(19) United States
(12) Patent Application Publication
(10) Pub. No.: US 2022/0096574 A1
(43) Pub. Date: Mar. 31, 2022

(54) METHODS AND COMPOSITIONS FOR TREATING AND PREVENTING CENTRAL NERVOUS SYSTEM DISORDERS AND OTHER CONDITIONS CAUSED BY GUT MICROBIAL DYSBIOSIS

(71) Applicant: HOLOBIOME, INC., Cambridge, MA (US)

(72) Inventors: STEPHEN SKOLNICK, SOMERVILLE, MA (US); PHILIP STRANDWITZ, MEDFORD, MA (US)

(73) Assignee: HOLOBIOME, INC., Cambridge, MA (US)

(21) Appl. No.: 17/426,178

(22) PCT Filed: Jan. 29, 2020
(86) PCT No.: PCT/US20/15728

§ 371 Date: Jul. 28, 2021

Related U.S. Application Data
(60) Provisional application No. 62/798,296, filed on Jan. 29, 2019.

(51) Int. Cl. A61K 35/747; A23L 33/135; A23L 33/14; A61K 31/49; A61K 31/714; A61K 35/742

(52) U.S. Cl. CPC A61K 35/747; A23L 33/135; A61K 35/742; A61K 31/49; A61K 31/714; A23L 33/14

(57) ABSTRACT

The technology described herein is directed to compositions and methods for treating CNS diseases or disorders associated with microbiome dysbiosis. In one aspect, described herein are compositions and methods for treating CNS diseases or disorders associated with a microbiome deficient in queuine biosynthesis. In another aspect, described herein are compositions and methods for treating CNS diseases or disorders associated with a microbiome deficient in endozepine biosynthesis. In another aspect, described herein are compositions and methods for treating CNS diseases or disorders associated with a microbiome deficient in heavy metal sequestration.

### CROSS-REFERENCE TO RELATED APPLICATIONS

[0001] This application claims benefit under 35 U.S.C. § 119(e) of U.S. Provisional Application No. 62/798,296 filed Jan. 29, 2019, the contents of which are incorporated herein by reference in their entirety.

### SEQUENCE LISTING

[0002] The instant application contains a Sequence Listing which has been submitted in ASCII format via EFS-Web and is hereby incorporated by reference in its entirety. Said ASCII copy, created on Jan. 29, 2020, is 251,702,365 total bytes in size and is submitted via EFS-Web in three pieces on Jan. 29, 2020: the first, submitted herewith, is named 083103-096850WOPT_SL_1.txt and is 77,747,143 bytes in size; the second, submitted subsequently associated with the PCT application number, is named 083103-096850WOPT_SL_2.txt and is 85,369,051 bytes in size; and the third, submitted subsequently associated with the PCT application number, is named 083103-096850WOPT_SL_3.txt and is 88,586,171 bytes in size.

### TECHNICAL FIELD

[0003] The technology described herein relates to prevention and treatment of dysbiosis caused by deficiencies or adverse changes in mammalian gut microbiology. More specifically, the technology described herein relates to methods and compositions for diagnosing and treating adverse health conditions in mammals caused by changes in gut microbial species composition, health, biology, activity and/or environment.

### BACKGROUND

[0004] Humans and other mammals depend on enteric microbes for their health and survival. These gut microbes initially colonize the mammalian gut from the environment, often directly or indirectly transmitted from other mammals of the same or different species. Essential enteric microbes can even be transmitted directly from parent to child. For example, recent studies reveal that mammal's milk contains live microorganisms from the GI tract of the mother selected by dendritic cells of the immune system. This vertical transmittal of critical microbes from parent to child to colonize the offspring's gut affords the offspring access to critical microbial processes and products. In evolutionary terms this constitutes a form of genetic “inheritance”—involving transfer of an adaptive complement of microbes and an associated library of microbial “ex-genes”, reliably and reproducibly from one generation to the next.

[0005] To maintain health, survival and adaptive fitness in evolution, mammals require certain microbes (and their ex-genes) to accompany individuals throughout life, to be practically re-acquirable if lost, and in the case of vertically transmitted species to be passed on with strict fidelity to subsequent generations. The extraordinary and complex capacity for vertical transmission of gut microbial species in breast milk indicates that symbioses between mammals and enteric microbes is far more critical and fundamental than previously suspected. Indeed, certain symbiotic associations between mammals and gut microbes have become so codependent, that mammals have lost the capacity to synthesize some essential products encoded by microbial genes. These critical “ex-genes”, and the microbial symbionts that carry them as quasi-heritable vectors, are linked in the mammal's life, reproduction and evolution by high fidelity transmittal, acquisition and colonization of microbes within the host gut and depend on reliable maintenance of a hospitable gut environment for long-term survival, reproduction and healthy function of essential microbes therein.

[0006] Enteric microbes that provide critical or essential contributions to mammalian host biology, whose genetics and life-cycles have co-evolved with their hosts over the course of millennia, can be referred to as “heirloom” taxa. These heirloom microbes often survive by a co-dependent relationship with their hosts, where host and microbe populations each afford essential survival advantages to one another.

[0007] For much of human evolutionary history, humans have been equipped from infancy onward with beneficial and even essential microbes, along with their “ex-genes” and encoded gene products, many of which are passed down reliably through generations via direct transmission. Vertically transmitted microbes in particular have evolved traits that directly improve human survival, and in this regard, the ex-genes of symbiotic microbes interact with human genes to form a “holobiont” unit of selection in evolution (see e.g., Rosenberg, E. & Zilber-Rosenberg, I. Symbiosis and development: the hologenome concept. Birth Defects Res C Embryo Today 93, 56-66). A clear manifestation of this co-evolutionary genetic model is provided by the immune system, which functions to coordinate transmission, expression, and silencing of microbial genes.

[0008] Where essential gene products are reliably afforded by a symbiotic gut microbe, fitness does not depend on having endogenous capacity to make those products. Where such endogenous capacities once existed but have become redundant due to exogenous substitution by microbes and their ex-genes, they will inevitably be lost over evolutionary time. Through normal mechanisms of mutation genes that no longer contribute significantly to fitness lose function over evolutionary time and become vestigial pseudogenes or are lost from the genome altogether.

[0009] Reliable intergenerational transmission of gut microbes and their ex-genes has allowed the mammalian microbiome to evolve as a community, contributing an integral, quasi-hereditary component to a “holobiont” evolutionary unit comprised of key heirloom microbe species and their co-evolved mammalian hosts. By virtue of this co-evolution, humans and other mammals exhibit complex interdependencies with their symbiotic gut microbes, involving genetic, metabolic, environmental and even host behavioral systems and processes, comparable to those of other ancient symbiotic partnerships (e.g., corals hosting endosymbiotic algae, hot-vent marine species hosting sulfur-fixing bacteria).

[0010] The most important result of mammalian co-evolution with symbiotic gut microbes is that many of the relationships humans share with these microbes have become obligate rather than facultative. Any substantial imbalance or impairment in the composition or function of the gut microbiome results in a “dysbiosis”, which can be accompanied by profound adverse health effects on the host. Only recently has western clinical medicine focused on the important health roles and functions of the natural gut microflora. Practical awareness is only now emerging that gut microbial dysbiosis is associated with a wide range of human diseases and adverse health conditions.

[0011] Extreme dysbiotic shifts in gut microbiome structure (including species composition, diversity, relative abundance and competition) and function (including structural, biochemical and metabolic activities) can be harmful and in severe cases devastating to host health. Such changes may be attributable to pronounced changes in the gut environment, for example caused by disease or external factors such as introduction of antibiotics, and may be exacerbated by competitive interactions between gut microfloral species (e.g., outgrowth, resource depletion, toxicity or other inhibitory effects mediated by other “pathogenic” bacterial or fungal species).

[0012] The most perilous conditions of human dysbiosis likely involve impairment or depletion of highly specialized microbes closely associated evolutionarily with human populations, particularly those heirloom species that are transmitted vertically and are difficult or impossible to acquire from the environment. While redundancies are expected to exist for many gut microfloral species that provide important ex-genes, metabolic pathways and products, certain microbial taxa may uniquely serve critical symbiotic roles, while others may be particularly susceptible to dysbiotic change (e.g., more vulnerable to elimination or competitive suppression in the wake of perturbations to the gut ecosystem). Most notably among these perturbations, antibiotic use, especially early in life or on the part of the mother before or during lactation, often results in profound and protracted changes in microbiome community structure and function. Differential antibiotic resistance among microbial taxa can further bias the microbiome toward dysbiosis, for example involving domination by a select few taxa, much like an invasive species in ecology. These and other dysbiotic influences can impose major limitations on the overall health and function of the gut microbiome, and when essential heirloom gut microbial species are negatively impacted the adverse impacts on their co-evolved, co-dependent mammalian host may be particularly dire.

[0013] In the emergent holistic medical field of gut microbiome ecology and related host health impacts, only general advances have been made to date. It is widely appreciated that dysbiosis impairing the gut microbiome can result in disruption or impairment of key microbial metabolic pathways and products important for host health and/or survival. Some of these pathways and products are implicated in diverse functions of the gut, including normal digestion and possibly regulation of gut-neural pathways. A related role for gut microbes in metabolic toxin clearance processes may exist. Other roles are proposed for gut microbes in supporting a healthy immune system, for cardiac disease prevention, to support healthy pulmonary and kidney function, and even for cancer prevention and elimination. Still other microbial genes, metabolic processes and products are suspected to support normal nervous system function, whereby deficits in these systems may be involved in impaired cognition, mood disorders and certain adverse mental health conditions.

[0014] Despite growing recognition in the medical community that the gut microbiome plays critical and diverse roles in human and veterinary health, little progress has been made to identify dietary and other factors affecting gut microfloral ecology, or to identify key microbial species, ex-genes, metabolic pathways and products at particular risk for dysbiosis that might impair or disrupt host health. Among the limited advances made to date, the medical community has recognized that widespread overuse of antibiotics should be curtailed, and adverse impacts of antibiotics on gut microfloral health should typically be mitigated by co-prescription of probiotics (ostensibly to re-colonize the gut with beneficial microbes following antibiotic-mediated crash of the gut microbiome). Additional focus has been afforded by medical researchers on gut microbiology prompted by increased prevalence of gut diseases such as Crohn's disease, inflammatory bowel syndrome and ulcerative colitis, leading to studies of dietary and other impacts on gut microbial ecology that may impact these diseases. But few answers have emerged from these studies, beyond a consensus that diets high in dairy, sugar, and processed foods contribute to higher incidence of these diseases, possibly based in part on adverse impacts on gut microfloral ecology.

[0015] In view of the foregoing, there remains a critical need in the medical arts for new tools and methods to diagnose and treat gut microbial dysbiosis in all its forms and clinical manifestations. A related need exists for more specific tools and methods to treat gut dysbiosis involving loss or impairment of key gut microbial species that contribute critical ex-genes, metabolic pathways and/or products essential for normal host health. More distinct and compelling needs exist to diagnose and treat specific dysbiosis-related health conditions, for example central nervous system (CNS) disorders caused or exacerbated by gut microbial dysbiosis affecting gut microbial taxa whose metabolism and/or metabolic products contribute to healthy CNS function.

### SUMMARY

[0016] The technology described herein fulfills the described needs and satisfies additional objects and advantages by providing compositions and methods for diagnosing, preventing and treating gut microbial dysbiosis, and/or directly treating or preventing clinical conditions arising from gut dysbiosis in mammals.

[0017] The technology described herein further provides compositions and methods for treating gut dysbiosis that features loss or impairment of microbial species expressing important ex-genes, metabolic pathways and products essential for normal host health, including normal central nervous system (CNS) function.

[0018] More detailed embodiments of the technology described herein provide active gut microbes, and probiotic compositions comprising these microbes, for administration to mammalian subjects, wherein the microbes are capable of stably colonizing the mammalian gastrointestinal (GI) tract and expressing ex-genes, metabolic pathways and products therein to correct dysbiosis and related adverse health impacts.

[0019] In exemplary embodiments, viable microbes (including natural or engineered bacterial strains) are delivered to a mammalian subject in dysbiosis, presenting a deficiency of one or more important gut bacteria, and/or of its expressed ex-genes, metabolic pathways or beneficial products involved in healthy host CNS function. Described herein is administration of such microbes to subjects presenting with an observed CNS disorder, such as a mood disorder, anxiety, autism or a mental health disorder like schizophrenia, to treat or prevent one or more symptoms of the CNS disorder.

[0020] In related embodiments, microbial metabolic precursors, enzymes, cofactors and/or metabolic products are delivered to a dysbiotic mammalian subject presenting with a CNS disorder, to replace or augment the function of a viable gut microbe expressing the subject precursors, enzymes, cofactors and/or products.

[0021] The technology described herein focuses in principal aspects on mammalian enteric microbes that are “heirloom” species strongly conserved across generations, on which the host relies symbiotically for metabolic pathways and products essential to normal host development and function. In certain aspects, the products of heirloom gut microfloral taxa of interest support healthy psychiatric and cognitive development and function.

[0022] In one exemplary embodiment, live microbes or their products employed within the methods and compositions of the technology described herein support the clearance of environmental neurotoxins, for example mercury or other heavy metals. These methods and compositions are effective to increase elimination rates of targeted compounds (e.g., toxins), and to effectively treat CNS disorders and other symptoms in subjects with dysbiosis involving loss or functional impairment of these detoxifying microbial strains. In illustrative embodiments, the methods and compositions of the technology described herein are used to substantially improve toxin clearance, including mercury clearance, within the gut and throughout the body, and to alleviate associated CNS disorders or symptoms.

[0023] Additional compositions and methods of the technology described herein employ an heirloom gut microbe, or compositions comprising products of these microbes, to treat dysbiosis affecting production and/or function of a neurotransmitter or neurotransmitter system in a mammalian host. These methods and compositions are effective to alleviate a diagnosed CNS disorder, for example a mood, attention, memory, or anxiety disorder, in subjects determined to be dysbiotic for one or more gut microbial species that synthesize products involved in neurotransmitter synthesis, or otherwise contribute to normal synthesis and/or function of neurotransmitters and/or neurotransmitter systems in their hosts. According to these aspects of the technology described herein, disruption of the microbiome, e.g., by disease or antibiotic use, leads to functional suppression or elimination of key microbial taxa that provide these functions, which leads to dysbiosis including abnormalities in a variety of psychiatric, neurodevelopmental, and neurodegenerative conditions of heretofore uncertain etiology. The methods and compositions of the technology described herein substantially improve neurotransmitter synthesis and/or function, and effectively prevent, treat or alleviate symptoms of the associated CNS disorder(s).

[0024] Other embodiments of the technology described herein employ heirloom gut microbes or compositions comprising products of these microbes to treat dysbiosis affecting queuine production and/or function in mammalian hosts, and to treat CNS disorders associated with loss or impairment of host queuine compounds and/or their precursors. Queuine is a modified nucleobase utilized by all eukaryotic organisms but produced exclusively by bacteria. Among the important activities described here for queuine, in regulating CNS function and mediating cognitive and mental health disorders in cases of queuine deficiency, queuine is involved in regenerating tetrahydrobiopterin (BH4) from its oxidation product dihydrobiopterin (BH2). BH4 is essential for the synthesis of the monoamine neurotransmitters serotonin, norepinephrine, dopamine, melatonin, and nitric oxide. Bacteria producing queuine or analogs thereof, or compositions comprising queuine or analogs thereof, can thus be used to treat dysbiosis affecting production and/or function of a neurotransmitter or neurotransmitter system in a mammalian host.

[0025] Other embodiments of the technology described herein employ heirloom gut microbes or compositions comprising products of these microbes to treat dysbiosis affecting endozepine production and/or function in mammalian hosts, and to treat CNS disorders associated with loss or impairment of host endozepine compounds and/or their synthetic precursors. Endozepines are naturally present in mammalian subjects, and are important CNS functional modulators mimicked by the anxiolytic drugs, benzodiazepines. Both groups of compounds act as positive allosteric modulators of gamma aminobutyric acid (GABA) receptor function to prevent or alleviate symptoms of anxiety or depression, and can thus be used to treat dysbiosis affecting production and/or function of a neurotransmitter or neurotransmitter system in a mammalian host.

[0026] Within exemplary embodiments of the technology described herein, methods and compositions are provided that alleviate a diagnosed CNS disorder, for example an anxiety disorder or depression, in subjects determined to be dysbiotic for one or more gut microbial species that synthesize products involved in queuine or endozepine synthesis, or otherwise contribute to normal synthesis and/or function of queuine or endozepines in their hosts. According to these aspects of the technology described herein, disruption of the microbiome leads to functional suppression or elimination of key microbial taxa that provide these functions, causing dysbiosis marked by loss or impairment of normal queuine or endozepine synthesis and/or function, and associated psychiatric, neurodevelopmental, and neurodegenerative conditions of heretofore uncertain etiology. The methods and compositions of the technology described herein substantially improve queuine or endozepine synthesis and/or function, and effectively prevent, treat or alleviate symptoms of the associated CNS disorder(s).

[0027] Within more detailed aspects of the technology described herein, selected heirloom bacterial species are identified, isolated, prepared and/or formulated for improved delivery, and administered to a dysbiotic mammalian subject to treat or prevent one or more CNS conditions or other symptom(s) attributable to the dysbiosis. The bacterial species are typically viable in a gut environment of treated subjects, however in other aspects non-viable (e.g., heat-killed) bacteria, or their isolated cellular contents, purified metabolic precursors, intermediates or products, can be effectively administered directly to address the dysbiosis and achieve the desired clinical benefits. Thus, in exemplary embodiments the bacterial species may be in the form of a live bacterial population, a lyophilized (e.g., viable) bacterial population, a non-viable bacterial preparation, or cellular components thereof (which may include metabolic precursors, intermediates or products of the subject bacteria, as well as synthetically derived replicates or chemically modified analogs thereof). Preferably, where the bacterial species is provided as a non-viable bacterial preparation, it is selected from heat-killed bacteria, irradiated bacteria and lysed bacteria.

[0028] In more detailed embodiments, the compositions and methods of the technology described herein may employ admixing of useful bacterial species, live or non-viable, or their isolated components, metabolic precursors, intermediates or products, with a pharmaceutically acceptable excipient, carrier, diluent or other agent that enhances delivery or activity of the administered composition. In some embodiments, the composition further comprises an enteric coating or similar composition to promote survival of or avoid the acidity of the stomach and permit delivery into the small or large intestines.

[0029] In related aspects, the technology described herein provides bacterial species and compositions comprising them in the form of “probiotics”, which are effective to improve intestinal microbial ecology, alleviate symptoms of microbial dysbiosis, and/or treat or prevent a CNS disorder in a mammalian subject.

[0030] Other aspects of the technology described herein relate to the use of gut bacterial species (live or non-viable), or metabolic precursors, intermediates or products thereof, in the preparation of medicaments for treating dysbiosis and associated CNS disorders and other adverse symptoms in mammalian subjects.

[0031] Other aspects of the technology described herein relate to the use of gut bacterial species for preparation of nutritional supplements or foodstuffs comprising the subject bacteria and optionally other ingredients that are generally accepted (or recognized) as safe for human consumption (“GRAS”), useful to support healthy gut ecology and normal CNS function in mammalian subjects.

[0032] Accordingly, in one aspect described herein is a composition comprising one or more isolated, non-pathogenic queuine-producing bacterial strains or an isolated product derived therefrom.

[0033] In some embodiments of any of the aspects, the one or more isolated, non-pathogenic queuine-producing bacterial strains comprise live bacteria or dead bacteria, or wherein the isolated product derived therefrom comprises culture medium in which said one or more isolated, non-pathogenic bacterial strains have been cultured.

[0034] In some embodiments of any of the aspects, the isolated product derived therefrom comprises a purified polypeptide produced by the one or more bacterial strains.

[0035] In some embodiments of any of the aspects, the composition further comprises a pharmaceutically acceptable carrier, wherein the one or more isolated non-pathogenic queuine-producing bacterial strains or an isolated product derived therefrom is present in an amount effective to alter queuine levels in a subject in need thereof.

[0036] In another aspect described herein is a pharmaceutical composition comprising queuine, an analog, derivative or precursor thereof, or a combination of any of these, in an amount effective to alter queuine levels in a subject in need thereof, and a pharmaceutically acceptable carrier.

[0037] In some embodiments of any of the aspects, the queuine, analog, derivative or precursor is isolated from a queuine-producing bacterial strain or culture medium in which a queuine-producing bacterial strain has been cultured.

[0038] In some embodiments of any of the aspects, the at least one isolated non-pathogenic queuine producing bacteria is a human gut bacteria.

[0039] In some embodiments of any of the aspects, the at least one isolated non-pathogenic queuine-producing bacteria belongs to a species selected from Acetobacter pasteurianus, Achromobacter xylosoxidans, Acidaminococcus fermentans, Acidaminococcus intestini, Acinetobacter baumannii, Acinetobacter calcoaceticus, Acinetobacter junii, Acinetobacter lwoffii, Acinetobacter pittii, Acinetobacter radioresistens, Acinetobacter schindleri, Acinetobacter towneri, Acinetobacter ursingii, Acinetobacter variabilis, Adlercreutzia equolifaciens, Aeribacillus pallidus, Aeromonas caviae, Aeromonas enteropelogenes, Aeromonas hydrophila, Aeromonas jandaei, Aeromonas salmonicida, Aeromonas schubertii, Aeromonas veronii, Aggregatibacter aphrophilus, Akkermansia muciniphila, Alistipes onderdonkii, Alistipes putredinis, Allisonella histaminiformans, Anaeroglobus geminatus, Anaerostipes caccae, Anaerostipes hadrus, Aneurinibacillus aneurinilyticus, Aneurinibacillus migulanus, Anoxybacillus flavithermus, Asaccharobacter celatus, Bacillus altitudinis, Bacillus amyloliquefaciens, Bacillus aquimaris, Bacillus atrophaeus, Bacillus badius, Bacillus bataviensis, Bacillus cereus, Bacillus circulans, Bacillus clausii, Bacillus coagulans, Bacillus cohnii, Bacillus endophyticus, Bacillus firmus, Bacillus flexus, Bacillus fordii, Bacillus galactosidilyticus, Bacillus halodurans, Bacillus infantis, Bacillus koreensis, Bacillus kyonggiensis, Bacillus lentus, Bacillus licheniformis, Bacillus litoralis, Bacillus marisflavi, Bacillus megaterium, Bacillus mojavensis, Bacillus mycoides, Bacillus nealsonii, Bacillus okuhidensis, Bacillus pseudofirmus, Bacillus pseudomycoides, Bacillus pumilus, Bacillus simplex, Bacillus sonorensis, Bacillus subterraneus, Bacillus subtilis, Bacillus thuringiensis, Bacillus timonensis, Bacillus vallismortis, Bacillus vietnamensis, Bacillus weihenstephanensis, Bacteroides caccae, Bacteroides cellulosilyticus, Bacteroides clarus, Bacteroides coprocola, Bacteroides dorei, Bacteroides eggerthii, Bacteroides faecis, Bacteroides fragilis, Bacteroides intestinalis, Bacteroides massiliensis, Bacteroides nordii, Bacteroides ovatus, Bacteroides plebeius, Bacteroides salyersiae, Bacteroides stercoris, Bacteroides thetaiotaomicron, Bacteroides uniformis, Bacteroides vulgatus, Bacteroides xylanisolvens, Bacteroides xylanolyticus, Barnesiella intestinihominis, Barnesiella viscericola, Bilophila wadsworthia, Blautia luti, Bordetella bronchiseptica, Bordetella trematum, Brenneria alni, Brevibacillus agri, Brevibacillus brevis, Brevibacillus choshinensis, Brevibacillus formosus, Brevibacillus laterosporus, Brevibacillus parabrevis, Brevundimonas diminuta, Butyricimonas virosa, Campylobacter coli, Campylobacter concisus, Campylobacter curvus, Campylobacter gracilis, Campylobacter jejuni, Campylobacter showae, Campylobacter ureolyticus, Cedecea lapagei, Cedecea neteri, Chromohalobacter japonicus, Citrobacter amalonaticus, Citrobacter braakii, Citrobacter farmeri, Citrobacter freundii, Citrobacter gillenii, Citrobacter koseri, Citrobacter murliniae, Citrobacter youngae, Clostridium acetireducens, Clostridium bartlettii, Clostridium beijerinckii, Clostridium botulinum, Clostridium butyricum, Clostridium carboxidivorans, Clostridium colicanis, Clostridium diolis, Clostridium disporicum, Clostridium novyi, Clostridium ramosum, Clostridium sporogenes, Clostridium thermocellum, Coprococcus catus, Coprococcus eutactus, Cronobacter sakazakii, Delftia tsuruhatensis, Desulfovibrio desulfuricans, Desulfovibrio fairfieldensis, Desulfovibrio piger, Dialister invisus, Dialister pneumosintes, Enterobacter aerogenes, Enterobacter asburiae, Enterobacter cloacae, Enterobacter hormaechei, Enterobacter kobei, Enterobacter ludwigii, Enterorhabdus caecimuris, Erysipelatoclostridium ramosum, Escherichia coli, Escherichiafergusonii, Escherichia hermannii, Escherichia marmotae, Geobacillus stearothermophilus, Haemophilus influenzae, Haemophilus pittmaniae, Hafnia alvei, Halobacillus dabanensis, Halobacillus karajensis, Halobacillus salinus, Halobacillus trueperi, Helicobacter pylori, Intestinibacter bartlettii, Klebsiella oxytoca, Klebsiella pneumoniae, Klebsiella variicola, Kluyvera cryocrescens, Kluyvera georgiana, Kosakonia cowanii, Kushneria sinocarnis, Lachnospira pectinoschiza, Lachnotalea glycerini, Lactobacillus mali, Leclercia adecarboxylata, Lelliottia amnigena, Litorilituus sediminis, Lysinibacillus boronitolerans, Lysinibacillus fusiformis, Lysinibacillus massiliensis, Lysinibacillus sphaericus, Lysinibacillus xylanilyticus, Lysobacter soli, Megasphaera elsdenii, Megasphaera micronuciformis, Micrococcus lylae, Mitsuokella jalaludinii, Moellerella wisconsensis, Monoglobus pectinilyticus, Moraxella osloensis, Morganella morganii, Neisseria canis, Neisseria cinerea, Neisseria elongata, Neisseria flavescens, Neisseria gonorrhoeae, Neisseria macacae, Neisseria meningitidis, Neisseria mucosa, Neisseria perflava, Neisseria subflava, Nosocomiicoccus massiliensis, Noviherbaspirillum denitrificans, Oceanobacillus iheyensis, Oceanobacillus oncorhynchi, Oceanobacillus sojae, Ochrobactrum anthropi, Odoribacter splanchnicus, Oxalobacter formigenes, Paenibacillus alvei, Paenibacillus amylolyticus, Paenibacillus barcinonensis, Paenibacillus barengoltzii, Paenibacillus daejeonensis, Paenibacillus dendritiformis, Paenibacillus glucanolyticus, Paenibacillus illinoisensis, Paenibacillus lactis, Paenibacillus larvae, Paenibacillus lautus, Paenibacillus macerans, Paenibacillus naphthalenovorans, Paenibacillus odorifer, Paenibacillus pabuli, Paenibacillus pasadenensis, Paenibacillus polymyxa, Paenibacillus rhizosphaerae, Paenibacillus stellifer, Paenibacillus thiaminolyticus, Paenibacillus typhae, Pantoea agglomerans, Parabacteroides distasonis, Parabacteroides goldsteinii, Parabacteroides gordonii, Parabacteroides johnsonii, Parabacteroides merdae, Paraprevotella clara, Parasutterella excrementihominis, Peptoniphilus asaccharolyticus, Peptoniphilus indolicus, Planococcus rifietoensis, Porphyromonas asaccharolytica, Porphyromonas bennonis, Porphyromonas somerae, Prevotella bivia, Prevotella buccae, Prevotella buccalis, Prevotella copri, Prevotella timonensis, Proteus mirabilis, Proteus penneri, Proteus vulgaris, Providencia alcalifaciens, Providencia heimbachae, Providencia rettgeri, Providencia stuartii, Pseudomonas aeruginosa, Pseudomonas alcaligenes, Pseudomonas bauzanensis, Pseudomonas caricapapayae, Pseudomonas chlororaphis, Pseudomonas fluorescens, Pseudomonas fragi, Pseudomonas fulva, Pseudomonas gessardii, Pseudomonas japonica, Pseudomonas libanensis, Pseudomonas lundensis, Pseudomonas luteola, Pseudomonas migulae, Pseudomonas monteilii, Pseudomonas mosselii, Pseudomonas oleovorans, Pseudomonas oryzihabitans, Pseudomonas putida, Pseudomonas rhodesiae, Pseudomonas saudiphocaensis, Pseudomonas stutzeri, Pseudomonas taetrolens, Pseudomonas tolaasii, Pseudomonas xanthomarina, Psychrobacter phenylpyruvicus, Raoultella ornithinolytica, Raoultella planticola, Roseomonas gilardii, Roseomonas mucosa, Ruminococcus albus, Ruminococcus callidus, Ruminococcus flavefaciens, Ruminococcus lactaris, Ruminococcus torques, Salinisphaera halophila, Salinivibrio costicola, Salmonella enterica, Salmonella enteritidis, Salmonella typhi, Selenomonas ruminantium, Selenomonas sputigena, Senegalimassilia anaerobia, Serratia marcescens, Serratia ureilytica, Shewanella xiamenensis, Shigella boydii, Shigella dysenteriae, Shigella flexneri, Shigella sonnei, Sphingomonas aerolata, Staphylococcus arlettae, Staphylococcus aureus, Staphylococcus auricularis, Staphylococcus capitis, Staphylococcus caprae, Staphylococcus carnosus, Staphylococcus cohnii, Staphylococcus condimenti, Staphylococcus devriesei, Staphylococcus epidermidis, Staphylococcus equorum, Staphylococcus gallinarum, Staphylococcus haemolyticus, Staphylococcus hominis, Staphylococcus hyicus, Staphylococcus intermedius, Staphylococcus kloosii, Staphylococcus lentus, Staphylococcus lugdunensis, Staphylococcus nepalensis, Staphylococcus pasteuri, Staphylococcus petrasii, Staphylococcus pettenkoferi, Staphylococcus saccharolyticus, Staphylococcus saprophyticus, Staphylococcus schleiferi, Staphylococcus sciuri, Staphylococcus simiae, Staphylococcus simulans, Staphylococcus succinus, Staphylococcus vitulinus, Staphylococcus warneri, Staphylococcus xylosus, Stenotrophomonas acidaminiphila, Stenotrophomonas maltophilia, Stenotrophomonas rhizophila, Streptococcus australis, Streptococcus bovis, Streptococcus equinus, Streptococcus gallolyticus, Streptococcus infantarius, Streptococcus infantis, Streptococcus lutetiensis, Streptococcus mitis, Streptococcus mutans, Streptococcus oralis, Streptococcus peroris, Streptococcus pseudopneumoniae, Streptococcus salivarius, Streptococcus sobrinus, Streptococcus thermophilus, Streptococcus tigurinus, Streptococcus vestibularis, Succiniclasticum ruminis, Terribacillus aidingensis, Terribacillus halophilus, Thermotalea metallivorans, Turicibacter sanguinis, Veillonella atypica, Veillonella denticariosi, Veillonella dispar, Veillonella parvula, Vibrio cholerae, Victivallis vadensis, Virgibacillus massiliensis, Yersinia bercovieri, Yersinia enterocolitica, Yersinia intermedia, Yersinia kristensenii, Yersinia mollaretii, and combinations thereof.

[0040] In some embodiments of any of the aspects, the one or more non-pathogenic queuine producing bacteria is a human gut bacteria, and comprises a 16S rRNA sequence at least about 97% identical to a 16S rRNA sequence selected from SEQ ID NOs 1-406.

[0041] In some embodiments of any of the aspects, the at least one isolated non-pathogenic queuine producing bacteria is a human gut bacteria that encodes within its genome and expresses in the human gastrointestinal tract at least one queuine biosynthesis enzyme selected from folE (GTP cyclohydrolase), QueD (6-carboxy-5,6,7,8-tetrahydrobiopterin synthase), QueE (7-carboxy-7-deazaguanine synthase), QueC (7-cyano-7-deazaguanine synthase, PreQ0 synthase), QueF (7-cyano-7-deazaguanine reductase, PreQ0 reductase), tgt or btgt (tRNA guanine transglycosylase, bacterial tRNA guanine transglycosylase), QueA (S-adenosylmethionine:tRNA ribosyltransferase-isomerase), and QueG or QueH (epoxyqueuosine reductase).

[0042] In some embodiments of any of the aspects, the at least one isolated non-pathogenic queuine producing bacteria is a human gut bacteria that encodes within its genome and expresses in the human gastrointestinal tract at least one queuine biosynthesis enzyme, wherein the amino acid sequence encoded by the at least one queuine biosynthesis gene is at least 90% similar to a sequence selected from SEQ ID NOs 3660-82283.

[0043] In some embodiments of any of the aspects, the at least one isolated non-pathogenic queuine producing bacteria is a human gut bacteria belongs to species selected from Acidaminococcus fermentans, Adlercreutzia equolifaciens, Akkermansia muciniphila, Alloprevotella tannerae, Anaerostipes caccae, Anaerostipes hadrus, Arcobacter butzleri, Bacteroides caccae, Bacteroides cellulosilyticus, Bacteroides clarus, Bacteroides coprophilus, Bacteroides dorei, Bacteroides eggerthii, Bacteroides faecis, Bacteroides fragilis, Bacteroides massiliensis, Bacteroides nordii, Bacteroides oleiciplenus, Bacteroides ovatus, Bacteroides plebeius, Bacteroides salanitronis, Bacteroides salyersiae, Bacteroides stercoris, Bacteroides thetaiotaomicron, Bacteroides uniformis, Bacteroides vulgatus, Bacteroides xylanisolvens, Barnesiella intestinihominis, Bilophila wadsworthia, Butyrivibrio crossotus, Campylobacter curvus, Citrobacter freundii, Citrobacter koseri, Clostridium bartelettii, Clostridium ramosum, Coprobacter fastidiosus, Coprococcus catus, Coprococcus eutactus, Desulfovibrio piger, Dialister invisus, Dialister succinatiphilus, Enterobacter aerogenes, Enterobacter cancerogenus, Enterobacter cloacae, Enterorhabdus caecimuris, Escherichia coli, Eubacterium hallii, Fusobacterium mortiferum, Haemophilus pittmaniae, Haemophilus sputorum, Hafnia alvei, Klebsiella oxytoca, Klebsiella pneumoniae, Klebsiella variicola, Megamonas funiformis, Megamonas rupellensis, Megasphaera elsdenii, Megasphaera micronuciformis, Mitsuokella multacida, Odoribacter laneus, Odoribacter splanchnicus, Oxalobacter formigenes, Parabacteroides distasonis, Porphyromonas asaccharolytica, Porphyromonas uenonis, Ruminococcus callidus, Ruminococcus torques, Shigella sonnei, Streptococcus infantis, Streptococcus mitis, Streptococcus oralis, Streptococcus pneumoniae, Streptococcus tigurinus, Turicibacter sanguinis, Veillonella atypica, Veillonella dispar, Veillonella parvula, Dysgonomonas mossii, Proteus mirabilis, Veillonella ratti, and combinations thereof, and wherein the at least one isolated non-pathogenic queuine producing bacteria encodes within its genome and expresses in the human gastrointestinal tract at least one queuine biosynthesis enzyme with an amino acid sequence at least 90% identical to a sequence selected from SEQ ID NOs 3660-82283.

[0044] In some embodiments of any of the aspects, the at least one isolated non-pathogenic queuine producing bacteria is a human gut bacteria with a 16S rRNA sequence at least about 97% identical to a 16S rRNA sequence selected from SEQ ID NOs 1-78, and the at least one isolated non-pathogenic queuine producing bacteria encodes within its genome and expresses in the human gastrointestinal tract at least one queuine biosynthesis enzyme with an amino acid sequence at least 90% identical to a sequence selected from SEQ ID NOs 3660-82283.

[0045] In some embodiments of any of the aspects, the queuine precursor is epoxyqueuine and/or cobalamin.

[0046] In some embodiments of any of the aspects, the queuine analogs are selected from queuosine, a mannosyl queuosine, galactosyl queuosine, glutamyl queuosine, mannosylqueuine, galactosylqueuine, and aminoacylated derivatives such as glutamylqueuine.

[0047] In some embodiments of any of the aspects, the composition is formulated in a capsule, a tablet, a caplet, a pill, a troche, a lozenge, a powder, a granule, a nutraceutical, a medical food, or a combination thereof.

[0048] In some embodiments of any of the aspects, the composition is formulated for delivery to the gut.

[0049] In some embodiments of any of the aspects, the composition further comprises a prebiotic.

[0050] In some embodiments of any of the aspects, the composition further comprises a different composition in an amount effective to treat a CNS disease or disorder.

[0051] In some embodiments of any of the aspects, the composition is administered orally, intravenously, intramuscularly, intrathecally, subcutaneously, sublingually, buccally, rectally, vaginally, by the ocular route, by the otic route, nasally, via inhalation, by nebulization, cutaneously, transdermally, or combinations thereof, and formulated for delivery with a pharmaceutically acceptable excipient, carrier or diluent.

[0052] In another aspect described herein is a method of increasing queuine levels in a subject in need thereof, the method comprising administering to the subject a composition as described herein in an amount effective to increase queuine levels in the subject.

[0053] In some embodiments of any of the aspects, the subject is a mammalian subject.

[0054] In some embodiments of any of the aspects, the subject is a human subject.

[0055] In another aspect described herein is a method for treating or preventing a gut microbiome dysbiosis-mediated central nervous system (CNS) disorder associated with queuine deficiency in a mammalian subject in need thereof, comprising administering to a subject dysbiotic for queuine producing gut microbes or low in queuine one or more isolated queuine-producing bacterial strains or an isolated product derived therefrom in an amount sufficient to increase queuine or to establish a queuine level within the range of normal in the subject, whereby one or more symptoms of the CNS disorder associated with queuine deficiency in the subject is improved.

[0056] In another aspect described herein is a method for treating or preventing a central nervous system (CNS) disorder associated with queuine deficiency in a mammalian subject in need thereof, comprising administering to the subject a composition comprising an agent selected from queuine, a queuine precursor, or a queuine analog, in an amount sufficient to increase queuine or to establish a queuine level within the range of normal in the subject, whereby one or more symptoms of the CNS disorder associated with queuine deficiency in the subject is improved.

[0057] In some embodiments of any of the aspects, the CNS disorder is selected from a cognitive disorder, a mood disorder, an anxiety disorder, and a psychiatric disorder.

[0058] In some embodiments of any of the aspects, the CNS disorder is selected from autism, bipolar disorder, major depression, anxiety and schizophrenia.

[0059] In some embodiments of any of the aspects, the method further comprises identifying a subject in need of treatment by determining whether the subject would benefit from an increase in endogenous queuine.

[0060] In some embodiments of any of the aspects, the amount of queuine in the subject's blood, liver, brain, serum, or stool is below 50 ng/mL.

[0061] In some embodiments of any of the aspects, the amount of queuosine-modified Histidyl tRNA in a sample of the subject's blood, liver, brain, serum, or stool is less than 80% that of the total Histidyl tRNA in the sample.

[0062] In some embodiments of any of the aspects, the amount of queuine-producing bacteria in the subject's stool is less than about 10% of total bacteria as measured by 16S sequence or shotgun sequencing.

[0063] In some embodiments of any of the aspects, the amount of queuine, queuine-incorporated RNA, or BH4 in the subject's blood, liver, brain, serum, or stool is increased relative to the initial amount after administering the composition.

[0064] In some embodiments of any of the aspects, the amount of queuine producing bacteria is increased in the subject's stool relative to the initial amount after administering the composition.

[0065] In some embodiments of any of the aspects, the amount of queuine producing genes are increased in the subject's stool relative to the initial amount after administering the composition.

[0066] In some embodiments of any of the aspects, the at least one isolated non-pathogenic queuine producing bacteria is a human gut bacteria, and belongs to the species selected from Acetobacter pasteurianus, Achromobacter xylosoxidans, Acidaminococcus fermentans, Acidaminococcus intestini, Acinetobacter baumannii, Acinetobacter calcoaceticus, Acinetobacter junii, Acinetobacter lwoffii, Acinetobacter pittii, Acinetobacter radioresistens, Acinetobacter schindleri, Acinetobacter towneri, Acinetobacter ursingii, Acinetobacter variabilis, Adlercreutzia equolifaciens, Aeribacillus pallidus, Aeromonas caviae, Aeromonas enteropelogenes, Aeromonas hydrophila, Aeromonas jandaei, Aeromonas salmonicida, Aeromonas schubertii, Aeromonas veronii, Aggregatibacter aphrophilus, Akkermansia muciniphila, Alistipes onderdonkii, Alistipes putredinis, Allisonella histaminiformans, Anaeroglobus geminatus, Anaerostipes caccae, Anaerostipes hadrus, Aneurinibacillus aneurinilyticus, Aneurinibacillus migulanus, Anoxybacillus flavithermus, Asaccharobacter celatus, Bacillus altitudinis, Bacillus amyloliquefaciens, Bacillus aquimaris, Bacillus atrophaeus, Bacillus badius, Bacillus bataviensis, Bacillus cereus, Bacillus circulans, Bacillus clausii, Bacillus coagulans, Bacillus cohnii, Bacillus endophyticus, Bacillus firmus, Bacillus flexus, Bacillus fordii, Bacillus galactosidilyticus, Bacillus halodurans, Bacillus infantis, Bacillus koreensis, Bacillus kyonggiensis, Bacillus lentus, Bacillus licheniformis, Bacillus litoralis, Bacillus marisflavi, Bacillus megaterium, Bacillus mojavensis, Bacillus mycoides, Bacillus nealsonii, Bacillus okuhidensis, Bacillus pseudofirmus, Bacillus pseudomycoides, Bacillus pumilus, Bacillus simplex, Bacillus sonorensis, Bacillus subterraneus, Bacillus subtilis, Bacillus thuringiensis, Bacillus timonensis, Bacillus vallismortis, Bacillus vietnamensis, Bacillus weihenstephanensis, Bacteroides caccae, Bacteroides cellulosilyticus, Bacteroides clarus, Bacteroides coprocola, Bacteroides dorei, Bacteroides eggerthii, Bacteroides faecis, Bacteroides fragilis, Bacteroides intestinalis, Bacteroides massiliensis, Bacteroides nordii, Bacteroides ovatus, Bacteroides plebeius, Bacteroides salyersiae, Bacteroides stercoris, Bacteroides thetaiotaomicron, Bacteroides uniformis, Bacteroides vulgatus, Bacteroides xylanisolvens, Bacteroides xylanolyticus, Barnesiella intestinihominis, Barnesiella viscericola, Bilophila wadsworthia, Blautia luti, Bordetella bronchiseptica, Bordetella trematum, Brenneria alni, Brevibacillus agri, Brevibacillus brevis, Brevibacillus choshinensis, Brevibacillus formosus, Brevibacillus laterosporus, Brevibacillus parabrevis, Brevundimonas diminuta, Butyricimonas virosa, Campylobacter coli, Campylobacter concisus, Campylobacter curvus, Campylobacter gracilis, Campylobacter jejuni, Campylobacter showae, Campylobacter ureolyticus, Cedecea lapagei, Cedecea neteri, Chromohalobacter japonicus, Citrobacter amalonaticus, Citrobacter braakii, Citrobacter farmeri, Citrobacter freundii, Citrobacter gillenii, Citrobacter koseri, Citrobacter murliniae, Citrobacter youngae, Clostridium acetireducens, Clostridium bartlettii, Clostridium beijerinckii, Clostridium botulinum, Clostridium butyricum, Clostridium carboxidivorans, Clostridium colicanis, Clostridium diolis, Clostridium disporicum, Clostridium novyi, Clostridium ramosum, Clostridium sporogenes, Clostridium thermocellum, Coprococcus catus, Coprococcus eutactus, Cronobacter sakazakii, Delftia tsuruhatensis, Desulfovibrio desulfuricans, Desulfovibrio fairfieldensis, Desulfovibrio piger, Dialister invisus, Dialister pneumosintes, Enterobacter aerogenes, Enterobacter asburiae, Enterobacter cloacae, Enterobacter hormaechei, Enterobacter kobei, Enterobacter ludwigii, Enterorhabdus caecimuris, Erysipelatoclostridium ramosum, Escherichia coli, Escherichia fergusonii, Escherichia hermannii, Escherichia marmotae, Geobacillus stearothermophilus, Haemophilus influenzae, Haemophilus pittmaniae, Hafnia alvei, Halobacillus dabanensis, Halobacillus karajensis, Halobacillus salinus, Halobacillus trueperi, Helicobacter pylori, Intestinibacter bartlettii, Klebsiella oxytoca, Klebsiella pneumoniae, Klebsiella variicola, Kluyvera cryocrescens, Kluyvera georgiana, Kosakonia cowanii, Kushneria sinocarnis, Lachnospira pectinoschiza, Lachnotalea glycerini, Lactobacillus mali, Leclercia adecarboxylata, Lelliottia amnigena, Litorilituus sediminis, Lysinibacillus boronitolerans, Lysinibacillus fusiformis, Lysinibacillus massiliensis, Lysinibacillus sphaericus, Lysinibacillus xylanilyticus, Lysobacter soli, Megasphaera elsdenii, Megasphaera micronuciformis, Micrococcus lylae, Mitsuokella jalaludinii, Moellerella wisconsensis, Monoglobus pectinilyticus, Moraxella osloensis, Morganella morganii, Neisseria canis, Neisseria cinerea, Neisseria elongata, Neisseria flavescens, Neisseria gonorrhoeae, Neisseria macacae, Neisseria meningitidis, Neisseria mucosa, Neisseria perflava, Neisseria subflava, Nosocomiicoccus massiliensis, Noviherbaspirillum denitrificans, Oceanobacillus iheyensis, Oceanobacillus oncorhynchi, Oceanobacillus sojae, Ochrobactrum anthropi, Odoribacter splanchnicus, Oxalobacter formigenes, Paenibacillus alvei, Paenibacillus amylolyticus, Paenibacillus barcinonensis, Paenibacillus barengoltzii, Paenibacillus daejeonensis, Paenibacillus dendritiformis, Paenibacillus glucanolyticus, Paenibacillus illinoisensis, Paenibacillus lactis, Paenibacillus larvae, Paenibacillus lautus, Paenibacillus macerans, Paenibacillus naphthalenovorans, Paenibacillus odorifer, Paenibacillus pabuli, Paenibacillus pasadenensis, Paenibacillus polymyxa, Paenibacillus rhizosphaerae, Paenibacillus stellifer, Paenibacillus thiaminolyticus, Paenibacillus typhae, Pantoea agglomerans, Parabacteroides distasonis, Parabacteroides goldsteinii, Parabacteroides gordonii, Parabacteroides johnsonii, Parabacteroides merdae, Paraprevotella clara, Parasutterella excrementihominis, Peptoniphilus asaccharolyticus, Peptoniphilus indolicus, Planococcus rifetoensis, Porphyromonas asaccharolytica, Porphyromonas bennonis, Porphyromonas somerae, Prevotella bivia, Prevotella buccae, Prevotella buccalis, Prevotella copri, Prevotella timonensis, Proteus mirabilis, Proteus penneri, Proteus vulgaris, Providencia alcalifaciens, Providencia heimbachae, Providencia rettgeri, Providencia stuartii, Pseudomonas aeruginosa, Pseudomonas alcaligenes, Pseudomonas bauzanensis, Pseudomonas caricapapayae, Pseudomonas chlororaphis, Pseudomonas fluorescens, Pseudomonas fragi, Pseudomonas fulva, Pseudomonas gessardii, Pseudomonas japonica, Pseudomonas libanensis, Pseudomonas lundensis, Pseudomonas luteola, Pseudomonas migulae, Pseudomonas monteilii, Pseudomonas mosselii, Pseudomonas oleovorans, Pseudomonas oryzihabitans, Pseudomonas putida, Pseudomonas rhodesiae, Pseudomonas saudiphocaensis, Pseudomonas stutzeri, Pseudomonas taetrolens, Pseudomonas tolaasii, Pseudomonas xanthomarina, Psychrobacter phenylpyruvicus, Raoultella ornithinolytica, Raoultella planticola, Roseomonas gilardii, Roseomonas mucosa, Ruminococcus albus, Ruminococcus callidus, Ruminococcus flavefaciens, Ruminococcus lactaris, Ruminococcus torques, Salinisphaera halophila, Salinivibrio costicola, Salmonella enterica, Salmonella enteritidis, Salmonella typhi, Selenomonas ruminantium, Selenomonas sputigena, Senegalimassilia anaerobia, Serratia marcescens, Serratia ureilytica, Shewanella xiamenensis, Shigella boydii, Shigella dysenteriae, Shigella flexneri, Shigella sonnei, Sphingomonas aerolata, Staphylococcus arlettae, Staphylococcus aureus, Staphylococcus auricularis, Staphylococcus capitis, Staphylococcus caprae, Staphylococcus carnosus, Staphylococcus cohnii, Staphylococcus condimenti, Staphylococcus devriesei, Staphylococcus epidermidis, Staphylococcus equorum, Staphylococcus gallinarum, Staphylococcus haemolyticus, Staphylococcus hominis, Staphylococcus hyicus, Staphylococcus intermedius, Staphylococcus kloosii, Staphylococcus lentus, Staphylococcus lugdunensis, Staphylococcus nepalensis, Staphylococcus pasteuri, Staphylococcus petrasii, Staphylococcus pettenkoferi, Staphylococcus saccharolyticus, Staphylococcus saprophyticus, Staphylococcus schleiferi, Staphylococcus sciuri, Staphylococcus simiae, Staphylococcus simulans, Staphylococcus succinus, Staphylococcus vitulinus, Staphylococcus warneri, Staphylococcus xylosus, Stenotrophomonas acidaminiphila, Stenotrophomonas maltophilia, Stenotrophomonas rhizophila, Streptococcus australis, Streptococcus bovis, Streptococcus equinus, Streptococcus gallolyticus, Streptococcus infantarius, Streptococcus infantis, Streptococcus lutetiensis, Streptococcus mitis, Streptococcus mutans, Streptococcus oralis, Streptococcus peroris, Streptococcus pseudopneumoniae, Streptococcus salivarius, Streptococcus sobrinus, Streptococcus thermophilus, Streptococcus tigurinus, Streptococcus vestibularis, Succiniclasticum ruminis, Terribacillus aidingensis, Terribacillus halophilus, Thermotalea metallivorans, Turicibacter sanguinis, Veillonella atypica, Veillonella denticariosi, Veillonella dispar, Veillonella parvula, Vibrio cholerae, Victivallis vadensis, Virgibacillus massiliensis, Yersinia bercovieri, Yersinia enterocolitica, Yersinia intermedia, Yersinia kristensenii, Yersinia mollaretii, and combinations thereof.

[0067] In some embodiments of any of the aspects, the one or more non-pathogenic queuine producing bacteria is a human gut bacteria, and consists of one or more bacteria comprising a 16S rRNA sequence at least about 97% identical to a 16S rRNA sequence selected from SEQ ID NOs 1-406.

[0068] In some embodiments of any of the aspects, the at least one isolated non-pathogenic queuine producing bacteria is a human gut bacteria that encodes within its genome and expresses in the human gastrointestinal tract at least one queuine biosynthesis selected from folE (GTP cyclohydrolase), QueD (6-carboxy-5,6,7,8-tetrahydrobiopterin synthase), QueE (7-carboxy-7-deazaguanine synthase), QueC (7-cyano-7-deazaguanine synthase, PreQ0 synthase), QueF (7-cyano-7-deazaguanine reductase, PreQ0 reductase), tgt or btgt (tRNA guanine transglycosylase, bacterial tRNA guanine transglycosylase), QueA (S-adenosylmethionine:tRNA ribosyltransferase-isomerase), and QueG or QueH (epoxyqueuosine reductase).

[0069] In some embodiments of any of the aspects, the at least one isolated non-pathogenic queuine producing bacteria is a human gut bacteria that encodes within its genome and expresses in the human gastrointestinal tract at least one queuine biosynthesis enzyme, wherein the amino acid sequence encoded by the at least one queuine biosynthesis gene is at least 90% similar to a sequence selected from SEQ ID NOs 3660-82283.

[0070] In some embodiments of any of the aspects, the at least one isolated non-pathogenic queuine producing bacteria is a human gut bacteria belongs to the species selected from Acidaminococcus fermentans, Adlercreutzia equolifaciens, Akkermansia muciniphila, Alloprevotella tannerae, Anaerostipes caccae, Anaerostipes hadrus, Arcobacter butzleri, Bacteroides caccae, Bacteroides cellulosilyticus, Bacteroides clarus, Bacteroides coprophilus, Bacteroides dorei, Bacteroides eggerthii, Bacteroides faecis, Bacteroides fragilis, Bacteroides massiliensis, Bacteroides nordii, Bacteroides oleiciplenus, Bacteroides ovatus, Bacteroides plebeius, Bacteroides salanitronis, Bacteroides salyersiae, Bacteroides stercoris, Bacteroides thetaiotaomicron, Bacteroides uniformis, Bacteroides vulgatus, Bacteroides xylanisolvens, Barnesiella intestinihominis, Bilophila wadsworthia, Butyrivibrio crossotus, Campylobacter curvus, Citrobacter freundii, Citrobacter koseri, Clostridium bartelettii, Clostridium ramosum, Coprobacter fastidiosus, Coprococcus catus, Coprococcus eutactus, Desulfovibrio piger, Dialister invisus, Dialister succinatiphilus, Enterobacter aerogenes, Enterobacter cancerogenus, Enterobacter cloacae, Enterorhabdus caecimuris, Escherichia coli, Eubacterium hallii, Fusobacterium mortiferum, Haemophilus pittmaniae, Haemophilus sputorum, Hafnia alvei, Klebsiella oxytoca, Klebsiella pneumoniae, Klebsiella variicola, Megamonas funiformis, Megamonas rupellensis, Megasphaera elsdenii, Megasphaera micronuciformis, Mitsuokella multacida, Odoribacter laneus, Odoribacter splanchnicus, Oxalobacter formigenes, Parabacteroides distasonis, Porphyromonas asaccharolytica, Porphyromonas uenonis, Ruminococcus callidus, Ruminococcus torques, Shigella sonnei, Streptococcus infantis, Streptococcus mitis, Streptococcus oralis, Streptococcus pneumoniae, Streptococcus tigurinus, Turicibacter sanguinis, Veillonella atypica, Veillonella dispar, Veillonella parvula, Dysgonomonas mossii, Proteus mirabilis, or Veillonella ratti, and combinations thereof, and the at least one isolated non-pathogenic queuine producing bacteria encodes within its genome and expresses in the human gastrointestinal tract at least one queuine biosynthesis enzyme with an amino acid sequence at least 90% identical to a sequence selected from SEQ ID NOs 3660-82283.

[0071] In some embodiments of any of the aspects, the at least one isolated non-pathogenic queuine producing bacteria is a human gut bacteria with a 16S rRNA sequence at least about 97% identical to a 16S rRNA sequence selected from SEQ ID NOs 1-78, and the at least one isolated non-pathogenic queuine producing bacteria encodes within its genome and expresses in the human gastrointestinal tract at least one queuine biosynthesis enzyme with an amino acid sequence at least 90% identical to a sequence selected from SEQ ID NOs 3660-82283.

[0072] In some embodiments of any of the aspects, the queuine precursors are selected from epoxyqueuine and/or cobalamin.

[0073] In some embodiments of any of the aspects, the queuine analogs are selected from queuosine, a mannosyl queuosine, galactosyl queuosine, glutamyl queuosine, mannosylqueuine, galactosylqueuine, and aminoacylated derivatives such as glutamylqueuine.

[0074] In some embodiments of any of the aspects, the composition is administered orally, intravenously, intramuscularly, intrathecally, subcutaneously, sublingually, buccally, rectally, vaginally, by the ocular route, by the otic route, nasally, via inhalation, by nebulization, cutaneously, transdermally, or combinations thereof, and formulated for delivery with a pharmaceutically acceptable excipient, carrier or diluent.

[0075] In some embodiments of any of the aspects, the administered composition is formulated in a capsule, a tablet, a caplet, a pill, a troche, a lozenge, a powder, a granule, nutraceutical, a medical food, or a combination thereof.

[0076] In some embodiments of any of the aspects, the composition is formulated for delivery to the gut.

[0077] In some embodiments of any of the aspects, the composition further comprises a prebiotic.

[0078] In some embodiments of any of the aspects, the composition further comprises a different composition in an amount effective to treat a CNS disease or disorder.

[0079] In another aspect, described herein is a composition comprising one or more isolated non-pathogenic endozepine-producing bacterial or yeast strains or an isolated product derived therefrom.

[0080] In some embodiments of any of the aspects, the one or more isolated, non-pathogenic endozepine-producing bacterial or yeast strains comprise live bacteria or yeast, or dead bacteria or yeast, or wherein the isolated product derived therefrom comprises culture medium in which said one or more isolated, non-pathogenic bacterial or yeast strains have been cultured.

[0081] In some embodiments of any of the aspects, the isolated product derived therefrom comprises a purified polypeptide produced by the one or more bacterial or yeast strains.

[0082] In some embodiments of any of the aspects, the composition further comprises a pharmaceutically acceptable carrier, wherein the one or more isolated non-pathogenic queuine-producing bacterial or yeast strains or an isolated product derived therefrom is present in an amount effective to alter endozepine levels in a subject in need thereof.

[0083] In another aspect described herein is a pharmaceutical composition comprising endozepine, an analog, derivative or precursor thereof, or a combination of any of these, in an amount effective to alter endozepine levels in a subject in need thereof, and a pharmaceutically acceptable carrier.

[0084] In some embodiments of any of the aspects, the endozepine analog, derivative or precursor is isolated from an endozepine-producing bacterial or yeast strain or culture medium in which an endozepine-producing bacterial or yeast strain has been cultured.

[0085] In another aspect described herein is a method of increasing endozepine levels in a subject in need thereof, the method comprising administering to the subject a composition as described herein in an amount effective to increase endozepine levels in the subject.

[0086] In some embodiments of any of the aspects, the subject is a mammalian subject.

[0087] In some embodiments of any of the aspects, the subject is a human subject.

[0088] In another aspect described herein is a method for treating or preventing a gut microbiome dysbiosis-mediated central nervous system (CNS) disorder associated with an endozepine deficiency in a mammalian subject in need thereof, comprising administering to a subject dysbiotic for endozepine producing gut microbes or low in endozepines one or more isolated non-pathogenic endozepine producing bacterial or yeast strains, an isolated product derived therefrom, endozepines, prebiotics, or combinations thereof, which alter endozepine levels in a subject in need thereof, wherein the composition is formulated for oral or intravenous delivery with a pharmaceutically acceptable excipient, carrier or diluent.

[0089] In some embodiments of any of the aspects, the one or more isolated non-pathogenic endozepine producing bacterial or yeast strains comprises live bacteria or yeast, dead bacteria or yeast, spent medium(s) derived from a bacteria or yeast, cell pellet(s) of a bacteria or yeast, purified metabolite(s) produced by bacteria or yeast, purified protein(s) produced by a bacteria or yeast, and combinations thereof.

[0090] In another aspect described herein is a composition comprising one or more isolated non-pathogenic heavy metal sequestering bacterial strains, their derivatives, siderophores, prebiotics, or combinations thereof, which alter heavy metal levels in a subject in need thereof, wherein the composition is formulated for oral or intravenous delivery with a pharmaceutically acceptable excipient, carrier or diluent.

[0091] In some embodiments of any of the aspects, the one or more isolated non-pathogenic heavy metal sequestering bacterial strains is a purified strain.

[0092] In some embodiments of any of the aspects, the one or more isolated non-pathogenic heavy metal sequestering bacterial strains comprises live bacteria, dead bacteria, spent medium(s) derived from a bacteria, cell pellet(s) of a bacteria, purified metabolite(s) produced by bacteria, purified protein(s) produced by a bacteria, and combinations thereof.

[0093] In another aspect described herein is a method for treating or preventing a gut microbiome dysbiosis-mediated central nervous system (CNS) disorder associated with a heavy metal toxicity in a mammalian subject in need thereof, comprising administering to subjects dysbiotic for heavy metal sequestering gut microbes or high in toxic heavy metals one or more isolated non-pathogenic heavy metal sequestering bacterial strains (e.g., purified strains), their derivatives (e.g. live bacteria, dead bacteria, spent medium(s) derived from a bacteria, cell pellet(s) of a bacteria, purified metabolite(s) produced by bacteria, purified protein(s) produced by a bacteria, or combinations thereof), siderophores, prebiotics, or combinations thereof, which alter endozepine levels in a subject in need thereof, wherein the composition is formulated for oral or intravenous delivery with a pharmaceutically acceptable excipient, carrier or diluent.

[0094] In some embodiments of any of the aspects, the one or more isolated non-pathogenic heavy metal sequestering bacterial strains is a purified strain.

[0095] In some embodiments of any of the aspects, the one or more isolated non-pathogenic heavy metal sequestering bacterial strains comprises live bacteria, dead bacteria, spent medium(s) derived from a bacteria, cell pellet(s) of a bacteria, purified metabolite(s) produced by bacteria, purified protein(s) produced by a bacteria, and combinations thereof.

[0096] In another aspect described herein is a method of increasing BH4 levels in a subject in need thereof, the method comprising administering to the subject a composition of any one of claims 1-20 in an amount effective to increase BH4 levels in the subject.

[0097] In some embodiments of any of the aspects, the subject is a mammalian subject.

[0098] In some embodiments of any of the aspects, the subject is a human subject.

[0099] In another aspect described herein is a composition as described herein, for use in treating a queuine-related CNS disease or disorder.

[0100] In some embodiments of any of the aspects, the CNS disease or disorder is selected from a cognitive disorder, a mood disorder, an anxiety disorder, and a psychiatric disorder.

[0101] In some embodiments of any of the aspects, the CNS disorder is selected from autism, bipolar disorder, major depression, anxiety and schizophrenia.

[0102] In some embodiments of any of the aspects, treating comprises administering the composition to an individual diagnosed as having a queuine-related CNS disease or disorder.

[0103] In some embodiments of any of the aspects, treating comprises, prior to administering the composition for use, identifying a subject in need of treatment by determining whether the subject would benefit from an increase in endogenous queuine.

[0104] In some embodiments of any of the aspects, identifying a subject in need comprises measurement of the amount of queuine in the subject's blood, liver, brain, serum or stool.

[0105] In some embodiments of any of the aspects, identifying a subject in need comprises measurement of queuosine-modified Histidyl-tRNA in a sample of the subject's blood, liver, brain, serum or stool.

[0106] In some embodiments of any of the aspects, identifying a subject in need comprises measurement of queuine-producing bacteria in the subject's stool by 16S rRNA sequencing.

[0107] In some embodiments of any of the aspects, the amount of queuine-producing bacteria in the subject's stool is less than about 10% of total bacteria as measured by 16S rRNA sequencing.

[0108] In another aspect described herein is use of a composition as described herein for the treatment of a queuine-related CNS disease or disorder.

[0109] In some embodiments of any of the aspects, the CNS disease or disorder is selected from a cognitive disorder, a mood disorder, an anxiety disorder, and a psychiatric disorder.

[0110] In some embodiments of any of the aspects, the CNS disorder is selected from autism, bipolar disorder, major depression, anxiety and schizophrenia.

[0111] In another aspect described herein is a composition as described herein, for use in treating a gut microbial dysbiosis.

[0112] In some embodiments of any of the aspects, the gut microbial dysbiosis comprises a deficiency in queuine-producing gut bacteria.

[0113] In some embodiments of any of the aspects, treating comprises administering the composition to an individual diagnosed as having a deficiency in queuine-producing gut bacteria.

[0114] In some embodiments of any of the aspects, treating comprises, prior to administering the composition for use, identifying a subject in need of treatment by determining that the subject has a deficiency in queuine-producing gut bacteria.

[0115] In some embodiments of any of the aspects, identifying a subject in need comprises measurement of the amount of queuine in the subject's blood, liver, brain, serum or stool.

[0116] In some embodiments of any of the aspects, identifying a subject in need comprises measurement of queuosine-modified Histidyl-tRNA in a sample of the subject's blood, liver, brain, serum or stool.

[0117] In some embodiments of any of the aspects, identifying a subject in need comprises measurement of queuine-producing bacteria in the subject's stool by 16S rRNA sequencing.

[0118] In some embodiments of any of the aspects, the amount of queuine-producing bacteria in the subject's stool is less than about 10% of total bacteria as measured by 16S rRNA sequencing.

[0119] In another aspect described herein is use of a composition as described herein for treating a gut microbial dysbiosis.

[0120] In some embodiments of any of the aspects, the gut microbial dysbiosis comprises a deficiency in queuine-producing gut bacteria.

[0121] In some embodiments of any of the aspects, treating comprises administering the composition to an individual diagnosed as having a deficiency in queuine-producing gut bacteria.

[0122] In some embodiments of any of the aspects, treating comprises, prior to administering the composition for use, identifying a subject in need of treatment by determining that the subject has a deficiency in queuine-producing gut bacteria.

[0123] In some embodiments of any of the aspects, identifying a subject in need comprises measurement of the amount of queuine in the subject's blood, liver, brain, serum or stool.

[0124] In some embodiments of any of the aspects, identifying a subject in need comprises measurement of queuosine-modified Histidyl-tRNA in a sample of the subject's blood, liver, brain, serum or stool.

[0125] In some embodiments of any of the aspects, identifying a subject in need comprises measurement of queuine-producing bacteria in the subject's stool by 16S rRNA sequencing.

[0126] In some embodiments of any of the aspects, the amount of queuine-producing bacteria in the subject's stool is less than about 10% of total bacteria as measured by 16S rRNA sequencing.

[0127] In another aspect described herein is a composition as described herein, for use in treating a BH4 deficiency or increasing the level of BH4 in a subject in need thereof.

[0128] In another aspect described herein is use of a composition as described herein, for treating a BH4 deficiency or increasing the level of BH4 in a subject in need thereof.

[0129] In another aspect described herein is a composition as described herein, for use in treating or preventing a gut microbiome dysbiosis-mediated central nervous system (CNS) disorder associated with an endozepine deficiency in a mammalian subject in need thereof.

[0130] In some embodiments of any of the aspects, the CNS disease or disorder is selected from a cognitive disorder, a mood disorder, an anxiety disorder, and a psychiatric disorder.

[0131] In some embodiments of any of the aspects, the CNS disorder is selected from autism, bipolar disorder, major depression, anxiety and schizophrenia.

[0132] In some embodiments of any of the aspects, treating comprises administering the composition to an individual diagnosed as having a gut microbiome dysbiosis-mediated central nervous system (CNS) disorder associated with an endozepine deficiency.

[0133] In some embodiments of any of the aspects, treating comprises, prior to administering the composition for use, identifying a subject in need of treatment by determining whether the subject would benefit from an increase in endogenous endozepine.

[0134] In some embodiments of any of the aspects, identifying a subject in need comprises measurement of the amount of endozepine in the subject's blood, liver, brain, serum or stool.

[0135] In another aspect described herein is use of a composition as described herein, for use in treating or preventing a gut microbiome dysbiosis-mediated central nervous system (CNS) disorder associated with an endozepine deficiency in a mammalian subject in need thereof.

[0136] In another aspect described herein is a composition as described herein, for use in treating or preventing a gut microbiome dysbiosis-mediated central nervous system (CNS) disorder associated with a heavy metal toxicity in a mammalian subject in need thereof.

[0137] In some embodiments of any of the aspects, treating comprises administering the composition to an individual diagnosed as having a gut microbiome dysbiosis-mediated central nervous system (CNS) disorder associated with a heavy metal toxicity.

[0138] In some embodiments of any of the aspects, treating comprises, prior to administering the composition for use, identifying a subject in need of treatment by determining whether the subject would benefit from a reduction in a heavy metal level.

[0139] In another aspect described herein use of a composition as described herein for the treatment or prevention of a gut microbiome dysbiosis-mediated central nervous system (CNS) disorder associated with a heavy metal toxicity.

### BRIEF DESCRIPTION OF THE DRAWINGS

[0140] FIG. 1A-1C is a schematic flow diagram illustrating the various metabolic pathways targeted within the technology described herein involved in central nervous system (CNS) function and mental health, to which critical species within the mammalian gut microbiome contribute important metabolic processes, products and functions. FIG. 1 is adapted from C. Fergus, et al. Nutrients 2015 April; 7(4): 2897-2929.

[0141] FIG. 2A-2B are schematic flow diagrams illustrating various metabolic pathways and components involved in neurotransmitter biology and related CNS function(s) targeted within the technology described herein.

[0142] FIG. 3 is a summary of one bacterial pathway involved in queuine biosynthesis.

[0143] FIG. 4 is a summary of some bacterial siderophore compounds with relevance to the technology described herein. FIG. 4 is based on a schematic from Kanehisa Laboratories© (01053, 3/11/26).

[0144] FIG. 5 details intraperitoneal administration of queuine to deficient animals; in FIG. 5, each queuine injection was 325 micrograms, administered to mice intraperitoneally 24 h apart and 24 h before tissues were harvested for analysis. FIG. 5 is based on Reyniers J P, et al., (1981), J. Biol. Chem. 256; 22, 11591-11594.

[0145] FIG. 6 details intraperitoneal administration of queuine to deficient humans. In FIG. 6, assuming a 32.5 g mouse (typical of adult CF1 mice) and a 70 kg human, the equivalent dose for a human would be 700 mg in each injection. FIG. 6 shows a dot plot of the predicted effect of intraperitoneally injected queuine on liver Q(+)tRNA concentration (e.g., histidyl tRNA, asparaginyl tRNA) in a moderately depleted 70 kg human.

[0146] FIG. 7 details oral administration of queuine to deficient animals; the indicated quantities of free queuine in FIG. 7 were fed to germ-free mice that had been completely depleted of (Q+)tRNA and the tissues were then harvested for analysis of hepatic Q(+)tRNAHis/Asp concentrations. FIG. 7 is based on Reyniers J P, et al., (1981), J. Biol. Chem. 256; 22, 11591-11594.

[0147] FIG. 8 details oral administration of queuine to deficient animals. Scaling the per-gram of body weight dosages yields a rough estimate of the results that would be expected from a short, high-dose regimen of oral supplemental queuine to restore proper BH4 redox cycling and associated neurotransmitter synthesis. FIG. 8 shows a dot plot of the predicted effect of orally administered queuine on liver Q(+)tRNA concentration (e.g., histidyl tRNA, asparaginyl tRNA) in a totally depleted 70 kg human.

### DETAILED DESCRIPTION

[0148] The gut microbiome of mammals is critical for many basic functions relating to gut health, including metabolizing fermentation substrates ingested or produced by the host to generate short chain fatty acids used by the host. Gut microbes are also capable of detoxifying undesired compounds, training the immune system, stimulating/regulating intestinal cell growth and development, inhibiting gut colonization by harmful bacteria, fungi and other pathogens, and producing certain vitamins for the host, such as biotin and vitamin K. Other important functions of gut microbes include production of hormones that mediate fat storage, modulating colonic pH, and regulating water and sodium absorption in the gut. Interactions between the gut and other organs in the body, including the liver, adipose tissue and brain, further explain the critical impacts of gut microbial ecology on host health.

[0149] Gut microbiome composition varies between individuals depending on such factors as diet, genetics, age and exposure to antibiotics (see e.g., Salonen, A. & de Vos, W. M. Impact of diet on human intestinal microbiota and health. Annu Rev Food Sci Technol 5, 239-262). Variations in gut microbiome constitution and health can allow pathogenic species to colonize, multiply and subsequently outnumber beneficial bacterial species. Causes of dysbiosis can range from changes or deficiencies in host diet, immune function, disease and other host-related factors, colonization of the gut by competing microbes (e.g., fungi) and other pathogens (that may toxify, deplete or otherwise adversely change the gut environment), adverse exposure of the gut to antibiotics, toxins and even “nutrients” that alter the gut environment or microbiome composition/balance, and other exogenous factors. The particular form and manifestation of dysbiosis can range from a global microbiome “crash” (e.g., attributable to heavy antibiotic use, or severe host disease), to a critical shift in population makeup that diminishes or eliminates key taxa, to more discrete impacts that selectively alter viability, reproduction, metabolism, or biosynthesis of critical products by heirloom taxa or other critical microbiome community members.

[0150] Among the best known, critical metabolic functions of gut microbes involves the production of short chain fatty acid butyrate by butyrogenic bacteria. Butyrate plays a regulatory role in transepithelial fluid transport in the gut, limits mucosal inflammation and oxidative status, reinforces the gut epithelial defense barrier, and helps regulate visceral sensitivity and intestinal motility. Recent studies implicate butyrate as a potential factor in prevention of colorectal cancer. Systemically, butyrate may also help limit metabolic diseases such as hypercholesterolemia, insulin resistance, and ischemic stroke. Only a limited number of anaerobic intestinal bacteria are known to produce butyrate, and these bacteria are notably depleted in the gastrointestinal (GI) tracts of patients with metabolic diseases.

[0151] An excess of pathogenic bacterial species in the gut is also associated with reduction of butyrogenic bacteria in the GI tract, as observed in association with several immune-related, inflammation-related and other disease conditions, including cancer (e.g., colorectal cancer), inflammatory bowel disease (IBD) (e.g., Crohn's disease, ulcerative colitis), irritable bowel syndrome (IBS), type 2 diabetes mellitus, obesity, bacterial or viral diarrhea, constipation, bloating, allergies, urinary tract infections, and others.

[0152] The technology described herein relates to more complex, and less well known, gut bacterial products and processes that impact central nervous system (CNS) functions of hosts. Within principal aspects of the technology described herein, selected heirloom bacterial species are identified that possess ex-genes directing metabolic pathways yielding important products utilized in development, maintenance and/or normal functioning of the mammalian CNS. The subject bacteria are isolated, prepared and optionally formulated for improved delivery or function a dysbiotic mammalian subject, to effectively treat or prevent one or more CNS conditions or other symptom(s) attributable to dysbiosis. The technology described herein focuses in principal aspects on clinical cases of gut dysbiosis associated with adverse impacts on CNS function. As illustrated in FIG. 1, the mammalian CNS is constructed in part and otherwise regulated by a diversity of metabolic pathways and products, many of which are targeted within the technology described herein as having their normal function influenced by, or even dependent on, a healthy and complete gut microbiome. The following describes various aspects of the technology and considerations to permit one of ordinary skill in the art to prepare and use the disclosed compositions and methods, e.g., to treat or prevent a CNS disease or disorder as described.

### Definitions

[0153] For convenience, the meaning of some terms and phrases used in the specification, examples, and appended claims, are provided below. Unless stated otherwise, or implicit from context, the following terms and phrases include the meanings provided below. The definitions are provided to aid in describing particular embodiments, and are not intended to limit the claimed invention, because the scope of the invention is limited only by the claims. Unless otherwise defined, all technical and scientific terms used herein have the same meaning as commonly understood by one of ordinary skill in the art to which this invention belongs. If there is an apparent discrepancy between the usage of a term in the art and its definition provided herein, the definition provided within the specification shall prevail.

[0154] For convenience, certain terms employed herein, in the specification, examples and appended claims are collected here.

[0155] As used herein, the term “administering,” refers to the placement of a compound as disclosed herein into a subject by a method or route which results in at least partial delivery of the agent at a desired site. Compositions comprising the compounds disclosed herein can be administered by any appropriate route which results in an effective treatment in the subject. In some embodiments, administration comprises physical human activity, e.g., an injection, act of ingestion, an act of application, and/or manipulation of a delivery device or machine. Such activity can be performed, e.g., by a medical professional and/or the subject being treated.

[0156] Specifically, as used herein “administer” and “administration” encompasses embodiments in which one person directs another to consume live bacteria, dead bacteria, spent medium(s) derived from a bacteria, cell pellet(s) of a bacteria, purified metabolite(s) produced by bacteria, purified protein(s) produced by a bacteria, prebiotics, small molecules, queuine, queuine analogs, queuine precursors, prebiotics, endozepines, siderophores, or combinations thereof in a certain manner and/or for a certain purpose, and also situations in which a user uses any of the above in a certain manner and/or for a certain purpose independently of or in variance to any instructions received from a second person. Non-limiting examples of embodiments include the situation in which one person directs another to consume live bacteria, dead bacteria, spent medium(s) derived from a bacteria, cell pellet(s) of a bacteria, purified metabolite(s) produced by bacteria, purified protein(s) produced by a bacteria, prebiotics, small molecules, queuine, queuine analogs, precursors of queuine, endozepines, siderophores, or combinations thereof in a certain manner and/or for a certain purpose include when a physician prescribes a course of conduct and/or treatment to a patient, when a parent commands a minor user (such as a child) to consume such a product, when a trainer advises a user (such as an athlete) to follow a particular course of conduct and/or treatment, or when a manufacturer, distributer, or marketer recommends conditions of use to an end user, for example through advertisements or labeling on packaging or on other materials provided in association with the sale or marketing of a product. In some embodiments, the disclosed compositions can be administered orally, intravenously, intramuscularly, intrathecally, subcutaneously, sublingually, buccally, rectally, vaginally, by the ocular route, by the otic route, nasally, via inhalation, by nebulization, cutaneously, transdermally, or combinations thereof, and formulated for delivery with a pharmaceutically acceptable excipient, carrier or diluent. Of note, although the disclosed compositions encompass multiple formulations and modes of delivery for treatments to ameliorate dysbiosis and its sequelae, it should be noted that live biotherapeutic products such as probiotics are not typically administered intravenously, intramuscularly, or intraperitoneally. These modes of delivery would likely be reserved for small-molecule products of bacterial metabolism including but not limited to queuine or queuosine, endozepine precursors, heavy metal-chelating small molecules or peptides, or other such compounds as described herein.

[0157] As used herein, the term “isolated” encompasses a bacterium or other entity or substance that has been (1) separated from at least some of the components with which it was associated when initially produced (whether in nature, such as human stool, or in an experimental setting, such as a Petri plate consisting of artificial growth medium), and/or (2) produced, prepared, purified, and/or manufactured by the hand of man. Isolated bacteria, proteins, metabolites, or combinations thereof may be separated from at least about 10%, about 20%, about 30%, about 40%, about 50%, about 60%, about 70%, about 80%, about 90%, or more of the other components with which they were initially associated. In some embodiments, isolated bacteria, proteins, metabolites, or combinations thereof are more than about 80%, about 85%, about 90%, about 91%, about 92%, about 93%, about 94%, about 95%, about 96%, about 97%, about 98%, about 99%, or more than about 99% pure. As used herein, a substance is “pure” if it is substantially free of other components (such as other bacterial species). The terms “purify,” “purifying” and “purified” refer to a bacterium or other material that has been separated from at least some of the components with which it was associated either when initially produced or generated (e.g., whether in nature or in an experimental setting), or during any time after its initial production, as recognized by those skilled in the art of bacterial cultivation or of relevant skill (e.g. chemistry). A bacterium or a bacterial population can be considered purified if it is isolated at or after production, such as from a material or environment containing the bacterium or bacterial population, and a purified bacterium or bacterial population can contain other materials up to about 10%, about 20%, about 30%, about 40%, about 50%, about 60%, about 70%, about 80%, about 90%, or above about 90% and still be considered “isolated.” In some embodiments, purified bacteria and bacterial populations are more than about 80%, about 85%, about 90%, about 91%, about 92%, about 93%, about 94%, about 95%, about 96%, about 97%, about 98%, about 99%, or more than about 99% pure. In the instance of bacterial compositions provided herein, the one or more bacterial types present in the composition can be independently purified from one or more other bacteria produced and/or present in the material or environment containing the bacterial type. In some embodiments, a bacterium or population of bacteria is “isolated” if it comprises a single strain of bacteria. In some embodiments, such isolated bacteria can be admixed or administered with other isolated bacteria, e.g., in a defined consortium of isolated bacteria. Bacterial compositions and the bacterial components thereof are generally purified from residual habitat products.

[0158] As used herein, “probiotic” is understood to mean “live microorganisms which when administered in adequate amounts confer a health benefit on the host”, as currently defined by the World Health Organization.

[0159] As used herein, “prebiotic” is understood to mean an ingredient that allows specific changes, both in the composition and/or activity in the gastrointestinal microbiota that may (or may not) confer benefits upon the host. Favored prebiotics will be those which encourage growth of probiotic compositions or their beneficial functions, but not growth of pathogens nor genes associated with pathogenicity (e.g. toxins).

[0160] As used herein, “medical food” is understood to mean “a food which is formulated to be consumed or administered enterally under the supervision of a physician and which is intended for the specific dietary management of a disease or condition for which distinctive nutritional requirements, based on recognized scientific principles, are established by medical evaluation”, as defined by 5(b) of the Orphan Drug Act (21 U.S.C. 360ee (b) (3)).

[0161] As used herein “initial amount” is understood to mean the amount of a substance, e.g., queuine, endozepines, siderophores, or levels of a given bacteria or function in an aliquot or sample prior to administration of the disclosed compositions to the subject. Initial amount can be measured in terms of concentration. As a non-limiting example, an initial amount can be measured in terms of nanograms of substance per milliliter of sample, e.g., nanograms of queuine per milliliter of blood or serum (ng queuine/mL blood or serum). The initial amount can also be measured, for instance, as the amount of queuine in regions of the brain, liver, whole or fractionated blood, or other relevant tissues prior to administration of the disclosed compositions. The amount of queuine can be represented in terms of millimoles of queuine per kg tissue. The initial amount can also be represented as a percentage of tRNAHis/Asp/Tyr/Asn which contains queuosine or a glycosylated queuosine derivative in the “wobble” position (position 34) of the anticodon, rather than guanosine. This percentage can depend on tissue type and tRNA type, and can be as low as 10-20% in skin, and as high as 100% in tissues such as brain. The initial amount can also be measured, for instance, as the amount of queuine or queuosine in a subject's stool sample prior to administration of queuine-producing bacteria to the subject. The amount of queuine can be represented in terms of nanograms of queuine per gram of stool (μg queuine/g stool). The initial amount can also be the level of expression of queuine producing enzymes or bacteria in the stool (log change of reads), as measured by qPCR, next-generation DNA or RNA sequencing, or other appropriate method. Unless otherwise defined herein, stool is weighed when wet or dry.

[0162] As used herein, a “host genetic response” means the response of a given organ and/or tissue (e.g., the brain, liver, or vagus nerve) on the gene expression level after exposure to disclosed compositions.

[0163] As used herein, “queuine producing bacteria” is understood to mean bacteria that can produce measurable quantities of queuine, as detected by LC/MS, ELISA, or other appropriate analytical assays. In some embodiments, queuine producing bacteria can produce queuine or its precursors under the physiological conditions in a human, e.g., under the pH, and temperature of the human gut. In some embodiments, queuine-producing bacteria express at least one gene involved in queuine biosynthesis once delivered to the human gastrointestinal tract.

[0164] As used herein, “human gut queuine producing bacteria” is understood to mean queuine producing bacteria that have been found in or isolated from the human gastrointestinal tract, or samples derived therefrom (e.g. fecal samples, colonic washes, or biopsies). In some embodiments, human gut queuine producing bacteria are identified by sequencing methods (e.g. qPCR or metagenomics) or by cultivation.

[0165] As used herein, “keystone human gut queuine producing bacteria” is understood to mean queuine producing bacteria that have been found or isolated from in the human gastrointestinal tract, or samples derived therefrom (e.g. fecal samples, colonic washes, or biopsies), that also express one or more genes involved in queuine biosynthesis in the mammalian gut or under physiologically relevant conditions. In some embodiments, keystone human gut queuine producing bacteria are identified by combining RNA and DNA based sequencing methods (e.g. transcriptomics, qPCR or metagenomics).

[0166] As used herein, “physiologically relevant conditions” of the human intestinal tract is understood to mean conditions that bacteria are exposed to in the human intestinal tract. In some embodiments this means a pH range that exists in the body. For instance, a pH range that is physiologically relevant to the human gut can be in the range of about 4.5 to about 7.5. In other embodiments it means exposure to other human gut bacteria, or carbon, nitrogen, nutrients or other compositions, e.g., mucin or phosphatidylcholine, in concentrations and combinations found in the intestinal tract.

[0167] As used herein, the term “gut” is understood to refer to the human gastrointestinal tract, also known as the alimentary canal. The gut includes the mouth, pharynx, oesophagus, stomach, small intestine (duodenum, jejunum, ileum), large intestines (cecum and colon) and rectum. While the entire alimentary canal can be colonized by varying species of microbes, the majority of the gut microbiome, in terms of both numbers of species of biomass, resides in the intestines (small and large).

[0168] As used herein, “bacteria” or “bacterial strain” is understood to mean a species or related taxonomic group of bacteria. A “bacterium” is understood as a single bacterial cell of a given species or related taxonomic group of bacteria.

[0169] As used herein, the terms “treat,” “treatment,” “treating,” or “amelioration” refer to therapeutic treatments, wherein the object is to reverse, alleviate, ameliorate, inhibit, slow down or stop the progression or severity of a condition associated with a disease or disorder, e.g. a queuine, endozepine and/or heavy metal-related disease or disorder. The term “treating” includes reducing or alleviating at least one adverse effect or symptom of a condition, disease or disorder associated with a queuine, endozepine and/or heavy metal-related disease or disorder. Treatment is generally “effective” if one or more symptoms or clinical markers are reduced. Alternatively, treatment is “effective” if the progression of a disease is reduced or halted. That is, “treatment” includes not just the improvement of symptoms or markers, but also a cessation of, or at least slowing of, progress or worsening of symptoms compared to what would be expected in the absence of treatment. Beneficial or desired clinical results include, but are not limited to, alleviation of one or more symptom(s), diminishment of extent of disease, stabilized (i.e., not worsening) state of disease, delay or slowing of disease progression, amelioration or palliation of the disease state, remission (whether partial or total), and/or decreased mortality, whether detectable or undetectable. The term “treatment” of a disease also includes providing relief from the symptoms or side-effects of the disease (including palliative treatment). A treatment need not cure a disorder (i.e., complete reversal or absence of disease) to be considered effective.

[0170] As used herein, the term “Uniprot ID” refers to an accession number, which when used as in input for the publicly available database Uniprot, permits access to information, such as nucleotide or amino acid sequence of a gene, and the bacterium or yeast encoding that sequence in its genome. For a given Uniprot ID, the relevant information can be accessed on the world wide web (see e.g., “uniprot.org/uniprot/XXXX”, where “XXXX” is the Uniprot ID). Additionally, SEQ ID NOs that are amino acid sequences (e.g., SEQ ID NOs: 3660-90760, 91407-95263, 95292-95321) list additional information in the sequence information, which corresponds to the following: database|Unique Identifier|Entry Name Protein Name OS=Organism Name OX=Organism Identifier GN=Gene Name PE=Protein Existence SV=Sequence Version.

[0171] As used herein, “dysbiosis” refers to any structural or functional imbalance or disruption within a normal, healthy gut microfloral community. This can include large or small changes in gut microbiome community composition, for example a decline in numbers of one or more key species (e.g., due to decreased viability and/or proliferative capacity), crashing of a wide diversity of species (e.g., due to radical changes in the gut environment, such as may be caused by host disease or antibiotic use) changes in relative abundance between multiple microbial species (e.g., outgrowth or inhibition by one or more competing fungal or bacterial species, depriving other community members of resources or otherwise impairing their growth, viability, and/or function (e.g., metabolic activity and output of specific products)), or any other circumstance that significantly alters the gut microfloral community structure, health, viability, stability, regenerative capacity, dominance/abundance of species, and/or specific biological and metabolic function of individual species and/or the community as a whole.

[0172] As used herein, “genes involved in queuine biosynthesis” and “queuine synthesis genes” refer to the genes themselves and/or the enzymes or proteins that are their gene products (denoted in parentheses), including, but not limited to: folE (GTP cyclohydrolase), QueD (6-carboxy-5,6,7,8-tetrahydrobiopterin synthase), QueE (7-carboxy-7-deazaguanine synthase), QueC (7-cyano-7-deazaguanine synthase, PreQ0 synthase), QueF (7-cyano-7-deazaguanine reductase, PreQ0 reductase), tgt or btgt (tRNA guanine transglycosylase, bacterial tRNA guanine transglycosylase), QueA (S-adenosylmethionine:tRNA ribosyltransferase-isomerase), QueG or QueH (both are epoxyqueuosine reductases), the PreQ1_1_Riboswitch, the PreQ1_2_Riboswitch, the PreQ1_3_Riboswitch, or combinations thereof.

[0173] As used herein, “queuine related metabolite” refers to any metabolite directly or indirectly influenced by queuine levels in the host. Non limiting examples include biopterins (particularly BH2 and BH4); monoamine neurotransmitters; imidazoleamines, e.g. histamine; catecholamines, e.g. adrenaline (epinephrine), dopamine, noradrenaline (norepinephrine); indolamines, e.g., serotonin (5-HT), melatonin; and other metabolites influenced by queuine, e.g. nitric oxide, phenylalanine, tyrosine, tryptophan, and kynurenine, or combinations thereof.

[0174] As used herein, “queuine analogs” refers to structural variants of queuine or a molecule or macromolecule comprising queuine or structural variants thereof that retains one or more activities of queuine (e.g., tRNA-queuosine translation, regeneration of BH4, synthesis of monoamine neurotransmitters, etc.). Non-limiting examples of queuine structural variants are described further herein. In some embodiments, the queuine analogs are in a form adapted for oral use or administration. In particular, a queuine analog can be part of a covalent or ionic complex, such as queuosine, a mannosyl queuosine, galactosyl queuosine, or a glutamyl queuosine. It can also be considered in the form of tRNA-queuosine or an oligonucleotide comprising queuosine. Among these derivatives are the glycosylated derivatives of queuine and queuosine, such as mannosylqueuine, galactosylqueuine, and aminoacylated derivatives such as glutamylqueuine.

[0175] As used herein, “queuine precursor” refers to any molecule listed in FIG. 3. Non limiting examples of a queuine precursor are its intermediate precursor, epoxyqueuine, whether in free form or in the form of a covalent complex with molecules or macromolecules. In another non-limiting example, a queuine precursor refers to cofactors required for queuine biosynthesis in bacteria, such as Vitamin B-12, generally referred to as cobalamin, which is required for a functional QueG.

[0176] As used herein, “endozepine producing bacteria” refers to any bacterium with the capability to produce an endozepine or a precursor of an endozepine, which is then converted to an endozepine by the host or its native microbiome.

[0177] As used herein, “endozepine producing yeast” refers to any yeast with the capability to produce an endozepine or a precursor of an endozepine, which is then converted to an endozepine by the host or its native microbiome

[0178] As used herein, “heavy metal sequestering bacteria” refers to any bacterium that can produce a substance that binds or complexes with a heavy metal thereby reducing bioavailability of the heavy metal or a bacterium that can actively import toxic heavy metals such as mercury and lead. In particular, a heavy metal sequestering bacteria can do this through production of a siderophore with an affinity to mercury, lead, or another toxic heavy metal. As used herein, “siderophore” refers to small peptidic molecules, readily assembled by short, dedicated metabolic pathways, which contain side chains and functional groups that can provide a high-affinity set of ligands for coordination of metals. Alternatively, a heavy metal sequestering bacteria can do this through production of extracellular polymeric substances that bind to the heavy metals, or by actively or passively transporting the heavy metals and sequestering internally in a vesicle.

[0179] As used herein, the term “clinical improvement” encompasses improvement in a measure of disease or symptom severity. Such improvement can include an increase, as that term is used herein, in the level of queuine or a queuine metabolite, endozepine or an endozepine metabolite, or a decrease, as that term is used herein, in bioavailable heavy metal. Clinical improvement can also be indicated by a change for the better in a clinically-accepted rating or scale of a CNS disease or disorder, e.g., a change of at least one level in such a clinically-accepted rating or scale of a CNS disease or disorder. In a non-limiting example, clinical improvement would refer to a change for the better by at least one level or by at least 10% or greater improvement in: HAM-D (Hamilton depression rating scale) score of a patient with depression (e.g., after eight weeks of treatment with a composition as described herein), PANSS (Positive and Negative Syndrome Scale) of a patient with schizophrenia (e.g., after eight weeks of treatment with a composition as described herein), BAI (Beck Anxiety Index) of a patient with anxiety or related disorders (e.g., after eight weeks of treatment with the composition). In another non-limiting example, “clinical improvement” would refer to a 50% or greater reduction in the rate of progression of global cortical atrophy (Pasquier scale score) in a patient with a neurodegenerative disease, as measured by neuroimaging or similar techniques (e.g., within eight weeks of commencement of treatment with a composition as described herein). In another non-limiting example, “clinical improvement” would refer to a 50% or greater reduction in the rate of increase of UPDRS (Unified Parkinson's Disease Rating Scale) score or similar metric (e.g., within eight weeks of commencement of treatment with a composition as described herein). In another non-limiting example, “clinical improvement” would refer to a 25% or greater reduction in the severity of symptoms of autism spectrum disorder as measured by the CARS (Childhood Autism Rating Scale) assessment as administered by a qualified psychiatric professional (e.g. within twenty four weeks of commencement of treatment with a composition as described herein).

[0180] As used herein the terms “derivative” or “product derived therefrom” when used in reference to a bacterial or yeast strain refers to one or more modified live bacteria or yeast, dead bacteria or yeast, spent medium(s) derived from a bacteria or yeast, cell pellet(s) of a bacteria or yeast, purified metabolite(s) produced by bacteria or yeast, purified protein(s) produced by a bacteria or yeast, or combinations thereof.

[0181] The terms “decrease”, “reduced”, “reduction”, or “inhibit” are all used herein to mean a decrease by a statistically significant amount. In some embodiments, “reduce,” “reduction” or “decrease” or “inhibit” typically means a decrease by at least 10% as compared to a reference level (e.g. the absence of a given treatment or agent) and can include, for example, a decrease by at least about 10%, at least about 20%, at least about 25%, at least about 30%, at least about 35%, at least about 40%, at least about 45%, at least about 50%, at least about 55%, at least about 60%, at least about 65%, at least about 70%, at least about 75%, at least about 80%, at least about 85%, at least about 90%, at least about 95%, at least about 98%, at least about 99%, or more. As used herein, “reduction” or “inhibition” does not encompass a complete inhibition or reduction as compared to a reference level. “Complete inhibition” is a 100% inhibition as compared to a reference level. A decrease can be preferably down to a level accepted as within the range of normal, e.g., for an individual without a given disorder.

[0182] The terms “increased”, “increase”, “enhance”, or “activate” are all used herein to mean an increase by a statically significant amount. In some embodiments, the terms “increased”, “increase”, “enhance”, or “activate” can mean an increase of at least 10% as compared to a reference level, for example an increase of at least about 20%, or at least about 30%, or at least about 40%, or at least about 50%, or at least about 60%, or at least about 70%, or at least about 80%, or at least about 90% or up to and including a 100% increase or any increase between 10-100% as compared to a reference level, or at least about a 2-fold, or at least about a 3-fold, or at least about a 4-fold, or at least about a 5-fold or at least about a 10-fold increase, or any increase between 2-fold and 10-fold or greater as compared to a reference level. In the context of a marker or symptom, an “increase” is a statistically significant increase in such level.

[0183] As used herein, a “subject” means a human or animal. Usually the animal is a vertebrate such as a primate, rodent, domestic animal or game animal. Primates include chimpanzees, cynomolgus monkeys, spider monkeys, and macaques, e.g., Rhesus. Rodents include mice, rats, woodchucks, ferrets, rabbits and hamsters. Domestic and game animals include cows, horses, pigs, deer, bison, buffalo, feline species, e.g., domestic cat, canine species, e.g., dog, fox, wolf, avian species, e.g., chicken, emu, ostrich, and fish, e.g., trout, catfish and salmon. In some embodiments, the subject is a mammal, e.g., a primate, e.g., a human. The terms, “individual,” “patient” and “subject” are used interchangeably herein.

[0184] Preferably, the subject is a mammal. The mammal can be a human, non-human primate, mouse, rat, dog, cat, horse, or cow, but is not limited to these examples. Mammals other than humans can be advantageously used as subjects that represent animal models of a queuine, endozepine and/or heavy metal-related disease or disorder. A subject can be male or female.

[0185] A subject can be one who has been previously diagnosed with or identified as suffering from or having a condition in need of treatment (e.g. a queuine, endozepine and/or heavy metal-related disease or disorder) or one or more complications related to such a condition, and optionally, has already undergone treatment for a queuine, endozepine and/or heavy metal-related disease or disorder or the one or more complications related to a queuine, endozepine and/or heavy metal-related disease or disorder. Alternatively, a subject can also be one who has not been previously diagnosed as having a queuine, endozepine and/or heavy metal-related disease or disorder or one or more complications related to a queuine, endozepine and/or heavy metal-related disease or disorder. For example, a subject can be one who exhibits one or more risk factors for a queuine, endozepine and/or heavy metal-related disease or disorder or one or more complications related to a queuine, endozepine and/or heavy metal-related disease or disorder or a subject who does not exhibit risk factors.

[0186] A “subject in need” of treatment for a particular condition can be a subject having that condition, diagnosed as having that condition, or at risk of developing that condition.

[0187] In the various embodiments described herein, it is further contemplated that variants (naturally occurring or otherwise), alleles, homologs, conservatively modified variants, and/or conservative substitution variants of any of the particular polypeptides described are encompassed. As to amino acid sequences, one of skill will recognize that individual substitutions, deletions or additions to a nucleic acid, peptide, polypeptide, or protein sequence which alters a single amino acid or a small percentage of amino acids in the encoded sequence is a “conservatively modified variant” where the alteration results in the substitution of an amino acid with a chemically similar amino acid and retains the desired activity of the polypeptide. Such conservatively modified variants are in addition to and do not exclude polymorphic variants, interspecies homologs, and alleles consistent with the disclosure.

[0188] A given amino acid can be replaced by a residue having similar physiochemical characteristics, e.g., substituting one aliphatic residue for another (such as Ile, Val, Leu, or Ala for one another), or substitution of one polar residue for another (such as between Lys and Arg; Glu and Asp; or Gln and Asn). Other such conservative substitutions, e.g., substitutions of entire regions having similar hydrophobicity characteristics, are well known. Polypeptides comprising conservative amino acid substitutions can be tested in any one of the assays described herein to confirm that a desired activity, e.g. activity and specificity of a native or reference polypeptide is retained.

[0189] Amino acids can be grouped according to similarities in the properties of their side chains (in A. L. Lehninger, in Biochemistry, second ed., pp. 73-75, Worth Publishers, New York (1975)): (1) non-polar: Ala (A), Val (V), Leu (L), Ile (I), Pro (P), Phe (F), Trp (W), Met (M); (2) uncharged polar: Gly (G), Ser (S), Thr (T), Cys (C), Tyr (Y), Asn (N), Gln (Q); (3) acidic: Asp (D), Glu (E); (4) basic: Lys (K), Arg (R), His (H). Alternatively, naturally occurring residues can be divided into groups based on common side-chain properties: (1) hydrophobic: Norleucine, Met, Ala, Val, Leu, Ile; (2) neutral hydrophilic: Cys, Ser, Thr, Asn, Gln; (3) acidic: Asp, Glu; (4) basic: His, Lys, Arg; (5) residues that influence chain orientation: Gly, Pro; (6) aromatic: Trp, Tyr, Phe. Non-conservative substitutions will entail exchanging a member of one of these classes for another class. Particular conservative substitutions include, for example; Ala into Gly or into Ser; Arg into Lys; Asn into Gln or into His; Asp into Glu; Cys into Ser; Gln into Asn; Glu into Asp; Gly into Ala or into Pro; His into Asn or into Gln; Ile into Leu or into Val; Leu into Ile or into Val; Lys into Arg, into Gln or into Glu; Met into Leu, into Tyr or into Ile; Phe into Met, into Leu or into Tyr; Ser into Thr; Thr into Ser; Trp into Tyr; Tyr into Trp; and/or Phe into Val, into Ile or into Leu.

[0190] In some embodiments, the polypeptide described herein (or a nucleic acid encoding such a polypeptide) can be a functional fragment of one of the amino acid sequences described herein. As used herein, a “functional fragment” is a fragment or segment of a peptide which retains at least 50% of the wild-type reference polypeptide's activity according to the assays described below herein. A functional fragment can comprise conservative substitutions of the sequences disclosed herein.

[0191] In some embodiments, the polypeptide described herein can be a variant of a sequence described herein. In some embodiments, the variant is a conservatively modified variant. Conservative substitution variants can be obtained by mutations of native nucleotide sequences, for example. A “variant,” as referred to herein, is a polypeptide substantially homologous to a native or reference polypeptide, but which has an amino acid sequence different from that of the native or reference polypeptide because of one or a plurality of deletions, insertions or substitutions. Variant polypeptide-encoding DNA sequences encompass sequences that comprise one or more additions, deletions, or substitutions of nucleotides when compared to a native or reference DNA sequence, but that encode a variant protein or fragment thereof that retains activity. A wide variety of PCR-based site-specific mutagenesis approaches are known in the art and can be applied by the ordinarily skilled artisan.

[0192] A variant amino acid or DNA sequence can be at least 50%, at least 60%, at least 70%, at least 80%, at least 90%, at least 91%, at least 92%, at least 93%, at least 94%, at least 95%, at least 96%, at least 97%, at least 98%, at least 99%, or more, identical to a native or reference sequence. The degree of homology (percent identity) between a native and a mutant sequence can be determined, for example, by comparing the two sequences using freely available computer programs commonly employed for this purpose on the world wide web (e.g. BLASTp or BLASTn with default settings).

[0193] A variant amino acid sequence can be at least 50%, at least 60%, at least 70%, at least 80%, at least 90%, at least 91%, at least 92%, at least 93%, at least 94%, at least 95%, at least 96%, at least 97%, at least 98%, at least 99%, or more, similar to a native or reference sequence. As used herein, “similarity” refers to an identical amino acid or a conservatively substituted amino acid, as descried herein. Accordingly, the percentage of “sequence similarity” is the percentage of amino acids which is either identical or conservatively changed; e.g., “sequence similarity”=(% sequence identity)+(% conservative changes). The skilled person will be aware of several different computer programs, using different mathematical algorithms, that are available to determine the identity or similarity between two sequences. For instance, use can be made of a computer program employing the Needleman and Wunsch algorithm (Needleman et al. (1970)); the GAP program in the Accelrys GCG software package (Accelerys Inc., San Diego U.S.A.); the algorithm of E. Meyers and W. Miller (Meyers et al. (1989)) which has been incorporated into the ALIGN program (version 2.0); or more preferably the BLAST (Basic Local Alignment Tool using default parameters); see e.g., U.S. Pat. No. 10,023,890, the content of which is incorporated by reference herein in its entirety.

[0194] Alterations of the native amino acid sequence can be accomplished by any of a number of techniques known to one of skill in the art. Mutations can be introduced, for example, at particular loci by synthesizing oligonucleotides containing a mutant sequence, flanked by restriction sites enabling ligation to fragments of the native sequence. Following ligation, the resulting reconstructed sequence encodes an analog having the desired amino acid insertion, substitution, or deletion. Alternatively, oligonucleotide-directed site-specific mutagenesis procedures can be employed to provide an altered nucleotide sequence having particular codons altered according to the substitution, deletion, or insertion required. Techniques for making such alterations are very well established and include, for example, those disclosed by Walder et al. (Gene 42:133, 1986); Bauer et al. (Gene 37:73, 1985); Craik (BioTechniques, January 1985, 12-19); Smith et al. (Genetic Engineering: Principles and Methods, Plenum Press, 1981); and U.S. Pat. Nos. 4,518,584 and 4,737,462, which are herein incorporated by reference in their entireties. Any cysteine residue not involved in maintaining the proper conformation of the polypeptide also can be substituted, generally with serine, to improve the oxidative stability of the molecule and prevent aberrant crosslinking. Conversely, cysteine bond(s) can be added to the polypeptide to improve its stability or facilitate oligomerization.

[0195] In some embodiments, a nucleic acid as described herein can be detected using PCR. In general, the PCR procedure describes a method of gene amplification which is comprised of (i) sequence-specific hybridization of primers to specific genes or sequences within a nucleic acid sample or library, (ii) subsequent amplification involving multiple rounds of annealing, elongation, and denaturation using a thermostable DNA polymerase, and (iii) screening the PCR products for a band of the correct size. The primers used are oligonucleotides of sufficient length and appropriate sequence to provide initiation of polymerization, i.e. each primer is specifically designed to be complementary to a strand of the genomic locus to be amplified. In an alternative embodiment, mRNA level of gene expression products described herein can be determined by reverse-transcription (RT) PCR or quantitative RT-PCR (QRT-PCR) or real-time PCR methods. Methods of RT-PCR and QRT-PCR are well known in the art.

[0196] In some embodiments of any of the aspects, the level of a nucleic acid described herein can be measured by a quantitative sequencing technology, e.g. a quantitative next-generation sequencing technology. In some embodiments of any of the aspects, the sequence of a nucleic acid described herein can be determined using a next-generation sequencing technology. Methods of sequencing a nucleic acid sequence are well known in the art. Briefly, a sample obtained from a subject can be contacted with one or more primers which specifically hybridize to a single-strand nucleic acid sequence flanking the target gene sequence and a complementary strand is synthesized. In some next-generation technologies, an adaptor (double or single-stranded) is ligated to nucleic acid molecules in the sample and synthesis proceeds from the adaptor or adaptor compatible primers. In some third-generation technologies, the sequence can be determined, e.g. by determining the location and pattern of the hybridization of probes, or measuring one or more characteristics of a single molecule as it passes through a sensor (e.g. the modulation of an electrical field as a nucleic acid molecule passes through a nanopore). Exemplary methods of sequencing include, but are not limited to, Sanger sequencing (i.e., dideoxy chain termination), high-throughput sequencing, next generation sequencing, 454 sequencing, SOLiD sequencing, polony sequencing, Illumina sequencing, Ion Torrent sequencing, sequencing by hybridization, nanopore sequencing, Helioscope sequencing, single molecule real time sequencing, RNAP sequencing, and the like. Methods and protocols for performing these sequencing methods are known in the art, see, e.g. “Next Generation Genome Sequencing” Ed. Michal Janitz, Wiley-VCH; “High-Throughput Next Generation Sequencing” Eds. Kwon and Ricke, Humanna Press, 2011; and Sambrook et al., Molecular Cloning: A Laboratory Manual (4 ed.), Cold Spring Harbor Laboratory Press, Cold Spring Harbor, N.Y., USA (2012); which are incorporated by reference herein in their entireties.

[0197] In some embodiments, sequencing comprises 16S rRNA gene sequencing, which can also be referred to as “16S ribosomal RNA sequencing”, “16S rDNA sequencing” or “16s rRNA sequencing”. Sequencing of the 16S rRNA gene can be used for genetic studies as it is highly conserved between different species of bacteria, but it is not present in eukaryotic species. In addition to highly conserved regions, the 16S rRNA gene also comprises nine hypervariable regions (V1-V9) that vary by species. 16S rRNA gene sequencing typically comprises using a plurality of universal primers that bind to conserved regions of the 16S rRNA gene, PCR amplifying the bacterial 16S rRNA gene regions (including hypervariable regions), and sequencing the amplified 16S rRNA genes with a next-generation sequencing technology as described herein (see also e.g., U.S. Pat. Nos. 5,654,418; 6,344,316; and 8,889,358; and US Patent Application Numbers US 2013/0157265 and US 2018/0195111, which are incorporated by reference in their entireties).

[0198] In some embodiments, sequencing comprises 18S rRNA gene sequencing, which can also be referred to as “18S ribosomal RNA sequencing”, “18S rDNA sequencing” or “18S rRNA sequencing”. 18S rRNA is the eukaryotic cytosolic homologue of 16S ribosomal RNA in prokaryotes and mitochondria. Sequencing of the 18S rRNA gene can be used for genetic studies as it is highly conserved between different eukaryotic species, but it is not present in bacteria and archaea species. In addition to highly conserved regions, the 18S rRNA gene also comprises nine hypervariable regions (V1-V9) that vary by species. 18S rRNA gene sequencing typically comprises using a plurality of universal primers that bind to conserved regions of the 18S rRNA gene (e.g., conserved among fungi-specific 18S rRNA), PCR amplifying the eukaryotic 18S rRNA gene regions (including hypervariable regions), and sequencing the amplified 18S rRNA genes with a next-generation sequencing technology as described herein. In some embodiments, human 18S rRNA sequences can be excluded from any analysis, or primers specific for fungal 18S rRNA can be used (see also e.g., Banos et al., BMC Microbiol. 2018 Nov. 20; 18(1):190; U.S. Pat. Nos. 6,180,339 and 9,434,986, which are incorporated by reference in their entireties).

[0199] In some embodiments of any of the aspects, a polypeptide, nucleic acid, or cell as described herein can be engineered. As used herein, “engineered” refers to the aspect of having been manipulated by the hand of man. For example, a polypeptide is considered to be “engineered” when at least one aspect of the polypeptide, e.g., its sequence, has been manipulated by the hand of man to differ from the aspect as it exists in nature. As is common practice and is understood by those in the art, progeny of an engineered cell are typically still referred to as “engineered” even though the actual manipulation was performed on a prior entity.

[0200] As used herein, the term “pharmaceutical composition” refers to the active agent in combination with a pharmaceutically acceptable carrier e.g. a carrier commonly used in the pharmaceutical industry. The phrase “pharmaceutically acceptable” is employed herein to refer to those compounds, materials, compositions, and/or dosage forms which are, within the scope of sound medical judgment, suitable for use in contact with the tissues of human beings and animals without excessive toxicity, irritation, allergic response, or other problem or complication, commensurate with a reasonable benefit/risk ratio. In some embodiments of any of the aspects, a pharmaceutically acceptable carrier can be a carrier other than water. In some embodiments of any of the aspects, a pharmaceutically acceptable carrier can be a cream, emulsion, gel, liposome, nanoparticle, and/or ointment. In some embodiments of any of the aspects, a pharmaceutically acceptable carrier can be an artificial or engineered carrier, e.g., a carrier that the active ingredient would not be found to occur in or within in nature.

[0201] The term “statistically significant” or “significantly” refers to statistical significance and generally means a two standard deviation (2SD) or greater difference.

[0202] Other than in the operating examples, or where otherwise indicated, all numbers expressing quantities of ingredients or reaction conditions used herein should be understood as modified in all instances by the term “about.” The term “about” when used in connection with percentages can mean±1%.

[0203] As used herein, the term “comprising” means that other elements can also be present in addition to the defined elements presented. The use of “comprising” indicates inclusion rather than limitation.

[0204] The term “consisting of” refers to compositions, methods, and respective components thereof as described herein, which are exclusive of any element not recited in that description of the embodiment.

[0205] As used herein the term “consisting essentially of” refers to those elements required for a given embodiment. The term permits the presence of additional elements that do not materially affect the basic and novel or functional characteristic(s) of that embodiment of the invention.

[0206] As used herein, the term “corresponding to” refers to an amino acid or nucleotide at the enumerated position in a first polypeptide or nucleic acid, or an amino acid or nucleotide that is equivalent to an enumerated amino acid or nucleotide in a second polypeptide or nucleic acid. Equivalent enumerated amino acids or nucleotides can be determined by alignment of candidate sequences using degree of homology programs known in the art, e.g., BLAST.

[0207] The singular terms “a,” “an,” and “the” include plural referents unless context clearly indicates otherwise. Similarly, the word “or” is intended to include “and” unless the context clearly indicates otherwise. Although methods and materials similar or equivalent to those described herein can be used in the practice or testing of this disclosure, suitable methods and materials are described below. The abbreviation, “e.g.” is derived from the Latin exempli gratia, and is used herein to indicate a non-limiting example. Thus, the abbreviation “e.g.” is synonymous with the term “for example.”

### Queuine

[0208] “Queuine” is a hypermodified nucleobase found in the first (or wobble) position of the anticodon of tRNAs specific for Asn, Asp, His, and Tyr, in most eukaryotes and prokaryotes. Queuine is also known as “Q base” or 2-amino-5-((((1S,4S,5R)-4,5-dihydroxy-2-cyclopenten-1-yl)amino)methyl)-1,7-dihydro-4H-pyrrolo(2,3-d)pyrimidin-4-one. Queuine has the chemical structure of formula (I) below.

[chemical structure]

[0209] Analogs and derivatives of queuine are discussed further herein in the section titled “Queuine Analogs, Queuine Precursors, and Queuine-Related Metabolites,” below.

[0210] FIG. 1, Panel B illustrates an exemplary CNS metabolic pathway targeted within the technology described herein, defined herein as a “queuine-dependent monoamine neurotransmitter synthesis pathway”. Queuine is a modified nucleobase utilized by all eukaryotic organisms but produced exclusively by bacteria. While it is possible for queuine to be acquired through the diet, most, if not all, foods exhibit a low level of bioavailable queuine (see e.g., Example 1). Accordingly, bacteria in the gut microbiome produce the majority, if not all, of queuine that enters the bloodstream and crosses the blood brain barrier. Among the important activities described here for queuine, in regulating CNS function and mediating cognitive and mental health disorders in cases of queuine deficiency, queuine is involved in regenerating tetrahydrobiopterin (BH₄) from its oxidation product dihydrobiopterin (BH₂). BH₄ is essential for the synthesis of the monoamine neurotransmitters serotonin, norepinephrine, dopamine, melatonin, and nitric oxide (see e.g., FIG. 2A-2B).

[0211] Queuine is a modified nucleobase that richly illustrates the nature of symbiotic interdependence between microbes and their hosts. Queuine is synthesized exclusively by bacteria, but is utilized by nearly all eukaryotic organisms. Queuine promotes accurate translation of mRNA into peptides, enzymes, and proteins, ordinarily by hosts salvaging the compound from the GI tract and incorporating it as the nucleoside form (queuosine) into the anticodon of certain tRNAs (see e.g., Fergus, C., Barnes, D., Algasem, M. A. & Kelly, V. P. The queuine micronutrient: charting a course from microbe to man. Nutrients 7, 2897-2929).

[0212] It has been demonstrated in mice that administration of exogenous queuine is essential for the biosynthesis of the queuosine-tRNAs (see e.g., Reyniers J P, et al., (1981), J. Biol. Chem. 256; 22, 11591-11594). Intraperitoneal administration of queuine to deficient mice resulted in a corresponding increase in (Q+)tRNA^{His} and (Q+)tRNA^{Asn} percentages of total (Q−)tRNA^{His} and (Q−)tRNA^{Asn}, respectively, in the liver (see e.g., FIG. 5). Similar results are predicted for humans (see e.g., FIG. 6). Oral administration of queuine produced a similar result in mice (see e.g., FIG. 7) and is also expected to produce a similar result in humans (see e.g., FIG. 8).

[0213] In bacteria, queuine conversion is affected by metabolic conversions of a 7-(aminomethyl)-7-deazaguanine, which is substituted for a guanine at position 34 (the “wobble” nucleotide) by a guanine transglycosylase. While this pathway is not known to occur in eukaryotes, the product of this pathway is critically significant in the metabolism of higher organisms.

[0214] Because queuine is essential for normal mammalian homeostasis but is not produced by the body, it is generally characterized as a “vitamin”. While queuine can be obtained from the diet, concentrations are generally small and highly variable across food sources. As a result, it has been previously undetermined whether the average diet can provide enough queuine to compensate for a deficiency of queuine production by the microbiome. To the extent that queuine is a nutrient sometimes classified as a vitamin, compositions as described herein that promote an increase in queuine production, e.g., in the gut, can be considered nutritional supplements.

[0215] The present disclosure provides for delivering a composition of one or more live bacteria, dead bacteria, spent medium(s) derived from a bacteria, cell pellet(s) of a bacteria, purified protein(s) produced by a bacteria, prebiotics, queuine, queuine analogs, queuine precursors, or combinations thereof, to increase queuine levels of the mammalian host. In some embodiments, a composition comprising a purified queuine-associated metabolite(s) produced by bacteria is administered to treat a queuine-associated disease or disorder as described herein; although such a metabolite does not necessarily increase the level of queuine, the metabolite can still be effective in treating a queuine-associated disease or disorder.

[0216] The present disclosure also provides methods for identifying mammalian subjects in need of the composition of one or more live bacteria, dead bacteria, spent medium(s) derived from bacteria, cell pellet(s) of bacteria, purified protein(s) produced by bacteria, prebiotics, queuine, queuine analogs, queuine precursors, or combinations thereof, to increase queuine levels of the mammalian host. In some embodiments, a method is described for identifying mammalian subjects in need of a composition comprising a purified queuine-associated metabolite(s) produced by bacteria to treat a queuine-associated disease or disorder as described herein

### Queuine-Producing Bacteria

[0217] In some embodiments the present disclosure provides one or more non-pathogenic queuine-producing bacterial strains (e.g., purified strains) and/or their derivatives (e.g. live bacteria, dead bacteria, spent medium(s) derived from a bacteria, cell pellet(s) of a bacteria, purified metabolite(s) produced by bacteria, purified protein(s) produced by a bacteria, or combinations thereof) and compositions comprising the same for administration to a subject in need thereof. The bacteria can be naturally occurring, or can be engineered (e.g., through strain engineering or selection) to produce queuine. In some embodiments, one strain of queuine-producing bacteria can be administered to a subject in need thereof. In some embodiments, multiple strains of queuine-producing bacteria can be administered to a subject in need thereof. In some embodiments, the one or more bacteria (e.g., purified bacteria) can act synergistically. For instance, the multiple bacteria can act synergistically to produce high levels of queuine, via, including but not limited to, cross feeding of nutrients or metabolites (including one or more queuine precursors) important for queuine production or via supporting growth or survival of queuine-producing bacteria. Accordingly, any one, or any combination of the queuine-producing bacteria described herein can be administered to a subject in need thereof. In one embodiment, a rationally designed consortium of bacteria can be assembled that in total encodes and expresses the enzymes sufficient to produce queuine.

[0218] In some embodiments, the bacteria described herein can produce queuine at or under physiologically relevant conditions, such as under the conditions of the human gut. In some embodiments, a pH relevant to the human gut is between about 4.5 and about 7.5. For instance, the pH can be about 4.5, 5.0, 5.5., 6.0, 6.5, 7.0 7.5, or any value between about 4.5 and 7.5. In some embodiments, the physiologically relevant conditions of the human gut include being exposed to carbon sources, nitrogen sources, or micronutrients found in the human gut (such as host-derived glycoproteins like mucin) or those in a typical human diet (e.g. complex or simple glycans).

[0219] In some embodiments, queuine producing bacteria are identified by the presence of genes involved in queuine biosynthesis (see e.g., FIG. 3), using genome sequencing, qPCR, or other related methods. In some embodiments, the queuine biosynthesis genes include but are not limited to folE, QueD, QueE, QueC, QueF, tgt, QueA, and QueG or QueH. In some embodiments, a queuine producing bacteria is classified as such by having 1, 2, 3, 4, 5, 6, 7, 8, or 9 of the genes involved in queuine biosynthesis (see e.g., FIG. 3, Table 1). In some embodiments, preference is given to bacteria that possess QueD, QueE, QueC, QueF, and tgt. In some embodiments, the genes encoding an enzyme involved in queuine biosynthesis are of at least 50% amino acid sequence similarity with the representative sequences SEQ ID NOs: 3660-82283 (e.g., at least 60% similarity, at least 70% similarity, at least 80% similarity, at least 90% similarity, at least 91% similarity, at least 92% similarity, at least 93% similarity, at least 94% similarity, at least 95% similarity, at least 96% similarity, at least 97% similarity, at least 98% similarity, at least 99% similarity, at least 99.5% similarity, at least 99.9% similarity, or 100% similarity). Enzymes produced by queuine biosynthesis genes from other species of bacteria will catalyze the same reactions as those of the reference or representative enzymes.

[0220] Table 1 highlights different categorizations of bacteria, based on the presence of genes involved in queuine biosynthesis and/or presence in the human gastrointestinal tract.

TABLE 1

| Gene | folE | QueD | QueE | QueC | QueF | tgt | QueA | QueG/H | Classification |
|---|---|---|---|---|---|---|---|---|---|
| Organism is assigned | + | + | + | + | + | + | + | + | Definite |
| (+) status for a given | | | | | | | | | Producer |
| gene if gene is present | +/− | + | + | + | + | + | +/− | +/− | Probable |
| in ≥50% of species | | | | | | | | | Producer |
| isolates. (−) otherwise. | +/− | + (any 3-4) | | | | + | +/− | +/− | Potential |
| | + (any 5 or more) | | | | | | | | Producer |
| (+/−) indicates that the | +/− | +/− | − | | | + | +/− | +/− | PreQ₁ |
| gene may be present or | | | | | | | | | Scavenger |
| absent in a microbe of | | | | | | | | | |
| that classification, as | | | | | | | | | |
| long as all other | | | | | | | | | |
| conditions of | | | | | | | | | |
| classification are met. | | | | | | | | | |

[0221] Table 2 lists Sequence IDs corresponding to bacteria 16S rRNA sequences identified to be queuine producing bacteria, human gut queuine producing bacteria, keystone human gut queuine producing bacteria, amino acid sequences for representative enzymes involved in the queuine biosynthesis pathway, bacterial genes involved in endozepine biosynthesis, 16S rRNA sequences of examples of endozepine producing bacteria or yeast, bacterial genes involved in siderophore biosynthesis, and 16S or 18S rRNA sequences of examples of endozepine producing bacteria or yeast.

TABLE 2
SEQ ID NO Key

| | | SEQ ID |
|---|---|---|
| Target | Description | NO |
| Queuine | Keystone human gut queuine producing bacteria (16S rRNA sequence) | 0001-0078 |
| | Human gut queuine producing bacteria (16S rRNA sequence) | 0001-0406 |
| | Queuine producing bacteria (16S rRNA sequence) | 0001-3659 |
| | GTP cyclohydrolase (folE; EC 3.5.4.16) | 3660- |
| | | 16762 |
| | 6-carboxy-5,6,7,8-tetrahydrobiopterin synthase (QueD; EC 4.1.2.50) | 16763- |
| | | 27170 |
| | 7-carboxy-7-deazaguanine synthase (QueE; EC 4.3.99.3) | 27171- |
| | | 35392 |
| | 7-cyano-7-deazaguanine synthase, PreQ0 synthase (QueC; EC 6.3.4.20) | 35393- |
| | | 43473 |
| | 7-cyano-7-deazaguanine reductase, PreQ0 reductase (QueF; EC 1.7.1.13) | 43474- |
| | | 50906 |
| | tRNA guanine transglycosylase, bacterial tRNA guanine transglycosylase | 50907- |
| | (TGT; EC 2.4.2.29) | 62499 |
| | S-adenosylmethionine:tRNA ribosyltransferase-isomerase (QueA; EC | 62500- |
| | 2.4.99.17) | 73907 |
| | epoxyqueuosine reductase (QueG or QueH; EC 1.17.99.6) | 73908- |
| | | 82283 |
| | PreQ1_1_Riboswitch | 90761- |
| | | 91292 |
| | PreQ1_2_Riboswitch | 91293- |
| | | 91361 |
| | PreQ1_3_Riboswitch | 91362- |
| | | 91398 |
| Endozepine | Endozepine producing bacteria or yeast (16S/18S rRNA sequence) | 91404- |
| | | 91406 |
| | Tryptophan_Halogenases | 82284- |
| | | 90702 |
| | Tomaymycin biosynthetic gene cluster | 90703- |
| | | 90719 |
| | Viridicatin biosynthetic gene cluster | 90720- |
| | | 90734 |
| | Sibiromycin biosynthetic gene cluster | 90735- |
| | | 90760 |
| | Pyrroloquinoline precursor producing bacteria (16S rRNA sequence) | 95264- |
| | | 95291 |
| | Pyrroloquinoline precursor gene | 95292- |
| | | 95321 |
| Heavy | Siderophore producing bacteria (16S rRNA sequence) | 91399- |
| Metals | | 91403 |
| | 2,3-dihydro-2,3-dihydroxybenzoate dehydrogenase (entA; EC: 1.3.1.28) | 91407- |
| | | 92334 |
| | isochorismatase (entB; EC: 3.3.2.1) | 92335- |
| | | 93030 |
| | enterobactin synthetase component D (entD; EC: 6.3.2.14) | 93031- |
| | | 93128 |
| | salicylate biosynthesis/isochorismate synthase (pchA; EC 5.4.4.2) | 93129- |
| | | 95220 |
| | Isochorismate pyruvate lyase (pchB; EC: 4.2.99.21) | 95221- |
| | | 95263 |

[0222] In some embodiments, the queuine producing bacteria can be identified by having a 16S nucleic acid sequence with a substantial percent identity to the 16S sequences of SEQ ID NOs: 0001-3659, which have been found to possess queuine producing genes encoded in their genomes. In some embodiments, the queuine-producing bacteria can have at least 90% 16S sequence identity to a 16S sequence given in Table 2 (e.g., at least 91% identity, at least 92% identity, at least 93% identity, at least 94% identity, at least 95% identity, at least 96% identity, at least 97% identity, at least 98% identity, at least 99% identity, at least 99.5% identity, at least 99.9% identity, or 100% identity).

[0223] In some embodiments, the queuine-producing bacteria have been exemplified to include members of the human gut microbiome (henceforth known as “human gut queuine producing bacteria”). These bacteria include bacteria identified to be found in human fecal samples and/or cecal samples by metagenomics or cultivation based methods. In some embodiments, the human gut queuine producing bacteria are non-pathogenic bacteria belonging to a genus selected from the group consisting of: Acetobacter, Achromobacter, Acidaminococcus, Acinetobacter, Adlercreutzia, Aeribacillus, Aeromonas, Aggregatibacter, Akkermansia, Alistipes, Allisonella, Anaeroglobus, Anaerostipes, Aneurinibacillus, Anoxybacillus, Asaccharobacter, Bacillus, Bacteroides, Barnesiella, Bilophila, Blautia, Bordetella, Brenneria, Brevibacillus, Brevundimonas, Butyricimonas, Campylobacter, Cedecea, Chromohalobacter, Citrobacter, Clostridium, Coprococcus, Cronobacter, Delftia, Desulfovibrio, Dialister, Enterobacter, Enterorhabdus, Erysipelatoclostridium, Escherichia, Geobacillus, Haemophilus, Hafnia, Halobacillus, Helicobacter, Intestinibacter, Klebsiella, Kluyvera, Kosakonia, Kushneria, Lachnospira, Lachnotalea, Lactobacillus, Leclercia, Lelliottia, Litorilituus, Lysinibacillus, Lysobacter, Megasphaera, Micrococcus, Mitsuokella, Moellerella, Monoglobus, Moraxella, Morganella, Neisseria, Nosocomiicoccus, Noviherbaspirillum, Oceanobacillus, Ochrobactrum, Odoribacter, Oxalobacter, Paenibacillus, Pantoea, Parabacteroides, Paraprevotella, Parasutterella, Peptoniphilus, Planococcus, Porphyromonas, Prevotella, Proteus, Providencia, Pseudomonas, Psychrobacter, Raoultella, Roseomonas, Ruminococcus, Salinisphaera, Salinivibrio, Salmonella, Selenomonas, Senegalimassilia, Serratia, Shewanella, Shigella, Sphingomonas, Staphylococcus, Stenotrophomonas, Streptococcus, Succiniclasticum, Terribacillus, Thermotalea, Turicibacter, Veillonella, Vibrio, Victivallis, Virgibacillus, and Yersinia.

[0224] In some embodiments, the human gut queuine producing bacteria are non-pathogenic bacteria belonging to a species selected from the group consisting of: Acetobacter pasteurianus, Achromobacter xylosoxidans, Acidaminococcus fermentans, Acidaminococcus intestini, Acinetobacter baumannii, Acinetobacter calcoaceticus, Acinetobacter junii, Acinetobacter lwoffii, Acinetobacter pittii, Acinetobacter radioresistens, Acinetobacter schindleri, Acinetobacter towneri, Acinetobacter ursingii, Acinetobacter variabilis, Adlercreutzia equolifaciens, Aeribacillus pallidus, Aeromonas caviae, Aeromonas enteropelogenes, Aeromonas hydrophila, Aeromonas jandaei, Aeromonas salmonicida, Aeromonas schubertii, Aeromonas veronii, Aggregatibacter aphrophilus, Akkermansia muciniphila, Alistipes onderdonkii, Alistipes putredinis, Allisonella histaminiformans, Anaeroglobus geminatus, Anaerostipes caccae, Anaerostipes hadrus, Aneurinibacillus aneurinilyticus, Aneurinibacillus migulanus, Anoxybacillus flavithermus, Asaccharobacter celatus, Bacillus altitudinis, Bacillus amyloliquefaciens, Bacillus aquimaris, Bacillus atrophaeus, Bacillus badius, Bacillus bataviensis, Bacillus cereus, Bacillus circulans, Bacillus clausii, Bacillus coagulans, Bacillus cohnii, Bacillus endophyticus, Bacillus firmus, Bacillus flexus, Bacillus fordii, Bacillus galactosidilyticus, Bacillus halodurans, Bacillus infantis, Bacillus koreensis, Bacillus kyonggiensis, Bacillus lentus, Bacillus licheniformis, Bacillus litoralis, Bacillus marisflavi, Bacillus megaterium, Bacillus mojavensis, Bacillus mycoides, Bacillus nealsonii, Bacillus okuhidensis, Bacillus pseudofirmus, Bacillus pseudomycoides, Bacillus pumilus, Bacillus simplex, Bacillus sonorensis, Bacillus subterraneus, Bacillus subtilis, Bacillus thuringiensis, Bacillus timonensis, Bacillus vallismortis, Bacillus vietnamensis, Bacillus weihenstephanensis, Bacteroides caccae, Bacteroides cellulosilyticus, Bacteroides clarus, Bacteroides coprocola, Bacteroides dorei, Bacteroides eggerthii, Bacteroides faecis, Bacteroides fragilis, Bacteroides intestinalis, Bacteroides massiliensis, Bacteroides nordii, Bacteroides ovatus, Bacteroides plebeius, Bacteroides salyersiae, Bacteroides stercoris, Bacteroides thetaiotaomicron, Bacteroides uniformis, Bacteroides vulgatus, Bacteroides xylanisolvens, Bacteroides xylanolyticus, Barnesiella intestinihominis, Barnesiella viscericola, Bilophila wadsworthia, Blautia luti, Bordetella bronchiseptica, Bordetella trematum, Brenneria alni, Brevibacillus agri, Brevibacillus brevis, Brevibacillus choshinensis, Brevibacillus formosus, Brevibacillus laterosporus, Brevibacillus parabrevis, Brevundimonas diminuta, Butyricimonas virosa, Campylobacter coli, Campylobacter concisus, Campylobacter curvus, Campylobacter gracilis, Campylobacter jejuni, Campylobacter showae, Campylobacter ureolyticus, Cedecea lapagei, Cedecea neteri, Chromohalobacter japonicus, Citrobacter amalonaticus, Citrobacter braakii, Citrobacter farmeri, Citrobacter freundii, Citrobacter gillenii, Citrobacter koseri, Citrobacter murliniae, Citrobacter youngae, Clostridium acetireducens, Clostridium bartlettii, Clostridium beijerinckii, Clostridium botulinum, Clostridium butyricum, Clostridium carboxidivorans, Clostridium colicanis, Clostridium diolis, Clostridium disporicum, Clostridium novyi, Clostridium ramosum, Clostridium sporogenes, Clostridium thermocellum, Coprococcus catus, Coprococcus eutactus, Cronobacter sakazakii, Delftia tsuruhatensis, Desulfovibrio desulfuricans, Desulfovibrio fairfieldensis, Desulfovibrio piger, Dialister invisus, Dialister pneumosintes, Enterobacter aerogenes, Enterobacter asburiae, Enterobacter cloacae, Enterobacter hormaechei, Enterobacter kobei, Enterobacter ludwigii, Enterorhabdus caecimuris, Erysipelatoclostridium ramosum, Escherichia coli, Escherichiafergusonii, Escherichia hermannii, Escherichia marmotae, Geobacillus stearothermophilus, Haemophilus influenzae, Haemophilus pittmaniae, Hafnia alvei, Halobacillus dabanensis, Halobacillus karajensis, Halobacillus salinus, Halobacillus trueperi, Helicobacter pylori, Intestinibacter bartlettii, Klebsiella oxytoca, Klebsiella pneumoniae, Klebsiella variicola, Kluyvera cryocrescens, Kluyvera georgiana, Kosakonia cowanii, Kushneria sinocarnis, Lachnospira pectinoschiza, Lachnotalea glycerini, Lactobacillus mali, Leclercia adecarboxylata, Lelliottia amnigena, Litorilituus sediminis, Lysinibacillus boronitolerans, Lysinibacillus fusiformis, Lysinibacillus massiliensis, Lysinibacillus sphaericus, Lysinibacillus xylanilyticus, Lysobacter soli, Megasphaera elsdenii, Megasphaera micronuciformis, Micrococcus lylae, Mitsuokella jalaludinii, Moellerella wisconsensis, Monoglobus pectinilyticus, Moraxella osloensis, Morganella morganii, Neisseria canis, Neisseria cinerea, Neisseria elongata, Neisseria flavescens, Neisseria gonorrhoeae, Neisseria macacae, Neisseria meningitidis, Neisseria mucosa, Neisseria perflava, Neisseria subflava, Nosocomiicoccus massiliensis, Noviherbaspirillum denitrificans, Oceanobacillus iheyensis, Oceanobacillus oncorhynchi, Oceanobacillus sojae, Ochrobactrum anthropi, Odoribacter splanchnicus, Oxalobacter formigenes, Paenibacillus alvei, Paenibacillus amylolyticus, Paenibacillus barcinonensis, Paenibacillus barengoltzii, Paenibacillus daejeonensis, Paenibacillus dendritiformis, Paenibacillus glucanolyticus, Paenibacillus illinoisensis, Paenibacillus lactis, Paenibacillus larvae, Paenibacillus lautus, Paenibacillus macerans, Paenibacillus naphthalenovorans, Paenibacillus odorifer, Paenibacillus pabuli, Paenibacillus pasadenensis, Paenibacillus polymyxa, Paenibacillus rhizosphaerae, Paenibacillus stellifer, Paenibacillus thiaminolyticus, Paenibacillus typhae, Pantoea agglomerans, Parabacteroides distasonis, Parabacteroides goldsteinii, Parabacteroides gordonii, Parabacteroides johnsonii, Parabacteroides merdae, Paraprevotella clara, Parasutterella excrementihominis, Peptoniphilus asaccharolyticus, Peptoniphilus indolicus, Planococcus rifetoensis, Porphyromonas asaccharolytica, Porphyromonas bennonis, Porphyromonas somerae, Prevotella bivia, Prevotella buccae, Prevotella buccalis, Prevotella copri, Prevotella timonensis, Proteus mirabilis, Proteus penneri, Proteus vulgaris, Providencia alcalifaciens, Providencia heimbachae, Providencia rettgeri, Providencia stuartii, Pseudomonas aeruginosa, Pseudomonas alcaligenes, Pseudomonas bauzanensis, Pseudomonas caricapapayae, Pseudomonas chlororaphis, Pseudomonas fluorescens, Pseudomonas fragi, Pseudomonas fulva, Pseudomonas gessardii, Pseudomonas japonica, Pseudomonas libanensis, Pseudomonas lundensis, Pseudomonas luteola, Pseudomonas migulae, Pseudomonas monteilii, Pseudomonas mosselii, Pseudomonas oleovorans, Pseudomonas oryzihabitans, Pseudomonas putida, Pseudomonas rhodesiae, Pseudomonas saudiphocaensis, Pseudomonas stutzeri, Pseudomonas taetrolens, Pseudomonas tolaasii, Pseudomonas xanthomarina, Psychrobacter phenylpyruvicus, Raoultella ornithinolytica, Raoultella planticola, Roseomonas gilardii, Roseomonas mucosa, Ruminococcus albus, Ruminococcus callidus, Ruminococcus flavefaciens, Ruminococcus lactaris, Ruminococcus torques, Salinisphaera halophila, Salinivibrio costicola, Salmonella enterica, Salmonella enteritidis, Salmonella typhi, Selenomonas ruminantium, Selenomonas sputigena, Senegalimassilia anaerobia, Serratia marcescens, Serratia ureilytica, Shewanella xiamenensis, Shigella boydii, Shigella dysenteriae, Shigella flexneri, Shigella sonnei, Sphingomonas aerolata, Staphylococcus arlettae, Staphylococcus aureus, Staphylococcus auricularis, Staphylococcus capitis, Staphylococcus caprae, Staphylococcus carnosus, Staphylococcus cohnii, Staphylococcus condimenti, Staphylococcus devriesei, Staphylococcus epidermidis, Staphylococcus equorum, Staphylococcus gallinarum, Staphylococcus haemolyticus, Staphylococcus hominis, Staphylococcus hyicus, Staphylococcus intermedius, Staphylococcus kloosii, Staphylococcus lentus, Staphylococcus lugdunensis, Staphylococcus nepalensis, Staphylococcus pasteuri, Staphylococcus petrasii, Staphylococcus pettenkoferi, Staphylococcus saccharolyticus, Staphylococcus saprophyticus, Staphylococcus schleiferi, Staphylococcus sciuri, Staphylococcus simiae, Staphylococcus simulans, Staphylococcus succinus, Staphylococcus vitulinus, Staphylococcus warneri, Staphylococcus xylosus, Stenotrophomonas acidaminiphila, Stenotrophomonas maltophilia, Stenotrophomonas rhizophila, Streptococcus australis, Streptococcus bovis, Streptococcus equinus, Streptococcus gallolyticus, Streptococcus infantarius, Streptococcus infantis, Streptococcus lutetiensis, Streptococcus mitis, Streptococcus mutans, Streptococcus oralis, Streptococcus peroris, Streptococcus pseudopneumoniae, Streptococcus salivarius, Streptococcus sobrinus, Streptococcus thermophilus, Streptococcus tigurinus, Streptococcus vestibularis, Succiniclasticum ruminis, Terribacillus aidingensis, Terribacillus halophilus, Thermotalea metallivorans, Turicibacter sanguinis, Veillonella atypica, Veillonella denticariosi, Veillonella dispar, Veillonella parvula, Vibrio cholerae, Victivallis vadensis, Virgibacillus massiliensis, Yersinia bercovieri, Yersinia enterocolitica, Yersinia intermedia, Yersinia kristensenii, and Yersinia mollaretii.

[0225] In some embodiments, the human gut queuine producing bacteria can be identified as having a 16S nucleic acid sequence with a substantial percent identity to the 16S sequences of SEQ ID NOs: 0001-0406. In some embodiments, the human gut queuine-producing bacteria can have at least 90% 16S sequence identity to any of the 16S sequences listed in SEQ ID NOs 0001-0406 (e.g., at least 91% identity, at least 92% identity, at least 93% identity, at least 94% identity, at least 95% identity, at least 96% identity, at least 97% identity, at least 98% identity, at least 99% identity, at least 99.5% identity, at least 99.9% identity, or 100% identity).

[0226] In some embodiments, the human gut queuine producing bacteria have been exemplified or determined to express genes involved in queuine biosynthesis in humans (henceforth known as “keystone human gut queuine producing bacteria”). In some embodiments, these keystone human gut queuine producing bacteria are non-pathogenic bacteria belonging to a genus selected from the group consisting of: Acidaminococcus, Adlercreutzia, Akkermansia, Alloprevotella, Anaerostipes, Arcobacter, Bacteroides, Barnesiella, Bilophila, Butyrivibrio, Campylobacter, Citrobacter, Clostridium, Coprobacter, Coprococcus, Desulfovibrio, Dialister, Dysgonomonas, Enterobacter, Enterorhabdus, Escherichia, Eubacterium, Fusobacterium, Haemophilus, Hafnia, Klebsiella, Megamonas, Megasphaera, Mitsuokella, Odoribacter, Oxalobacter, Parabacteroides, Porphyromonas, Proteus, Ruminococcus, Shigella, Streptococcus, Turicibacter, and Veillonella.

[0227] In some embodiments, the keystone human gut queuine producing bacteria are non-pathogenic bacteria belonging to a species selected from the group consisting of: Acidaminococcus fermentans, Adlercreutzia equolifaciens, Akkermansia muciniphila, Alloprevotella tannerae, Anaerostipes caccae, Anaerostipes hadrus, Arcobacter butzleri, Bacteroides caccae, Bacteroides cellulosilyticus, Bacteroides clarus, Bacteroides coprophilus, Bacteroides dorei, Bacteroides eggerthii, Bacteroides faecis, Bacteroides fragilis, Bacteroides massiliensis, Bacteroides nordii, Bacteroides oleiciplenus, Bacteroides ovatus, Bacteroides plebeius, Bacteroides salanitronis, Bacteroides salyersiae, Bacteroides stercoris, Bacteroides thetaiotaomicron, Bacteroides uniformis, Bacteroides vulgatus, Bacteroides xylanisolvens, Barnesiella intestinihominis, Bilophila wadsworthia, Butyrivibrio crossotus, Campylobacter curvus, Citrobacter freundii, Citrobacter koseri, Clostridium bartelettii, Clostridium ramosum, Coprobacter fastidiosus, Coprococcus catus, Coprococcus eutactus, Desulfovibrio piger, Dialister invisus, Dialister succinatiphilus, Enterobacter aerogenes, Enterobacter cancerogenus, Enterobacter cloacae, Enterorhabdus caecimuris, Escherichia coli, Eubacterium hallii, Fusobacterium mortiferum, Haemophilus pittmaniae, Haemophilus sputorum, Hafnia alvei, Klebsiella oxytoca, Klebsiella pneumoniae, Klebsiella variicola, Megamonas funiformis, Megamonas rupellensis, Megasphaera elsdenii, Megasphaera micronuciformis, Mitsuokella multacida, Odoribacter laneus, Odoribacter splanchnicus, Oxalobacter formigenes, Parabacteroides distasonis, Porphyromonas asaccharolytica, Porphyromonas uenonis, Ruminococcus callidus, Ruminococcus torques, Shigella sonnei, Streptococcus infantis, Streptococcus mitis, Streptococcus oralis, Streptococcus pneumoniae, Streptococcus tigurinus, Turicibacter sanguinis, Veillonella atypica, Veillonella dispar, Veillonella parvula, Dysgonomonas mossii, Proteus mirabilis, and Veillonella ratti.

[0228] In some embodiments, the keystone human gut queuine producing bacteria can be identified as having a 16S nucleic acid sequence with a substantial percent identity to the 16S sequences of SEQ ID NOs 0001-0078. In some embodiments, the human gut queuine-producing bacteria can have at least 90% 16S sequence identity to any of the 16S sequences listed in SEQ ID NOs 0001-0078 (e.g., at least 91% identity, at least 92% identity, at least 93% identity, at least 94% identity, at least 95% identity, at least 96% identity, at least 97% identity, at least 98% identity, at least 99% identity, at least 99.5% identity, at least 99.9% identity, or 100% identity).

[0229] In some embodiments, additional keystone queuine producing bacteria can be identified by surveying human gastrointestinal samples (e.g. fecal samples, tissue biopsies, colonic washes) for RNA encoding queuine biosynthesis genes, and then identifying the bacteria expressing those transcripts. For example, one skilled in the art can leverage human fecal transcriptome sequencing to identify bacterial RNA sequences encoding queuine producing genes that are expressed in humans. These RNA sequences can then be mapped to public or private reference bacterial genomes (see e.g. the Human Microbiome Project website—available on the world wide web at hmpdacc.org/reference_genomes/reference_genomes.php) or genomes assembled de novo from the same samples (e.g., using assembly/annotation tools like Athena, MEGAHIT, Minia (available on the world wide web at github.com/GATB/minia), SPADES), to identify bacteria that express queuine producing genes in a human (“keystone human gut queuine producing bacteria”). See e.g., Bishara, A. et al. High-quality genome sequences of uncultured microbes by assembly of read clouds. Nat Biotechnol, (2018); Li et al. MEGAHIT: an ultra-fast single-node solution for large and complex metagenomics assembly via succinct de Bruijn graph. Bioinformatics 31, 1674-1676, (2015); Bankevich, A. et al. SPAdes: a new genome assembly algorithm and its applications to single-cell sequencing. Journal of computational biology: a journal of computational molecular cell biology 19, 455-477, (2012).

[0230] In some embodiments, the human gut queuine producing bacteria are non-pathogenic bacteria belonging to the genus Blautia, Coprococcus, or Dialister. In some embodiments, the human gut queuine producing bacteria are non-pathogenic bacteria belonging to species selected from the group consisting of: Blautia luti, Coprococcus catus, Coprococcus eutactus, Dialister invisus, or Dialister succinatiphilus. In some embodiments, a composition as described herein comprises Blautia luti (e.g., SEQ ID NO: 154). In some embodiments, a composition as described herein comprises Coprococcus catus (e.g., SEQ ID NO: 37). In some embodiments, a composition as described herein comprises Coprococcus eutactus (e.g., SEQ ID NO: 38). In some embodiments, a composition as described herein comprises Dialister invisus (e.g., SEQ ID NO: 40). In some embodiments, a composition as described herein comprises Dialister succinatiphilus (e.g., SEQ ID NO: 41).

[0231] In some embodiments, the keystone human gut queuine producing bacteria can be identified as having a 16S nucleic acid sequence with a substantial percent identity to the 16S sequences of SEQ ID NOs 37, 38, 40, 41, or 154. In some embodiments, the human gut queuine-producing bacteria can have at least 90% 16S sequence identity to any of the 16S sequences listed in SEQ ID NOs 37, 38, 40, 41, or 154 (e.g., at least 91% identity, at least 92% identity, at least 93% identity, at least 94% identity, at least 95% identity, at least 96% identity, at least 97% identity, at least 98% identity, at least 99% identity, at least 99.5% identity, at least 99.9% identity, or 100% identity).

[0232] In some embodiments, the queuine producing bacteria are engineered to produce queuine constitutively or inducibly on its chromosome (one or multiple sites), a plasmid (high or low copy number), or both. A variety of different host bacteria can be engineered to produce queuine. For instance, in some embodiments, Escherichia coli Nissle 1917 or any probiotic strain, can be genetically modified or selected through evolution to produce queuine or its precursors at a level higher than the unmodified strain, using techniques such as CRISPR or lambda red recombination. In some embodiments, this modification or selection is characterized by alterations to genes encoding the PreQ1 riboswitch regulatory element, which regulates the bacterial cell's queuine synthesis via a feedback mechanism. In some embodiments, the genes encoding the PreQ1 riboswitch regulatory element are of at least 50% sequence identity to SEQ IDs 90761-91398 (e.g., at least 60% identity, at least 70% identity, at least 80% identity, at least 90% identity, at least 91% identity, at least 92% identity, at least 93% identity, at least 94% identity, at least 95% identity, at least 96% identity, at least 97% identity, at least 98% identity, at least 99% identity, at least 99.5% identity, at least 99.9% identity, or 100% identity). In some embodiments, the bacteria (e.g., Escherichia coli Nissle 1917) can be modified to express at least one gene involved in queuine biosynthesis or transport such as, but not limited to, FolE, QueD, QueE, QueC, QueF, bTGT, QueA, QueG, QueH, YhhQ, and/or QueT. In some embodiments, the bacteria (e.g., Escherichia coli Nissle 1917) can be modified to express at least one gene encoding an enzyme involved in queuine biosynthesis, with at least 50% amino acid sequence similarity to the representative sequences SEQ ID NOs 3660-82283 (e.g., at least 60% similarity, at least 70% similarity, at least 80% similarity, at least 90% similarity, at least 91% similarity, at least 92% similarity, at least 93% similarity, at least 94% similarity, at least 95% similarity, at least 96% similarity, at least 97% similarity, at least 98% similarity, at least 99% similarity, at least 99.5% similarity, at least 99.9% similarity, or 100% similarity). Enzymes produced by queuine biosynthesis genes from other species of bacteria will catalyze the same reactions as those of the reference or representative enzymes.

[0233] In some embodiments, the dose of the therapeutic queuine producing bacteria can comprise 1×10⁴ colony forming units (CFUs), 1×10⁵ CFUs, 1×10⁶ CFUs, 1×10⁷ CFUs, 1×10⁸ CFUs, 1×10⁹ CFUs, 1×10¹⁰ CFUs, 1×10¹¹ CFUs or greater than 1×10¹¹ CFUs of the desired bacteria.

[0234] In some embodiments, bacteria are purified prior to incorporation into a composition. For instance, bacteria can be purified so that the population of bacteria is substantially free of other bacteria (e.g., comprises at least 90%, at least 91%, at least 92%, at least 93%, at least 94%, at least 95%, at least 96%, at least 97%, or at least 98%, at least 99% of the specific bacterial strain or strains desired in the composition).

[0235] In some embodiments, the composition is a probiotic or a medical food comprising at least one queuine producing bacteria. The bacteria can be administered, for instance, as a probiotic, as a capsule, tablet, caplet, pill, troche, lozenge, powder, and/or granule. The strain can also be formulated as a nutraceutical, conventional food, medical food, or drug. The queuine producing bacteria can also be administered as part of a fecal transplant or via suppository. In some embodiments, the composition is formulated for delivery to the gut, as described further herein. In some embodiments, the composition further comprises a prebiotic.

[0236] In some embodiments, prebiotics can be delivered to alter the native microbiome to a state of elevated queuine production. This could include delivery of, but is not limited to, the following prebiotics: amino acids (including arginine, glutamate, and ornithine), biotin, fructooligosaccharide, galactooligosaccharides, hemicelluloses (e.g., arabinoxylan, xylan, xyloglucan, and glucomannan), inulin, chitin, lactulose, mannan oligosaccharides, oligofructose-enriched inulin, gums (e.g., guar gum, gum arabic and carrageenan), oligofructose, oligodextrose, tagatose, resistant maltodextrins (e.g., resistant starch), trans-galactooligosaccharide, pectins (e.g., xylogalactouronan, citrus pectin, apple pectin, and rhamnogalacturonan-I), dietary fibers (e.g., soy fiber, sugarbeet fiber, pea fiber, corn bran, and oat fiber) and xylooligosaccharides, polyamines (such as but not limited to spermidine and putrescine), or any combinations of the above. In some embodiments, the prebiotic(s) are combined with queuine-producing bacteria, human gut queuine producing bacteria, or keystone human gut queuine producing bacteria. In some embodiments, the prebiotics are selected so as not to encourage growth or unwanted activity (e.g. virulence factors) of pathogens.

[0237] In some embodiments, the composition or dose unit comprises a pharmaceutically acceptable formulation, including an enteric coating or similar composition to promote survival of or avoid the acidity of the stomach and permit delivery into the small or large intestines.

[0238] In some embodiments, the composition further comprises a pharmaceutically acceptable carrier, wherein the one or more isolated non-pathogenic queuine-producing bacterial strains or an isolated product derived therefrom is present in an amount effective to alter queuine levels in a subject in need thereof. Accordingly, in one aspect, described herein is a pharmaceutical composition comprising queuine, an analog, derivative or precursor thereof, or a combination of any of these, in an amount effective to alter queuine levels in a subject in need thereof, and a pharmaceutically acceptable carrier. In some embodiments, the queuine, analog, derivative or precursor is isolated from a queuine-producing bacterial strain or culture medium in which a queuine-producing bacterial strain has been cultured.

[0239] In some embodiments, a composition comprising one or more isolated, non-pathogenic queuine-producing bacterial strains or an isolated product derived therefrom as described herein further comprises a different therapeutic composition in an amount effective to treat a CNS disease or disorder, non-limiting examples of which are described further herein.

[0240] In some embodiments queuine-producing bacteria are isolated from appropriate samples from where they are predicted to reside. For example, bacteria identified in disclosure as keystone queuine producing bacteria have been isolated from human fecal samples. One skilled in the art would be able to isolate such bacterial taxa from fecal samples using cultivation and identification methods known to trained microbiologists (see e.g., Lagier, J. C. et al. Culturing the human microbiota and culturomics. Nat Rev Microbiol, 540-550, (2018)). These cultivation campaigns can leverage microbiological agars, broths, selective and enrichment conditions (e.g. antibiotics or specific nutrients used by queuine-producing bacteria) to enrich for and/or isolate individual colonies of bacteria. These isolated colonies can be purified and taxonomically identified by 16S rRNA sequencing, to identify which colony or colonies is/are predicted keystone human gut queuine-producing bacteria. These isolates can then be further profiled for suitability as a therapeutic, medical food, or nutraceutical by assessing the presence of desired (e.g., fast growth rates, capability of surviving lyophilization at a recovery >0.1%, capable of growing in commercial manufacturing mediums) and undesired (e.g., history of being a pathogen, antibiotic resistance to clinically relevant antibiotics, mobile elements, toxins, virulence factors, and a strong association with human disease) characteristics.

[0241] In some embodiments, additional keystone human gut queuine producing bacteria can be identified by screening a human-derived strain collection for queuine producing bacteria. As one approach, one skilled in the art can culture a diverse panel of human gut bacteria in multiple bacterial mediums (e.g. nutrient rich, nutrient poor, or environmentally similar to the mammalian gastrointestinal tract (e.g. similar pH, nutritional profiles, or presence of other bacteria and their metabolites)), and then measure queuine, queuine-modified RNA, or queuine-related metabolites (e.g. precursors) in the bacterial supernatant or cell pellet via LC/MS following enzymatic digestion, or other appropriate methods. One such method involves migration of select tRNA species through acrylamide electrophoresis gel infused with N-acrolyl-3-aminophenylboronic acid (“APB Gel”), which causes queuosinylated tRNA to form a separate band from unqueuosinylated tRNA (see e.g., Matuszek, Z. a. P., T. Quantification of Queuosine Modification Levels in tRNA from Human Cells Using APB Gel and Northern Blot. Bio-protocol 9, (2019)). In some embodiments, leveraging a collection of queuine producing bacteria and mediums in which they produce queuine (or queuine related metabolites or queuine precursors), one can furthermore identify prebiotics which further enhance queuine production by these bacteria, by comparing levels of queuine (or queuine related metabolites) in cultures with and without the candidate prebiotics. Similarly, one can employ such a method to identify synergistic combinations of queuine producing bacteria (in which the combination results in higher production of queuine than the organisms alone).

[0242] In some embodiments, leveraging human microbiome sequencing data, one can identify keystone queuine producing bacteria that co-occur within a mammalian host, using computation methods such as Meta-network and MDiNE (see e.g., Yang et al. Meta-network: optimized species-species network analysis for microbial communities. BMC Genomics 20, 187, (2019); McGregor et al. MDiNE: A model to estimate differential co-occurrence networks in microbiome studies. Bioinformatics, (2019)). Without wishing to be bound by theory, keystone queuine producing bacteria that co-occur with humans have a higher likelihood at elevating host queuine levels, as they are not competing for the same ecological niche. Conversely, keystone queuine producing bacteria that do not co-occur are poor candidates for co-administration, as they likely do compete for the same niche. Such predictions can be further supported by leveraging transcriptomic datasets, in which one looks to identify bacteria that both co-occur and express queuine producing genes within the target mammalian host (e.g. a human).

### Queuine Precursors and Queuine-Related Metabolites

[0243] In some embodiments, the present disclosure provides for delivering a composition of queuine, queuine analogs, queuine precursors, queuine-related metabolites, or combinations thereof, to increase queuine levels of or otherwise treat the mammalian host presenting with a queuine-associated mental health disorder or disease. In some embodiments, the present disclosure provides for a method of identifying a mammalian host presenting with a queuine-associated mental health disorder or disease, followed by treating them with a composition of queuine, queuine analogs, queuine precursors, queuine related metabolites, or combinations thereof.

[0244] In some embodiments, queuine, queuine analogs, queuine precursors or combinations thereof, are delivered to an individual in need thereof (described below) at a dose of at least 1 g, at least 500 mg, at least 100 mg, at least 10 mg, at least 1000 μg, at least 500 μg, at least 250 μg, or at least 100 μg.

[0245] In some embodiments, the composition of queuine, queuine analogs, queuine precursors, queuine related metabolites, or combinations thereof comprise a pharmaceutically acceptable formulation, including an enteric coating or similar composition to promote survival of or avoid the acidity of the stomach and permit delivery into the small or large intestines. In some embodiments, the composition can be delivered as a capsule, tablet, caplet, pill, troche, lozenge, powder, and/or granule. In some embodiments the composition of queuine, queuine analogs, queuine precursors, or combinations thereof can be delivered intravenously, through a patch, or in a slow release format. The composition can also be formulated as a nutraceutical, conventional food, medical food, or drug.

[0246] In some embodiments, the queuine analogs include structural variants of queuine or a molecule or macromolecule comprising queuine or structural variants thereof that retains one or more activities of queuine (e.g., tRNA-queuosine translation, regeneration of BH4, synthesis of monoamine neurotransmitters, etc.). Non-limiting examples of queuine structural variants are described further herein. In some embodiments, the queuine analogs are in a form adapted for oral use or administration. In particular, a queuine analog can be part of a covalent or ionic complex, such as queuosine, a mannosyl queuosine, galactosyl queuosine, or a glutamyl queuosine. It can also be administered in the form of tRNA-queuosine or an oligonucleotide comprising queuosine. Among these derivatives are the glycosylated derivatives of queuine and queuosine, such as mannosylqueuine, galactosylqueuine, and aminoacylated derivatives such as glutamylqueuine.

[0247] In some embodiments a queuine precursor refers, for example, to its intermediate precursor, epoxyqueuine, whether in free form or in the form of a covalent complex with molecules or macromolecules. In some embodiments, a precursor of queuine refers to any molecule listed in FIG. 3. In some embodiments precursors of queuine includes cofactors required for queuine biosynthesis in bacteria, such as Vitamin B-12, generally referred to as cobalamin, which is required for a functional QueG. Cobalamin is one of the most complex small molecules found in nature. Vitamin B-12 is a cofactor with four pyrrole rings that has a central cobalt ion bonded to four equatorial nitrogen ligands from the corrin ring. Uroporphyrinogen III (Uro III) is a precursor of cobalamins. The first part of the biosynthetic pathway for cobalamin involves the conversion of Uro III to coenzyme B12 intermediate cobinamide (cobI), followed by the synthesis of dimethylbenzimidazole (Dmb) from flavin precursors, concluding with covalent joining of cobI with Dmb and a phosphoribosyl group (see e.g., Roth, Lawrence, & Bobik, Cobalamin (coenzyme B12): synthesis and biological significance. Annu Rev Microbiol 50, 137-181, (1996); Lawrence & Roth, Evolution of coenzyme B12 synthesis among enteric bacteria: evidence for loss and reacquisition of a multigene complex. Genetics 142, 11-24 (1996)). There are various naturally occurring analogs of cobalamin that comprise a hydroxyl (—OH), methyl (—CH3), or a 5′-deoxyadenosyl group, such as methylcobalamin, hydroxocobalamin, and 5-deoxyadenosylcobalamin, including those that are found in human fecal samples. Without wishing to be bound by theory, it is likely that multiple analogs of cobalamin can be used as a cofactor for QueG in the mammalian gastrointestinal tract, and can thus influence queuine biosynthesis.

[0248] In some embodiments, a queuine-related metabolite refers to any metabolite directly or indirectly influenced by queuine levels in the host. In some embodiments, biopterins (particularly BH2+BH4); monoamine neurotransmitters; imidazoleamines, e.g. histamine; catecholamines, e.g. adrenaline (epinephrine), dopamine, noradrenaline (norepinephrine); indolamines, e.g. serotonin (5-HT), melatonin, nitric oxide, phenylalanine, tyrosine, tryptophan, kynurenine, kynurenic acid, quinolinic acid, picolinic acid, melanin, or combinations thereof, are queuine-related metabolites. In some embodiments, queuine-related metabolites can be high or low in a target population (e.g. high kynurenine is likely considered an indicator of poor functional serotonin biosynthesis).

### Queuine Analogs and Derivatives

[0249] It is specifically contemplated that one or more queuine structural analogs or derivatives that share the functional properties with queuine can be used in a method as described herein in place of, or in addition to queuine.

[0250] In some embodiments, a queuine-related analog or derivative can comprise compounds of formula (II), shown below, and pharmaceutically acceptable salts and solvates thereof.

[chemical structure]

[0251] In some embodiments, R¹ is selected from H and CH₃. In some embodiments, R² is selected from H, C₄H₉ alkyl, C₆H₁₃ alkyl and C₃H₆-phenyl, said Phenyl optionally substituted by OH or OCH₃, X is O or SY is C, N or S. Preferably alkyl chains are straight chain. In a preferred embodiment, R¹ is H. In a preferred embodiment R² is selected from C₄H₉ alkyl, C₆H₁₃ alkyl and C₃H₆-phenyl. In a particularly preferred embodiment R² is C₃H₆-phenyl. In a preferred embodiment X is O. In a preferred embodiment Y is C or N. In a particularly preferred embodiment Y is N. Particularly preferred are those compounds of formula (II) where: X is OY is NR¹ is H; and R² is selected from C₄H₉ alkyl, C₆H₁₃ alkyl and C₃H₆-phenyl. In a particularly preferred embodiment R² is C₃H₆-phenyl

[0252] Particularly preferred compounds comprising queuine analogs or derivatives include but are not limited to: (a) 2-amino-5-((butylamino)methyl)-3,7-dihydro-4H-pyrrolo[2,3-d]pyrimidin-4-one; (b) N-((2-amino-4-oxo-4,7-dihydro-3H-pyrrolo[2,3-d]pyrimidin-5-yl)methyl)butan-1-aminium chloride; (c) 2-amino-5-((hexylamino)methyl)-3,7-dihydro-4H-pyrrolo[2,3-d]pyrimidin-4-one; (d) N-((2-amino-4-oxo-4,7-dihydro-3H-pyrrolo[2,3-d]pyrimidin-5-yl)methyl)hexan-1-aminium chloride; (e) Queuine, 2-amino-5-((((1S,4S,5R)-4,5-dihydroxycyclopent-2-en-1-yl)amino)methyl)-3,7-dihydro-4H-pyrrolo[2,3-d]pyrimidin-4-one; (f) Queuine HCl 2-Amino-5-[[[(1S,4S,5R)-4,5-dihydroxy-2-cyclopenten-1-yl]amino]methyl]-1,7-dihydro-4H-pyrrolo[2,3-d]pyrimidin-4-one, monohydrochloride; (g) 2-amino-5-(((3-phenylpropyl)amino)methyl)-3,7-dihydro-4H-pyrrolo[2,3-d]pyrimidin-4-one; or (h) N-((2-amino-4-oxo-4,7-dihydro-3H-pyrrolo[2,3-d]pyrimidin-5-yl)methyl)-3-phenylpropan-1-aminium chloride.

[0253] Suitable salts include salts of acidic or basic groups present in compounds of formula (II). The compounds of formula (II) that are basic in nature are capable of forming a wide variety of salts with various inorganic and organic acids. The acids that may be used to prepare pharmaceutically acceptable acid addition salts of such basic compounds of formula (II) are those that form non-toxic acid addition salts. Suitable salts include acetate, benzenesulfonate, benzoate, bicarbonate, bisulfate, bitartrate, borate, bromide, calcium edentate, camsylate, carbonate, chloride, clavulanate, citrate, dihydrochloride edentate, edisylate, estolate, esylate, ethylsuccinate, fumarate, gluceptate, gluconate, glutamate, glycollylarsanilate, hexylresorcinate, hydrabamine, hydrobromide, hydrochloride, iodide isothionate, lactate, lactobionate, laurate, malate, maleate, mandelate, mesylate, methylsulfate, mucate, napsylate, nitrate, oleate, oxalate, pamoate, palmitate, pantothenate, phosphate, diphosphate, polygalacturonate, salicylate, stearate, subacetate, succinate, tannate, tartrate, teoclate, tosylate and valerate salts.

[0254] In some embodiments, a queuine-related analog or derivative can comprise compounds of formula (III), shown below, and pharmaceutically acceptable salts and solvates thereof.

[chemical structure]

[0255] In some embodiments, R1 represents —H or a ribosyl group of formula (IV).

[chemical structure]

[0256] In some embodiments, R₆ represents —H; —O—R₉ or —O—CO—R₉ wherein R₉ is H, an alkyl group having from 1 to 6 carbon atoms or an aryl group having from 3 to 12 carbon atoms. In some embodiments, R₇ represents —H; —O—R₁₀ or —O—CO—R₁₀ wherein R₁₀ is H, an alkyl group having from 1 to 6 carbon atoms or an aryl group having from 3 to 12 carbon atoms; a deoxyribonucleic acid group; or a ribonucleic acid group. In some embodiments, R₈ represents —H; —O—R₁₁ or —O—CO—R₁₁ wherein R₁₁ is H, an alkyl group having from 1 to 20 carbon atoms or an aryl group having from 3 to 20 carbon atoms; a phosphate group; a diphosphate group; a triphosphate group; a deoxyribonucleic acid group; or a ribonucleic acid group. In some embodiments, R₁₂ represents a saturated or unsaturated alkyl, cycloalkyl, heterocycloalkyl or ether group having from 1 to 20 carbon atoms, optionally substituted by at least one group selected from the group consisting of: (1) an alkyl group having from 1 to 20 carbon atoms, (2) an aryl or heteroaryl group having from 3 to 20 carbon atoms, (3) a cycloalkyl or heterocycloalkyl group having from 3 to 20 carbon atoms, (4) a hydroxyl group, (5) a carbonyl or carboxyl group having from 1 to 20 carbon atoms, (6) an epoxy group, (7) an —O—R₄ group wherein R₄ is H, an alkyl group having from 1 to 6 carbon atoms, an aryl group having from 3 to 12 carbon atoms, a glycosyl group or an aminoacyl group, and (8) an —O—CO—R₅ group wherein R₅ is an alkyl group having from 1 to 6 carbon atoms, an aryl group having from 3 to 12 carbon atoms or a glycosyl group;

or a pharmaceutically acceptable salt or hydrate thereof,
for use in the prevention or treatment of a disease associated with a mitochondrial dysfunction in an individual.

[0257] In some embodiments, a queuine-related analog or derivative can comprise compounds of formula (V), shown below, and pharmaceutically acceptable salts and solvates thereof.

[chemical structure]

[0258] In some embodiments, a represents a double bond or an epoxy group, and R₁ represents —H or a ribosyl group of formula (VI).

[chemical structure]

[0259] In some embodiments, R₆ represents —H; —O—R₉ or —O—CO—R₉ wherein R₉ is H, an alkyl group having from 1 to 6 carbon atoms or an aryl group having from 3 to 12 carbon atoms. In some embodiments, R₇ represents —H; —O—R₁₀ or —O—CO—R₁₀ wherein R₁₀ is H, an alkyl group having from 1 to 6 carbon atoms or an aryl group having from 3 to 12 carbon atoms; a deoxyribonucleic acid group; or a ribonucleic acid group. In some embodiments, R₈ represents —H; —O—R₁₁ or —O—CO—R₁₁ wherein R₁₁ is H, an alkyl group having from 1 to 20 carbon atoms or an aryl group having from 3 to 20 carbon atoms; a phosphate group; a diphosphate group; a triphosphate group; a deoxyribonucleic acid group; or a ribonucleic acid group. In some embodiments, R₂ and R₃, which are identical or different, represent —O—R₄ wherein R₄ is H, an alkyl group having from 1 to 6 carbon atoms, an aryl group having from 3 to 12 carbon atoms, a glycosyl group or an aminoacyl group; or —O—CO—R₅ wherein R₅ is an alkyl group having from 1 to 6 carbon atoms, an aryl group having from 3 to 12 carbon atoms or a glycosyl group. Additional queuine analogs or derivatives are described, for example, in U.S. patent applications US20170240553A1 and US20190224174A1, the contents of which are incorporated herein by reference in their entireties.

### Queuine-Associated Diseases or Disorders

[0260] The queuine-associated compositions described herein can be administered to a patient in need thereof, for instance for the treatment of a mental illness or disease associated with low levels of queuine (“queuine-associated mental illness or disease”). Described here are methods of use for such compositions.

[0261] In one aspect, described herein is a method of increasing queuine levels in a subject in need thereof, the method comprising administering to the subject a composition as described herein in an amount effective to increase queuine levels in the subject. In some embodiments, the subject is a mammalian subject. In some embodiments, the subject is a human subject.

[0262] In one or more embodiments of any of the above-aspects, the queuine associated mental illness or disease (also referred to herein as a central nervous system (CNS) disorder associated with queuine deficiency) that can be treated by administration of a composition described herein is selected from the group consisting of: clinical depression, bipolar disorder, schizophrenia, anxiety, anxiety disorders, addiction, social phobia, major depressive disorder, treatment-resistant major depressive disorder (TR-MDD), major depressive disorder and its subtypes (melancholic depression, atypical depression, catatonic depression, postpartum depression, and seasonal affective disorder), Neurodegenerative amyloid disorders (Parkinson's, Alzheimer's, and Huntington's diseases), restless leg syndrome, neuropathic pain, pain disorders, dementia, epilepsy, stiff-person syndrome, premenstrual dysphoric disorder, autism spectrum disorders, sleep disorders, obsessive-compulsive disorder, Tourette's syndrome, intellectual disability, Pediatric Autoimmune Neuropsychiatric Disorders Associated with Streptococcal infections (PANDAS), post-treatment Lyme disease syndrome, and attention deficit hyperactivity disorder (ADHD).

[0263] In some embodiments, the method further comprises improving at least one symptom or etiologically linked comorbidity of a queuine associated mental disorder or disease in the subject selected from the group consisting of: anhedonia, fatigue, insomnia, motor dysfunction, stress, persistent anxiety, persistent sadness, social withdrawal, substance withdrawal, irritability, thoughts of suicide, thoughts of self-harm, restlessness, low sex drive, lack of focus, loss of appetite, seizures, memory loss, anger, bouts of emotional reactivity, confusion, pain, cardiovascular or erectile dysfunction caused by biopterin-linked nitric oxide synthesis defects, and muscle spasms.

### Methods of Identifying Queuine-Deficient Mammals

[0264] In some embodiments, the method of treatment can comprise first diagnosing a subject or patient who can benefit from treatment by a composition described herein. In some embodiments, the method further comprises administering to the patient a composition described herein.

[0265] In some embodiments, the process of identifying a subject with a queuine associated mental illness or disease can be carried out by a trained psychologist, psychiatrist, or neurologist. For instance, a psychiatrist, psychologist, or neurologist can diagnose a subject with a mental illness or disease of the central nervous system by evaluating the subject's behavior for symptoms of the mental illness or disease. One of skill in the art will understand that mental illness can also be identified in a subject with the aid of the Diagnostic and Statistical Manual of Mental Disorders (DSM-5), (American Psychiatric Association), or other relevant tools.

[0266] In one or more embodiments, the process of identifying a subject with a queuine associated mental illness or disease can comprise diagnosing the subject with a mental illness or disease. In some embodiments, the mental illness or disease is identified or diagnosed using fMRI. In some embodiments, mental illness or disease can be identified with standard psychological and neurological surveys, or in other methods known to experts in the field.

[0267] In some embodiments, a subject in need of treatment with a composition described herein can be identified by identifying low levels of queuine, queuine-incorporated RNA, queuine precursors, or queuine-related metabolites in the subject's blood, liver, brain, serum, stool, or other bodily fluid or tissue. In some embodiments, the percentage of tRNAAsp/His/Tyr/Asn in the subject's blood, liver, brain, serum, stool, or other bodily fluid or tissue with a queuosine moiety in the first position of the anticodon is below about 80%. In some embodiments, the percentage of tRNAAsp/His/Tyr/Asn in the subject's blood, liver, brain, serum, stool, or other bodily fluid or tissue with a queuosine moiety in the first position of the anticodon is below 80%, below 70%, below 60%, below 50%, below 40%, below 30%, below 20%, or below 10%. In some embodiments, the amount of queuine, queuine precursors, or queuine related metabolites in the subject's blood, liver, brain, serum, stool, or other bodily fluid or tissue (e.g., the initial amount of queuine in the subject's blood, liver, brain, serum, stool, or other bodily fluid or tissue) is below 200 ng, 100 ng, below 50 ng, below 25 ng, below 20 ng, below 15 ng, below 10 ng, below 9 ng, below 8 ng, below 7 ng, below 6 ng, below 5 ng, below 4 ng, below 3 ng, below 2 ng, below 1 ng, below 0.5 ng, below 0.1 ng, below 0.01 ng, or below 0.001 ng of queuine, queuine precursors, or queuine-related metabolites per gram or mL sample or tissue (e.g., as measured by LC/MS or other appropriate methods). In some embodiments, the amount of queuine, queuine-incorporated RNA, queuine precursors, or queuine related metabolites in the subject's blood, liver, brain, serum, stool, or other bodily fluid or tissue (e.g., the initial amount of queuine in the subject's blood, liver, brain, serum, stool, or other bodily fluid or tissue) is at a level less than 1.5 or more standard deviations from what is detected in a healthy person. In some embodiments, the amount of queuine or related metabolites in the prefrontal cortex, or other areas of the brain, is below about 100 uM, below 50 uM, below 25 uM, below 20 uM, below 15 uM, below 10 uM, below 9 uM, below 8 uM, below 7 uM, below 6 uM, below 5 uM, below 4 uM, below 3 uM, below 2 uM, below 1 uM, below 0.5 uM, below 0.1 uM, below 0.01 uM, or below 0.001 uM, e.g., as measured by proton magnetic resonance (PMR), or another similar technique.

[0268] In some embodiments, a subject in need of treatment with a composition described herein can be identified by determining levels of queuine producing bacteria in a given tissue (e.g. stool). In some embodiments the percentage of queuine producing bacteria, human gut queuine producing bacteria, or keystone queuine producing bacteria in the subject's gut (e.g., the initial amount) represents less than about 10% of total 16S rRNA sequences as measured by sequencing using such methods as 16S rRNA gene Illumina™ sequencing or quantitative PCR. In some embodiments, the percentage of queuine producing bacteria, human gut queuine producing bacteria, or keystone queuine producing bacteria in the subject's gut represents about 9%, about 8%, about 7%, about 6%, about 5%, about 4%, about 3%, about 2%, about 1%, or less than about 1% of the total 16S sequences measured in the subject's gut.

[0269] In some embodiments, a subject in need of treatment with a composition described herein can be diagnosed as being dysbiotic or in need of queuine supplementation by analysis of blood or tissue for the amounts or ratios of tRNAHis/Asp/Tyr/Asn which contain(s) queuosine or a glycosylated queuosine derivative in the “wobble” position (position 34) of the anticodon, rather than guanosine. In a non-limiting example, a queuine deficiency would be diagnosed by a finding of a percentage of queuosine-modified Histidyl tRNA in a sample (e.g., preferably liver or alternatively blood, brain, serum, or stool) of less than 40%, less than 50%, less than 60%, less than 70%, less than 80%, less than 90%, or less than 95% out of the total Histidyl tRNA in the sample.

[0270] In some embodiments of any of the above aspects, the amount of queuine, queuine-incorporated RNA, queuine precursors, or queuine-related metabolites in the subject's blood, liver, brain, serum, stool, or other bodily fluid or tissue is increased following administration of a treatment as described herein by at least 0.1%, 1%, 5%, 10%, 20%, 30%, 40%, 50%, 60%, 70%, 80%, 90%, 100%, 500%, 1000%, 2000%, 3000%, 4000%, 5000%, or more relative to the initial amount in the subject's samples (e.g., as measured with LC/MS or other appropriate methods known to those familiar with the field). In some embodiments, at least one queuine producing bacteria, human gut queuine producing bacteria, or keystone queuine producing bacteria is increased 0.1%, 1%, 5%, 10%, 20%, 30%, 40%, 50%, 60%, 70%, 80%, 90%, 100%, 500%, 1000%, 2000%, 3000%, 4000%, 5000%, or more in the subject's stool relative to the initial amount in the subject's sample (e.g., as measured by qPCR, next generation sequencing, or other appropriate methods known to those familiar with the field). In some embodiments, the level of expression of at least one queuine producing enzyme is increased 0.1%, 1%, 5%, 10%, 20%, 30%, 40%, 50%, 60%, 70%, 80%, 90%, 100%, 500%, 1000%, 2000%, 3000%, 4000%, 5000%, or more in the subject's sample relative to the initial level of expression in the subject's sample (e.g., as measured by qPCR, next generation sequencing, or other appropriate methods known to those familiar with the field).

[0271] In some embodiments, a subject in need of treatment with a composition as described herein can be identified by having a mutation in one or more genes involved in queuine salvaging. In some embodiments, queuine salvaging genes include, but are not limited to, Queuine TRNA-Ribosyltransferase Catalytic Subunit 1 (QTRT1) and QTRT2 (previously called QTRTD1), or DUF2419 (domain of unknown function 2419). In some embodiments, a subject in need of treatment with a composition described herein can be identified by having high or low expression of queuine salvaging genes, such as QTRT1 and QTRT2 (previously called QTRTD1), or DUF2419, in target issues. See e.g., Zallot et al., Plant, Animal, and Fungal Micronutrient Queuosine Is Salvaged by Members of the DUF2419 Protein Family, ACS Chem Biol. 2014 Aug. 15; 9(8): 1812-1825.

[0272] In some embodiments, a subject in need of treatment with a composition described herein can be identified by detecting low levels of queuine-producing bacteria (e.g., comprising 16S from SEQ ID NO: 1-78, 1-406, or 1-3659) in the subject's stool (e.g., using quantitative next-generation 16S sequencing). In some embodiments, the level of queuine-producing bacteria in the subject's stool is below about 80% that of a healthy control. In some embodiments, the level of queuine-producing bacteria in the subject's stool is below 80%, below 70%, below 60%, below 50%, below 40%, below 30%, below 20%, or below 10% that of a healthy control.

[0273] In some embodiments, a subject in need of treatment with a composition described herein can be identified by detecting low DNA, RNA, or protein levels associated with at least one queuine biosynthesis enzyme (e.g., SEQ ID NO: 3660-82283) or low DNA or RNA levels of at least one PreQ1 riboswitch regulatory element, which regulates the bacterial cell's queuine synthesis via a feedback mechanism (e.g., SEQ ID NO: 90761-91398) in the subject's stool (e.g., using whole-genome sequencing or gene-specific sequencing to detect the nucleic acids encoding the enzymes, or through proteomic analysis such as LC MS). In some embodiments, the level of at least one queuine biosynthesis enzyme or at least one PreQ1 riboswitch in the subject's stool is below about 80% that of a healthy control. In some embodiments, the level of at least one queuine biosynthesis enzyme or at least one PreQ1 riboswitch in the subject's stool is below 80%, below 70%, below 60%, below 50%, below 40%, below 30%, below 20%, or below 10% that of a healthy control.

[0274] Accordingly, the present disclosure provides for the treatment of queuine-associated mental illness or disease comprising administering to the subject one or more queuine-producing bacterial strains (e.g., purified strains) and/or their derivatives (e.g. live bacteria, dead bacteria, spent medium(s) derived from a bacteria, cell pellet(s) of a bacteria, purified metabolite(s) produced by bacteria, purified protein(s) produced by a bacteria, or combinations thereof), queuine, queuine precursors, queuine analogs, queuine-related metabolites, prebiotics, and/or compositions comprising the same for administration to a subject in need thereof.

### Endozepines

[0275] Another exemplary CNS metabolic pathway is illustrated in FIG. 1, panel A, which depicts the pathway of endozepine production. Endozepines are endogenous benzodiazepine receptor ligands, and as such are involved in a variety of neural processes; see e.g., Farzampour et al., Endozepines, Adv Pharmacol. 2015; 72: 147-164. Levels of endozepines in the mammalian brain are described herein as being influenced at least in part by enteric microbes, and certain CNS disorders amenable to treatment using the methods and compositions described herein are associated with dysbiosis characterized by loss or impairment of these microbes (selected by their ability to direct synthesis of organochlorine precursors implicated in endozepine synthesis).

### Endozepine Producing Bacteria or Yeast

[0276] In some embodiments, the present disclosure provides one or more non-pathogenic endozepine producing bacterial or yeast strains (e.g., purified strains) and/or their derivatives (e.g. live bacteria or yeast, dead bacteria or yeast, spent medium(s) derived from a bacteria or yeast, cell pellet(s) of a bacteria or yeast, purified metabolite(s) produced by bacteria or yeast, purified protein(s) produced by a bacteria or yeast, or combinations thereof) and compositions comprising the same for administration to a subject in need thereof. The bacteria or yeast can be naturally occurring, or can be engineered (e.g., through strain engineering or selection) to produce one or more endozepines. In some embodiments, one strain of endozepine producing bacteria or yeast can be administered to a subject in need thereof. In some embodiments, multiple strains of endozepine producing bacteria or yeast can be administered to a subject in need thereof. In some embodiments, the one or more bacteria or yeast (e.g., purified bacteria or yeast) can act synergistically. For instance, the multiple bacteria or yeast can act synergistically to produce high levels of at least one endozepine, via, including but not limited to, cross feeding of nutrients important for endozepine biosynthesis or via supporting growth or survival of endozepine producing bacteria or yeast. Accordingly, any one, or any combination of the endozepine producing bacteria or yeast described herein can be administered to a subject in need thereof.

[0277] In some embodiments, the bacteria or yeast described herein can produce at least one endozepine under physiologically relevant conditions, such as under the conditions of the human gut. In some embodiments, a pH relevant to the human gut is between about 4.5 and about 7.5. For instance, the pH can be about 4.5, 5.0, 5.5., 6.0, 6.5, 7.0 7.5, or any value between about 4.5 and 7.5. In some embodiments, the physiologically relevant conditions of the human gut include being exposed to carbon, nitrogen, or micronutrients found in the human gut (such as host-derived glycoproteins like mucin) or those in a typical human diet (e.g. complex or simple glycans).

[0278] In some embodiments, endozepine producing bacteria or yeast are identified by the presence of genes involved in endozepine biosynthesis (see e.g., Table 2), using genome sequencing, qPCR, or other related methods. In some embodiments, a gene involved in endozepine biosynthesis is tryptophan halogenase. In some embodiments, one endozepine biosynthesis gene is functionally similar to the pyrroloquinoline quinone precursor peptide synthesis gene pqqA, with the representative sequences of SEQ ID NOs: 95292-95321. In some embodiments, the pqqA-related gene is characterized by a conservative substitution at positions 16-20 of the classical pqqA gene, resulting in condensation of modified quinoline derivatives which function as endozepines or endozepine precursors. In some embodiments, the endozepine biosynthesis genes have a high percent identity to those involved in the biosynthesis of the putative endozepines Sibiromycin, Tomaymycin, and Viridicatin (see e.g., Table 2). In some embodiments, an endozepine producing bacteria or yeast is classified as such by having 1, 2, 3, 4, or more of the genes involved in biosynthesis of Sibiromycin, Tomaymycin, Viridicatin, or other endozepines. In some embodiments, the genes encoding an enzyme involved in endozepine biosynthesis are of at least 50% amino acid sequence similarity with the representative sequences of SEQ ID NOs: 82284-90760 or SEQ ID NOs: 95292-95321 (e.g., at least 60% similarity, at least 70% similarity, at least 80% similarity, at least 90% similarity, at least 91% similarity, at least 92% similarity, at least 93% similarity, at least 94% similarity, at least 95% similarity, at least 96% similarity, at least 97% similarity, at least 98% similarity, at least 99% similarity, at least 99.5% similarity, at least 99.9% similarity, or 100% similarity). Enzymes produced by endozepine biosynthesis genes from other species of bacteria or yeast will catalyze the same reactions as those of the reference or representative enzymes.

[0279] In some embodiments, the endozepine producing bacteria or yeast are related taxonomically to known or putative producers of endozepine precursors including benzodiazepine, quinoline, and quinazoline derivatives. In some embodiments, they belong to the phylum Proteobacteria, especially the class Betaproteobacteria or Gammaproteobacteria. In some embodiments, they have a 16S sequence with a substantial percent identity to that of SEQ ID NOs: 91404-91406 or SEQ ID NOs: 95264-95291. In some embodiments, the endozepine producing bacteria or yeast can have at least 90% 16S or 18S sequence identity to any of the 16S or 18S sequences listed in SEQ ID NOs 91404-91406 or SEQ ID NOs: 95264-95291 (e.g., at least 91% identity, at least 92% identity, at least 93% identity, at least 94% identity, at least 95% identity, at least 96% identity, at least 97% identity, at least 98% identity, at least 99% identity, at least 99.5% identity, at least 99.9% identity, or 100% identity).

[0280] In some embodiments, the human gut endozepine producing bacteria or yeast are non-pathogenic bacteria or yeast belonging to a genus selected from the group consisting of: Bacillus, Streptomyces, Emericella, and Aspergillus. In some embodiments, the human gut endozepine producing bacteria or yeast are non-pathogenic bacteria or yeast belonging to a species selected from the group consisting of: Bacillus subtilis, Streptomyces, Emericella nidulans (also known as Aspergillus nidulans). In some embodiments, the human gut endozepine producing bacteria or yeast are non-pathogenic bacteria or yeast belonging to a strain selected from the group consisting of: Bacillus subtilis subsp. natto, Streptomyces achromogenes strain E91CS4, and Emericella nidulans strain BAB-2648.

[0281] In some embodiments, the composition further comprises a pharmaceutically acceptable carrier, wherein the one or more isolated non-pathogenic endozepine-producing bacterial or yeast strains or an isolated product derived therefrom is present in an amount effective to alter endozepine levels in a subject in need thereof. Accordingly, in one aspect, described herein is a pharmaceutical composition comprising endozepine, an analog, derivative or precursor thereof, or a combination of any of these, in an amount effective to alter endozepine levels in a subject in need thereof, and a pharmaceutically acceptable carrier. In some embodiments, the endozepine, analog, derivative or precursor is isolated from an endozepine-producing bacterial or yeast strain or culture medium in which a queuine-producing bacterial or yeast strain has been cultured.

[0282] In some embodiments, a composition comprising one or more isolated, non-pathogenic endozepine-producing bacterial strains or an isolated product derived therefrom as described herein further comprises a different therapeutic composition in an amount effective to treat a CNS disease or disorder, non-limiting examples of which are described further herein.

[0283] In some embodiments, endozepine producing bacteria or yeast are identified by growing isolated mammalian bacteria or yeast (e.g. human fecal bacteria or yeast) in multiple bacterial or yeast mediums (e.g. nutrient rich, nutrient poor, or environmentally similar to the mammalian gastrointestinal tract (e.g. similar pH or nutritional profiles)), and then measuring endozepine levels in the supernatants or cell pellets via LC/MS or other appropriate methods (e.g. a fluorescent protein-based assay to measure GABAA channel activation and allosteric modulation in mammalian cells, see e.g., Johansson et al. PLoS One 8, e59429, (2013)). In some embodiments, leveraging a collection of such identified endozepine producing bacteria or yeast and mediums in which they produce endozepines, one can furthermore identify prebiotics which further enhance endozepine production by these bacteria or yeast, by comparing levels of endozepines in cultures with and without the candidate prebiotics. Similarly, one can employ such a method to identify synergistic combinations of endozepine producing bacteria or yeast (where the combination results in higher production of endozepines than the organisms alone). Without wishing to be bound by theory, if unknown, one can also then identify bacterial or yeast genetic elements associated with endozepine biosynthesis by creating CRISPR or transposon gene knockout libraries of endozepine producing bacteria or yeast, and screening those libraries for clones that no longer produce endozepines. Those clones can then have the disrupted gene/sequence identified, which can be leveraged to predict other endozepine producing bacteria or yeast. Similarly, one can leverage a “gain-of-function” strategy, in which DNA from an endozepine producing bacteria or yeast is inserted into a genetically malleable host organism such as Escherichia coli or Saccharomyces cerevisiae or Schizosaccharomyces pombe in an ordered or non-ordered way, and the recombinant Escherichia coli or S. cerevisiae or S. pombe clones are then screened for production of endozepines. Such a technique has recently been employed to identify genes involved in bacterial xenobiotic metabolism; see e.g., Zimmermann et al. Nature 570, 462-467, (2019).

[0284] In some embodiments, keystone endozepine producing bacteria or yeast are then identified in the target mammalian species (e.g. a human) by mining or generating fecal, colonic wash, or intestinal biopsy transcriptome cohorts to identify which bacteria or yeast within a target mammal expresses genes involved in endozepine biosynthesis (either known, or those identified in the CRISPR or transposon library knockout strategy, or “gain-of-function” strategy, described above).

[0285] In some embodiments, the endozepine producing bacteria or yeast can be further profiled for suitability as a therapeutic, medical food, or nutraceutical by assessing the presence of wanted (e.g., fast growth rates, capability of surviving lyophilization at a recovery >0.1%, capable of growing in commercial manufacturing mediums) and unwanted (e.g., history of being a pathogen, antibiotic resistance to clinically relevant antibiotics, mobile elements, toxins, virulence factors, and a strong association with human disease) characteristics.

[0286] In some embodiments, such genes involved in endozepine biosynthesis can be introduced into a host probiotic such as Escherichia coli Nissle 1917, where it expresses said genes to produce endozepines constitutively or inducibly.

[0287] In some embodiments, purified endozepines (or synthetically produced analogs) from endozepine producing bacteria or yeast can be administered as a drug, medical food, or nutraceutical.

[0288] In some embodiments, the endozepine-related compositions can function in places beyond the brain, such as the peripheral or enteric nervous systems. Without wishing to be bound by theory, this can be useful for conditions presenting with disrupted intestinal motility, pain, inflammation, or metabolic features.

### Endozepine-Associated Diseases and Disorders

[0289] The endozepine compositions described herein can be administered to a patient in need thereof, for instance for the treatment of a mental illness or disease associated with low levels of endozepine (“endozepine-associated mental illness or disease”, also referred to herein as a central nervous system (CNS) disorder associated with endozepine deficiency). Described herein are methods of use for such compositions.

[0290] In one aspect, described herein is a method of increasing endozepine levels in a subject in need thereof, the method comprising administering to the subject a composition as described herein in an amount effective to increase endozepine levels in the subject. In some embodiments, the subject is a mammalian subject. In some embodiments, the subject is a human subject.

[0291] In one or more embodiments of any of the above-aspects, the endozepine associated mental illness or disease that can be treated by administration of a composition described herein is selected from the group consisting of: depression, bipolar disorder, schizophrenia, anxiety, anxiety disorders, addiction, social phobia, major depressive disorder, treatment-resistant major depressive disorder (TR-MDD), major depressive disorder and its subtypes (melancholic depression, atypical depression, catatonic depression, postpartum depression, and seasonal affective disorder), Neurodegenerative amyloid disorders (Parkinson's, Alzheimer's, and Huntington's diseases) orthostatic tremor, Lafora disease, restless leg syndrome, neuropathic pain, pain disorders, dementia, epilepsy, stiff-person syndrome, premenstrual dysphoric disorder, autism spectrum disorder, sleep disorders, and attention deficit hyperactivity disorder (ADHD).

[0292] In some embodiments, the method further comprises decreasing at least one symptom of an endozepine associated mental disorder or disease in the subject selected from the group consisting of: fatigue, insomnia, motor dysfunction, stress, persistent anxiety, persistent sadness, social withdrawal, substance withdrawal, irritability, thoughts of suicide, thoughts of self-harm, restlessness, low sex drive, lack of focus, loss of appetite, seizures, memory loss, anger, bouts of emotional reactivity, confusion, pain, and muscle spasms.

### Methods of Identifying Endozepine Deficient Mammals

[0293] In some embodiments, the method of treatment can comprise first diagnosing a subject or patient who can benefit from treatment by a composition described herein. In some embodiments, the method further comprises administering to the patient a composition described herein.

[0294] In some embodiments, the process of identifying a subject with a mental illness or disease can be carried out by a trained psychologist, psychiatrist, or neurologist. For instance, a psychiatrist, psychologist, or neurologist can diagnose a subject with a mental illness or disease of the central nervous system by evaluating the subject's behavior for symptoms of the mental illness or disease. One of skill in the art will understand that mental illness can also be identified in a subject with the aid of the Diagnostic and Statistical Manual of Mental Disorders (DSM-5), (American Psychiatric Association), or other relevant tools.

[0295] In one or more embodiments, the process of identifying a subject with a mental illness or disease can comprise diagnosing the subject with a mental illness or disease. In some embodiments, the mental illness or disease is identified or diagnosed using fMRI. In some embodiments, mental illness or disease can be identified with standard psychological and neurological surveys, or in other methods known to experts in the field.

[0296] In some embodiments, a subject in need of treatment with a composition described herein can be identified by identifying low levels of at least one endozepine in the subject's blood, liver, brain, serum, stool, or other bodily fluid or tissue. In some embodiments, the amount of at least one endozepine in the subject's blood, liver, brain, serum, stool, or other bodily fluid or tissue (e.g., the initial amount of at least one endozepine in the subject's blood, liver, brain, serum, stool, or other bodily fluid or tissue) is below about 100 pg/mL of sample or tissue (e.g., as measured by LC/MS or other appropriate methods). In some embodiments, the amount of at least one endozepine in the subject's blood, liver, brain, serum, stool, or other bodily fluid or tissue (e.g., the initial amount of at least one endozepine in the subject's blood, liver, brain, serum, stool, or other bodily fluid or tissue) is below 10,000 pg/mL, below 1,000 pg/mL, below 500 pg/mL, below 100 pg/mL, below 50 pg/mL, below 10 pg/mL, below 1 pg/mL, or below 0.1 pg/mL of sample or tissue (e.g., as measured by LC/MS, proton magnetic resonance (PMR) or other appropriate methods).

[0297] In some embodiments, the percentage of endozepine producing bacteria or yeast (e.g., the initial amount) represents less than about 10% of total 16S or non-human 18S rRNA sequences as measured by sequencing using such methods as 16S or 18S rRNA gene Illumina™ sequencing or quantitative PCR. In some embodiments, the percentage of endozepine producing bacteria or yeast, human gut endozepine producing bacteria or yeast or keystone endozepine producing bacteria in the subject's gut represents about 9%, about 8%, about 7%, about 6%, about 5%, about 4%, about 3%, about 2%, about 1%, or less than about 1% of the total 16S or non-human 18S sequences measured in the subject's gut.

[0298] In some embodiments of any of the above aspects, the amount of at least one endozepine in the subject's blood, liver, brain, serum, stool, or other bodily fluid or tissue is increased following administration of a treatment as described herein by at least 0.1%, 1%, 5%, 10%, 20%, 30%, 40%, 50%, 60%, 70%, 80%, 90%, 100%, 500%, 1000%, 2000%, 3000%, 4000%, 5000%, or more relative to the initial amount in the subject's samples (e.g., as measured by LC/MS, proton magnetic resonance (PMR) or other appropriate methods). In some embodiments, at least one endozepine producing bacteria or yeast is increased 0.1%, 1%, 5%, 10%, 20%, 30%, 40%, 50%, 60%, 70%, 80%, 90%, 100%, 500%, 1000%, 2000%, 3000%, 4000%, 5000%, or more in the subject's stool relative to the initial amount in the subject's sample (e.g., as measured by qPCR, next generation sequencing, or other appropriate methods known to those familiar with the field). In some embodiments, the level of expression of at least one endozepine producing enzyme is increased 0.1%, 1%, 5%, 10%, 20%, 30%, 40%, 50%, 60%, 70%, 80%, 90%, 100%, 500%, 1000%, 2000%, 3000%, 4000%, 5000%, or more in the subject's sample relative to the initial level of expression of endozepine enzymes in the subject's sample (e.g., as measured by qPCR, next generation sequencing, or other appropriate methods known to those familiar with the field).

[0299] In some embodiments, a subject in need of treatment with a composition described herein can be identified by detecting low levels of endozepine-producing bacteria or yeast (e.g., comprising 16S or 18S from SEQ ID NO: 91404-91406 or 95292-95321) in the subject's stool (e.g., using quantitative next-generation 16S or 18S sequencing). In some embodiments, the level of endozepine-producing bacteria or yeast in the subject's stool is below about 80% that of a healthy control. In some embodiments, the level of endozepine-producing bacteria or yeast in the subject's stool is below 80%, below 70%, below 60%, below 50%, below 40%, below 30%, below 20%, or below 10% that of a healthy control.

[0300] In some embodiments, a subject in need of treatment with a composition described herein can be identified by detecting low DNA, RNA, or protein levels associated with at least one endozepine biosynthesis enzyme (e.g., SEQ ID NO: 82284-90760 or 95264-95291) in the subject's stool (e.g., using whole-genome sequencing or gene-specific sequencing to detect the nucleic acids encoding the enzymes, or through proteomic analysis such as LC MS). In some embodiments, the level of at least one endozepine biosynthesis enzyme in the subject's stool is below about 80% that of a healthy control. In some embodiments, the level of at least one endozepine biosynthesis enzyme in the subject's stool is below 80%, below 70%, below 60%, below 50%, below 40%, below 30%, below 20%, or below 10% that of a healthy control.

[0301] Accordingly, the present disclosure provides for the treatment of endozepine associated mental illness or disease comprising administering to the subject one or more endozepine producing bacterial or yeast strains (e.g., purified strains) and/or their derivatives (e.g. live bacteria or yeast, dead bacteria or yeast, spent medium(s) derived from a bacteria or yeast, cell pellet(s) of a bacteria or yeast, purified metabolite(s) produced by bacteria or yeast, purified protein(s) produced by a bacteria or yeast, or combinations thereof), endozepines themselves, prebiotics (that stimulate the growth or activity of endozepine producing bacteria or yeast), and compositions comprising the same for administration to a subject in need thereof.

### Heavy Metal Sequestration

[0302] FIG. 1, Panel C illustrates a third exemplary CNS metabolic pathway targeted within the technology as described herein, defined herein as a “microbial-mediated heavy metal elimination”. The ability to excrete dietary heavy metals such as mercury depends on the composition and health of the gut microbiome. One mechanism for this dependence may involve microbial synthesis of siderophores, iron-scavenging molecules that also have the ability to sequester toxic heavy metals by forming insoluble complexes. Exemplifying this aspect, FIG. 1, Panel C depicts pydridine-2, 6-bis(thiocarboxylic acid) (PDTC), which can bind Cr, Pb, Hg, Cd, and As. Additionally, there is a wide variety of other microbial siderophores and other microbial products and processes implicated in microbiome-dependent heavy metal elimination, all of which are targets for substitution employing the methods and compositions described herein to treat cases of dysbiosis due to loss or impairment of heavy metal-eliminating microbial taxa, as described herein.

### Heavy Metal Sequestering Bacteria

[0303] In some embodiments the present disclosure provides one or more non-pathogenic heavy metal sequestering bacterial strains (e.g., purified strains) and/or their derivatives (e.g. live bacteria, dead bacteria, spent medium(s) derived from a bacteria, cell pellet(s) of a bacteria, purified metabolite(s) produced by bacteria, purified protein(s) produced by a bacteria, or combinations thereof) and compositions comprising the same for administration to a subject in need thereof. The bacteria can be naturally occurring, or can be engineered (e.g., through strain engineering or selection) to sequester heavy metal. In some embodiments, the bacteria sequester heavy metals via production of at least one siderophore. In some embodiments, one strain of siderophore producing bacteria can be administered to a subject in need thereof. In some embodiments, multiple strains of siderophore producing bacteria can be administered to a subject in need thereof. In some embodiments, the one or more bacteria (e.g., purified bacteria) can act synergistically. For instance, the multiple bacteria can act synergistically to produce high levels of at least one siderophore, via, including but not limited to, cross feeding of nutrients important for siderophore biosynthesis or via supporting growth or survival of siderophore producing bacteria. Additionally, the competition for a nutrient by a given bacterium (e.g. iron) can also elicit siderophore production in a siderophore producing bacteria. Accordingly, any one, or any combination of the siderophore producing bacteria described herein can be administered to a subject in need thereof.

[0304] In some embodiments, the heavy metal sequestering bacteria described herein can produce at least one siderophore under physiologically relevant conditions in the gut.

[0305] In some embodiments, a siderophore refers to a small peptidic molecule, readily assembled by short, dedicated metabolic pathways, which contain side chains and functional groups that can provide a high-affinity set of ligands for coordination of metals. In some embodiments, there are three main types of iron-coordinating functional groups in siderophores. First, there are the N-hydroxy amino acid side chains as in anguibactin, with the oxygen atom as one of the ligands for Fe3+. Second, there are the adjacent hydroxyls of catechol rings, almost always derived from 2,3-dihydroxybenzoate (DHB), as represented in enterobactin, anguibactin, and acinetobactin. Variants may involve biosynthetic use of 2-hydroxybenzoate (salicylate) in place of 2,3-DHB, leading to phenolic moieties as iron ligands. Third, the nitrogen atoms of five-membered thiazoline and oxazoline rings, resulting from enzymatic cyclization of cysteinyl, seryl, or threonyl side chains, respectively, can also bind to iron and other metals.

[0306] In some embodiments, the heavy metal sequestering bacteria described herein can produce at least one siderophore which binds to the heavy metal mercury or lead. In some embodiments, the siderophore binds preferentially to mercury or lead over other heavy metals, such as iron. As one example, bacterial produced siderophores with higher affinity to non-iron heavy metals are known for molybdenum, and generally siderophores have varying affinities for the metals they bind; see e.g., Liermann et al. Chemical Geology 220, 285-302 (2005).

[0307] In some embodiments, the heavy metal sequestering bacteria can be identified by having a 16S nucleic acid sequence with a substantial percent identity to a 16S sequence selected from SEQ ID NOs: 91399-91403, which have been found to possess genes encoding or directing the production of heavy-metal sequestering proteins or compositions (e.g., siderophore producing genes) encoded in their genomes. In some embodiments, the heavy metal sequestering bacteria can have at least 90% 16S sequence identity to a 16S sequence given in Table 2 (e.g., at least 91% identity, at least 92% identity, at least 93% identity, at least 94% identity, at least 95% identity, at least 96% identity, at least 97% identity, at least 98% identity, at least 99% identity, at least 99.5% identity, at least 99.9% identity, or 100% identity to one of SEQ ID NOs: 91399-91403).

[0308] In some embodiments, the heavy metal sequestering bacteria described herein can produce at least one siderophore that binds to mercury or lead, and that siderophore also does not support growth of known pathogens.

[0309] In some embodiments, the human gut siderophore producing bacteria are non-pathogenic bacteria belonging to a genus selected from the group consisting of: Azotobacter, Bacillus, Pantoea, and Rhizobium. In some embodiments, the human gut siderophore producing bacteria are non-pathogenic bacteria belonging to a species selected from the group consisting of: Azotobacter vinelandii, Bacillus megaterium, Bacillus subtilis, Pantoea allii, and Rhizobium radiobacter. In some embodiments, the human gut siderophore producing bacteria are non-pathogenic bacteria belonging to a strain selected from the group consisting of: Azotobacter vinelandii strain IAM 15004, Bacillus megaterium strain CT03, Bacillus subtilis strain IAM 12118, Pantoea allii strain BD 390, Rhizobium radiobacter (AM157353.1).

[0310] In some embodiments, the composition further comprises a pharmaceutically acceptable carrier, wherein the one or more isolated non-pathogenic heavy metal sequestering bacterial strains or an isolated product derived therefrom is present in an amount effective to alter heavy metal levels or bioavailable heavy metal levels in a subject in need thereof. Accordingly, in one aspect, described herein is a pharmaceutical composition comprising a siderophore, an analog, derivative or precursor thereof, or a combination of any of these, in an amount effective to alter heavy metal levels in a subject in need thereof, and a pharmaceutically acceptable carrier. In some embodiments, the siderophore, analog, derivative or precursor is isolated from a heavy metal sequestering bacterial strain or culture medium in which a queuine-producing bacterial or yeast strain has been cultured.

[0311] In some embodiments, a composition comprising one or more isolated, non-pathogenic heavy metal sequestering bacterial strains or an isolated product derived therefrom as described herein further comprises a different therapeutic composition in an amount effective to treat a CNS disease or disorder, non-limiting examples of which are described further herein.

[0312] In some embodiments, the heavy metal sequestering bacteria are identified by the presence of genes involved in siderophore biosynthesis (see e.g., Table 2), using genome sequencing, qPCR, or other related methods. In some embodiments, the siderophore biosynthesis genes are isochorismate pyruvate lyase (pchB; EC:4.2.99.21), salicylate biosynthesis/isochorismate synthase (pchA; EC 5.4.4.2), isochorismatase (entB; EC:3.3.2.1/6.3.2.14), 2,3-dihydro-2,3-dihydroxybenzoate dehydrogenase (entA; EC:1.3.1.28), or enterobactin synthetase component D (entD; EC:6.3.2.14 2.7.8.-). In some embodiments, the genes encoding enzymes involved in siderophore biosynthesis are of at least 50% amino acid sequence similarity with the representative sequences SEQ ID NOs 91407-95263 (e.g., at least 60% similarity, at least 70% similarity, at least 80% similarity, at least 90% similarity, at least 91% similarity, at least 92% similarity, at least 93% similarity, at least 94% similarity, at least 95% similarity, at least 96% similarity, at least 97% similarity, at least 98% similarity, at least 99% similarity, at least 99.5% similarity, at least 99.9% similarity, or 100% similarity). Enzymes produced by siderophore biosynthesis genes from other species of bacteria will catalyze the same reactions as those of the reference or representative enzymes.

[0313] In some embodiments, heavy metal sequestering composition producing bacteria are identified by growing isolated mammalian bacteria (e.g. human fecal bacteria) in multiple bacterial mediums (e.g. nutrient rich, nutrient poor, or environmentally similar to the mammalian gastrointestinal tract (e.g. similar pH or nutritional profiles)), and then measuring siderophore levels in the supernatants or cell pellets via LC/MS or other appropriate methods (e.g. the Blue Agar CAS Assay; see e.g., Louden et al., J Microbiol Biol Educ. 2011; 12(1): 51-53). In some embodiments, leveraging a collection of such identified siderophore producing bacteria, one can perform heavy metal binding competition assays to identify siderophores which bind to mercury or lead at a higher level than iron or other heavy metals. For example, one can mix an unpurified or purified siderophore (derived from siderophore producing bacteria) with an equal or varying concentration of a ferric substrate (e.g. ferric nitrate) and a heavy metal (e.g. mercury or lead). Incorporation of one metal over the other can be accessed via LC/MS or other methods appropriate for such detection; see e.g., Braud et al. J Bacteriol 191, 3517-3525, (2009). Such siderophores (or siderophore producing bacterial derivatives) can then be counter-screened against known pathogenic organisms known to use siderophores for virulence (e.g. Salmonella typhimurium), to identify siderophores with ideal binding affinities to target heavy metals (e.g. mercury or lead) but not able to support or enhance growth or virulence of a given or known pathogen.

[0314] In some embodiments, leveraging a collection of such identified siderophore producing bacteria and mediums in which they produce siderophores, one can furthermore identify prebiotics which further enhance siderophore production by these bacteria, by comparing levels of siderophore(s) in cultures with and without the candidate prebiotics. Similarly, one can employ such a method to identify synergistic combinations of siderophore producing bacteria (where the combination results in higher production of siderophore than the organisms alone).

[0315] In some embodiments, keystone siderophore producing bacteria are identified in the target mammalian species (e.g. a human) by mining or generating fecal, colonic wash, or intestinal biopsy transcriptome cohorts to identify which bacteria within a target mammal expresses genes involved in siderophore biosynthesis. Bacteria expressing genes involved in siderophore biosynthesis, particularly those bacteria found to have siderophores with high binding affinities to heavy metals, are strong candidates for the composition.

[0316] In some embodiments, genes involved in siderophore biosynthesis can be introduced into a host probiotic such as Escherichia coli Nissle 1917, where it expresses said genes to produce siderophore constitutively or inducibly. In some embodiments, point mutations or codon optimization in siderophore genes can be leveraged to change the binding site of siderophores, and consequently affinity for heavy metals.

[0317] In some embodiments, the compositions (including purified siderophores) can be administered as a drug, medical food, or nutraceutical.

[0318] In some embodiments, non-siderophore based mechanisms can also be leveraged to clear heavy metals. In a non-limiting example, compositions comprising bacteria which produce extracellular polymeric substances (EPS), or the EPS themselves, can be used to sequester heavy metal (see e.g., Francois et al. Appl Environ Microbiol 78, 1097-1106, (2012). Extracellular polymeric substances (EPSs) are natural polymers of high molecular weight secreted by microorganisms into their environment. EPSs establish the functional and structural integrity of biofilms, and are considered the fundamental component that determines the physiochemical properties of a biofilm. EPSs are mostly composed of polysaccharides (exopolysaccharides) and proteins, but include other macro-molecules such as DNA, lipids and humic substances. Bacteria that produce EPS can be identified by screening for mercury or lead tolerance in a panel of mammalian bacteria (e.g. human gut bacteria). Bacteria found to be tolerant to mercury or lead can then be tested for accumulation of mercury or lead in the cell pellets or supernatant. If the heavy metals are found in the supernatant, the bacteria secrete binding factors such as EPS to keep the mercury outside of the cell. If mercury is found in the cell, it is likely they sequester the mercury in vesicles away from other protein machinery. Genes involved in producing these heavy metal sequestering features can then be identified leveraging knockout strategies (e.g., CRISPR or transposon mutagenesis) or gain of function approaches.

[0319] In some embodiments, the heavy metal sequestering composition producing bacteria can be further profiled for suitability as a therapeutic, medical food, or nutraceutical by assessing the presence of wanted (e.g., fast growth rates, capability of surviving lyophilization at a recovery >0.1%, capable of growing in commercial manufacturing mediums) and unwanted (e.g., history of being a pathogen, antibiotic resistance to clinically relevant antibiotics, mobile elements, toxins, virulence factors, and a strong association with human disease) characteristics.

[0320] In some embodiments, the heavy metal sequestering related compositions can function in places beyond the brain, such as the gastrointestinal tract or the peripheral or enteric nervous systems. Without being limited by theory, this may be useful for conditions presenting with disrupted intestinal motility, pain, inflammation, or metabolic features.

### Heavy Metal Associated Diseases or Disorders

[0321] The heavy metal sequestering related compositions described herein can be administered to a patient in need thereof, for instance for the treatment of a mental illness or disease associated with high levels of mercury or lead (“heavy metal associated mental illness or disease”, also referred to herein as a central nervous system (CNS) disorder associated with heavy metals). Described herein are methods of use for such compositions.

[0322] In one aspect, described herein is a method of decreasing heavy metal levels in a subject in need thereof, the method comprising administering to the subject a composition as described herein in an amount effective to increase heavy metal levels in the subject. In some embodiments, the subject is a mammalian subject. In some embodiments, the subject is a human subject.

[0323] In one or more embodiments of any of the above-aspects, the heavy metal associated mental illness or disease that can be treated by administration of a composition described herein is selected from the group consisting of: depression, bipolar disorder, schizophrenia, anxiety, anxiety disorders, addiction, social phobia, major depressive disorder, treatment-resistant major depressive disorder (TR-MDD), major depressive disorder and its subtypes (melancholic depression, atypical depression, catatonic depression, postpartum depression, and seasonal affective disorder), Neurodegenerative amyloid disorders (Parkinson's, Alzheimer's, and Huntington's diseases) orthostatic tremor, Lafora disease, restless leg syndrome, neuropathic pain, pain disorders, dementia, epilepsy, stiff-person syndrome, premenstrual dysphoric disorder, autism spectrum disorder, sleep disorders, and attention deficit hyperactivity disorder (ADHD).

[0324] In some embodiments, the method further comprises decreasing at least one symptom of a heavy metal associated mental disorder or disease in the subject selected from the group consisting of: fatigue, insomnia, motor dysfunction, stress, persistent anxiety, persistent sadness, social withdrawal, substance withdrawal, irritability, thoughts of suicide, thoughts of self-harm, restlessness, low sex drive, lack of focus, loss of appetite, seizures, memory loss, anger, bouts of emotional reactivity, confusion, pain, and muscle spasms.

### Methods of Identifying Mammals in Need of Heavy Metal Sequestration

[0325] In some embodiments, the method of treatment can comprise first diagnosing a subject or patient who can benefit from treatment by a composition described herein. In some embodiments, the method further comprises administering to the patient a composition described herein.

[0326] In some embodiments, the process of identifying a subject with a heavy metal associated mental illness or disease can be carried out by a trained psychologist, psychiatrist, or neurologist. For instance, a psychiatrist, psychologist, or neurologist can diagnose a subject with a mental illness or disease of the central nervous system by evaluating the subject's behavior for symptoms of the mental illness or disease. One of skill in the art will understand that mental illness can also be identified in a subject with the aid of the Diagnostic and Statistical Manual of Mental Disorders (DSM-5), (American Psychiatric Association), or other relevant tools.

[0327] In one or more embodiments, the process of identifying a subject with a heavy metal associated mental illness or disease can comprise diagnosing the subject with a mental illness or disease. In some embodiments, the mental illness or disease is identified or diagnosed using fMRI. In some embodiments, mental illness or disease can be identified with standard psychological and neurological surveys, or in other methods known to experts in the field.

[0328] In some embodiments, a subject in need of treatment with a composition described herein can be identified by identifying high levels of heavy metals in the subject's blood, liver, brain, serum, stool, or other bodily fluid or tissue. In some embodiments, the amount of heavy metals in the subject's blood, liver, brain, serum, stool, or other bodily fluid or tissue (e.g., the initial amount of heavy metals in the subject's blood, liver, brain, serum, stool, or other bodily fluid or tissue) is above about 5.0 ug/mL gram or mL sample or tissue (e.g., as measured by LC/MS or other appropriate methods). In some embodiments, the amount of heavy metals in the subject's blood, liver, brain, serum, stool, or other bodily fluid or tissue (e.g., the initial amount of heavy metals in the subject's blood, liver, brain, serum, stool, or other bodily fluid or tissue) is above about 0.1 ug/mL, 0.5 ug/mL, 1.0 ug/mL, 2.5 ug/mL, 5.0 ug/mL, 10 ug/mL, 20 ug/mL, 50 ug/mL, or 100 ug/mL in the sample or tissue (e.g., as measured by LC/MS, proton magnetic resonance (PMR) or other appropriate methods).

[0329] In some embodiments, the percentage of heavy metal sequestering bacteria in the subject's gut (e.g., the initial amount) represents less than about 10% of total 16S rRNA sequences as measured by sequencing using such methods as 16S rRNA gene Illumina™ sequencing or quantitative PCR. In some embodiments, the percentage of heavy metal sequestering bacteria in the subject's gut represents about 9%, about 8%, about 7%, about 6%, about 5%, about 4%, about 3%, about 2%, about 1%, or less than about 1% of the total 16S sequences measured in the subject's gut.

[0330] In some embodiments of any of the above aspects, the amount of heavy metals in the subject's blood, liver, brain, serum, stool, or other bodily fluid or tissue is decreased 0.1%, 1%, 5%, 10%, 20%, 30%, 40%, 50%, 60%, 70%, 80%, 90%, 100%, 500%, 1000%, 2000%, 3000%, 4000%, 5000%, or more relative to the initial amount (e.g., as measured by LC/MS, proton magnetic resonance (PMR) or other appropriate methods). In some embodiments, at least one heavy metal sequestering bacteria is increased 0.1%, 1%, 5%, 10%, 20%, 30%, 40%, 50%, 60%, 70%, 80%, 90%, 100%, 500%, 1000%, 2000%, 3000%, 4000%, 5000%, or more in the subject's stool relative to the initial amount (e.g., as measured by qPCR, next generation sequencing, or other appropriate methods known to those familiar with the field). In some embodiments, the level of expression of at least one heavy metal sequestering enzyme (e.g. a siderophore producing gene) is increased 0.1%, 1%, 5%, 10%, 20%, 30%, 40%, 50%, 60%, 70%, 80%, 90%, 100%, 500%, 1000%, 2000%, 3000%, 4000%, 5000%, or more in the subject's sample relative to the initial level (e.g., as measured by qPCR, next generation sequencing, or other appropriate methods known to those familiar with the field).

[0331] In some embodiments, a subject in need of treatment with a composition described herein can be identified by detecting low levels of siderophore-producing bacteria (e.g., comprising 16S from SEQ ID NO: 91399-91403) in the subject's stool (e.g., using quantitative next-generation 16S sequencing). In some embodiments, the level of siderophore-producing bacteria in the subject's stool is below about 80% that of a healthy control. In some embodiments, the level of siderophore-producing bacteria in the subject's stool is below 80%, below 70%, below 60%, below 50%, below 40%, below 30%, below 20%, or below 10% that of a healthy control.

[0332] In some embodiments, a subject in need of treatment with a composition described herein can be identified by detecting low DNA, RNA, or protein levels associated with at least one siderophore biosynthesis enzyme (e.g., SEQ ID NO: 91407-95263) in the subject's stool (e.g., using whole-genome sequencing or gene-specific sequencing to detect the nucleic acids encoding the enzymes, or through proteomic analysis such as LC MS). In some embodiments, the level of at least one siderophore biosynthesis enzyme in the subject's stool is below about 80% that of a healthy control. In some embodiments, the level of at least one siderophore biosynthesis enzyme in the subject's stool is below 80%, below 70%, below 60%, below 50%, below 40%, below 30%, below 20%, or below 10% that of a healthy control.

[0333] Accordingly, the present disclosure provides for the treatment of heavy metal mental illness or disease comprising administering to the subject one or more siderophore producing bacterial strains (e.g., purified strains) and/or their derivatives (e.g. live bacteria, dead bacteria, spent medium(s) derived from a bacteria, cell pellet(s) of a bacteria, purified metabolite(s) produced by bacteria, purified protein(s) produced by a bacteria, or combinations thereof), purified siderophore, prebiotics, and compositions comprising the same for administration to a subject in need thereof.

### Treatment Methods

[0334] The compositions described herein can be administered to a patient in need thereof, for instance for the treatment of a queuine, endozepine and/or heavy metal-related disease or disorder. In some embodiments, the method of treatment can comprise first diagnosing a subject or patient who can benefit from treatment by a composition described herein. In some embodiments, such diagnosis comprises detecting or measuring a low level of queuine (or queuine precursor or queuine-associated metabolite) or a low level of endozepine (or endozepine precursor or endozepine-associated metabolite) or a low level of siderophore (or siderophore precursor or siderophore-associated metabolite) or a high heavy metal level in a sample from the subject or patient, each of which are examples of an abnormal level of each analyte. In other embodiments, such diagnosis comprises detecting or measuring low levels of queuine-producing, endozepine-producing, or heavy metal sequestering species in a sample, e.g., a sample of gut microbiota from the subject or patient, each of which are examples of an abnormal level of each analyte. In some embodiments, the method further comprises administering to the patient a composition described herein.

[0335] In some embodiments, the subject has previously been determined to have an abnormal level of an analyte described herein relative to a reference. In some embodiments, the reference level can be the level in a sample of similar cell type, sample type, sample processing, and/or obtained from a subject of similar age, sex and other demographic parameters as the sample/subject. In some embodiments, the test sample and control reference sample are of the same type, that is, obtained from the same biological source, and comprising the same composition, e.g. the same number and type of cells.

[0336] The term “sample” or “test sample” as used herein denotes a sample taken or isolated from a biological organism, e.g., a blood or plasma sample from a subject. In some embodiments of any of the aspects, the technology described herein encompasses several examples of a biological sample. In some embodiments of any of the aspects, the biological sample is cells, or tissue, or peripheral blood, or bodily fluid. Exemplary biological samples include, but are not limited to, a biopsy, a tumor sample, biofluid sample; blood; serum; plasma; urine; sperm; mucus; tissue biopsy; organ biopsy; synovial fluid; bile fluid; cerebrospinal fluid; mucosal secretion; effusion; sweat; saliva; and/or tissue sample etc. The term also includes a mixture of the above-mentioned samples. The term “test sample” also includes untreated or pretreated (or pre-processed) biological samples. In some embodiments of any of the aspects, a test sample can comprise cells from a subject.

[0337] In some embodiments of any of the aspects, the step of determining if the subject has an abnormal level of an analyte described herein can comprise i) obtaining or having obtained a sample from the subject and ii) performing or having performed an assay on the sample obtained from the subject to determine/measure the level of the analyte in the subject. In some embodiments of any of the aspects, the step of determining if the subject has an abnormal level of an analyte described herein can comprise performing or having performed an assay on a sample obtained from the subject to determine/measure the level of analyte in the subject. In some embodiments of any of the aspects, the step of determining if the subject has an abnormal level of an analyte described herein can comprise ordering or requesting an assay on a sample obtained from the subject to determine/measure the level of the analyte in the subject. In some embodiments of any of the aspects, the step of determining if the subject has an abnormal level of an analyte described herein can comprise receiving the results of an assay on a sample obtained from the subject to determine/measure the level of the analyte in the subject. In some embodiments of any of the aspects, the step of determining if the subject has an abnormal level of an analyte described herein can comprise receiving a report, results, or other means of identifying the subject as a subject with a decreased level of the analyte.

[0338] In one aspect of any of the embodiments, described herein is a method of treating a queuine-associated, endozepine-associated, or heavy metal-associated disease or disorder in a subject in need thereof, the method comprising: a) determining if the subject has an abnormal level of an analyte described herein; and b) instructing or directing that the subject be administered a composition comprising at least one queuine, endozepine, or heavy metal modulating bacteria and/or product(s) produced thereby as described herein if the level of the analyte is decreased relative to a reference. In some embodiments of any of the aspects, the step of instructing or directing that the subject be administered a particular treatment can comprise providing a report of the assay results. In some embodiments of any of the aspects, the step of instructing or directing that the subject be administered a particular treatment can comprise providing a report of the assay results and/or treatment recommendations in view of the assay results.

### Administration

[0339] Compositions as described herein can be administered via any of a number of different routes or in different regimens. As used herein, the term “administering,” refers to the placement of a compound or bacteria or yeast as disclosed herein into a subject by a method or route which results in at least partial delivery of the agent at a desired site. Pharmaceutical or therapeutic compositions comprising the compounds or bacteria or yeast disclosed herein can be administered by any appropriate route which results in an effective treatment in the subject. In some embodiments, administration comprises physical human activity, e.g., an injection, act of ingestion, an act of application, and/or manipulation of a delivery device or machine. Such activity can be performed, e.g., by a medical professional and/or the subject being treated. The period of viability of the bacteria or yeast cells after administration to a subject can be as short as a few hours, e.g., twenty-four hours, to a few days, to as long as several years, i.e., long-term engraftment.

[0340] In some embodiments, the methods described herein relate to treating a subject having or diagnosed as having a queuine, endozepine and/or heavy metal-related disease or disorder with a composition comprising at least one queuine, endozepine and/or heavy metal modulating bacteria or yeast and/or product(s) produced thereby as described herein. Subjects having a queuine, endozepine and/or heavy metal-related disease or disorder can be identified by a physician using current methods of diagnosing a queuine, endozepine and/or heavy metal-related disease or disorder. Symptoms and/or complications of a queuine, endozepine and/or heavy metal-related disease or disorder which characterize these conditions and aid in diagnosis are known in the art, as described above. Tests that can aid in a diagnosis of, e.g. a queuine, endozepine and/or heavy metal-related disease or disorder are described above and can include, in addition to standard measurements of queuine, endozepine and/or heavy metal itself, detection or measurement of gut bacteria or yeast that modulate queuine, endozepine and/or heavy metal, detection or measurement of genetic sequences of such bacteria or yeast, including 16S or 18S sequences and/or genetic sequences encoding proteins that modulate queuine, endozepine and/or heavy metal, or detection or measurement of bacterial or yeast metabolites or proteins that modulate queuine, endozepine and/or heavy metal. A family history of a queuine, endozepine and/or heavy metal-related disease or disorder, or exposure to risk factors for a queuine, endozepine and/or heavy metal-related disease or disorder can also aid in determining if a subject is likely to have a queuine, endozepine and/or heavy metal-related disease or disorder or in making a diagnosis of a queuine, endozepine and/or heavy metal-related disease or disorder.

[0341] In some embodiments, the methods described herein comprise administering an effective amount of a composition or compositions described herein, e.g. a composition comprising at least one queuine, endozepine and/or heavy metal modulating bacteria or yeast and/or product(s) produced thereby as described herein to a subject in order to alleviate a symptom of a queuine, endozepine and/or heavy metal-related disease or disorder. As used herein, “alleviating a symptom of a queuine, endozepine and/or heavy metal-related disease or disorder” is ameliorating any condition or symptom associated with the disease or disorder. As compared with an equivalent untreated control, such amelioration comprises a reduction by at least 5%, 10%, 20%, 40%, 50%, 60%, 80%, 90%, 95%, 99% or more as measured by any standard technique. A variety of means for administering the compositions described herein to subjects are known to those of skill in the art. Such methods can include, but are not limited to oral or parenteral administration. Administration can be local or systemic. It should be understood that administration routes will vary depending on the compositions being administered. For example, live bacteria or yeast, or even dead bacteria or yeast, will generally be administered via a route that delivers the composition to the gut, e.g., orally (including but not limited to orally with enteric delivery compositions), or rectally (e.g., via enema, colonoscope, or suppository), while purified polypeptides or metabolites can be delivered not only by these routes, but also, as appropriate, via ingestion, whether intravenous, subcutaneous, intraperitoneal, by inhalation, or by another parental route. The decisions for such delivery routes will be apparent to the ordinarily-skilled clinician.

[0342] The term “effective amount” as used herein refers to the amount of a composition comprising at least one queuine, endozepine and/or heavy metal modulating bacteria or yeast and/or product(s) produced thereby as described herein needed to alleviate at least one or more symptom of the disease or disorder, and relates to a sufficient amount of pharmacological composition to provide the desired effect. The term “therapeutically effective amount” therefore refers to an amount of a composition comprising at least one queuine, endozepine and/or heavy metal modulating bacteria or yeast and/or product(s) produced thereby as described herein that is sufficient to provide a particular anti-queuine, endozepine and/or heavy metal-related-disorder effect when administered to a typical subject. An effective amount as used herein, in various contexts, would also include an amount sufficient to delay the development of a symptom of the disease, alter the course of a symptom disease (for example but not limited to, slowing the progression of a symptom of the disease), or reverse a symptom of the disease. Thus, it is not generally practicable to specify an exact “effective amount”. However, for any given case, an appropriate “effective amount” can be determined by one of ordinary skill in the art using only routine experimentation.

[0343] Microbes derived from the healthy human gut can generally be used over a wide range of doses without adverse effects. For products derived from, made from, or isolated from such microbes, effective amounts, toxicity, and therapeutic efficacy can be determined by standard pharmaceutical procedures in cell cultures or experimental animals, e.g., for determining the LD50 (the dose lethal to 50% of the population) and the ED50 (the dose therapeutically effective in 50% of the population). The dosage can vary depending upon the dosage form employed and the route of administration utilized. The dose ratio between toxic and therapeutic effects is the therapeutic index and can be expressed as the ratio LD50/ED50. Compositions and methods that exhibit large therapeutic indices are preferred. A therapeutically effective dose can be estimated initially from cell culture assays. Also, where a composition's active agent or ingredient comprises, consists essentially of, or consists of a metabolite or protein produced by a bacteria or yeast or bacterial or yeast composition as described herein, a dose can be formulated in animal models to achieve a concentration range in vivo that includes the IC50 (i.e., the concentration of a composition comprising at least one product of at least one queuine, endozepine and/or heavy metal modulating bacteria or yeast as described herein, which achieves a half-maximal inhibition of symptoms) as determined in cell culture, or in an appropriate animal model. Levels in biological samples can be measured, for example, by high performance liquid chromatography. The effects of any particular dosage can be monitored by a suitable bioassay, e.g., assay for queuine, endozepine and/or heavy metal, among others. The dosage can be determined by a physician and adjusted, as necessary, to suit observed effects of the treatment.

[0344] In some embodiments, the technology described herein relates to a pharmaceutical composition comprising a composition comprising at least one queuine, endozepine and/or heavy metal modulating bacteria or yeast and/or product(s) produced thereby as described herein, and optionally a pharmaceutically acceptable carrier. In some embodiments, the active ingredients of the pharmaceutical composition comprise at least one queuine, endozepine and/or heavy metal modulating bacteria or yeast and/or product(s) produced thereby as described herein. In some embodiments, the active ingredients of the pharmaceutical composition consist essentially of at least one queuine, endozepine and/or heavy metal modulating bacteria or yeast and/or product(s) produced thereby as described herein. In some embodiments, the active ingredients of the pharmaceutical composition consist of at least one queuine, endozepine and/or heavy metal modulating bacteria or yeast and/or product(s) produced thereby as described herein. Pharmaceutically acceptable carriers and diluents include saline, aqueous buffer solutions, solvents and/or dispersion media. The use of such carriers and diluents is well known in the art. Some non-limiting examples of materials which can serve as pharmaceutically-acceptable carriers include: (1) sugars, such as lactose, glucose and sucrose; (2) starches, such as corn starch and potato starch; (3) cellulose, and its derivatives, such as sodium carboxymethyl cellulose, methylcellulose, ethyl cellulose, microcrystalline cellulose and cellulose acetate; (4) powdered tragacanth; (5) malt; (6) gelatin; (7) lubricating agents, such as magnesium stearate, sodium lauryl sulfate and talc; (8) excipients, such as cocoa butter and suppository waxes; (9) oils, such as peanut oil, cottonseed oil, safflower oil, sesame oil, olive oil, corn oil and soybean oil; (10) glycols, such as propylene glycol; (11) polyols, such as glycerin, sorbitol, mannitol and polyethylene glycol (PEG); (12) esters, such as ethyl oleate and ethyl laurate; (13) agar; (14) buffering agents, such as magnesium hydroxide and aluminum hydroxide; (15) alginic acid; (16) pyrogen-free water; (17) isotonic saline; (18) Ringer's solution; (19) ethyl alcohol; (20) pH buffered solutions; (21) polyesters, polycarbonates and/or polyanhydrides; (22) bulking agents, such as polypeptides and amino acids (23) serum component, such as serum albumin, HDL and LDL; (24) C₂-C₁₂ alcohols, such as ethanol; and (25) other non-toxic compatible substances employed in pharmaceutical formulations. Wetting agents, coloring agents, release agents, coating agents, sweetening agents, flavoring agents, perfuming agents, preservative and antioxidants can also be present in the formulation. The terms such as “excipient”, “carrier”, “pharmaceutically acceptable carrier” or the like are used interchangeably herein. In some embodiments, the carrier inhibits the degradation of the active agent, e.g. at least one queuine, endozepine and/or heavy metal modulating bacteria or yeast and/or product(s) produced thereby as described herein.

[0345] In some embodiments, the composition comprising at least one queuine, endozepine and/or heavy metal modulating bacteria or yeast and/or product(s) produced thereby further comprises an enteric coating or similar composition to promote survival of or avoid the acidity of the stomach and permit delivery into the small or large intestines. Non-limiting examples of enteric coatings include cellulose acetate phthalate (CAP), hydroxypropyl methylcellulose phthalate (HPMCP), hydroxypropyl methylcellulose acetate succinate (HPMCAS), polyvinyl acetate phthalate, cellulose acetate trimellitate, shellac, polymethacrylic acid, polymethyl methacrylate, polyethyl methacrylate, polyethyl acrylate, hydroxypropyl methylcellulose, hydroxypropyl cellulose, polyvinylpyrrolidone, polyethylene glycol, polyvinyl alcohol, and mixtures thereof. In some embodiments, the enteric coating is pH sensitive. As a non-limiting example, the enteric coating dissolves at a pH greater than about 6.5-7, so as to prevent the release in the stomach and permit the release in the intestines. See e.g., US Patent Application 20190046457 and U.S. Pat. No. 9,486,487, the contents of each of which are incorporated herein by reference in their entireties.

[0346] In some embodiments, the pharmaceutical composition comprising a product derived from one or more queuine, endozepine and/or heavy metal modulating bacteria or yeast as described herein can be in a parenteral dose form. Since administration of parenteral dosage forms typically bypasses the patient's natural defenses against contaminants, parenteral dosage forms are preferably sterile or capable of being sterilized prior to administration to a patient. Examples of parenteral dosage forms include, but are not limited to, solutions ready for injection, dry products ready to be dissolved or suspended in a pharmaceutically acceptable vehicle for injection, suspensions ready for injection, and emulsions. In addition, controlled-release parenteral dosage forms can be prepared for administration of a patient, including, but not limited to, DUROS®-type dosage forms and dose-dumping.

[0347] Suitable vehicles that can be used to provide parenteral dosage forms of a product derived from one or more queuine, endozepine and/or heavy metal modulating bacteria or yeast as disclosed within are well known to those skilled in the art. Examples include, without limitation: sterile water; water for injection USP; saline solution; glucose solution; aqueous vehicles such as but not limited to, sodium chloride injection, Ringer's injection, dextrose Injection, dextrose and sodium chloride injection, and lactated Ringer's injection; water-miscible vehicles such as, but not limited to, ethyl alcohol, polyethylene glycol, and propylene glycol; and non-aqueous vehicles such as, but not limited to, corn oil, cottonseed oil, peanut oil, sesame oil, ethyl oleate, isopropyl myristate, and benzyl benzoate. Compounds that alter or modify the solubility of a pharmaceutically acceptable salt of a queuine, endozepine and/or heavy metal modulating bacterial or yeast product as disclosed herein can also be incorporated into parenteral dosage, including conventional and controlled-release parenteral dosage forms.

[0348] Pharmaceutical compositions comprising at least one queuine, endozepine and/or heavy metal modulating bacteria or yeast and/or product(s) produced thereby can also be formulated to be suitable for oral administration, for example as discrete dosage forms, such as, but not limited to, tablets (including without limitation scored or coated tablets), pills, caplets, capsules, chewable tablets, powder packets, cachets, troches, wafers, aerosol sprays, or liquids, such as but not limited to, syrups, elixirs, solutions or suspensions in an aqueous liquid, a non-aqueous liquid, an oil-in-water emulsion, or a water-in-oil emulsion. Such compositions can contain a predetermined amount of a pharmaceutically acceptable salt of a bacterial or yeast-derived product, and can be prepared by methods of pharmacy well known to those skilled in the art. See generally, Remington: The Science and Practice of Pharmacy, 21st Ed., Lippincott, Williams, and Wilkins, Philadelphia Pa. (2005).

[0349] Conventional dosage forms generally provide rapid or immediate release from the formulation. Depending on the pharmacology and pharmacokinetics of the composition, use of conventional dosage forms can lead to wide fluctuations in the concentrations of the composition in a patient's blood and other tissues. These fluctuations can impact a number of parameters, such as dose frequency, onset of action, duration of efficacy, maintenance of therapeutic blood levels, toxicity, side effects, and the like. Advantageously, controlled-release formulations can be used to control parameters such as a therapeutic composition's onset of action, duration of action, plasma levels within the therapeutic window, and peak blood levels. In particular, controlled- or extended-release dosage forms or formulations can be used to ensure that the maximum effectiveness of a therapeutic composition is achieved while minimizing potential adverse effects and safety concerns, which can occur both from under-dosing a therapeutic composition (i.e., going below the minimum therapeutic levels) as well as exceeding the toxicity level for the therapeutic composition. In some embodiments, the composition comprising at least one queuine, endozepine and/or heavy metal modulating bacteria or yeast and/or product(s) produced thereby as described herein can be administered in a sustained release formulation.

[0350] Controlled-release pharmaceutical products have a common goal of improving therapeutic composition therapy over that achieved by their non-controlled release counterparts. Ideally, the use of an optimally designed controlled-release preparation in medical treatment is characterized by a minimum of therapeutic composition substance being employed to cure or control the condition in a minimum amount of time. Advantages of controlled-release formulations include: 1) extended activity of the therapeutic composition; 2) reduced dosage frequency; 3) increased patient compliance; 4) usage of less total therapeutic composition; 5) reduction in local or systemic side effects; 6) minimization of therapeutic composition accumulation; 7) reduction in blood level fluctuations; 8) improvement in efficacy of treatment; 9) reduction of potentiation or loss of therapeutic composition activity; and 10) improvement in speed of control of diseases or conditions. Kim, Cherng-ju, Controlled Release Dosage Form Design, 2 (Technomic Publishing, Lancaster, Pa.: 2000).

[0351] Most controlled-release formulations are designed to initially release an amount of active ingredient that promptly produces the desired therapeutic effect, and gradually and continually release other amounts of such ingredient to maintain this level of therapeutic or prophylactic effect over an extended period of time. In order to maintain this constant level of active ingredient in the body, the ingredient must be released from the dosage form at a rate that will replace the amount of ingredient being metabolized and excreted from the body. Controlled-release of an active ingredient can be stimulated by various conditions including, but not limited to, pH, ionic strength, osmotic pressure, temperature, enzymes, water, and other physiological conditions or compounds.

[0352] A variety of known controlled- or extended-release dosage forms, formulations, and devices can be adapted for use with the compositions as described herein. Examples include, but are not limited to, those described in U.S. Pat. Nos. 3,845,770; 3,916,899; 3,536,809; 3,598,123; 4,008,719; 5,674,533; 5,059,595; 5,591,767; 5,120,548; 5,073,543; 5,639,476; 5,354,556; 5,733,566; and 6,365,185; each of which is incorporated herein by reference. These dosage forms can be used to provide slow or controlled-release of one or more active ingredients using, for example, hydroxypropylmethyl cellulose, other polymer matrices, gels, permeable membranes, osmotic systems (such as OROS® (Alza Corporation, Mountain View, Calif. USA)), or a combination thereof to provide the desired release profile in varying proportions.

[0353] In some embodiments of any of the aspects, the composition comprising at least one queuine, endozepine and/or heavy metal modulating bacteria or yeast and/or product(s) produced thereby as described herein described herein is administered as a monotherapy, e.g., another treatment for the queuine, endozepine and/or heavy metal-related disease or disorder is not administered to the subject.

[0354] In some embodiments of any of the aspects, the methods described herein can further comprise administering a second agent and/or treatment to the subject, e.g. as part of a therapy. The combination therapy, where employed, can be tailored to the particular indication. For example, where a queuine, endozepine and/or heavy metal-modulating bacteria or yeast or product(s) as described herein is administered to treat anxiety or depression, it can be administered in combination with an anti-anxiety or anti-depression therapeutic composition or therapy as known in the art or approved for clinical treatment of anxiety or depression. Other indications can be similarly treated with queuine, endozepine and/or heavy metal modulating bacteria or yeast or their products as described herein in combination with agents known in the art or approved for the clinical treatment of those indications.

[0355] Non-limiting examples of a second agent for treatment of cognitive disorders, mood disorders, anxiety disorders, psychiatric disorders, autism, bipolar disorder, major depression, anxiety and/or schizophrenia include: analgesic combinations, antimigraine agents, CGRP inhibitors, cox-2 inhibitors, miscellaneous analgesics, narcotic analgesic combinations, narcotic analgesics, Nonsteroidal anti-inflammatory drugs, salicylates, AMPA receptor antagonists, barbiturate anticonvulsants, benzodiazepine anticonvulsants, carbamate anticonvulsants, carbonic anhydrase inhibitor anticonvulsants, dibenzazepine anticonvulsants, fatty acid derivative anticonvulsants, gamma-aminobutyric acid analogs, gamma-aminobutyric acid reuptake inhibitors, hydantoin anticonvulsants, miscellaneous anticonvulsants, neuronal potassium channel openers, oxazolidinedione anticonvulsants, pyrrolidine anticonvulsants, succinimide anticonvulsants, triazine anticonvulsants, 5HT3 receptor antagonists, anticholinergic antiemetics, miscellaneous antiemetics, NK1 receptor antagonists, phenothiazine antiemetics, anticholinergic antiparkinson agents, dopaminergic antiparkinsonism agents, miscellaneous antiparkinson agents, barbiturates, benzodiazepines, miscellaneous anxiolytics, sedatives and hypnotics, cholinergic agonists, cholinesterase inhibitors, CNS stimulants, general anesthetics, muscle relaxants, VMAT2 inhibitors, lithium, or combinations thereof.

[0356] In certain embodiments, an effective dose of a composition comprising at least one queuine, endozepine and/or heavy metal modulating bacteria or yeast and/or product(s) produced thereby as described herein can be administered to a patient once. In certain embodiments, an effective dose of a composition comprising at least one queuine, endozepine and/or heavy metal modulating bacteria or yeast and/or product(s) produced thereby as described herein can be administered to a patient repeatedly. For systemic administration, subjects can be administered a therapeutic amount of a composition comprising for example a metabolite or product of a queuine, endozepine and/or heavy metal-modulating bacteria or yeast as described herein, such as, e.g. 0.1 mg/kg, 0.5 mg/kg, 1.0 mg/kg, 2.0 mg/kg, 2.5 mg/kg, 5 mg/kg, 10 mg/kg, 15 mg/kg, 20 mg/kg, 25 mg/kg, 30 mg/kg, 40 mg/kg, 50 mg/kg, or more.

[0357] In some embodiments, after an initial treatment regimen, the treatments can be administered on a less frequent basis. For example, after treatment biweekly for three months, treatment can be repeated once per month, for six months or a year or longer. Depending upon the indication, treatment according to the methods described herein can increase levels of a marker (e.g., queuine, endozepine and/or heavy metal or other marker) by at least 10%, at least 15%, at least 20%, at least 25%, at least 30%, at least 40%, at least 50%, at least 60%, at least 70%, at least 80% or at least 90% or more. Alternatively, treatment according to the methods described herein can reduce levels of a or symptom of a condition, e.g. a queuine, endozepine and/or heavy metal-related disease or disorder by at least 10%, at least 15%, at least 20%, at least 25%, at least 30%, at least 40%, at least 50%, at least 60%, at least 70%, at least 80% or at least 90% or more.

[0358] The dosage of a composition as described herein can be determined by a physician and adjusted, as necessary, to suit observed effects of the treatment. With respect to duration and frequency of treatment, it is typical for skilled clinicians to monitor subjects in order to determine when the treatment is providing therapeutic benefit, and to determine whether to increase or decrease dosage, increase or decrease administration frequency, discontinue treatment, resume treatment, or make other alterations to the treatment regimen. The dosing schedule can vary from once a week to daily depending on a number of clinical factors, such as the subject's sensitivity to a composition comprising at least one queuine, endozepine and/or heavy metal modulating bacteria or yeast and/or product(s) produced thereby as described herein. The desired dose or amount can be administered at one time or divided into subdoses, e.g., 2-4 subdoses and administered over a period of time, e.g., at appropriate intervals through the day or other appropriate schedule. In some embodiments, administration can be chronic, e.g., one or more doses and/or treatments daily over a period of weeks or months. Examples of dosing and/or treatment schedules are administration daily, twice daily, three times daily or four or more times daily over a period of 1 week, 2 weeks, 3 weeks, 4 weeks, 1 month, 2 months, 3 months, 4 months, 5 months, or 6 months, or more. Alternative examples include dosing daily, every other day, twice weekly, every 10 days, every two weeks, once a month, every six weeks, every two months, or less frequently as required to maintain a beneficial effect. A composition comprising at least one queuine, endozepine and/or heavy metal modulating bacteria or yeast and/or product(s) produced thereby as described herein can be administered over a period of time, such as over a 5 minute, 10 minute, 15 minute, 20 minute, or 25 minute period.

[0359] The dosage ranges for the administration of a composition comprising at least one queuine, endozepine and/or heavy metal modulating bacteria or yeast and/or product(s) produced thereby as described herein, according to the methods described herein depend upon, for example, the form of the composition, its potency, and the extent to which symptoms, markers, or indicators of a condition described herein are desired to be reduced, for example the percentage reduction or increase desired for queuine, endozepine and/or heavy metal. The dosage should not be so large as to cause adverse side effects. Generally, the dosage will vary with the age, condition, and sex of the patient and can be determined by one of skill in the art. The dosage can also be adjusted by the individual physician in the event of any complication.

[0360] The efficacy of a composition comprising at least one queuine, endozepine and/or heavy metal modulating bacteria or yeast and/or product(s) produced thereby as described herein, e.g. the treatment of a condition described herein, or to induce a response as described herein (e.g. modulation of queuine, endozepine and/or heavy metal levels) can be determined by the skilled clinician. However, a treatment is considered “effective treatment,” as the term is used herein, if one or more of the signs or symptoms of a condition described herein are altered in a beneficial manner, other clinically accepted symptoms are improved, or even ameliorated, or a desired response is induced e.g., by at least 10% following treatment according to the methods described herein. For CNS disorders, such as depression or anxiety, among others, a change for the better by at least one increment on a clinically accepted scale of disease severity can be considered effective treatment. For example, an improvement on the Hamilton Depression Rating Scale, the Clinical Assessment of Depression (CAD), or other clinically-accepted scale of disease can indicate effective treatment. Efficacy can be assessed, for example, by measuring a marker, indicator, symptom, and/or the incidence of a condition treated according to the methods described herein or any other measurable parameter appropriate. Efficacy can also be measured by a failure of an individual to worsen as assessed by hospitalization, or need for medical interventions (i.e., progression of the disease is halted). Methods of measuring these indicators are known to those of skill in the art and/or are described herein. Treatment includes any treatment of a disease in an individual or an animal and includes: (1) inhibiting the disease, e.g., slowing or preventing a worsening of symptoms (e.g. depression, anxiety, etc.); or (2) relieving the severity of the disease, e.g., causing regression of symptoms. An effective amount for the treatment of a disease means that amount which, when administered to a subject in need thereof, is sufficient to result in effective treatment as that term is defined herein, for that disease. Efficacy of an agent can be determined by assessing physical indicators of a condition or desired response. It is well within the ability of one skilled in the art to monitor efficacy of administration and/or treatment by measuring any one of such parameters, or any combination of parameters. Efficacy can be assessed in animal models of a condition described herein, for example treatment of queuine, endozepine and/or heavy metal-related disease or disorder. When using an experimental animal model, efficacy of treatment is evidenced when a statistically significant change in a marker is observed, e.g. queuine, endozepine and/or heavy metal.

[0361] The efficacy of a given dosage combination can also be assessed in an animal model, e.g. germ-free animal models or alternatively, in a specific pathogen-free (SPF) animal model, or in an animal model of a queuine, endozepine and/or heavy metal-related disease or disorder.

[0362] Groupings of alternative elements or embodiments of the invention disclosed herein are not to be construed as limitations. Each group member can be referred to and claimed individually or in any combination with other members of the group or other elements found herein. One or more members of a group can be included in, or deleted from, a group for reasons of convenience and/or patentability. When any such inclusion or deletion occurs, the specification is herein deemed to contain the group as modified thus fulfilling the written description of all Markush groups used in the appended claims.

[0363] Unless otherwise defined herein, scientific and technical terms used in connection with the present application shall have the meanings that are commonly understood by those of ordinary skill in the art to which this disclosure belongs. It should be understood that this invention is not limited to the particular methodology, protocols, and reagents, etc., described herein and as such can vary. The terminology used herein is for the purpose of describing particular embodiments only, and is not intended to limit the scope of the present invention, which is defined solely by the claims. Definitions of common terms in immunology and molecular biology can be found in The Merck Manual of Diagnosis and Therapy, 20th Edition, published by Merck Sharp & Dohme Corp., 2018 (ISBN 0911910190, 978-0911910421); Robert S. Porter et al. (eds.), The Encyclopedia of Molecular Cell Biology and Molecular Medicine, published by Blackwell Science Ltd., 1999-2012 (ISBN 9783527600908); and Robert A. Meyers (ed.), Molecular Biology and Biotechnology: a Comprehensive Desk Reference, published by VCH Publishers, Inc., 1995 (ISBN 1-56081-569-8); Immunology by Werner Luttmann, published by Elsevier, 2006; Janeway's Immunobiology, Kenneth Murphy, Allan Mowat, Casey Weaver (eds.), W. W. Norton & Company, 2016 (ISBN 0815345054, 978-0815345053); Lewin's Genes XI, published by Jones & Bartlett Publishers, 2014 (ISBN-1449659055); Michael Richard Green and Joseph Sambrook, Molecular Cloning: A Laboratory Manual, 4th ed., Cold Spring Harbor Laboratory Press, Cold Spring Harbor, N.Y., USA (2012) (ISBN 1936113414); Davis et al., Basic Methods in Molecular Biology, Elsevier Science Publishing, Inc., New York, USA (2012) (ISBN 044460149X); Laboratory Methods in Enzymology: DNA, Jon Lorsch (ed.) Elsevier, 2013 (ISBN 0124199542); Current Protocols in Molecular Biology (CPMB), Frederick M. Ausubel (ed.), John Wiley and Sons, 2014 (ISBN 047150338X, 9780471503385), Current Protocols in Protein Science (CPPS), John E. Coligan (ed.), John Wiley and Sons, Inc., 2005; and Current Protocols in Immunology (CPI) (John E. Coligan, ADA M Kruisbeek, David H Margulies, Ethan M Shevach, Warren Strobe, (eds.) John Wiley and Sons, Inc., 2003 (ISBN 0471142735, 9780471142737), the contents of which are all incorporated by reference herein in their entireties.

[0364] Other terms are defined herein within the description of the various aspects of the invention.

[0365] All patents and other publications; including literature references, issued patents, published patent applications, and co-pending patent applications; cited throughout this application are expressly incorporated herein by reference for the purpose of describing and disclosing, for example, the methodologies described in such publications that might be used in connection with the technology described herein. These publications are provided solely for their disclosure prior to the filing date of the present application. Nothing in this regard should be construed as an admission that the inventors are not entitled to antedate such disclosure by virtue of prior invention or for any other reason. All statements as to the date or representation as to the contents of these documents is based on the information available to the applicants and does not constitute any admission as to the correctness of the dates or contents of these documents.

[0366] The description of embodiments of the disclosure is not intended to be exhaustive or to limit the disclosure to the precise form disclosed. While specific embodiments of, and examples for, the disclosure are described herein for illustrative purposes, various equivalent modifications are possible within the scope of the disclosure, as those skilled in the relevant art will recognize. For example, while method steps or functions are presented in a given order, alternative embodiments may perform functions in a different order, or functions may be performed substantially concurrently. The teachings of the disclosure provided herein can be applied to other procedures or methods as appropriate. The various embodiments described herein can be combined to provide further embodiments. Aspects of the disclosure can be modified, if necessary, to employ the compositions, functions and concepts of the above references and application to provide yet further embodiments of the disclosure. These and other changes can be made to the disclosure in light of the detailed description. All such modifications are intended to be included within the scope of the appended claims.

[0367] Specific elements of any of the foregoing embodiments can be combined or substituted for elements in other embodiments. Furthermore, while advantages associated with certain embodiments of the disclosure have been described in the context of these embodiments, other embodiments may also exhibit such advantages, and not all embodiments need necessarily exhibit such advantages to fall within the scope of the disclosure.

[0368] The technology described herein is further illustrated by the following examples which in no way should be construed as being further limiting.

[0369] Some embodiments of the technology described herein can be defined according to any of the following numbered paragraphs:
[0370] 1. A method for treating or preventing a gut microbiome dysbiosis-mediated central nervous system (CNS) disorder associated with queuine deficiency in a mammalian subject, comprising: administering to subjects dysbiotic for queuine producing gut microbes a probiotic containing an effective amount of a viable queuine producing bacterial strain capable of safely colonizing the subject's gut and viable and functional to re-establish normal microbiome queuine production levels in the gut, or a pharmaceutical composition comprising queuine in a dosage and delivery form suitable for queuine delivery to the gut and in an amount sufficient to meet or exceed normal gut queuine levels, whereby one or more symptoms of the CNS disorder associated with queuine deficiency in the subject is substantially alleviated.
[0371] 2. The method of any one of the preceding paragraphs, wherein the CNS disorder is selected from a cognitive disorder, a mood disorder, an anxiety disorder, or a psychiatric disorder.
[0372] 3. The method of any one of the preceding paragraphs, wherein the CNS disorder is selected from autism, bipolar disorder, major depression, anxiety or schizophrenia.
[0373] 4. The method of any one of the preceding paragraphs, wherein the queuine producing bacterial strain is formulated for oral or mucosal delivery with a pharmaceutically acceptable excipient, carrier or diluent.
[0374] 5. A nutritional supplement comprising: an isolated queuine producing mammalian gut-compatible bacterium, formulated and provided in sufficient bacterial numbers to colonize a gut of a mammalian subject following oral ingestion, said bacterium being viable and functional to support or establish normal microbiome queuine production levels in the gut.
[0375] 6. A method for treating antibiotic-associated gut dysbiosis in a mammalian subject, comprising administering a nutritional supplement according to any one of the preceding paragraphs to the subject.
[0376] 7. A feedstuff, food product, dietary supplement, nutritional supplement or food additive comprising: an isolated queuine producing mammalian gut-compatible bacterium, formulated and provided in sufficient bacterial numbers to colonize a gut of a mammalian subject following oral ingestion, said bacterium being viable and functional to support or establish normal microbiome queuine production levels in the gut.
[0377] 8. A pharmaceutical composition comprising: an isolated queuine producing mammalian gut-compatible bacterium, formulated for oral or mucosal delivery and containing sufficient numbers of bacteria to colonize a gut of a mammalian subject following administration, the bacterium being viable and functional to support or establish normal microbiome queuine production levels in the gut after administration.
[0378] 9. A pharmaceutical composition for treating a gut-dysbiosis associated CNS disorder in a mammalian subject exhibiting queuine and/or tetrahydrobiopterin deficiency comprising: queuine or a precursor or analog thereof in a dosage and delivery form suitable for delivery to the gut, in an amount sufficient to meet or exceed normal gut queuine levels, whereby one or more symptoms of the CNS disorder in the subject is substantially alleviated.

[0379] Some embodiments of the technology described herein can be defined according to any of the following numbered paragraphs:
[0380] 1. A composition comprising one or more isolated, non-pathogenic queuine-producing bacterial strains or an isolated product derived therefrom.
[0381] 2. The composition of paragraph 1, wherein the one or more isolated, non-pathogenic queuine-producing bacterial strains comprise live bacteria or dead bacteria, or wherein the isolated product derived therefrom comprises culture medium in which said one or more isolated, non-pathogenic bacterial strains have been cultured.
[0382] 3. The composition of paragraph 1 or paragraph 2, wherein the isolated product derived therefrom comprises a purified polypeptide produced by the one or more bacterial strains.
[0383] 4. The composition of any one of paragraphs 1-3, further comprising a pharmaceutically acceptable carrier, wherein the one or more isolated non-pathogenic queuine-producing bacterial strains or an isolated product derived therefrom is present in an amount effective to alter queuine levels in a subject in need thereof.
[0384] 5. A pharmaceutical composition comprising queuine, an analog, derivative or precursor thereof, or a combination of any of these, in an amount effective to alter queuine levels in a subject in need thereof, and a pharmaceutically acceptable carrier.
[0385] 6. The pharmaceutical composition of paragraph 5, wherein the queuine, analog, derivative or precursor is isolated from a queuine-producing bacterial strain or culture medium in which a queuine-producing bacterial strain has been cultured.
[0386] 7. The composition of any one of paragraphs 1-6, wherein the at least one isolated non-pathogenic queuine producing bacteria is a human gut bacteria.
[0387] 8. The composition of any one of paragraphs 1-7, wherein the at least one isolated non-pathogenic queuine-producing bacteria belongs to a species selected from Acetobacter pasteurianus, Achromobacter xylosoxidans, Acidaminococcus fermentans, Acidaminococcus intestini, Acinetobacter baumannii, Acinetobacter calcoaceticus, Acinetobacter junii, Acinetobacter lwoffii, Acinetobacter pittii, Acinetobacter radioresistens, Acinetobacter schindleri, Acinetobacter towneri, Acinetobacter ursingii, Acinetobacter variabilis, Adlercreutzia equolifaciens, Aeribacillus pallidus, Aeromonas caviae, Aeromonas enteropelogenes, Aeromonas hydrophila, Aeromonas jandaei, Aeromonas salmonicida, Aeromonas schubertii, Aeromonas veronii, Aggregatibacter aphrophilus, Akkermansia muciniphila, Alistipes onderdonkii, Alistipes putredinis, Allisonella histaminiformans, Anaeroglobus geminatus, Anaerostipes caccae, Anaerostipes hadrus, Aneurinibacillus aneurinilyticus, Aneurinibacillus migulanus, Anoxybacillus flavithermus, Asaccharobacter celatus, Bacillus altitudinis, Bacillus amyloliquefaciens, Bacillus aquimaris, Bacillus atrophaeus, Bacillus badius, Bacillus bataviensis, Bacillus cereus, Bacillus circulans, Bacillus clausii, Bacillus coagulans, Bacillus cohnii, Bacillus endophyticus, Bacillus firmus, Bacillus flexus, Bacillus fordii, Bacillus galactosidilyticus, Bacillus halodurans, Bacillus infantis, Bacillus koreensis, Bacillus kyonggiensis, Bacillus lentus, Bacillus licheniformis, Bacillus litoralis, Bacillus marisflavi, Bacillus megaterium, Bacillus mojavensis, Bacillus mycoides, Bacillus nealsonii, Bacillus okuhidensis, Bacillus pseudofirmus, Bacillus pseudomycoides, Bacillus pumilus, Bacillus simplex, Bacillus sonorensis, Bacillus subterraneus, Bacillus subtilis, Bacillus thuringiensis, Bacillus timonensis, Bacillus vallismortis, Bacillus vietnamensis, Bacillus weihenstephanensis, Bacteroides caccae, Bacteroides cellulosilyticus, Bacteroides clarus, Bacteroides coprocola, Bacteroides dorei, Bacteroides eggerthii, Bacteroides faecis, Bacteroides fragilis, Bacteroides intestinalis, Bacteroides massiliensis, Bacteroides nordii, Bacteroides ovatus, Bacteroides plebeius, Bacteroides salyersiae, Bacteroides stercoris, Bacteroides thetaiotaomicron, Bacteroides uniformis, Bacteroides vulgatus, Bacteroides xylanisolvens, Bacteroides xylanolyticus, Barnesiella intestinihominis, Barnesiella viscericola, Bilophila wadsworthia, Blautia luti, Bordetella bronchiseptica, Bordetella trematum, Brenneria alni, Brevibacillus agri, Brevibacillus brevis, Brevibacillus choshinensis, Brevibacillus formosus, Brevibacillus laterosporus, Brevibacillus parabrevis, Brevundimonas diminuta, Butyricimonas virosa, Campylobacter coli, Campylobacter concisus, Campylobacter curvus, Campylobacter gracilis, Campylobacter jejuni, Campylobacter showae, Campylobacter ureolyticus, Cedecea lapagei, Cedecea neteri, Chromohalobacter japonicus, Citrobacter amalonaticus, Citrobacter braakii, Citrobacter farmeri, Citrobacter freundii, Citrobacter gillenii, Citrobacter koseri, Citrobacter murliniae, Citrobacter youngae, Clostridium acetireducens, Clostridium bartlettii, Clostridium beijerinckii, Clostridium botulinum, Clostridium butyricum, Clostridium carboxidivorans, Clostridium colicanis, Clostridium diolis, Clostridium disporicum, Clostridium novyi, Clostridium ramosum, Clostridium sporogenes, Clostridium thermocellum, Coprococcus catus, Coprococcus eutactus, Cronobacter sakazakii, Delftia tsuruhatensis, Desulfovibrio desulfuricans, Desulfovibrio fairfieldensis, Desulfovibrio piger, Dialister invisus, Dialister pneumosintes, Enterobacter aerogenes, Enterobacter asburiae, Enterobacter cloacae, Enterobacter hormaechei, Enterobacter kobei, Enterobacter ludwigii, Enterorhabdus caecimuris, Erysipelatoclostridium ramosum, Escherichia coli, Escherichiafergusonii, Escherichia hermannii, Escherichia marmotae, Geobacillus stearothermophilus, Haemophilus influenzae, Haemophilus pittmaniae, Hafnia alvei, Halobacillus dabanensis, Halobacillus karajensis, Halobacillus salinus, Halobacillus trueperi, Helicobacter pylori, Intestinibacter bartlettii, Klebsiella oxytoca, Klebsiella pneumoniae, Klebsiella variicola, Kluyvera cryocrescens, Kluyvera georgiana, Kosakonia cowanii, Kushneria sinocarnis, Lachnospira pectinoschiza, Lachnotalea glycerini, Lactobacillus mali, Leclercia adecarboxylata, Lelliottia amnigena, Litorilituus sediminis, Lysinibacillus boronitolerans, Lysinibacillus fusiformis, Lysinibacillus massiliensis, Lysinibacillus sphaericus, Lysinibacillus xylanilyticus, Lysobacter soli, Megasphaera elsdenii, Megasphaera micronuciformis, Micrococcus lylae, Mitsuokella jalaludinii, Moellerella wisconsensis, Monoglobus pectinilyticus, Moraxella osloensis, Morganella morganii, Neisseria canis, Neisseria cinerea, Neisseria elongata, Neisseria flavescens, Neisseria gonorrhoeae, Neisseria macacae, Neisseria meningitidis, Neisseria mucosa, Neisseria perflava, Neisseria subflava, Nosocomiicoccus massiliensis, Noviherbaspirillum denitrificans, Oceanobacillus iheyensis, Oceanobacillus oncorhynchi, Oceanobacillus sojae, Ochrobactrum anthropi, Odoribacter splanchnicus, Oxalobacter formigenes, Paenibacillus alvei, Paenibacillus amylolyticus, Paenibacillus barcinonensis, Paenibacillus barengoltzii, Paenibacillus daejeonensis, Paenibacillus dendritiformis, Paenibacillus glucanolyticus, Paenibacillus illinoisensis, Paenibacillus lactis, Paenibacillus larvae, Paenibacillus lautus, Paenibacillus macerans, Paenibacillus naphthalenovorans, Paenibacillus odorifer, Paenibacillus pabuli, Paenibacillus pasadenensis, Paenibacillus polymyxa, Paenibacillus rhizosphaerae, Paenibacillus stellifer, Paenibacillus thiaminolyticus, Paenibacillus typhae, Pantoea agglomerans, Parabacteroides distasonis, Parabacteroides goldsteinii, Parabacteroides gordonii, Parabacteroides johnsonii, Parabacteroides merdae, Paraprevotella clara, Parasutterella excrementihominis, Peptoniphilus asaccharolyticus, Peptoniphilus indolicus, Planococcus rifietoensis, Porphyromonas asaccharolytica, Porphyromonas bennonis, Porphyromonas somerae, Prevotella bivia, Prevotella buccae, Prevotella buccalis, Prevotella copri, Prevotella timonensis, Proteus mirabilis, Proteus penneri, Proteus vulgaris, Providencia alcalifaciens, Providencia heimbachae, Providencia rettgeri, Providencia stuartii, Pseudomonas aeruginosa, Pseudomonas alcaligenes, Pseudomonas bauzanensis, Pseudomonas caricapapayae, Pseudomonas chlororaphis, Pseudomonas fluorescens, Pseudomonas fragi, Pseudomonas fulva, Pseudomonas gessardii, Pseudomonas japonica, Pseudomonas libanensis, Pseudomonas lundensis, Pseudomonas luteola, Pseudomonas migulae, Pseudomonas monteilii, Pseudomonas mosselii, Pseudomonas oleovorans, Pseudomonas oryzihabitans, Pseudomonas putida, Pseudomonas rhodesiae, Pseudomonas saudiphocaensis, Pseudomonas stutzeri, Pseudomonas taetrolens, Pseudomonas tolaasii, Pseudomonas xanthomarina, Psychrobacter phenylpyruvicus, Raoultella ornithinolytica, Raoultella planticola, Roseomonas gilardii, Roseomonas mucosa, Ruminococcus albus, Ruminococcus callidus, Ruminococcus flavefaciens, Ruminococcus lactaris, Ruminococcus torques, Salinisphaera halophila, Salinivibrio costicola, Salmonella enterica, Salmonella enteritidis, Salmonella typhi, Selenomonas ruminantium, Selenomonas sputigena, Senegalimassilia anaerobia, Serratia marcescens, Serratia ureilytica, Shewanella xiamenensis, Shigella boydii, Shigella dysenteriae, Shigella flexneri, Shigella sonnei, Sphingomonas aerolata, Staphylococcus arlettae, Staphylococcus aureus, Staphylococcus auricularis, Staphylococcus capitis, Staphylococcus caprae, Staphylococcus carnosus, Staphylococcus cohnii, Staphylococcus condimenti, Staphylococcus devriesei, Staphylococcus epidermidis, Staphylococcus equorum, Staphylococcus gallinarum, Staphylococcus haemolyticus, Staphylococcus hominis, Staphylococcus hyicus, Staphylococcus intermedius, Staphylococcus kloosii, Staphylococcus lentus, Staphylococcus lugdunensis, Staphylococcus nepalensis, Staphylococcus pasteuri, Staphylococcus petrasii, Staphylococcus pettenkoferi, Staphylococcus saccharolyticus, Staphylococcus saprophyticus, Staphylococcus schleiferi, Staphylococcus sciuri, Staphylococcus simiae, Staphylococcus simulans, Staphylococcus succinus, Staphylococcus vitulinus, Staphylococcus warneri, Staphylococcus xylosus, Stenotrophomonas acidaminiphila, Stenotrophomonas maltophilia, Stenotrophomonas rhizophila, Streptococcus australis, Streptococcus bovis, Streptococcus equinus, Streptococcus gallolyticus, Streptococcus infantarius, Streptococcus infantis, Streptococcus lutetiensis, Streptococcus mitis, Streptococcus mutans, Streptococcus oralis, Streptococcus peroris, Streptococcus pseudopneumoniae, Streptococcus salivarius, Streptococcus sobrinus, Streptococcus thermophilus, Streptococcus tigurinus, Streptococcus vestibularis, Succiniclasticum ruminis, Terribacillus aidingensis, Terribacillus halophilus, Thermotalea metallivorans, Turicibacter sanguinis, Veillonella atypica, Veillonella denticariosi, Veillonella dispar, Veillonella parvula, Vibrio cholerae, Victivallis vadensis, Virgibacillus massiliensis, Yersinia bercovieri, Yersinia enterocolitica, Yersinia intermedia, Yersinia kristensenii, Yersinia mollaretii, and combinations thereof.
[0388] 9. The composition of any one of paragraphs 1-8, wherein the one or more non-pathogenic queuine producing bacteria is a human gut bacteria, and comprises a 16S rRNA sequence at least about 97% identical to a 16S rRNA sequence selected from SEQ ID NOs 1-406.
[0389] 10. The composition of any one of paragraphs 1-9, wherein the at least one isolated non-pathogenic queuine producing bacteria is a human gut bacteria that encodes within its genome and expresses in the human gastrointestinal tract at least one queuine biosynthesis enzyme selected from folE (GTP cyclohydrolase), QueD (6-carboxy-5,6,7,8-tetrahydrobiopterin synthase), QueE (7-carboxy-7-deazaguanine synthase), QueC (7-cyano-7-deazaguanine synthase, PreQ0 synthase), QueF (7-cyano-7-deazaguanine reductase, PreQ0 reductase), tgt or btgt (tRNA guanine transglycosylase, bacterial tRNA guanine transglycosylase), QueA (S-adenosylmethionine:tRNA ribosyltransferase-isomerase), and QueG or QueH (epoxyqueuosine reductase).
[0390] 11. The composition of any one of paragraphs 1-10, wherein the at least one isolated non-pathogenic queuine producing bacteria is a human gut bacteria that encodes within its genome and expresses in the human gastrointestinal tract at least one queuine biosynthesis enzyme, wherein the amino acid sequence encoded by the at least one queuine biosynthesis gene is at least 90% similar to a sequence selected from SEQ ID NOs 3660-82283.
[0391] 12. The composition of any one of paragraphs 1-11, wherein the at least one isolated non-pathogenic queuine producing bacteria is a human gut bacteria belongs to species selected from Acidaminococcus fermentans, Adlercreutzia equolifaciens, Akkermansia muciniphila, Alloprevotella tannerae, Anaerostipes caccae, Anaerostipes hadrus, Arcobacter butzleri, Bacteroides caccae, Bacteroides cellulosilyticus, Bacteroides clarus, Bacteroides coprophilus, Bacteroides dorei, Bacteroides eggerthii, Bacteroides faecis, Bacteroides fragilis, Bacteroides massiliensis, Bacteroides nordii, Bacteroides oleiciplenus, Bacteroides ovatus, Bacteroides plebeius, Bacteroides salanitronis, Bacteroides salyersiae, Bacteroides stercoris, Bacteroides thetaiotaomicron, Bacteroides uniformis, Bacteroides vulgatus, Bacteroides xylanisolvens, Barnesiella intestinihominis, Bilophila wadsworthia, Butyrivibrio crossotus, Campylobacter curvus, Citrobacter freundii, Citrobacter koseri, Clostridium bartelettii, Clostridium ramosum, Coprobacter fastidiosus, Coprococcus catus, Coprococcus eutactus, Desulfovibrio piger, Dialister invisus, Dialister succinatiphilus, Enterobacter aerogenes, Enterobacter cancerogenus, Enterobacter cloacae, Enterorhabdus caecimuris, Escherichia coli, Eubacterium hallii, Fusobacterium mortiferum, Haemophilus pittmaniae, Haemophilus sputorum, Hafnia alvei, Klebsiella oxytoca, Klebsiella pneumoniae, Klebsiella variicola, Megamonas funiformis, Megamonas rupellensis, Megasphaera elsdenii, Megasphaera micronuciformis, Mitsuokella multacida, Odoribacter laneus, Odoribacter splanchnicus, Oxalobacter formigenes, Parabacteroides distasonis, Porphyromonas asaccharolytica, Porphyromonas uenonis, Ruminococcus callidus, Ruminococcus torques, Shigella sonnei, Streptococcus infantis, Streptococcus mitis, Streptococcus oralis, Streptococcus pneumoniae, Streptococcus tigurinus, Turicibacter sanguinis, Veillonella atypica, Veillonella dispar, Veillonella parvula, Dysgonomonas mossii, Proteus mirabilis, Veillonella ratti, and combinations thereof, and wherein the at least one isolated non-pathogenic queuine producing bacteria encodes within its genome and expresses in the human gastrointestinal tract at least one queuine biosynthesis enzyme with an amino acid sequence at least 90% identical to a sequence selected from SEQ ID NOs 3660-82283.
[0392] 13. The composition of any one of paragraphs 1-12, wherein the at least one isolated non-pathogenic queuine producing bacteria is a human gut bacteria with a 16S rRNA sequence at least about 97% identical to a 16S rRNA sequence selected from SEQ ID NOs 1-78, and the at least one isolated non-pathogenic queuine producing bacteria encodes within its genome and expresses in the human gastrointestinal tract at least one queuine biosynthesis enzyme with an amino acid sequence at least 90% identical to a sequence selected from SEQ ID NOs 3660-82283.
[0393] 14. The composition of paragraph 5 or 6, wherein the queuine precursor is epoxyqueuine and/or cobalamin.
[0394] 15. The composition of paragraph 5 or 6, wherein the queuine analogs are selected from queuosine, a mannosyl queuosine, galactosyl queuosine, glutamyl queuosine, mannosylqueuine, galactosylqueuine, and aminoacylated derivatives such as glutamylqueuine.
[0395] 16. The composition of any one of paragraphs 1-15, wherein the composition is formulated in a capsule, a tablet, a caplet, a pill, a troche, a lozenge, a powder, a granule, a nutraceutical, a medical food, or a combination thereof.
[0396] 17. The composition of any one of paragraphs 1-16, formulated for delivery to the gut.
[0397] 18. The composition of any one of paragraphs 1-17, further comprising a prebiotic.
[0398] 19. The composition of any one of paragraphs 1-18, further comprising a different composition in an amount effective to treat a CNS disease or disorder.
[0399] 20. The composition of any one of paragraphs 1-19, wherein the composition is administered orally, intravenously, intramuscularly, intrathecally, subcutaneously, sublingually, buccally, rectally, vaginally, by the ocular route, by the otic route, nasally, via inhalation, by nebulization, cutaneously, transdermally, or combinations thereof, and formulated for delivery with a pharmaceutically acceptable excipient, carrier or diluent.
[0400] 21. A method of increasing queuine levels in a subject in need thereof, the method comprising administering to the subject a composition of any one of paragraphs 1-20 in an amount effective to increase queuine levels in the subject.
[0401] 22. The method of paragraph 21, wherein the subject is a mammalian subject.
[0402] 23. The method of paragraph 21 or 22, wherein the subject is a human subject.
[0403] 24. A method for treating or preventing a gut microbiome dysbiosis-mediated central nervous system (CNS) disorder associated with queuine deficiency in a mammalian subject in need thereof, comprising administering to a subject dysbiotic for queuine producing gut microbes or low in queuine one or more isolated queuine-producing bacterial strains or an isolated product derived therefrom in an amount sufficient to increase queuine or to establish a queuine level within the range of normal in the subject, whereby one or more symptoms of the CNS disorder associated with queuine deficiency in the subject is improved.
[0404] 25. A method for treating or preventing a central nervous system (CNS) disorder associated with queuine deficiency in a mammalian subject in need thereof, comprising administering to the subject a composition comprising an agent selected from queuine, a queuine precursor, or a queuine analog, in an amount sufficient to increase queuine or to establish a queuine level within the range of normal in the subject, whereby one or more symptoms of the CNS disorder associated with queuine deficiency in the subject is improved.
[0405] 26. The method of paragraph 24 or 25, wherein the CNS disorder is selected from a cognitive disorder, a mood disorder, an anxiety disorder, and a psychiatric disorder.
[0406] 27. The method of any one of paragraphs 24-27, wherein the CNS disorder is selected from autism, bipolar disorder, major depression, anxiety and schizophrenia.
[0407] 28. The method of any one of paragraphs 21-27, further comprising identifying a subject in need of treatment by determining whether the subject would benefit from an increase in endogenous queuine.
[0408] 29. The method of any one of paragraphs 21-28, wherein the amount of queuine in the subject's blood, liver, brain, serum, or stool is below 50 ng/mL.
[0409] 30. The method of any one of paragraphs 21-29, wherein the amount of queuosine-modified Histidyl tRNA in a sample of the subject's blood, liver, brain, serum, or stool is less than 80% that of the total Histidyl tRNA in the sample.
[0410] 31. The method of any one of paragraphs 21-30, wherein the amount of queuine-producing bacteria in the subject's stool is less than about 10% of total bacteria as measured by 16S sequence or shotgun sequencing.
[0411] 32. The method of any one of paragraphs 21-31, wherein the amount of queuine, queuine-incorporated RNA, or BH4 in the subject's blood, liver, brain, serum, or stool is increased relative to the initial amount after administering the composition.
[0412] 33. The method of any one of paragraphs 21-32, wherein the amount of queuine producing bacteria is increased in the subject's stool relative to the initial amount after administering the composition.
[0413] 34. The method of any one of paragraphs 21-33, wherein the amount of queuine producing genes are increased in the subject's stool relative to the initial amount after administering the composition.
[0414] 35. The method of any one of paragraphs 21-34, wherein the at least one isolated non-pathogenic queuine producing bacteria is a human gut bacteria, and belongs to the species selected from Acetobacter pasteurianus, Achromobacter xylosoxidans, Acidaminococcus fermentans, Acidaminococcus intestini, Acinetobacter baumannii, Acinetobacter calcoaceticus, Acinetobacter junii, Acinetobacter lwoffii, Acinetobacter pittii, Acinetobacter radioresistens, Acinetobacter schindleri, Acinetobacter towneri, Acinetobacter ursingii, Acinetobacter variabilis, Adlercreutzia equolifaciens, Aeribacillus pallidus, Aeromonas caviae, Aeromonas enteropelogenes, Aeromonas hydrophila, Aeromonas jandaei, Aeromonas salmonicida, Aeromonas schubertii, Aeromonas veronii, Aggregatibacter aphrophilus, Akkermansia muciniphila, Alistipes onderdonkii, Alistipes putredinis, Allisonella histaminiformans, Anaeroglobus geminatus, Anaerostipes caccae, Anaerostipes hadrus, Aneurinibacillus aneurinilyticus, Aneurinibacillus migulanus, Anoxybacillus flavithermus, Asaccharobacter celatus, Bacillus altitudinis, Bacillus amyloliquefaciens, Bacillus aquimaris, Bacillus atrophaeus, Bacillus badius, Bacillus bataviensis, Bacillus cereus, Bacillus circulans, Bacillus clausii, Bacillus coagulans, Bacillus cohnii, Bacillus endophyticus, Bacillus firmus, Bacillus flexus, Bacillus fordii, Bacillus galactosidilyticus, Bacillus halodurans, Bacillus infantis, Bacillus koreensis, Bacillus kyonggiensis, Bacillus lentus, Bacillus licheniformis, Bacillus litoralis, Bacillus marisflavi, Bacillus megaterium, Bacillus mojavensis, Bacillus mycoides, Bacillus nealsonii, Bacillus okuhidensis, Bacillus pseudofirmus, Bacillus pseudomycoides, Bacillus pumilus, Bacillus simplex, Bacillus sonorensis, Bacillus subterraneus, Bacillus subtilis, Bacillus thuringiensis, Bacillus timonensis, Bacillus vallismortis, Bacillus vietnamensis, Bacillus weihenstephanensis, Bacteroides caccae, Bacteroides cellulosilyticus, Bacteroides clarus, Bacteroides coprocola, Bacteroides dorei, Bacteroides eggerthii, Bacteroides faecis, Bacteroides fragilis, Bacteroides intestinalis, Bacteroides massiliensis, Bacteroides nordii, Bacteroides ovatus, Bacteroides plebeius, Bacteroides salyersiae, Bacteroides stercoris, Bacteroides thetaiotaomicron, Bacteroides uniformis, Bacteroides vulgatus, Bacteroides xylanisolvens, Bacteroides xylanolyticus, Barnesiella intestinihominis, Barnesiella viscericola, Bilophila wadsworthia, Blautia luti, Bordetella bronchiseptica, Bordetella trematum, Brenneria alni, Brevibacillus agri, Brevibacillus brevis, Brevibacillus choshinensis, Brevibacillus formosus, Brevibacillus laterosporus, Brevibacillus parabrevis, Brevundimonas diminuta, Butyricimonas virosa, Campylobacter coli, Campylobacter concisus, Campylobacter curvus, Campylobacter gracilis, Campylobacter jejuni, Campylobacter showae, Campylobacter ureolyticus, Cedecea lapagei, Cedecea neteri, Chromohalobacter japonicus, Citrobacter amalonaticus, Citrobacter braakii, Citrobacter farmeri, Citrobacter freundii, Citrobacter gillenii, Citrobacter koseri, Citrobacter murliniae, Citrobacter youngae, Clostridium acetireducens, Clostridium bartlettii, Clostridium beijerinckii, Clostridium botulinum, Clostridium butyricum, Clostridium carboxidivorans, Clostridium colicanis, Clostridium diolis, Clostridium disporicum, Clostridium novyi, Clostridium ramosum, Clostridium sporogenes, Clostridium thermocellum, Coprococcus catus, Coprococcus eutactus, Cronobacter sakazakii, Delftia tsuruhatensis, Desulfovibrio desulfuricans, Desulfovibrio fairfieldensis, Desulfovibrio piger, Dialister invisus, Dialister pneumosintes, Enterobacter aerogenes, Enterobacter asburiae, Enterobacter cloacae, Enterobacter hormaechei, Enterobacter kobei, Enterobacter ludwigii, Enterorhabdus caecimuris, Erysipelatoclostridium ramosum, Escherichia coli, Escherichiafergusonii, Escherichia hermannii, Escherichia marmotae, Geobacillus stearothermophilus, Haemophilus influenzae, Haemophilus pittmaniae, Hafnia alvei, Halobacillus dabanensis, Halobacillus karajensis, Halobacillus salinus, Halobacillus trueperi, Helicobacter pylori, Intestinibacter bartlettii, Klebsiella oxytoca, Klebsiella pneumoniae, Klebsiella variicola, Kluyvera cryocrescens, Kluyvera georgiana, Kosakonia cowanii, Kushneria sinocarnis, Lachnospira pectinoschiza, Lachnotalea glycerini, Lactobacillus mali, Leclercia adecarboxylata, Lelliottia amnigena, Litorilituus sediminis, Lysinibacillus boronitolerans, Lysinibacillus fusiformis, Lysinibacillus massiliensis, Lysinibacillus sphaericus, Lysinibacillus xylanilyticus, Lysobacter soli, Megasphaera elsdenii, Megasphaera micronuciformis, Micrococcus lylae, Mitsuokella jalaludinii, Moellerella wisconsensis, Monoglobus pectinilyticus, Moraxella osloensis, Morganella morganii, Neisseria canis, Neisseria cinerea, Neisseria elongata, Neisseria flavescens, Neisseria gonorrhoeae, Neisseria macacae, Neisseria meningitidis, Neisseria mucosa, Neisseria perflava, Neisseria subflava, Nosocomiicoccus massiliensis, Noviherbaspirillum denitrificans, Oceanobacillus iheyensis, Oceanobacillus oncorhynchi, Oceanobacillus sojae, Ochrobactrum anthropi, Odoribacter splanchnicus, Oxalobacter formigenes, Paenibacillus alvei, Paenibacillus amylolyticus, Paenibacillus barcinonensis, Paenibacillus barengoltzii, Paenibacillus daejeonensis, Paenibacillus dendritiformis, Paenibacillus glucanolyticus, Paenibacillus illinoisensis, Paenibacillus lactis, Paenibacillus larvae, Paenibacillus lautus, Paenibacillus macerans, Paenibacillus naphthalenovorans, Paenibacillus odorifer, Paenibacillus pabuli, Paenibacillus pasadenensis, Paenibacillus polymyxa, Paenibacillus rhizosphaerae, Paenibacillus stellifer, Paenibacillus thiaminolyticus, Paenibacillus typhae, Pantoea agglomerans, Parabacteroides distasonis, Parabacteroides goldsteinii, Parabacteroides gordonii, Parabacteroides johnsonii, Parabacteroides merdae, Paraprevotella clara, Parasutterella excrementihominis, Peptoniphilus asaccharolyticus, Peptoniphilus indolicus, Planococcus rifietoensis, Porphyromonas asaccharolytica, Porphyromonas bennonis, Porphyromonas somerae, Prevotella bivia, Prevotella buccae, Prevotella buccalis, Prevotella copri, Prevotella timonensis, Proteus mirabilis, Proteus penneri, Proteus vulgaris, Providencia alcalifaciens, Providencia heimbachae, Providencia rettgeri, Providencia stuartii, Pseudomonas aeruginosa, Pseudomonas alcaligenes, Pseudomonas bauzanensis, Pseudomonas caricapapayae, Pseudomonas chlororaphis, Pseudomonas fluorescens, Pseudomonas fragi, Pseudomonas fulva, Pseudomonas gessardii, Pseudomonas japonica, Pseudomonas libanensis, Pseudomonas lundensis, Pseudomonas luteola, Pseudomonas migulae, Pseudomonas monteilii, Pseudomonas mosselii, Pseudomonas oleovorans, Pseudomonas oryzihabitans, Pseudomonas putida, Pseudomonas rhodesiae, Pseudomonas saudiphocaensis, Pseudomonas stutzeri, Pseudomonas taetrolens, Pseudomonas tolaasii, Pseudomonas xanthomarina, Psychrobacter phenylpyruvicus, Raoultella ornithinolytica, Raoultella planticola, Roseomonas gilardii, Roseomonas mucosa, Ruminococcus albus, Ruminococcus callidus, Ruminococcus flavefaciens, Ruminococcus lactaris, Ruminococcus torques, Salinisphaera halophila, Salinivibrio costicola, Salmonella enterica, Salmonella enteritidis, Salmonella typhi, Selenomonas ruminantium, Selenomonas sputigena, Senegalimassilia anaerobia, Serratia marcescens, Serratia ureilytica, Shewanella xiamenensis, Shigella boydii, Shigella dysenteriae, Shigella flexneri, Shigella sonnei, Sphingomonas aerolata, Staphylococcus arlettae, Staphylococcus aureus, Staphylococcus auricularis, Staphylococcus capitis, Staphylococcus caprae, Staphylococcus carnosus, Staphylococcus cohnii, Staphylococcus condimenti, Staphylococcus devriesei, Staphylococcus epidermidis, Staphylococcus equorum, Staphylococcus gallinarum, Staphylococcus haemolyticus, Staphylococcus hominis, Staphylococcus hyicus, Staphylococcus intermedius, Staphylococcus kloosii, Staphylococcus lentus, Staphylococcus lugdunensis, Staphylococcus nepalensis, Staphylococcus pasteuri, Staphylococcus petrasii, Staphylococcus pettenkoferi, Staphylococcus saccharolyticus, Staphylococcus saprophyticus, Staphylococcus schleiferi, Staphylococcus sciuri, Staphylococcus simiae, Staphylococcus simulans, Staphylococcus succinus, Staphylococcus vitulinus, Staphylococcus warneri, Staphylococcus xylosus, Stenotrophomonas acidaminiphila, Stenotrophomonas maltophilia, Stenotrophomonas rhizophila, Streptococcus australis, Streptococcus bovis, Streptococcus equinus, Streptococcus gallolyticus, Streptococcus infantarius, Streptococcus infantis, Streptococcus lutetiensis, Streptococcus mitis, Streptococcus mutans, Streptococcus oralis, Streptococcus peroris, Streptococcus pseudopneumoniae, Streptococcus salivarius, Streptococcus sobrinus, Streptococcus thermophilus, Streptococcus tigurinus, Streptococcus vestibularis, Succiniclasticum ruminis, Terribacillus aidingensis, Terribacillus halophilus, Thermotalea metallivorans, Turicibacter sanguinis, Veillonella atypica, Veillonella denticariosi, Veillonella dispar, Veillonella parvula, Vibrio cholerae, Victivallis vadensis, Virgibacillus massiliensis, Yersinia bercovieri, Yersinia enterocolitica, Yersinia intermedia, Yersinia kristensenii, Yersinia mollaretii, and combinations thereof.
[0415] 36. The method of any one of paragraphs 21-35, wherein the one or more non-pathogenic queuine producing bacteria is a human gut bacteria, and consists of one or more bacteria comprising a 16S rRNA sequence at least about 97% identical to a 16S rRNA sequence selected from SEQ ID NOs 1-406.
[0416] 37. The method of any one of paragraphs 21-36, wherein the at least one isolated non-pathogenic queuine producing bacteria is a human gut bacteria that encodes within its genome and expresses in the human gastrointestinal tract at least one queuine biosynthesis selected from folE (GTP cyclohydrolase), QueD (6-carboxy-5,6,7,8-tetrahydrobiopterin synthase), QueE (7-carboxy-7-deazaguanine synthase), QueC (7-cyano-7-deazaguanine synthase, PreQ0 synthase), QueF (7-cyano-7-deazaguanine reductase, PreQ0 reductase), tgt or btgt (tRNA guanine transglycosylase, bacterial tRNA guanine transglycosylase), QueA (S-adenosylmethionine:tRNA ribosyltransferase-isomerase), and QueG or QueH (epoxyqueuosine reductase).
[0417] 38. The method of any one of paragraphs 21-37, wherein the at least one isolated non-pathogenic queuine producing bacteria is a human gut bacteria that encodes within its genome and expresses in the human gastrointestinal tract at least one queuine biosynthesis enzyme, wherein the amino acid sequence encoded by the at least one queuine biosynthesis gene is at least 90% similar to a sequence selected from SEQ ID NOs 3660-82283.
[0418] 39. The method of any one of paragraphs 21-38, wherein the at least one isolated non-pathogenic queuine producing bacteria is a human gut bacteria belongs to the species selected from Acidaminococcus fermentans, Adlercreutzia equolifaciens, Akkermansia muciniphila, Alloprevotella tannerae, Anaerostipes caccae, Anaerostipes hadrus, Arcobacter butzleri, Bacteroides caccae, Bacteroides cellulosilyticus, Bacteroides clarus, Bacteroides coprophilus, Bacteroides dorei, Bacteroides eggerthii, Bacteroides faecis, Bacteroides fragilis, Bacteroides massiliensis, Bacteroides nordii, Bacteroides oleiciplenus, Bacteroides ovatus, Bacteroides plebeius, Bacteroides salanitronis, Bacteroides salyersiae, Bacteroides stercoris, Bacteroides thetaiotaomicron, Bacteroides uniformis, Bacteroides vulgatus, Bacteroides xylanisolvens, Barnesiella intestinihominis, Bilophila wadsworthia, Butyrivibrio crossotus, Campylobacter curvus, Citrobacter freundii, Citrobacter koseri, Clostridium bartelettii, Clostridium ramosum, Coprobacter fastidiosus, Coprococcus catus, Coprococcus eutactus, Desulfovibrio piger, Dialister invisus, Dialister succinatiphilus, Enterobacter aerogenes, Enterobacter cancerogenus, Enterobacter cloacae, Enterorhabdus caecimuris, Escherichia coli, Eubacterium hallii, Fusobacterium mortiferum, Haemophilus pittmaniae, Haemophilus sputorum, Hafnia alvei, Klebsiella oxytoca, Klebsiella pneumoniae, Klebsiella variicola, Megamonas funiformis, Megamonas rupellensis, Megasphaera elsdenii, Megasphaera micronuciformis, Mitsuokella multacida, Odoribacter laneus, Odoribacter splanchnicus, Oxalobacter formigenes, Parabacteroides distasonis, Porphyromonas asaccharolytica, Porphyromonas uenonis, Ruminococcus callidus, Ruminococcus torques, Shigella sonnei, Streptococcus infantis, Streptococcus mitis, Streptococcus oralis, Streptococcus pneumoniae, Streptococcus tigurinus, Turicibacter sanguinis, Veillonella atypica, Veillonella dispar, Veillonella parvula, Dysgonomonas mossii, Proteus mirabilis, or Veillonella ratti, and combinations thereof, and the at least one isolated non-pathogenic queuine producing bacteria encodes within its genome and expresses in the human gastrointestinal tract at least one queuine biosynthesis enzyme with an amino acid sequence at least 90% identical to a sequence selected from SEQ ID NOs 3660-82283.
[0419] 40. The method of any one of paragraphs 21-39, wherein the at least one isolated non-pathogenic queuine producing bacteria is a human gut bacteria with a 16S rRNA sequence at least about 97% identical to a 16S rRNA sequence selected from SEQ ID NOs 1-78, and the at least one isolated non-pathogenic queuine producing bacteria encodes within its genome and expresses in the human gastrointestinal tract at least one queuine biosynthesis enzyme with an amino acid sequence at least 90% identical to a sequence selected from SEQ ID NOs 3660-82283.
[0420] 41. The method of paragraph 25, wherein the queuine precursors are selected from epoxyqueuine and/or cobalamin.
[0421] 42. The method of paragraph 25, wherein the queuine analogs are selected from queuosine, a mannosyl queuosine, galactosyl queuosine, glutamyl queuosine, mannosylqueuine, galactosylqueuine, and aminoacylated derivatives such as glutamylqueuine.
[0422] 43. The method of any one of paragraphs 21-42, wherein the composition is administered orally, intravenously, intramuscularly, intrathecally, subcutaneously, sublingually, buccally, rectally, vaginally, by the ocular route, by the otic route, nasally, via inhalation, by nebulization, cutaneously, transdermally, or combinations thereof, and formulated for delivery with a pharmaceutically acceptable excipient, carrier or diluent.
[0423] 44. The method of any one of paragraphs 21-43, wherein the administered composition is formulated in a capsule, a tablet, a caplet, a pill, a troche, a lozenge, a powder, a granule, nutraceutical, a medical food, or a combination thereof.
[0424] 45. The composition of any one of paragraphs 21-44, formulated for delivery to the gut.
[0425] 46. The composition of any one of paragraphs 21-45, further comprising a prebiotic.
[0426] 47. The composition of any one of paragraphs 21-46, further comprising a different composition in an amount effective to treat a CNS disease or disorder.
[0427] 48. A composition comprising one or more isolated non-pathogenic endozepine-producing bacterial or yeast strains or an isolated product derived therefrom.
[0428] 49. The composition of paragraph 48, wherein the one or more isolated, non-pathogenic endozepine-producing bacterial or yeast strains comprise live bacteria or yeast, or dead bacteria or yeast, or wherein the isolated product derived therefrom comprises culture medium in which said one or more isolated, non-pathogenic bacterial or yeast strains have been cultured.
[0429] 50. The composition of paragraph 48 or 49, wherein the isolated product derived therefrom comprises a purified polypeptide produced by the one or more bacterial or yeast strains.
[0430] 51. The composition of any one of paragraphs 48-50, further comprising a pharmaceutically acceptable carrier, wherein the one or more isolated non-pathogenic queuine-producing bacterial or yeast strains or an isolated product derived therefrom is present in an amount effective to alter endozepine levels in a subject in need thereof.
[0431] 52. A pharmaceutical composition comprising endozepine, an analog, derivative or precursor thereof, or a combination of any of these, in an amount effective to alter endozepine levels in a subject in need thereof, and a pharmaceutically acceptable carrier.
[0432] 53. The pharmaceutical composition of paragraph 52, wherein the endozepine analog, derivative or precursor is isolated from an endozepine-producing bacterial or yeast strain or culture medium in which an endozepine-producing bacterial or yeast strain has been cultured.
[0433] 54. A method of increasing endozepine levels in a subject in need thereof, the method comprising administering to the subject a composition of any one of paragraphs 49-53 in an amount effective to increase endozepine levels in the subject.
[0434] 55. The method of paragraph 54, wherein the subject is a mammalian subject.
[0435] 56. The method of paragraph 54 or 55, wherein the subject is a human subject.
[0436] 57. A method for treating or preventing a gut microbiome dysbiosis-mediated central nervous system (CNS) disorder associated with an endozepine deficiency in a mammalian subject in need thereof, comprising administering to a subject dysbiotic for endozepine producing gut microbes or low in endozepines one or more isolated non-pathogenic endozepine producing bacterial or yeast strains, an isolated product derived therefrom, endozepines, prebiotics, or combinations thereof, which alter endozepine levels in a subject in need thereof, wherein the composition is formulated for oral or intravenous delivery with a pharmaceutically acceptable excipient, carrier or diluent.
[0437] 58. The method of paragraph 57, wherein the one or more isolated non-pathogenic endozepine producing bacterial or yeast strains comprises live bacteria or yeast, dead bacteria or yeast, spent medium(s) derived from a bacteria or yeast, cell pellet(s) of a bacteria or yeast, purified metabolite(s) produced by bacteria or yeast, purified protein(s) produced by a bacteria or yeast, and combinations thereof.
[0438] 59. A composition comprising one or more isolated non-pathogenic heavy metal sequestering bacterial strains, their derivatives, siderophores, prebiotics, or combinations thereof, which alter heavy metal levels in a subject in need thereof, wherein the composition is formulated for oral or intravenous delivery with a pharmaceutically acceptable excipient, carrier or diluent.
[0439] 60. The composition of paragraph 59, wherein the one or more isolated non-pathogenic heavy metal sequestering bacterial strains is a purified strain.
[0440] 61. The composition of paragraph 59, wherein the one or more isolated non-pathogenic heavy metal sequestering bacterial strains comprises live bacteria, dead bacteria, spent medium(s) derived from a bacteria, cell pellet(s) of a bacteria, purified metabolite(s) produced by bacteria, purified protein(s) produced by a bacteria, and combinations thereof.
[0441] 62. A method for treating or preventing a gut microbiome dysbiosis-mediated central nervous system (CNS) disorder associated with a heavy metal toxicity in a mammalian subject in need thereof, comprising administering to subjects dysbiotic for heavy metal sequestering gut microbes or high in toxic heavy metals one or more isolated non-pathogenic heavy metal sequestering bacterial strains (e.g., purified strains), their derivatives (e.g. live bacteria, dead bacteria, spent medium(s) derived from a bacteria, cell pellet(s) of a bacteria, purified metabolite(s) produced by bacteria, purified protein(s) produced by a bacteria, or combinations thereof), siderophores, prebiotics, or combinations thereof, which alter endozepine levels in a subject in need thereof, wherein the composition is formulated for oral or intravenous delivery with a pharmaceutically acceptable excipient, carrier or diluent.
[0442] 63. The method of paragraph 62, wherein the one or more isolated non-pathogenic heavy metal sequestering bacterial strains is a purified strain.
[0443] 64. The method of paragraph 62, wherein the one or more isolated non-pathogenic heavy metal sequestering bacterial strains comprises live bacteria, dead bacteria, spent medium(s) derived from a bacteria, cell pellet(s) of a bacteria, purified metabolite(s) produced by bacteria, purified protein(s) produced by a bacteria, and combinations thereof.
[0444] 65. A method of increasing BH4 levels in a subject in need thereof, the method comprising administering to the subject a composition of any one of paragraphs 1-20 in an amount effective to increase BH4 levels in the subject.
[0445] 66. The method of paragraph 65, wherein the subject is a mammalian subject.
[0446] 67. The method of paragraph 65 or 66, wherein the subject is a human subject.
[0447] 68. The composition of any one of paragraphs 1-20 and 45-47, for use in treating a queuine-related CNS disease or disorder.
[0448] 69. The composition for use of paragraph 68, wherein the CNS disease or disorder is selected from a cognitive disorder, a mood disorder, an anxiety disorder, and a psychiatric disorder.
[0449] 70. The composition for use of paragraph 68, wherein the CNS disorder is selected from autism, bipolar disorder, major depression, anxiety and schizophrenia.
[0450] 71. The composition for use of any one of paragraphs 68-70, wherein treating comprises administering the composition to an individual diagnosed as having a queuine-related CNS disease or disorder.
[0451] 72. The composition for use of any one of paragraphs 68-71, wherein treating comprises, prior to administering the composition for use, identifying a subject in need of treatment by determining whether the subject would benefit from an increase in endogenous queuine.
[0452] 73. The composition for use of paragraph 72, wherein identifying a subject in need comprises measurement of the amount of queuine in the subject's blood, liver, brain, serum or stool.
[0453] 74. The composition for use of any one of paragraphs 72 and 73, wherein identifying a subject in need comprises measurement of queuosine-modified Histidyl-tRNA in a sample of the subject's blood, liver, brain, serum or stool.
[0454] 75. The composition for use of any one of paragraphs 72-74, wherein identifying a subject in need comprises measurement of queuine-producing bacteria in the subject's stool by 16S rRNA sequencing.
[0455] 76. The composition for use of any one of paragraphs 72-75, wherein the amount of queuine-producing bacteria in the subject's stool is less than about 10% of total bacteria as measured by 16S rRNA sequencing.
[0456] 77. Use of a composition of any one of paragraphs 1-20 and 45-47 for the treatment of a queuine-related CNS disease or disorder.
[0457] 78. The use of paragraph 77, wherein the CNS disease or disorder is selected from a cognitive disorder, a mood disorder, an anxiety disorder, and a psychiatric disorder.
[0458] 79. The use of paragraph 77, wherein the CNS disorder is selected from autism, bipolar disorder, major depression, anxiety and schizophrenia.
[0459] 80. The composition of any one of paragraphs 1-20 and 45-47, for use in treating a gut microbial dysbiosis.
[0460] 81. The composition for use of paragraph 80, wherein the gut microbial dysbiosis comprises a deficiency in queuine-producing gut bacteria.
[0461] 82. The composition for use of any one of paragraphs 80-81, wherein treating comprises administering the composition to an individual diagnosed as having a deficiency in queuine-producing gut bacteria.
[0462] 83. The composition for use of any one of paragraphs 80-82, wherein treating comprises, prior to administering the composition for use, identifying a subject in need of treatment by determining that the subject has a deficiency in queuine-producing gut bacteria.
[0463] 84. The composition for use of paragraph 83, wherein identifying a subject in need comprises measurement of the amount of queuine in the subject's blood, liver, brain, serum or stool.
[0464] 85. The composition for use of any one of paragraphs 83 and 84, wherein identifying a subject in need comprises measurement of queuosine-modified Histidyl-tRNA in a sample of the subject's blood, liver, brain, serum or stool.
[0465] 86. The composition for use of any one of paragraphs 83-85, wherein identifying a subject in need comprises measurement of queuine-producing bacteria in the subject's stool by 16S rRNA sequencing.
[0466] 87. The composition for use of any one of paragraphs 83-86, wherein the amount of queuine-producing bacteria in the subject's stool is less than about 10% of total bacteria as measured by 16S rRNA sequencing.
[0467] 88. Use of a composition of any one of paragraphs 1-20 and 45-47, for treating a gut microbial dysbiosis.
[0468] 89. The use of paragraph 88, wherein the gut microbial dysbiosis comprises a deficiency in queuine-producing gut bacteria.
[0469] 90. The use of any one of paragraphs 88 and 89, wherein treating comprises administering the composition to an individual diagnosed as having a deficiency in queuine-producing gut bacteria.
[0470] 91. The use of any one of paragraphs 88-90, wherein treating comprises, prior to administering the composition for use, identifying a subject in need of treatment by determining that the subject has a deficiency in queuine-producing gut bacteria.
[0471] 92. The use of paragraph 91, wherein identifying a subject in need comprises measurement of the amount of queuine in the subject's blood, liver, brain, serum or stool.
[0472] 93. The use of any one of paragraphs 91 and 92, wherein identifying a subject in need comprises measurement of queuosine-modified Histidyl-tRNA in a sample of the subject's blood, liver, brain, serum or stool.
[0473] 94. The use of any one of paragraphs 91-93, wherein identifying a subject in need comprises measurement of queuine-producing bacteria in the subject's stool by 16S rRNA sequencing.
[0474] 95. The use of any one of paragraphs 91-94, wherein the amount of queuine-producing bacteria in the subject's stool is less than about 10% of total bacteria as measured by 16S rRNA sequencing.
[0475] 96. The composition of any one of paragraphs 1-20 and 45-47, for use in treating a BH4 deficiency or increasing the level of BH4 in a subject in need thereof.
[0476] 97. Use of a composition of any one of paragraphs 1-20 and 45-47, for treating a BH4 deficiency or increasing the level of BH4 in a subject in need thereof.
[0477] 98. The composition of any one of paragraphs 48-53, for use in treating or preventing a gut microbiome dysbiosis-mediated central nervous system (CNS) disorder associated with an endozepine deficiency in a mammalian subject in need thereof.
[0478] 99. The composition for use of paragraph 98, wherein the CNS disease or disorder is selected from a cognitive disorder, a mood disorder, an anxiety disorder, and a psychiatric disorder.
[0479] 100. The composition for use of paragraph 98, wherein the CNS disorder is selected from autism, bipolar disorder, major depression, anxiety and schizophrenia.
[0480] 101. The composition for use of any one of paragraphs 98-100, wherein treating comprises administering the composition to an individual diagnosed as having a gut microbiome dysbiosis-mediated central nervous system (CNS) disorder associated with an endozepine deficiency.
[0481] 102. The composition for use of any one of paragraphs 98-101, wherein treating comprises, prior to administering the composition for use, identifying a subject in need of treatment by determining whether the subject would benefit from an increase in endogenous endozepine.
[0482] 103. The composition for use of paragraph 102, wherein identifying a subject in need comprises measurement of the amount of endozepine in the subject's blood, liver, brain, serum or stool.
[0483] 104. The use of a composition of any one of paragraphs 48-53, for use in treating or preventing a gut microbiome dysbiosis-mediated central nervous system (CNS) disorder associated with an endozepine deficiency in a mammalian subject in need thereof.
[0484] 105. The composition of any one of paragraphs 59-61, for use in treating or preventing a gut microbiome dysbiosis-mediated central nervous system (CNS) disorder associated with a heavy metal toxicity in a mammalian subject in need thereof.
[0485] 106. The composition for use of paragraph 105, wherein treating comprises administering the composition to an individual diagnosed as having a gut microbiome dysbiosis-mediated central nervous system (CNS) disorder associated with a heavy metal toxicity.
[0486] 107. The composition for use of any one of paragraphs 105-106, wherein treating comprises, prior to administering the composition for use, identifying a subject in need of treatment by determining whether the subject would benefit from a reduction in a heavy metal level.
[0487] 108. Use of a composition of any one of paragraphs 59-61 for the treatment or prevention of a gut microbiome dysbiosis-mediated central nervous system (CNS) disorder associated with a heavy metal toxicity.

### EXAMPLES

[0488] The disclosure is further illustrated by the following examples, which are not to be construed as limiting this disclosure in scope or spirit to the specific procedures herein described. It is to be understood that the examples are provided to illustrate certain embodiments and that no limitation to the scope of the disclosure is intended thereby. It is to be further understood that resort may be had to various other embodiments, modifications, and equivalents thereof which may suggest themselves to those skilled in the art without departing from the spirit of the present disclosure and/or scope of the appended claims.

### Example 1—the Gut Microbiome is Essential for Normal Queuine Levels in Mammals

[0489] In the instant example, the feasibility of acquiring sufficient queuine from diet alone was determined. Estimates were provided for queuine intake and depletion based on the model of Marks & Farkas (see e.g., Marks, T. & Farkas, W. R. Effects of a diet deficient in tyrosine and queuine on germfree mice. Biochem Biophys Res Commun 230, 233-237 (1997), the content of which is incorporated by reference herein in its entirety). Germ-free mice deprived of both tyrosine and queuine suffer serious adverse health effects, and die within a short period of time. Accordingly, the lack of tyrosine is fatal in this context, despite the presence of phenylalanine in the diet (which in principle the mice ought to be able to convert to tyrosine). Notably, introducing chemically synthesized queuine at a concentration of 0.1 μM to the diet prevented emergence of these deleterious effects, confirming that exogenous queuine is indispensable for production of sufficient amounts of tyrosine, and demonstrating that queuine supplementation according to the methods described herein can correct queuine-deficiency related adverse impacts on neurotransmitter synthetic components, mechanisms and pathways.

[0490] To further elucidate the nature and extent of mammalian dependency on microbiome-derived queuine, the germ-free mouse's daily dietary queuine requirement was calculated. Adult male Swiss Webster mice weigh about 40 g, and these subjects consume roughly 7 mL of liquid diet per day when fed ad lib. The molecular weight of queuine is 277.28 g/mol. Accordingly, 0.1 μM of queuine amounts to 27.7 ng/mL, as shown in formula (VII) below.

$$100 nMQ = \frac{27.7 μg Q}{1 L water} = 27.7 \frac{ng}{mL}$$

### (VII)

[0491] Factoring in the daily liquid consumption results in a calculated 193.9 ng queuine (Q) for the germ free mouse's daily dietary queuine requirement (upper bound), as shown in Formula (VIII), below.

$$\frac{27.7 n g Q}{1 mL} * \frac{7 mL liquid diet}{day} = \frac{193.9 n g Q}{day} = germfree \\ mouse ’ s daily dietary Q requirement ( upper bound ) \qquad ( VIII )$$

[0492] Factoring in the mouse's weight (0.04 kg), this amounts to approximately 0.00485 mg/kg per day, as shown in formula (IX) below.

$$\frac{194 \frac{n g Q}{day}}{0.04 kg} = \frac{0.00485 \frac{mg}{kg}}{day} = rough mammalian Q requirement ( upper bound ) \qquad ( IX )$$

[0493] Scaling this to an adult human, assuming 70 kg weight, the daily requirement of Q is roughly 0.34 mg queuine per day, as shown in formula (X) below.

$$\frac{0.00485 \frac{mg Q}{kg}}{day} * 70 kg = 0.339 \; 5 \frac{mg Q}{day} \approx 0.34 \frac{mg Q}{day} = rough human Q requiremen t ( upper bound ) \qquad ( X )$$

[0494] To illustrate dietary scenarios required to meet this queuine intake, three common foods with the highest concentrations of queuine (see, e.g., C. Fergus, et al., 2015, Nutrients 7, 2897-2929) were evaluated. Specifically, ripe coconut water has the highest known queuine concentration among common foods (87-530 ng/mL), with wheat germ in second place at 190 ng/g, and tomatoes in third at 21 ng/g. As such, to meet the predicted requirements of queuine the following intakes would be needed: 0.642 liters ripe coconut water per day (with a lower to upper bound of ˜3.9 L), 1.79 kg wheat germ per day, or 16.2 kg of tomatoes per day, as shown in formulas XI, XII, and XIII below.

$$\begin{matrix}\frac{0.3 \frac{mg Q}{day}}{530 \frac{n g}{mL}} = 0.6 \; 42 liters ripe coconut water / day & ( XI ) \\ \frac{0.34 \frac{mg Q}{day}}{190 ng / g} = 1.79 kg wheat germ per day & ( XII ) \\ \frac{0.34 \frac{mg Q}{day}}{21 \frac{n g}{g}} = 16.2 kg of tomatoes per day & \end{matrix}$$

### (XIII)

[0495] While these values represent an upper boundary, the relatively small concentrations of queuine in common foods indicates that dysbiosis involving queuine-producing gut microbes ordinarily causes serious queuine deficiency, which as shown herein can often be associated with adverse health impacts.

[0496] Based on these and other findings, the methods and compositions described herein effectively treat dysbiosis arising from impairment or loss of queuine-producing microbial species, by restoring queuine-positive microbes as a functional component of the microbiome in dysbiotic patients, and/or administering queuine directly (e.g., in a mucosal delivery form, such as an oral capsule, sublingual tablet, or suppository) to restore and maintain healthy queuine levels in the gut and through the essential compartments of the patient's body, including the CNS.

[0497] In more detailed aspects described herein, queuine-producing bacteria, or queuine compositions, are administered to dysbiotic mammalian subjects exhibiting queuine deficiency (e.g., as determined by screening for the presence of deficient queuine positive bacteria in the gut, or by measuring systemic queuine levels in the subject using blood or tissue samples) to treat or prevent a CNS disorder. In certain embodiments, treatment or prevention of a CNS disorder comprises modulating queuine levels in the subject, modulating tetrahydrobiopterin (BH4) levels in the subject, and/or modulating neurotransmitter levels in the subject.

[0498] Studies in germ-free animals further indicate that queuine deficiency can compromise CNS function, potentially through depletion of tetrahydrobiopterin (BH₄), a cofactor in the synthesis of crucial neurotransmitters (see e.g., Rakovich, et al. J. Biol. Chem 286, 19354-19363 (2011)). As described herein, a linked deficiency of queuine and BH4 in humans can often be associated with a CNS disorder mediated at least in part by gut microbiome dysbiosis effecting impairment or loss of microbial queuine production. The methods and compositions described herein, involving establishment or restoration of an effective population of queuine producing bacteria to the gut microbiome, or administration of queuine or BH4 to dysbiotic subjects sufficient to correct the queuine or tetrahydrobiopterine deficiency, are clinically effective to treat a range of associated CNS disorders, including but not limited to cognitive disorders exemplified by autism, mood disorders exemplified by bipolar disorder and major depression, anxiety disorders, and psychiatric disorders exemplified by schizophrenia.

[0499] The dependency of queuine depleted germ free mice on exogenous tyrosine occurs despite the presence of dietary phenylalanine, which can ordinarily be converted to tyrosine by the enzyme phenylalanine hydroxylase (PAH). Studies directed to a large population of schizophrenic patients, elucidate a role for queuine in this neurochemical synthetic process and functional pathway. In accordance with the technologies described herein, PAH exhausts BH4, which then depends on dihydropteridine reductase (DHPR) to recycle BH2 to BH4. This recycling is dependent at least in part on queuine, which likely plays a role in the synthesis of DHPR and possibly other antioxidants that normally prevent spontaneous oxidation of BH4. Among many prospective roles for queuine in these biosynthetic and recycling processes, there appears to be a requirement for queuosine tRNA modification for tyrosine biosynthesis by PAH.

### Example 2

### Queuine Deficiency and Disorders of Biopterin Regeneration

[0500] Tetrahydrobiopterin (BH4) Deficiency in Schizophrenic Human Patients

[0501] Schizophrenia is an extraordinarily debilitating mental health condition, which robs patients and their families of quality of life more severely, and with greater cost in terms of patient function, than most other mental health disorders. Over 200,000 schizophrenia cases are diagnosed in the US every year. While rare in toddlers and children, schizophrenia is common in all other age groups, from adolescents to seniors. Considerable attention in the scientific community has focused on a possible role of gut dysbiosis in schizophrenia, potentially mediating a neurochemical imbalance in schizophrenic subjects, but supporting evidence for such a connection is limited. Schizophrenic patients exhibit higher incidence and levels of Candida in their stool, which is directly associated with gut microbiome dysbiosis. However, a causal role for the dysbiosis is uncertain, given the fact that dysbiosis can arise from defective diet, intestinal disease such as cancer and inflammatory diseases, immune system dysfunction, and many other circumstances that might mediate dysbiosis and a co-occurring neurochemical imbalance causing clinical CNS disease development.

[0502] As described herein, gut microbial queuine deficiency is implicated as a direct causal factor in schizophrenia and other CNS disorders associated with neurochemical imbalance. Queuine function was assessed in 90 schizophrenic patients and 65 healthy controls, as determined by measuring blood tetrahydrobiopterin concentrations in these subjects (indicative of queuine-dependent BH2 to BH4 re-dox recycling efficiency); see e.g., Clelland et al. Schizophrenia research 210, 316-318, (2019). Blood samples were taken from the normal and schizophrenic patients and processed to preserve original BH2-BH4 ratios. The harvested samples were centrifuged to isolate a plasma fraction, and the plasma was transferred to sample containers containing the antioxidant dithioerythritol (DTE) (alternatively pentetic acid) to maintain the original activation state of biopterin. BH2 and BH4 levels in the patient and control samples were then assayed quantitatively using HPLC to determine differences between schizophrenic and normal subjects. These studies showed a statistically significant decrease in BH4 concentration in schizophrenic subjects compared to controls, indicating that queuine dependent redox recycling of BH2 to yield activated BH4 is substantially impaired and in clinical association with schizophrenia. Accordingly, these findings support that dysbiosis impairing or eliminating queuine producing gut microbes can mediate queuine deficiency, resulting in adverse impacts on neurochemical synthetic pathways associated with schizophrenia and other CNS disorders, including cognitive disorders, mood disorders, anxiety and other psychiatric disorders.

[0503] Further studies can be implemented using accepted animal models to quantify queuine deficiency in dysbiotic subjects. Without wishing to be bound by theory, it is expected that such subjects exhibit queuine deficiency-associated CNS disorder symptoms. In addition to demonstrating this direct linkage, these studies can demonstrate that the compositions and methods described herein involving therapeutic administration of queuine producing microbes (e.g., in an oral or mucosal probiotic formulation), or a pharmaceutical composition containing queuine itself, can correct neurochemical imbalances (e.g., restore normal BH2/BH4 levels essential for healthy neurotransmitter synthesis) and effectively treat or prevent symptoms of CNS disorders in dysbiotic patients and other subjects presenting with or at risk of gut microbial queuine depletion.

[0504] BH4-Associated Disorders

[0505] Tetrahydrobiopterin (BH₄) is essential for the function of aromatic amino acid hydroxylase (AAAH) enzymes, including tryptophan hydroxylase (TPH) and tyrosine hydroxylase (TH), in addition to PAH. To perform their respective hydroxylation reactions, each of these enzymes oxidizes BH₄ to a metastable form of BH₂, which must be enzymatically reduced before it can be reused. Examples of these neurochemical synthetic pathways are illustrated below in FIG. 2A-2B. While the technology described herein focuses on CNS ramifications of dysbiosis and queuine depletion, it is notable that all isoforms of nitric oxide synthase (NOS) also utilize BH₄ as a cofactor (see e.g., Crabtree et al. J Biol Chem 284, 28128-28136, (2009)). NOS generates nitric oxide, which is essential for proper function of the immune system, cardiovascular system, and nervous system. In this context, related aspects can effectively employ queuine producing microbes and queuine as a direct pharmaceutical agent or nutraceutical, to correct queuine-dependent BH4 deficiencies for the treatment and prevention of clinical conditions of the immune system, cardiovascular system, and nervous system associated with nitric oxide, NOS and/or BH4 quantitative or functional imbalances or deficiencies.

[0506] Correlated with the roles of queuine described herein, a limited availability of BH₄ in humans has other known pathological outcomes, as seen in genetic disorders that compromise BH₄ production or maintenance, which, in accordance with this disclosure, are expected to correlate with cognitive, emotional, and perceptual abnormalities. Given the importance of the AAAH enzymes in monoamine neurotransmitter synthesis (see e.g., FIG. 2A-2B), queuine dependent BH₄ deficit is expected to alter these synthetic pathways in a parallel manner as determined for schizophrenia, leading to mood, anxiety and psychiatric disorders associated with neurochemical dysfunction or deficit affecting each of these pathways. Targeting queuine deficiency in such disorders according to or using methods and/or compositions as described herein is therefore specifically contemplated for therapeutic benefit in disorders involving or characterized by BH4 deficiency.

[0507] FIG. 2A-2B illustrates how a queuine/tetrahydrobiopterin deficit can adversely influence multiple monoamine neurotransmitter systems. The dietary amino acids tryptophan, tyrosine, and phenylalanine are essential for the synthesis of important monoamine neurotransmitters, and key enzymes in these reactions utilize tetrahydrobiopterin (BH₄) as a cofactor, oxidizing it to dihydrobiopterin (BH₂) in the process. Regeneration of BH₄ requires the microbial metabolite queuine (see e.g., FIG. 1), and impaired BH₄ regeneration is expected to adversely impact monoamine neurotransmitter synthesis, enhancing production of atypical and potentially deleterious metabolites.

[0508] As illustrated in FIG. 2A, a shortage of usable BH₄ leads to a reduction in 5-HTP synthesis, and consequent depletion of serotonin and melatonin. Tryptophan is instead metabolized into kynurenic acid—a potential psychotomimetic associated with schizophrenia—and quinolinic acid, an excitotoxin. In FIG. 2B, a BH₄ shortage impairs the conversion of phenylalanine to tyrosine as well as the conversion of tyrosine to L-DOPA, reducing synthesis of the catecholamine neurotransmitters dopamine and norepinephrine. Unmetabolized phenylalanine is detrimental by itself, resulting in blockade of tryptophan and tyrosine transport into the brain. This enzymatic blockade also enhances the fraction of phenylalanine oxidized non-enzymatically into m-tyrosine (and also o-tyrosine, not shown), which can deplete brain concentrations of catecholamines as well. Other atypical metabolites of phenylalanine, such as phenethylamine, are also enhanced by this enzymatic blockade. In view of the above, it is clear that queuine deficiency can play a role in diseases or disorders involving or characterized by deficits in any or all of these monoamine neurotransmitters or monoamine neurotransmitter systems. Thus, targeting queuine deficiency in such disorders using methods and/or compositions as described herein is specifically contemplated for the treatment of such disorders.

[0509] Phenylalanine Hydroxylase, Phenylalanine, and Phenylketonuria

[0510] Other detailed aspects address gut dysbiosis mediated changes in metabolism and function of specific amino acid metabolism pathways in neurochemistry, and associated CNS disorders. Phenylalanine Hydroxylase (PAH) converts ingested phenylalanine into tyrosine, oxidizing BH₄ in the process. Without PAH, phenylalanine can build up to toxic concentrations in the body, a condition known as phenylketonuria. Symptoms of phenylketonuria may result from PHE's competitive inhibition of the large neutral amino acid transporter, which depletes tryptophan and tyrosine concentrations in the brain. In the absence of PAH, phenylalanine may be metabolized into atypical compounds such as m-tyrosine or phenethylamine, which can in turn impose complex deleterious effects on both the CNS and peripheral nervous systems (see e.g., Cleary, Paediatrics and Child Health 25, 108-112 (2015); Andersen & Avins, Arch Neurol 33, 684-686, (1976); Shaw Nutr Neurosci 13, 135-143, (2010); Dyck et al. European journal of pharmacology 84, 139-149, (1982)).

[0511] Regardless of the mechanism, neuropsychiatric symptoms of untreated phenylketonuria are well characterized, and can include paranoid ideation, anxiety, avolition, executive dysfunction, psychoticism, and a predisposition to seizures. Similar symptoms manifest to various degrees in depression, autism, schizophrenia, and other disorders. One study reported significantly elevated PHE levels in schizophrenic patients (see e.g., Okusaga et al. PLoS One 9, e85945, (2014)).

[0512] In view of the findings described herein relating to the clinical roles of queuine and BH4 in schizophrenia, it is also contemplated that the methods and compositions described herein can effectively prevent or alleviate gut dysbiosis-associated deficits in metabolism, activity and/or function of PAH and phenylalanine associated with phenylketonuria, and thereby effectively treat related CNS symptoms and disorders.

[0513] Tyrosine Hydroxylase, Tyrosine, and Catecholamine-Associated Disorders

[0514] In another detailed aspect, compositions and methods are provided to prevent or treat gut dysbiosis mediated changes in metabolism and function of tyrosine hydroxylase (TH) and tyrosine in the synthesis of catecholamine neurotransmitters dopamine and norepinephrine. In the CNS, TH oxidizes BH₄ to BH₂ as it performs its function of tyrosine conversion, and this BH4 recycling is a rate-limiting step in dopamine and norepinephrine synthesis. These neurotransmitters are essential for a variety of cognitive and emotional processes including alertness and attentive engagement, pleasure seeking, memory, and reward-prediction. As such, impaired activity of TH due to gut dysbiosis and attendant queuine and BH4 deficit, can often correlate with impaired dopamine and norepinephrine synthesis, and with associated adverse CNS impacts, for example anhedonia, lethargy, flat affect, attention deficit, and learning difficulties. All of the latter symptoms are associated with schizophrenia and, to some extent, depression and bipolar disorders, as well as attention deficit disorder. Dysfunction and death of dopaminergic neurons is also strongly implicated in Parkinson's disease, and a shortage of norepinephrine from the locus coeruleus has been proposed as a key mediator in the pathology of Alzheimer's disease (wherein norepinephrine promotes microglial phagocytosis of amyloid beta, and plays an additional role in curtailing neuroinflammation); see e.g., Heneka et al. PNAS 107, 6058-6063, (2010). In view of this, each of the disorders noted above is specifically contemplated for benefit from the methods and/or compositions described herein that increase or restore the production of queuine and/or queuine-related metabolites.

[0515] Tryptophan Hydroxylase, Tryptophan, and Serotonin or Melatonin-Associated Disorders

[0516] In yet additional detailed aspects, compositions and methods are provided to prevent or treat gut dysbiosis mediated changes in metabolism and function of Tryptophan Hydroxylase (TPH) and tryptophan in synthesis of the monoamine neurotransmitter serotonin. TPH is similar in structure and function to TH and PAH and likewise requires BH₄ to operate. As such, the technology described herein includes methods and compositions to prevent or alleviate serotonin deficiency and related CNS conditions associated with gut dysbiosis mediated queuine and BH4 deficiency. TPH also serves as a rate-limiting intermediate in the synthesis of serotonin, transforming dietary tryptophan into 5-HTP, which is thereafter decarboxylated to form serotonin (5-HT). Although serotonin's role in mood regulation is complex and incompletely understood, it certainly exerts powerful influences on emotion and cognition, whereby disruption of TPH's function through gut dysbiosis mediated queuine and/or BH4 deficiency is expected to adversely impact these and other CNS functions.

[0517] Serotonin deficiency is central to a classical “neurotransmitter imbalance” model of depression, which model is supported by modest efficacy of serotonergic pharmaceuticals to treat these conditions. A frequently overlooked function of serotonin in the brain is its role as the precursor to melatonin. A shortage of BH₄ significant enough to impact TPH activity would thereby subsequently impair melatonin synthesis and likely impair or reduce the quality of sleep. Disrupted sleep is associated with a multitude of negative outcomes across all physical, cognitive, and emotional scales, especially in memory consolidation and recall. Abnormalities in melatonin synthesis and sleep have been noted in schizophrenia, autism, depression, Alzheimer's disease, and Parkinson's disease. In view of this, each of the disorders noted above is specifically contemplated for benefit from the methods and/or compositions described herein that increase or restore the production of queuine and/or queuine-related metabolites.

[0518] As in the case of PHE and its atypical metabolites, tryptophan that is not converted (e.g., to produce serotonin) has the potential to be metabolized into a molecule of clinical significance, kynurenine. Kynurenine has two important metabolites for consideration herein, quinolinic acid (QUIN) and kynurenic acid (KYNA). QUIN is a compound with multiple demonstrated mechanisms of neurotoxicity, including excitotoxicity at the N-methyl-D-aspartate (NMDA) receptor, dysregulation of glutamatergic signaling, and the formation of reactive oxygen species in the presence of iron. Excess QUIN has been linked to major depressive disorder and suicidality (suicide attempters have more than double the ordinary concentration of QUIN in their cerebrospinal fluid); see e.g., Erhardt et al. Neuropsychopharmacology 38, 743-752, (2013). QUIN is formed spontaneously from the kynurenine pathway intermediate aminocarboxymuconate semialdehyde (ACMS) when activity of its associated decarboxylase enzyme (ACMSD) is insufficient to transform available ACMS into the neuroprotective metabolite picolinic acid. The ratio of quinolinic to picolinic acid has proven to be one of the strongest known predictors of suicidality; see e.g., Brundin et al. Transl Psychiatry 6, e865, (2016). Curiously, phthalate esters (plasticizing compounds that are ubiquitous as contaminants in food) inhibit the activity of ACMSD and enhance production of QUIN in vivo, suggesting a possible multifactorial interaction among diet, microbiome, genetics, and environmental toxin exposure in the etiology of suicidality.

[0519] Kynurenine can be transformed by kynurenine aminotransferase enzymes in the CNS to form KYNA, a compound that functions as an antagonist at the glycine site of the NMDA receptors. While it is often taken for granted that KYNA is neuroprotective (due to its ability to limit QUIN mediated neural damage), it should be noted that pharmacologically similar compounds, such as ketamine and phencyclidine (PCP), can induce delusions, hallucinations and sensations of depersonalization similar to symptoms seen in dissociative disorders, schizophrenia, and some cases of anxiety, depression, and bipolar disorders. Elevated concentrations of KYNA have been repeatedly observed in schizophrenic patients, which may account for this disorder's “positive” symptoms.

[0520] KYNA and other NMDA antagonists alter the firing patterns of dopaminergic neurons in the midbrain, increasing firing rate in the substantia nigra and ventral tegmental area. This alteration in dopaminergic activity may be a key to the psychotomimetic effects of NMDA antagonists, which are suppressed by the antipsychotic clozapine.

[0521] In view of the foregoing, gut dysbiosis mediated deficiencies of queuine and associated BH₄ dysregulation is considered herein to clinically predispose individuals to schizophrenia, in part attributable to a so-called “dopamine paradox” effect. Schizophrenic patients exhibit symptoms characteristic of both hyper- and hypo-activity of dopaminergic systems. Activity of TH may lead to disrupted learning and memory, and other symptoms typically associated with dopamine downregulation, while impaired activity of TPH may result in increased CNS production of KYNA, enhancing the activity of specific dopaminergic pathways in a manner that could be reversed by antipsychotic dopamine antagonists. While kynurenine readily crosses the blood-brain barrier, KYNA and QUIN do not. Additionally, these neurochemical players and pathways may explain the positive influence of physical fitness on psychiatric health. Exercise upregulates expression of peripheral kynurenine aminotransferases (via the protein PGC-1α), thereby enhancing conversion of kynurenine to KYNA before it can cross the blood-brain barrier and protecting against neurotoxic effects of QUIN and psychotomimetic effects of KYNA. In view of this, each of the disorders noted above is specifically contemplated for benefit from the methods and/or compositions described herein that increase or restore the production of queuine and/or queuine-related metabolites.

[0522] Treating Disorders of Biopterin Regeneration

[0523] The redox kinetics of biopterins and other cofactors involved in neurochemical synthesis and function are complex and sensitive to numerous uncertain factors. For example, exogenous BH₄ is rapidly oxidized to BH₂ before transport into the cell, after which it must be reduced before being put to use. As a result, administration of supplemental BH₄ has shown limited efficacy in treating disorders of biopterin regeneration. Furthermore, examining total biopterin concentrations, without differentiating between oxidation states, is unlikely to provide much insight where a given disorder is related to impairment in the regeneration of BH₄ from BH₂ (as disclosed here in the case of CNS disorders affected by queuine deficit). It should also be noted that the enzyme responsible for regenerating BH₂ to BH₄ (dihydropteridine reductase) can be inactivated by heavy metals (see e.g., Altindag et al. Toxicol In Vitro 17, 533-537, (2003)), providing a parallel pathway from dysbiosis to disorders of biopterin metabolism. Thus, disorders of biopterin regeneration resulting in or characterized by reduced levels of BH4 or an imbalance between BH2 and BH4 can be treated by administering a composition as described herein that promotes or increase queuine levels in the gut and/or a composition as described herein that promotes heavy metal sequestration.

[0524] In one embodiment, a subject can be treated with each of a composition that composition that promotes or increases queuine, a composition as described herein that promotes or increases endozepine levels, and a composition as described herein that promotes heavy metal sequestration.

[0525] Accordingly, additional aspects are directed to dysbiotic subjects that have complex, or multifactorial, gut biome dysbiosis—resulting in complex and often more severe clinical symptoms arising therefrom. For example, particularly severe dysbiosis can involve impairment or loss of multiple heirloom taxa expressing discrete, host-critical ex-genes. These cases result in impairment or loss of multiple distinct, important microbial functions, processes and/or products, and in many cases can be attended by multiple adverse clinical effects. In other cases, the subject gut taxa, ex-genes and related processes and products can be distinct between dysbiosis-impacted gut species, yet can be positively or negatively linked functionally, and interrelated clinically. For example, distinct processes and/or products of one dysbiotic gut species can ordinarily contribute (positively or negatively) to a common metabolic pathway or end-product as does a different microbial species, or otherwise exhibit “complementarity” in terms of biological activity or ultimate clinical effect(s). As used herein, “complementarity” is not limited to common activity, as might be expected to yield additive or synergistic biological effects and related clinical symptoms. Instead some complementary processes can involve attenuation or inhibition by one gut microbe negatively affecting expression or activity of processes and/or products of another gut microbe. In some cases, this form of complementarity can naturally serve to beneficially regulate processes and/or products of multiple microbes based on the presence, health and activity of another. In such cases, the impacts of severe dysbiosis can be even more critical, intractable and difficult to rectify or treat. Many examples likely exist of this type of functional complementarity between diverse gut microbes and their discrete processes and products, as there are complementary metabolic, signaling, developmental, neurochemical and other complex pathways regulating metabolism, cellular, tissue and organ function, homeostasis, CNS health and activity, and other critical functions of the mammalian body.

### Heavy Metal-Associated Disorders

[0526] In one exemplary embodiment relating to complex or multifactorial gut biome dysbiosis, subjects are effectively treated for a co-occurring gut microbiome-derived queuine deficiency, and simultaneous impairment of lead and/or mercury clearance attributable to a loss or impairment of gut microbes expressing processes and/or products involved in normal clearance of dietary heavy metals. Heavy metals like lead and mercury can inactivate critical enzymes, including DHPR, and thus can contribute to impairment of BH4 recycling. Individuals presenting with elevated lead and/or mercury, in combination with gut microbiome derived queuine deficiency, can present with more severe, interrelated adverse CNS symptoms, as described above.

[0527] CNS disorders arising from or exacerbated by impaired neurochemical synthesis attributable to a combination of queuine deficiency and elevated mercury or lead can be effectively treated or prevented using compositions and methods as described herein. In illustrative methods, these and other multifactorial cases of dysbiosis are treated using coordinate administration of a queuine producing bacteria, or a queuine pharmaceutical or supplement directly, and a viable, effective gut bacterium expressing one or more processes and/or products that direct(s), mediate(s) or facilitate(s) elimination and/or detoxification of a toxic heavy metal, such as dietary mercury or lead. Exemplary bacteria include all viable, non-pathogenic gut bacteria that produce siderophores (small molecules that bind and help eliminate heavy metals), PDTCs and other effectors that contribute to mercury or other heavy metal elimination (for example enterobactin, a high-affinity siderophore produced by Enterobacter sp).

[0528] Related aspects focus on gut microbiome dependent heavy metal elimination, and on the use of gut microbial probiotics and other compositions and methods to treat CNS disorders associated with elevated heavy metals concentration in the body. Heavy metals such as mercury (Hg) and lead are found in a wide variety of foods at trace concentrations, and can have severe deleterious effects on neurodevelopment and cognitive health. While these metals are generally bioaccumulative, the fraction of ingested heavy metals retained by the body and their subsequent impacts depend on numerous factors, including differential absorption and deposition of organic versus inorganic Hg.

[0529] The composition of a mammal's gut microbiome is one of many factors that affects its ability to excrete dietary Hg. Mice fed the highly neurotoxic compound methylmercury (MeHg) ordinarily retain only a fraction of the ingested dose. Six days after ingestion mice on three different defined diets were found to have excreted between 14% and 58% of the dose, depending on the diet. In mice pretreated with oral antibiotics, however, only 0-6% of the ingested dose was eliminated by day 6—almost all ingested Hg was retained in the body, regardless of diet; see e.g., Rowland et al. Arch Environ Health 39, 401-408, (1984). The means by which the microbiome mediates Hg elimination remains unclear, but Rowland et al.⁷⁹ suggest that microbial demethylation of MeHg may play a role by transforming the metal into inorganic varieties having reduced solubility in tissue.

[0530] Another mechanism relevant to metal elimination more broadly, involves microbial production of siderophores—molecules utilized by bacteria to scavenge iron from the extracellular environment. Many such molecules can trap metals other than iron—including cadmium, mercury, chromium, arsenic, and lead to form insoluble complexes. This sequestration protects both the microbe and its host from the deleterious effects of the metal, allowing it to be safely excreted. While the elimination half-life of Hg in humans is significantly different from that in rodents, recent research indicates that the underlying mechanisms are similarly dependent on the microbiome; see e.g., Rothenberg et al. Toxicol Lett 242, 60-67 (2016).

[0531] The relationship between antibiotic use and heavy metal retention can have health implications in domains ranging from agriculture to medicine. After a course of antibiotic treatment, the microbiome ideally returns to a near-baseline state to thereby restore microbial metabolic pathways and products that contribute to Hg elimination. However, in certain cases of dysbiosis it is expected that antibiotic-resistant species can outcompete more specialized taxa, e.g., by monopolizing nutrients, substrate and other resources in a manner that impairs or prevents regrowth by other more specialized, poorly competitive microorganisms. In extreme cases, this competitive suppression can greatly protract or even permanently impair a mammal's ability to eliminate dietary Hg and other heavy metals, resulting in associated profound impacts on CNS function and health.

[0532] Hg is one of the best studied and widely consumed heavy metals, occurring as methyl mercury (MeHg) in fish and other foods. MeHg is found at particularly high concentrations in predatory fish that exhibit bioaccumulation or biomagnification of certain toxins, but it is also found in many other foods and even drinking water. The presence of MeHg in the environment is due primarily to industrial waste emissions and fossil fuel pollution. Although it has multiple mechanisms of toxicity, MeHg can bind to the sulfhydryl groups present on thiol-containing amino acids. These are key functional groups in coordinating metal-enzyme complexes and ensuring proper protein folding throughout the body. As a result, MeHg interferes with a wide variety of processes including the transport and utilization of iron, zinc, copper, and selenium. The functions of these metals are numerous and diverse, but in general an imbalance or impairment of each of these metals can mediate profound effects on neurotransmitter metabolism, antioxidant enzyme activity, protection of cells from oxidative stress, and a variety of other important metabolic and homeostatic processes.

[0533] The nature and severity of CNS disorders caused by impaired Hg and other heavy metal detox/clearance vary depending on the dose, route, and rate of exposure. From human studies, acute mercury and other heavy metal toxicity imposes broad, adverse CNS effects, including impacts on depressive behaviors, loss of self-control, shyness, irritability, insomnia, and memory impairment, along with more characteristic neurological symptoms of metal intoxication including tremors, loss of sensation in the extremities, and impaired fine motor control. Altered metabolism of metals including Hg has been observed in a number of psychiatric and neurodegenerative disorders, including Alzheimer's disease and autism spectrum disorders (ASD), and some have hypothesized that dysregulation of metal dynamics has the potential to produce many of the symptoms associated with these conditions.

[0534] While much alarm has been falsely directed to fears that exposure to mercury in vaccines can cause autism or other CNS disorders, the minor exposure to mercury from certain vaccines has been ruled out as a causal factor in the development of autism and other CNS disorders. However, relatively little consideration has been paid to a more likely correlate of vaccine use, namely adverse impacts on the gut microbiome which might in some cases result in dysbiosis impairing mercury detoxification or elimination. There is a reported association between autism spectrum disorder (ASD) and dysbiosis (see e.g., De Angelis et al. Gut Microbes 6, 207-213, (2015)), and additional evidence points to elevated heavy metal concentrations in subjects with ASD. While ASD likely has a multifactorial etiology, with contributing factors including genetic predisposition and other environmental triggers, ASD patients are likely to suffer more severe CNS symptoms when they suffer gut dysbiosis resulting in impaired heavy metal metabolism. Consequently, the methods and compositions described herein that mediate restoration of gut microbes competent to assist in heavy detoxification and/or clearance, can substantially reduce symptoms and side effects of heavy metal toxicity in dysbiotic patients with autism and other CNS disorders.

### Endozepine-Associated Disorders

[0535] Additional methods and compositions are directed toward correcting gut dysbiosis mediated changes in endozepine synthesis important to normal CNS function and health. Benzodiazepines are anxiolytic drugs that act as positive allosteric modulators of gamma aminobutyric acid (GABA) receptor function, amplifying potency of the brain's primary inhibitory neurotransmitter by increasing ion flux through the GABA receptor's chloride channel, resulting in neuronal hyperpolarization and firing suppression. Impairment of GABAergic neurotransmission is observed in anxiety disorders and depression (see e.g., Kalueff & Nutt, Depress Anxiety 24, 495-517 (2007)), and this correlation underlies psychopharmacological models of anxiety disorders (positing that decreased activation of GABA receptors leads to an inability to quench activity in neural circuits related to somatic stress and worry, causing uncontrolled excitability and ruminative patterns of thought and behavior characteristic of anxiety and depression).

[0536] Long after benzodiazepine drugs were discovered, endogenous ligands of benzodiazepine receptors were identified in the mammalian brain, including one compound chemically identical to the drug diazepam (see e.g., Basile et al. N Engl J Med 325, 473-478 (1991)). This finding presented a paradox, because mammals lack the enzymatic machinery to perform the organochlorine chemistry capable of synthesizing diazepam and similar organochlorine compounds. In vivo investigations of this peculiarity led to the discovery that certain species of enteric microbe modulate CNS concentrations of small-molecule endozepines, likely via production of precursors that can be converted into an active form by the host animal; see e.g., Yurdaydin et al. Brain Res 679, 42-48 (1995). It has more recently been determined that certain microbial species in the human microbiome synthesize compounds comprising a core benzodiazepine structure, and/or express halogenase enzymes capable of mediating production of chlorinated organic molecules; see e.g., Roos, W. Ch. 2: Benzodiazepine Alkaloids, 63-97 (1990); Zehner et al. Chem Biol 12, 445-452 (2005). However, other compounds that do not share the classical 1,4-benzodiazepine structure can still have potent activity at the benzodiazepine receptor, and have been found in brain tissue of both humans and other mammals under physiologically relevant concentrations, including compounds with a quinoline core structure; see e.g., Rothstein et al. J Neurochem 58, 2102-2115 (1992). While many bacterial metabolites featuring the quinoline core structure are virulence factors or otherwise potentially harmful, some—such as pyrroloquinoline quinone (PQQ)—are harmless or even beneficial (see e.g., Goodwin & Anthony, Adv Microb Physiol 40, 1-80 (1998)), and their metabolites are prime candidates to play a role in modulating GABAergic activity in a healthy human body.

[0537] Research concerning endozepine-modulatory microbes has focused on a pathological excess of endozepines, as seen in hepatic encephalopathy, resulting in an endozepine model focused on the influence of liver function on GABAergic systems in the brain; see e.g., Basile et al. Neuropsychopharmacology 3, 61-71 (1990). However, another largely ignored facet is the potential for a pathological deficit of endozepines. Accordingly, gut dysbiosis that impairs or eliminates endozepine-modulatory microbes limits the host's obligate supply of endozepines, resulting in or contributing to CNS disorders that are treatable according to the methods and compositions described herein (e.g., by administering a probiotic comprising one or more viable non-pathogenic microbes expressing ex-genes, processes and/or products contributing to endozepine synthesis, metabolism and/or function).

[0538] Among the CNS disorders treatable using endozepine enhancing bacterial compositions and methods described herein, social anxiety and generalized anxiety disorder are both characterized by recurrent, intrusive, and pathologically intense psychological stress, disproportionate to any real threat posed by anxiogenic stimuli. On a temporary basis, exogenous benzodiazepines can be highly effective in relieving the symptoms of these disorders, although chronic administration can precipitate tolerance, dependence, and a rebound effect upon discontinuation. Considering the role of GABAergic neurotransmission in anxiety disorders, and the established but limited efficacy of benzodiazepines in their treatment, patients presenting with gut dysbiosis associated endozepine deficits and related CNS disorders, including anxiety disorders, can be effectively treated using the compositions and methods described herein that restore gut microbiome derived endozepines. Consistent with this aspect, some researchers have proposed a correlation between anxiety disorders and gastrointestinal disorders; see e.g., Walker et al. Am J Med 92, 26S-30S (1992). While it is possible that anxiety can result from other impacts of gut dysbiosis, the substitution of gut microbiome derived endozepines in dysbiotic patients is expected to yield clinical benefits in a majority of these cases.

### Example 3—Human Fecal Microbiome Signatures in Human Psychiatric Disease Show Reduced Levels of Queuine Producing Bacteria

[0539] Given the wealth of human microbiome sequencing data, an assessment of the bacterial composition of a select few humans' diseases relevant for this disclosure was performed.

[0540] For depression, there have been several reports which have identified lower levels of what are disclosed herein as keystone queuine producing bacteria. Specifically, a recent survey of 1,054 individuals identified that quality of life was correlated with the abundance of species of the genus Coprococcus and Dialister; see e.g., Valles-Colomer, M. et al. The neuroactive potential of the human gut microbiota in quality of life and depression. Nat Microbiol 4, 623-632, (2019), the content of which is incorporated herein by reference in its entirety. In two independent studies, it was similarly found that low levels of Dialister were associated with clinically depressed patients; see e.g., Kelly et al. J Psychiatr Res 82, 109-118 (2016); Jiang et al. Brain Behav Immun 48, 186-194 (2015). It is thus predicted herein that Dialister (e.g., SEQ ID NO: 40-41, Dialister invisus, Dialister succinatiphilus) and Coprococcus (e.g., SEQ ID NO: 0037-0038; e.g., Coprococcus catus or Coprococcus eutactus) are keystone human gut queuine producing bacteria. Conversely, in Kelly, 2016, higher levels of non-predicted queuine producers are reported in depressed patients (e.g., Eggerthella, Paraprevotella, Holdemania, and Gelria).

[0541] Similarly, for Schizophrenia, a recent cohort of 64 schizophrenia patients and 53 healthy controls found elevated levels of the genera Succinivibrio, Collinsella, Klebsiella and Methanobrevibacter but reduced levels of the genera Blautia and Coprococcus schizophrenic patients versus controls; see e.g., Shen et al. Schizophrenia research 197, 470-477 (2018). Succinivibrio, Collinsella, Klebsiella and Methanobrevibacter are not predicted to produce queuine in this disclosure, but Blautia (e.g., SEQ ID NO: 0154; e.g., Blautia luti) and Coprococcus (e.g., SEQ ID NO: 0037-0038; e.g., Coprococcus catus or Coprococcus eutactus) in this disclosure are predicted herein to be queuine producing bacteria. As described above, Coprococcus is also predicted herein to be a genus which actively expresses queuine producing machinery (“keystone queuine producing bacteria”).

[0542] These non-limiting examples provide support for the general concept that certain central nervous system disorders have a microbiome signature suggesting dysbiosis and a general reduction of keystone queuine producing bacteria. It can be presumed that such individuals would benefit from the compositions presented in this disclosure, which would correct disrupted queuine levels. Thus, in additional embodiments, provided herein are diagnostic methods in which the microbiome signature is evaluated, e.g., via 16S sequencing or transcriptional analysis for queuine-producing enzyme synthesis, among other approaches, to identify an individual as suffering from or at risk for one or more associated CNS disorders. In another embodiment, analysis of microbiome signature can be used to monitor the efficacy of a therapy for such associated CNS disorders using methods as described herein.

### References for Examples

[0543] 1 Rosenberg, E. & Zilber-Rosenberg, I. Symbiosis and development: the hologenome concept. Birth Defects Res C Embryo Today 93, 56-66, doi:10.1002/bdrc.20196 (2011).
[0544] 2 Salonen, A. & de Vos, W. M. Impact of diet on human intestinal microbiota and health. Annu Rev Food Sci Technol 5, 239-262, doi:10.1146/annurev-food-030212-182554 (2014).
[0545] 3 Canani, R. B. et al. Potential beneficial effects of butyrate in intestinal and extraintestinal diseases. World J Gastroenterol 17, 1519-1528, doi:10.3748/wjg.v17.i12. 1519 10.3748/wjg.v17.i12.1519 (2011).
[0546] 4 Hartstra, A. V., Bouter, K. E., Backhed, F. & Nieuwdorp, M. Insights into the role of the microbiome in obesity and type 2 diabetes. Diabetes Care 38, 159-165, doi:10.2337/dc14-0769 (2015).
[0547] 5 Fergus, C., Barnes, D., Algasem, M. A. & Kelly, V. P. The queuine micronutrient: charting a course from microbe to man. Nutrients 7, 2897-2929, doi:10.3390/nu7042897 (2015).
[0548] 6 Langgut, W., Reisser, T., Nishimura, S. & Kersten, H. Modulation of mammalian cell proliferation by a modified tRNA base of bacterial origin. FEBS letters 336, 137-142, doi:10.1016/0014-5793(93)81627-c (1993).
[0549] 7 McCloskey, J. R. K. T. B. S. C. A. Why Is Tumor tRNA Hypomodified with Respect to Q Nucleoside. Modified Nucleosides and Cancer, 146-159 (1980).
[0550] 8 Jacobson, K. B. Mechanism of suppression in Drosophila. VII. Correlation between disappearance of an isoacceptor of tyrosine tRNA and activation of the vermilion locus. Nucleic Acids Res 5, 2391-2404, doi:10.1093/nar/5.7.2391 (1978).
[0551] 9 Emmanuel A. Meyer, N. D., Marine Guillot, W. Bernd Schweizer, François Diederich, Bernhard Stengl, Ruth Brenk, Klaus Reuter, and Gerhard Klebe. Synthesis, Biological Evaluation, and Crystallographic Studies of Extended Guanine-Based (lin-Benzoguanine) Inhibitors for tRNA-Guanine Transglycosylase (TGT). Helv. Chim. Acta 89, 573-597 (2006).
[0552] 10 Katze, J. R., Basile, B. & McCloskey, J. A. Queuine, a modified base incorporated posttranscriptionally into eukaryotic transfer RNA: wide distribution in nature. Science 216, 55-56, doi:10.1126/science.7063869 (1982).
[0553] 11 Bishara, A. et al. High-quality genome sequences of uncultured microbes by assembly of read clouds. Nat Biotechnol, doi:10.1038/nbt.4266 (2018).
[0554] 12 Li, D., Liu, C. M., Luo, R., Sadakane, K. & Lam, T. W. MEGAHIT: an ultra-fast single-node solution for large and complex metagenomics assembly via succinct de Bruijn graph. Bioinformatics 31, 1674-1676, doi:10.1093/bioinformatics/btv033 (2015).
[0555] 13 Bankevich, A. et al. SPAdes: a new genome assembly algorithm and its applications to single-cell sequencing. Journal of computational biology: a journal of computational molecular cell biology 19, 455-477, doi:10.1089/cmb.2012.0021 (2012).
[0556] 14 Zhang, H., Cheng, Q. X., Liu, A. M., Zhao, G. P. & Wang, J. A Novel and Efficient Method for Bacteria Genome Editing Employing both CRISPR/Cas9 and an Antibiotic Resistance Cassette. Front Microbiol 8, 812, doi:10.3389/fmicb.2017.00812 (2017).
[0557] 15 Murphy, K. C. Use of Bacteriophage λ Recombination Functions To Promote Gene Replacement in Escherichia coli. Journal of Bacteriology, 2063-2071 (1998).
[0558] 16 Lagier, J. C. et al. Culturing the human microbiota and culturomics. Nat Rev Microbiol, 540-550, doi:10.1038/s41579-018-0041-0 (2018).
[0559] 17 Matuszek, Z. a. P., T. Quantification of Queuosine Modification Levels in tRNA from Human Cells Using APB Gel and Northern Blot. Bio-protocol 9, doi:10.21769/BioProtoc.3191. (2019).
[0560] 18 Yang, P., Yu, S., Cheng, L. & Ning, K. Meta-network: optimized species-species network analysis for microbial communities. BMC Genomics 20, 187, doi:10.1186/s12864-019-5471-1 (2019).
[0561] 19 McGregor, K., Labbe, A. & Greenwood, C. M. T. MDiNE: A model to estimate differential co-occurrence networks in microbiome studies. Bioinformatics, doi:10.1093/bioinformatics/btz824 (2019).
[0562] 20 Roth, J. R., Lawrence, J. G. & Bobik, T. A. Cobalamin (coenzyme B12): synthesis and biological significance. Annu Rev Microbiol 50, 137-181, doi:10.1146/annurev.micro.50.1.137 (1996).
[0563] 21 Lawrence, J. G. & Roth, J. R. Evolution of coenzyme B12 synthesis among enteric bacteria: evidence for loss and reacquisition of a multigene complex. Genetics 142, 11-24 (1996).
[0564] 22 Allen, R. H. & Stabler, S. P. Identification and quantitation of cobalamin and cobalamin analogues in human feces. Am J Clin Nutr 87, 1324-1335, doi:10.1093/ajcn/87.5.1324 (2008).
[0565] 23 Johansson, T., Norris, T. & Peilot-Sjogren, H. Yellow fluorescent protein-based assay to measure GABA(A) channel activation and allosteric modulation in CHO-K1 cells. PLoS One 8, e59429, doi:10.1371/journal.pone.0059429 (2013).
[0566] 24 Zimmermann, M., Zimmermann-Kogadeeva, M., Wegmann, R. & Goodman, A. L. Mapping human microbiome drug metabolism by gut bacteria and their genes. Nature 570, 462-467, doi:10.1038/s41586-019-1291-3 (2019).
[0567] 25 Laura J. Liermann, R. L. G., Ariel Anbar, Susan L. Brantley. Production of a molybdophore during metal-targeted dissolution of silicates by soil bacteria. 220, 285-302 (2005).
[0568] 26 Brian C. Louden, D. H., and Aaron M. Lynne. Use of Blue Agar CAS Assay for Siderophore Detection. 51-53 (2011).
[0569] 27 Braud, A., Hannauer, M., Mislin, G. L. & Schalk, I. J. The Pseudomonas aeruginosa pyochelin-iron uptake pathway and its metal specificity. J Bacteriol 191, 3517-3525, doi:10.1128/JB.00010-09 (2009).
[0570] 28 Francois, F. et al. Isolation and characterization of environmental bacteria capable of extracellular biosorption of mercury. Appl Environ Microbiol 78, 1097-1106, doi:10.1128/AEM.06522-11 (2012).
[0571] 29 Marks, T. & Farkas, W. R. Effects of a diet deficient in tyrosine and queuine on germfree mice. Biochem Biophys Res Commun 230, 233-237, doi:10.1006/bbrc.1996.5768 (1997).
[0572] 30 Tatsiana Rakovich, C. B., Ilana Bernstein, Vimbai M. Chikwana, Dirk Iwata-Reuyl, and Vincent P. Kelly. Queuosine Deficiency in Eukaryotes Compromises Tyrosine Production through Increased Tetrahydrobiopterin Oxidation. J. Biol. Chem 286, 19354-19363 (2011).
[0573] 31 Clelland, J. D., Smeed, J., Cremers, S. & Clelland, C. L. A tetrahydrobiopterin deficit finding in schizophrenia: A confirmation study. Schizophrenia research 210, 316-318, doi:10.1016/j.schres.2019.06.006 (2019).
[0574] 32 Thony, B., Auerbach, G. & Blau, N. Tetrahydrobiopterin biosynthesis, regeneration and functions. Biochem J 347 Pt 1, 1-16 (2000).
[0575] 33 Crabtree, M. J., Tatham, A. L., Hale, A. B., Alp, N. J. & Channon, K. M. Critical role for tetrahydrobiopterin recycling by dihydrofolate reductase in regulation of endothelial nitric-oxide synthase coupling: relative importance of the de novo biopterin synthesis versus salvage pathways. J Biol Chem 284, 28128-28136, doi:10.1074/jbc.M109.041483 (2009).
[0576] 34 Ponzone, A., Spada, M., Ferraris, S., Dianzani, I. & de Sanctis, L. Dihydropteridine reductase deficiency in man: from biology to treatment. Med Res Rev 24, 127-150, doi:10.1002/med.10055 (2004).
[0577] 35 Cleary, M. A. Phenylketonuria. Paediatrics and Child Health 25, 108-112 (2015).
[0578] 36 Andersen, A. E. & Avins, L. Lowering brain phenylalanine levels by giving other large neutral amino acids. A new experimental therapeutic approach to phenylketonuria. Arch Neurol 33, 684-686, doi:10.1001/archneur.1976.00500100018008 (1976).
[0579] 37 Shaw, W. Increased urinary excretion of a 3-(3-hydroxyphenyl)-3-hydroxypropionic acid (HPHPA), an abnormal phenylalanine metabolite of Clostridia spp. in the gastrointestinal tract, in urine samples from patients with autism and schizophrenia. Nutr Neurosci 13, 135-143, doi:10.1179/147683010X12611460763968 (2010).
[0580] 38 Dyck, L. E., Kazakoff, C. W. & Dourish, C. T. The role of catecholamines, 5-hydroxytryptamine and m-tyramine in the behavioural effects of m-tyrosine in the rat. European journal of pharmacology 84, 139-149, doi:10.1016/0014-2999(82)90196-0 (1982).
[0581] 39 Bilder, D. A. et al. Psychiatric symptoms in adults with phenylketonuria. Mol Genet Metab 108, 155-160, doi:10.1016/j.ymgme.2012.12.006 (2013).
[0582] 40 Rush, A. J., Gullion, C. M., Basco, M. R., Jarrett, R. B. & Trivedi, M. H. The Inventory of Depressive Symptomatology (IDS): psychometric properties. Psychol Med 26, 477-486, doi:10.1017/s0033291700035558 (1996).
[0583] 41 Hill, E. L. Executive dysfunction in autism. Trends Cogn Sci 8, 26-32, doi:10.1016/j.tics.2003.11.003 (2004).
[0584] 42 Chang Y T, C. P., Tsai I J, Sung F C, Chin Z N, Kuo H T, Tsai C H, Chou I C. Bidirectional relation between schizophrenia and epilepsy: a population-based retrospective cohort study. Epilepsia 52, 2036-2042, doi:10.1111/j.1528-1167.2011.03268.x (2011).
[0585] 43 Tandon, R. et al. Definition and description of schizophrenia in the DSM-5. Schizophrenia research 150, 3-10, doi:10.1016/j.schres.2013.05.028 (2013).
[0586] 44 Battle, D. E. Diagnostic and Statistical Manual of Mental Disorders (DSM). Codas 25, 191-192, doi:10.1590/s2317-17822013000200017 (2013).
[0587] 45 Okusaga, O. et al. Elevated levels of plasma phenylalanine in schizophrenia: a guanosine triphosphate cyclohydrolase-1 metabolic pathway abnormality? PLoS One 9, e85945, doi:10.1371/journal.pone.0085945 (2014).
[0588] 46 Naoi, M. & Maruyama, W. Cell death of dopamine neurons in aging and Parkinson's disease. Mech Ageing Dev 111, 175-188, doi:10.1016/s0047-6374(99)00064-0 (1999).
[0589] 47 Heneka, M. T. et al. Locus ceruleus controls Alzheimer's disease pathology by modulating microglial functions through norepinephrine. Proc Natl Acad Sci USA 107, 6058-6063, doi:10.1073/pnas.0909586107 (2010).
[0590] 48 Healy, D. Serotonin and depression. BMJ 350, h1771, doi:10.1136/bmj.h1771 (2015).
[0591] 49 Jenkins, T. A., Nguyen, J. C., Polglaze, K. E. & Bertrand, P. P. Influence of Tryptophan and Serotonin on Mood and Cognition with a Possible Role of the Gut-Brain Axis. Nutrients 8, doi:10.3390/nu8010056 (2016).
[0592] 50 Charney, D. S. Monoamine dysfunction and the pathophysiology and treatment of depression. The Journal of clinical psychiatry 59 Suppl 14, 11-14 (1998).
[0593] 51 Yano, S., Moseley, K., Fu, X. & Azen, C. Evaluation of Tetrahydrobiopterin Therapy with Large Neutral Amino Acid Supplementation in Phenylketonuria: Effects on Potential Peripheral Biomarkers, Melatonin and Dopamine, for Brain Monoamine Neurotransmitters. PLoS One 11, e0160892, doi:10.1371/journal.pone.0160892 (2016).
[0594] 52 Reilly, T. & Waterhouse, J. Altered sleep-wake cycles and food intake: the Ramadan model. Physiol Behav 90, 219-228, doi:10.1016/j.physbeh.2006.09.004 (2007).
[0595] 53 Walker, M. P. & Stickgold, R. Sleep, memory, and plasticity. Annu Rev Psychol 57, 139-166, doi:10.1146/annurev.psych.56.091103.070307 (2006).
[0596] 54 Anderson, G. & Maes, M. Melatonin: an overlooked factor in schizophrenia and in the inhibition of anti-psychotic side effects. Metab Brain Dis 27, 113-119, doi:10.1007/s11011-012-9307-9 (2012).
[0597] 55 Melke, J. et al. Abnormal melatonin synthesis in autism spectrum disorders. Mol Psychiatry 13, 90-98, doi:10.1038/sj.mp.4002016 (2008).
[0598] 56 Claustrat, B., Chazot, G., Brun, J., Jordan, D. & Sassolas, G. A chronobiological study of melatonin and cortisol secretion in depressed subjects: plasma melatonin, a biochemical marker in major depression. Biological psychiatry 19, 1215-1228 (1984).
[0599] 57 Cardinali, D. P., Furio, A. M. & Brusco, L. I. Clinical aspects of melatonin intervention in Alzheimer's disease progression. Current neuropharmacology 8, 218-227, doi:10.2174/157015910792246209 (2010).
[0600] 58 Medeiros, C. A. et al. Effect of exogenous melatonin on sleep and motor dysfunction in Parkinson's disease. A randomized, double blind, placebo-controlled study. J Neurol 254, 459-464, doi:10.1007/s00415-006-0390-x (2007).
[0601] 59 Lugo-Huitron, R. et al. Quinolinic acid: an endogenous neurotoxin with multiple targets. Oxid Med Cell Longev 2013, 104024, doi:10.1155/2013/104024 (2013).
[0602] 60 Erhardt, S. et al. Connecting inflammation with glutamate agonism in suicidality. Neuropsychopharmacology 38, 743-752, doi:10.1038/npp.2012.248 (2013).
[0603] 61 Brundin, L. et al. An enzyme in the kynurenine pathway that governs vulnerability to suicidal behavior by regulating excitotoxicity and neuroinflammation. Transl Psychiatry 6, e865, doi:10.1038/tp.2016.133 (2016).
[0604] 62 Schecter, A. et al. Phthalate concentrations and dietary exposure from food purchased in New York State. Environ Health Perspect 121, 473-494, doi:10.1289/ehp.1206367 (2013).
[0605] 63 Fukuwatari, T., Ohsaki, S., Fukuoka, S., Sasaki, R. & Shibata, K. Phthalate esters enhance quinolinate production by inhibiting alpha-amino-beta-carboxymuconate-epsilon-semialdehyde decarboxylase (ACMSD), a key enzyme of the tryptophan pathway. Toxicol Sci 81, 302-308, doi:10.1093/toxsci/kfh204 (2004).
[0606] 64 Erhardt, S., Schwieler, L., Nilsson, L., Linderholm, K. & Engberg, G. The kynurenic acid hypothesis of schizophrenia. Physiol Behav 92, 203-209, doi:10.1016/j.physbeh.2007.05.025 (2007).
[0607] 65 Malhotra, A. K. et al. Ketamine-induced exacerbation of psychotic symptoms and cognitive impairment in neuroleptic-free schizophrenics. Neuropsychopharmacology 17, 141-150, doi:10.1016/S0893-133X(97)00036-5 (1997).
[0608] 66 Linderholm, K. R. et al. Increased levels of kynurenine and kynurenic acid in the CSF of patients with schizophrenia. Schizophr Bull 38, 426-432, doi:10.1093/schbul/sbq086 (2012).
[0609] 67 Szymona, K. et al. Correlations of Kynurenic Acid, 3-Hydroxykynurenine, sIL-2R, IFN-alpha, and IL-4 with Clinical Symptoms During Acute Relapse of Schizophrenia. Neurotox Res 32, 17-26, doi:10.1007/s12640-017-9714-0 (2017).
[0610] 68 Erhardt, S., Oberg, H., Mathe, J. M. & Engberg, G. Pharmacological elevation of endogenous kynurenic acid levels activates nigral dopamine neurons. Amino Acids 20, 353-362, doi:10.1007/s007260170032 (2001).
[0611] 69 Linderholm, K. R. et al. Activation of rat ventral tegmental area dopamine neurons by endogenous kynurenic acid: a pharmacological analysis. Neuropharmacology 53, 918-924, doi:10.1016/j.neuropharm.2007.09.003 (2007).
[0612] 70 Malhotra, A. K. et al. Clozapine blunts N-methyl-D-aspartate antagonist-induced psychosis: a study with ketamine. Biological psychiatry 42, 664-668, doi:10.1016/s0006-3223(96)00546-x (1997).
[0613] 71 Fukui, S., Schwarcz, R., Rapoport, S. I., Takada, Y. & Smith, Q. R. Blood-brain barrier transport of kynurenines: implications for brain synthesis and metabolism. J Neurochem 56, 2007-2017, doi:10.1111/j.1471-4159.1991.tb03460.x (1991).
[0614] 72 Agudelo, L. Z. et al. Skeletal muscle PGC-1alpha1 modulates kynurenine metabolism and mediates resilience to stress-induced depression. Cell 159, 33-45, doi:10.1016/j.cell.2014.07.051 (2014).
[0615] 73 Ohashi, A. et al. Tetrahydrobiopterin Supplementation: Elevation of Tissue Biopterin Levels Accompanied by a Relative Increase in Dihydrobiopterin in the Blood and the Role of Probenecid-Sensitive Uptake in Scavenging Dihydrobiopterin in the Liver and Kidney of Rats. PLoS One 11, e0164305, doi:10.1371/journal.pone.0164305 (2016).
[0616] 74 Altindag, Z. Z., Baydar, T., Engin, A. B. & Sahin, G. Effects of the metals on dihydropteridine reductase activity. Toxicol In Vitro 17, 533-537, doi:10.1016/s0887-2333(03)00136-x (2003).
[0617] 75 Hanninen, H. Behavioral effects of occupational exposure to mercury and lead. Acta neurologica Scandinavica. Supplementum 92, 167-175 (1982).
[0618] 76 Bellinger, D., Leviton, A., Waternaux, C., Needleman, H. & Rabinowitz, M. Longitudinal analyses of prenatal and postnatal lead exposure and early cognitive development. N Engl J Med 316, 1037-1043, doi:10.1056/NEJM198704233161701 (1987).
[0619] 77 Jedrychowski, W. et al. Effects of prenatal exposure to mercury on cognitive and psychomotor function in one-year-old infants: epidemiologic cohort study in Poland. Ann Epidemiol 16, 439-447, doi:10.1016/j.annepidem.2005.06.059 (2006).
[0620] 78 Carrier, G., Brunet, R. C., Caza, M. & Bouchard, M. A toxicokinetic model for predicting the tissue distribution and elimination of organic and inorganic mercury following exposure to methyl mercury in animals and humans. I. Development and validation of the model using experimental data in rats. Toxicol Appl Pharmacol 171, 38-49, doi:10.1006/taap.2000.9112 (2001).
[0621] 79 Rowland, I. R., Robinson, R. D. & Doherty, R. A. Effects of diet on mercury metabolism and excretion in mice given methylmercury: role of gut flora. Arch Environ Health 39, 401-408, doi:10.1080/00039896.1984.10545872 (1984).
[0622] 80 Miethke, M. & Marahiel, M. A. Siderophore-based iron acquisition and pathogen control. Microbiol Mol Biol Rev 71, 413-451, doi:10.1128/MMBR.00012-07 (2007).
[0623] 81 Zawadzka, A. M., Crawford, R. L. & Paszczynski, A. J. Pyridine-2,6-bis(thiocarboxylic acid) produced by Pseudomonas stutzeri KC reduces chromium(VI) and precipitates mercury, cadmium, lead and arsenic. Biometals 20, 145-158, doi:10.1007/s10534-006-9022-2 (2007).
[0624] 82 Schalk, I. J., Hannauer, M. & Braud, A. New roles for bacterial siderophores in metal transport and tolerance. Environ Microbiol 13, 2844-2854, doi:10.1111/j.1462-2920.2011.02556.x (2011).
[0625] 83 Jo, S. et al. Estimation of the Biological Half-Life of Methylmercury Using a Population Toxicokinetic Model. Int J Environ Res Public Health 12, 9054-9067, doi:10.3390/ijerph120809054 (2015).
[0626] 84 Rothenberg, S. E. et al. The role of gut microbiota in fetal methylmercury exposure: Insights from a pilot study. Toxicol Lett 242, 60-67, doi:10.1016/j.toxlet.2015.11.022 (2016).
[0627] 85 Zahir, F., Rizwi, S. J., Haq, S. K. & Khan, R. H. Low dose mercury toxicity and human health. Environ Toxicol Pharmacol 20, 351-360, doi:10.1016/j.etap.2005.03.007 (2005).
[0628] 86 Joensuu, O. I. Fossil fuels as a source of mercury pollution. Science 172, 1027-1028, doi:10.1126/science.172.3987.1027 (1971).
[0629] 87 Kumar, C. et al. Glutathione revisited: a vital function in iron metabolism and ancillary role in thiol-redox control. EMBO J 30, 2044-2056, doi:10.1038/emboj.2011.105 (2011).
[0630] 88 Chmielnicka, J., Brzeznicka, E. & Sniady, A. Kidney concentrations and urinary excretion of mercury, zinc and copper following the administration of mercuric chloride and sodium selenite to rats. Archives of toxicology 59, 16-20, doi:10.1007/bf00263951 (1986).
[0631] 89 Bernhoft, R. A. Mercury toxicity and treatment: a review of the literature. J Environ Public Health 2012, 460508, doi:10.1155/2012/460508 (2012).
[0632] 90 in World Health Organization.
[0633] 91 Adams, J. B., Romdalvik, J., Ramanujam, V. M. & Legator, M. S. Mercury, lead, and zinc in baby teeth of children with autism versus controls. J Toxicol Environ Health A 70, 1046-1051, doi:10.1080/15287390601172080 (2007).
[0634] 92 Arora, M. et al. Fetal and postnatal metal dysregulation in autism. Nature communications 8, 15493, doi:10.1038/ncomms15493 (2017).
[0635] 93 Mutter J, C. A., Naumann J, Deth R, Walach H. Does inorganic mercury play a role in Alzheimer's disease? A systematic review and an integrated molecular mechanism. Journal of Alzheimer's disease: JAD 22, 357-374, doi:10.3233/JAD-2010-100705. (2010).
[0636] 94 Parker, S. K., Schwartz, B., Todd, J. & Pickering, L. K. Thimerosal-containing vaccines and autistic spectrum disorder: a critical review of published original data. Pediatrics 114, 793-804, doi:10.1542/peds.2004-0434 (2004).
[0637] 95 De Angelis, M., Francavilla, R., Piccolo, M., De Giacomo, A. & Gobbetti, M. Autism spectrum disorders and intestinal microbiota. Gut Microbes 6, 207-213, doi:10.1080/19490976.2015.1035855 (2015).
[0638] 96 Nemeroff, C. B. The role of GABA in the pathophysiology and treatment of anxiety disorders. Psychopharmacol Bull 37, 133-146 (2003).
[0639] 97 Kalueff, A. V. & Nutt, D. J. Role of GABA in anxiety and depression. Depress Anxiety 24, 495-517, doi:10.1002/da.20262 (2007).
[0640] 98 Basile, A. S. et al. Elevated brain concentrations of 1,4-benzodiazepines in fulminant hepatic failure. N Engl J Med 325, 473-478, doi:10.1056/NEJM199108153250705 (1991).
[0641] 99 Yurdaydin, C. et al. Gut bacteria provide precursors of benzodiazepine receptor ligands in a rat model of hepatic encephalopathy. Brain Res 679, 42-48, doi:10.1016/0006-8993(95)00241-h (1995).
[0642] 100 Roos, W. Ch. 2: Benzodiazepine Alkaloids. 63-97 (1990).
[0643] 101 Zehner, S. et al. A regioselective tryptophan 5-halogenase is involved in pyrroindomycin biosynthesis in Streptomyces rugosporus LL-42D005. Chem Biol 12, 445-452, doi:10.1016/j.chembiol.2005.02.005 (2005).
[0644] 102 Rothstein, J. D. et al. Purification and characterization of naturally occurring benzodiazepine receptor ligands in rat and human brain. J Neurochem 58, 2102-2115, doi:10.1111/j.1471-4159.1992.tb10952.x (1992).
[0645] 103 Goodwin, P. M. & Anthony, C. The biochemistry, physiology and genetics of PQQ and PQQ-containing enzymes. Adv Microb Physiol 40, 1-80, doi:10.1016/s0065-2911(08)60129-0 (1998).
[0646] 104 Basile, A. S., Ostrowski, N. L., Gammal, S. H., Jones, E. A. & Skolnick, P. The GABAA receptor complex in hepatic encephalopathy. Autoradiographic evidence for the presence of elevated levels of a benzodiazepine receptor ligand. Neuropsychopharmacology 3, 61-71 (1990).
[0647] 105 Davidson, J. R. T. Use of benzodiazepines in social anxiety disorder, generalized anxiety disorder, and posttraumatic stress disorder. J. Clin. Psychiatry 65, 26-30 (2004).
[0648] 106 Walker, E. A., Katon, W. J., Jemelka, R. P. & Roy-Bryne, P. P. Comorbidity of gastrointestinal complaints, depression, and anxiety in the Epidemiologic Catchment Area (ECA) Study. Am J Med 92, 26S-30S, doi:10.1016/0002-9343(92)90133-v (1992).
[0649] 107 Valles-Colomer, M. et al. The neuroactive potential of the human gut microbiota in quality of life and depression. Nat Microbiol 4, 623-632, doi:10.1038/s41564-018-0337-x (2019).
[0650] 108 Kelly, J. R. et al. Transferring the blues: Depression-associated gut microbiota induces neurobehavioural changes in the rat. J Psychiatr Res 82, 109-118, doi:10.1016/j.jpsychires.2016.07.019 (2016).
[0651] 109 Jiang, H. et al. Altered fecal microbiota composition in patients with major depressive disorder. Brain Behav Immun 48, 186-194, doi:10.1016/j.bbi.2015.03.016 (2015).
[0652] 110 Shen, Y. et al. Analysis of gut microbiota diversity and auxiliary diagnosis as a biomarker in patients with schizophrenia: A cross-sectional study. Schizophrenia research 197, 470-477, doi:10.1016/j.schres.2018.01.002 (2018).

1. A composition comprising one or more isolated, non-pathogenic queuine-producing bacterial strains or an isolated product derived therefrom, wherein the one or more isolated, non-pathogenic queuine-producing bacterial strains comprise live bacteria or dead bacteria, or wherein the isolated product derived therefrom comprises culture medium in which said one or more isolated, non-pathogenic bacterial strains have been cultured.

2. (canceled)

3. The composition of claim 1, wherein the isolated product derived therefrom comprises a purified polypeptide produced by the one or more bacterial strains.

4. The composition of claim 1, further comprising a pharmaceutically acceptable carrier, wherein the one or more isolated non-pathogenic queuine-producing bacterial strains or an isolated product derived therefrom is present in an amount effective to alter queuine levels in a subject in need thereof.

5. A pharmaceutical composition comprising queuine, an analog, derivative or precursor thereof, or a combination of any of these, in an amount effective to alter queuine levels in a subject in need thereof, and a pharmaceutically acceptable carrier.

6. The pharmaceutical composition of claim 5, wherein the queuine, analog, derivative or precursor is isolated from a queuine-producing bacterial strain or culture medium in which a queuine-producing bacterial strain has been cultured.

7. The composition of claim 1, wherein the at least one isolated non-pathogenic queuine producing bacteria is a human gut bacteria.

8. The composition of claim 1, wherein the at least one isolated non-pathogenic queuine-producing bacteria belongs to a species selected from Acetobacter pasteurianus, Achromobacter xylosoxidans, Acidaminococcus fermentans, Acidaminococcus intestini, Acinetobacter baumannii, Acinetobacter calcoaceticus, Acinetobacter junii, Acinetobacter lwoffii, Acinetobacter pittii, Acinetobacter radioresistens, Acinetobacter schindleri, Acinetobacter towneri, Acinetobacter ursingii, Acinetobacter variabilis, Adlercreutzia equolifaciens, Aeribacillus pallidus, Aeromonas caviae, Aeromonas enteropelogenes, Aeromonas hydrophila, Aeromonas jandaei, Aeromonas salmonicida, Aeromonas schubertii, Aeromonas veronii, Aggregatibacter aphrophilus, Akkermansia muciniphila, Alistipes onderdonkii, Alistipes putredinis, Allisonella histaminiformans, Anaeroglobus geminatus, Anaerostipes caccae, Anaerostipes hadrus, Aneurinibacillus aneurinilyticus, Aneurinibacillus migulanus, Anoxybacillus flavithermus, Asaccharobacter celatus, Bacillus altitudinis, Bacillus amyloliquefaciens, Bacillus aquimaris, Bacillus atrophaeus, Bacillus badius, Bacillus bataviensis, Bacillus cereus, Bacillus circulans, Bacillus clausii, Bacillus coagulans, Bacillus cohnii, Bacillus endophyticus, Bacillus firmus, Bacillus flexus, Bacillus fordii, Bacillus galactosidilyticus, Bacillus halodurans, Bacillus infantis, Bacillus koreensis, Bacillus kyonggiensis, Bacillus lentus, Bacillus licheniformis, Bacillus litoralis, Bacillus marisflavi, Bacillus megaterium, Bacillus mojavensis, Bacillus mycoides, Bacillus nealsonii, Bacillus okuhidensis, Bacillus pseudofirmus, Bacillus pseudomycoides, Bacillus pumilus, Bacillus simplex, Bacillus sonorensis, Bacillus subterraneus, Bacillus subtilis, Bacillus thuringiensis, Bacillus timonensis, Bacillus vallismortis, Bacillus vietnamensis, Bacillus weihenstephanensis, Bacteroides caccae, Bacteroides cellulosilyticus, Bacteroides clarus, Bacteroides coprocola, Bacteroides dorei, Bacteroides eggerthii, Bacteroides faecis, Bacteroides fragilis, Bacteroides intestinalis, Bacteroides massiliensis, Bacteroides nordii, Bacteroides ovatus, Bacteroides plebeius, Bacteroides salyersiae, Bacteroides stercoris, Bacteroides thetaiotaomicron, Bacteroides uniformis, Bacteroides vulgatus, Bacteroides xylanisolvens, Bacteroides xylanolyticus, Barnesiella intestinihominis, Barnesiella viscericola, Bilophila wadsworthia, Blautia luti, Bordetella bronchiseptica, Bordetella trematum, Brenneria alni, Brevibacillus agri, Brevibacillus brevis, Brevibacillus choshinensis, Brevibacillus formosus, Brevibacillus laterosporus, Brevibacillus parabrevis, Brevundimonas diminuta, Butyricimonas virosa, Campylobacter coli, Campylobacter concisus, Campylobacter curvus, Campylobacter gracilis, Campylobacter jejuni, Campylobacter showae, Campylobacter ureolyticus, Cedecea lapagei, Cedecea neteri, Chromohalobacter japonicus, Citrobacter amalonaticus, Citrobacter braakii, Citrobacter farmeri, Citrobacter freundii, Citrobacter gillenii, Citrobacter koseri, Citrobacter murliniae, Citrobacter youngae, Clostridium acetireducens, Clostridium bartlettii, Clostridium beijerinckii, Clostridium botulinum, Clostridium butyricum, Clostridium carboxidivorans, Clostridium colicanis, Clostridium diolis, Clostridium disporicum, Clostridium novyi, Clostridium ramosum, Clostridium sporogenes, Clostridium thermocellum, Coprococcus catus, Coprococcus eutactus, Cronobacter sakazakii, Delftia tsuruhatensis, Desulfovibrio desulfuricans, Desulfovibrio fairfieldensis, Desulfovibrio piger, Dialister invisus, Dialister pneumosintes, Enterobacter aerogenes, Enterobacter asburiae, Enterobacter cloacae, Enterobacter hormaechei, Enterobacter kobei, Enterobacter ludwigii, Enterorhabdus caecimuris, Erysipelatoclostridium ramosum, Escherichia coli, Escherichia fergusonii, Escherichia hermannii, Escherichia marmotae, Geobacillus stearothermophilus, Haemophilus influenzae, Haemophilus pittmaniae, Hafnia alvei, Halobacillus dabanensis, Halobacillus karajensis, Halobacillus salinus, Halobacillus trueperi, Helicobacter pylori, Intestinibacter bartlettii, Klebsiella oxytoca, Klebsiella pneumoniae, Klebsiella variicola, Kluyvera cryocrescens, Kluyvera georgiana, Kosakonia cowanii, Kushneria sinocarnis, Lachnospira pectinoschiza, Lachnotalea glycerini, Lactobacillus mali, Leclercia adecarboxylata, Lelliottia amnigena, Litorilituus sediminis, Lysinibacillus boronitolerans, Lysinibacillus fusiformis, Lysinibacillus massiliensis, Lysinibacillus sphaericus, Lysinibacillus xylanilyticus, Lysobacter soli, Megasphaera elsdenii, Megasphaera micronuciformis, Micrococcus lylae, Mitsuokella jalaludinii, Moellerella wisconsensis, Monoglobus pectinilyticus, Moraxella osloensis, Morganella morganii, Neisseria canis, Neisseria cinerea, Neisseria elongata, Neisseria flavescens, Neisseria gonorrhoeae, Neisseria macacae, Neisseria meningitidis, Neisseria mucosa, Neisseria perflava, Neisseria subflava, Nosocomiicoccus massiliensis, Noviherbaspirillum denitrificans, Oceanobacillus iheyensis, Oceanobacillus oncorhynchi, Oceanobacillus sojae, Ochrobactrum anthropi, Odoribacter splanchnicus, Oxalobacter formigenes, Paenibacillus alvei, Paenibacillus amylolyticus, Paenibacillus barcinonensis, Paenibacillus barengoltzii, Paenibacillus daejeonensis, Paenibacillus dendritiformis, Paenibacillus glucanolyticus, Paenibacillus illinoisensis, Paenibacillus lactis, Paenibacillus larvae, Paenibacillus lautus, Paenibacillus macerans, Paenibacillus naphthalenovorans, Paenibacillus odorifer, Paenibacillus pabuli, Paenibacillus pasadenensis, Paenibacillus polymyxa, Paenibacillus rhizosphaerae, Paenibacillus stellifer, Paenibacillus thiaminolyticus, Paenibacillus typhae, Pantoea agglomerans, Parabacteroides distasonis, Parabacteroides goldsteinii, Parabacteroides gordonii, Parabacteroides johnsonii, Parabacteroides merdae, Paraprevotella clara, Parasutterella excrementihominis, Peptoniphilus asaccharolyticus, Peptoniphilus indolicus, Planococcus rifietoensis, Porphyromonas asaccharolytica, Porphyromonas bennonis, Porphyromonas somerae, Prevotella bivia, Prevotella buccae, Prevotella buccalis, Prevotella copri, Prevotella timonensis, Proteus mirabilis, Proteus penneri, Proteus vulgaris, Providencia alcalifaciens, Providencia heimbachae, Providencia rettgeri, Providencia stuartii, Pseudomonas aeruginosa, Pseudomonas alcaligenes, Pseudomonas bauzanensis, Pseudomonas caricapapayae, Pseudomonas chlororaphis, Pseudomonas fluorescens, Pseudomonas fragi, Pseudomonas fulva, Pseudomonas gessardii, Pseudomonas japonica, Pseudomonas libanensis, Pseudomonas lundensis, Pseudomonas luteola, Pseudomonas migulae, Pseudomonas monteilii, Pseudomonas mosselii, Pseudomonas oleovorans, Pseudomonas oryzihabitans, Pseudomonas putida, Pseudomonas rhodesiae, Pseudomonas saudiphocaensis, Pseudomonas stutzeri, Pseudomonas taetrolens, Pseudomonas tolaasii, Pseudomonas xanthomarina, Psychrobacter phenylpyruvicus, Raoultella ornithinolytica, Raoultella planticola, Roseomonas gilardii, Roseomonas mucosa, Ruminococcus albus, Ruminococcus callidus, Ruminococcus flavefaciens, Ruminococcus lactaris, Ruminococcus torques, Salinisphaera halophila, Salinivibrio costicola, Salmonella enterica, Salmonella enteritidis, Salmonella typhi, Selenomonas ruminantium, Selenomonas sputigena, Senegalimassilia anaerobia, Serratia marcescens, Serratia ureilytica, Shewanella xiamenensis, Shigella boydii, Shigella dysenteriae, Shigella flexneri, Shigella sonnei, Sphingomonas aerolata, Staphylococcus arlettae, Staphylococcus aureus, Staphylococcus auricularis, Staphylococcus capitis, Staphylococcus caprae, Staphylococcus carnosus, Staphylococcus cohnii, Staphylococcus condimenti, Staphylococcus devriesei, Staphylococcus epidermidis, Staphylococcus equorum, Staphylococcus gallinarum, Staphylococcus haemolyticus, Staphylococcus hominis, Staphylococcus hyicus, Staphylococcus intermedius, Staphylococcus kloosii, Staphylococcus lentus, Staphylococcus lugdunensis, Staphylococcus nepalensis, Staphylococcus pasteuri, Staphylococcus petrasii, Staphylococcus pettenkoferi, Staphylococcus saccharolyticus, Staphylococcus saprophyticus, Staphylococcus schleiferi, Staphylococcus sciuri, Staphylococcus simiae, Staphylococcus simulans, Staphylococcus succinus, Staphylococcus vitulinus, Staphylococcus warneri, Staphylococcus xylosus, Stenotrophomonas acidaminiphila, Stenotrophomonas maltophilia, Stenotrophomonas rhizophila, Streptococcus australis, Streptococcus bovis, Streptococcus equinus, Streptococcus gallolyticus, Streptococcus infantarius, Streptococcus infantis, Streptococcus lutetiensis, Streptococcus mitis, Streptococcus mutans, Streptococcus oralis, Streptococcus peroris, Streptococcus pseudopneumoniae, Streptococcus salivarius, Streptococcus sobrinus, Streptococcus thermophilus, Streptococcus tigurinus, Streptococcus vestibularis, Succiniclasticum ruminis, Terribacillus aidingensis, Terribacillus halophilus, Thermotalea metallivorans, Turicibacter sanguinis, Veillonella atypica, Veillonella denticariosi, Veillonella dispar, Veillonella parvula, Vibrio cholerae, Victivallis vadensis, Virgibacillus massiliensis, Yersinia bercovieri, Yersinia enterocolitica, Yersinia intermedia, Yersinia kristensenii, Yersinia mollaretii, and combinations thereof.

9. The composition of claim 1, wherein the one or more non-pathogenic queuine producing bacteria is a human gut bacteria, and comprises a 16S rRNA sequence at least about 97% identical to a 16S rRNA sequence selected from SEQ ID NOs 1-406.

10. The composition of claim 1, wherein the at least one isolated non-pathogenic queuine producing bacteria is a human gut bacteria that encodes within its genome and expresses in the human gastrointestinal tract at least one queuine biosynthesis enzyme selected from folE (GTP cyclohydrolase), QueD (6-carboxy-5,6,7,8-tetrahydrobiopterin synthase), QueE (7-carboxy-7-deazaguanine synthase), QueC (7-cyano-7-deazaguanine synthase, PreQ0 synthase), QueF (7-cyano-7-deazaguanine reductase, PreQ0 reductase), tgt or btgt (tRNA guanine transglycosylase, bacterial tRNA guanine transglycosylase), QueA (S-adenosylmethionine:tRNA ribosyltransferase-isomerase), and QueG or QueH (epoxyqueuosine reductase).

11. The composition of claim 1, wherein the at least one isolated non-pathogenic queuine producing bacteria is a human gut bacteria that encodes within its genome and expresses in the human gastrointestinal tract at least one queuine biosynthesis enzyme, wherein the amino acid sequence encoded by the at least one queuine biosynthesis gene is at least 90% similar to a sequence selected from SEQ ID NOs 3660-82283.

12. The composition of claim 1, wherein the at least one isolated non-pathogenic queuine producing bacteria is a human gut bacteria belongs to species selected from Acidaminococcus fermentans, Adlercreutzia equolifaciens, Akkermansia muciniphila, Alloprevotella tannerae, Anaerostipes caccae, Anaerostipes hadrus, Arcobacter butzleri, Bacteroides caccae, Bacteroides cellulosilyticus, Bacteroides clarus, Bacteroides coprophilus, Bacteroides dorei, Bacteroides eggerthii, Bacteroides faecis, Bacteroides fragilis, Bacteroides massiliensis, Bacteroides nordii, Bacteroides oleiciplenus, Bacteroides ovatus, Bacteroides plebeius, Bacteroides salanitronis, Bacteroides salyersiae, Bacteroides stercoris, Bacteroides thetaiotaomicron, Bacteroides uniformis, Bacteroides vulgatus, Bacteroides xylanisolvens, Barnesiella intestinihominis, Bilophila wadsworthia, Butyrivibrio crossotus, Campylobacter curvus, Citrobacter freundii, Citrobacter koseri, Clostridium bartelettii, Clostridium ramosum, Coprobacter fastidiosus, Coprococcus catus, Coprococcus eutactus, Desulfovibrio piger, Dialister invisus, Dialister succinatiphilus, Enterobacter aerogenes, Enterobacter cancerogenus, Enterobacter cloacae, Enterorhabdus caecimuris, Escherichia coli, Eubacterium hallii, Fusobacterium mortiferum, Haemophilus pittmaniae, Haemophilus sputorum, Hafnia alvei, Klebsiella oxytoca, Klebsiella pneumoniae, Klebsiella variicola, Megamonas funiformis, Megamonas rupellensis, Megasphaera elsdenii, Megasphaera micronuciformis, Mitsuokella multacida, Odoribacter laneus, Odoribacter splanchnicus, Oxalobacter formigenes, Parabacteroides distasonis, Porphyromonas asaccharolytica, Porphyromonas uenonis, Ruminococcus callidus, Ruminococcus torques, Shigella sonnei, Streptococcus infantis, Streptococcus mitis, Streptococcus oralis, Streptococcus pneumoniae, Streptococcus tigurinus, Turicibacter sanguinis, Veillonella atypica, Veillonella dispar, Veillonella parvula, Dysgonomonas mossii, Proteus mirabilis, Veillonella ratti, and combinations thereof, and wherein the at least one isolated non-pathogenic queuine producing bacteria encodes within its genome and expresses in the human gastrointestinal tract at least one queuine biosynthesis enzyme with an amino acid sequence at least 90% identical to a sequence selected from SEQ ID NOs 3660-82283.

13. The composition of claim 1, wherein the at least one isolated non-pathogenic queuine producing bacteria is a human gut bacteria with a 16S rRNA sequence at least about 97% identical to a 16S rRNA sequence selected from SEQ ID NOs 1-78, and the at least one isolated non-pathogenic queuine producing bacteria encodes within its genome and expresses in the human gastrointestinal tract at least one queuine biosynthesis enzyme with an amino acid sequence at least 90% identical to a sequence selected from SEQ ID NOs 3660-82283.

14. The composition of claim 5, wherein the queuine precursor is epoxyqueuine and/or cobalamin.

15. The composition of claim 5, wherein the queuine analogs are selected from queuosine, a mannosyl queuosine, galactosyl queuosine, glutamyl queuosine, mannosylqueuine, galactosylqueuine, and aminoacylated derivatives such as glutamylqueuine.

16. The composition of claim 1, wherein the composition is formulated in a capsule, a tablet, a caplet, a pill, a troche, a lozenge, a powder, a granule, a nutraceutical, a medical food, or a combination thereof.

17. The composition of claim 1, formulated for delivery to the gut.

18. The composition of claim 1, further comprising a prebiotic.

19. The composition of claim 1, further comprising a different composition in an amount effective to treat a CNS disease or disorder.

20. (canceled)

21. A method of increasing queuine levels in a subject in need thereof, the method comprising administering to the subject a composition of claim 1 in an amount effective to increase queuine levels in the subject.

22.-47. (canceled)

48. A composition comprising one or more isolated non-pathogenic endozepine-producing bacterial or yeast strains or an isolated product derived therefrom.

49.-108. (canceled)

The application's sequence listing, which the Patent Office published only in electronic form, follows.

SEQUENCE LISTING (95321 sequences)

SEQ ID NO: 1 - DNA, 1479 bp, Acidaminococcus fermentans
gacgaacgctggcggcgtgcttaacacatgcaagtcgaacggagaactttcttcggaatgttcttagtggcgaacgggtgagtaacgcgtaggcaacctgccctctggttggggacaacattccgaaagggatgctaataccgaatgagatcctctttccgcatggagagaggatgaaagatggcctctacttgtaagctatcgccagaagatgggcctgcgtctgattagctagtaggtgaggtaacggctcacctaggcgatgatcagtagccggtctgagaggatgaacggccacattgggactgagacacggcccaaactcctacgggaggcagcagtggggaatcttccgcaatggacgaaagtctgacggagcaacgccgcgtgagtgatgaaggccttcgggttgtaaaactctgttgtcagggacgaaagcaccgatctataatacattttggtgttgacggtacctgacgaggaagccacggctaactacgtgccagcagccgcggtaatacgtaggtggcaagcgttgtccggaattattgggcgtaaagagcatgtaggcgggcttttaagtccgacgtgaaaatgcggggcttaaccccgtatggcgttggatactggaagtcttgagtgcaggagaggaaaggggaattcccagtgtagcggtgaaatgcgtagatattgggaggaacaccagtggcgaaggcgcctttctggactgtgtctgacgctgagatgcgaaagccagggtagcaaacgggattagataccccggtagtcctggccgtaaacgatgggtactaggtgtaggaggtatcgaccccttctgtgccggagttaacgcaataagtaccccgcctggggactacgatcgcaagattgaaactcaaaggaattgacgggggcccgcacaagcggtggagtatgtggtttaattcgacgcaacgcgaagaaccttaccaaggcttgacattgagtgaaagacccagagatgggtccccttcttcggaagcacgaaaacaggtggtgcatggctgtcgtcagctcgtgtcgtgagatgttgggttaagtcccgcaacgagcgcaacccttatcctatgttaccagcacgtaatggtggggactcataggagactgccagggataacctggaggaaggcggggatgacgtcaagtcatcatgccccttatgtcttgggctacacacgtactacaatggtcggcaacaaagggcagcgaagccgcgaggcggagccaatcccagaaacccgaccccagttcggatcgcaggctgcaacccgcctgcgtgaagttggaatcgctagtaatcgcaggtcagcatactgcggtgaatacgttcccgggccttgtacacaccgcccgtcacaccacgaaagttggtaacacccgaagccggtgagataaccttttaggagtcagctgtctaaggtggggccgatgattggggtg

SEQ ID NO: 2 - DNA, 1430 bp, Adlercreutzia equolifaciens
gatgaacgctggcggcgtgcttaacacatgcaagtcgaacgattaagacggcttcggccgtgtatagagtggcgaacgggtgagtaacacgtgaccaacctgccccgcgctccgggacaaccgctggaaacggcggctaataccggatgctccggggaggccccatggcctccccgggaaagccctgacggcgcgggatggggtcgcggcccattaggtagacggcggggtaacggcccaccgtgcccgcgatgggtagccggactgagaggtcgaccggccacattgggactgagatacggcccagactcctacgggaggcagcagtggggaattttgcgcaatgggggcaaccctgacgcagcaacgccgcgtgcgggacgaaggccttcgggttgtaaaccgctttcagcagggaagacatagacggtacctgcagaagaagctccggctaactacgtgccagcagccgcggtaatacgtagggggcgagcgttatccggattcattgggcgtaaagcgcgcgtaggcggccgcctaagcggaacctctaatcccggggctcaacctcgggccgggttccggactgggcggctcgagtgcggtagaggcaggcggaattcccggtgtagcggtggaatgcgcagatatcgggaagaacaccgatggcgaaggcagcctgctgggccgccactgacgctgaggcgcgaaagctgggggagcgaacaggattagataccctggtagtcccagccgtaaacgatggacgctaggtgtggggggaccatccccccgtgccgcagccaacgcattaagcgtcccgcctggggagtacggccgcaaggctaaaactcaaaggaattgacgggggcccgcacaagcagcggagcatgtggcttaattcgaagcaacgcgaagaaccttaccagggcttgacatgcgagtgaagccgcggagacgcggtggccgagaggagctcgcgcaggtggtgcatggctgtcgtcagctcgtgtcgtgagatgttgggttaagtcccgcaacgagcgcaacccccgtcccgtgttgccagcattcagttggggactcgcgggagactgccggcgtcaagccggaggaaggtggggacgacgtcaagtcatcatgccccttatgccctgggctgcacacgtgctacaatggccggtacagagggttgccaccccgcgagggggagcggatcccggaaagccggtcccagttcggatcgcaggctgcaacccgcctgcgtgaagtcggagttgctagtaatcgcggatcagcatgccgcggtgaatacgttcccgggccttgtacacaccgcccgtcacaccacccgagtcgtctgcacccgaagccgccggccgaacccttctggggcggaggcgtcgaaggtgtggagggtaaggggggtg

SEQ ID NO: 3 - DNA, 1432 bp, Akkermansia muciniphila
aacgaacgctggcggcgtggataagacatgcaagtcgaacgagagaattgctagcttgctaataattctctagtggcgcacgggtgagtaacacgtgagtaacctgcccccgagagcgggatagccctgggaaactgggattaataccgcatagtatcgaaagattaaagcagcaatgcgcttggggatgggctcgcggcctattagttagttggtgaggtaacggctcaccaaggcgatgacgggtagccggtctgagaggatgtccggccacactggaactgagacacggtccagacacctacgggtggcagcagtcgagaatcattcacaatgggggaaaccctgatggtgcgacgccgcgtgggggatgaaggtcttcggattgtaaacccctgtcatgtgggagcaaattaaaaagatagtaccacaagaggaagagacggctaactctgtgccagcagccgcggtaatacagaggtctcaagcgttgttcggaatcactgggcgtaaagcgtgcgtaggctgtttcgtaagtcgtgtgtgaaaggcgcgggctcaacccgcggacggcacatgatactgcgagactagagtaatggagggggaaccggaattctcggtgtagcagtgaaatgcgtagatatcgagaggaacactcgtggcgaaggcgggttcctggacattaactgacgctgaggcacgaaggccaggggagcgaaagggattagatacccctgtagtcctggcagtaaacggtgcacgcttggtgtgcggggaatcgaccccctgcgtgccggagctaacgcgttaagcgtgccgcctggggagtacggtcgcaagattaaaactcaaagaaattgacggggacccgcacaagcggtggagtatgtggcttaattcgatgcaacgcgaagaaccttacctgggcttgacatgtaatgaacaacatgtgaaagcatgcgactcttcggaggcgttacacaggtgctgcatggccgtcgtcagctcgtgtcgtgagatgtttggttaagtccagcaacgagcgcaacccctgttgccagttaccagcacgtgaaggtggggactctggcgagactgcccagatcaactgggaggaaggtggggacgacgtcaggtcagtatggcccttatgcccagggctgcacacgtactacaatgcccagtacagagggggccgaagccgcgaggcggaggaaatcctaaaaactgggcccagttcggactgtaggctgcaacccgcctacacgaagccggaatcgctagtaatggcgcatcagctacggcgccgtgaatacgttcccgggtcttgtacacaccgcccgtcacatcatggaagccggtcgcacccgaagtatctgagccaaccgcaaggaggcagggtcctaaggtgagactggtaactgggatg

SEQ ID NO: 4 - DNA, 1452 bp, Alloprevotella tannerae
gatgaacgctggctacaggcttaacacatgcaagtcgtggggcagcggatgcttagcttgctaagtatgccggcgaccggcgcacgggtgagtaacgcgtaccgaacctgcccatcacacagggataggcttgcgaaagcaagattaatactgatggtctcagttgtatgcatgtatgattgagtaaagccttcgggcggtgatggatggcggtgcgtcccattaggacgttggcggggtaacggcccaccaatccttcgatgggtaggggttctgagaggaaggtcccccacattggaactgagatacggtccaaactcctacgggaggcagcagtgaggaatattggtcaatgggcgagagcctgaaccagccaagtagcgtgcgggatgaaggcccttgtggtcgtaaaccgcttttatcagtgaataaagtgcaccacgtgtggtgtcattgcaggtagctgaagaaaaaggaccggctaattccgtgccagcagccgcggtaatacggaaggtccgggcgttatccggaattattgggtttaaagggagcgcaggcgggagtataagtcagctgttaaatatcagagcccaactctgttatgcagttgaaactatatttcttgagtacgcacagggatggcggaattcagggtgtagcggtgaaatgcttagatatcctgaagaactccgatcgcgaaggcagccatccggagcgtaactgacgctgaggctcgaaggtgcgggtatcgaacaggattagataccctggtagtccgcacggtaaacgatgaatactcgcagttcggccgtttaggtcgagttgtccagcgaaagcgttaagtattccacctggggagtacgccggcaacggtgaaactcaaaggaattgacgggggcccgcacaagcggaggaacatgtggtttaattcgatgatacgcgaggaaccttacccgggcttgaaccaagagtgcggagtgcagagatgcgctttttcttcggacacttttggaggtgctgcatggttgtcgtcagctcgtgccgtgaggtgtcggcttaagtgccataacgagcgcaacccttttctacgtttgccatcgggtaatgccgggaactccgtggatactgccgccgcaaggcggaggaaggtggggatgacgtcaaatcagcacggcccttacgtccggggctacacacgtgttacaatggtcggagcagcaggaagctacctggcgacaggatgctgatcccaaaacccggcctcagttcggactggagtctgcaacccgactccacgaagccggattcgctagtaatcgcgcatcagccatggcgcggtgaatacgttcccgggccttgtacacaccgcccgtcaagccatgaaagccgggggtgcctgaaagccgtgaccgcgagggtcggcctagggtaaaaccggtgattggggct

SEQ ID NO: 5 - DNA, 1456 bp, Anaerostipes caccae
gatgaacgctggcggcgtgcttaacacatgcaagtcgaacgaagcatttaggattgaagttttcggatggatttcctatatgactgagtggcggacgggtgagtaacgcgtggggaacctgccctatacagggggataacagctggaaacggctgctaataccgcataagcgcacagaatcgcatgattcagtgtgaaaagccctggcagtataggatggtcccgcgtctgattagctggttggtgaggtaacggctcaccaaggcgacgatcagtagccggcttgagagagtgaacggccacattgggactgagacacggcccaaactcctacgggaggcagcagtggggaatattgcacaatgggggaaaccctgatgcagcgacgccgcgtgagtgaagaagtatttcggtatgtaaagctctatcagcagggaagaaaacagacggtacctgactaagaagccccggctaactacgtgccagcagccgcggtaatacgtagggggcaagcgttatccggaattactgggtgtaaagggtgcgtaggtggcatggtaagtcagaagtgaaagcccggggcttaaccccgggactgcttttgaaactgtcatgctggagtgcaggagaggtaagcggaattcctagtgtagcggtgaaatgcgtagatattaggaggaacaccagtggcgaaggcggcttactggactgtcactgacactgatgcacgaaagcgtggggagcaaacaggattagataccctggtagtccacgccgtaaacgatgaatactaggtgtcggggccgtagaggcttcggtgccgcagcaaacgcagtaagtattccacctggggagtacgttcgcaagaatgaaactcaaaggaattgacggggacccgcacaagcggtggagcatgtggtttaattcgaagcaacgcgaagaaccttacctggtcttgacatcccaatgaccgaaccttaaccggttttttctttcgagacattggagacaggtggtgcatggttgtcgtcagctcgtgtcgtgagatgttgggttaagtcccgcaacgagcgcaacccctatctttagtagccagcatttaaggtgggcactctagagagactgccagggataacctggaggaaggtggggacgacgtcaaatcatcatgccccttatggccagggctacacacgtgctacaatggcgtaaacaaagggaagcgaagtcgtgaggcgaagcaaatcccagaaataacgtctcagttcggattgtagtctgcaactcgactacatgaagctggaatcgctagtaatcgtgaatcagaatgtcacggtgaatacgttcccgggtcttgtacacaccgcccgtcacaccatgggagtcagtaacgcccgaagtcagtgacccaaccgcaaggagggagctgccgaaggtgggaccgataactggggtg

SEQ ID NO: 6 - DNA, 1455 bp, Anaerostipes hadrus
gatgaacgctggcggcgtgcttaacacatgcaagtcgaacgaaacaccttatttgattttcttcggaactgaagatttggtgattgagtggcggacgggtgagtaacgcgtgggtaacctgccctgtacagggggataacagtcagaaatgactgctaataccgcataagaccacagcaccgcatggtgcaggggtaaaaactccggtggtacaggatggacccgcgtctgattagctggttggtgaggtaacggctcaccaaggcgacgatcagtagccggcttgagagagtgaacggccacattgggactgagacacggcccaaactcctacgggaggcagcagtggggaatattgcacaatgggggaaaccctgatgcagcgacgccgcgtgagtgaagaagtatctcggtatgtaaagctctatcagcagggaagaaaatgacggtacctgactaagaagccccggctaactacgtgccagcagccgcggtaatacgtagggggcaagcgttatccggaattactgggtgtaaagggtgcgtaggtggtatggcaagtcagaagtgaaaacccagggcttaactctgggactgcttttgaaactgtcagactggagtgcaggagaggtaagcggaattcctagtgtagcggtgaaatgcgtagatattaggaggaacatcagtggcgaaggcggcttactggactgaaactgacactgaggcacgaaagcgtggggagcaaacaggattagataccctggtagtccacgccgtaaacgatgaatactaggtgtcggggccgtaggggcttcggtgccgcagccaacgcagtaagtattccacctggggagtacgttcgcaagaatgaaactcaaaggaattgacggggacccgcacaagcggtggagcatgtggtttaattcgaagcaacgcgaagaaccttacctggtcttgacatccttctgaccggtccttaaccggacctttccttcgggacaggagagacaggtggtgcatggttgtcgtcagctcgtgtcgtgagatgttgggttaagtcccgcaacgagcgcaacccctatctttagtagccagcatataaggtgggcactctagagagactgccagggataacctggaggaaggtggggacgacgtcaaatcatcatgccccttatgaccagggctacacacgtgctacaatggcgtaaacagagggaagcagcctcgtgagagtgagcaaatcccaaaaataacgtctcagttcggattgtagtctgcaactcgactacatgaagctggaatcgctagtaatcgcgaatcagaatgtcgcggtgaatacgttcccgggtcttgtacacaccgcccgtcacaccatgggagtcagtaacgcccgaagtcagtgacccaaccgtaaggagggagctgccgaaggcgggaccgataactggggtg

SEQ ID NO: 7 - DNA, 1439 bp, Arcobacter butzleri
agtgaacgctggcggcgtgcttaacacatgcaagtcgaacgagaacggattatagcttgctataattgtcagctaagtggcgcacgggtgagtaatgtataggtaatatgcctcttactaagggataacaattggaaacgattgctaataccttatattcctttttatcaaaagataaaaagggaaagatttattggtaagagattagcctgtattgtatcagttagttggtggggtaatggcctaccaagacgatgacgcataactggtttgagaggatgatcagtcacactggaactgagacacggtccagactcctacgggaggcagcagtggggaatattgcacaatggacgaaagtctgatgcagcaacgccgcgtggaggatgacacatttcggtgcgtaaactccttttatataagaagataatgacggtattatatgaataagcaccggctaactccgtgccagcagccgcggtaatacggagggtgcaagcgttactcggaatcactgggcgtaaagagcgtgtaggcggattgataagtttgaagtgaaatcctatagcttaactatagaactgctttgaaaactgttaatctagaatgtgggagaggtagatggaatttctggtgtaggggtaaaatccgtagagatcagaaggaataccgattgcgaaggcgatctactggaacaatattgacgctgagacgcgaaagcgtggggagcaaacaggattagataccctggtagtccacgccctaaacgatgtacactagttgttgtgaggctcgaccttgcagtaatgcagttaacacattaagtgtaccgcctggggagtacggtcgcaagattaaaactcaaaggaatagacggggacccgcacaagcggtggagcatgtggtttaattcgacgatacacgaagaaccttacctggacttgacatagtaagaatgatttagagatagattagtgtctgcttgcagaaacttgcatacaggtgctgcacggctgtcgtcagctcgtgtcgtgagatgttgggttaagtcccgcaacgagcgcaaccctcgtccttagttgctaacagttcggctgagaactctaaggagactgcctacgcaagtaggaggaaggtgaggatgacgtcaagtcatcatggcccttacgtccagggctacacacgtgctacaatggggtatacaaagagcagcaatacggtgacgtggagcaaatctcaaaaatgcctcccagttcggattgtagtctgcaactcgactacatgaagttggaatcgctagtaatcgtagatcagctatgctacggtgaatacgttcccgggtcttgtactcaccgcccgtcacaccatgggagttgaactcattcgaagcggggatgctaaagtagctaccttccacagtggattcagcgactggggtg

SEQ ID NO: 8 - DNA, 1451 bp, Bacteroides caccae
gatgaacgctagctacaggcttaacacatgcaagtcgaggggcatcagtttggtttgcttgcaaaccaaagctggcgaccggcgcacgggtgagtaacacgtatccaacctacctcatactcggggatagcctttcgaaagaaagattaatatccgatagcatatatttcccgcatgggttttatattaaagaaattcggtatgagatggggatgcgttccattagtttgttgggggggtaacggcccaccaagactacgatggataggggttctgagaggaaggtcccccacattggaactgagacacggtccaaactcctacgggaggcagcagtgaggaatattggtcaatggacgcgagtctgaaccagccaagtagcgtgaaggatgactgccctatgggttgtaaacttcttttatatgggaataaagtggtccacgtgtggacttttgtatgtaccatatgaataaggatcggctaactccgtgccagcagccgcggtaatacggaggatccgagcgttatccggatttattgggtttaaagggagcgtaggcggattgttaagtcagttgtgaaagtttgcggctcaaccgtaaaattgcagttgatactggcagtcttgagtgcagtagaggtgggcggaattcgtggtgtagcggtgaaatgcttagatatcacgaagaactccgattgcgaaggcagctcactggagtgtaactgacgctgatgctcgaaagtgtgggtatcaaacaggattagataccctggtagtccacacagtaaacgatgaatactcgctgtttgcgatatacagtaagcggccaagcgaaagcattaagtattccacctggggagtacgccggcaacggtgaaactcaaaggaattgacgggggcccgcacaagcggaggaacatgtggtttaattcgatgatacgcgaggaaccttacccgggcttaaattgcaaatgaattatggggaaacccatacgccgcaaggcatttgtgaaggtgctgcatggttgtcgtcagctcgtgccgtgaggtgtcggcttaagtgccataacgagcgcaacccttatcttcagttactaacaggtcatgctgaggactctggagagactgccgtcgtaagatgtgaggaaggtggggatgacgtcaaatcagcacggcccttacgtccggggctacacacgtgttacaatggggggtacagaaggccgctacctggtgacaggatgccaatcccaaaaacctctctcagttcggatcgaagtctgcaacccgacttcgtgaagctggattcgctagtaatcgcgcatcagccatggcgcggtgaatacgttcccgggccttgtacacaccgcccgtcaagccatgaaagccgggggtacctgaagtacgtaaccgcaaggagcgtcctagggtaaaactggtaattggggct

SEQ ID NO: 9 - DNA, 1445 bp, Bacteroides cellulosilyticus
gatgaacgctagctacaggcttaacacatgcaagtcgaggggcagcatgacctagcaataggttgatggcgaccggcgcacgggtgagtaacacgtatccaacctaccggttattccgggatagcctttcgaaagaaagattaataccggatagtataacgagaaggcatctttttgttattaaagaatttcgataaccgatggggatgcgttccattagtttgttggcggggtaacggcccaccaagacatcgatggataggggttctgagaggaaggtcccccacattggaactgagacacggtccaaactcctacgggaggcagcagtgaggaatattggtcaatggacgagagtctgaaccagccaagtagcgtgaaggatgactgccctatgggttgtaaacttcttttatatgggaataaagtgagccacgtgtggctttttgtatgtaccatacgaataaggatcggctaactccgtgccagcagccgcggtaatacggaggatccgagcgttatccggatttattgggtttaaagggagcgtaggcggactattaagtcagctgtgaaagtttgcggctcaaccgtaaaattgcagttgatactggtcgtcttgagtgcagtagaggtaggcggaattcgtggtgtagcggtgaaatgcttagatatcacgaagaactccgattgcgaaggcagcttactggactgtaactgacgctgatgctcgaaagtgtgggtatcaaacaggattagataccctggtagtccacacagtaaacgatgaatactcgctgtttgcgatatacagcaagcggccaagcgaaagcattaagtattccacctggggagtacgccggcaacggtgaaactcaaaggaattgacgggggcccgcacaagcggaggaacatgtggtttaattcgatgatacgcgaggaaccttacccgggcttaaattgcatctgaataatttggaaacagattagccgcaaggcagatgtgaaggtgctgcatggttgtcgtcagctcgtgccgtgaggtgtcggcttaagtgccataacgagcgcaacccttatctttagttactaacaggtcatgctgaggactctagagagactgccgtcgtaagatgtgaggaaggtggggatgacgtcaaatcagcacggcccttacgtccggggctacacacgtgttacaatggggggtacagaaggcagctacacagcgatgtgatgctaatcccaaaagcctctctcagttcggattggagtctgcaacccgactccatgaagctggattcgctagtaatcgcgcatcagccacggcgcggtgaatacgttcccgggccttgtacacaccgcccgtcaagccatgaaagccgggggtacctgaagtccgtaaccgcaaggagcggcctagggtaaaactggtaattggggct

SEQ ID NO: 10 - DNA, 1449 bp, Bacteroides clarus
gatgaacgctagctacaggcttaacacatgcaagtcgaggggcagcggggttgaagcttgcttcaaccgccggcgaccggcgcacgggtgagtaacacgtatccaacctgccgataactccgggatagcctttcgaaagaaagattaataccggatggcatagttttcccgcatggaataactattaaagaatttcggttatcgatggggatgcgttccattaggcagttggcggggtaacggcccaccaaaccgacgatggataggggttctgagaggaaggtcccccacattggaactgagacacggtccaaactcctacgggaggcagcagtgaggaatattggtcaatggacgagagtctgaaccagccaagtagcgtgaaggatgactgccctatgggttgtaaacttcttttatacgggaataaagttagccacgtgtggttttttgcatgtaccgtatgaataaggatcggctaactccgtgccagcagccgcggtaatacggaggatccgagcgttatccggatttattgggtttaaagggagcgtaggcggggtattaagtcagttgtgaaagtttgcggctcaaccgtaaaattgcagttgatactggtatccttgagtgcagcagaggtgggcggaattcgtggtgtagcggtgaaatgcttagatatcacgaagaactccgattgcgaaggcagctcactggagtgtaactgacgctgatgctcgaaagtgtgggtatcaaacaggattagataccctggtagtccacacagtaaacgatgaatactcgctgttggcgatacaatgtcagcggccaagcgaaagcattaagtattccacctggggagtacgccggcaacggtgaaactcaaaggaattgacgggggcccgcacaagcggaggaacatgtggtttaattcgatgatacgcgaggaaccttacccgggcttgaattgcaactgacggaattggaaacagttctttcttcggacagttgtgaaggtgctgcatggttgtcgtcagctcgtgccgtgaggtgtcggcttaagtgccataacgagcgcaacccttatcgatagttaccatcaggtcatgctggggactctatcgagactgccgtcgtaagatgtgaggaaggtggggatgacgtcaaatcagcacggcccttacgtccggggctacacacgtgttacaatggggggtacagaaggcagctacacggcgacgtgatgctaatccccaaaacctctctcagttcggattggagtctgcaacccgactccatgaagctggattcgctagtaatcgcgcatcagccacggcgcggtgaatacgttcccgggccttgtacacaccgcccgtcaagccatgaaagccgggggtacctgaagtacgtaaccgcaaggagcgtcctagggtaaaactggtgattggggct

SEQ ID NO: 11 - DNA, 1452 bp, Bacteroides coprophilus
gatgaacgctagctacaggcttaacacatgcaagtcgaggggcagcgggattgaagcttgcttcaattgccggcgaccggcgcacgggtgagtaacgcgtatccaaccttccgcttactcggggatagcctttcgaaagaaagattaatacccgatggtatcttaagcacgcatgagattaagattaaagatttatcggtaagcgatggggatgcgttccattaggcagttggcggggtaacggcccaccaaacctacgatggataggggttctgagaggaaggtcccccacattggaactgagacacggtccaaactcctacgggaggcagcagtgaggaatattggtcaatgggcgagagcctgaaccagccaagtagcgtgaaggatgacggccctacgggttgtaaacttcttttgtgcgggaataaaggaacctacgtgtaggtttttgcatgtaccgtacgaataagcatcggctaactccgtgccagcagccgcggtaatacggaggatgcgagcgttatccggatttattgggtttaaagggagcgtagacgggtttttaagtcagctgtgaaagtttggggctcaaccttaaaattgcagttgaaactggagaccttgagtacggttgaggcaggcggaattcgtggtgtagcggtgaaatgcttagatatcacgaagaaccccgattgcgaaggcagcctgctaagccgccactgacgttgaggctcgaaagtgcgggtatcaaacaggattagataccctggtagtccgcacggtaaacgatggatactcgctgttggcgatagacagtcagcggccaagcgaaagcgttaagtatcccacctggggagtacgccggcaacggtgaaactcaaaggaattgacgggggcccgcacaagcggaggaacatgtggtttaattcgatgatacgcgaggaaccttacccgggcttgaactgcagtggaattatccggaaacggataagcgagcaatcgccgctgtggaggtgctgcatggttgtcgtcagctcgtgccgtgaggtgtcggcttaagtgccataacgagcgcaacccttgctgccagttactaacaggtcatgctgaggactctggcaggactgccatcgtaagatgcgaggaaggtggggatgacgtcaaatcagcacggcccttacgtccggggctacacacgtgttacaatggggagtacagagggcagctaccgggcgaccggatgcgaatcccgaaagctcctctcagttcggactggagtctgcaacccgactccacgaagctggattcgctagtaatcgcgcatcagccacggcgcggtgaatacgttcccgggccttgtacacaccgcccgtcaagccatgaaagccgggggtacctgaagtacgtaaccgcgaggatcgtcctagggtaaaaccggtaattggggct

SEQ ID NO: 12 - DNA, 1454 bp, Bacteroides dorei
gatgaacgctagctacaggcttaacacatgcaagtcgaggggcagcatggtcttagcttgctaaggctgatggcgaccggcgcacgggtgagtaacacgtatccaacctgccgtctactcttggccagccttctgaaaggaagattaatccaggatgggatcatgagttcacatgtccgcatgattaaaggtattttccggtagacgatggggatgcgttccattagatagtaggcggggtaacggcccacctagtcaacgatggataggggttctgagaggaaggtcccccacattggaactgagacacggtccaaactcctacgggaggcagcagtgaggaatattggtcaatgggcgatggcctgaaccagccaagtagcgtgaaggatgactgccctatgggttgtaaacttcttttataaaggaataaagtcgggtatgcatacccgtttgcatgtactttatgaataaggatcggctaactccgtgccagcagccgcggtaatacggaggatccgagcgttatccggatttattgggtttaaagggagcgtagatggatgtttaagtcagttgtgaaagtttgcggctcaaccgtaaaattgcagttgatactggatgtcttgagtgcagttgaggcaggcggaattcgtggtgtagcggtgaaatgcttagatatcacgaagaactccgattgcgaaggcagcctgctaagctgcaactgacattgaggctcgaaagtgtgggtatcaaacaggattagataccctggtagtccacacggtaaacgatgaatactcgctgtttgcgatatacggcaagcggccaagcgaaagcgttaagtattccacctggggagtacgccggcaacggtgaaactcaaaggaattgacgggggcccgcacaagcggaggaacatgtggtttaattcgatgatacgcgaggaaccttacccgggcttaaattgcactcgaatgatccggaaacggttcagctagcaatagcgagtgtgaaggtgctgcatggttgtcgtcagctcgtgccgtgaggtgtcggcttaagtgccataacgagcgcaacccttgttgtcagttactaacaggtgatgctgaggactctgacaagactgccatcgtaagatgtgaggaaggtggggatgacgtcaaatcagcacggcccttacgtccggggctacacacgtgttacaatggggggtacagagggccgctaccacgcgagtggatgccaatccctaaaacccctctcagttcggactggagtctgcaacccgactccacgaagctggattcgctagtaatcgcgcatcagccacggcgcggtgaatacgttcccgggccttgtacacaccgcccgtcaagccatgggagccgggggtacctgaagtgcgtaaccgcgaggatcgccctagggtaaaactggtgactggggct

SEQ ID NO: 13 - DNA, 1449 bp, Bacteroides eggerthii
gatgaacgctagctacaggcttaacacatgcaagtcgaggggcagcatgattgaagcttgcttcaatcgatggcgaccggcgcacgggtgagtaacacgtatccaacctgccgataactcggggatagcctttcgaaagaaagattaatacccgatagtatagtttttccgcatggtttcactattaaagaatttcggttatcgatggggatgcgttccattagatagttggcggggtaacggcccaccaagtcaacgatggataggggttctgagaggaaggtcccccacattggaactgagacacggtccaaactcctacgggaggcagcagtgaggaatattggtcaatggacgagagtctgaaccagccaagtagcgtgaaggatgactgccctatgggttgtaaacttcttttatacgggaataaagtggagtatgcatactcctttgtatgtaccgtatgaataaggatcggctaactccgtgccagcagccgcggtaatacggaggatccgagcgttatccggatttattgggtttaaagggagcgtaggcgggtgcttaagtcagttgtgaaagtttgcggctcaaccgtaaaattgcagttgatactgggcgccttgagtgcagcataggtaggcggaattcgtggtgtagcggtgaaatgcttagatatcacgaagaactccgattgcgaaggcagcttactggactgtaactgacgctgatgctcgaaagtgtgggtatcaaacaggattagataccctggtagtccacacagtaaacgatgaatactcgctgttggcgatacacagtcagcggccaagcgaaagcattaagtattccacctggggagtacgccggcaacggtgaaactcaaaggaattgacgggggcccgcacaagcggaggaacatgtggtttaattcgatgatacgcgaggaaccttacccgggcttaaattgcagcggaatgtagtggaaacattacagccttcgggccgctgtgaaggtgctgcatggttgtcgtcagctcgtgccgtgaggtgtcggcttaagtgccataacgagcgcaacccttatctatagttactatcaggtcatgctgaggactctatggagactgccgtcgtaagatgtgaggaaggtggggatgacgtcaaatcagcacggcccttacgtccggggctacacacgtgttacaatggggggtacagaaggcagctacctggcgacaggatgctaatcccgaaaacctctctcagttcggattggagtctgcaacccgactccatgaagctggattcgctagtaatcgcgcatcagccacggcgcggtgaatacgttcccgggccttgtacacaccgcccgtcaagccatgaaagccgggggtacctgaagtacgtaaccgcaaggagcgtcctagggtaaaactggtgattggggct

SEQ ID NO: 14 - DNA, 1451 bp, Bacteroides faecis
gatgaacgctagctacaggcttaacacatgcaagtcgaggggcagcattccagtttgcttgcaaactggagatggcgaccggcgcacgggtgagtaacacgtatccaacctgccgataactcggggatagcctttcgaaagaaagattaatacccgatggcataatagaaccgcatggtttgattattaaagaatttcggttatcgatggggatgcgttccattaggcagttggtggggtaacggcccaccaaaccttcgatggataggggttctgagaggaaggtcccccacattggaactgagacacggtccaaactcctacgggaggcagcagtgaggaatattggtcaatggacgagagtctgaaccagccaagtagcgtgaaggatgactgccctatgggttgtaaacttcttttatatgggaataaagtggtccacgtgtggatttttgtatgtaccatatgaataaggatcggctaactccgtgccagcagccgcggtaatacggaggatccgagcgttatccggatttattgggtttaaagggagcgtaggtggacagttaagtcagttgtgaaagtttgcggctcaaccgtaaaattgcagttgatactggctgtcttgagtacagtagaggtgggcggaattcgtggtgtagcggtgaaatgcttagatatcacgaagaactccgattgcgaaggcagctcactggactgcaactgacactgatgctcgaaagtgtgggtatcaaacaggattagataccctggtagtccacacagtaaacgatgaatactcgctgtttgcgatatacagtaagcggccaagcgaaagcattaagtattccacctggggagtacgccggcaacggtgaaactcaaaggaattgacgggggcccgcacaagcggaggaacatgtggtttaattcgatgatacgcgaggaaccttacccgggcttaaattgcatttgaatatattggaaacagtatagtcgtaagacaaatgtgaaggtgctgcatggttgtcgtcagctcgtgccgtgaggtgtcggcttaagtgccataacgagcgcaacccttatctttagttactaacaggtcatgctgaggactctggagagactgccgtcgtaagatgtgaggaaggtggggatgacgtcaaatcagcacggcccttacgtccggggctacacacgtgttacaatggggggtacagaaggccgctacctggtgacaggatgctaatcccaaaagcctctctcagttcggatcgaagtctgcaacccgacttcgtgaagctggattcgctagtaatcgcgcatcagccatggcgcggtgaatacgttcccgggccttgtacacaccgcccgtcaagccatgaaagccgggggtacctgaagtacgtaaccgcaaggagcgtcctagggtaaaactggtaattggggct

SEQ ID NO: 15 - DNA, 1451 bp, Bacteroides fragilis
gatgaacgctagctacaggcttaacacatgcaagtcgaggggcatcaggaagaaagcttgctttctttgctggcgaccggcgcacgggtgagtaacacgtatccaacctgccctttactcggggatagcctttcgaaagaaagattaatacccgatagcataatgattccgcatggtttcattattaaaggattccggtaaaggatggggatgcgttccattaggttgttggtgaggtaacggctcaccaagccttcgatggataggggttctgagaggaaggtcccccacattggaactgagacacggtccaaactcctacgggaggcagcagtgaggaatattggtcaatgggcgctagcctgaaccagccaagtagcgtgaaggatgaaggctctatgggtcgtaaacttcttttatataagaataaagtgcagtatgtatactgttttgtatgtattatatgaataaggatcggctaactccgtgccagcagccgcggtaatacggaggatccgagcgttatccggatttattgggtttaaagggagcgtaggtggactggtaagtcagttgtgaaagtttgcggctcaaccgtaaaattgcagttgatactgtcagtcttgagtacagtagaggtgggcggaattcgtggtgtagcggtgaaatgcttagatatcacgaagaactccgattgcgaaggcagctcactggactgcaactgacactgatgctcgaaagtgtgggtatcaaacaggattagataccctggtagtccacacagtaaacgatgaatactcgctgtttgcgatatacagtaagcggccaagcgaaagcattaagtattccacctggggagtacgccggcaacggtgaaactcaaaggaattgacgggggcccgcacaagcggaggaacatgtggtttaattcgatgatacgcgaggaaccttacccgggcttaaattgcagtggaatgatgtggaaacatgtcagtgagcaatcaccgctgtgaaggtgctgcatggttgtcgtcagctcgtgccgtgaggtgtcggcttaagtgccataacgagcgcaacccttatctttagttactaacaggttatgctgaggactctagagagactgccgtcgtaagatgtgaggaaggtggggatgacgtcaaatcagcacggcccttacgtccggggctacacacgtgttacaatggggggtacagaaggcagctagcgggtgaccgtatgctaatcccaaaatcctctctcagttcggatcgaagtctgcaacccgacttcgtgaagctggattcgctagtaatcgcgcatcagccacggcgcggtgaatacgttcccgggccttgtacacaccgcccgtcaagccatgggagccgggggtacctgaagtacgtaaccgcaaggatcgtcctagggtaaaactggtgactggggct

SEQ ID NO: 16 - DNA, 1452 bp, Bacteroides massiliensis
gatgaacgctagctacaggcttaacacatgcaagtcgaggggcagcatggtcttagcttgctaagaccgatggcgaccggcgcacgggtgagtaacgcgtatccaacctgccttacactcttggacagccttctgaaagggagattaatacaagatgttatcatgagtaagcattttcgcatgattaaaggtttaccggtgtaagatggggatgcgttccattagatagtaggcggggtaacggcccacctagtcttcgatggataggggttctgagaggaaggtcccccacattggaactgagacacggtccaaactcctacgggaggcagcagtgaggaatattggtcaatggacgagagtctgaaccagccaagtagcgtgaaggatgaaggttctatggattgtaaacttcttttatacgggaataaacggatccacgtgtggatttttgcatgtaccgtatgaataaggatcggctaactccgtgccagcagccgcggtaatacggaggatccgagcgttatccggatttattgggtttaaagggagcgtagatgggttgttaagtcagttgtgaaagtttgcggctcaaccgtaaaattgcaattgatactggcagtcttgagtacagttgaggtaggcggaattcgtggtgtagcggtgaaatgcttagatatcacgaagaactccgattgcgaaggcagcttactaacctgtaactgacattgatgctcgaaagtgtgggtatcaaacaggattagataccctggtagtccacacggtaaacgatgaatactcgctgtaggcgatatacggtctgtggccaagcgaaagcattaagtattccacctggggagtacgccggcaacggtgaaactcaaaggaattgacgggggcccgcacaagcggaggaacatgtggtttaattcgatgatacgcgaggaaccttacccgggcttaaattgcaaccgaatatggcggaaacgctatagctagcaatagcggttgtgaaggtgctgcatggttgtcgtcagctcgtgccgtgaggtgtcggcttaagtgccataacgagcgcaacccttgccgatagttactaacaggtcatgctgaggactctgtcgggactgccatcgtaagatgtgaggaaggtggggatgacgtcaaatcagcacggcccttacgtccggggctacacacgtgttacaatggggggtacagagggctgctaccacgcaagtggatgccaatcccaaaaacctctctcagttcggattgaagtctgcaacccgacttcatgaagctggattcgctagtaatcgcgcatcagccacggcgcggtgaatacgttcccgggccttgtacacaccgcccgtcaagccatgggagccgggggtacctgaagtgcgtaaccgcaaggagcgccctagggtaaaactggtgactggggct

SEQ ID NO: 17 - DNA, 1444 bp, Bacteroides nordii
gatgaacgctagctacaggcttaacacatgcaagtcgaggggcatcaggatgtagcaatacattgctggcgaccggcgcacgggtgagtaacacgtatccaacctgccttttactcggggataggctttcgaaagaaagattaatacccgatggtataatatttccgcatgggattattattaaagaatttcggtaaaagatggggatgcgttccattaggcagttggcggggtaacggcccaccaaaccttcgatggataggggttctgagaggaaggtcccccacattggaactgagacacggtccaaactcctacgggaggcagcagtgaggaatattggtcaatgggcgaaagcctgaaccagccaagtagcgtgaaggatgactgccctatgggttgtaaacttcttttataggggaataaaatgagccacgtgtggctttttgtatgtaccctatgaataaggatcggctaactccgtgccagcagccgcggtaatacggaggatccgagcgttatccggatttattgggtttaaagggagcgtaggtggacatgtaagtcagttgtgaaagtttgcggctcaaccgtaaaattgcagttgatactgtgtgtcttgagtacagtagaggtgggcggaattcgtggtgtagcggtgaaatgcttagatatcacgaagaactccgattgcgaaggcagctcactggactgttactgacactgaggctcgaaagtgtgggtatcaaacaggattagataccctggtagtccacacagtaaacgatgaatactcgctgtttgcgatatacggcaagcggccaagcgaaagcattaagtattccacctggggagtacgccggcaacggtgaaactcaaaggaattgacgggggcccgcacaagcggaggaacatgtggtttaattcgatgatacgcgaggaaccttacccgggcttaaattgcatttgaatgttggggaaacccaacagccgtaaggcaaatgtgaaggtgctgcatggttgtcgtcagctcgtgccgtgaggtgtcggcttaagtgccataacgagcgcaacccttatctttagttactaacaggtcatgctgaggactctagagagactgcgtcgtaagatgtgaggaaggtggggatgacgtcaaatcagcacggcccttacgtccggggctacacacgtgttacaatggggggtacagaaggcagctacacggcgacgtgatgctaatcccaaaagcctctctcagttcggatcgaagtctgcaacccgacttcgtgaagctggattcgctagtaatcgcgcatcagccacggcgcggtgaatacgttcccgggccttgtacacaccgcccgtcaagccatgggagccgggggtacctgaagtacgtaaccgcaaggagcgtcctagggtaaaactggtgactggggct

SEQ ID NO: 18 - DNA, 1446 bp, Bacteroides oleiciplenus
gatgaacgctagctacaggcttaacacatgcaagtcgaggggcatcaggatgtagcaatacattgctggcgaccggcgcacgggtgagtaacacgtatccaacctaccgattattccgggatagcctttcgaaagaaagattaatactggatagtataacgagaaggcatctttttgttattaaagaatttcgataatcgatggggatgcgttccattagtttgttggcggggtaacggcccaccaagacttcgatggataggggttctgagaggaaggtcccccacattggaactgagacacggtccaaactcctacgggaggcagcagtgaggaatattggtcaatgggcgagagcctgaaccagccaagtagcgtgaaggatgactgccctatgggttgtaaacttcttttatatgggaataaagtgcagtatgtatactgttttgtatgtaccatatgaataaggatcggctaactccgtgccagcagccgcggtaatacggaggatccgagcgttatccggatttattgggtttaaagggagcgtaggcggaagcttaagtcagttgtgaaagtttgcggctcaaccgtaaaattgcagttgatactgggtttcttgagtgcagtagaggtaggcggaattcgtggtgtagcggtgaaatgcttagatatcacgaagaactccgattgcgaaggcagcttactggactgtaactgacgctgatgctcgaaagtgtgggtatcaaacaggattagataccctggtagtccacacagtaaacgatgaatactcgctgtttgcgatatacagcaagcggccaagcgaaagcattaagtattccacctggggagtacgccggcaacggtgaaactcaaaggaattgacgggggcccgcacaagcggaggaacatgtggtttaattcgatgatacgcgaggaaccttacccgggcttaaattgcaactgacgtaggtggaaacatctattccttcgggcagttgtgaaggtgctgcatggttgtcgtcagctcgtgccgtgaggtgtcggcttaagtgccataacgagcgcaacccttatctttagttactaacaggttatgctgaggactctagagagactgccgtcgtaagatgtgaggaaggtggggatgacgtcaaatcagcacggcccttacgtccggggctacacacgtgttacaatggggggtacagaaggcagctacacggcgacgtgatgctaatcccaaaaacctctctcagttcggattggagtctgcaactcgactccatgaagctggattcgctagtaatcgcgcatcagccacggcgcggtgaatacgttcccgggccttgtacacaccgcccgtcaagccatgaaagccgggggtacctgaagtccgtaaccgttaaggagcggcctagggtaaaactggtaattggggct

SEQ ID NO: 19 - DNA, 1451 bp, Bacteroides ovatus
gatgaacgctagctacaggcttaacacatgcaagtcgaggggcagcattttagtttgcttgcaaactgaagatggcgaccggcgcacgggtgagtaacacgtatccaacctgccgataactccggaatagcctttcgaaagaaagattaataccggatagcatacgaatatcgcatgatatttttattaaagaatttcggttatcgatggggatgcgttccattagtttgttggcggggtaacggcccaccaagactacgatggataggggttctgagaggaaggtcccccacattggaactgagacacggtccaaactcctacgggaggcagcagtgaggaatattggtcaatgggcgagagcctgaaccagccaagtagcgtgaaggatgaaggctctatgggtcgtaaacttcttttatatgggaataaagttttccacgtgtggaattttgtatgtaccatatgaataaggatcggctaactccgtgccagcagccgcggtaatacggaggatccgagcgttatccggatttattgggtttaaagggagcgtaggtggattgttaagtcagttgtgaaagtttgcggctcaaccgtaaaattgcagttgaaactggcagtcttgagtacagtagaggtgggcggaattcgtggtgtagcggtgaaatgcttagatatcacgaagaactccgattgcgaaggcagctcactagactgttactgacactgatgctcgaaagtgtgggtatcaaacaggattagataccctggtagtccacacagtaaacgatgaatactcgctgtttgcgatatacagtaagcggccaagcgaaagcattaagtattccacctggggagtacgccggcaacggtgaaactcaaaggaattgacgggggcccgcacaagcggaggaacatgtggtttaattcgatgatacgcgaggaaccttacccgggcttaaattgcaacagaatatattggaaacagtatagccgtaaggctgttgtgaaggtgctgcatggttgtcgtcagctcgtgccgtgaggtgtcggcttaagtgccataacgagcgcaacccttatctttagttactaacaggttatgctgaggactctagagagactgccgtcgtaagatgtgaggaaggtggggatgacgtcaaatcagcacggcccttacgtccggggctacacacgtgttacaatggggggtacagaaggcagctacacggcgacgtgatgctaatcccaaaaacctctctcagttcggatcgaagtctgcaacccgacttcgtgaagctggattcgctagtaatcgcgcatcagccatggcgcggtgaatacgttcccgggccttgtacacaccgcccgtcaagccatgaaagccgggggtacctgaagtacgtaaccgcaaggagcgtcctagggtaaaactggtaattggggct

SEQ ID NO: 20 - DNA, 1450 bp, Bacteroides plebeius
gatgaacgctagctacaggcttaacacatgcaagtcgaggggcagcgggattgaagcttgcttcaattgccggcgaccggcgcacgggtgagtaacgcgtatccaaccttccgtacactcagggatagcctttcgaaagaaagattaatacctgatggtatgatgagattgcatgatagcatcattaaagatttatcggtgtacgatggggatgcgttccattaggtagtaggcggggtaacggcccacctagcctacgatggataggggttctgagaggaaggtcccccacattggaactgagacacggtccaaactcctacgggaggcagcagtgaggaatattggtcaatggacgagagtctgaaccagccaagtagcgtgaaggatgaaggtcctacggattgtaaacttcttttataagggaataaaacctcccacgtgtgggagcttgtatgtaccttatgaataagcatcggctaactccgtgccagcagccgcggtaatacggaggatgcgagcgttatccggatttattgggtttaaagggagcgcagacgggtcgttaagtcagctgtgaaagtttggggctcaaccttaaaattgcagttgatactggcgtccttgagtgcggttgaggtgtgcggaattcgtggtgtagcggtgaaatgcttagatatcacgaagaactccgattgcgaaggcagcacactaagccgtaactgacgttcatgctcgaaagtgtgggtatcaaacaggattagataccctggtagtccacacggtaaacgatggatactcgctgttggcgatatacagtcagcggcttagcgaaagcgttaagtatcccacctggggagtacgccggcaacggtgaaactcaaaggaattgacgggggcccgcacaagcggaggaacatgtggtttaattcgatgatacgcgaggaaccttacccgggcttaaattgcaaaggaatgatctggaaacaggtcagtcttcggacctttgtgaaggtgctgcatggttgtcgtcagctcgtgccgtgaggtgtcggcttaagtgccataacgagcgcaaccctcgccgccagttactaacaggtaatgctgaggactctggcgggactgccatcgtaagatgtgaggaaggtggggatgacgtcaaatcagcacggcccttacgtccggggctacacacgtgttacaatgggcggtacagaaggcagctacctggcgacaggatgccaatcccgaaagccgctctcagttcggactggagtctgcaacccgactccacgaagctggattcgctagtaatcgcgcatcagccacggcgcggtgaatacgttcccgggccttgtacacaccgcccgtcaagccatgaaagccgggggtacctgaagtgcgtaaccgcaaggagcgccctagggtaaaaccggtaattggggct

SEQ ID NO: 21 - DNA, 1454 bp, Bacteroides salanitronis
gatgaacgctagctacaggcttaacacatgcaagtcgcggggcagcggaagtttagcttgctaggcttgccggcgaccggcgcacgggtgagtaacgcgtatccgaccttccgcacactccgggccagccttccgaaaggaagattaatcccggatggtatggcgtggctgcatggcagcgccattaaaggagcgatccggtgtgcgatgggggtgcgttccattagcttgttggcggggtaacggcccaccaaggcgacgatggataggggttctgagaggaaggccccccacattgggactgagacacggcccaaactcctacgggaggcagcagtgaggaatattggtcaatgggcgagagcctgaaccagccaagtagcgtggaggatgactgccctacgggttgtaaactccttttataagggaataaaacctcccacgtgtgggagcttgtatgtaccttatgaataagcatcggctaactccgtgccagcagccgcggtaatacggaggatgcgagcgttatccggatttattgggtttaaagggagcgtagacgggatgtcaagtcagctgtgaaagtttgcggctcaaccgtaaaattgcagttgaaactggctttcttgagtgcgttcgaggcaggcggaattcgtggtgtagcggtgaaatgcatagatatcacgaagaaccccgattgcgaaggcagcctgctaggccgcaactgacgttgatgctcgaaagtgcgggtatcaaacaggattagataccctggtagtccgcacggtaaacgatgggcactcgctgccggcgatatactgccggcggcttagcgaaagcgttaagtgccccacctggggagtacgccggcaacggtgaaactcaaaggaattgacgggggcccgcacaagcggaggaacatgtggtttaattcgatgatacgcgaggaaccttacccgggcttgaactgcggatgcattgcgcggaaacgcgcaagtgggcaaccacatccgtggaggtgctgcatggttgtcgtcagctcgtgccgtgaggtgtcggcttaagtgccataacgagcgcaaccccttccgccagttgccatcaggttatgctggggactctggcggtactgccatcgtaagatgcgaggaaggtggggatgacgtcaaatcagcacggcccttacgtccggggctacacacgtgttacaatggggggtacagagggccgccatccggcgacggagcgccaatccctaaagcccctcccagttcggactggagcctgcaacccggctccacgaagctggattcgctagtaatcgcgcatcagccacggcgcggtgaatacgttcccgggccttgtacacaccgcccgtcaagccatgaaagccgggggtgcctgaagtgcgtaaccgaaaggggcgccctagggtaaaaccggtgattggggct

SEQ ID NO: 22 - DNA, 1445 bp, Bacteroides salyersiae
gatgaacgctagctacaggcttaacacatgcaagtcgaggggcatcagggtgtagcaatacaccgctggcgaccggcgcacgggtgagtaacacgtatccaacctgccctttactcggggatagcctttcgaaagaaagattaatacccgatggtataacatgacctcctggttttgttattaaagaatttcggtagaggatggggatgcgttccattaggcagttggcggggtaacggcccaccaaaccttcgatggataggggttctgagaggaaggtcccccacattggaactgagacacggtccaaactcctacgggaggcagcagtgaggaatattggtcaatgggcgagagcctgaaccagccaagtagcgtgaaggatgaccgccctatgggttgtaaacttcttttatatgggaataaagggtgccacgtgtggcattttgtatgtaccatatgaataaggatcggctaactccgtgccagcagccgcggtaatacggaggatccgagcgttatccggatttattgggtttaaagggagcgtaggtggacatgtaagtcagttgtgaaagtttgcggctcaaccgtaaaattgcagttgatactgcgtgtcttgagtacagtagaggtgggcggaattcgtggtgtagcggtgaaatgcttagatatcacgaagaactccgattgcgaaggcagctcactggactgcaactgacactgatgctcgaaagtgtgggtatcaaacaggattagataccctggtagtccacacagtaaacgatgaatactcgctgtttgcgatatacagtaagcggccaagcgaaagcattaagtattccacctggggagtacgccggcaacggtgaaactcaaaggaattgacgggggcccgcacaagcggaggaacatgtggtttaattcgatgatacgcgaggaaccttacccgggcttaaattgcaaatgaatatgccggaaacggcatagccgcaaggcatttgtgaaggtgctgcatggttgtcgtcagctcgtgccgtgaggtgtcggcttaagtgccataacgagcgcaacccttatcttcagttactaacaggttatgctgaggactctggagagactgccgtcgtaagatgtgaggaaggtggggatgacgtcaaatcagcacggcccttacgtccggggctacacacgtgttacaatggggggtacagaaggccgctacacagcgatgtgatgccaatccctaaagcccctctcagttcggatcgaagtctgcaacccgacttcgtgaagctggattcgctagtaatcgcgcatcagccacggcgcggtgaatacgttcccgggccttgtacacaccgcccgtcaagccatgggagccgggggtacctgaagtacgtaaccgcaaggagcgtcctagggtaaaactggtgactggggct

SEQ ID NO: 23 - DNA, 1449 bp, Bacteroides stercoris
gatgaacgctagctacaggcttaacacatgcaagtcgaggggcagcatcatcaaagcttgctttgatggatggcgaccggcgcacgggtgagtaacacgtatccaacctgccgacaacactgggatagcctttcgaaagaaagattaataccggatggcatagttttcccgcatgggataattattaaagaatttcggttgtcgatggggatgcgttccattaggcagttggcggggtaacggcccaccaaaccaacgatggataggggttctgagaggaaggtcccccacattggaactgagacacggtccaaactcctacgggaggcagcagtgaggaatattggtcaatggacgagagtctgaaccagccaagtagcgtgaaggatgactgccctatgggttgtaaacttcttttatacgggaataaagtgagccacgtgtggctttttgtatgtaccgtatgaataaggatcggctaactccgtgccagcagccgcggtaatacggaggatccgagcgttatccggatttattgggtttaaagggagcgtaggcgggttgttaagtcagttgtgaaagtttgcggctcaaccgtaaaattgcagttgatactggcgaccttgagtgcaacagaggtaggcggaattcgtggtgtagcggtgaaatgcttagatatcacgaagaactccgattgcgaaggcagcttactggattgtaactgacgctgatgctcgaaagtgtgggtatcaaacaggattagataccctggtagtccacacagtaaacgatgaatactcgctgttggcgatatacagtcagcggccaagcgaaagcattaagtattccacctggggagtacgccggcaacggtgaaactcaaaggaattgacgggggcccgcacaagcggaggaacatgtggtttaattcgatgatacgcgaggaaccttacccgggcttaaattgcaactgactgaatcggaaacggttctttcttcggacagttgtgaaggtgctgcatggttgtcgtcagctcgtgccgtgaggtgtcggcttaagtgccataacgagcgcaacccttacgggtagttaccatcaggttatgctggggactctacccggactgccgtcgtaagatgtgaggaaggtggggatgacgtcaaatcagcacggcccttacgtccggggctacacacgtgttacaatggggggtacagaaggcagctacacggcgacgtggtgctaatcccgaaagcctctctcagttcggattggagtctgcaacccgactccatgaagctggattcgctagtaatcgcgcatcagccacggcgcggtgaatacgttcccgggccttgtacacaccgcccgtcaagccatgaaagccgggggtacctgaagtacgtaaccgcgaggagcgtcctagggtaaaactggtgattggggct

SEQ ID NO: 24 - DNA, 1450 bp, Bacteroides thetaiotaomicron
gatgaacgctagctacaggcttaacacatgcaagtcgaggggcagcatttcagtttgcttgcaaactggagatggcgaccggcgcacgggtgagtaacacgtatccaacctgccgataactcggggatagcctttcgaaagaaagattaatacccgatggtataatcagaccgcatggtttgattattaaagaatttcggttatcgatggggatgcgttccattaggcagttggtgaggtaacggctcaccaaaccttcgatggataggggttctgagaggaaggtcccccacattggaactgagacacggtccaaactcctacgggaggcagcagtgaggaatattggtcaatgggcgcaggcctgaaccagccaagtagcgtgaaggatgactgccctatgggttgtaaacttcttttatatgggaataaagttttccacgtgtggaattttgtatgtaccatatgaataaggatcggctaactccgtgccagcagccgcggtaatacggaggatccgagcgttatccggatttattgggtttaaagggagcgtaggtggacagttaagtcagttgtgaaagtttgcggctcaaccgtaaaattgcagttgatactggctgtcttgagtacagtagaggtgggcggaattcgtggtgtagcggtgaaatgcttagatatcacgaagaactccgattgcgaaggcagctcactggactgcaactgacactgatgctcgaaagtgtgggtatcaaacaggattagataccctggtagtccacacagtaaacgatgaatactcgctgtttgcgatatacagtaagcggccaagcgaaagcattaagtattccacctggggagtacgccggcaacggtgaaactcaaaggaattgacgggggcccgcacaagcggaggaacatgtggtttaattcgatgatacgcgaggaaccttacccgggcttaaattgcatttgaatatattggaaacagtatagccgtaaggcaaatgtgaaggtgctgcatggttgtcgtcagctcgtgccgtgaggtgtcggcttaagtgccataacgagcgcaacccttatctttagttactaacaggtcatgctgaggactctagagagactgccgtcgtaagatgtgaggaaggtggggatgacgtcaaatcagcacggcccttacgtccggggctacacacgtgttacaatggggggtacagaaggcagctacctggtgacaggatgctaatcccaaaagcctctctcagttcggatcgaagtctgcaacccgacttcgtgaagctggattcgctagtaatcgcgcatcagccatggcgcggtgaatacgttcccgggccttgtacacaccgcccgtcaagccatgaaagccgggggtacctgaagtacgtaaccgcaaggagcgtcctagggtaaaactggtaattggggc

SEQ ID NO: 25 - DNA, 1449 bp, Bacteroides uniformis
gatgaacgctagctacaggcttaacacatgcaagtcgaggggcagcatgaacttagcttgctaagtttgatggcgaccggcgcacgggtgagtaacacgtatccaacctgccgatgactcggggatagcctttcgaaagaaagattaatacccgatggcatagttcttccgcatggtggaactattaaagaatttcggtcatcgatggggatgcgttccattaggttgttggcggggtaacggcccaccaagccttcgatggataggggttctgagaggaaggtcccccacattggaactgagacacggtccaaactcctacgggaggcagcagtgaggaatattggtcaatggacgagagtctgaaccagccaagtagcgtgaaggatgactgccctatgggttgtaaacttcttttatacgggaataaagtgaggcacgtgtgcctttttgtatgtaccgtatgaataaggatcggctaactccgtgccagcagccgcggtaatacggaggatccgagcgttatccggatttattgggtttaaagggagcgtaggcggacgcttaagtcagttgtgaaagtttgcggctcaaccgtaaaattgcagttgatactgggtgtcttgagtacagtagaggcaggcggaattcgtggtgtagcggtgaaatgcttagatatcacgaagaactccgattgcgaaggcagcttgctggactgtaactgacgctgatgctcgaaagtgtgggtatcaaacaggattagataccctggtagtccacacagtaaacgatgaatactcgctgtttgcgatatacagtaagcggccaagcgaaagcgttaagtattccacctggggagtacgccggcaacggtgaaactcaaaggaattgacgggggcccgcacaagcggaggaacatgtggtttaattcgatgatacgcgaggaaccttacccgggcttgaattgcaactgaatgatgtggagacatgtcagccgcaaggcagttgtgaaggtgctgcatggttgtcgtcagctcgtgccgtgaggtgtcggcttaagtgccataacgagcgcaacccttatcgatagttaccatcaggttatgctggggactctgtcgagactgccgtcgtaagatgtgaggaaggtggggatgacgtcaaatcagcacggcccttacgtccggggctacacacgtgttacaatggggggtacagaaggcagctacacggcgacgtgatgctaatccctaaagcctctctcagttcggattggagtctgcaacccgactccatgaagctggattcgctagtaatcgcgcatcagccacggcgcggtgaatacgttcccgggccttgtacacaccgcccgtcaagccatgaaagccgggggtacctgaagtgcgtaaccgcaaggagcgccctagggtaaaactggtgattggggct

SEQ ID NO: 26 - DNA, 1450 bp, Bacteroides vulgatus
gatgaacgctagctacaggcttaacacatgcaagtcgaggggcagcatggtcttagcttgctaaggccgatggcgaccggcgcacgggtgagtaacacgtatccaacctgccgtctactcttggacagccttctgaaaggaagattaatacaagatggcatcatgagtccgcatgttcacatgattaaaggtattccggtagacgatggggatgcgttccattagatagtaggcggggtaacggcccacctagtcttcgatggataggggttctgagaggaaggtcccccacattggaactgagacacggtccaaactcctacgggaggcagcagtgaggaatattggtcaatgggcgagagcctgaaccagccaagtagcgtgaaggatgactgccctatgggttgtaaacttcttttataaaggaataaagtcgggtatgcatacccgtttgcatgtactttatgaataaggatcggctaactccgtgccagcagccgcggtaatacggaggatccgagcgttatccggatttattgggtttaaagggagcgtagatggatgtttaagtcagttgtgaaagtttgcggctcaaccgtaaaattgcagttgatactggatatcttgagtgcagttgaggcaggcggaattcgtggtgtagcggtgaaatgcttagatatcacgaggaactccgattgcgaaggcagcctgctaagctgcaactgacattgaggctcgaaagtgtgggtatcaaacaggattagataccctggtagtccacacggtaaacgatgaatactcgctgtttgcgatatacggcaagcggccaagcgaaagcgttaagtattccacctggggagtacgccggcaacggtgaaactcaaaggaattgacgggggcccgcacaagcggaggaacatgtggtttaattcgatgatacgcgaggaaccttacccgggcttaaattgcagatgaattacggtgaaagccgtaagccgcaaggcatctgtgaaggtgctgcatggttgtcgtcagctcgtgccgtgaggtgtcggcttaagtgccataacgagcgcaacccttgttgtcagttactaacaggttctgctgaggactctgacaagactgccatcgtaagatgtgaggaaggtggggatgacgtcaaatcagcacggcccttacgtccggggctacacacgtgttacaatggggggtacagagggccgctaccacgcgagtggatgccaatcccaaaaacctctctcagttcggactggagtctgcaacccgactccacgaagctggattcgctagtaatcgcgcatcagccacggcgcggtgaatacgttcccgggccttgtacacaccgcccgtcaagccatgggagccgggggtacctgaagtgcgtaaccgcgaggagcgccctagggtaaaactggtgactggggct

SEQ ID NO: 27 - DNA, 1368 bp, Bacteroides xylanisolvens
catgcaagtcgaggggcagcattttagtttgcttgcaaactaaagatggcgaccggcgcacgggtgagtaacacgtatccaacctgccgataactcggggatagcctttcgaaagaaagattaatatccgatagtatattaaaaccgcatggttttactattaaagaatttcggttatcgatggggatgcgttccattagtttgttggcggggtaacggcccaccaagactacgatggataggggttctgagaggaaggtcccccacattggaactgagacacggtccaaactcctacgggaggcagcagtgaggaatattggtcaatggacgagagtctgaaccagccaagtagcgtgaaggatgactgccctatgggttgtaaacttcttttatatgggaataaagtattccacgtgtgggattttgtatgtaccatatgaataaggatcggctaactccgtgccagcagccgcggtaatacggaggatccgagcgttatccggatttattgggtttaaagggagcgtaggtggattgttaagtcagttgtgaaagtttgcggctcaaccgtaaaattgcagttgaaactggcagtcttgagtacagtagaggtgggcggaattcgtggtgtagcggtgaaatgcttagatatcacgaagaactccgattgcgaaggcagctcactagactgcaactgacactgatgctcgaaagtgtgggtatcaaacaggattagataccctggtagtccacacagtaaacgatgaatactcgctgtttgcgatatacagtaagcggccaagcgaaagcattaagtattccacctggggagtacgccggcaacggtgaaactcaaaggaattgacgggggcccgcacaagcggaggaacatgtggtttaattcgatgatacgcgaggaaccttacccgggcttaaattgcaaatgaataatctggaaacaggttagccgcaaggcatttgtgaaggtgctgcatggttgtcgtcagctcgtgccgtgaggtgtcggcttaagtgccataacgagcgcaacccttatctttagttactaacaggttatgctgaggactctagagagactgccgtcgtaagatgtgaggaaggtggggatgacgtcaaatcagcacggcccttacgtccggggctacacacgtgttacaatggggggtacagaaggcagctacctggcgacaggatgctaatcccaaaaacctctctcagttcggatcgaagtctgcaacccgacttcgtgaagctggattcgctagtaatcgcgcatcagccatggcgcggtgaatacgttcccgggccttgtacacaccgcccgtcaagccatgaaagccgggg

SEQ ID NO: 28 - DNA, 1454 bp, Barnesiella intestinihominis
gatgaacgctagcgacaggcctaacacatgcaagtcgaggggcagcggggaggtagcaatacctttgccggcgaccggcgcacgggtgagtaacacgtatgcaatccacctgtaacagggggataacccggagaaatccggactaataccccataatatgggcgctccgcatggagagttcattaaagagagcaattttggttacagacgagcatgcgctccattagccagttggcggggtaacggcccaccaaagcgacgatggataggggttctgagaggaaggtcccccacattggaactgagacacggtccaaactcctacgggaggcagcagtgaggaatattggtcaatggtcggcagactgaaccagccaagtcgcgtgagggaagacggccctacgggttgtaaacctcttttgtcggagagtaaagtacgctacgtgtagcgtattgcaagtatccgaagaaaaagcatcggctaactccgtgccagcagccgcggtaatacggaggatgcgagcgttatccggatttattgggtttaaagggtgcgtaggcggcacgccaagtcagcggtgaaatttccgggctcaacccggagtgtgccgttgaaactggcgagctagagtacacaagaggcaggcggaatgcgtggtgtagcggtgaaatgcatagatatcacgcagaaccccgattgcgaaggcagcctgctagggtgaaacagacgctgaggcacgaaagcgtgggtatcgaacaggattagataccctggtagtccacgcagtaaacgatgaatactaactgtttgcgatacaatgtaagcggtacagcgaaagcgttaagtattccacctggggagtacgccggcaacggtgaaactcaaaggaattgacgggggcccgcacaagcggaggaacatgtggtttaattcgatgatacgcgaggaaccttacccgggctcaaacgcagggggaatgtcggtgaaagccggcagctagtaatagtcacctgcgaggtgctgcatggttgtcgtcagctcgtgccgtgaggtgtcggcttaagtgccataacgagcgcaacccctatcgacagttactaacgggtgaagccgaggactctgtcgagactgccggcgcaagccgcgaggaaggtggggatgacgtcaaatcagcacggcccttacgtccggggcgacacacgtgttacaatggcaggtacagaaggcagccagtcagcaatgacgcgcgaatcccgaaaacctgtctcagttcggattggagtctgcaacccgactccatgaagctggattcgctagtaatcgcgcatcagccatggcgcggtgaatacgttcccgggccttgtacacaccgcccgtcaagccatggaagccgggagtacctgaagcatgcaaccgcaaggagcgtacgaaggtaataccggtaactggggct

SEQ ID NO: 29 - DNA, 1473 bp, Bilophila wadsworthia
attgaacgctggcggcgtgcttaacacatgcaagtcgaacgtgaaagtccttcggggcgagtaaagtggcgcacgggtgagtaacgcgtggataatctacccttaagatggggataacggctggaaacggtcgctaataccgaatacgctcccgattttatcattggggggaaagatggcctctgcttgcaagctatcgcttaaggatgagtccgcgtcccattagctagttggcggggtaacggcccaccaaggcaacgatgggtagccggtctgagaggatgaccggccacactggaactggaacacggtccagactcctacgggaggcagcagtggggaatattgcgcaatgggcgaaagcctgacgcagcgacgccgcgtgagggatgaaggttctcggatcgtaaacctctgtcaggggggaagaaaccccctcgtgtgaataatgcgagggcttgacggtacccccaaaggaagcaccggctaactccgtgccagcagccgcggtaatacggagggtgcaagcgttaatcggaatcactgggcgtaaagcgcacgtaggcggcttggtaagtcaggggtgaaatcccacagcccaactgtggaactgcctttgatactgccaggcttgagtaccggagagggtggcggaattccaggtgtaggagtgaaatccgtagatatctggaggaacaccggtggcgaaggcggccacctggacggtaactgacgctgaggtgcgaaagcgtgggtagcaaacaggattagataccctggtagtccacgctgtaaacgatgggtgctgggtgctgggatgtatgtctcggtgccgtagctaacgcgataagcaccccgcctggggagtacggtcgcaaggctgaaactcaaagaaattgacgggggcccgcacaagcggtggagtatgtggtttaattcgatgcaacgcgaagaaccttacccaggcttgacatctagggaacccttcggaaatgaaggggtgcccttcggggagccctaagacaggtgctgcatggctgtcgtcagctcgtgccgtgaggtgttgggttaagtcccgcaacgagcgcaacccctatcttcagttgccagcaggtaaggctgggcactctggagagaccgccccggtcaacggggaggaaggtggggacgacgtcaagtcatcatggcccttacgcctggggctacacacgtactacaatggcgcgcacaaagggtagcgagaccgcgaggtggagccaatcccaaaaaacgcgtcccagtccggattggagtctgcaactcgactccatgaagtcggaatcgctagtaattcgagatcagcatgctcgggtgaatgcgttcccgggccttgtacacaccgcccgtcacaccacgaaagtcggttttacccgaagccggtgagctaactcgcaagaggagcagccgtctacggtagggccgatgattggggtg

SEQ ID NO: 30 - DNA, 1445 bp, Butyrivibrio crossotus
gatgaacgctggcggcgtgcttaacacatgcaagtcgaacgaagcacttcataaagcttgctttaagaagtgacttagtggcggacgggtgagtaacgcgtgggtaacctgccttacacagggggataacagttagaaatgactgctaataccgcataaaacagcagagtcgcatgactcaactgtcaaagatttatcggtgtaagatggacccgcgtctgattagcttgttggtggggtaacggcctaccaaggcgacgatcagtagccggcctgagagggtgaacggccacattgggactgagacacggcccaaactcctacgggaggcagcagtggggaatattggacaatgggcgaaagcctgatccagcgacgccgcgtgagcgatgaagtatttcggtatgtaaagctctatcagcagggaagaaaacgacggtacctgactaagaagccccggctaactacgtgccagcagccgcggtaatacgtagggggcaagcgttatccggatttactgggtgtaaagggagcgtagacggcatcacaagtcagaagtgaaaatccggggctcaaccccggaactgcttttgaaactgtggagctggagtgcaggagaggtaagcggaattcctagtgtagcggtgaaatgcgtagatattaggaggaacaccagtggcgaaggcggcttactggactgtaactgacgttgaggctcgaaagcgtggggagcaaacaggattagataccctggtagtccacgccgtaaacgatgaatactaggtgttgggtttcataagaagctcggtgccggcgcaaacgcattaagtattccacctggggagtacgttcgcaagaatgaaactcaaaggaattgacggggacccgcacaagcggtggagcatgtggtttaattcgaagcaacgcgaagaaccttaccaagtcttgacatcccgttgacctgttatgtaatgtaacatctcttcggagcaacggagacaggtggtgcatggttgtcgtcagctcgtgtcgtgagatgttgggttaagtcccgcaacgagcgcaacccttgtccttagtagccagcagtaagatgggcactctagggagactgccggggataactcggaggaaggtggggacgacgtcaaatcatcatgccccttatgacttgggctacacacgtgctacaatggcgtaaacaaagggaagcgaacctgtgaaggcaagcaaatcccaaaaataacgtctcagttcggattgtagtctgcaactcgactacatgaagctggaatcgctagtaatcgcagatcagaatgctgcggtgaatacgttcccgggtcttgtacacaccgcccgtcacaccatgggagtcgtaaatgcccgaagtcggtgacctaaccgtaaggaaggagccgccgaaggcaggtatgataactggggtg

SEQ ID NO: 31 - DNA, 1609 bp, Campylobacter curvus
agagtttgatcctggctcagagtgaacgctggcggcgtgcctaatacatgcaagtcgaacggacaagtaagagcttgctcttatgagttagtggcgcacgggtgagtaatgtatagctaatctgccccatagtggaggacaacagttggaaacgactgctaatactccatactccatttatatataagtataaatgggaaagtcgaaccctatatattgtttatttatcaaatacctacggcgcaaccgaaagttgcggtgtgctttaggtgggtcaagggagcgtagctccttgtcgcaaagacggactttgttcgtctgcgaagtaaataatatatagggtttctcgctatgggatgaggctatatcgtatcagctagttggtaaggtaatggcttaccaaggctatgacgcgtaactggtctgagaggatgatcagtcacactggaactgagacacggtccagactcctacgggaggcagcagtagggaatattgctcaatgggggaaaccctgaagcagcaacgccgcgtggaggatgacacttttcggagcgtaaactccttttcttggggaagaaatttgacggtacccaaggaataagcaccggctaactccgtgccagcagccgcggtaatacggagggtgcaagcgttactcggaatcactgggcgtaaaggacgcgtaggcggattatcaagtctcttgtgaaatccaatggcttaaccattgaactgcttgagaaactgataatctagagtgagggagaggtagatggaattggtggtgtaggggtaaaatccgtagagatcaccaggaatacccattgcgaaggcgatctgctggaactcaactgacgctaatgcgtgaaagcgtggggagcaaacaggattagataccctggtagtccacgccctaaacgatgtatactagttgttgctgagctagtcttggcagtaatgcacctaacggattaagtataccgcctggggagtacggtcgcaagattaaaactcaaaggaatagacggggacccgcacaagcggtggagcatgtggtttaattcgaagatacgcgaagaaccttacccggacttgatatctaacaaatcatctagagatagaagagtgtctgcttgcagaaatgttaagacaggtgctgcacggctgtcgtcagctcgtgtcgtgagatgttgggttaagtcccgcaacgagcgcaacccacgtcattagttgctaacggttcggccgagcactctaatgagactgccttcgcaaggaggaggaaggtgtggacgacgtcaagtcatcatggcccttatgtccggggcgacacacgtgctacaatggcgtatacaatgagacgcaatatcgcgagatggagcaaatctataaaatacgtcccagttcggattggagtctgcaactcgactccatgaagccggaatcgctagtaatcgtagatcagccatgctacggtgaatacgttcccgggtcttgtactcaccgcccgtcacaccatgggagttgatttcactcgaagcccaaataccaaaccggttatggtccacagtggaatcagcgactggggtgaagtcgtaacaaggta

SEQ ID NO: 32 - DNA, 1464 bp, Citrobacter freundii
attgaacgctggcggcaggcctaacacatgcaagtcgaacggtagcacagaggagcttgctccttgggtgacgagtggcggacgggtgagtaatgtctgggaaactgcccgatggagggggataactactggaaacggtagctaataccgcataacgtcgcaagaccaaagagggggaccttcgggcctcttgccatcggatgtgcccagatgggattagctagtaggtggggtaacggctcacctaggcgacgatccctagctggtctgagaggatgaccagccacactggaactgagacacggtccagactcctacgggaggcagcagtggggaatattgcacaatgggcgcaagcctgatgcagccatgccgcgtgtatgaagaaggccttcgggttgtaaagtactttcagcgaggaggaaggcgttgtggttaataaccgcagcgattgacgttactcgcagaagaagcaccggctaactccgtgccagcagccgcggtaatacggagggtgcaagcgttaatcggaattactgggcgtaaagcgcacgcaggcggtctgtcaagtcggatgtgaaatccccgggctcaacctgggaactgcatccgaaactggcaggctagagtcttgtagaggggggtagaattccaggtgtagcggtgaaatgcgtagagatctggaggaataccggtggcgaaggcggccccctggacaaagactgacgctcaggtgcgaaagcgtggggagcaaacaggattagataccctggtagtccacgccgtaaacgatgtcgacttggaggttgtgcccttgaggcgtggcttccggagctaacgcgttaagtcgaccgcctggggagtacggccgcaaggttaaaactcaaatgaattgacgggggcccgcacaagcggtggagcatgtggtttaattcgatgcaacgcgaagaaccttacctactcttgacatccagagaacttagcagagatgctttggtgccttcgggaactctgagacaggtgctgcatggctgtcgtcagctcgtgttgtgaaatgttgggttaagtcccgcaacgagcgcaacccttatcctttgttgccagcggttcggccgggaactcaaaggagactgccagtgataaactggaggaaggtggggatgacgtcaagtcatcatggcccttacgagtagggctacacacgtgctacaatggcatatacaaagagaagcgacctcgcgagagcaagcggacctcataaagtatgtcgtagtccggattggagtctgcaactcgactccatgaagtcggaatcgctagtaatcgtggatcagaatgccacggtgaatacgttcccgggccttgtacacaccgcccgtcacaccatgggagtgggttgcaaaagaagtaggtagcttaaccttcgggagggcgcttaccactttgtgattcatgactggggtg

SEQ ID NO: 33 - DNA, 1464 bp, Citrobacter koseri
  misc_feature (223)..(223): n is a, c, g, or t
  misc_feature (445)..(445): n is a, c, g, or t
  misc_feature (982)..(982): n is a, c, g, or t
  misc_feature (993)..(993): n is a, c, g, or t
  misc_feature (1109)..(1110): n is a, c, g, or t
attgaacgctggcggcaggcctaacacatgcaagtcgaacggtaacaggaagcagcttgctgctttgctgacgagtggcggacgggtgagtaatgtctgggaaactgcctgatggagggggataactactggaaacggtagctaataccgcataacgtcgcaagaccaaagagggggaccttcgggcctcttgccatcagatgtgcccagatgggattagctngttggtggggtaacggctcaccaaggcgacgatccctagctggtctgagaggatgaccagccacactggaactgagacacggtccagactcctacgggaggcagcagtggggaatattgcacaatgggcgcaagcctgatgcagccatgccgcgtgtatgaagaaggccttcgggttgtaaagtactttcagcggggaggaaggtgttgtggttaataaccncagcaattgacgttacccgcagaagaagcaccggctaactccgtgccagcagccgcggtaatacggagggtgcaagcgttaatcggaattactgggcgtaaagcgcacgcaggcggtctgttaagtcagatgtgaaatccccgggctcaacctgggaactgcatctgatactggcaggcttgagtctcgtagaggggggtagaattccaggtgtagcggtgaaatgcgtagagatctggaggaataccggtggcgaaggcggccccctggacgaagactgacgctcaggtgcgaaagcgtggggagcaaacaggattagataccctggtagtccacgccgtaaacgatgtcgacttggaggttgtgcccttgaggcgtggcttccggagctaacgcgttaagtcgaccgcctggggagtacggccgcaaggttaaaactcaaatgaattgacgggggcccgcacaagcggtggagcatgtggtttaattcgatgcaacgcgaagaaccttacctggtcttgacatccacggaagttntcagagatganaatgtgccttcgggaaccgtgagacaggtgctgcatggctgtcgtcagctcgtgttgtgaaatgttgggttaagtcccgcaacgagcgcaacccttatcctttgttgccagcggtnnggccgggaactcaaaggagactgccagtgataaactggaggaaggtggggatgacgtcaagtcatcatggcccttacgaccagggctacacacgtgctacaatggcatatacaaagagaagcgacctcgcgagagcaagcggacctcataaagtatgtcgtagtccggattggagtctgcaactcgactccatgaagtcggaatcgctagtaatcgtggatcagaatgccacggtgaatacgttcccgggccttgtacacaccgcccgtcacaccatgggagtgggttgcaaaagaagtaggtagcttaaccttcgggagggcgcttaccactttgtgattcatgactggggtg

SEQ ID NO: 34 - DNA, 1429 bp, Clostridium bartelettii
  misc_feature (47)..(47): n is a, c, g, or t
aggatgaacgctggcggcgtgcctaacacatgcaagtcgagcgattntcttcggagaagagcggcggacgggtgagtaacgcgtgggtaacctgccctgtacacacggataacataccgaaaggtatgctaatacgggataacataagaaattcgcatgtttttcttatcaaagctccggcggtacaggatggacccgcgtctgattagctagttggtgaggtaacggctcaccaaggcgacgatcagtagccgacctgagagggtgatcggccacattggaactgagacacggtccaaactcctacgggaggcagcagtggggaatattgcacaatgggcgaaagcctgatgcagcaacgccgcgtgagcgatgaaggccttcgggtcgtaaagctctgtcctcaaggaagataatgacggtacttgaggaggaagccccggctaactacgtgccagcagccgcggtaatacgtagggggctagcgttatccggatttactgggcgtaaagggtgcgtaggcggtcttttaagtcaggagtgaaaggctacggctcaaccgtagtaagctcttgaaactggaggacttgagtgcaggagaggagagtggaattcctagtgtagcggtgaaatgcgtagatattaggaggaacaccagtagcgaaggcggctctctggactgtaactgacgctgaggcacgaaagcgtggggagcaaacaggattagataccctggtagtccacgccgtaaacgatgagtactagctgtcggaggttacccccttcggtggcgcagctaacgcattaagtactccgcctggggagtacgctcgcaagagtgaaactcaaaggaattgacggggacccgcacaagtagcggagcatgtggtttaattcgaagcaacgcgaagaaccttacctaagcttgacatccttttgaccgatgcctaatcgcatctttcccttcggggacagaagtgacaggtggtgcatggttgtcgtcagctcgtgtcgtgagatgttgggttaagtcccgcaacgagcgcaacccttgcctttagttgccatcattaagttgggcactctagagggactgccagggataacctggaggaaggtggggatgacgtcaaatcatcatgccccttatgcttagggctacacacgtgctacaatgggtggtacagagggcagcgaagtcgtgaggccaagctaatcccttaaagccattctcagttcggattgtaggctgaaactcgcctacatgaagctggagttactagtaatcgcagatcagaatgctgcggtgaatgcgttcccgggtcttgtacacaccgcccgtcacaccatgggagttgggggcgcccgaagccggctagctaaccttttggaagcggtcgtcgaaggtgaaaccaataactggggtgaa

SEQ ID NO: 35 - DNA, 1449 bp, Clostridium ramosum
gatgaacgctggcggcgtgcctaatacatgcaagtcgaacgcgagcacttgtgctcgagtggcgaacgggtgagtaatacataagtaacctgccctagacagggggataactattggaaacgatagctaagaccgcataggtacggacactgcatggtgaccgtattaaaagtgcctcaaagcactggtagaggatggacttatggcgcattagctggttggcggggtaacggcccaccaaggcgacgatgcgtagccgacctgagagggtgaccggccacactgggactgagacacggcccagactcctacgggaggcagcagtagggaattttcggcaatgggggaaaccctgaccgagcaacgccgcgtgaaggaagaaggttttcggattgtaaacttctgttataaaggaagaacggcggctacaggaaatggtagccgagtgacggtactttattagaaagccacggctaactacgtgccagcagccgcggtaatacgtaggtggcaagcgttatccggaattattgggcgtaaagagggagcaggcggcagcaagggtctgtggtgaaagcctgaagcttaacttcagtaagccatagaaaccaggcagctagagtgcaggagaggatcgtggaattccatgtgtagcggtgaaatgcgtagatatatggaggaacaccagtggcgaaggcgacgatctggcctgcaactgacgctcagtcccgaaagcgtggggagcaaataggattagataccctagtagtccacgccgtaaacgatgagtactaagtgttggatgtcaaagttcagtgctgcagttaacgcaataagtactccgcctgagtagtacgttcgcaagaatgaaactcaaaggaattgacgggggcccgcacaagcggtggagcatgtggtttaattcgaagcaacgcgaagaaccttaccaggtcttgacatactcataaaggctccagagatggagagatagctatatgagatacaggtggtgcatggttgtcgtcagctcgtgtcgtgagatgttgggttaagtcccgcaacgagcgcaacccttatcgttagttaccatcattaagttggggactctagcgagactgccagtgacaagctggaggaaggcggggatgacgtcaaatcatcatgccccttatgacctgggctacacacgtgctacaatggatggtgcagagggaagcgaagccgcgaggtgaagcaaaacccataaaaccattctcagttcggattgtagtctgcaactcgactacatgaagttggaatcgctagtaatcgcgaatcagcatgtcgcggtgaatacgttctcgggccttgtacacaccgcccgtcacaccacgagagttgataacacccgaagccggtggcctaaccgcaaggaaggagctgtctaaggtgggattgatgattggggtg

SEQ ID NO: 36 - DNA, 1451 bp, Coprobacter fastidiosus
gatgaacgctagcgacaggcctaacacatgcaagtcgaggggcaacatggtatcagcttgctgataccgatggcgaccggcgcacgggtgagtaacgcgtatgtaatctacctgtaacagagggataacccggagaaatccggactaatacctcatagcacatattattcgcatgaattttatgttaaagagactcggttacagatgaacatgcgttccattagctagttggcggggtcacggcccaccaaggcaacgatggataggggttctgagaggaaggtcccccacactggtactgagacacggaccagactcctacgggaggcagcagtgaggaatattggtcaatgggcggaagcctgaaccagccaagtcgcgtggaggaagacggccctacgggttgtaaactccttttacctgggaataacgggcgctacgtgtagcgctgtgcatgtaccgggagaataagcatcggctaattccgtgccagcagccgcggtaatacggaagatgcgagcgttatccggatttattgggtttaaagggtgcgtaggcggaagaataagtcagcggtgaaatgcttcagctcaactggagaattgccgatgaaactgtttttctagagtataaaagaggtatgcggaatgcgtggtgtagcggtgaaatgcatagatatcacgcagaaccccgattgcgaaggcagcatactgggctataactgacgctgaagcacgaaagcgtgggtatcgaacaggattagataccctggtagtccacgccgtaaacgatgaatactaactgtttgcgatataatgtaagcggtacagcgaaagcgttaagtattccacctggggagtacgccggcaacggtgaaactcaaaggaattgacgggggcccgcacaagcggaggaacatgtggtttaattcgatgatacgcgaggaaccttacccgggctcaaacgacaggggaataatcccgaaaaggattagccagcaatggtcgctgtcgaggtgctgcatggttgtcgtcagctcgtgccgtgaggtgtcggcttaagtgccataacgagcgcaacccttaccggtagttactaacaggtcaagctgaggactctaccgggactgccagcgcaagctgtgaggaaggtggggatgacgtcaaatcagcacggcccttacgtccggggcgacacacgtgttacaatggcaggtacaaagagtcgcgacgtagcaatacgtagccaatcccaaaaacctgtctcagttcggatcggagtctgcaactcgactccgtgaagctggattcgctagtaatcgcgcatcagccatggcgcggtgaatacgttcccgggccttgtacacaccgcccgtcaagccatgggagccgggagtacctgaagtatgcaaccgcaaggagcgtcctagggtaatactggtgactggggct

SEQ ID NO: 37 - DNA, 1439 bp, Coprococcus catus
gatgaacgctggcggcgcgcctaacacatgcaagtcgaacggacgatgaagagcttgcttttcaaagttagtggcggacgggtgagtaacgcgtgggtaacctgcctcatacaggggaatagcagctggaaacggctgataaaaccgcataagcgcacagtgccgcatggcacagtgtgaaaaactccggtggtatgagatggacccgcgtctgattagcttgttggcggggtaacggcccaccaaggcgacgatcagtagccggcctgagagggtgatcggccacattgggactgagacacggcccaaactcctacgggaggcagcagtggggaatattgcacaatgggggaaaccctgatgcagcgacgccgcgtgaaggaagaagtatctcggtatgtaaacttctatcagcagggaagataatgacggtacctgactaagaagccccggctaactacgtgccagcagccgcggtaatacgtagggggcaagcgttatccggatttactgggtgtaaagggagcgtaggcggcggagcaagtcagaagtgaaagcccggggctcaaccccgggacggcttttgaaactgccctgcttgatttcaggagaggtaagcggaattcctagtgtagcggtgaaatgcgtagatattaggaggaacaccagtggcgaaggcggcttactggactgacaatgacgctgaggctcgaaagcgtggggagcaaacaggattagataccctggtagtccacgccgtaaacgatgaatactaggtgtcggggctcataagagcttcggtgccgcagcaaacgcaataagtattccacctggggagtacgttcgcaagaatgaaactcaaaggaattgacggggacccgcacaagcggtggagcatgtggtttaattcgaagcaacgcgaagaaccttaccaggccttgacatcccggtgaccgacccgtaatggggtcttctctacggagcactggagacaggtggtgcatggttgtcgtcagctcgtgtcgtgagatgttgggttaagtcccgcaacgagcgcaacccctatgttcagtagccagcatttaggatgggcactctggacagactgccggggataacccggaggaaggcggggatgacgtcaaatcatcatgccccttacggcctgggctacacacgtgctacaatggcgtaaacaaagggaagcaagagggtgacctggagcgaatcccataaataacgtcccagttcggactgtagtctgcaacccgactacacgaagctggaatcgctagtaatcgcgaatcagcatgtcgcggtgaatacgttcccgggtcttgtacacaccgcccgtcacaccatgggagttggaaatgcccgaagtcagtgacctgaccgcaaggagggagctgccgaaggtggagccgatgactggggtg

SEQ ID NO: 38 - DNA, 1440 bp, Coprococcus eutactus
gatgaacgctggcggcgtgcttaacacatgcaagtcgaacgattgaagctggagcttgctccggccgatttagtggcggacgggtgagtaacgcgtgggtaacctgcctcatacagggggatagcagttggaaacgactggtaaaaccgcataagcgcacggtatcgcatgatacagtgtgaaaacactccggtggtatgagatggacccgcgtctgattagctagttggtgaggtaacggcccaccaaggcgacgatcagtagccggcctgagagggtgaacggccacattgggactgagacacggcccaaactcctacgggaggcagcagtggggaatattgcacaatgggggaaaccctgatgcagcgacgccgcgtgagtgaagaagtatttcggtatgtaaagctctatcagcagggaagataatgacggtacctgactaagaagcaccggctaaatacgtgccagcagccgcggtaatacgtatggtgcaagcgttatccggatttactgggtgtaaagggtgcgtaggtggcaaggcaagtctgaagtgaaaatccggggctcaaccccggaactgctttggaaactgtttagctagagtacaggagaggtaagtggaattcctagtgtagcggtgaaatgcgtagatattaggaggaacaccagtggcgaaggcgacttactggactgctactgacactgaggcacgaaagcgtggggagcaaacaggattagataccctggtagtccacgccgtaaacgatgaatactaggtgttgggttccaaagggactcggtgccgtcgcaaacgcattaagtattccacctggggagtacgttcgcaagaatgaaactcaaaggaattgacggggacccgcacaagcggtggagcatgtggtttaattcgaagcaacgcgaaaaaccttaccaagtcttgacatcctgatgacagtttcttaaccggaacttctcttcggagcatcagagacaggtggtgcatggttgtcgtcagctcgtgtcgtgagatgttgggttaagtcccgcaacgagcgcaacccctatttccagtagccagcagtaagatgggcactctggagagactgccggggataacccggaggaaggtggggatgacgtcaaatcatcatgccccttatgatttgggctacacacgtgctacaatggcagttacaaagagaagcaaacctgtgaaggcgagcaaacctcaaaaaggctgtctcagttcggattgtagtctgcaactcgactacatgaagctggaatcgctagtaatcgcagatcagcatgctgcggtgaatacgttcccgggtcttgtacacaccgcccgtcacaccatgggagtcggtaacgcccgaagtcagtgacccaaccgcaaggagggagctgccgaaggcaggatcgataactggggtg

SEQ ID NO: 39 - DNA, 1472 bp, Desulfovibrio piger
attgaacgctggcggcgtgcttaacacatgcaagtcgtacgcgaaagggacttcggtcccgagtaaagtggcgcacgggtgagtaacacgtggataatctgcctctatgatggggataacagttggaaacgactgctaataccgaatacgctcatgatgaactttgtgaggaaaggtggcctctgcttgcaagctatcgcatagagatgagtccgcgtcccattagctagttggtggggtaacggcctaccaaggcaacgatgggtagccgatctgagaggatgatcggccacactggaactgaaacacggtccagactcctacgggaggcagcagtggggaatattgcgcaatgggcgaaagcctgacgcagcgacgccgcgtgagggatgaaggtcttcggatcgtaaacctctgtcagaagggaagaaactagggtgttctaatcatcatcctactgacggtaccttcaaaggaagcaccggctaactccgtgccagcagccgcggtaatacggagggtgcaagcgttaatcggaatcactgggcgtaaagcgcacgtaggctgttatgtaagtcaggggtgaaagcccacggctcaaccgtggaactgcccttgatactgcacgactcgaatccgggagagggtggcggaattccaggtgtaggagtgaaatccgtagatatctggaggaacatcagtggcgaaggcggccacctggaccggtattgacgctgaggtgcgaaagcgtggggagcaaacaggattagataccctggtagtccacgccgtaaacgatggatgctagatgtcgggatgtatgtctcggtgtcgtagttaacgcgttaagcatcccgcctggggagtacggtcgcaaggctgaaactcaaagaaattgacgggggcccgcacaagcggtggagtatgtggtttaattcgatgcaacgcgaagaaccttacctaggtttgacatctggggaaccctcccgaaaatgaggggtgcccttcggggagccccaagacaggtgctgcatggctgtcgtcagctcgtgtcgtgagatgttgggttaagtcccgcaacgagcgcaacccctatgcatagttgccagcaagtaaagttgggcactctatgcagactgcccgggttaaccgggaggaaggtggggacgacgtcaagtcatcatggcccttacacctagggctacacacgtactacaatggcacgcacaaagggcagcgataccgtgaggtggagccaatcccaaaaaacgtgtcccagtccggattgcagtctgcaactcgactgcatgaagtcggaatcgctagtaattcgaggtcagcatactcgggtgaatgcgttcccgggccttgtacacaccgcccgtcacaccacgaaagtcggttttacccgaagccggtgagccaactagcaatagaggcagccgtctacggtagggccgatgattggggtg

SEQ ID NO: 40 - DNA, 1491 bp, Dialister invisus
gacgaacgctggcggcgtgcttaacacatgcaagtcgaacgaaaagagggaaagagcttgctctttccggaattgagtggcaaacgggtgagtaacacgtaaacaacctgccttcaggatggggacaacagacggaaacgactgctaataccgaataagttccaagagccgcatggcccatggaagaaaaggtggcctctacctgtaagctatcgcctgaagaggggtttgcgtctgattagctggttggaggggtaacggcccaccaaggcgacgatcagtagccggtctgagaggatgaacggccacactggaactgagacacggtccagactcctacgggaggcagcagtggggaatcttccgcaatgggcgaaagcctgacggagcaacgccgcgtgagtgatgacggccttcgggttgtaaaactctgtgatccgggacgaaaaggcagagtgcgaagaacaaactgcattgacggtaccggaaaagcaagccacggctaactacgtgccagcagccgcggtaatacgtaggtggcaagcgttgtccggaattattgggcgtaaagcgcgcgcaggcggcttcccaagtccctcttaaaagtgcggggcttaaccccgtgatgggaaggaaactgggaagctggagtatcggagaggaaagtggaattcctagtgtagcggtgaaatgcgtagagattaggaagaacaccggtggcgaaggcgactttctggacgaaaactgacgctgaggcgcgaaagcgtggggagcaaacaggattagataccctggtagtccacgccgtaaacgatggatactaggtgtaggaggtatcgacccctcctgtgccggagttaacgcaataagtatcccgcctgggaagtacgatcgcaagattaaaactcaaaggaattgacgggggcccgcacaagcggtggagtatgtggtttaattcgacgcaacgcgaagaaccttaccaggtcttgacattgatcgcgatctgcagaaatgcggagttcttcttcggaagacgagaaaacaggtggtgcacggctgtcgtcagctcgtgtcgtgagatgttgggttaagtcccgcaacgagcgcaacccctatcatttgttaccagcacgtaaaggtggggactcaaatgagaccgccgcggacaacgcggaggaaggcggggacgacgtcaagtcatcatgccccttatgacctgggctacacacgtactacaatgggtgtcaacaaagagaagcgaacccgcgaggaagagcaaacctcaaaaacacacccccagttcagatcgcaggctgcaacccgcctgcgtgaagtaggaatcgctagtaatcgcgggtcagcataccgcggtgaatacgttcccgggccttgtacacaccgcccgtcacactatgagagtcagaaacacccgaagccggtgaggtaaccgcaaggagccagccgtcgaaggcggagctgatgattggagtg

SEQ ID NO: 41 - DNA, 1491 bp, Dialister succinatiphilus
gacgaacgctggcggcgtgcttaacacatgcaagtcgaacgagaggacaagagaagcttgcttcttttggaatcgagtggcaaacgggtgagtaacacgtaaacaacctgccttcaggatggggacaacagacggaaacgactgctaataccgaatacacttggaagaccgcatgatcttccaaggaaagggtggcctctacctgtaagctatcgcctgaagaggggtttgcgtctgattaggcagttggtgaggtaacggcccaccaaacctacgatcagtagccggtctgagaggatgaacggccacactggaactgagacacggtccagactcctacgggaggcagcagtggggaatcttccgcaatgggcgaaagcctgacggagcaacgccgcgtgagtgatgacggccttcgggttgtaaagctctgtgatcggggacgaacggcccgtaagctaataccttatggaagtgacggtacccgaatagcaagccacggctaactacgtgccagcagccgcggtaatacgtaggtggcaagcgttgtccggaattattgggcgtaaagcgcgcgcaggcggctttctaagtccatcttaaaagtgcggggcttaaccccgtgatgggatggaaactggaaagctggagtatcggagaggaaagtggaattcctagtgtagcggtgaaatgcgtagagattaggaagaacaccggtggcgaaggcgactttctggacgacaactgacgctgaggcgcgaaagcgtggggagcaaacaggattagataccctggtagtccacgccgtaaacgatgaatactaggtgtaggaggtatcgaccccttctgtgccggagctaacacaataagtattccgcctgggaagtacgatcgcaagattaaaactcaaaggaattgacgggggcccgcacaagcggtggagtatgtggtttaattcgacgcaacgcgaagaaccttaccaggtcttgacattgatcgccattcacagaaatgtgaagttctccttcgggagacgagaaaacaggtggtgcacggctgtcgtcagctcgtgtcgtgagatgttgggttaagtcccgcaacgagcgcaacccctatcttatgttaccagcacgctatggtggggactcatgagagaccgccgcggacaacgcggaggaaggtggggatgacgtcaagtcatcatgccccttatgacctgggctacacacgtactacaatgggtgtcaacaaagagaagcaaaaccgcgaggtggagcgaacctcaaaaacacacccccagttcagattgcaggctgcaacccgcctgcatgaagtaggaatcgctagtaatcgcgggtcagcataccgcggtgaatacgttcccgggccttgtacacaccgcccgtcacactatgagagtcggaaacacccgaagccggtgaggtaaccgcaaggagccagccgtcgaaggtggagctgatgattggagtg

SEQ ID NO: 42 - DNA, 1462 bp, Enterobacter aerogenes
attgaacgctggcggcaggcctaacacatgcaagtcgagcggtagcacagagagcttgctctcgggtgacgagcggcggacgggtgagtaatgtctgggaaactgcctgatggagggggataactactggaaacggtagctaataccgcataacgtcgcaagaccaaagtgggggaccttcgggcctcatgccatcagatgtgcccagatgggattagctagtaggtggggtaatggctcacctaggcgacgatccctagctggtctgagaggatgaccagccacactggaactgagacacggtccagactcctacgggaggcagcagtggggaatattgcacaatgggcgcaagcctgatgcagccatgccgcgtgtatgaagaaggccttcgggttgtaaagtactttcagcgaggaggaaggcgttaaggttaataaccttggcgattgacgttactcgcagaagaagcaccggctaactccgtgccagcagccgcggtaatacggagggtgcaagcgttaatcggaattactgggcgtaaagcgcacgcaggcggtctgtcaagtcggatgtgaaatccccgggctcaacctgggaactgcattcgaaactggcaggctagagtcttgtagaggggggtagaattccaggtgtagcggtgaaatgcgtagagatctggaggaataccggtggcgaaggcggccccctggacaaagactgacgctcaggtgcgaaagcgtggggagcaaacaggattagataccctggtagtccacgccgtaaacgatgtcgacttggaggttgtgcccttgaggcgtggcttccggagctaacgcgttaagtcgaccgcctggggagtacggccgcaaggttaaaactcaaatgaattgacgggggcccgcacaagcggtggagcatgtggtttaattcgatgcaacgcgaagaaccttacctactcttgacatccagagaacttagcagagatgctttggtgccttcgggaactctgagacaggtgctgcatggctgtcgtcagctcgtgttgtgaaatgttgggttaagtcccgcaacgagcgcaacccttatcctttgttgccagcggtccggccgggaactcaaaggagactgccagtgataaactggaggaaggtggggatgacgtcaagtcatcatggcccttacgagtagggctacacacgtgctacaatggcatatacaaagagaagcgacctcgcgagagcaagcggacctcataaagtatgtcgtagtccggattggagtctgcaactcgactccatgaagtcggaatcgctagtaatcgtagatcagaatgctacggtgaatacgttcccgggccttgtacacaccgcccgtcacaccatgggagtgggttgcaaaagaagtaggtagcttaaccttcgggagggcgcttaccactttgtgattcatgactggggtg

SEQ ID NO: 43 - DNA, 1462 bp, Enterobacter cancerogenus
attgaacgctggcggcaggcctaacacatgcaagtcgaacggtagcacagagagcttgctctcgggtgacgagtggcggacgggtgagtaatgtctgggaaactgcctgatggagggggataactactggaaacggtagctaataccgcataacgtcgcaagaccaaagagggggaccttcgggcctcttgccatcagatgtgcccagatgggattagctagtaggtggggtaacggctcacctaggcgacgatccctagctggtctgagaggatgaccagccacactggaactgagacacggtccagactcctacgggaggcagcagtggggaatattgcacaatgggcgcaagcctgatgcagccatgccgcgtgtatgaagaaggccttcgggttgtaaagtactttcagcggggaggaaggcgataaggttaataaccttgtcgattgacgttacccgcagaagaagcaccggctaactccgtgccagcagccgcggtaatacggagggtgcaagcgttaatcggaattactgggcgtaaagcgcacgcaggcggtctgtcaagtcggatgtgaaatccccgggctcaacctgggaactgcattcgaaactggcaggctagagtcttgtagaggggggtagaattccaggtgtagcggtgaaatgcgtagagatctggaggaataccggtggcgaaggcggccccctggacaaagactgacgctcaggtgcgaaagcgtggggagcaaacaggattagataccctggtagtccacgccgtaaacgatgtcgacttggaggttgtgcccttgaggcgtggcttccggagctaacgcgttaagtcgaccgcctggggagtacggccgcaaggttaaaactcaaatgaattgacgggggcccgcacaagcggtggagcatgtggtttaattcgatgcaacgcgaagaaccttacctactcttgacatccagagaacttagcagagatgctttggtgccttcgggaactctgagacaggtgctgcatggctgtcgtcagctcgtgttgtgaaatgttgggttaagtcccgcaacgagcgcaacccttatcctttgttgccagcggttaggccgggaactcaaaggagactgccagtgataaactggaggaaggtggggatgacgtcaagtcatcatggcccttacgagtagggctacacacgtgctacaatggcgcatacaaagagaagcgacctcgcgagagcaagcggacctcataaagtgcgtcgtagtccggattggagtctgcaactcgactccatgaagtcggaatcgctagtaatcgtagatcagaatgctacggtgaatacgttcccgggccttgtacacaccgcccgtcacaccatgggagtgggttgcaaaagaagtaggtagcttaaccttcgggagggcgcttaccactttgtgattcatgactggggtg

SEQ ID NO: 44 - DNA, 1462 bp, Enterobacter cloacae
  misc_feature (61)..(61): n is a, c, g, or t
  misc_feature (443)..(443): n is a, c, g, or t
attgaacgctggcggcaggcctaacacatgcaagtcgaacggtagcacagagagcttgctntcgggtgacgagtggcggacgggtgagtaatgtctgggaaactgcctgatggagggggataactactggaaacggtagctaataccgcataacgtcgcaagaccaaagagggggaccttcgggcctcttgccatcagatgtgcccagatgggattagctagtaggtggggtaacggctcacctaggcgacgatccctagctggtctgagaggatgaccagccacactggaactgagacacggtccagactcctacgggaggcagcagtggggaatattgcacaatgggcgcaagcctgatgcagccatgccgcgtgtatgaagaaggccttcgggttgtaaagtactttcagcggggaggaaggtgttgtggttaataaccncagcaattgacgttacccgcagaagaagcaccggctaactccgtgccagcagccgcggtaatacggagggtgcaagcgttaatcggaattactgggcgtaaagcgcacgcaggcggtctgtcaagtcggatgtgaaatccccgggctcaacctgggaactgcattcgaaactggcaggctagagtcttgtagaggggggtagaattccaggtgtagcggtgaaatgcgtagagatctggaggaataccggtggcgaaggcggccccctggacaaagactgacgctcaggtgcgaaagcgtggggagcaaacaggattagataccctggtagtccacgccgtaaacgatgtcgatttggaggttgtgcccttgaggcgtggcttccggagctaacgcgttaaatcgaccgcctggggagtacggccgcaaggttaaaactcaaatgaattgacgggggcccgcacaagcggtggagcatgtggtttaattcgatgcaacgcgaagaaccttacctggtcttgacatccacagaactttccagagatggattggtgccttcgggaactgtgagacaggtgctgcatggctgtcgtcagctcgtgttgtgaaatgttgggttaagtcccgcaacgagcgcaacccttatcctttgttgccagcggttaggccgggaactcaaaggagactgccagtgataaactggaggaaggtggggatgacgtcaagtcatcatggcccttacgaccagggctacacacgtgctacaatggcgcatacaaagagaagcgacctcgcgagagcaagcggacctcataaagtgcgtcgtagtccggattggagtctgcaactcgactccatgaagtcggaatcgctagtaatcgtagatcagaatgctacggtgaatacgttcccgggccttgtacacaccgcccgtcacaccatgggagtgggttgcaaaagaagtaggtagcttaaccttcgggagggcgcttaccactttgtgattcatgactggggtg

SEQ ID NO: 45 - DNA, 1435 bp, Enterorhabdus caecimuris
gatgaacgctggcggcgtgcctaacacatgcaagtcgaacggttaaaccgccctcgggcggacatacagtggcgaacgggtgagtaacacgtgaccaacctgccccgcgctccgggacaaccgctggaaacggcggctaataccggatactccgcggcccccgcatgggggcggcgggaaagccccgacggcgcgggatggggtcgcggcccattaggtagtaggcggggtagaggcccacctagccgacgatgggtagccggactgagaggtcgatcggccacattgggactgagatacggcccagactcctacgggaggcagcagtggggaattttgcgcaatggggggaaccctgacgcagcaacgccgcgtgcgggacgaaggccctcgggtcgtaaaccgctttcagcagggaagaccttacgacggtacctgcagaagaagctccggctaactacgtgccagcagccgcggtaatacgtagggggcgagcgttatccggattcattgggcgtaaagcgcgcgtaggcggccgcctaagcggaacctctaaccccggggctcaacctcgggccgggttccggactgggcggctcgagtgcggtagaggagagcggaattcccggtgtagcggtggaatgcgcagatatcgggaagaacaccgatggcgaaggcagctctctgggccgtcactgacgctgaggcgcgaaagctgggggagcgaacaggattagataccctggtagtcccagccgtaaacgatggatactaggtgtggggggatcctccctccgtgccgcagccaacgcattaagtatcccgcctggggagtacggccgcaaggctaaaactcaaaggaattgacgggggcccgcacaagcagcggagcatgtggcttaattcgaagcaacgcgaagaaccttaccagggcttgacatgcgcctgaagccgcggagacgcggtggccgagaggagggcgcgcaggtggtgcatggctgtcgtcagctcgtgtcgtgagatgttgggttaagtcccgcaacgagcgcaacccccgtcccgtgttgccagcattaggttggggactcgcgggagactgccggcgtcaagccggaggaaggtggggacgacgtcaagtcatcatgccccttatgccctgggctgcacacgtgctacaatggccggtacagagggttgccaccccgcgagggggagcggatcccggaaagccggccccagttcggatcgcaggctgcaacccgcctgcgtgaagccggagttgctagtaatcgcggatcagcacgccgcggtgaatacgttcccgggccttgtacacaccgcccgtcacaccacccgagtcgtctgcacccgaagccgccggccgaacccccccctgggggcggaggcgtcgaaggtgtggagggtaaggggggtg

SEQ ID NO: 46 - DNA, 1432 bp, Escherichia coli
  misc_feature (374)..(374): n is a, c, g, or t
  misc_feature (834)..(835): n is a, c, g, or t
attgaacgctggcggcaggcctaacacatgcaagtcgaacggtaacaggaagcagcttgctgctttgctgacgagtggcggacgggtgagtaatgtctgggaaactgcctgatggagggggataactactggaaacggtagctaataccgcataacgtcgcaagcacaaagagggggaccttagggcctcttgccatcggatgtgcccagatgggattagctagtaggtggggtaacggctcacctaggcgacgatccctagctggtctgagaggatgaccagcaacactggaactgagacacggtccagactcctacgggaggcagcagtggggaatattgcacaatgggcgcaagcctgatgcagccatgcngcgtgtatgaagaaggccttcgggttgtaaagtactttcagcggggaggaagggagtaaagttaatacctttgctcattgacgttacccgcagaagaagcaccggctaactccgtgccagcagccgcggtaatacggagggtgcaagcgttaatcggaattactgggcgtaaagcgcacgcaggcggtttgttaagtcagatgtgaaatccccgggctcaacctgggaactgcatctgatactggcaagcttgagtctcgtagaggggggtagaattccaggtgtagcggtgaaatgcgtagagatctggaggaataccggtggcgaaggcggccccctggacgaagactgacgctcaggtgcgaaagcgtggggagcaaacaggattagataccctggtagtccacgccgtaaacgatgtcgacttggaggttgtgcccttgaggcgtggcttccgganntaacgcgttaagtcgaccgcctggggagtacggccgcaaggttaaaactcaaatgaattgacgggggccgcacaagcggtggagcatgtggtttaattcgatgcaacgcgaagaaccttacctggtcttgacatccacggaagttttcagagatgagaatgtgccttcgggaaccgtgagacaggtgctgcatggctgtcgtcagctcgtgttgtgaaatgttgggttaagtcccgcaacgagcgcaacccttatcctttgttgccagcggtccggccgggaactcaaaggagactgccagtgataaactggaggaaggtggggatgacgtcaagtcatcatggcccttacgaccagggctacacacgtgctacaatggcgcatacaaagagaagcgacctcgcgagagcaagcggacctcataaagtgcgtcgtagtccggattggagtctgcaactcgactccatgaagtcggaatcgctagtaatcgtggatcagaatgccacggtgaatacgttcccgggccttgtacacaccgcccgtcacaccatgggagtgggttgcaaaagaagtaggtagcttaacttcgggagggcg

SEQ ID NO: 47 - DNA, 1451 bp, Eubacterium hallii
  misc_feature (54)..(54): n is a, c, g, or t
  misc_feature (72)..(73): n is a, c, g, or t
gatgaacgctggcggcgtgcctaacacatgcaagtcgaacgaagcaccttaccngattcttcggatgaaagnntggtgactgagtggcggacgggtgagtaacgcgtgggtaacctgccctgtacagggggataacagctggaaacggctgctaataccgcataagcgcacgaggagacatctccttgtgtgaaaaactccggtggtacaggatgggcccgcgtctgattagctggttggcagggtaacggcctaccaaggcaacgatcagtagccggtctgagaggatgaacggccacattggaactgagacacggtccaaactcctacgggaggcagcagtggggaatattgcacaatgggggaaaccctgatgcagcaacgccgcgtgagtgaagaagtatttcggtatgtaaagctctatcagcagggaagataatgacggtacctgactaagaagctccggctaaatacgtgccagcagccgcggtaatacgtatggagcaagcgttatccggatttactgggtgtaaagggtgcgtaggtggcagtgcaagtcagatgtgaaaggccggggctcaaccccggagctgcatttgaaactgctcggctagagtacaggagaggcaggcggaattcctagtgtagcggtgaaatgcgtagatattaggaggaacaccagtggcgaaggcggcctgctggactgttactgacactgaggcacgaaagcgtggggagcaaacaggattagataccctggtagtccacgccgtaaacgatgaatactaggtgtcggggccgtataggcttcggtgccgccgctaacgcagtaagtattccacctggggagtacgttcgcaagaatgaaactcaaaggaattgacggggacccgcacaagcggtggagcatgtggtttaattcgaagcaacgcgaagaaccttaccaggtcttgacatccttctgaccgcaccttaatcggtgctttccttcgggacagaagagacaggtggtgcatggttgtcgtcagctcgtgtcgtgagatgttgggttaagtcccgcaacgagcgcaacccctatcttcagtagccagcaggtaaggctgggcactctggagagactgccagggataacctggaggaaggtggggacgacgtcaaatcatcatgccccttatgatctgggcgacacacgtgctacaatggcggtcacagagtgaggcgaacccgcgagggggagcaaaccacaaaaaggccgtcccagttcggactgtagtctgcaacccgactacacgaagctggaatcgctagtaatcgcgaatcagaatgtcgcggtgaatacgttcccgggtcttgtacacaccgcccgtcacaccatgggagtcggaaatgcccgaagccagtgacccaacctttatggagggagctgtcgaaggtggagccggtaactgggg

SEQ ID NO: 48 - DNA, 1333 bp, Fusobacterium mortiferum
  misc_feature (16)..(16): n is a, c, g, or t
  misc_feature (43)..(43): n is a, c, g, or t
  misc_feature (243)..(243): n is a, c, g, or t
  misc_feature (258)..(258): n is a, c, g, or t
  misc_feature (261)..(261): n is a, c, g, or t
  misc_feature (302)..(302): n is a, c, g, or t
  misc_feature (314)..(314): n is a, c, g, or t
  misc_feature (756)..(756): n is a, c, g, or t
  misc_feature (830)..(830): n is a, c, g, or t
  misc_feature (832)..(832): n is a, c, g, or t
  misc_feature (846)..(846): n is a, c, g, or t
  misc_feature (946)..(946): n is a, c, g, or t
  misc_feature (1000)..(1000): n is a, c, g, or t
  misc_feature (1077)..(1077): n is a, c, g, or t
  misc_feature (1094)..(1094): n is a, c, g, or t
  misc_feature (1175)..(1175): n is a, c, g, or t
aggtggcggacgggtnagtaacgcgtaaagaacttgcctcacngactgggacaacatttggaaacgaatgctaataccggatattatgactgagtcgcatcatttggttatgaaagctatatgcgctgtgagagagctttgcgtcccattagttagttggtgaggtaacggctcaccaagacgatgatgggtagccggcctgagagggtgaacggccacaaggggactgagacacggcccttnctcctacgggaggcngcngtggggaatattggacaatggaccaaaagtctgatccagcnattctgtgtgcncgatgaagtttttcggaatgtaaagtgctttcagttgggaagaagtcagtgacggtaccaacagaagaagcgacggctaaatacgtgccagcagccgcggtaatacgtatgtcgcaagcgttatccggatttattgggcgtaaagcgcgtctaggcggtttagtaagtctgatgtgaaaatgcggggctcaaccccgtattgcgttggaaactgcttaactagagtactggagaggtaggcggaactacaagtgtagaggtgaaattcgtagatatttgtaggaatgccgatggggaagccagcctactggacagatactgacgctaaagcgcgaaagcgtgggtagcaaacaggattagataccctggtagtccacgccgtaaacgatgattactaggtgttgggggtcgaacctcagcgcccaagctaacgcgataagtnatccgcctggggagtacgtacgcaagtatgaaactcaaaggaattgacggggaccgcacaagcggtggagcatntngtttaattcgacgnaacgcgaggaaccttaccagcgtttgacatcccaagaagttaacagagatgttttcgtgcctcttcggaggaacttggtgacaggtggtgcatggctgtngtcagctcgtgtcgtgagatgttgggttaagtcccgcaacgagcgcaacccctntcgtatgttaccatcattaagttggggactcatgcgagactgcctgcgatgagcaggaggaaggtggggatgacgtnaagtcatcatgcccctnatacgctgggctacacacgtgctacaatgggtagtacagagagctgcaaacctgcgagggtgagctaatctcataaaactnttcttagttcggattgtactctgcaactcgagtacatgaagttggaatcgctagtaatcgcaaatcagctatgttgcggtgaatacgttctcgggtcttgtactcaccgcccgtcacaccacgagagttggttgcacctgaagtaacaggcctaaccg

SEQ ID NO: 49 - DNA, 1464 bp, Haemophilus pittmaniae
attgaacgctggcggcaggcttaacacatgcaagtcgaacggtaacaggaagaaagcttgctttctttgctgacgagtggcggacgggtgagtaatgcttgggtatctggcttatggagggggataactacgggaaactgtagctaataccgcgtagtatcggaagatgaaagtgtgggaccgtaaggccacatgccataggatgagcccaagtgggattaggtagttggtgaggtaatggctcaccaagccgacgatctctagctggtctgagaggatgaccagccacaccgggactgagacacggcccggactcctacgggaggcagcagtggggaatattgcgcaatgggggcaaccctgacgcagccatgccgcgtgaatgaagaaggccttcgggttgtaaagttctttcggtagcgaggaaggcatttagtttaatagactagatgattgacgttaactacagaagaagcaccggctaactccgtgccagcagccgcggtaatacggagggtgcgagcgttaatcggaataactgggcgtaaagggcacgcaggcggacttttaagtgaggtgtgaaagccccgggcttaacctgggaattgcatttcagactgggagtctagagtactttagggaggggtagaattccacgtgtagcggcgaaatgcgtagagatgtggaggaataccgaaggcgaaggcagccccttgggaatgtactgacgctcatgtgcgaaagcgtggggagcaaacaggattagataccctggtagtccacgctgtaaacgctgtcgatttggggattgggcttaatgcttggtgcccgtagctaacgtgataaatcgaccgcctggggagtacggccgcaaggttaaaactcaaatgaattgacgggggcccgcacaagcggtggagcatgtggtttaattcgatgcaacgcgaagaaccttacctactcttgacatccagagaacttttcagagatgaattggtgccttcgggagccctgagacaggtgctgcatggctgtcgtcagctcgtgttgtgaaatgttgggttaagtcccgcaacgagcgcaacccttatcctttgttgccagcgatttggtcgggaactcaaaggagactgccggtgataaaccggaggaaggtggggatgacgtcaagtcatcatggcccttacgagtagggctacacacgtgctacaatggcgtatacagagggaggcgaagcagcgatgtggagcgaatcccagaaagtgcgtctaagtccggattggagtctgcaactcgactccatgaagtcggaatcgctagtaatcgcgaatcagaatgtcgcggtgaatacgttcccgggccttgtacacaccgcccgtcacaccatgggagtgggttgtaccagaagtagatagcttaaccttcgggggggcgtttaccacggtatgattcatgactggggtg

SEQ ID NO: 50 - DNA, 1464 bp, Haemophilus sputorum
attgaacgctggcggcaggcttaacacatgcaagtcgaacggtaacaggaagaaagcttgctttctttgctgacgagtggcggacgggtgagtaatgcttgggaatctggcttatggagggggataactacgggaaactgtagctaataccgcgtaatatcgagagattaaagggtgggaccgcaaggccacctgccatgagatgagcccaagtgggattaggtagttggtgaggtaaaggctcaccaagccgacgatctctagctggtctgagaggatgaccagccacactggaactgagacacggtccagactcctacgggaggcagcagtggggaatattgcacaatggggggaaccctgatgcagccatgccgcgtgaatgaagaaggccttcgggttgtaaagttctttcggtagcgaggaaggcatttagtttaatagactagatgattgacgttaactacagaagaagcaccggctaactccgtgccagcagccgcggtaatacggggggtgcgagcgttaatcggaataactgggcgtaaagggcacgcaggcggtgacttaagtgagatgtgaaagccccgggcttaacctgggaattgcatttcatactgggtcgctagagtactttagggaggggtagaattccacgtgtagcggtgaaatgcgtagagatgtggaggaataccgaaggcgaaggcagccccttgggaatgtactgacgctcatgtgcgaaagcgtggggagcaaacaggattagataccctggtagtccacgctgtaaacgatgtcgatttgggggttgggctttaagcttggcgcccgtagctaacgtgataaatcgaccgcctggggagtacggccgcaaggttaaaactcaaatgaattgacgggggcccgcacaagcggtggagcatgtggtttaattcgatgcaacgcgaagaaccttacctactcttgacatccagagaactttccagagatggattggtgccttcgggaactctgagacaggtgctgcatggctgtcgtcagctcgtgttgtgaaatgttgggttaagtcccgcaacgagcgcaacccttatcctttgttgccagcgattaggtcgggaactcaaaggagactgccggtgataaaccggaggaaggtggggatgacgtcaagtcatcatggcccttacgagtagggctacacacgtgctacaatggcgtatacagagggaagcaatcctgcgagggggagcaaatctcacaaagtacgtctaagtccggattggagtctgcaactcgactccatgaagtcggaatcgctagtaatcgcaaatcagaatgttgcggtgaatacgttcccgggccttgtacacaccgcccgtcacaccatgggagtgggttgtaccagaagtagatagcttaaccttcgggggggcgtttaccacggtatgattcatgactggggtg

SEQ ID NO: 51 - DNA, 1465 bp, Hafnia alvei
attgaacgctggcggcaggcctaacacatgcaagtcgagcggtagcacaagagagcttgctctctgggtgacgagcggcggacgggtgagtaatgtctgggaaactgcctgatggagggggataactactggaaacggtagctaataccgcatgacgtcttcggaccaaagtgggggaccttcgggcctcacgccatcagatgtgcccagatgggattagctagtaggtggggtaatggctcacctaggcgacgatctctagctggtctgagaggatgaccagccacactggaactgagacacggtccagactcctacgggaggcagcagtggggaatattgcacaatgggcgcaagcctgatgcagccatgccgcgtgtatgaagaaggccttcgggttgtaaagtactttcagcgaggaggaaggcattgtggttaataaccacagtgattgacgttactcgcagaagaagcaccggctaactccgtgccagcagccgcggtaatacggagggtgcaagcgttaatcggaattactgggcgtaaagcgcacgcaggcggttgattaagtcagatgtgaaatccccgagcttaacttgggaactgcatttgaaactggtcagctagagtcttgtagaggggggtagaattccaggtgtagcggtgaaatgcgtagagatctggaggaataccggtggcgaaggcggccccctggacaaagactgacgctcaggtgcgaaagcgtggggagcaaacaggattagataccctggtagtccacgctgtaaacgatgtcgacttggaggttgtgcccttgaggcgtggcttccggagctaacgcgttaagtcgaccgcctggggagtacggccgcaaggttaaaactcaaatgaattgacgggggcccgcacaagcggtggagcatgtggtttaattcgatgcaacgcgaagaaccttacctactcttgacatccagagaatttagcagagatgctttagtgccttcgggaactctgagacaggtgctgcatggctgtcgtcagctcgtgttgtgaaatgttgggttaagtcccgcaacgagcgcaacccttatcctttgttgccagcacgtaatggtgggaactcaaaggagactgccggtgataaaccggaggaaggtggggatgacgtcaagtcatcatggcccttacgagtagggctacacacgtgctacaatggcatatacaaagagaagcgaactcgcgagagcaagcggacctcataaagtatgtcgtagtccggattggagtctgcaactcgactccatgaagtcggaatcgctagtaatcgtagatcagaatgctacggtgaatacgttcccgggccttgtacacaccgcccgtcacaccatgggagtgggttgcaaaagaagtaggtagcttaaccttcgggagggcgcttaccactttgtgattcatgactggggtg

SEQ ID NO: 52 - DNA, 1441 bp, Klebsiella oxytoca
  misc_feature (441)..(441): n is a, c, g, or t
acgctggcggcaggcctaacacatgcaagtcgaacggtagcacagagagcttgctctcgggtgacgagtggcggacgggtgagtaatgtctgggaaactgcctgatggagggggataactactggaaacggtagctaataccgcataacgtcgcaagaccaaagagggggaccttcgggcctcttgccatcagatgtgcccagatgggattagctagtaggtggggtaacggctcacctaggcgacgatccctagctggtctgagaggatgaccagccacactggaactgagacacggtccagactcctacgggaggcagcagtggggaatattgcacaatgggcgcaagcctgatgcagccatgccgcgtgtatgaagaaggccttcgggttgtaaagtactttcagcggggaggaaggtgataaggttaataaccttancaattgacgttacccgcagaagaagcaccggctaactccgtgccagcagccgcggtaatacggagggtgcaagcgttaatcggaattactgggcgtaaagcgcacgcaggcggtctgtcaagtcggatgtgaaatccccgggctcaacctgggaactgcattcgaaactggcaggctggagtcttgtagaggggggtagaattccaggtgtagcggtgaaatgcgtagagatctggaggaataccggtggcgaaggcggccccctggacaaagactgacgctcaggtgcgaaagcgtggggagcaaacaggattagataccctggtagtccacgctgtaaacgatgtcgacttggaggttgttcccttgaggagtggcttccggagctaacgcgttaagtcgaccgcctggggagtacggccgcaaggttaaaactcaaatgaattgacgggggcccgcacaagcggtggagcatgtggtttaattcgatgcaacgcgaagaaccttacctactcttgacatccagagaacttagcagagatgctttggtgccttcgggaactctgagacaggtgctgcatggctgtcgtcagctcgtgttgtgaaatgttgggttaagtcccgcaacgagcgcaacccttatcctttgttgccagcgattcggtcgggaactcaaaggagactgccagtgataaactggaggaaggtggggatgacgtcaagtcatcatggcccttacgagtagggctacacacgtgctacaatggcatatacaaagagaagcgacctcgcgagagcaagcggacctcataaagtatgtcgtagtccggattggagtctgcaactcgactccatgaagtcggaatcgctagtaatcgtggatcagaatgccacggtgaatacgttcccgggccttgtacacaccgcccgtcacaccatgggagtgggttgcaaaagaagtaggtagcttaaccttcgggagggcgcttaccactttgtg

SEQ ID NO: 53 - DNA, 1452 bp, Klebsiella pneumoniae
  misc_feature (412)..(412): n is a, c, g, or t
  misc_feature (426)..(426): n is a, c, g, or t
  misc_feature (444)..(444): n is a, c, g, or t
  misc_feature (1291)..(1291): n is a, c, g, or t
tgaacgctggcggcaggcctaacacatgcaagtcgagcggtagcacagagagcttgctctcgggtgacgagcggcggacgggtgagtaatgtctgggaaactgcctgatggagggggataactactggaaacggtagctaataccgcataacgtcgcaagaccaaagtgggggaccttcgggcctcatgccatcagatgtgcccagatgggattagctagtaggtggggtaacggctcacctaggcgacgatccctagctggtctgagaggatgaccagccacactggaactgagacacggtccagactcctacgggaggcagcagtggggaatattgcacaatgggcgcaagcctgatgcagccatgccgcgtgtgtgaagaaggccttcgggttgtaaagcactttcagnggggaggaaggcgntaaggttaataaccttgncgattgacgttacccgcagaagaagcaccggctaactccgtgccagcagccgcggtaatacggagggtgcaagcgttaatcggaattactgggcgtaaagcgcacgcaggcggtctgtcaagtcggatgtgaaatccccgggcttaacctgggaactgcattcgaaactggcaggctagagtcttgtagaggggggtagaattccaggtgtagcggtgaaatgcgtagagatctggaggaataccggtggcgaaggcggccccctggacaaagactgacgctcaggtgcgaaagcgtggggagcaaacaggattagataccctggtagtccacgccgtaaacgatgtcgatttggaggttgtgcccttgaggcgtggcttccggagctaacgcgttaaatcgaccgcctggggagtacggccgcaaggttaaaactcaaatgaattgacgggggcccgcacaagcggtggagcatgtggtttaattcgatgcaacgcgaagaaccttacctggtcttgacatccacagaactttccagagatggattggtgccttcgggaactgtgagacaggtgctgcatggctgtcgtcagctcgtgttgtgaaatgttgggttaagtcccgcaacgagcgcaacccttatcctttgttgccagcggtccggccgggaactcaaaggagactgccagtgataaactggaggaaggtggggatgacgtcaagtcatcatggcccttacgaccagggctacacacgtgctacaatggcatatacaaagagaagcgacctcgcgagagcaagcggacctcataaagtatgtcgtagtccggattggagtctgcaactngactccatgaagtcggaatcgctagtaatcgtagatcagaatgctacggtgaatacgttcccgggccttgtacacaccgcccgtcacaccatgggagtgggttgcaaaagaagtaggtagcttaaccttcgggagggcgcttaccactttgtgattcatga

SEQ ID NO: 54 - DNA, 1462 bp, Klebsiella variicola
attgaacgctggcggcaggcctaacacatgcaagtcgagcggtagcacagagagcttgctctcgggtgacgagcggcggacgggtgagtaatgtctgggaaactgcctgatggagggggataactactggaaacggtagctaataccgcataacgtcgcaagaccaaagtgggggaccttcgggcctcatgccatcagatgtgcccagatgggattagctagtaggtggggtaacggctcacctaggcgacgatccctagctggtctgagaggatgaccagccacactggaactgagacacggtccagactcctacgggaggcagcagtggggaatattgcacaatgggcgcaagcctgatgcagccatgccgcgtgtgtgaagaaggccttcgggttgtaaagcactttcagcggggaggaaggcgataaggttaataaccttgtcgattgacgttacccgcagaagaagcaccggctaactccgtgccagcagccgcggtaatacggagggtgcaagcgttaatcggaattactgggcgtaaagcgcacgcaggcggtctgtcaagtcggatgtgaaatccccgggctcaacctgggaactgcattcgaaactggcaggctagagtcttgtagaggggggtagaattccaggtgtagcggtgaaatgcgtagagatctggaggaataccggtggcgaaggcggccccctggacaaagactgacgctcaggtgcgaaagcgtggggagcaaacaggattagataccctggtagtccacgctgtaaacgatgtcgatttggaggttgtgcccttgaggcgtggcttccggagctaacgcgttaaatcgaccgcctggggagtacggccgcaaggttaaaactcaaatgaattgacgggggcccgcacaagcggtggagcatgtggtttaattcgatgcaacgcgaagaaccttacctggtcttgacatccacagaactttccagagatggattggtgccttcgggaactgtgagacaggtgctgcatggctgtcgtcagctcgtgttgtgaaatgttgggttaagtcccgcaacgagcgcaacccttatcctttgttgccagcggttaggccgggaactcaaaggagactgccagtgataaactggaggaaggtggggatgacgtcaagtcatcatggcccttacgaccagggctacacacgtgctacaatggcatatacaaagagaagcgacctcgcgagagcaagcggacctcataaagtatgtcgtagtccggattggagtctgcaactcgactccatgaagtcggaatcgctagtaatcgtagatcagaatgctacggtgaatacgttcccgggccttgtacacaccgcccgtcacaccatgggagtgggttgcaaaagaagtaggtagcttaaccttcgggagggcgcttaccactttgtgattcatgactggggtg

SEQ ID NO: 55 - DNA, 1476 bp, Megamonas funiformis
gacgaacgctggcggcgtgcttaacacatgcaagtcgaacggggggtttatttcggtaaacaccaagtggcgaacgggtgagtaacgcgtaagcaatctaccttcaagatggggacaacacttcgaaaggggtgctaataccgaatgaatgtaagagtatcgcatgagacacttactaaaggaggcctctgacataagcttccgcttgaagatgagcttgcgtctgattagctagttggtggggtaaaggcccaccaaggcgacgatcagtagccggtctgagaggatgaacggccacattgggactgagacacggcccagactcctacgggaggcagcagtggggaatcttccgcaatgggcgaaagcctgacggagcaacgccgcgtgaacgatgaaggtcttaggatcgtaaagttctgttgttagggacgaaggataagaatcataataaagtctttatttgacggtacctaacgaggaagccacggctaactacgtgccagcagccgcggtaatacgtaggcggcaagcgttgtccggaattattgggcgtaaagggagcgcaggcgggaaactaagcggatcttaaaagtgcggggctcaaccccgtgatggggtccgaactggttttcttgagtgcaggagaggaaagcggaattcccagtgtagcggtgaaatgcgtagatattgggaagaacaccagtggcgaaggcggctttctggactgtaactgacgctgaggctcgaaagctagggtagcgaacgggattagataccccggtagtcctagccgtaaacgatggatactaggtgtgggaggtatcgactccttccgtgccggagttaacgcaataagtatcccgcctggggagtacggccgcaaggttgaaactcaaaggaattgacgggggcccgcacaagcggtggagtatgtggtttaattcgacgcaacgcgaagaaccttaccaagacttgacattgattgaaagacttagagataagttccttctcttcggagaacaagaaaacaggtggtgcatggctgtcgtcagctcgtgtcgtgagatgttgggttaagtcccgcaacgagcgcaacccctatactatgttgccagcattacggatgggaactcatagtagactgccgcggacaacgcggaggaaggcggggatgacgtcaagtcatcatgccccttacgtcttgggctacacacgtactacaatgggatgaacagagggaagcgaaatcgcgaggtggagcggatccctaaaagcatctctcagttcggattgtaggctgaaactcgcctacatgaagtcggaatcgctagtaatcgcaggtcagcatactgcggtgaatacgttcccgggccttgtacacaccgcccgtcacaccacgaaagtcattcacacccgaagccggctaagggcctatggtaccgaccgtctaaggggggggcgatgattggggtg

SEQ ID NO: 56 - DNA, 1397 bp, Megamonas rupellensis
  misc_feature (981)..(981): n is a, c, g, or t
aagtcgaacggggtgtttatttcggtaaacaccaagtggcgaacgggtgagtaacgcgtaagcaatctaccttcaagatggggacaacacttcgaaaggggtgctaataccgaatgaatgtaagagtatcgcatgagacacttactaaaggaggcctctgaaaatgcttccgcttgaagatgagcttgcgtctgattagctagttggtggggtaaaggcccaccaaggcgacgatcagtagccggtctgagaggatgaacggccacattgggactgagacacggcccagactcctacgggaggcagcagtggggaatcttccgcaatgggcgaaagcctgacggagcaacgccgcgtgaacgatgaaggtcttaagatcgtaaagttctgttgttagggacgaagggtaagaataataatacggtttttatttgagagcacctaacgaggaagccacggctaactacgtgccagcagccgcggtaatacgtaggcaggcagcgttgtccggaattattgggcgtaaagggagcgcaggcgggaaactaagcggatcttaaaagtgcggggctcaaccccgtgatggggtccgaactggttttcttgagtgcaggagaggaaagcggaattcccagtgtagcggtgaaatgcgtagatattgggaagaacaccagtggcgaaggcggctttctggactgtaactgacgctgaggctcgaaagctagggtagcgaacgggattagataccccggtagtcctagccgtaaacgatggatactaggtgtgggaggtatcgaccccttccgtgccggagttaacgcaataagtatcccgcctggggagtacggccgcaaggttgaaactcaaaggaattgacgggggcccgcacaagcggtggagtatgtggtttaattcgacgcaacgcgaagaaccttaccaagacttgacattgattgaaaggcctagagataggtccctgancttcggttcacaagaaaacaggtggtgcatggctgtcgtcagctcgtgtcgtgagatgttgggttaagtcccgcaacgagcgcaacccctatactatgttgccagcattacggatgggaactcatagtagactgccgcggacaacgcggaggaaggcggggatgacgtcaagtcatcatgccccttacgtcttgggctacacacgtactacaatgggatgaacagagggaagcgaaatcgcgaggtggagcggatccctaaaagcatctctcagttcggattgtaggctgaaactcgcctacatgaagtcggaatcgctagtaatcgcaggtcagcatactgcggtgaatacgttcccgggccttgtacacaccgcccgtcacaccaccgaaggcattcaaacccgaagccggctg

SEQ ID NO: 57 - DNA, 1486 bp, Megasphaera elsdenii
gacgaacgctggcggcgtgcttaacacatgcaagtcgaacgagaagagatgagaagcttgcttcttatcaattcgagtggcaaacgggtgagtaacgcgtaagcaacctgcccttcagatggggacaacagctggaaacggctgctaataccgaatacgttctttttgtcgcatggcagagggaagaaagggaggctcttcggagctttcgctgaaggaggggcttgcgtctgattagctagttggaggggtaacggcccaccaaggcgacgatcagtagccggtctgagaggatgaacggccacattgggactgagacacggcccagactcctacgggaggcagcagtggggaatcttccgcaatggacgaaagtctgacggagcaacgccgcgtgaacgatgacggccttcgggttgtaaagttctgttatacgggacgaatggcgtagcggtcaatacccgttacgagtgacggtaccgtaagagaaagccacggctaactacgtgccagcagccgcggtaatacgtaggtggcaagcgttgtccggaattattgggcgtaaagggcgcgcaggcggcgtcgtaagtcggtcttaaaagtgcggggcttaaccccgtgaggggaccgaaactgcgatgctagagtatcggagaggaaagcggaattcctagtgtagcggtgaaatgcgtagatattaggaggaacaccagtggcgaaagcggctttctggacgacaactgacgctgaggcgcgaaagccaggggagcaaacgggattagataccccggtagtcctggccgtaaacgatggatactaggtgtaggaggtatcgaccccttctgtgccggagttaacgcaataagtatcccgcctggggagtacggccgcaaggctgaaactcaaaggaattgacgggggcccgcacaagcggtggagtatgtggtttaattcgacgcaacgcgaagaaccttaccaagccttgacattgattgctatggatagagatatccagttcctcttcggaggacaagaaaacaggtggtgcacggctgtcgtcagctcgtgtcgtgagatgttgggttaagtcccgcaacgagcgcaacccctatcttctgttaccagcggttcggccggggactcaggagagactgccgcagacaatgcggaggaaggcggggatgacgtcaagtcatcatgccccttatggcttgggctacacacgtactacaatggctcttaatagagggaagcgaaggagcgatccggagcaaaccccaaaaacagagtcccagttcggattgcaggctgcaactcgcctgcatgaagcaggaatcgctagtaatcgcaggtcagcatactgcggtgaatacgttcccgggccttgtacacaccgcccgtcacaccacgaaagtcattcacacccgaagccggtgaggtaaccttttggagccagccgtcgaaggtgggggcgatgattggggtg

SEQ ID NO: 58 - DNA, 1410 bp, Megasphaera micronuciformis
gaaagcttgctttttctacaatctagtggcaaacgggtgagtaacgcgtaaacaacctgccctacggatggggacaacagctggaaacggctgctaataccgaatacgttccgaaagtcgcatgactgtcggaagaaaggatggcctctatttataagctatcgccggaggaggggtttgcgtctgattagctagttggaggggtaacggcccaccaaggcgacgatcagtagccggtctgagaggatgaacggccacattggaactgagacacggtccagactcctacgggaggcagcagtggggaatcttccgcaatgggcgaaagcctgacggagcaacgccgcgtgagtgaagacggccttcgggttgtaaagctctgttatacgggacgaataatcttgtggttaatacccataagaagtgacggtaccgtaagagaaagccacggctaactacgtgccagcagccgcggtaatacgtaggtggcaagcgttgtccggaattattgggcgtaaagggcgcgcaggcggcttcttaagtctgtcttaaaagtgcggggcttaaccccgtgatgggatggaaactgggaagctcagagtatcggagaggaaagcggaattcctagtgtagcggtgaaatgcgtagatattaggaggaacaccagtggcgaaagcggctttctggacgaaaactgacgctgaggcgcgaaagccaggggagcgaacgggattagataccccggtagtcctggccgtaaacgatgggtactaggtgtaggaggtatcgaccccttctgtgccggagttaacgcaataagtaccccgcctggggagtacggccgcaaggttgaaactcaaaggaattgacgggggcccgcacaagcggtggagtatgtggtttaattcgacgcaacgcgaagaaccttaccaagccttgacattgatcgcaaggagtagagatactctgttcttcttcggaagacgagaaaacaggtggtgcacggctgtcgtcagctcgtgtcgtgagatgttgggttaagtcccgcaacgagcgcaacccctatcttctgttaccagcacgtaaaggtggggactcaggagagactgccgcagacaatgcggaggaaggcggggatgacgtcaagtcatcatgccccttatggcttgggctacacacgtactacaatggctcttaatagagggaagcgaaggagcgatccggagcaaaccccaaaaacagagtctcagttcggattgtaggctgcaactcgcctacatgaagcaggaatcgctagtaatcgcaggtcagcatactgcggtgaatacgttcccgggccttgtacacaccgcccgtcacaccacgaaagtcattcacacccgaagccggtgaggtaaccgcaaggagcca

SEQ ID NO: 59 - DNA, 1483 bp, Mitsuokella multacida
gacgaacgctggcggcgtgcttaacacatgcaagtcgaacgagacgattgaaagcttgcttttgaaagtcgagtggcaaacgggtgagtaacgcgtagacaacctgccgtaaagatggggacaacagtccgaaaggactgctaataccgaatgttgtgggacttccgcatgggagttctactaaagatggcctctacttgtaagctatcgctttacgatgggtctgcgtctgattagctagttggtggggtaacggcttaccaaggcgacgatcagtagccggtctgagaggatgaacggccacattggaactgagacacggtccagactcctacgggaggcagcagtggggaatcttccgcaatgggcgcaagcctgacggagcaacgccgcgtgagtgaagaagggtttcgactcgtaaagctctgttgtcggggacgaatgtggagatggtgaataaccatttccaatgacggtacctgacgaggaagccacggctaactacgtgccagcagccgcggtaatacgtaggtggcgagcgttgtccggaattattgggcgtaaagggagcgcaggcgggaggtcaagtctatcttaaaagtgcggggctcaaccccgtgaggggatggaaactggtcttcttgagtgcaggagaggaaagcggaattcctagtgtagcggtgaaatgcgtagatattaggaggaacaccagtggcgaaggcggctttctggactgtaactgacgctgaggctcgaaagcgtggggagcgaacaggattagataccctggtagtccacgccgtaaacgatgaatgctaggtgtaggaggtatcgacccctcctgtgccggagttaacgcaataagcattccgcctggggagtacggccgcaaggctgaaactcaaaggaattgacgggggcccgcacaagcggtggagtatgtggtttaattcgacgcaacgcgaagaaccttaccagggcttgacattgagtgaaaggactagagatagtcccctctcttcggagacacgaaaacaggtggtgcatggctgtcgtcagctcgtgtcgtgagatgttgggttaagtcccgcaacgagcgcaacccctatcctttgttgccagcacataatggtgggaactcaaaggagactgccgcggacaacgcggaggaaggcggggatgacgtcaagtcatcatgccccttatgtcctgggctacacacgtactacaatgggatggacagagagcagcgaagccgcgaggccaagcgaaccccataaaccatctcccagttcggattgcaggctgcaacccgcctgcatgaagttggaatcgctagtaatcgcaggtcagcatactgcggtgaatacgttcccgggccttgtacacaccgcccgtcacaccacggaagtcattcacacccgaagccggcaggctaaccgcaaggaggcagccgtctaaggtgggggcgatgactggggtg

SEQ ID NO: 60 - DNA, 1448 bp, Odoribacter laneus
gatgaacgctagcgacaggcttaacacatgcaagtcgaggggtaacagggtgtagcaatacaccgctgacgaccggcgcacgggtgagtaacgcgtatgcaacctgcctttgacagagggatagcccatggaaacgtggattaatacctcatagtctctttttccttcctggggaatagagtaaaacgagagtggtcaaagatgggcatgcgtcctattaggcagttggcggggtaacggcccaccaaaccgatgataggtaggggttctgagaggaaggtcccccacactggtactgagacacggaccagactcctacgggaggcagcagtgaggaatattggtcaatggtcgagagactgaaccagccaagtcgcgtgagggatgactgccctatgggttgtaaacctcttttctattgggagaataagccttatgtatagggtgatgacagtacagtaggaataagcatcggctaactccgtgccagcagccgcggtaatacggaggatgcgagcgttatccggatttattgggtttaaagggtgcgtaggcggctttataagttagtggtaaaatttcggagcttcactccggtccgccattaaaactgtagagctagagaatggacgaggtaggcggaataagttaagtagcggtgaaatgcatagatataacttagaactccgatagcgaaggcagcttaccagaccataactgacgctgatgcacgagagcgtgggtagcgaacaggattagataccctggtagtccacgccgtaaacgatgctcaccggcccttagcgataagacagttaggggttaattgaaagaattaagtgagccacctggggagtacgtcggcaacgatgaaactcaaaggaattgacgggggcccgcacaagcggaggaacatgtggtttaattcgatgatacgcgaggaaccttacctgggtttaaatgtatgttgcataatctggaaacagtttttctcttcggagctatatacaaggtgctgcatggttgtcgtcagctcgtgccgtgaggtgtcgggttaagtcccataacgagcgcaacccttaccgttagttgctagcatgtaatgatgagcactctagcgggactgccaccgtaaggtgagaggaagggggggatgacgtcaaatcagcacggcccttacatccagggcgacacacgtgttacaatggccataacagcgggtagctaccgggtgaccggatgcaaatctcgaaaattggtctaagttcggattggagtctgcaacccgactccatgaagttggattcgctagtaatcgcgcatcagccatggcgcggtgaatacgttcccgggccttgtacacaccgcccgtcaagccatggaagctgggagtacctgaagtccgtaaccgcgaggatcggcctagggtaataccggtgactggggct

SEQ ID NO: 61 - DNA, 1446 bp, Odoribacter splanchnicus
gatgaacgctagcgacaggcttaacacatgcaagtcgaggggcagcatgaggtagcaataccttgatggcgaccggcgcacgggtgagtaacgcgtatgcaacctgcctgataccggggtatagcccatggaaacgtggattaacaccccatagtacttttatcctgcctgggatgggagttaaatgttcaaggtatcggatgggcatgcgtcctattagttagttggcggggtaacagcccaccaagacgatgataggtaggggttctgagaggaaggtcccccacattggaactgagacacggtccaaactcctacgggaggcagcagtgaggaatattggtcaatggacgtaagtctgaaccagccaagtcgcgtgagggaagactgccctatgggttgtaaacctcttttataagggaagaataagttctacgtgtagaatgatgcctgtaccttatgaataagcatcggctaactccgtgccagcagccgcggtaatacggaggatgcgagcgttatccggatttattgggtttaaagggtgcgtaggcggtttattaagttagtggttaaatatttgagctaaactcaattgtgccattaatactggtaaactggagtacagacgaggtaggcggaataagttaagtagcggtgaaatgcatagatataacttagaactccgatagcgaaggcagcttaccagactgtaactgacgctgatgcacgagagcgtgggtagcgaacaggattagataccctggtagtccacgccgtaaacgatgctcactggttctgtgcgatatattgtacgggattaagcgaaagtattaagtgagccacctggggagtacgtcggcaacgatgaaactcaaaggaattgacgggggcccgcacaagcggaggaacatgtggtttaattcgatgatacgcgaggaaccttacctgggtttaaatgggaaatgccgtatttggaaacagatattctcttcggagcgtttttcaaggtgctgcatggttgtcgtcagctcgtgccgtgaggtgtcgggttaagtcccataacgagcgcaacccttaccgttagttgctagcatgtaatgatgagcactctaacgggactgccaccgtaaggtgagaggaaggcggggatgacgtcaaatcagcacggcccttacacccagggctacacacgtgttacaatggccggtacagagggccgctaccaggtgactggatgccaatctcaaaagccggtcgtagttcggattggagtctgtaacccgactccatgaagttggattcgctagtaatcgcgcatcagccatggcgcggtgaatacgttcccgggccttgtacacaccgcccgtcaagccatggaagccgggggtgcctgaagtccgtaaccgcgaggatcggcctagggcaaaactggtaactggggct

SEQ ID NO: 62 - DNA, 1451 bp, Oxalobacter formigenes
attgaacgctggcggcatgctttacacatgcaagtcgaacggcagcatgggggcaacctgatggcgagtggcgaacgggtgagtaatatatcggaacgtaccccagagtgggggacaaccagtcgaaagattggctaataccgcatacgatctatggatgaaagtgggggaccttcgggcctcacgctcctggagcggccgatagctgattagctagttggtggggtaaaggcctaccaaggcgatgatcagtagctggtctgagaggacgatcagccacactgggactgagacacggcccagactcctacgggaggcagcagtggggaattttggacaatgggggaaaccctgatccagcaatgccgcgtgagtgaagaaggccttcgggttgtaaagctcttttgtcagggaagaaattgattgggctaatatcccgattagatgacggtacctgaagaataagcaccggctaactacgtgccagcagccgcggtaatacgtagggtgcgagcgttaatcggaattactgggcgtaaagcgtgcgcaggcggttgtgtaagacagatgtgaaatgcccgggctcaacctgggaattgcatttgtgactgcacggctagagtgtgtcagaggggggtagaattccacgtgtagcagtgaaatgcgtagatatgtggaggaataccgatggcgaaggcagccccctgggataacactgacgctcatgcacgaaagcgtggggagcaaacaggattagataccctggtagtccacgcactaaacgatgtcgactagttgttgggtcttaatagacttagtaacgcagctaacgcgtgaagtcgaccgcctggggagtacggtcgcaagattaaaactcaaaggaattgacggggaaagcacaagcggtggatgatgtggattaattcgatgcaacgcgaaaaaccttacctaccctttacatgtcagaaatcccgaagagatttgggagtgctcgaaagagagcctgaacacaggtgctgcatggctgtcgtcagctcgtgtcgtgagatgttcggttaagtcccgcaacgagcgcaacccttgtcattagttgctacgaaagggcactctaatgaaactgccggtgacaaaccggaggaaggtggggatgacgtcaagtcctcatggcccttatgggtagggcttcacacgtcatacaatggtgcatacagagggttgccaacccgagagggggagctaatctcagaaagtgcatcgtagtccggattgaagtctgcaactcgacttcatgaagttggaatcgctagtaatcgcggatcagcatgtcgcggtgaatacgttcccgggtcttgtacacaccgcccgtcacaccatgggagcgggttttaccagaagtaggtagcttaaccgtaaggagggcgcttaccacggtaggattcgtgactggggtg

SEQ ID NO: 63 - DNA, 1449 bp, Parabacteroides distasonis
gatgaacgctagcgacaggcttaacacatgcaagtcgaggggcagcggggtgtagcaatacaccgccggcgaccggcgcacgggtgagtaacgcgtatgcaacttgcctatcagagggggataacccggcgaaagtcggactaataccgcatgaagcagggatcccgcatgggaatatttgctaaagattcatcgctgatagataggcatgcgttccattaggcagttggcggggtaacggcccaccaaaccgacgatggataggggttctgagaggaaggtcccccacattggtactgagacacggaccaaactcctacgggaggcagcagtgaggaatattggtcaatggccgagaggctgaaccagccaagtcgcgtgagggatgaaggttctatggatcgtaaacctcttttataagggaataaagtgcgggacgtgtcccgttttgtatgtaccttatgaataaggatcggctaactccgtgccagcagccgcggtaatacggaggatccgagcgttatccggatttattgggtttaaagggtgcgtaggcggccttttaagtcagcggtgaaagtctgtggctcaaccatagaattgccgttgaaactggggggcttgagtatgtttgaggcaggcggaatgcgtggtgtagcggtgaaatgcatagatatcacgcagaaccccgattgcgaaggcagcctgccaagccattactgacgctgatgcacgaaagcgtggggatcaaacaggattagataccctggtagtccacgcagtaaacgatgatcactagctgtttgcgatacactgtaagcggcacagcgaaagcgttaagtgatccacctggggagtacgccggcaacggtgaaactcaaaggaattgacgggggcccgcacaagcggaggaacatgtggtttaattcgatgatacgcgaggaaccttacccgggtttgaacgcattcggaccgaggtggaaacaccttttctagcaatagccgtttgcgaggtgctgcatggttgtcgtcagctcgtgccgtgaggtgtcggcttaagtgccataacgagcgcaacccttgccactagttactaacaggttaggctgaggactctggtgggactgccagcgtaagctgcgaggaaggcggggatgacgtcaaatcagcacggcccttacatccggggcgacacacgtgttacaatggcgtggacaaagggaggccacctggcgacagggagcgaatccccaaaccacgtctcagttcggatcggagtctgcaacccgactccgtgaagctggattcgctagtaatcgcgcatcagccatggcgcggtgaatacgttcccgggccttgtacacaccgcccgtcaagccatgggagccgggggtacctgaagtccgtaaccgaaaggatcggcctagggtaaaactggtgactggggct

SEQ ID NO: 64 - DNA, 1451 bp, Porphyromonas asaccharolytica
gatgaacgctagcgataggcttaacacatgcaagtcgaggggcagcgagatgtagcaatacgtcgtcggcgaccggcgaatgggtgagtaacacgtatgcaacttacctcttagtggtgaataacccgatgaaagtcggactaatacaccatatactccttagatcccatgagaagaggaggaaagattaatcgctaagagatgggcctgcgttccattagctagttggtaaggtaacggcttaccaaggcaacgatggatagggggactgagaggttgaccccccacattgacactgagatacgggtcaaactcctacgggaggcagcagtgaggaatattggtcaatgggcgagagcctgaaccagccaagtcgcgtgaaggaagactgcccgcaagggttgtaaacttcttttgtatgggattaaagtcacctacgtgtaggtgtttgcagttaccatacgaataagcatcggctaactccgtgccagcagccgcggtaatacggaggatgcgagcgttatccggaattattgggtttaaagggtgcgtaggttgcaagggaagtcaggggtgaaaagctgtagctcaactatggtcttgcctttgaaactctctagctagagtgtactggaggtacgtggaacgtgtggtgtagcggtgaaatgcatagatatcacacagaactccgattgcgcaggcagcgtactacattacaactgacactgaagcacgaaagcgtgggtatccaacaggattagataccctggtagtccacgcagtaaacgatgaatactagatctatgcgatatacagtatgggtctaagcgaaagcgataagtattccacctggggagtacgccggcaacggtgaaactcaaagagattggcgggggtccgcacaagcggaggaacatgtggtttaattcgatgatacgcgaggaaccttacccgggattgaaatgtagatgcatgaggctgagaggtctcttcccttcggggcttctatgtaggtgctgcatggttgtcgtcagctcgtgccgtgaggtgtcggcttaagtgccataacgagcgcaacccgcgtcgatagttactaacgagtcaagtcgaggactctatcgagacagccgtcgtaagacgtgaggaaggagcggatgacgtcaaatcagcacggcccttacatccggggcgacacacgtgttacaatggtagggacagcgagcagccatctggtgacagagagctaatctataaaccctatcccagttcggatcggagtctgcaactcgactctgtgaagctggattcgctagtaatcgcgcatcagccatggcgcggtgaatacgttcccggaccttgcacacaccgcccgtcaagccatgggagtcgggggtacctgaagagcgtgaccgtcacaggagcgcttgagggtaaaactggtgactggggct

SEQ ID NO: 65 - DNA, 1451 bp, Porphyromonas uenonis
gatgaacgctagcgataggcttaacacatgcaagtcgaggggcagcgagatgtagcaatacgtcgtcggcgaccggcgaatgggtgagtaacacgtatgcaacttacctcttagtggtgaataactcgatgaaagtcggactaatacaccatactctccttagatcacatgagaagaggaggaaagattaatcgctaagagataggcctgcgttccattagctagttggtaaggtaacggcttaccaaggcaacgatggatagggggactgagaggttgaccccccacattgacactgagatacgggtcaaactcctacgggaggcagcagtgaggaatattggtcaatgggcgagagcctgaaccagccaagtcgcgtgaaggaagactgcccgcaagggttgtaaacttcttttgtatgggattaaagtcgtctacgtgtagacgtttgcagttaccatacgaataagcatcggctaactccgtgccagcagccgcggtaatacggaggatgcgagcgttatccggaattattgggtttaaagggtgcgtaggttgcaagggaagtcaggggtgaaaagctatagctcaactatggtcttgcctttgaaactctctagctagagtgtactggaggtacgtggaacgtgtggtgtagcggtgaaatgcatagatatcacacagaactccgattgcgcaggcagcgtactacattacaactgacactgaagcacgaaagcgtgggtatccaacaggattagataccctggtagtccacgcagtaaacgatgaatactagatctatgcgatacactgtatgggtctaagcgaaagcgataagtattccacctggggagtacgccggcaacggtgaaactcaaagagattggcgggggtccgcacaagcggaggaacatgtggtttaattcgatgatacgcgaggaaccttacccgggattgaaatgtagatgcatgaggctgagaggtctcttcccttcggggcttctatgtaggtgctgcatggttgtcgtcagctcgtgccgtgaggtgtcggcttaagtgccataacgagcgcaacccgcgtcgatagttactaacgagtcaagtcgaggactctatcgagacagccgtcgtaagacgagaggaaggagcggatgacgtcaaatcagcacggcccttacatccggggcgacacacgtgttacaatggtagggacagcgagcagccatctggcgacagagagctaatctataaaccctatcccagttcggatcggagtctgcaactcgactctgtgaagctggattcgctagtaatcgcgcatcagccatggcgcggtgaatacgttcccggaccttgcacacaccgcccgtcaagccatgggagtcgggggtacctgaagagcgtgaccgtcacaggagcgcttgagggtaaaactggtgactggggct

SEQ ID NO: 66 - DNA, 1430 bp, Ruminococcus callidus
gacgaacgctggcggcacgcttaacacatgcaagtcgaacggagaacattgagcttgcttaatgttcttagtggcggacgggtgagtaacacgtgagtaacctgcctctgagagtgggatagcttctggaaacggatggtaataccgcataacatcatggattcgcatgtttctgtgatcaaagatttatcgcttagagatggactcgcgtctgattagctagttggtaaggtaacggcttaccaaggcgacgatcagtagccggactgagaggttgatcggccacattgggactgagacacggcccagactcctacgggaggcagcagtggggaatattgcacaatgggggaaaccctgatgcagcgatgccgcgtggaggaagaaggttttcggattgtaaactcctgttgaagaggacgataatgacggtactcttttagaaagctccggctaactacgtgccagcagccgcggtaatacgtagggagcgagcgttgtccggaattactgggtgtaaagggagcgtaggcgggatggcaagtcagatgtgaaaactatgggctcaacccatagactgcatttgaaactgttgttcttgagtgaggtagaggtaagcggaattcctggtgtagcggtgaaatgcgtagagatcaggaggaacatcggtggcgaaggcggcttactgggcctttactgacgctgaggctcgaaagcgtggggagcaaacaggattagataccctggtagtccacgccgtaaacgatgattactaggtgtggggggactgaccccttccgtgccgcagttaacacaataagtaatccacctggggagtacggccgcaaggttgaaactcaaaggaattgacgggggcccgcacaagcagtggagtatgtggtttaattcgaagcaacgcgaagaaccttaccaggtcttgacatcgagtgacgtacctagagataggtattttcttcggaacacaaagacaggtggtgcatggttgtcgtcagctcgtgtcgtgagatgttgggttaagtcccgcaacgagcgcaacccttaccattagttgctacgcaagagcactctaatgggactgccgttgacaaaacggaggaaggtggggatgacgtcaaatcatcatgccccttatgacctgggctacacacgtactacaatggcaattaacagagggaagcaatacagcgatgtggagcaaatccccaaaaattgtcccagttcagattgcaggctgcaactcgcctgcatgaagtcggaattgctagtaatcgcagatcagcatgctgcggtgaatacgttcccgggccttgtacacaccgcccgtcacaccatgggagtcggtaacacccaaagccggtcgtctaaccttcgggaggatgccgtctaaggtgggattgatgactggggtg

SEQ ID NO: 67 - DNA, 1453 bp, Ruminococcus torques
gatgaacgcgggcggcgtgcctaacacatgcaagtcgagcgaagcactttgcttagattcttcggatgaagaggattgtgactgagcggcggacgggtgagtaacgcgtgggtaacctgcctcatacagggggataacagttagaaatgactgctaataccgcataagaccacagcaccgcatggtgcgggggtaaaaactccggtggtatgagatggacccgcgtctgattagctagttggtaaggtaacggcttaccaaggcgacgatcagtagccgacctgagagggtggccggccacattgggactgagacacggcccaaactcctacgggaggcagcagtggggaatattgcacaatgggggaaaccctgatgcagcgacgccgcgtgagcgaagaagtatttcggtatgtaaagctctatcagcagggaagaaaatgacggtacctgactaagaagcaccggctaaatacgtgccagcagccgcggtaatacgtatggtgcaagcgttatccggatttactgggtgtaaagggagcgtagacggatgggcaagtctgatgtgaaaacccggggctcaaccccgggactgcattggaaactgttcatctagagtgctggagaggtaagtggaattcctagtgtagcggtgaaatgcgtagatattaggaggaacaccagtggcgaaggcggcttactggacagtaactgacgttgaggctcgaaagcgtggggagcaaacaggattagataccctggtagtccacgccgtaaacgatgactactaggtgtcgggtggcaaagccattcggtgccgcagcaaacgcaataagtagtccacctggggagtacgttcgcaagaatgaaactcaaaggaattgacggggacccgcacaagcggtggagcatgtggtttaattcgaagcaacgcgaagaaccttacctgctcttgacatcccgctgaccggacggtaatgcgtccttcccttcggggcagcggagacaggtggtgcatggttgtcgtcagctcgtgtcgtgagatgttgggttaagtcccgcaacgagcgcaacccctatctttagtagccagcggccaggccgggcactctagagagactgccggggataacccggaggaaggtggggatgacgtcaaatcatcatgccccttatgagcagggctacacacgtgctacaatggcgtaaacaaagggaagcgagaccgcgaggtggagcaaatcccaaaaataacgtctcagttcggattgtagtctgcaactcgactacatgaagctggaatcgctagtaatcgcgaatcagaatgtcgcggtgaatacgttcccgggtcttgtacacaccgcccgtcacaccatgggagtcagtaacgcccgaagtcagtgacccaaccgtaaggagggagctgccgaaggcgggaccgataactggggtg

SEQ ID NO: 68 - DNA, 1464 bp, Shigella sonnei
attgaacgctggcggcaggcctaacacatgcaagtcgaacggtaacaggaaacagcttgctgtttcgctgacgagtggcggacgggtgagtaatgtctgggaaactgcctgatggagggggataactactggaaacggtagctaataccgcataacgtcgcaagaccaaagagggggaccttcgggcctcttgccatcggatgtgcccagatgggattagctagtaggtggggtaacggctcacctaggcgacgatccctagctggtctgagaggatgaccagccacactggaactgagacacggtccagactcctacgggaggcagcagtggggaatattgcacaatgggcgcaagcctgatgcagccatgccgcgtgtatgaagaaggccttcgggttgtaaagtactttcagcggggaggaagggagtaaagttaatacctttgctcattgacgttacccgcagaagaagcaccggctaactccgtgccagcagccgcggtaatacggagggtgcaagcgttaatcggaattactgggcgtaaagcgcacgcaggcggtttgttaagtcagatgtgaaatccccgggctcaacctgggaactgcatctgatactggcaagcttgagtctcgtagaggggggtagaattccaggtgtagcggtgaaatgcgtagagatctggaggaataccggtggcgaaggcggccccctggacgaagactgacgctcaggtgcgaaagcgtggggagcaaacaggattagataccctggtagtccacgccgtaaacgatgtcgacttggaggttgtgcccttgaggcgtggcttccggagctaacgcgttaagtcgaccgcctggggagtacggccgcaaggttaaaactcaaatgaattgacgggggcccgcacaagcggtggagcatgtggtttaattcgatgcaacgcgaagaaccttacctggtcttgacatccacggaagttttcagagatgagaatgtgccttcgggaaccctgagacaggtgctgcatggctgtcgtcagctcgtgttgtgaaatgttgggttaagtcccgcaacgagcgcaacccttatcctttgttgccagcggtccggccgggaactcaaaggagactgccagtgataaactggaggaaggtggggatgacgtcaagtcatcatggcccttacgaccagggctacacacgtgctacaatggcgcatacaaagagaagcgacctcgcgagagcaagcggacctcataaagtgcgtcgtagtccggattggagtctgcaactcgactccatgaagtcggaatcgctagtaatcgtggatcagaatgccacggtgaatacgttcccgggccttgtacacaccgcccgtcacaccatgggagtgggttgcaaaagaagtaggtagcttaaccttcgggagggcgcttaccactttgtgattcatgactggggtg

SEQ ID NO: 69 - DNA, 1468 bp, Streptococcus infantis
gacgaacgctggcggcgtgcctaatacatgcaagtagaacgctgaaggaggagcttgctcttctggatgagttgcgaacgggtgagtaacgcgtaggtaacctgcctggtagcgggggataactattggaaacgatagctaataccgcataacagtagatatcgcatgatagctgcttgaaaggtgcaattgcaccactaccagatggacctgcgttgtattagctagttggtgaggtaacggctcaccaaggcaacgatacatagccgacctgagagggtgatcggccacactgggactgagacacggcccagactcctacgggaggcagcagtagggaatcttcggcaatggacggaagtctgaccgagcaacgccgcgtgagtgaagaaggttttcggatcgtaaagctctgttgtaagagaagaacgagtgtgagagtggaaagttcacactgtgacggtatcttaccagaaagggacggctaactacgtgccagcagccgcggtaatacgtaggtcccgagcgttgtccggatttattgggcgtaaagcgagcgcaggcggttagataagtctgaagttaaaggctgtggcttaaccatagtacgctttggaaactgtttaacttgagtgcaagaggggagagtggaattccatgtgtagcggtgaaatgcgtagatatatggaggaacaccggtggcgaaagcggctctctggcttgtaactgacgctgaggctcgaaagcgtggggagcaaacaggattagataccctggtagtccacgccgtaaacgatgagtgctaggtgttagaccctttccggggtttagtgccgaagctaacgcattaagcactccgcctggggagtacgaccgcaaggttgaaactcaaaggaattgacgggggcccgcacaagcggtggagcatgtggtttaattcgaagcaacgcgaagaaccttaccaggtcttgacatccctctgaccgctctagagatagagttttccttcgggacagaggtgacaggtggtgcatggttgtcgtcagctcgtgtcgtgagatgttgggttaagtcccgcaacgagcgcaacccctattgttagttgccatcatttagttgggcactctagcgagactgccggtaataaaccggaggaaggtggggatgacgtcaaatcatcatgccccttatgacctgggctacacacgtgctacaatggttggtacaacgagtcgcaagccggtgacggcaagctaatctcttaaagccaatctcagttcggattgtaggctgcaactcgcctacatgaagtcggaatcgctagtaatcgcggatcagcacgccgcggtgaatacgttcccgggccttgtacacaccgcccgtcacaccacgagagtttgtaacacccgaagtcggtgaggtaaccatttggagccagccgcctaaggtgggatagatgattggggtg

SEQ ID NO: 70 - DNA, 1520 bp, Streptococcus mitis oralis pneumoniae
ttttgagtttgatcctggctcaggacgaacgctggcggcgtgcctaatacatgcaagtagaacgctgaaggaggagcttgcttctccggatgagttgcgaacgggtgagtaacgcgtaggtaacctgcctggtagcgggggataactattggaaacgatagctaataccgcataagagtagatgttgcatgacatttgcttaaaaggtgcaattgcatcactaccagatggacctgcgttgtattagctagttggtggggtaacggctcaccaaggcgacgatacatagccgacctgagagggtgatcggccacactgggactgagacacggcccagactcctacgggaggcagcagtagggaatcttcggcaatggacggaagtctgaccgagcaacgccgcgtgagtgaagaaggttttcggatcgtaaagctctgttgtaagagaagaacgagtgtgagagtggaaagttcacactgtgacggtatcttaccagaaagggacggctaactacgtgccagcagccgcggtaatacgtaggtcccgagcgttgtccggatttattgggcgtaaagcgagcgcaggcggttagataagtctgaagttaaaggctgtggcttaaccatagtacgctttggaaactgtttaacttgagtgcaagaggggagagtggaattccatgtgtagcggtgaaatgcgtagatatatggaggaacaccggtggcgaaagcggctctctggcttgtaactgacgctgaggctcgaaagcgtggggagcaaacaggattagataccctggtagtccacgccgtaaacgatgagtgctaggtgttagaccctttccggggtttagtgccgcagctaacgcattaagcactccgcctggggagtacgaccgcaaggttgaaactcaaaggaattgacgggggcccgcacaagcggtggagcatgtggtttaattcgaagcaacgcgaagaaccttaccaggtcttgacatccctctgaccgctctagagatagagttttccttcgggacagaggtgacaggtggtgcatggttgtcgtcagctcgtgtcgtgagatgttgggttaagtcccgcaacgagcgcaacccctattgttagttgccatcatttagttgggcactctagcgagactgccggtaataaaccggaggaaggtggggatgacgtcaaatcatcatgccccttatgacctgggctacacacgtgctacaatggctggtacaacgagtcgcaagccggtgacggcaagctaatctcttaaagccagtctcagttcggattgtaggctgcaactcgcctacatgaagtcggaatcgctagtaatcgcggatcagcacgccgcggtgaatacgttcccgggccttgtacacaccgcccgtcacaccacgagagtttgtaacacccgaagtcggtgaggtaaccttttaggagccagccgcctaaggtgggatagatgattggggtgaagtcgtaacaagtcagccgtttgggaa

SEQ ID NO: 71 - DNA, 1476 bp, Streptococcus tigurinus
gtttgatcatggctcaggacgaacgctggcggcgtgcctaatacatgcaagtagaacgctgaagagaggagcttgctcttcttggatgagttgcgaacgggtgagtaacgcgtaggtaacctgcctggtagcgggggataactattggaaacgatagctaataccgcataaaatggattatcgcatgataatcaattgaaaggtgcaaatgcatcactaccagatggacctgcgttgtattagctagttggtggggtaacggctcaccaaggcgacgatacatagccgacctgagagggtgatcggccacactgggactgagacacggcccagactcctacgggaggcagcagtagggaatcttcggcaatggacggaagtctgaccgagcaacgccgcgtgagtgaagaaggttttcggatcgtaaagctctgttgtaagagaagaacgagtgtgagagtggaaagttcacactgtgacggtatcttaccagaaagggacggctaactacgtgccagcagccgcggtaatacgtaggtcccgagcgttgtccggatttattgggcgtaaagcgagcgcaggcggttagataagtctgaagttaaaggctgtggcttaaccatagtacgctttggaaactgtttaacttgagtgcaagaggggagagtggaattccatgtgtagcggtgaaatgcgtagatatatggaggaacaccggtggcgaaagcggctctctggcttgtaactgacgctgaggctcgaaagcgtggggagcaaacaggattagataccctggtagtccacgccgtaaacgatgagtgctaggtgttagaccctttccggggtttagtgccgcagctaacgcattaagcactccgcctggggagtacgaccgcaaggttgaaactcaaaggaattgacgggggcccgcacaagcggtggagcatgtggtttaattcgaagcaacgcgaagaaccttaccaggtcttgacatccctctgaccgctctagagatagagttttccttcgggacagaggtgacaggtggtgcatggttgtcgtcagctcgtgtcgtgagatgttgggttaagtcccgcaacgagcgcaacccctattgttagttgccatcatttagttgggcactctagcgagactgccggtaataaaccggaggaaggtggggatgacgtcaaatcatcatgccccttatgacctgggctacacacgtgctacaatggctggtacaacgagtcgcaagccggtgacggcaagctaatctcttaaagccagtctcagttcggattgtaggctgcaactcgcctacatgaagtcggaatcgctagtaatcgcggatcagcacgccgcggtgaatacgttcccgggccttgtacacaccgcccgtcacaccacgagagtttgtaacacccgaagtcggtgaggtaaccttttaggagccagccgcctaaggtgggaata

SEQ ID NO: 72 - DNA, 1438 bp, Turicibacter sanguinis
gatgaacgctggcggcgtgcctaatacatgcaagtcgagcgaaccacttcggtggtgagcggcgaacgggtgagtaacacgtaggttatctgcccatcagacggggacaacgattggaaacgatcgctaataccggataggacgaaagtttaaaggtgcttcggcaccactgatggatgagcctgcggcgcattagctagttggtagggtaaaggcctaccaaggcgacgatgcgtagccgacctgagagggtgaacggccacactgggactgagacacggcccagactcctacgggaggcagcagtagggaatcttcggcaatgggcgaaagcctgaccgagcaacgccgcgtgaatgatgaaggccttcgggttgtaaaattctgttataagggaagaatggctctagtaggaaatggctagagtgtgacggtaccttatgagaaagccacggctaactacgtgccagcagccgcggtaatacgtaggtggcgagcgttatccggaattattgggcgtaaagagcgcgcaggtggttgattaagtctgatgtgaaagcccacggcttaaccgtggagggtcattggaaactggtcaacttgagtgcagaagagggaagtggaattccatgtgtagcggtgaaatgcgtagagatatggaggaacaccagtggcgaaggcggcttcctggtctgtaactgacactgaggcgcgaaagcgtggggagcaaacaggattagataccctggtagtccacgccgtaaacgatgagtgctaagtgttgggggtcgaacctcagtgctgaagttaacgcattaagcactccgcctggggagtacggtcgcaagactgaaactcaaaggaattgacggggacccgcacaagcggtggagcatgtggtttaattcgaagcaacgcgaagaaccttaccaggtcttgacataccagtgaccgtcctagagataggattttcccttcggggacaatggatacaggtggtgcatggttgtcgtcagctcgtgtcgtgagatgttgggttaagtcccgcaacgagcgcaacccctgtcgttagttgccagcattcagttggggactctaacgagactgccagtgacaaactggaggaaggtggggatgacgtcaaatcatcatgccccttatgacctgggctacacacgtgctacaatggttggtacaaagagaagcgaagcggtgacgtggagcaaacctcataaagccaatctcagttcggattgtaggctgcaactcgcctacatgaagttggaatcgctagtaatcgcgaatcagcatgtcgcggtgaatacgttcccgggtcttgtacacaccgcccgtcacaccacgagagtttacaacacccgaagtcagtggcctaaccgcaaggagggagctgcctaaggtggggtagatgattggggtg

SEQ ID NO: 73 - DNA, 1485 bp, Veillonella atypica
gacgaacgctggcggcgtgcttaacacatgcaagtcgaacgaagagcgatggaagcttgcttctatcaatcttagtggcgaacgggtgagtaacgcgtaatcaacctgcccttcagagggggacaacagttggaaacgactgctaataccgcatacgatccaatctcggcatcgagactggatgaaaggtggcctctatttataagctatcactgaaggaggggattgcgtctgattagctagttggaggggtaacggcccaccaaggcgatgatcagtagccggtctgagaggatgaacggccacattgggactgagacacggcccagactcctacgggaggcagcagtggggaatcttccgcaatggacgaaagtctgacggagcaacgccgcgtgagtgatgacggccttcgggttgtaaagctctgttaatcgggacgaatggttcttgtgcgaatagtgcgaggatttgacggtaccggaatagaaagccacggctaactacgtgccagcagccgcggtaatacgtaggtggcaagcgttgtccggaattattgggcgtaaagcgcgcgcaggcggatcagttagtctgtcttaaaagttcggggcttaaccccgtgatgggatggaaactgctgatctagagtatcggagaggaaagtggaattcctagtgtagcggtgaaatgcgtagatattaggaagaacaccagtggcgaaggcgactttctggacgaaaactgacgctgaggcgcgaaagccaggggagcgaacgggattagataccccggtagtcctggccgtaaacgatgggtactaggtgtaggaggtatcgaccccttctgtgccggagttaacgcaataagtaccccgcctggggagtacgaccgcaaggttgaaactcaaaggaattgacgggggcccgcacaagcggtggagtatgtggtttaattcgacgcaacgcgaagaaccttaccaggtcttgacattgatggacagaaccagagatggttcctcttcttcggaagccagaaaacaggtggtgcacggttgtcgtcagctcgtgtcgtgagatgttgggttaagtcccgcaacgagcgcaacccctatcttatgttgccagcacttcgggtgggaactcatgagagactgccgcagacaatgcggaggaaggcggggatgacgtcaaatcatcatgccccttatgacctgggctacacacgtactacaatgggagttaatagacggaagcgaaaccgcgaggtggagcaaacccgagaaacactctctcagttcggatcgtaggctgcaactcgcctacgtgaagtcggaatcgctagtaatcgcaggtcagcatactgcggtgaatacgttcccgggccttgtacacaccgcccgtcacaccacgaaagtcggaagtgcccaaagccggtggggtaaccttcgggagccagccgtctaaggtaaagtcgatgattggggtg

SEQ ID NO: 74 - DNA, 1485 bp, Veillonella dispar
gacgaacgctggcggcgtgcttaacacatgcaagtcgaacgaagagcgatggaagcttgcttctatcaatcttagtggcgaacgggtgagtaacgcgtaatcaacctgcccttcagagggggacaacagttggaaacgactgctaataccgcatacgatctaacctcggcatcgaggatagatgaaaggtggcctctatttataagctatcactgaaggaggggattgcgtctgattagctagttggaggggtaacggcccaccaaggcgatgatcagtagccggtctgagaggatgaacggccacattgggactgagacacggcccagactcctacgggaggcagcagtggggaatcttccgcaatggacgaaagtctgacggagcaacgccgcgtgagtgatgacggccttcgggttgtaaagctctgttaatcgggacgaaaggccttcttgcgaatagttagaaggattgacggtaccggaatagaaagccacggctaactacgtgccagcagccgcggtaatacgtaggtggcaagcgttgtccggaattattgggcgtaaagcgcgcgcaggcggattggtcagtctgtcttaaaagttcggggcttaaccccgtgatgggatggaaactgccaatctagagtatcggagaggaaagtggaattcctagtgtagcggtgaaatgcgtagatattaggaagaacaccagtggcgaaggcgactttctggacgaaaactgacgctgaggcgcgaaagccaggggagcgaacgggattagataccccggtagtcctggccgtaaacgatgggtactaggtgtaggaggtatcgaccccttctgtgccggagttaacgcaataagtaccccgcctggggagtacgaccgcaaggttgaaactcaaaggaattgacgggggcccgcacaagcggtggagtatgtggtttaattcgacgcaacgcgaagaaccttaccaggtcttgacattgatggacagaactagagatagttcctcttcttcggaagccagaaaacaggtggtgcacggttgtcgtcagctcgtgtcgtgagatgttgggttaagtcccgcaacgagcgcaacccctatcttatgttgccagcactttgggtgggaactcatgagagactgccgcagacaatgcggaggaaggcggggatgacgtcaaatcatcatgccccttatgacctgggctacacacgtactacaatgggagttaatagacggaagcaataccgcgaggtggagcaaacccgagaaacactctctcagttcggatcgtaggctgcaactcgcctacgtgaagtcggaatcgctagtaatcgcaggtcagcatactgcggtgaatacgttcccgggccttgtacacaccgcccgtcacaccacgaaagtcggaagtgcccaaagccggtggggtaaccttcgggagccagccgtctaaggtaaagtcgatgattggggtg

SEQ ID NO: 75 - DNA, 1485 bp, Veillonella parvula
gacgaacgctggcggcgtgcttaacacatgcaagtcgaacgaagagcgatggaagcttgcttctatcaatcttagtggcgaacgggtgagtaacgcgtaatcaacctgcccttcagagggggacaacagttggaaacgactgctaataccgcatacgatctaacctcggcatcgaggaaagatgaaaggtggcctctatttataagctatcactgaaggaggggattgcgtctgattagctagttggaggggtaacggcccaccaaggcgatgatcagtagccggtctgagaggatgaacggccacattgggactgagacacggcccagactcctacgggaggcagcagtggggaatcttccgcaatggacgaaagtctgacggagcaacgccgcgtgagtgatgacggccttcgggttgtaaagctctgttaatcgggacgaaaggccttcttgcgaacagttagaaggattgacggtaccggaatagaaagccacggctaactacgtgccagcagccgcggtaatacgtaggtggcaagcgttgtccggaattattgggcgtaaagcgcgcgcaggcggatcagtcagtctgtcttaaaagttcggggcttaaccccgtgatgggatggaaactgctgatctagagtatcggagaggaaagtggaattcctagtgtagcggtgaaatgcgtagatattaggaagaacaccagtggcgaaggcgactttctggacgaaaactgacgctgaggcgcgaaagccaggggagcgaacgggattagataccccggtagtcctggccgtaaacgatgggtactaggtgtaggaggtatcgaccccttctgtgccggagttaacgcaataagtaccccgcctggggagtacgaccgcaaggttgaaactcaaaggaattgacgggggcccgcacaagcggtggagtatgtggtttaattcgacgcaacgcgaagaaccttaccaggtcttgacattgatggacagaaccagagatggttcctcttcttcggaagccagaaaacaggtggtgcacggttgtcgtcagctcgtgtcgtgagatgttgggttaagtcccgcaacgagcgcaacccctatcttatgttgccagcactttgggtgggaactcatgagagactgccgcagacaatgcggaggaaggcggggatgacgtcaaatcatcatgccccttatgacctgggctacacacgtactacaatgggagttaatagacggaagcgagatcgcgagatggagcaaacccgagaaacactctctcagttcggatcgtaggctgcaactcgcctacgtgaagtcggaatcgctagtaatcgcaggtcagcatactgcggtgaatacgttcccgggccttgtacacaccgcccgtcacaccacgaaagtcggaagtgcccaaagccggtggggtaaccttcgggagccagccgtctaaggtaaagtcgatgattggggtg

SEQ ID NO: 76 - DNA, 1449 bp, Dysgonomonas mossii
gatgaacgctagcgataggcctaacacatgcaagtcgaggggcagcatagagtagcaatactttgatggcgaccggcgcacgggtgagtaacacgtatgcaacctacctacatcaggggaataacccggagaaattcggactaataccgcataatacagggatgccgcatggcaatatttgttaaagatttatcggatgtagatgggcatgcgttccattagctggttggtaaggtaacggcttaccaaggcaacgatggataggggaactgagaggtttgtcccccacactggaactgagacacggaccagactcctacgggaggcagcagtgaggaatattggtcaatggacgagagtctgaaccagccaaatcgcgtgaaggaagactgccctacgggttgtaaacttcttttgtacaggaataaaagacattacgtgtagtgtattgcatgtactgtacgaataagcatcggctaactccgtgccagcagccgcggtaatacggaggatgcgagcgttatccggatttattgggtttaaagggtgcgcaggcgggattttaagtcagcggtgaaattttcaggctcaacctgaacactgccgttgaaactgggattcttgagtatggatgaagtaggcggaattcgttgtgtagcggtgacatgcttagatataacgaggaactccgattgcgtaggcagcttactaagccataactgacgctcaagcacgaaagcgtggggatcaaacaggattagataccctggtagtccacgccgtaaacgatgattactagttgtttgcgatataccgtaagtgactaagcgaaagcgataagtaatccacctggggagtacgccggcaacggtgaaactcaaaggaattgacgggggcccgcacaagcggaggaacatgtggtttaattcgatgatacgcgaggaaccttacccgggcttgaaatgtacctgaccgtccttgaaaggggacttctagcaatagcaggtatgtaggtgctgcatggttgtcgtcagctcgtgccgtgaggtgtcggcttaagtgccataacgagcgcaacccacattattagttactaacaggttaagctgaggactctaataagactgccgtcgtaagatgcgaggaaggtgtggatgacgtcaaatcagcacggcccttacgtccggggcgacacacgtgttacaatgggaggtacaaagggctgctacctggtgacaggatgctaatccccaaagcctctcccagttcggatcggagtctgcaactcgactccgtgaagctggattcgctagtaatcgcgcatcagccatggcgcggtgaatacgttcccgggccttgtacacaccgcccgtcaagccatgggagccgggggtatctgaagtgcgtaaccgtaaggagcgtcctagggtaaaactggtgactggggct

SEQ ID NO: 77 - DNA, 1465 bp, Proteus mirabilis
attgaacgctggcggcaggcctaacacatgcaagtcgagcggtaacaggagaaagcttgctttcttgctgacgagcggcggacgggtgagtaatgtatggggatctgcccgatagagggggataactactggaaacggtggctaataccgcataatgtctacggaccaaagcaggggctcttcggaccttgcactatcggatgaacccatatgggattagctagtaggtggggtaaaggctcacctaggcgacgatctctagctggtctgagaggatgatcagccacactgggactgagacacggcccagactcctacgggaggcagcagtggggaatattgcacaatgggcgcaagcctgatgcagccatgccgcgtgtatgaagaaggccttagggttgtaaagtactttcagcggggaggaaggtgataaggttaatacccttgtcaattgacgttacccgcagaagaagcaccggctaactccgtgccagcagccgcggtaatacggagggtgcaagcgttaatcggaattactgggcgtaaagcgcacgcaggcggtcaattaagtcagatgtgaaagccccgagcttaacttgggaattgcatctgaaactggttggctagagtcttgtagaggggggtagaattccatgtgtagcggtgaaatgcgtagagatgtggaggaataccggtggcgaaggcggccccctggacaaagactgacgctcaggtgcgaaagcgtggggagcaaacaggattagataccctggtagtccacgctgtaaacgatgtcgatttagaggttgtggtcttgaaccgtggcttctggagctaacgcgttaaatcgaccgcctggggagtacggccgcaaggttaaaactcaaatgaattgacgggggcccgcacaagcggtggagcatgtggtttaattcgatgcaacgcgaagaaccttacctactcttgacatccagcgaatcctttagagatagaggagtgccttcgggaacgctgagacaggtgctgcatggctgtcgtcagctcgtgttgtgaaatgttgggttaagtcccgcaacgagcgcaacccttatcctttgttgccagcacgtaatggtgggaactcaaaggagactgccggtgataaaccggaggaaggtggggatgacgtcaagtcatcatggcccttacgagtagggctacacacgtgctacaatggcagatacaaagagaagcgacctcgcgagagcaagcggaactcataaagtctgtcgtagtccggattggagtctgcaactcgactccatgaagtcggaatcgctagtaatcgtagatcagaatgctacggtgaatacgttcccgggccttgtacacaccgcccgtcacaccatgggagtgggttgcaaaagaagtaggtagcttaaccttcgggagggcgcttaccactttgtgattcatgactggggtg

SEQ ID NO: 78 - DNA, 1396 bp, Veillonella ratt
aaagtggaagcttgcttctagcgatcttagtggcgaacgggtgagtaacgcgtaaccaacctgcccttcagagggggataacaacgggaaaccgttgctaataccgcgtacgaatgaacttcggcatcggagctcattgaaaggtggcctctatttataagctatcgctgaaggagggggttgcgtctgattagctagttggaggggtaacggcccaccaaggcaatgatcagtagccggtctgagaggatgaacggccacattgggactgagacacggcccaaactcctacgggaagcagcagtggggaatcttccgcaatggacgaaagtctgacggagcaacgccgcgtgagtgatgacggccttcgggttgtaaagctctgttaatcgggacgaatggtctttgtgtgaataatgcaaagatttgacggtaccggaatagaaagccacggctaactacgtgccagcagccgcggtaatacgtaggtggcaagcgttgtccggaattattgggcgtaaagcgcgcgcaggcggtttcataagtctgtcttaaaagtgcggggcttaaccccgtgaggggatggaaactatggaactggagtatcggagaggaaagcggaattcctagtgtagcggtgaaatgcgtagatattaggaagaacaccagtggcgaaggcggctttctggacgacaactgacgctgaggcgcgaaagccaggggagcgaacgggattagataccccggtagtcctggccgtaaacgatgggtactaggtgtaggaggtatcgaccccttctgtgccggagttaacgcaataagtaccccgcctggggagtacggtcgcaaggctgaaactcaaaggaattgacgggggcccgcacaagcggtggagtatgtggtttaattcgacgcaacgcgaagaaccttaccaggtcttgacattgatggacgaaacaagagattgtttttctccttcgggagccagaaaacaggtggtgcacggctgtcgtcagctcgtgtcgtgagatgttgggttaagtcccgcaacgagcgcaacccctatcttatgttgccagcacttcgggtgggaactcatgagagactgccgcagacaatgcggaggaaggcggggatgacgtcaagtcatcatgccccttatgacctgggctacacacgtactacaatgggctttaatagagggaagcgaaaccgcgaggtggagcaaaccccagaaacaagctctcagttcggatcgtaggctgcaactcgcctacgtgaagtcggaatcgctagtaatcgcaggtcagcatactgcggtgaatacgttcccgggccttgtacacaccgcccgtcacaccacgaaagtcggaagtacccaaagccggtggggtaa

SEQ ID NO: 79 - DNA, 1410 bp, Acetobacter pasteurianus
agcgaacgctggcggcatgcttaacacatgcaagtcgcacgaaggtttcggccttagtggcggacgggtgagtaacgcgtaggtatctatccatgggtgggggataacactgggaaactggtgctaataccgcatgacacctgagggtcaaaggcgcgagtcgcctgtggaggagcctgcgtttgattagctagttggtggggtaaaggcctaccaaggcgatgatcaatagctggtttgagaggatgatcagccacactgggactgagacacggcccagactcctacgggaggcagcagtggggaatattggacaatgggggcaaccctgatccagcaatgccgcgtgtgtgaagaaggtcttcggattgtaaagcactttcgacggggacgatgatgacggtacccgtagaagaagccccggctaacttcgtgccagcagccgcggtaatacgaagggggctagcgttgctcggaatgactgggcgtaaagggcgtgtaggcggtttgtacagtcagatgtgaaatccccgggcttaacctgggagctgcatttgatacgtgcagactagagtgtgagagagggttgtggaattcccagtgtagaggtgaaattcgtagatattgggaagaacaccggtggcgaaggcggcaacctggctcattactgacgctgaggcgcgaaagcgtggggagcaaacaggattagataccctggtagtccacgctgtaaacgatgtgtgctagatgttgggtgacttagtcattcagtgtcgcagttaacgcgttaagcacaccgcctggggagtacggccgcaaggttgaaactcaaaggaattgacgggggcccgcacaagcggtggagcatgtggtttaattcgaagcaacgcgcagaaccttaccagggcttgaatgtagaggctgcaagcagagatgtttgtttcccgcaagggacctctaacacaggtgctgcatggctgtcgtcagctcgtgtcgtgagatgttgggttaagtcccgcaacgagcgcaacccctatctttagttgccatcaggttgggctgggcactctagagagactgccggtgacaagccggaggaaggtggggatgacgtcaagtcctcatggcccttatgtcctgggctacacacgtgctacaatggcggtgacagtgggaagctaggtggtgacaccatgctgatctctaaaagccgtctcagttcggattgcactctgcaactcgagtgcatgaaggtggaatcgctagtaatcgcggatcagcatgccgcggtgaatacgttcccgggccttgtacacaccgcccgtcacaccatgggagttggtttgaccttaagccggtgagcgaaccgcaaggacgcagccgaccacggtcgggtcagcgactggggtg

SEQ ID NO: 80 - DNA, 1453 bp, Achromobacter xylosoxidans
attgaacgctagcgggatgcctgacacatgcaagtcgaacggcagcacggacttcggtctggtggcgagtggcgaacgggtgagtaatgtatcggaacgtgcccagtagcgggggataactacgcgaaagcgtagctaataccgcatacgccctacgggggaaagcaggggatcgcaagaccttgcactattggagcggccgatatcggattagctagttggtggggtaacggctcaccaaggcgacgatccgtagctggtttgagaggacgaccagccacactgggactgagacacggcccagactcctacgggaggcagcagtggggaattttggacaatgggggaaaccctgatccagccatcccgcgtgtgcgatgaaggccttcgggttgtaaagcacttttggcaggaaagaaacgtcgcgggttaatacctcgcgaaactgacggtacctgcagaataagcaccggctaactacgtgccagcagccgcggtaatacgtagggtgcaagcgttaatcggaattactgggcgtaaagcgtgcgcaggcggttcggaaagaaagatgtgaaatcccagagcttaactttggaactgcatttttaactaccgggctagagtgtgtcagagggaggtggaattccgcgtgtagcagtgaaatgcgtagatatgcggaggaacaccgatggcgaaggcagcctcctgggataacactgacgctcatgcacgaaagcgtggggagcaaacaggattagataccctggtagtccacgccctaaacgatgtcaactagctgttggggccttcgggccttggtagcgcagctaacgcgtgaagttgaccgcctggggagtacggtcgcaagattaaaactcaaaggaattgacggggacccgcacaagcggtggatgatgtggattaattcgatgcaacgcgaaaaaccttacctacccttgacatgtctggaatgccgaagagatttggcagtgctcgcaagagaaccggaacacaggtgctgcatggctgtcgtcagctcgtgtcgtgagatgttgggttaagtcccgcaacgagcgcaacccttgtcattagttgctacgaaagggcactctaatgagactgccggtgacaaaccggaggaaggtggggatgacgtcaagtcctcatggcccttatgggtagggcttcacacgtcatacaatggtcgggacagagggtcgccaacccgcgagggggagccaatcccagaaacccgatcgtagtccggatcgcagtctgcaactcgactgcgtgaagtcggaatcgctagtaatcgcggatcagcatgtcgcggtgaatacgttcccgggtcttgtacacaccgcccgtcacaccatgggagtgggttttaccagaagtagttagcctaaccgcaaggggggcgattaccacggtaggattcatgactggggtg

SEQ ID NO: 81 - DNA, 1479 bp, Acidaminococcus intestini
gacgaacgctggcggcgtgcttaacacatgcaagtcgaacggagaacttatttcggtaagttcttagtggcgaacgggtgagtaacgcgtgggcaacctgccctccagttggggacaacattccgaaagggatgctaataccgaatgtgctccctcctccgcatggaggagggaggaaagatggcctctgcttgcaagctatcgctggaagatgggcccgcgtctgattagctagttggtggggtaacggctcaccaaggcgatgatcagtagccggtctgagaggatgaacggccacattgggactgagacacggcccaaactcctacgggaggcagcagtggggaatcttccgcaatggacgaaagtctgacggagcaacgccgcgtgagtgatgaaggtcttcggattgtaaaactctgttgttagggacgaaagcaccgtgttcgaacaggtcatggtgttgacggtacctaacgaggaagccacggctaactacgtgccagcagccgcggtaatacgtaggtggcaagcgttgtccggaattattgggcgtaaagagcatgtaggcgggcttttaagtctgacgtgaaaatgcggggcttaaccccgtatggcgttggatactggaagtcttgagtgcaggagaggaaaggggaattcccagtgtagcggtgaaatgcgtagatattgggaggaacaccagtggcgaaggcgcctttctggactgtgtctgacgctgagatgcgaaagccagggtagcaaacgggattagataccccggtagtcctggccgtaaacgatggatactaggtgtaggaggtatcgaccccttctgtgccggagttaacgcaataagtatcccgcctggggactacgatcgcaagattgaaactcaaaggaattgacgggggcccgcacaagcggtggagtatgtggtttaattcgacgcaacgcgaagaaccttaccaaggcttgacattgagtgaaagacctagagataggtccctcccttcggggacacgaaaacaggtggtgcatggctgtcgtcagctcgtgtcgtgagatgttgggttaagtcccgcaacgagcgcaacccctatcctatgttaccagcgcgtaatggcggggactcataggagactgccagggataacttggaggaaggcggggatgacgtcaagtcatcatgccccttatgtcttgggctacacacgtactacaatggtcggcaacaaagggcagcgaaaccgcgaggtggagcaaatcccagaaacccgaccccagttcggatcgtaggctgcaacccgcctacgtgaagttggaatcgctagtaatcgcaggtcagcatactgcggtgaatacgttcccgggccttgtacacaccgcccgtcacaccacgaaagttggtaacacccgaagccggtgagataaccttttaggagtcagctgtctaaggtggggccgatgattggggtg

SEQ ID NO: 82 - DNA, 1459 bp, Acinetobacter baumannii
attgaacgctggcggcaggcttaacacatgcaagtcgagcgggggaaggtagcttgctaccggacctagcggcggacgggtgagtaatgcttaggaatctgcctattagtgggggacaacatctcgaaagggatgctaataccgcatacgtcctacgggagaaagcaggggatcttcggaccttgcgctaatagatgagcctaagtcggattagctagttggtggggtaaaggcctaccaaggcgacgatctgtagcgggtctgagaggatgatccgccacactgggactgagacacggcccagactcctacgggaggcagcagtggggaatattggacaatggggggaaccctgatccagccatgccgcgtgtgtgaagaaggccttatggttgtaaagcactttaagcgaggaggaggctactttagttaatacctagagatagtggacgttactcgcagaataagcaccggctaactctgtgccagcagccgcggtaatacagagggtgcgagcgttaatcggatttactgggcgtaaagcgtgcgtaggcggcttattaagtcggatgtgaaatccccgagcttaacttgggaattgcattcgatactggtgagctagagtatgggagaggatggtagaattccaggtgtagcggtgaaatgcgtagagatctggaggaataccgatggcgaaggcagccatctggcctaatactgacgctgaggtacgaaagcatggggagcaaacaggattagataccctggtagtccatgccgtaaacgatgtctactagccgttggggcctttgaggctttagtggcgcagctaacgcgataagtagaccgcctggggagtacggtcgcaagactaaaactcaaatgaattgacgggggcccgcacaagcggtggagcatgtggtttaattcgatgcaacgcgaagaaccttacctggccttgacatactagaaactttccagagatggattggtgccttcgggaatctagatacaggtgctgcatggctgtcgtcagctcgtgtcgtgagatgttgggttaagtcccgcaacgagcgcaacccttttccttacttgccagcatttcggatgggaactttaaggatactgccagtgacaaactggaggaaggcggggacgacgtcaagtcatcatggcccttacggccagggctacacacgtgctacaatggtcggtacaaagggttgctacacagcgatgtgatgctaatctcaaaaagccgatcgtagtccggattggagtctgcaactcgactccatgaagtcggaatcgctagtaatcgcggatcagaatgccgcggtgaatacgttcccgggccttgtacacaccgcccgtcacaccatgggagtttgttgcaccagaagtagctagcctaactgcaaagagggcggttaccacggtgtggccgatgactggggtg

SEQ ID NO: 83 - DNA, 1460 bp, Acinetobacter calcoaceticus
attgaacgctggcggcaggcttaacacatgcaagtcgagcggagtgatggtgcttgcactatcacttagcggcggacgggtgagtaatgcttaggaatctgcctattagtgggggacaacatttcgaaaggaatgctaataccgcatacgtcctacgggagaaagcaggggatcttcggaccttgcgctaatagatgagcctaagtcggattagctagttggtggggtaaaggcctaccaaggcgacgatctgtagcgggtctgagaggatgatccgccacactgggactgagacacggcccagactcctacgggaggcagcagtggggaatattggacaatgggcgcaagcctgatccagccatgccgcgtgtgtgaagaaggccttatggttgtaaagcactttaagcgaggaggaggctactgaagttaataccttcagatagtggacgttactcgcagaataagcaccggctaactctgtgccagcagccgcggtaatacagagggtgcaagcgttaatcggatttactgggcgtaaagcgcgcgtaggcggctaattaagtcaaatgtgaaatccccgagcttaacttgggaattgcattcgatactggttagctagagtgtgggagaggatggtagaattccaggtgtagcggtgaaatgcgtagagatctggaggaataccgatggcgaaggcagccatctggcctaacactgacgctgaggtgcgaaagcatggggagcaaacaggattagataccctggtagtccatgccgtaaacgatgtctactagccgttggggcctttgaggctttagtggcgcagctaacgcgataagtagaccgcctggggagtacggtcgcaagactaaaactcaaatgaattgacgggggcccgcacaagcggtggagcatgtggtttaattcgatgcaacgcgaagaaccttacctggccttgacatagtaagaactttccagagatggattggtgccttcgggaacttacatacaggtgctgcatggctgtcgtcagctcgtgtcgtgagatgttgggttaagtcccgcaacgagcgcaacccttttccttatttgccagcgagtaatgtcgggaactttaaggatactgccagtgacaaactggaggaaggcggggacgacgtcaagtcatcatggcccttacggccagggctacacacgtgctacaatggtcggtacaaagggttgctacctagcgataggatgctaatctcaaaaagccgatcgtagtccggattggagtctgcaactcgactccatgaagtcggaatcgctagtaatcgcggatcagaatgccgcggtgaatacgttcccgggccttgtacacaccgcccgtcacaccatgggagtttgttgcaccagaagtaggtagtctaaccgcaaggaggacgcttaccacggtgtggccgatgactggggtg

SEQ ID NO: 84 - DNA, 1459 bp, Acinetobacter junii
attgaacgctggcggcaggcttaacacatgcaagtcgagcggagatgaggtgcttgcaccttatcttagcggcggacgggtgagtaatgcttaggaatctgcctattagtgggggacaacattccgaaaggaatgctaataccgcatacgtcctacgggagaaagcaggggatcttcggaccttgcgctaatagatgagcctaagtcggattagctagttggtggggtaaaggcctaccaaggcgacgatctgtagcgggtctgagaggatgatccgccacactgggactgagacacggcccagactcctacgggaggcagcagtggggaatattggacaatggggggaaccctgatccagccatgccgcgtgtgtgaagaaggccttatggttgtaaagcactttaagcgaggaggaggctaccgtgactaatactcaaggagagtggacgttactcgcagaataagcaccggctaactctgtgccagcagccgcggtaatacagagggtgcgagcgttaatcggatttactgggcgtaaagcgtgcgtaggcggctttttaagtcggatgtgaaatccccgagcttaacttgggaattgcattcgatactgggaagctagagtatgggagaggatggtagaattccaggtgtagcggtgaaatgcgtagagatctggaggaataccgatggcgaaggcagccatctggcctaatactgacgctgaggtacgaaagcatggggagcaaacaggattagataccctggtagtccatgccgtaaacgatgtctactagccgttggggcctttgaggctttagtggcgcagctaacgcgataagtagaccgcctggggagtacggtcgcaagactaaaactcaaatgaattgacgggggcccgcacaagcggtggagcatgtggtttaattcgatgcaacgcgaagaaccttacctggccttgacatactagaaactttccagagatggattggtgccttcgggaatctagatacaggtgctgcatggctgtcgtcagctcgtgtcgtgagatgttgggttaagtcccgcaacgagcgcaacccttttccttacttgccagcatttcggatgggaactttaaggatactgccagtgacaaactggaggaaggcggggacgacgtcaagtcatcatggcccttacggccagggctacacacgtgctacaatggtcggtacaaagggttgctacacagcgatgtgatgctaatctcaaaaagccgatcgtagtccggattggagtctgcaactcgactccatgaagtcggaatcgctagtaatcgcggatcagaatgccgcggtgaatacgttcccgggccttgtacacaccgcccgtcacaccatgggagtttgttgcaccagaagtaggtagtctaaccgcaaggaggacgcttaccacggtgtggccgatgactggggtg

SEQ ID NO: 85 - DNA, 1460 bp, Acinetobacter lwoffii
attgaacgctggcggcaggcttaacacatgcaagtcgagcggggaaaggtagcttgctacctaacctagcggcggacgggtgagtaatgcttaggaatctgcctattagtgggggacaacatctcgaaagggatgctaataccgcatacgtcctacgggagaaagcaggggaccttcgggccttgcgctaatagatgagcctaagtcggattagctagttggtggggtaaaggcctaccaaggcgacgatctgtagcgggtctgagaggatgatccgccacactgggactgagacacggcccagactcctacgggaggcagcagtggggaatattggacaatggggggaaccctgatccagccatgccgcgtgtgtgaagaaggccttttggttgtaaagcactttaagcgaggaggaggctaccgagattaatactcttggatagtggacgttactcgcagaataagcaccggctaactctgtgccagcagccgcggtaatacagagggtgcaagcgttaatcggatttactgggcgtaaagcgcgcgtaggtggccaattaagtcaaatgtgaaatccccgagcttaacttgggaattgcattcgatactggttggctagagtatgggagaggatggtagaattccaggtgtagcggtgaaatgcgtagagatctggaggaataccgatggcgaaggcagccatctggcctaatactgacactgaggtgcgaaagcatggggagcaaacaggattagataccctggtagtccatgccgtaaacgatgtctactagccgttggggcctttgaggctttagtggcgcagctaacgcgataagtagaccgcctggggagtacggtcgcaagactaaaactcaaatgaattgacgggggcccgcacaagcggtggagcatgtggtttaattcgatgcaacgcgaagaaccttacctggtcttgacatagtaagaactttccagagatggattggtgccttcgggaacttacatacaggtgctgcatggctgtcgtcagctcgtgtcgtgagatgttgggttaagtcccgcaacgagcgcaacccttttccttatttgccagcgggttaagccgggaactttaaggatactgccagtgacaaactggaggaaggcggggacgacgtcaagtcatcatggcccttacgaccagggctacacacgtgctacaatggtcggtacaaagggttgctacctcgcgagaggatgctaatctcaaaaagccgatcgtagtccggattggagtctgcaactcgactccatgaagtcggaatcgctagtaatcgcggatcagaatgccgcggtgaatacgttcccgggccttgtacacaccgcccgtcacaccatgggagtttgttgcaccagaagtaggtagtctaaccttaggggggacgcttaccacggtgtggcagatgactggggtg

SEQ ID NO: 86 - DNA, 1460 bp, Acinetobacter pittii
attgaacgctggcggcaggcttaacacatgcaagtcgagcggagagaggtagcttgctactgatcttagcggcggacgggtgagtaatgcttaggaatctgcctattagtgggggacaacatttcgaaaggaatgctaataccgcatacgtcctacgggagaaagcaggggatcttcggaccttgcgctaatagatgagcctaagtcggattagctagttggtggggtaaaggcctaccaaggcgacgatctgtagcgggtctgagaggatgatccgccacactgggactgagacacggcccagactcctacgggaggcagcagtggggaatattggacaatgggcgcaagcctgatccagccatgccgcgtgtgtgaagaaggccttatggttgtaaagcactttaagcgaggaggaggctactttagttaatacctagagatagtggacgttactcgcagaataagcaccggctaactctgtgccagcagccgcggtaatacagagggtgcaagcgttaatcggatttactgggcgtaaagcgcgcgtaggcggctaattaagtcaaatgtgaaatccccgagcttaacttgggaattgcattcgatactggttagctagagtgtgggagaggatggtagaattccaggtgtagcggtgaaatgcgtagagatctggaggaataccgatggcgaaggcagccatctggcctaacactgacgctgaggtgcgaaagcatggggagcaaacaggattagataccctggtagtccatgccgtaaacgatgtctactagccgttggggcctttgaggctttagtggcgcagctaacgcgataagtagaccgcctggggagtacggtcgcaagactaaaactcaaatgaattgacgggggcccgcacaagcggtggagcatgtggtttaattcgatgcaacgcgaagaaccttacctggccttgacatagtaagaactttccagagatggattggtgccttcgggaacttacatacaggtgctgcatggctgtcgtcagctcgtgtcgtgagatgttgggttaagtcccgcaacgagcgcaacccttttccttatttgccagcgagtaatgtcgggaactttaaggatactgccagtgacaaactggaggaaggcggggacgacgtcaagtcatcatggcccttacggccagggctacacacgtgctacaatggtcggtacaaagggttgctacctagcgataggatgctaatctcaaaaagccgatcgtagtccggattggagtctgcaactcgactccatgaagtcggaatcgctagtaatcgcggatcagaatgccgcggtgaatacgttcccgggccttgtacacaccgcccgtcacaccatgggagtttgttgcaccagaagtagctagcctaactgcaaagagggcggttaccacggtgtggccgatgactggggtg

SEQ ID NO: 87 - DNA, 1459 bp, Acinetobacter radioresistens
attgaacgctggcggcaggcttaacacatgcaagtcgagcggatgaaggtagcttgctactggattcagcggcggacgggtgagtaatgcttaggaatctgcctattagtgggggacaacgttccgaaaggagcgctaataccgcatacgtcctacgggagaaagcaggggacctttgggccttgcgctaatagatgagcctaagtcggattagctagttggtagggtaaaggcctaccaaggcgacgatctgtagcgggtctgagaggatgatccgccacactgggactgagacacggcccagactcctacgggaggcagcagtggggaatattggacaatggggggaaccctgatccagccatgccgcgtgtgtgaagaaggccttttggttgtaaagcactttaagcgaggaggaggctacctagattaatactttaggatagtggacgttactcgcagaataagcaccggctaactctgtgccagcagccgcggtaatacagagggtgcgagcgttaatcggatttactgggcgtaaagcgtgcgtaggcggccaattaagtcaaatgtgaaatccccgagcttaacttgggaattgcattcgatactggttggctagagtatgggagaggatggtagaattccaggtgtagcggtgaaatgcgtagagatctggaggaataccgatggcgaaggcagccatctggcctaatactgacgctgaggtacgaaagcatggggagcaaacaggattagataccctggtagtccatgccgtaaacgatgtctactagccgttggggcccttgaggctttagtggcgcagctaacgcgataagtagaccgcctggggagtacggtcgcaagactaaaactcaaatgaattgacgggggcccgcacaagcggtggagcatgtggtttaattcgatgcaacgcgaagaaccttacctggccttgacatacagagaactttccagagatggattggtgccttcgggaactctgatacaggtgctgcatggctgtcgtcagctcgtgtcgtgagatgttgggttaagtcccgcaacgagcgcaacccttttccttatttgccagcacttcgggtgggaactttaaggatactgccagtgacaaactggaggaaggcggggacgacgtcaagtcatcatggcccttacggccagggctacacacgtgctacaatggtcggtacaaagggttgctacacagcgatgtgatgctaatctcaaaaagccgatcgtagtccggattggagtctgcaactcgactccatgaagtcggaatcgctagtaatcgcggatcagaatgccgcggtgaatacgttcccgggccttgtacacaccgcccgtcacaccatgggagtttgttgcaccagaagtaggtagtctaaccgcaaggaggacgcttaccacggtgtggccgatgactggggtg

SEQ ID NO: 88 - DNA, 1460 bp, Acinetobacter schindleri
attgaacgctggcggcaggcttaacacatgcaagtcgagcggggaaaggtagcttgctacctgacctagcggcggacgggtgagtaatgcttaggaatctgcctattagtgggggacaacgttccgaaaggaacgctaataccgcatacgccctacgggggaaagcaggggatcttcggaccttgcgctaatagatgagcctaagtcggattagctagttggtggggtaaaggcctaccaaggcgacgatctgtagcgggtctgagaggatgatccgccacactgggactgagacacggcccagactcctacgggaggcagcagtggggaatattggacaatgggcggaagcctgatccagccatgccgcgtgtgtgaagaaggccttttggttgtaaagcactttaagcgaggaggaggctcctttagttaatacctaaagtgagtggacgttactcgcagaataagcaccggctaactctgtgccagcagccgcggtaatacagagggtgcgagcgttaatcggatttactgggcgtaaagcgtgcgtaggcggctttttaagtcggatgtgaaatccctgagcttaacttaggaattgcattcgatactggaaagctagagtatgggagaggatggtagaattccaggtgtagcggtgaaatgcgtagagatctggaggaataccgatggcgaaggcagccatctggcctaatactgacgctgaggtacgaaagcatggggagcaaacaggattagataccctggtagtccatgccgtaaacgatgtctactagccgttggggcctttgaggctttagtggcgcagctaacgcgataagtagaccgcctggggagtacggtcgcaagactaaaactcaaatgaattgacgggggcccgcacaagcggtggagcatgtggtttaattcgatgcaacgcgaagaaccttacctggccttgacatactaagaactttccagagatggattggtgccttcgggaacttagatacaggtgctgcatggctgtcgtcagctcgtgtcgtgagatgttgggttaagtcccgcaacgagcgcaacccttttccttatttgccatcgggttatgccgggaactttaaggatactgccagtgacaaactggaggaaggcggggacgacgtcaagtcatcatggcccttacggccagggctacacacgtgctacaatggtcggtacaaagggttgctacctcgcgagaggatgctaatctcaaaaagccgatcgtagtccggatcgcagtctgcaactcgactgcgtgaagtcggaatcgctagtaatcgcggatcagaatgccgcggtgaatacgttcccgggccttgtacacaccgcccgtcacaccatgggagtttgttgcaccagaagtaggtagtctaaccgcaaggaggacgcttaccacggtgtggccgatgactggggtg

SEQ ID NO: 89 - DNA, 1460 bp, Acinetobacter towneri
attgaacgctggcggcaggcttaacacatgcaagtcgagcgggcgaggttgcttcggtaactgagctagcggcggacgggtgagtaatgcttaggaatctgcctattagtgggggacaacattccgaaagggatgctaataccgcatacgtcctacgggagaaagcaggggctctttatgaccttgcgctaatagatgagcctaagtcggattagctagttggtggggtaaaggcctaccaaggcgacgatctgtagcgggtctgagaggatgatccgccacactgggactgagacacggcccagactcctacgggaggcagcagtggggaatattggacaatggggggaaccctgatccagccatgccgcgtgtgtgaagaaggccttttggttgtaaagcactttaagtggggaggaggcttacctggttaatacctgggctaagtggacgttacccacagaataagcaccggctaactctgtgccagcagccgcggtaatacagagggtgcgagcgttaatcggatttactgggcgtaaagcgcgcgtaggtggctaattaagtcaaatgtgaaatccccgagcttaacttgggaattgcattcgatactggttggctagagtatgggagaggatggtagaattccaggtgtagcggtgaaatgcgtagagatctggaggaataccgatggcgaaggcagccatctggcctaatactgacactgaggtgcgaaagcatggggagcaaacaggattagataccctggtagtccatgccgtaaacgatgtctactagccgttgggggatttgatcctttagtggcgcagctaacgcgataagtagaccgcctggggagtacggtcgcaagactaaaactcaaatgaattgacgggggcccgcacaagcggtggagcatgtggtttaattcgatgcaacgcgaagaaccttacctggccttgacatagtagagactttccagagatggattggtgccttcgggaatctacatacaggtgctgcatggctgtcgtcagctcgtgtcgtgagatgttgggttaagtcccgcaacgagcgcaacccttttccttacttgccagcatttcggatgggaactttaaggatactgccagtgacaaactggaggaaggcggggacgacgtcaagtcatcatggcccttacggccagggctacacacgtgctacaatggtcggtacaaagggttgctacacagcgatgtgatgctaatctcaaaaagccgatcgtagtccggatcgcagtctgcaactcgactgcgtgaagtcggaatcgctagtaatcgcggatcagaatgccgcggtgaatacgttcccgggccttgtacacaccgcccgtcacaccatgggagtttgttgcaccagaagtaggtagtctaaccgcaaggaggacgcttaccacggtgtggccgatgactggggtg

SEQ ID NO: 90 - DNA, 1459 bp, Acinetobacter ursingii
attgaacgctggcggcaggcttaacacatgcaagtcgagcggagagaggtagcttgctactgatcttagcggcggacgggtgagtaatacttaggaatctggctattagtgggggacaacatttcgaaagggatgctaataccgcatacgtcctacgggagaaagcaggggatcttcggaccttgcgctaatagatgagcctaagtcggattagctagttggtggggtaaaggcctaccaaggcgacgatctgtagcgggtctgagaggatgatccgccacactgggactgagacacggcccagactcctacgggaggcagcagtggggaatattggacaatggggggaaccctgatccagccatgccgcgtgtgtgaagaaggccttatggttgtaaagcactttaagcgaggaggagggtactggtattaatactaccaggtactggacgttactcgcagaataagcaccggctaactctgtgccagcagccgcggtaatacagagggtgcgagcgttaatcggatttactgggcgtaaagcgtgcgtaggcggctaattgagtcggatgtgaaatccccgagcttaacttgggaattgcattcgatactggttagctagagtgtgggagaggatggtagaattccaggtgtagcggtgaaatgcgtagagatctggaggaataccgatggcgaaggcagccatctggcctaacactgacgctgaggtacgaaagcatggggagcaaacaggattagataccctggtagtccatgccgtaaacgatgtctactagccgttggtctctttgagggattagtggcgcagctaacgcgataagtagaccgcctggggagtacggtcgcaagactaaaactcaaatgaattgacgggggcccgcacaagcggtggagcatgtggtttaattcgatgcaacgcgaagaaccttacctggtcttgacatagtaagaactttccagagatggattggtgccttcgggaacttacatacaggtgctgcatggctgtcgtcagctcgtgtcgtgagatgttgggttaagtcccgcaacgagcgcaacccttttccttatttgccagcactttgggtgggaactttaaggatactgccagtgacaaactggaggaaggcggggacgacgtcaagtcatcatggcccttacgaccagggctacacacgtgctacaatggtcggtacaaagggttgctacctagcgataggatgctaatctcaaaaagccgatcgtagtccggattggagtctgcaactcgactccatgaagtcggaatcgctagtaatcgcggatcagaatgccgcggtgaatacgttcccgggccttgtacacaccgcccgtcacaccatgggagtttgttgcaccagaagtggatagtctaactgcaaagaggacgttcaccacggtgtggccgatgactggggtg

SEQ ID NO: 91 - DNA, 1460 bp, Acinetobacter variabilis
attgaacgctggcggcaggcttaacacatgcaagtcgagcggggatagggtgcttgcacctgattcctagcggcggacgggtgagtaatgcttaggaatctgcctattagtgggggacaacgttccgaaagggacgctaataccgcatacgtcctacgggagaaagcaggggatcttcggaccttgcgctaatagatgagcctaagtcggattagctagttggtggggtaaaggcctaccaaggcgacgatctgtagcgggtctgagaggatgatccgccacactgggactgagacacggcccagactcctacgggaggcagcagtggggaatattggacaatggggggaaccctgatccagccatgccgcgtgtgtgaagaaggccttttggttgtaaagcactttaagcgaggaggaggcttacctggttaatacctgggataagtggacgttactcgcagaataagcaccggctaactctgtgccagcagccgcggtaatacagagggtgcaagcgttaatcggatttactgggcgtaaagcgcgcgtaggtggctaattaagtcaaatgtgaaatccccgagcttaacttgggaattgcattcgatactggttagctagagtatgggagaggatggtagaattccaggtgtagcggtgaaatgcgtagagatctggaggaataccgatggcgaaggcagccatctggcctaatactgacactgaggtgcgaaagcatggggagcaaacaggattagataccctggtagtccatgccgtaaacgatgtctactagccgttggggcccttgaggctttagtggcgcagctaacgcgataagtagaccgcctggggagtacggtcgcaagactaaaactcaaatgaattgacgggggcccgcacaagcggtggagcatgtggtttaattcgatgcaacgcgaagaaccttacctggccttgacatacagagaactttccagagatggattggtgccttcgggaactctgatacaggtgctgcatggctgtcgtcagctcgtgtcgtgagatgttgggttaagtcccgcaacgagcgcaacccttttccttatttgccagcacttcgggtgggaactttaaggatactgccagtgacaaactggaggaaggcggggacgacgtcaagtcatcatggcccttacggccagggctacacacgtgctacaatggtcggtacaaagggttgctactgcgcgagcagatgctaatctcaaaaagccgatcgtagtccggatcgcagtctgcaactcgactgcgtgaagtcggaatcgctagtaatcgcggatcagaatgccgcggtgaatacgttcccgggccttgtacacaccgcccgtcacaccatgggagtttgttgcaccagaagtagctagtctaaccgcaaggaggacgcttaccacggtgtggccgatgactggggtg

SEQ ID NO: 92 - DNA, 1476 bp, Aeribacillus pallidus
gacgaacgctggcggcgtgcctaatacatgcaagtcgagcggaccgaagggagcttgctcctttaggttagcggcggacgggtgagtaacacgtgggcaacctgccctgcagactgggataacttcgggaaaccggagctaataccggataacaccgaaaaccgcatggttttcggttgaaaggcggcttttagctgtcactgcaggatgggcccgcggcgcattagctagttggtgaggtaacggctcaccaaggcgacgatgcgtagccgacctgagagggtgaccggccacactgggactgagacacggcccagactcctacgggaggcagcagtagggaatcttccgcaatggacgaaagtctgacggagcaacgccgcgtgagcgaagaaggtcttcggatcgtaaagctctgttgtcagggaagaacaagtaccgttcgaacagggcggtaccttgacggtacctgacgaggaagccacggctaactacgtgccagcagccgcggtaatacgtaggtggcaagcgttgtccggaattattgggcgtaaagcgcgcgcaggcggttccttaagtctgatgtgaaatctcgcggctcaaccgcgagcggccattggaaactggggaacttgagtgcaggagaggggagcggaattccacgtgtagcggtgaaatgcgtagagatgtggaggaacaccagtggcgaaggcggctctctggcctgtaactgacgctgaggcgcgaaagcgtggggagcgaacaggattagataccctggtagtccacgccgtaaacgatgagtgctaagtgttagagggtatccaccctttagtgctgcagcaaacgcattaagcactccgcctggggagtacggccgcaaggctgaaactcaaaggaattgacggggacccgcacaagcggtggagcatgtggtttaattcgaagcaacgcgaagaaccttaccaggtcttgacatcccctgacaaccctagagatagggcgttcccctttcggggacagggtgacaggtggtgcatggttgtcgtcagctcgtgtcgtgagatgttgggttaagtcccgcaacgagcgcaacccttgaccttagttgccagcattcagttgggcactctaaggtgactgccggctaaaagtcggaggaaggtggggatgacgtcaaatcatcatgccccttatgacctgggctacacacgtgctacaatgggtggtacaaagggcagcgaaaccgcgaggtggagcgaatcccaaaaaaccactctcagttcggattgcaggctgcaactcgcctgcatgaagccggaatcgctagtaatcgcggatcagcatgccgcggtgaatacgttcccgggtcttgtacacaccgcccgtcacaccacgagagtttgtaacacccgaagtcggtggggtaacccttacgggagccagccgccgaaggtgggacaaatgattggggtg

SEQ ID NO: 93 - DNA, 1467 bp, Aeromonas caviae
attgaacgctggcggcaggcctaacacatgcaagtcgagcggcagcgggaaagtagcttgctacttttgccggcgagcggcggacgggtgagtaatgcctgggaaattgcccagtcgagggggataacagttggaaacgactgctaataccgcatacgccctacgggggaaagcaggggaccttcgggccttgcgcgattggatatgcccaggtgggattagctagttggtgaggtaatggctcaccaaggcgacgatccctagctggtctgagaggatgatcagccacactggaactgagacacggtccagactcctacgggaggcagcagtggggaatattgcacaatgggggaaaccctgatgcagccatgccgcgtgtgtgaagaaggccttcgggttgtaaagcactttcagcgaggaggaaaggtcagtagctaatatctgctggctgtgacgttactcgcagaagaagcaccggctaactccgtgccagcagccgcggtaatacggagggtgcaagcgttaatcggaattactgggcgtaaagcgcacgcaggcggttggataagttagatgtgaaagccccgggctcaacctgggaattgcatttaaaactgtccagctagagtcttgtagaggggggtagaattccaggtgtagcggtgaaatgcgtagagatctggaggaataccggtggcgaaggcggccccctggacaaagactgacgctcaggtgcgaaagcgtggggagcaaacaggattagataccctggtagtccacgccgtaaacgatgtcgatttggaggctgtgtccttgagacgtggcttccggagctaacgcgttaaatcgaccgcctggggagtacggccgcaaggttaaaactcaaatgaattgacgggggcccgcacaagcggtggagcatgtggtttaattcgatgcaacgcgaagaaccttacctggccttgacatgtctggaatcctgcagagatgcgggagtgccttcgggaatcagaacacaggtgctgcatggctgtcgtcagctcgtgtcgtgagatgttgggttaagtcccgcaacgagcgcaacccctgtcctttgttgccagcacgtaatggtgggaactcaagggagactgccggtgataaaccggaggaaggtggggatgacgtcaagtcatcatggcccttacggccagggctacacacgtgctacaatggcgcgtacagagggctgcaagctagcgatagtgagcgaatcccaaaaagcgcgtcgtagtccggattggagtctgcaactcgactccatgaagtcggaatcgctagtaatcgcaaatcagaatgttgcggtgaatacgttcccgggccttgtacacaccgcccgtcacaccatgggagtgggttgcaccagaagtagatagcttaaccttcgggagggcgtttaccacggtgtgattcatgactggggtg

SEQ ID NO: 94 - DNA, 1467 bp, Aeromonas enteropelogenes
attgaacgctggcggcaggcctaacacatgcaagtcgagcggcagcgggaaagtagcttgctacttttgccggcgagcggcggacgggtgagtaatgcctgggaaattgcccagtcgagggggataacagttggaaacgactgctaataccgcatacgccctacgggggaaagcaggggaccttcgggccttgcgcgattggatatgcccaggtgggattagctagttggtgaggtaatggctcaccaaggcgacgatccctagctggtctgagaggatgatcagccacactggaactgagacacggtccagactcctacgggaggcagcagtggggaatattgcacaatgggggaaaccctgatgcagccatgccgcgtgtgtgaagaaggccttcgggttgtaaagcactttcagcgaggaggaaaggtcagtagctaatatctgctggctgtgacgttactcgcagaagaagcaccggctaactccgtgccagcagccgcggtaatacggagggtgcaagcgttaatcggaattactgggcgtaaagcgcacgcaggcggttggataagttagatgtgaaagccccgggctcaacctgggaattgcatttaaaactgtccggctagagtcttgtagaggggggtagaattccaggtgtagcggtgaaatgcgtagagatctggaggaataccggtggcgaaggcggccccctggacaaagactgacgctcaggtgcgaaagcgtggggagcaaacaggattagataccctggtagtccacgccgtaaacgatgtcgatttggaggctgtgtccttgagacgtggcttccggagctaacgcgttaaatcgaccgcctggggagtacggccgcaaggttaaaactcaaatgaattgacgggggcccgcacaagcggtggagcatgtggtttaattcgatgcaacgcgaagaaccttacctggccttgacatgtctggaatcctgcagagatgcgggagtgccttcgggaatcagaacacaggtgctgcatggctgtcgtcagctcgtgtcgtgagatgttgggttaagtcccgcaacgagcgcaacccctgtcctttgttgccagcacgtaatggtgggaactcaagggagactgccggtgataaaccggaggaaggtggggatgacgtcaagtcatcatggcccttacggccagggctacacacgtgctacaatggcgcgtacagagggctgcaagctagcgatagtgagcgaatcccaaaaagcgcgtcgtagtccggattggagtctgcaactcgactccatgaagtcggaatcgctagtaatcgcaaatcagaatgttgcggtgaatacgttcccgggccttgtacacaccgcccgtcacaccatgggagtgggttgcaccagaagtagatagcttaaccttcgggagggcgtttaccacggtgtgattcatgactggggtg

SEQ ID NO: 95 - DNA, 1467 bp, Aeromonas hydrophila
attgaacgctggcggcaggcctaacacatgcaagtcgagcggcagcgggaaagtagcttgctacttttgccggcgagcggcggacgggtgagtaatgcctgggaaattgcccagtcgagggggataacagttggaaacgactgctaataccgcatacgccctacgggggaaagcaggggaccttcgggccttgcgcgattggatatgcccaggtgggattagctagttggtgaggtaatggctcaccaaggcgacgatccctagctggtctgagaggatgatcagccacactggaactgagacacggtccagactcctacgggaggcagcagtggggaatattgcacaatgggggaaaccctgatgcagccatgccgcgtgtgtgaagaaggccttcgggttgtaaagcactttcagcgaggaggaaaggttgatgcctaatacgtatcaactgtgacgttactcgcagaagaagcaccggctaactccgtgccagcagccgcggtaatacggagggtgcaagcgttaatcggaattactgggcgtaaagcgcacgcaggcggttggataagttagatgtgaaagccccgggctcaacctgggaattgcatttaaaactgtccagctagagtcttgtagaggggggtagaattccaggtgtagcggtgaaatgcgtagagatctggaggaataccggtggcgaaggcggccccctggacaaagactgacgctcaggtgcgaaagcgtggggagcaaacaggattagataccctggtagtccacgccgtaaacgatgtcgatttggaggctgtgtccttgagacgtggcttccggagctaacgcgttaaatcgaccgcctggggagtacggccgcaaggttaaaactcaaatgaattgacgggggcccgcacaagcggtggagcatgtggtttaattcgatgcaacgcgaagaaccttacctggccttgacatgtctggaatcctgcagagatgcgggagtgccttcgggaatcagaacacaggtgctgcatggctgtcgtcagctcgtgtcgtgagatgttgggttaagtcccgcaacgagcgcaacccctgtcctttgttgccagcacgtaatggtgggaactcaagggagactgccggtgataaaccggaggaaggtggggatgacgtcaagtcatcatggcccttacggccagggctacacacgtgctacaatggcgcgtacagagggctgcaagctagcgatagtgagcgaatcccaaaaagcgcgtcgtagtccggatcggagtctgcaactcgactccgtgaagtcggaatcgctagtaatcgcaaatcagaatgttgcggtgaatacgttcccgggccttgtacacaccgcccgtcacaccatgggagtgggttgcaccagaagtagatagcttaaccttcgggagggcgtttaccacggtgtgattcatgactggggtg

SEQ ID NO: 96 - DNA, 1467 bp, Aeromonas jandaei
attgaacgctggcggcaggcctaacacatgcaagtcgagcggcagcgggaaagtagcttgctacttttgccggcgagcggcggacgggtgagtaatgcctggggatctgcccagtcgagggggataactactggaaacggtagctaataccgcatacgccctacgggggaaagcaggggaccttcgggccttgcgcgattggatgaacccaggtgggattagctagttggtgaggtaacggctcaccaaggcgacgatccctagctggtctgagaggatgatcagccacactggaactgagacacggtccagactcctacgggaggcagcagtggggaatattgcacaatgggggaaaccctgatgcagccatgccgcgtgtgtgaagaaggccttcgggttgtaaagcactttcagcgaggaggaaaggtcagtagctaatatctgctggctgtgacgttactcgcagaagaagcaccggctaactccgtgccagcagccgcggtaatacggagggtgcaagcgttaatcggaattactgggcgtaaagcgcacgcaggcggttggataagttagatgtgaaagccccgggctcaacctgggaattgcatttaaaactgtccagctagagtcttgtagaggggggtagaattccaggtgtagcggtgaaatgcgtagagatctggaggaataccggtggcgaaggcggccccctggacaaagactgacgctcaggtgcgaaagcgtggggagcaaacaggattagataccctggtagtccacgccgtaaacgatgtcgatttggaggctgtgtccttgagacgtggcttccggagctaacgcgttaaatcgaccgcctggggagtacggccgcaaggttaaaactcaaatgaattgacgggggcccgcacaagcggtggagcatgtggtttaattcgatgcaacgcgaagaaccttacctggccttgacatgtctggaatcctgtagagatacgggagtgccttcgggaatcagaacacaggtgctgcatggctgtcgtcagctcgtgtcgtgagatgttgggttaagtcccgcaacgagcgcaacccctgtcctttgttgccagcacgtaatggtgggaactcaagggagactgccggtgataaaccggaggaaggtggggatgacgtcaagtcatcatggcccttacggccagggctacacacgtgctacaatggcgcgtacagagggctgcaagctagcgatagtgagcgaatcccaaaaagcgcgtcgtagtccggatcggagtctgcaactcgactccgtgaagtcggaatcgctagtaatcgcaaatcagaatgttgcggtgaatacgttcccgggccttgtacacaccgcccgtcacaccatgggagtgggttgcaccagaagtagatagcttaaccttcgggagggcgtttaccacggtgtgattcatgactggggtg

SEQ ID NO: 97 - DNA, 1466 bp, Aeromonas salmonicida
attgaacgctggcggcaggcctaacacatgcaagtcgagcggcagcgggaaagtagcttgctacttttgccggcgagcggcggacgggtgagtaatgcctggggatctgcccagtcgagggggataacagttggaaacgactgctaataccgcatacgcctacgggggaaaggaggggaccttcgggcctttcgcgattggatgaacccaggtgggattagctagttggtggggtaatggctcaccaaggcgacgatccctagctggtctgagaggatgatcagccacactggaactgagacacggtccagactcctacgggaggcagcagtggggaatattgcacaatgggggaaaccctgatgcagccatgccgcgtgtgtgaagaaggccttcgggttgtaaagcactttcagcgaggaggaaaggttggcgcctaatacgtgtcaactgtgacgttactcgcagaagaagcaccggctaactccgtgccagcagccgcggtaatacggagggtgcaagcgttaatcggaattactgggcgtaaagcgcacgcaggcggttggataagttagatgtgaaagccccgggctcaacctgggaattgcatttaaaactgtccagctagagtcttgtagaggggggtagaattccaggtgtagcggtgaaatgcgtagagatctggaggaataccggtggcgaaggcggccccctggacaaagactgacgctcaggtgcgaaagcgtggggagcaaacaggattagataccctggtagtccacgccgtaaacgatgtcgatttggaggctgtgtccttgagacgtggcttccggagctaacgcgttaaatcgaccgcctggggagtacggccgcaaggttaaaactcaaatgaattgacgggggcccgcacaagcggtggagcatgtggtttaattcgatgcaacgcgaagaaccttacctggccttgacatgtctggaatcctgcagagatgcgggagtgccttcgggaatcagaacacaggtgctgcatggctgtcgtcagctcgtgtcgtgagatgttgggttaagtcccgcaacgagcgcaacccctgtcctttgttgccagcacgtaatggtgggaactcaagggagactgccggtgataaaccggaggaaggtggggatgacgtcaagtcatcatggcccttacggccagggctacacacgtgctacaatggcgcgtacagagggctgcaagctagcgatagtgagcgaatcccaaaaagcgcgtcgtagtccggatcggagtctgcaactcgactccgtgaagtcggaatcgctagtaatcgcgaatcagaatgtcgcggtgaatacgttcccgggccttgtacacaccgcccgtcacaccatgggagtgggttgcaccagaagtagatagcttaaccttcgggagggcgtttaccacggtgtgattcatgactggggtg

SEQ ID NO: 98 - DNA, 1398 bp, Aeromonas schubertii
  misc_feature (623)..(624): n is a, c, g, or t
attgaacgctggcggcaggcctaacacatgcaagtcgagcggcagcgggagagtagcttgctacttttgccggcgagcggcggacgggtgagtaatgcctggggatctgcccagtcgagggggataactactggaaacggtagctaataccgcatacgccctacgggggaaagcaggggaccttcgggccttgcgcgattggatgaacccaggtgggattagcttgttggtgaggtaacggctcaccaaggcgacgatccctagctggtctgagaggatgatcagccacactggaactgagacacggtccagactcctacgggaggcagcagtggggaatattgcacaatgggggaaaccctgatgcagccatgccgcgtgtgtgaagaaggccttcgggttgtaaagcactttcagcgaggaggaaaggttggtggttaatacctgccagctgtgacgttactcgcagaagaagcaccggctaactccgtgccagcagccgcggtaatacggagggtgcaagcgttaatcggaattactgggcgtaaagcgcacgcaggcggttggataagttagatgtgaaagccccgggctcaacctgggaattgcatttaaaactgtcnnccggtggcgaaggcggccccctggacaaagactgacgctcaggtgcgaaagcgtggggagcaaacaggattagataccctggtagtccacgccgtaaacgatgtcgatttggaggttgtgcccttgaggcgtggcttccggagctaacgcgttaaatcgaccgcctggggagtacggccgcaaggttaaaactcaaatgaattgacgggggcccgcacaagcggtggagcatgtggtttaattcgatgcaacgcgaagaaccttacctggccttgacatgtctggaatcctgtagagatacgggagtgccttcgggaatcagaacacaggtgctgcatggctgtcgtcagctcgtgtcgtgagatgttgggttaagtcccgcaacgagcgcaacccctgtcctttgttgccagcacgtaatggtgggaactcaaaggagactgccggtgataaaccggaggaaggtggggatgacgtcaagtcatcatggcccttacggccagggctacacacgtgctacaatggcgcgtacagagggctgcaagctagcgatagtgagcgaatccctaaaagcgcgtcgtagtccggattggagtctgcaactcgactccatgaagtcggaatcgctagtaatcgcaaatcagaatgttgcggtgaatacgttcccgggccttgtacacaccgcccgtcacaccatgggagtgggttgcaccagaagtagatagcttaaccttcgggagggcgtttaccacggtgtgattcatgactggggtg

SEQ ID NO: 99 - DNA, 1467 bp, Aeromonas veronii
attgaacgctggcggcaggcctaacacatgcaagtcgagcggcagcgggaaagtagcttgctacttttgccggcgagcggcggacgggtgagtaatgcctggggatctgcccagtcgagggggataactactggaaacggtagctaataccgcatacgccctacgggggaaagcaggggaccttcgggccttgcgcgattggatgaacccaggtgggattagctagttggtgaggtaatggctcaccaaggcgacgatccctagctggtctgagaggatgatcagccacactggaactgagacacggtccagactcctacgggaggcagcagtggggaatattgcacaatgggggaaaccctgatgcagccatgccgcgtgtgtgaagaaggccttcgggttgtaaagcactttcagcgaggaggaaaggttggtagctaataactgccagctgtgacgttactcgcagaagaagcaccggctaactccgtgccagcagccgcggtaatacggagggtgcaagcgttaatcggaattactgggcgtaaagcgcacgcaggcggttggataagttagatgtgaaagccccgggctcaacctgggaattgcatttaaaactgtccagctagagtcttgtagaggggggtagaattccaggtgtagcggtgaaatgcgtagagatctggaggaataccggtggcgaaggcggccccctggacaaagactgacgctcaggtgcgaaagcgtggggagcaaacaggattagataccctggtagtccacgccgtaaacgatgtcgatttggaggctgtgtccttgagacgtggcttccggagctaacgcgttaaatcgaccgcctggggagtacggccgcaaggttaaaactcaaatgaattgacgggggcccgcacaagcggtggagcatgtggtttaattcgatgcaacgcgaagaaccttacctggccttgacatgtctggaatcctgtagagatacgggagtgccttcgggaatcagaacacaggtgctgcatggctgtcgtcagctcgtgtcgtgagatgttgggttaagtcccgcaacgagcgcaacccctgtcctttgttgccagcacgtaatggtgggaactcaagggagactgccggtgataaaccggaggaaggtggggatgacgtcaagtcatcatggcccttacggccagggctacacacgtgctacaatggcgcgtacagagggctgcaagctagcgatagtgagcgaatcccaaaaagcgcgtcgtagtccggatcggagtctgcaactcgactccgtgaagtcggaatcgctagtaatcgcaaatcagaatgttgcggtgaatacgttcccgggccttgtacacaccgcccgtcacaccatgggagtgggttgcaccagaagtagatagcttaaccttcgggagggcgtttaccacggtgtgattcatgactggggtg

SEQ ID NO: 100 - DNA, 1462 bp, Aggregatibacter aphrophilus
attgaacgctggcggcaggcttaacacatgcaagtcgaacggtaacaggtaagtacttgtacttatgctgacgagtggcggacgggtgagtaatgcttggggatctggcttatggagggggataacgacgggaaactgtcgctaataccgcgtagaatcgggagatgaaagtgtgggaccttcgggccacatgccataggatgaacccaagtgggattaggtagttggtggggtaatggcctaccaagccgacgatctctagctggtctgagaggatgaccagccacaccgggactgagacacggcccggactcctacgggaggcagcagtggggaatattgcgcaatgggggcaaccctgacgcagccatgccgcgtgaatgaagaaggccttcgggttgtaaagttctttcggtgacgaggaaggttgttgtgttaatagcgcaacaaattgacgttaatcacagaagaagcaccggctaactccgtgccagcagccgcggtaatacggagggtgcgagcgttaatcggaataactgggcgtaaagggcacgcaggcggacttttaagtgaggtgtgaaatccccgggcttaacctgggaattgcatttcagactgggggtctagagtactttagggaggggtagaattccacgtgtagcggtgaaatgcgtagagatgtggaggaataccgaaggcgaaggcagccccttgggaatgtactgacgctcatgtgcgaaagcgtggggagcaaacaggattagataccctggtagtccacgctgtaaacgctgtcgatttggggattgtgctttgagcttggtgcccgtagctaacgtgataaatcgaccgcctggggagtacggccgcaaggttaaaactcaaatgaattgacgggggcccgcacaagcggtggagcatgtggtttaattcgatgcaacgcgaagaaccttacctactcttgacatccatggaatcttgtagagatatgagagtgccttcgggaaccatgagacaggtgctgcatggctgtcgtcagctcgtgttgtgaaatgttgggttaagtcccgcaacgagcgcaacccttatcctttgttgccagcgatttggtcgggaactcaaaggagactgccggtgataaaccggaggaaggtggggatgacgtcaagtcatcatggcccttacgagtagggctacacacgtgctacaatggcgtatacagagggcgacgaagccgcgaggtggagtgaatctcagaaagtacgtctaagtccggattggagtctgcaactcgactccatgaagtcggaatcgctagtaatcgcgaatcagaatgtcgcggtgaatacgttcccgggccttgtacacaccgcccgtcacaccatgggagtgggttgtaccagaagtagatagcttaaccgcaaggggggcgtttaccacggtatgattcatgactggggtg

SEQ ID NO: 101 - DNA, 1450 bp, Alistipes onderdonkii
gatgaacgctagcggcaggcctaacacatgcaagtcgaggggcatcgggattgaagcttgcttcaattgccggcgaccggcgcacgggtgcgtaacgcgtatgtaacctacctataacaggggcataacactgagaaattggtactaattccccataatattcggagaggcatctctccgggttgaaaactccggtggttatagatggacatgcgttgtattagctagttggtgaggtaacggctcaccaaggcaacgatacatagggggactgagaggttaaccccccacactggtactgagacacggaccagactcctacgggaggcagcagtgaggaatattggtcaatggacgcaagtctgaaccagccatgccgcgtgcaggaagacggctctatgagttgtaaactgcttttgtacgagggtaaactcacctacgtgtaggtgactgaaagtatcgtacgaataaggatcggctaactccgtgccagcagccgcggtaatacggaggattcaagcgttatccggatttattgggtttaaagggtgcgtaggcggtttgataagttagaggtgaaatcccggggcttaactccggaactgcctctaatactgttagactagagagtagttgcggtaggcggaatgtatggtgtagcggtgaaatgcttagagatcatacagaacaccgattgcgaaggcagcttaccaaactatatctgacgttgaggcacgaaagcgtggggagcaaacaggattagataccctggtagtccacgcagtaaacgatgataactcgttgtcggcgatacacagtcggtgactaagcgaaagcgataagttatccacctggggagtacgttcgcaagaatgaaactcaaaggaattgacgggggcccgcacaagcggaggaacatgtggtttaattcgatgatacgcgaggaaccttacccgggcttgaaagttactgacgattctggaaacaggatttcccttcggggcaggaaactaggtgctgcatggttgtcgtcagctcgtgccgtgaggtgtcgggttaagtcccataacgagcgcaacccctaccgttagttgccatcaggtcaagctgggcactctggcgggactgccggtgtaagccgagaggaaggtggggatgacgtcaaatcagcacggcccttacgtccggggctacacacgtgttacaatggtaggtacagagggtcgctaccccgcgaggggatgccaatctcgaaagcctatctcagttcggattggaggctgaaacccgcctccatgaagttggattcgctagtaatcgcgcatcagccatggcgcggtgaatacgttcccgggccttgtacacaccgcccgtcaagccatggaagctgggggtgcctgaagttcgtgaccgcaaggagcgacctagggcaaaaccggtaactggggct

SEQ ID NO: 102 - DNA, 1449 bp, Alistipes putredinis
gatgaacgctagcggcaggcttaacacatgcaagtcgaggggcagcataatggatagcaatatctatggtggcgaccggcgcacgggtgcgtaacgcgtatgcaacctacctttaacagggggataacactgagaaattggtactaataccccataatatcatagaaggcatcttttatggttgaaaattccgatggttagagatgggcatgcgttgtattagctagttggtggggtaacggctcaccaaggcgacgatacatagggggactgagaggttaaccccccacactggtactgagacacggaccagactcctacgggaggcagcagtgaggaatattggtcaatggacgcaagtctgaaccagccatgccgcgtgcaggatgacggctctatgagttgtaaactgcttttgtacgagggtaaacgcagatacgtgtatctgtctgaaagtatcgtacgaataaggatcggctaactccgtgccagcagccgcggtaatacggaggattcaagcgttatccggatttattgggtttaaagggtgcgtaggcggtttgataagttagaggtgaaatttcggggctcaaccctgaacgtgcctctaatactgttgagctagagagtagttgcggtaggcggaatgtatggtgtagcggtgaaatgcttagagatcatacagaacaccgattgcgaaggcagcttaccaaactatatctgacgttgaggcacgaaagcgtggggagcaaacaggattagataccctggtagtccacgcagtaaacgatgataactcgttgtcggcgatacacagtcggtgactaagcgaaagcgataagttatccacctggggagtacgttcgcaagaatgaaactcaaaggaattgacgggggcccgcacaagcggaggaacatgtggtttaattcgatgatacgcgaggaaccttacccgggcttgaaagttagcgacgattcttgaaagaggatttcccttcggggcgcgaaactaggtgctgcatggttgtcgtcagctcgtgccgtgaggtgtcgggttaagtcccataacgagcgcaacccctaccgttagttgccatcaggtgaagctgggcactctggcgggactgccggtgtaagccgagaggaaggtggggatgacgtcaaatcagcacggcccttacgtccggggctacacacgtgttacaatggtaggtacagagggcagctacccagcgatgggatgcgaatctcgaaagcctatctcagttcggattggaggctgaaacccgcctccatgaagttggattcgctagtaatcgcgcatcagccatggcgcggtgaatacgttcccgggccttgtacacaccgcccgtcaagccatgggagccgggggtgcctgaagttcgtgaccgcaaggagcgacctagggcaaaactggtgactggggct

SEQ ID NO: 103 - DNA, 1493 bp, Allisonella histaminiformans
gacgaacgctggcggcgtgcttaacacatgcaagtcgaacgggaagaaaagaaagagcttgctcttttttggattccagtggcaaacgggtgagtaacacgtaaacaacctgccttcaggatggggacaacagacggaaacgactgctaataccgaataccttccaatttccgcatagagataggaagaaagggtggcctctacttgtaagctatcgcctgaagaggggtttgcgtctgattagctggttggtgaggtaacggcccaccaaggcgacgatcagtagccggtctgagaggatgaacggccacactggaactgagacacggtccagactcctacgggaggcagcagtggggaatcttccgcaatggacgaaagtctgacggagcaacgccgcgtgaacgatgaaggtcttcggattgtaaagttctgtgatccgggacgaaggcattgattgagaacattgattgatgttgacggtaccggaaaagcaagccacggctaactacgtgccagcagccgcggtaatacgtaggtggcaagcgttgtccggaattattgggcgtaaagcgcgcgcaggcggccgtgcaagtccatcttaaaagcgtggggcttaaccccatgaggggatggaaactgcagggctggagtgtcggaggggaaagtggaattcctagtgtagcggtgaaatgcgtagagattaggaagaacaccggtggcgaaggcgactttctagacgacaactgacgctgaggcgcgaaagcgtggggagcaaacaggattagataccctggtagtctacgccgtaaacgatggatactaggtgtaggaggtatcgaccccttctgtgccggagttaacgcaataagtatcccgcctgggaagtacgatcgcaagattaaaactcaaaggaattgacgggggcccgcacaagcggtggagtatgtggtttaattcgacgcaacgcgaagaaccttaccaagccttgacattgatcgcaatctgcagaaatgcggagttcctcttcggaggacgagaaaacaggtggtgcacggctgtcgtcagctcgtgtcgtgagatgttgggttaagtcccgcaacgagcgcaacccctatcttctgttgccagcacgtaaaggtgggaactcaggagagaccgccgcggacaacgcggaggaaggcggggatgacgtcaagtcatcatgccccttatggcttgggctacacacgtactacaatgggtgcaaacaaagagaagcgaagtcgcgagacggagcggacctcataaacgcactcccagttcagattgcaggctgcaacccgcctgcatgaagtaggaatcgctagtaatcgcgggtcagcataccgcggtgaatacgttcccgggccttgtacacaccgcccgtcacactatgagagtcagagacacccaaagccggtgggataaccgaaagggatcagccgtctaaggtggagctgatgattggagtg

SEQ ID NO: 104 - DNA, 1408 bp, Anaeroglobus geminatus
cttacgatcgagtggcaaacgggtgagtaacgcgtaaacaacctgccccgcagatggggacaacagctggaaacggctgctaataccgaatacggtcctcttagcgcatggtaagaggaagaaagggtggcctctggaacaagctaccgctgtgggaggggtttgcgtctgattagctggttggaggggtaacggcccaccaaggcgacgatcagtagccggtctgagaggatgaacggccacattggaactgagacacggtccagactcctacgggaggcagcagtggggaatcttccgcaatgggcgaaagcctgacggagcaacgccgcgtgagtgaagacggccttcgggttgtaaagctctgttataggggacgaacggccgggtagcgaagaggtagccggcatgacggtaccgtaagagaaagccacggctaactacgtgccagcagccgcggtaatacgtaggtggcaagcgttgtccggaatgattgggcgtaaagggcgcgcaggcggctgtgtaagtctgtctaaaaagtgcggggctaaaccccgtgagaggatggaaactggacagctgagagtgtcggagaggaaagcggaattcctagtgtagcggtgaaatgcgtagatattaggaggaacaccggtggcgaaagcggctttctggacgacaactgacgctgaggcgcgaaagccaggggagcaaacgggattagataccccggtagtcctggccgtaaacgatgggtactaggtgtaggaggtatcgacccctcctgtgccggagttaacgcaataagtaccccgcctggggagtacggccgcaaggctgaaactcaaaggaattgacgggggcccgcacaagcggtggagtatgtggtttaattcgacgcaacgcgaagaaccttaccaagccttgacattgctcgcaacgggtagagatacctggttcttcttcggaagacgagacaacaggtggtgcacggctgtcgtcagctcgtgtcgtgagatgttgggttaagtcccgcaacgagcgcaacccctatcttcagttaccagcacgtagcggtggggactcaggagagacagccgcagacaatgcggaggaaggcggggacgacgtcaagtcatcatgccccttatggcttgggctacacacgtactacaatggctctaaatagagggaagcgaaggagcgatccggagcaaaccccgcaaacagagtcccagttcggattgcaggctgcaactcgcctgcatgaaggaggaatcgctagtaatcgcaggtcagcatactgcggtgaatacgttcccgggccttgtacacaccgcccgtcacaccacgaaagtcattcacacccgaagccggtgaggtaaccgcaaggagccagccgtcaaaggtg

SEQ ID NO: 105 - DNA, 1461 bp, Aneurinibacillus aneurinilyticus
gacgaacgctggcggcgtgcctaatacatgcaagtcgagcggaccaaagaagagcttgctcttcggcggttagcggcggacgggtgagtaacacgtaggcaacctgcctgtacgactgggataactccgggaaaccggagctaataccggatacgtttttcagaccgcatggtctgaaagagaaagacctttggtcacgtacagatgggcctgcggcgcattagctagttggtggggtaacggcctaccaaggcgacgatgcgtagccgacctgagagggtgatcggccacactgggactgagacacggcccagactcctacgggaggcagcagtagggaatcttccgcaatggacgaaagtctgacggagcaacgccgcgtgaacgatgaaggttttcggatcgtaaagttctgttgttagggaagaaccgccgggatgacctcccggtctgacggtacctaacgagaaagccccggctaactacgtgccagcagccgcggtaatacgtagggggcaagcgttgtccggaattattgggcgtaaagcgcgcgcaggcggcttcttaagtcaggtgtgaaagcccacggctcaaccgtggagggccacttgaaactgggaggcttgagtgcaggagaggagagcggaattccacgtgtagcggtgaaatgcgtagagatgtggaggaacacccgtggcgaaggcggctctctggcctgtaactgacgctgaggcgcgaaagcgtggggagcgaacaggattagataccctggtagtccacgccgtaaacgttgagtgctaggtgttggggactccaatcctcagtgccgcagctaacgcaataagcactccgcctggggagtacggccgcaaggctgaaactcaaaggaattgacggggacccgcacaagcggtggagcatgtggtttaattcgaagcaacgcgaagaaccttaccagggcttgacatcccgctgtccctcctagagataggagctctcttcggagcagcggtgacaggtggtgcatggttgtcgtcagctcgtgtcgtgagatgttgggttaagtcccgcaacgagcgcaacccttgtccttagttgccagcattcagttgggcactctagggagactgccgtcgacaagacggaggaaggtggggatgacgtcaaatcatcatgccccttatgtcctgggctacacacgtgctacaatggatggaacaacgggcagccaactcgcgagagtgcgccaatcccttaaaaccattctcagttcggattgcaggctgcaactcgcctgcatgaagccggaatcgctagtaatcgcggatcagcatgccgcggtgaatacgttcccgggtcttgtacacaccgcccgtcacaccacgagagtttgcaacacccgaagtcggtgaggtaaccgcaaggagccagccgccgaaggtggggcagatgattggggtg

SEQ ID NO: 106 - DNA, 1462 bp, Aneurinibacillus migulanus
gacgaacgctggcggcgtgcctaatacatgcaagtcgagcggaccaatgaagagcttgctcttcggcggttagcggcggacgggtgagtaacacgtaggcaacctgcctgtacgactgggataactccgggaaaccggagctaataccggatacttctttcagaccgcatggtctgaaagggaaagacttttggtcacgtacagatgggcctgcggcgcattagctagttggtggggtaacggcctaccaaggcgacgatgcgtagccgacctgagagggtgatcggccacactgggactgagacacggcccagactcctacgggaggcagcagtagggaatcttccgcaatggacgaaagtctgacggagcaacgccgcgtgaacgatgaaggttttcggatcgtaaagttctgttgttagggaagaaccgccgggatgacctcccggtctgacggtacctaacgagaaagccccggctaactacgtgccagcagccgcggtaatacgtagggggcaagcgttgtccggaattattgggcgtaaagcgcgcgcaggcggcttcttaagtcaggtgtgaaagcccacggctcaaccgtggagggccacttgaaactgggaagcttgagtgcaggagaggagagcggaattccacgtgtagcggtgaaatgcgtagagatgtggaggaacacccgtggcgaaggcggctctctggcctgtaactgacgctgaggcgcgaaagcgtggggagcgaacaggattagataccctggtagtccacgccgtaaacgttgagtgctaggtgttgggggtgaccaatcctcagtgccgcagctaacgcaataagcactccgcctggggagtacggccgcaaggctgaaactcaaaggaattgacggggacccgcacaagcggtggagcatgtggtttaattcgaagcaacgcgaagaaccttaccagggcttgacatcccgctgaccctcctagagataggagctctcttcggagcagcggtgacaggtggtgcatggttgtcgtcagctcgtgtcgtgagatgttgggttaagtcccgcaacgagcgcaacccttgtccttagttgccagcatttagttgggcactctagggagactgccgtcgacaagacggaggaaggtggggatgacgtcaaatcatcatgccccttatgtcctgggctacacacgtgctacaatggatggaacaacgggcagccaactcgcgagagtgcgcgaatcccttaaaaccattctcagttcggattgcaggctgcaactcgcctgcatgaagccggaatcgctagtaatcgcggatcagcatgccgcggtgaatacgttcccgggtcttgtacacaccgcccgtcacaccacgagagtttgcaacacccgaagtcggtgaggtaaccgcaaggagccagccgccgaaggtggggcagatgattggggtg

SEQ ID NO: 107 - DNA, 1478 bp, Anoxybacillus flavithermus
gacgaacgctggcggcgtgcctaatacatgcaagtcgagcggaccgaatagaagcttgcttctatttggttagcggcggacgggtgagtaacacgtgggcaacctgccctgtagacggggataacaccgagaaatcggtgctaataccggataacacggaatgtcgcatgacgtttcgttgaaaggcggcgcaagctgtcgctacaggatgggcccgcggcgcattagctagttggtgaggtaacggctcaccaaggcgacgatgcgtagccgacctgagagggtgatcggccacactgggactgagacacggcccagactcctacgggaggcagcagtagggaatcttccgcaatggacgaaagtctgacggagcaacgccgcgtgagcgaagaaggccttcgggtcgtaaagctctgttgttagggaagaacaagtagcgcagtaactggcgttaccttgacggtacctaacgagaaagccacggctaactacgtgccagcagccgcggtaatacgtaggtggcaagcgttgtccggaattattgggcgtaaagcgcgcgcaggcggttccttaagtctgatgtgaaagcccacggctcaaccgtggagggtcattggaaactgggggacttgagtgcagaagaggagagcggaattccacgtgtagcggtgaaatgcgtagagatgtggaggaacaccagtggcgaaggcggctctctggtctgtaactgacgctgaggcgcgaaagcgtggggagcaaacaggattagataccctggtagtccacgccgtaaacgatgagtgctaagtgttagagggtatccaccctttagtgctgtagctaacgcattaagcactccgcctggggagtacgctcgcaagagtgaaactcaaaggaattgacgggggcccgcacaagcggtggagcatgtggtttaattcgaagcaacgcgaagaaccttaccaggtcttgacatcccctgacaacccgagagatcgggcgttcccccttcggggggacagggtgacaggtggtgcatggttgtcgtcagctcgtgtcgtgagatgttgggttaagtcccgcaacgagcgcaaccctcgaccttagttgccagcattcagttgggcactctaaggtgactgccggctaaaagtcggaggaaggtggggatgacgtcaaatcatcatgccccttatgacctgggctacacacgtgctacaatgggcgttacaaagggtcgcgaacccgcgagggggagccaatcccaaaaagccgctctcagttcggattgcaggctgcaactcgcctgcatgaagccggaatcgctagtaatcgcggatcagcatgccgcggtgaatacgttcccgggccttgtacacaccgcccgtcacaccacgagagtttgcaacacccgaagtcggtgaggtaacccttacgggagccagccgccgaaggtggggcaaatgattggggtg

SEQ ID NO: 108 - DNA, 1404 bp, Asaccharobacter celatus
gatgaacgctggcggcgtgcttaacacatgcaagtcgaacgattaagacggcttcggccgtgtatagagtggcgaacgggtgagtaacacgtgaccaacctgccccgcgctccgggacaaccgctggaaacggcggctaataccggatgctccggggaggccccatggcctccccgggaaagccccgacggcgcgggatggggtcgcggcccattaggtagacggcggggtaacggcccaccgtgcccgcgatgggtagccggactgagaggtcgaccggccacattgggactgagatacggcccagactcctacgggaggcagcagtggggaattttgcgcaatggggggaaccctgacgcagcaacgccgcgtgcgggacgaaggccttcgggttgtaaaccgctttcagcagggaagacatagacggtacctgcagaagaagctccggctaactacgtgccagcagccgcggtaatacgtagggggcgagcgttatccggattcattgggcgtaaagcgcgcgtaggcggccgcctaagcggaacctctaatcccggggctcaacctcgggccgggttccggactgggcggctcgagtgcggtagaggcaggcggaattcccggtgtagcggtggaatgcgcagatatcgggaagaacaccgatggcgaaggcagcctgctgggccgccactgacgctgaggcgcgaaagctgggggagcgaacaggattagataccctggtagtcccagccgtaaacgatggacgctaggtgtggggggaccatccccccgtgccgcagccaacgcattaagcgtcccgcctggggagtacggccgcaaggctaaaactcaaaggaattgacgggggcccgcacaagcagcggagcatgtggcttaattcgaagcaacgcgaagaaccttaccagggcttgacatgcgagtgaagccgcggagacgcggtggccgagaggagctcgcgcaggtggtgcatggctgtcgtcagctcgtgtcgtgagatgttgggttaagtcccgcaacgagcgcaacccccgtcccgtgttgccagcattcagttggggactcgcgggagactgccggcgtcaagccggaggaaggtggggacgacgtcaagtcatcatgccccttatgccctgggctgcacacgtgctacaatggccggtacagagggttgccaccccgcgagggggagcggatcccggaaagccggtcccagttcggatcgcaggctgcaacccgcctgcgtgaagtcggagttgctagtaatcgcggatcagcatgccgcggtgaatacgttcccgggccttgtacacaccgcccgtcacaccacccgagtcgtctgcacccgaagccgccgtccgaacccttcctgggtgcggaggc

SEQ ID NO: 109 - DNA, 1471 bp, Bacillus altitudinis
gacgaacgctggcggcgtgcctaatacatgcaagtcgagcggacagaagggagcttgctcccggatgttagcggcggacgggtgagtaacacgtgggtaacctgcctgtaagactgggataactccgggaaaccggagctaataccggatagttccttgaaccgcatggttcaaggatgaaagacggtttcggctgtcacttacagatggacccgcggcgcattagctagttggtgaggtaacggctcaccaaggcgacgatgcgtagccgacctgagagggtgatcggccacactgggactgagacacggcccagactcctacgggaggcagcagtagggaatcttccgcaatggacgaaagtctgacggagcaacgccgcgtgagtgatgaaggttttcggatcgtaaagctctgttgttagggaagaacaagtgcaagagtaactgcttgcaccttgacggtacctaaccagaaagccacggctaactacgtgccagcagccgcggtaatacgtaggtggcaagcgttgtccggaattattgggcgtaaagggctcgcaggcggtttcttaagtctgatgtgaaagcccccggctcaaccggggagggtcattggaaactgggaaacttgagtgcagaagaggagagtggaattccacgtgtagcggtgaaatgcgtagagatgtggaggaacaccagtggcgaaggcgactctctggtctgtaactgacgctgaggagcgaaagcgtggggagcgaacaggattagataccctggtagtccacgccgtaaacgatgagtgctaagtgttagggggtttccgccccttagtgctgcagctaacgcattaagcactccgcctggggagtacggtcgcaagactgaaactcaaaggaattgacgggggcccgcacaagcggtggagcatgtggtttaattcgaagcaacgcgaagaaccttaccaggtcttgacatcctctgacaaccctagagatagggctttcccttcggggacagagtgacaggtggtgcatggttgtcgtcagctcgtgtcgtgagatgttgggttaagtcccgcaacgagcgcaacccttgatcttagttgccagcattcagttgggcactctaaggtgactgccggtgacaaaccggaggaaggtggggatgacgtcaaatcatcatgccccttatgacctgggctacacacgtgctacaatggacagaacaaagggctgcgagaccgcaaggtttagccaatcccacaaatctgttctcagttcggatcgcagtctgcaactcgactgcgtgaagctggaatcgctagtaatcgcggatcagcatgccgcggtgaatacgttcccgggccttgtacacaccgcccgtcacaccacgagagtttgcaacacccgaagtcggtgaggtaacctttatggagccagccgccgaaggtggggcagatgattggggtg

SEQ ID NO: 110 - DNA, 1472 bp, Bacillus amyloliquefaciens
gacgaacgctggcggcgtgcctaatacatgcaagtcgagcggacagatgggagcttgctctctgatgttagcggcggacgggtgagtaacacgtgggtaacctgcctgtaagactgggataactccgggaaaccggggctaataccggatgcttgtttgaaccgcatggttcagacataaaaggtggcttcggctaccacttacagatggacccgcggcgcattagctagttggtgaggtaacggctcaccaaggcgacgatgcgtagccgacctgagagggtgatcggccacactgggactgagacacggcccagactcctacgggaggcagcagtagggaatcttccgcaatggacgaaagtctgacggagcaacgccgcgtgagtgatgaaggttttcggatcgtaaagctctgttgttagggaagaacaagtgccgttcaaatagggcggcaccttgacggtacctaaccagaaagccacggctaactacgtgccagcagccgcggtaatacgtaggtggcaagcgttgtccggaattattgggcgtaaagggctcgcaggcggtttcttaagtctgatgtgaaagcccccggctcaaccggggagggtcattggaaactggggaacttgagtgcagaagaggagagtggaattccacgtgtagcggtgaaatgcgtagagatgtggaggaacaccagtggcgaaggcgactctctggtctgtaactgacgctgaggagcgaaagcgtggggagcgaacaggattagataccctggtagtccacgccgtaaacgatgagtgctaagtgttagggggtttccgccccttagtgctgcagctaacgcattaagcactccgcctggggagtacggtcgcaagactgaaactcaaaggaattgacgggggcccgcacaagcggtggagcatgtggtttaattcgaagcaacgcgaagaaccttaccaggtcttgacatcctctgacaatcctagagataggacgtccccttcgggggcagagtgacaggcggtgcatggttgtcgtcagctcgtgtcgtgagatgttgggttaagtcccgcaacgagcgcaacccttgatcttagttgccagcattcagttgggcactctaaggtgactgccggtgacaaaccggaggaaggtggggatgacgtcaaatcatcatgccccttatgacctgggctacacacgtgctacaatgggcagaacaaagggcagcgaaaccgcgaggttaagccaatcccacaaatctgttctcagttcggatcgcagtctgcaactcgactgcgtgaagctggaatcgctagtaatcgcggatcagcatgccgcggtgaatacgttcccgggccttgtacacaccgcccgtcacaccacgagagtttgtaacacccgaagtcggtgaggtaacctttttggagccagccgccgaaggtgggacagatgattggggtg

SEQ ID NO: 111 - DNA, 1474 bp, Bacillus aquimaris
gacgaacgctggcggcgtgcctaatacatgcaagtcgagcggattgatgggagcttgctccctgatatcagcggcggacgggtgagtaacacgtgggtaacctgcctgtaagattgggataactccgggaaaccggggctaataccgaataattcatttcctcgcatgaggaaatgttgaaaggtggcttttagctaccacttacagatggacccgcggcgcattagctagttggtgaggtaacggctcaccaaggcgacgatgcgtagccgacctgagagggtgatcggccacactgggactgagacacggcccagactcctacgggaggcagcagtagggaatcttccgcaatggacgaaagtctgacggagcaacgccgcgtgagtgatgaaggttttcggatcgtaaagctctgttgttagggaagaacaagtaccgttcgaatagggcggtaccttgacggtacctaaccagaaagccacggctaactacgtgccagcagccgcggtaatacgtaggtggcaagcgttgtccggaattattgggcgtaaagcgcgcgcaggtggtttcttaagtctgatgtgaaagcccacggctcaaccgtggagggtcattggaaactggggaacttgagtgcagaagaggaaagtggaattccaagtgtagcggtgaaatgcgtagatatttggaggaacaccagtggcgaaggcgactttctggtctgtaactgacactgaggcgcgaaagcgtggggagcaaacaggattagataccctggtagtccacgccgtaaacgatgagtgctaagtgttagggggtttccgccccttagtgctgcagctaacgcattaagcactccgcctggggagtacggtcgcaagactgaaactcaaaggaattgacgggggcccgcacaagcggtggagcatgtggtttaattcgaagcaacgcgaagaaccttaccaggtcttgacatcctctgacaaccctagagatagggctttccccttcgggggacagagtgacaggtggtgcatggttgtcgtcagctcgtgtcgtgagatgttgggttaagtcccgcaacgagcgcaacccttgatcttagttgccagcattcagttgggcactctaagatgactgccggtgacaaaccggaggaaggtggggatgacgtcaaatcatcatgccccttatgacctgggctacacacgtgctacaatggacggtacaaagggcagcaagaccgcgaggtttagccaatcccataaaaccgttctcagttcggattgtaggctgcaactcgcctacatgaagctggaatcgctagtaatcgcggatcagcatgccgcggtgaatacgttcccgggccttgtacacaccgcccgtcacaccacgagagtttgtaacacccgaagtcggtgaggtaaccttttggagccagccgcctaaggtgggacagatgattggggtg

SEQ ID NO: 112 - DNA, 1472 bp, Bacillus atrophaeus
gacgaacgctggcggcgtgcctaatacatgcaagtcgagcggacagatgggagcttgctccctgatgttagcggcggacgggtgagtaacacgtgggtaacctgcctgtaagactgggataactccgggaaaccggggctaataccggatgcttgtttgaaccgcatggttcaaacataaaaggtggcttcggctaccacttacagatggacccgcggcgcattagctagttggtgaggtaacggctcaccaaggcaacgatgcgtagccgacctgagagggtgatcggccacactgggactgagacacggcccagactcctacgggaggcagcagtagggaatcttccgcaatggacgaaagtctgacggagcaacgccgcgtgagtgatgaaggttttcggatcgtaaagctctgttgttagggaagaacaagtgccgttcaaatagggcggcaccttgacggtacctaaccagaaagccacggctaactacgtgccagcagccgcggtaatacgtaggtggcaagcgttgtccggaattattgggcgtaaagggctcgcaggcggtttcttaagtctgatgtgaaagcccccggctcaaccggggagggtcattggaaactggggaacttgagtgcagaagaggagagtggaattccacgtgtagcggtgaaatgcgtagagatgtggaggaacaccagtggcgaaggcgactctctggtctgtaactgacgctgaggagcgaaagcgtggggagcgaacaggattagataccctggtagtccacgccgtaaacgatgagtgctaagtgttagggggtttccgccccttagtgctgcagctaacgcattaagcactccgcctggggagtacggtcgcaagactgaaactcaaaggaattgacgggggcccgcacaagcggtggagcatgtggtttaattcgaagcaacgcgaagaaccttaccaggtcttgacatcctctgacacccctagagatagggcttccccttcgggggcagagtgacaggtggtgcatggttgtcgtcagctcgtgtcgtgagatgttgggttaagtcccgcaacgagcgcaacccttgatcttagttgccagcattcagttgggcactctaaggtgactgccggtgacaaaccggaggaaggtggggatgacgtcaaatcatcatgccccttatgacctgggctacacacgtgctacaatggacagaacaaagggcagcgagaccgcgaggttaagccaatcccacaaatctgttctcagttcggatcgcagtctgcaactcgactgcgtgaagctggaatcgctagtaatcgcggatcagcatgccgcggtgaatacgttcccgggccttgtacacaccgcccgtcacaccacgagagtttgtaacacccgaagtcggtgaggtaacctttatggagccagccgccgaaggtgggacagatgattggggtg

SEQ ID NO: 113 - DNA, 1478 bp, Bacillus badius
gacgaacgctggcggcgtgcctaatacatgcaagtcgagcggacttgacggaagcttgcttccgttcaagttagcggcggacgggtgagtaacacgtgggtaacctgcctgtaagactgggataactccgggaaaccggggctaataccggatattctttttcttcgcatgaagaagaatggaaaggcggcttttagctgtcgcttacagatggacccgcggcgcattagctagttggtgaggtaacggctcaccaaggcaacgatgcgtagccgacctgagagggtgatcggccacactgggactgagacacggcccagactcctacgggaggcagcagtagggaatcttccgcaatggacgaaagtctgacggagcaacgccgcgtgagtgaagaaggttttcggatcgtaaagctctgttgtcagggaagaacaagtacggaagtaactgtccgtaccttgacggtacctgaccagaaagccacggctaactacgtgccagcagccgcggtaatacgtaggtggcaagcgttgtccggaattattgggcgtaaagcgcgcgcaggcggcttcttaagtctgatgtgaaagcccacggctcaaccgtggagggtcattggaaactgggaggcttgagtgcagaagaggagagcggaattccacgtgtagcggtgaaatgcgtagagatgtggaggaacaccagtggcgaaggcggctctctggtctgtaactgacgctgaggcgcgaaagcgtggggagcgaacaggattagataccctggtagtccacgccgtaaacgatgagtgctaagtgttggagggtttccgcccttcagtgctgcagctaacgcattaagcactccgcctggggagtacggccgcaaggctgaaactcaaaggaattgacgggggcccgcacaagcggtggagcatgtggtttaattcgaagcaacgcgaagaaccttaccaggtcttgacatcccgctgaccggtctggagacaggcctttcccttcggggacagcggtgacaggtggtgcatggttgtcgtcagctcgtgtcgtgagatgttgggttaagtcccgcaacgagcgcaacccttgatcttagttgccagcattcagttgggcactctaaggtgactgccggtgacaaaccggaggaaggtggggatgacgtcaaatcatcatgccccttatgacctgggctacacacgtgctacaatggatggtacaaagggctgcaagaccgcaaggtttagccaatcccataaaaccattctcagttcggattgcaggctgcaactcgcctgcatgaagccggaatcgctagtaatcgcggatcagcatgccgcggtgaatacgttcccgggccttgtacacaccgcccgtcacaccacgagagtttgcaacacccgaagtcggtggggtaacccttacgggagccagccgcctaaggtggggcagatgattggggtg

SEQ ID NO: 114 - DNA, 1472 bp, Bacillus bataviensis
gacgaacgctggcggcgtgcctaatacatgcaagtcgagcgaatctttgggagcttgctcccattggttagcggcggacgggtgagtaacacgtgggcaacctgcctgtaagactgggataacttcgggaaaccggagctaataccggataatctttttcctctcatgaggaaaaactgaaagacggtttcggctgtcacttacagatgggcccgcggcgcattagctagttggtgaggtaacggctcaccaaggcgacgatgcgtagccgacctgagagggtgatcggccacactgggactgagacacggcccagactcctacgggaggcagcagtagggaatcttccacaatggacgaaagtctgatggagcaacgccgcgtgagcgatgaaggccttcgggtcgtaaagctctgttgttagggaagaacaagtatcggagtaactgccggtaccttgacggtacctaaccagaaagccacggctaactacgtgccagcagccgcggtaatacgtaggtggcaagcgttgtccggaattattgggcgtaaagcgcgcgcaggcggtcctttaagtctgatgtgaaagcccacggctcaaccgtggagggtcattggaaactgggggacttgagtgcagaagaggaaagcggaattccacgtgtagcggtgaaatgcgtagagatgtggaggaacaccagtggcgaaggcggctttctggtctgtaactgacgctgaggcgcgaaagcgtggggagcaaacaggattagataccctggtagtccacgccgtaaacgatgagtgctaagtgttagggggtttccgccccttagtgctgcagctaacgcattaagcactccgcctggggagtacggccgcaaggctgaaactcaaaggaattgacgggggcccgcacaagcggtggagcatgtggtttaattcgaagcaacgcgaagaaccttaccaggtcttgacatcctctgacactcctagagataggacgttccccttcgggggacagagtgacaggtggtgcatggttgtcgtcagctcgtgtcgtgagatgttgggttaagtcccgcaacgagcgcaacccttgatcttagttgccagcattcagttgggcactctaaggtgactgccggtgacaaaccggaggaaggtggggatgacgtcaaatcatcatgccccttatgacctgggctacacacgtgctacaatggatggtacaaagggctgcaagaccgcgaggtttagccaatcccataaaaccattctcagttcggattgtaggctgcaactcgcctacatgaagccggaatcgctagtaatcgcggatcagcatgccgcggtgaatacgttcccgggccttgtacacaccgcccgtcacaccacgagagtttgtaacacccgaagtcggtggggtaaccgtaaggagccagccgcctaaggtgggacagatgattggggtg

SEQ ID NO: 115 - DNA, 1474 bp, Bacillus cereus
gatgaacgctggcggcgtgcctaatacatgcaagtcgagcgaatggattaagagcttgctcttatgaagttagcggcggacgggtgagtaacacgtgggtaacctgcccataagactgggataactccgggaaaccggggctaataccggataacattttgaaccgcatggttcgaaattgaaaggcggcttcggctgtcacttatggatggacccgcgtcgcattagctagttggtgaggtaacggctcaccaaggcaacgatgcgtagccgacctgagagggtgatcggccacactgggactgagacacggcccagactcctacgggaggcagcagtagggaatcttccgcaatggacgaaagtctgacggagcaacgccgcgtgagtgatgaaggctttcgggtcgtaaaactctgttgttagggaagaacaagtgctagttgaataagctggcaccttgacggtacctaaccagaaagccacggctaactacgtgccagcagccgcggtaatacgtaggtggcaagcgttatccggaattattgggcgtaaagcgcgcgcaggtggtttcttaagtctgatgtgaaagcccacggctcaaccgtggagggtcattggaaactgggagacttgagtgcagaagaggaaagtggaattccatgtgtagcggtgaaatgcgtagagatatggaggaacaccagtggcgaaggcgactttctggtctgtaactgacactgaggcgcgaaagcgtggggagcaaacaggattagataccctggtagtccacgccgtaaacgatgagtgctaagtgttagagggtttccgccctttagtgctgaagttaacgcattaagcactccgcctggggagtacggccgcaaggctgaaactcaaaggaattgacgggggcccgcacaagcggtggagcatgtggtttaattcgaagcaacgcgaagaaccttaccaggtcttgacatcctctgaaaaccctagagatagggcttctccttcgggagcagagtgacaggtggtgcatggttgtcgtcagctcgtgtcgtgagatgttgggttaagtcccgcaacgagcgcaacccttgatcttagttgccatcattaagttgggcactctaaggtgactgccggtgacaaaccggaggaaggtggggatgacgtcaaatcatcatgccccttatgacctgggctacacacgtgctacaatggacggtacaaagagctgcaagaccgcgaggtggagctaatctcataaaaccgttctcagttcggattgtaggctgcaactcgcctacatgaagctggaatcgctagtaatcgcggatcagcatgccgcggtgaatacgttcccgggccttgtacacaccgcccgtcacaccacgagagtttgtaacacccgaagtcggtggggtaacctttttggagccagccgcctaaggtgggacagatgattggggtg

SEQ ID NO: 116 - DNA, 1470 bp, Bacillus circulans
  misc_feature (359)..(359): n is a, c, g, or t
gacgaacgctggcggcgtgcctaatacatgcaagtcgagcggactttaaaagcttgcttttaaagttagcggcggacgggtgagtaacacgtgggcaacctgcctgtaagactgggataacttcgggaaaccggagctaataccggataatccttttcctctcatgaggaaaagctgaaagacggtttacgctgtcacttacagatgggcccgcggcgcattagctagttggtgaggtaacggctcaccaaggcgacgatgcgtagccgacctgagagggtgatcggccacactgggactgagacacggcccagactcctacgggaggcagcagtagggaatcttccgcaatggacganagtctgacggagcaacgccgcgtgagtgatgaaggttttcggatcgtaaaactctgttgttagggaagaacaagtacaagagtaactgcttgtaccttgacggtacctaaccagaaagccacggctaactacgtgccagcagccgcggtaatacgtaggtggcaagcgttgtccggaattattgggcgtaaagcgcgcgcaggcggtcctttaagtctgatgtgaaagcccacggctcaaccgtggagggtcattggaaactgggggacttgagtgcagaagagaagagtggaattccacgtgtagcggtgaaatgcgtagagatgtggaggaacaccagtggcgaaggcgactctttggtctgtaactgacgctgaggcgcgaaagcgtggggagcaaacaggattagataccctggtagtccacgccgtaaacgatgagtgctaagtgttagagggtttccgccctttagtgctgcagcaaacgcattaagcactccgcctggggagtacggccgcaaggctgaaactcaaaggaattgacgggggcccgcacaagcggtggagcatgtggtttaattcgaagcaacgcgaagaaccttaccaggtcttgacatcctctgacactcctagagataggacgttccccttcgggggacagagtgacaggtggtgcatggttgtcgtcagctcgtgtcgtgagatgttgggttaagtcccgcaacgagcgcaacccttgatcttagttgccagcattcagttgggcactctaaggtgactgccggtgacaaaccggaggaaggtggggatgacgtcaaatcatcatgccccttatgacctgggctacacacgtgctacaatggatggtacaaagggcagcaaaaccgcgaggtcgagcaaatcccataaaaccattctcagttcggattgtaggctgcaactcgcctacatgaagctggaatcgctagtaatcgcggatcagcatgccgcggtgaatacgttcccgggccttgtacacaccgcccgtcacaccacgagagtttgtaacacccgaagtcggtggggtaaccttttggagccagccgcctaaggtgggatagatgattggggtg

SEQ ID NO: 117 - DNA, 1471 bp, Bacillus clausii
gacgaacgctggcggcgtgcctaatacatgcaagtcgagcggacagaagggagcttgctcccggacgttagcggcggacgggtgagtaacacgtgggcaacctgccccttagactgggataactccgggaaaccggagctaataccggataatccctttctccacctggagagagggtgaaagatggcttcggctatcactaggggatgggcccgcggcgcattagctagttggtaaggtaacggcttaccaaggcaacgatgcgtagccgacctgagagggtgatcggccacactgggactgagacacggcccagactcctacgggaggcagcagtagggaatcttccgcaatggacgaaagtctgacggagcaacgccgcgtgagtgaggaaggccttcgggtcgtaaagctctgttgtgagggaagaagcggtaccgttcgaatagggcggtaccttgacggtacctcaccagaaagccacggctaactacgtgccagcagccgcggtaatacgtaggtggcaagcgttgtccggaattattgggcgtaaagcgcgcgcaggcggcttcttaagtctgatgtgaaatctcggggctcaaccccgagcggccattggaaactggggagcttgagtgcagaagaggagagtggaattccacgtgtagcggtgaaatgcgtagagatgtggaggaacaccagtggcgaaggcgactctctggtctgtaactgacgctgaggcgcgaaagcgtggggagcaaacaggattagataccctggtagtccacgccgtaaacgatgagtgctaggtgttaggggtttcgatgcccgtagtgccgaagttaacacattaagcactccgcctggggagtacggccgcaaggctgaaactcaaaggaattgacggggacccgcacaagcagtggagcatgtggtttaattcgaagcaacgcgaagaaccttaccaggtcttgacatcctttgaccacccaagagattgggcttccccttcgggggcaaagtgacaggtggtgcatggttgtcgtcagctcgtgtcgtgagatgttgggttaagtcccgcaacgagcgcaacccttgatcttagttgccagcattgagttgggcactctaaggtgactgccggtgacaaaccggaggaaggtggggatgacgtcaaatcatcatgccccttatgacctgggctacacacgtgctacaatggatggtacaaagggcagcgaagccgcgaggtgaagccaatcccataaagccattctcagttcggattgcaggctgcaactcgcctgcatgaagccggaattgctagtaatcgcggatcagcatgccgcggtgaatacgttcccgggtcttgtacacaccgcccgtcacaccacgagagtttgtaacacccgaagtcggtgaggcaaccttttggagccagccgcctaaggtgggacaaatgattggggtg

SEQ ID NO: 118 - DNA, 1476 bp, Bacillus coagulans
gacgaacgctggcggcgtgcctaatacatgcaagtcgtgcggaccttttaaaagcttgcttttaaaaggttagcggcggacgggtgagtaacacgtgggcaacctgcctgtaagatcgggataacgccgggaaaccggggctaataccggatagtttttttctccgcatggaggaaaaaggaaagacggcttcggctgtcacttacagatgggcccgcggcgcattagctagttggtggggtaacggctcaccaaggcaacgatgcgtagccgacctgagagggtgatcggccacattgggactgagacacggcccaaactcctacgggaggcagcagtagggaatcttccgcaatggacgaaagtctgacggagcaacgccgcgtgagtgaagaaggccttcgggtcgtaaaactctgttgccggggaagaacaagtgccgttcgaacagggcggcgccttgacggtacccggccagaaagccacggctaactacgtgccagcagccgcggtaatacgtaggtggcaagcgttgtccggaattattgggcgtaaagcgcgcgcaggcggcttcttaagtctgatgtgaaatcttgcggctcaaccgcaagcggtcattggaaactgggaggcttgagtgcagaagaggagagtggaattccacgtgtagcggtgaaatgcgtagagatgtggaggaacaccagtggcgaaggcggctctctggtctgtaactgacgctgaggcgcgaaagcgtggggagcaaacaggattagataccctggtagtccacgccgtaaatgatgagtgctaagtgttagagggtttccgccctttagtgctgcagctaacgcattaagcactccgcctggggagtacggccgcaaggctgaaactcaaaggaattgacgggggcccgcacaagcggtggagcatgtggtttaattcgaagcaacgcgaagaaccttaccaggtcttgacatcctctgacctccctggagacagggctttccccttcgggggacagagtgacaggtggtgcatggttgtcgtcagctcgtgtcgtgagatgttgggttaagtcccgcaacgagcgcaacccttgaccttagttgccagcattcagttgggcactctaaggtgactgccggtgacaaaccggaggaaggtggggatgacgtcaaatcatcatgccccttatgacctgggctacacacgtgctacaatggatggtacaaagggctgcgagaccgcgaggttaagccaatcccagaaaaccattcccagttcggattgcaggctgcaacccgcctgcatgaagccggaatcgctagtaatcgcggatcagcatgccgcggtgaatacgttcccgggccttgtacacaccgcccgtcacaccacgagagtttgtaacacccgaagtcggtgaggtaacctttatggagccagccgccgaaggtgggacagatgattggggtg

SEQ ID NO: 119 - DNA, 1474 bp, Bacillus cohnii
gacgaacgctggcggcgtgcctaatacatgcaagtcgagcgaacttctttagagcttgctttaaagaagttagcggcggacgggtgagtaacacgtgggcaacctgcctgtaagactgggataacttcgggaaaccggagctaataccggataatatatagtacctcctggtactatattgaaagatggtttcggctatcacttacagatgggcccgcggcgcattagctagttggtgaggtaacggctcaccaaggcaacgatgcgtagccgacctgagagggtgatcggccacactgggactgagacacggcccagactcctacgggaggcagcagtagggaatcttccacaatggacgaaagtctgatggagcaacgccgcgtgagcgatgaaggccttcgggtcgtaaagctctgttgttagggaagaacaagtgcgagagtaactgctcgcaccttgacggtacctaaccagaaagccacggctaactacgtgccagcagccgcggtaatacgtaggtggcaagcgttgtccggaattattgggcgtaaagcgcgcgcaggcggtttcttaagtctgatgtgaaagcccacggctcaaccgtggagggtcattggaaactgggagacttgagtgcagaagaggagagtggaattccacgtgtagcggtgaaatgcgtagagatgtggaggaacaccagtggcgaaggcgactctctggtctgtaactgacgctgaggcgcgaaagcgtggggagcaaacaggattagataccctggtagtccacgccgtaaacgatgagtgctaagtgttagagggtttccgccctttagtgctgcagctaacgcattaagcactccgcctggggagtacggtcgcaagactgaaactcaaaggaattgacgggggcccgcacaagcggtggagcatgtggtttaattcgaagcaacgcgaagaaccttaccaggtcttgacatcctctgccacctctagagatagagcgttccccttcgggggacagagtgacaggtggtgcatggttgtcgtcagctcgtgtcgtgagatgttgggttaagtcccgcaacgagcgcaacccttgttcttagttgccagcatttagttgggcactctaaggagactgccggtgacaaaccggaggaaggtggggatgacgtcaaatcatcatgccccttatgacctgggctacacacgtgctacaatggacggtacaaagggcagcaaaaccgcgaggtcgagccaatcccataaaaccgttctcagttcggattgtaggctgcaactcgcctacatgaagccggaatcgctagtaatcgcggatcagcatgccgcggtgaatacgttcccgggccttgtacacaccgcccgtcacaccacgagagtttgtaacacccgaagtcggtggggtaaccttttggagccagccgcctaaggtgggacagatgattggggtg

SEQ ID NO: 120 - DNA, 1466 bp, Bacillus endophyticus
  misc_feature (1235)..(1235): n is a, c, g, or t
  misc_feature (1266)..(1266): n is a, c, g, or t
ctggcggcgtgcctaatacatgcaagtcgagcggagttttgaaaagcttgcttttcaaaacttagcggcggacgggtgagtaacacgtgggcaacctgcccttgagacggggataactccgggaaaccggagctaataccggataacacatatcttcgcatgaggatatgttagaaggtggcttttagctaccactcaaggatgggcccgcggcgcattagctagttggtgaggtaacggctcaccaaggcgacgatgcgtagccgacctgagagggtgatcggccacactgggactgagacacggcccagactcctacgggaggcagcagtagggaatcttccgcaatggacgaaagtctgacggagcaacgccgcgtgagtgatgaaggttttcggatcgtaaagctctgttgttagggaagaacaagtacctgttaaataagcaggtaccttgacggtacctaaccagaaagccacggctaactacgtgccagcagccgcggtaatacgtaggtggcaagcgttgtccggaattattgggcgtaaagcgcgcgcaggcggttccttaagtctgatgtgaaagcccacggctcaaccgtggagggtcattggaaactggggaacttgagtgcagaagaggagagcggaattccacgtgtagcggtgaaatgcgtagagatgtggaggaacaccagtggcgaaggcggctctctggtctgtaactgacgctgaggcgcgaaagcgtggggagcgaacaggattagataccctggtagtccacgccgtaaacgatgagtgctaagtgttagagggtttccgccctttagtgctgcagcaaacgcattaagcactccgcctggggagtacggtcgcaagactgaaactcaaaggaattgacggggacccgcacaagcggtggagcatgtggtttaattcgaagcaacgcgaagaaccttaccaggtcttgacatcctctgctacttctagagatagaaggttcccttcggggacagagtgacaggtggtgcatggttgtcgtcagctcgtgtcgtgagatgttgggttaagtcccgcaacgagcgcaacccttgatcttagttgccagcatttagttgggcactctaaggtgactgccggtgacaaaccggaggaaggtggggatgacgtcaaatcatcatgccccttatgacctgggctacacacgtgctacaatggatggtacaaagggctgcnaaaccgcgaggttaagccaatcccataaaancattctcagttcggattgtaggctgcaactcgcctacatgaagccggaatcgctagtaatcgcggatcagcatgccgcggtgaatacgttcccgggtcttgtacacaccgcccgtcacaccacgagagtttgtaacacccgaagtcggtgaggtaaccttttggagccagccgccgaaggtgggacagatgattggggtg

SEQ ID NO: 121 - DNA, 1474 bp, Bacillus firmus
gacgaacgctggcggcgtgcctaatacatgcaagtcgagcggacggatgggagcttgctcccagaccgtcagcggcggacgggtgagtaacacgtgggcaacctgcctgtaagactgggataactccgggaaaccggggctaataccggataattcttttcctcacatgaggaaaagctgaaagatggcatctcgctatcacttacagatgggcccgcggcgcattagctagttggtgaggtaacggctcaccaaggcgacgatgcgtagccgacctgagagggtgatcggccacactgggactgagacacggcccagactcctacgggaggcagcagtagggaatcttccgcaatggacgaaagtctgacggagcaacgccgcgtgagtgatgaaggttttcggatcgtaaaactctgttgtcagggaagaacaagtaccggagtaactgccggtaccttgacggtacctgaccagaaagccacggctaactacgtgccagcagccgcggtaatacgtaggtggcaagcgttgtccggaattattgggcgtaaagcgcgcgcaggcggttccttaagtctgatgtgaaagcccccggctcaaccggggagggtcattggaaactggggaacttgagtgcagaagagaagagtggaattccacgtgtagcggtgaaatgcgtagagatgtggaggaacaccagtggcgaaggcgactctttggtctgtaactgacgctgaggcgcgaaagcgtggggagcaaacaggattagataccctggtagtccacgccgtaaacgatgagtgctaagtgttagagggtttccgccctttagtgctgcagcaaacgcattaagcactccgcctggggagtacggccgcaaggctgaaactcaaaggaattgacgggggcccgcacaagcggtggagcatgtggtttaattcgaagcaacgcgaagaaccttaccaggtcttgacatctcctgacaaccctagagatagggcgttccccttcgggggacaggatgacaggtggtgcatggttgtcgtcagctcgtgtcgtgagatgttgggttaagtcccgcaacgagcgcaacccttgatcttagttgccagcattcagttgggcactctaaggtgactgccggtgacaaaccggaggaaggtggggatgacgtcaaatcatcatgccccttatgacctgggctacacacgtgctacaatggatggtacaaagggctgcaagaccgcgaggttaagcgaatcccataaaaccattctcagttcggattgcaggctgcaactcgcctgcatgaagccggaatcgctagtaatcgcggatcagcatgccgcggtgaatacgttcccgggccttgtacacaccgcccgtcacaccacgagagtttgtaacacccgaagtcggtggggtaaccttttggagccagccgcctaaggtgggacagatgattggggtg

SEQ ID NO: 122 - DNA, 1475 bp, Bacillus flexus
gatgaacgctggcggcgtgcctaatacatgcaagtcgagcgaactgattagaagcttgcttctatgacgttagcggcggacgggtgagtaacacgtgggcaacctgcctgtaagactgggataactccgggaaaccggagctaataccggataacattttctcttgcataagagaaaattgaaagatggtttcggctatcacttacagatgggcccgcggtgcattagctagttggtgaggtaacggctcaccaaggcaacgatgcatagccgacctgagagggtgatcggccacactgggactgagacacggcccagactcctacgggaggcagcagtagggaatcttccgcaatggacgaaagtctgacggagcaacgccgcgtgagtgatgaaggctttcgggtcgtaaaactctgttgttagggaagaacaagtacaagagtaactgcttgtaccttgacggtacctaaccagaaagccacggctaactacgtgccagcagccgcggtaatacgtaggtggcaagcgttatccggaattattgggcgtaaagcgcgcgcaggcggtttcttaagtctgatgtgaaagcccacggctcaaccgtggagggtcattggaaactggggaacttgagtgcagaagagaaaagcggaattccacgtgtagcggtgaaatgcgtagagatgtggaggaacaccagtggcgaaggcggctttttggtctgtaactgacgctgaggcgcgaaagcgtggggagcaaacaggattagataccctggtagtccacgccgtaaacgatgagtgctaagtgttagagggtttccgccctttagtgctgcagctaacgcattaagcactccgcctggggagtacggtcgcaagactgaaactcaaaggaattgacgggggcccgcacaagcggtggagcatgtggtttaattcgaagcaacgcgaagaaccttaccaggtcttgacatcctctgacaactctagagatagagcgttccccttcgggggacagagtgacaggtggtgcatggttgtcgtcagctcgtgtcgtgagatgttgggttaagtcccgcaacgagcgcaacccttgatcttagttgccagcatttagttgggcactctaaggtgactgccggtgacaaaccggaggaaggtggggatgacgtcaaatcatcatgccccttatgacctgggctacacacgtgctacaatggatggtacaaagggctgcaagaccgcgaggtcaagccaatcccataaaaccattctcagttcggattgtaggctgcaactcgcctacatgaagctggaatcgctagtaatcgcggatcagcatgccgcggtgaatacgttcccgggccttgtacacaccgcccgtcacaccacgagagtttgtaacacccgaagtcggtggggtaacctttatggagccagccgcctaaggtgggacagatgattggggtg

SEQ ID NO: 123 - DNA, 1454 bp, Bacillus fordii
gtgcctaatacatgcaagtcgagcggatgaaagagagcttgctctctggattcagcggcggacgggtgagtaacacgtgggcaacctgcctgtaagactgggataactccgggaaaccggggctaataccggataacttcttttcccgcatggggagaggttgaaagacggttatgctgtcacttacagatgggcccgcggcgcattagctagttggtggggtaacggcctaccaaggcgacgatgcgtagccgacctgagagggtgatcggccacactgggactgagacacggcccagactcctacgggaggcagcagtagggaatcttccgcaatggacgaaagtctgacggagcaacgccgcgtgagtgacgaaggccttcgggtcgtaaaactctgttatcagggaagaacaagcatcgtttaactgacggtgccatgacggtacctgaccagaaagccacggctaactacgtgccagcagccgcggtaatacgtaggtggcaagcgttgtccggaattattgggcgtaaagcgcgcgcaggcggcttcttaagtctgatgtgaaagcccacggctcaaccgtggagggtcattggaaactgggaggcagttgtgcagaagaggagagcggaattccacgtgtagcggtgaaatgcgtaaagatgtggaggaacaccagtggcgaaggcggctctctggtctgtaactgacgctgaggcgcgaaagcgtgggtagcgaacaggattagataccctggtagtccacgccgtaaacgatgagtgctaagtgttagggggtttccgccccttagtgctgcagcaaacgcattaagcactccgcctggggagtacggccgcaaggctgaaactcaaaggaattgacgggggcccgcacaagcggtggagcatgtggtttaattcgaagcaacgcgaagaaccttaccaggtcttgacatcccgctgaccggtctggagacagatctttcccttcggggacagcggtgacaggtggtgcatggttgtcgtcagctcgtgtcgtgagatgttgggttaagtcccgcaacgagcgcaacccttgatcttagttgccagcattcagttgggcactctaaggtgactgccggtgacaaaccggaggaaggtggggatgacgtcaaatcatcatgccccttatgacctgggctacacacgtgctacaatggatggtacagagggcagcgagaccgcgaggtggagcgaatcccttaaaaccattctcagttcggattgcaggctgcaactcgcctgcatgaagccggaatcgctagtaatcgcggatcagcatgccgcggtgaatacgttcccgggccttgtacacaccgcccgtcacaccacgagagtttgtaacacccgaagtcggtggggtaaccttttggagccagccgccgaaggtgggacagatgattggggtg

SEQ ID NO: 124 - DNA, 1468 bp, Bacillus galactosidilyticus
acgctggcggcgtgcctaatacatgcaagtcgagcgaatttgatgggagcttgctccctgaaaattagcggcggacgggtgagtaacacgtgggcaacctacctgtaagcctgggataacttcgggaaaccggagctaataccggataatttctttcttcacatgaagagaggttgaaagacggctttgctgtcacttacagatgggcccgcggcgcattagctagttggtgaggtaacggctcaccaaggccacgatgcgtagccgacctgagagggtgatcggccacactgggactgagacacggcccagactcctacgggaggcagcagtagggaatcttccgcaatggacgaaagtctgacggagcaacgccgcgtgagtgaagaaggtcttcggatcgtaaaactctgttatcagggaagaacaagtaccggagttactgccggtaccttgacggtacctgaccagaaagccacggctaactacgtgccagcagccgcggtaatacgtaggtggcaagcgttgtccggaattattgggcgtaaagcgcgcgcaggcggttctttaagtctgatgtgaaatcttgcggctcaaccgtgagcggtcattggaaactggagaacttgagtgcagaagagaagagcggaattccacgtgtagcggtgaaatgcgtagagatgtggaggaacaccagtggcgaaggcggctctttggtctgtaactgacgctgaggcgcgaaagcgtggggagcgaacaggattagataccctggtagtccacgccgtaaacgatgagtgctaagtgttagagggtttccgccctttagtgctgcagcaaacgcattaagcactccgcctggggagtacggccgcaaggctgaaactcaaaggaattgacgggggcccgcacaagcggtggagcatgtggtttaattcgaagcaacgcgaagaaccttaccaggtcttgacatccttatgcctgccctagagatagggagttcccttcggggacataagtgacaggtggtgcatggttgtcgtcagctcgtgtcgtgagatgttgggttaagtcccgcaacgagcgcaacccttgaaattagttgccagcatttagttgggcactctaatttgactgccggtgacaaaccggaggaaggtggggatgacgtcaaatcatcatgccccttatgacctgggctacacacgtgctacaatggatggtacagagggctgcgagaccgcgaggtttagccaatcccttaaaaccattctcagttcggattgcaggctgcaactcgcctgcatgaagccggaatcgctagtaatcgcggatcagcatgccgcggtgaatacgttcccgggccttgtacacaccgcccgtcacaccacgagagtttgtaacacccgaagtcggtgaggtaaccttttggagccagccgccgaaggtgggacagatgattggggtg

SEQ ID NO: 125 - DNA, 1465 bp, Bacillus halodurans
  misc_feature (232)..(232): n is a, c, g, or t
  misc_feature (818)..(818): n is a, c, g, or t
  misc_feature (1241)..(1241): n is a, c, g, or t
acgctggcggcgtgcctaatacatgcaagtcgagcggaccaaagggagcttgctcctggaggttagcggcgaacgggtgagtaacacgtgggcaacctgcctgtaagactgggataacatcgagaaatcggtgctaataccggataataaaaagaactgcatggttcttttttgaaagatggtttcggctatcacttacagatgggcccgcggcgcattagctagttggtgnggtaacggctcaccaaggcgacgatgcgtagccgacctgagagggtgatcggccacactgggactgagacacggcccagactcctacgggaggcagcagtagggaatcttccgcaatggacgaaagtctgacggagcaacgccgcgtgagtgatgaaggttttcggatcgtaaaactctgttgttagggaagacagtgccgttcgaaagggcggcaccttgacggtacctaacgagaaagccacggctaactacgtgccagcagccgcggtaatacgtaggtggcaagcgttgtccggaattattgggcgtaaagcgcgcgcaggcggtctcttaagtctgatgtgaaagcccccggctcaaccggggagggtcattggaaactgggagacttgagtacagaagaggagagtggaattccacgtgtagcggtgaaatgcgtagagatgtggaggaacaccagtggcgaaggcgactctctggtctgtaactgacgctgaggcgcgaaagcgtggggagcaaacaggattagataccctggtagtccacgccgtaaacgatgagtgctaggtgttaggggtttcgangcccttagtgccgaagttaacacattaagcactccgcctggggagtacgaccgcaaggttgaaactcaaaggaattgacgggggcccgcacaagcagtggagcatgtggtttaattcgaagcaacgcgaagaaccttaccaggtcttgacatcctttgaccaccctagagatagggctttccccttcgggggacaaagtgacaggtggtgcatggttgtcgtcagctcgtgtcgtgagatgttgggttaagtcccgcaacgagcgcaacccttgaccttagttgccagcattcagttgggcactctaaggtgactgccggtgacaaaccggaggaaggtggggatgacgtcaaatcatcatgccccttatgacctgggctacacacgtgctacaatggatggtacaaagggttgcgaagccgngaggtgaagccaatcccagaaagccattctcagttcggattgcaggctgcaactcgcctgcatgaagccggaattgctagtaatcgcggatcagcatgccgcggtgaatacgttcccgggccttgtacacaccgcccgtcacaccacgagagtttgtaacacccgaagtcggtggggtaaccttttggagccagccgcctaaggtgggacagatgattggggtg

SEQ ID NO: 126 - DNA, 1472 bp, Bacillus infantis
gacgaacgctggcggcgtgcctaatacatgcaagtcgagcggacggatgggagcttgctccctgaagtcagcggcggacgggtgagtaacacgtgggcaacctgcctgtaagactgggataacttcgggaaaccggagctaataccggataatgcataacctctcatgaggctatgctgaaagatggtttcggctatcacttacagatgggcccgcggcgcattagctagttggtgaggtaacggctcaccaaggcaacgatgcgtagccgacctgagagggtgatcggccacactgggactgagacacggcccagactcctacgggaggcagcagtagggaatcttccgcaatggacgaaagtctgacggagcaacgccgcgtgagtgatgaaggttttcggatcgtaaaactctgttgtcagggaagaacaagtgccggagtaactgccggcaccttgacggtacctgaccagaaagccacggctaactacgtgccagcagccgcggtaatacgtaggtggcaagcgttgtccggaattattgggcgtaaagcgcgcgcaggcggtctcttaagtctgatgtgaaagcccacggctcaaccgtggagggtcattggaaactgggggacttgagtgcagaagaggaaagtggaattccacgtgtagcggtgaaatgcgtagagatgtggaggaacaccagtggcgaaggcgactttctggtctgtaactgacgctgaggcgcgaaagcgtggggagcaaacaggattagataccctggtagtccacgccgtaaacgatgagtgctaagtgttagagggtttccgccctttagtgctgcagcaaacgcattaagcactccgcctggggagtacggccgcaaggctgaaactcaaaggaattgacgggggcccgcacaagcggtggagcatgtggtttaattcgaagcaacgcgaagaaccttaccaggtcttgacatctcctgacaaccctagagatagggcgttccccttcgggggacaggatgacaggtggtgcatggttgtcgtcagctcgtgtcgtgagatgttgggttaagtcccgcaacgagcgcaacccttgatcttagttgccagcattaggttgggcactctaaggtgactgccggtgacaaaccggaggaaggtggggatgacgtcaaatcatcatgccccttatgacctgggctacacacgtgctacaatggatggtacaaagggctgcaagaccgcgaggttaagcgaatcccataaaaccattctcagttcggattgcaggctgcaactcgcctgcatgaagctggaatcgctagtaatcgcggatcagcatgccgcggtgaatacgttcccgggccttgtacacaccgcccgtcacaccacgagagtttgtaacacccgaagtcggtggggtaaccttttggagccagccgcctaaggtgggacagatgattggggtg

SEQ ID NO: 127 - DNA, 1474 bp, Bacillus koreensis
gacgaacgctggcggcgtgcctaatacatgcaagtcgagcggacttgttagaagcttgcttctaacaagttagcggcggacgggtgagtaacacgtgggtaacctgcctgtaagatggggataactccgggaaaccggagctaataccgaataacactttcgctcgcatgagcggatgttaaaagacggtttcggctgtcacttacagatggacccgcggcgcattagctagttggtgaggtaacggctcaccaaggcgacgatgcgtagccgacctgagagggtgatcggccacactgggactgagacacggcccagactcctacgggaggcagcagtagggaatcttccgcaatggacgaaagtctgacggagcaacgccgcgtgagtgatgaaggttttcggatcgtaaaactctgttgttagggaagaacaagtatgagagtaactgctcgtaccttgacggtacctaaccagaaagccacggctaactacgtgccagcagccgcggtaatacgtaggtggcaagcgttgtccggaattattgggcgtaaagcgcgcgcaggcggttccttaagtctgatgtgaaagcccacggctcaaccgtggagggtcattggaaactggggaacttgagtgcagaagaggaaagcggaattccacgtgtagcggtgaaatgcgtagagatgtggaggaacaccagtggcgaaggcggctttctggtctgtaactgacgctgaggcgcgaaagcgtggggagcaaacaggattagataccctggtagtccacgccgtaaacgatgagtgctaagtgttagagggtttccgccctttagtgctgcagctaacgcattaagcactccgcctggggagtacggccgcaaggctgaaactcaaaggaattgacgggggcccgcacaagcggtggagcatgtggtttaattcgaagcaacgcgaagaaccttaccaggtcttgacatcctttgaccactctagagatagagctttccccttcgggggacaaagtgacaggtggtgcatggttgtcgtcagctcgtgtcgtgagatgttgggttaagtcccgcaacgagcgcaacccttgatcttagttgccagcattaagttgggcactctaaggtgactgccggtgacaaaccggaggaaggtggggatgacgtcaaatcatcatgccccttatgacctgggctacacacgtgctacaatggatgatacaaagggttgcgaagccgcgaggtgaagctaatctcataaaatcattctcagttcggattgtaggctgcaactcgcctacatgaagctggaatcgctagtaatcgcggatcagcatgccgcggtgaatacgttcccgggccttgtacacaccgcccgtcacaccacgagagtttgtaacacccgaagtcggtggggtaaccgtaaggagccagccgcctaaggtgggacagatgattggggtg

SEQ ID NO: 128 - DNA, 1457 bp, Bacillus kyonggiensis
  misc_feature (1005)..(1005): n is a, c, g, or t
ctatacatgcaagtcgagcgcttgcatattgaaagcttgctttcaatatgcttgagcggcggacgggtgagtaacacgtgggcaacctgcctgtaagactgggataacttcgggaaaccggagctaataccggataatgcttttgaactcatgttcgaaagctgaaagatggtttcggctatcacttacagatgggcccgcggcgcattagctagttggtgaggtaacggctcaccaaggcgacgatgcgtagccgacctgagagggtgatcggccacactgggactgagacacggcccagactcctacgggaggcagcagtagggaatcttccgcaatggacgaaagtctgacggagcaacgccgcgtgagtgatgaaggttttcggatcgtaaaactctgttgttagggaagaacaagtaccggagtaactgccggtaccttgacggtacctaaccagaaagccacggctaactacgtgccagcagccgcggtaatacgtaggtggcaagcgttgtccggaattattgggcgtaaagcgcgcgcaggcggtcttttaagtctgatgtgaaagcccccggctcaaccggggagggtcattggaaactgggagacttgagtgcagaagagaagagcggaattccacgtgtagcggtgaaatgcgtagagatgtggaggaacaccagtggcgaaggcggctctttggtctgtaactgacgctgaggcgcgaaagcgtggggagcaaacaggattagataccctggtagtccacgccgtaaacgatgagtgctaagtgttagagggtttccgccctttagtgctgcagcaaacgcattaagcactccgcctggggagtacggccgcaaggctgaaactcaaaggaattgacgggggcccgcacaagcggtggagcatgtggtttaattcgaagcaacgcgaagaaccttaccaggtcttgacatcctctgccaaccctagagatagggcgttccccttcgggggacngagtgacaggtggtgcatggttgtcgtcagctcgtgtcgtgagatgttgggttaagtcccgcaacgagcgcaacccttgatcttagttgccagcatttagttgggcactctaaggtgactgccggtgacaaaccggaggaaggtggggatgacgtcaaatcatcatgccccttatgacctgggctacacacgtgctacaatggatggtacaaagggcagcaaaaccgcgaggtcgagccaatcccataaaaccattctcagttcggattgtaggctgcaactcgcctacatgaagccggaatcgctagtaatcgcggatcagcatgccgcggtgaatacgttcccgggccttgtacacaccgcccgtcacaccacgagagtttgtaacacccgaagtcggtggggtaaccgtaaggagccagccgcctaaggtgggacagatgattggggtg

SEQ ID NO: 129 - DNA, 1474 bp, Bacillus lentus
gacgaacgctggcggcgtgcctaatacatgcaagtcgagcgaatggatgggagcttgctcccagaagttagcggcggacgggtgagtaacacgtgggcaacctacctgtaagactgggataacttcgggaaaccggagctaataccggataacttctttcttctcctggagaaaggttgaaagacggcttcggctgtcacttacagatgggcccgcggcgcattagctagttggtgaggtaacggctcaccaaggcaacgatgcgtagccgacctgagagggtgatcggccacactgggactgagacacggcccagactcctacgggaggcagcagtagggaatcttccgcaatggacgaaagtctgacggagcaacgccgcgtgagtgatgaaggttttcggatcgtaaaactctgttatcagggaagaacaagtatcggagtaactgccggtaccttgacggtacctgaccagaaagccacggctaactacgtgccagcagccgcggtaatacgtaggtggcaagcgttgtccggaattattgggcgtaaagcgcgcgcaggcggtttcttaagtctgatgtgaaagcccacggctcaaccgtggaaggtcattggaaactgggagacttgagtgcagaagagaagagcggaattccacgtgtagcggtgaaatgcgtagagatgtggaggaacaccagtggcgaaggcggctctttggtctgtaactgacgctgaggcgcgaaagcgtggggagcgaacaggattagataccctggtagtccacgccgtaaacgatgagtgctaagtgttagagggtttccgccctttagtgctgcagttaacgcattaagcactccgcctggggagtacggccgcaaggctgaaactcaaaggaattgacgggggcccgcacaagcggtggagcatgtggtttaattcgaagcaacgcgaagaaccttaccaggtcttgacatcctctgaccaccctagagatagggacttccccttcgggggacagagtgacaggtggtgcatggttgtcgtcagctcgtgtcgtgagatgttgggttaagtcccgcaacgagcgcaacccttaaccttagttgccagcattcagttgggcactctaaggtgactgccggtgacaaaccggaggaaggtggggatgacgtcaaatcatcatgccccttatgacctgggctacacacgtgctacaatggatggtacaaagggttgcaagaccgcgaggtttagctaatcccataaaaccattctcagttcggattgcaggctgcaactcgcctgcatgaagccggaatcgctagtaatcgtggatcagcatgccacggtgaatacgttcccgggccttgtacacaccgcccgtcacaccacgagagtttgtaacacccgaagtcggtggggtaacccttacgggagccagccgccgaaggtgggacagatgattggggtg

SEQ ID NO: 130 - DNA, 1473 bp, Bacillus licheniformis
gacgaacgctggcggcgtgcctaatacatgcaagtcgagcggaccgacgggagcttgctctcttaggtcagcggcggacgggtgagtaacacgtgggtaacctgcctgtaagactgggataactccgggaaaccggggctaataccggatgcttgattgaaccgcatggttccaatcataaaaggtggctttcagctaccacttacagatggacccgcggcgcattagctagttggtgaggtaacggctcaccaaggcgacgatgcgtagccgacctgagagggtgatcggccacactgggactgagacacggcccagactcctacgggaggcagcagtagggaatcttccgcaatggacgaaagtctgacggagcaacgccgcgtgagtgatgaaggttttcggatcgtaaaactctgttgttagggaagaacaagtaccgttcgaatagggcggtaccttgacggtacctaaccagaaagccacggctaactacgtgccagcagccgcggtaatacgtaggtggcaagcgttgtccggaattattgggcgtaaagcgcgcgcaggcggtttcttaagtctgatgtgaaagcccccggctcaaccggggagggtcattggaaactggggaacttgagtgcagaagaggagagtggaattccacgtgtagcggtgaaatgcgtagagatgtggaggaacaccagtggcgaaggcgactctctggtctgtaactgacgctgaggcgcgaaagcgtggggagcgaacaggattagataccctggtagtccacgccgtaaacgatgagtgctaagtgttagagggtttccgccctttagtgctgcagcaaacgcattaagcactccgcctggggagtacggtcgcaagactgaaactcaaaggaattgacgggggcccgcacaagcggtggagcatgtggtttaattcgaagcaacgcgaagaaccttaccaggtcttgacatcctctgacaaccctagagatagggcttccccttcgggggcagagtgacaggtggtgcatggttgtcgtcagctcgtgtcgtgagatgttgggttaagtcccgcaacgagcgcaacccttgatcttagttgccagcattcagttgggcactctaaggtgactgccggtgacaaaccggaggaaggtggggatgacgtcaaatcatcatgccccttatgacctgggctacacacgtgctacaatgggcagaacaaagggcagcgaagccgcgaggctaagccaatcccacaaatctgttctcagttcggatcgcagtctgcaactcgactgcgtgaagctggaatcgctagtaatcgcggatcagcatgccgcggtgaatacgttcccgggccttgtacacaccgcccgtcacaccacgagagtttgtaacacccgaagtcggtgaggtaaccttttggagccagccgccgaaggtgggacagatgattggggtg

SEQ ID NO: 131 - DNA, 1472 bp, Bacillus litoralis
gacgaacgctggcggcgtgcctaatacatgcaagtcgagcgaattgatgggagcttgctccctgatattagcggcggacgggtgagtaacacgtgggtaacctgcctgtaagattgggataactccgggaaaccggagctaataccggataatatgttgaaccgcatggttcaacattgaaagatggcttttgctatcacttacagatggacccgcggcgcattagctagttggtgaggtaacggctcaccaaggcaacgatgcgtagccgacctgagagggtgatcggccacactgggactgagacacggcccagactcctacgggaggcagcagtagggaatcttccgcaatggacgaaagtctgacggagcaacgccgcgtgaacgatgaaggccttcgggtcgtaaagttctgttgttagggaagaacaagtaccagagtaactgctggtaccttgacggtacctaaccagaaagccacggctaactacgtgccagcagccgcggtaatacgtaggtggcaagcgttgtccggaattattgggcgtaaagcgcgcgcaggtggtttcttaagtctgatgtgaaagcccacggctcaaccgtggagggtcattggaaactggggaacttgagtgcagaagaggaaagtggaattccaagtgtagcggtgaaatgcgtagagatttggaggaacaccagtggcgaaggcgactttctggtctgtaactgacactgaggcgcgaaagcgtggggagcgaacaggattagataccctggtagtccacgccgtaaacgatgagtgctaagtgttagagggtttccgccctttagtgctgcagcaaacgcattaagcactccgcctggggagtacggtcgcaagactgaaactcaaaggaattgacgggggcccgcacaagcggtggagcatgtggtttaattcgaagcaacgcgaagaaccttaccaggtcttgacatcccactgcccggtatagagatatacctttcccttcggggacagtggtgacaggtggtgcatggttgtcgtcagctcgtgtcgtgagatgttgggttaagtcccgcaacgagcgcaacccttgatcttagttgccagcattcagttgggcactctaagatgactgccggtgacaaaccggaggaaggtggggatgacgtcaaatcatcatgccccttatgacctgggctacacacgtgctacaatggatggtacaaagggctgcgagactgcgaagttaagcgaatcccataaaaccattctcagttcggattgcaggctgcaactcgcctgcatgaagctggaatcgctagtaatcgcggatcagcatgccgcggtgaatacgttcccgggccttgtacacaccgcccgtcacaccacgagagtttgtaacacccgaagtcggtggggtaaccgtaaggagccagccgcctaaggtgggacagatgattggggtg

SEQ ID NO: 132 - DNA, 1473 bp, Bacillus marisflavi
gacgaacgctggcggcgtgcctaatacatgcaagtcgagcggatcgatgggagcttgctccctgagatcagcggcggacgggtgagtaacacgtgggtaacctgcctgtaagactgggataactccgggaaaccggggctaataccggataacacctacccccgcatgggggaaggttgaaaggtggcttcggctatcacttacagatggacccgcggcgcattagctagttggtgaggtaatggctcaccaaggcgacgatgcgtagccgacctgagagggtgatcggccacactgggactgagacacggcccagactcctacgggaggcagcagtagggaatcttccgcaatggacgaaagtctgacggagcaacgccgcgtgagtgaagaaggttttcggatcgtaaaactctgttgttagggaagaacaagtgccgttcgaatagggcggcgccttgacggtacctaaccagaaagccacggctaactacgtgccagcagccgcggtaatacgtaggtggcaagcgttgtccggaattattgggcgtaaagcgcgcgcaggtggtttcttaagtctgatgtgaaagcccacggctcaaccgtggagggtcattggaaactggggaacttgagtgcagaagaggaaagtggaattccaagtgtagcggtgaaatgcgtagatatttggaggaacaccagtggcgaaggcgactttctggtctgtaactgacactgaggcgcgaaagcgtggggagcaaacaggattagataccctggtagtccacgccgtaaacgatgagtgctaagtgttagagggtttccgccctttagtgctgcagctaacgcattaagcactccgcctggggagtacggtcgcaagactgaaactcaaaggaattgacgggggcccgcacaagcggtggagcatgtggtttaattcgaagcaacgcgaagaaccttaccaggtcttgacatcctctgacaaccctagagatagggctttccccttcgggggacagagtgacaggtggtgcatggttgtcgtcagctcgtgtcgtgagatgttgggttaagtcccgcaacgagcgcaacccttgatcttagttgccagcattcagttgggcactctaagatgactgccggtgacaaaccggaggaaggtggggatgacgtcaaatcatcatgccccttatgacctgggctacacacgtgctacaatggacggtacaaagggctgcaagaccgcgaggtttagccaatcccataaaaccgttctcagttcggattgtaggctgcaactcgcctacatgaagctggaatcgctagtaatcgcggatcagcatgccgcggtgaatacgttcccgggccttgtacacaccgcccgtcacaccacgagagtttgtaacacccgaagtcggtgaggtaaccttttggagccagccgcctaaggtgggacagatgattggggtg

SEQ ID NO: 133 - DNA, 1474 bp, Bacillus megaterium
gatgaacgctggcggcgtgcctaatacatgcaagtcgagcgaactgattagaagcttgcttctatgacgttagcggcggacgggtgagtaacacgtgggcaacctgcctgtaagactgggataacttcgggaaaccgaagctaataccggataggatcttctccttcatgggagatgattgaaagatggtttcggctatcacttacagatgggcccgcggtgcattagctagttggtgaggtaacggctcaccaaggcaacgatgcatagccgacctgagagggtgatcggccacactgggactgagacacggcccagactcctacgggaggcagcagtagggaatcttccgcaatggacgaaagtctgacggagcaacgccgcgtgagtgatgaaggctttcgggtcgtaaaactctgttgttagggaagaacaagtacaagagtaactgcttgtaccttgacggtacctaaccagaaagccacggctaactacgtgccagcagccgcggtaatacgtaggtggcaagcgttatccggaattattgggcgtaaagcgcgcgcaggcggtttcttaagtctgatgtgaaagcccacggctcaaccgtggagggtcattggaaactggggaacttgagtgcagaagagaaaagcggaattccacgtgtagcggtgaaatgcgtagagatgtggaggaacaccagtggcgaaggcggctttttggtctgtaactgacgctgaggcgcgaaagcgtggggagcaaacaggattagataccctggtagtccacgccgtaaacgatgagtgctaagtgttagagggtttccgccctttagtgctgcagctaacgcattaagcactccgcctggggagtacggtcgcaagactgaaactcaaaggaattgacgggggcccgcacaagcggtggagcatgtggtttaattcgaagcaacgcgaagaaccttaccaggtcttgacatcctctgacaactctagagatagagcgttccccttcgggggacagagtgacaggtggtgcatggttgtcgtcagctcgtgtcgtgagatgttgggttaagtcccgcaacgagcgcaacccttgatcttagttgccagcatttagttgggcactctaaggtgactgccggtgacaaaccggaggaaggtggggatgacgtcaaatcatcatgccccttatgacctgggctacacacgtgctacaatggatggtacaaagggctgcaagaccgcgaggtcaagccaatcccataaaaccattctcagttcggattgtaggctgcaactcgcctacatgaagctggaatcgctagtaatcgcggatcagcatgccgcggtgaatacgttcccgggccttgtacacaccgcccgtcacaccacgagagtttgtaacacccgaagtcggtggagtaaccgtaaggagctagccgcctaaggtgggacagatgattggggtg

SEQ ID NO: 134 - DNA, 1472 bp, Bacillus mojavensis
gacgaacgctggcggcgtgcctaatacatgcaagtcgagcggacagatgggagcttgctccctgatgttagcggcggacgggtgagtaacacgtgggtaacctgcctgtaagactgggataactccgggaaaccggggctaataccggatgcttgtttgaaccgcatggttcaaacataaaaggtggcttcggctaccacttacagatggacccgcggcgcattagctagttggtgaggtaacggctcaccaaggcaacgatgcgtagccgacctgagagggtgatcggccacactgggactgagacacggcccagactcctacgggaggcagcagtagggaatcttccgcaatggacgaaagtctgacggagcaacgccgcgtgagtgatgaaggttttcggatcgtaaagctctgttgttagggaagaacaagtaccgttcgaatagggcggtaccttgacggtacctaaccagaaagccacggctaactacgtgccagcagccgcggtaatacgtaggtggcaagcgttgtccggaattattgggcgtaaagggctcgcaggcggttccttaagtctgatgtgaaagcccccggctcaaccggggagggtcattggaaactggggaacttgagtgcagaagaggagagtggaattccacgtgtagcggtgaaatgcgtagagatgtggaggaacaccagtggcgaaggcgactctctggtctgtaactgacgctgaggagcgaaagcgtggggagcgaacaggattagataccctggtagtccacgccgtaaacgatgagtgctaagtgttagggggtttccgccccttagtgctgcagctaacgcattaagcactccgcctggggagtacggtcgcaagactgaaactcaaaggaattgacgggggcccgcacaagcggtggagcatgtggtttaattcgaagcaacgcgaagaaccttaccaggtcttgacatcctctgacaattctagagataggacgtccccttcgggggcagagtgacaggtggtgcatggttgtcgtcagctcgtgtcgtgagatgttgggttaagtcccgcaacgagcgcaacccttgatcttagttgccagcattcagttgggcactctaaggtgactgccggtgacaaaccggaggaaggtggggatgacgtcaaatcatcatgccccttatgacctgggctacacacgtgctacaatggacagaacaaagggcagcaaaaccgcgaggttaagccaatcccacaaatctgttctcagttcggatcgcagtctgcaactcgactgcgtgaagctggaatcgctagtaatcgcggatcagcatgccgcggtgaatacgttcccgggccttgtacacaccgcccgtcacaccacgagagtttgtaacacccgaagtcggtgaggtaacctttatggagccagccgccgaaggtgggacagatgattggggtg

SEQ ID NO: 135 - DNA, 1474 bp, Bacillus mycoides
gatgaacgctggcggcgtgcctaatacatgcaagtcgagcgaatggattaagagcttgctcttatgaagttagcggcggacgggtgagtaacacgtgggtaacctacccataagactgggataactccgggaaaccggggctaataccggataatattttgaactgcatagttcgaaattgaaaggcggcttcggctgtcacttatggatggacccgcgtcgcattagctagttggtgaggtaacggctcaccaaggcgacgatgcgtagccgacctgagagggtgatcggccacactgggactgagacacggcccagactcctacgggaggcagcagtagggaatcttccgcaatggacgaaagtctgacggagcaacgccgcgtgagtgatgaaggctttcgggtcgtaaaactctgttgttagggaagaacaagtgctagttgaataagctggcaccttgacggtacctaaccagaaagccacggctaactacgtgccagcagccgcggtaatacgtaggtggcaagcgttatccggaattattgggcgtaaagcgcgcgcaggtggtttcttaagtctgatgtgaaagcccacggctcaaccgtggagggtcattggaaactgggagacttgagtgcagaagaggaaagtggaattccatgtgtagcggtgaaatgcgtagagatatggaggaacaccagtggcgaaggcgactttctggtctgtaactgacactgaggcgcgaaagcgtggggagcaaacaggattagataccctggtagtccacgccgtaaacgatgagtgctaagtgttagagggtttccgccctttagtgctgaagttaacgcattaagcactccgcctggggagtacggccgcaaggctgaaactcaaaggaattgacgggggcccgcacaagcggtggagcatgtggtttaattcgaagcaacgcgaagaaccttaccaggtcttgacatcctctgaaaactctagagatagagcttctccttcgggagcagagtgacaggtggtgcatggttgtcgtcagctcgtgtcgtgagatgttgggttaagtcccgcaacgagcgcaacccttgatcttagttgccatcattaagttgggcactctaaggtgactgccggtgacaaaccggaggaaggtggggatgacgtcaaatcatcatgccccttatgacctgggctacacacgtgctacaatggacggtacaaagagctgcaagaccgcgaggtggagctaatctcataaaaccgttctcagttcggattgtaggctgcaactcgcctacatgaagctggaatcgctagtaatcgcggatcagcatgccgcggtgaatacgttcccgggccttgtacacaccgcccgtcacaccacgagagtttgtaacacccgaagtcggtggggtaacctttatggagccagccgcctaaggtgggacagatgattggggtg

SEQ ID NO: 136 - DNA, 1473 bp, Bacillus nealsonii
gacgaacgctggcggcgtgcctaatacatgcaagtcgagcggacttaaaaagcttgctttttaagttagcggcggacgggtgagtaacacgtgggcaacctgcctgtaagactgggataacttcgggaaaccggagctaataccggataatccttttctactcatgtagagaagtctgaaagacggcatctcgctgtcacttacagatgggcccgcggcgcattagctagttggtgaggtaacggctcaccaaggcgacgatgcgtagccgacctgagagggtgatcggccacactgggactgagacacggcccagactcctacgggaggcagcagtagggaatcttccgcaatggacgaaagtctgacggagcaacgccgcgtgagtgatgaaggttttcggatcgtaaaactctgttgttagggaagaataagtatgagagtaactgctcgtaccttgacggtacctaaccagaaagccacggctaactacgtgccagcagccgcggtaatacgtaggtggcaagcgttgtccggaattattgggcgtaaagcgcgcgcaggcggtcctttaagtctgatgtgaaagcccacggctcaaccgtggagggtcattggaaactgggggacttgagtgcagaagagaagagtggaattccacgtgtagcggtgaaatgcgtagagatgtggaggaacaccagtggcgaaggcgactctttggtctgtaactgacgctgaggcgcgaaagcgtggggagcaaacaggattagataccctggtagtccacgccgtaaacgatgagtgctaagtgttagagggtttccgccctttagtgctgcagcaaacgcattaagcactccgcctggggagtacggccgcaaggctgaaactcaaaggaattgacgggggcccgcacaagcggtggagcatgtggtttaattcgaagcaacgcgaagaaccttaccaggtcttgacatctcctgacaatcctagagataggacgttccccttcgggggacaggatgacaggtggtgcatggttgtcgtcagctcgtgtcgtgagatgttgggttaagtcccgcaacgagcgcaacccttgatcttagttgccagcatttagttgggcactctaaggtgactgccggtgacaaaccggaggaaggtggggatgacgtcaaatcatcatgccccttatgacctgggctacacacgtgctacaatggatggtacaaagggcagcaaaaccgcgaggtcgagcaaatcccataaaaccattctcagttcggattgtaggctgcaactcgcctacatgaagctggaatcgctagtaatcgcggatcagcatgccgcggtgaatacgttcccgggccttgtacacaccgcccgtcacaccacgagagtttgtaacacccgaagtcggtggggtaacctttttggagccagccgcctaaggtgggatagatgattggggtg

SEQ ID NO: 137 - DNA, 1437 bp, Bacillus okuhidensis
caagttgagcggaccaaagggagcttgctcctggaggttagcggcgaacgggtgagtaacacgtgggcaacctgcctggaagactggcataacatcgagaaatcggtgctaataccggataataaaaagaactgcatggttcttttttgaaagatggtttcggctatcacttaaagatgggcccgcggcgcattagctagttggtggggtaacggctcaccaaggcgacgatgcgtacgacctgagagggtgatccgccacactgggactgagacacggcccagactcctacgggaggcagcagtagggaatcttccgcaatggacgaaagtctgacggagcaacgccgcgtgagtgatgaaggttttcggatcgtaaaactctgttgttagggaagaacaagtgccgttcgaaagggcggcacctggacggtacctaacgagaaagccacggctaactacgtgccagcagccgcggtaatacgtaggtggcaagcgttgtccggaattattgggcgtaaagcgcgcgcaggcggtctcttaagtctgatgtgaaagcccccggctcaaccggggagggtcattggaaactgggagacttgagtacagaagaggagagtggaattccacgtgtagcggtgaaatgcgtagagatgtggaggaacaccagtggcgaaggcgactctctggtctgtaactgacgctgaggcgcgaaagcgtgggagcaaacaggattagataccctggtagtccacgccgtaaacgatgagtgctaggtgttaggggtttcgacgcccttagtgccgaagttaacacattaagcactccgcctggggagtacgaccgcaagttgaaactcaaaggaattgacgggggcccgcacaagcagtggagcatgtggtttaattcgaagcaacgcgaagaaccttaccaggtcttgacatcctttgaccaccctagagatagggctttccccttcgggggacaaagtgacaggtggtgcatggttgtcgtcagctcgtgtcgtgagatgttgggttaagtcccgcaacgagcgcaagccttgaccttagttgccagcattcagttgggcactctaaggtgactgccggtgacaaaccggaggaaggtggggatgacgtcaaatcatcatgccccttatgacctgggctacacacgtgctacaatggatggtacaaagggttgcgaagccgcgaggttaagccaatcccagaaagcattctcagttcggattgcaggctgcaactcgcctgcatgaagccggaattgctagtaatcgcggatcagcatgccgcggtgaatacgttcccgggccttgtacacaccgcccgtcacaccacgagagtttgtaacacccgaagtcggtggggtaaccttttggagccagccgcctaaggtgggacagatgattggggtg

SEQ ID NO: 138 - DNA, 1474 bp, Bacillus pseudofirmus
gacgaacgctggcggcgtgcctaatacatgcaagtcgagcggactgatgggagcttgctccctgatgttagcggcggacgggtgagtaacacgtggccaacctgcctgtaagactgggataactccgggaaaccggggctaataccggataacccgttccacctcatggtggagcggtaaaagatggcctctggctatcacttacagatgggcccgcggcgcattagctagttggtaaggtaacggcttaccaaggcgacgatgcgtagccgacctgagagggtgatcggccacactgggactgagacacggcccagactcctacgggaggcagcagtagggaatcttccgcaatggacgaaagtctgacggagcaacgccgcgtgagtgatgaaggttttcggatcgtaaagctctgttgttagggaagaacaagtgccgtttgaataaggcggcaccttgacggtacctaaccagaaagccacggctaactacgtgccagcagccgcggtaatacgtaggtggcaagcgttgtccggaattattgggcgtaaagcgcgcgcaggcggtctcttaagtctgatgtgaaagcccacggctcaaccgtggagggtcattggaaactgggagacttgagtacagaagaggagagtggaattccacgtgtagcggtgaaatgcgtagatatgtggaggaacaccagtggcgaaggcgactctctggtctgtaactgacgctgaggcgcgaaagcgtggggagcaaacaggattagataccctggtagtccacgccgtaaacgatgagtgctaggtgttaggggtttcgatgcccttagtgccgaagttaacacattaagcactccgcctggggagtacgaccgcaaggttgaaactcaaaggaattgacgggggcccgcacaagcagtggagcatgtggtttaattcgaagcaacgcgaagaaccttaccaggtcttgacatcctttgaccactctagagatagagctttccccttcgggggacaaagtgacaggtggtgcatggttgtcgtcagctcgtgtcgtgagatgttgggttaagtcccgcaacgagcgcaacccttgatcttagttgccagcattcagttgggcactctaaggtgactgccggtgacaaaccggaggaaggtggggatgacgtcaaatcatcatgccccttatgacctgggctacacacgtgctacaatggatggtacaaagggctgcaaaaccgcgaggttgagcgaatcccataaagccattctcagttcggattgtaggctgcaactcgcctacatgaagccggaattgctagtaatcgcggatcagcatgccgcggtgaatacgttcccgggccttgtacacaccgcccgtcacaccacgagagtttgtaacacccgaagtcggtgaggtaaccttttggagccagccgcctaaggtgggacagatgattggggtg

SEQ ID NO: 139 - DNA, 1474 bp, Bacillus pseudomycoides
gatgaacgctggcggcgtgcctaatacatgcaagtcgagcgaatggattaagagcttgctcttatgaagttagcggcggacgggtgagtaacacgtgggtaacctgcccataagactgggataactccgggaaaccggggctaataccggataacattttgcaccgcatggtgcgaaattcaaaggcggcttcggctgtcacttatggatggacccgcgtcgcattagctagttggtgaggtaacggctcaccaaggcaacgatgcgtagccgacctgagagggtgatcggccacactgggactgagacacggcccagactcctacgggaggcagcagtagggaatcttccgcaatggacgaaagtctgacggagcaacgccgcgtgagtgatgaaggctttcgggtcgtaaaactctgttgttagggaagaacaagtgctagttgaataagctggcaccttgacggtacctaaccagaaagccacggctaactacgtgccagcagccgcggtaatacgtaggtggcaagcgttatccggaattattgggcgtaaagcgcgcgcaggtggtttcttaagtctgatgtgaaagcccacggctcaaccgtggagggtcattggaaactgggagacttgagtgcagaagaggaaagtggaattccatgtgtagcggtgaaatgcgtagagatatggaggaacaccagtggcgaaggcgactttctggtctgtaactgacactgaggcgcgaaagcgtggggagcaaacaggattagataccctggtagtccacgccgtaaacgatgagtgctaagtgttagagggtttccgccctttagtgctgaagttaacgcattaagcactccgcctggggagtacggccgcaaggctgaaactcaaaggaattgacgggggcccgcacaagcggtggagcatgtggtttaattcgaagcaacgcgaagaaccttaccaggtcttgacatcctctgacaaccctagagatagggcttccccttcgggggcagagtgacaggtggtgcatggttgtcgtcagctcgtgtcgtgagatgttgggttaagtcccgcaacgagcgcaacccttgatcttagttgccatcattaagttgggcactctaaggtgactgccggtgacaaaccggaggaaggtggggatgacgtcaaatcatcatgccccttatgacctgggctacacacgtgctacaatggacggtacaaagagctgcaagaccgcgaggtggagctaatctcataaaaccgttctcagttcggattgtaggctgcaactcgcctacatgaagctggaatcgctagtaatcgcggatcagcatgccgcggtgaatacgttcccgggccttgtacacaccgcccgtcacaccacgagagtttgtaacacccgaagtcggtggggtaacctttttggagccagccgcctaaggtgggacagatgattggggtg

SEQ ID NO: 140 - DNA, 1471 bp, Bacillus pumilus
gacgaacgctggcggcgtgcctaatacatgcaagtcgagcggacagaagggagcttgctcccggatgttagcggcggacgggtgagtaacacgtgggtaacctgcctgtaagactgggataactccgggaaaccggagctaataccggatagttccttgaaccgcatggttcaaggatgaaagacggtttcggctgtcacttgcagatggacccgcggcgcattagctagttggtggggtaatggctcaccaaggcgacgatgcgtagccgacctgagagggtgatcggccacactgggactgagacacggcccagactcctacgggaggcagcagtagggaatcttccgcaatggacgaaagtctgacggagcaacgccgcgtgagtgatgaaggttttcggatcgtaaagctctgttgttagggaagaacaagtgcgagagtaactgctcgcaccttgacggtacctaaccagaaagccacggctaactacgtgccagcagccgcggtaatacgtaggtggcaagcgttgtccggaattattgggcgtaaagggctcgcaggcggtttcttaagtctgatgtgaaagcccccggctcaaccggggagggtcattggaaactgggaaacttgagtgcagaagaggagagtggaattccacgtgtagcggtgaaatgcgtagagatgtggaggaacaccagtggcgaaggcgactctctggtctgtaactgacgctgaggagcgaaagcgtggggagcgaacaggattagataccctggtagtccacgccgtaaacgatgagtgctaagtgttagggggtttccgccccttagtgctgcagctaacgcattaagcactccgcctggggagtacggtcgcaagactgaaactcaaaggaattgacgggggcccgcacaagcggtggagcatgtggtttaattcgaagcaacgcgaagaaccttaccaggtcttgacatcctctgacaaccctagagatagggctttcccttcggggacagagtgacaggtggtgcatggttgtcgtcagctcgtgtcgtgagatgttgggttaagtcccgcaacgagcgcaacccttgatcttagttgccagcatttagttgggcactctaaggtgactgccggtgacaaaccggaggaaggtggggatgacgtcaaatcatcatgccccttatgacctgggctacacacgtgctacaatggacagaacaaagggctgcgagaccgcaaggtttagccaatcccataaatctgttctcagttcggatcgcagtctgcaactcgactgcgtgaagctggaatcgctagtaatcgcggatcagcatgccgcggtgaatacgttcccgggccttgtacacaccgcccgtcacaccacgagagtttgcaacacccgaagtcggtgaggtaacctttatggagccagccgccgaaggtggggcagatgattggggtg

SEQ ID NO: 141 - DNA, 1473 bp, Bacillus simplex
gacgaacgctggcggcgtgcctaatacatgcaagtcgagcgaatcgatgggagcttgctccctgagattagcggcggacgggtgagtaacacgtgggcaacctgcctataagactgggataacttcgggaaaccggagctaataccggatacgttcttttctcgcatgagagaagatggaaagacggtttacgctgtcacttatagatgggcccgcggcgcattagctagttggtgaggtaatggctcaccaaggcgacgatgcgtagccgacctgagagggtgatcggccacactgggactgagacacggcccagactcctacgggaggcagcagtagggaatcttccgcaatggacgaaagtctgacggagcaacgccgcgtgaacgaagaaggccttcgggtcgtaaagttctgttgttagggaagaacaagtaccagagtaactgctggtaccttgacggtacctaaccagaaagccacggctaactacgtgccagcagccgcggtaatacgtaggtggcaagcgttgtccggaattattgggcgtaaagcgcgcgcaggtggttccttaagtctgatgtgaaagcccacggctcaaccgtggagggtcattggaaactggggaacttgagtgcagaagaggaaagtggaattccaagtgtagcggtgaaatgcgtagagatttggaggaacaccagtggcgaaggcgactttctggtctgtaactgacactgaggcgcgaaagcgtggggagcaaacaggattagataccctggtagtccacgccgtaaacgatgagtgctaagtgttagagggtttccgccctttagtgctgcagctaacgcattaagcactccgcctggggagtacggccgcaaggctgaaactcaaaggaattgacgggggcccgcacaagcggtggagcatgtggtttaattcgaagcaacgcgaagaaccttaccaggtcttgacatcctctgacaaccctagagatagggctttccccttcgggggacagagtgacaggtggtgcatggttgtcgtcagctcgtgtcgtgagatgttgggttaagtcccgcaacgagcgcaacccttgatcttagttgccagcattcagttgggcactctaaggtgactgccggtgacaaaccggaggaaggtggggatgacgtcaaatcatcatgccccttatgacctgggctacacacgtgctacaatggatggtacaaagggctgcaaacctgcgaaggtaagcgaatcccataaagccattctcagttcggattgtaggctgcaactcgcctacatgaagccggaatcgctagtaatcgcggatcagcatgccgcggtgaatacgttcccgggccttgtacacaccgcccgtcacaccacgagagtttgtaacacccgaagtcggtgaggtaacctttatggagccagccgcctaaggtgggacagatgattggggtg

SEQ ID NO: 142 - DNA, 1472 bp, Bacillus sonorensis
gacgaacgctggcggcgtgcctaatacatgcaagtcgagcgaaccgacgggagcttgctcccttaggttagcggcggacgggtgagtaacacgtgggtaacctgcctgtaagactgggataactccgggaaaccggggctaataccggatgcttgattgaaccgcatggttcaattataaaaggtggcttttagctaccacttacagatggacccgcggcgcattagctagttggtgaggtaacggctcaccaaggcgacgatgcgtagccgacctgagagggtgatcggccacactgggactgagacacggcccagactcctacgggaggcagcagtagggaatcttccgcaatggacgaaagtctgacggagcaacgccgcgtgagtgatgaaggttttcggatcgtaaaactctgttgttagggaagaacaagtaccgttcgaacagggcggtaccttgacggtacctaaccagaaagccacggctaactacgtgccagcagccgcggtaatacgtaggtggcaagcgttgtccggaattattgggcgtaaagcgcgcgcaggcggtttcttaagtctgatgtgaaagcccccggctcaaccggggagggtcattggaaactggggaacttgagtgcagaagaggagagtggaattccacgtgtagcggtgaaatgcgtagagatgtggaggaacaccagtggcgaaggcgactctctggtctgtaactgacgctgaggcgcgaaagcgtggggagcgaacaggattagataccctggtagtccacgccgtaaacgatgagtgctaagtgttagagggtttccgccctttagtgctgcagcaaacgcattaagcactccgcctggggagtacggtcgcaagactgaaactcaaaggaattgacgggggcccgcacaagcggtggagcatgtggtttaattcgaagcaacgcgaagaaccttaccaggtcttgacatcctctgacacccctagagatagggcttccccttcgggggcagagtgacaggtggtgcatggttgtcgtcagctcgtgtcgtgagatgttgggttaagtcccgcaacgagcgcaacccttgatcttagttgccagcattcagttgggcactctaaggtgactgccggtgacaaaccggaggaaggtggggatgacgtcaaatcatcatgccccttatgacctgggctacacacgtgctacaatgggcagaacaaagggcagcgaagccgcgaggctaagccaatcccacaaatctgttctcagttcggatcgcagtctgcaactcgactgcgtgaagctggaatcgctagtaatcgcggatcagcatgccgcggtgaatacgttcccgggccttgtacacaccgcccgtcacaccacgagagtttgtaacacccgaagtcggtgaggtaaccttttggagccagccgccgaaggtgggacagatgattggggtg

SEQ ID NO: 143 - DNA, 1472 bp, Bacillus subterraneus
gacgaacgctggcggcgtgcctaatacatgcaagtcgagcggatcttcattagcttgcttttgaagatcagcggcggacgggtgagtaacacgtgggcaacctgcctgtaagactgggataacttcgggaaaccggagctaataccggataatcctttccctcacatgagggaaagctgaaagacggtttcggctgtcacttacagatgggcccgcggcgcattagctagttggtgaggtaacggctcaccaaggcgacgatgcgtagccgacctgagagggtgatcggccacactgggactgagacacggcccagactcctacgggaggcagcagtagggaatcttccgcaatggacgaaagtctgacggagcaacgccgcgtgagcgatgaaggccttcgggtcgtaaagctctgttgtcagggaagaacaagtaccggagtaactgccggtaccttgacggtacctgaccagaaagccacggctaactacgtgccagcagccgcggtaatacgtaggtggcaagcgttgtccggaattattgggcgtaaagcgcgcgcaggcggttccttaagtctgatgtgaaagcccccggctcaaccggggagggtcattggaaactggggaacttgagtgcagaagaggagagcggaattccacgtgtagcggtgaaatgcgtagagatgtggaggaacaccagtggcgaaggcggctctctggtctgtaactgacgctgaggcgcgaaagcgtggggagcgaacaggattagataccctggtagtccacgccgtaaacgatgagtgctaagtgttagagggtttccgccctttagtgctgcagcaaacgcattaagcactccgcctggggagtacggccgcaaggctgaaactcaaaggaattgacgggggcccgcacaagcggtggagcatgtggtttaattcgaagcaacgcgaagaaccttaccaggtcttgacatcctctgacaaccctagagatagggcgttccccttcgggggacagagtgacaggtggtgcatggttgtcgtcagctcgtgtcgtgagatgttgggttaagtcccgcaacgagcgcaacccttgatcttagttgccagcattcagttgggcactctaaggtgactgccggtgacaaaccggaggaaggtggggatgacgtcaaatcatcatgccccttatgacctgggctacacacgtgctacaatggatggaacaaagggtcgcgaagccgcgaggtcgagccaatcccataaaaccattctcagttcggattgcaggctgcaactcgcctgcatgaagccggaatcgctagtaatcgcggatcagcatgccgcggtgaatacgttcccgggccttgtacacaccgcccgtcacaccacgagagtttgtaacacccgaagtcggtggggtaaccttttggagccagccgcctaaggtgggacagatgattggggtg

SEQ ID NO: 144 - DNA, 1268 bp, Bacillus subtilis
cagatggacccgcggcgcattagctagttggtgaggtaatggctcaccaaggcgacgatgcgtagccgacctgagagggtgatcggccacactgggactgagacacggcccagactcctacgggaggcagcagtagggaatcttccgcaatggacgaaagtctgacggagcaacgccgcgtgagtgatgaaggttttcggatcgtaaagctctgttgttagggaagaacaagtaccgttcgaatagggcggtaccttgacggtacctaaccagaaagccacggctaactacgtgccagcagccgcggtaatacgtaggtggcaagcgttgtccggaattattgggcgtaaagggctcgcaggcggtttcttaagtctgatgtgaaagcccccggctcaaccggggagggtcattggaaactggggaacttgagtgcagaagaggagagtggaattccacgtgtagcggtgaaatgcgtagagatgtggaggaacaccagtggcgaaggcgactctctggtctgtaactgacgctgaggagcgaaagcgtggggagcgaacaggattagataccctggtagtccacgccgtaaacgatgagtgctaagtgttagggggtttccgccccttagtgctgcagctaacgcattaagcactccgcctggggagtacggtcgcaagactgaaactcaaaggaattgacgggggcccgcacaagcggtggagcatgtggtttaattcgaagcaacgcgaagaaccttaccaggtcttgacatcctctgacaatcctagagataggacgtcccttcgggggcagagtgacaggtggtgcatggttgtcgtcagctcgtgtcgtgagatgttgggttaagtcccgcaacgagcgcaacccttgatcttagttgccagcattcagttgggcactctaaggtgactgccggtgacaaaccggaggaaggtggggatgacgtcaaatcatcatgccccttatgacctgggctacacacgtgctacaatggacagaacaaagggcagcgaaaccgcgaggttaagccaatcccacaaatctgttctcagttcggatcgcagtctgcaactcgactgcgtgaagctggaatcgctagtaatcgcggatcagcatgccgcggtgaatacgttcccgggccttgtacacaccgcccgtcacaccacgagagtttgtaacacccgaagtcggtgaggtaaccttttaggagccagccgccgaaggtgggacagatgattggggtg

SEQ ID NO: 145 - DNA, 1474 bp, Bacillus thuringiensis
gatgaacgctggcggcgtgcctaatacatgcaagtcgagcgaatggattgagagcttgctctcaagaagttagcggcggacgggtgagtaacacgtgggtaacctgcccataagactgggataactccgggaaaccggggctaataccggataacattttgaactgcatggttcgaaattgaaaggcggcttcggctgtcacttatggatggacccgcgtcgcattagctagttggtgaggtaacggctcaccaaggcaacgatgcgtagccgacctgagagggtgatcggccacactgggactgagacacggcccagactcctacgggaggcagcagtagggaatcttccgcaatggacgaaagtctgacggagcaacgccgcgtgagtgatgaaggctttcgggtcgtaaaactctgttgttagggaagaacaagtgctagttgaataagctggcaccttgacggtacctaaccagaaagccacggctaactacgtgccagcagccgcggtaatacgtaggtggcaagcgttatccggaattattgggcgtaaagcgcgcgcaggtggtttcttaagtctgatgtgaaagcccacggctcaaccgtggagggtcattggaaactgggagacttgagtgcagaagaggaaagtggaattccatgtgtagcggtgaaatgcgtagagatatggaggaacaccagtggcgaaggcgactttctggtctgtaactgacactgaggcgcgaaagcgtggggagcaaacaggattagataccctggtagtccacgccgtaaacgatgagtgctaagtgttagagggtttccgccctttagtgctgaagttaacgcattaagcactccgcctggggagtacggccgcaaggctgaaactcaaaggaattgacgggggcccgcacaagcggtggagcatgtggtttaattcgaagcaacgcgaagaaccttaccaggtcttgacatcctctgaaaaccctagagatagggcttctccttcgggagcagagtgacaggtggtgcatggttgtcgtcagctcgtgtcgtgagatgttgggttaagtcccgcaacgagcgcaacccttgatcttagttgccatcattaagttgggcactctaaggtgactgccggtgacaaaccggaggaaggtggggatgacgtcaaatcatcatgccccttatgacctgggctacacacgtgctacaatggacggtacaaagagctgcaagaccgcgaggtggagctaatctcataaaaccgttctcagttcggattgtaggctgcaactcgcctacatgaagctggaatcgctagtaatcgcggatcagcatgccgcggtgaatacgttcccgggccttgtacacaccgcccgtcacaccacgagagtttgtaacacccgaagtcggtggggtaacctttttggagccagccgcctaaggtgggacagatgattggggtg

SEQ ID NO: 146 - DNA, 1471 bp, Bacillus timonensis
gatgaacgctggcggcgtgcctaatacatgcaagtcgagcgaacctgagggagcttgctcccaaaggttagcggcggacgggtgagtaacacgtgggcaacctgcctgtaagactgggataacttcgggaaaccggagctaataccggataatataagagaccacatggtctcctattaaaagatggcttttcgctatcacttacagatgggcccgcggcgcattagctagttggtgaggtaacggctcaccaaggcaacgatgcgtagccgacctgagagggtgatcggccacactgggactgagacacggcccagactcctacgggaggcagcagtagggaatcttccgcaatggacgaaagtctgacggagcaacgccgcgtgagcgaagaaggtcttcggatcgtaaagctctgttgttagggaagaacaagtatcgttcgaatagggcggtaccttgacggtacctaaccagaaagccacggctaactacgtgccagcagccgcggtaatacgtaggtggcaagcgttatccggaattattgggcgtaaagcgcgcgcaggcggtcctttaagtctgatgtgaaagcccacggctcaaccgtggagggtcattggaaactgggggacttgagtgcagaagaggagagcggaattccacgtgtagcggtgaaatgcgtagagatgtggaggaacaccagtggcgaaggcggctctctggtctgtaactgacgctgaggcgcgaaagcgtggggagcgaacaggattagataccctggtagtccacgccgtaaacgatgagtgctaagtgttagagggtttccgccctttagtgctgcagcaaacgcattaagcactccgcctggggagtacggtcgcaagactgaaactcaaaggaattgacgggggcccgcacaagcggtggagcatgtggtttaattcgaagcaacgcgaagaaccttaccaggtcttgacatcctctgacactcctagagataggatttcccttcggggacagagtgacaggtggtgcatggttgtcgtcagctcgtgtcgtgagatgttgggttaagtcccgcaacgagcgcaacccttgatcttagttgccagcatttagttgggcactctaaggtgactgccggtgacaaaccggaggaaggtggggatgacgtcaaatcatcatgccccttatgacctgggctacacacgtgctacaatggatggtacaaagggcagcgaaaccgcgaggttaagccaatcccataaaaccattctcagttcggattgcaggctgcaactcgcctgcatgaagccggaatcgctagtaatcgcggatcagcatgccgcggtgaatacgttcccgggccttgtacacaccgcccgtcacaccacgagagtttgtaacacccgaagtcggtggggtaaccgtaaggagccagccgcctaaggtgggacagatgattggggtg

SEQ ID NO: 147 - DNA, 1472 bp, Bacillus vallismortis
gacgaacgctggcggcgtgcctaatacatgcaagtcgagcggacagatgggagcttgctccctgatgttagcggcggacgggtgagtaacacgtgggtaacctgcctgtaagactgggataactccgggaaaccggggctaataccggatgcttgtttgaaccgcatggttcaaacataaaaggtggcttcggctaccacttacagatggacccgcggcgcattagctagttggtgaggtaatggctcaccaaggcaacgatgcgtagccgacctgagagggtgatcggccacactgggactgagacacggcccagactcctacgggaggcagcagtagggaatcttccgcaatggacgaaagtctgacggagcaacgccgcgtgagtgatgaaggttttcggatcgtaaagctctgttgttagggaagaacaagtgccgttcgaatagggcggcaccttgacggtacctaaccagaaagccacggctaactacgtgccagcagccgcggtaatacgtaggtggcaagcgttgtccggaattattgggcgtaaagggctcgcaggcggcttcttaagtctgatgtgaaagcccccggctcaaccggggagggtcattggaaactggggaacttgagtgcagaagaggagagtggaattccacgtgtagcggtgaaatgcgtagagatgtggaggaacaccagtggcgaaggcgactctctggtctgtaactgacgctgaggagcgaaagcgtggggagcgaacaggattagataccctggtagtccacgccgtaaacgatgagtgctaagtgttagggggtttccgccccttagtgctgcagctaacgcactaagcactccgcctggggagtacggtcgcaagactgaaactcaaaggaattgacgggggcccgcacaagcggtggagcatgtggtttaattcgaagcaacgcgaagaaccttaccaggtcttgacatcctctgacaatcctagagataggacgtccccttcgggggcagagtgacaggtggtgcatggttgtcgtcagctcgtgtcgtgagatgttgggttaagtcccgcaacgagcgcaacccttgatcttagttgccagcattcagttgggcactctaaggtgactgccggtgacaaaccggaggaaggtggggatgacgtcaaatcatcatgccccttatgacctgggctacacacgtgctacaatggacagaacaaagggcagcgaaaccgcgaggttaagccaatcccacaaatctgttctcagttcggatcgcagtctgcaactcgactgcgtgaagctggaatcgctagtaatcgcggatcagcatgccgcggtgaatacgttcccgggccttgtacacaccgcccgtcacaccacgagagtttgtaacacccgaagtcggtgaggtaaccttttaggagccagccgccgaaggtgggacagatgattggggtg

SEQ ID NO: 148 - DNA, 1388 bp, Bacillus vietnamensis
  misc_feature (181)..(181): n is a, c, g, or t
  misc_feature (1129)..(1129): n is a, c, g, or t
  misc_feature (1207)..(1207): n is a, c, g, or t
  misc_feature (1234)..(1234): n is a, c, g, or t
  misc_feature (1299)..(1299): n is a, c, g, or t
  misc_feature (1323)..(1323): n is a, c, g, or t
  misc_feature (1355)..(1355): n is a, c, g, or t
gctggcggcgtgcctaatacatgcaagtcgagcggattgatgggagcttgctccctgatatcagcggcggacgggtgagtaacacgtgggtaacctgcctgtaagactgggataactccgggaaaccggggctaataccggataactcatttcctcgcatgaggaaatgttgaaaggtggnttctggctaccacttacagatggacccgcggcgcattagctagttggtgaggtaacggctcaccaaggcaacgatgcgtagccgacctgagagggtgatcggccacactgggactgagacacggcccagactcctacgggaggcagcagtagggaatcttccgcaatggacgaaagtctgacggagcaacgccgcgtgagtgatgaaggttttcggatcgtaaagctctgttgttagggaagaacaagtgccgttcgaatagggcggcaccttgacggtacctaaccagaaagccacggctaactacgtgccagcagccgcggtaatacgtaggtggcaagcgttgtccggaattattgggcgtaaagcgcgcgcaggtggttccttaagtctgatgtgaaagcccacggctcaaccgtggagggtcattggaaactggggaacttgagtgcagaagaggaaagtggaattccaagtgtagcggtgaaatgcgtagatatttggaggaacaccagtggcgaaggcgactttctggtctgtaactgacactgaggcgcgaaagcgtggggagcaaacaggattagataccctggtagtccacgccgtaaacgatgagtgctaagtgttagggggtttccgccccttagtgctgcagctaacgcattaagcactccgcctggggagtacggtcgcaagactgaaactcaaaggaattgacgggggcccgcacaagcggtggagcatgtggtttaattcgaagcaacgcgaagaaccttaccaggtcttgacatcctctgacaaccctagagatagggctttccccttcgggggacagagtgacaggtggtgcatggttgtcgtcagctcgtgtcgtgagatgttgggttaagtcccgcaacgagcgcaacccttgatcttagttgccagcattcagttgggcactctaanatgactgccggtgacaaaccggaggaaggtggggatgacgtcaaatcatcatgccccttatgacctgggctacacacntgctacaatggacggtacaaagggcancgaaaccgcgaggtttacccaatcccataaaaccgttctcagttcggattgtaggctgcaactcncctacatgaagctggaatcgctantaatcgcggatcagcatgccgcggtgaatacnttcccgggccttgtacacaccgcccgtcacacc

SEQ ID NO: 149 - DNA, 1531 bp, Bacillus weihenstephanensis
tgatcctggctcaggatgaacgctggcggcgtgcctaatacatgcaagtcgagcgaatggattaagagcttgctcttatgaagttagcggcggacgggtgagtaacacgtgggtaacctacccataagactgggataactccgggaaaccggggctaataccggataatattttgaactgcatagttcgaaattgaaaggcggcttcggctgtcacttatggatggacccgcgtcgcattagctagttggtgaggtaacggctcaccaaggcgacgatgcgtagccgacctgagagggtgatcggccacactgggactgagacacggcccagactcctacgggaggcagcagtagggaatcttccgcaatggacgaaagtctgacggagcaacgccgcgtgagtgatgaaggctttcgggtcgtaaaactctgttgttagggaagaacaagtgctagttgaataagctggcaccttgacggtacctaaccagaaagccacggctaactacgtgccagcagccgcggtaatacgtaggtggcaagcgttatccggaattattgggcgtaaagcgcgcgcaggtggtttcttaagtctgatgtgaaagcccacggctcaaccgtggagggtcattggaaactgggagacttgagtgcagaagaggaaagtggaattccatgtgtagcggtgaaatgcgtagagatatggaggaacaccagtggcgaaggcgactttctggtctgtaactgacactgaggcgcgaaagcgtggggagcaaacaggattagataccctggtagtccacgccgtaaacgatgagtgctaagtgttagagggtttccgccctttagtgctgaagttaacgcattaagcactccgcctggggagtacggccgcaaggctgaaactcaaaggaattgacgggggcccgcacaagcggtggagcatgtggtttaattcgaagcaacgcgaagaaccttaccaggtcttgacatcctctgaaaactctagagatagagcttctccttcgggagcagagtgacaggtggtgcatggttgtcgtcagctcgtgtcgtgagatgttgggttaagtcccgcaacgagcgcaacccttgatcttagttgccatcattaagttgggcactctaaggtgactgccggtgacaaaccggaggaaggtggggatgacgtcaaatcatcatgccccttatgacctgggctacacacgtgctacaatggacggtacaaagagctgcaagaccgcgaggtggagctaatctcataaaaccgttctcagttcggattgtaggctgcaactcgcctacatgaagctggaatcgctagtaatcgcggatcagcatgccgcggtgaatacgttcccgggccttgtacacaccgcccgtcacaccacgagagtttgtaacacccgaagtcggtggggtaacctttatggagccagccgcctaaggtgggacagatgattggggtgaagtcgtaacaaggtagccgtatcggaaggtgcggctggatca

SEQ ID NO: 150 - DNA, 1450 bp, Bacteroides coprocola
gatgaacgctagctacaggcttaacacatgcaagtcgaggggcagcatgaacttagcttgctaagtttgatggcgaccggcgcacgggtgagtaacacgtatccaaccttccgtttactcagggatagcctttcgaaagaaagattaatacctgatagtatggtgagattgcatgatggcaccattaaagatttattggtaaacgatggggatgcgttccattaggtagtaggcggggtaacggcccacctagcctgcgatggataggggttctgagaggaaggtcccccacattggaactgagacacggtccaaactcctacgggaggcagcagtgaggaatattggtcaatgggcgagagcctgaaccagccaagtagcgtgaaggatgaaggtcctacggattgtaaacttcttttatacgggaataaagtttcctacgtgtaggattttgtatgtaccgtatgaataagcatcggctaactccgtgccagcagccgcggtaatacggaggatgcgagcgttatccggatttattgggtttaaagggagcgcagacgggagattaagtcagttgtgaaagtttgcggctcaaccgtaaaattgcagttgatactggtttccttgagtgcagttgaggcaggcggaattcgtggtgtagcggtgaaatgcttagatatcacgaagaaccccgattgcgaaggcagcttgctaaactgtaactgacgttcatgctcgaaagtgtgggtatcaaacaggattagataccctggtagtccacacggtaaacgatggatactcgctgttggcgatatactgtcagcggccaagcgaaagcattaagtatcccacctggggagtacgccggcaacggtgaaactcaaaggaattgacgggggcccgcacaagcggaggaacatgtggtttaattcgatgatacgcgaggaaccttacccgggcttaaattgcagacgaattacgaggaaacttgtaagccgcaaggcgtctgtgaaggtgctgcatggttgtcgtcagctcgtgccgtgaggtgtcggcttaagtgccataacgagcgcaaccctcgtggtcagttactaacaggttaagctgagggctctggccagactgccatcgtaagatgtgaggaaggtggggatgacgtcaaatcagcacggcccttacgtccggggctacacacgtgttacaatgggaggtacagaaggccgctacccggcaacgggatgccaatccccaaaacctctctcagttcggactggagtctgcaacccgactccacgaagctggattcgctagtaatcgcgcatcagccacggcgcggtgaatacgttcccgggccttgtacacaccgcccgtcaagccatgaaagccgggggtacctgaagtgcgtaaccgcaaggagcgccctagggtaaaaccggtaattggggct

SEQ ID NO: 151 - DNA, 1445 bp, Bacteroides intestinalis
gatgaacgctagctacaggcttaacacatgcaagtcgaggggcagcatgacctagcaataggttgatggcgaccggcgcacgggtgagtaacacgtatccaacctgccgattattccgggatagcctttcgaaagaaagattaatactggatagcataacgagaaggcatcttcttgttattaaagaatttcgataatcgatggggatgcgttccattagtttgttggcggggtaacggcccaccaagacatcgatggataggggttctgagaggaaggtcccccacattggaactgagacacggtccaaactcctacgggaggcagcagtgaggaatattggtcaatggacgagagtctgaaccagccaagtagcgtgaaggatgactgccctatgggttgtaaacttcttttatatgggaataaagtgagccacgtgtggctttttgtatgtaccatacgaataaggatcggctaactccgtgccagcagccgcggtaatacggaggatccaagcgttatccggatttattgggtttaaagggagcgtaggcggattattaagtcagttgtgaaagtttgcggctcaaccgtaaaattgcagttgatactggtagtcttgagtgcagcagaggtaggcggaattcgtggtgtagcggtgaaatgcttagatatcacgaagaactccgattgcgaaggcagcttactggactgtaactgacgctgatgctcgaaagtgtgggtatcaaacaggattagataccctggtagtccacacagtaaacgatgaatactcgctgtttgcgatatacagcaagcggccaagcgaaagcattaagtattccacctggggagtacgccggcaacggtgaaactcaaaggaattgacgggggcccgcacaagcggaggaacatgtggtttaattcgatgatacgcgaggaaccttacccgggcttaaattgcaactgacggatttggaaacagatcttccttcgggcagttgtgaaggtgctgcatggttgtcgtcagctcgtgccgtgaggtgtcggcttaagtgccataacgagcgcaacccttatctttagttactaacaggtcatgctgaggactctagagagactgccgtcgtaagatgtgaggaaggtggggatgacgtcaaatcagcacggcccttacgtccggggctacacacgtgttacaatggggggtacagaaggcagctacacagcgatgtgatgctaatcccaaaagcctctctcagttcggattggagtctgcaacccgactccatgaagctggattcgctagtaatcgcgcatcagccacggcgcggtgaatacgttcccgggccttgtacacaccgcccgtcaagccatgaaagccgggggtacctgaagtacgtaaccgcaaggagcgtcctagggtaaaactggtaattggggct

SEQ ID NO: 152 - DNA, 1453 bp, Bacteroides xylanolyticus
  misc_feature (1413)..(1413): n is a, c, g, or t
gatgaacgctggcggcgtgcttaacacatgcaagtcgagcgaagcgattttaaggaagttttcggatggaattaaaattgacttagcggcggacgggtgagtaacgcgtgggtaacctgcctcatacagggggataacagttagaaatgactgctaataccgcataagcgcacagtgccacatggcacagtgtgaaaaactccggtggtatgagatggacccgcgtctgattaggtagttggtgaggtaatggctcaccaagccgacgatcagtagccgacctgagagggtgaccggccacattgggactgagacacggcccaaactcctacgggaggcagcagtggggaatattggacaatgggggaaaccctgatccagcgacgccgcgtgagtgaagaagtgtttcggcatgtaaagctctatcagcagggaagaaaatgacggtacctgactaagaagccccggctaactacgtgccagcagccgcggtaatacgtagggggcaagcgttatccggatttactgggtgtaaagggagcgtagacggttctgcaagtctggagtgaaagcccggggctcaaccccgggactgctttggaaactgtggaactagagtgcaggagaggtaagtggaattcctagtgtagcggtgaaatgcgtagatattaggaggaacaccagtggcgaaggcggcttactggactgtaactgacgttgaggctcgaaagcgtggggagcaaacaggattagataccctggtagtccacgccgtaaacgatgaatactaggtgttggggagcaaagctcttcggtgccgccgctaacgcaataagtattccacctggggagtacgttcgcaagaatgaaactcaaaggaattgacggggacccgcacaagcggtggagcatgtggtttaattcgaagcaacgcgaagaaccttaccaagtcttgacatcggaatgaccgtcccgtaacgggggcttcccttcggggcattccagacaggtggtgcatggttgtcgtcagctcgtgtcgtgagatgttgggttaagtcccgcaacgagcgcaacccttatccttagtagccagcagttcggctgggcactctggggagactgccagggataacctggaggaaggtggggatgacgtcaaatcatcatgccccttatgatttgggctacacacgtgctacaatggcgtaaacaaagggaagcgaaggagtgatctggagcaaatctcaaaaataacgtctcagttcggattgtagtctgcaactcgactacatgaagctggaatcgctagtaatcgcagatcagaatgctgcggtgaatacgttcccgggtcttgtacacaccgcccgtcacaccatgggagttggtaacgcccgaagtcagtgacccaaccgnaaggagggagctgccgaaggcgggactgataactggggtg

SEQ ID NO: 153 - DNA, 1454 bp, Barnesiella viscericola
gatgaacgctagcgacaggcctaacacatgcaagtcgaggggcagcgcgggagtagcaatacttctggcggcgaccggcgcacgggtgagtaacacgtatgcaatctgcctgtaacagggggataacccggagaaatccggcctaataccccataacgacatatcttcgcatggggagatgtctaaagagagcaatcttggttacagatgagcatgcggtccattagccagttggcggggtaacggcccaccaaagcgacgatggataggggttctgagaggaaggtcccccacattggaactgagacacggtccaaactcctacgggaggcagcagtgaggaatattggtcaatggtcggcagactgaaccagccaagtcgcgtgaaggaagacggccctacgggttgtaaacttcttttgtcggagagtaaagtgcgctacgcgtagcgtattgcaagtatccgaagaaaaagcatcggctaactccgtgccagcagccgcggtaatacggaggatgcgagcgttatccggatttattgggtttaaagggtgcgtaggcggcacgccaagtcagcggtgaaatgcccgggcttaacccgggagctgccgttgaaactggcgagctagcgtgcacaagaggcaggcggaatgcgtggtgtagcggtgaaatgcatagatatcacgcagaaccccgattgcgaaggcagcctgctagggtgcaacggacgctgaggcacgaaagcgtggggatcgaacaggattagataccctggtagtccacgcagtaaacgatgaatactaactgtttgcgatataatgtaagcggtacagcgaaagcgttaagtattccacctggggagtacgccggcaacggtgaaactcaaaggaattgacgggggcccgcacaagcggaggaacatgtggtttaattcgatgatacgcgaggaaccttacccgggctcaaacgcagggggaatatgggtgaaagtccatagccagcaatggtcgcctgcgaggtgctgcatggttgtcgtcagctcgtgccgtgaggtgtcggcttaagtgccataacgagcgcaacccctattgacagttactaacgggtcaagccgaggactctgtcgagactgccggcgcaagccgcgaggaaggtggggatgacgtcaaatcagcacggcccttacgtccggggcgacacacgtgttacaatggcaggtacagaaggcagccagtcagcaatgacgcgcgaatcccgaaaacctgtctcagttcggattggagtctgcaactcgactccatgaagctggattcgctagtaatcgcgcatcagccatggcgcggtgaatacgttcccgggccttgtacacaccgcccgtcaagccatggaagccgggagtacctgaagcatgcaaccgcaaggagcgtacgaaggtaataccggtaactggggct

SEQ ID NO: 154 - DNA, 1453 bp, Blautia luti
  misc_feature (46)..(46): n is a, c, g, or t
  misc_feature (67)..(67): n is a, c, g, or t
  misc_feature (236)..(236): n is a, c, g, or t
  misc_feature (607)..(607): n is a, c, g, or t
  misc_feature (1226)..(1227): n is a, c, g, or t
  misc_feature (1232)..(1232): n is a, c, g, or t
gatgaacgctggcggcgtgcttaacacatgcaagtcgaacgggaantattttattgaaacttcggtngatttaatttaattctagtggcggacgggtgagtaacgcgtgggtaacctgccttatacagggggataacagtcagaaatgactgctaataccgcataagcgcacagagctgcatggctcagtgtgaaaaactccggtggtataagatggacccgcgttggattagctngttggtggggtaacggcccaccaaggcgacgatccatagccggcctgagagggtgaacggccacattgggactgagacacggcccagactcctacgggaggcagcagtggggaatattgcacaatgggggaaaccctgatgcagcgacgccgcgtgaaggaagaagtatctcggtatgtaaacttctatcagcagggaagatagtgacggtacctgactaagaagccccggctaactacgtgccagcagccgcggtaatacgtagggggcaagcgttatccggatttactgggtgtaaagggagcgtagacggtgtggcaagtctgatgtgaaaggcatgggctcaacctgtggactgcattggaaactgncatacttgagtgccggaggggtaagcggaattcctagtgtagcggtgaaatgcgtagatattaggaggaacaccagtggcgaaggcggcttactggacggtaactgacgttgaggctcgaaagcgtggggagcaaacaggattagataccctggtagtccacgccgtaaacgatgaatactaggtgtcggggagcatggctcttcggtgccgtcgcaaacgcagtaagtattccacctggggagtacgttcgcaagaatgaaactcaaaggaattgacggggacccgcacaagcggtggagcatgtggtttaattcgaagcaacgcgaagaaccttaccaaatcttgacatccctctgaccggtctttaatcggacctttccttcgggacaggggagacaggtggtgcatggttgtcgtcagctcgtgtcgtgagatgttgggttaagtcccgcaacgagcgcaacccctatcctcagtagccagcaagttaagttgggcactctgtggagactgccagggataacctggaggaaggcggggatgacgtcaaatcatcatgccccttatgatttgggctacacacgtgctacaatggcgtaaacaaagggaagcgaganngtganatggagcaaatcccaaaaataacgtcccagttcggactgtagtctgcaacccgactacacgaagctggaatcgctagtaatcgcggatcagaatgccgcggtgaatacgttcccgggtcttgtacacaccgcccgtcacaccatgggagtcagtaacgcccgaagtcagtgacctaaccgaaagggaggagctgccgaaggcgggaccgatgactggggtg

SEQ ID NO: 155 - DNA, 1438 bp, Bordetella bronchiseptica
  misc_feature (61)..(61): n is a, c, g, or t
  misc_feature (134)..(134): n is a, c, g, or t
  misc_feature (217)..(217): n is a, c, g, or t
  misc_feature (305)..(305): n is a, c, g, or t
  misc_feature (354)..(354): n is a, c, g, or t
  misc_feature (932)..(932): n is a, c, g, or t
  misc_feature (1261)..(1261): n is a, c, g, or t
  misc_feature (1383)..(1383): n is a, c, g, or t
attgaacgctggcgggatgctttacacatgcaagtcggacggcagcacgggcttcggcctngtggcgagtggcgaacgggtgagtaatgtatcggaacgtgcccagtagcgggggataactacgcgaaagcgtngctaataccgcatacgccctacgggggaaagcgggggaccttcgggcctcgcactattggagcggccgatatcggattagctngttggtggggtaacggcctaccaaggcgacgatccgtagctggtttgagaggacgaccagccacactgggactgagacacggcccagnctcctacgggaggcagcagtggggaattttggacaatgggggcaacccngatccagccatcccgcgtgtgcgatgaaggccttcgggttgtaaagcacttttggcaggaaagaaacggcacgggctaatatcctgtgcaactgacggtacctgcagaataagcaccggctaactacgtgccagcagccgcggtaatacgtagggtgcaagcgttaatcggaattactgggcgtaaagcgtgcgcaggcggttcggaaagaaagatgtgaaatcccagggcttaaccttggaactgcatttttaactaccgggctagagtgtgtcagagggaggtggaattccgcgtgtagcagtgaaatgcgtagatatgcggaggaacaccgatggcgaaggcagcctcctgggataacactgacgctcatgcacgaaagcgtggggagcaaacaggattagataccctggtagtccacgccctaaacgatgtcaactagctgttggggccttcgggccttggtagcgcagctaacgcgtgaagttgaccgcctggggagtacggtcgcaagattaaaactcaaaggaattgacggggacccgcacaagcggtggatgatgtggattaattcgatncaacgcgaaaaaccttacctacccttgacatgtctggaatcccgaagagatttgggagtgctcgcaagagaaccggaacacaggtgctgcatggctgtcgtcagctcgtgtcgtgagatgttgggttaagtcccgcaacgagcgcaacccttgtcattagttgctacgaaagggcactctaatgagactgccggtgacaaaccggaggaaggtggggatgacgtcaagtcctcatggcccttatgggtagggcttcacacgtcatacaatggtcgggacagagggtcgccaacccgcgagggggagccaatcccagaaacccgatcgtngtccggatcgcagtctgcaactcgactgcgtgaagtcggaatcgctagtaatcgcggatcagcatgtcgcggtgaatacgttcccgggtcttgtacacaccgcccgtcacaccatgggagtnggttttaccagaagtagttagcctaaccgcaaggggggcgattaccacggtagga

SEQ ID NO: 156 - DNA, 1453 bp, Bordetella trematum
attgaacgctggcgggatgctttacacatgcaagtcggacggcagcacggacttcggtctggtggcgagtggcgaacgggtgagtaatgtatcggaacgtgcccagtagcgggggataactacgcgaaagcgtggctaataccgcatacgccctacgggggaaagcgggggaccttcgggcctcgcactattggagcggccgatatcggattagctagttggtggggtaacggctcaccaaggcgacgatccgtagctggtttgagaggacgaccagccacactgggactgagacacggcccagactcctacgggaggcagcagtggggaattttggacaatgggggcaaccctgatccagccatcccgcgtgtgcgatgaaggccttcgggttgtaaagcacttttggcaggaaagaaacggcgccagctaatacctggcgctaatgacggtacctgcagaataagcaccggctaactacgtgccagcagccgcggtaatacgtagggtgcaagcgttaatcggaattactgggcgtaaagcgtgcgcaggcggttcggaaagaaagatgtgaaatcccagagcttaactttggaactgcatttttaactaccgggctagagtgtgtcagagggaggtggaattccgcgtgtagcagtgaaatgcgtagatatgcggaggaacaccgatggcgaaggcagcctcctgggataacactgacgctcatgcacgaaagcgtggggagcaaacaggattagataccctggtagtccacgccctaaacgatgtcaactagctgttggggccttcgggccttagtagcgcagctaacgcgtgaagttgaccgcctggggagtacggtcgcaagattaaaactcaaaggaattgacggggacccgcacaagcggtggatgatgtggattaattcgatgcaacgcgaaaaaccttacctacccttgacatgtctggaatcccgaagagatttgggagtgctcgcaagagaaccggaacacaggtgctgcatggctgtcgtcagctcgtgtcgtgagatgttgggttaagtcccgcaacgagcgcaacccttgtcattagttgctacgaaagggcactctaatgagactgccggtgacaaaccggaggaaggtggggatgacgtcaagtcctcatggcccttatgggtagggcttcacacgtcatacaatggtcgggacagagggttgccaacccgcgagggggagccaatctcagaaacccgatcgtagtccggatcgcagtctgcaactcgactgcgtgaagtcggaatcgctagtaatcgcggatcagcatgtcgcggtgaatacgttcccgggtcttgtacacaccgcccgtcacaccatgggagtgggttttaccagaagtagttagcctaaccgcaaggggggcgattaccacggtaggattcatgactggggtg

SEQ ID NO: 157 - DNA, 1465 bp, Brenneria alni
  misc_feature (289)..(289): n is a, c, g, or t
attgaacgctggcggcaggcctaacacatgcaagtcgggcggtagcacaggggagcttgcttcctgggtgacgagcggcggacgggtgagtaaagtctgggaaactgcctgatggagggggataactactggaaacggtagctaataccgcataatgtcttcggaccaaagtgggggaccttagggcctcacgccatcggatgtgcccagatgggattagctggtaggtggggtaaaggctcacctaggcgacgatccctagctggtctgagaggatgaccagccacantggaactgagacacggtccagactcctacgggaggcagcagtggggaatattgcacaatgggggaaaccctgatgcagccatgccgcgtgtgtgaagaaggccttagggttgtaaagcactttcagcggggaggaaggcaatgagcttaataagcttgttgattgacgttacccgcagaagaagcaccggctaactccgtgccagcagccgcggtaatacggagggtgcaagcgttaatcggaatgactgggcgtaaagggcacgcaggcggtttgttaagtcagatgtgaaatccccgggcttaacctgggaactgcatttgaaactggcaagctggagtcttgtagaggggggtagaattccaggtgtagcggtgaaatgcgtagagatctggaggaataccggtggcgaaggcggccccctggacaaagactgacgctgaggtgcgaaagcgtggggagcaaacaggattagataccctggtagtccacgctgtaaacgatgtcgacttgaaggttgtggccttgagccgtggctttcggagcaaacgcgttaagtcgaccgcctggggagtacggccgcaaggttaaaactcaaatgaattgacgggggcccgcacaagcggtggagcatgtggtttaattcgatgcaacgcgaagaaccttacctactcttgacatcctcagaagagactggagacagttttgtgccttcgggaactgagagacaggtgctgcatggctgtcgtcagctcgtgttgtgaaatgttgggttaagtcccgcaacgagcgcaacccttatcctttgttgccagcacgtaatggtgggaactcaaaggagactgccggtgataaaccggaggaaggtggggatgacgtcaagtcatcatggcccttacgagtagggctacacacgtgctacaatggcgcatacaaagagaagcgagcctgcgagggtgagcggacctcataaagtgcgtcgtagtccggattggagtctgcaactcgactccatgaagtcggaatcgctagtaatcgtggatcagaatgccacggtgaatacgttcccgggccttgtacacaccgcccgtcacaccatgggagtgggttgcaaaagaagtaggtagcttaacctcagggggggcgcttaccactttgtgattcatgactggggtg

SEQ ID NO: 158 - DNA, 1398 bp, Brevibacillus agri
  misc_feature (429)..(429): n is a, c, g, or t
  misc_feature (597)..(597): n is a, c, g, or t
  misc_feature (699)..(699): n is a, c, g, or t
  misc_feature (702)..(702): n is a, c, g, or t
  misc_feature (969)..(969): n is a, c, g, or t
  misc_feature (976)..(976): n is a, c, g, or t
gacgaacgctggcggcgtgcctaatacatgcaagtcgagcgagtcccttcgggggctagcggcggacgggtgagtaacacgtaggcaacctgcctctcagactgggataacatagggaaacttatgctaataccggataggtttgtggatcgcatgatctgaaaagaaaagatggctttcgctatcactgggagatgggcctgcggcgcattagctagttggtggggtaacggcctaccaaggcgacgatgcgtagccgacctgagagggtgaccggccacactgggactgagacacggcccagactcctacgggaggcagcagtagggaattttccacaatggacgaaagtctgatggagcaacgccgcgtgaacgatgaaggtcttcggattgtaaagttctgttgtcagggacgaacacgtaccgntcgaacagggcggtatcttgacggtacctgacgagaaagccacggctaactacgtgccagcagccgcggtaatacgtaggtggcaaacgttgtccggatttattgggcgtaaagcgcgcgcaggcggctatgtaagtctggtgttaaagcccggggctcaaccccggntcgcatcggaaactgtgtagcttgagtgcagaagaggaaagcggtattccacgtgtagcggtgaaatgcgtagagatgtggaggaacaccagtggcgaaggnggntttctggtctgtaactgacgctgaggcgcgaaagcgtggggagcaaacaggattagataccctggtagtccacgccgtaaacgatgagtgctaggtgttgggggtttcaataccctcagtgccgcagctaacgcaataagcactccgcctggggagtacgctcgcaagagtgaaactcaaaggaattgacgggggcccgcacaagcggtggagcatgtggtttaattcgaagcaacgcgaagaaccttaccaggtcttgacatcccnctgaccnctctggagacagagtttcccttcgggggagcggtgacaggtggtgcatggttgtcgtcagctcgtgtcgtgagatgttgggttaagtcccgcaacgagcgcaacccttatctttagttgccagcattcagttgggcactctagagagactgccgtcgataagacggaggaaggcggggatgacgtcaaatcatcatgccccttatgacctgggctacacacgtgctacaatggttggtacaacgggatgctacctcgcgagaggacgccaatctcttaaaaccaatctcagttcggattgtaggctgcaactcgcctacatgaagtcggaatcgctagtaatcgcggatcagcatgccgcggtgaatacgttcccgggccttgtacacaccgcccgtcacaccacgggagtttgcaacaccc

SEQ ID NO: 159 - DNA, 1458 bp, Brevibacillus brevis
  misc_feature (44)..(45): n is a, c, g, or t
  misc_feature (54)..(55): n is a, c, g, or t
gacgaacgctggcggcgtgcctaatacatgcaagtcgagcgagnntcttcggannctagcggcggacgggtgagtaacacgtaggcaacctgcctctcagactgggataacatagggaaacttatgctaataccggataggtttttggatcgcatgatccgaaaagaaaaggcggcttcggctgtcactgggagatgggcctgcggcgcattagctagttggtggggtaacggcctaccaaggcgacgatgcgtagccgacctgagagggtgaccggccacactgggactgagacacggcccagactcctacgggaggcagcagtagggaattttccacaatggacgaaagtctgatggagcaacgccgcgtgaacgatgaaggtcttcggattgtaaagttctgttgttagggacgaataagtaccgttcgaatagggcggtaccttgacggtacctgacgagaaagccacggctaactacgtgccagcagccgcggtaatacgtaggtggcaagcgttgtccggatttattgggcgtaaagcgcgcgcaggcggctatgtaagtctggtgttaaagcccggggctcaaccccggttcgcatcggaaactgtgtagcttgagtgcagaagaggaaagcggtattccacgtgtagcggtgaaatgcgtagagatgtggaggaacaccagtggcgaaggcggctttctggtctgtaactgacgctgaggcgcgaaagcgtggggagcaaacaggattagataccctggtagtccacgccgtaaacgatgagtgctaggtgttgggggtttcaataccctcagtgccgcagctaacgcaataagcactccgcctggggagtacgctcgcaagagtgaaactcaaaggaattgacgggggcccgcacaagcggtggagcatgtggtttaattcgaagcaacgcgaagaaccttaccaggtcttgacatcccgctgaccgctctggagacagagcttcccttcggggcagcggtgacaggtggtgcatggttgtcgtcagctcgtgtcgtgagatgttgggttaagtcccgcaacgagcgcaacccttatctttagttgccagcattcagttgggcactctagagagactgccgtcgacaagacggaggaaggcggggatgacgtcaaatcatcatgccccttatgacctgggctacacacgtgctacaatggttggtacaacgggatgctacctcgcgagaggacgccaatctcttaaaaccaatctcagttcggattgtaggctgcaactcgcctacatgaagtcggaatcgctagtaatcgcggatcagcatgccgcggtgaatacgttcccgggccttgtacacaccgcccgtcacaccacgggagtttgcaacacccgaagtcggtgaggtaaccgcaaggagccagccgccgaaggtggggtagatgactggggtg

SEQ ID NO: 160 - DNA, 1458 bp, Brevibacillus choshinensis
gacgaacgctggcggcgtgcctaatacatgcaagtcgagcgagtctcttcggaggctagcggcggacgggtgagtaacacgtaggcaacctgcctctcagactgggataacatagggaaacttatgctaataccggataggtttttggatcgcatgatccgaaaagaaaaggcggcttcggctgtcactgggagatgggcctgcggcgcattagctagttggtggggtaacggcctaccaaggcgacgatgcgtagccgacctgagagggtgaccggccacactgggactgagacacggcccagactcctacgggaggcagcagtagggaattttccacaatggacgaaagtctgatggagcaacgccgcgtgaacgatgaaggtcttcggattgtaaagttctgttgttagggacgaacaagtaccgttcgaatagggcggtaccttgacggtacctgacgagaaagccacggctaactacgtgccagcagccgcggtaatacgtaggtggcaagcgttgtccggatttattgggcgtaaagcgcgcgcaggcggctatgtaagtctggtgttaaagcccggagctcaactccggttcgcatcggaaactgtgtagcttgagtgcagaagaggaaagcggtattccacgtgtagcggtgaaatgcgtagagatgtggaggaacaccagtggcgaaggcggctttctggtctgtaactgacgctgaggcgcgaaagcgtggggagcaaacaggattagataccctggtagtccacgccgtaaacgatgagtgctaggtgttgggggtttcaataccctcagtgccgcagctaacgcaataagcactccgcctggggagtacgctcgcaagagtgaaactcaaaggaattgacgggggcccgcacaagcggtggagcatgtggtttaattcgaagcaacgcgaagaaccttaccaggtcttgacatcccgctgaccgctctggagacagagcttcccttcggggcagcggtgacaggtggtgcatggttgtcgtcagctcgtgtcgtgagatgttgggttaagtcccgcaacgagcgcaacccttatttctagttgccagcattcagttgggcactctagagagactgccgtcgacaagacggaggaaggcggggatgacgtcaaatcatcatgccccttatgacctgggctacacacgtgctacaatggttggtacaacgggatgctacctcgcgaggggacgccaatctcttaaaaccaatctcagttcggattgtaggctgcaactcgcctacatgaagtcggaatcgctagtaatcgcggatcagcatgccgcggtgaatacgttcccgggccttgtacacaccgcccgtcacaccacgggagtttgcaacacccgaagtcggtgaggtaaccgcaaggagccagccgccgaaggtggggtagatgactggggtg

SEQ ID NO: 161 - DNA, 1458 bp, Brevibacillus formosus
gacgaacgctggcggcgtgcctaatacatgcaagtcgagcgagtctcttcggaggctagcggcggacgggtgagtaacacgtaggcaacctgcctctcagactgggataacatagggaaacttatgctaataccggataggtttttggatcgcatgattcgaaaagaaaagatggcttcggctatcactgggagatgggcctgcggcgcattagctagttggtggggtaacggcctaccaaggcgacgatgcgtagccgacctgagagggtgaccggccacactgggactgagacacggcccagactcctacgggaggcagcagtagggaattttccacaatggacgaaagtctgatggagcaacgccgcgtgaacgatgaaggtcttcggattgtaaagttctgttgttagggacgaataagtaccgttcgaatagggcggtaccttgacggtacctgacgagaaagccacggctaactacgtgccagcagccgcggtaatacgtaggtggcaagcgttgtccggatttattgggcgtaaagcgcgcgcaggcggctatgtaagtctggtgttaaagcccggggctcaaccccggttcgcatcggaaactgtgtagcttgagtgcagaagaggaaagcggtattccacgtgtagcggtgaaatgcgtagagatgtggaggaacaccagtggcgaaggcggctttctggtctgtaactgacgctgaggcgcgaaagcgtggggagcaaacaggattagataccctggtagtccacgccgtaaacgatgagtgctaggtgttgggggtttcaataccctcagtgccgcagctaacgcaataagcactccgcctggggagtacgctcgcaagagtgaaactcaaaggaattgacgggggcccgcacaagcggtggagcatgtggtttaattcgaagcaacgcgaagaaccttaccaggtcttgacatcccgctgaccgctctggagacagagcttcccttcggggcagcggtgacaggtggtgcatggttgtcgtcagctcgtgtcgtgagatgttgggttaagtcccgcaacgagcgcaacccttatctttagttgccagcattcagttgggcactctagagagactgccgtcgacaagacggaggaaggcggggatgacgtcaaatcatcatgccccttatgacctgggctacacacgtgctacaatggttggtacaacgggatgctacctcgcgagaggacgccaatctcttaaaaccaatctcagttcggattgtaggctgcaactcgcctacatgaagtcggaatcgctagtaatcgcggatcagcatgccgcggtgaatacgttcccgggccttgtacacaccgcccgtcacaccacgggagtttgcaacacccgaagtcggtgaggtaaccgcaaggagccagccgccgaaggtggggtagatgactggggtg

SEQ ID NO: 162 - DNA, 1458 bp, Brevibacillus laterosporus
gacgaacgctggcggcgtgcctaatacatgcaagtcgagcgagggtcttcggaccctagcggcggacgggtgagtaacacgtaggcaacctgcctgtgagactgggataacatagggaaacttatgctaataccggatagggttttgcttcgcctgaagcgaaacggaaagatggcgcaagctatcacttacagatgggcctgcggcgcattagctagttggtgaggtaacggctcaccaaggcgacgatgcgtagccgacctgagagggtgaccggccacactgggactgagacacggcccagactcctacgggaggcagcagtagggaattttccacaatggacgaaagtctgatggagcaacgccgcgtgaacgatgaaggctttcgggtcgtaaagttctgttgttagggaagaaacagtgctatttaaataaggtagcaccttgacggtacctaacgagaaagccacggctaactacgtgccagcagccgcggtaatacgtaggtggcaagcgttgtccggaattattgggcgtaaagcgcgcgcaggtggctatgtaagtctgatgttaaagcccgaggctcaacctcggttcgcattggaaactgtgtagcttgagtgcaggagaggaaagtggtattccacgtgtagcggtgaaatgcgtagagatgtggaggaacaccagtggcgaaggcgactttctggcctgtaactgacactgaggcgcgaaagcgtggggagcaaacaggattagataccctggtagtccacgccgtaaacgatgagtgctaggtgttaggggtttcaatacccttagtgccgcagctaacgcaataagcactccgcctggggagtacgctcgcaagagtgaaactcaaaggaattgacgggggcccgcacaagcggtggagcatgtggtttaattcgaagcaacgcgaagaaccttaccaggtcttgacatcccactgaccgctctagagatagagcttcccttcggggcagtggtgacaggtggtgcatggttgtcgtcagctcgtgtcgtgagatgttgggttaagtcccgcaacgagcgcaacccttatctttagttgccagcattcagttgggcactctagagagactgccgtcgacaagacggaggaaggcggggatgacgtcaaatcatcatgccccttatgacctgggctacacacgtgctacaatggttggtacaacgggatgctacttcgcgagaagatgctaatctcttaaaaccaatctcagttcggattgtaggctgcaactcgcctacatgaagtcggaatcgctagtaatcgcggatcagcatgccgcggtgaatacgttcccgggccttgtacacaccgcccgtcacaccacgggagtttgcaacacccgaagtcggtgaggtaaccgtaaggagccagccgccgaaggtggggtagataactggggtg

SEQ ID NO: 163 - DNA, 1398 bp, Brevibacillus parabrevis
  misc_feature (429)..(429): n is a, c, g, or t
  misc_feature (576)..(576): n is a, c, g, or t
  misc_feature (659)..(659): n is a, c, g, or t
  misc_feature (849)..(849): n is a, c, g, or t
  misc_feature (869)..(869): n is a, c, g, or t
  misc_feature (974)..(974): n is a, c, g, or t
gacgaacgctggcggcgtgcctaatacatgcaagtcgagcgagggttttcggaccctagcggcggacgggtgagtaacacgtaggcaacctgcctctcagaccgggataacatagggaaacttatgctaataccggataggtttgtggattgcatgatccgaaaagaaaagatggcttcggctatcactgggagatgggcctgcggcgcattagctagttggtggggtaacggcctaccaaggcgacgatgcgtagccgacctgagagggtgaccggccacactgggactgagacacggcccagactcctacgggaggcagcagtagggaattttccacaatggacgaaagtctgatggagcaacgccgcgtgaacgatgaaggtcttcggattgtaaagttctgttgtcagggacgaacacgtgccgntcgaatagggcggtaccttgacggtacctgacgagaaagccacggctaactacgtgccagcagccgcggtaatacgtaggtggcaagcgttgtccggatttattgggcgtaaagcgcgcgcaggcggctatgtaagtctggtgttanagcccggagctcaactccggttcgcatcggaaactgtgtagcttgagtgcagaagaggaaagcggtattccacgtgtagcggngaaatgcgtagagatgtggaggaacaacagtggcgaaggcggctttctggtctgtaactgacgctgaggcgcgaaagcgtggggagcaaacaggattagataccctggtagtccacgccgcaaacgatgagtgctaggtgttgggggtttcaataccctcagtgccgcagctaacgcaataagcactccncctggggagtacgctcgcangagtgaaactcaaaggaattgacgggggcccgcacaagcggtggagcatgtggtttaattcgaagcaacgcgaagaaccttaccaggtcttgacatcccgctgancgctctggagacagagcttcccttcggggcagcggtgacaggtggtgcatggttgtcgtcagctcgtgtcgtgagatgttgggttaagtcccgcaacgagcgcaacccttatctttagttgccagcattcagttgggcactctagagagactgccgtcgacaagacggaggaaggcggggatgacgtcaaatcatcatgccccttatgacctgggctacacacgtgctacaatggttggtacaacgggatgctacctcgcgagaggacgccaatctctgaaaaccaatctcagttcggattgtaggctgcaactcgcctacatgaagtcggaatcgctagtaatcgcggatcagcatgccgcggtgaatacgttcccgggccttgtacacaccgcccgtcacaccacgggagtttgcaacaccc

SEQ ID NO: 164 - DNA, 1385 bp, Brevundimonas diminuta
agcgaacgctggcggcaggcctaacacatgcaagtcgaacggacccttcggggttagtggcggacgggtgagtaacacgtgggaacgtgcctttaggttcggaatagctcctggaaacgggtggtaatgccgaatgtgcccttcgggggaaagatttatcgcctttagagcggcccgcgtctgattagctagttggtgaggtaacggctcaccaaggcgacgatcagtagctggtctgagaggatgaccagccacactgggactgagacacggcccagactcctacgggaggcagcagtggggaatcttgcgcaatgggcgaaagcctgacgcagccatgccgcgtgaatgatgaaggtcttaggattgtaaaattctttcaccggagacgataatgacggtacccggagaagaagccccggctaacttcgtgccagcagccgcggtaatacgaagggggctagcgttgctcggaattactgggcgtaaagggcgcgtaggcggatcgttaagtcagaggtgaaatcccagggctcaaccctggaactgcctttgatactggcgatcttgagtatgagagaggtatgtggaactccgagtgtagaggtgaaattcgtagatattcggaagaacaccagtggcgaaggcgacatactggctcattactgacgctgaggcgcgaaagcgtggggagcaaacaggattagataccctggtagtccacgccgtaaacgatgattgctagttgtcgggctgcatgcagttcggtgacgcagctaacgcattaagcaatccgcctggggagtacggtcgcaagattaaaactcaaaggaattgacgggggcccgcacaagcggtggagcatgtggtttaattcgaagcaacgcgcagaaccttaccaccttttgacatgcctggaccgccacggagacgtggctttcccttcggggactaggacacaggtgctgcatggctgtcgtcagctcgtgtcgtgagatgttgggttaagtcccgcaacgagcgcaaccctcgccattagttgccatcatttagttgggaactctaatgggactgccggtgctaagccggaggaaggtggggatgacgtcaagtcctcatggcccttacagggtgggctacacacgtgctacaatggcaactacagagggttaatccttaaaagttgtctcagttcggattgtcctctgcaactcgagggcatgaagttggaatcgctagtaatcgcggatcagcatgccgcggtgaatacgttcccgggccttgtacacaccgcccgtcacaccatgggagttggttctacccgaaggcggtgcgctaaccagcaatggaggcagccgaccacggtagggtcagcgactggggtg

SEQ ID NO: 165 - DNA, 1447 bp, Butyricimonas virosa
gatgaacgctagcgacaggcttaacacatgcaagtcgaggggcagcacggtgtagcaatacactggtggcgaccggcgcacgggtgagtaacacgtgtgcaaccaaccccgtaccgggagataacccgcggaaacgtggactaacatcccatgatactcgagagccgcatggctctcgatttaaaattccggtggtacgggacgggcacgcgcgacattaggtagttggcggggtaacggcccaccaagccgacgatgtctaggggttctgagaggaaggtcccccacactggaactgagacacggtccagactcctacgggaggcagcagtgaggaatattggtcaatgggcgagagcctgaaccagccaagtcgcgtgagggaagaatggtctatggcctgtaaacctcttttgtcagggaagaataaggatgacgagtcattcgatgccagtacttgacgaataagcatcggctaactccgtgccagcagccgcggtaatacgggggatgcgagcgttatccggatttattgggtttaaagggcgcgtaggcgggacgtcaagtcagcggtaaaagactgcagctaaactgtagcacgccgttgaaactggcgccctggagacgagacgagggaggcggaacaagtgaagtagcggtgaaatgcatagatatcacttggaaccccgatagcgaaggcagcttcccaggctcgttctgacgctgatgcgcgagagcgtgggtagcgaacaggattagataccctggtagtccacgccgtaaacgatgctcactggatcttggcgatacactgccagggttcaagcgaaagtattaagtgagccacctggggagtacgtcggcaacgatgaaactcaaaggaattgacgggggcccgcacaagcggaggaacatgtggtttaattcgatgatacgcgaggaaccttacccgggtttaaatgtagattgcatgaggtggaaacgcttcttcccttcggggctatttacaaggtgctgcatggttgtcgtcagctcgtgccgtgaggtgtcgggttaagtcccataacgagcgcaacccctatcgccagttgccatcggttgaagccgggcactctgtcgagactgccaccgtaaggtgcgaggaaggcggggatgacgtcaaatcagcacggcccttacacccggggcgacacacgtgttacaatggccggtacagagggcagccacggggtgacccggagcgaatctctaaagccggtcgtagttcggactggagtctgcaacccgactccacgaagttggattcgctagtaatcgcgcatcagccatggcgcggtgaatacgttcccgggccttgtacacaccgcccgtcaagccatggaagccgggagtacctgaagatcgtgaccgcgaggaacgggctagggtaataccggtaactggggct

SEQ ID NO: 166 - DNA, 1435 bp, Campylobacter coli
agtgaacgctggcggcgtgcctaatacatgcaagtcgaacgatgaagcttctagcttgctagaagtggattagtggcgcacgggtgagtaaggtatagttaatctgccctacacaagaggacaacagttggaaacgactgctaatactctatactcctgcttaacacaagttgagtagggaaagtttttcggtgtaggatgagactatatagtatcagctagttggtaaggtaatggcttaccaaggctatgacgcttaactggtctgagaggatgatcagtcacactggaactgagacacggtccagactcctacgggaggcagcagtagggaatattgcgcaatgggggaaaccctgacgcagcaacgccgcgtggaggatgacacttttcggagcgtaaactccttttcttagggaagaattctgacggtacctaaggaataagcaccggctaactccgtgccagcagccgcggtaatacggagggtgcaagcgttactcggaatcactgggcgtaaaggacgcgtaggcggattatcaagtcttttgtgaaatctaatggcttaaccattaaactgcttgagaaactgataatctagagtgagggagaggcagatggaattggtggtgtaggggtaaaatccgtagagatcaccaagaatacccattgcgaaggcgatctgctagaactcaactgacgctaatgcgtgaaagcgtggggagcaaacaggattagataccctggtagtccacgccctaaacgatgtatactagttgttgctctgctagtcagggcagtaatgcacctaacggattaagtataccgcctggggagtacggtcgcaagattaaaactcaaaggaatagacggggacccgcacaagcggtggagcatgtggtttaattcgatgatacgcgaagaaccttacctgggcttgatatcctaagaaccttttagagataagagggtgctagcttgctagaacttagagacaggtgctgcacggctgtcgtcagctcgtgtcgtgagatgttgggttaagtcccgcaacgagcgcaacccacgtatttagttgctaacggttcggccgagcactctaaatagactgccttcgtaaggaggaggaaggtgtggacgacgtcaagtcatcatggcccttatgcccagggcgacacacgtgctacaatggcatatacaatgagacgcaataccgcgaggtggagcaaatctataaaatatgtcccagttcggattgttctctgcaactcgagagcatgaagccggaatcgctagtaatcgtagatcagccatgctacggtgaatacgttcccgggtcttgtactcaccgcccgtcacaccatgggagttgatttcactcgaagccggaatactaaactagttaccgtccacagtggaatcagcgactggggtg

SEQ ID NO: 167 - DNA, 1434 bp, Campylobacter concisus
agtgaacgctggcggcgtgcctaatacatgcaagtcgaacggacaagtaagagcttgctcttatgagttagtggcgcacgggtgagtaatgtatagctaatctgccctacactagaggacaacagttggaaacggctgctaatactctatactcctgtcttacataagttagatagggaaagttttatcggtgtaggatgaggctatattgtatcagctagttggtgaggtaatggctcaccaaggctatgacgcataactggtctgagaggatgatcagtcacactggaactgagacacggtccagactcctacgggaggcagcagtagggaatattgctcaatgggggaaaccctgaagcagcaacgccgcgtggaggatgacacttttcggagcgtaaactccttttgttagggaagaataatgacggtacctaacgaataagcaccggctaactccgtgccagcagccgcggtaatacggagggtgcaagcgttactcggaatcactgggcgtaaaggacgcgtaggcggattatcaagtctcttgtgaaatcctatggcttaaccatagaactgcttgggaaactggtaatctagagtgagggagaggcagatggaattggtggtgtaggggtaaaatccgtagagatcaccaggaatacccattgcgaaggcgatctgctggaactcaactgacgctaatgcgtgaaagcgtggggagcaaacaggattagataccctggtagtccacgccctaaacgatgtatactagttgttgctaagctagtcttggcagtaatgcacctaacggattaagtataccgcctggggagtacggtcgcaagattaaaactcaaaggaatagacggggacccgcacaagcggtggagcatgtggtttaattcgaagatacgcgaagaaccttacccggacttgatatctaacaaatcatctagagatagaagagtgtctgcttgcagaaatgttaagacaggtgctgcacggctgtcgtcagctcgtgtcgtgagatgttgggttaagtcccgcaacgagcgcaacccacgtcattagttgctaacagttcggctgagcactctaatgagactgccttcgtaaggaggaggaaggtgtggacgacgtcaagtcatcatggcccttatgtccggggcgacacacgtgctacaatggcatatacaatgagaagcaatatcgcgagatggagcaaatctataaaatatgtcccagttcggattggagtctgcaactcgactccatgaagccggaatcgctagtaatcgtagatcagccatgctacggtgaatacgttcccgggtcttgtactcaccgcccgtcacaccatgggagttgatttcactcgaagccggaatactaaattagttaccgtccacagtggaatcagcgactggggtg

SEQ ID NO: 168 - DNA, 1435 bp, Campylobacter gracilis
agtgaacgctggcggcgtgcctaatacatgcaagtcgaacggaatttaagagagcttgctcttttaaatttagtggcgcacgggtgagtaatatatagctaatctgccccttgctggaggacaacagttagaaatgactgctaatactccatactcctttttaccataagataaatcgggaaagaatttcggcaagggatgagactatatcgtatcagctagtcggtggggtaacggcctaccgaggctatgacgcgtaactggtctgagaggatgatcagtcacattggaactgagacacggtccaaactcctacgggaggcagcagtagggaatattgcgcaatgggggaaaccctgacgcagcaacgccgcgtggaggatgacacttttcggagcgtaaactccttttgttagggaagaataatgacggtacctaacgaataagcaccggctaactccgtgccagcagccgcggtaatacggagggtgcaagcgttactcggaatcactgggcgtaaaggacgcgtaggcggattatcaagtctcttgtgaaatctaacggcttaaccgttaaactgcttgggaaactgataatctagagtaagggagaggcagatggaattcttggtgtaggggtaaaatccgtagatatcaagaagaatacctattgcgaaggcgatctgctggaacttaactgacgctaatgcgtgaaagcgtggggagcaaacaggattagataccctggtagtccacgccctaaacgatgtataccggttgttgctgtgctagtcacggcagtaatccacctaacggattaagtataccgcctggggagtacggtcgcaagattaaaactcaaaggaatagacggggacccgcacaagcggtggagcatgtggtttaattcgaagatacgcgaagaaccttacccggacttgatatctaacaaatcatccagagatggaagagtgtctgcttgcagaaatgttaagacaggtgctgcacggctgtcgtcagctcgtgtcgtgagatgttgggttaagtcccgcaacgagcgcaacccacgtcattagttgctaacggttcggccgagcactctaatgagactgccttcgtaaggaggaggaaggtgtggacgacgtcaagtcatcatggcccttatgtccggggcgacacacgtgctacaatggcatatacaataagacgcaatatcgtaagatggagcaaatctaaaaaatatgtcccagttcggattggagtctgcaactcgactccatgaagccggaatcgctagtaatcgtagatcagccatgctacggtgaatacgttcccgggtcttgtactcaccgcccgtcacaccatgggagttgatttcactcgaagcgggaatgcgaaattcgctaccctccacagtggaatcagcgactggggtg

SEQ ID NO: 169 - DNA, 1435 bp, Campylobacter jejuni
agtgaacgctggcggcgtgcctaatacatgcaagtcgaacgatgaagcttctagcttgctagaagtggattagtggcgcacgggtgagtaaggtatagttaatctgccctacacaagaggacaacagttggaaacgactgctaatactctatactcctgcttaacacaagttgagtagggaaagtttttcggtgtaggatgagactatatagtatcagctagttggtaaggtaatggcttaccaaggctatgacgcttaactggtctgagaggatgatcagtcacactggaactgagacacggtccagactcctacgggaggcagcagtagggaatattgcgcaatgggggaaaccctgacgcagcaacgccgcgtggaggatgacacttttcggagcgtaaactccttttcttagggaagaattctgacggtacctaaggaataagcaccggctaactccgtgccagcagccgcggtaatacggagggtgcaagcgttactcggaatcactgggcgtaaagggcgcgtaggcggattatcaagtctcttgtgaaatctaatggcttaaccattaaactgcttgggaaactgatagtctagagtgagggagaggcagatggaattggtggtgtaggggtaaaatccgtagatatcaccaagaatacccattgcgaaggcgatctgctggaactcaactgacgctaaggcgcgaaagcgtggggagcaaacaggattagataccctggtagtccacgccctaaacgatgtacactagttgttggggtgctagccatctcagtaatgcagctaacgcattaagtgtaccgcctggggagtacggtcgcaagattaaaactcaaaggaatagacggggacccgcacaagcggtggagcatgtggtttaattcgaagatacgcgaagaaccttacctgggcttgatatcctaagaaccttatagagatatgagggtgctagcttgctagaacttagagacaggtgctgcacggctgtcgtcagctcgtgtcgtgagatgttgggttaagtcccgcaacgagcgcaacccacgtatttagttgctaacggttcggccgagcactctaaatagactgccttcgtaaggaggaggaaggtgtggacgacgtcaagtcatcatggcccttatgcccagggcgacacacgtgctacaatggcatatacaatgagacgcaataccgcgaggtggagcaaatctataaaatatgtcccagttcggattgttctctgcaactcgagagcatgaagccggaatcgctagtaatcgtagatcagccatgctacggtgaatacgttcccgggtcttgtactcaccgcccgtcacaccatgggagttgatttcactcgaagccggaatactaaactagttaccgtccacagtggaatcagcgactggggtg

SEQ ID NO: 170 - DNA, 1339 bp, Campylobacter showae
agtgaacgctggcggcgtgcctaatacatgcaagtcgaacggagattaagtagcttgctatttaatcttagtggcgcacgggtgagtaatatatagctaacttgcccattactaagggacaacagttggaaacgactgctaataccttatactccgtatctatataagtagatacgggaaagtttttcggtaatggatagggctatatcgtatcagctagttggtaaggtaatggcttaccaaggctatgacgcgtaactggtctgagaggatgatcagtcacactggaactgagacacggtccagactcctacgggaggcagcagtagggaatattgctcaatgggggaaaccctgaagcagcaacgccgcgtggaggatgacacttttcggagcgtaaactccttttcttgggaaagaattatgacggtacccaaggaataagcaccggctaactccgtgccagcagccgcggtaatacggagggtgcaagcgttactcggaatcactgggcgtaaaggacgcgtaggcggattatcaagtctcttgtgaaatctaacggcttaaccgttaaactgcttgggaaactgataatctagagtaagggagaggcagatggaattcttggtgtaggggtaaaatccgtagagatcaagaagaatacccattgcgaaagcgatctgctggaacttaactgacgctaatgcgtgaaagcgtggggagcaaacaggattagataccctggtagtccacgccctaaacgatgtatactagttgttgcttcgctagtcgaggcagtaatgcacctaacggattaagtataccgcctggggagtacggtcgcaagattaaaactcaaaggaatagacggggacccgcacaagcggtggagcatgtggtttaattcgaagatacgcgaagaaccttacccggacttgatatctaacaaatcatccagagatggaagagtgtctgcttgcagaaatgttaagacaggtgctgcacggctgtcgtcagctcgtgtcgtgagatgttgggttaagtcccgcaacgagcgcaacccacgtcattagttgctaacggttcggccgagcactctaatgagactgccttcgcaaggaggaggaaggtgtggacgacgtcaagtcatcatggcccttatgtccggggcgacacacgtgctacaatggcatatacaatgagacgcaatatcgcgagatggagcaaatctataaaatatgtcccagttcggattggagtctgcaactcgactccatgaagccggaatcgctagtaatcgtagatcagccatgctacggtgaatacgttcccgggtctt

SEQ ID NO: 171 - DNA, 1434 bp, Campylobacter ureolyticus
agtgaacgctggtggcgtgcctaatacatgcaagtcgaacgatgaagtcctagcttgctaggatggattagtggcgcacgggtgagtaatatatagttaatctgccctacacagaggaacaacagttggaaacgactgctaatacctcatactcctatttaacataagttaaatagggaaagtcttttcggtgtaggatgagactatatcgtatcagctagttggtaaggtaatggcttaccaaggctatgacgcgtaactggtctgagaggatgatcagtcacattggaactgagacacggtccaaactcctacgggaggcagcagtaaggaatattgcgcaatgggggaaaccctgacgcagcaacgccgcgtggaggatgacacttttcggagcgtaaactccttttatcaggaaagaataatgacggtacctgatgaataagcaccggctaactccgtgccagcagccgcggtaatacggggggtgcaagcgttactcggaatcactgggcgtaaaggacgcgtaggcggattatcaagtcttttgtgaaatctagtggcttaaccactaaactgcttaggaaactgatagtctagagtaggggagaggtagatggaattcttggtgtaggggtaaaatccgtagagatcaagaagaatacccattgcgaaagcgatctgctggaacctaactgacgctgaggcgtgaaagcgtgggtagcaaacaggattagataccctggtagtccacgccctaaacgatgtatactagttgttgctttgctagtcaaggcagtaatgcagctaacgcattaagtataccgcctggggagtacggtcgcaagattaaaactcaaaggaatagacggggacccgcacaagcggtggagcatgtggtttaattcgaagatacgcgaagaaccttacctggacttgacatcctaaaaacatctaagagattagaaagtgctagtttactagaatttagtgacaggtgctgcacggctgtcgtcagctcgtgtcgtgagatgttgggttaagtcccgcaacgagcgcaacccacgtgtttagttgctaacagctcggctgagcactctaaacagactgccttcgcaaggaggaggaaggtgtggacgacgtcaagtcatcatggcccttatgtccagggcgacacacgtgctacaatgacatatacagtaagacgcaatatcgcaagatggagcaaatctataaaatatgtcccagttcggattggggtctgcaactcgaccccatgaagccggaatcgctagtaatcgtagatcagccatgctacggtgaatacgttcccgggtcttgtactcaccgcccgtcacaccatggaagttgatctcactcgaagcagggatgctaaaatagctaccttccacagtggaatcagtaactggggtg

SEQ ID NO: 172 - DNA, 1464 bp, Cedecea lapagei
attgaacgctggcggcaggcctaacacatgcaagtcgagcggtagcacgggagagcttgctctccgggtgacgagcggcggacgggtgagtaatgtctggggatctgcctgatggagggggataactactggaaacggtagctaataccgcataacgtcgcaagaccaaagagggggaccttcgggcctcttgccatcagatgaacccagatgggattagctagtaggtggggtaacggctcacctaggcgacgatccctagctggtctgagaggatgaccagccacactggaactgagacacggtccagactcctacgggaggcagcagtggggaatattgcacaatgggcgcaagcctgatgcagccatgccgcgtgtatgaagaaggccttcgggttgtaaagtactttcagcgaggaggaaggcattaaggttaataaccttagtgattgacgttactcgcagaagaagcaccggctaactccgtgccagcagccgcggtaatacggagggtgcaagcgttaatcggaattactgggcgtaaagcgcacgcaggcggtttgttaagtcggatgtgaaatccccgggctcaacctgggaactgcattcgaaactggcaagcttgagtcttgtagaggggggtagaattccaggtgtagcggtgaaatgcgtagagatctggaggaataccggtggcgaaggcggccccctggacaaagactgacgctcaggtgcgaaagcgtggggagcaaacaggattagataccctggtagtccacgccgtaaacgatgtcgacttggaggttgtgcccttgaggcgtggcttccggagctaacgcgttaagtcgaccgcctggggagtacggccgcaaggttaaaactcaaatgaattgacgggggcccgcacaagcggtggagcatgtggtttaattcgatgcaacgcgaagaaccttacctactcttgacatccagagaactttccagagatggattggtgccttcgggaactctgagacaggtgctgcatggctgtcgtcagctcgtgttgtgaaatgttgggttaagtcccgcaacgagcgcaacccttatcctttgttgccagcggttcggccgggaactcaaaggagactgccagtgataaactggaggaaggtggggatgacgtcaagtcatcatggcccttacgagtagggctacacacgtgctacaatggcgcatacaaagagaagcgacctcgcgagagcaagcggacctcataaagtgcgtcgtagtccggattggagtctgcaactcgactccatgaagtcggaatcgctagtaatcgtagatcagaatgctacggtgaatacgttcccgggccttgtacacaccgcccgtcacaccatgggagtgggttgcaaaagaagtaggtagcttaaccttcgggagggcgcttaccactttgtgattcatgactggggtg

SEQ ID NO: 173 - DNA, 1464 bp, Cedecea neteri
attgaacgctggcggcaggcctaacacatgcaagtcgagcggtagcacgggagagcttgctctctgggtgacgagcggcggacgggtgagtaatgtctggggatctgcctgatggagggggataactactggaaacggtagctaataccgcataacgtcgcaagaccaaagagggggaccttcgggcctcttgccatcagatgaacccagatgggattagctagtaggtgaggtaatggctcacctaggcgacgatccctagctggtctgagaggatgaccagccacactggaactgagacacggtccagactcctacgggaggcagcagtggggaatattgcacaatgggcgcaagcctgatgcagccatgccgcgtgtatgaagaaggccttcgggttgtaaagtactttcagcgaggaggaaggcattaaggttaataaccttagtgattgacgttactcgcagaagaagcaccggctaactccgtgccagcagccgcggtaatacggagggtgcaagcgttaatcggaattactgggcgtaaagcgcacgcaggcggtttgttaagtcggatgtgaaatccccgggctcaacctgggaactgcattcgaaactggcaagcttgagtcttgtagaggggggtagaattccaggtgtagcggtgaaatgcgtagagatctggaggaataccggtggcgaaggcggccccctggacaaagactgacgctcaggtgcgaaagcgtggggagcaaacaggattagataccctggtagtccacgccgtaaacgatgtcgacttggaggttgtgcccttgaggcgtggcttccggagctaacgcgttaagtcgaccgcctggggagtacggccgcaaggttaaaactcaaatgaattgacgggggcccgcacaagcggtggagcatgtggtttaattcgatgcaacgcgaagaaccttacctactcttgacatccagagaactttccagagatggattggtgccttcgggaactctgagacaggtgctgcatggctgtcgtcagctcgtgttgtgaaatgttgggttaagtcccgcaacgagcgcaacccttatcctttgttgccagcggttcggccgggaactcaaaggagactgccagtgataaactggaggaaggtggggatgacgtcaagtcatcatggcccttacgagtagggctacacacgtgctacaatggcgcatacaaagagaagcgacctcgcgagagcaagcggacctcataaagtgcgtcgtagtccggattggagtctgcaactcgactccatgaagtcggaatcgctagtaatcgtagatcagaatgctacggtgaatacgttcccgggccttgtacacaccgcccgtcacaccatgggagtgggttgcaaaagaagtaggtagcttaaccttcgggagggcgcttaccactttgtgattcatgactggggtg

SEQ ID NO: 174 - DNA, 1462 bp, Chromohalobacter japonicus
attgaacgctggcggcaggcctaacacatgcaagtcgagcggaaacgatcctagcttgctaggaggtgtcgagcggcggacgggtgagtaatgcataggaatctacccagtcgtgggggataacctgaggaaactcaggctaataccgcatacgtcctacgggagaaagcgggggctcttcggacctcgcgcgattggatgagcctatgtcggattagctagttggtaaggtaatggcttaccaaggcaacgatccgtagctggtctgagaggatgatcagccacaccgggactgagacacggcccggactcctacgggaggcagcagtggggaatattggacaatgggcgaaagcctgatccagccatgccgcgtgtgtgaagaaggctttcgggttgtaaagcactttcagcgaggaagaaagcgtgccgtttaatacacggtacggacgacatcactcgcagaagaagcaccggctaactccgtgccagcagccgcggtaatacggagggtgcaagcgttaatcggaattactgggcgtaaagcgcgcgtaggcggcgtgtcacgccgggtgtgaaagccccgggctcaacctgggaacggcatccggaacgggcaggctagagtgcaggagaggaaggtagaattcccggtgtagcggtgaaatgcgtagagatcgggaggaataccagtggcgaaggcggccttctggactgacactgacgctgaggtgcgaaagcgtgggtagcaaacaggattagataccctggtagtccacgccgtaaacgatgtcgactagccgttgggtcccttgaggacttagtggcgcagttaacgcgataagtcgaccgcctggggagtacggccgcaaggttaaaactcaaatgaattgacgggggcccgcacaagcggtggagcatgtggtttaattcgatgcaacgcgaagaaccttacctacccttgacatcctgcgaacccggaagagattccggggtgccttcgggagcgcagagacaggtgctgcatggctgtcgtcagctcgtgttgtgaaatgttgggttaagtcccgtaacgagcgcaacccttgtccctatttgccagcgattcggtcgggaactctagggagactgccggtgacaaaccggaggaaggtggggacgacgtcaagtcatcatggcccttacgggtagggctacacacgtgctacaatggccggtacaaagggttgcgaaagcgcgagctgaagctaatcccgaaaagccggtctcagtccggatcggagtctgcaactcgactccgcgaagtcggaatcgctagtaatcgtgcatcagaatggcacggtgaatacgttcccgggccttgtacacaccgcccgtcacaccatggaagtggactgcaccagaagtggttagcttaaccttcgggagagcgatcaccacggtgtggttcatgactggggtg

SEQ ID NO: 175 - DNA, 1464 bp, Citrobacter amalonaticus
attgaacgctggcggcaggcctaacacatgcaagtcgaacggtaacaggaagcagcttgctgctttgctgacgagtggcggacgggtgagtaatgtctgggaaactgcccgatggagggggataactactggaaacggtagctaataccgcataatgtcgcaagaccaaagagggggaccttcgggcctcttgccatcggatgtgcccagatgggattagctagttggtgaggtaacggctcaccaaggcgacgatccctagctggtctgagaggatgaccagccacactggaactgagacacggtccagactcctacgggaggcagcagtggggaatattgcacaatgggcgcaagcctgatgcagccatgccgcgtgtatgaagaaggccttcgggttgtaaagtactttcagcggggaggaaggggttaaggttaataaccttagccattgacgttacccgcagaagaagcaccggctaactccgtgccagcagccgcggtaatacggagggtgcaagcgttaatcggaattactgggcgtaaagcgcacgcaggcggtctgtcaagtcggatgtgaaatccccgggctcaacctgggaactgcattcgaaactggcaggcttgagtctcgtagaggggggtagaattccaggtgtagcggtgaaatgcgtagagatctggaggaataccggtggcgaaggcggccccctggacgaagactgacgctcaggtgcgaaagcgtggggagcaaacaggattagataccctggtagtccacgccgtaaacgatgtctatttggaggttgtgcccttgaggcgtggcttccggagctaacgcgttaaatagaccgcctggggagtacggccgcaaggttaaaactcaaatgaattgacgggggcccgcacaagcggtggagcatgtggtttaattcgatgcaacgcgaagaaccttacctggtcttgacatccacagaacttggcagagatgccttggtgccttcgggaactgtgagacaggtgctgcatggctgtcgtcagctcgtgttgtgaaatgttgggttaagtcccgcaacgagcgcaacccttatcctttgttgccagcggtccggccgggaactcaaaggagactgccagtgataaactggaggaaggtggggatgacgtcaagtcatcatggcccttacgaccagggctacacacgtgctacaatggcatatacaaagagaagcgacctcgcgagagcaagcggacctcataaagtatgtcgtagtccggattggagtctgcaactcgactccatgaagtcggaatcgctagtaatcgtggatcagaatgccacggtgaatacgttcccgggccttgtacacaccgcccgtcacaccatgggagtgggttgcaaaagaagtaggtagcttaaccttcgggagggcgcttaccactttgtgattcatgactggggtg

SEQ ID NO: 176 - DNA, 1464 bp, Citrobacter braakii
attgaacgctggcggcaggcctaacacatgcaagtcgaacggtagcacagaggagcttgctccttgggtgacgagtggcggacgggtgagtaatgtctgggaaactgcccgatggagggggataactactggaaacggtagctaataccgcataacgtcgcaagaccaaagagggggaccttcgggcctcttgccatcggatgtgcccagatgggattagctagtaggtggggtaacggctcacctaggcgacgatccctagctggtctgagaggatgaccagccacactggaactgagacacggtccagactcctacgggaggcagcagtggggaatattgcacaatgggcgcaagcctgatgcagccatgccgcgtgtatgaagaaggccttcgggttgtaaagtactttcagcgaggaggaaggcattgtggttaataaccgcagtgattgacgttactcgcagaagaagcaccggctaactccgtgccagcagccgcggtaatacggagggtgcaagcgttaatcggaattactgggcgtaaagcgcacgcaggcggtctgtcaagtcggatgtgaaatccccgggctcaacctgggaactgcatccgaaactggcaggctagagtcttgtagaggggggtagaattccaggtgtagcggtgaaatgcgtagagatctggaggaataccggtggcgaaggcggccccctggacaaagactgacgctcaggtgcgaaagcgtggggagcaaacaggattagataccctggtagtccacgccgtaaacgatgtcgacttggaggttgtgcccttgaggcgtggcttccggagctaacgcgttaagtcgaccgcctggggagtacggccgcaaggttaaaactcaaatgaattgacgggggcccgcacaagcggtggagcatgtggtttaattcgatgcaacgcgaagaaccttacctactcttgacatccagagaacttagcagagatgctttggtgccttcgggaactctgagacaggtgctgcatggctgtcgtcagctcgtgttgtgaaatgttgggttaagtcccgcaacgagcgcaacccttatcctttgttgccagcggtccggccgggaactcaaaggagactgccagtgataaactggaggaaggtggggatgacgtcaagtcatcatggcccttacgagtagggctacacacgtgctacaatggcatatacaaagagaagcgacctcgcgagagcaagcggacctcataaagtatgtcgtagtccggattggagtctgcaactcgactccatgaagtcggaatcgctagtaatcgtggatcagaatgccacggtgaatacgttcccgggccttgtacacaccgcccgtcacaccatgggagtgggttgcaaaagaagtaggtagcttaaccttcgggagggcgcttaccactttgtgattcatgactggggtg

SEQ ID NO: 177 - DNA, 1464 bp, Citrobacter farmeri
  misc_feature (62)..(62): n is a, c, g, or t
  misc_feature (448)..(448): n is a, c, g, or t
attgaacgctggcggcaggcctaacacatgcaagtcgaacggtaacaggaagcagcttgctncttcgctgacgagtggcggacgggtgagtaatgtctgggaaactgcccgatggagggggataactactggaaacggtagctaataccgcataacgtcgcaagaccaaagagggggaccttcgggcctcttgccatcggatgtgcccagatgggattagcttgttggtgaggtaacggctcaccaaggcgacgatccctagctggtctgagaggatgaccagccacactggaactgagacacggtccagactcctacgggaggcagcagtggggaatattgcacaatgggcgcaagcctgatgcagccatgccgcgtgtatgaagaaggccttcgggttgtaaagtactttcagcggggaggaaggggttatggttaataaccttanccattgacgttacccgcagaagaagcaccggctaactccgtgccagcagccgcggtaatacggagggtgcaagcgttaatcggaattactgggcgtaaagcgcacgcaggcggtctgtcaagtcggatgtgaaatccccgggctcaacctgggaactgcattcgaaactggcaggcttgagtctcgtagaggggggtagaattccaggtgtagcggtgaaatgcgtagagatctggaggaataccggtggcgaaggcggccccctggacgaagactgacgctcaggtgcgaaagcgtggggagcaaacaggattagataccctggtagtccacgccgtaaacgatgtctatttggaggttgtgcccttgaggcgtggcttccggagctaacgcgttaaatagaccgcctggggagtacggccgcaaggttaaaactcaaatgaattgacgggggcccgcacaagcggtggagcatgtggtttaattcgatgcaacgcgaagaaccttacctggtcttgacatccacagaacttggcagagatgccttggtgccttcgggaactgtgagacaggtgctgcatggctgtcgtcagctcgtgttgtgaaatgttgggttaagtcccgcaacgagcgcaacccttatcctttgttgccagcggtccggccgggaactcaaaggagactgccagtgataaactggaggaaggtggggatgacgtcaagtcatcatggcccttacgaccagggctacacacgtgctacaatggcatatacaaagagaagcgacctcgcgagagcaagcggacctcataaagtatgtcgtagtccggattggagtctgcaactcgactccatgaagtcggaatcgctagtaatcgtggatcagaatgccacggtgaatacgttcccgggccttgtacacaccgcccgtcacaccatgggagtgggttgcaaaagaagtaggtagcttaaccttcgggagggcgcttaccactttgtgattcatgactggggtg

SEQ ID NO: 178 - DNA, 1464 bp, Citrobacter gillenii
attgaacgctggcggcaggcctaacacatgcaagtcgaacggtagcacagaggagcttgctccttgggtgacgagtggcggacgggtgagtaatgtctgggaaactgcccgatggagggggataactactggaaacggtagctaataccgcataacgtcgcaagaccaaagagggggaccttcgggcctcttgccatcggatgtgcccagatgggattagctagtaggtggggtaacggctcacctaggcgacgatccctagctggtctgagaggatgaccagccacactggaactgagacacggtccagactcctacgggaggcagcagtggggaatattgcacaatgggcgcaagcctgatgcagccatgccgcgtgtatgaagaaggccttcgggttgtaaagtactttcagcgaggaggaaggggatgtggttaataaccgcattcattgacgttactcgcagaagaagcaccggctaactccgtgccagcagccgcggtaatacggagggtgcaagcgttaatcggaattactgggcgtaaagcgcacgcaggcggtctgtcaagtcggatgtgaaatccccgggctcaacctgggaactgcatccgaaactggcaggctagagtcttgtagaggggggtagaattccaggtgtagcggtgaaatgcgtagagatctggaggaataccggtggcgaaggcggccccctggacaaagactgacgctcaggtgcgaaagcgtggggagcaaacaggattagataccctggtagtccacgccgtaaacgatgtcgacttggaggttgttcccttgaggagtggcttccggagctaacgcgttaagtcgaccgcctggggagtacggccgcaaggttaaaactcaaatgaattgacgggggcccgcacaagcggtggagcatgtggtttaattcgatgcaacgcgaagaaccttacctactcttgacatccacggaatttagcagagatgctttagtgccttcgggaaccgtgagacaggtgctgcatggctgtcgtcagctcgtgttgtgaaatgttgggttaagtcccgcaacgagcgcaacccttatcctttgttgccagcggttcggccgggaactcaaaggagactgccagtgataaactggaggaaggtggggatgacgtcaagtcatcatggcccttacgagtagggctacacacgtgctacaatggcatatacaaagagaagcgacctcgcgagagcaagcggacctcataaagtatgtcgtagtccggattggagtctgcaactcgactccatgaagtcggaatcgctagtaatcgtagatcagaatgctacggtgaatacgttcccgggccttgtacacaccgcccgtcacaccatgggagtgggttgcaaaagaagtaggtagcttaaccttcgggagggcgcttaccactttgtgattcatgactggggtg

SEQ ID NO: 179 - DNA, 1464 bp, Citrobacter murliniae
attgaacgctggcggcaggcctaacacatgcaagtcgaacggtagcacagaggagcttgctccttgggtgacgagtggcggacgggtgagtaatgtctgggaaactgcccgatggagggggataactactggaaacggtagctaataccgcataacgtcgcaagaccaaagagggggaccttcgggcctcttgccatcggatgtgcccagatgggattagctagtaggtggggtaacggctcacctaggcgacgatccctagctggtctgagaggatgaccagccacactggaactgagacacggtccagactcctacgggaggcagcagtggggaatattgcacaatgggcgcaagcctgatgcagccatgccgcgtgtatgaagaaggccttcgggttgtaaagtactttcagcgaggaggaaggtgttgaggttaataacctcagcaattgacgttactcgcagaagaagcaccggctaactccgtgccagcagccgcggtaatacggagggtgcaagcgttaatcggaattactgggcgtaaagcgcacgcaggcggtctgtcaagtcggatgtgaaatccccgggctcaacctgggaactgcatccgaaactggcaggctagagtcttgtagaggggggtagaattccaggtgtagcggtgaaatgcgtagagatctggaggaataccggtggcgaaggcggccccctggacaaagactgacgctcaggtgcgaaagcgtggggagcaaacaggattagataccctggtagtccacgccgtaaacgatgtcgacttggaggttgtgcccttgaggcgtggcttccggagctaacgcgttaagtcgaccgcctggggagtacggccgcaaggttaaaactcaaatgaattgacgggggcccgcacaagcggtggagcatgtggtttaattcgatgcaacgcgaagaaccttacctactcttgacatccagagaacttagcagagatgctttggtgccttcgggaactctgagacaggtgctgcatggctgtcgtcagctcgtgttgtgaaatgttgggttaagtcccgcaacgagcgcaacccttatcctttgttgccagcggtccggccgggaactcaaaggagactgccagtgataaactggaggaaggtggggatgacgtcaagtcatcatggcccttacgagtagggctacacacgtgctacaatggcatatacaaagagaagcgacctcgcgagagcaagcggacctcataaagtatgtcgtagtccggattggagtctgcaactcgactccatgaagtcggaatcgctagtaatcgtggatcagaatgccacggtgaatacgttcccgggccttgtacacaccgcccgtcacaccatgggagtgggttgcaaaagaagtaggtagcttaaccttcgggagggcgcttaccactttgtgattcatgactggggtg

SEQ ID NO: 180 - DNA, 1464 bp, Citrobacter youngae
attgaacgctggcggcaggcctaacacatgcaagtcgaacggtagcacagaggagcttgctccttgggtgacgagtggcggacgggtgagtaatgtctgggaaactgcccgatggagggggataactactggaaacggtagctaataccgcataacgtcgcaagaccaaagagggggaccttcgggcctcttgccatcggatgtgcccagatgggattagctagtaggtggggtaacggctcacctaggcgacgatccctagctggtctgagaggatgaccagccacactggaactgagacacggtccagactcctacgggaggcagcagtggggaatattgcacaatgggcgcaagcctgatgcagccatgccgcgtgtatgaagaaggccttcgggttgtaaagtactttcagcggggaggaagggattgtggttaataaccgcagtcattgacgttacccgcagaagaagcaccggctaactccgtgccagcagccgcggtaatacggagggtgcaagcgttaatcggaattactgggcgtaaagcgcacgcaggcggtctgtcaagtcggatgtgaaatccccgggctcaacctgggaactgcattcgaaactggcaggcttgagtctcgtagaggggggtagaattccaggtgtagcggtgaaatgcgtagagatctggaggaataccggtggcgaaggcggccccctggacaaagactgacgctcaggtgcgaaagcgtggggagcaaacaggattagataccctggtagtccacgccgtaaacgatgtcgacttggaggttgtgcccttgaggcgtggcttccggagctaacgcgttaagtcgaccgcctggggagtacggccgcaaggttaaaactcaaatgaattgacgggggcccgcacaagcggtggagcatgtggtttaattcgatgcaacgcgaagaaccttacctggtcttgacatccacggaagactgcagagatgtggttgtgccttcgggaaccgtgagacaggtgctgcatggctgtcgtcagctcgtgttgtgaaatgttgggttaagtcccgcaacgagcgcaacccttatcctttgttgccagcggtccggccgggaactcaaaggagactgccagtgataaactggaggaaggtggggatgacgtcaagtcatcatggcccttacgaccagggctacacacgtgctacaatggcgcatacaaagagaagcgacctcgcgagagcaagcggacctcataaagtgcgtcgtagtccggattggagtctgcaactcgactccatgaagtcggaatcgctagtaatcgtggatcagaatgccacggtgaatacgttcccgggccttgtacacaccgcccgtcacaccatgggagtgggttgcaaaagaagtaggtagcttaaccttcgggagggcgcttaccactttgtgattcatgactggggtg

SEQ ID NO: 181 - DNA, 1436 bp, Clostridium acetireducens
gacgaacgctggcggcgtgcctaacacatgcaagtcgagcgatgaaacttccttcgggaagtgaattagcggcggacgggtgagtatcacgtgggcaacctgcctcaaagaggggaatagccttccgaaaggaagattaataccgcataatattagaaattcgcatgaatttctaatcaaaggagtaatccgctttgagatgggcccgcggcgcattagctagttggtggggtaatagcctaccaaggcaacgatgcgtagccgacctgagagggtgaacggccacattggaactgagatacggtccagactcctacgggaggcagcagtggggaatattgcgcaatgggggaaaccctgacgcagcaacgccgcgtgagcgatgaaggtcttcggatcgtaaagctctgtcttttgggacgataatgacggtaccaaaagaggaagccacggctaactacgtgccagcagccgcggtaatacgtaggtggcgagcgttgtccggaattactgggcgtaaagggtgcgtaggcggatatttaagtcagatgtgaaatacccaggcttaacttgggagttgcatttgaaactggatatctagagtgcaggagaggaaagcggaattcctagtgtagcggtgaaatgcgtagagattaggaagaacaccagtggcgaaggcggctttctggactgtaactgacgctgaggcacgaaagcgtgggtagcaaacaggattagataccctggtagtccacgctgtaaacgatgaatactaggtgtaggaggtatcatcccttctgtgccgcagttaacacaataagtattccgcctggggagtacggtcgcaagattaaaactcaaaggaattgacgggggcccgcacaagcagcggagcatgtggtttaattcgaagcaacgcgaagaaccttacctagacttgacatcccctgaattactcgtaatagaggaaatcccttcggggacagggagacaggtggtgcatggttgtcgtcagctcgtgtcgtgagatgttgggttaagtcccgcaacgagcgcaacccttgttattagttgctaccattaagttgagcactctaataagactgcccgggtcaaccgggaggaaggtggggatgacgtcaaatcatcatgccccttatgtctagggctacacacgtgctacaatggtaagtacagagagatgcaaattcgcaaggaagagcaaatctcaaaaacttatcccagttcggattgcaggctgaaactcgcctgcatgaagtcggagttgctagtaatcgcaaatcagaatgttgcggtgaatacgttcccgggccttgtacacaccgcccgtcacaccatgagagctggtaacacccgaagtccgtgaggtaaccgtaaggaaccagcggccgaaggtgggattagtgattggggtg

SEQ ID NO: 182 - DNA, 1434 bp, Clostridium beijerinckii
gacgaacgctggcggcgtgcttaacacatgcaagtcgagcgatgaagctccttcgggagcggattagcggcggacgggtgagtaacacgtgggtaacctgcctcatagaggggaatagcctttcgaaaggaagattaataccgcataagattgtagtgccgcatggcatagcaattaaaggagtaatccgctatgagatggacccgcgtcgcattagctagttggtgaggtaacggctcaccaaggcgacgatgcgtagccgacctgagagggtgatcggccacattgggactgagacacggcccagactcctacgggaggcagcagtggggaatattgcacaatgggggaaaccctgatgcagcaacgccgcgtgagtgatgacggtcttcggattgtaaagctctgtcttcagggacgataatgacggtacctgaggaggaagccacggctaactacgtgccagcagccgcggtaatacgtaggtggcaagcgttgtccggatttactgggcgtaaagggagcgtaggtggatatttaagtgggatgtgaaatactcgggcttaacctgggtgctgcattccaaactggatatctagagtgcaggagaggaaagtagaattcctagtgtagcggtgaaatgcgtagagattaggaagaataccagtggcgaaggcgactttctggactgtaactgacactgaggctcgaaagcgtggggagcaaacaggattagataccctggtagtccacgccgtaaacgatgaatactaggtgtaggggttgtcatgacctctgtgccgccgctaacgcattaagtattccgcctggggagtacggtcgcaagattaaaactcaaaggaattgacgggggcccgcacaagcagcggagcatgtggtttaattcgaagcaacgcgaagaaccttacctagacttgacatctcctgaattactcttaatcggggaagcccttcggggcaggaagacaggtggtgcatggttgtcgtcagctcgtgtcgtgagatgttgggttaagtcccgcaacgagcgcaacccttattgttagttgctaccatttagttgagcactctagcgagactgcccgggttaaccgggaggaaggtggggatgacgtcaaatcatcatgccccttatgtctagggctacacacgtgctacaatggctggtacagagagatgctaaaccgtgaggtggagccaaactttaaaaccagtctcagttcggattgtaggctgaaactcgcctacatgaagctggagttgctagtaatcgcgaatcagaatgtcgcggtgaatacgttcccgggccttgtacacaccgcccgtcacaccatgagagttggcaatacccaaagttcgtgagctaacgcgtaagcggggcagcgacctaaggtagggtcagcgattggggtg

SEQ ID NO: 183 - DNA, 1436 bp, Clostridium botulinum
gacgaacgctggcggcgtgcctaacacatgcaagtcgagcgatgaaacttcttcggaagtggattagcggcggacgggtgagtaacacgtgggcaacctgcctcatagagagggatagcctttcgaaaggaagattaatacctcataagattgtagtttcgcatgaaacggcaataaaaggagtaatccgctatgagatgggcccgcgtcgcattagctagttggtaaggtaatggcttaccaaggcgacgatgcgtagccgacctgagagggtgatcggccacattgggactgagacacggcccagactcctacgggaggcagcagtggggaatattgcacaatgggggaaaccctgatgcagcaacgccgcgtgagtgatgaaggtcttcggattgtaaaactctgtctttggggacgataatgacggtacccaaggaggaagccacggctaactacgtgccagcagccgcggtaatacgtaggtggcaagcgttgtccggatttactgggcgtaaagggagcgtaggtggatatttaagtgggatgtgaaatactcgggcttaacctgagtgctgcattccaaactggatatctagagtgcaggagaggaaagtggaattcctagtgtagcggtgaaatgcgtagatattaggaagaacaccagtggcgaaggcgactttctggactgtaactgacactgaggctcgaaagcgtggggagcgaacaggattagataccctggtagtccacgccgtaaacgatgaatactaggtgtaggagctgtcatggcttctgtgccgccgctaacgcattaagtattccgcctggggagtacggtcgcaagattaaaactcaaaggaattgacgggggcccgcacaagcagcggagcatgtggtttaattcgaagcaacgcgaagaaccttacctagacttgacatctcctgaattactcttaatcgaggaagtcacttcggtgacaggaagacaggtggtgcatggttgtcgtcagctcgtgtcgtgagatgttgggttaagtcccgcaacgagcgcaacccttattgttagttgctaccatttagttgagcactctagcgagactgccgtggttaacgcggaggaaggtggggatgacgtcaaatcatcatgccccttatgtctagggctacacacgtgctacaatggctggtacaaagagatgcaataccgcgaggtggagctaaactataaaaccagtctcagttcggattgtaggctgaaactcgcctacatgaagctggagttgctagtaatcgcgaatcagaatgtcgcggtgaatacgttcccgggccttgtacacaccgcccgtcacaccatgagagttggcaatacccaaagttcgtgagctaacccgtaagggaggcagcgacctaaggtagggtcagcgattggggtg

SEQ ID NO: 184 - DNA, 1435 bp, Clostridium butyricum
gacgaacgctggcggcgtgcttaacacatgcaagtcgagcgatgaagctccttcgggagtggattagcggcggacgggtgagtaacacgtgggtaacctgcctcatagaggggaatagcctttcgaaaggaagattaataccgcataagattgtagtaccgcatggtacagcaattaaaggagtaatccgctatgagatggacccgcgtcgcattagctagttggtgaggtaacggctcaccaaggcgacgatgcgtagccgacctgagagggtgatcggccacattgggactgagacacggcccagactcctacgggaggcagcagtggggaatattgcacaatgggggaaaccctgatgcagcaacgccgcgtgagtgatgacggtcttcggattgtaaagctctgtctttagggacgataatgacggtacctaaggaggaagccacggctaactacgtgccagcagccgcggtaatacgtaggtggcaagcgttgtccggatttactgggcgtaaagggagcgtaggtggatatttaagtgggatgtgaaatacccgggcttaacctgggtgctgcattccaaactggatatctagagtgcaggagaggaaaggagaattcctagtgtagcggtgaaatgcgtagagattaggaagaataccagtggcgaaggcgactttctggactgtaactgacactgaggctcgaaagcgtggggagcaaacaggattagataccctggtagtccacgccgtaaacgatgaatactaggtgtaggggttgtcatgacctctgtgccgccgctaacgcattaagtattccgcctggggagtacggtcgcaagattaaaactcaaaggaattgacgggggcccgcacaagcagcggagcatgtggtttaattcgaagcaacgcgaagaaccttacctagacttgacatctcctgaattactctgtaatggaggaagccacttcggtggcaggaagacaggtggtgcatggttgtcgtcagctcgtgtcgtgagatgttgggttaagtcccgcaacgagcgcaacccttattgttagttgctaccatttagttgagcactctagcgagactgcccgggttaaccgggaggaaggtggggatgacgtcaaatcatcatgccccttatgtctagggctacacacgtgctacaatggtcggtacaatgagatgcaacctcgcgagagtgagcaaaactataaaaccgatctcagttcggattgtaggctgaaactcgcctacatgaagctggagttgctagtaatcgcgaatcagaatgtcgcggtgaatacgttcccgggccttgtacacaccgcccgtcacaccatgagagttggcaatacccaaagttcgtgagctaaccgcaaggaggcagcgacctaaggtagggtcagcgattggggtg

SEQ ID NO: 185 - DNA, 1434 bp, Clostridium carboxidivorans
gacgaacgctggcggcgtgcttaacacatgcaagtcgagcgatgaaatcccttcggggatggattagcggcggacgggtgagtaacacgtgggcaacctgcctcaaagtgggggatagccttccgaaagggagattaataccgcataacattagtttttcacatgaaatactaattaaaggagtaatccgctttgagatgggcccgcggcgcattagctagttggtgaggtaacggctcaccaaggccacgatgcgtagccgacctgagagggtgatcggccacattggaactgagacacggtccagactcctacgggaggcagcagtggggaatattgcacaatgggcgaaagcctgatgcagcaacgccgcgtgagtgatgaaggccttcgggttgtaaagctctgtctttggggacgataatgacggtacccaaggaggaagccacggctaactacgtgccagcagccgcggtaatacgtaggtggcgagcgttgtccggatttactgggcgtaaaggatgcgtaggcggatgtttaagtcagatgtgaaaatcccgagcttaacttgggaactgcatttgaaactggatatctagagtgcgggagaggagaatggaattcctagtgtagcggtgaaatgcgtagagattaggaagaacaccagtggcgaaggcgattctctggaccgtaactgacgctgaggcatgaaagcgtgggtagcaaacaggattagataccctggtagtccacgccgtaaacgatgaatactaggtgtaggaggtatcgactccttctgtgccgcagctaacgcaataagtattccgcctgggaagtacgatcgcaagattaaaactcaaaggaattgacgggggcccgcacaagcagcggagcatgtggtttaattcgaagcaacgcgaagaaccttacctagacttgacatcccctgaattacctgtaatgagggaagcccttcggggcagggagacaggtggtgcatggttgtcgtcagctcgtgtcgtgagatgttaggttaagtcctgcaacgagcgcaacccttatcattagttgctaccattaagttgagcactctagtgagactgcccgggttaaccgggaggaaggtggggatgacgtcaaatcatcatgccccttatgtctagggctacacacgtgctacaatggtgagtacagaaagatgcaagaccgtgaggtggagcaaaacttttaaaactcatctcagttcggattgtaggctgaaactcgcctacatgaagctggagttgctagtaatcgcgaatcagcatgtcgcggtgaatacgttcccgggccttgtacacaccgcccgtcacaccatgagagctggcaacacccgaagtccgtgaggtaaccgtaaggagccagcggccgaaggtggggttagtaattggggtg

SEQ ID NO: 186 - DNA, 1435 bp, Clostridium colicanis
gacgaacgctggcggcgtgcctaacacatgcaagtcgagcgatgaaattttcttcggaaaatggattagcggcggacgggtgagtaacacgtgggtaacctgccctatagagagggatagccttccgaaagggagattaatacctcataatatcctagtatcgcatgatacatggattaaaggagcaatccgctataggatggacccgcggcgcattagctagttggtgaggtaacggctcaccaaggcgacgatgcgtagccgacctgagagggtgatcggccacattgggactgagacacggcccagactcctacgggaggcagcagtggggaatattgcacaatgggggaaaccctgatgcagcaacgccgcgtgagtgatgacggtcttcggattgtaaagctctgtctttagggacgataatgacggtacctaaggaggaagccacggctaactacgtgccagcagccgcggtaatacgtaggtggcaagcgttgtccggatttactgggcgtaaagggagcgtaggcggatctttaagtgggatgtgaaatactcgggctcaacctgggggctgcattccaaactggagatctagagtacaggaggggagagtggaattcctagtgtagcggtgaaatgcgtagagattaggaagaacaccagtggcgaaggcgactctctggactgtaactgacgctgaggctcgaaagcgtggggagcaaacaggattagataccctggtagtccacgccgtaaacgatgaatactaggtgtagggggtgtcaactccccctgtgccgccgctaacgcattaagtattccgcctggggagtacggtcgcaagattaaaactcaaaggaattgacgggggcccgcacaagtagcggagcatgtggtttaattcgacgcaacgcgaagaaccttacctagacttgacatcttctgcattacccttaatcggggaagttccttcgggaacagaatgacaggtggtgcatggttgtcgtcagctcgtgtcgtgagatgttgggttaagtcccgcaacgagcgcaacccttattgttagttgctaccatttagttgagcactctagcgagactgcccgggttaaccgggaggaaggtggggatgacgtcaaatcatcatgccccttatgtctagggctacacacgtgctacaatggccggtacagaaagacgcgataccgcgaggtggagcaaaactttaaaaccggtctcagttcggattgtaggctgaaactcgcctacatgaagctggagttactagtaatcgcgaatcagcatgtcgcggtgaatacgttcccgggccttgtacacaccgcccgtcacaccatgagagttggcaatacccaaagttcgtgagctaaccgcaaggaggcagcgacctaaggtagggtcagcgattgggg

SEQ ID NO: 187 - DNA, 1434 bp, Clostridium diolis
  misc_feature (60)..(60): n is a, c, g, or t
  misc_feature (1399)..(1399): n is a, c, g, or t
gacgaacgctggcggcgtgcttaacacatgcaagtcgagcgatgaagctccttcgggagnggattagcggcggacgggtgagtaacacgtgggtaacctgcctcatagaggggaatagcctttcgaaaggaagattaataccgcataagattgtagtgccgcatggcatagcaattaaaggagtaatccgctatgagatggacccgcgtcgcattagctagttggtgaggtaacggctcaccaaggcgacgatgcgtagccgacctgagagggtgatcggccacattgggactgagacacggcccagactcctacgggaggcagcagtggggaatattgcacaatgggggaaaccctgatgcagcaacgccgcgtgagtgatgacggtcttcggattgtaaagctctgtcttcagggacgataatgacggtacctgaggaggaagccacggctaactacgtgccagcagccgcggtaatacgtaggtggcaagcgttgtccggatttactgggcgtaaagggagcgtaggtggatatttaagtgggatgtgaaatactcgggcttaacctgggtgctgcattccaaactggatatctagagtgcaggagaggaaagtagaattcctagtgtagcggtgaaatgcgtagagattaggaagaataccagtggcgaaggcgactttctggactgtaactgacactgaggctcgaaagcgtggggagcaaacaggattagataccctggtagtccacgccgtaaacgatgaatactaggtgtaggggttgtcatgacctctgtgccgccgctaacgcattaagtattccgcctggggagtacggtcgcaagattaaaactcaaaggaattgacgggggcccgcacaagcagcggagcatgtggtttaattcgaagcaacgcgaagaaccttacctagacttgacatctcctgaattacccttaatcggggaagcccttcggggcaggaagacaggtggtgcatggttgtcgtcagctcgtgtcgtgagatgttgggttaagtcccgcaacgagcgcaacccttattgttagttgctaccatttagttgagcactctagcgagactgcccgggttaaccgggaggaaggtggggatgacgtcaaatcatcatgccccttatgtctagggctacacacgtgctacaatggctggtacagagagatgctaaaccgcgaggtggagccaaactttaaaaccagtctcagttcggattgtaggctgaaactcgcctacatgaagctggagttgctagtaatcgcgaatcagaatgtcgcggtgaatacgttcccgggccttgtacacaccgcccgtcacaccatgagagttggcaatacccaaagttcgtgagctaacgcgcaagcgnggcagcgacctaaggtagggtcagcgattggggtg

SEQ ID NO: 188 - DNA, 1438 bp, Clostridium disporicum
gacgaacgctggcggcgtgcctaacacatgcaagtcgagcgagttgattctcttcggagatgaagctagcggcggacgggtgagtaacacgtgggcaacctgcctcatagaggggaatagcctcccgaaagggagattaataccgcataagattgtagcttcgcatgaagtagcaattaaaggagcaatccgctatgagatgggcccgcggcgcattagctagttggtgaggtaacggctcaccaaggcgacgatgcgtagccgacctgagagggtgatcggccacattgggactgagacacggcccagactcctacgggaggcagcagtggggaatattgcacaatgggggaaaccctgatgcagcaacgccgcgtgagtgatgacggccttcgggttgtaaagctctgtcttcagggacgataatgacggtacctgaggaggaagccacggctaactacgtgccagcagccgcggtaatacgtaggtggcgagcgttgtccggatttactgggcgtaaagggagcgtaggcggacttttaagtgagatgtgaaatacccgggctcaacttgggtgctgcatttcaaactggaagtctagagtgcaggagaggagaatggaattcctagtgtagcggtgaaatgcgtagagattaggaagaacaccagtggcgaaggcgattctctggactgtaactgacgctgaggctcgaaagcgtggggagcaaacaggattagataccctggtagtccacgccgtaaacgatgaatactaggtgtaggggttgtcatgacctctgtgccgccgctaacgcattaagtattccgcctggggagtacggtcgcaagattaaaactcaaaggaattgacgggggcccgcacaagcagcggagcatgtggtttaattcgaagcaacgcgaagaaccttacctagacttgacatctcctgaattacccgtaactggggaagccacttcggtggcaggaagacaggtggtgcatggttgtcgtcagctcgtgtcgtgagatgttgggttaagtcccgcaacgagcgcaacccttattgttagttgctaccatttagttgagcactctagcgagactgcccgggttaaccgggaggaaggtggggatgacgtcaaatcatcatgccccttatgtctagggctacacacgtgctacaatggcaagtacaaagagaagcaagaccgcgaggtggagcaaaactcaaaaacttgtctcagttcggattgtaggctgaaactcgcctacatgaagctggagttgctagtaatcgcgaatcagcatgtcgcggtgaatacgttcccgggccttgtacacaccgcccgtcacaccatgagagttggcaatacccaacgtacgtgatctaacccgcaagggaggaagcgtcctaaggtagggtcagcgattggggtg

SEQ ID NO: 189 - DNA, 1435 bp, Clostridium novyi
gacgaacgctggcggcgtgcctaacacatgcaagtcgagcgatgaagcttccttcgggaagtggattagcggcggacgggtgagtaacacgtgggtaacctgcctcaaagagtgggatagcctcccgaaagggagattaataccgcataacattattttacggcatcgtagaataatcaaaggagcaatccgctttgagatggacccgcggcgcattagctagttggtgaggtaacggctcaccaaggcaacgatgcgtagccgacctgagagggtgatcggccacattggaactgagacacggtccagactcctacgggaggcagcagtggggaatattgcgcaatgggggaaaccctgacgcagcaacgccgcgtgagtgatgaaggttttcggatcgtaaaactctgtcattagggacgataatgacggtacctaatgaggaagccacggctaactacgtgccagcagccgcggtaatacgtaggtggcaagcgttgtccggatttactgggcgtaaagagtatgtaggtgggcatttaagtcagatgtgaaattcccgggcttaacctgggagctgcatttgatactgggtgtctagagtgcaggagaggaaagtggaattcctagtgtagcggtgaaatgcgtagagattaggaagaacaccagtggcgaaggcgactttctggactgtaactgacactgagatacgaaagcgtgggtagcaaacaggattagataccctggtagtccacgccgtaaacgatgaatactaggtgtcggggggtaccaccctcggtgccgcagcaaacgcattaagtattccgcctggggagtacggtcgcaagattaaaactcaaaggaattgacggggacccgcacaagcagcggagcatgtggtttaattcgaagcaacgcgaagaaccttacctagacttgacatctcctgaattactcgtaactgaggaagtcccttcggggacaggaagacaggtggtgcatggttgtcgtcagctcgtgtcgtgagatgttgggttaagtcccgcaacgagcgcaacccttattgttagttgctactattaagttaagcactctaacgagactgccgcggttaacgtggaggaaggtggggatgacgtcaaatcatcatgccccttatgtctagggctacacacgtgctacaatggctggtacaacgagcagcaatcccgcgagggggagcaaaacttgaaagccagtcccagttcggattgtaggctgaaactcgcctacatgaagttggagttgctagtaatcgcgaatcagcatgtcgcggtgaatacgttcccgggtcttgtacacaccgcccgtcacaccatgagagccggtaacacccgaagcccgtgaggtaaccgtaaggagccagcggtcgaaggtgggattggtgattggggtg

SEQ ID NO: 190 - DNA, 1434 bp, Clostridium sporogenes
gacgaacgctggcggcgtgcttaacacatgcaagtcgagcgatgaagcttccttcgggaggtggattagcggcggacgggtgagtaacacgtgggtaacctgcctcaaagtgggggatagccttccgaaaggaagattaataccgcataatataagagaatcgcatgattttcttatcaaagatttattgctttgagatggacccgcggcgcattagctagttggtaaggtaacggcttaccaaggcaacgatgcgtagccgacctgagagggtgatcggccacattggaactgagacacggtccagactcctacgggaggcagcagtggggaatattgcgcaatgggggaaaccctgacgcagcaacgccgcgtgggtgatgaaggtcttcggattgtaaagccctgttttctgggacgataatgacggtaccagaggaggaagccacggctaactacgtgccagcagccgcggtaatacgtaggtggcgagcgttgtccggatttactgggcgtaaagggtgcgtaggcggatgtttaagtgggatgtgaaatccccgggcttaacctgggggctgcattccaaactggatatctagagtgcaggagaggaaagcggaattcctagtgtagcggtgaaatgcgtagagattaggaagaacaccagtggcgaaggcggctttctggactgtaactgacgctgaggcacgaaagcgtgggtagcaaacaggattagataccctggtagtccacgccgtaaacgatggatactaggtgtagggggtatcaactccccctgtgccgcagttaacacaataagtatcccgcctggggagtacggtcgcaagattaaaactcaaaggaattgacgggggcccgcacaagcagcggagcatgtggtttaattcgaagcaacgcgaagaaccttacctggacttgacatcccttgcatagcctagagataggtgaagcccttcggggcaaggagacaggtggtgcatggttgtcgtcagctcgtgtcgtgagatgttaggttaagtcctgcaacgagcgcaacccttgttattagttgctaccattaagttgagcactctaatgagactgcctgggtaaccaggaggaaggtggggatgacgtcaaatcatcatgccccttatgtccagggctacacacgtgctacaatggtaggtacaataagacgcaagaccgtgaggtggagcaaaacttataaaacctatctcagttcggattgtaggctgcaactcgcctacatgaagctggagttgctagtaatcgcgaatcagaatgtcgcggtgaatacgttcccgggccttgtacacaccgcccgtcacaccatgagagctggtaacacccgaagtccgtgaggtaaccgtaaggagccagcggccgaaggtgggattagtgattggggtg

SEQ ID NO: 191 - DNA, 1450 bp, Clostridium thermocellum
gacgaacgctggcggcgtgcctaacacatgcaagtcgagcggggatatacggaaggtttaccggaagtatatcctagcggcggacgggtgagtaacgcgtgggtaacctacctcatacagggggataacacagggaaacctgtgctaataccgcataatataacggggcggcatcgtcctgttatcaaaggagaaatccggtatgagatgggcccgcgtccgattagctggttggtgaggtaacggctcaccaaggcgacgatcggtagccgaactgagaggttggtcggccacattgggactgagacacggcccagactcctacgggaggcagcagtggggaatattgcgcaatgggggaaaccctgacgcagcaacgccgcgtgaaggaagaaggccttcgggttgtaaacttctttgattggggacgaaggaagtgacggtacccaaagaacaagccacggctaactacgtgccagcagccgcggtaatacgtaggtggcgagcgttgtccggaattactgggtgtaaagggcgcgtaggcggggatgcaagtcagatgtgaaattccggggcttaaccccggcgctgcatctgaaactgtatctcttgagtgctggagaggaaagcggaattcctagtgtagcggtgaaatgcgtagatattaggaggaacaccagtggcgaaggcggctttctggacagtaactgacgctgaggcgcgaaagcgtggggagcaaacaggattagataccctggtagtccacgccgtaaacgatggatactaggtgtaggaggtatcgaccccttctgtgccggagttaacacaataagtatcccacctggggagtacggccgcaaggttgaaactcaaaggaattgacgggggcccgcacaagcagtggagtatgtggtttaattcgaagcaacgcgaagaaccttaccagggcttgacatccctctgacagctctagagatagggcttcccttcggggcagaggagacaggtggtgcatggttgtcgtcagctcgtgtcgtgagatgttgggttaagtcccgcaacgagcgcaacccttgtcgttagttgccagcacgttaaggtgggcactctagcgagactgccggcgacaagtcggaggaaggtggggacgacgtcaaatcatcatgccccttatgtcctgggctacacacgtactacaatggctgctacaaagggaagcgataccgcgaggtggagcaaatccccaaaagcagtcccagttcggattgcaggctgaaactcgcctgcatgaagtcggaattgctagtaatggcaggtcagcatactgccgtgaatacgttcccgggccttgtacacaccgcccgtcacaccatgagagtctgcaacacccgaagtcagtagtctaaccgtaaggagggcgctgccgaaggtggggcagatgattggggtg

SEQ ID NO: 192 - DNA, 1464 bp, Cronobacter sakazakii
attgaacgctggcggcaggcctaacacatgcaagtcgaacggtaacagggagcagcttgctgctctgctgacgagtggcggacgggtgagtaatgtctgggaaactgcctgatggagggggataactactggaaacggtagctaataccgcataacgtctacggaccaaagtgggggaccttcgggcctcatgccatcagatgtgcccagatgggattagctagtaggtggggtaacggctcacctaggcgacgatccctagctggtctgagaggatgaccagccacactggaactgagacacggtccagactcctacgggaggcagcagtggggaatattgcacaatgggcgcaagcctgatgcagccatgccgcgtgtatgaagaaggccttcgggttgtaaagtactttcagcggggaggaaggtgttgtggttaataaccgcagcaattgacgttacccgcagaagaagcaccggctaactccgtgccagcagccgcggtaatacggagggtgcaagcgttaatcggaattactgggcgtaaagcgcacgcaggcggttgattaagtcagatgtgaaatccccgggctcaacctgggaactgcatttgaaactggtcagcttgagtctcgtagaggggggtagaattccaggtgtagcggtgaaatgcgtagagatctggaggaataccggtggcgaaggcggccccctggacgaagactgacgctcaggtgcgaaagcgtggggagcaaacaggattagataccctggtagtccacgccgtaaacgatgtcgacttggaggttgtgcccttgaggcgtggcttccggagctaacgcgttaagtcgaccgcctggggagtacggccgcaaggttaaaactcaaatgaattgacgggggcccgcacaagcggtggagcatgtggtttaattcgatgcaacgcgaagaaccttacctggtcttgacatccagagaatcctgcagagatgcgggagtgccttcgggaactctgagacaggtgctgcatggctgtcgtcagctcgtgttgtgaaatgttgggttaagtcccgcaacgagcgcaacccttatcctttgttgccagcggttcggccgggaactcaaaggagactgccggtgataaaccggaggaaggtggggatgacgtcaagtcatcatggcccttacgaccagggctacacacgtgctacaatggcgcatacaaagagaagcgacctcgcgagagcaagcggacctcataaagtgcgtcgtagtccggattggagtctgcaactcgactccatgaagtcggaatcgctagtaatcgtggatcagaatgccacggtgaatacgttcccgggccttgtacacaccgcccgtcacaccatgggagtgggttgcaaaagaagtaggtagcttaaccttcgggagggcgcttaccactttgtgattcatgactggggtg

SEQ ID NO: 193 - DNA, 1455 bp, Delftia tsuruhatensis
attgaacgctggcggcatgccttacacatgcaagtcgaacggtaacaggtcttcggacgctgacgagtggcgaacgggtgagtaatacatcggaacgtgcccagtcgtgggggataactactcgaaagagtagctaataccgcatacgatctgaggatgaaagcgggggaccttcgggcctcgcgcgattggagcggccgatggcagattaggtagttggtgggataaaagcttaccaagccgacgatctgtagctggtctgagaggacgaccagccacactgggactgagacacggcccagactcctacgggaggcagcagtggggaattttggacaatgggcgaaagcctgatccagcaatgccgcgtgcaggatgaaggccttcgggttgtaaactgcttttgtacggaacgaaaaagctccttctaatacagggggcccatgacggtaccgtaagaataagcaccggctaactacgtgccagcagccgcggtaatacgtagggtgcgagcgttaatcggaattactgggcgtaaagcgtgcgcaggcggttatgtaagacagatgtgaaatccccgggctcaacctgggaactgcatttgtgactgcatggctagagtacggtagagggggatggaattccgcgtgtagcagtgaaatgcgtagatatgcggaggaacaccgatggcgaaggcaatcccctggacctgtactgacgctcatgcacgaaagcgtggggagcaaacaggattagataccctggtagtccacgccctaaacgatgtcaactggttgttgggaattagttttctcagtaacgaagctaacgcgtgaagttgaccgcctggggagtacggccgcaaggttgaaactcaaaggaattgacggggacccgcacaagcggtggatgatgtggtttaattcgatgcaacgcgaaaaaccttacccacctttgacatggcaggaagtttccagagatggattcgtgctcgaaagagaacctgcacacaggtgctgcatggctgtcgtcagctcgtgtcgtgagatgttgggttaagtcccgcaacgagcgcaacccttgtcattagttgctacattcagttgagcactctaatgagactgccggtgacaaaccggaggaaggtggggatgacgtcaagtcctcatggcccttataggtggggctacacacgtcatacaatggctggtacagagggttgccaacccgcgagggggagctaatcccataaaaccagtcgtagtccggatcgcagtctgcaactcgactgcgtgaagtcggaatcgctagtaatcgcggatcagcatgccgcggtgaatacgttcccgggtcttgtacacaccgcccgtcacaccatgggagcgggtctcgccagaagtaggtagcctaaccgcaaggagggcgcttaccacggcggggttcgtgactggggtg

SEQ ID NO: 194 - DNA, 1472 bp, Desulfovibrio desulfuricans
attgaacgctggcggcgtgcttaacacatgcaagtcgaacgcgaaagggacttcggtcctgagtaaagtggcgcacgggtgagtaacgcgtggataatctgcccttatgatcgggataacagttggaaacggctgctaataccggatacgctcaaaatgaactttttgaggaaagatggcctctgcttgcatgctatcacgtaaggatgagtccgcgtcccattagcttgttggcggggtaacggcccaccaaggcatcgatgggtagccgatttgagaggatgatcggccacactggaactgaaacacggtccagactcctacgggaggcagcagtggggaatattgcgcaatgggcgaaagcctgacgcagcgacgccgcgtgagggatgaaggttttcggatcgtaaacctctgtcagaagggaagaaactacgttgtgctaatcagcagcgtactgacggtaccttcaaaggaagcaccggctaactccgtgccagcagccgcggtaatacggagggtgcaagcgttaatcggaattactgggcgtaaagcgcacgtaggctgtagtgtaagtcaggggtgaaatcccacggctcaaccgtggaactgcctttgatactgcacaacttgaatccgggagagggtggcggaattccaggtgtaggagtgaaatccgtagatatctggaggaacatcagtggcgaaggcggccacctggaccggtattgacgctgaggtgcgaaagcgtggggagcaaacaggattagataccctggtagtccacgctgtaaacgatggatgctagatgtcggggagtattcttcggtgtcgtagttaacgcgttaagcatcccgcctggggagtacggtcgcaaggctgaaactcaaagaaattgacgggggcccgcacaagcggtggagtatgtggtttaattcgatgcaacgcgaagaaccttacctaggtttgacatccacggaaccctcccgaaaaggaggggtgcccttcggggagccgtgagacaggtgctgcatggctgtcgtcagctcgtgtcgtgagatgttgggttaagtcccgcaacgagcgcaacccctatggatagttgccagcaagtaatgttgggcactctattcagactgcccgggttaaccgggaggaaggtggggacgacgtcaagtcatcatggcccttacgcctagggctacacacgtactacaatggcgcgcacaaaggggagcgagaccgcgaggtggagccaatcccaaaaaacgcgtcccagtccggattgcagtctgcaactcgactgcatgaagttggaatcgctagtaattcgagatcagcatgctcgggtgaatgcgttcccgggccttgtacacaccgcccgtcacaccacgaaagtcggttttacccgaagccggtgagccaaccagcaatggaggcagccgtctacggtagggccgatgattggggtg

SEQ ID NO: 195 - DNA, 1472 bp, Desulfovibrio fairfieldensis
attgaacgctggcggcgtgcttaacacatgcaagtcgaacgcgaaagagacttcggtctcgagtagagtggcgcacgggtgagtaacgcgtggataatctgccctcataaccgggataacagttggaaacggctgctaataccggatacgctctgaatgaacttttaggggaaagacggcctctgcttgcaagctgtcgtatgaggatgagtccgcgtcccattagctggttggcggggtaacggcccaccaaggcaacgatgggtagccgatctgagaggatgatcggccacactggaactgaaacacggtccagactcctacgggaggcagcagtggggaatattgcgcaatgggcgaaagcctgacgcagcgacgccgcgtgagggatgaaggttttcggatcgtaaacctctgtcagaagggaagaaagtgcgtggtgctaatcagctgcgcattgacggtaccttcaaaggaagcaccggctaactccgtgccagcagccgcggtaatacggagggtgcaagcgttaatcggaattactgggcgtaaagcgcacgtaggctgttgtgtaagtcaggggtgaaatcccacggctcaaccgtggaactgcccttgatactgcatgacttgaatccgggagagggtggcggaattccaggtgtaggagtgaaatccgtagatatctggaggaacatcagtggcgaaggcggccacctggaccggtattgacgctgaggtgcgaaagcgtggggagcaaacaggattagataccctggtagtccacgctgtaaacgatggatgctagatgtcggggagtattcttcggtgtcgtagttaacgcgttaagcatcccgcctggggagtacggtcgcaaggctgaaactcaaagaaattgacgggggcccgcacaagcggtggagtatgtggtttaattcgatgcaacgcgaagaaccttacctaggtttgacatctggggaaccctcccgaaaaggaggggtgcccttcggggagccccaagacaggtgctgcatggctgtcgtcagctcgtgtcgtgagatgttgggttaagtcccgcaacgagcgcaacccctatgcatagttgccagcaagtgaagttgggcactctatgcagactgcccgggttaaccgggaggaaggtggggacgacgtcaagtcatcatggcccttacacctagggctacacacgtactacaatggcgcgcacaaaggggagcgagaccgcgaggtggagccaatcccaaaaaacgcgtcccagtccggattgcagtctgcaactcgactgcatgaagtcggaatcgctagtaattcgagatcagcatgctcgggtgaatgcgttcccgggccttgtacacaccgcccgtcacaccacgaaagtcggttttacccgaagccggtgagccaaccatttatggaggcagccgtctacggtagggccgatgattggggtg

SEQ ID NO: 196 - DNA, 1491 bp, Dialister pneumosintes
cgaacgctggcggcgtgcttaacacatgcaagtcgaacggaaagagatgaaagagcttgctcttttattaatttcagtggcaaacgggtgagtaacacgtaaacaacctgccttaaggatggggataacagacggaaacgactgctaataccgaatacgttctaagcatcgcatggtgcatagaagaaagggtggcctctacaagaaagctatcgccttaagaggggtttgcgactgattaggtagttggtgaggtaacggctcaccaagccgacgatcagtagccggtctgagaggatgaacggccacactggaactgagacacggtccagactcctacgggaggcagcagtggggaatcttccgcaatggacgaaagtctgacggagcaacgccgcgtgaacgaagaaggtcttcggattgtaaagttctgtgattcgggacgaaagggtttgtggtgaataatcattgacattgacggtaccgaaaaagcaagccacggctaactacgtgccagcagccgcggtaatacgtaggtggcaagcgttgtccggaattattgggcgtaaagcgcgcgcaggcggtttcttaagtccatcttaaaagcgtggggctcaaccccatgaggggatggaaactgggaagctggagtatcggagaggaaagtggaattcctagtgtagcggtgaaatgcgtagagattaggaagaacaccggtggcgaaggcgactttctagacgaaaactgacgctgaggcgcgaaagcgtggggagcaaacaggattagataccctggtagtccacgccgtaaacgatggatactaggtgtaggaggtatcgacccctcctgtgccggagttaacgcaataagtatcccgcctgggaagtacgatcgcaagattaaaactcaaaggaattgacgggggcccgcacaagcggtggagtatgtggtttaattcgacgcaacgcgaagaaccttaccaagccttgacattgatcgcaatccatagaaatatggagttcttcttcggaagacgagaaaacaggtggtgcacggctgtcgtcagctcgtgtcgtgagatgttgggttaagtcccgcaacgagcgcaacccctatttcctgttaccagcacgtaaaggtggggactcaggagagaccgccgcggacaacgcggaggaaggcggggatgacgtcaagtcatcatgccccttatggcttgggctacacacgtactacaatgggtgccaacaaagagaagcgaaatcgcgagatggagcggacctcataaacgcacccccagttcagattgcaggctgcaactcgcctgcatgaagtaggaatcgctagtaatcgcgggtcagcataccgcggtgaatacgttcccgggccttgtacacaccgcccgtcacactatgagagttagagacacccgaagccggtgaggtaaccgcaagggaccagccgtctaaggtggagctgatgattggagtg

SEQ ID NO: 197 - DNA, 1459 bp, Enterobacter asburiae
attgaacgctggcggcaggcctaacacatgcaagtcgagcggtaacacagggagcttgctcctgggtgacgagcggcggacgggtgagtaatgtctgggaaactgcctgatggagggggataactactggaaacggtagctaataccgcataacgtcgcaagaccaaagagggggaccttcgggcctcttgccatcagatgtgccagatgggattagctagtaggtggggtaacggctcacctaggcgacgatccctagctggtctgagaggatgaccagccacactggaactgagacacggtccagactcctacgggaggcagcagtggggaatattgcacaatgggcgcaagcctgatgcagccatgccgcgtgtatgaagaaggccttcgggttgtaaagtactttcagcggggaggaaggcgataaggttaataaccttgtcgattgacgttacccgcagaagaagcaccggctaactccgtgccagcagccgcggtaatacggagggtgcaagcgttaatcggaattactgggcgtaaagcgcacgcaggcggtctgtcaagtcggatgtgaaatccccggctcaacctggaactgcattcgaaactggcaggctagagtcttgtagaggggggtagaattccaggtgtagcggtgaaatgcgtagagatctggaggaataccggtggcgaaggcggccccctggacaaagactgacgctcaggtgcgaaagcgtggggagcaaacaggattagataccctggtagtccacgccgtaaacgatgtcgacttggaggttgtgcccttgaggcgtggcttccggagctaacgcgttaagtcgaccgcctggggagtacggccgcaaggttaaaactcaaatgaattgacgggggcccgcacaagcggtggagcatgtggtttaattcgatgcaacgcgaagaaccttacctactcttgacatccagagaactttccagagatggattggtgccttcgggaactctgagacaggtgctgcatggctgtcgtcagctcgtgttgtgaaatgttgggttaagtcccgcaacgagcgcaacccttatcctttgttgccagcggttcggccgggaactcaaaggagactgccagtgataaactggaggaaggtggggatgacgtcaagtcatcatggcccttacgagtagggctacacacgtgctacaatggcgcatacaaagagaagcgacctcgcgagagcaagcggacctcataaagtgcgtcgtagtccggattggagtctgcaactcgactccatgaagtcggaatcgctagtaatcgtagatcagaatgctacggtgaatacgttcccgggccttgtacacaccgcccgtcacaccatgggagtgggttgcaaaagaagtaggtagcttaaccttcgggagggcgcttaccactttgtgattcatgactggggtg

SEQ ID NO: 198 - DNA, 1464 bp, Enterobacter hormaechei
attgaacgctggcggcaggcctaacacatgcaagtcgaacggtaacaggaagcagcttgctgcttcgctgacgagtggcggacgggtgagtaatgtctgggaaactgcctgatggagggggataactactggaaacggtagctaataccgcataacgtcgcaagaccaaagagggggaccttcgggcctcttgccatcggatgtgcccagatgggattagctagtaggtggggtaacggctcacctaggcgacgatccctagctggtctgagaggatgaccagccacactggaactgagacacggtccagactcctacgggaggcagcagtggggaatattgcacaatgggcgcaagcctgatgcagccatgccgcgtgtatgaagaaggccttcgggttgtaaagtactttcagcggggaggaaggcggtgaggttaataacctcatcgattgacgttacccgcagaagaagcaccggctaactccgtgccagcagccgcggtaatacggagggtgcaagcgttaatcggaattactgggcgtaaagcgcacgcaggcggtctgtcaagtcggatgtgaaatccccgggctcaacctgggaactgcattcgaaactggcaggctagagtcttgtagaggggggtagaattccaggtgtagcggtgaaatgcgtagagatctggaggaataccggtggcgaaggcggccccctggacaaagactgacgctcaggtgcgaaagcgtggggagcaaacaggattagataccctggtagtccacgccgtaaacgatgtcgacttggaggttgtgcccttgaggcgtggcttccggagctaacgcgttaagtcgaccgcctggggagtacggccgcaaggttaaaactcaaatgaattgacgggggcccgcacaagcggtggagcatgtggtttaattcgatgcaacgcgaagaaccttacctactcttgacatccagagaactttccagagatggattggtgccttcgggaactctgagacaggtgctgcatggctgtcgtcagctcgtgttgtgaaatgttgggttaagtcccgcaacgagcgcaacccttatcctttgttgccagcggtccggccgggaactcaaaggagactgccagtgataaactggaggaaggtggggatgacgtcaagtcatcatggcccttacgagtagggctacacacgtgctacaatggcgcatacaaagagaagcgacctcgcgagagcaagcggacctcataaagtgcgtcgtagtccggattggagtctgcaactcgactccatgaagtcggaatcgctagtaatcgtggatcagaatgccacggtgaatacgttcccgggccttgtacacaccgcccgtcacaccatgggagtgggttgcaaaagaagtaggtagcttaaccttcgggagggcgcttaccactttgtgattcatgactggggtg

SEQ ID NO: 199 - DNA, 1462 bp, Enterobacter kobei
attgaacgctggcggcaggcctaacacatgcaagtcgagcggtagcacagagagcttgctctcgggtgacgagcggcggacgggtgagtaatgtctgggaaactgcctgatggagggggataactactggaaacggtagctaataccgcataacgtcgcaagaccaaagagggggaccttcgggcctcttgccatcagatgtgcccagatgggattagctagtaggtggggtaacggctcacctaggcgacgatccctagctggtctgagaggatgaccagccacactggaactgagacacggtccagactcctacgggaggcagcagtggggaatattgcacaatgggcgcaagcctgatgcagccatgccgcgtgtatgaagaaggccttcgggttgtaaagtactttcagcggggaggaaggtgttgtggttaataaccacagcaattgacgttacccgcagaagaagcaccggctaactccgtgccagcagccgcggtaatacggagggtgcaagcgttaatcggaattactgggcgtaaagcgcacgcaggcggtctgtcaagtcggatgtgaaatccccgggctcaacctgggaactgcattcgaaactggcaggctagagtcttgtagaggggggtagaattccaggtgtagcggtgaaatgcgtagagatctggaggaataccggtggcgaaggcggccccctggacaaagactgacgctcaggtgcgaaagcgtggggagcaaacaggattagataccctggtagtccacgctgtaaacgatgtcgacttggaggttgtgcccttgaggcgtggcttccggagctaacgcgttaagtcgaccgcctggggagtacggccgcaaggttaaaactcaaatgaattgacgggggcccgcacaagcggtggagcatgtggtttaattcgatgcaacgcgaagaaccttacctactcttgacatccacggaacttggcagagatgccttggtgccttcgggaaccgtgagacaggtgctgcatggctgtcgtcagctcgtgttgtgaaatgttgggttaagtcccgcaacgagcgcaacccttatcctttgttgccagcgattcggtcgggaactcaaaggagactgccagtgataaactggaggaaggtggggatgacgtcaagtcatcatggcccttacgagtagggctacacacgtgctacaatggcatatacaaagagaagcgacctcgcgagagcaagcggacctcataaagtatgtcgtagtccggatcggagtctgcaactcgactccgtgaagtcggaatcgctagtaatcgtggatcagaatgccacggtgaatacgttcccgggccttgtacacaccgcccgtcacaccatgggagtgggttgcaaaagaagtaggtagcttaaccttcgggagggcgcttaccactttgtgattcatgactggggtg

SEQ ID NO: 200 - DNA, 1462 bp, Enterobacter ludwigii
attgaacgctggcggcaggcctaacacatgcaagtcgaacggtagcacagagagcttgctctcgggtgacgagtggcggacgggtgagtaatgtctgggaaactgcctgatggagggggataactactggaaacggtagctaataccgcataacgtcgcaagaccaaagagggggaccttcgggcctcttgccatcagatgtgcccagatgggattagctagtaggtggggtaacggctcacctaggcgacgatccctagctggtctgagaggatgaccagccacactggaactgagacacggtccagactcctacgggaggcagcagtggggaatattgcacaatgggcgcaagcctgatgcagccatgccgcgtgtatgaagaaggccttcgggttgtaaagtactttcagcggggaggaaggtgttgtggttaataaccgcagcaattgacgttacccgcagaagaagcaccggctaactccgtgccagcagccgcggtaatacggagggtgcaagcgttaatcggaattactgggcgtaaagcgcacgcaggcggtctgtcaagtcggatgtgaaatccccgggctcaacctgggaactgcattcgaaactggcaggctagagtcttgtagaggggggtagaattccaggtgtagcggtgaaatgcgtagagatctggaggaataccggtggcgaaggcggccccctggacaaagactgacgctcaggtgcgaaagcgtggggagcaaacaggattagataccctggtagtccacgccgtaaacgatgtcgacttggaggttgtgcccttgaggcgtggcttccggagctaacgcgttaagtcgaccgcctggggagtacggccgcaaggttaaaactcaaatgaattgacgggggcccgcacaagcggtggagcatgtggtttaattcgatgcaacgcgaagaaccttacctactcttgacatccagagaacttagcagagatgctttggtgccttcgggaactctgagacaggtgctgcatggctgtcgtcagctcgtgttgtgaaatgttgggttaagtcccgcaacgagcgcaacccttatcctttgttgccagcggtccggccgggaactcaaaggagactgccagtgataaactggaggaaggtggggatgacgtcaagtcatcatggcccttacgagtagggctacacacgtgctacaatggcgcatacaaagagaagcgaactcgcgagagcaagcggacctcataaagtgcgtcgtagtccggattggagtctgcaactcgactccatgaagtcggaatcgctagtaatcgtagatcagaatgctacggtgaatacgttcccgggccttgtacacaccgcccgtcacaccatgggagtgggttgcaaaagaagtaggtagcttaaccttcgggagggcgcttaccactttgtgattcatgactggggtg

SEQ ID NO: 201 - DNA, 1488 bp, Erysipelatoclostridium ramosum
agagtttgatcctggctcaggatgaacgctggcggcgtgcctaatacatgcaagtcgaacgcgagcacttgtgctcgagtggcgaacgggtgagtaatacataagtaacctgccctagacagggggataactattggaaacgatagctaagaccgcataggtacggacactgcatggtgaccgtattaaaagtgcctcaaagcactggtagaggatggacttatggcgcattagctggttggcggggtaacggcccaccaaggcgacgatgcgtagccgacctgagagggtgaccggccacactgggactgagacacggcccagactcctacgggaggcagcagtagggaattttcggcaatgggggaaaccctgaccgagcaacgccgcgtgaaggaagaaggttttcggattgtaaacttctgttataaaggaagaacggcggctacaggaaatggtagccgagtgacggtactttattagaaagccacggctaactacgtgccagcagccgcggtaatacgtaggtggcaagcgttatccggaattattgggcgtaaagagggagcaggcggcagcaagggtctgtggtgaaagcctgaagcttaacttcagtaagccatagaaaccaggcagctagagtgcaggagaggatcgtggaattccatgtgtagcggtgaaatgcgtagatatatggaggaacaccagtggcgaaggcgacgatctggcctgcaactgacgctcagtcccgaaagcgtggggagcaaataggattagataccctagtagtccacgccgtaaacgatgagtactaagtgttggatgtcaaagttcagtgctgcagttaacgcaataagtactccgcctgagtagtacgttcgcaagaatgaaactcaaaggaattgacgggggcccgcacaagcggtggagcatgtggtttaattcgaagcaacgcgaagaaccttaccaggtcttgacatactcataaaggctccagagatggagagatagctatatgagatacaggtggtgcatggttgtcgtcagctcgtgtcgtgagatgttgggttaagtcccgcaacgagcgcaacccttatcgttagttaccatcattaagttggggactctagcgagactgccagtgacaagctggaggaaggcggggatgacgtcaaatcatcatgccccttatgacctgggctacacacgtgctacaatggatggtgcagagggaagcgaagccgcgaggtgaagcaaaacccataaaaccattctcagttcggattgtagtctgcaactcgactacatgaagttggaatcgctagtaatcgcgaatcagcatgtcgcggtgaatacgttctcgggccttgtacacaccgcccgtcacaccacgagagttgataacacccgaagccggtggcctaaccgcaaggaaggagctgtctaaggtgggattgatgattggggtgaagtcgtaacaaggtaacc

SEQ ID NO: 202 - DNA, 1464 bp, Escherichia fergusonii
attgaacgctggcggcaggcctaacacatgcaagtcgaacggtaacaggaagcagcttgctgctttgctgacgagtggcggacgggtgagtaatgtctgggaaactgcctgatggagggggataactactggaaacggtagctaataccgcataatgtcgcaagaccaaagagggggaccttcgggcctcttgccatcggatgtgcccagatgggattagctagtaggtggggtaacggctcacctaggcgacgatccctagctggtctgagaggatgaccagccacactggaactgagacacggtccagactcctacgggaggcagcagtggggaatattgcacaatgggcgcaagcctgatgcagccatgccgcgtgtatgaagaaggccttcgggttgtaaagtactttcagcggggaggaagggagtaaagttaatacctttgctcattgacgttacccgcagaagaagcaccggctaactccgtgccagcagccgcggtaatacggagggtgcaagcgttaatcggaattactgggcgtaaagcgcacgcaggcggtttgttaagtcagatgtgaaatccccgggctcaacctgggaactgcatctgatactggcaagcttgagtctcgtagaggggggtagaattccaggtgtagcggtgaaatgcgtagagatctggaggaataccggtggcgaaggcggccccctggacgaagactgacgctcaggtgcgaaagcgtggggagcaaacaggattagataccctggtagtccacgccgtaaacgatgtcgacttggaggttgtgcccttgaggcgtggcttccggagctaacgcgttaagtcgaccgcctggggagtacggccgcaaggttaaaactcaaatgaattgacgggggcccgcacaagcggtggagcatgtggtttaattcgatgcaacgcgaagaaccttacctggtcttgacatccacggaagttttcagagatgagaatgtgccttcgggaaccgtgagacaggtgctgcatggctgtcgtcagctcgtgttgtgaaatgttgggttaagtcccgcaacgagcgcaacccttatcctttgttgccagcggtccggccgggaactcaaaggagactgccagtgataaactggaggaaggtggggatgacgtcaagtcatcatggcccttacgaccagggctacacacgtgctacaatggcgcatacaaagagaagcgacctcgcgagagcaagcggacctcataaagtgcgtcgtagtccggattggagtctgcaactcgactccatgaagtcggaatcgctagtaatcgtggatcagaatgccacggtgaatacgttcccgggccttgtacacaccgcccgtcacaccatgggagtgggttgcaaaagaagtaggtagcttaaccttcgggagggcgcttaccactttgtgattcatgactggggtg

SEQ ID NO: 203 - DNA, 1439 bp, Escherichia hermannii
acatgcaagtcgaacggtaacaggaagcagcttgctgcttcgctgacgagtggcggacgggtgagtaatgtctggggatctgcctgatggagggggataactactggaaacggtagctaataccgcataacgtcgcaagaccaaagagggggaccttcgggcctcttgccatcagatgaacccagatgggattagctagtaggtggggtaacggctcacctaggcgacgatccctagctggtctgagaggatgaccagccacactggaactgagacacggtccagactcctacgggaggcagcagtggggaatattgcacaatgggcgcaagcctgatgcagccatgccgcgtgtatgaagaaggccttcgggttgtaaagtactttcagcggggaggaaggcgatgcggttaataaccgcgtcgattgacgttacccgcagaagaagcaccggctaactccgtgccagcagccgcggtaatacggagggtgcaagcgttaatcggaattactgggcgtaaagcgcacgcaggcggtctgtcaagtcggatgtgaaatccccgggctcaacctgggaactgcatccgaaactggcaggcttgagtcttgtagaggggggtagaattccaggtgtagcggtgaaatgcgtagagatctggaggaataccggtggcgaaggcggccccctggacaaagactgacgctcaggtgcgaaagcgtggggagcaaacaggattagataccctggtagtccacgccgtaaacgatgtcgacttggaggttgtgcccttgaggcgtggcttccggagctaacgcgttaagtcgaccgcctggggagtacggccgcaaggttaaaactcaaatgaattgacgggggcccgcacaagcggtggagcatgtggtttaattcgatgcaacgcgaagaaccttacctggtcttgacatccacagaactttccagagatggattggtgccttcgggaactgtgagacaggtgctgcatggctgtcgtcagctcgtgttgtgaaatgttgggttaagtcccgcaacgagcgcaacccttatcctttgttgccagcggtccggccgggaactcaaaggagactgccagtgataaactggaggaaggtggggatgacgtcaagtcatcatggcccttacgaccagggctacacacgtgctacaatggcgcatacaaagagaagcgaactcgcgagagcaagcggacctcataaagtgcgtcgtagtccggattggagtctgcaactcgactccatgaagtcggaatcgctagtaatcgtggatcagaatgccacggtgaatacgttcccgggccttgtacacaccgcccgtcacaccatgggagtgggttgcaaaagaagtaggtagcttaaccttcgggagggcgcttaccactttgtgattcatgactggggtg

SEQ ID NO: 204 - DNA, 1464 bp, Escherichia marmotae
attgaacgctggcggcaggcctaacacatgcaagtcgaacggtaacagaaagaagcttgcttctttgctgacgagtggcggacgggtgagtaatgtctgggaaactgcccgatggagggggataactactggaaacggtagctaataccgcataacgtcgcaagaccaaagagggggaccttcgggcctcttgccatcggatgtgcccagatgggattagctagtaggcggggtaacggcccacctaggcgacgatctctagctggtctgagaggatgaccagccacactggaactgagacacggtccagactcctacgggaggcagcagtggggaatattgcacaatgggcgcaagcctgatgcagccatgccgcgtgtatgaagaaggccttcgggttgtaaagtactttcagctgggaggaagggagtaaagttaatacctttgctcattgacgttacccgcagaagaagcaccggctaactccgtgccagcagccgcggtaatacggagggtgcaagcgttaatcggaattactgggcgtaaagcgcacgcaggcggtttgttaagtcagatgtgaaatccccgggctcaacctgggaactgcatctgatactggcaagcttgagtctcgtagaggggggtagaattccaggtgtagcggtgaaatgcgtagagatctggaggaataccggtggcgaaggcggccccctggacgaagactgacgctcaggtgcgaaagcgtggggagcaaacaggattagataccctggtagtccacgccgtaaacgatgtcgacttggaggttgtgcccttgaggcgtggcttccggagctaacgcgttaagtcgaccgcctggggagtacggccgcaaggttaaaactcaaatgaattgacgggggcccgcacaagcggtggagcatgtggtttaattcgatgcaacgcgaagaaccttacctggtcttgacatccacagaacattccagagatgggatggtgccttcgggaactgtgagacaggtgctgcatggctgtcgtcagctcgtgttgtgaaatgttgggttaagtcccgcaacgagcgcaacccttatcctttgttgccagcggtccggccgggaactcaaaggagactgccagtgataaactggaggaaggtggggatgacgtcaagtcatcatggcccttacgaccagggctacacacgtgctacaatggcgcatacaaagagaagcgacctcgcgagagcaagcggacctcataaagtgcgtcgtagtccggattggagtctgcaactcgactccatgaagtcggaatcgctagtaatcgtggatcagaatgccacggtgaatacgttcccgggccttgtacacaccgcccgtcacaccatgggagtgggttgcaaaagaagtaggtagcttaaccttcgggagggcgcttaccactttgtgattcatgactggggtg

SEQ ID NO: 205 - DNA, 1482 bp, Geobacillus stearothermophilus
gacgaacgctggcggcgtgcctaatacatgcaagtcgagcggaccggattggggcttgccttggattcggtcagcggcggacgggtgagtaacacgtgggcaacctgcccgcaagaccgggataactccgggaaaccggagctaataccggataacaccgaagaccgcatggtcttcggttgaaaggcggcctttgggctgtcacttgcggatgggcccgcggcgcattagctagttggtgaggtaacggctcaccaaggcgacgatgcgtagccggcctgagagggtgaccggccacactgggactgagacacggcccagactcctacgggaggcagcagtagggaatcttccgcaatgggcgaaagcctgacggagcgacgccgcgtgagcgaagaaggccttcgggtcgtaaagctctgttgtgagggacgaaggagcgccgttcgaagagggcggcgcggtgacggtacctcacgagaaagccccggctaactacgtgccagcagccgcggtaatacgtagggggcgagcgttgtccggaattattgggcgtaaagcgcgcgcaggcggtctcttaagtctgatgtgaaagcccacggctcaaccgtggagggtcattggaaactgggggacttgagggcaggagaggagagcggaattccacgtgtagcggtgaaatgcgtagagatgtggaggaacaccagtggcgaaggcggctctctggcctgcacctgacgctgaggcgcgaaagcgtggggagcaaacaggattagataccctggtagtccacgccgtaaacgatgagtgctaagtgttagaggggtcacaccctttagtgctgcagctaacgcgataagcactccgcctggggagtacggccgcaaggctgaaactcaaaggaattgacgggggcccgcacaagcggtggagcatgtggtttaattcgaagcaacgcgaagaaccttaccaggtcttgacatcccctgacaacccaagagattgggcgttcccccttcggggggacagggtgacaggtggtgcatggttgtcgtcagctcgtgtcgtgagatgttgggttaagtcccgcaacgagcgcaaccctcgcctctagttgccagcattcggttgggcactctagagggactgccggcgacaagtcggaggaaggtggggatgacgtcaaatcatcatgccccttatgacctgggctacacacgtgctacaatgggcggtacaaagggctgcgaacccgcgagggggagcgaatcccaaaaagccgctctcagttcggattgcaggctgcaactcgcctgcatgaagccggaatcgctagtaatcgcggatcagcatgccgcggtgaatacgttcccgggccttgtacacaccgcccgtcacaccacgagagcttgcaacacccgaagtcggtgaggtaacccttacgggagccagccgccgaaggtggggcaagtgattggggtg

SEQ ID NO: 206 - DNA, 1462 bp, Haemophilus influenzae
attgaacgctggcggcaggcttaacacatgcaagtcgaacggtagcaggagaaagcttgctttcttgctgacgagtggcggacgggtgagtaatgcttgggaatctggcttatggagggggataacgacgggaaactgtcgctaataccgcgtattatcggaagatgaaagtgcgggactgagaggccgcatgccataggatgagcccaagtgggattaggtagttggtggggtaaatgcctaccaagcctgcgatctctagctggtctgagaggatgaccagccacactggaactgagacacggtccagactcctacgggaggcagcagtggggaatattgcgcaatggggggaaccctgacgcagccatgccgcgtgaatgaagaaggccttcgggttgtaaagttctttcggtattgaggaaggttgatgtgttaatagcacatcaaattgacgttaaatacagaagaagcaccggctaactccgtgccagcagccgcggtaatacggagggtgcgagcgttaatcggaataactgggcgtaaagggcacgcaggcggttatttaagtgaggtgtgaaagccccgggcttaacctgggaattgcatttcagactgggtaactagagtactttagggaggggtagaattccacgtgtagcggtgaaatgcgtagagatgtggaggaataccgaaggcgaaggcagccccttgggaatgtactgacgctcatgtgcgaaagcgtggggagcaaacaggattagataccctggtagtccacgctgtaaacgctgtcgatttgggggttggggtttaactctggcacccgtagctaacgtgataaatcgaccgcctggggagtacggccgcaaggttaaaactcaaatgaattgacgggggcccgcacaagcggtggagcatgtggtttaattcgatgcaacgcgaagaaccttacctactcttgacatcctaagaagagctcagagatgagcttgtgccttcgggaacttagagacaggtgctgcatggctgtcgtcagctcgtgttgtgaaatgttgggttaagtcccgcaacgagcgcaacccttatcctttgttgccagcgacttggtcgggaactcaaaggagactgccagtgataaactggaggaaggtggggatgacgtcaagtcatcatggcccttacgagtagggctacacacgtgctacaatggcgtatacagagggaagcgaagctgcgaggtggagcgaatctcataaagtacgtctaagtccggattggagtctgcaactcgactccatgaagtcggaatcgctagtaatcgcgaatcagaatgtcgcggtgaatacgttcccgggccttgtacacaccgcccgtcacaccatgggagtgggttgtaccagaagtagatagcttaaccttttggagggcgtttaccacggtatgattcatgactggggtg

SEQ ID NO: 207 - DNA, 1459 bp, Halobacillus dabanensis
ggcggcgtgcctaatacatgcaagtcgagcgcgggaagcgagcggatcccttcggggtgaagctcgtggaacgagcggcggacgggtgagtaacacgtgggcaacctgcctgtaagaccggaataaccccgggaaaccggggctaatgccgggtaatacttttcttcgcatgaaggaaagttgaaagatggcttctcgctatcacttacagatgggcccgcggcgcattagctagttggtgaggtaacggctcaccaaggcgacgatgcgtagccgacctgagagggtgatcggccacactgggactgagacacggcccagactcctacgggaggcagcagtagggaatcttccgcaatggacgaaagtctgacggagcaacgccgcgtgaacgatgaaggtcttcggatcgtaaagttctgttgttagggaagaacaagtaccgtgcgaatagagcggtaccttgacggtacctaacgaggaagccccggctaactacgtgccagcagccgcggtaatacgtagggggcaagcgttgtccggaattattgggcgtaaagcgcgcgcaggcggttccttaagtctgatgtgaaagcccacggctcaaccgtggagggtcattggaaactggggaacttgaggacagaagaggagagtggaattccacgtgtagcggtgaaatgcgtagatatgtggaggaacaccagtggcgaaggcgactctctggtctgtctctgacgctgaggtgcgaaagcgtgggtagcaaacaggattagataccctggtagtccacgccgtaaacgatgagtgctaggtgttagggggcttccaccccttagtgctgaagttaacgcattaagcactccgcctggggagtacggccgcaaggctgaaactcaaaggaattgacgggggcccgcacaagcggtggagcatgtggtttaattcgaagcaacgcgaagaaccttaccaggtcttgacatccttggacatccctagagatagggctttcccttcggggaccaagtgacaggtggtgcatggttgtcgtcagctcgtgtcgtgagatgttgggttaagtcccgcaacgagcgcaacccctaatcttagttgccagcattcagttgggcactctaaggtgactgccggtgacaaaccggaggaaggcggggatgacgtcaaatcatcatgccccttatgacctgggctacacacgtgctacaatggatggtacaaagggcagcgaagccgcgaggtgtagcaaatcccataaaaccattctcagttcggattgcaggctgcaactcgcctgcatgaagccggaatcgctagtaatcgcggatcagcatgccgcggtgaatacgttcccgggccttgtacacaccgcccgtcacaccacgagagttggcaacacccgaagtcggtgaggtaacctttttggagccagccgccgaaggtg

SEQ ID NO: 208 - DNA, 1487 bp, Halobacillus karajensis
gacgaacgctggcggcgtgcctaatacatgcaagtcgagcgcgggaagcgagtggatcccttcggggtgaagctcgtggaacgagcggcggacgggtgagtaacacgtgggcaacctgcctgtaagaccggaataaccccgggaaaccggggctaatgccgggtaatacttttcttcgcatgaaggaaagttgaaagatggcttcttgctatcacttacagatgggcccgcggcgcattagctagttggtgaggtaacggctcaccaaggcgacgatgcgtagccgacctgagagggtgatcggccacactgggactgagacacggcccagactcctacgggaggcagcagtagggaatcttccgcaatggacgaaagtctgacggagcaacgccgcgtgaacgatgaaggtcttcggatcgtaaagttctgttgttagggaagaacaagtaccgtgcgaatagagcggtaccttgacggtacctaacgaggaagccccggctaactacgtgccagcagccgcggtaatacgtagggggcaagcgttgtccggaattattgggcgtaaagcgcgcgcaggcggttccttaagtctgatgtgaaagcccacggctcaaccgtggagggtcattggaaactggggaacttgaggaggacagaggagagtggaattccacgtgtagcggtgaaatgcgtagatatgtggaggaacaccagtggcgaaggcgactctctggtctgtttctgacgctgaggtgcgaaagcgtgggtagcaaacaggattatataccctggtagtccacgccgtaaacgatgactgctaggtgttagggggcttccaccccttagtgctgaagttaacgcattaagcactccgcctggggagtacggccgcaaggctgaaactcaaaggaattgacgggggcccgcacaagcggtggagcatgtggtttaattcgaagcaacgcgaagaaccttaccaggtcttgacatccttggacatccctagagatagggctttcccttcggggaccaagtgacaggtggtgcatggttgtcgtcagctcgtgtcgtgagatgttgggttaagtcccgcaacgagcgcaacccctaatcttagttgccagcattcagttgggcactctaaggtgactgccggtgacaaaccggaggaaggcggggatgacgtcaaatcatcatgccccttatgacctgggctacacacgtgctacaatggatggtacaaagggcagcgaagccgcgaggtgtagcaaatcccataaaaccattctcagttcggattgcaggctgcaactcgcctgcatgaagccggaatcgctagtaatcgcggatcagcatgccgcggtgaatacgttcccgggccttgtacacaccgcccgtcacaccacgagagttggcaacacccgaagtcggtgaggtaacctttttggagccagccgccgaaggtggggccaatgattggggtg

SEQ ID NO: 209 - DNA, 1489 bp, Halobacillus salinus
gacgaacgctggcggcgtgcctaatacatgcaagtcgagcgcaggaagcgagttgatccccttcgggggtgacgctcgtggaatgagcggcggacgggtgagtaacacgtgggcaacctgcctgtaagatcggaataactccgggaaaccggagctaatgccgggtaacatgttccttcgcatgaaggaacattaaaagatggcttctcgctatcacttacagatgggcccgcggcgcattagctagttggtgaggtaacggctcaccaaggcaacgatgcgtagccgacctgagagggtgatcggccacactgggactgagacacggcccagactcctacgggaggcagcagtagggaatcttccgcaatggacgaaagtctgacggagcaacgccgcgtgaacgatgaaggtcttcggatcgtaaagttctgttgttagggaagaacaagtaccgtgcgaatagaacggtaccttgacggtacctaacgaggaagccccggctaactacgtgccagcagccgcggtaatacgtagggggcaagcgttgtccggaattattgggcgtaaagcgcgcgcaggcggttccttaagtctgatgtgaaaggccacggctcaaccgtggagggccattggaaactggggaacttgaggacagaagaggagagtggaattccacgtgtagcggtgaaatgcgtagatatgtggaggaacaccagtggcgaaggcgactctctggtctgtttctgacgctgaggtgcgaaagcgtgggtagcaaacaggattagataccctggtagtccacgccgtaaacgatgagtgctaggtgttagggggcttccaccccttagtgctgaagttaacgcattaagcactccgcctggggagtacggccgcaaggctgaaactcaaaggaattgacgggggcccgcacaagcggtggagcatgtggtttaattcgaagcaacgcgaagaaccttaccaggtcttgacatctttggaccaccctagagatagggtcttcccttcggggaccaaatgacaggtggtgcatggttgtcgtcagctcgtgtcgtgagatgttgggttaagtcccgcaacgagcgcaacccctaatcttagttgccagcatttagttgggcactctaaggtgactgccggtgacaaaccggaggaaggcggggatgacgtcaaatcatcatgccccttatgacctgggctacacacgtgctacaatggatggaacaaagggcagcgaagccgcgaggtgtagcaaatcccataaaaccattctcagttcggattgcaggctgcaactcgcctgcatgaagccggaatcgctagtaatcgcggatcagcatgccgcggtgaatacgttcccgggccttgtacacaccgcccgtcacaccacgagagttggcaacacccgaagtcggtgaggtaacctttttggagccagccgccgaaggtggggccaatgattggggtg

SEQ ID NO: 210 - DNA, 1487 bp, Halobacillus trueperi
gacgaacgctggcggcgtgcctaatacatgcaagtcgagcgcgggaagcgagtggctcccttcggggtgaagctcgtggaacgagcggcggacgggtgagtaacacgtgggcaacctgcctgtaagatcggaataaccccgggaaaccggggctaatgccgggtaatactttctttcgcatgaaggaaagttgaaagatggcttctagctatcacttacagatgggcccgcggcgcattagctagttggtgaggtaacggctcaccaaggcgacgatgcgtagccgacctgagagggtgatcggccacactgggactgagacacggcccagactcctacgggaggcagcagtagggaatcttccgcaatggacgaaagtctgacggagcaacgccgcgtgaacgatgaaggtcttcggatcgtaaagttctgttgttagggaagaacaagtaccgtgcgaatagagcggtaccttgacggtacctaacgaggaagccccggctaactacgtgccagcagccgcggtaatacgtagggggcaagcgttgtccggaattattgggcgtaaagcgcgcgcaggcggttccttaagtctgatgtgaaagcccacggctcaaccgtggagggtcattggaaactggggaacttgaggacagaagaggagagtggaattccacgtgtagcggtgaaatgcgtagatatgtggaggaacaccagtggcgaaggcgactctctggtctgtttctgacgctgaggtgcgaaagcgtgggtagcaaacaggattagataccctggtagtccacgccgtaaacgatgagtgctaggtgttagggggcttccaccccttagtgctgaagttaacgcattaagcactccgcctggggagtacggccgcaaggctgaaactcaaaggaattgacgggggcccgcacaagcggtggagcatgtggtttaattcgaagcaacgcgaagaaccttaccaggtcttgacatccttggacatccctagagatagggctttcccttcggggaccaagtgacaggtggtgcatggttgtcgtcagctcgtgtcgtgagatgttgggttaagtcccgcaacgagcgcaacccctaatcttagttgccagcattcagttgggcactctaaggtgactgccggtgacaaaccggaggaaggcggggatgacgtcaaatcatcatgccccttatgacctgggctacacacgtgctacaatggatggtacaaagggcagcgaagccgcgaggtgtagcaaatcccataaaaccattctcagttcggattgcaggctgcaactcgcctgcatgaagccggaatcgctagtaatcgcggatcagcatgccgcggtgaatacgttcccgggccttgtacacaccgcccgtcacaccacgagagttggcaacacccgaagtcggtgaggtaacctttttggagccagccgccgaaggtggggccaatgattggggtg

SEQ ID NO: 211 - DNA, 1426 bp, Helicobacter pylori
agtgaacgctggcggcgtgcctaatacatgcaagtcgaacgatgaagcttctagcttgctagagtgctgattagtggcgcacgggtgagtaacgcataggtcatgtgcctcttagtttgggatagccattggaaacgatgattaataccagatactccctacgggggaaagatttatcgctaagagatcagcctatgtcctatcagcttgttggtaaggtaatggcttaccaaggctatgacgggtatccggcctgagagggtgaacggacacactggaactgagacacggtccagactcctacgggaggcagcagtagggaatattgctcaatgggggaaaccctgaagcagcaacgccgcgtggaggatgaaggttttaggattgtaaactccttttgttagagaagataatgacggtatctaacgaataagcaccggctaactccgtgccagcagccgcggtaatacggagggtgcaagcgttactcggaatcactgggcgtaaagagcgcgtaggcgggatagtcagtcaggtgtgaaatcctatggcttaaccatagaactgcatttgaaactactattctagagtgtgggagaggtaggtggaattcttggtgtaggggtaaaatccgtagagatcaagaggaatactcattgcgaaggcgacctgctggaacattactgacgctgattgcgcgaaagcgtggggagcaaacaggattagataccctggtagtccacgccctaaacgatggatgctagttgttggagggcttagtctctccagtaatgcagctaacgcattaagcatcccgcctggggagtacggtcgcaagattaaaactcaaaggaatagacggggacccgcacaagcggtggagcatgtggtttaattcgaagatacacgaagaaccttacctaggcttgacattgagagaatccgctagaaatagtggagtgtctagcttgctagaccttgaaaacaggtgctgcacggctgtcgtcagctcgtgtcgtgagatgttgggttaagtcccgcaacgagcgcaaccccctttcttagttgctaacaggttatgctgagaactctaaggatactgcctccgtaaggaggaggaaggtggggacgacgtcaagtcatcatggcccttacgcctagggctacacacgtgctacaatggggtgcacaaagagaagcaatactgtgaagtggagccaatcttcaaaacacctctcagttcggattgtaggctgcaactcgcctgcatgaagctggaatcgctagtaatcgcaaatcagccatgttgcggtgaatacgttcccgggtcttgtactcaccgcccgtcacaccatgggagttgtgtttgccttaagtcaggatgctaaattggctactgcccacggcacacacagcgactggggtg

SEQ ID NO: 212 - DNA, 1429 bp, Intestinibacter bartlettii; identical to SEQ ID NO: 34
  misc_feature (47)..(47): n is a, c, g, or t

SEQ ID NO: 213 - DNA, 1404 bp, Kluyvera cryocrescens
agcttgctcttgggtgacgagtggcggacgggtgagtaatgtctgggaaactgcccgatggagggggataactactggaaacggtagctaataccgcataacgtcgcaagaccaaagtgggggaccttcgggcctcacaccatcggatgtgcccagatgggattagctagtaggtggggtaatggctcacctaggcgacgatccctagctggtctgagaggatgaccagccacactggaactgagacacggtccagactcctacgggaggcagcagtggggaatattgcacaatgggcgcaagcctgatgcagccatgccgcgtgtatgaagaaggccttcgggttgtaaagtactttcagcgaggaggaaggcattaaggttaataaccttagtgattgacgttactcgcagaagaagcaccggctaactccgtgccagcagccgcggtaatacggagggtgcaagcgttaatcggaattactgggcgtaaagcgcacgcaggcggtctgtcaagtcggatgtgaaatccccgggctcaacctgggaactgcattcgaaactggcaggctagagtcttgtagaggggggtagaattccaggtgtagcggtgaaatgcgtagagatctggaggaataccggtggcgaaggcggccccctggacaaagactgacgctcaggtgcgaaagcgtggggagcaaacaggattagataccctggtagtccacgccgtaaacgatgtcgacttggaggttgtgcccttgaggcgtggcttccggagctaacgcgttaagtcgaccgcctggggagtacggccgcaaggttaaaactcaaatgaattgacgggggcccgcacaagcggtggagcatgtggtttaattcgatgcaacgcgaagaaccttacctactcttgacatccagagaacttagcagagatgctttggtgccttcgggaactctgagacaggtgctgcatggctgtcgtcagctcgtgttgtgaaatgttgggttaagtcccgcaacgagcgcaacccttatcctttgttgccagcggttcggccgggaactcaaaggagactgccagtgataaactggaggaaggtggggatgacgtcaagtcatcatggcccttacgagtagggctacacacgtgctacaatggcatatacaaagagaagcgacctcgcgagagcaagcggacctcataaagtatgtcgtagtccggattggagtctgcaactcgactccatgaagtcggaatcgctagtaatcgtagatcagaatgctacggtgaatacgttcccgggccttgtacacaccgcccgtcacaccatgggagtgggttgcaaaagaagtaggtagcttaaccttcgggagggcgcttaccactttgtgattcatgatt

SEQ ID NO: 214 - DNA, 1462 bp, Kluyvera georgiana
attgaacgctggcggcaggcctaacacatgcaagtcgaacggtagcacagagagcttgctctcgggtgacgagtggcggacgggtgagtaatgtctgggaaactgcccgatggagggggataactactggaaacggtagctaataccgcataacgtcgcaagaccaaagtgggggaccttcgggcctcacaccatcggatgtgcccagatgggattagctagtaggtggggtaacggctcacctaggcgacgatccctagctggtctgagaggatgaccagccacactggaactgagacacggtccagactcctacgggaggcagcagtggggaatattgcacaatgggcgcaagcctgatgcagccatgccgcgtgtatgaagaaggccttcgggttgtaaagtactttcagcgaggaggaaggcattgtggttaataaccgcagcgattgacgttactcgcagaagaagcaccggctaactccgtgccagcagccgcggtaatacggagggtgcaagcgttaatcggaattactgggcgtaaagcgcacgcaggcggtttgttaagtcagatgtgaaatccccgggctcaacctgggaactgcatttgaaactggcaagcttgagtctcgtagaggggggtagaattccaggtgtagcggtgaaatgcgtagagatctggaggaataccggtggcgaaggcggccccctggacgaagactgacgctcaggtgcgaaagcgtggggagcaaacaggattagataccctggtagtccacgccgtaaacgatgtctatttggaggttgttcccttgaggagtggcttccggagctaacgcgttaaatagaccgcctggggagtacggccgcaaggttaaaactcaaatgaattgacgggggcccgcacaagcggtggagcatgtggtttaattcgatgcaacgcgaagaaccttacctactcttgacatccagagaacttagcagagatgctttggtgccttcgggaactctgagacaggtgctgcatggctgtcgtcagctcgtgttgtgaaatgttgggttaagtcccgcaacgagcgcaacccttatcctttgttgccagcggtccggccgggaactcaaaggagactgccagtgataaactggaggaaggtggggatgacgtcaagtcatcatggcccttacgagtagggctacacacgtgctacaatggcatatacaaagagaagcgacctcgcgagagcaagcggacctcataaagtatgtcgtagtccggattggagtctgcaactcgactccatgaagtcggaatcgctagtaatcgtagatcagaatgctacggtgaatacgttcccgggccttgtacacaccgcccgtcacaccatgggagtgggttgcaaaagaagtaggtagcttaaccttcgggagggcgcttaccactttgtgattcatgactggggtg

SEQ ID NO: 215 - DNA, 1463 bp, Kosakonia cowanii
attgaacgctggcggcaggcctaacacatgcaagtcgaacggtaacaggaagcagcttgctgctttgctgacgagtggcggacgggtgagtaatgtctgggaaactgcctgatggagggggataactactggaaacggtagctaataccgcataacgtcgcaagaccaaagagggggaccttcgggcctcttgccatcagatgtgccagatgggattagctagtaggtggggtaacggctcacctaggcgacgatccctagctggtctgagaggatgaccagccacactggaactgagacacggtccagactcctacgggaggcagcagtggggaatattgcacaatgggcgcaagcctgatgcagccatgccgcgtgtatgaagaaggccttcgggttgtaaagtactttcagcggggaggaaggcgatgtggttaataaccgcgtcgattgacgttacccgcagaagaagcaccggctaactccgtgccagcagccgcggtaatacggagggtgcaagcgttaatcggaattactgggcgtaaagcgcacgcaggcggtctgtcaagtcggatgtgaaatccccgggctcaacctgggaactgcatccgaaactggcaggcttgagtctcgtagaggggggtagaattccaggtgtagcggtgaaatgcgtagagatctggaggaataccggtggcgaaggcggccccctggacgaagactgacgctcaggtgcgaaagcgtggggagcaaacaggattagataccctggtagtccacgccgtaaacgatgtcgacttggaggttgtgcccttgaggcgtggcttccggagctaacgcgttaagtcgaccgcctggggagtacggccgcaaggttaaaactcaaatgaattgacgggggcccgcacaagcggtggagcatgtggtttaattcgatgcaacgcgaagaaccttacctggtcttgacatccacagaactttccagagatggaaaggtgccttcgggaactgtgagacaggtgctgcatggctgtcgtcagctcgtgttgtgaaatgttgggttaagtcccgcaacgagcgcaacccttatcctttgttgccagcggttaggccgggaactcaaaggagactgccagtgataaactggaggaaggtggggatgacgtcaagtcatcatggcccttacgaccagggctacacacgtgctacaatggcgcatacaaagagaagcaatctcgcgagagctagcggacctcataaagtgcgtcgtagtccggattggagtctgcaactcgactccatgaagtcggaatcgctagtaatcgtgaatcagaatgtcacggtgaatacgttcccgggccttgtacacaccgcccgtcacaccatgggagtgggttgcaaaagaagtaggtagcttaaccttcgggagggcgcttaccactttgtgattcatgactggggtg

SEQ ID NO: 216 - DNA, 1458 bp, Kushneria sinocarnis
  misc_feature (291)..(291): n is a, c, g, or t
attgaacgctggtggcaggcttaacacatgcaagtcgagcggcagcggacccttcggggtgccggcgagcggcggacgggtgagtaatgcatgggaatctgcccggtagtgggggataacccggggaaacccgggctaataccgcatacctcccacgggagaaagcaggggatcttcggaccttgcgctatcggatgagcccatgtcggattagcttgctggtgaggtaacggctcaccagggctgcgatccgtagctggtttgagagaatgatcagccacaccgggactnagacacggcccggactcctacgggaggcagcagtggggaatattggacaatgggcgaaagcctgatccagccatgccgcgtgtgtgaagaaggccctcgggttgtaaagcactttcagcggggaagaaggcgtggcggttaatacccgccacgaaggacatcacccgcagaagaagcaccggctaactccgtgccagcagccgcggtaatacggagggtgcaagcgttaatcggaattactgggcgtaaagggcgcgtaggcggcctgtcacgccgggtgtgaaagccccgggctcaacccgggaacggcatccggaacgggcaggctcgagtgcaggagaggaaggtagaattcccggtgtagcggtgaaatgcgtagagatcgggaggaataccagtggcgaaggcggccttctggactgacactgacgctgaggcgcgaaagcatgggtagcaaacaggattagataccctggtagtccatgccgtaaacgatgtcgaccagccgttggcctcctcgagaggctggtggcgcagttaacgcgctaagtcgaccgcctggggagtacggccgcaaggctaaaactcaaatgaattgacgggggcccgcacaagcggtggagcatgtggtttaattcgatgcaacgcgaagaaccttacctgcccttgacatcccgggaatccgccggagacggcggagtgccttcgggaacccggagacaggtgctgcatggctgtcgtcagctcgtgttgtgaaatgttgggttaagtcccgtaacgagcgcaacccctatccccatttgccagcggtccggccgggaactctggggagactgccggtgacaaaccggaggaaggtggggacgacgtcaagtcatcatggcccttacgggcagggctacacacgtgctacaatggcgagtacaaagggttgcgaagcggcgacgtgaagccaatcccgtaaagctcgcctcagtccggattggagtctgcaactcgactccatgaagtcggaatcgctagtaatcgcgtatcagaatggcgcggtgaatacgttcccgggccttgtacacaccgcccgtcacaccatgggagtggactgcaccagaagcggttagcccaaccttcgggagggcgaccgccacggtgtggttcacgactggggtg

SEQ ID NO: 217 - DNA, 1440 bp, Lachnospira pectinoschiza
  misc_feature (4)..(4): n is a, c, g, or t
  misc_feature (48)..(49): n is a, c, g, or t
  misc_feature (55)..(56): n is a, c, g, or t
  misc_feature (61)..(62): n is a, c, g, or t
  misc_feature (68)..(68): n is a, c, g, or t
  misc_feature (77)..(78): n is a, c, g, or t
  misc_feature (84)..(84): n is a, c, g, or t
  misc_feature (179)..(179): n is a, c, g, or t
  misc_feature (326)..(326): n is a, c, g, or t
  misc_feature (408)..(408): n is a, c, g, or t
  misc_feature (492)..(492): n is a, c, g, or t
  misc_feature (511)..(511): n is a, c, g, or t
  misc_feature (593)..(594): n is a, c, g, or t
  misc_feature (618)..(618): n is a, c, g, or t
  misc_feature (658)..(658): n is a, c, g, or t
  misc_feature (847)..(847): n is a, c, g, or t
  misc_feature (903)..(903): n is a, c, g, or t
  misc_feature (1176)..(1176): n is a, c, g, or t
  misc_feature (1178)..(1178): n is a, c, g, or t
  misc_feature (1239)..(1239): n is a, c, g, or t
  misc_feature (1351)..(1352): n is a, c, g, or t
  misc_feature (1366)..(1366): n is a, c, g, or t
  misc_feature (1369)..(1369): n is a, c, g, or t
  misc_feature (1373)..(1373): n is a, c, g, or t
  misc_feature (1376)..(1376): n is a, c, g, or t
  misc_feature (1407)..(1407): n is a, c, g, or t
  misc_feature (1428)..(1428): n is a, c, g, or t
gatnaacgctggcggcgtgcttaacacatgcaagtcgaacgaagcatnnaagacnngattnnttcggnatgaagtcnnttatgnctgagtggcggacgggtgagtaacgcgtgggtaacctgcctcacacagggggatagcagttggaaacggctgataataccgcataagcgcacagnaccgcatggtacagtgtgaaaaactccggtggtgtgagatggacccgcgtctgattagctggttggcagggtaacggcctaccaaggcaacgatcagtagccgacctgagagggtgaccggccacattgggactgagacacggcccngactcctacgggaggcagcagtggggaatattgcacaatggaggaaactctgatgcagcgacgccgcgtgagtgaagaagtnattcgttatgtaaagctctatcagcagggaagatagtgacggtacctgactaagaagctccggctaaatacgtgccagcagccncggtaatacgtatggagcnagcgttatccggatttactgggtgtaaagggagtgtaggtggcatcacaagtcagaagtgaaagcccggggctcaaccccgnnactgcttttgaaactgtggagctngagtgcaggagaggcaagtggaattcctagtgtagcggtnaaatgcgtagatattaggaggaacaccagtggcgaaggcggcttgctggactgtaactgacactgaggctcgaaagcgtggggagcaaacaggattagataccctggtagtccacgccgtaaacgatgaatactaggtgtcggggctcataagagcttcggtgccgcagcaaacgcaataagtattccncctggggagtacgttcgcaagaatgaaactcaaaggaattgacggggacccgcacnagcggtggagcatgtggtttaattcgaagcaacgcgaagaaccttaccaagtcttgacatcctcctgcccggtcagtaatgtgaccttttcttcggaacaagagtgacaggtggtgcatggttgtcgtcagctcgtgtcgtgagatgttgggttaagtcccgcaacgagcgcaacccctattcttagtagccagcatttaaggtgggcactctaggaagactgccagggataacctggaggaaggtggggatgacgtcaaatcatcatgcccntnatgacttgggctacacacgtgctacaatggcgtaaacaaagtgaagcgagagtgtgagctnaagcaaatcacaaaaataacgtctcagttcggattgtagtctgcaactcgactacatgaagctggaatcgctagtaatcgcgaatcagaatgtcgcggtgaatacgttcccnngtcttgtacacacngcncgtnacnccatgggagtcggaaatgcccgaagtcggtnacctaacgaaagaaggagccnccgaaggcaggt

SEQ ID NO: 218 - DNA, 1207 bp, Lachnotalea glycerini
ataacagttagaaatgactgctaataccgcataacccgctagtaccgcatggtacggacggaaaagatttatcggtataagatggacccgcgtctgattagctggttggtgaggtaatggctcaccaaggcaacgatcagtagccggcttgagagagtgaacggccacattgggactgagacacggcccaaactcctacgggaggcagcagtggggaatattgcacaatgggggaaaccctgatgcagcaacgccgcgtgaaggaagaagtatttcggtatgtaaacttctatcagcagggaagaaaatgacggtacctgactaagaagccccggctaactacgtgccagcagccgcggtaatacgtagggggcaagcgttatccggatttactgggtgtaaagggagcgtaggtggcatggcaagtcagatgtgaaaacccagggctcaaccctgggactgcatttgaaactgtcaggctggagtgcaggagaggtaagtggaattcctagtgtagcggtgaaatgcgtagatattaggaggaacaccagtggcgaaggcggcttactggactgtaactgacactgaggctcgaaagcgtggggagcaaacaggattagataccctggtagtccacgccgtaaacgatgaatactaggtgtcggggggcataagctcttcggtgccgcagctaacgcaataagtattccacctggggagtacgttcgcaagaatgaaactcaaaggaattgacggggacccgcacaagcggtggagcatgtggtttaattcgaagcaacgcgaagaaccttaccaaatcttgacatccctctgacgtagtcgtaatggactatttctttcgggacagaggagacaggtggtgcatggttgtcgtcagctcgtgtcgtgagatgttgggttaagtcccgcaacgagcgcaacccttatctttagtagccagcatgtaagatgggcactctagagagacagccggggataacccggaggaaggcggggatgacgtcaaatcatcatgccccttatgatttgggctacacacgtgctacaatggcgtaaacaaagggaagcgaagtcgtgaggccaagcaaatcccaaaaataacgtctcagttcggattgtagtctgcaactcgactacatgaagctggaatcgctagtaatcgcgaatcagaatgtcgcggtgaata

SEQ ID NO: 219 - DNA, 1482 bp, Lactobacillus mali
gacgaacgctggcggcgtgcctaatacatgcaagtcgaacgcaaaactttcatcgaatgcttgcattcaccggaagttttgagtggcgaacgggtgagtaacacgtgggtaacctgcccagaagagggggataacacttggaaacaggtgctaataccgcataacaataaaaaccgcatggtttttatttaaaagatggttttgctatcacttctggatggacccgcggcgtattagctagttggtaaggtaaaggcttaccaaggcaatgatacgtagccgaactgagaggttgatcggccacattgggactgagacacggcccaaactcctacgggaggcagcagtagggaatcttccacaatggacgaaagtctgatggagcaacgccgcgtgagtgaagaaggttttcggatcgtaaaactctgttgttagagaagaacgtgtgtgagagtaactgctcatgcagtgacggtatctaaccagaaagccacggctaactacgtgccagcagccgcggtaatacgtaggtggcaagcgttgtccggatttattgggcgtaaagggaacgcaggcggttttttaagtctgatgtgaaagccttcggcttaaccgaagtcatgcattggaaactgaaagacttgagtgcagaagaggagagtggaactccatgtgtagcggtgaaatgcgtagatatatggaagaacaccagtggcgaaagcggctctctggtctgtaactgacgctgaggttcgaaagtgtgggtagcaaacaggattagataccctggtagtccacaccgtaaacgatgaatgctaagtgttggagggtttccgcccttcggtgctgcagctaacgcattaagcattccgcctggggagtacgaccgcaaggttgaaactcaaaggaattgacgggggcccgcacaagcggtggagcatgtggtttaattcgaagcaacgcgaagaaccttaccaggtcttgacatcttctgacaacctaagagattaggtgttcccttcggggacagaatgacaggtggtgcatggttgtcgtcagctcgtgtcgtgagatgttgggttaagtcccgcaacgagcgcaacccttattattagttgccagcattaagttgggcactctagtgagactgccggtgacaaaccggaggaaggtggggatgacgtcaaatcatcatgccccttatgacctgggctacacacgtgctacaatggacggtacaacgagtcgcgaaaccgcgaggtttagctaatctcttaaagccgttctcagttcggattgtaggctgcaactcgcctacatgaagtcggaatcgctagtaatcgcggatcagcatgccgcggtgaatacgttcccgggccttgtacacaccgcccgtcacaccatgagagtttgtaacacccaaagccggtgaggtaacctttatgggaccagccgtctaaggtgggacagatgattggggtg

SEQ ID NO: 220 - DNA, 1462 bp, Leclercia adecarboxylata
attgaacgctggcggcaggcctaacacatgcaagtcgaacggtagcacagagagcttgctctcgggtgacgagtggcggacgggtgagtaatgtctgggaaactgcctgatggagggggataactactggaaacggtagctaataccgcataacgtcgcaagaccaaagagggggaccttcgggcctcttgccatcagatgtgcccagatgggattagctagtaggtggggtaatggctcacctaggcgacgatccctagctggtctgagaggatgaccagccacactggaactgagacacggtccagactcctacgggaggcagcagtggggaatattgcacaatgggcgcaagcctgatgcagccatgccgcgtgtatgaagaaggccttcgggttgtaaagtactttcagcggggaggaaggtgttgtggttaataaccgcagcaattgacgttacccgcagaagaagcaccggctaactccgtgccagcagccgcggtaatacggagggtgcaagcgttaatcggaattactgggcgtaaagcgcacgcaggcggtctgtcaagtcggatgtgaaatccccgggctcaacctgggaactgcattcgaaactggcaggctagagtcttgtagaggggggtagaattccaggtgtagcggtgaaatgcgtagagatctggaggaataccggtggcgaaggcggccccctggacaaagactgacgctcaggtgcgaaagcgtggggagcaaacaggattagataccctggtagtccacgccgtaaacgatgtcgacttggaggttgttcccttgaggagtggcttccggagctaacgcgttaagtcgaccgcctggggagtacggccgcaaggttaaaactcaaatgaattgacgggggcccgcacaagcggtggagcatgtggtttaattcgatgcaacgcgaagaaccttacctactcttgacatccagagaacttagcagagatgctttggtgccttcgggaactctgagacaggtgctgcatggctgtcgtcagctcgtgttgtgaaatgttgggttaagtcccgcaacgagcgcaacccttatcctttgttgccagcggttaggccgggaactcaaaggagactgccagtgataaactggaggaaggtggggatgacgtcaagtcatcatggcccttacgagtagggctacacacgtgctacaatggcgcatacaaagagaagcgacctcgcgagagcaagcggacctcataaagtgcgtcgtagtccggattggagtctgcaactcgactccatgaagtcggaatcgctagtaatcgtagatcagaatgctacggtgaatacgttcccgggccttgtacacaccgcccgtcacaccatgggagtgggttgcaaaagaagtaggtagcttaaccttcgggagggcgcttaccactttgtgattcatgactggggtg

SEQ ID NO: 221 - DNA, 1462 bp, Lelliottia amnigena
attgaacgctggcggcaggcctaacacatgcaagtcgagcggtagcatagagagcttgctctcgggtgacgagcggcggacgggtgagtaatgtctgggaaactgcctgatggagggggataactactggaaacggtagctaataccgcataacgtcgcaagaccaaagagggggaccttcgggcctcttgccatcagatgtgcccagatgggattagctagtaggtggggtaatggctcacctaggcgacgatccctagctggtctgagaggatgaccagccacactggaactgagacacggtccagactcctacgggaggcagcagtggggaatattgcacaatgggcgcaagcctgatgcagccatgccgcgtgtatgaagaaggccttcgggttgtaaagtactttcagcgaggaggaaggcattgtggttaataaccacagtgattgacgttactcgcagaagaagcaccggctaactccgtgccagcagccgcggtaatacggagggtgcaagcgttaatcggaattactgggcgtaaagcgcacgcaggcggtctgtcaagtcggatgtgaaatccccgggctcaacctgggaactgcattcgaaactggcaggctagagtcttgtagaggggggtagaattccaggtgtagcggtgaaatgcgtagagatctggaggaataccggtggcgaaggcggccccctggacaaagactgacgctcaggtgcgaaagcgtggggagcaaacaggattagataccctggtagtccacgccgtaaacgatgtcgacttggaggttgttcccttgaggagtggcttccggagctaacgcgttaagtcgaccgcctggggagtacggccgcaaggttaaaactcaaatgaattgacgggggcccgcacaagcggtggagcatgtggtttaattcgatgcaacgcgaagaaccttacctactcttgacatccagagaacttagcagagatgctttggtgccttcgggaactctgagacaggtgctgcatggctgtcgtcagctcgtgttgtgaaatgttgggttaagtcccgcaacgagcgcaacccttatcctttgttgccagcggttcggccgggaactcaaaggagactgccagtgataaactggaggaaggtggggatgacgtcaagtcatcatggcccttacgagtagggctacacacgtgctacaatggcatatacaaagagaagcgacctcgcgagagcaagcggacctcacaaagtatgtcgtagtccggatcggagtctgcaactcgactccgtgaagtcggaatcgctagtaatcgtagatcagaatgctacggtgaatacgttcccgggccttgtacacaccgcccgtcacaccatgggagtgggttgcaaaagaagtaggtagcttaaccttcgggagggcgcttaccactttgtgattcatgactggggtg

SEQ ID NO: 222 - DNA, 1417 bp, Litorilituus sediminis
gcgcgcggcttacacatgcagtcgagcggaacgagaagtacttgtacttcggcgtcgagcggcggacgggtgagtaatgcttgggaatatgcctttaggtgggggacaacagttggaaacgactgctaataccgcataatgtctacggaccaaagggggggctcttcggacctcttgcctaaagattagcccaagtgagattagctagttggtgaggtaatggctcaccaaggcgacgatctctagctggtttgagaggatgatcagccacactgggactgagacacggcccagactcctacgggaggcagcagtggggaatattgcacaatgggggaaaccctgatgcagccatgccgcgtgtgtgaagaaggccctagggttgtaaagcactttcagtagggaggaaagggtgttgattaatactcaacatctgtgacgttacctacagaagaagcaccggctaacttcgtgccagcagccgcggtaatacgaggggtgcaagcgttaatcggaattactgggcgtaaagcgtgcgtaggcggtttgttaagcaagatgtgaaagcccagggctcaaccttggaactgcattttgaactggcaaactagagtactgtagagggtggtggaatttccagtgtagcggtgaaatgctagagattggaaggaacatcagtggcgaaggcggccacctggacagatactgacgttgaggcacgaaagcgtggggagcaaacaggattagataccctggtagtccacgccgtaaacgatgtcaactagccgtctgttgccttgagcagtgggtggcgtagctaacgcgctaagttgaccgcctggggagtacggccgcaaggttaaaactcaaatgaattgacgggggcccgcacaagcggtggagcatgtggtttaattcgatgcaacgcgaagaaccttaccatcccttgacatcctgcgaattttctagagatagaattgtgccttcgggaacgcagtgacaggtgctgcatggctgtcgtcagctcgtgttgtgaaatgttgggttaagtcccgcaacgagcgcaacccctatccttatttgccagcgcgtagtggcgggaactctaaggagactgccggtgataaaccggaggaaggtggggacgacgtcaagtcatcatggcccttacgggatgggctacacacgtgctacaatggcgtatacagagggcagcaataccgcgaggtggagcgaatcccacaaagtacgtcgtagtccggattggagtctgcaactcgactccatgaagtcggaatcgctagtaatcgtggatcagaatgccacggtgaatacgttcccgggccttgtacacaccgcccgtcacaccatgggagtgggatgcaaaagaagtggctagtttaacctcgggaggacg

SEQ ID NO: 223 - DNA, 1444 bp, Lysinibacillus boronitolerans
tgcagtcgagcgacagaaaggagcttgctcctttgacgttagcggcggacgggtgagtaacacgtgggcaacttcccctatagtttgggataattccgggaaaccggggctaataccgaataatttcttttgcttcatggccaagagactgaaagacggtttcggctgtcgctataggatgggcccgcggcgcattagctagttggtgaggtaacggctcaccaaggcgacgatgcgtagccgacctgagagggtgatcggccacactgggactgagacacggcccagactcctacgggaggcagcagtagggaatcttccacaatgggcgaaagcctgatggagcaacgccgcgtgagtgaagaaggttttcggatcgtaaaactctgttgtaagggaagaacaagtacagtagtaactggctgtaccttgacggtaccttattaaaaagccacggctaactacctgccaacagccgcggtaatacctaagtggcaagcgttgtccggaattattgggcgtaaagcgcgcgcaggcggtcctttaagtctgatgtgaaagcccacggctcaaccgtggagggtcattggaaactgggggacttgagtgcagaagaggaaagtggaattccaagtgtagcggtgaaatgcgtagagatttggaggaacaccagtggcgaaggcgactttctggtctgtaactgacgctgaggcgcgaaagcgtggggagcaaacaggattagataccctggtagtccacgccgtaaacgatgagtgctaagtgttagggggtttccgccccttagtgctgcagctaacgcattaagcactccgcctggggagtacggtcgcaagactgaaactcaaaggaattgacgggggcccgcacaagcggtggagcatgtggtttaattcgaagcaacgcgaagaaccttaccaggtcttgacatcccgttgaccactgtagagatatagtttccccttcgggggcaacggtgacaggtggtgcatggttgtcgtcagctcgtgtcgtgagatgttgggttaagtcccgcaacgagcgcaacccttgatcttagttgccatcatttagttgggcactctaaggtgactgccggtgacaaaccggaggaaggtggggatgacgtcaaatcatcatgccccttatgacctgggctacacacgtgctacaatggacgatacaaacggttgccaactcgcgagagggagctaatccgataaagtcgttctcagttcggattgtaggctgcaactcgcctacatgaagccggaatcgctagtaatcgcggatcagcatgccgcggtgaatacgttcccgggccttgtacacaccgcccgtcacaccacgagagtttgtaacacccgaagtcggtgaggtaaccttttggagccagccgccgaaggtgggatagatgattggggtg

SEQ ID NO: 224 - DNA, 1474 bp, Lysinibacillus fusiformis
gacgaacgctggcggcgtgcctaatacatgcaagtcgagcgaacagagaaggagcttgctccttcgacgttagcggcggacgggtgagtaacacgtgggcaacctaccttatagtttgggataactccgggaaaccggggctaataccgaataatctgtttcacctcatggtgaaacactgaaagacggtttcggctgtcgctataggatgggcccgcggcgcattagctagttggtgaggtaacggctcaccaaggcgacgatgcgtagccgacctgagagggtgatcggccacactgggactgagacacggcccagactcctacgggaggcagcagtagggaatcttccacaatgggcgaaagcctgatggagcaacgccgcgtgagtgaagaaggatttcggttcgtaaaactctgttgtaagggaagaacaagtacagtagtaactggctgtaccttgacggtaccttattagaaagccacggctaactacgtgccagcagccgcggtaatacgtaggtggcaagcgttgtccggaattattgggcgtaaagcgcgcgcaggtggtttcttaagtctgatgtgaaagcccacggctcaaccgtggagggtcattggaaactgggagacttgagtgcagaagaggatagtggaattccaagtgtagcggtgaaatgcgtagagatttggaggaacaccagtggcgaaggcgactatctggtctgtaactgacactgaggcgcgaaagcgtggggagcaaacaggattagataccctggtagtccacgccgtaaacgatgagtgctaagtgttagggggtttccgccccttagtgctgcagctaacgcattaagcactccgcctggggagtacggtcgcaagactgaaactcaaaggaattgacgggggcccgcacaagcggtggagcatgtggtttaattcgaagcaacgcgaagaaccttaccaggtcttgacatcccgttgaccactgtagagatatagtttccccttcgggggcaacggtgacaggtggtgcatggttgtcgtcagctcgtgtcgtgagatgttgggttaagtcccgcaacgagcgcaacccttgatcttagttgccatcatttagttgggcactctaaggtgactgccggtgacaaaccggaggaaggtggggatgacgtcaaatcatcatgccccttatgacctgggctacacacgtgctacaatggacgatacaaacggttgccaactcgcgagagggagctaatccgataaagtcgttctcagttcggattgtaggctgcaactcgcctacatgaagccggaatcgctagtaatcgcggatcagcatgccgcggtgaatacgttcccgggccttgtacacaccgcccgtcacaccacgagagtttgtaacacccgaagtcggtgaggtaaccttttggagccagccgccgaaggtgggatagatgattggggtg

SEQ ID NO: 225 - DNA, 1472 bp, Lysinibacillus massiliensis
  misc_feature (95)..(95): n is a, c, g, or t
gacgaacgctggcggcgtgcctaatacatgcaagtcgagcggacggatgggagcttgctcccagaagttagcggcggacgggtgagtaacacgtnggcaacctgccctatagttggggataactccgggaaaccggggctaataccgaatgatataatttagctcctgctagattgttgaaagatggtttacgctatcgctataggatgggcccgcggcgcattagctagttggtgaggtaacggctcaccaaggcgacgatgcgtagccgacctgagagggtgatcggccacactgggactgagacacggcccagactcctacgggaggcagcagtagggaatcttccacaatgggcgaaagcctgatggagcaacgccgcgtgagtgaagaaggttttcggatcgtaaaactctgttgtaagggaagaacaagtacagtagtaactggctgtaccttgacggtaccttattagaaagccacggctaactacgtgccagcagccgcggtaatacgtaggtggcaagcgttgtccggaattattgggcgtaaagcgcgcgcaggcggtcctttaagtctgatgtgaaagccctcggctcaaccgaggagggtcattggaaactggaggacttgagtgcagaagaggaaagtggaattccaagtgtagcggtgaaatgcgtagagatttggaggaacaccagtggcgaaggcgactttctggtctgtaactgacgctgaggcgcgaaagcgtggggagcaaacaggattagataccctggtagtccacgccgtaaacgatgagtgctaagtgttagggggtttccgccccttagtgctgcagctaacgcattaagcactccgcctggggagtacggtcgcaagactgaaactcaaaggaattgacgggggcccgcacaagcggtggagcatgtggtttaattcgaagcaacgcgaagaaccttaccaggtcttgacatcccactgaccgctatggagacatagctttcccttcggggacagtggtgacaggtggtgcatggttgtcgtcagctcgtgtcgtgagatgttgggttaagtcccgcaacgagcgcaacccttgtccttagttgccatcattaagttgggcactctaaggagactgccgatgacaaatcggaggaaggtggggatgacgtcaaatcatcatgccccttatgacctgggctacacacgtgctacaatggacggtacaaacggttgcgaagtcgcgagatggagctaatctgataaaaccgttctcagttcggattgtaggctgcaactcgcctacatgaagctggaatcgctagtaatcgcggatcagcatgccgcggtgaatacgttcccgggccttgtacacaccgcccgtcacaccacgagagtttgtaacacccgaagtcggtgaggtaaccttatggagccagccgccgaaggtgggacagatgattggggtg

SEQ ID NO: 226 - DNA, 1474 bp, Lysinibacillus sphaericus
gacgaacgctggcggcgtgcctaatacatgcaagtcgagcgaacagagaaggagcttgctcctttgacgttagcggcggacgggtgagtaacacgtgggcaacctaccctatagtttgggataactccgggaaaccggggctaataccgaataatcttttgtccctcatgggacaatactgaaagacggtttcggctgtcgctataggatgggcccgcggcgcattagctagttggtgaggtaacggctcaccaaggcaacgatgcgtagccgacctgagagggtgatcggccacactgggactgagacacggcccagactcctacgggaggcagcagtagggaatcttccacaatgggcgaaagcctgatggagcaacgccgcgtgagtgaagaaggatttcggttcgtaaaactctgttgtaagggaagaacaagtacagtagtaactggctgtaccttgacggtaccttattagaaagccacggctaactacgtgccagcagccgcggtaatacgtaggtggcaagcgttgtccggaattattgggcgtaaagcgcgcgcaggtggtttcttaagtctgatgtgaaagcccacggctcaaccgtggagggtcattggaaactgggagacttgagtgcagaagaggatagtggaattccaagtgtagcggtgaaatgcgtagagatttggaggaacaccagtggcgaaggcgactatctggtctgtaactgacactgaggcgcgaaagcgtggggagcaaacaggattagataccctggtagtccacgccgtaaacgatgagtgctaagtgttagggggtttccgccccttagtgctgcagctaacgcattaagcactccgcctggggagtacggtcgcaagactgaaactcaaaggaattgacgggggcccgcacaagcggtggagcatgtggtttaattcgaagcaacgcgaagaaccttaccaggtcttgacatcccgttgaccactgtagagatatggttttcccttcggggacaacggtgacaggtggtgcatggttgtcgtcagctcgtgtcgtgagatgttgggttaagtcccgcaacgagcgcaacccttgatcttagttgccatcatttagttgggcactctaaggtgactgccggtgacaaaccggaggaaggtggggatgacgtcaaatcatcatgccccttatgacctgggctacacacgtgctacaatggacgatacaaacggttgccaactcgcgagagggagctaatccgataaagtcgttctcagttcggattgtaggctgcaactcgcctacatgaagccggaatcgctagtaatcgcggatcagcatgccgcggtgaatacgttcccgggccttgtacacaccgcccgtcacaccacgagagtttgtaacacccgaagtcggtgaggtaaccttttggagccagccgccgaaggtgggatagatgattggggtg

SEQ ID NO: 227 - DNA, 1474 bp, Lysinibacillus xylanilyticus
gacgaacgctggcggcgtgcctaatacatgcaagtcgagcgaacagagaaggagcttgctcctttgacgttagcggcggacgggtgagtaacacgtgggcaacctaccctatagtttgggataactccgggaaaccggggctaataccgaataatctgtttcacttcatggtgaaacactgaaagacggtttcggctgtcgctataggatgggcccgcggcgcattagctagttggtgaggtaacggctcaccaaggcgacgatgcgtagccgacctgagagggtgatcggccacactgggactgagacacggcccagactcctacgggaggcagcagtagggaatcttccacaatgggcgaaagcctgatggagcaacgccgcgtgagtgaagaaggttttcggatcgtaaaactctgttgtaagggaagaacaagtacagtagtaactggctgtaccttgacggtaccttattagaaagccacggctaactacgtgccagcagccgcggtaatacgtaggtggcaagcgttgtccggaattattgggcgtaaagcgcgcgcaggcggtcctttaagtctgatgtgaaagcccacggctcaaccgtggagggtcattggaaactgggggacttgagtgcagaagaggaaagtggaattccaagtgtagcggtgaaatgcgtagagatttggaggaacaccagtggcgaaggcgactttctggtctgtaactgacgctgaggcgcgaaagcgtggggagcaaacaggattagataccctggtagtccacgccgtaaacgatgagtgctaagtgttagggggtttccgccccttagtgctgcagctaacgcattaagcactccgcctggggagtacggtcgcaagactgaaactcaaaggaattgacgggggcccgcacaagcggtggagcatgtggtttaattcgaagcaacgcgaagaaccttaccaggtcttgacatcccgttgaccactgtagagatatggttttcccttcggggacaacggtgacaggtggtgcatggttgtcgtcagctcgtgtcgtgagatgttgggttaagtcccgcaacgagcgcaacccttgatcttagttgccatcatttagttgggcactctaaggtgactgccggtgacaaaccggaggaaggtggggatgacgtcaaatcatcatgccccttatgacctgggctacacacgtgctacaatggacgatacaaacggttgccaactcgcgagagggagctaatccgataaagtcgttctcagttcggattgtaggctgcaactcgcctacatgaagccggaatcgctagtaatcgcggatcagcatgccgcggtgaatacgttcccgggccttgtacacaccgcccgtcacaccacgagagtttgtaacacccgaagtcggtggggtaaccttttggagccagccgccgaaggtgggatagatgattggggtg

SEQ ID NO: 228 - DNA, 1467 bp, Lysobacter soli
agtgaacgctggcggcaggcctaacacatgcaagtcgaacggcagcacagaggagcttgctccttgggtggcgagtggcggacgggtgaggaatgcatcggaatctgcctatttgtgggggataacgtagggaaacttacgctaataccgcatacgtcctacgggagaaagtgggggaccttcgggcctcacgcagatagatgagccgatgccggattagctagttggcggggtaaaggcccaccaaggcgacgatccgtagctggtctgagaggatgatcagccacactggaactgagacacggtccagactcctacgggaggcagcagtggggaatattggacaatgggcgcaagcctgatccagccatgccgcgtgtgtgaagaaggccttcgggttgtaaagcacttttgtccggaaagaaaagcgctcgattaatactcgggtgttatgacggtaccggaagaataagcaccggctaacttcgtgccagcagccgcggtaatacgaagggtgcaagcgttactcggaattactgggcgtaaagcgtgcgtaggtggtttgttaagtctgatgtgaaagccctgggctcaacctgggaactgcattggaaactggcttactagagtgcggtagaggggtgtggaattcccggtgtagcagtgaaatgcgtagatatcgggaggaacatctgtggcgaaggcgacaccctggaccagcactgacactgaggcacgaaagcgtggggagcaaacaggattagataccctggtagtccacgccctaaacgatgcgaactggatgttgggggcaacttggccctcagtatcgaagctaacgcgttaagttcgccgcctgggaagtacggtcgcaagactgaaactcaaaggaattgacgggggcccgcacaagcggtggagtatgtggtttaattcgatgcaacgcgaagaaccttacctggccttgacatgcacggaactttccagagatggattggtgccttcgggaaccgtgacacaggtgctgcatggctgtcgtcagctcgtgtcgtgagatgttgggttaagtcccgcaacgagcgcaacccttgtccttagttgccagcacgtaatggtgggaactctaaggagaccgccggtgacaaaccggaggaaggtggggatgacgtcaagtcatcatggcccttacggccagggctacacacgtactacaatggtagggacagagggctgcaaacccgcgagggcaagccaatcccagaaaccctatctcagtccggattggagtctgcaactcgactccatgaagtcggaatcgctagtaatcgcagatcagcattgctgcggtgaatacgttcccgggccttgtacacaccgcccgtcacaccatgggagtttgttgcaccagaagcaggtagcttaaccttcgggagggcgcttgccacggtgtggccgatgactggggtg

SEQ ID NO: 229 - DNA, 1446 bp, Micrococcus lylae
gatgaacgctggcggcgtgcttaacacatgcaagtcgaacgatgaagctccagcttgctggggtggattagtggcgaacgggtgagtaacacgtgagtaacctgcccttgactctgggataagccttggaaacggggtctaataccggataggagcattcaccgcatggtgggtgttggaaagaatttcggtcttggatggactcgcggcccatcagcttgttggtgaggtaatggctcaccaaggcgacgacgggtagccggcctgagagggtgaccggccacactgggactgagacacggcccagactcctacgggaggcagcagtggggaatattgcacaatgggcgcaagcctgatgcagcgacgccgcgtgagggatgacggccttcgggttgtaaacctctttcagtagggaagaagcgaaagtgacggtacctgcagaagaagcaccggctaactacgtgccagcagccgcggtaatacgtagggtgcgagcgttatccggaattattgggcgtaaagagctcgtaggcggtttgtcgcgtctgccgtgaaagtccggggcttaactccggatctgcggtgggtacgggcagactagagtgcagtaggggagactggaattcctggtgtagcggtggaatgcgcagatatcaggaggaacaccgatggcgaaggcaggtctctgggctgtaactgacgctgaggagcgaaagcatggggagcgaacaggattagataccctggtagtccatgccgtaaacgttgggcactaggtgtgggggccattccacggtttccgcgccgcagctaacgcattaagtgccccgcctggggagtacggccgcaaggctaaaactcaaaggaattgacgggggcccgcacaagcggcggagcatgcggattaattcgatgcaacgcgaagaaccttaccaaggcttgacatgttctcgttcgccgtagagatacggtttcccctttggggcgggttcacaggtggtgcatggttgtcgtcagctcgtgtcgtgagatgttgggttaagtcccgcaacgagcgcaacccctgttctatgttgccagcacgtgatggtggggactcatgggagactgccggggtcaactcggaggaaggtggggacgacgtcaaatcatcatgccccttatgtcttgggcttcacgcatgctacaatggccggtacaatgggttgcgatactgtgaggtggagctaatcccaaaaagccggtctcagttcggattggggtctgcaactcgaccccatgaagttggagtcgctagtaatcgcagatcagcaacgctgcggtgaatacgttcccgggccttgtacacaccgcccgtcaagtcacgaaagtcggtaacacccgaagccggtggcctaacccttgtggaaggagccgtcgaaggtgggactggcgattgggact

SEQ ID NO: 230 - DNA, 1483 bp, Mitsuokella jalaludinii
gacgaacgctggcggcgtgcttaacacatgcaagtcgtacgagacgattgaaagcttgcttttgaaagtcgagtggcaaacgggtgagtaacgcgtagacaacctgccgtaaagatggggacaacagttcgaaaggactgctaataccgaatgttgtagagtttccgcatgggaatcctactaaaggtggcctctacttgtaagctatcgctttacgatgggtctgcgtctgattagctagttggtggggtaacggcctaccaaggcgacgatcagtagccggtctgagaggatgaacggccacattggaactgagacacggtccagactcctacgggaggcagcagtggggaatcttccgcaatgggcgcaagcctgacggagcaacgccgcgtgagtgaagaagggtttcgactcgtaaagctctgttgtcggggacgaatgtggagatggtgaataaccatttccaatgacggtacctgacgaggaagccacggctaactacgtgccagcagccgcggtaatacgtaggtggcgagcgttgtccggaattattgggcgtaaagggagcgcaggcgggaaggtaagtctatcttaaaagtgcggggctcaaccccgtgaggggatggaaactatctttcttgagtgcaggagaggaaagcggaattcctagtgtagcggtgaaatgcgtagatattaggaggaacaccagtggcgaaggcggctttctggactgtaactgacgctgaggctcgaaagcgtggggagcgaacaggattagataccctggtagtccacgccgtaaacgatgaatgctaggtgtaggaggtatcgacccctcctgtgccggagttaacgcaataagcattccgcctggggagtacggccgcaaggctgaaactcaaaggaattgacgggggcccgcacaagcggtggagtatgtggtttaattcgacgcaacgcgaagaaccttaccagggcttgacattgagtgaaagggctagagatagttccctctcttcggagacacgaaaacaggtggtgcatggctgtcgtcagctcgtgtcgtgagatgttgggttaagtcccgcaacgagcgcaacccctatcctttgttgccagcacgcaatggtgggaactcaaaggagactgccgcggacaacgcggaggaaggcggggatgacgtcaagtcatcatgccccttatgtcctgggctacacacgtactacaatgggatggacagagagcagcgaagccgcgaggccaagcgaaccccataaaccatctcccagttcggattgcaggctgcaacccgcctgcatgaagttggaatcgctagtaatcgcaggtcagcatactgcggtgaatacgttcccgggccttgtacacaccgcccgtcacaccacggaagtcattcacacccgaagccggcaggctaaccgcaaggaggcagccgtctaaggtgggggcgatgactggggtg

SEQ ID NO: 231 - DNA, 1456 bp, Moellerella wisconsensis
  misc_feature (228)..(228): n is a, c, g, or t
tggcggcaggcctaacacatgcaagtcgagcggtaacaggaagaagcttgcttctttgctgacgagcggcggacgggtgagtaatgtatggggatctgcctgacagagggggataactactggaaacggtagctaataccgcataatgtctaaggagcaaagcaggggaccttcgggccttgcgctgtcggatgaacccatatgggattagctagtaggtggggtaanggctcacctaggcgacgatctctagctggtctgagaggatgatcagccacactgggactgagacacggcccagactcctacgggaggcagcagtggggaatattgcacaatgggcgcaagcctgatgcagccatgccgcgtgtatgaagaaggccttagggttgtaaagtactttcagtcgggaggaaggcgttgatattaatactatcagcgattgacgttaccgacagaagaagcaccggctaactccgtgccagcagccgcggtaatacggggggtgcaagcgttaatcggaattactgggcgtaaagcgcacgcaggcggttgattaagttagatgtgaaatccccgggcttaacctgggaatggcatctaaaactggtcagctagagtcttgtagaggggggtagaattccatgtgtagcggtgaaatgcgtagagatgtggaggaataccggtggcgaaggcggccccctggacaaagactgacgctcaggtgcgaaagcgtggggagcaaacaggattagataccctggtagtccacgctgtaaacgatgtcgatttggaggttgttcccttgaggagtggcttccggagctaacgcgttaaatcgaccgcctggggagtacggccgcaaggttaaaactcaaatgaattgacgggggcccgcacaagcggtggagcatgtggtttaattcgatgcaacgcgaagaaccttacctactcttgacatccagagaatttagcagagatgctttagtgccttcgggaactctgagacaggtgctgcatggctgtcgtcagctcgtgttgtgaaatgttgggttaagtcccgcaacgagcgcaacccttatcctttgttgccagcacgtaatggtgggaactcaagggagactgccggtgataaaccggaggaaggtggggatgacgtcaagtcatcatggcccttacgagtagggctacacacgtgctacaatggcgcatacaaagagaagcgaactcgcgagagccagcggaactcataaagtgcgtcgtagtccggattggagtctgcaactcgactccatgaagtcggaatcgctagtaatcgtagatcagaatgctacggtgaatacgttcccgggccttgtacacaccgcccgtcacaccatgggagtgggttgcaaaagaagtaggtagcttaaccttcgggggggcgcttaccactttgtgattcatgactggggtg

SEQ ID NO: 232 - DNA, 1452 bp, Monoglobus pectinilyticus
gacgaacgctggcggcgtgcctaacacatgcaagtcgagcgagaaatttttaacggatcccttcggggagaagataaggatggaaagcggcggacgggtgagtaacgcgtgagtaacctgcctttaggagggggacaacattccgaaagggatgctaataccgcataaaattattgtatcgcatggtataataatcaaagatttatcgcctaaagatggactcgcgtccgattagctagttggtggggtaaaagcctaccaaggcgacgatcggtagccgaactgagaggttgatcggccacattgggactgagacacggcccagactcctacgggaggcagcagtgggggatattgcgcaatgggggaaaccctgacgcagcaacgccgcgtgaaggaagaaggccttcgggttgtaaacttctttaagtgtggaagataatgacggtacacacagaataagccacggctaactacgtgccagcagccgcggtaatacgtaggtggcaagcgttgtccggatttactgggtgtaaagggcgtgtaggcgggtagacaagtcagatgtgaaataccggggctcaactccggggctgcatttgaaactgtatatcttgagtgtcggagaggaaagcggaattcctagtgtagcggtgaaatgcgtagatattaggaggaacaccagtggcgaaggcggctttctggacgataactgacgctgaggcgcgaaagcgtggggagcaaacaggattagataccctggtagtccacgccgtaaacgatggatactaggtgtaggaggtatcgacccttctgtgccgcagttaacacaataagtatcccacctggggagtacggtcgcaagattgaaactcaaaggaattgacgggggcccgcacaagcagtggagtatgtggtttaattcgaagcagcgcgaagaaccttaccaggacttgacatcccacgcatagcctagagataggtgaagtcctacgggacgtggagacaggtggtgcatggttgtcgtcagctcgtgtcgtgagatgttgggttaagtcccgcaacgagcgcaacccttactgtcagttaccatcattaagttggggactctggcaggactgccggtgacaaatcggaggaaggtggggacgacgtcaaatcatcatgccccttatgtcctgggctacacacgtactacaatggctgttaacaaagtgaagcaaagcagtgatgtggagcaaaacacaaaaagcagtctcagttcagattgtaggctgaaactcgcctatatgaagtcggaattgctagtaatcgcagatcagcatgctgcggtgaatacgttcccgggccttgtacacaccgcccgtcacaccatgagagtcgataacacccgaagcctgtagcttaaccttagggagagcgcagtcgaaggtgggattgataattagggtg

SEQ ID NO: 233 - DNA, 1454 bp, Moraxella osloensis
attgaacgctggcggcaggcttaacacatgcaagtcgaacgatgactctctagcttgctagagatgattagtggcggacgggtgagtaacatttaggaatctacctagtagtgggggatagctcggggaaactcgaattaataccgcatacgacctacgggtgaaagggggcgcaagctcttgctattagatgagcctaaatcagattagctagttggtggggtaaaggcccaccaaggcgacgatctgtaactggtctgagaggatgatcagtcacaccggaactgagacacggtccggactcctacgggaggcagcagtggggaatattggacaatgggggcaaccctgatccagccatgccgcgtgtgtgaagaaggccttttggttgtaaagcactttaagcagggaggagaggctaatggttaatacccattagattagacgttacctgcagaataagcaccggctaactctgtgccagcagccgcggtaatacagagggtgcgagcgttaatcggaattactgggcgtaaagcgagtgtaggtggctcattaagtcacatgtgaaatccccgggcttaacctgggaactgcatgtgatactggtggtgctagaatatgtgagagggaagtagaattccaggtgtagcggtgaaatgcgtagagatctggaggaataccgatggcgaaggcagcttcctggcataatattgacactgagattcgaaagcgtgggtagcaaacaggattagataccctggtagtccacgccgtaaacgatgtctactagccgttggggtccttgagactttagtggcgcagttaacgcgataagtagaccgcctggggagtacggccgcaaggttaaaactcaaatgaattgacgggggcccgcacaagcggtggagcatgtggtttaattcgatgcaacgcgaagaaccttacctggtcttgacatagtgagaatctctcagagatgagagagtgccttcgggaactcacatacaggtgctgcatggctgtcgtcagctcgtgtcgtgagatgttgggttaagtcccgcaacgagcgcaacccttttccttatttgccagcgggttaagccgggaactttaaggatactgccagtgacaaactggaggaaggcggggacgacgtcaagtcatcatggcccttacgaccagggctacacacgtgctacaatggtaggtacagagggttgctacacagcgatgtgatgctaatctcaaaaagcctatcgtagtccggattggagtctgcaactcgactccatgaagtcggaatcgctagtaatcgcggatcagaatgccgcggtgaatacgttcccgggccttgtacacaccgcccgtcacaccatgggagtctattgcaccagaagtaggtagcctaacgaaagagggcgcttaccacggtgtggtcgatgactggggtg

SEQ ID NO: 234 - DNA, 1356 bp, Morganella morganii
  misc_feature (1057)..(1057): n is a, c, g, or t
agcttgcttctctgctgacgagcggcggacgggtgagtaatgtatggggatctgcctgatggagggggataactactggaaacggtagctaataccgcataatgtccacggaccaaagcgggggaccttcgggcctcgcaccatcagatgaacccatatgggattagcttgtaggtgaggtaacggctcacctaggcgacgatccctagctggtctgagaggatgatcagccacactgggactgagacacggcccagactcctacgggaggcagcagtggggaatattgcacaatgggcgcaagcctgatgcagccatgccgcgtgtatgaagaaggccttcgggttgtaaagtactttcagtcgggaggaaggtgttaaggttaataaccttggcaattgacgttaccgacagaagaagcaccggctaactccgtgccagcagccgcggtaatacggagggtgcaagcgttaatcggaattactgggcgtaaagcgcacgcaggcggttgattgagtcagatgtgaaatccccgggcttaacccgggaattgcatctgatactggtcagctagagtcttgtagaggggggtagaattccatgtgtagcggtgaaatgcgtagagatgtggaggaataccggtggcgaaggcggccccctggacaaagactgacgctcaggtgcgaaagcgtggggagcaaacaggattagataccctggtagtccacgctgtaaacgatgtcgacttggaggttgtgcccttgaggcgtggcttccggagctaacgcgttaagtcgaccgcctggggagtacggccgcaaggttaaaactcaaatgaattgacgggggcccgcacaagcggtggagcatgtggtttaattcgatgcaacgcgaagaaccttacctactcttgacatccagagaacttagcagagatgctttggtgccttcgggaactctgagacaggtgctgcatggctgtcgtcagctcgtgttgtgaaatgttgggttaagtcccgcaacgagcgcaacccttatcctttgttgccagcgcgtnatggcgggaactcaaaggagactgccggtgataaaccggaggaaggtggggatgacgtcaagtcatcatggcccttacgagtagggctacacacgtgctacaatggcgtatacaaagggaagcgaccctgcgaaggcaagcggaactcataaagtacgtcgtagtccggattggagtctgcaactcgactccatgaagtcggaatcgctagtaatcgtagatcagaatgctacggtgaatacgttcccgggccttgtacacaccgcccgtcacaccatgggagtgggttgcaaaagaag

SEQ ID NO: 235 - DNA, 1463 bp, Neisseria canis
attgaacgctggcggcatgctttacacatgcaagtcgaacggcagcacggaagagcttgctcttttggtggcgagtggcgaacgggtgagtaatgcatcggaacgtaccgagtagtgggggataactgtccgaaaggatggctaataccgcatacgctttgagaaggaaagcaggggatcttcggaccttgcgctattcgagcggccgatgtctgattagctggttggtggggtaaaggcctaccaaggcgacgatcagtagcgggtctgagaggatgatccgccacactgggactgagacacggcccagactcctacgggaggcagcagtggggaattttggacaatgggcgcaagcctgatccagccatgccgcgtgtctgaagaaggccttcgggttgtaaaggacttttgtcagggaagaaaagctttgggttaataccctggagtgatgacggtacctgaagaataagcaccggctaactacgtgccagcagccgcggtaatacgtagggtgcgagcgttaatcggaattactgggcgtaaagcgagcgcagacggttacttaagcaggatgtgaaatccccgggctcaacctgggaactgcgttctgaactgggtggctagagtatgtcagaggggggtagaattccacgtgtagcagtgaaatgcgtagagatgtggaggaataccgatggcgaaggcagccccctgggataatactgacgttcatgctcgaaagcgtgggtagcaaacaggattagataccctggtagtccacgccctaaacgatgtcaattagctgttggggcacttgatgccttagtagcgtagctaacgcgtgaaattgaccgcctggggagtacggtcgcaagattaaaactcaaaggaattgacggggacccgcacaagcggtggatgatgtggattaattcgatgcaacgcgaagaaccttacctggtcttgacatgtacggaatcctccagagacggaggagtgccttcgggagccgtaacacaggtgctgcatggctgtcgtcagctcgtgtcgtgagatgttgggttaagtcccgcaacgagcgcaacccttgtcattagttgccatcatttggttgggcactctaatgagactgccggtgacaaaccggaggaaggtggggatgacgtcaagtcctcatggcccttatgaccagggcttcacacgtcatacaatggtcggtacagagggtagccaagccgcgaggtggagccaatcccacaaaaccgatcgtagtccggattgcactctgcaactcgagtgcatgaagtcggaatcgctagtaatcgcaggtcagcatactgcggtgaatacgttcccgggtcttgtacacaccgcccgtcacaccatgggagtgggggataccagaagtaggtagggtaaccgcaaggagcccgcttaccacggtatgcttcatgactggggtg

SEQ ID NO: 236 - DNA, 1463 bp, Neisseria cinerea
attgaacgctggcggcatgctttacacatgcaagtcggacggcagcacagagaagcttgcttcttgggtggcgagtggcgaacgggtgagtaacatatcggaacgtaccgagtagtgggggataactgatcgaaagatcagctaataccgcatacgtcttgagagggaaagcaggggaccttcgggccttgcgctattcgagcggccgatatctgattagctagttggtggggtaaaggcctaccaaggcgacgatcagtagcgggtctgagaggatgatccgccacactgggactgagacacggcccagactcctacgggaggcagcagtggggaattttggacaatgggcgcaagcctgatccagccatgccgcgtgtctgaagaaggccttcgggttgtaaaggacttttgtcagggaagaaaaggctgttgctaatatcagcggctgatgacggtacctgaagaataagcaccggctaactacgtgccagcagccgcggtaatacgtagggtgcgagcgttaatcggaattactgggcgtaaagcgagcgcagacggttacttaagcaggatgtgaaatccccgggctcaacctgggaactgcgttctgaactgggtgactagagtgtgtcagagggaggtagaattccacgtgtagcagtgaaatgcgtagagatgtggaggaataccgatggcgaaggcagcctcctgggataacactgacgttcatgctcgaaagcgtgggtagcaaacaggattagataccctggtagtccacgccctaaacgatgtcaattagctgttgggcaacttgattgttcagtagcgtagctaacgcgtgaaattgaccgcctggggagtacggtcgcaagattaaaactcaaaggaattgacggggacccgcacaagcggtggatgatgtggattaattcgatgcaacgcgaagaaccttacctggtcttgacatgtacggaatcctccagagacggaggagtgccttcgggagccgtaacacaggtgctgcatggctgtcgtcagctcgtgtcgtgagatgttgggttaagtcccgcaacgagcgcaacccttgtcattagttgccatcattcagttgggcactctaatgagactgccggtgacaagccggaggaaggtggggatgacgtcaagtcctcatggcccttatgaccagggcttcacacgtcatacaatggtcggtacagagggtagccaagccgcgaggtggagccaatctcacaaaaccgatcgtagtccggattgcactctgcaactcgagtgcatgaagtcggaatcgctagtaatcgcaggtcagcatactgcggtgaatacgttcccgggtcttgtacacaccgcccgtcacaccatgggagtgggggataccagaagtaggtaggataaccgcaaggggtccgcttaccacggtatgcttcatgactggggtg

SEQ ID NO: 237 - DNA, 1416 bp, Neisseria elongata
cggcagcggggtagtgcttgcactactgcggccgagtggcgaacgggtgagtaatatattggaacgtaccgagtaatgggggataaccaatcgaaagattggctaataccgcatacgctctgaggaggaaagcaggggaccttcgggccttgcgttattcgagcggccaatatctgattagctagttggtggggtaaaggcctaccaaggcgacgatcagtagcgggtctgagaggatgatccgccacactgggactgagacacggcccagactcctacgggaggcagcagtggggaattttggacaatgggcgcaagcctgatccagccatgccgcgtgtctgaagaaggccttcgggttgtaaaggacttttgttagggaagaaaaaggagcggttaatacccgtttctgctgacggtacctaaagaataagcaccggctaactacgtgccagcagccgcggtaatacgtagggtgcgagcgttaatcggaattactgggcgtaaagcgagcgcagacggttacttaagcaggatgtgaaatccccgggctcaacctgggaactgcgttctgaactgggtagctagagtatgtcagaggggggtagaattccacgtgtagcagtgaaatgcgtagagatgtggaggaataccgatggcgaaggcagccccctgggataatactgacgttcatgctcgaaagcgtgggtagcaaacaggattagataccctggtagtccacgccctaaacgatgtcgattagctgttgggcagcttgactgcttagtagcgtagctaacgcgtgaaatcgaccgcctggggagtacggtcgcaagattaaaactcaaaggaattgacggggacccgcacaagcggtggatgatgtggattaattcgatgcaacgcgaagaaccttacctggtcttgacatgtacggaaccttccagagacggaagggtgccttcgggagccgtaacacaggtgctgcatggctgtcgtcagctcgtgtcgtgagatgttgggttaagtcccgcaacgagcgcaacccttgtcattagttgccatcattcagttgggcactctaatgagactgccggtgacaaaccggaggaaggtggggatgacgtcaagtcctcatggcccttatgaccagggcttcacacgtcatacaatggtcggtacaaagggtagccaagccgcgaggcggagccaatctcataaaaccgatcgtagtccggattgcactctgcaactcgagtgcatgaagtcggaatcgctagtaatcgcaggtcagcatactgcggtgaatacgttcccgggtcttgtacacaccgcccgtcacaccatgggagtgggggataccagaagtaggtagggtaaccgcaaggagcccgcttaccacggtatgcttcatga

SEQ ID NO: 238 - DNA, 1460 bp, Neisseria flavescens
  misc_feature (189)..(189): n is a, c, g, or t
  misc_feature (308)..(309): n is a, c, g, or t
  misc_feature (311)..(311): n is a, c, g, or t
  misc_feature (519)..(519): n is a, c, g, or t
  misc_feature (939)..(939): n is a, c, g, or t
  misc_feature (995)..(995): n is a, c, g, or t
  misc_feature (1073)..(1073): n is a, c, g, or t
attgaacgctggcggcatgctttacacatgcaagtcgaacggcagcacagagaagcttgcttcttgggtggcgagtggcgaacgggtgagtaatatatcggaacgtaccgagtaatgggggataactaatcgaaagattagctaataccgcatattctctgaggaggaaagcaggggaccttcgggccntgcgttattcgagcggccgatatctgattagttagttggtggggtaaaggcctaccaaggcgacgatcagtagcgggtctgagaggatgatccgccacactgggactgagacacggccnngnctcctacgggaggcagcagtggggaattttggacaatgggcgcaagcctgatccagccatgccgcgtgtctgaagaaggccttcgggttgtaaaggacttttgtcagggaagaaaaggctgttgctaatatcgacagctgatgacggtacctgaagaataagcaccggctaactacgtgccagcagccgcggtaatacgtagggtgcnagcgttaatcggaattactgggcgtaaagcgagcgcagacggttacttaagcaggatgtgaaatcccgggctcaacccgggaactgcgttctgaactgggtaactagagtgtgtcagagggaggtagaattccacgtgtagcagtgaaatgcgtagagatgtggaggaataccgatggcgaaggcagcctcctgggataacactgacgttcatgctcgaaagcgtgggtagcaaacaggattagataccctggtagtccacgccctaaacgatgtcaattagctgttgggcaacttgattgcttagtagcgtagctaacgcgtgaaattgaccgcctggggagtacggtcgcaagattaaaactcaaaggaattgacggggacccgcacaagcggtggatgatgtggattaattcgatgnaacgcgaagaaccttacctggtcttgacatgtacggaatcctccggagacggaggngtgccttcgggagccgtaacacaggtgctgcatggctgtcgtcagctcgtgtcgtgagatgttgggttaagtcccgcnacgagcgcaacccttgtcattagttgccatcatttagttgggcactctaatgagactgccggtgacaagccggaggaaggtggggatgacgtcaagtcctcatggcccttatgaccagggcttcacacgtcatacaatggtcggtacagagggtagccaagccgcgaggtggagccaatctcacaaaaccgatcgtagtccggattgcactctgcaactcgagtgcatgaagtcggaatcgctagtaatcgcaggtcagcatactgcggtgaatacgttcccgggtcttgtacacaccgcccgtcacaccatgggagtgggggataccagaagtaggtagggtaaccgcaaggagtccgcttaccacggtatgcttcatgactgggg

SEQ ID NO: 239 - DNA, 1463 bp, Neisseria gonorrhoeae
attgaacgctggcggcatgctttacacatgcaagtcggacggcagcacagggaagcttgcttctcgggtggcgagtggcgaacgggtgagtaacatatcggaacgtaccgggtagcgggggataactgatcgaaagatcagctaataccgcatacgtcttgagagggaaagcaggggaccttcgggccttgcgctatccgagcggccgatatctgattagctggttggcggggtaaaggcccaccaaggcgacgatcagtagcgggtctgagaggatgatccgccacactgggactgagacacggcccagactcctacgggaggcagcagtggggaattttggacaatgggcgcaagcctgatccagccatgccgcgtgtctgaagaaggccttcgggttgtaaaggacttttgtcagggaagaaaaggctgttgccaatatcggcggccgatgacggtacctgaagaataagcaccggctaactacgtgccagcagccgcggtaatacgtagggtgcgagcgttaatcggaattactgggcgtaaagcgggcgcagacggttacttaagcaggatgtgaaatccccgggctcaacccgggaactgcgttctgaactgggtgactcgagtgtgtcagagggaggtggaattccacgtgtagcagtgaaatgcgtagagatgtggaggaataccgatggcgaaggcagcctcctgggataacactgacgttcatgtccgaaagcgtgggtagcaaacaggattagataccctggtagtccacgccctaaacgatgtcaattagctgttgggcaacttgattgcttggtagcgtagctaacgcgtgaaattgaccgcctggggagtacggtcgcaagattaaaactcaaaggaattgacggggacccgcacaagcggtggatgatgtggattaattcgatgcaacgcgaagaaccttacctggttttgacatgtgcggaatcctccggagacggaggagtgccttcgggagccgtaacacaggtgctgcatggctgtcgtcagctcgtgtcgtgagatgttgggttaagtcccgcaacgagcgcaacccttgtcattagttgccatcattcggttgggcactctaatgagactgccggtgacaagccggaggaaggtggggatgacgtcaagtcctcatggcccttatgaccagggcttcacacgtcatacaatggtcggtacagagggtagccaagccgcgaggcggagccaatctcacaaaaccgatcgtagtccggattgcactctgcaactcgagtgcatgaagtcggaatcgctagtaatcgcaggtcagcatactgcggtgaatacgttcccgggtcttgtacacaccgcccgtcacaccatgggagtgggggataccagaagtaggtagggtaaccgcaaggagtccgcttaccacggtatgcttcatgactggggtg

SEQ ID NO: 240 - DNA, 1463 bp, Neisseria macacae
attgaacgctggcggcatgctttacacatgcaagtcggacggcagcacagagaagcttgcttcttgggtggcgagtggcgaacgggtgagtaacatatcggaacgtaccgagcagtgggggataactaatcgaaagattagctaataccgcatatattctgaggaagaaagcaggggaccatttggccttgcgctgtttgagcggccgatatctgattagctagttggtggggtaaaggcctaccaaggcgacgatcagtagcgggtctgagaggatgatccgccacactgggactgagacacggcccagactcctacgggaggcagcagtggggaattttggacaatgggcgcaagcctgatccagccatgccgcgtgtctgaagaaggccttcgggttgtaaaggacttttgtcagggaagaaaagggcggggttaatacccctgtctgatgacggtacctgaagaataagcaccggctaactacgtgccagcagccgcggtaatacgtagggtgcgagcgttaatcggaattactgggcgtaaagcgggcgcagacggttacttaagcaggatgtgaaatccccgggctcaacctgggaactgcgttctgaactgggtgactagagtgtgtcagagggaggtagaattccacgtgtagcagtgaaatgcgtagagatgtggaggaataccgatggcgaaggcagcctcctgggataacactgacgttcatgcccgaaagcgtgggtagcaaacaggattagataccctggtagtccacgccctaaacgatgtcgattagctgttgggcagcatgactgcttagtagcgaagctaacgcgtgaaatcgaccgcctggggagtacggtcgcaagattaaaactcaaaggaattgacggggacccgcacaagcggtggatgatgtggattaattcgatgcaacgcgaagaaccttacctggtcttgacatgtacggaaccctccagagacggaggggtgccttcgggagccgtaacacaggtgctgcatggctgtcgtcagctcgtgtcgtgagatgttgggttaagtcccgcaacgagcgcaacccttgtcattagttgccatcattaagttgggcactctaatgagactgccggtgacaagccggaggaaggtggggatgacgtcaagtcctcatggcccttatgaccagggcttcacacgtcatacaatggtcggtacagagggtagccaagccgcgaggtggagccaatctcacaaaaccgatcgtagtccggattgcactctgcaactcgagtgcatgaagtcggaatcgctagtaatcgcaggtcagcatactgcggtgaatacgttcccgggtcttgtacacaccgcccgtcacaccatgggagtgggggataccagaagtaggtagggtaaccgcaaggagcccgcttaccacggtatgcttcatgactggggtg

SEQ ID NO: 241 - DNA, 1463 bp, Neisseria meningitidis
attgaacgctggcggcatgctttacacatgcaagtcggacggcagcacagagaagcttgcttctcgggtggcgagtggcgaacgggtgagtaacatatcggaacgtaccgagtagtgggggataactgatcgaaagatcagctaataccgcatacgtcttgagagagaaagcaggggaccttcgggccttgcgctattcgagcggccgatatctgattagctagttggtggggtaaaggcctaccaaggcgacgatcagtagcgggtctgagaggatgatccgccacactgggactgagacacggcccagactcctacgggaggcagcagtggggaattttggacaatgggcgcaagcctgatccagccatgccgcgtgtctgaagaaggccttcgggttgtaaaggacttttgtcagggaagaaaaggctgttgctaatatcagcggctgatgacggtacctgaagaataagcaccggctaactacgtgccagcagccgcggtaatacgtagggtgcgagcgttaatcggaattactgggcgtaaagcgggcgcagacggttacttaagcaggatgtgaaatccccgggctcaacccgggaactgcgttctgaactgggtgactcgagtgtgtcagagggaggtagaattccacgtgtagcagtgaaatgcgtagagatgtggaggaataccgatggcgaaggcagcctcctgggacaacactgacgttcatgcccgaaagcgtgggtagcaaacaggattagataccctggtagtccacgccctaaacgatgtcaattagctgttgggcaacctgattgcttggtagcgtagctaacgcgtgaaattgaccgcctggggagtacggtcgcaagattaaaactcaaaggaattgacggggacccgcacaagcggtggatgatgtggattaattcgatgcaacgcgaagaaccttacctggtcttgacatgtacggaatcctccggagacggaggagtgccttcgggagccgtaacacaggtgctgcatggctgtcgtcagctcgtgtcgtgagatgttgggttaagtcccgcaacgagcgcaacccttgtcattagttgccatcattcagttgggcactctaatgagactgccggtgacaagccggaggaaggtggggatgacgtcaagtcctcatggcccttatgaccagggcttcacacgtcatacaatggtcggtacagagggtagccaagccgcgaggcggagccaatctcacaaaaccgatcgtagtccggattgcactctgcaactcgagtgcatgaagtcggaatcgctagtaatcgcaggtcagcatactgcggtgaatacgttcccgggtcttgtacacaccgcccgtcacaccatgggagtgggggataccagaagtaggtaggataaccacaaggagtccgcttaccacggtatgcttcatgactggggtg

SEQ ID NO: 242 - DNA, 1463 bp, Neisseria mucosa
attgaacgctggcggcatgctttacacatgcaagtcggacggcagcacagagaagcttgcttcttgggtggcgagtggcgaacgggtgagtaacatatcggaacgtaccgagcagtgggggataactaatcgaaagattagctaataccgcatatattctgaggaagaaagcaggggaccatttggccttgcgctgtttgagcggccgatatctgattagctagttggtggggtaaaggcctaccaaggcgacgatcagtagcgggtctgagaggatgatccgccacactgggactgagacacggcccagactcctacgggaggcagcagtggggaattttggacaatgggcgcaagcctgatccagccatgccgcgtgtctgaagaaggccttcgggttgtaaaggacttttgtcagggaagaaaagggcggggttaatacccctgtctgatgacggtacctgaagaataagcaccggctaactacgtgccagcagccgcggtaatacgtagggtgcgagcgttaatcggaattactgggcgtaaagcgggcgcagacggttacttaagcaggatgtgaaatccccgggctcaacctgggaactgcgttctgaactgggtgactagagtgtgtcagagggaggtagaattccacgtgtagcagtgaaatgcgtagagatgtggaggaataccgatggcgaaggcagcctcctgggataacactgacgttcatgcccgaaagcgtgggtagcaaacaggattagataccctggtagtccacgccctaaacgatgtcgattagctgttgggcagcatgactgcttagtagcgaagctaacgcgtgaaatcgaccgcctggggagtacggtcgcaagattaaaactcaaaggaattgacggggacccgcacaagcggtggatgatgtggattaattcgatgcaacgcgaagaaccttacctggtcttgacatgtacggaatcctccagagacggaggagtgccttcgggagccgtaacacaggtgctgcatggctgtcgtcagctcgtgtcgtgagatgttgggttaagtcccgcaacgagcgcaacccttgtcattagttgccatcattaagttgggcactctaatgagactgccggtgacaagccggaggaaggtggggatgacgtcaagtcctcatggcccttatgaccagggcttcacacgtcatacaatggtcggtacagagggtagccaagccgcgaggtggagccaatctcacaaaaccgatcgtagtccggattgcactctgcaactcgagtgcatgaagtcggaatcgctagtaatcgcaggtcagcatactgcggtgaatacgttcccgggtcttgtacacaccgcccgtcacaccatgggagtgggggataccagaagtaggtagggtaaccgcaaggagcccgcttaccacggtatgcttcatgactggggtg

SEQ ID NO: 243 - DNA, 1355 bp, Neisseria perflava
cagcacagagaagcttgcttcttgggtggcgagtggcgaacgggtgagtaatatatcggaacgtaccgagtaatgggggataactaatcgaaagattagctaataccgcatattctctgaggaggaaagcaggggaccttcgggccttgcgttattcgagcggccgatatctgattagctagttggtggggtaaaggcctaccaaggcgacgatcagtagcgggtctgagaggatgatccgccacactgggactgagacacggcccagactcctacgggaggcagcagtggggaattttggacaatgggcgcaagcctgatccagccatgccgcgtgtctgaagaaggccttcgggttgtaaaggacttttgtcagggaagaaaaggctgttgctaataccgacagctgatgacggtacctgaagaataagcaccggctaactacgtgccagcagccgcggtaatacgtagggtgcgagcgttaatcggaattactgggcgtaaagcgagcgcagacggttacttaagcaggatgtgaaatccccgggctcaacctgggaactgcgttctgaactgggtgactagagtgtgtcagagggaggtagaattccacgtgtagcagtgaaatgcgtagagatgtggaggaataccgatggcgaaggcagcctcctgggataacactgacgttcatgctcgaaagcgtgggtagcaaacaggattagataccctggtagtccacgccctaaacgatgtcaattagctgttgggcaacttgattgcttagtagcgtagctaacgcgtgaaattgaccgcctggggagtacggtcgcaagattaaaactcaaaggaattgacggggacccgcacaagcggtggatgatgtggattaattcgatgcaacgcgaagaaccttacctggtcttgacatgtacggaatcctccagagacggaggagtgccttcgggaaccgtaacacaggtgctgcatggctgtcgtcagctcgtgtcgtgagatgttgggttaagtcccgcaacgagcgcaacccttgtcattagttgccatcatttagttgggcactctaatgagactgccggtgacaagccggaggaaggtggggatgacgtcaagtcctcatggcccttatgaccagggcttcacacgtcatacaatggtcggtacagagggtagccaagccgcgaggtggagccaatctcacaaaaccgatcgtagtccggattgcactctgcaactcgagtgcatgaagtcggaatcgctagtaatcgcaggtcagcatactgcggtgaatacgttcccgggtcttgtacacaccgcccgtcacaccatgggagtggggg

SEQ ID NO: 244 - DNA, 1355 bp, Neisseria subflava
cagcacagagaagcttgcttcttgggtggcgagtggcgaacgggtgagtaatatatcggaacgtaccgagtaatgggggataactaatcgaaagattagctaataccgcatattctctgaggaggaaagcaggggaccttcgggccttgcgttattcgagcggccgatatctgattagctagttggtggggtaaaggcctaccaaggcgacgatcagtagcgggtctgagaggatgatccgccacactgggactgagacacggcccagactcctacgggaggcagcagtggggaattttggacaatgggcgcaagcctgatccagccatgccgcgtgtctgaagaaggccttcgggttgtaaaggacttttgtcagggaagaaaaggatagggttaatacccctgtctgatgacggtacctgaagaataagcaccggctaactacgtgccagcagccgcggtaatacgtagggtgcgagcgttaatcggaattactgggcgtaaagcgagcgcagacggttacttaagcaggatgtgaaatccccgggctcaacctgggaactgcgttctgaactgggtgactagagtgtgtcagagggaggtagaattccacgtgtagcagtgaaatgcgtagagatgtggaggaataccgatggcgaaggcagcctcctgggataacactgacgttcatgctcgaaagcgtgggtagcaaacaggattagataccctggtagtccacgccctaaacgatgtcaattagctgttgggcaacttgattgcttagtagcgtagctaacgcgtgaaattgaccgcctggggagtacggtcgcaagattaaaactcaaaggaattgacggggacccgcacaagcggtggatgatgtggattaattcgatgcaacgcgaagaaccttacctggtcttgacatgtacggaatcctccagagacggaggagtgccttcgggagccgtaacacaggtgctgcatggctgtcgtcagctcgtgtcgtgagatgttgggttaagtcccgcaacgagcgcaacccttgtcattagttgccatcatttagttgggcactctaatgagactgccggtgacaagccggaggaaggtggggatgacgtcaagtcctcatggcccttatgaccagggcttcacacgtcatacaatggtcggtacagagggtagccaagccgcgaggtggagccaatctcacaaaaccgatcgtagtccggattgcactctgcaactcgagtgcatgaagtcggaatcgctagtaatcgcaggtcagcatactgcggtgaatacgttcccgggtcttgtacacaccgcccgtcacaccatgggagtggggg

SEQ ID NO: 245 - DNA, 1480 bp, Nosocomiicoccus massiliensis
gatgaacgctggcggcgtgcctaatacatgcaagtcgagcgcgactgattacaccgttcttatgaacatcgtaatcatcgagcggcggacgggtgagtaacacgtgggcaacctgcccttaagactgggataactacgggaaaccgtagctaataccggataccacttttaaacataagtttaagagttaaaaggtggatttatctatcacttaaggatgggcctgcggcgcattagctagttggtgaggtaatggcttaccaaggcgacgatgcgtagccgacctgagagggtgatcggccacactggaactgagacacggtccagactcctacgggaggcagcagtagggaatcttccgcaatgggcgaaagcctgacggagcaacgccgcgtgtgcgaagaaggtcttcggatcgtaaagcactgttgttaaggaagaacgacagtaagagtactgcttactgtgtgacggtacttaaccagaaagccacggctaactacgtgccagcagccgcggtaatacgtaggtggcaagcgttatccggaattattgggcgtaaagcgcgcgtaggcggcgaaataagtctgatgtgaaagcccccggctcaaccggggaaggtcattggaaactgtatcgcttgagtgcagaagaggagagtggaattccatgtgtagcggtgaaatgcgcagagatatggaggaacaccagtggcgaaggcggctctctggtctgtaactgacgctgatgtgcgaaagcgtggggatcaaacaggattagataccctggtagtccacgccgtaaacgatgagtgctaagtgttagggggtttccgccccttagtgctgcagcaaacgcattaagcactccgcctggggagtacggccgcaaggctgaaactcaaaggaattgacggggacccgcacaagcggtggagcatgtggtttaattcgaagcaacgcgaagaaccttaccaaatcttgacatcctctgaccgtcatggagacatgattttccctttgggacagagagacaggtggtgcatggttgtcgtcagctcgtgtcgtgagatgttgggttaagtcccgcaacgagcgcaacccttaactttagttgccatcattgagttgggcactttagagtgactgccggtgacaaaccggaggaaggtggggatgacgtcaaatcatcatgccccttatgatttgggctacacacgtgctacaatgggcaggaacaaagggcagcgaaaccgtgaggtcaagcgaatcccataaaactgttctcagttcggattggagtctgcaactcgactccatgaagctggaatcgctagtaatcgtggatcagaatgccacggtgaatacgttcccgggtcttgtacacaccgcccgtcacaccacgaaagttggtaacacctgaagccggtggcctaaccattcggagggagccgtcgaaggtgggactgatgattggggtg

SEQ ID NO: 246 - DNA, 1458 bp, Noviherbaspirillum denitrificans
attgaacgctggcggcatgccttacacatgcaagtcgaacggcagcgcgggcttcggcctggcggcgagtggcgaacgggtgagtaacatatcggaacgtgccttagagtgggggataaccagtcgaaagactggctaataccgcatacgatctacggatgaaagtgggggatcgcaagacctcatgctcttagagcggccgatatctgattagctagttggtggggtaaaggcctaccaaggcgacgatcagtagctggtctgagaggacgaccagccacactgggactgagacacggcccagactcctacgggaggcagcagtggggaattttggacaatgggggcaaccctgatccagcaatgccgcgtgtgtgaagaaggccttcgggttgtaaagcacttttgttcggaaagaaatcgtcctggttaatacctgggatggatgacggtaccggaagaataagcaccggctaactacgtgccagcagccgcggtaatacgtagggtgcaagcgttaatcggaattactgggcgtaaagcgtgcgcaggcggttgtgcaagacagatgtgaaatccccgggcttaacctgggaactgcatttgtgactgcacggctagagtgtgtcagaggggggtagaattccacgtgtagcagtgaaatgcgtagatatgtggaggaataccgatggcgaaggcagccccctgggataacactgacgctcatgcacgaaagcgtggggagcaaacaggattagataccctggtagtccacgccctaaacgatgtcaactagttgtcggggattaatttccttggtaacgcagctaacgcgtgaagttgaccgcctggggagtacggtcgcaagattaaaactcaaaggaattgacggggacccgcacaagcggtggatgatgtggattaattcgatgcaacgcgaaaaaccttacctacccttgacatggtcggaatcctggagagatctgggagtgctcgaaagagaaccggcgcacaggtgctgcatggctgtcgtcagctcgtgtcgtgagatgttgggttaagtcccgcaacgagcgcaacccttgtcattagttgctacgaaagggcactctaatgagactgccggtgacaaaccggaggaaggtggggatgacgtcaagtcctcatggcccttatgggtagggcttcacacgtcatacaatggtacatacagagggctgccaacccgcgagggggagctaatcccagaaagtgtatcgtagtccggattgtagtctgcaactcgactgcatgaagttggaatcgctagtaatcgcggatcagcatgccgcggtgaatacgttcccgggtcttgtacacaccgcccgtcacaccatgggagcgggttttaccagaagtaggtagcctaaccgcaaggagggcgcttaccacggtaggattcgtgactggggtgaagtc

SEQ ID NO: 247 - DNA, 1486 bp, Oceanobacillus iheyensis
gacgaacgctggcggcgtgcctaatacatgcaagtcgagcgcatgaaattatttgattctcttcggagttgacgataatggaatgagcggcggacgggtgagtaacacgtaggcaacctgcctgtaagactgggataactcgtggaaacgcgagctaataccggataacacttttcatctcctgatgagaagttgaaaggcggcttttgctgtcacttacagatgggcctgcggcgcattagctagttggtaaggtaacggcttaccaaggcgacgatgcgtagccgacctgagagggtgatcggccacactgggactgagacacggcccagactcctacgggaggcagcagtagggaatcttccgcaatggacgaaagtctgacggagcaacgccgcgtgagtgatgaaggttttcggatcgtaaaactctgttgttagggaagaacaagtactatagtaactgatagtaccttgacggtacctaaccagaaagccacggctaactacgtgccagcagccgcggtaatacgtaggtggcaagcgttgtccggaattattgggcgtaaagcgctcgcaggcggttctttaagtctgatgtgaaatcttacggctcaaccgtaaacgtgcattggaaactggggaacttgagtgcagaagaggagagtggaattccacgtgtagcggtgaaatgcgtagagatgtggaggaacaccagtggcgaaggcgactctctggtctgtaactgacgctgaggagcgaaagcgtggggagcgaacaggattagataccctggtagtccacgccgtaaacgatgagtgctaggtgttagggggtttccgccccttagtgctgaagttaacgcattaagcactccgcctggggagtacggccgcaaggctgaaactcaaaagaattgacgggggcccgcacaagcggtggagcatgtggtttaattcgaagcaacgcgaagaaccttaccaggtcttgacatcctctgaacactctagagatagagttttcccttcggggacagagtgacaggtggtgcatggttgtcgtcagctcgtgtcgtgagatgttgggttaagtcccgcaacgagcgcaacccttgatcttagttgccagcattaagttgggcactctaaggtgactgccggtgacaaaccggaggaaggtggggatgacgtcaaatcatcatgccccttatgacctgggctacacacgtgctacaatggatggaacaaagggaagcgaacccgcgaggtcaagcaaatcccacaaaaccattctcagttcggattgtaggctgcaactcgcctacatgaagccggaatcgctagtaatcgcggatcagcatgccgcggtgaatacgttcccgggccttgtacacaccgcccgtcacaccacgagagttggtaacacccgaagtcggtgaggtaaccgtaaggagccagccgccgaaggtgggactaatgattggggtg

SEQ ID NO: 248 - DNA, 1484 bp, Oceanobacillus oncorhynchi
gacgaacgctggcggcgtgcctaatacatgcaagtcgagcgcgggaagcgaacggaactcttcggagggaagttcgtggaacgagcggcggacgggtgagtaacacgtaggcaacctgcctgtaagactgggataactcgcggaaacgcgagctaataccggataacactttctatcacctgatggaaagttgaaaggcggcttttgctgtcacttacagatgggcctgcggcgcattagctagttggtgaggtaacggctcaccaaggcgacgatgcgtagccgacctgagagggtgatcggccacactgggactgagacacggcccagactcctacgggaggcagcagtagggaatcttccgcaatggacgaaagtctgacggagcaacgccgcgtgagtgatgaaggttttcggatcgtaaaactctgttgtcagggaagaacaagtacgatagtaactgatcgtaccttgacggtacctgaccagaaagccacggctaactacgtgccagcagccgcggtaatacgtaggtggcaagcgttgtccggaattattgggcgtaaagcgctcgcaggcggttctttaagtctgatgtgaaatcttgcggctcaaccgcaaacgtgcattggaaactggaggacttgagtgcagaagaggagagtggaattccacgtgtagcggtgaaatgcgtagagatgtggaggaacaccagtggcgaaggcgactctctggtctgtaactgacgctgaggagcgaaagcgtggggagcgaacaggattagataccctggtagtccacgccgtaaacgatgagtgctaggtgttagggggtttccgccccttagtgctgaagttaacgcattaagcactccgcctggggagtacggccgcaaggctgaaactcaaaagaattgacggggacccgcacaagcggtggagcatgtggtttaattcgaagcaacgcgaagaaccttaccaggtcttgacatcctttgaccgctctagagatagagttttcccttcggggacaaagtgacaggtggtgcatggttgtcgtcagctcgtgtcgtgagatgttgggttaagtcccgcaacgagcgcaacccttaatcttagttgccagcatttagttgggcactctaaggtgactgccggtgacaaaccggaggaaggtggggatgacgtcaaatcatcatgccccttatgacctgggctacacacgtgctacaatggacggaacaaagggaagcgaacccgcgaggtccagcaaatcccataaaaccgttctcagttcggattgcaggctgcaactcgcctgcatgaagccggaatcgctagtaatcgcggatcagcatgccgcggtgaatacgttcccgggtcttgtacacaccgcccgtcacaccacgagagttcgtaacacccgaagtcggtgaggtaaccttttggagccagccgccgaaggtgggacgaatgattggggtg

SEQ ID NO: 249 - DNA, 1485 bp, Oceanobacillus sojae
gacgaacgctggcggcgtgcctaatacatgcaagtcgagcgcgggaagcggacagaactcttcggagggacgttcgtggaacgagcggcggacgggtgagtaacacgtaggcaacctgcctgtaagactgggataactcgcggaaacgcgagctaataccggataatacttatcatctcctgatggtaagttgaaaggcggcttttgctgtcacttacagatgggcctgcggcgcattagctagttggtggggtaacggctcaccaaggcgacgatgcgtagccgacctgagagggtgatcggccacactgggactgagacacggcccagactcctacgggaggcagcagtagggaatcttccgcaatggacgaaagtctgacggagcaacgccgcgtgagtgatgaaggttttcggatcgtaaaactctgttgtcggggaagaacaagtatgatagtaactgatcgtaccttgacggtacccgaccagaaagccacggctaactacgtgccagcagccgcggtaatacgtaggtggcaagcgttgtccggaattattgggcgtaaagcgctcgcaggcggttctttaagtctgatgtgaaatcttgcggctcaaccgtaaacgtgcattggaaactggaggacttgagtgcagaagaggagagtggaattccacgtgtagcggtgaaatgcgtagagatgtggaggaacaccagtggcgaaggcgactctctggtctgtaactgacgctgaggagcgaaagcgtggggagcgaacaggattagataccctggtagtccacgccgtaaacgatgagtgctaggtgttagggggtttccgccccttagtgctgaagttaacgcattaagcactccgcctggggagtacggccgcaaggctgaaactcaaaagaattgacggggacccgcacaagcggtggagcatgtggtttaattcgaagcaacgcgaagaaccttaccaggtcttgacatcctttgaccgctctggagacagagttttcccttcggggacaaagtgacaggtggtgcatggttgtcgtcagctcgtgtcgtgagatgttgggttaagtcccgcaacgagcgcaacccttgatcttagttgccagcatttagttgggcactctaaggtgactgccggtgacaaaccggaggaaggtggggatgacgtcaaatcatcatgccccttatgacctgggctacacacgtgctacaatggacggaacaaagggaagcaagcccgcgaggtcaagcaaatcccataaaaccgttctcagttcggattgtaggctgcaactcgcctacatgaagccggaatcgctagtaatcgcggatcagcatgccgcggtgaatacgttcccgggtcttgtacacaccgcccgtcacaccacgagagttcgtaacacccgaagtcggtgaggtaacctttttggagccagccgccgaaggtgggacgaatgattggggtg

SEQ ID NO: 250 - DNA, 1405 bp, Ochrobactrum anthropi
aacgaacgctggcggcaggcttaacacatgcaagtcgagcgccccgcaaggggagcggcagacgggtgagtaacgcgtgggaacgtaccttttgctacggaataactcagggaaacttgtgctaataccgtatgtgcccttcgggggaaagatttatcggcaaaggatcggcccgcgttggattagctagttggtgaggtaaaggctcaccaaggcgacgatccatagctggtctgagaggatgatcagccacactgggactgagacacggcccagactcctacgggaggcagcagtggggaatattggacaatgggcgcaagcctgatccagccatgccgcgtgagtgatgaaggccctagggttgtaaagctctttcaccggtgaagataatgacggtaaccggagaagaagccccggctaacttcgtgccagcagccgcggtaatacgaagggggctagcgttgttcggatttactgggcgtaaagcgcacgtaggcggacttttaagtcaggggtgaaatcccggggctcaaccccggaactgcctttgatactggaagtcttgagtatggtagaggtgagtggaattccgagtgtagaggtgaaattcgtagatattcggaggaacaccagtggcgaaggcggctcactggaccattactgacgctgaggtgcgaaagcgtggggagcaaacaggattagataccctggtagtccacgccgtaaacgatgaatgttagccgttggggagtttactcttcggtggcgcagctaacgcattaaacattccgcctggggagtacggtcgcaagattaaaactcaaaggaattgacgggggcccgcacaagcggtggagcatgtggtttaattcgaagcaacgcgcagaaccttaccagcccttgacataccggtcgcggacacagagatgtgtctttcagttcggctggaccggatacaggtgctgcatggctgtcgtcagctcgtgtcgtgagatgttgggttaagtcccgcaacgagcgcaaccctcgcccttagttgccagcatttagttgggcactctaaggggactgccggtgataagccgagaggaaggtggggatgacgtcaagtcctcatggcccttacgggctgggctacacacgtgctacaatggtggtgacagtgggcagcgagcacgcgagtgtgagctaatctccaaaagccatctcagttcggattgcactctgcaactcgagtgcatgaagttggaatcgctagtaatcgcggatcagcatgccgcggtgaatacgttcccgggccttgtacacaccgcccgtcacaccatgggagttggttttacccgaaggcgctgtgctaaccgcaaggaggcaggcgaccacggtagggtcagcgactggggtg

SEQ ID NO: 251 - DNA, 1473 bp, Paenibacillus alvei
gacgaacgctggcggcgtgcctaatacatgcaagtcgagcggacttgatggagtgcttgcactcctgacggttagcggcggacgggtgagtaacacgtaggtaacctgcccataagactgggataacccacggaaacgtgagctaataccagataggcgttttcctcgcatgaggggaatgagaaaggcggagcaatctgtcacttatggatggacctgcggcgcattagctagttggtgaggtaacggctcaccaaggcgacgatgcgtagccgacctgagagggtgatcggccacactgggactgagacacggcccagactcctacgggaggcagcagtagggaatcttccgcaatggacgaaagtctgacggagcaacgccgcgtgagtgatgaaggttttcggatcgtaaagctctgttgccagggaagaacgcctaggagagtaactgctcctagggtgacggtacctgagaagaaagccccggctaactacgtgccagcagccgcggtaatacgtagggggcgagcgttgtccggaattattgggcgtaaagcgcgcgcaggcggcaatgtaagttgggtgtttaaacctagggctcaaccttgggtcgcatccaaaactgcatagcttgagtacagaagaggaaagtggaattccacgtgtagcggtgaaatgcgtagagatgtggaggaacaccagtggcgaaggcgactttctgggctgtaactgacgctgaggcgcgaaagcgtggggagcaaacaggattagataccctggtagtccacgccgtaaacgatgaatgctaggtgttaggggtttcgatacccttggtgccgaagttaacacattaagcattccgcctggggagtacggtcgcaagactgaaactcaaaggaattgacggggacccgcacaagcagtggagtatgtggtttaattcgaagcaacgcgaagaaccttaccaggtcttgacatctgaatgaccgtcctagagatagggctttccttcgggacattcaagacaggtggtgcatggttgtcgtcagctcgtgtcgtgagatgttgggttaagtcccgcaacgagcgcaacccttaactttagttgccagcatttagttgggcactctagagtgactgccggtgacaaaccggaggaaggtggggatgacgtcaaatcatcatgccccttatgacctgggctacacacgtactacaatggctggtacaacgggaagcgaagccgcgaggtggagccaatcctaaaaagccagtctcagttcggattgcaggctgcaactcgcctgcatgaagtcggaattgctagtaatcgcggatcagcatgccgcggtgaatacgttcccgggtcttgtacacaccgcccgtcacaccacgagagtttacaacacccgaagtcggtgaggtaaccgcaaggagccagccgccgaaggtggggtagatgattggggtg

SEQ ID NO: 252 - DNA, 1475 bp, Paenibacillus amylolyticus
  misc_feature (176)..(177): n is a, c, g, or t
  misc_feature (646)..(646): n is a, c, g, or t
  misc_feature (685)..(685): n is a, c, g, or t
gacgaacgctggcggcatgcctaatacatgcaagtcgagcggacttgaagagaagcttgcttctctgatggttagcggcggacgggtgagtaacacgtaggcaacctgccctcaagtttgggacaactaccggaaacggtagctaataccgaataattgttttcttcgcctgaagnnaactggaaagacggagcaatctgtcacttggggatgggcctgcggcgcattagctagttggtgaggtaacggctcaccaaggcgacgatgcgtagccgacctgagagggtgatcggccacactgggactgagacacggcccagactcctacgggaggcagcagtagggaatcttccgcaatgggcgaaagcctgacggagcaatgccgcgtgagtgatgaaggttttcggatcgtaaagctctgttgccagggaagaacgcttgggagagtaactgctctcaaggtgacggtacctgagaagaaagccccggctaactacgtgccagcagccgcggtaatacgtagggggcaagcgttgtccggaattattgggcgtaaagcgcgcgcaggcggtcatttaagtctggtgtttaatcccggggctcaaccccggatcgcactggaaactgggtgacttgagtgcagaanaggagagtggaattccacgtgtagcggtgaaatgcgtanatatgtggaggaacaccagtggcgaaggcgactctctgggctgtaactgacgctgaggcgcgaaagcgtggggagcaaacaggattagataccctggtagtccacgccgtaaacgatgagtgctaggtgttaggggtttcgatacccttggtgccgaagttaacacattaagcactccgcctggggagtacggtcgcaagactgaaactcaaaggaattgacggggacccgcacaagcagtggagtatgtggtttaattcgaagcaacgcgaagaaccttaccaggtcttgacatccctctgatcgatgcagagatgtatctttccttcgggacatacgagacaggtggtgcatggttgtcgtcagctcgtgtcgtgagatgttgggttaagtcccgcaacgagcgcaacccttatatttagttgccagcacttcgggtgggcactctagatagactgccggtgacaaaccggaggaaggtggggatgacgtcaaatcatcatgccccttatgacctgggctacacacgtactacaatggccggtacaacgggctgcgaaatcgcgagatggagccaatcccaacaaagccggtctcagttcggattgcaggctgcaactcgcctgcatgaagtcggaattgctagtaatcgcggatcagcatgccgcggtgaatacgttcccgggtcttgtacacaccgcccgtcacaccacgagagtttataacacccgaagtcggtggggtaaccgcaaggagccagccgccgaaggtgggatagatgattggggtg

SEQ ID NO: 253 - DNA, 1473 bp, Paenibacillus barcinonensis
aacgctggcggcatgcctaatacatgcaagtcgagcggacttgaagagaagcttgcttctctgatggttagcggcggacgggtgagtaacacgtaggcaacctgccctcaagcttgggacaactaccggaaacggtagctaataccgaatacttgttttcttcgcctgaagagaactggaaagacggagcaatctgtcacttgaggatgggcctgcggcgcattagctagttggtgaggtaacggctcaccaaggcgacgatgcgtagccgacctgagagggtgatcggccacactgggactgagacacggcccagactcctacgggaggcagcagtagggaatcttccgcaatgggcgaaagcctgacggagcaatgccgcgtgagtgatgaaggttttcggatcgtaaagctctgttgccagggaagaacgcttgggagagtaactgctcccaaggtgacggtacctgagaagaaagccccggctaactacgtgccagcagccgcggtaatacgtagggggcaagcgttgtccggaattattgggcgtaaagcgcgcgcaggcggtcatgtaagtctggtgtttaatcccggggctcaaccccggatcgcactggaaactgggtgacttgagtgcagaagaggagagtggaattccacgtgtagcggtgaaatgcgtagagatgtggaggaacaccagtggcgaaggcgactctctgggctgtaactgacgctgaggcgcgaaagcgtggggagcaaacaggattagataccctggtagtccacgccgtaaacgatgaatgctaggtgttaggggtttcgatacccttggtgccgaagttaacacattaagcattccgcctggggagtacggtcgcaagactgaaactcaaaggaattgacggggacccgcacaagcagtggagtatgtggtttaattcgaagcaacgcgaagaaccttaccaggtcttgacatccaactaacgaggtagagatacgttaggtgcccttcggggaaagttgagacaggtggtgcatggttgtcgtcagctcgtgtcgtgagatgttgggttaagtcccgcaacgagcgcaacccttgatcttagttgccagcatttcggatgggcactctaaggtgactgccggtgacaaaccggaggaaggtggggatgacgtcaaatcatcatgccccttatgacctgggctacacacgtactacaatggccggtacaacgggcagtgaaaccgcgaggtggaacgaatcctaaaaagccggtctcagttcggattgcaggctgcaactcgcctgcatgaagtcggaattgctagtaatcgcggatcagcatgccgcggtgaatacgttcccgggtcttgtacacaccgcccgtcacaccacgagagtttataacacccgaagtcggtggggtaaccgcaaggagccagccgccgaaggtgggatagatgattggggtg

SEQ ID NO: 254 - DNA, 1475 bp, Paenibacillus barengoltzii
gacgaacgctggcggcgtgcctaatacatgcaagtcgagcggagtttatcgggagcttgctcctgataaacttagcggcggacgggtgagtaacacgtaggcaacctgcccgtaagactgggataactaccggaaacggtagctaataccggatacgcaagtctctcgcatgaggggcttgggaaaggcggagcaatctgtcacttacggatgggcctgcggcgcattagctagttggtggggtaacggctcaccaaggcgacgatgcgtagccgacctgagagggtgaacggccacactgggactgagacacggcccagactcctacgggaggcagcagtagggaatcttccgcaatggacgaaagtctgacggagcaacgccgcgtgagtgatgaaggttttcggatcgtaaagctctgttgccagggaagaacgtccgttagagtaactgctaacggagtgacggtacctgagaagaaagccccggctaactacgtgccagcagccgcggtaatacgtagggggcgagcgttgtccggaattattgggcgtaaagcgcgcgcaggcggctgtttaagtctggtgtttaatcctggggctcaaccccgggtcgcactggaaactgggcagcttgagtgcagaagaggagagtggaattccacgtgtagcggtgaaatgcgtagagatgtggaggaacaccagtggcgaaggcgactctctgggctgtaactgacgctgaggcgcgaaagcgtggggagcaaacaggattagataccctggtagtccacgccgtaaacgatgaatgctaggtgttaggggtttcgatacccttggtgccgaagttaacacattaagcattccgcctggggagtacggccgcaaggctgaaactcaaaggaattgacggggacccgcacaagcagtggagtatgtggtttaattcgaagcaacgcgaagaaccttaccaggtcttgacatccccctgaccggtacagagatgtacctttccttcgggacaggggagacaggtggtgcatggttgtcgtcagctcgtgtcgtgagatgttgggttaagtcccgcaacgagcgcaacccttgactttagttgccagcaagtaaggttgggcactctagagtgactgccggtgacaaaccggaggaaggtggggatgacgtcaaatcatcatgccccttatgacctgggctacacacgtactacaatggccggtacaacgggaagcgaaggagcgatctggagcgaatcctttaaagccggtctcagttcggattgcaggctgcaactcgcctgcatgaagtcggaattgctagtaatcgcggatcagcatgccgcggtgaatacgttcccgggtcttgtacacaccgcccgtcacaccacgagagtttacaacacccgaagtcggtgaggtaaccgcaaggagccagccgccgaaggtggggtagatgattggggtg

SEQ ID NO: 255 - DNA, 1464 bp, Paenibacillus daejeonensis
  misc_feature (43)..(43): n is a, c, g, or t
cgctggcggcgtgcctaatacatgcaagtcgagcggagttgangagaagcttgcttctctgaaacttagcggcggacgggtgagtaacacgtaggcaacctgcctgcaagcctgggataactgcgggaaaccgcagctaataccggatactgcagtcgagatgcatatcttgactgggaaaggcggagcaatctgtcgcttgtagatgggcctgcggcgcattagctagttggtgaggtaacggctcaccaaggcgacgatgcgtagccgacctgagagggtgatcggccacactgggactgagacacggcccagactcctacgggaggcagcagtagggaatcttccgcaatggacgcaagtctgacggagcaacgccgcgtgagtgaggaaggccttcgggtcgtaaagctctgttgccagggaagaatgtcgaggagagtaactgctcttcgaatgacggtacctgagaagaaagccccggctaactacgtgccagcagccgcggtaatacgtagggggcaagcgttgtccggaattattgggcgtaaagcgcgcgcaggcggctttgtaagtctggtgtttaaacccgaagctcaacttcgggtcgcattggaaactgcaaggcttgagtgcagaagaggaaagtggaattccacgtgtagcggtgaaatgcgtagagatgtggaggaacaccagtggcgaaggcgactttctgggctgtaactgacgctgaggcgcgaaagcgtggggagcaaacaggattagataccctggtagtccacgccgtaaacgatgaatgctaggtgttaggggtttcaatacccttggtgccgaagttaacacattaagcattccgcctggggagtacggtcgcaagactgaaactcaaaggaattgacggggacccgcacaagcagtggagtatgtggtttaattcgaagcaacgcgaagaaccttaccaggtcttgacatccctctgaccgtcctagagatagggctttccttcgggacagaggagacaggtggtgcatggttgtcgtcagctcgtgtcgtgagatgttgggttaagtcccgcaacgagcgcaacccttgatcttagttgccagcatttcggatgggcactctaggatgactgccggtgacaaaccggaggaaggtggggatgacgtcaaatcatcatgccccttatgacctgggctacacacgtactacaatggccggtacaacgggtcgcgaagccgcgaggtggagccaatcccagcaaagccggtctcagttcggattgcaggctgcaactcgcctgcatgaagtcggaattgctagtaatcgcggatcagcatgccgcggtgaatacgttcccgggtcttgtacacaccgcccgtcacaccacgagagtttacaacacccgaagtcggtggggtaacccgcaagggagccagccgccgaaggtggggtagatga

SEQ ID NO: 256 - DNA, 1468 bp, Paenibacillus dendritiformis
aacgctggcggcgtgcctaatacatgcaagtcgagcggagcggatggagtgcttgcactcctgatgcttagcggcggacgggtgagtaatacgtaggtaacctgcccttaagaccgggataactcacggaaacgtgggctaataccggataggcgatttcctcgcatgagggaatcgggaaaggcggagcaatctgccacttatggatggacctacggcgcattagctagttggtggggtaacggctcaccaaggcgacgatgcgtagccgacctgagagggtgatcggccacactgggactgagacacggcccagactcctacgggaggcagcagtagggaatcttccgcaatggacgcaagtctgacggagcaacgccgcgtgagtgatgaaggttttcggatcgtaaagctctgttgccagggaagaacgctatggagagtaactgttccataggtgacggtacctgagaagaaagccccggctaactacgtgccagcagccgcggtaatacgtagggggcaagcgttgtccggaattattgggcgtaaagcgcgcgcaggcggtcatgtaagtctggtgtttaaacccggggctcaactccgggtcgcatcggaaactgtgtgacttgagtgcagaagaggaaagtggaattccacgtgtagcggtgaaatgcgtagagatgtggaggaacaccagtggcgaaggcgactttctgggctgtaactgacgctgaggcgcgaaagcgtggggagcaaacaggattagataccctggtagtccacgccgtaaacgatgaatgctaggtgttaggggtttcgatacccttggtgccgaagttaacacattaagcattccgcctggggagtacggtcgcaagactgaaactcaaaggaattgacggggacccgcacaagcagtggagtatgtggtttaattcgaagcaacgcgaagaaccttaccaggtcttgacatccctctgaccgtcctagagatagggcttcccttcggggcagaggtgacaggtggtgcatggttgtcgtcagctcgtgtcgtgagatgttgggttaagtcccgcaacgagcgcaacccttaactttagttgccagcattgagttgggcactctagagtgactgccggtgacaaaccggaggaaggtggggatgacgtcaaatcatcatgccccttatgacctgggctacacacgtactacaatggctggtacaacgggaagcgaagccgcgaggtggagcgaatcctaaaaagccagtctcagttcggattgcaggctgcaactcgcctgcatgaagtcgaattgctagtaatcgcggatcagcatgccgcggtgaatacgttcccgggtcttgtacacaccgcccgtcacaccacgagagtttacaacacccgaagtcggtggggtaaccgcaaggagccagccgccgaaggtggggtagatgattggggtg

SEQ ID NO: 257 - DNA, 1478 bp, Paenibacillus glucanolyticus
  misc_feature (49)..(49): n is a, c, g, or t
  misc_feature (69)..(69): n is a, c, g, or t
  misc_feature (177)..(177): n is a, c, g, or t
  misc_feature (985)..(985): n is a, c, g, or t
gacgaacgctggcggcgtgcctaatacatgcaagtcgagcggacttganggagtgcttgcactcctganagttagcggcggacgggtgagtaacacgtaggcaacctgccctcaagactgggataactaccggaaacggtagctaataccggataatttattacatagcattatgtnataatgaaagacggagcaatctgtcacttggggatgggcctgcggcgcattagctagttggtggggtaacggcccaccaaggcgacgatgcgtagccgacctgagagggtgaacggccacactgggactgagacacggcccagactcctacgggaggcagcagtagggaatcttccgcaatgggcgaaagcctgacggagcaacgccgcgtgagtgatgaaggttttcggatcgtaaagctctgttgccaaggaagaacgtctcatagagtaactgctataggagtgacggtacttgagaagaaagccccggctaactacgtgccagcagccgcggtaatacgtagggggcaagcgttgtccggaattattgggcgtaaagcgcgcgcaggcggttctttaagtctggtgtttaaacctggggctcaacttcaggtcgcactggaaactggggaacttgagtgcagaagaggagagtggaattccacgtgtagcggtgaaatgcgtagatatgtggaggaacaccagtggcgaaggcgactctctgggctgtaactgacgctgaggcgcgaaagcgtggggagcaaacaggattagataccctggtagtccacgccgtaaacgatgaatgctaggtgttaggggtttcgatacccttggtgccgaagttaacacattaagcattccgcctggggagtacggtcgcaagactgaaactcaaaggaattgacggggacccgcacaagcagtggagtatgtggtttaattcgaagcaacgcgaagaaccttaccaagtcttgacatccctntgaatctgctagagatagcagcggccttcgggacagaggagacaggtggtgcatggttgtcgtcagctcgtgtcgtgagatgttgggttaagtcccgcaacgagcgcaacccttgattttagttgccagcaggtaaggctgggcactctagaatgactgccggtgacaaaccggaggaaggcggggatgacgtcaaatcatcatgccccttatgacttgggctacacacgtactacaatggctggtacaacgggaagcgaagccgcgaggtggagccaatcctataaaagccagtctcagttcggattgcaggctgcaactcgcctgcatgaagtcggaattgctagtaatcgcggatcagcatgccgcggtgaatacgttcccgggtcttgtacacaccgcccgtcacaccacgagagtttacaacacccgaagtcggtggggtaacccgcaagggagccagccgccgaaggtggggtagatgattggggtg

SEQ ID NO: 258 - DNA, 1414 bp, Paenibacillus illinoisensis
  misc_feature (643)..(643): n is a, c, g, or t
  misc_feature (685)..(685): n is a, c, g, or t
  misc_feature (1246)..(1246): n is a, c, g, or t
gacgaacgctggcggcgtgcctaatacatgcaagtcgagcggacttgatgagaagcttgcttctctgatggttagcggcggacgggtgagtaacacgtaggcaacctgccctcaagcttgggacaactaccggaaacggtagctaataccgaatacttgcttccttcgcctgaaggaagctggaaagacggagcaatctgtcacttgaggatgggcctgcggcgcattagctagttggtgaggtaacggctcaccaaggcgacgatgcgtacccgacctgagagggtgatcggccacactgggactgagacacggcccagactcctacgggaggcagcagtagggaatcttccgcaatgggcgaaagcctgacggagcaatgccgcgtgagtgatgaaggttttcggatcgtaaagctctgttgccagggaagaacgtccttgagagtaactgctcaaggagtgacggtacctgagaagaaagccccggctaactacgtgccagcagccgcggtaatacgtagggggcaagcgttgtccggaattattgggcgtaaagcgcgcgcaggcggtcatttaagtctggtgtttaatcccggggctcaaccccggatcgcactggaaactgggtgacttgagtgcanaagaggagagtggaattccacgtgtagcggtgaaatgcgtanagatgtggaggaacaccagtggcgaaggcgactctctgggctgtaactgacgctgaggcgcgaaagcgtggggagcaaacaggattagataccctggtagtccacgccgtaaacgatgaatgctaggtgttaggggtttcgatacccttggtgccgaagttaacacattaagcattccgcctggggagtacggtcgcaagactgaaactcaaaggaattgacggggacccgcacaagcagtggagtatgtggtttaattcgaagcaacgcgaagaaccttaccaggtcttgacatccctctgaccgtcctagagatagggctttccttcgggacagaggagacaggtggtgcatggttgtcgtcagctcgtgtcgtgagatgttgggttaagtcccgcaacgagcgcaacccttgatcttagttgccagcacttcgggtgggcactctaaggtgactgccggtgacaaaccggaggaaggtggggatgacgtcaaatcatcatgccccttatgacctgggctacacacgtactacaatggccggtacaacgggctgtgaanccgcgaggtggaacgaatcctaaaaagccggtctcagttcggattgcaggctgcaactcgcctgcatgaagtcggaattgctagtaatcgcggatcagcatgccgcggtgaatacgttcccgggtcttgtacacaccgcccgtcacaccacgagagtttataacaccc

SEQ ID NO: 259 - DNA, 1457 bp, Paenibacillus lactis
  misc_feature (43)..(43): n is a, c, g, or t
  misc_feature (143)..(144): n is a, c, g, or t
  misc_feature (158)..(158): n is a, c, g, or t
  misc_feature (984)..(984): n is a, c, g, or t
ctaatacatgcaagtcgagcggacttgatgaggagcttgcttntctgagagttagcggcggacgggtgagtaacacgtaggcaacctgccctcaagactgggataactaccggaaacggtagctaataccggataattaaatnngctgcatggcgganttatgaaaggcggagcaatctgtcacttgaggatgggcctgcggcgcattagctagttggtgaggtaacggctcaccaaggcgacgatgcgtagccgacctgagagggtgaacggccacactgggactgagacacggcccagactcctacgggaggcagcagtagggaatcttccgcaatgggcgaaagcctgacggagcaacgccgcgtgagtgatgaaggttttcggatcgtaaagctctgttgccagggaagaacgtctcatagagtaactgctatgagagtgacggtacctgagaagaaagccccggctaactacgtgccagcagccgcggtaatacgtagggggcaagcgttgtccggaattattgggcgtaaagcgcgcgcaggcggttctttaagtctggtgtttaaacccgaggctcaacttcgggacgcactggaaactggggaacttgagtgcagaagaggagagtggaattccacgtgtagcggtgaaatgcgtagatatgtggaggaacaccagtggcgaaggcgactctctgggctgtaactgacgctgaggcgcgaaagcgtggggagcgaacaggattagataccctggtagtccacgccgtaaacgatgaatgctaggtgttaggggtttcgatacccttggtgccgaagttaacacattaagcattccgcctggggagtacggtcgcaagactgaaactcaaaggaattgacggggacccgcacaagcagtggagtatgtggtttaattcgaagcaacgcgaagaaccttaccaagtcttgacatccctctgaatcctctagagatagnggcggccttcgggacagaggagacaggtggtgcatggttgtcgtcagctcgtgtcgtgagatgttgggttaagtcccgcaacgagcgcaacccttgatcttagttgccagcactttgggtgggcactctaaggtgactgccggtgacaaaccggaggaaggtggggatgacgtcaaatcatcatgccccttatgacttgggctacacacgtactacaatggctggtacaacgggaagcgaagccgcgaggtggagccaatcctaaaaagccagtctcagttcggattgcaggctgcaactcgcctgcatgaagtcggaattgctagtaatcgcggatcagcatgccgcggtgaatacgttcccgggtcttgtacacaccgcccgtcacaccacgagagtttacaacacccgaagttcggtggggtaacccttacgggagccagccgccgaaggtggggtagatgattggggtg

SEQ ID NO: 260 - DNA, 1477 bp, Paenibacillus larvae
gacgaacgctggcggcgtgcctaatacatgcaagtcgagcggaccttgtgtttctttcgggagacgccaggttagcggcggacgggtgagtaacacgtaggcaacctgcctgtaagaccgggataacttgcggaaacgtgagctaataccggataactggtttcttcgcatgaagaagtcatgaaagacggggcaacctgtcacttacagatgggcctgcggcgcattagctagttggtagggtaacggcttaccaaggcgacgatgcgtagccgacctgagagggtgaacggccacactgggactgagacacggcccagactcctacgggaggcagcagtagggaatcttccgcaatggacgaaagtctgacggagcaacgccgcgtgagtgatgaaggttttcggatcgtaaagctctgttgccaaggaagaacggccaggggagtaactgcccctggagtgacggtacttgagaagaaagccccggctaactacgtgccagcagccgcggtaatacgtagggggcaagcgttgtccggaattattgggcgtaaagcgcgcgcaggcggtcttttaagtctggtgtttaagcccggggctcaaccccggttcgcactggaaactgggagacttgagtgtaggagaggaaagtggaattccacgtgtagcggtgaaatgcgtagagatgtggaggaacaccagtggcgaaggcggctttctggcctataactgacgctgaggcgcgaaagcgtggggagcaaacaggattagataccctggtagtccacgccgtaaacgatgaatgctaggtgttaggggtttcgatacccttggtgccgaagttaacacagtaagcattccgcctggggagtacggtcgcaagactgaaactcaaaggaattgacggggacccgcacaagcagtggagtatgtggtttaattcgaagcaacgcgaagaaccttaccaggccttgacatccctctgaccggtttagagacagaccttttccttcggggacagaggagacaggtggtgcatggttgtcgtcagctcgtgtcgtgagatgttgggttaagtcccgcaacgagcgcaacccttgatcttagttgccagcacgcagaggtgggcactctaagatgactgccggtgacaaaccggaggaaggtggggatgacgtcaaatcatcatgccccttatggcctgggctacacacgtactacaatggtcggtacaacgggaagcgaaggagcgatccggagccaatcctcaaaagccgatctcagttcggattgcaggctgcaactcgcctgcatgaagtcggaattgctagtaatcgcggatcagcatgccgcggtgaatacgttcccgggtcttgtacacaccgcccgtcacaccacgagagtttacaacacccgaagtcggtgaggtaaccgcaagggggcagccgccgaaggtggggtagatgattggggtg

SEQ ID NO: 261 - DNA, 1415 bp, Paenibacillus lautus
  misc_feature (572)..(572): n is a, c, g, or t
  misc_feature (1111)..(1111): n is a, c, g, or t
  misc_feature (1263)..(1263): n is a, c, g, or t
  misc_feature (1272)..(1272): n is a, c, g, or t
  misc_feature (1303)..(1303): n is a, c, g, or t
  misc_feature (1323)..(1323): n is a, c, g, or t
  misc_feature (1346)..(1346): n is a, c, g, or t
  misc_feature (1365)..(1365): n is a, c, g, or t
  misc_feature (1393)..(1393): n is a, c, g, or t
gacgaacgctggcggcgtgcctaatacatgcaagtcgagcggacttgatggagtgcttgcactcctgaaggttagcggcggacgggtgagtaacacgtaggcaacctgccctcaagactgggataactaccggaaacggtagctaataccggataatttatttcacagcattatggaataatgaaagacggagcaatctgtcacttggggatgggcctgcggcgcattagctagttggtggggtaatggcccaccaaggcgacgatgcgtagccgacctgagagggtgaacggccacactgggactgagacacggcccagactcctacgggaggcagcagtagggaatcttccgcaatgggcgaaagcctgacggagcaacgccgcgtgagtgatgaaggttttcggatcgtaaagctctgttgccaaggaagaacgtcttctagagtaactgctaggagagtgacggtacttgagaagaaagccccggctaactacgtgccagcagccgcggtaatacgtagggggcaagcgttgtccggaattattgggcgtaaagcgcgcgcaggcggntctttaagtctggtgtttaaacccgaggctcaacttcgggtcgcactggaaactgggggacttgagtgcagaagaggagagtggaattccacgtgtagcggtgaaatgcgtagatatgtggaggaacaccagtggcgaaggcgactctctgggctgtaactgacgctgaggcgcgaaagcgtggggagcaaacaggattagataccctggtagtccacgccgcaaacgatgaatgctaggtgttaggggtttcgatacccttggtgccgaagttaacacattaagcattccgcctggggagtacggtcgcaagactgaaactcaaaggaattgacggggacccgcacaagcagtggagtatgtggtttaattcgaagcaacgcgaagaaccttaccaagtcttgacatccctctgaatcctctagagatagaggcggccttcgggacagaggtgacaggtggtgcatggttgtcgtcagctcgtgccgtgagatgttgggttaagtcccgcaacgagcgcaacccttgattttagttgncagcacttcgggtgggcactctagaatgactgccggtgacaaaccggaggaaggcggggatgacgtcaaatcatcatgccccttatgacttgggctacacacgtactacaatggctggtacaacgggaagcgaagccgcgaggtggagccantcctataanagccagtctcagttcggattgcaggctgcanctcgcctgcatgaagtcggnattgctagtaatcgcggatcagnatgccgcggtgaatacgtncccgggtcttgtacacaccgcccgtcanaccacgagagtttacaacaccc

SEQ ID NO: 262 - DNA, 1474 bp, Paenibacillus macerans
  misc_feature (175)..(175): n is a, c, g, or t
  misc_feature (440)..(440): n is a, c, g, or t
  misc_feature (455)..(455): n is a, c, g, or t
  misc_feature (1252)..(1252): n is a, c, g, or t
cgaacgctggcggcgtgcctaatacatgcaagtcgagcggacctgatggagtgcttgcactcctgatggttagcggcggacgggtgagtaacacgtaggcaacctgcccgtaagaccgggataactaccggaaacggtagctaataccggataatcaagtcttccgcatgggagncttgggaaaggcggagcaatctgtcacttacggatgggcctgcggcgcattagctagttggtggggtaacggctcaccaaggcgacgatgcgtagccgacctgagagggtgaacggccacactgggactgagacacggcccagactcctacgggaggcagcagtagggaatcttccgcaatggacgaaagtctgacggagcaacgccgcgtgagtgatgaaggttttcggatcgtaaagctctgttgccagggaagaacgtcttntggagtaactgccangagagtgacggtacctgagaagaaagccccggctaactacgtgccagcagccgcggtaatacgtagggggcaagcgttgtccggaattattgggcgtaaagcgcgcgcaggcggctgtttaagtctggtgtataatcctggggctcaactccgggtcgcactggaaactggacggcttgagtgcagaagaggagagtggaattccacgtgtagcggtgaaatgcgtagagatgtggaggaacaccagtggcgaaggcgactctctgggctgtaactgacgctgaggcgcgaaagcgtggggagcaaacaggattagataccctggtagtccacgccgtaaacgatgagtgctaggtgttaggggtttcgatacccttggtgccgaagtaaacacattaagcactccgcctggggagtacggccgcaaggctgaaactcaaaggaattgacggggacccgcacaagcagtggagtatgtggtttaattcgaagcaacgcgaagaaccttaccaggtcttgacatccctctgaccgctgtagagatatggctttccttcgggacagaggagacaggtggtgcatggttgtcgtcagctcgtgtcgtgagatgttgggttaagtcccgcaacgagcgcaacccttgactttagttgccagcaagtaaagttgggcactctagagtgactgccggtgacaaaccggaggaaggtggggatgacgtcaaatcatcatgccccttatgacctgggctacacacgtactacaatggccggtacaacgggaagcgaagtcgtganatggagcgaatcctagaaaagccggtctcagttcggattgcaggctgcaactcgcctgcatgaagtcggaattgctagtaatcgcggatcagcatgccgcggtgaatacgttcccgggtcttgtacacaccgcccgtcacaccacgagagtttacaacacccgaagtcggtgaggtaaccgcaaggggccagccgccgaaggtggggtagatgattggggtg

SEQ ID NO: 263 - DNA, 1473 bp, Paenibacillus naphthalenovorans
gacgaacgctggcggcgtgcctaatacatgcaagtcgagcgctaggggtgctcccttaggggagacctcctggagcggcggacgggtgagtaacacgtaggcaacctgcctgtaagaccgggataactaccggaaacggtagctaagaccggataggtggtttctccgcatggagggatcaagaaacacggtgcaagctgtggcttacagatgggcctgcggcgcattagctagttggtggggtaacggctcaccaaggcgacgatgcgtagccgacctgagagggtgatcggccacactgggactgagacacggcccagactcctacgggaggcagcagtagggaatcttccgcaatggacgcaagtctgacggagcaacgccgcgtgagtgaagaaggttttcggatcgtaaagctctgttgccaaggaagaacgccttggggagtcactgccctgagggtgacggtacttgagaagaaagccccggctaactacgtgccagcagccgcggtaatacgtagggggcaagcgttgtccggaattattgggcgtaaagcgcgcgcaggcggccgcttaagtttggtgtataagcccggggctcaaccccggatcgcaccgaaaactgggtggcttgagtgcaggagaggaaagcggaattccacgtgtagcggtgaaatgcgtagagatgtggaggaacaccagtggcgaaggcggctttctggactgtaactgacgctgaggcgcgaaagcgtggggagcaaacaggattagataccctggtagtccacgccgtaaacgatgagtgctaggtgttaggggtttcgatacccttggtgccgaagtcaacacaataagcactccgcctggggagtacgctcgcaagagtgaaactcaaaggaattgacggggacccgcacaagcagtggagtatgtggtttaattcgaagcaacgcgaagaaccttaccaggtcttgacatccctttgaccggtacagagatgtacctttccttcgggacagaggagacaggtggtgcatggttgtcgtcagctcgtgtcgtgagatgttgggttaagtcccgcaacgagcgcaacccttgagcttagttgccagcattaagttgggcactctaagttgactgccggtgacaaaccggaggaaggtggggatgacgtcaaatcatcatgccccttatgacctgggctacacacgtactacaatggccggtacaacgggaagcgaaggagcgatccggagcgaatccttataagccggtctcagttcggattgcaggctgcaactcgcctgcatgaagtcggaattgctagtaatcgcggatcagcatgccgcggtgaatacgttcccgggtcttgtacacaccgcccgtcacaccacgagagtttacaacacccgaagtcggtggggtaaccgcaaggagccagccgccgaaggtggggtagatgattggggtg

SEQ ID NO: 264 - DNA, 1480 bp, Paenibacillus odorifer
gacgaacgctggcggcgtgcctaatacatgcaagtcgagcggagttactttgaaagcttgctttcaaagtaacttagcggcggacgggtgagtaacacgtaggcaacctgcccttcagactgggataactaccggaaacggtagctaataccggataatttcttttttctcctgagagaagaatgaaagacggagcaatctgtcactgagggatgggcctgcggcgcattagctagttggtggggtaacggcccaccaaggcgacgatgcgtagccgacctgagagggtgaacggccacactgggactgagacacggcccagactcctacgggaggcagcagtagggaatcttccgcaatgggcgaaagcctgacggagcaacgccgcgtgagtgatgaaggttttcggatcgtaaagctctgttgccagggaagaacgtccggtagagtaactgttaccggagtgacggtacctgagaagaaagccccggctaactacgtgccagcagccgcggtaatacgtagggggcaagcgttgtccggaattattgggcgtaaagcgcgcgcaggcggctatttaagtctggtgtttaaaccttgggctcaacctgaggtcgcactggaaactgggtggcttgagtacagaagaggaaagtggaattccacgtgtagcggtgaaatgcgtagatatgtggaggaacaccagtggcgaaggcgactttctgggctgtaactgacgctgaggcgcgaaagcgtggggagcaaacaggattagataccctggtagtccacgccgtaaacgatgagtgctaggtgttaggggtttcgatacccttggtgccgaagttaacacagtaagcactccgcctggggagtacggtcgcaagactgaaactcaaaggaattgacggggacccgcacaagcagtggagtatgtggtttaattcgaagcaacgcgaagaaccttaccaggtcttgacatccctctgaatctgctagagatagcagcggccttcgggacagaggagacaggtggtgcatggttgtcgtcagctcgtgtcgtgagatgttgggttaagtcccgcaacgagcgcaacccttaactttagttgccagcaggtaatgctgggcactctagagtgactgccggtgacaaaccggaggaaggtggggatgacgtcaaatcatcatgccccttatgacctgggctacacacgtactacaatggccggtacaacgggaagcgaagccgcgaggtggagccaatcccatcaaagccggtctcagttcggattgcaggctgcaactcgcctgcatgaagtcggaattgctagtaatcgcggatcagcatgccgcggtgaatacgttcccgggtcttgtacacaccgcccgtcacaccacgagagtttacaacacccgaagtcggtggggtaacccgcaagggagccagccgccgaaggtggggtagatgattggggtg

SEQ ID NO: 265 - DNA, 1474 bp, Paenibacillus pabuli
gacgaacgctggcggcatgcctaatacatgcaagtcgagcggagttgagagaaagcttgctttcttgatacttagcggcggacgggtgagtaacacgtaggcaacctgccctcaagtttgggacaactaccggaaacggtagctaataccgaatagttgttttcttcgcctgaagagaactggaaagacggagcaatctgtcacttggggatgggcctgcggcgcattagctagttggtggggtaacggctcaccaaggcgacgatgcgtagccgacctgagagggtgatcggccacactgggactgagacacggcccagactcctacgggaggcagcagtagggaatcttccgcaatgggcgaaagcctgacggagcaatgccgcgtgagtgatgaaggttttcggatcgtaaagctctgttgccagggaagaacgcttgggagagtaactgctctcaaggtgacggtacctgagaagaaagccccggctaactacgtgccagcagccgcggtaatacgtagggggcaagcgttgtccggaattattgggcgtaaagcgcgcgcaggcggtcatttaagtctggtgtttaatcccggggctcaaccccggatcgcactggaaactgggtgacttgagtgcagaagaggagagtggaattccacgtgtagcggtgaaatgcgtagatatgtggaggaacaccagtggcgaaggcgactctctgggctgtaactgacgctgaggcgcgaaagcgtggggagcaaacaggattagataccctggtagtccacgccgtaaacgatgagtgctaggtgttaggggtttcgatacccttggtgccgaagttaacacattaagcactccgcctggggagtacggtcgcaagactgaaactcaaaggaattgacggggacccgcacaagcagtggagtatgtggtttaattcgaagcaacgcgaagaaccttaccaggtcttgacatccctctgaccggtacagagatgtacctttccttcgggacagaggagacaggtggtgcatggttgtcgtcagctcgtgtcgtgagatgttgggttaagtcccgcaacgagcgcaacccttgatcttagttgccagcacttcgggtgggcactctaaggtgactgccggtgacaaaccggaggaaggtggggatgacgtcaaatcatcatgccccttatgacctgggctacacacgtactacaatggccggtacaacgggctgtgaagccgcgaggtggaacgaatcctaaaaagccggtctcagttcggattgcaggctgcaactcgcctgcatgaagtcggaattgctagtaatcgcggatcagcatgccgcggtgaatacgttcccgggtcttgtacacaccgcccgtcacaccacgagagtttataacacccgaagtcggtggggtaaccgcaaggagccagccgccgaaggtgggatagatgattggggtg

SEQ ID NO: 266 - DNA, 1339 bp, Paenibacillus pasadenensis
agcggcggacgggtgagtaacacgtaggcaacctgccctcgagactgggataacctccggaaacggatgctaataccagatacgcgatcttccctcctggggagatcgggaaagacggagcaatctgttactcggggatgggcctgcggcgcattagctagttggtgaggtaacggctcaccaaggcgacgatgcgtagccgacctgagagggtgatcggccacactgggactgagacacggcccagactcctacgggaggcagcagtagggaatcttccgcaatggacgaaagtctgacggagcaacgccgcgtgagtgaggaaggccttcgggtcgtaaagctctgttgccagggaagaacgcttgggagagtaactgctcccaaggtgacggtacctgagaagaaagccccggctaactacgtgccagcagccgcggtaatacgtagggggcaagcgttgtccggaattattgggcgtaaagcgcgcgcaggcggctttgtaagtccggtgtttaatcttggggctcaaccccaagtcgcacgggaaactgcaaggcttgagtgcagaagaggaaagtggaattccacgtgtagcggtgaaatgcgtagagatgtggaggaacaccagtggcgaaggcgactttctgggctgtaactgacgctgaggcgcgaaagcgtggggagcaaacaggattagataccctggtagtccacgccgtaaacgatgaatgctaggtgttaggggtttcgatacccttggtgccgaagttaacacaataagcattccgcctggggagtacgctcgcaagagtgaaactcaaaggaattgacggggacccgcacaagcagtggagtatgtggtttaatttgaagcaacgcgaagaaccttaccaggtcttgacatccctttgaatccgctagagatagcggcggccttcgggacagaggagacaggtggtgcatggttgtcgtcagctcgtgtcgtgagatgttgggttaagtcccgcaacgagcgcaacccttgaattcagttgccagcaagtaagggtgggcactctgaattgactgccggtgacaaaccggaggaaggcggggatgacgtcaaatcatcatgccccttatgacctgggctacacacgtactacaatggccggtacaacgggccgcgaagccgcgaggcggagccaatccttaaaagccggtctcagttcggattgcaggctgcaactcgcctgcatgaagtcggaattgctagtaatcgcggatcagcatgccgcggtgaatacgttcccgggtcttgtacacaccgcccgtcacaccacgagagtttgtaaca

SEQ ID NO: 267 - DNA, 1476 bp, Paenibacillus polymyxa
gacgaacgctggcggcgtgcctaatacatgcaagtcgagcggggttatttagaagcttgcttctaaataacctagcggcggacgggtgagtaacacgtaggcaacctgcccacaagacagggataactaccggaaacggtagctaatacccgatacatccttttcctgcatgggagaaggaggaaaggcggagcaatctgtcacttgtggatgggcctgcggcgcattagctagttggtggggtaaaggcctaccaaggcgacgatgcgtagccgacctgagagggtgatcggccacactgggactgagacacggcccagactcctacgggaggcagcagtagggaatcttccgcaatgggcgaaagcctgacggagcaacgccgcgtgagtgatgaaggttttcggatcgtaaagctctgttgccagggaagaacgtcttgtagagtaactgctacaagagtgacggtacctgagaagaaagccccggctaactacgtgccagcagccgcggtaatacgtagggggcaagcgttgtccggaattattgggcgtaaagcgcgcgcaggcggctctttaagtctggtgtttaatcccgaggctcaacttcgggtcgcactggaaactggggagcttgagtgcagaagaggagagtggaattccacgtgtagcggtgaaatgcgtagagatgtggaggaacaccagtggcgaaggcgactctctgggctgtaactgacgctgaggcgcgaaagcgtggggagcaaacaggattagataccctggtagtccacgccgtaaacgatgaatgctaggtgttaggggtttcgatacccttggtgccgaagttaacacattaagcattccgcctggggagtacggtcgcaagactgaaactcaaaggaattgacggggacccgcacaagcagtggagtatgtggtttaattcgaagcaacgcgaagaaccttaccaggtcttgacatccctctgaccggtctagagatagacctttccttcgggacagaggagacaggtggtgcatggttgtcgtcagctcgtgtcgtgagatgttgggttaagtcccgcaacgagcgcaacccttatgcttagttgccagcaggtcaagctgggcactctaagcagactgccggtgacaaaccggaggaaggtggggatgacgtcaaatcatcatgccccttatgacctgggctacacacgtactacaatggccggtacaacgggaagcgaaggagcgatctggagccaatcctagaaaagccggtctcagttcggattgtaggctgcaactcgcctacatgaagtcggaattgctagtaatcgcggatcagcatgccgcggtgaatacgttcccgggtcttgtacacaccgcccgtcacaccacgagagtttacaacacccgaagtcggtgaggtaaccgcaaggagccagccgccgaaggtggggtagatgattggggtg

SEQ ID NO: 268 - DNA, 1475 bp, Paenibacillus rhizosphaerae
gacgaacgctggcggcgtgcctaatacatgcaagtcgagcggacttgatggagagcttgctctcctgatggttagcggcggacgggtgagtaacacgtaggcaacctgcctgcaagaccgggataacccacggaaacgtgagctaataccggatatctcatttcctctcctgagggaatgacgaaagacggagcaatctgtcacttgcggatgggcctgcggcgcattagctagttggtgaggtaacggctcaccaaggcgacgatgcgtagccgacctgagagggtgaacggccacactgggactgagacacggcccagactcctacgggaggcagcagtatggaatcttccgcaatgggcgaaagcctgacggagcaacgccgcgtgagtgatgaaggttttcggatcgtaaagctctgttgccagggaagaacgtccgatagagtaactgctatcggagtgacggtacctgagacgaaagccccggctaactacgtgccagcagccgcggtaatacgtagggggcaagcgttgtccggaattattgggcgtaaagcgcgcgcaggcggtcatttaagtctggtgtttaaggccaaggctcaaccttggttcgcactggaaactgggtgacttgagtgcagaagaggagagtggaattccacgtgtagcggtgaaatgcgtagatatgtggaggaacaccagtggcgaaggcgactctctgggctgtaactgacgctgaggcgcgaaagcgtggggagcaaacaggattagataccctggtagtccacgccgtaaacgatgaatgctaggtgttaggggtttcgatacccttggtgccgaagttaacacattaagcattccgcctggggagtacggtcgcaagactgaaactcaaaggaattgacggggacccgcacaagcagtggagtatgtggtttaattcgaagcaacgcgaagaaccttaccaggtcttgacatccctctgaccggtctagagatagacctttccttcgggacagaggagacaggtggtgcatggttgtcgtcagctcgtgtcgtgagatgttgggttaagtcccgcaacgagcgcaacccttgattttagttgccagcacttcgggtgggcactctagaatgactgccggtgacaaaccggaggaaggcggggatgacgtcaaatcatcatgccccttatgacctgggctacacacgtactacaatggccagtacaacgggaagcgaagccgcgaggtggagccaatcctatcaaagctggtctcagttcggattgcaggctgcaactcgcctgcatgaagtcggaattgctagtaatcgcggatcagcatgccgcggtgaatacgttcccgggtcttgtacacaccgcccgtcacaccacgagagtttacaacacccgaagtcggtgaggtaaccgcaaggagccagccgccgaaggtggggtagatgattggggtg

SEQ ID NO: 269 - DNA, 1477 bp, Paenibacillus stellifer
gacgaacgctggcggcgtgcctaatacatgcaagtcgagcggagttatgaaggagcttgctctggattaacttagcggcggacgggtgagtaacacgtaggcaacctgcccttcagactgggataactaccggaaacggtagctaataccggataattcctttcttcgcctgaaggaaggatgaaagacggagcaatctgttgctgagggatgggcctgcggcgcattagctagttggtggggtaacggctcaccaaggcaacgatgcgtagccgacctgagagggtgaacggccacactgggactgagacacggcccagactcctacgggaggcagcagtagggaatcttccgcaatgggcgaaagcctgacggagcaacgccgcgtgagtgatgaaggttttcggatcgtaaagctctgttgccagggaagaacgttctctagagtaactgctagagaagtgacggtacctgagaagaaagccccggctaactacgtgccagcagccgcggtaatacgtagggggcaagcgttgtccggaattattgggcgtaaagcgcgcgcaggcggcgatttaagtctggtgtttaaaccatgggctcaacctgtggtcgcatcggaaactggatggcttgagtgcagaagaggaaagtggaattccacgtgtagcggtgaaatgcgtagagatgtggaggaacaccagtggcgaaggcgactttctgggctgtaactgacgctgaggcgcgaaagcgtggggagcaaacaggattagataccctggtagtccacgccgtaaacgatgagtgctaggtgttaggggtttcgatacccttggtgccgaagttaacacagtaagcactccgcctggggagtacggtcgcaagactgaaactcaaaggaattgacggggacccgcacaagcagtggagtatgtggtttaattcgaagcaacgcgaagaaccttaccaggtcttgacatccccctgaatacgttagagatagcgtaggccttcgggacaggggagacaggtggtgcatggttgtcgtcagctcgtgtcgtgagatgttgggttaagtcccgcaacgagcgcaacccttgactttagttgccagcaggtcaggctgggcactctagagtgactgccggtgacaaaccggaggaaggtggggatgacgtcaaatcatcatgccccttatgacctgggctacacacgtactacaatggccggtacaacgggaagcgaaaccgcgaggtggagccaatcttataaagccggtctcagttcggattgcaggctgcaactcgcctgcatgaagtcggaattgctagtaatcgcggatcagcatgccgcggtgaatacgttcccgggtcttgtacacaccgcccgtcacaccacgagagtttacaacacccgaagtcggtggggtaacccgcaagggagccagccgccgaaggtggggtagatgattggggtg

SEQ ID NO: 270 - DNA, 1472 bp, Paenibacillus thiaminolyticus
  misc_feature (44)..(44): n is a, c, g, or t
  misc_feature (1118)..(1118): n is a, c, g, or t
cgaacgctggcggcgtgcctaatacatgcaagtcgagcggagcnacggtttccttcgggaaaccattagcttagcggcggacgggtgagtaatacgtaggtaacctgcccttaagactgggataactcacggaaacgtgggctaataccggatagtcgatttcctcgcatgagggaatcgggaaaggcggagcaatctgccacttatggatggacctacggcgcattagctagttggtggggtaacggctcaccaaggcgacgatgcgtagccgacctgagagggtgatcggccacactgggactgagacacggcccagactcctacgggaggcagcagtagggaatcttccgcaatggacgcaagtctgacggagcaacgccgcgtgagtgatgaaggttttcggatcgtaaagctctgttgccagggaagaacgctatggagagtaactgttccataggtgacggtacctgagaagaaagccccggctaactacgtgccagcagccgcggtaatacgtagggggcaagcgttgtccggaattattgggcgtaaagcgcgcgcaggcggtcatgtaagtctggtgtttaaacccggggctcaactccgggtcgcatcggaaactgtgtgacttgagtgcagaagaggaaagtggaattccacgtgtagcggtgaaatgcgtagagatgtggaggaacaccagtggcgaaggcgactttctgggctgtaactgacgctgaggcgcgaaagcgtggggagcaaacaggattagataccctggtagtccacgccgtaaacgatgaatgctaggtgttaggggtttcgatacccttggtgccgaagttaacacattaagcattccgcctggggagtacggtcgcaagactgaaactcaaaggaattgacggggacccgcacaagcagtggagtatgtggtttaattcgaagcaacgcgaagaaccttaccaggtcttgacatccctctgaccgtcctagagatagggcttcccttcggggcagaggtgacaggtggtgcatggttgtcgtcagctcgtgtcgtgagatgttgggttaagtcccgcaacgagcgcaacccttaactttagttgccagcattnagttgggcactctagagtgactgccggtgacaaaccggaggaaggtggggatgacgtcaaatcatcatgccccttatgacctgggctacacacgtactacaatggctggtacaacgggaagcgaagccgcgaggtggagcgaatcctaaaaagccagtctcagttcggattgcaggctgcaactcgcctgcatgaagtcggaattgctagtaatcgcggatcagcatgccgcggtgaatacgttcccgggtcttgtacacaccgcccgtcacaccacgagagtttacaacacccgaagtcggtggggtaaccgcaaggagccagccgccgaaggtggggtagatgattggggtg

SEQ ID NO: 271 - DNA, 1470 bp, Paenibacillus typhae
gacgaacgctggcggcgtgcctaatacatgcaagtcgagcggagtttatccttcggggtaagcttagcggcggacgggtgagtaacacgtaggcaacctgccccttagcctgggataactaccggaaacggtagctaataccggataatccctttcctcgcctgaggaaaggataaaaggcggagcaatctgctgataagggatgggcctgcggcgcattagctagttggtggggtaacggctcaccaaggcgacgatgcgtagccgacctgagagggtgaacggccacactgggactgagacacggcccagactcctacgggaggcagcagtagggaatcttccgcaatgggcgaaagcctgacggagcaacgccgcgtgagtgatgaaggttttcggatcgtaaagctctgttgccagggaagaacgtccggtagagtaactgctaccggagtgacggtacctgagaagaaagccccggctaactacgtgccagcagccgcggtaatacgtagggggcaagcgttgtccggaattattgggcgtaaagcgcgcgcaggcggctatttaagtctggtgtttaaaccttgggctcaacctgaggtcgcactggaaactgggtggcttgagtacagaagaggaaagtggaattccacgtgtagcggtgaaatgcgtagagatgtggaggaacaccagtggcgaaggcgactttctgggctgtaactgacgctgaggcgcgaaagcgtggggagcaaacaggattagataccctggtagtccacgccgtaaacgatgagtgctaggtgttaggggtttcgatacccttggtgccgaagttaacacagtaagcactccgcctggggagtacggtcgcaagactgaaactcaaaggaattgacggggacccgcacaagcagtggagtatgtggtttaattcgaagcaacgcgaagaaccttaccaggtcttgacatccctctgaatcctctagagatagaggcggccttcgggacagaggagacaggtggtgcatggttgtcgtcagctcgtgtcgtgagatgttgggttaagtcccgcaacgagcgcaacccttgactttagttgccagcaggttaagctgggcactctagagtgactgccggtgacaaaccggaggaaggtggggatgacgtcaaatcatcatgccccttatgacctgggctacacacgtactacaatggccggtacaacgggaagcgaagccgcgaggtggagccaatcccagcaaagccggtctcagttcggattgcaggctgcaactcgcctgcatgaagtcggaattgctagtaatcgcggatcagcatgccgcggtgaatacgttcccgggtcttgtacacaccgcccgtcacaccacgagagtttacaacacccgaagtcggtggggtaacccgcaagggggccagccgccgaaggtggggtagatgattggggtg

SEQ ID NO: 272 - DNA, 1447 bp, Pantoea agglomerans
ggcctaacacatgcaagtctgacggtagcacagaggagcttgctccttgggtgacgagtggcggacgggtgagtaatgtctggggatctgcccgatagagggggataaccactggaaacggtggctaataccgcataacgtcgcaagaccaaagagggggaccttcgggcctctcactatcggatgaacccagatgggattagctagtaggcggggtaatggcccacctaggcgacgatccctagctggtctgagaggatgaccagccacactggaactgagacacggtccagactcctacgggaggcagcagtggggaatattgcacaatgggcgcaagcctgatgcagccatgccgcgtgtatgaagaaggccttcgggttgtaaagtactttcagcggggaggaaggcgatggggttaataaccttgtcgattgacgttacccgcagaagaagcaccggctaactccgtgccagcagccgcggtaatacggagggtgcaagcgttaatcggaattactgggcgtaaagcgcacgcaggcggtctgttaagtcagatgtgaaatccccgggcttaacctgggaactgcatttgaaactggcaggcttgagtcttgtagaggggggtagaattccaggtgtagcggtgaaatgcgtagagatctggaggaataccggtggcgaaggcggccccctggacaaagactgacgctcaggtgcgaaagcgtggggagcaaacaggattagataccctggtagtccacgccgtaaacgatgtcgacttggaggttgttcccttgaggagtggcttccggagctaacgcgttaagtcgaccgcctggggagtacggccgcaaggttaaaactcaaatgaattgacgggggcccgcacaagcggtggagcatgtggtttaattcgatgcaacgcgaagaaccttacctactcttgacatccacggaatttggcagagatgccttagtgccttcgggaaccgtgagacaggtgctgcatggctgtcgtcagctcgtgttgtgaaatgttgggttaagtcccgcaacgagcgcaacccttatcctttgttgccagcgattcggtcgggaactcaaaggagactgccggtgataaaccggaggaaggtggggatgacgtcaagtcatcatggcccttacgagtagggctacacacgtgctacaatggcgcatacaaagagaagcgacctcgcgagagcaagcggacctcacaaagtgcgtcgtagtccggatcggagtctgcaactcgactccgtgaagtcggaatcgctagtaatcgtggatcagaatgccacggtgaatacgttcccgggccttgtacacaccgcccgtcacaccatgggagtgggttgcaaaagaagtaggtagcttaaccttcgggagggcgcttaccactttgtgattcatgactggggtg

SEQ ID NO: 273 - DNA, 1449 bp, Parabacteroides goldsteinii
gatgaacgctagcgacaggcttaacacatgcaagtcgaggggcagcacgatgtagcaatacattggtggcgaccggcgcacgggtgagtaacgcgtatgcaacctacctatcagaggggaataacccggcgaaagtcggactaataccgcataaaacaggggttccacatggaaatatttgttaaagaattatcgctgatagatgggcatgcgttccattagatagttggtgaggtaacggctcaccaagtccacgatggataggggttctgagaggaaggtcccccacactggtactgagacacggaccagactcctacgggaggcagcagtgaggaatattggtcaatgggcgagagcctgaaccagccaagtcgcgtgaaggatgaaggatctatggtttgtaaacttcttttatatgggaataaagtgaggaacgtgttcctttttgtatgtaccatatgaataagcatcggctaactccgtgccagcagccgcggtaatacggaggatgcgagcgttatccggatttattgggtttaaagggtgcgtaggtggttaattaagtcagcggtgaaagtttgtggctcaaccataaaattgccgttgaaactggttgacttgagtatatttgaggtaggcggaatgcgtggtgtagcggtgaaatgcatagatatcacgcagaactccgattgcgaaggcagcttactaaactataactgacactgaagcacgaaagcgtggggatcaaacaggattagataccctggtagtccacgcagtaaacgatgattactagctgtttgcgatacacagtaagcggcacagcgaaagcgttaagtaatccacctggggagtacgccggcaacggtgaaactcaaaggaattgacgggggcccgcacaagcggaggaacatgtggtttaattcgatgatacgcgaggaaccttacccgggtttgaacgcatattgacagctctggaaacagagtctctagtaatagcaatttgcgaggtgctgcatggttgtcgtcagctcgtgccgtgaggtgtcggcttaagtgccataacgagcgcaacccttatcactagttactaacaggtcatgctgaggactctagtgagactgccagcgtaagctgtgaggaaggtggggatgacgtcaaatcagcacggcccttacatccggggcgacacacgtgttacaatggtggggacaaagggcagctaccgtgtgagcggatgcaaatctccaaaccccatctcagttcggatcgaagtctgcaacccgacttcgtgaagctggattcgctagtaatcgcgcatcagccatggcgcggtgaatacgttcccgggccttgtacacaccgcccgtcaagccatgggagttgggggtacctaaagtccgtaaccgcaaggatcggcctagggtaaaaccgatgactggggct

SEQ ID NO: 274 - DNA, 1449 bp, Parabacteroides gordonii
gatgaacgctagcgacaggcttaacacatgcaagtcgaggggcagcaggaagtagcaatactttgctggcgaccggcgcacgggtgagtaacgcgtatgcaacctacctatcagagggggataacccggcgaaagtcggactaataccgcataaaacagggggcccgcatgggaatatttgttaaagattaattgctgatagatgggcatgcgttccattagatagttggtaaggtaacggcttaccaagtctgcgatggataggggttctgagaggaaggtcccccacactggtactgagacacggaccagactcctacgggaggcagcagtgaggaatattggtcaatgggcgagagcctgaaccagccaagtcgcgtgaaggatgaaggatctatggttcgtaaacttcttttataagggaataaagtgcgggacgtgtcctgttttgtatgtaccttatgaataaggatcggctaactccgtgccagcagccgcggtaatacggaggatccgagcgttatccggatttattgggtttaaagggtgcgtaggtggtttattaagtcagcggtgaaagtttgtggctcaaccataaaattgccgttgaaactggttaacttgagtatatttgaggtaggcggaatgcgtggtgtagcggtgaaatgcatagatatcacgcagaactccaattgcgaaggcagcttactaaactataactgacactgaagcacgaaagcgtggggatcaaacaggattagataccctggtagtccacgcagtaaacgatgattactaggagtttgcgatacacagtaagctctacagcgaaagcgttaagtaatccacctggggagtacgccggcaacggtgaaactcaaaggaattgacgggggcccgcacaagcggaggaacatgtggtttaattcgatgatacgcgaggaaccttacccgggtttgaacgcatttggacagctctggaaacagagtctctagcaatagccatttgcgaggtgctgcatggttgtcgtcagctcgtgccgtgaggtgtcggcttaagtgccataacgagcgcaacccttatctttagttactaacaggtcatgctgaggactctaaagagactgccagcgtaagctgtgaggaaggtggggatgacgtcaaatcagcacggcccttacatccggggcgacacacgtgttacaatggtggggacaaagggcagctacacagcgatgtgatgctaatctccaaaccccatctcagttcggatcgaagtctgcaacccgacttcgtgaagctggattcgctagtaatcgcgcatcagccatggcgcggtgaatacgttcccgggccttgtacacaccgcccgtcaagccatgggagttgggggtacctaaagtccgtaaccgcaaggatcggcctagggtaaaaccgatgactggggct

SEQ ID NO: 275 - DNA, 1453 bp, Parabacteroides johnsonii
gatgaacgctagcgacaggcttaacacatgcaagtcgaggggcagcatggtaagtagcaatacttattgatggcgaccggcgcacgggtgagtaacgcgtatgcaacttacctatcagagggggatagcccggcgaaagtcggattaatactccataaaacaggggttccgcatgggactatttgttaaagattcatcgctgatagataggcatgcgttccattaggcagttggcggggtaacggcccaccaaaccgacgatggataggggttctgagaggaaggtcccccacattggtactgagacacggaccaaactcctacgggaggcagcagtgaggaatattggtcaatggccgagaggctgaaccagccaagtcgcgtgaaggatgaaggatctatggtttgtaaacttcttttataggggaataaagtgtgggacgtgttccattttgtatgtaccctatgaataagcatcggctaactccgtgccagcagccgcggtaatacggaggatgcgagcgttatccggatttattgggtttaaagggtgcgtaggtggtaatttaagtcagcggtgaaagtttgtggctcaaccataaaattgccgttgaaactgggttacttgagtgtgtttgaggtaggcggaatgcgtggtgtagcggtgaaatgcatagatatcacgcagaactccaattgcgaaggcagcttactaaaccataactgacactgaagcacgaaagcgtgggtatcaaacaggattagataccctggtagtccacgcagtaaacgatgattactaggagtttgcgatacacagtaagctctacagcgaaagcgttaagtaatccacctggggagtacgccggcaacggtgaaactcaaaggaattgacgggggcccgcacaagcggaggaacatgtggtttaattcgatgatacgcgaggaaccttacccgggtttgaacgtagtcagaccgaccttgaaagaggttttctagcaatagctgattacgaggtgctgcatggttgtcgtcagctcgtgccgtgaggtgtcggcttaagtgccataacgagcgcaacccttatcactagttactaacaggttaagctgaggactctggtgagactgccagcgtaagctgtgaggaaggtggggatgacgtcaaatcagcacggcccttacatccggggcgacacacgtgttacaatggcatggacaaagggcagctacctggcgacaggatgctaatctctaaaccatgtctcagttcggatcggagtctgcaactcgactccgtgaagctggattcgctagtaatcgcgcatcagccatggcgcggtgaatacgttcccgggccttgtacacaccgcccgtcaagccatgggagccgggggtacctgaagtccgtaaccgcaaggatcggcctagggtaaaactggtgactggggct

SEQ ID NO: 276 - DNA, 1453 bp, Parabacteroides merdae
gatgaacgctagcgacaggcttaacacatgcaagtcgaggggcagcatgatttgtagcaatacagattgatggcgaccggcgcacgggtgagtaacgcgtatgcaacttacctatcagagggggatagcccggcgaaagtcggattaataccccataaaacaggggtcccgcatgggaatatttgttaaagattcatcgctgatagataggcatgcgttccattaggcagttggcggggtaacggcccaccaaaccgacgatggataggggttctgagaggaaggtcccccacattggtactgagacacggaccaaactcctacgggaggcagcagtgaggaatattggtcaatggccgagaggctgaaccagccaagtcgcgtgaaggaagaaggatctatggtttgtaaacttcttttataggggaataaagtggaggacgtgtccttttttgtatgtaccctatgaataagcatcggctaactccgtgccagcagccgcggtaatacggaggatgcgagcgttatccggatttattgggtttaaagggtgcgtaggtggtgatttaagtcagcggtgaaagtttgtggctcaaccataaaattgccgttgaaactgggttacttgagtgtgtttgaggtaggcggaatgcgtggtgtagcggtgaaatgcatagatatcacgcagaactccgattgcgaaggcagcttactaaaccataactgacactgaagcacgaaagcgtggggatcaaacaggattagataccctggtagtccacgcagtaaacgatgattactaggagtttgcgatacaatgtaagctctacagcgaaagcgttaagtaatccacctggggagtacgccggcaacggtgaaactcaaaggaattgacgggggcccgcacaagcggaggaacatgtggtttaattcgatgatacgcgaggaaccttacccgggtttgaacgtagtctgaccggagtggaaacactccttctagcaatagcagattacgaggtgctgcatggttgtcgtcagctcgtgccgtgaggtgtcggcttaagtgccataacgagcgcaacccttatcactagttactaacaggtgaagctgaggactctggtgagactgccagcgtaagctgtgaggaaggtggggatgacgtcaaatcagcacggcccttacatccggggcgacacacgtgttacaatggcatggacaaagggcagctacctggcgacaggatgctaatctccaaaccatgtctcagttcggatcggagtctgcaactcgactccgtgaagctggattcgctagtaatcgcgcatcagccatggcgcggtgaatacgttcccgggccttgtacacaccgcccgtcaagccatgggagccgggggtacctgaagtccgtaaccgcaaggatcggcctagggtaaaactggtgactggggct

SEQ ID NO: 277 - DNA, 1453 bp, Paraprevotella clara
  misc_feature (50)..(51): n is a, c, g, or t
  misc_feature (53)..(53): n is a, c, g, or t
  misc_feature (230)..(230): n is a, c, g, or t
  misc_feature (258)..(258): n is a, c, g, or t
  misc_feature (816)..(816): n is a, c, g, or t
  misc_feature (818)..(818): n is a, c, g, or t
gatgaacgctagctacaggcttaacacatgcaagtcgaggggcagcatgnncncagctttgctgggtttgatggcgaccggcgcacgggtgagtaacgcgtatccaacctgccctttactccgggatagtctcctgaaagggagtttaataccggatgtgtttgtctttccgcatgggagcgacaaataaagattgattggtaaaggatggggatgcgtcccattagctngttggcggggtaacggcccaccaaggcnacgatgggtaggggttctgagaggaaggtcccccacattggaactgagacacggtccaaactcctacgggaggcagcagtgaggaatattggtcaatgggcgagagcctgaaccagccaagtagcgtgaaggacgacggccctacgggttgtaaacttcttttataagggaataaagttcgccacgcgtggtgttttgtatgtaccttatgaataagcatcggctaattccgtgccagcagccgcggtaatacggaagatgcgagcgttatccggatttattgggtttaaagggagcgtaggcgggcttttaagtcagcggtcaaatgtcacggctcaaccgtggccagccgttgaaactgtaagccttgagtctgcacagggcacatggaattcgtggtgtagcggtgaaatgcttagatatcacgaagaactccgatcgcgaaggcattgtgccggggcagcactgacgctgaggctcgaaagtgcgggtatcaaacaggattagataccctggtagtccgcacggtaaacgatgaatgctcgctatgggcgatanantgtccgtggccaagcgaaagcgttaagcattccacctggggagtacgccggcaacggtgaaactcaaaggaattgacgggggcccgcacaagcggaggaacatgtggtttaattcgatgatacgcgaggaaccttacccgggcttgaattgcaggtgcatgagtcagagatgattctttccttcgggactcctgtgaaggtgctgcatggttgtcgtcagctcgtgccgtgaggtgtcggcttaagtgccataacgagcgcaacccttctccccagttgccatcgggtaatgccgggccctctggggacactgccatcgtaagatgcgaggaaggtggggatgacgtcaaatcagcacggcccttacgtccggggctacacacgtgttacaatggggggtacagagggccgctgtccggtgacggttggccaatccctaaaacccctctcagttcggactggagtctgcaacccgactccacgaagctggattcgctagtaatcgcgcatcagccatggcgcggtgaatacgttcccgggccttgtacacaccgcccgtcaagccatgaaagccgggggtgcctgaagtccgtgaccgcgagggtcggcctagggtaaaactggtgattggggct

SEQ ID NO: 278 - DNA, 1464 bp, Parasutterella excrementihominis
attgaacgctggcggaacgctttacacatgcaagtcgaacggtaacgcggagagaagcttgcttctctccggcgacgagtggcgaacgggtgagtaatacatcggaacgtgtccgctcgtgggggacaaccagccgaaaggttggctaataccgcatgagttctacggaagaaagagggggacccgcaagggcctctcgcgagcggagcggccgatgactgattagcctgttggtgaggtaacggctcaccaaagcaacgatcagtagctggtctgagaggacgaccagccacactgggactgagacacggcccagactcctacgggaggcagcagtggggaattttggacaatgggcgcaagcctgatccagctattccgcgtgtgggatgaaggccctcgggttgtaaaccacttttgtagagaacgaaaagacaccttcgaataaagggtgttgctgacggtactctaagaataagcaccggctaactacgtgccagcagccgcggtaatacgtagggtgcgagcgttaatcggaattactgggcgtaaagggtgcgcaggcggttgagtaagacagatgtgaaatccccgagcttaactcgggaatggcatatgtgactgctcgactagagtgtgtcagagggaggtggaattccacgtgtagcagtgaaatgcgtagatatgtggaagaacaccgatggcgaaggcagcctcctgggacataactgacgctcaggcacgaaagcgtggggagcaaacaggattagataccctggtagtccacgccctaaacgatgttaactagttgttgggaagtaaaattctcagtaacgcagccaacgcgagaagttaaccgcctgggaagtacggtcgcaagactaaaactcaaaggaattgacggggacccgcacaagcggtggatgatgtggattaattcgatgcaacgcgaaaaaccttacctacccttgacatgtcaggaagctcttgtaatgagagcgtgcccgcaagggagcctgaacacaggtgctgcatggctgtcgtcagctcgtgtcgtgagatgttgggttaagtcccgcaacgagcgcaacccttgtcactagttgctacgaaagggcactctagtgagactgccggtgacaaaccggaggaaggtggggatgacgtcaagtcctcatggcccttatgggtagggcttcacacgtcatacaatggtcggaacagagggcagcgaagccgtgaggcggagccaatcccagaaaaccgatcgtagtccggattgcagtctgcaactcgactgcatgaagtcggaatcgctagtaatcgcggatcagcatgccgcggtgaatacgttcccgggtcttgtacacaccgcccgtcaaacaatgggagtggtgtttaccagaagtcgttagcctaaccgcaaggagggcggcgaccacggtgagcaccgtgactaatgtt

SEQ ID NO: 279 - DNA, 1451 bp, Peptoniphilus asaccharolyticus
gacgaacgctggcggcgcgcctaacacatgcaagtcgagcgatgaaaatcaaacagaacccttcggggtgaagtttggaaggattagcggcggacgggtgagtaacacgtgagtaacctgcctttgacacggggatagccaccggaaacggtgattaatacccgatgaaatcgtagtgacacatgtcataacgatcaaagtgaattagcggtcaaagatggactcgcgtctgattaattagttggtgaggtaacggctcaccaagatagcgatcagtagccggcctgagagggtgaacggccacattggaactgagaaacggtccaaactcctacgggaggcagcagtggggaatattgcacaatgggggaaaccctgatgcagcgacgccgcgtgagcgaagaaggctttcgagtcgtaaagctctgtcctatgggaagataatgacggtaccataggaggaagccccggctaactacgtgccagcagccgcggtaatacgtagggggcgagcgttgtccggaatcactgggcgtaaagggttcgcaggcggtttagaaagtcagatgtgaaaggcaagggctcaacccttgtaagcatttgaaactaataaacttgagtagtgaagaggtaagtggaattcctagtgtagcggtgaaatgcgtagatattaggaggaataccggtggcgaaggcgacttactggtcacaaactgacgctgaggaacgaaagcgtgggtagcaaacaggattagataccctggtagtccacgccgtaaacgatgagtgctaggtgtcggagaatttcggtgccgcagttaacacaataagcactccgcctggggagtacgtgcgcaagcatgaaactcaaaggaattgacggggacccgcacaagcagcggagcatgtggtttaattcgaagcaacgcgaagaaccttaccagggcttgacataatattgaccgctctagagatagagctttcccttcggggacagtattacaggtggtgcatggttgtcgtcagctcgtgtcgtgagatgttgggttaagtcccgcaacgagcgcaacccttacctttagttgccagcatgtaaagatgggaactctaaagggactgccgatgataaatcggaggaaggtggggatgacgtcaaatcatcatgccctttatgtcctgggctacacacgtgctacaatggtcggaacaaagagcgggcgagctagtgatagtaagcgaatctcaaaaagccgatctcagttcggattgttctctgcaactcgagaacatgaagtcggagttgctagtaatcgcagatcagaatgctgcggtgaatgcgttcccgggtcttgtacacaccgcccgtcacaccatgggagttggcaatacccgaagtcgtcgagctaaccgcaaggaagcagacgccgaaggtagggttaatgactggggtg

SEQ ID NO: 280 - DNA, 1353 bp, Peptoniphilus indolicus
  misc_feature (69)..(69): n is a, c, g, or t
  misc_feature (166)..(166): n is a, c, g, or t
  misc_feature (190)..(190): n is a, c, g, or t
  misc_feature (600)..(600): n is a, c, g, or t
  misc_feature (870)..(870): n is a, c, g, or t
gacgaacgctggcggcgcgcttaacacatgcaagtcgagcgatgaaatcttaacaagacccttcggggngaagataagtggattagcggcggacgggtgagtaacacgtgagtaacctgccttagacattgggatagcctcgggaaaccgggattaataccaaatnaaatcacatatgcacatgcataantgatcaaagctccggcggtctaagatggactcgcgtcccattagctagttggtgaggtaacggcccaccaaggcgacgatgggtagccggcctgagagggtgaacggccacattggaactgagaaacggtccaaactcctacgggaggcagcagtggggaatattgcacaatggagggaactctgatgcagcgacgccgcgtgaacgaagaaggctttcgagtcgtaaagttctttgatatgggaagataatgacggtaccataagaaaaagccccggctaactacgtgccagcagccgcggtaatacgtagggggctagcgttgtccggaatcactgggcgtaaagggttcgcaggcggaaatgcaagtcaggtgtaaaaggcagtagcttaactactgtaagcatttnaaactgcatatcttgagtgaagtagaggtaagtggaatttttagtgtagcggtgaaatgcgtagatattaaaaagaataccggtggcgaaggcgactttctgggctcattctgacgctgaggaacgaaagcgtgggtagcaaacaggattagataccctggtagtccacgctgtaaacgatgagtgctaggtatcggaataattcggtgccgcagttaacacattaagcactccgcctggggagtacgtgcgcaagcatgaaactcaaangaatcgacggggacccgcacaagcagcggagatgtggtttaatacgaagcaacgcgaagaaccttaccagggcttgacatactcaggaccggtatagagatataccctcttcttcgcaagcctcaatacaggtggtgcatggttgtcgtcagctcgtgtcgtgagatgttcagttaagtctggcaacgagcgcaacccctatctttagttaccagcatttcggatggggactctaaagagactgccgatgataaatcggaggaaggtggggatgacgtcaaatcatcatgccctttatgccctgggctacacacgtgctacaatggtcggaacaaagagcgggcaagctagcgatagcaagcgaatctcaaaaagcctatctcagttcggattgttctctgcaactcgagaacatgaagtcggagttgctagtaatcgcagatcagaatgctgcggtgaatgcgttcccgggtcttgtacacc

SEQ ID NO: 281 - DNA, 1473 bp, Planococcus rifietoensis
gacgaacgctggcggcgtgcctaatacatgcaagtcgagcggagataatggagcttgctccattatcttagcggcggacgggtgagtaacacgtgggcaacctgccctgcagatcgggataactccgggaaaccggtgctaataccgaatagtttgcggcctctcatgaggctgcacggaaagacggtttcggctgtcactgcaggatgggcccgcggcgcattagctagttggtgaggtaacggctcaccaaggccacgatgcgtagccgacctgagagggtgatcggccacactgggactgagacacggcccagactcctacgggaggcagcagtagggaatcttccgcaatggacgaaagtctgacggagcaacgccgcgtgagtgaagaaggttttcggatcgtaaaactctgttgtgagggaagaacaagtaccaagtaactactggtaccttgacggtacctcaccagaaagccacggctaactacgtgccagcagccgcggtaatacgtaggtggcaagcgttgtccggaattattgggcgtaaagcgcgcgcaggcggtcctttaagtctgatgtgaaagcccacggctcaaccgtggagggtcattggaaactgggggacttgagtgcagaagaggaaagtggaattccacgtgtagcggtgaaatgcgtagagatgtggaggaacaccagtggcgaaggcgactttctggtctgtaactgacgctgaggcgcgaaagcgtggggagcaaacaggattagataccctggtagtccacgccgtaaacgatgagtgctaagtgttagggggtttccgccccttagtgctgcagctaacgcattaagcactccgcctggggagtacggccgcaaggctgaaactcaaaggaattgacgggggcccgcacaagcggtggagcatgtggtttaattcgaagcaacgcgaagaaccttaccaggtcttgacatcccgctgaccgcctaggagactaggctttcccttcggggacagcggtgacaggtggtgcatggttgtcgtcagctcgtgtcgtgagatgttgggttaagtcccgcaacgagcgcaacccttgatcttagttgccagcattcagttgggcactctaaggtgactgccggtgacaaaccggaggaaggtggggatgacgtcaaatcatcatgccccttatgacctgggctacacacgtgctacaatggacggtacaaagggctgcaaacccgcgagggggagccaatcccagaaaaccgttctcagttcggattgcaggctgcaactcgcctgcatgaagccggaatcgctagtaatcgcggatcagcatgccgcggtgaatacgttcccgggccttgtacacaccgcccgtcacaccacgagagtttgtaacacccgaagtcggtggggtaacccttacgggagccagccgccgaaggtgggacagatgattggggtg

SEQ ID NO: 282 - DNA, 1456 bp, Porphyromonas bennonis
gatgacgctagcgataggcttacacatgcaagtcgagggtaacgtgttggaagcttgcttccgatgacgacgaccggcggatgggtgcgtaacgcgtatgcaacttgcctcacagaggagaataacccggagaaatccggactaatgctccatacactcttaagtacgcctgtacatgagaggaaagatttatcgctgtgagataggcatgcgtcctattaggtagttggtgaggtaacggctcaccaagccgacgataggtaggggtgctgagaggcagatcccccacattgggactgagacacggcccaaactcctacgggaggcagcagtgaggaatattggtcaatggaggaaactctgaaccagccaagtcgcgtgaaggaagaatgtcctaaggattgtaaacttctttagcgagcgagtaaggacttccacgtgatgggagtttgaaagtagctcgagaataagtatcggctaactccgtgccagcagccgcggtaatacggaggatacgagcgttatccggatttattgggtttaaagggtgcgcaggtggtcttgcaagtcagtggtgaaaagctgaggctcaacctcagccttgccgttgaaactgcaagacttgagagtacatgatgtgggcggaatgcgtagtgtagcggtgaaatgcatagatattacgcagaactccgattgcgaaggcagctcacaaaggtatgtctgacactgaggcacgaaagcgtggggagcgaacaggattagataccctggtagtccacgccgtaaacgatgattactcgaagtatgcgatatgacagtatgcttccaagcgaaagtgataagtaatccacctggggagtacgccggcaacggtgaaactcaaaggaattgacgggggcccgcacaagcggaggaacatgtggtttaattcgatgatacgcgaggaaccttacccgggattgaaatgtatgtgagcctcttgggaaaccgagagggttctcttcggagacacatatgtaggtgctgcatggttgtcgtcagctcgtgccgtgaggtgtcggcttaagtgccataacgagcgcaacccttatcgtcagttactaacaggttaagctgaggactctggcgagactgccgtcgtaaggcgagaggaaggtggggatgacgtcaaatcagcacggcccttacatccggggcgacacacgtgttacaatggtagggacagagagtagccactcggtgacgaggagcggatcttgaaaccctatctcagttcggatcggagtctgcaactcgactccgtgaagccggattcgctagtaatcgcgcatcagccatggcgcggtgaatacgttcccgggccttgtacacaccgcccgtcaagccatggaagttgggggtacctgaagtgcgtgaccgcaaggagcgtccgagggtaaatccagtgactggggct

SEQ ID NO: 283 - DNA, 1458 bp, Porphyromonas somerae
  misc_feature (180)..(180): n is a, c, g, or t
  misc_feature (994)..(994): n is a, c, g, or t
gatgaacgctagcgataggcttaacacatgcaagtcgaggggtaacatggagagaagcttgcttcactctgatgacgaccggcggatgggtgagtaacgcgtatgcaacttgcctcttagtgggggataacccggagaaatccggactaataccgcatattcttaatttctcgcatgagntattaaggaaagatttattgctaagagataggcatgcgttccattagttagttggtgaggtaacggctcaccaaggcatcgatggataggggagctgagaggctgatcccccacattgggactgagacacggcccaaactcctacgggaggcagcagtgaggaatattggtcaatggaggaaactctgaaccagccaagtcgcgtgaaggatgacggtcctatggattgtaaacttctttagtaggtgagtaaggataggtacgtgtacctattagaaagtagcctaagaataagtatcggctaactccgtgccagcagccgcggtaatacggaggatacgagcgttatccggatttattgggtttaaagggtgcgtaggtggctgattaagtcagtggtgaaaagctatggctcaaccatagtcttgccgttgatactggttagcttgagtgtagatgatgtaggcggaatgcgtagtgtagcggtgaaatgcatagatattacgcagaactccgattgcgaaggcagcttacaaaactactactgacactgaggcacgaaagcgtgggtatcaaacaggattagataccctggtagtccacgccgtaaactatgattactcagagtatgcgatatacagtatgctctcaagcgaaagcattaagtaatccacctggggagtacgtcggcaacgatgaaactcaaaggaattgacgggggcccgcacaagcggaggaacatgtggtttaattcgatgatacgcgaggaaccttacctgggattgaaatgtataggctggcaactggaaacagntgctttcacttcggtgacttatatgtaggtgctgcatggttgtcgtcagctcgtgccgtgaggtgtcggcttaagtgccataacgagcgcaacccttatcgttagttgctaacaggttaagctgaggactctggcgagactgccgtcgtaaggcgagaggaaggtggggatgacgtcaaatcagcacggcccttatatccagggcgacacacgtgttacaatggtgaggacaaagggtagctacctggtgacaggatgccaatctccaaacctcatctcagttcggatcgaagtctgcaactcgacttcgtgaagctggattcgctagtaatcgcgcatcagccatggcgcggtgaatacgttcccgggccttgtacacaccgcccgtcaagccatggaagctgggggtacctgaagtgcgtgaccgcgaggagcgtccgagggtaagaccggtgactggggct

SEQ ID NO: 284 - DNA, 1451 bp, Prevotella bivia
gatgaacgctagctataggcttaacacatgcaagtcgaggggcagcgaatagatagcttgctatttatgtcggcgaccggcgcacgggtgagtaacgcgtatccaacctacccataactaagggataacccagcgaaagttggactaataccttatgtattcgtttgatctcatgagattacgaataaagatttatcggttatggatggggatgcgtctgattagcttgttggcggggtaacggcccaccaaggcaacgatcagtaggggttctgagaggaaggtcccccacattggaactgagacacggtccaaactcctacgggaggcagcagtgaggaatattggtcaatggacgcaagtctgaaccagccaagtagcgtgcaggatgacggccctatgggttgtaaactgcttttatatggggataaagtggggaacgtgttcccttttgcaggtaccatatgaataaggactggctaattccgtgccagcagccgcggtaatacggaaggttcgggcgttatccggatttattgggtttaaagggagcgtaggccgtttggtaagcgtgttgtgaaatgtaggagctcaacttctagattgcagcgcgaactgtcagacttgagtgcgcacaacgtaggcggaattcatggtgtagcggtgaaatgcttagatatcatgaagaactccgattgcgaaggcagcttacgggagcgcaactgacgctgaagctcgaaggtgcgggtatcgaacaggattagataccctggtagtccgcacagtaaacgatggatgcccgctgttagcacctagtgttagcggctaagcgaaagcattaagcatcccacctggggagtacgccggcaacggtgaaactcaaaggaattgacgggggcccgcacaagcggaggaacatgtggtttaattcgatgatacgcgaggaaccttacccgggcttgaattgcagatgaacgatttagagataatgaggtctttcgggacatctgtgaaggtgctgcatggttgtcgtcagctcgtgccgtgaggtgtcggcttaagtgccataacgagcgcaacccctttctttagttgccatcaggttctgctgggcactctggagatactgccaccgtaaggtgtgaggaaggtggggatgacgtcaaatcagcacggcccttacgtccggggctacacacgtgttacaatgggtggtacagatagttggtcgtgtgcaaatacgatctaatccttaaaaccattctcagttcggactggggtctgcaacccgaccccacgaagctggattcgctagtaatcgcgcatcagccatggcgcggtgaatacgttcccgggccttgtacacaccgcccgtcaagccatgaaagccgggggtgcctgaagttcgtgaccgtaaggatcgacctagggcaaaactggtaattggggct

SEQ ID NO: 285 - DNA, 1447 bp, Prevotella buccae
  misc_feature (4)..(4): n is a, c, g, or t
  misc_feature (314)..(314): n is a, c, g, or t
  misc_feature (401)..(401): n is a, c, g, or t
  misc_feature (414)..(414): n is a, c, g, or t
  misc_feature (449)..(450): n is a, c, g, or t
  misc_feature (519)..(519): n is a, c, g, or t
  misc_feature (721)..(721): n is a, c, g, or t
  misc_feature (787)..(787): n is a, c, g, or t
  misc_feature (1127)..(1127): n is a, c, g, or t
  misc_feature (1247)..(1247): n is a, c, g, or t
  misc_feature (1383)..(1383): n is a, c, g, or t
gatnaacgctggctacaggcttaacacatgcaagtcgaggggcagcatgccggttgcttgcaaccggtgatggcgaccggcgcacgggtgagtaacgcgtatccaaccttcccgcgaccaagggataacctgccgaaaggcagactaataccttatgtcctcctttgaaggcatctgacgaggagcaaagatccgtcggtcacggatggggatgcgtccgattagcttgttggcggggcaacggcccaccaaggcttcgatcggtaggggttctgagaggaaggccccccacactggaactgagacacggtccngactcctacgggaggcagcagtgaggaatattggtcaatgggcggaagcctgaaccagccaagtagcgtgcaggatgacggccctangggttgtaaactncttttatgcggggataaagttgcccacgtgtgggnntttgcaggtaccgcatgaataaggaccggctaattccgtgccagcagccgcggtaatacggaaggtccnggcgttatccggatttattgggtttaaagggagcgcaggccgccgtgcaagcgtgccgtgaaaagcagcggcccaaccgctgccctgcggcgcgaactgcttggcttgagtgcgccggaagcgggcggaattcgtggtgtagcggtgaaatgcttagatatcacgaagaaccccgattgcgaaggcagcccgctgtggcgcnactgacgctgaggctcgaaggtgcgggtatcgaacaggattagataccctggtagtccgcacggtnaacgatggatacccgctgtccggcccgtacggtctgggcggccaagcgaaagcgttaagtatcccacctggggagtacgccggcaacggtgaaactcaaaggaattgacgggggcccgcacaagcggaggaacatgtggtttaattcgatgatacgcgaggaaccttacccgggcttgaattgcaggagaatgattcagagatgatgaagtccctcgggactcctgtgaaggtgctgcatggttgtcgtcagctcgtgccgtgaggtgtcggcttaagtgccataacgagcgcaacccctctccgcagttgccatcgggtcatgccgggcactctgcggncactgccgccgcaaggtgcgaggaaggtggggatgacgtcaaatcagcacggcccttacgtccggggccacacacgtgttacaatggccggcacagagggctgtccgcatgcaagtgcgngcgaatccccaaatccggtcccagttcggactggggtctgcaacccgaccccacgaagctggattcgctagtaatcgcgcatcagccatggcgcggtgaatacgttcccgggccttgtacacaccgcccgtcaagncatgaaagccgggggtgcctgaagtccgtgaccgcgagggtcggcctagggcaaaaccggtgat

SEQ ID NO: 286 - DNA, 1441 bp, Prevotella buccalis
  misc_feature (310)..(310): n is a, c, g, or t
  misc_feature (432)..(432): n is a, c, g, or t
  misc_feature (478)..(478): n is a, c, g, or t
  misc_feature (515)..(515): n is a, c, g, or t
  misc_feature (541)..(542): n is a, c, g, or t
  misc_feature (597)..(597): n is a, c, g, or t
  misc_feature (819)..(819): n is a, c, g, or t
  misc_feature (933)..(933): n is a, c, g, or t
  misc_feature (1080)..(1081): n is a, c, g, or t
aacgctagctacaggcttaacacatgcaagtcgcagggtaacgtgagggaagcttgcttcccttgacgacgactggcgcacgggtgagtaacgcgtatccaaccttcccatgaccacgggataacccgttgaaagacggactaataccgtatgacgtcgtttgctgacatcaaataacgattaaaggtttagcggtgatggatggggatgcgtctgattagcttgttggcggggtaacggcccaccaaggcgacgatcagtaggggttctgagaggaaggtcccccacattggaactgagacacggtccnaactcctacgggaggcagcagtgaggaatattggtcaatgggcgagagcctgaaccagccaagtagcgtgcaggatgacggccctatgggttgtaaactgcttttatgcggggataaagtgngcgacgtgtcgtgcattgcaggtaccgcatgaataaggaccggctnattccgtgccagcagccgcggtaatacggaaggtccnggcgttatccggatttattgggtttnnagggagcgtaggccgccaggtaagcgtgttgtgaaatgtaccggctcaaccggtnaattgcagcgcgaactgtctggcttgagtgcacggtaagcaggcggaattcatggtgtagcggtgaaatgcttagatatcatgaagaactccgattgcgaaggcagcttgctgcagtgcgactgacgctgatgctcgaaggtgcgggtatcaaacaggattagataccctggtagtccgcacggtaaacgatggatgcccctgtccgcctttttgtggcggntggccaagcgaaagcgttaagcatcccacctggggagtacgccggcaacggtgaaactcaaaggaattgacgggggcccgcacaagcggaggaacatgtggtttaattcgatgntacgcgaggaaccttacccgggcttgaactgccagtgaacgatacagagatgttgaggccttcggggcgctggtggaggtgctgcatggttgtcgtcagctcgtgccgtgaggtgtcggcttaagtgccataacgagcgcaaccccnnttttcagttgccatcaggtaatgctgggcactctggagatactgccaccgcaaggtgtgaggaaggtggggatgacgtcaaatcagcacggcccttacgtccggggctacacacgtgttacaatggggcatacagagtgttggcttaacgcaagtttggtctaatcttcaaagtgtctcccagttcggactggggtctgcaacccgaccccacgaagctggattcgctagtaatcgcgcatcagccatggcgcggtgaatacgttcccgggccttgtacacaccgcccgtcaagccatgaaagccgggggtgcctgaagtccgtaaccgtcaaggagcggcctagggcaaaactggtgat

SEQ ID NO: 287 - DNA, 1454 bp, Prevotella copri
  misc_feature (117)..(117): n is a, c, g, or t
  misc_feature (358)..(358): n is a, c, g, or t
  misc_feature (1008)..(1008): n is a, c, g, or t
  misc_feature (1108)..(1108): n is a, c, g, or t
  misc_feature (1233)..(1234): n is a, c, g, or t
  misc_feature (1236)..(1237): n is a, c, g, or t
  misc_feature (1239)..(1239): n is a, c, g, or t
  misc_feature (1245)..(1245): n is a, c, g, or t
gatgaacgctagctacaggcttaacacatgcaagtcgaggggaaacgacatcgaaagcttgcttttgatgggcgtcgaccggcgcacgggtgagtaacgcgtatccaacctgcccancacttggggataaccttgcgaaagtaagactaatacccaatgatatctctagaagacatctgaaagagattaaagatttatcggtgatggatggggatgcgtctgattagcttgttggcggggtaacggcccaccaaggcgacgatcagtaggggttctgagaggaaggtcccccacattggaactgagacacggtccaaactcctacgggaggcagcagtgaggaatattggtcaatggncgagagcctgaaccagccaagtagcgtgcaggatgacggccctatgggttgtaaactgcttttataagggaataaagtgagcctcgtgaggctttttgcatgtaccttatgaataaggaccggctaattccgtgccagcagccgcggtaatacggaaggtccgggcgttatccggatttattgggtttaaagggagcgtaggccggagattaagcgtgttgtgaaatgtagacgctcaacgtctgcactgcagcgcgaactggtttccttgagtacgcacaaagtgggcggaattcgtggtgtagcggtgaaatgcttagatatcacgaagaactccgattgcgaaggcagctcactggagcgcaactgacgctgaagctcgaaagtgcgggtatcgaacaggattagataccctggtagtccgcacggtaaacgatggatgcccgctgttggtctgaacaggtcagcggccaagcgaaagcattaagcatcccacctggggagtacgccggcaacggtgaaactcaaaggaattgacgggggcccgcacaagcggaggaacatgtggtttaattcgatgatacgcgaggaaccttacccgggcttgaattgcagaggaaggatttggagacaatgacgcccttcggggnctctgtgaaggtgctgcatggttgtcgtcagctcgtgccgtgaggtgtcggcttaagtgccataacgagcgcaacccctctccttagttgccatcaggtnaagctgggcactctggggacactgccaccgtaaggtgtgaggaaggtggggatgacgtcaaatcagcacggcccttacgtccggggctacacacgtgttacaatggcaggtacagagagacggtnncnngnaaagtngatcaaatccttaaagcctgtctcagttcggactggggtctgcaacccgaccccacgaagctggattcgctagtaatcgcgcatcagccatggcgcggtgaatacgttcccgggccttgtacacaccgcccgtcaagccatgaaagccgggggcgcctaaagtccgtgaccgtaaggagcggcctagggcgaaactggtaattggggct

SEQ ID NO: 288 - DNA, 1454 bp, Prevotella timonensis
gatgaacgctagctacaggcttaacacatgcaagtcgcagggtaacatgaggaaagcttgctttccttgatgacgactggcgcacgggtgagtaacgcgtatccaaccttcccataactacgggataacccgttgaaagacggcctaataccgtatgatatcgtttgctgacatcaaataacgattaaaggtttagcggttatggatggggatgcgtctgattagcttgttggcggggtaacggcccaccaaggctacgatcagtaggggttctgagaggaaggtcccccacattggaactgagacacggtccaaactcctacgggaggcagcagtgaggaatattggtcaatgggcgagagcctgaaccagccaagtagcgtgcaggatgacggccctatgggttgtaaactgcttttatgtggggataaagtgcgtgacgtgtcatgcattgcaggtaccacatgaataaggaccggctaattccgtgccagcagccgcggtaatacggaaggtccgggcgttatccggatttattgggtttaaagggagcgtaggctgtctattaagcgtgttgtgaaatttaccggctcaaccggtggcttgcagcgcgaactggtcgacttgagtatgcaggaagtaggcggaattcatggtgtagcggtgaaatgcttagatatcatgacgaactccgattgcgcaggcagcttactgtagcataactgacgctgatgctcgaaagtgcgggtatcaaacaggattagataccctggtagtccgcacggtaaacgatggatgctcgctattcgtcctatttggatgagtggccaagtgaaaacattaagcatcccacctggggagtacgccggcaacggtgaaactcaaaggaattgacgggggcccgcacaagcggaggaacatgtggtttaattcgatgatacgcgaggaaccttacccgggcttgaactgccagcgaacgatacagagatgttgaggcccttcggggcgctggtggaggtgctgcatggttgtcgtcagctcgtgccgtgaggtgtcggcttaagtgccataacgagcgcaacccttttctttagttgccatcaggtgatgctgggcactctatggatactgccaccgtaaggtgtgaggaaggtggggatgacgtcaaatcagcacggcccttacgtccggggctacacacgtgttacaatggggcatacagagtgttggcttaacgcaagtttggtctaatcttcaaagtgtctcccagttcggattggggtctgcaacccgaccccatgaagctggattcgctagtaatcgcgcatcagccatggcgcggtgaatacgttcccgggccttgtacacaccgcccgtcaagccatgaaagctgggggtgcctgaagtccgtaaccgttaaggagcggcctagggcaaaactggtgattggggct

SEQ ID NO: 289 - DNA, 1372 bp, Proteus penneri
tgtatggggatctgcccgatagagggggataactactggaaacggtggctaatcccgcatgacgtctacggaccaaagcaggggctcttcggaccttgcgctatcggatgaacccatatgggattagctagtaggtgaggtaaaggctcacctaggcgacgatctctagctggtctgagaggatgatcagccacactgggactgagacacggcccagactcctacgggaggcagcagtggggaatattgcacaatgggcgcaagcctgatgcagccatgccgcgtgtatgaagaaggccttagggttgtaaagtactttcagcggggaggaaggtgataaagttaatacctttgtcaattgacgttacccgcagaagaagcaccggctaactccgtgccagcagccgcggtaatacggagggtgcaagcgttaatcggaattactgggcgtaaagcgcacgcaggcggtcaattaagtcagatgtgaaagccccgagcttaacttgggaattgcatctgaaactggttggctagagtcttgtagaggggggtagaattccatgtgtagcggtgaaatgcgtagagatgtggaggaataccggtggcgaaggcggccccctggacaaaggctgacgctcaggtgcgaaagcgtggggagcaaacaggattagataccctggtagtccacgctgtaaacgatgtcgatttagaggttgtggtcttgaaccgtggcttctggagctaacgcgttaaatcgaccgcctggggagtacggccgcaaggttaaaactcaaatgaattgacgggggcccgcacaagcggtggagcatgtggtttaattcgatgcaacgcgaagaaccttacctactcttgacatccagcgaatcctttagagatagaggagtgccttcgggaacgctgagacaggtgctgcatggctgtcgtcagctcgtgttgtgaaatgttgggttaagtcccgcaacgagcgcaacccttatcctttgttgccagcgcgtgatggcgggaactcaaaggagactgccggtgataaaccggaggaaggtggggatgacgtcaagtcatcatggcccttacgagtagggctacacacgtgctacaatggcagatacaaagagaagcgacctcgcgagagcaagcggaactcataaagtctgtcgtagtccggattggagtctgcaactcgactccatgaagtcggaatcgctagtaatcgtagatcagaatgctacggtgaatacgttcccgggccttgtacacaccgcccgtcacaccatgggagtgggttgcaaaagaagtaggtagcttaaccttcgggagggcgcttaccactttgtgattcatgactggggtg

SEQ ID NO: 290 - DNA, 1464 bp, Proteus vulgaris
attgaacgctggcggcaggcctaacacatgcaatcgagcggtaacagaagaaagcttgctttcttgctgacgagcggcggacgggtgagtaatgtatggggatctgcccgatagagggggataactactggaaacggtggctaataccgcatgacgtctacggaccaaagcaggggctcttcggaccttgcgctatcggatgaacccatatgggattagctagtaggtgaggtaatggctcacctaggcaacgatctctagctggtctgagaggatgatcagccacactgggactgagacacggcccagactcctacgggaggcagcagtggggaatattgcacaatgggcgcaagcctgatgcagccatgccgcgtgtatgaagaaggccttagggttgtaaagtactttcagcggggaggaaggtgataaagttaatacctttgtcaattgacgttacccgcagaagaagcaccggctaactccgtgccagcagccgcggtaatacggagggtgcaagcgttaatcggaattactgggcgtaaagcgcacgcaggcggtcaattaagtcagatgtgaaagccccgagcttaacttgggaattgcatctgaaactggttggctagagtcttgtagaggggggtagaattccacgtgtagcggtgaaatgcgtagagatgtggaggaataccggtggcgaaggcggccccctggacaaagactgacgctcaggtgcgaaagcgtggggagcaaacaggattagataccctggtagtccacgctgtaaacgatgtcgatttagaggttgtggtcttgaactgtggcttctggagctaacgcgttaaatcgaccgcctggggagtacggccgcaaggttaaaactcaaatgaattgacgggggcccgcacaagcggtggagcatgtggtttaattcgatgcaacgcgaagaaccttacctactcttgacatccagcgaatcctttagagatagaggagtgccttcgggaacgctgagacaggtgctgcatggctgtcgtcagctcgtgttgtgaaatgttgggttaagtcccgcaacgagcgcaacccttatcctttgttgccagcgcgtaatggcgggaactcaaaggagactgccggtgataaaccggaggaaggtggggatgacgtcaagtcatcatggcccttacgagtagggctacacacgtgctacaatggcagatacaaagagaagcgacctcgcgagagcaagcggaactcataaagtctgtcgtagtccggattggagtctgcaactcgactccatgaagtcggaatcgctagtaatcgtagatcagaatgctacggtgaatacgttcccgggccttgtacacaccgcccgtcacaccatgggagtgggttgcaaaagaagtaggtagcttaaccttcgggagggcgcttaccactttgtgattcatgactggggtg

SEQ ID NO: 291 - DNA, 1463 bp, Providencia alcalifaciens
attgaacgctggcggcaggcctaacacatgcaagtcgagcggtaacaggggaagcttgcttctcgctgacgagcggcggacgggtgagtaatgtatggggatctgcccgatagagggggataactactggaaacggtagctaataccgcataatctctaaggagcaaagcaggggaacttcggtccttgcgctatcggatgaacccatatgggattagctagttggtgaggtaatggctcaccaaggcgacgatccctagctggtctgagaggatgatcagccacactgggactgagacacggcccagactcctacgggaggcagcagtggggaatattgcacaatgggcgcaagcctgatgcagccatgccgcgtgtatgaagaaggccttagggttgtaaagtactttcagttgggaggaaggcgttgatgctaatatcatcaacgattgacgttaccaacagaagaagcaccggctaactccgtgccagcagccgcggtaatacggagggtgcaagcgttaatcggaattactgggcgtaaagcgcacgcaggcggttgattaagttagatgtgaaatccccgggcttaacctgggaatggcatctaagactggtcagctagagtcttgtagaggggggtagaattccatgtgtagcggtgaaatgcgtagagatgtggaggaataccggtggcgaaggcggccccctggacaaagactgacgctcaggtgcgaaagcgtggggagcaaacaggattagataccctggtagtccacgctgtaaacgatgtcgatttggaggttgttcccttgaggagtggcttccggagctaacgcgttaaatcgaccgcctggggagtacggccgcaaggttaaaactcaaatgaattgacgggggcccgcacaagcggtggagcatgtggtttaattcgatgcaacgcgaagaaccttacctactcttgacatccagagaatttagcagagatgctttagtgccttcgggaactctgagacaggtgctgcatggctgtcgtcagctcgtgttgtgaaatgttgggttaagtcccgcaacgagcgcaacccttatcctttgttgccagcacattatggtgggaactcaaaggagactgccggtgataaaccggaggaaggtggggatgacgtcaagtcatcatggcccttacgagtagggctacacacgtgctacaatggcgtatacaaagagaagcgacctcgcgagagcaagcggaactcataaagtacgtcgtagtccggattggagtctgcaactcgactccatgaagtcggaatcgctagtaatcgtagatcagaatgctacggtgaatacgttcccgggccttgtacacaccgcccgtcacaccatgggagtgggttgcaaaagaagtaggtagcttaaccttcgggagggcgcttaccactttgtgattcatgactggggtg

SEQ ID NO: 292 - DNA, 1465 bp, Providencia heimbachae
attgaacgctggcggcaggcctaacacatgcaagtcgagcggtaacaggggaaagcttgctttcccgctgacgagcggcggacgggtgagtaatgtatggggatctgcccgatagagggggataactactggaaacggtggctaataccgcataatctcttaggagcaaagcaggggaacttcggtccttgcgctatcggatgaacccatatgggattagctagtaggtgaggtaatggctcacctaggcgacgatccctagctggtctgagaggatgatcagccacactgggactgagacacggcccagactcctacgggaggcagcagtggggaatattgcacaatgggcgcaagcctgatgcagccatgccgcgtgtatgaagaaggccttagggttgtaaagtactttcagtcgggaggaaggcgttgatgcgaataccatcagcgattgacgttaccgacagaagaagcaccggctaactccgtgccagcagccgcggtaatacggagggtgcaagcgttaatcggaattactgggcgtaaagcgcatgcaggcggttgattaagttagatgtgaaatccccgggcttaacctgggaatggcatctaaaactggtcagctagagtcttgtagaggggggtagaattccatgtgtagcggtgaaatgcgtagagatgtggaggaataccggtggcgaaggcggccccctggacaaagactgacgctcagatgcgaaagcgtggggagcaaacaggattagataccctggtagtccacgctgtaaacgatgtcgatttgaaggttgttcccttgaggagtggctttcggagctaacgcgttaaatcgaccgcctggggagtacggccgcaaggttaaaactcaaatgaattgacgggggcccgcacaagcggtggagcatgtggtttaattcgatgcaacgcgaagaaccttacctactcttgacatccagagaatttagcagagatgctttagtgccttcgggaactctgagacaggtgctgcatggctgtcgtcagctcgtgttgtgaaatgttgggttaagtcccgcaacgagcgcaacccttatcctttgttgccagcacgtgatggtgggaactcaaaggagactgccggtgataaaccggaggaaggtggggatgacgtcaagtcatcatggcccttacgagtagggctacacacgtgctacaatggcgtatacaaagagaagcaaactcgcgagagctagcggaactcataaagtacgtcgtagtccggattggagtctgcaactcgactccatgaagtcggaatcgctagtaatcgtagatcagaatgctacggtgaatacgttcccgggccttgtacacaccgcccgtcacaccatgggagtgggttgcaaaagaagtaggtagcttaaccttcgggagggcgcttaccactttgtgattcatgactggggtg

SEQ ID NO: 293 - DNA, 1462 bp, Providencia rettgeri
attgaacgctggcggcaggcctaacacatgcaagtcgagcggtaacaggggaagcttgcttctcgctgacgagcggcggacgggtgagtaatgtatggggatctgcccgatagagggggataactactggaaacggtagctaataccgcataatctcttaggagcaaagcaggggaacttcggtccttgcgctatcggatgaacccatatgggattagctagtaggtgaggtaatggctcacctaggcgacgatccctagctggtctgagaggatgatcagccacactgggactgagacacggcccagactcctacgggaggcagcagtggggaatattgcacaatgggcgcaagcctgatgcagccatgccgcgtgtatgaagaaggccctagggttgtaaagtactttcagtcgggaggaaggcgttgatgctaatatcatcaacgattgacgttaccgacagaagaagcaccggctaactccgtgccagcagccgcggtaatacggagggtgcaagcgttaatcggaattactgggcgtaaagcgcacgcaggcggttgattaagttagatgtgaaatccccgggcttaacctgggaatggcatctaagactggtcagctagagtcttgtagaggggggtagaattccatgtgtagcggtgaaatgcgtagagatgtggaggaataccggtggcgaaggcggccccctggacaaagactgacgctcaggtgcgaaagcgtggggagcaaaccggattagataccctggtagtccacgctgtaaacgatgtcgatttgaaggttgttcccttgaggagtggctttcggagctaacgcgttaaatcgaccgcctggggagtacggccgcaaggttaaaactcaaatgaattgacgggggcccgcacaagcggtggagcatgtggtttaattcgatgcaacgcgaagaaccttacctactcttgacatccagagaacttagcagagatgctttggtgccttcgggaactctgagacaggtgctgcatggctgtcgtcagctcgtgttgtgaaatgttgggttaagtcccgcaacgagcgcaacccttatcctttgttgccagcgattcggtcgggaactcaaaggagactgccggtgataaaccggaggaaggtggggatgacgtcaagtcatcatggcccttacgagtagggctacacacgtgctacaatggcgtatacaaagagaagcgacctcgcgagagcaagcggaactcataaagtacgtcgtagtccggattggagtctgcaactcgactccatgaagtcggaatcgctagtaatcgtagatcagaatgctacggtgaatacgttcccgggccttgtacacaccgcccgtcacaccatgggagtgggttgcaaaagaagtaggtagcttaaccttcgggagggcgcttaccactttgtgattcatgactggggtt

SEQ ID NO: 294 - DNA, 1452 bp, Providencia stuartii
ggcggcaggcctaacacatgcaagtcgagcggtaacaggggaagcttgcttctcgctgacgagcggcggacgggtgagtaatgtatggggatctgcccgatagagggggataactactggaaacggtggctaataccgcataatgtcttaggagcaaagcaggggaccttcgggccttgcgctgtcggatgaacccatatgggattagctagtaggtaaggtaatggcttacctaggcgacgatccctagctggtctgagaggatgatcagccacactgggactgagacacggcccagactcctacgggaggcagcagtggggaatattgcacaatgggcgcaagcctgatgcagccatgccgcgtgtatgaagaaggccctagggttgtaaagtactttcagtcgggaggaaggcgttgatgttaataccatcaacgattgacgttaccgacagaagaagcaccggctaactccgtgccagcagccgcggtaatacggagggtgcaagcgttaatcggaattactgggcgtaaagcgcacgcaggcggttaattaagttagatgtgaaatccccgggcttaacctgggaatggcatctaagactggttagctagagtcttgtagaggggggtagaattccatgtgtagcggtgaaatgcgtagagatgtggaggaataccggtggcgaaggcggccccctggacaaagactgacgctcaggtgcgaaagcgtggggagcaaacaggattagataccctggtagtccacgctgtaaacgatgtcgatttggaggttgttccctagaggagtggcttccggagctaacgcgttaaatcgaccgcctggggagtacggccgcaaggttaaaactcaaatgaattgacgggggcccgcacaagcggtggagcatgtggtttaattcgatgcaacgcgaagaaccttacctactcttgacatccagagaatttagcagagatgctttagtgccttcgggaactctgagacaggtgctgcatggctgtcgtcagctcgtgttgtgaaatgttgggttaagtcccgcaacgagcgcaacccttatcctttgttgccagcgattcggtcgggaactcaaaggagactgccggtgataaaccggaggaaggtggggatgacgtcaagtcatcatggcccttacgagtagggctacacacgtgctacaatggcgtatacaaagagaagcgacctcgcgagagcaagcggacctcgtaaagtacgtcgtagtccggattggagtctgcaactcgactccatgaagtcggaatcgctagtaatcgtagatcagaatgctacggtgaatacgttcccgggccttgtacacaccgcccgtcacaccatgggagtgggttgcaaaagaagtaggtagcttaaccttcgggagggcgcttaccactttgtgatccatgactggggtg

SEQ ID NO: 295 - DNA, 1458 bp, Pseudomonas aeruginosa
attgaacgctggcggcaggcctaacacatgcaagtcgagcggatgaagggagcttgctcctggattcagcggcggacgggtgagtaatgcctaggaatctgcctggtagtgggggataacgtccggaaacgggcgctaataccgcatacgtcctgagggagaaagtgggggatcttcggacctcacgctatcagatgagcctaggtcggattagctagttggtggggtaaaggcctaccaaggcgacgatccgtaactggtctgagaggatgatcagtcacactggaactgagacacggtccagactcctacgggaggcagcagtggggaatattggacaatgggcgaaagcctgatccagccatgccgcgtgtgtgaagaaggtcttcggattgtaaagcactttaagttgggaggaagggcagtaagttaataccttgctgttttgacgttaccaacagaataagcaccggctaacttcgtgccagcagccgcggtaatacgaagggtgcaagcgttaatcggaattactgggcgtaaagcgcgcgtaggtggttcagcaagttggatgtgaaatccccgggctcaacctgggaactgcatccaaaactactgagctagagtacggtagagggtggtggaatttcctgtgtagcggtgaaatgcgtagatataggaaggaacaccagtggcgaaggcgaccacctggactgatactgacactgaggtgcgaaagcgtggggagcaaacaggattagataccctggtagtccacgccgtaaacgatgtcgactagccgttgggatccttgagatcttagtggcgcagctaacgcgataagtcgaccgcctggggagtacggccgcaaggttaaaactcaaatgaattgacgggggcccgcacaagcggtggagcatgtggtttaattcgaagcaacgcgaagaaccttacctggccttgacatgctgagaactttccagagatggattggtgccttcgggaactcagacacaggtgctgcatggctgtcgtcagctcgtgtcgtgagatgttgggttaagtcccgtaacgagcgcaacccttgtccttagttaccagcacctcgggtgggcactctaaggagactgccggtgacaaaccggaggaaggtggggatgacgtcaagtcatcatggcccttacggccagggctacacacgtgctacaatggtcggtacaaagggttgccaagccgcgaggtggagctaatcccataaaaccgatcgtagtccggatcgcagtctgcaactcgactgcgtgaagtcggaatcgctagtaatcgtgaatcagaatgtcacggtgaatacgttcccgggccttgtacacaccgcccgtcacaccatgggagtgggttgctccagaagtagctagtctaaccgcaagggggacggttaccacggagtgattcatgactggggtg

SEQ ID NO: 296 - DNA, 1459 bp, Pseudomonas alcaligenes
attgaacgctggcggcaggcctaacacatgcaagtcgagcggatgagtggagcttgctccatgattcagcggcggacgggtgagtaatgcctaggaatctgcctggtagtgggggacaacgtttcgaaaggaacgctaataccgcatacgtcctacgggagaaagcaggggaccttcgggccttgcgctatcagatgagcctaggtcggattagctagtaggtgaggtaatggctcacctaggcgacgatccgtaactggtctgagaggatgatcagtcacactggaactgagacacggtccagactcctacgggaggcagcagtggggaatattggacaatgggcgaaagcctgatccagccatgccgcgtgtgtgaagaaggtcttcggattgtaaagcactttaagttgggaggaagggcagtaagttaataccttgctgttttgacgttaccaacagaataagcaccggctaacttcgtgccagcagccgcggtaatacgaagggtgcaagcgttaatcggaattactgggcgtaaagcgcgcgtaggtggttcagcaagttggaggtgaaatccccgggctcaacctgggaactgcctccaaaactactgagctagagtacggtagagggtagtggaatttcctgtgtagcggtgaaatgcgtagatataggaaggaacaccagtggcgaaggcgactacctggactgatactgacactgaggtgcgaaagcgtggggagcaaacaggattagataccctggtagtccacgccgtaaacgatgtcgactagccgttgggatccttgagatcttagtggcgcagctaacgcattaagtcgaccgcctggggagtacggccgcaaggttaaaactcaaatgaattgacgggggcccgcacaagcggtggagcatgtggtttaattcgaagcaacgcgaagaaccttacctggccttgacatgctgagaactttccagagatggattggtgccttcgggaactcagacacaggtgctgcatggctgtcgtcagctcgtgtcgtgagatgttgggttaagtcccgtaacgagcgcaacccttgtccttagttaccagcacgttatggtgggcactctaaggagactgccggtgacaaaccggaggaaggtggggatgacgtcaagtcatcatggcccttacggccagggctacacacgtgctacaatggtcggtacaaagggttgccaagccgcgaggtggagctaatcccataaaaccgatcgtagtccggatcgcagtctgcaactcgactgcgtgaagtcggaatcgctagtaatcgtgaatcagaatgtcacggtgaatacgttcccgggccttgtacacaccgcccgtcacaccatgggagtgggttgctccagaagtagctagtctaaccgcaagggggacggttaccacggagtgattcatgactggggtg

SEQ ID NO: 297 - DNA, 1459 bp, Pseudomonas bauzanensis
attgaacgctggcggcaggcctaacacatgcaagtcgagcggaagaagggagcttgctcccggatttagcggcggacgggtgagtaacacctgggaatctgcctgatagtgggggataacgtccggaaacgggcgctaataccgcgtacgtcctacgggagaaagcaggggatcttcggaccttgcgctatcagatgagcccaggtcggattagcttgttggtgaggtaatggctcaccaaggcgacgatccgtaactggtctgagaggatgatcagtcacactggaactgagacacggtccagactcctacgggaggcagcagtggggaatattggacaatgggggcaaccctgatccagccatgccgcgtgtgtgaagaaggtcttcggattgtaaagcactttaagttgggaggaagggttgtggattaatactctacaattttgacgttaccgacagaataagcaccggctaactctgtgccagcagccgcggtaatacagagggtgcaagcgttaatcggaattactgggcgtaaagcgcgcgtaggtggttcagtaagatgggtgtgaaatccccgggctcaacctgggaactgcatccataactgctgggctagagtacggtagagggtagtggaatttcctgtgtagcggtgaaatgcgtagatataggaaggaacaccagtggcgaaggcgactacctggactgatactgacactgaggtgcgaaagcgtggggagcaaacaggattagataccctggtagtccacgccgtaaacgatgtcaactagccgttgggaaccttgagttcttagtggcgcagctaacgcactaagttgaccgcctggggagtacggtcgcaagattaaaactcaaatgaattgacgggggcccgcacaagcggtggagcatgtggtttaattcgaagcaacgcgaagaaccttacctggccttgacatgcagagaactttccagagatggattggtgccttcgggaactctgacacaggtgctgcatggctgtcgtcagctcgtgtcgtgagatgttgggttaagtcccgtaacgagcgcaacccttgtccttagttaccagcacgttatggtgggcactctaaggagactgccggtgacaaaccggaggaaggtggggatgacgtcaagtcatcatggcccttacggccagggctacacacgtgctacaatgggggatacaaagggttgccaagccgcgaggtggagctaatcccataaagtctctcgtagtccggattggagtctgcaactcgactccatgaagtcggaatcgctagtaatcgtggatcagaatgccacggtgaatacgttcccgggccttgtacacaccgcccgtcacaccatgggagtgggttgcaccagaagtagctagtctaaccttcgggaggacggttaccacggtgtgattcatgactggggtg

SEQ ID NO: 298 - DNA, 1441 bp, Pseudomonas caricapapayae
ctaacacatgcaagtcgagcggcagcacgggtacttgtacctggtggcgagcggcggacgggtgagtaatgcctaggaatctgcctggtagtgggggataacgctcggaaacggacgctaataccgcatacgtcctacgggagaaagcaggggaccttcgggccttgcgctatcagatgagcctaggtcggattagctagttggtgaggtaatggctcaccaaggcgacgatccgtaactggtctgagaggatgatcagtcacactggaactgagacacggtccagactcctacgggaggcagcagtggggaatattggacaatgggccaaagcctgatccagccatgccgcgtgtgtgaagaaggtcttcggattgtaaagcactttaagttgggaggaagggcagttacctaatacgtgactgttttgacgttaccgacagaataagcaccggctaactctgtgccagcagccgcggtaatacagagggtgcaagcgttaatcggaattactgggcgtaaagcgcgcgtaggtggtttgttaagttggatgtgaaatccccgggctcaacctgggaactgcatccaaaactggcaagctagagtatggtagagggtggtggaatttcctgtgtagcggtgaaatgcgtagatataggaaggaacaccagtggcgaaggcgaccacctggactgatactgacactgaggtgcgaaagcgtggggagcaaacaggattagataccctggtagtccacgccgtaaacgatgtcaactagccgttgggagccttgagctcttagtggcgcagctaacgcattaagttgaccgcctggggagtacggccgcaaggttaaaactcaaatgaattgacgggggcccgcacaagcggtggagcatgtggtttaattcgaagcaacgcgaagaaccttaccaggccttgacatccaatgaactttccagagatggattggtgccttcgggagcattgagacaggtgctgcatggctgtcgtcagctcgtgtcgtgagatgttgggttaagtcccgtaacgagcgcaacccttgtccttagttaccagcacgttatggtgggcactctaaggagactgccggtgacaaaccggaggaaggtggggatgacgtcaagtcatcatggcccttacggcctgggctacacacgtgctacaatggtcggtacagagggttgccaagccgcgaggtggagctaatctcacaaaaccgatcgtagtccggatcgcagtctgcaactcgactgcgtgaagtcggaatcgctagtaatcgcgaatcagaatgtcgcggtgaatacgttcccgggccttgtacacaccgcccgtcacaccatgggagtgggttgcaccagaagtagctagtctaaccttcggggggacggttaccacggtgtgattcatgactggggtg

SEQ ID NO: 299 - DNA, 1459 bp, Pseudomonas chlororaphis
attgaacgctggcggcaggcctaacacatgcaagtcgagcggtagagaggagcttgcttctcttgagagcggcggacgggtgagtaatgcctaggaatctgcctggtagtgggggataacgttcggaaacggacgctaataccgcatacgtcctacgggagaaagcaggggaccttcgggccttgcgctatcagatgagcctaggtcggattagctagttggtgaggtaatggctcaccaaggcgacgatccgtaactggtctgagaggatgatcagtcacactggaactgagacacggtccagactcctacgggaggcagcagtggggaatattggacaatgggcgaaagcctgatccagccatgccgcgtgtgtgaagaaggtcttcggattgtaaagcactttaagttgggaggaagggtacttacctaatacgtgagtattttgacgttaccgacagaataagcaccggctaactctgtgccagcagccgcggtaatacagagggtgcaagcgttaatcggaattactgggcgtaaagcgcgcgtaggtggttcgttaagttgaatgtgaaatccccgggctcaacctgggaactgcatccaaaactggcgagctagagtatggtagagggtggtggaatttcctgtgtagcggtgaaatgcgtagatataggaaggaacaccagtggcgaaggcgaccacctggactgatactgacactgaggtgcgaaagcgtggggagcaaacaggattagataccctggtagtccacgccgtaaacgatgtcaactagccgttgggagccttgagctcttagtggcgcagctaacgcattaagttgaccgcctggggagtacggccgcaaggttaaaactcaaatgaattgacgggggcccgcacaagcggtggagcatgtggtttaattcgaagcaacgcgaagaaccttaccaggccttgacatccaatgaactttccagagatggattggtgccttcgggaacattgagacaggtgctgcatggctgtcgtcagctcgtgtcgtgagatgttgggttaagtcccgtaacgagcgcaacccttgtccttagttaccagcacgtaatggtgggcactctaaggagactgccggtgacaaaccggaggaaggtggggatgacgtcaagtcatcatggcccttacggcctgggctacacacgtgctacaatggtcggtacagagggttgccaagccgcgaggtggagctaatcccataaaaccgatcgtagtccggatcgcagtctgcaactcgactgcgtgaagtcggaatcgctagtaatcgcgaatcagaatgtcgcggtgaatacgttcccgggccttgtacacaccgcccgtcacaccatgggagtgggttgcaccagaagtagctagtctaaccttcgggaggacggttaccacggtgtgattcatgactggggtg

SEQ ID NO: 300 - DNA, 1459 bp, Pseudomonas fluorescens
attgaacgctggcggcaggcctaacacatgcaagtcgagcggtagagagaagcttgcttctcttgagagcggcggacgggtgagtaaagcctaggaatctgcctggtagtgggggataacgttcggaaacggacgctaataccgcatacgtcctacgggagaaagcaggggaccttcgggccttgcgctatcagatgagcctaggtcggattagctagttggtgaggtaatggctcaccaaggcgacgatccgtaactggtctgagaggatgatcagtcacactggaactgagacacggtccagactcctacgggaggcagcagtggggaatattggacaatgggcgaaagcctgatccagccatgccgcgtgtgtgaagaaggtcttcggattgtaaagcactttaagttgggaggaagggcattaacctaatacgttagtgttttgacgttaccgacagaataagcaccggctaactctgtgccagcagccgcggtaatacagagggtgcaagcgttaatcggaattactgggcgtaaagcgcgcgtaggtggtttgttaagttggatgtgaaatccccgggctcaacctgggaactgcattcaaaactgactgactagagtatggtagagggtggtggaatttcctgtgtagcggtgaaatgcgtagatataggaaggaacaccagtggcgaaggcgaccacctggactaatactgacactgaggtgcgaaagcgtggggagcaaacaggattagataccctggtagtccacgccgtaaacgatgtcaactagccgttgggagccttgagctcttagtggcgcagctaacgcattaagttgaccgcctggggagtacggccgcaaggttaaaactcaaatgaattgacgggggcccgcacaagcggtggagcatgtggtttaattcgaagcaacgcgaagaaccttaccaggccttgacatccaatgaactttctagagatagattggtgccttcgggaacattgagacaggtgctgcatggctgtcgtcagctcgtgtcgtgagatgttgggttaagtcccgtaacgagcgcaacccttgtccttagttaccagcacgtaatggtgggcactctaaggagactgccggtgacaaaccggaggaaggtggggatgacgtcaagtcatcatggcccttacggcctgggctacacacgtgctacaatggtcggtacagagggttgccaagccgcgaggtggagctaatcccacaaaaccgatcgtagtccggatcgcagtctgcaactcgactgcgtgaagtcggaatcgctagtaatcgcgaatcagaatgtcgcggtgaatacgttcccgggccttgtacacaccgcccgtcacaccatgggagtgggttgcaccagaagtagctagtctaaccttcgggaggacggttaccacggtgtgattcatgactggggtg

SEQ ID NO: 301 - DNA, 1459 bp, Pseudomonas fragi
attgaacgctggcggcaggcctaacacatgcaagtcgagcggtagagagaagcttgcttctcttgagagcggcggacgggtgagtaatacctaggaatctgcctgatagtgggggataacgttcggaaacggacgctaataccgcatacgtcctacgggagaaagcaggggaccttcgggccttgcgctatcagatgagcctaggtcggattagctagttggtgaggtaatggctcaccaaggctacgatccgtaactggtctgagaggatgatcagtcacactggaactgagacacggtccagactcctacgggaggcagcagtggggaatattggacaatgggcgaaagcctgatccagccatgccgcgtgtgtgaagaaggtcttcggattgtaaagcactttaagttgggaggaagggcattaacctaatacgttggtgtcttgacgttaccgacagaataagcaccggctaactctgtgccagcagccgcggtaatacagagggtgcaagcgttaatcggaattactgggcgtaaagcgcgcgtaggtggtttgttaagttggatgtgaaatccccgggctcaacctgggaactgcatccaaaactggcaagctagagtatggtagagggtagtggaatttcctgtgtagcggtgaaatgcgtagatataggaaggaacaccagtggcgaaggcgactacctggactgatactgacactgaggtgcgaaagcgtggggagcaaacaggattagataccctggtagtccacgccgtaaacgatgtcaactagccgttgggagtcttgaactcttagtggcgcagctaacgcattaagttgaccgcctggggagtacggccgcaaggttaaaactcaaatgaattgacgggggcccgcacaagcggtggagcatgtggtttaattcgaagcaacgcgaagaaccttaccaggccttgacatccaatgaactttctagagatagattggtgccttcgggaacattgagacaggtgctgcatggctgtcgtcagctcgtgtcgtgagatgttgggttaagtcccgtaacgagcgcaacccttgtccttagttaccagcacgtaatggtgggcactctaaggagactgccggtgacaaaccggaggaaggtggggatgacgtcaagtcatcatggcccttacggcctgggctacacacgtgctacaatggtcggtacaaagggttgccaagccgcgaggtggagctaatcccataaaaccgatcgtagtccggatcgcagtctgcaactcgactgcgtgaagtcggaatcgctagtaatcgtgaatcagaatgtcacggtgaatacgttcccgggccttgtacacaccgcccgtcacaccatgggagtgggttgcaccagaagtagctagtctaaccttcgggaggacggttaccacggtgtgattcatgactggggtg

SEQ ID NO: 302 - DNA, 1459 bp, Pseudomonas fulva
attgaacgctggcggcaggcctaacacatgcaagtcgagcggatgacaggagcttgctcctggattcagcggcggacgggtgagtaatgcctaggaatctgcctggtagtgggggacaacgtttcgaaaggaacgctaataccgcatacgtcctacgggagaaagcaggggaccttcgggccttgcgctatcagatgagcctaggtcggattagcttgttggtgaggtaatggctcaccaaggcgacgatccgtaactggtctgagaggatgatcagtcacactggaactgagacacggtccagactcctacgggaggcagcagtggggaatattggacaatgggcgaaagcctgatccagccatgccgcgtgtgtgaagaaggtcttcggattgtaaagcactttaagttgggaggaagggttgtagattaatactctgcaattttgacgttaccgacagaataagcaccggctaactctgtgccagcagccgcggtaatacagagggtgcaagcgttaatcggaattactgggcgtaaagcgcgcgtaggtggtttgttaagttggatgtgaaagccccgggctcaacctgggaactgcatccaaaactggcaagctagagtacggtagagggtggtggaatttcctgtgtagcggtgaaatgcgtagatataggaaggaacaccagtggcgaaggcgaccacctggactgatactgacactgaggtgcgaaagcgtggggagcaaacaggattagataccctggtagtccacgccgtaaacgatgtcaactagccgttggaatccttgagattttagtggcgcagctaacgcattaagttgaccgcctggggagtacggccgcaaggttaaaactcaaatgaattgacgggggcccgcacaagcggtggagcatgtggtttaattcgaagcaacgcgaagaaccttaccaggccttgacatgcagagaactttccagagatggattggtgccttcgggaactctgacacaggtgctgcatggctgtcgtcagctcgtgtcgtgagatgttgggttaagtcccgtaacgagcgcaacccttgtccttagttaccagcacgttatggtgggcactctaaggagactgccggtgacaaaccggaggaaggtggggatgacgtcaagtcatcatggcccttacggcctgggctacacacgtgctacaatggtcggtacagagggttgccaagccgcgaggtggagctaatctcacaaaaccgatcgtagtccggatcgcagtctgcaactcgactgcgtgaagtcggaatcgctagtaatcgcgaatcagaatgtcgcggtgaatacgttcccgggccttgtacacaccgcccgtcacaccatgggagtgggttgcaccagaagtagctagtctaaccttcggggggacggttaccacggtgtgattcatgactggggtg

SEQ ID NO: 303 - DNA, 1459 bp, Pseudomonas gessardii
attgaacgctggcggcaggcctaacacatgcaagtcgagcggtagagagaagcttgcttctcttgagagcggcggacgggtgagtaatgcctaggaatctgcctggtagtgggggataacgttcggaaacggacgctaataccgcatacgtcctacgggagaaagcaggggaccttcgggccttgcgctatcagatgagcctaggtcggattagctagttggtggggtaatggctcaccaaggcgacgatccgtaactggtctgagaggatgatcagtcacactggaactgagacacggtccagactcctacgggaggcagcagtggggaatattggacaatgggcgaaagcctgatccagccatgccgcgtgtgtgaagaaggtcttcggattgtaaagcactttaagttgggaggaagggttgtagattaatactctgcaattttgacgttaccgacagaataagcaccggctaactctgtgccagcagccgcggtaatacagagggtgcaagcgttaatcggaattactgggcgtaaagcgcgcgtaggtggttagttaagttggatgtgaaatccccgggctcaacctgggaactgcattcaaaactgactgactagagtatggtagagggtggtggaatttcctgtgtagcggtgaaatgcgtagatataggaaggaacaccagtggcgaaggcgaccacctggactgatactgacactgaggtgcgaaagcgtggggagcaaacaggattagataccctggtagtccacgccgtaaacgatgtcaactagccgttgggagccttgagctcttagtggcgcagctaacgcattaagttgaccgcctggggagtacggccgcaaggttaaaactcaaatgaattgacgggggcccgcacaagcggtggagcatgtggtttaattcgaagcaacgcgaagaaccttaccaggccttgacatccaatgaactttctagagatagattggtgccttcgggaacattgagacaggtgctgcatggctgtcgtcagctcgtgtcgtgagatgttgggttaagtcccgtaacgagcgcaacccttgtccttagttaccagcacgttatggtgggcactctaaggagactgccggtgacaaaccggaggaaggtggggatgacgtcaagtcatcatggcccttacggcctgggctacacacgtgctacaatggtcggtacagagggttgccaagccgcgaggtggagctaatcccacaaaaccgatcgtagtccggatcgcagtctgcaactcgactgcgtgaagtcggaatcgctagtaatcgcgaatcagaatgtcgcggtgaatacgttcccgggccttgtacacaccgcccgtcacaccatgggagtgggttgcaccagaagtagctagtctaaccttcgggaggacggttaccacggtgtgattcatgactggggtg

SEQ ID NO: 304 - DNA, 1459 bp, Pseudomonas japonica
attgaacgctggcggcaggcctaacacatgcaagtcgagcggatgagaagagcttgctcttcgagttagcggcggacgggtgagtaatgcctaggaatctgcctggtagtgggggacaacgtttcgaaaggaacgctaataccgcatacgtcctacgggagaaagcaggggaccttcgggccttgcgctatcagatgagcctaggtcggattagctagttggtgaggtaatggctcaccaaggcgacgatccgtaactggtctgagaggatgatcagtcacactggaactgagacacggtccagactcctacgggaggcagcagtggggaatattggacaatgggcgaaagcctgatccagccatgccgcgtgtgtgaagaaggtcttcggattgtaaagcactttaagttgggaggaagggcagtaagcgaataccttgctgttttgacgttaccgacagaataagcaccggctaactctgtgccagcagccgcggtaatacagagggtgcaagcgttaatcggaattactgggcgtaaagcgcgcgtaggtggttcgttaagttgaatgtgaaagccccgggctcaacctgggaactgcatccaaaactggcgagctagagtagggcagagggtggtggaatttcctgtgtagcggtgaaatgcgtagatataggaaggaacaccagtggcgaaggcgaccacctgggctcatactgacactgaggtgcgaaagcgtggggagcaaacaggattagataccctggtagtccacgccgtaaacgatgtcaactagccgttggaatccttgagattttagtggcgcagctaacgcattaagttgaccgcctggggagtacggccgcaaggttaaaactcaaatgaattgacgggggcccgcacaagcggtggagcatgtggtttaattcgaagcaacgcgaagaaccttaccaggccttgacatgcagagaactttccagagatggattggtgccttcgggaactctgacacaggtgctgcatggctgtcgtcagctcgtgtcgtgagatgttgggttaagtcccgtaacgagcgcaacccttgtccttagttaccagcacgttaaggtgggcactctaaggagactgccggtgacaaaccggaggaaggtggggatgacgtcaagtcatcatggcccttacggcctgggctacacacgtgctacaatggtcggtacagagggttgccaagccgcgaggtggagctaatctcacaaaaccgatcgtagtccggatcgcagtctgcaactcgactgcgtgaagtcggaatcgctagtaatcgcgaatcagaatgtcgcggtgaatacgttcccgggccttgtacacaccgcccgtcacaccatgggagtgggttgcaccagaagtagctagtctaaccttcgggaggacggttaccacggtgtgattcatgactggggtg

SEQ ID NO: 305 - DNA, 1459 bp, Pseudomonas libanensis
attgaacgctggcggcaggcctaacacatgcaagtcgagcggtagagagaagcttgcttctcttgagagcggcggacgggtgagtaatgcctaggaatctgcctggtagtgggggataacgttcggaaacggacgctaataccgcatacgtcctacgggagaaagcaggggaccttcgggccttgcgctatcagatgagcctaggtcggattagctagttggtggggtaatggctcaccaaggcgacgatccgtaactggtctgagaggatgatcagtcacactggaactgagacacggtccagactcctacgggaggcagcagtggggaatattggacaatgggcgaaagcctgatccagccatgccgcgtgtgtgaagaaggtcttcggattgtaaagcactttaagttgggaggaagggttgtagattaatactctgcaattttgacgttaccgacagaataagcaccggctaactctgtgccagcagccgcggtaatacagagggtgcaagcgttaatcggaattactgggcgtaaagcgcgcgtaggtggtttgttaagttggatgtgaaatccccgggctcaacctgggaactgcattcaaaactgactgactagagtatggtagagggtggtggaatttcctgtgtagcggtgaaatgcgtagatataggaaggaacaccagtggcgaaggcgaccacctggactgatactgacactgaggtgcgaaagcgtggggagcaaacaggattagataccctggtagtccacgccgtaaacgatgtcaactagccgttgggagccttgagctcttagtggcgcagctaacgcattaagttgaccgcctggggagtacggccgcaaggttaaaactcaaatgaattgacgggggcccgcacaagcggtggagcatgtggtttaattcgaagcaacgcgaagaaccttaccaggccttgacatccaatgaactttctagagatagattggtgccttcgggaacattgagacaggtgctgcatggctgtcgtcagctcgtgtcgtgagatgttgggttaagtcccgtaacgagcgcaacccttgtccttagttaccagcacgtcatggtgggcactctaaggagactgccggtgacaaaccggaggaaggtggggatgacgtcaagtcatcatggcccttacggcctgggctacacacgtgctacaatggtcggtacagagggttgccaagccgcgaggtggagctaatcccagaaaaccgatcgtagtccggatcgcagtctgcaactcgactgcgtgaagtcggaatcgctagtaatcgcgaatcagaatgtcgcggtgaatacgttcccgggccttgtacacaccgcccgtcacaccatgggagtgggttgcaccagaagtagctagtctaaccttcgggaggacggttaccacggtgtgattcatgactggggtg

SEQ ID NO: 306 - DNA, 1459 bp, Pseudomonas lundensis
attgaacgctggcggcaggcctaacacatgcaagtcgagcggtagagaggtgcttgcacctcttgagagcggcggacgggtgagtaatacctaggaatctgcctggtagtgggggataacgttcggaaacggacgctaataccgcatacgtcctacgggagaaagcaggggaccttcgggccttgcgctatcagatgagcctaggtcggattagctagttggtgaggtaatggctcaccaaggctacgatccgtaactggtctgagaggatgatcagtcacactggaactgagacacggtccagactcctacgggaggcagcagtggggaatattggacaatgggcgaaagcctgatccagccatgccgcgtgtgtgaagaaggtcttcggattgtaaagcactttaagttgggaggaagggcattaacctaatacgttagtgttttgacgttaccgacagaataagcaccggctaactctgtgccagcagccgcggtaatacagagggtgcaagcgttaatcggaattactgggcgtaaagcgcgcgtaggtggtttgttaagttgaatgtgaaatccccgggctcaacctgggaactgcatccaaaactggcaagctagagtatggtagagggtagtggaatttcctgtgtagcggtgaaatgcgtagatataggaaggaacaccagtggcgaaggcgactacctggactgatactgacactgaggtgcgaaagcgtggggagcaaacaggattagataccctggtagtccacgccgtaaacgatgtcaactagccgttgggaaccttgagttcttagtggcgcagctaacgcattaagttgaccgcctggggagtacggccgcaaggttaaaactcaaatgaattgacgggggcccgcacaagcggtggagcatgtggtttaattcgaagcaacgcgaagaaccttaccaggccttgacatccaatgaactttccagagatggattggtgccttcgggaacattgagacaggtgctgcatggctgtcgtcagctcgtgtcgtgagatgttgggttaagtcccgtaacgagcgcaacccttgtccttagttaccagcacgtaatggtgggcactctaaggagactgccggtgacaaaccggaggaaggtggggatgacgtcaagtcatcatggcccttacggcctgggctacacacgtgctacaatggtcggtacaaagggttgccaagccgcgaggtggagctaatcccataaaaccgatcgtagtccggatcgcagtctgcaactcgactgcgtgaagtcggaatcgctagtaatcgtgaatcagaatgtcacggtgaatacgttcccgggccttgtacacaccgcccgtcacaccatgggagtgggttgcaccagaagtagctagtctaaccctcgggaggacggttaccacggtgtgattcatgactggggtg

SEQ ID NO: 307 - DNA, 1459 bp, Pseudomonas luteola
attgaacgctggcggcaggcctaacacatgcaagtcgagcggatgaggagagcttgctctctgattcagcggcggacgggtgagtaatgcctaggaatctgcctggtagtgggggacaacgtttcgaaaggaacgctaataccgcatacgtcctacgggagaaagtgggggatcttcggacctcacgctatcagatgagcctaggtcggattagctagttggtggggtaacggctcaccaaggcgacgatccgtaactggtctgagaggatgatcagtcacactggaactgagacacggtccagactcctacgggaggcagcagtggggaatattggacaatgggcgaaagcctgatccagccatgccgcgtgtgtgaagaaggccctcgggtcgtaaagcactttaagctgggaggaagggttgtaacctaatacgttgcagctttgacgttaccagcagaataagcaccggctaactctgtgccagcagccgcggtaatacagagggtgcaagcgttaatcggaattactgggcgtaaagcgcgcgtaggtggcttggtaagttgaatgtgaaatccccgggctcaacctgggaactgcatccaaaactgcctggctagagtacggtagagggtggtggaatttcctgtgtagcggtgaaatgcgtagatataggaaggaacaccagtggcgaaggcgaccacctggactgatactgacactgaggtgcgaaagcgtggggagcaaacaggattagataccctggtagtccacgccgtaaacgatgtcaactagccgttggggtccttgagactttagtggcgcagctaacgcaataagttgaccgcctggggagtacggccgcaaggttaaaactcaaatgaattgacgggggcccgcacaagcggtggagcatgtggtttaattcgaagcaacgcgaagaaccttaccaggccttgacatgcagagaactttccagagatggattggtgccttcgggaactctgacacaggtgctgcatggctgtcgtcagctcgtgtcgtgagatgttgggttaagtcccgtaacgagcgcaacccttgtccttagttaccagcacatcatggtgggcactctaaggagactgccggtgacaaaccggaggaaggtggggatgacgtcaagtcatcatggcccttacggcctgggctacacacgtgctacaatggtcggtacaaagggttgccaaaccgcgaggtggagctaatcccataaaaccgatcgtagtccggatcgcagtctgcaactcgactgcgtgaagtcggaatcgctagtaatcgtgaatcagaacgtcacggtgaatacgttcccgggccttgtacacaccgcccgtcacaccatgggagtgggttgcaccagaagtagctagtctaaccttcgggaggacggttaccacggtgtgattcatgactggggtg

SEQ ID NO: 308 - DNA, 1459 bp, Pseudomonas migulae
attgaacgctggcggcaggcctaacacatgcaagtcgagcggtagagagaagcttgcttctcttgagagcggcggacgggtgagtaatgcctaggaatctgcctggtagtgggggataacgctcggaaacggacgctaataccgcatacgtcctacgggagaaagcaggggaccttcgggccttgcgctatcagatgagcctaggtcggattagctagttggtgaggtaatggctcaccaaggcgacgatccgtaactggtctgagaggatgatcagtcacactggaactgagacacggtccagactcctacgggaggcagcagtggggaatattggacaatgggcgaaagcctgatccagccatgccgcgtgtgtgaagaaggtcttcggattgtaaagcactttaagttgggaggaagggcagtaaattaatactttgctgttttgacgttaccgacagaataagcaccggctaactctgtgccagcagccgcggtaatacagagggtgcaagcgttaatcggaattactgggcgtaaagcgcgcgtaggtggtttgttaagttggatgtgaaatccccgggctcaacctgggaactgcattcaaaactgacaagctagagtatggtagagggtggtggaatttcctgtgtagcggtgaaatgcgtagatataggaaggaacaccagtggcgaaggcgaccacctggactgatactgacactgaggtgcgaaagcgtggggagcaaacaggattagataccctggtagtccacgccgtaaacgatgtcaactagccgttgggagccttgagctcttagtggcgcagctaacgcattaagttgaccgcctggggagtacggccgcaaggttaaaactcaaatgaattgacgggggcccgcacaagcggtggagcatgtggtttaattcgaagcaacgcgaagaaccttaccaggccttgacatccaatgaactttccagagatggattggtgccttcgggaacattgagacaggtgctgcatggctgtcgtcagctcgtgtcgtgagatgttgggttaagtcccgtaacgagcgcaacccttgtccttagttaccagcacgttatggtgggcactctaaggagactgccggtgacaaaccggaggaaggtggggatgacgtcaagtcatcatggcccttacggcctgggctacacacgtgctacaatggtcggtacagagggttgccaagccgcgaggtggagctaatcccacaaaaccgatcgtagtccggatcgcagtctgcaactcgactgcgtgaagtcggaatcgctagtaatcgcgaatcagaatgtcgcggtgaatacgttcccgggccttgtacacaccgcccgtcacaccatgggagtgggttgcaccagaagtagctagtctaaccttcgggaggacggttaccacggtgtgattcatgactggggtg

SEQ ID NO: 309 - DNA, 1459 bp, Pseudomonas monteilii
attgaacgctggcggcaggcctaacacatgcaagtcgagcggatgacgggagcttgctccttgattcagcggcggacgggtgagtaatgcctaggaatctgcctggtagtgggggacaacgtttcgaaaggaacgctaataccgcatacgtcctacgggagaaagcaggggaccttcgggccttgcgctatcagatgagcctaggtcggattagctagttggtggggtaatggctcaccaaggcgacgatccgtaactggtctgagaggatgatcagtcacactggaactgagacacggtccagactcctacgggaggcagcagtggggaatattggacaatgggcgaaagcctgatccagccatgccgcgtgtgtgaagaaggtcttcggattgtaaagcactttaagttgggaggaagggcagtaagttaataccttgctgttttgacgttaccgacagaataagcaccggctaactctgtgccagcagccgcggtaatacagagggtgcaagcgttaatcggaattactgggcgtaaagcgcgcgtaggtggttcgttaagttggatgtgaaagccccgggctcaacctgggaactgcatccaaaactggcgagctagagtacggtagagggtggtggaatttcctgtgtagcggtgaaatgcgtagatataggaaggaacaccagtggcgaaggcgaccacctggactgatactgacactgaggtgcgaaagcgtggggagcaaacaggattagataccctggtagtccacgccgtaaacgatgtcaactagccgttggaatccttgagattttagtggcgcagctaacgcattaagttgaccgcctggggagtacggccgcaaggttaaaactcaaatgaattgacgggggcccgcacaagcggtggagcatgtggtttaattcgaagcaacgcgaagaaccttaccaggccttgacatgcagagaactttccagagatggattggtgccttcgggaactctgacacaggtgctgcatggctgtcgtcagctcgtgtcgtgagatgttgggttaagtcccgtaacgagcgcaacccttgtccttagttaccagcacgtaatggtgggcactctaaggagactgccggtgacaaaccggaggaaggtggggatgacgtcaagtcatcatggcccttacggcctgggctacacacgtgctacaatggtcggtacagagggttgccaagccgcgaggtggagctaatctcacaaaaccgatcgtagtccggatcgcagtctgcaactcgactgcgtgaagtcggaatcgctagtaatcgcgaatcagaatgtcgcggtgaatacgttcccgggccttgtacacaccgcccgtcacaccatgggagtgggttgcaccagaagtagctagtctaaccttcgggaggacggttaccacggtgtgattcatgactggggtg

SEQ ID NO: 310 - DNA, 1458 bp, Pseudomonas mosselii
attgaacgctgcggcaggcctaacacatgcaagtcgagcggatgacgggagcttgctccttgattcagcggcggacgggtgagtaatgcctaggaatctgcctggtagtgggggacaacgtttcgaaaggaacgctaataccgcatacgtcctacgggagaaagcaggggaccttcgggccttgcgctatcagatgagcctaggtcggattagctagtaggtgaggtaatggctcacctaggcgacgatccgtaactggtctgagaggatgatcagtcacactggaactgagacacggtccagactcctacgggaggcagcagtggggaatattggacaatgggcgaaagcctgatccagccatgccgcgtgtgtgaagaaggtcttcggattgtaaagcactttaagttgggaggaagggcagtaagttaataccttgctgttttgacgttaccgacagaataagcaccggctaactctgtgccagcagccgcggtaatacagagggtgcaagcgttaatcggaattactgggcgtaaagcgcgcgtaggtggttcgttaagttggatgtgaaagccccgggctcaacctgggaactgcatccaaaactggcgagctagagtatggtagagggtggtggaatttcctgtgtagcggtgaaatgcgtagatataggaaggaacaccagtggcgaaggcgaccacctggactgatactgacactgaggtgcgaaagcgtggggagcaaacaggattagataccctggtagtccacgccgtaaacgatgtcaactagccgttggaatccttgagattttagtggcgcagctaacgcattaagttgaccgcctggggagtacggccgcaaggttaaaactcaaatgaattgacgggggcccgcacaagcggtggagcatgtggtttaattcgaagcaacgcgaagaaccttaccaggccttgacatgcagagaactttccagagatggattggtgccttcgggaactctgacacaggtgctgcatggctgtcgtcagctcgtgtcgtgagatgttgggttaagtcccgtaacgagcgcaacccttgtccttagttaccagcacgttatggtgggcactctaaggagactgccggtgacaaaccggaggaaggtggggatgacgtcaagtcatcatggcccttacggcctgggctacacacgtgctacaatggtcggtacagagggttgccaagccgcgaggtggagctaatctcacaaaaccgatcgtagtccggatcgcagtctgcaactcgactgcgtgaagtcggaatcgctagtaatcgcaaatcagaatgttgcggtgaatacgttcccgggccttgtacacaccgcccgtcacaccatgggagtgggttgcaccagaagtagctagtctaaccttcgggaggacggttaccacggtgtgattcatgactggggtg

SEQ ID NO: 311 - DNA, 1459 bp, Pseudomonas oleovorans
attgaacgctggcggcaggcctaacacatgcaagtcgagcggatgaagggagcttgctccctgatttagcggcggacgggtgagtaatgcctaggaatctgcctggtagtgggggataacgttccgaaaggaacgctaataccgcatacgtcctacgggagaaagcaggggaccttcgggccttgcgctatcagatgagcctaggtcggattagctagttggtgaggtaatggctcaccaaggcgacgatccgtaactggtctgagaggatgatcagtcacactggaactgagacacggtccagactcctacgggaggcagcagtggggaatattggacaatgggcgaaagcctgatccagccatgccgcgtgtgtgaagaaggtcttcggattgtaaagcactttaagttgggaggaagggcagtaagctaataccttgctgttttgacgttaccgacagaataagcaccggctaacttcgtgccagcagccgcggtaatacgaagggtgcaagcgttaatcggaattactgggcgtaaagcgcgcgtaggtggttcgttaagttggatgtgaaagccccgggctcaacctgggaactgcatccaaaactggcgagctagagtacggtagagggtggtggaatttcctgtgtagcggtgaaatgcgtagatataggaaggaacaccagtggcgaaggcgaccacctggactgatactgacactgaggtgcgaaagcgtggggagcaaacaggattagataccctggtagtccacgccgtaaacgatgtcaactagccgttgggttccttgagaacttagtggcgcagctaacgcattaagttgaccgcctggggagtacggccgcaaggttaaaactcaaatgaattgacgggggcccgcacaagcggtggagcatgtggtttaattcgaagcaacgcgaagaaccttacctggccttgacatgctgagaactttccagagatggattggtgccttcgggaactcagacacaggtgctgcatggctgtcgtcagctcgtgtcgtgagatgttgggttaagtcccgtaacgagcgcaacccttgtccttagttaccagcacgtaatggtgggcactctaaggagactgccggtgacaaaccggaggaaggtggggatgacgtcaagtcatcatggcccttacggccagggctacacacgtgctacaatggtcggtacaaagggttgccaagccgcgaggtggagctaatcccataaaaccgatcgtagtccggatcgcagtctgcaactcgactgcgtgaagtcggaatcgctagtaatcgtgaatcagaatgtcacggtgaatacgttcccgggccttgtacacaccgcccgtcacaccatgggagtgggttgctccagaagtagctagtctaaccttcggggggacggttaccacggagtgattcatgactggggtg

SEQ ID NO: 312 - DNA, 1459 bp, Pseudomonas oryzihabitans
attgaacgctggcggcaggcctaacacatgcaagtcgagcggatgagaggagcttgctcctcgattcagcggcggacgggtgagtaatgcctaggaatctgcctagtagtgggggacaacgtttcgaaaggaacgctaataccgcatacgtcctacgggagaaagtgggggatcttcggacctcacgctattagatgagcctaggtcggattagctagttggtagggtaaaggcctaccaaggcgacgatccgtaactggtctgagaggatgatcagtcacactggaactgagacacggtccagactcctacgggaggcagcagtggggaatattggacaatgggcgaaagcctgatccagccatgccgcgtgtgtgaagaaggccttcgggtcgtaaagcactttaagttgggaggaagggctcatagcgaatacctgtgagttttgacgttaccaacagaataagcaccggctaacttcgtgccagcagccgcggtaatacgaagggtgcaagcgttaatcggaattactgggcgtaaagcgcgcgtaggtggcttgataagttggatgtgaaatccccgggctcaacctgggaactgcatccaaaactgtctggctagagtgcggtagagggtagtggaatttccagtgtagcggtgaaatgcgtagatattggaaggaacaccagtggcgaaggcgactacctggactgacactgacactgaggtgcgaaagcgtggggagcaaacaggattagataccctggtagtccacgccgtaaacgatgtcaactagccgttgggatccttgagatcttagtggcgcagctaacgcattaagttgaccgcctggggagtacggccgcaaggttaaaactcaaatgaattgacgggggcccgcacaagcggtggagcatgtggtttaattcgaagcaacgcgaagaaccttacctggccttgacatgctgagaactttccagagatggattggtgccttcgggaactcagacacaggtgctgcatggctgtcgtcagctcgtgtcgtgagatgttgggttaagtcccgtaacgagcgcaacccttgtccttagttaccagcacgttatggtgggcactctaaggagactgccggtgacaaaccggaggaaggtggggatgacgtcaagtcatcatggcccttacggccagggctacacacgtgctacaatggtcggtacaaagggttgccaagccgcgaggtggagctaatcccataaaaccgatcgtagtccggatcgcagtctgcaactcgactgcgtgaagtcggaatcgctagtaatcgtgaatcagaacgtcacggtgaatacgttcccgggccttgtacacaccgcccgtcacaccatgggagtgggttgctccagaagtagctagtctaaccttcgggaggacggttaccacggagtgattcatgactggggtg

SEQ ID NO: 313 - DNA, 1459 bp, Pseudomonas putida
attgaacgctggcggcaggcctaacacatgcaagtcgagcggatgagaagagcttgctcttcgattcagcggcggacgggtgagtaatgcctaggaatctgcctggtagtgggggacaacgtttcgaaaggaacgctaataccgcatacgtcctacgggagaaagcaggggaccttcgggccttgcgctatcagatgagcctaggtcggattagctagttggtgaggtaatggctcaccaaggcaacgatccgtaactggtctgagaggatgatcagtcacactggaactgagacacggtccagactcctacgggaggcagcagtggggaatattggacaatgggcgaaagcctgatccagccatgccgcgtgtgtgaagaaggtcttcggattgtaaagcactttaagttgggaggaagggcattaacctaatacgttagtgttttgacgttaccgacagaataagcaccggctaactctgtgccagcagccgcggtaatacagagggtgcaagcgttaatcggaattactgggcgtaaagcgcgcgtaggtggtttgttaagttggatgtgaaagccccgggctcaacctgggaactgcatccaaaactggcaagctagagtacggtagagggtggtggaatttcctgtgtagcggtgaaatgcgtagatataggaaggaacaccagtggcgaaggcgaccacctggactgatactgacactgaggtgcgaaagcgtggggagcaaacaggattagataccctggtagtccacgccgtaaacgatgtcaactagccgttggaatccttgagattttagtggcgcagctaacgcattaagttgaccgcctggggagtacggccgcaaggttaaaactcaaatgaattgacgggggcccgcacaagcggtggagcatgtggtttaattcgaagcaacgcgaagaaccttaccaggccttgacatgcagagaactttccagagatggattggtgccttcgggaactctgacacaggtgctgcatggctgtcgtcagctcgtgtcgtgagatgttgggttaagtcccgtaacgagcgcaacccttgtccttagttaccagcacgttatggtgggcactctaaggagactgccggtgacaaaccggaggaaggtggggatgacgtcaagtcatcatggcccttacggcctgggctacacacgtgctacaatggtcggtacagagggttgccaagccgcgaggtggagctaatctcacaaaaccgatcgtagtccggatcgcagtctgcaactcgactgcgtgaagtcggaatcgctagtaatcgcgaatcagaatgtcgcggtgaatacgttcccgggccttgtacacaccgcccgtcacaccatgggagtgggttgcaccagaagtagctagtctaaccttcgggaggacggttaccacggtgtgattcatgactggggtg

SEQ ID NO: 314 - DNA, 1459 bp, Pseudomonas rhodesiae
attgaacgctggcggcaggcctaacacatgcaagtcgagcggtagagagaagcttgcttctcttgagagcggcggacgggtgagtaatgcctaggaatctgcctggtagtgggggataacgttcggaaacgaacgctaataccgcatacgtcctacgggagaaagcaggggaccttcgggccttgcgctatcagatgagcctaggtcggattagctagttggtggggtaatggctcaccaaggcgacgatccgtaactggtctgagaggatgatcagtcacactggaactgagacacggtccagactcctacgggaggcagcagtggggaatattggacaatgggcgaaagcctgatccagccatgccgcgtgtgtgaagaaggtcttcggattgtaaagcactttaagttgggaggaagggccattacctaatacgtgatggttttgacgttaccgacagaataagcaccggctaactctgtgccagcagccgcggtaatacagagggtgcaagcgttaatcggaattactgggcgtaaagcgcgcgtaggtggtttgttaagttggatgtgaaatccccgggctcaacctgggaactgcattcaaaactgactgactagagtatggtagagggtggtggaatttcctgtgtagcggtgaaatgcgtagatataggaaggaacaccagtggcgaaggcgaccacctggactgatactgacactgaggtgcgaaagcgtggggagcaaacaggattagataccctggtagtccacgccgtaaacgatgtcaactagccgttgggagccttgagctcttagtggcgcagctaacgcattaagttgaccgcctggggagtacggccgcaaggttaaaactcaaatgaattgacgggggcccgcacaagcggtggagcatgtggtttaattcgaagcaacgcgaagaaccttaccaggccttgacatccaatgaactttctagagatagattggtgccttcgggaacattgagacaggtgctgcatggctgtcgtcagctcgtgtcgtgagatgttgggttaagtcccgtaacgagcgcaacccttgtccttagttaccagcacgtaatggtgggcactctaaggagactgccggtgacaaaccggaggaaggtggggatgacgtcaagtcatcatggcccttacggcctgggctacacacgtgctacaatggtcggtacagagggttgccaagccgcgaggtggagctaatcccataaaaccgatcgtagtccggatcgcagtctgcaactcgactgcgtgaagtcggaatcgctagtaatcgcgaatcagaatgtcgcggtgaatacgttcccgggccttgtacacaccgcccgtcacaccatgggagtgggttgcaccagaagtagctagtctaaccttcggggggacggttaccacggtgtgattcatgactggggtg

SEQ ID NO: 315 - DNA, 1459 bp, Pseudomonas saudiphocaensis
attgaacgctggcggcaggcctaacacatgcaagtcgagcggatgaagggagcttgctcctggatttagcggcggacgggtgagtaatgcctaggaatctgcctggtagtgggggataacgtccggaaacgggcgctaataccgcatacgtcctacgggagaaagcaggggaccttcgggccttgcgctatcagatgagcctaggtcggattagcttgttggtgaggtaatggctcaccaaggctgcgatccgtaactggtctgagaggatgatcagtcacactggaactgagacacggtccagactcctacgggaggcagcagtggggaatattggacaatgggcgaaagcctgatccagccatgccgcgtgtgtgaagaaggtcttcggattgtaaagcactttaagttgggaggaagggttgtagattaatactctgcaattttgacgttaccaacagaataagcaccggctaacttcgtgccagcagccgcggtaatacgaagggtgcaagcgttaatcggaattactgggcgtaaagcgcgcgtaggtggtttgtcaagttggaagtgaaagccccgggctcaacctgggaactgctttcaaaactggcaagctagagtatggcagagggtggtggaatttcctgtgtagcggtgaaatgcgtagatataggaaggaacatcagtggcgaaggcgaccacctgggctaatactgacactgaggtgcgaaagcgtggggagcaaacaggattagataccctggtagtccacgccgtaaacgatgtcaactagccgttgggttccttgagaacttagtggcgcagctaacgcattaagttgaccgcctggggagtacggccgcaaggttaaaactcaaatgaattgacgggggcccgcacaagcggtggagcatgtggtttaattcgaagcaacgcgaagaaccttaccaggccttgacatgcagagaactttccagagatggattggtgccttcgggaactctgacacaggtgctgcatggctgtcgtcagctcgtgtcgtgagatgttgggttaagtcccgtaacgagcgcaacccttgtccttagttaccagcacgttatggtgggcactctaaggagactgccggtgacaaaccggaggaaggtggggatgacgtcaagtcatcatggcccttacggcctgggctacacacgtgctacaatggtcggtacaaagggttgccaagccgcgaggtggagctaatcccataaaaccgatcgtagtccggatcgcagtctgcaactcgactgcgtgaagtcggaatcgctagtaatcgtgaatcagaatgtcacggtgaatacgttcccgggccttgtacacaccgcccgtcacaccatgggagtgggttgctccagaagtagctagtctaaccttcgggaggacggttaccacggagtgattcatgactggggtg

SEQ ID NO: 316 - DNA, 1459 bp, Pseudomonas stutzeri
attgaacgctggcggcaggcctaacacatgcaagtcgagcggatgagtggagcttgctccatgattcagcggcggacgggtgagtaatgcctaggaatctgcctggtagtgggggacaacgtttcgaaaggaacgctaataccgcatacgtcctacgggagaaagtgggggatcttcggacctcacgctatcagatgagcctaggtcggattagctagttggtgaggtaaaggctcaccaaggcgacgatccgtaactggtctgagaggatgatcagtcacactggaactgagacacggtccagactcctacgggaggcagcagtggggaatattggacaatgggcgaaagcctgatccagccatgccgcgtgtgtgaagaaggtcttcggattgtaaagcactttaagttgggaggaagggcagtaagttaataccttgctgttttgacgttaccaacagaataagcaccggctaacttcgtgccagcagccgcggtaatacgaagggtgcaagcgttaatcggaattactgggcgtaaagcgcgcgtaggtggttcgttaagttggatgtgaaagccccgggctcaacctgggaactgcatccaaaactggcgagctagagtatggcagagggtggtggaatttcctgtgtagcggtgaaatgcgtagatataggaaggaacaccagtggcgaaggcgaccacctgggctaatactgacactgaggtgcgaaagcgtggggagcaaacatgattagataccctggtagtccacgccgtaaacgatgtcgactagccgttgggatccttgagatcttagtggcgcagctaacgcattaagtcgaccgcctggggagtacggccgcaaggttaaaactcaaatgaattgacgggggcccgcacaagcggtggagcatgtggtttaattcgaagcaacgcgaagaaccttaccaggccttgacatgcagagaactttccagagatggattggtgccttcgggaactctgacacaggtgctgcatggctgtcgtcagctcgtgtcgtgagatgttgggttaagtcccgtaacgagcgcaacccttgtccttagttaccagcacgttaaggtgggcactctaaggagactgccggtgacaaaccggaggaaggtggggatgacgtcaagtcatcatggcccttacggcctgggctacacacgtgctacaatggtcggtacaaagggttgccaagccgcgaggtggagctaatcccataaaaccgatcgtagtccggatcgcagtctgcaactcgactgcgtgaagtcggaatcgctagtaatcgtgaatcagaatgtcacggtgaatacgttcccgggccttgtacacaccgcccgtcacaccatgggagtgggttgctccagaagtagctagtctaaccttcggggggacggttaccacggagtgattcatgactggggtg

SEQ ID NO: 317 - DNA, 1459 bp, Pseudomonas taetrolens
attgaacgctggcggcaggcctaacacatgcaagtcgagcggtagagaggtgcttgcacctcttgagagcggcggacgggtgagtaatacctaggaatctgcctggtagtgggggataacgttcggaaacggacgctaataccgcatacgtcctacgggagaaagcaggggaccttcgggccttgcgctatcagatgagcctaggtcggattagctagttggtgaggtaatggctcaccaaggctacgatccgtaactggtctgagaggatgatcagtcacactggaactgagacacggtccagactcctacgggaggcagcagtggggaatattggacaatgggcgaaagcctgatccagccatgccgcgtgtgtgaagaaggtcttcggattgtaaagcactttaagttgggaggaagggcattaacctaatacgttagtgttttgacgttaccgacagaataagcaccggctaactctgtgccagcagccgcggtaatacagagggtgcaagcgttaatcggaattactgggcgtaaagcgcgcgtaggtggtttgttaagttggatgtgaaatccccgggctcaacctgggaactgcatccaaaactggcaagctagagtatggtagagggtggtggaatttcctgtgtagcggtgaaatgcgtagatataggaaggaacaccagtggcgaaggcgaccacctggactgatactgacactgaggtgcgaaagcgtggggagcaaacaggattagataccctggtagtccacgccgtaaacgatgtcaactagccgttgggagtcttgaactcttagtggcgcagctaacgcattaagttgaccgcctggggagtacggccgcaaggttaaaactcaaatgaattgacgggggcccgcacaagcggtggagcatgtggtttaattcgaagcaacgcgaagaaccttaccaggccttgacatccaatgaactttccagagatggattggtgccttcgggaacattgagacaggtgctgcatggctgtcgtcagctcgtgtcgtgagatgttgggttaagtcccgtaacgagcgcaacccttgtccttagttaccagcacgtaatggtgggcactctaaggagactgccggtgacaaaccggaggaaggtggggatgacgtcaagtcatcatggcccttacggcctgggctacacacgtgctacaatggtcggtacaaagggttgccaagccgcgaggtggagctaatcccataaaaccgatcgtagtccggatcgcagtctgcaactcgactgcgtgaagtcggaatcgctagtaatcgtgaatcagaatgtcacggtgaatacgttcccgggccttgtacacaccgcccgtcacaccatgggagtgggttgcaccagaagtagctagtctaaccttcgggaggacggttaccacggtgtgattcatgactggggtg

SEQ ID NO: 318 - DNA, 1445 bp, Pseudomonas tolaasii
  misc_feature (1171)..(1171): n is a, c, g, or t
  misc_feature (1270)..(1270): n is a, c, g, or t
caggcctaacacatgcaagtcgagcggtagagcagaagcttgcttctcttgagagcggcggacgggtgagtaatgcctaggaatctgcctggtagtgggggataacgtccggaaacggacgctaataccgcatacgtcctacgggagaaagcaggggaccttcgggccttgcgctatcagatgagcctaggtcggattagctagttggtgaggtaatggctcaccaaggcgacgatccgtaactggtctgagaggatgatcagccacactggaactgagacacgggccagactcctacgggaggcagcagtggggaatattggacaatgggcgaaagcctgatccagccatgccgcgtgtgtgaagaaggtcttcggattgtaaagcactttaagttgggaggaagggcagttgcctaatacgtaactgttttgacgttaccgacagaataagcaccggctaactctgtgccagcagccgcggtaatacagagggtgcaagcgttaatcggaattactgggcgtaaagcgcgcgtaggtggtttgttaagttggatgtgaaatccccgggctcaacctgggaactgcattcaaaactgactgactagagtatggtagagggtggtggaattccctgtgtagcggtgaaatgcgtagttataggaaggaacaccagtggcgaaggcgaccacctggactaatactgacactgaggtgcgaaagcgtggggagcaaacaggattagataccctggtagtccacgccgtaaacgatgtcaactagccgttggaagccttgagcttttagtggcgcagctaacgcattaagttgaccgcctggggagtacggccgcaaggttaaaactcaaatgaattgacgggggcccgcacaagcggtggagcatgtggtttaattcgaagcaacgcgaagaaccttaccaggccttgacatccaatgaactttccagagatggattggtgccttcgggaacattgagacaggtgctgcatggctgtcgtcagctcgtgtcgtgagatgttgggttaagtcccgtaacgagcgcaacccttgtccttagttaccagcacgttatggtgggcactctaaggagactgccggtgacaaaccggaggaaggtggggatgacgtcaagtcatcatggcccttacggnctgggctacacacgtgctacaatggtcggtacagagggttgccaagccgcgaggtggagctaatcccataaaaccgatcgtagtccggatcgcagtctncaactcgactgcgtgaagtcggaatcgctagtaatcgcgaatcagaatgtcgcggtgaatacgttcccgggccttgtacacaccgcccgtcacaccatgggagtgggttgcaccagaagtagctagtctaaccttcgggaggacggttaccacggtgtgattcatgactggggtg

SEQ ID NO: 319 - DNA, 1459 bp, Pseudomonas xanthomarina
attgaacgctggcggcaggcctaacacatgcaagtcgagcggatgaagagagcttgctctctgattcagcggcggacgggtgagtaatgcctaggaatctgcctggtagtgggggacaacgtttcgaaaggaacgctaataccgcatacgtcctacgggagaaagcaggggaccttcgggccttgcgctatcagatgagcctaggtcggattagctagttggtgaggtaatggctcaccaaggcgacgatccgtaactggtctgagaggatgatcagtcacactggaactgagacacggtccagactcctacgggaggcagcagtggggaatattggacaatgggcgaaagcctgatccagccatgccgcgtgtgtgaagaaggtcttcggattgtaaagcactttaagttgggaggaagggcattaacctaatacgttagtgttttgacgttaccgacagaataagcaccggctaacttcgtgccagcagccgcggtaatacgaagggtgcaagcgttaatcggaattactgggcgtaaagcgcgcgtaggtggtttgttaagttggaagtgaaagccccgggctcaacctgggaactgctttcaaaactggcaagctagagtatggcagagggtggtggaatttcctgtgtagcggtgaaatgcgtagatataggaaggaacaccagtggcgaaggcgaccacctgggctaatactgacactgaggtgcgaaagcgtggggagcaaacaggattagataccctggtagtccacgccgtaaacgatgtcgactagccgttgggatccttgagatcttagtggcgcagctaacgcattaagtcgaccgcctggggagtacggccgcaaggttaaaactcaaatgaattgacgggggcccgcacaagcggtggagcatgtggtttaattcgaagcaacgcgaagaaccttaccaggccttgacatgcagagaactttccagagatggatgggtgccttcgggaactctgacacaggtgctgcatggctgtcgtcagctcgtgtcgtgagatgttgggttaagtcccgtaacgagcgcaacccttgtccttagttaccagcacgtcatggtgggcactctaaggagactgccggtgacaaaccggaggaaggtggggatgacgtcaagtcatcatggcccttacggcctgggctacacacgtgctacaatggtcggtacaaagggttgccaagccgcgaggtggagctaatcccataaaaccgatcgtagtccggatcgcagtctgcaactcgactgcgtgaagtcggaatcgctagtaatcgtgaatcagaatgtcacggtgaatacgttcccgggccttgtacacaccgcccgtcacaccatgggagtgggttgctccagaagtagctagtctaaccttcgggaggacggttaccacggagtgattcatgactggggtg

SEQ ID NO: 320 - DNA, 1457 bp, Psychrobacter phenylpyruvicus
attgaacgctggcggcaggcttaacacatgcaagtcgagcggaaacgatgggagcttgctcccaggcgtcgagcggcggacgggtgagtaatacttaggaatctgcccagtagtgggggatagctcggggaaactcgaattaataccgcatacaccctacggggaaaagggggcacttgtgctctcgctattggatgagcctaagtcggattagctagttggtggggtaaaggcctaccaaggcgacgatctgtagctggtctgagaggatgatcagccacaccgggactgagacacggcccggactcctacgggaggcagcagtggggaatattggacaatgggggcaaccctgatccagccatgccgcgtgtgtgaagaaggccttttggttgtaaagcactttaagcagtgaagaagactctatggttaatacccatagacgatgacattagctgcagaataagcaccggctaactctgtgccagcagccgcggtaatacagagggtgcaagcgttaatcggaattactgggcgtaaagcgagcgtaggtggcttaataagtcagatgtgaaatccccgggcttaacctgggaactgcatctgatactgttgggctagagtaggtgagagggaggtagaatttcaggtgtagcggtgaaatgcgtagagatctgaaggaataccgatggcgaaggcagcctcctggcatcatactgacactgaggttcgaaagcgtgggtagcaaacaggattagataccctggtagtccacgccgtaaacgatgtctactagtcgttggggaacttgattccttagtgacgcagctaacgcaataagtagaccgcctggggagtacggccgcaaggttaaaactcaaatgaattgacgggggcccgcacaagcggtggagcatgtggtttaattcgatgcaacgcgaagaaccttacctggtcttgacatatctagaatcctgcagagatgcgggagtgccttcgggaattagaatacaggtgctgcatggctgtcgtcagctcgtgtcgtgagatgttgggttaagtcccgcaacgagcgcaacccttttccttagttaccagcggtttggccggggactctaaggatactgccagtgacaaactggaggaaggcggggacgacgtcaagtcatcatggcccttacgaccagggctacacacgtgctacaatggtaggtacagagggcagctacacagcgatgtgatgcgaatctcaaaaagcctatcgtagtccagattggagtctgcaactcgactccatgaagtcggaatcgctagtaatcgcggatcagaatgccgcggtgaatacgttcccgggccttgtacacaccgcccgtcacaccatgggagttgattgcaccagaagtgggtagcctaacttttagagggcgctcaccacggtgtggtcgatgactggggtg

SEQ ID NO: 321 - DNA, 1462 bp, Raoultella ornithinolytica
  misc_feature (18)..(18): n is a, c, g, or t
  misc_feature (427)..(427): n is a, c, g, or t
  misc_feature (445)..(445): n is a, c, g, or t
  misc_feature (447)..(447): n is a, c, g, or t
  misc_feature (674)..(674): n is a, c, g, or t
attgaacgctggcggcangcctaacacatgcaagtcgagcggtagcacagagagcttgctctcgggtgacgagcggcggacgggtgagtaatgtctgggaaactgcctgatggagggggataactactggaaacggtagctaataccgcataacgtcgcaagaccaaagtgggggaccttcgggcctcatgccatcagatgtgcccagatgggattagctagtaggtggggtaatggctcacctaggcgacgatccctagctggtctgagaggatgaccagccacactggaactgagacacggtccagactcctacgggaggcagcagtggggaatattgcacaatgggcgcaagcctgatgcagccatgccgcgtgtatgaagaaggccttcgggttgtaaagtactttcagcgaggaggaaggcnttaaggttaataaccttngngattgacgttactcgcagaagaagcaccggctaactccgtgccagcagccgcggtaatacggagggtgcaagcgttaatcggaattactgggcgtaaagcgcacgcaggcggtctgttaagtcagatgtgaaatccccgggctcaacctgggaactgcatttgaaactggcaggcttgagtcttgtagaggggggtagaattccaggtgtagcggtgaaatgcgtanagatctggaggaataccggtggcgaaggcggccccctggacaaagactgacgctcaggtgcgaaagcgtggggagcaaacaggattagataccctggtagtccacgctgtaaacgatgtcgacttggaggttgttcccttgaggagtggcttccggagctaacgcgttaagtcgaccgcctggggagtacggccgcaaggttaaaactcaaatgaattgacgggggcccgcacaagcggtggagcatgtggtttaattcgatgcaacgcgaagaaccttacctactcttgacatccagagaacttagcagagatgctttggtgccttcgggaactctgagacaggtgctgcatggctgtcgtcagctcgtgttgtgaaatgttgggttaagtcccgcaacgagcgcaacccttatcctttgttgccagcgattcggtcgggaactcaaaggagactgccagtgataaactggaggaaggtggggatgacgtcaagtcatcatggcccttacgagtagggctacacacgtgctacaatggcatatacaaagagaagcgacctcgcgagagcaagcggacctcataaagtatgtcgtagtccggattggagtctgcaactcgactccatgaagtcggaatcgctagtaatcgtagatcagaatgctacggtgaatacgttcccgggccttgtacacaccgcccgtcacaccatgggagtgggttgcaaaagaagtaggtagcttaaccttcgggagggcgcttaccactttgtgattcatgactggggtg

SEQ ID NO: 322 - DNA, 1462 bp, Raoultella planticola
attgaacgctggcggcaggcctaacacatgcaagtcgagcggtagcacagagagcttgctctcgggtgacgagcggcggacgggtgagtaatgtctgggaaactgcctgatggagggggataactactggaaacggtagctaataccgcataacgtcgcaagaccaaagtgggggaccttcgggcctcatgccatcagatgtgcccagatgggattagctagtaggtggggtaatggctcacctaggcgacgatccctagctggtctgagaggatgaccagccacactggaactgagacacggtccagactcctacgggaggcagcagtggggaatattgcacaatgggcgcaagcctgatgcagccatgccgcgtgtatgaagaaggccttcgggttgtaaagtactttcagcgaggaggaaggcgttaaggttaataaccttagcgattgacgttactcgcagaagaagcaccggctaactccgtgccagcagccgcggtaatacggagggtgcaagcgttaatcggaattactgggcgtaaagcgcacgcaggcggtttgttaagtcagatgtgaaatccccgggctcaacctgggaactgcatttgaaactggcaagcttgagtcttgtagaggggggtagaattccaggtgtagcggtgaaatgcgtagagatctggaggaataccggtggcgaaggcggccccctggacaaagactgacgctcaggtgcgaaagcgtggggagcaaacaggattagataccctggtagtccacgctgtaaacgatgtcgacttggaggttgttcccttgaggagtggcttccggagctaacgcgttaagtcgaccgcctggggagtacggccgcaaggttaaaactcaaatgaattgacgggggcccgcacaagcggtggagcatgtggtttaattcgatgcaacgcgaagaaccttacctactcttgacatccagagaacttagcagagatgctttggtgccttcgggaactctgagacaggtgctgcatggctgtcgtcagctcgtgttgtgaaatgttgggttaagtcccgcaacgagcgcaacccttatcctttgttgccagcggtccggccgggaactcaaaggagactgccagtgataaactggaggaaggtggggatgacgtcaagtcatcatggcccttacgagtagggctacacacgtgctacaatggcatatacaaagagaagcgacctcgcgagagcaagcggacctcataaagtatgtcgtagtccggattggagtctgcaactcgactccatgaagtcggaatcgctagtaatcgtagatcagaatgctacggtgaatacgttcccgggccttgtacacaccgcccgtcacaccatgggagtgggttgcaaaagaagtaggtagcttaaccttcgggagggcgcttaccactttgtgattcatgactggggtg

SEQ ID NO: 323 - DNA, 1415 bp, Roseomonas gilardii
agcgaacgctgacggcatgcttaacacatgcaagtcgcacgggtggtttcggccatcagtggcggacgggtgagtaacgcgtaggaacgtgtccagaggtgggggacaaccccgggaaactggggctaataccgcatgggggctgaggcccaaagccgagaggcgcctttggagcggcctgcgtccgattaggtagttggtggggtaaaggcctaccaagcctgcgatcggtagctggtctgagaggacgaccagccacactgggactgagacacggcccagactcctacgggaggcagcagtggggaatattggacaatgggcgaaagcctgatccagcaatgccgcgtgggtgaagaaggtcttcggatcgtaaagccctttcgacggggacgatgatgacggtacccgtagaagaagccccggctaacttcgtgccagcagccgcggtaatacgaagggggctagcgttgctcggaattactgggcgtaaagggcgcgtaggcggcggcccaagtcaggcgtgaaattcctgggctcaacctggggactgcgcttgatactgggttgcttgaggatggaagaggctcgtggaattcccagtgtagaggtgaaattcgtagatattgggaagaacaccggtggcgaaggcggcgagctggtccattactgacgctgaggcgcgacagcgtggggagcaaacaggattagataccctggtagtccacgccgtaaacgatgtgcgctggatgttggggcccatagggtctcagtgtcgtagccaacgcggtaagcgcaccgcctggggagtacggccgcaaggttgaaactcaaaggaattgacgggggcccgcacaagcggtggagcatgtggtttaattcgaagcaacgcgcagaaccttaccagcccttgacatggtcacgaccggtccagagatgggctttccccgcaaggggcgtgatgcacaggtgctgcatggctgtcgtcagctcgtgtcgtgagatgttgggttaagtcccgcaacgagcgcaaccctcgcctctagttgccagcatgttcgggtgggcactctagaggaactgccggtgacaagccggaggaaggtggggatgacgtcaagtcctcatggcccttatgggctgggctacacacgtgctacaatggcggtgacagagggaagccaggtcgcgaggccgagccgatcccgaaaagccgtctcagttcggattgcactctgcaactcgggtgcatgaaggtggaatcgctagtaatcgcggatcagcacgccgcggtgaatacgttcccgggccttgtacacaccgcccgtcacaccatgggagttggttctaccttaagtcgttgcgctaaccagcgatgggggcaggcgaccacggtagggtcagcgactggggtg

SEQ ID NO: 324 - DNA, 1411 bp, Roseomonas mucosa
agcgaacgctggcggcatgcttaacacatgcaagtcgcacgggcagcaatgtcagtggcggacgggtgagtaacgcgtaggaacgtgtcctgaggtgggggacaaccccgggaaactggggctaataccgcatatgggctgaggcccaaagccgagaggcgcctttggagcggcctgcgtccgattaggtagttggtggggtaaaggcctaccaagcctgcgatcggtagctggtctgagaggacgaccagccacactgggactgagacacggcccagactcctacgggaggcagcagtggggaatattggacaatgggcgaaagcctgatccagcaatgccgcgtgggtgaagaaggtcttcggatcgtaaagccctttcgacggggacgatgatgacggtacccgtagaagaagccccggctaacttcgtgccagcagccgcggtaatacgaagggggctagcgttgctcggaattactgggcgtaaagggcgcgtaggcggcggcccaagtcaggcgtgaaattcctgggctcaacctggggactgcgcttgatactgggttgcttgaggatggaagaggctcgtggaattcccagtgtagaggtgaaattcgtagatattgggaagaacaccggtggcgaaggcggcgagctggtccattactgacgctgaggcgcgacagcgtggggagcaaacaggattagataccctggtagtccacgccgtaaacgatgtgcgctggatgttggggcccatagggtctcagtgtcgtagccaacgcggtaagcgcaccgcctggggagtacggccgcaaggttgaaactcaaaggaattgacgggggcccgcacaagcggtggagcatgtggtttaattcgaagcaacgcgcagaaccttaccagcccttgacatggtcacgaccggtccagagatggactttcctagcaataggcgtgatgcacaggtgctgcatggctgtcgtcagctcgtgtcgtgagatgttgggttaagtcccgcaacgagcgcaaccctcgcctctagttgccagcatgttcgggtgggcactctagaggaactgccggtgacaagccggaggaaggtggggatgacgtcaagtcctcatggcccttatgggctgggctacacacgtgctacaatggcggtgacagagggaagccaggtcgcgaggccgagccgatcccgaaaagccgtctcagttcggattgcactctgcaactcgggtgcatgaaggtggaatcgctagtaatcgcggatcagcacgccgcggtgaatacgttcccgggccttgtacacaccgcccgtcacaccatgggagttggttctaccttaagtcgttgcgctaaccagcgatgggggcaggcgaccacggtagggtcagcgactggggtg

SEQ ID NO: 325 - DNA, 1433 bp, Ruminococcus albus
gacgaacgctggcggcacgcttaacacatgcaagtcgaacgagcgaaagagtgcttgcactctctagctagtggcggacgggtgagtaacacgtgagcaatctgcctttcggagagggataccaattggaaacgattgttaatacctcataacataacgaagccgcatgactttgttatcaaatgaatttcgccgaaagatgagctcgcgtctgattaggtagttggtgaggtaacggcccaccaagccgacgatcagtagccggactgagaggttgaacggccacattgggactgagacacggcccagactcctacgggaggcagcagtggggaatattgcacaatgggcgaaagcctgatgcagcgatgccgcgtgagggaagaaggttttaggattgtaaacctctgtctttggggacgataatgacggtacccaaggaggaagctccggctaactacgtgccagcagccgcggtaatacgtagggagcgagcgttgtccggaattactgggtgtaaagggagcgtaggcgggattgcaagtcaggtgtgaaatttaggggcttaacccctgaactgcacttgaaactgtagttcttgagtgaagtagaggtaagcggaattcctagtgtagcggtgaaatgcgtagatattaggaggaacatcagtggcgaaggcggcttactgggctttaactgacgctgaggctcgaaagcgtggggagcaaacaggattagataccctggtagtccacgccgtaaacgatgattactaggtgtggggggactgaccccttccgtgccgcagttaacacaataagtaatccacctggggagtacggccgcaaggctgaaactcaaaggaattgacgggggcccgcacaagcagtggagtatgtggtttaattcgaagcaacgcgaagaaccttaccaggtcttgacatcgtacgcatagcatagagatatgtgaaatcccttcggggacgtatagacaggtggtgcatggttgtcgtcagctcgtgtcgtgagatgttgggttaagtcccgcaacgagcgcaacccttactgttagttgctacgcaagagcactctagcaggactgccgttgacaaaacggaggaaggtggggatgacgtcaaatcatcatgccccttatgacctgggctacacacgtactacaatggctgttaacagagggaagcaaaacagtgatgtggagcaaaaccctaaaagcagtcttagttcggattgtaggctgcaacccgcctacatgaagtcggaattgctagtaatcgcggatcagcatgccgcggtgaatacgttcccgggccttgtacacaccgcccgtcacgccatgggagtcggtaacacccgaagcctgtgttctaaccgcaaggaggaagcagtcgaaggtgggattgatgactggggtg

SEQ ID NO: 326 - DNA, 1435 bp, Ruminococcus flavefaciens
gacgaacgctggcggcacgcttaacacatgcaagtcgaacggagataatttgagtttacttaggttatcttagtggcggacgggtgagtaacacgtgagcaacctaccttagagagagggatagcttctggaaacggatggtaatacctcataacataactgaaccgcatgatttagttatcaaagatttatcactctgagatgggctcgcgtctgattagatagttggtgaggtaacggctcaccaagtcgacgatcagtagccggactgagaggttgaacggccacattgggactgagacacggcccagactcctacgggaggcagcagtggggaatattgcacaatgggggaaaccctgatgcagcgatgccgcgtggaggaagaaggttttcggattgtaaactcctgtcttaaaggacgataatgacggtactttaggaggaagctccggctaactacgtgccagcagccgcggtaatacgtagggagcgagcgttgtccggaattactgggtgtaaagggagcgtaggcgggagcgcaagtcagatgtgaaatacatgggctcaacccatgggctgcatttgaaactgtgtttcttgagtgaagtagaggtaagcggaattcctggtgtagcggtgaaatgcgtagatatcaggaggaacaccggtggcgaaggcggcttactgggcttttactgacgctgaggctcgaaagcgtggggagcaaacaggattagataccctggtagtccacgctgtaaacgatgattactaggtgtggggggactgaccccttccgtgccgcagttaacacaataagtaatccacctggggagtacggccgcaaggttgaaactcaaaggaattgacgggggcccgcacaagcagtggagtatgtggtttaattcgaagcaacgcgaagaaccttaccaggtcttgacatcgtatgcatagtctagagatagatgaaattccttcggggacatatagacaggtggtgcatggttgtcgtcagctcgtgtcgtgagatgttgggttaagtcccgcaacgagcgcaacccttacctttagttgctacgcaagagcactctaaagggactgccgttgacaaaacggaggaaggtggggatgacgtcaaatcatcatgccccttatgacctgggctacacacgtactacaatggcaattaacaaagagaagcaagacggtgacgtggagcgaatctcaaaaaattgtcccagttcagattgcaggctgcaactcgcctgcatgaagtcggaattgctagtaatcgcggatcagcatgccgcggtgaatacgttcccgggccttgtacacaccgcccgtcacaccatgggagtcggtaacacccgaagtcggtagtctaacagcaatgaggacgccgccgaaggtgggattgatgactggggtg

SEQ ID NO: 327 - DNA, 1455 bp, Ruminococcus lactaris
gatgaacgctggcggcgtgcttaacacatgcaagtcgagcgaagcactttgctttgatttcttcgggatgaagagcttagtgactgagcggcggacgggtgagtaacgcgtgggtaacctgcctcatacagggggataacagttagaaatgactgctaataccgcataagaccacagcaccgcatggtgcaggggtaaaaactccggtggtatgagatggacccgcgtctgattagttagttggtggggtaacggcctaccaaggcgacgatcagtagccgacctgagagggtgaccggccacattgggactgagacacggcccaaactcctacgggaggcagcagtggggaatattgcacaatgggggaaaccctgatgcagcgacgccgcgtgagcgaagaagtatttcggtatgtaaagctctatcagcagggaagaaaatgacggtacctgactaagaagccccggctaactacgtgccagcagccgcggtaatacgtagggggcaagcgttatccggatttactgggtgtaaagggagcgtagacggagcagcaagtctgatgtgaaaacccggggctcaaccccgggactgcattggaaactgttgatctggagtgccggagaggtaagcggaattcctagtgtagcggtgaaatgcgtagatattaggaggaacaccagtggcgaaggcggcttactggacggtaactgacgttgaggctcgaaagcgtggggagcaaacaggattagataccctggtagtccacgccgtaaacgatgactactaggtgtcgggtggcaaagccattcggtgccgcagccaacgcaataagtagtccacctggggagtacgttcgcaagaatgaaactcaaaggaattgacggggacccgcacaagcggtggagcatgtggtttaattcgaagcaacgcgaagaaccttacctgctcttgacatcccggtgacggcagagtaatgtctgcttttcttcggaacaccggtgacaggtggtgcatggttgtcgtcagctcgtgtcgtgagatgttgggttaagtcccgcaacgagcgcaacccctatcttcagtagccagcggtaaggccgggcactctggagagactgccagggataacctggaggaaggtggggatgacgtcaaatcatcatgccccttatgagcagggctacacacgtgctacaatggcgtaaacaaagggaagcgaacccgcgagggtgggcaaatcccaaaaataacgtctcagttcggattgtagtctgcaactcgactacatgaagctggaatcgctagtaatcgcgaatcagaatgtcgcggtgaatacgttcccgggtcttgtacacaccgcccgtcacaccatgggagtcagtaacgcccgaagtcagtgacccaaccgtaaggagggagctgccgaaggtgggaccgataactggggtg

SEQ ID NO: 328 - DNA, 1462 bp, Salinisphaera halophila
attgaacgctggcggcaggcctaacacatgcaagtcgagcggcagcagcaggagcttgctcctggctggcgagcggcggacgggtgagtaatgcctaggaatctgcccttttgtggaggataacccggggaaactcgggctaatactgcataatctctacggagcaaagcggggctcttcgaccctcgcgcagaaggatgagcctaggtctgattagcttgttggtggggtaacggcctaccaaggcaacgatcagtagctggtctgagaggatgatcagccacaccgggactgagacacggcccggactcctacgggaggcagcagtggggaatattggacaatgggcgaaagcctgatccagccatgccgcgtgtgtgaagaaggccttagggttgtaaagcactttaagcaggaaagaaaagcgccgagttaatagctcgagcgtgttgacggtacctgcagaataagcaccggctaactccgtgccagcagccgcggtaatacggagggtgcaagcgttaatcggaattactgggcgtaaagcgagtgcaggcggttgcgtatgtcggatgtgaaagccccgggctcaacctgggaattgcattcgaaactgcgtaactagaatatggtagaggaagacggaattccacgtgtagcggtgaaatgcgtagatatgtggaggaacaccaatggcgaaggcagtcttctgggccaatattgacgctgaggctcgaaagcgtgggtagcaaacaggattagataccctggtagtccacgccgtaaacgatgagaactagacgttgggcgacatagtcgctcagtgtcgcagcaaacgcgttaagttctccgcctggggagtacggccgcaaggttgaaactcaaaggaattgacgggggcccgcacaagcggtggagcatgtggtttaattcgatgcaacgcgaagaaccttacctgcccttgacatcctgtgaacccttcggagacgaaggggtgctttcgagaacacagtgacaggtgctgcatggctgtcgtcagctcgtgtcgtgagatgttgggttaagtcccgcaacgagcgcaacccctatccttagttgccagcattaagttgggcactctaaggagactgccggtgacaaaccggaggaaggtggggatgacgtcaagtcatcatggcccttatgggcagggctacacacgtgctacaatggcaagtacaaagggttgctaagccgcgaggtggtgctaatctcataaagcttgtcttagtccggattgcagtctgcaactcgactgcatgaagtcggaatcgctagtaatcgcagatcagcaatgctgcggtgaatacgttcccgggccttgtacacaccgcccgtcacaccatggaagtcggttgcaccagaagaggctagtctaaccttcgggaggacggtctccacggtgtgatcgatgactggggtg

SEQ ID NO: 329 - DNA, 1491 bp, Salinivibrio costicola
  misc_feature (172)..(172): n is a, c, g, or t
  misc_feature (180)..(180): n is a, c, g, or t
  misc_feature (184)..(186): n is a, c, g, or t
  misc_feature (1022)..(1022): n is a, c, g, or t
  misc_feature (1134)..(1134): n is a, c, g, or t
attgaacgctggcggcaggcctaacacatgcaagtcgagcggaaacggcagtattgaagcttcggtggatttactggacgtcgagcggcggacgggtgagtaacggctgggaacctgccctgacgagggggataaccgttggaaacgacggctaataccgcataatgtcttnattcttangagnnnggaccaaaggtggcctctacatgtaagctatcgcgttgggatgggcccagttaggattagctagttggtaaggtaatggcttaccaaggcaacgatccttagctggtttgagaggatgatcagccacactgggactgagacacggcccagactcctacgggaggcagcagtggggaatattgcacaatgggggagaccctgatgcagccatgccgcgtgtgtgaagaaggccttcgggttgtaaagcactttcagcagtgaggaaggtcgtgtacttaatacgtgcacggcttgacgttagctgcagaagaagcaccggctaactccgtgccagcagccgcggtaatacggagggtgcgagcgttaatcggaattactgggcgtaaagcgcatgcaggcggtttgttaagtcagatgtgaaagcccggggctcaacctcggaaccgcatttgaaactggcaggctagagtcttgtagaggggggtagaatttcaggtgtagcggtgaaatgcgtagagatctgaaggaataccagtggcgaaggcggccccctggacaaagactgacgctcagatgcgaaagcgtgggtagcaaacaggattagataccctggtagtccacgccgtaaacgctgtctacttggaggttgaggttttagactttggctttcggcgctaacgcattaagtagaccgcctggggagtacggccgcaaggttaaaactcaaatgaattgacgggggcccgcacaagcggtggagcatgtggtttaattcgatgcaacgcgaagaaccttacctactcttgacatccagcgaagcctttagagatagaggngtgccttcgggagcgctgagacaggtgctgcatggctgtcgtcagctcgtgttgtgaaatgttgggttaagtcccgcaacgagcgcaacccttatccttgtttgccagcacntaatggtgggaactccagggagactgccggtgataaaccggaggaaggtggggacgacgtcaagtcatcatggcccttacgagtagggctacacacgtgctacaatggcagatacagagggcagcgagacagcgatgtttagcgaatcccttaaagtttgtcgtagtccggattggagtctgcaactcgactccatgaagtcggaatcgctagtaatcgtggatcagaatgccacggtgaatacgttcccgggccttgtacacaccgcccgtcacaccatgggagtgggctgcaccagaagtagatagcttaaccttcgggagggcgtttaccacggtgtggttcatgactggggtg

SEQ ID NO: 330 - DNA, 1368 bp, Salmonella enterica
cagcttgctgctttgctgacgagtggcggacgggtgagtaatgtctgggaaactgcctgatggagggggataactactggaaacggtggctaataccgcataacgtcgcaagaccaaagagggggaccttcgggcctcttgccatcagatgtgcccagatgggattagcttgttggtgaggtaacggctcaccaaggcgacgatccctagctggtctgagaggatgaccagccacactggaactgagacacggtccagactcctacgggaggcagcagtggggaatattgcacaatgggcgcaagcctgatgcagccatgccgcgtgtatgaagaaggccttcgggttgtaaagtactttcagcggggaggaaggtgttgtggttaataaccgcagcaattgacgttacccgcagaagaagcaccggctaactccgtgccagcagccgcggtaatacggagggtgcaagcgttaatcggaattactgggcgtaaagcgcacgcaggcggtctgtcaagtcggatgtgaaatccccgggctcaacctgggaactgcattcgaaactggcaggcttgagtcttgtagaggggggtagaattccaggtgtagcggtgaaatgcgtagagatctggaggaataccggtggcgaaggcggccccctggacaaagactgacgctcaggtgcgaaagcgtggggagcaaacaggattagataccctggtagtccacgccgtaaacgatgtctacttggaggctgtgcccttgaggcgtggcttccggagctaacgcgttaagtagaccgcctggggagtacggccgcaaggttaaaactcaaatgaattgacgggggcccgcacaagcggtggagcatgtggtttaattcgatgcaacgcgaagaaccttacctggtcttgacatccacagaagtttgcagagatgcgaatgtgccttcgggaactgtgagacaggtgctgcatggctgtcgtcagctcgtgttgtgaaatgttgggttaagtcccgcaacgagcgcaacccttatcctttgttgccagcggttaggccgggaactcaaaggagactgccagtgataaactggaggaaggtggggatgacgtcaagtcatcatggcccttacgaccagggctacacacgtgctacaatggcgcatacaaagagaagcgacctcgcgagagcaagcggacctcataaagtgcgtcgtagtccggattggagtctgcaactcgactccatgaagtcggaatcgctagtaatcgtggatcagaatgccacggtgaatacgttcccgggccttgtacacaccgcccgtcacaccatgggagtgggttgcaaaagaagtaggtagagtta

SEQ ID NO: 331 - DNA, 659 bp, Salmonella enteritidis
caagcctgatgcagccatcccgcgtgtatgaagaaggccttcgggttgtaaagtactttcagcggggaggaaggtgttgtggttaataaccgcagcaattgacgttacccgcagaagaagcaccggctaactccgtgccagcagccgcggtaatacggagggtgcaagcgttaatcggaattactgggcgtaaagcgcacgcaggcggtctgtcaagtcggatgtgaaatccccgggctcaacctgggaactgcattcgaaactggcaggcttgagtcttgtagaggggggtagaattccaggtgtagcggtgaaatgcgtagagatctggaggaataccggtggcgaaggcggccccctggacaaagactgacgctcaggtgcgaaagcgtggggagcaaacaggattagataccctggtagtccacgccgtaaacgatgtctacttggaggttgtgcccttgaggcgtggcttccggagctaacgcgttaagtagaccgcctggggagtacggccgcaaggttaaaactcaaatgaattgacgggggcccgcacaagcggtggagcatgtggtttaattcgatgcaacgcgaagaaccttacctggtcttgacatccacagaagaatccagagatggatttgtgccttcgggaactg

SEQ ID NO: 332 - DNA, 1546 bp, Salmonella typhi
aaattgaagagtttgatcatggctcagattgaacgctggcggcaggcctaacacatgcaagtcgaacggtaacaggaagcagcttgctgctttgctgacgagtggcggacgggtgagtaatgtctgggaaactgcctgatggagggggataactactggaaacggtggctaataccgcataacgtcgcaagaccaaagagggggaccttcgggcctcttgccatcagatgtgcccagatgggattagcttgttggtgaggtaacggctcaccaaggcgacgatccctagctggtctgagaggatgaccagccacactggaactgagacacggtccagactcctacgggaggcagcagtggggaatattgcacaatgggcgcaagcctgatgcagccatgccgcgtgtatgaagaaggccttcgggttgtaaagtactttcagcggggaggaaggtgttgtggttaataaccgcagcaattgacgttacccgcagaagaagcaccggctaactccgtgccagcagccgcggtaatacggagggtgcaagcgttaatcggaattactgggcgtaaagcgcacgcaggcggtctgtcaagtcggatgtgaaatccccgggctcaacctgggaactgcattcgaaactggcaggcttgagtcttgtagaggggggtagaattccaggtgtagcggtgaaatgcgtagagatctggaggaataccggtggcgaaggcggccccctggacaaagactgacgctcaggtgcgaaagcgtggggagcaaacaggattagataccctggtagtccacgccgtaaacgatgtctacttggaggttgtgcccttgaggcgtggcttccggagctaacgcgttaagtagaccgcctggggaatacggccgcaaggttaaaactcaaatgaattgacgggggcccgcacaagcggtggagcatgtggtttaattcgatgcaacgcgaagaaccttacctggtcttgacatccacagaactttccagagatggattggtgccttcgggaactgtgagacaggtgctgcatggctgtcgtcagctcgtgttgtgaaatgttgggttaagtcccgcaacgagcgcaacccttatcctttgttgccagcggtccggccgggaactcaaaggagactgccagtgataaactggaggaaggtggggatgacgtcaagtcatcatggcccttacgaccagggctacacacgtgctacaatggcgcatacaaagagaagcgacctcgcgagagcaagcggacctcataaagggcgtcgtagtccggattggagtctgcaactcgactccatgaagtcggaatcgctagtaatcgtggatcagaatgccacggtgaatacgttcccgggccttgtacacaccgcccgtcacaccatgggagtgggttgcaaaagaagtaggtagcttaaccttcgggggggcgcttaccactttgtgattcatgactggggtgaagtcgtaacaaggtaaccgtaggggaacctgcggtttgatcacctccctacctt

SEQ ID NO: 333 - DNA, 1459 bp, Selenomonas ruminantium
  misc_feature (45)..(45): n is a, c, g, or t
  misc_feature (57)..(58): n is a, c, g, or t
  misc_feature (64)..(64): n is a, c, g, or t
  misc_feature (68)..(69): n is a, c, g, or t
  misc_feature (459)..(459): n is a, c, g, or t
  misc_feature (1002)..(1002): n is a, c, g, or t
  misc_feature (1010)..(1011): n is a, c, g, or t
  misc_feature (1128)..(1128): n is a, c, g, or t
  misc_feature (1437)..(1437): n is a, c, g, or t
gacgaacgctggcggcgtgcttaacacatgcaagtcgaacgaggngattgaaagctnncttttnaganncgagtggcaaacgggtgagtaacgcgtagacaacctgccgcaaagatggggacaacagtccgaaaggactgctaataccgaatgttgtcaagtttccgcatgggagcttgattaaagatggcctctacttgtaagctatcgctttgcgatgggtctgcgtctgattagctagttggtggggtaacggcctaccaaggcgacgatcagtagccggtctgagaggatgaacggccacattggaactgagacacggtccagactcctacgggaggcagcagtggggaatcttccgcaatgggcgaaagcctgacggagcaacgccgcgtgagtgaagaagggtttcggctcgtaaagctctgttgacggggacgaatgtgcgaaatgcgaatngtttttcgcaatgacggtacccgtcgaggaagccacggctaactacgtgccagcagccgcggtaatacgtaggtggcgagcgttgtccggaattattgggcgtaaagggagcgcaggcgggaaggcaagtcagtcttaaaagtgcggggctcaaccccgtgatgggattgaaactgtctttcttgagtgcaggagaggaaagcggaattcctagtgtagcggtgaaatgcgtagatattaggaggaacaccagtggcgaaggcggctttctggactgtaactgacgctgaggctcgaaagcgtggggagcgaacaggattagataccctggtagtccacgccgtaaacgatgaatgctaggtgtaggaggtatcgaccccttctgtgccggagttaacgcaataagcattccgcctggggagtacggtcgcaagactgaaactcaaaggaattgacgggggcccgcacaagcggtggagtatgtggtttaattcgacgcaacgcgaagaaccttaccagggcttgacattgagtgaaaggccnagagatanncccctctcttcggagacacgaaaacaggtggtgcatggctgtcgtcagctcgtgtcgtgagatgttgggttaagtcccgcaacgagcgcaacccctatcatttgttgccagcacgtnaaggtgggaactcaaatgagactgccgcggacaacgcggaggaaggcggggatgacgtcaagtcatcatgccccttatgtcctgggctacacacgtactacaatgggatggacagagagcagcgaccccgcgagggcaagcgaaccccataaaccatctcccagttcggattgcaggctgcaacccgcctgcatgaagtcggaatcgctagtaatcgctggtcagcatacagcggtgaatacgttcccgggccttgtacacaccgcccgtcacaccacggaagtcattcacacccgaagccggtgggtnaaccgcaaggatatagccgtcg

SEQ ID NO: 334 - DNA, 1477 bp, Selenomonas sputigena
gacgaacgctggcggcgtgcttaacacatgcaagtcgaacgggaacctttatttcggtaaaggtgagagtggcaaacgggtgagtaacacgtaggcaacctgccgacaggatggggacaacattccgaaaggaatgctaataccgaatggagtccggggatggcatcatccctggataaaagatggcctctgaatatgctatcgcctgtcgatgggcctgcgtctgattagccagttggcggggtaacggcccaccaaagcgacgatcagtagccggtctgagaggatgaacggccacattgggactgagacacggcccagactcctacgggaggcagcagtggggaatcttccacaatgggcgaaagcctgatggagcaacgccgcgtgagtgaagaaggtcttcggatcgtaaagctctgttgcacgggacgaaaaccgagcttgagaatattgagtttgggtgacggtaccgagcgaggaagccacggctaactacgtgccagcagccgcggtaatacgtaggtggcgagcgttgtccggaattattgggcgtaaagggagcgcaggcggacatataagtccatcttaaaagtgcggggctcaaccccgtgaggggatggaaactgtatgccttgagtgcaggagaggaaagcggaattcccagtgtagcggtgaaatgcgtagatattgggaggaacaccagtggcgaaggcggctttctggactgtaactgacgctgaggctcgaaagccaggggagcgaacgggattagataccccggtagtcctggccgtaaacgatgaatgctaggtgtaggaggtatcgacccctcctgtgccggagttaacgcaataagcattccgcctggggagtacggtcgcaagactgaaactcaaaggaattgacgggggcccgcacaagcggtggagtatgtggtttaattcgacgcaacgcgaagaaccttaccagggcttgacattgagtgaaagagctagagatagcttcctcccttcggggacacgaaaacaggtggtgcatggctgtcgtcagctcgtgtcgtgagatgttgggttaagtcccgcaacgagcgcaacccctgtcctttgttgccagcgcgtaatggcgggaactcaaaggagactgccgcggagaacgcggaggaaggcggggatgacgtcaagtcatcatgccccttatgtcctgggctacacacgtactacaatgggatggacagagggaagcgaaggcgtgagccggagcggaccccacaaaccatcccccagttcggattgcaggctgcaacccgcctgcatgaagtcggaatcgctagtaatcgcaggtcagcatactgcggtgaatacgttcccgggccttgtacacaccgcccgtcacaccacggaagtcattcacgcccaaagccggtgggccaaccgcaaggaggcagctgtctaaggcgggggcgatgactggggtg

SEQ ID NO: 335 - DNA, 1433 bp, Senegalimassilia anaerobia
gatgaacgctggcggcgtgcctaacacatgcaagtcgaacgatgaaaccgcccccgggcggacatgaagtggcgaacgggtgagtaacacgtgaccgacctgccccccgcccagggacagccccccgaaagggggattaatacctggtactccgggagcggcgcatgccgcccccgggaaagctctcgcggcgggggatggggtcgcggcccatcaggtagacggcggggcagaggcccaccgtgccgacgacgggtagccgggttgagagaccgaccggccacattgggactgagatacggcccagactcctacgggaggcagcagtggggaattttgcgcaatgggggcaaccctgacgcagcaacgccgcgtgcgggacgaaggcgtccgcgtcgtaaaccgctttcagcggggaacacctaacgagggtacccgcagaagaagccccggctaaatacgtgccagcagccgcggtaatacgtatggggcgagcgttatccggattcattgggcgtaaagcgcgcgtaggcggagcgctaagcgggacctctaacccgagggctcaacccccggccgggtcccgaactggcgctctcgagtgcggtaggggagagcggaattcccggtgtagcggtggaatgcgcagatatcgggaagaacaccgacggcgaaggcagctctctgggccgaaactgacgctgaggcgcgaaagctgggggagcgaacaggattagataccctggtagtcccagccgtaaacgatgggcgctaggtgtgggggatgagatcccccgtgccgcagccaacgcattaagcgccccgcctggggagtacggccgcaaggctaaaactcaaaggaattgacgggggcccgcacaagcagcggagcatgtggcttaattcgaagcaacgcgaagaaccttaccagggcttgacatgcaggtgaagcggcggagacgccgtggccgagaggagcctgcacaggtggtgcatggctgtcgtcagctcgtgtcgtgagatgttgggttaagtcccgcaacgagcgcaacccctgccccgtgttgccagcattcagttggggactcgcgggggactgccggcgtcaagccggaggaaggtggggacgacgtcaagtcatcatgccccttatgccctgggccgcacacgtgctacaatggccggtacagagggttgcgaccccgcgagggggagcggatcccgcaaagccggccccagttcggatcggaggctgcaacccgcctccgtgaagccggagttgctagtaatcgcggatcagcacgccgcggtgaatacgttcccgggccttgtacacaccgcccgtcacaccacccgagtcgtctgcacccgaagccgccggccgaaccctttcaggggcggaggcgtcgaaggtgtggagggtgaggggggtg

SEQ ID NO: 336 - DNA, 1464 bp, Serratia marcescens
attgaacgctggcggcaggcttaacacatgcaagtcgagcggtagcacaggggagcttgctccctgggtgacgagcggcggacgggtgagtaatgtctgggaaactgcctgatggagggggataactactggaaacggtagctaataccgcataacgtcgcaagaccaaagagggggaccttcgggcctcttgccatcagatgtgcccagatgggattagctagtaggtggggtaatggctcacctaggcgacgatccctagctggtctgagaggatgaccagccacactggaactgagacacggtccagactcctacgggaggcagcagtggggaatattgcacaatgggcgcaagcctgatgcagccatgccgcgtgtgtgaagaaggccttcgggttgtaaagcactttcagcgaggaggaaggtggtgagcttaatacgttcatcaattgacgttactcgcagaagaagcaccggctaactccgtgccagcagccgcggtaatacggagggtgcaagcgttaatcggaattactgggcgtaaagcgcacgcaggcggtttgttaagtcagatgtgaaatccccgggctcaacctgggaactgcatttgaaactggcaagctagagtctcgtagaggggggtagaattccaggtgtagcggtgaaatgcgtagagatctggaggaataccggtggcgaaggcggccccctggacgaagactgacgctcaggtgcgaaagcgtggggagcaaacaggattagataccctggtagtccacgctgtaaacgatgtcgatttggaggttgtgcccttgaggcgtggcttccggagctaacgcgttaaatcgaccgcctggggagtacggccgcaaggttaaaactcaaatgaattgacgggggcccgcacaagcggtggagcatgtggtttaattcgatgcaacgcgaagaaccttacctactcttgacatccagagaactttccagagatggattggtgccttcgggaactctgagacaggtgctgcatggctgtcgtcagctcgtgttgtgaaatgttgggttaagtcccgcaacgagcgcaacccttatcctttgttgccagcggttcggccgggaactcaaaggagactgccagtgataaactggaggaaggtggggatgacgtcaagtcatcatggcccttacgagtagggctacacacgtgctacaatggcatatacaaagagaagcgacctcgcgagagcaagcggacctcataaagtatgtcgtagtccggattggagtctgcaactcgactccatgaagtcggaatcgctagtaatcgtagatcagaatgctacggtgaatacgttcccgggccttgtacacaccgcccgtcacaccatgggagtgggttgcaaaagaagtaggtagcttaaccttcgggagggcgcttaccactttgtgattcatgactggggtg

SEQ ID NO: 337 - DNA, 1456 bp, Serratia ureilytica
gctggcggcaggcttacacatgcaagtcgagcggtagcacaggggagcttgctccctgggtgacgagcggcggacgggtgagtaatgtctgggaaactgcctgatggatggggataactactggaaacggtagctaataccgcataacgtcgcaagaccaaagagggggaccttcgggcctcttgccatcagatgtgcccagatgggattagctagtaggtggggtaatggctcacctaggcgacgatccctagctggtctgagaggatgaccagccacactggaactgagacacggtccagactcctacgggaggcagcagtggggaatattgcacaatgggcgcaagcctgatgcagccatgccgcgtgtgtgaagaaggccttcgggttgtaaagcactttcagcgaggaggaaggtggtgagcttaatacgctcatcaattgacgttactcgcagaagaagcaccggctaactccgtgccagcagccgcggtaatacggagggtgcaagcgttaatcggaattactgggcgtaaagcgcacgcaggcggtctgtcaagtcggatgtgaaatccccgggctcaacctgggaactgcattcgaaactggcaggctagagtcttgtagaggggggtagaattccaggtgtagcgatgaaatgcgtagagatctggaggaataccggtggcgaaggcggccccctggacaaagactgacgctcaggtgcgaaagcgtggggagcaaacaggattagataccctggtagtccacgccgtaaacgatgtcgacttggaggttgtgcccttgaggcgtggcttccggagctaacgcgttaagtcgaccgcctggggagtacggccgcaaggttaaaactcaaatgaattgacgggggcccgcacaagcggtggagcatgtggtttaattcgatgcaacgcgaagaaccttacctactcttgacatccagagaacttagcagagatgctttggtgccttcgggaactctgagacaggtgctgcatggctgtcgtcagctcgtgttgtgaaatgttgggttaagtcccgcaacgagcgcaacccttatcctttgttgccagcggttaggccgggaacccaaaggagactgccagtgataaactggaggaaggtggggatgacgtcaagtcatcatggcccttacgagtagggctacacacgtgctacaatggcgtatacaaagagaagcgacctcgcgagagcaagcggacctcataaagtacgtcgtagtccggattggagtctgcaactcgactccatgaagtcggaatcgctagtaatcgtagatcagaatgctacggtgaatacgttcccgggccttgtacacaccgcccgtcacaccatgggagtgggttgcaaaagaagtaggtagcttaaccttcgggagggcgcttaccactttgtgattcatgactggggtg

SEQ ID NO: 338 - DNA, 1465 bp, Shewanella xiamenensis
attgaacgctggcggcaggcctaacacatgcaagtcgagcggcagcacaagggagtttactcctgaggtggcgagcggcggacgggtgagtaatgcctagggatctgcccagtcgagggggataacagttggaaacgactgctaataccgcatacgccctacgggggaaagagggggaccttcgggcctctcgcgattggatgaacctaggtgggattagctagttggtgaggtaatggctcaccaaggcgacgatccctagctgttctgagaggatgatcagccacactgggactgagacacggcccagactcctacgggaggcagcagtggggaatattgcacaatgggggaaaccctgatgcagccatgccgcgtgtgtgaagaaggccttcgggttgtaaagcactttcagtagggaggaaagggtgagtcttaatacggctcatctgtgacgttacctacagaagaaggaccggctaactccgtgccagcagccgcggtaatacggagggtccgagcgttaatcggaattactgggcgtaaagcgtgcgcaggcggtttgttaagcgagatgtgaaagccctgggctcaacctaggaatagcatttcgaactggcgaactagagtcttgtagaggggggtagaattccaggtgtagcggtgaaatgcgtagagatctggaggaataccggtggcgaaggcggccccctggacaaagactgacgctcatgcacgaaagcgtggggagcaaacaggattagataccctggtagtccacgccgtaaacgatgtctactcggagtttggtgtcttgaacactgggctctcaagctaacgcattaagtagaccgcctggggagtacggccgcaaggttaaaactcaaatgaattgacgggggcccgcacaagcggtggagcatgtggtttaattcgatgcaacgcgaagaaccttacctactcttgacatccacagaagagaccagagatggacttgtgccttcgggaactgtgagacaggtgctgcatggctgtcgtcagctcgtgttgtgaaatgttgggttaagtcccgcaacgagcgcaacccctatccttatttgccagcacgtaatggtgggaactctagggagactgccggtgataaaccggaggaaggtggggacgacgtcaagtcatcatggcccttacgagtagggctacacacgtgctacaatggcgagtacagagggttgcaaagccgcgaggtggagctaatctcacaaagctcgtcgtagtccggattggagtctgcaactcgactccatgaagtcggaatcgctagtaatcgtggatcagaatgccacggtgaatacgttcccgggccttgtacacaccgcccgtcacaccatgggagtgggctgcaaaagaagtgggtagcttaaccttcgggggggcgctcaccactttgtggttcatgactggggtg

SEQ ID NO: 339 - DNA, 1464 bp, Shigella boydii
attgaacgctggcggcaggcctaacacatgcaagtcgaacggtaacaggaatcagcttgctgattcgctgacgagtggcggacgggtgagtaatgtctgggaaactgcctgatggagggggataactactggaaacggtagctaataccgcataatgtcgcaagaccaaagagggggaccttcgggcctcttgccatcggatgtgcccagatgggattagcttgttggtggggtaacggctcaccaaggcgacgatccctagctggtctgagaggatgaccagccacactggaactgagacacggtccagactcctacgggaggcagcagtggggaatattgcacaatgggcgcaagcctgatgcagccatgccgcgtgtatgaagaaggccttcgggttgtaaagtactttcagcggggaggaagggagtaaagttaatacctttgctcattgacgttatccgcagaagaagcaccggctaactccgtgccagcagccgcggtaatacggagggtgcaagcgttaatcggaattactgggcgtaaagcgcacgcaggcggtttgttaagtcagatgtgaaatccccgggctcaacctgggaactgcatctgatactggcaagcttgagtctcgtagaggggggtagaattccaggtgtagcggtgaaatgcgtagagatctggaggaataccggtggcgaaggcggccccctggacgaagactgacgctcaggtgcgaaagcgtggggagcaaacaggattagataccctggtagtccacgccgtaaacgatgtcgacttggaggttgtgcccttgaggcgtggcttccggagctaacgcgttaagtcgaccgcctggggagtacggccgcaaggttaaaactcaaatgaattgacgggggcccgcacaagcggtggagcatgtggtttaattcgatgcaacgcgaagaaccttacctggtcttgacatccacggaagttttcagagatgagaatgtgccttcgggaaccgtgagacaggtgctgcatggctgtcgtcagctcgtgttgtgaaatgttgggttaagtcccgcaacgagcgcaacccttatcctttgttgccagcggtccggccgggaactcaaaggagactgccagtgataaactggaggaaggtggggacgacgtcaagtcatcatggcccttacgaccagggctacacacgtgctacaatggcgcatacaaagagaagcgacctcgcgagagcaagcggacctcataaagtgcgtcgtagtccggattggagtctgcaactcgactccatgaagtcggaatcgctagtaatcgtggatcagaatgccacggtgaatacgttcccgggccttgtacacaccgcccgtcacaccatgggagtgggttgcaaaagaagtaggtagcttaaccttcgggagggcgcttaccactttgtgattcatgactggggtg

SEQ ID NO: 340 - DNA, 1463 bp, Shigella dysenteriae
attgaacgctggcggcaggcctaacacatgcaagtcgaacggtaacagaaagcagcttgctgtttgctgacgagtggcggacgggtgagtaatgtctgggaaactgcctgatggagggggataactactggaaacggtagctaataccgcataacgtcgcaagaccaaagagggggaccttcgggcctcttgccatcggatgtgcccagatgggattagctagtaggtggggtaacggctcacctaggcgacgatccctagctggtctgagaggatgaccagccacactggaactgagacacggtccagactcctacgggaggcagcagtggggaatattgcacaatgggcgcaagcctgatgcagccatgccgcgtgtatgaagaaggccttcgggttgtaaagtactttcagcggggaggaagggagtaaagttaatacctttgctcattgacgttacccgcagaagaagcaccggctaactccgtgccagcagccgcggtaatacggagggtgcaagcgttaatcggaattactgggcgtaaagcgcacgcaggcggtttgttaagtcagatgtgaaatccccgggctcaacctgggaactgcatctgatactggcaagcttgagtctcgtagaggggggtagaattccaggtgtagcggtgaaatgcgtagagatctggaggaataccggtggcgaaggcggccccctggacgaaaactgacgctcaggtgcgaaagcgtggggagcaaacaggattagataccctggtagtccacgccgtaaacgatgtcgacttggaggttgtgcccttgaggcgtggcttccggagctaacgcgttaagtcgaccgcctggggagtacggccgcaaggttaaaactcaaatgaattgacgggggcccgcacaagcggtggagcatgtggtttaattcgatgcaacgcgaagaaccttacctggtcttgacatccacagaaccttgtagagatacgagggtgccttcgggaactgtgagacaggtgctgcatggctgtcgtcagctcgtgttgtgaaatgttgggttaagtcccgcaacgagcgcaacccttatcctttgttgccagcggtccggccgggaactcaaaggagactgccagtgataaactggaggaaggtggggatgacgtcaagtcatcatggcccttacgaccagggctacacacgtgctacaatggcgcatacaaagagaagcgacctcgcgagagcaagcggacctcataaagtgcgtcgtagtccggattggagtctgcaactcgactccatgaagtcggaatcgctagtaatcgtggatcagaatgtcacggtgaatacgttcccgggccttgtacacaccgcccgtcacaccatgggagtgggttgcaaaagaagtaggtagcttaaccttcgggagggcgcttaccactttgtgattcatgactggggtg

SEQ ID NO: 341 - DNA, 1464 bp, Shigella flexneri
attgaacgctggcggcaggcctaacacatgcaagtcgaacggtaacaggaagcagcttgctgtttcgctgacgagtggcggacgggtgagtaatgtctgggaaactgcctgatggagggggataactactggaaacggtagctaataccgcataacgtcgcaagaccaaagagggggaccttcgggcctcttgccatcggatgtgcccagatgggattagctagtaggtggggtaacggctcacctaggcgacgatccctagctggtctgagaggatgaccagccacactggaactgagacacggtccagactcctacgggaggcagcagtggggaatattgcacaatgggcgcaagcctgatgcagccatgccgcgtgtatgaagaaggccttcgggttgtaaagtactttcagcggggaggaagggagtaaagttaatacctttgctcattgacgttacccgcagaagaagcaccggctaactccgtgccagcagccgcggtaatacggagggtgcaagcgttaatcggaattactgggcgtaaagcgcacgcaggcggtttgttaagtcagatgtgaaatccccgggctcaacctgggaactgcatctgatactggcaagcttgagtctcgtagaggggggtagaattccaggtgtagcggtgaaatgcgtagagatctggaggaataccggtggcgaaggcggccccctggacgaagactgacgctcaggtgcgaaagcgtggggagcaaacaggattagataccctggtagtccacgccgtaaacgatgtcgacttggaggttgtgcccttgaggcgtggcttccggagctaacgcgttaagtcgaccgcctggggagtacggccgcaaggttaaaactcaaatgaattgacgggggcccgcacaagcggtggagcatgtggtttaattcgatgcaacgcgaagaaccttacctggtcttgacatccacggaagttttcagagatgagaatgtgccttcgggaaccgtgagacaggtgctgcatggctgtcgtcagctcgtgttgtgaaatgttgggttaagtcccgcaacgagcgcaacccttatcctttgttgccagcggtccggccgggaactcaaaggagactgccagtgataaactggaggaaggtggggatgacgtcaagtcatcatggcccttacgaccagggctacacacgtgctacaatggcgcatacaaagagaagcgacctcgcgagagcaagcggacctcataaagtgcgtcgtagtccggattggagtctgcaactcgactccatgaagtcggaatcgctagtaatcgtggatcagaatgccacggtgaatacgttcccgggccttgtacacaccgcccgtcacaccatgggagtgggttgcaaaagaagtaggtagcttaaccttcgggagggcgcttaccactttgtgattcatgactggggtg

SEQ ID NO: 342 - DNA, 1409 bp, Sphingomonas aerolata
  misc_feature (1034)..(1034): n is a, c, g, or t
  misc_feature (1112)..(1112): n is a, c, g, or t
  misc_feature (1270)..(1270): n is a, c, g, or t
  misc_feature (1288)..(1288): n is a, c, g, or t
  misc_feature (1318)..(1318): n is a, c, g, or t
  misc_feature (1379)..(1379): n is a, c, g, or t
aatgaacgctggcggcatgcctaacacatgcaagtcgaacgaagccttcgggtttagtggcgcacgggtgcgtaacgcgtgggaatctgccccttggttcggaataacagttggaaacgactgctaataccggatgatgacgtaagtccaaagatttatcgccgagggatgagcccgcgtaggattaggtagttggtgtggtaaaggcgcaccaagccgacgatccttagctggtctgagaggatgatcagccacactgggactgagacacggcccagactcctacgggaggcagcagtggggaatattggacaatgggcgaaagcctgatccagcaatgccgcgtgagtgatgaaggccttagggttgtaaagctcttttacccgggatgataatgacagtaccgggagaataagctccggctaactccgtgccagcagccgcggtaatacggagggagctagcgttattcggaattactgggcgtaaagcgcacgtaggcggctttgtaagtaagaggtgaaagcccagagctcaactctggaattgccttttagactgcatcgcttgaatcatggagaggtcagtggaattccgagtgtagaggtgaaattcgtagatattcggaagaacaccagtggcgaaggcggctgactggacatgtattgacgctgaggtgcgaaagcgtggggagcaaacaggattagataccctggtagtccacgccgtaaacgatgataactagctgtccggggacttggtctttgggtggcgcagctaacgcattaagttatccgcctggggagtacggccgcaaggttaaaactcaaatgaattgacgggggcctgcacaagcggtggagcatgtggtttaattcgaagcaacgcgcagaaccttaccagcgtttgacatggcaggacgacttctggagacagatttcttcccttcggggacctgcacacaggtgctgcatggctgtcgtcagctcgtgtcgtgagatgttgggttaagtcccgcaacgagcgcaaccctngaccttagttgccatcatttagttgggcactttaaggtaaccgccggtgataagccggaggaaggtggggatgacgtnaagtcctcatggcccttacgcgctgggctacacacgtgctacaatggcggtgacagtgggcagcaagcacgcgagtgtgagctaatctccaaaagccgtctcagttcggattgttctctgcaactcgagagcatgaaggcggaatcgctagtaatcgnggatcagcatgccgcggngaatacgttcccaggccttgtacacaccgnccgtcacaccatgggagttggattcacccgaaggcgttgcgctaactcgcaagagaggcangcgaccacggtgggtttagcgactggggtg

SEQ ID NO: 343 - DNA, 1474 bp, Staphylococcus arlettae
gatgaacgctggcggcgtgcctaatacatgcaagtcgagcgaacagataaggagcttgctcctttgacgttagcggcggacgggtgagtaacacgtgggtaacctacctataagactggaataactccgggaaaccggggctaatgccggataacatttagaaccgcatggttctaaagtgaaagatggttttgctatcacttatagatggacccgcgccgtattagctagttggtaaggtaatggcttaccaaggcaacgatacgtagccgacctgagagggtgatcggccacactggaactgagacacggtccagactcctacgggaggcagcagtagggaatcttccgcaatgggcgaaagcctgacggagcaacgccgcgtgagtgatgaagggtttcggctcgtaaaactctgttattagggaagaacaaacgtgtaagtaactgtgcacgtcttgacggtacctaatcagaaagccacggctaactacgtgccagcagccgcggtaatacgtaggtggcaagcgttatccggaattattgggcgtaaagcgcgcgtaggcggtttcttaagtctgatgtgaaagcccacggctcaaccgtggagggtcattggaaactgggagacttgagtgcagaagaggaaagtggaattccatgtgtagcggtgaaatgcgcagagatatggaggaacaccagtggcgaaggcgactttctggtctgtaactgacgctgatgtgcgaaagcgtggggatcaaacaggattagataccctggtagtccacgccgtaaacgatgagtgctaagtgttagggggtttccgccccttagtgctgcagctaacgcattaagcactccgcctggggagtacgaccgcaaggttgaaactcaaaggaattgacggggacccgcacaagcggtggagcatgtggtttaattcgaagcaacgcgaagaaccttaccaaatcttgacatcctttgaccactctagagatagagttttccccttcgggggacaaagtgacaggtggtgcatggttgtcgtcagctcgtgtcgtgagatgttgggttaagtcccgcaacgagcgcaacccttaaacttagttgccagcatttagttgggcactctaggttgactgccggtgacaaaccggaggaaggtggggatgacgtcaaatcatcatgccccttatgatttgggctacacacgtgctacaatggacaatacaaagggcagctaaaccgcgaggtcatgcaaatcccataaagttgttctcagttcggattgtagtctgcaactcgactacatgaagctggaatcgctagtaatcgtagatcagcatgctacggtgaatacgttcccgggtcttgtacacaccgcccgtcacaccacgagagtttgtaacacccgaagccggtggagtaaccatttatggagctagccgtcgaaggtgggacaaatgattggggt

SEQ ID NO: 344 - DNA, 1474 bp, Staphylococcus aureus
gatgaacgctggcggcgtgcctaatacatgcaagtcgagcgaacggacgagaagcttgcttctctgatgttagcggcggacgggtgagtaacacgtggataacctacctataagactgggataacttcgggaaaccggagctaataccggataatattttgaaccgcatggttcaaaagtgaaagacggtcttgctgtcacttatagatggatccgcgctgcattagctagttggtaaggtaacggcttaccaaggcaacgatgcatagccgacctgagagggtgatcggccacactggaactgagacacggtccagactcctacgggaggcagcagtagggaatcttccgcaatgggcgaaagcctgacggagcaacgccgcgtgagtgatgaaggtcttcggatcgtaaaactctgttattagggaagaacatatgtgtaagtaactgtgcacatcttgacggtacctaatcagaaagccacggctaactacgtgccagcagccgcggtaatacgtaggtggcaagcgttatccggaattattgggcgtaaagcgcgcgtaggcggttttttaagtctgatgtgaaagcccacggctcaaccgtggagggtcattggaaactggaaaacttgagtgcagaagaggaaagtggaattccatgtgtagcggtgaaatgcgcagagatatggaggaacaccagtggcgaaggcgactttctggtctgtaactgacgctgatgtgcgaaagcgtggggatcaaacaggattagataccctggtagtccacgccgtaaacgatgagtgctaagtgttagggggtttccgccccttagtgctgcagctaacgcattaagcactccgcctggggagtacgaccgcaaggttgaaactcaaaggaattgacggggacccgcacaagcggtggagcatgtggtttaattcgaagcaacgcgaagaaccttaccaaatcttgacatcctttgacaactctagagatagagccttccccttcgggggacaaagtgacaggtggtgcatggttgtcgtcagctcgtgtcgtgagatgttgggttaagtcccgcaacgagcgcaacccttaagcttagttgccatcattaagttgggcactctaagttgactgccggtgacaaaccggaggaaggtggggatgacgtcaaatcatcatgccccttatgatttgggctacacacgtgctacaatggacaatacaaagggtagcgaaaccgcgaggtcaagcaaatcccataaagttgttctcagttcggattgtagtctgcaactcgactacatgaagctggaatcgctagtaatcgtagatcagcatgctacggtgaatacgttcccgggtcttgtacacaccgcccgtcacaccacgagagtttgtaacacccgaagccggtggagtaaccttttaggagctagccgtcgaaggtgggacaaatgattggggtg

SEQ ID NO: 345 - DNA, 1468 bp, Staphylococcus auricularis
  misc_feature (187)..(187): n is a, c, g, or t
  misc_feature (487)..(487): n is a, c, g, or t
gatgaacgctggcggcgtgcctaatacatgcaagtcgagcgaacagataaggagcttgctcctttgacgttagcggcggacgggtgagtaacacgtgggtaacctacctataagactggaataactccgggaaaccggggctaatgccggataacatgttgaaccgcatggttctacagtgaaaggnggctttgctgtcacttatagatggacccgcgccgtattagctagttggtgaggtaacggctcaccaaggcaacgatacgtagccgacctgagagggtgatcggccacactggaactgagacacggtccagactcctacgggaggcagcagtagggaatcttccgcaatgggcgaaagcctgacggagcaacgccgcgtgagtgatgaaggtcttcggatcgtaaaactctgttattagggaagaacaaatgcgtaagtaactgtgcgcgtcttgacggtacctaatcagaaagccacggntaactacgtgccagcagccgcggtaatacgtaggtggcaagcgttatccggaattattgggcgtaaagcgcgcgtaggcggttttttaagtctgatgtgaaagcccacggctcaaccgtggagggtcattggaaactgaaaaacttgagtgcagaagaggaaagtggaattccatgtgtagcggtgaaatgcgcagagatatggaggaacaccagtggcgaagccgactttctggtctgtaactgacgctgatgtgcgaaagcgtggggatcaaacaggattagataccctggtagtccacgccgtaaacgatgagtgctaagtgttagggggtttccgccccttagtgctgtagctaacgcattaagcactccgcctggggagtacggccgcaaggcttaaactcaaaggaattgacggggacccgcacaagcggtggagcatgtggtttaattcgaagcaacgcgaagaaccttaccaaatcttgacatcctttgaccgctctagagatagagtcttccccttcgggggacaaagtgacaggtggtgcatggttgtcgtcagctcgtgtcgtgagatgttgggttaagtcccgcaacgagcgcaacccttaagcttagttgccatcattcagttgggcactctaagttgactgccggtgacaaaccggaggaaggtggggatgacgtcaaatcatcatgccccttatgatttgggctacacacgtgctacgatggacaatacaaagggcagcgaaaccgcgaggtcaagcaaatcccataaagttgttctcagttcggattgtagtctgcaactcgactacatgaagctggaatcgctagtaatcgtagatcagcatgctacggtgaatacgttcccgggtcttgtacacaccgcccgtcacaccacgagagtttgtaacacccgaagtcggtagagtaaccttttggagctagccgccgaaggtgggacaaatgattg

SEQ ID NO: 346 - DNA, 1469 bp, Staphylococcus capitis
  misc_feature (9)..(9): n is a, c, g, or t
gatgaacgntggcggcgtgcctaatacatgcaagtcgagcgaacagacgaggagcttgctcctctgacgttagcggcggacgggtgagtaacacgtggataacctacctataagactgggataacttcgggaaaccggagctaataccggataacatgttgaaccgcatggttcaacagtgaaagacggtcttgctgtcacttatagatggatccgcgccgcattagctagttggtaaggtaacggcttaccaaggcaacgatgcgtagccgacctgagagggtgatcggccacactggaactgagacacggtccagactcctacgggaggcagcagtagggaatcttccgcaatgggcgaaagcctgacggagcaacgccgcgtgagtgaagaaggtcttcggatcgtaaaactctgttattagggaagaacaaatgtgtaagtaactatgcacgtcttgacggtacctaatcagaaagccacggctaactacgtgccagcagccgcggtaatacgtaggtggcaagcgttatccggaattattgggcgtaaagcgcgcgtaggcggttttttaagtctgatgtgaaagcccacggctcaaccgtggagggtcattggaaactggaaaacttgagtgcagaagaggaaagtggaattccatgtgtagcggtgaaatgcgcagagatatggaggaacaccagtggcgaaggcgactttctggtctgtaactgacgctgatgtgcgaaagcgtggggatcaaacaggattagataccctggtagtccacgccgtaaacgatgagtgctaagtgttagggggtttccgccccttagtgctgcagctaacgcattaagcactccgcctggggagtacgaccgcaaggttgaaactcaaaggaattgacggggacccgcacaagcggtggagcatgtggtttaattcgaagcaacgcgaagaaccttaccaaatcttgacatcctctgatccctctagagatagagttttccccttcgggggacagagtgacaggtggtgcatggttgtcgtcagctcgtgtcgtgagatgttgggttaagtcccgcaacgagcgcaacccttaagcttagttgccatcattaagttgggcactctaagttgactgccggtgacaaaccggaggaaggtggggatgacgtcaaatcatcatgccccttatgatttgggctacacacgtgctacaatggacaatacaaagggtagcgaaaccgcgaggtcaagcaaatcccataaagttgttctcagttcggattgtagtctgcaactcgactacatgaagctggaatcgctagtaatcgtagatcagcatgctacggtgaatacgttcccgggtcttgtacacaccgcccgtcacaccacgagagtttgtaacacccgaagccggtggagtaaccttttggagctagccgtcgaaggtgggacaaatgattgg

SEQ ID NO: 347 - DNA, 1472 bp, Staphylococcus caprae
gatgaacgctggcggcgtgcctaatacatgcaagtcgagcgaacagacgaggagcttgctcctctgacgttagcggcggacgggtgagtaacacgtggataacctacctataagactgggataacttcgggaaaccggagctaataccggataacatgttgaaccgcatggttcaacagtgaaagacggtcttgctgtcacttatagatggatccgcgccgcattagctagttggtaaggtaacggcttaccaaggcaacgatgcgtagccgacctgagagggtgatcggccacactggaactgagacacggtccagactcctacgggaggcagcagtagggaatcttccgcaatgggcgaaagcctgacggagcaacgccgcgtgagtgaagaaggtcttcggatcgtaaaactctgttattagggaagaacaaatgtgtaagtaactatgcacgtcttgacggtacctaatcagaaagccacggctaactacgtgccagcagccgcggtaatacgtaggtggcaagcgttatccggaattattgggcgtaaagcgcgcgtaggcggttttttaagtctgatgtgaaagcccacggctcaaccgtggagggtcattggaaactggaaaacttgagtgcagaagaggaaagtggaattccatgtgtagcggtgaaatgcgcagagatatggaggaacaccagtggcgaaggcgactttctggtctgtaactgacgctgatgtgcgaaagcgtggggatcaaacaggattagataccctggtagtccacgccgtaaacgatgagtgctaagtgttagggggtttccgccccttagtgctgcagctaacgcattaagcactccgcctggggagtacgaccgcaaggttgaaactcaaaggaattgacggggacccgcacaagcggtggagcatgtggtttaattcgaagcaacgcgaagaaccttaccaaatcttgacatcctctgacccctctagagatagagttttccccttcgggggacagagtgacaggtggtgcatggttgtcgtcagctcgtgtcgtgagatgttgggttaagtcccgcaacgagcgcaacccttaagcttagttgccatcattaagttgggcactctaagttgactgccggtgacaaaccggaggaaggtggggatgacgtcaaatcatcatgccccttatgatttgggctacacacgtgctacaatggacaatacaaagggcagcgaaaccgcgaggtcaagcaaatcccataaagttgttctcagttcggattgtagtctgcaactcgactacatgaagctggaatcgctagtaatcgtagatcagcatgctacggtgaatacgttcccgggtcttgtacacaccgcccgtcacaccacgagagtttgtaacacccgaagccggtggagtaaccttttggagctagccgtcgaaggtgggacaaatgattggggt

SEQ ID NO: 348 - DNA, 1449 bp, Staphylococcus carnosus
actggcggcgtgcctatacatgcaagtcgagcgaacagacgaggagcttgctcctctgatgttagcggcggacgggtgagtaacacgtgggtaatctacctataagactggaataactccgggaaaccggggctaatgccggataatatgcagaaccgcatggttctgcaatgaaagacggttttgctgtcacttatagatggacccgcgccgtattagctagttggtaaggtaatggcttaccaaggcaacgatacgtagccgacctgagagggtgatcggccacactggaactgagacacggtccagactcctacgggaggcagcagtagggaatcttccgcaatgggcgaaagcctgacggagcaacgccgcgtgagtgatgaaggtcttcggatcgtaaaactctgttattagggaagaacaagtgcgtaggtaactatgcgcaccttgacggtacctaatcagaaagccacggctaactacgtgccagcagccgcggtaatacgtaggtggcaagcgttatccggaattattgggcgtaaagcgcgcgtaggcggttttttaagtctgatgtgaaagcccacggctcaaccgtggagggtcattggaaactggaaaacttgagtgcagaagaggaaagtggaattccatgtgtagcggtgaaatgcgcagagatatggaggaacaccagtggcgaaggcgactttctggtctgcaactgacgctgatgtgcgaaagcgtggggatcaaacaggattagataccctggtagtccacgccgtaaacgatgagtgctaagtgttagggggtttccgccccttagtgctgcagctaacgcattaagcactccgcctggggagtacggccgcaaggctgaaactcaaaggaattgacggggacccgcacaagcggtggagcatgtggtttaattcgaagcaacgcgaagaaccttaccaaatcttgacatcctttgaccgctctagagatagagtcttccccttcgggggacaaagtgacaggtggtgcatggttgtcgtcagctcgtgtcgtgagatgttgggttaagtcccgcaacgagcgcaacccttaagcttagttgccagcattaagttgggcactctaagttgactgccggtgacaaaccggaggaaggtggggatgacgtcaaatcatcatgccccttatgatttgggctacacacgtgctacaatggacagtacaaagggcagcgaaaccgcgaggtcaagcaaatcccataaagctgttctcagttcggattgtagtctgcaactcgactacatgaagctggaatcgctagtaatcgtagatcagcatgctacggtgaatacgttcccgggtcttgtacacaccgcccgtcacaccacgagagttcgtaacaccagaagccggtggagtaaccttttaggagctagccgtcgaaggtgg

SEQ ID NO: 349 - DNA, 1475 bp, Staphylococcus cohnii
gatgaacgctggcggcgtgcctaatacatgcaagtcgagcgaacagataaggagcttgctcctttgacgttagcggcggacgggtgagtaacacgtgggtaacctacctataagactggaataactccgggaaaccggggctaatgccggataacatttagaaccgcatggttctaaagtgaaagatggttttgctatcacttatagatggacccgcgccgtattagctagttggtaaggtaacggcttaccaaggcaacgatacgtagccgacctgagagggtgatcggccacactggaactgagacacggtccagactcctacgggaggcagcagtagggaatcttccgcaatgggcgaaagcctgacggagcaacgccgcgtgagtgatgaaggtcttcggatcgtaaaactctgttattagggaagaacaaatgtgtaagtaactatgcacgtcttgacggtacctaatcagaaagccacggctaactacgtgccagcagccgcggtaatacgtaggtggcaagcgttatccggaattattgggcgtaaagcgcgcgtaggcggtttcttaagtctgatgtgaaagcccacggctcaaccgtggagggtcattggaaactgggaaacttgagtgcagaagaggaaagtggaattccatgtgtagcggtgaaatgcgcagagatatggaggaacaccagtggcgaaggcgactttctggtctgtaactgacgctgatgtgcgaaagcgtggggatcaaacaggattagataccctggtagtccacgccgtaaacgatgagtgctaagtgttagggggtttccgccccttagtgctgcagctaacgcattaagcactccgcctggggagtacgaccgcaaggttgaaactcaaaggaattgacggggacccgcacaagcggtggagcatgtggtttaattcgaagcaacgcgaagaaccttaccaaatcttgacatcctttgacaactctagagatagagccttccccttcgggggacaaagtgacaggtggtgcatggttgtcgtcagctcgtgtcgtgagatgttgggttaagtcccgcaacgagcgcaacccttaaacttagttgccagcatttagttgggcactctaagttgactgccggtgacaaaccggaggaaggtggggatgacgtcaaatcatcatgccccttatgatttgggctacacacgtgctacaatggacaatacaaagggcagctaaaccgcgaggtcatgcaaatcccataaagttgttctcagttcggattgtagtctgcaactcgactacatgaagctggaatcgctagtaatcgtagatcagcatgctacggtgaatacgttcccgggtcttgtacacaccgcccgtcacaccacgagagtttgtaacacccgaagccggtggagtaaccatttatggagctagccgtcgaaggtgggacaaatgattggggtg

SEQ ID NO: 350 - DNA, 1474 bp, Staphylococcus condimenti
gatgaacgctggcggcgtgcctaatacatgcaagtcgagcgaacagacgaggagcttgctcctctgacgttagcggcggacgggtgagtaacacgtgggtaacctacctataagactggaataactccgggaaaccggggctaatgccggataatatgcagaaccgcatggttctgcaatgaaagacggttttgctgtcacttatagatggacccgcgccgtattagctagttggtaaggtaacggcttaccaaggcaacgatacgtagccgacctgagagggtgatcggccacactggaactgagacacggtccagactcctacgggaggcagcagtagggaatcttccgcaatgggcgaaagcctgacggagcaacgccgcgtgagtgatgaaggtcttcggatcgtaaaactctgttattagggaagaacaagtgcgtaggtaactatgcgcaccttgacggtacctaatcagaaagccacggctaactacgtgccagcagccgcggtaatacgtaggtggcaagcgttatccggaattattgggcgtaaagcgcgcgtaggcggttttttaagtctgatgtgaaagcccacggctcaaccgtggagggtcattggaaactggaaaacttgagtgcagaagaggaaagtggaattccatgtgtagcggtgaaatgcgcagagatatggaggaacaccagtggcgaaggcgactttctggtctgcaactgacgctgatgtgcgaaagcgtggggatcaaacaggattagataccctggtagtccacgccgtaaacgatgagtgctaagtgttagggggtttccgccccttagtgctgcagctaacgcattaagcactccgcctggggagtacggccgcaaggctgaaactcaaaggaattgacggggacccgcacaagcggtggagcatgtggtttaattcgaagcaacgcgaagaaccttaccaaatcttgacatcctttgaccgctctagagatagagtcttccccttcgggggacaaagtgacaggtggtgcatggttgtcgtcagctcgtgtcgtgagatgttgggttaagtcccgcaacgagcgcaacccttaagcttagttgccagcattaagttgggcactctaagttgactgccggtgacaaaccggaggaaggtggggatgacgtcaaatcatcatgccccttatgatttgggctacacacgtgctacaatggacagtacaaagggcagcgaaaccgcgaggtcaagcaaatcccataaagctgttctcagttcggattgtagtctgcaactcgactacatgaagctggaatcgctagtaatcgtagatcagcatgctacggtgaatacgttcccgggtcttgtacacaccgcccgtcacaccacgagagttcgtaacacccgaagccggtggagtaaccttttaggagctagccgtcgaaggtgggacgaatgattggggtg

SEQ ID NO: 351 - DNA, 1474 bp, Staphylococcus devriesei
gatgaacgctggcggcgtgcctaatacatgcaagtcgagcgaacagataaggagcttgctcctttgacgttagcggcggacgggtgagtaacacgtgggtaacctacctataagactgggataacttcgggaaaccggagctaataccggataatatttcgaaccgcatggttcgatagtgaaagatggttttgctatcacttatagatggatccgcgccgtattagctagttggtaaggtaacggcttaccaaggcaacgatacgtagccgacctgagagggtgatcggccacactggaactgagacacggtccagactcctacgggaggcagcagtagggaatcttccgcaatgggcgaaagcctgacggagcaacgccgcgtgagtgatgaaggtcttcggatcgtaaaactctgttattagggaagaacatacgtgtaagtaactatgcacgtcttgacggtacctaatcagaaagccacggctaactacgtgccagcagccgcggtaatacgtaggtggcaagcgttatccggaattattgggcgtaaagcgcgcgtaggcggttttttaagtctgatgtgaaatcccacggctcaaccgtggagggtcattggaaactggaaaacttgagtgcagaagaggaaagtggaattccatgtgtagcggtgaaatgcgcagagatatggaggaacaccagtggcgaaggcgactttctggtctgtaactgacgctgatgtgcgaaagcgtggggatcaaacaggattagataccctggtagtccacgccgtaaacgatgagtgctaagtgttagggggtttccgccccttagtgctgcagctaacgcattaagcactccgcctggggagtacgaccgcaaggttgaaactcaaaggaattgacggggacccgcacaagcggtggagcatgtggtttaattcgaagcaacgcgaagaaccttaccaaatcttgacatcctttgaccgctctagagatagagttttccccttcgggggacaaagtgacaggtggtgcatggttgtcgtcagctcgtgtcgtgagatgttgggttaagtcccgcaacgagcgcaacccttaaacttagttgccagcattcagttgggcactctaagttgactgccggtgacaaaccggaggaaggtggggatgacgtcaaatcatcatgccccttatgatttgggctacacacgtgctacaatggacaatacaaagggcagcgaaaccgcgaggtcaagcaaatcccataaagttgttctcagttcggattgtagtctgcaactcgactacatgaagctggaatcgctagtaatcgtagatcagcatgctacggtgaatacgttcccgggtcttgtacacaccgcccgtcacaccacgagagtttgtaacacccgaagccggtggagtaaccattttggagctagccgtcgaaggtgggacaaatgattggggtg

SEQ ID NO: 352 - DNA, 1468 bp, Staphylococcus epidermidis
gatgaacgctggcggcgtgcctaatacatgcaagtcgagcgaacagacgaggagcttgctcctctgacgttagcggcggacgggtgagtaacacgtggataacctacctataagactgggataacttcgggaaaccggagctaataccggataatatattgaaccgcatggttcaatagtgaaagacggttttgctgtcacttatagatggatccgcgccgcattagctagttggtaaggtaacggcttaccaaggcaacgatgcgtagccgacctgagagggtgatcggccacactggaactgagacacggtccagactcctacgggaggcagcagtagggaatcttccgcaatgggcgaaagcctgacggagcaacgccgcgtgagtgatgaaggtcttcggatcgtaaaactctgttattagggaagaacaaatgtgtaagtaactatgcacgtcttgacggtacctaatcagaaagccacggctaactacgtgccagcagccgcggtaatacgtaggtggcaagcgttatccggaattattgggcgtaaagcgcgcgtaggcggttttttaagtctgatgtgaaagcccacggctcaaccgtggagggtcattggaaactggaaaacttgagtgcagaagaggaaagtggaattccatgtgtagcggtgaaatgcgcagagatatggaggaacaccagtggcgaaggcgactttctggtctgtaactgacgctgatgtgcgaaagcgtggggatcaaacaggattagataccctggtagtccacgccgtaaacgatgagtgctaagtgttagggggtttccgccccttagtgctgcagctaacgcattaagcactccgcctggggagtacgaccgcaaggttgaaactcaaaggaattgacggggacccgcacaagcggtggagcatgtggtttaattcgaagcaacgcgaagaaccttaccaaatcttgacatcctctgacccctctagagatagagttttccccttcgggggacagagtgacaggtggtgcatggttgtcgtcagctcgtgtcgtgagatgttgggttaagtcccgcaacgagcgcaacccttaagcttagttgccatcattaagttgggcactctaagttgactgccggtgacaaaccggaggaaggtggggatgacgtcaaatcatcatgccccttatgatttgggctacacacgtgctacaatggacaatacaaagggtagcgaaaccgcgaggtcaagcaaatcccataaagttgttctcagttcggattgtagtctgcaactcgactatatgaagctggaatcgctagtaatcgtagatcagcatgctacggtgaatacgttcccgggtcttgtacacaccgcccgtcacaccacgagagtttgtaacacccgaagccggtggagtaaccatttggagctagccgtcgaaggtgggacaaatgattg

SEQ ID NO: 353 - DNA, 1475 bp, Staphylococcus equorum
gatgaacgctggcggcgtgcctaatacatgcaagtcgagcgaacggataaggagcttgctcctttgaagttagcggcggacgggtgagtaacacgtgggtaacctacctataagactggaataacttcgggaaaccggagctaatgccggataacatttggaaccgcatggttctaaagtaaaagatggttttgctatcacttatagatggacccgcgccgtattagctagttggtaaggtaacggcttaccaaggcaacgatacgtagccgacctgagagggtgatcggccacactggaactgagacacggtccagactcctacgggaggcagcagtagggaatcttccgcaatggacgaaagtctgacggagcaacgccgcgtgagtgatgaaggttttcggatcgtaaaactctgttattagggaagaacaaatgtgtaagtaactgtgcacatcttgacggtacctaatcagaaagccacggctaactacgtgccagcagccgcggtaatacgtaggtggcaagcgttatccggaattattgggcgtaaagcgcgcgtaggcggtttcttaagtctgatgtgaaagcccacggctcaaccgtggagggtcattggaaactgggaaacttgagtacagaagaggaaagtggaattccatgtgtagcggtgaaatgcgcagagatatggaggaacaccagtggcgaaggcgactttctggtctgtaactgacgctgatgtgcgaaagcgtggggatcaaacaggattagataccctggtagtccacgccgtaaacgatgagtgctaagtgttagggggtttccgccccttagtgctgcagctaacgcattaagcactccgcctggggagtacgaccgcaaggttgaaactcaaaggaattgacggggacccgcacaagcggtggagcatgtggtttaattcgaagcaacgcgaagaaccttaccaaatcttgacatcctttgaaaactctagagatagagctttccccttcgggggacaaagtgacaggtggtgcatggttgtcgtcagctcgtgtcgtgagatgttgggttaagtcccgcaacgagcgcaacccttaaacttagttgccagcatttagttgggcactctaggttgactgccggtgacaaaccggaggaaggtggggatgacgtcaaatcatcatgccccttatgatttgggctacacacgtgctacaatggacaatacaaagggcagctaaaccgcgaggtcatgcaaatcccataaagttgttctcagttcggattgtagtctgcaactcgactacatgaagctggaatcgctagtaatcgtagatcagcatgctacggtgaatacgttcccgggtcttgtacacaccgcccgtcacaccacgagagtttgtaacacccgaagccggtggagtaaccatttatggagctagccgtcgaaggtgggacaaatgattggggtg

SEQ ID NO: 354 - DNA, 1475 bp, Staphylococcus gallinarum
gatgaacgctggcggcgtgcctaatacatgcaagtcgagcgaacagataaggagcttgctcctttgacgttagcggcggacgggtgagtaacacgtgggtaacctacctataagactggaataactccgggaaaccggggctaatgccggataacatatagaaccgcatggttctatagtgaaagatggttttgctatcacttatagatggacccgcgccgtattagctagttggtaaggtaatggcttaccaaggcgacgatacgtagccgacctgagagggtgatcggccacactggaactgagacacggtccagactcctacgggaggcagcagtagggaatcttccgcaatgggcgaaagcctgacggagcaacgccgcgtgagtgatgaagggtttcggctcgtaaaactctgttattagggaagaacatatgtgtaagtaactgtgcacatcttgacggtacctaatcagaaagccacggctaactacgtgccagcagccgcggtaatacgtaggtggcaagcgttatccggaattattgggcgtaaagcgcgcgtaggcggtttcttaagtctgatgtgaaagcccacggctcaaccgtggagggtcattggaaactgggaaacttgagtgcagaagaggaaagtggaattccatgtgtagcggtgaaatgcgcagagatatggaggaacaccagtggcgaaggcgactttctggtctgtaactgacgctgatgtgcgaaagcgtggggatcaaacaggattagataccctggtagtccacgccgtaaacgatgagtgctaagtgttagggggtttccgccccttagtgctgcagctaacgcattaagcactccgcctggggagtacgaccgcaaggttgaaactcaaaggaattgacggggacccgcacaagcggtggagcatgtggtttaattcgaagcaacgcgaagaaccttaccaaatcttgacatcctttgaccactctagagatagagctttccccttcgggggacaaagtgacaggtggtgcatggttgtcgtcagctcgtgtcgtgagatgttgggttaagtcccgcaacgagcgcaacccttaagcttagttgccatcattaagttgggcactctaggttgactgccggtgacaaaccggaggaaggtggggatgacgtcaaatcatcatgccccttatgatttgggctacacacgtgctacaatggacaatacaaagggcagctaaaccgcgaggtcatgcaaatcccataaagttgttctcagttcggattgtagtctgcaactcgactacatgaagctggaatcgctagtaatcgtagatcagcatgctacggtgaatacgttcccgggtcttgtacacaccgcccgtcacaccacgagagtttgtaacacccgaagccggtggagtaaccatttatggagctagccgtcgaaggtgggacaaatgattggggtg

SEQ ID NO: 355 - DNA, 1473 bp, Staphylococcus haemolyticus
gatgaacgctggcggcgtgcctaatacatgcaagtcgagcgaacagacaaggagcttgctcctttgacgttagcggcggacgggtgagtaacacgtgggtaacctacctataagactgggataacttcgggaaaccggagctaataccggataatatttcgaaccgcatggttcgatagtgaaagatggttttgctatcacttatagatggacccgcgccgtattagctagttggtaaggtaacggcttaccaaggcgacgatacgtagccgacctgagagggtgatcggccacactggaactgagacacggtccagactcctacgggaggcagcagtagggaatcttccgcaatgggcgaaagcctgacggagcaacgccgcgtgagtgatgaaggtcttcggatcgtaaaactctgttattagggaagaacatacgtgtaagtaactatgcacgtcttgacggtacctaatcagaaagccacggctaactacgtgccagcagccgcggtaatacgtaggtggcaagcgttatccggaattattgggcgtaaagcgcgcgtaggcggttttttaagtctgatgtgaaagcccacggctcaaccgtggagggtcattggaaactggaaaacttgagtgcagaagaggaaagtggaattccatgtgtagcggtgaaatgcgcagagatatggaggaacaccagtggcgaaggcgactttctggtctgtaactgacgctgatgtgcgaaagcgtggggatcaaacaggattagataccctggtagtccacgccgtaaacgatgagtgctaagtgttagggggtttccgccccttagtgctgcagctaacgcattaagcactccgcctggggagtacgaccgcaaggttgaaactcaaaggaattgacggggacccgcacaagcggtggagcatgtggtttaattcgaagcaacgcgaagaaccttaccaaatcttgacatcctttgacaactctagagatagagccttccccttcgggggacaaagtgacaggtggtgcatggttgtcgtcagctcgtgtcgtgagatgttgggttaagtcccgcaacgagcgcaacccttaagcttagttgccatcattaagttgggcactctaagttgactgccggtgacaaaccggaggaaggtggggatgacgtcaaatcatcatgccccttatgatttgggctacacacgtgctacaatggacaatacaaagggcagcgaaaccgcgaggtcaagcaaatcccataaagttgttctcagttcggattgtagtctgcaactcgactacatgaagctggaatcgctagtaatcgtagatcagcatgctacggtgaatacgttcccgggtcttgtacacaccgcccgtcacaccacgagagtttgtaacacccgaagccggtggagtaaccatttggagctagccgtcgaaggtgggacaaatgattggggtg

SEQ ID NO: 356 - DNA, 1471 bp, Staphylococcus hominis
gatgaacgctggcggcgtgcctaatacatgcaagtcgagcgaacagacgaggagcttgctcctttgacgttagcggcggacgggtgagtaacacgtgggtaacctacctataagactgggataacttcgggaaaccggagctaataccggataatatttcgaaccgcatggttcgatagtgaaagatggctttgctatcacttatagatggacctgcgccgtattagctagttggtaaggtaacggcttaccaaggcaacgatacgtagccgacctgagagggtgatcggccacactggaactgagacacggtccagactcctacgggaggcagcagtagggaatcttccgcaatgggcgaaagcctgacggagcaacgccgcgtgagtgatgaaggtcttcggatcgtaaaactctgttattagggaagaacaaacgtgtaagtaactgtgcacgtcttgacggtacctaatcagaaagccacggctaactacgtgccagcagccgcggtaatacgtaggtggcaagcgttatccggaattattgggcgtaaagcgcgcgtaggcggttttttaagtctgatgtgaaagcccacggctcaaccgtggagggtcattggaaactggaaaacttgagtgcagaagaggaaagtggaattccatgtgtagcggtgaaatgcgcagagatatggaggaacaccagtggcgaaggcgactttctggtctctaactgacgctgatgtgcgaaagcgtggggatcaaacaggattagataccctggtagtccacgccgtaaacgatgagtgctaagtgttagggggtttccgccccttagtgctgcagctaacgcattaagcactccgcctggggagtacgaccgcaaggttgaaactcaaaggaattgacggggacccgcacaagcggtggagcatgtggtttaattcgaagcaacgcgaagaaccttaccaaatcttgacatcctttgacccttctagagatagaagtttccttcgggggacaaagtgacaggtggtgcatggttgtcgtcagctcgtgtcgtgagatgttgggttaagtcccgcaacgagcgcaacccttaagcttagttgccatcattaagttgggcactctaagttgactgccggtgacaaaccggaggaaggtggggatgacgtcaaatcatcatgccccttatgatttgggctacacacgtgctacaatggacaatacaaagggcagcgaaaccgcgaggtcaagcaaatcccataaagttgttctcagttcggattgtagtctgcaactcgactacatgaagctggaatcgctagtaatcgtagatcagcatgctacggtgaatacgttcccgggtcttgtacacaccgcccgtcacaccacgagagtttgtaacacccgaagccggtggagtaaccatttggagctagccgtcgaaggtgggacaaatgattggggtg

SEQ ID NO: 357 - DNA, 1474 bp, Staphylococcus hyicus
gatgaacgctggcggcgtgcctaatacatgcaagtcgagcgaactgacgaggagcttgctcctttgacgttagcggcggacgggtgagtaacacgtgggtaacctacctataagactggaataactccgggaaaccggggctaatgccggataacatgttgaaccgcatggttcaacagtgaaagacggtcttgctgtcacttatagatggacccgcgccgtattagctagttggtaaggtaacggcttaccaaggcgacgatacgtagccgacctgagagggtgatcggccacactggaactgagacacggtccagactcctacgggaggcagcagtagggaatcttccgcaatgggcgaaagcctgacggagcaacgccgcgtgagtgatgaaggtcttcggatcgtaaagctctgttgttagggaagaacatatgtgtaagtaactgtgcacatcttgacggtacctaaccagaaagccacggctaactacgtgccagcagccgcggtaatacgtaggtggcaagcgttatccggaattattgggcgtaaagcgcgcgtaggcggttttttaagtctgatgtgaaagcccacggctcaaccgtggagggtcattggaaactggaaaacttgagtgcagaagaggaaagtggaattccatgtgtagcggtgaaatgcgcagagatatggaggaacaccagtggcgaaggcggctttctggtctgtaactgacgctgaggtgcgaaagcgtggggatcaaacaggattagataccctggtagtccacgccgtaaacgatgagtgctaagtgttagggggtttccgccccttagtgctgcagctaacgcattaagcactccgcctggggagtacggtcgcaagactgaaactcaaaggaattgacggggacccgcacaagcggtggagcatgtggtttaattcgaagcaacgcgaagaaccttaccaaatcttgacatcttttgatcgctctagagatagagttttcctcttcggaggacaaaatgacaggtggtgcatggttgtcgtcagctcgtgtcgtgagatgttgggttaagtcccgcaacgagcgcaacccttaagcttagttgccatcattaagttgggcactctaagttgactgccggtgacaaaccggaggaaggtggggatgacgtcaaatcatcatgccccttatgatttgggctacacacgtgctacaatggacaatacaaagggcagcaaaaccgcgaggtcaagcaaatcccataaagttgttctcagttcggattgtagtctgcaactcgactacatgaagctggaatcgctagtaatcgtagatcagcatgctacggtgaatacgttcccgggtcttgtacacaccgcccgtcacaccacgagagtttgtaacacccgaagccggtggagtaaccattttggagctagccgtcgaaggtgggacaaatgattggggtg

SEQ ID NO: 358 - DNA, 1474 bp, Staphylococcus intermedius
gatgaacgctggcggcgtgcctaatacatgcaagtcgagcgaacagataaggagcttgctcctttgacgttagcggcggacgggtgagtaacacgtgggtaacctacctataagactggaataactccgggaaaccggggctaatgccggataacatgttgaaccgcatggttctacagtgaaagacggtcttgctgtcacttatagatggacccgcgccgtattagctagttggtggggtaacggcctaccaaggcgacgatacgtagccgacctgagagggtgatcggccacactggaactgagacacggtccagactcctacgggaggcagcagtagggaatcttccgcaatgggcgaaagcctgacggagcaacgccgcgtgagtgatgaaggtcttcggatcgtaaagctctgttgttagggaagaacaaatgtgtaagtaactgtgcacatcttgacggtacctaaccagaaagccacggctaactacgtgccagcagccgcggtaatacgtaggtggcaagcgttatccggaattattgggcgtaaagcgcgcgtaggcggttttttaagtctgatgtgaaagcccacggctcaaccgtggagggtcattggaaactggaaaacttgagtgcagaagaggaaagtggaattccatgtgtagcggtgaaatgcgcagagatatggaggaacaccagtggcgaaggcggctttctggtctgcaactgacgctgatgtgcgaaagcgtggggatcaaacaggattagataccctggtagtccacgccgtaaacgatgagtgctaagtgttagggggtttccgccccttagtgctgcagctaacgcattaagcactccgcctggggagtacggtcgcaagactgaaactcaaaggaattgacggggacccgcacaagcggtggagcatgtggtttaattcgaagcaacgcgaagaaccttaccaaatcttgacatcctttgaccgctctagagatagagttttcctcttcggaggacaaagtgacaggtggtgcatggttgtcgtcagctcgtgtcgtgagatgttgggttaagtcccgcaacgagcgcaacccttgaacttagttgccatcattcagttgggcactctaagttgactgccggtgacaaaccggaggaaggtggggatgacgtcaaatcatcatgccccttatgatttgggctacacacgtgctacaatggacaatacaaagggcagcaaaaccgcgaggtcaagcaaatcccataaagttgttctcagttcggattgtagtctgcaactcgactacatgaagctggaatcgctagtaatcgtagatcagcatgctacggtgaatacgttcccgggtcttgtacacaccgcccgtcacaccacgagagtttgtaacacccgaagccggtggagtaaccattttggagctagccgtcgaaggtgggacaaatgattggggtg

SEQ ID NO: 359 - DNA, 1474 bp, Staphylococcus kloosii
gatgaacgctggcggcgtgcctaatacatgcaagtcgagcgaacagataaggagcttgctcctttgacgttagcggcggacgggtgagtaacacgtgggtaacctacctataagactggaataacttcgggaaaccgaagctaatgccggataacatgtagaaccgcatggttctacagtgaaagatggccttgctatcacttatagatggacccgcgccgtattagctagttggtaaggtaacggcttaccaaggcaacgatacgtagccgacctgagagggtgatcggccacactggaactgagacacggtccagactcctacgggaggcagcagtagggaatcttccgcaatgggcgaaagcctgacggagcaacgccgcgtgagtgatgaaggtcttcggatcgtaaagctctgttattagggaagaacaagtgcgtaagtaactgtgcgcaccttgacggtacctaatcagaaagccacggctaactacgtgccagcagccgcggtaatacgtaggtggcaagcgttatccggaattattgggcgtaaagcgcgcgtaggcggtttcttaagtctgatgtgaaagcccacggctcaaccgtggagggtcattggaaactgggagacttgagtgcagaagaggaaagtggaattccatgtgtagcggtgaaatgcgcagagatatggaggaacaccagtggcgaaggcgactttctggtctgtaactgacgctgatgtgcgaaagcgtggggatcaaacaggattagataccctggtagtccacgccgtaaacgatgagtgctaagtgttagggggtttccgccccttagtgctgcagctaacgcattaagcactccgcctggggagtacgaccgcaaggttgaaactcaaaggaattgacggggacccgcacaagcggtggagcatgtggtttaattcgaagcaacgcgaagaaccttaccaaatcttgacatcctttgaccactctagagacagagctttccccttcgggggacaaagtgacaggtggtgcatggttgtcgtcagctcgtgtcgtgagatgttgggttaagtcccgcaacgagcgcaacccttaagcttagttgccatcattaagttgggcactctaagttgactgccggtgacaaaccggaggaaggtggggatgacgtcaaatcatcatgccccttatgatttgggctacacacgtgctacaatggacaatacaaagggcagctaaaccgcgaggtcatgcaaatcccataaagttgttctcagttcggattgtagtctgcaactcgactacatgaagctggaatcgctagtaatcgtagatcagcatgctacggtgaatacgttcccgggtcttgtacacaccgcccgtcacaccacgagagtttgtaacacccgaagccggtggagtaaccatttatggagctagccgtcgaaggtgggacaaatgattggggt

SEQ ID NO: 360 - DNA, 1478 bp, Staphylococcus lentus
gatgaacgctggcggcgtgcctaatacatgcaagtcgagcgaacagatgagaagcttgcttctctgatgttagcggcggacgggtgagtaacacgtgggtaacctacctataagactgggataactccgggaaaccggggctaataccggataatatattgaaccgcatggttcaatgttgaaagacggtttcggctgtcacttatagatggacccgcgccgtattagctagttggtaaggtaacggcttaccaaggcaacgatacgtagccgacctgagagggtgatcggccacactggaactgagacacggtccagactcctacgggaggcagcagtagggaatcttccgcaatgggcgaaagcctgacggagcaacgccgcgtgagtgatgaaggtcttaggatcgtaaaactctgttgttagggaagaacaaatttgttagtaactgaacaagtcttgacggtacctaaccagaaagccacggctaactacgtgccagcagccgcggtaatacgtaggtggcaagcgttatccggaattattgggcgtaaagcgcgcgtaggcggtttcttaagtctgatgtgaaagcccacggctcaaccgtggagggtcattggaaactggggaacttgagtgcagaagaggagagtggaattccatgtgtagcggtgaaatgcgcagagatatggaggaacaccagtggcgaaggcggctctctggtctgtaactgacgctgatgtgcgaaagcgtggggatcaaacaggattagataccctggtagtccacgccgtaaacgatgagtgctaagtgttagggggtttccgccccttagtgctgcagctaacgcattaagcactccgcctggggagtacgaccgcaaggttgaaactcaaaggaattgacggggacccgcacaagcggtggagcatgtggtttaattcgaagcaacgcgaagaaccttaccaaatcttgacatcctttgatcgctctagagatagagttttccccttcgggggacaaagtgacaggtggtgcatggttgtcgtcagctcgtgtcgtgagatgttgggttaagtcccgcaacgagcgcaacccttaagcttagttgccatcattaagttgggcactctaggttgactgccggtgacaaaccggaggaaggtggggatgacgtcaaatcatcatgccccttatgatttgggctacacacgtgctacaatggataatacaaagggcagcgaacccgcgaggtcaagcaaatcccataaaattattctcagttcggattgtagtctgcaactcgactacatgaagctggaatcgctagtaatcgtagatcagcatgctacggtgaatacgttcccgggtcttgtacacaccgcccgtcacaccacgagagtttgtaacacccgaagccggtggagtaaccttttattaggagctagccgtcgaaggtgggacagatgattggggtg

SEQ ID NO: 361 - DNA, 1472 bp, Staphylococcus lugdunensis
gatgaacgctggcggcgtgcctaatacatgcaagtcgagcgaacagataaggagcttgctcctttgacgttagcggcggacgggtgagtaacacgtgggtaacctacctataagactgggacaacttcgggaaaccggagctaataccggataatatgttgaaccgcatggttcaatagtgaaagatggttttgctatcacttatagatggacccgcgccgtattagctagttggtgaggtaacggctcaccaaggcaacgatacgtagccgacctgagagggtgatcggccacactggaactgagacacggtccagactcctacgggaggcagcagtagggaatcttccgcaatgggcgaaagcctgacggagcaacgccgcgtgagtgatgaaggtcttaggatcgtaaaactctgttattagggaagaacaaacgtgtaagtaactgtgcacgtcttgacggtacctaatcagaaagccacggctaactacgtgccagcagccgcggtaatacgtaggtggcaagcgttatccggaattattgggcgtaaagcgcgcgtaggcggttttttaagtctgatgtgaaagcccacggctcaaccgtggagggtcattggaaactggaaaacttgagtgcagaagaggaaagtggaattccatgtgtagcggtgaaatgcgcagagatatggaggaacaccagtggcgaaggcgactttctggtctgtaactgacgctgatgtgcgaaagcgtggggatcaaacaggattagataccctggtagtccacgccgtaaacgatgagtgctaagtgttagggggtttccgccccttagtgctgcagctaacgcattaagcactccgcctggggagtacgaccgcaaggttgaaactcaaaggaattgacggggacccgcacaagcggtggagcatgtggtttaattcgaagcaacgcgaagaaccttaccaaatcttgacatcctttgaccgctctagagatagagtcttccccttcgggggacaaagtgacaggtggtgcatggttgtcgtcagctcgtgtcgtgagatgttgggttaagtcccgcaacgagcgcaacccttaagcttagttgccatcatttagttgggcactctaagttgactgccggtgacaaaccggaggaaggtggggatgacgtcaaatcatcatgccccttatgatttgggctacacacgtgctacaatggacaatacaaagggcagcgaaaccgcgaggtcaagcaaatcccataaagttgttctcagttcggattgtagtctgcaactcgactacatgaagctggaatcgctagtaatcgtagatcagcatgctacggtgaatacgttcccgggtcttgtacacaccgcccgtcacaccacgagagtttgtaacacccgaagccggtggagtaaccatttggagctagccgtcgaaggtgggacaaatgattggggt

SEQ ID NO: 362 - DNA, 1449 bp, Staphylococcus nepalensis
  misc_feature (548)..(548): n is a, c, g, or t
  misc_feature (624)..(624): n is a, c, g, or t
  misc_feature (1243)..(1243): n is a, c, g, or t
aatacatgcaagtcgagcgaacagataaggagcttgctcctttgacgttagcggcggacgggtgagtaacacgtgggtaacctacctataagactggaataactccgggaaaccggggctaatgccggataatatttagaaccgcatggttctaaagtgaaagatggttttgctatcacttatagatggacccgcgccgtattagctagttggtggggtaatggcttaccaaggcaacgatacgtagccgacctgagagggtgatcggccacactggaactgagacacggtccagactcctacgggaggcagcagtagggaatcttccgcaatgggcgaaagcctgacggagcaacgccgcgtgagtgatgaaggtcttcggatcgtaaaactctgttattagggaagaacaaatgtgtaagtaactgtgcacgtcttgacggtacctaatcagaaagccacggctaactacgtgccagcagccgcggtaatacgtaggtggcaagcgttatccggaattattgggcgtaaagcgcgcgtaggcggtntcttaagtctgatgtgaaagcccacggctcaaccgtggagggtcattggaaactgggaaacttgagtgcagaagangaaagtggaattccatgtgtagcggtgaaatgcgcagagatatggaggaacaccagtggcgaaggcgactttctggtctgtaactgacgctgatgtgcgaaagcgtggggatcaaacaggattagataccctggtagtccacgccgtaaacgatgagtgctaagtgttagggggtttccgccccttagtgctgcagctaacgcattaagcactccgcctggggagtacgaccgcaaggttgaaactcaaaggaattgacggggacccgcacaagcggtggagcatgtggtttaattcgaagcaacgcgaagaaccttaccaaatcttgacatcctttgacaactctagagatagagtcttccccttcgggggacaaagtgacaggtggtgcatggttgtcgtcagctcgtgtcgtgagatgttgggttaagtcccgcaacgagcgcaacccttaagcttagttgccagcattaagttgggcactctaagttgactgccggtgacaaaccggaggaaggtggggatgacgtcaaatcatcatgccccttatgatttgggctacacacgtgctacaatggacaatacaaagggcagctaaaccgcgaggtcatgcaaatcncataaagttgttctcagttcggattgtagtctgcaactcgactacatgaagctggaatcgctagtaatcgtagatcagcatgctacggtgaatacgttcccgggtcttgtacacaccgcccgtcacacacgagagtctgtacacccgaagccggtggagtaaccattatggagctagccgtcgaaggtgggacaatgattggggtg

SEQ ID NO: 363 - DNA, 1419 bp, Staphylococcus pasteuri
caagtcgagcgaacagataaggagcttgctcctttgacgttagcggcggacgggtgagtaacacgtggataacctacctataagactgggataacttcgggaaaccggagctaataccggataagattttgaaccgcatggttcaatagtgaaagacggccttgctgtcacttatagatggatccgcgccgtattagctagttggtaaggtaacggcttaccaaggcaacgatacgtagccgacctgagagggtgatcggccacactggaactgagacacggtccagactcctacgggaggcagcagtagggaatcttccgcaatgggcgaaagcctgacggagcaacgccgcgtgagtgatgaaggtcttcggatcgtaaaactctgttatcagggaagaacaaacgtgtaagtaactgtgcacgtcttgacggtacctgatcagaaagccacggctaactacgtgccagcagccgcggtaatacgtaggtggcaagcgttatccggaattattgggcgtaaagcgcgcgtaggcggttttttaagtctgatgtgaaagcccacggctcaaccgtggagggtcattggaaactggaaaacttgagtgcagaagaggaaagtggaattccatgtgtagcggtgaaatgcgcagagatatggaggaacaccagtggcgaaggcgactttctggtctgtaactgacgctgatgtgcgaaagcgtggggatcaaacaggattagataccctggtagtccacgccgtaaacgatgagtgctaagtgttagggggtttccgccccttagtgctgcagctaacgcattaagcactccgcctggggagtacgaccgcaaggttgaaactcaaaggaattgacggggacccgcacaagcggtggagcatgtggtttaattcgaagcaacgcgaagaaccttaccaaatcttgacatcctttgaccgctctagagatagagttttccccttcgggggacaaagtgacaggtggtgcatggttgtcgtcagctcgtgtcgtgagatgttgggttaagtcccgcaacgagcgcaacccttaagcttagttgccatcattaagttgggcactctaagttgactgccggtgacaaaccggaggaaggtggggatgacgtcaaatcatcatgccccttatgatttgggctacacacgtgctacaatggacaatacaaagggcagctaaaccgcgaggtcaagcaaatcccataaagttgttctcagttcggattgtagtctgcaactcgactacatgaagctggaatcgctagtaatcgtagatcagcatgctacggtgaatacgttcccgggtcttgtacacaccgcccgtcacaccacgagagtttgtaacacccgaagccggtggagtaaccattcctggagctagccgt

SEQ ID NO: 364 - DNA, 1473 bp, Staphylococcus petrasii
  misc_feature (139)..(139): n is a, c, g, or t
gatgaacgctggcggcgtgcctaatacatgcaagtcgagcgaacagacgaggagcttgctcctctgacgttagcggcggacgggtgagtaacacgtgggtaacctacctataagactgggataactccgggaaaccggngctaataccggataatattttgaaccgcatggttcaaaagtgaaagatggttttgctatcacttatagatggacccgcgccgtattagctagttggtaaggtaacggcttaccaaggcgacgatacgtagccgacctgagagggtgatcggccacactggaactgagacacggtccagactcctacgggaggcagcagtagggaatcttccgcaatgggcgaaagcctgacggagcaacgccgcgtgagtgatgaaggtcttcggatcgtaaaactctgttattagggaagaacatacgtgtaagtaactgtgcacgtcttgacggtacctaatcagaaagccacggctaactacgtgccagcagccgcggtaatacgtaggtggcaagcgttatccggaattattgggcgtaaagcgcgcgtaggcggttttttaagtctgatgtgaaagcccacggctcaaccgtggagggtcattggaaactggaaaacttgagtgcagaagaggaaagtggaattccatgtgtagcggtgaaatgcgcagagatatggaggaacaccagtggcgaaggcgactttctggtctgtaactgacgctgatgtgcgaaagcgtggggatcaaacaggattagataccctggtagtccacgccgtaaacgatgagtgctaagtgttagggggtttccgccccttagtgctgcagctaacgcattaagcactccgcctggggagtacgaccgcaaggttgaaactcaaaggaattgacggggacccgcacaagcggtggagcatgtggtttaattcgaagcaacgcgaagaaccttaccaaatcttgacatcctttgacaactctagagatagagctttccccttcgggggacaaagtgacaggtggtgcatggttgtcgtcagctcgtgtcgtgagatgttgggttaagtcccgcaacgagcgcaacccttaagcttagttgccatcatttagttgggcactctaagttgactgccggtgacaaaccggaggaaggtggggatgacgtcaaatcatcatgccccttatgatttgggctacacacgtgctacaatggacaatacaaagggtagcgaaaccgcgaggtcaagcaaatcccataaagttgttctcagttcggattgtagtctgcaactcgactacatgaagctggaatcgctagtaatcgtagatcagcatgctacggtgaatacgttcccgggtcttgtacacaccgcccgtcacaccacgagagtttgtaacacccgaagccggtggagtaaccatttggagctagccgtcgaaggtgggacaaatgattggggtg

SEQ ID NO: 365 - DNA, 1476 bp, Staphylococcus pettenkoferi
gatgaacgctggcggcgtgcctaatacatgcaagtcgagcgaacagacggggagcttgctcccccgacgttagcggcggacgggtgagtaacacgtgggtaacctacctataagactggaataactccgggaaaccggggctaatgccggataacatgttggaccgcatggtcctacagtgaaagacggtcttgctgtcacttatagatggacccgcgccgtattagctagttggtaaggtaacggcttaccaaggcaacgatacgtagccgacctgagagggtgatcggccacactggaactgagacacggtccagactcctacgggaggcagcagtagggaatcttccgcaatgggcgaaagcctgacggagcaacgccgcgtgagtgatgaaggccttcgggtcgtaaaactctgttattagggaagaacaaatgtgtaagtaactatgcacgtcttgacggtacctaatcagaaagccacggctaactacgtgccagcagccgcggtaatacgtaggtggcaagcgttatccggaattattgggcgtaaagcgcgcgtaggcggtttcttaagtctgatgtgaaagcccacggctcaaccgtggagggtcattggaaactgggaaacttgagtgcaggagaggaaagtggaattccatgtgtagcggtgaaatgcgcagagatatggaggaacaccagtggcgaaggcgactttctggtctgcaactgacgctgatgtgcgaaagcgtggggatcaaacaggattagataccctggtagtccacgccgtaaacgatgagtgctaagtgttagggggtttccgccccttagtgctgcagctaacgcattaagcactccgcctggggagtacgaccgcaaggttgaaactcaaaggaattgacggggacccgcacaagcggtggagcatgtggtttaattcgaagcaacgcgaagaaccttaccaaatcttgacatcctttgccccctctagagatagaggtttccccttcgggggacaaagtgacaggtggtgcatggttgtcgtcagctcgtgtcgtgagatgttgggttaagtcccgcaacgagcgcaacccttaagcttagttgccatcattcagttgggcactctaagttgactgccggtgacaaaccggaggaaggtggggatgacgtcaaatcatcatgccccttatgatttgggctacacacgtgctacaatggacaatacaaagggcagctaaaccgcgaggtcaagcaaatcccataaagttgttctcagttcggattgtagtctgcaactcgactacatgaagctggaatcgctagtaatcgtagatcagcatgctacggtgaatacgttcccgggtcttgtacacaccgcccgtcacaccacgagagtttgtaacacccgaagccggtggagcaaccactttgtggagctagccgtcgaaggtgggacaaatgattggggtg

SEQ ID NO: 366 - DNA, 1460 bp, Staphylococcus saccharolyticus
  misc_feature (1420)..(1420): n is a, c, g, or t
ggcgtgcctaatacatgcaagtcgagcgaacagacgaggagcttgctcctctgacgttagcggcggacgggtgagtaacacgtggataacctacctataagactgggataacttcgggaaaccggagctaataccagataacatgttgaaccgcatggttcaacagtgaaagacggtcttgctgtcacttatagatggatccgcgccgcattagctagttggtaaggtaacggcttaccaaggcaacgatgcgtagccgacctgagagggtgatcggccacactggaactgagacacggtccagactcctacgggaggcagcagtagggaatcttccgcaatgggcgaaagcctgacggagcaacgccgcgtgagtgatgaaggtcttcggatcgtaaaactctgttattagggaagaacaaatgtgtaagtaactatgcacgtcttgacggcacctaatcagaaagccacggctaactacgtgccagcagccgcggtaatacgtaggtggcaagcgttatccggaattattgggcgtaaagcgcgcgtaggcggttttttaagtctgatgtgaaagcccacggctcaaccgtggagggtcattggaaactggaaaacttgagtgcagaagaggaaagtggaattccatgtgtagcggtgaaatgcgcagagatatggaggaacaccagtggcgaaggcgactttctggtctgtaactgacgctgatgtgcgaaagcgtggggatcaaacaggattagataccctggtagtccacgccgtaaacgatgagtgctaagtgttagggggtttccgccccttagtgctgcagctaacgcattaagcactccgcctggggagtacgaccgcaaggttgaaactcaaaggaattgacggggacccgcacaagcggtggagcatgtggtttaattcgaagcaacgcgaagaaccttaccaaatcttgacatcctctgacccctctagagatagagttttccccttcgggggacagagtgacaggtggtgcatggttgtcgtcagctcgtgtcgtgagatgttgggttaagtcccgcaacgagcgcaacccttaagcttagttgccatcattaagttgggcactctaagttgactgccggtgacaaaccggaggaaggtggggatgacgtcaaatcatcatgccccttatgatttgggctacacacgtgctacaatggacaatacaaagggcagcgaaaccgcgaggtcaagcaaaccccataaagttgttctcagttcggattgtagtctgcaactcgactatatgaagctggaatcgctagtaatcgtagatcagcatgctacggtgaatacgttcccgggtcttgtacacaccgcccgtcacaccacgagagtttgtaacacccgaagccggtggagtaacctnttggagctagccgtcgaaggtgggacaaatgattggggtg

SEQ ID NO: 367 - DNA, 1475 bp, Staphylococcus saprophyticus
gatgaacgctggcggcgtgcctaatacatgcaagtcgagcgaacagataaggagcttgctcctttgacgttagcggcggacgggtgagtaacacgtgggtaacctacctataagactgggataacttcgggaaaccggagctaataccggataacatttggaaccgcatggttctaaagtgaaagatggttttgctatcacttatagatggacccgcgccgtattagctagttggtaaggtaacggcttaccaaggcgacgatacgtagccgacctgagagggtgatcggccacactggaactgagacacggtccagactcctacgggaggcagcagtagggaatcttccgcaatgggcgaaagcctgacggagcaacgccgcgtgagtgatgaagggtttcggctcgtaaaactctgttattagggaagaacaaatgtgtaagtaactgtgcacgtcttgacggtacctaatcagaaagccacggctaactacgtgccagcagccgcggtaatacgtaggtggcaagcgttatccggaattattgggcgtaaagcgcgcgtaggcggtttcttaagtctgatgtgaaagcccacggctcaaccgtggagggtcattggaaactgggaaacttgagtgcagaagaggaaagtggaattccatgtgtagcggtgaaatgcgcagagatatggaggaacaccagtggcgaaggcgactttctggtctgtaactgacgctgatgtgcgaaagcgtggggatcaaacaggattagataccctggtagtccacgccgtaaacgatgagtgctaagtgttagggggtttccgccccttagtgctgcagctaacgcattaagcactccgcctggggagtacgaccgcaaggttgaaactcaaaggaattgacggggacccgcacaagcggtggagcatgtggtttaattcgaagcaacgcgaagaaccttaccaaatcttgacatcctttgaaaactctagagatagagccttccccttcgggggacaaagtgacaggtggtgcatggttgtcgtcagctcgtgtcgtgagatgttgggttaagtcccgcaacgagcgcaacccttaagcttagttgccatcattaagttgggcactctaggttgactgccggtgacaaaccggaggaaggtggggatgacgtcaaatcatcatgccccttatgatttgggctacacacgtgctacaatggacaatacaaagggcagctaaaccgcgaggtcatgcaaatcccataaagttgttctcagttcggattgtagtctgcaactcgactacatgaagctggaatcgctagtaatcgtagatcagcatgctacggtgaatacgttcccgggtcttgtacacaccgcccgtcacaccacgagagtttgtaacacccgaagccggtggagtaaccatttatggagctagccgtcgaaggtgggacaaatgattggggtg

SEQ ID NO: 368 - DNA, 1336 bp, Staphylococcus schleiferi
ctggcggcgtgcctaatacatgcaagtcgagcgaacggacaaggagcttgctcctttcaagttagcggcggacgggtgagtaacacgtgggtaacctacctataagactggaataactccgggaaaccggggctaatgccggataacatgttgaaccgcatggttcaacagtgaaagacggtcttgctgtcacttatagatggacccgcgccgtattagctagttggtggggtaacggcctaccaaggcgacgatacgtagccgacctgagagggtgatcggccacactggaactgagacacggtccagactcctacgggaggcagcagtagggaatcttccgcaatgggcgaaagcctgacggagcaacgccgcgtgagtgatgaaggtcttcggatcgtaaagctctgttgttagggaagaacaaatgtgtaagtaactgtgcacgtcttgacggtacctaaccagaaagccacggctaactacgtgccagcagccgcggtaatacgtaggtggcaagcgttatccggaattattgggcgtaaagcgcgcgtaggcggttttttaagtctgatgtgaaagcccacggctcaaccgtggagggtcattggaaactggaaaacttgagtgcagaagaggaaagtggaattccatgtgtagcggtgaaatgcgcagagatatggaggaacaccagtggcgaaggcggctttctggtctgcaactgacgctgatgtgcgaaagcgtggggatcaaacaggattagataccctggtagtccacgccgtaaacgatgagtgctaagtgttagggggtttccgccccttagtgctgcagctaacgcattaagcactccgcctggggagtacggtcgcaagactgaaactcaaaggaattgacggggacccgcacaagcggtggagcatgtggtttaattcgaagcaacgcgaagaaccttaccaaatcttgacatcctttgaccgctctagagatagagttttcctcttcggaggacaaagtgacaggtggtgcatggttgtcgtcagctcgtgtcgtgagatgttgggttaagtcccgcaacgagcgcaacccttgagcttagttgccatcattaagttgggcactctaagttgactgccggtgacaaaccggaggaaggtggggatgacgtcaaatcatcatgccccttatgatttgggctacacacgtgctacaatggacaatacaaagggcagcgaaaccgcgaggtcaagcaaatcccataaagttgttctcagttcggattgtagtctgcaactcgagaacatgaagctggaatcgctagtaatcgtagatcagc

SEQ ID NO: 369 - DNA, 1475 bp, Staphylococcus sciuri
gatgaacgctggcggcgtgcctaatacatgcaagtcgagcgaacagatgagaagcttgcttctctgatgttagcggcggacgggtgagtaacacgtgggtaacctacctataagactgggataactccgggaaaccggggctaataccggataatattttgaaccgcatggttcaatagtgaaagacggtttcggctgtcacttatagatggacccgcgccgtattagctagttggtaaggtaacggcttaccaaggcgacgatacgtagccgacctgagagggtgatcggccacactggaactgagacacggtccagactcctacgggaggcagcagtagggaatcttccgcaatgggcgaaagcctgacggagcaacgccgcgtgagtgatgaaggtcttcggatcgtaaaactctgttgttagggaagaacaaatttgttagtaactgaacaagtcttgacggtacctaaccagaaagccacggctaactacgtgccagcagccgcggtaatacgtaggtggcaagcgttatccggaattattgggcgtaaagcgcgcgtaggcggtttcttaagtctgatgtgaaagcccacggctcaaccgtggagggtcattggaaactgggaaacttgagtgcagaagaggagagtggaattccatgtgtagcggtgaaatgcgcagagatatggaggaacaccagtggcgaaggcggctctctggtctgtaactgacgctgatgtgcgaaagcgtggggatcaaacaggattagataccctggtagtccacgccgtaaacgatgagtgctaagtgttagggggtttccgccccttagtgctgcagctaacgcattaagcactccgcctggggagtacgaccgcaaggttgaaactcaaaggaattgacggggacccgcacaagcggtggagcatgtggtttaattcgaagcaacgcgaagaaccttaccaaatcttgacatcctttgaccgctctagagatagagtcttccccttcgggggacaaagtgacaggtggtgcatggttgtcgtcagctcgtgtcgtgagatgttgggttaagtcccgcaacgagcgcaacccttaagcttagttgccatcattaagttgggcactctaggttgactgccggtgacaaaccggaggaaggtggggatgacgtcaaatcatcatgccccttatgatttgggctacacacgtgctacaatggataatacaaagggcagcgaatccgcgaggccaagcaaatcccataaaattattctcagttcggattgtagtctgcaactcgactacatgaagctggaatcgctagtaatcgtagatcagcatgctacggtgaatacgttcccgggtcttgtacacaccgcccgtcacaccacgagagtttgtaacacccgaagccggtggagtaaccttttaggagctagccgtcgaaggtgggacaaatgattggggtg

SEQ ID NO: 370 - DNA, 1474 bp, Staphylococcus simiae
gatgaacgctggcggcgtgcctaatacatgcaagtcgagcgaacagatgagaagtttgcttctctgatgttagcggcggacgggtgagtaacacgtggataacctacctataagactgggataacttcgggaaaccggagctaataccggataatatatcgaaccgcatggttcaatagtgaaagatggtcttgctatcacttatagatggatccgcgctgcattagctagttggtaaggtaacggcttaccaaggcaacgatgcatagccgacctgagagggtgatcggccacactggaactgagacacggtccagactcctacgggaggcagcagtagggaatcttccgcaatgggcgaaagcctgacggagcaacgccgcgtgagtgatgaaggtcttcggatcgtaaaactctgttattagggaagaacatatgtgtaagtaactgtgcacatcttgacggtacctaatcagaaagccacggctaactacgtgccagcagccgcggtaatacgtaggtggcaagcgttatccggaattattgggcgtaaagcgcgcgtaggcggttttttaagtctgatgtgaaagcccacggctcaaccgtggagggtcattggaaactggaaaacttgagtgcagaagaggaaagtggaattccatgtgtagcggtgaaatgcgcagagatatggaggaacaccagtggcgaaggcgactttctggtctgtaactgacgctgatgtgcgaaagcgtggggatcaaacaggattagataccctggtagtccacgccgtaaacgatgagtgctaagtgttagggggtttccgccccttagtgctgcagctaacgcattaagcactccgcctggggagtacgaccgcaaggttgaaactcaaaggaattgacggggacccgcacaagcggtggagcatgtggtttaattcgaagcaacgcgaagaaccttaccaaatcttgacatcctttgacaactctagagatagagccttccccttcgggggacaaagtgacaggtggtgcatggttgtcgtcagctcgtgtcgtgagatgttgggttaagtcccgcaacgagcgcaacccttaagcttagttgccatcattaagttgggcactctaagttgactgccggtgacaaaccggaggaaggtggggatgacgtcaaatcatcatgccccttatgatttgggctacacacgtgctacaatggacaatacaaagggtagcgaaaccgcgaggtcaagcaaatcccataaagttgttctcagttcggattgtagtctgcaactcgactacatgaagctggaatcgctagtaatcgtagatcagcatgctacggtgaatacgttcccgggtcttgtacacaccgcccgtcacaccacgagagtttgtaacacccgaagccggtggagtaaccttttaggagctagccgtcgaaggtgggacaaatgattggggtg

SEQ ID NO: 371 - DNA, 1474 bp, Staphylococcus simulans
gatgaacgctggcggcgtgcctaatacatgcaagtcgagcgaacagacgaggagcttgctcctctgacgttagcggcggacgggtgagtaacacgtgggtaacctacctataagactgggataactccgggaaaccggggctaataccggataacacatgaaaccgcatggtttcatgatgaaagacggttttgctgtcacttatagatggacccgcggcgtattagctagttggtaaggtaacggcttaccaaggcaacgatacgtagccgacctgagagggtgatcggccacactggaactgagacacggtccagactcctacgggaggcagcagtagggaatcttccgcaatgggcgaaagcctgacggagcaacgccgcgtgagtgatgaaggtcttcggatcgtaaaactctgttattagggaagaacaaggatgtaagtaactatgcatcccttgacggtacctaatcagaaagccacggctaactacgtgccagcagccgcggtaatacgtaggtggcaagcgttatccggaattattgggcgtaaagcgcgcgtaggcggttttttaagtctgatgtgaaagcccacggctcaaccgtggagggtcattggaaactggaaaacttgagtgcagaagaggaaagtggaattccatgtgtagcggtgaaatgcgcagagatatggaggaacaccagtggcgaaggcgactttctggtctgcaactgacgctgatgtgcgaaagcgtggggatcaaacaggattagataccctggtagtccacgccgtaaacgatgagtgctaagtgttagggggtttccgccccttagtgctgcagctaacgcattaagcactccgcctggggagtacggccgcaaggctgaaactcaaaggaattgacggggacccgcacaagcggtggagcatgtggtttaattcgaagcaacgcgaagaaccttaccaaatcttgacatcctttgacaactctagagatagagctttccccttcgggggacaaagtgacaggtggtgcatggttgtcgtcagctcgtgtcgtgagatgttgggttaagtcccgcaacgagcgcaacccttaagcttagttgccagcattaagttgggcactctaagttgactgccggtgacaaaccggaggaaggtggggatgacgtcaaatcatcatgccccttatgatttgggctacacacgtgctacaatggacggtacaaagggcagcgaacccgcgaggtcaagcaaatcccataaagccgttctcagttcggattgtagtctgcaactcgactacatgaagctggaatcgctagtaatcgtagatcagcatgctacggtgaatacgttcccgggtcttgtacacaccgcccgtcacaccacgagagtttgtaacacccgaagccggtggagtaaccttttaggaactagccgtcgaaggtgggacaaatgattggggtg

SEQ ID NO: 372 - DNA, 1475 bp, Staphylococcus succinus
gatgaacgctggcggcgtgcctaatacatgcaagtcgagcgaacggataaggagcttgctcctttgaagttagcggcggacgggtgagtaacacgtgggtaacctacctataagactggaataacttcgggaaaccggagctaatgccggataacatatagaaccgcatggttctatagtgaaagatggttttgctatcacttatagatggacccgcgctgtattagctagttggtaaggtaatggcttaccaaggcgacgatacatagccgacctgagagggtgatcggccacactggaactgagacacggtccagactcctacgggaggcagcagtagggaatcttccgcaatgggcgaaagcctgacggagcaacgccgcgtgagtgatgaaggttttcggatcgtaaaactctgttattagggaagaacaaatgcgtaagtaactgtgcgcatcttgacggtacctaatcagaaagccacggctaactacgtgccagcagccgcggtaatacgtaggtggcaagcgttatccggaattattgggcgtaaagcgcgcgtaggcggtttcttaagtctgatgtgaaagcccacggctcaaccgtggagggtcattggaaactgggaaacttgagtgcagaagaggaaagtggaattccatgtgtagcggtgaaatgcgcagagatatggaggaacaccagtggcgaaggcgactttctggtctgtaactgacgctgatgtgcgaaagcgtggggatcaaacaggattagataccctggtagtccacgccgtaaacgatgagtgctaagtgttagggggtttccgccccttagtgctgcagctaacgcattaagcactccgcctggggagtacgaccgcaaggttgaaactcaaaggaattgacggggacccgcacaagcggtggagcatgtggtttaattcgaagcaacgcgaagaaccttaccaaatcttgacatcctttgaaaactctagagatagagccttccccttcgggggacaaagtgacaggtggtgcatggttgtcgtcagctcgtgtcgtgagatgttgggttaagtcccgcaacgagcgcaacccttaagcttagttgccatcattaagttgggcactctaggttgactgccggtgacaaaccggaggaaggtggggatgacgtcaaatcatcatgccccttatgatttgggctacacacgtgctacaatggacaatacaaagggcagctaaaccgcgaggtcatgcaaatcccataaagttgttctcagttcggattgtagtctgcaactcgactacatgaagctggaatcgctagtaatcgtagatcagcatgctacggtgaatacgttcccgggtcttgtacacaccgcccgtcacaccacgagagtttgtaacacccgaagccggtggagtaaccatttatggagctagccgtcgaaggtgggacaaatgattggggtg

SEQ ID NO: 373 - DNA, 1477 bp, Staphylococcus vitulinus
gacgaacgctggcggcgtgcctaatacatgcaagtcgagcgaacagatgagaagcttgcttctctgatgttagcggcggacgggtgagtaacacgtgggtaacctacctataagactgggataactccgggaaaccggggctaatacctgataatattttgaaccgcatggttcaatagtgaaagacggcttcggctgtcacttatagatggacccgcgccgtattagctagttggtaaggtaatggcttaccaaggcaacgatacgtagccgacctgagagggtgatcggccacactggaactgagacacggtccagactcctacgggaggcagcagtagggaatcttccgcaatgggcgaaagcctgacggagcaacgccgcgtgagtgatgaaggtcttaggatcgtaaaactctgttgttagggaagaacaaatttgttagtaactgaacaagtcttgacggtacctaaccagaaagccacggctaactacgtgccagcagccgcggtaatacgtaggtggcaagcgttatccggaattattgggcgtaaagcgcgcgtaggcggtttcttaagtctgatgtgaaagtccacggctcaaccgtggaaggtcattggaaactggggaacttgagtgcagaagaggagagtggaattccatgtgtagcggtgaaatgcgcagagatatggaggaacaccagtggcgaaggcggctctctggtctgtaactgacgctgatgtgcgaaagcgtggggatcaaacaggattagataccctggtagtccacgccgtaaacgatgagtgctaagtgttagggggtttccgccccttagtgctgcagctaacgcattaagcactccgcctggggagtacgaccgcaaggttgaaactcaaaggaattgacggggacccgcacaagcggtggagcatgtggtttaattcgaagcaacgcgaagaaccttaccaaatcttgacatcctttgatcgctctagagatagagttttccccttcgggggacaaagtgacaggtggtgcatggttgtcgtcagctcgtgtcgtgagatgttgggttaagtcccgcaacgagcgcaacccttaagcttagttgccatcattaagttgggcactctaggttgactgccggtgacaaaccggaggaaggtggggatgacgtcaaatcatcatgccccttatgatttgggctacacacgtgctacaatggataatacaaagggcagcgaaaccgcgaggtcaagcaaatcccataaaattattctcagttcggattgtagtctgcaactcgactacatgaagctggaatcgctagtaatcgtagatcagcatgctacggtgaatacgttcccgggtcttgtacacaccgcccgtcacaccacgagagtttgtaacacccgaagccggtggagtaaccttttattaggagctagccgtcgaaggtgggacagatgattggggt

SEQ ID NO: 374 - DNA, 1470 bp, Staphylococcus warneri
  misc_feature (1258)..(1258): n is a, c, g, or t
gatgaacgctggcggcgtgcctaatacatgcaagtcgagcgaacagataaggagcttgctcctttgacgttagcggcggacgggtgagtaacacgtggataacctacctataagactgggataacttcgggaaaccggagctaataccggataacatattgaaccgcatggttcaatagtgaaaggcggctttgctgtcacttatagatggatccgcgccgtattagctagttggtaaggtaacggcttaccaaggcaacgatacgtagccgacctgagagggtgatcggccacactggaactgagacacggtccagactcctacgggaggcagcagtagggaatcttccgcaatgggcgaaagcctgacggagcaacgccgcgtgagtgatgaaggtcttcggatcgtaaaactctgttatcagggaagaacaaatgtgtaagtaactgtgcacatcttgacggtacctgatcagaaagccacggctaactacgtgccagcagccgcggtaatacgtaggtggcaagcgttatccggaattattgggcgtaaagcgcgcgtaggcggttttttaagtctgatgtgaaagcccacggctcaaccgtggagggtcattggaaactggaaaacttgagtgcagaagaggaaagtggaattccatgtgtagcggtgaaatgcgcagagatatggaggaacaccagtggcgaaggcgactttctggtctgtaactgacgctgatgtgcgaaagcgtggggatcaaacaggattagataccctggtagtccacgccgtaaacgatgagtgctaagtgttagggggtttccgccccttagtgctgcagctaacgcattaagcactccgcctggggagtacgaccgcaaggttgaaactcaaaggaattgacggggacccgcacaagcggtggagcatgtggtttaattcgaagcaacgcgaagaaccttaccaaatcttgacatcctttgaccgctctagagatagagtcttccccttcgggggacaaagtgacaggtggtgcatggttgtcgtcagctcgtgtcgtgagatgttgggttaagtcccgcaacgagcgcaacccttaagcttagttgccatcattaagttgggcactctaagttgactgccggtgacaaaccggaggaaggtggggatgacgtcaaatcatcatgccccttatgatttgggctacacacgtgctacaatggacaatacaaagggcagctaaaccgcgaggtcaancaaatcccataaagttgttctcagttcggattgtagtctgcaactcgactacatgaagctggaatcgctagtaatcgtagatcagcatgctacggtgaatacgttcccgggtcttgtacacaccgcccgtcacaccacgagagtttgtaacacccgaagccggtggagtaaccatttatggagctagccgtcgaaggtgggacaaatgattg

SEQ ID NO: 375 - DNA, 1475 bp, Staphylococcus xylosus
gatgaacgctggcggcgtgcctaatacatgcaagtcgagcgaacagataaggagcttgctcctttgaagttagcggcggacgggtgagtaacacgtgggtaacctacctataagactgggataacttcgggaaaccggagctaataccggataacatttagaaccgcatggttctaaagtgaaagatggttttgctatcacttatagatggacccgcgccgtattagctagttggtaaggtaacggcttaccaaggcgacgatacgtagccgacctgagagggtgatcggccacactggaactgagacacggtccagactcctacgggaggcagcagtagggaatcttccgcaatgggcgaaagcctgacggagcaacgccgcgtgagtgatgaagggtttcggctcgtaaaactctgttattagggaagaacaaatgtgtaagtaactgtgcacatcttgacggtacctaatcagaaagccacggctaactacgtgccagcagccgcggtaatacgtaggtggcaagcgttatccggaattattgggcgtaaagcgcgcgtaggcggtttcttaagtctgatgtgaaagcccacggctcaaccgtggagggtcattggaaactgggaaacttgagtgcagaagaggaaagtggaattccatgtgtagcggtgaaatgcgcagagatatggaggaacaccagtggcgaaggcgactttctggtctgtaactgacgctgatgtgcgaaagcgtggggatcaaacaggattagataccctggtagtccacgccgtaaacgatgagtgctaagtgttagggggtttccgccccttagtgctgcagctaacgcattaagcactccgcctggggagtacgaccgcaaggttgaaactcaaaggaattgacggggacccgcacaagcggtggagcatgtggtttaattcgaagcaacgcgaagaaccttaccaaatcttgacatcctttgaaaactctagagatagagccttccccttcgggggacaaagtgacaggtggtgcatggttgtcgtcagctcgtgtcgtgagatgttgggttaagtcccgcaacgagcgcaacccttaagcttagttgccatcattaagttgggcactctaggttgactgccggtgacaaaccggaggaaggtggggatgacgtcaaatcatcatgccccttatgatttgggctacacacgtgctacaatggacaatacaaagggcagctaaaccgcgaggtcatgcaaatcccataaagttgttctcagttcggattgtagtctgcaactcgactacatgaagctggaatcgctagtaatcgtagatcagcatgctacggtgaatacgttcccgggtcttgtacacaccgcccgtcacaccacgagagtttgtaacacccgaagccggtggagtaaccatttatggagctagccgtcgaaggtgggacaaatgattggggtg

SEQ ID NO: 376 - DNA, 1469 bp, Stenotrophomonas acidaminiphila
agtgaacgctggcggtaggcctaacacatgcaagtcgaacggcagcacagtaagagcttgctcttacgggtggcgagtggcggacgggtgaggaatgcatcggaatctactctgtcgtgggggataacgtagggaaacttacgctaataccgcatacgacctacgggtgaaagcaggggatcttcggaccttgcgcgattgaatgagccgatgcccgattagctagttggcggggtaagagcccaccaaggcgacgatcggtagctggtctgagaggatgatcagccacactggaactgagacacggtccagactcctacgggaggcagcagtggggaatattggacaatgggcgcaagcctgatccagccataccgcgtgggtgaagaaggccttcgggttgtaaagcccttttgttgggaaagaaaagcagtcggttaatacccgattgttctgacggtacccaaagaataagcaccggctaacttcgtgccagcagccgcggtaatacgaagggtgcaagcgttactcggaattactgggcgtaaagcgtgcgtaggtggttgtttaagtctgtcgtgaaagccctgggctcaacctgggaattgcgatggaaactgggcgactagagtgtggcagagggtagtggaattcctggtgtagcagtgaaatgcgtagagatcaggaggaacatccgtggcgaaggcgactgcctgggccaacactgacactgaggcacgaaagcgtggggagcaaacaggattagataccctggtagtccacgccctaaacgatgcgaactggatgttgggtgcaatttggcacgcagtatcgaagctaacgcgttaagttcgccgcctggggagtacggtcgcaagactgaaactcaaaggaattgacgggggcccgcacaagcggtggagtatgtggtttaattcgatgcaacgcgaagaaccttacctggccttgacatgcacggaactttccagagatggattggtgccttcgggaaccgtgacacaggtgctgcatggctgtcgtcagctcgtgtcgtgagatgttgggttaagtcccgcaacgagcgcaacccttgtccttagttgccagcacgtaatggtgggaactctaaggagaccgccggtgacaaaccggaggaaggtggggatgacgtcaagtcatcatggcccttacggccagggctacacacgtactacaatggtagggacagagggctgcaagccggcgacggtgagccaatcccagaaaccctatctcagtccggattggagtctgcaactcgactccatgaagtcggaatcgctagtaatcgcagatcagcattgctgcggtgaatacgttcccgggccttgtacacaccgcccgtcacaccatgggagtttgttgcaccagaagcaggtagcttaaccttcgggagggcgcttgccacggtgtggccgatgactggggtg

SEQ ID NO: 377 - DNA, 1467 bp, Stenotrophomonas maltophilia
agtgaacgctggcggtaggcctaacacatgcaagtcgaacggcagcacaggagagcttgctctctgggtggcgagtggcggacgggtgaggaatacatcggaatctactttttcgtgggggataacgtagggaaacttacgctaataccgcatacgacctacgggtgaaagcaggggatcttcggaccttgcgcgattgaatgagccgatgtcggattagctagttggcggggtaaaggcccaccaaggcgacgatccgtagctggtctgagaggatgatcagccacactggaactgagacacggtccagactcctacgggaggcagcagtggggaatattggacaatgggcgcaagcctgatccagccataccgcgtgggtgaagaaggccttcgggttgtaaagcccttttgttgggaaagaaatccagctggttaatacccggttgggatgacggtacccaaagaataagcaccggctaacttcgtgccagcagccgcggtaatacgaagggtgcaagcgttactcggaattactgggcgtaaagcgtgcgtaggtggtcgtttaagtccgttgtgaaagccctgggctcaacctgggaactgcagtggatactgggcgactagagtgtggtagagggtagcggaattcctggtgtagcagtgaaatgcgtagagatcaggaggaacatccatggcgaaggcagctacctggaccaacactgacactgaggcacgaaagcgtggggagcaaacaggattagataccctggtagtccacgccctaaacgatgcgaactggatgttgggtgcaatttggcacgcagtatcgaagctaacgcgttaagttcgccgcctggggagtacggtcgcaagactgaaactcaaaggaattgacgggggcccgcacaagcggtggagtatgtggtttaattcgatgcaacgcgaagaaccttacctggccttgacatgtcgagaactttccagagatggattggtgccttcgggaactcgaacacaggtgctgcatggctgtcgtcagctcgtgtcgtgagatgttgggttaagtcccgcaacgagcgcaacccttgtccttagttgccagcacgtaatggtgggaactctaaggagaccgccggtgacaaaccggaggaaggtggggatgacgtcaagtcatcatggcccttacggccagggctacacacgtactacaatggtagggacagagggctgcaagccggcgacggtaagccaatcccagaaaccctatctcagtccggattggagtctgcaactcgactccatgaagtcggaatcgctagtaatcgcagatcagcattgctgcggtgaatacgttcccgggccttgtacacaccgcccgtcacaccatgggagtttgttgcaccagaagcaggtagcttaaccttcgggagggcgcttgccacggtgtggccgatgactggggtg

SEQ ID NO: 378 - DNA, 1469 bp, Stenotrophomonas rhizophila
agtgaacgctggcggtaggcctaacacatgcaagtcgaacggcagcacagtaagagcttgctcttatgggtggcgagtggcggacgggtgaggaatacatcggaatctaccttttcgtgggggataacgtagggaaacttacgctaataccgcatacgaccttcgggtgaaagcaggggaccttcgggccttgcgcggatagatgagccgatgtcggattagctagttggcggggtaaaggcccaccaaggcgacgatccgtagctggtctgagaggatgatcagccacactggaactgagacacggtccagactcctacgggaggcagcagtggggaatattggacaatgggcgcaagcctgatccagccataccgcgtgggtgaagaaggccttcgggttgtaaagcccttttgttgggaaagaaaagcagtcgattaatactcggttgttctgacggtacccaaagaataagcaccggctaacttcgtgccagcagccgcggtaatacgaagggtgcaagcgttactcggaattactgggcgtaaagcgtgcgtaggtggttgtttaagtctgttgtgaaagccctgggctcaacctgggaattgcagtggatactgggcgactagagtgtggtagagggtagtggaattcccggtgtagcagtgaaatgcgtagagatcgggaggaacatccatggcgaaggcagctacctggaccaacactgacactgaggcacgaaagcgtggggagcaaacaggattagataccctggtagtccacgccctaaacgatgcgaactggatgttgggtgcaatttggcacgcagtatcgaagctaacgcgttaagttcgccgcctggggagtacggtcgcaagactgaaactcaaaggaattgacgggggcccgcacaagcggtggagtatgtggtttaattcgatgcaacgcgaagaaccttacctggtcttgacatgtcgagaactttccagagatggattggtgccttcgggaactcgaacacaggtgctgcatggctgtcgtcagctcgtgtcgtgagatgttgggttaagtcccgcaacgagcgcaacccttgtccttagttgccagcacgtaatggtgggaactctaaggagaccgccggtgacaaaccggaggaaggtggggatgacgtcaagtcatcatggcccttacgaccagggctacacacgtactacaatggtagggacagagggctgcaaacccgcgagggcaagccaatcccagaaaccctatctcagtccggattggagtctgcaactcgactccatgaagtcggaatcgctagtaatcgcagatcagcattgctgcggtgaatacgttcccgggccttgtacacaccgcccgtcacaccatgggagtttgttgcaccagaagcaggtagcttaaccttcgggagggcgcttgccacggtgtggccgatgactggggtg

SEQ ID NO: 379 - DNA, 1471 bp, Streptococcus australis
gatgaacgctggcggcgtgcctaatacatgcaagtagaacgctgaaggaaggagcttgctctttctggatgagttgcgaacgggtgagtaacgcgtaggtaacctgcctggtagcgggggataactattggaaacgatagctaataccgcataacagtagatgttgcatgatatctgcttgaaaggggcaattgctccactaccagatggacctgcgttgtattagctagttggtgaggtaacggctcaccaaggcgacgatacatagccgacctgagagggtgatcggccacactgggactgagacacggcccagactcctacgggaggcagcagtagggaatcttcggcaatggacggaagtctgaccgagcaacgccgcgtgagtgaagaaggttttcggatcgtaaagctctgttgtaagagaagaacgagtgtgagagtggaaagttcacactgtgacggtatcttaccagaaagggacggctaactacgtgccagcagccgcggtaatacgtaggtcccgagcgttatccggatttattgggcgtaaagcgagcgcaggcggttagataagtctgaagttaaaggctgtggcttaaccatagtacgctttggaaactgtttaacttgagtgcagaaggggagagtggaattccatgtgtagcggtgaaatgcgtagatatatggaggaacaccggtggcgaaagcggctctctggtctgtaactgacgctgaggctcgaaagcgtggggagcaaacaggattagataccctggtagtccacgccgtaaacgatgagtgctaggtgttgggtcctttccgggactcagtgccgtagctaacgcattaagcactccgcctggggagtacgaccgcaaggttgaaactcaaaggaattgacgggggcccgcacaagcggtggagcatgtggtttaattcgaagcaacgcgaagaaccttaccaggtcttgacatccctctgatcgctctagagatagagttttccttcgggacagaggtgacaggtggtgcatggttgtcgtcagctcgtgtcgtgagatgttgggttaagtcccgcaacgagcgcaacccctattgttagttgccatcattcagttgggcactctagcgagactgccggtaataaaccggaggaaggtggggatgacgtcaaatcatcatgccccttatgacctgggctacacacgtgctacaatggctggtacaacgagtcgcaagtcggtgacggcaagctaatctcttaaagccagtctcagttcggattgtaggctgcaactcgcctacatgaagtcggaatcgctagtaatcgcggatcagcacgccgcggtgaatacgttcccgggccttgtacacaccgcccgtcacaccacgagagtttgtaacacccgaagtcggtgaggtaaccttttaggagccagccgcctaaggtgggatagatgattggggtg

SEQ ID NO: 380 - DNA, 1490 bp, Streptococcus bovis
  misc_feature (555)..(555): n is a, c, g, or t
acttaaatgagagtttgatcctggctcaggacgaacgctggcggcgtgcctaatacatgcaagtagaacgctgaagactttagcttgctaaagttggaagagttgcgaacgggtgagtaacgcgtaggtaacctgcctactagcgggggataactattggaaacgatagctaataccgcataacagcatttaacacatgttagatgcttgaaaggagcaattgcttcactagtagatggacctgcgttgtattagctagttggtgaggtaacggctcaccaaggcgacgatacatagccgacctgagagggtgatcggccacactgggactgagacacggcccagactcctacgggaggcagcagtagggaatcttcggcaatgggggcaaccctgaccgagcaacgccgcgtgagtgaagaaggttttcggatcgtaaagctctgttgtaagagaagaacgtgtgtgagagtggaaagttcacacagtgacggtaacttaccagaaagggacggctaactacgtgccagcagccgcggtaatacgtaggtcccnagcgttgtccggatttattgggcgtaaagcgagcgcaggcggtttaataagtctgaagttaaaggcagtggcttaaccattgttcgctttggaaactgttagacttgagtgcagaaggggagagtggaattccatgtgtagcggtgaaatgcgtagatatatggaggaacaccggtggcgaaagcggctctctggtctgtaactgacgctgaggctcgaaagcgtggggagcaaacaggattagataccctggtagtccacgccgtaaacgatgagtgctaggtgttaggcctttccggggcttagtgccagagctaacgcattaagcactccgcctggggagtacgaccgcaaggttgaaactcaaaggaattgacgggggcccgcacaagcggtggagcatgtggtttaattcgaagcaacgcgaagaaccttaccaggtcttgacatcccgatgctattcctagagataggaagtttcttcggaacatcggtgacaggtggtgcatggttgtcgtcagctcgtgtcgtgagatgttgggttaagtcccgcaacgagcgcaacccctattgttagttgccatcattaagttgggcactctagcgagactgccggtaataaaccggaggaaggtggggatgacgtcaaatcatcatgccccttatgacctgggctacacacgtgctacaatggttggtacaacgagtcgcgagtcggtgacggcaagcaaatctcttaaagccaatctcagttcggattgtaggctgcaactcgcctacatgaagtcggaatcgctagtaatcgcggatcagcacgccgcggtgaatacgttcccgggccttgtacacaccgcccgtcacaccacgagagtttgtaacacccgaagtcggtgaggtaaccttttggagctagccgcctaaggtgggatagatga

SEQ ID NO: 381 - DNA, 1470 bp, Streptococcus equinus
gacgaacgctggcggcgtgcctaatacatgcaagtagaacgctgaagactttagcttgctaaagttggaagagttgcgaacgggtgagtaacgcgtaggtaacctgcctactagcgggggataactattggaaacgatagctaataccgcataacagcatttaacacatgttagatgcttgaaagaagcaattgcttcactagtagatggacctgcgttgtattagctagttggtgaggtaaaggctcaccaaggcgacgatacatagccgacctgagagggtgatcggccacactgggactgagacacggcccagactcctacgggaggcagcagtagggaatcttcggcaatgggggcaaccctgaccgagcaacgccgcgtgagtgaagaaggttttcggatcgtaaagctctgttgtaagagaagaacgtgtgtgagagtggaaagttcacacagtgacggtaacttaccagaaagggacggctaactacgtgccagcagccgcggtaatacgtaggtcccgagcgttgtccggatttattgggcgtaaagcgagcgcaggcggtttaataagtctgaagttaaaggcagtggcttaaccattgttcgctttggaaactgttagacttgagtgcagaaggggagagtggaattccatgtgtagcggtgaaatgcgtagatatatggaggaacaccggtggcgaaagcggctctctggtctgtaactgacgctgaggctcgaaagcgtggggagcaaacaggattagataccctggtagtccacgccgtaaacgatgagtgctaggtgttaggccctttccggggcttagtgccgcagctaacgcattaagcactccgcctggggagtacgaccgcaaggttgaaactcaaaggaattgacgggggcccgcacaagcggtggagcatgtggtttaattcgaagcaacgcgaagaaccttaccaggtcttgacatcccgatgctatttctagagataggaagtttcttcggaacatcggtgacaggtggtgcatggttgtcgtcagctcgtgtcgtgagatgttgggttaagtcccgcaacgagcgcaacccctattgttagttgccatcattaagttgggcactctagcgagactgccggtaataaaccggaggaaggtggggatgacgtcaaatcatcatgccccttatgacctgggctacacacgtgctacaatggttggtacaacgagtcgcgagtcggtgacggcaagcaaatctcttaaagccaatctcagttcggattgtaggctgcaactcgcctacatgaagtcggaatcgctagtaatcgcggatcagcacgccgcggtgaatacgttcccgggccttgtacacaccgcccgtcacaccacgagagtttgtaacacccgaagtcggtgaggtaaccttttggagccagccgcctaaggtgggatagatgattggggtg

SEQ ID NO: 382 - DNA, 1471 bp, Streptococcus gallolyticus
gacgaacgctggcggcgtgcctaatacatgcaagtagaacgctgaagactttagcttgctagagttggaagagttgcgaacgggtgagtaacgcgtaggtaacctgcctattagtgggggataactattggaaacgatagctaataccgcataatagtgtttaacacatgttagagacttaaaagatgcaattgcatcactagtagatggacctgcgttgtattagctagttggtggggtaacggcctaccaaggcgacgatacatagccgacctgagagggtgatcggccacactgggactgagacacggcccagactcctacgggaggcagcagtagggaatcttcggcaatgggggcaaccctgaccgagcaacgccgcgtgagtgaagaaggttttcggatcgtaaagctctgttgtaagagaagaacgtgtgtgagagtggaaagttcacacagtgacggtaacttaccagaaagggacggctaactacgtgccagcagccgcggtaatacgtaggtcccgagcgttgtccggatttattgggcgtaaagcgagcgcaggcggtttaataagtctgaagttaaaggcagtggcttaaccattgttcgctttggaaactgttaaacttgagtgcagaaggggagagtggaattccatgtgtagcggtgaaatgcgtagatatatggaggaacaccggtggcgaaagcggctctctggtctgtaactgacgctgaggctcgaaagcgtggggagcaaacaggattagataccctggtagtccacgccgtaaacgatgagtgctaggtgttaggccctttccggggcttagtgccgcagctaacgcattaagcactccgcctggggagtacgaccgcaaggttgaaactcaaaggaattgacgggggcccgcacaagcggtggagcatgtggtttaattcgaagcaacgcgaagaaccttaccaggtcttgacatcccgatgctatttctagagatagaaagtttcttcggaacatcggtgacaggtggtgcatggttgtcgtcagctcgtgtcgtgagatgttgggttaagtcccgcaacgagcgcaacccctattgttagttgccatcattcagttgggcactctagcgagactgccggtgataaaccggaggaaggtggggatgacgtcaaatcatcatgccccttatgacctgggctacacacgtgctacaatggttggtacaacgagtcgcaagccggtgacggcaagcaaatctcttaaagccaatctcagttcggattgtaggctgcaactcgcctacatgaagtcggaatcgctagtaatcgcggatcagcacgccgcggtgaatacgttcccgggccttgtacacaccgcccgtcacaccacgagagtttgtaacacccgaagtcggtgaggtaaccttttaggagccagccgcctaaggtgggacagatgattggggtg

SEQ ID NO: 383 - DNA, 1471 bp, Streptococcus infantarius
gacgaacgctggcggcgtgcctaatacatgcaagtagaacgctgaaaactttagcttgctaaagtttgaagagttgcgaacgggtgagtaacgcgtaggtaacctgcctactagcgggggataactattggaaacgatagctaataccgcataacagcatttaacccatgttagatgcttgaaaggagcaattgcttcactagtagatggacctgcgttgtattagctagttggtgaggtaacggctcaccaaggcgacgatacatagccgacctgagagggtgatcggccacactgggactgagacacggcccagactcctacgggaggcagcagtagggaatcttcggcaatgggggcaaccctgaccgagcaacgccgcgtgagtgaagaaggttttcggatcgtaaagctctgttgtaagagaagaatgtgtgtgagagtggaaagttcacacagtgacggtaacttaccagaaagggacggctaactacgtgccagcagccgcggtaatacgtaggtcccgagcgttgtccggatttattgggcgtaaagcgagcgcaggcggtttaataagtctgaagttaaaggcagtggcttaaccattgttcgctttggaaactgttagacttgagtgcagaaggggagagtggaattccatgtgtagcggtgaaatgcgtagatatatggaggaacaccggtggcgaaagcggctctctggtctgtaactgacgctgaggctcgaaagcgtggggagcaaacaggattagataccctggtagtccacgccgtaaacgatgagtgctaggtgttaggccctttccggggcttagtgccgcagctaacgcattaagcactccgcctggggagtacgaccgcaaggttgaaactcaaaggaattgacgggggcccgcacaagcggtggagcatgtggtttaattcgaagcaacgcgaagaaccttaccaggtcttgacatcccgatgctattcctagagataggaagtttcttcggaacatcggtgacaggtggtgcatggttgtcgtcagctcgtgtcgtgagatgttgggttaagtcccgcaacgagcgcaacccctattgttagttgccatcattaagttgggcactctagcgagactgccggtaataaaccggaggaaggtggggatgacgtcaaatcatcatgccccttatgacctgggctacacacgtgctacaatggttggtacaacgagtcgcgagtcggtgacggcaagcaaatctcttaaagccaatctcagttcggattgtaggctgcaactcgcctacatgaagtcggaatcgctagtaatcgcggatcagcacgccgcggtgaatacgttcccgggccttgtacacaccgcccgtcacaccacgagagtttgtaacacccgaagtcggtgaggtaaccttttaggagccagccgcctaaggtgggatagatgattggggtg

SEQ ID NO: 384 - DNA, 1463 bp, Streptococcus lutetiensis
ctggcggcgtgcctaatacatgcaagtagaacgctgaagactttagcttgctaaagttggaagagttgcgaacgggtgagtaacgcgtaggtaacctgcctactagcgggggataactattggaaacgatagctaataccgcataacagcatttaacccatgttagatgcttgaaaggagcaattgcttcactagtagatggacctgcgttgtattagctagttggtgaggtaacggctcaccaaggcgacgatacatagccgacctgagagggtgatcggccacactgggactgagacacggcccagactcctacgggaggcagcagtagggaatcttcggcaatgggggcaaccctgaccgagcaacgccgcgtgagtgaagaaggttttcggatcgtaaagctctgttgtaagagaagaacgtgtgtgagagtggaaagttcacacagtgacggtaacttaccagaaagggacggctaactacgtgccagcagccgcggtaatacgtaggtcccgagcgttgtccggatttattgggcgtaaagcgagcgcaggcggtttaataagtctgaagttaaaggcagtggcttaaccattgttcgctttggaaactgttagacttgagtgcagaaggggagagtggaattccatgtgtagcggtgaaatgcgtagatatatggaggaacaccggtggcgaaagcggctctctggtctgtaactgacgctgaggctcgaaagcgtggggagcaaacaggattagataccctggtagtccacgccgtaaacgatgagtgctaggtgttaggccctttccggggcttagtgccgcagctaacgcattaagcactccgcctggggagtacgaccgcaaggttgaaactcaaaggaattgacgggggcccgcacaagcggtggagcatgtggtttaattcgaagcaacgcgaagaaccttaccaggtcttgacatcccgatgctattcctagagataggaagtttcttcggaacatcggtgacaggtggtgcatggttgtcgtcagctcgtgtcgtgagatgttgggttaagtcccgcaacgagcgcaacccctattgttagttgccatcattaagttgggcactctagcgagactgccggtaataaaccggaggaaggtggggatgacgtcaaatcatcatgccccttatgacctgggctacacacgtgctacaatggttggtacaacgagtcgcgagtcggtgacggcaagcaaatctcttaaagccaatctcagttcggattgtaggctgcaactcgcctacatgaagtcggaatcgctagtaatcgcggatcagcacgccgcggtgaatacgttcccgggccttgtacacaccgcccgtcacaccacgagagtttgtaacacccgaagtcggtgaagtaaccttttaggagccagccgcctaaggtgggatagatgattggggtg

SEQ ID NO: 385 - DNA, 1520 bp, Streptococcus mitis; identical to SEQ ID NO: 70

SEQ ID NO: 386 - DNA, 1479 bp, Streptococcus mutans
gacgaacgctggcggcgtgcctaatacatgcaagtgggacgcaagggaacacactgtgcttgcacaccgtgttttcttgagtcgcgaacgggtgagtaacgcgtaggtaacctgcctattagcgggggataactattggaaacgatagctaataccgcataatattaattattgcatgataattgattgaaagatgcaagcgcatcactagtagatggacctgcgttgtattagctagttggtaaggtaagagcttaccaaggcgacgatacatagccgacctgagagggtgatcggccacactgggactgagacacggcccagactcctacgggaggcagcagtagggaatcttcggcaatggacgaaagtctgaccgagcaacgccgcgtgagtgaagaaggttttcggatcgtaaagctctgttgtaagtcaagaacgtgtgtgagagtggaaagttcacacagtgacggtagcttaccagaaagggacggctaactacgtgccagcagccgcggtaatacgtaggtcccgagcgttgtccggatttattgggcgtaaagggagcgcaggcggtcaggaaagtctggagtaaaaggctatggctcaaccatagtgtgctctggaaactgtctgacttgagtgcagaaggggagagtggaattccatgtgtagcggtgaaatgcgtagatatatggaggaacaccagtggcgaaagcggctctctggtctgtcactgacgctgaggctcgaaagcgtgggtagcgaacaggattagataccctggtagtccacgccgtaaacgatgagtgctaggtgttaggccctttccggggcttagtgccggagctaacgcaataagcactccgcctggggagtacgaccgcaaggttgaaactcaaaggaattgacgggggcccgcacaagcggtggagcatgtggtttaattcgaagcaacgcgaagaaccttaccaggtcttgacatcccgatgctattcttagagataggaagttacttcggtacatcggagacaggtggtgcatggttgtcgtcagctcgtgtcgtgagatgttgggttaagtcccgcaacgagcgcaacccttattgttagttgccatcattaagttgggcactctagcgagactgccggtaataaaccggaggaaggtggggatgacgtcaaatcatcatgccccttatgacctgggctacacacgtgctacaatggtcggtacaacgagttgcgagccggtgacggcaagctaatctctgaaagccgatctcagttcggattggaggctgcaactcgcctccatgaagtcggaatcgctagtaatcgcggatcagcacgccgcggtgaatacgttcccgggccttgtacacaccgcccgtcacaccacgagagtttgtaacacccgaagtcggtgaggtaaccttttaggggccagccgcctaaggtgggatggatgattggggtg

SEQ ID NO: 387 - DNA, 1476 bp, Streptococcus oralis; identical to SEQ ID NO: 71

SEQ ID NO: 388 - DNA, 1468 bp, Streptococcus peroris
gatgaacgctggcggcgtgcctaatacatgcaagtagaacgctgaaggaggagcttgcttctctggatgagttgcgaacgggtgagtaacgcgtaggtaacctgcctggtagcgggggataactattggaaacgatagctaataccgcataagagcagttgttgcatgacagctgtttaaaaggtgcaattgcaccactaccagatggacctgcgttgtattagctagttggtgaggtaacggctcaccaaggcgacgatacatagccgacctgagagggtgatcggccacactgggactgagacacggcccagactcctacgggaggcagcagtagggaatcttcggcaatgggggcaaccctgaccgagcaacgccgcgtgagtgaagaaggttttcggatcgtaaagctctgttgtaagagaagaacgagtgtgagagtggaaagttcacgctgtgacggtatcttaccagaaagggacggctaactacgtgccagcagccgcggtaatacgtaggtcccgagcgttatccggatttattgggcgtaaagcgagcgcaggcggttagataagtctgaagttaaaggctgtggcttaaccatagtacgctttggaaactgtttaacttgagtgcaagaggggagagtggaattccatgtgtagcggtgaaatgcgtagatatatggaggaacaccggtggcgaaagcggctctctggcttgtaactgacgctgaggctcgaaagcgtggggagcaaacaggattagataccctggtagtccacgccgtaaacgatgagtgctaggtgttagaccctttccggggtttagtgccgcagctaacgcattaagcactccgcctggggagtacgaccgcaaggttgaaactcaaaggaattgacgggggcccgcacaagcggtggagcatgtggtttaattcgaagcaacgcgaagaaccttaccaggtcttgacatcccgatgccatttctagagataggaagttacttcggtacatcggtgacaggtggtgcatggttgtcgtcagctcgtgtcgtgagatgttgggttaagtcccgcaacgagcgcaacccctattgttagttgccatcattcagttgggcactctagcgagactgccggtaataaaccggaggaaggtggggatgacgtcaaatcatcatgccccttatgacctgggctacacacgtgctacaatggctggtacaacgagtcgcgagtcggtgacggcaagctaatctcttaaagccagtctcagttcggattgtaggctgcaactcgcctacatgaagtcggaatcgctagtaatcgcggatcagcacgccgcggtgaatacgttcccgggccttgtacacaccgcccgtcacaccacgagagtttgtaacacccgaagtcggtgaggtaaccatttggagccagccgcctaaggtgggatagatgattggggtg

SEQ ID NO: 389 - DNA, 1468 bp, Streptococcus pseudopneumoniae
gacgaacgctggcggcgtgcctaatacatgcaagtagaacgctgaaggaggagcttgcttctctggatgagttgcgaacgggtgagtaacgcgtaggtaacctgcctggtagcgggggataactattggaaacgatagctaataccgcataagagtagatgttgcatgacatttgcttaaaaggtgcaaatgcatcactaccagatggacctgcgttgtattagctagttggtggggtaacggctcaccaaggcgacgatacatagccgacctgagagggtgatcggccacactgggactgagacacggcccagactcctacgggaggcagcagtagggaatcttcggcaatggacggaagtctgaccgagcaacgccgcgtgagtgaagaaggttttcggatcgtaaagctctgttgtaagagaagaacgagtgtgagagtggaaagttcacactgtgacggtatcttaccagaaagggacggctaactacgtgccagcagccgcggtaatacgtaggtcccgagcgttgtccggatttattgggcgtaaagcgagcgcaggcggttagataagtctgaagttaaaggctgtggcttaaccatagtaggctttggaaactgtttaacttgagtgcaagaggggagagtggaattccatgtgtagcggtgaaatgcgtagatatatggaggaacaccggtggcgaaagcggctctctggcttgtaactgacgctgaggctcgaaagcgtggggagcaaacaggattagataccctggtagtccacgccgtaaacgatgagtgctaggtgttagaccctttccggggtttagtgccgtagctaacgcattaagcactccgcctggggagtacgaccgcaaggttgaaactcaaaggaattgacgggggcccgcacaagcggtggagcatgtggtttaattcgaagcaacgcgaagaaccttaccaggtcttgacatccctctgaccgctctagagatagagctttccttcgggacagaggtgacaggtggtgcatggttgtcgtcagctcgtgtcgtgagatgttgggttaagtcccgcaacgagcgcaacccctattgttagttgccatcattcagttgggcactctagcgagactgccggtaataaaccggaggaaggtggggatgacgtcaaatcatcatgccccttatgacctgggctacacacgtgctacaatggctggtacaacgagtcgcaagccggtgacggcaagctaatctcttaaagccagtctcagttcggattgtaggctgcaactcgcctacatgaagtcggaatcgctagtaatcgcggatcagcacgccgcggtgaatacgttcccgggccttgtacacaccgcccgtcacaccacgagagtttgtaacacccgaagtcggtgaggtaaccgtaaggagccagccgcctaaggtgggatagatgattggggtg

SEQ ID NO: 390 - DNA, 1470 bp, Streptococcus salivarius
gacgaacgctggcggcgtgcctaatacatgcaagtagaacgctgaagagaggagcttgctcttcttggatgagttgcgaacgggtgagtaacgcgtaggtaacctgccttgtagcgggggataactattggaaacgatagctaataccgcataacaatggatgacacatgtcatttatttgaaaggggcaattgctccactacaagatggacctgcgttgtattagctagtaggtgaggtaacggctcacctaggcgacgatacatagccgacctgagagggtgatcggccacactgggactgagacacggcccagactcctacgggaggcagcagtagggaatcttcggcaatgggggcaaccctgaccgagcaacgccgcgtgagtgaagaaggttttcggatcgtaaagctctgttgtaagtcaagaacgagtgtgagagtggaaagttcacactgtgacggtagcttaccagaaagggacggctaactacgtgccagcagccgcggtaatacgtaggtcccgagcgttgtccggatttattgggcgtaaagcgagcgcaggcggtttgataagtctgaagttaaaggctgtggctcaaccatagttcgctttggaaactgtcaaacttgagtgcagaaggggagagtggaattccatgtgtagcggtgaaatgcgtagatatatggaggaacaccggtggcgaaagcggctctctggtctgtaactgacgctgaggctcgaaagcgtggggagcgaacaggattagataccctggtagtccacgccgtaaacgatgagtgctaggtgttggatcctttccgggattcagtgccgcagctaacgcattaagcactccgcctggggagtacgaccgcaaggttgaaactcaaaggaattgacgggggcccgcacaagcggtggagcatgtggtttaattcgaagcaacgcgaagaaccttaccaggtcttgacatcccgatgctatttctagagatagaaagttacttcggtacatcggtgacaggtggtgcatggttgtcgtcagctcgtgtcgtgagatgttgggttaagtcccgcaacgagcgcaacccctattgttagttgccatcattcagttgggcactctagcgagactgccggtaataaaccggaggaaggtggggatgacgtcaaatcatcatgccccttatgacctgggctacacacgtgctacaatggttggtacaacgagttgcgagtcggtgacggcaagctaatctcttaaagccaatctcagttcggattgtaggctgcaactcgcctacatgaagtcggaatcgctagtaatcgcggatcagcacgccgcggtgaatacgttcccgggccttgtacacaccgcccgtcacaccacgagagtttgtaacacccgaagtcggtgaggtaaccttttggagccagccgcctaaggtgggatagatgattggggtg

SEQ ID NO: 391 - DNA, 1479 bp, Streptococcus sobrinus
gacgaacgctggcggcgtgcctaatacatgcaagtggaacgcattggtaacaccggacttgctccagtgttactaatgagtcgcgaacgggtgagtaacgcgtaggtaacctgcctgatagcgggggataactattggaaacgatagctaataccgcataagaggagttaactcatgttaactgtttaaaagaagccattgcttcactatcagatggacctgcgttgtattagctagtaggtagggtaacggcctacctaggcaacgatacatagccgacctgagagggtgaacggccacactgggactgagacacggcccagactcctacgggaggcagcagtagggaatcttcggcaatggacgcaagtctgaccgagcaacgccgcgtgagtgaagacggttttcggatcgtaaagctctgttgtaggggaagaacgtgtgtaagagtggaaagcttacacagtgacggtaccctaccagaaagggacggctaactacgtgccagcagccgcggtaatacgtaggtcccgagcgttgtccggatttattgggcgtaaagggagcgcaggcggtttagtaagtctgaagttaaaggcattggctcaaccaatgtatgctttggaaactgttagacttgagtgcagaaggggagagtggaattccatgtgtagcggtgaaatgcgtagatatatggaggaacaccggtggcgaaagcggctctctggtctgtcactgacgctgaggctcgaaagcgtgggtagcgaacaggattagataccctggtagtccacgccgtaaacgctgagtgctaggtgttaggtcctttccgggacttagtgccgacgctaacgcattaagcactccgcctggggagtacgaccgcaaggttgaaactcaaaggaattgacgggggcccgcacaagcggtggagcatgtggtttaattcgaagcaacgcgaagaaccttaccaggtcttgacatcccgatgcccgctctagagatagagtttttcttcggaacatcggagacaggtggtgcatggttgtcgtcagctcgtgtcgtgagatgttgggttaagtcccgcaacgagcgcaacccttattgttagttgccatcattaagttgggcactctagcgagactgccggtaataaaccggaggaaggtggggatgacgtcaaatcatcatgccccttatgacctgggctacacacgtgctacaatggttggtacaacgagtcgcaagccggtgacggcaagctaatctctgaaagccaatctcagttcggattgtaggctgcaactcgcctacatgaagtcggaatcgctagtaatcgcggatcagcacgccgcggtgaatacgttcccgggccttgtacacaccgcccgtcacaccacgagagtttgtaacacccaaagtcggtgaggtaaccatttatggggccagccgcctaaggtgggatggatgattggggtg

SEQ ID NO: 392 - DNA, 1470 bp, Streptococcus thermophilus
gacgaacgctggcggcgtgcctaatacatgcaagtagaacgctgaagagaggagcttgctcttcttggatgagttgcgaacgggtgagtaacgcgtaggtaacctgccttgtagcgggggataactattggaaacgatagctaataccgcataacaatggatgacacatgtcatttatttgaaaggggcaattgctccactacaagatggacctgcgttgtattagctagtaggtgaggtaatggctcacctaggcgacgatacatagccgacctgagagggtgatcggccacactgggactgagacacggcccagactcctacgggaggcagcagtagggaatcttcggcaatgggggcaaccctgaccgagcaacgccgcgtgagtgaagaaggttttcggatcgtaaagctctgttgtaagtcaagaacgggtgtgagagtggaaagttcacactgtgacggtagcttaccagaaagggacggctaactacgtgccagcagccgcggtaatacgtaggtcccgagcgttgtccggatttattgggcgtaaagcgagcgcaggcggtttgataagtctgaagttaaaggctgtggctcaaccatagttcgctttggaaactgtcaaacttgagtgcagaaggggagagtggaattccatgtgtagcggtgaaatgcgtagatatatggaggaacaccggtggcgaaagcggctctctggtctgtaactgacgctgaggctcgaaagcgtggggagcgaacaggattagataccctggtagtccacgccgtaaacgatgagtgctaggtgttggatcctttccgggattcagtgccgcagctaacgcattaagcactccgcctggggagtacgaccgcaaggttgaaactcaaaggaattgacgggggcccgcacaagcggtggagcatgtggtttaattcgaagcaacgcgaagaaccttaccaggtcttgacatcccgatgctatttctagagatagaaagttacttcggtacatcggtgacaggtggtgcatggttgtcgtcagctcgtgtcgtgagatgttgggttaagtcccgcaacgagcgcaacccctattgttagttgccatcattcagttgggcactctagcgagactgccggtaataaaccggaggaaggtggggatgacgtcaaatcatcatgccccttatgacctgggctacacacgtgctacaatggttggtacaacgagttgcgagtcggtgacggcgagctaatctcttaaagccaatctcagttcggattgtaggctgcaactcgcctacatgaagtcggaatcgctagtaatcgcggatcagcacgccgcggtgaatacgttcccgggccttgtacacaccgcccgtcacaccacgagagtttgtaacacccgaagtcggtgaggtaaccttttggagccagccgcctaaggtgggacagatgattggggtg

SEQ ID NO: 393 - DNA, 1470 bp, Streptococcus vestibularis
gacgaacgctggcggcgtgcctaatacatgcaagtagaacgctgaagagaggagcttgctcttcttggatgagttgcgaacgggtgagtaacgcgtaggtaacctgccttgtagcgggggataactattggaaacgatagctaataccgcataacaataggtgacacatgtcatttatttgaaaggggcaattgctccactacaagatggacctgcgttgtattagctagtaggtgaggtaacggctcacctaggcgacgatacatagccgacctgagagggtgatcggccacactgggactgagacacggcccagactcctacgggaggcagcagtagggaatcttcggcaatgggggcaaccctgaccgagcaacgccgcgtgagtgaagaaggttttcggatcgtaaagctctgttgtaagtcaagaacgagtgtgagagtggaaagttcacactgtgacggtagcttaccagaaagggacggctaactacgtgccagcagccgcggtaatacgtaggtcccgagcgttgtccggatttattgggcgtaaagcgagcgcaggcggtttgataagtctgaagttaaaggctgtggctcaaccatagttcgctttggaaactgtcaaacttgagtgcagaaggggagagtggaattccatgtgtagcggtgaaatgcgtagatatatggaggaacaccggtggcgaaagcggctctctggtctgtaactgacgctgaggctcgaaagcgtggggagcgaacaggattagataccctggtagtccacgccgtaaacgatgagtgctaggtgttggatcctttccgggattcagtgccgcagctaacgcattaagcactccgcctggggagtacgaccgcaaggttgaaactcaaaggaattgacgggggcccgcacaagcggtggagcatgtggtttaattcgaagcaacgcgaagaaccttaccaggtcttgacatcccgatgctatttctagagatagaaagttacttcggtacatcggtgacaggtggtgcatggttgtcgtcagctcgtgtcgtgagatgttgggttaagtcccgcaacgagcgcaacccctattgttagttgccatcattcagttgggcactctagcgagactgccggtaataaaccggaggaaggtggggatgacgtcaaatcatcatgccccttatgacctgggctacacacgtgctacaatggttggtacaacgagttgcgagtcggtgacggcaagctaatctcttaaagccaatctcagttcggattgtaggctgcaactcgcctacatgaagtcggaatcgctagtaatcgcggatcagcacgccgcggtgaatacgttcccgggccttgtacacaccgcccgtcacaccacgagagtttgtaacacccgaagtcggtgaggtaaccttttggagccagccgcctaaggtgggatagatgattggggtg

SEQ ID NO: 394 - DNA, 1476 bp, Succiniclasticum ruminis
gacgaacgctggcggcgtgcctaacacatgcaagtcgaacggggattttgtttcggcagaatcctagtggcgaacgggtgagtaacgcgtaggcaacctgccccccggattgggacaacaccccgaaaggggtgctaataccggatacgaagatagcaccgcatggtgttattttgaaagatggcctctatttataagctatcgccgggggatgggcctgcgtccgattagctggttggtggggtaacggcctaccaaggcgacgatcggtagccggtctgagaggatgaacggccacattgggactgagacacggcccagactcctacgggaggcagcagtggggaatcttccgcaatgggcgaaagcctgacggagcaacgccgcgtgggtgaggaagttcttcggaacgtaaagccctgttgtacatgacgaacgtgctttctatcaacaacgggaagcaatgacggtagtgtacgaggaagccacggctaactacgtgccagcagccgcggtaatacgtaggtggcaagcgttgtccggaattattgggcgtaaagcgcatgtaggcggtgccttaagtctgtcgtgaaactgcggggcctaaccccgtatggcgatggaaactggggcacttgagtgcaggagaggaaaggggaactcccagtgtagcggtgaaatgcgtagatattgggaagaacaccggtggcgaaggcgcctttctggactgtgtctgacgctgagatgcgaaagccagggtagcgaacgggattagataccccggtagtcctggccgtaaacgatgggtactaggtgtgggaggtatcgaccccttccgtgccggagttaacgcaataagtaccccgcctggggagtacggccgcaaggcttaaactcaaaggaattgacgggggcccgcacaagcggtggagtatgtggtttaattcgacgcaacgcgaagaaccttaccagggcttgacatcgattgcaaggcgtagagatacgcccctctcttcggagacatgaagacaggtggtgcatggctgtcgtcagctcgtgtcgtgagatgttgggttaagtcccgcaacgagcgcaacccctatcccatgttaccatcattaagttggggactcatgggagactgccagggacaacctggaggaaggcggggatgacgtcaagtcatcatgccccttatgtcctgggctacacacgtactacaatggccggcaacagagggaagcgaagccgcgaggcggagcgaaccccataaacccggtcccagttcggatcgcaggctgcaacccgcctgcgtgaagtcggaatcgctagtaatcgcaggtcagcatactgcggtgaatacgttcccgggccttgtacacaccgcccgtcacaccacgaaagttggtaacacccgaagccggtggggtaaccgcaaggagccagccgtctaaggtggggccgatgattggggtg

SEQ ID NO: 395 - DNA, 1484 bp, Terribacillus aidingensis
gacgaacgctggcggcgtgcctaatacatgcaagtcgagcgcaggaagctagatgaccccttcggggtgattctagtggaatgagcggcggacgggtgagtaacacgtgggcaacctgcctgtaagactgggataactccgggaaaccggggctaataccggatagtattttctttctcctgattgaaaatggaaagacggtttcggctgtcacttacagatgggcccgcggtgcattagctagttggtggggtaatggcccaccaaggcgacgatgcatagccgacctgagagggtgatcggccacactgggactgagacacggcccagactcctacgggaggcagcagtagggaatcttccgcaatggacgaaagtctgacggagcaacgccgcgtgagcgatgaaggccttcgggtcgtaaagctctgttgtcagggaagaacaagtacgagagtaactgctcgtaccttgacggtacctgaccagaaagccccggctaactacgtgccagcagccgcggtaatacgtagggggcaagcgttgtccggaattattgggcgtaaagggcgtgtaggcggtttcttaagtctgatgtgaaagcccacagcttaactgtggagggtcattggaaactggggaacttgagtgcagaagaggagagtggaattccacgtgtagcggtgaaatgcgtagatatgtggaggaacaccagtggcgaaggcgactctctggtctgtaactgacgctgaggcgcgaaagcgtggggagcaaacaggattagataccctggtagtccacgccgtaaacgatgagtgctaggtgttagggggtttccgccccttagtgctgaagttaacgcattaagcactccgcctggggagtacggccgcaaggctgaaactcaaaagaattgacgggggcccgcacaagcggtggagcatgtggtttaattcgaagcaacgcgaagaaccttaccaggtcttgacatccgctgacaaccttggagacaaggcattcccttcggggacagcgtgacaggtggtgcatggttgtcgtcagctcgtgtcgtgagatgttgggttaagtcccgcaacgagcgcaacccttgattctagttgccagcattcagttgggcactctagagtgactgccggtgacaaaccggaggaaggtggggatgacgtcaaatcatcatgccccttatgacctgggctacacacgtgctacaatggatggtacaaagggcagcaagaccgcgaggttaagcaaatcccataaaaccattctcagttcggattgcaggctgcaactcgcctgcatgaagccggaatcgctagtaatcgcggatcagcatgccgcggtgaatacgttcccgggccttgtacacaccgcccgtcacaccacgagagttggtaacacccgaagtcggtgaggtaaccttttggagccagccgccgaaggtgggatcaatgattggggtg

SEQ ID NO: 396 - DNA, 1484 bp, Terribacillus halophilus
gacgaacgctggcggcgtgcctaatacatgcaagtcgagcgcaggaaaccagatgaccccttcggggtgattctggcggaatgagcggcggacgggtgagtaacacgtgggcaacctgcctgtaagactgggataacttcgggaaaccggagctaataccggatagtatttcctttctcctgattggaaatggaaagacggtttcggctgtcacttacagatgggcccgcggtgcattagctagttggtggggtaatggcccaccaaggcgacgatgcatagccgacctgagagggtgatcggccacactgggactgagacacggcccagactcctacgggaggcagcagtagggaatcttccgcaatggacgaaagtctgacggagcaacgccgcgtgagcgatgaaggccttcgggtcgtaaagctctgttgtcagggaagaataagtacaagagtaactgcttgtaccttgacggtacctgaccagaaagccccggctaactacgtgccagcagccgcggtaatacgtagggggcaagcgttgtccggaattattgggcgtaaagggcgcgtaggcggtttcttaagtctgatgtgaaagcccacagcttaactgtggagggtcattggaaactggggaacttgagtgcagaagaggagagtggaattccacgtgtagcggtgaaatgcgtagatatgtggaggaacaccagtggcgaaggcgactctctggtctgtaactgacgctgaggcgcgaaagcgtggggagcgaacaggattagataccctggtagtccacgccgtaaacgatgagtgctaggtgttagggggtttccgccccttagtgctgaagttaacgcattaagcactccgcctggggagtacggccgcaaggctgaaactcaaaagaattgacgggggcccgcacaagcggtggagcatgtggtttaattcgaagcaacgcgaagaaccttaccaggtcttgacatccgctgacaaccttggagacaaggcattcccttcggggacagcgtgacaggtggtgcatggttgtcgtcagctcgtgtcgtgagatgttgggttaagtcccgcaacgagcgcaacccttgattctagttgccagcattcagttgggcactctagagtgactgccggtgacaaaccggaggaaggtggggatgacgtcaaatcatcatgccccttatgacctgggctacacacgtgctacaatggatggtacaaagggcagcaaagtcgcgaggctaagcaaatcccataaaaccattctcagttcggattgcaggctgcaactcgcctgcatgaagccggaatcgctagtaatcgcggatcagcatgccgcggtgaatacgttcccgggccttgtacacaccgcccgtcacaccacgagagttggtaacacccgaagtcggtgaggtaaccttttggagccagccgccgaaggtgggatcaatgattggggtg

SEQ ID NO: 397 - DNA, 1553 bp, Thermotalea metallivorans
gatgaacgctggcggcgtgcctaacacatgcaagtcgagcggtccaatgttcaacactgattattcagtagattgagccgcgtctaggacggaaacgaagttggagtcctacacgcgttaataaaaagccaacacatgctcaaaggttttatgtgatactgagtattgagtgttgaacattggacagcggcggacgggtgagtaacgcgtgggcaacctgccctatgcagggggataacacagcgaaagttgtgctaataccccatatagccggacatacgcatgtatggatggtgaaagattttatcggcataggatgggcccgcgtctgattagctagttggtgaggtaacggctcaccaaggcgacgatcagtagccgacctgagagggtgaacggccacactggaactgagacacggtccagactcctacgggaggcagcagtggggaatattgcacaatgggggaaaccctgatgcagcaacgccgcgtgagcgaagaaggccttcgggtcgtaaagctctgtcctaagggaagaagaatgacggtaccttaggaggaagccccggctaactacgtgccagcagccgcggtaatacgtagggggcaagcgttatccggaatcactgggcgtaaagggtgcgtaggcggccgataaagtctggggtgaaaggctacggctcaaccgtggtaagccttggaaacttatgggcttgagtgcaggagaggtaagtggaattcctagtgtagcggtgaaatgcgtagatattaggaggaacaccagtggcgaaggcgacttactggactgtaactgacgctgaggcacgaaagcgtggggagcaaacaggattagataccctggtagtccacgccgtaaacgatgagtgctaggtgtcgggggcggaagccctcggtgccgcagctaacgcattaagcactccgcctggggagtacgctcgcaagagtgaaactcaaaggaattgacggggacccgcacaagcagcggagcatgtggtttaattcgaagcaacgcgaagaaccttaccaggacttgacatccctcgcattagccgtaacgggtgaaattccatttgggacgaggagacaggtggtgcatggttgtcgtcagctcgtgtcgtgagatgttgggttaagtcccgcaacgagcgcaacccttgtctttagttgccagcatgaaagatgggcactctagagagactgccggggagaactcggaggaaggtggggatgacgtcaaatcatcatgccccttatgttctgggctacacacgtgctacaatggctggtacaaagggcagcgaaggagcaatccggagccaatcccaaaagccagtcacagttcggattgtgggctgcaactcgcccacatgaagccggagttgctagtaatcgcggatcagaatgccgcggtgaatgcgttcccgggtcttgtacacaccgcccgtcacaccatgggagctcagggcacccgaagtcagtgagtcaaccgcaaggagacagctgccgaaggtgaaatgagtgactggggtg

SEQ ID NO: 398 - DNA, 1478 bp, Veillonella denticariosi
  misc_feature (193)..(193): n is a, c, g, or t
  misc_feature (733)..(733): n is a, c, g, or t
gctggcggcgtgcttaacacatgcaagtcgaacgaagagcgacggaagcttgcttctatcaatcttagtggcgaacgggtgagtaacgcgtaatcaacctgcccttcagagggggacaacagttggaaacgactgctaataccgcatacgatctgacctcggcatcgaggatagatgaaaggtggcctctatntataagctatcactgaaggaggggattgcgtctgattagctagttggaggggtaacggcccaccaaggcgatgatcagtagccggtctgagaggatgaacggccacattgggactgagacacggcccagactcctacgggaggcagcagtggggaatcttccgcaatggacgaaagtctgacggagcaacgccgcgtgagtgatgacggccttcgggttgtaaagctctgttaatcgggacgaaaggccttcttgcgaatagttaggaggattgacggtaccggaatagaaagccacggctaactacgtgccagcagccgcggtaatacgtaggtggcaagcgttgtccggaattattgggcgtaaagcgcgcgcaggcggatcagtcagtctgtcttaaaagttcggggcttaaccccgtgaggggatggaaactgctgatctagagtatcggagaggaaagtggaattcctagtgtagcggtgaaatgcgtagatattaggaagaacaccagtggcgaaggcgactttctggacgaanactgacgctgaggcgcgaaagccaggggagcgaacgggattagataccccggtagtcctggccgtaaacgatgggtactaggtgtaggaggtatcgaccccttctgtgccggagttaacgcaataagtaccccgcctggggagtacgaccgcaaggttgaaactcaaaggaattgacgggggcccgcacaagcggtggagtatgtggtttaattcgacgcaacgcgaagaaccttaccaggtcttgacattgatggacagaaccagagatggttcctcttcttcggaagccagaaaacaggtggtgcacggttgtcgtcagctcgtgtcgtgagatgttgggttaagtcccgcaacgagcgcaacccctatcttatgttgccagcacttcgggtggggactcatgagagactgccgcagacaatgcggaggaaggcggggatgacgtcaaatcatcatgccccttatgacctgggctacacacgtactacaatgggagttaatagacggaagcgaagccgcgaggtggagcgaacccgagaaacactctctcagttcggatcgtaggctgcaactcgcctacgtgaagtcggaatcgctagtaatcgcaggtcagcatactgcggtgaatacgttcccgggccttgtacacaccgcccgtcacaccacgaaagtcggaagtacccaaagccggtggggtaaccttcgggagccagccgtctaaggtaaagtcgatgattggggtg

SEQ ID NO: 399 - DNA, 1465 bp, Vibrio cholerae
attgaacgctggcggcaggcctaacacatgcaagtcgagcggcagcacagaggaacttgttccttgggtggcgagcggcggacgggtgagtaatgcctgggaaattgcccggtagagggggataaccattggaaacgatggctaataccgcataacctcgcaagagcaaagcaggggaccttcgggccttgcgctaccggatatgcccaggtgggattagctagttggtgaggtaagggctcaccaaggcgacgatccctagctggtctgagaggatgatcagccacactggaactgagacacggtccagactcctacgggaggcagcagtggggaatattgcacaatgggcgcaagcctgatgcagccatgccgcgtgtatgaagaaggccttcgggttgtaaagtactttcagtagggaggaaggtggttaagttaataccttaatcatttgacgttacctacagaagaagcaccggctaactccgtgccagcagccgcggtaatacggagggtgcaagcgttaatcggaattactgggcgtaaagcgcatgcaggtggtttgttaagtcagatgtgaaagccctgggctcaacctaggaatcgcatttgaaactgacaagctagagtactgtagaggggggtagaatttcaggtgtagcggtgaaatgcgtagagatctgaaggaataccggtggcgaaggcggccccctggacagatactgacactcagatgcgaaagcgtggggagcaaacaggattagataccctggtagtccacgccgtaaacgatgtctacttggaggttgtgccctagaggcgtggctttcggagctaacgcgttaagtagaccgcctggggagtacggtcgcaagattaaaactcaaatgaattgacgggggcccgcacaagcggtggagcatgtggtttaattcgatgcaacgcgaagaaccttacctactcttgacatccagagaatctagcggagacgctggagtgccttcgggagctctgagacaggtgctgcatggctgtcgtcagctcgtgttgtgaaatgttgggttaagtcccgcaacgagcgcaacccttatccttgtttgccagcacgtaatggtgggaactccagggagactgccggtgataaaccggaggaaggtggggacgacgtcaagtcatcatggcccttacgagtagggctacacacgtgctacaatggcgtatacagagggcagcgaaaccgcgaaggtgagcgaatctcacaaagtacgtcgtagtccggattggagtctgcaactcgactccatgaagtcggaatcgctagtaatcgcaaatcagaatgttgcggtgaatacgttcccgggccttgtacacaccgcccgtcacaccatgggagtgggctgcaaaagaagcaggtagtttaaccttcgggaggacgcttgccactttgtggttcatgactggggtg

SEQ ID NO: 400 - DNA, 1430 bp, Victivallis vadensis
aacgaacgctggcggcatggattaggcatgcaagttgaacgaactccttcgggagtgagtagcgaaagggtgaggaacgcgtgagtaatctgcccataagttgggaacaacagttggaaacgactgctaataccgaatgtggctattgacccgcatgggtttttggctaaagatttatcgcttatggatgagctcgcgtcccattagctagttggtgaggtaacggcccaccaaggctacgatgggtagctggtctgagaggatggtcagccacactgggactgagacactgcccagactcctacgggaggctgcagtcgagaatcttgggcaatgcgcgaaagcgtgacccagcaatgccgcgtgcatgatgaaggccctcgggtcgtaaaatgctgtctcccgtgacgaataatgacggtagcggggaaggaagccacggctaactacgtgccagcagccgcggtaatacgtaggtggcgagcgttgttcggatttattgggcgtaaagggtctgtaggaggtttgttaaatacgaggtgaaatccgggggctcaacttccgaattgccttgtagactgatgaactagagtactggagaggtaagcggaataccaggtgtagcggtggaatgcgtagatatctggtagaacaccaatagcgaaggcagcttgctggacagaaactgactctgaaagacgaaagcatggggagcaaacaggattagataccctggtagtccatgccgtaaacgttgtcaacttgatgtgggcggatttagtcctgtccgtatcgaagctaacgcgataagttgaccgcctgggaactacggccgcaaggctaaaactcaaaggaattgacgggggcccgcacaagcggtggagcatgtggcttaattcgaggcaacgcgaagaaccttacctgggcttgaaatataccggaccggctgtgaaagcagtcttctcttcggagctggtatacaggtgctgcatggctgtcgtcagctcgtgccgtgaggtgttcggttaagtccggcaacgagcgcaacccgtgtcattagttgccaacaggtaatgctggggactctaatgagactgcctgtgttaagcaggaggaaggcgcggatgacgtcaagtcagtatggcccttacgcccagggctgcacacgtgctacaatggggggtacaatgagaagcgaagtcgcgaggcggagcaaatctacaaaacctctcttagttcagattgcagtctgcaactcgactgcatgaagttggaatcgctagtaaatgcgtatcagctacgacgcattgaatacgttcccgggccttgtacacaccgcccgtcacatcatgggagttgattgcacccgaaatcggtgatctaacctgcaaaggaagaagccgcctaaggtgtggtcgatgactgggatg

SEQ ID NO: 401 - DNA, 1530 bp, Virgibacillus massiliensis
agagtttgatcctggctcaggacgaacgctggcggcgtgcctaatacatgcaagtcgagcgcgggaagcaggcagaactccttcgggagtgatgcctgtggaacgagcggcggacgggtgagtaacacgtgggcaacctgcctgtaagactgggataaccccgggaaaccggggctaataccggataacactttttggtacatgccaagaagttgaaaggcggcctttttggctgtcacttacagatgggcccgcggcgcattagctagttggtagggtaacggcctaccaaggcaacgatgcgtagccgacctgagagggtgatcggccacactgggactgagacacggcccagactcctacgggaggcagcagtagggaatcttccgcaatggacgaaagtctgacggagcaacgccgcgtgagtgatgaaggttttcggatcgtaaaactctgttgttagggaagaacaagtgccgttcaaatagggcggcaccttgacggtacctaaccagaaagccccggctaactacgtgccagcagccgcggtaatacgtagggggcaagcgttgtccggaattattgggcgtaaagcgcgcgcaggcggtcctttaagtctgatgtgaaagcccacggctcaaccgtggatggccattggaaactggaggacttgagtacagaagaggagagtggaattccacgtgtagcggtgaaatgcgtagagatgtggaggaacaccagtggcgaaggcgactctctggtctgtaactgacgctgaggtgcgaaagcgtggggagcgaacaggattagataccctggtagtccacgccgtaaacgttgagtgctaggtgttagggggtttccgccccttagtgctgaagttaacgcattaagcactccgcctggggagtacggccgcaaggctgaaactcaaaagaattgacgggggcccgcacaagcggtggagcatgtggtttaattcgaagcaacgcgaagaaccttaccaggtcttgacatcctctgacacccctagagatagggcattcccttcggggacagagtgacaggtggtgcatggttgtcgtcagctcgtgtcgtgagatgttgggttaagtcccgcaacgagcgcaacccttgatcttagttgccagcattgagttgggcactctaaggtgactgccggtgacaaaccggaggaaggtggggatgacgtcaaatcatcatgccccttatgacctgggctacacacgtgctacaatggatggaacaaagggcagcgaaaccgcaaggtcaagcaaatcccataaaaccattctcagttcggattgcaggctgcaactcgcctgcatgaagccggaatcgctagtaatcgcggatcagcatgccgcggtgaatacgttcccgggccttgtacacaccgcccgtcacaccacgagagttggtaacacccgaagtcggtgaggtaaccttttggagccagccgccgaaggtgggaccaatgattgggtgaagtcgtaacaagtaagccgt

SEQ ID NO: 402 - DNA, 1461 bp, Yersinia bercovieri
attgaacgctggcggcaggcctaacacatgcaagtcgagcggcagcgggaagtagtttactactttgccggcgagcggcggacgggtgagtaatgtctggggatctgcctgatggagggggataactactggaaacggtagctaataccgcatgacctcgtaagagcaaagtgggggaccttcgggcctcacgccatcggatgaacccagatgggattagctagtaggtggggtaatggctcacctaggcgacgatccctagctggtctgagaggatgaccagccacactggaactgagacacggtccagactcctacgggaggcagcagtggggaatattgcacaatgggcgcaagcctgatgcatccatgccgcgtgtgtgaagaaggccttcgggttgtaaagcactttcagcgaggaggaaggcagtcgtgttaatagcacgattgattgacgttactcgcagaagaagcaccggctaactccgtgccagcagccgcggtaatacggagggtgcaagcgttaatcggaattactgggcgtaaagcgcacgcaggcggtttgttaagtcagatgtgaaatccccgcgcttaacgtgggaactgcatttgaaactggcaagctagagtcttgtagaggggggtagaattccaggtgtagcggtgaaatgcgtagagatctggaggaataccggtggcgaaggcggccccctggacaaagactgacgctcaggtgcgaaagcgtggggagcaaacaggattagataccctggtagtccacgctgtaaacgatgtcgacttggaggttgtgcccttgaggcgtggcttccggagctaacgcgttaagtcgaccgcctggggagtacggccgcaaggttaaaactcaaatgaattgacgggggcccgcacaagcggtggagcatgtggtttaattcgatgcaacgcgaagaaccttacctactcttgacatccacagaacttagcagagatgcttcagtgccttcgggaactgtgagacaggtgctgcatggctgtcgtcagctcgtgttgtgaaatgttgggttaagtcccgcaacgagcgcaacccttatcctttgttgccagcacgtaatggtgggaactcaagggagactgccggtgacaaaccggaggaaggtggggatgacgtcaagtcatcatggcccttacgagtagggctacacacgtgctacaatggcagatacaaagtgaagcgaactcgcgagagcaagcggaccacataaagtctgtcgtagtccggattggagtctgcaactcgactccatgaagtcggaatcgctagtaatcgtagatcagaatgctacggtgaatacgttcccgggccttgtacacaccgcccgtcacaccatgggagtgggttgcaaaagaagtaggtagcttaaccttcgggagggcgcttaccactttgtgattcatgactgg

SEQ ID NO: 403 - DNA, 1465 bp, Yersinia enterocolitica
attgaacgctggcggcaggcctaacacatgcaagtcgagcggcagcgggaagtagtttactactttgccggcgagcggcggacgggtgagtaatgtctgggaaactgcctgatggagggggataactactggaaacggtagctaataccgcataacgtcttcggaccaaagtgggggaccttagggcctcacgccatcggatgtgcccagatgggattagctagtaggtggggtaatggctcacctaggcgacgatccctagctggtctgagaggatgaccagccacactggaactgagacacggtccagactcctacgggaggcagcagtggggaatattgcacaatgggcgcaagcctgatgcagccatgccgcgtgtgtgaagaaggccttcgggttgtaaagcactttcagcgaggaggaaggccaataacttaatacgttgttggattgacgttactcgcagaagaagcaccggctaactccgtgccagcagccgcggtaatacggagggtgcaagcgttaatcggaattactgggcgtaaagcgcacgcaggcggtttgttaagtcagatgtgaaatccccgcgcttaacgtgggaactgcatttgaaactggcaagctagagtcttgtagaggggggtagaattccaggtgtagcggtgaaatgcgtagagatctggaggaataccggtggcgaaggcggccccctggacaaagactgacgctcaggtgcgaaagcgtggggagcaaacaggattagataccctggtagtccacgctgtaaacgatgtcgacttggaggttgtgcccttgaggcgtggcttccggagctaacgcgttaagtcgaccgcctggggagtacggccgcaaggttaaaactcaaatgaattgacgggggcccgcacaagcggtggagcatgtggtttaattcgatgcaacgcgaagaaccttacctactcttgacatccacggaatttagcagagatgctttagtgccttcgggaaccgtgagacaggtgctgcatggctgtcgtcagctcgtgttgtgaaatgttgggttaagtcccgcaacgagcgcaacccttatcctttgttgccagcacgtaatggtgggaactcaaaggagactgccggtgataaaccggaggaaggtggggatgacgtcaagtcatcatggcccttacgagtagggctacacacgtgctacaatggcagatacaaagtgaagcgaactcgcgagagcaagcggaccacataaagtctgtcgtagtccggattggagtctgcaactcgactccatgaagtcggaatcgctagtaatcgtagatcagaatgctacggtgaatacgttcccgggccttgtacacaccgcccgtcacaccatgggagtgggttgcaaaagaagtaggtagcttaaccttcgggagggcgcttaccactttgtgattcatgactggggtg

SEQ ID NO: 404 - DNA, 1461 bp, Yersinia intermedia
attgaacgctggcggcaggcctaacacatgcaagtcgagcggcagcgggaagtagtttactactttgccggcgagcggcggacgggtgagtaatgtctgggaaactgcctgatggagggggataactactggaaacggtagctaataccgcatgacctcgtaagagcaaagtgggggaccttcgggcctcacgccatcggatgtgcccagatgggattagctagtaggtggggtaatggctcacctaggcgacgatccctagctggtctgagaggatgaccagccacactggaactgagacacggtccagactcctacgggaggcagcagtggggaatattgcacaatgggcgcaagcctgatgcagccatgccgcgtgtgtgaagaaggccttcgggttgtaaagcactttcagcgaggaggaaggcagtcgtgttaatagcacgattgattgacgttactcgcagaagaagcaccggctaactccgtgccagcagccgcggtaatacggagggtgcaagcgttaatcggaattactgggcgtaaagcgcacgcaggcggtttgttaagtcagatgtgaaatccccgcgcttaacgtgggaactgcatttgaaactggcaagctagagtcttgtagaggggggtagaattccaggtgtagcggtgaaatgcgtagagatctggaggaataccggtggcgaaggcggccccctggacaaagactgacgctcaggtgcgaaagcgtggggagcaaacaggattagataccctggtagtccacgctgtaaacgatgtcgacttggaggttgtgcccttgaggcgtggcttccggagctaacgcgttaagtcgaccgcctggggagtacggccgcaaggttaaaactcaaatgaattgacgggggcccgcacaagcggtggagcatgtggtttaattcgatgcaacgcgaagaaccttacctactcttgacatccacagaacttagcagagatgctttagtgccttcgggaaccgtgagacaggtgctgcatggctgtcgtcagctcgtgttgtgaaatgttgggttaagtcccgcaacgagcgcaacccttatcctttgttgccagcacgtaatggtgggaactcaagggagactgccggtgacaaaccggaggaaggtggggatgacgtcaagtcatcatggcccttacgagtagggctacacacgtgctacaatggcagatacaaagtgaagcgaactcgcgagagcaagcggaccacataaagtctgtcgtagtccggattggagtctgcaactcgactccatgaagtcggaatcgctagtaatcgtagatcagaatgctacggtgaatacgttcccgggccttgtacacaccgcccgtcacaccatgggagtgggttgcaaaagaagtaggtagcttaaccttcgggagggcgcttaccactttgtgattcatgactgg

SEQ ID NO: 405 - DNA, 1465 bp, Yersinia kristensenii
attgaacgctggcggcaggcctaacacatgcaagtcgagcggcagcgggaagtagtttactactttgccggcgagcggcggacgggtgagtaatgtctgggaaactgcctgatggagggggataactactggaaacggtagctaataccgcatgacctcgcaagagcaaagtgggggaccttcgggcctcacgccatcggatgtgcccagatgggattagctagtaggtggggtaatggctcacctaggcgacgatccctagctggtctgagaggatgaccagccacactggaactgagacacggtccagactcctacgggaggcagcagtggggaatattgcacaatgggcgcaagcctgatgcagccatgccgcgtgtgtgaagaaggccttcgggttgtaaagcactttcagcgaggaggaagggttcagtgttaatagcactgagcattgacgttactcgcagaagaagcaccggctaactccgtgccagcagccgcggtaatacggagggtgcaagcgttaatcggaattactgggcgtaaagcgcacgcaggcggtttgttaagtcagatgtgaaatccccgcgcttaacgtgggaactgcatttgaaactggcaagctagagtcttgtagaggggggtagaattccaggtgtagcggtgaaatgcgtagagatctggaggaataccggtggcgaaggcggccccctggacaaagactgacgctcaggtgcgaaagcgtggggagcaaacaggattagataccctggtagtccacgctgtaaacgatgtcgacttggaggttgtgcccttgaggcgtggcttccggagctaacgcgttaagtcgaccgcctggggagtacggccgcaaggttaaaactcaaatgaattgacgggggcccgcacaagcggtggagcatgtggtttaattcgatgcaacgcgaagaaccttacctactcttgacatccacagaacttagcagagatgcttaggtgccttcgggaactgtgagacaggtgctgcatggctgtcgtcagctcgtgttgtgaaatgttgggttaagtcccgcaacgagcgcaacccttatcctttgttgccagcacgtaatggtgggaactcaagggagactgccggtgacaaaccggaggaaggtggggatgacgtcaagtcatcatggcccttacgagtagggctacacacgtgctacaatggcagatacaaagtgaagcgaactcgcgagagcaagcggaccacataaagtctgtcgtagtccggattggagtctgcaactcgactccatgaagtcggaatcgctagtaatcgtagatcagaatgctacggtgaatacgttcccgggccttgtacacaccgcccgtcacaccatgggagtgggttgcaaaagaagtaggtagcttaaccttcgggagggcgcttaccactttgtgattcatgactggggtg

SEQ ID NO: 406 - DNA, 1461 bp, Yersinia mollaretii
attgaacgctggcggcaggcctaacacatgcaagtcgagcggcagcggaaagtagcttgctactttgccggcgagcggcggacgggtgagtaatgtctgggaaactgcctgatggagggggataactactggaaacggtagctaataccgcatgacctcgcaagagcaaagtgggggaccttcgggcctcacgccatcggatgtgcccagatgggattagctagtaggtggggtaatggctcacctaggcgacgatccctagctggtctgagaggatgaccagccacactggaactgagacacggtccagactcctacgggaggcagcagtggggaatattgcacaatgggcgcaagcctgatgcatccatgccgcgtgtgtgaagaaggccttcgggttgtaaagcactttcagcgaggaggaaggcagtcgtgttaatagcacgattgattgacgttactcgcagaagaagcaccggctaactccgtgccagcagccgcggtaatacggagggtgcaagcgttaatcggaattactgggcgtaaagcgcacgcaggcggtttgttaagtcagatgtgaaatccccgcgcttaacgtgggaactgcatttgaaactggcaagctagagtcttgtagaggggggtagaattccaggtgtagcggtgaaatgcgtagagatctggaggaataccggtggcgaaggcggccccctggacaaagactgacgctcaggtgcgaaagcgtggggagcaaacaggattagataccctggtagtccacgctgtaaacgatgtcgacttggaggttgtgcccttgaggcgtggcttccggagctaacgcgttaagtcgaccgcctggggagtacggccgcaaggttaaaactcaaatgaattgacgggggcccgcacaagcggtggagcatgtggtttaattcgatgcaacgcgaagaaccttacctactcttgacatccacagaacttagcagagatgcttcggtgccttcgggaactgtgagacaggtgctgcatggctgtcgtcagctcgtgttgtgaaatgttgggttaagtcccgcaacgagcgcaacccttatcctttgttgccagcacgtaatggtgggaactcaagggagactgccggtgacaaaccggaggaaggtggggatgacgtcaagtcatcatggcccttacgagtagggctacacacgtgctacaatggcagatacaaagtgaagcgaactcgcgagagccagcggaccacataaagtctgtcgtagtccggattggagtctgcaactcgactccatgaagtcggaatcgctagtaatcgtagatcagaatgctacggtgaatacgttcccgggccttgtacacaccgcccgtcacaccatgggagtgggttgcaaaagaagtaggtagcttaaccttcgggagggcgcttaccactttgtgattcatgactgg

SEQ ID NO: 407 - DNA, 1471 bp, Abyssicoccus albus
  misc_feature (602)..(602): n is a, c, g, or t
  misc_feature (932)..(932): n is a, c, g, or t
gatgaacgctggcggcgtgcctaatacatgcaagtcgagcgcgtttcgaaggtgcttgcaccttcaatgaaacgagcggcggacgggtgagtaacacgtaggtaacctacctttatgactgggataaccacgggaaaccggggctaataccggataagatttagcttcgcatgaagcagaagtaaaaggcagtttcggctgtcacataaagatggacctgcggcgcattagctagttggagaggtaagagctccccaaggcgacgatgcgtagccgacctgagagggtgatcggccacactgggactgagacacggcccagactcctacgggaggcagcagtagggaatcttccgcaatggacgaaagtctgacggagcaacgccgcgtgagtgaagaaggttttcggatcgtaaagctctgttgttaaggaagaacaccatggataggaaatgatcgatggatgacggtacttaaccagaaagccacggctaactacgtgccagcagccgcggtaatacgtaggtggcaagcgttatccggaattattgggcgtaaagcgcgcgtaggcggtttcttaagtctgatgtgaaagcccccggntcaaccggggagggtcattggaaactggggaacttgagtacagaagaggagagtggaattccatgtgtagcggtgaaatgcgcagagatatggaggaacaccagtggcgaaggcggctctctggtctgaaactgacgctgaggtgcgaaagcgtggggatcaaacaggattagataccctggtagtccacgctgtaaacgatgagtgctaagtgttagggggtttccgccccttagtgctgcagtaaacgcattaagcactccgcctggggagtacggccgcaaggctgaaactcaaaggaattgacggggacctgcacaagcggtggancatgtggtttaattcgaagcaacgcgaagaaccttaccaaatcttgacatcctctgacaactttagagataaagtgtcccttcggggcagagagacaggtggtgcatggttgtcgtcagctcgtgtcgtgagatgttgggttaagtcccgcaacgagcgcaacccttaacattagttgccatcattgagttgggcactctaatgtgactgccggtgacaaaccggaggaaggtggggatgacgtcaaatcatcatgccccttatgatttgggctacacacgtgctacaatggataggaacaaagggtggcgaagtcgtgagatgaagcaaatcccataaaactattcccagttcggattgtagtctgcaactcgactacatgaaggtggaatcgctagtaatcgtggatcagcatgccacggtgaatacgttcccaggtcttgtacacaccgcccgtcacaccacgagagttcgtaacacccgaagccggtgggctaacattgaggcagccgtcgaaggtgggacgaatgattggggtg

SEQ ID NO: 408 - DNA, 1425 bp, Acaryochloris marina
gatgaacgctggcggtatgcttaacacatgcaagtcgaacggcagcacgaggagcttgctccttggtggcgagtggcggacgggtgagtaacgcgtgagaatctaccttcaggtctgggacaacagttggaaacgactgctaataccggatgtgccttagggtgaaagttttttcgcctgaagatgagctcgcgtctgattagttagttggtggggtaaaggcttaccaagacatcgatcagtagctggtctgagaggacgatcagccacactgggactgagacacggcccagactcctacgggaggcagcagtggggaattttccgcaatgggcgaaagcctgacggagcaataccgcgtgcgggaggaaggcctttgggtcgtaaaccgcttttaacagggaagaagatctgacggtacctgttgaataagcctcggctaactccgtgccagcagccgcggtaagacggaggaggcaagcgttatccggaattattgggcgtaaagcgtccgcaggtggcctatcaagtctgttgttaaagcccagggctcaactctggatcagcaatggaaactgaaaggctagagtacggtaggggtagagggaattcccagtgtagcggtgaaatgcgtagatattgggaagaacaccagtggcgaaggcgctctgctgggccgtaactgacactcatggacgaaagctaggggagcgaaagggattagatacccctgtagtcctagctgtaaacgatgaacactaggtgttggccgtatcgacccggtcagtgccgtagccaacgcgttaagtgttccgcctggggagtacgcacgcaagtgtgaaactcaaaggaattgacgggggcccgcacaagcggtggagtatgtggtttaattcgatgcaacgcgaagaaccttaccagggcttgacatgtcgcgaatccgagtgaaagcttggagtgccttcgggaacgcgaacacaggtggtgcatggctgtcgtcagctcgtgtcgtgagatgttgggttaagtcccgcaacgagcgcaacccacgtttttagttgccatcattcagttgggcactctagaaagactgccggtgacaaaccggaggaaggtgtggatgacgtcaagtcagcatgccccttacgctctgggctacacacgtactacaatggttaggacaaagagctgccaactcgcgagagtgcgctaatctcataaacctagcctcagttcagattgcaggctgcaactcgcctgcatgaaggaggaatcgctagtaatcgcaggtcagcatactgcggtgaatacgttcccgggccttgtacacaccgcccgtcacaccatggaagctggccacgcccgaagtcgttaccccaacccttgtggagggggacgccgaaggtagggctggtgactggggtg

SEQ ID NO: 409 - DNA, 1460 bp, Accumulibacter phosphatis
attaaacgctggcggcatgccttacacatgcaagtcgaacggcagcacgggggcaaccctggtggcgagtggcggacgggtgagtaaagcatcggaacgtatcctggagtgggggataacgtagcgaaagttacgctaataccgcatattctgtgagcaggaaagcaggggatcgcaagaccttgcgctctgggagcggccgatgtcggattagctagttggtggggtaaaggcctaccaaggcgacgatccgtagcgggtctgagaggatgatccgccacactgggactgagacacggcccagactcctacgggaggcagcagtggggaattttggacaatgggcgcaagcctgatccagccatgccgcgtgagtgaagaaggccttcgggttgtaaagctctttcggcggggaagaaattgcacgggttaataccctgtgtagatgacggtacccgaataagaagcaccggctaactacgtgccagcagccgcggtaatacgtagggtgcgagcgttaatcggaattactgggcgtaaagcgtgcgcaggcggtttggtaagtcagatgtgaaatccccgggctcaacctgggaactgcatttgagactgccaggctggagtttggcagaggggggtggaattccacgtgtagcagtgaaatgcgtagagatgtggaggaacaccgatggcgaaggcagccccctgggccaatactgacgctcatgcacgaaagcgtggggagcaaacaggattagataccctggtagtccacgccctaaacgatgtcaactaggtgttgggagggttaaaccttttagtgccgtagctaacgcgtgaagttgaccgcctggggagtacggccgcaaggctaaaactcaaaggaattgacggggacccgcacaagcggtggatgatgtggattaattcgatgcaacgcgaaaaaccttacctacccttgacatgtcaggaatcccgaagagatttgggagtgctcgcaagagagcctgaacacaggtgctgcatggctgtcgtcagctcgtgtcgtgagatgttgggttaagtcccgcaacgagcgcaacccttgtcattaattgccatcattcagttgggcactttaatgagactgccggtgacaaaccggaggaaggtggggatgacgtcaagtcctcatggcccttatgggtagggcttcacacgtcatacaatggtcggtccagagggttgccaacccgcgagggggagccaatctcagaaagccgatcgtagtccggatcgcagtctgcaactcgactgcgtgaagtcggaatcgctagtaatcgcggatcagcatgtcgcggtgaatacgttcccgggtcttgtacacaccgcccgtcacaccatgggagcgggttctgccagaagtagttagcctaaccgcaaggagggcgattaccacggcagggttcgtgactggggtg

SEQ ID NO: 410 - DNA, 1434 bp, Acetitomaculum ruminis
  misc_feature (4)..(4): n is a, c, g, or t
  misc_feature (322)..(323): n is a, c, g, or t
  misc_feature (489)..(490): n is a, c, g, or t
  misc_feature (507)..(508): n is a, c, g, or t
  misc_feature (575)..(575): n is a, c, g, or t
  misc_feature (591)..(591): n is a, c, g, or t
  misc_feature (611)..(611): n is a, c, g, or t
  misc_feature (886)..(886): n is a, c, g, or t
  misc_feature (894)..(894): n is a, c, g, or t
  misc_feature (929)..(929): n is a, c, g, or t
  misc_feature (998)..(998): n is a, c, g, or t
  misc_feature (1063)..(1063): n is a, c, g, or t
  misc_feature (1106)..(1106): n is a, c, g, or t
  misc_feature (1117)..(1118): n is a, c, g, or t
  misc_feature (1128)..(1128): n is a, c, g, or t
  misc_feature (1157)..(1158): n is a, c, g, or t
gatnaacgctggcggcatgcctaacacatgcaagtcgaacggagtgcttgtagaagctttttcggaagtggaaataagttacttagtggcggacgggtgagtaacgcgtgggcaacctgccctgtacagggggatacctaccggaaacggtagctaataccctataagcgcacgatatcgcatgataaagtgtgaaaagccataacggtacaggatgggcccgcgtccgattagccagttggcggggtaacggcccaccaaagcgacgatcggtagccggcttgagagagtgaacggccacattgggactgagacacggccnngactcctacgggaggcagcagtggggaatattgcacaatgggggaaaccctgatgcagcaatgccgcgtgaaggaagaagtatttcggtatgtaaacttctatcagcagggaagaaaatgacggtacctgactaagaagccccggctaactacgtgccagcagccnnggtaatacgtagggggnnagcgttatccggatttactgggtgtaaagggagcgcaggcggcagggcaagtcagatgtgaaatccnggggcccaaccccggnactgcatttgaaactgtccngcttgagtacaggagaggcaggcggaattcctagtgtagcggtgaaatgcgtagatattaggaggaacaccagtggcgaaggcggcctgctggactgtaactgacgctgaggctcgaaagcgtggggagcaaacaggattagataccctggtagtccacgccgtaaacgatgaatactaggtgtcggggaccactggtcttcggtgccgcagctaacgcaataagtattccacctggggagtacgttcgcaagaatgaaactcaaaggaattganggggaccngcacaagcggtggagcatgtggtttaattcgaagnaacgcgaagaaccttaccaggtcttgacatcccaatgacagtgcatgtaatgtgtattcccttcggggnattggagacaggtggtgcatggttgtcgtcagctcgtgtcgtgagatgttgggttaagtcccgcnacgagcgcaacccttgccgccagtagccagcagttaggctggncactctggcgnnactgccgggntcaacccggaggaaggcggggatgacgtnnaatcatcatgccccttatgacctgggctacacacgtgctacaatggcatggacaaagggaagcgaccctgcgaaggtgagcaaatcccaaaaataatgtcccagttcggattgcaggctgcaacccgcctgcatgaagctggaatcgctagtaatcgcagatcagaatgctgcggtgaatacgttcccgggtcttgtacacaccgcccgtcacaccatgggagccggaaatgcccgaagtcagtggcccaaccgcaaggagggagctgccgaaggc

SEQ ID NO: 411 - DNA, 1433 bp, Acetivibrio cellulolyticus
gacgaacgctggcggcgtgcttaacacatgcaagtcgagcggagaatatagcaatatattcttagcggcggacgggtgagtaacgcgtgggcaatctgcctcatacagggggataacactgggaaactagtgctaataccgcataaaatagtgaagtggcatcactttactatcaaaggagcaatccggtgtgagatgagcccgcgtccgattagctagttggtggggtaacggcccaccaaggcgacgatcggtagccgaactgagaggttgatcggccacattgggactgagacacggcccagactcctacgggaggcagcagtggggaatattgcgcaatgggggaaaccctgacgcagcaacgccgcgtgaaggatgaaggttttcggattgtaaacttctttgattggggacgataatgacggtacccaaaaaacaagccacggctaactacgtgccagcagccgcggtaatacgtaggtggcaagcgttgtccggatttactgggtgtaaagggcgtgtaggcggggatgcaagtcagatgtgaaattccggggctcaaccccggcgctgcatctgaaactgtatctcttgagtgctggagaggaaagcggaattcctagtgtagcggtgaaatgcgtagatattaggaggaacaccagtggcgaaggcggctttctggacagtaactgacgctgaggcgcgaaagcgtggggagcgaacaggattagataccctggtagtccacgccgtaaacgatggatactaggtgtaggaggtatcgaccccttctgtgccggagttaacacaataagtatcccacctggggagtacggccgcaaggttgaaactcaaaggaattgacgggggcccgcacaagcagtggagtatgtggtttaattcgaagcaacgcgaagaaccttaccagggcttgacataccattgacgtatctagagataggtatttccttcgggacaatggatacaggtggtgcatggttgtcgtcagctcgtgtcgtgagatgttgggttaagtcccgcaacgagcgcaacccctgttgttagttgccatcattaagttgggcactctagcgagactgccggtgacaaatcggaggaaggtggggacgacgtcaaatcatcatgccccttatgtcctgggctacacacgtactacaatggctattacagagggaagcgaagccgtgaggtggagcaaatctccaaaaatagtcccagttcagattgtaggctgaaactcgcctacatgaagtcggaattgctagtaatggcaggtcagcatactgccgtgaatacgttcccgggccttgtacacaccgcccgtcacaccatgagagtctgcaacacccgaagtcagtagtctaactgtaaagaggacgctgccgaaggtggggccgatgattggggtg

SEQ ID NO: 412 - DNA, 1410 bp, Acetobacter aceti
agcgaacgctggcggcatgcttaacacatgcaagtcgcacgaaggcttcggccttagtggcggacgggtgagtaacgcgtaggaatctatccatgggtgggggataactccgggaaactggagctaataccgcatgatacctgagggtcaaaggcgcaagtcgcctgtggaggagcctgcgtttgattagcttgttggtggggtaaaggcctaccaaggcgatgatcaatagctggtctgagaggatgatcagccacactgggactgagacacggcccagactcctacgggaggcagcagtggggaatattggacaatgggggcaaccctgatccagcaatgccgcgtgtgtgaagaaggttttcggattgtaaagcactttcggcggggacgatgatgacggtacccgcagaagaagccccggctaacttcgtgccagcagccgcggtaatacgaagggggctagcgttgctcggaatgactgggcgtaaagggcgtgtaggcggtttgtacagtcagatgtgaaatccccgggcttaacctgggagctgcatttgatacgtgcagactagagtatgagagagggttgtggaattctcagtgtagaggtgaaattcgtagatattgggaagaacaccggtggcgaaggcggcaacctggctcattactgacgctgaggcgcgaaagcgtggggagcaaacaggattagataccctggtagtccacgctgtaaacgatgtgtgctggatgttgggtaacttagttactcagtgtcgtagctaacgcgataagcacaccgcctggggagtacggccgcaaggttgaaactcaaaggaattgacgggggcccgcacaagcggtggagcatgtggtttaattcgaagcaacgcgcagaaccttaccagggcttgtatggagaggctgtattcagagatggatatttcccgcaagggacctcttgcacaggtgctgcatggctgtcgtcagctcgtgtcgtgagatgttgggttaagtcccgcaacgagcgcaacccttatctttagttgccagcatgtttgggtgggcactctaaagagactgccggtgacaagccggaggaaggtggggatgacgtcaagtcctcatggcccttatgtcctgggctacacacgtgctacaatggcggtgacagtgggaagctagatggcgacatcgtgccgatctctaaaaaccgtctcagttcggattgcactctgcaactcgagtgcatgaaggtggaatcgctagtaatcgcggatcagcatgccgcggtgaatacgttcccgggccttgtacacaccgcccgtcacaccatgggagttggtttgaccttaagccggtgagcgaaccgcaaggacgcagccgaccacggtcgggtcagcgactggggtg

SEQ ID NO: 413 - DNA, 1462 bp, Acetobacter ascendens
  misc_feature (475)..(475): n is a, c, g, or t
  misc_feature (517)..(517): n is a, c, g, or t
  misc_feature (872)..(872): n is a, c, g, or t
  misc_feature (901)..(901): n is a, c, g, or t
  misc_feature (1443)..(1443): n is a, c, g, or t
  misc_feature (1447)..(1447): n is a, c, g, or t
  misc_feature (1451)..(1451): n is a, c, g, or t
agagtttgatcctggctcagagcgaacgctggcggcatgcttaacacatgcaagtcgcacgaaggtttcggccttagtggcggacgggtgagtaacgcgtaggtatctatccatgggtgggggataacactgggaaactggtgctaataccgcatgacacctgagggtcaaaggcgcgagtcgcctgtggaggagcctgcgtttgattagctagttggtggggtaaaggcctaccaaggcgatgatcaatagctggtttgagaggatgatcagccacactgggactgagacacggcccagactcctacgggaggcagcagtggggaatattggacaatgggggcaaccctgatccagcaatgccgcgtgtgtgaagaaggtcttcggattgtaaagcactttcgacggggacgatgatgacggtacccgtagaagaagccccggctaacttcgtgccagcagccgcggtaatacnaagggggctagcgttgctcggaatgactgggcgtaaagggcntgtaggcggtttgtacagtcagatgtgaaatccccgggcttaacctgggagctgcatttgatacgtgcagactagagtgtgagagagggttgtggaattcccagtgtagaggtgaaattcgtagatattgggaagaacaccggtggcgaaggcggcaacctggctcattactgacgctgaggcgcgaaagcgtggggagcaaacaggattagataccctggtagtccacgctgtaaacgatgtgtgctagatgttgggtgacttagtcattcagtgtcgcagttaacgcgttaagcacaccgcctggggagtacggccgcaaggttgaaactcaaaggaattgacgggggcccgnacaagcggtggagcatgtggtttaattcnaagcaacgcgcagaacttaccagggcttgaatgtagaggctgcaagcagagatgtttgtttcccgcaagggacctctaacacaggtgctgcatggctgtcgtcagctcgtgtcgtgagatgttgggttaagtcccgcaacgagcgcaacccctatctttagttgccatcaggttgggctgggcactctagagagactgccggtgacaagccggaggaaggtggggatgacgtcaagtcctcatggcccttatgtcctgggctacacacgtgctacaatggcggtgacagtgggaagctaggtggtgacaccatgctgatctctaaaagccgtctcagttcggattgcactctgcaactcgagtgcatgaaggtggaatcgctagtaatcgcggatcagcatgccgcggtgaatacgttcccgggccttgtacacaccgcccgtcacaccatgggagttggtttgaccttaagcccggtgagcgaaccgccaggacgcagccgaccacggtcgggtcagcgactggggtgaagtcgtaacaangtancccnaagggaacctg

SEQ ID NO: 414 - DNA, 1412 bp, Acetobacter cerevisiae
agcgaacgctggcggcatgcttaacacatgcaagtcgcacgaaggtttcggccttagtggcggacgggtgagtaacgcgtaggaatctatccatgggtgggggataactccgggaaactggagctaataccgcatgatacctgagggtcaaaggcgcaagtcgcctgtggaggagcctgcgtttgattagcttgttggtggggtaatggcctaccaaggcgatgatcaatagctggtctgagaggatgatcagccacactgggactgagacacggcccagactcctacgggaggcagcagtggggaatattggacaatgggggcaaccctgatccagcaatgccgcgtgtgtgaagaaggttttcggattgtaaagcactttcggcggggacgatgatgacggtacccgcagaagaagccccggctaacttcgtgccagcagccgcggtaatacgaagggggctagcgttgctcggaatgactgggcgtaaagggcgtgtaggcggtttgtacagttagatgtgaaatccccgggcttaacctgggagctgcatttaatacgtgcagactagagtgtgagagagggttgtggaattcccagtgtagaggtgaaattcgtagatattgggaagaacaccggtggcgaaggcggcaacctggctcattactgacgctgaggcgcgaaagcgtggggagcaaacaggattagataccctggtagtccacgctgtaaacgatgtgtgctggatgttgggtaacttagttactcagtgtcgtagctaacgcgataagcacaccgcctggggagtacggccgcaaggttgaaactcaaaggaattgacgggggcccgcacaagcggtggagcatgtggtttaattcgaagcaacgcgcagaaccttaccagggcttgtatgggtaggctgtgtccagagatgggcatttcccgcaagggacctaccgcacaggtgctgcatggctgtcgtcagctcgtgtcgtgagatgttgggttaagtcccgcaacgagcgcaacccctatctttagttgccagcatgtttgggtgggcactctagagagactgccggtgacaagccggaggaaggtggggatgacgtcaagtcctcatggcccttatgtcctgggctacacacgtgctacaatggcgatgacaatgggaagctagatggcgacatcgtgctgatctcaaaaagtcgtctcagttcggattgcactctgcaactcgagtgcatgaaggtggaatcgctagtaatcgcggatcagcatgccgcggtgaatacgttcccgggccttgtacacaccgcccgtcacaccatgggagttggtttgaccttaagccggtgagcgaacccgcaaggggcgcagccgaccacggtcgggtcagcgactggggtg

SEQ ID NO: 415 - DNA, 1414 bp, Acetobacter cibinongensis
agcgaacgctggcggcatgcttaacacatgcaagtcgcacgaaggtttcggccttagtggcggacgggtgagtaacgcgtaggaatctatccatgggtgggggataactctgggaaactggagctaataccgcatgacaccttagggtcaaaggcgcaagtcgcctatggaggagcctgcgtttgattagcttgttggtggggtaatggcctaccaaggcgatgatcaatagctggtctgagaggatgatcagccacactgggactgagacacggcccagactcctacgggaggcagcagtggggaatattggacaatgggggcaaccctgatccagcaatgccgcgtgtgtgaagaaggttttcggattgtaaagcactttcggcggggacgatgatgacggtacccgcagaagaagccccggctaacttcgtgccagcagccgcggtaatacgaagggggctagcgttgctcggaatgactgggcgtaaagggcgtgtaggcggtttgtacagtcagatgtgaaatccccgggcttaacctgggagctgcatttgatacgtgcagactagagtgtgagagagggttgtggaattcccagtgtagaggtgaaattcgtagatattgggaagaacaccggtggcgaaggcggcaacctggctcataactgacgctgaggcgcgaaagcgtggggagcaaacaggattagataccctggtagtccacgctgtaaacgatgtgtgctagatgttgggtaacttagttattcagtgtcgcagttaacgcgttaagcacaccgcctggggagtacggccgcaaggttgaaactcaaaggaattgacgggggcccgcacaagcggtggagcatgtggtttaattcgaagcaacgcgcagaaccttaccagggcttgtatgggtaggctgtatccagagatggatatttcccgcaagggacctaccgcacaggtgctgcatggctgtcgtcagctcgtgtcgtgagatgttgggttaagtcccgcaacgagcgcaacccctatctttagttgccagcatgtttgggtgggcactctagagagactgccggtgacaagccggaggaaggtggggatgacgtcaagtcctcatggcccttatgccctgggctacacacgtgctacaatggcggtgacagtgggaagctagatggcgacatcgtgctgatctctaaaaaccgtctcagttcggattgcactctgcaactcgagtgcatgaaggtggaatcgctagtaatcgcggatcagcatgccgcggtgaatacgttcccgggccttgtacacaccgcccgtcacaccatgggagttggtttgaccttaagccggtgagcgaacccagcaatggggcgcagccgaccacggtcgggtcagcgactggggtg

SEQ ID NO: 416 - DNA, 1412 bp, Acetobacter fabarum
agcgaacgctggcggcatgcttaacacatgcaagtcgcacgaacctttcggggttagtggcggacgggtgagtaacgcgtaggaatctgtccacgggtgggggataactctgggaaactggagctaataccgcatgatacctgagggtcaaaggcgcaagtcgcctgtggaggagcctgcgttcgattagctagttggtggggtaaaggcctaccaaggcgatgatcgatagctggtttgagaggatgatcagccacactgggactgagacacggcccagactcctacgggaggcagcagtggggaatattggacaatgggggcaaccctgatccagcaatgccgcgtgtgtgaagaaggtcttcggattgtaaagcactttcgacggggacgatgatgacggtacccgtagaagaagccccggctaacttcgtgccagcagccgcggtaatacgaagggggctagcgttgctcggaatgactgggcgtaaagggcgtgtaggcggtttacacagtcagatgtgaaatccccgggcttaacctgggagctgcatttgatacgtgtagactagagtgtgagagagggttgtggaattcccagtgtagaggtgaaattcgtagatattgggaagaacaccggtggcgaaggcggcaacctggctcattactgacgctgaggcgcgaaagcgtggggagcaaacaggattagataccctggtagtccacgctgtaaacgatgtgtgctagatgttgggtaactttgttattcagtgtcgcagttaacgcgttaagcacaccgcctggggagtacggccgcaaggttgaaactcaaaggaattgacgggggcccgcacaagcggtggagcatgtggtttaattcgaagcaacgcgcagaaccttaccagggcttgaatgtagaggctgtattcagagatggatatttcccgcaagggacctctaacacaggtgctgcatggctgtcgtcagctcgtgtcgtgagatgttgggttaagtcccgcaacgagcgcaacccctatctttagttgccagcatgtttgggtgggcactctagagagactgccggtgacaagccggaggaaggtggggatgacgtcaagtcctcatggcccttatgtcctgggctacacacgtgctacaatggcggtgacagtgggaagctagatggtgacatcgtgctgatctctaaaagccgtctcagttcggattgcactctgcaactcgagtgcatgaaggtggaatcgctagtaatcgcggatcagcatgccgcggtgaatacgttcccgggccttgtacacaccgcccgtcacaccatgggagttggtttgaccttaagccggtgagcgaacccgcaaggggcgcagccgaccacggtcgggtcagcgactggggtg

SEQ ID NO: 417 - DNA, 1412 bp, Acetobacter ghanensis
agcgaacgctggcggcatgcttaacacatgcaagtcgcacgaacctttcggggttagtggcggacgggtgagtaacgcgtaggaatctgtccatgggtgggggataactctgggaaactggagctaataccgcatgatacctgagggtcaaaggcgcaagtcgcctgtggaggagcctgcgttcgattagctagttggtggggtaaaggcctaccaaggcgatgatcgatagctggtttgagaggatgatcagccacactgggactgagacacggcccagactcctacgggaggcagcagtggggaatattggacaatgggggcaaccctgatccagcaatgccgcgtgtgtgaagaaggtcttcggattgtaaagcactttcgacggggacgatgatgacggtacccgtagaagaagccccggctaacttcgtgccagcagccgcggtaatacgaagggggctagcgttgctcggaatgactgggcgtaaagggcgtgtaggcggtttgtacagtcagatgtgaaatccccgggcttaacctgggagctgcatttgatacgtgcagactagagtgtgagagagggttgtggaattcccagtgtagaggtgaaattcgtagatattgggaagaacaccggtggcgaaggcggcaacctggctcattactgacgctgaggcgcgaaagcgtggggagcaaacaggattagataccctggtagtccacgctgtaaacgatgtgtgctagatgttgggtaactttgttattcagtgtcgcagttaacgcgttaagcacaccgcctggggagtacggccgcaaggttgaaactcaaaggaattgacgggggcccgcacaagcggtggagcatgtggtttaattcgaagcaacgcgcagaaccttaccagggcttgaatgtagaggctgtattcagagatggatatttcccgcaagggacctctaacacaggtgctgcatggctgtcgtcagctcgtgtcgtgagatgttgggttaagtcccgcaacgagcgcaacccctatctttagttgccagcacgtttgggtgggcactctagagagactgccggtgacaagccggaggaaggtggggatgacgtcaagtcctcatggcccttatgtcctgggctacacacgtgctacaatggcggtgacagtgggaagctagatggtgacatcgtgctgatctctaaaagccgtctcagttcggattgcactctgcaactcgagtgcatgaaggtggaatcgctagtaatcgcggatcagcatgccgcggtgaatacgttcccgggccttgtacacaccgcccgtcacaccatgggagttggtttgaccttaagccggtgagcgaacccgcaaggggcgcagccgaccacggtcgggtcagcgactggggtg

SEQ ID NO: 418 - DNA, 1412 bp, Acetobacter indonesiensis
agcgaacgctggcggcatgcttaacacatgcaagtcgcacgaaggtttcggccttagtggcggacgggtgagtaacgcgtaggaatctatccgtgggtgggggataactctgggaaactggagctaataccgcatgacacctgagggtcaaaggcgcaagtcgcctgcggaggagcctgcgtttgattagcttgttggtggggtaatggcctaccaaggcgatgatcaatagctggtctgagaggatgatcagccacactgggactgagacacggcccagactcctacgggaggcagcagtggggaatattggacaatgggggcaaccctgatccagcaatgccgcgtgtgtgaagaaggttttcggattgtaaagcactttcggcggggacgatgatgacggtacccgcagaagaagccccggctaacttcgtgccagcagccgcggtaatacgaagggggctagcgttgctcggaatgactgggcgtaaagggcgtgtaggcggtttgtacagtcagatgtgaaatccccgggcttaacctgggagctgcatttgagacgtgcagactagagtgtgagagagggttgtggaattcccagtgtagaggtgaaattcgtagatattgggaagaacaccggtggcgaaggcggcaacctggctcattactgacgctgaggcgcgaaagcgtggggagcaaacaggattagataccctggtagtccacgctgtaaacgatgtgtgctggatgttgggtaacttagttattcagtgtcgtagctaacgcgataagcacaccgcctggggagtacggccgcaaggttgaaactcaaaggaattgacgggggcccgcacaagcggtggagcatgtggtttaattcgaagcaacgcgcagaaccttaccaggacttgtatgggtaggctgtattcagagatggatatttcccgcaagggacctaccgcacaggtgctgcatggctgtcgtcagctcgtgtcgtgagatgttgggttaagtcccgcaacgagcgcaacccctatctttagttgccagcatgtttgggtgggcactctagagagactgccggtgacaagccggaggaaggtggggatgacgtcaagtcctcatggcccttatgtcctgggctacacacgtgctacaatggcggtgacagtgggaagctagatggcgacatcgtgctgatctctaaaagccgtctcagttcggattgcactctgcaactcgagtgcatgaaggtggaatcgctagtaatcgcggatcagcatgccgcggtgaatacgttcccgggccttgtacacaccgcccgtcacaccatgggagttggtttgaccttaagccggtgagcgaacccgcaaggggcgcagccgaccacggtcgggtcagcgactggggtg

SEQ ID NO: 419 - DNA, 1412 bp, Acetobacter malorum
agcgaacgctggcggcatgcttaacacatgcaagtcgcacgaaggcttcggccttagtggcggacgggtgagtaacgcgtaggaatctatccacgggtgggggataactccgggaaactggagctaataccgcatgatacctgagggtcaaaggcgcaagtcgcctgtggaggagcctgcgtttgattagcttgttggtggggtaatggcctaccaaggcgatgatcaatagctggtctgagaggatgatcagccacactgggactgagacacggcccagactcctacgggaggcagcagtggggaatattggacaatgggggcaaccctgatccagcaatgccgcgtgtgtgaagaaggttttcggattgtaaagcactttcggcggggacgatgatgacggtacccgcagaagaagccccggctaacttcgtgccagcagccgcggtaatacgaagggggctagcgttgctcggaatgactgggcgtaaagggcgtgtaggcggtttgtacagttagatgtgaaatccccgggcttaacctgggagctgcatttaatacgtgcagactagagtgtgagagagggttgtggaattcccagtgtagaggtgaaattcgtagatattgggaagaacaccggtggcgaaggcggcaacctggctcattactgacgctgaggcgcgaaagcgtggggagcaaacaggattagataccctggtagtccacgctgtaaacgatgtgtgctggatgttgggtaacttagttactcagtgtcgtagctaacgcgataagcacaccgcctggggagtacggccgcaaggttgaaactcaaaggaattgacgggggcccgcacaagcggtggagcatgtggtttaattcgaagcaacgcgcagaaccttaccagggcttgtatgggtaggctgtgtccagagatgggcatttcccgcaagggacctaccgcacaggtgctgcatggctgtcgtcagctcgtgtcgtgagatgttgggttaagtcccgcaacgagcgcaacccctatctttagttgccagcatgtttgggtgggcactctagagagactgccggtgacaagccggaggaaggtggggatgacgtcaagtcctcatggcccttatgtcctgggctacacacgtgctacaatggcgatgacaatgggaagctagatggcgacatcgtgctgatctcaaaaagtcgtctcagttcggattgcactctgcaactcgagtgcatgaaggtggaatcgctagtaatcgcggatcagcatgccgcggtgaatacgttcccgggccttgtacacaccgcccgtcacaccatgggagttggtttgaccttaagccggtgagcgaacccgcaaggggcgcagccgaccacggtcgggtcagcgactggggtg

SEQ ID NO: 420 - DNA, 1412 bp, Acetobacter nitrogenifigens
agcgaacgctggcggcatgcttaacacatgcaagtcgcacggaggttttcggacttcagtggcggacgggtgagtaacgcgtagggatctatccacgggtgggggataactccgggaaactggagctaataccgcatgacacctgagggtcaaaggcgcaagtcgcctgtggaggagcctgcgttcgattagcttgttggtggggtaaaggcctaccaaggcgatgatcgatagctggtctgagaggatgatcagccacactgggactgagacacggcccagactcctacgggaggcagcagtggggaatattggacaatgggggcaaccctgatccagcaatgccgcgtgtgtgaagaaggttttcggattgtaaagcactttcggcggggacgatgatgacggtacccgcagaagaagccccggctaacttcgtgccagcagccgcggtaatacgaagggggctagcgttgctcggaatgactgggcgtaaagggcgtgtaggcggtttggacagtcagatgtgaaatccccgggcttaacctgggagctgcatttgatacgtccagactagagtgtgagagagggttgtggaattctcagtgtagaggtgaaattcgtagatattgggaagaacaccggtggcgaaggcggcaacctggctcattactgacgctgaggcgcgaaagcgtggggagcaaacaggattagataccctggtagtccacgctgtaaacgatgtgtgctggatgttgggtaacttagttactcagtgtcgtagctaacgcgataagcacaccgcctggggagtacggccgcaaggttgaaactcaaaggaattgacgggggcccgcacaagcggtggagcatgtggtttaattcgaagcaacgcgcagaaccttaccagggcttgtatggagaggctgtattcagagatggatatttcccgcaagggacctcttgcacaggtgctgcatggctgtcgtcagctcgtgtcgtgagatgttgggttaagtcccgcaacgagcgcaacccttatctttagttgccagcatgtttgggtgggcactctaaagagactgccggtgacaagccggaggaaggtggggatgacgtcaagtcctcatggcccttatgtcctgggctacacacgtgctacaatggcggtgacagtgggaagctagatggcgacatcgtgctgatctctaaaagccgtctcagttcggattgcactctgcaactcgagtgcatgaaggtggaatcgctagtaatcgcggatcagcatgccgcggtgaatacgttcccgggccttgtacacaccgcccgtcacaccatgggagttggtttgaccttaagccggtgagcgaaccgcaaggacgcagccgaccacggtcgggtcagcgactggggtg

SEQ ID NO: 421 - DNA, 1410 bp, Acetobacter oeni
  misc_feature (185)..(185): n is a, c, g, or t
agcgaacgctggcggcatgcttaacacatgcaagtcgcacgaaggtttcggccttagtggcggacgggtgagtaacgcgtaggtatctgtccatgggtgggggataactccgggaaactggagctaataccgcatgacacctgagggtcaaaggcgcaagtcgcctgtggaggagcctgcgttcnattagcttgttggtggggtaaaggcctaccaaggcgatgatcgatagctggtctgacaggatgatcagccacactgggactgagacacggcccaaactcctacgggaggcagcagtggggaatattggacaatgggggcaaccctgatccagcaatgccgcgtgtgtgaagaaggttttccgattgtaaagcactttcggcggggacgatgatgacggtacccgcagaagaagccccggctaacttcgtgccagcagccgcggtaatacgaagggggctagcgttgctcggaatgactgggcgtaaagggcgtgtaggcggtttgtacagtcagatgtgaaatccccgggcttaacctgggagctgcatttgatacgtgcagactagagtatgagagagggttgtggaattctcagtgtagaggtgaaattcgtagatattgggaagaacaccggtggcgaaggcggcaacctggctcattactgacgctgaggcgcgaaagcgtggggagcaaacaggattagataccctggtagtccacgctgtaaacgatgtgtgctggatgttgggtgacttagtcattcagtgtcgtagctaacgcgataagcacaccgcctggggagtacggccgcaaggttgaaactcaaaggaattgacgggggcccgcacaagcggtggagcatgtggtttaattcgaagcaacgcgcagaaccttaccagggcttgtatggagaggctgtgtccagagatgggcatttcccgcaagggacctttcgcacaggtgctgcatggctgtcgtcagctcgtgtcgtgagatgttgggttaagtcccgcaacgagcgcaacccttatctttagttgccagcatgtttgggtgggcactctaaagagactgccggtgacaagccggaggaaggtggggatgacgtcaagtcctcatggcccttatgtcctgggctacacacgtgctacaatggcggtgacagtgggaagctagatggtgacatcatgctgatctctaaaagccgtctcagttcggattgcactctgcaactcgagtgcatgaaggtggaatcgctagtaatcgcggatcagcatgccgcggtgaatacgttcccgggccttgtacacaccgcccgtcacaccatgggagttggtttgaccttaagccggtgagcgaaccgcaaggacgcagccgaccacggtcgggtcagcgactggggtg

SEQ ID NO: 422 - DNA, 1412 bp, Acetobacter okinawensis
agcgaacgctggcggcatgcttaacacatgcaagtcgcacgaacctttcggggttagtggcggacgggtgagtaacgcgtaggaatctgtccacgggtgggggataactctgggaaactggagctaataccgcatgatacctgagggtcaaaggcgcaagtcgcctgtggaggagcctgcgttcgattagctagttggtggggtaaaggcctaccaaggcgatgatcgatagctggtttgagaggatgatcagccacactgggactgagacacggcccagactcctacgggaggcagcagtggggaatattggacaatgggggcaaccctgatccagcaatgccgcgtgtgtgaagaaggtcttcggattgtaaagcactttcgacggggacgatgatgacggtacccgtagaagaagccccggctaacttcgtgccagcagccgcggtaatacgaagggggctagcgttgctcggaatgactgggcgtaaagggcgtgtaggcggtttgtacagtcagatgtgaaatccccgggcttaacctgggagctgcatttgagacgtgcagactagagtgtgagagagggttgtggaattcccagtgtagaggtgaaattcgtagatattgggaagaacaccggtggcgaaggcggcaacctggctcattactgacgctgaggcgcgaaagcgtggggagcaaacaggattagataccctggtagtccacgctgtaaacgatgtgtgctagatgttgggtgactttgtcattcagtgtcgcagttaacgcgttaagcacaccgcctggggagtacggccgcaaggttgaaactcaaaggaattgacgggggcccgcacaagcggtggagcatgtggtttaattcgaagcaacgcgcagaaccttaccagggcttgaatgtagaggctgtattcagagatggatatttcccgcaagggacctctaacacaggtgctgcatggctgtcgtcagctcgtgtcgtgagatgttgggttaagtcccgcaacgagcgcaacccctatctttagttgccagcatgtttgggtgggcactctagagagactgccggtgacaagccggaggaaggtggggatgacgtcaagtcctcatggcccttatgtcctgggctacacacgtgctacaatggcggtgacagtgggaagctagatggtgacatcatgctgatctctaaaagccgtctcagttcggattgcactctgcaactcgagtgcatgaaggtggaatcgctagtaatcgcggatcagcatgccgcggtgaatacgttcccgggccttgtacacaccgcccgtcacaccatgggagttggtttgaccttaagccggtgagcgaacccgcaaggggcgcagccgaccacggtcgggtcagcgactggggtg

SEQ ID NO: 423 - DNA, 1412 bp, Acetobacter orientalis
agcgaacgctggcggcatgcttaacacatgcaagtcgcacgaaggtttcggccttagtggcggacgggtgagtaacgcgtaggaatctatccatgggtgggggataactctgggaaactggagctaataccgcatgatacctgagggtcaaaggcgcgagtcgcctgtggaggagcctgcgtttgattagcttgttggtggggtaatggcctaccaaggcgatgatcaatagctggtctgagaggatgatcagccacactgggactgagacacggcccagactcctacgggaggcagcagtggggaatattggacaatgggggcaaccctgatccagcaatgccgcgtgtgtgaagaaggttttcggattgtaaagcactttcgacggggacgatgatgacggtacccgtagaagaagccccggctaacttcgtgccagcagccgcggtaatacgaagggggctagcgttgctcggaatgactgggcgtaaagggcgtgtaggcggtttgtacagtcagatgtgaaatccccgggcttaacctgggagctgcatttgatacgtgcagactagagtgtgagagagggttgtggaattcccagtgtagaggtgaaattcgtagatattgggaagaacaccggtggcgaaggcggcaacctggctcataactgacgctgaggcgcgaaagcgtggggagcaaacaggattagataccctggtagtccacgctgtaaacgatgtgtgctagatgttgggtaacttagttattcagtgtcgcagttaacgcgttaagcacaccgcctggggagtacggccgcaaggttgaaactcaaaggaattgacgggggcccgcacaagcggtggagcatgtggtttaattcgaagcaacgcgcagaaccttaccagggcttgtatgggtaggctgtgtccagagatgggcatttcccgcaagggacctaccgcacaggtgctgcatggctgtcgtcagctcgtgtcgtgagatgttgggttaagtcccgcaacgagcgcaacccctatctttagttgccagcatgtttgggtgggcactctagagagactgccggtgacaagccggaggaaggtggggatgacgtcaagtcctcatggcccttatgtcctgggctacacacgtgctacaatggcggtgacagtgggaagctagatggcgacatcgtgctgatctctaaaaaccgtctcagttcggattgtactctgcaactcgagtacatgaaggtggaatcgctagtaatcgcggatcagcatgccgcggtgaatacgttcccgggccttgtacacaccgcccgtcacaccatgggagttggtttgaccttaagccggtgagcgaacccgcaaggggcgcagccgaccacggtcgggtcagcgactggggtg

SEQ ID NO: 424 - DNA, 1412 bp, Acetobacter orleanensis
agcgaacgctggcggcatgcttaacacatgcaagtcgcacgaaggtttcggccttagtggcggacgggtgagtaacgcgtaggaatctatccacgggtgggggataactccgggaaactggagctaataccgcatgatacctgagggtcaaaggcgcaagtcgcctgtggaggagcctgcgtttgattagcttgttggtggggtaatggcctaccaaggcgatgatcaatagctggtctgagaggatgatcagccacactgggactgagacacggcccagactcctacgggaggcagcagtggggaatattggacaatgggggcaaccctgatccagcaatgccgcgtgtgtgaagaaggttttcggattgtaaagcactttcggcggggacgatgatgacggtacccgcagaagaagccccggctaacttcgtgccagcagccgcggtaatacgaagggggctagcgttgctcggaatgactgggcgtaaagggcgtgtaggcggtttgtacagttagatgtgaaatccccgggcttaacctgggagctgcatttaagacgtatagactagagtgtgagagagggttgtggaattcccagtgtagaggtgaaattcgtagatattgggaagaacaccggtggcgaaggcggcaacctggctcatgactgacgctgaggcgcgaaagcgtggggagcaaacaggattagataccctggtagtccacgctgtaaacgatgtgtgctggatgttgggtaacttagttactcagtgtcgtagctaacgcgataagcacaccgcctggggagtacggccgcaaggttgaaactcaaaggaattgacgggggcccgcacaagcggtggagcatgtggtttaattcgaagcaacgcgcagaaccttaccagggcttgtatgggtaggctgtgtccagagatgggcatttcccgcaagggacctaccgcacaggtgctgcatggctgtcgtcagctcgtgtcgtgagatgttgggttaagtcccgcaacgagcgcaacccctatctttagttgccagcatgtttgggtgggcactctagagagactgccggtgacaagccggaggaaggtggggatgacgtcaagtcctcatggcccttatgtcctgggctacacacgtgctacaatggcgatgacaatgggaagctagatggcgacatcgtgctgatctcaaaaagtcgtctcagttcggattgcactctgcaactcgagtgcatgaaggtggaatcgctagtaatcgcggatcagcatgccgcggtgaatacgttcccgggccttgtacacaccgcccgtcacaccatgggagttggtttgaccttaagccggtgagcgaacccgcaaggggcgcagccgaccacggtcgggtcagcgactggggtg

SEQ ID NO: 425 - DNA, 1406 bp, Acetobacter peroxydans
agcgaacgctggcggcatgcttaacacatgcaagtcgcacgaaggtttcggccttagtggcggacgggtgagtaacgcgtaggaatctatccatgggtgggggataacactgggaaactggtgctaataccgcatgatacctgagggtcaaaggcgcaagtcgcctgtggaggagcctgcgttcgattagctagttggtggggtaaaggcctaccaaggcgatgatcgatagctggtttgagaggatgatcagccacactgggactgagacacggcccagactcctacgggaggcagcagtggggaatattggacaatgggggcaaccctgatccagcaatgccgcgtgtgtgaagaaggtcttcggattgtaaagcactttcgacggggacgatgatgacggtacccgtagaagaagccccggctaacttcgtgccagcagccgcggtaatacgaagggggctagcgttgctcggaatgactgggcgtaaagggcgtgtaggcggttttgacagtcagatgtgaaatccccgggcttaacctgggagctgcatttgagacgttaagactagagtgtgagagagggttgtggaattcccagtgtagaggtgaaattcgtagatattgggaagaacaccggtggcgaaggcggcaacctggctcattactgacgctgaggcgcgaaagcgtggggagcaaacaggattagataccctggtagtccacgctgtaaacgatgtgtgctagatgttgggtaacttagttactcagtgtcgcagttaacgcgttaagcacaccgcctggggagtacggccgcaaggttgaaactcaaaggaattgacgggggcccgcacaagcggtggagcatgtggtttaattcgaagcaacgcgcagaaccttaccagggcttgaatgtggaggctgtaggcagagatgtctatttcttcggacctccaacacaggtgctgcatggctgtcgtcagctcgtgtcgtgagatgttgggttaagtcccgcaacgagcgcaacccctatctttagttgccagcatgtttgggtgggcactctagagagactgccggtgacaagccggaggaaggtggggatgacgtcaagtcctcatggcccttatgtcctgggctacacacgtgctacaatggcggtgacagtgggaagctatgtggtgacacagtgctgatctctaaaagccgtctcagttcggattgcactctgcaactcgagtgcatgaaggtggaatcgctagtaatcgcggatcagcatgccgcggtgaatacgttcccgggccttgtacacaccgcccgtcacaccatgggagttggtttgaccttaagccggtgagcgaaccgcaaggacgcagccgaccacggtcgggtcagcgactggggtg

SEQ ID NO: 426 - DNA, 1412 bp, Acetobacter persici
agcgaacgctggcggcatgcttaacacatgcaagtcgcacgaaggtttcggccttagtggcggacgggtgagtaacgcgtaggaatctatccatgggtgggggataactccgggaaactggagctaataccgcatgatacctgagggtcaaaggcgcaagtcgcctgtggaggagcctgcgtttgattagcttgttggtggggtaatggcctaccaaggcgatgatcaatagctggtctgagaggatgatcagccacactgggactgagacacggcccagactcctacgggaggcagcagtggggaatattggacaatgggggcaaccctgatccagcaatgccgcgtgtgtgaagaaggttttcggattgtaaagcactttcggcggggacgatgatgacggtacccgcagaagaagccccggctaacttcgtgccagcagccgcggtaatacgaagggggctagcgttgctcggaatgactgggcgtaaagggcgtgtaggcggtttgcacagttagatgtgaaatccccgggcttaacctgggagctgcatttaatacgtgcagactagagtgtgagagagggttgtggaattcccagtgtagaggtgaaattcgtagatattgggaagaacaccggtggcgaaggcggcaacctggctcatgactgacgctgaggcgcgaaagcgtggggagcaaacaggattagataccctggtagtccacgctgtaaacgatgtgtgctggatgttgggtaacttagttactcagtgtcgtagctaacgcgataagcacaccgcctggggagtacggccgcaaggttgaaactcaaaggaattgacgggggcccgcacaagcggtggagcatgtggtttaattcgaagcaacgcgcagaaccttaccagggcttgtatgggtaggctgtattcagagatggatatttcccgcaagggacctaccgcacaggtgctgcatggctgtcgtcagctcgtgtcgtgagatgttgggttaagtcccgcaacgagcgcaacccctatctttagttgccagcatgtttgggtgggcactctagagagactgccggtgacaagccggaggaaggtggggatgacgtcaagtcctcatggcccttatgtcctgggctacacacgtgctacaatggcgatgacaatgggaagctagatggcgacatcgtgctgatctcaaaaagtcgtctcagttcggattgcactctgcaactcgagtgcatgaaggtggaatcgctagtaatcgcggatcagcatgccgcggtgaatacgttcccgggccttgtacacaccgcccgtcacaccatgggagttggtttgaccttaagccggtgagcgaacccgcaaggggcgcagccgaccacggtcgggtcagcgactggggtg

SEQ ID NO: 427 - DNA, 1410 bp, Acetobacter pomorum
agcgaacgctggcggcatgcttaacacatgcaagtcgcacgaaggtttcggccttagtggcggacgggtgagtaacgcgtaggtatctatccatgggtgggggataacactgggaaactggtgctaataccgcatgacacctgagggtcaaaggcgcaagtcgcctgtggaggagcctgcgtttgattagctagttggtggggtaaaggcctaccaaggcgatgatcaatagctggtttgagaggatgatcagccacactgggactgagacacggcccagactcctacgggaggcagcagtggggaatattggacaatgggggcaaccctgatccagcaatgccgcgtgtgtgaagaaggtcttcggattgtaaagcactttcgacggggacgatgatgacggtacccgtagaagaagccccggctaacttcgtgccagcagccgcggtaatacgaagggggctagcgttgctcggaatgactgggcgtaaagggcgtgtaggcggtttgtacagtcagatgtgaaatccccgggcttaacctgggagctgcatttgatacgtgcagactagagtatgagagagggttgtggaattcccagtgtagaggtgaaattcgtagatattgggaagaacaccggtggcgaaggcggcaacctggctcattactgacgctgaggcgcgaaagcgtggggagcaaacaggattagataccctggtagtccacgctgtaaacgatgtgtgctagatgttgggtaacttagttattcagtgtcgcagttaacgcgttaagcacaccgcctggggagtacggccgcaaggttgaaactcaaaggaattgacgggggcccgcacaagcggtggagcatgtggtttaattcgaagcaacgcgcagaaccttaccagggcttgaatgtagaggctgcaagcagagatgtttgtttcccgcaagggacctctaacacaggtgctgcatggctgtcgtcagctcgtgtcgtgagatgttgggttaagtcccgcaacgagcgcaacccctatctttagttgccatcaggttgggctgggcactctagagagactgccggtgacaagccggaggaaggtggggatgacgtcaagtcctcatggcccttatgtcctgggctacacacgtgctacaatggcggtgacagtgggaagctaggtggtgacaccatgctgatctctaaaagccgtctcagttcggattgcactctgcaactcgagtgcatgaaggtggaatcgctagtaatcgcggatcagcatgccgcggtgaatacgttcccgggccttgtacacaccgcccgtcacaccatgggagttggtttgaccttaagccggtgagcgaaccgcaaggacgcagccgaccacggtcgggtcagcgactggggtg

SEQ ID NO: 428 - DNA, 1414 bp, Acetobacter senegalensis
agcgaacgctggcggcatgcttaacacatgcaagtcgcacgaaggtttcggccttagtggcggacgggtgagtaacgcgtaggaatctatccatgggtgggggataactctgggaaactggagctaataccgcatgatacctgagggtcaaaggcgtaagtcgcctgtggaggagcctgcgttcgattagcttgttggtggggtaatggcctaccaaggcgatgatcgatagctggtctgagaggatgatcagccacactgggactgagacacggcccagactcctacgggaggcagcagtggggaatattggacaatgggggcaaccctgatccagcaatgccgcgtgtgtgaagaaggttttcggattgtaaagcactttcggcggggacgatgatgacggtacccgcagaagaagccccggctaacttcgtgccagcagccgcggtaatacgaagggggctagcgttgctcggaatgactgggcgtaaagggcgtgtaggcggtttgtacagtcagatgtgaaatccccgggcttaacctgggagctgcatttgatacgtgcagactagagtgtgagagagggttgtggaattcccagtgtagaggtgaaattcgtagatattgggaagaacaccggtggcgaaggcggcaacctggctcatgactgacgctgaggcgcgaaagcgtggggagcaaacaggattagataccctggtagtccacgctgtaaacgatgtgtgctggatgttgggcaacttagttgttcagtgtcgtagctaacgcgataagcacaccgcctggggagtacggccgcaaggttgaaactcaaaggaattgacgggggcccgcacaagcggtggagcatgtggtttaattcgaagcaacgcgcagaaccttaccagggcttgtatgtgtaggctgtgtccagagatgggcatttcccgcaagggacctacagcacaggtgctgcatggctgtcgtcagctcgtgtcgtgagatgttgggttaagtcccgcaacgagcgcaacccctatctttagttgccagcatgtttgggtgggcactctagagagactgccggtgacaagccggaggaaggtggggatgacgtcaagtcctcatggcccttatgtcctgggctacacacgtgctacaatggcggtgacagtgggaagctagatggcgacatcgtgctgatctctaaaagccgtctcagttcggattgcactctgcaactcgagtgcatgaaggtggaatcgctagtaatcgcggatcagcatgccgcggtgaatacgttcccgggccttgtacacaccgcccgtcacaccatgggagttggtttgaccttaagccggtgagcgaacccagcaatggggcgcagccgaccacggtcgggtcagcgactggggtg

SEQ ID NO: 429 - DNA, 1412 bp, Acetobacter syzygii
agcgaacgctggcggcatgcttaacacatgcaagtcgcacgaacctttcggggttagtggcggacgggtgagtaacgcgtaggaatctgtccatgggtgggggataactctgggaaactggagctaataccgcatgatacctgagggtcaaaggcgcaagtcgcctgtggaggagcctgcgttcgattagctagttggtggggtaaaggcctaccaaggcgatgatcgatagctggtttgagaggatgatcagccacactgggactgagacacggcccagactcctacgggaggcagcagtggggaatattggacaatgggggcaaccctgatccagcaatgccgcgtgtgtgaagaaggtcttcggattgtaaagcactttcgacggggacgatgatgacggtacccgtagaagaagccccggctaacttcgtgccagcagccgcggtaatacgaagggggctagcgttgctcggaatgactgggcgtaaagggcgtgtaggcggtttgtacagtcagatgtgaaatccccgggcttaacctgggagctgcatttgatacgtacagactagagtgtgagagagggttgtggaattcccagtgtagaggtgaaattcgtagatattgggaagaacaccggtggcgaaggcggcaacctggctcattactgacgctgaggcgcgaaagcgtggggagcaaacaggattagataccctggtagtccacgctgtaaacgatgtgtgctagatgttgggtgactttgtcattcagtgtcgcagttaacgcgttaagcacaccgcctggggagtacggccgcaaggttgaaactcaaaggaattgacgggggcccgcacaagcggtggagcatgtggtttaattcgaagcaacgcgcagaaccttaccagggcttgaatgtagaggctgtattcagagatggatatttcccgcaagggacctctaacacaggtgctgcatggctgtcgtcagctcgtgtcgtgagatgttgggttaagtcccgcaacgagcgcaacccctatctttagttgccagcatgtttgggtgggcactctagagagactgccggtgacaagccggaggaaggtggggatgacgtcaagtcctcatggcccttatgtcctgggctacacacgtgctacaatggcggtgacagtgggaagctagatggtgacatcgtgctgatctctaaaagccgtctcagttcggattgcactctgcaactcgagtgcatgaaggtggaatcgctagtaatcgcggatcagcatgccgcggtgaatacgttcccgggccttgtacacaccgcccgtcacaccatgggagttggtttgaccttaagccggtgagcgaacccgcaaggggcgcagccgaccacggtcgggtcagcgactggggtg

SEQ ID NO: 430 - DNA, 1414 bp, Acetobacter tropicalis; identical to SEQ ID NO: 428

SEQ ID NO: 431 - DNA, 1440 bp, Acetobacteroides hydrogenigenes
gatgaacgctagcggcaggcctaacacatgcaagtcgagcggtaggggacttcggtccctgagagcggcgcacgggtgcgtaacgcgtatgcaacctaccctttacaggggaatagcccgtcgaaaggcggattaatgccccatggctccttcgagaggcatctcttggagggtaaagattcatcggtaaaggatgggcatgcgtgccattagctggatggtggggtaacggcccaccatggcgacgatggctaggggttctgagaggaaggccccccacactgggactgagacacggcccagactcctacgggaggcagcagtgaggaatattggtcaatgggcggaagcctgaaccagccatgccgcgtgcgggaagaaggcgctacgcgtcgtaaaccgcttttgtccgggggtaaccgcggggacgtgtccccgcctgcaagtaccggacgaataagggtcggctaactccgtgccagcagccgcggtaatacggaggacccgagcgttatccggattcattgggtttaaagggtgcgtaggcggcccggtaagtcagcggtgaaaggctcctgctccacaggagagctgccgttgatactgctgggctagaatcttagcgaggcgggcggaatgcgcggtgtagcggtgaaatgcatagatatcgcgcagaacgccgattggggagccagctcgccagctgagtattgacgctgaggcacgaaagcgtggggatcgaacaggattagataccctggtagtccacgccgtaaacgatgatggctcgctcttggttcgcaaggatcaggggcttagcgaaagcgttaagccatccacctggggagtacgccggcaacggtgaaactcaaaggaattgacgggggcccgcacaagcggaggaacatgtggtttaattcgatgatacgcgaggaaccttacccaggctcgaacgccgaacgaatacgggggaaactccgtagccagcaatggcggtcggcgaggtgctgcatggttgtcgtcagctcgtgccgtgaggtgtcggcttaagtgccataacgagcgcaacccctatcggtagttgccagcgggttatgccgggaactctaccgagactgccagcgcaagctgcgaggaaggcggggatgacgtcaaatcagcacggcccttacgtctggggcgacacacgtgttacaatggccggtacagagggcagccacccagcgatggggcgcgaatctcaaaagccggtcgtagttcggatcggaggctgcaacccgcctccgtgaagctggattcgctagtaatcgcatatcagccatgatgcggtgaatacgttcccgggccttgtacacaccgcccgtcaaaccatgggagctggggggacctgaagtgcgtgaccgcaaggagcgccctagggtaaaaccggtgactggggtt

SEQ ID NO: 432 - DNA, 1459 bp, Acetohalobium arabaticum
gacgaacgctggcggcgtgcctaacacatgcaagtcgcgcgagaaagctgctctttgagcagttagtaaagcggcggacgggtgagtaacgcgtgagtaatctacctttaagtctgatataacttctcgaaagggaagctaatttcggatattatgctgcctggataaccaggctgcatcaaaggcggctttttgcctccgcttttagatgtgctcgcgtcccattagcttgttggtgagataacagctcaccaaggctgcgatgggtagccgacctgagagggtgatcggccacactgggactgagacacggcccagactcctacgggaggctgcagtggggaatctttcgcaatgagcgcaagcttgacgaagcgacgccgcgtgagtgatgaaggccttcgggtcgtaaagctctgtcctcagggaagaacatcttagtagtgaataactgctaggcttgacggtacctgagaagaaagctccggctaactacgtgccagcagccgcggtaatacgtagggagcaagcgttgtccggaatcattgggcgtaaagggtgcgcaggcggtctggcaagtcaagtgtgaaatgtatcggcttaactgatacactgcgcttgaaactgtcagacttgagggcaagagaagagagcggaattcctagtgtagcggtgaaatgcgtagatattaggaagaacaccagtggcgaaagcggctctctggcttgaccctgacgctgaggcacgaaagctaggggagcgaacgggattagataccccggtagtcctggctgtaaacgctggatactaggtgttgggggttcaactccctcagtgctgcagttaacgcgttaagtatcccgcctggggattacgaccgcaaggttgaaactcaaaggaattgacgggggcctgcacaagcggcggagcatgtggtttaattcgaagcaacgcgcagaaccttaccagggcttgacatcccgtgactatctgtcaacagcagaatttggtcctttggatcacacggtgacaggtggtgcatggctgtcgtcagctcgtgtcgtgagatgttgggttaagtcccgcaacgagcgtaacccctatccttagttgccagcattaagttggggactctagggagactgccagtcaaaaactggaggaaggtggggatgacgtcaagtcatcatgccccttatgctctgggctacacacgtgctacaatggcctgtacagagggctgctataccgcaaggtttagccaatcctcaaaacaggtcccagttcggattgctggctgcaactcgcctgcatgaagctggagtcgctagtaatcgcggatcagaatgccgcggtgaatccgttcccaggccttgtacacaccgcccgtcacaccacccgagttggatgcaccagaagtcgtctacgggcgccgaaggtgtgtccgataaggggggtg

SEQ ID NO: 433 - DNA, 1453 bp, Acetomicrobium mobile
gacgaacgctggcggcgcgcttaacacatgcaagtcgtgcggtgtcgaaggcaagtcttacgacaagccttcgacacagcggcgaacgggtgagtaacacgtgagtagctgtcctaaggagggggataacgcctggaaacgggtgctaataccccatatgcctcgcaagaggtgaaagtgtacttgttacagccttagggtgtgctcgcggcctatcagctagttggtgaggtaacggctcaccaaggctaagacgggtagccggcctgagagggtgtacggccacactggaattgagatacggtccagactcctacgggaggcagcagtggggaatcttgggcaatgggcgaaagcctgacccagcgacgccgcgttggggatgaagcccttcggggcgtaaacccatgttgtaggggacgaagaaagtgacggtaccctacgagaaagccccggccaactacgtgccagcagccgcggtaaaacgtagggggcgagcgttgtccggaattactgggcgtaaagggcacgcaggcggtacgccaagtcgggggtgtaaagttacggctcaaccgtgaccttgcaatcgatactggcgtactggagtgcgggagagggaagtggaattcccggtgtagcggtgaaatgcgtagatatcgggaggaacgccagtggcgaaggcggcttcctggcccgcgactgacgctcatgtgcgaaagccaggggagcgaaccggattagatacccgggtagtcctggccgtaaacgatgggtgctaggtgtaggcgcgtcaagcgtctgtgccgcagttaacgcgataagcacctcgcctggggagtacggtcgcaaggctgaaactcaaaggaattgacgggggcccgcacaagcggtggagcacgtggtttaattcgatgcaaaccgaagaaccttacctgggtttgacatgcaggtggtacgagcctgaaagggcgaggaccgcatcttcggatgcggagcctgcacaggtgctgcatggctgtcgtcagctcgtgtcgtgagatgttgggttaagtcccgcaacgagcgcaacccctgcgcctagttgccatcagttaggctgggcactctaggcggactgccggcgacaagtcggaggaaggtggggatgacgtcaagtcatcatggcctttaagcccagggcgacacacgtgctacaatggccagcacagagggctgcaagtccgcgaggacaagcgaatcccttaaagctggtctcagttcggattgcagtctgcaactcgactgcatgaagccggaatcgctagtaatcgccggtcagccatacggcggtgaatacgttcccgggccttgtacacaccgcccgtcacaccacccgagttgggtgctcccgaagccgccggcccaaccccgtaaggggagggaggcgtcgaaggagtgtctgataaggggggtg

SEQ ID NO: 434 - DNA, 1477 bp, Acetonema longum
gacgaacgctggcggcgtgcttaacacatgcaagtcgaacggggagttagcaataactccaagtggcgaacgggtgagtaacgcgtagacaatctgcccttgagatggggacaacgttccgaaaggagcgctaataccgaatgttgtggagaggatgcatatcttctttactaaaggtggcctctatatataagctaccactcaaggaggggtctgcgtctgattagctagttggtgaggtaacggctcaccaaggcgacgatcagtagccggtctgagaggatgaacggccacactgggactgagacacggcccagactcctacgggaggcagcagtggggaatcttccgcaatgggcgaaagcctgacggagcaacgccgcgtgagtgaagaaggttttcggattgtaaagctctgtctttcgggacgaatgtgcgggtggtaaataatcactcgtaatgacggtaccgaaggaggaagccacggctaactacgtgccagcagccgcggtaatacgtaggtggcaagcgttgtccggaatgattgggcgtaaagcgcgcgcaggcgggtttataagtctgttgtgaaaatgcggggctcaaccccgtagggtcaatggaaactgtaaatcttgagtgcaggagaggaaagcggaattcccagtgtagcggtgaaatgcgtagatattgggaggaacaccagtggcgaaggcggctttctggactgttactgacgctgaggcgcgaaagccagggtagtgaacgggattagataccccggtaatcctggccgtaaacgatgggtactaggtgtaggaggtatcgacccctcctgtgccggagttaacgcaataagtaccccgcctggggagtacggccgcaaggttgaaactcaaaggaattgacgggggcccgcacaagcggtggagtatgtggtttaattcgacgcaacgcgaagaaccttaccagggcttgacatcgcctgaagatcctagagatagggagttcccttcggggacaggtagacaggtggtgcatggctgtcgtcagctcgtgtcgtgagatgttgggttaagtcccgcaacgagcgcaacccttattctttgttgccagcacgtaaaggtgggcactcagaggagactgccgcagacaatgcggaggaaggcggggatgacgtcaagtcatcatgccccttatgtcctgggctacacacgtactacaatgggctctaacagagggaagcaaagccgcgaggccaagccaatcccaaaaacgagctctcagttcggatcggaggctgcaactcgcctccgtgaagtcggaatcgctagtaatcgcagatcagcatgctgcggtgaatacgttcccgggccttgtacacaccgcccgtcacaccacgaaagttggaaatacccgaagccggtggggtaactcgcaagagagccagccgtcgaaggtagggccgatgattggggtg

SEQ ID NO: 435 - DNA, 1453 bp, Achromobacter agilis
attgaacgctagcgggatgccttacacatgcaagtcgaacggcagcacggacttcggtctggtggcgagtggcgaacgggtgagtaatgtatcggaacgtgcctagtagcgggggataactacgcgaaagcgtagctaataccgcatacgccctacgggggaaagcaggggatcgcaagaccttgcactattagagcggccgatatcggattagctagttggtggggtaacggctcaccaaggcgacgatccgtagctggtttgagaggacgaccagccacactgggactgagacacggcccagactcctacgggaggcagcagtggggaattttggacaatgggggaaaccctgatccagccatcccgcgtgtgcgatgaaggccttcgggttgtaaagcacttttggcaggaaagaaacgtcgcgggttaataccccgcggaactgacggtacctgcagaataagcaccggctaactacgtgccagcagccgcggtaatacgtagggtgcaagcgttaatcggaattactgggcgtaaagcgtgcgcaggcggttcggaaagaaagatgtgaaatcccagagcttaactttggaactgcatttttaactaccgggctagagtgtgtcagagggaggtggaattccgcgtgtagcagtgaaatgcgtagatatgcggaggaacaccgatggcgaaggcagcctcctgggataacactgacgctcatgcacgaaagcgtggggagcaaacaggattagataccctggtagtccacgccctaaacgatgtcaactagctgttggggccttcgggccttggtagcgcagctaacgcgtgaagttgaccgcctggggagtacggtcgcaagattaaaactcaaaggaattgacggggacccgcacaagcggtggatgatgtggattaattcgatgcaacgcgaaaaaccttacctacccttgacatgtctggaatcctgaagagatttaggagtgctcgcaagagaaccggaacacaggtgctgcatggctgtcgtcagctcgtgtcgtgagatgttgggttaagtcccgcaacgagcgcaacccttgtcattagttgctacgaaagggcactctaatgagactgccggtgacaaaccggaggaaggtggggatgacgtcaagtcctcatggcccttatgggtagggcttcacacgtcatacaatggtcgggacagagggtcgccaacccgcgagggggagccaatcccagaaacccgatcgtagtccggatcgcagtctgcaactcgactgcgtgaagtcggaatcgctagtaatcgcggatcagcatgtcgcggtgaatacgttcccgggtcttgtacacaccgcccgtcacaccatgggagtgggttttaccagaagtagttagcctaaccgcaaggagggcgattaccacggtaggattcatgactggggtg

SEQ ID NO: 436 - DNA, 1414 bp, Achromobacter aloeverae
attgaacgctagcgggatgccttacacatgcaagtcgaacggcagcacggacttcggtctggtggcgagtggcgaacgggtgagtaatgtatcggaacgtgcccagtagcgggggataactacgcgaaagcgtagctaataccgcatacgccctacgggggaaagcgggggatcgcaagacctcgcactattggagcggccgatatcggattagctagttggtgaggtaaaggctcaccaaggcgacgatccgtagctggtttgagaggacgaccagccacactgggactgagacacggcccagactcctacgggaggcagcagtggggaattttggacaatgggtgcaaccctgatccagccatcccgcgtgtgcgatgaaggccttcgggttgtaaagcacttttggcaggaaagaaacggcgctggttaatacctggcgcaactgacggtacctgcagaataagcaccggctaactacgtgccagcagccgcggtaatacgtagggtgcaagcgttaatcggaattactgggcgtaaagcgtgcgcaggcggttcggaaagaaagatgtgaaatcccagagcttaactttggaactgcatttttaactaccgagctagagtgtgtcagaggggggtggaattccacgtgtagcagtgaaatgcgtagatatgtggaggaacaccgatggcgaaggcagccccctgggataacactgacgctcatgcacgaaagcgtggggagcaaacaggattagataccctggtagtccacgccctaaacgatgtcaactagctgttggggccttcgggccttggtagcgcagctaacgcgtgaagttgaccgcctggggagtacggtcgcaagattaaaactcaaaggaattgacggggacccgcacaagcggtggatgatgtggattaattcgatgcaacgcgaaaaaccttacctacccttgacatgtctggaatgccgaagagatttggcagtgctcgcaagagaaccggaacacaggtgctgcatggctgtcgtcagctcgtgtcgtgagatgttgggttaagtcccgcaacgagcgcaacccttgtcattagttgctacgaaagggcactctaatgagactgccggtgacaaaccggaggaaggtggggatgacgtcaagtcctcatggcccttatgggtagggcttcacacgtcatacaatggtcgggacagagggtcgccaacccgcgagggggagccaatcccagaaacccgatcgtagtccggatcgcagtctgcaactcgactgcgtgaagtcggaatcgctagtaatcgcggatcagcatgtcgcggtgaatacgttcccgggtcttgtacacaccgcccgtcacaccatgggagtgggttttaccagaagtagtagcttaacccgca

SEQ ID NO: 437 - DNA, 1452 bp, Achromobacter denitrificans
attgaacgctagcgggatgccttacacatgcaagtcgaacggcagcacggacttcgtctggtggcgagtggcgaacgggtgagtaatgtatcggaacgtgcccagtagcgggggataactacgcgaaagcgtagctaataccgcatacgccctacgggggaaagcaggggatcgcaagaccttgcactattggagcggccgatatcggattagctagttggtggggtaacggctcaccaaggcgacgatccgtagctggtttgagaggacgaccagccacactgggactgagacacggcccagactcctacgggaggcagcagtggggaattttggacaatgggggaaaccctgatccagccatcccgcgtgtgcgatgaaggccttcgggttgtaaagcacttttggcaggaaagaaacgtcgtgggttaataccccgcggaactgacggtacctgcagaataagcaccggctaactacgtgccagcagccgcggtaatacgtagggtgcaagcgttaatcggaattactgggcgtaaagcgtgcgcaggcggttcggaaagaaagatgtgaaatcccagagcttaactttggaactgcatttttaactaccgggctagagtgtgtcagagggaggtggaattccgcgtgtagcagtgaaatgcgtagatatgcggaggaacaccgatggcgaaggcagcctcctgggataacactgacgctcatgcacgaaagcgtggggagcaaacaggattagataccctggtagtccacgccctaaacgatgtcaactagctgttggggccttcgggccttggtagcgcagctaacgcgtgaagttgaccgcctggggagtacggtcgcaagattaaaactcaaaggaattgacggggacccgcacaagcggtggatgatgtggattaattcgatgcaacgcgaaaaaccttacctacccttgacatgtctggaatcctgaagagatttaggagtgctcgcaagagaaccggaacacaggtgctgcatggctgtcgtcagctcgtgtcgtgagatgttgggttaagtcccgcaacgagcgcaacccttgtcattagttgctacgaaagggcactctaatgagactgccggtgacaaaccggaggaaggtggggatgacgtcaagtcctcatggcccttatgggtagggcttcacacgtcatacaatggtcgggacagagggtcgccaacccgcgagggggagccaatcccagaaacccgatcgtagtccggatcgcagtctgcaactcgactgcgtgaagtcggaatcgctagtaatcgcggatcagcatgtcgcggtgaatacgttcccgggtcttgtacacaccgcccgtcacaccatgggagtgggttttaccagaagtagttagcctaaccgcaaggagggcgattaccacggtaggattcatgactggggag

SEQ ID NO: 438 - DNA, 1453 bp, Achromobacter insolitus
attgaacgctagcgggatgccttacacatgcaagtcgaacggcagcacggacttcggtctggtggcgagtggcgaacgggtgagtaatgtatcggaacgtgcccagtagcgggggataactacgcgaaagcgtagctaataccgcatacgccctacgggggaaagcaggggatcgtaagaccttgcactattggagcggccgatatcggattagctagttggtggggtaacggctcaccaaggcgacgatccgtagctggtttgagaggacgaccagccacactgggactgagacacggcccagactcctacgggaggcagcagtggggaattttggacaatgggggaaaccctgatccagccatcccgcgtgtgcgatgaaggccttcgggttgtaaagcacttttggcaggaaagaaacgtcgtgggttaataccccgcgaaactgacggtacctgcagaataagcaccggctaactacgtgccagcagccgcggtaatacgtagggtgcaagcgttaatcggaattactgggcgtaaagcgtgcgcaggcggttcggaaagaaagatgtgaaatcccagagcttaactttggaactgcatttttaactaccgagctagagtgtgtcagagggaggtggaattccgcgtgtagcagtgaaatgcgtagatatgcggaggaacaccgatggcgaaggcagcctcctgggataacactgacgctcatgcacgaaagcgtggggagcaaacaggattagataccctggtagtccacgccctaaacgatgtcaactagctgttggggccttcgggccttggtagcgcagctaacgcgtgaagttgaccgcctggggagtacggtcgcaagattaaaactcaaaggaattgacggggacccgcacaagcggtggatgatgtggattaattcgatgcaacgcgaaaaaccttacctacccttgacatgtctggaattccgaagagatttggaagtgctcgcaagagaaccggaacacaggtgctgcatggctgtcgtcagctcgtgtcgtgagatgttgggttaagtcccgcaacgagcgcaacccttgtcattagttgctacgaaagggcactctaatgagactgccggtgacaaaccggaggaaggtggggatgacgtcaagtcctcatggcccttatgggtagggcttcacacgtcatacaatggtcgggacagagggtcgccaacccgcgagggggagccaatcccagaaacccgatcgtagtccggatcgcagtctgcaactcgactgcgtgaagtcggaatcgctagtaatcgcggatcagcatgtcgcggtgaatacgttcccgggtcttgtacacaccgcccgtcacaccatgggagtgggttttaccagaagtagttagcctaaccgtaaggggggcgattaccacggtaggattcatgactggggtg

SEQ ID NO: 439 - DNA, 1453 bp, Achromobacter insuavis
attgaacgctagcgggatgccttacacatgcaagtcgaacggcagcacggacttcggtctggtggcgagtggcgaacgggtgagtaatgtatcggaacgtgcccagtagcgggggataactacgcgaaagcgtagctaataccgcatacgccctacgggggaaagcaggggatcgcaagaccttgcactattggagcggccgatatcggattagctagttggtggggtaacggctcaccaaggcgacgatccgtagctggtttgagaggacgaccagccacactgggactgagacacggcccagactcctacgggaggcagcagtggggaattttggacaatgggggaaaccctgatccagccatcccgcgtgtgcgatgaaggccttcgggttgtaaagcacttttggcaggaaagaaacgtcatgggttaataccccgtgaaactgacggtacctgcagaataagcaccggctaactacgtgccagcagccgcggtaatacgtagggtgcaagcgttaatcggaattactgggcgtaaagcgtgcgcaggcggttcggaaagaaagatgtgaaatcccagagcttaactttggaactgcatttttaactaccgggctagagtgtgtcagagggaggtggaattccgcgtgtagcagtgaaatgcgtagatatgcggaggaacaccgatggcgaaggcagcctcctgggataacactgacgctcatgcacgaaagcgtggggagcaaacaggattagataccctggtagtccacgccctaaacgatgtcaactagctgttggggccttcgggccttggtagcgcagctaacgcgtgaagttgaccgcctggggagtacggtcgcaagattaaaactcaaaggaattgacggggacccgcacaagcggtggatgatgtggattaattcgatgcaacgcgaaaaaccttacctacccttgacatgtctggaatgccgaagagatttggcagtgctcgcaagagaaccggaacacaggtgctgcatggctgtcgtcagctcgtgtcgtgagatgttgggttaagtcccgcaacgagcgcaacccttgtcattagttgctacgaaagggcactctaatgagactgccggtgacaaaccggaggaaggtggggatgacgtcaagtcctcatggcccttatgggtagggcttcacacgtcatacaatggtcgggacagagggtcgccaacccgcgagggggagccaatcccagaaacccgatcgtagtccggatcgcagtctgcaactcgactgcgtgaagtcggaatcgctagtaatcgcggatcagcatgtcgcggtgaatacgttcccgggtcttgtacacaccgcccgtcacaccatgggagtgggttttaccagaagtagttagcctaaccgcaaggggggcgattaccacggtaggattcatgactggggtg

SEQ ID NO: 440 - DNA, 1378 bp, Achromobacter marplatensis
gtcgaacggcagcacggacttcggtctggtggcgagtggcgaacgggtgagtaatgtatcggaacgtgcctagtagcgggggataactacgcgaaagcgtagctaataccgcatacgccctacgggggaaagcaggggatcgcaagaccttgcactattagagcggccgatatcggattagctagttggtggggtaacggctcaccaaggcgacgatccgtagctggtttgagaggacgaccagccacactgggactgagacacggcccagactcctacgggaggcagcagtggggaattttggacaatgggggaaaccctgatccagccatcccgcgtgtgcgatgaaggccttcgggttgtaaagcacttttggcaggaaagaaacgtcatgggttaataccccgtgaaactgacggtacctgcagaataagcaccggctaactacgtgccagcagccgcggtaatacgtagggtgcaagcgttaatcggaattactgggcgtaaagcgtgcgcaggcggttcggaaagaaagatgtgaaatcccagagcttaactttggaactgcatttttaactaccgggctagagtgtgtcagagggaggtggaattccgcgtgtagcagtgaaatgcgtagatatgcggaggaacaccgatggcgaaggcagcctcctgggataacactgacgctcatgcacgaaagcgtggggagcaaacaggattagataccctggtagtccacgccctaaacgatgtcaactagctgttggggccttcgggccttagtagcgcagctaacgcgtgaagttgaccgcctggggagtacggtcgcaagattaaaactcaaaggaattgacggggacccgcacaagcggtggatgatgtggattaattcgatgcaacgcgaaaaaccttacctacccttgacatgtctggaattccgaagagatttggaagtgctcgcaagagaaccggaacacaggtgctgcatggctgtcgtcagctcgtgtcgtgagatgttgggttaagtcccgcaacgagcgcaacccttgtcattagttgctacgaaagggcactctaatgagactgccggtgacaaaccggaggaaggtggggatgacgtcaagtcctcatggcccttatgggtagggcttcacacgtcatacaatggtcgggacagagggtcgccaacccgcgagggggagccaatcccagaaacccgatcgtagtccggatcgcagtctgcaactcgactgcgtgaagtcggaatcgctagtaatcgcggatcagcatgtcgcggtgaatacgttcccgggtcttgtacacaccgcccgtcacaccatgggagtgggttttaccagaagtagttagcctaacc

SEQ ID NO: 441 - DNA, 1453 bp, Achromobacter piechaudii
attgaacgctagcgggatgccttacacatgcaagtcgaacggcagcacggacttcggtctggtggcgagtggcgaacgggtgagtaatgtatcggaacgtgcctagtagcgggggataactacgcgaaagcgtagctaataccgcatacgccctacgggggaaagcaggggatcgtaagaccttgcactattagagcggccgatatcggattagctagttggtggggtaatggctcaccaaggcgacgatccgtagctggtttgagaggacgaccagccacactgggactgagacacggcccagactcctacgggaggcagcagtggggaattttggacaatgggggaaaccctgatccagccatcccgcgtgtgcgatgaaggccttcgggttgtaaagcacttttggcaggaaagaaacgtcatgggctaataccccgtgaaactgacggtacctgcagaataagcaccggctaactacgtgccagcagccgcggtaatacgtagggtgcaagcgttaatcggaattactgggcgtaaagcgtgcgcaggcggttcggaaagaaagatgtgaaatcccagagcttaactttggaactgcatttttaactaccgagctagagtgtgtcagagggaggtggaattccgcgtgtagcagtgaaatgcgtagatatgcggaggaacaccgatggcgaaggcagcctcctgggataacactgacgctcatgcacgaaagcgtggggagcaaacaggattagataccctggtagtccacgccctaaacgatgtcaactagctgttggggccttcgggccttggtagcgcagctaacgcgtgaagttgaccgcctggggagtacggtcgcaagattaaaactcaaaggaattgacggggacccgcacaagcggtggatgatgtggattaattcgatgcaacgcgaaaaaccttacctacccttgacatgtctggaattccgaagagatttggaagtgctcgcaagagaactggaacacaggtgctgcatggctgtcgtcagctcgtgtcgtgagatgttgggttaagtcccgcaacgagcgcaacccttgtcattagttgctacgaaagggcactctaatgagactgccggtgacaaaccggaggaaggtggggatgacgtcaagtcctcatggcccttatgggtagggcttcacacgtcatacaatggtcgggacagagggtcgccaacccgcgagggggagccaatcccagaaacccgatcgtagtccggatcgcagtctgcaactcgactgcgtgaagtcggaatcgctagtaatcgcggatcagcatgtcgcggtgaatacgttcccgggtcttgtacacaccgcccgtcacaccatgggagtgggttttaccagaagtagttagcctaaccgcaaggggggcgattaccacggtaggattcatgactggggtg

SEQ ID NO: 442 - DNA, 1453 bp, Achromobacter pulmonis
attgaacgctagcgggatgccttacacatgcaagtcgaacggcagcacggacttcggtctggtggcgagtggcgaacgggtgagtaatgtatcggaacgtgcccagtagcgggggataactacgcgaaagcgtagctaataccgcatacgccctacgggggaaagcaggggatcgcaagaccttgcactattggagcggccgatatcggattagctagttggtggggtaacggctcaccaaggcgacgatccgtagctggtttgagaggacgaccagccacactgggactgagacacggcccagactcctacgggaggcagcagtggggaattttggacaatgggggaaaccctgatccagccatcccgcgtgtgcgatgaaggccttcgggttgtaaagcacttttggcaggaaagaaacgtcgcgggttaataccccgcggaactgacggtacctgcagaataagcaccggctaactacgtgccagcagccgcggtaatacgtagggtgcaagcgttaatcggaattactgggcgtaaagcgtgcgcaggcggttcggaaagaaagatgtgaaatcccagagcttaactttggaactgcatttttaactaccgggctagagtgtgtcagagggaggtggaattccgcgtgtagcagtgaaatgcgtagatatgcggaggaacaccgatggcgaaggcagcctcctgggataacactgacgctcatgcacgaaagcgtggggagcaaacaggattagataccctggtagtccacgccctaaacgatgtcaactagctgttggggtcttcggaccttggtagcgcagctaacgcgtgaagttgaccgcctggggagtacggtcgcaagattaaaactcaaaggaattgacggggacccgcacaagcggtggatgatgtggattaattcgatgcaacgcgaaaaaccttacctacccttgacatgtctggaatgccgaagagatttggcagtgctcgcaagagaactggaacacaggtgctgcatggctgtcgtcagctcgtgtcgtgagatgttgggttaagtcccgcaacgagcgcaacccttgtcattagttgctacgaaagggcactctaatgagactgccggtgacaaaccggaggaaggtggggatgacgtcaagtcctcatggcccttatgggtagggcttcacacgtcatacaatggtcgggacagagggtcgccaacccgcgagggggagccaatcccagaaacccgatcgtagtccggatcgcagtctgcaactcgactgcgtgaagtcggaatcgctagtaatcgcggatcagcatgtcgcggtgaatacgttcccgggtcttgtacacaccgcccgtcacaccatgggagtgggttttaccagaagtagttagcctaaccgcaaggggggcgattaccacggtaggattcatgactggggtg

SEQ ID NO: 443 - DNA, 1317 bp, Achromobacter ruhlandii
  misc_feature (133)..(133): n is a, c, g, or t
  misc_feature (552)..(553): n is a, c, g, or t
atgcttacacatgcaagtcgaacggcagcacggacttcggtctggtggcgagtggcgaacgggtgagtaatgtatcggaacgtgcccagtagcgggggataactacgcgaaagcgtagctaataccgcatacnccctacgggggaaagcaggggatcgcaagaccttgcactattggagcggccgatatcggattagctagttggtggggtaacggctcaccaaggcgacgatccgtagctggtttgagaggacgaccagccacactgggactgagacacggcccagactcctacgggaggcagcagtggggaattttggacaatgggggaaaccctgatccagccatcccgcgtgtgcgatgaaggccttcgggttgtaaagcacttttggcaggaaagaaacgtcgtgggttaataccccgcggaactgacggtacctgcagaataagcaccggctaactacgtgccagcagccgcggtaatacgtagggtgcaagcgttaatcggaattactgggcgtaaagcgtgcgcaggcggttcggaaagaaagnngtgaaatcccagagcttaactttggaactgcatttttaactaccgggctagagtgtgtcagagggaggtggaattccgcgtgtagcagtgaaatgcgtagatatgcggaggaacaccgatggcgaaggcagcctcctgggataacactgacgctcatgcacgaaagcgtggggagcaaacaggattagataccctggtagtccacgccctaaacgatgtcaactagctgttggggcttcgggcttggtagcgcaataacgcgtgaagttgaccgcctggggagtacggtcgcaagattaaaactcaaaggaattgacggggacccgcacaagcggtggatgatgtggattaattcgatgcaacgcgaaaaaccttacctacccttgacatgtctggaatcctgaagagatttaggagtgctcgcaagagaaccggaacacaggtgctgcatggctgtcgtcagctcgtgtcgtgagatgttgggttaagtcccgcaacgagcgcaacccttgtcattagttgctacgaaagggcactctaatgagactgccggtgacaaaccggaggaaggtggggatgacgtcaagtcctcatggcccttatgggtagggcttcacacgtcatacaatggtcgggacagagggtcgccaacccgcgagggggagccaatcccagaaacccgatcgtagtccggatcgcagtctgcaactcgactgcgtgaagtcggaatcgctagtaatcgcggatcagcatgtcgcggtgaa

SEQ ID NO: 444 - DNA, 1446 bp, Achromobacter spanius
  misc_feature (1413)..(1413): n is a, c, g, or t
attgaacgctagcgggatgccttacacatgcaagtcgaacggcagcacggacttcggtctggtggcgagtggcgaacgggtgagtaatgtatcggaacgtgcctagtagcgggggataactacgcgaaagcgtagctaataccgcatacgccctacgggggaaagcaggggatcgcaagaccttgcactattagagcggccgatatcggattagctagttggtggggtaacggctcaccaaggcgacgatccgtagctggtttgagaggacgaccagccacactgggactgagacacggcccagactcctacgggaggcagcagtggggaattttggacaatgggggaaaccctgatccagccatcccgcgtgtgcgatgaaggccttcgggttgtaaagcacttttggcaggaaagaaacgtcatgggctaataccccgtgaaactgacggtacctgcagaataagcaccggctaactacgtgccagcagccgcggtaatacgtagggtgcaagcgttaatcggaattactgggcgtaaagcgtgcgcaggcggttcggaaagaaagatgtgaaatcccagagcttaactttggaactgcatttttaactaccgagctagagtgtgtcagagggaggtggaattccgcgtgtagcagtgaaatgcgtagatatgcggaggaacaccgatggcgaaggcagcctcctgggataacactgacgctcatgcacgaaagcgtggggagcaaacaggattagataccctggtagtccacgccctaaacgatgtcaactagctgttggggccttcgggccttggtagcgcagctaacgcgtgaagttgaccgcctggggagtacggtcgcaagattaaaactcaaaggaattgacggggacccgcacaagcggtggatgatgtggattaattcgatgcaacgcgaaaaaccttacctacccttgacatgtctggaattccgaagagatttggaagtgctcgcaagagaaccggaacacaggtgctgcatggctgtcgtcagctcgtgtcgtgagatgttgggttaagtcccgcaacgagcgcaacccttgtcattagttgctacgaaagggcactctaatgagactgccggtgacaaaccggaggaaggtggggatgacgtcaagtcctcatggcccttatgggtagggcttcacacgtcatacaatggtcgggacagagggtcgccaacccgcgagggggagccaatcccagaaacccgatcgtagtccggatcgcagtctgcaactcgactgcgtgaagtcggaatcgctagtaatcgcggatcagcatgtcgcggtgaatacgttcccgggtcttgtacacaccgcccgtcacaccatgggagtgggttttaccagaagtagttagcctaaccgnaaggggggcgattaccacggtaggattcatgac

SEQ ID NO: 445 - DNA, 1452 bp, Acidaminobacter hydrogenoformans
  misc_feature (251)..(251): n is a, c, g, or t
  misc_feature (980)..(980): n is a, c, g, or t
gatgacgctggcggcgtgcctaacacatgcaagtcgagcgcgattagttggaacggcgacttcggtcaaagggaagactatgaaagcggcggacgggtgagtaacgcgtgagcaacctgccctgtacagggggatagccactggaaacggtgattaataccccataaccccattggatcgcatggtctgatgggcaaagccttggcggtacaggatgggctcgcgtctgattagctagttggtgaggtaanggctcaccaaggcttcgatcagtagccgacctgagagggtgaacggccacactggaactgagacacggtccagactcctacgggaggcagcagtggggaatattgcacaatgggcgcaagcctgatgcagcaacgccgcgtgagtgaagaaggccttcgggtcgtaaaactctgtcctaagggaagaagaagtgacggtaccttaggaggaagccccggctaactacgtgccagcagccgcggtaatacgtagggggcaagcgttatccggaatcactgggcgtaaagggtgcgtaggcggctgatcaagccaggggtgaaaggctgtggcttaaccatggtaagcctttggaactggtcagcttgagtgcaggagaggaaagcggaattcctagtgtagcggtgaaatgcgtagatattaggaggaacacccgtggcgaaggcggctttctggactgtaactgacgctgaggcacgaaagcgtggggagcaaacaggattagataccctggtagtccacgctgtaaacgatgaatactaggtgtcgggggtcaaagcccggtgccgcagctaacgcattaagtattccgcctggggagtacggtcgcaagactgaaactcaaaggaattgacggggacccgcacaagcagcggagcatgtggtttaattcgaagcaacgcgaagaaccttaccaggtcttgacatccctctgactggcgcttagcagngcagttccttcgggacagaggagacaggtggtgcatggttgtcgtcagctcgtgtcgtgagatgttgggttaagtcccgcaacgagcgcaacccttgcctttagttgccagcacataatggtgggcactctagagggactgccggtgacaaaccggaggaaggtggggatgacgtcaaatcatcatgccccttatgatctgggctacacacgtgctacaatggccggtacaacgagaagcgaaaccgcgaggtgaagcaaatcttacaaagccggtcccagttcggattgcaggctgaaactcgcctgcatgaagttggagttgctagtaatcacggatcagcatgccgtggtgaatgcgttcccgggtcttgtacacaccgcccgtcacaccatggaagttggggggacccgaagccagtgatccaaccgtaaggaggaagctgtcgaaggtaaaaccaatgactggggtg

SEQ ID NO: 446 - DNA, 1465 bp, Acidibacillus ferrooxidans
gacgaacgctggcggcgtgcctaatacatgcaagtcgagcgctcttttccttcggggaaagggagcggcggacgggtgagtaacacgtgggtaacctgccgttcagatggggataacgcctggaaacgggtgctaatcccgaatgggatccctgctcgcatgggcggggaaggaaaggcgcttctggcgtcgctgaacgatgggcccgcggcgcattagctagttggtggggtaacggcctaccaaggcgacgatgcgtagccgacctgagagggtgaccggccacactgggactgagacacggcccagactcctacgggaggcagcagtagggaatcttccgcaatgggcgaaagcctgacggagcaacgccgcgtgaatgaagacggtcttcggattgtaaagttctgtcatttgggacgagcgaccttgagaggaaatgctcaaggtgagacggtaccaaaggaggaagccccggctaactacgtgccagcagccgcggtaatacgtagggggcaagcgttgtccggaatgactgggcgtaaagcgcgcgcaggcggtctttcgcgtctggggtgaaaggtcagggctcaaccctgacatggccttggaaacggggagacttgagggtcggagaggtcaggggaattccacgtgtagcggtgaaatgcgtagatatgtggaggaataccagtggcgaaggcgcctgactggacgaaacctgacgctgaggcgcgaaggcgtggggagcaaacaggattagataccctggtagtccacgcggtaaacgatgagtgctaggtgtcggagggtaccacctccggtgccgaaggaaacccactaagcactccgcctggggagtacggtcgcaagactgaaactcaaaggaattgacgggggcccgcacaagcagtggagcatgtggtttaattcgaagcaacgcgaagaaccttaccagggcttgacatcggcgtgacgggatcagagatgatccgtcccttcggggcacgctagacaggtggtgcatggttgtcgtcagctcgtgtcgtgagatgttgggttaagtcccgcaacgagcgcaacccttgatcgatgttaccagcgcgtaaaggcggggactcatcgatgactgccggtgacaaaccggaggaaggcggggatgacgtcaaatcatcatgccccttatgtcctgggctacacacgtgctacaatgggcggtacaacgggaagcgagaccgcgaggtggagcgaaacccaaaaagccgttcatagttcggattgcaggctgcaactcgcctgcatgaagccggaattgctagtaatcgcggatcagcatgccgcggtgaatacgttcccgggccttgtacacaccgcccgtcacaccacgagagtgggtaacacccgaagtcggtgaggtaacccgcaagggggccagccgccgaaggtgggattcgcgattggggtg

SEQ ID NO: 447 - DNA, 1455 bp, Acidiferrobacter thiooxydans
attgaacgctggcggcatgcttaacacatgcaagtcgaacgcgaaagggggcaaccccgagtagagtggcggacgggtgagtaacgcgtaggaatctgcccagtagtgggggataacccggcgaaagccgggctaataccgcatatgccctatggggcaaagcaggggatcttcggaccttgcgctattggatgagcctgcgtcggattagctagttggtagggtaaaggcctaccaaggcgacgatccgtagctggtctgagaggatgatcagccacactgggactgagacacggcccagactcctacgggaggcagcagtggggaatattggacaatgggggaaaccctgatccagcaatgccgcgtgtgtgaagaaggccttcgggttgtaaagcactttcagtagggaagaaaaaagcctggctaatatccaggctcttgacggtacctaaagaggaagcaccggctaactctgtgccagcagccgcggtaatacagagggtgcaagcgttaatcggaattactgggcgtaaagcgtgcgtaggtggttcggtaagtcagatgtgaaagccctgggcttaacctgggaattgcgtttgatactgtcggactagagtttggtagagggaagtggaattccacgtgtagcggtgaaatgcgtagatatgtggaggaacaccagtggcgaaggcggcttcctggactaaaactgacactgaggcacgaaagcgtggggagcaaacaggattagataccctggtagtccacgccgtaaacgatgggtactagacgttgggaggtttaaccttctagtgtcgcagctaacgcaataagtaccccgcctggggagtacggccgcaaggttaaaactcaaaggaattgacgggggcccgcacaagcggtggagcatgtggtttaactcgatgcaacgcgaaaaaccttacctgcccttgacatgtgaggaaccttccagagatgggagggtgcccgcaagggagcctcaacacaggtgctgcatggctgtcgtcagctcgtgtcgtgagatgttgggttaagtcccgtaacgagcgcaacccttgcccttagttgccatcatttagttgggcactctaaggggaccgccggtgacaaaccggaggaaggtggggatgacgtcaagtcatcatggcccttatgggcagggctacacacgtgctacaatggccggtacagagggttgccaacccgcgagggggagctaatcccagaaagccggtcgtagtccggattggagtctgcaactcgactccatgaagtcggaatcgctagtaatcgcgaatcagcatgtcgcggtgaatacgttcccgggccttgtacacaccgcccgtcacaccatgggagttggttgtaccagaagcaggtagcctaaccgcaaggagggcgcctaccacggtatggtcaatgactggggtg

SEQ ID NO: 448 - DNA, 1458 bp, Acidihalobacter prosperus
attgaacgctggcggcatgcttaacacatgcaagtcgaacggtaacaggcccttcggggtgctgacgagtggcggacgggtgagtaacgcgtgggaatctgcctagtagtgggggatagcccggagaaatccggattaataccgcatacgccctacggggaaagcaggggatcttcggaccttgcgctattagatgagcccgcgtctgattagcttgttggtggggtaatggcccaccaaggcgacgatcagtagctggtctgagaggatgatcagccacactgggactgagacacggcccagactcctacgggaggcagcagtggggaatattggacaatgggcgaaagcctgatccagcaatgccgcgtgtgtgaagaaggcctgcgggttgtaaagcactttcagtagggaagaaaagcctaaggttaatacccttgagtcttgacgttacctacagaagaagcaccggctaactccgtgccagcagccgcggtaatacggagggtgcgagcgttaatcggaattactgggcgtaaagcgtgcgtaggcggctgggtaagtcagatgtgaaagcctgggcttaacctgggaactgcatctgatactgcttggctagagtctggtagagggtagcggaattcccggtgtagcggtgaaatgcatagatatcgggaggaacatcagtggcgaaggcggctacctggcccaagactgacgctgaggcacgaaagcgtggggagcaaacaggattagataccctggtagtccacgctgtaaacgatgagaactagccgttgggggtatttacacccttagtggcgtagctaacgcgttaagttctccgcctggggagtacggccgcaaggttgaaactcaaaggaattgacgggggcccgcacaagcggtggagcatgtggtttaattcgatgcaacgcgaagaaccttacctgccttgacatcctcggaacttgtcagagatgacttggtgccttcgggaaccgagagacaggtgctgcatggctgtcgtcagctcgtgtcgtgagatgttgggttaagtcccgcaacgagcgcaacccttgtccctagttgccagcacgtaatggtgggaactctagggagactgccggtgacaaaccggaggaaggtggggatgacgtcaagtcatcatggcccttatgggcagggctacacacgtgctacaatggtcagtacaaagggttgccaacccgcgagggggagctaatcccaaaaagctgatcgtagtccggattggagtctgcaactcgactccatgaagtcggaatcgctagtaatcgcagatcagcattgctgcggtgaatacgttcccgggccttgtacacaccgcccgtcacaccatgggagtgggctgcaccagaagccggtagtctaaccttcgggagggcgccgtccacggtgtggtcgatgactggggtg

SEQ ID NO: 449 - DNA, 1413 bp, Acidiphilium cryptum
agcgaacgctggcggcatgcttaacacatgcaagtcgcacgggcagggcaacctgtcagtggcggacgggtgagtaacgcgtaggaatctatccttgggtgggggacaaccgtgggaaactacggctaataccgcatgatccctgaggggcaaaggcgaaagtcgcctgaggaggagcctgcgtctgattaggtagttggtggggtaaaggcctaccaagcctgcgatcagtagctggtctgagaggatgatcagccacactgggactgagacacggcccagactcctacgggaggcagcagtggggaatattggacaatgggcgaaagcctgatccagcaatgccgcgtggatgaagaaggtcttcggattgtaaagtccttttggcggggacgatgatgacggtacccgcagaataagctccggctaacttcgtgccagcagccgcggtaatacgaagggggctagcgttgctcggaatgactgggcgtaaagggcgcgtaggcggacggcacagtcaggcgtgaaattcctgggctcaacctggggactgcgtctgagacgtgttgtcttgagtatggaagagggttgtggaatttccagtgtagaggtgaaattcgtagatattggaaagaacaccggtggcgaaggcggcaacctggtccattactgacgctgaggcgcgaaagcgtggggagcaaacaggattagataccctggtagtccacgctgtaaacgatgtgtgctggatgttggggtgcttagcacttcagtgtcgtagctaacgcggtaagcacaccgcctggggagtacggccgcaaggttgaaactcaaaggaattgacgggggcccgcacaagcggtggagcatgtggtttaattcgaagcaacgcgcagaaccttaccaggatttgacatggggagtaccggtccagagatggactttcccgcaaggggctcccgcacaggtgctgcatggctgtcgtcagctcgtgtcgtgagatgttgggttaagtcccgcaacgagcgcaaccctcgccttcagttgccagcatgtttgggtgggcactctgaaggaactgccggtgacaagccggaggaaggtggggatgacgtcaagtcctcatggcccttatgtcctgggctacacacgtgctacaatggcggtgacagtgggaagccaggtggtgacaccgagctgatctcaaaaagccgtctcagttcggattgcactctgcaactcgagtgcatgaaggtggaatcgctagtaatcgcggatcagcatgccgcggtgaatacgttcccgggccttgtacacaccgcccgtcacaccatgggatttggtttgaccttaagttggtgcgctaacccgcaagggaggcagccaaccacggtcgggtcagagactggggtg

SEQ ID NO: 450 - DNA, 1413 bp, Acidiphilium multivorum
agcgaacgctggcggcatgcttaacacatgcaagtcgcacgggcagggcaacctgtcagtggcggacgggtgagtaacgcgtaggaatctatccttgggtgggggacaaccgtgggaaactacggctaataccgcatgatccctgaggggcaaaggcgaaagtcgcctggggaggagcctgcgtctgattaggtagttggtggggtaaaggcctaccaagcctgcgatcagtagctggtctgagaggatgatcagccacactgggactgagacacggcccagactcctacgggaggcagcagtggggaatattggacaatgggcgaaagcctgatccagcaatgccgcgtggatgaagaaggtcttcggattgtaaagtccttttggcggggacgatgatgacggtacccgcagaataagctccggctaacttcgtgccagcagccgcggtaatacgaagggggctagcgttgctcggaatgactgggcgtaaagggcgcgtaggcggacggcacagtcaggcgtgaaattcctgggctcaacctggggactgcgtctgagacgtgttgtcttgagtatggaagagggttgtggaatttccagtgtagaggtgaaattcgtagatattggaaagaacaccggtggcgaaggcggcaacctggtccattactgacgctgaggcgcgaaagcgtggggagcaaacaggattagataccctggtagtccacgctgtaaacgatgtgtgctggatgttggggtgcttagcacttcagtgtcgtagctaacgcggtaagcacaccgcctggggagtacggccgcaaggttgaaactcaaaggaattgacgggggcccgcacaagcggtggagcatgtggtttaattcgaagcaacgcgcagaaccttaccaggatttgacatggggagtaccggtccagagatggactttcccgcaaggggctcccgcacaggtgctgcatggctgtcgtcagctcgtgtcgtgagatgttgggttaagtcccgcaacgagcgcaaccctcgccttcagttgccagcatgtttgggtgggcactctgaaggaactgccggtgacaagccggaggaaggtggggatgacgtcaagtcctcatggcccttatgtcctgggctacacacgtgctacaatggcggtgacagtgggaagccaggtggtgacaccgagctgatctcaaaaagccgtctcagttcggattgcactctgcaactcgagtgcatgaaggtggaatcgctagtaatcgcggatcagcatgccgcggtgaatacgttcccgggccttgtacacaccgcccgtcacaccatgggatttggtttgaccttaagttggtgcgctaacccgcaagggaggcagccaaccacggtcgggtcagagactggggtg

SEQ ID NO: 451 - DNA, 1413 bp, Acidiphilium rubrum
agcgaacgctggcggcatgcttaacacatgcaagtcgcacgggcagtagcaatattgtcagtggcggacgggtgagtaacgcgtaggaatctatccttggatgggggacaaccgtgggaaactacggctaataccgcataatgcctgagggccaaagacgtaagtcgtctggggaggagcctgcgtctgattaggtagttggtggggtaaaggcctaccaagcctgcgatcagtagctggtctgagaggatgatcagccacattgggactgagacacggcccaaactcctacgggaggcagcagtggggaatattggacaatgggggcaaccctgatccagcaatgccgcgtgggtgaagaaggttttcggattgtaaagcccttttggcggggacgatgatgacggtacccgcagaataagctccggctaacttcgtgccagcagccgcggtaatacgaagggggctagcgttgctcggaatgactgggcgtaaagggcgcgtaggcggcttacatagttaggcgtgaaattcctgggctcaacctggggactgcgtctaatacatgtaggcttgagtgtgaaagagggtcgtggaatttccagtgtagaggtgaaattcgtagatattggaaagaacaccggtggcgaaggcggcgacctggttcattactgacgctgaggcgcgaaagcgtggggagcaaacaggattagataccctggtagtccacgctgtaaacgatgtgtgctggatgttggggtgcttagcacttcagtgtcgtagctaacgcggtaagcacaccgcctggggagtacggccgcaaggttgaaactcaaaggaattgacgggggcccgcacaagcggtggagcatgtggtttaattcgaagcaacgcgcagaaccttaccaggatttgacatggaagagacgtgcccagagatgggtattcccgcaagggctctttgcacaggtgctgcatggctgtcgtcagctcgtgtcgtgagatgttgggttaagtcccgcaacgagcgcaaccctcgcctttagttgccagcacgtttgggtgggcactctagaggaactgccggtgacaagccggaggaaggtggggatgacgtcaagtcctcatggcccttatgtcctgggctacacacgtgctacaatggcggtgacagtgggaagccaagcagcgatgctgagctgatcctgaaaagccgtctcagttcggattgcactctgcaactcgggtgcatgaaggtggaatcgctagtaatcgcggatcagcatgccgcggtgaatacgttcccgggccttgtacacaccgcccgtcacaccatgggatttggtttgaccttaagttgatgcgctaaccgcaaggaggcagtcaaccacggtcgggtcagagactggggtg

SEQ ID NO: 452 - DNA, 1422 bp, Acidipila dinghuensis
aatcaacgctggcggcgtgcctaacacatgcaagtcgaacgagaaagggacttcggtcctgagtaaagtggcgcacgggtgagtaacacgtgactaacctacccttgagtggggaataactaggagaaatcttagctaataccgcataacacctacgggtcaaaggagcaattcgcttaaggagggggtcgcggcagattagttagttggcggggtaatggcccaccaagacagtgatctgtatccggcctgagagggcgcacggacacactggaactgaaacacggtccagactcctacgggaggcagcagtggggaattttgcgcaatgggggaaaccctgacgcagcaacgccgcgtggaggatgaagtcctttgggacgtaaactcctttcgatcgggacgattatgacggtaccgagagaagaagccccggctaacttcgtgccagcagccgcggtaatacgaggggggcgagcgttgttcggaattattgggcgtaaagggtgcgtaggcggttcggtaagtcttgtgtgaaatcttcgggctcaactcgaagtctgcactcgaaactgccgggcttgagtatgggagaggtgagtggaatttccggtgtagcggtgaaatgcgtagatatcggaaggaacacctgtggcgaaagcggctcactggaccataactgacgctgatgcacgaaagctaggggagcaaacaggattagataccctggtagtcctagccctaaacgatgatcgcttggtgtgacgggtacccaatcccgccgtgccgaagctaacgcgttaagcgatccgcctggggagtacggtcgcaaggctgaaactcaaaggaattgacgggggcccgcacaagcggtggagcatgtggtttaattcgacgcaacgcgaagaaccttacctgggctcgaaatgtagaggaatccggtggaaacatcggcgcttagcaataggcctctatataggtgctgcatggctgtcgtcagctcgtgtcgtgagatgttgggttaagtcccgcaacgagtgcaacccttattaccagttgctaccatttagttgagcactctggtgagaccgcctcggataacggggaggaaggcggggatgacgtcaagtcctcatggcctttatgtccagggctacacacgtgctacaatggtcggtacaaaccgtcgcaaacccgcgagggggagctaatcggaaaaagccgacctcagttcggattacagtctgcaactcgactgtatgaagctggaatcgctagtaatcgcggatcagaatgccgcggtgaatacgttcccgggccttgtacacaccgcccgtcacatcacgaaagtgggttgcactagaagcaggtgagccaaccgcaagggggcagccttccaaggtgtaattcatgattggggtg

SEQ ID NO: 453 - DNA, 1422 bp, Acidipila rosea
aatcaacgctggcggcgtgcctaacacatgcaagtcgaacgagaaagggacttcggtcctgagtacagtggcgcacgggtgagtaacacgtgactaacctacccttgagtgggggataacttcgggaaaccgaggctaataccgcataatacctacgggtcaaaggagcaattcgcttaaggagggggtcgcggtcgattagttagttggtagggtaatggcctaccaagactgtgatcgatatccggcctgagagggcgcacggacacactggaactgaaacacggtccagactcctacgggaggcagcagtggggaattttgcgcaatgggggaaaccctgacgcagcaacgccgcgtggaggatgaagtctcttgggacgtaaactcctttcgaccgggacgataatgacggtaccggaagaagaagccccggctaacttcgtgccagcagccgcggtaatacgaggggggcgagcgttgttcggaattattgggcgtaaagggtgcgtaggcggtttggtaagtcttgtgtgaaatcttcgggctcaactcgaagtctgcacgagaaactgccgggcttgagtatgggagaggtgagtggaatttccggtgtagcggtgaaatgcgtagatatcggaaggaacacctgtggcgaaagcggctcactggaccataactgacgctgatgcacgaaagctaggggagcaaacaggattagataccctggtagtcctagccctaaacgatgatcgcttggtgtgacgggtacccaatcccgccgtgccgaagctaacgcgttaagcgatccgcctggggagtacggtcgcaaggctgaaactcaaaggaattgacgggggcccgcacaagcggtggagcatgtggtttaattcgacgcaacgcgaagaaccttacctgggctcgaaatgtagtggaatccggtggaaacatcggcgcctagcaataggccgctatataggtgctgcatggctgtcgtcagctcgtgtcgtgagatgttgggttaagtcccgcaacgagcgcaacccttattaccagttgctaccatttagttgagcactctggtgagaccgcctcggataacggggaggaaggcggggatgacgtcaagtcctcatggcctttatgtccagggctacacacgtgctacaatggccggtacaaaccgtcgcaaacccgtgagggggagctaatcggaaaaagccggcctcagttcggattacagtctgcaactcgactgtatgaagctggaatcgctagtaatcgcggatcagaacgccgcggtgaatacgttcccgggccttgtacacaccgcccgtcacatcacgaaagtgggttgtactagaagccggtgagccaaccgcaaggaggcagccgtccaaggtgtaattcatgattggggtg

SEQ ID NO: 454 - DNA, 1411 bp, Acidisphaera rubrifaciens
agcgaacgctggcggcatgcttaacacatgcaagtcgcacggccgggcaaccggcagtggcggacgggtgagtaacgcgtaggtatctatccacgggtgggggataactgtgggaaactacagctaataccgcatgacaccttcgggtcaaaggcgcgagtcgcctgtggaggagcctgcgtccgattagctagttggtggggtaaaggcctaccaaggcgacgatcggtagctggtctgagaggatgatcagccacactgggactgagacacggcccagactcctacgggaggcagcagtggggaatattggacaatgggcgaaagcctgatccagcaatgccgcgtgggtgaagaaggtcttcggattgtaaagccctttcggcggggacgatgatgacggtacccgcagaagaagccccggctaacttcgtgccagcagccgcggtaatacgaagggggctagcgttgctcggaatgactgggcgtaaagggcgcgtaggcggttgatacagtcaggcgtgaaattcctgggcttaacctgggggctgcgcttgatacgtattggcttgagtggggaagagggtcgtggaattcccagtgtagaggtgaaattcgtagatattgggaagaacaccggtggcgaaggcggcgacctggtccttgactgacgctgaggcgcgaaagcgtggggagcaaacaggattagataccctggtagtccacgccgtaaacgatgtgcgctggatgttgggtggcctagccactcagtgtcgtagctaacgcgataagcgcaccgcctggggagtacggccgcaaggttgaaactcaaaggaattgacgggggcccgcacaagcggtggagcatgtggtttaattcgaagcaacgcgcagaaccttaccagggcttgacatggggtcgtcatgtccagagatgggcattcccgcaagggcgacctgcacaggtgctgcatggctgtcgtcagctcgtgtcgtgagatgttgggttaagtcccgcaacgagcgcaaccctcgccttcagttgccatcaggtttggctgggcactctgaaggaactgccggtgacaagccggaggaaggtggggatgacgtcaagtcctcatggcccttatgtcctgggctacacacgtgctacaatggcggtgacagtgggaagccaggcagcgatgccgagctgatcccaaaaagccgtctcagttcagattgcactctgcaactcgggtgcatgaaggtggaatcgctagtaatcgcggatcagcatgccgcggtgaatacgttcccgggccttgtacacaccgcccgtcacaccatgggagttggttcgaccttaagccggtgcgcgaactcgcaagagacgcagccgaccacggtcgggtcagcgactggggtg

SEQ ID NO: 455 - DNA, 1460 bp, Acidithiobacillus caldus
attgaacgctggcggcatgcctaacacatgcaagtcggacggcagcaggtccttcgggatgctggcgagtggcggacgggtgagtaatgcgtaggaacctatccttttgtgggggacaacccagggaaacttgggctaataccgcataagccctgagggggaaagcgggggatcttcggacctcgtgctgaaggaggggcctacgtccgattagctagttggtggggtaaaggcctaccaaggcgacgatcggtagctggtctgagaggacgaccagccacactgggactgagacacggcccagactcctacgggaggcagcagtggggaatttttcgcaatgggggcaaccctgacgaagcaatgccgcgtggatgaagaaggccttcgggttgtaaagtcctttcgtgggggacgaaaaggcggatccgaatacggtctgctattgacgtgaacccaagaagaagcaccggctaactccgtgccagcagccgcggtaatacggagggtgcgagcgttaatcggaattactgggcgtaaagggcgcgtaggcggtgggttacgtctgccgtgaaatccccgggctcaacctgggaatggcggtggaaacgggctgactggagtatgggagagggtgatggaattccaggtgtagcggtgaaatgcgtagagatctggaggaacaccagtggcgaaggcggtcacctggcccaatactgacgctgaggcgcgaaagcgtggggagcaaacaggattagataccctggtagtccacgccctaaacgatggatactggatgtttggcgccttaggtgctgagtgtcgtagctaacgcgataagtatcccgcctgggaagtacggccgcaaggttaaaactcaaaggaattgacgggggcccgcacaagcggtggagcatgtggtttaattcgatgcaacgcgaagaaccttacctgggcttgacatgtccggaaccctgcagagatgtgggggtgcccttcggggaatcggaacacaggtgctgcatggctgtcgtcagctcgtgtcgtgagatgttgggttaagtcccgcaacgagcgcaacccttgttcctagttgccagcggttcggccgggcactctagggagactgccggtgacaaaccggaggaaggtggggatgacgtcaagtcctcatggcctttatgtccagggctacacacgtgctacaatggcgcgtacagagggaagccaagccgcgaggtggagcagaccccagaaagcgcgtcgtagttcggattgcagtctgcaactcgactgcatgaagtcggaatcgctagtaatcgcggatcagcatgccgcggtgaatacgttcccgggccttgtacacaccgcccgtcacaccatgggagtggatggtaccagaagccgttagcctaaccttcgggggggcgacgaccacggtatggttcatgactggggtg

SEQ ID NO: 456 - DNA, 1408 bp, Acidithiobacillus ferridurans
ttgaacgctggcggcatgcctaacacatgcaagtcgaacggtaacaggtcttcggatgctgacgagtggcggacgggtgagtaatgcgtaggaatctgtcttttagtgggggacaacccagggaaacttgggctaataccgcatgagccctgagggggaaagcgggggatcttcggacctcgcgctaagggaggagcctacgtctgattagctagttggtagggtaaaggcctaccaaggcgacgatcagtagctggtctgagaggacgaccagccacactgggactgagacacggcccagactcctacgggaggcagcagtggggaatttttcgcaatgggggcaaccctgacgaagcaatgccgcgtggatgaagaaggccttcgggttgtaaagtcctttcgtggaggacgaaaaggcgggttctaatacaatctgctgttgacgtgaatccaagaagaagcaccggctaactccgtgccagcagccgcggtaatacggggggtgcaagcgttaatcggaatcactgggcgtaaagggtgcgtaggcggtacgttaggtctgtcgtgaaatccccgggctcaacctgggaatggcggtggaaaccggcggactagagtatgggagagggtggtggaattccaggtgtagcggtgaaatgcgtagagatctggaggaacatcagtggcgaaggcggccacctggcccaatactgacgctgaggcacgaaagcgtggggagcaaacaggattagataccctggtagtccacgccctaaacgatgaatactagatgtttggtgccacgcgtactgagtgtcgtagctaacgcgataagtattccgcctgggaagtacggccgcaaggttaaaactcaaaggaattgacgggggcccgcacaagcggtggagcatgtggtttaattcgatgcaacgcgaagaaccttacctgggcttgacatgtccggaattctgcagagatgcgggagtgcccttcggggaatcggaacacaggtgctgcatggctgtcgtcagctcgtgtcgtgagatgttgggttaagtcccgcaacgagcgcaacccttgtccttagttgccagcggttcggccgggcactctagggagactgccggtgacaaaccggaggaaggtggggatgacgtcaagtcctcatggcctttatgtccagggctacacacgtgctacaatggcgcgtacagagggaagccaagccgcgaggtggagcagaccccagaaagcgcgtcgtagttcggattgcagtctgcaactcgactgcatgaagtcggaatcgctagtaatcgcggatcagcatgccgcggtgaatacgttcccgggccttgtacacaccgcccgtcacaccatgggagtggatggtaccagaagcagctag

SEQ ID NO: 457 - DNA, 1458 bp, Acidithiobacillus ferrivorans
attgaacgctggcggcatgcctaacacatgcaagtcgaacggtagcaggccttcgggtgctgacgagtggcggacgggtgagtaatgcgtaggaatctgtcttttagtgggggacaacccagggaaacttgggctaataccgcatgagccctgagggggaaagcgggggatcttcggacctcgcgctaagagaagagcctacgtctgattagctagttggtagggtaaaggcctaccaaggcgacgatcagtagctggtctgagaggacgaccagccacactgggactgagacacggcccagactcctacgggaggcagcagtggggaatttttcgcaatgggggcaaccctgacgaagcaatgccgcgtggatgaagaaggccttcgggttgtaaagtcctttcgtgggggacgaaaaggtggttcctaatacgagctgctgttgacgtgaacccaagaagaagcaccggctaactccgtgccagcagccgcggtaatacggggggtgcaagcgttaatcggaatcactgggcgtaaagggtgcgtaggcggtacgttaggtctgtcgtgaaatccccgggctcaacctgggaatggcggtagaaaccggcgaactagagtatgggagagggtggtggaattccaggtgtagcggtgaaatgcgtagagatctggaggaacatcagtggcgaaggcggccacctggcccaatactgacgctgaggcacgaaagcgtggggagcaaacaggattagataccctggtagtccacgccctaaacgatgaatactagatgtttggtacctagcgtactgagtgtcgtagctaacgcgataagtattccgcctgggaagtacggccgcaaggttaaaactcaaaggaattgacgggggcccgcacaagcggtggagcatgtggtttaattcgatgcaacgcgaagaaccttacctgggcttgacatgtccggaatcctgcagagatgcgggagtgcccttcggggaatcggaacacaggtgctgcatggctgtcgtcagctcgtgtcgtgagatgttgggttaagtcccgcaacgagcgcaacccttgtccttagttgccagcggttcggccgggcactctagggagactgccggtgacaaaccggaggaaggtggggatgacgtcaagtcctcatggcctttatgtccagggctacacacgtgctacaatggcgcgtacagagggacgccaaaccgcgaggtggagcagaccccagaaagcgcgtcgtagttcggattgcagtctgcaactcgactgcatgaagtcggaatcgctagtaatcgcggatcagcatgccgcggtgaatacgttcccgggccttgtacacaccgcccgtcacaccatgggagtagattgtaccagaagcggctagcctaaccttcgggagggcggttaccacggtatggtttatgactggggtg

SEQ ID NO: 458 - DNA, 1458 bp, Acidithiobacillus ferrooxidans
attgaacgctggcggcatgcctaacacatgcaagtcgaacggtaacaggtcttcggatgctgacgagtggcggacgggtgagtaatgcgtaggaatctgtcttttagtgggggacaacccagggaaacttgggctaataccgcatgagccctgagggggaaagcgggggatcttcggacctcgcgctaagagaggagcctacgtccgattagctagttggcggggtaaaggcccaccaaggcgacgatcggtagctggtctgagaggacgaccagccacactgggactgagacacggcccagactcctacgggaggcagcagtggggaatttttcgcaatgggggcaaccctgacgaagcaatgccgcgtggatgaagaaggccttcgggttgtaaagtcctttcgtggaggacgaaaaggtgggttctaatacaatctgctattgacgtgaatccaagaagaagcaccggctaactccgtgccagcagccgcggtaatacggggggtgcaagcgttaatcggaatcactgggcgtaaagggtgcgtaggcggtacgttaggtctgtcgtgaaatccccgggctcaacctgggaatggcggtggaaaccggtgtactagagtatgggagagggtggtggaattccaggtgtagcggtgaaatgcgtagagatctggaggaacatcagtggcgaaggcggccacctggcccaatactgacgctgaggcacgaaagcgtggggagcaaacaggattagataccctggtagtccacgccctaaacgatgaatactagatgtttggtgcctagcgtactgagtgtcgtagctaacgcgataagtattccgcctgggaagtacggccgcaaggttaaaactcaaaggaattgacgggggcccgcacaagcggtggagcatgtggtttaattcgatgcaacgcgaagaaccttacctgggcttgacatgtccggaattctgcagagatgcggaagtgcccttcggggaatcggaacacaggtgctgcatggctgtcgtcagctcgtgtcgtgagatgttgggttaagtcccgcaacgagcgcaacccttgtccttagttgccagcggttcggccgggcactctagggagactgccggtgacaaaccggaggaaggtggggatgacgtcaagtcctcatggcctttatgtccagggctacacacgtgctacaatggcgcgtacagagggaagccaagccgcgaggtggagcagaccccagaaagcgcgtcgtagttcggattgcagtctgcaactcgactgcatgaagtcggaatcgctagtaatcgcggatcagcatgccgcggtgaatacgttcccgggccttgtacacaccgcccgtcacaccatgggagtggattgtaccagaagcagctagcctaaccttcgggagggcggttaccacggtatggttcatgactggggtg

SEQ ID NO: 459 - DNA, 1458 bp, Acidithiobacillus thiooxidans
attgaacgctggcggcatgcctaacacatgcaagtcgaacggtaacaggtcttcggatgctgacgagtggcggacgggtgagtaatgcgtaggaatctgtctttgagtgggggacaacccagggaaacttgggctaataccgcataagccctgagggggaaagcgggggatcttcggacctcgcgctggaagaggagcctacgtctgattagctagttggtagggtaaaggcctaccaaggcgacgatcggtagctggtctgagaggacgaccagccacactgggactgagacacggcccagactcctacgggaggcagcagtggggaatttttcgcaatgggggcaaccctgacgaagcaatgccgcgtgaatgaagaaggccttcgggttgtaaagttctttcgtggaggacgaaaaggtgggtgctaatatcgcctgctgttgacgtgaatccaagaagaagcaccggctaactccgtgccagcagccgcggtaatacggggggtgcaagcgttaatcggaatcactgggcgtaaagggtgcgtaggcggtgcattaggtctgtcgtgaaatccccgggctcaacctgggaatggcggtggaaaccggtgtactagagtatgggagagggtggtggaattccaggtgtagcggtgaaatgcgtagagatctggaggaacatcagtggcgaaggcggccacctggcccaatactgacgctgaggcacgaaagcgtggggagcaaacaggattagataccctggtagtccacgccctaaacgatgaatactagatgtttggtgccaagcgtactgagtgtcgtagctaacgcgataagtattccgcctgggaagtacggccgcaaggttaaaactcaaaggaattgacgggggcccgcacaagcggtggagcatgtggtttaattcgatgcaacgcgaagaaccttacctgggcttgacatgtctggaatcctgcagagatgcgggagtgcccttcggggaatcagaacacaggtgctgcatggctgtcgtcagctcgtgtcgtgagatgttgggttaagtcccgcaacgagcgcaacccttgtccttagttgccagcggttcggccgggcactctagggagactgccggtgacaaaccggaggaaggtggggatgacgtcaagtcctcatggcctttatgtccagggctacacacgtgctacaatggcgcgtacagagggaagccaagccgcgaggtggagcagaccccagaaagcgcgtcgtagttcggattgcagtctgcaactcgactgcatgaagtcggaatcgctagtaatcgcggatcagcatgccgcggtgaatacgttcccgggccttgtacacaccgcccgtcacaccatgggagtggattgtaccagaagccgttagcctaaccttcgggagggcgatgaccacggtatggttcatgactggggtg

SEQ ID NO: 460 - DNA, 1440 bp, Acidithrix ferrooxidans
gacgaacgctggcggcgtgcttaacacatgcaagtcgaacggtttataagggcttgcccttatagatagtggcgaacgggtgcgtaacacgtgagcaacctgccccaaagtttggaataacaccgggaaaccgatgctaataccaaatatgctcacactatcacaagatagagtgaggaaagtttttcgctttgggaggggctcgcggcctatcagcttgttggtgaggtaacggctcaccaaggcatcgacgggtagctggtctgagaggacgatcagccacactgggactgagacacggcccagactcctacgggaggcagcagtggggaatattgcgcaatgggcgaaagcctgacgcagcaacgccgcgtggaggatgaaggccttagggtcgtaaactcctttcagcaggaacgaaaatgacggtacctgcagaagaagctccggccaactacgtgccagcagccgcggtaatacgtagggagcaagcgttgtccggatttattgggcgtaaagagctcgtaggcggcttggcaagtcggatgtgaaacccccaggcttaacctggggccgccattcgatactgctatggcttgagttcggtaggggattgtggaattcccggtgtagcggtgaaatgcgcagatatcgggaggaacaccaatggcgaaggcagcaatctgggccgacactgacgctgaggagcgaaagcgtggggagcaaacaggattagataccctggtagtccacgccctaaacgttgggcactaggtgtgggacctacttcgacgggttccgtgccgtagctaacgcattaagtgccccgcctggggagtacggccgcaaggctaaaactcaaaggaattgacgggggcccgcacaagcggcggagcatgtggcttaattcgatgcaacgcgaagaacctcacctgggcttgacatgttgggaaaagccgtagagatacggtgtccattagggcccttcacaggtggtgcatggctgtcgtcagctcgtgtcgtgagatgttgagttaagtcccgcaacgagcgcaacccttgtcttatgttaccagcgagtaatgtcggggactcatgagagactgccggggtcaactcggaggaaggtggggatgacgtcaagtcatcatgccccttatgtccagggctgcacacatgctacaatggccggtacagagggtcgcaatcccgcgagggggagctaatcccacaaagccggtctcagttcggatcgcagtctgcaactcgactgcgtgaagccggagtcgctagtaatcccgaatcagcattgtcggggtgaatacgttcccgggccttgtacacaccgcccgtcacaccacgaaagtcggcaacacccgaagccggtggcccaaccagtaatggagggagccgtcgaaggtggggtcggtgattggggtg

SEQ ID NO: 461 - DNA, 1407 bp, Acidocella aminolytica
agcgaacgctggcggcatgcttaacacatgcaagtcgcacggtcagcaatggcagtggcggacgggtgagtaacacgtaggaatctatccagaggtgggggacaacagcgggaaactgctgctaataccgcatgatacctgagggtcaaaggcgcaagtcgcctttggaggagcctgcgtctgattagcttgttggtggggtaaaggcttaccaaggcgacgatcagtagctggtctgagaggatgatcagccacattgggactgagacacggcccaaactcctacgggaggcagcagtggggaatattggacaatgggcgcaagcctgatccagcaatgccgcgtgtgtgaagaaggtcttcggattgtaaagcacttttggcagggacgatgatgacggtacctgcagaataagccccggctaacttcgtgccagcagccgcggtaatacgaagggggctagcgttgctcggaatgactgggcgtaaagggcgtgtaggcggcatgtacagtcagaagtgaaattcctgggctcaacctggggactgcttttgatacgtgcaagcttgagtgaggaagagggttgtggaatttccagtgtagaggtgaaattcgtagatattggaaagaacaccggtggcgaaggcggcaacctggtcctttactgacgctgaggcgcgaaagcgtggggagcaaacaggattagataccctggtagtccacgctgtaaacgatgtgtgctggatgttgggaaacttagtttttcagtgtcgtagctaacgcgataagcacaccgcctggggagtacggccgcaaggttgaaactcaaaggaattgacgggggcccgcacaagcggtggagcatgtggtttaattcgaagcaacgcgcagaaccttaccaggatttgacatggggaggcttggtacagagatgtatctttcccgcaagggaccttccgcacaggtgctgcatggctgtcgtcagctcgtgtcgtgagatgttgggttaagtcccgcaacgagcgcaaccctcgcctttagttgccatcatttagttgggcactctaaaggaactgccggtgacaagccggaggaaggtggggatgacgtcaagtcctcatggcccttatgtcctgggctacacacgtgctacaatggtggtgacagtgggaagctaggcggtgacgccgtgctgatctctaaaagccatctcagttcggattgtactctgcaactcgagtacatgaaggtggaatcgctagtaatcgtggatcagcatgccacggtgaatacgttcccgggccttgtacacaccgcccgtcacaccatgggatttggtttgaccttaagcaggtgcgctaaccgcaaggaggcagcctaccacggtcgggtcagagactggggtg

SEQ ID NO: 462 - DNA, 1411 bp, Acidomonas methanolica
agcgaacgctggcggcatgcttaacacatgcaagtcgcacgagggtttcggccctagtggcggacgggtgagtagcgcgtagggatctatccatgggtgggggataacactgggaaactggtgctaataccgcatgatgcctgagggccaaaggcgcgagtcgcctgtggaggagcctgcgttcgattagcttgttggtggggtaaaggcctaccaaggcgatgatcgatagctggtctgagaggatgatcagccacactgggactgagacacggcccagactcctacgggaggcagcagtggggaatattggacaatgggggcaaccctgatccagcaatgccgcgtgtgtgaagaaggtcttcggattgtaaagcactttcgacggggacgatgatgacggtacccgtagaagaagccccggctaacttcgtgccagcagccgcggtaatacgaagggggctagcgttgctcggaatgactgggcgtaaagggcgcgtaggcggttgacacagtcagatgtgaaattccagggcttaaccttggggctgcatttgagacgtgttgactggagttcgagagagggttgtggaattcccagtgtagaggtgaaattcgtagatattgggaagaacaccggtggcgaaggcggcaacctggctcgatactgacgctgaggcgcgaaagcgtggggagcaaacaggattagataccctggtagtccacgctgtaaacgatgtgtgctggatgttgggtgactttgtcattcagtgtcgaagctaacgcgctaagcacaccgcctggggagtacggccgcaaggttgaaactcaaaggaattgacgggggcccgcacaagcggtggagcatgtggtttaattcgaagcaacgcgcagaaccttaccagggcttgacatggggaggctgtgtccagagatgggcatttcccgcaagggacctcctgcacaggtgctgcatggctgtcgtcagctcgtgtcgtgagatgttgggttaagtcccgcaacgagcgcaacccttgcctttagttgccagcatgatcgggtgggcactctagaggaactgccggtgacaagccggaggaaggtggggatgacgtcaagtcctcatggcccttatgtcctgggctacacacgtgctacaatggcggtgacagtgggaagccaggcagtgatgctgagctgatctcaaaaagccgtctcagttcggattgcactctgcaactcgggtgcatgaaggtggaatcgctagtaatcgcggatcagcatgccgcggtgaatacgttcccgggccttgtacacaccgcccgtcacaccatgggagttggtttgaccttaagccggtgagcgaaccgcaaggacgcagccgaccacggtcaggtcagcgactggggtg

SEQ ID NO: 463 - DNA, 1447 bp, Acidovorax anthurii
  misc_feature (129)..(129): n is a, c, g, or t
attgaacgctggcggcatgccttacacatgcaagtcgaacggtaacaggtcttcggatgctgacgagtggcgaacgggtgagtaatacatcggaacgtgcccgatcgtgggggataacgaggcgaaagntttgctaataccgcatacgatgtacggatgaaagcaggggaccgcaaggccttgcgcgaacggagcggccgatggcagattaggtagttggtggggtaaaggcttaccaagcctacgatctgtagctggtctgagaggacgaccagccacactgggactgagacacggcccagactcctacgggaggcagcagtggggaattttggacaatgggcgaaagcctgatccagccatgccgcgtgcaggatgaaggccttcgggttgtaaactgcttttgtacggaacgaaaaggttcgggttaataccctgggatgacggtaccgtaagaataagcaccggctaactacgtgccagcagccgcggcaatacgtagggtgcaagcgttaatcggaattactgggcgtaaagcgtgcgcaggcggttatgtaagacagatgtgaaatccccgggctcaacctgggaactgcatttgtgactgcatagctagagtacggtagagggggatggaattccgcgtgtagcagtgaaatgcgtagatatgcggaggaacaccgatggcgaaggcaatcccctggacctgtactgacgctcatgcacgaaagcgtggggagcaaacaggattagataccctggtagtccacgccctaaacgatgtcaatagttgttgggtcttcactgactcagtaacgaagctaacgcgtgaagttgaccgcctggggagtacggccgcaaggttgaaactcaaaggaattgacggggacccgcacaagcggtggatgatgtggtttaattcgatgcaacgcgaaaaaccttacccacctttgacatgtacggaatttgccagagatggcttagtgctcgaaagagaaccgtaacacaggtgctgcatggctgtcgtcagctcgtgtcgtgagatgttgggttaagtcccgcaacgagcgcaacccttgccattagttgctacgaaagggcactctaatgggactgccggtgacaaaccggaggaaggtggggatgacgtcaagtcctcatggcccttataggtggggctacacacgtcatacaatggctggtccagagggttgccaacccgcgagggggagctaatcccataaagccagtcgtagtccggatcgcagtctgcaactcgactgcgtgaagtcggaatcgctagtaatcgcggatcagaatgtcgcggtgaatacgttcccgggtcttgtacacaccgcccgtcacaccatgggagcgggttctgccagaagtaggtagcctaaccgtaaggagggcgcttaccacggcagggttcgtgactggggtg

SEQ ID NO: 464 - DNA, 1451 bp, Acidovorax avenae
attgaacgctggcggcatgccttacacatgcaagtcgaacggtaacaggtcttcggatgctgacgagtggcgaacgggtgagtaatacatcggaacgtgcccgatcgtgggggataacgaggcgaaagctttgctaataccgcataagatctatggatgaaagcaggggaccgcaaggccttgcgcgaacggagcggccgatggcagattaggtagttggtggggtaaaggcttaccaagcctacgatctgtagctggtctgagaggacgaccagccacactgggactgagacacggcccagactcctacgggaggcagcagtggggaattttggacaatgggcgcaagcctgatccagccatgccgcgtgcaggatgaaggccttcgggttgtaaactgcttttgtacggaacgaaaagccttcttctaataaagggaggtcatgacggtaccgtaagaataagcaccggctaactacgtgccagcagccgcggtaatacgtagggtgcaagcgttaatcggaattactgggcgtaaagcgtgcgcaggcggtgatgtaagacagatgtgaaatccccgggctcaacctgggaactgcatttgtgactgcatcgctggagtacggcagagggggatggaattccgcgtgtagcagtgaaatgcgtagatatgcggaggaacaccgatggcgaaggcaatcccctgggcctgtactgacgctcatgcacgaaagcgtggggagcaaacaggattagataccctggtagtccacgccctaaacgatgtcaactggttgttgggtcttcactgactcagtaacgaagctaacgcgtgaagttgaccgcctggggagtacggccgcaaggttgaaactcaaaggaattgacggggacccgcacaagcggtggatgatgtggtttaattcgatgcaacgcgaaaaaccttacccacctttgacatgtacggaatcctttagagatagaggagtgctcgaaagagaaccgtaacacaggtgctgcatggctgtcgtcagctcgtgtcgtgagatgttgggttaagtcccgcaacgagcgcaacccttgccattagttgctacgaaagggcactctaatgggactgccggtgacaaaccggaggaaggtggggatgacgtcaagtcctcatggcccttataggtggggctacacacgtcatacaatggctggtacagagggttgccaacccgcgagggggagctaatcccataaagccagtcgtagtccggatcgcagtctgcaactcgactgcgtgaagtcggaatcgctagtaatcgcggatcagaatgtcgcggtgaatacgttcccgggtcttgtacacaccgcccgtcacaccatgggagcgggttctgccagaagtaggtagcctaaccgtaaggggggcgcttaccacggcagggttcgtgactggggtg

SEQ ID NO: 465 - DNA, 1451 bp, Acidovorax cattleyae
attgaacgctggcggcatgccttacacatgcaagtcgaacggtaacaggtcttcggatgctgacgagtggcgaacgggtgagtaatacatcggaacgtgcccgatcgtgggggataacgaggcgaaagctttgctaataccgcataagatctatggatgaaagcaggggaccgcaaggccttgcgcgaacggagcggccgatggcagattaggtagttggtggggtaaaggcttaccaagcctacgatctgtagctggtctgagaggacgaccagccacactgggactgagacacggcccagactcctacgggaggcagcagtggggaattttggacaatgggcgcaagcctgatccagccatgccgcgtgcaggatgaaggccttcgggttgtaaactgcttttgtacggaacgaaaagccttcttctaataaaggggggtcatgacggtaccgtaagaataagcaccggctaactacgtgccagcagccgcggtaatacgtagggtgcaagcgttaatcggaattactgggcgtaaagcgtgcgcaggcggtgatgtaagacagatgtgaaatccccgggctcaacctgggaactgcatttgtgactgcatcgctggagtacggcagagggggatggaattccgcgtgtagcagtgaaatgcgtagatatgcggaggaacaccgatggcgaaggcaatcccctgggcctgtactgacgctcatgcacgaaagcgtggggagcaaacaggattagataccctggtagtccacgccctaaacgatgtcaactggttgttgggtcttcactgactcagtaacgaagctaacgcgtgaagttgaccgcctggggagtacggccgcaaggttgaaactcaaaggaattgacggggacccgcacaagcggtggatgatgtggtttaattcgatgcaacgcgaaaaaccttacccacctttgacatgtacggaatcctttagagatagaggagtgctcgaaagagaaccgtaacacaggtgctgcatggctgtcgtcagctcgtgtcgtgagatgttgggttaagtcccgcaacgagcgcaacccttgccattagttgctacgaaagggcactctaatgggactgccggtgacaaaccggaggaaggtggggatgacgtcaagtcctcatggcccttataggtggggctacacacgtcatacaatggctggtacagagggttgccaacccgcgagggggagctaatcccataaagccagtcgtagtccggatcgcagtctgcaactcgactgcgtgaagtcggaatcgctagtaatcgcggatcagaatgtcgcggtgaatacgttcccgggtcttgtacacaccgcccgtcacaccatgggagcgggttctgccagaagtaggtagcctaaccgtaaggagggcgcttaccacggcagggttcgtgactggggtg

SEQ ID NO: 466 - DNA, 1451 bp, Acidovorax citrulli
attgaacgctggcggcatgccttacacatgcaagtcgaacggtaacaggtcttcggatgctgacgagtggcgaacgggtgagtaatacatcggaacgtgcccgatcgtgggggataacgaggcgaaagctttgctaataccgcataagatctatggatgaaagcaggggaccgtaaggccttgcgcgaacggagcggccgatggcagattaggtagttggtggggtaaaggcttaccaagcctacgatctgtagctggtctgagaggacgaccagccacactgggactgagacacggcccagactcctacgggaggcagcagtggggaattttggacaatgggcgcaagcctgatccagccatgccgcgtgcaggatgaaggccttcgggttgtaaactgcttttgtacggaacgaaaagccttcttctaataaaggggggtcatgacggtaccgtaagaataagcaccggctaactacgtgccagcagccgcggtaatacgtagggtgcaagcgttaatcggaattactgggcgtaaagcgtgcgcaggcggtgatgtaagacagatgtgaaatccccgggctcaacctgggaactgcatttgtgactgcatcgctggagtacggcagagggggatggaattccgcgtgtagcagtgaaatgcgtagatatgcggaggaacaccgatggcgaaggcaatcccctgggcctgtactgacgctcatgcacgaaagcgtggggagcaaacaggattagataccctggtagtccacgccctaaacgatgtcaactggttgttgggtcttcactgactcagtaacgaagctaacgcgtgaagttgaccgcctggggagtacggccgcaaggttgaaactcaaaggaattgacggggacccgcacaagcggtggatgatgtggtttaattcgatgcaacgcgaaaaaccttacccacctttgacatgtacggaatcctttagagatagaggagtgctcgaaagagaaccgtaacacaggtgctgcatggctgtcgtcagctcgtgtcgtgagatgttgggttaagtcccgcaacgagcgcaacccttgccattagttgctacgaaagggcactctaatgggactgccggtgacaaaccggaggaaggtggggatgacgtcaagtcctcatggcccttataggtggggctacacacgtcatacaatggctggtacagagggttgccaacccgcgagggggagctaatcccataaagccagtcgtagtccggatcgcagtctgcaactcgactgcgtgaagtcggaatcgctagtaatcgcggatcagaatgtcgcggtgaatacgttcccgggtcttgtacacaccgcccgtcacaccatgggagcgggttctgccagaagtaggtagcctaaccgtaaggagggcgcttaccacggcagggttcgtgactggggtg

SEQ ID NO: 467 - DNA, 1455 bp, Acidovorax delafieldii
attgaacgctggcggcatgccttacacatgcaagtcgaacggtaacaggtcttcggatgctgacgagtggcgaacgggtgagtaatacatcggaacgtgcccgagagtgggggataacgaagcgaaagctttgctaataccgcatacgatctcaggatgaaagcaggggaccgcaaggccttgcgctcacggagcggccgatggcagattaggtagttggtgggataaaagcttaccaagccgacgatctgtagctggtctgagaggacgaccagccacactgggactgagacacggcccagactcctacgggaggcagcagtggggaattttggacaatgggcgcaagcctgatccagccatgccgcgtgcaggatgaaggccttcgggttgtaaactgcttttgtacggaacgaaaagactctggttaatacctggggtccatgacggtaccgtaagaataagcaccggctaactacgtgccagcagccgcggtaatacgtagggtgcgagcgttaatcggaattactgggcgtaaagcgtgcgcaggcggttatataagacagatgtgaaatccccgggctcaacctgggaactgcatttgtgactgtatagctagagtacggcagagggggatggaattccgcgtgtagcagtgaaatgcgtagatatgcggaggaacaccgatggcgaaggcaatcccctgggcctgtactgacgctcatgcacgaaagcgtggggagcaaacaggattagataccctggtagtccacgccctaaacgatgtcaactggttgttgggtcttcactgactcagtaacgaagctaacgcgtgaagttgaccgcctggggagtacggccgcaaggttgaaactcaaaggaattgacggggacccgcacaagcggtggatgatgtggtttaattcgatgcaacgcgaaaaaccttacccacctttgacatgtacggaatcctttagagatagaggagtgctcgaaagagaaccgtaacacaggtgctgcatggctgtcgtcagctcgtgtcgtgagatgttgggttaagtcccgcaacgagcgcaacccttgtcattagttgctacattcagttgggcactctaatgagactgccggtgacaaaccggaggaaggtggggatgacgtcaagtcctcatggcccttataggtggggctacacacgtcatacaatggctggtacagagggttgccaacccgcgagggggagccaatcccataaagccagtcgtagtccggatcgcagtctgcaactcgactgcgtgaagtcggaatcgctagtaatcgcggatcagaatgtcgcggtgaatacgttcccgggtcttgtacacaccgcccgtcacaccatgggagcgggttctgccagaagtagttagcctaaccgcaaggagggcgattaccacggcagggttcgtgactggggtg

SEQ ID NO: 468 - DNA, 1451 bp, Acidovorax konjaci
attgaacgctggcggcatgccttacacatgcaagtcgaacggtaacaggtcttcggatgctgacgagtggcgaacgggtgagtaatacatcggaacgtgcccgatcgtgggggataacgaggcgaaagctttgctaataccgcataagatctatggatgaaagcaggggaccgcaaggccttgcgcgaacggagcggccgatggcagattaggtagttggtggggtaaaggcttaccaagcctacgatctgtagctggtctgagaggacgaccagccacactgggactgagacacggcccagactcctacgggaggcagcagtggggaattttggacaatgggcgcaagcctgatccagccatgccgcgtgcaggatgaaggccttcgggttgtaaactgcttttgtacggaacgaaaagccttgggataataccctgaggtcatgacggtaccgtaagaataagcaccggctaactacgtgccagcagccgcggtaatacgtagggtgcaagcgttaatcggaattactgggcgtaaagcgtgcgcaggcggtgatgtaagacagatgtgaaatccccgggctcaacctgggaactgcatttgtgactgcatcgctggagtgcggcagagggggatggaattccgcgtgtagcagtgaaatgcgtagatatgcggaggaacaccgatggcgaaggcaatcccctgggcctgcactgacgctcatgcacgaaagcgtggggagcaaacaggattagataccctggtagtccacgccctaaacgatgtcaactggttgttgggtcttcactggctcagtaacgaagctaacgcgtgaagttgaccgcctggggagtacggccgcaaggttgaaactcaaaggaattgacggggacccgcacaagcggtggatgatgtggtttaattcgatgcaacgcgaaaaaccttacccacctttgacatgtacggaagttgccagagatggcttcgtgctcgaaagagagccgtaacacaggtgctgcatggctgtcgtcagctcgtgtcgtgagatgttgggttaagtcccgcaacgagcgcaacccttgccattagttgctacgaaagggcactctaatgggactgccggtgacaaaccggaggaaggtggggatgacgtcaagtcctcatggcccttataggtggggctacacacgtcatacaatggctggtacagagggttgccaacccgcgagggggagctaatcccataaagccagtcgtagtccggatcgcagtctgcaactcgactgcgtgaagtcggaatcgctagtaatcgcggatcagaatgtcgcggtgaatacgttcccgggtcttgtacacaccgcccgtcacaccatgggagcgggttctgccagaagtaggtagcctaaccgtaaggagggcgcttaccacggcagggttcgtgactggggtg

SEQ ID NO: 469 - DNA, 1455 bp, Acidovorax radicis
attgaacgctggcggcatgccttacacatgcaagtcgaacggtaacaggtcttcggatgctgacgagtggcgaacgggtgagtaatacatcggaacgtgcccgatcgtgggggataacggagcgaaagctttgctaataccgcatacgatctacggatgaaagcaggggaccgcaaggccttgcgcggacggagcggccgatggcagattaggtagttggtgggataaaagcttaccaagccgacgatctgtagctggtctgagaggacgaccagccacactgggactgagacacggcccagactcctacgggaggcagcagtggggaattttggacaatgggcgaaagcctgatccagccatgccgcgtgcaggatgaaggccttcgggttgtaaactgcttttgtacggaacgaaaagactctggttaatacctggggtccatgacggtaccgtaagaataagcaccggctaactacgtgccagcagccgcggtaatacgtagggtgcaagcgttaatcggaattactgggcgtaaagcgtgcgcaggcggttatataagacagatgtgaaatccccgggctcaacctgggaactgcatttgtgactgtatagctagagtacggtagagggggatggaattccgcgtgtagcagtgaaatgcgtagatatgcggaggaacaccgatggcgaaggcaatcccctggacctgtactgacgctcatgcacgaaagcgtggggagcaaacaggattagataccctggtagtccacgccctaaacgatgtcaactggttgttgggtcttcactgactcagtaacgaagctaacgcgtgaagttgaccgcctggggagtacggccgcaaggttgaaactcaaaggaattgacggggacccgcacaagcggtggatgatgtggtttaattcgatgcaacgcgaaaaaccttacccacctttgacatgtacggaatcctttagagatagaggagtgctcgaaagagaaccgtaacacaggtgctgcatggctgtcgtcagctcgtgtcgtgagatgttgggttaagtcccgcaacgagcgcaacccttgtcattagttgctacatttagttgggcactctaatgagactgccggtgacaaaccggaggaaggtggggatgacgtcaagtcctcatggcccttataggtggggctacacacgtcatacaatggatggtacaaagggtcgccaacccgcgagggggagccaatcccataaagccattcgtagtccggatcgcagtctgcaactcgactgcgtgaagtcggaatcgctagtaatcgtggatcagaatgtcacggtgaatacgttcccgggtcttgtacacaccgcccgtcacaccatgggagcgggttctgccagaagtagttagcctaaccgcaaggagggcgattaccacggcagggttcgtgactggggtg

SEQ ID NO: 470 - DNA, 1451 bp, Acidovorax soli
attgaacgctggcggcatgccttacacatgcaagtcgaacggtaacaggtcttcggatgctgacgagtggcgaacgggtgagtaatacatcggaacgtgcccgagagtgggggataacggagcgaaagctttgctaataccgcatacgatctcaggatgaaagcaggggaccgcaaggccttgcgctcacggagcggccgatggcagattaggtagttggtgggataaaagcttaccaagccgacgatctgtagctggtctgagaggacgaccagccacactgggactgagacacggcccagactcctacgggaggcagcagtggggaattttggacaatgggcgcaagcctgatccagccatgccgcgtgcaggatgaaggccttcgggttgtaaactgcttttgtacggaacgaaaagactccttctaataaagggggtccatgacggtaccgtaagaataagcaccggctaactacgtgccagcagccgcggtaatacgtagggtgcaagcgttaatcggaattactgggcgtaaagcgtgcgcaggcggttatgtaagacagatgtgaaatccccgggctcaacctgggaactgcatttgtgactgcatagctagagtacggcagagggggatggaattccgcgtgtagcagtgaaatgcgtagatatgcggaggaacaccgatggcgaaggcaatcccctgggcctgtactgacgctcatgcacgaaagcgtggggagcaaacaggattagataccctggtagtccacgccctaaacgatgtcaactggttgttgggtcttcactgactcagtaacgaagctaacgcgtgaagttgaccgcctggggagtacggccgcaaggttgaaactcaaaggaattgacggggacccgcacaagcggtggatgatgtggtttaattcgatgcaacgcgaaaaaccttacccacctttgacatgtatggaatcctttagagatagaggagtgctcgaaagagagccataacacaggtgctgcatggctgtcgtcagctcgtgtcgtgagatgttgggttaagtcccgcaacgagcgcaacccttgccattagttgctacgaaagggcactctaatgggactgccggtgacaaaccggaggaaggtggggatgacgtcaagtcctcatggcccttataggtggggctacacacgtcatacaatggctggtacagagggttgccaacccgcgagggggagccaatcccataaagccagtcgtagtccggatcgcagtctgcaactcgactgcgtgaagtcggaatcgctagtaatcgcggatcagaatgtcgcggtgaatacgttcccgggtcttgtacacaccgcccgtcacaccatgggagcgggttctgccagaagtagttagcctaaccgcaaggagggcgattaccacggcagggttcgtgactggggtg

SEQ ID NO: 471 - DNA, 1451 bp, Acidovorax temperans
attgaacgctggcggcatgccttacacatgcaagtcgaacggtaacaggtcttcggatgctgacgagtggcgaacgggtgagtaatacatcggaacgtgcccgatcgtgggggataacgaagcgaaagctttgctaataccgcataagatctacggatgaaagcaggggaccgcaaggccttgcgcgaacggagcggccgatggcagattaggtagttggtgggataaaagcttaccaagccgacgatctgtagctggtctgagaggacgaccagccacactgggactgagacacggcccagactcctacgggaggcagcagtggggaattttggacaatgggcgaaagcctgatccagccatgccgcgtgaaggatgaaggccttcgggttgtaaactgctttggtacggaacgaaaagactctggttaatacctggggtccatgacggtaccgtaagaataagcaccggctaactacgtgccagcagccgcggtaatacgtagggtgcaagcgttaatcggaattactgggcgtaaagcgtgcgcaggcggttatataagacagatgtgaaatccccgggctcaacctgggaactgcatttgtgactgtatagctagagtacggcagagggggatggaattccgcgtgtagcagtgaaatgcgtagatatgcggaggaacaccgatggcgaaggcaatcccctgggcctgtactgacgctcatgcacgaaagcgtggggagcaaacaggattagataccctggtagtccacgccctaaacgatgtcaactggttgttgggtcttcactgactcagtaacgaagctaacgcgtgaagttgaccgcctggggagtacggccgcaaggttgaaactcaaaggaattgacggggacccgcacaagcggtggatgatgtggtttaattcgatgcaacgcgaaaaaccttacccacctttgacatgtacggaatcctttagagatagaggagtgctcgaaagagagccgtaacacaggtgctgcatggctgtcgtcagctcgtgtcgtgagatgttgggttaagtcccgcaacgagcgcaacccttgccattagttgctacgaaagggcactctaatgggactgccggtgacaaaccggaggaaggtggggatgacgtcaagtcctcatggcccttataggtggggctacacacgtcatacaatggctggtacagagggttgccaacccgcgagggggagctaatcccataaagccagtcgtagtccggatcgcagtctgcaactcgactgcgtgaagtcggaatcgctagtaatcgcggatcagaatgtcgcggtgaatacgttcccgggtcttgtacacaccgcccgtcacaccatgggagcgggttctgccagaagtaggtagcctaaccgtaaggagggcgcttaccacggcagggttcgtgactggggtg

SEQ ID NO: 472 - DNA, 1451 bp, Acidovorax valerianellae
attgaacgctggcggcatgccttacacatgcaagtcgaacggtaacaggtcttcggatgctgacgagtggcgaacgggtgagtaatacatcggaacgtgcccgatcgtgggggataacggagcgaaagctttgctaataccgcatacgatctacggatgaaagcaggggaccgcaaggccttgcgcggacggagcggccgatggcagattaggtagttggtgggataaaagcttaccaagccgacgatctgtagctggtctgagaggacgaccagccacactgggactgagacacggcccagactcctacgggaggcagcagtggggaattttggacaatgggcgaaagcctgatccagccatgccgcgtgcaggatgaaggccttcgggttgtaaactgcttttgtacggaacgaaaaagctctttctaataaagagagctcatgacggtaccgtaagaataagcaccggctaactacgtgccagcagccgcggtaatacgtagggtgcaagcgttaatcggaattactgggcgtaaagcgtgcgcaggcggttatgcaagacagatgtgaaatccccgggctcaacctgggaactgcatttgtgactgcatagctagagtacggtagagggggatggaattccgcgtgtagcagtgaaatgcgtagatatgcggaggaacaccgatggcgaaggcaatcccctggacctgtactgacgctcatgcacgaaagcgtggggagcaaacaggattagataccctggtagtccacgccctaaacgatgtcaactggttgttgggtcttcactgactcagtaacgaagctaacgcgtgaagttgaccgcctggggagtacggccgcaaggttgaaactcaaaggaattgacggggacccgcacaagcggtggatgatgtggtttaattcgatgcaacgcgaaaaaccttacccacctttgacatgtacggaattttccagagatggattagtgctcgaaagagaaccgtaacacaggtgctgcatggctgtcgtcagctcgtgtcgtgagatgttgggttaagtcccgcaacgagcgcaacccttgccattagttgctacgaaagggcactctaatgggactgccggtgacaaaccggaggaaggtggggatgacgtcaagtcctcatggcccttataggtggggctacacacgtcatacaatggctggtacagagggttgccaacccgcgagggggagccaatcccataaagccagtcgtagtccggatcgcagtctgcaactcgactgcgtgaagtcggaatcgctagtaatcgcggatcagaatgtcgcggtgaatacgttcccgggtcttgtacacaccgcccgtcacaccatgggagcgggttctgccagaagtaggtagcctaaccgtaaggagggcgcttaccacggcagggttcgtgactggggtg

SEQ ID NO: 473 - DNA, 1451 bp, Acidovorax wautersii
attgaacgctggcggcatgccttacacatgcaagtcgaacggtaacaggtcttcggatgctgacgagtggcgaacgggtgagtaatacatcggaacgtgcccgatcgtgggggataacggagcgaaagctttgctaataccgcatacgatctacggatgaaagcaggggaccgcaaggccttgcgcggacggagcggccgatggcagattaggtagttggtgggataaaagcttaccaagccgacgatctgtagctggtctgagaggacgaccagccacactgggactgagacacggcccagactcctacgggaggcagcagtggggaattttggacaatgggcgaaagcctgatccagccatgccgcgtgcaggatgaaggccttcgggttgtaaactgcttttgtacggaacgaaaagcctctttctaataaagagaggtcatgacggtaccgtaagaataagcaccggctaactacgtgccagcagccgcggtaatacgtagggtgcgagcgttaatcggaattactgggcgtaaagcgtgcgcaggcggtgatgtaagacagatgtgaaatccccgggctcaacctgggaactgcatttgtgactgcatcgctggagtgcggcagagggggatggaattccgcgtgtagcagtgaaatgcgtagatatgcggaggaacaccgatggcgaaggcaatcccctgggcctgcactgacgctcatgcacgaaagcgtggggagcaaacaggattagataccctggtagtccacgccctaaacgatgtcaactggttgttgggtcttcactgactcagtaacgaagctaacgcgtgaagttgaccgcctggggagtacggccgcaaggttgaaactcaaaggaattgacggggacccgcacaagcggtggatgatgtggtttaattcgatgcaacgcgaaaaaccttacccacctttgacatgtacggaatcctttagagatagaggagtgctcgaaagagaaccgtaacacaggtgctgcatggctgtcgtcagctcgtgtcgtgagatgttgggttaagtcccgcaacgagcgcaacccttgccattagttgctacgaaagggcactctaatgggactgccggtgacaaaccggaggaaggtggggatgacgtcaagtcctcatggcccttataggtggggctacacacgtcatacaatggctggtacagagggttgccaacccgcgagggggagccaatcccataaagccagtcgtagtccggatcgcagtctgcaactcgactgcgtgaagtcggaatcgctagtaatcgcggatcagaatgtcgcggtgaatacgttcccgggtcttgtacacaccgcccgtcacaccatgggagcgggttctgccagaagtaggtagcctaaccgtaaggagggcgcttaccacggcagggttcgtgactggggtg

SEQ ID NO: 474 - DNA, 1462 bp, Acinetobacter albensis
attgaacgctggcggcaggcttaacacatgcaagtcgagcggggaaaagtagcttgctacttaacttagcggcggacgggtgagtaatacttaggaatctgcctattagtgggggacaacatttcgaaaggaatgctaataccgcatacgtcctacgggagaaagcaggggatcacttgtgaccttgcgctaatagatgagcctaagtcggattagctagttggtggggtaaaggcctaccaaggcgacgatctgtagcgggtctgagaggatgatccgccacactgggactgagacacggcccagactcctacgggaggcagcagtggggaatattggacaatggggggaaccctgatccagccatgccgcgtgtgtgaagaaggccttttggttgtaaagcactttaagcgaggaggaggctactctagttaatacctagggatagtggacgttactcgcagaataagcaccggctaactctgtgccagcagccgcggtaatacagagggtgcgagcgttaatcggatttactgggcgtaaagcgtgcgtaggtggccaattaagtcaaatgtgaaatccccgagcttaacttgggaattgcattcgatactggttggctagagtatgggagaggatggtagaattccaggtgtagcggtgaaatgcgtagagatctggaggaataccgatggcgaaggcagccatctggcctaatactgacactgaggtacgaaagcatggggagcaaacaggattagataccctggtagtccatgccgtaaacgatgtctactagccgttggggtctttgagactttagtggcgcagctaacgcgataagtagaccgcctggggagtacggtcgcaagactaaaactcaaatgaattgacgggggcccgcacaagcggtggagcatgtggtttaattcgatgcaacgcgaagaaccttacctggtcttgacatagtaagaactttccagagatggattggtgccttcgggagcttacatacaggtgctgcatggctgtcgtcagctcgtgtcgtgagatgttgggttaagtcccgcaacgagcgcaacccttttccttatttgccagcgggttaagccgggaactttaaggatactgccagtgacaaactggaggaaggcggggacgacgtcaagtcatcatggcccttacgaccagggctacacacgtgctacaatggtcggtacaaagggttgctacctagcgataggatgctaatctcaaaaagccgatcgtagtccggattggagtctgcaactcgactccatgaagtcggaatcgctagtaatcgcggatcagaatgccgcggtgaatacgttcccgggccttgtacacaccgcccgtcacaccatgggagtttgttgcaccagaagtaggtagtctaaccgcaaggaggacgcttaccacggtgtggccgatgactggggtg

SEQ ID NO: 475 - DNA, 1460 bp, Acinetobacter apis
attgaacgctggcggcaggcttaacacatgcaagtcgagcgggggaaagtagcttgctactgaccttagcggcggacgggtgagtaatgcttaggaatctgcctattagtgggggacaacgtttcgaaagggacgctaataccgcatacgccctacgggggaaagcaggggatcttcggaccttgcgctaatagatgagcctaagtcggattagctagttggtagggtaaaggcctaccaaggcgacgatctgtagcgggtttgagaggatgatccgccacactgggactgagacacggcccagactcctacgggaggcagcagtggggaatattggacaatgggcgaaagcctgatccagccatgccgcgtgtgtgaagaaggccttatggttgtaaagcactttaagcgaggaggaggcttacctagttaatacctaggataagtggacgttactcgcagaataagcaccggctaactctgtgccagcagccgcggtaatacagagggtgcaagcgttaatcggaattactgggcgtaaagcgcgcgtaggtggccatttaagtcaaatgtgaaatccccgagcttaacttgggaattgcattcgatactgggtggctagagtataggagaggaaggtagaattccaggtgtagcggtgaaatgcgtagagatctggaggaataccgatggcgaaggcagccttctggcctaatactgacactgaggtgcgaaagcatggggagcaaacaggattagataccctggtagtccatgccgtaaacgatgtctactagccgttgggccctttgagggcttagtggcgcagctaacgcgataagtagaccgcctggggagtacggtcgcaagactaaaactcaaatgaattgacgggggcccgcacaagcggtggagcatgtggtttaattcgatgcaacgcgaagaaccttacctggccttgacatactaagaactttctagagatagattggtgccttcgggaacttagatacaggtgctgcatggctgtcgtcagctcgtgtcgtgagatgttgggttaagtcccgcaacgagcgcaacccttttccttatttgccagcgagtaatgtcgggaactttaaggatactgccagtgacaaactggaggaaggcggggacgacgtcaagtcatcatggcccttacggccagggctacacacgtgctacaatggtcggtacagagggttgctacacagcgatgtgatgctaatctcaaaaagccgatcgtagtccggattggagtctgcaactcgactccatgaagtcggaatcgctagtaatcgcggatcagaatgccgcggtgaatacgttcccgggccttgtacacaccgcccgtcacaccatgggagtttgttgcaccagaagtagatagtctaaccctcgggaggacgtttaccacggtgtggccaatgactggggtg

SEQ ID NO: 476 - DNA, 1460 bp, Acinetobacter baylyi
attgaacgctggcggcaggcttaacacatgcaagtcgagcgggggaaagtacttcggtactaaccttagcggcggacgggtgagtaatacttaggaatctgcctattagtgggggacaacatctcgaaagggatgctaataccgcatacgtcctacgggagaaagcaggggatctttatgaccttgcgctaatagatgagcctaagtcggattagctagttggtggggtaaaggcctaccaaggcgacgatctgtagcgggtctgagagaatgatccgccacactgggactgagacacggcccagactcctacgggaggcagcagtggggaatattggacaatggggggaaccctgatccagccatgccgcgtgtgtgaagaaggccttatggttgtaaagcactttaagcgaggaagaggcttacctggttaatacccaggataagtggacgttactcgcagaataagcaccggctaactctgtgccagcagccgcggtaatacagagggtgcaagcgttaatcggatttactgggcgtaaagcgcgcgtaggcggccaattaagtcaaatgtgaaatccccgagcttaacttgggaattgcattcgatactgtttggctagagtgtgggagaggatggtagaattccaggtgtagcggtgaaatgcgtagagatctggaggaataccgatggcgaaggcagccatctggcctaacactgacgctgaggtgcgaaagcatggggagcaaacaggattagataccctggtagtccatgccgtaaacgatgtctactagccgttggggcctttgaggctttagtggcgcagctaacgcgataagtagaccgcctggggagtacggtcgcaagactaaaactcaaatgaattgacgggggcccgcacaagcggtggagcatgtggtttaattcgatgcaacgcgaagaaccttacctggccttgacatagtagaaactttccagagatggattggtgccttcgggaatctacatacaggtgctgcatggctgtcgtcagctcgtgtcgtgagatgttgggttaagtcccgcaacgagcgcaacccttttccttacttgccagcatttcggatgggaactttaaggatactgccagtgacaaactggaggaaggcggggacgacgtcaagtcatcatggcccttacggccagggctacacacgtgctacaatggtcggtacaaagggttgctacctagcgataggatgctaatctcaaaaagccgatcgtagtccggattggagtctgcaactcgactccatgaagtcggaatcgctagtaatcgcggatcagaatgccgcggtgaatacgttcccgggccttgtacacaccgcccgtcacaccatgggagtttgttgcaccagaagtagctagcctaactgcaaagagggcggttaccacggtgtggccgatgactggggtg

SEQ ID NO: 477 - DNA, 1460 bp, Acinetobacter beijerinckii
attgaacgctggcggcaggcttaacacatgcaagtcgagcggggaaaggtagcttgctacctaacctagcggcggacgggtgagtaatgcttaggaatctgcctattagtgggggacaacattccgaaaggaatgctaataccgcatacgtcctacgggagaaagcaggggaccttcgggccttgcgctaatagatgagcctaagtcggattagctagttggtggggtaaaggcctaccaaggcgacgatctgtagcgggtctgagaggatgatccgccacactgggactgagacacggcccagactcctacgggaggcagcagtggggaatattggacaatggggggaaccctgatccagccatgccgcgtgtgtgaagaaggccttttggttgtaaagcactttaagcgaggaggaggctactagtattaatactactggatagtggacgttactcgcagaataagcaccggctaactctgtgccagcagccgcggtaatacagagggtgcgagcgttaatcggatttactgggcgtaaagcgtgcgtaggcggctgattaagtcggatgtgaaatccctgagcttaacttaggaattgcattcgatactggtcagctagagtatgggagaggatggtagaattccaggtgtagcggtgaaatgcgtagagatctggaggaataccgatggcgaaggcagccatctggcctaatactgacgctgaggtacgaaagcatggggagcaaacaggattagataccctggtagtccatgccgtaaacgatgtctactagccgttggggcctttgaggctttagtggcgcagctaacgcgataagtagaccgcctggggagtacggtcgcaagactaaaactcaaatgaattgacgggggcccgcacaagcggtggagcatgtggtttaattcgatgcaacgcgaagaaccttacctggtcttgacatagtaagaactttccagagatggattggtgccttcgggaacttacatacaggtgctgcatggctgtcgtcagctcgtgtcgtgagatgttgggttaagtcccgcaacgagcgcaacccttttccttatttgccagcgggttaagccgggaactttaaggatactgccagtgacaaactggaggaaggcggggacgacgtcaagtcatcatggcccttacgaccagggctacacacgtgctacaatggtcggtacaaagggttgctacctagcgataggatgctaatctcaaaaagccgatcgtagtccggattggagtctgcaactcgactccatgaagtcggaatcgctagtaatcgcggatcagaatgccgcggtgaatacgttcccgggccttgtacacaccgcccgtcacaccatgggagtttgttgcaccagaagtaggtagtctaaccgcaaggaggacgcttaccacggtgtggccgatgactggggtg

SEQ ID NO: 478 - DNA, 1461 bp, Acinetobacter bereziniae
attgaacgctggcggcaggcttaacacatgcaagtcgagcgggggagattgcttcggtaattgacctagcggcggacgggtgagtaatacttaggaatctgcctattaatgggggacaacatctcgaaagggatgctaataccgcatacgccctacgggggaaagcaggggatcacttgtgaccttgcgttaatagatgagcctaagtcggattagctagttggtggggtaaaggcctaccaaggcgacgatctgtagcgggtctgagaggatgatccgccacactgggactgagacacggcccagactcctacgggaggcagcagtggggaatattggacaatggggggaaccctgatccagccatgccgcgtgtgtgaagaaggccttatggttgtaaagcactttaagcgaggaggaggctcttttggttaatacccaagatgagtggacgttactcgcagaataagcaccggctaactctgtgccagcagccgcggtaatacagagggtgcgagcgttaatcggatttactgggcgtaaagcgtgcgtaggcggctttttaagtcggatgtgaaatccccgagcttaacttgggaattgcattcgatactgggaagctagagtatgggagaggatggtagaattccaggtgtagcggtgaaatgcgtagagatctggaggaataccgatggcgaaggcagccatctggcctaatactgacgctgaggtacgaaagcatggggagcaaacaggattagataccctggtagtccatgccgtaaacgatgtctactagccgttggggtctttgagactttagtggcgcagctaacgcgataagtagaccgcctggggagtacggtcgcaagactaaaactcaaatgaattgacgggggcccgcacaagcggtggagcatgtggtttaattcgatgcaacgcgaagaaccttacctggtcttgacatagtaagaactttccagagatggattggtgccttcgggaacttacatacaggtgctgcatggctgtcgtcagctcgtgtcgtgagatgttgggttaagtcccgcaacgagcgcaacccttttccttacttgccagcatttcggatgggaactttaaggatactgccagtgacaaactggaggaaggcggggacgacgtcaagtcatcatggcccttacgaccagggctacacacgtgctacaatggtcggtacaaagggttgctacctagcgataggatgctaatctcaaaaagccgatcgtagtccggattggagtctgcaactcgactccatgaagtcggaatcgctagtaatcgcggatcagaatgccgcggtgaatacgttcccgggccttgtacacaccgcccgtcacaccatgggagtttgttgcaccagaagtaggtagtctaaccgtaaggaggacgcttaccacggtgtggccgatgactggggtg

SEQ ID NO: 479 - DNA, 1460 bp, Acinetobacter bohemicus
attgaacgctggcggcaggcttaacacatgcaagtcgagcggagatgaggtgcttgcaccttatcttagcggcggacgggtgagtaatgcttaggaatctgcctattagtgggggacaacatttcgaaaggaatgctaataccgcatacgccctacgggggaaagcaggggatcttcggaccttgcgctaatagatgagcctaagtcggattagctagttggtggggtaaaggcctaccaaggcgacgatctgtagcgggtctgagaggatgatccgccacactgggactgagacacggcccagactcctacgggaggcagcagtggggaatattggacaatggggggaaccctgatccagccatgccgcgtgtgtgaagaaggccttttggttgtaaagcactttaagcgaggaggaggagctctagactaatactctagatgcttggacgttactcgcagaataagcaccggctaactctgtgccagcagccgcggtaatacagagggtgcaagcgttaatcggatttactgggcgtaaagcgtgcgtaggtggtcttttaagtcggatgtgaaatccctgagcttaacttaggaattgcattcgatactgggagactagagtatgggagaggatggtagaattccaggtgtagcggtgaaatgcgtagagatctggaggaataccgatggcgaaggcagccatctggcctaatactgacactgaggtacgaaagcatggggagcaaacaggattagataccctggtagtccatgccgtaaacgatgtctactagccgttggggcctttgaggctttagtggcgcagctaacgcgataagtagaccgcctggggagtacggtcgcaagactaaaactcaaatgaattgacgggggcccgcacaagcggtggagcatgtggtttaattcgatgcaacgcgaagaaccttacctggtcttgacatagtaagaactttccagagatggattggtgccttcgggagcttacatacaggtgctgcatggctgtcgtcagctcgtgtcgtgagatgttgggttaagtcccgcaacgagcgcaacccttttccttatttgccagcgggttaagccgggaactttaaggatactgccagtgacaaactggaggaaggcggggacgacgtcaagtcatcatggcccttacgaccagggctacacacgtgctacaatggtcggtacaaagggttgctacctagcgataggatgctaatctcaaaaagccgatcgtagtccggattggagtctgcaactcgactccatgaagtcggaatcgctagtaatcgcggatcagaatgccgcggtgaatacgttcccgggccttgtacacaccgcccgtcacaccatgggagtttgttgcaccagaagtaggtagtctaaccgtaaggaggacgcttaccacggtgtggccgatgactggggtg

SEQ ID NO: 480 - DNA, 1459 bp, Acinetobacter boissieri
attgaacgctggcggcaggcttaacacatgcaagtcgagcgggggaaagtagcttgctactgaccttagcggcggacgggtgagtaatacttaggaatctacctattaatgggggacaacgtttcgaaagggacgctaataccgcatacgccctacgggggaaagcaggggatcttcggaccttgcgttaatagatgagcctaagccggattagctagttggtggggtaaaggcctaccaaggcgacgatctgtagcgggtttgagaggatgatccgccacactgggactgagacacggcccagactcctacgggaggcagcagtggggaatattggacaatggggggaaccctgatccagccatgccgcgtgtgtgaagaaggccttatggttgtaaagcactttaagcgaggaggaggcttacctaactaatacttaggataagtggacgttactcgcagaataagcaccggctaactctgtgccagcagccgcggtaatacagagggtgcaagcgttaatcggaattactgggcgtaaagcgcgcgtaggtggccaattaagtcaaatgtgaaatccccgagcttaacttgggaattgcattcgatactggttggctagagtataggagaggaaggtagaattccaggtgtagcggtgaaatgcgtagagatctggaggaataccgatggcgaaggcagccttctggcctaatactgacactgaggtgcgaaagcatggggagcaaacaggattagataccctggtagtccatgccgtaaacgatgtctactagccgttgggccctttgagggcttagtggcgcagctaacgcgataagtagaccgcctggggagtacggtcgcaagactaaaactcaaatgaattgacgggggcccgcacaagcggtggagcatgtggtttaattcgatgcaacgcgaagaaccttacctggccttgacatagtagaaactttctagagatagattggtgccttcgggaatctacatacaggtgctgcatggctgtcgtcagctcgtgtcgtgagatgttgggttaagtcccgcaacgagcgcaacccttttccttatttgccagcacttcgggtgggaactttaaggatactgccagtgacaaactggaggaaggcggggacgacgtcaagtcatcatggcccttacggccagggctacacacgtgctacaatggtcggtacagagggttgctacacagcgatgtgatgctaatctcaaaaagccgatcgtagtccggattggagtctgcaactcgactccatgaagtcggaatcgctagtaatcgcggatcagaatgccgcggtgaatacgttcccgggccttgtacacaccgcccgtcacaccatgggagtttgttgcaccagaagtagatagtctaaccctcgggaggacgtttaccacggtgtggccaatgactggggtg

SEQ ID NO: 481 - DNA, 1460 bp, Acinetobacter bouvetii
attgaacgctggcggcaggcttaacacatgcaagtcgagcggggagatgtagcttgctacatttcctagcggcggacgggtgagtaatgcttaggaatctgcctattagtgggggacaacgtttcgaaaggaacgctaataccgcatacgccctacgggggaaagcaggggatcttcggaccttgcgctaatagatgagcctaagtcagattagctagttggtggggtaaaggcctaccaaggcgacgatctgtagcgggtctgagaggatgatccgccacactgggactgagacacggcccagactcctacgggaggcagcagtggggaatattggacaatggggggaaccctgatccagccatgccgcgtgtgtgaagaaggccttttggttgtaaagcactttaagcgaggaggaggctactagtactaatactactggatagtggacgttactcgcagaataagcaccggctaactctgtgccagcagccgcggtaatacagagggtgcgagcgttaatcggatttactgggcgtaaagcgtacgtaggcggctttttaagtcggatgtgaaatccctgagcttaacttaggaattgcattcgatactgggaagctagagtatgggagaggatggtagaattccaggtgtagcggtgaaatgcgtagagatctggaggaataccgatggcgaaggcagccatctggcctaatactgacgctgaggtacgaaagcatggggagcaaacaggattagataccctggtagtccatgccgtaaacgatgtctactagccgttggggcctttgaggctttagtggcgcagctaacgcgataagtagaccgcctggggagtacggtcgcaagactaaaactcaaatgaattgacgggggcccgcacaagcggtggagcatgtggtttaattcgatgcaacgcgaagaaccttacctggtcttgacatagtaagaactttccagagatggattggtgccttcgggaacttacatacaggtgctgcatggctgtcgtcagctcgtgtcgtgagatgttgggttaagtcccgcaacgagcgcaacccttttccttatttgccagcgggttaagccgggaactttaaggatactgccagtgacaaactggaggaaggcggggacgacgtcaagtcatcatggcccttacgaccagggctacacacgtgctacaatggtcggtacaaagggttgctacctagcgataggatgctaatctcaaaaagccgatcgtagtccggattggagtctgcaactcgactccatgaagtcggaatcgctagtaatcgcggatcagaatgccgcggtgaatacgttcccgggccttgtacacaccgcccgtcacaccatgggaatttgttgcaccagaagtaggtagtctaaccgcaaggaggacgcttaccacggtgtggccgatgactggggtg

SEQ ID NO: 482 - DNA, 1460 bp, Acinetobacter brisouii
attgaacgctggcggcaggcttaacacatgcaagtcgagcggagcgaaggtgcttgcaccttagcttagcggcggacgggtgagtaatgcttaggaatctgcctattagtgggggacaacgtttcgaaaggaacgctaataccgcatacgtcctacgggagaaagcaggggatcttcggaccttgtgctaatagatgagcctaagtcggattagctagttggtggggtaaaggcctaccaaggcgacgatctgtagcgggtctgagaggatgatccgccacactgggactgagacacggcccagactcctacgggaggcagcagtggggaatattggacaatgggcgaaagcctgatccagccatgccgcgtgtgtgaagaaggccttttggttgtaaagcactttaagcgaggaggaggcttctttggttaatacccaaagtaagtggacgttactcgcagaataagcaccggctaactctgtgccagcagccgcggtaatacagagggtgcaagcgttaatcggatttactgggcgtaaagcgtgcgtaggcggctaattaagtcaaatgtgaaatccccgagcttaacttgggaattgcattcgatactggttagctagagtatgggagaggatggtagaattccaggtgtagcggtgaaatgcgtagagatctggaggaataccgatggcgaaggcagccatctggcctaatactgacgctgaggtacgaaagcatggggagcaaacaggattagataccctggtagtccatgccgtaaacgatgtctactagccgttggggtctttgagaccttagtggcgcagctaacgcgataagtagaccgcctggggagtacggtcgcaagactaaaactcaaatgaattgacgggggcccgcacaagcggtggagcatgtggtttaattcgatgcaacgcgaagaaccttacctggccttgacatactaagaactttccagagatggattggtgccttcgggaacttagatacaggtgctgcatggctgtcgtcagctcgtgtcgtgagatgttgggttaagtcccgcaacgagcgcaacccttttccttatttgccagcgagtaatgtcgggaactttaaggatactgccagtgacaaactggaggaaggcggggacgacgtcaagtcatcatggcccttacggccagggctacacacgtgctacaatggtcggtacaaagggttgctacctagcgataggatgctaatctcaaaaagccgatcgtagtccggattggagtctgcaactcgactccatgaagtcggaatcgctagtaatcgcggatcagaatgccgcggtgaatacgttcccgggccttgtacacaccgcccgtcacaccatgggagtttgttgcaccagaagtagctagcctaacagcaatgagggcggttaccacggtgtggccgatgactggggtg

SEQ ID NO: 483 - DNA, 1460 bp, Acinetobacter celticus
attgaacgctggcggcaggcttaacacatgcaagtcgagcggagatgaggtgcttgcaccttatcttagcggcggacgggtgagtaatgcttaggaatctacctattagtgggggacaacgtttcgaaaggaacgctaataccgcatacgtcctacgggagaaagcaggggaccttcgggccttgcgctaatagatgagcctaagtcggattagctagttggtggggtaaaggcctaccaaggcgacgatctgtagcgggtctgagaggatgatccgccacactgggactgagacacggcccagactcctacgggaggcagcagtggggaatattggacaatggggggaaccctgatccagccatgccgcgtgtgtgaagaaggccttttggttgtaaagcactttaagcggggaggaggctacttagattaatactctaggatagtggacgttacccgcagaataagcaccggctaactctgtgccagcagccgcggtaatacagagggtgcgagcgttaatcggatttactgggcgtaaagcgtgcgtaggtggtcttttaagtcggatgtgaaatccctgagcttaacttaggaattgcattcgatactgggagactagagtatgggagaggatggtagaattccaggtgtagcggtgaaatgcgtagagatctggaggaataccgatggcgaaggcagccatctggcctaatactgacactgaggcacgaaagcatggggagcaaacaggattagataccctggtagtccatgccgtaaacgatgtctactagccgttggggtctttgagactttagtggcgcagctaacgcgataagtagaccgcctggggagtacggtcgcaagactaaaactcaaatgaattgacgggggcccgcacaagcggtggagcatgtggtttaattcgatgcaacgcgaagaaccttacctggtcttgacatagtaagaactttccagagatggattggtgccttcgggagcttacatacaggtgctgcatggctgtcgtcagctcgtgtcgtgagatgttgggttaagtcccgcaacgagcgcaacccttttccttatttgccagcgggtaatgccgggaactttaaggatactgccagtgacaaactggaggaaggcggggacgacgtcaagtcatcatggcccttacgaccagggctacacacgtgctacaatggtcggtacaaagggttgctacctagcgataggatgctaatctcaaaaagccgatcgtagtccggattggagtctgcaactcgactccatgaagtcggaatcgctagtaatcgcggatcagaatgccgcggtgaatacgttcccgggccttgtacacaccgcccgtcacaccatgggaatttgttgcaccagaagtaggtagtctaaccgcaaggaggacgcttaccacggtgtggccgatgactggggtg

SEQ ID NO: 484 - DNA, 1460 bp, Acinetobacter colistiniresistens
attgaacgctggcggcaggcttaacacatgcaagtcgagcggggaagggtagcttgctacctaacctagcggcggacgggtgagtaatgcttaggaatctgccatttagtgggggacaacattccgaaaggaatgctaataccgcatacgtcctacgggagaaagcaggggatcttcggaccttgcgctaaatgatgagcctaagtcggattagctagttggtggggtaaaggcctaccaaggcgacgatctgtagcgggtctgagaggatgatccgccacactgggactgagacacggcccagactcctacgggaggcagcagtggggaatattggacaatgggcgaaagcctgatccagccatgccgcgtgtgtgaagaaggccttttggttgtaaagcactttaagcgaggaggaggctacctagattaatactctaggatagtggacgttactcgcagaataagcaccggctaactctgtgccagcagccgcggtaatacagagggtgcgagcgttaatcggatttactgggcgtaaagcgtgcgtaggcggctttttaagtcggatgtgaaatccccgagcttaacttgggaattgcattcgatactgggaagctagagtatgggagaggatggtagaattccaggtgtagcggtgaaatgcgtagagatctggaggaataccgatggcgaaggcagccatctggcctaatactgacgctgaggtacgaaagcatggggagcaaacaggattagataccctggtagtccatgccgtaaacgatgtctactagccgttggggcctttgaggctttagtggcgcagctaacgcgataagtagaccgcctggggagtacggtcgcaagactaaaactcaaatgaattgacgggggcccgcacaagcggtggagcatgtggtttaattcgatgcaacgcgaagaaccttacctggtcttgacatagtaagaactttccagagatggattggtgccttcgggaacttacatacaggtgctgcatggctgtcgtcagctcgtgtcgtgagatgttgggttaagtcccgcaacgagcgcaacccttttccttatttgccagcgggttaagccgggaactttaaggatactgccagtgacaaactggaggaaggcggggacgacgtcaagtcatcatggcccttacgaccagggctacacacgtgctacaatggtcggtacaaagggttgctacctagcgataggatgctaatctcaaaaagccgatcgtagtccggattggagtctgcaactcgactccatgaagtcggaatcgctagtaatcgcggatcagaatgccgcggtgaatacgttcccgggccttgtacacaccgcccgtcacaccatgggagtttgttgcaccagaagtaggtagtctaaccgtaaggaggacgcttaccacggtgtggccgatgactggggtg

SEQ ID NO: 485 - DNA, 1461 bp, Acinetobacter defluvii
attgaacgctggcggcaggcttaacacatgcaagtcgagcggggtgagttacttcggtaactgacctagcggcggacgggtgagtaatacttaggaatctgcctattagtgggggacaacgttccgaaagggacgctaataccgcatacgccctacgggggaaaggaggggatcacttgtgacctttcgctaatagatgagcctaagtcggattagctagttggtggggtaaaggcctaccaaggcgacgatctgtagcgggtctgagaggatgatccgccacactgggactgagacacggcccagactcctacgggaggcagcagtggggaatattggacaatggggggaaccctgatccagccatgccgcgtgtgtgaagaaggccttatggttgtaaagcactttaagcgaggaggaggctcctatagataatacctatagagagtggacgttactcgcagaataagcaccggctaactctgtgccagcagccgcggtaatacagagggtgcgagcgttaatcggatttactgggcgtaaagcgtacgtaggcggctttttaagtcggatgtgaaatccccgagcttaacttgggaattgcattcgatactgggaagctagagtatgggagaggatggtagaattccaggtgtagcggtgaaatgcgtagagatctggaggaataccgatggcgaaggcagccatctggcctaatactgacgctgaggtacgaaagcatggggagcaaacaggattagataccctggtagtccatgccgtaaacgatgtctactagccgttggggcctttgaggctttagtggcgcagctaacgcgataagtagaccgcctggggagtacggtcgcaagactaaaactcaaatgaattgacgggggcccgcacaagcggtggagcatgtggtttaattcgatgcaacgcgaagaaccttacctggtcttgacatagtagaaactttccagagatggattggtgccttcgggaatctacatacaggtgctgcatggctgtcgtcagctcgtgtcgtgagatgttgggttaagtcccgcaacgagcgcaacccttttccttacttgccagcatttcggatgggaactttaaggatactgccagtgacaaactggaggaaggcggggacgacgtcaagtcatcatggcccttacgaccagggctacacacgtgctacaatggtcggtacaaagggttgctacctagcgataggatgctaatctcaaaaagccgatcgtagtccggattggagtctgcaactcgactccatgaagtcggaatcgctagtaatcgcggatcagaatgccgcggtgaatacgttcccgggccttgtacacaccgcccgtcacaccatgggagtttattgcaccagaagtaggtagtctaaccgcaaggaggacgcttaccacggtgtggtcgacgactggggtg

SEQ ID NO: 486 - DNA, 1460 bp, Acinetobacter equi
attgaacgctggcggcaggcttaacacatgcaagtcgagcgggggaaggtagcttgctactggacctagcggcggacgggtgagtaatgcttaggaatctgcctattagtgggggacaacgtttcgaaagggacgctaataccgcatacgccctacgggggaaagcaggggatcttcggaccttgcgctaatagatgagcctaagtcggattagctagttggtggggtaaaggcctaccaaggcgacgatctgtagcgggtctgagaggatgatccgccacactgggactgagacacggcccagactcctacgggaggcagcagtggggaatattggacaatgggcgcaagcctgatccagccatgccgcgtgtgtgaagaaggccttttggttgtaaagcactttaagcgaggaggaggctacttggattaatactctgagatagtggacgttactcgcagaataagcaccggctaactctgtgccagcagccgcggtaatacagagggtgcaagcgttaatcggatttactgggcgtaaagcgtgcgtaggtggccaattaagtcaaatgtgaaatccctgagcttaacttaggaattgcattcgatactggttggctagagtatgggagaggatggtagaattccaggtgtagcggtgaaatgcgtagagatctggaggaataccgatggcgaaggcagccatctggcctaatactgacactgaggtacgaaagcatggggagcaaacaggattagataccctggtagtccatgccgtaaacgatgtctactagccgttggggcctttgaggctttagtggcgcagctaacgcgataagtagaccgcctggggagtacggtcgcaagactaaaactcaaatgaattgacgggggcccgcacaagcggtggagcatgtggtttaattcgatgcaacgcgaagaaccttacctggtcttgacatacagagaactttccagagatggattggtgccttcgggaactctgatacaggtgctgcatggctgtcgtcagctcgtgtcgtgagatgttgggttaagtcccgcaacgagcgcaacccttttccttatttgccagcgggttatgccgggaactttaaggatactgccagtgacaaactggaggaaggcggggacgacgtcaagtcatcatggcccttacgaccagggctacacacgtgctacaatggtcggtacaaagggttgctacctcgcgagaggatgctaatctcaaaaagccgatcgtagtccggattggagtctgcaactcgactccatgaagtcggaatcgctagtaatcgcggatcagaatgccgcggtgaatacgttcccgggccttgtacacaccgcccgtcacaccatgggagtttgttgcaccagaagtaggtagtctaaccgcaaggaggacgcttaccacggtgtggccgatgactggggtg

SEQ ID NO: 487 - DNA, 1401 bp, Acinetobacter gandensis
gcagtcgagcggatgagggagcttgctcctggattcagcggcggacgggtgagtaatgcttaggaatctgcctattagtgggggacaacagttggaaacgactgctaataccgcatacgccctacgggggaaaggaggggatcttcggacctttcgctaatagatgagcctaagtcagattagctagttggtggggtaaaggcctaccaaggcgacgatctgtagcgggtctgagaggatgatccgccacactgggactgagacacggcccagactcctacgggaggcagcagtggggaatattggacaatgggggcaaccctgatccagccatgccgcgtgtgtgaagaaggccttttggttgtaaagcactttaagcgaggaggaggctcttctagttaatacctaggatgagtggacgttactcgcagaataagcaccggctaactctgtgccagcagccgcggtaatacagagggtgcgagcgttaatcggatttactgggcgtaaagcgtacgtaggcggctttttaagtcggatgtgaaatccctgagcttaacttaggaattgcattcgatactgggaagctagagtatgggagaggatggtagaattccaggtgtagcggtgaaatgcgtagagatctggaggaataccgatggcgaaggcagccatctggcctaatactgacgctgaggtacgaaagcatggggagcaaacaggattagataccctggtagtccatgccgtaaacgatgtctactagccgttggggcctttgaggctttagtggcgcagctaacgcgataagtagaccgcctggggagtacggtcgcaagactaaaactcaaatgaattgacgggggcccgcacaagcggtggagcatgtggtttaattcgatgcaacgcgaagaaccttacctggtcttgacatagtaagaactttccagagatggattggtgccttcgggaacttacatacaggtgctgcatggctgtcgtcagctcgtgtcgtgagatgttgggttaagtcccgcaacgagcgcaacccttttccttatttgccagcgggttaagccgggaactttaaggatactgccagtgacaaactggaggaaggcggggacgacgtcaagtcatcatggcccttacgaccagggctacacacgtgctacaatggtcggtacaaagggttgctactccgcgaggagatgctaatctcaaaaagccgatcgtagtccggatcgcagtctgcaactcgactgcgtgaagtcggaatcgctagtaatcgcggatcagaatgccgcggtgaatacgttcccgggccttgtacacaccgcccgtcacaccatgggagtttgttgcaccagaagtaggtagtctaaccgtaaggaggacgct

SEQ ID NO: 488 - DNA, 1462 bp, Acinetobacter gerneri
attgaacgctggcggcaggcttaacacatgcaagtcgagcggggatagggtgcttgcacctgattcttagcggcggacgggtgagtaatacttaggaatctgcctattagtgggggataacggctcgaaagggtcgctaataccgcatacgtcctacgggagaaagcaggggatcacttgtgaccttgcgctaatagatgagcctaagtcggattagctagttggtggggtaaaggcctaccaaggcgacgatctgtagcgggtctgagaggatgatccgccacactgggactgagacacggcccagactcctacgggaggcagcagtggggaatattggacaatggggggaaccctgatccagccatgccgcgtgtgtgaagaaggccttatggttgtaaagcactttaagcgaggaggaggctcccgtagctaatatctacggagagtggacgttactcgcagaataagcaccggctaactctgtgccagcagccgcggtaatacagagggtgcgagcgttaatcggatttactgggcgtaaagcgtgcgtaggcggctttttaagtcggatgtgaaatccccgagcttaacttgggaattgcattcgatactgggaagctagagtatgggagaggatggtagaattccaggtgtagcggtgaaatgcgtagagatctggaggaataccgatggcgaaggcagccatctggcctaatactgacgctgaggtacgaaagcatggggagcaaacaggattagataccctggtagtccatgctgtaaacgatgtctactagccgttggggcctttgaggctttagtggcgcagctaacgcgataagtagaccgcctggggagtacggtcgcaagactaaaactcaaatgaattgacgggggcccgcacaagcggtggagcatgtggtttaattcgatgcaacgcgaagaaccttacctggccttgacatactaagaactttctagagatagattggtgccttcgggaacttagatacaggtgctgcatggctgtcgtcagctcgtgtcgtgagatgttgggttaagtcccgcaacgagcgcaacccttttccttacttgccagcatttcggatgggaactttaaggatactgccagtgacaaactggaggaaggcggggacgacgtcaagtcatcatggcccttacggccagggctacacacgtgctacaatggtcggtacaaagggttgctacacagcgatgtgatgctaatctcaaaaagccgatcgtagtccggattggagtctgcaactcgactccatgaagtcggaatcgctagtaatcgcggatcagaatgccgcggtgaatacgttcccgggccttgtacacaccgcccgtcacaccatgggagtttgttgcaccagaagtagctagcctaactgcaaagaaggcggttaccacggtgtggccgatgactggggtg

SEQ ID NO: 489 - DNA, 1461 bp, Acinetobacter guillouiae
attgaacgctggcggcaggcttaacacatgcaagtcgagcgggggaagttgcttcggtaactgacctagcggcggacgggtgagtaatacttaggaatctgcctattaatgggggacaacatctcgaaagggatgctaataccgcatacgccctacgggggaaagcaggggatcacttgtgaccttgcgttaatagatgagcctaagtcggattagctagttggtggggtaaaggcctaccaaggcgacgatctgtagcgggtctgagaggatgatccgccacactgggactgagacacggcccagactcctacgggaggcagcagtggggaatattggacaatggggggaaccctgatccagccatgccgcgtgtgtgaagaaggccttatggttgtaaagcactttaagcgaggaggaggctctcttggttaatacccaagatgagtggacgttactcgcagaataagcaccggctaactctgtgccagcagccgcggtaatacagagggtgcgagcgttaatcggatttactgggcgtaaagcgtgcgtaggcggctttttaagtcggatgtgaaatccccgagcttaacttgggaattgcattcgatactgggaagctagagtatgggagaggatggtagaattccaggtgtagcggtgaaatgcgtagagatctggaggaataccgatggcgaaggcagccatctggcctaatactgacgctgaggtacgaaagcatggggagcaaacaggattagataccctggtagtccatgccgtaaacgatgtctactagccgttggggcctttgaggctttagtggcgcagctaacgcgataagtagaccgcctggggagtacggtcgcaagactaaaactcaaatgaattgacgggggcccgcacaagcggtggagcatgtggtttaattcgatgcaacgcgaagaaccttacctggtcttgacatagtaagaactttccagagatggattggtgccttcgggaacttacatacaggtgctgcatggctgtcgtcagctcgtgtcgtgagatgttgggttaagtcccgcaacgagcgcaacccttttccttatttgccagcacttcgggtgggaactttaaggatactgccagtgacaaactggaggaaggcggggacgacgtcaagtcatcatggcccttacgaccagggctacacacgtgctacaatggtcggtacaaagggttgctacctagcgataggatgctaatctcaaaaagccgatcgtagtccggattggagtctgcaactcgactccatgaagtcggaatcgctagtaatcgcggatcagaatgccgcggtgaatacgttcccgggccttgtacacaccgcccgtcacaccatgggagtttgttgcaccagaagtaggtagtctaaccgtaaggaggacgcttaccacggtgtggccgatgactggggtg

SEQ ID NO: 490 - DNA, 1460 bp, Acinetobacter gyllenbergii
attgaacgctggcggcaggcttaacacatgcaagtcgagcggggaagggtagcttgctacctaacctagcggcggacgggtgagtaatgcttaggaatctgccatttagtgggggacaacattccgaaaggaatgctaataccgcatacgtcctacgggagaaagcaggggatcttcggaccttgcgctaaatgatgagcctaagtcggattagctagttggtggggtaaaggcctaccaaggcgacgatctgtagcgggtctgagaggatgatccgccacactgggactgagacacggcccagactcctacgggaggcagcagtggggaatattggacaatgggcggaagcctgatccagccatgccgcgtgtgtgaagaaggccttttggttgtaaagcactttaagcgaggaggaggctactagtactaatactactggatagtggacgttactcgcagaataagcaccggctaactctgtgccagcagccgcggtaatacagagggtgcgagcgttaatcggatttactgggcgtaaagcgtgcgtaggcggctttttaagtcggatgtgaaatccccgagcttaacttgggaattgcattcgatactgggaagctagagtatgggagaggatggtagaattccaggtgtagcggtgaaatgcgtagagatctggaggaataccgatggcgaaggcagccatctggcctaatactgacgctgaggtacgaaagcatggggagcaaacaggattagataccctggtagtccatgccgtaaacgatgtctactagccgttggggcctttgaggctttagtggcgcagctaacgcgataagtagaccgcctggggagtacggtcgcaagactaaaactcaaatgaattgacgggggcccgcacaagcggtggagcatgtggtttaattcgatgcaacgcgaagaaccttacctggtcttgacatagtaagaactttccagagatggattggtgccttcgggaacttacatacaggtgctgcatggctgtcgtcagctcgtgtcgtgagatgttgggttaagtcccgcaacgagcgcaacccttttccttatttgccagcgagtaatgtcgggaactttaaggatactgccagtgacaaactggaggaaggcggggacgacgtcaagtcatcatggcccttacgaccagggctacacacgtgctacaatggtcggtacaaagggttgctacctagcgataggatgctaatctcaaaaagccgatcgtagtccggattggagtctgcaactcgactccatgaagtcggaatcgctagtaatcgcggatcagaatgccgcggtgaatacgttcccgggccttgtacacaccgcccgtcacaccatgggagtttgttgcaccagaagtaggtagtctaaccgtaaggaggacgcttaccacggtgtggccgatgactggggtg

SEQ ID NO: 491 - DNA, 1460 bp, Acinetobacter haemolyticus
attgaacgctggcggcaggcttaacacatgcaagtcgagcggggaagggtagcttgctacctaacctagcggcggacgggtgagtaatgcttaggaatctgcctattagtgggggacaacattccgaaaggaatgctaataccgcatacgtcctacgggagaaagcaggggatcttcggaccttgcgctaatagatgagcctaagtcggattagctagttggtggggtaaaggcctaccaaggcgacgatctgtagcgggtctgagaggatgatccgccacactgggactgagacacggcccagactcctacgggaggcagcagtggggaatattggacaatgggcggaagcctgatccagccatgccgcgtgtgtgaagaaggccttttggttgtaaagcactttaagcgaggaggaggctactctagttaatacctagagatagtggacgttactcgcagaataagcaccggctaactctgtgccagcagccgcggtaatacagagggtgcgagcgttaatcggatttactgggcgtaaagcgtgcgtaggcggctgattaagtcggatgtgaaatccctgagcttaacttaggaattgcattcgatactggtcagctagagtatgggagaggatggtagaattccaggtgtagcggtgaaatgcgtagagatctggaggaataccgatggcgaaggcagccatctggcctaatactgacgctgaggtacgaaagcatggggagcaaacaggattagataccctggtagtccatgccgtaaacgatgtctactagccgttggggcctttgaggctttagtggcgcagctaacgcgataagtagaccgcctggggagtacggtcgcaagactaaaactcaaatgaattgacgggggcccgcacaagcggtggagcatgtggtttaattcgatgcaacgcgaagaaccttacctggtcttgacatagtaagaactttccagagatggattggtgccttcgggaacttacatacaggtgctgcatggctgtcgtcagctcgtgtcgtgagatgttgggttaagtcccgcaacgagcgcaacccttttccttatttgccagcgggttaagccgggaactttaaggatactgccagtgacaaactggaggaaggcggggacgacgtcaagtcatcatggcccttacgaccagggctacacacgtgctacaatggtcggtacaaagggttgctacctagcgataggatgctaatctcaaaaagccgatcgtagtccggattggagtctgcaactcgactccatgaagtcggaatcgctagtaatcgcggatcagaatgccgcggtgaatacgttcccgggccttgtacacaccgcccgtcacaccatgggagtttgttgcaccagaagtaggtagtctaaccgtaaggaggacgcttaccacggtgtggccgatgactggggtg

SEQ ID NO: 492 - DNA, 1451 bp, Acinetobacter halotolerans
gcggcaggcttaacacatgcaagtcgagcgggggaaagtagcttgctactggacctagcggcggacgggtgagtaatgcttaggaatctgcctattagtgggggacaacattccgaaagggatgctaataccgcatacgtcctacgggagaaagcaggggatcacttgtgaccttgcgctaatagatgagcctaagtcggattagctagttggtggggtaaaggcctaccaaggcgacgatctgtagcgggtctgagaggatgatccgccacactgggactgagacacggcccagactcctacgggaggcagcagtggggaatattggacaatggggggaaccctgatccagccatgccgcgtgtgtgaagaaggccttatggttgtaaagcactttaagcgaggaggaggctactttggttaatacccagagatagtggacgttactcgcagaataagcaccggctaactctgtgccagcagccgcggtaatacagagggtgcgagcgttaatcggatttactgggcgtaaagcgtgcgtaggtggctaattaagtcaaatgtgaaatccccgagcttaacttgggaattgcattcgatactggttagctagagtatgggagaggatggtagaattccaggtgtagcggtgaaatgcgtagagatctggaggaataccgatggcgaaggcagccatctggcctaatactgacactgaggtacgaaagcatggggagcaaacaggattagataccctggtagtccatgccgtaaacgatgtctactagccgttggggtctttgagactttagtggcgcagctaacgcgataagtagaccgcctggggagtacggtcgcaagactaaaactcaaatgaattgacgggggcccgcacaagcggtggagcatgtggtttaattcgatgcaacgcgaagaaccttacctggccttgacatagtagaaactttccagagatggattggtgccttcgggaatctacatacaggtgctgcatggctgtcgtcagctcgtgtcgtgagatgttgggttaagtcccgcaacgagcgcaacccttttccttatttgccagcgagtaatgtcgggaactttaaggatactgccagtgacaaactggaggaaggcggggacgacgtcaagtcatcatggcccttacggccagggctacacacgtgctacaatggtcggtacaaagggttgctacctagcgataggatgctaatctcaaaaagccgatcgtagtccggattggagtctgcaactcgactccatgaagtcggaatcgctagtaatcgcggatcagaatgccgcggtgaatacgttcccgggccttgtacacaccgcccgtcacaccatgggagtttgttgcaccagaagtagctagcctaactgcaaagagggcggttaccacggtgtggccgatgactggggtg

SEQ ID NO: 493 - DNA, 1459 bp, Acinetobacter indicus
attgaacgctggcggcaggcttaacacatgcaagtcgagcggagcgagggtgcttgcaccttagcttagcggcggacgggtgagtaatgcttaggaatctgcctattagtgggggacaacattccgaaagggatgctaataccgcatacgccctacgggggaaagcaggggatcttcggaccttgcgctaatagatgagcctaagtcggattagctagttggtggggtaaaggcctaccaaggcgacgatctgtagcgggtctgagaggatgatccgccacactgggactgagacacggcccagactcctacgggaggcagcagtggggaatattggacaatggggggaaccctgatccagccatgccgcgtgtgtgaagaaggccttttggttgtaaagcactttaagcgaggaggaggcgctctaggctaataccctagatgcgtggacgttactcgcagaataagcaccggctaactctgtgccagcagccgcggtaatacagagggtgcgagcgttaatcggatttactgggcgtaaagcgcgcgtaggtggctaattaagtcaaatgtgaaatccccgagcttaacttgggaattgcattcgatactggttagctagagtatgggagaggatggtagaattccaggtgtagcggtgaaatgcgtagagatctggaggaataccgatggcgaaggcagccatctggcctaatactgacactgaggtgcgaaagcatggggagcaaacaggattagataccctggtagtccatgccgtaaacgatgtctactagccgttggggcctttgaggctttagtggcgcagctaacgcgataagtagaccgcctggggagtacggtcgcaagactaaaactcaaatgaattgacgggggcccgcacaagcggtggagcatgtggtttaattcgatgcaacgcgaagaaccttacctggccttgacatacagagaactttccagagatggattggtgccttcgggaactctgatacaggtgctgcatggctgtcgtcagctcgtgtcgtgagatgttgggttaagtcccgcaacgagcgcaacccttttccttacttgccagcatttcggatgggaactttaaggatactgccagtgacaaactggaggaaggcggggacgacgtcaagtcatcatggcccttacggccagggctacacacgtgctacaatggtcggtacaaagggttgctacacagcgatgtgatgctaatctcaaaaagccgatcgtagtccggattggagtctgcaactcgactccatgaagtcggaatcgctagtaatcgcggatcagaatgccgcggtgaatacgttcccgggccttgtacacaccgcccgtcacaccatgggagtttgttgcaccagaagtaggtagtctaaccttagggaggacgcttaccacggtgtggccgatgactggggtg

SEQ ID NO: 494 - DNA, 1460 bp, Acinetobacter johnsonii
attgaacgctggcggcaggcttaacacatgcaagtcgagcggggagatgtagcttgctacatttcctagcggcggacgggtgagtaatgcttaggaatctgcctattagtgggggacaacattccgaaaggaatgctaataccgcatacgccctacgggggaaagcaggggatcttcggaccttgcgctaatagatgagcctaagtcagattagctagttggtggggtaaaggcctaccaaggcgacgatctgtagcgggtctgagaggatgatccgccacactgggactgagacacggcccagactcctacgggaggcagcagtggggaatattggacaatgggcgaaagcctgatccagccatgccgcgtgtgtgaagaaggccttttggttgtaaagcactttaagcgaggaggaggctaccgaaattaatactttaggatagtggacgttactcgcagaataagcaccggctaactctgtgccagcagccgcggtaatacagagggtgcgagcgttaatcggatttactgggcgtaaagcgtgcgtaggcggctttttaagtcggatgtgaaatccctgagcttaacttaggaattgcattcgatactgggaagctagagtatgggagaggatggtagaattccaggtgtagcggtgaaatgcgtagagatctggaggaataccgatggcgaaggcagccatctggcctaatactgacgctgaggtacgaaagcatggggagcaaacaggattagataccctggtagtccatgccgtaaacgatgtctactagccgttggggcctttgaggctttagtggcgcagctaacgcgataagtagaccgcctggggagtacggtcgcaagactaaaactcaaatgaattgacgggggcccgcacaagcggtggagcatgtggtttaattcgatgcaacgcgaagaaccttacctggtcttgacatagtaagaactttccagagatggattggtgccttcgggaacttacatacaggtgctgcatggctgtcgtcagctcgtgtcgtgagatgttgggttaagtcccgcaacgagcgcaacccttttccttatttgccagcgggttaagccgggaactttaaggatactgccagtgacaaactggaggaaggcggggacgacgtcaagtcatcatggcccttacgaccagggctacacacgtgctacaatggtcggtacaaagggttgctacctagcgataggatgctaatctcaaaaagccgatcgtagtccggattggagtctgcaactcgactccatgaagtcggaatcgctagtaatcgcggatcagaatgccgcggtgaatacgttcccgggccttgtacacaccgcccgtcacaccatgggaatttgttgcaccagaagtaggtagtctaaccgcaaggaggacgcttaccacggtgtggccgatgactggggtg

SEQ ID NO: 495 - DNA, 1460 bp, Acinetobacter kookii
attgaacgctggcggcaggcttaacacatgcaagtcgagcggagttgtggtgcttgcaccataacttagcggcggacgggtgagtaatgcttaggaatctgcctattagtgggggacaacatctcgaaagggatgctaataccgcatacgtcctacgggagaaagcaggggaccttcgggccttgcgctaatagatgagcctaagtcggattagctagttggtggggtaaaggcctaccaaggcgacgatctgtagcgggtctgagaggatgatccgccacactgggactgagacacggcccagactcctacgggaggcagcagtggggaatattggacaatggggggaaccctgatccagccatgccgcgtgtgtgaagaaggccttttggttgtaaagcactttaagcgaggaggaggctactggtattaatactaccggatagtggacgttactcgcagaataagcaccggctaactctgtgccagcagccgcggtaatacagagggtgcgagcgttaatcggatttactgggcgtaaagcgtgcgtaggcggctttttaagtcggatgtgaaatccctgagcttaacttaggaattgcattcgatactgggaggctagagtatgggagaggatggtagaattccaggtgtagcggtgaaatgcgtagagatctggaggaataccgatggcgaaggcagccatctggcctaatactgacgctgaggtacgaaagcatggggagcaaacaggattagataccctggtagtccatgccgtaaacgatgtctactagccgttggggcctttgaggctttagtggcgcagctaacgcgataagtagaccgcctggggagtacggtcgcaagactaaaactcaaatgaattgacgggggcccgcacaagcggtggagcatgtggtttaattcgatgcaacgcgaagaaccttacctggtcttgacatacagagaactttccagagatggattggtgccttcgggaactctgatacaggtgctgcatggctgtcgtcagctcgtgtcgtgagatgttgggttaagtcccgcaacgagcgcaacccttttccttacttgccatcgggtcatgccgggaactttaaggatactgccagtgacaaactggaggaaggcggggacgacgtcaagtcatcatggcccttacgaccagggctacacacgtgctacaatggtcggtacaaagggttgctacctagcgataggatgctaatctcaaaaagccgatcgtagtccggattggagtctgcaactcgactccatgaagtcggaatcgctagtaatcgcggatcagaatgccgcggtgaatacgttcccgggccttgtacacaccgcccgtcacaccatgggagtttgttgcaccagaagtaggtagtctaaccgcaaggaggacgcttaccacggtgtggccgatgactggggtg

SEQ ID NO: 496 - DNA, 1462 bp, Acinetobacter kyonggiensis
attgaacgctggcggcaggcttaacacatgcaagtcgagcggagatgaggtgcttgcaccttatcttagcggcggacgggtgagtaatacttaggaatctgcctattagtgggggacaacatctcgaaagggatgctaataccgcatacgccctacgggggaaagcaggggatcacttgtgaccttgcgctaatagatgagcctaagtcagattagctagttggtggggtaaaggcctaccaaggcgacgatctgtaacgggtctgagaggatgatccgtcacactgggactgagacacggcccagactcctacgggaggcagcagtggggaatattggacaatggggggaaccctgatccagccatgccgcgtgtgtgaagaaggccttttggttgtaaagcactttaagcgaggaggaggctacttagattaatactctaagatagtggacgttactcgcagaataagcaccggctaactctgtgccagcagccgcggtaatacagagggtgcaagcgttaatcggatttactgggcgtaaagggtacgtaggtggtcttttaagtcggatgtgaaatccctgagcttaacttaggaattgcattcgatactgaaagactagagtatgggagaggatggtagaattccaggtgtagcggtgaaatgcgtagagatctggaggaataccgatggcgaaggcagccatctggcctaatactgacactgaggtacgaaagcatggggagcaaacaggattagataccctggtagtccatgccgtaaacgatgtctactagccgttggggtctttgagactttagtggcgcagctaacgcgataagtagaccgcctggggagtacggtcgcaagactaaaactcaaatgaattgacgggggcccgcacaagcggtggagcatgtggtttaattcgatgcaacgcgaagaaccttacctggtcttgacatagtaagaactttccagagatggattggtgccttcgggagcttacatacaggtgctgcatggctgtcgtcagctcgtgtcgtgagatgttgggttaagtcccgcaacgagcgcaacccttttccttatttgccagcgggttaagccgggaactttaaggatactgccagtgacaaactggaggaaggcggggacgacgtcaagtcatcatggcccttacgaccagggctacacacgtgctacaatggtcggtacaaagggttgctacctagcgataggatgctaatctcaaaaagccgatcgtagtccggattggagtctgcaactcgactccatgaagtcggaatcgctagtaatcgcggatcagaatgccgcggtgaatacgttcccgggccttgtacacaccgcccgtcacaccatgggagtttgttgcaccagaagtaggtagtctaaccgcaaggaggacgcttaccacggtgtggccgacgactggggtg

SEQ ID NO: 497 - DNA, 1460 bp, Acinetobacter lactucae
attgaacgctggcggcaggcttaacacatgcaagtcgagcggggtgatggtgcttgcactatcacctagcggcggacgggtgagtaatgcttaggaatctgcctattagtgggggacaacatttcgaaaggaatgctaataccgcatacgtcctacgggagaaagcaggggatcttcggaccttgcgctaatagatgagcctaagtcggattagctagttggtggggtaaaggcctaccaaggcgacgatctgtagcgggtctgagaggatgatccgccacactgggactgagacacggcccagactcctacgggaggcagcagtggggaatattggacaatgggcgcaagcctgatccagccatgccgcgtgtgtgaagaaggccttatggttgtaaagcactttaagcgaggaggaggctactttagataatacctagagatagtggacgttactcgcagaataagcaccggctaactctgtgccagcagccgcggtaatacagagggtgcaagcgttaatcggatttactgggcgtaaagcgcgcgtaggcggctaattaagtcaaatgtgaaatccccgagcttaacttgggaattgcattcgatactggttagctagagtgtgggagaggatggtagaattccaggtgtagcggtgaaatgcgtagagatctggaggaataccgatggcgaaggcagccatctggcctaacactgacgctgaggtgcgaaagcatggggagcaaacaggattagataccctggtagtccatgccgtaaacgatgtctactagccgttggggcctttgaggctttagtggcgcagctaacgcgataagtagaccgcctggggagtacggtcgcaagactaaaactcaaatgaattgacgggggcccgcacaagcggtggagcatgtggtttaattcgatgcaacgcgaagaaccttacctggccttgacatagtaagaactttccagagatggattggtgccttcgggaacttacatacaggtgctgcatggctgtcgtcagctcgtgtcgtgagatgttgggttaagtcccgcaacgagcgcaacccttttccttatttgccagcgagtaatgtcgggaactttaaggatactgccagtgacaaactggaggaaggcggggacgacgtcaagtcatcatggcccttacggccagggctacacacgtgctacaatggtcggtacaaagggttgctacctagcgataggatgctaatctcaaaaagccgatcgtagtccggattggagtctgcaactcgactccatgaagtcggaatcgctagtaatcgcggatcagaatgccgcggtgaatacgttcccgggccttgtacacaccgcccgtcacaccatgggagtttgttgcaccagaagtagctagcctaactgcaaagagggcggttaccacggtgtggccgatgactggggtg

SEQ ID NO: 498 - DNA, 1459 bp, Acinetobacter larvae
attgaacgctggcggcaggcttaacacatgcaagtcgagcgggggaaggtgcttcggtactggacctagcggcggacgggtgagtaaagcttaggaatctgcccattaatgggggataacgtttcgaaaggagcgctaataccgcatacgccctacgggggaaagcaggggatcgtaagaccttgcgttaatggatgagcctaagtcggattagctagttggtggggtaaaggcctaccaaggcgacgatctgtagcgggtctgagaggatgatccgccacactgggactgagacacggcccagactcctacgggaggcagcagtggggaatattggacaatggggggaaccctgatccagccatgccgcgtgtgtgaagaaggccttatggttgtaaagcactttaagcgaggaggagagtaccttagataatacctaagtgtattggacgttactcgcagaataagcaccggctaactctgtgccagcagccgcggtaatacagagggtgcgagcgttaatcggatttactgggcgtaaagcgtgcgtaggcggccatttaagtcaaatgtgaaatccccgagcttaacttgggaattgcattcgatactgggtggctagagtatgggagaggaaggtagaattccaggtgtagcggtgaaatgcgtagagatctggaggaataccgatggcgaaggcagccttctggcctaatactgacgctgaggtacgaaagcatggggagcaaacaggattagataccctggtagtccatgctgtaaacgatgtctactagccgttggggcctttgaggctttagtggcgcagctaacgcgataagtagaccgcctggggagtacggtcgcaagactaaaactcaaatgaattgacgggggcccgcacaagcggtggagcatgtggtttaattcgatgcaacgcgaagaaccttacctggccttgacatagtgagaacgatctagagatagattggtgccttcgggaattcacatacaggtgctgcatggctgtcgtcagctcgtgtcgtgagatgttgggttaagtcccgcaacgagcgcaacccttttccttacttgccagcatttcggatgggaactttaaggatactgccagtgacaaactggaggaaggcggggacgacgtcaagtcatcatggcccttacggccagggctacacacgtgctacaatggtcggtacaaagggttgctacctagcgataggatgctaatctcaaaaagccgatcgtagtccggattggagtctgcaactcgactccatgaagtcggaatcgctagtaatcgcggatcagaatgccgcggtgaatacgttcccgggccttgtacacaccgcccgtcacaccatgggagtttgttgcaccagaagtaggtaggataaccgtaaggagtccgcttaccacggtgtggccaatgactggggtg

SEQ ID NO: 499 - DNA, 1493 bp, Acinetobacter marinus
attgaacgctggcggcaggcttaacacatgcaagtcgagcgggaataggtagcttgctactgatttctagcggcggacgggtgagtaatgcttaggaatctgcctattagtgggggacaacattccgaaagggatgctaataccgcatacgccctacgggggaaagcaggggatcgtaagaccttgcgctaatagatgagcctaagtcggattagctagttggtggggtaaaggcctaccaaggcgacgatctgtagcgggtctgagaggatgatccgccacactgggactgagacacggcccagactcctacgggaggcagcagtggggaatattggacaatggggggaaccctgatccagccatgccgcgtgtgtgaagaaggccttttggttgtaaagcactttaagcgaggaggaggcttacttagttaatacctaggataagtggacgttactcgcagaataagcaccggctaactctgtgccagcagccgcggtaatacagagggtgcgagcgttaatcggatttactgggcgtaaagcgtgcgtaggcggctttataagttggatgtgaaatccccgagcttaacttgggaattgcattcaaaactgtaaggctagagtatgggagaggatggtagaattccaggtgtagcggtgaaatgcgtagagatctggaggaataccgatggcgaaggcagccatctggcctaatactgacgctgaggtacgaaagcatggggagcaaacaggattagataccctggtagtccatgccgtaaacgatgtctactagccgttggggtctttgagactttagtggcgcagctaacgcgataagtagaccgcctggggagtacggtcgcaagactaaaactcaaatgaattgacgggggcccgcacaagcggtggagcatgtggtttaattcgatgcaacgcgaagaaccttacctggtcttgacatagtagaaactttccagagatggattggtgccttcgggaatctacatacaggtgctgcatggctgtcgtcagctcgtgtcgtgagatgttgggttaagtcccgcaacgagcgcaacccttttccttatttgccagcactttgggtgggaactttaaggatactgccagtgacaaactggaggaaggcggggacgacgtcaagtcatcatggcccttacgaccagggctacacacgtgctacaatggttggtacaaagggttgctacacagcgatgtgatgctaatctcaaaaagccaatcgtagtccggattggagtctgcaactcgactccatgaagtcggaatcgctagtaatcgcggatcagaatgccgcggtgaatacgttcccgggccttgtacacaccgcccgtcacaccatgggagtttgttgcaccagaagtggatagtctaaccttaggggggacgttcaccacggtgtggccgatgactggggtgaagtcgtaacaaggtagccgtaggggaacctgc

SEQ ID NO: 500 - DNA, 1459 bp, Acinetobacter nectaris
attgaacgctggcggcaggcttaacacatgcaagtcgagcgggggattgtagcttgctacatgacctagcggcggacgggtgagtaatacttaggaatctgcctattagtgggggacaacgttccgaaaggagcgctaataccgcatacgccctacgggggaaagcaggggatcttcggaccttgcgctaatagatgagcctaagtcggattagctagttggtagggtaaaggcctaccaaggcgacgatctgtagcgggtttgagaggatgatccgccacactgggactgagacacggcccagactcctacgggaggcagcagtggggaatattggacaatgggcgcaagcctgatccagccatgccgcgtgtgtgaagaaggccttatggttgtaaagcactttaagcgaggaggaggcttacctggataatacctaggataagtggacgttactcgcagaataagcaccggctaactctgtgccagcagccgcggtaatacagagggtgcaagcgttaatcggaattactgggcgtaaagcgcgcgtaggtggccatttaagtcaaatgtgaaatccccgagcttaacttgggaattgcattcgatactgggtggctagagtataggagaggaaggtagaattccaggtgtagcggtgaaatgcgtagagatctggaggaataccgatggcgaaggcagccttctggcctaatactgacactgaggtgcgaaagcatggggagcaaacaggattagataccctggtagtccatgccgtaaacgatgtctactagccgttgggtcctttgaggacttagtggcgcagctaacgcgataagtagaccgcctggggagtacggtcgcaagactaaaactcaaatgaattgacgggggcccgcacaagcggtggagcatgtggtttaattcgatgcaacgcgaagaaccttacctggccttgacatactaagaactttctagagatagattggtgccttcgggaacttagatacaggtgctgcatggctgtcgtcagctcgtgtcgtgagatgttgggttaagtcccgcaacgagcgcaacccttttccttacttgccagcatttcggatgggaactttaaggatactgccagtgacaaactggaggaaggcggggacgacgtcaagtcatcatggcccttacggccagggctacacacgtgctacaatggtcggtacagagggttgctacacagcgatgtgatgctaatctcaaaaagccgatcgtagtccggattggagtctgcaactcgactccatgaagtcggaatcgctagtaatcgcggatcagaatgccgcggtgaatacgttcccgggccttgtacacaccgcccgtcacaccatgggagtttgttgcaccagaagtagatagtctaaccctcgggaggacgtttaccacggtgtggccaatgactggggtg

SEQ ID NO: 501 - DNA, 1460 bp, Acinetobacter nosocomialis
attgaacgctggcggcaggcttaacacatgcaagtcgagcgggggaaggtagcttgctactggacctagcggcggacgggtgagtaatgcttaggaatctgcctattagtgggggacaacatctcgaaagggatgctaataccgcatacgtcctacgggagaaagcaggggatcttcggaccttgcgctaatagatgagcctaagtcggattagctagttggtggggtaaaggcctaccaaggcgacgatctgtagcgggtctgagaggatgatccgccacactgggactgagacacggcccagactcctacgggaggcagcagtggggaatattggacaatgggcgcaagcctgatccagccatgccgcgtgtgtgaagaaggccttatggttgtaaagcactttaagcgaggaggaggctactttagataatacctagagatagtggacgttactcgcagaataagcaccggctaactctgtgccagcagccgcggtaatacagagggtgcaagcgttaatcggatttactgggcgtaaagcgcgcgtaggcggctaattaagtcaaatgtgaaatccccgagcttaacttgggaattgcattcgatactggttagctagagtgtgggagaggatggtagaattccaggtgtagcggtgaaatgcgtagagatctggaggaataccgatggcgaaggcagccatctggcctaacactgacgctgaggtgcgaaagcatggggagcaaacaggattagataccctggtagtccatgccgtaaacgatgtctactagccgttggggcctttgaggctttagtggcgcagctaacgcgataagtagaccgcctggggagtacggtcgcaagactaaaactcaaatgaattgacgggggcccgcacaagcggtggagcatgtggtttaattcgatgcaacgcgaagaaccttacctggccttgacatagtaagaactttccagagatggattggtgccttcgggaacttacatacaggtgctgcatggctgtcgtcagctcgtgtcgtgagatgttgggttaagtcccgcaacgagcgcaacccttttccttatttgccagcgagtaatgtcgggaactttaaggatactgccagtgacaaactggaggaaggcggggacgacgtcaagtcatcatggcccttacggccagggctacacacgtgctacaatggtcggtacaaagggttgctacacagcgatgtgatgctaatctcaaaaagccgatcgtagtccggattggagtctgcaactcgactccatgaagtcggaatcgctagtaatcgcggatcagaatgccgcggtgaatacgttcccgggccttgtacacaccgcccgtcacaccatgggagtttgttgcaccagaagtagctagcctaactgcaaagagggcggttaccacggtgtggccgatgactggggtg

SEQ ID NO: 502 - DNA, 1460 bp, Acinetobacter oleivorans
attgaacgctggcggcaggcttaacacatgcaagtcgagcggagagaggtagcttgctactgatcttagcggcggacgggtgagtaatgcttaggaatctgcctattagtgggggacaacatttcgaaaggaatgctaataccgcatacgtcctacgggagaaagcaggggatcttcggaccttgcgctaatagatgagcctaagtcggattagctagttggtggggtaaaggcctaccaaggcgacgatctgtagcgggtctgagaggatgatccgccacactgggactgagacacggcccagactcctacgggaggcagcagtggggaatattggacaatgggcggaagcctgatccagccatgccgcgtgtgtgaagaaggccttatggttgtaaagcactttaagcgaggaggaggctactttagttaatacctagagatagtggacgttactcgcagaataagcaccggctaactctgtgccagcagccgcggtaatacagagggtgcaagcgttaatcggatttactgggcgtaaagcgcgcgtaggcggctaattaagtcaaatgtgaaatccccgagcttaacttgggaattgcattcgatactggttagctagagtgtgggagaggatggtagaattccaggtgtagcggtgaaatgcgtagagatctggaggaataccgatggcgaaggcagccatctggcctaacactgacgctgaggtgcgaaagcatggggagcaaacaggattagataccctggtagtccatgccgtaaacgatgtctactagccgttggggcctttgaggctttagtggcgcagctaacgcgataagtagaccgcctggggagtacggtcgcaagactaaaactcaaatgaattgacgggggcccgcacaagcggtggagcatgtggtttaattcgatgcaacgcgaagaaccttacctggccttgacatagtaagaactttccagagatggattggtgccttcgggaacttacatacaggtgctgcatggctgtcgtcagctcgtgtcgtgagatgttgggttaagtcccgcaacgagcgcaacccttttccttatttgccagcgagtaatgtcgggaactttaaggatactgccagtgacaaactggaggaaggcggggacgacgtcaagtcatcatggcccttacggccagggctacacacgtgctacaatggtcggtacaaagggttgctacctagcgataggatgctaatctcaaaaagccgatcgtagtccggattggagtctgcaactcgactccatgaagtcggaatcgctagtaatcgcggatcagaatgccgcggtgaatacgttcccgggccttgtacacaccgcccgtcacaccatgggagtttgttgcaccagaagtagctagcctaactgcaaagagggcggttaccacggtgtggccgatgactggggtg

SEQ ID NO: 503 - DNA, 1459 bp, Acinetobacter parvus
attgaacgctggcggcaggcttaacacatgcaagtcgagcggggattgggtgcttgcacctaatcttagcggcggacgggtgagtaatgcttaggaatctgccatttagtgggggacaacattccgaaagggatgctaataccgcatacgccctacgggggaaagcaggggatcttcggaccttgcgctaaatgatgagcctaagtcggattagctagttggtggggtaaaggcctaccaaggcgacgatctgtagcgggtctgagaggatgatccgccacactgggactgagacacggcccagactcctacgggaggcagcagtggggaatattggacaatgggcggaagcctgatccagccatgccgcgtgtgtgaagaaggccttttggttgtaaagcactttaagcgaggaggaggctacctggattaatactctaggatagtggacgttactcgcagaataagcaccggctaactctgtgccagcagccgcggtaatacagagggtgcgagcgttaatcggatttactgggcgtaaagcgtgcgtaggcggctgattaagtcggatgtgaaatccctgagcttaacttaggaattgcattcgatactggtcagctagagtatgggagaggatggtagaattccaggtgtagcggtgaaatgcgtagagatctggaggaataccgatggcgaaggcagccatctggcctaatactgacgctgaggtacgaaagcatggggagcaaacaggattagataccctggtagtccatgccgtaaacgatgtctactagccgttggggcctttgaggctttagtggcgcagctaacgcgataagtagaccgcctggggagtacggtcgcaagactaaaactcaaatgaattgacgggggcccgcacaagcggtggagcatgtggtttaattcgatgcaacgcgaagaaccttacctggccttgacatagtagaaactttccagagatggattggtgccttcgggaatctacatacaggtgctgcatggctgtcgtcagctcgtgtcgtgagatgttgggttaagtcccgcaacgagcgcaacccttttccttacttgccagcatttcggatgggaactttaaggatactgccagtgacaaactggaggaaggcggggacgacgtcaagtcatcatggcccttacggccagggctacacacgtgctacaatggtcggtacaaagggttgctacctagcgataggatgctaatctcaaaaagccgatcgtagtccggattggagtctgcaactcgactccatgaagtcggaatcgctagtaatcgcggatcagaatgccgcggtgaatacgttcccgggccttgtacacaccgcccgtcacaccatgggagtttgttgcaccagaagtaggtagtctaaccttaggggggacgcttaccacggtgtggccgatgactggggtg

SEQ ID NO: 504 - DNA, 1501 bp, Acinetobacter piscicola
agagtttgatcctggctcagattgaacgctggcggcaggcttaacacatgcaagtcgagcggagtgatggtgcttgcactatcacttagcggcggacgggtgagtaatacttaggaatctacctattaatgggggacaacatctcgaaagggatgctaataccgcatacgccctacgggggaaagcaggggatcttcggaccttgcgttaatagatgagcctaagtcggattagctagttggtggggtaaaggcctaccaaggcgacgatctgtagcgggtctgagaggatgatccgccacactgggactgagacacggcccagactcctacgggaggcagcagtggggaatattggacaatggggggaaccctgatccagccatgccgcgtgtgtgaagaaggccttatggttgtaaagcactttaagcgaggaggaggctacctagaataatactctaggatagtggacgttactcgcagaataagcaccggctaactctgtgccagcagccgcggtaatacagagggtgcgagcgttaatcggatttactgggcgtaaagcgtacgtaggcggcttattaagtcggatgtgaaatccctgagcttaacttaggaattgcattcgatactggtgagctagagtatgggagaggatggtagaattccaggtgtagcggtgaaatgcgtagagatctggaggaataccgatggcgaaggcagccatctggcctaatactgacgctgaggtacgaaagcatggggagcaaacaggattagataccctggtagtccatgccgtaaacgatgtctactagccgttggggcctttgaggctttagtggcgcagctaacgcgataagtagaccgcctggggagtacggtcgcaagactaaaactcaaatgaattgacgggggcccgcacaagcggtggagcatgtggtttaattcgatgcaacgcgaagaaccttacctggtcttgacatagtaagaactttccagagatggattggtgccttcgggagcttacatacaggtgctgcatggctgtcgtcagctcgtgtcgtgagatgttgggttaagtcccgcaacgagcgcaacccttttccttatttgccagcacttcgggtgggaactttaaggatactgccagtgacaaactggaggaaggcggggacgacgtcaagtcatcatggcccttacgaccagggctacacacgtgctacaatggtcggtacaaagggttgctacctagcgataggatgctaatctcaaaaagccgatcgtagtccggattggagtctgcaactcgactccatgaagtcggaatcgctagtaatcgcggatcagaatgccgcggtgaatacgttcccgggccttgtacacaccgcccgtcacaccatgggagtttgttgcaccagaagtaggtagtctaaccttagggaggacgcttaccacggtgtggccgacgactggggtgaagtcgtaacaaggtagccgta

SEQ ID NO: 505 - DNA, 1460 bp, Acinetobacter populi
attgaacgctggcggcaggcttaacacatgcaagtcgagcgggggaaggtagcttgctaccggacctagcggcggacgggtgagtaatacttaggaatctgcctattagtgggggacaacgtttcgaaagggacgctaataccgcatacgtcctacgggagaaagcaggggctctttatgaccttgcgctaatagatgagcctaagtcggattagctagttggtggggtaaaggcctaccaaggcgacgatctgtagcgggtctgagaggatgatccgccacactgggactgagacacggcccagactcctacgggaggcagcagtggggaatattggacaatggggggaaccctgatccagccatgccgcgtgtgtgaagaaggcatttttgttgtaaagcactttaagcgaggaggaggctctttaggttaataccctgaatgagtggacgttactcgcagaataagcaccggctaactctgtgccagcagccgcggtaatacagagggtgcgagcgttaatcggatttactgggcgtaaagcgtgcgtaggcggccaattaagtcaaatgtgaaatccccgagcttaacttgggaattgcattcgatactggttggctagagtatgggagaggatggtagaattccaggtgtagcggtgaaatgcgtagagatctggaggaataccgatggcgaaggcagccatctggcctaatactgacgctgaggtacgaaagcatggggagcaaacaggattagataccctggtagtccatgccgtaaacgatgtctactagccgttggggcctttgaggctttagtggcgcagctaacgcgataagtagaccgcctggggagtacggtcgcaagactaaaactcaaatgaattgacgggggcccgcacaagcggtggagcatgtggtttaattcgatgcaacgcgaagaaccttacctggccttgacatactaagaatatagcagagatgctttagtgccttcgggaacttagatacaggtgctgcatggctgtcgtcagctcgtgtcgtgagatgttgggttaagtcccgcaacgagcgcaacccttttccttacttgccagcatttcggatgggaactttaaggatactgccagtgacaaactggaggaaggcggggacgacgtcaagtcatcatggcccttacggccagggctacacacgtgctacaatggtcggtacaaagggttgctacacagcgatgtgatgctaatctcaaaaagccgatcgtagtccggattggagtctgcaactcgactccatgaagtcggaatcgctagtaatcgcggatcagaatgccgcggtgaatacgttcccgggccttgtacacaccgcccgtcacaccatgggagtttgttgcaccagaagtagctagcctaactgcaaagagggcggttaccacggtgtggccgatgactggggtg

SEQ ID NO: 506 - DNA, 1460 bp, Acinetobacter pragensis
attgaacgctggcggcaggcttaacacatgcaagtcgagcggggaaaggtagcttgctactggacctagcggcggacgggtgagtaatgcttaggaatctgcctattagtgggggacaacgtttcgaaaggaacgctaataccgcatacgccctacgggggaaagcaggggatcttcggaccttgcgctaatagatgagcctaagtcggattagctagttggtggggtaaaggcctaccaaggcgacgatctgtagcgggtctgagaggatgatccgccacactgggactgagacacggcccagactcctacgggaggcagcagtggggaatattggacaatggggggaaccctgatccagccatgccgcgtgtgtgaagaaggccttttggttgtaaagcactttaagcgaggaggaggctcctatagataatacctatagtgagtggacgttactcgcagaataagcaccggctaactctgtgccagcagccgcggtaatacagagggtgcgagcgttaatcggatttactgggcgtaaagcgtgcgtaggtggtcttttaagtcggatgtgaaatccctgagcttaacttaggaattgcattcgatactgggagactagagtatgggagaggatggtagaattccaggtgtagcggtgaaatgcgtagagatctggaggaataccgatggcgaaggcagccatctggcctaatactgacactgaggcacgaaagcatggggagcaaacaggattagataccctggtagtccatgccgtaaacgatgtctactagccgttggggcctttgaggctttagtggcgcagctaacgcgataagtagaccgcctggggagtacggtcgcaagactaaaactcaaatgaattgacgggggcccgcacaagcggtggagcatgtggtttaattcgatgcaacgcgaagaaccttacctggccttgacatacagagaactttccagagatggattggtgccttcgggaactctgatacaggtgctgcatggctgtcgtcagctcgtgtcgtgagatgttgggttaagtcccgcaacgagcgcaacccttttccttatttgccagcgggtaatgccgggaactttaaggatactgccagtgacaaactggaggaaggcggggacgacgtcaagtcatcatggcccttacggccagggctacacacgtgctacaatggtcggtacaaagggttgctacctagcgataggatgctaatctcaaaaagccgatcgtagtccggattggagtctgcaactcgactccatgaagtcggaatcgctagtaatcgcggatcagaatgccgcggtgaatacgttcccgggccttgtacacaccgcccgtcacaccatgggagtttgttgcaccagaagtaggtagtctaaccgcaaggaggacgcttaccacggtgtggccgacgactggggtg

SEQ ID NO: 507 - DNA, 1460 bp, Acinetobacter proteolyticus
attgaacgctggcggcaggcttaacacatgcaagtcgagcggagtgatggtgcttgcactatcacttagcggcggacgggtgagtaatgcttaggaatctgccatttagtgggggacaacattccgaaaggaatgctaataccgcatacgtcctacgggagaaagcaggggatcttcggaccttgcgctaaatgatgagcctaagtcggattagctagttggtggggtaaaggcctaccaaggcgacgatctgtagcgggtctgagaggatgatccgccacactgggactgagacacggcccagactcctacgggaggcagcagtggggaatattggacaatgggcggaagcctgatccagccatgccgcgtgtgtgaagaaggccttttggttgtaaagcactttaagcgaggaggaggctacctggattaatactctaggatagtggacgttactcgcagaataagcaccggctaactctgtgccagcagccgcggtaatacagagggtgcgagcgttaatcggatttactgggcgtaaagcgtgcgtaggcggctttttaagtcggatgtgaaatccccgagcttaacttgggaattgcattcgatactgggaagctagagtatgggagaggatggtagaattccaggtgtagcggtgaaatgcgtagagatctggaggaataccgatggcgaaggcagccatctggcctaatactgacgctgaggtacgaaagcatggggagcaaacaggattagataccctggtagtccatgccgtaaacgatgtctactagccgttggggcctttgaggctttagtggcgcagctaacgcgataagtagaccgcctggggagtacggtcgcaagactaaaactcaaatgaattgacgggggcccgcacaagcggtggagcatgtggtttaattcgatgcaacgcgaagaaccttacctggtcttgacatagtaagaactttccagagatggattggtgccttcgggaacttacatacaggtgctgcatggctgtcgtcagctcgtgtcgtgagatgttgggttaagtcccgcaacgagcgcaacccttttccttatttgccagcgggttaagccgggaactttaaggatactgccagtgacaaactggaggaaggcggggacgacgtcaagtcatcatggcccttacgaccagggctacacacgtgctacaatggtcggtacaaagggttgctacctagcgataggatgctaatctcaaaaagccgatcgtagtccggattggagtctgcaactcgactccatgaagtcggaatcgctagtaatcgcggatcagaatgccgcggtgaatacgttcccgggccttgtacacaccgcccgtcacaccatgggagtttgttgcaccagaagtaggtagtctaaccgtaaggaggacgcttaccacggtgtggccgatgactggggtg

SEQ ID NO: 508 - DNA, 1462 bp, Acinetobacter puyangensis
attgaacgctggcggcaggcttaacacatgcaagtcgagcggttttatgtagcttgctacataagatagcggcggacgggtgagtaatacttaggaatctgcctattagtgggggacaacgtttcgaaagggacgctaataccgcatacgtcctacgggagaaagcaggggatcacttgtgaccttgcgctaatagatgagcctaagtcggattagctagttggtggggtaaaggcctaccaaggcgacgatctgtagcgggtctgagaggatgatccgccacactgggactgagacacggcccagactcctacgggaggcagcagtggggaatattggacaatggggggaaccctgatccagccatgccgcgtgtgtgaagaaggcatttttgttgtaaagcactttaagcgaggaggaggctctcttagataatacctaaggtgagtggacgttactcgcagaataagcaccggctaactctgtgccagcagccgcggtaatacagagggtgcgagcgttaatcggatttactgggcgtaaagcgtgcgtaggcggctaattaagtcaaatgtgaaatccccgagcttaacttgggaattgcattcgatactggttagctagagtatgggagaggatggtagaattccaggtgtagcggtgaaatgcgtagagatctggaggaataccgatggcgaaggcagccatctggcctaatactgacgctgaggtacgaaagcatggggagcaaacaggattagataccctggtagtccatgccgtaaacgatgtctactagccgttggggcctttgaggctttagtggcgcagctaacgcgataagtagaccgcctggggagtacggtcgcaagactaaaactcaaatgaattgacgggggcccgcacaagcggtggagcatgtggtttaattcgatgcaacgcgaagaaccttacctggccttgacatagtagaaactttccagagatggattggtgccttcgggaatctacatacaggtgctgcatggctgtcgtcagctcgtgtcgtgagatgttgggttaagtcccgcaacgagcgcaacccttttccttacttgccatcgggtaatgccgggaactttaaggatactgccagtgacaaactggaggaaggcggggacgacgtcaagtcatcatggcccttacggccagggctacacacgtgctacaatggtcggtacaaagggttgctacatagcgatatgatgctaatctcaaaaagccgatcgtagtccggattggagtctgcaactcgactccatgaagtcggaatcgctagtaatcgcggatcagaatgccgcggtgaatacgttcccgggccttgtacacaccgcccgtcacaccatgggagtttgttgcaccagaagtagctagcctaactgcaaagagggcggttaccacggtgtggccgatgactggggtg

SEQ ID NO: 509 - DNA, 1399 bp, Acinetobacter qingfengensis
agtcgagcgggggatattacttcggtaattgacctagcggcggacgggtgagtaatacttaggaatctgcctattagtgggggacaacgttccgaaaggagcgctaataccgcatacgccctacgggggaaagcaggggatcacttgtgaccttgtgctaatagatgagcctaagtcggattagctagttggtggggtaaaggcctaccaaggcgacgatctgtagcgggtctgagaggatgatccgccacactgggactgagacacggcccagactcctacgggaggcagcagtggggaatattggacaatgggggaaaccctgatccagccatgccgcgtgtgtgaagaaggccttatggttgtaaagcactttaagcgaggaggaggcttacctaactaatacttaggctaagtggacgttactcgcagaataagcaccggctaactctgtgccagcagccgcggtaatacagagggtgcgagcgttaatcggatttactgggcgtaaagcgtgcgtaggcggcttattaagtcggatgtgaaatccccgagcttaacttgggaattgcattcgatactggtaagctagagtatgggagaggatggtagaattccaggtgtagcggtgaaatgcgtagagatctggaggaataccgatggcgaaggcagccatctggcctaatactgacgctgaggtacgaaagcatggggagcaaacaggattagataccctggtagtccatgccgtaaacgatgtctactagccgttggtctctttgagggattagtggcgcagctaacgcgataagtagaccgcctggggagtacggtcgcaagactaaaactcaaatgaattgacgggggcccgcacaagcggtggagcatgtggtttaattcgatgcaacgcgaagaaccttacctggccttgacatagtgagaatctttcagagatgagagagtgccttcgggaattcacatacaggtgctgcatggctgtcgtcagctcgtgtcgtgagatgttgggttaagtcccgcaacgagcgcaacccttttccttacttgccagcatttcggatgggaactttaaggatactgccagtgacaaactggaggaaggcggggacgacgtcaagtcatcatggcccttacggccagggctacacacgtgctacaatggtcggtacaaagggttgctagtccgcgagggcatgctaatctcaaaaagccgatcgtagtccggattggagtctgcaactcgactccatgaagtcggaatcgctagtaatcgcggatcagaatgccgcggtgaatacgttcccgggccttgtacacaccgcccgtcacaccatgggagtttgttgcaccagaagtagctagcctaacagcaatgagggcg

SEQ ID NO: 510 - DNA, 1461 bp, Acinetobacter rudis
attgaacgctggcggcaggcttaacacatgcaagtcgagcggggaaaggtagcttgctactggacctagcggcggacgggtgagtaatacttaggaatctgcctattagtgggggacaacgttccgaaaggagcgctaataccgcatacgccctacgggggaaagcaggggatcacttgtgaccttgcgctaatagatgagcctaagtcggattagctagttggtggggtaaaggcctaccaaggcgacgatctgtagcgggtctgagaggatgatccgccacactgggactgagacacggcccagactcctacgggaggcagcagtggggaatattggacaatggggggaaccctgatccagccatgccgcgtgtgtgaagaaggccttttggttgtaaagcactttaagcgaggaggagaggccctaggttaataccctaggtgcttggacgttactcgcagaataagcaccggctaactctgtgccagcagccgcggtaatacagagggtgcgagcgttaatcggatttactgggcgtaaagcgtgcgtaggcggccatttaagtcggatgtgaaatccccgagctcaacttgggaattgcattcgatactgggtggctagagtataggagaggaaggtagaattccaggtgtagcggtgaaatgcgtagagatctggaggaataccgatggcgaaggcagccttctggcctaatactgacgctgaggtacgaaagcatggggagcaaacaggattagataccctggtagtccatgccgtaaacgatgtctactagccgttggggtctttgagaccttagtggcgcagctaacgcgataagtagaccgcctggggagtacggtcgcaagactaaaactcaaatgaattgacgggggcccgcacaagcggtggagcatgtggtttaattcgatgcaacgcgaagaaccttacctggccttgacatactagaaactttccagagatggattggtgccttcgggaatctagatacaggtgctgcatggctgtcgtcagctcgtgtcgtgagatgttgggttaagtcccgcaacgagcgcaacccttttccttatttgccagcacttcgggtgggaactttaaggatactgccagtgacaaactggaggaaggcggggacgacgtcaagtcatcatggcccttacggccagggctacacacgtgctacaatggtcggtacaaagggttgctacctagcgataggatgctaatctcaaaaagccgatcgtagtccggattggagtctgcaactcgactccatgaagtcggaatcgctagtaatcgcggatcagaatgccgcggtgaatacgttcccgggccttgtacacaccgcccgtcacaccatgggagtttgttgcaccagaagtgggtaggataaccgtaaggagtccgctcaccacggtgtggccaatgactggggtg

SEQ ID NO: 511 - DNA, 1460 bp, Acinetobacter seifertii
attgaacgctggcggcaggcttaacacatgcaagtcgagcggagagaggtagcttgctactgaacctagcggcggacgggtgagtaatgcttaggaatctgcctattagtgggggacaacatctcgaaagggatgctaataccgcatacgtcctacgggagaaagcaggggatcttcggaccttgcgctaatagatgagcctaagtcggattagctagttggtggggtaaaggcctaccaaggcgacgatctgtagcgggtctgagaggatgatccgccacactgggactgagacacggcccagactcctacgggaggcagcagtggggaatattggacaatggggggaaccctgatccagccatgccgcgtgtgtgaagaaggccttatggttgtaaagcactttaagcgaggaggaggctactttagttaatacctagagatagtggacgttactcgcagaataagcaccggctaactctgtgccagcagccgcggtaatacagagggtgcaagcgttaatcggatttactgggcgtaaagcgcgcgtaggcggctaattaagtcaaatgtgaaatccccgagcttaacttgggaattgcattcgatactggttagctagagtgtgggagaggatggtagaattccaggtgtagcggtgaaatgcgtagagatctggaggaataccgatggcgaaggcagccatctggcctaacactgacgctgaggtgcgaaagcatggggagcaaacaggattagataccctggtagtccatgccgtaaacgatgtctactagccgttggggcctttgaggctttagtggcgcagctaacgcgataagtagaccgcctggggagtacggtcgcaagactaaaactcaaatgaattgacgggggcccgcacaagcggtggagcatgtggtttaattcgatgcaacgcgaagaaccttacctggccttgacatagtaagaactttccagagatggattggtgccttcgggaacttacatacaggtgctgcatggctgtcgtcagctcgtgtcgtgagatgttgggttaagtcccgcaacgagcgcaacccttttccttatttgccagcgagtaatgtcgggaactttaaggatactgccagtgacaaactggaggaaggcggggacgacgtcaagtcatcatggcccttacggccagggctacacacgtgctacaatggtcggtacaaagggttgctacacagcgatgtgatgctaatctcaaaaagccgatcgtagtccggattggagtctgcaactcgactccatgaagtcggaatcgctagtaatcgcggatcagaatgccgcggtgaatacgttcccgggccttgtacacaccgcccgtcacaccatgggagtttgttgcaccagaagtagctagcctaactgcaaagagggcggttaccacggtgtggccgatgactggggtg

SEQ ID NO: 512 - DNA, 1461 bp, Acinetobacter soli
attgaacgctggcggcaggcttaacacatgcaagtcgagcggggtgatggtgcttgcactatcacttagcggcggacgggtgagtaatgcttaggaatctgcctattagtgggggacaacatctcgaaagggatgctaataccgcatacgtcctacgggagaaagcaggggatcacttgtgaccttgcgctaatagatgagcctaagtcggattagctagttggtggggtaaaggcctaccaaggcgacgatctgtagcgggtctgagaggatgatccgccacactgggactgagacacggcccagactcctacgggaggcagcagtggggaatattggacaatggggggaaccctgatccagccatgccgcgtgtgtgaagaaggccttatggttgtaaagcactttaagcgaggaggaggctcttttggttaatacccaagatgagtggacgttactcgcagaataagcaccggctaactctgtgccagcagccgcggtaatacagagggtgcaagcgttaatcggatttactgggcgtaaagcgcgcgtaggcggccaattaagtcaaatgtgaaatccccgagcttaacttgggaattgcattcgatactggttggctagagtgtgggagaggatggtagaattccaggtgtagcggtgaaatgcgtagagatctggaggaataccgatggcgaaggcagccatctggcctaacactgacgctgaggtgcgaaagcatggggagcaaacaggattagataccctggtagtccatgccgtaaacgatgtctactagccgttggggcctttgaggctttagtggcgcagctaacgcgataagtagaccgcctggggagtacggtcgcaagactaaaactcaaatgaattgacgggggcccgcacaagcggtggagcatgtggtttaattcgatgcaacgcgaagaaccttacctggccttgacatagtagaaactttccagagatggattggtgccttcgggaatctacatacaggtgctgcatggctgtcgtcagctcgtgtcgtgagatgttgggttaagtcccgcaacgagcgcaacccttttccttacttgccagcatttcggatgggaactttaaggatactgccagtgacaaactggaggaaggcggggacgacgtcaagtcatcatggcccttacggccagggctacacacgtgctacaatggtcggtacaaagggttgctacctagcgataggatgctaatctcaaaaagccgatcgtagtccggattggagtctgcaactcgactccatgaagtcggaatcgctagtaatcgcggatcagaatgccgcggtgaatacgttcccgggccttgtacacaccgcccgtcacaccatgggagtttgttgcaccagaagtagctagcctaactgcaaagagggcggttaccacggtgtggccgatgactggggtg

SEQ ID NO: 513 - DNA, 1459 bp, Acinetobacter tandoii
attgaacgctggcggcaggcttaacacatgcaagtcgagcgggggaggtggccttgcaccttagcttagcggcggacgggtgagtaatgcttaggaatctgcctattagtgggggacaacattccgaaaggaatgctaataccgcatacgccctacgggggaaagcaggggatcttcggaccttgcgctaatagatgagcctaagtcggattagctagttggtggggtaaaggcctaccaaggcgacgatctgtagcgggtctgagaggatgatccgccacactgggactgagacacggcccagactcctacgggaggcagcagtggggaatattggacaatgggcggaagcctgatccagccatgccgcgtgtgtgaagaaggccttttggttgtaaagcactttaagcgaggaggaggctcttaaggttaatacccttgatgagtggacgttactcgcagaataagcaccggctaactctgtgccagcagccgcggtaatacagagggtgcgagcgttaatcggatttactgggcgtaaagcgtgcgtaggcggctgattaagtcggatgtgaaatccctgagcttaacttaggaattgcattcgatactggtcagctagagtatgggagaggatggtagaattccaggtgtagcggtgaaatgcgtagagatctggaggaataccgatggcgaaggcagccatctggcctaatactgacgctgaggtacgaaagcatggggagcaaacaggattagataccctggtagtccatgccgtaaacgatgtctactagccgttggggcctttgaggctttagtggcgcagctaacgcgataagtagaccgcctggggagtacggtcgcaagactaaaactcaaatgaattgacgggggcccgcacaagcggtggagcatgtggtttaattcgatgcaacgcgaagaaccttacctggtcttgacatagtaagaactttccagagatggattggtgccttcgggaacttacatacaggtgctgcatggctgtcgtcagctcgtgtcgtgagatgttgggttaagtcccgcaacgagcgcaacccttttccttatttgccagcacttcgggtgggaactttaaggatactgccagtgacaaactggaggaaggcggggacgacgtcaagtcatcatggcccttacgaccagggctacacacgtgctacaatggtcggtacaaagggttgctacctagcgataggatgctaatctcaaaaagccgatcgtagtccggattggagtctgcaactcgactccatgaagtcggaatcgctagtaatcgcggatcagaatgccgcggtgaatacgttcccgggccttgtacacaccgcccgtcacaccatgggagtttgttgcaccagaagtagctagcctaactgcaaagagggcggttaccacggtgtggccgatgactggggtg

SEQ ID NO: 514 - DNA, 1460 bp, Acinetobacter tjernbergiae
attgaacgctggcggcaggcttaacacatgcaagtcgagcggagatgaggtgcttgcaccttatcttagcggcggacgggtgagtaatgcttaggaatctgccatttagtgggggacaacatttcgaaagggatgctaataccgcatacgtcctacgggagaaagcaggggatcttcggaccttgcgctaaatgatgagcctaagtcggattagctagttggtggggtaaaggcctaccaaggcgacgatctgtagcgggtctgagaggatgatccgccacactgggactgagacacggcccagactcctacgggaggcagcagtggggaatattggacaatgggcggaagcctgatccagccatgccgcgtgtgtgaagaaggccttttggttgtaaagcactttaagcgaggaggaggctacttagattaatactctaggatagtggacgttactcgcagaataagcaccggctaactctgtgccagcagccgcggtaatacagagggtgcgagcgttaatcggatttactgggcgtaaagcgtgcgtaggcggctgattaagtcggatgtgaaatccctgagcttaacttaggaattgcattcgatactggtcagctagagtatgggagaggatggtagaattccaggtgtagcggtgaaatgcgtagagatctggaggaataccgatggcgaaggcagccatctggcctaatactgacgctgaggtacgaaagcatggggagcaaacaggattagataccctggtagtccatgccgtaaacgatgtctactagccgttggggcctttgaggctttagtggcgcagctaacgcgataagtagaccgcctggggagtacggtcgcaagactaaaactcaaatgaattgacgggggcccgcacaagcggtggagcatgtggtttaattcgatgcaacgcgaagaaccttacctggccttgacatagtaagaactttccagagatggattggtgccttcgggaacttacatacaggtgctgcatggctgtcgtcagctcgtgtcgtgagatgttgggttaagtcccgcaacgagcgcaacccttttccttatttgccagcgagtaatgtcgggaactttaaggatactgccagtgacaaactggaggaaggcggggacgacgtcaagtcatcatggcccttacggccagggctacacacgtgctacaatggtcggtacaaagggttgctacctagcgataggatgctaatctcaaaaagccgatcgtagtccggattggagtctgcaactcgactccatgaagtcggaatcgctagtaatcgcggatcagaatgccgcggtgaatacgttcccgggccttgtacacaccgcccgtcacaccatgggagtttgttgcaccagaagtaggtagtctaaccgcaaggaggacgcttaccacggtgtggccgatgactggggtg

SEQ ID NO: 515 - DNA, 1459 bp, Acinetobacter venetianus
attgaacgctggcggcaggcttaacacatgcaagtcgagcggggaaaggtagcttgctactggacctagcggcggacgggtgagtaatgcttaggaatctgcctattagtgggggacaacattccgaaaggaatgctaataccgcatacgtcctacgggagaaagcaggggaccttcgggccttgcgctaatagatgagcctaagtcggattagctagttggtggggtaaaggcctaccaaggcgacgatctgtagcgggtctgagaggatgatccgccacactgggactgagacacggcccagactcctacgggaggcagcagtggggaatattggacaatggggggaaccctgatccagccatgccgcgtgtgtgaagaaggccttatggttgtaaagcactttaagcgaggaggaggctactagtattaatactactggatagtggacgttactcgcagaataagcaccggctaactctgtgccagcagccgcggtaatacagagggtgcgagcgttaatcggatttactgggcgtaaagcgtgcgtaggcggccatttaagtcaaatgtgaaatccccgagcttaacttgggaattgcattcgatactggatggctagagtatgggagaggatggtagaattccaggtgtagcggtgaaatgcgtagagatctggaggaataccgatggcgaaggcagccatctggcctaatactgacgctgaggtacgaaagcatggggagcaaacaggattagataccctggtagtccatgccgtaaacgatgtctactagccgttggggcctttgaggctttagtggcgcagctaacgcgataagtagaccgcctggggagtacggtcgcaagactaaaactcaaatgaattgacgggggcccgcacaagcggtggagcatgtggtttaattcgatgcaacgcgaagaaccttacctggccttgacatactagaaactttccagagatggattggtgccttcgggaatctagatacaggtgctgcatggctgtcgtcagctcgtgtcgtgagatgttgggttaagtcccgcaacgagcgcaacccttttccttacttgccagcatttcggatgggaactttaaggatactgccagtgacaaactggaggaaggcggggacgacgtcaagtcatcatggcccttacggccagggctacacacgtgctacaatggtcggtacaaagggttgctacctagcgataggatgctaatctcaaaaagccgatcgtagtccggattggagtctgcaactcgactccatgaagtcggaatcgctagtaatcgcggatcagaatgccgcggtgaatacgttcccgggccttgtacacaccgcccgtcacaccatgggagtttgttgcaccagaagtaggtagtctaaccgcaaggaggacgcttaccacggtgtggccgatgactggggtg

SEQ ID NO: 516 - DNA, 1451 bp, Actinobacillus capsulatus
  misc_feature (252)..(252): n is a, c, g, or t
  misc_feature (482)..(482): n is a, c, g, or t
  misc_feature (594)..(594): n is a, c, g, or t
  misc_feature (626)..(626): n is a, c, g, or t
  misc_feature (644)..(644): n is a, c, g, or t
  misc_feature (666)..(666): n is a, c, g, or t
  misc_feature (675)..(675): n is a, c, g, or t
  misc_feature (683)..(683): n is a, c, g, or t
  misc_feature (738)..(738): n is a, c, g, or t
  misc_feature (763)..(763): n is a, c, g, or t
  misc_feature (816)..(816): n is a, c, g, or t
  misc_feature (888)..(888): n is a, c, g, or t
  misc_feature (938)..(938): n is a, c, g, or t
  misc_feature (1056)..(1056): n is a, c, g, or t
  misc_feature (1063)..(1064): n is a, c, g, or t
  misc_feature (1140)..(1140): n is a, c, g, or t
  misc_feature (1177)..(1177): n is a, c, g, or t
  misc_feature (1179)..(1179): n is a, c, g, or t
attgaacgctggcggcaggcttaacacatgcaagtcgaacggtagcaggaaagtacttgtacttttgctgacgagtggcggacgggtgagtaatgcttgggaatctggcttatggagggggataactactggaaacggtagctaataccgcgtaatatcggaagattaaagggtgggaccatttggccacctgccataagatgagcccaagtgggattaggtagttggtggggtaagggcctaccaagcctncgatctctagctggtctgagaggatgaccagccacactggaactgagacacggtccagactcctacgggaggcagcagtggggaatattgcacaatggggggaaccctgatgcagccatgccgcgtgaatgaagaaggccttcgggttgtaaagttctttcggtgatgaggaaggcggttagtttaatagactaattgattgacgttagtcacagaagaagcaccggctnactccgtgccagcagccgcggtaatacggagggtgcgagcgttaatcggaataactgggcgtaaagggcacgcaggcggatttttaagtgagatgtgaaagccccgagcttnacttgggaattgcatttcagactggaagtctngagtattttagggagggntagaattccacgtgtagcggtnaaatgcgtngagatgtngaggaataccgaaggcgaaggcagccccttgggaatgtactgacgctcatgtgcnaaagcgtggggagcaaacaggattngataccctggtagtccacgctgtaaacgctgtcgatttggggattgggctttnagcttggtgcccgtagctaacgtgataaatcgaccgcctggggagtacggccgcaaggttaaaactcaaatnaattgacgggggcccgcacaagcggtggagcatgtggtttaattcgatgnaacgcgaagaaccttacctactcttgacatcctcagaatccgatagagatattggagtgcctttgggaactgagagacaggtgctgcatggctgtcgtcagctcgtgttgtgaaatgntgggttnngtcccgcaacgagcgcaacccttatcctttgttgccagcgattaggtcgggaactcaaaggagactgccagtgatnaactggaggaaggtggggatgacgtcaagtcatcatngnccttacgagtagggctacacacgtgctacaatggtgcatacagagggcgacaaacctgcgagggggagtgaatctcagaaagtgcatctaagtccggattggagtctgcaactcgactccatgaagtcggaatcgctagtaatcgcgaatcagaatgtcgcggtgaatacgttcccgggccttgtacacaccgcccgtcacaccatgggagtgggttgtaccagaagtagatagcttaaccgagaggggggcgtttaccacggtatgattca

SEQ ID NO: 517 - DNA, 1365 bp, Actinobacillus delphinicola
  misc_feature (185)..(185): n is a, c, g, or t
attgaacgctggcggcaggcttaacacatgcaagtcgaacggtaacaggaagaaagcttgctttctttgctgacgagtggcggacgggtgagtaatgcttgggaatctgtttcatggagggggataactacgggaaactgtagctaataccgcgtaatatcgagagattaaatgtgtgggaccgnaaggccacatgccatgaagtgagcccaagtgggattagatagttggtgaggtaatggctcaccaagtcggcgatctctagctggtctgagaggatgaccagccacactgggactgagacacggcccagactcctacgggaggcagcagtggggaatattgcacaatgggcgcaagcctgatgcagccatgccgcgtgaatgaagaaggccttcgggttgtaaagttctttcggtggtgaggaaggttggcgtgttaatagcacgttgacttgacgttagccacagaagaagcaccggctaactccgtgccagcagccgcggtaatacggagggtgcgagcgttaatcggaataactgggcgtaaagggcacgcaggcggtgacttaagtgaggtgtgaaagccctgggcttaacctaggaattgcatttcatactgggtcgctagagtattttagggaggggtagaattccacgtgtagcggtgaaatgcgtagagatgtggaggaataccgaaggcgaaggcagccccttgggaatatactgacgctcatgtgcgaaagcgtggggagcaaacaggattagataccctggtagtccacgctgtaaacgatgtcgatttggggattgggctttaggtctggtgcccgtagctaacgtgataaatcgaccgcctggggagtacggccgcaaggttaaaactcaaatgaattgacgggggcccgcacaagcggtggagcatgtggtttaattcgatgcaacgcgaagaaccttacctactcttgacatccatggaaccttgtagagatacgagggtgccttcgggaaccatgagacaggtgctgcatggctgtcgtcagctcgtgttgtgaaatgttgggttaagtcccgcaacgagcgcaacccttatcctttgttgccagcggtttggccgggaactcaaaggagactgccagtgataaactggaggaaggtggggatgacgtcaagtcatcatggcccttacgagtagggctacacacgtgctacaatggcgtatacagagggcagcgagcctgcgagggtgagcgaatctcagaaagtacgtctaagtccggattggagtctgcaactcgactccatgaagtcggaatcgctagtaatcgcgaatcagaatgtcgcggtgaatacgttcccgggcctt

SEQ ID NO: 518 - DNA, 1452 bp, Actinobacillus equuli
  misc_feature (593)..(594): n is a, c, g, or t
  misc_feature (814)..(816): n is a, c, g, or t
  misc_feature (843)..(843): n is a, c, g, or t
  misc_feature (888)..(888): n is a, c, g, or t
  misc_feature (937)..(938): n is a, c, g, or t
  misc_feature (1063)..(1063): n is a, c, g, or t
  misc_feature (1140)..(1140): n is a, c, g, or t
  misc_feature (1179)..(1179): n is a, c, g, or t
  misc_feature (1360)..(1360): n is a, c, g, or t
attgaacgctggcggcaggcttaacacatgcaagtcgaacggtagcacgaaggagcttgctccttgggtgacgagtggcggacgggtgagtaatgcttgggaatctggcttatggagggggataactacgggaaactgtagctaataccgcgtaatatcttcggattaaagtgtgggaccgcaaggccacatgccatgagatgagcccaagtgggattaggtagttggtggggtaaaggcctaccaagccgacgatctctagctggtctgagaggatgaccagccacactggaactgagacacggtccagactcctacgggaggcagcagtggggaatattgcacaatggggggaaccctgatgcagccatgccgcgtgaatgaagaaggccttcgggttgtaaagttctttcggtagcgaggaaggtatcaaatttaatagatttggtaattgacgttaactacagaagaagcaccggctaactccgtgccagcagccgcggtaatacggagggtgcgagcgttaatcggaataactgggcgtaaagggcacgcaggcggttgattaagtgagatgtgaaagccccgggctnnacctgggaattgcatttcatactggtcaactagagtactttagggaggggtagaattccacgtgtagcggtgaaatgcgtagagatgtggaggaataccgaaggcgaaggcagccccttgggaatgtactgacgctcatgtgcgaaagcgtggggagcaaacaggattagataccctggtagtccacgctgtaaacgctgtcgatttggggattggactnnnagtctggtgcccgaagctaacgtgatnaatcgaccgcctggggagtacggccgcaaggttaaaactcaaatnaattgacgggggcccgcacaagcggtggagcatgtggtttaattcgatnnaacgcgaagaaccttacctactcttgacatccatggaatcttgtagagatacgagagtgccttcgggaaccatgagacaggtgctgcatggctgtcgtcagctcgtgttgtgaaatgttgggttnagtcccgcaacgagcgcaacccttatcctttgttgccagcggttcggccgggaactcaaaggagactgccagtgatnaactggaggaaggtggggatgacgtcaagtcatcatggnccttacgagtagggctacacacgtgctacaatggcgtatacagagggaagcaatatggcgacatggagcaaatctcacaaagtacgtctaagtccggattggagtctgcaactcgactccatgaagtcggaatcgctagtaatcgcaaatcagaatgttgcggtgaatacgttcccgggcnttgtacacaccgcccgtcacaccatgggagtgggttgtaccagaagtagatagcttaaccgcaaggggggcgtttaccacggtatgattcat

SEQ ID NO: 519 - DNA, 1462 bp, Actinobacillus lignieresii
  misc_feature (267)..(267): n is a, c, g, or t
  misc_feature (596)..(596): n is a, c, g, or t
  misc_feature (818)..(818): n is a, c, g, or t
  misc_feature (1065)..(1065): n is a, c, g, or t
  misc_feature (1110)..(1110): n is a, c, g, or t
  misc_feature (1142)..(1142): n is a, c, g, or t
attgaacgctggcggcaggcttaacacatgcaagtcgaacggtaacgggaagggagcttgctttctttgccgacgagtggcggacgggtgagtaatgcttgggaatctggcttatggagggggataactacgggaaactgtagctaataccgcgtaatatcttaggattaaagggtgggactttcgggccacctgccataagatgagcccaagtgggattaggtagttggttaggtaaaggctgaccaagccgacgatctctagctngtctgagaggatgaccagccacactggaactgagacacggtccagactcctacgggaggcagcagtggggaatattgcacaatggggggaaccctgatgcagccatgccgcgtgaatgaagaaggccttcgggttgtaaagttctttcggtagcgaggaaggtatcaaatttaatagatttggtaattgacgttaactacagaagaagcaccggctaactccgtgccagcagccgcggtaatacggagggtgcgagcgttaatcggaataactgggcgtaaagggcacgcaggcggttgattaagtgagatgtgaaagccccgggcttnacctgggaattgcatttcatactggtcaactagagtactttagggaggggtagaattccacgtgtagcggtgaaatgcgtagagatgtggaggaataccgaaggcgaaggcagccccttgggaatgtactgacgctcatgtgcgaaagcgtggggagcaaacaggattagataccctggtagtccacgctgtaaacgctgtcgatttggggattggactttnagtctggtgcccgaagctaacgtgataaatcgaccgcctggggagtacggccgcaaggttaaaactcaaatgaattgacgggggcccgcacaagcggtggagcatgtggtttaattcgatgcaacgcgaagaaccttacctactcttgacatccatggaatcttgtagagatacgagagtgccttcgggaaccatgagacaggtgctgcatggctgtcgtcagctcgtgttgtgaaatgttgggttnagtcccgcaacgagcgcaacccttatcctttgttgccagcgattnggtcgggaactcaaaggagactgccggtgatnaaccggaggaaggtggggatgacgtcaagtcatcatggcccttacgagtagggctacacacgtgctacaatggcgtatacagagggaagcaagatggcgacatggagcaaatctcacaaagtacgtctaagtccggattggagtctgcaactcgactccatgaagtcggaatcgctagtaatcgcaaatcagaatgttgcggtgaatacgttcccgggccttgtacacaccgcccgtcacaccatgggagtgggttgtaccagaagtagatagcttaaccgcaaggggggcgtttaccacggtatgattcatgactgggg

SEQ ID NO: 520 - DNA, 1462 bp, Actinobacillus minor
attgaacgctggcggcaggcttaacacatgcaagtcgaacggtaacagggaggagcttgcttctttgctgacgagtggcggacgggtgagtaatgcttgggaatctggcttatggagggggataactacgggaaactgtagctaataccgcgtaatatcttcggattaaagggtgggactttcgggccacctgccataagatgagcccaagtgggattaggtagttggtggggtaaaggcctaccaagccgacgatctctagctggtctgagaggatgaccagccacactggaactgagacacggtccagactcctacgggaggcagcagtggggaatattgcacaatggggggaaccctgatgcagccatgccgcgtgaatgaagaaggccttcgggttgtaaagttctttcggtgatgaggaaggcggttgttttaatagaacaatcgattgacgttagtcacagaagaagcaccggctaactccgtgccagcagccgcggtaatacggagggtgcgagcgttaatcggaatgactgggcgtaaagggcacgcaggcggtgacttaagtgagatgtgaaagccccgagcttaacttgggaattgcatttcatactgggtcgctagagtactttagggaggggtagaattccacgtgtagcggtgaaatgcgtagagatgtggaggaataccgaaggcgaaggcagccccttgggaatgtactgacgctcatgtgcgaaagcgtggggagcaaacaggattagataccctggtagtccacgctgtaaacgctgtcgatttggggattgggctttaagcttggtgcccgtagctaacgtgataaatcgaccgcctggggagtacggccgcaaggttaaaactaaaatgaattgacgggggcccgcacaagcggtggagcatgtggtttaattcgatgcaacgcgaagaaccttacctactcttgacatccaaagaaggccgtagagatatggctgtgccttcgggaactttgagacaggtgctgcatggctgtcgtcagctcgtgttgtgaaatgttgggttaagtcccgcaacgagcgcaacccttatcctttgttgccagcgatttggtcgggaactcaaaggagactgccagtgataaactggaggaaggtggggatgacgtcaagtcatcatggcccttacgagtagggctacacacgtgctacaatggcgtatacagagggaagcaaaatggcgacatggagcaaatctcacaaagtacgtctaagtccggattggagtctgcaactcgactccatgaagtcggaatcgctagtaatcgcaaatcagaatgttgcggtgaatacgttcccgggccttgtacacaccgcccgtcacaccatgggagtgggttgtaccagaagtagatagcttaacggaaacgggggcgtttaccacggtatgattcatgactggggtg

SEQ ID NO: 521 - DNA, 1464 bp, Actinobacillus pleuropneumoniae
attgaacgctggcggcaggcttaacacatgcaagtcgaacggtaacgggaagggagcttgctttctttgccgacgagtggcggacgggtgagtaatgcttgggaatctggcttatggagggggataactacgggaaactgtagctaataccgcgtaatatctatggattaaagggtgggactttcgggccacctgccataagatgagcccaagtgggattaggtagttggttaggtaaaggctgaccaagccgacgatctctagctggtctgagaggatgaccagccacactggaactgagacacggtccagactcctacgggaggcagcagtggggaatattgcacaatggggggaaccctgatgcagccatgccgcgtgaatgaagaaggccttcgggttgtaaagttctttcggtagcgaggaaggtatcaaatttaatagatttggtaattgacgttaactacagaagaagcaccggctaactccgtgccagcagccgcggtaatacggagggtgcgagcgttaatcggaataactgggcgtaaagggcacgcaggcggttgattaagtgagatgtgaaagccccgggcttaacctgggaattgcatttcatactggtcaactagagtactttagggaggggtagaattccacgtgtagcggtgaaatgcgtagagatgtggaggaataccgaaggcgaaggcagccccttgggaatgtactgacgctcatgtgcgaaagcgtggggagcaaacaggattagataccctggtagtccacgctgtaaacgctgtcgatttggggattggactgtgagtctggtgcccgaagctaacgtgataaatcgaccgcctggggagtacggccgcaaggttaaaactcaaatgaattgacgggggcccgcacaagcggtggagcatgtggtttaattcgatgcaacgcgaagaaccttacctactcttgacatccatggaatcttgtagagatacgagagtgccttcgggaaccatgagacaggtgctgcatggctgtcgtcagctcgtgttgtgaaatgttgggttaagtcccgcaacgagcgcaacccttatcctttgttgccagcgattaggtcgggaactcaaaggagactgccggtgataaaccggaggaaggtggggatgacgtcaagtcatcatggcccttacgagtagggctacacacgtgctacaatggcgtatacagagggaagcaagatggcgacatggagcaaatctcacaaagtacgtctaagtccggattggagtctgcaactcgactccatgaagtcggaatcgctagtaatcgcaaatcagaatgttgcggtgaatacgttcccgggccttgtacacaccgcccgtcacaccatgggagtgggttgtaccagaagtagatagcttaaccgaaaggggggcgtttaccacggtatgattcatgactggggtg

SEQ ID NO: 522 - DNA, 1464 bp, Actinobacillus porcinus
  misc_feature (131)..(131): n is a, c, g, or t
  misc_feature (183)..(183): n is a, c, g, or t
  misc_feature (818)..(818): n is a, c, g, or t
  misc_feature (1234)..(1234): n is a, c, g, or t
  misc_feature (1405)..(1405): n is a, c, g, or t
attgaacgctggcggcaggcttaacacatgcaagtcgaacggtaacaggaagaaagcttgctttctttgctgacgagtggcggacgggtgagtaatgcttgggaatctggcttatggagggggataactangggaaactgtagctaataccgcgtagtatctgaagatgaaagtgtgggactntaaggccacatgccataagatgagcccaagtgggattaggtagttggttaggtaaaggctgaccaagccgacgatctctagctggtctgagaggatgaccagccacactggaactgagacacggtccagactcctacgggaggcagcagtggggaatattgcacaatggggggaaccctgatgcagccatgccgcgtgaatgaagaaggccttcgggttgtaaagttctttcggtgatgaggaaggtgtttgttttaatagaacaagcaattgacgttagtcacagaagaagcaccggctaactccgtgccagcagccgcggtaatacggagggtgcgagcgttaatcggaataactgggcgtaaagggcacgcaggcggtgacttaagtgagatgtgaaagccccgggcttaacctgggaattgcatttcatactgggtcgctagagtactttagggaggggtagaattccacgtgtagcggtgaaatgcgtagagatgtggaggaataccgaaggcgaaggcagccccttgggaatgtactgacgctcatgtgcgaaagcgtggggagcaaacaggattagataccctggtagtccacgctgtaaacgctgtcgatttggggattgggctttnagcttggtgcccgtagctaacgtgataaatcgaccgcctggggagtacggccgcaaggttaaaactcaaatgaattgacgggggcccgcacaagcggtggagcatgtggtttaattcgatgcaacgcgaagaaccttacctactcttgacatcctaagaagaactcagagatgagtttgtgccttcgggaacttagagacaggtgctgcatggctgtcgtcagctcgtgttgtgaaatgttgggttaagtcccgcaacgagcgcaacccttatcctttgttgccagcgacttggtcgggaactcaaaggagactgccggtgataaaccggaggaaggtggggatgacgtcaagtcatcatggcccttacgagtagggctacacacgtgctacaatggtgcatacagagggcggcanacctgcgagggagagcgaatctcagaaagtgcatcgtagtccggattggagtctgcaactcgactccatgaagtcggaatcgctagtaatcgcaaatcagaatgttgcggtgaatacgttcccgggccttgtacacaccgcccgtcacaccatgggagtgggttgtaccanaagtagatagcttaacggaaacgggggcgtttaccacggtatgattcatgactggggtg

SEQ ID NO: 523 - DNA, 1364 bp, Actinobacillus rossii
  misc_feature (158)..(158): n is a, c, g, or t
  misc_feature (163)..(164): n is a, c, g, or t
  misc_feature (184)..(184): n is a, c, g, or t
  misc_feature (532)..(532): n is a, c, g, or t
  misc_feature (567)..(567): n is a, c, g, or t
attgaacgctggcggcaggcttaacacatgcaagtcgaacggtaacagggagaaagcttgctttctttgctgacgagtggcggacgggtgagtaatgcttgggaatctggcctatggagggggataactacgggaaactgtagctaataccgcgtagnatcgnnagatgaaagtgtgggaccgnaaggccacatgccatgggatgagcccaagtgggattaggtagttggtaaggtaaaggcttaccaagccgacgatctctagctggtctgagaggatgaccagccacactggaactgagacacggtccagactcctacgggaggcagcagtggggaatattgcacaatggggggaaccctgatgcagccatgccgcgtgaatgaagaaggccttcgggttgtaaagttctttcggtgatgaggaaggcagttactttaatagagtagttgattgacgttagtcacagaagaagcaccggctaactccgtgccagcagccgcggtaatacggagggtgcgagcgttaatcngaataactgggcgtaaagggcacgcaggcggtganttaagtgagatgtgaaagccccgggcttaacctgggaattgcatttcatactgggtcgctagagtactttagggaggggtagaattccacgtgtagcggtgaaatgcgtagagatgtggaggaataccgaaggcgaaggcagccccttgggaatgtactgacgctcatgtgcgaaagcgtggggagcaaacaggattagataccctggtagtccacgctgtaaacgctgtcgatttggggattgagctttaagcttggtgcccgtagctaacgtgataaatcgaccgcctggggagtacggccgcaaggttaaaactcaaatgaattgacgggggcccgcacaagcggtggagcatgtggtttaattcgatgcaacgcgaagaaccttacctactcttgacatccatagaatcctgtagagatacgggagtgccttagggagctatgagacaggtgctgcatggctgtcgtcagctcgtgttgtgaaatgttgggttaagtcccgcaacgagcgcaacccttatcctttgttgccagcgatacggtcgggaactcaaaggagactgccagtgataaactggaggaaggtggggatgacgtcaagtcatcatggcccttacgagtagggctacacacgtgctacaatggtgcatacagagggcggcgaacctgcgagggtgagcgaatctcagaaagtgcatcgtagtccggattggagtctgcaactcgactccatgaagtcggaatcgctagtaatcgcaaatcagaatgttgcggtgaatacgttcccgggcctt

SEQ ID NO: 524 - DNA, 1464 bp, Actinobacillus seminis
attgaacgctggcggcaggcttaacacatgcaagtcgaacggtaacggggagggagcttgctttctctgctgacgagtggcggacgggtgagtaatgcttgggaatctggcttatggagggggataacgacgggaaactgtcgctaataccgcgtagtatcgggagatgaaagggtgggactgaagggccacctgccataagatgagcccaagtgggattaggtagttggtggggtaaaggcctaccaagcctgcgatctctagctggtctgagaggatggccagccacactggaactgagacacggtccagactcctacgggaggcagcagtggggaatattgcgcaatggggggaaccctgacgcagccatgccgcgtgaatgaagaaggccttcgggttgtaaagttctttcggtggtgaggaaggtgatgaagtgaagagtttcatcaattgacgttaatcacagaagaagcaccggctaactccgtgccagcagccgcggtaatacggggggtgcgagcgttaatcggaataactgggcgtaaagggcacgcaggcggacttttaagtgaggtgtgaaatccccgggcttaacctgggaatggcatttcagactgggggtctagagtattttagggaggggtagaattccacgtgtagcggtgaaatgcgtagagatgtggaggaataccgaaggcgaaggcagccccttggggagatactgacgctcaagtgcgaaagcgtggggagcaaacaggattagataccctggtagtccacgctgtaaacgatgtcgatttggggattgggctataagcttggtgcccgaagctaacgtgataaatcgaccgcctggggagtacggccgcaaggttaaaactcaaatgaattgacgggggcccgcacaagcggtggagcatgtggtttaattcgatgcaacgcgaagaaccttacctactcttgacatccataggagagtgcagagatgtgcttgtgccttcgggagctatgagacaggtgctgcatggctgtcgtcagctcgtgttgtgaaatgttgggttaagtcccgcaacgagcgcaacccttatcctttgttgccatcgattaggtcgggaactcaaaggagactgccggtgataagccggaggaaggtggggatgacgtcaagtcatcatggcccttacgagtagggctacacacgtgctacaatggtgcatacagagagcgacgaggccgcgaggtggagtgaatctcagaaagtgcatctaagtccggattggagtctgcaactcgactccatgaagtcggaatcgctagtaatcgcggatcagaatgtcgcggtgaatacgttcccgggccttgtacacaccgcccgtcacaccatgggagtgggttgtaccagaagtagatagcttaaccggaaggggggcgtttaccacggtatgattcatgactggggtg

SEQ ID NO: 525 - DNA, 1465 bp, Actinobacillus succinogenes
attgaacgctggcggcaggcttaacacatgcaagtcgaacggtaacgggtggaaagcttgctttccatgctgacgagtggcggacgggtgagtaatgcttggggatctggcttatggagggggataacgacgggaaactgtcgctaataccgcgtaatgtctaaggactaaagggtgggattttcggaccgcccgccataagatgagcccaagtgggattaggtagttggtggggtaaaggcctaccaagccgacgatctctagctggtctgagaggatgaccagccacactggaactgagacacggtccagactcctacgggaggcagcagtggggaatattgcgcaatgggggcaaccctgacgcagccatgccgcgtgaatgaagaaggccttcgggttgtaaagttctttcggtggtgaggaaggcgaataagttaacagcttattcgattgacgttagccacagaagaagcaccggctaactccgtgccagcagccgcggtaatacggagggtgcgagcgttaatcggaataactgggcgtaaagggcacgcaggcggctatttaagtgagatgtgaaatccccgggcttaacctgggaactgcatttcagactgggtagctagagtactttagggaggggtagaattccacgtgtagcggtgaaatgcgtagagatgtggaggaataccgaaggcgaaggcagccccttgggaacgtactgacgctcatgtgcgaaagcgtggggagcaaacaggattagataccctggtagtccacgctgtaaacgctgtcgatttggggattgggcgataagcctggtgcccgaagctaacgtgataaatcgaccgcctggggagtacggccgcaaggttaaaactcaaatgaattgacgggggcccgcacaagcggtggagcatgtggtttaattcgatgcaacgcgaagaaccttacctactcttgacatcctcagaatccggtagagatatcggagtgccttcgggaactgagagacaggtgctgcatggctgtcgtcagctcgtgttgtgaaatgttgggttaagtcccgcaacgagcgcaacccttatcctttgttgccagcatgtagagatgggaactcaaaggagactgccggtgataaaccggaggaaggtggggatgacgtcaagtcatcatggcccttacgagtagggctacacacgtgctacaatggcgtatacagagggaaacgagcctgcgagggggagtgaatctcagaaagtgcgtcgtagtccggattggagtctgcaactcgactccatgaagtcggaatcgctagtaatcgcgaatcagcatgtcgcggtgaatacgttcccgggccttgtacacaccgcccgtcacaccatgggagtgggttgtaccagaagtagatagcttaaccgaaaggggggcgtttaccacggtatgattcatgactggggtg

SEQ ID NO: 526 - DNA, 1463 bp, Actinobacillus suis
attgaacgctggcggcaggcttaacacatgcaagtcgaacggtagcacgaaggagcttgctccttgggtgacgagtggcggacgggtgagtaatgcttgggaatctggctcatggagggggataactacgggaaactgtagctaataccgcgtaatatcttcggattaaagtgtgggaccgcaaggccacatgccatgagatgagcccaagtgggattaggtagttggtggggtaaaggcctaccaagccgacgatctctagctggtctgagaggatgaccagccacactggaactgagacacggtccagactcctacgggaggcagcagtggggaatattgcacaatggggggaaccctgatgcagccatgccgcgtgaatgaagaaggccttcgggttgtaaagttctttcggtagcgaggaaggtatcaaatttaatagatttggtaattgacgttaactacagaagaagcaccggctaactccgtgccagcagccgcggtaatacggagggtgcgagcgttaatcggaataactgggcgtaaagggcacgcaggcggttgattaagtgagatgtgaaagccccgggcttaacctgggaattgcatttcatactggtcaactagagtactttagggaggggtagaattccacgtgtagcggtgaaatgcgtagagatgtggaggaataccgaaggcgaaggcagccccttgggaatgtactgacgctcatgtgcgaaagcgtggggagcaaacaggattagataccctggtagtccacgctgtaaacgctgtcgatttggggattggactttaagtctggtgcccgaagctaacgtgataaatcgaccgcctggggagtacggccgcaaggttaaaactcaaatgaattgacgggggcccgcacaagcggtggagcatgtggtttaattcgatgcaacgcgaagaaccttacctactcttgacatccatggaatcttgtagagatacgagagtgccttcgggaaccatgagacaggtgctgcatggctgtcgtcagctcgtgttgtgaaatgttgggttaagtcccgcaacgagcgcaacccttatcctttgttgccagcggtttggccgggaactcaaaggagactgccagtgataaactggaggaaggtggggatgacgtcaagtcatcatggcccttacgagtagggctacacacgtgctacaatggcgtatacagagggaagcaatatggcgacatggagcaaatctcacaaagtacgtctaagtccggattggagtctgcaactcgactccatgaagtcggaatcgctagtaatcgcaaatcagaatgttgcggtgaatacgttcccgggccttgtacacaccgcccgtcacaccatgggagtgggttgtaccagaagtagatagcttaaccttcggggggggcgtttaccacggtatgattcatgactggggtg

SEQ ID NO: 527 - DNA, 1462 bp, Actinobacillus ureae
attgaacgctggcggcaggcttaacacatgcaagtcgaacggtaacagggattagcttgctaatttgctgacgagtggcggacgggtgagtaatgcttgggaatttggctcatggagggggataactacgggaaactgtagctaataccgcgtaatatcttaggattaaagtgtgggaccgcaaggccacatgccatgagatgagcccaagtgggattaggtagttggtggggtaaaggcctaccaagccgacgatctctagctggtctgagaggatgatcagccacactggaactgagacacggtccagactcctacgggaggcagcagtggggaatattgcacaatgggggggaccctgatgcagccatgccgcgtgaatgaagaaggccttcgggttgtaaagttctttcggtagcgaggaaggtatcaaatttaatagatttggtaattgacgttaactacagaagaagcaccggctaactccgtgccagcagccgcggtaatacggagggtgcgagcgttaatcggaataactgggcgtaaagggcacgcaggcggttgattaagtgagatgtgaaagccctgggcttaacctgggaattgcatttcatactggtcaactagagtactttagggaggggtagaattccacgtgtagcggtgaaatgcgtagagatgtggaggaataccgaaggcgaaggcagccccttgggaatgtactgacgctcatgtgcgaaagcgtggggagcaaacaggattagataccctggtagtccacgctgtaaacgctgtcgatttggggattgggctttgagcttggtgcccgtagctaacgtgataaatcgaccgcctggggagtacggccgcaaggttaaaactcaaatgaattgacgggggcccgcacaagcggtggagcatgtggtttaattcgatgcaacgcgaagaaccttacctactcttgacatccatggaatcttgtagagatacgagagtgccttcgggaaccatgagacaggtgctgcatggctgtcgtcagctcgtgttgtgaaatgttgggttaagtcccgcaacgagcgcaacccttatcctttgttgccagcgatttggtcgggaactcaaaggagactgccagtgataaactggaggaaggtggggatgacgtcaagtcatcatggcccttacgagtagggctacacacgtgctacaatggcgtatacagagggaagcaatatggcgacatggagcaaatctcacaaagtacgtctaagtccggattggagtctgcaactcgactccatgaagtcggaatcgctagtaatcgcaaatcagaatgttgcggtgaatacgttcccgggccttgtacacaccgcccgtcacaccatgggagtgggttgtaccagaagtagatagcttaaccgcaaggggggcgtttaccacggtatgattcatgactggggtg

SEQ ID NO: 528 - DNA, 1445 bp, Adhaeribacter aerolatus
gatgaacgctagcggcaggcctaatacatgcaagtcgaacggatgtagggacttcggtttctacattagtggcgcacgggtgcgtaacgcgtatgcaacctaccttttattgggggatagcccgtcgaaagacggattaataccgcatgaaatcatttgagggcatctgaggatgattaaagctgaggcgataaaagatgggcatgcgtgccattagctagttggtggggtaacggcccaccaaggcgacgatggctaggggttctgagaggatgatcccccacactggtactgagatacggaccagactcctacgggaggcagcagtagggaatattgggcaatgggcggaagcctgacccagccatgccgcgtgcaggaagaaggccttctgggttgtaaactgcttttatttgggaagaaaagactcttgcgagaggcactgacggtaccagatgaataagcaccggctaactccgtgccagcagccgcggtaatacggagggtgcaagcgttgtccggatttattgggtttaaagggtgcgtaggcggcttgataagtccgtggtgaaagccaacagctcaactgttgaactgccatggatactgtcgggcttgagtacagacgaggtaggcggaattgatggtgtagcggtgaaatgcatagataccatcaagaaccccgattgcgaaggcagcttactaggctgtaactgacgctgaggcacgaaagcgtggggagcgaacaggattagataccctggtagtccacgctgtaaacgatgataactcgatgttggcgatatacggtcagcgtcttagcgaaagcgttaagttatccacctggggagtacgcccgcaagggtgaaactcaaaggaattgacgggggcccgcacaagcggtggagcatgtggtttaattcgatgatacgcgaggaaccttacctaggctagaatgcgcgtgaccgcttcagagatggagcttcccttcggggcacaaagcaaggtgctgcatggctgtcgtcagctcgtgccgtgaggtgttgggttaagtcccgcaacgagcgcaacccctatctttagttgccagcacgtgatggtggggactctaaagagactgcctgcgcaagcagtgaggaaggtggggatgacgtcaagtcatcatggcccttacgcctagggctacacacgtgctacaatgggcggtacaaagggttgctactgggtaaccagatgccaatctcaaaaaaccgttctcagttcggattgaggtctgcaactcgacctcatgaagctggaatcgctagtaatcgcgcatcagcaatggcgcggtgaatacgttcccgggccttgtacacaccgcccgtcaagccatggaagtcagggagacctgaagacggtacccgttaaaggagccgtttagggtaaaactggtaactggggct

SEQ ID NO: 529 - DNA, 1341 bp, Advenella incenata
tagcttgctacttttgccggcgagtggcgaacgggtgagtaatgtatcggaacgtgcccagtagcgggggataactacgcgaaagcgtggctaataccgcatacgccctacgggggaaagggggggatcttaggacctctcactattggagcggccgatatcggattagctagttggtggggtaaaggcctaccaaggcgacgatccgtagctggtttgagaggacgaccagccacactgggactgagacacggcccagactcctacgggaggcagcagtggggaattttggacaatgggggaaaccctgatccggccatcccgcgtgtgcgatgaaggccttcgggttgtaaagcacttttgtcagggaagaaaaggtttcggataatacccggaactgatgacggtacctgaagaataagcaccggctaactacgtgccagcagccgcggtaatacgtagggtgcaagcgttaatcggaattactgggcgtaaagcgtgcgcaggcggttcggaaagaaagatgtgaaatcccagggctcaaccttggaactgcatttttaactaccgaactagagtatgtcagaggggggtggaattccacgtgtagcagtgaaatgcgtagatatgtggaggaacaccgatggcgaaggcagccccctgggataatactgacgctcatgcacgaaagcgtggggagcaaacaggattagataccctggtagtccacgccctaaacgatgtcaactagctgttgggcccttcggggcttagtagcgcagctaacgcgtgaagttgaccgcctggggagtacggtcgcaagattaaaactcaaaggaattgacggggacccgcacaagcggtggatgatgtggattaattcgatgcaacgcgaaaaaccttacctacccttgacatgtctggaatcctgaagagatttaggagtgctcgcaagagaaccggaacacaggtgctgcatggctgtcgtcagctcgtgtcgtgagatgttgggttaagtcccgcaacgagcgcaacccttgtcattagttgctacgtttagttgagcactctaatgagactgccggtgacaaaccggaggagggtggggatgacgtcgagtcctcgtggcccttatggggagggcttcacacgtcatacaatggtcgggacacagggttgccaaaccgcaaggtggagctaatctcataaacccgatcgtagtccggattgcaggctgcaactcgcctgcatgaagtcggaatcgctagtaatcgcggatcaccatgtcgcggtgaatacgttcccgggtcttgtacacaccgcccgtcacaccatgggagt

SEQ ID NO: 530 - DNA, 1415 bp, Advenella kashmirensis
atgcaagtcgaacggcagcgggaaagtagcttgctacttttgccggcgagtggcgaacgggtgagtaatgtatcggaacgtgcccagtagcgggggataactacgcgaaagcgtggctaataccgcatacgccctacgggggaaagggggggatcttaggacctctcactattggagcggccgatatcggattagctagttggtggggtaaaggcctaccaaggcgacgatccgtagctggtttgagaggacgaccagccacactgggactgagacacggcccagactcctacgggaggcagcagtggggaattttggacaatgggggaaaccctgatccagccatcccgcgtgtgcgatgaaggccttcgggttgtaaagcacttttgtcagggaagaaaaggtttcggataatacccggaactgatgacggtacctgaagaataagcaccggctaactacgtgccagcagccgcggtaatacgtagggtgcaagcgttaatcggaattactgggcgtaaagcgtgcgcaggcggttcggaaagaaagatgtgaaatcccagggctcaaccttggaactgcatttttaactaccgaactagagtatgtcagaggggggtggaattccacgtgtagcagtgaaatgcgtagatatgtggaggaacaccgatggcgaagcagccccctgggataatactgacgctcatgcacgaaagcgtggggagcaaacaggattagataccctggtagtccacgccctaaacgatgtcaactagctgttgggcccttcggggcttagtagcgcagctaacgcgtgaagttgaccgcctggggagtacggtcgcaagattaaaactcaaaggaattgacggggacccgcacaagcggtggatgatgtggattaattcgatgcaacgcgaaaaaccttacctacccttgacatgtctggaatcctgaagagatttaggagtgctcgcaagagaaccggaacacaggtgctgcatggctgtcgtcagctcgtgtcgtgagatgttgggttaagtcccgcaacgagcgcaacccttgtcattagttgctacatttagttgagcactctaatgagactgccggtgacaaaccggaggaaggtggggatgacgtcaagtcctcatggcccttatgggtagggcttcacacgtcatacaatggtcgggacagagggttgccaaaccgcaaggtggagctaatctcataaacccgatcgtagtccggattgcaggctgcaactcgcctgcatgaagtcggaatcgctagtaatcgcggatcagcatgtcgcggtgaatacgttcccgggtcttgtacacaccgcccgtcacaccatgggagtgggttttaccagaagtagttagcctaaccgcaaggggggcgataccacg

SEQ ID NO: 531 - DNA, 1465 bp, Advenella mimigardefordensis
attgaacgctagcgggatgccttacacatgcaagtcgaacggcagcgggaaagtagcttgctacttttgccggcgagtggcgaacgggtgagtaatgtatcggaacgtgcccagtagcgggggataactacgcgaaagcgtggctaataccgcatacgccctacgggggaaagggggggatcttaggacctctcactattggagcggccgatatcggattagctagttggtgaggtaaaggctcaccaaggcgacgatccgtagctggtttgagaggacgaccagccacactgggactgagacacggcccagactcctacgggaggcagcagtggggaattttggacaatgggggaaaccctgatccagccatcccgcgtgtgcgatgaaggccttcgggttgtaaagcacttttgtcagggaagaaaaggttctggctaatatccggaactgatgacggtacctgaagaataagcaccggctaactacgtgccagcagccgcggtaatacgtagggtgcaagcgttaatcggaattactgggcgtaaagcgtgcgcaggcggttcggaaagaaagatgtgaaatcccagggctcaaccttggaactgcatttttaactcccggactagagtatgtcagaggggggtggaattccacgtgtagcagtgaaatgcgtagatatgtggaggaacaccgatggcgaaggcagccccctgggataatactgacgctcatgcacgaaagcgtggggagcaaacaggattagataccctggtagtccacgccctaaacgatgtcaactagctgttgggcccttcggggcttagtagcgcagctaacgcgtgaagttgaccgcctggggagtacggtcgcaagattaaaactcaaaggaattgacggggacccgcacaagcggtggatgatgtggattaattcgatgcaacgcgaaaaaccttacctacccttgacatgtctggaatcctgaagagatttaggagtgctcgcaagagaaccggaacacaggtgctgcatggctgtcgtcagctcgtgtcgtgagatgttgggttaagtcccgcaacgagcgcaacccttgtcattagttgctacatttagttgagcactctaatgagactgccggtgacaaaccggaggaaggtggggatgacgtcaagtcctcatggcccttatgggtagggcttcacacgtcatacaatggtcgggacagagggttgccaagccgcaaggtggagctaatctcataaacccgatcgtagtccggattgcaggctgcaactcgcctgcatgaagtcggaatcgctagtaatcgcggatcagcatgtcgcggtgaatacgttcccgggtcttgtacacaccgcccgtcacaccatgggagtgggttttaccagaagtagttagcctaaccgcaaggggggcgattaccacggtaggattcatgactggggtg

SEQ ID NO: 532 - DNA, 1422 bp, Aequorivita antarctica
gaacgctagcggcaggcctaacacatgcaagtcgaggggtagagagtgcttgcgctcttgagaccggcgcacgggtgcgtaacgcgtatgcaatctgccctctacaggggaatagcccagggaaacttggattaatgccccatagtattaatgaacggcattgttctttaattaaagatttatcggtagaggatgagcatgcgtaccattagctagttggtgtggtaacggcacaccaaggctacgatggttaggggccctgagagggggatcccccacactggtactgagacacggaccagactcctacgggaggcagcagtgaggaatattggacaatgggcgagagcctgatccagccatgccgcgtgcaggaagacggccctatgggttgtaaactgcttttttacgggaagaaacacctctacgtgtagaggcttgacggtaccgtacgaataaagaccggctaactccgtgccagcagccgcggtaatacggaggatccgagcgttatccggaatcattgggtttaaagggtccgtaggcggacgtctaagtcagtggtgaaattctgcagctcaactgtagaactgccattgatactggtcgtcttgaatcgttgtgaagtggctagaatatgtagtgtagcggtgaaatgcttagatattacatagaataccgattgcgaaggcaggtcactaacaacgcattgacgctgatggacgaaagcgtggggagcgaacaggattagataccctggtagtccacgccgtaaacgatggatactagctgtccggcgcacattggtgtgctgggtggccaaacgaaagtgataagtatcccacctggggagtacgttcgcaagaatgaaactcaaaggaattgacgggggcccgcacaagcggtggagcatgtggtttaattcgatgatacgcgaggaaccttaccagggcttaaatgtagtctgacaggattggaaacagtcttttcttcggacagattacaaggtgctgcatggttgtcgtcagctcgtgccgtgaggtgtcaggttaagtcctataacgagcgcaacccctgttgttagttgccagcgagtcatgtcgggaactctaacaagactgccggtgcaaaccgtgaggaaggtggggatgacgtcaaatcatcacggcccttacgtcctgggccacacacgtgctacaatggcaggtacaatgggcagccactgcgcaagcaggagcgaatccacaaaacctgtctcagttcggatcggggtctgcaactcgaccccgtgaagctggaatcgctagtaatcggatatcagccatgatccggtgaatacgttcccgggccttgtacacaccgcccgtcaagccatggaagctggaagcacctgaagtccgtcaccgtaaggagcgacttagg

SEQ ID NO: 533 - DNA, 1447 bp, Aeribacillus composti
tgcagtcgagcggaccgaagggagcttgctcctttaggttagcggcggacgggtgagtaacacgtgggcaacctgccctgcagactgggataacttcgggaaaccggagctaataccggataaccccgaaaaccgcatggttttcggttgaaaggcggcttttagctgtcactgcaggatgggcccgcggcgcattagctagttggtgaggtaacggctcaccaaggcgacgatgcgtagccgacctgagagggtgaccggccacactgggactgagacacggcccagactcctacgggaggcagcagtagggaatcttccgcaatggacgaaagtctgacggagcaacgccgcgtgagcgaagaaggtcttcggatcgtaaagctctgttgtcagggaagaacaagtgccgttcgaacagggcggtaccttgacggtacctgacgaggaagccacggctaactacgtgccagcagccgcggtaatacgtaggtggcaagcgttgtccggaattattgggcgtaaagcgcgcgcaggcggttccttaagtctgatgtgaaatctcgcggctcaaccgcgagcggccattggaaactggggaacttgagtgcaggagaggggagcggaattccacgtgtagcggtgaaatgcgtagagatgtggaggaacaccagtggcgaaggcggctctctggcctgtaactgacgctgaggcgcgaaagcgtggggagcgaacaggattagataccctggtagtccacgccgtaaacgatgagtgctaagtgttagagggtatccaccctttagtgctgcagcaaacgcattaagcactccgcctggggagtacggccgcaaggctgaaactcaaaggaattgacggggacccgcacaagcggtggagcatgtggtttaattcgaagcaacgcgaagaaccttaccaggtcttgacatcccctgacaaccctagagatagggcgttcccctttcggggacagggtgacaggtggtgcatggttgtcgtcagctcgtgtcgtgagatgttgggttaagtcccgcaacgagcgcaacccttgaccttagttgccagcattcagttgggcactctaaggtgactgccggctaaaagtcggaggaaggtggggatgacgtcaaatcatcatgccccttatgacctgggctacacacgtgctacaatgggtggtacaaagggcagcgaaaccgcgaggtggagcgaatcccaaaaaaccactctcagttcggattgcaggctgcaactcgcctgcatgaagccggaatcgctagtaatcgcggatcagcatgccgcggtgaatacgttcccgggtcttgtacacaccgcccgtcacaccacgagagtttgtaacacccgaagtcggtggggtaacccttacgggagccagccgccgaaggtgggacaaatgattggggtg

SEQ ID NO: 534 - DNA, 1467 bp, Aeromonas allosaccharophila
attgaacgctggcggcaggcctaacacatgcaagtcgagcggcagcgggaaagtagcttgctacttttgccggcgagcggcggacgggtgagtaatgcctggggatctgcccagtcgagggggataacagttggaaacgactgctaataccgcatacgccctacgggggaaagcaggggaccttcgggccttgcgcgattggatgaacccaggtgggattagctagttggtgaggtaatggctcaccaaggcgacgatccctagctggtctgagaggatgatcagccacactggaactgagacacggtccagactcctacgggaggcagcagtggggaatattgcacaatgggggaaaccctgatgcagccatgccgcgtgtgtgaagaaggccttcgggttgtaaagcactttcagcgaggaggaaaggttggtagcgaataactgccagctgtgacgttactcgcagaagaagcaccggctaactccgtgccagcagccgcggtaatacggagggtgcaagcgttaatcggaattactgggcgtaaagcgcacgcaggcggttggataagttagatgtgaaagccccgggctcaacctgggaattgcatttaaaactgtccagctagagtcttgtagaggggggtagaattccaggtgtagcggtgaaatgcgtagagatctggaggaataccggtggcgaaggcggccccctggacaaagactgacgctcaggtgcgaaagcgtggggagcaaacaggattagataccctggtagtccacgccgtaaacgatgtcgatttggaggctgtgtccttgagacgtggcttccggagctaacgcgttaaatcgaccgcctggggagtacggccgcaaggttaaaactcaaatgaattgacgggggcccgcacaagcggtggagcatgtggtttaattcgatgcaacgcgaagaaccttacctggccttgacatgtctggaatccctaagagattggggagtgccttcgggaatcagaacacaggtgctgcatggctgtcgtcagctcgtgtcgtgagatgttgggttaagtcccgcaacgagcgcaacccctgtcctttgttgccagcacgtaatggtgggaactcaagggagactgccggtgataaaccggaggaaggtggggatgacgtcaagtcatcatggcccttacggccagggctacacacgtgctacaatggcgcgtacagagggctgcaagctagcgatagtgagcgaatcccaaaaagcgcgtcgtagtccggatcggagtctgcaactcgactccgtgaagtcggaatcgctagtaatcgcaaatcagaatgttgcggtgaatacgttcccgggccttgtacacaccgcccgtcacaccatgggagtgggttgcaccagaagtagatagcttaaccttcgggagggcgtttaccacggtgtgattcatgactggggtg

SEQ ID NO: 535 - DNA, 1467 bp, Aeromonas cavernicola
attgaacgctggcggcaggcctaacacatgcaagtcgagcggcagcgggaaagtagcttgctacttttgccggcgagcggcggacgggtgagtaatgcctgggaaattgccctgatgtgggggataactactggaaacggtagctaataccgcatgatgcctacgggccaaagagggggaccttcgggcctctcgcgtcaggatatgcccaggtgggattagctagttggtgaggtaatggctcaccaaggcgacgatccctagctggtctgagaggatgatcagccacactggaactgagacacggtccagactcctacgggaggcagcagtggggaatattgcacaatgggggaaaccctgatgcagccatgccgcgtgtgtgaagaaggccttcgggttgtaaagcactttcagcgaggaggaaaggttggtagcgaataactgccagctgtgacgttactcgcagaagaagcaccggctaactccgtgccagcagccgcggtaatacggagggtgcaagcgttaatcggaattactgggcgtaaagcgcacgcaggcggttggataagttagatgtgaaagccccgggctcaacctgggaattgcatttaaaactgtccagctagagtcttgtagaggggggtagaattccaggtgtagcggtgaaatgcgtagagatctggaggaataccggtggcgaaggcggccccctggacaaagactgacgctcaggtgcgaaagcgtggggagcaaacaggattagataccctggtagtccacgccgtaaacgatgtcgatttggaggctgtgtccttgagacgtggcttccggagctaacgcgttaaatcgaccgcctggggagtacggccgcaaggttaaaactcaaatgaattgacgggggcccgcacaagcggtggagcatgtggtttaattcgatgcaacgcgaagaaccttacctggccttgacatgtctggaatcctgtagagatacgggagtgccttcgggaatcagaacacaggtgctgcatggctgtcgtcagctcgtgtcgtgagatgttgggttaagtcccgcaacgagcgcaacccctgtcctttgttgccagcacgtaatggtgggaactcaagggagactgccggtgataaaccggaggaaggtggggatgacgtcaagtcatcatggcccttacggccagggctacacacgtgctacaatggcgcgtacagagggctgcaagctagcgatagtgagcgaatcccaaaaagcgcgtcgtagtccggatcggagtctgcaactcgactccgtgaagtcggaatcgctagtaatcgcaaatcagaatgttgcggtgaatacgttcccgggccttgtacacaccgcccgtcacaccatgggagtgggttgcaccagaagtagatagcttaaccttcgggagggcgtttaccacggtgtgattcatgactggggtg

SEQ ID NO: 536 - DNA, 1467 bp, Aeromonas dhakensis
attgaacgctggcggcaggcctaacacatgcaagtcgagcggcagcgggaaagtagcttgctacttttgccggcgagcggcggacgggtgagtaatgcctgggaaattgcccagtcgagggggataacagttggaaacgactgctaataccgcatacgccctacgggggaaagcaggggaccttcgggccttgcgcgattggatatgcccaggtgggattagctagttggtgaggtaatggctcaccaaggcgacgatccctagctggtctgagaggatgatcagccacactggaactgagacacggtccagactcctacgggaggcagcagtggggaatattgcacaatgggggaaaccctgatgcagccatgccgcgtgtgtgaagaaggccttcgggttgtaaagcactttcagcgaggaggaaaggtcagtagctaatatctgctgactgtgacgttactcgcagaagaagcaccggctaactccgtgccagcagccgcggtaatacggagggtgcaagcgttaatcggaattactgggcgtaaagcgcacgcaggcggttggataagttagatgtgaaagccccgggctcaacctgggaattgcatttaaaactgtccagctagagtcttgtagaggggggtagaattccaggtgtagcggtgaaatgcgtagagatctggaggaataccggtggcgaaggcggccccctggacaaagactgacgctcaggtgcgaaagcgtggggagcaaacaggattagataccctggtagtccacgccgtaaacgatgtcgatttggaggctgtgtccttgagacgtggcttccggagctaacgcgttaaatcgaccgcctggggagtacggccgcaaggttaaaactcaaatgaattgacgggggcccgcacaagcggtggagcatgtggtttaattcgatgcaacgcgaagaaccttacctggccttgacatgtctggaatcctgcagagatgcgggagtgccttcgggaatcagaacacaggtgctgcatggctgtcgtcagctcgtgtcgtgagatgttgggttaagtcccgcaacgagcgcaacccctgtcctttgttgccagcacgtaatggtgggaactcaagggagactgccggtgataaaccggaggaaggtggggatgacgtcaagtcatcatggcccttacggccagggctacacacgtgctacaatggcgcgtacagagggctgcaagctagcgatagtgagcgaatcccaaaaagcgcgtcgtagtccggattggagtctgcaactcgactccatgaagtcggaatcgctagtaatcgcaaatcagaatgttgcggtgaatacgttcccgggccttgtacacaccgcccgtcacaccatgggagtgggttgcaccagaagtagatagcttaaccttcgggagggcgtttaccacggtgtgattcatgactggggtg

SEQ ID NO: 537 - DNA, 1465 bp, Aeromonas diversa
attgaacgctggcggcaggcctaacacatgcaagtcgagcggcagcgggaagtagcttgctactttgccggcgagcggcggacgggtgagtaatgcctggggatctgcccagtcgagggggataactactggaaacggtagctaataccgcatacgccctacgggggaaagcaggggaccttcgggccttgcgcgattggatgaacccaggtgggattagcttgttggtgaggtaacggctcaccaaggcgacgatccctagctggtctgagaggatgatcagccacactggaactgagacacggtccagactcctacgggaggcagcagtggggaatattgcacaatgggggaaaccctgatgcagccatgccgcgtgtgtgaagaaggccttcgggttgtaaagcactttcagcgaggaggaaaggttggtagctaataactgccagctgtgacgttactcgcagaagaagcaccggctaactccgtgccagcagccgcggtaatacggagggtgcaagcgttaatcggaattactgggcgtaaagcgcacgcaggcggttggataagttagatgtgaaagccccgggctcaacctgggaattgcatttaaaactgtccgactagagtcttgtagaggggggtagaattccaggtgtagcggtgaaatgcgtagagatctggaggaataccggtggcgaaggcggccccctggacaaagactgacgctcaggtgcgaaagcgtggggagcaaacaggattagataccctggtagtccacgccgtaaacgatgtcgatttggaggttgtgcccttgaggcgtggcttccggagctaacgcgttaaatcgaccgcctggggagtacggccgcaaggttaaaactcaaatgaattgacgggggcccgcacaagcggtggagcatgtggtttaattcgatgcaacgcgaagaaccttacctggccttgacatgtctggaatcctgcagagatgcgggagtgccttcgggaatcagaacacaggtgctgcatggctgtcgtcagctcgtgtcgtgagatgttgggttaagtcccgcaacgagcgcaacccctgtcctttgttgccagcacgtaatggtgggaactcaaaggagactgccggtgataaaccggaggaaggtggggatgacgtcaagtcatcatggcccttacggccagggctacacacgtgctacaatggcgcgtacagagggctgcaagctagcgatagtgagcgaatccctaaaagcgcgtcgtagtccggattggagtctgcaactcgactccatgaagtcggaatcgctagtaatcgcaaatcagaatgttgcggtgaatacgttcccgggccttgtacacaccgcccgtcacaccatgggagtgggttgcaccagaagtagatagcttaaccttcgggagggcgtttaccacggtgtgattcatgactggggtg

SEQ ID NO: 538 - DNA, 1354 bp, Aeromonas encheleia
ggcctaacacatgcaagtcgagcggcagcgggaaagtagcttgctacttttgccggcgagcggcggacgggtgagtaatgcctggggatctgcccagtcgagggggataacagttggaaacgactgctaataccgcatacgccctacgggggaaaggaggggaccttcgggcctttcgcgattggatgaacccaggtgggattagctagttggtggggtaatggctcaccaaggcgacgatccctagctggtctgagaggatgatcagccacactggaactgagacacggtccagactcctacgggaggcagcagtggggaatattgcacaatgggggaaaccctgatgcagccatgccgcgtgtgtgaagaaggccttcgggttgtaaagcactttcagcgaggaggaaaggttgatgcctaatacgtatcaactgtgacgttactcgcagaagaagcaccggctaactccgtgccagcagccgcggtaatacggagggtgcaagcgttaatcggaattactgggcgtaaagcgcacgcaggcggttggataagttagatgtgaaagccccgggctcaacctgggaattgcatttaaaactgtccagctagagtcttgtagaggggggtagaattccaggtgtagcggtgaaatgcgtagagatctggaggaataccggtggcgaaggcggccccctggacaaagactgacgctcaggtgcgaaagcgtggggagcaaacaggattagataccctggtagtccacgccgtaaacgatgtcgatttggaggctgtgtccttgagacgtggcttccggagctaacgcgttaaatcgaccgcctggggagtacggccgcaaggttaaaactcaaatgaattgacgggggcccgcacaagcggtggagcatgtggtttaattcgatgcaacgcgaagaaccttacctggccttgacatgtctggaatcctgtagagatacgggagtgccttcgggaatcagaacacaggtgctgcatggctgtcgtcagctcgtgtcgtgagatgttgggttaagtcccgcaacgagcgcaacccctgtcctttgttgccagcacgtaatggtgggaactcaagggagactgccggtgataaaccggaggaaggtggggatgacgtcaagtcatcatggcccttacggccagggctacacacgtgctacaatggcgcgtacagagggctgcaagctagcgatagtgagcgaatcccaaaaagcgcgtcgtagtccggatcggagtctgcaactcgactccgtgaagtcggaatcgctagtaatcgcaaatcagaatgttgcggtgaatacgttcccgggccttgtac

SEQ ID NO: 539 - DNA, 1467 bp, Aeromonas lusitana
attgaacgctggcggcaggcctaacacatgcaagtcgagcggcagcgggaaagtagcttgctacttttgccggcgagcggcggacgggtgagtaatgcctggggatctgcccagtcgagggggataacagttggaaacggctgctaataccgcatacgccctacgggggaaagcaggggaccttcgggccttgcgcgattggatgaacccaggtgggattagctagttggtggggtaatggctcaccaaggcgacgatccctagctggtctgagaggatgatcagccacactggaactgagacacggtccagactcctacgggaggcagcagtggggaatattgcacaatgggggaaaccctgatgcagccatgccgcgtgtgtgaagaaggccttcgggttgtaaagcactttcagcgaggaggaaaggtcagtggctaataactactggctgtgacgttactcgcagaagaagcaccggctaactccgtgccagcagccgcggtaatacggagggtgcaagcgttaatcggaattactgggcgtaaagcgcacgcaggcggttggataagttagatgtgaaagccccgggctcaacctgggaattgcatttaaaactgtccagctagagtcttgtagaggggggtagaattccaggtgtagcggtgaaatgcgtagagatctggaggaataccggtggcgaaggcggccccctggacaaagactgacgctcaggtgcgaaagcgtggggagcaaacaggattagataccctggtagtccacgccgtaaacgatgtcgatttggaggctgtgtccttgagacgtggcttccggagctaacgcgttaaatcgaccgcctggggagtacggccgcaaggttaaaactcaaatgaattgacgggggcccgcacaagcggtggagcatgtggtttaattcgatgcaacgcgaagaaccttacctggccttgacatgtctggaatcctgtagagatacgggagtgccttcgggaatcagaacacaggtgctgcatggctgtcgtcagctcgtgtcgtgagatgttgggttaagtcccgcaacgagcgcaacccctgtcctttgttgccagcacgtaatggtgggaactcaagggagactgccggtgataaaccggaggaaggtggggatgacgtcaagtcatcatggcccttacggccagggctacacacgtgctacaatggcgcgtacaaagggctgcaagctagcgatagtgagcgaatcccagaaagcgcgtcgtagtccggatcggagtctgcaactcgactccgtgaagtcggaatcgctagtaatcgcgaatcagaatgtcgcggtgaatacgttcccgggccttgtacacaccgcccgtcacaccatgggagtgggttgcaccagaagtagatagcttaaccttcgggagggcgtttaccacggtgtgattcatgactggggtg

SEQ ID NO: 540 - DNA, 1467 bp, Aeromonas media
attgaacgctggcggcaggcctaacacatgcaagtcgagcggcagcgggaaagtagcttgctacttttgccggcgagcggcggacgggtgagtaatgcctgggaaattgcccagtcgagggggataacagttggaaacgactgctaataccgcatacgccctacgggggaaagcaggggaccttcgggccttgcgcgattggatatgcccaggtgggattagcttgttggtgaggtaatggctcaccaaggcgacgatccctagctggtctgagaggatgatcagccacactggaactgagacacggtccagactcctacgggaggcagcagtggggaatattgcacaatgggggaaaccctgatgcagccatgccgcgtgtgtgaagaaggccttcgggttgtaaagcactttcagcgaggaggaaaggttgatgcctaatacgcatcagctgtgacgttactcgcagaagaagcaccggctaactccgtgccagcagccgcggtaatacggagggtgcaagcgttaatcggaattactgggcgtaaagcgcacgcaggcggttggataagttagatgtgaaagccccgggctcaacctgggaattgcatttaaaactgtccagctagagtcttgtagaggggggtagaattccaggtgtagcggtgaaatgcgtagagatctggaggaataccggtggcgaaggcggccccctggacaaagactgacgctcaggtgcgaaagcgtggggagcaaacaggattagataccctggtagtccacgccgtaaacgatgtcgatttggaggctgtgtccttgagacgtggcttccggagctaacgcgttaaatcgaccgcctggggagtacggccgcaaggttaaaactcaaatgaattgacgggggcccgcacaagcggtggagcatgtggtttaattcgatgcaacgcgaagaaccttacctggccttgacatgtctggaatcctgcagagatgcgggagtgccttcgggaatcagaacacaggtgctgcatggctgtcgtcagctcgtgtcgtgagatgttgggttaagtcccgcaacgagcgcaacccctgtcctttgttgccagcacgtaatggtgggaactcaagggagactgccggtgataaaccggaggaaggtggggatgacgtcaagtcatcatggcccttacggccagggctacacacgtgctacaatggcgcgtacagagggctgcaagctagcgatagtgagcgaatcccaaaaagcgcgtcgtagtccggatcggagtctgcaactcgactccgtgaagtcggaatcgctagtaatcgcaaatcagaatgttgcggtgaatacgttcccgggccttgtacacaccgcccgtcacaccatgggagtgggttgcaccagaagtagatagcttaaccttcgggagggcgtttaccacggtgtgattcatgactggggtg

SEQ ID NO: 541 - DNA, 1467 bp, Aeromonas molluscorum
attgaacgctggcggcaggcctaacacatgcaagtcgagcggcagcgggaaagtagcttgctacttttgccggcgagcggcggacgggtgagtaatgcctggggatctgcccagtcgagggggataacagttggaaacgactgctaataccgcatacgccctacgggggaaaggaggggaccttcgggcctttcgcgattggatgaacccaggtgggattagctagttggtgaggtaatggctcaccaaggcgacgatccctagctggtctgagaggatgatcagccacactggaactgagacacggtccagactcctacgggaggcagcagtggggaatattgcacaatgggggaaaccctgatgcagccatgccgcgtgtgtgaagaaggccttcgggttgtaaagcactttcagcgaggaggaaaggttgatgcctaatacgtatcaactgtgacgttactcgcagaagaagcaccggctaactccgtgccagcagccgcggtaatacggagggtgcaagcgttaatcggaattactgggcgtaaagcgcacgcaggcggttggataagttagatgtgaaagccccgggctcaacctgggaattgcatttaaaactgtccagctagagtcttgtagaggggggtagaattccaggtgtagcggtgaaatgcgtagagatctggaggaataccggtggcgaaggcggccccctggacaaagactgacgctcaggtgcgaaagcgtggggagcaaacaggattagataccctggtagtccacgccgtaaacgatgtcgatttggaggctgtgtccttgagacgtggcttccggagctaacgcgttaaatcgaccgcctggggagtacggccgcaaggttaaaactcaaatgaattgacgggggcccgcacaagcggtggagcatgtggtttaattcgatgcaacgcgaagaaccttacctggccttgacatgtctggaatcctgtagagatacgggagtgccttcgggaatcagaacacaggtgctgcatggctgtcgtcagctcgtgtcgtgagatgttgggttaagtcccgcaacgagcgcaacccctgtcctttgttgccagcacgtaatggtgggaactcaagggagactgccggtgataaaccggaggaaggtggggatgacgtcaagtcatcatggcccttacggccagggctacacacgtgctacaatggcgcgtacagagggctgcaagctagcgatagtgagcgaatcccaaaaagcgcgtcgtagtccggatcggagtctgcaactcgactccgtgaagtcggaatcgctagtaatcgcgaatcagaatgtcgcggtgaatacgttcccgggccttgtacacaccgcccgtcacaccatgggagtgggttgcaccagaagtagatagcttaaccttcgggagggcgtttaccacggtgtgattcatgactggggtg

SEQ ID NO: 542 - DNA, 1445 bp, Aeromonas rivipollensis
attgaacgctggcggcaggcctaacacatgcaagtcgagcggcagcgggaaagtagcttgctacttttgccggcgagcggcggacgggtgagtaatgcctgggaaattgcccagtcgagggggataacagttggaaacgactgctaataccgcatacgccctacgggggaaagcaggggaccttcgggccttgcgcgattggatatgcccaggtgggattagcttgttggtgaggtaatggctcaccaaggcgacgatccctagctggtctgagaggatgatcagccacactggaactgagacacggtccagactcctacgggaggcagcagtggggaatattgcacaatgggggaaaccctgatgcagccatgccgcgtgtgtgaagaaggccttcgggttgtaaagcactttcagcgaggaggaaaggttggtagctaataactgccaactgtgacgttactcgcagaagaagcaccggctaactccgtgccagcagccgcggtaatacggagggtgcaagcgttaatcggaattactgggcgtaaagcgcacgcaggcggttggataagttagatgtgaaagccccgggctcaacctgggaattgcatttaaaactgtccagctagagtcttgtagaggggggtagaattccaggtgtagcggtgaaatgcgtagagatctggaggaataccggtggcgaaggcggccccctggacaaagactgacgctcaggtgcgaaagcgtggggagcaaacaggattagataccctggtagtccacgccgtaaacgatgtcgatttggaggctgtgtccttgagacgtggcttccggagctaacgcgttaaatcgaccgcctggggagtacggccgcaaggttaaaactcaaatgaattgacgggggcccgcacaagcggtggagcatgtggtttaattcgatgcaacgcgaagaaccttacctggccttgacatgtctggaatcctgtagagatacgggagtgccttcgggaatcagaacacaggtgctgcatggctgtcgtcagctcgtgtcgtgagatgttgggttaagtcccgcaacgagcgcaacccctgtcctttgttgccagcacgtaatggtgggaactcaagggagactgccggtgataaaccggaggaaggtggggatgacgtcaagtcatcatggcccttacggccagggctacacacgtgctacaatggcgcgtacagagggctgcaagctagcgatagtgagcgaatcccaaaaagcgcgtcgtagtccggatcggagtctgcaactcgactccgtgaagtcggaatcgctagtaatcgcaaatcagaatgttgcggtgaatacgttcccgggccttgtacacaccgcccgtcacaccatgggagtgggttgcaccagaagtagatagcttaaccttcgggagggcgtttaccac

SEQ ID NO: 543 - DNA, 1452 bp, Aeromonas simiae
caggcctaacacatgcaagtcgagcggcagcgggagagtagcttgctacttttgccggcgagcggcggacgggtgagtaatgcctgggaaattgcccagttgtgagggataactactggaaacggtggctaataccgcatacgccctacgggggaaagcaggggaccttcgggccttgcgcgattggatatgcccaggtgggattagcttgttggtgaggtaatggctcaccaaggcgacgatctctagctggtctgagaggatgatcagccacactgggactgagacacggcccagactcctacgggaggcagcagtggggaatattgcacaatgggggaaaccctgatgcagccatgccgcgtgtgtgaagaaggccttcgggttgtaaagcactttcagcgaggaggaaaggttggtagctaataactgccagctgtgacgttactcgcagaagaagcaccggctaactccgtgccagcagccgcggtaatacggagggtgcaagcgttaatcggaattactgggcgtaaagcgcacgcaggcggttggacaagttagatgtgaaagccccgggctcaacctgggaatagcatttaaaactgtccggctagagtcttgtagaggggggtagaattccaggtgtagcggtgaaatgcgtagagatctggaggaataccggtggcgaaggcggccccctggacaaagactgacgctcaggtgcgaaagcgtggggagcaaacaggattagataccctggtagtccacgccgtaaacgatgtcgatttggaggttgtgcccttgaggcgtggcttccggagctaacgcgttaaatcgaccgcctggggagtacggccgcaaggttaaaactcaaatgaattgacgggggcccgcacaagcggtggagcatgtggtttaattcgatgcaacgcgaagaaccttacctggccttgacatgtctggaaccttgtagagatacgagggtgccttcgggaatcagaacacaggtgctgcatggctgtcgtcagctcgtgtcgtgagatgttgggttaagtcccgcaacgagcgcaacccctgtcctttgttgccagcacgtaatggtgggaactcaaaggagactgccggtgataaaccggaggaaggtggggatgacgtcaagtcatcatggcccttacggccagggctacacacgtgctacaatggcgcgtacagagggctgcaagctagcgatagtgagcgaatccctaaaagcgcgtcgtagtccggattggagtctgcaactcgactccatgaagtcggaatcgctagtaatcgcaaatcagaatgttgcggtgaatacgttcccgggccttgtacacaccgcccgtcacaccatgggagtgggttgcaccagaagtagatagcttaaccttcgggagggcgtttaccacggtgtgattcatgactggggtg

SEQ ID NO: 544 - DNA, 1435 bp, Aeromonas sobria
attgaacgctggcggcaggcctaacacatgcaagtcgagcggcagcgggaaagtagcttgctacttttgccggcgagcggcggacgggtgagtaatgcctggggatctgcccagtcgagggggataacagttggaaacgactgctaataccgcatacgccctacgggggaaaggaggggaccttcgggcctttcgcgattggatgaacccaggtgggattagctagttggtggggtaatggctcaccaaggcgacgatccctagctggtctgagaggatgatcagccacactggaactgagacacggtccagactcctacgggaggcagcagtggggaatattgcacaatgggggaaaccctgatgcagccatgccgcgtgtgtgaagaaggccttcgggttgtaaagcactttcagcgaggaggaaaggttggcagctaatatctgtcagctgtgacgttactcgcagaagaagcaccggctaactccgtgccagcagccgcggtaatacggagggtgcaagcgttaatcggaattactgggcgtaaagcgcacgcaggcggttggataagttagatgtgaaagccccgggctcaacctgggaattgcatttaaaactgttcagctagagtcttgtagaggggggtagaattccaggtgtagcggtgaaatgcgtagagatctggaggaataccggtggcgaaggcggccccctggacaaagactgacgctcaggtgcgaaagcgtggggagcaaacaggattagataccctggtagtccacgccgtaaacgatgtcgatttggaggctgtgtccttgagacgtggcttccggagctaacgcgttaaatcgaccgcctggggagtacggccgcaaggttaaaactcaaatgaattgacgggggcccgcacaagcggtggagcatgtggtttaattcgatgcaacgcgaagaaccttacctggccttgacatgtctggaatcctgtagagatacgggagtgccttcgggaatcagaacacaggtgctgcatggctgtcgtcagctcgtgtcgtgagatgttgggttaagtcccgcaacgagcgcaacccctgtcctttgttgccagcacgtaatggtgggaactcaagggagactgccggtgataaaccggaggaaggtggggatgacgtcaagtcatcatggcccttacggccagggctacacacgtgctacaatggcgcgtacagagggctgcaagctagcgatagtgagcgaatcccaaaaagcgcgtcgtagtccggatcggagtctgcaactcgactccgtgaagtcggaatcgctagtaatcgcaaatcagaatgttgcggtgaatacgttcccgggccttgtacacaccgcccgtcacaccatgggagtgggttgcaccagaagtagatagcttaaccttcgggaggg

SEQ ID NO: 545 - DNA, 1467 bp, Aeromonas taiwanensis
attgaacgctggcggcaggcctaacacatgcaagtcgagcggcagcgggaaagtagcttgctacttttgccggcgagcggcggacgggtgagtaatgcctgggaaattgcccagtcgagggggataacagttggaaacgactgctaataccgcatacgccctacgggggaaagcaggggaccttcgggccttgcgcgattggatatgcccaggtgggattagctagttggtgaggtaatggctcaccaaggcgacgatccctagctggtctgagaggatgatcagccacactggaactgagacacggtccagactcctacgggaggcagcagtggggaatattgcacaatgggggaaaccctgatgcagccatgccgcgtgtgtgaagaaggccttcgggttgtaaagcactttcagcgaggaggaaaggtcagtagctaatatctgctgactgtgacgttactcgcagaagaagcaccggctaactccgtgccagcagccgcggtaatacggagggtgcaagcgttaatcggaattactgggcgtaaagcgcacgcaggcggttggataagttagatgtgaaagccccgggctcaacctgggaattgcatttaaaactgtccagctagagtcttgtagaggggggtagaattccaggtgtagcggtgaaatgcgtagagatctggaggaataccggtggcgaaggcggccccctggacaaagactgacgctcaggtgcgaaagcgtggggagcaaacaggattagataccctggtagtccacgccgtaaacgatgtcgatttggaggctgtgtccttgagacgtggcttccggagctaacgcgttaaatcgaccgcctggggagtacggccgcaaggttaaaactcaaatgaattgacgggggcccgcacaagcggtggagcatgtggtttaattcgatgcaacgcgaagaaccttacctggccttgacatgtctggaatcctgcagagatgcgggagtgccttcgggaatcagaacacaggtgctgcatggctgtcgtcagctcgtgtcgtgagatgttgggttaagtcccgcaacgagcgcaacccctgtcctttgttgccagcacgtaatggtgggaactcaagggagactgccggtgataaaccggaggaaggtggggatgacgtcaagtcatcatggcccttacggccagggctacacacgtgctacaatggcgcgtacaaagggctgcaagctagcgatagtgagcgaatcccagaaagcgcgtcgtagtccggattggagtctgcaactcgactccatgaagtcggaatcgctagtaatcgcgaatcagaatgtcgcggtgaatacgttcccgggccttgtacacaccgcccgtcacaccatgggagtgggttgcaccagaagtagatagcttaaccttcgggagggcgtttaccacggtgtgattcatgactggggtg

SEQ ID NO: 546 - DNA, 1417 bp, Aestuariispira insulae
aacgaacgctggcggcaggcctaacacatgcaagtcgagcgagaaggcatcttcgggtgctgggcagcggcggacgggtgagtaacgcgtgggaacatacctttcggtgggggacaacagttggaaacgactgctaataccgcatacgcccttcgggggaaagatttatcgccgagagattggcccgcgttagattaggtagttggtgaggtaacggctcaccaagccgacgatctatagctggtctgagaggatgatcagccacactgggactgagacacggcccagactcctacgggaggcagcagtggggaatattgcgcaatggaggaaactctgacgcagccatgccgcgtgagtgaagaaggccttagggttgtaaagctctttcaatagtgaagatgatgacggtaactatagaagaagctccggctaacttcgtgccagcagccgcggtaatacgaagggagcaagcgttgttcggaattactgggcgtaaagggcgtgtaggcggactgtccagtcaggggtgaaatcccggggctcaacctcggaactgcctttgatactgacagtctagagtccgcgagaggatagtggaatacccagtgtagaggtgaaattcgtagatattgggtagaacaccagtggcgaaggcgactatctggagcggtactgacgctgaggcgcgaaagcgtggggagcaaacaggattagataccctggtagtccacgccgtaaacgatgtgaactagtcgtcggggtttagacttcggtgacgcagctaacgcattaagttcaccgcctggggagtacggtcgcaagattaaaactcaaaggaattgacgggggcccgcacaagcggtggagcatgtggtttaattcgaagcaacgcgcagaaccttaccaacccttgacatccctatcgcggttaccagagatggtttccttcagttcggctggataggtgacaggtgctgcatggctgtcgtcagctcgtgtcgtgagatgttgggttaagtcccgcaacgagcgcaacccccgcccttagttgccatcattaagttgggcactctaggggaactgccggtgacaagccggaggaaggcggggatgacgtcaagtcctcatggcccttatgggttgggctacacacgtgctacaatggctactacagagggcagctactcagcgatgaggtgctaatcccaaaaagtagtctcagttcggattgttctctgcaactcgagagcatgaagtcggaatcgctagtaatcgtggatcagcatgccacggtgaatacgttcccgggccttgtacacaccgcccgtcacaccatgggagttggttctacccgaagccggtgcgctaaccttttagggggcagccgaccacggtagggtcagcgactggggtg

SEQ ID NO: 547 - DNA, 1409 bp, Afipia broomeae
agcgaacgctggcggcaggcttaacacatgcaagtcgagcgggcgtagcaatacgtcagcggcagacgggtgagtaacgcgtgggaacgtaccttttggttcggaacaacacagggaaacttgtgctaataccggataagcccttacggggaaagatttatcgccgaaagatcggcccgcgtctgattagctagttggtgaggtaacggctcaccaaggcgacgatcagtagctggtctgagaggatgatcagccacattgggactgagacacggcccaaactcctacgggaggcagcagtggggaatattggacaatgggcgcaagcctgatccagccatgccgcgtgagtgatgaaggccctagggttgtaaagctcttttgtgcgggaagataatgacggtaccgcaagaataagccccggctaacttcgtgccagcagccgcggtaatacgaagggggctagcgttgctcggaatcactgggcgtaaagggtgcgtaggcgggtctttaagtcaggggtgaaatcctggagctcaactccagaactgcctttgatactgaagatcttgagttcgggagaggtgagtggaactgcgagtgtagaggtgaaattcgtagatattcgcaagaacaccagtggcgaaggcggctcactggcccgatactgacgctgaggcacgaaagcgtggggagcaaacaggattagataccctggtagtccacgccgtaaacgatgaatgccagccgttggaaagtttacttttcagtggcgcagctaacgctttaagcattccgcctggggagtacggtcgcaagattaaaactcaaaggaattgacgggggcccgcacaagcggtggagcatgtggtttaattcgacgcaacgcgcagaaccttaccagcccttgacatgtctatgaccggtaccagagatggaaccttcccttcggggcatagagcacaggtgctgcatggctgtcgtcagctcgtgtcgtgagatgttgggttaagtcccgcaacgagcgcaacccccgtccttagttgctaccatttagttgagcactctaaggagactgccggtgataagccgcgaggaaggtggggatgacgtcaagtcctcatggcccttacgggctgggctacacacgtgctacaatggcggtgacaatgggacgctaaggggcaacccttcgcaaatctcaaaaagccgtctcagttcggattgggctctgcaactcgagcccatgaagttggaatcgctagtaatcgtggatcagcatgccacggtgaatacgttcccgggccttgtacacaccgcccgtcacaccatgggagttggttttacctgaagacggtgcgctaaccgaaagggggcagccggccacggtagggtcagcgactggggtg

SEQ ID NO: 548 - DNA, 1411 bp, Afipia clevelandensis
agcgaacgctggcggcaggcttaacacatgcaagtcgaacgggcgtagcaatacgtcagtggcagacgggtgagtaacgcgtgggaacgtaccttttggttcggaacaacacagggaaacttgtgctaataccggataagcccttacggggaaagatttatcgccgaaagatcggcccgcgtctgattagctagttggtgaggtaacggctcaccaaggcgacgatcagtagctggtctgagaggatgatcagccacattgggactgagacacggcccaaactcctacgggaggcagcagtggggaatattggacaatgggggcaaccctgatccagccatgccgcgtgagtgatgaaggccctagggttgtaaagctcttttgtgcgggaagataatgacggtaccgcaagaataagccccggctaacttcgtgccagcagccgcggtaatacgaagggggctagcgttgctcggaatcactgggcgtaaagggtgcgtaggcgggtctttaagtcagaggtgaaagcctggagctcaactccagaactgcctttgatactgaggatcttgagttcgggagaggtgagtggaactgcgagtgtagaggtgaaattcgtagatattcgcaagaacaccagtggcgaaggcggctcactggcccgatactgacgctgaggcacgaaagcgtggggagcaaacaggattagataccctggtagtccacgccgtaaacgatgaatgccagccgttggaaagtttacttttcagtggcgcagctaacgctttaagcattccgcctggggagtacggtcgcaagattaaaactcaaaggaattgacgggggcccgcacaagcggtggagcatgtggtttaattcgacgcaacgcgcagaaccttaccagcccttgacatgtccaggaccggtcgcagagatgtgaccttctcttcggagcctggagcacaggtgctgcatggctgtcgtcagctcgtgtcgtgagatgttgggttaagtcccgcaacgagcgcaacccccgtccttagttgctaccatttagttgagcactctaaggagactgccggtgataagccgcgaggaaggtggggatgacgtcaagtcctcatggcccttacgggctgggctacacacgtgctacaatggcggtgacaatgggatgcaaaggggcgacccctagcaaatctcaaaaagccgtctcagttcggattgggctctgcaactcgagcccatgaagttggaatcgctagtaatcgtggatcagcatgccacggtgaatacgttcccgggccttgtacacaccgcccgtcacaccatgggagttggttttacctgaagacggtgcgctaacccgcaagggaggcagccggccacggtagggtcagcgactggggtg

SEQ ID NO: 549 - DNA, 1411 bp, Afipia felis
agcgaacgctggcggcaggcttaacacatgcaagtcgagcgggcgtagcaatacgtcagcggcagacgggtgagtaacgcgtgggaacataccttttggttcggaacaacacagggaaacttgtgctaataccgaataagcccttacggggaaagatttatcgccgaaagattggcccgcgtctgattagcttgttggtgaggtaacggctcaccaaggcgacgatcagtagctggtctgagaggatgatcagccacattgggactgagacacggcccaaactcctacgggaggcagcagtggggaatattggacaatgggcgcaagcctgatccagccatgccgcgtgagtgatgaaggccctagggttgtaaagctcttttgtgcgggaagataatgacggtaccgcaagaataagccccggctaacttcgtgccagcagccgcggtaatacgaagggggctagcgttgctcggaatcactgggcgtaaagggtgcgtaggcgggtctttaagtcagaggtgaaagcctggagctcaactccagaactgcctttgatactgaggatctcgagttcgggagaggtgagtggaactgcgagtgtagaggtgaaattcgtagatattcgcaagaacaccagtggcgaaggcggctcactggcccgatactgacgctgaggcacgaaagcgtggggagcaaacaggattagataccctggtagtccacgccgtaaacgatgaatgccagccgttggggagtttactcttcagtggcgcagttaacgctttaagcattccgcctggggagtacggtcgcaagattaaaactcaaaggaattgacgggggcccgcacaagcggtggagcatgtggtttaattcgacgcaacgcgcagaaccttaccagcccttgacatgtccaggaccggtcgcagagatgtgaccttctcttcggagcctggagcacaggtgctgcatggctgtcgtcagctcgtgtcgtgagatgttgggttaagtcccgcaacgagcgcaacccccgtccttagttgctaccatttagttgagcactctaaggagactgccggtgataagccgcgaggaaggtggggatgacgtcaagtcctcatggcccttacgggctgggctacacacgtgctacaatggcggtgacaatgggatgcaaaggcgcgagccctagcaaatctcaaaaagccgtctcagttcggattggactctgcaactcgagtccatgaagttggaatcgctagtaatcgtggatcagcatgccacggtgaatacgttcccgggccttgtacacaccgcccgtcacaccatgggagttggttttacctgaagacggtgcgctaacccgcaagggaggcagccggccacggtagggtcagcgactggggtg

SEQ ID NO: 550 - DNA, 1364 bp, Afipia massiliensis
gcaatacgtcagcggcagacgggtgagtaacgcgtgggaacgtaccttttggttcggaacaactgagggaaacttcagctaataccggataagcccttacggggaaagatttatcgccgaaagatcggcccgcgtctgattagctagttggtgaggtaatggctcaccaaggcgacgatcagtagctggtctgagaggatgatcagccacattgggactgagacacggcccaaactcctacgggaggcagcagtggggaatattggacaatgggcgaaagcctgatccagccatgccgcgtgagtgatgaaggccctagggttgtaaagctcttttgtgcgggaagataatgacggtaccgcaagaataagccccggctaacttcgtgccagcagccgcggtaatacgaagggggctagcgttgctcggaatcactgggcgtaaagggtgcgtaggcgggtctttaagtcagaggtgaaatcctggagctcaactccagaactgcctttgatactgaggatcttgagttcgggagaggtgagtggaactgcgagtgtagaggtgaaattcgtagatattcgcaagaacaccagtggcgaaggcggctcactggcccgatactgacgctgaggcacgaaagcgtggggagcaaacaggattagataccctggtagtccacgccgtaaacgatgaatgccagccgttggggagtttactcttcagtggcgcagctaacgctttaagcattccgcctggggagtacggtcgcaagattaaaactcaaaggaattgacgggggcccgcacaagcggtggagcatgtggtttaattcgacgcaacgcgcagaaccttaccagcccttgacatgtctatgaccggtaccagagatggaaccttcccttcggggcatagagcacaggtgctgcatggctgtcgtcagctcgtgtcgtgagatgttgggttaagtcccgcaacgagcgcaacccccgtccttagttgctaccatttagttgagcactctaaggagactgccggtgataagccgcgaggaaggtggggatgacgtcaagtcctcatggcccttacgggctgggctacacacgtgctacaatggcggtgacaatgggacgctaaggggcaacccttcgcaaatctcaaaaagccgtctcagttcggattgggctctgcaactcgagcccatgaagttggaatcgctagtaatcgtggatcagcatgccacggtgaatacgttcccgggccttgtacacaccgcccgtcacaccatgggagttggttctacctgaaggcagtgcgctaacccgcaagggaggcagctgaccacggtagggtcagcgactggggtg

SEQ ID NO: 551 - DNA, 1465 bp, Agarivorans albus
attgaacgctggcggcaggcttaacacatgcaagtcgagcggtaacatttctagcttgctagaagatgacgagcggcggacgggtgagtaatgcttgggaatatgcctttacgtgggggacaacagttggaaacgactgctaataccgcataatgtcttcggaccaaaggaggggactcttcggagcctttcgcgtaaagattagcccaagtgggattagctagttggtggggtaatggctcaccaaggcgacgatccctagctggtttgagaggatgatcagccacactgggactgagacacggcccagactcctacgggaggcagcagtggggaatattgcacaatgggcgaaagcctgatgcagccatgccgcgtgtgtgaagaaggccttcgggttgtaaagcactttcagtcgtgaggaaggggtagtaattaatacttgctatctttgacgttagcgacagaagaaggaccggctaactccgtgccagcagccgcggtaatacggagggtccgagcgttaatcggaattactgggcgtaaagcgtacgcaggcggcttgttaagccagatgtgaaatccccgggctcaacctgggaatggcatttggaactggcaagctagagttttgtagagggtggtagaatttcaggtgtagcggtgaaatgcgtagagatctgaaggaataccagtggcgaaggcggccacctggacaaaaactgacgctcatgtacgaaagcgtggggagcaaacaggattagataccctggtagtccacgccgtaaacgatgtctactagttgtctgtgagtttaactcgtgggtaacgcagctaacgcattaagtagaccgcctggggagtacggccgcaaggttaaaactcaaatgaattgacgggggcccgcacaagcggtggagcatgtggtttaattcgatgcaacgcgaagaaccttacctgcccttgacatactgagaatttaccagagatggtttagtgccttcgggaactcagatacaggtgctgcatggctgtcgtcagctcgtgtcgtgagatgttgggttaagtcccgcaacgagcgcaacccctatccttatttgccagcacgtaatggtgggaactctagggagactgccggtgataaaccggaggaaggtggggacgacgtcaagtcatcatggcccttacgggcagggctacacacgtgctacaatggcatgtacagagggatgcgaactcgcgagagcaagcggaccccaaaaagcatgtcgtagtccggatcggagtctgcaactcgactccgtgaagtcggaatcgctagtaatcgtagatcagaatgctacggtgaatacgttcccgggccttgtacacaccgcccgtcacaccatgggagtgggctgcaaaagaagtgggtagtttaaccttcgggaggacgctcaccactttgtggttcatgactggggtg

SEQ ID NO: 552 - DNA, 1429 bp, Agathobacter ruminis
tgcagtcgaacgaagcactctatttgatttccttcgggattgattattttgtgactgattggcggacgggtgagtaacgcgtgggtaacctaccttatacagggggataacagttggaaacgactgctaataccgcataagcgcacagcatcgcatgatgcagtgtgaaaagctccgacggtataagatggacccgcgtctgattagctagttggtgaggtaacggcccaccaaggcgacgatcagtagccgacctgagagggtgaccggccacattgggactgagacacggcccaaactcctacgggaggcagcagtggggaatattgcacaatgggcgaaagcctgatgcagcgacgccgcgtgagcgaagaagtatttcggtatgtaaagctctatcagcagggaagaaaaatgacggtacctgactaagaagcaccggctaaatacgtgccagcagccgcggtaatacgtatggtgcaagcgttatccggatttactgggtgtaaagggagcgcaggcggtacggcaagtctgatgtgaaagcccggggctcaacccccggtactgcattggaaactgtcgaactagagtgtcggaggggtaagtggaattcctagtgtagcggtgaaatgcgtagatattaggaggaacaccagtggcgaaggcggcttactggacgatcactgacgctgaggctcgaaagcgtggggagcaaacaggattagataccctggtagtccacgccgtaaacgatgaatactaggtgtcgggaggcattgcctttcggtgccgtcgctaacgcagtaagtattccacctgggggagtacgttcgcaagaatgaaactcaaaggaattgacggggacccgcacaagcggtggagcatgtggtttaattcgacgcaacgcgaagaaccttaccaagtcttgacatcccgatgaccggctcttagccgagccttttcttcggaacatcggtgacaggtggtgcatggttgtcgtcagctcgtgtcgtgagatgttgggttaagtcccgcaacgagcgcaacccctgtccttagtagccagcagttcggctgggcactctagggagactgccagggataacctggaggaaggcggggatgacgtcaaatcatcatgccccttatgacttgggctacacacgtgctacaatggcgtaaacaaagggaagcagagccgtgaggccgagcaaatctcaaaaataacgtctcagttcggattgtagtctgcaactcgactacatgaagctggaatcgctagtaatcgcagatcagaatgctgcggtgaatacgttcccgggtcttgtacacaccgcccgtcacaccatgggagttgggaatgcccgaagccagtgacctaaccgtaaggagggagctgtcgaaggcaggctcgataactggggtg

SEQ ID NO: 553 - DNA, 1451 bp, Aggregatibacter actinomycetemcomitans
  misc_feature (102)..(102): n is a, c, g, or t
  misc_feature (309)..(309): n is a, c, g, or t
  misc_feature (311)..(311): n is a, c, g, or t
  misc_feature (602)..(602): n is a, c, g, or t
  misc_feature (644)..(644): n is a, c, g, or t
  misc_feature (1063)..(1063): n is a, c, g, or t
attgaacgctggcggcaggcttaacacatgcaagtcggacggtagcaggtaagtacttgtacttatgctgacgagtggcggacgggtgagtaatgcttgggnatctgtcttatggagggggataacgacgggaaactgtcgctaataccgcgtagaatcgggagatgaaagtgtgggaccttcgggccacatgccatagaatgagcccaagtgtgattaggtagttggtggggtaaaggcctaccaagccgacgatcgctagctggtctgagaggatggccagccacaccgggactgagacacggcccngnctcctacgggaggcagcagtggggaatattgcgcaatgggggcaaccctgacgcagccatgccgcgtgaatgaagaaggccttcgggttgtaaagttctttcggtgatgaggaaggttggtgtgttaatagcatgccaaattgacgttaaatacagaagaagcaccggctaactccgtgccagcagccgcggtaatacggggggtgcgagcgttaatcggaataactgggcgtaaagggcacgtaggcggacctttaagtgaggtgtgaaatccccgggcttaacctgggnattgcatttcatactgggggtctggagtactttagggagggntagaattccacgtgtagcggtgaaatgcgtagagatgtggaggaataccgaaggcgaaggcagccccttggggatgtactgacgctgatgtgcgaaagcgtggggagcaaacaggattagataccctggtagtccacgctgtaaacggtgtcgatttggggattggggtttagccctggtgcccgaagctaacgtgataaatcgaccgcctggggagtacggccgcaaggttaaaactcaaatgaattgacgggggcccgcacaagcggtggagcatgtggtttaattcgatgcaacgcgaagaaccttacctactcttgacatccgaagaagaactcagagatgggtttgtgccttagggagctttgagacaggtgctgcatggctgtcgtcagctcgtgttgtgaaatgttgggttnagtcccgcaacgagcgcaacccttatcctttgttgccagcgacttggtcgggaactcaaaggagactgccggtgataaaccggaggaaggtggggatgacgtcaagtcatcatggcccttacgagtagggctacacacgtgctacaatggcgtatacagagggtaaccaaccagcgatggggagtgaatctcagaaagtacgtctaagtccggattggagtctgcaactcgactccatgaagtcggaatcgctagtaatcgcgaatcagaatgttgcggtgaatacgttcccgggccttgtacacaccgcccgtcacaccatgggagtgggttgtaccagaagtagatagcttaaccgagaggggggcgtttaccacggtatgattca

SEQ ID NO: 554 - DNA, 1447 bp, Agitococcus lubricus
  misc_feature (330)..(331): n is a, c, g, or t
  misc_feature (337)..(338): n is a, c, g, or t
  misc_feature (341)..(341): n is a, c, g, or t
attgaacgctggcggcaggcttaacacatgcaagtcgagcggagacttcggtcttagcggcgaacgggtgagtaatacctaggaatctgcctattagtgggggataacgaatcgaaaggttcgctaataccgcatacgtcctacgggagaaagagggggatcttcggacctcttgctaatagatgagcctaggtcggattagctagttggtagggtaaaggcctaccaaggcgacgatctgtagctggtctgagaggatggccagccacactggaactgagacacggtccagactcctacgggaggcagcagtggggaatattggacaannggcgcnngcntgatccagccatgccgcgtgtgtgaagaaggccttcgggttgtaaagcactttaagtagggaggaaggtcactatactaatattatggtgaattgacgttacctacagaataagcaccggctaactctgtgccagcagccgcggtaatacagagggtgcaagcgttaatcggaattactgggcgtaaagcgcgcgtaggcggtttgttaagtcggatgtgaaatccctgggctcaacctaggcactgcatccgatactggctgactagagtatgggagaggaaggtagaattccaggtgtagcggtgaaatgcgtagagatctggaggaataccgatggcgaaggcagccttctggcctaatactgacgctgaggtgcgaaagcatggggagcaaacaggattagataccctggtagtccatgctgtaaacgatgtcaactagccgttgggctccttgagggcttagtggcgcagctaacgcgataagttgaccgcctggggagtacggtcgcaagactaaaactcaaatgaattgactggggcccgcacaagcggtggagcatgtggtttaattcgatgcaacgcgaagaaccttacctggccttgacatgtctggaatcttgtagagatacgagagtgccttcgggaatcagaacacaggtgctgcatggctgtcgtcagctcgtgtcgtgagatgttgggttaagtcccgcaacgagcgcaacccttttctttatttgccagcacgtaatggtgggaactctaaagatactgccggtgacaaaccggaggaaggcggggacgacgtcaagtcatcatggcccttacggccagggctacacacgtgctacaatggttggtacaaagggttgctacctcgcgagaggatgctaatctcaaaaagccaatcgtagtccagattggagtctgcaactcgactccatgaagtcggaatcgctagtaatcgcagatcagaatgctgcggtgaatacgttcccgggccttgtacacaccgcccgtcacaccatgggagtctattgcaccagaagtaggtagtctaaccgtaaggaggacgcttaccacggtgtggtcgatgactggggtg

SEQ ID NO: 555 - DNA, 1462 bp, Aidingimonas halophila
attgaacgctggcggcaggcctaacacatgcaagtcgagcggcagcacggggagcttgctccctggtggcgagcggcggacgggtgagtaaggcataggaatctacccggtagtgggggataacctgaggaaactcaggctaataccgcatacgtcctacgggagaaagcgggggaccttcgggcctcgcgctatcggctgagcctatgtcggattagctggttggtagggtaacggcctaccaaggcgacgatccgtagctggtttgagaggatgatcagccacatcgggactgagacacggcccgaactcctacgggaggcagcagtggggaatattggacaatgggcgaaagcctgatccagccatgccgcgtgtgtgaagaaggctttcgggttgtaaagcactttcagcggggaagaaagcgtgcgggttaataaccggcacggacgacatcacccgcagaagaagcaccggcaaactccgtgccagcagccgcggtaatacggagggtgcgagcgttaatcggaattactgggcgtaaagcgcgcgtaggcggcgagataagccggttgtgaaagccccgggctcaacctgggaatggcatccggaactgtctggctagagtgcaggagaggaaggtggaattcccggtgtagcggtgaaatgcgtagagatcgggaggaataccagtggcgaaggcggccttctggcctgacactgacgctgaggtgcgaaagcgtgggtagcaaacaggattagataccctggtagtccacgccgtaaacgctgtcgactagccgttgggagccttgagttcttagtggcgcagttaacgcgataagtcgaccgcctggggagtacggccgcaaggttaaaactcaaatgaattgacgggggcccgcacaagcggtggagcatgtggtttaattcgatgcaacgcgaagcaccttacctacccttgacatcctcggaacttggcagagatgccttggtgccttcgggagccgagtgacaggtgctgcatggctgtcgtcagctcgtgttgtgaaatgttgggttaagtcccgtaacgagcgcaacccttatccctatttgccagcggtccggccgggaactctagggagactgccggtgacaaaccggaggaaggtggggacgacgtcaagtcatcatggcccttacgggtagggctacacacgtgctacaatggtcggtacaaagggttgcgatctcgcgagagccagctaaccccggaaagccgatctcagtccggatcggagtctgcaactcgactccgtgaagtcggaatcgctagtaatcgtgaatcagaatgtcacggtgaatacgttcccgggccttgtacacaccgcccgtcacaccatgggagtggactgcaccagaagtggttagcttaaccttcgggggagcgatcaccacggtgtggttcatgactggggtg

SEQ ID NO: 556 - DNA, 1436 bp, Akkermansia glycaniphila
aacgaacgctggcggcgtggataagacatgcaagtcgaacggagaagcaatagcttgctaatgcttcttagtggcgcacgggtgagtaacacgtgagcaacctgccttcgagacgggaatagccctgggaaaccgggattaatgcccgatagactcgcaagagtaaacgcagcaatgcgcttgaagaggggctcgcggcctattagttagttggtgaggtaacggctcaccaaggcgatgacgggtagccggtctgagaggatgtccggccacactggaactgagacacggtccagacacctacgggtggcagcagtcgagaatcattcacaatgggggaaaccctgatggtgcgacgccgcgtgggggaagaaggtcttcggattgtaaacccctgtcatgtgggagcaaggcgcaagcttgatagtaccacaagaggaagagacggctaactctgtgccagcagccgcggtaatacagaggtctcaagcgttgttcggaatcactgggcgtaaagggtacgtaggctgcatcataagtcgggcgtgaaaggcaggggctcaacccctggagtgcgcttgatactgtgatgctagagtcatggagggggaaccggaactctcggtgtagcagtgaaatgcgtagatatcgagaagaacactcgtggcgaaggcgggttcctggacatgtactgacgctgaggtacgaaggctaggggagcgaaagggattagatacccctgtagtcctagcagtaaacggtgcacgcttggtgtgtggggaatcgaccccccacgtgccggagcaaacgcgttaagcgtgccgcctggggagtacggtcgcaagattaaaactcaaagaaattgacggggacccgcacaagcggtggagtatgtggcttaattcgatgcaacgcgaagaaccttacctgggcttgacatgtgatgaacaacatgtgaaagcatgtgacacctcggtggcgtcacacaggtgctgcatggccgtcgtcagctcgtgtcgtgagatgtttggttaagtccagcaacgagcgcaacccctgttgccagttaccagcacgttatggtggggactctggcgagactgcccagatcaactgggaggaaggtggggacgacgtcaggtcagtatggcccttatgcccagggctgcacacgtactacaatgcccagtacagagggtaccgaacccgcgagggggaggcaatccatgaaaactgggcccagttcggattgtaggctgcaactcgcctacatgaagatggaatcgctagtaatggcgcatcagctacggcgccgtgaatacgttcccgggtcttgtacacaccgcccgtcacatcatggaagccggtcgcacccgaagtatctgaagccaaccgcaaggaggcagggtcctaaggtgagactggtaactgggatg

SEQ ID NO: 557 - DNA, 1464 bp, Alcanivorax borkumensis
attgaacgctggcggcaggcctaacacatgcaagtcgagcggaaacgatcctagcttgctaggaggcgtcgagcggcggacgggtgagtaacacgtgagaatctgcccattagagggggataacctggggaaacccaggctaataccgcataatccctacgggggaaagcaggggatcttcggaccttgtgctgatggatgagctcgcgtcggattagcttgttggtgaggtaatggctcaccaaggcgacgatccgtagctggtcttagaggatgatcagccacaccgggactgagacacggcccggactcctacgggaggcagcagtggggaatcttggacaatgggggcaaccctgatccagccatgccgcgtgtgtgaagaaggccttcgggttgtaaagcactttcagtagggaggaaggcttatccttaatacggatgagtacttgacgttacctacagaagaagcaccggctaatttcgtgccagcagccgcggtaatacgaaaggtgcgagcgttaatcggaattactgggcgtaaagcgcgcgtaggcggtttgctaagtcagatgtgaaagccccgggctcaacctgggaactgcatttgaaactggcaggctagaatgcagtagagggaggtggaatttccggtgtagcggtgaaatgcgtagagatcggaaggaacaccagtggcgaaggcggcctcctggactgacattgacgctgaggtgcgaaagcgtggggagcaaacaggattagataccctggtagtccacgccgtaaacgatgtctactagtcgttgggaatcttagtattcttggtgacgaagttaacgcgataagtagaccgcctggggagtacggccgcaaggttaaaactcaaatgaattgacgggggcccgcacaagcggtggagcatgtggtttaattcgatgcaacgcgaagaaccttaccaggccttgacatccttggaactttctagagatagattggtgccttcgggagccaagtgacaggtgctgcatggctgtcgtcagctcgtgtcgtgagatgttgggttaagtcccgtaacgagcgcaacccttgtccctagttgccagcacgtaatggtgggaactctagggagactgccggtgacaaaccggaggaaggtggggacgacgtcaagtcatcatggcccttacggcctgggctacacacgtgctacaatgggcagtacagagggcagcaaagtcgcgaggccaagcaaatcccttaaaactgttcgtagtccggattggagtctgcaactcgactccatgaagtcggaatcgctagtaatcgcggatcagaatgccgcggtgaatacgttcccgggccttgtacacaccgcccgtcacaccatgggagtggattgcaccagaagtggatagtctaaccttcgggaggacgttcaccacggtgtggttcatgactggggtg

SEQ ID NO: 558 - DNA, 1463 bp, Alcanivorax dieselolei
attgaacgctggcggcaggcctaacacatgcaagtcgagcggaaacgatgggagcttgctcccaggcgtcgagcggcggacgggtgagtaacacgtgggaatctgcccattagtgggggataactcggggaaactcgagctaataccgcataatccctacgggggaaagcaggggatcttcggaccttgcgctgatggatgagcccgcgtcggattagcttgttggtggggtaatggcccaccaaggcgacgatccgtaactggtctgagaggatggccagtcacaccgggactgagacacggcccggactcctacgggaggcagcagtggggaatcttggacaatgggcgcaagcctgatccagccatgccgcgtgtgtgaagaaggccttcgggttgtaaagcactttcagtagggaggaaggctttgggctaataccctggagtacttgacgttacctacagaagaagcaccggctaatttcgtgccagcagccgcggtaatacgaaaggtgcgagcgttaatcggaattactgggcgtaaagcgcgcgtaggcggtgtgttaagtcggatgtgaaagcccagggctcaaccttggaattgcatccgatactggcacgctagagtgcagtagagggaggtggaatttccggtgtagcggtgaaatgcgtagagatcggaaggaacaccagtggcgaaggcggcctcctggactgacactgacgctgaggtgcgaaagcgtggggagcaaacaggattagataccctggtagtccacgctgtaaacgatgtctactagccgttggggtccttagtgactttggtggcgcagctaacgcgataagtagaccgcctggggagtacggccgcaaggttaaaactcaaatgaattgacgggggcccgcacaagcggtggagcatgtggtttaattcgatgcaacgcgaagaaccttaccaggccttgacatcctgcgaactttctagagatagattggtgccttcgggaacgcagtgacaggtgctgcatggctgtcgtcagctcgtgtcgtgagatgttgggttaagtcccgtaacgagcgcaacccttgtccttagttgccagcacttcgggtgggaactctagggagactgccggtgacaaaccggaggaaggtggggacgacgtcaagtcatcatggcccttacggcctgggctacacacgtgctacaatggttggtacagagggttgcgaagtcgcgaggcggagctaatctctcaaagccaatcgtagtccggattggagtctgcaactcgactccatgaagtcggaatcgctagtaatcgcggatcagaatgccgcggtgaatacgttcccgggccttgtacacaccgcccgtcacaccatgggagtggattgcaccagaagtagttagtctaaccttcgggaggacgattaccacggtgtggttcatgactggggtg

SEQ ID NO: 559 - DNA, 1463 bp, Alcanivorax hongdengensis
attgaacgctggcggcaggcctaacacatgcaagtcgagcggaaacgatggtagcttgctaccaggcgtcgagcggcggacgggtgagtaacgcgtgagaatctgcccatttgtgggggataacctggggaaactcaggctaataccgcataatccctacgggggaaagcaggggaccttcgggccttgtgcagatggatgagctcgcgtcggattagcttgttggtgaggtaatggctcaccaaggcgacgatccgtagctggtctgagaggatgatcagccacactgggactgagacacggcccagactcctacgggaggcagcagtggggaatcttggacaatgggggcaaccctgatccagccatgccgcgtgtgtgaagaaggccttcgggttgtaaagcactttcagtagggaggaaggcttagcattaatactgctgagtacttgacgttacctacagaagaagcaccggctaatttcgtgccagcagccgcggtaatacgaaaggtgcgagcgttaatcggaattactgggcgtaaagcgcgcgtaggcggtttgttaagtcagatgtgaaagccccgggctcaacctgggaattgcatttgaaactggcaggctagaatgcagtagagggaggtggaatttccggtgtagcggtgaaatgcgtagagatcggaaggaacaccagtggcgaaggcggcctcctggactgacattgacgctgaggtgcgaaagcgtggggagcaaacaggattagataccctggtagtccacgccgtaaacgatgtctactagtcgttgggaatcttagtattcttggtgacgaagttaacgcgataagtagaccgcctggggagtacggccgcaaggttaaaactcaaatgaattgacgggggcccgcacaagcggtggagcatgtggtttaattcgatgcaacgcgaagaaccttaccaggccttgacatgctgagaactttccagagatggattggtgccttcgggaactcagacacaggtgctgcatggccgtcgtcagctcgtgtcgtgagatgttgggttaagtcccgtaacgagcgcaacccttgtccttagttgccagcacttcgggtgggaactctagggagactgccggtgacaaaccggaggaaggtggggacgacgtcaggtcatcatggcccttacggcctgggctacacacgtgctacaatggacggtacagagggccgcgaagtcgcgaggcggagcaaatcccttaaaaccgttcgtagtccggattggagtctgcaactcgactccatgaagtcggaatcgctagtaatcgcagatcagaatgctgcggtgaatacgttcccgggccttgtacacaccgcccgtcacaccatgggagtggattgcaccagaagtggttagtctaaccttcgggaggacgatcaccacggtgtggttcatgactggggtg

SEQ ID NO: 560 - DNA, 1464 bp, Alcanivorax jadensis
attgaacgctggcggcaggcctaacacatgcaagtcgagcggaaacgatcctagcttgctaggaggcgtcgagcggcggacgggtgagtaacgcgtgagaatctgcccatttgtgggggataactcggggaaactcgagctaataccgcataatccctacgggggaaagcaggggaccttcgggccttgtgcagatggatgagctcgcgtcggattagcttgttggtgaggtaaaagctcaccaaggcgacgatccgtagctggtctgagaggatgatcagccacaccgggactgagacacggcccggactcctacgggaggcagcagtggggaatcttggacaatgggggcaaccctgatccagccatgccgcgtgtgtgaagaaggccttcgggttgtaaagcactttcagtagggaggaaggcttaccgctaataatggtgagtacttgacgttacctacagaagaagcaccggctaatttcgtgccagcagccgcggtaatacgaaaggtgcgagcgttaatcggaattactgggcgtaaagcgcgcgtaggcggtttgttaagtcagatgtgaaagccccgggctcaacctgggaattgcatttgaaactggcaggctagaatgcagtagagggaggtggaatttccggtgtagcggtgaaatgcgtagagatcggaaggaacaccagtggcgaaggcggcctcctggactgacattgacgctgaggtgcgaaagcgtggggagcaaacaggattagataccctggtagtccacgccgtaaacgatgtctactagtcgttgggaatcttagtattcttggtgacgaagttaacgcgataagtagaccgcctggggagtacggccgcaaggttaaaactcaaatgaattgacgggggcccgcacaagcggtggagcatgtggtttaattcgatgcaacgcgaagaaccttaccaggccttgacatccttggaactttctagagatagattggtgccttcgggagccaagtgacaggtgctgcatggctgtcgtcagctcgtgtcgtgagatgttgggttaagtcccgtaacgagcgcaacccttgtccctagttgccagcacataatggtgggaactctagggagactgccggtgacaaaccggaggaaggtggggacgacgtcaagtcatcatggcccttacggcctgggctacacacgtgctacaatgggcagtacagagggccgcaaagtcgcgaggccaagcaaatcccttaaaactgttcgtagtccggattggagtctgcaactcgactccatgaagtcggaatcgctagtaatcgcgaatcagaatgtcgcggtgaatacgttcccgggccttgtacacaccgcccgtcacaccatgggagtggattgcaccagaagtagttagtctaaccttcgggaggacgattaccacggtgtggttcatgactggggtg

SEQ ID NO: 561 - DNA, 1463 bp, Alcanivorax nanhaiticus
attgaacgctggcggcaggcctaacacatgcaagtcgagcggaaacgatggtagcttgctaccaggcgtcgagcggcggacgggtgagtaacgcgtgagaatctgcccatttgtgggggataactcggggaaactcgagctaataccgcataatccctacgggggaaagcaggggaccttcgggccttgtgcagatggatgagctcgcgtcggattagctagttggtagggtaaaggcctaccaaggcgacgatccgtagctggtctgagaggatgatcagccacactgggactgagacacggcccagactcctacgggaggcagcagtggggaatcttggacaatgggggcaaccctgatccagccatgccgcgtgtgtgaagaaggccttagggttgtaaagcactttcagtagggaggaaggcttcaagttaataccttggagtacttgacgttacctacagaagaagcaccggctaatttcgtgccagcagccgcggtaatacgaaaggtgcgagcgttaatcggaattactgggcgtaaagcgcgcgtaggcggtttgttaagtcagatgtgaaagccccgggctcaacctgggaattgcatttgaaactggcaagctagagtgcagtagagggaggtggaatttccggtgtagcggtgaaatgcgtagagatcggaaggaacaccagtggcgaaggcggcctcctggactgacactgacgctgaggtgcgaaagcgtggggagcaaacaggattagataccctggtagtccacgccgtaaacgatgtctactagtcgttgggaatcttagtattcttggtgacgaagttaacgcgataagtagaccgcctggggagtacggccgcaaggttaaaactcaaatgaattgacgggggcccgcacaagcggtggagcatgtggtttaattcgatgcaacgcgaagaaccttaccaggccttgacatccttggaactttctagagatagattggtgccttcgggagccaagtgacaggtgctgcatggctgtcgtcagctcgtgtcgtgagatgttgggttaagtcccgtaacgagcgcaacccttgtccctagttgccagcacttcgggtgggaactctagggagactgccggtgacaaaccggaggaaggtggggacgacgtcaagtcatcatggcccttacggcctgggctacacacgtgctacaatgggcggtacagagggcagcgaagtcgcgaggccaagcaaatcccttaaaaccgttcgtagtccggattggagtctgcaactcgactccatgaagtcggaatcgctagtaatcgcagatcagaatgctgcggtgaatacgttcccgggccttgtacacaccgcccgtcacaccatgggagtggattgcaccagaagtagttagtctaaccttcgggaggacgattaccacggtgtggttcatgactggggtg

SEQ ID NO: 562 - DNA, 1465 bp, Alcanivorax pacificus
attgaacgctggcggcaggcctaacacatgcaagtcgagcggcagcgggaagtagcttgctactttgccggcgagcggcggacgggtgagtaacgggtgggaatctacccatttgtgggggataacttggggaaacccaagctaataccgcataatccctacgggggaaagcaggggatcttcggaccttgcgcagatggatgagcccgcgtcggattagctagttggtagggtaaaggcctaccaaggcgacgatccgtaactggtctgagaggatgaccagtcacatcgggactgagacacggcccgaatttctacgggaggcagcagtggggaatcttggacaatgggggcaaccctgatccagccatgccgcgtgtgtgaagaaggccctagggttgtaaagcactttcagtagggaggaaggcttcgggttaataccctggagtacttgacgttacctacagaagaagcaccggctaatttcgtgccagcagccgcggtaatacgaaaggtgcgagcgttaatcggaattactgggcgtaaagcgcgcgtaggcggtttgttaagtcggatgtgaaagcccagggctcatccttggaactgcatccgatactggctagctagagtgcagtagagggaggtggaatttccggtgtagcggtgaaatgcgtagagatcggaaggaacaccagtggcgaaggcggcctcctggactgacactgacgctgaggtgcgaaagcgtggggagcaaacaggattagataccctggtagtccacgccgtaaacgatgtctactagccgtcggcgatcttgtattgttggtggcgcagctaacgcgataagtagaccgcctggggagtacggccgcaaggttaaaactcaaatgaattgacgggggcccgcacaagcggtggagcatgtggtttaattcgatgcaacgcgaagaaccttacctactcttgacatcctcggaacttggcagagatgccttggtgccttcgggagccgagtgacaggtgctgcatggctgtcgtcagctcgtgtcgtgagatgttgggttaagtcgcgtaacgagcgcaacccttgtccctagttgccagcgggttatgccgggaactctagggagactgccggtgacaaaccggaggaaggtggggacgacgtcaagtcatcatggcccttacgagtagggctacacacgtgctacaatggccggtacagagggcagcgaagtcgcgaggcggagcaaatcccttaaaaccggtcgtagtccggattgcagtctgcaactcgactgcatgaagtcggaatcgctagtaatcgcagatcagaatgctgcggtgaatacgttcccgggccttgtacacaccgcccgtcacaccatgggagtggattgcaccagaagtaggtagcctaaccttcgggagggcgcttaccacggtgtggttcatgactggggtg

SEQ ID NO: 563 - DNA, 1460 bp, Alicyclobacillus acidocaldarius
gacgaacgctggcggcgtgcctaatacatgcaagtcgagcggacctcttcggaggtcagcggcggacgggtgaggaacacgtgggtaatctgcctttcagaccggaataacgcccggaaacgggcgctaatgccggatacgcccgcgaggaggcatcttcttgcggggaaaggcccgattgggccgctgagagaggagcccgcggcgcattagctggttggcggggtaacggcccaccaaggcgacgatgcgtagccgacctgagagggtgaccggccacactgggactgagacacggcccagactcctacgggaggcagcagtagggaatcttccgcaatgggcgcaagcctgacggagcaacgccgcgtgagcgaagaaggccttcgggttgtaaagctctgttgctcggggagagcggcatggggagtggaaagccccatgcgagacggtaccgagtgaggaagccccggctaactacgtgccagcagccgcggtaaaacgtagggggcgagcgttgtccggaatcactgggcgtaaagggtgcgtaggcggtcgagcaagtctggagtgaaagtccatggctcaaccatgggatggctctggaaactgcttgacttgagtgctggagaggcaaggggaattccacgtgtagcggtgaaatgcgtagagatgtggaggaatacctgtggcgaaggcgccttgctggacagtgactgacgctgaggcacgaaagcgtggggagcaaacaggattagataccctggtagtccacgccgtaaacgatgagtgctaggtgttggggggacacaccccagtgccgaaggaaacccaataagcactccgcctggggagtacggtcgcaagactgaaactcaaaggaattgacgggggcccgcacaagcagtggagcatgtggtttaattcgaagcaacgcgaagaaccttaccagggcttgacatccctctgaccggtgcagagatgcaccttcccttcggggcagaggagacaggtggtgcatggttgtcgtcagctcgtgtcgtgagatgttgggttcagtcccgcaacgagcgcaacccttgacctgtgttaccagcgcgttgaggcggggactcacaggtgactgccggcgtaagtcggaggaaggcggggatgacgtcaaatcatcatgcccctgatgtcctgggctacacacgtgctacaatgggcggtacaaagggaggcgaagccgcgaggcggagcgaaacccaaaaagccgctcgtagttcggattgcaggctgcaactcgcctgcatgaagccggaattgctagtaatcgcggatcagcatgccgcggtgaatacgttcccgggccttgtacacaccgcccgtcacaccacgagagtcggcaacacccgaagtcggtgaggtaaccccgaaaggggagccagccgccgaaggtggggtcgatgattggggtg

SEQ ID NO: 564 - DNA, 1454 bp, Alicyclobacillus acidoterrestris
gacgaacgctggcggcgtgcctaatacatgcaagtcgagcgagcccttcggggctagcggcggacgggtgagtaacacgtgggcaatctgcctttcagactggaataacactcggaaacgggtgctaatgccggataatacacgggtaggcatctacttgtgttgaaagatgcaactgcatcgctgagagaggagcccgcggcgcattagctagttggtgaggtaacggctcaccaaggcgacgatgcgtagccgacctgagagggtgaccggccacactgggactgagacacggcccagactcctacgggaggcagcagtagggaatcttccgcaatgggcgcaagcctgacggagcaacgccgcgtgagcgaagaaggccttcgggttgtaaagctctgttgctcggggagagcgacaaggagagtggaaagctccttgtgagacggtaccgagtgaggaagccccggctaactacgtgccagcagccgcggtaatacgtagggggcaagcgttgtccggaatcactgggcgtaaagcgtgcgtaggcggttgtgtaagtctgaagtgaaagtccaaggctcaaccttgggattgctttggaaactgcatgacttgagtgctggagaggcaaggggaattccacgtgtagcggtgaaatgcgtagatatgtggaggaataccagtggcgaaggcgccttgctggacagtgactgacgctgaggcacgaaagcgtggggagcaaacaggattagataccctggtagtccacgccgtaaacgatgagtgctaggtgttggggggacacaccccagtgccgaaggaaacccaataagcactccgcctggggagtacggtcgcaagactgaaactcaaaggaattgacgggggcccgcacaagcagtggagcatgtggtttaattcgaagcaacgcgaagaaccttaccagggcttgacatccctctgaccggtgcagagatgtaccttcccttcggggcagaggagacaggtggtgcatggttgtcgtcagctcgtgtcgtgagatgttgggttaagtcccgcaacgagcgcaacccttgatctgtgttaccagcacgtagaggtggggactcacaggtgactgccggcgtaagtcggaggaaggcggggatgacgtcaaatcatcatgccctttatgtcctgggctacacacgtgctacaatgggcggtacaacgggaagcgaagccgcgaggtggagcaaaacctaaaaagccgttcgtagttcggattgcaggctgcaactcgcctgcatgaagccggaattgctagtaatcgcggatcagcatgccgcggtgaatccgttcccgggccttgtacacaccgcccgtcacaccacgagagtcggcaacacccgaagtcggtgaggtaaccgttatggagccagccgccgaaggtggggttgatgattggggtg

SEQ ID NO: 565 - DNA, 1457 bp, Alicyclobacillus ferrooxydans
gacgaacgctggcggcgtgcctaatacatgcaagtcgcgcggacttcttcggaagtcagcggcggacgggtgagtaacacgtgggcaatctgcctcttagactggaataacgcctggaaacgggtgctaatgccagatagagcaacggacaggcatctgtttgttgggaaaggtgctacggcatcgctaagagaggagcccgcggcgcattagctagttggtggggtaacggcctaccaaggcgacgatgcgtagccgacctgagagggtgaccggccacactgggactgagacacggcccagactcctacgggaggcagcagtagggaatcttcggcaatgggcgcaagcctgaccgagcaacgccgcgtgagcgaagaaggccttcgggttgtaaagctcagtcatccgggaagagagaccaggggagggaatgcccctggagagacggtaccgggagaggaagccccggctaactacgtgccagcagccgcggtaatacgtagggggcaagcgttgtccggaatcactgggcgtaaagcgtgcgtaggcggtttgttaagtctgaagtgaaaggccatggctcaaccatgggaatgctttggaaactggcagacttgagtactggagaggcaaggggaattccacgtgtagcggtgaaatgcgtagagatgtggaggaataccagtggcgaaggcgccttgctggacagtgactgacgctgaggcacgaaagcgtggggagcaaacaggattagataccctggtagtccacgccgtaaacgatgagtgctaggtgttggaggttcagaccttcagtgccgaaggaaacccaataagcactccgcctggggagtacggtcgcaagactgaaactcaaaggaattgacgggggcccgcacaagcagtggagcatgtggtttaattcgaagcaacgcgaagaaccttaccagggcttgacatccctctgaccggtgtagagatacaccttcccttcggggcagaggagacaggtggtgcatggttgtcgtcagctcgtgtcgtgagatgttgggttaagtcccgcaacgagcgcaacccttgacctgtgttaccagcacgtaatggtggggactcacaggtgactgccggcgtaagtcggaggaaggtggggatgacgtcaaatcatcatgccccttatgtcctgggcaacacacgtgctacaatgggcggaacaacgggaagcgagaccgcgaggtggagcgaacccctgaaaaccgttcgtagttcggattgcaggctgcaacccgcctgcatgaagccggaattgctagtaatcgcggatcagcatgccgcggtgaatccgttcccgggccttgtacacaccgcccgtcacaccacgagagttggcaacacccgaagtcggtggggtaaccttataggggccagccgccgaaggtggggctgatgattggggtg

SEQ ID NO: 566 - DNA, 1457 bp, Alicyclobacillus hesperidum
  misc_feature (139)..(139): n is a, c, g, or t
  misc_feature (971)..(971): n is a, c, g, or t
gacgaacgctggcggcgtgcctaatacatgcaagtcgtgcggacatcttcggatgtcagcggcggacgggtgagtaacacgtgggcaatctgcctttcagaccggaataacactcggaaacgggtgctaatgccggatnggtcacgaggaggcatcttcttgtgaggaaagttgcaaatgcagcgctgagagaggagcccgcggcgcattagctagttggtgaggtaacggctcaccaaggcgacgatgcgtagccgacctgagagggtgaccggccacactgggactgagacacggcccagactcctacgggaggcagcagtagggaatcttccgcaatgggcgaaagcctgacggagcaacgccgcgtgagcgaagaaggccttcgggttgtaaagctctgttgctcggggagagcgataaggagagtggaaagctccttaggagacggtaccgagtgaggaagccccggcaaactacgtgccagcagccgcggtaatacgtagggggcaagcgttgtccggaatcactgggcgtaaagcgtgcgtaggcggttgtgtaagtctggagtgaaagtccatggctcaaccatgggatggctttggaaactgcatgacttgagtgctggagaggcaaggggaattccacgtgtagcggtgaaatgcgtagatatgtggaggaataccagtggcgaaggcgccttgctggacagtgactgacgctgaggcacgaaagcgtggggagcaaacaggattagataccctggtagtccacgccgtaaacgatgagtgctaggtgttggggggatacacctcagtgccgaaggaaacccaataagcactccgcctggggagtacggtcgcaagactgaaactcaaaggaattgacgggggcccgcacaagcagtggagcatgtggtttaattcgaagcaacgcgaagaaccttaccagggcttgacatccctctgacnggtgcagagatgtaccttcccttcggggcagaggagacaggtggtgcatggttgtcgtcagctcgtgtcgtgagatgttgggttaagtcccgcaacgagcgcaacccttgacctgtgttaccagcacgtagaggtggggactcacaggtgactgccggcgtaagtcggaggaaggcggggatgacgtcaaatcatcatgccctttatgtcctgggctacacacgtgctacaatgggcggtacaacgggaagcgaagccgcgaggtggagccaaacccagaaagccgttcgtagttcggattgcaggctgcaactcgcctgcatgaagccggaattgctagtaatcgcggatcagcatgccgcggtgaatccgttcccgggccttgtacacaccgcccgtcacaccacgagagtcggcaacacccgaagtcggtgaggtaacccttaggggagccagccgccgaaggtggggcggatgattggggtg

SEQ ID NO: 567 - DNA, 1475 bp, Alicyclobacillus macrosporangiidus
  misc_feature (46)..(48): n is a, c, g, or t
gacgaacgctggcggcgtgcctaatacatgcaagtcgagcgggttnnnggaggcttgcctcctggaatcagcggcggacgggtgagtaacacgtgggcaatctgcctgtcagaccggaataacgcctggaaacgggtgctaatgccggatagagcaatgggcaggcatctgcctgttgggaaaggcgcgaatgcgctgctgacagaggagcccgcggcgcattagctagttggcggggtaacggcccaccaaggcgacgatgcgtagccgacctgagagggtgaccggccacactgggactgagacacggcccagactcctacgggaggcagcagtagggaatcttccgcaatgggcgcaagcctgacggagcaacgccgcgtgagcgaagaaggccttcgggttgtaaagctcagtcacccgggaagagcgacctgcggagtggaaagccgcaggggagacggtaccgggagaggaagccccggcaaactacgtgccagcagccgcggtaatacgtagggggcgagcgttgtccggaatcactgggcgtaaagcgtgcgtaggcggtcaagcaagtccgaggtgaaagaccgaggctcaacctcggggtggccttggaaactgtttgacttgagtgctggagaggcaaggggaattccacgtgtagcggtgaaatgcgtagatatgtggaggaataccagtggcgaaggcgccttgctggacagtgactgacgctgaggcacgaaagcgtggggagcaaacaggattagataccctggtagtccacgccgtaaacgatgagtgctaggtgttgggggggttacccttcagtgccgaaggaaacccaataagcactccgcctggggagtacggtcgcaagactgaaactcaaaggaattgacgggggcccgcacaagcagtggagcatgtggtttaattcgaagcaacgcgaagaaccttaccagggcttgacatccctctgacaggtgcagagatgcaccctcccttcggggcagaggagacaggtggtgcatggttgtcgtcagctcgtgtcgtgagatgttgggttaagtcccgcaacgagcgcaacccttgacctgtgttaccagcgcgtaatggcggggactcacaggtgactgccggcgtaagtcggaggaaggtggggatgacgtcaaatcatcatgccctttatgtcctgggctacacacgtgctacaatgggcggtacaacgggaagcgaggccgcgaggcggagcaaacccctgaaagccgcccccagttcggattgcaggctgcaactcgcctgcatgaagccggaattgctagtaatcgcggatcagcatgccgcggtgaatacgttcccgggccttgtacacaccgcccgtcacaccacgagagtcggcaacacccgaagtcggtgaggtaaccctcgcaagagggggccagccgccgaaggtggggctgatgattggggtg

SEQ ID NO: 568 - DNA, 1457 bp, Alicyclobacillus sacchari
  misc_feature (984)..(984): n is a, c, g, or t
gacgaacgctggcggcgtgcctaatacatgcaagtcgagcggacatcttcggatgtcagcggcggacgggtgagtaacacgtgggcaatctgcctttcagaccggaataacactcggaaacgggtgctaatgccggataggtcacgaggaggcatcttcttgtgaggaaagctgcaaatgcagcgctgggagaggagcccgcggcgcattagctagttggtgaggtaacggctcaccaaggcgacgatgcgtagccgacctgagagggtgaccggccacactgggactgagacacggcccagactcctacgggaggcagcagtagggaatcttccgcaatgggcgaaagcctgacggagcaacgccgcgtgagcgaagaaggccttcgggttgtaaagctctgttgctcggggagagcgataaggagagtggaaagctccttaggagacggtaccgagtgaggaagccccggcaaactacgtgccagcagccgcggtaatacgtagggggcaagcgttgtccggaatcactgggcgtaaagcgtgcgtaggcggttgtgtaagtctggagtgaaagtccatggctcaaccatgggatggctttggaaactgcatgacttgagtgctggagaggcaaggggaattccacgtgtagcggtgaaatgcgtagatatgtggaggaataccagtggcgaaggcgccttgctggacagtgactgacgctgaggcacgaaagcgtggggagcaaacaggattagataccctggtagtccacgccgtaaacgatgagtgctaggtgttggggggatacacctcagtgccgaaggaaacccaataagcactccgcctggggagtacggtcgcaagactgaaactcaaaggaattgacgggggcccgcacaagcagtggagcatgtggtttaattcgaagcaacgcgaagaaccttaccagggcttgacatccctctgacaggtgcagagatgnaccttcccttcggggcagaggagacaggtggtgcatggttgtcgtcagctcgtgtcgtgagatgttgggttaagtcccgcaacgagcgcaacccttgacctgtgttaccagcacgtagaggtggggactcacaggtgactgccggcgtaagtcggaggaaggcggggatgacgtcaaatcatcatgccctttatgtcctgggctacacacgtgctacaatgggcggtacaacgggaagcgaagccgcgaggtggagccaaacccagaaagccgttcgtagttcggattgcaggctgcaactcgcctgcatgaagccggaattgctagtaatcgcggatcagcatgccgcggtgaatccgttcccgggccttgtacacaccgcccgtcacaccacgagagtcggcaacacccgaagtcggtgaggtaacccttaggggagccagccgccgaaggtggggcggatgattggggtg

SEQ ID NO: 569 - DNA, 1435 bp, Alicyclobacillus tengchongensis
atcatgcagtcgagcgggttatcgaaagataccagcggcggacgggtgaggaacacgtggtggaatctgcctaacagaccggaataacgcctggaaacgggtgctaaggccggataggcgcatgaggcgcatgcctgatgcgggaaaggatgctacggcatcgctgagagaggaccccgcggcgcattagctagttggtagggtaaaggcctaccaaggcgacgatgcgtagccgacctgagagggtgaccggccacactgggactgagacacggcccagactcctacgggaggcagcagtagggaatcttccgcaatgggcgcaagcctgacggagcaacgccgcgtgagcgaggaaggccttcgggttgtaaagctcagtcaagggggaagagcggcaaggagagggaatgctctttgcgagacggtaccccgagaggaagccccggcaaactacgtgccagcagccgcggtaatacgtagggggcaagcgttgtccggaatcactgggcgtaaagggtgcgtaggcggttctgcaagtctggggtgaaaggccagggctcaaccttgggaatgccttggaaactgtaggacttgagtactggagaggcaaggggaattccacgtgtagcggtgaaatgcgtagagatgtggaggaataccagtggcgaaggcgccttgctggacagtgactgacgctgaggcacgaaagcgtggggagcaaacaggattagataccctggtagtccacgccgtaaacgatgagtgctaggtgttggggggtaccaccctcagtgccgaaggaaacccaataagcactccgcctggggagtacggtcgcaagactgaaactcaaaggaattgacgggggcccgcacaagcagtggagcatgtggtttaattcgaagcaacgcgaagaaccttaccagggcttgacatccctctgacgataccagagatggtaggtcccttcggggcagaggagacaggtggtgcatggttgtcgtcagctcgtgtcgtgagatgttgggttaagtcccgcaacgagcgcaacccttgacctgtgttaccagcacgtagaggtggggactcacaggtgactgccggcgcaagtcggaggaaggcggggatgacgtcaaatcatcatgcccctgatgtcctgggcgacacacgtgctacaatgggcggcacaacgggaagcgagagagcgatctggagcgaacccctgaaaaccgctcgtagttcggattgcaggctgcaactcgcctgcatgaagccggaattgctagtaatcgcggatcagcatgccgcggtgaatccgttcccgggccttgtacacaccgcccgtcacaccacgagagttggcaacacccgaagtcggtggggtaacccgaaagggagccagccgccgaaggtggggtcgatgattggggtg

SEQ ID NO: 570 - DNA, 1458 bp, Alicyclobacillus vulcanalis
gacgaacgctggcggcgtgcctaatacatgcaagtcgagcggacctcttcggaggtcagcggcggacgggtgaggaacacgtgggtaatctgcctttcagaccggaataacgcccggaaacgggcgctaatgccggatacgcccgatgggaggcatctcatgtcggggaaagggccaacgggtccgctgagagaggagcccgcggcgcattagctagttggcggggtaacggcccaccaaggcgacgatgcgtagccggcctgagagggtgaacggccacactgggactgagacacggcccagactcctacgggaggcagcagtagggaatcttccgcaatgggcgcaagcctgacggagcaacgccgcgtgagcgaagaaggccttcgggttgtaaagctctgttgctcggggagagcggcgcagggaggggaaagccctgcgcgagacggtaccgagtgaggaagccccggctaactacgtgccagcagccgcggtaaaacgtagggggcgagcgttgtccggaatcactgggcgtaaagggtgcgtaggcggtcgagcaagtctggagtgaaagtccgtggctcaaccatgggatggctctggaaactgcttgacttgagtgctggagaggcaaggggaattccacgtgtagcggtgaaatgcgtagagatgtggaggaataccagtggcgaaggcgccttgctggacagtgactgacgctgaggcacgaaagcgtggggagcaaacaggattagataccctggtagtccacgccgtaaacgatgagtgctaggtgttggggggacacaccccagtgccgaaggaaacccaataagcactccgcctggggagtacggtcgcaagactgaaactcaaaggaattgacgggggcccgcacaagcagtggagcatgtggtttaattcgaagcaacgcgaagaaccttaccagggcttgacatccctctgacggatgcagagatgcatcttcccttcggggcagaggagacaggtggtgcatggttgtcgtcagctcgtgtcgtgagatgttgggttcagtcccgcaacgagcgcaacccttgacctgtgttaccagcgcgtgagggcggggactcacaggtgactgccggcgtaagtcggaggaaggcggggatgacgtcaaatcatcatgcccctgatgtcctgggcgacacacgtgctacaatgggcggtacaaagggaggcgaagccgcgaggcggagcgaaacccaaaaagccgctcgtagttcggattgcaggctgcaactcgcctgcatgaagccggaattgctagtaatcgcggatcagcatgccgcggtgaatacgttcccgggccttgtacacaccgcccgtcacaccacgagagtcggcaacacccgaagtcggtgaggtaacccgcaagggagccagccgccgaaggtggggtcgatgattggggtg

SEQ ID NO: 571 - DNA, 1423 bp, Aliidiomarina haloalkalitolerans
ctaccatgcagtcgagcggtaacatttctagcttgctagaagatgacgagcggcggacgggtgagtacaacttgggaatctgcctgatggagggggacaaccactggaaacggtggctaataccgcataatttcccttctgtaacaagaggggagcaaagagggggatcttcggacctctcgccatcagatgagcccaagcaagattaggtagttggtggggtaatggcctaccaagccgacgatctttagctggtctgagaggatgatcagccacactgggactgagacacggcccagactcctacgggaggcagcagtggggaatattggacaatgggggcaaccctgatccagccatgccgcgtgtgtgaagaaggccttcgggttgtaaagcactttcagtggtgaggaaggcatgcaaattaatactttgcgtgattgacgttagccacagaagaagcaccggctaactccgtgccagcagccgcggtaatacggagggtgcgagcgttaatcggaattactgggcgtaaagcgcacgtaggcggtttgttaagcaagatgtgaaagccccgggctcaacctgggaattgcattttgaactggcaggctagagttttgaagagggtggtagaatttcctgtgtagcggtgaaatgcgtagatataggaaggaataccagtggcgaaggcggccacctggtcaaaaactgacgctgaggagcgaaagcgtggggagcaaacaggattagataccctggtagtccacgctgtaaacgatgtcaactagttgttcgtttcataaatgaagtgagtaacgcagctaacgcactaagttgaccgcctggggagtacggccgcaaggttaaaactcaaatgaattgacgggggcccgcacaagcggtggagcatgtggtttaattcgatgcaacgcgaagaaccttaccatcccttgacatctacagaagattctagagatagaattgtgccttcgggaactgtaagacaggtgctgcatggctgtcgtcagctcgtgttgtgagatgttgggttaagtcccgcaacgagcgcaacccctatccttagttgccagcacgttatggtgggaactctagggagactgccggtgataaaccggaggaaggtggggacgacgtcaagtcatcatggcccttacgggatgggctacacacgtgctacaatggcgcgtacaaagggcagcaagctagcgatagtgagcgaatcccataaagcgcgtcgtagtccggattggagtctgcaactcgactccatgaagtcggaatcgctagtaatcgtgaatcagaatgtcacggtgaatacgttcccgggccttgtacacaccgcccgtcacaccatgggagtgggctgcaccagaagtagatagcttaaccttcgggaggg

SEQ ID NO: 572 - DNA, 1413 bp, Aliidiomarina iranensis
  misc_feature (1389)..(1389): n is a, c, g, or t
acacatgcaagtcgagcggtaacatatctagcttgctagatgatgacgagcggcggacgggtgagtaatacttgggtatctgcctgatggagggggacaaccactggaaacggtggctaataccgcataatctcttaggagcaaagtgggggaccttcgggcctcacgccatcagatgagcccaagcaagattagctagttggtagggtaaaggcctaccaaggcgacgatctttagctggtctgagaggatgatcagccacactgggactgagacacggcccagactcctacgggaggcagcagtggggaatattggacaatgggcgcaagcctgatccagccatgccgcgtgtgtgaagaaggccttcgggttgtaaagcactttcagtggtgaggaaggggaataagttaatagcttatttcattgacgttagccacagaagaagcaccggctaactccgtgccagcagccgcggtaatacggagggtgcaagcgttaatcggaattactgggcgtaaagcgcacgtaggcggtttgttaagcaagatgtgaaagcccagggctcaaccttggaatagcattttgaactggcagactagagttttgaagagggtggtagaatttccagtgtagcggtgaaatgcgtagatattggaaggaataccagtggcgaaggcggccacctggtcaaaaactgacgctgaggagcgaaagcgtggggagcaaacaggattagataccctggtagtccacgctgtaaacgatgtcaactagttgttcgtttcataaatgaagtgagtaacgcagctaacgcactaagttgaccgcctggggagtacggccgcaaggttaaaactcaaatgaattgacgggggcccgcacaagcggtggagcatgtggtttaattcgatgcaacgcgaagaaccttaccatcccttgacatccagtgaattttccagagatggattagtgccttcgggaacactgagacaggtgctgcatggctgtcgtcagctcgtgttgtgagatgttgggttaagtcccgcaacgagcgcaacccctatccttagttgccagcacgttatggtgggaactctagggagactgccggtgataaaccggaggaaggtggggacgacgtcaagtcatcatggcccttacgggatgggctacacacgtgctacaatggcgcatacaaagggcagcgagctagcgatagtgagcgaatcccataaagtgcgtcgtagtccggattggagtctgcaactcgactccatgaagtcggaatcgctagtaatcgtagatcagaatgctacggtgaatacgttcccgggccttgtacacaccgcccgtcacaccatgggagtgggctgcaccagaagtagntagcttaaccttcgggagggcgtt

SEQ ID NO: 573 - DNA, 1463 bp, Aliidiomarina maris
attgaacgctggcggcaggcctaacacatgcaagtcgagcggtaacatttctagcttgctagaagatgacgagcggcggacgggtgagtaatacttggggatctgcctgatggagggggacaaccactggaaacggtggctaataccgcatgacgcctacgggccaaagtgtgggaccttcgggccacacgccatcagatgaacccaagcgagattagctagttggtgaggtaacggctcaccaaggcgacgatctctagctggtctgagaggatgatcagccacactgggactgagacacggcccagactcctacgggaggcagcagtggggaatattggacaatgggcgcaagcctgatccagccatgccgcgtgtgtgaagaaggccttagggttgtaaagcactttcagtggtgaggaaggcgttgtagttaatagctgcaacgattgacgttagccacagaagaagcaccggctaactccgtgccagcagccgcggtaatacggagggtgcgagcgttaatcggaattactgggcgtaaagcgcacgtaggcggcttgttaagcaagatgtgaaagcccagggctcaaccttggaattgcattttgaactggcaagctagagttttgaagagggtggtagaatttccagtgtagcggtgaaatgcgtagatattggaaggaataccagtggcgaaggcggccacctggtcaaaaactgacgctgaggagcgaaagcgtggggagcaaacaggattagataccctggtagtccacgccgtaaacgatgtcgactagttgttcgtgtctttaagatgtgagtaacgcagctaacgcactaagtcgaccgcctggggagtacggccgcaaggttaaaactcaaatgaattgacgggggcccgcacaagcggtggagcatgtggtttaattcgatgcaacgcgaagaaccttaccatcccttgacatccagagaatcatctagagatagatgagtgccttcgggaactctgagacaggtgctgcatggctgtcgtcagctcgtgttgtgagatgttgggttaagtcccgcaacgagcgcaacccttatccttagttgccagcacataatggtgggaactctagggagactgccggtgataaaccggaggaaggtggggacgacgtcaagtcatcatggcccttacgggatgggctacacacgtgctacaatggcgcacacaaagggcagcaagctagcgatagcaagcgaatctcaaaaagtgcgtcgtagtccggattggagtctgcaactcgactccatgaagtcggaatcgctagtaatcgtggatcagaatgccacggtgaatacgttcccgggccttgtacacaccgcccgtcacaccatgggagtgggctgcaccagaagtagatagcttaaccttcgggagggcgtttaccacggtgtggttcatgactggggtg

SEQ ID NO: 574 - DNA, 1434 bp, Aliidiomarina minuta
tgcaagtcgagcggtaacatatctagcttgctagatgatgacaagcggcggacgggtgagtacaacttggggatctgcctgatggcgggggacaaccactggaaacggtggctaataccgcataatctctacggagcaaagtatgggaccttcgggccatacgccatcagatgaacccaagcgagattagctagttggtgaggtaatggctcaccaaggcgacgatctctagctggtctgagaggatgatcagccacactgggactgagacacggcccagactcctacgggaggcagcagtggggaatattggacaatgggggcaaccctgatccagccatgccgcgtgtgtgaagaaggccttcgggttgtaaagcactttcagtggtgaggaaggcgttgtagttaatagctgcaacgattgacgttagccacagaagaagcaccggctaactccgtgccagcagccgcggtaatacggagggtgcgagcgttaatcggaattactgggcgtaaagcgcacgtaggcggcctgttaagcaagatgtgaaagcccagggctcaaccttggaatagcattttgaactggcaggctagagttttgaagagggtggtagaatttccagtgtagcggtgaaatgcgtagatattggaaggaataccagtggcgaaggcggccacctggtcaaaaactgacgctgaggagcgaaagcgtggggagcaaacaggattagataccctggtagtccacgccgtaaacgatgtcaactagttgttcgtgtcattatgatgtgagtaacgcagctaacgcactaagttgaccgcctggggagtacggccgcaaggttaaaactcaaatgaattgacgggggcccgcacaagcggtggagcatgtggtttaattcgatgcaacgcgaagaaccttaccatcccttgacatccacggaagctttcagagatgagagtgtgccttcgggaaccgtgagacaggtgctgcatggctgtcgtcagctcgtgttgtgagatgttgggttaagtcccgcaacgagcgcaacccttatccttagttgccagcacgtaatggtgggaactctagggagactgccggtgataaaccggaggaaggtggggacgacgtcaagtcatcatggcccttacgggatgggctacacacgtgctacaatggcgcacacaaagggcagcaagtacgcgagtgcaagcgaatctcaaaaagtgcgtcgtagtccggatcggagtctgcaactcgactccgtgaagtcggaatcgctagtaatcgtggatcagaatgccacggtgaatacgttcccgggccttgtacacaccgcccgtcacaccatgggagtgggctgcaccagaagtagatagcttaaccctcgggagagcgtttaccacggtgtggttcatgactggggg

SEQ ID NO: 575 - DNA, 1413 bp, Aliidiomarina sanyensis
catgcaagtcgagcggtaacaggggtagcttgctacccgctgacgagcggcggacgggtgagtacaacttgggaatctgcctaatggagggggacaaccactggaaacggtggctaataccgcataatacctttgggtcaaagagggggatcttcggacctctcgccattagatgagcccaagcaggattaggtagttggtagggtaaaggcctaccaagccgacgatccttagctggtctgagaggatgatcagccacactgggactgagacacggcccagactcctacgggaggcagcagtggggaatattggacaatgggggcaaccctgatccagccatgccgcgtgtgtgaagaaggccttcgggttgtaaagcactttcagtggtgaggaaggcttgcagattaatactctgcgagattgacgttagccacagaagaagcaccggctaactccgtgccagcagccgcggtaatacggagggtgcaagcgttaatcggaattactgggcgtaaagcgcacgtaggcggtttgttaagctagatgtgaaagccccgggcttaacctgggaattgcatttagaactggcaggctagagttttggagagggtggtagaatttccagtgtagcggtgaaatgcgtagatattggaaggaataccagtggcgaaggcggccacctggccaaaaactgacgctgaggagcgaaagcgtggggagcaaacaggattagataccctggtagtccacgctgtaaacgatgtcgactagttgttcgtttcataaaagaagtgagtaacgcagctaacgcactaagtcgaccgcctggggagtacggccgcaaggttaaaactcaaatgaattgacggggcccgcacaagcggtggagcatgtggtttaattcgatgcaacgcgaagaaccttaccatcccttgacatctacagaaggtttagagatagactgtgccttcgggaactgtagacaggtgctgcatggctgtcgtcagctcgtgttgtgagatgttgggttaagtcccgcaacgagcgcaacccttatccttagttgccagcggttcggccgggaactctagggagactgccggtgataaaccggaggaaggtggggacgacgtcaagtcatcatggcccttacgggatgggctacacacgtgctacaatggcgcatacaaagggcggcgagctagcgatagtgagcgaatcccataaagtgcgtcgtagtccggattggagtctgcaactcgactccatgaagtcggaatcgctagtaatcgcggatcagaatgccgcggtgaatacgttcccgggccttgtacacaccgcccgtcacaccatgggagtgggctgcaccagaagtagatagcttaaccttcgggagggcgttaccacggt

SEQ ID NO: 576 - DNA, 1429 bp, Aliidiomarina shirensis
attgaacgctggcggcaggcttaacacatgcaagtcgagcggtaacatatctagcttgctagatgatgacgagcggcggacgggtgagtacaacttgggaatctgcctgatggagggggacaaccactggaaacggtggctaataccgcataatctctttggagcaaagtgggggaccttcgggcctcacgccatcagatgagcccaagcaagattagctagttggtaaggtaatggcttaccaaggcgacgatctttagctggtctgagaggatgatcagccacactgggactgagacacggcccagactcctacgggaggcagcagtggggaatattggacaatgggcgcaagcctgatccagccatgccgcgtgtgtgaagaaggccttcgggttgtaaagcactttcagtggtgaggaaggggagtacgttaatagcgtgcttcattgacgttagccacagaagaagcaccggctaactccgtgccagcagccgcggtaatacggagggtgcaagcgttaatcggaattactgggcgtaaagcgcacgtaggcggtttgttaagcaagatgtgaaagcccagggctcaaccttggaatagcattttgaactggcagactagagttttgaagagggtggtagaatttccagtgtagcggtgaaatgcgtagatattggaaggaataccagtggcgaaggcggccacctggtcaaaaactgacgctgaggagcgaaagcgtggggagcaaacaggattagataccctggtagtccacgctgtaaacgatgtcaactagttgttcgtttcataaatgaagtgagtaacgcagctaacgcactaagttgaccgcctggggagtacggccgcaaggttaaaactcaaatgaattgacgggggcccgcacaagcggtggagcatgtggtttaattcgatgcaacgcgaagaaccttaccatcccttgacatctacagaagattctagagatagaattgtgccttcgggaactgtaagacaggtgctgcatggctgtcgtcagctcgtgttgtgagatgttgggttaagtcccgcaacgagcgcaacccctatccttagttgccagcacgttatggtgggaactctagggagactgccggtgataaaccggaggaaggtggggacgacgtcaagtcatcatggcccttacgggatgggctacacacgtgctacaatggcgcatacaaagggcagcaagctagcgatagtgagcgaatcccataaagtgcgtcgtagtccggatcggagtctgcaactcgactccgtgaagtcggaatcgctagtaatcgtagatcagaatgctacggtgaatacgttcccgggccttgtacacaccgcccgtcacaccatgggagtgggctgcaccagaagtagatagcttaaccttcggga

SEQ ID NO: 577 - DNA, 1351 bp, Aliidiomarina soli
cgagcggcggacgggtgagtaatacttggggatctgcctgatggcgggggacaaccactggaaacggtggctaataccgcataatacctacgggtcaaagtgtgggaccttcgggccacatgccatcagatgaacccaagcgagattagctagttggtgaggtaacggctcaccaaggcgacgatctctagctgttctgagaggatgatcagccacactgggactgagacacggcccagactcctacgggaggcagcagtggggaatattggacaatgggcgcaagcctgatccagccatgccgcgtgtgtgaagaaggccttcgggttgtaaagcactttcagtggtgaggaaggcgtgctagttaatagctgcaacgattgacgttagccacagaagaagcaccggctaactccgtgccagcagccgcggtaatacggagggtgcgagcgttaatcggaattactgggcgtaaagcgcacgtaggcggcttgttaagcaagatgtgaaagcccagggctcaaccttggaattgcattttgaactggcaagctagagttttgaagagggtggtagaatttccagtgtagcggtgaaatgcgtagatattggaaggaataccagtggcgaaggcggccacctggtcaaaaactgacgctgaggagcgaaagcgtggggagcaaacaggattagataccctggtagtccacgccgtaaacgatgtcaactagttgttcgtgtctttgagacgtgagtaacgcagctaacgcactaagttgaccgcctggggagtacggccgcaaggttaaaactcaaatgaattgacgggggcccgcacaagcggtggagcatgtggtttaattcgatgcaacgcgaagaaccttaccatcccttgacatccagagaattttccagagatggattagtgccttcgggaactctgagacaggtgctgcatggctgtcgtcagctcgtgttgtgagatgttgggttaagtcccgcaacgagcgcaacccttatccttagttgccagcacgtaatggtgggaactctagggagactgccggtgataaaccggaggaaggtggggacgacgtcaagtcatcatggcccttacgggatgggctacacacgtgctacaatggcgcgcacaaagggcagcaagctagcgatagcaagcgaatctcaaaaagcgcgtcgtagtccggatcggagtctgcaactcgactccgtgaagtcggaatcgctagtaatcgtggatcagaatgccacggtgaatacattcccgggccttgtacacaccgcccgtcacaccatgggagtgggctgcaccagaagtagatagcttaac

SEQ ID NO: 578 - DNA, 1416 bp, Aliiglaciecola lipolytica
gcctacacatgcaagtcgaacggtagcaggaagtgcttgcactttgctgacgagtggcggacgggtgagtaatacttaggaacatgcctttgtgtgggggataaccattggaaacgatggctaataccgcataatgtctttggaccaaagagggctttcgggctctcgcgcaaagagtggcctaagtgagattagcttgttggtgaggtaaaggctcaccaaggcgacgatctctagctgttctgagaggaagatcagccacactgggactgagacacggcccagactcctacgggaggcagcagtggggaatattgcacaatgggggcaaccctgatgcagccatgccgcgtgtgtgaagaaggccttcgggttgtaaagcactttcagttgtgaggaaaggttgatggttaatacccatcagctgtgacgttagcaacagaagaagcaccggctaactccgtgccagcagccgcggtaatacggagggtgcgagcgttaatcggaattactgggcgtaaagcgcacgcaggcggttatataagctagatgtgaaagccccgggctcaacctgggaatagcatttagaactgtatgactagagtcttggagaggggagtggaattccaggtgtagcggtgaaatgcgtagatatctggaggaacatcagtggcgaaggcgactccctggccaaagactgacgctcatgtgcgaaagtgtgggtagcgaacaggattagataccctggtagtccacaccgtaaacgctgtctactagctgtttgtgtattatatacgtgagtagcgaagctaacgcgctaagtagaccgcctggggagtacggccgcaaggttaaaactcaaatgaattgacgggggcccgcacaagcggtggagcatgtggtttaattcgatgcaacgcgaagaaccttacctactcttgacatccagaaaatttggcagagatgcctcagtgccttcgggaattctgagacaggtgctgcatggctgtcgtcagctcgtgtcgtgagatgttgggttaagtcccgcaacgagcgcaacccttgtccttagttgccagcatttagttgggcactctaaggagactgccggtgacaaaccggaggaaggtggggacgacgtcaagtcatcatggcccttacgagtagggctacacacgtgctacaatggcgagtacagagggaagcgaacttgcgagagtaagcggatcccttaaagctcgtcgtagtccggattggagtctgcaactcgactccatgaagtcggaatcgctagtaatcgcaaatcagaatgttgcggtgaatacgttcccgggccttgtacacaccgcccgtcacaccatgggagtgggatgcaaaagaagtggttagcttaaccttcgggagagcgatcaccac

SEQ ID NO: 579 - DNA, 1392 bp, Aliikangiella marina
tgcagtcgacggcagcatatcctgcttgcaggatgatggcgagtggcggacgggtgagtaacgcgtaggaatctacctattggcgggggatagcccggagaaatccggattaataccgcataagccctacgggggaaagcgggggaccttttggcctcgcaccgatagatgagcctgcgttagattagctagttggtggggtaatggcctaccaaggcgacgatctatagctggtctgagaggatgatcagccacactgggactgagacacggcccagactcctacgggaggcagcagtggggaatattggacaatgggcgcaagcctgatccagcaataccgcgtgtgtgaagaagggtttcggctcgtaaagcactttcagtagggaggaaggccagtaagttaataccttgctggattgacgttacctacagaagaagcaccggctaactccgtgccagcagccgcggtaatacggagggtgcaagcgttaatcggaattactgggcgtaaagcgcgcgtaggcggaatattaagtctcatgtgaaagccctgggctcaacctgggaactgcatgggatactggtattctagaatacagtagagggaggtggaatttcaggtgtagcggtgaaatgcgtagagatctgaaggaacatcagtggcgaaggcgacctcctggactgatattgacgctgaggtgcgaaagcgtggggagcaaacaggattagataccctggtagtccacgccgtaaacgatgtcaactagttgttggtcttataaagaagattagtgacgcagctaacgcgataagttgaccgcctggggagtacggtcgcaagactaaaactcaaatgaattgacgggggcccgcacaagcggtggagcatgtggtttaattcgatgcaacgcgaagaaccttaccaggtcttgacatccagagaatctttcagagatgagagagtgccttcgggaattctgagacaggtgctgcatggctgtcgtcagctcgtgtcgtgagatgttgggttaagtcccgtaacgagcgcaacccttatccttagttgccagcaattcggttggggactctaaggagactgccggtgacaaaccggaggaaggtggggacgacgtcaagtcatcatggcccttacgacctgggctacacacgtgctacaatggcaagtacagagggaaacgataccgcgaggtggagtggaccccagaaagcttgtcgtagtccggattggagtctgcaactcgactccatgaagtcggaatcgctagtaatcgcggatcagaatgccgcggtgaatacgttcccgggccttgtacacaccgcccgtcacaccatgggagtggattgcaccagaagtagctagcttaacat

SEQ ID NO: 580 - DNA, 1465 bp, Aliivibrio finisterrensis
attgaacgctggcggcaggcctaacacatgcaagtcgagcggtaacagaaattagcttgctaatttgctgacgagcggcggacgggtgagtaatgcctgggaatatgccttagtgtgggggataactattggaaacgatagctaataccgcataatgtcttcggaccaaagagggggaccttcgggcctctcgcgctaagattagcccaggtgagattagctagttggtgaggtaagagctcaccaaggcgacgatctctagctggtctgagaggatgatcagccacactggaactgagacacggtccagactcctacgggaggcagcagtggggaatattgcacaatgggcgaaagcctgatgcagccatgccgcgtgtatgaagaaggccttcgggttgtaaagtactttcagtagggaggaaggcgttgtcgttaatagcggcttcgtttgacgttacctacagaagaagcaccggctaactccgtgccagcagccgcggtaatacggagggtgcgagcgttaatcggaattactgggcgtaaagcgcatgcaggtggttcattaagtcagatgtgaaagcccggggctcaacctcggaaccgcatttgaaactggtgaactagagtgctgtagaggggggtagaatttcaggtgtagcggtgaaatgcgtagagatctgaaggaataccagtggcgaaggcggccccctggacagacactgacactcagatgcgaaagcgtggggagcaaacaggattagataccctggtagtccacgccgtaaacgatgtctacttggaggttgtggccttgagccgtggctttcggagctaacgcgttaagtagaccgcctggggagtacggtcgcaagattaaaactcaaatgaattgacgggggcccgcacaagcggtggagcatgtggtttaattcgatgcaacgcgaagaaccttacctactcttgacatccagagaattcgctagagatagcttagtgccttcgggagctctgagacaggtgctgcatggctgtcgtcagctcgtgttgtgaaatgttgggttaagtcccgcaacgagcgcaacccttatccttgtttgccagcacgtaatggtgggaactccagggagactgccggtgataaaccggaggaaggtggggacgacgtcaagtcatcatggcccttacgagtagggctacacacgtgctacaatggcgcatacagagggctgcaaactagcgatagtaagcgaatcccaaaaagtgcgtcgtagtccggatcggagtctgcaactcgactccgtgaagtcggaatcgctagtaatcgtgaatcagaatgtcacggtgaatacgttcccgggccttgtacacaccgcccgtcacaccatgggagtgggctgcaaaagaagtgggtagtttaaccttcgggaggacgctcaccactttgtggttcatgactggggtg

SEQ ID NO: 581 - DNA, 1473 bp, Aliivibrio fischeri
attgaacgctggcggcaggcctaacacatgcaagtcgagcggaaacgacttaactgaaccttcggggaacgttaagggcgtcgagcggcggacgggtgagtaatgcctgggaatatgccttagtgtgggggataactattggaaacgatagctaataccgcataatgtcttcggaccaaagagggggaccttcgggcctctcgcgctaagattagcccaggtgagattagctagttggtgaggtaagagctcaccaaggcgacgatctctagctggtctgagaggatgatcagccacactggaactgagacacggtccagactcctacgggaggcagcagtggggaatattgcacaatgggcgaaagcctgatgcagccatgccgcgtgtatgaagaaggcctcgggttgtaaagtactttcagtagggaggaaggtgttgtagttaatagctgcagcatttgacgttacctacagaagaagcaccggctaactccgtgccagcagccgcggtaatacggagggtgcgagcgttaatcggaattactgggcgtaaagcgcatgcaggtggttcattaagtcagatgtgaaagcccggggctcaacctcggaaccgcatttgaaactggtgaactagagtgctgtagagggggtagaatttcaggtgtagcggtgaaatgcgtagagatctgaaggaataccagtggcgaaggcggccccctggacagacactgacactcagatgcgaaagcgtggggagcaaacaggattagataccctggtagtccacgccgtaaacgatgtctacttggaggttgttcccttgaggagtggctttcggagctaacgcgttaagtagaccgcctggggagtacggtcgcaagattaaaactcaaatgaattgacgggggcccgcacaagcggtggagcatgtggtttaattcgatgcaacgcgaagaaccttacctactcttgacatccagagaattcgctagagatagcttagtgccttcgggaactctgagacaggtgctgcatggctgtcgtcagctcgtgttgtgaaatgttgggttaagtcccgcaacgagcgcaacccttatccttgtttgccagcacgtaatggtgggaactccagggagactgccggtgataaaccggaggaaggtggggacgacgtcaagtcatcatggcccttacgagtagggctacacacgtgctacaatggcgcatacagagggctgcaagctagcgatagtgagcgaatcccaaaaagtgcgtcgtagtccggattggagtctgcaactcgactccatgaagtcggaatcgctagtaatcgtagatcagaatgctacggtgaatacgttcccgggccttgtacacaccgcccgtcacaccatgggagtgggctgcaaaagaagtgggtagtttaaccttcgggaggacgctcaccactttgtggttcatgactggggtg

SEQ ID NO: 582 - DNA, 1377 bp, Aliivibrio logei
aacagaaagtagcttgctactttgctgacgagcggcggacgggtgagtaatgcctgggaatatgccttgatgtgggggataactattggaaacgatagctaataccgcataatgtcttcggaccaaagagggggatcttcggacctctcgcgtcaagattagcccaggtgagattagctagttggtggggtaagagctcaccaaggcgacgatctctagctggtctgagaggatgatcagccacactggaactgagacacggtccagactcctacgggaggcagcagtggggaatattgcacaatgggcgaaagcctgatgcagccatgccgcgtgtatgaagaaggccttcgggttgtaaagtactttcagtcgtgaggaagggtgtgcagttaatagctgtacatcttgacgttagcgacagaagaagcaccggctaactccgtgccagcagccgcggtaatacggagggtgcgagcgttaatcggaattactgggcgtaaagcgcatgcaggtggttcattaagtcagatgtgaaagcccggggctcaacctcggaaccgcatttgaaactggtgaactagagtgctgtagaggggggtagaatttcaggtgtagcggtgaaatgcgtagagatctgaaggaataccagtggcgaaggcggccccctggacagacactgacactcagatgcgaaagcgtggggagcaaacaggattagataccctggtagtccacgccgtaaacgatgtctacttggaggttgtggccttgagccgtggctttcggagctaacgcgttaagtagaccgcctggggagtacggtcgcaagattaaaactcaaatgaattgacgggggcccgcacaagcggtggagcatgtggtttaattcgatgcaacgcgaagaaccttacctactcttgacatctacagaattcgctagagatagcttagtgccttcgggaactgtaagacaggtgctgcatggctgtcgtcagctcgtgttgtgaaatgttgggttaagtcccgcaacgagcgcaacccttatccttgtttgccagcacgtaatggtgggaactccagggagactgccggtgataaaccggaggaaggtggggacgacgtcaagtcatcatggcccttacgagtagggctacacacgtgctacaatggcgcatacagagggctgcaagctagcgatagtgagcgaatcccaaaaagtgcgtcgtagtccggatcggagtctgcaactcgactccgtgaagtcggaatcgctagtaatcgtgaatcagaatgtcacggtgaatacgttcccgggccttgtacacaccgcccgtcacaccatgggagtgggctgcaaaagaagtgggtagttta

SEQ ID NO: 583 - DNA, 1450 bp, Aliivibrio salmonicida
  misc_feature (265)..(265): n is a, c, g, or t
  misc_feature (361)..(361): n is a, c, g, or t
  misc_feature (463)..(463): n is a, c, g, or t
  misc_feature (649)..(652): n is a, c, g, or t
  misc_feature (900)..(900): n is a, c, g, or t
attgaacgctggcggcaggcctaacacatgcaagtcgagcggtaacaggaattagcttgctaattcgctgacgagcggcggacgggtgagtaatgcctgggaatatgccttgatgtgggggataactattggaaacgatagctaataccgcataatgtcttcggaccaaagagggggatcttcggacctctcgcgtcaagattagcccaggtgagattagctagttggtggggtaacagctcaccaaggcgacgatccctagctngtctgagaggatgatcagccacactggaactgagacacggtccagactcctacgggaggcagcagtggggaatattgcacaatgggcgaaagcctnatgcagccatgccgcgtgtatgaagaaggcttcgggttgtaaagtactttcagtcgtgaggaagggtgtgcagttaatagctgtacatcttgacgttagcgncagaagaagcaccggctaactccgtgccagcagccgcggtaatacggagggtgcgagcgttaatcggaattactgggcgtaaagcgcatgcaggtggtggattaagtcagatgtgaaagcccggggctcaacctcggaaccgcatttgaaactggtgaactagagtgctgtagaggggggtagaannnnaggtgtagcggtgaaatgcgtagagatctgaaggaataccagtggcgaaggcggccccctggacagacactgacactcagatgcgaaagcgtggggagcaaacaggattagataccctggtagtccacgccgtaaacgatgtctacttggaggttgtggccttgagccgtggctttcggacgtaacgcgttaagtagaccgcctggggagtacggtcgcaagattaaaactcaaatgaattgacgggnggccgcacaagcggtggagcatgtggtttaattcgatgcaacgcgaagaaccttacctactcttgacatctacagaattcgctagagatagcttagtgcttcgggaactgtaagacaggtgctgcatggctgtcgtcagctcgtgttgtgaaatgttgggttaagtcccgcaacgagcgcaacccttatccttgtttgccagcacgtaatggtgggaactccagggagactgccggtgataaaccggaggaaggtggggacgacgtcaagtcatcatggcccttacgagtagggctacacacgtgctacaatggcgcatacagagggctgcaagctagcgatagtgagcgaatcccaaaaagtgcgtcgtagtccggatcggagtctgcaactcgactccgtgaagtcggaatcgctagtaatcgtgaatcagaatgtcacggtgaatacgttcccgggcgttgtacacaccgcccgtcacaccatgggagtgggctgcaaaagaagtgggtagtttaacctttcggggaggacgctcaccactttgtgg

SEQ ID NO: 584 - DNA, 1401 bp, Aliivibrio sifiae
cgagcggtaacagaaattagcttgctaatttgctgacgagcggcggacgggtgagtaatgcctgggaatatgccttagtgtgggggataactattggaaacgatagctaataccgcataatgtcttcggaccaaagagggggatcttcggacctctcgcgctaagattagcccaggtgagattagcttgttggtgaggtaagagctcaccaaggcgacgatctctagctggtctgagaggatgatcagccacactggaactgagacacggtccagactcctacgggaggcagcagtggggaatattgcacaatgggcgaaagcctgatgcagccatgccgcgtgtatgaagaaggccttcgggttgtaaagtactttcagtcgtgaggaagggtgtgtagttaatagctgcacatcttgacgttagcgacagaagaagcaccggctaactccgtgccagcagccgcggtaatacggagggtgcgagcgttaatcggaattactgggcgtaaagcgcatgcaggtggttcattaagtcagatgtgaaagcccggggctcaacctcggaaccgcatttgaaactggtgaactagagtgctgtagaggggggtagaatttcaggtgtagcggtgaaatgcgtagagatctgaaggaataccagtggcgaaggcggccccctggacagacactgacactcagatgcgaaagcgtggggagcaaacaggattagataccctggtagtccacgccgtaaacgatgtctacttggaggttgtggccttgagccgtggctttcggagctaacgcgttaagtagaccgcctggggagtacggtcgcaagattaaaactcaaatgaattgacgggggcccgcacaagcggtggagcatgtggtttaattcgatgcaacgcgaagaaccttacctactcttgacatccacagaattcgctagagatagcttagtgccttcgggagctgtgagacaggtgctgcatggctgtcgtcagctcgtgttgtgaaatgttgggttaagtcccgcaacgagcgcaacccttatccttgtttgccagcacgtaatggtgggaactccagggagactgccggtgataaaccggaggaaggtggggacgacgtcaagtcatcatggcccttacgagtagggctacacacgtgctacaatggcgcatacagagggctgcaagctagcgatagtgagcgaatcccaaaaagtgcgtcgtagtccggatcggagtctgcaactcgactccgtgaagtcggaatcgctagtaatcgtgaatcagaatgtcacggtgaatacgttcccgggccttgtacacaccgcccgtcacaccatgggagtgggctgcaaaagaagtgggtagtttaaccttcgggaggacgc

SEQ ID NO: 585 - DNA, 1465 bp, Aliivibrio wodanis
attgcacgctggcggcaggcctaacacatgcaagtcgagcggtaacaggaattagcttgctaattcgctgacgagcggcggacgggtgagtaatgcctgggaatatgccttagtgtgggggataactattggaaacgatagctaataccgcataatgtcttcggaccaaagagggggatcttcggacctctcgcgctaagattagcccaggtgagattagcttgttggtgaggtaagagctcaccaaggcgacgatctctagctggtctgagaggatgatcagccacactggaactgagacacggtccagactcctacgggaggcagcagtggggaatattgcacaatgggcgaaagcctgatgcagccatgccgcgtgtatgaagaaggccttcgggttgtaaagtactttcagtcgtgaggaagggtatgtagttaatagctgcacatcttgacgttagcgacagaagaagcaccggctaactccgtgccagcagccgcggtaatacggagggtgcgagcgttaatcggaattactgggcgtaaagcgcatgcaggtggtttgttaagtcagatgtgaaagcccggggctcaacctcggaaccgcatttgaaactggcaaactagagtgctgtagaggggggtagaatttcaggtgtagcggtgaaatgcgtagagatctgaaggaataccagtggcgaaggcggccccctggacagacactgacactcagatgcgaaagcgtggggagcaaacaggattagataccctggtagtccacgccgtaaacgatgtctacttggaggttgtggccttgagccgtggctttcggagctaacgcgttaagtagaccgcctggggagtacggtcgcaagattaaaactcaaatgaattgacgggggcccgcacaagcggtggagcatgtggtttaattcgatgcaacgcgaagaaccttacctactcttgacatccagagaattcgctagagatagcttagtgccttcgggaactctgagacaggtgctgcatggctgtcgtcagctcgtgttgtgaaatgttgggttaagtcccgcaacgagcgcaacccttatccttgtttgccagcacgtaatggtgggaactccagggagactgccggtgataaaccggaggaaggtggggacgacgtcaagtcatcatggcccttacgagtagggctacacacgtgctacaatggcgcatacagagggctgcaagctagcgatagtgagcgaatcccaaaaagtgcgtcgtagtccggatcggagtctgcaactcgactccgtgaagtcggaatcgctagtaatcgtgaatcagaatgtcacggtgaatacgttcccgggccttgtacacaccgcccgtcacaccatgggagtgggctgcaaaagaagtgggtagtttaaccttcgggaggacgctcaccactttgtggttcatgactggggtg

SEQ ID NO: 586 - DNA, 1446 bp, Alishewanella aestuarii
attgaacgctggcggcaggcctaacacatgcaagtcgagcgaggttttcggacctagcggcggacgggtgagtaatgcgtaggaagctgcccgatagagggggataccagttggaaacgactgttaataccgcataatgtctacggaccaaagtgtgggaccttcgggccacatgctatcggatgcgcctacgtgggattagctagttggtggggtaatggctcaccaaggcgacgatccctagctggtttgagaggatgatcagccacactgggactgagacacggcccagactcctacgggaggcagcagtggggaatattggacaatgggcgcaagcctgatccagccatgccgcgtgtgtgaagaaggccttcgggttgtaaagcactttcagtggggaggaagggtgttgtgttaatagcacagcattttgacgttacccacagaagaagcaccggctaactccgtgccagcagccgcggtaatacggagggtgcaagcgttaatcggaattactgggcgtaaagcgcacgcaggcggctttttaagtcggatgtgaaagccccgggctcaacctgggaattgcatctgatactgggaagctagagtatgtgagaggggggtagaattccaagtgtagcggtgaaatgcgtagagatttggaggaataccagtggcgaaggcggccccctggcacaatactgacgctcaggtgcgaaagcgtggggagcaaacaggattagataccctggtagtccacgccgtaaacgatgtctactagctgttcgcggccttgtgttgtgagtagcgcagctaacgcattaagtagaccgcctggggagtacggtcgcaagattaaaactcaaatgaattgacgggggcccgcacaagcggtggagcatgtggtttaattcgacgcaacgcgaagaaccttacctactcttgacatctacagaagaacgcagagatgtgtttgtgccttcgggaactgtaagacaggtgctgcatggctgtcgtcagctcgtgttgtgaaatgttgggttaagtcccgcaacgagcgcaacccttatccttagttgccagcgattcggtcgggaactctagggagactgccggtgataaaccggaggaaggtggggacgacgtcaagtcatcatggcccttacgagtagggctacacacgtgctacaatggtatgtacagagggaggcaagctggcgacagtgagcggatctcttaaagcatatcgtagtccggattggagtctgcaactcgactccatgaagtcggaatcgctagtaatcgcaaatcagaatgttgcggtgaatacgttcccgggccttgtacacaccgcccgtcacaccatgggagtgggttgcaaaagaagtaggtagcttaaccttcgggagggcgcttaccactttgtgattcatgactggggtg

SEQ ID NO: 587 - DNA, 1446 bp, Alishewanella agri
attgaacgctggcggcaggcctaacacatgcaagtcgagcgaggttttcggacctagcggcggacgggtgagtaatgcgtaggaagctgcccgatagagggggataccagttggaaacgactgttaataccgcataatgtctacggaccaaagtgtgggaccttcgggccacatgctatcggatgcgcctacgtgggattagctagttggtggggtaatggctcaccaaggcgacgatccctagctggtttgagaggatgatcagccacactgggactgagacacggcccagactcctacgggaggcagcagtggggaatattggacaatgggcgcaagcctgatccagccatgccgcgtgtgtgaagaaggccttcgggttgtaaagcactttcagtggggaggaagggtgttgtgttaatagcacagcattttgacgttacccacagaagaagcaccggctaactccgtgccagcagccgcggtaatacggagggtgcaagcgttaatcggaattactgggcgtaaagcgcacgcaggcggctttttaagtcggatgtgaaagccccgggctcaacctgggaattgcatctgatactgggaagctagagtatgtgagaggggggtagaattccaagtgtagcggtgaaatgcgtagagatttggaggaataccagtggcgaaggcggccccctggcacaatactgacgctcaggtgcgaaagcgtggggagcaaacaggattagataccctggtagtccacgccgtaaacgatgtctactagatgttcgtggtcttgtaccgtgagtatcgcagctaacgcattaagtagaccgcctggggagtacggtcgcaagattaaaactcaaatgaattgacgggggcccgcacaagcggtggagcatgtggtttaattcgacgcaacgcgaagaaccttacctactcttgacatctacagaacttggtagagataccttggtgccttcgggaactgtaagacaggtgctgcatggctgtcgtcagctcgtgttgtgaaatgttgggttaagtcccgcaacgagcgcaacccttatccttagttgccagcgattcggtcgggaactctagggagactgccggtgataaaccggaggaaggtggggacgacgtcaagtcatcatggcccttacgagtagggctacacacgtgctacaatggtatgtacagagggaggcaagctggcgacagtgagcggatctcttaaagcatatcgtagtccggattggagtctgcaactcgactccatgaagtcggaatcgctagtaatcgcaaatcagaatgttgcggtgaatacgttcccgggccttgtacacaccgcccgtcacaccatgggagtgggttgcaaaagaagtaggtagcttaaccttcgggagggcgcttaccactttgtgattcatgactggggtg

SEQ ID NO: 588 - DNA, 1459 bp, Alishewanella jeotgali
attgaacgctggcggcaggcctaacacatgcaagtcgagcgaatgagggggagcttgctccctgatttagcggcggacgggtgagtaatgcgtaggaagctgcccgatagagggggataccagttggaaacgactgttaataccgcataatgtctacggaccaaagtgtgggaccttcgggccacatgctatcggatgcgcctacgtgggattagctagttggtggggtaatggctcaccaaggcgacgatccctagctggtttgagaggatgatcagccacactgggactgagacacggcccagactcctacgggaggcagcagtggggaatattggacaatgggcgcaagcctgatccagccatgccgcgtgtgtgaagaaggccttcgggttgtaaagcactttcagtggggaggaaggggttgtagttaatagctgcaatttttgacgttacccacagaagaagcaccggctaactccgtgccagcagccgcggtaatacggagggtgcaagcgttaatcggaattactgggcgtaaagcgcacgcaggcggctttttaagtcggatgtgaaagccccgggctcaacctgggaattgcatctgatactgggaagctagagtatgtgagaggggggtagaattccaagtgtagcggtgaaatgcgtagagatttggaggaataccagtggcgaaggcggccccctggcacaatactgacgctcaggtgcgaaagcgtggggagcaaacaggattagataccctggtagtccacgccgtaaacgatgtctactagctgttcgcggccttgtgttgtgagtagcgcagctaacgcattaagtagaccgcctggggagtacggtcgcaagattaaaactcaaatgaattgacgggggcccgcacaagcggtggagcatgtggtttaattcgacgcaacgcgaagaaccttacctactcttgacatctacagaagaacgcagagatgtgtttgtgccttcgggaactgtaagacaggtgctgcatggctgtcgtcagctcgtgttgtgaaatgttgggttaagtcccgcaacgagcgcaacccttatccttagttgccagcgattcggtcgggaactctagggagactgccggtgataaaccggaggaaggtggggacgacgtcaagtcatcatggcccttacgagtagggctacacacgtgctacaatggtatgtacagagggaggcaagctggcgacagtgagcggatctcttaaagcatatcgtagtccggattggagtctgcaactcgactccatgaagtcggaatcgctagtaatcgcaaatcagaatgttgcggtgaatacgttcccgggccttgtacacaccgcccgtcacaccatgggagtgggttgcaaaagaagtaggtagcttaaccttcgggagggcgcttaccactttgtgattcatgactggggtg

SEQ ID NO: 589 - DNA, 1412 bp, Alkalibacillus haloalkaliphilus
tggcggcgtgcctaatacatgcaagtcgagcgcgggaagcagactgaatccttcgggaggatgtctgtggaacgagcggcggacgggtgagtaacacgtgggcaacctgcctgtaagactgggataactccgggaaaccggggctaataccggataactcaacgaaccgcatggttcggtgttaaaagatggcttttgctattacttacagatgggcccgcggcgcattagctagttggtgaggtaacggctcaccaaggccacgatgcgtagccgacctgagagggtgatcggccacactgggactgagacacggcccagactcctacgggaggcagcagtagggaatcatccgcaatggacgaaagtctgacggtgcaacgccgcgtgagtgatgaaggttttcggatcgtaaaactctgttgttagggaagaacacgtgctgttcgaatagggcagtgccttgacggtacctaaccagaaagccacggctaactacgtgccagcagccgcggtaatacgtaggtggcaagcgttgtccggaattattgggcgtaaagcgcgcgcaggcggtttcttaagtctgatgtgaaaggccatagctcaactatggagggccattggaaactggggaacttgagtacagaagaggagagcggaattccacgtgtagcggtgaaatgcgtagatatgtggaggaacaccagtggcgaaggcggctctctggtctgtgactgacgctgaggcgcgaaagcatgggtagcgaacaggattagataccctggtagtccatgccgtaaacgatgagtgctaggtgttagggggtccaacccttagtgctgcagttaacgcaataagcactccgcctggggagtacggccgcaaggctgaaactcaaaggaattgacgggggccgcacaagcggtggagcatgtggtttaattcgacgcaacgcgaagaaccttaccaggtcttgacatcttcggaccaccctagagatagggtcttccttcggggaccgaatgacaggtggtgcatggttgtcgtcagctcgtgtcgtgagatgttgggttaagtcccgcaacgagcgcaacccttaaccttagttgccagcattcagttgggcactctaaggtgactgccggtgacaaaccggaggaaggtggggatgacgtcaaatcatcatgccccttatgacctgggctacacacgtgctacaatggatggtacaaagggaagcgaaaccgcgaggtcaagccaatcccataaagccattctcagttcggattgtaggctgcaactcgcctgcatgaagccggaatcgctagtaatcgcagatcagcatgctgcggtgaatacgttcccgggccttgtacacaccgcccgtcacaccacgagagttggcaacaccc

SEQ ID NO: 590 - DNA, 1499 bp, Alkalicoccus halolimnae
gacgaacgctggcggcgtgcctaatacatgcaagtcgagcgcaggaagcaggcagcgcccttcggggcaaaacctgtggaatgagcggcggacgggtgagtaacacgtgggcaacctgccttccaggccggaataaccccgggaaaccggggctaatgccggatgatcaagcggctcgcatgagcggcttgtcaaaggggcggagacttcggtctcctcccgctggaagatgggcccgcggcgcattagcttgttggtggggtaacgacccaccaaggcgacgatgcgtagccgacctgagagggtgatcggccacactggaactgagacacggtccagactcctacgggaggcagcagtagggaatcatccgcaatgggcgaaagcctgacggtgcaacgccgcgtgaacgatgaaggttttcggatcgtaaagttctgttgtgagggaagaacaagtgccggtcgaacaggccggcaccttgacggtacctcacgagaaagccccggctaactacgtgccagcagccgcggtaatacgtagggggcaagcgttgtccggaattattgggcgtaaagcgcacgcaggcggtctcgtaagtctgatgtgaaagcccacggctcaaccgtggagggtcattggaaactgcaggacttgagtgtaggagaggaaagtggaattccacgtgtagcggtgaaatgcgtagatatgtggaggaacaccagtggcgaaggcgactttctggcctacaactgacgctgaggtgcgaaagcgtggggagcaaacaggattagataccctggtagtccacgccgtaaacgttgagtgctaggtgttaggggtttcgatgcccttagtgccgaagttaacacattaagcactccgcctggggagtacggccgcaaggctgaaactcaaaggaattgacgggggcccgcacaagcagtggagcatgtggtttaattcgacgcaacgcgaagaaccttaccaggtcttgacatcctttgaacactctggagacagagttttccccttcgggggacaaagtgacaggtggtgcatggttgtcgtcagctcgtgtcgtgagatgttgggttaagtcccgcaacgagcgcaacccttgaccttagttgccagcatttggttgggcactctaaggtgactgccggtgataaaccggaggaaggtggggacgacgtcaaatcatcatgccccttatgacctgggctacacacgtgctacaatggatggtacaaagggcagcgaagccgcgaggtggagcgaatcccagaaagccattctcagttcggattgcaggctgcaactcgcctgcatgaagccggaattgctagtaatcgcggatcagcatgccgcggtgaatacgttcccgggccttgtacacaccgcccgtcacaccacgagagtttgtaacacccgaagtcggtgaggcaaccctttttgggacccagccgccgaaggtgggacagatgattggggtg

SEQ ID NO: 591 - DNA, 1485 bp, Alkalicoccus saliphilus
ctggcggcgtgcctaatacatgcaagtcgagcgcaggaaaccggcggaacccttcggggggaagccggtggaatgagcggcggacgggtgagtaacacgtgggcaacctgcctttcagaccggaataaccccgggaaaccggggctaatgccggataatcaagcggttcgcatgaaccgcttgtaaaaggggggagttttctcctcccactggaagatgggcccgcggcgcattagcttgttggtggggtaacggcctaccaaggcgacgatgcgtagccgacctgagagggtgatcggccacactggaactgagacacggtccagactcctacgggaggcagcagtagggaatcatccgcaatgggcgaaagcctgacggtgcaacgccgcgtgaacgaagaaggttttcggatcgtaaagttctgttgtgagggaagaacacgtgccggtcgaacaggccggcaccttgacggtacctcacgagaaagccccggctaactacgtgccagcagccgcggtaatacgtagggggcaagcgttgtccggaattattgggcgtaaagcgcacgcaggcggtctcgtaagtctgatgtgaaagcccacggctcaaccgtggagggtcattggaaactgggagacttgagtgtaggagaggaaagtggaattccacgtgtagcggtgaaatgcgtagatatgtggaggaacaccagtggcgaaggcgactttctggcctacaactgacgctgaggtgcgaaagcgtggggagcaaacaggattagataccctggtagtccacgccgtaaacgttgagtgctaggtgttaggggtttcgatgcccttagtgccgaagttaacacattaagcactccgcctggggagtacggccgcaaggctgaaactcaaaggaattgacgggggcccgcacaagcagtggagcatgtggtttaattcgacgcaacgcgaagaaccttaccaggtcttgacatcctttgcccgctctggagacagagttttccccttcgggggacaaagtgacaggtggtgcatggttgtcgtcagctcgtgtcgtgagatgttgggttaagtcccgcaacgagcgcaacccttgaccttagttgccagcattcagttgggcactctagggtgactgccggtgacaaaccggaggaaggtggggacgacgtcaaatcatcatgccccttatgacctgggctacacacgtgctacaatggatggtacaaagggtggcgaagccgcgaggtggagcgaatcccagaaagccattctcagttcggattgcaggctgcaactcgcctgcatgaagccggaattgctagtaatcgcggatcagcatgccgcggtgaatacgttcccgggccttgtacacaccgcccgtcacaccacgagagtttgtaacacccgaagtcggtgaggtaacccttacgggggccagccgccgaaggtgggacagatgattggggtg

SEQ ID NO: 592 - DNA, 1461 bp, Alkalilimnicola ehrlichii
attgaacgctggcggcatgcctaacacatgcaagtcgagcggtaacaggcccttcggggtgctgacgagcggcggacgggtgagtaacgcgtgggaatctgcccttcggtgggggatagcccggggaaactcggattaataccgcatacgccctacggggcaaagtggccctctgattcaaggtcacgccgagggatgagcccgcgtccgattagctagttggtggggtaaaggcctaccaaggcgacgatcggtagctggtttgagaggatgatcagccacactgggactgagacacggcccagactcctacgggaggcagcagtggggaatattggacaatgggcgaaagcctgatccagcaatgccgcgtgtgtgaagaaggcctgcgggttgtaaagcactttcagcagggaggaaaagcttacggttaatagccgtgggtcttgacgttacctgcagaagaagcaccggctaactccgtgccagcagccgcggtaatacggagggtgcgagcgttaatcggaattactgggcgtaaagcgcgcgtaggcggttcgataagtcgggtgtgaaagccccgggctcaacctgggaattgcatccgatactgtcgggctagagtctggtagagggcagtggaattccgggtgtagcggtgaaatgcgtagatatccggaggaacaccagtggcgaaggcgactgcctggaccaagactgacgctgaggtgcgaaagcgtgggtagcaaacaggattagataccctggtagtccacgccgtaaacgatgagaactagccgttgggttcatttatggacttagtggcgcagctaacgcattaagttctccgcctggggagtacggccgcaaggttaaaactcaaaggaattgacgggggcccgcacaagcggtggagcatgtggtttaattcgatgcaacgcgaagaaccttacctgcccttgacatcctcggaaccagccagagatggctgggtgccttcgggaaccgagtgacaggtgctgcatggctgtcgtcagctcgtgtcgtgagatgttgggttaagtcccgcaacgagcgcaacccttgtccctagttgccagcgattcggtcgggaactctagggagactgccggtgacaaaccggaggaaggtggggatgacgtcaagtcatcatggcccttatgggcagggctacacacgtgctacaatggccggtacagagggttgccaagccgcgaggtggagctaatcccagaaagccggtcgtagtccggatcggagtctgcaactcgactccgtgaagtcggaatcgctagtaatcgcagatcagcaatgctgcggtgaatacgttcccgggccttgtacacaccgcccgtcacaccatgggagttggctgcaccagaagcaggtagtctaaccttcgggagggcgcctgccacggtgtggtcgatgactggggtg

SEQ ID NO: 593 - DNA, 1456 bp, Alkalimonas amylolytica
aacgaacgctggcggcgggcctaacacatgcaagtcgagcggtaacatgccttcgggtgatgacgagcggcggacgggtgagtaatgcttgggtatctgcccgatggagggggacaaccactggaaacggtggctaataccgcataatgtctacggaccaaagcgtgggaccttcgggccacgcaccatcggatgagcccaagtgagattagctagttggtggggtaaaggctcaccaaggcgacgatctctagctggtttgagaggatgatcagccacactggaactgagacacggtccagactcctacgggaggcagcagtggggaatattggacaatgggggcaaccctgatccagccatgccgcgtgtgtgaagaaggccttcgggttgtaaagcactttcagcgaggaggaaggggttgtagttaatagctgcaacctttgacgttactcgcagaagaagcaccggctaactctgtgccagcagccgcggtaatacagagggtgcaagcgttaatcggaattactgggcgtaaagcgcacgcaggcggtttgttaagtcagatgtgaaatccccgggctcaacctgggaattgcatttgaaactggcaagctagagtacgagagaggggggtagaattccacgtgtagcggtgaaatgcgtagagatgtggaggaataccggtggcgaaggcggccccctggctcgatactgacgctcaggtgcgaaagcgtggggagcaaacaggattagataccctggtagtccacgccgtaaacgatgtctactagctgttcgaggtcttgtactttgggtagcgcagctaacgcattaagtagaccgcctggggagtagggtcgcaagattaaaactcaaatgaattgacgggggcccgcacaagcggtggagcatgtggtttaattcgacgcaacgcgaagaaccttacctactcttgacatccagagaacttagcagagatgctttggtgccttcgggaactctgagacaggtgctgcatggctgtcgtcagctcgtgttgtgaaatgttgggttaagtcccgcaacgagcgcaacccttatccttagttgccagcgattcggtcgggaactctagggggactgccggtgataaaccggaggaaggtggggacgacgtcaagtcatcatggcccttacgagtagggctacacacgtgctacaatggtatgtacagagggaggcaagctggcgacagtgagcggatctcataaagcatatcgtagtccggatcgcagtctgcaactcgactgcgtgaagtcggaatcgctagtaatcgcaaatcagaatgttgcggtgaatacgttcccgggccttgtacacaccgcccgtcacaccatgggagtgggttgcaaaagaagtaggtagcttaaccttcgggagggcgcttaccactttgtgattcatgactggggtg

SEQ ID NO: 594 - DNA, 1484 bp, Alkaliphilus peptidifermentans
gatgaacgctggcggcgtgcctaacacatgcaagtcgggggattcaaatcttccaagtcgaataatcgttattaatcattgttttttgagtgattttaatttgattaagatggatctagcggcggacgggtgagtaacgcgtgggcaacctaccctgtacagagggacaacaacgggaaaccgttgctaatacctcataaaaccctaaaggggcatcccttatgggtcaaagaatttcggtacaggatgggcccgcgtctgattagctagttggtggggtaatggcccaccaaggcgacgatcagtagccgacctgagagggtgatcggccacactggaactgagacacggtccagactcctacgggaggcagcagtggggaatattgcacaatgggcgaaagcctgatgcagcaacgccgcgtgagcgatgaaggccttcgggtcgtaaagctctgtcctaagggaagaatattgacggtaccttaggaggaagccccggctaactacgtgccagcagccgcggtaatacgtagggggcaagcgttatccggaatcactgggcgtaaagggtgcgtaggcggctttacaagtcaggggtgaaaggctacggctcaaccgtagtaagcctttgaaactgtagagcttgagtgcaggagaggagagtggaattcctagtgtagcggtgaaatgcgtagatattaggaggaacaccagtggcgaaggcgactctctggactgtaactgacgctgaggcacgaaagcgtggggagcgaacaggattagataccctggtagtccacgccgtaaacgatgagtgctaggtgttgggggtcaaacctcagtgccgcagctaacgcattaagcactccgcctggggagtacgctcgcaagagtgaaactcaaaggaattgacggggacccgcacaagcagcggagcatgtggtttaattcgaagcaacgcgaagaaccttacctggacttgacatccttcagaaatctccttaatcggagccctcccttcggggactgaagagacaggtggtgcatggttgtcgtcagctcgtgtcgtgagatgttgggttaagtcccgcaacgagcgcaacccttgcctttagttgccagcagttcggctgggcactctagagggactgccggggataactcggaggaaggtggggatgacgtcaaatcatcatgccccttatgttcagggctacacacgtgctacaatggccgatacaaagggcagctaaggagtaatctggagccaatcccataaagtcggtcccagttcggattgtgggctgaaactcgcccacatgaagttggagttgctagtaattgcgaatcagaatgtcgcggtgaatgcgttcccgggtcttgtacacaccgcccgtcacaccatgggagtcggaagcacccgaagccagctatctaaccgtaaggaggaagctgtcgaaggtgaagtcgatgactggggtg

SEQ ID NO: 595 - DNA, 1464 bp, Alkalispirillum mobile
attgaacgctggcggcatgcctaacacatgcaagtcgagcggcagcagcaggagcttgctcctggctggcgagcggcggacgggtgagtaacgcgtgggaatctgcccttcggtgggggatagcccggggaaactcggattaataccgcatacgccctacggggcaaagtggccctctgattcaaggtcacgccgaaggatgagcccgcgtccgattagctagttggtggggtaaaggcctaccaaggcgacgatcggtagctggtttgagaggatgatcagccacactgggactgagacacggcccagactcctacgggaggcagcagtggggaatattggacaatgggcgaaagcctgatccagcaatgccgcgtgtgtgaagaaggcctgcgggttgtaaagcactttcagcagggaggaaaagcttacggttaatacccgtgagtcttgacgttacctgcagaagaagcaccggctaactccgtgccagcagccgcggtaatacggagggtgcgagcgttaatcggaattactgggcgtaaagcgcgcgtaggcggttcgataagtcgggtgtgaaagccccgggctcaacctgggaattgcatccgatactgtcgggctagagtctggtagagggaagtggaattccgggtgtagcggtgaaatgcgtagatatccggaggaacaccagtggcgaaggcgacttcctggaccaagactgacgctgaggtgcgaaagcgtgggtagcaaacaggattagataccctggtagtccacgccgtaaacgatgagaactagccgttgggctcatttatgggcttagtggcgcagctaacgcattaagtctccgcctggggagtacggccgcaaggttaaaactcaaaggaattgacgggggcccgcacaagcggtggagcatgtggtttaattcgatgcaacgcgaagaaccttacctgcccttgacatcctcggaaccagccagagatggctgggtgccttcgggaaccgagtgacaggtgctgcatggctgtcgtcagctcgtgtcgtgagatgttgggttgagtcccgcaacgagcgcaacccttgtccctagttgccagcgattcggtcgggaactctagggagactgccggtgacaaaccggaggaaggtggggatgacgtcaagtcatcatggcccatatgggcagggctacacacgtgctacaatggccggtacagagggttgccaagccgcgaggtggagctaatcccagaaagccggtcgtagtccggatcggagtctgcaactcgactccgtgaagtcggaatcgctagtaatcgcagatcagcaatgctgcggtgaatacgttcccgggccttgtacacaccgcccgtcacaccatgggagttggctgcaccagaagcaggtagtctaaccttcgggagggcgcctgccacggtgtggtcgatgactggggtg

SEQ ID NO: 596 - DNA, 1444 bp, Alkalitalea saponilacus
gatgaacgctagcgacaggcctaacacatgcaagtcgaggggtaacaggggagcttgcttccgctgacgaccggcgcacgggtgagtaacgcgtatgcaacctacctgtaacagggggatagctccctgaaaggggaattaacaccgcataagactacggcatcacatggtgcagtggtaaaatatttataggttacagatgggcatgcgtgacattagctagttggcggggtaacggcccaccaaggctacgatgtctaggggttctgagaggaaggtcccccacactggtactgagacacggaccagactcctacgggaggcagcagtgaggaatattggtcaatgggcgcaagcctgaaccagccatgtcgcgtgcaggaagactgccctatgggttgtaaactgcttttttacgggaagaaaaccaactacgtgtagttgtttgccggtaccgtaggaataagcatcggctaactccgtgccagcagccgcggtaatacggaggatgcgagcgttatccggatttattgggtttaaagggtgcgtaggcggaatagtaagtcaggggtgaaatactgcagctcaactgtagaattgcctttgatactgttattcttgagtatagatgaggtaggcggaatgtggtgtgtagcggtgaaatgcatagatataccacagaacaccgattgcgaaggcagcttactaaactataactgacgctgatgcacgaaagcgtgggtatcaaacaggattagataccctggtagtccacgccgtaaacgatgattactggttgtttgcgatacatagcaagtgactgagcgaaagcattaagtaatccacctggggagtacgtcggcaacgatgaaactcaaaggaattgacgggggcccgcacaagcggaggaacatgtggtttaattcgatgatacgcgaggaaccttacctgggtttaaatgggaagtgacagacttggaaacaggtttttcttcggacacttttcaaggtgctgcatggttgtcgtcagctcgtgccgtgaggtgtcgggttaagtcccataacgagcgcaacccctattgtcagttaccagcacgtcatggtggggactctggcaagactgccggtgtaaaccgagaggaaggtggggatgacgtcaaatcagcacggcccttacatccagggctacacacgtgttacaatggccggtacaaagggccgctacctcgcgagaggatgcgaatcttaaaagccggtctcagttcggatcggagtctgcaacccgactccgtgaagctggattcgctagtaatcgcgcatcagccatggcgcggtgaatacgttcccgggccttgtacacaccgcccgtcaagccatggaagccgggggtacctgaagtatgtaaccgcaaggagcgtcctagggtaaaactggtgactggggct

SEQ ID NO: 597 - DNA, 1460 bp, Alkanindiges illinoisensis
  misc_feature (848)..(848): n is a, c, g, or t
  misc_feature (1046)..(1046): n is a, c, g, or t
  misc_feature (1048)..(1048): n is a, c, g, or t
attgaacgctggcggcaggcttaacacatgcaagtcgagcggagatggtgtgcttgcacactattttagcggcgaacgggtgagtaatgcctaggaatctgcccattagcgggggacaacgtgtggaaacgcacgctaataccgcatacgccctacgggggaaagcaggggactctttgagccttgcactaatggatgagcctaggtcagattagctagttggtggggtaaaggcctaccaaggcgacgatctgtagcgggtctgagaggatgatccgccacactggaactgagacacggtccagactcctacgggaggcagcagtggggaatattggacaatgggcgcaagcctgatccagccatgccgcgtgtgtgaagaaggccttttggttgtaaagcactttaagcggggaggaggctactggtactaatattaccagctagtggacgttacccgcagaataagcaccggctaactctgtgccagcagccgcggtaatacagagggtgcgagcgttaatcggaattactgggcgtaaagcgcgcgtaggcggtttgttaagtcggatgtgaaatccccgggctcaacctgggaattgcattcgatactggcaagctagagtatgggagaggaaggtagaattccaggtgtagcggtgaaatgcgtagagatctggaggaataccgatggcgaaggcagccttctggcctaatactgacgctgaggtgcgaaagcatggggagcaaacaggattagataccctggtagtccatgccgtaaacgatgtcaactagccgttgggggatttgatcctttagtggcgcagctaacgcgataagttgancgcctggggagtacggtcgcaagactaaaactcaaatgaattgacgggggcccgcacaagcggtggagcatgtggtttaattcgatgcaacgcgaagaaccttacctggtcttgacatagtgagaattgggcagagatgcccgagtgccttcgggaattcacatacaggtgctgcatggctgtcgtcagctcgtgtcntnagatgttgggttaagtcccgcaacgagcgcaacccttttccttatttgccagcacttcgggtgggaactctaaggatactgccagtgacaaactggaggaaggcggggacgacgtcaagtcatcatggcccttacgaccagggctacacacgtgctacaatggtcggtacaaagggttgctacacagcgatgtgatgctaatctcaaaaagccgatcgtagtccggattggagtctgcaactcgactccatgaagtcggaatcgctagtaatcgcggatcagaatgccgcggtgaatacgttcccgggccttgtacacaccgcccgtcacaccatgggagtttgttgcaccagaagtaggtagtctaaccttaggggggacgcttaccacggtgtggccgatgactggggtg

SEQ ID NO: 598 - DNA, 1450 bp, Allochromatium vinosum
attgaacgctggcggcatgcctaacacatgcaagtcgaacgcgaaagggcttcggcctgagtagagtggcggacgggtgagtaacgcatgggaatctgcctggcagagggggataacccggggaaactcgggctaataccgcatacgccctacgggggaaagggggcttcggctctcgttgccagatgagcccatgtccgattagctagttggcggggtaaaggcccaccaaggcgacgatcggtagctggtctgagaggatgaccagccacactgggactgagacacggcccagactcctacgggaggcagcagtggggaatattggacaatgggggaaaccctgatccagcaatgccgcgtgggtgaagacggcctgcgggttgtaaagccctttcggtgggaaagaaaagcacggggctaatacctccgtgtattgacgttacccacagaagaagcaccggctaactccgtgccagcagccgcggtaatacggagggtgcaagcgttaatcggaatcactgggcgtaaagcgcacgtaggcggcacggtcagtctgctgtgaaagccccgggctcaacctgggaactgcagtggatactgccgcgctagagtgtgaaagaggggggtggaattccaggtgtagcggtgaaatgcgtagagatctggaggaacaccagtggcgaaggcggccccctggttcaacactgacgctgaggtgcgaaagcgtggggagcaaacaggattagataccctggtagtccacgctgtaaacgctgtcgactagccgtttggtccatttaagggctgagtggcgcagctaacgcgctaagtcgaccgcctggggagtacggccgcaaggttaaaactcaaaggaattgacgggggcccgcacaagcggtggagcatgtggtttaattcgatgcaacgcgaagaaccttaccagcccttgacatcctcggaacttggcagagatgccttggtgccttcgggagccgagagacaggtgctgcatggctgtcgtcagctcgtgtcgtgagatgttgggttaagtcccgtaacgagcgcaacccttgtccctagttgccagcacttcgggtgggaactctagggagactgccggtgataaaccggaggaaggtggggatgacgtcaagtcatcatggcccttatgggctgggctacacacgtgctacaatggtcggtacagagcgtcgcgaagccgcgaggtggagccaatcgcacaaaaccgatcgtagtccggatcgcagtctgcaactcgactgcgtgaagtcggaatcgctagtaatcgcggatcagcatgccgcggtgaatacgttcccgggccttgtacacaccgcccgtcacaccatgggagttggttgcaccagaagtagatagcttaaccttcgggagggcgtttaccacggtgtggtcaatgactggggtg

SEQ ID NO: 599 - DNA, 1461 bp, Allochromatium warmingii
  misc_feature (21)..(21): n is a, c, g, or t
attgaacgctggcggcatgcntaacacatgcaagtcgaacggcagcacgggggagcttgctccttgggtggcgagtggcggacgggtgagtaacgcatgagaatctgcctggcagagggggataacccggggaaactcgggctaataccgcatacgccctacgggggaaaggggggtttcggcctctcgttgccagatgagctcatgtccgattagctagttggcggggtaaaagcccaccaaggcgacgatcggtagctggtctgagaggatgaccagccacactgggactgagacacggcccagactcctacgggaggcagcagtggggaatattggacaatgggggcaaccctgatccagcaatgccgcgtgggtgaagacggcctgcgggttgtaaagccctttcgatgggaaagaaaagccagtggctaatacctgctggtattgacgttacccatagaagaagcaccggctaactccgtgccagcagccgcggtaatacggagggtgcaagcgttaatcggaatcactgggcgtaaagcgcacgtaggcggtgcggtcagtctgctgtgaaagccctgggctcaacctgggaactgcagtggatactgccggactagagtgtgaaagaggggggtggaattccaggtgtagcggtgaaatgcgtagagatctggaggaacaccagtggcgaaggcggccccctggttcaacactgacgctgaggtgcgaaagcgtggggagcaaacaggattagataccctggtagtccacgctgtaaacgctgtcgactagccgtttggtccatttaagggctgagtggcgcagctaacgcggtaagtcgaccgcctggggagtacggccgcaaggttaaaactcaaaggaattgacgggggcccgcacaagcggtggagcatgtggtttaattcgatgcaacgcgaagaaccttaccagcccttgacatccgtggaatcctgtagagatacgggagtgccgcaaggagccacgagacaggtgctgcatggctgtcgtcagctcgtgtcgtgagatgttgggttaagtcccgtaacgagcgcaacccttgtccctagttgccagcaccttgggtgggaactctagggagactgccggtgataaaccggaggaaggtggggatgacgtcaagtcatcatggcccttatgggctgggctacacacgtgctacaatggtcggtacagagcgtcgcgaagccgcgaggtggagccaatcgcacaaaaccgatcgtagtccggatcgcagtctgcaactcgactgcgtgaagtcggaatcgctagtaatcgcagatcagcatgctgcggtgaatacgttcccgggccttgtacacaccgcccgtcacaccatgggagttggttgcaccagaagcaggtagcttaaccttcgggagggcgcttgccacggtgtggtcaatgactggggtg

SEQ ID NO: 600 - DNA, 1455 bp, Alloprevotella rava
  misc_feature (159)..(159): n is a, c, g, or t
  misc_feature (166)..(166): n is a, c, g, or t
gatgaacgctagctacaggcttaacacatgcaagtcgaggggaaacgacattgaaagcttgcttttgatgggcgtcgaccggcgcacgggtgcgtaacgcgtatcgaacctgccctttactcagggatagccttgcgaaagtaagattaatacctgatngtgttgngatgaggcatcttgttgcaactaaagatttattggtaaaggatggcgatgcgtctgattaggtagtaggcggggtaatggcccacctagccgacgatcagtaggggttctgagaggaaggtcccccacattggaactgagacacggtccaaactcctacgggaggcagcagtgaggaatattggtcaatggacgagagtctgaaccagccaagtagcgtgcaggatgacggccctctgggttgtaaactgcttttagttgggaacataaaaggcgacgtgtcgcctctggagtgtaccatcagaaaaaggaccggctaattccgtgccagcagccgcggtaatacggaaggtccaggcgttatccggatttattgggtttaaagggagcgtaggcggacgattaagtcagctgtgaaagtttgcggctcaaccgtaaaattgcagttgaaactggttgtcttgagtgcacgcagggatgttggaattcatggtgtagcggtgaaatgcttagatatcatgaagaactccgatcgcgaaggcatatgtccggagtgcaactgacgctgaggctcgaaagtgcgggtatcgaacaggattagataccctggtagtccgcacagtaaacgatgaatactcgcagtatgcgatacagtgtatgctgccaagtgaaaacgttaagtattccacctggggagtacgccggcaacggtgaaactcaaaggaattgacgggggcccgcacaagcggaggaacatgtggtttaattcgatgatacgcgaggaaccttacccgggcttgaactaagcaggaagatgggcagagacgcctgttgtcttcggacctgcttggaggtgctgcatggttgtcgtcagctcgtgccgtgaggtgtcggcttaagtgccataacgagcgcaacccttctccacgtttgccatcaggtagagctgggcactccgtggatactgccatcgtaagatgtgaggaaggtggggatgacgtcaaatcagcacggcccttacgtccggggctacacacgtgttacaatggccggtacagagggaagccaccaggcgactgggcgctgatccattaaaaccggtctcagttcggactggagtctgcaacccgactccacgaagctggattcgctagtaatcgcgcatcagccatggcgcggtgaatacgttcccgggccttgtacacaccgcccgtcaagccatgaaagccgggggtgcctgaaagctgtgaccgtaaggggcggcctagggtaaaaccggtgattggggct

SEQ ID NO: 601 - DNA, 1410 bp, Altererythrobacter atlanticus
aacgaacgctggcggcatgcctaacacatgcaagtcgaacgagctcttcggagctagtggcgcacgggtgcgtaacgcgtgggaacctgcccttaggttcggaataactccccgaaaggggtgctaataccggataatgtcttcggaccaaagatttatcgcctttggatgggcccgcgttggattagctagttggtagggtaaaggcctaccaaggcgacgatccatagctggtcttagaggatgatcagccacactgggactgagacacggcccagactcctacgggaggcagcagtggggaatattggacaatgggcgaaagcctgatccagcaatgccgcgtgagtgatgaaggccttagggttgtaaagctcttttaccagggatgataatgacagtacctggagaataagctccggctaactccgtgccagcagccgcggtaatacggagggagctagcgttgttcggaaatactgggcgtaaagcgcgcgtaggcggctttccaagtcaggggtgaaatcccggggctcaaccccggaactgcccttgaaactggatcgctagaatcctggagaggcgagtggaattccgagtgtagaggtgaaattcgtagatattcggaagaacaccagtggcgaaggcgactcgctggacaggtattgacgctgaggtgcgaaagcgtggggagcaaacaggattagataccctggtagtccacgccgtaaacgatgataactagctgtccgggcacatggtgcttgggtggcgcagctaacgcattaagttatccgcctggggagtacggtcgcaagattaaaactcaaaggaattgacgggggcctgcacaagcggtggagcatgtggtttaattcgaagcaacgcgcagaaccttaccagcttttgacatcccgatcgcgaatagcagagatgcttttcttcagttcggctggatcggtgacaggtgctgcatggctgtcgtcagctcgtgtcgtgagatgttgggttaagtcccgcaacgagcgcaaccctcgtccttagttgccatcatttagttgggaactctaaggaaaccgccggtgataagccggaggaaggtggggatgacgtcaagtcctcatggcccttacaagctgggctacacacgtgctacaatggcgatgacagtgggcagcgagcacgcgagtgtgagctaatctccaaaagtcgtctcagttcggattgttctctgcaactcgagagcatgaaggcggaatcgctagtaatcgcggatcagcatgccgcggtgaatacgttcccaggccttgtacacaccgcccgtcacgccatgggagttggtttcacccgaagatggtgcgctaaccttttaggaggcagccagccacggtgggatcagcgactggggtg

SEQ ID NO: 602 - DNA, 1411 bp, Altererythrobacter dongtanensis
aacgaacgctggcggcatgcctaacacatgcaagtcgaacgagaccttcgggtctagtggcgcacgggtgcgtaacgcgtgggaacctgcctttaggttcggaataactccccgaaaggggtgctaataccggataatgtcttcggaccaaagatttatcgcctttagatgggcccgcgtaggattagctagttggtggggtaaaggcctaccaaggcgacgatccttagctggtctgagaggatgatcagccacactgggactgagacacggcccagactcctacgggaggcagcagtggggaatattggacaatgggcgaaagcctgatccagcaatgccgcgtgagtgatgaaggccttagggttgtaaagctcttttaccagggatgataatgacagtacctggagaataagctccggctaactccgtgccagcagccgcggtaatacggagggagctagcgttgttcggaattactgggcgtaaagcgcacgtaggcggcgattcaagtcagaggtgaaagcccggggctcaaccccggaactgcctttgaaactagattgctagaatcctggagaggcgagtggaattccgagtgtagaggtgaaattcgtagatattcggaagaacaccagtggcgaaggcgactcgctggacaggtattgacgctgaggtgcgaaagcgtggggagcaaacaggattagataccctggtagtccacgccgtaaacgatgataactagctgtccgggttcatggaacttgggtggcgcagctaacgcattaagttatccgcctggggagtacggtcgcaagattaaaactcaaaggaattgacgggggcctgcacaagcggtggagcatgtggtttaattcgaagcaacgcgcagaaccttaccagcctttgacatcccggtcgcggattagagagatcttttccttcagttcggctggaccggtgacaggtgctgcatggctgtcgtcagctcgtgtcgtgagatgttgggttaagtcccgcaacgagcgcaaccctcgtccttagttgccatcattcagttgggcactttaaggaaactgccggtgataagccggaggaaggtggggatgacgtcaagtcctcatggcccttacaggctgggctacacacgtgctacaatggcggtgacagtgggcagcaaactcgcaagggtgagctaatctccaaaagccgtctcagttcggattgtcctctgcaactcgagggcatgaaggcggaatcgctagtaatcgcggatcagcatgccgcggtgaatacgttcccaggccttgtacacaccgcccgtcacaccatgggagttgggttcacccgaaggcgttgcgctaactcgcaagagaggcaggcgaccacggtgggcttagcgactggggtg

SEQ ID NO: 603 - DNA, 1410 bp, Altererythrobacter epoxidivorans
aacgaacgctggcggcatgcctaacacatgcaagtcgaacgagaccttcgggtctagtggcgcacgggtgcgtaacgcgtgggaacctgcccttaggttcggaataacagttagaaatgactgctaataccggataatgtcttcggaccaaagatttatcgcctttggatgggcccgcgttggattagctagttggtggggtaaaggcctaccaaggcgacgatccatagctggtctgagaggatgatcagccacactgggactgagacacggcccagactcctacgggaggcagcagtggggaatattggacaatgggcgaaagcctgatccagcaatgccgcgtgagtgatgaaggccttagggttgtaaagctcttttaccagggatgataatgacagtacctggagaataagctccggctaactccgtgccagcagccgcggtaatacggagggagctagcgttgttcggaattactgggcgtaaagcgcacgtaggcggcgatccaagtcaggggtgaaatcccggggctcaaccccggaactgcccttgaaactaggttgctagaatcctggagaggcgagtggaattccgagtgtagaggtgaaattcgtagatattcggaagaacaccagtggcgaaggcgactcgctggacaggtattgacgctgaggtgcgaaagcgtggggagcaaacaggattagataccctggtagtccacgccgtaaacgatgataactagctgttcgggttcacagaacttgagtggcgcagctaacgcattaagttatccgcctggggagtacggtcgcaagattaaaactcaaaggaattgacgggggcctgcacaagcggtggagcatgtggtttaattcgaagcaacgcgcagaaccttaccagcctttgacatcctggtcgcggttagaggagactctttccttcagttcggctggaccagtgacaggtgctgcatggctgtcgtcagctcgtgtcgtgagatgttgggttaagtcccgcaacgagcgcaaccctcgtccttagttgccatcatttagttgggcactttaaggaaactgccggtgataagccggaggaaggtggggatgacgtcaagtcctcatggcccttacaggctgggctacacacgtgctacaatggcgttgacagtgggcagctagaccgcgaggtcatgctaatctctaaaagacgtctcagttcggattgttctctgcaactcgagagcatgaaggcggaatcgctagtaatcgcggatcagcatgccgcggtgaatacgttcccaggccttgtacacaccgcccgtcacaccatgggagttggtttcacccgaagatcgtgcgctaaccttttaggaggcagcgagccacggtgggatcagcgactggggtg

SEQ ID NO: 604 - DNA, 1410 bp, Altererythrobacter ishigakiensis
aacgaacgctggcggcatgcctaacacatgcaagtcgaacgaacccttcggggttagtggcgcacgggtgcgtaacgcgtgggaacctgcctttaggttcggaataactcagagaaatttgagctaataccggataatgtcttcggaccaaagatttatcgcctttagatgggcccgcgttagattagatagttggtggggtaatggcctaccaagtcgacgatctatagctggtctgagaggatgatcagccacactgggactgagacacggcccagactcctacgggaggcagcagtggggaatattggacaatgggcgaaagcctgatccagcaatgccgcgtgagtgatgaaggccttagggttgtaaagctcttttaccagggatgataatgacagtacctggagaataagctccggctaactccgtgccagcagccgcggtaatacggagggagctagcgttgttcggaattactgggcgtaaagcgcgcgtaggcggtctattaagtcaggggtgaaatcccggagctcaactccggaactgcccttgaaactggcagactagaatcttggagaggcgagtggaattccgagtgtagaggtgaaattcgtagatattcggaagaacaccagtggcgaaggcgactcgctggacaagtattgacgctgaggtgcgaaagcgtggggagcaaacaggattagataccctggtagtccacgccgtaaacgatgataactagctgtccgggttcacagaacttgggtggcgcagctaacgcattaagttatccgcctggggagtacggtcgcaagattaaaactcaaaggaattgacgggggcctgcacaagcggtggagcatgtggtttaattcgaagcaacgcgcagaaccttaccagcctttgacatcctggtcgcggttagaggagactctttccttcagttcggctggaccagtgacaggtgctgcatggctgtcgtcagctcgtgtcgtgagatgttgggttaagtcccgcaacgagcgcaaccctcgtccttagttgctaccatttagttgggcactttaaggaaactgccggtgataagccggaggaaggtggggatgacgtcaagtcctcatggcccttacaggctgggctacacacgtgctacaatggcgatgacagtgggcagcgaccccgcaagggtgagctaatctccaaaagtcgtctcagttcggattgtcctctgcaactcgagggcatgaaggcggaatcgctagtaatcgcggatcagcatgccgcggtgaatacgttcccaggccttgtacacaccgcccgtcacaccatgggagttggtttcacccgaagatcgtgcgctaaccttttaggaggcagcgagccacggtgggatcagcgactggggtg

SEQ ID NO: 605 - DNA, 1413 bp, Altererythrobacter marensis
aacgaacgctggcggcatgcctaacacatgcaagtcgaacgaacccttcggggttagtggcgcacgggtgcgtaacgcgtgggaacctgcctttaggttcggaataacagttagaaatgactgctaataccggataatgtcttcggaccaaagatttatcgcctttagatgggcccgcgttagattaggtagttggtggggtaatggcctaccaagccgacgatctatagctggtctgagaggatgatcagccacactgggactgagacacggcccagactcctacgggaggcagcagtggggaatattggacaatgggcgaaagcctgatccagcaatgccgcgtgagtgatgaaggccttagggttgtaaagctcttttaccagggatgataatgacagtacctggagaataagctccggctaactccgtgccagcagccgcggtaatacggagggagctagcgttgttcggaattactgggcgtaaagcgcgcgtaggcggctattcaagtcaggggtgaaatcccggggctcaaccccggaactgcccttgaaactggatggctagaatcctggagaggcgagtggaattccgagtgtagaggtgaaattcgtagatattcggaagaacaccagtggcgaaggcgactcgctggacaggtattgacgctgaggtgcgaaagcgtggggagcaaacaggattagataccctggtagtccacgccgtaaacgatgataactagctgtccgggcacatggtgcttgggtggcgcagctaacgcattaagttatccgcctggggagtacggtcgcaagattaaaactcaaaggaattgacgggggcctgcacaagcggtggagcatgtggtttaattcgaagcaacgcgcagaaccttaccagcctttgacatcctggtcgcggatagaggagactctttccttcagttcggctggaccagtgacaggtgctgcatggctgtcgtcagctcgtgtcgtgagatgttgggttaagtcccgcaacgagcgcaaccctcatccttagttgccatcatttagttgggcactttaaggaaactgccggtgataagccggaggaaggtggggatgacgtcaagtcctcatggcccttacaggctgggctacacacgtgctacaatggcgttgacagtgggcagctagatcgcaagatcatgctaatctctaaaagacgtctcagttcggattgttctctgcaactcgagagcatgaaggcggaatcgctagtaatcgcggatcagcatgccgcggtgaatacgttcccaggccttgtacacaccgcccgtcacaccatgggagttggattcacccgaaggtggtgcgctaaccagtttactggaggcagccaaccacggtgggttcagcgactggggtg

SEQ ID NO: 606 - DNA, 1413 bp, Altererythrobacter namhicola
aacgaacgctggcggcatgcctaacacatgcaagtcgaacgaacccttcggggtgagtggcgcacgggtgcgtaacgcgtgggaacctgcccttaggttcggaataacagttggaaacgactgctaataccggataatgtcttcggaccaaagatttatcgcctttggatgggcccgcgtaggattaggtagttggtggggtaaaagcctaccaagccgacgatccttagctggtctgagaggatgatcagccacactgggactgagacacggcccagactcctacgggaggcagcagtggggaatattggacaatgggcgaaagcctgatccagcaatgccgcgtgagtgatgaaggccttagggttgtaaagctcttttaccagggatgataatgacagtacctggagaataagctccggctaactccgtgccagcagccgcggtaatacggagggagctagcgttgttcggaattactgggcgtaaagcgcgcgtaggcggcataccaagtcaggggtgaaatcccggggctcaaccccggaactgcccttgaaactggtaagctagaatatcggagaggtaagtggaattccgagtgtagaggtgaaattcgtagatattcggaagaacaccagtggcgaaggcgacttactggacgattattgacgctgaggtgcgaaagcgtggggagcaaacaggattagataccctggtagtccacgccgtaaacgatgataactagctgctcgggctcttagagcttgggtggcgcagctaacgcattaagttatccgcctggggagtacggtcgcaagattaaaactcaaaggaattgacgggggcctgcacaagcggtggagcatgtggtttaattcgaagcaacgcgcagaaccttaccagcctttgacatcctggtcgcggattagagagatcttttccttcagttcggctggaccagtgacaggtgctgcatggctgtcgtcagctcgtgtcgtgagatgttgggttaagtcccgcaacgagcgcaaccctcgtccttagttgccatcatttagttgggaactctaaggaaaccgccggtgataagccggaggaaggtggggatgacgtcaagtcctcatggcccttacaggctgggctacacacgtgctacaatggcgatgacagtgagcagcgatcccgcgagggttagctaatctccaaaagtcgtctcagttcggattgttctctgcaactcgagagcatgaaggcggaatcgctagtaatcgcggatcagcatgccgcggtgaatacgttcccaggccttgtacacaccgcccgtcacaccatgggagttggattcacccgaaggtggtgcgctaaccagtttactggaggcagccaaccacggtgggttcagcgactggggtg

SEQ ID NO: 607 - DNA, 1410 bp, Altererythrobacter xiamenensis
aacgaacgctggcggcatgcctaacacatgcaagtcgaacgaacccttcggggttagtggcgcacgggtgcgtaacgcgtgggaacctgcctttaggttcggaataacagtgagaaatcgctgctaataccggataatgtcttcggaccaaagatttatcgcctttagatgggcccgcgttagattagatagttggtggggtaatggcctaccaagtcgacgatctatagctggtctgagaggatgatcagccacactgggactgagacacggcccagactcctacgggaggcagcagtggggaatattggacaatgggcggaagcctgatccagcaatgccgcgtgagtgatgaaggccttagggttgtaaagctcttttaccagggatgataatgacagtacctggagaataagctccggctaactccgtgccagcagccgcggtaatacggagggagctagcgttgttcggaattactgggcgtaaagcgcgcgtaggcggctatttaagtcaggggtgaaatcccggggctcaaccccggaactgcctttgaaactggatggctagaatcctggagaggcgagtggaattccgagtgtagaggtgaaattcgtagatattcggaagaacaccagtggcgaaggcgactcgctggacaggtattgacgctgaggtgcgaaagcgtggggagcaaacaggattagataccctggtagtccacgccgtaaacgatgataactagctgtccgggttcacagaacttgggtggcgcagctaacgcattaagttatccgcctggggagtacggtcgcaagattaaaactcaaaggaattgacgggggcctgcacaagcggtggagcatgtggtttaattcgaagcaacgcgcagaaccttaccagcctttgacatcctggtcgcggttagaggagactctttccttcagttcggctggaccagtgacaggtgctgcatggctgtcgtcagctcgtgtcgtgagatgttgggttaagtcccgcaacgagcgcaaccctcgtccttagttgccatcatttagttgggcactttaaggaaactgccggtgataagccggaggaaggtggggatgacgtcaagtcctcatggcccttacaggctgggctacacacgtgctacaatggcggtgacagtgagcagctaactcgcgagagtacgctaatctctaaaaaccgtctcagttcggattgttctctgcaactcgagagcatgaaggcggaatcgctagtaatcgcggatcagcatgccgcggtgaatacgttcccaggccttgtacacaccgcccgtcacaccatgggagttggtttcacccgaagatcgtgcgctaaccttttaggaggcagcgagccacggtgggatcagcgactggggtg

SEQ ID NO: 608 - DNA, 1491 bp, Alteribacillus bidgolensis
gacgaacgctggcggcgtgcctaatacatgcaagtcgagcgcgggaagcaggcagatcccttcggggtgacgcatgtggaacgagcggcggacgggtgagtaacacgtgggcaacctgccttgcagactgggataaccccgggaaaccggggctaataccggatgatcagccaaatcgcatgatttgattgtaaaagtagggacttgttccttacactgcaagatgggcccgcggcgcattagctagttggtgaggtaagagcttaccaaggcaacgatgcgtagccgacctgagagggtgatcggccacactgggactgagacacggcccagactcctacgggaggcagcagtagggaatcatccgcaatgggcgaaagcctgacggtgcaacgccgcgtgagtgaagaaggttttcggatcgtaaagctctgttatctgggaagaacaagtaccggtcgaataggccggtaccttgacggtacccgatcagaaagccccggctaactacgtgccagcagccgcggtaatacgtagggggcaagcgttgtccggaattattgggcgtaaagggcgcgcaggcggtttcctaagtctgatgtgaaagcccacggctcaaccgtggagggtcattggaaactggggaacttgagtacaggagaggagagcggaattccacgtgtagcggtgaaatgcgtagagatgtggaggaacaccagtggcgaaggcggctctctggcctgtaactgacgctgaggcgcgaaagcgtggggagcgaacaggattagataccctggtagtccacgccgtaaacgttgagtgctaggtgttaggggtttcgacgcccttagtgccgcagcaaacgcattaagcactccgcctggggagtacgaccgcaaggttgaaactcaaaggaattgacgggggcccgcacaagcggtggagcatgtggtttaattcgacgcaacgcgaagaaccttaccaggtcttgacatcttctgccacttccagagatggaaggttccccttcgggggacagaatgacaggtggtgcatggttgtcgtcagctcgtgtcgtgagatgttgggttaagtcccgcaacgagcgcaacccttaaccttagttgccagcattcagttgggcactctagggtgactgccggtgacaaaccggaggaaggtggggatgacgtcaaatcatcatgccccttatgacctgggctacacacgtgctacaatggatggtacagagggacgcgaagccgcgaggtgaagcgaatctcaaaaagccattctcagttcggattgcaggctgcaactcgcctgcatgaagccggaatcgctagtaatcgcggatcagcatgccgcggtgaatacgttcccgggccttgtacacaccgcccgtcacaccacgagagcttgcaacacccgaagtcggtgaggtaaccctatgggagccagccgccgaaggtggggcaggtgattggggtg

SEQ ID NO: 609 - DNA, 1490 bp, Alteribacillus iranensis
gacgaacgctggcggcgtgcctaatacatgcaagtcgagcgcgggaagcaggcagatcccttcggggtgacgcctgtggaacgagcggcggacgggtgagtaacacgtgggcaacctgccttagagactgggataaccccgggaaaccggggctaataccggataatcaaaagaatcgcatgattcttttgtaaaagtggggacttgttcctcacactctaagatgggcccgcggcgcattagctagttggggaggtaatggctccccaaggcgacgatgcgtagccgacctgagagggtgaccggccacactgggactgagacacggcccagactcctacgggaggcagcagtagggaatcatccgcaatgggcgaaagcctgacggtgcaacgccgcgtgagtgaagaaggttttcggatcgtaaagctctgttatccgggaagaacaagtgccggtcgaataggccggtgccgtgacggtaccggatcagaaagccccggctaactacgtgccagcagccgcggtaatacgtagggggcaagcgttgtccggaattattgggcgtaaagggcgcgcaggcggtttcctaagtctgatgtgaaagcccacggctcaaccgtggagggtcattggaaactggggaacttgagtacaggagaggagagtggaattccacgtgtagcggtgaaatgcgtagatatgtggaggaacaccagtggcgaaggcggctctctggcctgttactgacgctgaggcgcgaaagcgtgggtagcgaacaggattagataccctggtagtccacgccgtaaacgttgagtgctaggtgttaggggtttcgacgcccttagtgccgaagcaaacgcattaagcactccgcctggggactacgaccgcaaggttgaaactcaaaggaattgacgggggcccgcacaagcggtggagcatgtggtttaattcgacgcaacgcgaagaaccttaccaggtcttgacatcttctgctacttctagagatagaaggttccccttcgggggacagaatgacaggtggtgcatggttgtcgtcagctcgtgtcgtgagatgttgggttaagtcccgcaacgagcgcaacccttgaccttagttgccagcattcagttgggcactctaaggtgactgccggtgacaaaccggaggaaggtggggatgacgtcaaatcatcatgccccttatgacctgggctacacacgtgctacaatggatggtacagagggaagcgaagccgcgaggtgaagcgaatctcaaaaagccgttctcagttcggattgcaggctgcaactcgcctgcatgaagccggaatcgctagtaatcgtggatcagcatgccacggtgaatacgttcccgggccttgtacacaccgcccgtcacaccacgagagcttgcaacacccgaagtcggtgaggtaacctttgggagccagccgccgaaggtggggcaggtgattggggtg

SEQ ID NO: 610 - DNA, 1457 bp, Alteribacillus persepolensis
  misc_feature (1263)..(1263): n is a, c, g, or t
  misc_feature (1448)..(1448): n is a, c, g, or t
gacgaacgctggcggcgtgcctaatacatgcaagtcgagcgcgggaagcagtctgatcccttcggggtgacgattgtggaacgagcggcggacgggtgagtaacacgtgggcaacctgccttgcagactgggataacctcgggaaaccggggctaataccggataaccaatctcatcgcatggagagattgtaaaagtagggattatccttacactgcaagatgggcccgcggcgcattagctagttggtggggtaagagctcaccaaggcgacgatgcgtagccgacctgagagggtgatcggccacactgggactgagacacggcccagactcctacgggaggcagcagtagggaatcatccgcaatgggcgaaagcctgacggtgcaacgccgcgtgagtgaagaaggttttcggatcgtaaagctctgttattagggaagaacaagtacagctcgaagagggctgtaccttgacggtacctaatcagaaagccccggctaactacgtgccagcagccgcggtaatacgtagggggcaagcgttgtccggaattattgggcgtaaagggcgcgcaggcggtttcctaagtctgatgtgaaagcccacggctcaaccgtggagggtcattggaaactggggaacttgagtgcaagagaggagagcggaattccacgtgtagcggtgaaatgcgtagagatgtggaggaacaccagtggcgaaggcggctctctggcttgcaactgacgctgaggcgcgaaagcgtggggagcgaacaggattagataccctggtagtccacgccgtaaacgttgagtgctaggtgttaggggtttcgatgcccttagtgccgcagcaaacgcattaagcactccgcctggggagtacgaccgcaaggttgaaactcaaaggaattgacgggggcccgcacaagcggtggagcatgtggtttaattcgacgcaacgcgaagaaccttaccaggtcttgacatcttctgctacttccagagatggaaggttccccttcgggggacagaatgacaggtggtgcatggttgtcgtcagctcgtgtcgtgagatgttgggttaagtcccgcaacgagcgcaacccttgaccttagttgccagcattcagttgggcactctaggtgactgccggtgacaaaccggaggaaggtggggatgacgtcaaatcatcatgccccttatgacctgggctacacacgtgctacaatggatggtacagagggaagcaaaaccgngaggtcaagcgaatcccaaaaagccattctcagttcggattgcaggctgcaactcgcctgcatgaagccggaatcgctagtaatcgcggatcagcatgccgcggtgaatacgttcccgggccttgtacacaccgcccgtcacaccacgagagcttgcaacacccgaagtcggtgaggtaaccttngagccagcc

SEQ ID NO: 611 - DNA, 1457 bp, Alteromonas aestuariivivens
attgaacgctggcggcaggcctaacacatgcaagtcgaacggtaacaggaattagcttgctaatttgctgacgagtggcggacgggtgagtaatgcttgggaacttgcctttgcgagggggataacagttggaaacgactgctaataccgcatgatgtctacggaccaaagggggcttttgctctcgcgcaaagagaggcccaagtgagattagctagttggtggggtaaaggctcaccaaggcgacgatctctagctgttctgagaggaagatcagccacactgggactgagacacggcccagactcctacgggaggcagcagtggggaatattgcacaatgggggaaaccctgatgcagccatgccgcgtgtgtgaagaaggccttcgggttgtaaagcactttcagttgtgaggaagggttggtagttaatacctgccaacattgacgttagcaacagaagaagcaccggctaactccgtgccagcagccgcggtaatacggagggtgcgagcgttaatcggaattactgggcgtaaagcgcacgcaggcggtttgttaagctagatgtgaaagccccgggctcaacctgggatggtcatttagaactggcagactagagtcttggagaggggagtggaattccaggtgtagcggtgaaatgcgtagatatctggaggaacatcagtggcgaaggcgactccctggccaaagactgacgctcatgtgcgaaagtgtgggtagcgaacaggattagataccctggtagtccacaccgtaaacgctgtctactagctgtgtgtgaatttaattcgtgcgtagcgaagctaacgcgctaagtagaccgcctggggagtacggccgcaaggttaaaactcaaatgaattgacgggggcccgcacaagcggtggagcatgtggtttaattcgatgcaacgcgaagaaccttacctacacttgacatgcagagaactttccagagatggataggtgccttcgggaactctgacacaggtgctgcatggctgtcgtcagctcgtgtcgtgagatgttgggttaagtcccgcaacgagcgcaacccttgtccttagttgccagcattaagttgggcactctaaggagactgccggtgacaaaccggaggaaggtggggacgacgtcaagtcatcatggcccttacgtgtagggctacacacgtgctacaatggcaagtacagagggaagcgagacagtgatgtggagcggaccccttaaagcttgtcgtagtccggattggagtctgcaactcgactccatgaagtcggaatcgctagtaatcgcaggtcagcatactgcggtgaatacgttcccgggccttgtacacaccgcccgtcacaccatgggagtgggatgcaaaagaagtagttagtctaaccttcgggaggacgattaccactttgtgtttcatgactggggtg

SEQ ID NO: 612 - DNA, 1455 bp, Alteromonas australica
attgaacgctggcggcaggcctaacacatgcaagtcgaacggtaacatttctagcttgctagaagatgacgagtggcggacgggtgagtaatgcttgggaacttgcctttgcgagggggataacagttggaaacgactgctaataccgcataatgtctacggaccaaacggggcttaggctccggcgcaaagagaggcccaagtgagattagctagttggtaaggtaatggcttaccaaggcaacgatctctagctgttctgagaggaagatcagccacactggaactgagacacggtccagactcctacgggaggcagcagtggggaatattgcacaatgggggaaaccctgatgcagccatgccgcgtgtgtgaagaaggccttcgggttgtaaagcactttcagttgtgaggaaaagttagtagttaatacctgctagccgtgacgttaacaacagaagaagcaccggctaactccgtgccagcagccgcggtaatacggagggtgcgagcgttaatcggaattactgggcgtaaagcgcacgcaggcggtttgttaagctagatgtgaaagccccgggctcaacctgggatagtcatttagaactggcagactagagtcttggagaggggagtggaattccaggtgtagcggtgaaatgcgtagatatctggaggaacatcagtggcgaaggcgactccctggccaaagactgacgctcatgtgcgaaagtgtgggtagcgaacaggattagataccctggtagtccacaccgtaaacgctgtctactagctgtttgtgactttaagtcgtgagtagcgaagctaacgcgctaagtagaccgcctggggagtacggccgcaaggttaaaactcaaatgaattgacgggggcccgcacaagcggtggagcatgtggtttaattcgatgcaacgcgaagaaccttacctacacttgacatgctgagaactttctagagatagattggtgccttcgggaactcagacacaggtgctgcatggctgtcgtcagctcgtgtcgtgagatgttgggttaagtcccgcaacgagcgcaacccttgtccttagttgccagccttaagttgggcactctaaggagactgccggtgacaaaccggaggaaggtggggacgacgtcaagtcatcatggcccttacgtgtagggctacacacgtgctacaatggcatttacagagggaagcgagacagtgatgtggagcggaccccttaaagaatgtcgtagtccggattggagtctgcaactcgactccatgaagtcggaatcgctagtaatcgcaggtcagaatactgcggtgaatacgttcccgggccttgtacacaccgcccgtcacaccatgggagtgggatgcaaaagaagtagttagtctaaccttcgggaggacgattaccactttgtgtttcatgactggggtg

SEQ ID NO: 613 - DNA, 1455 bp, Alteromonas confluentis
attgaacgctggcggcaggcctaacacatgcaagtcgaacggtagcaggatgtgcttgcacatcgctgacgagtggcggacgggtgagtaatgcttgggaacttgcctttgcgagggggataacagttggaaacgactgctaataccgcataatgtcttcggaccaaacggggcttcggctccggcgcaaagagaggcccaagtgagattagctagttggtgaggtaaaggctcaccaaggcgacgatctctagctgttctgagaggaagatcagccacactgggactgagacacggcccagactcctacgggaggcagcagtggggaatattgcacaatgggggaaaccctgatgcagccatgccgcgtgtgtgaagaaggccttcgggttgtaaagcactttcagttgtgaggaaaggttggtagttaatacctgccagctgtgacgttaacaacagaagaagcaccggctaactccgtgccagcagccgcggtaatacggagggtgcgagcgttaatcggaattactgggcgtaaagcgcacgcaggcggtttgttaagctagatgtgaaagccccgggctcaacctgggatggtcatttagaactggcagactagagtcttggagaggggagtggaattccaggtgtagcggtgaaatgcgtagatatctggaggaacatcagtggcgaaggcgactccctggccaaagactgacgctcatgtgcgaaagtgtgggtagcgaacaggattagataccctggtagtccacaccgtaaacgctgtctactagctgtgcgtgaatttaatttgtgcgtagcgaagctaacgcgataagtagaccgcctggggagtacggccgcaaggttaaaactcaaatgaattgacgggggcccgcacaagcggtggagcatgtggtttaattcgaagcaacgcgaagaaccttacctacacttgacatgcagagaattttccagagatggattagtgccttcgggaactctgacacaggtgctgcatggctgtcgtcagctcgtgtcgtgagatgttgggttaagtcccgcaacgagcgcaacccttgtccttagttgccagcattcggttgggcactttaaggagactgccggtgacaaaccggaggaaggtggggacgacgtcaagtcatcatggcccttacgtgtagggctacacacgtgctacaatggtatttacagagggaagcaagacagcgatgtggagcggaccccttaaagaatatcgtagtccggattggagtctgcaactcgactccatgaagtcggaatcgctagtaatcgcaggtcagcatactgcggtgaatacgttcccgggccttgtacacaccgcccgtcacaccatgggagtgggatgcaaaagaagtagttagtctaaccttcgggaggacgattaccactttgtgtttcatgactggggtg

SEQ ID NO: 614 - DNA, 1455 bp, Alteromonas lipolytica
attgaacgctggcggcaggcctaacacatgcaagtcgaacggtagcaggatgtgcttgcacatcgctgacgagtggcggacgggtgagtaatgcttgggaacttgcctttgcgagggggataacagttggaaacgactgctaataccgcatgatgtcttcggaccaaagggggcttcggctcccgcgcaaagagaggcccaagtgagattagctagttggtaaggtaaaggcttaccaaggcgacgatctctagctgttctgagaggaagatcagccacactgggactgagacacggcccagactcctacgggaggcagcagtggggaatattgcacaatgggggaaaccctgatgcagccatgccgcgtgtgtgaagaaggccttcgggttgtaaagcactttcagttgtgaggaaaggttggtagttaatacctgccagctgtgacgttaacaacagaagaagcaccggctaactccgtgccagcagccgcggtaatacggagggtgcgagcgttaatcggaattactgggcgtaaagcgcacgcaggcggtttgttaagctagatgtgaaagccccgggctcaacctgggatggtcatttagaactggcagactagagtcttggagaggggagtggaattccaggtgtagcggtgaaatgcgtagatatctggaggaacatcagtggcgaaggcggctccctggccaaagactgacgctcatgtgcgaaagtgtgggtagcgaacaggattagataccctggtagtccacaccgtaaacgctgtctactagctgtgtgtgaatttaattcgtgcgtagcgaagctaacgcgctaagtagaccgcctggggagtacggccgcaaggttaaaactcaaatgaattgacgggggcccgcacaagcggtggagcatgtggtttaattcgatgcaacgcgaagaaccttacctacacttgacatgcagagaactttccagagatggattggtgccttcgggaactctgacacaggtgctgcatggctgtcgtcagctcgtgtcgtgagatgttgggttaagtcccgcaacgagcgcaacccttgtccttagttgccatcatttagttgggcactctaaggagactgccggtgacaaaccggaggaaggtggggacgacgtcaagtcatcatggcccttacgtgtagggctacacacgtgctacaatggcaagtacagagggaagcgagacagtgatgtggagcggaccccttaaagcttgtcgtagtccggattggagtctgcaactcgactccatgaagtcggaatcgctagtaatcgcaggtcagcatactgcggtgaatacgttcccgggccttgtacacaccgcccgtcacaccatgggagtgggatgcaaaagaagtagttagtctaaccttcgggaggacgattaccactttgtgtttcatgactggggtg

SEQ ID NO: 615 - DNA, 1455 bp, Alteromonas macleodii
attgaacgctggcggcaggcctaacacatgcaagtcgaacggtaacatttctagcttgctagaagatgacgagtggcggacgggtgagtaatgcttgggaacttgcctttgcgagggggataacagttggaaacgactgctaataccgcataatgtcttcggaccaaacggggcttcggctccggcgcaaagagaggcccaagtgagattagctagttggtaaggtaacggcttaccaaggcgacgatctctagctgttctgagaggaagatcagccacactgggactgagacacggcccagactcctacgggaggcagcagtggggaatattgcacaatgggggaaaccctgatgcagccatgccgcgtgtgtgaagaaggccttcgggttgtaaagcactttcagttgtgaggaaaagttagtagttaatacctgctagccgtgacgttaacaacagaagaagcaccggctaactccgtgccagcagccgcggtaatacggagggtgcgagcgttaatcggaattactgggcgtaaagcgcacgcaggcggtttgttaagctagatgtgaaagccccgggctcaacctgggatggtcatttagaactggcagactagagtcttggagaggggagtggaattccaggtgtagcggtgaaatgcgtagatatctggaggaacatcagtggcgaaggcgactccctggccaaagactgacgctcatgtgcgaaagtgtgggtagcgaacaggattagataccctggtagtccacaccgtaaacgctgtctactagctgtgtgtgtctttaagacgtgcgtagcgaagctaacgcgctaagtagaccgcctggggagtacggccgcaaggttaaaactcaaatgaattgacgggggcccgcacaagcggtggagcatgtggtttaattcgatgcaacgcgaagaaccttacctacacttgacatgctgagaagttactagagatagtttcgtgccttcgggaactcagacacaggtgctgcatggctgtcgtcagctcgtgtcgtgagatgttgggttaagtcccgcaacgagcgcaacccttgtccttagttgccagcattaagttgggcactctaaggagactgccggtgacaaaccggaggaaggtggggacgacgtcaagtcatcatggcccttacgtgtagggctacacacgtgctacaatggcatttacagagggaagcgagacagtgatgtggagcggaccccttaaagaatgtcgtagtccggattggagtctgcaactcgactccatgaagtcggaatcgctagtaatcgcaggtcagaatactgcggtgaatacgttcccgggccttgtacacaccgcccgtcacaccatgggagtgggatgcaaaagaagtagttagtctaaccttcgggaggacgattaccactttgtgtttcatgactggggtg

SEQ ID NO: 616 - DNA, 1456 bp, Alteromonas marina
  misc_feature (48)..(50): n is a, c, g, or t
  misc_feature (52)..(52): n is a, c, g, or t
  misc_feature (61)..(61): n is a, c, g, or t
  misc_feature (64)..(64): n is a, c, g, or t
attgaacgctggcggcaggcctaacacatgcaagtcgaacggtaacannntnagcttgctnatngatgacgagtggcggacgggtgagtaatgcttgggaacttgcctttgcgagggggataacagttggaaacgactgctaataccgcataatgttttcgaaccaaacggggcttaggctccggcgcaaagagaggcccaagtgagattagctagttggtaaggtaacggcttaccaaggcgacgatctctagctgttctgagaggaagatcagccacactgggactgagacacggcccagactcctacgggaggcagcagtggggaatattgcacaatgggggaaaccctgatgcagccatgccgcgtgtgtgaagaaggccttcgggttgtaaagcactttcagttgtgaggaaaagttagtagttaatacctgctagccgtgacgttaacaacagaagaagcaccggctaactccgtgccagcagccgcggtaatacggagggtgcgagcgttaatcggaattactgggcgtaaagcgcacgcaggcggtttgttaagctagatgtgaaagccccgggctcaacctgggatggtcatttagaactggcagactagagtcttggagaggggagtggaattccaggtgtagcggtgaaatgcgtagatatctggaggaacatcagtggcgaaggcgactccctggccaaagactgacgctcatgtgcgaaagtgtgggtagcgaacaggattagataccctggtagtccacaccgtaaacgctgtctactagctgtgtgtgcctttaaggctgtgcgtagcgaagctaacgcgataagtagaccgcctggggagtacggccgcaaggttaaaactcaaatgaattgacgggggcccgcacaagcggtggagcatgtggtttaattcgatgcaacgcgaagaaccttacctacacttgacatgctgagaagttactagagatagtttcgtgccttcgggaactcagacacaggtgctgcatggctgtcgtcagctcgtgtcgtgagatgttgggttaagtcccgcaacgagcgcaacccttgtccttagttgccagccttaagttgggcactctaaggagactgccggtgacaaaccggaggaaggtggggacgacgtcaagtcatcatggcccttacgtgtagggctacacacgtgctacaatggcatttacagagggaagcgagacagtgatgtggagcggaccccttaaagaatgtcgtagtccggattggagtctgcaactcgactccatgaagtcggaatcgctagtaatcgcaggtcagaatactgcggtgaatacgttcccgggccttgtacacaccgcccgtcacaccatgggagtgggatgcaaaagaagtagttagtctaaccttcgggaggacgattaccactttgtgtttcatgactggggtg

SEQ ID NO: 617 - DNA, 1438 bp, Alteromonas mediterranea
attgaacgctggcggcaggcctaacacatgcaagtcgaacggtaacaggattagcttgctaatcgctgacgagtggcggacgggtgagtaatgcttgggaacttgcctttgcgagggggataacagttggaaacgactgctaataccgcataacgtctacggaccaaacggggcttaggctccggcgcaaagagaggcccaagtgagattagctagttggtaaggtaaaggcttaccaaggcaacgatctctagctgttctgagaggaagatcagccacactggaactgagacacggtccagactcctacgggaggcagcagtggggaatattgcacaatgggggaaaccctgatgcagccatgccgcgtgtgtgaagaaggccttcgggttgtaaagcactttcagttgtgaggaaaagttagtagttaatacctgctagccgtgacgttaacaacagaagaagcaccggctaactccgtgccagcagccgcggtaatacggagggtgcgagcgttaatcggaattactgggcgtaaagcgcacgcaggcggtttgttaagctagatgtgaaagccccgggctcaacctgggatggtcatttagaactggcagactagagtcttggagaggggagtggaattccaggtgtagcggtgaaatgcgtagatatctggaggaacatcagtggcgaaggcgactccctggccaaagactgacgctcatgtgcgaaagtgtgggtagcgaacaggattagataccctggtagtccacaccgtaaacgctgtctactagctgtttgtgactttaagtcgtgagtagcgaagctaacgcgataagtagaccgcctggggagtacggccgcaaggttaaaactcaaatgaattgacgggggcccgcacaagcggtggagcatgtggtttaattcgatgcaacgcgaagaaccttacctacacttgacatgcagagaactttccagagatggattggtgccttcgggaactctgacacaggtgctgcatggctgtcgtcagctcgtgtcgtgagatgttgggttaagtcccgcaacgagcgcaacccttgtccttagttgccagccttaagttgggcactctaaggagactgccggtgacaaaccggaggaaggtggggacgacgtcaagtcatcatggcccttacgtgtagggctacacacgtgctacaatggcatttacagagggaagcgagacagtgatgtggagcggaccccttaaagaatgtcgtagtccggattggagtctgcaactcgactccatgaagtcggaatcgctagtaatcgcaggtcagaatactgcggtgaatacgttcccgggccttgtacacaccgcccgtcacaccatgggagtgggatgcaaaagaagtagttagtctaaccttcgggaggacgattaccactttgt

SEQ ID NO: 618 - DNA, 1455 bp, Alteromonas naphthalenivorans
attgaacgctggcggcaggcctaacacatgcaagtcgaacggaaacatatctagcttgctagatgatgtcgagtggcggacgggtgagtaatgcttgggaacttgcctttgcgagggggataacagttggaaacgactgctaataccgcataatgtctacggaccaaacggggcttcggctccggcgcaaagagaggcccaagtgagattagctagttggtgaggtaaaggctcaccaaggcaacgatctctagctgttctgagaggaagatcagccacactgggactgagacacggcccagactcctacgggaggcagcagtggggaatattgcacaatgggggaaaccctgatgcagccatgccgcgtgtgtgaagaaggccttcgggttgtaaagcactttcagttgtgaggaaaagttagtagttaatacctgctagccgtgacgttaacaacagaagaagcaccggctaactccgtgccagcagccgcggtaatacggagggtgcgagcgttaatcggaattactgggcgtaaagcgcacgcaggcggtttgttaagctagatgtgaaagccccgggctcaacctgggacggtcatttagaactggcagactagagtcttggagaggggagtggaattccaggtgtagcggtgaaatgcgtagatatctggaggaacatcagtggcgaaggcgactccctggccaaagactgacgctcatgtgcgaaagtgtgggtagcgaacaggattagataccctggtagtccacaccgtaaacgctgtctactagctgtttgtggctttaagccgtgagtagcgaagctaacgcgataagtagaccgcctggggagtacggccgcaaggttaaaactcaaatgaattgacgggggcccgcacaagcggtggagcatgtggtttaattcgatgcaacgcgaagaaccttacctacacttgacatgttgagaagttactagagatagtttcgtgccttcgggaactcaaacacaggtgctgcatggctgtcgtcagctcgtgtcgtgagatgttgggttaagtcccgcaacgagcgcaacccttgtccttagttgccagcatttagttgggcactctaaggagactgccggtgacaaaccggaggaaggtggggacgacgtcaagtcatcatggcccttacgtgtagggctacacacgtgctacaatggcatatacagagggatgcgagacagtgatgtggagcggaccccttaaagtatgtcgtagtccggattggagtctgcaactcgactccatgaagtcggaatcgctagtaatcgcaggtcagaatactgcggtgaatacgttcccgggccttgtacacaccgcccgtcacaccatgggagtgggatgcaaaagaagtagttagtttaaccttcgggagaacgattaccactttgtgtttcatgactggggtg

SEQ ID NO: 619 - DNA, 1419 bp, Alteromonas pelagimontana
atgcagtcgaacggtagcaggacgtgcttgcacatctgctgacgagtggcggacgggtgagtaatgcttgggaacttgccttttggagggggataacagttggaaacgactgctaataccgcataatgtctacggaccaaagggggcgcttgcgctcttaccaaaagagaggcccaagtgagattacctagtaggtgaggtaagagctcacctaggcgacgatctctagctgttctgagaggaagatcagccacactgggactgagacacggcccagactcctacgggaggcagcagtggggaatattgcacaatgggggcaaccctgatgcagccatgccgcgtgtgtgaagaaggccttcgggttgtaaagcactttcagttgtgaggaagggttgatggttaatacccatcagcattgacgttagcaacagaagaagcaccggctaactccgtgccagcagccgcggtaatacggagggtgcgagcgttaatcggaatttactgggcgtaaagcgcacgcaggcggtttgttaagctagatgtgaaagccccgggctcaacctgggacggtcatttagaactggcagactagagtcttggagaggggagtggaattccaggtgtagcggtgaaatgcgtagatatctggaggaacatcagtggcgaaggcgactccctggccaaagactgacgctcatgtgcgaaagtgtgggtagcgaacaggattagataccctggtagtccacaccgtaaacgctgtctactagctgtttgtgaatttaatttgtaagtagcgaagctaacgcgataagtagaccgcctggggagtacggccgcaaggttaaaactcaaatgaattgacgggggcccgcacaagcggtggagcatgtggtttaattcgatgcaacgcgaagaaccttacctacacttgacatgctgagaactttccagagatggattggtgccttcgggaactcagacacaggtgctgcatggctgtcgtcagctcgtgtcgtgagatgttgggttaagtcccgcaacgagcgcaacccttgtccttagttgccagcatttggttgggcactctaaggagactgccggtgacaaaccggaggaaggtggggacgacgtcaagtcatcatggcccttacgtgtagggctacacacgtgctacaatggcaagtacagagggaagcgagacagtgatgtggagcggaccccttaaagcttgtcgtagtccggattggagtctgcaactcgactccatgaagtcggaatcgctagtaatcgcaaatcagaatgttgcggtgaatacgttcccgggccttgtacacaccgcccgtcacaccatgggagtgggatgcaaaagaagtagttagtctaaccttcgtcgtttcacgatgagggaggacgata

SEQ ID NO: 620 - DNA, 1455 bp, Alteromonas stellipolaris
attgaacgctggcggcaggcctaacacatgcaagtcgaacggaaacatgtctagcttgctagatgatgtcgagtggcggacgggtgagtaatgcttgggaacttgcctttgcgagggggataacagttggaaacgactgctaataccgcataatgtcttcggaccaaacggggcttcggctccggcgcaaagagaggcccaagtgagattagctagttggtgaggtaaaggctcaccaaggcaacgatctctagctgttctgagaggaagatcagccacactgggactgagacacggcccagactcctacgggaggcagcagtggggaatattgcacaatgggggaaaccctgatgcagccatgccgcgtgtgtgaagaaggccttcgggttgtaaagcactttcagttgtgaggaaaagttagtagttaatacctgctagccgtgacgttaacaacagaagaagcaccggctaactccgtgccagcagccgcggtaatacggagggtgcgagcgttaatcggaattactgggcgtaaagcgcacgcaggcggtttgttaagctagatgtgaaagccccgggctcaacctgggacggtcatttagaactggcagactagagtcttggagaggggagtggaattccaggtgtagcggtgaaatgcgtagatatctggaggaacatcagtggcgaaggcgactccctggccaaagactgacgctcatgtgcgaaagtgtgggtagcgaacaggattagataccctggtagtccacaccgtaaacgctgtctactagctgtttgtgactttaagtcgtgagtagcgaagctaacgcgataagtagaccgcctggggagtacggccgcaaggttaaaactcaaatgaattgacgggggcccgcacaagcggtggagcatgtggtttaattcgatgcaacgcgaagaaccttacctacacttgacatgttgagaagttaccagagatggtttcgtgccttcgggaactcaaacacaggtgctgcatggctgtcgtcagctcgtgtcgtgagatgttgggttaagtcccgcaacgagcgcaacccttgtccttagttgccagcatttagttgggcactctaaggagactgccggtgacaaaccggaggaaggtggggacgacgtcaagtcatcatggcccttacgtgtagggctacacacgtgctacaatggcatatacagagggatgcgagacagtgatgtggagcggaccccttaaagtatgtcgtagtccggattggagtctgcaactcgactccatgaagtcggaatcgctagtaatcgcaggtcagaatactgcggtgaatacgttcccgggccttgtacacaccgcccgtcacaccatgggagtgggatgcaaaagaagtagttagtttaaccttcgggagaacgattaccactttgtgtttcatgactggggtg

SEQ ID NO: 621 - DNA, 1460 bp, Alysiella crassa
attgaacgctggcggcatgctttacacatgcaagtcgaacggcagcacgggtgcttgcacctggtggcgagtggcgaacgggtgagtaatgcattggaacgtaccgagtagtgggggataactgtccgaaaggatagctaataccgcatacgacctgagggtgaaagcgggggactttttgagcctcgcgctatttgagcggccaatgtctgattaggtagttggtggggtaaaggcctaccaagccgacgatcagtagcgggtctgagaggatgatccgccacactgggactgagacacggcccagactcctacgggaggcagcagtggggaattttggacaatggggggaaccctgatccagccatgccgcgtgtctgaagaaggccttcgggttgtaaaggacttttgtcggggaagaaaagcggattgataataccagttcgtgatgacggtacccgaagaataagcaccggctaactacgtgccagcagccgcggtaatacgtagggtgcgagcgttaatcggaattactgggcgtaaagcgagcgcagacggtttgttaagtcagatgtgaaatccccgagctcaacttgggaacggcgtttgaaactggcaagctagagtatgtcagaggggggtagaattccacgtgtagcagtgaaatgcgtagagatgtggaggaataccgatggcgaaggcagccccctgggataatactgacgttcatgctcgaaagcgtgggtagcaaacaggattagataccctggtagtccacgccctaaacgatgtcaattagctgttggggtacttgataccttagtagcgtagctaacgcgtgaaattgaccgcctggggagtacggtcgcaagattaaaactcaaaggaattgacggggacccgcacaagcggtggatgatgtggattaattcgatgcaacgcgaagaaccttacctggtcttgacatgtacggaagagcgtagagatatgcttgtgccttcgggagccgtaacacaggtgctgcatggctgtcgtcagctcgtgtcgtgagatgttgggttaagtcccgcaacgagcgcaacccttgtcattagttgccatcatttagttgggcactctaatgagactgccggtgacaaaccggaggaaggtggggatgacgtcaagtcctcatggcccttatgaccagggcttcacacgtcatacaatggtcggtacagagggtagccaaaccgcgaggtggagccaatcccagaaaaccgatcgtagtccggattgcactctgcaactcgagtgcatgaagtcggaatcgctagtaatcgcaggtcagcatactgcggtgaatacgttcccgggtcttgtacacaccgcccgtcacaccatgggagtgggggataccagaagtaggtagggtaaccgcgaggagcccgcttaccacggtatgtttcatgactggggtg

SEQ ID NO: 622 - DNA, 1461 bp, Alysiella filiformis
attgaacgctggcggcatgctttacacatgcaagtcgaacggcagcacgagtacttgtacttggtggcgagtggcgaacgggtgagtaatgcattggaacgtaccgagtagtgggggataactgtccgaaaggatagctaataccgcatacgacctgagggtgaaagcgggggacttttaggagcctcgcgctatttgagcggccaatgtctgattaggtagttggtggggtaaaggcctaccaagccgacgatcagtagcgggtctgagaggatgatccgccacactgggactgagacacggcccagactcctacgggaggcagcagtggggaattttggacaatggggggaaccctgatccagccatgccgcgtgtctgaagaaggccttcgggttgtaaaggacttttgtcggggaagaaaagcggattgataataccagttcgtgatgacggtacccgaagaataagcaccggctaactacgtgccagcagccgcggtaatacgtagggtgcgagcgttaatcggaattactgggcgtaaagcgagcgcagacggtttgttaagtcagatgtgaaatccccgagctcaacttgggaacggcgtttgaaactggcaagctagagtatgtcagaggggggtagaattccacgtgtagcagtgaaatgcgtagagatgtggaggaataccgatggcgaaggcagccccctgggataatactgacgttcatgctcgaaagcgtgggtagcaaacaggattagataccctggtagtccacgccctaaacgatgtcaattagctgttggggcacttgatgccttagtagcgtagctaacgcgtgaaattgaccgcctggggagtacggtcgcaagattaaaactcaaaggaattgacggggacccgcacaagcggtggatgatgtggattaattcgatgcaacgcgaagaaccttacctggtcttgacatgtgcggaaggctttagagatagagctgtgccttcgggaaccgcaacacaggtgctgcatggctgtcgtcagctcgtgtcgtgagatgttgggttaagtcccgcaacgagcgcaacccttgtcattagttgccatcattaagttgggcactctaatgagactgccggtgacaaaccggaggaaggtggggatgacgtcaagtcctcatggcccttatgaccagggcttcacacgtcatacaatggtcggtacagagggtagccaaaccgcgaggtggagccaatcccagaaaaccgatcgtagtccggattgcactctgcaactcgagtgcatgaagtcggaatcgctagtaatcgcaggtcagcatactgcggtgaatacgttcccgggtcttgtacacaccgcccgtcacaccatgggagtgggggataccagaagtaggtagggtaaccgcaaggagcccgcttaccacggtatgcttcatgactggggtg

SEQ ID NO: 623 - DNA, 1456 bp, Amantichitinum ursilacus
attgaacgctggcggcatgctttacacatgcaagtcgaacgggctttgggggcttgctcccaaagttagtggcgaacgggtgagtaatgcatcggaacgtaccgtgtaatgggggataacctaccgaaaggtggactaataccgcatacgccctgagggggaaagagggggatcgcaagacctcttgttatacgagcggccgatgtcggattagctagttggtgaggtaaaggctcaccaaggcaacgatccgtagcgggtctgagaggacgacccgccacactgggactgagacacggcccagactcctacgggaggcagcagtggggaatcttggacaatgggcgcaagcctgatccagcaatgccgcgtgggtgaagaaggccttcgggttgtaaagcccttttgtcagggagcaaatccttgtggctaataaccaccggggatgagagtacctgaagaataaggaccggctaactacgtgccagcagccgcggtaatacgtagggtccaagcgttaatcggaattactgggcgtaaagcgtgcgcaggtggcttgttaagatcgatgtgaaatccccgggctcaacctgggaatggcattgatgactggctcgctagagtacggcagaggggggtggaattccacgtgtagcagtgaaatgcgtagagatgtggaggaacaccgatggcgaaggcaaccccctgggctgatactgacactcatgcacgaaagcgtggggagcaaacaggattagataccctggtagtccacgccctaaacgatgtctactagttgtcggggttttcggactttggtaacgcagctaacgcgggaagtagaccgcctggggagtacggtcgcaagattaaaactcaaaggaattgacgggggcccgcacaagcggtggatgatgtggattaattcgatgcaacgcgaaaaaccttacctggtcttgacatgtacggaatcctccagagacggaggagtgccttcgggagccgtaacacaggtgctgcatggctgtcgtcagctcgtgtcgtgagatgttgggttaagtcccgcaacgagcgcaacccttgccattagttgccagcattcagttgggcactttaatgggactgccggtgacaaaccggaggaaggtggggatgacgtcaagtcctcatggcccttatgaccagggcttcacacgtcatacaatggtcggtacagagggcagccaacccgcgagggggagccaatcctttaaaaccgatcgtagtccggattgcactctgcaactcgagtgcatgaagtcggaatcgctagtaatcgcggatcagcatgtcgcggtgaatacgttcccgggccttgtacacaccgcccgtcacaccatgggagtgggttctaccagaagtggccagactaaccttcggggggtcggttaccacggtaggattcatgactggggtg

SEQ ID NO: 624 - DNA, 1407 bp, Aminobacter aminovorans
aacgaacgctggcggcaggcttaacacatgcaagtcgagcgccccgcaaggggagcggcagacgggtgagtaacgcgtgggaatctacccagctctacggaataactcagggaaacttgtgctaataccgtatacgtccgataggagaaagatttatcggagttggatgagcccgcgttggattagctagttggtggggtaatggcctaccaaggcgacgatccatagctggtctgagaggatgatcagccacactgggactgagacacggcccagactcctacgggaggcagcagtggggaatattggacaatgggcgcaagcctgatccagccatgccgcgtgagtgatgaaggccctagggttgtaaagctctttcaccggtgaagataatgacggtaaccggagaagaagccccggctaacttcgtgccagcagccgcggtaatacgaagggggctagcgttgttcggaattactgggcgtaaagcgcacgtaggcggattgttaagttaggggtgaaatcccagggctcaaccctggaactgcctttaatactggcaatctcgagtccgagagaggtgagtggaattccgagtgtagaggtgaaattcgtagatattcggaggaacaccagtggcgaaggcggctcactggctcggtactgacgctgaggtgcgaaagcgtggggagcaaacaggattagataccctggtagtccacgccgtaaactatgagagctagccgtcggcaagtttacttgtcggtggcgcagctaacgcattaagctctccgcctggggagtacggtcgcaagattaaaactcaaaggaattgacgggggcccgcacaagcggtggagcatgtggtttaattcgaagcaacgcgcagaaccttaccagcccttgacatcccggtcgcggtttccagagatggatcccttcagttcggctggaccggtgacaggtgctgcatggctgtcgtcagctcgtgtcgtgagatgttgggttaagtcccgcaacgagcgcaaccttcgcccttagttgccatcattaagttgggcactctaaggggactgccggtgataagccgcgaggaaggtgaagatgacgtcaagtcctcatggcccttacgggctgggctacacacgtgctacaatggtggtgacagtgggcagcgagaccgcgaggtcgagctaatctccaaaagccatctcagttcggattgcactctgcaactcgagtgcatgaagttggaatcgctagtaatcgcagatcagcatgctgcggtgaatacgttcccgggccttgtacacaccgcccgtcacaccatgggagttggttttacccgaaggcactgtgctaaccgcaaggaggcaggtgaccacggtagggtcagcgactggggtg

SEQ ID NO: 625 - DNA, 1502 bp, Ammonifex degensii
gacgaacgctggcggcgtgcctaacacatgcaagtcgagcgggcttgtcagggccttgtgtcctggcaagttgagcggcggacgggtgagtaacgcgtgggtaacctacccaggagactgggataaccctgggaaactggggctaataccggatacgctcctgctggggcatcctggtgggaggaaaggtggcgttgaggcgctgccgctcctggatgggcccgcgtcccatcagctagttggtggggtaacggcctaccaaggcgacgacgggtagccggcctgagagggtggtcggccacactgggactgagacacggcccagactcctacgggaggcagcagtgggggatcttccgcaatgggcgaaagcctgacggagcgacgccgcgtgggggaagaaggccttcgggtcgtaaacccctgtcgtgggggacgatgctctagggggtgaatagcctcctggggtgacggtacctcacaagaaagccccggctaactacgtgccagcagccgcggtaagacgtagggggcgagcgttgtccggaatcactgggcgtaaagggcgcgtaggcggctccagaagtcgtgggtgaaatccctgggctcaacctaggggctgcccacgaaaccatggggcttgagggcaggagaggggagtggaattcccggtgtagcggtgaaatgcgtagatatcgggaggaacaccagtggcgaaggcggctccctggtctgtccctgacgctgaggcgcgaaagctgggggagcaaaccggattagatacccgggtagtcccagccgtaaacgatgggcgctaggtgtgggggagtgttaactcctccgtgccgtaggtaacccattaagcgccccgcctggggagtacggtcgcaagactgaaactcaaaggaattgacgggggcccgcacaagcggtggagcgcgtggtttaattcgatgctaagcgaagaaccttaccagggcttgacatgctggtggtagcgacccgaaagggaagcgaccccggggtttagccgccggggagccagcacaggtggtgcatggttgtcgtcagctcgtgccgtgaggtgttgggttaagtcccgcaacgagcgcaacccctgcccctagttgccagcgggtgaggccgggcactctagggggactgccgtcgacaagacggaggaaggtggggatgacgtcaaatcatcatgcccctgatgccctgggctacacacgcgctacaatggccggtacagcgggaagcgaagccgcgaggcggagcaaatccctgaaagccggtctcagttcggattgcaggctgcaactcgcctgcatgaagccggaatcgctagtaatcgccggtcagcatacggcggtgaatacgttcccgggccttgtacacaccgcccgtcacaccacggaagccggcaacacccgaagtcggtactcctaaccctcgcaagagggagggagccgccgaaggtggggccggtgactggggtg

SEQ ID NO: 626 - DNA, 1505 bp, Ammonifex thiophilus
gacgaacgctggcggcgtgcctaacacatgcaagtcgagcgggcttgtcggggccttgtgtcccggcaagttgagcggcggacgggtgagtaacgcgtgggtaacctacccgggagactgggataaccctgggaaactggggctaataccggatacgctcctgctggggcatcctggtgggaggaaaggtggcggtcaaagccgctgccgctcctggatgggcccgcgtcccatcagctagttggtggggtaacggcctaccaaggcgacgacgggtagccggcctgagagggtggtcggccacactgggactgagacacggcccagactcctacgggaggcagcagtgggggatcttccgcaatgggcgaaagcctgacggagcgacgccgcgtgggggaagaaggccttcgggtcgtaaacccctgtcgtgggggaagatgcctcagggggtgaacagcttcttggggtgacggtaccccacaagaaagccccggctaactacgtgccagcagccgcggtaagacgtagggggcgagcgttgtccggaatcactgggcgtaaagggcgcgtaggcggcctcagaagtcgtgggtgaaatctccaggctcaacctgggggctgcccacgaaaccatggggcttgagggcaggagaggggagtggaattcccggtgtagcggtgaaatgcgtagatatcgggaggaacaccagtggcgaaggcggctccctggtctgtccctgacgctgaggcgcgaaagctgggggagcaaaccggattagatacccgggtagtcccagccgtaaacgatgggcgctaggtgtgggggagtgttaactcctccgtgccgcaggtaacccattaagcgccccgcctggggagtacggccgcaagactgaaactcaaaggaattgacgggggcccgcacaagcggtggagcgcgtggtttaattcgatgctaagcgaagaaccttaccagggcttgacatgctggtggtagtgacccgaaaggggagcgaccccgggggtttagccgccggggagccagcacaggtggtgcatggttgtcgtcagctcgtgccgtgaggtgttgggttaagtcccgcaacgagcgcaacccctgcccctagttgccagcgggtaaggccgggcactctagggggactgccgtcgacaagacggaggaaggtggggatgacgtcaaatcatcatgcccctgatgccctgggctacacacgcgctacaatggccggtacagcgggaagcgaagccgcgaggcggagcaaatccctgaaagccggtctcagttcggattgcaggctgcaactcgcctgcatgaagccggaatcgctagtaatcgccggtcagcatacggcggtgaatacgttcccgggccttgtacacaccgcccgtcacaccacggaagccggcaacacccgaagtcggaactcctaaccctcgcgagagggagggagccgccgaaggtgcggccggtgactgggatg

SEQ ID NO: 627 - DNA, 1461 bp, Ammoniphilus oxalaticus
gacgaacgctggcggcgtgcctaatacatgcaagtcgagcgaagttttaggagcttgctcttaaaacttagcggcaaacgggtgagtaacacgtgggcaacctgcctgacagactgggataacttgaggaaactcaagctaataccggataggatcgcggatcgcatggatcgcgatggaaagtctgaacgacactgtcagatgggcccgcggcgcattagctagttggtggggtaatggcctaccaaggcaacgatgcgtagccgacctgagagggtgaccggccacactgggactgagacacggcccagactcctacgggaggcagcagtagggaatcttccacaatgggcgaaagcctgatggagcaacgccgcgtgagtgatgaaggttttcggatcgtaaaactctgttgttagggaagaacacccgagagaggatctcggtttgacggtacctaacgaggaagccccggctaactacgtgccagcagccgcggtaatacgtagggggcaagcgttgtccggatttattgggcgtaaagcgcgcgcaggcggcctgttaagtctgatgtgaaatcccacggctcaaccgtggagggccattggaaactggtaggcttgagtgcaggagaggagagcggaattcccggtgtagcggtgaaatgcgtagatatcgggaggaacacccgtggcgaaggcggctctctggcctgtaactgacgctgaggcgcgaaagcgtggggagcaaacaggattagataccctggtagtccacgccgtaaacgatgagtgctaagtgtcgggggtgaccaaccctcggtgctgtcgctaacgcaataagcactccgcctggggagtacggccgcaaggctgaaactcaaaggaattgacggggacccgcacaagcggtggagcatgtggtttaattcgaagcaacgcgaagaaccttaccaaggcttgacatccctctgaccgatttagagatagatctttcccttcggggacagaggtgacaggtggtgcatggttgtcgtcagctcgtgtcgtgagatgttgggttaagtcccgcaacgagcgcaacccttatctttagttgccatcattcagttgggcactctagagagactgccggtgacaaaccggaggaaggtggggatgacgtcaaatcatcatgccccttatgtcttgggctacacacgtgctacaatggttggtacaaagggctgcaagccagcgatggtaagccaatcccataaagccaatctcagttcggattgtaggctgcaactcgcctacatgaagtaggaatcgctagtaatcgcagatcagcatgctgcggtgaatacgttcccgggtcttgtacacaccgcccgtcacaccacgagagtttgcaacacccgaagtcggtggggtaaccgtaaggagccagccgccgaaggtggggcagatgattggggtg

SEQ ID NO: 628 - DNA, 1490 bp, Amphibacillus jilinensis
gacgaacgctggcggcgtgcctaatacatgcaagtcgagcgcaggaagcatgacggatcccttcggggtgacatcatgtggaatgagcggcggacgggtgagtaacacgtgggcaacctacctgtaagactgggataactccgggaaaccggagctaataccggataatccttattcctgcatgggaggaaggtaaaaggcggcattatgctgtcacttacagatgggcccgcggcgcattagctagttggtgaggtaacggctcaccaaggcaacgatgcgtagccgacctgagagggtgatcggccacactgggactgagacacggcccagactcctacgggaggcagcagtagggaatcttccgcaatggacgaaagtctgacggagcaacgccgcgtgaacgaagaaggttttcggatcgtaaagttctgttgttagggaagaacacgtaccgatcaaataggtcggtaccttgacggtacctaacgaggaagccccggctaactacgtgccagcagccgcggtaatacgtagggggcaagcgttgtccggaattattgggcgtaaagcgcacgcaggcggttttttaagtctgatgtgaaatcttgcggctcaaccgcaagcggtcattggaaactggagaacttgagtgcagaagaggagagtggaattccacgtgtagcggtgaaatgcgtagagatgtggaggaacaccagtggcgaaggcgactctctggtctgttactgacgctgaggtgcgaaagcgtggggagcaaacaggattagataccctggtagtccacgccgtaaacgatgagtgctaggtgttagggggtttccgccccttagtgctgcagttaacgcattaagcactccgcctggggagtacggccgcaaggctgaaactcaaaagaattgacggggacccgcacaagcggtggagcatgtggtttaattcgaagcaacgcgaagaaccttaccaggtcttgacatccttatgcccgctctagagatagagttttcccttcggggacataagtgacaggtggtgcatggttgtcgtcagctcgtgtcgtgagatgttgggttaagtcccgcaacgagcgcaacccttgatcttagttgccagcattcagttgggcactctaaggtgactgccggtgacaaaccggaggaaggtggggatgacgtcaaatcatcatgccccttatgacctgggctacacacgtgctacaatggatggtacaaagggcagcaaagccgcaaggccaagcgaatcccataaaaccattctcagttcggattgtaggctgcaactcgcctacatgaagccggaatcgctagtaatcgcggatcagcatgccgcggtgaatacgttcccgggtcttgtacacaccgcccgtcacaccacgagagttagcaacacccgaagtcggtgaggtaaccatttggagccagccgccgaaggtggggccaatgattggggtg

SEQ ID NO: 629 - DNA, 1490 bp, Amphibacillus marinus
gacgaacgctggcggcgtgcctaatacatgcaagtcgagcgcaggaagcagtttagatcccttcggggtgacgagctgtggaatgagcggcggacgggtgagtaacacgtgggcaacctacctgtaagactgggataactccgggaaaccggggctaataccggatgatcctttgactcacatgggttagaggtaaaaggcggcttttagctgtcacttacagatgggcccgcggcgcattagctagttggtgaggtaacggctcaccaaggcaacgatgcgtagccgacctgagagggtgatcggccacactgggactgagacacggcccagactcctacgggaggcagcagtagggaatcttccgcaatggacgaaagtctgacggagcaacgccgcgtgaacgaagaaggttttcggatcgtaaagttctgttgttagggaagaacacgtaccgttcaaatagggcggtaccttgacggtacctaacgagaaagccccggctaactacgtgccagcagccgcggtaatacgtagggggcaagcgttgtccggaattattgggcgtaaagcgcgcgcaggcggttttttaagtctgatgtgaaatcttgcggctcaaccgcaagcggtcattggaaactggagaacttgagtgcagaagaggagagtggaattccacgtgtagcggtgaaatgcgtagatatgtggaggaacaccagtggcgaaggcgactctctggtctgtaactgacgctgaggcgcgaaagcgtggggagcaaacaggattagataccctggtagtccacgccgtaaacgatgagtgctaggtgttagggggtttccgccccttagtgctgcagttaacgcattaagcactccgcctggggagtacggccgcaaggctgaaactcaaaagaattgacggggacccgcacaagcggtggagcatgtggtttaattcgaagcaacgcgaagaaccttaccaggtcttgacatcctcatgaaagctctagagatagagtcggcccttcggggacatgagtgacaggtggtgcatggttgtcgtcagctcgtgtcgtgagatgttgggttaagtcccgcaacgagcgcaacccttgatcttagttgccagcatttagttgggcactctaaggtgactgccggtgacaaaccggaggaaggtggggatgacgtcaaatcatcatgccccttatgacctgggctacacacgtgctacaatggatggtacaaagggcagcgaagccgtgaggtgaagcaaaccccataaaaccattctcagttcggattgtaggctgcaactcgcctacatgaagccggaatcgctagtaatcgcggatcagcatgccgcggtgaatacgttcccgggtcttgtacacaccgcccgtcacaccacgagagttagcaacacccgaagtcggtgaggtaaccatttggagccagccgccgaaggtggggccaatgattggggtg

SEQ ID NO: 630 - DNA, 1387 bp, Amphiplicatus metriothermophilus
gacgaacgctggcggcaggcttaacacatgcaagtcgaacgcgcccttcggggcgagtggcagacgggtgagtaacgcgtgggaacgtacccttcggttcggaacaacccagggaaacttgggctaataccggatacgccctccgggggaaagatttatcgccgaaggatcggcccgcgtcggattagcttgttggtggggtaacggcccaccaaggcgatgatccgtagctggtctgagaggatgatcagccacactgggactgagacacggcccagactcctacgggaggcagcagtggggaatattggacaatgggcgaaagcctgatccagccatgccgcgtggatgaagaaggccctagggttgtaaagtcctttcggcggggaagataatgacggtacccgcagaagaagccccggctaatttcgtgccagcagccgcggtaatacgaaaggggctagcgttgttcggaattactgggcgtaaagcgcgcgtaggcggccttgcaagttgggggtgaaatcccggagctcaactccggaactgccttcaaaactgcaaagctagaggatgcgagaggtgagcggaattccgagtgtagaggtgaaattcgtagatattcggaagaacaccagtggcgaaggcggctcactggcgcatttctgacgctgaggcgcgaaagcgtggggagcaaacaggattagataccctggtagtccacgctgtaaacgatgagggctagttgtcggcaggcatgcctgtcggtgacgcagctaacgcattaagccctccgcctggggagtacggtcgcaagattaaaactcaaaggaattgacgggggcccgcacaagcggtggagcatgtggtttaattcgaagcaacgcgaagaaccttaccagcccttgacatcccggtcgcggattccagagatggattccttcagttcggctggaccggagacaggtgttgcatggctgtcgtcagctcgtgtcgtgagatgttgggttaagtcccgcaacgagcgcaaccctcgctgttagttgccatcatttagttgggcactctaacgggaccgccggtgataagccggaggaaggtggggatgacgtcaagtcatcatggcccttacgggctgggctacacacgtgctacaatggcggccataatgggctaatccccaaaagccgtctcagttcggattgtcctctgcaactcgagggcatgaagtcggaatcgctagtaatcgcggatcagcatgccgcggtgaatacgttcccgggccttgtacacaccgcccgtcacaccatgggagttggctttacccgaagacggtgcgctaaccgcaaggaggcagccggccacggtagggtcagcgactggggtg

SEQ ID NO: 631 - DNA, 1465 bp, Amphritea atlantica
attgaacgctggcggcaggcttaacacatgcaagtcgagcggtaacagagagtagcttgctactttgctgacgagcggcggacgggtgagtaacgcgtagaaatctgcctggtagtgggggatagcccagagaaatttggattaataccgcatacgccctacgggggaaagcaggggaccttcgggccttgcgctatcagatgagtctgcgtcggattagcttgttggtgaggtaatggctcaccaaggcgacgatccgtagctggtctgagaggatgatcagccacactgggactgagacacggcccagactcctacgggaggcagcagtggggaatattgcacaatgggcgaaagcctgatgcagccatgccgcgtgtgtgaagaaggccttagggttgtaaagcactttcagcagtgaggaaaggttgtagcttaatacgctatagctgtgacgttaactgcagaagaaggaccggctaactccgtgccagcagccgcggtaatacggagggtccgagcgttaatcggaattactgggcgtaaagcgcgcgtaggcggtttgttaagtcagatgtgaaagccccgggctcaacctgggaactgcacctgatactggcaaactagagtacagaagagggtggtggaatttcctgtgtagcggtgaaatgcgtagatataggaaggaacatcagtggcgaaggcgaccacctggtctgatactgacgctgaggtgcgaaagcgtggggagcaaacaggattagataccctggtagtccacgccgtaaacgatgtctactagccgttgggacacttgatgtcttagtggcgcagctaacgcactaagtagaccgcctggggagtacggccgcaaggttaaaactcaaatgaattgacgggggcccgcacaagcggtggagcatgtggtttaattcgacgcaacgcgaagaaccttacctactcttgaaatccagagaattcgctagagatagcttagtgccttcgggaactctgtgacaggtgctgcatggctgtcgtcagctcgtgttgtgaaatgttgggttaagtcccgtaacgagcgcaacccttgtccttatttgccagcacgtaatggtgggaactctaaggagactgccggtgacaaaccggaggaaggtggggacgacgtcaagtcatcatggcccttacgagtagggctacacacgtgctacaatggccggtacagagggccgcaaacctgcgagggggagcaaatctcagaaaaccggtcgtagtccggattggagtctgcaactcgactccatgaagtcggaatcgctagtaatcgcgaatcagaatgtcgcggtgaatacgttcccgggccttgtacacaccgcccgtcacaccatgggagtggattgcaccagaagtagctagcttaaccttcgggagggcggttaccacggtgtggttcatgactggggtg

SEQ ID NO: 632 - DNA, 1463 bp, Amphritea balenae
attgaacgctggcggcaggcctaacacatgcaagtcgagcggtaacatttctagcttgctagaagatgacgagcggcggacgggtgagtaacgcgtagaaatctgcctggtagtgggggatagcccagagaaatttggattaataccgcatacgccctacgggggaaagcaggggaccttcgggccttgcgctatcagatgagtctgcgtcggattagcttgttggtgaggtaatggctcaccaaggcgacgatccgtagctggtctgagaggatgatcagccacactggaactgagacacggtccagactcctacgggaggcagcagtggggaatattgcacaatgggcgcaagcctgatgcagccatgccgcgtgtgtgaagaaggccctagggttgtaaagcactttcagcagtgaggaaaggttggtagttaataactgccagctgtgacgttaactgcagaagaaggaccggctaactccgtgccagcagccgcggtaatacggagggtccaagcgttaatcggaattactgggcgtaaagcgcgcgtaggcggtttgttaagtcagatgtgaaagccctgggctcaacctgggaactgcacctgatactggcaaactagagtacagaagagggtggtggaatttcctgtgtagcggtgaaatgcgtagatataggaaggaacaccagtggcgaaggcgaccacctggtctgatactgacgctgaggtgcgaaagcgtggggagcaaacaggattagataccctggtagtccacgccgtaaacgatgtctactagccgttggggaacttgattccttagtggcgcagctaacgcactaagtagaccgcctggggagtacggccgcaaggttaaaactcaaatgaattgacgggggcccgcacaagcggtggagcatgtggtttaattcgacgcaacgcgaagaaccttacctactcttgaaatccagagaattcgctagagatagcttagtgccttcgggaactctgtgacaggtgctgcatggctgtcgtcagctcgtgttgtgaaatgttgggttaagtcccgtaacgagcgcaacccttgtccttatttgccagcacgtaatggtgggaactctaaggagactgccggtgacaaaccggaggaaggtggggacgacgtcaagtcatcatggcccttacgagtagggctacacacgtgctacaatggccggtacagagggccgcaaacccgcgagggggagcaaatctcagaaaaccggtcgtagtccggattggagtctgcaactcgactccatgaagtcggaatcgctagtaatcgcgaatcagaatgtcgcggtgaatacgttcccgggccttgtacacaccgcccgtcacaccatgggagtggattgcaccagaagtagctagcttaaccttcgggagggcggttaccacggtgtggttcatgactggggtg

SEQ ID NO: 633 - DNA, 1411 bp, Anabaena cylindrica
gatgaacgctggcggtatgcttaacacatgcaagtcgaacggaatctttagggatttagtggcggacgggtgagtaacgcgtaagaatctaccttcaggtcggggacaaccactggaaacggtggctaataccggatgtgccgagaggtgaaaggcttgctgcctgaagaagagcttgcgtctgattagctagttggtggggtaagagcctaccaaggcgacgatcagtagctggtctgagaggatgatcagccacactgggactgagacacggcccagactcctacgggaggcagcagtggggaattttccgcaatgggcgaaagcctgacggagcaataccgcgtgagggaggaaggctcttgggttgtaaacctcttttctcagggaagaaaaaaatgacggtacctgaggaataagcatcggctaactccgtgccagcagccgcggtaatacggaggatgcaagcgttatccggaatgattgggcgtaaagggtccgcaggtggcattgtaagtctgctgttaaagagtctggctcaaccagataaaagcagtggaaactacaaagctagagtatggtcggggcagagggaattcctggtgtagcggtgaaatgcgtagatatcaggaagaacaccggtggcgaaggcgctctgctaggccaaaactgacactgagggacgaaagctaggggagcgaatgggattagataccccagtagtcctagccgtaaacgatggatactaggcgtagctcgtatcgacccgagctgtgccgtagctaacgcgttaagtatcccgcctggggagtacgcaggcaactgtgaaactcaaaggaattgacgggggcccgcacaagcggtggagtatgtggtttaattcgatgcaacgcgaagaaccttaccaaggcttgacatgtcacgaattccgttgaaagatggaagtgccttagggagcgtgaacacaggtggtgcatggctgtcgtcagctcgtgtcgtgagatgttgggttaagtcccgcaacgagcgcaaccctcgtttttagttgccagcattaagttgggcactctagagagactgccggtgacaaaccggaggaaggtggggatgacgtcaagtcagcatgccccttacgtcttgggctacacacgtactacaatgctccggacaaagggcagctacacagcgatgtgatgcgaatctcataaaccggagctcagttcagatcgaaggctgcaactcgccttcgtgaaggaggaatcgctagtaattgcaggtcagcatactgcagtgaattcgttcccgggccttgtacacaccgcccgtcacaccatggaagttggtcacgcccgaagtcgttaccccaaccgcaaggagggggatgcctaaggtaggactgatgactggggtg

SEQ ID NO: 634 - DNA, 1411 bp, Anabaena variabilis
gatgaacgctggcggtatgcttaacacatgcaagtcgaacggaatcttcggatttagtggcggacgggtgagtaacgcgtgagaatctagctctaggtcggggacaaccactggaaacggtggctaataccggatgtgccgaaaggtgaaagatttattgcctagagatgagctcgcgtctgattagctagttggtgtggtaagagcgcaccaaggcgacgatcagtagctggtctgagaggatgatcagccacactgggactgagacacggcccagactcctacgggaggcagcagtggggaattttccgcaatgggcgaaagcctgacggagcaataccgcgtgagggaggaaggctcttgggttgtaaacctcttttctcagggaataagaaagtgaaggtacctgaggaataagcatcggctaactccgtgccagcagccgcggtaatacggaggatgcaagcgttatccggaatgattgggcgtaaagcgtccgcaggtggcactgtaagtctgctgttaaagagcaaggctcaaccttgtaaaggcagtggaaactacagagctagagtacgttcggggcagagggaattcctggtgtagcggtgaaatgcgtagagatcaggaagaacaccggtggcgaaagcgctctgctaggccgtaactgacactgagggacgaaagctaggggagcgaatgggattagataccccagtagtcctagccgtaaacgatggatactaggcgtggcttgtatcgacccgagccgtgccggagccaacgcgttaagtatcccgcctggggagtacgcacgcaagtgtgaaactcaaaggaattgacgggggcccgcacaagcggtggagtatgtggtttaattcgatgcaacgcgaagaaccttaccaagacttgacatgtcgcgaatcttcttgaaagggaagagtgccttagggagcgcgaacacaggtggtgcatggctgtcgtcagctcgtgtcgtgagatgttgggttaagtcccgcaacgagcgcaaccctcgtttttagttgccagcattaagttgggcactctagagagactgccggtgacaaaccggaggaaggtggggatgacgtcaagtcagcatgccccttacgtcttgggctacacacgtactacaatgctacggacagagggcagcaagctagcgatagcaagcaaatcccgtaaaccgtagctcagttcagatcgcaggctgcaactcgcctgcgtgaaggaggaatcgctagtaattgcaggtcagcatactgcagtgaattcgttcccgggccttgtacacaccgcccgtcacaccatggaagctggcaacgcccgaagtcattactccaaccattcgtgggggaggatgcctaaggcagtgctggtgactggggtg

SEQ ID NO: 635 - DNA, 1392 bp, Anabaenopsis circularis
tgcttaacacatgcaagtcgaacggtctctttcggagatagtggcggacgggtgagtaacgcgtgagaatctagcttcaggtcggggataactactggaaacggtggctaataccggatgtgccgaaaggtgaaaggcttgctgcctgaagatgagctcgcgtctgattagctagttggtgtggtaagagcgcaccaaggcgtcgatcagtagctggtctgagaggatgatcagccacactgggactgagacacggcccagactcctacgggaggcagcagtggggaattttccgcaatgggcgaaagcctgacggagcaataccgcgtgagggaggaaggctcttgggttgtaaacctcttttctcagggaataagaaagtgaaggtacctgaggaataagcatcggctaactccgtgccagcagccgcggtaatacggaggatgcaagcgttatccggaatgattgggcgtaaagcgtccgcaggtggcgatgtaagtctgctgttaaagagcaaagcttaactttgtaaaagcagtggaaactacatagctagagtacgttcggggcagagggaattcctggtgtagcggtgaaatgcgtagagatcaggaagaacaccggtggcgaaggcgctctgctaggccgtaactgacactgagggacgaaagctaggggagcgaatgggattagataccccagtagtcctagccgtaaacgatggatactaggcgttgcgagtatcgaccctcgcagtgccggagccaacgcgttaagtatcccgcctggggagtacgcacgcaagtgtgaaactcaaaggaattgacgggggcccgcacaagcggtggagtatgtggtttaattcgatgcaacgcgaagaaccttaccaagacttgacatgtcgcgaatcctcttgaaagggaggagtgccttagggagcgcgaacacaggtggtgcatggctgtcgtcagctcgtgtcgtgagatgttgggttaagtcccgcaacgagcgcaaccctcgtttttagttgccagcattaagttgggcactctagagagactgccggtgacaaaccggaggaaggtggggatgacgtcaagtcagcatgccccttacgtcttgggctacacacgtactacaatgctacgaacagagggcagcaagctagcgatagcaagcaaatcccggaaatcgtagctcagttcagatcgaagcttgcaactcagcttcgtgaaggaggaatcgctagtaattgcaggtcagcatactgcagtgaattcgttcccgggccttgtacacaccgcccgtcacaccatggaagctggcaacgcccgaagtcattaccccaacttttaggagagggggatgcctaaggcagtgctggtgactggg

SEQ ID NO: 636 - DNA, 1475 bp, Anaerobacillus alkalidiazotrophicus
gacgaacgctggcggcgtgcctaatacatgcaagtcgagcggaatggattggagcttgcttcctaaaacttagcggcgaacgggtgagtaacacgtgggcaacctgccctgtagactgggataactccgggaaaccgaagctaataccggataatctttggagcctcatggttctaaagtaaaagttgggtttacctaacactacaggatgggcccgcggcgcattagctagttggtaaggtaacggcttaccaaggcgacgatgcgtagccgacctgagagggtgatcggccacactgggactgagacacggcccagactcctacgggaggcagcagtagggaatcttccgcaatggacgaaagtctgacggagcaacgccgcgtgagcgatgaaggccttcgggtcgtaaagctctgttgttagggaagaacaagtaccgttcaaatagggcggtaccttgacggtacctaacgagaaagccacggctaactacgtgccagcagccgcggtaatacgtaggtggcaagcgttgtccggaattattgggcgtaaagcgcgcgcaggcggtctcttaagtctgatgtgaaagcccccggctcaaccggggagggtcattggaaactgggagacttgagtgcagaagaggagagtggaattccatgtgtagcggtgaaatgcgtagatatatggaggaacaccagtggcgaaggcgactctctggtctgtaactgacgctgaggcgcgaaagcgtggggagcaaacaggattagataccctggtagtccacgccgtaaacgatgagtgctaggtgttaggggtttcgatgcccttagtgccgaagttaacacattaagcactccgcctggggagtacgaccgcaaggttgaaactcaaaggaattgacgggggcccgcacaagcagtggagcatgtggtttaattcgaagcaacgcgaagaaccttaccaggtcttgacatcctttgaccactctagagatagggatttcccttcgggggacaaagtgacaggtggtgcatggttgtcgtcagctcgtgtcgtgagatgttgggttaagtcccgcaacgagcgcaacccttgatcttagttgccagcatttagttgggcactctaaggtgactgccggtgacaaaccggaggaaggtggggatgacgtcaaatcatcatgccccttatgacctgggctacacacgtgctacaatggatggtacaaagggctgcgaaaccgcgaggttgagccaatcccataaagccattctcagttcggattgtaggctgcaactcgcctacatgaagccggaattgctagtaatcgcggatcagcatgccgcggtgaatacgttcccgggccttgtacacaccgcccgtcacaccacgagagtttgtaacacccgaagtcggtggggtaaccttttgggagccagccgcctaaggtgggacaaatgattggggtg

SEQ ID NO: 637 - DNA, 1473 bp, Anaerobacillus alkalilacustris
gacgaacgctggcggcgtgcctaacacatacaagtcgagcggacagttgaaaccttctttccgaaaattagcggcggacgggtgagtaacacgtgggcaacctgccctgtagactgggataacttcgggaaaccgaagctaataccggataatctttggaacctcatggttctaaagtgaaagttgggtttacctaacactacaggatgggcccgcggcgcattagctagttggtaaggtaacggcttaccaaggcgacgatgcgtagccgacctgagagggtgatcggccacactgggactgagacacggcccagactcctacgggaggcagcagtagggaatcttccgcaatggacgaaagtctgacggagcaacgccgcgtgagcgatgaaggccttcgggtcgtaaagctctgttgttagggaagaacaagtaccgttcaaatagggcggtaccttgacggtacctaacgagaaagccacggctaactacgtgccagcagccgcggtaatacgtaggtggcaagcgttgtccggaattattgggcgtaaagcgcgcgcaggcggtctcttaagtctgatgtgaaagcccccggctcaaccggggagggtcattggaaactgggagacttgagtgcagaagaggagagtggaattccatgtgtagcggtgaaatgcgtagatatatggaggaacaccagtggcgaaggcgactctctggtctgtaactgacgctgaggcgcgaaagcgtggggagcaaacaggattagataccctggtagtccacgccgtaaacgatgagtgctaggtgttaggggtttcgatgcccttagtgccgaagttaacacattaagcactccgcctggggagtacgaccgcaaggttgaaactcaaaggaattgacgggggcccgcacaagcagtggagcatgtggtttaattcgaagcaacgcgaagaaccttaccaggtcttgacatccttatgacctccctagagatagggatttcccttcggggacataagtgacaggtggtgcatggttgtcgtcagctcgtgtcgtgagatgttgggttaagtcccgcaacgagcgcaacccttgatcttagttgccagcatttagttgggcactctaaggtgactgccggtgacaaaccggaggaaggtggggatgacgtcaaatcatcatgccccttatgacctgggctacacacgtgctacaatggatggtacaaagggctgcgagaccgcgaggttgagccaatcccataaagccattctcagttcggattgtaggctgcaactcgcctacatgaagccggaattgctagtaatcgcggatcagcatgccgcggtgaatacgttcccgggccttgtacacaccgcccgtcacaccacgagagtttgtaacacccgaagtcggtggggtaaccttttggagccagccgcctaaggtgggacagatgattggggtg

SEQ ID NO: 638 - DNA, 1474 bp, Anaerobacillus macyae
gacgaacgctggcggcgtgcctaatacatgcaagtcgagcggatagttgagagcttgctctcaattattagcggcggacgggtgagtaacacgtgggcaacctgccctgtagactgggataacctcgggaaaccgaagctaataccggataatctttggaactgcatagttctaaagtaaaagttgggtttacctaacactacaggatgggcccgcggcgcattagctagttggtagggtaacggcctaccaaggcgacgatgcgtagccgacctgagagggtgatcggccacactgggactgagacacggcccagactcctacgggaggcagcagtagggaatcttccgcaatggacgaaagtctgacggagcaacgccgcgtgaacgatgaaggccttcgggtcgtaaagttctgttgttagggaagaacaagtaccgttcaaatagggcggtaccttgacggtacctaacgagaaagccacggctaactacgtgccagcagccgcggtaatacgtaggtggcaagcgttgtccggaattattgggcgtaaagcgcgcgcaggcggtttcttaagtctgatgtgaaagcccccggctcaaccggggagggtcattggaaactgggagacttgagtgcagaagaggagagtggaattccatgtgtagcggtgaaatgcgtagatatatggaggaacaccagtggcgaaggcgactctctggtctgtaactgacgctgaggcgcgaaagcgtggggagcaaacaggattagataccctggtagtccacgccgtaaacgatgagtgctaggtgttaggggtttcgatgcccttagtgccgaagttaacacattaagcactccgcctggggagtacgaccgcaaggttgaaactcaaaggaattgacgggggcccgcacaagcagtggagcatgtggtttaattcgaagcaacgcgaagaaccttaccaggtcttgacatccttatgacatccctagagatagggctttcccttcggggacataagtgacaggtggtgcatggttgtcgtcagctcgtgtcgtgagatgttgggttaagtcccgcaacgagcgcaacccttgatcttagttgccagcattcagttgggcactctaaggtgactgccggtgataaaccggaggaaggtggggatgacgtcaaatcatcatgccccttatgacctgggctacacacgtgctacaatggatggtacaaagggcagcaaaaccgcgaggttgagccaatcccataaagccattctcagttcggattgtaggctgcaactcgcctacatgaagccggaattgctagtaatcgcggatcagcatgccgcggtgaatacgttcccgggccttgtacacaccgcccgtcacaccacgagagtttgtaacacccgaagtcggtggggtaaccttttaggagccagccgcctaaggtgggacagatgattggggtg

SEQ ID NO: 639 - DNA, 1454 bp, Anaerobium acetethylicum
gatgaacgctggcggcgtgcttaacacatgcaagtcgaacgaagcatttttgcggaagctttcgggtggaaacagaaatgacttagtggcggacgggtgagtaacgcgtgggtaacctgccttgtacagggggataacagttagaaatgactgctaataccgcataagcctttagtgccgcatggcacagaaggaaaagatttatcggtacaagatggacccgcgtctgattagctagttggtgaggtaatggcccaccaaggcgacgatcagtagccgacttgagagagtgatcggccacattgggactgagacacggcccaaactcctacgggaggcagcagtggggaatattgcacaatgggggaaaccctgatgcagcgacgccgcgtgaaggaagaagtatttcggtatgtaaacttctatcagcaaggaagataatgacggtacttgactaagaagccccggctaactacgtgccagcagccgcggtaatacgtagggggcaagcgttatccggatttactgggtgtaaagggagcgtaggtggcatggcaagtcagatgtgaaagcccggggctcaaccccgggactgcatttgaaactgccaggctggagtgcaggagaggtaagtggaattcctagtgtagcggtgaaatgcgtagatattaggaggaacaccagtggcgaaggcggcttactggactgtaactgacactgaggctcgaaagcgtggggagcaaacaggattagataccctggtagtccacgccgtaaacgatgaatactaggtgtcgggggtcacacgaccttcggtgccgcagctaacgcaataagtattccacctggggagtacgttcgcaagaatgaaactcaaaggaattgacggggacccgcacaagcggtggagcatgtggtttaattcgaagcaacgcgaagaaccttaccaggtcttgacatccccctgaccgtcacataactgtgacttctcttcggagcaggggtgacaggtggtgcatggttgtcgtcagctcgtgtcgtgagatgttgggttaagtcccgcaacgagcgcaacccttatctttagtagccagcatttcggatgggcactctagagagactgccagggataacctggaggaaggtggggatgacgtcaaatcatcatgccccttatgatctgggctacacacgtgctacaatggcgtaaacaaagagaagcaagagggcgacctggagcaaatctcaaaaataacgtctcagttcggattgtagtctgcaactcgactacatgaagctggaatcgctagtaatcgcgaatcagaatgtcgcggtgaatacgttcccgggtcttgtacacaccgcccgtcacaccatgggagttggatatgcccgaagtcagtgacccaaccgtaaggagggagctgccgaaggtggagccaataactggggtg

SEQ ID NO: 640 - DNA, 1348 bp, Anaerococcus nagyae
ttaatgaacccttcggggagaattaaagcggattagtggcgaacgggtgagtaacgcgtgagtaacctgccttacacaaggggatagcctttggaaacgaagaataataccctataaaaccataaaggcacatgcaattatggtcaaagtattagcggtgtaagatggacttgcgtctgattagctagttggtgagataaaagcccaccaaggcaacgatcagtagccggcttgagagagtgtacggccacattgggactgagacacggcccagactcctacgggaggcagcagtggggaattttgcacaatgggggaaaccctgatgcagcgacgccgcgtgatttagaaggccttcgggttgtaaaaatcttttgtataggaagaaaatgacagtactatacgaataaggtccggctaattacgtgccagcagccgcggtaatacgtaaggaccgagcgttgtccggaatcattgggcgtaaagggtacgtaggcggctagaaaagttagaagtcaaaggctatagctcaactatagtaagcttctaaaactatttagcttgagagatggaagggaaagtggaattcctagtgtagcggtggaatgcgcagatattaggaggaataccggtggcgaaggcgactttctggccattttctgacgctgaggtacgaaagcgtgggtagcaaacaggattagataccctggtagtccacgccgtaaacgatgagtgttaggtgtctggagtcaaatctgggtgccgcagcaaacgcattaaacactccgcctggggagtacgcacgcaagtgtgaaactcaaaggaattgacggggacccgcacaagcagcggagcatgtggtttaattcgacgcaacgcgaagaaccttaccaagtcttgacatattttagaagcaattagagataattgcctatatcttcggataactaaaatacaggtggtgcatggttgtcgtcagctcgtgtcgtgagatgttgggttaagtcccataacgagcgcaacccctattgctagttaccatcattaagttggggactctagtaatactgccggtgacaaaccggaggaaggtggggatgacgtcaaatcatcatgccctttatgacttgggctacacacgtgctacaatggcaggtacacagggaagcaagactgtgaagttaagcaaaactcaaaaagcctgtcccagttcggattgcactctgcaactcgagtgcatgaagttggagttgctagtaatcgcagatcagaatgctgcggtgaatgcgttcccgggtcttgtacacaccgcccgtcacaccatggaagttggcaatacccgaagcct

SEQ ID NO: 641 - DNA, 1411 bp, Anaeromicrobium sediminis
  misc_feature (1381)..(1381): n is a, c, g, or t
caaaggccgcgtgctaccatgcaagtcgagcgagattctttagttgatccttcgggtgattctaaagaaggacagcggcggacgggtgagtaacgcgtaggcaacctgccccatacattgggatagccctgggaaactgggtgtaataccgaataacactttgaaatggcatcattttaaagtcaaaactccggtggtatgggatgggcctgcgtctgattagctagttggtaaggtaatggcttaccaaggcgacgatcagtagccgacctgagagggtgatcggccacactggaactgagacacggtccagactcctacgggaggcagcagtggggaatattgcacaatgggcgaaagcctgatgcagcaacgccgcgtgagtgatgaaggctttcgggtcgtaaaactctgtcctaaaggaagaataatgacggtactttaggaggaagccccggctaactacgtgccagcagccgcggtaatacgtagggggcaagcgttatccggatttactgggcgtaaagggtgtgtaggcggttatgcaagttgatggtgaaaggctacggctcaaccgtagtaagccgtcaaaactgcatgacttgagtgcaggagaggagagtggaattcctagtgtagcggtgaaatgcgtagatattaggaggaacaccagtggcgaaggcgactctctggactgttactgacgctgaggcacgaaagcgtggggagcgaacaggattagataccctggtagtccacgccgtaaacgatgaatgctaggtgtcgggggtcgaacctcggtgccgcagctaacgcattaagcattccgcctggggagtacggtcgcaagactgaaactcaaaggaattgacggggacccgcacaagcagcggagcatgtggtttaattcgaagcaacgcgaagaaccttaccaggacttgacatcctctgcattacccttaatcggggaaatcccttcggggacagagtgacaggtggtgcatggttgtcgtcagctcgtgtcgtgagatgttgggttaagtcccgcaacgagcgcaacccttatctttagttgccagcaccttgggtgggcactctagagagactgccggtgataaaccggaggaaggtggggatgacgtcaaatcatcatgccccttatgttctgggctacacacgtgctacaatggctggtacaacgggctgcgaaagagtaatctggagctaatccataaagccagtcccagttcggattgtgggctgcaactcgcccacatgaagttggagttgctagtaatcgtgaatcagaatgtcgcggtgaatgcgttcccgggtcttgtacacaccgcccgtcacaccatggaagttgggggcgcccganagtcagctatccccaaccgccaaagggaag

SEQ ID NO: 642 - DNA, 1471 bp, Anaeromusa acidaminophila
  misc_feature (13)..(13): n is a, c, g, or t
gacgcaacctggnggcgtgcttaacacatgcaagtcgaacggagattcaccaatggatcttagtggcgaacgggtgagtaacgcgtaggcaatctgccttctagatggggacaacatcccgaaaggggtgctaataccgaatgttgtatgatattcgcatggagatgatactaaaggtggcctctgaatatgctaccgctagaagatgagcctgcgtctgattagctagttggaggggtaacggcccaccaaggcttcgatcagtagccggtctgagaggatgaacggccacactgggactgagacacggcccagactcctacgggaggcagcagtggggaatcttccgcaatggacgaaagtctgacggagcaacgccgcgtgagtgaagaaggttttcggatcgtaaagctctttcgttagggacgaacgtgctctttgtgaataatgaggagtaatgacggtacctaaataagaagccacggctaattacgtgccagcagccgcggtaatacgtaggtgccaagcgttgtccggaattattgggcgtaaagcgcgcgcaggcgggatatcaagtctgtcttaaaagtgcgaggctcaacctcgtgaggggacagaaactggtattcttgagtgtcggagaggaaagtggaattccaagtgtagcggtgaaatgcgtagagatttggaagaacaccagtggcgaaggcgactttctggacgatgtctgacgctgaggcgcgaaagctaggggagcgaacgggattagataccccggtagtcctagccgtaaacgatgggtactaggtgtagggggtatcgacccctcctgtgccggagttaacgcaataagtaccccgcctggggagtacggccgcaaggttgaaactcaaaggaattgacgggggcccgcacaagcggtggagtatgtggtttaattcgacgcaacgcgaagaaccttaccagggcttgacattgagtgaaagacctagagataggtccctcccttcggggacacaaaaacaggtggtgcatggctgtcgtcagctcgtgtcgtgagatgttgggttaagtcccgcaacgagcgcaacccctatcctatgttgccagcgagtaaagtcgggaactcatgggagactgccgtcgacaagacggaggaaggcggggatgacgtcaagtcatcatgccccttatgtcctgggctacacacgtactacaatggccggtaacagagggcagcgaaccgcgaggtgaagcgaatctcaaaaacccggtcccagttcggattgcaggctgcaactcgcctgcatgaagtcggaatcgctagtaatcgcaggtcagcatactgcggtgaatacgttcccgggccttgtacacaccgcccgtcacaccacgagagttggagacacccgaagccggtgaggtaaccgtaaggagccagccgtcgaaggtggagtcgatgattggggtg

SEQ ID NO: 643 - DNA, 1479 bp, Anaeromyxobacter dehalogenans
aacgaacgctggcggcgtgcctaacacatgcaagtcgagcgagagagcccgcaagggtgagtaaagcggcgcacgggtgcgtaacacgtgggtaatctgccctagagtccggaataactcgccgaaaggcgtgctaatgccggatgagaccacgggagcttcggctcctgcgggaaaaggtggcctctgtacacaagctatcgctctaggatgagcccgcggcccatcagctcgttggcggggtaacggcccaccaaggcaacgacgggtagctggtctgagaggacgatcagccacactggaactgagacacggtccagactcctacgggaggcagcagtggggaatcttgcgcaatgggcgaaagcctgacgcagcaacgccgcgtgtgtgatgaaggtcttcggatcgtaaagcactgtcgcgagggacgaataagggacgggcgaacagtccgtttcgatgacggtacctcgagaggaagcaccggctaactctgtgccagcagccgcggtaatacagagggtgcgagcgttgttcggaattattgggcgtaaagcgcgtgtaggcggcctagcaagtcggatgtgaaagccctcggcttaaccgaggaagtgcgttcgaaactactgggcttgagtaccggagagggtggcggaattcccggtgtagaggtgaaattcgtagatatcgggaggaacaccagtggcgaaggcggccacctggacggatactgacgctgagacgcgaaagcgtgggtagcaaacaggattagataccctggtagtccacgctgtaaacgatgagcgctaggtgttgcgggtgttgacccctgcagtgccgcagctaacgcattaagcgctccgcctgggaagtacggccgcaaggctaaaactcaaaggaattgacgggggcccgcacaagcggtggagcatgtggtttaattcgacgcaacgcgcagaaccttacctggtcttgacatcctcggaacctctcagagatgagggggtgcccgcaagggaaccgagagacaggtgctgcatggctgtcgtcagctcgtgtcgtgagatgttgggttaagtcccgcaacgagcgcaacccctgccgttagttgccatcattcagttgggcactctaacgggactgccggcgtcaagccggaggaaggtggggatgacgtcaagtcctcatggcctttatgaccagggctacacacgtgctacaatggccggtacagagggtcgccaagtcgcgagacggagctaatcccagaaaaccggtctcagttcggattggagtctgcaactcgactccatgaagtcggaatcgctagtaatcgcggatcagcacgccgcggtgaatacgttcccgggccttgtacacaccgcccgtcacaccatgggagtcagttgctccagaagtggccgcgccaacccgcaagggaggcaggtccctaaggagtggctggtaactggggtg

SEQ ID NO: 644 - DNA, 1452 bp, Anaerophaga thermohalophila
gatgaacgctagcgacaggcctaacacatgcaagtcgaggggtaacagtcccgttcttcggaaagggagctgacgaccggcgcacgggtgagtaacgcgtatgcaacctttcttcaacaggagaatagcccccggaaacggggattaatgctccataggactatattgttgcatgacaggatagttaaagctttggcggttgaaggtgggcatgcgtaacattagctggttggcggggtaaaggcccaccaaggcgacgatgtttaggggttctgagaggaaggtcccccacactggtactgagacacggaccagactcctacgggaggcagcagtgaggaatattggtcaatggacggaagtctgacccagccatgtcgcgtgcaggaagacggccctacgggttgtaaactgcttttgtacgggaagaaaaggtcttacgtgtaagacattgccggtaccgtacgaataagcatcggctaactccgtgccagcagccgcggtaatacggaggatgcgagcgttatccggaattattgggtttaaagggtgcgtaggcggactggtaagtcagcggtgaaatactgcagctcaactgaagttgtgccgttgatactgtcagtcttgagtatagatgaggtaggcggaatgagtagtgtagcggtgaaatgcatagatattactcagaacaccgattgcgaaggcagcttactaaactaatactgacgctgaagcacgaaagcgtgggtatcaaacaggattagataccctggtagtccacgccgtaaacgatgattactggttgtttgggcgaatgagcttaagcgactgagcgaaagcattaagtaatccacctggggagtacgtcggcaacgatgaaactcaaaggaattgacgggggcccgcacaagcggtggaacatgtggtttaattcgatgatacgcgaggaaccttacctgggcttaaatggggagtgacagatctggaaacaggtttttcttcggacactcttcaaggtgctgcatggttgtcgtcagctcgtgccgtgaggtgtcgggttaagtcccataacgagcgcaacccctgttgtcagttaccagcacgtagcggtggggactctggcaagactgccggtgtaaaccgcgaggaaggtggggatgacgtcaaatcagcacggcccttacgtccagggctacacacgtgttacaatggccggtacagcgggcagcggcgcggcgacgcgtagcgaatcccgaaagccggtcccagttcggattgaagtctgcaacccgacttcatgaagctggaatcgctagtaatcgcgcatcagccatggcgcggtgaatacgttcccgggccttgtacacaccgcccgtcaagccatggaagccgggggtacctgaagtctgtaaccgcgaggagcggcctagggtaaaaccggtgactggggct

SEQ ID NO: 645 - DNA, 1472 bp, Anaerosporomusa subterranea
gacgaacgctggcggcgtgcctaacacatgcaagtcgaacgggggatagcaatatccctagtggcgaacgggtgagtaacgcgtagacaacctgccttctagacggggacaacgttccgaaaggagcgctaataccggatgaggtctttaggctgcatagcttaaagaagaaaggtggcctctatatataagctaccgctagaagatgggtctgcgtctgattagctagttggcggggtaacggcccaccaaggcgacgatcagtagccggtctgagaggatgaacggccacactgggactgagacacggcccagactcctacgggaggcagcagtggggaatcttccgcaatggacgaaagtctgacggagcaacgccgcgtgagtgaagaaggttttcggattgtaaagctctgtcttctgggaagaatggcttccatgtgaataatgtgggagcatgacggtactagaggaggaagccacggctaactacgtgccagcagccgcggtaatacgtaggtggcaagcgttgtccggaattattgggcgtaaagcgcgcgcaggcgggaatgtaagtctgtcttaaaagtgcggtgctcaacgccgtgatgggacagaaactatatttcttgagtgcaggagaggacagtggaattcccagtgtagcggtgaaatgcgtagatattgggaggaacaccagtggcgaaggcgactgtctggactgtgtctgacgctgaggcgcgaaagccagggtagtgaacgggattagataccccggtaatcctggccgtaaacgatgggtactaggtgttgggggtatcgacccctccagtgccggagttaacgcaataagtaccccgcctggggagtacggccgcaaggttgaaactcaaaggaattgacgggggcccgcacaagcggtggagtatgtggtttaattcgacgcaacgcgaagaaccttaccagggcttgacattgagtgaaagacctagagataggtccctcccttcggggacacaaaaacaggtggtgcatggctgtcgtcagctcgtgtcgtgagatgttgggttaagtcccgcaacgagcgcaacccttattctttgttgccagcatgtaatgatgggcactcaagggagactgccgtcgacaagacggaggaaggtggggatgacgtcaagtcatcatgccccttatgtcctgggctacacacgtactacaatgggcgtaaacagagggaagcaagaccgcgaggtggagccaatcccataaatacgctctcagttcggatcggaggctgcaactcgcctccgtgaagtcggaatcgctagtaatcgcagatcagcatgctgcggtgaatacgttcccgggccttgtacacaccgcccgtcacaccacgaaagttggaaacacccgaagccggtgggctaaccgcaaggaagcagccgtcgaaggtggggccgatgattggggtg

SEQ ID NO: 646 - DNA, 1382 bp, Anaerostipes rhamnosivorans
  misc_feature (727)..(727): n is a, c, g, or t
  misc_feature (933)..(935): n is a, c, g, or t
tattttggattgaagttttcggatggatctccttaatgactgagtggcggacgggtgagtaacgcgtggggaacctgccctatacagggggataacagctggaaacggctgctaataccgcataagcgcacagaatcgcatgattcagtgtgaaaagccctggcagtataggatggtcccgcgtctgattagctggttggcggggtaacggcccaccaaggcgacgatcagtagccggcttgagagagtggacggccacattgggactgagacacggcccaaactcctacgggaggcagcagtggggaatattgcacaatgggggaaaccctgatgcagcgacgccgcgtgagtgaagaagtatttcggtatgtaaagctctatcagcagggaagaaataagacggtacctgactaagaagccccggctaactacgtgccagcagccgcggtaatacgtagggggcaagcgttatccggaattactgggtgtaaagggtgcgtaggtggcatgataagtcagaagtgaaagcccggggcttaaccccgggactgcttttgaaactgtaatgctagagtgcaggagaggtaagcggaattcctagtgtagcggtgaaatgcgtagatattaggaggaacaccagtggcgaaggcggcttactggactgtcactgacactgaggcacgaaagcgtggggagcaaacaggattagataccctggtagtcnacgccgtaaacgatgaatactaggtgtcggggccgtagaggcttcggtgccgcagcaaacgcagtaagtattccacctggggagtacgttcgcaagaatgaaactcaaaggaattgacggggacccgcacaagcggtggagcatgtggtttaattcgaagcaacgcgaagaaccttacctggtcttgacatccttctgaccggttnnnaaccgaacctttccttcgggacagaagtgacaggtggtgcatggttgtcgtcagctcgtgtcgtgagatgttgggttaagtcccgcaacgagcgcaacccctatctttagtagccagcatataaggtgggcactctagagagactgccagggataacctggaggaaggtggggacgacgtcaaatcatcatgccccttatggccagggctacacacgtgctacaatggcgtaaacaaagggaagcgaccccgcgagggcaagcaaatcccagaaataacgtctcagttcggattgtagtctgcaactcgactacatgaagctggaatcgctagtaatcgtgaatcagaatgtcacggtgaatacgttcccgggtcttgtacacaccgcccgtcacaccatgggagtcagtaacgcccgaagtcagtgacccaaccgcaaggaggaga

SEQ ID NO: 647 - DNA, 1514 bp, Anaerovibrio lipolyticus
gacgaacgctggcggcgtgcttaacacatgcaagtcgaacgggaagacatttctaacaccgagtagttgaggtgtgattaacacttggctattgggtgttagaaatggattctagtggcaaacgggtgagtaacgcgtaggcaacctgcccttcagatggggacaacatttcgaaaggaatgctaataccgaatgacgtgcgtgggtcgcatgaccgatgtaccaaaggccgggcaaccggtcactgaaggatgggcctgcgtctgattagctagttggtggggtaacggcccaccaaggcgacgatcagtagccggtctgagaggatgaacggccacattgggactgagacacggcccaaactcctacgggaggcagcagtggggaatcttccgcaatgggcgcaagcctgacggagcaacgccgcgtgagtgaagaaggttttcggatcgtaaagctctgttgtcagggacgagagacttgatcaggaaatgggtcaaggaggacggtacctgacgagaaagccacggctaactacgtgccagcagccgcggtaatacgtaggtggcgagcgttgtccggaattattgggcgtaaagggagcgcaggtgggattgtaagtcagtcttaaaagttcggggctcaaccccgtgatgggattgaaactataattcttgagtgcaggagaggaaagcggaattcctagtgtagcggtggaatgcgtagatattaggaggaacaccagtggcgaaggcggctttctggactgtaactgacactgaggctcgaaagcgtggggagcgaacaggattagataccctggtagtccacgccgtaaacgatgaatgctaggtgtaggaggtatcgaccccttctgtgccggagttaacgcaataagcattccgcctggggagtacggtcgcaagactgaaactcaaaggaattgacgggggcccgcacaagcggtggagtatgtggtttaattcgacgcaacgcgaagaaccttaccaggtcttgacattgagtgaaagacatagagatatgtcccttcttcggaacacgaaaacaggtggtgcatggctgtcgtcagctcgtgtcgtgagatgttgggttaagtcccgcaacgagcgcaacccctgtcctgtgttgccagcgtgtaaaggtgggaactcacaggagactgccgcggagaacgcggaggaaggcggggatgacgtcaagtcatcatgccccttatgacctgggctacacacgtactacaatggggcgtacagagggcagcgaaggagcgatccggagcgaatcccaaaaaacgcctcccagttcggattgcaggctgaaacccgcctgcatgaagtcggaatcgctagtaatcgcaggtcagcatactgcggtgaatacgttcccgggccttgtacacaccgcccgtcacaccacggaagtcattcacacccgaagccggtgggttaaccttatgggagcagccgtctaaggtgggggcgatgactggggtg

SEQ ID NO: 648 - DNA, 1447 bp, Andreesenia angusta
gatgaacgctggcggcgtgcttaacacatgcaagtcgagcgagagaactcgaaggaaaacttcggtcggaattcgaatgatctagcggcggacgggtgagtaacgcgtgggaaacctgccttgtacaaggggatagcctcgggaaaccgggattaataccctatgaaaccacaagaacacatgttctaatggtcaaagctccggcggtacaagatggtcccgcgtctgattagctagttggagaggtaacggctcaccaaggcgacgatcagtagccggcctgagagggtgaacggccacactggaactgagacacggtccagactcctacgggaggcagcagtggggaatattgcacaatgggggaaaccctgatgcagcgacgccgcgtgagcgaagaaggctttcgggtcgtaaagctctgtcctaagggaagatagtgacggtaccttaggaggaagccccggctaactacgtgccagcagccgcggtaatacgtagggggcgagcgttatccggaattattgggcgtaaagggttcgcaggtggtcctttaagtcaggtgtgaaaggcagtggctcaaccattgcaagcacttgaaactgaaggacttgagtacaggagaggaaagcggaattcctagtgtagcggtgaaatgcgtagatattaggaggaacaccagtggcgaaggcggctttctggactgaaactgacactgaggaacgaaagcgtggggagcaaacaggattagataccctggtagtccacgccgtaaacgatgagtgctaggtgttgggggtcgaacctcagtgccgcagctaacgcattaagcactccgcctggggagtacggtcgcaagactgaaactcaaaggaattgacggggacccgcacaagtagcggagcatgtggtttaattcgaagcaacgcgaagaaccttaccaaggcttgacatccctctgaccgcactagagatagtgcttctcttcggagcagaggtgacaggtggtgcatggttgtcgtcagctcgtgtcgtgagatgttgggttaagtcccgcaacgagcgcaacccctgcatttagttgctacattaagttgagcactctagatggactgccggtgacaaaccggaggaaggtggggatgacgtcaaatcatcatgccccttatgccttgggctacacacgtgctacaatggtcggtacaacgggcagcgaaggagcgatctggagcgaatcccaagaagccgatctcagttcggattgcaggctgcaactcgcctgcatgaagccggagttactagtaatcgcggatcagaatgccgcggtgaatacgttcccgggtcttgtacacaccgcccgtcacaccacgagagttggtaacacccgaagtcagtgagctaaccttttaggaggcagctgccgaaggtgggattgatgattggggtg

SEQ ID NO: 649 - DNA, 1398 bp, Andreprevotia lacus
ggggcttgatccacaagttagtggcgaacgggtgagtaatacatcggaacgtacccagtaatgggggataactctccgaaaggagtgctaataccgcatacgccctgagggggaaagtgggggatcgcaagacctcacgttattggagcggccgatgcctgattagctagttggtagggtaaaagcctaccaaggcgacgatcagtagcgggtctgagaggacgacccgccacactgggactgagacacggcccagactcctacgggaggcagcagtggggaatcttggacaatggacgaaagtctgatccagcaattccgcgtgggtgaagaaggccttcgggttgtaaagcccttttgtccgggaggaaatcctagtctctaataaaggctggggatgacagtaccggaagaatcagcaccggctaactacgtgccagcagccgcggtaatacgtagggtgcaagcgttaatcggaattactgggcgtaaagcgtgcgcaggtggcttgttaagacagtcgtgaaatccccgggctcaacctgggaactgcgattgtgactggctcgctagagtacggcagaggggggtggaattccacgtgtagcagtgaaatgcgtagagatgtggaggaacaccgatggcgaaggcaaccccctgggctgatactgacactcatgcacgaaagcgtggggagcaaacaggattagataccctggtagtccacgccctaaacgatgtctactagttgttggggatttcggtccttagtaacgcagctaacgcgagaagtagaccgcctggggagtacggtcgcaagattaaaactcaaaggaattgacgggggcccgcacaagcggtggatgatgtggattaattcgatgcaacgcgaaaaaccttacctggtcttgacatgtcgagaatcccgaagagactcgggagtgccgcaaggaactcgaacacaggtgctgcatggctgtcgtcagctcgtgtcgtgagatgttgggttaagtcccgcaacgagcgcaacccttgccattagttgctaccattcagttgagcactttaatgggactgccggtgacaaaccggaggaaggtggggatgacgtcaagtcctcatggcccttatgaccagggcttcacacgtcatacaatggtcggtacagagggtcgccaacccgcgagggggagccaatctcataaaaccgatcgtagtccggattgcactctgcaactcgagtgcatgaagtcggaatcgctagtaatcgcggatcagcatgtcgcggtgaatacgttcccgggccttgtacacaccgcccgtcacaccatgggagtgggttttaccagaagtagctagggtaaccttcgggagcccggttaccacggtaggattcta

SEQ ID NO: 650 - DNA, 1496 bp, Aneurinibacillus danicus
  misc_feature (809)..(809): n is a, c, g, or t
  misc_feature (1245)..(1245): n is a, c, g, or t
cgaacgctggcggcgtgcctaatacatgcaagtcgagcggaccaacggagagcttgctctcctgcggtcagcggcggacgggtgagtaacacgtaggcaacctgcctgtacgaccgggataactccgggaaaccggagctaataccggataggatttcagaccgcatggtttggaatggaaagaccctgtgtcacgtacagatgggcctgcggcgcattagctagttggtggggtaacggcctaccaaggcgacgatgcgtagccgacctgagagggtgaacggccacactgggactgagacacggcccagactcctacgggaggcagcagtagggaatcttccgcaatggacgaaagtctgacggagcaacgccgcgtgaacgaagaaggttttcggatcgtaaagttctgttgttagggaagaaccgccgggataacctcccggtctgacggtacctaacgagaaagccccggctaactacgtgccagcagccgcggtaatacgtagggggcaagcgttgtccggaattattgggcgtaaagcgcgcgcaggcggcttcttaagtcaggtgtgaaagcccacggctcaaccgtggagggccacttgaaactgggaggcttgagtgcaggagaggagagcggaattccacgtgtagcggtgaaatgcgtagagatgtggaggaacacctgtggcgaaggcggctctctggcctgtaactgacgctgaggcgcgaaagcgtggggagcgaacaggattagataccctggtagtccacgccgtaaacgatgagtgctaggtgttggggtntccaaacctcagtgccgcagctaacgcaataagcactccgcctggggagtacggccgcaaggctgaaactcaaaggaattgacggggacccgcacaagcggtggagcatgtggtttaattcgaagcaacgcgaagaaccttaccagggcttgacatcccgctgacccctctagagatagaggcttccttcgggacagcggtgacaggtggtgcatggttgtcgtcagctcgtgtcgtgagatgttgggttaagtcccgcaacgagcgcaacccttgtccttagttgccagcattcagttgggcactctagggagactgccgtcgacaagacggaggaaggtggggatgacgtcaaatcatcatgccccttatgtcctgggctacacacgtgctacaatggatggaacaacgggcagccaactcgcgagagtgagcnaatcccttaaaaccattctcagttcggattgcaggctgcaactcgcctgcatgaagccggaatcgctagtaatcgcggatcagcatgccgcggtgaatacgttcccgggtcttgtacacaccgcccgtcacaccacgagagtttgcaacacccgaagtcggtgaggtaacctaaactgccccaaaaagtattacttttcggggaccccagttgggagccagccgccgaaggtggggcagatgattggggtg

SEQ ID NO: 651 - DNA, 1461 bp, Aneurinibacillus soli
gacgaacgctggcggcgtgcctaatacatgcaagtcgagcggatcaacggagagcttgctctcctgagattagcggcggacgggtgagtaacacgtaggcaacctgcctgtacgatcgggataacttcgggaaaccgaagctaataccgaatacgacattagcccgcatgggctgatgtggaaagaccttgtgtcacgtacagatgggcctgcggcgcattagctagttggtggggtagaggcctaccaaggcgacgatgcgtagccgacctgagagggtgatcggccacactgggactgagacacggcccagactcctacgggaggcagcagtagggaatcttccgcaatggacgaaagtctgacggagcaacgccgcgtgaacgatgaaggttttcggatcgtaaagttctgttgtaagggaagaaccgccgggatgacctcccggtctgacggtaccttacgagaaagccccggctaactacgtgccagcagccgcggtaatacgtagggggcaagcgttgtccggaattattgggcgtaaagcgcgcgcaggcggttttctaagttaggtgtgaaagcccacggctcaaccgtggagggccacctaaaactgggagacttgagtgcaggagaggagagcggaattccacgtgtagcggtgaaatgcgtagagatgtggaggaacacccgtggcgaaggcggctctctggcctgtaactgacgctgaggcgcgaaagcgtggggagcaaacaggattagataccctggtagtccacgccgtaaacgatgagtgctaggtgttgggggtgaccaatcctcagtgccgcagctaacgcaataagcactccgcctggggagtacggccgcaaggctgaaactcaaaggaattgacggggacccgcacaagcggtggagcatgtggtttaattcgaagcaacgcgaagaaccttaccagggcttgacatccctctgaaatctctagagatagaggctcccttcggggcagaggtgacaggtggtgcatggttgtcgtcagctcgtgtcgtgagatgttgggttaagtcccgcaacgagcgcaacccttgtccttagttgccagcattcagttgggcactctagggagactgccgtcgacaagacggaggaaggtggggatgacgtcaaatcatcatgccccttatgtcctgggctacacacgtgctacaatggatggaacaacgggcagccaactcgcgagagtgcgcaaatcccttaaaaccattctcagttcggattgcaggctgcaactcgcctgcatgaagccggaatcgctagtaatcgcggatcagcatgccgcggtgaatacgttcccgggtcttgtacacaccgcccgtcacaccacgagagtttgcaacacccgaagtcggtgaggtaaccgcaaggagccagccgccgaaggtggggtagatgattggggtg

SEQ ID NO: 652 - DNA, 1463 bp, Aneurinibacillus thermoaerophilus
gacgaacgctggcggcgtgcctaatacatgcaagtcgagcgaaccgatggagtgcttgcattcctgaggttagcggcggacgggtgagtaacacgtaggcaacctgcctgtacgaccgggataactccgggaaaccggagctaataccggataggatgccgaaccgcatggttcggcatggaaaggcctttgagccgcgtacagatgggcctgcggcgcattagctagttggtggggtaacggcctaccaaggcgacgatgcgtagccgacctgagagggtgaacggccacactgggactgagacacgtcccagactcctacgggaggcagcagtagggaatcttccgcaatggacgaaagtctgacggagcaacgccgcgtgagtgaggaaggtcttcggatcgtaaaactctgttgtcagggaagaaccgccgggatgacctcccggtctgacggtacctgacgagaaagccccggctaactacgtgccagcagccgcggtaatacgtagggggcaagcgttgtccggaattattgggcgtaaagcgcgcgcaggcggcttcttaagtcaggtgtgaaagcccacggctcaaccgtggagggccatctgaaactggggagcttgagtgcaggagaggagagcggaattccacgtgtagcggtgaaatgcgtagagatgtggaggaacaccagtggcgaaggcggctctctggcctgtaactgacgctgaggcgcgaaagcgtggggagcaaacaggattagataccctggtagtccacgccgtaaacgatgagtgctaggtgttggggagtccacctcctcagtgccgcagctaacgcaataagcactccgcctggggagtacggccgcaaggctgaaactcaaaggaattgacggggacccgcacaagcggtggagcatgtggtttaattcgaagcaacgcgaagaaccttaccagggcttgacatcccgctgacccctccagagatggaggtttccttcgggacagcggtgacaggtggtgcatggttgtcgtcagctcgtgtcgtgagatgttgggttaagtcccgcaacgagcgcaacccttgtcctttgttgccagcattcagttgggcactctaaggagactgccgtcgacaagacggaggaaggtggggatgacgtcaaatcatcatgccccttatgtcctgggctacacacgtgctacaatggacggtacaacgggcgtgccaacccgcgagggtgagccaatccctaaaaaccgttctcagttcggattgcaggctgcaactcgcctgcatgaagccggaatcgctagtaatcgcggatcagcatgccgcggtgaatacgttcccgggtcttgtacacaccgcccgtcacaccacgagagtttgcaacacccgaagtcggtgaggtaaccttctggagccagccgccgaaggtggggcagatgattggggtg

SEQ ID NO: 653 - DNA, 1476 bp, Anoxybacillus amylolyticus
gacgaacgctggcggcgtgcctaatacatgcaagtcgagcggaccgaataggagcttgcttctgttcggttagcggcggacgggtgagtaacacgtgggcaacctgcccgtaagaccgggataacttcgggaaaccggagctaataccggataacaccgaagaccgcatggtctttggttgaaaggcggcgcaagctgtcacttacggatgggcccgcggcgcattagctagttggtgaggtaacggctcaccaaggcgacgatgcgtagccgacctgagagggtgatcggccacactgggactgagacacggcccagactcctacgggaggcagcagtagggaatcttccgcaatggacgaaagtctgacggagcaacgccgcgtgagcgaagaaggtcttcggattgtaaagctctgttgttagggaagaacaagtaccgcagtaactggcggtaccttgacggtacctaacgagaaagccacggctaactacgtgccagcagccgcggtaatacgtaggtggcaagcgttgtccggaattattgggcgtaaagcgcgcgcaggcggtcctttaagtctgatgtgaaagcccacggctcaaccgtggagggtcattggaaactgggggacttgagtgcagaagaggagagcggaattccacgtgtagcggtgaaatgcgtagagatgtggaggaacaccagtggcgaaggcggctctctggtctgtaactgacgctgaggcgcgaaagcgtggggagcaaacaggattagataccctggtagtccacgccgtaaacgatgagtgctaagtgttagaggggttacaccctttagtgctgtagctaacgcattaagcactccgcctggggagtacgctcgcaagagtgaaactcaaaggaattgacgggggcccgcacaagcggtggagcatgtggtttaattcgaagcaacgcgaagaaccttaccaggtcttgacatcccttgacaacccaagagattgggcgttccccttcgggggacaaggtgacaggtggtgcatggttgtcgtcagctcgtgtcgtgagatgttgggttaagtcccgcaacgagcgcaacccttgaccttagttgccagcattcagttgggcactctaaggtgactgccgatgacaaatcggaggaaggtggggatgacgtcaaatcatcatgccccttatgacctgggctacacacgtgctacaatgggcggtacaaagggttgcaaacccgcgagggggagccaatcccaaaaagccgctctcagttcggattgcaggctgcaactcgcctgcatgaagccggaatcgctagtaatcgcggatcagcatgccgcggtgaatacgttcccgggccttgtacacaccgcccgtcacaccacgagagtttgcaacacccgaagtcggtgaggtaacccttttgggagccagccgccgaaggtggggcagatgattggggtg

SEQ ID NO: 654 - DNA, 1410 bp, Anoxybacillus ayderensis
acgctggcggcgtgcctaatacatgcaagtcgagcggacgattcaaaagcttgcttttgaatcgttagcggcggacgggtgagtaacacgtgggcaacctgccctgtagacggggataacaccgagaaatcggtgctaataccggataacgcgaaagaccgcatggtttttcgttgaaaggcggcgcaagctgtcgctacaggatgggcccgcggcgcattagctagttggtgaggtaacggctcaccaaggcgacgatgcgtagccgacctgagagggtgatcggccacactgggactgagacacggcccagactcctacgggaggcagcagtagggaatcttccgcaatggacgaaagtctgacggagcaacgccgcgtgagcgaagaaggccttcgggtcgtgaagctctgttgttagggaagaacaagtaccgcagtcgctggcggtaccttgacggtacctaacgagaaagccacggctaatacgtgccagcagccgcggtaatacgtaggtggcaagcgttgtccggaattattgggcgtaaagcgcgcgcaggcggttccttaagtctgatgtgaaagcccacggctcaaccgtggagggtcattggaaactgggggacttgagtgcagaagaggagagcggaattccacgtgtagcggtgaaatgcgtagagatgtggaggaacaccagtggcgaaggcggctttctggtctgtaactgacgctgaggcgcgaaagcgtggggagcaaacaggattagataccctggtagtccacgccgtaaacgatgagtgctaagtgttagagggtatccaccctttagtgctgtagctaacgcattaagcactccgcctggggagtacgctcgcaagagtgaaactcaaaggaattgacgggggcccgcacaagcggtggagcatgtggtttaattcgaagcaacgcgaagaaccttaccaggtcttgacatcccctgacaacccgagagatcgggcgttcccccttcggggggacagggtgacaggtggtgcatggttgtcgtcagctcgtgtcgtgagatgttgggttaagtcccgcaacgagcgcaaccctcgaccttagttgccagcattcagttgggcactctaaggtgactgccggctaaaagtcggaggaaggtggggatgacgtcaaatcatcatgccccttatgacctgggctacacacgtgctacaatgggcggtacaaagggttgcgaacccgcgagggggagccaatcccaaaaagccgctctcagttcggattgcaggctgcaactcgcctgcatgaagccggaatcgctagtaatcgcggatcagcatgccgcggtgaatacgttcccgggccttgtacacaccgcccgtcacaccacgagagtttgcaacaccc

SEQ ID NO: 655 - DNA, 1478 bp, Anoxybacillus gonensis
gacgaacgctggcggcgtgcctaatacatgcaagtcgagcggacgattcaaaagcttgcttttggatcgttagcggcggacgggtgagtaacacgtgggcaacctgccctgtagacggggataacaccgagaaatcggtgctaataccggataatacgaaaggccgcatggtctttcgttgaaaggcggcgcaagctgtcgctacaggatgggcccgcggcgcattagctagttggtgaggtaacggctcaccaaggcgacgatgcgtagccgacctgagagggtgatcggccacactgggactgagacacggcccagactcctacgggaggcagcagtagggaatcttccgcaatggacgaaagtctgacggagcaacgccgcgtgagcgaagaaggccttcgggtcgtaaagctctgttgttagggaagaacaagtaccgcagtcactggcggtaccttgacggtacctaacgaggaagccacggctaactacgtgccagcagccgcggtaatacgtaggtggcaagcgttgtccggaattattgggcgtaaagcgcgcgcaggcggttccttaagtctgatgtgaaagcccacggctcaaccgtggagggtcattggaaactgggggacttgagtgcagaagaggagagcggaattccacgtgtagcggtgaaatgcgtagagatgtggaggaacaccagtggcgaaggcggctctctggtctgtaactgacgctgaggcgcgaaagcgtggggagcaaacaggattagataccctggtagtccacgccgtaaacgatgagtgctaagtgttagagggtatccaccctttagtgctgtagctaacgcattaagcactccgcctggggagtacgctcgcaagagtgaaactcaaaggaattgacgggggcccgcacaagcggtggagcatgtggtttaattcgaagcaacgcgaagaaccttaccaggtcttgacatcccctgacaacccgagagatcgggcgttcccccttcggggggacagggtgacaggtggtgcatggttgtcgtcagctcgtgtcgtgagatgttgggttaagtcccgcaacgagcgcaaccctcgaccttagttgccagcattcagttgggcactctaaggtgactgccggctaaaagtcggaggaaggtggggatgacgtcaaatcatcatgccccttatgacctgggctacacacgtgctacaatgggcggtacaaagggtcgcgaacccgcgagggggagccaatcccaaaaagccgctctcagttcggattgcaggctgcaactcgcctgcatgaagccggaatcgctagtaatcgcggatcagcatgccgcggtgaatacgttcccgggccttgtacacaccgcccgtcacaccacgagagtttgcaacacccgaagtcggtgaggtaacccttacgggagccagccgccgaaggtggggcaaatgattggggtg

SEQ ID NO: 656 - DNA, 1478 bp, Anoxybacillus kamchatkensis
gacgaacgctggcggcgtgcctaatacatgcaagtcgagcggacgattcaaaagcttgtttttggatcgttagcggcggacgggtgagtaacacgtgggcaacctgccctgtagacggggataacaccgagaaatcggtgctaataccggataacacgaaagaccgcatggtctttcgttgaaaggcggcgcaagctgtcgctacaggatgggcccgcggcgcattagctagttggtgaggtaatggctcaccaaggcgacgatgcgtagccgacctgagagggtgatcggccacactgggactgagacacggcccagactcctacgggaggcagcagtagggaatcttccgcaatggacgaaagtctgacggagcaacgccgcgtgagcgaagaaggccttcgggtcgtaaagctctgttgttagggaagaacaagtaccgcagtcactggcggtaccttgacggtacctaacgagaaagccacggctaactacgtgccagcagccgcggtaatacgtaggtggcaagcgttgtccggaattattgggcgtaaagcgcgcgcaggcggttccttaagtctgatgtgaaagcccacggctcaaccgtggagggtcattggaaactgggggacttgagtgcagaagaggagagcggagttccacgtgtagcggtgaaatgcgtagagatgtggaggaacaccagtggcgaaggcggctctctggtctgtaactgacgctgaggcgcgaaagcgtggggagcaaacaggattagataccctggtagtccacgccgtaaacgatgagtgctaagtgttagagggtatccaccctttagtgctgtagctaacgcattaagcactccgcctggggagtacgctcgcaagagtgaaactcaaaggaattgacgggggcccgcacaagcggtggagcatgtggcttaattcgaagcaacgcgaagaaccttaccaggtcttgacatcccctgacaacccgagagatcgggcgttcccccttcggggggacagggtgacaggtggtgcatggttgtcgtcagctcgtgtcgtgagatgttgggttaagtcccgcaacgagcgcaaccctcgaccttagttgccagcattcagttgggcactctaaggtgactgccggctaaaagtcggaggaaggtggggatgacgtcaaatcatcatgccccttatgacctgggctacacacgtgctacaatgggcggtacaaagggtcgcgaacccgcgagggggagccaatcccaaaaagccgctctcagttcggattgcaggctgcaactcgcctgcatgaagccggaatcgctagtaatcgcggatcagcatgccgcggtgaatacgttcccgggccttgtacacaccgcccgtcacaccacgagagtttgcaacacccgaagtcggtgaggtaacccttacgggagccagccgccgaaggtggggcaaatgattggggtg

SEQ ID NO: 657 - DNA, 1480 bp, Anoxybacillus pushchinoensis
gacgaacgctggcggcgtgcctaatacatgcaagtcgagcggacgattcgaaagcttgcttttgaatcgttagcggcggacgggtgagtaacacgtgggcaacctgccctgtagacggggataacaccgagaaatcggtgctaataccggataacacgaaatgtcgcatgacgtttcgttgaaaggcggcgcaagctgccgctacaggatgggcccgcggcgcattagctagttggtgaggtaacggctcaccaaggcgacgatgcgtagccgacctgagagggtgatcggccacactgggactgagacacggcccagactcctacgggaggcagcagtagggaatcttccgcaatggacgaaagtctgacggagcaacgccgcgtgagcgaagaaggccttcgggtcgtaaagctctgttgttagggaagaacaagtaacgtagtaactggcgttactatgacggtacctaacgagaaagccacggctaactacgtgccagcagccgcggtaatacgtaggtggcaagcgttgtccggaattattgggcgtaaagcgcgcgcaggcggttccttaagtctgatgtgaaagcccacggctcaaccgtggagggtcattggaaactgggggacttgagtgcagaagaggagagcggaattccacgtgtagcggtgaaatgcgtagagatgtggaggaacaccagtggcgaaggcggctctctggtctgtaactgacgctgaggcgcgaaagcgtggggagcaaacaggattagataccctggtagtccacgccgtaaacgatgagtgctaagtgttagagggtatccaccctttagtgctgtagctaacgcattaagcactccgcctggggagtacgctcgcaagagtgaaactcaaaggaattgacgggggcccgcacaagcggtggagcatgtggtttaattcgaagcaacgcgaagaaccttaccaggtcttgacatcccctgacaacccgagagatcgggcgttcccccttcggggggacagggtgacaggtggtgcatggttgtcgtcagctcgtgtcgtgagatgttgggttaagtcccgcaacgagcgcaaccctcgaccttagttgccagcgagtcaagtcgggcactctaaggtgactgccggctaaaagtcggaggaaggtggggatgacgtcaaatcatcatgccccttatgacctgggctacacacgtgctacaatgggcggtacaaagggttgcgaacccgcgagggggagccaatcccaaaaagccgctctcagttcggattgcaggctgcaactcgcctgcatgaagccggaatcgctagtaatcgcggatcagcatgccgcggtgaatacgttcccgggccttgtacacaccgcccgtcacaccacgagagtttgcaacacccgaagtcggtgaggtaacccttacgggagccagccgccgaaggtggggcaaatgattggggtg

SEQ ID NO: 658 - DNA, 1122 bp, Anoxybacillus thermarum
gacgaacgctggcggcgtgcctaatacatgcaagtcgagcggacgattcaaaagcttgcttttgaatcgttagcggcggacgggtgagtaacacgtgggcaacctgccctgtagacggggataacaccgagaaatcggtgctaataccggataacacgaaagatcgcatgatctttcgttgaaaggcggcgcaagctgtcgctacaggatgggcccgcggcgcattagctagttggtgaggtaacggctcaccaaggcgacgatgcgtagccgacctgagagggtgatcggccacactgggactgagacacggcccagactcctacgggaggcagcagtagggaatcttccgcaatggacgaaagtctgacggagcaacgccgcgtgagcgaggaaggccttcgggtcgtaaagctctgttgttagggaagaacaagtaccgcagtcactggcggtaccttgacggtacctaacgagaaagccacggctaactacgtgccagcagccgcggtaatacgtaggtggcaagcgttgtccggaattattgggcgtaaagcgcgcgcaggcggttccttaagtctgatgtgaaagcccacggctcaaccgtggagggtcattggaaactgggggacttgagtgcagaagaggagagcggaattccacgtgtagcggtgaaatgcgtagagatgtggaggaacaccagtggcgaaggcggctctctggtctgtaactgacgctgaggcgcgaaagcgtggggagcaaacaggattagataccctggtagtccacgccgtaaacgatgagtgctaagtgttagagggtatccaccctttagtgctgtagctaacgcattaagcactccgcctggggagtacgctcgcaagagtgaaactcaaaggaattgacgggggcccgcacaagcggtggagcatgtggtttaattcgaagcaacgcgaagaaccttaccaggtcttgacatcccctgacaacccgagagatcgggcgttcccccttcggggggacagggtgacaggtggtgcatggttgtcgtcagctcgtgtcgtgagatgttgggttaagtcccgcaacgagcgcaaccctcgaccttagttgccagcattc

SEQ ID NO: 659 - DNA, 1475 bp, Anoxybacillus vitaminiphilus
gacgaacgctggcggcgtgcctaatacatgcaagtcgagcggaccaaagggagcttgctccctgaggttagcggcggacgggtgagtaacacgtgggcaacctgccctgcagaccgggataacttcgggaaaccggagctaataccggataataccgaaaaccgcatggttttcggttgaaaggcggctttggctgtcactgcaggatgggcccgcggcgcattagctagttggtgaggtaacggctcaccaaggcgacgatgcgtagccgacctgagagggtgatcggccacactgggactgagacacggcccagactcctacgggaggcagcagtagggaatcttccgcaatggacgaaagtctgacggagcgacgccgcgtgagcgaagaaggccttcgggtcgtaaagctctgttgtcagggaagaacaagtaccgttcgaacagggcggtaccttgacggtacctgacgagaaagccacggctaactacgtgccagcagccgcggtaatacgtaggtggcaagcgttgtccggaattattgggcgtaaagcgcgcgcaggcggttccttaagtctgatgtgaaagcccacggctcaaccgtggagggtcattggaaactggggaacttgagtgcagaagaggagagcggaattccacgtgtagcggtgaaatgcgtagagatgtggaggaacaccagtggcgaaggcggctctctggtctgtaactgacgctgaggcgcgaaagcgtggggagcaaacaggattagataccctggtagtccacgccgtaaacgatgagtgctaagtgttagagggtttccaccctttagtgctgtagctaacgcattaagcactccgcctggggagtacgctcgcaagagtgaaactcaaaggaattgacgggggcccgcacaagcggtggagcatgtggtttaattcgaagcaacgcgaagaaccttaccaggtcttgacatcccctgacaaccctagagatagggcgttccccttcgggggacagggtgacaggtggtgcatggttgtcgtcagctcgtgtcgtgagatgttgggttaagtcccgcaacgagcgcaaccctcgaccttagttgccagcattgagttgggcactctaaggtgactgccggctaaaagtcggaggaaggtggggatgacgtcaaatcatcatgccccttatgacctgggctacacacgtgctacaatgggcggtacaaagggttgcgaagccgcgaggtggagctaatcccaaaaagccgctctcagttcggattgcaggctgcaactcgcctgcatgaagccggaatcgctagtaatcgcggatcagcatgccgcggtgaatacgttcccgggccttgtacacaccgcccgtcacaccacgagagtttgcaacacccgaagtcggtgaggtaacccttacgggagccagccgccgaaggtggggcaaatgattggggtg

SEQ ID NO: 660 - DNA, 1409 bp, Aphanizomenon flosaquae
  misc_feature (1056)..(1056): n is a, c, g, or t
  misc_feature (1058)..(1058): n is a, c, g, or t
gatgaacgctggcggtatgcttaacacatgcaagtcgaacggtcttttaggagacagtggcggacgggtgagtaacgcgtaagaatctaccttcaggttggggacaaccactggaaacggtggctaataccgaatgtgccgagaggtgaaaggcttgctgcctgaagaagagcttgcgtctgattagctagttggtagtgtaagagactaccaaggcgacgatcagtagctggtctgagaggatgatcagccacactgggactgagacacggcccagactcctacgggaggcagcagtggggaattttccgcaatgggcgaaagcctgacggagcaataccgcgtgagggaggaaggctcttgggttgtaaacctcttttctcagggaagaacagaatgacggtacctgaggaataagcatcggctaactccgtgccagcagccgcggtaatacggaggatgcaagcgttatccggaatgattgggcgtaaagggtccgcaggtggcattgtaagtctgctgttaaagagtttggctcaaccaaataagagcagtggaaactacaaagctagagtgtggtcggggcagagggaattcctggtgtagcggtgaaatgcgtagatatcaggaagaacaccagtggcgaaggcgctctgctaggccgagactgacactgagggacgaaagctaggggagcgaatgggattagataccccagtagtcctagccgtaaacgatggatactaggcgtagctcgtatcgacccgagctgtgccggagctaacgcgttaagtatcccgcctggggagtacgcaggcaactgtgaaactcaaaggaattgacgggggcccgcacaagcggtggagtatgtggtttaattcgatgcaacgcgaagaaccttaccaaggcttgacatgtcacgaatcctattgaaagatgggagtgccttcgggagcgtgaacacaggtggtgcatggctgtcgtcagctcgtgtcgtgagatgttgggttaagtcccgcaacgagcgcaaccctcgtttttagttgccagcattangntgggcactctagagagactgccggtgacaaaccggaggaaggtggggatgacgtcaagtcagcatgccccttacgtcttgggctacacacgtactacaatgctacggacaaagggcagctacacagcgatgtgatgcgaatctcgtaaaccgtagctcagttcagatcgaaggctgcaactcgccttcgtgaaggaggaatcgctagtaattgcaggtcagcatactgcagtgaattcgttcccgggccttgtacacaccgcccgtcacaccatggaagttggtcacgcccgaagtcgttaccccaacctattggagggggatgcctaaggtaggactgatgactggggtg

SEQ ID NO: 661 - DNA, 1411 bp, Aphanothece sacrum
gatgaacgctggcggtatgcctaacacatgcaagtcgaacggtcacttaggtgatagtggcggacgggtgagtaacgcgtgagaatctgccctcaggatggggacaacagttggaaacgactgctaatacccgatgtgccgcaaggtgaaagatttatcgcctgaggaggagctcgcgtctgattagctagttggtaaggtaaaggcttaccaaggcatcgatcagtagctggtctgagaggatgagcagccacactgggactgagacacggcccagactcctacgggaggcagcagtggggaattttccgcaatgggcgaaagcctgacggagcaataccgcgtgagggaggaaggctcttgggttgtaaacctcttttctctgggaagaaaaaaatgacggtaccagaggaataagcatcggctaactccgtgccagcagccgcggtaatacggaggatgcaagcgttatccggaatcattgggcgtaaagcgtccgtaggtggtttttcaagtctgctgtcaaagcctggggcttaaccccagataggcagtggaaactgggagactagagttcggtaggggtagcgggaattcccagtgtagcggtgaaatgcgtagatattgggaagaacatcggtggcgaaggcgcgctactgggccgaaactgacactcacggacgaaagctaggggagcgaaagggattagatacccctgtagtcctagctgtaaacgatggaaactaggtgtggcttgtatcgacccgagccgtgccgaagctaacgcgttaagtttcccgcctggggagtacgcacgcaagtgtgaaactcaaaggaattgacgggggcccgcacaagcggtggagtatgtggtttaattcgatgcaacgcgaagaaccttaccagggcttgacatgtcgcgaatctcttagaaataggagagtgccttcgggaacgcgaacacaggtggtgcatggctgtcgtcagctcgtgtcgtgagatgttgggttaagtcccgcaacgagcgcaaccctcgtttttagttgccatcattaagttgggcactctagagagactgccggtgacaaaccggaggaaggtgaggatgacgtcaagtcagcatgccccttacgccctgggctacacacgtactacaatggttgggacaacgggtagcgaccccgcgagggcaagcgaatctcatcaaacccagcctcagttcagattgcaggctgcaactcgcctgcatgaaggaggaatcgctagtaatcgcaggtcagcatactgcggtgaattcgttcccgggccttgtacacaccgcccgtcacaccatggaagctggccacacccgaagtcgttaccctaacccttgtggagggggacgccgaaggtggggctagtgactggggtg

SEQ ID NO: 662 - DNA, 1407 bp, Aquabacter spiritensis
agcgaacgctggcggcaggcctaacacatgcaagtcgagcgcccagcaatgggagcggcagacgggtgagtaacgcgtggggatgtgcccaatggtacggaataacccagggaaacttggactaataccgtatgtgcccttcgggggaaagatttatcgccattggatcaacccgcgtcggattagctagttggtggggtaaaggcccaccaaggcgacgatccgtagctggtctgagaggatgatcagccacactgggactgagacacggcccagactcctacgggaggcagcagtggggaatattggacaatgggcgcaagcctgatccagccatgccgcgtgtgtgatgaaggccttagggttgtaaagcactttcgccggtgaagataatgacggtaaccggagaagaagccccggctaacttcgtgccagcagccgcggtaatacgaagggggctagcgttgctcggaatcactgggcgtaaagcgcacgtaggcgggtcgttaagtcaggggtgaaatcctggagctcaactccagaactgcctttgatactggcgacctagagttcgagagaggttggtggaactccgagtgtagaggtgaaattcgtagatattcggaagaacaccagtggcgaaggcggccaactggctcgatactgacgctgaggtgcgaaagcgtggggagcaaacaggattagataccctggtagtccacgccgtaaacgatggatgctagccgttggggggtttacccttcagtggcgcagctaacgccttaagcatcccgcctggggagtacggtcgcaagattaaaactcaaaggaattgacgggggcccgcacaagcggtggagcatgtggtttaattcgaagcaacgcgcagaaccttaccagcctttgacatggcaggacgatttccagagatggatctcttccagcaatggacctgcacacaggtgctgcatggctgtcgtcagctcgtgtcgtgagatgttgggttaagtcccgcaacgagcgcaaccctcgcccttagttgccagcattcagttgggcactctaaggggactgccggtgataagccgagaggaaggtggggatgacgtcaagtcctcatggcccttacgggctgggctacacacgtgctacaatggtggtgacaatgggtagcgaaagggcgacctcgagctaatctccaaaagccatctcagttcggattgcactctgcaactcgagtgcatgaagttggaatcgctagtaatcgtggatcagcatgccacggtgaatacgttcccgggccttgtacacaccgcccgtcacaccatgggagttggttttacccgaaggcgttgcgctaacccgcaagggaggcaggcgaccacggtagggtcagcgactggggtg

SEQ ID NO: 663 - DNA, 1460 bp, Aquicella lusitana
  misc_feature (732)..(732): n is a, c, g, or t
ggcggcacgcctaacacatgcaagtcgagcggtaacaggatctgtagcaatacagattgctgacgagcggcggacgggtgaggaacacgtaggaacttgcctgggagagggggataaccaagggaaactttggctaataccgcgtaaactcgagagagcaaagctgccccgcacttgttgcggggtggcgcttccagagaggcctgcgtccgattagctagttggtggggtaagagctcaccaaggcgatgatcggtaactggtctgagaggacgaccagtcacactgggactgagacacggcccagactcctacgggaggcagcagtggggaatcttggacaatgggggcaaccctgatccagcgatgccgcgtgagtgaagaaggccttcgggtcgtaaagctctttaggttgggaagaagtgtgtatgaggataattcatgcacattgacggtaccgacagaataagcaccggcaaactctgtgccagcagccgcggtaatacagagggtgcaagcgttgatcggagttactgggcgtaaagggcgcgtaggcggatgagtgtgtgtgatgtgaaagccccgggcttaacctgggaagcgcatcgcaaactactgatctggagtatgggagagggtgatggaatttccggtgtagcggtgaaatgcgtagagatcggaaggaacgtcaatggcgaaggcagtcacctggcccaatactgacgctgaggngcgaaagcgtggggagcgaacaggattagataccctggtagtccacgctgtaaacgatgaggactagatgttgattggggaaccaagcagtatcgaagctaacgcgataagtcttccgcctgggaagtacggccgcaaggttgaaactcaaaggaattgacgggggcccgcacaagcggtggagcatgtggtttaattcgatgcaacgcgaagaaccttacctacccttgacatcctgcgaatcccgatgagagttgggagtgccgaaaggaacgcagagacaggtgctgcatggctgtcgtcagctcgtgttgtgagatgttgggttaagtcccgtaacgagcgcaacccttgtccttagttgccagcattaagttggggactctaaggagactgccggtgaggaaccggaggaaggcggggacgacgtcaagtcatcatggcctttatgggtagggctacacacgtgctacaatggggcgtacagagggtagccaacccgcgagggggagccaatctcagaaagcgtctcgtagtccggattggagtctgcaactcgactccatgaagttggaatcgctagtaatcgcgaatcagcaacgtcgcggtgaatacgttcccgggccttgtacacaccgcccgtcacgtcatgggagtggatggtaccagaagtgggtagttgaaccgaaagggtgacgcctaccacggtatgattcatgactgggacg

SEQ ID NO: 664 - DNA, 1452 bp, Aquicella siphonis
ggcggcacgcctaacacatgcaagtcgagcggtagcaggggctagtagcaatactagctgctgacgagcggcggacgggtgaggaatacgtaggaacctgccctcaagcgggggataaccaagggaaactttggctaataccgcataatctcgagagagtaaagctgcccgcgagggtggcacttgaggaggggcctgcgtccgattagctagttggtgaggtaaaggctcaccaaggcggtgatcggtaactggtctgagaggacgaccagtcacactgggactgagacacggcccagactcctacgggaggcagcagtggggaatattggacaatgggggcaaccctgatccagcgatgccgcgtgagtgaagaaggccctcgggtcgtaaagctctttaggttgggaagaagtgtgcccggtgaatatccgggtatgttgacggtaccgacagaataagcaccggcaaactctgtgccagcagccgcggtaatacagagggtgcgagcgttaatcggaattactgggcgtaaagggcgcgtaggcggtaagatgtgtgtggtgtgaaagccccgggcttaacctgggaagtgcatcgcaaactatctaactggagtatatgagagggtggcggaatttccggtgtagcggtgaaatgcgtagagatcggaaggaacgtcaatggcgaaggcagccacctggcataatactgacgctgaggcgcgaaagcgtggggagcgaacaggattagataccctggtagtccacgctgtaaacgatgaggactaaatgttggtaggggaacctatcagtattgaagctaacgcgataagtcttccgcctgggaagtacggccgcaaggttgaaactcaaatgaattgacgggggcccgcacaagcggtggagcatgtggtttaattcgatgcaacgcgaagaaccttacctacccttgacatcctgcgaatcccgatgagagttgggagtgccgaaaggaacgcagagacaggtgctgcatggctgtcgtcagctcgtgttgtgagatgttgggttaagtcccgtaacgagcgcaacccttgtccttagttgccagcatttaagttggggactctaaggagactgccggtgaggaaccggaggaaggcggggacgacgtcaagtcatcatggcctttatgggtagggctacacacgtgctacaatggggcgtacagagggtcgcgaacccgcgagggggagctaatctcataaagcgtctcgtagtccggattggagtctgcaactcgactccatgaagttggaatcgctagtaatcgcgaatcagcaacgtcgcgtgaatacgttcccgggccttgtacacaccgcccgtcacgtcatgggagtggatggtaccagaagtgggtagttgaaccgaaagggagacgcttaccacggtatgattcatgactgggacg

SEQ ID NO: 665 - DNA, 1506 bp, Aquifex aeolicus
cgcgaacgctggcggcgtgcctaacacatgcaagtcgtgcgcagggtcggccccttttggggccggccgctgagcggcaaacgggtgagtaacacgtgggtaacctacccccaggagggggataaccccgggaaaccggggctaataccccataatgccacccgccactaaggcgcggtggccaaagggggcctctggccttcggccacgctcccgcctggggatgggcccgcggcccatcaggtagttggtggggtaacggcccaccaagcctatgacgggtagccggcctgagagggtggccggccacagcgggactgagacacggcccgcacccctacggggggcagcagtggggaatcgtgggcaatgggcgaaagcctgaccccgcgacgccgcgtgggggatgaagccctgcggggtgtaaacccctgtcgggggggacgatgcggacacgggttaatagcccgtgtccgtgacggtacccccagaggaagggacggctaactacgtgccagcagccgcggtaatacgtaggtcccaagcgttgcgcgaagtcactgggcgtaaagcgtccgcagccggtcgggtaagcgggatgtcaaagcccacggctcaaccgtggaccggcatcccgaactgcccgacttgaggcacgcccgggcaggcggaattcccggggtagcggtgaaatgcgtagatctcgggaggaacaccgaaggggaagccagcctgctggggctgtcctgacggtcagggacgaaagccgggggagcaaaccggattagatacccgggtagtcccggccgtaaaccatgggcgctagggcttgtccctctggggcaggctcgcagctaacgcgttaagcgccccgcctggggagtacgggcgcaagcctgaaactcaaaggaattggcgggggcccgcacaaccggtggagcgtctggttcaattcgatgctaaccgaagaaccttacccgggcttgacatgccggggagactccgcgaaagcggagttgtggaagtccctaggactttcccccggcacaggtggtgcatggccgtcgtcagctcgtgtcgtgagatgttgggttaagtcccgcaacgagcgcaacccctgcccccagttgctaccccgtttggggagcactctggggggaccgccggcgataagccggaggaagggggggatgacgtcaggtcagtatgccctttatgcccggggccacacaggcgctacagtggccgggacaatgggatgcgaccccgtaagggggagctaatccctaaacccggtcatggtgcggattgggggctgaaactcgcccccatgaagccggaatcggtagtaacggggtatcagcgatgtccccgtgaatacgttctcgggccttgcacacaccgcccgtcacgccacggaagtcggtccggccggaagtccccgagctaaccggctccttcgggagccggaggcaggggccgatggccgggccggcgactggggcg

SEQ ID NO: 666 - DNA, 1460 bp, Aquimonas voraii
attgaacgctggcggcatgcctaacacatgcaagtcgaacggcagcgcgggggcaaccctggcggcgagtggcggacgggtgaggaatgcataggaatctgcccggttgtgggggataacgtagggaaacttacgctaataccgcatacgaccttcgggtgaaagtgggggaccttcgggcctcacgcgatcggatgagcctatgcccgattagctagttggcggggtaagagcccaccaaggcgacgatcggtagctggtctgagaggatgatcagccacactgggactgagacacggcccagactcctacgggaggcagcagtggggaatattggacaatgggcgcaagcctgatccagcaatgccgcgtgtgtgaagaaggccttcgggttgtaaagcacttttgttcgggaagaaatccgtgaggttaatacccttacgggatgacggtaccgaaagaataagcaccggctaacttcgtgccagcagccgcggtaatacgaagggtgcaagcgttaatcggaattactgggcgtaaagcgtgcgtaggcggtttgttaagtcagatgtgaaagccccgggctcaacctgggaactgcatttgatactggcaggctagagtgcggtagagggtggtggaattcccggtgtagcggtgaaatgcgtagagatcgggaggaacatccgtggcgaaggcggccacctggaccagcactgacgctgaggcacgaaagcgtggggagcaaacaggattagataccctggtagtccacgccctaaacgatgcgaactggacgttggtctcactttggagatcagtgtcgaagctaacgcgttaagttcgccgcctggggagtacggtcgcaagactgaaactcaaaggaattgacgggggcccgcacaagcggtggagtatgtggtttaattcgatgcaacgcgcagaaccttacctggccttgacatgtccggaaccctgcagagatgcgggggtgccttcgggaatcggaacacaggtgctgcatggctgtcgtcagctcgtgtcgtgagatgttgggttaagtcccgcaacgagcgcaacccttgtccttagttgccagcacgtaatggtgggaactctaaggagactgccggtgacaaaccggaggaaggtggggatgacgtcaagtcatcatggcccttacggccagggctacacacgtactacaatggtcggtacagagggttgcaataccgcgaggtggagccaatcccagaaaaccgatcccagtccggattggagtctgcaactcgactccatgaagtcggaatcgctagtaatcgcggatcagcatgccgcggtgaatacgttcccgggccttgtacacaccgcccgtcacaccatgggagttggttgctccagaagtaggtagtctaaccgcaaggagggcgcttaccacggagtggtcaatgactggggtg

SEQ ID NO: 667 - DNA, 1465 bp, Aquisalimonas asiatica
attgaacgctggcggcatgcctaacacatgcaagtcgagcggcagcatcaggagcttgctcctggatggcgagcggcggacgggtgagtaacacgtgggaatctgccctttggcgggggatagcccggggaaactcggattaataccgcatactccctacgggggaaagtaggcctctgtttcatgcttacaccaaaggatgagcccgcgcccgattagctagttggtgaggtaatggcttaccaaggcgacgatcggtagctggtctgagaggatgatcagccacactgggactgagacacggcccagactcctacgggaggcagcagtggggaatattggacaatgggggaaaccctgatccagcaatgccgcgtgtgtgaagaaggcctgcgggttgtaaagcactttcagcagggaggaaaatctcacggttaatacccgtgagccttgacgttacctgcagaagaagcaccggctaactccgtgccagcagccgcggtaatacggagggtgcaagcgttaatcggaattactgggcgtaaagggcacgtaggcggccaggtaagttagctgtgaaagccccgggctcaacctgggaattgcagttaatactgcttggctagagtttggtagagggtggtggaattcccggtgtagcggtgaaatgcgtagatatcgggaggaacaccagtggcgaaggcggccacctggaccaaaactgacgctgaggtgcgaaagcgtggggagcaaacaggattagataccctggtagtccacgccgtaaacgctgagaactagccgttggacccattcaagggtttagtggcgcagctaacgcgttaagttctccgcctggggagtacggccgcaaggttaaaactcaaaggaattgacgggggcccgcacaagcggtggagcatgtggtttaattcgatgcaacgcgaagaaccttacctgcccttgacatcctcggaacttgtcagagatgacttggtgccttcgggaaccgagtgacaggtgctgcatggctgtcgtcagctcgtgtcgtgagatgttgggttaagtcccgcaacgagcgcaacccttgtccctagttgccagcgattcggtcgggaactctagggagactgccggtgacaaaccggaggaaggtggggatgacgtcaagtcatcatggcccttatgggcagggctacacacgtgctacaatggccggtacaacgggttgccaaaccgcgaggtggagccaatctcgcaaagccggtcgtagtccggattggagtctgcaactcgactccatgaagtcggaatcgctagtaatcgcagatcagcattgctgcggtgaatacgttcccgggccttgtacacaccgcccgtcacaccatgggagttggctgcaccagaagcgggtagtctaaccttcgggaagacgctcgccacggtgtggtcaatgactggggtg

SEQ ID NO: 668 - DNA, 1437 bp, Aquisphaera giovannonii
aatgaacgttggcggcgtggattaggcatgcaagtcgaacgggcctagcaataggccagtggcgcaagggtgagtaaggcgacggtaaccaaccccacggttgggtatagccgcgggaaactgcgggtaatccccagcgacataagctatcggcatcggtggcgtatcaaagctccggcgccgtgggacgggccgtcgtggtattagctagttggcggggtgatggcccaccaaggccgtgatgcctaccgggcgtgcgagcgtggcccggcacactgggactgagacactgcccagactcctacgggaggctgcagtcgagaatcttcggcaatgggcgcaagcctgaccgagcgacgccgcgtggaggacgaaggccttcgggttgtaaactcctgtcgagggggaggaaggcgcaagcttgaccgatccctggaggaagcacgggctaagttcgtgccagcagccgcggtaagacgaaccgtgcgaacgttattcggaatcactgggcttaaagcgcgtgtaggcggatgggagcgtcggcttctgaaatcccccggctcaaccggggaagtggagccgaaacgacccgtctggagggacgtagggggacctggaacttccggtggagcggtgaaatgcgttgagatcggaaggaacgcccgtggcgaaagcgaggtcctggacgtctgctgacgctgagacgcgaaagccaggggagcgaacgggattagataccccggtagtcctggccgtaaacgatgggcactgggtaggggacccttccgatgggttccctgccgtagcgaaagcgtgaagtgccccgcctggggagtatggtcgcaaggctgaaactcaaaggaattgacgggggctcacacaagcggtggagcatgtggcttaattcgaggctacgcgaagaaccttattctgggcttgacatgcagggattagccggcggaaacgtcggtgacgccgcaaggtggaacctgcacaggtgctgcatggctgtcgtcagctcgtgccgtgaggtgttgggttaagtcccgtaacgagcgaaacccctgtggtcagttgccagcgcgtcatggcggggactctgatcagaccgccggcgtcaagccggaggaaggcggggacgacgtcaagtcatcatggcccttatgcccagggctgcacacgtgctacaatggggcggacagagcgtcgccaggccgcgaggccgagccaatcgcaaaaatcgcccctcagttcggattgcgggctgcaactcgcccgcatgaagctggaatcgctagtaatcgcggatcagcactgccgcggtgaatgtgttcctgagccttgtacacaccgcccgtcaagccaccaaagcggggggcatccgaagtcgtcggagccgcgaggcaggcgccgaagatgaaacccgtgatggggact

SEQ ID NO: 669 - DNA, 1458 bp, Aquitalea magnusonii
attgaacgctggcggcatgctttacacatgcaagtcgaacggtaacagggagcttgctccgctgacgagtggcgaacgggtgagtaatgcgtcggaacgtgccgagtagtgggggataactatccgaaaggatagctaataccgcatacgctttgagaaggaaagcaggggatcgcaagaccttgcgctattcgagcggccgacgtctgattagctagttggtgaggtaagagctcaccaaggcgacgatcagtagcgggtctgagaggatgatccgccacactgggactgagacacggcccagactcctacgggaggcagcagtggggaattttggacaatgggcgcaagcctgatccagccatgccgcgtgtctgaagaaggccttcgggttgtaaaggacttttgtcagggaggaaatccctagcgctaatatcgctgggggatgacagtacctgaagaataagcaccggctaactacgtgccagcagccgcggtaatacgtagggtgcaagcgttaatcggaattactgggcgtaaagcgtgcgcaggcggttgtgtaagtctgatgtgaaagccccgggcttaacctgggaactgcattggagactgcacggctagagtgcgtcagaggggggtagaattccgcgtgtagcagtgaaatgcgtagagatgcggaggaataccgatggcgaaggcagccccctgggatgacactgacgctcatgcacgaaagcgtggggagcaaacaggattagataccctggtagtccacgccctaaacgatgtcaactagctgttgggggtttgaatccttggtagcgtagctaacgcgagaagttgaccgcctggggagtacggccgcaaggttaaaactcaaaggaattgacggggacccgcacaagcggtggatgatgtggattaattcgatgcaacgcgaaaaaccttacctggtcttgacatgtacagaactttccagagatggattggtgcccgaaagggagctgtaacacaggtgctgcatggctgtcgtcagctcgtgtcgtgagatgttgggttaagtcccgcaacgagcgcaacccttgccattagttgctaccatttagttgagcactctaatgggactgccggtgacaaaccggaggaaggtggggatgacgtcaagtcctcatggcccttatgaccagggcttcacacgtcatacaatggtcggtacagagggtcgcgaagccgcgaggtggagccaatctcataaaaccgatcgtagtccggatcgcactctgcaactcgagtgcgtgaagtcggaatcgctagtaatcgcggatcagcatgccgcggtgaatacgttcccgggtcttgtacacaccgcccgtcacaccatgggagtgagtttcaccagaagtgggtaggctaaccgtaaggaggccgcttaccacggtgggattcatgactggggtg

SEQ ID NO: 670 - DNA, 1461 bp, Arboricoccus pini
tggctcagaacgaacgctggcggcgcgcctaacacatgcaagtcgagcgcctcgcaagaggagcggcggacgggtgagtaacgcgtgggaacctgccctttggtctggaacaaccgcgggaaactgcggctaatgccggatattccctgtgggggaaagatttatcgccaaaggatgggcccgcgtccgattagcttgttggtggggtaatggcctaccaaggcatcgatcggtagctggtctgagaggatgaccagccacactgggactgagacacggcccagactcctacgggaggcagcagtggggaatcttggacaatgggcgcaagcctgatccagcgacgccgcgtgggtgatgaaggccttcgggttgtaaagcccttttcccagggaagatgatgacggtacctggggaataagcaccggctaactccgtgccagcagccgcggtaagacggagggtgctagcgttgttcggaatcactgggcgtaaagggcgcgtaggcggcctgttaagtcggatgtgaaagcccggggctcaaccccggaactgcatccgagactggcaggcttgagaccgggagaggagggtggaatatccagtgtagaggtgaaattcgtagatattggatggaacaccggtggcgaaagcggctctctggcccggatctgacgctgaggcgcgaaagcgtggggagcaaacaggattagataccctggtagtccacgccctaaacgatgtgtgctagatgtcggggggcttgcccttcggtgtcggagctaacgtgttaagcacaccgcctgggaagtacggccgcaaggttaaaactcaaaggaattgacgggggcccgcacaagcggtggagcatgtggtttaattcgacgcaacgcgcagaaccttaccagcctttgacatggtagctgcgaccttgagagatcttggtttcccgcaagggggctatcacaggtgctgcatggctgtcgtcagctcgtgtcgtgagatgttgggttaagtcccgcaacgagcgcaacccttacttctagttgccagcggtatcggccgggcactctagagggactgccggtgacaagccggaggaaggtggggatgacgtcaagtcctcatggcccttacgggctgggctacacacgtgctacaatggtggtgacagtgggcagcgaaggggcgacctggagctaatccccaaaagccacctcagttcggattgcaggctgcaactcgcctgcatgaaggtggaatcgctagtaatcgtggatcagcatgccacggtgaatacgttcccgggccttgtacacaccgcccgtcacaccatgggagttggttctaccttaagccggtgggctaaccgcgcaagcggaggcagccgtccacggtcgggtcagcgactggggtgaagtcgtaacaaggtagccgtaggggaacctgcggctggatcac

SEQ ID NO: 671 - DNA, 1458 bp, Archangium gephyra
aacgaacgctggcggcgtgcctaacacatgcaagtcgagcgcgaatggagcaatcctagtagagcggcgcacgggtgcgtaacacgtggataatctgcctgggtgtctgggataaccagtcgaaagattggctaataccggataagcccccgggagcttcggctcttgagggaaaaggtggcctctgtatacaagctatcacatccagatgagtccgcggcccatcagctagttggcggggtaatggcccaccaaggcaacgacgggtagctggtctgagaggacgatcagccacactggaactgagacacggtccagactcctacgggaggcagcagtggggaattttgcgcaatgggcgaaagcctgacgcagcaacgccgcgtgtgtgatgaaggtcttcggattgtaaagcactttcgaccgggacgaaaaccctgaggctaacatcctcaggcttgacggtaccgggagaagaagcaccggctaactctgtgccagcagccgcggtaatacagagggtgcaagcgttgttcggaattattgggcgtaaagcgcgtgtaggcggctttgcaagtcgggtgtgaaagccctcagctcaactgaggaagtgcgcccgaaactgcagagcttgagtgccggagagggtggcggaattccccaagtagaggtgaaattcgtagatatggggaggaacaccggtggcgaaggcggccacctggacggtaactgacgctgagacgcgaaagcgtggggagcaaacaggattagataccctggtagtccacgccgtaaacgatgagaactaggtgtcgtgggtgttgacccccgcggtgccgtagctaacgcattaagttctccgcctgggaagtacggtcgcaagactaaaactcaaaggaattgacgggggcccgcacaagcggtggagcatgtggtttaattcgacgcaacgcgcagaaccttacctggtcttgacatccttggaatccctcagagatgagggagtgcccgcaagggaaccaagagacaggtgctgcatggctgtcgtcagctcgtgtcgtgagatgttgggttaagtcccgcaacgagcgcaaccctcgcctttagttgccacgcaagtggatctctagagggactgccggtgttaaaccggaggaaggtggggatgacgtcaagtcctcatggcctttatgaccagggctacacacgtgctacaatggccggtacaacgcgtcgccaacccgcgagggggagctaatcgcataaaaccggtctcagttcagattggagtctgcaactcgactccatgaaggcggaatcgctagtaatcgcggatcagcacgccgcggtgaatacgttcccgggccttgtacacaccgcccgtcacaccatgggagtcgattgctccagaagtcatctcaccaagaggtgcccaaggagtggtcggtaactggggtg

SEQ ID NO: 672 - DNA, 1456 bp, Archangium violaceum
aacgaacgctggcggcgtgcctaacacatgcaagtcgagcgcgaatggagcaatcctagtagagcggcgcacgggtgcgtaacacgtggataatctgcctgggtgtctgggataaccagtcgaaagattggctaataccggataagcccccgggagcttcggctcctgagggaaaaggtggcctctgtatacaagctatcacatccagatgagtccgcggcccatcagctagttggcggggtaatggcccaccaaggcgacgacgggtagctggtctgagaggacgatcagccacactggaactgagacacggtccagactcctacgggaggcagcagtggggaattttgcgcaatgggcgaaagcctgacgcagcaacgccgcgtgtgtgatgaaggtcttcggattgtaaagcactttcgaccgggacgaaaacccctagcccaacacgctggggcttgacggtaccgggagaagaagcaccggctaactctgtgccagcagccgcggtaatacagagggtgcaagcgttgttcggaattattgggcgtaaagcgcgtgtaggcggctttgcaagtcgggtgtgaaagccctcagctcaactgaggaagtgcgcccgaaactgcagagcttgagtgccggagagggtggcggaattccccaagtagaggtgaaattcgtagatatggggaggaacaccggtggcgaaggcggccacctggacggtaactgacgctgagacgcgaaagcgtggggagcaaacaggattagataccctggtagtccacgccgtaaacgatgagaactaggtgtcgtgggtgttgacccccgcggtgccgtagctaacgcattaagttctccgcctgggaagtacggtcgcaagactaaaactcaaaggaattgacgggggcccgcacaagcggtggagcatgtggtttaattcgacgcaacgcgcagaaccttacctggtcttgacatcctcggaacctttcagagatgagagggtgcccgcaagggaaccgagacaggtgctgcatggctgtcgtcagctcgtgtcgtgagatgttgggttaagtcccgcaacgagcgcaaccctcgcctttagttgccgcgcaagcggatctctagagggactgccggtgttaaaccggaggaaggtggggatgacgtcaagtcctcatggcctttatgaccagggctacacacgtgctacaatggccggtacaacgcgtcgccaactcgcgagagggagctaatcgcataaaaccggtctcagttcagattggagtctgcaactcgactccatgaaggcggaatcgctagtaatcgcggatcagcacgccgcggtgaatacgttcccgggccttgtacacaccgcccgtcacaccatgggagtcgattgctccagaagtcatctcaccaagaggtgcccaaggagtggtcggtaactggggtg

SEQ ID NO: 673 - DNA, 1385 bp, Arcobacter anaerophilus
gaacgagaacggattaaagcttgctttaattgtcagctaagtggcgcacgggtgagtaatgtatagttaacctgccctagagagagggataacagatggaaacgtctgctaagacctcatatgcctttaaaacaaaagtttgcaagggaaatatttatagctctaggatgggactgtattgtatcagttagttggtgaggtaatggctcaccaagacaatgacgcataactggtttgagaggatgatcagtcacactggaactgagacacggtccagactcctacgggaggcagcagtggggaatattgcacaatggaggaaactctgatgcagcaacgccgcgtggaggatgacacttttcggagcgtaaactccttttatataggaagataatgacggtactatatgaataagcaccggctaactccgtgccagcagccgcggtaatacggagggtgcaagcgttactcggaatcactgggcgtaaagagcgtgtaggcggatagataagtcagaagtgaaatccaatagctcaactattgaactgcttttgaaactgtctatctagagtatgggagaggtagatggaatttctggtgtaggggtaaaatccgtagagatcagaaggaataccgattgcgaaggcgatctactggaacattactgacgctgagacgcgaaagcgtggggagcaaacaggattagataccctggtagtccacgccctaaacgatgtgcactagttgttgcgatgctagacattgcagtaatgcagtacacacattaagtgcaccgcctggggagtacggtcgcaagattaaaactcaaaggaatagacggggacccgcacaagcggtggagcatgtggtttaattcgacgatacgcgaagaaccttacctggacttgacatagtaagaaccatttagagatagatgggtgtctgcttgcagaaacttatatacaggtgctgcacggctgtcgtcagctcgtgtcgtgagatgttgggttaagtcccgcaacgagcgcaacccacgtcattagttgctaacacttcgggtgagaactctaatgagactgcctacgcaagtaggaggaaggtgtggacgacgtcaagtcatcatggcccttacgtccagggctacacacgtgctacaatggagtatacaaagagcagcaataccgtgaggtggagcaaatcttaaaaatacttcccagttcggatagtagtctgcaactcgactacttgaagttggaatcgctagtaatcgtagatcagcaatgctacggtgaatacgttcccgggtcttgtactccgtcacaccatgggagttgaactcattcgaagcggggatgctaaactagctaccctcccaccatgtagga

SEQ ID NO: 674 - DNA, 1402 bp, Arcobacter aquimarinus
taacacatgcaagtcgaacgagaacggattatagcttgctataattgtcagctaagtggcgcacgggtgagtaatgtatagataacctgccctctagaaaggaataacagatggaaacgtctgctaatgccctatatgcctttaatacataagtatgcaagggaaacgctttagtgctagaggatgggtctgtatggtatcagtttgttggtgaggtaatggctcaccaagactatgacgcctaactggtttgagaggatgatcagtcacactggaactgagacacggtccagactcctacgggaggcagcagtggggaatattgcacaatggacgaaagtctgatgcagcaacgccgcgtggaggatgacacatttcggtgcgtaaactccttttatataggaagataatgacggtactatatgaataagcaccggctaactccgtgccagcagccgcggtaatacggagggtgcaagcgttactcggaatcactgggcgtaaagagcgtgtaggcgggtatataagtcagaagtgaaatcctatagcttaactatagaactgcttttgaaactgtatacctagaatgtgggagaggtagatggaatttctggtgtaggggtaaaatccgtagagatcagaaggaataccgattgcgaaggcgatctactggaacattattgacgctgagacgcgaaagcgtggggagcaaacaggattagataccctggtagtccacgccctaaacgatgtacactagttgttgtgaggctcgaccttgcagtaatgcagttaacacattaagtgtaccgcctggggagtacggtcgcaagattaaaactcaaaggaatagacggggacccgcacaagcggtggagcatgtggtttaattcgacgatacacgaagaaccttacctggacttgacatagtaagaactttctagagatagattggtgtctgcttgcagaaacttatatacaggtgctgcacggctgtcgtcagctcgtgtcgtgagatgttgggttaagtcccgcaacgagcgcaaccctcgtcattagttgctaacagttcggctgagaactctaatgagactgcctacgcaagtaggaggaaggtgaggacgacgtcaagtcatcatggcccttacgtccagggctacacacgtgctacaatggggtatacaaagagcagcaataccgcgaggtggagcaaatctcaaaaatatctcccagttcggattgtagtctgcaactcgactacatgaagttggaatcgctagtaatcgtagatcagctatgctacggtgaatacgttcccgggtcttgtactcaccgcccgtcacaccatgggagttgaactcattcgaagcggggatgctaaaatagctaccttccacagtgg

SEQ ID NO: 675 - DNA, 1439 bp, Arcobacter bivalviorum
agtgaacgctggcggcgtgcctaacacatgcaagtcgaacgagaacggacttaagcttgcttaagttgtcagctaagtggcgcacgggtgagtaatgtatagttaacctgccctcgagaaaggaataacagatggaaacgtctgctaatgccctatatgcccataatacataagtatgctggggaaatgctttagtgctcgaggatgggactgtatggtatcagatagttggtgaggtaatggctcaccaagtcaatgacgcctaactggtttgagaggatgatcagtcacactggaactgagacacggtccagactcctacgggaggcagcagtggggaatattgcacaatggaggaaactctgatgcagcaacgccgcgtggaggatgacacttttcggagcgtaaactccttttatataggaagataatgacggtactatatgaataagcaccggctaactccgtgccagcagccgcggtaatacggagggtgcaagcgttactcggaatcactgggcgtaaagagcgtgtaggcgggttattaagtcagaagtgaaatcctatggctcaaccatagaactgcttttgaaactggtaacctagagtatgggagaggtagatggaatttctggtgtaggggtaaaatccgtagagatcagaaggaataccgattgcgaaggcgatctactggaacattactgacgctgagacgcgaaagcgtggggagcaaacaggattagataccctggtagtccacgccctaaacgatgtacactagttgttgccatgctagacatggcagtaatgcagttaacacattaagtgtaccgcctggggagtacggtcgcaagattaaaactcaaaggaatagacggggacccgcacaagcggtggagcatgtggtttaattcgacgatacgcgaagaaccttacctggacttgacatttacagaactttcaagagattgattggtgtctgcttgcagaaactgtaggacaggtgctgcacggctgtcgtcagctcgtgtcgtgagatgttgggttaagtcccgcaacgagcgcacccacgtcgttagttgctaacagttcggctgagaactctaacgagactgcctgggcaaccaggaggaaggtgtggacgacgtcaagtcatcatggcccttacgtccagggctacacacgtgctacaatggggtatacaaagagccgcaataccgcgaggtggagcaaatctcaaaaatatctcccagttcggattgtactctgcaactcgagtgcatgaagttggaatcgctagtaatcgtagatcagcaacgctacggtgaatacgttcccgggtcttgtactcaccgcccgtcacaccatgggagttgaactcattcgaagcggggatgctaagatagctaccctccacagtggattcagcgactggggtg

SEQ ID NO: 676 - DNA, 1503 bp, Arcobacter canalis
agagtttgatcctggctcagagtgaacgctggcggcgtgcttaacacatgcaagtcgaacgagaacgggattagcttgctaatctgtcagctaagtggcgcacgggtgagtaatatataggtaacgtgccttcaagagggggataacagatggaaacgtctgctaaaaccccatatgcctttaatgcgaaagtatgcaagggaaatatttatagcttgaagatcggcctgtacagtatcagatagttggtgaggtaatagctcaccaagtcaatgacgcttaactggtttgagaggatgatcagtcacactggaactgagacacggtccagactcctacgggaggcagcagtggggaatattgcacaatgggggaaaccctgatgcagcaacgccgcgtggaggatgacacatttcggtgcgtaaactccttttatataagaagataatgacggtattatatgaataagcaccggctaactccgtgccagcagccgcggtaatacggagggtgcaagcgttactcggaatcactgggcgtaaagagcgtgtaggcggatagataagtcagaagtgaaatccaatagcttaactattgaactgcttttgaaactgtctatctagagtatgggagaggtagatggaatttctggtgtaggggtaaaatccgtagagatcagaaggaataccgattgcgaaggcgatctactggaacataactgacgctgagacgcgaaagcgtggggagcaaacaggattagataccctggtagtccacgccctaaacgatgtacactagttgttgctatgctcgacatagcagtaatgcagttaacacattaagtgtaccgcctggggagtacggtcgcaagattaaaactcaaaggaatagacggggacccgcacaagcggtggagcatgtggtttaattcgacgatacgcgaagaaccttacctggtcttgacatagtaagaaccatttagagatagatgggtgtctgcttgcagaaacttatatacaggtgctgcacggctgtcgtcagctcgtgtcgtgagatgttgggttaagtcccgcaacgagcgcaaccctcgtcattagttgctaacacttcgggtgagaactctaatgagactgcctacgcaagtaggaggaaggtgaggacgacgtcaagtcatcatggcccttacgaccagggctacacacgtgctacaatggggtatacaaagagcagcgatacagtgatgtggagcaaatctaaaaaatacctcccagttcggattgtagtctgcaactcgactacatgaagttggaatcgctagtaatcgtagatcagcaatgctacggtgaatacgttcccgggtcttgtactcaccgcccgtcacaccatgggagttgatttcactcgaagcggggatgctaagatagctaccctccacagtggaattagcgactggggtgaagtcgtaacaaggtaaccgtaggagaacctgcggttggatcacct

SEQ ID NO: 677 - DNA, 1440 bp, Arcobacter cibarius
agtgaacgctggcggcgtgcttaacacatgcaagtcgaacgagaacgggttatagcttgctataattgtcagctaagtggcgcacgggtgagtaatgtataggtaatatgcctcttactaagggataacaaatggaaacgtttgctaataccttatactccttactaactaaagttagtaagggaaagatttattggtaagagattagcctgtattgtatcagttagttggtggggtaatggcctaccaagacaatgacgcataactggtttgagaggatgatcagtcacactggaactgagacacggtccagactcctacgggaggcagcagtggggaatattgcacaatggacgaaagtctgatgcagcaacgccgcgtggaggatgacacatttcggtgcgtaaactccttttatataagaagataatgacggtattatatgaataagcaccggctaactccgtgccagcagccgcggtaatacggggggtgcaagcgttactcggaatcactgggcgtaaagagcatgtaggcggattaataagtttgaagtgaaatcctatagcttaactatagaactgctttgaaaactgttagtctagaatgtgggagaggtagatggaatttctggtgtaggggtaaaatccgtagagatcagaaggaataccgattgcgaaggcgatctactggaacattattgacgctgagatgcgaaagcgtggggagcaaacaggattagataccctggtagtccacgccctaaacgatgtacactagttgttgtgagacttgatcttgcagtaatgcagttaacacattaagtgtaccgcctggggagtacggtcgcaagattaaaactcaaaggaatagacggggacccgcacaagcggtggagcatgtggtttaattcgacgatacacgaagaaccttacctggacttgacatagtaagaactttctagagatagattggtgtctgcttgcagaaacttatatacaggtgctgcacggctgtcgtcagctcgtgtcgtgagatgttgggttaagtcccgcaacgagcgcaaccctcgtccttagttgctaacagttcggctgagaactctaaggagactgcctacgcaagtaggaggaaggtgaggacgacgtcaagtcatcatggcccttacgtccagggctacacacgtgctacaatgggatatacaatgagccgcaatacggtgacgtggagcaaatcttataaaatatctcccagttcggattgtagtctgcaactcgactacatgaagttggaatcgctagtaatcgtagatcagctatgctacggtgaatacgttcccgggtcttgtactcaccgcccgtcacaccatgggagttgaactcattcgaagcggggatgctaaagtagctaccttccacagtggattcagcgactggggtg

SEQ ID NO: 678 - DNA, 1402 bp, Arcobacter cloacae
taacacatgcaagtcgaacgagaacgggatatagcttgctatatttgtcagctaagtggcgcacgggtgagtaatgtatagataacctgcccttaagaaaggaataacagttggaaacgactgctaatgccctatatgcctttaatacataagtatgcaagggaaacgctttagtgcttaaggatgggtctgtatggtatcagcttgttggtgaggtaatggctcaccaaggctatgacgcctaactggtttgagaggatgatcagtcacactggaactgagacacggtccagactcctacgggaggcagcagtggggaatattgcacaatggacgaaagtctgatgcagcaacgccgcgtggaggatgacacatttcggtgcgtaaactccttttatataggaagataatgacggtactatatgaataagcaccggctaactccgtgccagcagccgcggtaatacggagggtgcaagcgttactcggaatcactgggcgtaaagagcgtgtaggcgggtatataagtcagaagtgaaatccaatagcttaactattgaactgcttttgaaactgtatacctagaatgtgggagaggtagatggaatttctggtgtaggggtaaaatccgtagagatcagaaggaataccgattgcgaaggcgatctactggaacattattgacgctgagacgcgaaagcgtggggagcaaacaggattagataccctggtagtccacgccctaaacgatgtacactagttgttgtgaggctcgaccttgcagtaatgcagttaacacattaagtgtaccgcctggggagtacggtcgcaagattaaaactcaaaggaatagacggggacccgcacaagcggtggagcatgtggtttaattcgacgatacacgaagaaccttacctggacttgacatagtaagaactttctagagatagattggtgtctgcttgcagaaacttatatacaggtgctgcacggctgtcgtcagctcgtgtcgtgagatgttgggttaagtcccgcaacgagcgcaaccctcgtcattagttgctaacagttcggctgagaactctaatgagactgcctacgcaagtaggaggaaggtgaggacgacgtcaagtcatcatggcccttacgtccagggctacacacgtgctacaatggggtatacaaagagcagcaatacggtgacgtggagcaaatctcaaaaatatctcccagttcggattgtagtctgcaactcgactacatgaagttggaatcgctagtaatcgtagatcagctatgctacggtgaatacgttcccgggtcttgtactcaccgcccgtcacaccatgggagttgaactcattcgaagcggggatgctaaagtagctaccttccacagtgg

SEQ ID NO: 679 - DNA, 1438 bp, Arcobacter cryaerophilus
  misc_feature (171)..(171): n is a, c, g, or t
  misc_feature (912)..(912): n is a, c, g, or t
  misc_feature (1074)..(1074): n is a, c, g, or t
agtgaacgctggcggcgtgcttaacacatgcaagtcgaacgagaacggattatagcttgctataattgtcagctaagtggcgcacgggtgagtaatgtataggtaatatgcctcttactaagggataacaattggaaacgattgctaataccttatactccttgttaactnaagttaataagggaaagatttattggtaagagattagcctgtattgtatcagttagttggtggggtaatggcctaccaagacaatgacacataactggtttgagaggatgatcagtcacactggaactgagacacggtccagactcctacgggaggcagcagtggggaatattgcacaatggacgaaagtctgatgcagcaacgccgcgtggaggatgacacatttcggtgcgtaaactccttttatatgagaagataatgacggtattatatgaataagcaccggctaactccgtgccagcagccgcggtaatacggggggtgcaagcgttactcggaatcactgggcgtaaagagcatgtaggcggattgataagtttgaagtgaaatcctatagcttaactatagaactgctttgaaaactgttaatctagaatgtgggagaggtagatggaatttctggtgtaggggtaaaatccgtagagatcagaaggaataccgattgcgaaggcgatctactggaacattattgacgctgagatgcgaaagcgtggggagcaaacaggattagataccctggtagtccacgccctaaacgatgtacactagttgttgtgagacttgatcttgcagtaatgcagttaacacattaagtgtaccgcctggggagtacggtcgcaagattaaaactcaaaggaatagacggggacccgcacaagcggtggagcatgtggtttaatncgaagatacacgaagaaccttacctggacttgacatagtaagaactttctagagatagattggtgtctgcttgcagaaacttatatacaggtgctgcacggctgtcgtcagctcgtgtcgtgagatgttgggttaagtcccgcaacgagcgcaaccctcgtntttagttgctaacagttcggctgagaactctaaacagactgcctacgcaagtaggaggaaggtgaggacgacgtcaagtcatcatggcccttacgtccagggctacacacgtgctacaatgggatatacaaagagccgcaatacggtgacgtggagcaaatcttataaaatatctcccagttcggattgtagtctgcaactcgactacatgaagttggaatcgctagtaatcgtagatcagctatgctacggtgaatacgttcccgggtcttgtactcaccgcccgtcacaccatgggagtcgaactcattcgaagcggggatgctaaaatagctaccttccacagtggatttggcgactgggg

SEQ ID NO: 680 - DNA, 1402 bp, Arcobacter defluvii
taacacatgcaagtcgaacgagaacggattatagcttgctataattgtcagctaagtggcgcacgggtgagtaatgtatagataacctgccctctagaaaggaataacagatggaaacgtctgctaatgccctatatgcctttaatacataagtatgcaagggaaacgctttagtgctagaggatgggtctgtatggtatcagcttgttggtgaggtaatggctcaccaaggcaatgacgcctaactggtttgagaggatgatcagtcacactggaactgagacacggtccagactcctacgggaggcagcagtggggaatattgcacaatggacgaaagtctgatgcagcaacgccgcgtggaggatgacacatttcggtgcgtaaactccttttatataggaagataatgacggtactatatgaataagcaccggctaactccgtgccagcagccgcggtaatacggagggtgcaagcgttactcggaatcactgggcgtaaagagcgtgtaggcgggtatataagtcagaagtgaaatccaatagcttaactattgaactgcttttgaaactgtatacctagaatgtgggagaggtagatggaatttctggtgtaggggtaaaatccgtagagatcagaaggaataccgattgcgaaggcgatctactggaacattattgacgctgagacgcgaaagcgtggggagcaaacaggattagataccctggtagtccacgccctaaacgatgtacactagttgttgtgaggctcgaccttgcagtaatgcagttaacacattaagtgtaccgcctggggagtacggtcgcaagattaaaactcaaaggaatagacggggacccgcacaagcggtggagcatgtggtttaattcgacgatacacgaagaaccttacctggacttgacatagtaagaactttctagagatagattggtgtctgcttgcagaaacttatatacaggtgctgcacggctgtcgtcagctcgtgtcgtgagatgttgggttaagtcccgcaacgagcgcaaccctcgtcattagttgctaacagttcggctgagaactctaatgagactgcctacgcaagtaggaggaaggtgaggacgacgtcaagtcatcatggcccttacgtccagggctacacacgtgctacaatggggtatacaaagagcagcaatacagtgatgtggagcaaatctcaaaaatatctcccagttcggattgtagtctgcaactcgactacatgaagttggaatcgctagtaatcgtagatcagctatgctacggtgaatacgttcccgggtcttgtactcaccgcccgtcacaccatgggagttgaactcattcgaagcggggatgctaaagtagctaccttccacagtgg

SEQ ID NO: 681 - DNA, 1402 bp, Arcobacter ebronensis
taacacatgcaagtcgaacgagaacggggtaaagcttgctttacttgtcagctaagtggcgcacgggtgagtaatgtatagttaacctgccctcaagaaaggaataacagatggaaacgtctgctaatgccctatatgcccataatacaaaagtatgctggggaaacgctttagtgcttgaggatgggactgtattgtatcagttagttggtgaggtaatggctcaccaagacaatgacgcataactggtttgagaggatgatcagtcacactggaactgagacacggtccagactcctacgggaggcagcagtggggaatattgcacaatggaggaaactctgatgcagcaacgccgcgtggaggatgacacttttcggagcgtaaactccttttatataggaagataatgacggtactatatgaataagcaccggctaactccgtgccagcagccgcggtaatacggagggtgcaagcgttactcggaatcactgggcgtaaagagcgtgtaggcggatagataagtcagaagtgaaatccaatagctcaactattgaactgcttttgaaactgtctatctagagtatgggagaggtagatggaatttctggtgtaggggtaaaatccgtagagatcagaaggaataccgattgcgaaggcgatctactggaacattactgacgctgagacgcgaaagcgtggggagcaaacaggattagataccctggtagtccacgccctaaacgatgtgcactagttgttgcgatgctagacattgcagtaatgcagtaaacacattaagtgcaccgcctggggagtacggtcgcaagattaaaactcaaaggaatagacggggacccgcacaagcggtggagcatgtggtttaattcgacgatacgcgaagaaccttacctggacttgacatttacagaactttctagagatagattggtgtctgcttgcagaaactgtaggacaggtgctgcacggctgtcgtcagctcgtgtcgtgagatgttgggttaagtcccgcaacgagcgcaacccacgtcgttagttgctaacagttcggctgagaactctaacgagactgcctacgcaagtaggaggaaggtgtggacgacgtcaagtcatcatggcccttacgtccagggctacacacgtgctacaatggggcatacaaagagctgcaatatcgtgaggtggagcaaatctcaaaaatgcctcccagttcggattgtagtctgcaactcgactacatgaagtcggaatcgctagtaatcgtagatcagctatgctacggtgaatacgttcccgggtcttgtactcaccgcccgtcacaccatgggagttgaactcattcgaagcggggatgctaaagtagctaccctccacagtgg

SEQ ID NO: 682 - DNA, 1402 bp, Arcobacter ellisii
  misc_feature (938)..(938): n is a, c, g, or t
taacacatgcaagtcgaacgagaacggattatagcttgctataattgtcagctaagtggcgcacgggtgagtaatgtatagataacctgcccttaagaaaggaataacagttggaaacgactgctaatgccctatatgcctttaatacataagtatgcaagggaaacgctttagtgcttaaggatgggtctgtatggtatcagcttgttggtgaggtaatggctcaccaaggctatgacgcctaactggtttgagaggatgatcagtcacactggaactgagacacggtccagactcctacgggaggcagcagtggggaatattgcacaatggacgaaagtctgatgcagcaacgccgcgtggaggatgacacatttcggtgcgtaaactccttttatataggaagataatgacggtactatatgaataagcaccggctaactccgtgccagcagccgcggtaatacggagggtgcaagcgttactcggaatcactgggcgtaaagagcgtgtaggcgggtatataagtcagaagtgaaatccaatagctcaactattgaactgcttttgaaactgtatacctagaatgtgggagaggtagatggaatttctggtgtaggggtaaaatccgtagagatcagaaggaataccgattgcgaaggcgatctactggaacattattgacgctgagacgcgaaagcgtggggagcaaacaggattagataccctggtagtccacgccctaaacgatgtacactagttgttgtgaggctcgaccttgcagtaatgcagttaacacattaagtgtaccgcctggggagtacggtcgcaagattaaaactcaaaggaatagacggggacccgcacaagcggtggagcatgtggtttaattcgacgatacacgaagaaccttacctggacttgacatagtaagaacnttctagagatagattggtgtctgcttgcagaaacttatatacaggtgctgcacggctgtcgtcagctcgtgtcgtgagatgttgggttaagtcccgcaacgagcgcaaccctcgtccttagttgctaacagttcggctgagaactctaaggagactgcctacgcaagtaggaggaaggtgaggacgacgtcaagtcatcatggcccttacgtccagggctacacacgtgctacaatggggtatacaaagagcagcaatacggtgacgtggagcaaatctcaaaaatatctcccagttcggattgtagtctgcaactcgactacatgaagttggaatcgctagtaatcgtagatcagctatgctacggtgaatacgttcccgggtcttgtactcaccgcccgtcacaccatgggagttgaactcattcgaagcggggatgctaaagtagctaccttccacagtgg

SEQ ID NO: 683 - DNA, 1402 bp, Arcobacter halophilus
taacacatgcaagtcgaacgagaacggattatagcttgctataattgtcagctaagtggcgcacgggtgagtaatatataggtaacgtgcctctaagaaagggataacagatggaaacgtctgctaataccttatatgcctttaatacgaaagtatgcaagggaaacgctttagtgcttagagatcggcctgtacagtatcagctagttggtgaggtaagagctcaccaaggcaatgacgcttaactggtttgagaggatgatcagtcacactggaactgagacacggtccagactcctacgggaggcagcagtggggaatattgcacaatgggggaaaccctgatgcagcaacgccgcgtggaggatgacacatttcggtgcgtaaactccttttatataggaagaaaatgacggtactatatgaataagcgccggctaactccgtgccagcagccgcggtaatacggagggcgcaagcgttactcggaatcactgggcgtaaagagcgtgtaggcggatagataagttaggagtgaaatcctatggctcaaccatagaactgcttctaaaactgtctatctagagtatgggagaggtagatggaatttctggtgtaggggtaaaatccgtagagatcagaaggaataccgattgcgaaggcgatctactggaacataactgacgctgagacgcgaaagcgtggggagcaaacaggattagataccctggtagtccacgccctaaacgatgtacactagttgttgccatgctcgacatggcagtaatgcagttaacacattaagtgtaccgcctggggagtacggtcgcaagattaaaactcaaaggaatagacggggacccgcacaagcggtggagcatgtggtttaattcgacgatacgcgaagaaccttacctggtcttgacatagtaagaaccatttagagatagatgggtgtctgcttgcagaagcttatatacaggtgctgcacggctgtcgtcagctcgtgtcgtgagatgttgggttaagtcccgcaacgagcgcaaccctcgtcgttagttgctaacagtacggctgagaactctaacgagactgcctgggcaaccaggaggaaggtgaggacgacgtcaagtcatcatggcccttacgaccagggctacacacgtgctacaatggggtatacaaagagcagcaatacagtgatgtggagcaaatctaaaaaatacctcccagttcggatagtagtctgcaactcgactacttgaagttggaatcgctagtaatcgtagatcagcaatgctacggtgaatacgttcccgggtcttgtactcaccgcccgtcacaccatgggagttgatttcactcgaagcggggatgctaagatagctaccctccacagtgg

SEQ ID NO: 684 - DNA, 1437 bp, Arcobacter marinus
agtgaacgctggcggcgtgcttaacacatgcaagtcgaacgagaacgggattagcttgctaatctgtcagctaagtggcgcacgggtgagtaatatataggtaacgtgccttcaagagggggataacagatggaaacgtctgctaagaccccatatgcctttaatacaaaagtatgaaagggaaatatttatagcttgaagatcggcctgtacagtatcagatagttggtgaggtaatggctcaccaagtcaatgacgcttaactggtttgagaggatgatcagtcacactggaactgagacacggtccagactcctacgggaggcagcagtggggaatattgcacaatgggggaaaccctgatgcagcaacgccgcgtggaggatgacacatttcggtgcgtaaactccttttatataagaagataatgacggtattatatgaataagcaccggctaactccgtgccagcagccgcggtaatacggagggtgcaagcgttactcggaatcactgggcgtaaagagcgtgtaggcggatagataagtcagaagtgaaatccaatagcttaactattgaactgcttttgaaactgtctatctagagtatgggagaggtagatggaatttctggtgtaggggtaaaatccgtagagatcagaaggaataccgattgcgaaggcgatctactggaacataactgacgctgagacgcgaaagcgtggggagcaaacaggattagataccctggtagtccacgccctaaacgatgtacactagttgttgctatgctcgacatagcagtaatgcagttaacacattaagtgtaccgcctggggagtacggtcgcaagattaaaactcaaaggaatagacggggacccgcacaagcggtggagcatgtggtttaattcgacgatacgcgaagaaccttacctggtcttgacatagtaagaaccatttagagatagatgggtgtctgcttgcagaaacttatatacaggtgctgcacggctgtcgtcagctcgtgtcgtgagatgttgggttaagtcccgcaacgagcgcaaccctcgtcattagttgctaacacttcgggtgagaactctaatgagactgcctacgcaagtaggaggaaggtgaggacgacgtcaagtcatcatggcccttacgaccagggctacacacgtgctacaatggggtatacaaagagcagcgatacagtgatgtggagcaaatctaaaaaatacctcccagttcggattgtagtctgcaactcgactacatgaagttggaatcgctagtaatcgtagatcagcaatgctacggtgaatacgttcccgggtcttgtactcaccgcccgtcacaccatgggagttgatttcactcgaagcggggatgctaagatagctaccctccacagtggaattagcgactggggtg

SEQ ID NO: 685 - DNA, 1439 bp, Arcobacter molluscorum
agtgaacgctggcggcgtgcttaacacatgcaagtcgaacgagaacggattatagcttgctataattgtcagctaagtggcgcacgggtgagtaatatataggtaatgtgccttcaagagggggataacagatggaaacgtctgctaagaccccatatgcctttaatacaaaagtatgcaagggaaatattaatagcttgaagatcggcctgtacagtatcagatagttggtgaggtaatggctcaccaagtcaatgacgcttaactggtttgagaggatgatcagtcacactggaactgagacacggtccagactcctacgggaggcagcagtggggaatattgcacaatgggggaaaccctgatgcagcaacgccgcgtggaggatgacacatttcggtgcgtaaactccttttatataggaagataatgacggtactatatgaataagcgccggctaactccgtgccagcagccgcggtaatacggagggcgcaagcgttactcggaatcactgggcgtaaagagcgtgtaggcggataaataagtcaggagtgaaatccaatagctcaactattgaactgcttttgaaactgtttatctagagtatgggagaggtagatggaatttctggtgtaggggtaaaatccgtagagatcagaaggaataccgattgcgaaggcgatctactggaacataactgacgctgagacgcgaaagcgtggggagcaaacaggattagataccctggtagtccacgccctaaacgatgtacactagttgttgctatgctcgacatagcagtaatgcagttaacacattaagtgtaccgcctggggagtacggtcgcaagattaaaactcaaaggaatagacggggacccgcacaagcggtggagcatgtggtttaattcgacgatacgcgaagaaccttacctggtcttgacatagtaagaacattccagagatgggatggtgtctgcttgcagaaacttatatacaggtgctgcacggctgtcgtcagctcgtgtcgtgagatgttgggttaagtcccgcaacgagcgcaaccctcgtcattagttgctaacacttcgggtgagaactctaatgagactgcctacgcaagtaggaggaaggtgaggacgacgtcaagtcatcatggcccttacgaccagggctacacacgtgctacaatggggtatacaaagagcagcgatacggtgacgtggagcaaatcttaaaaatatctctcagttcggattgtagtctgcaactcgactacatgaagttggaatcgctagtaatcgtagatcagcaatgctacggtgaatacgttcccgggtcttgtactcaccgcccgtcacaccatgggagttgatttcactcgaagcagggatgttaagataactaccttccacagtggaattagcgactggggtg

SEQ ID NO: 686 - DNA, 1439 bp, Arcobacter mytili
agtgaacgctggcggcgtgcttaacacatgcaagtcgaacgagaacgggatatagcttgctatatttgtcagctaagtggcgcacgggtgagtaatgtataggtaacatgccctttacaaggaaataacagttggaaacgactgctaatgtcctatatgcctttaatactaaagtatgcaagggaaagatttatcggtaaaggattggcctgtattgtatcagttagttggtggggtaatggcctaccaagacaatgacgcataactggtttgagaggatgatcagtcacactggaactgagacacggtccagactcctacgggaggcagcagtggggaatattgcacaatggggggaaccctgatgcagcaacgccgcgtggaggatgacacatttcggtgcgtaaactccttttatataggaagataatgacggtactatatgaataagcgccggctaactccgtgccagcagccgcggtaatacggagggcgcaagcgttactcggaatcactgggcgtaaagagcgtgtaggcggatcgataagtcaggagtgaaatcctatggctcaaccatagaactgctcttgaaactgtcaatctagagtatgggagaggtagatggaatttctggtgtaggggtaaaatccgtagagatcagaaggaataccgattgcgaaggcgatctactggaacataactgacgctgagacgcgaaagcgtggggagcaaacaggattagataccctggtagtccacgccctaaacgatgtacactagttgttgccatactagatatggcagtaatgcagttaacacattaagtgtaccgcctggggagtacggtcgcaagattaaaactcaaaggaatagacggggacccgcacaagcggtggagcatgtggtttaattcgacgatacgcgaagaaccttacctggtcttgacatagtaagaatattttagagatagaatagtgctagcttgctagaacttacatacaggtgctgcacggctgtcgtcagctcgtgtcgtgagatgttgggttaagtcccgcaacgagcgcaaccctcgtcgttagttgctaacagttcggctgagaactctaacgagactgcctacgcaagtaggaggaaggtgaggacgacgtcaagtcatcatggcccttacgaccagggctacacacgtgctacaatggggtatacaaagagcagcaatacggtgacgtggagcaaatctcaaaaatacctcccagttcggattgtagtctgcaactcgactacatgaagttggaatcgctagtaatcgtagatcagctacgctacggtgaatacgttcccgggtcttgtactcaccgcccgtcacaccatgggagttgatttcactcgaagcagggatgctaagatagctaccttccacagtggaatcagcgactggggtg

SEQ ID NO: 687 - DNA, 1439 bp, Arcobacter nitrofigilis
agtgaacgctggcggcgtgcttaacacatgcaagtcgaacgagaacgggttaaagcttgctttaactgtcagctaagtggcgcacgggtgagtaatatataggtaacatgccctagagagggggataacagatggaaacgtctgctaacaccccatatgcctttaagacctaagtctgcaagggaaacatttatggctctaggattggcctgtacggtatcagctagttggtgaggtaatggctcaccaaggcaatgacacctaactggtttgagaggatgatcagtcacactggaactgagacacggtccagactcctacgggaggcagcagtggggaatattgcacaatggacgaaagtctgatgcagcaacgccgcgtggaggatgacacatttcggtgcgtaaactccttttatataggaagataatgacggtactatatgaataagcaccggctaactccgtgccagcagccgcggtaatacggagggtgcaagcgttactcggaattactgggcgtaaagagcgtgtaggcgggtaaataagttggaagtgaaatcctatggctcaaccatagaactgcttccaaaactgttaacctagaatgtgggagaggtagatggaatttctggtgtaggggtaaaatccgtagatatcagaaggaataccgattgcgaaggcgatctactggaacataattgacgctgagacgcgaaagcgtggggagcaaacaggattagataccctggtagtccacgccctaaacgatgtacactagttgttgtgaggctagaccttgcagtaatgcagttaacacattaagtgtaccgcctggggagtacggtcgcaagattaaaactcaaaggaatagacggggacccgcacaagcggtggagcatgtggtttaattcgacgatacgcgaagaaccttacctggtcttgacatagtaagaactttttagagataaattggtgtctgcttgcagaaacttacatacaggtgctgcacggctgtcgtcagctcgtgtcgtgagatgttgggttaagtcccgcaacgagcgcaaccctcgtcgttagttgctaacagttcggctgagaactctaacgagactgcctacgcaagtaggaggaaggtgaggacgacgtcaagtcatcatggcccttacgaccagggctacacacgtgctacaatggggtatacaaagagcagcgatacggtgacgtggagcgaatctcaaaaatgcctcccagttcggattgtagtctgcaactcgactacatgaagttggaatcgctagtaatcgtagatcagctatgctacggtgaatacgttcccgggtcttgtactcaccgcccgtcacaccatgggagttgaattcattcgaagcggggatgctaaaatagctaccttccacagtggatttagcgactggggtg

SEQ ID NO: 688 - DNA, 1427 bp, Arcobacter pacificus
ttatctcgtgccgcgtgcttacacatgcagtcgaacgagaacgggtatttcgcttgctaatactgtcagctaagtggcgaacgggtgagtaatatataggtaatgtgccttgaagaaggggataacagttggaaacgactgctaagaccctatatgcctttaaaacaaaagtttgcaagggaaatatttatagcttcaagatcggcctgtacagtatcagttagttggtgaggtaatggctcaccaagacaatgacgcttaactggtttgagaggatgatcagtcacactggaactgagacacggtccagactcctacgggaggcagcagtggggaatattgcacaatgggggaaaccctgatgcagcaacgccgcgtggaggatgacacatttcggtgcgtaaactccttttatataggaagataatgacggtactatatgaataagcgccggctaactccgtgccagcagccgcggtaatacggagggcgcaagcgttactcggaatcactgggcgtaaagagcgtgtaggcggatagataagttgggagtgaaatcctatggctcaaccatagaactgcttccaaaactgtctatctagagtatgggagaggtagatggaatttctggtgtaggggtaaaatccgtagagatcagaaggaataccgattgcgaaggcgatctactggaacattactgacgctgagacgcgaaagcgtggggagcaaacaggattagataccctggtagtccacgccctaaacgatgtacactagttgttgtgaggctagaccttgcagtaatgcagttaacacattaagtgtaccgcctggggagtacggtcgcaagattaaaactcaaaggaatagacggggacccgcacaagcggtggagcatgtggtttaattcgacgatacacgaagaaccttacctggtcttgacatagtaagaactttccagagatggattggtgtctgcttgcagaaacttatatacaggtgctgcacggctgtcgtcagctcgtgtcgtgagatgttgggttaagtcccgcaacgagcgcaaccctcgtcgttagttgctaacagttcggctgagaactctaacgagactgcctacgcaagtaggaggaaggtgaggacgacgtcaagtcatcatggcccttacgaccagggctacacacgtgctacaatggggtatacaaagagcagcgatacggtgacgtggagcaaatctcaaaaatatctcccagttcggatagtagtctgcaactcgactacttgaagttggaatcgctagtaatcgtagatcagctatgctacggtgaatacgttcccgggtcttgtactcaccgcccgtcacaccatgggagttgaactcattcgaagcagggatgctaaagtagctacctccacatgatcagatctaa

SEQ ID NO: 689 - DNA, 1438 bp, Arcobacter skirrowii
  misc_feature (147)..(147): n is a, c, g, or t
  misc_feature (163)..(163): n is a, c, g, or t
  misc_feature (320)..(320): n is a, c, g, or t
  misc_feature (765)..(765): n is a, c, g, or t
  misc_feature (794)..(794): n is a, c, g, or t
  misc_feature (894)..(901): n is a, c, g, or t
  misc_feature (916)..(919): n is a, c, g, or t
  misc_feature (938)..(938): n is a, c, g, or t
agtgaacgctggcggcgtgcttaacacatgcaagtcgaacgagaacgggctatagcttgctatagttgtcagctaagtggcgcacgggtgagtaatgtataggtaatatgcctcttactaagggataacaaatggaaacgtttgctnataccttatactcctnttaaacaaaagtttaaaagggaaagatttattggtaagagattagcctgtattgtatcagttagttggtggggtaatggcttaccaagactatgacacataactggtttgagaggatgatcagtcacactggaactgagacacggtccagactcctncgggaggcagcagtggggaatattgcacaatggacgaaagtctgatgcagcaacgccgcgtggaggatgacacatttcggtgcgtaaactccttttatataagaagataatgacggtattatatgaataagcaccggctaactccgtgccagcagccgcggtaatacggggggtgcaagcgttactcggaatcactgggcgtaaagagcatgtaggcggattaataagtttgaagtgaaatcctatagcttaactatagaactgctttgaaaactgttgatctagaatgtgggagaggtagatggaatttctggtgtaggggtaaaatccgtagagatcagaaggaataccgattgcgaaggcgatttactggaacacaattgacgctgagatgcgaaagcgtggggagcaaacaggattagataccctggtagtccacgccctnaacgatgtacactagttgttgtgagactngatcttgcagtaatgcagttaacacattaagtgtaccgcctggggagtacggtcgcaagattaaaactcaaaggaatagacggggacccgcacaagcggnnnnnnnngtggtttaattcgannnnacacgaagaaccttacctngacttgacatagtaagaactttctagagatagattggtgtctgcttgcagaaacttatatacaggtgctgcacggctgtcgtcagctcgtgtcgtgagatgttgggttaagtcccgcaacgagcgcaaccctcgtgtttagttgctaacagttcggctgagaactctaaacagactgcctacgcaagtaggaggaaggtgaggacgacgtcaagtcatcatggcccttacgtccagggctacacacgtgctacaatgggatatacaaagagcggcaatacggtgacgtggagcaaatcttataaaatatctcccagttcggattgtagtctgcaactcgactacatgaagttggaatcgctagtaatcgtagatcagctatgctacggtgaatacgttcccgggtcttgtactcaccgcccgtcacaccatgggagtcgaactcattcgaagcggggatgctaaagtagctaccttccacagtggatttggcgactgggg

SEQ ID NO: 690 - DNA, 1440 bp, Arcobacter suis
agtgaacgctggcggcgtgcttaacacatgcaagtcgaacgagaacggattatagcttgctataattgtcagctaagtggcgcacgggtgagtaatatatagataacctgccctcaagaaaggaataacagttggaaacgactgctaatgccctatatgcctttaatacataagtatgcaagggaaacgctttagtgcttgaggatgggtctgtatggtatcagcttgttggtgaggtaatggctcaccaaggctatgacgcctaactggtttgagaggatgatcagtcacactggaactgagacacggtccagactcctacgggaggcagcagtggggaatattgcacaatggacgaaagtctgatgcagcaacgccgcgtggaggatgacacatttcggtgcgtaaactccttttatatgggaagataatgacggtaccatatgaataagcaccggctaactccgtgccagcagccgcggtaatacggagggtgcaagcgttactcggaatcactgggcgtaaagagcgtgtaggcggatatataagtcagaagtgaaatccaatagcttaactattgaactgcttttgaaactgtatatctagaatgtgggagaggtagatggaatttctggtgtaggggtaaaatccgtagagatcagaaggaataccgattgcgaaggcgatctactggaacattattgacgctgagacgcgaaagcgtggggagcaaacaggattagataccctggtagtccacgccctaaacgatgcacactagttgttgtgaggctagaccttgcagtaatgcagttaacacattaagtgtgccgcctggggagtacggtcgcaagattaaaactcaaaggaatagacggggacccgcacaagcggtggagcatgtggtttaattcgacgatacacgaagaaccttacctggacttgacatagtaagaactttctagagatagattggtgtctgcttgcagaaacttatatacaggtgctgcacggctgtcgtcagctcgtgtcgtgagatgttgggttaagtcccgcaacgagcgcaaccctcgtcattagttgctaacagttcggctgagaactctaatgagactgcctacgcaagtaggaggaaggtgaggacgacgtcaagtcatcatggcccttacgtccagggctacacacgtgctacaatggggtatacaaagagccgcaatacagtgatgtggagcaaatctcaaaaatatctcccagttcggattgtagtctgcaactcgactacatgaagttggaatcgctagtaatcgtagatcagctatgctacggtgaatacgttcccgggtcttgtactcaccgcccgtcacaccatgggagttgaactcattcgaagcggggatgctaaaatagctaccttccacagtggattcagcgactggggtg

SEQ ID NO: 691 - DNA, 1302 bp, Arcobacter trophiarum
agtgaacgctggcggcgtgcttaacacatgcaagtcgaacgagaacgggttatagcttgctataattgtcagctaagtggcgcacgggtgagtaatgtataggtaatatgcctcttactaagggataacaaatggaaacgtttgctaataccttatattccttttatacagaagtataaaagggaaagatttattggtaagagattagcctgtattgtatcagttagttggtggggtaatggcttaccaagacaatgacacataactggtttgagaggatgatcagtcacactggaactgagacacggtccagactcctacgggaggcagcagtggggaatattgcacaatggacggaagtctgatgcagcaacgccgcgtggaggatgacacatttcggtgcgtaaactccttttatatgagaagataatgacggtattatatgaataagcaccggctaactccgtgccagcagccgcggtaatacggggggtgcaagcgttactcggaatcactgggcgtaaagagcatgtaggcggattgataagtttgaagtgaaatcctatagcttaactatagaactgctttgaaaactgttaatctagaatgtgggagaggtagatggaatttctggtgtaggggtaaaatccgtagagatcagaaggaataccgattgcgaaggcgatctactggaacactattgacgctgagatgcgaaagcgtggggagcaaacaggattagataccctggtagtccacgccctaaacgatgtacactagttgttgtgagacttgatcttgcagtaatgcagttaacacattaagtgtaccgcctggggagtacggtcgcaagattaaaactcaaaggaatagacggggacccgcacaagcggtggagcatgtggtttaattcgacgatacacgaagaaccttacctggacttgacatagtaagaactttcaagagattgattggtgtctgcttgcagaagcttatatacaggtgctgcacggctgtcgtcagctcgtgtcgtgagatgttgggttaagtcccgcaacgagcgcaaccctcgtgtttagttgctaacagtttggctgagaactctaaacagactgcctacgcaagtaggaggaaggtgaggacgacgtcaagtcatcatggcccttacgtccagggctacacacgtgctacaatgggatatacaaagagctgcaatacggtgacgtggagcaaatcttataaaatatctcccagttcggattgtagtctgcaactcgactacatgaagttggaatcgctagt

SEQ ID NO: 692 - DNA, 1401 bp, Arcobacter venerupis
taacacatgcaagtcgaacgagaacggattatagcttgctataattgtcagctaagtggcgcacgggtgagtaatatataggtaatgtgccctagagaagaggataacagttggaaacgactgctaagactctatatgcctttaagacagaagtctgcaagggaaatatttatagctctaggatcagcctgtacagtatcagctagttggtgaggtaatggctcaccaaggcaatgacgcttaactggtttgagaggatgatcagtcacactggaactgagacacggtccagactcctacgggaggcagcagtggggaatattgcacaatggacgaaagtctgatgcagcaacgccgcgtggaggatgacacatttcggtgcgtaaactccttttatatgggaagataatgacggtaccatatgaataagcaccggctaactccgtgccagcagccgcggtaatacggagggtgcaagcgttactcggaatcactgggcgtaaagagcgtgtaggcggataaataagtcagaagtgaaatccaatagcttaactattgaactgcttttgaaactgtatatctagaatgtgggagaggtagatggaatttctggtgtaggggtaaaatccgtagagatcagaaggaataccgattgcgaaggcgatctactggaacattattgacgctgagacgcgaaagcgtggggagcaaacaggattagataccctggtagtccacgccctaaacgatgcacactagttgttgtgaggctagaccttgcagtaatgcagttaacacattaagtgtgccgcctggggagtacggtcgcaagattaaaactcaaaggaatagacggggacccgcacaagcggtggagcatgtggtttaattcgacgatacacgaagaaccttacctggacttgacatagtaagaactttctagagatagattggtgtctgcttgcagaaacttatatacaggtgctgcacggctgtcgtcagctcgtgtcgtgagatgttgggttaagtcccgcaacgagcgcaaccctcgtcattagttgctaacagttcggctgagaactctaatgagactgcctacgcaagtaggaggaaggtgaggacgacgtcaagtcatcatggcccttacgtccagggctacacacgtgctacaatggggtatacaaagagccgcaatacggtgacgtggagcaaatctcaaaaatatctcccagttcggattgtagtctgcaactcgactacatgaagttggaatcgctagtaatcgtagatcagctatgctacggtgaatacgttcccgggtcttgtactcaccgcccgtcgcaccatgggagttgaactcattcgaagcggggatgctaaagtagctaccttccacagtgg

SEQ ID NO: 693 - DNA, 1458 bp, Arenicella xantha
attgaacgctggaggtatgcttaacacatgcaagtcgaacgcgaacgttccttcggggataagtagagtggcggacgggtgagtaacgcgtaggaatctacctagatgtgggggataacatggagaaattcatgctaataccgcatatgccctacggggtaaagagggcctcttcttgaaagctcttgcatttagatgagcctgcgtcggattagcttgttggcggggtaatggcccaccaaggcgacgatccgtagctggtctgagaggatgatcagccacactgggactgagacacggcccagactcctacgggaggcagcagtggggaatattggacaatgggcgcaagcctgatccagcaatacctcgtgtgtgaagaaggccttagggttgtaaagcactttcaattgggacgaagattgtaaaattaatacttttataatttgacggtacctttagaagaagcaccggctaactccgtgccagcagccgcggtaatacggagggtgcaagcgttaatcggaattactgggcgtaaagcgcgcgtaggtggtttgttaagttagatgtgaaagccctgggcttaacctaggaactgcatttaatactggctaactagagtatggtagagggaagtggaattccacatgtagcggtgaaatgcgtagagatgtggaggaacaccagtggcgaaggcgacttcctggaccaatactgacactgaggtgcgaaagcgtggggagcaaacaggattagataccctggtagtccacgccgtaaacgatgtcaactagccgttgggggggttacctcttagtggcgcaactaacgcgataagttgaccgcctggggagtacggtcgcaagattaaaactcaaaggaattgacgggggcccgcacaagcggtggagcatgtggtttaattcgatgcaacgcgaagaaccttacctacccttgacattgacagaatcctgtagagatacgggagtgccttcgggcctggaaaacaggtgctgcatggctgtcgtcagctcgtgtcgtgagatgttgggttaagtcccgtaacgagcgcaacccttgtccttagttgccagcgcgtaatggcggggactctaaggagactgccggtgacaaaccggaggaaggtggggacgacgtcaagtcatcatggcccttatgggtagggctacacacgtgctacaatgggcagtacagagggttgcgaagccgcgaggtggagctaatctcagaaaactgttcgtagtccggattgcactctgcaactcgagtgcatgaagtcggaatcgctagtaatcgcggatcagaatgccgcggtgaatacgttcccgggccttgtacacaccgcccgtcacaccatgggagtgggttgtaccagaagtggctagcttaaccttcgggatggcggtcaccacggtgtgattcatgactggggtg

SEQ ID NO: 694 - DNA, 1460 bp, Arenimonas composti
agtgaacgctggcggcaggcctaacacatgcaagtcgagcggcagcgggtccttcgggatgccggcgagcggcggacgggtgaggaacacatcggaatctgcccagtcgtgggggataacgtagggaaacttacgctaataccgcatacgacctgagggtgaaagcaggggaccgcaaggccttgcgcgattggatgagccgatgtccgattagctagttggcggggtaaaggcccaccaaggcgacgatcggtagctggtctgagaggatgatcagccacactggaactgagacacggtccagactcctacgggaggcagcagtggggaatattggacaatgggcgcaagcctgatccagccatgccgcgtgtgtgaagaaggccttcgggttgtaaagcacttttgttggggaagaaaagccgtgggttaataccccgtggttctgacggtacccaaagaataagcaccggctaacttcgtgccagcagccgcggtaatacgaagggtgcaagcgttactcggaattactgggcgtaaagcgtgcgtaggtggttcgttaagtctgccgtgaaagccccgggctcaacctgggaatggcggtggatactggcggactagagtgcggtagagggtggtggaattcccggtgtagcagtgaaatgcgtagagatcgggaggaacatctgtggcgaaggcggccacctggaccagcactgacactgaggcacgaaagcgtggggagcaaacaggattagataccctggtagtccacgccctaaacgatgcggactggacgttgggctcaatcaggagctcagtgtcgaagctaacgcgttaagtccgccgcctggggagtacggtcgcaagactgaaactcaaaggaattgacgggggcccgcacaagcggtggagtatgtggtttaattcgatgcaacgcgcagaaccttacctggccttgacatccacggaagccctgagagatcggggtgtgccttcgggaaccgtgagacaggtgctgcatggctgtcgtcagctcgtgtcgtgagatgttgggttaagtcccgcaacgagcgcaacccttgtccttagttgccagcacctcgggtgggaactctaaggagactgccggtgacaaaccggaggaaggtggggatgacgtcaagtcatcatggcccttacggccagggctacacacgtactacaatggtggggacagagggtcgcgaggccgcgaggcggagccaatcccagaaaccccatcctagtccggatcggagtctgcaactcgactccgtgaagtcggaatcgctagtaatcgcagatcagcattgctgcggtgaatacgttcccgggccttgtacacaccgcccgtcacaccatgggagtttgctgcaccagaagcaggtagcttaaccgcaaggggggcgcttgccacggtgtggccgatgactggggtg

SEQ ID NO: 695 - DNA, 1467 bp, Arenimonas donghaensis
agtgaacgctggcggcaggcctaacacatgcaagtcgagcggcagcacaggagagcttgctctctgggtggcgagcggcggacgggtgaggaatacatcggaatctgcccagttgtgggggataacgtagggaaacttacgctaataccgcatacgacctacgggtgaaagcaggggaccttcgggccttgcgcgactggatgagccgatgtcggattagcttgttggtgaggtaaaggctcaccaaggcgacgatccgtagctggtctgagaggatgatcagccacactggaactgagacacggtccagactcctacgggaggcagcagtggggaatattggacaatgggcgcaagcctgatccagccatgccgcgtgtgtgaagaaggccttcgggttgtaaagcacttttgtacgggaagaaaccttccgggttaataccctgggagactgacggtaccgtaagaataagcaccggctaacttcgtgccagcagccgcggtaatacgaagggtgcaagcgttactcggaattactgggcgtaaagcgtgcgtaggtggttcgttaagtctgccgtgaaagccccgggctcaacctgggaattgcggtggatactggcggactagagtgcggtagagggtggtggaattcccggtgtagcagtgaaatgcgtagagatcgggaggaacatctgtggcgaaggcggccacctggaccagcactgacactgaggcacgaaagcgtggggagcaaacaggattagataccctggtagtccacgccctaaacgatgcgaactggacgttgggctcaattgagagttcagtgtcgaagctaacgcgttaagttcgccgcctggggagtacggtcgcaagactgaaactcaaaggaattgacgggggcccgcacaagcggtggagtatgtggtttaattcgatgcaacgcgcagaaccttacctggccttgacatccagtgaactttccagagatggattggtgccttcgggaacactgagacaggtgctgcatggctgtcgtcagctcgtgtcgtgagatgttgggttaagtcccgcaacgagcgcaacccttgtccttagttgccagcacgtaatggtgggaactctaaggagactgccggtgacaaaccggaggaaggtggggatgacgtcaagtcatcatggcccttacggccagggctacacacgtactacaatggtggggacagagggtcgcgaagccgcgaggtggagccaatcccagaaaccccatcctagtccggatcggagtctgcaactcgactccgtgaagtcggaatcgctagtaatcgcagatcagcattgctgcggtgaatacgttcccgggccttgtacacaccgcccgtcacaccatgggagtgggttgcaccagaagcaggtagtctaaccttcgggaggacgcttgccacggtgtgattcatgactggggtg

SEQ ID NO: 696 - DNA, 1465 bp, Arenimonas malthae
agtgaacgctggcggcaggcctaacacatgcaagtcgagcggcagcgggtcgtagcaatacgatgccggcgagcggcggacgggtgaggaatacatcggaatctacccagtcgtgggggataacgtagggaaacttacgctaataccgcatacgacctgagggtgaaagcaggggaccgcaaggccttgcgcgattggatgagccgatgtcggattagctagttggtgaggtaaaggctcaccaaggcgacgatccgtagctggtctgagaggatgatcagccacactggaactgagacacggtccagactcctacgggaggcagcagtggggaatattggacaatgggcgcaagcctgatccagccatgccgcgtgtgtgaagaaggccttcgggttgtaaagcacttttgtccgggaagaaatcttccgacctaatacgtcgggaggatgacggtaccggaagaataagcaccggctaacttcgtgccagcagccgcggtaatacgaagggtgcaagcgttactcggaattactgggcgtaaagcgtgcgtaggtggttcgttaagtctgccgtgaaagccccgggctcaacctgggaatggcggtggatactggcggactagagtgcggtagagggtggtggaattcccggtgtagcagtgaaatgcgtagagatcgggaggaacatctgtggcgaaggcggccacctggaccagcactgacactgaggcacgaaagcgtggggagcaaacaggattagataccctggtagtccacgccctaaacgatgcgaactggacgttgggctcaattaggagctcagtgtcgaagctaacgcgttaagttcgccgcctggggagtacggtcgcaagactgaaactcaaaggaattgacgggggcccgcacaagcggtggagtatgtggtttaattcgatgcaacgcgcagaaccttacctggccttgacatccacggaatcctttagagatagaggagtgccttcgggaaccgtgagacaggtgctgcatggctgtcgtcagctcgtgtcgtgagatgttgggttaagtcccgcaacgagcgcaacccttgtccttagttgccagcgagtaatgtcgggaactctaaggagactgccggtgacaaaccggaggaaggtggggatgacgtcaagtcatcatggcccttacggccagggctacacacgtactacaatggtggggacagagggtcgcgaggccgcgaggcggagccaatcccagaaaccccatcctagtccggatcggagtctgcaactcgactccgtgaagtcggaatcgctagtaatcgcagatcagcattgctgcggtgaatacgttcccgggccttgtacacaccgcccgtcacaccatgggagtgggttgcaccagaagcaggtagtctaaccgcaagggggacgcttgccacggtgtgattcatgactggggtg

SEQ ID NO: 697 - DNA, 1467 bp, Arenimonas metalli
agtgaacgctggcggcaggcctaacacatgcaagtcgagcggcagcgcagcagtagcaatactgtgggcggcgagcggcggacgggtgaggaatacatcggaatctaccttcttgtgggggataacgtagggaaacttacgctaataccgcataagacctgagggtgaaagcgggggaccgcaaggcctcgcgcgagaagatgagccgatgtcggattagctagttggtggggtaaaggcccaccaaggcgacgatccgtagctggtctgagaggatgatcagccacactggaactgagacacggtccagactcctacgggaggcagcagtggggaatattggacaatgggcgcaagcctgatctagccatgccgcgtgtgtgaagaaggccttcgggttgtaaagcacttttgttggggaagaaaagatcgcggttaataaccgtggttcatgacggtacccaaagaataagcaccggctaacttcgtgccagcagccgcggtaatacgaagggtgcaagcgttactcggaattactgggcgtaaagcgtgcgtaggcggtttgttaagtctgccgtgaaagccccgggctcaacctgggaattgcggtggatactggcaggctagagtacggtagaggatggtggaattcccggtgtagcagtgaaatgcgtagagatcgggaggaacatctatggcgaaggcagccatctggaccagtactgacgctgaggcacgaaagcgtggggagcaaacaggattagataccctggtagtccacgccctaaacgatgcgaactggacgttgggctcaattgagagctcagtgtcgaagctaacgcgttaagttcgccgcctggggagtacggtcgcaagactgaaactcaaaggaattgacgggggcccgcacaagcggtggagtatgtggtttaattcgatgcaacgcgaagaaccttacctggtcttgacatccacggaacccttgagagatcgaggggtgccttcgggaaccgtgagacaggtgctgcatggctgtcgtcagctcatgtcgtgagatgttgggttaagtcccgcaacgagcgcaacccttgtccttagttgccagcacgtaatggtgggaactctaaggagactgccggtgacaaaccggaggaaggtggggatgacgtcaagtcatcatggcccttacgaccagggctacacacgtactacaatggtggggatagagggtcgcgaagccgcgaggtggagccaatcccagaaaccccatcctagtccggatcggagtctgcaactcgactccgtgaagtcggaatcgctagtaatcgcggatcagcattgccgcggtgaatacgttcccgggccttgtacacaccgcccgtcacaccatgggagtgggttgcaccagaagcaggtagtctaaccgcaagggggacgcttgccacggtgtgattcatgactggggtg

SEQ ID NO: 698 - DNA, 1465 bp, Arenimonas oryziterrae
agtgaacgctggcggcaggcctaacacatgcaagtcgagcggcagcgggctgtagcaatacagtgccggcgagcggcggacgggtgaggaatacatcggaatctaccttgtcgtgggggataacgtagggaaacttacgctaataccgcatacgaactacggttgaaagcggaggaccgcaaggcttcgcgcgattggatgagccgatgtcggattagctagttggcggggtaaaggcccaccaaggcgacgatccgtagctggtctgagaggatgatcagccacactggaactgagacacggtccagactcctacgggaggcagcagtggggaatattggacaatgggcgcaagcctgatccagccatgccgcgtgtgtgaagaaggccttcgggttgtaaagcacttttgttcgggaagaaaagctaccggttaatacccgggagtcatgacggtaccgaaagaataagcaccggctaacttcgtgccagcagccgcggtaatacgaagggtgcaagcgttactcggaattactgggcgtaaagcgtgcgtaggtggtgcgttaagtctgtcgtgaaagccccgggctcaacctgggaatggcgatggatactggcgcgctagagtgcggtagaggagagtggaattcccggtgtagcagtgaaatgcgtagagatcgggaggaacatcagttgcgaaggcggctctctggaccaacactgacactgaggcacgaaagcgtggggagcaaacaggattagataccctggtagtccacgccctaaacgatgcgaactggacgttgggagcaactaggctctcagtgtcgaagctaacgcgttaagttcgccgcctggggagtacggtcgcaagactgaaactcaaaggaattgacgggggcccgcacaagcggtggagtatgtggtttaattcgatgcaacgcgaagaaccttacctggccttgacatccacggaacccttgagagatcgaggggtgccttcgggaaccgtgagacaggtgctgcatggctgtcgtcagctcgtgtcgtgagatgttgggttaagtcccgcaacgagcgcaacccttgtccttagttgccagcgagtaatgtcgggaactctaaggagactgccggtgacaaaccggaggaaggtggggatgacgtcaagtcatcatggcccttacggccagggctacacacgtactacaatggtggggacagagggttgcgataccgcgaggtggagccaatcccagaaaccccatcctagtccggatcggagtctgcaactcgactccgtgaagtcggaatcgctagtaatcgcggatcagcattgccgcggtgaatacgttcccgggccttgtacacaccgcccgtcacaccatgggagtttgttgcaccagaagcaggtagcttaaccgcaaggggggcgcttgccacggtgtggccgatgactggggtg

SEQ ID NO: 699 - DNA, 1429 bp, Arsenicibacter rosenii
gatgaacgctagcggcaggcctaatacatgcaagtcgaacgaaccgcaaggttagtggcgaacgggtgcgtaacgcgtaaacaatctgccccggtttgggggatagcccggcgaaagctggggtaaacccgcgtagtttcaggaggtggcatcacattctgaatagacatttatggaaccgagaggggtttgcgtctgattagttagatggcggggtaacggcccaccatgacgatgatcagtaggggctctgagaggagggtcccccacatgggcactgagacacgggcccaactcctacgggaggcagcagtagggaatattggtcaatggacggaagtctgaaccagccatgccgcgtgcaggaagaaggcgctcagcgttgtaaactgcttttgagagggaagaaagtgcaggatgcgtcctgttttgccggtacctttcgaataagcaccggctaactccgtgccagcagccgcggtaatacggagggtgcaagcgttgtccggatttattgggtttaaagggtgcgtaggtggtttggtaagtctggtttgaaagtcagccgcttaacggttgagggtggctggatactgccgaacttgaatgtcccggaggcaggcggaacgggttgtgtagcggtgaaatgcatagatatgacccagaacaccgattgcgaaggcagcctgctacgggaagattgacactgaggcacgagagcatggggagcaaacaggattagataccctggtagtccatgccgtaaacgatgatcactgtctgtttggctttcgggctgagtggataagcgaaagcgataagtgatccacctggggagtacgccggcaacggtgaaactcaaaggaattgacgggggtccgcacaagcggtggagcatgtggtttaattcgatgatacgcgaggaaccttacccgggctagaatgtgcgtgaatgatgtggaaacatgtcagcctagcaataggcacaaaacaaggtgctgcatggctgtcgtcagctcgtgccgtgaagtgttgggttaagtcccgcaacgagcgcaacccctattttcagttgccagcatgtaaaggtggggactctggaaagactgcctgcgcaagcagagaggaaggaggggacgacgtcaagtcatcatggcccttacgcccggggcgacacacgtgctacaatggtatctacagcgtgttacgagctggtaacagtgagtcaatcacgaaaaggatatcacagttcggattggggtctgcaactcgaccctatgaagctggaatcgctagtaatcgcgcatcagccatggcgcggtgaatacgttcccggaccttgtacacaccgcccgtcaagccatggaagtctgggggacctgaagctccgcgtgaaaccggggtaagggtaaaccaggtaactagggct

SEQ ID NO: 700 - DNA, 1460 bp, Arsenophonus nasoniae
aacgctggcggcaggcctaacacatgcaagtcgagcggcagcgggagaaagcttgctttcttgccggcgagcggcggacgggtgagtaaggtatggggatctggccgaaggcgggggataaccactggaaacggtggctaataccgcataatctctaaggagcaaagtgggggaccttctggcctcacaccttcggatgaacccatatgagattagctagtaggtggggtaaaggctcacctaggcgacgatctctagctggtctgagaggatgatcagccacactgggactgagacacggcccagactcctacgggaggcagcagtggggaatattgcacaatgggcgcaagcctgatgcagccatgccgcgtgtatgaagaaggccttcgggttgtagagtactttcagtcgtgaggaaggtgttaaggttaataagcttagcaattgacgttagcgacagaagaagcaccggctaactccgtgccagcagccgcggtaatacggagggtgcgagcgttaatcggaattactgggcgtaaagggcacgcaggcggttaattaagttggatgtgaaatccccgggcttaacctgggaatggcattcaagactggttagctagagtcttgtagaggggggtagaattccatgtgtagcggtgaaatgcgtagagatgtggaggaataccggtggcgaaggcggccccctggacaaagactgacgctcatgtgcgaaagcgtggggagcaaacaggattagataccctggtagtccacgctgtaaacgatgtcgatttggaggctgtggtcaagaactgtggcctccggagctaacgcgttaaatcgaccgcctggggagtacggccgcaaggttaaaactcaaatgaattgacgggggcccgcacaagcggtggagcatgtggtttaattcgatgcaacgcgaagaaccttacctactcttgacatccagagaagcttttagagataaaggcgtgccttcgggaactttgagacaggtgctgcatggctgtcgtcagctcgtgttgtgaaatgttgggttaagtcccgcaacgagcgcaacccttatcctttgttgccagcgatacggtcgggaactcaaaggagactgccggtgataaaccggaggaaggtggggatgacgtcaagtcatcatggcccttacgagtagggctacacacgtgctacaatggcgtatacagagagaggcgagcctgcgaggggaagcggaactcagaaagtacgtcgaagtccggattggagtctgcaactcgactccatgaagtcggaatcgctagtaatcgcggatcagcatgtcgcggtgaatacgttcccgggccttgtacacaccgcccgtcacaccatgggagtgggttgcaaaagaagtaggtagcttaaccttcgggatggcgcttaccactttgtgattcatgactggggtg

SEQ ID NO: 701 - DNA, 1411 bp, Arthrospira maxima
gatgaacgctggcggtctgcttaacacatgcaagtcgaacgggctcttcggagctagtggcggacgggtgagtaacacgtgagaatctggctcccggtcggggacaacagagggaaacttctgctaatcccggatgagccgaaaggtaaaagatttatcgccgggagatgagctcgcgtctgattagctagttggtgaggtaaaggctcaccaaggcgacgatcagtagctggtctgagaggatgatcagccacactgggactgagacacggcccagactcctacgggaggcagcagtggggaattttccgcaatgggcgcaagcctgacggagcaagaccgcgtgggggaggaaggctcttgggttgtaaaccccttttctcaaggaagaacacaatgacggtacttgaggaataagcctcggctaactccgtgccagcagccgcggtaatacggaggaggcaagcgttatccggaatgattgggcgtaaagcgtccgtaggtggcagttcaagtctgctgtcaaagacagtagctcaactactgaaaggcagtggaaactgaacagctagagtacggtaggggcagagggaattcccggtgtagcggtgaaatgcgtagatatcgggaagaacaccggtggcgaaagcgctctgctgggccgtaactgacactgagggacgaaagctaggggagcgaatgggattagataccccagtagtcctagccgtaaacgatggaaactaggtgtagcctgtatcgacccgggctgtgccgaagctaacgcgttaagtttcccgcctggggagtacgcacgcaagtgtgaaactcaaaggaattgacgggggcccgcacaagcggtggagtatgtggtttaattcgatgcaacgcgaagaaccttaccagggcttgacatgtccggaatcttggtgaaagccgagagtgccttcgggagccggaacacaggtggtgcatggctgtcgtcagctcgtgtcgtgagatgttgggttaagtcccgcaacgagcgcaaccctcgtccttagttgccatcattcagttgggcactttagggagactgccggtgacaaaccggaggaaggtggggatgacgtcaagtcatcatgccccttacgtcctgggctacacacgtactacaatgggggggacaaagggtagccaagacgcgagtctgagccaatcccgtaaacctctcctcagttcagattgcaggctgcaactcgcctgcatgaaggaggaatcgctagtaatcgcaggtcagcatactgcggtgaatccgttcccgggccttgtacacaccgcccgtcacaccatggaagttagccacgcccgaagtcgttactctaaccgttcgcggaggaggatgccgaaggcagggctgatgactggggtg

SEQ ID NO: 702 - DNA, 1412 bp, Arthrospira platensis
gatgaacgctggcggtctgcttaacacatgcaagtcgaacgggctcttcggagctagtggcggacgggtgagtaacacgtgagaatctggctcccggtcggggacaacagagggaaacttctgctaatcccggatgagccgaaaggtaaaagatttatcgtcgggagatgagctcgcgtctgattagctagttggtgaggtaaaggctcaccaaggcgacgatcagtagctggtctgagaggatgatcagccacactgggactgagacacggcccagactcctacgggaggcagcagtggggaattttccgcaatgggcgcaagcctgacggagcaagaccgcgtgggggaggaaggctcttgggttgtaaaccccttttctcaaggaagaacacaatgacggtacttgaggaataagcctcggctaactccgtgccagcagccgcggtaatacggaggaggcaagcgttatccggaatgattgggcgtaaagcgtccgtaggtggctgttcaagtctgctgtcaaagacagtggcttaactactgaaaggcagtggaaactgaacagctagagtgcggtaggggcagagggaattcccggtgtagcggtgaaatgcgtagatatcgggaagaacaccggtggcgaaagcgctctgctgggccgcaactgacactgagggacgaaagctaggggagcgaatgggattagataccccagtagtcctagccgtaaacgatggaaactaggtgtagcctgtatcgacccgggctgtgccgaagctaacgcgttaagtttcccgcctggggagtacgcacgcaagtgtgaaactcaaaggaattgacgggggcccgcacaagcggtggagtatgtggtttaattcgatgcaacgcgaagaaccttaccagggcttgacatgtccggaatcttggtgaaagccgagagtgccttcgggagctggaacacaggtggtgcatggctgtcgtcagctcgtgtcgtgagatgttgggttaagtcccgcaacgagcgcaaccctcgtccttagttgccatcattcagttgggcactttagggagactgccggtgacaaaccggaggaaggtggggatgacgtcaagtcatcatgccccttacgtcctgggctacacacgtactacaatggggggggacaaagggtagccaagacgcgagtctgagccaatcccgtaaacctctcctcagttcagattgcaggctgcaactcgcctgcatgaaggaggaatcgctagtaatcgcaggtcagcatactgcggtgaatccgttcccgggccttgtacacaccgcccgtcacaccatggaagttagccacgcccgaagtcgttactctaaccgttcgcggaggaggatgccgaaggcagggctgatgactggggtg

SEQ ID NO: 703 - DNA, 1416 bp, Asaccharospora irregularis
gatgaacgctggcggcgtgcctaacacatgcaagtcgagcgaacttcggggtgagcggcggacgggtgagtaacgcgtgggtaacctgcctcatacacatggataacataccgaaaggtatgctaatacaggataacatatttttatcgcatgataaaaatatcaaagctccggcggtatgagatggacccgcgtctgattagctagttggtaaggtaatggcttaccaaggcgacgatcagtagccgacctgagagggtgatcggccacattggaactgagacacggtccaaactcctacgggaggcagcagtggggaatattgcacaatgggcgaaagcctgatgcagcaacgccgcgtgagcgatgaaggccttcgggtcgtaaagctctgtcctcaaggaagataatgacggtacttgaggaggaagccccggctaactacgtgccagcagccgcggtaatacgtagggggctagcgttatccggatttactgggcgtaaagggtgcgtaggcggtctttcaagtcaggagtgaaaggctacggctcaaccgtagtaagctcttgaaactgggagacttgagtgcaggagaggagagtggaattcctagtgtagcggtgaaatgcgtagatattaggaggaacaccagtagcgaaggcgctctctggactgtaactgacgctgaggcacgaaagcgtggggagcgaacaggattagataccctggtagtccacgccgtaaacgatgagtactaggtgtcgggggttaccccctcggtgccgcagctaacgcattaagtactccgcctggggagtacgctcgcaagagtgaaactcaaaggaattgacggggacccgcacaagtagcggagcatgtggtttaattcgaagcaacgcgaagaaccttacctaagcttgacatccttctgactctccttaatcggagatttccttcggggacagaagtgacaggtggtgcatggttgtcgtcagctcgtgtcgtgagatgttgggttaagtcccgcaacgagcgcaacccttgcctttagttgccagcattaagttgggcactctagagggactgccagggtaacctggaggaaggtggggatgacgtcaaatcatcatgccccttatgcttagggctacacacgtgctacaatgggtggtacagagggcagccaagtcgtgaggcggagctaatcccttaaagccattctcagttcggattgtaggctgaaactcgcctacatgaagctggagttactagtaatcgcagatcagaatgctgcggtgaatgcgttcccgggtcttgtacacaccgcccgtcacaccacgggagttggagacgcccgaagcggactatctaaccttttggaagaagtcgtcgaaggtggaatcaataactggggtg

SEQ ID NO: 704 - DNA, 1411 bp, Asaia bogorensis
agcgaacgctggcggcatgcttaacacatgcaagtcgcacggacccttcggggtgagtggcggacgggtgagtatcgcgtagggatctatccatgggtgggggataacatcgggaaactggtgctaataccgcatgatacctgagggtcaaaggcgcaagtcgcctgtggaggagcctgcgttcgattagcttgttggtggggtaaaggcctaccaaggcgatgatcgatagctggtctgagaggatgatcagccacactgggactgagacacggcccagactcctacgggaggcagcagtggggaatattggacaatgggcgaaagcctgatccagcaatgccgcgtgtgtgaagaaggtcttcggattgtaaagcactttcgacggggacgatgatgacggtacccgtagaagaagccccggctaacttcgtgccagcagccgcggtaatacgaagggggctagcgttgctcggaatgactgggcgtaaagggcgcgtaggcggtttacacagtcagatgtgaaattccagggcttaaccttggggctgcatttgatacgtgtagactagagtgtgagagagggttgtggaattcccagtgtagaggtgaaattcgtagatattgggaagaacaccggtggcgaaggcggcaacctggctcattactgacgctgaggcgcgaaagcgtggggagcaaacaggattagataccctggtagtccacgctgtaaacgatgtgtgctggatgttgggtaacttagttactcagtgtcgaagctaacgcgctaagcacaccgcctggggagtacggccgcaaggttgaaactcaaaggaattgacgggggcccgcacaagcggtggagcatgtggtttaattcgaagcaacgcgcagaaccttaccagggcttgacatggggaggctgtatccagagatgggtatttcccgcaagggacctcctgcacaggtgctgcatggctgtcgtcagctcgtgtcgtgagatgttgggttaagtcccgcaacgagcgcaaccctcgcctttagttgccagcacgtttgggtgggcactctagaggaactgccggtgacaagccggaggaaggtggggatgacgtcaagtcctcatggcccttatgtcctgggctacacacgtgctacaatggcggtgacagtgggaagctagatggtgacatcgtgccgatctctaaaagccgtctcagttcggattgtactctgcaactcgagtgcatgaaggtggaatcgctagtaatcgcggatcagcatgccgcggtgaatacgttcccgggccttgtacacaccgcccgtcacaccatgggagttggtttgacccgaagccggtgagcgaaccgcaaggacgcagccgaccacggtcgggtcagcgactggggtg

SEQ ID NO: 705 - DNA, 1410 bp, Asaia platycodi
agcgaacgctggcggcatgcttaacacatgcaagtcgcacggacctttcggggtgagtggcggacgggtgagtatcgcgtagggatctatccacgggtgggggataacatcgggaaactggtgctaataccgcatgatacctgagggtcaaaggcgcaagtcgcctgtggaggagcctgcgttcgattagcttgttggtggggtaaaggcctaccaaggcgatgatcgatagctggtctgagaggatgatcagcacactgggactgagacacggcccagactcctacgggaggcagcagtggggaatattggacaatgggcgaaagcctgatccagcaatgccgcgtgtgtgaagaaggtcttcggattgtaaagcactttcgacggggacgatgatgacggtacccgtagaagaagccccggctaacttcgtgccagcagccgcggtaatacgaagggggctagcgttgctcggaatgactgggcgtaaagggcgcgtaggcggtttacacagtcagatgtgaaattccagggcttaaccttggggctgcatttgatacgtgtagactagagtgtgagagagggttgtggaattcccagtgtagaggtgaaattcgtagatattgggaagaacaccggtggcgaaggcggcaacctggctcattactgacgctgaggcgcgaaagcgtggggagcaaacaggattagataccctggtagtccacgctgtaaacgatgtgtgctggatgttgggtaacttagttactcagtgtcgaagctaacgcgctaagcacaccgcctggggagtacggccgcaaggttgaaactcaaaggaattgacgggggcccgcacaagcggtggagcatgtggtttaattcgaagcaacgcgcagaaccttaccaggacttgacatggggaggctgtatccagagatgggtatttcccgcaagggacctcctgcacaggtgctgcatggctgtcgtcagctcgtgtcgtgagatgttgggttaagtcccgcaacgagcgcaaccctcgcctttagttgccagcacgtttgggtgggcactctagaggaactgccggtgacaagccggaggaaggtggggatgacgtcaagtcctcatggcccttatgtcctgggctacacacgtgctacaatggcggtgacagtgggaagctagatggtgacatcatgccgatctctaaaagccgtctcagttcggattgtactctgcaactcgagtacatgaaggtggaatcgctagtaatcgcggatcagcatgccgcggtgaatacgttcccgggccttgtacacaccgcccgtcacaccatgggagttggtttgacccgaagccggtgagcgaaccgcaaggacgcagccgaccacggtcgggttagcgactggggtg

SEQ ID NO: 706 - DNA, 1383 bp, Asticcacaulis benevestitus
agcgaacgctggcggcaggcctaacacatgcaagtcgaacgcaccttcgggtgagtggcggacgggtgagtaacacgtgggaacgtaccttttggttcggaataacgcagggaaacttgtgctaataccgaatgtgcccttcgggggaaagatttatcgccattagagcggcccgcgttagattagctagttggtgaggtaaaggctcaccaaggctacgatctatagctggtctgagaggatgatcagccacactgggactgagacacggcccagactcctacgggaggcagcagtggggaatcttgcgcaatgggcgaaagcctgacgcagccatgccgcgtgaatgatgaaggtcttaggattgtaaaattctttcagtagggacgataatgacggtacctacagaagaagccccggctaacttcgtgccagcagccgcggtaatacgaagggggctagcgttgctcggaattactgggcgtaaagggagcgtaggcgggttatcaagttggaggtgaaagcccagggctcaaccttggaattgccttcaaaactgatagcctagagtatgatagaggtaagtggaactccgagtgtagaggtgaaattcgtagatattcggaagaacaccagtggcgaaggcgacttactggatcatgactgacgctgaggctcgaaagcgtggggagcaaacaggattagataccctggtagtccacgctgtaaacgatgattgctagttgtcggacggcatgccgttcggtgacgcagctaacgcattaagcaatccgcctggggagtacggtcgcaagattaaaactcaaaggaattgacgggggcccgcacaagcggtggagcatgtggtttaattcgaagcaacgcgcagaaccttaccaccttttgacatgcctggacatcatgggagaccatgctttctcttcggagactgggacacaggtgctgcatggctgtcgtcagctcgtgtcgtgagatgttgggttaagtcccgcaacgagcgcaaccctcgctgttagttgccatcattaagttgggaactctaacaggactgccggtgctaagccggaggaaggtggggatgacgtcaagtcctcatggcccttacagggtgggctacacacgtgctacaatggcgactacagagggcaaatccctaaaagtcgtctcagttcggatcgtcctctgcaactcgagggcgtgaagttggaatcgctagtaatcgcggatcagcatgccgcggtgaatacgttcccgggccttgtacacaccgcccgtcacaccatgggagttggttctacccgaaggcgctgcgctaacccgtaagggaggcaggcgaccacggtagggtcagcgactggggtg

SEQ ID NO: 707 - DNA, 1383 bp, Asticcacaulis excentricus
agcgaacgctggcggcaggcctaacacatgcaagtcgaacgaagtcttcggacttagtggcggacgggtgagtaacacgtgggaacgtaccttttggttcggaacaactcagggaaacttgagctaataccggatgagcccttagggggaaagatttatcgccgaaagagcggcccgcgttagattagctagttggtgaggtaaaggctcaccaaggctacgatctatagctggtctgagaggatgatcagccacactgggactgagacacggcccagactcctacgggaggcagcagtggggaatcttgcgcaatgggcgaaagcctgacgcagccatgccgcgtgaatgatgaaggtcttaggattgtaaaattcttttaccagggacgataatgacggtacctggagaaaaagccccggctaacttcgtgccagcagccgcggtaatacgaagggggctagcgttgctcggaattactgggcgtaaagggagcgtaggcgggttgacaagttggaggtgaaagcccagggctcaaccctggaattgccttcaaaactgtcagccttgagtatggaagaggtaagtggaactccgagtgtagaggtgaaattcgtagatattcggaagaacaccagtggcgaaggcgacttactggtccatgactgacgctgaggctcgaaagcgtggggagcaaacaggattagataccctggtagtccacgctgtaaacgatgattgctagttgtcgggcagtatactgttcggtgacgcagctaacgcaataagcaatccgcctggggagtacggtcgcaagattaaaactcaaaggaattgacgggggcccgcacaagcggtggagcatgtggtttaattcgaagcaacgcgcagaaccttaccaccttttgacatgcccggctaaccagagagatttggtgttcccttcggggaccgggacacaggtgctgcatggctgtcgtcagctcgtgtcgtgagatgttgggttaagtcccgcaacgagcgcaaccctcgctgttagttgccatcatttagttgggaactctaacaggactgccggtgctaagccggaggaaggtggggatgacgtcaagtcctcatggcccttacggggtgggctacacacgtgctacaatggcgactacagagggaaaatccctaaaagtcgtctcagttcggattgtcctctgcaactcgagggcatgaagttggaatcgctagtaatcgcggatcagcatgccgcggtgaatacgttcccgggccttgtacacaccgcccgtcacaccatgggagttgggtttacccgaaggtcgtgcgctaaccgcaaggaggcagcgaaccacggtaggctcagcgactggggtg

SEQ ID NO: 708 - DNA, 1381 bp, Asticcacaulis taihuensis
agcgaacgctggcggcaggcctaacacatgcaagtcgaacgagccttcgggctagtggcggacgggtgagtaacacgtgggaacgtacctttaggttcggaacaacacagggaaacttgtgctaataccgaatgtgcccttcgggggaaagatttatcgcctttagagcggcccgcgttagattagctagttggtgaggtaaaggctcaccaaggctacgatctatagctggtctgagaggatgatcagccacattgggactgagacacggcccaaactcctacgggaggcagcagtggggaatcttgcgcaatggtcgaaagactgacgcagccatgccgcgtgaatgatgaaggtcttaggattgtaaaattctttcagcagggacgataatgacggtacctgcagaagaagccccggctaacttcgtgccagcagccgcggtaatacgaagggggctagcgttgctcggaattactgggcgtaaagggagcgtaggcgggttatcaagttggaggtgaaagcccagggctcaaccttggaattgccttcaaaactgatagcctagagtatgatagaggtaagtggaactccgagtgtagaggtgaaattcgtagatattcggaagaacaccagtggcgaaggcgacttactggatcatgactgacgctgaggctcgaaagcgtggggagcaaacaggattagataccctggtagtccacgctgtaaacgatgattgctagttgtcagccggcatgccggttggtgacgcagctaacgcattaagcaatccgcctggggagtacggtcgcaagattaaaactcaaaggaattgacgggggcccgcacaagcggtggagcatgtggtttaattcgaagcaacgcgcagaaccttaccaccttttgacatgcctggacatcatgggagaccatgctttctcttcggagactgggacacaggtgctgcatggctgtcgtcagctcgtgtcgtgagatgttgggttaagtcccgcaacgagcgcaaccctcgctgttagttgccatcatttagttgggaactctaacaggactgccggtgctaagccggaggaaggtggggatgacgtcaagtcctcatggcccttacagggtgggctacacacgtgctacaatggcgactacagagggcaaatccctaaaagtcgtctcagttcggatcgtcctctgcaactcgagggcgtgaagttggaatcgctagtaatcgcggatcagcatgccgcggtgaatacgttcccgggccttgtacacaccgcccgtcacaccatgggagttggttctacccgaaggcgctgcgctaaccgcaaggaggcaggcgaccacggtagggtcagcgactggggtg

SEQ ID NO: 709 - DNA, 1478 bp, Atlantibacter hermannii
acatgcaagtcgaacggtaacaggaagcagcttgctgcttcgctgacgagtggcggacgggtgagtaatgtctggggatctgcctgatggagggggataactactggaaacggtagctaataccgcataacgtcgcaagaccaaagagggggaccttcgggcctcttgccatcagatgaacccagatgggattagctagtaggtggggtaacggctcacctaggcgacgatccctagctggtctgagaggatgaccagccacactggaactgagacacggtccagactcctacgggaggcagcagtggggaatattgcacaatgggcgcaagcctgatgcagccatgccgcgtgtatgaagaaggccttcgggttgtaaagtactttcagcggggaggaaggcgatgcggttaataaccgcgtcgattgacgttacccgcagaagaagcaccggctaactccgtgccagcagccgcggtaatacggagggtgcaagcgttaatcggaattactgggcgtaaagcgcacgcaggcggtctgtcaagtcggatgtgaaatccccgggctcaacctgggaactgcatccgaaactggcaggcttgagtcttgtagaggggggtagaattccaggtgtagcggtgaaatgcgtagagatctggaggaataccggtggcgaaggcggccccctggacaaagactgacgctcaggtgcgaaagcgtggggagcaaacaggattagataccctggtagtccacgccgtaaacgatgtcgacttggaggttgtgcccttgaggcgtggcttccggagctaacgcgttaagtcgaccgcctggggagtacggccgcaaggttaaaactcaaatgaattgacgggggcccgcacaagcggtggagcatgtggtttaattcgatgcaacgcgaagaaccttacctggtcttgacatccacagaactttccagagatggattggtgccttcgggaactgtgagacaggtgctgcatggctgtcgtcagctcgtgttgtgaaatgttgggttaagtcccgcaacgagcgcaacccttatcctttgttgccagcggtccggccgggaactcaaaggagactgccagtgataaactggaggaaggtggggatgacgtcaagtcatcatggcccttacgaccagggctacacacgtgctacaatggcgcatacaaagagaagcgaactcgcgagagcaagcggacctcataaagtgcgtcgtagtccggattggagtctgcaactcgactccatgaagtcggaatcgctagtaatcgtggatcagaatgccacggtgaatacgttcccgggccttgtacacaccgcccgtcacaccatgggagtgggttgcaaaagaagtaggtagcttaaccttcgggagggcgcttaccactttgtgattcatgactggggtgaagtcgtaacaaggtaaccgtaggggaacctgcggttgg

SEQ ID NO: 710 - DNA, 1363 bp, Atlantibacter subterranea
gggatctgccatgatggagggggataactactggaaacggtagctaataccgcataacgtcgcaagaccaaagagggggaccttcgggcctcttgccatcagatgaacccagatgggattagctagtaggtggggtaacggctcacctaggcgacgatccctagctggtctgagaggatgaccagccacactggaactgagacacggtccagactcctacgggaggcagcagtggggaatattgcacaatgggcgcaagcctgatgcagccatgccgcgtgtatgaagaaggccttcgggttgtaaagtactttcagcggggaggaaggggaagtggttaataaccactttcattgacgttacccgcagaagaagcaccggctaactccgtgccagcagccgcggtaatacggagggtgcaagcgttaatcggaattactgggcgtaaagcgcacgcaggcggtctgtcaagtcggatgtgaaatccccgggctcaacctgggaactgcatccgaaactggcaggcttgagtcttgtagaggggggtagaattccaggtgtagcggtgaaatgcgtagagatctggaggaataccggtggcgaaggcggccccctggacaaagactgacgctcaggtgcgaaagcgtggggagcaaacaggattagataccctggtagtccacgccgtaaacgatgtcgacttggaggttgtgcccttgaggcgtggcttccggagctaacgcgttaagtcgaccgcctggggagtacggccgcaaggttaaaactcaaatgaattgacgggggcccgcacaagcggtggagcatgtggtttaattcgatgcaacgcgaagaaccttacctggtcttgacatccacagaatttcgcagagatgcggaagtgccttcgggaactgtgagacaggtgctgcatggctgtcgtcagctcgtgttgtgaaatgttgggttaagtcccgcaacgagcgcaacccttatcctttgttgccagcggttaggccgggaactcaaaggagactgccagtgataaactggaggaaggtggggatgacgtcaagtcatcatggcccttacgaccagggctacacacgtgctacaatggcgcatacaaagagaagcgacctcgcgagagcaagcggacctcataaagtgcgtcgtagtccggattggagtctgcaactcgactccatgaagtcggaatcgctagtaatcgtggatcagaatgccacggtgaatacgttcccgggccttgtacacaccgcccgtcacaccatgggagtgggttgcaaaagaagtaggtagcttaaccttcgggagggcgcttaccactttgtgattcatgactggg

SEQ ID NO: 711 - DNA, 1411 bp, Aulosira laxa
gatgaacgctggcggtatgcttaacacatgcaagtcgaacggtctcttcggagatagtggcggacgggtgagtaacgcgtgagaatctagcttcaggtcggggacaaccactggaaacggtggctaataccggatgtgccgaaaggtgaaagatttattgcctgaagatgagctcgcgtctgattagctagtaggtgtggtaagagcgcacctaggcgacgatcagtagctggtctgagaggatgatcagccacactgggactgagacacggcccagactcctacgggaggcagcagtggggaattttccgcaatgggcgaaagcctgacggagcaataccgcgtgagggaggaaggctcttgggttgtaaacctcttttctcagggaagaaaaaaatgacggtacctgaggaataagcatcggctaactccgtgccagcagccgcggtaatacggaggatgcaagcgttatccggaatgattgggcgtaaagcgtccgcaggtggctatgtaagtctgctgttaaagagtgaggctcaacctcataagagcagtggaaactacatagctagagtgcgttcggggcagagggaattcctggtgtagcggtgaaatgcgtagagatcaggaagaacaccggtggcgaaagcgctctgctaggccgcaactgacactgagggacgaaagctaggggagcgaatgggattagataccccagtagtcctagccgtaaacgatggatactaggcgtggcttgtatcgacccgagccgtgccggagctaacgcgttaagtatcccgcctggggagtacgcacgcaagtgtgaaactcaaaggaattgacgggggcccgcacaagcggtggagtatgtggtttaattcgatgcaacgcgaagaaccttaccaagacttgacatgtcgcgaaccctctggaaagggaggggtgccttcgggagcgcgaacacaggtggtgcatggctgtcgtcagctcgtgtcgtgagatgttgggttaagtcccgcaacgagcgcaaccctcgtttttagttgccagcattaagttgggcactctagagagactgccggtgacaaaccggaggaaggtggggatgacgtcaagtcagcatgccccttacgtcttgggctacacacgtactacaatgctacggacaaagggcagcgagctagcgatagcaagcaaatctcataaaccgtggctcagttcagatcgcaggctgcaactcgcctgcgtgaaggaggaatcgctagtaattgcaggtcagcatactgcagtgaattcgttcccgggccttgtacacaccgcccgtcacaccatggaagctggcaacgcccgaagtcattactccaaccattcgtgggggaggatgccgaaggcagtgctggtgactggggtg

SEQ ID NO: 712 - DNA, 1477 bp, Aureibacillus halotolerans
gacgaacgctggcggcgtgcctaatacatgcaagtcgagcgaaccaacagaagagcttgctcttctcgaggtgagcggcggacgggtgagtaacacgtgggcaacctgcctgtaagattgggataactccgggaaaccggggctaataccggataggatacgctcccgcatgggagcgtgtggaaaggcggcatttcggtgctgtcacttacagatgggcccgcggcgcattagctagttggtggggtagaggctcaccaaggcaacgatgcgtagccgacctgggagggtgatcggccacactgggactgagacacggcccagactcctacgggaggcagcagtagggaatcttccgcaatggacgaaagtctgacggagcaacgccgcgtgagtgatgaaggttttcggatcgtaaagctctgttgtgagggaagaacaagccctgtttgaataaggcagggccctgacggtacctcaccagaaagccccggctaactacgtgccagcagccgcggtaatacgtagggggcaagcgttgtccggaattattgggcgtaaagcgcgcgcaggcggtcctttaagtctgatgtgaaagcccgtggctcaaccacggagggtcattggaaactggaggacttgagtacagaagaggagagcggaattccacgtgtagcggtgaaatgcgtagatatgtggaggaacaccagtggcgaaagcggccctctggtctgtaactgacgctgagcgcaaaagcgtggggagcaaacagattagataccctggtagtccacgccgtaaacgatgagtgctaagtgttaggggggttccaccccttagtgctgaagttaacgcattaagcactccgcctggggagtacgaccgcaaggttgaaactcaaaggaattgacgggggcccgcacaagcggtggagcatgtggtttaattcgaagcaacgcgaagaaccttaccaggtcttgacatcctctgacaaccttggagacaaggcgttcccttcggggacagagtgacaggtggtgcatggttgtcgtcagctcgtgtcgtgagatgttgggttaagtcccgcaacgagcgcaacccttgaccttagttgccagcatttggttgggcactctaaggtgactgccggtgacaaaccggaggaaggtggggatgacgtcaaatcatcatgccccttatgacctgggctacacacgtgctacaatggacggcacagaggggagcaagaccgcgaggtggagcaaatcccaaaaagccgttctcagttcggattgcaggctgcaactcgcctgcatgaagccggaatcgctagtaatcgcggatcagcatgccgcggtgaatacgttcccgggccttgtacacaccgcccgtcacaccacgagagtttgtaacacccgaagtcggtgtggtaaccttttggagccagccgccgaaggtgggacagatgattggggtg

SEQ ID NO: 713 - DNA, 1405 bp, Aureimonas altamirensis
aacgaacgctggcggcaggcttaacacatgcaagtcgaacgcacctttcggggtgagtggcagacgggtgagtaacgcgtgggaatctacccttctctacgggatagctccgggaaactggaattaataccgtatacgtcctgagggagaaagatttatcggggaaggatgagcccgcgttggattagctagttggtggggtaaaggcctaccaaggcgacgatccatagctggtctaagaggatgatcagccacattgggactgagacacggcccaaactcctacgggaggcagcagtggggaatattggacaatgggcgcaagcctgatccagccatgccgcgtgagtgatgaaggccctagggttgtaaagctctttcagtggggacgataatgacggtacccacagaagaagccccggctaacttcgtgccagcagccgcggtaatacgaagggggctagcgttgttcggaattactgggcgtaaagcgcacgtaggcggatatttaagtcaggggtgaaatcccggggctcaaccccggaactgcctttgatactggatatcttgagttcggaagaggtaagtggaattgcgagtgtagaggtgaaattcgtagatattcgcaggaacaccagtggcgaaggcggcttactggtccgatactgacgctgaggtgcgaaagcgtggggagcaaacaggattagataccctggtagtccacgccgtaaacgatggaagctagccgtcgggtgatttatcactcggtggcgcagcaaacgcattaagcttcccgcctggggagtacggtcgcaagattaaaactcaaaggaattgacgggggcccgcacaagcggtggagcatgtggtttaattcgaagcaacgcgcagaaccttaccagctcttgacatgccacgacgattaccggagacggtattcttccttcgggacgtggacacaggtgctgcatggctgtcgtcagctcgtgtcgtgagatgttgggttaagtcccgcaacgagcgcaaccctcgcccttagttgccatcattcagttgggcactctaaggggactgccggtgataagccgagaggaaggtggggatgacgtcaagtcctcatggcccttacgggctgggctacacacgtgctacaatggcggtgacaatgggcagccaactcgcgagagtgcgctaatcccaaaaagccgtctcagttcggattgcactctgcaactcgggtgcatgaagttggaatcgctagtaatcgtggatcagcatgccacggtgaatacgttcccgggccttgtacacaccgcccgtcacaccatgggagttggttctacccgaaggtggtgcgctaaccgcaaggaggcagccaaccacggtagggtcagcgactggggtg

SEQ ID NO: 714 - DNA, 1402 bp, Aureimonas ureilytica
aacgaacgctggcggcaggcttaacacatgcaagtcgagcgccccgcaaggggagcggcagacgggtgagtaacgcgtgggaatctaccctgatctgcggaatagctccgggaaactggaattaataccgcatgtgccctgaggggcaaagatttatcggttcaggatgagcccgcgtccgattagctagttggtggggtaaaggcctaccaaggcgacgatcggtagctggtctaagaggatgatcagccacattgggactgagacacggcccaaactcctacgggaggcagcagtggggaatattggacaatgggcgcaagcctgatccagccatgccgcgtgagtgatgaaggccctagggttgtaaagctctttcagtggggacgataatgacggtacccacagaagaagccccggctaacttcgtgccagcagccgcggtaatacgaagggggctagcgttgttcggaattactgggcgtaaagcgcacgtaggcggacatttaagtcaggggtgaaatcccggggctcaaccccggaactgcctttgatactgggtgtcttgagttcggaagaggtgagtggaattgcgagtgtagaggtgaaattcgtagatattcgcaggaacaccagtggcgaaggcggctcactggtccgatactgacgctgaggtgcgaaagcgtggggagcaaacaggattagataccctggtagtccacgccgtaaacgatggaagctagccgttgggggatttatctctcggtggcgcagttaacgcattaagcttcccgcctggggagtacggtcgcaagattaaaactcaaaggaattgacgggggcccgcacaagcggtggagcatgtggtttaattcgaagcaacgcgcagaaccttaccagcccttgacatgccctgacggcttcagagatgaagtcattccttcgggacaggtgcacaggtgctgcatggctgtcgtcagctcgtgtcgtgagatgttgggttaagtcccgcaacgagcgcaaccctcgcccttagttgccagcattcagttgggcactctagggggactgccggtgataagccgagaggaaggtggggatgacgtcaagtcctcatggcccttacgggctgggctacacacgtgctacaatggcggtgacaatgggcagccagactgcgaagtcgagctaatcccaaaaagccgtctcagttcggattgcactctgcaactcgagtgcatgaagttggaatcgctagtaatcgtggatcagcatgccacggtgaatacgttcccgggccttgtacacaccgcccgtcacaccatgggagttggttctacccgaaggcgttgcgctaaccgcaaggaggcaggcgaccacggtagggtcagcgactggggtg

SEQ ID NO: 715 - DNA, 1471 bp, Auricoccus indicus
gatgaacgctggcggcgtgcctaatacatgcaagtcgagcgcgtttcgaaggtgcttgcaccttcaatgaaacgagcggcggacgggtgagtaacacgtaggtaacctacctttatgactgggataaccacgggaaaccggggctaataccggataagatttagcttcgcatgaagcagaagtaaaaggcagtttcggctgtcacataaagatggacctgcggcgcattagctagttggagaggtaagagctccccaaggcgacgatgcgtagccgacctgagagggtgatcggccacactgggactgagacacggcccagactcctacgggaggcagcagtagggaatcttccgcaatggacgaaagtctgacggagcaacgccgcgtgagtgaagaaggttttcggatcgtaaagctctgttgttaaggaagaacaccatggataggaaatgatcgatggatgacggtacttaaccagaaagccacggctaactacgtgccagcagccgcggtaatacgtaggtggcaagcgttatccggaattattgggcgtaaagcgcgcgtaggcggtttcttaagtctgatgtgaaagcccccggctcaaccggggagggtcattggaaactggggaacttgagtacagaagaggagagtggaattccatgtgtagcggtgaaatgcgcagagatatggaggaacaccagtggcgaaggcggctctctggtctgaaactgacgctgaggtgcgaaagcgtggggatcaaacaggattagataccctggtagtccacgctgtaaacgatgagtgctaagtgttagggggtttccgccccttagtgctgcagtaaacgcattaagcactccgcctggggagtacggccgcaaggttgaaactcaaaggaattgacggggacctgcacaagcggtggagcatgtggtttaattcgaagcaacgcgaagaaccttaccaaatcttgacatcctctgacaactttagagataaagtgtcccttcggggcagagagacaggtggtgcatggttgtcgtcagctcgtgtcgtgagatgttgggttaagtcccgcaacgagcgcaacccttaacattagttgccatcattgagttgggcactctaatgtgactgccggtgacaaaccggaggaaggtggggatgacgtcaaatcatcatgccccttatgatttgggctacacacgtgctacaatggataggaacaaagggtggcgaagtcgtgagatgaagcaaatcccataaaactattcccagttcggattgtagtctgcaactcgactacatgaaggtggaatcgctagtaatcgtggatcagcatgccacggtgaatacgttcccaggtcttgtacacaccgcccgtcacaccacgagagttcgtaacacccgaagccggtgggctaacattgaggcagccgtcgaaggtgggacgaatgattggggtg

SEQ ID NO: 716 - DNA, 1349 bp, Azoarcus communis
  misc_feature (35)..(35): n is a, c, g, or t
ttacacatgcaagtcgaacggcagcgggggcttcngcctgccggcgagtggcgaacgggtgagtaatgcatcggaacgtgcccagtcatgggggataactacgcgaaagcgtagctaataccgcatacgccctgagggggaaagtgggggatcttcggacctcacgtgattggagcggccgatgtcagattagctagttggtgaggtaaaggctcaccaaggcgacgatctgtagcgggtctgagaggatgatccgccacactgggactgagacacggcccagactcctacgggaggcagcagtggggaattttggacaatgggcgcaaccctgatccagccatgccgcgtgagtgaagaaggccttcgggttgtaaagctctttcgcaagggaagaaaacgtgtgggctaatatcctgcgcggatgacggtaccttgacaagaagcaccggctaactacgtgccagcagccgcggtaatacgtagggtgcgagcgttaatcggaattactgggcgtaaagcgtgcgcaggcggttttgtaagacaggtgtgaaatccccgggcttaacctgggaactgcgcttgtgactgcacgcctagagtacggcagaggggggtggaattcctggtgtagcagtgaaatgcgtagatatcaggaggaacaccgatggcgaaggcagccccctgggcctgtactgacgctcatgcacgaaagcgtggggagcaaacaggattagataccctggtagtccacgccctaaacgatgtcaactagttgttcgtagaggtaactctgtgagtaacgcagctaacgcgtgaagttgaccgcctggggagtacggccgcaaggttaaaactcaaaggaattgacggggacccgcacaagcggtggatgatgtggattaattcgatgcaacgcgaaaaaccttacctacccttgacatgtccagaaccctcgagagattgaggggtgccttcgggagctggaacacaggtgctgcatggctgtcgtcagctcgtgtcgtgagatgttgggttaagtcccgcaacgagcgcaacccttgtcattagttgccatcatttggttgggcactctaatgagactgccggtgacaaaccggaggaaggtggggatgacgtcaagtcctcatggcccttatgggtagggcttcacacgtcatacaatggtcggtacagagggttgccaagccgcgaggtggagctaatcccttaaagccgatcgtagtccggatcgtagtctgcaactcgactacgtgaagtcggaatcgctagtaatcgcagatcagcatgctgcggtgaatacgttcccgggtcttgtacacaccgcc

SEQ ID NO: 717 - DNA, 1453 bp, Azoarcus indigens
  misc_feature (4)..(4): n is a, c, g, or t
  misc_feature (49)..(49): n is a, c, g, or t
  misc_feature (1354)..(1354): n is a, c, g, or t
  misc_feature (1418)..(1418): n is a, c, g, or t
attnaacgctggcggcatgctttacacatgcaagtcgaacggcagcggngggcttcggccccgccggcgagtggcgaacgggtgagtaatgcatcggaacgtgcccagtcgtgggggataactacgcgaaagcgttgctaataccgcatacgtcctgagggagaaagcgggggatcttcggacctcgcgcgattggagcggccgatgtcggattagctagttggtggggtaaaggctcaccaaggcgacgatccgtagctggtctgagaggatgatcagccacactgggactgagacacggcccagactcctacgggaggcagcagtggggaattttggacaatgggggaaaccctgatccagccatgccgcgtgagtgaagaaggccttcgggttgtaaagctctttcggacggaaagaaatcgcttcggccaatacccgaagtggatgacggtaccgtaagaagaagcaccggctaactacgtgccagcagccgcggtaatacgtagggtgcgagcgttaatcggaattactgggcgtaaagcgtgcgcaggcggtttgctaagacaggtgtgaaatccccgggcttaacctgggaactgcgcttgtgactggcaggctagagtacggcagaggggggtggaattccacgtgtagcagtgaaatgcgtagagatgtggaggaacaccgatggcgaaggcagccccctgggcctgtactgacgctcatgcacgaaagcgtggggagcaaacaggattagataccctggtagtccacgccctaaacgatgtcgactagttgttcgtagaggtaactctgtgagtaacgcagctaacgcgtgaagtcgaccgcctggggagtacggccgcaaggttaaaactcaaaggaattgacggggacccgcacaagcggtggatgatgtggattaattcgatgcaacgcgaaaaaccttacctacccttgacatgcctggaaccttggtgagagccgagggtgccttcgggaaccaggacacaggtgctgcatggctgtcgtcagctcgtgtcgtgagatgttgggttaagtcccgcaacgagcgcaacccttgccattaattgccatcattcagttgggcactttaatgggactgccggtgacaaaccggaggaaggtggggatgacgtcaagtcctcatggcccttatgggtagggcttcacacgtcatacaatggtcggtacagagggttgccaagccgcgaggtggagctaatcccttaaagccgatcgtagtccggattgcagtctgcaactcgactgcatgaagtcggaatcgctagtaatcgcagatcagcatgctgcggtgaatacgttcccnggtcttgtacacaccgcccgtcacaccatgggagtgggtttcaccagaagtaggtagcttaacnttcgggagggcgcttaccacggtgagattcatgac

SEQ ID NO: 718 - DNA, 1458 bp, Azoarcus toluclasticus
attgaacgctggcggcatgctttacacatgcaagtcgaacggcagcgggggcttcggcctgccggcgagtggcgaacgggtgagtaatgcatcggaacgtgcccagtcatgggggataactacgcgaaagcgtagctaataccgcatacgccctgagggggaaagcgggggatcgcaagacctcgcgtgattggagcggccgatgtcggattagctagttggtggggtaaaggcctaccaaggcgacgatccgtagcgggtctgagaggatgatccgccacactgggactgagacacggcccagactcctacgggaggcagcagtggggaattttggacaatgggggcaaccctgatccagccatgccgcgtgagtgaagaaggccttcgggttgtaaagctctttcagacggaaagaaatcgggtgggtgaatagtctgcctggatgacggtactgtcagaagaagcaccggctaactacgtgccagcagccgcggtaatacgtagggtgcgagcgttaatcggaattactgggcgtaaagcgtgcgcaggcggttgtgtaagacaggtgtgaaatccccgggcttaacctgggaactgcgcttgtgactgcacagctagagtacggcagaggggggtggaattccacgtgtagcagtgaaatgcgtagatatgtggaggaacaccgatggcgaaggcagccccctgggccgatactgacgctcatgcacgaaagcgtggggagcaaacaggattagataccctggtagtccacgccctaaacgatgtcgactagtcgttcggagaggtaactcactgagtgacgcagctaacgcgtgaagtcgaccgcctggggagtacggccgcaaggttaaaactcaaaggaattgacggggacccgcacaagcggtggatgatgtggattaattcgatgcaacgcgaaaaaccttacctacccttgacatgcctggaatccttgagagatcagggagtgccttcgggagccaggacacaggtgctgcatggctgtcgtcagctcgtgtcgtgagatgttgggttaagtcccgcaacgagcgcaacccttgtcgttaattgccatcattaagttgggcactttagcgagactgccggtgacaaaccggaggaaggtggggatgacgtcaagtcctcatggcccttatgggtagggcttcacacgtcatacaatggtcggtacagagggctgccaaagcgcgagctggagccaatcccttaaagccgatcgtagtccggatcgtagtctgcaactcgactacgtgaagtcggaatcgctagtaatcgcagatcagcatgctgcggtgaatacgttcccgggtcttgtacacaccgcccgtcacaccatgggagtgggtttcaccagaagtaggtagcttaaccttcgggagggcgcttaccacggtgagattcatgactggggtg

SEQ ID NO: 719 - DNA, 1458 bp, Azoarcus tolulyticus
attgaacgctggcggcatgctttacacatgcaagtcgaacggcagcgggggcttcggcctgccggcgagtggcgaacgggtgagtaatgcatcggaacgtgcccagtcatgggggataactacgcgaaagcgtagctaataccgcatacgccctgagggggaaagcgggggatcgcaagacctcgcgtgattggagcggccgatgtcggattagctagttggtggggtaaaggcctaccaaggcgacgatccgtagcgggtctgagaggatgatccgccacactgggactgagacacggcccagactcctacgggaggcagcagtggggaattttggacaatgggggcaaccctgatccagccatgccgcgtgagtgaagaaggccttcgggttgtaaagctctttcagacggaaagaaatcgggtgggtcaataccctgcctggatgacggtactgtcagaagaagcaccggctaactacgtgccagcagccgcggtaatacgtagggtgcgagcgttaatcggaattactgggcgtaaagcgtgcgcaggcggttgtgtaagacaggtgtgaaatccccgggcttaacctgggaactgcgcttgtgactgcacggctagagtacggcagaggggggtggaattccacgtgtagcagtgaaatgcgtagatatgtggaggaacaccgatggcgaaggcagccccctgggccgatactgacgctcatgcacgaaagcgtggggagcaaacaggattagataccctggtagtccacgccctaaacgatgtcgactagtcgttcggagaggtaactcactgagtgacgcagctaacgcgtgaagtcgaccgcctggggagtacggccgcaaggttaaaactcaaaggaattgacggggacccgcacaagcggtggatgatgtggattaattcgatgcaacgcgaaaaaccttacctacccttgacatgcctggaatccttgagagatcagggagtgccttcgggaaccaggacacaggtgctgcatggctgtcgtcagctcgtgtcgtgagatgttgggttaagtcccgcaacgagcgcaacccttgtcgctaattgccatcatttagttgggcactttagcgagactgccggtgacaaaccggaggaaggtggggatgacgtcaagtcctcatggcccttatgggtagggcttcacacgtcatacaatggtcggtacagagggctgccaaagcgcgagctggagccaatcccttaaagccgatcgtagtccggatcgtagtctgcaactcgactacgtgaagtcggaatcgctagtaatcgcagatcagcatgctgcggtgaatacgttcccgggtcttgtacacaccgcccgtcacaccatgggagtgggtttcaccagaagtaggtagcttaaccttcgggagggcgcttaccacggtgagattcatgactggggtg

SEQ ID NO: 720 - DNA, 1443 bp, Azomonas agilis
ggcctaacacatgcaagtcgagcggatgagaaaagcttagctttttgattcagcggcggacgggtgagtaatgcctaggaatctgcctgttagtgggggataactcggggaaactcgggctaataccgcatacgtcctacgggagaaagtgggggatcttcggacctcacgctaacagatgagcctaggtcggattagctagtaggtgaggtaatggctcacctaggcgacgatccgtaactggtctgagaggatgatcagtcacactggaactgagacacggtccagactcctacgggaggcagcagtggggaatattggacaatgggcgaaagcctgatccagccatgccgcgtgtgtgaagaaggtcttcggattgtaaagcactttaagttgggaggaagggtattcacctaatacgtgggtactttgacgttaccaacagaataagcaccggctaactctgtgccagcagccgcggtaatacagagggtgcaagcgttaatcggaattactgggcgtaaagcgcgcgtaggtggtttgataagttgaatgtgaaatccccgagctcaacttgggaactgcatccaaaactgtctaactagagtacggtagagggtggtggaatttcctgtgtagcggtgaaatgcgtagatataggaaggaacaccagtggcgaaggcgaccacctggactgatactgacactgaggtgcgaaagcgtggggagcaaacaggattagataccctggtagtccacgccgtaaacgatgtcaactagccgttggaatccttgagattttagtggcgcagctaacgcattaagttgaccgcctggggagtacggccgcaaggttaaaactcaaatgaattgacgggggcccgcacaagcggtggagcatgtggtttaattcgaagcaacgcgaagaaccttacctggccttgacatgcagagaactttctagagatagattggtgccttcgggaactctgacacaggtgctgcatggctgtcgtcagctcgtgtcgtgagatgttgggttaagtcccgtaacgagcgcaacccttgtccttagttaccagcacattatggtgggcactctaaggagactgccggtgacaaaccggaggaaggtggggatgacgtcaagtcatcatggcccttacggccagggctacacacgtgctacaatggtcggtacagagggttgccaagccgcgaggtggagctaatctcacaaaaccgatcgtagtccggatcgcagtctgcaactcgactgcgtgaagtcggaatcgctagtaatcgtgaatcagaacgtcacggtgaatacgttcccgggccttgtacacaccgcccgtcacaccatgggagtgggttgctccagaagtagctagtctaaccttaggggggacggttaccacggagtgatttatgactggggtg

SEQ ID NO: 721 - DNA, 1463 bp, Azonexus fungiphilus
  misc_feature (52)..(52): n is a, c, g, or t
  misc_feature (59)..(59): n is a, c, g, or t
  misc_feature (1392)..(1392): n is a, c, g, or t
  misc_feature (1399)..(1400): n is a, c, g, or t
  misc_feature (1409)..(1409): n is a, c, g, or t
  misc_feature (1411)..(1411): n is a, c, g, or t
  misc_feature (1423)..(1423): n is a, c, g, or t
  misc_feature (1428)..(1428): n is a, c, g, or t
  misc_feature (1434)..(1434): n is a, c, g, or t
  misc_feature (1444)..(1445): n is a, c, g, or t
  misc_feature (1448)..(1448): n is a, c, g, or t
  misc_feature (1452)..(1452): n is a, c, g, or t
attgaacgctggcggcatgccttacacatgcaagtcgaacggcagcacgggngcttcgntcctggtggcgagtggcgaacgggtgagtaatgtatcggaacgtacccttcagtgggggataactatccgaaaggatagctaataccgcatattctctgaggaggaaagcgggggatcgcaagacctcgcgctgatggagcggccgatatcagattagctagttggtggggtaaaggcctaccaaggcgacgatctgtagcgggtctgagaggatgatccgccacactgggactgagacacggcccagactcctacgggaggcagcagtggggaattttggacaatgggggcaaccctgatccagccatgccgcgtgagtgaagaaggccttcgggttgtaaagctctttcggccgggaagaaatcgcgtgagttaataccttgcgtggatgacggtaccggaataagaagcaccggctaactacgtgccagcagccgcggtaatacgtagggtgcgagcgttaatcggaattactgggcgtaaagcgtgcgcaggcggttttttaagacaggcgtgaaatccccgggcttaacctgggaactgcgcttgtgactggaagactagagtatggcagaggggggtggaattccacgtgtagcagtgaaatgcgtagagatgtggaggaacaccgatggcgaaggcagccccctgggccaatactgacgctcatgcacgaaagcgtggggagcaaacaggattagataccctggtagtccacgccctaaacgatgtcaactaggtgttgggtgggtaaaaccatttagtaccgtagctaacgcgtgaagttgaccgcctggggagtacggccgcaaggttaaaactcaaaggaattgacggggacccgcacaagcggtggatgatgtggattaattcgatgcaacgcgaaaaaccttacctacccttgacatgttcagaatcctgaagagatttgggagtgcccgaaagggagctggaacacaggtgctgcatggctgtcgtcagctcgtgtcgtgagatgttgggttaagtcccgcaacgagcgcaacccttgtcgttaattgccatcatttagttgggcactttagcgagactgccggtgacaaaccggaggaaggtggggatgacgtcaagtcctcatggcccttatgggtagggcttcacacgtcatacaatggtcggtacagagggttgccaagccgcgaggtggagccaatcccagaaagccgatcgtagtccggatcgtagtctgcaactcgactgcgtgaagtcggaatcgctagtaatcgcggatcagcatgtcgcggtgaatacgttcccgggtcttgtacacaccgcccgtcacaccatgggagngggttcnnccagaagtngntagcctaaccgnaaggngggcgnttaccacggnnggnttcntgactggggtg

SEQ ID NO: 722 - DNA, 1460 bp, Azonexus hydrophilus
attgaacgctggcggcatgccttacacatgcaagtcgaacggcagcacggacttcggtctggtggcgagtggcgaacgggtgagtaatgcatcggaacgtacccgggagtgggggataactatccgaaaggatagctaataccgcatattctgtgcgcaggaaagcaggggaccttcgggccttgtgctcccggagcggccgatgtcagattagctagttggtggggtaaaggcctaccaaggcgacgatctgtagcgggtctgagaggatgatccgccacactggaactgagacacggtccagactcctacgggaggcagcagtggggaattttggacaatgggggcaaccctgatccagccatgccgcgtgagtgaagaaggccttcgggttgtaaagctctttcggccgggaagaaatcgcgttggctaatacccagcgtggatgacggtaccggaataagaagcaccggctaactacgtgccagcagccgcggtaatacgtagggtgcgagcgttaatcggaattactgggcgtaaagcgtgcgcaggcggttttttaagataggcgtgaaatccccgggctcaacctgggaactgcgcttatgactggaagactagagtatggcagaggggggtggaattccacgtgtagcagtgaaatgcgtagagatgtggaggaacaccgatggcgaaggcagccccctgggccaatactgacgctcatgcacgaaagcgtggggagcaaacaggattagataccctggtagtccacgccctaaacgatgtcaactagttgttgggagggtaaaaccttttagtaacggagctaacgcgtgaagttgaccgcctggggagtacggccgcaaggttaaaactcaaaggaattgacggggacccgcacaagcggtggatgatgtggattaattcgatgcaacgcgaaaaaccttacctacccttgacatgccaggaacttgccagagatggcttggtgcccgaaagggagcctggacacaggtgctgcatggctgtcgtcagctcgtgtcgtgagatgttgggttaagtcccgcaacgagcgcaacccttgtcgttaattgccatcatttggttgggcactttaacgagactgccggtgacaaaccggaggaaggtggggatgacgtcaagtcctcatggcccttatgggtagggcttcacacgtcatacaatggtcggtacagagggttgccaagccgcgaggtggagccaatcccagaaagccgatcgtagtccggattgtaggctgcaactcgcctgcatgaagtcggaatcgctagtaatcgcggatcagcatgtcgcggtgaatacgttcccgggtcttgtacacaccgcccgtcacaccatgggagcgggttccgccagaagtgggtagcctaaccgcaaggagggcgcttaccacggcggggttcgtgactggggtg

SEQ ID NO: 723 - DNA, 1405 bp, Azorhizobium caulinodans
agcgaacgctggcggcaggcctaacacatgcaagtcgagcgcccagcaatgggagcggcagacgggtgagtaacgcgtggggatgtgcccaatggtgcggaataacccagggaaacttggattaataccgcatgtgcccttcgggggaaagatttatcgccattggatcaacccgcgtctgattagctagttggtgaggtaaaggctcaccaaggcgacgatcagtagctggtctgagaggatgatcagccacactgggactgagacacggcccagactcctacgggaggcagcagtggggaatattggacaatgggcgcaagcctgatccagccatgccgcgtgagtgatgaaggccttagggttgtaaagctctttcgccggtgaagataatgacggtaaccggagaagaagccccggctaacttcgtgccagcagccgcggtaatacgaagggggcaagcgttgctcggaatcactgggcgtaaagcgcacgtaggcggatcgttaagtcaggggtgaaagcctggagctcaactccagaactgcccttgatactggcgatcttgagttcgagagaggttggtggaactccgagtgtagaggtgaaattcgtagatattcggaagaacaccagtggcgaaggcggccaactggctcgatactgacgctgaggtgcgaaagcgtggggagcaaacaggattagataccctggtagtccacgccgtaaacgatggatgctagccgttggggagcttgctcttcagtggcgcagctaacgccttaagcatcccgcctggggagtacggtcgcaagattaaaactcaaaggaattgacgggggcccgcacaagcggtggagcatgtggtttaattcgaagcaacgcgcagaaccttaccagcctttgacatggcaggacgacttccggagacggatttcttccagcaatggacctgcacacaggtgctgcatggctgtcgtcagctcgtgtcgtgagatgttgggttaagtcccgcaacgagcgcaaccctcgcctttagttgccatcattcagttgggcactctaaagggactgccggtgataagccgcgaggaaggtggggatgacgtcaagtcctcatggcccttacgggctgggctacacacgtgctacaatggcggtgacaatgggatgcgagcctgcgagggtgagcaaatctccaaaagccgtctcagttcggattgcactctgcaactcgagtgcatgaagttggaatcgctagtaatcgtggatcagcatgccacggtgaatacgttcccgggccttgtacacaccgcccgtcacaccatgggagttggctttacccgaaggcgttgcgctaaccgcaaggaggcaggcgaccacggtagggtcagtgactggggtg

SEQ ID NO: 724 - DNA, 1436 bp, Azospira oryzae
gcttacacatgcaagtcgaacggcagcacgggagcttgctcctggtggcgagtggcgaacgggtgagtaatacatcggaacgtacccaggagtgggggataacgtagcgaaagttacgctaataccgcatattctgtgagcaggaaagcgggggatcgcaagacctcgcgctcttggagcggccgatgtcggattagctagttggtgaggtaaaagctcaccaaggcgacgatccgtagcaggtctgagaggatgatctgccacactgggactgagacacggcccagactcctacgggaggcagcagtggggaattttggacaatgggggcaaccctgatccagccatgccgcgtgagtgaagaaggccttcgggttgtaaagctctttcggcggggaagaaatggcaacggctaatatccgttgttgatgacggtacccgcataagaagcaccggctaactacgtgccagcagccgcggtaatacgtagggtgcgagcgttaatcggaattactgggcgtaaagcgtgcgcaggcggtttcgtaagacagacgtgaaatccccgggctcaacctgggaactgcgtttgtgactgcgaggctagagtacggcagaggggggtagaattccacgtgtagcagtgaaatgcgtagagatgtggaggaataccgatggcgaaggcagccccctgggttagtactgacgctcatgcacgaaagcgtggggagcaaacaggattagataccctggtagtccacgccctaaacgatgtcaactaggtgttggaagggttaaaccttttagtaccgcagctaacgcgtgaagttgaccgcctggggagtacggccgcaaggttaaaactcaaaggaattgacggggacccgcacaagcggtggatgatgtggattaattcgatgcaacgcgaaaaaccttacctacccttgacatgccaggaactttccagagatggattggtgcccgaaagggagcctggacacaggtgctgcatggctgtcgtcagctcgtgtcgtgagatgttgggttaagtcccgcaacgagcgcaacccttgtcattaattgccatcatttagttgggcactttaatgagactgccggtgacaaaccggaggaaggtggggatgacgtcaagtcctcatggcccttatgggtagggcttcacacgtcatacaatggtcggtacagagggttgccaagccgcgaggtggagccaatcccagaaagccgatcgtagtccggatcgcagtctgcaactcgactgcgtgaagtcggaatcgctagtaatcgcggatcagcatgtcgcggtgaatacgttcccgggtcttgtacacaccgcccgtcacaccatgggagtgggttctaccagaagtagttagcctaaccgtaaggagggcgattaccacggtaggattcatgac

SEQ ID NO: 725 - DNA, 1420 bp, Azospirillum brasilense
agcgaacgctggcggcatgcctaacacatgcaagtcgaacgagggcttcggccctagtggcgcacgggtgagtaacacgtgggaacctgcctttcggttcgggataacgtctggaaacggacgctaacaccggatacgtcccccagagagatttgggcggagaaagtttacgccgagagaggggcccgcgtccgattaggtagttggtggggtaatggcccaccaagccgacgatcggtagctggtctgagaggatgatcagccacactgggactgagacacggcccagactcctacgggaggcagcagtggggaatattggacaatgggggcaaccctgatccagcaatgccgcgtgagtgatgaaggccttagggttgtaaagctctttcgcacgcgacgatgatgacggtagcgtgagaagaagccccggctaacttcgtgccagcagccgcggtaatacgaagggggcgagcgttgttcggaattactgggcgtaaagggcgcgtaggcggcccgatcagtcagatgtgaaagccccgggctcaacctgggaactgcatttgatactgtcgggcttgagttccggagaggatggtggaattcccagtgtagaggtgaaattcgtagatattgggaagaacaccggtggcgaaggcggccatctggacggacactgacgctgaggcgcgaaagcgtggggagcaaacaggattagataccctggtagtccacgccgtaaacgatgaatgctagacgctggggtgcatgcacttcggtgtcgccgctaacgcattaagcattccgcctggggagtacggccgcaaggttaaaactcaaaggaattgacgggggcccgcacaagcggtggagcatgtggtttaattcgaagcaacgcgcagaaccttaccaacccttgacatgtccaccaccggctcgagagatcgggctttcagttcggctgggtggaacacaggtgctgcatggctgtcgtcagctcgtgtcgtgagatgttgggttaagtcccgcaacgagcgcaacccctaccgccagttgccatcattcagttgggcactctggtggaactgccggtgacaagccggaggaaggcggggatgacgtcaagtcctcatggcccttatgggttgggctacacacgtgctacaatggcggtgacagtgggatgcgaagtcgcaagatggagccaatccccaaaagccgtctcagttcggattgcactctgcaactcgggtgcatgaagttggaatcgctagtaatcgcggatcagcacgccgcggtgaatacgttcccgggccttgtacacaccgcccgtcacaccatgggagttggctttacccgaaggtggtgcgctaaccggcaacggaggcagccaaccacggtcaggtcagcgactggggtg

SEQ ID NO: 726 - DNA, 1362 bp, Azotobacter beijerinckii
tctgcccgatagtgggggacaacgtttcgaaaggaacgctaataccgcatacgtcctacgggagaaagtgggggctcttcggacctcacgctatcggatgagcctaggtcggattagctagttggtggggtaaaggcccaccaaggcgacgatccgtaactggtctgagaggatgatcagtcacactggaactgagacacggtccagactcctacgggaggcagcagtggggaatattggacaatgggcgaaagcctgatccagccatgccgcgtgtgtgaagaaggtcttcggattgtaaagcactttaagttgggaggaagggctgtaagttaataccttgcagttttgacgttaccgacagaataagcaccggctaacttcgtgccagcagccgcggtaatacgaagggtgcaagcgttaatcggaattactgggcgtaaagcgcgcgtaggtggtttggtaagttggatgtgaaagccccgggctcaacctgggaactgcatccaaaactgcctgactagagtacggtagagggtggtggaatttcctgtgtagcggtgaaatgcgtagatataggaaggaacaccagtggcgaaggcgaccacctggactgatactgacactgaggtgcgaaagcgtggggagcaaacaggattagataccctggtagtccacgccgtaaacgatgtcgactagccgttgggctccttgagagcttagtggcgcagctaacgcattaagtcgaccgcctggggagtacggccgcaaggttaaaactcaaatgaattgacgggggcccgcacaagcggtggagcatgtggtttaattcgaagcaacgcgaagaaccttacctggccttgacatcctgcgaactgggtagagatacctgggtgccttcgggagcgcagagacaggtgctgcatggctgtcgtcagctcgtgtcgtgagatgttgggttaagtcccgtaacgagcgcaacccttgtccttagttaccagcacgtcatggtgggcactctaaggagactgccggtgacaaaccggaggaaggtggggatgacgtcaagtcatcatggcccttacggccagggctacacacgtgctacaatggtcggtacagagggttgccaagtcgcgaggcggagctaatcccagaaaaccgatcgtagtccggatcgcagtctgcaactcgactgcgtgaagtcggaatcgctagtaatcgcgaatcagaatgtcgcggtgaatacgttcccgggccttgtacacaccgcccgtcacaccatgggagtgggttgctccagaagtagctagtctaaccttcggggggacggttaccacggagtgattcatgactggggtg

SEQ ID NO: 727 - DNA, 1422 bp, Azotobacter chroococcum
gagcggatgaggggtgcttgcatcccgattcagcggcggacgggtgagtaatgcctaggaatctgcccgatagtgggggacaacgtttcgaaaggaacgctaataccgcatacgtcctacgggagaaagtgggggctcttcggacctcacgctatcggatgagcctaggtcggattagctagttggtggggtaaaggctcaccaaggcgacgatccgtaactggtctgagaggatgatcagtcacactggaactgagacacggtccagactcctacgggaggcagcagtggggaatattggacaatgggcgaaagcctgatccagccatgccgcgtgtgtgaagaaggtcttcggattgtaaagcactttaagttgggaggaagggctgtaagcgaataccttgcagttttgacgttaccgacagaataagcaccggctaacttcgtgccagcagccgcggtaatacgaagggtgcaagcgttaatcggaattactgggcgtaaagcgcgcgtaggtggtttggtaagttggatgtgaaagccccgggctcaacctgggaactgcatccaaaactgcctgactagagtacggtagagggtggtggaatttcctgtgtagcggtgaaatgcgtagatataggaaggaacaccagtggcgaaggcgaccacctggactgatactgacactgaggtgcgaaagcgtggggagcaaacaggattagataccctggtagtccacgccgtaaacgatgtcgactagccgttgggctccttgagagcttagtggcgcagctaacgcattaagtcgaccgcctggggagtacggccgcaaggttaaaactcaaatgaattgacgggggcccgcacaagcggtggagcatgtggtttaattcgaagcaacgcgaagaaccttacctggccttgacatgctgagaactttccagagatggattggtgccttcgggaactcagacacaggtgctgcatggctgtcgtcagctcgtgtcgtgagatgttgggttaagtcccgtaacgagcgcaacccttgtccttagttaccagcacctcgggtgggcactctaaggagactgccggtgacaaaccggaggaaggtggggatgacgtcaagtcatcatggcccttacggccagggctacacacgtgctacaatggttggtacagagggttgccaagtcgcgaggcggagctaatcccagaaaaccgatcgtagtccggatcgcagtctgcaactcgactgcgtgaagtcggaatcgctagtaatcgcgaatcagaatgtcgcggtgaatacgttcccgggccttgtacacaccgcccgtcacaccatgggagtgggttgctccagaagtagctagtctaaccttcgggaggacggttaccacggagtgattcatgactggggtg

SEQ ID NO: 728 - DNA, 1458 bp, Azotobacter vinelandii
attgaacgctggcggcaggcctaacacatgcaagtcgagcggcagcgggaccttcgggttgccggcgagcggcggacgggtgagtaatgcctaggaatctgcctgttagtgggggataacgcggggaaactcgcgctaataccgcatacgtcctacgggagaaagtgggggaccctcgggcctcacgctaacagatgagcctaggtcggattagctagttggtggggtaaaggcccaccaaggcgacgatccgtaactggtctgagaggatgatcagtcacactggaactgagacacggtccagactcctacgggaggcagcagtggggaatattggacaatgggcgaaagcctgatccagccatgccgcgtgtgtgaagaaggtcttcggattgtaaagcactttaagttgggaggaagggcgctcggtgaatacccaagcgtcttgacgttaccgacagaataagcaccggctaacttcgtgccagcagccgcggtaatacgaagggtgcaagcgttaatcggaattactgggcgtaaagcgcgcgtaggtggttcggcaagttggatgtgaaagccccgggctcaacctgggaaccgcatccaaaactactgggctagagtacggtagagggtggtggaatttcctgtgtagcggtgaaatgcgtagatataggaaggaacaccagtggcgaaggcgaccacctggaccgatactgacactgaggtgcgaaagcgtggggagcaaacaggattagataccctggtagtccacgccgtaaacgatgtcgactagccgttgggctccttgagagcttagtggcgcagctaacgcattaagtcgaccgcctggggagtacggccgcaaggttaaaactcaaatgaattgacgggggcccgcacaagcggtggagcatgtggtttaattcgaagcaacgcgaagaaccttacctggccttgacatcctgcgaactttcaagagattgatgggtgccttcgggagcgcagagacaggtgctgcatggctgtcgtcagctcgtgtcgtgagatgttgggttaagtcccgtaacgagcgcaacccttgtccttagttaccagcgattcggtcgggcactctaaggagactgccggtgacaaaccggaggaaggtggggatgacgtcaagtcatcatggcccttacggccagggctacacacgtgctacaatggtcggtacaaagggttgccaagtcgcgaggcggagctaatcccagaaaaccgatcgtagtccggatcgcagtctgcaactcgactgcgtgaagtcggaatcgctagtaatcgcgaatcagaatgtcgcggtgaatacgttcccgggccttgtacacaccgcccgtcacaccatgggagtgggttgctccagaagtagctagtctaaccctcgggaggacggttaccacggagtgattcatgactggggtg

SEQ ID NO: 729 - DNA, 1414 bp, Bacillus acidiproducens
gtcgagcggactctttaaaagcttgcttttaaagagtcagcggcggacgggtgagtaacacgtgggtaacctgcctgtaagactgggataactccgggaaaccggggctaataccggataagtttttccttcgcatggaggaaaaataaaagatggcttttgctatcacttacagatggacccgcggcgcattagctagttggtggggtaatggcccaccaaggcaacgatgcgtagccgacctgagagggtgatcggccacattgggactgagacacggcccaaactcctacgggaggcagcagtagggaatcttccgcaatggacgaaagtctgacggagcaacgccgcgtgagtgaagaaggttttcggatcgtaaaactctgttgtcagggaagaacaagtgctgttcgaacagggcggcaccttgacggtacctgaccagaaagccacggctaactacgtgccagcagccgcggtaatacgtaggtggcaagcgttgtccggaattattgggcgtaaagcgcgcgcaggcggcttcttaagtctgatgtgaaatcttgcggctcaaccgcaagcggtcattggaaactgggaggcttgagtgcagaagaggagagtggaattccacgtgtagcggtgaaatgcgtagagatgtggaggaacaccagtggcgaaggcgactctctggtctgtaactgacgctgaggcgcgaaagcgtggggagcgaacaggattagataccctggtagtccacgccgtaaacgatgagtgctaagtgttagagggtttccgccctttagtgctgcagctaacgcattaagcactccgcctggggagtacgaccgcaaggttgaaactcaaaggaattgacgggggcccgcacaagcggtggagcatgtggtttaattcgaagcaacgcgaagaaccttaccaggtcttgacatcctctgacctccctggagacagggccttccccttcgggggacagagtgacaggtggtgcatggttgtcgtcagctcgtgtcgtgagatgttgggttaagtcccgcaacgagcgcaacccttgaccttagttgccagcattcagttgggcactctaaggtgactgccggtgacaaaccggaggaaggtggggatgacgtcaaatcatcatgccccttatgacctgggctacacacgtgctacaatggatggtacaaagggcagcaagaccgcgaggttaagccaatcccataaaaccattctcagttcggattgcaggctgcaacccgcctgcatgaagctggaatcgctagtaatcgcggatcagcatgccgcggtgaatacgttcccgggccttgtacacaccgcccgtcacaccacgagagtttgtaacacccgaagtcggtgaggtaacctttggagccagccg

SEQ ID NO: 730 - DNA, 1470 bp, Bacillus aerius
gacgaacgctggcggcgtgcctaatacatgcaagtcgagcggaccgacgggagcttgctcccttaggtcagcggcggacgggtgagtaacacgtgcgtaacctgcctgtaagactgggataactccgggaaaccggggctaataccggatgcttgattgaaccgcatggttcaatcataaaaggtggcttttagctaccacttacagatggacccgcggcgcattagctagttggtgaggtaacggctcaccaaggcgacgatgcgtagccgacctgagagggtgatcggccacactgggactgagacacggcccagactcctacgggaggcagcagtagggaatcttccgcaatggacgaaagtctgacggagcaacgccgcgtgagtgatgaaggttttcggatcgtaaaactctgttgttagggaagaacaagtaccgttcgaatagggcggtaccttgacggtacctaaccagaaagccacggctaactacgtgccagcagccgcggtaatacgtaggtggcaagcgttgtccggatattgggcgtaaagcgcgcgcaaggggttttctaagtctgatgtgcccgcccccggctcaaccggggagggtcattggaaactggggaacttgagtgcagaagaggagagtggaattccacgtgtagcggtgaaatgcgtagagatgtggaggaacaccagtggcgaaggcgactctctggtctgtaactgacgctgaggcgcgaaagcgtggggagcgaacaggattagataccctggtagtccacgccgtaaacgatgagtgctaagtgttagagggtttccgccctttagtgctgcagcaaacgcattaagcactccgcctggggagtacggtcgcaagactgaaactcaaaggaattgacgggggcccgcacaagcggtggagcatgtggtttaattcgaagcaacgcgaagaaccttaccaggtcttgacatcctctgacaaccctagagatagggcttccccttcgggggcagagtgacaggtggtgcatggttgtcgtcagctcgtgtcgtgagatgttgggttaagtcccgcaacgagcgcaacccttgatcttagttgccagcattcagttgggcactctaaggtgactgccggtgacaaaccggaggaaggtggggatgacgtcaaatcatcatgccccttatgacctgggctacacacgtgctacaatgggcagaacaaagggcagcgaagccgcgaggctaagccaatcccacaaatctgttctcagttcggatcgcagtctgcaactcgactgcgtgaagctggaatcgctagtaatcgcggatcagcatgccgcggtgaatacgttcccgggccttgtacacaccgcccgtcacaccacgagagtttgtaacacccgaagtcggtgaggtaaccttttggagccagccgccgaaggtgggacagatgattggggtg

SEQ ID NO: 731 - DNA, 1531 bp, Bacillus aerophilus
gagtttgatcctggctcaggacgaacgctggcggcgtgcctaatacatgcaagtcgagcggacagaagggagcttgctcccggatgttagcggcggacgggtgagtaacacgtgggtaacctgcctgtaagactgggataactccgggaaaccggagctaataccggatagttccttgaaccgcatggttcaaggatgaaagacggtttcggctgtcacttacagatggacccgcggcgcattagctagttggtgaggtaacggctcaccaaggcgacgatgcgtagccgacctgagagggtgatcggccacactgggactgagacacggcccagactcctacgggaggcagcagtagggaatcttccgcaatggacgaaagtctgacggagcaacgccgcgtgagtgatgaaggttttcggatcgtaaagctctgttgttagggaagaacaagtgcaagagtaactgcttgcaccttgacggtacctaaccagaaagccacggctaactacgtgccagcagccgcggtaatacgtaggtggcaagcgttgtccggaattattgggcgtaaagggctcgcaggcggtttcttaagtctgatgtgaaagcccccggctcaaccggggagggtcattggaaactgggaaacttgagtgcagaagaggagagtggaattccacgtgtagcggtgaaatgcgtagagatgtggaggaacaccagtggcgaaggcgactctctggtctgtaactgacgctgaggagcgaaagcgtggggagcgaacaggattagataccctggtagtccacgccgtaaacgatgagtgctaagtgttagggggtttccgccccttagtgctgcagctaacgcattaagcactccgcctggggagtacggtcgcaagactgaaactcaaaggaattgacgggggcccgcacaagcggtggagcatgtggtttaattcgaagcaacgcgaagaaccttaccaggtcttgacatcctctgacaaccctagagatagggctttcccttcggggacagagtgacaggtggtgcatggttgtcgtcagctcgtgtcgtgagatgttgggttaagtcccgcaacgagcgcaacccttgatcttagttgccagcattcagttgggcactctaaggtgactgccggtgacaaaccggaggaaggtggggatgacgtcaaatcatcatgccccttatgacctgggctacacacgtgctacaatggacagaacaaagggctgcgagaccgcaaggtttagccaatcccacaaatctgttctcagttcggatcgcagtctgcaactcgactgcgtgaagctggaatcgctagtaatcgcggatcagcatgccgcggtgaatacgttcccgggccttgtacacaccgcccgtcacaccacgagagtttgcaacacccgaagtcggtgaggtaacctttatggagccagccgccgaaaggtggggcagatgattggggtgaagtcgtaacaaggtagccgtatcggaaggtgcggctgga

SEQ ID NO: 732 - DNA, 1474 bp, Bacillus akibai
  misc_feature (444)..(444): n is a, c, g, or t
  misc_feature (455)..(455): n is a, c, g, or t
  misc_feature (532)..(532): n is a, c, g, or t
gacgaacgctggcggcgtgcctaatacatgcaagtcgagcggactaatgggagcttgctcccagaggttagcggcggacgggtgagtaacacgtgggcaacctgccctgtagactgggataacaccgagaaatcggtgctaataccggataacttccgaggtcacctgaccttggattaaaagatggctccggctatcactacaggatgggcccgcggcgcattagctagttggtgaggtaacggctcaccaaggcgacgatgcgtagccgacctgagagggtgatcggccacactgggactgagacacggcccagactcctacgggaggcagcagtagggaatcttccgcaatggacgaaagtctgacggagcaacgccgcgtgagtgatgaaggatttcggttcgtaaagctctgttgttagggaagaacaagtaccgttcnaatagggcggnaccttgacggtacctaaccagaaagccacggctaactacgtgccagcagccgcggtaatacgtaggtggcaagcgtngtccggaattattgggcgtaaagcgcgcgcaggcggtcttttaagtctgatgtgaaagcccacggctcaaccgtggagggtcattggaaactgggagacttgagtacagaagaggagagtggaattccacgtgtagcggtgaaatgcgtagatatgtggaggaacaccagtggcgaaggcgactctctggtctgtaactgacgctgaggcgcgaaagcgtggggagcaaacaggattagataccctggtagtccacgccgtaaacgatgagtgctaggtgttaggggtttcgatgcccttagtgccgaagttaacacattaagcactccgcctggggagtacgaccgcaaggttgaaactcaaaggaattgacgggggcccgcacaagcagtggagcatgtggtttaattcgaagcaacgcgaagaaccttaccaggtcttgacatcctttgaccaccctagagatagggctttccccttcgggggcaaagtgacaggtggtgcatggttgtcgtcagctcgtgtcgtgagatgttgggttaagtcccgcaacgagcgcaacccttgatcttagttgccagcattcagttgggcactctaaggtgactgccggtgacaaaccggaggaaggtggggacgacgtcaaatcatcatgccccttatgacctgggctacacacgtgctacaatggatggtacaaagagcagcaaaaccgcgaggtcgagccaatctcataaagccattctcagttcggattgtaggctgcaactcgcctacatgaagccggaattgctagtaatcgcggatcagcatgccgcggtgaatacgttcccgggccttgtacacaccgcccgtcacaccacgagagtttgtaacacccgaagtcggtggggtaacccttttgggagctagccgcctaaggtgggacagatgattggggtg

SEQ ID NO: 733 - DNA, 1474 bp, Bacillus albus
gatgaacgctggcggcgtgcctaatacatgcaagtcgagcgaatggattaagagcttgctcttatgaagttagcggcggacgggtgagtaacacgtgggtaacctgcccataagactgggataactccgggaaaccggggctaataccggataacattttgaactgcatggttcgaaattgaaaggcggcttcggctgtcacttatggatggacccgcgtcgcattagctagttggtgaggtaacggctcaccaaggcaacgatgcgtagccgacctgagagggtgatcggccacactgggactgagacacggcccagactcctacgggaggcagcagtagggaatcttccgcaatggacgaaagtctgacggagcaacgccgcgtgagtgatgaaggctttcgggtcgtaaaactctgttgttagggaagaacaagtgctagttgaataagctggcaccttgacggtacctaaccagaaagccacggctaactacgtgccagcagccgcggtaatacgtaggtggcaagcgttatccggaattattgggcgtaaagcgcgcgcaggtggtttcttaagtctgatgtgaaagcccacggctcaaccgtggagggtcattggaaactgggagacttgagtgcagaagaggaaagtggaattccatgtgtagcggtgaaatgcgtagagatatggaggaacaccagtggcgaaggcgactttctggtctgtaactgacactgaggcgcgaaagcgtggggagcaaacaggattagataccctggtagtccacgccgtaaacgatgagtgctaagtgttagagggtttccgccctttagtgctgaagttaacgcattaagcactccgcctggggagtacggccgcaaggctgaaactcaaaggaattgacgggggcccgcacaagcggtggagcatgtggtttaattcgaagcaacgcgaagaaccttaccaggtcttgacatcctctgaaaaccctagagatagggcttctccttcgggagcagagtgacaggtggtgcatggttgtcgtcagctcgtgtcgtgagatgttgggttaagtcccgcaacgagcgcaacccttgatcttagttgccatcattaagttgggcactctaaggtgactgccggtgacaaaccggaggaaggtggggatgacgtcaaatcatcatgccccttatgacctgggctacacacgtgctacaatggacggtacaaagagctgcaagaccgcgaggtggagctaatctcataaaaccgttctcagttcggattgtaggctgcaactcgcctacatgaagctggaatcgctagtaatcgcggatcagcatgccgcggtgaatacgttcccgggccttgtacacaccgcccgtcacaccacgagagtttgtaacacccgaagtcggtggggtaacctttttggagccagccgcctaaggtgggacagatgattggggtg

SEQ ID NO: 734 - DNA, 1410 bp, Bacillus alcalophilus
  misc_feature (660)..(660): n is a, c, g, or t
  misc_feature (666)..(666): n is a, c, g, or t
  misc_feature (998)..(998): n is a, c, g, or t
  misc_feature (1182)..(1182): n is a, c, g, or t
  misc_feature (1199)..(1199): n is a, c, g, or t
gacgaacgctggcggcgtgcctaatacatgcaagtcgagcggaccaaagggagcttgctcccagaggttagcggcggacgggtgagtaacacgtgggcaacctgccctgtagactgggataacatcgagaaatcggtgctaataccggataatcacaggaatcacatggttcttttgtaaaagatggctccggctatcactaacagatgggcctgcggcgctttagctagttggtaaggtaatggcttaccaaggcgacgatgcgtagccgacctgagagggtgatcggccacactgggactgagacacggcccagactcctacgggaggcagcagtagggaatcttccgcaatggacgaaagtctgacggagcaacgccgcgtgagtgatgaaggttttcggatcgtaaagctctgttgttagggaagaacaagtgccgttcgaataggtcggcaccttgacggtacctaaccagaaagccacggctaactacgtgccagcagccgcggtaatacgtaggtggcaagcgttgtccggaattattgggcgtaaagcgcgcgcaggcggtcttttaagtctgatgtgaaatatcggggctcaaccccgaggggtcattggaaactgggagcttgagtacagaagaggagagtggaattccncgtgtngcggtgaaatgcgtagatatgtggaggaacaccagtggcgaaggcgactctctggtctgtaactgacgctgaggcgcgaaagcgtggggagcaaacaggattagataccctggtagtccacgccgtaaacgatgagtgctaggtgttaggggtttcgatgcccttagtgccgaagttaacacattaagcactccgcctggggagtacggccgcaaggctgaaactcaaaggaattgacgggggcccgcacaagcagtggagcatgtggtttaattcgaagcaacgcgaagaaccttaccaggtcttgacatcctttgaccactctagagatngagctttccttcgggggacaaagtgacaggtggtgcatggttgtcgtcagctcgtgtcgtgagatgttgggttaagtcccgcaacgagcgcaacccttgatcttagttgccagcatttagttgggcactctaaggtgactgccggtgacaaaccggaggaaggtggggatgacgtcaaatcatnatgccccttatgacctnggctacacacgtgctacaatggatggtacaaagggcagcgaaaccgcgaggtcgagccaatcccataaagccattctcagttcggattgtaggctgcaactcgcctacatgaagccggaattgctagtaatcgcggatcagcatgccgcggtgaatacgttcccgggccttgtacacaccgcccgtcacaccacgagagtttgtaacaccc

SEQ ID NO: 735 - DNA, 1474 bp, Bacillus anthracis
gatgaacgctggcggcgtgcctaatacatgcaagtcgagcgaatggattaagagcttgctcttatgaagttagcggcggacgggtgagtaacacgtgggtaacctgcccataagactgggataactccgggaaaccggggctaataccggataatattttgaaccgcatggttcgaaattgaaaggcggcttcggctgtcacttatggatggacccgcgtcgcattagctagttggtgaggtaacggctcaccaaggcaacgatgcgtagccgacctgagagggtgatcggccacactgggactgagacacggcccagactcctacgggaggcagcagtagggaatcttccgcaatggacgaaagtctgacggagcaacgccgcgtgagtgatgaaggctttcgggtcgtaaaactctgttgttagggaagaacaagtgctagttgaataagctggcaccttgacggtacctaaccagaaagccacggctaactacgtgccagcagccgcggtaatacgtaggtggcaagcgttatccggaattattgggcgtaaagcgcgcgcaggtggtttcttaagtctgatgtgaaagcccacggctcaaccgtggagggtcattggaaactgggagacttgagtgcagaagaggaaagtggaattccatgtgtagcggtgaaatgcgtagagatatggaggaacaccagtggcgaaggcgactttctggtctgtaactgacactgaggcgcgaaagcgtggggagcaaacaggattagataccctggtagtccacgccgtaaacgatgagtgctaagtgttagagggtttccgccctttagtgctgaagttaacgcattaagcactccgcctggggagtacggccgcaaggctgaaactcaaaggaattgacgggggcccgcacaagcggtggagcatgtggtttaattcgaagcaacgcgaagaaccttaccaggtcttgacatcctctgacaaccctagagatagggcttctccttcgggagcagagtgacaggtggtgcatggttgtcgtcagctcgtgtcgtgagatgttgggttaagtcccgcaacgagcgcaacccttgatcttagttgccatcattaagttgggcactctaaggtgactgccggtgacaaaccggaggaaggtggggatgacgtcaaatcatcatgccccttatgacctgggctacacacgtgctacaatggacggtacaaagagctgcaagaccgcgaggtggagctaatctcataaaaccgttctcagttcggattgtaggctgcaactcgcctacatgaagctggaatcgctagtaatcgcggatcagcatgccgcggtgaatacgttcccgggccttgtacacaccgcccgtcacaccacgagagtttgtaacacccgaagtcggtggggtaacctttttggagccagccgcctaaggtgggacagatgattggggtg

SEQ ID NO: 736 - DNA, 1474 bp, Bacillus aryabhattai
gatgaacgctggcggcgtgcctaatacatgcaagtcgagcgaactgattagaagcttgcttctatgacgttagcggcggacgggtgagtaacacgtgggcaacctgcctgtaagactgggataacttcgggaaaccgaagctaataccggataggatcttctccttcatgggagatgattgaaagatggtttcggctatcacttacagatgggcccgcggtgcattagctagttggtgaggtaacggctcaccaaggcaacgatgcatagccgacctgagagggtgatcggccacactgggactgagacacggcccagactcctacgggaggcagcagtagggaatcttccgcaatggacgaaagtctgacggagcaacgccgcgtgagtgatgaaggctttcgggtcgtaaaactctgttgttagggaagaacaagtacgagagtaactgctcgtaccttgacggtacctaaccagaaagccacggctaactacgtgccagcagccgcggtaatacgtaggtggcaagcgttatccggaattattgggcgtaaagcgcgcgcaggcggtttcttaagtctgatgtgaaagcccacggctcaaccgtggagggtcattggaaactggggaacttgagtgcagaagagaaaagcggaattccacgtgtagcggtgaaatgcgtagagatgtggaggaacaccagtggcgaaggcggctttttggtctgtaactgacgctgaggcgcgaaagcgtggggagcaaacaggattagataccctggtagtccacgccgtaaacgatgagtgctaagtgttagagggtttccgccctttagtgctgcagctaacgcattaagcactccgcctggggagtacggtcgcaagactgaaactcaaaggaattgacgggggcccgcacaagcggtggagcatgtggtttaattcgaagcaacgcgaagaaccttaccaggtcttgacatcctctgacaactctagagatagagcgttccccttcgggggacagagtgacaggtggtgcatggttgtcgtcagctcgtgtcgtgagatgttgggttaagtcccgcaacgagcgcaacccttgatcttagttgccagcatttagttgggcactctaaggtgactgccggtgacaaaccggaggaaggtggggatgacgtcaaatcatcatgccccttatgacctgggctacacacgtgctacaatggatggtacaaagggctgcaagaccgcgaggtcaagccaatcccataaaaccattctcagttcggattgtaggctgcaactcgcctacatgaagctggaatcgctagtaatcgcggatcagcatgccgcggtgaatacgttcccgggccttgtacacaccgcccgtcacaccacgagagtttgtaacacccgaagtcggtggagtaaccgtaaggagctagccgcctaaggtgggacagatgattggggtg

SEQ ID NO: 737 - DNA, 1472 bp, Bacillus asahii
  misc_feature (794)..(794): n is a, c, g, or t
  misc_feature (1259)..(1259): n is a, c, g, or t
gacgaacgctggcggcgtgcctaatacatgcaagtcgagcgaatcaatgggagcttgctccctgagattagcggcggacgggtgagtaacacgtgggtaacctgcctgtaagactgggataacttcgggaaaccggagctaataccggatagtttcttctctcgcatgagagaagatggaaagatggtttcggctatcacttacagatggacccgcggcgcattagctagttggtgaggtaacggctcaccaaggcgacgatgcgtagccgacctgagagggtgatcggccacactgggactgagacacggcccagactcctacgggaggcagcagtagggaatcttccgcaatggacgaaagtctgacggagcaacgccgcgtgagcgaagaaggccttcgggtcgtaaagctctgttgttagggaagaacaagtacgagagtaactgctcgtaccttgacggtacctaaccagaaagccacggctaactacgtgccagcagccgcggtaatacgtaggtggcaagcgttgtccggaattattgggcgtaaagcgcgcgcaggcggtcctttaagtctgatgtgaaagcccacggctcaaccgtggagggtcattggaaactgggggacttgagtgcagaagaggagagtggaattccacgtgtagcggtgaaatgcgtagagatgtggaggaacaccagtggcgaaggcgactctctggtctgtaactgacgctgaggcgcgaaagcgtggggagcaaacaggattagataccctggtagtccacgccgtanacgatgagtgctaagtgttagagggtttccgccctttagtgctgcagctaacgcattaagcactccgcctggggagtacggccgcaaggctgaaactcaaaggaattgacgggggcccgcacaagcggtggagcatgtggtttaattcgaagcaacgcgaagaaccttaccaggtcttgacatcctctgccaaccctagagatagggcgttccccttcgggggacagagtgacaggtggtgcatgggtgtcgtcagctcgtgtcgtgagatgttgggttaagtcccgcaacgagcgcaacccttgatcttagttgccagcattcagttgggcactctaaggtgactgccggtgacaaaccggaggaaggtggggatgacgtcaaatcatcatgccccttatgacctgggctacacacgtgctacaatggatggtacaaagagctgcgaacccgcgagggtaagcnaatctcataaagccattctcagttcggattgtaggctgcaactcgcctacatgaagccggaatcgctagtaatcgcggatcagcatgccgcggtgaatacgttcccgggccttgtacacaccgcccgtcacaccacgagagtttgtaacacccgaagtcggtgaggtaaccttttggagccagccgcctaaggtgggatagatgattggggtg

SEQ ID NO: 738 - DNA, 1471 bp, Bacillus australimaris
gacgaacgctggcggcgtgcctaatacatgcaagtcgagcggacagaagggagcttgctcccggatgttagcggcggacgggtgagtaacacgtgggtaacctgcctgtaagactgggataactccgggaaaccggagctaataccggatagttccttgaaccgcatggttcaaggatgaaagacggtttcggctgtcacttacagatggacccgcggcgcattagctagttggtggggtaatggctcaccaaggcgacgatgcgtagccgacctgagagggtgatcggccacactgggactgagacacggcccagactcctacgggaggcagcagtagggaatcttccgcaatggacgaaagtctgacggagcaacgccgcgtgagtgatgaaggttttcggatcgtaaagctctgttgttagggaagaacaagtgcgagagtaactgctcgcaccatgacggtacctaaccagaaagccacggctaactacgtgccagcagccgcggtaatacgtaggtggcaagcgttgtccggaattattgggcgtaaagggctcgcaggcggtttcttaagtctgatgtgaaagcccccggctcaaccggggagggtcattggaaactgggaaacttgagtgcagaagaggagagtggaattccacgtgtagcggtgaaatgcgtagagatgtggaggaacaccagtggcgaaggcgactctctggtctgtaactgacgctgaggagcgaaagcgtggggagcgaacaggattagataccctggtagtccacgccgtaaacgatgagtgctaagtgttagggggtttccgccccttagtgctgcagctaacgcattaagcactccgcctggggagtacggtcgcaagactgaaactcaaaggaattgacgggggcccgcacaagcggtggagcatgtggtttaattcgaagcaacgcgaagaaccttaccaggtcttgacatcctctgacaaccctagagatagggctttcccttcggggacagagtgacaggtggtgcatggttgtcgtcagctcgtgtcgtgagatgttgggttaagtcccgcaacgagcgcaacccttgatcttagttgccagcatttagttgggcactctaaggtgactgccggtgacaaaccggaggaaggtggggatgacgtcaaatcatcatgccccttatgacctgggctacacacgtgctacaatggacagaacaaagggctgcaagaccgcaaggtttagccaatcccataaatctgttctcagttcggatcgcagtctgcaactcgactgcgtgaagctggaatcgctagtaatcgcggatcagcatgccgcggtgaatacgttcccgggccttgtacacaccgcccgtcacaccacgagagtttgcaacacccgaagtcggtgaggtaacctttatggagccagccgccgaaggtggggcagatgattggggtg

SEQ ID NO: 739 - DNA, 1471 bp, Bacillus azotoformans
  misc_feature (10)..(10): n is a, c, g, or t
  misc_feature (1006)..(1006): n is a, c, g, or t
  misc_feature (1254)..(1254): n is a, c, g, or t
gacgaacgcnggcggcgtgcctaatacatgcaagtcgagcggatgataaaggagcttgctcctttagattcagcggcggacgggtgagtaacacgtgggcaacctgcctgtaagactgggataacttcgggaaaccggagctaataccggataactcttcgaacctcatggttcgaagataaaagatggtttcggctatcacttacagatgggcccgcggcgcattagctagttggtgaggtaacggctcaccaaggcgacgatgcgtagccgacctgagagggtgatcggccacactgggactgagacacggcccagactcctacgggaggcagcagtagggaatcttccgcaatggacgaaagtctgacggagcaacgccgcgtgagcgatgaaggccttcgggtcgtaaagctctgttgttagggaagaacaagtaccagttaactgctggtaccttgacggtacctaacgagaaagccacggctaactacgtgccagcagccgcggtaatacgtaggtggcaagcgttgtccggatttattgggcgtaaagcgcgcgcaggcggttctttaagtctgatgtgaaagcccccggctcaaccggggagggtcattggaaactggggaacttgagtgcagaagagaagagcggaattccacgtgtagcggtgaaatgcgtagagatgtggaggaacaccagtggcgaaggcggctctttggtctgtaactgacgctgaggcgcgaaagcgtggggagcaaacaggattagataccctggtagtccacgccgtaaacgatgagtgctaagtgttggagggtttccgcccttcagtgctgcagctaacgcattaagcactccgcctggggagtacggtcgcaagactgaaactcaaaggaattgacgggggcccgcacaagcggtggagcatgtggtttaattcgaagcaacgcgaagaaccttaccaggtcttgacatcttctgacaatcctagagataggacttncccttcgggggcagaatgacaggtggtgcatggttgtcgtcagctcgtgtcgtgagatgttgggttaagtcccgcaacgagcgcaacccttgtccttagttgccagcattcagttgggcactctaaggagactgccggtgacaaaccggaggaaggtggggatgacgtcaaatcatcatgccccttatgacctgggctacacacgtgctacaatggatggtacaaagggctgctaagccgcgaggctnagccaatcccataaagccattctcagttcggattgtaggctgcaactcgcctacatgaagccggaatcgctagtaatcgcggatcagcatgccgcggtgaatacgttcccgggccttgtacacaccgcccgtcacaccacgagagtttgtaacacccgaagtcggtggggtaaccttttggagccagccgcctaaggtgggacagatgattggggtg

SEQ ID NO: 740 - DNA, 1473 bp, Bacillus boroniphilus
gacgaacgctggcggcgtgcctaatacatgcaagtcgagcggatcttcattagcttgcttttgaagatcagcggcggacgggtgagtaacacgtgggcaacctgcctgtaagactgggataacttcgggaaaccggagctaataccggataatcctttccctcacatgagggaaagctgaaagacggtttcggctgtcacttacagatgggcccgcggcgcattagctagttggtgaggtaacggctcaccaaggcaacgatgcgtagccgacctgagagggtgatcggccacactgggactgagacacggcccagactcctacgggaggcagcagtagggaatcttccgcaatggacgaaagtctgacggagcaacgccgcgtgaacgatgaaggccttcgggtcgtaaagttctgttgtcagggaagaacaagtgccggagtaactgccggtaccttgacggtacctgaccagaaagccacggctaactacgtgccagcagccgcggtaatacgtaggtggcaagcgttgtccggaattattgggcgtaaagcgcgcgcaggcggttccttaagtctgatgtgaaagcccccggctcaaccggggagggtcattggaaactggggaacttgagtgcagaagaggagagcggaattccacgtgtagcggtgaaatgcgtagagatgtggaggaacaccagtggcgaaggcggctctctggtctgtaactgacgctgaggcgcgaaagcgtggggagcgaacaggattagataccctggtagtccacgccgtaaacgatgagtgctaagtgttagagggtttccgccctttagtgctgcagcaaacgcattaagcactccgcctggggagtacggccgcaaggctgaaactcaaaggaattgacgggggcccgcacaagcggtggagcatgtggtttaattcgaagcaacgcgaagaaccttaccaggtcttgacatcctctgacaaccctagagatagggcgttccccttcgggggacagagtgacaggtggtgcatggttgtcgtcagctcgtgtcgtgagatgttgggttaagtcccgcaacgagcgcaacccttgatcttagttgccagcattcagttgggcactctaaggtgactgccggtgacaaaccggaggaaggtggggatgacgtcaaatcatcatgccccttatgacctgggctacacacgtgctacaatggatggaacaaagggtcgcgaagccgcgaggtcgagccaatcccataaatccattctcagttcggattgcaggctgcaactcgcctgcatgaagccggaatcgctagtaatcgcggatcagcatgccgcggtgaatacgttcccgggccttgtacacaccgcccgtcacaccacgagagtttgtaacacccgaagtcggtggggtaacctttatggagccagccgcctaaggtgggacagatgattggggtg

SEQ ID NO: 741 - DNA, 1473 bp, Bacillus butanolivorans
gacgaacgctggcggcgtgcctaatacatgcaagtcgagcgaatcgatgggagcttgctccctgagattagcggcggacgggtgagtaacacgtgggcaacctgcctataagactgggataacttcgggaaaccggagctaataccggatacgttcttttctcgcatgagagaagatggaaagacggtttcggctgtcacttatagatgggcccgcggcgcattagctagttggtgaggtaatggctcaccaaggcgacgatgcgtagccgacctgagagggtgatcggccacactgggactgagacacggcccagactcctacgggaggcagcagtagggaatcttccgcaatggacgaaagtctgacggagcaacgccgcgtgaacgaagaaggccttcgggtcgtaaagttctgttgttagggaagaacaagtaccagagtaactgctggtaccttgacggtacctaaccagaaagccacggctaactacgtgccagcagccgcggtaatacgtaggtggcaagcgttgtccggaattattgggcgtaaagcgcgcgcaggtggttccttaagtctgatgtgaaagcccacggctcaaccgtggagggtcattggaaactggggaacttgagtgcagaagaggaaagtggaattccaagtgtagcggtgaaatgcgtagagatttggaggaacaccagtggcgaaggcgactttctggtctgtaactgacactgaggcgcgaaagcgtggggagcaaacaggattagataccctggtagtccacgccgtaaacgatgagtgctaagtgttagagggtttccgccctttagtgctgcagctaacgcattaagcactccgcctggggagtacggccgcaaggctgaaactcaaaggaattgacgggggcccgcacaagcggtggagcatgtggtttaattcgaagcaacgcgaagaaccttaccaggtcttgacatcctctgacaaccctagagatagggcgttccccttcgggggacagagtgacaggtggtgcatggttgtcgtcagctcgtgtcgtgagatgttgggttaagtcccgcaacgagcgcaacccttgatcttagttgccagcattcagttgggcactctaaggtgactgccggtgacaaaccggaggaaggtggggatgacgtcaaatcatcatgccccttatgacctgggctacacacgtgctacaatggatggtacaaagggctgcaaacctgcgaaggtaagcgaatcccataaagccattctcagttcggattgtaggctgcaactcgcctacatgaagccggaatcgctagtaatcgcggatcagcatgccgcggtgaatacgttcccgggccttgtacacaccgcccgtcacaccacgagagtttgtaacacccgaagtcggtgaggtaacctttatggagccagccgcctaaggtgggacagatgattggggtg

SEQ ID NO: 742 - DNA, 1479 bp, Bacillus camelliae
gacgaacgctggcggcgtgcctaatacatgcaagtcgagcggaccaaaatgaaagtttactttcattttggttagcggcggacgggtgagtaacacgtgggtaacctgcctgtaagactgggataactccgggaaaccggggctaataccggataacttctttcctcgcatgaggaaagattgaaagatggcttttgctatcacttacagatggacccgcggcgcattagctagttggtgaggtaacggctcaccaaggcaacgatgcgtagccgacctgagagggtgatcggccacactgggactgagacacggcccagactcctacgggaggcagcagtagggaatcttccgcaatggacgaaagtctgacggagcaacgccgcgtaagtgatgaaggtcttcggatcgtaaaactctgttgttagagaagaacaagtaccgttcgaatagggcggtaccttgacggtacctaaccagaaagccacggctaactacgtgccagcagccgcggtaatacgtaggtggcaagcgttgtccggaattattgggcgtaaagcgcgcgcaggcggtttcttaagtctgatgtgaaagcccacggctcaaccgtggagggtcattggaaactgggagacttgagtgcagaagaggagagtggaattccacgtgtagcggtgaaatgcgtagagatgtggaggaacaccagtggcgaaggcgactctctggtctgtaactgacgctgaggcgcgaaagcgtggggagcgaacaggattagataccctggtagtccacgccgtaaacgatgagtgctaagtgttagagggtttccgccctttagtgctgcagctaacgcattaagcactccgcctggggagtacggccgcaaggctgaaactcaaaggaattgacgggggcccgcacaagcggtggagcatgtggtttaattcgaagcaacgcgaagaaccttaccaggtcttgacatcctctgctaaccctagagatagggcgttccccttcgggggacagagtgacaggtggtgcatggttgtcgtcagctcgtgtcgtgagatgttgggttaagtcccgcaacgagcgcaacccttgaccttagttgccagcattcagttgggcactctaaggtgactgccggtgacaaaccggaggaaggtggggatgacgtcaaatcatcatgccccttatgacctgggctacacacgtgctacaatggatggtacaaagggctgcgagaccgcgaggttaagccaatcccataaaaccattctcagttcggattgcaggctgcaactcgcctgcatgaagccggaatcgctagtaatcgcggatcagcatgccgcggtgaatacgttcccgggccttgtacacaccgcccgtcacaccacgagagtttgtaacacccgaagtcggtgaggtaacgcagacgcgagccagccgccgaaggtgggacagatgattggggtg

SEQ ID NO: 743 - DNA, 1472 bp, Bacillus campisalis
gacgaacgctggcggcgtgcctaatacatgcaagtcgagcggacttgagggagcttgctcccgatggtcagcggcggacgggtgagtaacacgtgggcaacctgcctgtaagactgggataactccgggaaaccggggctaataccggataattcattccctcacatgagggaatgctgaaagacggcttttgctgtcacttacagatgggcccgcggcgcattagctagttgggagggtaacggctcaccaaggccacgatgcgtagccgacctgagagggtgatcggccacactgggactgagacacggcccagactcctacgggaggcagcagtagggaatcttccgcaatggacgaaagtctgacggagcaacgccgcgtgagcgaagaaggccttcgggtcgtaaagctctgttgtcagggaagaacaagtaccggagtaactgccggtaccttgacggtacctgaccagaaagccacggctaactacgtgccagcagccgcggtaatacgtaggtggcaagcgttgtccggaattattgggcgtaaagcgcgcgcaggcggtcctttaagtctgatgtgaaagcccacggctcaaccgtggagggtcattggaaactgggggacttgagtgcagaagaggagagcggaattccacgtgtagcggtgaaatgcgtagagatgtggaggaacaccagtggcgaaggcggctctctggtctgtaactgacgctgaggcgcgaaagcgtggggagcgaacaggattagataccctggtagtccacgccgtaaacgatgagtgctaagtgttagagggtttccgccctttagtgctgcagcaaacgcattaagcactccgcctggggagtacggccgcaaggctgaaactcaaaggaattgacgggggcccgcacaagcggtggagcatgtggtttaattcgaagcaacgcgaagaaccttaccaggtcttgacatcctctgccactcctggagacaggacgttccccttcgggggacagagtgacaggtggtgcatggttgtcgtcagctcgtgtcgtgagatgttgggttaagtcccgcaacgagcgcaacccttgttcttagttgccagcattcagttgggcactctaaggagactgccggtgaccaaccggaggaaggtggggatgacgtcaaatcatcatgccccttatgacctgggctacacacgtgctacaatggatagaacaaagggcagcgaagccgcgaggtgaagccaatcccataaatctattctcagttcggattgcaggctgcaactcgcctgcatgaagccggaatcgctagtaatcgcggatcagcatgccgcggtgaatacgttcccgggccttgtacacaccgcccgtcacaccacgagagtttgtaacacccgaagtcggtggggtaaccttttggagccagccgcctaaggtgggacagatgattggggtg

SEQ ID NO: 744 - DNA, 1320 bp, Bacillus canaveralius
atacatgcaagtcgagcggacgtgcgggagcttgctcccgttcgttagcggcggacgggtgagtaacacgtgggcaacctgcctgtaagactgggataacttcgggaaaccggagctaataccggataatccattccctctcctgagggaatgctgaaagacggtttcggctgtcacttacagatgggcccgcggcgcattagctagttggtggggtaatggctcaccaaggcgacgatgcgtagccgacctgagagggtgatcggccacactgggactgagacacggcccagactcctacgggaggcagcagtagggaatcttccgcaatggacgaaagtctgacggagcaacgccgcgtgagtgatgaaggttttcggatcgtaaaactctgttgtcagggaagaacaagtattggagtaactgccagtaccttgacggtacctgaccagaaagccacggctaactacgtgccagcagccgcggtaatacgtaggtggcaagcgttgtccggaattattgggcgtaaagcgcgcgcaggcggtttcttaagtctgatgtgaaagcccacggctcaaccgtggagggtcattggaaactgggaaacttgagtgcagaagaggagagcggaattccacgtgtagcggtgaaatgcgtagagatgtggaggaacaccagtggcgaaggcggctctctggtctgtaactgacgctgaggcgcgaaagcgtggggagcgaacaggattagataccctggtagtccacgccgtaaacgatgagtgctaagtgttagagggtttccgccctttagtgctgcagcaaacgcattaagcactccgcctggggagtacggccgcaaggctgaaactcaaaggaattgacgggggcccgcacaagcggtggagcatgtggtttaattcgaagcaacgcgaagaaccttaccaggtcttgacatcctctgacaatcctggagacaggacgttccccttcgggggacagagtgacaggtggtgcatggttgtcgtcagctcgtgtcgtgagatgttgggttaagtcccgcaacgagcgcaacccttgatcttagttgccagcattcagttgggcactctaaggtgactgccggtgacaaaccggaggaaggtggggatgacgtcaaatcatcatgccccttatgacctgggctacacacgtgctacaatggatggtacaaagggctgcgaaaccgcgaggtggagcgaatcccataaaaccattctcagttcggattgcaggctgcaactcgcctgcatgaagccggaatcgctagtaatcgcggatcagc

SEQ ID NO: 745 - DNA, 1472 bp, Bacillus caseinilyticus
gacgaacgctggcggcgtgcctaatacatgcaagtcgagcggaccaaaggaagcttgcttccggaggtcagcggcggacgggtgagtaacacgtgggcaacctgccttacagactgggataactccgggaaaccggggctaataccggatgaccgatgggaccgcatggtcctgtcgtaaaagttgggattactaacactgtaagatgggcccgcggcgcattagctagttggtgaggtaacggctcaccaaggcgacgatgcgtagccgacctgagagggtgatcggccacactgggactgagacacggcccagactcctacgggaggcagcagtagggaatcatccgcaatgggcgaaagcctgacggtgcaacgccgcgtgaacgaggaaggtcttcggattgtaaagttctgttgtcagggaagaagaagtgccattcgaacaggttggcaccgtgacggtacctgacgagaaagccccggctaactacgtgccagcagccgcggtaatacgtagggggcaagcgttgtccggaattattgggcgtaaagcgcgcgcaggcggtttcttaagtctgatgtgaaagcccacggctcaaccgtggagggtcattggaaactgggagacttgagtgtaggagaggaaagtggaattccacgtgtagcggtgaaatgcgtagagatgtggaggaacaccagtggcgaaggcgactttctggcctataactgacgctgaggcgcgaaagcgtggggagcaaacaggattagataccctggtagtccacgccgtaaacgatgagtgctaggtgttaggggtttcgatacccttagtgccgcagttaacacattaagcactccgcctggggagtacggccgcaaggctgaaactcaaaggaattgacgggggcccgcacaagcagtggagcatgtggtttaattcgaagcaacgcgaagaaccttaccaggtcttgacatcctctgccactcctggagacaggacgttccccttcgggggacagagtgacaggtggtgcatggttgtcgtcagctcgtgtcgtgagatgttgggttaagtcccgcaacgagcgcaacccttgatcttagttgccagcattgagttgggcactctaaggtgactgccggtgacaaaccggaggaaggtggggatgacgtcaaatcatcatgccccttatgacctgggctacacacgtgctacaatgggtggtacaaagggcagcaacgccgcgaggccgagcgaatcccagaaagccactctcagttcggattgcaggctgcaactcgcctgcatgaagccggaattgctagtaatcgcggatcagcatgccgcggtgaatacgttcccgggccttgtacacaccgcccgtcacaccacgagagtttgtaacacccgaagtcggtgaggtaaccttttggagccagccgccgaaggtgggacagatgattggggtg

SEQ ID NO: 746 - DNA, 1472 bp, Bacillus cavernae
gacgaacgctggcggcgtgcctaatacatgcaagtcgagcggattttcgggagcttgcttctgaaaatcagcggcggacgggtgagtaacacgtgggcaacctgcctgtaagactgggataacttcgggaaaccggagctaataccggatagattctgctctcgcatgagaggagagggaaagatggtttacgctatcacttacagatgggcccgcggcgcattagctagttggtgaggtaatggctcaccaaggcgacgatgcgtagccgacctgagagggtgatcggccacactgggactgagacacggcccagactcctacgggaggcagcagtagggaatcttccgcaatggacgaaagtctgacggagcaacgccgcgtgagtgaagaaggttttcggatcgtaaaactctgttgtcagggaagaacacgtaccagagtaactgctggtaccttgacggtacctgaccagaaagccacggctaactacgtgccagcagccgcggtaatacgtaggtggcaagcgttgtccggaattattgggcgtaaagcgcgcgcaggcggtcctttaagtctgatgtgaaagcccacggctcaaccgtggagggtcattggaaactgggggacttgagtgcagaagaggagagtggaattccacgtgtagcggtgaaatgcgtagagatgtggaggaacaccagtggcgaaggcgactctctggtctgtaactgacgctgaggcgcgaaagcgtggggagcgaacaggattagataccctggtagtccacgccgtaaacgatgagtgctaagtgttagagggtttccgccctttagtgctgcagcaaacgcattaagcactccgcctggggagtacggccgcaaggctgaaactcaaaggaattgacgggggcccgcacaagcggtggagcatgtggtttaattcgaagcaacgcgaagaaccttaccaggtcttgacatcctctgacgcccctagagatagggagttccccttcgggggacagagtgacaggtggtgcatggttgtcgtcagctcgtgtcgtgagatgttgggttaagtcccgcaacgagcgcaacccttgatcttagttgccagcattgagttgggcactctaaggtgactgccggtgacaaaccggaggaaggtggggatgacgtcaaatcatcatgccccttatgacctgggctacacacgtgctacaatggatggtacaaagggcagcaaagccgcaaggcctagcgaatcccagaaagccattctcagttcggattgcaggctgcaactcgcctgcatgaagccggaatcgctagtaatcgcggatcagcatgccgcggtgaatacgttcccgggccttgtacacaccgcccgtcacaccacgagagtttgtaacacccgaagtcggtgaggtaaccatttggagccagccgcctaaggtggaacagatgattggggtg

SEQ ID NO: 747 - DNA, 1477 bp, Bacillus cellulosilyticus
gacgaacgctggcggcgtgcctaatacatgcaagtcgagcggatcaattaagagcttgctcttatgagatcagcggcggacgggtgagtaacacgtgggcaacctgccttacagactgggataactccgggaaaccgaagctaataccggatgatcaacggaaccgcatggttctattgtaaaagttgggagtaatcctaacactgtgagatgggcccgcggcgcattagctagttggtgaggtaatggctcaccaaggcaacgatgcgtagccgacctgagagggtgatcggccacactggaactgagacacggtccagactcctacgggaggcagcagtagggaatcatccgcaatgggcgaaagcctgacggtgcaacgccgcgtgaacgatgaaggtcttcggattgtaaagttctgttgttagggaagaacaagtgccattcaaataggttggcaccttgacggtacctaaccagaaagccccggctaactacgtgccagcagccgcggtaatacgtagggggcaagcgttgtccggaattattgggcgtaaagcgcgcgcaggcggtctcttaagtctgatgtgaaagcccacggctcaaccgtggagggtcattggaaactgggggacttgagtgtaggagaggaaagtggaattccacgtgtagcggtgaaatgcgtagatatgtggaggaacaccagtggcgaaggcgactttctggcctacaactgacgctgaggcgcgaaagcgtggggagcaaacaggattagataccctggtagtccacgccgtaaacgatgagtgctaggtgttaggggtttcgatacccttagtgccgcagttaacacattaagcactccgcctggggagtacggccgcaaggctgaaactcaaaggaattgacgggggcccgcacaagcagtggagcatgtggtttaattcgaagcaacgcgaagaaccttaccaggtcttgacatcctctgacactcctagagataggacgttccccttcgggggacagagtgacaggtggtgcatggttgtcgtcagctcgtgtcgtgagatgttgggttaagtcccgcaacgagcgcaacccttgatcttagttgccagcattcagttgggcactctaaggtgactgccggtgacaaaccggaggaaggtggggatgacgtcaaatcatcatgccccttatgacctgggctacacacgtgctacaatgggtggtacaaagggcagcaaagccgcgaggccgagcgaatcccataaagccactctcagttcggattgcaggctgcaactcgcctgcatgaagccggaattgctagtaatcgcggatcagcatgccgcggtgaatacgttcccgggccttgtacacaccgcccgtcacaccacgagagtttgtaacacccgaagtcggtgaggtaaccttttggagccagccgccgaaggtgggacagatgattggggtg

SEQ ID NO: 748 - DNA, 1460 bp, Bacillus coahuilensis
gacgaacgctggcggcgtgcctaatacatgcaagtcgagcgaggccttcgggcctagcggcggacgggtgagtaacacgtgggtaacctgcctgtaagactgggataacttcgggaaaccgaagctaataccggataacatttttggttgcatgaccgaaaattgaaaggtggcttttagctatcacttacagatggacccgtggcgcattagctagttggtgaggtaacggctcaccaaggcaacgatgcgtagccgacctgagagggtgatcggccacactgggactgagacacggcccagactcctacgggaggcagcagtagggaatcttccgcaatggacgaaagtctgacggagcaacgccgcgtgagtgaagaaggttttcggatcgtaaaactctgttgttagggaagaacaagtgccgtttgaataaggcggcaccttgacggtacctaaccagaaagccacggctaactacgtgccagcagccgcggtaatacgtaggtggcaagcgttgtccggaattattgggcgtaaagcgcgcgcaggtggttccttaagtctgatgtgaaagcccacggctcaaccgtggagggtcattggaaactggggaacttgagtgcagaagaggaaagtggaattccaagtgtagcggtgaaatgcgtagagatttggaggaacaccagtggcgaaggcgactttctggtctgtaactgacactgaggcgcgaaagcgtggggagcaaacaggattagataccctggtagtccacgccgtaaacgatgagtgctaagtgttagggggtttccgccccttagtgctgcagctaacgcattaagcactccgcctggggagtacggccgcaaggctgaaactcaaaggaattgacggggacccgcacaagcggtggagcatgtggtttaattcgaagcaacgcgaagaaccttaccaggtcttgacatcctctgacaaccctagagatagggcgttccccttcgggggacagagtgacaggtggtgcatggttgtcgtcagctcgtgtcgtgagatgttgggttaagtcccgcaacgagcgcaacccttgatcttagttgccatcattaagttgggcactctaagatgactgccggtgacaaaccggaggaaggtggggatgacgtcaaatcatcatgccccttatgacctgggctacacacgtgctacaatggacggtacaaagggcagcgaagccgcgaggtgaagccaatcccataaaaccgttctcagttcggattgtaggctgcaactcgcctacatgaagctggaatcgctagtaatcgcggatcagcatgccgcggtgaatacgttcccgggtcttgtacacaccgcccgtcacaccacgagagtttgtaacacccgaagtcggtggggtaaccttttggagccagccgcctaaggtgggacagatgattggggtg

SEQ ID NO: 749 - DNA, 1454 bp, Bacillus cucumis
  misc_feature (175)..(175): n is a, c, g, or t
  misc_feature (1002)..(1003): n is a, c, g, or t
gacgaacgctggcggcgtgcctaatacatgcaagtcgagcgaatcaataggagcttgctcctgttggttagcggcggacgggtgagtaacacgtgggcaacctgcctgtaagactgggataacaccgggaaaccggtgctaataccggataattcattccctctcatgagggaangttgaaagtcggtttcggctgacacttacagatgggcccgcggcgcattagctagttggtgaggtaacggctcaccaaggcgacgatgcgtagccgacctgagagggtgatcggccacactgggactgagacacggcccagactcctacgggaggcagcagtagggaatcttccacaatggacgaaagtctgatggagcaacgccgcgtgagcgatgaaggccttcgggtcgtaaagctctgttgttagggaagaacaagtaccggagtaactgccggtaccttgacggtacctaaccagaaagccacggctaactacgtgccagcagccgcggtaatacgtaggtggcaagcgttgtccggaattattgggcgtaaagcgcgcgcaggcggtcctttaagtctgatgtgaaagcccacggctcaaccgtggagggtcattggaaactgggggacttgagtgcagaagaggaaagcggaattccacgtgtagcggtgaaatgcgtagagatgtggaggaacaccagtggcgaaggcggctttctggtctgtaactgacgctgaggcgcgaaagcgtggggagcaaacaggattagataccctggtagtccacgccgtaaacgatgagtgctaagtgttagagggtttccgccctttagtgctgcagctaacgcattaagcactccgcctggggagtacggccgcaaggctgaaactcaaaggaattgacgggggcccgcacaagcggtggagcatgtggtttaattcgaagcaacgcgaagaaccttaccaggtcttgacatcctctgacactcctagagataggannttccccttcgggggacagagtgacaggtggtgcatggttgtcgtcagctcgtgtcgtgagatgttgggttaagtcccgcaacgagcgcaacccttgatcttagttgccagcattcagttgggcactctaaggtgactgccggtgacaaaccggaggaaggtggggatgacgtcaaatcatcatgccccttatgacctgggctacacacgtgctacaatggatggtacaaagggctgcaaaaccgcaaggtctagccaatcccataaaaccattctcagttcggattgtaggctgcaactcgcctacatgaagccggaatcgctagtaatcgcggatcagcatgccgcggtgaatacgttcccgggccttgtacacaccgcccgtcacaccacgagagtttgtaacacccgaagtcggtggggtaaccgtaaggagccagccgcctaaggtg

SEQ ID NO: 750 - DNA, 1473 bp, Bacillus cytotoxicus
gatgaacgctggcggcgtgcctaatacatgcaagtcgagcgaacggattaagagcttgctcttaagaagttagcggcggacgggtgagtaacacgtgggtaacctgcccataagactgggataactccgggaaaccggggctaataccggataacatctagcaccgcatggtgcaagattgaaaggcggcttcggctgtcacttatggatggacccgcgtcgcattagctagttggtgaggtaacggctcaccaaggcgacgatgcgtagccgacctgagagggtgatcggccacactgggactgagacacggcccagactcctacgggaggcagcagtagggaatcttccgcaatggacgaaagtctgacggagcaacgccgcgtgagcgatgaaggccttcgggtcgtaaagctctgttgttagggaagaacaagtgtgagttgaataagctcatgccttgacggtacctaaccagaaagccacggctaactacgtgccagcagccgcggtaatacgtaggtggcaagcgttatccggaattattgggcgtaaagcgcgcgcaggcggtttcttaagtctgatgtgaaagcccacggctcaaccgtggagggtcattggaaactgggagacttgagtgcagaagaggagagtggaattccatgtgtagcggtgaaatgcgtagagatatggaggaacaccagtggcgaaggcgactctctggtctgtaactgacgctgaggcgcgaaagcgtggggagcaaacaggattagataccctggtagtccacgccgtaaacgatgagtgctaagtgttagagggtttccgccctttagtgctgaagttaacgcattaagcactccgcctggggagtacggccgcaaggctgaaactcaaaggaattgacgggggcccgcacaagcggtggagcatgtggtttaattcgaagcaacgcgaagaaccttaccaggtcttgacatcctctgacaaccctagagatagggcttccccttcgggggcagagtgacaggtggtgcatggttgtcgtcagctcgtgtcgtgagatgttgggttaagtcccgcaacgagcgcaacccttgatcttagttgccatcattcagttgggcactctaaggtgactgccggtgacaaaccggaggaaggtggggatgacgtcaaatcatcatgccccttatgacctgggctacacacgtgctacaatggacggtacaaagagtcgcgagaccgcgaggtggagctaatctcataaaaccgttctcagttcggattgtaggctgcaactcgcctacatgaagctggaatcgctagtaatcgcggatcagcatgccgcggtgaatacgttcccgggccttgtacacaccgcccgtcacaccacgagagtttgtaacacccgaagtcggtggggtaaccttttggagccagccgcctaaggtgggacagatgattggggtg

SEQ ID NO: 751 - DNA, 1462 bp, Bacillus daliensis
gcagtcgagcgcaggaaacaggcagaacccttcggggggaggcctgtgggatgagcggcggtagggtgagtaacacgtgggcaacctgccttccagatcggaataaccccgggaaaccggggctaatgccgaataaccagtcggttcgcatgaaccggctgtaaaagtggggacttgttcctcacactggaagatgggcccgcggcgcattagctggttggtagggtagtggcctaccaaggcaacgatgcgtagccgacctgagagggtgatcggccacactggaactgagacacggtccagactcctacgggaggcagcagtagggaatcatccgcaatgggcgaaagcctgacggtgcaacgccgcgtgaacgatgaaggttttcggatcgtaaagttctgttatgagggaagaacaagtgccgggcaaacaggccggcaccttgacggtacctcacgagaaagccccggctaactacgtgccagcagccgcggtaatacgtagggggcaagcgttgtccggaattattgggcgtaaagcgcgcgcaggcggtctcgtaagtctgatgtgaaagcccacggctcaaccgtggagggtcattggaaactgggagacttgagtgtaggagaggaaagtggaattccacgtgtagcggtgaaatgcgtagatatgtggaggaacaccagtggcgaaggcgactttctggcctacaactgacgctgaggcgcgaaagcgtggggagcaaacaggattagataccctggtagtccacgctgtaaacgatgagtgctaggtgttaggggtttcgatgcccttagtgccgaagttaacacattaagcactccgcctggggagtacggccgcaaggctgaaactcaaaggaattgacgggggcccgcacaagcagtggagcatgtggtttaattcgacgcaacgcgaagaaccttaccaggtcttgacatcctttgatcgcgctggagacagcgttttccccttcgggggacaaagtgacaggtggtgcatggttgtcgtcagctcgtgtcgtgagatgttgggttaagtcccgcaacgagcgcaacccttgaccttagttgccagcattcagttgggcactctaaggtgactgccggtgataaaccggaggaaggtggggacgacgtcaaatcatcatgccccttatgacctgggctacacacgtgctacaatggatggtacaaagggaagcgaagccgcgaggtggagcgaatcccagaaagccattctcagttcggattgcaggctgcaactcgcctgcatgaagccggaattgctagtaatcgcggatcagcatgccgcggtgaatacgttcccgggccttgtacacaccgcccgtcacaccacgagagtttgtaacacccgaagtcggtgaggtaacccttttgggagccagccgccgaaggtgggacagatgattggggtg

SEQ ID NO: 752 - DNA, 1462 bp, Bacillus deserti
gcgtgcggtacctatacatgcaagtcgagcggatggatggaagcttgcttccaaaagtcagcggcggacgggtgagtaacacgtgggcaacctgcccctaagatcgggataacttcgggaaaccggagctaataccggatatgattatttctcacatgagagataatggaaagacggtttcggctgtcacttagggatgggcccgcggcgcattagctagttggtgaggtaacggctcaccaaggcgacgatgcgtagccgacctgagagggtgatcggccacactgggactgagacacggcccagactcctacgggaggcagcagtagggaatcttccgcaatggacgaaagtctgacggagcaacgccgcgtgagtgaagaaggttttcggatcgtaaaactctgttgttagggaagaacaagtaccatagtaactgatggtaccttgacggtacctaaccagaaagccacggctaactacgtgccagcagccgcggtaatacgtaggtggcaagcgttgtccggatttattgggcgtaaagcgcgcgcaggcggtcttttaagtctgatgtgaaagcccacggctcaaccgtggagggtcattggaaactgggagacttgagtgcagaagaggagagtggaattccacgtgtagcggtgaaatgcgtagagatgtggaggaacaccagtggcgaaggcgactctctggtctgtaactgacgctgaggcgcgaaagcgtggggagcgaacaggattagataccctggtagtccacgccgtaaacgatgagtgctaagtgttagagggtttccgccctttagtgctgcagctaacgcattaagcactccgcctggggagtacggccgcaaggctgaaactcaaaggaattgacgggggcccgcacaagcggtggagcatgtggtttaattcgaagcaacgcgaagaaccttaccaggtcttgacatcctctgacaatcctagagataggacgttccccttcgggggacagagtgacaggtggtgcatggttgtcgtcagctcgtgtcgtgagatgttgggttaagtcccgcaacgagcgcaacccttgatcttagttgccagcattcagttgggcactctaaggtgactgccggtgacaaaccggaggaaggtggggatgacgtcaaatcatcatgccccttatgacctgggctacacacgtgctacaatggatggtacaaagggcagcaaagccgcgaggccgagcgaatcccataaagccattctcagttcggattgcaggctgcaactcgcctgcatgaagccggaatcgctagtaatcgcggatcagcatgccgcggtgaatacgttcccgggccttgtacacaccgcccgtcacaccacgagagtttgtaacacccgaagtcggtggggtaaccttttggagccagccgcctaaggtgggacagatgattggggtg

SEQ ID NO: 753 - DNA, 1392 bp, Bacillus enclensis
gagatcagcggcggacgggtgagtaacacgtgggtaacctgcctgtaagactgggataactccgggaaaccggggctaataccggataatttagttcctcgcatgaggaactgttgaaaggtggcttctcctaccccttaccgaagggcccccggcccattaactaattggggaaggaacggctccaccagggaacgatgcctaacccaactggaagggtggtcggccaccctgggactgaaaaccgggccaaaatcctacgggagggaacaataagggatcctcccccatggaccaaagtccgacggaaccacgccccgtgaatgaaaaaggtttccgatcctaaacttcgttggtaaggaaaaccagttccggtccaattaggcgcccctggcggtacctaacaaaagcccggctaatacgtgccgcagcgcggtaatagtagtggcaagcgttgtcggaatattggcgtaaagcgcgcgcaggtgtttcttagtctgatgtgaaagcccacggctcaaccgtggagggtcattggaaactggggaacttgagtgcagaagaggaaagtggaattccaagtgtagcggtgaaatgcgtagatatttggaggaacaccagtggcgaaggcgactttctggtctgtaactgacactgaggcgcgaaagcgtggggagcaaacaggattagataccctggtagtccacgccgtaaacgatgagtgctaagtgttagagggtttccgccctttagtgctgcagctaacgcattaagcactccgcctggggagtacggtcgcaagactgaaactcaaaggaattgacgggggcccgcacaagcggtggagcatgtggtttaattcgaagcaacgcgaagaaccttaccaggtcttgacatcctctgacaaccctagagatagggctttccccttcgggggacagagtgacaggtggtgcatggttgtcgtcagctcgtgtcgtgagatgttgggttaagtcccgcaacgagcgcaacccttgatcttagttgccagcattcagttgggcactctaagatgactgccggtgacaaaccggaggaaggtggggatgacgtcaaatcatcatgccccttatgacctgggctacacacgtgctacaatggacggtacaaagggcagcgagaccgcgaggtttagccaatcccataaaaccgttctcagttcggattgcaggctgcaactcgcctgcatgaagctggaatcgctagtaatcgcggatcagcatgccgcggtgaatacgttcccgggccttgtacacaccgcccgtcacaccacgagagtttgtaacacccgaagtcggtgaggtaaccttttggagccagccgcctaaggtgggacagatgattggggtg

SEQ ID NO: 754 - DNA, 1434 bp, Bacillus endozanthoxylicus
cgggctatcatgcagtcgagcgaacttttgggagcttgctcccaaaagttagcggcggacgggtgagtaacacgtgggcaacctgcctataagactgggataacttcgggaaaccggagctaataccggataattcttttcctctcatgaggaaaagctgaaaggcggcttttagctgtcacttatagatgggcccgcggcgcattagctagttggtgaggtaacggctcaccaaggcgacgatgcgtagccgacctgagagggtgatcggccacactgggactgagacacggcccagactcctacgggaggcagcagtagggaatcttccgcaatggacgaaagtctgacggagcaacgccgcgtgagtgatgaaggttttcggatcgtaaaactctgttgttagggaagaacaagtacgagagtaactgctcgtaccttgacggtacctaaccagaaagccacggctaactacgtgccagcagccgcggtaatacgtaggtggcaagcgttgtccggaattattgggcgtaaagcgcgcgcaggcggttccttaagtctgatgtgaaagcccacggctcaaccgtggagggtcattggaaactggggaacttgagtgcagaagagaagagtggaattccacgtgtagcggtgaaatgcgtagagatgtggaggaacaccagtggcgaaggcgactctttggtctgtaactgacgctgaggcgcgaaagcgtggggagcaaacaggattagataccctggtagtccacgccgtaaacgatgagtgctaagtgttagagggtttccgccctttagtgctgcagcaaacgcattaagcactccgcctggggagtacggccgcaaggctgaaactcaaaggaattgacggggacccgcacaagcggtggagcatgtggtttaattcgaagcaacgcgaagaaccttaccaggtcttgacatcctctgacaatcctagagataggacgttccccttcgggggacagagtgacaggtggtgcatggttgtcgtcagctcgtgtcgtgagatgttgggttaagtcccgcaacgagcgcaacccttgtccttagttgccagcatttagttgggcactctaaggagactgccggtgacaaaccggaggaaggtggggatgacgtcaaatcatcatgccccttatgacctgggctacacacgtgctacaatggatggtacaaagggctgcgaaactgtgaagtcgagcgaatcccataaaaccattctcagttcggattgcaggctgcaactcgcctgcatgaagctggaatcgctagtaatcgcggatcagcatgccgcggtgaatacgttcccgggtcttgtacacaccgcccgtcacaccacgagagtttgtaacacccgaagtcggtggggtaaccgtaaggagccagccgccaagtg

SEQ ID NO: 755 - DNA, 1402 bp, Bacillus filamentosus
tgaaaagcttgcttttcaaatcttagcggcggcacgggtgagtaacacgtgggcaacctgcccttgagacggggataactccgggaaaccggagctaataccggataacacatatcttcgcatgaggatatgttagaaggtggcttttagctaccactcaaggatgggcccgcggcgcattagctagttggtgaggtaacggctcaccaaggcgacgatgcgtagccgacctgagagggtgatcggccacactgggactgagacacggcccagactcctacgggaggcagcagtagggaatcttccgcaatggacgaaagtctgacggagcaacgccgcgtgagtgatgaaggttttcggatcgtaaagctctgttgttagggaagaacaagtacctgttaaataagcaggtaccttgacggtacctaaccagaaagccacggctaactacgtgccagcagccgcggtaatacgtaggtggcaagcgttgtccggaattattgggcgtaaagcgcgcgcaggcggttccttaagtctgatgtgaaagcccacggctcaaccgtggagggtcattggaaactggggaacttgagtgcagaagaggagagcggaattccacgtgtagcggtgaaatgcgtagagatgtggaggaacaccagtggcgaaggcggctctctggtctgtaactgacgctgaggcgcgaaagcgtggggagcgaacaggattagataccctggtagtccacgccgtaaacgatgagtgctaagtgttagagggtttccgccctttagtgctgcagcaaacgcattaagcactccgcctggggagtacggtcgcaagactgaaactcaaaggaattgacggggacccgcacaagcggtggagcatgtggtttaattcgaagcaacgcgaagaaccttaccaggtcttgacatcctctgctacttctagagatagaaggttcccttcggggacagagtgacaggtggtgcatggttgtcgtcagctcgtgtcgtgagatgttgggttaagtcccgcaacgagcgcaacccttgatcttagttgccagcattcagttgggcactctaaggtgactgccggtgacaaaccggaggaaggtggggatgacgtcaaatcatcatgccccttatgacctgggctacacacgtgctacaatggatggtacaaagggctgcaaaaccgtgaggtcgagccaatcccataaaaccattctcagttcggattgtaggctgcaactcgcctacatgaagccggaatcgctagtaatcgcggatcagcatgccgcggtgaatacgttcccgggtcttgtacacaccgcccgtcacaccacgagagtttgtaacacccgaagtcggtgaggtaaccttttggagccagccgc

SEQ ID NO: 756 - DNA, 1473 bp, Bacillus foraminis
gacgaacgctggcggcgtgcctaatacatgcaagtcgagcgaatcggagggagcttgctcccaaagattagcggcggacgggtgagtaacacgtgggcaacctgcctgtaagactgggataacttcgggaaaccggagctaataccggataatccttttcctcacatgagggaaagctgaaagacggtttcggctgtcacttacagatgggcccgcggcgcattagctagttggtgaggtaacggctcaccaaggcgacgatgcgtagccgacctgagagggtgatcggccacactgggactgagacacggcccagactcctacgggaggcagcagtagggaatcttccgcaatggacgaaagtctgacggagcaacgccgcgtgagcgaagaaggccttcgggtcgtaaagctctgttgtcagggaagaacaagtgccggagtaactgccggcaccttgacggtacctgaccagaaagccacggctaactacgtgccagcagccgcggtaatacgtaggtggcaagcgttgtccggaattattgggcgtaaagcgcgcgcaggcggtcctttaagtctgatgtgaaagcccacggctcaaccgtggagggtcattggaaactgggggacttgagtgcagaagaggagagtggaattccacgtgtagcggtgaaatgcgtagagatgtggaggaacaccagtggcgaaggcgactctctggtctgtaactgacgctgaggcgcgaaagcgtggggagcgaacaggattagataccctggtagtccacgccgtaaacgatgagtgctaagtgttagagggtttccgccctttagtgctgcagcaaacgcattaagcactccgcctggggagtacggccgcaaggctgaaactcaaaggaattgacgggggcccgcacaagcggtggagcatgtggtttaattcgaagcaacgcgaagaaccttaccaggtcttgacatcctctgacaaccctagagatagggcgttccccttcgggggacagagtgacaggtggtgcatggttgtcgtcagctcgtgtcgtgagatgttgggttaagtcccgcaacgagcgcaacccttgatcttagttgccagcattcagttgggcactctaaggtgactgccggtgacaaaccggaggaaggtggggatgacgtcaaatcatcatgccccttatgacctgggctacacacgtgctacaatggatagaacaaagggcagcgaagccgcgaggtgaagccaatcccataaatctattctcagttcggattgcaggctgcaactcgcctgcatgaagccggaatcgctagtaatcgcggatcagcatgccgcggtgaatacgttcccgggccttgtacacaccgcccgtcacaccacgagagtttgtaacacccgaagtcggtggggtaacctttatggggccagccgcctaaggtgggacagatgattggggtg

SEQ ID NO: 757 - DNA, 1474 bp, Bacillus gaemokensis
  misc_feature (174)..(174): n is a, c, g, or t
gatgaacgctggcggcgtgcctaatacatgcaagtcgagcgaatggattaagagcttgctcttatgaagttagcggcggacgggtgagtaacacgtgggtaacctgcccataagactgggataactccgggaaaccggggctaataccggataatatttttcactgcatagtgnaaaattgaaaggcggcttcggctgtcacttatggatggacccgcgtcgcattagctagttggtgaggtaacggctcaccaaggcgacgatgcgtagccgacctgagagggtgatcggccacactgggactgagacacggcccagactcctacgggaggcagcagtagggaatcttccgcaatggacgaaagtctgacggagcaacgccgcgtgagtgatgaaggctttcgggtcgtaaaactctgttgttagggaagaacaagtgctagttgaataagctggcaccttgacggtacctaaccagaaagccacggctaactacgtgccagcagccgcggtaatacgtaggtggcaagcgttatccggaattattgggcgtaaagcgcgcgcaggtggtttcttaagtctgatgtgaaagcccacggctcaaccgtggagggtcattggaaactgggagacttgagtgcagaagaggaaagtggaattccatgtgtagcggtgaaatgcgtagagatatggaggaacaccagtggcgaaggcgactttctggtctgtaactgacactgaggcgcgaaagcgtggggagcaaacaggattagataccctggtagtccacgccgtaaacgatgagtgctaagtgttagagggtttccgccctttagtgctgaagttaacgcattaagcactccgcctggggagtacggccgcaaggctgaaactcaaaggaattgacgggggcccgcacaagcggtggagcatgtggtttaattcgaagcaacgcgaagaaccttaccaggtcttgacatcctttgaaaaccctagagatagggcttccccttcgggggcaaagtgacaggtggtgcatggttgtcgtcagctcgtgtcgtgagatgttgggttaagtcccgcaacgagcgcaacccttgatcttagttgccagcatttagttgggcactctaaggtgactgccggtgacaaaccggaggaaggtggggatgacgtcaaatcatcatgccccttatgacctgggctacacacgtgctacaatggacggtacaaagagctgcaagaccgcgaggtggagctaatctcataaaaccgttctcagttcggattgtaggctgcaactcgcctacatgaagctggaatcgctagtaatcgcggatcagcatgccgcggtgaatacgttcccgggccttgtacacaccgcccgtcacaccacgagagtttgtaacacccgaagtcggtggggtaacctttatggagccagccgcctaaggtgggacagatgattggggtg

SEQ ID NO: 758 - DNA, 1475 bp, Bacillus ginsengihumi
gacgaacgctggcggcgtgcctaatacatgcaagtcgagcgaactgatgaagagcttgcttttgatcagttagcggcggacgggtgagtaacacgtgggtaacctgcctgtaagactaggataactccgggaaaccggggctaatactggataacttttctctccgcatggagagagattgaaagatggcttcggctatcacttacagatggacccgcggcgcattagctagttggtgaggtaacggctcaccaaggcaacgatgcgtagccgacctgagagggtgatcggccacattgggactgagacacggcccaaactcctacgggaggcagcagtagggaatcttccgcaatggacgaaagtctgacggagcaacgccgcgtgagtgaagaaggtcttcggatcgtaaaactctgttgttagggaagaacaagtatcgttcgaatagggcggtaccttgacggtacctaaccagaaagccacggctaactacgtgccagcagccgcggtaatacgtaggtggcaagcgttgtccggaattattgggcgtaaagcgcgcgcaggcggtcttttaagtctgatgtgaaagcccacggctcaaccgtggagggtcattggaaactggaagacttgagtgcagaagaggagagtggaattccacgtgtagcggtgaaatgcgtagagatgtggaggaacaccagtggcgaaggcgactctctggtctgtaactgacgctgaggcgcgaaagcgtggggagcaaacaggattagataccctggtagtccacgccgtaaacgatgagtgctaagtgttagagggtttccgccctttagtgctgcagctaacgcattaagcactccgcctggggagtacgaccgcaaggttgaaactcaaaggaattgacgggggcccgcacaagcggtggagcatgtggtttaattcgaagcaacgcgaagaaccttaccaggtcttgacatcctctgacctccctagagatagggccttccccttcgggggacagagtgacaggtggtgcatggttgtcgtcagctcgtgtcgtgagatgttgggttaagtcccgcaacgagcgcaacccttgaccttagttgccagcattcagttgggcactctaaggtgactgccggtgacaaaccggaggaaggtggggatgacgtcaaatcatcatgccccttatgacctgggctacacacgtgctacaatggatggtacaaagggctgcgagaccgcgaggttaagccaatcccataaaaccattctcagttcggattgcaggctgcaactcgcctgcatgaagctggaatcgctagtaatcgcggatcagcatgccgcggtgaatacgttcccgggccttgtacacaccgcccgtcacaccacgagagtttgtaacacccgaagtcggtgaggtaaccttttggagccagccgccgaaggtgggacagatgattggggtg

SEQ ID NO: 759 - DNA, 1472 bp, Bacillus glycinifermentans
gacgaacgctggcggcgtgcctaatacatgcaagtcgagcggacagatgggagcttgctccctgatgttagcggcggacgggtgagtaacacgtgggtaacctgcctgtaagactgggataactccgggaaaccggggctaataccggatgcttgtttgaaccgcatggttcaaatataaaaggtggcttttagctaccacttacagatggacccgcggcgcattagctagttggtgaggtaacggctcaccaaggcaacgatgcgtagccgacctgagagggtgatcggccacactgggactgagacacggcccagactcctacgggaggcagcagtagggaatcttccgcaatggacgaaagtctgacggagcaacgccgcgtgagtgatgaaggttttcggatcgtaaaactctgttgttagggaagaacaagtaccgttcgaatagggcggtaccttgacggtacctgaccagaaagccacggctaactacgtgccagcagccgcggtaatacgtaggtggcaagcgttgtccggaattattgggcgtaaagcgcgcgcaggcggtttcttaagtctgatgtgaaagcccccggctcaaccggggagggtcattggaaactggggaacttgagtgcagaagaggagagtggaattccacgtgtagcggtgaaatgcgtagagatgtggaggaacaccagtggcgaaggcgactctctggtctgtaactgacgctgaggcgcgaaagcgtggggagcgaacaggattagataccctggtagtccacgccgtaaacgatgagtgctaagtgttagagggtttccgccctttagtgctgcagcaaacgcattaagcactccgcctggggagtacggtcgcaagactgaaactcaaaggaattgacgggggcccgcacaagcggtggagcatgtggtttaattcgaagcaacgcgaagaaccttaccaggtcttgacatcctctgacaaccctagagatagggcttccccttcgggggcagagtgacaggtggtgcatggttgtcgtcagctcgtgtcgtgagatgttgggttaagtcccgcaacgagcgcaacccttgatcttagttgccagcattcagttgggcactctaaggtgactgccggtgacaaaccggaggaaggtggggatgacgtcaaatcatcatgccccttatgacctgggctacacacgtgctacaatgggcagaacaaagggcagcgaagccgcgaggctaagccaatcccacaaatctgttctcagttcggatcgcagtctgcaactcgactgcgtgaagctggaatcgctagtaatcgcggatcagcatgccgcggtgaatacgttcccgggccttgtacacaccgcccgtcacaccacgagagtttgtaacacccgaagtcggtgaggtaaccttttggagccagccgccgaaggtgggacagatgattggggtg

SEQ ID NO: 760 - DNA, 1474 bp, Bacillus gobiensis
gacgaacgctggcggcgtgcctaatacatgcaagtcgagcgaacctttggaggcttgcctccgaaaggttagcggcggacgggtgagtaacacgtgggtaacctgcctgtaagactgggataactccgggaaaccggggctaataccggatgcgtcacgaaaccgcatggttttgtgatcaaaggtggcacttgtgctaccacttacagatggacccgcggcgcattagctagttggtgaggtaacggctcaccaaggcaacgatgcgtagccgacctgagagggtgatcggccacactgggactgagacacggcccagactcctacgggaggcagcagtagggaatcttccgcaatggacgaaagtctgacggagcaacgccgcgtgagtgatgaaggttttcggatcgtaaagctctgttgtcagggaagaacacgtgccggttgaataagccggtaccttgacggtacctgaccagaaagccacggctaactacgtgccagcagccgcggtaatacgtaggtggcaagcgttgtccggaattattgggcgtaaagcgcgcgcaggcggttctttaagtctgatgtgaaagcccccggctcaaccggggagggtcattggaaactggggaacttgagtgcagaagaggagagtggaattccacgtgtagcggtgaaatgcgtagagatgtggaggaacaccagtggcgaaggcgactctctggtctgtaactgacgctgaggcgcgaaagcgtggggagcgaacaggattagataccctggtagtccacgccgtaaacgatgagtgctaagtgttagagggtttccgccctttagtgctgcagcaaacgcattaagcactccgcctggggagtacggtcgcaagactgaaactcaaaggaattgacgggggcccgcacaagcggtggagcatgtggtttaattcgaagcaacgcgaagaaccttaccaggtcttgacatcctctgaccaccctagagatagggctttcccttcggggacagagtgacaggtggtgcatggttgtcgtcagctcgtgtcgtgagatgttgggttaagtcccgcaacgagcgcaacccttgatcttagttgccagcattcagttgggcactctaaggtgactgccggtgacaaaccggaggaaggtggggatgacgtcaaatcatcatgccccttatgacctgggctacacacgtgctacaatgggcagaacaaagggctgcgagaccgcaaggtttagccaatcccacaaatctgttctcagttcggattgcaggctgcaactcgcctgcatgaagctggaatcgctagtaatcgcggatcagcatgccgcggtgaatacgttcccgggccttgtacacaccgcccgtcacaccacgagagtttgcaacacccgaagtcggtgaggtaaccatttggagccagccgccgaaggtggggcagatgattggggtg

SEQ ID NO: 761 - DNA, 1472 bp, Bacillus halotolerans
gacgaacgctggcggcgtgcctaatacatgcaagtcgagcggacagatgggagcttgctccctgatgttagcggcggacgggtgagtaacacgtgggtaacctgcctgtaagactgggataactccgggaaaccggggctaataccggatgcttgtttgaaccgcatggttcaaacataaaaggtggcttcggctaccacttacagatggacccgcggcgcattagctagttggtgaggtaatggctcaccaaggcaacgatgcgtagccgacctgagagggtgatcggccacactgggactgagacacggcccagactcctacgggaggcagcagtagggaatcttccgcaatggacgaaagtctgacggagcaacgccgcgtgagtgatgaaggttttcggatcgtaaagctctgttgttagggaagaacaagtaccgttcgaatagggcggtaccttgacggtacctaaccagaaagccacggctaactacgtgccagcagccgcggtaatacgtaggtggcaagcgttgtccggaattattgggcgtaaagggctcgcaggcggttccttaagtctgatgtgaaagcccccggctcaaccggggagggtcattggaaactggggaacttgagtgcagaagaggagagtggaattccacgtgtagcggtgaaatgcgtagagatgtggaggaacaccagtggcgaaggcgactctctggtctgtaactgacgctgaggagcgaaagcgtggggagcgaacaggattagataccctggtagtccacgccgtaaacgatgagtgctaagtgttagggggtttccgccccttagtgctgcagctaacgcattaagcactccgcctggggagtacggtcgcaagactgaaactcaaaggaattgacgggggcccgcacaagcggtggagcatgtggtttaattcgaagcaacgcgaagaaccttaccaggtcttgacatcctctgacaatcctagagataggacgtccccttcgggggcagagtgacaggtggtgcatggttgtcgtcagctcgtgtcgtgagatgttgggttaagtcccgcaacgagcgcaacccttgatcttagttgccagcattcagttgggcactctaaggtgactgccggtgacaaaccggaggaaggtggggatgacgtcaaatcatcatgccccttatgacctgggctacacacgtgctacaatggacagaacaaagggcagcgaaaccgcgaggttaagccaatcccacaaatctgttctcagttcggatcgcagtctgcaactcgactgcgtgaagctggaatcgctagtaatcgcggatcagcatgccgcggtgaatacgttcccgggccttgtacacaccgcccgtcacaccacgagagtttgtaacacccgaagtcggtgaggtaacctttatggagccagccgccgaaggtgggacagatgattggggtg

SEQ ID NO: 762 - DNA, 1472 bp, Bacillus haynesii
gacgaacgctggcggcgtgcctaatacatgcaagtcgagcggaccgacgggagcttgctcccttaggttagcggcggacgggtgagtaacacgtgggtaacctgcctgtaagactgggataactccgggaaaccggggctaataccggatgcttgattgaaccgcatggttcaattataaaaggtggcttttagctaccacttacagatggacccgcggcgcattagctagttggtgaggtaacggctcaccaaggcaacgatgcgtagccgacctgagagggtgatcggccacactgggactgagacacggcccagactcctacgggaggcagcagtagggaatcttccgcaatggacgaaagtctgacggagcaacgccgcgtgagtgatgaaggttttcggatcgtaaaactctgttgttagggaagaacaagtaccgttcgaatagggcggtaccttgacggtacctaaccagaaagccacggctaactacgtgccagcagccgcggtaatacgtaggtggcaagcgttgtccggaattattgggcgtaaagcgcgcgcaggcggtttcttaagtctgatgtgaaagcccccggctcaaccggggagggtcattggaaactggggaacttgagtgcagaagaggagagtggaattccacgtgtagcggtgaaatgcgtagagatgtggaggaacaccagtggcgaaggcgactctctggtctgtaactgacgctgaggcgcgaaagcgtggggagcgaacaggattagataccctggtagtccacgccgtaaacgatgagtgctaagtgttagagggtttccgccctttagtgctgcagcaaacgcattaagcactccgcctggggagtacggtcgcaagactgaaactcaaaggaattgacgggggcccgcacaagcggtggagcatgtggtttaattcgaagcaacgcgaagaaccttaccaggtcttgacatcctctgacaaccctagagatagggcttccccttcgggggcagagtgacaggtggtgcatggttgtcgtcagctcgtgtcgtgagatgttgggttaagtcccgcaacgagcgcaacccttgatcttagttgccagcattcagttgggcactctaaggtgactgccggtgacaaaccggaggaaggtggggatgacgtcaaatcatcatgccccttatgacctgggctacacacgtgctacaatgggcagaacaaagggcagcgaagccgcgaggctaagccaatcccacaaatctgttctcagttcggatcgcagtctgcaactcgactgcgtgaagctggaatcgctagtaatcgcggatcagcatgccgcggtgaatacgttcccgggccttgtacacaccgcccgtcacaccacgagagtttgtaacacccgaagtcggtgaggtaaccttttggagccagccgccgaaggtgggacagatgattggggtg

SEQ ID NO: 763 - DNA, 1474 bp, Bacillus hemicellulosilyticus
gacgaacgctggcggcgtgcctaatacatgcaagtcgagcggacagaagggagcttgctcccggaagttagcggcgaacgggtgagtaacacgtgggcaacctgccctgtagattgggataacatcgagaaatcggtgctaataccggatgatagaatgagcgtgcatgcgtttattctcaaagatggcttcggctatcactacaggatgggcccgcggcgcattagctagttggtaaggtaacggcttaccaaggcgacgatgcgtagccgacctgagagggtgatcggccacactgggactgagacacggcccagactcctacgggaggcagcagtagggaatcttccgcaatggacgaaagtctgacggagcaacgccgcgtgagtgatgaagggtttcggctcgtaaagctctgttgttagggaagaacaagtgctagtcgaataggatggcaccttgacggtacctaaccagaaagccacggctaactacgtgccagcagccgcggtaatacgtaggtggcaagcgttgtccggaattattgggcgtaaagcgcgcgcaggcggtcttttaagtctgatgtgaaagcccccggctcaaccggggagggtcattggaaactgggagacttgagtacagaagaggagagtggaattccacgtgtagcggtgaaatgcgtagagatgtggaggaacaccagtggcgaaggcgactctctggtctgtaactgacgctgaggcgcgaaagcgtggggagcaaacaggattagataccctggtagtccacgccgtaaacgatgagtgctaggtgttaggggtttcgatgcccttagtgccgaagttaacacattaagcactccgcctggggagtacgaccgcaaggttgaaactcaaaggaattgacgggggcccgcacaagcagtggagcatgtggtttaattcgaagcaacgcgaagaaccttaccaggtcttgacatcctttgaccactctagagatagagctttccccttcgggggacaaagtgacaggtggtgcatggttgtcgtcagctcgtgtcgtgagatgttgggttaagtcccgcaacgagcgcaacccttgatcttagttgccagcattcagttgggcactctaaggtgactgccggtgacaaaccggaggaaggtggggatgacgtcaaatcatcatgccccttatgacctgggctacacacgtgctacaatggatggtacaaagggcagcgaagccgcgaggtgaagccaatcccataaagccattctcagttcggattgtaggctgcaactcgcctacatgaagccggaattgctagtaatcgcggatcagcatgccgcggtgaatacgttcccgggccttgtacacaccgcccgtcacaccacgagagtttgtaacacccgaagtcggtggggtaaccttttggagccagccgcctaaggtgggacagatgattggggtg

SEQ ID NO: 764 - DNA, 1473 bp, Bacillus horikoshii
  misc_feature (48)..(48): n is a, c, g, or t
gacgaacgctggcggcgtgcctaatacatgcaagtcgagcggatcttnacaagcttgcttttggaagatcagcggcggacgggtgagtaacacgtgggcaacctgcctgtgagactgggataacttcgggaaaccggagctaataccggataatataaggaacctcctggttctttattgaaagatggtttcggctatcactcacagatgggcccgcggcgcattagctagttggtgaggtaacggctcaccaaggcgacgatgcgtagccgacctgagagggtgatcggccacactgggactgagacacggcccagactcctacgggaggcagcagtagggaatcttccacaatggacgaaagtctgatggagcaacgccgcgtgagcgatgaaggccttcgggtcgtaaagctctgttgttagggaagaacaagtgcgagagtaactgctcgcaccttgacggtacctaaccagaaagccacggctaactacgtgccagcagccgcggtaatacgtaggtggcaagcgttgtccggaattattgggcgtaaagcgcgcgcaggtggtcctttaagtctgatgtgaaagcccacggctcaaccgtggagggtcattggaaactgggggacttgagtgcagaagaggaaagtggaattccaagtgtagcggtgaaatgcgtagagatttggaggaacaccagtggcgaaggcgactttctggtctgtaactgacactgaggcgcgaaagcgtggggagcaaacaggattagataccctggtagtccacgccgtaaacgatgagtgctaagtgttagagggtttccgccctttagtgctgcagctaacgcattaagcactccgcctggggagtacggtcgcaagactgaaactcaaaggaattgacgggggcccgcacaagcggtggagcatgtggtttaattcgaagcaacgcgaagaaccttaccaggtcttgacatcctctgccactcctagagataggacgttccccttcgggggacagagtgacaggtggtgcatggttgtcgtcagctcgtgtcgtgagatgttgggttaagtcccgcaacgagcgcaacccttgatcttagttgccagcattcagttgggcactctaaggtgactgccggtgacaaaccggaggaaggtggggatgacgtcaaatcatcatgccccttatgacctgggctacacacgtgctacaatggacggtacaaagggcagcaaaaccgcgaggtcgagccaatcccataaaaccgttctcagttcggattgcaggctgcaactcgcctgcatgaagccggaatcgctagtaatcgcggatcagcatgccgcggtgaatacgttcccgggccttgtacacaccgcccgtcacaccacgagagtttgtaacacccgaagtcggtggggtaaccttttggagccagccgcctaaggtgggacagatgattggggtg

SEQ ID NO: 765 - DNA, 1473 bp, Bacillus horneckiae
gacgaacgctggcggcgtgcctaatacatgcaagtcgagcgaatctgagggagcttgctcccaaagattagcggcggacgggtgagtaacacgtgggcaacctgcctgtaagactgggataacttcgggaaaccggagctaataccggataatccctttcctcacatgaggaaaggctgaaagacggcgtctagctgtcacttacagatgggcccgcggcgcattagctagttggtgaggtaacggctcaccaaggccacgatgcgtagccgacctgagagggtgatcggccacactgggactgagacacggcccagactcctacgggaggcagcagtagggaatcttccgcaatggacgaaagtctgacggagcaacgccgcgtgagtgatgaaggttttcggatcgtaaaactctgttgttagggaagaacaagtatcggagtaactgccggtaccttgacggtacctaaccagaaagccacggctaactacgtgccagcagccgcggtaatacgtaggtggcaagcgttgtccggaattattgggcgtaaagcgcgcgcaggtggttccttaagtctgatgtgaaagcccacggctcaaccgtggagggtcattggaaactggggaacttgagtgcagaagaggaaagtggaattccaagtgtagcggtgaaatgcgtagagatttggaggaacaccagtggcgaaggcgactttctggtctgtaactgacactgaggcgcgaaagcgtggggagcgaacaggattagataccctggtagtccacgccgtaaacgatgagtgctaagtgttagagggtttccgccctttagtgctgcagcaaacgcattaagcactccgcctggggagtacgaccgcaaggttgaaactcaaaggaattgacgggggcccgcacaagcggtggagcatgtggtttaattcgaagcaacgcgaagaaccttaccaggtcttgacatcctctgacaatcctagagataggacgttccccttcgggggacagagtgacaggtggtgcatggttgtcgtcagctcgtgtcgtgagatgttgggttaagtcccgcaacgagcgcaacccttgatcttagttgccagcattcagttgggcactctaaggtgactgccggtgacaaaccggaggaaggtggggatgacgtcaaatcatcatgccccttatgacctgggctacacacgtgctacaatggatggtacaaagggctgcaagaccgcgaggtttagccaatcccataaaaccattctcagttcggattgcaggctgcaactcgcctgcatgaagccggaatcgctagtaatcgcggatcagcatgccgcggtgaatacgttcccgggccttgtacacaccgcccgtcacaccacgagagtttgtaacacccgaagtcggtggggtaaccttttggagccagccgcctaaggtgggacagatgattggggtg

SEQ ID NO: 766 - DNA, 1474 bp, Bacillus hwajinpoensis
gacgaacgctggcggcgtgcctaatacatgcaagtcgagcggagatttgggagcttgctcccaaatcttagcggcggacgggtgagtaacacgtgggcaacctgccctgcagactgggataactccgggaaaccggagctaataccgggtaatacatcgcaccgcatggtgcaatgttgaaagttggctttcgagctaacactgcaggatgggcccgcggcgcattagctagttggtaaggtaatggcttaccaaggcgacgatgcgtagccgacctgagagggtgatcggccacactgggactgagacacggcccagactcctacgggaggcagcagtagggaatcttccgcaatggacgaaagtctgacggagcaacgccgcgtgagtgacgaaggccttcgggtcgtaaagctctgttgttagggaagaacaagtaccgttcgaatagggcggtaccttgacggtacctaaccagaaagccacggctaactacgtgccagcagccgcggtaatacgtaggtggcaagcgttgtccggaattattgggcgtaaagcgcgcgcaggcggtcttttaagtctgatgtgaaagcccacggctcaaccgtggagggtcattggaaactggaggacttgagtgcagaagaggagagtggaattccacgtgtagcggtgaaatgcgtagatatgtggaggaacaccagtggcgaaggcggctctctggtctgtaactgacgctgaggcgcgaaagcgtggggagcaaacaggattagataccctggtagtccacgccgtaaacgatgagtgctaggtgttggggggttccaccctcagtgctgaagttaacacattaagcactccgcctggggagtacgaccgcaaggttgaaactcaaaggaattgacgggggcccgcacaagcagtggagcatgtggtttaattcgaagcaacgcgaagaaccttaccaggtcttgacatcctctgacaatcctggagacaggacgttccccttcgggggacagagtgacaggtggtgcatggttgtcgtcagctcgtgtcgtgagatgttgggttaagtcccgcaacgagcgcaacccttgatcttagttgccagcattcagttgggcactctaaggtgactgccggtgacaaaccggaggaaggtggggatgacgtcaaatcatcatgccccttatgacctgggctacacacgtgctacaatggacggtacaaagggcagcaacaccgcgaggtgaagcgaatcccataaagccgttctcagttcggattgcaggctgcaactcgcctgcatgaagccggaattgctagtaatcgcggatcagcatgccgcggtgaatacgttcccgggccttgtacacaccgcccgtcacaccacgagagtttgtaacacccgaagtcggtggggtaacctttatggagccagccgccgaaggtgggacaaatgattggggtg

SEQ ID NO: 767 - DNA, 1460 bp, Bacillus indicus
gacgaacgctggcggcgtgcctaatacatgcaagtcgagcggacctcttcggaggtcagcggcggacgggtgagtaacacgtgggcaacctgcctgtaagactgggataactccgggaaaccggagctaataccggatactatgtcaaaccgcatggtttgacattcaaagacggtttcggctgtcacttacagatgggcccgcggcgcattagctagttggtgaggtaatggctcaccaaggcgacgatgcgtagccgacctgagagggtgatcggccacactgggactgagacacggcccagactcctacgggaggcagcagtagggaatcttccgcaatggacgaaagtctgacggagcaacgccgcgtgagtgatgaaggttttcggatcgtaaaactctgttgtcagggaagaacaagtgccggagtaactgccggcgccttgacggtacctgaccagaaagccacggctaactacgtgccagcagccgcggtaatacgtaggtggcaagcgttgtccggaattattgggcgtaaagcgcgcgcaggcggtttcttaagtctgatgtgaaagcccccggctcaaccggggagggtcattggaaactgggaaacttgagtgcagaagaggagagtggaattccacgtgtagcggtgaaatgcgtagagatgtggaggaacaccagtggcgaaggcgactctctggtctgtaactgacgctgaggcgcgaaagcgtggggagcgaacaggattagataccctggtagtccacgccgtaaacgatgagtgctaagtgttagagggtttccgccctttagtgctgcagctaacgcattaagcactccgcctggggagtacggtcgcaagactgaaactcaaaggaattgacgggggcccgcacaagcggtggagcatgtggtttaattcgaagcaacgcgaagaaccttaccaggtcttgacatcctttgccacttctagagatagaaggttccccttcgggggacaaagtgacaggtggtgcatggttgtcgtcagctcgtgtcgtgagatgttgggttaagtcccgcaacgagcgcaacccttgatcttagttgccagcattcagttgggcactctaaggtgactgccggtgacaaaccggaggaaggtggggatgacgtcaaatcatcatgccccttatgacctgggctacacacgtgctacaatggatggtacaaagggctgcgagaccgcgaggtttagccaatcccataaaaccattctcagttcggattgcaggctgcaactcgcctgcatgaagctggaatcgctagtaatcgcggatcagcatgccgcggtgaatacgttcccgggccttgtacacaccgcccgtcacaccacgagagtttgcaacacccgaagtcggtggggtaaccgcaaggagccagccgcctaaggtggggtagatgattggggtg

SEQ ID NO: 768 - DNA, 1471 bp, Bacillus kochii
  misc_feature (63)..(63): n is a, c, g, or t
  misc_feature (153)..(153): n is a, c, g, or t
  misc_feature (437)..(437): n is a, c, g, or t
  misc_feature (967)..(967): n is a, c, g, or t
  misc_feature (1117)..(1117): n is a, c, g, or t
gacgaacgctggcggcgtgcctaatacatgcaagtcgagcgaatctgagggagcttgctcccnaagattagcggcggacgggtgagtaacacgtgggcaacctgcctgtaagactgggataactccgggaaaccggggctaataccggataanatctatttatacatataattagattgaaagatggttctgctatcacttacagatgggcccgcggcgcattagctagttggtgaggtaacggctcaccaaggcgacgatgcgtagccgacctgagagggtgatcggccacactgggactgagacacggcccagactcctacgggaggcagcagtagggaatcttccgcaatggacgaaagtctgacggagcaacgccgcgtgagtgatgaaggttttcggatcgtaaaactctgttgttagggaagaacaagtancggagtaactgccggtaccttgacggtacctaaccagaaagccacggctaactacgtgccagcagccgcggtaatacgtaggtggcaagcgttgtccggaattattgggcgtaaagcgcgcgcaggcggttccttaagtctgatgtgaaagcccacggctcaaccgtggagggtcattggaaactggggaacttgagtgcagaagaggaaagtggaattccaagtgtagcggtgaaatgcgtagagatttggaggaacaccagtggcgaaggcgactttctggtctgtaactgacgctgaggcgcgaaagcgtggggagcaaacaggattagataccctggtagtccacgccgtaaacgatgagtgctaagtgttagagggtttccgccctttagtgctgcagcaaacgcattaagcactccgcctggggagtacgaccgcaaggttgaaactcaaaggaattgacgggggcccgcacaagcggtggagcatgtggtttaattcgaagcaacgcgaagaaccttaccagntcttgacatcctctgacaatcctagagataggactttccccttcgggggacagagtgacaggtggtgcatggttgtcgtcagctcgtgtcgtgagatgttgggttaagtcccgcaacgagcgcaacccttgatcttagttgccagcattnagttgggcactctaaggtgactgccggtgacaaaccggaggaaggtggggatgacgtcaaatcatcatgccccttatgacctgggctacacacgtgctacaatggatggtacaaagggctgcaagaccgcgaggtttagccaatcccataaaaccattctcagttcggattgtaggctgcaactcgcctacatgaagccggaatcgctagtaatcgcggatcagcatgccgcggtgaatacgttcccgggccttgtacacaccgcccgtcacaccacgagagtttgtaacacccgaagtcggtggggtaaccttttggagccagccgcctaaggtgggacagatgattggggtg

SEQ ID NO: 769 - DNA, 1476 bp, Bacillus krulwichiae
gacgaacgctggcggcgtgcctaatacatgcaagtcgagcggactgattaagagcttgctcttatgacgttagcggcggacgggtgagtaacacgtgggcaacctgccctgtagactgggataacatcgagaaatcggtgctaataccggataacatctgaggcctcatggtcttagactaaaagatggctccggctatcactacaggatgggcccgcggcgcattagctagttggtaaggtaatggcttaccaaggcgacgatgcgtagccgacctgagagggtgatcggccacactgggactgagacacggcccagactcctacgggaggcagcagtagggaatcttccgcaatggacgaaagtctgacggagcaacgccgcgtgagtgatgaaggatttcggttcgtaaagctctgttgttagggaagaacaagtatcgttcgaatagggcggtaccttgacggtacctaaccagaaagccacggctaactacgtgccagcagccgcggtaatacgtaggtggcaagcgttgtccggaattattgggcgtaaagcgcgcgcaggcggtcttttaagtctgatgtgaaagcccacggctcaaccgtggagggtcattggaaactgggagacttgagtacagaagaggagagtggaattccacgtgtagcggtgaaatgcgtagatatgtggaggaacaccagtggcgaaggcgactctctggtctgtaactgacgctgaggcgcgaaagcgtggggagcaaacaggattagataccctggtagtccacgccgtaaacgatgagtgctaggtgttaggggtttcgatgcccttagtgccgaagttaacacattaagcactccgcctggggagtacgaccgcaaggttgaaactcaaaggaattgacgggggcccgcacaagcagtggagcatgtggtttaattcgaagcaacgcgaagaaccttaccaggtcttgacatcctttgaccaccctagagatagggctttccccttcggggacaaagtgacaggtggtgcatggttgtcgtcagctcgtgtcgtgagatgttgggttaagtcccgcaacgagcgcaacccttgatcttagttgccagcatttagttgggcactctaaggtgactgccggtgacaaaccggaggaaggtggggatgacgtcaaatcatcatgccccttatgacctgggctacacacgtgctacaatggatggtacaaagagcagcaaaaccgcgaggtcgagccaatctcataaagccattctcagttcggattgtaggctgcaactcgcctacatgaagccggaattgctagtaatcgcggatcagcatgccgcggtgaatacgttcccgggccttgtacacaccgcccgtcacaccacgagagtttgtaacacccgaagtcggtggagtaacccttttgggagctagccgcctaaggtgggacagatgattggggtg

SEQ ID NO: 770 - DNA, 1470 bp, Bacillus lehensis
gacgaacgctggcggcgtgcctaatacatgcaagtcgagcggacagaagggagcttgctcccggacgttagcggcggacgggtgagtaacacgtaggtaacctgccccttagactgggataactccgggaaaccggagctaatacgggataataaagagaatcacctgattctcttttgaaagacggtttcggctgtcactaagggatgggcctgcggcgcattagctagttggtaaggtaacggcttaccaaggcgacgatgcgtagccgacctgagagggtgatcggccacactgggactgagacacggcccagactcctacgggaggcagcagtagggaatcttccgcaatggacgaaagtctgacggagcaacgccgcgtgagtgaggaaggccttcgggtcgtaaagctctgttgtgagggaagaacaagtaccggagtaactaccggtaccttgacggtacctcaccagaaagccacggctaactacgtgccagcagccgcggtaatacgtaggtggcaagcgttgtccggaattattgggcgtaaagcgcgcgcaggcggcttcttaagtctgatgtgaaatctcggggctcaaccccgagcggccattggaaactgggaagcttgagtgcagaagaggagagtggaattccacgtgtagcggtgaaatgcgtagatatgtggaggaacaccagtggcgaaggcgactctctggtctgtaactgacgctgaggcgcgaaagcgtggggagcaaacaggattagataccctggtagtccacgccgtaaacgatgagtgctaggtgttaggggtttcgatgcccgtagtgccgaagtaaacacattaagcactccgcctggggagtacggccgcaaggctgaaactcaaaggaattgacggggacccgcacaagcagtggagcatgtggtttaattcgaagcaacgcgaagaaccttaccaggtcttgacatcctttgaccactctggagacagagcttccccttcgggggcaaagtgacaggtggtgcatggttgtcgtcagctcgtgtcgtgagatgttgggttaagtcccgcaacgagcgcaacccttgatcttagttgccagcatttagttgggcactctaaggtgactgccggtgacaaaccggaggaaggtggggacgacgtcaaatcatcatgccccttatgacctgggctacacacgtgctacaatggatggtacaaagggcagcgaaaccgcgaggtggagccaatcccataaagccattctcagttcggattgtaggctgcaactcgcctacatgaagccggaattgctagtaatcgcggatcagcatgccgcggtgaatacgttcccgggtcttgtacacaccgcccgtcacaccacgagagtttgtaacacccgaagtcggtgaggtaaccttttggagccagccgcctaaggtgggacaaatgattggggtg

SEQ ID NO: 771 - DNA, 1472 bp, Bacillus loiseleuriae
gacgaacgctggcggcgtgcctaatacatgcaagtcgagcgaatagatgggagcttgctccctgatattagcggcggacgggtgagtaacacgtgggcaacctacctgtaagactgggataacttcgggaaaccggagctaataccggataatttcttttctcgcatgagagaagatggaaagacggtttcggctgtcacttacagatgggcccgcggcgcattagctagttggtgaggtaatggctcaccaaggccacgatgcgtagccgacctgagagggtgatcggccacactgggactgagacacggcccagactcctacgggaggcagcagtagggaatcttccgcaatggacgaaagtctgacggagcaacgccgcgtgaacgaagaaggccttcgggtcgtaaagttctgttgttagggaagaacaagtaccagagtaactgctggtaccttgacggtacctaaccagaaagccacggctaactacgtgccagcagccgcggtaatacgtaggtggcaagcgttgtccggaattattgggcgtaaagcgcgcgcaggtggttccttaagtctgatgtgaaagcccacggctcaaccgtggagggtcattggaaactggggaacttgagtgcagaagaggaaagtggaattccaagtgtagcggtgaaatgcgtagagatttggaggaacaccagtggcgaaggcgactttctggtctgtaactgacactgaggcgcgaaagcgtggggagcgaacaggattagataccctggtagtccacgccgtaaacgatgagtgctaagtgttagagggtttccgccctttagtgctgcagctaacgcattaagcactccgcctggggagtacggccgcaaggctgaaactcaaaggaattgacgggggcccgcacaagcggtggagcatgtggtttaattcgaagcaacgcgaagaaccttaccaggtcttgacatccttttgccctccctagagatagggacttcccttcggggacaaaagtgacaggtggtgcatggttgtcgtcagctcgtgtcgtgagatgttgggttaagtcccgcaacgagcgcaacccttgatcttagttgccagcatttagttgggcactctaaggtgactgccggtgacaaaccggaggaaggtggggatgacgtcaaatcatcatgccccttatgacctgggctacacacgtgctacaatggatggtacaaagagctgcaaacccgcgagggtaagcgaatctcataaagccattctcagttcggattgtaggctgcaactcgcctacatgaagccggaatcgctagtaatcgcggatcagcatgccgcggtgaatacgttcccgggccttgtacacaccgcccgtcacaccacgagagtttgtaacacccgaagtcggtgaggtaaccgcaaggagccagccgcctaaggtgggacagatgattggggtg

SEQ ID NO: 772 - DNA, 1471 bp, Bacillus lonarensis
gacgaacgctggcggcgtgcctaatacatgcaagtcgagcgcacagaagggagcttgctcccggaagtgagcggcggacgggtgagtaacacgtgggcaacctgccccctagcctgggataacttcgggaaaccgaagctaataccggataacatattgacctacctaggtcgatattaaaagatggcttctgctatcactaagggatgggcccgcggcgcattagctagttggtgaggtaacagctcaccaaggcgacgatgcgtagccgacctgagagggtgatcggccacactgggactgagacacggcccagactcctacgggaggcagcagtagggaatcttccgcaatggacgaaagtctgacggagcaacgccgcgtgagtgaggaaggccttcgggtcgtaaagctctgttgtgagggaagaacaagtaccgtttgaataaggcggtaccgtgacggtacctcaccagaaagccacggctaactacgtgccagcagccgcggtaatacgtaggtggcaagcgttgtccggaattattgggcgtaaagcgcgcgcaggcggcttcttaagtctgatgtgaaatcttgcggctcaaccgcaagcggccattggaaactgggaagcttgagtacagaagaggagagtggaattccacgtgtagcggtgaaatgcgtagatatgtggaggaacaccagtggcgaaggcgactctctggtctgtaactgacgctgaggcgcgaaagcgtggggagcaaacaggattagataccctggtagtccacgccgtaaacgatgagtgctaggtgttaggggtttcgatgcccttagtgccgaagtaaacacattaagcactccgcctggggagtacgaccgcaaggttgaaactcaaaggaattgacggggacccgcacaagcagtggagcatgtggtttaattcgaagcaacgcgaagaaccttaccaggtcttgacatcctttgaccaccctagagatagggctttcccttcggggacaaagtgacaggtggtgcatggttgtcgtcagctcgtgtcgtgagatgttgggttaagtcccgcaacgagcgcaacccttgatcttagttgccagcattcagttgggcactctaaggtgactgccggtgacaaaccggaggaaggtggggacgacgtcaaatcatcatgccccttatgacctgggctacacacgtgctacaatggatggtacaaagggaagcgaaaccgcgaggtggagccaatcccataaagccattctcagttcggattgtaggctgcaactcgcctacatgaagccggaattgctagtaatcgcggatcagcatgccgcggtgaatacgttcccgggtcttgtacacaccgcccgtcacaccacgagagtttgtaacacccgaagtcggtgagggaaccttttggacccagccgcctaaggtgggacagatgattggggtg

SEQ ID NO: 773 - DNA, 1472 bp, Bacillus luciferensis
  misc_feature (155)..(155): n is a, c, g, or t
  misc_feature (176)..(176): n is a, c, g, or t
gacgaacgctggcggcgtgcctaatacatgcaagtcgagcggactaattggagcttgctccaattagttagcggcggacgggtgagtaacacgtgggcaacctacctataagactgggataacttcgggaaaccggagctaataccggatgacanaaaggaactcctgttcctttnttgaaagatggcttcggctatcacttatagatgggcccgcggcgcattagctagttggtgaggtaacggctcaccaaggcgacgatgcgtagccgacctgagagggtgatcggccacactgggactgagacacggcccagactcctacgggaggcagcagtagggaatcttccgcaatggacgaaagtctgacggagcaacgccgcgtgagcgatgaaggccttcgggtcgtaaagctctgttgttagggaagaacaagtgctagttgaataagctggcaccttgacggtacctaaccagaaagccacggctaactacgtgccagcagccgcggtaatacgtaggtggcaagcgttgtccggaattattgggcgtaaagcgcgcgcaggcggtttcttaagtctgatgtgaaagcccccggctcaaccggggagggtcattggaaactgggaaacttgagtgcagaagaggaaagtggaattccaagtgtagcggtgaaatgcgtagagatttggaggaacaccagtggcgaaggcgactttctggtctgtaactgacgctgaggcgcgaaagcgtggggagcaaacaggattagataccctggtagtccacgctgtaaacgatgagtgctaagtgttagagggtttccgccctttagtgctgaagttaacgcattaagcactccgcctggggagtacggtcgcaagactgaaactcaaaggaattgacgggggcccgcacaagtggtggagcatgtggtttaattcgaagcaacgcgaagaaccttaccaggtcttgacatcctctgacaaccctagagatagggctttcccttcggggacagagtgacaggtggtgcatggttgtcgtcagctcgtgtcgtgagatgttgggttaagtcccgcaacgagcgcaacccttgatcttagttgccagcattcagttgggcactctaaggtgactgccggtgacaaaccggaggaaggtggggatgacgtcaaatcatcatgccccttatgacctgggctacacacgtgctacaatggatagtacaaagggttgcaagaccgcgaggtggagctaatcccataaaactattctcagttcggattgtaggctgcaactcgcctacatgaagccggaatcactagtaatcgcggatcagcatgccgcggtgaatacgttcccgggccttgtacacaccgcccgtcacaccacgagagtttgtaacacccgaagtcggtggggtaaccttttaggggccagccgcctaaggtgggacagatgattggggtg

SEQ ID NO: 774 - DNA, 1474 bp, Bacillus luti; identical to SEQ ID NO: 733

SEQ ID NO: 775 - DNA, 1400 bp, Bacillus manliponensis
ttcttaagagcttgctcttaagaaattagcggcggacgggtgagtaacacgtgggtaacctgcccataagactgggataactccgggaaaccggggctaataccggatagcattttgaaccgcatggttcgaaattgaaaggcggcttcggctgtcacttatggatggacccgcgtcgcattagctagttggtgaggtaacggctcaccaaggcgacgatgcgtagccgacctgagagggtgatcggccacactgggactgagacacggcccagactcctacgggaggcagcagtagggaatcttccgcaatggacgaaagtctgacggagcaacgccgcgtgaacgatgaaggccttcgggtcgtaaagttctgttgttagggaagaacaagtacaagttgaataagcttgtaccttgacggtacctaaccagaaagccacggctaactacgtgccagcagccgcggtaatacgtaggtggcaagcgttatccggaattattgggcgtaaagcgcgcgcaggtggtttcttaagtctgatgtgaaagcccacggctcaaccgtggagggtcattggaaactgggaaacttgagtgcagaagaggaaagtggaattccatgtgtagcggtgaaatgcgtagagatatggaggaacaccagtggcgaaggcgactttctggtctgtaactgacactgaggcgcgaaagcgtggggagcaaacaggattagataccctggtagtccacgccgtaaacgatgagtgctaagtgttagggggtttccgccccttagtgctgaagttaacgcattaagcactccgcctggggagtacggccgcaaggctgaaactcaaaggaattgacgggggcccgcacaagcggtggagcatgtggtttaattcgaagcaacgcgaagaaccttaccaggtcttgacatcctctgacaaccctagagatagggctttcccttcggggacagagtgacaggtggtgcatggttgtcgtcagctcgtgtcgtgagatgttgggttaagtcccgcaacgagcgcaacccttgatcttagttgccatcattaagttgggcactctaaggtgactgccggtgacaaaccggaggaaggtggggatgacgtcaaatcatcatgccccttatgacctgggctacacacgtgctacaatggacggtacaaagagctgcaagaccgcgaggtggagctaatctcataaaaccgttctcagttcggattgtaggctgcaactcgcctacatgaagctggaatcgctagtaatcgcagatcagcatgctgcggtgaatacgttcccgggccttgtacacaccgcccgtcacaccacgagagtttgtaacacccgaagtcggtggggtaacctttggagccagcc

SEQ ID NO: 776 - DNA, 1288 bp, Bacillus marmarensis
  misc_feature (1279)..(1279): n is a, c, g, or t
tgcagtcgagcggactgatgggagcttgctccctgatgttagcggcggacgggtgagtaacacgtgggcaacctgcctgtaagactgggataactccgggaaaccggggctaataccggataacccgttccacctcatggtggagcggtaaaagatggcctctggctatcacttacagatgggcccgcggcgcattagctagttggtaaggtaacggcttaccaaggcgacgatgcgtagccgacctgagagggtgatcggccacactgggactgagacacggcccagactccgacgggaggcagcagtagggaatcttccgaaatagacgaaagtctgacggagcaacgccgcgtgagtgatgaaggttttcggatcgtaaagctctgttgttagggaagaacaagtgccgtttgaataaggcggcaccttgacggtacctaaccagaaagccacggctaactacgtgccagcagccgcggtaatacgtaggtggcaagcgttgtccggaattattgggcgtaaagcgcgcgcaggcggtctcttaagtctgatgtgaaagcccacggctcaagccgtggaggtcattggaaactgggagacttgagtacagaagaggagagtggaattccacgtgtagcggtgaaatgcgtagatatgtggaggaacaccagtggcgaaggcgactctctggtctgtaactgacgctgaggcgcgaaagcgtggggagcaaacaggattagataccctggtagtccacgccgtaaacgatgagtgctaggtgttaggggtttcgatgcccttagtgccgaagttaacacattaagcactccgccggaggagtacgaccgcaaggttgaaactcaaaagaattgacgggagcccgcacaagcagtggagcatgtggtttaattcgaagcaacgcgaagaaccttaccaggtcttgacatcctttgaccaccctagagatagggctttccccttcgggggacaaagtgacaggtggtgcatggttgtcgtcagctcgtgtcgtgagatgttgggttaagtcccgcaacgagcgcaacccttgatcttagttgccagcattcagttgggcactctaaggtgactgccggtgacaaaccggaggaaggtggggatgacgtcaaatcatcatgccccttatgacctgggctacacacgtgctacaatggatggtacaaagggctgcaaaaccgcgaggttgagcgaatcccataaagccattctcaggtcggattgtaggctgcaactcgcntacagaagc

SEQ ID NO: 777 - DNA, 1472 bp, Bacillus mesonae
gacgaacgctggcggcgtgcctaatacatgcaagtcgagcgaacttgcgggagcttgctcccaaaagttagcggcggacgggtgagtaacacgtgggcaacctgcctgtaagactgggataacttcgggaaaccggagctaataccggataattcttatcaacacatgttgataagctgaaagtcggtttcggctgacacttacagatgggcccgcggcgcattagctagttggtgaggtaacggctcaccaaggcaacgatgcgtagccgacctgagagggtgatcggccacactgggactgagacacggcccagactcctacgggaggcagcagtagggaatcttccacaatggacgaaagtctgatggagcaacgccgcgtgagcgatgaaggccttcgggtcgtaaagctctgttgttagggaagaacaagtatcggagtaactgccggtaccttgacggtacctaaccagaaagccacggctaactacgtgccagcagccgcggtaatacgtaggtggcaagcgttgtccggaattattgggcgtaaagcgcgcgcaggcggtcctttaagtctgatgtgaaagcccacggctcaaccgtggagggtcattggaaactgggggacttgagtgcagaagaggaaagcggaattccacgtgtagcggtgaaatgcgtagagatgtggaggaacaccagtggcgaaggcggctttctggtctgtaactgacgctgaggcgcgaaagcgtggggagcaaacaggattagataccctggtagtccacgccgtaaacgatgagtgctaagtgttagagggtttccgccctttagtgctgcagctaacgcattaagcactccgcctggggagtacggccgcaaggctgaaactcaaaggaattgacgggggcccgcacaagcggtggagcatgtggtttaattcgaagcaacgcgaagaaccttaccaggtcttgacatcctctgacactcctagagataggactttccccttcgggggacagagtgacaggtggtgcatggttgtcgtcagctcgtgtcgtgagatgttgggttaagtcccgcaacgagcgcaacccttgatcttagttgccagcattcagttgggcactctaaggtgactgccggtgacaaaccggaggaaggtggggatgacgtcaaatcatcatgccccttatgacctgggctacacacgtgctacaatggatggtacaaagggctgcaaaaccgcaaggtctagccaatcccataaaaccattctcagttcggattgcaggctgcaactcgcctgcatgaagccggaatcgctagtaatcgcggatcagcatgccgcggtgaatacgttcccgggccttgtacacaccgcccgtcacaccacgagagtttgtaacacccgaagtcggtggggtaaccgtaaggagccagccgcctaaggtgggacagatgattggggtg

SEQ ID NO: 778 - DNA, 1474 bp, Bacillus methanolicus
gacgaacgctggcggcgtgcctaatacatgcaagtcgagcggactgatggaagcttgcttcctgaagtcagcggcggacgggtgagtaacacgtgggcaacctgcctgcaagaccgggataacttcgggaaaccggagctaataccggataatcctctttcccgcatgggaaagagctgaaagatggcttcggctatcacttgcagatgggcccgcggcgcattagctggttggtgaggtaacggctcaccaaggcgacgatgcgtagccgacctgagagggtgatcggccacactgggactgagacacggcccagactcctacgggaggcagcagtagggaatcttccgcaatggacgaaagtctgacggagcaacgccgcgtgagcgaagaaggccttcgggtcgtaaagctctgttgtcagggaagaacaagtaccgttcgaatagggcggtgccttgacggtacctgaccagaaagccacggctaactacgtgccagcagccgcggtaatacgtaggtggcaagcgttgtccggaattattgggcgtaaagcgcgcgcaggcggttccttaagtctgatgtgaaagcccacggctcaaccgtggagggtcattggaaactggggaacttgagtgcagaagaggagagcggaattccacgtgtagcggtgaaatgcgtagagatgtggaggaacaccagtggcgaaggcggctctctggtctgtaactgacgctgaggcgcgaaagcgtggggagcaaacaggattagataccctggtagtccacgccgtaaacgatgagtgctaagtgttagagggtttccgccctttagtgctgcagctaacgcattaagcactccgcctggggagtacggccgcaaggctgaaactcaaaggaattgacgggggcccgcacaagcggtggagcatgtggtttaattcgaagcaacgcgaagaaccttaccaggtcttgacatcctctgacaatcctggagacaggacgttccccttcgggggacagagtgacaggtggtgcatggttgtcgtcagctcgtgtcgtgagatgttgggttaagtcccgcaacgagcgcaacccttgaccttagttgccagcattcagttgggcactctaaggtgactgccggtgacaaaccggaggaaggtggggatgacgtcaaatcatcatgccccttatgacctgggctacacacgtgctacaatggatggtacaaagggctgctaagccgcgaggctgagccaatcccaaaaaaccattctcagttcggattgcaggctgcaactcgcctgcatgaagccggaatcgctagtaatcgcggatcagcatgccgcggtgaatacgttcccgggccttgtacacaccgcccgtcacaccacgagagtttgtaacacccgaagtcggtgaggtaacctttaaggagccagccgcctaaggtgggacagatgattggggtg

SEQ ID NO: 779 - DNA, 1474 bp, Bacillus mobilis; identical to SEQ ID NO: 145

SEQ ID NO: 780 - DNA, 1473 bp, Bacillus muralis
gacgaacgctggcggcgtgcctaatacatgcaagtcgagcgaatggatgggagcttgctccctgaagttagcggcggacgggtgagtaacacgtgggcaacctgcctataagactgggataacttcgggaaaccggagctaataccggatacgttcttttctcgcatgagagaagatggaaagacggtttacgctgtcacttatagatgggcccgcggcgcattagctagttggtgaggtaatggctcaccaaggcgacgatgcgtagccgacctgagagggtgatcggccacactgggactgagacacggcccagactcctacgggaggcagcagtagggaatcttccgcaatggacgaaagtctgacggagcaacgccgcgtgaacgaagaaggccttcgggtcgtaaagttctgttgttagggaagaacaagtaccagagtaactgctggtaccttgacggtacctaaccagaaagccacggctaactacgtgccagcagccgcggtaatacgtaggtggcaagcgttgtccggaattattgggcgtaaagcgcgcgcaggtggttccttaagtctgatgtgaaagcccacggctcaaccgtggagggtcattggaaactggggaacttgagtgcagaagaggaaagtggaattccaagtgtagcggtgaaatgcgtagagatttggaggaacaccagtggcgaaggcgactttctggtctgtaactgacactgaggcgcgaaagcgtggggagcaaacaggattagataccctggtagtccacgccgtaaacgatgagtgctaagtgttagagggtttccgccctttagtgctgcagctaacgcattaagcactccgcctggggagtacggccgcaaggctgaaactcaaaggaattgacgggggcccgcacaagcggtggagcatgtggtttaattcgaagcaacgcgaagaaccttaccaggtcttgacatcctctgacaaccctagagatagggcgttccccttcgggggacagagtgacaggtggtgcatggttgtcgtcagctcgtgtcgtgagatgttgggttaagtcccgcaacgagcgcaacccttgatcttagttgccagcattcagttgggcactctaaggtgactgccggtgacaaaccggaggaaggtggggatgacgtcaaatcatcatgccccttatgacctgggctacacacgtgctacaatggatggtacaaagggctgcaaacctgcgaaggtaagcgaatcccataaagccattctcagttcggattgcaggctgcaactcgcctgcatgaagccggaatcgctagtaatcgcggatcagcatgccgcggtgaatacgttcccgggccttgtacacaccgcccgtcacaccacgagagtttgtaacacccgaagtcggtgaggtaacctttatggagccagccgcctaaggtgggacagatgattggggtg

SEQ ID NO: 781 - DNA, 1472 bp, Bacillus nakamurai
gacgaacgctggcggcgtgcctaatacatgcaagtcgagcggacagatgggagcttgctccctgatgtcagcggcggacgggtgagtaacacgtgggtaacctgcctgtaagactgggataactccgggaaaccggggctaataccggatgcttgtttgaaccgcatggttcaaacataaaaggtggcttcggctaccacttacagatggacccgcggcgcattagctagttggtgaggtaacggctcaccaaggcaacgatgcgtagccgacctgagagggtgatcggccacactgggactgagacacggcccagactcctacgggaggcagcagtagggaatcttccgcaatggacgaaagtctgacggagcaacgccgcgtgagtgatgaaggttttcggatcgtaaagctctgttgttagggaagaacaagtgccgttcgaatagggcggcaccttgacggtacctaaccagaaagccacggctaactacgtgccagcagccgcggtaatacgtaggtggcaagcgttgtccggaattattgggcgtaaagggctcgcaggcggtttcttaagtctgatgtgaaagcccccggctcaaccggggagggtcattggaaactggggaacttgagtgcagaagaggagagtggaattccacgtgtagcggtgaaatgcgtagagatgtggaggaacaccagtggcgaaggcgactctctggtctgtaactgacgctgaggagcgaaagcgtggggagcgaacaggattagataccctggtagtccacgccgtaaacgatgagtgctaagtgttagggggtttccgccccttagtgctgcagctaacgcattaagcactccgcctggggagtacggtcgcaagactgaaactcaaaggaattgacgggggcccgcacaagcggtggagcatgtggtttaattcgaagcaacgcgaagaaccttaccaggtcttgacatcctctgacaatcctagagataggacgtccccttcgggggcagagtgacaggtggtgcatggttgtcgtcagctcgtgtcgtgagatgttgggttaagtcccgcaacgagcgcaacccttgatcttagttgccagcattcagttgggcactctaaggtgactgccggtgacaaaccggaggaaggtggggatgacgtcaaatcatcatgccccttatgacctgggctacacacgtgctacaatggacagaacaaagggcagcgaaaccgcgaggttaagccaatcccacaaatctgttctcagttcggatcgcagtctgcaactcgactgcgtgaagctggaatcgctagtaatcgcggatcagcatgccgcggtgaatacgttcccgggccttgtacacaccgcccgtcacaccacgagagtttgtaacacccgaagtcggtgaggtaacctttatggagccagccgccgaaggtgggacagatgattggggtg

SEQ ID NO: 782 - DNA, 1419 bp, Bacillus nanhaiisediminis
agtcgagcggatcaaagggagcttgctcccagagattagcggcggacgggtgagtaacacgtgggcaacctgccctgtagactgggataacaccgagaaatcggtgctaataccggataacacctttcttctcatggaggaaggttaaaagttgggattactaacactacaggatgggcccgcggcgcattagctagttggtaaggtaatggcttaccaaggcgacgatgcgtagccgacctgagagggtgatcggccacactgggactgagacacggcccagactcctacgggaggcagcagtagggaatcttccgcaatggacgaaagtctgacggagcaacgccgcgtgagtgatgaaggttttcggatcgtaaagctctgttgttagggaagaacaagtgccgttcgaataggtcggcaccttgacggtacctaaccagaaagccacggctaactacgtgccagcagccgcggtaatacgtaggtggcaagcgttgtccggaattattgggcgtaaagcgcgcgcaggcggtcttttaagtctgatgtgaaagcccccggctcaaccggggagggtcattggaaactgggagacttgagtacagaagaggagagtggaattccacgtgtagcggtgaaatgcgtagatatgtggaggaacaccagtggcgaaggcgactctctggtctgtaactgacgctgaggcgcgaaagcgtggggagcaaacaggattagataccctggtagtccacgccgtaaacgatgagtgctaggtgttaggggtttcgatgcccttagtgccgaagttaacacattaagcactccgcctggggagtacgaccgcaaggttgaaactcaaaggaattgacgggggcccgcacaagcagtggagcatgtggtttaattcgaagcaacgcgaagaaccttaccaggtcttgacatcctttgaccaccctagagatagggctttccccttcgggggacaaagtgacaggtggtgcatggttgtcgtcagctcgtgtcgtgagatgttgggttaagtcccgcaacgagcgcaacccttgatcttagttgccagcattcagttgggcactctaaggtgactgccggtgacaaaccggaggaaggtggggatgacgtcaaatcatcatgccccttatgacctgggctacacacgtgctacaatggatggtacaaagggctgcgaaaccgcgaggttgagcgaatcccataaagccattctcagttcggattgtaggctgcaactcgcctacatgaagccggaattgctagtaatcgcggatcagcatgccgcggtgaatacgttcccgggccttgtacacaccgcccgtcacaccacgagagtttgtaacacccgaagtcggtggggtaaccttttggagccagccgcctaag

SEQ ID NO: 783 - DNA, 1476 bp, Bacillus notoginsengisoli
gacgaacgctggcggcgtgcctaatacatgcaagtcgagcgaaagtttcagaagcttgcttttgaaactttagcggcggacgggtgagtaacacgtgggcaacctgcctgtaagactgggataactccgggaaaccggggctaataccggataatccttttccctgcatagggaagagctaaaagacggtttcggctgtcacttacagatgggcccgcggcgcattagctagttggtggggtaatggcccaccaaggcgacgatgcgtagccgacctgagagggtgatcggccacactgggactgagacacggcccagactcctacgggaggcagcagtagggaatcttccgcaatggacgaaagtctgacggagcaacgccgcgtgagcgaagaaggccttcgggtcgtaaagctctgttgtcagggaagaacaagtgccggagtcactgccggcaccttgacggtacctgaccagaaagccacggctaactacgtgccagcagccgcggtaatacgtaggtggcaagcgttgtccggaattattgggcgtaaagcgcgcgcaggcggcctcttaagtctgatgtgaaagcccacggctcaaccgtggagggtcattggaaactggggggcttgagtgcagaagaggagagcggaattccacgtgtagcggtgaaatgcgtagagatgtggaggaacaccagtggcgaaggcggctctctggtctgtaactgacgctgaggcgcgaaagcgtggggagcgaacaggattagataccctggtagtccacgccgtaaacgatgagtgctaagtgttagagggtttccgccctttagtgctgcagcaaacgcattaagcactccgcctggggagtacggccgcaaggctgaaactcaaaggaattgacgggggcccgcacaagcggtggagcatgtggtttaattcgaagcaacgcgaagaaccttaccaggtcttgacatcctctgacacctctggagacagagcgttccccttcgggggacagagtgacaggtggtgcatggttgtcgtcagctcgtgtcgtgagatgttgggttaagtcccgcaacgagcgcaacccttgatcttagttgccagcattcagttgggcactctaaggtgactgccggtgacaaaccggaggaaggtggggatgacgtcaaatcatcatgccccttatgacctgggctacacacgtgctacaatggatggtacaaagggcagcgaagccgcgaggtgaagccaaccccataaaaccattctcagttcggattgcaggctgcaactcgcctgcatgaagccggaatcgctagtaatcgcggatcagcatgccgcggtgaatacgttcccgggccttgtacacaccgcccgtcacaccacgggagtttgtaacacccgaagtcggtggggtaacctttttaggagccagccgcctaaggtgggacagatgactggggtg

SEQ ID NO: 784 - DNA, 1393 bp, Bacillus oceanisediminis
tgggagcttgctcccggaagtcagcggcggacgggtgagtaacacgtgggcaacctgcctgtaagactgggataacttcgggaaaccggagctaataccggataattctttccctcacatgagggaaagctgaaagatggtttcggctatcacttacagatgggcccgcggcgcattagctagttggtgaggtaacggctcaccaaggcaacgatgcgtagccgacctgagagggtgatcggccacactgggactgagacacggcccagactcctacgggaggcagcagtagggaatcttccgcaatggacgaaagtctgacggagcaacgccgcgtgagtgatgaaggttttcggatcgtaaaactctgttgttagggaagaacaagtaccggagtaactgccggtaccttgacggtacctaaccagaaagccacggctaactacgtgccagcagccgcggtaatacgtaggtggcaagcgttgtccggaattattgggcgtaaagcgcgcgcaggcggttccttaagtctgatgtgaaagcccacggctcaaccgtggagggtcattggaaactggggaacttgagtgcagaagagaagagtggaattccacgtgtagcggtgaaatgcgtagagatgtggaggaacaccagtggcgaaggcgactctttggtctgtaactgacgctgaggcgcgaaagcgtggggagcaaacaggattagataccctggtagtccacgccgtaaacgatgagtgctaagtgttagagggtttccgccctttagtgctgcagcaaacgcattaagcactccgcctggggagtacggccgcaaggctgaaactcaaaggaattgacgggggcccgcacaagcggtggagcatgtggtttaattcgaagcaacgcgaagaaccttaccaggtcttgacatctcctgacaaccctagagatagggcgttccccttcgggggacaggatgacaggtggtgcatggttgtcgtcagctcgtgtcgtgagatgttgggttaagtcccgcaacgagcgcaacccttgatcttagttgccagcattcagttgggcactctaaggtgactgccggtgacaaaccggaggaaggtggggatgacgtcaaatcatcatgccccttatgacctgggctacacacgtgctacaatggatggtacaaagggctgcgagaccgcgaggttaagcgaatcccataaaaccattctcagttcggattgcaggctgcaactcgcctgcatgaagccggaatcgctagtaatcgcggatcagcatgccgcggtgaatacgttcccgggccttgtacacaccgcccgtcacaccacgagagtttgtaacacccgaagtcggtggggtaacctttggagcca

SEQ ID NO: 785 - DNA, 1475 bp, Bacillus okhensis
gacgaacgctggcggcgtgcctaatacatgcaagtcgagcggactgattaagagcttgctcttatgacgttagcggcggacgggtgagtaacacgtgggcaacctgccctgtagatcgggataacaccgagaaatcggtgctaataccgggtaatatctgagatcacatgatcttaggttaaaagatggctccggctatcactacaggatgggcccgcggcgcattagctagttggtaaggtaatggcttaccaaggcgacgatgcgtagccgacctgagagggtgatcggccacactgggactgagacacggcccagactcctacgggaggcagcagtagggaatcttccgcaatggacgaaagtctgacggagcaacgccgcgtgagtgatgaagggtttcggctcgtaaagctctgttgttagggaagaacaagtatcgttcgaatagggcggtaccttgacggtacctaaccagaaagccacggctaactacgtgccagcagccgcggtaatacgtaggtggcaagcgttgtccggaattattgggcgtaaagcgcgcgcaggcggtcttttaagtctgatgtgaaagcccccggctcaaccggggagggtcattggaaactgggagacttgagtacagaagaggagagtggaattccacgtgtagcggtgaaatgcgtagatatgtggaggaacaccagtggcgaaggcgactctctggtctgtaactgacgctgaggcgcgaaagcgtggggagcaaacaggattagataccctggtagtccacgccgtaaacgatgagtgctaggtgttaggggtttcgatgcccttagtgccgaagttaacacattaagcactccgcctggggagtacgaccgcaaggttgaaactcaaaggaattgacgggggcccgcacaagcagtggagcatgtggtttaattcgaagcaacgcgaagaaccttaccaggtcttgacatcctttgaccactctagagatagagctttccccttcgggggacaaagtgacaggtggtgcatggttgtcgtcagctcgtgtcgtgagatgttgggttaagtcccgcaacgagcgcaacccttgatcttagttgccagcatttagttgggcactctaaggtgactgccggtgacaaaccggaggaaggtggggatgacgtcaaatcatcatgccccttatgacctgggctacacacgtgctacaatggatggtacaaagagcagcgaaaccgcgaggtcgagccaatctcataaagccattctcagttcggattgtaggctgcaactcgcctacatgaagccggaattgctagtaatcgcggatcagcatgccgcggtgaatacgttcccgggccttgtacacaccgcccgtcacaccacgagagtttgtaacacccgaagtcggtggggtaaccttttggagccagccgcctaaggtgggacagatgattggggtg

SEQ ID NO: 786 - DNA, 1400 bp, Bacillus oleivorans
tgcaagtcgagcggacttgagggagcttgctcccgaaggttagcggcggacgggtgagtaacacgtggataacctgcctgtaagactgggataactccgggaaaccggggctaataccggataggatttcggttcgcatgaaccgaaatggaaaggtggcttttagctaccacttacagatggatccgcggcgcattagctagttggtgaggtaacggctcaccaaggcgacgatgcgtagccgacctgagagggtgatcggccacactgggactgagacacggcccagactcctacgggaggcagcagtagggaatcttccgcaatggacgaaagtctgacggagcaacgccgcgtgagcgatgaaggttttcggatcgtaaagctctgttgttagggaagaacaagtaccgttcgaatagggcggtaccttgacggtacctaaccagaaagcccacggctaactacgtgccagcagccgcggtaatacgtaggtggcaagcgttgtccgggaattattgggcgtaaagcgcgcgcaggcggtttcttaagtctgatgtgaaagcccacggctcaacccgtggagggtcattggaaactgggagacttgagtgcagaagaggagagcggaattccacgtgtagcggtgaaatgcgtagagatgtggaggaacaccagtggcgaaggcggctctctggtctgtaactgacgctgaggcgcgaaagcgtggggagcaaacaggattagataccctggtagtccacgccgtaaacgatgagtgctaagtgttagagggtttccgccctttagtgctgcagcaaacgcattaagcactccgcctggggagtacggccgcaaggctgaaactcaaaggaattgacgggggcccgcccaagcggtggagcatgtgggtttaattggaagcaacgcgaagaaccttaccaggtcttgacatccttcgttacctctagagatagagggttcccttcggggacgaagtgacaggtggtgcatggttgtcgtcagctcgtgtcgtgagatgttgggttaagtcccgcaacgagcgcaacccttgaccttagttgccagcattaagttgggcactctaaggtgactgccggtgacaaaccggaggaaggtggggatgacgtcaaatcatcatgccccttatgacctgggctacacacgtgctacaatggatagaacaaagggcagcaaagccgcgaggccgagccaatcccacaaatctattctcagttcggattgcaggctgcaactcgcctgcatgaagccggaatcgctagtaatcgcggatcagcatgccgcggtgaatacgttcccgggccttgtacacaccgcccgtcacaccacgagagtttgtaacacccgaagtcggtggg

SEQ ID NO: 787 - DNA, 1474 bp, Bacillus pacificus
gatgaacgctggcggcgtgcctaatacatgcaagtcgagcgaatggattgagagcttgctctcaagaagttagcggcggacgggtgagtaacacgtgggtaacctgcccataagactgggataactccgggaaaccggggctaataccggataacattttgaaccgcatggttcgaaattgaaaggcggcttcggctgtcacttatggatggacccgcgtcgcattagctagttggtgaggtaacggctcaccaaggcaacgatgcgtagccgacctgagagggtgatcggccacactgggactgagacacggcccagactcctacgggaggcagcagtagggaatcttccgcaatggacgaaagtctgacggagcaacgccgcgtgagtgatgaaggctttcgggtcgtaaaactctgttgttagggaagaacaagtgctagttgaataagctggcaccttgacggtacctaaccagaaagccacggctaactacgtgccagcagccgcggtaatacgtaggtggcaagcgttatccggaattattgggcgtaaagcgcgcgcaggtggtttcttaagtctgatgtgaaagcccacggctcaaccgtggagggtcattggaaactgggagacttgagtgcagaagaggaaagtggaattccatgtgtagcggtgaaatgcgtagagatatggaggaacaccagtggcgaaggcgactttctggtctgtaactgacactgaggcgcgaaagcgtggggagcaaacaggattagataccctggtagtccacgccgtaaacgatgagtgctaagtgttagagggtttccgccctttagtgctgaagttaacgcattaagcactccgcctggggagtacggccgcaaggctgaaactcaaaggaattgacgggggcccgcacaagcggtggagcatgtggtttaattcgaagcaacgcgaagaaccttaccaggtcttgacatcctctgaaaaccctagagatagggcttctccttcgggagcagagtgacaggtggtgcatggttgtcgtcagctcgtgtcgtgagatgttgggttaagtcccgcaacgagcgcaacccttgatcttagttgccatcattaagttgggcactctaaggtgactgccggtgacaaaccggaggaaggtggggatgacgtcaaatcatcatgccccttatgacctgggctacacacgtgctacaatggacggtacaaagagctgcaagaccgcgaggtggagctaatctcataaaaccgttctcagttcggattgtaggctgcaactcgcctacatgaagctggaatcgctagtaatcgcggatcagcatgccgcggtgaatacgttcccgggccttgtacacaccgcccgtcacaccacgagagtttgtaacacccgaagtcggtggggtaacctttatggagccagccgcctaaggtgggacagatgattggggtg

SEQ ID NO: 788 - DNA, 1472 bp, Bacillus paralicheniformis
gacgaacgctggcggcgtgcctaatacatgcaagtcgagcggacagatgggagcttgctccctgatgttagcggcggacgggtgagtaacacgtgggtaacctgcctgtaagactgggataactccgggaaaccggggctaataccggatgcttgattgaaccgcatggttcaattataaaaggtggcttttagctaccacttacagatggacccgcggcgcattagctagttggtgaggtaacggctcaccaaggcaacgatgcgtagccgacctgagagggtgatcggccacactgggactgagacacggcccagactcctacgggaggcagcagtagggaatcttccgcaatggacgaaagtctgacggagcaacgccgcgtgagtgatgaaggttttcggatcgtaaaactctgttgttagggaagaacaagtaccgttcgaatagggcggtaccttgacggtacctaaccagaaagccacggctaactacgtgccagcagccgcggtaatacgtaggtggcaagcgttgtccggaattattgggcgtaaagcgcgcgcaggcggtttcttaagtctgatgtgaaagcccccggctcaaccggggagggtcattggaaactggggaacttgagtgcagaagaggagagtggaattccacgtgtagcggtgaaatgcgtagagatgtggaggaacaccagtggcgaaggcgactctctggtctgtaactgacgctgaggcgcgaaagcgtggggagcgaacaggattagataccctggtagtccacgccgtaaacgatgagtgctaagtgttagagggtttccgccctttagtgctgcagcaaacgcattaagcactccgcctggggagtacggtcgcaagactgaaactcaaaggaattgacgggggcccgcacaagcggtggagcatgtggtttaattcgaagcaacgcgaagaaccttaccaggtcttgacatcctctgacaaccctagagatagggcttccccttcgggggcagagtgacaggtggtgcatggttgtcgtcagctcgtgtcgtgagatgttgggttaagtcccgcaacgagcgcaacccttgatcttagttgccagcattcagttgggcactctaaggtgactgccggtgacaaaccggaggaaggtggggatgacgtcaaatcatcatgccccttatgacctgggctacacacgtgctacaatgggcagaacaaagggcagcgaagccgcgaggctaagccaatcccacaaatctgttctcagttcggatcgcagtctgcaactcgactgcgtgaagctggaatcgctagtaatcgcggatcagcatgccgcggtgaatacgttcccgggccttgtacacaccgcccgtcacaccacgagagtttgtaacacccgaagtcggtgaggtaaccttttggagccagccgccgaaggtgggacagatgattggggtg

SEQ ID NO: 789 - DNA, 1474 bp, Bacillus paramycoides
gatgaacgctggcggcgtgcctaatacatgcaagtcgagcgaatggattaagagcttgctcttatgaagttagcggcggacgggtgagtaacacgtgggtaacctgcccataagactgggataactccgggaaaccggggctaataccggataacattttgaaccgcatggttcgaaattgaaaggcggcttcggctgtcacttatggatggacccgcgtcgcattagctagttggtgaggtaacggctcaccaaggcaacgatgcgtagccgacctgagagggtgatcggccacactgggactgagacacggcccagactcctacgggaggcagcagtagggaatcttccgcaatggacgaaagtctgacggagcaacgccgcgtgagtgatgaaggctttcgggtcgtaaaactctgttgttagggaagaacaagtgctagttgaataagctggcaccttgacggtacctaaccagaaagccacggctaactacgtgccagcagccgcggtaatacgtaggtggcaagcgttatccggaattattgggcgtaaagcgcgcgcaggtggtttcttaagtctgatgtgaaagcccacggctcaaccgtggagggtcattggaaactgggagacttgagtgcagaagaggaaagtggaattccatgtgtagcggtgaaatgcgtagagatatggaggaacaccagtggcgaaggcgactttctggtctgtaactgacactgaggcgcgaaagcgtggggagcaaacaggattagataccctggtagtccacgccgtaaacgatgagtgctaagtgttagagggtttccgccctttagtgctgaagttaacgcattaagcactccgcctggggagtacggccgcaaggctgaaactcaaaggaattgacgggggcccgcacaagcggtggagcatgtggtttaattcgaagcaacgcgaagaaccttaccaggtcttgacatcctctgacaaccctagagatagggcttctccttcgggagcagagtgacaggtggtgcatggttgtcgtcagctcgtgtcgtgagatgttgggttaagtcccgcaacgagcgcaacccttgatcttagttgccatcattaagttgggcactctaaggtgactgccggtgacaaaccggaggaaggtggggatgacgtcaaatcatcatgccccttatgacctgggctacacacgtgctacaatggacggtacaaagagctgcaagaccgcgaggtggagctaatctcataaaaccgttctcagttcggattgtaggctgcaactcgcctacatgaagctggaatcgctagtaatcgcggatcagcatgccgcggtgaatacgttcccgggccttgtacacaccgcccgtcacaccacgagagtttgtaacacccgaagtcggtggggtaacctttatggagccagccgcctaaggtgggacagatgattggggtg

SEQ ID NO: 790 - DNA, 1474 bp, Bacillus paranthracis
gatgaacgctggcggcgtgcctaatacatgcaagtcgagcgaatggattaagagcttgctcttatgaagttagcggcggacgggtgagtaacacgtgggtaacctgcccataagactgggataactccgggaaaccggggctaataccggataacattttgaaccgcatggttcgaaattgaaaggcggcttcggctgtcacttatggatggacccgcgtcgcattagctagttggtgaggtaacggctcaccaaggcaacgatgcgtagccgacctgagagggtgatcggccacactgggactgagacacggcccagactcctacgggaggcagcagtagggaatcttccgcaatggacgaaagtctgacggagcaacgccgcgtgagtgatgaaggctttcgggtcgtaaaactctgttgttagggaagaacaagtgctagttgaataagctggcaccttgacggtacctaaccagaaagccacggctaactacgtgccagcagccgcggtaatacgtaggtggcaagcgttatccggaattattgggcgtaaagcgcgcgcaggtggtttcttaagtctgatgtgaaagcccacggctcaaccgtggagggtcattggaaactgggagacttgagtgcagaagaggaaagtggaattccatgtgtagcggtgaaatgcgtagagatatggaggaacaccagtggcgaaggcgactttctggtctgtaactgacactgaggcgcgaaagcgtggggagcaaacaggattagataccctggtagtccacgccgtaaacgatgagtgctaagtgttagagggtttccgccctttagtgctgaagttaacgcattaagcactccgcctggggagtacggccgcaaggctgaaactcaaaggaattgacgggggcccgcacaagcggtggagcatgtggtttaattcgaagcaacgcgaagaaccttaccaggtcttgacatcctctgacaaccctagagatagggcttctccttcgggagcagagtgacaggtggtgcatggttgtcgtcagctcgtgtcgtgagatgttgggttaagtcccgcaacgagcgcaacccttgatcttagttgccatcattaagttgggcactctaaggtgactgccggtgacaaaccggaggaaggtggggatgacgtcaaatcatcatgccccttatgacctgggctacacacgtgctacaatggacggtacaaagagctgcaagaccgcgaggtggagctaatctcataaaaccgttctcagttcggattgtaggctgcaactcgcctacatgaagctggaatcgctagtaatcgcggatcagcatgccgcggtgaatacgttcccgggccttgtacacaccgcccgtcacaccacgagagtttgtaacacccgaagtcggtggggtaacctttttggagccagccgcctaaggtgggacagatgattggggtg

SEQ ID NO: 791 - DNA, 1438 bp, Bacillus persicus
gacgaacgctggcggcgtgcctaatacatgcaagtcgagcggattgatgggagcttgctccctgatgttagcggcggacgggtgagtaacacgtgggcaacctgcctgtaagactgggataactccgggaaaccggggctaataccggataattcatttcctctcatgagggaatgctgaaagacggtttcggctgtcacttacagatgggcccgcggcgcattagctagttggtgaggtaacggctcaccaaggcaacgatgcgtagccgacctgagagggtgatcggccacactgggactgagacacggcccagactcctacgggaggcagcagtagggaatcttccgcaatggacgaaagtctgacggagcaacgccgcgtgagcgatgaaggccttcgggtcgtaaagctctgttgttagggaagaacaagtatcggagtaactgccggtaccttgacggtacctaaccagaaagccacggctaactacgtgccagcagccgcggtaatacgtaggtggcaagcgttgtccggaattattgggcgtaaagcgcgcgcaggtggttccttaagtctgatgtgaaagcccacggctcaaccgtggagggtcattggaaactggggaacttgagtgcagaagaggaaagtggaattccacgtgtagcggtgaaatgcgtagagatgtggaggaacaccagtggcgaaggcgactttctggtctgtaactgacactgaggcgcgaaagcgtggggagcgaacaggattagataccctggtagtccacgccgtaaacgatgagtgctaagtgttagagggtttccgccctttagtgctgcagcaaacgcattaagcactccgcctggggagtacggccgcaaggctgaaactcaaaggaattgacgggggcccgcacaagcggtggagcatgtggtttaattcgaagcaacgcgaagaaccttaccaggtcttgacatcctctgacaactctggagacagagcgttccccttcgggggacagagtgacaggtggtgcatggttgtcgtcagctcgtgtcgtgagatgttgggttaagtcccgcaacgagcgcaacccttgatcttagttgccagcattcagttgggcactctaaggtgactgccggtgacaaaccggaggaaggtggggatgacgtcaaatcatcatgccccttatgacctgggctacacacgtgctacaatggatagaacaaagggcagcaaaaccgcgaggtcaagcaaatcccataaatctattctcagttcggattgcaggctgcaactcgcctgcatgaagccggaatcgctagtaatcgcggatcagcatgccgcggtgaatacgttcccgggccttgtacacaccgcccgtcacaccacgagagtttgtaacacccgaagtcggtggggtaacctttatggg

SEQ ID NO: 792 - DNA, 1471 bp, Bacillus safensis
gacgaacgctggcggcgtgcctaatacatgcaagtcgagcggacagaagggagcttgctcccggatgttagcggcggacgggtgagtaacacgtgggtaacctgcctgtaagactgggataactccgggaaaccggagctaataccggatagttccttgaaccgcatggttcaaggatgaaagacggtttcggctgtcacttacagatggacccgcggcgcattagctagttggtggggtaatggctcaccaaggcgacgatgcgtagccgacctgagagggtgatcggccacactgggactgagacacggcccagactcctacgggaggcagcagtagggaatcttccgcaatggacgaaagtctgacggagcaacgccgcgtgagtgatgaaggttttcggatcgtaaagctctgttgttagggaagaacaagtgcgagagtaactgctcgcaccttgacggtacctaaccagaaagccacggctaactacgtgccagcagccgcggtaatacgtaggtggcaagcgttgtccggaattattgggcgtaaagggctcgcaggcggtttcttaagtctgatgtgaaagcccccggctcaaccggggagggtcattggaaactgggaaacttgagtgcagaagaggagagtggaattccacgtgtagcggtgaaatgcgtagagatgtggaggaacaccagtggcgaaggcgactctctggtctgtaactgacgctgaggagcgaaagcgtggggagcgaacaggattagataccctggtagtccacgccgtaaacgatgagtgctaagtgttagggggtttccgccccttagtgctgcagctaacgcattaagcactccgcctggggagtacggtcgcaagactgaaactcaaaggaattgacgggggcccgcacaagcggtggagcatgtggtttaattcgaagcaacgcgaagaaccttaccaggtcttgacatcctctgacaaccctagagatagggctttcccttcggggacagagtgacaggtggtgcatggttgtcgtcagctcgtgtcgtgagatgttgggttaagtcccgcaacgagcgcaacccttgatcttagttgccagcattcagttgggcactctaaggtgactgccggtgacaaaccggaggaaggtggggatgacgtcaaatcatcatgccccttatgacctgggctacacacgtgctacaatggacagaacaaagggctgcaagaccgcaaggtttagccaatcccataaatctgttctcagttcggatcgcagtctgcaactcgactgcgtgaagctggaatcgctagtaatcgcggatcagcatgccgcggtgaatacgttcccgggccttgtacacaccgcccgtcacaccacgagagtttgcaacacccgaagtcggtgaggtaacctttatggagccagccgccgaaggtggggcagatgattggggtg

SEQ ID NO: 793 - DNA, 1379 bp, Bacillus salarius
tgacgatggtggaacgagcggcggacgggtgagtaacacgtgggcaacctaccttttagactgggataaccccgggaaaccggagctaataccagatagccccatcgatcacctgatcgatgggagaaagcggggagtaatcctcgccctagaagatgggcccgcggcgcattagctagttggggaggtaaaggcttcccaaggcaacgatgcgtagccgacctgagagggtgatcggccacactgggactgagacacggcccagactcctacgggaggcagcagtagggaatcatccgcaatgggcgaaagcctgacggtgcaacgccgcgtgagtgaagaaggttttcggatcgtaaagctctgttatccgagaagaacaaggactggtcgaataggccggtcccctgacggtaccggatcagaaagccccggctaactacgtgccagcagccgcggtaatacgtagggggcaagcgttgtccggaattattgggcgtaaagggcgcgcaggcggtttcctaagtctgatgtgaaaggccacggctcaaccgtggaatggcattggaaactggggaacttgagtacaggagaggagagtggaattccacgtgtagcggtgaaatgcgtagagatgtggaggaacaccagtggcgaagcggctctctggcctgtaactgacgctgaggcgcgaaagcgtggggagcgaacaggattagataccctggtagtccacgccgtaaacgttgagtgctaggtgttaggggtttcgacacccttagtgccgaagcaaacgcattaagcactccgcctggggagtacgaccgcaaggttgaaactcaaaggaattgacgggggcccgcacaagcggtggagcatgtggtttaattcgacgcaacgcgaagaaccttaccaggtcttgacatcttttgctacttctagagatagaaggttccccttcgggggacaaaatgacaggtggtgcatggttgtcgtcagctcgtgtcgtgagatgttgggttaagtcccgcaacgagcgcaacccttaatcttagttgccagcattgagttgggcactctaaggtgactgccggtgacaaaccggaggaaggtggggatgacgtcaaatcatcatgccccttatgacctgggctacacacgtgctacaatggatggtacagaggggagcgaagccgtgaggtggagcgaatctcaaaaagccattctcagttcggactgcaggctgcaactcgcctgcatgaagccggaatcgctagtaatcgcggatcagcatgccgcggtgaatacgttcccgggccttgtacacaccgcccgtcacaccacgagagcttgcaacacccgaagtcggtgaggtaacc

SEQ ID NO: 794 - DNA, 1446 bp, Bacillus salsus
gatgaacgctggcggcgtgcctaatacatgcaagtcgagcggatctgagggagcttgctcccaaagattagcggcggacgggtgagtaacacgtgggcaatctgcctgtaagactgggataacttcgggaaaccggagctaataccggataatatagagaaccgcatggttctctattaaaagatggtttcggctatcacttacagatgagcccgcggcgcattagctagttggtgaggtaatggctcaccaaggcaacgatgcgtagccgacctgagagggtgatcggccacactgggactgagacacggcccagactcctacgggaggcagcagtagggaatcttccgcaatggacgaaagtctgacggagcaacgccgcgtgaacgatgaaggccttcgggtcgtaaagttctgttgttaaggaagaacaagtacgagagtaactgctcgtaccttgacggtacttaaccagaaagccacggctaactacgtgccagcagccgcggtaatacgtaggtggcaagcgttatccggaattattgggcgtaaagcgctcgcaggcggtcctttaagtctgatgtgaaagcccacggctcaaccgtggagggtcattggaaactgggggacttgagtgcagaagaggagagtggaattccacgtgtagcggtgaaatgcgtagagatgtggaggaacaccagtggcgaaggcgactctctggtctgtaactgacgctgaggagcgaaagcgtggggagcgaacaggattagataccctggtagtccacgccgtaaacgatgagtgctaagtgttagagggtttccgccctttagtgctgcagctaacgcattaagcactccgcctggggagtacggtcgcaagactgaaactcaaaggaattgacgggggcccgcacaagcggtggagcatgtggtttaattcgaagcaacgcgaagaaccttaccaggtcttgacatcccaatgacctccctagagatagggctttaccttcgggtacattggtgacaggtggtgcatggttgtcgtcagctcgtgtcgtgagatgttgggttaagtcccgcaacgagcgcaacccttgatcttagttgccagcattcagttgggcactctaaggtgactgccggtgacaaaccggaggaaggtggggatgacgtcaaatcatcatgccccttatgacctgggctacacacgtgctacaatggatggtacaaagggcagcaaaaccgcgaggttaagcgaatcccataaaaccattctcagttcggattgtaggctgcaactcgcctacatgaagctggaatcgctagtaatcgcggatcagcatgccgcggtgaatacgttcccgggccttgtacacaccgcccgtcacaccacgagagtttgtaacacccgaagtcggtggggtaaccgtaaggagccagccgc

SEQ ID NO: 795 - DNA, 1413 bp, Bacillus selenatarsenatis
gcggatcttcattagcttgcttttgaagatcagcggcggacgggtgagtaacacgtgggcaacctgcctgtaagactgggataacttcgggaaaccggagctaataccggataatccattccctcacatgagggaatgctgaaagacggtttcggctgtcacttacagatgggcccgcggcgcattagctagttggtgaggtaacggctcaccaaggcaacgatgcgtagccgacctgagagggtgatcggccacactgggactgagacacggcccagactcctacgggaggcagcagtagggaatcttccgcaatggacgaaagtctgacggagcaacgccgcgtgaacgatgaaggctttcgggtcgtaaagttctgttgtcagggaagaacaagtaccggagtaactgccggtaccttgacggtacctgaccagaaagccacggctaactacgtgccagcagccgcggtaatacgtaggtggcaagcgttgtccggaattatggggcgtaaagcgcgcgcaggcggttccttaagtctgatgtgaaagcccccggctcaaccggggagggtcattggaaactggggaacttgagtgcagaagaggagagcggaattccacgtgtagcggtgaaatgcgtagagatgtggaggaacaccagtggcgaaggcggctctctggtctgtaactgacgctgaggcgcgaaagcgtggggagcgaacaggattagataccctggtagtccacgccgtaaacgatgagtgctaagtgttagagggtttccgccctttagtgctgcagcaaacgcattaagcactccgcctggggagtacggccgcaaggctgaaactcaaaggaattgacgggggcccgcacaagcggtggagcatgtggtttaattcgaagcaacgcgaagaaccttaccaggtcttgacatcctctgacaaccctagagatagggcgttccccttcgggggacagagtgacaggtggtgcatggttgtcgtcagctcgtgtcgtgagatgttgggttaagtcccgcaacgagcgcaacccttgatcttagttgccagcattcagttgggcactctaaggtgactgccggtgacaaaccggaggaaggtggggatgacgtcaaatcatcatgccccttatgacctgggctacacacgtgctacaatggatggaacaaagggtcgcgaagccgcgaggtcgagccaatcccataaatccattctcagttcggattgcaggctgcaactcgcctgcatgaagccggaatcgctagtaatcgcggatcagcatgccgcggtgaatacgttcccgggccttgtacacaccgcccgtcacaccacgagagtttgtaacacccgaagtcggtggggtaacctttatggagccagccgcctaa

SEQ ID NO: 796 - DNA, 1489 bp, Bacillus selenitireducens
gacgaacgctggcggcatgcctaatacatgcaagtcgagcgcaggaagctttctgaagccttcgggtggacgaaagtggaatgagcggcggacgggtgagtaacacgtgggcaacctgccctgcagaccgggacaacctcgtgaaaatgaggctaataccggatgaccattggcaccgcatggtgccgatgtaaaagaggggattcgtcctctcactgcaggatgggcccgcggcgcattagctagttggtgaggtaagggctcaccaaggcgacgatgcgtagccgacctgagagggtgatcggccacactgggactgagacacggcccagactcctacgggaggcagcagtagggaatcatccgcaatgggcgaaagcctgacggtgcaatgccgcgtgaacgatgaaggttctcggatcgtaaagttctgttatgagggaagaacaagtgccgtttgaataaggcggcaccttgacggtacctcacgagaaagccccggctaactacgtgccagcagccgcggtaatacgtagggggcaagcgttgtccggaattattgggcgtaaagcgcgcgcaggcggtctcttaagtctgatgtgaaagcccacggctcaaccgtggagggtcattggaaactgggagacttgagtgtaagagaggaaagtggaattccacgtgtagcggtgaaatgcgtagatatgtggaggaacaccagtggcgaaggcgactttctggcttacaactgacgctgaggcgcgaaagcgtggggagcaaacaggattagataccctggtagtccacgccgtaaacgatgagtgctaggtgttaggggtttcgatacccttagtgccgaagttaacacattaagcactccgcctggggagtacggccgcaaggctgaaactcaaaggaattgacgggggcccgcacaagcagtggagcatgtggtttaattcgaagcaacgcgaagaaccttaccaggtcttgacatcctctgaacatccaggagactggactttccccttcgggggacagagtgacaggtggtgcatggttgtcgtcagctcgtgtcgtgagatgttgggttaagtcccgcaacgagcgcaacccctgatcttagttgccagcattcagttgggcactctaaggtgactgccggtgataaaccggaggaaggtggggatgacgtcaaatcatcatgccccttatgacctgggctacacacgtgctacaatggatggtacaatgggttgcgaagccgcgaggtgaagccaatcccataaagccattctcagttcggattgcaggctgcaactcgcctgcatgaagccggaattgctagtaatcgcggatcagcatgccgcggtgaatacgttcccgggccttgtacacaccgcccgtcacaccacgagagtttgtaacacccgaagtcggtgaggtaaccttttggagccagccgccgaaggtgggacagatgattggggtg

SEQ ID NO: 797 - DNA, 1473 bp, Bacillus shackletonii
gacgaacgctggcggcgtgcctaatacatgcaagtcgagcggacttttaaaagcttgcttttaaaagttagcggcggacgggtgagtaacacgtgggtaacctgcctgtaagactgggataactccgggaaaccggggctaataccggataacttctttcctcgcatgaggaaagattgaaagatggcttcggctatcacttacagatggacccgcggcgcattagctagttggtgaggtaacggctcaccaaggcaacgatgcgtagccgacctgagagggtgatcggccacactgggactgagacacggcccagactcctacgggaggcagcagtagggaatcttccgcaatggacgaaagtctgacggagcaacgccgcgtgagtgatgaaggttttcggatcgtaaaactctgttgttagggaagaacaagtatcgttcgaatagggcggtaccttgacggtacctaaccagaaagccacggctaactacgtgccagcagccgcggtaatacgtaggtggcaagcgttgtccggaattattgggcgtaaagcgcgcgcaggcggtttcttaagtctgatgtgaaagcccacggctcaaccgtggagggtcattggaaactgggagacttgagtgcagaagaggagagtggaattccacgtgtagcggtgaaatgcgtagagatgtggaggaacaccagtggcgaaggcgactctctggtctgtaactgacgctgaggcgcgaaagcgtggggagcgaacaggattagataccctggtagtccacgccgtaaacgatgagtgctaagtgttagagggtttccgccctttagtgctgcagctaacgcattaagcactccgcctggggagtacggccgcaaggctgaaactcaaaggaattgacgggggcccgcacaagcggtggagcatgtggtttaattcgaagcaacgcgaagaaccttaccaggtcttgacatcctctgacaaccctagagatagggcgttccccttcgggggacagagtgacaggtggtgcatggttgtcgtcagctcgtgtcgtgagatgttgggttaagtcccgcaacgagcgcaacccttgaccttagttgccagcattcagttgggcactctaaggtgactgccggtgacaaaccggaggaaggtggggatgacgtcaaatcatcatgccccttatgacctgggctacacacgtgctacaatggatggtacaaagggctgcgagaccgcgaggttaagccaatcccataaaaccattctcagttcggattgcaggctgcaactcgcctgcatgaagccggaatcgctagtaatcgcggatcagcatgccgcggtgaatacgttcccgggccttgtacacaccgcccgtcacaccacgagagtttgtaacacccgaagtcggtgaggtaacctttaggagccagccgccgaaggtgggacagatgattggggtg

SEQ ID NO: 798 - DNA, 1472 bp, Bacillus siamensis
gacgaacgctggcggcgtgcctaatacatgcaagtcgagcggacagatgggagcttgctccctgatgttagcggcggacgggtgagtaacacgtgggtaacctgcctgtaagactgggataactccgggaaaccggggctaataccggatggttgtttgaaccgcatggttcagacataaaaggtggcttcggctaccacttacagatggacccgcggcgcattagctagttggtgaggtaacggctcaccaaggcgacgatgcgtagccgacctgagagggtgatcggccacactgggactgagacacggcccagactcctacgggaggcagcagtagggaatcttccgcaatggacgaaagtctgacggagcaacgccgcgtgagtgatgaaggttttcggatcgtaaagctctgttgttagggaagaacaagtgccgttcaaatagggcggcaccttgacggtacctaaccagaaagccacggctaactacgtgccagcagccgcggtaatacgtaggtggcaagcgttgtccggaattattgggcgtaaagggctcgcaggcggtttcttaagtctgatgtgaaagcccccggctcaaccggggagggtcattggaaactggggaacttgagtgcagaagaggagagtggaattccacgtgtagcggtgaaatgcgtagagatgtggaggaacaccagtggcgaaggcgactctctggtctgtaactgacgctgaggagcgaaagcgtggggagcgaacaggattagataccctggtagtccacgccgtaaacgatgagtgctaagtgttagggggtttccgccccttagtgctgcagctaacgcattaagcactccgcctggggagtacggtcgcaagactgaaactcaaaggaattgacgggggcccgcacaagcggtggagcatgtggtttaattcgaagcaacgcgaagaaccttaccaggtcttgacatcctctgacaatcctagagataggacgtccccttcgggggcagagtgacaggtggtgcatggttgtcgtcagctcgtgtcgtgagatgttgggttaagtcccgcaacgagcgcaacccttgatcttagttgccagcattcagttgggcactctaaggtgactgccggtgacaaaccggaggaaggtggggatgacgtcaaatcatcatgccccttatgacctgggctacacacgtgctacaatgggcagaacaaagggcagcgaaaccgcgaggttaagccaatcccacaaatctgttctcagttcggatcgcagtctgcaactcgactgcgtgaagctggaatcgctagtaatcgcggatcagcatgccgcggtgaatacgttcccgggccttgtacacaccgcccgtcacaccacgagagtttgtaacacccgaagtcggtgaggtaacctttatggagccagccgccgaaggtgggacagatgattggggtg

SEQ ID NO: 799 - DNA, 1477 bp, Bacillus smithii
gacgaacgctggcggcgtgcctaatacatgcaagtcgagcggactttcaagaagcttgctttttgaaagttagcggcggacgggtgagtaacacgtgggcaacctgcctgcaagacggggataactccgggaaaccggggctaataccggataatatcttccttcgcatgaaggaaggttgaaaggcggcgcaagctgccgcttgcagatgggcccgcggcgcattagctagttggtgaggtaacggctcaccaaggcgacgatgcgtagccgacctgagagggtgatcggccacactgggactgagacacggcccagactcctacgggaggcagcagtagggaatcttccgcaatggacgaaagtctgacggagcaacgccgcgtgagcgaagaaggtcttcggatcgtaaagctctgttgtcagggaagaacaagtaccgttcgaacagggcggtaccttgacggtacctgaccagaaagccacggctaactacgtgccagcagccgcggtaatacgtaggtggcaagcgttgtccggaattattgggcgtaaagcgcgcgcaggcggtctcttaagtctgatgtgaaagcccacggctcaaccgtggagggtcattggaaactgggagacttgagtgcagaagaggagagcggaattccacgtgtagcggtgaaatgcgtagagatgtggaggaacaccagtggcgaaggcggctctctggtctgtaactgacgctgaggcgcgaaagcgtggggagcgaacaggattagataccctggtagtccacgccgtaaacgatgagtgctaagtgttagagggcttccaccctttagtgctgcagctaacgcattaagcactccgcctggggagtacggccgcaaggctgaaactcaaaggaattgacgggggcccgcacaagcggtggagcatgtggtttaattcgaagcaacgcgaagaaccttaccaggtcttgacatccttcgctacctctagagatagagggttccccttcgggggacggagtgacaggtggtgcatggttgtcgtcagctcgtgtcgtgagatgttgggttaagtcccgcaacgagcgcaacccttgaccttagttgccagcattcagttgggcactctaaggtgactgccggtgacaaaccggaggaaggtggggatgacgtcaaatcatcatgccccttatgacctgggctacacacgtgctacaatggatggtacaaagggtcgcgaaaccgcgaggtggagctaatcccaaaaaaccattctcagttcggattgcaggctgcaactcgcctgcatgaagccggaatcgctagtaatcgcggatcagcatgccgcggtgaatacgttcccgggccttgtacacaccgcccgtcacaccacgagagtttgcaacacccgaagtcggtgaggtaacccttacgggagccagccgccgaaggtggggcagatgattggggtg

SEQ ID NO: 800 - DNA, 1470 bp, Bacillus solimangrovi
gacgaacgctggcggcgtgcctaatacatgcaagtcgagcggatgaaagggagcttgctccctggattcagcggcggacgggtgagtaacacgtgggcaacctgcctgtaagactgggataacttcgggaaaccggagctaataccggataatcaacagaactgcatggttctgttgtaaaagacggttttgctgtcacttacagatgggcccgcggcgcattagttagttggtggggtaacggcctaccaagacgacgatgcgtagccgacctgagagggtgatcggccacactgggactgagacacggcccagactcctacgggaggcagcagtagggaatcttccgcaatggacgaaagtctgacggagcaacgccgcgtgagtgatgaaggccttcgggtcgtaaagctctgttgttagggaagaacaagtaccagagtaactgctggtaccttgacggtacctaaccagaaagccacggctaactacgtgccagcagccgcggtaatacgtaggtggcaagcgttgtccggaattattgggcgtaaagcgcgcgcaggcggttccttaagtctgatgtgaaagcccgcagctcaactgcggagggtcattggaaactggggaacttgagtacagaagaggaaagtggaattccatgtgtagcggtgaaatgcgtagatatatggaggaacaccagtggcgaaggcgactttctggtctgtaactgacgctgaggcgcgaaagcgtggggagcgaacaggattagataccctggtagtccacgccgtaaacgatgagtgctaagtgttagggggtttccgccccttagtgctgaagttaacgcattaagcactccgcctggggagtacgaccgcaaggttgaaactcaaaggaattgacgggggcccgcacaagcggtggagcatgtggtttaattcgaagcaacgcgaagaaccttaccaggtcttgacatcctctgacaaccctagagatagggcttccccttcgggggcagagtgacaggtggtgcatggttgtcgtcagctcgtgtcgtgagatgttgggttaagtcccgcaacgagcgcaacccttgtccttagttgccagcattcagttgggcactctaaggagactgccggtgacaaaccggaggaaggtggggatgacgtcaaatcatcatgccccttatgacctgggctacacacgtgctacaatggatggtacaaagggcagcaagaccgcgaggtttagccaatcccataaagccattctcagttcggattgtaggctgcaactcgcctacatgaagccggaatcgctagtaatcgcggatcagcatgccgcggtgaatacgttcccgggccttgtacacaccgcccgtcacaccacgagagtttgtaacacccgaagtcggtggggtaacctttatggagccagccgccgaaggtgggacagatgattggggtg

SEQ ID NO: 801 - DNA, 1467 bp, Bacillus sporothermodurans
ctggcggcgtgcctaatacatgcaagtcgagcgaacttgatgggagcttgctccctgatagttagcggcggacgggtgagtaacacgtgggtaacctgcctgtaagactgggataactccgggaaaccggggctaataccggataacttttttcttcgcatgaaggggaattgaaagatggctccggctatcacttacagatggacccgcggcgcattagctagttggtgaggtaacggctcaccaaggcgacgatgcgtagccgacttgagagggtgatcggccacactgggactgagacacggcccagactcctacgggaggcagcagtagggaatcttccgcaatggacgaaagtctgacggagcaacgccgcgtgagtgatgaaggttttcggatcgtaaaactctgttgttagggaagaacaagtatcgttcgaatagggcggtaccttgacggtacctaaccagaaagccacggctaactacgtgccagcagccgcggtaatacgtaggtggcaagcgttgtccggaattattgggcgtaaagcgcgcgcaggcggtttcttaagtctgatgtgaaagcccacggctcaaccgtggagggtcattggaaactgggagacttgagtgcagaagagaagagcggaattccacgtgtagcggtgaaatgcgtagagatgtggaggaacaccagtggcgaaggcggctctttggtctgtaactgacgctgaggcgcgaaagcgtggggagcgaacaggattagataccctggtagtccacgccgtaaacgatgagtgctaagtgttagagggtttccgccctttagtgctgcagctaacgcattaagcactccgcctggggagtacggccgcaaggctgaaactcaaaggaattgacgggggcccgcacaagcggtggagcatgtggtttaattcgaagcaacgcgaagaaccttaccaggtcttgacatcctcttgacctccctagagatagggatttcccttcggggacaagagtgacaggtggtgcatggttgtcgtcagctcgtgtcgtgagatgttgggttaagtcccgcaacgagcgcaacccttgaccttagttgccagcattcagttgggcactctaaggtgactgccggtgacaaaccggaggaaggtggggatgacgtcaaatcatcatgccccttatgacctgggctacacacgtgctacaatggatggtacaaagggttgctagaccgcgaggttacgccaatcccataaaaccattctcagttcggattgtaggctgcaactcgcctacatgaagccggaatcgctagtaatcgcggatcagcatgccgcggtgaatacgttcccgggccttgtacacaccgcccgtcacaccacgagagtttgtaacacccgaagtcggtgaggtaaccttttggagccagccgccgaaggtgggacagatgattggggtg

SEQ ID NO: 802 - DNA, 1463 bp, Bacillus stratosphericus
ctaatacatgcaagtcgagcggacagaagggagcttgctcccggatgttagcggcggacgggtgagtaacacgtgggtaacctgcctgtaagactgggataactccgggaaaccggagctaataccggatagttccttgaaccgcatggttcaaggatgaaagacggtttcggctgtcacttacagatggacccgcggcgcattagctagttggtgaggtaacggctcaccaaggcgacgatgcgtagccgacctgagagggtgatcggccacactgggactgagacacggcccagactcctacgggaggcagcagtagggaatcttccgcaatggacgaaagtctgacggagcaacgccgcgtgagtgatgaaggttttcggatcgtaaagctctgttgttagggaagaacaagtgcaagagtaactgcttgcaccttgacggtacctaaccagaaagccacggctaactacgtgccagcagccgcggtaatacgtaggtggcaagcgttgtccggaattattgggcgtaaagggctcgcaggcggtttcttaagtctgatgtgaaagcccccggctcaaccggggagggtcattggaaactgggaaacttgagtgcagaagaggagagtggaattccacgtgtagcggtgaaatgcgtagagatgtggaggaacaccagtggcgaaggcgactctctggtctgtaactgacgctgaggagcgaaagcgtggggagcgaacaggattagataccctggtagtccacgccgtaaacgatgagtgctaagtgttagggggtttccgccccttagtgctgcagctaacgcattaagcactccgcctggggagtacggtcgcaagactgaaactcaaaggaattgacgggggcccgcacaagcggtggagcatgtggtttaattcgaagcaacgcgaagaaccttaccaggtcttgacatcctctgacaaccctagagatagggctttcccttcggggacagagtgacaggtggtgcatggttgtcgtcagctcgtgtcgtgagatgttgggttaagtcccgcaacgagcgcaacccttgatcttagttgccagcatttagttgggcactctaaggtgactgccggtgacaaaccggaggaaggtggggatgacgtcaaatcatcatgccccttatgacctgggctacacacgtgctacaatggacagaacaaagggctgcgagaccgcaaggtttagccaatcccacaaatctgttctcagttcggatcgcagtctgcaactcgactgcgtgaagctggaatcgctagtaatcgcggatcagcatgccgcggtgaatacgttcccgggccttgtacacaccgcccgtcacaccacgagagtttgcaacacccgaagtcggtgaggtaacctttatggagccagccgccgaaggtggggcagatgattggggtgaagtcgtaacaa

SEQ ID NO: 803 - DNA, 1471 bp, Bacillus swezeyi
gacgaacgctggcggcgtgcctaatacatgcaagtcgagcgaaccgacgggagcttgctcccttaggttagcggcggacgggtgagtaacacgtgggtaacctgcctgtaagactgggataactccgggaaaccggggctaataccggatgcttgattgaaccgcatggttcaatcataaaaggcggcttcggctgccgtttacagatggacccgcggcgcattagctagttggtgaggtaatggctcaccaaggcgacgatgcgtagccgacctgagagggtgatcggccacactgggactgagacacggcccagactcctacgggaggcagcagtagggaatcttccgcaatggacgaaagtctgacggagcaacgccgcgtgagtgatgaaggttttcggatcgtaaagctctgttgttagggaagaacaagtaccgttcgaatagggcggtaccttgacggtacctaaccagaaagccacggctaactacgtgccagcagccgcggtaatacgtaggtggcaagcgttgtccggaattattgggcgtaaagcgcgcgcaggcggtttcttaagtctgatgtgaaagcccccggctcaaccggggagggtcattggaaactggggaacttgagtgcagaagaggagagtggaattccacgtgtagcggtgaaatgcgtagagatgtggaggaacaccagtggcgaaggcgactctctggtctgtaactgacgctgaggcgcgaaagcgtggggagcgaacaggattagataccctggtagtccacgccgtaaacgatgagtgctaagtgttagagggtttccgccctttagtgctgcagcaaacgcattaagcactccgcctggggagtacggtcgcaagactgaaactcaaaggaattgacgggggcccgcacaagcggtggagcatgtggtttaattcgaagcaacgcgaagaaccttaccaggtcttgacatcctctgacacccctagagatagggcttccccttcgggggcagagtgacaggtggtgcatggttgtcgtcagctcgtgtcgtgagatgttgggttaagtcccgcaacgagcgcaacccttgatcttagttgccagcattcagttgggcactctaaggtgactgccggtgacaaaccggaggaaggtggggatgacgtcaaatcatcatgccccttatgacctgggctacacacgtgctacaatggacagaacaaagggcagcgaagccgcgaggctcagccaatcccacaaatctgttctcagttcggatcgcagtctgcaactcgactgcgtgaagctggaatcgctagtaatcgcggatcagcatgccgcggtgaatacgttcccgggccttgtacacaccgcccgtcacaccacgagagtttgtaacacccgaagtcggtgaggtaaccttttggagccagccgccgaaggtgggacagatgattggggtg

SEQ ID NO: 804 - DNA, 1435 bp, Bacillus taeanensis
gctggcggcgtgcctaatacatgcaagtcgagcgcgtgaaactaactgatcccttcggggtgacgttagtggatcgagcggcggacgggtgagtaacacgtgggcaacctgccctgcagatcgggataacttcgggaaaccggagctaataccgggtaacaaatggaatcgcatgattccattttgaaagttgggttttacctaacactgcaggatgggcccgcggcgcattagctagttggtgaggtaacggctcaccaaggcaacgatgcgtagccgacctgagagggtgatcggccacactgggactgagacacggcccagactcctacgggaggcagcagtagggaatcttccgcaatggacgaaagtctgacggagcaacgccgcgtgagcgatgaaggccttcgggtcgtaaagctctgttgttagggaagaacaagtaccgttcgaatagggcggtaccttgacggtacctaaccagaaagccacggctaactacgtgccagcagccgcggtaatacgtaggtggcaagcgttgtccggaattattgggcgtaaagcgcgcgcaggcggtctcttaagtctgatgtgaaagcccacggctcaaccgtggagggtcattggaaactgggggacttgagtacagaagaggagagtggaattccacgtgtagcggtgaaatgcgtagagatgtggaggaacaccagtggcgaaggcggctctctggtctgtaactgacgctgaggcgcgaaagcgtggggagcaaacaggattagataccctggtagtccacgccgtaaacgatgagtgctaggtgttagggggtttccgccccttagtgctgaagttaacacattaagcactccgcctggggagtacggccgcaaggctgaaactcaaaggaattgacgggggcccgcacaagcggtggagcatgtggtttaattcgaagcaacgcgaagaaccttaccaggtcttgacatcctctgccaaccctagagatagggcgttcccttcgggggacagagtgacaggtggtgcatggttgtcgtcagctcgtgtcgtgagatgttgggttaagtcccgcaacgagcgcaacccttgatcttagttgccagcatttagttgggcactctaaggtgactgccggtgacaaaccggaggaaggtggggatgacgtcaaatcatcatgccccttatgacctgggctacacacgtgctacaatggatggtacaaagggctgcgagaccgcgaggttaagccaatcccataaagccattctcagttcggattgcaggctgcaactcgcctgcatgaagccggaatcgctagtaatcgcggatcagcatgccgcggtgaatacgttcccgggccttgtacacaccgcccgtcacaccacgagagtttgcaacacccgaagtcggtgaggta

SEQ ID NO: 805 - DNA, 1472 bp, Bacillus tequilensis
gacgaacgctggcggcgtgcctaatacatgcaagtcgagcggacagatgggagcttgctccctgatgttagcggcggacgggtgagtaacacgtgggtaacctgcctgtaagactgggataactccgggaaaccggggctaataccggatggttgtttgaaccgcatggttcaaacataaaaggtggcttcggctaccacttacagatggacccgcggcgcattagctagttggtgaggtaatggctcaccaaggcaacgatgcgtagccgacctgagagggtgatcggccacactgggactgagacacggcccagactcctacgggaggcagcagtagggaatcttccgcaatggacgaaagtctgacggagcaacgccgcgtgagtgatgaaggttttcggatcgtaaagctctgttgttagggaagaacaagtaccgttcgaatagggcggtaccttgacggtacctaaccagaaagccacggctaactacgtgccagcagccgcggtaatacgtaggtggcaagcgttgtccggaattattgggcgtaaagggctcgcaggcggtttcttaagtctgatgtgaaagcccccggctcaaccggggagggtcattggaaactggggaacttgagtgcagaagaggagagtggaattccacgtgtagcggtgaaatgcgtagagatgtggaggaacaccagtggcgaaggcgactctctggtctgtaactgacgctgaggagcgaaagcgtggggagcgaacaggattagataccctggtagtccacgccgtaaacgatgagtgctaagtgttagggggtttccgccccttagtgctgcagctaacgcattaagcactccgcctggggagtacggtcgcaagactgaaactcaaaggaattgacgggggcccgcacaagcggtggagcatgtggtttaattcgaagcaacgcgaagaaccttaccaggtcttgacatcctctgacaatcctagagataggacgtccccttcgggggcagagtgacaggtggtgcatggttgtcgtcagctcgtgtcgtgagatgttgggttaagtcccgcaacgagcgcaacccttgatcttagttgccagcattcagttgggcactctaaggtgactgccggtgacaaaccggaggaaggtggggatgacgtcaaatcatcatgccccttatgacctgggctacacacgtgctacaatggacagaacaaagggcagcgaaaccgcgaggttaagccaatcccacaaatctgttctcagttcggatcgcagtctgcaactcgactgcgtgaagctggaatcgctagtaatcgcggatcagcatgccgcggtgaatacgttcccgggccttgtacacaccgcccgtcacaccacgagagtttgtaacacccgaagtcggtgaggtaaccttttaggagccagccgccgaaggtgggacagatgattggggtg

SEQ ID NO: 806 - DNA, 1470 bp, Bacillus terrae
  misc_feature (1116)..(1116): n is a, c, g, or t
gacgaacgctggcggcgtgcctaatacatgcaagtcgagcggatgaaagggagcttgctccctggattcagcggcggacgggtgagtaacacgtgggcaacctgcctgtaagactgggataactccgggaaaccggggctaataccggataacttcttttctcgcatggggagaggttgaaagacggttatgctgtcacttacagatgggcccgcggcgcattagctagttggtggggtaacggcctaccaaggcgacgatgcgtagccgacctgagagggtgatcggccacactgggactgagacacggcccagactcctacgggaggcagcagtagggaatcttccgcaatggacgaaagtctgacggagcaacgccgcgtgagtgacgaaggccttcgggtcgtaaaactctgttatcagggaagaataagcattggttaactgccagtgccttgacggtacctgaccagaaagccacggctaactacgtgccagcagccgcggtaatacgtaggtggcaagcgttgtccggaattattgggcgtaaagcgcgcgcaggcggcttcttaagtctgatgtgaaagcccacggctcaaccgtggagggtcattggaaactgggaggcttgagtgcagaagagaagagcggaattccacgtgtagcggtgaaatgcgtagagatgtggaggaacaccagtggcgaaggcggctctttggtctgtaactgacgctgaggcgcgaaagcgtggggagagaacaggattagataccctggtattccacgccgtaaacgatgagtgctaagtgttagggggtttccgccccttagtgctgcagcaaacgcattaagcactccgcctggggagtacggccgcaaggctgaaactcaaaggaattgacgggggcccgcacaagcggtggagcatgtggtttaattcgaagcaacgcgaagaaccttaccaggtcttgacatcccgctgcccgctctggagacagagtcttcccttcggggacagcggtgacaggtggtgcatggttgtcgtcagctcgtgtcgtgagatgttgggttaagtcccgcaacgagcgcaacccttgatcttagttgccagcattnagttgggcactctaaggtgactgccggtgacaaaccggaggaaggtggggatgacgtcaaatcatcatgccccttatgacctgggctacacacgtgctacaatggatggtacagagggcagcaagaccgcgaggtggagcaaatcccttaaaaccattctcagttcggattgcaggctgcaactcgcctgcatgaagccggaatcgctagtaatcgcggatcagcatgccgcggtgaatacgttcccgggccttgtacacaccgcccgtcacaccacgagagtttgtaacacccgaagtcggtggggtaaccatttggagccagccgccgaaggtgggacagatgattggggtg

SEQ ID NO: 807 - DNA, 1425 bp, Bacillus thermocopriae
  misc_feature (563)..(563): n is a, c, g, or t
  misc_feature (839)..(839): n is a, c, g, or t
atgcagtcgagcggaccaatagaagcttgcttctgttggttagcggcggacgggtgagtaacacgtgggcaacctgcctgtaagactgggataacttcgggaaaccggagctaataccggataattcatcccctcgcatgaggggatgctgaaagtcggttcacgctgacacttacagatgggcccgcggcgcattagctagttggtgaggtaatggctcaccaaggcgacgatgcgtagccgacctgagagggtgatcggccacactgggactgagacacggcccagactcctacgggaggcagcagtagggaatcttccacaatggacgaaagtctgatggagcaacgccgcgtgagcgatgaaggccttcgggtcgtaaagctctgttgttagggaagaacaagtatcggagtaactgccggtaccttgacggtacctaaccagaaagccacggctaactacgtgccagcagccgcggtaatacgtaggtggcaagcgttgtccggaattattgggcgtaaagcgcgcgcaggcggtcctttaagtctgatgtgaaagcncacggctcaaccgtggagggtcattggaaactgggggacttgagtgcagaagaggaaagcggaattccacgtgtagcggtgaaatgcgtagagatgtggaggaacaccagtggcgaaggcggctttctggtctgtaactgacgctgaggcgcgaaagcgtggggagcaaacaggattagataccctggtagtccacgccgtaaacgatgagtgctaagtgttagagggtttccgccctttagtgctgcagctaacgcattaagcactccgcctggngagtacggccgcaaggctgaaactcaaaggaattgacgggggcccgcacaagcggtggagcatgtggtttaattcgaagcaacgcgaagaaccttaccaggtcttgacatccttacgacctccctagagatagggatttccccttcgggggacggaagtgacaggtggtgcatggttgtcgtcagctcgtgtcgtgagatgttgggttaagtcccgcaacgagcgcaacccttgatcttagttgccagcattcagttgggcactctaaggtgactgccggtgacaaaccggaggaaggtggggatgacgtcaaatcatcatgccccttatgacctgggctacacacgtgctacaatggatggtacaaagggcagcgaaaccgcgaggtcgagccaatcccataaaaccattctcagttcggattgcaggctgcaactcgcctgcatgaagccggaatcgctagtaatcgcggatcagcatgccgcggtgaatacgttcccgggccttgtacacaccgcccgtcacaccacgagagtttgtaacacccgaagtcggtggggtaacctttatgagccagccgctaagg

SEQ ID NO: 808 - DNA, 1474 bp, Bacillus toyonensis
gatgaacgctggcggcgtgcctaatacatgcaagtcgagcgaatggattgagagcttgctctcaagaagttagcggcggacgggtgagtaacacgtgggtaacctgcccataagactgggataactccgggaaaccggggctaataccggataacattttgaactgcatggttcgaaattgaaaggcggcttcggctgtcacttatggatggacccgcgtcgcattagctagttggtgaggtaacggctcaccaaggcaacgatgcgtagccgacctgagagggtgatcggccacactgggactgagacacggcccagactcctacgggaggcagcagtagggaatcttccgcaatggacgaaagtctgacggagcaacgccgcgtgagtgatgaaggctttcgggtcgtaaaactctgttgttagggaagaacaagtgctagttgaataagctggcaccttgacggtacctaaccagaaagccacggctaactacgtgccagcagccgcggtaatacgtaggtggcaagcgttatccggaattattgggcgtaaagcgcgcgcaggtggtttcttaagtctgatgtgaaagcccacggctcaaccgtggagggtcattggaaactgggagacttgagtgcagaagaggaaagtggaattccatgtgtagcggtgaaatgcgtagagatatggaggaacaccagtggcgaaggcgactttctggtctgtaactgacactgaggcgcgaaagcgtggggagcaaacaggattagataccctggtagtccacgccgtaaacgatgagtgctaagtgttagagggtttccgccctttagtgctgaagttaacgcattaagcactccgcctggggagtacggccgcaaggctgaaactcaaaggaattgacgggggcccgcacaagcggtggagcatgtggtttaattcgaagcaacgcgaagaaccttaccaggtcttgacatcctctgaaaaccctagagatagggcttctccttcgggagcagagtgacaggtggtgcatggttgtcgtcagctcgtgtcgtgagatgttgggttaagtcccgcaacgagcgcaacccttgatcttagttgccatcattaagttgggcactctaaggtgactgccggtgacaaaccggaggaaggtggggatgacgtcaaatcatcatgccccttatgacctgggctacacacgtgctacaatggacggtacaaagagctgcaagaccgcgaggtggagctaatctcataaaaccgttctcagttcggattgtaggctgcaactcgcctacatgaagctggaatcgctagtaatcgcggatcagcatgccgcggtgaatacgttcccgggccttgtacacaccgcccgtcacaccacgagagtttgtaacacccgaagtcggtggggtaacctttatggagccagccgcctaaggtgggacagatgattggggtg

SEQ ID NO: 809 - DNA, 1474 bp, Bacillus tropicus
gatgaacgctggcggcgtgcctaatacatgcaagtcgagcgaatggattaagagcttgctcttatgaagttagcggcggacgggtgagtaacacgtgggtaacctgcccataagactgggataactccgggaaaccggggctaataccggataacattttgaactgcatggttcgaaattgaaaggcggcttcggctgtcacttatggatggacccgcgtcgcattagctagttggtgaggtaacggctcaccaaggcaacgatgcgtagccgacctgagagggtgatcggccacactgggactgagacacggcccagactcctacgggaggcagcagtagggaatcttccgcaatggacgaaagtctgacggagcaacgccgcgtgagtgatgaaggctttcgggtcgtaaaactctgttgttagggaagaacaagtgctagttgaataagctggcaccttgacggtacctaaccagaaagccacggctaactacgtgccagcagccgcggtaatacgtaggtggcaagcgttatccggaattattgggcgtaaagcgcgcgcaggtggtttcttaagtctgatgtgaaagcccacggctcaaccgtggagggtcattggaaactgggagacttgagtgcagaagaggaaagtggaattccatgtgtagcggtgaaatgcgtagagatatggaggaacaccagtggcgaaggcgactttctggtctgtaactgacactgaggcgcgaaagcgtggggagcaaacaggattagataccctggtagtccacgccgtaaacgatgagtgctaagtgttagagggtttccgccctttagtgctgaagttaacgcattaagcactccgcctggggagtacggccgcaaggctgaaactcaaaggaattgacgggggcccgcacaagcggtggagcatgtggtttaattcgaagcaacgcgaagaaccttaccaggtcttgacatcctctgacaaccctagagatagggcttctccttcgggagcagagtgacaggtggtgcatggttgtcgtcagctcgtgtcgtgagatgttgggttaagtcccgcaacgagcgcaacccttgatcttagttgccatcattaagttgggcactctaaggtgactgccggtgacaaaccggaggaaggtggggatgacgtcaaatcatcatgccccttatgacctgggctacacacgtgctacaatggacggtacaaagagctgcaagaccgcgaggtggagctaatctcataaaaccgttctcagttcggattgtaggctgcaactcgcctacatgaagctggaatcgctagtaatcgcggatcagcatgccgcggtgaatacgttcccgggccttgtacacaccgcccgtcacaccacgagagtttgtaacacccgaagtcggtggggtaacctttttggagccagccgcctaaggtgggacagatgattggggtg

SEQ ID NO: 810 - DNA, 1491 bp, Bacillus urumqiensis
gacgaacgctggcggcgtgcctaatacatgcaagtcgagcgcaggaagccggcagatcccttcggggtgacaccggtggaatgagcggcggacgggtgagtaacacgtgggcaacctgccttccagactgggataaccccgggaaaccggggctaataccggataatcaaccggtccgcatggaccggctgtaaaagcgcggacttgttccgcgcactggaagatgggcccgcggcgcattagcttgttggtggggtagtggcccaccaaggcgacgatgcgtagccgacctgagagggtgatcggccacactgggactgagacacggcccagactcctacgggaggcagcagtagggaatcatccgcaatggacgaaagtctgacggtgcaacgccgcgtgaacgatgaaggttttcggatcgtaaagttctgttatgagggaagaacacgtgccggtcgaacaggccggcaccttgacggtacctcacgagaaagccccggctaactacgtgccagcagccgcggtaatacgtagggggcaagcgttgtccggaattattgggcgtaaagcgcgcgcaggcggtctcttaagtctgatgtgaaagcccacggctcaaccgtggagggtcattggaaactgggggacttgagtgtaggagaggaaagtggaattccacgtgtagcggtgaaatgcgtagatatgtggaggaacaccagtggcgaaggcgactttctggcctacaactgacgctgaggcgcgaaagcgtggggagcaaacaggattagataccctggtagtccacgccgtaaacgttgagtgctaggtgttaggggtttcgatgcccttagtgccgaagttaacacattaagcactccgcctggggagtacggccgcaaggctgaaactcaaaggaattgacgggggcccgcacaagcagtggagcatgtggtttaattcgacgcaacgcgaagaaccttaccaggtcttgacatcttttgcccgctctggagacagagttttccccttcgggggacaaaatgacaggtggtgcatggttgtcgtcagctcgtgtcgtgagatgttgggttaagtcccgcaacgagcgcaacccttgaccttagttgccagcattcagttgggcactctaaggtgactgccggtgacaaaccggaggaaggtggggatgacgtcaaatcatcatgccccttatgacctgggctacacacgtgctacaatggatggtacagagggacgcgagaccgcgaggtggagccaatcccaaaaagccattctcagttcggattgcaggctgcaactcgcctgcatgaagccggaattgctagtaatcgcggatcagcatgccgcggtgaatacgttcccgggccttgtacacaccgcccgtcacaccacgagagtttgtaacacccgaagtcggtgaggtaacctttttggagccagccgccgaaggtgggacaaatgattggggtg

SEQ ID NO: 811 - DNA, 1404 bp, Bacillus velezensis
  misc_feature (1216)..(1216): n is a, c, g, or t
gctggcggcgtgcctaatacatgcaagtcgagcggacagatgggagcttgctccctgatgttagcggcggacgggtgagtaacacgtgggtaacctgcctgtaagactgggataactccgggaaaccggggctaataccggatggttgtttgaaccgcatggttcagacataaaaggtggcttcggctaccacttacagatggacccgcggcgcattagctagttggtgaggtaacggctcaccaaggcaacgatgcgtagccgacctgagagggtgatcggccacactgggactgagacacggcccagactcctacgggaggcagcagtagggaatcttccgcaatggacgaaagtctgacggagcaacgccgcgtgagtgatgaaggttttcggatcgtaaagctctgttgttagggaagaacaagtgccgttcaaatagggcggcaccttgacggtacctaaccagaaagccacggctaactacgtgccagcagccgcggtaatacgtaggtggcaagcgttgtccggaattattgggcgtaaagggctcgcaggcggtttcttaagtctgatgtgaaagcccccggctcaaccggggagggtcattggaaactggggaacttgagtgcagaagaggagagtggaattccacgtgtagcggtgaaatgcgtagagatgtggaggaacaccagtggcgaaggcgactctctggtctgtaactgacgctgaggagcgaaagcgtggggagcgaacaggattagataccctggtagtccacgccgtaaacgatgagtgctaagtgttagggggtttccgccccttagtgctgcagctaacgcattaagcactccgcctggggagtacggtcgcaagactgaaactcaaaggaattgacgggggcccgcacaagcggtggagcatgtggtttaattcgaagcaacgcgaagaaccttaccaggtcttgacatcctctgacaatcctagagataggacgtccccttcgggggcagagtgacaggtggtgcatggttgtcgtcagctcgtgtcgtgagatgttgggttaagtcccgcaacgagcgcaacccttgatcttagttgccagcattcagttgggcactctaaggtgactgccggtgacaaaccggaggaaggtggggatgacgtcaaatcatcatgccccttatgacctgggctacacacgtgctacaatggncagaacaaagggcagcgaaaccgcgaggttaagccaatcccacaaatctgttctcagttcggatcgcagtctgcaactcgactgcgtgaagctggaatcgctagtaatcgcggatcagcatgccgcggtgaatacgttcccgggccttgtacacaccgcccgtcacaccacgagagtttgtaacaccc

SEQ ID NO: 812 - DNA, 1477 bp, Bacillus wakoensis
gacgaacgctggcggcgtgcctaatacatgcaagtcgagcggactgattaagagcttgctcttatgacgttagcggcggacgggtgagtaacacgtgggcaacctgccctgtagatcgggataacatcgagaaatcggtgctaataccgggtaatatctgagatcacatgatcttcggttaaaagatggctccggctatcactacaggatgggcccgcggcgcattagctagttggtaaggtaatggcttaccaaggcgacgatgcgtagccgacctgagagggtgatcggccacactgggactgagacacggcccagactcctacgggaggcagcagtagggaatcttccgcaatggacgaaagtctgacggagcaacgccgcgtgagtgatgaagggtttcggctcgtaaagctctgttgttagggaagaacaagtatcgttcgaatagggcggtaccttgacggtacctaaccagaaagccacggctaactacgtgccagcagccgcggtaatacgtaggtggcaagcgttgtccggaattattgggcgtaaagcgcgcgcaggcggtcttttaagtctgatgtgaaagcccccggctcaaccggggagggtcattggaaactgggagacttgagtacagaagaggagagtggaattccacgtgtagcggtgaaatgcgtagatatgtggaggaacaccagtggcgaaggcgactctctggtctgtaactgacgctgaggcgcgaaagcgtggggagcaaacaggattagataccctggtagtccacgccgtaaacgatgagtgctaggtgttaggggtttcgatgcccttagtgccgaagttaacacattaagcactccgcctggggagtacgaccgcaaggttgaaactcaaaggaattgacgggggcccgcacaagcagtggagcatgtggtttaattcgaagcaacgcgaagaaccttaccaggtcttgacatccttatgacctccctagagatagggatttcccttcggggacataagtgacaggtggtgcatggttgtcgtcagctcgtgtcgtgagatgttgggttaagtcccgcaacgagcgcaacccttgatcttagttgccagcatttagttgggcactctaaggtgactgccggtgacaaaccggaggaaggtggggatgacgtcaaatcatcatgccccttatgacctgggctacacacgtgctacaatggatggtacaaagagcagcaaaaccgcgaggtcgagccaatctcataaagccattctcagttcggattgtaggctgcaactcgcctacatgaagccggaattgctagtaatcgcggatcagcatgccgcggtgaatacgttcccgggccttgtacacaccgcccgtcacaccacgagagtttgtaacacccgaagtcggtggggtaacccttttgggagccagccgcctaaggtgggacagatgattggggtg

SEQ ID NO: 813 - DNA, 1474 bp, Bacillus wiedmannii
gatgaacgctggcggcgtgcctaatacatgcaagtcgagcgaatggattaagagcttgctcttatgaagttagcggcggacgggtgagtaacacgtgggtaacctgcccataagactgggataactccgggaaaccggggctaataccggataacattttgaactgcatggttcgaaattgaaaggcggcttcggctgtcacttatggatggacccgcgtcgcattagctagttggtgaggtaacggctcaccaaggcaacgatgcgtagccgacctgagagggtgatcggccacactgggactgagacacggcccagactcctacgggaggcagcagtagggaatcttccgcaatggacgaaagtctgacggagcaacgccgcgtgagtgatgaaggctttcgggtcgtaaaactctgttgttagggaagaacaagtgctagttgaataagctggcaccttgacggtacctaaccagaaagccacggctaactacgtgccagcagccgcggtaatacgtaggtggcaagcgttatccggaattattgggcgtaaagcgcgcgcaggtggtttcttaagtctgatgtgaaagcccacggctcaaccgtggagggtcattggaaactgggagacttgagtgcagaagaggaaagtggaattccatgtgtagcggtgaaatgcgtagagatatggaggaacaccagtggcgaaggcgactttctggtctgtaactgacactgaggcgcgaaagcgtggggagcaaacaggattagataccctggtagtccacgccgtaaacgatgagtgctaagtgttagagggtttccgccctttagtgctgaagttaacgcattaagcactccgcctggggagtacggccgcaaggctgaaactcaaaggaattgacgggggcccgcacaagcggtggagcatgtggtttaattcgaagcaacgcgaagaaccttaccaggtcttgacatcctctgaaaaccctagagatagggcttctccttcgggagcagagtgacaggtggtgcatggttgtcgtcagctcgtgtcgtgagatgttgggttaagtcccgcaacgagcgcaacccttgatcttagttgccatcattaagttgggcactctaaggtgactgccggtgacaaaccggaggaaggtggggatgacgtcaaatcatcatgccccttatgacctgggctacacacgtgctacaatggacggtacaaagagctgcaagaccgcgaggtggagctaatctcataaaaccgttctcagttcggattgtaggctgcaactcgcctacatgaagctggaatcgctagtaatcgcggatcagcatgccgcggtgaatacgttcccgggccttgtacacaccgcccgtcacaccacgagagtttgtaacacccgaagtcggtggggtaacctttatggagccagccgcctaaggtgggacagatgattggggtg

SEQ ID NO: 814 - DNA, 1476 bp, Bacillus wudalianchiensis
gacgaacgctggcggcgtgcctaatacatgcaagtcgagcggacttgacggagcttgctctgttcaagttagcggcggacgggtgagtaacacgtgggtaacctgcctgtaagactgggataactccgggaaaccggggctaataccggatattcttttttctccgcatggagaaggatggaaaggcggcttcggctgctacttacagatggacccgcggcgcattagctagttggtggggtaatggcccaccaaggcgacgatgcgtagccgacctgagagggtgatcggccacactgggactgagacacggcccagactcctacgggaggcagcagtagggaatcttccgcaatggacgaaagtctgacggagcaacgccgcgtgagtgaagaaggttttcggatcgtaaagctctgttgttagggaagaacaagtacgggagtaactgtccgtaccttgacggtacctaaccagaaagccacggctaactacgtgccagcagccgcggtaatacgtaggtggcaagcgttgtccggaattattgggcgtaaagcgcgcgcaggcggcttcttaagtctgatgtgaaagcccacggctcaaccgtggagggtcattggaaactgggaggcttgagtgcagaagaggagagcggaattccacgtgtagcggtgaaatgcgtagagatgtggaggaacaccagtggcgaaggcggctctctggtctgtaactgacgctgaggcgcgaaagcgtggggagcgaacaggattagataccctggtagtccacgccgtaaacgatgagtgctaagtgttggagggtttccgcccttcagtgctgcagctaacgcattaagcactccgcctggggagtacggtcgcaagactgaaactcaaaggaattgacgggggcccgcacaagcggtggagcatgtggtttaattcgaagcaacgcgaagaaccttaccaggtcttgacatcccgctgaccggtctggagacagatctttcccttcggggacagcggtgacaggtggtgcatggttgtcgtcagctcgtgtcgtgagatgttgggttaagtcccgcaacgagcgcaacccttgatcttagttgccagcattcagttgggcactctaaggtgactgccggtgacaaaccggaggaaggtggggatgacgtcaaatcatcatgccccttatgacctgggctacacacgtgctacaatggatggtacaaagggctgcaagaccgcaaggtttagccaatcccataaaaccattctcagttcggattgcaggctgcaactcgcctgcatgaagccggaatcgctagtaatcgcggatcagcatgccgcggtgaatacgttcccgggccttgtacacaccgcccgtcacaccacgagagtttgcaacacccgaagtcggtggggtaacccttacgggagccagccgcctaaggtggggcagatgattggggtg

SEQ ID NO: 815 - DNA, 1471 bp, Bacillus xiamenensis
gacgaacgctggcggcgtgcctaatacatgcaagtcgagcggacagaagggagcttgctcccggatgttagcggcggacgggtgagtaacacgtgggtaacctgcctgtaagactgggataactccgggaaaccggagctaataccggatagttccttgaaccgcatggttcaaggatgaaagacggtttcggctgtcacttacagatggacccgcggcgcattagctagttggtgaggtaacggctcaccaaggcgacgatgcgtagccgacctgagagggtgatcggccacactgggactgagacacggcccagactcctacgggaggcagcagtagggaatcttccgcaatggacgaaagtctgacggagcaacgccgcgtgagtgatgaaggttttcggatcgtaaagctctgttgttagggaagaacaagtgcaagagtaactgcttgcaccatgacggtacctaaccagaaagccacggctaactacgtgccagcagccgcggtaatacgtaggtggcaagcgttgtccggaattattgggcgtaaagggctcgcaggcggtttcttaagtctgatgtgaaagcccccggctcaaccggggagggtcattggaaactgggaaacttgagtgcagaagaggagagtggaattccacgtgtagcggtgaaatgcgtagagatgtggaggaacaccagtggcgaaggcgactctctggtctgtaactgacgctgaggagcgaaagcgtggggagcgaacaggattagataccctggtagtccacgccgtaaacgatgagtgctaagtgttagggggtttccgccccttagtgctgcagctaacgcattaagcactccgcctggggagtacggtcgcaagactgaaactcaaaggaattgacgggggcccgcacaagcggtggagcatgtggtttaattcgaagcaacgcgaagaaccttaccaggtcttgacatcctctgacaaccctagagatagggctttcccttcggggacagagtgacaggtggtgcatggttgtcgtcagctcgtgtcgtgagatgttgggttaagtcccgcaacgagcgcaacccttgatcttagttgccagcattcagttgggcactctaaggtgactgccggtgacaaaccggaggaaggtggggatgacgtcaaatcatcatgccccttatgacctgggctacacacgtgctacaatggacagaacaaagggctgcgagaccgcaaggtttagccaatcccacaaatctgttctcagttcggatcgcagtctgcaactcgactgcgtgaagctggaatcgctagtaatcgcggatcagcatgccgcggtgaatacgttcccgggccttgtacacaccgcccgtcacaccacgagagtttgcaacacccgaagtcggtgaggtaacctttatggagccagccgccgaaggtggggcagatgattggggtg

SEQ ID NO: 816 - DNA, 1453 bp, Bacillus zeae
  misc_feature (44)..(45): n is a, c, g, or t
gacgaacgctggcggcgtgcctaatacatgcaagtcgagcgganngatgggagcttgctccctgaagtcagcggcggacgggtgagtaacacgtgggcaacctgcctgtaagactgggataacttcgggaaaccggagctaataccggataatccttttcctcacatgggggaaagctgaaagacggtttcggctgtcacttacagatgggcccgcggcgcattagctagttggtgaggtaacggctcaccaaggccacgatgcgtagccgacctgagagggtgatcggccacactgggactgagacacggcccagactcctacgggaggcagcagtagggaatcttccgcaatggacgaaagtctgacggagcaacgccgcgtgagcgaagaaggccttcgggtcgtaaagctctgttgtcagggaagaacaagtgccggagtaactgccggcaccttgacggtacctggccagaaagccacggctaactacgtgccagcagccgcggtaatacgtaggtggcaagcgttgtccggaattattgggcgtaaagcgcgcgcaggcggtcctttaagtctgatgtgaaagcccacggctcaaccgtggagggtcattggaaactgggggacttgagtgcagaagaggagagcggaattccacgtgtagcggtgaaatgcgtagagatgtggaggaacaccagtggcgaaggcggctctctggtctgtaactgacgctgaggcgcgaaagcgtggggagcgaacaggattagataccctggtagtccacgccgtaaacgatgagtgctaagtgttagggggtttccgccccttagtgctgcagctaacgcattaagcactccgcctggggagtacggccgcaaggctgaaactcaaaggaattgacgggggcccgcacaagcggtggagcatgtggtttaattcgaagcaacgcgaagaaccttaccaggtcttgacatcctctgacaatcctggagacaggacgttccccttcgggggacagagtgacaggtggtgcatggttgtcgtcagctcgtgtcgtgagatgttgggttaagtcccgcaacgagcgcaacccttgatcttagttgccagcattcagttgggcactctaaggtgactgccggtgacaaaccggaggaaggtggggatgacgtcaaatcatcatgccccttatgacctgggctacacacgtgctacaatggatagaacaaagggcagcgaagccgcgaggtgaagccaatcccataaatctattctcagttcggattgcaggctgcaactcgcctgcatgaagccggaatcgctagtaatcgcggatcagcatgccgcggtgaatacgttcccgggccttgtacacaccgcccgtcacaccacgagagtttgtaacacccgaagtcggtggggtaacctttggagccagccgcctaaggtg

SEQ ID NO: 817 - DNA, 1471 bp, Bacillus zhangzhouensis
gacgaacgctggcggcgtgcctaatacatgcaagtcgagcggacagaagggagcttgctcccggatgttagcggcggacgggtgagtaacacgtgggtaacctgcctgtaagactgggataactccgggaaaccggagctaataccggatagttccttgaaccgcatggttcaaggatgaaagacggtttcggctgtcacttacagatggacccgcggcgcattagctagttggtggggtaatggctcaccaaggcgacgatgcgtagccgacctgagagggtgatcggccacactgggactgagacacggcccagactcctacgggaggcagcagtagggaatcttccgcaatggacgaaagtctgacggagcaacgccgcgtgagtgatgaaggttttcggatcgtaaagctctgttgttagggaagaacaagtgcgagagtaactgctcgcaccttgacggtacctaaccagaaagccacggctaactacgtgccagcagccgcggtaatacgtaggtggcaagcgttgtccggaattattgggcgtaaagggctcgcaggcggtttcttaagtctgatgtgaaagcccccggctcaaccggggagggtcattggaaactgggaaacttgagtgcagaagaggagagtggaattccacgtgtagcggtgaaatgcgtagagatgtggaggaacaccagtggcgaaggcgactctctggtctgtaactgacgctgaggagcgaaagcgtggggagcgaacaggattagataccctggtagtccacgccgtaaacgatgagtgctaagtgttagggggtttccgccccttagtgctgcagctaacgcattaagcactccgcctggggagtacggtcgcaagactgaaactcaaaggaattgacgggggcccgcacaagcggtggagcatgtggtttaattcgaagcaacgcgaagaaccttaccaggtcttgacatcctctgacaaccctagagatagggctttcccttcggggacagagtgacaggtggtgcatggttgtcgtcagctcgtgtcgtgagatgttgggttaagtcccgcaacgagcgcaacccttgatcttagttgccagcatttagttgggcactctaaggtgactgccggtgacaaaccggaggaaggtggggatgacgtcaaatcatcatgccccttatgacctgggctacacacgtgctacaatggacagaacaaagggctgcgagaccgcaaggtttagcgaatcccataaatctgttctcagttcggatcgcagtctgcaactcgactgcgtgaagctggaatcgctagtaatcgcggatcagcatgccgcggtgaatacgttcccgggccttgtacacaccgcccgtcacaccacgagagtttgcaacacccgaagtcggtgaggtaacctttatggagccagccgccgaaggtggggcagatgattggggtg

SEQ ID NO: 818 - DNA, 1412 bp, Bacterioplanes sanyensis
acacatgcaagtcgagcggtaacagagatagcttgctatctgctgacgagcggcggacgggtgagtaacgcgtaggaaactgcctggtagtgggggacaacagttggaaacgactgctaataccgcatacgccctacgggggaaagcaggggatcttcggaccttgcgctatcagatgtgcctgcgtcggattagcttgttggtggggtaatggcctaccaaggcaacgatccgtagctggtctgagaggatgatcagccacactgggactgagacacggcccagactcctacgggaggcagcagtggggaatattggacaatgggcgcaagcctgatccagccatgccgcgtgtgtgaagaaggctctagggttgtaaagcactttcagtcgggaggaaagcttgatggttaatacccctcaagtgtgacgttaccgacagaagaagcaccggctaactccgtgccagcagccgcggtaatacggagggtgcaagcgttaatcggaattactgggcgtaaagcgcgcgtaggtggttcgttaagttggatgtgaaagcccagggctcaaccttggaactgcattcaaaactggcgagctagagtacagtagagggtagtggaatttcaggtgtagcggtgaaatgcgtagagatctgaaggaacatcagtggcgaaggcgactgcctggactgatactgacactgaggtgcgaaagcgtggggagcaaacaggattagataccctggtagtccacgccgtaaacgatgtctactagttgtcgggggacttgatcctttggtaacgaagctaacgcgataagtagaccgcctggggagtacggccgcaaggttaaaactcaaatgaattgacgggggcccgcacaagcggtggagcatgtggtttaattcgaagcaacgcgaagaaccttacctactcttgacatcctgcgaacttggtagagataccttggtgccttcgggaacgcagtgacaggtgctgcatggctgtcgtcagctcgtgttgtgaaatgttgggttaagtcccgtaacgagcgcaacccttgtccttagttgccatcatttagttggggactctaaggagactgccggtgacaaaccggaggaaggcggggacgacgtcaagtcatcatggcccttacgagtagggctacacacgtgctacaatggcgtatacagagggttgcgaagccgcgaggtgaagctaatctcacaaagtacgtcgtagtccggattggagtctgcaactcgactccatgaagtcggaatcgctagtaatcgtgaatcagaatgtcacggtgaatacgttcccgggccttgtacacaccgcccgtcacaccatgggagtgggttgctccagaagtagctagcttaaccttcgggagagcggtac

SEQ ID NO: 819 - DNA, 1371 bp, Bacteriovorax stolpii
cgtgcctaacacatgcaagtcgaacgtgaaagtccttcgggatgagtaaagtggcgcacgggtgagtaacacgtaggtgacctgccttttagaggggaataaccagaagaaattttggctaatgccgcatacgaagcacggttttaagactgtgcttgaaagaatgcctctgcatatgcattcgctattagatgggcctgcgggacattagctagttggtggggtaaaggcctaccaaggcgacgatgtctatccggtctgagaggatgatcggacacactggaactgagacacggtccagactcctacgggaggcagcagtggggaatattgcgcaatgggggaaaccctgacgcagcaacgccgcgtgagtgaggaaggacttcggtctgtaaagctctgttaatgtggaaaaatggcagttggtctaataggccgattgtttgatggtacacatagaggaagcaccggctaacttcgtgccagcagccgcggtaatacgaagggtgcaagcgttgttcggatttattgggcgtaaagcgcgcgtaggcggacctgcaagtcagatgtgaaatctcggggctcaacctcgaaactgcgtctgaaactacaggtctagaatctcggagggggaaggggaatatcgcatgtaggggtaaaatccgtagatatgcgatggaacaccagaggcgaaggcgccttcctggacgagtattgacgctgaggcgcgaaagcgtggggatcaaacaggattagataccctggtagtccacgctgtaaacgatgaacactagatattggaggatttgaccccttcagtgtcgtagctaacgcgttaagtgttccgcctgggaagtacggtcgcaagactaaaactcaaaggaattgacgggggcccgcacaagcggtggattatgtggtttaattcgaagcaacgcgcagaaccttacctaggcttgaaatcctacgaatcccttttaaacgagggagtgctcttcggagaatgtagtgacaggcgctgcatggctgtcgtcagctcgtgtcgtgagatgttgggttaagtctcgcaacgagcgcaacccccatttttagttgccagcattaagttgggcactctagaaagactgcctgggctaaccaggaggaaggtggggatgacgtcaagtcctcatggcccttatgtctagggctacacacgtaatacaatggtcggtacaaagggatgcgaactcgcgagggggagccaatctcaaaaaaccgatctcagtccggattggagtctgcaactcgactccatgaagttggaatcgctagtaatcgcggatcagcacgccgcggtgaatacgttcccgggccttgtacacaccgccc

SEQ ID NO: 820 - DNA, 1450 bp, Bacteroides acidifaciens
gatgaacgctagctacaggcttaacacatgcaagtcgaggggcagcatgaaagtttgcttgcaaacttttgatggcgaccggcgcacgggtgagtaacacgtatccaacctgcctcatactcggggatagcctttcgaaagaaagattaatacccgatgtcatagtcctaccgcatgatgggattattaaagaatttcggtatgggatggggatgcgttccattagttagttggcggggtaacggcccaccaagacaacgatggataggggttctgagaggaaggtcccccacattggaactgagacacggtccaaactcctacgggaggcagcagtgaggaatattggtcaatggacgagagtctgaaccagccaagtagcgtgaaggatgactgccctatgggttgtaaacttcttttatatgggaataaaatgttccacgtgtgggattttgtatgtaccatatgaataaggatcggctaactccgtgccagcagccgcggtaatacggaggatccgagcgttatccggatttattgggtttaaagggagcgtaggtggattgttaagtcagttgtgaaagtttgcggctcaaccgtaaaattgcagttgaaactggcagtcttgagtacagtagaggtgggcggaattcgtggtgtagcggtgaaatgcttagatatcacgaagaactccgattgcgaaggcagctcactggactgcaactgacactgaggctcgaaagtgtgggtatcaaacaggattagataccctggtagtccacacagtaaacgatgaatactcgctgtttgcgatatacagtaagcggccaagcgaaagcattaagtattccacctggggagtacgccggcaacggtgaaactcaaaggaattgacgggggcccgcacaagcggaggaacatgtggtttaattcgatgatacgcgaggaaccttacccgggcttaaattgcacctgaataatgtggaaacatgttagccgtaaggcaggtgtgaaggtgctgcatggttgtcgtcagctcgtgccgtgaggtgtcggcttaagtgccataacgagcgcaacccttatcttcagttactaacaggtcatgctgaggactctggagagactgcgtcgtaagatgtgaggaaggtggggatgacgtcaaatcagcacggcccttacgtccggggctacacacgtgttacaatgggaggtacagaaggccgctacctggcgacaggatgccaatccccaaaacctctctcagttcggatcgaagtctgcaacccgacttcgtgaagctggattcgctagtaatcgcgcatcagccatggcgcggtgaatacgttcccgggccttgtacacaccgcccgtcaagccatgaaagccgggggtacctgaagtacgtaaccgcaaggatcgtcctagggtaaaactggtaattggggct

SEQ ID NO: 821 - DNA, 1450 bp, Bacteroides barnesiae
gatgaacgctagctacaggcttaacacatgcaagtcgaggggcagcgggaagtcagcttgctgactttgccggcgaccggcgcacgggtgagtaacacgtatccaaccttccgcatactctggaatagcctttcgaaagaaagattaatgcccgatggtatcaagagattgcatgatatctcgaataaagattcatcggtatgcgatggggatgcgttccattaggcagttggcggggtaacggcccaccaaaccgacgatggataggggttctgagaggaaggtcccccacattggaactgagacacggtccaaactcctacgggaggcagcagtgaggaatattggtcaatgggcgagagcctgaaccagccaagtagcgtgaaggatgactgccctacgggttgtaaacttcttttataagggaataaagttctctacgtgtagagttttgtatgtaccttatgaataagcatcggctaactccgtgccagcagccgcggtaatacggaggatgcgagcgttatccggatttattgggtttaaagggagcgtagacggcggtttaagtcagctgtgaaatggtgcggctcaaccgtagcactgcagttgaaactggacggcttgagtgcagttgaggcaggcggaattcgtggtgtagcggtgaaatgcttagatatcacgaagaaccccgattgcgaaggcagcctgctaagctgcaactgacgttgaggctcgaaagtgtgggtatcaaacaggattagataccctggtagtccacacggtaaacgatggatactcgctgttggcgatatactgtcagcggccaagtgaaaacgttaagtatcccacctggggagtacgccggcaacggtgaaactcaaaggaattgacgggggcccgcacaagcggaggaacatgtggtttaattcgatgatacgcgaggaaccttacccgggcttgaattgcagacgaatcatccggagacggatgagccgcaaggcgtctgtgaaggtgctgcatggttgtcgtcagctcgtgccgtgaggtgtcggcttaagtgccataacgagcgcaaccctttccgccggttactaacaggtgatgctgaggactccgacggtactgccatcgtaagatgtgaggaaggtggggatgacgtcaaatcagcacggcccttacgtccggggctacacacgtgttacaatggggggtacagaaggcagcgaccgggcgaccggaagcgaatccctaaagcccctctcagttcggactggagtctgcaacccgactccacgaagctggattcgctagtaatcgcgcatcagccacggcgcggtgaatacgttcccgggccttgtacacaccgcccgtcaagccatgaaagccgggggtacctgaagtgcgtaaccgcgaggagcgccctagggtaaaaccggtaattggggct

SEQ ID NO: 822 - DNA, 1451 bp, Bacteroides caecimuri
gatgaacgctagctacaggcttaacacatgcaagtcgaggggcagcatgggagtttgcttgcaaacttccgatggcgaccggcgcacgggtgagtaacacgtatccaacctgccgataactcggggatagcctttcgaaagaaagattaatatccgataggatatcaagatcgcatgatcttgatattaaagaatttcggttatcgatggggatgcgttccattagttagttggcggggtaacggcccaccaagacgacgatggataggggttctgagaggaaggtcccccacattggaactgagacacggtccaaactcctacgggaggcagcagtgaggaatattggtcaatggacgagagtctgaaccagccaagtagcgtgaaggatgactgccctatgggttgtaaacttcttttatatgggaataaaacagggtatgcataccctcttgtatgtaccatatgaataaggatcggctaactccgtgccagcagccgcggtaatacggaggatccgagcgttatccggatttattgggtttaaagggagcgtaggtggattgttaagtcagttgtgaaagtttgcggctcaaccgtaaaattgcagttgaaactggcagtcttgagtacagtagaggtgggcggaattcgtggtgtagcggtgaaatgcttagatatcacgaagaactccgattgcgaaggcagctcactggactgcaactgacactgatgctcgaaagtgtgggtatcaaacaggattagataccctggtagtccacacagtaaacgatgaatactcgctgtttgcgatatacagtaagcggccaagcgaaagcattaagtattccacctggggagtacgccggcaacggtgaaactcaaaggaattgacgggggcccgcacaagcggaggaacatgtggtttaattcgatgatacgcgaggaaccttacccgggcttaaattgcacctgaataacgtggaaacatgttagccgcaaggcaggtgtgaaggtgctgcatggttgtcgtcagctcgtgccgtgaggtgtcggcttaagtgccataacgagcgcaacccttatctttagttactaacaggttctgctgaggactctagagagactgccgtcgtaagatgtgaggaaggtggggatgacgtcaaatcagcacggcccttacgtccggggctacacacgtgttacaatggggggtacagaaggcagctacctggcgacaggatgctaatccccaaaacctctctcagttcggatcgaagtctgcaacccgacttcgtgaagctggattcgctagtaatcgcgcatcagccatggcgcggtgaatacgttcccgggccttgtacacaccgcccgtcaagccatgaaagccgggggtacctgaagtacgtaaccgcgaggagcgtcctagggtaaaactggtaattggggct

SEQ ID NO: 823 - DNA, 1451 bp, Bacteroides caecimuris; identical to SEQ ID NO: 822

SEQ ID NO: 824 - DNA, 1446 bp, Bacteroides faecichinchillae
gatgaacgctagctacaggcttaacacatgcaagtcgaggggcagcatatttctagcaatagagatgatggcgaccggcgcacgggtgagtaacacgtatccaacctgccttatactcggggatagcctttcgaaagaaagattaatacccgatgttatagtctaaccgcatgatttgactataaaagattttcggtataagatggggatgcgttccattagattgtaggcggggtaacggcccacctagtcttcgatggataggggttctgagaggaaggtcccccacattggaactgagacacggtccaaactcctacgggaggcagcagtgaggaatattggtcaatgggcgagagcctgaaccagccaagtagcgtgaaggatgactgccctatgggttgtaaacttcttttatatgggaataaagtattccacgtgtgggattttgtatgtaccatatgaataaggatcggctaactccgtgccagcagccgcggtaatacggaggatccgagcgttatccggatttattgggtttaaagggagcgtaggtggacagttaagtcagttgtgaaagtttgcggctcaaccgtaaaattgcagttgatactggctgtcttgagtacagtagaggtgggcggaattcgtggtgtagcggtgaaatgcttagatatcacgaagaactccgattgcgaaggcagctcactggactgcaactgacactgatgctcgaaagtgtgggtatcaaacaggattagataccctggtagtccacacagtaaacgatgaatactcgctgtttgcgatatacagtaagcggccaagcgaaagcattaagtattccacctggggagtacgccggcaacggtgaaactcaaaggaattgacgggggcccgcacaagcggaggaacatgtggtttaattcgatgatacgcgaggaaccttacccgggcttaaattgcaaatgaataatctggaaacaggttagccgcaaggcatttgtgaaggtgctgcatggttgtcgtcagctcgtgccgtgaggtgtcggcttaagtgccataacgagcgcaacccttatctttagttactaacaggtcatgctgaggactctagagagactgcgtcgtaagatgtgaggaaggtggggatgacgtcaaatcagcacggcccttacgtccggggctacacacgtgttacaatggggggtacagaaggccgctacctggtgacaggatgctaatccctaaaacctctctcagttcggatcgaagtctgcaacccgacttcgtgaagctggattcgctagtaatcgcgcatcagccatggcgcggtgaatacgttcccgggccttgtacacaccgcccgtcaagccatgaaagccgggggtacctgaagtacgtaaccgcaaggagcgtcctagggtaaaactggtaattggggct

SEQ ID NO: 825 - DNA, 1447 bp, Bacteroides fluxus
gatgaacgctagctacaggcttaacacatgcaagtcgaggggcagcatttttatagcaatataaaagatggcgaccggcgcacgggtgagtaacacgtatccaacctgccgataactcggggataacccttcgaaagaaggcctaatacccgatggcatatcccttccgcctggttgggatattaaagaacttcggttatcgatggggatgcgttccattagcttgttggcggggtaacggcccaccaaggcttcgatggataggggttctgagaggaaggtcccccacattggaactgagacacggtccaaactcctacgggaggcagcagtgaggaatattggtcaatggacgagagtctgaaccagccaagtagcgtgaaggatgaaggtcctatggattgtaaacttcttttatacgggaataaagtgcagtatgcatactgttttgtatgtaccgtatgaataaggatcggctaactccgtgccagcagccgcggtaatacggaggatccgagcgttatccggatttattgggtttaaagggagcgtaggcggatgcttaagtcagttgtgaaagtttgcggctcaaccgtaaaattgcagttgatactgggcgtcttgagtacagtagaggcaggcggaattcgtggtgtagcggtgaaatgcttagatatcacgaagaactccgattgcgaaggcagcctgctggactgtcactgacgctgatgctcgaaagtgtgggtatcaaacaggattagataccctggtagtccacacagtaaacgatgaatactcgctgttggcgatacacagtcagcggccaagcgaaagcgttaagtattccacctggggagtacgccggcaacggtgaaactcaaaggaattgacgggggcccgcacaagcggaggaacatgtggtttaattcgatgatacgcgaggaaccttacccgggcttgaattgcatatgagttatccggagacggataagccgcaaggcatatgtgaaggtgctgcatggttgtcgtcagctcgtgccgtgaggtgtcggcttaagtgccataacgagcgcaacccttatcgatagttaccatcaggtcatgctggggactctgtcgagactgccgtcgtaagatgcgaggaaggtggggatgacgtcaaatcagcacggcccttacgtccggggccacacacgtgttacaatggggggtacagaaggccgctacacagcgatgtgatgccaatccccaaaacccctctcagttcggattggagtctgcaacccgactccatgaagctggattcgctagtaatcgcgcatcagccacggcgcggtgaatacgttcccgggccttgtacacaccgcccgtcaagccatgaaagccgggggtacctgaagtgcgtaaccgcgaggagcgccctagggtaaaactggtgattggggct

SEQ ID NO: 826 - DNA, 1449 bp, Bacteroides gallinarum
gatgaacgctagctacaggcttaacacatgcaagtcgaggggcatcgggaaggaagcttgcttcctttgccggcgaccggcgcacgggtgagtaacacgtatccaacctgccgataactccgggatagcctttcgaaagaaagattaataccggatggcatagttttcccgcatgagagaactattaaagaacttcggttatcgatggggatgcgttccattaggcagttggcggggtaacggcccaccaaaccgacgatggataggggttctgagaggaaggtcccccacattggaactgagacacggtccaaactcctacgggaggcagcagtgaggaatattggtcaatggacgggagtctgaaccagccaagtagcgtgaaggatgactgccctatgggttgtaaacttcttttatacgggaataaagttagccacgtgtggttatttgtatgtaccgtatgaataaggatcggctaactccgtgccagcagccgcggtaatacggaggatccgagcgttatccggatttattgggtttaaagggagcgtaggcgggatattaagtcagttgtgaaagtttgcggctcaaccgtaaaattgcagttgatactggtatccttgagtgcagcataggcgggcggaattcgtggtgtagcggtgaaatgcttagatatcacgaagaactccgattgcgaaggcagctcgctggactgtaactgacgctgatgctcgaaagtgtgggtatcaaacaggattagataccctggtagtccacacagtaaacgatgaatactcgctgttggcgatacactgtcagcggccaagcgaaagcattaagtattccacctggggagtacgccggcaacggtgaaactcaaaggaattgacgggggcccgcacaagcggaggaacatgtggtttaattcgatgatacgcgaggaaccttacccgggcttgaattgcagcggaatgtagtggaaacattacagccttcgggccgctgtgaaggtgctgcatggttgtcgtcagctcgtgccgtgaggtgtcggcttaagtgccataacgagcgcaacccttacgggtagttaccatcaggtcatgctggggactctacccggactgccgtcgtaagatgtgaggaaggtggggatgacgtcaaatcagcacggcccttacgtccggggctacacacgtgttacaatggggggtacagaaggcagctacctggcgacaggatgttaatccccaaaacctctctcagttcggattggagtctgcaacccgactccatgaagctggattcgctagtaatcgcgcatcagccacggcgcggtgaatacgttcccgggccttgtacacaccgcccgtcaagccatgaaagccgggggtacctgaagtacgtaaccgcgaggagcgtcctagggtaaaactggtgattggggct

SEQ ID NO: 827 - DNA, 1446 bp, Bacteroides helcogenes
gatgaacgctagctacaggcttaacacatgcaagtcgaggggcagcattgtcatagcaatatgacagatggcgaccggcgcacgggtgagtaacacgtatccaacctgccttccactcgggaatagcctttcgaaagaaagattaatgtccgatggcactgaaataggccatcctatttcagttaaagaatttcggtggaagatggggatgcgttccattagcttgttggcggggtaacggcccaccaaggcatcgatggataggggttctgagaggaaggtcccccacattggaactgagacacggtccaaactcctacgggaggcagcagtgaggaatattggtcaatgggcgggagcctgaaccagccaagtagcgtgaaggatgactgccctatgggttgtaaacttcttttataagggaataaaacgggccacgtgtggccttttgcatgtaccttatgaataaggatcggctaactccgtgccagcagccgcggtaatacggaggatccgagcgttatccggatttattgggtttaaagggagcgcagacggggtcttaagtcagttgtgaaagtttgcggctcaaccgtaaaattgcagttgatactggggctcttgagtgcagtataggcaggcggaattcgtggtgtagcggtgaaatgcttagatatcacgaagaactccgattgcgaaggcagcctgctggactgtaactgacgttcatgctcgaaagtgcgggtatcaaacaggattagataccctggtagtccgcacagtaacgatgaatactcgctgttggcgatacacagtcagcggccaagcgaaagcgttaagtattccacctggggagtacgccggcaacggtgaaactcaaaggaattgacgggggcccgcacaagcggaggaacatgtggtttaattcgatgatacgcgagggaccttacccgggcttgaattgctaatgaatatggcggaaacgtcatagccgcaaggcattagtgaaggtgctgcatggttgtcgtcagctcgtgccgtgaggtgtcggcttaagtgccataacgagcgcaacccttatctatagttaccatcaggcaatgctggggactctatggagactgccgtcgtaagatgtgaggaaggttgggatgacgtcaaatcagcacggcccttacgtccggggctacacacgtgttacaatggggggtacagaaggcagctacacagcgatgtgatgctaatcccaaaaacctctctcagttcggactggagtctgcaacccgactccacgaagctggattcgctagtaatcgcgcatcagccacggcgcggtgaatacgttcccgggccttgtacacaccgcccgtcaagccatgaaagccgggggtacctgaagtgcgtaaccgcaaggagcgccctagggtaaaactggtgattggggct

SEQ ID NO: 828 - DNA, 1444 bp, Bacteroides reticulotermitis
gatgaacgctagctacaggcttaacacatgcaagtcgaggggtagcaggatctagcaatagattgctgacgaccggcgcacgggtgagtaacacgtatccaaccttccgtttactcggggatagcctttcgaaagaaagattaatacccgatagtatgtttttcccgcatgggagaaccattaaagtttttcggtaatcgatggggatgcgttccattaggcagttggtgaggtaacggctcaccaaaccttcgatggataggggttctgagaggaaggtcccccacattggaactgagacacggtccaaactcctacgggaggcagcagtgaggaatattggtcaatggacgagagtctgaaccagccaagtagcgtgaaggatgactgccctatgggttgtaaacttcttttatatgggaataaaggagcctacgtgtaggtttttgtatgtaccatacgaataaggatcggctaactccgtgccagcagccgcggtaatacggaggatccaagcgttatccggatttattgggtttaaagggagcgtaggtggaggcttaagtcagttgtgaaagtttgcggctcaaccgtaaaattgcagttgatactgggtttcttgagtacagtagaggtgggcggaattcgtggtgtagcggtgaaatgcttagatatcacgaagaactccaattgcgaaggcagctcactagactggcactgacactgatgctcgaaagtgtgggtatcaaacaggattagataccctggtagtccacacagtaaacgatgaatactcgctgtttgcgatatacagtaagcggccaagcgaaagcattaagtattccacctggggagtacgccggcaacggtgaaactcaaaggaattgacgggggcccgcacaagcggaggaacatgtggtttaattcgatgatacgcgaggaaccttacccgggcttaaattgcactggacgatcttggaaacaggattttcttcggaccagtgtgaaggtgctgcatggttgtcgtcagctcgtgccgtgaggtgtcggcttaagtgccataacgagcgcaacccttatctttagttactaacaggttatgctgaggactctaaagagactgcgtcgtaagatgtgaggaaggtggggatgacgtcaaatcagcacggcccttacgtccggggctacacacgtgttacaatggggggtacaacaggcagctacctagcgataggatgctaatcccaaaaacctctctcagttcggatcgaagtctgcaacccgacttcgtgaagctggattcgctagtaatcgcgcatcagccacggcgcggtgaatacgttcccgggccttgtacacaccgcccgtcaagccatgaaagccgggggtacctgaagtacgtaaccgtaaggagcgtcctagggtaaaactggtaattggggct

SEQ ID NO: 829 - DNA, 1449 bp, Bacteroides sartorii
gatgaacgctagctacaggcttaacacatgcaagtcgaggggcagcatggtcttagcttgctaagactgatggcgaccggcgcacgggtgagtaacacgtatccaacctgccttatactcccggacagccttctgaaaggaagattaatacgggatggtatcacgggccagcattttctcgtgattaaagaacttcggtataagatggggatgcgttccattagatagtaggcggggtaacggcccacctagtctacgatggataggggttctgagaggaaggtcccccacattggaactgagacacggtccaaactcctacgggaggcagcagtgaggaatattggtcaatgggcgcgagcctgaaccagccaagtagcgtgaaggatgactgcctacgggttgtaaacttcttttataaaggaataaagtgaggcacgtgtgcctttttgtatgtactttatgaataaggatcggctaactccgtgccagcagccgcggtaatacggaggatccgagcgttatccggatttattgggtttaaagggagcgtagatgggttgttaagtcagttgtgaaagtttgcggctcaaccgtaaaattgcaattgatactggcagccttgagtacagttgaggtaggcggaattcgtggtgtagcggtgaaatgcttagatatcacgaagaactccgattgcgaaggcagctactaaactgccactgacattgatgctcgaaagtgtgggtatcaaacaggattagataccctggtagtccacacggtaaacgatgaatactcgctgtttgcgatatactgcaagcggccaagcgaaagcgttaagtattccacctggggagtacgccggcaacggtgaaactcaaaggaattgacgggggcccgcacaagcggaggaacatgtggtttaattcgatgatacgcgaggaaccttacccgggcttgaattgcactcgaatatagcggaaacgttatagctagcaatagcgagtgtgaaggtgctgcatggttgtcgtcagctcgtgccgtgaggtgtcggcttaagtgccataacgagcgcaacccttgtctatagttactaacaggtcatgctgaggactctatggagactgccatcgtaagatgtgaggaaggtggggatgacgtcaaatcagcacggcccttacgtccggggccacacacgtgttacaatggggggtacagagggccgctaccacgcaagtggatgccaatcccgaaagcctctctcagttcggactggagtctgcaacccgactccacgaagctggattcgctagtaatcgcgcatcagccatggcgcggtgaatacgttcccgggccttgtacacaccgcccgtcaagccatgggagccgggggtacctgaagtgcgtaaccgcaaggagcgccctagggtaaaactggtgactggggct

SEQ ID NO: 830 - DNA, 1444 bp, Bacteroides stercorirosoris
gatgaacgctagctacaggcttaacacatgcaagtcgaggggcagcatggtctagcaatagactgatggcgaccggcgcacgggtgagtaacacgtatccaacctgccgattattccgggatagcctttcgaaagaaagattaatactggatagtataacgagaaggcatcttcttgttattaaagaatttcgataattgatggggatgcgttccattagtttgttggcggggtaacggcccaccaagacatcgatggataggggttctgagaggaaggtcccccacattggaactgagacacggtccaaactcctacgggaggcagcagtgaggaatattggtcaatggacgcgagtctgaaccagccaagtagcgtgaaggatgactgccctatgggttgtaaacttcttttatatgggaataaagtgcagtatgtatactgttttgtatgtaccatatgaataaggatcggctaactccgtgccagcagccgcggtaatacggaggatccgagcgttatccggatttattgggtttaaagggagcgtaggcggaagcttaagtcagttgtgaaagtttgcggctcaaccgtaaaattgcagttgatactgggtttcttgagtgcagtagaggtaggcggaattcgtggtgtagcggtgaaatgcttagatatcacgaagaactccgattgcgaaggcagcttactggactgtaactgacgctgatgctcgaaagtgtgggtatcaaacaggattagataccctggtagtccacacagtaaacgatgaatactcgctgtttgcgatatacagcaagcggccaagcgaaagcattaagtattccacctggggagtacgccggcaacggtgaaactcaaaggaattgacgggggcccgcacaagcggaggaacatgtggtttaattcgatgatacgcgaggaaccttacccgggcttaaattgcaaatgaatatagtggaaacattatagccgcaaggcatttgtgaaggtgctgcatggttgtcgtcagctcgtgccgtgaggtgtcggcttaagtgccataacgagcgcaacccttatctttagttactaacaggtcatgctgaggactctagagagactgcgtcgtaagatgtgaggaaggtggggatgacgtcaaatcagcacggcccttacgtccggggctacacacgtgttacaatggggggtacagaaggcagctacacggcgacgtgatgctaatccctaaaacctctctcagttcggattggagtctgcaacccgactccatgaagctggattcgctagtaatcgcgcatcagccacggcgcggtgaatacgttcccgggccttgtacacaccgcccgtcaagccatgaaagccgggggtacctgaagtccgtaaccgtaaggagcggcctagggtaaaactggtaattggggct

SEQ ID NO: 831 - DNA, 1428 bp, Baia soyae
gacgaacgctggcggcgtgcctaatacatgcaagtcgagcgaggagcttttagctcctagcggcgaacgggtgagtaacacgtgggcaacctgcccgtaagactgggataacttcgggaaaccggagctaatactggataatcttgaccttcgcatgaaggacaagtaaaagatttatcacttacggatgggcccgcggtgcattagcttgttggtggggtaatggcctaccaaggcgacgatgcatagccgacctgagagggtgaccggccacactgggactgagacacggcccagactcctacgggaggcagcagtagggaattttccgcaatgggcgaaagcctgacggagcaacgccgcgtgaatgatgacggccttcgggttgtaaaattctgttctaggggaagaagttctgacggtaccctaggagaaagccacggctaactacgtgccagcagccgcggtaatacgtaggtggcaagcgttgtccggaattattgggcgtaaagcgcgcgcaggcggttctttaagttgggtgttaaaggcagcggctcaaccgctgttcgcacccaaaactggggaacttgagtgcaggagaggatagtggaattcccggtgtagcggtggaatgcgtagagatcgggaggaacaccagtggcgaaggcgactgtctggcctgcaactgacgctgaggcgcgaaagcgtggggagcaaacaggattagataccctggtagtccacgccgtaaacgatgagtgctaggtgttgggggctttcccgccctcagtgccgaagttaacacagtaagcactccgcctggggagtacggccgcaaggttgaaactcaaaggaattgacgggggcccgcacaagcggtggagcatgtggtttaattcgaagcaacgcgaagaaccttaccaaggcttgacatccctctgtaaactctagagatagagtccctcttcggagcagaggtgacaggtggtgcatggttgtcgtcagctcgtgtcgtgagatgttgggttcagtcccgcaacgagcgcaacccttatcgttagttgccagcagttcggctgggcactctaacgagacagccggtgaaagccggaggaaggtggggatgacgtcaaatcatcatgccccttatgtcttgggctacacacgtgctacaatggctggtacaaagagtcgctaaatcgtgagatcatgctaatctcataaaaccagtctcagttcggattgtaggctgcaactcgcctacatgaagctggaatcgctagtaatcgcggatcagcatgccgcggtgaatacgttcccgggccttgtacacaccgcccgtcacaccacgggagtttgtcacacccgaagtcggtgaggtaacctttttggagccagccgcctaaggtggggcagatgactggggtg

SEQ ID NO: 832 - DNA, 1479 bp, Balnearium lithotrophicum
cgcgaacgcagtcggcgtgcctaacacatgcaagtcgtggggcagcaggccggttccttcgggaaccggtgctggcgaccggcgaacgggtgagtaacgcgtgagcaacctaccccgaggagggggataacccggggaaacccgggctaataccccataagcgcacgtcccgcatgggacgtgtgtaaaggcggcctctgctctgcatgctgccgcctcgggatgggctcgcgtcccatcaggtagttggtgaggtaacggctcaccaagcctacgacgggtagccggcctgagagggtggtcggccacaccgggactgagacacggcccggactcctacgggaggcagcagtggggaatcttgggcaatgggcgcaagcctgacccagcgacgccgagtggaggatgaagcccttcggggtgtaaactcctgtcgccggggacgatgcgacctcgggttaatagcccgaggccgtgacggtacccggagaggaagggacggctaactacgtgccagcagccgcggtaatacgtaggtcccgagcgttgcgcgaaattactgggcgtaaagtgcgcgtaggcgggcctgtaagtcagaggtgaaagcccccggctcaaccggggaattgcctctgatactgcaggcctagggtccggaagacgtcggcggaattcccggtgtagcggtgaaatgcgtagatatcgggaggaacaccggtggcgaaggcggccggcgaggacggtaccgacgctgaggcgcgaaagcgtggggagcgaaccggattagatacccgggtagtccacgctgtaaacgatgggtgctgggcgttggccacataagtggtcagtgccgaagctaacgcgttaagcaccccgcctggggagtacggccgcaaggctgaaactcaaaggaatagacgggggcccgcacaagcggtggagcatgtggtttaattcaatgctacgcgaagaaccttaccagggcttgacatgctgggggtagccctgccgaaaggcagggtcgttgccgccttcgggcggcacacccagcacaggtggtacatggccgtcgtcagctcgtgccgtgaggtgttgggttaagtcccgcaacgagcgcaacccctgcccttagttgccagcgggtaacgccgggcacactaaggggactgccggcgataagccggaggaaggaggggatgacgtcaggtcagtatgccccttacgccctgggctacacacgtgctacaatggccgggacagtgggaagcgaagccgcgaggcggagcaaatccctcaaacccggtcccagttcggattgcaggctgcaactcgactgcatgaagctggaatcgctagtaacggccggtcagccacacggccgtgaatacgttcccgggccttgtactcaccgcccgtcacaccccggaagctggttctaccagaagtcccccgggcaacccctcgaaaaggggggaggcc

SEQ ID NO: 833 - DNA, 1464 bp, Basilea psittacipulmonis
attgaacgctagcgggatgccttacacatgcaagtcgaacggcagcgagaggaagcttgctttcttgtcggcgagtggcgaacgggtgagtaaagtatcggaacgtacccatcagtgggggataactacgcgaaagcgtagctaataccgcatattatctaaggatgaaagcaggggaccgcaaggccttgcgctaatggagtggccgatatcggattagctagttggtggggtaaaggcctaccaaggcgacgatccgtagctggtttgagaggacgaccagccacactgggactgagacacggcccagactcctacgggaggcagcagtggggaattttggacaatgggggcaaccctgatccagccatcccgcgtgtgcgaagaaggccttcgggttgtaaagcacttttgtcagggaagaaaagcttagtgataataccattgagtgatgacggtacctgaagaataagcaccggctaactacgtgccagcagccgcggtaatacgtagggtgcaagcgttaatcggaattactgggcgtaaagcgtgcgcaggcggcaggaaaagaaagatgtgaaatccccgagcttaacttgggaatggcatttttaactgtcttgctagagtgtgtcagagggaggtggaattccacgtgtagcagtgaaatgcgtagagatgtggaggaacaccgatggcgaaggcagcctcctgggataacactgacgctcatgcacgaaagcgtggggagcaaacaggattagataccctggtagtccacgccctaaacgatgtcaactagctgttgggtcaagactgacttagtagcgaagctaacgcgagaagttgaccgcctggggagtacggtcgcaagattaaaactcaaaggaattgacggggacccgcacaagcggtggatgatgtggattaattcgatgcaacgcgaaaaaccttacctacccttgacatgtctggaatgctttagagatagagcagtgctcgcaagagaactggaacacaggtgctgcatggctgtcgtcagctcgtgtcgtgagatgttgggttaagtcccgcaacgagcgcaacccttgtcattagttgccatcattaagttgggcactctaatgagactgccggtgacaaaccggaggaaggtggggatgacgtcaagtcctcatggcccttatgggtagggcttcacacgtcatacaatggtcgggacagagggttgccaagccgcgaggtggagctaatctcacaaacccgatcgtagtccggattgcactctgcaactcgagtgcatgaagtcggaatcgctagtaatcgcggatcagcatgtcgcggtgaatacgttcccgggtcttgtacacaccgcccgtcacaccatgggagcgggttttaccagaagtcgttagcctaaccgaaaggagggcgatgaccacggtaggattcgtgactggggtg

SEQ ID NO: 834 - DNA, 1480 bp, Baumannia cicadellinicola
attgaacgctggcggtaagcttaacacatgcaagtcgagcggcatcgaaaagttctattttatagaattttgtcggcgagcggcgaacgggtgagtaatgtctggggatctacctaatggagggggataactactggaaacggtagctaacaccgcataatgtcgtaagaccaaaatgggggactatattatatagtatagcctcatgccattagatgaacccagatgagattagctagtaggtgagataatagctcacctaggcaacgatctctagctggtctgagaggatgaccagccacactggaactgagacacggtccagactcctacgggaggcagcagtggggaatcttgcacaatgggggaaaccctgatgcagctataccgcgtgtgtgaagaaggccttagggttgtaaagcactttcaatgagaaagaaagttgtcttcttaaaaagaagataatttgacgttactcataaaagaagcaccggctaactccgtgccagcagccgcggtaatacggagggtgcgagcgttaatcggaattactgggcgtaaagcgtatgcaggtggtttgcttagtcagatgtgaaagccccgggcttaacctgggaatggcatttgaaactagctagctagagtatcgtaaaggggaggagaattccaggtgtagcggtgaaatgcgtagagatctggaagaataccagtggcgaaggcgcctccctagacgaaaactgacactcaagtacgaaagcgtggggagcaaacaggattagataccctggtagtccatgctgtaaacgatgtcgatttggaggttgtaacctttgagttatagctttcgaagctaacgcattaaatcgaccgcctggggagtacgaccgcaaggttaaaactcaaatgaattgacgggggcccgcacaagcggtggagcatgtggtttaattcgatacaacgcgaagaaccttacctactcttgacatccagagaataaagcagaaaagttttagtgcctacgggaactctgagacaggtgctgcatggctgtcgtcagctcgtgttgtgaaatgttgggttaagtcccgcaacgagcgcaacccttatgctttgttgccaacgactcggtcgggaactcaaaggaaactgccggtgataaaccggaggaaggtgaggataacgtcaagtcatcatggcccttacgagtagggctacacacgtgctacaatggtgcatacaaaggggagcaatctcgcaagagctagcaaaactcataaagtgcgtcgtagtccggattagagtctgcaactcgactctatgaagtcggaatcgctagtaatcgtgaatcagaatgtcacggtgaatacgttcccgggccttgtacacaccgcccgtcacaccatgggagtgtgttgcaaaagaagtaagtagcttaacctacgggagggcgcttaccactttgtgattcatgactggggtg

SEQ ID NO: 835 - DNA, 1436 bp, Bdellovibrio bacteriovorus
aacaaacgctggcggcgtgcctaatacatgcaagtcgaacggggaaagctttcgggtgagtactagtggcgcacgggtgaggaacgcgtggataatctgccttagagtgggggataactagtcgaaagattagctaataccgcataagaccacaggagctgcggctctaggggtcaaaggtttttcgctctaagatgagtccgcgtaagattagctagttggtgaggtaacggctcaccaaggcgacgatctttaactggtctgagaggatgatcagtcacactggaactgagacacggtccagactcctacgggaggcagcagtagggaatattgcacaatggaggaaactctgatgcagcgacgccgcgtgagtgatgaaggccttcgggtcgtaaagctctgtcgcaggggaataacacaatgaatgtaccctgtaagaaaggatcggctaacttcgtgccagcagccgcggtaagacgagggatcctagcgttgttcggaattattgggcgtaaagcggatgtaggtggctttgtaagtcagatgtgaaagcccagggctcaaccctggaagtgcatttgatactgcgaagcttgagtgtcggagaggttactagaattgttggtgtagtggtgaaatacgtagatatcaacaggaataccggaggcgaaggcgggtaactggccgaacactgacactgagatccgaaagcgtggggatcaaacaggattagataccctggtagtccacgccgtaaacgatggatacttgttgttggaggtattgaccccttcagtgacgaagctaacgcgttaagtatcccgcctggggagtacggtcgcaagattaaaactcaaagaaattgacgggggcccgcacaagcggtggagcatgtggtttaattcgatgcaacgcgaagaaccttacctaggcttgacatgtactggaagactggcagaaatgtcgtcgcccgcaagggtcggtacacaggtgctgcatggctgtcgtcagctcgtgtcgtgagatgttgggttaagtcccgcaacgagcgcaacccctgcatttagttgccagcattcagttgggcactctagatggactgccggtgttaaaccggaggaaggtggggatgacgtcaagtcctcatggcccttatgcctagggctacacacgtgctacaatggtagtcacagagcgaagctaagccgcgaggtagagcaaatcgcttaaaagctatctaagttcagattgatctctgcaactcgagatcatgaagttggaatcgctagtaatcgcggatcagaatgccgcggtgaatacgttcccgggccttgtacacaccgcccgtcacaccatgaaagttggctgtaccagaagtcgctgcgctaaccgcaaggaggcaggcgcccaaggtatggtcgatgattggggtg

SEQ ID NO: 836 - DNA, 1436 bp, Bdellovibrio exovorus
aacaaacgctggcggcgtgcctaatacatgcaagtcgaacggggaaagctttcgggtgagtactagtggcgcacgggtgaggaatacatgggtaatctgccctcgagttggggataactagtcgaaagattagctaataccgaataagaccacaggatctgcggatctaggggttaaaggtttttcgcttgaggatgagcccatgtgggattagctagttggtggggtaatggcctaccaaggcgacgatccctaactggtcttagaggatgatcagtcacactggaactgagacacggtccagactcctacgggaggcagcagtagggaatattgcacaatgggggaaaccctgatgcagcgacgccgcgtgagtgatgaaggccttcgggtcgtaaagctctgtcgtatgggactaacacaatgaaggtaccatgcaagaaaggatcggctaacttcgtgccagcagccgcggtaagacgagggatcctagcgttgttcggaattattgggcgtaaagcgggtgtaggcgggcttataagtcaggtgtgaaatcccagggctcaaccctggaagtgcacttgatactgtaagtcttgagtgtggtagaggctattagaattcttggtgtagtggtgaaatacgtagatatcaagaggaataccggaggcgaaggcggatagctgggccaacactgacgctgagacccgaaagcgtggggatcaaacaggattagataccctggtagtccacgccgtaaacgatggatacttgttgttagtggtattgaccccactagtgacgtagctaacgcgttaagtatcccgcctggggagtacggtcgcaagattaaaactcaaagaaattgacgggggcccgcacaagcggtggagcatgtggtttaattcgatgcaacgcgaagaaccttacctaggcttgacatggactggaagagtggcagaaatgtcctcgctcgcaagagtcggttcacaggtgctgcatggctgtcgtcagctcgtgtcgtgagatgttgggttaagtcccgcaacgagcgcaacccttacctttagttgccagcatttagttgggcactctaaagggactgcctgcgttaagcaggaggaaggtggggatgacgtcaagtcctcatggcccttatgcctagggctacacacgtgctacaatggtggtcacagagggaagccaaaccgcgaggtggagctaatcccttaaaagccatctaagttcagattggtctctgcaactcgagaccatgaagttggaatcgctagtaatcgcggatcagaatgccgcggtgaatacgttcccgggccttgtacacaccgcccgtcacaccatgaaagttggtcgtaccagaagtcgctgtgctaaccgcaaggaggtaggcgcccaaggtatggtcgatgattggggtg

SEQ ID NO: 837 - DNA, 1451 bp, Beggiatoa alba
attgaacgctggcggcatgcttaacacatgcaagtcgaacggtaacgggttaagccgacgagtggcggacgggtgagtaatacatgggaatctgcctgatagtgggggacaacctagggaaacttaggctaataccgcataatccctaagggggaaagtaggggaccttcgggccttacgctaacagatgagcccatgtcggattagctagttggtagggtaaaagcctaccaaggctacgatccgtagctggtctgagaggacgaccagccacactgggactgagacacggcccagactcctgcgggaggcagcagtggggaatattggacaatgggggcaaccctgatccagcaatgccgcgtgtgtgaagaaggcctgcgggttgtaaagcactttaggttgggaagaaaaagcacatgctaataccatgtgaaattgacgttaccaacggaataagcaccggctaactctgtgccagcagccgcggtaatacagagggtgcaagcgttaatcggaattactgggcgtaaagcgtgcgtaggtggttaattaagtcagatgtgaaatccctgagcttaacttaggaacagcatttgatactggttgactagagtgtaatagagggtagtggaattccacgtgtagcggtgaaatgcgtagatatgtggaggaacatcagtggcgaaggcgactacctggattaacactgacactgaggcacgaaagcgtggggagcaaacaggattagataccctggtagtccacgccctaaacgatgagaactagatgttgggagagactgtctcttagtatcgcagctaacgcactaagttctccgcctggggagtacggtcgcaagattaaaactcaaatgaattgacgggggcccgcacaagcggtggagcatgtggtttaattcgatgcaacgcgaagaaccttacctggtcttgacatcctaagaatcctgtagaaatatgggagtgccttcgggagcttagagacaggtgctgcatggctgtcgtcagctcgtgtcgtgagatgttgggttaagtcccgcaacgagcgcaacccctatccttagttgccagcgtaaagtcgggaactctaaggagactgccgatgacaaatcggaggaaggtggggatgacgtcaagtcatcatggcctttatgaccagggctacacacgtgctacaatggtaggtacaaagggttgccaagccgcgaggtggagccaatcccagaaaacctatcgtagtccggattgaagtctgcaactcgactccatgaagtcggaatcgctagtaatcgtagatcagcactgctacggtgaatacgttcccgggccttgtacacaccgcccgtcacaccatgggagtgggctgtaccagaagtaggtagtctaaccgaaaggggggcgcttaccacggtatggttcatgactggggtg

SEQ ID NO: 838 - DNA, 1416 bp, Beggiatoa leptomitoformis
tgcttaacacatgcaagtcgaacggtaacaggtcaagctgacgagtggcggacgggtgagtaaagcatgggaatctgcctgatagtgggggacaacctagggaaacttaggctaataccgcataagccctacgggggaaagcaggggaccttcgggccttgcgctaacagatgagcccatgtcggattagctagttggtggggtaaaggcctaccaaggcgacgatccgtagctggtctgagaggacgaccagccacactgggactgagacacggcccagactcctgcgggaggcagcagtggggaatattggacaatgggggcaaccctgatccagcaatgccgcgtgtgtgaagaaggcctgcgggttgtaaagcactttaggttgggaagaaaaagcgtatgttaataccatgcgcaattgacgttaccaacggaataagcaccggctaactctgtgccagcagccgcggtaatacagagggtgcaagcgttaatcggaattactgggcgtaaagcgtgcgtaggtggttaattaagtcagatgtgaaatccctgagcttaacttaggaactgcatatgatactggttgactagagtgtagtagagggtagtggaattccacgtgtagcggtgaaatgcgtagatatgtggaggaacatcagtggcgaaggcgactacctggattaacactgacactgaggcacgaaagcgtggggagcaaacaggattagataccctggtagtccacgccctaaacgatgagaactagatgttgggagagactgtctcttagtatcgcagctaacgcactaagttctccgcctggggagtacgatcgcaagattaaaactcaaatgaattgacgggggcccgcacaagcggtggagcatgtggtttaattcgatgcaacgcgaagaaccttacctggtcttgacatcctaagaatcctgtagaaatatgggagtgccttcgggaacttagagacaggtgctgcatggctgtcgtcagctcgtgtcgtgagatgttgggttaagtcccgcaacgagcgcaacccctatccttagttgccagcgtaaagtcgggaactctaaggagactgccgatgacaaatcggaggaaggtggggatgacgtcaagtcatcatggcccttatgaccagggctacacacgtgctacaatggtaggtacaaagggctgccaaatcgcgagatggagccaatcccagaaaacctatcgtagtccggattgaagtctgcaactcgactccatgaagtcggaatcgctagtaatcgtagatcagcactgctacggtgaatacgttcccgggccttgtacacaccgcccgtcacaccatgggagtgggctgtaccagaagtaggtagtctaaccgtaaggaggacgcttaccacggta

SEQ ID NO: 839 - DNA, 1409 bp, Beijerinckia indica
aacgaacgctggcggcaggcctaacacatgcaagtcgaacgctgtagcaatacggagtggcagacgggtgagtaacacgtgggaacataccctttggttcggaataactcagggaaacttgggctaataccggatacgccctacgggggaaagatttattgccgaaggattggcccgcgtctgattagctagttggtgaggtaatggctcaccaaggcgacgatcagtagctggtctgagaggatgatcagccacattgggactgagacacggcccaaactcctacgggaggcagcagtggggaatattggacaatgggcgcaagcctgatccagccatgccgcgtgagtgatgaaggccttagggttgtaaagctcttttacctgggaagataatgacggtaccaggagaataagccccggctaacttcgtgccagcagccgcggtaatacgaagggggctagcgttgttcggatttactgggcgtaaagcgcacgtaggcggatctttaagtcaggggtgaaatcccaaggctcaaccttggaactgcctttgatactggggatctcgagtccgggagaggtgagtggaactgcgagtgtagaggtgaaattcgtagatattcgcaagaacaccagtggcgaaggcggctcactggcccggtactgacgctgaggtgcgaaagcgtggggagcaaacaggattagataccctggtagtccacgccgtaaacgatggatgctagccgttaggcagcttgctgcttagtggcgcagttaacgctttaagcatcccgcctggggagtacggtcgcaagattaaaactcaaaggaattgacgggggcccgcacaagcggtggagcatgtggtttaattcgaagcaacgcgcagaaccttaccaacctttgacatgtctcgtttggttaccagagatggtttccttcagttaggctggcgagaacacaggtgctgcatggctgtcgtcagctcgtgtcgtgagatgttgggttaagtcccgcaacgagcgcaacccacgcccttagttgccatcattcagttgggcactctagggggactgccggtgataagccgagaggaaggtgtggatgacgtcaagtcctcatggcccttacgggttgggctacacacgtgctacaatggcggtgacaatgggatgcgaaggggcgaccctcagcaaatctcaaaaagccgtctcagttcggattgtactctgcaactcgagtgcatgaagttggaatcgctagtaatcgtagatcagaacgctacggtgaatacgttcccgggccttgtacacaccgcccgtcacaccatgggagttggttctacccgaaggcgttttgctaaccgcaagggggcaggcgaccacggtagggtcagcgactggggtg

SEQ ID NO: 840 - DNA, 1411 bp, Belnapia rosea
agcgaacgctggcggaatgcttaacacatgcaagtcgcacgggggcttcggctctagtggcggacgggtgagtaacgcgtaggaacgtgtcctgggatgggggataacgctgggaaactggcgctaataccgcatgtctgctgaggcagaaagcctttgggtgtcttgggagcggcctgcgtccgattagctagttggtggggtaaaggcttaccaaggcgacgatcggtagctggtctgagaggacgatcagccacactgggactgagacacggcccagactcctacgggaggcagcagtggggaatattggacaatgggcggaagcctgatccagcaattccgcgtgggtgaagaaggtcttcggattgtaaagccctttcggcggggacgatgatgacggtacccgcagaagaagccccggctaacttcgtgccagcagccgcggtaatacgaagggggctagcgttgctcggaattactgggcgtaaagggcgcgtaggcggcgcagttagtcaggcgtgaaattcctgggcttaacctggggactgcgcttgatacggctgtgctagagggtggaagaggctcgcggaattcccagtgtagaggtgaaattcgtagatattgggaagaacaccggtggcgaaggcggcgagctggtccattactgacgctgaggcgcgacagcgtggggagcaaacaggattagataccctggtagtccacgccgtaaacgatgtgcgctggatgttgggtggcctagccactcagtgtcgtagccaacgcggtaagcgcaccgcctggggagtacggccgcaaggttgaaactcaaaggaattgacgggggcccgcacaagcggtggagcatgtggtttaattcgaagcaacgcgcagaaccttaccagcccttgacatgggcaggaccggcgcagagatgcgctttccccgcaaggggcctgctgcacaggtgctgcatggctgtcgtcagctcgtgtcgtgagatgttgggttaagtcccgcaacgagcgcaaccctcgcctttagttgccagcatgttcgggtgggcactctagaggaactgccggtgacaagccggaggaaggtggggatgacgtcaagtcctcatggcccttatgggctgggctacacacgtgctacaatggcggtgacaatgggaggccaagtggcgacactgagccgatcccaaaaagctgtctcagttcggattgcactctgcaactcgggtgcatgaaggtggaatcgctagtaatcgcggatcagcacgccgcggtgaatacgttcccgggccttgtacacaccgcccgtcacaccatgggagttggttctaccttaagcaggtgcggcaaccgcaaggggctagcttgccacggtagggtcagtgactggggtg

SEQ ID NO: 841 - DNA, 1463 bp, Bergeriella denitrificans
attgaacgctggcggcatgctttacacatgcaagtcgaacggcagcggagaagtgcttgcacttctgccggcgagtggcgaacgggtgagtaacatattggaacgtaccgagtaatgggggataactaatcgaaagattagctaataccgcatacgtcctgagggagaaagcgggggatcttcggacctcgcgttattcgagcggccaatatctgattagctagttggtggggtaaaggcctaccaaggcgacgatcagtagcgggtctgagaggatgatccgccacactgggactgagacacggcccagactcctacgggaggcagcagtggggaattttggacaatgggcgcaagcctgatccagccatgccgcgtgtatgaagaaggccttcgggttgtaaagtacttttgtcagggaagaaaagggatttgctaataccgaatcctcatgacggtacctgaagaataagcaccggctaactacgtgccagcagccgcggtaatacgtagggtgcgagcgttaatcggaattactgggcgtaaagcgagcgcagacggttacttaagcaggatgtgaaatccccgagctcaacttgggaactgcgttctgaactgggtagctagagtatgtcagaggggggtagaattccacgtgtagcagtgaaatgcgtagagatgtggaggaataccgatggcgaaggcagccccctgggataatactgacgttcatgctcgaaagcgtgggtagcaaacaggattagataccctggtagtccacgccctaaacgatgtcaattagctgttggggtacttgataccttagtagcgtagctaacgcgtgaaattgaccgcctggggagtacggtcgcaagattaaaactcaaaggaattgacggggacccgcacaagcggtggatgatgtggattaattcgatgcaacgcgaagaaccttacctggtcttgacatgtacggaatctcccagagacgggagagtgccttcgggagccgtaacacaggtgctgcatggctgtcgtcagctcgtgtcgtgagatgttgggttaagtcccgcaacgagcgcaacccttgtcattagttgccatcattcagttgggcactctaatgagactgccggtgacaagccggaggaaggtggggatgacgtcaagtcctcatggcccttatgaccagggcttcacacgtcatacaatggtcggtacagagggtagccaagccgcgaggtggagccaatctcacaaaaccgatcgtagtccggattgcactctgcaactcgagtgcatgaagtcggaatcgctagtaatcgcaggtcagcatactgcggtgaatacgttcccgggtcttgtacacaccgcccgtcacaccatgggagtgggggataccagaagtaggtagggtaaccgcaaggagcccgcttaccacggtatgcttcatgactggggtg

SEQ ID NO: 842 - DNA, 1455 bp, Bermanella marisrubri
attgaacgctggcggcaggcttaacacatgcaagtcgagcggaaacgatgatagcttgctatcaggcgtcgagcggcggacgggtgagtaacgcgtaggaacctacccagtagttcgggatagcccagagaaatttggattaataccggatacgccctacgggggaaagggggcttcggctctcgctattggatgggcctgcgtgagattagcttgttggtgaggtaagagctcaccaaggcaacgatctctagctggtctgagaggatgatcagccacactgggactgagacacggcccagactcctacgggaggcagcagtggggaatattgcacaatgggcgcaagcctgatgcagccatgccgcgtgtgtgaagaaggctctagggttgtaaagcactttcagcagcgaggaaagcttgttggttaatacccatcaagtgtgacgttaactgcagaagaagcaccggctaactccgtgccagcagccgcggtaatacggagggtgcaagcgttaatcggaattactgggcgtaaagcgcacgtaggttgtctgttaagttggatgtgaaagcccagggctcaaccttggaactgcatccaaaactggcaggctagagtacggtagaggtgagtggaatttcctgtgtagcggtgaaatgcgtagagatgggaaggaacatcagtggcgaaggcgactcactggactgatactgacactgaggtgcgaaagcgtgggtagcaaacaggattagataccctggtagtccacgccgtaaacgatgtctactagccgttgggatccttgagatcttagtggcgcagctaacgcactaagtagaccgcctggggagtacggtcgcaagattaaaactcaaatgaattgacgggggcccgcacaagcggtggagcatgtggtttaattcgaagcaacgcgaagaaccttacctactcttgacatctagagaacttggcagagatgccttggtgccttcgggaactctaagacaggtgctgcatggctgtcgtcagctcgtgttgtgaaatgttgggttaagtcccgtaacgagcgcaacccttgtccttagttgccatcatttagttggggactctaaggagactgccggtgacaaaccggaggaaggcggggacgacgtcaagtcatcatggcccttacgagtagggctacacacgtgctacaatggccagtacaaacggttgccaagtcgcgagacggagctaatctgagaaagctggtcgtagtccggattggagtctgcaactcgactccatgaagtcggaatcgctagtaatcgcgaatcagaatgtcgcggtgaatacgttcccgggccttgtacacaccgcccgtcacaccatgggagtgggttgctccagaagtggctagcttaaccttcgggagagcggtcaccacggagtgattcatgactggggtg

SEQ ID NO: 843 - DNA, 1362 bp, Bibersteinia trehalosi
  misc_feature (51)..(52): n is a, c, g, or t
  misc_feature (63)..(64): n is a, c, g, or t
attgaacgctggcggcaggcttaacacatgcaagtcgaacggtagcaggannaagcttgcttnnttgctgacgagtggcggacgggtgagtaatgcttgggaatctggcttatggagggggataactactggaaacggtagctaataccgcgtaatatcgagagattaaagggtgggactttcgggccacctgccataagatgagcccaagtgggattaggtagttggtggggtaaaggcctaccaagcctgcgatctctagctggtctgagaggatggccagccacactggaactgagacacggtccagactcctacgggaggcagcagtggggaatattgcacaatggggggaaccctgatgcagccatgccgcgtgaatgaagaaggccttcgggttgtaaagttctttcggtgatgaggaaggtgttttgtttaatagacaaagcaattgacgttagtcacagaagaagcaccggctaactccgtgccagcagccgcggtaatacggagggtgcgagcgttaatcggaataactgggcgtaaagggcacgcaggcggatagttaagtgagatgtgaaagccccgggcttaacctgggaattgcatttcagactggctgtctagagtattttagggaggggtagaattccacgtgtagcggtgaaatgcgtagagatgtggaggaataccgaaggcgaaggcagccccttgggaatatactgacgctcatgtgcgaaagcgtggggagcaaacaggattagataccctggtagtccacgctgtaaacgatgttgatttggggattgggctttaagcttggtgcccgtagctaacgtgataaatcaaccgcctggggagtacggccgcaaggttaaaactcaaatgaattgacgggggcccgcacaagcggtggagcatgtggtttaattcgatgcaacgcgaagaaccttacctactcttgacatccagagaagcttgcagagatgcgagtgtgccttcgggagctctgagacaggtgctgcatggctgtcgtcagctcgtgttgtgaaatgttgggttaagtcccgcaacgagcgcaacccttatcctttgttgccagcgatacggtcgggaactcaaaggagactgccagtgataaactggaggaaggtggggatgacgtcaagtcatcatggcccttacgagtagggctacacacgtgctacaatggtgcatacagagggtagcgagccagcgatggtgagccaatctcagaaagtgcatctaagtccggattggagtctgcaactcgactccatgaagtcggaatcgctagtaatcgcaaatcagaatgttgcggtgaatacgttcccgggcctt

SEQ ID NO: 844 - DNA, 1418 bp, Biostraticola tofi
  misc_feature (20)..(20): n is a, c, g, or t
  misc_feature (1333)..(1333): n is a, c, g, or t
gtcgagcggcagcggaaagnagcttgctactttgccggcgagcggcggacgggtgagtaatgtctggggatctgcctgatggcgggggataactactggaaacggtagctaataccgcataacgtcgcaagaccaaagtgggggaccttcgggcctcacgccatcagatgaacccagatgggattagctagtaggtggggtaatggctcacctaggcgacgatccctagctggtctgagaggatgaccagccacactggaactgagacacggtccagactcctacgggaggcagcagtggggaatattgcacaatgggggaaaccctgatgcagccatgccgcgtgtgtgaagaaggccttcgggttgtaaagcactttcagcgaggaggaaggcgatagcgttaatagcgctgtcgattgacgttactcgcagaagaagcaccggctaactccgtgccagcagccgcggtaatacggagggtgcaagcgttaatcggaattactgggcgtaaagcgtacgcaggcggtctgttaagtcagatgtgaaatccccgggcttaacctgggaactgcatttgaaactggcaggctagagtcttgtagaggggggtagaattccaggtgtagcggtgaaatgcgtagagatctggaggaataccggtggcgaaggcggccccctggacaaagactgacgctcaggtacgaaagcgtggggagcaaacaggattagataccctggtagtccacgctgtaaacgatgtcgatatgaaggttgtggccttgagccgtggctttcggagctaacgcgtcaaatcgaccgcctggggagtacggccgcaatgtgaaaactcaaatgaattgacgggggcccgcacaagcggtggagcatgtggtttaattcgatgcaacgcgaagaaccttacctactcttgacatccagagaatcgggcagagatgcctgagtgccttcgggaactctgagacaggtgctgcatggctgtcgtcagctcgtgttgtgaaatgttgggttaagtcccgcaacgagcgcaacccttatcctttgttgccagcacgtaatggtgggaactcaaaggagactgccggtgataaaccggaggaaggtggggatgacgtcaagtcatcatggcccttacgagtatggctacacacgtgctacaatggcgcatacaaagagaagcgatctcgcgagagtcagcggacctcataaagtgcgtcgtagtccggataggagtctgcaactcgactccatgaagtctgaatcgctagtaatcgtggatcagaatgccacggtgaatacgttcacgggcctgnacacaccgcccgtcacaccatgggagtgggttgcaaaagaagtaggtagcttaaccttcgggagggcgcttaccactttgtgatt

SEQ ID NO: 845 - DNA, 1363 bp, Bisgaardia hudsonensis
attgaacgctggcggcaggcttaacacatgcaagtcgaacggtaacaggaaaaagcttgcttttttgctgacgagtggcggacgggtgagtaatgcttgggaatctgtcttatggagggggataactacgggaaactgtagctaataccgcgtataatcgagagatgaaagggtgggatcttcggaccatctgccataaggtgagcccaagtgggattaggtagttggtggggtaaaggcctaccaagccgacgatctctagctggtttgagaggatgaccagccacactgggactgagacacggcccagactcctacgggaggcagcagtggggaatattgcacaatggggggaaccctgatgcagccatgccgcgtgaatgaagaaggccttagggttgtaaagttctttcggtgatgaggaaggtagtgaagttaatagctttactaattgacgttagtcacagaagaagcaccggctaactccgtgccagcagccgcggtaatacggagggtgcgagcgttaatcggaataactgggcgtaaagggcacgcaggcggtaacttaagtgaggtgtgaaagccccgggctcaacctgggaattgcacttcatactgggttactagagtattttagggaggggtagaattccatgtgtagcggtgaaatgcgtagagatgtggaggaataccgaaggcgaaggcagccccttgggaatatactgacgctcatgtgcgaaagcgtggggagcaaacaggattagataccctggtagtccacgctgtaaacgatgtcgatttggggattgggctttaagcttggtgcccgtagctaacgcgataaatcgaccgcctggggagtacggccgcaaggttaaaactcaaatgaattgacgggggcccgcacaagcggtggagcatgtggtttaattcgatgcaacgcgaagaaccttacctactcttgacatccatggaagagctcagagatgagcttgtgccttcgggaaccatgagacaggtgctgcatggctgtcgtcagctcgtgttgtgaaatgttgggttaagtcccgcaacgagcgcaacccttatcctttgttgctagcaggtaatgctgagaactcaaaggagactgccagtgataaactggaggaaggtggggatgacgtcaagtcatcatggcccttacgagtagggctacacacgtgctacaatggtgcatacagagggaagcgaagtagcgatatggagcgaatctcagaaagtgcatctaagtccggattggagtctgcaactcgactccatgaagtcggaatcgctagtaatcgcgaatcagaatgtcgcggtgaatacgttcccgggcctt

SEQ ID NO: 846 - DNA, 1409 bp, Blastochloris viridis
agcgaacgctggcggcaggcttaacacatgcaagtcgagcgccgtagcaatacggagcggcagacgggtgagtaacgcgtgggaatgtgcccaaaggtacggaacaaccaagggaaactttggctaataccgtatgtgcccgagaggggaaagatttattgcctttggagcagcccgcgtctgattagctagttggtggggtaacggcccaccaaggcgacgatcagtagctggtctgagaggatgatcagccacactgggactgagacacggcccagactcctacgggaggcagcagtggggaatattggacaatgggcgcaagcctgatccagccatgccgcgtgagtgatgaaggccttagggttgtaaagctctttcgacggggaagataatgacggtacccgtagaagaagccccggctaacttcgtgccagcagccgcggtaatacgaagggggctagcgttgctcggatttactgggcgtaaagcgcacgtaggcgggtcgttaagtcgggggtgaaatcccggagctcaactccggaactgccttcgatactggcgacctcgagtccgggagaggtgagtggaactccgagtgtagaggtgaaattcgtagatattcggaagaacaccagtggcgaaggcggctcactggcccggtactgacgctgaggtgcgaaagcgtggggagcaaacaggattagataccctggtagtccacgccgtaaacgatggaggctagccgttggtgagcatgctcatcagtggcgcagctaacgctttaagcctcccgcctggggagtacggtcgcaagattaaaactcaaaggaattgacgggggcccgcacaagcggtggagcatgtggtttaattcgaagcaacgcgcagaaccttaccagctcttgacatgccacgacggttcccagagatgggttctttcccgcaagggacgtggacacaggtgctgcatggctgtcgtcagctcgtgtcgtgagatgttgggttaagtcccgcaacgagcgcaaccctcgcccttagttgccatcatttagttgggcactctaaggggactgccggtgataagccgagaggaaggtggggatgacgtcaagtcctcatggcccttacgggctgggctacacacgtgctacaatggcggtgacagtgggcagcgaaggggcgaccctgagctaatctccaaaagccgtctcagttcggattgcactctgcaactcgagtgcatgaagtcggaatcgctagtaatcgcagatcagcatgctgcggtgaatacgttcccgggccttgtacacaccgcccgtcacaccatgggagttggctttacccgaaggcgctgcgccaacccgcgaggggggcaggcgaccacggtagggtcagcgactggggtg

SEQ ID NO: 847 - DNA, 1411 bp, Blastomonas fulva
aacgaacgctggcggcatgcctaacacatgcaagtcgaacgagaccttcgggtctagtggcgcacgggtgcgtaacgcgtgggaatctgcctttgggttcggaataacagtgagaaattactgctaataccggatgatgtcttcggaccaaagatttatcgcccaaagatgagcccgcgtaagattagctagttggtgaggtaaaggctcaccaaggcgacgatctttagctggtctgagaggatgatcagccacactgggactgagacacggcccagactcctacgggaggcagcagtggggaatattggacaatgggcgaaagcctgatccagcaatgccgcgtgagtgatgaaggccttagggttgtaaagctcttttaccagggatgataatgacagtacctggagaataagctccggctaactccgtgccagcagccgcggtaatacggagggagctagcgttgttcggaattactgggcgtaaagcgcacgtaggcggctattcaagtcagaggtgaaagcccggggctcaaccccggaactgcctttgaaactagatagcttgaatcttggagaggcgagtggaattccgagtgtagaggtgaaattcgtagatattcggaagaacaccagtggcgaaggcgactcgctggacaagtattgacgctgaggtgcgaaagcgtggggagcaaacaggattagataccctggtagtccacgccgtaaacgatgataactagctgtccgggttcatggaacttgggtggcgcagctaacgcattaagttatccgcctggggagtacggtcgcaagattaaaactcaaaggaattgacgggggcctgcacaagcggtggagcatgtggtttaattcgaagcaacgcgcagaaccttaccagcgtttgacatggctagtatattttccagagatggattatttcagttcggctggctagcacacaggtgctgcatggctgtcgtcagctcgtgtcgtgagatgttgggttaagtcccgcaacgagcgcaaccctcgtctttagttgccatcattaagttgggcactctaaagaaaccgccggtgataagccggaggaaggtggggatgacgtcaagtcctcatggcccttacacgctgggctacacacgtgctacaatggcggtgacagtgggcagcaagcacgcgagtgcaagctaatctccaaaagccgtctcagttcggattgttctctgcaactcgagagcatgaaggcggaatcgctagtaatcgcggatcagcatgccgcggtgaatacgttcccaggccttgtacacaccgcccgtcacaccatgggagttggattcacccgaaggcgctgcgctaacccgcaagggaggcaggcgaccacggtgggttcagcgactggggtg

SEQ ID NO: 848 - DNA, 1411 bp, Blastomonas natatoria
aacgaacgctggcggcatgcctaacacatgcaagtcgaacgaaggcttcggccttagtggcgcacgggtgcgtaacgcgtgggaatctgcccttgggttcggaataacagtgagaaattactgctaataccggatgatgacttcggtccaaagatttatcgcccaaggatgagcccgcgtaagattagctagttggtgaggtaaaggctcaccaaggcgacgatctttagctggtctgagaggatgatcagccacactgggactgagacacggcccagactcctacgggaggcagcagtggggaatattggacaatgggcgaaagcctgatccagcaatgccgcgtgagtgatgaaggccttagggttgtaaagctcttttaccagggatgataatgacagtacctggagaataagctccggctaactccgtgccagcagccgcggtaatacggagggagctagcgttgttcggaattactgggcgtaaagcgcacgtaggcggccattcaagtcagaggtgaaagcccggggctcaaccccggaactgcctttgaaactagatggcttgaatcttggagaggcgagtggaattccgagtgtagaggtgaaattcgtagatattcggaagaacaccagtggcgaaggcgactcgctggacaagtattgacgctgaggtgcgaaagcgtggggagcaaacaggattagataccctggtagtccacgccgtaaacgatgataactagctgtccgggttcatggaacttgggtggcgcagctaacgcattaagttatccgcctggggagtacggtcgcaagattaaaactcaaaggaattgacgggggcctgcacaagcggtggagcatgtggtttaattcgaagcaacgcgcagaaccttaccagcgtttgacatgtctagtatgtttcccagagatgggttacttcagttcggctggctagaacacaggtgctgcatggctgtcgtcagctcgtgtcgtgagatgttgggttaagtcccgcaacgagcgcaaccctcgtctttagttgccatcatttagttgggcactctaaagaaaccgccggtgataagccggaggaaggtggggatgacgtcaagtcctcatggcccttacacgctgggctacacacgtgctacaatggcggtgacagtgagcagctagatcgcgagatcatgctaatctcaaaaagccgtctcagttcggattgttctctgcaactcgagagcatgaaggcggaatcgctagtaatcgcggatcagcatgccgcggtgaatacgttcccaggccttgtacacaccgcccgtcacaccatgggagttggattcacccgaaggcgctgcgctaacccgcaagggaggcaggcgaccacggtgggttcagcgactggggtg

SEQ ID NO: 849 - DNA, 1430 bp, Blastopirellula cremea
aatgaacgttggcggcatggattaggcatgcaagtcgagcgagaaccgaggaagcttgcttctaaggggacagcggcgaaagggagagtaacaggtggatacctacctccaggctgggaatagcgtcgggaaactggcggtaatgcccaataacatctacggatcaaagctccggcgcctggagatgggtctgctcactattagctagttggtaaggtaatggcttaccaaggcgacgatggttagcgggcgtgagagcgtggcccgtctcactgggactgagacactgcccagacacctacgggtggctgcagtcgagaatcttcggcaatggacgcaagtctgaccgagcgatgccgcgtgcgggatgaaggccttcgggttgtaaaccgctgtcagagggaaggaaattttgaccaaacctcagaggaaggtcgggctaagttcgtgccagcagccgcggtaagacgaaccgaccaaacgttattcggaattactgggcttaaagggtgcgtaggcggtcatgcaagtcagatgtgaaatcccacggctcaaccgtggaactgcgtttgaaactgcatgacttgagggagataggggtgagcggaactgatggtggagcggtgaaatgcgttgatatcatcaggaacaccggtggcgaaggcggctcactgggtctcttctgacgctgaggcacgaaagctaggggagcgaacgggattagataccccggtagtcctagctgtaaacgatgagcactggatcgagggacctcccacagtttctcggtcgtagcgaaagtgttaagtgctccgcctggggagtatggtcgcaaggctgaaactcaaaagaattgacgggggctcacacaagcggtggaggatgtggcttaattcgaggctacgcgaagaaccttatcctagtcttgacatgcttaagaatctccctgaaaggggagagtgctcttcggagagcttttgcacaggtgctgcatggctgtcgtcagctcgtgtcgtgagatgtcgggttaagtcccttaacgagcgaaacccttatctctagttgccagcgagtaatgtcggggactctagagagaccgccggtgttaaaccggaggaaggtggggatgacgtcaagtcctcatggcctttatgactagggctgcacacgtcctacaatgcaacatacaaagggaagccaactcgcgagagtgagcaaatcccaaaaagtgttgctcagttcggattgcaggctgcaactcgcctgcatgaagccggaatcgctagtaatcgcgggtcagcataccgcggtgaatatgttcctgagccttgtacacaccgcccgtcaagccacgaaagtggggtgcacgcgaagtcgctaagctaaccttcgggaggcaggcgccgaacgatgactccgcgatggggact

SEQ ID NO: 850 - DNA, 1433 bp, Blastopirellula marina
aatgaacgttggcggcatggattaggcatgcaagtcgcgcgataactgagagagcttgctctcgaggggacagcggcgaaagggagagtaacaggtggtttatctaccctcgggtttgggatagcgtcgggaaactggcggtaataccaaataacatctacggatcaaagttccggcgcccggggatgagactgctcactattagcttgttggtggggtaatggcctaccaaggcgacgatggttagcgggcgtgagagcgtggcccgtctcactgggactgagatactgcccagacacctacgggtggctgcagtcgagaatctttggcaatgggcgcaagcctgaccaagcgatgccgcgtgcgggattaaggccttcgggttgtaaaccgctgtcagaggggaagaaattttgactgatcctcagaggaaggacgggctaagttcgtgccagcagccgcggtaagacgaaccgtccgaacgttattcggaattactgggcttaaagggtgcgtaggcggccctacaagtcaggtgtgaaatcccacggctcaaccgtggaactgcgcttgaaactgtagggcttgagggagataggggtgagcggaactgatggtggagcggtgaaatgcgttgatatcatcaggaacaccggcggcgaaggcggctcactgggtctctactgacgctgaggcacgaaagctaggggagcgaacgggattagataccccggtagtcctagctgtaaacgatgagcactggatcgaggggactcccacatcttctcggtcgtagcgaaagtgttaagtgctccgcctggggagtatggtcgcaaggctgaaactcaaagaaattgacgggggctcacacaagcggtggaggatgtggcttaattcgaggctacgcgaagaaccttatcctagtcttgacatgtttaagaatctccctgaaaggggagagtgctcttcggagagcttttgcacaggtgctgcatggctgtcgtcagctcgtgtcgtgagatgtcgggttaagtcccttaacgagcgaaacccctatctctagttgccagcgagtaatgtcggggactctagagagactgccggtgtgaaaccggaggaaggcggggatgacgtcaagtcctcatggcctttatgactagggctgcacacgtcctacaatggtgcgaacaaagggacgcaaactcgcgagagtaagcaaatcccagaaaacgcgcctcagttcggattgcaggctgcaactcgcctgcatgaagccggaatcgctagtaatcgcgggtcagcataccgcggtgaatatgttcctgagccttgtacacaccgcccgtcaagccacgaaagtggggtgcacgcgaagtcgctaagctaactcgcaagagaggcaggcgccgaacgtgaactccgcgattgggact

SEQ ID NO: 851 - DNA, 1406 bp, Bombella intestini
agcgaacgctggcggcatgcttaacacatgcaagtcgcacgaatctttcgggattagtggcggacgggtgagtaacgcgtaggaacctatccagaggtgggggataacatcgggaaactggtgctaataccgcatgatgcctgagggccaaaggagcaattcgccattggaggggcctgcgttcgattagctagttggttaggtaaaggctgaccaaggcgatgatcgatagctggtttgagaggatgatcagccacactgggactgagacacggcccagactcctacgggaggcagcagtggggaatattggacaatgggggcaaccctgatccagcaatgccgcgtgtgtgaagaaggtcttcggattgtaaagcactttcactagggaagatgatgacggtacctagagaagaagccccggctaacttcgtgccagcagccgcggtaatacgaagggggctagcgttgctcggaatgactgggcgtaaagggcgcgtaggctgtttgtacagtcagatgtgaaatccccgggcttaacctgggaactgcatttgatacgtgcagactagagtccgagagagggttgtggaattcccagtgtagaggtgaaattcgtagatattgggaagaacaccggttgcgaaggcggcaacctggctcggaactgacgctgaggcgcgaaagcgtggggagcgaacaggattagataccctggtagtccacgctgtaaacgatgtgtgctggatgttgggtaattttattactcagtgtcggagctaacgcgttaagcacaccgcctggggagtacggccgcaaggttgaaactcaaaggaattgacgggggcccgcacaagcggtggagcatgtggtttaattcgaagcaacgcgcagaaccttaccagggcttgcatggggaggctgtattcagagatggatatttcttcggacctcccgcacaggtgctgcatggctgtcgtcagctcgtgtcgtgagatgttgggttaagtcccgcaacgagcgcaacccttgtctttagttgccatcacgtttgggtgggcactctagagagactgccggtgacaagccggaggaaggtggggatgacgtcaagtcctcatggcccttatgtcctgggctacacacgtgctacaatggcggtgacagagggatgctacatggtgacatggtgctgatctcaaaaaaccgtctcagttcggattgtactctgcaactcgagtgcatgaaggtggaatcgctagtaatcgcggatcagcatgccgcggtgaatacgttcccgggccttgtacacaccgcccgtcacaccatgggagttggtttgaccttaagccggtgagcgaaccgcaaggacgcagccgaccacggtcgggtcagcgactggggtg

SEQ ID NO: 852 - DNA, 1453 bp, Bordetella ansorpii
attgaacgctggcgggatgccttacacatgcaagtcgaacggcagcacggacttcggtctggtggcgagtggcgaacgggtgagtaatgtatcggaacgtacccagtagcgggggataactacgcgaaagcgtagctaataccgcatacgtcctacgggagaaagcgggggaccttcgggcctcgcactattggagcggccgatatcggattagctagttggtggggtaaaggcctaccaaggcgacgatccgtagctggtttgagaggacgaccagccacactgggactgagacacggcccagactcctacgggaggcagcagtggggaattttggacaatgggggaaaccctgatccagccatcccgcgtgtgcgatgaaggccttcgggttgtaaagcacttttggcaggaaagaaacggctccggataatacctggggcaactgacggtacctgcagaataagcaccggctaactacgtgccagcagccgcggtaatacgtagggtgcaagcgttaatcggaattactgggcgtaaagcgtgcgcaggcggttcggaaagaaagatgtgaaatcccagagcttaactttggaactgcatttttaactaccgagctagagtgtgtcagagggaggtggaattccgcgtgtagcagtgaaatgcgtagatatgcggaggaacaccgatggcgaaggcagcctcctgggacaacactgacgctcatgcacgaaagcgtggggagcaaacaggattagataccctggtagtccacgccctaaacgatgtcaactagctgttggggacttcggtccttggtagcgcagctaacgcgtgaagttgaccgcctggggagtacggtcgcaagattaaaactcaaaggaattgacggggacccgcacaagcggtggatgatgtggattaattcgatgcaacgcgaaaaaccttacctacccttgacatgtctagaaggccgaagagatttggctgtgctcgcaagagaactggaacacaggtgctgcatggctgtcgtcagctcgtgtcgtgagatgttgggttaagtcccgcaacgagcgcaacccttgtcattagttgctacgaaagggcactctaatgagactgccggtgacaaaccggaggaaggtggggatgacgtcaagtcctcatggcccttatgggtagggcttcacacgtcatacaatggtcgggacagagggctgccaacccgcgagggggagccaatcccagaaacccgatcgtagtccggatcgcagtctgcaactcgactgcgtgaagtcggaatcgctagtaatcgcggatcagcatgtcgcggtgaatacgttcccgggtcttgtacacaccgcccgtcacaccatgggagcgggttttaccagaagtaggtagcctaaccgcaaggggggcgcttaccacggtaggattcgtgactggggtg

SEQ ID NO: 853 - DNA, 1453 bp, Bordetella avium
attgaacgctggcgggatgctttacacatgcaagtcgaacggcagcacggacttcggtctggtggcgagtggcgaacgggtgagtaatgtatcggaacgtgcctagtagcgggggataactacgcgaaagcgtagctaataccgcatacgccctacgggggaaagcgggggaccttcgggcctcgcactattagagcggccgatatcggattagctagttggtggggtaacggctcaccaaggcgacgatccgtagctggtttgagaggacgaccagccacactgggactgagacacggcccagactcctacgggaggcagcagtggggaattttggacaatgggggaaaccctgatccagccatcccgcgtgtgcgatgaaggccttcgggttgtaaagcacttttggcaggaaagaaaaggcgcaggctaataccttgcgcaaatgacggtacctgcagaataagcaccggctaactacgtgccagcagccgcggtaatacgtagggtgcaagcgttaatcggaattactgggcgtaaagcgtgcgcaggcggttcggaaagaaagatgtgaaatcccagagcttaactttggaactgcatttttaactaccgagctagagtgtgtcagagggaggtggaattccgcgtgtagcagtgaaatgcgtagatatgcggaggaacaccgatggcgaaggcagcctcctgggataacactgacgctcatgcacgaaagcgtggggagcaaacaggattagataccctggtagtccacgccctaaacgatgtcaactagctgttggggccttcgggccttagtagcgcagctaacgcgtgaagttgaccgcctggggagtacggtcgcaagattaaaactcaaaggaattgacggggacccgcacaagcggtggatgatgtggattaattcgatgcaacgcgaaaaaccttacctacccttgacatgtctggaatcccgaagagatttgggagtgctcgcaagagaaccggaacacaggtgctgcatggctgtcgtcagctcgtgtcgtgagatgttgggttaagtcccgcaacgagcgcaacccttgtcattagttgctacgaaagggcactctaatgagactgccggtgacaaaccggaggaaggtggggatgacgtcaagtcctcatggcccttatgggtagggcttcacacgtcatacaatggtcgggacagagggtcgccaacccgcgagggggagccaatcccagaaacccgatcgtagtccggatcgcagtctgcaactcgactgcgtgaagtcggaatcgctagtaatcgcggatcagcatgtcgcggtgaatacgttcccgggtcttgtacacaccgcccgtcacaccatgggagtgggttttaccagaagtagttagcctaaccgcaaggggggcgattaccacggtaggattcatgactggggtg

SEQ ID NO: 854 - DNA, 1453 bp, Bordetella bronchialis
attgaacgctggcgggatgccttacacatgcaagtcgaacggcagcgcggacttcggtctggcggcgagtggcgaacgggtgagtaatgtatcggaacgtgcccagtagcgggggataactacgcgaaagcgtagctaataccgcatacgccctgagggggaaagcgggggatcttcggacctcgcactattggagcggccgatatcggattagctagttggtggggtaacggctcaccaaggcgacgatccgtagctggtttgagaggacgaccagccacactgggactgagacacggcccagactcctacgggaggcagcagtggggaattttggacaatgggggcaaccctgatccagccatcccgcgtgtgcgatgaaggccttcgggttgtaaagcacttttggcaggaaagaaacggcgccggctaatacctggcgtaactgacggtacctgcagaataagcaccggctaactacgtgccagcagccgcggtaatacgtagggtgcaagcgttaatcggaattactgggcgtaaagcgtgcgcaggcggttcggaaagaaagatgtgaaatcccagggcttaaccttggaactgcatttttaactaccgggctagagtgtgtcagaggggggtggaattccacgtgtagcagtgaaatgcgtagatatgtggaggaacaccgatggcgaaggcagccccctgggataacactgacgctcatgcacgaaagcgtggggagcaaacaggattagataccctggtagtccacgccctaaacgatgtcaactagctgttgggtccttcggggcttggtagcgcagctaacgcgtgaagttgaccgcctggggagtacggtcgcaagattaaaactcaaaggaattgacggggacccgcacaagcggtggatgatgtggattaattcgatgcaacgcgaaaaaccttacctacccttgacatgtctggaatcccgaagagatttgggagtgctcgcaagagaaccggaacacaggtgctgcatggctgtcgtcagctcgtgtcgtgagatgttgggttaagtcccgcaacgagcgcaacccttgtcattagttgctacgaaagggcactctaatgagactgccggtgacaaaccggaggaaggtggggatgacgtcaagtcctcatggcccttatgggtagggcttcacacgtcatacaatggtcgggacagagggtcgccaacccgcgagggggagccaatcccagaaacccgatcgtagtccggatcgcagtctgcaactcgactgcgtgaagtcggaatcgctagtaatcgcggatcagcatgtcgcggtgaatacgttcccgggtcttgtacacaccgcccgtcacaccatgggagtgggttttaccagaagtagttagcctaaccgcaaggagggcgattaccacggtaggattcatgactggggtg

SEQ ID NO: 855 - DNA, 1453 bp, Bordetella flabilis
attgaacgctggcgggatgccttacacatgcaagtcgaacggcagcgcggacttcggtctggcggcgagtggcgaacgggtgagtaatgtatcggaacgtgcccagtagcgggggataactacgcgaaagcgtagctaataccgcatacgccctacgggggaaagcgggggatcttcggacctcgcactattggagcggccgatatcggattagctagttggtggggtaacggctcaccaaggcgacgatccgtagctggtttgagaggacgaccagccacactgggactgagacacggcccagactcctacgggaggcagcagtggggaattttggacaatgggggcaaccctgatccagccatcccgcgtgtgcgatgaaggccttcgggttgtaaagcacttttggcaggaaagaaacggcgctggttaatacctggcgcaactgacggtacctgcagaataagcaccggctaactacgtgccagcagccgcggtaatacgtagggtgcaagcgttaatcggaattactgggcgtaaagcgtgcgcaggcggttcggaaagaaagatgtgaaatcccagggcttaaccttggaactgcatttttaactaccgggctagagtgtgtcagaggggggtggaattccacgtgtagcagtgaaatgcgtagatatgtggaggaacaccgatggcgaaggcagccccctgggataacactgacgctcatgcacgaaagcgtggggagcaaacaggattagataccctggtagtccacgccctaaacgatgtcaactagctgttggggccttcgggccttggtagcgcagctaacgcgtgaagttgaccgcctggggagtacggtcgcaagattaaaactcaaaggaattgacggggacccgcacaagcggtggatgatgtggattaattcgatgcaacgcgaaaaaccttacctacccttgacatgtctggaatcccgaagagatttgggagtgctcgcaagagaaccggaacacaggtgctgcatggctgtcgtcagctcgtgtcgtgagatgttgggttaagtcccgcaacgagcgcaacccttgtcattagttgctacgaaagggcactctaatgagactgccggtgacaaaccggaggaaggtggggatgacgtcaagtcctcatggcccttatgggtagggcttcacacgtcatacaatggtcgggacagagggtcgccaacccgcgagggggagccaatcccagaaacccgatcgtagtccggatcgcagtctgcaactcgactgcgtgaagtcggaatcgctagtaatcgcggatcagcatgtcgcggtgaatacgttcccgggtcttgtacacaccgcccgtcacaccatgggagtgggttttaccagaagtagttagcctaaccgcaaggagggcgattaccacggtaggattcatgactggggtg

SEQ ID NO: 856 - DNA, 1453 bp, Bordetella hinzii
attgaacgctggcgggatgctttacacatgcaagtcggacggcagcacgggcttcggcctggtggcgagtggcgaacgggtgagtaatgtatcggaacgtgcccagtagcgggggataactacgcgaaagcgtagctaataccgcatacgccctacgggggaaagcgggggaccttcgggcctcgcactattggagcggccgatatcggattagctagttggtggggtaacggctcaccaaggcgacgatccgtagctggtttgagaggacgaccagccacactgggactgagacacggcccagactcctacgggaggcagcagtggggaattttggacaatgggggcaaccctgatccagccatcccgcgtgtgcgatgaaggccttcgggttgtaaagcacttttggcaggaaagaaacggcgcaggctaatatcttgcgcaactgacggtacctgcagaataagcaccggctaactacgtgccagcagccgcggtaatacgtagggtgcaagcgttaatcggaattactgggcgtaaagcgtgcgcaggcggttcggaaagaaagatgtgaaatcccagagcttaactttggaactgcatttttaactaccgggctagagtgtgtcagagggaggtggaattccgcgtgtagcagtgaaatgcgtagatatgcggaggaacaccgatggcgaaggcagcctcctgggataacactgacgctcatgcacgaaagcgtggggagcaaacaggattagataccctggtagtccacgccctaaacgatgtcaactagctgttggggccttcgggccttggtagcgcagctaacgcgtgaagttgaccgcctggggagtacggtcgcaagattaaaactcaaaggaattgacggggacccgcacaagcggtggatgatgtggattaattcgatgcaacgcgaaaaaccttacctacccttgacatgtctggaatcccgaagagatttgggagtgctcgcaagagaaccggaacacaggtgctgcatggctgtcgtcagctcgtgtcgtgagatgttgggttaagtcccgcaacgagcgcaacccttgtcattagttgctacgaaagggcactctaatgagactgccggtgacaaaccggaggaaggtggggatgacgtcaagtcctcatggcccttatgggtagggcttcacacgtcatacaatggtcgggacagagggtcgccaacccgcgagggggagccaatcccagaaacccgatcgtagtccggatcgcagtctgcaactcgactgcgtgaagtcggaatcgctagtaatcgcggatcagcatgtcgcggtgaatacgttcccgggtcttgtacacaccgcccgtcacaccatgggagtgggttttaccagaagtagttagcctaaccgcaaggggggcgattaccacggtaggattcatgactggggtg

SEQ ID NO: 857 - DNA, 1454 bp, Bordetella holmesii
attgaacgctggcgggatgctttacacatgcaagtcggacggcagcacggggcttcggcctggtggcgagtggcgaacgggtgagtaatgtatcggaacgtgcccggtagcgggggataactacgcgaaagcgtggctaataccgcatacgccctacgggggaaagcgggggaccttcgggcctcgcactattggagcggccgatatcggattagctagttggtggggtaacggcctaccaaggcgacgatccgtagctggtttgagaggacgaccagtcacactgggactgagacacggcccagactcctacgggaggcagcagtggggaattttggacaatgggggcaaccctgatccagccatcccgcgtgtgcgatgaaggccttcgggttgtaaagcacttttggcaggaaagaaacggcacgggctaatatcctgtgcaactgacggtacctgcagaataagcaccggctaactacgtgccagcagccgcggtaatacgtagggtgcaagcgttaatcggaattactgggcgtaaagcgtgcgcaggcggttcggaaagaaagatgtgaaatcccagggcttaaccttggaactgcatttttaactaccgagctagagtgtgtcagagggaggtggaattccgcgtgtagcagtgaaatgcgtagatatgcggaggaacaccgatggcgaaggcagcctcctgggataacactgacgctcatgcccgaaagtgtggggagcaaacaggattagataccctggtagtccacgccctaaacgatgtcaactagctgttggggccttcgggccttggtagcgcagctaacgcgtgaagttgaccgcctggggagtacggtcgcaagattaaaactcaaaggaattgacggggacccgcacaagcggtggatgatgtggattaattcgatgcaacgcgaaaaaccttacctacccttgacatgtctggaatcccgaagagatttgggagtgctcgcaagagaaccggaacacaggtgctgcatggctgtcgtcagctcgtgtcgtgagatgttgggttaagtcccgcaacgagcgcaacccttgtcattagttgctacgaaagggcactctaatgagactgccggtgacaaaccggaggaaggtggggatgacgtcaagtcctcatggcccttatgggtagggcttcacacgtcatacaatggtcgggacagagggttgccaacccgcgagggggagccaatcccagaaacccggtcgtagtccggatcgcagtctgcaactcgactgcgtgaagtcggaatcgctagtaatcgcggatcagcatgtcgcggtgaatacgttcccgggtcttgtacacaccgcccgtcacaccatgggagtgggttttaccagaagtagttagcctaaccgcaaggggggcgattaccacggtaggattcatgactggggtg

SEQ ID NO: 858 - DNA, 1453 bp, Bordetella parapertussis
attgaacgctggcgggatgctttacacatgcaagtcggacggcagcacgggcttcggcctggtggcgagtggcgaacgggtgagtaatgtatcggaacgtgcccagtagcgggggataactacgcgaaagcgtggctaataccgcatacgccctacgggggaaagcgggggaccttcgggcctcgcactattggagcggccgatatcggattagctagttggtggggtaacggcctaccaaggcgacgatccgtagctggtttgagaggacgaccagccacactgggactgagacacggcccagactcctacgggaggcagcagtggggaattttggacaatgggggcaaccctgatccagccatcccgcgtgtgcgatgaaggccttcgggttgtaaagcacttttggcaggaaagaaacggcacgggctaatatcctgtgcaactgacggtacctgcagaataagcaccggctaactacgtgccagcagccgcggtaatacgtagggtgcaagcgttaatcggaattactgggcgtaaagcgtgcgcaggcggttcggaaagaaagatgtgaaatcccagggcttaaccttggaactgcatttttaactaccgggctagagtgtgtcagagggaggtggaattccgcgtgtagcagtgaaatgcgtagatatgcggaggaacaccgatggcgaaggcagcctcctgggataacactgacgctcatgcacgaaagcgtggggagcaaacaggattagataccctggtagtccacgccctaaacgatgtcaactagctgttggggccttcgggccttggtagcgcagctaacgcgtgaagttgaccgcctggggagtacggtcgcaagattaaaactcaaaggaattgacggggacccgcacaagcggtggatgatgtggattaattcgatgcaacgcgaaaaaccttacctacccttgacatgtctggaatcccgaagagatttgggagtgctcgcaagagaaccggaacacaggtgctgcatggctgtcgtcagctcgtgtcgtgagatgttgggttaagtcccgcaacgagcgcaacccttgtcattagttgctacgaaagggcactctaatgagactgccggtgacaaaccggaggaaggtggggatgacgtcaagtcctcatggcccttatgggtagggcttcacacgtcatacaatggtcgggacagagggtcgccaacccgcgagggggagccaatcccagaaacccgatcgtagtccggatcgcagtctgcaactcgactgcgtgaagtcggaatcgctagtaatcgcggatcagcatgtcgcggtgaatacgttcccgggtcttgtacacaccgcccgtcacaccatgggagtgggttttaccagaagtagttagcctaaccgcaaggggggcgattaccacggtaggattcatgactggggtg

SEQ ID NO: 859 - DNA, 1453 bp, Bordetella pertussis
attgaacgctggcgggatgctttacacatgcaagtcggacggcagcacgggcttcggcctggtggcgagtggcgaacgggtgagtaatgtatcggaacgtgcccagtagcgggggataactacgcgaaagcgtggctaataccgcatacgccctacgggggaaagcgggggaccttcgggcctcgcactattggagcggccgatatcggattagctagttggtggggtaacggcctaccaaggcgacgatccgtagctggtttgagaggacgaccagccacactgggactgagacacggcccagactcctacgggaggcagcagtggggaattttggacaatgggggcaaccctgatccagccatcccgcgtgtgcgatgaaggccttcgggttgtaaagcacttttggcaggaaagaaacggcacgggctaatatcctgtgcaactgacggtacctgcagaataagcaccggctaactacgtgccagcagccgcggtaatacgtagggtgcaagcgttaatcggaattactgggcgtaaagcgtgcgcaggcggttcggaaagaaagatgtgaaatcccagggcttaaccttggaactgcatttttaactaccgggctagagtgtgtcagagggaggtggaattccgcgtgtagcagtgaaatgcgtagatatgcggaggaacaccgatggcgaaggcagcctcctgggataacactgacgctcatgcacgaaagtgtggggagcaaacaggattagataccctggtagtccacgccctaaacgatgtcaactagctgttggggccttcgggccttggtagcgcagctaacgcgtgaagttgaccgcctggggagtacggtcgcaagattaaaactcaaaggaattgacggggacccgcacaagcggtggatgatgtggattaattcgatgcaacgcgaaaaaccttacctacccttgacatgtctggaatcccgaagagatttgggagtgctcgcaagagaaccggaacacaggtgctgcatggctgtcgtcagctcgtgtcgtgagatgttgggttaagtcccgcaacgagcgcaacccttgtcattagttgctacgaaagggcactctaatgagactgccggtgacaaaccggaggaaggtggggatgacgtcaagtcctcatggcccttatgggtagggcttcacacgtcatacaatggtcgggacagagggttgccaacccgcgagggggagccaatcccagaaacccggtcgtagtccggatcgcagtctgcaactcgactgcgtgaagtcggaatcgctagtaatcgcggatcagcatgtcgcggtgaatacgttcccgggtcttgtacacaccgcccgtcacaccatgggagtgggttttaccagaagtagttagcctaaccgcaaggggggcgattaccacggtaggattcatgactggggtg

SEQ ID NO: 860 - DNA, 1453 bp, Bordetella petrii
attgaacgctagcgggatgctttacacatgcaagtcgaacggcagcgcggacttcggtctggcggcgagtggcgaacgggtgagtaatgtatcggaacgtgcccagtagcgggggataactacgcgaaagcgtagctaataccgcatacgccctacgggggaaagcgggggaccttcgggcctcgcactattggagcggccgatatcggattagctagttggtggggtaaaggcctaccaaggcgacgatccgtagctggtttgagaggacgaccagccacactgggactgagacacggcccagactcctacgggaggcagcagtggggaattttggacaatgggggcaaccctgatccagccatcccgcgtgtgcgatgaaggccttcgggttgtaaagcacttttggcaggaaagaaacggctctggctaatacctggggcaactgacggtacctgcagaataagcaccggctaactacgtgccagcagccgcggtaatacgtagggtgcaagcgttaatcggaattactgggcgtaaagcgtgcgcaggcggttcggaaagaaagatgtgaaatcccagggcttaaccttggaactgcatttttaactaccgggctagagtgtgtcagagggaggtggaattccgcgtgtagcagtgaaatgcgtagagatgcggaggaacaccgatggcgaaggcagcctcctgggataacactgacgctcatgcacgaaagcgtggggagcaaacaggattagataccctggtagtccacgccctaaacgatgtcaactagctgttggggacttcggtccttggtagcgcagctaacgcgtgaagttgaccgcctggggagtacggtcgcaagattaaaactcaaaggaattgacggggacccgcacaagcggtggatgatgtggattaattcgatgcaacgcgaaaaaccttacctacccttgacatgtctggaatgccgaagagatttggcagtgctcgcaagagaaccggaacacaggtgctgcatggctgtcgtcagctcgtgtcgtgagatgttgggttaagtcccgcaacgagcgcaacccttgtcattagttgctacgaaagggcactctaatgagactgccggtgacaaaccggaggaaggtggggatgacgtcaagtcctcatggcccttatgggtagggcttcacacgtcatacaatggtcgggacagagggctgccaacccgcaagggggagccaatcccagaaacccgatcgtagtccggatcgcagtctgcaactcgactgcgtgaagtcggaatcgctagtaatcgcggatcagcatgtcgcggtgaatacgttcccgggtcttgtacacaccgcccgtcacaccatgggagtgggttttaccagaagtagttagcctaaccgcaaggggggcgattaccacggtaggattcatgactggggtg

SEQ ID NO: 861 - DNA, 1453 bp, Bordetella pseudohinzii
attgaacgctggcgggatgctttacacatgcaagtcggacggcagcacgggcttcggcctggtggcgagtggcgaacgggtgagtaatgtatcggaacgtgcccagtagcgggggataactacgcgaaagcgtagctaataccgcatacgccctacgggggaaagcgggggaccttcgggcctcgcactattggagcggccgatatcggattagctagttggtggggtaacggctcaccaaggcgacgatccgtagctggtttgagaggacgaccagccacactgggactgagacacggcccagactcctacgggaggcagcagtggggaattttggacaatgggggcaaccctgatccagccatcccgcgtgtgcgatgaaggccttcgggttgtaaagcacttttggcaggaaagaaacggcgcaggctaataccttgcgcaactgacggtacctgcagaataagcaccggctaactacgtgccagcagccgcggtaatacgtagggtgcaagcgttaatcggaattactgggcgtaaagcgtgcgcaggcggttcggaaagaaagatgtgaaatcccagagcttaactttggaactgcatttttaactaccgagctagagtgtgtcagagggaggtggaattccgcgtgtagcagtgaaatgcgtagatatgcggaggaacaccgatggcgaaggcagcctcctgggataacactgacgctcatgcacgaaagcgtggggagcaaacaggattagataccctggtagtccacgccctaaacgatgtcaactagctgttggggccttcgggccttggtagcgcagctaacgcgtgaagttgaccgcctggggagtacggtcgcaagattaaaactcaaaggaattgacggggacccgcacaagcggtggatgatgtggattaattcgatgcaacgcgaaaaaccttacctacccttgacatgtctggaatcccgaagagatttgggagtgctcgcaagagaaccggaacacaggtgctgcatggctgtcgtcagctcgtgtcgtgagatgttgggttaagtcccgcaacgagcgcaacccttgtcattagttgctacgaaagggcactctaatgagactgccggtgacaaaccggaggaaggtggggatgacgtcaagtcctcatggcccttatgggtagggcttcacacgtcatacaatggtcgggacagagggtcgccaacccgcgagggggagccaatcccagaaacccgatcgtagtccggatcgcagtctgcaactcgactgcgtgaagtcggaatcgctagtaatcgcggatcagcatgtcgcggtgaatacgttcccgggtcttgtacacaccgcccgtcacaccatgggagtgggttttaccagaagtagttagcctaaccgcaaggggggcgattaccacggtaggattcatgactggggtg

SEQ ID NO: 862 - DNA, 1411 bp, Bosea lathyri
agcgaacgctggcggcaggcttaacacatgcaagtcgaacgggtatcttcggatactagtggcagacgggtgagtaacacgtgggaacgtacctttcggttcggaataatacagggaaacttgtactaataccggataagcccttcgggggaaagatttatcgccgatagatcggcccgcgtctgattagctagttggtgaggtaatggctcaccaaggcgacgatcagtagctggtctgagaggatgatcagccacactgggactgagacacggcccagactcctacgggaggcagcagtggggaatattggacaatgggcgaaagcctgatccagccatgccgcgtgtgtgatgaaggccttagggttgtaaagcacttttgtccgggaagataatgactgtaccggaagaataagccccggctaacttcgtgccagcagccgcggtaatacgaagggggctagcgttgctcggaatcactgggcgtaaagggcgcgtaggcggactcttaagtcgggggtgaaagcccagggctcaaccctggaattgccttcgatactgagagtcttgagttcggaagaggttggtggaactgcgagtgtagaggtgaaattcgtagatattcgcaagaacaccagtggcgaaggcggccaactggtccgatactgacgctgaggcgcgaaagcgtggggagcaaacaggattagataccctggtagtccacgccgtaaacgatgaatgccagccgttggggtgcatgcacctcagtggcgcagctaacgctttaagcattccgcctggggagtacggtcgcaagattaaaactcaaaggaattgacgggggcccgcacaagcggtggagcatgtggtttaattcgaagcaacgcgcagaaccttaccagcttttgacatgtccggtttgaggaacagagatgtacctcttcagttcggctggccggaacacaggtgctgcatggctgtcgtcagctcgtgtcgtgagatgttgggttaagtcccgcaacgagcgcaaccctcgcccctagttgccatcattaagttgggaactctagggggactgccggtgataagccgcgaggaaggtggggatgacgtcaagtcctcatggcccttacaggctgggctacacacgtgctacaatggcggtgacaatgggcagcgaaagagcgatctggagctaatctcaaaaagccgtctcagttcagattgcactctgcaactcgagtgcatgaaggtggaatcgctagtaatcgtggatcagcatgccacggtgaatacgttcccgggccttgtacacaccgcccgtcacaccatgggagttgggtttacccgaaggcgtcgcgctaaccgcaaggaggcaggcgaccacggtaggctcagcgactggggtg

SEQ ID NO: 863 - DNA, 1409 bp, Bosea lupini
  misc_feature (758)..(758): n is a, c, g, or t
agcgaacgctggcggcaggcttaacacatgcaagtcgaacgggcacttcggtgctagtggcagacgggtgagtaacacgtgggaacgtacctttcggttcggaataattcagggaaacttggactaataccggatacgcccttcgggggaaagatttatcgccgatagatcggcccgcgtctgattagctagttggtgaggtaatggctcaccaaggcgacgatcagtagctggtctgagaggatgatcagccacattgggactgagacacggcccaaactcctacgggaggcagcagtggggaatattggacaatgggcgcaagcctgatccagccatgccgcgtgagtgatgaaggccttagggttgtaaagctcttttgtccgggaagataatgactgtaccggaagaataagccccggctaacttcgtgccagcagccgcggtaatacgaagggggctagcgttgctcggaatcactgggcgtaaagggcgcgtaggcggactcttaagtcgggggtgaaagcccagggctcaaccctggaattgccttcgatactgagagtcttgagttcggaagaggttggtggaactgcgagtgtagaggtgaaattcgtagatattcgcaagaacaccagtggcgaaggcggccaactggtccgatactgacgctgaggcgcgaaagcgtggggagcaaacaggattagataccctggtagtccacgccgtaaacgatgaatgccagccgttggggtgcntgcacttcagtggcgcagctaacgctttaagcattccgcctggggagtacggtcgcaagattaaaactcaaaggaattgacgggggcccgcacaagcggtggagcatgtggtttaattcgaagcaacgcgcagaaccttaccagcttttgacatgtccggtttgatcggcagagatgcctttcttcagttcggctggccggagcacaggtgctgcatggctgtcgtcagctcgtgtcgtgagatgttgggttaagtcccgcaacgagcgcaaccctcgcccctagttgccatcattcagttgggaactctagggggactgccggtgataagccgcgaggaaggtggggatgacgtcaagtcctcatggcccttacaggctgggctacacacgtgctacaatggcggtgacaatgggcagcgaaagggcgacctcgagctaatcccaaaaagccgtctcagttcagattgtactctgcaactcgagtacatgaaggtggaatcgctagtaatcgtggatcagcatgccacggtgaatacgttcccgggccttgtacacaccgcccgtcacaccatgggagttgggtttacccgaaggcgtcgcgctaaccgcaaggaggcaggcgaccacggtaggctcagcgactggggtg

SEQ ID NO: 864 - DNA, 1409 bp, Bosea thiooxidans
agcgaacgctggcggcaggcttaacacatgcaagtcgaacgggcacttcggtgctagtggcagacgggtgagtaacacgtgggaacgtacctttcggttcggaataactcagggaaacttgaactaataccggatacgcccttcgggggaaagatttatcgccgatagatcggcccgcgtctgattagctagttggtgaggtaatggctcaccaaggcgacgatcagtagctggtctgagaggatgatcagccacattgggactgagacacggcccaaactcctacgggaggcagcagtggggaatattggacaatgggcgcaagcctgatccagccatgccgcgtgagtgatgaaggccttagggttgtaaagctcttttgtccgggaagataatgactgtaccggaagaataagccccggctaacttcgtgccagcagccgcggtaatacgaagggggctagcgttgctcggaatcactgggcgtaaagggcgcgtaggcggactcttaagtcgggggtgaaagcccagggctcaaccctggaattgccttcgatactgggagtcttgagttcggaagaggttggtggaactgcgagtgtagaggtgaaattcgtagatattcgcaagaacaccagtggcgaaggcggccaactggtccgatactgacgctgaggcgcgaaagcgtggggagcaaacaggattagataccctggtagtccacgccgtaaacgatgaatgccagccgttggggagcatgctcttcagtggcgcagctaacgctttaagcattccgcctggggagtacggtcgcaagattaaaactcaaaggaattgacgggggcccgcacaagcggtggagcatgtggtttaattcgaagcaacgcgcagaaccttaccagcttttgacatgtccggtttgatcggcagagatgcctttcttcagttcggctggccggaacacaggtgctgcatggctgtcgtcagctcgtgtcgtgagatgttgggttaagtcccgcaacgagcgcaaccctcgcccctagttgccatcattcagttgggaactctagggggactgccggtgataagccgcgaggaaggtggggatgacgtcaagtcctcatggcccttacaggctgggctacacacgtgctacaatggcggtgacaatgggcagcgaaagggcgacctcgagctaatcccaaaaagccgtctcagttcagattgtactctgcaactcgagtacatgaaggtggaatcgctagtaatcgtggatcagcatgccacggtgaatacgttcccgggccttgtacacaccgcccgtcacaccatgggagttgggtttacccgaaggcgtcgcgctaaccgcaaggaggcaggcgaccacggtaggctcagcgactggggtg

SEQ ID NO: 865 - DNA, 1392 bp, Bosea vaviloviae
gcttacacatgcaagtcgaacgggtatcttcggatactagtggcagacgggtgagtaacacgtgggaacgtacctttcggttcggaataattcagggaaacttggactaataccggatacgcccttcgggggaaagatttatcgccgatagatcggcccgcgtctgattagctagttggtgaggtaatggctcaccaaggcgacgatcagtagctggtctgagaggatgatcagccacattgggactgagacacggcccaaactcctacgggaggcagcagtggggaatattggacaatgggcgcaagcctgatccagccatgccgcgtgagtgatgaaggccttagggttgtaaagctcttttgtccgggaagataatgactgtaccggaagaataagccccggctaacttcgtgccagcagccgcggtaatacgaagggggctagcgttgctcggaatcactgggcgtaaagggcgcgtaggcggactcttaagtcgggggtgaaagcccagggctcaaccctggaattgccttcgatactgagagtcttgagttcggaagaggttggtggaactgcgagtgtagaggtgaaattcgtagatattcgcaagaacaccagtggcgaaggcggccaactggtccgatactgacgctgaggcgcgaaagcgtggggagcaaacaggattagataccctggtagtccacgccgtaaacgatgaatgccagccgttggggtgcatgcacctcagtggcgcagctaacgctttaagcattccgcctggggagtacggtcgcaagattaaaactcaaaggaattgacgggggcccgcacaagcggtggagcatgtggtttaattcgaagcaacgcgcagaaccttaccagcttttgacatgtccggtttgaggaacagagatgtacctcttcagttcggctggccggaacacaggtgctgcatggctgtcgtcagctcgtgtcgtgagatgttgggttaagtcccgcaacgagcgcaaccctcgcccctagttgccatcattcagttgggaactctagggggactgccggtgataagccgcgaggaaggtggggatgacgtcaagtcctcatggcccttacaggctgggctacacacgtgctacaatggcggtgacaatgggcagcgaaggagcgatccggtgctaatcccaaaaagccgtctcagttcagattgcactctgcaactcgagtgcatgaaggtggaatcgctagtaatcgtggatcagcatgccacggtgaatacgttcccgggccttgtacacaccgcccgtcacaccatgggagttgggtttacccgaaggcgtcgcgctaaccgcaaggaggcaggcgaccacggtaggctcagcgactggggtg

SEQ ID NO: 866 - DNA, 1409 bp, Bosea vestrisii
agcgaacgctggcggcaggcttaacacatgcaagtcgaacgggcacttcggtgctagtggcagacgggtgagtaacacgtgggaacgtacctttcggttcggaataatccagggaaacttggactaataccggatacgcccttcgggggaaagattcatcgccgatagatcggcccgcgtctgattagctagttggtgaggtaatggctcaccaaggcgacgatcagtagctggtctgagaggatgatcagccacattgggactgagacacggcccaaactcctacgggaggcagcagtggggaatattggacaatgggcgcaagcctgatccagccatgccgcgtgagtgatgaaggccttagggttgtaaagctcttttgtccgggaagataatgactgtaccggaagaataagccccggctaacttcgtgccagcagccgcggtaatacgaagggggctagcgttgctcggaatcactgggcgtaaagggcgcgtaggcggactcttaagtcgggggtgaaagcccagggctcaaccctggaattgccttcgatactgagagtcttgagttcggaagaggttggtggaactgcgagtgtagaggtgaaattcgtagatattcgcaagaacaccagtggcgaaggcggccaactggtccgatactgacgctgaggcgcgaaagcgtggggagcaaacaggattagataccctggtagtccacgccgtaaacgatgaatgccagccgttggggtgcatgcacttcagtggcgcagctaacgctttaagcattccgcctggggagtacggtcgcaagattaaaactcaaaggaattgacgggggcccgcacaagcggtggagcatgtggtttaattcgaagcaacgcgcagaaccttaccagcttttgacatgtccggtttgatcgacagagatgtctttcttcagttcggctggccggaacacaggtgctgcatggctgtcgtcagctcgtgtcgtgagatgttgggttaagtcccgcaacgagcgcaaccctcgcccctagttgccatcattcagttgggaactctagggggactgccggtgataagccgcgaggaaggtggggatgacgtcaagtcctcatggcccttacaggctgggctacacacgtgctacaatggcggtgacaatgggcagcgaaagggcgacctcgagctaatcccaaaaagccgtctcagttcagattgtactctgcaactcgagtacatgaaggtggaatcgctagtaatcgtggatcagcatgccacggtgaatacgttcccgggccttgtacacaccgcccgtcacaccatgggagttgggtttacccgaaggcgtcgcgctaaccgcaaggaggcaggcgaccacggtaggctcagcgactggggtg

SEQ ID NO: 867 - DNA, 1411 bp, Bradyrhizobium arachidis
agcgaacgctggcggcaggcttaacacatgcaagtcgagcgggcgtagcaatacgtcagcggcagacgggtgagtaacgcgtgggaacgtaccttttggttcggaacaacacagggaaacttgtgctaataccggataagcccttacggggaaagatttatcgccgaaagatcggcccgcgtctgattagctagttggtagggtaatggcctaccaaggcgacgatcagtagctggtctgagaggatgatcagccacattgggactgagacacggcccaaactcctacgggaggcagcagtggggaatattggacaatgggggcaaccctgatccagccatgccgcgtgagtgatgaaggccctagggttgtaaagctcttttgtgcgggaagataatgacggtaccgcaagaataagccccggctaacttcgtgccagcagccgcggtaatacgaagggggctagcgttgctcggaatcactgggcgtaaagggtgcgtaggcgggtctttaagtcaggggtgaaatcctggagctcaactccagaactgcctttgatactgaagatcttgagtccgggagaggtgagtggaactgcgagtgtagaggtgaaattcgtagatattcgcaagaacaccagtggcgaaggcggctcactggcccggtactgacgctgaggcacgaaagcgtggggagcaaacaggattagataccctggtagtccacgccgtaaacgatgaatgccagccgttagtgggtttactcactagtggcgcagctaacgctttaagcattccgcctggggagtacggtcgcaagattaaaactcaaaggaattgacgggggcccgcacaagcggtggagcatgtggtttaattcgacgcaacgcgcagaaccttaccagcccttgacatgtccaggaccggtcgcagagacgtgaccttctcttcggagcctggaacacaggtgctgcatggctgtcgtcagctcgtgtcgtgagatgttgggttaagtcccgcaacgagcgcaacccccgtccttagttgctaccatttagttgagcactctaaggagactgccggtgataagccgcgaggaaggtggggatgacgtcaagtcctcatggcccttacgggctgggctacacacgtgctacaatggcggtgacaatgggatgcgaaggggcaacccctagcaaatctcaaaaagccgtctcagttcggattgggctctgcaactcgagcccatgaagttggaatcgctagtaatcgtggatcagcacgccacggtgaatacgttcccgggccttgtacacaccgcccgtcacaccatgggagttggttttacctgaagacggtgcgctaacccgcaagggaggcagccggccacggtagggtcagcgactggggtg

SEQ ID NO: 868 - DNA, 1411 bp, Bradyrhizobium betae
agcgaacgctggcggcaggcttaacacatgcaagtcgagcgggcgtagcaatacgtcagcggcagacgggtgagtaacgcgtgggaacataccttttggttcggaacaacacagggaaacttgtgctaataccggataagcccttacggggaaagatttatcgccgaaagattggcccgcgtctgattagctagttggtagggtaatggcctaccaaggcgacgatcagtagctggtctgagaggatgatcagccacattgggactgagacacggcccaaactcctacgggaggcagcagtggggaatattggacaatgggggcaaccctgatccagccatgccgcgtgagtgatgaaggccctagggttgtaaagctcttttgtgcgggaagataatgacggtaccgcaagaataagccccggctaacttcgtgccagcagccgcggtaatacgaagggggctagcgttgctcggaatcactgggcgtaaagggtgcgtaggcgggtctttaagtcaggggtgaaatcctggagctcaactccagaactgcctttgatactgaagatcttgagttcgggagaggtgagtggaactgcgagtgtagaggtgaaattcgtagatattcgcaagaacaccagtggcgaaggcggctcactggcccgatactgacgctgaggcacgaaagcgtggggagcaaacaggattagataccctggtagtccacgccgtaaacgatgaatgccagccgttagtgggtttactcactagtggcgcagctaacgctttaagcattccgcctggggagtacggtcgcaagattaaaactcaaaggaattgacgggggcccgcacaagcggtggagcatgtggtttaattcgacgcaacgcgcagaaccttaccagcccttgacatgtccaggaccggtcgcagagatgtgaccttctcttcggagcctggaacacaggtgctgcatggctgtcgtcagctcgtgtcgtgagatgttgggttaagtcccgcaacgagcgcaacccccgtccttagttgctaccatttagttgagcactctaaggagactgccggtgataagccgcgaggaaggtggggatgacgtcaagtcctcatggcccttacgggctgggctacacacgtgctacaatggcggtgacaatgggatgctaaggggcgacccttcgcaaatctcaaaaagccgtctcagttcggattgggctctgcaactcgagcccatgaagttggaatcgctagtaatcgtggatcagcacgccacggtgaatacgttcccgggccttgtacacaccgcccgtcacaccatgggagttggttttacctgaaggtagtgcgctaacccgcaagggaggcagctaaccacggtagggtcagcgactggggtg

SEQ ID NO: 869 - DNA, 1411 bp, Bradyrhizobium canariense
agcgaacgctggcggcaggcttaacacatgcaagtcgagcgggcgtagcaatacgtcagcggcagacgggtgagtaacgcgtgggaacataccttttggttcggaacaacacagggaaacttgtgctaataccggataagcccttacggggaaagatttatcgccgaaagattggcccgcgtctgattagctagttggtgaggtaatggctcaccaaggcgacgatcagtagctggtctgagaggatgatcagccacattgggactgagacacggcccaaactcctacgggaggcagcagtggggaatattggacaatgggggcaaccctgatccagccatgccgcgtgagtgatgaaggccctagggttgtaaagctcttttgtgcgggaagataatgacggtaccgcaagaataagccccggctaacttcgtgccagcagccgcggtaatacgaagggggctagcgttgctcggaatcactgggcgtaaagggtgcgtaggcgggtctttaagtcaggggtgaaatcctggagctcaactccagaactgcctttgatactgaggatcttgagttcgggagaggtgagtggaactgcgagtgtagaggtgaaattcgtagatattcgcaagaacaccagtggcgaaggcggctcactggcccgatactgacgctgaggcacgaaagcgtggggagcaaacaggattagataccctggtagtccacgccgtaaacgatgaatgccagccgttagtgggtttactcactagtggcgcagctaacgctttaagcattccgcctggggagtacggtcgcaagattaaaactcaaaggaattgacgggggcccgcacaagcggtggagcatgtggtttaattcgacgcaacgcgcagaaccttaccagcccttgacatgtccaggaccggtcgcagagatgtgaccttctcttcggagcctggaacacaggtgctgcatggctgtcgtcagctcgtgtcgtgagatgttgggttaagtcccgcaacgagcgcaacccccgtccttagttgctaccatttagttgagcactctaaggagactgccggtgataagccgcgaggaaggtggggatgacgtcaagtcctcatggcccttacgggctgggctacacacgtgctacaatggcggtgacaatgggacgctaaggggcaacccttcgcaaatctcaaaaagccgtctcagttcggattgggctctgcaactcgagcccatgaagttggaatcgctagtaatcgtggatcagcacgccacggtgaatacgttcccgggccttgtacacaccgcccgtcacaccatgggagttggttttacctgaagacggtgcgctaaccagcaatggaggcagccggccacggtagggtcagcgactggggtg

SEQ ID NO: 870 - DNA, 1411 bp, Bradyrhizobium daqingense
agcgaacgctggcggcaggcttaacacatgcaagtcgagcgggcgtagcaatacgtcagcggcagacgggtgagtaacgcgtgggaacgtaccttttggttcggaacaacacagggaaacttgtgctaataccggataagcccttacggggaaagatttatcgccgaaagatcggcccgcgtctgattagctagttggtgaggtaacggctcaccaaggcgacgatcagtagctggtctgagaggatgatcagccacattgggactgagacacggcccaaactcctacgggaggcagcagtggggaatattggacaatgggggcaaccctgatccagccatgccgcgtgagtgatgaaggccctagggttgtaaagctcttttgtgcgggaagataatgacggtaccgcaagaataagccccggctaacttcgtgccagcagccgcggtaatacgaagggggctagcgttgctcggaatcactgggcgtaaagggtgcgtaggcgggtctttaagtcaggggtgaaatcctggagctcaactccagaactgcctttgatactgaagatcttgagttcgggagaggtgagtggaactgcgagtgtagaggtgaaattcgtagatattcgcaagaacaccagtggcgaaggcggctcactggcccgatactgacgctgaggcacgaaagcgtggggagcaaacaggattagataccctggtagtccacgccgtaaacgatgaatgccagccgttagtgggtttactcactagtggcgcagctaacgctttaagcattccgcctggggagtacggtcgcaagattaaaactcaaaggaattgacgggggcccgcacaagcggtggagcatgtggtttaattcgacgcaacgcgcagaaccttaccagcccttgacatgtccaggaccggtcgcagagatgtgaccctctcttcggagcctggaacacaggtgctgcatggctgtcgtcagctcgtgtcgtgagatgttgggttaagtcccgcaacgagcgcaacccccgtccttagttgctaccatttagttgagcactctaaggagactgccggtgataagccgcgaggaaggtggggatgacgtcaagtcctcatggcccttacgggctgggctacacacgtgctacaatggcggtgacaatgggatgctaaggggcgacccttcgcaaatctcaaaaagccgtctcagttcggattgggctctgcaactcgagcccatgaagttggaatcgctagtaatcgtggatcagcacgccacggtgaatacgttcccgggccttgtacacaccgcccgtcacaccatgggagttggctttacctgaagacggtgcgctaaccagcaatggaggcagccggccacggtagggtcagcgactggggtg

SEQ ID NO: 871 - DNA, 1411 bp, Bradyrhizobium diazoefficiens
agcgaacgctggcggcaggcttaacacatgcaagtcgagcgggcgtagcaatacgtcagcggcagacgggtgagtaacgcgtgggaacgtaccttttggttcggaacaacacagggaaacttgtgctaataccggataagcccttacggggaaagatttatcgccgaaagatcggcccgcgtctgattagctagttggtagggtaacggcctaccaaggcgacgatcagtagctggtctgagaggatgatcagccacattgggactgagacacggcccaaactcctacgggaggcagcagtggggaatattggacaatgggggcaaccctgatccagccatgccgcgtgagtgatgaaggccctagggttgtaaagctcttttgtgcgggaagataatgacggtaccgcaagaataagccccggctaacttcgtgccagcagccgcggtaatacgaagggggctagcgttgctcggaatcactgggcgtaaagggtgcgtaggcgggtctttaagtcaggggtgaaatcctggagctcaactccagaactgcctttgatactgaagatcttgagttcgggagaggtgagtggaactgcgagtgtagaggtgaaattcgtagatattcgcaagaacaccagtggcgaaggcggctcactggcccgatactgacgctgaggcacgaaagcgtggggagcaaacaggattagataccctggtagtccacgccgtaaacgatgaatgccagccgttagtgggtttactcactagtggcgcagctaacgctttaagcattccgcctggggagtacggtcgcaagattaaaactcaaaggaattgacgggggcccgcacaagcggtggagcatgtggtttaattcgacgcaacgcgcagaaccttaccagcccttgacatgtccaggaccggtcgcagagatgtgaccttctcttcggagcctggaacacaggtgctgcatggctgtcgtcagctcgtgtcgtgagatgttgggttaagtcccgcaacgagcgcaacccccgtccttagttgctaccatttagttgagcactctaaggagactgccggtgataagccgcgaggaaggtggggatgacgtcaagtcctcatggcccttacgggctgggctacacacgtgctacaatggcggtgacaatgggatgctaaggggcgacccttcgcaaatctcaaaaagccgtctcagttcggattgggctctgcaactcgagcccatgaagttggaatcgctagtaatcgtggatcagcacgccacggtgaatacgttcccgggccttgtacacaccgcccgtcacaccatgggagttggctttacctgaagacggtgcgctaaccagcaatggaggcagccggccacggtagggtcagcgactggggtg

SEQ ID NO: 872 - DNA, 1411 bp, Bradyrhizobium elkanii
agcgaacgctggcggcaggcttaacacatgcaagtcgagcgggcatagcaatatgtcagcggcagacgggtgagtaacgcgtgggaacgtaccttttggttcggaacaactgagggaaacttcagctaataccggataagcccttacggggaaagatttatcgccgaaagatcggcccgcgtctgattagctagttggtgaggtaatggctcaccaaggcgacgatcagtagctggtctgagaggatgatcagccacattgggactgagacacggcccaaactcctacgggaggcagcagtggggaatattggacaatgggcgcaagcctgatccagccatgccgcgtgagtgatgaaggccctagggttgtaaagctcttttgtgcgggaagataatgacggtaccgcaagaataagccccggctaacttcgtgccagcagccgcggtaatacgaagggggctagcgttgctcggaatcactgggcgtaaagggtgcgtaggcgggtctttaagtcaggggtgaaatcctggagctcaactccagaactgcctttgatactgaagatcttgagttcgggagaggtgagtggaactgcgagtgtagaggtgaaattcgtagatattcgcaagaacaccagtggcgaaggcggctcactggcccgatactgacgctgaggcacgaaagcgtggggagcaaacaggattagataccctggtagtccacgccgtaaacgatgaatgccagccgttagtgggtttactcactagtggcgcagctaacgctttaagcattccgcctggggagtacggtcgcaagattaaaactcaaaggaattgacgggggcccgcacaagcggtggagcatgtggtttaattcgacgcaacgcgcagaaccttaccagcccttgacatcccggtcgcggactccagagacggagttcttcagttcggctggaccggagacaggtgctgcatggctgtcgtcagctcgtgtcgtgagatgttgggttaagtcccgcaacgagcgcaacccccgtccttagttgctaccatttagttgagcactctaaggagactgccggtgataagccgcgaggaaggtggggatgacgtcaagtcctcatggcccttacgggctgggctacacacgtgctacaatggcggtgacaatgggatgctaaggggcgacccttcgcaaatctcaaaaagccgtctcagttcggattgggctctgcaactcgagcccatgaagttggaatcgctagtaatcgtggatcagcacgccacggtgaatacgttcccgggccttgtacacaccgcccgtcacaccatgggagttggttttacctgaagacggtgcgctaaccgaaagggggcagccggccacggtagggtcagcgactggggtg

SEQ ID NO: 873 - DNA, 1335 bp, Bradyrhizobium erythrophlei
tcgagcgggcgtagcaatacgtcagcggcagacgggtgagtaacgcgtgggaacgtaccttttggttcggaacaacacagggaaacttgtgctaataccggataagcccttacggggaaagatttatcgccgaaagatcggcccgcgtctgattagctagttggtgaggtaatggctcaccaaggcgacgatcagtagctggtctgagaggatgatcagccacattgggactgagacacggcccaaactcctacgggaggcagcagtggggaatattggacaatgggcgcaagcctgatccagccatgccgcgtgagtgatgaaggccctagggttgtaaagctcttttgtgcgggaagataatgacggtaccgcaagaataagccccggctaacttcgtgccagcagccgcggtaatacgaagggggctagcgttgctcggaatcactgggcgtaaagggtgcgtaggcgggtctttaagtcaggggtgaaatcctggagctcaactccagaactgcctttgatactgaagatcttgagttcgggagaggtgagtggaactgcgagtgtagaggtgaaattcgtagatattcgcaagaacaccagtggcgaaggcggctcactggcccgatactgacgctgaggcacgaaagcgtggggagcaaacaggattagataccctggtagtccacgccgtaaacgatgaatgccagccgttagtgggtttactcactagtggcgcagctaacgctttaagcattccgcctggggagtacggtcgcaagattaaaactcaaaggaattgacgggggcccgcacaagcggtggagcatgtggtttaattcgacgcaacgcgcagaaccttaccagcccttgacatcccggtcgcggactccagagacggagttcttcagttcggctggaccggagacaggtgctgcatggctgtcgtcagctcgtgtcgtgagatgttgggttaagtcccgcaacgagcgcaacccccgtccttagttgctaccatttagttgagcactctaaggagactgccggtgataagccgcgaggaaggtggggatgacgtcaagtcctcatggcccttacgggctgggctacacacgtgctacaatggcggtgacaatgggatgctaaggggcgacccttcgcaaatctcaaaaagccgtctcagttcggattgggctctgcaactcgagcccatgaagttggaatcgctagtaatcgtggatcagcacgccacggtgaatacgttcccgggccttgtacacaccgcccgtcacaccatgggagttggttttacctgaagacggtgcgctaacc

SEQ ID NO: 874 - DNA, 1262 bp, Bradyrhizobium guangdongense
gggaacgtaccttttggttcggaacaacacagggaaacttgtgctaataccggataagcccttacggggaaagatttatcgccgaaagatcggcccgcgtctgattagctagttggtagggtaatggcctaccaaggcgacgatcagtagctggtctgagaggatgatcagccacattgggactgagacacggcccaaactcctacgggaggcagcagtggggaatattggacaatgggggcaaccctgatccagccatgccgcgtgagtgatgaaggccctagggttgtaaagctcttttgtgcgggaagataatgacggtaccgcaagaataagccccggctaacttcgtgccagcagccgcggtaatacgaagggggctagcgttgctcggaatcactgggcgtaaagggtgcgtaggcgggtttttaagtcaggggtgaaatcctggagctcaactccagaactgcctttgatactgaagatcttgagtccgggagaggtgagtggaactgcgagtgtagaggtgaaattcgtagatattcgcaagaacaccagtggcgaaggcggctcactggcccggtactgacgctgaggcacgaaagcgtggggagcaaacaggattagataccctggtagtccacgccgtaaacgatgaatgccagccgttagtgggtttactcactagtggcgcagctaacgctttaagcattccgcctggggagtacggtcgcaagattaaaactcaaaggaattgacgggggcccgcacaagcggtggagcatgtggtttaattcgacgcaacgcgcagaaccttaccagcccttgacatgtccaggaccggtcgcagagatgtgaccctctcttcggagcctggaacacaggtgctgcatggctgtcgtcagctcgtgtcgtgagatgttgggttaagtcccgcaacgagcgcaacccccgtccttagttgctaccatttagttgagcactctaaggagactgccggtgataagccgcgaggaaggtggggatgacgtcaagtcctcatggcccttacgggctgggctacacacgtgctacaatggcggtgacaatgggatgctaaggggcgacccttcgcaaatctcaaaaagccgtctcagttcggattgggctctgcaactcgagcccatgaagttggaatcgctagtaatcgtggatcagcacgccacggtgaatacgttcccgggccttgtacacaccgcccgtcacaccatgggagttggttt

SEQ ID NO: 875 - DNA, 1411 bp, Bradyrhizobium huanghuaihaiense
agcgaacgctggcggcaggcttaacacatgcaagtcgagcgggcgtagcaatacgtcagcggcagacgggtgagtaacgcgtgggaacgtaccttttggttcggaacaacacagggaaacttgtgctaataccggataagcccttacggggaaagatttatcgccgaaagatcggcccgcgtctgattagctagttggtagggtaatggcctaccaaggcgacgatcagtagctggtctgagaggatgatcagccacattgggactgagacacggcccaaactcctacgggaggcagcagtggggaatattggacaatgggggcaaccctgatccagccatgccgcgtgagtgatgaaggccctagggttgtaaagctcttttgtgcgggaagataatgacggtaccgcaagaataagccccggctaacttcgtgccagcagccgcggtaatacgaagggggctagcgttgctcggaatcactgggcgtaaagggtgcgtaggcgggtctttaagtcaggggtgaaatcctggagctcaactccagaactgcctttgatactgaagatcttgagttcgggagaggtgagtggaactgcgagtgtagaggtgaaattcgtagatattcgcaagaacaccagtggcgaaggcggctcactggcccgatactgacgctgaggcacgaaagcgtggggagcaaacaggattagataccctggtagtccacgccgtaaacgatgaatgccagccgttagtgggtttactcactagtggcgcagctaacgctttaagcattccgcctggggagtacggtcgcaagattaaaactcaaaggaattgacgggggcccgcacaagcggtggagcatgtggtttaattcgacgcaacgcgcagaaccttaccagcccttgacatgtccaggaccggtcgcagagacgtgaccttctcttcggagcctggaacacaggtgctgcatggctgtcgtcagctcgtgtcgtgagatgttgggttaagtcccgcaacgagcgcaacccccgtccttagttgctaccatttagttgagcactctaaggagactgccggtgataagccgcgaggaaggtggggatgacgtcaagtcctcatggcccttacgggctgggctacacacgtgctacaatggcggtgacaatgggatgcgaaggggcaacccctagcaaatctcaaaaagccgtctcagttcggattgggctctgcaactcgagcccatgaagttggaatcgctagtaatcgtggatcagcacgccacggtgaatacgttcccgggccttgtacacaccgcccgtcacaccatgggagttggttttacctgaagacggtgcgctaacccgcaagggaggcagccggccacggtagggtcagcgactggggtg

SEQ ID NO: 876 - DNA, 1411 bp, Bradyrhizobium icense
agcgaacgctggcggcaggcttaacacatgcaagtcgagcgggcgtagcaatacgtcagcggcagacgggtgagtaacgcgtgggaacgtaccttttggttcggaacaacccagggaaacttgggctaataccggataagcccttacggggaaagatttatcgccgaaagatcggcccgcgtctgattagctagttggtgaggtaatggctcaccaaggcgacgatcagtagctggtctgagaggatgatcagccacattgggactgagacacggcccaaactcctacgggaggcagcagtggggaatattggacaatgggcgcaagcctgatccagccatgccgcgtgagtgatgaaggccctagggttgtaaagctcttttgtgcgggaagataatgacggtaccgcaagaataagccccggctaacttcgtgccagcagccgcggtaatacgaagggggctagcgttgctcggaatcactgggcgtaaagggtgcgtaggcgggtctttaagtcaggggtgaaatcctggagctcaactccagaactgcctttgatactgaagatcttgagttcgggagaggtgagtggaactgcgagtgtagaggtgaaattcgtagatattcgcaagaacaccagtggcgaaggcggctcactggcccgatactgacgctgaggcacgaaagcgtggggagcaaacaggattagataccctggtagtccacgccgtaaacgatgaatgccagccgttagtgggtttactcactagtggcgcagctaacgctttaagcattccgcctggggagtacggtcgcaagattaaaactcaaaggaattgacgggggcccgcacaagcggtggagcatgtggtttaattcgacgcaacgcgcagaaccttaccagcccttgacatcccggtcgcggactccagagacggagttcttcagttcggctggaccggagacaggtgctgcatggctgtcgtcagctcgtgtcgtgagatgttgggttaagtcccgcaacgagcgcaacccccgtccttagttgctaccatttagttgagcactctaaggagactgccggtgataagccgcgaggaaggtggggatgacgtcaagtcctcatggcccttacgggctgggctacacacgtgctacaatggcggtgacaatgggatgctaaggggcgacccttcgcaaatctcaaaaagccgtctcagttcggattgggctctgcaactcgagcccatgaagttggaatcgctagtaatcgtggatcagcacgccacggtgaatacgttcccgggccttgtacacaccgcccgtcacaccatgggagttggttttacctgaagacggtgcgctaaccgaaagggggcagccggccacggtagggtcagcgactggggtg

SEQ ID NO: 877 - DNA, 1411 bp, Bradyrhizobium japonicum
agcgaacgctggcggcaggcttaacacatgcaagtcgagcgggcgtagcaatacgtcagcggcagacgggtgagtaacgcgtgggaacgtaccttttggttcggaacaacacagggaaacttgtgctaataccggataagcccttacggggaaagatttatcgccgaaagatcggcccgcgtctgattagctagttggtgaggtaatggctcaccaaggcgacgatcagtagctggtctgagaggatgatcagccacattgggactgagacacggcccaaactcctacgggaggcagcagtggggaatattggacaatgggggcaaccctgatccagccatgccgcgtgagtgatgaaggccctagggttgtaaagctcttttgtgcgggaagataatgacggtaccgcaagaataagccccggctaacttcgtgccagcagccgcggtaatacgaagggggctagcgttgctcggaatcactgggcgtaaagggtgcgtaggcgggtctttaagtcaggggtgaaatcctggagctcaactccagaactgcctttgatactgaggatcttgagttcgggagaggtgagtggaactgcgagtgtagaggtgaaattcgtagatattcgcaagaacaccagtggcgaaggcggctcactggcccgatactgacgctgaggcacgaaagcgtggggagcaaacaggattagataccctggtagtccacgccgtaaacgatgaatgccagccgttagtgggtttactcactagtggcgcagctaacgctttaagcattccgcctggggagtacggtcgcaagattaaaactcaaaggaattgacgggggcccgcacaagcggtggagcatgtggtttaattcgacgcaacgcgcagaaccttaccagcccttgacatgtccaggaccggtcgcagagatgtgaccttctcttcggagcctggagcacaggtgctgcatggctgtcgtcagctcgtgtcgtgagatgttgggttaagtcccgcaacgagcgcaacccccgtccttagttgctaccatttagttgagcactctaaggagactgccggtgataagccgcgaggaaggtggggatgacgtcaagtcctcatggcccttacgggctgggctacacacgtgctacaatggcggtgacaatgggatgctaaggggcgacccttcgcaaatctcaaaaagccgtctcagttcggattgggctctgcaactcgagcccatgaagttggaatcgctagtaatcgtggatcagcacgccacggtgaatacgttcccgggccttgtacacaccgcccgtcacaccatgggagttggttttacctgaagacggtgcgctaacccgcaagggaggcagccggccacggtagggtcagcgactggggtg

SEQ ID NO: 878 - DNA, 1411 bp, Bradyrhizobium jicamae
agcgaacgctggcggcaggcttaacacatgcaagtcgagcgggcgtagcaatacgtcagcggcagacgggtgagtaacgcgtgggaacgtaccttttggttcggaacaacacagggaaacttgtgctaataccggataagcccttacggggaaagatttatcgccgaaagatcggcccgcgtctgattagctagttggtgaggtaatggctcaccaaggcgacgatcagtagctggtctgagaggatgatcagccacattgggactgagacacggcccaaactcctacgggaggcagcagtggggaatattggacaatgggcgcaagcctgatccagccatgccgcgtgagtgatgaaggccctagggttgtaaagctcttttgtgcgggaagataatgacggtaccgcaagaataagccccggctaacttcgtgccagcagccgcggtaatacgaagggggctagcgttgctcggaatcactgggcgtaaagggtgcgtaggcgggtctttaagtcaggggtgaaatcctggagctcaactccagaactgcctttgatactgaagatcttgagttcgggagaggtgagtggaactgcgagtgtagaggtgaaattcgtagatattcgcaagaacaccagtggcgaaggcggctcactggcccgatactgacgctgaggcacgaaagcgtggggagcaaacaggattagataccctggtagtccacgccgtaaacgatgaatgccagccgttagtgggtttactcactagtggcgcagctaacgctttaagcattccgcctggggagtacggtcgcaagattaaaactcaaaggaattgacgggggcccgcacaagcggtggagcatgtggtttaattcgacgcaacgcgcagaaccttaccagcccttgacatcccggtcgcggactccagagacggagttcttcagttcggctggaccggagacaggtgctgcatggctgtcgtcagctcgtgtcgtgagatgttgggttaagtcccgcaacgagcgcaacccccgtccttagttgctaccatttagttgagcactctaaggagactgccggtgataagccgcgaggaaggtggggatgacgtcaagtcctcatggcccttacgggctgggctacacacgtgctacaatggcggtgacaatgggatgctaaggggcgacccttcgcaaatctcaaaaagccgtctcagttcggattgggctctgcaactcgagcccatgaagttggaatcgctagtaatcgtggatcagcacgccacggtgaatacgttcccgggccttgtacacaccgcccgtcacaccatgggagttggttttacctgaagacggtgcgctaaccgaaagggggcagccggccacggtagggtcagcgactggggtg

SEQ ID NO: 879 - DNA, 1411 bp, Bradyrhizobium lablabi
agcgaacgctggcggcaggcttaacacatgcaagtcgagcgggcgtagcaatacgtcagcggcagacgggtgagtaacgcgtgggaacgtaccttttggttcggaacaacccagggaaacttgggctaataccggataagcccttacggggaaagatttatcgccgaaagatcggcccgcgtctgattagctagttggtgaggtaacggctcaccaaggcgacgatcagtagctggtctgagaggatgatcagccacattgggactgagacacggcccaaactcctacgggaggcagcagtggggaatattggacaatgggcgcaagcctgatccagccatgccgcgtgagtgatgaaggccctagggttgtaaagctcttttgtgcgggaagataatgacggtaccgcaagaataagccccggctaacttcgtgccagcagccgcggtaatacgaagggggctagcgttgctcggaatcactgggcgtaaagggtgcgtaggcgggtctttaagtcaggggtgaaatcctggagctcaactccagaactgcctttgatactgaagatcttgagttcgggagaggtgagtggaactgcgagtgtagaggtgaaattcgtagatattcgcaagaacaccagtggcgaaggcggctcactggcccgatactgacgctgaggcacgaaagcgtggggagcaaacaggattagataccctggtagtccacgccgtaaacgatgaatgccagccgttagtgggtttactcactagtggcgcagctaacgctttaagcattccgcctggggagtacggtcgcaagattaaaactcaaaggaattgacgggggcccgcacaagcggtggagcatgtggtttaattcgacgcaacgcgcagaaccttaccagcccttgacatcccggtcgcggactccagagacggagttcttcagttcggctggaccggagacaggtgctgcatggctgtcgtcagctcgtgtcgtgagatgttgggttaagtcccgcaacgagcgcaacccccgtccttagttgctaccatttagttgagcactctaaggagactgccggtgataagccgcgaggaaggtggggatgacgtcaagtcctcatggcccttacgggctgggctacacacgtgctacaatggcggtgacaatgggatgctaaggggcgacccttcgcaaatctcaaaaagccgtctcagttcggattgggctctgcaactcgagcccatgaagttggaatcgctagtaatcgtggatcagcacgccacggtgaatacgttcccgggccttgtacacaccgcccgtcacaccatgggagttggttttacctgaagacggtgcgctaaccgaaagggggcagccggccacggtagggtcagcgactggggtg

SEQ ID NO: 880 - DNA, 1411 bp, Bradyrhizobium liaoningense
agcgaacgctggcggcaggcttaacacatgcaagtcgagcgggcgtagcaatacgtcagcggcagacgggtgagtaacgcgtgggaacgtaccttttggttcggaacaacacagggaaacttgtgctaataccggataagcccttacggggaaagatttatcgccgaaagatcggcccgcgtctgattagctagttggtgaggtaatggctcaccaaggcgacgatcagtagctggtctgagaggatgatcagccacattgggactgagacacggcccaaactcctacgggaggcagcagtggggaatattggacaatgggggcaaccctgatccagccatgccgcgtgagtgatgaaggccctagggttgtaaagctcttttgtgcgggaagataatgacggtaccgcaagaataagccccggctaacttcgtgccagcagccgcggtaatacgaagggggctagcgttgctcggaatcactgggcgtaaagggtgcgtaggcgggtctttaagtcaggggtgaaatcctggagctcaactccagaactgcctttgatactgaagatcttgagttcgggagaggtgagtggaactgcgagtgtagaggtgaaattcgtagatattcgcaagaacaccagtggcgaaggcggctcactggcccgatactgacgctgaggcacgaaagcgtggggagcaaacaggattagataccctggtagtccacgccgtaaacgatgaatgccagccgttagtgggtttactcactagtggcgcagctaacgctttaagcattccgcctggggagtacggtcgcaagattaaaactcaaaggaattgacgggggcccgcacaagcggtggagcatgtggtttaattcgacgcaacgcgcagaaccttaccagcccttgacatgtccaggaccggtcgcagagatgtgaccctctcttcggagcctggaacacaggtgctgcatggctgtcgtcagctcgtgtcgtgagatgttgggttaagtcccgcaacgagcgcaacccccgtccttagttgctaccatttagttgagcactctaaggagactgccggtgataagccgcgaggaaggtggggatgacgtcaagtcctcatggcccttacgggctgggctacacacgtgctacaatggcggtgacaatgggatgctaaggggcgacccttcgcaaatctcaaaaagccgtctcagttcggattgggctctgcaactcgagcccatgaagttggaatcgctagtaatcgtggatcagcacgccacggtgaatacgttcccgggccttgtacacaccgcccgtcacaccatgggagttggttttacctgaagacggtgcgctaacccgcaagggaggcagccggccacggtagggtcagcgactggggtg

SEQ ID NO: 881 - DNA, 1411 bp, Bradyrhizobium lupini
agcgaacgctggcggcaggcttaacacatgcaagtcgagcgggcgtagcaatacgtcagcggcagacgggtgagtaacgcgtgggaacgtaccttttggttcggaacaacacagggaaacttgtgctaataccggataagcccttacggggaaagatttatcgccgaaagatcggcccgcgtctgattagctagttggtgaggtaatggctcaccaaggcgacgatcagtagctggtctgagaggatgatcagccacattgggactgagacacggcccaaactcctacgggaggcagcagtggggaatattggacaatgggggcaaccctgatccagccatgccgcgtgagtgatgaaggccctagggttgtaaagctcttttgtgcgggaagataatgacggtaccgcaagaataagccccggctaacttcgtgccagcagccgcggtaatacgaagggggctagcgttgctcggaatcactgggcgtaaagggtgcgtaggcgggtctttaagtcaggggtgaaatcctggagctcaactccagaactgcctttgatactgaggatcttgagttcgggagaggtgagtggaactgcgagtgtagaggtgaaattcgtagatattcgcaagaacaccagtggcgaaggcggctcactggcccgatactgacgctgaggcacgaaagcgtggggagcaaacaggattagataccctggtagtccacgccgtaaacgatgaatgccagccgttagtgggtttactcactagtggcgcagctaacgctttaagcattccgcctggggagtacggtcgcaagattaaaactcaaaggaattgacgggggcccgcacaagcggtggagcatgtggtttaattcgacgcaacgcgcagaaccttaccagcccttgacatgtccaggaccggtcgcagagatgtgaccttctcttcggagcctggagcacaggtgctgcatggctgtcgtcagctcgtgtcgtgagatgttgggttaagtcccgcaacgagcgcaacccccgtccttagttgctaccatttagttgagcactctaaggagactgccggtcataagccgcgaggaaggtggggatgacgtcaagtcctcatggcccttacgggctgggctacacacgtgctacaatggcggtgacaatgggatgctaaggggcgacccttcgcaaatctcaaaaagccgtctcagttcggattgggctctgcaactcgagcccatgaagttggaatcgctagtaatcgtggatcagcacgccacggtgaatacgttcccgggccttgtacacaccgcccgtcacaccatgggagttggttttacctgaagacggtgcgctaacccgcaagggaggcagccggccacggtagggtcagcgactggggtg

SEQ ID NO: 882 - DNA, 1413 bp, Bradyrhizobium neotropicale
agcgaacgctggcggcaggcttaacacatgcaagtcgagcgggcgtagcaatacgtcagcggcagacgggtgagtaacgcgtgggaacgtaccttttggttcggaacaacacagggaaacttgtgctaataccggataagcccttacggggaaagatttatcgccgaaagatcggcccgcgtctgattagctagttggtgaggtaatggctcaccaaggcgacgatcagtagctggtctgagaggatgatcagccacattgggactgagacacggcccaaactcctacgggaggcagcagtggggaatattggacaatgggggcaaccctgatccagccatgccgcgtgagtgatgaaggccctagggttgtaaagctcttttgtgcgggaagataatgacggtaccgcaagaataagccccggctaacttcgtgccagcagccgcggtaatacgaagggggctagcgttgctcggaatcactgggcgtaaagggtgcgtaggcgggtctttaagtcaggggtgaaatcctggagctcaactccagaactgcctttgatactgaagatcttgagttcgggagaggtgagtggaactgcgagtgtagaggtgaaattcgtagatattcgcaagaacaccagtggcgaaggcggctcactggcccgatactgacgctgaggcacgaaagcgtggggagcaaacaggattagataccctggtagtccacgccgtaaacgatgaatgccagccgttagtgggtttactcactagtggcgcagctaacgctttaagcattccgcctggggagtacggtcgcaagattaaaactcaaaggaattgacgggggcccgcacaagcggtggagcatgtggtttaattcgacgcaacgcgcagaaccttaccagcccttgacatcccggtcgcggactccagagacggagttcttcagttcggctggaccggagacaggtgctgcatggctgtcgtcagctcgtgtcgtgagatgttgggttaagtcccgcaacgagcgcaacccccgtccttagttgctaccatttagttgagcactctaaggagactgccggtgataagccgcgaggaaggtggggatgacgtcaagtcctcatggcccttacgggctgggctacacacgtgctacaatggcggtgacaatgggaagcgaagacgcaagtcctagcaaatctcaaaaagccgtctcagttcggattgggctctgcaactcgagcccatgaagttggaatcgctagtaatcgtggatcagcacgccacggtgaatacgttcccgggccttgtacacaccgcccgtcacaccatgggagttggctttacctgaagacggtgcgctaaccagcaatggaggcagccggccacggtagggtcagcgactggggtg

SEQ ID NO: 883 - DNA, 1411 bp, Bradyrhizobium oligotrophicum
agcgaacgctggcggcaggcttaacacatgcaagtcgagcgggcgtagcaatacgtcagcggcagacgggtgagtaacgcgtgggaacgtaccttttggttcggaacaacacagggaaacttgtgctaataccggataagcccttacggggaaagatttatcgccgaaagatcggcccgcgtctgattagctagttggtggggtaatggcccaccaaggcgacgatcagtagctggtctgagaggatgatcagccacattgggactgagacacggcccaaactcctacgggaggcagcagtggggaatattggacaatgggggcaaccctgatccagccatgccgcgtgagtgatgaaggccctagggttgtaaagctcttttgtgcgggaagataatgacggtaccgcaagaataagccccggctaacttcgtgccagcagccgcggtaatacgaagggggctagcgttgctcggaatcactgggcgtaaagggtgcgtaggcgggtctttaagtcaggggtgaaatcctggagctcaactccagaactgcctttgatactgaagatcttgagttcgggagaggtgagtggaactgcgagtgtagaggtgaaattcgtagatattcgcaagaacaccagtggcgaaggcggctcactggcccgatactgacgctgaggcacgaaagcgtggggagcaaacaggattagataccctggtagtccacgccgtaaacgatgaatgccagccgttggtgggtttactcaccagtggcgcagctaacgctttaagcattccgcctggggagtacggtcgcaagattaaaactcaaaggaattgacgggggcccgcacaagcggtggagcatgtggtttaattcgacgcaacgcgcagaaccttaccagcccttgacatgtttgggaccggtcgcagagatgtgaccttctcttcggagcccgaaacacaggtgctgcatggctgtcgtcagctcgtgtcgtgagatgttgggttaagtcccgcaacgagcgcaacccccgtccttagttgctaccatttagttgagcactctaaggagactgccggtgataagccgcgaggaaggtggggatgacgtcaagtcctcatggcccttacgggctgggctacacacgtgctacaatggcggtgacagtgggaagctaaggggcaacccttcgcaaatctcaaaaagccgtctcagttcggattgggctctgcaactcgagcccatgaagttggaatcgctagtaatcgtggatcagcacgccacggtgaatacgttcccgggccttgtacacaccgcccgtcacaccatgggagttggctttacctgaaggcggtgcgctaaccagcaatggaggcagccgaccacggtagggtcagcgactggggtg

SEQ ID NO: 884 - DNA, 1411 bp, Bradyrhizobium ottawaense
agcgaacgctggcggcaggcttaacacatgcaagtcgagcgggcgtagcaatacgtcagcggcagacgggtgagtaacgcgtgggaacataccttttggttcggaacaacacagggaaacttgtgctaataccggataagcccttacggggaaagatttatcgccgaaagattggcccgcgtctgattagctagttggtgaggtaatggctcaccaaggcgacgatcagtagctggtctgagaggatgatcagccacattgggactgagacacggcccaaactcctacgggaggcagcagtggggaatattggacaatgggggcaaccctgatccagccatgccgcgtgagtgatgaaggccctagggttgtaaagctcttttgtgcgggaagataatgacggtaccgcaagaataagccccggctaacttcgtgccagcagccgcggtaatacgaagggggctagcgttgctcggaatcactgggcgtaaagggtgcgtaggcgggtctttaagtcaggggtgaaatcctggagctcaactccagaactgcctttgatactgaagatcttgagttcgggagaggtgagtggaactgcgagtgtagaggtgaaattcgtagatattcgcaagaacaccagtggcgaaggcggctcactggcccgatactgacgctgaggcacgaaagcgtggggagcaaacaggattagataccctggtagtccacgccgtaaacgatgaatgccagccgttagtgggtttactcactagtggcgcagctaacgctttaagcattccgcctggggagtacggtcgcaagattaaaactcaaaggaattgacgggggcccgcacaagcggtggagcatgtggtttaattcgacgcaacgcgcagaaccttaccagcccttgacatgtccaggaccggtcgcagagatgtgaccttctcttcggagcctggaacacaggtgctgcatggctgtcgtcagctcgtgtcgtgagatgttgggttaagtcccgcaacgagcgcaacccccgtccttagttgctaccatttagttgagcactctaaggagactgccggtgataagccgcgaggaaggtggggatgacgtcaagtcctcatggcccttacgggctgggctacacacgtgctacaatggcggtgacaatgggatgctaaggggcgacccttcgcaaatctcaaaaagccgtctcagttcggattgggctctgcaactcgagcccatgaagttggaatcgctagtaatcgtggatcagcacgccacggtgaatacgttcccgggccttgtacacaccgcccgtcacaccatgggagttggttttacctgaagacggtgcgctaacccgcaagggaggcagccggccacggtagggtcagcgactggggtg

SEQ ID NO: 885 - DNA, 1411 bp, Bradyrhizobium retamae
agcgaacgctggcggcaggcttaacacatgcaagtcgagcgggcgtagcaatacgtcagcggcagacgggtgagtaacgcgtgggaacgtaccttttggttcggaacaacccagggaaacttgggctaataccggataagcccttacggggaaagatttatcgccgaaagatcggcccgcgtctgattagctagttggtgaggtaatggctcaccaaggcgacgatcagtagctggtctgagaggatgatcagccacattgggactgagacacggcccaaactcctacgggaggcagcagtggggaatattggacaatgggcgcaagcctgatccagccatgccgcgtgagtgatgaaggccctagggttgtaaagctcttttgtgcgggaagataatgacggtaccgcaagaataagccccggctaacttcgtgccagcagccgcggtaatacgaagggggctagcgttgctcggaatcactgggcgtaaagggtgcgtaggcgggtctttaagtcaggggtgaaatcctggagctcaactccagaactgcctttgatactgaagatcttgagttcgggagaggtgagtggaactgcgagtgtagaggtgaaattcgtagatattcgcaagaacaccagtggcgaaggcggctcactggcccgatactgacgctgaggcacgaaagcgtggggagcaaacaggattagataccctggtagtccacgccgtaaacgatgaatgccagccgttagtgggtttactcactagtggcgcagctaacgctttaagcattccgcctggggagtacggtcgcaagattaaaactcaaaggaattgacgggggcccgcacaagcggtggagcatgtggtttaattcgacgcaacgcgcagaaccttaccagcccttgacatcccggtcgcgggccccagagatggggtccttcagttcggctggaccggagacaggtgctgcatggctgtcgtcagctcgtgtcgtgagatgttgggttaagtcccgcaacgagcgcaacccccgtccttagttgctaccatttagttgagcactctaaggagactgccggtgataagccgcgaggaaggtggggatgacgtcaagtcctcatggcccttacgggctgggctacacacgtgctacaatggcggtgacaatgggatgctaaggggtgacccttcgcaaatctcaaaaagccgtctcagttcggattgggctctgcaactcgagcccatgaagttggaatcgctagtaatcgtggatcagcacgccacggtgaatacgttcccgggccttgtacacaccgcccgtcacaccatgggagttggttttacctgaagacggtgcgctaaccgaaagggggcagccggccacggtagggtcagcgactggggtg

SEQ ID NO: 886 - DNA, 1411 bp, Bradyrhizobium rifense
agcgaacgctggcggcaggcttaacacatgcaagtcgagcgggcgtagcaatacgtcagcggcagacgggtgagtaacgcgtgggaacataccttttggttcggaacaacacagggaaacttgtgctaataccggataagcccttacggggaaagatttatcgccgaaagattggcccgcgtctgattagctagttggtagggtaatggcctaccaaggcgacgatcagtagctggtctgagaggatgatcagccacattgggactgagacacggcccaaactcctacgggaggcagcagtggggaatattggacaatgggggcaaccctgatccagccatgccgcgtgagtgatgaaggccctagggttgtaaagctcttttgtgcgggaagataatgacggtaccgcaagaataagccccggctaacttcgtgccagcagccgcggtaatacgaagggggctagcgttgctcggaatcactgggcgtaaagggtgcgtaggcgggtttttaagtcaggggtgaaatcctggagctcaactccagaactgcctttgatactgaagatcttgagtccgggagaggtgagtggaactgcgagtgtagaggtgaaattcgtagatattcgcaagaacaccagtggcgaaggcggctcactggcccggtactgacgctgaggcacgaaagcgtggggagcaaacaggattagataccctggtagtccacgccgtaaacgatgaatgccagccgttagtgggtttactcactagtggcgcagctaacgctttaagcattccgcctggggagtacggtcgcaagattaaaactcaaaggaattgacgggggcccgcacaagcggtggagcatgtggtttaattcgacgcaacgcgcagaaccttaccagcccttgacatgtccaggaccggtcgcagagatgtgaccttctcttcggagcctggaacacaggtgctgcatggctgtcgtcagctcgtgtcgtgagatgttgggttaagtcccgcaacgagcgcaacccccgtccttagttgctaccatttagttgagcactctaaggagactgccggtgataagccgcgaggaaggtggggatgacgtcaagtcctcatggcccttacgggctgggctacacacgtgctacaatggcggtgacaatgggatgctaaggggcgacccttcgcaaatctcaaaaagccgtctcagttcggattgggctctgcaactcgagcccatgaagttggaatcgctagtaatcgtggatcagcacgccacggtgaatacgttcccgggccttgtacacaccgcccgtcacaccatgggagttggttttacctgaagacggtgcgctaaccagcaatggaggcagccggccacggtagggtcagcgactggggtg

SEQ ID NO: 887 - DNA, 1411 bp, Bradyrhizobium shewense
agcgaacgctggcggcaggcttaacacatgcaagtcgagcgggcgtagcaatacgtcagcggcagacgggtgagtaacgcgtgggaacgtaccttttggttcggaacaacacagggaaacttgtgctaataccggataagcccttacggggaaagatttatcgccgaaagatcggcccgcgtctgattagctagttggtgaggtaatggctcaccaaggcgacgatcagtagctggtctgagaggatgatcagccacattgggactgagacacggcccaaactcctacgggaggcagcagtggggaatattggacaatgggggcaaccctgatccagccatgccgcgtgagtgatgaaggccctagggttgtaaagctcttttgtgcgggaagataatgacggtaccgcaagaataagccccggctaacttcgtgccagcagccgcggtaatacgaagggggctagcgttgctcggaatcactgggcgtaaagggtgcgtaggcgggtctttaagtcaggggtgaaatcctggagctcaactccagaactgcctttgatactgaagatcttgagttcgggagaggtgagtggaactgcgagtgtagaggtgaaattcgtagatattcgcaagaacaccagtggcgaaggcggctcactggcccgatactgacgctgaggcacgaaagcgtggggagcaaacaggattagataccctggtagtccacgccgtaaacgatgaatgccagccgttagtgggtttactcactagtggcgcagctaacgctttaagcattccgcctggggagtacggtcgcaagattaaaactcaaaggaattgacgggggcccgcacaagcggtggagcatgtggtttaattcgacgcaacgcgcagaaccttaccagcccttgacatgtccaggaccggtcgcagagatgtgaccttctcttcggagcctggaacacaggtgctgcatggctgtcgtcagctcgtgtcgtgagatgttgggttaagtcccgcaacgagcgcaacccccgtccttagttgctaccatttagttgagcactctaaggagactgccggtgataagccgcgaggaaggtggggatgacgtcaagtcctcatggcccttacgggctgggctacacacgtgctacaatggcggtgacaatgggatgctaaggggcgacccttcgcaaatctcaaaaagccgtctcagttcggattgggctctgcaactcgagcccatgaagttggaatcgctagtaatcgtggatcagcacgccacggtgaatacgttcccgggccttgtacacaccgcccgtcacaccatgggagttggttttacctgaagacggtgcgctaacccgcaagggaggcagccggccacggtagggtcagcgactggggtg

SEQ ID NO: 888 - DNA, 1308 bp, Bradyrhizobium stylosanthis
gacgggtgagtaacgcgtgggaacgtaccttttggttcggaacaacacagggaaacttgtgctaataccggataagcccttacggggaaagatttatcgccgaaagatcggcccgcgtctgattagctagttggtagggtaatggcctaccaaggcgacgatcagtagctggtctgagaggatgatcagccacattgggactgagacacggcccaaactcctacgggaggcagcagtggggaatattggacaatgggggcaaccctgatccagccatgccgcgtgagtgatgaaggccctagggttgtaaagctcttttgtgcgggaagataatgacggtaccgcaagaataagccccggctaacttcgtgccagcagccgcggtaatacgaagggggctagcgttgctcggaatcactgggcgtaaagggtgcgtaggcgggtctttaagtcaggggtgaaatcctggagctcaactccagaactgcctttgatactgaagatcttgagttcgggagaggtgagtggaactgcgagtgtagaggtgaaattcgtagatattcgcaagaacaccagtggcgaaggcggctcactggcccgatactgacgctgaggcacgaaagcgtggggagcaaacaggattagataccctggtagtccacgccgtaaacgatgaatgccagccgttagtgggtttactcactagtggcgcagctaacgctttaagcattccgcctggggagtacggtcgcaagattaaaactcaaaggaattgacgggggcccgcacaagcggtggagcatgtggtttaattcgacgcaacgcgcagaaccttaccagcccttgacatgtccaggaccggtcgcagagatgtgaccttctcttcggagcctggaacacaggtgctgcatggctgtcgtcagctcgtgtcgtgagatgttgggttaagtcccgcaacgagcgcaacccccgtccttagttgctaccatttagttgagcactctaaggagactgccggtgataagccgcgaggaaggtggggatgacgtcaagtcctcatggcccttacgggctgggctacacacgtgctacaatggcggtgacaatgggaagcgaaggggcaacccctagcaaatctcaaaaagccgtctcagttcggattgggctctgcaactcgagcccatgaagttggaatcgctagtaatcgtggatcagcacgccacggtgaatacgttcccgggccttgtacacaccgcccgtcacaccatgggagttggttttacctgaagacggtgcgctaaccgaaag

SEQ ID NO: 889 - DNA, 1411 bp, Bradyrhizobium valentinum
agcgaacgctggcggcaggcttaacacatgcaagtcgagcgggcgtagcaatacgtcagcggcagacgggtgagtaacgcgtgggaacgtaccttttggttcggaacaacccagggaaacttgggctaataccggataagcccttacggggaaagatttatcgccgaaagatcggcccgcgtctgattagctagttggtgaggtaatggctcaccaaggcgacgatcagtagctggtctgagaggatgatcagccacattgggactgagacacggcccaaactcctacgggaggcagcagtggggaatattggacaatgggcgcaagcctgatccagccatgccgcgtgagtgatgaaggccctagggttgtaaagctcttttgtgcgggaagataatgacggtaccgcaagaataagccccggctaacttcgtgccagcagccgcggtaatacgaagggggctagcgttgctcggaatcactgggcgtaaagggtgcgtaggcgggtctttaagtcaggggtgaaatcctggagctcaactccagaactgcctttgatactgaagatcttgagttcgggagaggtgagtggaactgcgagtgtagaggtgaaattcgtagatattcgcaagaacaccagtggcgaaggcggctcactggcccgatactgacgctgaggcacgaaagcgtggggagcaaacaggattagataccctggtagtccacgccgtaaacgatgaatgccagccgttagtgggtttactcactagtggcgcagctaacgctttaagcattccgcctggggagtacggtcgcaagattaaaactcaaaggaattgacgggggcccgcacaagcggtggagcatgtggtttaattcgacgcaacgcgcagaaccttaccagcccttgacatcccggtcgcggactccagagatggagttcttcagttcggctggaccggagacaggtgctgcatggctgtcgtcagctcgtgtcgtgagatgttgggttaagtcccgcaacgagcgcaacccccgtccttagttgctaccattcagttgagcactctaaggagactgccggtgataagccgcgaggaaggtggggatgacgtcaagtcctcatggcccttacgggctgggctacacacgtgctacaatggcggtgacaatgggatgctaaggggtgacccttcgcaaatctcaaaaagccgtctcagttcggattgggctctgcaactcgagcccatgaagttggaatcgctagtaatcgtggatcagcacgccacggtgaatacgttcccgggccttgtacacaccgcccgtcacaccatgggagttggttttacctgaagacggtgcgctaaccgaaagggggcagccggccacggtagggtcagcgactggggtg

SEQ ID NO: 890 - DNA, 1298 bp, Bradyrhizobium vignae
cagggaaacttgggctaaaacaaggataagcccttacggggaaagatttatcgccgaaagatcggcccgcgtctgattagctagttggtagggtaatggcctaccaaggcgacgatcagtagctggtctgagaggatgatcagccacattgggactgagacacggcccaaactcctacgggaggcagcagtggggaatattggacaatgggcgcaagcctgatccagccatgccgcgtgagtgatgaaggccctagggttgtaaagctcttttgtgcgggaagataatgacggtaccgcaagaataagccccggctaacttcgtgccagcagccgcggtaatacgaagggggctagcgttgctcggaatcactgggcgtaaagggtgcgtaggcgggtctttaagtcaggggtgaaatcctggagctcaactccagaactgcctttgatactgaagatcttgagtccgggagaggtgagtggaactgcgagtgtagaggtgaaattcgtagatattcgcaagaacaccagtggcgaaggcggctcactggcccggtactgacgctgaggcacgaaagcgtggggagcaaacaggattagataccctggtagtccacgccgtaaacgatgaatgccagccgttagtgggtttactcactagtggcgcagctaacgctttaagcattccgcctggggagtacggtcgcaagattaaaactcaaaggaattgacgggggcccgcacaagcggtggagcatgtggtttaattcgacgcaacgcgcagaaccttaccagcccttgacatgtccaggaccggtcgcagagatgtgaccctctcttcggagcctggagcacaggtgctgcatggctgtcgtcagctcgtgtcgtgagatgttgggttaagtcccgcaacgagcgcaacccccgtccttagttgctaccatttagttgagcactctaaggagactgccggtgataagccgcgaggaaggtggggatgacgtcaagtcctcatggcccttacgggctgggctacacacgtgctacaatggcggtgacaatgggatgctaaggggcgacccttcgcaaatctcaaaaagccgtctcagttcggattgggctctgcaactcgagcccatgaagttggaatcgctagtaatcgtggatcagcacgccacggtgaatacgttcccgggccttgtacacaccgcccgtcacaccatgggagttggttttacctgaagacggtgcgctaacccgcaagggaggcagccgggcacggtagggtcagcgactggg

SEQ ID NO: 891 - DNA, 1411 bp, Bradyrhizobium yuanmingense
agcgaacgctggcggcaggcttaacacatgcaagtcgagcgggcgtagcaatacgtcagcggcagacgggtgagtaacgcgtgggaacgtaccttttggttcggaacaacacagggaaacttgtgctaataccggataagcccttacggggaaagatttatcgccgaaagatcggcccgcgtctgattagctagttggtgaggtaatggctcaccaaggcgacgatcagtagctggtctgagaggatgatcagccacattgggactgagacacggcccaaactcctacgggaggcagcagtggggaatattggacaatgggggcaaccctgatccagccatgccgcgtgagtgatgaaggccctagggttgtaaagctcttttgtgcgggaagataatgacggtaccgcaagaataagccccggctaacttcgtgccagcagccgcggtaatacgaagggggctagcgttgctcggaatcactgggcgtaaagggtgcgtaggcgggtctttaagtcaggggtgaaatcctggagctcaactccagaactgcctttgatactgaagatcttgagtccgggagaggtgagtggaactgcgagtgtagaggtgaaattcgtagatattcgcaagaacaccagtggcgaaggcggctcactggcccggtactgacgctgaggcacgaaagcgtggggagcaaacaggattagataccctggtagtccacgccgtaaacgatgaatgccagccgttagtgggtttactcactagtggcgcagctaacgctttaagcattccgcctggggagtacggtcgcaagattaaaactcaaaggaattgacgggggcccgcacaagcggtggagcatgtggtttaattcgacgcaacgcgcagaaccttaccagcccttgacatgtccaggaccggtcgcagagatgtgaccctctcttcggagcctggagcacaggtgctgcatggctgtcgtcagctcgtgtcgtgagatgttgggttaagtcccgcaacgagcgcaacccccgtccttagttgctaccatttagttgagcactctaaggagactgccggtgataagccgcgaggaaggtggggatgacgtcaagtcctcatggcccttacgggctgggctacacacgtgctacaatggcggtgacaatgggatgctaaggggcgacccttcgcaaatctcaaaaagccgtctcagttcggattgggctctgcaactcgagcccatgaagttggaatcgctagtaatcgtggatcagcacgccacggtgaatacgttcccgggccttgtacacaccgcccgtcacaccatgggagttggttttacctgaagacggtgcgctaacccgcaagggaggcagccggccacggtagggtcagcgactggggtg

SEQ ID NO: 892 - DNA, 1464 bp, Brenneria goodwinii
attgaacgctggcggcaggcctaacacatgcaagtcgagcggcagcgggaagaagcttgcttctttgccggcgagcggcggacgggtgagtaaagtctggggatctgcccgatggagggggataactactggaaacggtagctaataccgcataacgtcgcaagaccaaagtgggggaccttagggcctcacaccatcggatgaacccagatgggattagctagtaggcggggtaagggcccacctaggcgacgatccctagctggtctgagaggatgaccagccacactggaactgagacacggtccagactcctacgggaggcagcagtggggaatattgcacaatgggggaaaccctgatgcagccatgccgcgtgtatgaagaaggccttcgggttgtaaagtactttcagcggggaggaaggggatagggttaataaccttgttcattgacgttacccgcagaagaagcaccggctaactccgtgccagcagccgcggtaatacggagggtgcaagcgttaatcggaatgactgggcgtaaagcgcacgcaggcggtctgttaagttggatgtgaaatccccgggcttaacctgggaactgcattcaagactggcaggctagagtctcgtagaggggggtagaattccaggtgtagcggtgaaatgcgtagagatctggaggaataccggtggcgaaggcggccccctggacgaagactgacgctcaggtgcgaaagcgtggggagcaaacaggattagataccctggtagtccacgccgtaaacgatgtcgacttggaggctgtggtcttgaaccgtggcttccggagctaacgcgttaagtcgaccgcctggggagtacggccgcaaggttaaaactcaaatgaattgacgggggcccgcacaagcggtggagcatgtggtttaattcgatgcaacgcgaagaaccttacctactcttgacatccagagaagtttgcagagatgcgaatgtgccttcgggagctctgagacaggtgctgcatggctgtcgtcagctcgtgttgtgaaatgttgggttaagtcccgcaacgagcgcaacccttatcctttgttgccagcgattcggtcgggaactcaaaggagactgccggtgataaaccggaggaaggtggggatgacgtcaagtcatcatggcccttacgagtagggctacacacgtgctacaatggcgcatacaaagagaagcgacctcgcgagagtaagcggacctcataaagtgcgtcgtagtccggattggagtctgcaactcgactccatgaagtcggaatcgctagtaatcgtagatcagaatgctacggtgaatacgttcccgggccttgtacacaccgcccgtcacaccatgggagtgggttgcaaaagaagtaggtagcttaaccttcgggggggcgcttaccactttgtgattcatgactggggtg

SEQ ID NO: 893 - DNA, 1464 bp, Brenneria nigrifluens
  misc_feature (51)..(51): n is a, c, g, or t
attgaacgctggcggcaggcctaacacatgcaagtcgagcggtagcacagnggagcttgctccttgggtgacgagcggcggacgggtgagtaatgtctgggaaactgcctgatggagggggataactactggaaacggtagctaataccgcataacctcgcaagagcaaagtgggggaccttatggcctcacgccatcggatgtgcccagatgggattagctggtaggtggggtaaaggctcacctaggcgacgatccctagctggtctgagaggatgaccagccacactggaactgagacacggtccagactcctacgggaggcagcagtggggaatattgcacaatgggggaaaccctgatgcagccatgccgcgtgtgtgaagaaggccttcgggttgtaaagcactttcagcggggaggaaggcaacaagcttaataatcttgttgattgacgttacccgcagaagaagcaccggctaactccgtgccagcagccgcggtaatacggagggtgcaagcgttaatcggaatgactgggcgtaaagcgcacgcaggcggtctgttaagttggatgtgaaatccccgggcttaacctgggaactgcattcaaaactgacaggctagagtctcgtagaggggggtagaattccaggtgtagcggtgaaatgcgtagagatctggaggaataccggtggcgaaggcggccccctggacgaagactgacgctcaggtgcgaaagcgtggggagcaaacaggattagataccctggtagtccacgccgtaaacgatgtcgacttggaggctgtggtcttgaaccgtggcttccggagctaacgcgttaagtcgaccgcctggggagtacggccgcaaggttaaaactcaaatgaattgacgggggcccgcacaagcggtggagcatgtggtttaattcgatgcaacgcgaagaaccttacctactcttgacatcctcagaagagactggagacagtcttgtgccttcgggaactgagagacaggtgctgcatggctgtcgtcagctcgtgttgtgaaatgttgggttaagtcccgcaacgagcgcaacccttatcctttgttgccagcgattcggtcgggaactcaaaggagactgccggtgataaaccggaggaaggtggggatgacgtcaagtcatcatggcccttacgagtagggctacacacgtgctacaatggcgcatacaaagagaagcgaacttgcgagagtaagcggacctcataaagtgcgtcgtagtccggattggagtctgcaactcgactccatgaagtcggaatcgctagtaatcgtagatcagaatgctacggtgaatacgttcccgggccttgtacacaccgcccgtcacaccatgggagtgggttgcaaaagaagtaggtagcttaaccttagggggggcgcttaccactttgtgattcatgactggggtg

SEQ ID NO: 894 - DNA, 1344 bp, Brenneria roseae
ggacgggtgagtaaagtctgggaaactgcctgatggagggggataactactggaaacggtagctaataccgcatgatgtcgcaagaccaaagtgggggaccttcgggcctcacgccatcggatgtgcccagatgggattagctggtaggtggggtaacggctcacctaggcgacgatccctagctggtctgagaggatgaccagccacactggaactgagacacggtccagactcctacgggaggcagcagtggggaatattgcacaatgggggaaaccctgatgcagccatgccgcgtgtgtgaagaaggccttcgggttgtaaagcactttcagcggggaggaagggggcagggttaataagcctgttcattgacgttacccgcagaagaagcaccggctaactccgtgccagcagccgcggtaatacggagggtgcaagcgttaatcggaatgactgggcgtaaagcgcacgcaggcggtctgttaagttggatgtgaaatccccgggcttaacctgggaactgcattcaaaactgacaggctagagtctcgtagaggggggtagaattccaggtgtagcggtgaaatgcgtagagatctggaggaataccggtggcgaaggcggccccctggacgaagactgacgctcaggtgcgaaagcgtggggagcaaacaggattagataccctggtagtccacgctgtaaacgatgtcgacttggaggttgtggcctagagccgtggcttccggagctaacgcgttaagtcgaccgcctggggagtacggccgcaaggttaaaactcaaatgaattgacgggggcccgcacaagcggtggagcatgtggtttaattcgatgcaacgcgaagaaccttacctactcttgacatccacggaacttggcagagatgccttggtgccttcgggaaccgtgagacaggtgctgcatggctgtcgtcagctcgtgttgtgaaatgttgggttaagtcccgcaacgagcgcaacccttatcctttgttgccagcgatttggtcgggaactcaaaggagactgccggtgataaaccggaggaaggtggggatgacgtcaagtcatcatggcccttacgagtagggctacacacgtgctacaatggcgcatacaaagagaagcgaccctgcgaaggcgagcggacctcataaagtgcgtcgtagtccggattggagtctgcaactcgactccatgaagtcggaatcgctagtaatcgtagatcagaatgctacggtgaatacgttcccgggccttgtacacaccgcccgtcacaccatgggagtgggttgcaaaagaagtaggtagcttaacct

SEQ ID NO: 895 - DNA, 1464 bp, Brenneria rubrifaciens
  misc_feature (1327)..(1328): n is a, c, g, or t
  misc_feature (1350)..(1350): n is a, c, g, or t
attgaacgctggcggcaggcctaacacatgcaagtcgagcggcagcgggaagtagcttgctactttgccggcgagcggcggacgggtgagtaatgtctggggatctgcctgatggagggggataaccactggaaacggtggctaataccgcatgacgtcgcaagaccaaagtgggggaccttcgggcctcacgccatcggatgaacccagatgggattagctagtaggcggggtaatggcccacctaggcgacgatccctagctggtctgagaggatgaccagccacactggaactgagacacggtccagactcctacgggaggcagcagtggggaatattgcacaatgggggaaaccctgatgcagccatgccgcgtgtgtgaagaaggccttcgggttgtaaagcactttcagcggggaggaaggggaaaggtttaagagactttttcattgacgttacccgcagaagaagcaccggctaactccgtgccagcagccgcggtaatacggagggtgcaagcgttaatcggaatgactgggcgtaaagcgcacgcaggcggtctgttaagttggatgtgaaatccccgggcttaacccgggaactgcattcaaaactgacaggctggagtctcgtagaggggggtagaattccaggtgtagcggtgaaatgcgtagagatctggaggaataccggtggcgaaggcggccccctggacgaagactgacgctcaggtgcgaaagcgtggggagcaaacaggattagataccctggtagtccacgccgtaaacgatgtcgacttggaggctgtggtccagaaccgtggcttccggagctaacgcgttaagtcgaccgcctggggagtacggccgcaaggttaaaactcaaatgaattgacgggggcccgcacaagcggtggagcatgtggtttaattcgatgcaacgcgaagaaccttacctactcttgacatccagagaagacttcagagatgaggttgtgccttagggagctctgagacaggtgctgcatggctgtcgtcagctcgtgttgtgaaatgttgggttaagtcccgcaacgagcgcaacccttatcctttgttgccagcgattcggtcgggaactcaaaggagactgccggtgataaaccggaggaaggtggggatgacgtcaagtcatcatggcccttacgagtagggctacacacgtgctacaatggcgcatacaaagagaagcgagcctgcgagggtgagcggacctcataaagtgcgtcgtaggccggattggagtctgcaactcgactccatgaagtcggaatcgctagtaatcgnngatcagaatgctacggtgaatncgttcccgggccttgtacacaccgcccgtcacaccatgggagtgggttgcaaaagaagtaggtagcttaaccttcgggggggcgcttaccactttgtgattcatgactggggtg

SEQ ID NO: 896 - DNA, 1465 bp, Brenneria salicis
attgaacgctggcggcaggcctaacacatgcaagtcgggcggtagcacagaggagcttgctccttgggtgacgagcggcggacgggtgagtaaagtctggggatctgcctgatggagggggataactactggaaacggtagctaataccgcatgacgtcttcggaccaaagtgggggaccttcgggcctcacgccatgagatgaacccagatgggattagctggtaggtgaggtaacggctcacctaggcgacgatccctagctggtctgagaggatgaccagccacactggaactgagacacggtccagactcctacgggaggcagcagtggggaatattgcacaatgggggaaaccctgatgcagccatgccgcgtgtgtgaagaaggccttcgggttgtaaagcactttcagcggggaggaaggcgataaacttaataagtttgttgattgacgttacccgcagaagaagcaccggctaactccgtgccagcagccgcggtaatacggagggtgcaagcgttaatcggaatgactgggcgtaaagcgcacgcaggcggtgtgttaagttggatgtgaaatccccgggctcaacccgggaacagcattcaaaactgacaggctagagtctcgtagaggggggtagaattccaggtgtagcggtgaaatgcgtagagatctggaggaataccggtggcgaaggcggccccctggacgaagactgacgctcaggtgcgaaagcgtggggagcaaacaggattagataccctggtagtccacgccgtaaacgatgtcgacttggaggctgtggtcttgaaccgtggcttccggagctaacgcgttaagtcgaccgcctggggagtacggccgcaaggttaaaactcaaatgaattgacgggggcccgcacaagcggtggagcatgtggtttaattcgatgcaacgcgaagaaccttacctactcttgacatccagagaagactgtagagatacggttgtgccttcgggagctctgagacaggtgctgcatggctgtcgtcagctcgtgttgtgaaatgttgggttaagtcccgcaacgagcgcaacccttatcctttgttgccagcacgtaatggtgggaactcaaaggagactgccggtgataaaccggaggaaggtggggatgacgtcaagtcatcatggcccttacgagtagggctacacacgtgctacaatggcgcatacaaagagaagcgagcctgcgagggtgagcggacctcataaagtgcgtcgtagtccggattggagtctgcaactcgactccatgaagtcggaatcgctagtaatcgtagatcagaatgctacggtgaatacgttcccgggccttgtacacaccgcccgtcacaccatgggagtgggttgcaaaagaagtaggtagcttaaccttagggggggcgcttaccactttgtgattcatgactggggtg

SEQ ID NO: 897 - DNA, 1413 bp, Brevibacillus fluminis
tacatgcaagtcgagcgagtcccttcgggggctagcggcggacgggtgagtaacacgtaggcaacctgcctgtaagactgggataacatagggaaacttatgctaataccagatagggttttggatcgcatgatccgaaacggaaagatggcgcaagctatcacttgcagatgggcctgcggcgcattagctagttggtggggtaacggcctaccaaggcgacgatgcgtagccgacctgagagggtgaccggccacactgggactgagacacggcccagactcctacgggaggcagcagtagggaattttccacaatggacgaaagtctgatggagcaacgccgcgtgaacgatgaaggctctcgggtcgtaaagttctgttgttagggacgaacaagtgccgttcgaatagggcggcaccttgacggtacctaacgagaaagccacggctaactacgtgccagcagccgcggtaatacgtaggtggcaagcgttgtccggaattattgggcgtaaagcgcgcgcaggcggttatgtaagtctgatgttaaagcccggggctcaacctcggtccgcattggaaactgtgtaacttgagtgcagaagaggaaagtggtattccacgtgtagcggtgaaatgcgtagagatgtggaggaacaccagtggcgaaggcgactttctggtctgtaactgacgctgaggcgcgaaagcgtggggagcaaacaggattagataccctggtagtccacgccgtaaacgatgagtgctaggtgttgggggtttcaataccctcagtgccgcagctaacgcaataagcactccgcctggggagtacgctcgcaagagtgaaactcaaaggaattgacgggggcccgcacaagcggtggagcatgtggtttaattcgaagcaacgcgaagaaccttaccaggtcttgacatcccgctgaccgctctggagacagagcttcccttcggggcagcggtgacaggtggtgcatggttgtcgtcagctcgtgtcgtgagatgttgggttaagtcccgcaacgagcgcaacccttatctttagttgccagcattcagttgggcactctagagagactgccgtcgacaagacggaggaaggcggggatgacgtcaaatcatcatgccccttatgacctgggctacacacgtgctacaatggctggtacaacgggatgctagctcgcgagagtacgcaaatctcttaaaaccagtctcagttcggattgcaggctgcaactcgcctgcatgaagtcggaatcgctagtaatcgcggatcagcatgccgcggtgaatacgttcccgggccttgtacacaccgcccgtcacaccacgggagtttgcaacacccgaagtcggtgaggtaaccgcaaggagccagccgccgaag

SEQ ID NO: 898 - DNA, 1354 bp, Brevibacillus gelatini
tacatgcaagtcgagcgagggttttcgaaccctagcggcggacgggtgagtaacacgtaggcaacctgcctctcagaccgggataacatagggaaacttatgctaataccggataggtttttggatcgcatgatctgaaaaggaaagatggcgtttgctatcactgggagatgggcctgcggcgcattagctagttggtagggtaacggcctaccaaggcgacgatgcgtagccgacctgagagggtgaccggccacactgggactgagacacggcccagactcctacgggaggcagcagtagggaattttccacaatggacgaaagtctgatggagcaacgccgcgtgaacgatgaaggtcttcggattgtaaagttctgttgtcagggacgaataagtaccgttcgaacagggcggtaccttgacggtacctgacgagaaagccacggctaactacgtgccagcagccgcggtaatacgtaggtggcaagcgttgtccggaattattgggcgtaaagcgcgcgcaggcggctatgtaagtctggtgttaaagcccggggctcaaccccggttcgcatcggaaactgtgtagcttgagtgcagaagaggaaagcggtattccacgtgtagcggtgaaatgcgtagagatgtggaggaacaccagtggcgaaggcggctttctggtctgtaactgacgctgaggcgcgaaagcgtggggagcaaacaggattagataccctggtagtccacgccgtaaacgatgagtgctaggtgttgggggtttcaataccctcagtgccgcagctaacgcaataagcactccgcctggggagtacgctcgcaagagtgaaactcaaaggaattgacgggggcccgcacaagcggtggagcatgtggtttaattcgaagcaacgcgaagaaccttaccaggtcttgacatcccgctgaccgctctggagacagagcttcccttcggggcagcggtgacaggtggtgcatggttgtcgtcagctcgtgtcgtgagatgttgggttaagtcccgcaacgagcgcaacccttatctttagttgccagcattcagttgggcactctagagagactgccgtcgacaagacggaggaaggcggggatgacgtcaaatcatcatgccccttatgacctgggctacacacgtgctacaatggttggtacaacgggatgctacctcgcgagaggacgccaatctcttaaaaccaatctcagttcggattgtaggctgcaactcgcctacatgaagtcggaatcgctagtaatcgcggatcagcatgccgcggtgaatacgttcccgggccttgtacacaccgcccgtcacac

SEQ ID NO: 899 - DNA, 1458 bp, Brevibacillus invocatus
  misc_feature (45)..(45): n is a, c, g, or t
  misc_feature (47)..(47): n is a, c, g, or t
  misc_feature (54)..(55): n is a, c, g, or t
  misc_feature (103)..(103): n is a, c, g, or t
  misc_feature (435)..(435): n is a, c, g, or t
gacgaacgctggcggcgtgcctaatacatgcaagtcgagcgaggntnttcggannctagcggcggacgggtgagtaacacgtaggcaacctgcccataagacngggataacatagggaaacttatgctaataccggatagagtcttctcccgcatgagagaagacggaaaggtggcgcaagctaccacttgtggatgggcctgcggcgcattagctagttggtggggtaacggcctaccaaggcgacgatgcgtagccgacctgagagggtgaccggccacactgggactgagacacggcccagactcctacgggaggcagcagtagggaattttccacaatggacgaaagtctgatggagcaacgccgcgtgaacgatgaaggccttcgggttgtaaagttctgttgtcagggacgaacaagtaccgttcgaanagggcggtaccttgacggtacctgacgagaaagccacggctaactacgtgccagcagccgcggtaatacgtaggtggcaagcgttgtccggatttattgggcgtaaagcgcgcgcaggcggctatgtaagtctggtgttaaagcccggggctcaaccccggttcgcatcggaaactgtgtagcttgagtgcagaagaggaaagcggtattccacgtgtagcggtgaaatgcgtagagatgtggaggaacaccagtggcgaaggcggctttctggtctgtaactgacgctgaggcgcgaaagcgtggggagcaaacaggattagataccctggtagtccacgccgtaaacgatgagtgctaggtgttaggggtttcaatacccttagtgccgcagctaacgcaataagcactccgcctggggagtacggtcgcaagactgaaactcaaaggaattgacgggggcccgcacaagcggtggagcatgtggtttaattcgaagcaacgcgaagaaccttaccaggtcttgacatcccgctgaccgctctggagacagagcttcccttcggggcagcggtgacaggtggtgcatggttgtcgtcagctcgtgtcgtgagatgttgggttaagtcccgcaacgagcgcaacccttatctttagttgccagcattcagttgggcactctagagagactgccgtcgacaagacggaggaaggcggggatgacgtcaaatcatcatgccccttatgacctgggctacacacgtgctacaatggttggtacaacgggatgctacctcgcgagaggatgccaatctcttaaaaccaatctcagttcggattgtaggctgcaactcgcctacatgaagtcggaatcgctagtaatcgcggatcagcatgccgcggtgaatacgttcccgggccttgtacacaccgcccgtcacaccacgggagtttgcaacacccgaagtcggtgaggtaaccgcaaggagccagccgccgaaggtggggtagatgactggggtg

SEQ ID NO: 900 - DNA, 1459 bp, Brevibacillus nitrificans
gacgaacgctggcggcgtgcctaatacatgcaagtcgagcgagtctcttcggaggctagcggcggacgggtgagtaacacgtaggcaacctgcctctcagactgggataacatagggaaacttatgctaataccggataggtttttggatcgcatgatccgaaaagaaaaggcggctttaagctgtcactgggagatgggcctgcggcgcattagctagttggtggggtaatggcctaccaaggcgacgatgcgtagccgacctgagagggtgaccggccacactgggactgagacacggcccagactcctacgggaggcagcagtagggaattttccacaatggacgaaagtctgatggagcaacgccgcgtgaacgatgaaggtcttcggattgtaaagttctgttgttagggacgaacaagtaccgttcgaatagggcggtaccttgacggtacctgacgagaaagccacggctaactacgtgccagcagccgcggtaatacgtaggtggcaagcgttgtccggatttattgggcgtaaagcgcgcgcaggcggctatgtaagtctggtgttaaagcccggagctcaactccggttcgcatcggaaactgtgtagcttgagtgcagaagaggaaagcggtattccacgtgtagcggtgaaatgcgtagagatgtggaggaacaccagtggcgaaggcggctttctggtctgtaactgacgctgaggcgcgaaagcgtggggagcaaacaggattagataccctggtagtccacgccgtaaacgatgagtgctaggtgttgggggtttcaataccctcagtgccgcagctaacgcaataagcactccgcctggggagtacgctcgcaagagtgaaactcaaaggaattgacgggggcccgcacaagcggtggagcatgtggtttaattcgaagcaacgcgaagaaccttaccaggtcttgacatcccgctgaccgctctggagacagagcttcccttcggggcagcggtgacaggtggtgcatggttgtcgtcagctcgtgtcgtgagatgttgggttaagtcccgcaacgagcgcaacccttatttctagttgccagcattcagttgggcactctagagagactgccgtcgacaagacggaggaaggcggggatgacgtcaaatcatcatgccccttatgacctgggctacacacgtgctacaatggttggtacaacgggatgctacctcgcgagaggacgccaatctcttaaaaccaatctcagttcggattgtaggctgcaactcgcctacatgaagtcggaatcgctagtaatcgcggatcagcatgccgcggtgaatacgttcccgggccttgtacacaccgcccgtcacaccacgggagtttgcaacacccgaagtcggtgaggtaaccgcaaggagccagccgccgaaggtggggtagatgactggggtg

SEQ ID NO: 901 - DNA, 1458 bp, Brevibacillus panacihumi
gacgaacgctggcggcgtgcctaatacatgcaagtcgagcgagggtcttcggaccctagcggcggacgggtgagtaacacgtaggcaacctgcccataagactgggataacatagggaaacttatgctaataccggatagagtcttctcccgcatgagaggagacggaaaggtggcgcaagctaccacttgtggatgggcctgcggcgcattagctagttggtggggtaacggcccaccaaggcgacgatgcgtagccgacctgagagggtgaccggccacactgggactgagacacggcccagactcctacgggaggcagcagtagggaattttccacaatggacgaaagtctgatggagcaacgccgcgtgaacgatgaaggtcttcggattgtaaagttctgttgtcagggacgaacaagtaccgttcgaatagggcggtaccttgacggtacctgacgagaaagccacggctaactacgtgccagcagccgcggtaatacgtaggtggcaagcgttgtccggaattattgggcgtaaagcgcgcgcaggcggctatgtaagtctggtgttaaagcccggggctcaaccccggttcgcatcggaaactgtgtagcttgagtgcagaagaggaaagcggtattccacgtgtagcggtgaaatgcgtagagatgtggaggaacaccagtggcgaaggcggctttctggtctgtaactgacgctgaggcgcgaaagcgtggggagcaaacaggattagataccctggtagtccacgccgtaaacgatgagtgctaggtgttgggggtttcaataccctcagtgccgcagctaacgcaataagcactccgcctggggagtacggtcgcaagactgaaactcaaaggaattgacgggggcccgcacaagcggtggagcatgtggtttaattcgaagcaacgcgaagaaccttaccaggtcttgacatcccgctgaccgctctggagacagagcttcccttcggggcagcggtgacaggtggtgcatggttgtcgtcagctcgtgtcgtgagatgttgggttaagtcccgcaacgagcgcaacccttatctttagttgccagcattcagttgggcactctagagagactgccgtcgacaagacggaggaaggcggggatgacgtcaaatcatcatgccccttatgacctgggctacacacgtgctacaatggttggtacaacgggatgctacctcgcgagaggacgccaatctcttaaaaccaatctcagttcggattgtaggctgcaactcgcctacatgaagtcggaatcgctagtaatcgcggatcagcatgccgcggtgaatacgttcccgggccttgtacacaccgcccgtcacaccacgggagtttgcaacacccgaagtcggtgaggtaaccgcaaggagccagccgccgaaggtggggtagatgactggggtg

SEQ ID NO: 902 - DNA, 1458 bp, Brevibacillus reuszeri
gacgaacgctggcggcgtgcctaatacatgcaagtcgagcgagtctcttcggaggctagcggcggacgggtgagtaacacgtaggcaacctgcctctcagactgggataacatagggaaacttatgctaataccggataggtttttggaccgcatggtccgaaaagaaaagatggcttcggctatcactgggagatgggcctgcggcgcattagctagttggtggggtaacggcctaccaaggcgacgatgcgtagccgacctgagagggtgaccggccacactgggactgagacacggcccagactcctacgggaggcagcagtagggaattttccacaatggacgaaagtctgatggagcaacgccgcgtgaacgatgaaggtcttcggattgtaaagttctgttgttagggacgaataagtaccgttcgaatagggcggtaccttgacggtacctgacgagaaagccacggctaactacgtgccagcagccgcggtaatacgtaggtggcaagcgttgtccggatttattgggcgtaaagcgcgcgcaggcggctatgtaagtctggtgttaaagcccggagctcaactccggttcgcatcggaaactgtgtagcttgagtgcagaagaggaaagcggtattccacgtgtagcggtgaaatgcgtagagatgtggaggaacaccagtggcgaaggcggctttctggtctgtaactgacgctgaggcgcgaaagcgtggggagcaaacaggattagataccctggtagtccacgccgtaaacgatgagtgctaggtgttgggggtttcaataccctcagtgccgcagctaacgcaataagcactccgcctggggagtacgctcgcaagagtgaaactcaaaggaattgacgggggcccgcacaagcggtggagcatgtggtttaattcgaagcaacgcgaagaaccttaccaggtcttgacatcccgctgaccgctctggagacagagcttcccttcggggcagcggtgacaggtggtgcatggttgtcgtcagctcgtgtcgtgagatgttgggttaagtcccgcaacgagcgcaacccttatctttagttgccagcattcagttgggcactctagagagactgccgtcgacaagacggaggaaggcggggatgacgtcaaatcatcatgccccttatgacctgggctacacacgtgctacaatggttggtacaacgggacgctagcccgcgagggtatgccaatctcttaaaaccaatctcagttcggattgtaggctgcaactcgcctacatgaagtcggaatcgctagtaatcgcggatcagcatgccgcggtgaatacgttcccgggccttgtacacaccgcccgtcacaccacgggagtttgcaacacccgaagtcggtgaggtaaccgcaaggagccagccgccgaaggtggggtagatgactggggtg

SEQ ID NO: 903 - DNA, 1469 bp, Brevifollis gellanilyticus
aacgaacgctggcggcgtggataagacatgcaagtcgaacgggatcattgaagtagcaatatgacaatggttcagtggcgaacgggtgcgtaacacgtggatacattccgggaagcgggggatagcccagggaaacttggattaataccgcatgtgatcgaaagatcaaagacggggaccgcaaggcctgtcacttcccgattggtccgcggcctatcagctagttggcggggtaaaagcccaccaaggcgacgacgggtagctggtctgagaggacgaccagccacactggaactgagacacggtccagacacctacgggtggcagcagtcgagaatctttcacaatgggggcaaccctgatggagcgacgccgcgtggaggataaggtcttcggattgtaaactcctgtcatgtgtgaacaaggcagccgggctaataacctgtgctgattgatggtaacacaagaggaagagacggctaactctgtgccagcagccgcggtaatacagaggtctcaagcgttgttcggaatcactgggcgtaaagggtgcgtaggtggcgtggtaagtcagatgtgaaagcccggggctcaacctcggaattgcatccgatactgccgtgcttgagtactggagaggtgactagaattctaggtgtagcagtgaaatgcgtagatatctagaggaataccaaaggcgtaggcaggtcactggacagttactgacactgaggcacgaaggccaggggagcaaacgggattagataccccggtagtcctggcagtaaacggtgcacacttggtgtgggaggattcgacccctcctgtgccggagctaacgcgttaagtgtgccgcctgggaagtacggtcgcaagattaaaactcaaagaaattgacggggacccgcacaagcggtggagtatgtggcttaattcgatgcaacgcgaagaaccttacctggtcttgacatgcatcttgtcgctagtgaaagctagctagggtagcaatacccgatttgcacaggtgctgcatggctgtcgtcagctcgtgtcgtgagatgttgggttaagtcccgcaacgagcgcaacccctgtgaattgttgccacccggtttaccggcgcactcgattcagactgcctcgatcaacgaggaggaaggtggggatgacgtcaagtccgtatggcccttacgaccagggctgcacacgtactacaatgctcagcacaatgtgatccgataccgcgaggtggaggaaatcctcaaaactgagctcagttcagattggagtctgcaactcgactccatgaagttggaatcgctagtaatggtgcatcagctacggcaccgtgaatacgttcccgggtcttgtacacaccgcccgtcacatcatgggagctggtttcgcccgaagtgcatgcgccaaccgcaaggaggcagtgccctaaggcaagactggtgactgggatg

SEQ ID NO: 904 - DNA, 1384 bp, Brevirhabdus pacifica
aacgaacgctggcggcacgcctaacacatgcaagtcgagcgccctcttcggagggagcggcggacgggttagtaacgcgtgggaacatacccttttctacggaatagcctcgggaaactgagagtaataccgtatacgccctacgggggaaagatttatcggtgaaggattggcccgcgttggattaggtagttggtggggtaatggcctaccaagcctacgatccatagctggtttgagaggatgatcagcaacactgggactgagacacggcccagactcctacgggaggcagcagtggggaatcttagacaatgggcgcaagcctgatctagcgatgccgcgtgagtgacgaaggccttagggtcgtaaagctctttcgccagggatgataatgacagtacctggtaaagaagtcccggctaactccgtgccagcagccgcggtaatacggaggggactagcgttgttcggaattactgggcgtaaagcgtacgtaggcggattagttagtcagaggtgaaatcccagggctcaaccctggaactgcctttgatactgctagtcttgagttcgagagaggtgagtggaattccgagtgtagaggtgaaattcgtagatattcggaggaacaccagtggcgaaggcggctcactggctcgatactgacgctgaggtacgaaagtgtggggagcaaacaggattagataccctggtagtccacaccgtaaacgatgaatgccagacgtcgggcagtatactgttcggtgtcacacctaacggattaagcattccgcctggggagtacggtcgcaagattaaaactcaaaggaattgacgggggcccgcacaagcggtggagcatgtggtttaattcgaagcaacgcgcagaaccttaccaacccttgacatcccgggaccgccagagagatctggttttcacttcggtgacccggtgacaggtgctgcatggctgtcgtcagctcgtgtcgtgagatgttcggttaagtccggcaacgagcgcaacccacatccttagttgccagcagttcggctgggcactctagggaaactgcccgtgataagcgggaggaaggtgtggatgacgtcaagtcctcatggcccttacgggttgggctacacacgtgctacaatggcagtgacaatgggttaatcccaaaaaactgtctcagttcggattggggtctgcaactcgaccccatgaagtcggaatcgctagtaatcgcgtaacagcatgacgcggtgaatacgttcccgggccttgtacacaccgcccgtcacaccatgggagttggttctacctgacgacgctgcgctaaccttcggggggcaggcggccacggtaggatcagcgactggggtg

SEQ ID NO: 905 - DNA, 1383 bp, Brevundimonas intermedia
agcgaacgctggcggcaggcctaacacatgcaagtcgaacgaactcttcggagttagtggcggacgggtgagtaacacgtgggaacgtgcctttaggttcggaataactcagggaaacttgtgctaataccgaatgtgcccttcgggggaaagatttatcgcctttagagcggcccgcgtctgattagctagttggtgaggtaaaggctcaccaaggcgacgatcagtagctggtctgagaggatgatcagccacattgggactgagacacggcccaaactcctacgggaggcagcagtggggaatcttgcgcaatgggcgaaagcctgacgcagccatgccgcgtgaatgatgaaggtcttaggattgtaaaattctttcaccggggacgataatgacggtacccggagaagaagccccggctaacttcgtgccagcagccgcggtaatacgaagggggctagcgttgctcggaattactgggcgtaaagggagcgtaggcggacatttaagtcaggggtgaaatcccggggctcaacctcggaattgcctttgatactgggtgtcttgagtatgagagaggtatgtggaactccgagtgtagaggtgaaattcgtagatattcggaagaacaccagtggcgaaggcgacatactggctcattactgacgctgaggctcgaaagcgtggggagcaaacaggattagataccctggtagtccacgccgtaaacgatgattgctagttgtcgggatgcatgcatttcggtgacgcagctaacgcattaagcaatccgcctggggagtacggtcgcaagattaaaactcaaaggaattgacgggggcccgcacaagcggtggagcatgtggtttaattcgaagcaacgcgcagaaccttaccaccttttgacatgcctggaccgccagagagatctggctttcccttcggggactaggacacaggtgctgcatggctgtcgtcagctcgtgtcgtgagatgttgggttaagtcccgcaacgagcgcaaccctcgccattagttgccatcatttagttgggaactctaatgggactgccggtgctaagccggaggaaggtggggatgacgtcaagtcctcatggcccttacagggtgggctacacacgtgctacaatggcgactacagagggttaatccttaaaagtcgtctcagttcggattgtcctctgcaactcgagggcatgaagttggaatcgctagtaatcgcggatcagcatgccgcggtgaatacgttcccgggccttgtacacaccgcccgtcacaccatgggagttggttctacccgaaggcgctgcgctgaccgcaagggggcaggcgaccacggtagggtcagcgactggggtg

SEQ ID NO: 906 - DNA, 1385 bp, Brevundimonas naejangsanensis
agcgaacgctggcggcaggcctaacacatgcaagtcgaacgaactcttcggagttagtggcggacgggtgagtaacacgtgggaacgtgccttttggttcggaataactcagggaaacttgtgctaataccgaatgtgcccttcgggggaaagatttatcgccattagagcggcccgcgtctgattagctagttggtgaggtaaaagctcaccaaggcgacgatcagtagctggtctgagaggatgaccagccacactgggactgagacacggcccagactcctacgggaggcagcagtggggaatcttgcgcaatgggcgaaagcctgacgcagccatgccgcgtgaatgatgaaggtcttaggattgtaaaattctttcaccggggacgataatgacggtacccggagaagaagccccggctaacttcgtgccagcagccgcggtaatacgaagggggctagcgttgctcggaattactgggcgtaaagggcgcgtaggcggatcgttaagtcagaggtgaaatcccagggctcaaccctggaactgcctttgatactggcgatcttgagtatgagagaggtatgtggaactccgagtgtagaggtgaaattcgtagatattcggaagaacaccagtggcgaaggcgacatactggctcattactgacgctgaggcgcgaaagcgtggggagcaaacaggattagataccctggtagtccacgccgtaaacgatgattgctagttgtcgggctgcatgcagttcggtgacgcagctaacgcattaagcaatccgcctggggagtacggtcgcaagattaaaactcaaaggaattgacgggggcccgcacaagcggtggagcatgtggtttaattcgaagcaacgcgcagaaccttaccaccttttgacatgcctggaccgccacggagacgtggctttcccttcggggactaggacacaggtgctgcatggctgtcgtcagctcgtgtcgtgagatgttgggttaagtcccgcaacgagcgcaaccctcgccattagttgccatcatttagttgggaactctaatgggactgccggtgctaagccggaggaaggtggggatgacgtcaagtcctcatggcccttacagggtgggctacacacgtgctacaatggcgactacagagggttaatccttaaaagtcgtctcagttcggattgtcctctgcaactcgagggcatgaagttggaatcgctagtaatcgcggatcagcatgccgcggtgaatacgttcccgggccttgtacacaccgcccgtcacaccatgggagttggttctacccgaaggcggtgcgctaaccagcaatggaggcagccgaccacggtagggtcagcgactggggtg

SEQ ID NO: 907 - DNA, 1384 bp, Brevundimonas nasdae
agcgaacgctggcggcaggcctaacacatgcaagtcgaacgaactcttcggagttagtggcggacgggtgagtaacacgtgggaacgtgcctttaggttcggaataactcagggaaacttgtgctaataccgaatgtgcccttcgggggaaagatttatcgcctttagagcggcccgcgtctgattagctagttggtgaggtaaaggctcaccaaggcgacgatcagtagctggtctgagaggatgatcagccacattgggactgagacacggcccaaactcctacgggaggcagcagtggggaatcttgcgcaatgggcgaaagcctgacgcagccatgccgcgtgaatgatgaaggtcttaggattgtaaaattctttcaccggggacgataatgacggtacccggagaagaagccccggctaacttcgtgccagcagccgcggtaatacgaagggggctagcgttgctcggaattactgggcgtaaagggagcgtaggcggacatttaagtcaggggtgaaatcccggggctcaacctcggaattgcctttgatactgggtgtcttgagtatgagagaggtgtgtggaactccgagtgtagaggtgaaattcgtagatattcggaagaacaccagtggcgaaggcgacacactggctcattactgacgctgaggctcgaaagcgtggggagcaaacaggattagataccctggtagtccacgccgtaaacgatgattgctagttgtcgggatgcatgcatttcggtgacgcagctaacgcattaagcaatccgcctggggagtacggtcgcaagattaaaactcaaaggaattgacgggggcccgcacaagcggtggagcatgtggtttaattcgaagcaacgcgcagaaccttaccaccttttgacatgcctggaccgccagagagatctggctttcccttcggggactaggacacaggtgctgcatggctgtcgtcagctcgtgtcgtgagatgttgggttaagtcccgcaacgagcgcaaccctcgccattagttgccatcatttagttgggaactctaatgggactgccggtgctaagccggaggaaggtggggatgacgtcaagtcctcatggcccttacagggtgggctacacacgtgctacaatggcgactacagagggttaatccttaaaagtcgtctcagttcggattgtcctctgcaactcgagggcatgaagttggaatcgctagtaatcgcggatcagcatgccgcggtgaatacgttcccgggccttgtacacaccgcccgtcacaccatgggagttggttctacccgaaggcgctgcgctgaccgcaaggaaggcaggcgaccacggtagggtcagcgactggggtg

SEQ ID NO: 908 - DNA, 1383 bp, Brevundimonas subvibrioides
agcgaacgctggcggcaggcctaacacatgcaagtcgaacggacctctcggggttagtggcggacgggtgagtaacacgtgggaacgtgccttttggttcggaatagctcctggaaacgggtggtaatgccgaatgtgccctttgggggaaagatttatcgccattagagcggcccgcgtctgattagctagttggtgaggtaaaggctcaccaaggctacgatcagtagctggtctgagaggatgaccagccacattgggactgagacacggcccaaactcctacgggaggcagcagtggggaatcttgcgcaatgggcgaaagcctgacgcagccatgccgcgtgtatgatgaaggtcttaggattgtaaaatactttcaccggtgaagataatgactgtagccggagaagaagccccggctaacttcgtgccagcagccgcggtaatacgaagggggctagcgttgctcggaattactgggcgtaaagggagcgtaggcggacatttaagtcaggggtgaaatcccagagctcaactctggaactgcctttgatactgggtgtcttgagtgtgagagaggtatgtggaactccgagtgtagaggtgaaattcgtagatattcggaagaacaccagtggcgaaggcgacatactggctcattactgacgctgaggctcgaaagcgtggggagcaaacaggattagataccctggtagtccacgccgtaaacgatgattgctagttgtcgggatgtttacatctcggtgacgcagctaacgcattaagcaatccgcctggggagtacggtcgcaagattaaaactcaaaggaattgacgggggcccgcacaagcggtggagcatgtggtttaattcgaagcaacgcgcagaaccttaccaccttttgacatgcctggaccgccagagagatctggctttcccttcggggactaggacacaggtgctgcatggctgtcgtcagctcgtgtcgtgagatgttgggttaagtcccgcaacgagcgcaaccctcgccattagttgccatcatttagttgggaactctaatgggactgccggtgctaagccggaggaaggtggggatgacgtcaagtcctcatggcccttacagggtgggctacacacgtgctacaatggcgactacagagggttaatccttaaaagtcgtctcagttcggattgtcctctgcaactcgagggcatgaagttggaatcgctagtaatcgcggatcagcatgccgcggtgaatacgttcccgggccttgtacacaccgcccgtcacaccatgggagttggttctacccgaaggcgatgcgctaaccgcaaggaggcagtcgaccacggtagggtcagcgactggggtg

SEQ ID NO: 909 - DNA, 1385 bp, Brevundimonas vancanneytii
agcgaacgctggcggcaggcctaacacatgcaagtcgaacggatccttcgggattagtggcggacgggtgagtaacacgtgggaacgtgccctttggttcggaacaactcagggaaacttgagctaataccggatgtgcccttcgggggaaagatttatcgccattggagcggcccgcgtctgattagctagttggtggggtaaaggcccaccaaggcgacgatcagtagctggtctgagaggatgatcagccacattgggactgagacacggcccagactcctacgggaggcagcagtggggaatcttgcgcaatgggcgaaagcctgacgcagccatgccgcgtgaatgatgaaggtcttaggattgtaaaattctttcaccggggacgataatgacggtacccggagaagaagccccggctaacttcgtgccagcagccgcggtaatacgaagggggctagcgttgctcggaattactgggcgtaaagggcgcgtaggcggatcgttaagtcagaggtgaaatcccagggctcaaccctggaactgcctttgatactggcgatcttgagtatgagagaggtatgtggaactccgagtgtagaggtgaaattcgtagatattcggaagaacaccagtggcgaaggcgacatactggctcattactgacgctgaggcgcgaaagcgtggggagcaaacaggattagataccctggtagtccacgccgtaaacgatgattgctagttgtcgggctgcatgcagttcggtgacgcagctaacgcattaagcaatccgcctggggagtacggtcgcaagattaaaactcaaaggaattgacgggggcccgcacaagcggtggagcatgtggtttaattcgaagcaacgcgcagaaccttaccaccttttgacatgcctggaccgccacggagacgtggctttcccttcggggactaggacacaggtgctgcatggctgtcgtcagctcgtgtcgtgagatgttgggttaagtcccgcaacgagcgcaaccctcgccattagttgccatcatttagttgggaactctaatgggactgccggtgctaagccggaggaaggtggggatgacgtcaagtcctcatggcccttacagggtgggctacacacgtgctacaatggcaactacagagggttaatccttaaaagttgtctcagttcggattgtcctctgcaactcgagggcatgaagttggaatcgctagtaatcgcggatcagcatgccgcggtgaatacgttcccgggccttgtacacaccgcccgtcacaccatgggagttggttctacccgaaggcggtgcgctaaccagcaatggaggcagccgaccacggtagggtcagccactggggtg

SEQ ID NO: 910 - DNA, 1383 bp, Brevundimonas vesicularis
agcgaacgctggcggcaggcctaacacatgcaagtcgaacgaactcttcggagttagtggcggacgggtgagtaacacgtgggaacgtgcctttaggttcggaataactcagggaaacttgtgctaataccgaatgtgcccttcgggggaaagatttatcgcctttagagcggcccgcgtctgattagctagttggtgaggtaaaggctcaccaaggcgacgatcagtagctggtctgagaggatgatcagccacattgggactgagacacggcccaaactcctacgggaggcagcagtggggaatcttgcgcaatgggcgaaagcctgacgcagccatgccgcgtgaatgatgaaggtcttaggattgtaaaattctttcaccggggacgataatgacggtacccggagaagaagccccggctaacttcgtgccagcagccgcggtaatacgaagggggctagcgttgctcggaattactgggcgtaaagggagcgtaggcggacatttaagtcaggggtgaaatcccggggctcaacctcggaattgcctttgatactgggtgtcttgagtatgagagaggtgtgtggaactccgagtgtagaggtgaaattcgtagatattcggaagaacaccagtggcgaaggcgacacactggctcattactgacgctgaggctcgaaagcgtggggagcaaacaggattagataccctggtagtccacgccgtaaacgatgattgctagttgtcgggatgcatgcatttcggtgacgcagctaacgcattaagcaatccgcctggggagtacggtcgcaagattaaaactcaaaggaattgacgggggcccgcacaagcggtggagcatgtggtttaattcgaagcaacgcgcagaaccttaccaccttttgacatgcctggaccgccagagagatctggctttcccttcggggactaggacacaggtgctgcatggctgtcgtcagctcgtgtcgtgagatgttgggttaagtcccgcaacgagcgcaaccctcgccattagttgccatcatttagttgggaactctaatgggactgccggtgctaagccggaggaaggtggggatgacgtcaagtcctcatggcccttacagggtgggctacacacgtgctacaatggcgactacagagggttaatccttaaaagtcgtctcagttcggattgtcctctgcaactcgagggcatgaagttggaatcgctagtaatcgcggatcagcatgccgcggtgaatacgttcccgggccttgtacacaccgcccgtcacaccatgggagttggttctacccgaaggcgctgcgctgaccgcaaggaggcaggcgaccacggtagggtcagcgactggggtg

SEQ ID NO: 911 - DNA, 1385 bp, Brevundimonas viscosa
agcgaacgctggcggcaggcctaacacatgcaagtcgaacgaactcttcggagttagtggcggacgggtgagtaacacgtgggaacgtgcctttaggttcggaataactcagggaaacttgtgctaataccgaatgtgcccttcgggggaaagatttatcgcctttagagcggcccgcgtctgattagcttgttggtggggtaatggcccaccaaggcgacgatcagtagctggtctgagaggatgaccagccacattgggactgagacacggcccaaactcctacgggaggcagcagtggggaatcttgcgcaatgggcgaaagcctgacgcagccatgccgcgtggatgatgaaggtcttaggattgtaaaatcctttcaccggtgaagataatgactgtagccggagaagaagccccggctaacttcgtgccagcagccgcggtaatacgaagggggctagcgttgctcggaattactgggcgtaaagggagcgtaggcggacatttaagtcaggggtgaaatcccgaggctcaacctcggaactgcctttgatactgggtgtcttgagtgtgagagaggtgagtggaactccgagtgtagaggtgaaattcgtagatattcggaagaacaccagtggcgaaggcgactcactggctcattactgacgctgaggctcgaaagcgtggggagcaaacaggattagataccctggtagtccacgccgtaaacgatgattgctagttgtcggggagcttgctcttcggtgacgcagctaacgcgttaagcaatccgcctggggagtacggtcgcaagattaaaactcaaaggaattgacgggggcccgcacaagcggtggagcatgtggtttaattcgaagcaacgcgcagaaccttaccaccttttgacatgcccggaccgccacagagatgtggctttcccttcggggaccgggacacaggtgctgcatggctgtcgtcagctcgtgtcgtgagatgttgggttaagtcccgcaacgagcgcaaccctcgccattagttgccatcatttagttgggaactctaatgggactgccggtgctaagccggaggaaggtggggatgacgtcaagtcctcatggcccttacagggtgggctacacacgtgctacaatggcgactacagagggttaatccttaaaagtcgtctcagttcggattgtcctctgcaactcgagggcatgaagttggaatcgctagtaatcgcggatcagcatgccgcggtgaatacgttcccgggccttgtacacaccgcccgtcacaccatgggagttggttctacccgaaggcggtgcgctaaccagcaatggaggcagccgaccacggtagggtcagcgactggggtg

SEQ ID NO: 912 - DNA, 1407 bp, Brucella abortus
aacgaacgctggcggcaggcttaacacatgcaagtcgagcgccccgcaaggggagcggcagacgggtgagtaacgcgtgggaacgtaccatttgctacggaataactcagggaaacttgtgctaataccgtatgtgcccttcgggggaaagatttatcggcaaatgatcggcccgcgttggattagctagttggtggggtaaaggctcaccaaggcgacgatccatagctggtctgagaggatgatcagccacactgggactgagacacggcccagactcctacgggaggcagcagtggggaatattggacaatgggcgcaagcctgatccagccatgccgcgtgagtgatgaaggccctagggttgtaaagctctttcaccggtgaagataatgacggtaaccggagaagaagccccggctaacttcgtgccagcagccgcggtaatacgaagggggctagcgttgttcggatttactgggcgtaaagcgcacgtaggcggacttttaagtcaggggtgaaatcccggggctcaaccccggaactgcctttgatactggaagtcttgagtatggtagaggtgagtggaattccgagtgtagaggtgaaattcgtagatattcggaggaacaccagtggcgaaggcggctcactggaccattactgacgctgaggtgcgaaagcgtggggagcaaacaggattagataccctggtagtccacgccgtaaacgatgaatgttagccgtcggggtgtttacacttcggtggcgcagctaacgcattaaacattccgcctggggagtacggtcgcaagattaaaactcaaaggaattgacgggggcccgcacaagcggtggagcatgtggtttaattcgaagcaacgcgcagaaccttaccagcccttgacatcccggtcgcggttagtggagacactatccttcagttaggctggaccggagacaggtgctgcatggctgtcgtcagctcgtgtcgtgagatgttgggttaagtcccgcaacgagcgcaaccctcgcccttagttgccagcattcagttgggcactctaaggggactgccggtgataagccgagaggaaggtggggatgacgtcaagtcctcatggcccttacgggctgggctacacacgtgctacaatggtggtgacagtgggcagcgagcacgcgagtgtgagctaatctccaaaagccatctcagttcggattgcactctgcaactcgagtgcatgaagttggaatcgctagtaatcgcggatcagcatgccgcggtgaatacgttcccgggccttgtacacaccgcccgtcacaccatgggagttggttttacccgaaggcgctgtgctaaccgcaaggaggcaggcgaccacggtagggtcagcgactggggtg

SEQ ID NO: 913 - DNA, 1407 bp, Brucella canis; identical to SEQ ID NO: 912

SEQ ID NO: 914 - DNA, 1407 bp, Brucella ceti; identical to SEQ ID NO: 912

SEQ ID NO: 915 - DNA, 1407 bp, Brucella melitensis; identical to SEQ ID NO: 912

SEQ ID NO: 916 - DNA, 1407 bp, Brucella microti; identical to SEQ ID NO: 912

SEQ ID NO: 917 - DNA, 1407 bp, Brucella neotomae
aacgaacgctggcggcaggcttaacacatgcaagtcgagcgccccgcaaggggagcggcagacgggtgagtaacgcgtgggaacgtaccatttgctacggaataactcagggaaacttgtgctaataccgtatgtgcccttcgggggaaagatttatcggcaaatgatcggcccgcgttggattagctagttggtggggtaaaggctcaccaaggcgacgatccatagctggtctgagaggatgatcagccacactgggactgagacacggcccagactcctacgggaggcagcagtggggaatattggacaatgggcgcaagcctgatccagccatgccgcgtgagtgatgaaggccctagggttgtaaagctctttcaccggtgaagataatgacggtaaccggagaagaagccccggctaacttcgtgccagcagccgcggtaatacgaagggggctagcgttgttcggatttactgggcgtaaagcgcacgtaggcggacttttaagttaggggtgaaatcccggggctcaaccccggaactgcctttgatactggaagtcttgagtatggtagaggtgagtggaattccgagtgtagaggtgaaattcgtagatattcggaggaacaccagtggcgaaggcggctcactggaccattactgacgctgaggtgcgaaagcgtggggagcaaacaggattagataccctggtagtccacgccgtaaacgatgaatgttagccgtcggggtgtttacacttcggtggcgcagctaacgcattaaacattccgcctggggagtacggtcgcaagattaaaactcaaaggaattgacgggggcccgcacaagcggtggagcatgtggtttaattcgaagcaacgcgcagaaccttaccagcccttgacatcccggtcgcggttagtggagacactatccttcagttaggctggaccggagacaggtgctgcatggctgtcgtcagctcgtgtcgtgagatgttgggttaagtcccgcaacgagcgcaaccctcgcccttagttgccagcattcagttgggcactctaaggggactgccggtgataagccgagaggaaggtggggatgacgtcaagtcctcatggcccttacgggctgggctacacacgtgctacaatggtggtgacagtgggcagcgagcacgcgagtgtgagctaatctccaaaagccatctcagttcggattgcactctgcaactcgagtgcatgaagttggaatcgctagtaatcgcggatcagcatgccgcggtgaatacgttcccgggccttgtacacaccgcccgtcacaccatgggagttggttttacccgaaggcgctgtgctaaccgcaaggaggcaggcgaccacggtagggtcagcgactggggtg

SEQ ID NO: 918 - DNA, 1407 bp, Brucella ovis; identical to SEQ ID NO: 912

SEQ ID NO: 919 - DNA, 1407 bp, Brucella pinnipedialis; identical to SEQ ID NO: 912

SEQ ID NO: 920 - DNA, 1407 bp, Brucella suis; identical to SEQ ID NO: 912

SEQ ID NO: 921 - DNA, 1422 bp, Bryocella elongata
aatcaacgctggcggcgtgcctaacacatgcaagtcgaacgagaaagtggagcaatccatgagtaaagtggcgcacgggtgagtaacacgtgactaacctacccttgagtgcggaataacttcgggaaaccgaggctaataccgcataacacctacgggtcaaaggagcaattcgcttaaggagggggtcgcggcagattagttagttggcggggtaacggcccaccaagacgatgatctgtatccggcctgagagggcgcacggacacactggaactgaaacacggtccagactcctacgggaggcagcagtggggaattttgcgcaatgggggaaaccctgacgcagcaacgccgcgtggaggatgaaatcccttgggatgtaaactcctttcgatagggacgataatgacggtacctatagaagaagccccggctaacttcgtgccagcagccgcggtaatacgaggggggcaagcgttgttcggaattattgggcgtaaagggtgcgtaggcggtctgataagtctgatgtgaaatcgatgggctcaacccatcgtctgcattagaaactgtcgggcttgagtatgggagaggtgagtggaatttccggtgtagcggtgaaatgcgtagatatcggaaggaacacctgtggcgaaagcggctcactggaccattactgacgctgatgcacgaaagctaggggagcaaacaggattagataccctggtagtcctagccctaaacgatgattgcttgatgtggggggtacccaatcctcccgtgtcgaagctaacgcgataagcaatccgcctggggagtacggtcgcaaggctgaaactcaaaggaattgacgggggcccgcacaagcggtggagcatgtggtttaattcgacgcaacgcgaagaaccttacctgggctcgaaatgtacaggaatccggtagaaatatcggcgtcccgcaagggacctgtatataggtgctgcatggctgtcgtcagctcgtgtcgtgagatgttgggttaagtcccgcaacgagcgcaacccttacctctagttgctaccatttagttgagcactctagcggaaccgcctcggataacggggaggaaggcggggatgacgtcaagtcctcatggcctttatgtccagggctacacacgtgctacaatggccggtacaaaccgctgcaaacccgtgagggggagctaatcggaaaaagccggcctcagttcggattggagtctgcaactcgactccatgaagctggaatcgctagtaatcgtggatcagcatgccacggtgaatacgttcccgggccttgtacacaccgcccgtcacatcacgaaagtgggttgcactagaagtcggtgcgctaaccgcaagggagcagccgcccaaggtgtaattcatgattggggtg

SEQ ID NO: 922 - DNA, 1470 bp, Buchnera aphidicola
attgaacgctggcggcaagcctaacacatgcaagtcgagcggcagcgagaagagagcttgctctctttgtcggcaagcggcaaacgggtgagtaatatctggggatctacccaaaagagggggataactactagaaatggtagctaataccgcataatgttgaaaaaccaaagtgggggaccttttggcctcatgcttttggatgaacccagacgagattagcttgttggtagagtaatagcctaccaaggcaacgatctctagctggtctgagaggataaccagccacactggaactgagacacggtccagactcctacgggaggcagcagtggggaatattgcacaatgggcgaaagcctgatgcagctatgccgcgtgtatgaagaaggccttagggttgtaaagtactttcagcggggaggaaaaaaataaaactaataattttatttcgtgacgttacccgcagaagaagcaccggctaactccgtgccagcagccgcggtaatacggagggtgcaagcgttaatcagaattactgggcgtaaagagcgcgtaggtggttttttaagtcaggtgtgaaatccctaggctcaacctaggaactgcatttgaaactggaaaactagagtttcgtagagggaggtagaattctaggtgtagcggtgaaatgcgtagatatctggaggaatacccgtggcgaaagcggcctcctaaacgaaaactgacactgaggcgcgaaagcgtggggagcaaacaggattagataccctggtagtccatgccgtaaacgatgtcgacttggaggttgtttccaagagaagtgacttccgaagctaacgcattaagtcgaccgcctggggagtacggccgcaaggctaaaactcaaatgaattgacgggggcccgcacaagcggtggagcatgtggtttaattcgatgcaacgcgaaaaaccttacctggtcttgacatccacagaattctttagaaataaagaagtgccttcgggagctgtgagacaggtgctgcatggctgtcgtcagctcgtgttgtgaaatgttgggttaagtcccgcaacgagcgcaacccttatcccctgttgccagcggttcggccgggaactcagaggagactgccggttataaaccggaggaaggtggggacgacgtcaagtcatcatggcccttacgaccagggctacacacgtgctacaatggtttatacaaagagaagcaaatctgcaaagacaagcaaacctcataaagtaaatcgtagtccggactggagtctgcaactcgactccacgaagtcggaatcgctagtaatcgtggatcagaatgccacggtgaatacgttcccgggccttgtacacaccgcccgtcacaccatgggagtgggttgcaaaagaagcaggtatcctaaccctttaaaaggaaggcgcttaccactttgtgattcatgactggggtg

SEQ ID NO: 923 - DNA, 1455 bp, Budvicia aquatica
ggcggcaggcctaacacatgcaagtcgagcggcagcggaaagtagcttgctactttgccggcgagcggcggacgggtgagtaatgtctggggatctgcctgatggagggggataactactggaaacggtagctaataccgcgtaacgtcgaaagaccaaagcgggggaccttcgggcctcgcgccatcagatgaacccagatgggattagctagtaggtggggtaatggctcacctaggcgacgatctctaactggtctgagaggatgaccagtcacactgggactgagacacggcccagactcctacgggaggcagcagtggggaatattgcacaatgggcgcaagcctgatgcagccatgccgcgtgtgtgaagaaggccttcgggttgtaaagcactttcagcgaggaggaaggcgttgtagttaatagctgcaagcattgacgttactcgcagaagaagcaccggctaactccgtgccagcagccgcggtaatacggagggtgcaagcgttaatcggaattactgggcgtaaagcgcacgcaggcggtttgttaagtcagatgtgaaatccccgcgcttaacgtgggaactgcatttgaaactggcaagctagagtcttgtagaggggggtagaattccatgtgtagcggtgaaatgcgtagagatgtggaggaataccggtggcgaaggcggccccctggacaaagactgacgctcaggtgcgaaagcgtggggagcaaacaggattagataccctggtagtccacgctgtaaacgatgtcgatttggaggttgtgggcatgacccgtggcttccggagctaacgcgttaaatcgaccgcctggggagtacggccgcaaggttaaaactcaaatgaattgacgggggcccgcacaagcggtggagcatgtggtttaattcgatgcaacgcgaagaaccttacctactcttgacatccagagaatttagcagagatgctttagtgccttcgggaactctgagacaggtgctgcatggctgtcgtcagctcgtgttgtgaaatgttgggttaagtcccgcaacgagcgcaacccttatcctttgttgccagcgagtaatgtcgggaactcaaaggagactgccggtgataaaccggaggaaggtggggatgacgtcaagtcatcatggcccttacgagtagggctacacacgtgctacaatggcgcatacaaagtgaagcgaactcgcgagagtaagcggaccacataaagtgcgtcgtagtccggatcggagtctgcaactcgactccgtgaagtcggaatcgctagtaatcgtagatcagaatgctacggtgaatacgttcccgggccttgtacacaccgcccgtcacaccatgggagtgggttgcaaaagaagtaggtagcttaaccttcgggagggcgcttaccactttgtgattcatgactggggtg

SEQ ID NO: 924 - DNA, 1455 bp, Burkholderia ambifaria
attgaacgctggcggcatgccttacacatgcaagtcgaacggcagcacgggtgcttgcacctggtggcgagtggcgaacgggtgagtaatacatcggaacatgtcctgtagtgggggatagcccggcgaaagccggattaataccgcatacgatctacggatgaaagcgggggaccttcgggcctcgcgctatagggttggccgatggctgattagctagttggtggggtaaaggcctaccaaggcgacgatcagtagctggtctgagaggacgaccagccacactgggactgagacacggcccagactcctacgggaggcagcagtggggaattttggacaatgggcgaaagcctgatccagcaatgccgcgtgtgtgaagaaggccttcgggttgtaaagcacttttgtccggaaagaaatccttggttctaatatagccgggggatgacggtaccggaagaataagcaccggctaactacgtgccagcagccgcggtaatacgtagggtgcgagcgttaatcggaattactgggcgtaaagcgtgcgcaggcggtttgttaagaccgatgtgaaatccccgggctcaacctgggaactgcattggtgactggcaagctagagtatggcagaggggggtagaattccacgtgtagcagtgaaatgcgtagagatgtggaggaataccgatggcgaaggcagccccctgggccaatactgacgctcatgcacgaaagcgtggggagcaaacaggattagataccctggtagtccacgccctaaacgatgtcaactagttgttggggattcatttccttagtaacgtagctaacgcgtgaagttgaccgcctggggagtacggtcgcaagattaaaactcaaaggaattgacggggacccgcacaagcggtggatgatgtggattaattcgatgcaacgcgaaaaaccttacctacccttgacatggtcggaatcctgctgagaggtgggagtgctcgaaagagaaccggcgcacaggtgctgcatggctgtcgtcagctcgtgtcgtgagatgttgggttaagtcccgcaacgagcgcaacccttgtccttagttgctacgcaagagcactctaaggagactgccggtgacaaaccggaggaaggtggggatgacgtcaagtcctcatggcccttatgggtagggcttcacacgtcatacaatggtcggaacagagggttgccaacccgcgagggggagctaatcccagaaaaccgatcgtagtccggattgcactctgcaactcgagtgcatgaagctggaatcgctagtaatcgcggatcagcatgccgcggtgaatacgttcccgggtcttgtacacaccgcccgtcacaccatgggagtgggttttaccagaagtggctagtctaaccgcaaggaggacggtcaccacggtaggattcatgactggggtg

SEQ ID NO: 925 - DNA, 1455 bp, Burkholderia anthina
attgaacgctggcggcatgccttacacatgcaagtcgaacggcagcacgggtgcttgcacctggtggcgagtggcgaacgggtgagtaatacatcggaacatgtcctgtagtgggggatagcccggcgaaagccggattaataccgcatacgatctacggatgaaagcgggggaccttcgggcctcgcgctatagggttggccgatggctgattagctagttggtggggtaaaggcctaccaaggcgacgatcagtagctggtctgagaggacgaccagccacactgggactgagacacggcccagactcctacgggaggcagcagtggggaattttggacaatgggcgaaagcctgatccagcaatgccgcgtgtgtgaagaaggccttcgggttgtaaagcacttttgtccggaaagaaatccttggctctaatacagccgggggatgacggtaccggaagaataagcaccggctaactacgtgccagcagccgcggtaatacgtagggtgcaagcgttaatcggaattactgggcgtaaagcgtgcgcaggcggtttgctaagaccgatgtgaaatccccgggctcaacctgggaactgcattggtgactggcaggctagagtatggcagaggggggtagaattccacgtgtagcagtgaaatgcgtagagatgtggaggaataccgatggcgaaggcagccccctgggccaatactgacgctcatgcacgaaagcgtggggagcaaacaggattagataccctggtagtccacgccctaaacgatgtcaactagttgttggggattcatttccttagtaacgtagctaacgcgtgaagttgaccgcctggggagtacggtcgcaagattaaaactcaaaggaattgacggggacccgcacaagcggtggatgatgtggattaattcgatgcaacgcgaaaaaccttacctacccttgacatggtcggaatcctgctgagaggcgggagtgctcgaaagagaaccggcgcacaggtgctgcatggctgtcgtcagctcgtgtcgtgagatgttgggttaagtcccgcaacgagcgcaacccttgtccttagttgctacgcaagagcactctaaggagactgccggtgacaaaccggaggaaggtggggatgacgtcaagtcctcatggcccttatgggtagggcttcacacgtcatacaatggtcggaacagagggttgccaacccgcgagggggagctaatcccagaaaaccgatcgtagtccggattgcactctgcaactcgagtgcatgaagctggaatcgctagtaatcgcggatcagcatgccgcggtgaatacgttcccgggtcttgtacacaccgcccgtcacaccatgggagtgggttttaccagaagtggctagtctaaccgcaaggaggacggtcaccacggtaggattcatgactggggtg

SEQ ID NO: 926 - DNA, 1532 bp, Burkholderia catarinensis
tgagtttgatcctggctcagattgaacgctggcggcatgccttacacatgcaagtcgaacggcagcacgggtgcttgcacctggtggcgagtggcgaacgggtgagtaatacatcggaacatgtcctgtagtgggggatagcccggcgaaagccggattaataccgcatacgatctatggatgaaagcgggggaccttcgggcctcgcgctatagggttggccgatggctgattagctagttggtggggtaaaggcctaccaaggcgacgatcagtagctggtctgagaggacgaccagccacactgggactgagacacggcccagactcctacgggaggcagcagtggggaattttggacaatgggcgaaagcctgatccagcaatgccgcgtgtgtgaagaaggccttcgggttgtaaagcacttttgtccggaaagaaaacctctgccctaatacggcggggggatgacggtaccggaagaataagcaccggctaactacgtgccagcagccgcggtaatacgtagggtgcaagcgttaatcggaattactgggcgtaaagcgtgcgcaggcggtttgttaagaccgatgtgaaatccccgggctcaacctgggaactgcattggtgactggcaagctagagtatggcagaggggggtagaattccacgtgtagcagtgaaatgcgtagagatgtggaggaataccgatggcgaaggcagccccctgggccaatactgacgctcatgcacgaaagcgtggggagcaaacaggattagataccctggtagtccacgccctaaacgatgtcaactagttgttggggattcatttccttagtaacgtagctaacgcgtgaagttgaccgcctggggagtacggtcgcaagattaaaactcaaaggaattgacggggacccgcacaagcggtggatgatgtggattaattcgatgcaacgcgaaaaaccttacctacccttgacatggtcggaatcccgctgagaggtgggagtgctcgaaagagaaccggcgcacaggtgctgcatggctgtcgtcagctcgtgtcgtgagatgttgggttaagtcccgcaacgagcgcaacccttgtccttagttgctacgcaagagcactctaaggagactgccggtgacaaaccggaggaaggtggggatgacgtcaagtcctcatggcccttatgggtagggcttcacacgtcatacaatggtcggaacagagggtcgccaacccgcgagggggagctaatcccagaaaaccgatcgtagtccggatcgcactctgcaactcgagtgcgtgaagctggaatcgctagtaatcgcggatcagcatgccgcggtgaatacgttcccgggtcttgtacacaccgcccgtcacaccatgggagtgggttttaccagaagtggctagtctaaccgcaaggaggacggtcaccacggtaggattcatgactggggtgaagtcgtaacaaggtagccgtatcggaaggtgcggctggatcacctcctttctagct

SEQ ID NO: 927 - DNA, 1456 bp, Burkholderia cenocepacia
attgaacgctggcggcatgccttacacatgcaagtcgaacggcagcacgggtgcttgcacctggtggcgagtggcgaacgggtgagtaatacatcggaacatgtcctgtagtgggggatagcccggcgaaagccggattaataccgcatacgatccacggatgaaagcgggggaccttcgggcctcgcgctatagggttggccgatggctgattagctagttggtggggtaaaggcctaccaaggcgacgatcagtagctggtctgagaggacgaccagccacactgggactgagacacggcccagactcctacgggaggcagcagtggggaattttggacaatgggcgaaagcctgatccagcaatgccgcgtgtgtgaagaaggccttcgggttgtaaagcacttttgtccggaaagaaatccttggctctaatacagtcgggggatgacggtaccggaagaataagcaccggctaactacgtgccagcagccgcggtaatacgtagggtggcaagcgttaatcggaattactgggcgtaaagcgtgcgcaggcggtttgctaagaccgatgtgaaatccccgggctcaacctgggaactgcattggtgactggcaggctagagtatggcagaggggggtagaattccacgtgtagcagtgaaatgcgtagagatgtggaggaataccgatggcgaaggcagccccctgggccaatactgacgctcatgcacgaaagcgtggggagcaaacaggattagataccctggtagtccacgccctaaacgatgtcaactagttgttggggattcatttccttagtaacgtagctaacgcgtgaagttgaccgcctggggagtacggtcgcaagattaaaactcaaaggaattgacggggacccgcacaagcggtggatgatgtggattaattcgatgcaacgcgaaaaaccttacctacccttgacatggtcggaatcccgctgagaggtgggagtgctcgaaagagaaccggcgcacaggtgctgcatggctgtcgtcagctcgtgtcgtgagatgttgggttaagtcccgcaacgagcgcaacccttgtccttagttgctacgcaagagcactctaaggagactgccggtgacaaaccggaggaaggtggggatgacgtcaagtcctcatggcccttatgggtagggcttcacacgtcatacaatggtcggaacagagggttgccaacccgcgagggggagctaatcccagaaaaccgatcgtagtccggattgcactctgcaactcgagtgcatgaagctggaatcgctagtaatcgcggatcagcatgccgcggtgaatacgttcccgggtcttgtacacaccgcccgtcacaccatgggagtgggttttaccagaagtggctagtctaaccgcaaggaggacggtcaccacggtaggattcatgactggggtg

SEQ ID NO: 928 - DNA, 1455 bp, Burkholderia cepacia
attgaacgctggcggcatgccttacacatgcaagtcgaacggcagcacgggtgcttgcacctggtggcgagtggcgaacgggtgagtaatacatcggaacatgtcctgtagtgggggatagcccggcgaaagccggattaataccgcatacgatccacggatgaaagcgggggaccttcgggcctcgcgctatagggttggccgatggctgattagctagttggtggggtaaaggcctaccaaggcgacgatcagtagctggtctgagaggacgaccagccacactgggactgagacacggcccagactcctacgggaggcagcagtggggaattttggacaatgggcgaaagcctgatccagcaatgccgcgtgtgtgaagaaggccttcgggttgtaaagcacttttgtccggaaagaaatccttggctctaatacagtcgggggatgacggtaccggaagaataagcaccggctaactacgtgccagcagccgcggtaatacgtagggtgcaagcgttaatcggaattactgggcgtaaagcgtgcgcaggcggtttgctaagaccgatgtgaaatccccgggctcaacctgggaactgcattggtgactggcaggctagagtatggcagaggggggtagaattccacgtgtagcagtgaaatgcgtagagatgtggaggaataccgatggcgaaggcagccccctgggccaatactgacgctcatgcacgaaagcgtggggagcaaacaggattagataccctggtagtccacgccctaaacgatgtcaactagttgttggggattcatttccttagtaacgtagctaacgcgtgaagttgaccgcctggggagtacggtcgcaagattaaaactcaaaggaattgacggggacccgcacaagcggtggatgatgtggattaattcgatgcaacgcgaaaaaccttacctacccttgacatggtcggaatcctgctgagaggcgggagtgctcgaaagagaaccggcgcacaggtgctgcatggctgtcgtcagctcgtgtcgtgagatgttgggttaagtcccgcaacgagcgcaacccttgtccttagttgctacgcaagagcactctaaggagactgccggtgacaaaccggaggaaggtggggatgacgtcaagtcctcatggcccttatgggtagggcttcacacgtcatacaatggtcggaacagagggttgccaacccgcgagggggagctaatcccagaaaaccgatcgtagtccggattgcactctgcaactcgagtgcatgaagctggaatcgctagtaatcgcggatcagcatgccgcggtgaatacgttcccgggtcttgtacacaccgcccgtcacaccatgggagtgggttttaccagaagtggctagtctaaccgcaaggaggacggtcaccacggtaggattcatgactggggtg

SEQ ID NO: 929 - DNA, 1455 bp, Burkholderia contaminans
attgaacgctggcggcatgccttacacatgcaagtcgaacggcagcacgggtgcttgcacctggtggcgagtggcgaacgggtgagtaatacatcggaacatgtcctgtagtgggggatagcccggcgaaagccggattaataccgcatacgatctacggatgaaagcgggggaccttcgggcctcgcgctatagggttggccgatggctgattagctagttggtggggtaaaggcctaccaaggcgacgatcagtagctggtctgagaggacgaccagccacactgggactgagacacggcccagactcctacgggaggcagcagtggggaattttggacaatgggcgaaagcctgatccagcaatgccgcgtgtgtgaagaaggccttcgggttgtaaagcacttttgtccggaaagaaatccttggctctaatacagtcgggggatgacggtaccggaagaataagcaccggctaactacgtgccagcagccgcggtaatacgtagggtgcgagcgttaatcggaattactgggcgtaaagcgtgcgcaggcggtttgctaagaccgatgtgaaatccccgggctcaacctgggaactgcattggtgactggcaggctagagtatggcagaggggggtagaattccacgtgtagcagtgaaatgcgtagagatgtggaggaataccgatggcgaaggcagccccctgggccaatactgacgctcatgcacgaaagcgtggggagcaaacaggattagataccctggtagtccacgccctaaacgatgtcaactagttgttggggattcatttccttagtaacgtagctaacgcgtgaagttgaccgcctggggagtacggtcgcaagattaaaactcaaaggaattgacggggacccgcacaagcggtggatgatgtggattaattcgatgcaacgcgaaaaaccttacctacccttgacatggtcggaatcccgctgagaggtgggagtgctcgaaagagaaccggcgcacaggtgctgcatggctgtcgtcagctcgtgtcgtgagatgttgggttaagtcccgcaacgagcgcaacccttgtccttagttgctacgcaagagcactctaaggagactgccggtgacaaaccggaggaaggtggggatgacgtcaagtcctcatggcccttatgggtagggcttcacacgtcatacaatggtcggaacagagggttgccaacccgcgagggggagctaatcccagaaaaccgatcgtagtccggattgcactctgcaactcgagtgcatgaagctggaatcgctagtaatcgcggatcagcatgccgcggtgaatacgttcccgggtcttgtacacaccgcccgtcacaccatgggagtgggttttaccagaagtggctagtctaaccgcaaggaggacggtcaccacggtaggattcatgactggggtg

SEQ ID NO: 930 - DNA, 1431 bp, Burkholderia dabaoshanensis
acacatgcaagtcgaacggcagcacgggggcaaccctggtggcgagtggcgaacgggtgagtaatacatcggaacgtgtcctggagtgggggatagcccggcgaaagccggattaataccgcatacgctctacggaggaaagcgggggatcttcggacctcgcgctcaaggggcggccgatggcggattagctagttggtagggtaaaggcctaccaaggcgacgatccgtagctggtctgagaggacgaccagccacactgggactgagacacggcccagactcctacgggaggcagcagtggggaattttggacaatgggggcaaccctgatccagcaatgccgcgtgtgtgaagaaggccttcgggttgtaaagcacttttgtccggaaagaaatcctttgggctaatacctcggagggatgacggtaccggaagaataagcaccggctaactacgtgccagcagccgcggtaatacgtagggtgcgagcgttaatcggaattactgggcgtaaagcgtgcgcaggcggttcgctaagaccgatgtgaaatccccgggcttaacctgggaactgcattggtgactggcgagctagagtgtggcagaggggggtagaattccacgtgtagcagtgaaatgcgtagagatgtggaggaataccgatggcgaaggcagccccctgggctaacactgacgctcatgcacgaaagcgtggggagcaaacaggattagataccctggtagtccacgccctaaacgatgtcaactagttgttggggattcatttccttagtaacgtagctaacgcgtgaagttgaccgcctggggagtacggtcgcaagattaaaactcaaaggaattgacggggacccgcacaagcggtggatgatgtggattaattcgatgcaacgcgaaaaaccttacctacccttgacatggacggaatccctgctgagaggtgagagtgctcgaaagagaaccgtcgcacaggtgctgcatggctgtcgtcagctcgtgtcgtgagatgttgggttaagtcccgcaacgagcgcaacccttgtctctagttgctacgaaagggcactctagagagactgccggtgacaaaccggaggaaggtggggatgacgtcaagtcctcatggcccttatgggtagggcttcacacgtcatacaatggtcggaacagagggttgccaacccgcgagggggagctaatcccagaaaaccgatcgtagtccggattgcactctgcaactcgagtgcatgaagctggaatcgctagtaatcgcggatcagcatgccgcggtgaatacgttcccgggtcttgtacacaccgcccgtcacaccatgggagtgggttttaccagaagtggctagtctaaccgcaaggaggacggtcaccacggtaggattcatgactggggtg

SEQ ID NO: 931 - DNA, 1455 bp, Burkholderia diffusa
attgaacgctggcggcatgccttacacatgcaagtcgaacggcagcacgggtgcttgcacctggtggcgagtggcgaacgggtgagtaatacatcggaacatgtcctgtagtgggggatagcccggcgaaagccggattaataccgcatacgatctacggatgaaagcgggggaccttcgggcctcgcgctatagggttggccgatggctgattagctagttggtggggtaaaggcctaccaaggcgacgatcagtagctggtctgagaggacgaccagccacactgggactgagacacggcccagactcctacgggaggcagcagtggggaattttggacaatgggcgaaagcctgatccagcaatgccgcgtgtgtgaagaaggccttcgggttgtaaagcacttttgtccggaaagaaatccttggttctaatatagccgggggatgacggtaccggaagaataagcaccggctaactacgtgccagcagccgcggtaatacgtagggtgcaagcgttaatcggaattactgggcgtaaagcgtgcgcaggcggtttgttaagaccgatgtgaaatccccgggctcaacctgggaactgcattggtgactggcaagctagagtatggcagaggggggtagaattccacgtgtagcagtgaaatgcgtagagatgtggaggaataccgatggcgaaggcagccccctgggccaatactgacgctcatgcacgaaagcgtggggagcaaacaggattagataccctggtagtccacgccctaaacgatgtcaactagttgttggggattcatttccttagtaacgtagctaacgcgtgaagttgaccgcctggggagtacggtcgcaagattaaaactcaaaggaattgacggggacccgcacaagcggtggatgatgtggattaattcgatgcaacgcgaaaaaccttacctacccttgacatggtcggaatcccgctgagaggtgggagtgctcgaaagagaaccggcgcacaggtgctgcatggctgtcgtcagctcgtgtcgtgagatgttgggttaagtcccgcaacgagcgcaacccttgtccttagttgctacgcaagagcactctaaggagactgccggtgacaaaccggaggaaggtggggatgacgtcaagtcctcatggcccttatgggtagggcttcacacgtcatacaatggtcggaacagagggttgccaacccgcgagggggagctaatcccagaaaaccgatcgtagtccggattgcactctgcaactcgagtgcatgaagctggaatcgctagtaatcgcggatcagcatgccgcggtgaatacgttcccgggtcttgtacacaccgcccgtcacaccatgggagtgggttttaccagaagtggctagtctaaccgcaaggaggacggtcaccacggtaggattcatgactggggtg

SEQ ID NO: 932 - DNA, 1455 bp, Burkholderia dolosa
  misc_feature (426)..(426): n is a, c, g, or t
  misc_feature (1012)..(1012): n is a, c, g, or t
attgaacgctggcggcatgccttacacatgcaagtcgaacggcagcacgggtgcttgcacctggtggcgagtggcgaacgggtgagtaatacatcggaacatgtcctgtagtgggggatagcccggcgaaagccggattaataccgcatacgatccacggatgaaagcgggggaccttcgggcctcgcgctatagggttggccgatggctgattagctagttggtggggtaaaggcctaccaaggcgacgatcagtagctggtctgagaggacgaccagccacactgggactgagacacggcccagactcctacgggaggcagcagtggggaattttggacaatgggcgcaagcctgatccagcaatgccgcgtgtgtgaagaaggccttcgggttgtaaagcacttttgtccggaaagaaaaccntggctctaatacagccgggggatgacggtaccggaagaataagcaccggctaactacgtgccagcagccgcggtaatacgtagggtgcgagcgttaatcggaattactgggcgtaaagcgtgcgcaggcggttcgctaagaccgatgtgaaatccccgggctcaacctgggaactgcattggtgactggcgggctagagtatggcagaggggggtagaattccacgtgtagcagtgaaatgcgtagagatgtggaggaataccgatggcgaaggcagccccctgggccaatactgacgctcatgcacgaaagcgtggggagcaaacaggattagataccctggtagtccacgccctaaacgatgtcaactagttgttggggattcatttccttagtaacgtagctaacgcgtgaagttgaccgcctggggagtacggtcgcaagattaaaactcaaaggaattgacggggacccgcacaagcggtggatgatgtggattaattcgatgcaacgcgaaaaaccttacctacccttgacatggtcggaatcctgaagagattcgggagtgctcgaaagagaaccggcncacaggtgctgcatggctgtcgtcagctcgtgtcgtgagatgttgggttaagtcccgcaacgagcgcaacccttgtccttagttgctacgcaagagcactctaaggagactgccggtgacaaaccggaggaaggtggggatgacgtcaagtcctcatggcccttatgggtagggcttcacacgtcatacaatggtcggaacagagggttgccaacccgcgagggggagctaatcccagaaaaccgatcgtagtccggattgcactctgcaactcgagtgcatgaagctggaatcgctagtaatcgcggatcagcatgccgcggtgaatacgttcccgggtcttgtacacaccgcccgtcacaccatgggagtgggttttaccagaagtggctagtctaaccgcaaggaggacggtcaccacggtaggattcatgactggggtg

SEQ ID NO: 933 - DNA, 1455 bp, Burkholderia gladioli
attgaacgctggcggcatgccttacacatgcaagtcgaacggcagcacgggtgcttgcacctggtggcgagtggcgaacgggtgagtaatacatcggaacatgtcctgtagtgggggatagcccggcgaaagccggattaataccgcatacgatccacggatgaaagcgggggaccttcgggcctcgcgctatagggttggccgatggctgattagctagttggtggggtaaaggcccaccaaggcgacgatcagtagctggtctgagaggacgaccagccacactgggactgagacacggcccagactcctacgggaggcagcagtggggaattttggacaatgggcgaaagcctgatccagcaatgccgcgtgtgtgaagaaggccttcgggttgtaaagcacttttgtccggaaagaaatcctgagggctaatatccttcggggatgacggtaccggaagaataagcaccggctaactacgtgccagcagccgcggtaatacgtagggtgcgagcgttaatcggaattactgggcgtaaagcgtgcgcaggcggtttgttaagaccgatgtgaaatccccgggctcaacctgggaactgcattggtgactggcaagctagagtatggcagaggggggtagaattccacgtgtagcagtgaaatgcgtagagatgtggaggaataccgatggcgaaggcagccccctgggccaatactgacgctcatgcacgaaagcgtggggagcaaacaggattagataccctggtagtccacgccctaaacgatgtcaactagttgttggggattcatttccttagtaacgtagctaacgcgtgaagttgaccgcctggggagtacggtcgcaagattaaaactcaaaggaattgacggggacccgcacaagcggtggatgatgtggattaattcgatgcaacgcgaaaaaccttacctacccttgacatggtcggaatcctagagagatctgggagtgctcgaaagagaaccgatacacaggtgctgcatggctgtcgtcagctcgtgtcgtgagatgttgggttaagtcccgcaacgagcgcaacccttgtccttagttgctacgcaagagcactctagggagactgccggtgacaaaccggaggaaggtggggatgacgtcaagtcctcatggcccttatgggtagggcttcacacgtcatacaatggtcggaacagagggtcgccaacccgcgagggggagctaatcccagaaaaccgatcgtagtccggattgcactctgcaactcgagtgcatgaagctggaatcgctagtaatcgcggatcagcatgccgcggtgaatacgttcccgggtcttgtacacaccgcccgtcacaccatgggagtgggttttaccagaagtggctagtctaaccgcaaggaggacggtcaccacggtaggattcatgactggggtg

SEQ ID NO: 934 - DNA, 1455 bp, Burkholderia glumae
attgaacgctggcggcatgccttacacatgcaagtcgaacggcagcacgggtgcttgcacctggtggcgagtggcgaacgggtgagtaatacatcggaacatgtcctgtagtgggggatagcccggcgaaagccggattaataccgcatacgatctacggaagaaagcgggggaccttcgggcctcgcgctatagggttggccgatggctgattagctagttggtggggtaaaggcctaccaaggcgacgatcagtagctggtctgagaggacgaccagccacactgggactgagacacggcccagactcctacgggaggcagcagtggggaattttggacaatgggcgaaagcctgatccagcaatgccgcgtgtgtgaagaaggccttcgggttgtaaagcacttttgtccggaaagaaatcctgagggctaatatccttcggggatgacggtaccggaagaataagcaccggctaactacgtgccagcagccgcggtaatacgtagggtgcgagcgttaatcggaattactgggcgtaaagcgtgcgcaggcggtttgctaagaccgatgtgaaatccccgggctcaacctgggaactgcattggtgactggcaggctagagtatggcagaggggggtagaattccacgtgtagcagtgaaatgcgtagagatgtggaggaataccgatggcgaaggcagccccctgggccaatactgacgctcatgcacgaaagcgtggggagcaaacaggattagataccctggtagtccacgccctaaacgatgtcaactagttgttggggattcatttccttagtaacgtagctaacgcgtgaagttgaccgcctggggagtacggtcgcaagattaaaactcaaaggaattgacggggacccgcacaagcggtggatgatgtggattaattcgatgcaacgcgaaaaaccttacctacccttgacatggtcggaatcctgaggagactcgggagtgctcgaaagagaaccgatacacaggtgctgcatggctgtcgtcagctcgtgtcgtgagatgttgggttaagtcccgcaacgagcgcaacccttgtccttagttgctacgcaagagcactctaaggagactgccggtgacaaaccggaggaaggtggggatgacgtcaagtcctcatggcccttatgggtagggcttcacacgtcatacaatggtcggaacagagggttgccaacccgcgagggggagctaatcccagaaaaccgatcgtagtccggattgcactctgcaactcgagtgcatgaagctggaatcgctagtaatcgcggatcagcatgccgcggtgaatacgttcccgggtcttgtacacaccgcccgtcacaccatgggagtgggttttaccagaagtggctagtctaaccgcaaggaggacggtcaccacggtaggattcatgactggggtg

SEQ ID NO: 935 - DNA, 1455 bp, Burkholderia lata
attgaacgctggcggcatgccttacacatgcaagtcgaacggcagcacgggtgcttgcacctggtggcgagtggcgaacgggtgagtaatacatcggaacatgtcctgtagtgggggatagcccggcgaaagccggattaataccgcatacgatctacggatgaaagcgggggaccttcgggcctcgcgctatagggttggccgatggctgattagctagttggtggggtaaaggcctaccaaggcgacgatcagtagctggtctgagaggacgaccagccacactgggactgagacacggcccagactcctacgggaggcagcagtggggaattttggacaatgggcgaaagcctgatccagcaatgccgcgtgtgtgaagaaggccttcgggttgtaaagcacttttgtccggaaagaaatccttggccctaatacggtcgggggatgacggtaccggaagaataagcaccggctaactacgtgccagcagccgcggtaatacgtagggtgcgagcgttaatcggaattactgggcgtaaagcgtgcgcaggcggtttgctaagaccgatgtgaaatccccgggctcaacctgggaactgcattggtgactggcaggctagagtatggcagaggggggtagaattccacgtgtagcagtgaaatgcgtagagatgtggaggaataccgatggcgaaggcagccccctgggccaatactgacgctcatgcacgaaagcgtggggagcaaacaggattagataccctggtagtccacgccctaaacgatgtcaactagttgttggggattcatttccttagtaacgtagctaacgcgtgaagttgaccgcctggggagtacggtcgcaagattaaaactcaaaggaattgacggggacccgcacaagcggtggatgatgtggattaattcgatgcaacgcgaaaaaccttacctacccttgacatggtcggaattccgctgagaggtggaagtgctcgaaagagaaccggcgcacaggtgctgcatggctgtcgtcagctcgtgtcgtgagatgttgggttaagtcccgcaacgagcgcaacccttgtccttagttgctacgcaagagcactctaaggagactgccggtgacaaaccggaggaaggtggggatgacgtcaagtcctcatggcccttatgggtagggcttcacacgtcatacaatggtcggaacagagggtcgccaacccgcgagggggagctaatcccagaaaaccgatcgtagtccggattgcactctgcaactcgagtgcatgaagctggaatcgctagtaatcgcggatcagcatgccgcggtgaatacgttcccgggtcttgtacacaccgcccgtcacaccatgggagtgggttttaccagaagtggctagtctaaccgcaaggaggacggtcaccacggtaggattcatgactggggtg

SEQ ID NO: 936 - DNA, 1455 bp, Burkholderia latens
attgaacgctggcggcatgccttacacatgcaagtcgaacggcagcacgggtgcttgcacctggtggcgagtggcgaacgggtgagtaatacatcggaacatgtcctgtagtgggggatagcccggcgaaagccggattaataccgcatacgatccacggatgaaagcgggggaccttcgggcctcgcgctatagggttggccgatggctgattagctagttggtggggtaaaggcctaccaaggcgacgatcagtagctggtctgagaggacgaccagccacactgggactgagacacggcccagactcctacgggaggcagcagtggggaattttggacaatgggcgaaagcctgatccagcaatgccgcgtgtgtgaagaaggccttcgggttgtaaagcacttttgtccggaaagaaatccttggctctaatacagccgggggatgacggtaccggaagaataagcaccggctaactacgtgccagcagccgcggtaatacgtagggtgcaagcgttaatcggaattactgggcgtaaagcgtgcgcaggcggtttgctaagaccgatgtgaaatccccgggctcaacctgggaactgcattggtgactggcaggctagagtatggcagaggggggtagaattccacgtgtagcagtgaaatgcgtagagatgtggaggaataccgatggcgaaggcagccccctgggccaatactgacgctcatgcacgaaagcgtggggagcaaacaggattagataccctggtagtccacgccctaaacgatgtcaactagttgttggggattcatttccttagtaacgtagctaacgcgtgaagttgaccgcctggggagtacggtcgcaagattaaaactcaaaggaattgacggggacccgcacaagcggtggatgatgtggattaattcgatgcaacgcgaaaaaccttacctacccttgacatggtcggaatcctgaagagattcgggagtgctcgaaagagaaccggcgcacaggtgctgcatggctgtcgtcagctcgtgtcgtgagatgttgggttaagtcccgcaacgagcgcaacccttgtccttagttgctacgcaagagcactctaaggagactgccggtgacaaaccggaggaaggtggggatgacgtcaagtcctcatggcccttatgggtagggcttcacacgtcatacaatggtcggaacagagggttgccaacccgcgagggggagctaatcccagaaaaccgatcgtagtccggattgcactctgcaactcgagtgcatgaagctggaatcgctagtaatcgcggatcagcatgccgcggtgaatacgttcccgggtcttgtacacaccgcccgtcacaccatgggagtgggttttaccagaagtggctagtctaaccgcaaggaggacggtcaccacggtaggattcatgactggggtg

SEQ ID NO: 937 - DNA, 1453 bp, Burkholderia mallei
attgaacgctggcggcatgccttacacatgcaagtcgaacggcagcacgggcttcggcctggtggcgagtggtgaacgggtgagtaatacatcggaacatgtcctgtagtgggggatagcccggcgaaagccggattaataccgcatacgatctgaggatgaaagcgggggaccttcgggcctcgcgctatagggttggccgatggctgattagctagttggtggggtaaaggcctaccaaggcgacgatcagtagctggtctgagaggacgaccagccacactgggactgagacacggcccagactcctacgggaggcagcagtggggaattttggacaatgggcgcaagcctgatccagcaatgccgcgtgtgtgaagaaggccttcgggttgtaaagcacttttgtccggaaagaaatcattctggctaatacccggagtggatgacggtaccggaagaataagcaccggctaactacgtgccagcagccgcggtaatacgtagggtgcgagcgttaatcggaattactgggcgtaaagcgtgcgcaggcggtttgctaagaccgatgtgaaatccccgggctcaacctgggaactgcattggtgactggcaggctagagtatggcagaggggggtagaattccacgtgtagcagtgaaatgcgtagagatgtggaggaataccgatggcgaaggcagccccctgggccaatactgacgctcatgcacgaaagcgtggggagcaaacaggattagataccctggtagtccacgccctaaacgatgtcaactagttgttggggattcatttccttagtaacgtagctaacgcgtgaagttgaccgcctggggagtacggtcgcaagattaaaactcaaaggaattgacggggacccgcacaagcggtggatgatgtggattaattcgatgcaacgcgaaaaaccttacctacccttgacatggtcggaagcccgatgagagttgggcgtgctcgaaagagaaccggcgcacaggtgctgcatggctgtcgtcagctcgtgtcgtgagatgttgggttaagtcccgcaacgagcgcaacccttgtccttagttgctacgcaagagcactctaaggagactgccggtgacaaaccggaggaaggtggggatgacgtcaagtcctcatggcccttatgggtagggcttcacacgtcatacaatggtcggaacagagggtcgccaacccgcgagggggagccaatcccagaaaaccgatcgtagtccggattgcactctgcaactcgagtgcatgaagctggaatcgctagtaatcgcggatcagcatgccgcggtgaatacgttcccgggtcttgtacacaccgcccgtcacaccatgggagtgggttttaccagaagtggctagtctaaccgcaaggaggacggtcaccacggtaggattcatgactggggtg

SEQ ID NO: 938 - DNA, 1455 bp, Burkholderia metallica
attgaacgctggcggcatgccttacacatgcaagtcgaacggcagcacgggtgcttgcacctggtggcgagtggcgaacgggtgagtaatacatcggaacatgtcctgtagtgggggatagcccggcgaaagccggattaataccgcatacgatctacggatgaaagcgggggaccttcgggcctcgcgctatagggttggccgatggctgattagctagttggtggggtaaaggcctaccaaggcgacgatcagtagctggtctgagaggacgaccagccacactgggactgagacacggcccagactcctacgggaggcagcagtggggaattttggacaatgggcgaaagcctgatccagcaatgccgcgtgtgtgaagaaggccttcgggttgtaaagcacttttgtccggaaagaaatccttgattctaatacagtcgggggatgacggtaccggaagaataagcaccggctaactacgtgccagcagccgcggtaatacgtagggtgcgagcgttaatcggaattactgggcgtaaagcgtgcgcaggcggtttgctaagaccgatgtgaaatccccgggctcaacctgggaactgcattggtgactggcaggctagagtatggcagaggggggtagaattccacgtgtagcagtgaaatgcgtagagatgtggaggaataccgatggcgaaggcagccccctgggccaatactgacgctcatgcacgaaagcgtggggagcaaacaggattagataccctggtagtccacgccctaaacgatgtcaactagttgttggggattcatttccttagtaacgtagctaacgcgtgaagttgaccgcctggggagtacggtcgcaagattaaaactcaaaggaattgacggggacccgcacaagcggtggatgatgtggattaattcgatgcaacgcgaaaaaccttacctacccttgacatggtcggaatcctgctgagaggcgggagtgctcgaaagagaaccggcgcacaggtgctgcatggctgtcgtcagctcgtgtcgtgagatgttgggttaagtcccgcaacgagcgcaacccttgtccttagttgctacgcaagagcactctaaggagactgccggtgacaaaccggaggaaggtggggatgacgtcaagtcctcatggcccttatgggtagggcttcacacgtcatacaatggtcggaacagagggttgccaacccgcgagggggagctaatcccagaaaaccgatcgtagtccggattgcactctgcaactcgagtgcatgaagctggaatcgctagtaatcgcggatcagcatgccgcggtgaatacgttcccgggtcttgtacacaccgcccgtcacaccatgggagtgggttttaccagaagtggctagtctaaccgcaaggaggacggtcaccacggtaggattcatgactggggtg

SEQ ID NO: 939 - DNA, 1455 bp, Burkholderia multivorans
attgaacgctggcggcatgccttacacatgcaagtcgaacggcagcacgggtgcttgcacctggtggcgagtggcgaacgggtgagtaatacatcggaacatgtcctgtagtgggggatagcccggcgaaagccggattaataccgcatacgatccacggatgaaagcgggggaccttcgggcctcgcgctatagggttggccgatggctgattagctagttggtggggtaaaggcctaccaaggcgacgatcagtagctggtctgagaggacgaccagccacactgggactgagacacggcccagactcctacgggaggcagcagtggggaattttggacaatgggcgaaagcctgatccagcaatgccgcgtgtgtgaagaaggccttcgggttgtaaagcacttttgtccggaaagaaatccttggctctaatacagtcgggggatgacggtaccggaagaataagcaccggctaactacgtgccagcagccgcggtaatacgtagggtgcgagcgttaatcggaattactgggcgtaaagcgtgcgcaggcggtctgttaagacagatgtgaaatccccgggctcaacctgggaactgcatttgtgactggcaggctagagtatggcagaggggggtagaattccacgtgtagcagtgaaatgcgtagagatgtggaggaataccgatggcgaaggcagccccctgggccaatactgacgctcatgcacgaaagcgtggggagcaaacaggattagataccctggtagtccacgccctaaacgatgtcaactagttgttggggattcatttccttagtaacgtagctaacgcgtgaagttgaccgcctggggagtacggtcgcaagattaaaactcaaaggaattgacggggacccgcacaagcggtggatgatgtggattaattcgatgcaacgcgaaaaaccttacctacccttgacatggtcggaatcctgaagagattcgggagtgctcgaaagagaaccggcgcacaggtgctgcatggctgtcgtcagctcgtgtcgtgagatgttgggttaagtcccgcaacgagcgcaacccttgtccttagttgctacgcaagagcactctaaggagactgccggtgacaaaccggaggaaggtggggatgacgtcaagtcctcatggcccttatgggtagggcttcacacgtcatacaatggtcggaacagagggttgccaacccgcgagggggagctaatcccagaaaaccgatcgtagtccggattgcactctgcaactcgagtgcatgaagctggaatcgctagtaatcgcggatcagcatgccgcggtgaatacgttcccgggtcttgtacacaccgcccgtcacaccatgggagtgggttttaccagaagtggctagtctaaccgcaaggaggacggtcaccacggtaggattcatgactggggtg

SEQ ID NO: 940 - DNA, 1342 bp, Burkholderia novacaledonica
ctgctcagattgaacgctggcggcatgccttacacatgcaagtcgaacggcagcacgggggcaaccctggtggcgagtggcgaacgggtgagtaatacatcggaacgtgtcctgtagtgggggatagcccggcgaaagccggattaataccgcatacgatctacggaagaaagcgggggatcttcggacctcgcgctgcaggggcggccgatggcagattagctagttggtggggtaaaggcctaccaaggcgacgatctgtagctggtctgagaggacgaccagccacactgggactgagacacggcccagactcctacgggaggcagcagtggggaattttggacaatgggggcaaccctgatccagcaatgccgcgtgtgtgaagaaggccttcgggttgtaaagcacttttgtccggaaagaaaaccaacgccctaatatggtggtgggatgacggtaccggaagaataagcaccggctaactacgtgccagcagccgcggtaatacgtagggtgcgtagcgttaatcggaattactgggcgtaaagcgtgcgcaggcggtctgttaagaccgatgtgaaatccccgggcttaacctgggaactgcattggtgactggcaggcttggagtgtggcagaggggggtagaattccacgtgtagcagtgaaatgcgtagagatgtggaggaataccgatggcgaaggcagccccctgggccaacactgacgctcatgcacgaaagcgtgcgggagcaaacaggattagataccctggtagtccacgccctaaacgatgtcaactagttgttggggattcatttccttagtaacgtagctaacgcgtgaagttgaccgcctggggagtacggtcgcaagattaaaactcaaaggaattgacggggacccgcacaagcggtggatgatgtggattaattcgatgcaacgcgaaaaaccttacctacccttgacatggtcggaatcccgctgagaggtgggagtgctcgaaagagaaccggcgcacaggtgctgcatggctgtcgtcagctcgtgtcgtgagatgttgggttaagtcccgcaacgagcgcaacccttgtccttagttgctacgcaagagcactctaaggagactgccggtgacaaaccggaggaaggtggggatgacgtcaagtcctcatggcccttatgggtagggcttcacacgtcatacaatggtcggaacagagggttgccaagccgcgaggcggagccaatcccagaaaaccgatcgtagtccggatcgcagtctgcaactcgactgcgtgaagctggaatcgctagtaatcgcggatcagcatgcgcg

SEQ ID NO: 941 - DNA, 1455 bp, Burkholderia oklahomensis
attgaacgctggcggcatgccttacacatgcaagtcgaacggcagcacgggtgcttgcacctggtggcgagtggcgaacgggtgagtaatacatcggaacatgtcctgtagtgggggatagcccggcgaaagccggattaataccgcatacgatctgaggatgaaagcgggggaccttcgggcctcgcgctatagggttggccgatggctgattagctagttggtggggtaaaggcctaccaaggcgacgatcagtagctggtctgagaggacgaccagccacactgggactgagacacggcccagactcctacgggaggcagcagtggggaattttggacaatgggcgcaagcctgatccagcaatgccgcgtgtgtgaagaaggccttcgggttgtaaagcacttttgtccggaaagaaatcctaccgactaatactgggtggggatgacggtaccggaagaataagcaccggctaactacgtgccagcagccgcggtaatacgtagggtgcgagcgttaatcggaattactgggcgtaaagcgtgcgcaggcggtttgttaagaccgatgtgaaatccccgggctcaacctgggaactgcattggtgactggcaagctagagtatggcagaggggggtagaattccacgtgtagcagtgaaatgcgtagagatgtggaggaataccgatggcgaaggcagccccctgggccaatactgacgctcatgcacgaaagcgtggggagcaaacaggattagataccctggtagtccacgccctaaacgatgtcaactagttgttggggattcatttccttagtaacgtagctaacgcgtgaagttgaccgcctggggagtacggtcgcaagattaaaactcaaaggaattgacggggacccgcacaagcggtggatgatgtggattaattcgatgcaacgcgaaaaaccttacctacccttgacatggtcggaatcctgctgagaggtgggagtgctcgaaagagaaccgatacacaggtgctgcatggctgtcgtcagctcgtgtcgtgagatgttgggttaagtcccgcaacgagcgcaacccttgtccttagttgctacgcaagagcactctaaggagactgccggtgacaaaccggaggaaggtggggatgacgtcaagtcctcatggcccttatgggtagggcttcacacgtcatacaatggtcggaacagagggtcgccaacccgcgagggggagccaatcccagaaaaccgatcgtagtccggattgcactctgcaactcgagtgcatgaagctggaatcgctagtaatcgcggatcagcatgccgcggtgaatacgttcccgggtcttgtacacaccgcccgtcacaccatgggagtgggttttaccagaagtggctagtctaaccgcaaggaggacggtcaccacggtaggattcatgactggggtg

SEQ ID NO: 942 - DNA, 1455 bp, Burkholderia plantarii
attgaacgctggcggcatgccttacacatgcaagtcgaacggcagcacgggtgcttgcacctggtggcgagtggcgaacgggtgagtaatacatcggaacatgtcctgtagtgggggatagcccggcgaaagccggattaataccgcatacgatctacggatgaaagcgggggatctttggacctcgcgctatagggttggccgatggctgattagctagttggtggggtaaaggcctaccaaggcgacgatcagtagctggtctgagaggacgaccagccacactgggactgagacacggcccagactcctacgggaggcagcagtggggaattttggacaatgggcgaaagcctgatccagcaatgccgcgtgtgtgaagaaggccttcgggttgtaaagcacttttgtccggaaagaaatcctgagggctaatatccttcggggatgacggtaccggaagaataagcaccggctaactacgtgccagcagccgcggtaatacgtagggtgcgagcgttaatcggaattactgggcgtaaagcgtgcgcaggcggtttgttaagaccgatgtgaaatccccgggctcaacctgggaactgcattggtgactggcaagctagagtatggcagaggggggtagaattccacgtgtagcagtgaaatgcgtagagatgtggaggaataccgatggcgaaggcagccccctgggccaatactgacgctcatgcacgaaagcgtggggagcaaacaggattagataccctggtagtccacgccctaaacgatgtcaactagttgttggggattcatttccttagtaacgtagctaacgcgtgaagttgaccgcctggggagtacggtcgcaagattaaaactcaaaggaattgacggggacccgcacaagcggtggatgatgtggattaattcgatgcaacgcgaaaaaccttacctacccttgacatggtcggaatcccgaagagatttgggagtgctcgaaagagaaccgatacacaggtgctgcatggctgtcgtcagctcgtgtcgtgagatgttgggttaagtcccgcaacgagcgcaacccttgtccttagttgctacgcaagagcactctaaggagactgccggtgacaaaccggaggaaggtggggatgacgtcaagtcctcatggcccttatgggtagggcttcacacgtcatacaatggtcggaacagagggtcgccaacccgcgagggggagctaatcccagaaaaccgatcgtagtccggattgcactctgcaactcgagtgcatgaagctggaatcgctagtaatcgcggatcagcatgccgcggtgaatacgttcccgggtcttgtacacaccgcccgtcacaccatgggagtgggttttaccagaagtggctagtctaaccgcaaggaggacggtcaccacggtaggattcatgactggggtg

SEQ ID NO: 943 - DNA, 1453 bp, Burkholderia pseudomallei
attgaacgctggcggcatgccttacacatgcaagtcgaacggcagcacgggcttcggcctggtggcgagtggcgaacgggtgagtaatacatcggaacatgtcctgtagtgggggatagcccggcgaaagccggattaataccgcatacgatctaaggatgaaagcgggggaccttcgggcctcgcgctatagggttggccgatggctgattagctagttggtggggtaaaggcctaccaaggcgacgatcagtagctggtctgagaggacgaccagccacactgggactgagacacggcccagactcctacgggaggcagcagtggggaattttggacaatgggcgcaagcctgatccagcaatgccgcgtgtgtgaagaaggccttcgggttgtaaagcacttttgtccggaaagaaatcattctggctaatacccggagtggatgacggtaccggaagaataagcaccggctaactacgtgccagcagccgcggtaatacgtagggtgcgagcgttaatcggaattactgggcgtaaagcgtgcgcaggcggtttgctaagaccgatgtgaaatccccgggctcaacctgggaactgcattggtgactggcaggctagagtatggcagaggggggtagaattccacgtgtagcagtgaaatgcgtagagatgtggaggaataccgatggcgaaggcagccccctgggccaatactgacgctcatgcacgaaagcgtggggagcaaacaggattagataccctggtagtccacgccctaaacgatgtcaactagttgttggggattcatttccttagtaacgtagctaacgcgtgaagttgaccgcctggggagtacggtcgcaagattaaaactcaaaggaattgacggggacccgcacaagcggtggatgatgtggattaattcgatgcaacgcgaaaaaccttacctacccttgacatggtcggaagcccgatgagagttgggcgtgctcgaaagagaaccggcgcacaggtgctgcatggctgtcgtcagctcgtgtcgtgagatgttgggttaagtcccgcaacgagcgcaacccttgtccttagttgctacgcaagagcactctaaggagactgccggtgacaaaccggaggaaggtggggatgacgtcaagtcctcatggcccttatgggtagggcttcacacgtcatacaatggtcggaacagagggtcgccaacccgcgagggggagccaatcccagaaaaccgatcgtagtccggattgcactctgcaactcgagtgcatgaagctggaatcgctagtaatcgcggatcagcatgccgcggtgaatacgttcccgggtcttgtacacaccgcccgtcacaccatgggagtgggttttaccagaagtggctagtctaaccgcaaggaggacggtcaccacggtaggattcatgactggggtg

SEQ ID NO: 944 - DNA, 1455 bp, Burkholderia pseudomultivorans
  misc_feature (156)..(157): n is a, c, g, or t
attgaacgctggcggcatgccttacacatgcaagtcgaacggcagcacgggtgcttgcacctggtggcgagtggcgaacgggtgagtaatacatcggaacatgtcctgtagtgggggatagcccggcgaaagccggattaataccgcatacgatcnnaggatgaaagcgggggaccttcgggcctcgcgctatagggttggccgatggctgattagctagttggtggggtaaaggcctaccaaggcgacgatcagtagctggtctgagaggacgaccagccacactgggactgagacacggcccagactcctacgggaggcagcagtggggaattttggacaatgggcgaaagcctgatccagcaatgccgcgtgtgtgaagaaggccttcgggttgtaaagcacttttgtccggaaagaaaacctctgggttaataccctggggggatgacggtaccggaagaataagcaccggctaactacgtgccagcagccgcggtaatacgtagggtgcgagcgttaatcggaattactgggcgtaaagcgtgcgcaggcggtttgttaagacagatgtgaaatccccgggctcaacctgggaactgcatttgtgactggcaggctagagtatggcagaggggggtagaattccacgtgtagcagtgaaatgcgtagagatgtggaggaataccgatggcgaaggcagccccctgggccaatactgacgctcatgcacgaaagcgtggggagcaaacaggattagataccctggtagtccacgccctaaacgatgtcaactagttgttggggattcatttccttagtaacgtagctaacgcgtgaagttgaccgcctggggagtacggtcgcaagattaaaactcaaaggaattgacggggacccgcacaagcggtggatgatgtggattaattcgatgcaacgcgaaaaaccttacctacccttgacatggtcggaatcctgaagagattcgggagtgctcgaaagagaaccggcgcacaggtgctgcatggctgtcgtcagctcgtgtcgtgagatgttgggttaagtcccgcaacgagcgcaacccttgtccttagttgctacgcaagagcactctaaggagactgccggtgacaaaccggaggaaggtggggatgacgtcaagtcctcatggcccttatgggtagggcttcacacgtcatacaatggtcggaacagagggttgccaacccgcgagggggagctaatcccagaaaaccgatcgtagtccggattgcactctgcaactcgagtgcatgaagctggaatcgctagtaatcgcggatcagcatgccgcggtgaatacgttcccgggtcttgtacacaccgcccgtcacaccatgggagtgggttttaccagaagtggctagtctaaccgcaaggaggacggtcaccacggtaggattcatgactggggtg

SEQ ID NO: 945 - DNA, 1455 bp, Burkholderia puraquae
  misc_feature (987)..(987): n is a, c, g, or t
attgaacgctggcggcatgccttacacatgcaagtcgaacggcagcacgggtgcttgcacctggtggcgagtggcgaacgggtgagtaatacatcggaacatgtcctgtagtgggggatagcccggcgaaagccggattaataccgcatacgatctacggatgaaagcgggggaccttcgggcctcgcgctatagggttggccgatggctgattagctagttggtggggtaaaggcctaccaaggcgacgatcagtagctggtctgagaggacgaccagccacactgggactgagacacggcccagactcctacgggaggcagcagtggggaattttggacaatgggcgaaagcctgatccagcaatgccgcgtgtgtgaagaaggccttcgggttgtaaagcacttttgtccggaaagaaatccttggctctaatacagtcgggggatgacggtaccggaagaataagcaccggctaactacgtgccagcagccgcggtaatacgtagggtgcgagcgttaatcggaattactgggcgtaaagcgtgcgcaggcggtttgttaagaccgatgtgaaatccccgggctcaacctgggaactgcattggtgactggcaagctagagtatggcagaggggggtagaattccacgtgtagcagtgaaatgcgtagagatgtggaggaataccgatggcgaaggcagccccctgggccaatactgacgctcatgcacgaaagcgtggggagcaaacaggattagataccctggtagtccacgccctaaacgatgtcaactagttgttggggattcatttccttagtaacgtagctaacgcgtgaagttgaccgcctggggagtacggtcgcaagattaaaactcaaaggaattgacggggacccgcacaagcggtggatgatgtggattaattcgatgcaacgcgaaaaaccttacctacccttgacatggtcggaatcctgctgagaggngggagtgctcgaaagagaaccggcgcacaggtgctgcatggctgtcgtcagctcgtgtcgtgagatgttgggttaagtcccgcaacgagcgcaacccttgtccttagttgctacgcaagagcactctaaggagactgccggtgacaaaccggaggaaggtggggatgacgtcaagtcctcatggcccttatgggtagggcttcacacgtcatacaatggtcggaacagagggttgccaacccgcgagggggagctaatcccagaaaaccgatcgtagtccggattgcactctgcaactcgagtgcatgaagctggaatcgctagtaatcgcggatcagcatgccgcggtgaatacgttcccgggtcttgtacacaccgcccgtcacaccatgggagtgggttttaccagaagtggctagtctaaccgcaaggaggacggtcaccacggtaggattcatgactggggtg

SEQ ID NO: 946 - DNA, 1455 bp, Burkholderia pyrrocinia
attgaacgctggcggcatgccttacacatgcaagtcgaacggcagcacgggtgcttgcacctggtggcgagtggcgaacgggtgagtaatacatcggaacatgtcctgtagtgggggatagcccggcgaaagccggattaataccgcatacgatctacggatgaaagcgggggaccttcgggcctcgcgctatagggttggccgatggctgattagctagttggtggggtaaaggcctaccaaggcgacgatcagtagctggtctgagaggacgaccagccacactgggactgagacacggcccagactcctacgggaggcagcagtggggaattttggacaatgggcgaaagcctgatccagcaatgccgcgtgtgtgaagaaggccttcgggttgtaaagcacttttgtccggaaagaaatccttggttctaatataaccgggggatgacggtaccggaagaataagcaccggctaactacgtgccagcagccgcggtaatacgtagggtgcgagcgttaatcggaattactgggcgtaaagcgtgcgcaggcggtttgctaagaccgatgtgaaatccccgggctcaacctgggaactgcattggtgactggcaggctagagtatggcagaggggggtagaattccacgtgtagcagtgaaatgcgtagagatgtggaggaataccgatggcgaaggcagccccctgggccaatactgacgctcatgcacgaaagcgtggggagcaaacaggattagataccctggtagtccacgccctaaacgatgtcaactagttgttggggattcatttccttagtaacgtagctaacgcgtgaagttgaccgcctggggagtacggtcgcaagattaaaactcaaaggaattgacggggacccgcacaagcggtggatgatgtggattaattcgatgcaacgcgaaaaaccttacctacccttgacatggtcggaatcctgctgagaggtgggagtgctcgaaagagaaccgatacacaggtgctgcatggctgtcgtcagctcgtgtcgtgagatgttgggttaagtcccgcaacgagcgcaacccttgtccttagttgctacgcaagagcactctaaggagactgccggtgacaaaccggaggaaggtggggatgacgtcaagtcctcatggcccttatgggtagggcttcacacgtcatacaatggtcggaacagagggttgccaacccgcgagggggagctaatcccagaaaaccgatcgtagtccggattgcactctgcaactcgagtgcatgaagctggaatcgctagtaatcgcggatcagcatgccgcggtgaatacgttcccgggtcttgtacacaccgcccgtcacaccatgggagtgggttttaccagaagtggctagtctaaccgcaaggaggacggtcaccacggtaggattcatgactggggtg

SEQ ID NO: 947 - DNA, 1455 bp, Burkholderia seminalis
  misc_feature (156)..(157): n is a, c, g, or t
  misc_feature (987)..(987): n is a, c, g, or t
attgaacgctggcggcatgccttacacatgcaagtcgaacggcagcacgggtgcttgcacctggtggcgagtggcgaacgggtgagtaatacatcggaacatgtcctgtagtgggggatagcccggcgaaagccggattaataccgcatacgatcnntggatgaaagcgggggaccttcgggcctcgcgctatagggttggccgatggctgattagctagttggtggggtaaaggcctaccaaggcgacgatcagtagctggtctgagaggacgaccagccacactgggactgagacacggcccagactcctacgggaggcagcagtggggaattttggacaatgggcgaaagcctgatccagcaatgccgcgtgtgtgaagaaggccttcgggttgtaaagcacttttgtccggaaagaaatccctggctctaatacagtcgggggatgacggtaccggaagaataagcaccggctaactacgtgccagcagccgcggtaatacgtagggtgcaagcgttaatcggaattactgggcgtaaagcgtgcgcaggcggtttgctaagaccgatgtgaaatccccgggctcaacctgggaactgcattggtgactggcaggctagagtatggcagaggggggtagaattccacgtgtagcagtgaaatgcgtagagatgtggaggaataccgatggcgaaggcagccccctgggccaatactgacgctcatgcacgaaagcgtggggagcaaacaggattagataccctggtagtccacgccctaaacgatgtcaactagttgttggggattcatttccttagtaacgtagctaacgcgtgaagttgaccgcctggggagtacggtcgcaagattaaaactcaaaggaattgacggggacccgcacaagcggtggatgatgtggattaattcgatgcaacgcgaaaaaccttacctacccttgacatggtcggaatcctgctgagaggngggagtgctcgaaagagaaccggcgcacaggtgctgcatggctgtcgtcagctcgtgtcgtgagatgttgggttaagtcccgcaacgagcgcaacccttgtccttagttgctacgcaagagcactctaaggagactgccggtgacaaaccggaggaaggtggggatgacgtcaagtcctcatggcccttatgggtagggcttcacacgtcatacaatggtcggaacagagggttgccaacccgcgagggggagctaatcccagaaaaccgatcgtagtccggattgcactctgcaactcgagtgcatgaagctggaatcgctagtaatcgcggatcagcatgccgcggtgaatacgttcccgggtcttgtacacaccgcccgtcacaccatgggagtgggttttaccagaagtggctagtctaaccgcaaggaggacggtcaccacggtaggattcatgactggggtg

SEQ ID NO: 948 - DNA, 1453 bp, Burkholderia singularis
attgaacgctggcggcatgccttacacatgcaagtcgaacggcagcacgggcttcggcctggtggcgagtggcgaacgggtgagtaatacatcggaacatatcctgtagtgggggatagcccggcgaaagccggattaataccgcatacgatctttggatgaaagcgggggaccttcgggcctcgcgctataggggtggccgatggctgattagctagttggtggggtaaaggcctaccaaggcgacgatcagtagctggtctgagaggacgaccagccacactgggactgagacacggcccagactcctacgggaggcagcagtggggaattttggacaatgggggcaaccctgatccagcaatgccgcgtgtgtgaagaaggccttcgggttgtaaagcacttttgtccggaaagaaaacctaatggctaataaccgttggggatgacggtaccggaagaataagcaccggctaactacgtgccagcagccgcggtaatacgtagggtgcgagcgttaatcggaattactgggcgtaaagcgtgcgcaggcggtttgctaagaccgatgtgaaatccccgggctcaacctgggaactgcattggtgactggcaggctagagtatggcagaggggggtagaattccacgtgtagcagtgaaatgcgtagagatgtggaggaataccgatggcgaaggcagccccctgggccaatactgacgctcatgcacgaaagcgtggggagcaaacaggattagataccctggtagtccacgccctaaacgatgtcaactagttgttggggattcatttccttagtaacgtagctaacgcgtgaagttgaccgcctggggagtacggtcgcaagattaaaactcaaaggaattgacggggacccgcacaagcggtggatgatgtggattaattcgatgcaacgcgaaaaaccttacctacccttgacatggtcggaatcctgctgagaggcgggagtgctcgaaagagaaccggcgcacaggtgctgcatggctgtcgtcagctcgtgtcgtgagatgttgggttaagtcccgcaacgagcgcaacccttgtccttagttgctacgcaagagcactctagggagactgccggtgacaaaccggaggaaggtggggatgacgtcaagtcctcatggcccttatgggtagggcttcacacgtcatacaatggtcggaacagagggtcgccaacccgcgagggggagccaatcccagaaaaccgatcgtagtccggattgcactctgcaactcgagtgcatgaagctggaatcgctagtaatcgcggatcagcatgccgcggtgaatacgttcccgggtcttgtacacaccgcccgtcacaccatgggagtgggttttaccagaagtggctagtctaaccgcaaggaggacggtcaccacggtaggattcatgactggggtg

SEQ ID NO: 949 - DNA, 1455 bp, Burkholderia stabilis
attgaacgctggcggcatgccttacacatgcaagtcgaacggcagcacgggtgcttgcacctggtggcgagtggcgaacgggtgagtaatacatcggaacatgtcctgtagtgggggatagcccggcgaaagccggattaataccgcatacgatctatggatgaaagcgggggaccttcgggcctcgcgctatagggttggccgatggctgattagctagttggtggggtaaaggcctaccaaggcgacgatcagtagctggtctgagaggacgaccagccacactgggactgagacacggcccagactcctacgggaggcagcagtggggaattttggacaatgggcgaaagcctgatccagcaatgccgcgtgtgtgaagaaggccttcgggttgtaaagcacttttgtccggaaagaaatccttggttctaatatagccgggggatgacggtaccggaagaataagcaccggctaactacgtgccagcagccgcggtaatacgtagggtgcgagcgttaatcggaattactgggcgtaaagcgtgcgcaggcggtttgctaagaccgatgtgaaatccccgggctcaacctgggaactgcattggtgactggcaggctagagtatggcagaggggggtagaattccacgtgtagcagtgaaatgcgtagagatgtggaggaataccgatggcgaaggcagccccctgggccaatactgacgctcatgcacgaaagcgtggggagcaaacaggattagataccctggtagtccacgccctaaacgatgtcaactagttgttggggattcatttccttagtaacgtagctaacgcgtgaagttgaccgcctggggagtacggtcgcaagattaaaactcaaaggaattgacggggacccgcacaagcggtggatgatgtggattaattcgatgcaacgcgaaaaaccttacctacccttgacatggtcggaatcctgctgagaggtgggagtgctcgaaagagaaccgatacacaggtgctgcatggctgtcgtcagctcgtgtcgtgagatgttgggttaagtcccgcaacgagcgcaacccttgtccttagttgctacgcaagagcactctaaggagactgccggtgacaaaccggaggaaggtggggatgacgtcaagtcctcatggcccttatgggtagggcttcacacgtcatacaatggtcggaacagagggttgccaacccgcgagggggagctaatcccagaaaaccgatcgtagtccggattgcactctgcaactcgagtgcatgaagctggaatcgctagtaatcgcggatcagcatgccgcggtgaatacgttcccgggtcttgtacacaccgcccgtcacaccatgggagtgggttttaccagaagtggctagtctaaccgcaaggaggacggtcaccacggtaggattcatgactggggtg

SEQ ID NO: 950 - DNA, 1455 bp, Burkholderia stagnalis
  misc_feature (156)..(156): n is a, c, g, or t
attgaacgctggcggcatgccttacacatgcaagtcgaacggcagcacgggtgcttgcacctggtggcgagtggcgaacgggtgagtaatacatcggaacatgtcctgtagtgggggatagcccggcgaaagccggattaataccgcatacgatcnacggatgaaagcgggggaccttcgggcctcgcgctatagggttggccgatggctgattagctagttggtggggtaaaggcctaccaaggcgacgatcagtagctggtctgagaggacgaccagccacactgggactgagacacggcccagactcctacgggaggcagcagtggggaattttggacaatgggcgaaagcctgatccagcaatgccgcgtgtgtgaagaaggccttcgggttgtaaagcacttttgtccggaaagaaatccttggtcctaatatggccgggggatgacggtaccggaagaataagcaccggctaactacgtgccagcagccgcggtaatacgtagggtgcgagcgttaatcggaattactgggcgtaaagcgtgcgcaggcggtttgctaagaccgatgtgaaatccccgggctcaacctgggaactgcattggtgactggcaggctagagtatggcagaggggggtagaattccacgtgtagcagtgaaatgcgtagagatgtggaggaataccgatggcgaaggcagccccctgggccaatactgacgctcatgcacgaaagcgtggggagcaaacaggattagataccctggtagtccacgccctaaacgatgtcaactagttgttggggattcatttccttagtaacgtagctaacgcgtgaagttgaccgcctggggagtacggtcgcaagattaaaactcaaaggaattgacggggacccgcacaagcggtggatgatgtggattaattcgatgcaacgcgaaaaaccttacctacccttgacatggtcggaatcctgccgagaggcgggagtgctcgaaagagaaccgatacacaggtgctgcatggctgtcgtcagctcgtgtcgtgagatgttgggttaagtcccgcaacgagcgcaacccttgtccttagttgctacgcaagagcactctagggagactgccggtgacaaaccggaggaaggtggggatgacgtcaagtcctcatggcccttatgggtagggcttcacacgtcatacaatggtcggaacagagggttgccaacccgcgagggggagctaatcccagaaaaccgatcgtagtccggattgcactctgcaactcgagtgcatgaagctggaatcgctagtaatcgcggatcagcatgccgcggtgaatacgttcccgggtcttgtacacaccgcccgtcacaccatgggagtgggttttaccagaagtggctagtctaaccgcaaggaggacggtcaccacggtaggattcatgactggggtg

SEQ ID NO: 951 - DNA, 1443 bp, Burkholderia territorii
  misc_feature (156)..(156): n is a, c, g, or t
  misc_feature (430)..(430): n is a, c, g, or t
  misc_feature (980)..(980): n is a, c, g, or t
attgaacgctggcggcatgccttacacatgcaagtcgaacggcagcacgggtgcttgcacctggtggcgagtggcgaacgggtgagtaatacatcggaacatgtcctgtagtgggggatagcccggcgaaagccggattaataccgcatacgatcnacggatgaaagcgggggaccttcgggcctcgcgctatagggttggccgatggctgattagctagttggtggggtaaaggcctaccaaggcgacgatcagtagctggtctgagaggacgaccagccacactgggactgagacacggcccagactcctacgggaggcagcagtggggaattttggacaatgggcgaaagcctgatccagcaatgccgcgtgtgtgaagaaggccttcgggttgtaaagcacttttgtccggaaagaaatccttggntctaatacagtcgggggatgacggtaccggaagaataagcaccggctaactacgtgccagcagccgcggtaatacgtagggtgcaagcgttaatcggaattactgggcgtaaagcgtgcgcaggcggtttgctaagaccgatgtgaaatccccgggctcaacctgggaactgcattggtgactggcaggctagagtatggcagaggggggtagaattccacgtgtagcagtgaaatgcgtagagatgtggaggaataccgatggcgaaggcagccccctgggccaatactgacgctcatgcacgaaagcgtggggagcaaacaggattagataccctggtagtccacgccctaaacgatgtcaactagttgttggggattcatttccttagtaacgtagctaacgcgtgaagttgaccgcctggggagtacggtcgcaagattaaaactcaaaggaattgacggggacccgcacaagcggtggatgatgtggattaattcgatgcaacgcgaaaaaccttacctacccttgacatggtcggaatcctgcngagaggcgggagtgctcgaaagagaaccggcgcacaggtgctgcatggctgtcgtcagctcgtgtcgtgagatgttgggttaagtcccgcaacgagcgcaacccttgtccttagttgctacgcaagagcactctaaggagactgccggtgacaaaccggaggaaggtggggatgacgtcaagtcctcatggcccttatgggtagggcttcacacgtcatacaatggtcggaacagagggttgccaacccgcgagggggagctaatcccagaaaaccgatcgtagtccggattgcactctgcaactcgagtgcatgaagctggaatcgctagtaatcgcggatcagcatgccgcggtgaatacgttcccgggtcttgtacacaccgcccgtcacaccatgggagtgggttttaccagaagtggctagtctaaccgcaaggaggacggtcaccacggtaggattc

SEQ ID NO: 952 - DNA, 1453 bp, Burkholderia thailandensis
attgaacgctggcggcatgccttacacatgcaagtcgaacggcagcgcgggcttcggcctggcggcgagtggcgaacgggtgagtaatacatcggaacatgtcctgtagtgggggatagcccggcgaaagccggattaataccgcatacgatctgtggatgaaagcgggggaccttcgggcctcgcgctatagggttggccgatggctgattagctagttggtggggtaaaggcctaccaaggcgacgatcagtagctggtctgagaggacgaccagccacactgggactgagacacggcccagactcctacgggaggcagcagtggggaattttggacaatgggcgcaagcctgatccagcaatgccgcgtgtgtgaagaaggccttcgggttgtaaagcacttttgtccggaaagaaatcatcctggctaataaccggggtggatgacggtaccggaagaataagcaccggctaactacgtgccagcagccgcggtaatacgtagggtgcgagcgttaatcggaattactgggcgtaaagcgtgcgcaggcggtttgctaagaccgatgtgaaatccccgggctcaacctgggaactgcattggtgactggcaggctagagtatggcagaggggggtagaattccacgtgtagcagtgaaatgcgtagagatgtggaggaataccgatggcgaaggcagccccctgggccaatactgacgctcatgcacgaaagcgtggggagcaaacaggattagataccctggtagtccacgccctaaacgatgtcaactagttgttggggattcatttccttagtaacgtagctaacgcgtgaagttgaccgcctggggagtacggtcgcaagattaaaactcaaaggaattgacggggacccgcacaagcggtggatgatgtggattaattcgatgcaacgcgaaaaaccttacctacccttgacatggtcggaatcctgctgagaggcgggagtgctcgaaagagaaccggcgcacaggtgctgcatggctgtcgtcagctcgtgtcgtgagatgttgggttaagtcccgcaacgagcgcaacccttgtccttagttgctacgcaagagcactctaaggagactgccggtgacaaaccggaggaaggtggggatgacgtcaagtcctcatggcccttatgggtagggcttcacacgtcatacaatggtcggaacagagggtcgccaacccgcgagggggagccaatcccagaaaaccgatcgtagtccggattgcactctgcaactcgagtgcatgaagctggaatcgctagtaatcgcggatcagcatgccgcggtgaatacgttcccgggtcttgtacacaccgcccgtcacaccatgggagtgggttttaccagaagtggctagtctaaccgcaaggaggacggtcaccacggtaggattcatgactggggtg

SEQ ID NO: 953 - DNA, 1313 bp, Burkholderia ubonensis
ggcgagtggcgaacgggtgagtaatacatcggaacatgtcctgtagtgggggatagcccggcgaaagccggattaataccgcatacgatctacggatgaaagcgggggaccttcgggcctcgcgctatagggttggccgatggctgattagctagttggtggggtaaaggcctaccaaggcgacgatcagtagctggtctgagaggacgaccagccacactgggactgagacacggcccagactcctacgggaggcagcagtggggaattttggacaatgggggaaagcctgatccagcaatgccgcgtgtgtgaagaaggccttcgggttgtaaagcacttttgtccggaaagaaatccttggcctaatatggccgggggatgacggtaccggaagaataagcaccggctaactacgtgccagcagccgcggtaatacgtagggtgcgagcgttaatcggaattactgggcgtaaagcgtgcgcaggcggtttgctaagaccgatgtgaaatccccgggctcaacctgggaactgcattggtgactggcaggctagagtatggcagaggggggtagaattccacgtgtagcagtgaaatgcgtagagatgtggaggaataccgatggcgaaggcagccccctgggccaatactgacgctcatgcacgaaagcgtggggagcaaacaggattagataccctggtagtccacgccctaaacgatgtcaactagttgttggggattcatttccttagtaacgtagctaacgcgtgaagttgaccgcctggggagtacggtcgcaagattaaaactcaaaggaattgacggggacccgcacaagcggtggatgatgtggattaattcgatgcaacgcgaaaaaccttacctacccttgacatggtcggaatcctgaagagattcgggagtgctcgaaagagaaccggcgcacaggtgctgcatggctgtcgtcagctcgtgtcgtgagatgttgggttaagtcccgcaacgagcgcaacccttgtccttagttgctacgcaagagcactctaaggagactgccggtgacaaaccggaggaaggtggggatgacgtcaagtcctcatggcccttatgggtagggcttcacacgtcatacaatggtcggaacagagggtcgccaacccgcgagggggagctaatcccagaaaaccgatcgtagtccggattgcactctgcaactcgagtgcatgaagctggaatcgctagtaatcgcggatcagcatgccgcggtgaatacgttcccgggtcttgtacacaccgcccgtcacaccatg

SEQ ID NO: 954 - DNA, 1455 bp, Burkholderia vietnamiensis
attgaacgctggcggcatgccttacacatgcaagtcgaacggcagcacgggtgcttgcacctggtggcgagtggcgaacgggtgagtaatacatcggaacatgtcctgtagtgggggatagcccggcgaaagccggattaataccgcatacgatctatggatgaaagcgggggaccttcgggcctcgcgctatagggttggccgatggctgattagctagttggtggggtaaaggcctaccaaggcgacgatcagtagctggtctgagaggacgaccagccacactgggactgagacacggcccagactcctacgggaggcagcagtggggaattttggacaatgggcgaaagcctgatccagcaatgccgcgtgtgtgaagaaggccttcgggttgtaaagcacttttgtccggaaagaaatccttggctctaatacagtcgggggatgacggtaccggaagaataagcaccggctaactacgtgccagcagccgcggtaatacgtagggtgcaagcgttaatcggaattactgggcgtaaagcgtgcgcaggcggtttgctaagaccgatgtgaaatccccgggctcaacctgggaactgcattggtgactggcaggctagagtatggcagaggggggtagaattccacgtgtagcagtgaaatgcgtagagatgtggaggaataccgatggcgaaggcagccccctgggccaatactgacgctcatgcacgaaagcgtggggagcaaacaggattagataccctggtagtccacgccctaaacgatgtcaactagttgttggggattcatttccttagtaacgtagctaacgcgtgaagttgaccgcctggggagtacggtcgcaagattaaaactcaaaggaattgacggggacccgcacaagcggtggatgatgtggattaattcgatgcaacgcgaaaaaccttacctacccttgacatggtcggaatcctgaagagattcgggagtgctcgaaagagaaccggcgcacaggtgctgcatggctgtcgtcagctcgtgtcgtgagatgttgggttaagtcccgcaacgagcgcaacccttgtccttagttgctacgcaagagcactctaaggagactgccggtgacaaaccggaggaaggtggggatgacgtcaagtcctcatggcccttatgggtagggcttcacacgtcatacaatggtcggaacagagggttgccaacccgcgagggggagctaatcccagaaaaccgatcgtagtccggattgcactctgcaactcgagtgcatgaagctggaatcgctagtaatcgcggatcagcatgccgcggtgaatacgttcccgggtcttgtacacaccgcccgtcacaccatgggagtgggttttaccagaagtggctagtctaaccgcaaggaggacggtcaccacggtaggattcatgactggggtg

SEQ ID NO: 955 - DNA, 1462 bp, Buttiauxella agrestis
attgaacgctggcggcaggcctaacacatgcaagtcgagcggtagcacagggagcttgctcctgggtgacgagcggcggacgggtgagtaatgtctgggaaactgcctgatggagggggataactactggaaacggtagctaataccgcataacgtcttcggaccaaagagggggaccttcgggcctcttgccatcagatgtgcccagatgggattagctagtaggtgaggtaatggctcacctaggcgacgatccctagctggtctgagaggatgaccagccacactggaactgagacacggtccagactcctacgggaggcagcagtggggaatattgcacaatgggcgcaagcctgatgcagccatgccgcgtgtatgaagaaggccttcgggttgtaaagtactttcagcgaggaggaaggcattgtggttaataaccgcagtgattgacgttactcgcagaagaagcaccggctaactccgtgccagcagccgcggtaatacggagggtgcaagcgttaatcggaattactgggcgtaaagcgcacgcaggcggtctgtcaagtcggatgtgaaatccccgggctcaacctgggaactgcattcgaaactggcaggctagagtcttgtagaggggggtagaattccaggtgtagcggtgaaatgcgtagagatctggaggaataccggtggcgaaggcggccccctggacaaagactgacgctcaggtgcgaaagcgtggggagcaaacaggattagataccctggtagtccacgccgtaaacgatgtcgacttggaggttgttcccttgaggagtggcttccggagctaacgcgttaagtcgaccgcctggggagtacggccgcaaggttaaaactcaaatgaattgacgggggcccgcacaagcggtggagcatgtggtttaattcgatgcaacgcgaagaaccttacctactcttgacatccagagaattcgctagagatagcttagtgccttcgggaactctgagacaggtgctgcatggctgtcgtcagctcgtgttgtgaaatgttgggttaagtcccgcaacgagcgcaacccttatcctttgttgccagcggttcggccgggaactcaaaggagactgccagtgataaactggaggaaggtggggatgacgtcaagtcatcatggcccttacgagtagggctacacacgtgctacaatggcgcatacaaagagaagcgacctcgcgagagcaagcggacctcataaagtgcgtcgtagtccggatcggagtctgcaactcgactccgtgaagtcggaatcgctagtaatcgtagatcagaatgctacggtgaatacgttcccgggccttgtacacaccgcccgtcacaccatgggagtgggttgcaaaagaagtaggtagcttaaccttcgggagggcgcttaccactttgtgattcatgactggggtg

SEQ ID NO: 956 - DNA, 1462 bp, Buttiauxella brennerae
attgaacgctggcggcaggcctaacacatgcaagtcgagcggtagcacagggagcttgctcctgggtgacgagcggcggacgggtgagtaatgtctgggaaactgcctgatggagggggataactactggaaacggtagctaataccgcataacgtcttcggaccaaagagggggaccttcgggcctcttgccatcagatgtgcccagatgggattagctagtaggtgaggtaatggctcacctaggcgacgatccctagctggtctgagaggatgaccagccacactggaactgagacacggtccagactcctacgggaggcagcagtggggaatattgcacaatgggcgcaagcctgatgcagccatgccgcgtgtatgaagaaggccttcgggttgtaaagtactttcagcgaggaggaaggcattgtggttaataaccacagtgattgacgttactcgcagaagaagcaccggctaactccgtgccagcagccgcggtaatacggagggtgcaagcgttaatcggaattactgggcgtaaagcgcacgcaggcggtttgtcaagtcggatgtgaaatccccgggctcaacctgggaactgcattcgaaactggcaagctagagtcttgtagaggggggtagaattccaggtgtagcggtgaaatgcgtagagatctggaggaataccggtggcgaagggcggcccctggacaaagactgacgctcaggtgcgaaagcgtggggagcaaacaggattagataccctggtagtccacgccgtaaacgatgtcgacttggaggttgttcccttgaggagtggcttccggagctaacgcgttaagtcgaccgcctggggagtacggccgcaaggttaaaactcaaatgaattgacgggggcccgcacaagcggtggagcatgtggtttaattcgatgcaacgcgaagaaccttacctactcttgacatccagagaattcgctagagatagcttagtgccttcgggaactctgagacaggtgctgcatggctgtcgtcagctcgtgttgtgaaatgttgggttaagtcccgcaacgagcgcaacccttatcctttgttgccagcggttcggccgggaactcaaaggagactgccagtgataaactggaggaaggtggggatgacgtcaagtcatcatggcccttacgagtagggctacacacgtgctacaatggcgcatacaaagagaagcgacctcgcgagagcaagcggacctcataaagtgcgtcgtagtccggatcggagtctgcaactcgactccgtgaagtcggaatcgctagtaatcgtagatcagaatgctacggtgaatacgttcccgggccttgtacacaccgcccgtcacaccatgggagtgggttgcaaaagaagtaggtagcttaaccttcgggagggcgcttaccactttgtgattcatgactggggtg

SEQ ID NO: 957 - DNA, 1462 bp, Buttiauxella gaviniae
attgaacgctggcggcaggcctaacacatgcaagtcgagcggtagcacagggagcttgctcctgggtgacgagcggcggacgggtgagtaatgtctgggaaactgcctgatggagggggataactactggaaacggtagctaataccgcataacgtcttcggaccaaagagggggaccttcgggcctcttgccatcagatgtgcccagatgggattagctagtaggtgaggtaatggctcacctaggcgacgatccctagctggtctgagaggatgaccagccacactggaactgagacacggtccagactcctacgggaggcagcagtggggaatattgcacaatgggcgcaagcctgatgcagccatgccgcgtgtatgaagaaggccttcgggttgtaaagtactttcagcgaggaggaaggcattgtggttaataaccgcagtgattgacgttactcgcagaagaagcaccggctaactccgtgccagcagccgcggtaatacggagggtgcaagcgttaatcggaattactgggcgtaaagcgcacgcaggcggtttgtcaagtcggatgtgaaatccccgggctcaacctgggaactgcattcgaaactggcaagctagagtcttgtagaggggggtagaattccaggtgtagcggtgaaatgcgtagagatctggaggaataccggtggcgaaggcggccccctggacaaagactgacgctcaggtgcgaaagcgtggggagcaaacaggattagataccctggtagtccacgccgtaaacgatgtcgacttggaggttgttcccttgaggagtggcttccggagctaacgcgttaagtcgaccgcctggggagtacggccgcaaggttaaaactcaaatgaattgacgggggcccgcacaagcggtggagcatgtggtttaattcgatgcaacgcgaagaaccttacctactcttgacatccacagaattcggcagagatgccttagtgccttcgggaactgtgagacaggtgctgcatggctgtcgtcagctcgtgttgtgaaatgttgggttaagtcccgcaacgagcgcaacccttatcctttgttgccagcggttcggccgggaactcaaaggagactgccagtgataaactggaggaaggtggggatgacgtcaagtcatcatggcccttacgagtagggctacacacgtgctacaatggcgcatacaaagagaagcgacctcgcgagagcaagcggacctcataaagtgcgtcgtagtccggatcggagtctgcaactcgactccgtgaagtcggaatcgctagtaatcgtagatcagaatgctacggtgaatacgttcccgggccttgtacacaccgcccgtcacaccatgggagtgggttgcaaaagaagtaggtagcttaaccttcgggagggcgcttaccactttgtgattcatgactggggtg

SEQ ID NO: 958 - DNA, 1462 bp, Buttiauxella izardii
attgaacgctggcggcaggcctaacacatgcaagtcgagcggtagcacagggagcttgctcctgggtgacgagcggcggacgggtgagtaatgtctgggaaactgcctgatggagggggataactactggaaacggtagctaataccgcataacgtcttcggaccaaagagggggaccttcgggcctcttgccatcagatgtgcccagatgggattagctagtaggtggggtaatggctcacctaggcgacgatccctagctggtctgagaggatgaccagccacactggaactgagacacggtccagactcctacgggaggcagcagtggggaatattgcacaatgggcgcaagcctgatgcagccatgccgcgtgtatgaagaaggccttcgggttgtaaagtactttcagcgaggaggaaggcattgtggttaataaccacagtgattgacgttactcgcagaagaagcaccggctaactccgtgccagcagccgcggtaatacggagggtgcaagcgttaatcggaattactgggcgtaaagcgcacgcaggcggtctgtcaagtcggatgtgaaatccccgggctcaacctgggaactgcattcgaaactggcaggctagagtcttgtagaggggggtagaattccaggtgtagcggtgaaatgcgtagagatctggaggaataccggtggcgaaggcggccccctggacaaagactgacgctcaggtgcgaaagcgtggggagcaaacaggattagataccctggtagtccacgccgtaaacgatgtcgacttggaggttgttcccttgaggagtggcttccggagctaacgcgttaagtcgaccgcctggggagtacggccgcaaggttaaaactcaaatgaattgacgggggcccgcacaagcggtggagcatgtggtttaattcgatgcaacgcgaagaaccttacctactcttgacatccacggaatttggcagagatgccttagtgccttcgggaaccgtgagacaggtgctgcatggctgtcgtcagctcgtgttgtgaaatgttgggttaagtcccgcaacgagcgcaacccttatcctttgttgccagcggttcggccgggaactcaaaggagactgccagtgataaactggaggaaggtggggatgacgtcaagtcatcatggcccttacgagtagggctacacacgtgctacaatggcgcatacaaagagaagcgacctcgcgagagcaagcggacctcataaagtgcgtcgtagtccggatcggagtctgcaactcgactccgtgaagtcggaatcgctagtaatcgtagatcagaatgctacggtgaatacgttcccgggccttgtacacaccgcccgtcacaccatgggagtgggttgcaaaagaagtaggtagcttaaccttcgggagggcgcttaccactttgtgattcatgactggggtg

SEQ ID NO: 959 - DNA, 1462 bp, Buttiauxella noackiae
attgaacgctggcggcaggcctaacacatgcaagtcgagcggtagcacagggagcttgctcctgggtgacgagcggcggacgggtgagtaatgtctgggaaactgcctgatggagggggataactactggaaacggtagctaataccgcataacgtcttcggaccaaagagggggaccttcgggcctcttgccatcagatgtgcccagatgggattagctagtaggtgaggtaatggctcacctaggcgacgatccctagctggtctgagaggatgaccagccacactggaactgagacacggtccagactcctacgggaggcagcagtggggaatattgcacaatgggcgcaagcctgatgcagccatgccgcgtgtatgaagaaggccttcgggttgtaaagtactttcagcgaggaggaaggcattgtggttaataaccgcagtgattgacgttactcgcagaagaagcaccggctaactccgtgccagcagccgcggtaatacggagggtgcaagcgttaatcggaattactgggcgtaaagcgcacgcaggcggtctgtcaagtcggatgtgaaatccccgggctcaacctgggaactgcattcgaaactggcaggctagagtcttgtagaggggggtagaattccaggtgtagcggtgaaatgcgtagagatctggaggaataccggtggcgaaggcggccccctggacaaagactgacgctcaggtgcgaaagcgtggggagcaaacaggattagataccctggtagtccacgccgtaaacgatgtcgacttggaggttgttcccttgaggagtggcttccggagctaacgcgttaagtcgaccgcctggggagtacggccgcaaggttaaaactcaaatgaattgacgggggcccgcacaagcggtggagcatgtggtttaattcgatgcaacgcgaagaaccttacctactcttgacatccacggaattcggcagagatgccttagtgccttcgggaaccgtgagacaggtgctgcatggctgtcgtcagctcgtgttgtgaaatgttgggttaagtcccgcaacgagcgcaacccttatcctttgttgccagcggttcggccgggaactcaaaggagactgccagtgataaactggaggaaggtggggatgacgtcaagtcatcatggcccttacgagtagggctacacacgtgctacaatggcgcatacaaagagaagcgacctcgcgagagcaagcggacctcataaagtgcgtcgtagtccggatcggagtctgcaactcgactccgtgaagtcggaatcgctagtaatcgtagatcagaatgctacggtgaatacgttcccgggccttgtacacaccgcccgtcacaccatgggagtgggttgcaaaagaagtaggtagcttaaccttcgggagggcgcttaccactttgtgattcatgactggggtg

SEQ ID NO: 960 - DNA, 1462 bp, Buttiauxella warmboldiae
attgaacggtggcggcaggcctaacacatgcaagtcgagcggtagcacagggagcttgctcttggctgacgagcggcggacgggtgagtaatgtctgggaaactgcctgatggagggggataactactggaaacggtagctaataccgcataacgtcttcggaccaaagagggggaccttcgggcctcttgccatcagatgtgcccagatgggattagctagcaggtgaggtaatggctcacctgggcgacgatccctagctggtctgagaggatgaccagccacactggaactgagacacggtccagactcctacgggaggcagcagtggggaatattgcacaatgggcgcaagcctgatgcagccatgccgcgtgtatgaagaaggccttcgggttgtaaagtactttcagcgaggaggaaggcattgtggttaataaccacagtgattgacgttactcgcagaagaagcaccggctaactccgtgccagcagccgcggtaatacggagggtgcaagcgttaatcggaattactgggcgtaaagcgcacgcaggcggtctgtcaagtcggatgtgaaatccccgggctcaacctgggaactgcattcgaaactggcaggctagagtcttgtagaggggggtagaattccaggtgtagcggtgaaatgcgtagagatctggaggaataccggtggcgaaggcggccccctggacaaagactgacgctcaggtgcgaaagcgtggggagcaaacaggattagataccctggtagtccacgccgtaaacgatgtcgacttggaggttgttcccttgaggagtggcttccggagctaacgcgttaagtcgaccgcctggggagtacggccgcaaggttaaaactcaaatgaattgacgggggcccgcacaagcggtggagcatgtggtttaattcgatgcaacgcgaagaaccttacctactcttgacatccacggaattcggcagagatgccttagtgccttcgggaaccgtgagacaggtgctgcatggctgtcgtcagctcgtgttgtgaaatgttgggttaagtcccgcaacgagcgcaacccttatcctttgttgccagcggttcggccgggaactcaaaggagactgccagtgataaactggaggaaggtggggatgacgtcaagtcatcatggcccttacgagtagggctacacacgtgctacaatggcgcatacaaagagaagcgacctcgcgagagcaagcggacctcataaagtgcgtcgtagtccggatcggagtctgcaactcgactccgtgaagtcggaatcgctagtaatcgtagatcagaatgctacggtgaatacgttcccgggccttgtacacaccgcccgtcacaccatgggagtgggttgcaaaagaagtaggtagcttaaccttcgggagggcgcttaccactttgtgattcatgactggggtg

SEQ ID NO: 961 - DNA, 1445 bp, Butyricimonas synergistica
gatgaacgctagcgacaggcttaacacatgcaagtcgaggggcagcatgaggtagcaataccttgatggcgaccggcgcacgggtgagtaacacgtgtgcaaccaacctcgtgccgggagataacccgcggaaacgtggactaacatcccatgggactttttggtcgcatgaccaaaattttaaaagtaatggcacgagacgggcacgcgcggcattaggtagttggcggggtaacggcccaccaagccgacgatgcctaggggttctgagaggaaggtcccccacactggaactgagacacggtccagactcctacgggaggcagcagtgaggaatattggtcaatgggcggaagcctgaaccagccaagtcgcgtgagggaagaatggtctatggcctgtaaacctcttttgaaagggaagaataagtggcacgtgtgccatgatgccagtacctttcgaataagcatcggctaactccgtgccagcagccgcggtaacacgggggatgcgagcgttatccggatttattgggtttaaagggcgcgtaggcgggatgccaagtcagcggtaaaagactgcagctaaactgtagcacgccgttgaaactggtgacctagagagaagtcgagggaggcggaacaagtgaagtagcggtgaaatgcttagatatcacttggaaccccgatagcgaaggcagcttcccagtctttgtctgacgctgatgcgcgagagcgtgggtagcgaacaggattagataccctggtagtccacgccgtaaacgatgctcactggatcttggcgatacacggccagggttcaagcgaaagtattaagtgagccacctggggagtacgtcggcaacgatgaaactcaaaggaattgacgggggcccgcacaagcggaggaacatgtggtttaattcgatgatacgcgaggaaccttacctgggtttaaatgtagagtgcattcgctggaaacagtgattcccctcggggctctttacaaggtgctgcatggttgtcgtcagctcgtgccgtgaggtgtcgggttaagtcccataacgagcgcaacccctatcgatagttgccaccgggttaagccgggcactctatcgagactgccaccgtaaggtgcgaggaaggcggggatgacgtcaaatcagcacggcccttacatccagggctacacacgtgttacaatggccggtacagagggccgccacggggtgacccggcgccaatctctaaagccggtcgtagttcggactggagtctgcaacccgactccacgaagttggattcgctagtaatcgcgcatcagccatggcgcggtgaatacgttcccgggccttgtacacaccgcccgtcaagccatggaagccgggagtacctgaagatcgtgaccgcgaggaacgggctagggtaatactggtaactggggct

SEQ ID NO: 962 - DNA, 1465 bp, Butyrivibrio fibrisolvens
  misc_feature (28)..(28): n is a, c, g, or t
  misc_feature (37)..(37): n is a, c, g, or t
  misc_feature (909)..(909): n is a, c, g, or t
tgaacgctggcggcgtgcctaacacatncaagtcgancggagttattcgctgatgaagcttcggcagaatcttgaataacttagtggcggacgggtgagtaacgcgtgggtaacctgcctcatacagggggatagcagttggaaacgactgataacaccgcataagcgcacagtgtcgcatgacacagtgtgaaaatatttataggtatgagatggacccgcgtctgattagctagttggtgaggtaacggcccaccaaggcgacgatcagtagccggcctgagagggcggacggccacattgggactgagacacggcccaaactcctacgggaggcagcagtgggggatattgcacaatgggcgaaagcctgatgcagcgacgccgcgtgagtgaagaagtatttcggtatgtaaagctctatcagcagggaagaaagacctcgtaagaggggatgacggtacctgagtaagaagccccggctaactacgtgccagcagccgcggtaatacgtagggggcaagcgttatccggatttactgggtgtaaagggagcgtagacggtgtatcaagtctgaagtgaaaccccacggctcaaccgtgggcttgctttggaaactggtagactagagtactggagaggtaagcggaattcctggtgtagtagtgaaatgcgtagatatcaggaagaacatcagtggcgaaggcggcttactggacagcaactgacgttgaggctcgaaggcgtggggagcaaacaggattagataccctggtagtccacgcagtaaacgatgaatactaggtgttgggagacatagtctttcagtgccggcgctaacgcaataagtattccacctggggagtacgttcgcaagaatgaaactcaaaggaattgacggggacccncacaagcggtggagcatgtggtttaattcgaagcaacgcgaagaaccttaccaaatcttgagatccagatgaatgatgggtaatgccatcagtccttcgggacatctgagacaggtggtgcatggttgtcgtcagctcgtgtcgtgagatgttgggtcaagtcccgcaacgagcgcaacccttgtccatagtagccagcagtaagatgggcactctatggagactgccagggataacctggaggaaggtggggatgacgtcaaatcatcatgccccttatgatttgggccacacacgtgctacaatgtcgtaacaaagggaagcaaccctgcgaaggtgagcaaatcccaaaaataacgacccagttcggactgtaggctgcaacccgcctgcacgaagctggaatcgctagtaatcgcagatcagaatgctgcggtgaatacgttcccgggtcttgtacacaccgcccgtcacaccatgggagtcggaaatgcccaaagtcagtggcctaaccgtaaggagggagctgcctaaggcaggtcggataactggggtg

SEQ ID NO: 963 - DNA, 1418 bp, Bythopirellula goksoyri
cgagcgagaagctaaagtttgaaacttcggtcgattactttagtggaaagcggcgcaagggagagtaacgagtagttatctaccccagggtccggaatagctgcgggaaactgcaggtaatgccggataatatccccggatcaaaggtgtgattccgccctgggaggagactgctttgtactagcttgttggtggggtaatggcctaccaaggctacgatgcatagcgggcgtgagagcgtggcccgtctcactgggactgaaacactgcccagacacctacgggtggctgcagtcgagaatcttcggcaatgggcgaaagcctgaccgagcaatgccgcgtgcgggatgaaggccttcgggttgtaaaccgctgtcagttgggaggaagggtccgtgaagagcggatcttgacctatcttcagaggaagtccgggctaagttcgtgccagcagccgcggtaatacgaaccggacaaacgttattcggaattattgggcttaaagggtgcgtaggcggtgcggtaagtgcggtgtgaaatcccacggctcaaccgtggaattgcgctgcatactgccgtgctagagggagacaggggtaagcggaactgatggtggagcggtgaaatgcgttgatatcatcaggaacaccagtggcgaaagcggcttactgggtctcttctgacgctgaggtacgaaagctagggtagcgaacgggattagataccccggtagtcctagccgtaaacgatgagcacttgactgagggcccccccataggctctcggtcgcagcgaaagtgttaagtgctccgcctggggagtatggtcgcaaggctgaaactcaaaggaattgacgggggctcacacaagcggtggaggatgtggcttaattcgaggctacgcgaagaaccttatccaggccttgacatagttggatgctgcccatgaaagtgggttagttgccttcgggtgaaacttctacaggtgctgcatggctgtcgtcagctcgtgtcgtgagatgtcgggttaagtcccttaacgagcgaaacccttgttcttagttgccagcgcgtcatggcggggactctaagaagactgccggtgttaaaccggaggaaggtggggatgacgtcaagtcctcatggcctttatggtctgggctgcacacgtcctacaatggcatatacaaagggatgctacctcgcgagagcaagcaaatcccaaaaagtatgccccagttcggattgcaggctgcaactcgcctgcatgaagccggaatcgctagtaatcgtggatcagcatgccacggtgaatatgttcctgagccttgtacacaccgcccgtcaagccacgaaagtggggggggcttaaagtcgccaagctaaccgtaaggaggcaggcgcctagagtcaactccg

SEQ ID NO: 964 - DNA, 1453 bp, Caballeronia arationis
attgaacgctggcggcatgccttacacatgcaagtcgaacggcagcacgggggcaaccctggtggcgagtggcgaacgggtgagtaatacatcggaacgtgtcctggagtgggggatagcccggcgaaagccggattaataccgcatacgctctacggaggaaagggggggatcgcaagacctctcgctcaaggggcggccgatggcagattagctagttggtggggtaaaggcctaccaaggcgacgatctgtagctggtctgagaggacgaccagccacactgggactgagacacggcccagactcctacgggaggcagcagtggggaattttggacaatgggcgcaagcctgatccagcaatgccgcgtgtgtgaagaaggccttcgggttgtaaagcacttttgtccggaaagaaaacttcctggttaatacctggggaggatgacggtaccggaagaataagcaccggctaactacgtgccagcagccgcggtaatacgtagggtgcgagcgttaatcggaattactgggcgtaaagcgtgcgcaggcggtctgttaagacagatgtgaaatccccgggcttaacctgggaactgcatttgtgactggcaggctagagtatggcagaggggggtagaattccacgtgtagcagtgaaatgcgtagagatgtggaggaataccgatggcgaaggcagccccctgggccaatactgacgctcatgcacgaaagcgtggggagcaaacaggattagataccctggtagtccacgccctaaacgatgtcaactagttgttggggattcatttccttagtaacgtagctaacgcgtgaagttgaccgcctggggagtacggtcgcaagattaaaactcaaaggaattgacggggacccgcacaagcggtggatgatgtggattaattcgatgcaacgcgaaaaaccttacctacccttgacatggtcggaatcctgctgagaggcgggagtgctcgaaagagaaccggcgcacaggtgctgcatggctgtcgtcagctcgtgtcgtgagatgttgggttaagtcccgcaacgagcgcaacccttgtccttagttgctacgcaagagcactctaaggagactgccggtgacaaaccggaggaaggtggggatgacgtcaagtcctcatggcccttatgggtagggcttcacacgtcatacaatggtcggaacagagggtcgctaagccgcgaggtggagccaatcccagaaaaccgatcgtagtccggatcgcagtctgcaactcgactgcgtgaagctggaatcgctagtaatcgcggatcagcatgccgcggtgaatacgttcccgggtcttgtacacaccgcccgtcacaccatgggagtgggttttaccagaagtggctagtctaaccgcaaggaggacggtcaccacggtaggattcatgactggggtg

SEQ ID NO: 965 - DNA, 1454 bp, Caballeronia arvi
attgaacgctggcggcatgccttacacatgcaagtcgaacggcagcacgggggcaaccctggtggcgagtggcgaacgggtgagtaatacatcggaacgtgtcctgtagtgggggatagcccggcgaaagccggattaataccgcatacgacctaagggagaaagcgggggatcttcggacctcgcgctataggggcggccgatggcagattagctagttggtggggtaaaggcctaccaaggcgacgatctgtagctggtctgagaggacgaccagccacactgggactgagacacggcccagactcctacgggaggcagcagtggggaattttggacaatgggggcaaccctgatccagcaatgccgcgtgtgtgaagaaggccttcgggttgtaaagcacttttgtccggaaagaaaaccacctggctaatatccgggtgggatgacggtaccggaagaataagcaccggctaactacgtgccagcagccgcggtaatacgtagggtgcgagcgttaatcggaattactgggcgtaaagcgtgcgcaggcggtctgttaagaccgatgtgaaatccccgggcttaacctgggaactgcattggtgactggcaggctttgagtgtggcagaggggggtagaattccacgtgtagcagtgaaatgcgtagagatgtggaggaataccgatggcgaaggcagccccctgggccaacactgacgctcatgcacgaaagcgtggggagcaaacaggattagataccctggtagtccacgccctaaacgatgtcaactagttgttggggattcatttccttagtaacgtagctaacgcgtgaagttgaccgcctggggagtacggtcgcaagattaaaactcaaaggaattgacggggacccgcacaagcggtggatgatgtggattaattcgatgcaacgcgaaaaaccttacctacccttgacatggtcggaaccctgctgaaaggtgggggtgctcgaaagagaaccggcgcacaggtgctgcatggctgtcgtcagctcgtgtcgtgagatgttgggttaagtcccgcaacgagcgcaacccttgtccttagttgctacgcaagagcactctaaggagactgccggtgacaaaccggaggaaggtggggatgacgtcaagtcctcatggcccttatgggtagggcttcacacgtcatacaatggtcggaacagagggttgccaagccgcgaggtggagccaatcccagaaaaccgatcgtagtccggatcgcagtctgcaactcgactgcgtgaagctggaatcgctagtaatcgcggatcagcatgccgcggtgaatacgttcccgggtcttgtacacaccgcccgtcacaccatgggagtgggtttcaccagaagtaggtagcctaaccgcaaggagggcgcttaccacggtgggattcatgactggggtg

SEQ ID NO: 966 - DNA, 1454 bp, Caballeronia calidae
attgaacgctggcggcatgccttacacatgcaagtcgaacggcagcacgggggcaaccctggtggcgagtggcgaacgggtgagtaatacatcggaacgtgtcctgtagtgggggatagcccggcgaaagccggattaataccgcatacgacctaagggagaaagcgggggatcttcggacctcgcgctataggggcggccgatggcagattagctagttggtggggtaaaggcctaccaaggcgacgatctgtagctggtctgagaggacgaccagccacactgggactgagacacggcccagactcctacgggaggcagcagtggggaattttggacaatgggggcaaccctgatccagcaatgccgcgtgtgtgaagaaggccttcgggttgtaaagcacttttgtccggaaagaaaacttcgccgctaatatcggtggaggatgacggtaccggaagaataagcaccggctaactacgtgccagcagccgcggtaatacgtagggtgcgagcgttaatcggaattactgggcgtaaagcgtgcgcaggcggtctgttaagaccgatgtgaaatccccgggcttaacctgggaactgcattggtgactggcaggctttgagtgtggcagagggaggtagaattccacgtgtagcagtgaaatgcgtagagatgtggaggaataccgatggcgaaggcagcctcctgggccaacactgacgctcatgcacgaaagcgtggggagcaaacaggattagataccctggtagtccacgccctaaacgatgtcaactagttgttggggattcatttccttagtaacgtagctaacgcgtgaagttgaccgcctggggagtacggtcgcaagattaaaactcaaaggaattgacggggacccgcacaagcggtggatgatgtggattaattcgatgcaacgcgaaaaaccttacctacccttgacatggtcggaatcctgctgagaggcgggagtgctcgaaagagaaccggcgcacaggtgctgcatggctgtcgtcagctcgtgtcgtgagatgttgggttaagtcccgcaacgagcgcaacccttgtccttagttgctacgcaagagcactctaaggagactgccggtgacaaaccggaggaaggtggggatgacgtcaagtcctcatggcccttatgggtagggcttcacacgtcatacaatggtcggaacagagggttgccaagccgcgaggtggagccaatcccagaaaaccgatcgtagtccggatcgcagtctgcaactcgactgcgtgaagctggaatcgctagtaatcgcggatcagcatgccgcggtgaatacgttcccgggtcttgtacacaccgcccgtcacaccatgggagtgggtttcaccagaagtaggtagcctaaccgcaaggagggcgcttaccacggtgggattcatgactggggtg

SEQ ID NO: 967 - DNA, 1454 bp, Caballeronia catudaia
attgaacgctggcggcatgccttacacatgcaagtcgaacggcagcacgggggcaaccctggtggcgagtggcgaacgggtgagtaatacatcggaacgtgtcctgtagtgggggatagcccggcgaaagccggattaataccgcatacgacctgagggagaaagcgggggatcttcggacctcgcgctacaggggcggccgatggcagattagctagttggtggggtaaaggcctaccaaggcgacgatctgtagctggtctgagaggacgaccagccacactgggactgagacacggcccagactcctacgggaggcagcagtggggaattttggacaatgggggcaaccctgatccagcaatgccgcgtgtgtgaagaaggccttcgggttgtaaagcacttttgtccggaaagaaaacttcgtccctaatatggatggaggatgacggtaccggaagaataagcaccggctaactacgtgccagcagccgcggtaatacgtagggtgcgagcgttaatcggaattactgggcgtaaagcgtgcgcaggcggtctgttaagaccgatgtgaaatccccgggcttaacctgggaactgcattggtgactggcaggctttgagtgtggcagaggggggtagaattccacgtgtagcagtgaaatgcgtagagatgtggaggaataccgatggcgaaggcagccccctgggccaacactgacgctcatgcacgaaagcgtggggagcaaacaggattagataccctggtagtccacgccctaaacgatgtcaactagttgttggggattcatttccttagtaacgtagctaacgcgtgaagttgaccgcctggggagtacggtcgcaagattaaaactcaaaggaattgacggggacccgcacaagcggtggatgatgtggattaattcgatgcaacgcgaaaaaccttacctacccttgacatggtcggaaccctgctgaaaggtgggggtgctcgaaagagaaccggcgcacaggtgctgcatggctgtcgtcagctcgtgtcgtgagatgttgggttaagtcccgcaacgagcgcaacccttgtccttagttgctacgcaagagcactctaaggagactgccggtgacaaaccggaggaaggtggggatgacgtcaagtcctcatggcccttatgggtagggcttcacacgtcatacaatggtcggaacagagggttgccaagccgcgaggtggagccaatcccagaaaaccgatcgtagtccggatcgcagtctgcaactcgactgcgtgaagctggaatcgctagtaatcgcggatcagcatgccgcggtgaatacgttcccgggtcttgtacacaccgcccgtcacaccatgggagtgggtttcaccagaagtaggtagcctaaccgtaaggagggcgcttaccacggtgggattcatgactggggtg

SEQ ID NO: 968 - DNA, 1453 bp, Caballeronia choica
attgaacgctggcggcatgccttacacatgcaagtcgaacggcagcacgggggcaaccctggtggcgagtggcgaacgggtgagtaatacatcggaacgtgtcctgtagtgggggatagcccggcgaaagccggattaataccgcatacgacctaagggagaaagcgggggatcttcggacctcgcgctataggggcggccgatggcagattagctagttggtggggtaaaggcctaccaaggcgacgatctgtagctggtctgagaggacgaccagccacactgggactgagacacggcccagactcctacgggaggcagcagtggggaattttggacaatgggggaaaccctgatccagcaatgccgcgtgtgtgaagaaggccttcgggttgtaaagcacttttgtccggaaagaaaacttcctggttaatacctggggaggctgacggtaccggaagaataagcaccggctaactacgtgccagcagccgcggtaatacgtagggtgcgagcgttaatcggaattactgggcgtaaagcgtgcgcaggcggtttgttaagacagatgtgaaatccccgggcttaacctgggaactgcatttgtgactggcaagctagagtatggcagaggggggtagaattccacgtgtagcagtgaaatgcgtagagatgtggaggaataccgatggcgaaggcagccccctgggccaatactgacgctcatgcacgaaagcgtggggagcaaacaggattagataccctggtagtccacgccctaaacgatgtcaactagttgttggggattcatttccttagtaacgtagctaacgcgtgaagttgaccgcctggggagtacggtcgcaagattaaaactcaaaggaattgacggggacccgcacaagcggtggatgatgtggattaattcgatgcaacgcgaaaaaccttacctacccttgacatggtcggaaccctgctgaaaggtgggggtgctcgaaagagaaccggcgcacaggtgctgcatggctgtcgtcagctcgtgtcgtgagatgttgggttaagtcccgcaacgagcgcaacccttgtccttagttgctacgcaagagcactctaaggagactgccggtgacaaaccggaggaaggtggggatgacgtcaagtcctcatggcccttatgggtagggcttcacacgtcatacaatggtcggaacagagggctgccaacccgtgagggggagctaatcccagaaaaccgatcgtagtccggatcgcagtctgcaactcgactgcgtgaagctggaatcgctagtaatcgcggatcagcatgccgcggtgaatacgttcccgggtcttgtacacaccgcccgtcacaccatgggagtgggttttaccagaagtggctagtctaaccgcaaggaggacggtcaccacggtaggattcatgactggggtg

SEQ ID NO: 969 - DNA, 1454 bp, Caballeronia cordobensis
attgaacgctggcggcatgccttacacatgcaagtcgaacggcagcacgggggcaaccctggtggcgagtggcgaacgggtgagtaatacatcggaacgtgtcctgtagtgggggatagcccggcgaaagccggattaataccgcatacgacctaagggagaaagcgggggatcttcggacctcgcgctataggggcggccgatggcagattagctagttggtggggtaaaggcctaccaaggcgacgatctgtagctggtctgagaggacgaccagccacactgggactgagacacggcccagactcctacgggaggcagcagtggggaattttggacaatgggggcaaccctgatccagcaatgccgcgtgtgtgaagaaggccttcgggttgtaaagcacttttgtccggaaagaaaacttcgtccctaatatggatggaggatgacggtaccggaagaataagcaccggctaactacgtgccagcagccgcggtaatacgtagggtgcgagcgttaatcggaattactgggcgtaaagcgtgcgcaggcggtctgttaagaccgatgtgaaatccccgggcttaacctgggaactgcattggtgactggcaggctttgagtgtggcagaggggggtagaattccacgtgtagcagtgaaatgcgtagagatgtggaggaataccgatggcgaaggcagccccctgggccaacactgacgctcatgcacgaaagcgtggggagcaaacaggattagataccctggtagtccacgccctaaacgatgtcaactagttgttggggattcatttccttagtaacgtagctaacgcgtgaagttgaccgcctggggagtacggtcgcaagattaaaactcaaaggaattgacggggacccgcacaagcggtggatgatgtggattaattcgatgcaacgcgaaaaaccttacctacccttgacatggtcggaaccctgctgaaaggtgggggtgctcgaaagagaaccggcgcacaggtgctgcatggctgtcgtcagctcgtgtcgtgagatgttgggttaagtcccgcaacgagcgcaacccttgtccttagttgctacgcaagagcactctaaggagactgccggtgacaaaccggaggaaggtggggatgacgtcaagtcctcatggcccttatgggtagggcttcacacgtcatacaatggtcggaacagagggttgccaagccgcgaggtggagccaatcccagaaaaccgatcgtagtccggatcgcagtctgcaactcgactgcgtgaagctggaatcgctagtaatcgcggatcagcatgccgcggtgaatacgttcccgggtcttgtacacaccgcccgtcacaccatgggagtgggtttcaccagaagtaggtagcctaaccgcaaggagggcgcttaccacggtgggattcatgactggggtg

SEQ ID NO: 970 - DNA, 1454 bp, Caballeronia fortuita
attgaacgctggcggcatgccttacacatgcaagtcgaacggcagcacgggggcaaccctggtggcgagtggcgaacgggtgagtaatacatcggaacgtgtcctgtagtgggggatagcccggcgaaagccggattaataccgcatacgacctaagggagaaagcgggggatcttcggacctcgcgctataggggcggccgatggcagattagctagttggtggggtaaaggcctaccaaggcgacgatctgtagctggtctgagaggacgaccagccacactgggactgagacacggcccagactcctacgggaggcagcagtggggaattttggacaatgggggcaaccctgatccagcaatgccgcgtgtgtgaagaaggccttcgggttgtaaagcacttttgtccggaaagaaaaccatcgccctaatatggtggtgggatgacggtaccggaagaataagcaccggctaactacgtgccagcagccgcggtaatacgtagggtgcgagcgttaatcggaattactgggcgtaaagcgtgcgcaggcggtctgttaagaccgatgtgaaatccccgggcttaacctgggaactgcattggtgactggcaggctttgagtgtggcagaggggggtagaattccacgtgtagcagtgaaatgcgtagagatgtggaggaataccgatggcgaaggcagccccctgggccaacactgacgctcatgcacgaaagcgtggggagcaaacaggattagataccctggtagtccacgccctaaacgatgtcaactagttgttggggattcatttccttagtaacgtagctaacgcgtgaagttgaccgcctggggagtacggtcgcaagattaaaactcaaaggaattgacggggacccgcacaagcggtggatgatgtggattaattcgatgcaacgcgaaaaaccttacctacccttgacatggtcggaagtctgctgagaggcggacgtgctcgaaagagaaccggcgcacaggtgctgcatggctgtcgtcagctcgtgtcgtgagatgttgggttaagtcccgcaacgagcgcaacccttgtccttagttgctacgcaagagcactctaaggagactgccggtgacaaaccggaggaaggtggggatgacgtcaagtcctcatggcccttatgggtagggcttcacacgtcatacaatggtcggaacagagggttgccaagccgcgaggtggagccaatcccagaaaaccgatcgtagtccggatcgcagtctgcaactcgactgcgtgaagctggaatcgctagtaatcgcggatcagcatgccgcggtgaatacgttcccgggtcttgtacacaccgcccgtcacaccatgggagtgggtttcaccagaagtaggtagcctaaccgtaaggagggcgcttaccacggtgggattcatgactggggtg

SEQ ID NO: 971 - DNA, 1453 bp, Caballeronia glathei
attgaacgctggcggcatgccttacacatgcaagtcgaacggcagcacgggggcaaccctggtggcgagtggcgaacgggtgagtaatacatcggaacgtgtcctgtagtgggggatagcccggcgaaagccggattaataccgcatacgatctacggaagaaagcgggggatcttcggacctcgcgctataggggcggccgatggcagattagctagttggtggggtaaaggcctaccaaggcgacgatctgtagctggtctgagaggacgaccagccacactgggactgagacacggcccagactcctacgggaggcagcagtggggaattttggacaatgggggaaaccctgatccagcaatgccgcgtgtgtgaagaaggccttcgggttgtaaagcacttttgtccggaaagaaaacttcggggctaatacctctggaggatgacggtaccggaagaataagcaccggctaactacgtgccagcagccgcggtaatacgtagggtgcgagcgttaatcggaattactgggcgtaaagcgtgcgcaggcggtctgttaagacagatgtgaaatccccgggcttaacctgggaactgcatttgtgactggcaggctagagtatggcagaggggggtagaattccacgtgtagcagtgaaatgcgtagagatgtggaggaataccgatggcgaaggcagccccctgggccaatactgacgctcatgcacgaaagcgtggggagcaaacaggattagataccctggtagtccacgccctaaacgatgtcaactagttgttggggattcatttccttagtaacgtagctaacgcgtgaagttgaccgcctggggagtacggtcgcaagattaaaactcaaaggaattgacggggacccgcacaagcggtggatgatgtggattaattcgatgcaacgcgaaaaaccttacctacccttgacatggtcggaaccctggtgagagctgggggtgctcgaaagagaaccgacacacaggtgctgcatggctgtcgtcagctcgtgtcgtgagatgttgggttaagtcccgcaacgagcgcaacccttgtccttagttgctacgcaagagcactctaaggagactgccggtgacaaaccggaggaaggtggggatgacgtcaagtcctcatggcccttatgggtagggcttcacacgtcatacaatggtcggaacagagggtcgctaagccgcgaggtggagccaatcccagaaaaccgatcgtagtccggatcgtagtctgcaactcgactacgtgaagctggaatcgctagtaatcgcggatcagcatgccgcggtgaatacgttcccgggtcttgtacacaccgcccgtcacaccatgggagtgggttttaccagaagtggctagtctaaccgcaaggaggacggtcaccacggtaggattcatgactggggtg

SEQ ID NO: 972 - DNA, 1454 bp, Caballeronia glebae
attgaacgctggcggcatgccttacacatgcaagtcgaacggcagcacgggggcaaccctggtggcgagtggcgaacgggtgagtaatacatcggaacgtgtcctgtagtgggggatagcccggcgaaagccggattaataccgcatacgatctacggaagaaagcgggggatcttcggacctcgcgctataggggcggccgatggcagattagctagttggtggggtaaaggcctaccaaggcgacgatctgtagctggtctgagaggacgaccagccacactgggactgagacacggcccagactcctacgggaggcagcagtggggaattttggacaatgggggcaaccctgatccagcaatgccgcgtgtgtgaagaaggccttcgggttgtaaagcacttttgttcgggaagaaaacttcgatcctaatatggttggaggatgacggtaccggaagaataagcaccggctaactacgtgccagcagccgcggtaatacgtagggtgcgagcgttaatcggaattactgggcgtaaagcgtgcgcaggcggtctgttaagaccgatgtgaaatccccgggcttaacctgggaactgcattggtgactggcaggctttgagtgtggcagagggaggtagaattccacgtgtagcagtgaaatgcgtagagatgtggaggaataccgatggcgaaggcagcctcctgggccaacactgacgctcatgcacgaaagcgtggggagcaaacaggattagataccctggtagtccacgccctaaacgatgtcaactagttgttggggattcatttccttagtaacgtagctaacgcgtgaagttgaccgcctggggagtacggtcgcaagattaaaactcaaaggaattgacggggacccgcacaagcggtggatgatgtggattaattcgatgcaacgcgaaaaaccttacctacccttgacatggtcggaatcctgctgagaggcgggagtgctcgaaagagaaccggcgcacaggtgctgcatggctgtcgtcagctcgtgtcgtgagatgttgggttaagtcccgcaacgagcgcaacccttgtccttagttgctacgcaagagcactctaaggagactgccggtgacaaaccggaggaaggtggggatgacgtcaagtcctcatggcccttatgggtagggcttcacacgtcatacaatggtcggaacagagggttgccaagccgcgaggtggagccaatcccagaaaaccgatcgtagtccggatcgcagtctgcaactcgactgcgtgaagctggaatcgctagtaatcgcggatcagcatgccgcggtgaatacgttcccgggtcttgtacacaccgcccgtcacaccatgggagtgggtttcaccagaagtaggtagcctaaccgcaaggagggcgcttaccacggtgggattcatgactggggtg

SEQ ID NO: 973 - DNA, 1453 bp, Caballeronia humi
attgaacgctggcggcatgccttacacatgcaagtcgaacggcagcacgggggcaaccctggtggcgagtggcgaacgggtgagtaatacatcggaacgtgtcctgtagtgggggatagcccggcgaaagccggattaataccgcatacgacctaagggagaaagcgggggatcttcggacctcgcgctataggggcggccgatggcagattagctagttggtggggtaaaggcctaccaaggcgacgatctgtagctggtctgagaggacgaccagccacactgggactgagacacggcccagactcctacgggaggcagcagtggggaattttggacaatgggggaaaccctgatccagcaatgccgcgtgtgtgaagaaggccttcgggttgtaaagcacttttgtccggaaagaaaacctcttggataatacctgagggggatgacggtaccggaagaataagcaccggctaactacgtgccagcagccgcggtaatacgtagggtgcgagcgttaatcggaattactgggcgtaaagcgtgcgcaggcggtttgttaagacagatgtgaaatccccgggcttaacctgggaactgcatttgtgactggcaagctagagtatggcagaggggggtagaattccacgtgtagcagtgaaatgcgtagagatgtggaggaataccgatggcgaaggcagccccctgggccaatactgacgctcatgcacgaaagcgtggggagcaaacaggattagataccctggtagtccacgccctaaacgatgtcaactagttgttggggattcatttccttagtaacgtagctaacgcgtgaagttgaccgcctggggagtacggtcgcaagattaaaactcaaaggaattgacggggacccgcacaagcggtggatgatgtggattaattcgatgcaacgcgaaaaaccttacctacccttgacatggtcggaaccctgctgaaaggtgggggtgctcgaaagagaaccggcgcacaggtgctgcatggctgtcgtcagctcgtgtcgtgagatgttgggttaagtcccgcaacgagcgcaacccttgtccttagttgctacgcaagagcactctaaggagactgccggtgacaaaccggaggaaggtggggatgacgtcaagtcctcatggcccttatgggtagggcttcacacgtcatacaatggtcggaacagagggtcgctaagccgcgaggtggagccaatcccagaaaaccgatcgtagtccggatcgcagtctgcaactcgactgcgtgaagctggaatcgctagtaatcgcggatcagcatgccgcggtgaatacgttcccgggtcttgtacacaccgcccgtcacaccatgggagtgggttttaccagaagtggctagtctaaccgcaaggaggacggtcaccacggtaggattcatgactggggtg

SEQ ID NO: 974 - DNA, 1456 bp, Caballeronia hypogeia
attgaacgctggcggcatgccttacacatgcaagtcgaacggcagcacgggggcaaccctggtggcgagtggcgaacgggtgagtaatacatcggaacgtgtcctgtagtgggggatagcccggcgaaagccggattaataccgcatacgacctaagggagaaagcgggggatcttcggacctcgcgctataggggcggccgatggcagattagctagttggtggggtaaaggcctaccaaggcgacgatctgtagctggtctgagaggacgaccagccacactgggactgagacacggcccagactcctacgggaggcagcagtggggaattttggacaatgggggcaaccctgatccagcaatgccgcgtgtgtgaagaaggccttcgggttgtaaagcacttttgtccggaaagaaaactttgtccctaatatggatggaggatgacggtaccggaagaataagcaccggctaactacgtgccagcagccgcggtaatacgtagggtgcgagcgttaatcggaattactgggcgtaaagcgtgcgcaggcggtctgttaagaccgatgtgaaatccccgggcttaacctgggaactgcattggtgactggcaggctttgagtgtggcagaggggggtagaattccacgtgtagcagtgaaatgcgtagagatgtggaggaataccgatggcgaaggcagccccctgggccaacactgacgctcatgcacgaaagcgtggggagcaaacaggattagataccctggtagtccacgccctaaacgatgtcaactagttgttggggattcatttccttagtaacgtagctaacgcgtgaagttgaccgcctggggagtacggtcgcaagattaaaactcaaaggaattgacggggacccgcacaagcggtggatgatgtggattaattcgatgcaacgcgaaaaaccttacctacccttgacatggtcggaaccctgctgaaaggtgggggtgctcgaaagagaaccggcgcacaggtgctgcatggctgtcgtcagctcgtgtcgtgagatgttgggttaagtcccgcaacgagcgcaacccttgtccttagttgctacgcaagagcactctaaggagactgccggtgacaaaccggaggaaggtggggatgacgtcaagtcctcatggcccttatgggtagggcttcacacgtcatacaatggtcggaacagagggttgccaagccgcgaggtggagccaatcccagaaaaccgatcgtagtccggatcgcagtctgcaactcgactgcgtgaagctggaatcgctagtaatcgcggatcagcatgccgcggtgaatacgttcccgggtcttgtacacaccgcccgtcacaccatgggagtgggtttcaccagaagtaggtagcctaacctgcgaaggagggcgcttaccacggtgggattcatgactggggtg

SEQ ID NO: 975 - DNA, 1456 bp, Caballeronia jiangsuensis
attgaacgctggcggcatgccttacacatgcaagtcgaacggcagcacgggggcaaccctggtggcgagtggcgaacgggtgagtaatacatcggaacgtgtcctgtagtgggggatagcccggcgaaagccggattaataccgcatacgatctacggaagaaagcgggggatccttcgggacctcgcgctataggggcggccgatggcagattagctagttggtggggtaaaggcctaccaaggcgacgatctgtagctggtctgagaggacgaccagccacactgggactgagacacggcccagactcctacgggaggcagcagtggggaattttggacaatgggggcaaccctgatccagcaatgccgcgtgtgtgaagaaggccttcgggttgtaaagcacttttgtccggaaagaaaacgtcttggttaatacccgaggcggatgacggtaccggaagaataagcaccggctaactacgtgccagcagccgcggtaatacgtagggtgcgagcgttaatcggaattactgggcgtaaagcgtgcgcaggcggtctgttaagaccgatgtgaaatccccgggcttaacctgggaactgcattggtgactggcaggctttgagtgtggcagaggggggtagaattccacgtgtagcagtgaaatgcgtagagatgtggaggaataccgatggcgaaggcagccccctgggccaacactgacgctcatgcacgaaagcgtggggagcaaacaggattagataccctggtagtccacgccctaaacgatgtcaactagttgttggggattcatttccttagtaacgtagctaacgcgtgaagttgaccgcctggggagtacggtcgcaagattaaaactcaaaggaattgacggggacccgcacaagcggtggatgatgtggattaattcgatgcaacgcgaaaaaccttacctacccttgacatggtcggaagtctgctgagaggtggacgtgctcgaaagagaaccggcgcacaggtgctgcatggctgtcgtcagctcgtgtcgtgagatgttgggttaagtcccgcaacgagcgcaacccttgtccttagttgctacgcaagagcactctaaggagactgccggtgacaaaccggaggaaggtggggatgacgtcaagtcctcatggcccttatgggtagggcttcacacgtcatacaatggtcggaacagagggttgccaagccgcgaggtggagccaatcccagaaaaccgatcgtagtccggatcgcagtctgcaactcgactgcgtgaagctggaatcgctagtaatcgcggatcagcatgccgcggtgaatacgttcccgggtcttgtacacaccgcccgtcacaccatgggagtgggtttcaccagaagtaggtagcctaaccgcaaggagggcgcttaccacggtgggattcatgactggggtg

SEQ ID NO: 976 - DNA, 1454 bp, Caballeronia megalochromosomata
attgaacgctggcggcatgccttacacatgcaagtcgaacggcagcacgggggcaaccctggtggcgagtggcgaacgggtgagtaatacatcggaacgtgtcctgtagtgggggatagcccggcgaaagccggattaataccgcatacgatctacggaagaaagcgggggatcttcggacctcgcgctgcaggggcggccgatggcagattagctagttggtggggtaaaggcctaccaaggcgacgatctgtagctggtctgagaggacgaccagccacactgggactgagacacggcccagactcctacgggaggcagcagtggggaattttggacaatgggggcaaccctgatccagcaatgccgcgtgtgtgaagaaggccttcgggttgtaaagcacttttgtccggaaagaaaaccgccgccctaatatggtggtgggatgacggtaccggaagaataagcaccggctaactacgtgccagcagccgcggtaatacgtagggtgcgagcgttaatcggaattactgggcgtaaagcgtgcgcaggcggtctgttaagaccgatgtgaaatccccgggcttaacctgggaactgcattggtgactggcaggctttgagtgtggcagaggggggtagaattccacgtgtagcagtgaaatgcgtagagatgtggaggaataccgatggcgaaggcagccccctgggccaacactgacgctcatgcacgaaagcgtggggagcaaacaggattagataccctggtagtccacgccctaaacgatgtcaactagttgttggggattcatttccttagtaacgtagctaacgcgtgaagttgaccgcctggggagtacggtcgcaagattaaaactcaaaggaattgacggggacccgcacaagcggtggatgatgtggattaattcgatgcaacgcgaaaaaccttacctacccttgacatggtcggaagtctgctgagaggtggacgtgctcgaaagagaaccggcgcacaggtgctgcatggctgtcgtcagctcgtgtcgtgagatgttgggttaagtcccgcaacgagcgcaacccttgtccttagttgctacgcaagagcactctaaggagactgccggtgacaaaccggaggaaggtggggatgacgtcaagtcctcatggcccttatgggtagggcttcacacgtcatacaatggtcggaacagagggttgccaagccgcgaggtggagccaatcccagaaaaccgatcgtagtccggatcgcagtctgcaactcgactgcgtgaagcaggaatcgctagtaatcgcggatcagcatgccgcggagaatacgttcccgggtcttgtacacaccgcccgtcacaccatgggagtgggtttcaccagaagtaggtagcctaaccgcaaggagggcgcttaccacggtgggattcatgactggggtg

SEQ ID NO: 977 - DNA, 1454 bp, Caballeronia pedi
attgaacgctggcggcatgccttacacatgcaagtcgaacggcagcacgggggcaaccctggtggcgagtggcgaacgggtgagtaatacatcggaacgtgtcctgtagtgggggatagcccggcgaaagccggattaataccgcatacgatctacggaagaaagcgggggatcttcggacctcgcgctgcaggggcggccgatggcagattagctagttggtggggtaaaggcctaccaaggcgacgatctgtagctggtctgagaggacgaccagccacactgggactgagacacggcccagactcctacgggaggcagcagtggggaattttggacaatgggggcaaccctgatccagcaatgccgcgtgtgtgaagaaggccttcgggttgtaaagcacttttgtccggaaagaaaacttcgtccctaatatggatggaggatgacggtaccggaagaataagcaccggctaactacgtgccagcagccgcggtaatacgtagggtgcgagcgttaatcggaattactgggcgtaaagcgtgcgcaggcggtctgttaagaccgatgtgaaatccccgggcttaacctgggaactgcattggtgactggcaggctttgagtgtggcagaggggggtagaattccacgtgtagcagtgaaatgcgtagagatgtggaggaataccgatggcgaaggcagccccctgggccaacactgacgctcatgcacgaaagcgtggggagcaaacaggattagataccctggtagtccacgccctaaacgatgtcaactagttgttggggattcatttccttagtaacgtagctaacgcgtgaagttgaccgcctggggagtacggtcgcaagattaaaactcaaaggaattgacggggacccgcacaagcggtggatgatgtggattaattcgatgcaacgcgaaaaaccttacctacccttgacatggtcggaatcccgctgagaggtgggagtgctcgaaagagaaccggcgcacaggtgctgcatggctgtcgtcagctcgtgtcgtgagatgttgggttaagtcccgcaacgagcgcaacccttgtccttagttgctacgcaagagcactctaaggagactgccggtgacaaaccggaggaaggtggggatgacgtcaagtcctcatggcccttatgggtagggcttcacacgtcatacaatggtcggaacagagggttgccaagccgcgaggtggagccaatcccagaaaaccgatcgtagtccggatcgcagtctgcaactcgactgcgtgaagctggaatcgctagtaatcgcggatcagcatgccgcggtgaatacgttcccgggtcttgtacacaccgcccgtcacaccatgggagtgggtttcaccagaagtaggtagcctaaccgcaaggagggcgcttaccacggtgggattcatgactggggtg

SEQ ID NO: 978 - DNA, 1456 bp, Caballeronia peredens
attgaacgctggcggcatgccttacacatgcaagtcgaacggcagcacgggggcaaccctggtggcgagtggcgaacgggtgagtaatacatcggaacgtgtcctgtagtgggggatagcccggcgaaagccggattaataccgcatacgatctacggaagaaagcgggggatccttcgggacctcgcgctataggggcggccgatggcagattagctagttggtggggtaaaggcctaccaaggcgacgatctgtagctggtctgagaggacgaccagccacactgggactgagacacggcccagactcctacgggaggcagcagtggggaattttggacaatgggggcaaccctgatccagcaatgccgcgtgtgtgaagaaggccttcgggttgtaaagcacttttgtccggaaagaaaaccatcgccctaatatggtggtgggatgacggtaccggaagaataagcaccggctaactacgtgccagcagccgcggtaatacgtagggtgcgagcgttaatcggaattactgggcgtaaagcgtgcgcaggcggtctgttaagaccgatgtgaaatccccgggcttaacctgggaactgcattggtgactggcaggctttgagtgtggcagaggggggtagaattccacgtgtagcagtgaaatgcgtagagatgtggaggaataccgatggcgaaggcagccccctgggccaacactgacgctcatgcacgaaagcgtggggagcaaacaggattagataccctggtagtccacgccctaaacgatgtcaactagttgttggggattcatttccttagtaacgtagctaacgcgtgaagttgaccgcctggggagtacggtcgcaagattaaaactcaaaggaattgacggggacccgcacaagcggtggatgatgtggattaattcgatgcaacgcgaaaaaccttacctacccttgacatggtcggaatcctgctgagaggcgggagtgctcgaaagagaaccggcgcacaggtgctgcatggctgtcgtcagctcgtgtcgtgagatgttgggttaagtcccgcaacgagcgcaacccttgtccttagttgctacgcaagagcactctaaggagactgccggtgacaaaccggaggaaggtggggatgacgtcaagtcctcatggcccttatgggtagggcttcacacgtcatacaatggtcggaacagagggttgccaagccgcgaggtggagccaatcccagaaaaccgatcgtagtccggatcgcagtctgcaactcgactgcgtgaagctggaatcgctagtaatcgcggatcagcatgccgcggtgaatacgttcccgggtcttgtacacaccgcccgtcacaccatgggagtgggttttaccagaagtggctagtctaaccgcaaggaggacggtcaccacggtaggattcatgactggggtg

SEQ ID NO: 979 - DNA, 1454 bp, Caballeronia ptereochthonis
attgaacgctggcggcatgccttacacatgcaagtcgaacggcagcacgggggcaaccctggtggcgagtggcgaacgggtgagtaatacatcggaacgtgtcctgtagtgggggatagcccggcgaaagccggattaataccgcatacgatctacggaagaaagcgggggatcttcggacctcgcgctgcaggggcggccgatggcagattagctagttggtggggtaaaggcctaccaaggcgacgatctgtagctggtctgagaggacgaccagccacactgggactgagacacggcccagactcctacgggaggcagcagtggggaattttggacaatgggggcaaccctgatccagcaatgccgcgtgtgtgaagaaggccttcgggttgtaaagcacttttgtccggaaagaaaaccgccgccctaatatggtggtgggatgacggtaccggaagaataagcaccggctaactacgtgccagcagccgcggtaatacgtagggtgcgagcgttaatcggaattactgggcgtaaagcgtgcgcaggcggtctgttaagaccgatgtgaaatccccgggcttaacctgggaactgcattggtgactggcaggcttggagtgtggcagagggaggtagaattccacgtgtagcagtgaaatgcgtagagatgtggaggaataccgatggcgaaggcagcctcctgggccaacactgacgctcatgcacgaaagcgtggggagcaaacaggattagataccctggtagtccacgccctaaacgatgtcaactagttgttggggattcatttccttagtaacgtagctaacgcgtgaagttgaccgcctggggagtacggtcgcaagattaaaactcaaaggaattgacggggacccgcacaagcggtggatgatgtggattaattcgatgcaacgcgaaaaaccttacctacccttgacatggtcggaagtctgctgagaggcggatgtgctcgaaagagaaccgacgcacaggtgctgcatggctgtcgtcagctcgtgtcgtgagatgttgggttaagtcccgcaacgagcgcaacccttgtccttagttgctacgcaagagcactctaaggagactgccggtgacaaaccggaggaaggtggggatgacgtcaagtcctcatggcccttatgggtagggcttcacacgtcatacaatggtcggaacagagggttgccaagccgcgaggtggagccaatcccagaaaaccgatcgtagtccggatcgcagtctgcaactcgactgcgtgaagctggaatcgctagtaatcgcggatcagcatgccgcggtgaatacgttcccgggtcttgtacacaccgcccgtcacaccatgggagtgggttttaccagaagtggctagtctaaccgcaaggaggacggtcaccacggtaggattcatgactggggtg

SEQ ID NO: 980 - DNA, 1453 bp, Caballeronia sordidicola
attgaacgctggcggcatgccttacacatgcaagtcgaacggcagcacgggggcaaccctggtggcgagtggcgaacgggtgagtaatacatcggaacgtgtcctgtagtgggggatagcccggcgaaagccggattaataccgcatacgatctacggaagaaagcgggggaccttagggcctcgcgctataggggcggccgatggcagattagctagttggtggggtaaaggcctaccaaggcgacgatctgtagctggtctgagaggacgaccagccacactgggactgagacacggcccagactcctacgggaggcagcagtggggaattttggacaatgggggcaaccctgatccagcaatgccgcgtgtgtgaagaaggccttcgggttgtaaagcacttttgtccggaaagaaaaccttcgctctaatacagtggagggatgacggtaccggaagaataagcaccggctaactacgtgccagcagccgcggtaatacgtagggtgcgagcgttaatcggaattactgggcgtaaagcgtgcgcaggcggttcgttaagacagatgtgaaatccccgggcttaacctgggaactgcatttgtgactggcgagctagagtatggcagaggggggtagaattccacgtgtagcagtgaaatgcgtagagatgtggaggaataccgatggcgaaggcagccccctgggccaatactgacgctcatgcacgaaagcgtggggagcaaacaggattagataccctggtagtccacgccctaaacgatgtcaactagttgttggggattcatttccttagtaacgtagctaacgcgtgaagttgaccgcctggggagtacggtcgcaagattaaaactcaaaggaattgacggggacccgcacaagcggtggatgatgtggattaattcgatgcaacgcgaaaaaccttacctacccttgacatggtcggaacctggctgaaaggctggggtgctcgaaagagaaccgatacacaggtgctgcatggctgtcgtcagctcgtgtcgtgagatgttgggttaagtcccgcaacgagcgcaacccttgtccttagttgctacgcaagagcactctaaggagactgccggtgacaaaccggaggaaggtggggatgacgtcaagtcctcatggcccttatgggtagggcttcacacgtcatacaatggtcggaacagagggctgccaacccgtgagggggagctaatcccagaaaaccgatcgtagtccggatcgtagtctgcaactcgactacgtgaagctggaatcgctagtaatcgcggatcagcatgccgcggtgaatacgttcccgggtcttgtacacaccgcccgtcacaccatgggagtgggttttaccagaagtggctagtctaaccgcaaggaggacggtcaccacggtaggattcatgactggggtg

SEQ ID NO: 981 - DNA, 1455 bp, Caballeronia telluris
attgaacgctggcggcatgccttacacatgcaagtcgaacggcagcacgggggcaaccctggtggcgagtggcgaacgggtgagtaatacatcggaacgtgtcctggagtgggggatagcccggcgaaagccggattaataccgcatacgctctaaggaggaaagggggggatctttcgggacctctcgctcaaggggcggccgatggcagattagctagttggtggggtaaaggcctaccaaggcgacgatctgtagctggtctgagaggacgaccagccacactgggactgagacacggcccagactcctacgggaggcagcagtggggaattttggacaatgggcgcaagcctgatccagcaatgccgcgtgtgtgaagaaggccttcgggttgtaaagcacttttgtccggaaagaaaacttttgccctaatacggtgagaggatgacggtaccggaagaataagcaccggctaactacgtgccagcagccgcggtaatacgtagggtgcgagcgttaatcggaattactgggcgtaaagcgtgcgcaggcggtctgttaagacagatgtgaaatccccgggcttaacctgggaactgcatttgtgactggcaggctagagtatggcagaggggggtagaattccacgtgtagcagtgaaatgcgtagagatgtggaggaataccgatggcgaaggcagccccctgggccaatactgacgctcatgcacgaaagcgtggggagcaaacaggattagataccctggtagtccacgccctaaacgatgtcaactagttgttggggattcatttccttagtaacgtagctaacgcgtgaagttgaccgcctggggagtacggtcgcaagattaaaactcaaaggaattgacggggacccgcacaagcggtggatgatgtggattaattcgatgcaacgcgaaaaaccttacctacccttgacatggtcggaaccctgctgaaaggtgggggtgctcgaaagagaaccggcgcacaggtgctgcatggctgtcgtcagctcgtgtcgtgagatgttgggttaagtcccgcaacgagcgcaacccttgtccttagttgctacgcaagagcactctaaggagactgccggtgacaaaccggaggaaggtggggatgacgtcaagtcctcatggcccttatgggtagggcttcacacgtcatacaatggtcggaacagagggtcgctaagccgcgaggtggagccaatcccagaaaaccgatcgtagtccggatcgcagtctgcaactcgactgcgtgaagctggaatcgctagtaatcgcggatcagcatgccgcggtgaatacgttcccgggtcttgtacacaccgcccgtcacaccatgggagtgggttttaccagaagtggctagtctaaccgcaaggaggacggtcaccacggtaggattcatgactggggtg

SEQ ID NO: 982 - DNA, 1456 bp, Caballeronia temeraria
attgaacgctggcggcatgccttacacatgcaagtcgaacggcagcacgggggcaaccctggtggcgagtggcgaacgggtgagtaatacatcggaacgtgtcctgtagtgggggatagcccggcgaaagccggattaataccgcatacgacctaagggagaaagcgggggatcttcggacctcgcgctataggggcggccgatggcagattagctagttggtggggtaaaggcctaccaaggcgacgatctgtagctggtctgagaggacgaccagccacactgggactgagacacggcccagactcctacgggaggcagcagtggggaattttggacaatgggggcaaccctgatccagcaatgccgcgtgtgtgaagaaggccttcgggttgtaaagcacttttgtccggaaagaaaacttcgaggttaatacccttggaggatgacggtaccggaagaataagcaccggctaactacgtgccagcagccgcggtaatacgtagggtgcgagcgttaatcggaattactgggcgtaaagcgtgcgcaggcggtctgttaagaccgatgtgaaatccccgggcttaacctgggaactgcattggtgactggcaggctttgagtgtggcagaggggggtagaattccacgtgtagcagtgaaatgcgtagagatgtggaggaataccgatggcgaaggcagccccctgggccaacactgacgctcatgcacgaaagcgtggggagcaaacaggattagataccctggtagtccacgccctaaacgatgtcaactagttgttggggattcatttccttagtaacgtagctaacgcgtgaagttgaccgcctggggagtacggtcgcaagattaaaactcaaaggaattgacggggacccgcacaagcggtggatgatgtggattaattcgatgcaacgcgaaaaaccttacctacccttgacatggtcggaagtctgctgagaggtggacgtgctcgaaagagaaccggcgcacaggtgctgcatggctgtcgtcagctcgtgtcgtgagatgttgggttaagtcccgcaacgagcgcaacccttgtccttagttgctacgcaagagcactctaaggagactgccggtgacaaaccggaggaaggtggggatgacgtcaagtcctcatggcccttatgggtagggcttcacacgtcatacaatggtcggaacagagggttgccaagccgcgaggtggagccaatcccagaaaaccgatcgtagtccggatcgcagtctgcaactcgactgcgtgaagctggaatcgctagtaatcgcggatcagcatgccgcggtgaatacgttcccgggtcttgtacacaccgcccgtcacaccatgggagtgggtttcaccagaagtaggtagcctaacctgcaaaggagggcgcttaccacggtgggattcatgactggggtg

SEQ ID NO: 983 - DNA, 1453 bp, Caballeronia terrestris
attgaacgctggcggcatgccttacacatgcaagtcgaacggcagcacgggggcaaccctggtggcgagtggcgaacgggtgagtaatacatcggaacgtgtcctgtagtgggggatagcccggcgaaagccggattaataccgcatacgacctaagggagaaagcgggggatcttcggacctcgcgctataggggcggccgatggcagattagctagttggtggggtaaaggcctaccaaggcgacgatctgtagctggtctgagaggacgaccagccacactgggactgagacacggcccagactcctacgggaggcagcagtggggaattttggacaatgggggaaaccctgatccagcaatgccgcgtgtgtgaagaaggccttcgggttgtaaagcacttttgtccggaaagaaaaccttcgagctaataccttgaggggatgacggtaccggaagaataagcaccggctaactacgtgccagcagccgcggtaatacgtagggtgcgagcgttaatcggaattactgggcgtaaagcgtgcgcaggcggtttgttaagacagatgtgaaatccccgggcttaacctgggaactgcatttgtgactggcaagctagagtatggcagaggggggtagaattccacgtgtagcagtgaaatgcgtagagatgtggaggaataccgatggcgaaggcagccccctgggccaatactgacgctcatgcacgaaagcgtggggagcaaacaggattagataccctggtagtccacgccctaaacgatgtcaactagttgttggggattcatttccttagtaacgtagctaacgcgtgaagttgaccgcctggggagtacggtcgcaagattaaaactcaaaggaattgacggggacccgcacaagcggtggatgatgtggattaattcgatgcaacgcgaaaaaccttacctacccttgacatggtcggaaccctgctgaaaggtgggggtgctcgaaagagaaccggcgcacaggtgctgcatggctgtcgtcagctcgtgtcgtgagatgttgggttaagtcccgcaacgagcgcaacccttgtccttagttgctacgcaagagcactctaaggagactgccggtgacaaaccggaggaaggtggggatgacgtcaagtcctcatggcccttatgggtagggcttcacacgtcatacaatggtcggaacagagggtcgctaagccgcgaggtggagccaatcccagaaaaccgatcgtagtccggatcgcagtctgcaactcgactgcgtgaagctggaatcgctagtaatcgcggatcagcatgccgcggtgaatacgttcccgggtcttgtacacaccgcccgtcacaccatgggagtgggttttaccagaagtggctagtctaaccgcaaggaggacggtcaccacggtaggattcatgactggggtg

SEQ ID NO: 984 - DNA, 1454 bp, Caballeronia turbans
attgaacgctggcggcatgccttacacatgcaagtcgaacggcagcacgggggcaaccctggtggcgagtggcgaacgggtgagtaatacatcggaacgtgtcctgtagtgggggatagcccggcgaaagccggattaataccgcatacgatctacggaagaaagcgggggatcttcggacctcgcgctgcaggggcggccgatggcagattagctagttggtggggtaaaggcctaccaaggcgacgatctgtagctggtctgagaggacgaccagccacactgggactgagacacggcccagactcctacgggaggcagcagtggggaattttggacaatgggggcaaccctgatccagcaatgccgcgtgtgtgaagaaggccttcgggttgtaaagcacttttgtccggaaagaaaaccatcgccctaatatggtggtgggatgacggtaccggaagaataagcaccggctaactacgtgccagcagccgcggtaatacgtagggtgcgagcgttaatcggaattactgggcgtaaagcgtgcgcaggcggtctgttaagaccgatgtgaaatccccgggcttaacctgggaactgcattggtgactggcaggctttgagtgtggcagagggaggtagaattccacgtgtagcagtgaaatgcgtagagatgtggaggaataccgatggcgaaggcagcctcctgggccaacactgacgctcatgcacgaaagcgtggggagcaaacaggattagataccctggtagtccacgccctaaacgatgtcaactagttgttggggattcatttccttagtaacgtagctaacgcgtgaagttgaccgcctggggagtacggtcgcaagattaaaactcaaaggaattgacggggacccgcacaagcggtggatgatgtggattaattcgatgcaacgcgaaaaaccttacctacccttgacatggtcggaatcctgctgagaggcgggagtgctcgaaagagaaccggcgcacaggtgctgcatggctgtcgtcagctcgtgtcgtgagatgttgggttaagtcccgcaacgagcgcaacccttgtccttagttgctacgcaagagcactctaaggagactgccggtgacaaaccggaggaaggtggggatgacgtcaagtcctcatggcccttatgggtagggcttcacacgtcatacaatggtcggaacagagggttgccaagccgcgaggcggagccaatcccagaaaaccgatcgtagtccggatcgcagtctgcaactcgactgcgtgaagctggaatcgctagtaatcgcggatcagcatgccgcggtgaatacgttcccgggtcttgtacacaccgcccgtcacaccatgggagtgggttttaccagaagtggctagtctaaccgcaaggaggacggtcaccacggtaggattcatgactggggtg

SEQ ID NO: 985 - DNA, 1453 bp, Caballeronia udeis
attgaacgctggcggcatgccttacacatgcaagtcgaacggcagcacgggggcaaccctggtggcgagtggcgaacgggtgagtaatacatcggaacgtgtcctgtagtgggggatagcccggcgaaagccggattaataccgcatacgatctacggaagaaagcgggggaccgaaaggcctcgcgctataggggcggccgatggcagattagctagttggtggggtaaaggcctaccaaggcgacgatctgtagctggtctgagaggacgaccagccacactgggactgagacacggcccagactcctacgggaggcagcagtggggaattttggacaatgggggaaaccctgatccagcaatgccgcgtgtgtgaagaaggccttcgggttgtaaagcacttttgtccggaaagaaaacttctgccctaatacggcgggaggatgacggtaccggaagaataagcaccggctaactacgtgccagcagccgcggtaatacgtagggtgcgagcgttaatcggaattactgggcgtaaagcgtgcgcaggcggttcgttaagacagatgtgaaatccccgggcttaacctgggaactgcatttgtgactggcgagctagagtatggcagaggggggtagaattccacgtgtagcagtgaaatgcgtagagatgtggaggaataccgatggcgaaggcagccccctgggccaatactgacgctcatgcacgaaagcgtggggagcaaacaggattagataccctggtagtccacgccctaaacgatgtcaactagttgttggggattcatttccttagtaacgtagctaacgcgtgaagttgaccgcctggggagtacggtcgcaagattaaaactcaaaggaattgacggggacccgcacaagcggtggatgatgtggattaattcgatgcaacgcgaaaaaccttacctacccttgacatggtcggaaccctgctgaaaggtgggggtgctcgaaagagaaccgatacacaggtgctgcatggctgtcgtcagctcgtgtcgtgagatgttgggttaagtcccgcaacgagcgcaacccttgtccttagttgctacgcaagagcactctaaggagactgccggtgacaaaccggaggaaggtggggatgacgtcaagtcctcatggcccttatgggtagggcttcacacgtcatacaatggtcggaacagagggctgccaacccgtgagggggagctaatcccagaaaaccgatcgtagtccggatcgtagtctgcaactcgactacgtgaagctggaatcgctagtaatcgcggatcagcatgccgcggtgaatacgttcccgggtcttgtacacaccgcccgtcacaccatgggagtgggttttaccagaagtggctagtctaaccgcaaggaggacggtcaccacggtaggattcatgactggggtg

SEQ ID NO: 986 - DNA, 1468 bp, Caldalkalibacillus thermarum
aatacatgcaagtcgagcgcgtgaagcttccagaagccttcgggcggacgggagtggatcgagcggcggacgggtgagtaacacgtaggcaacctgcctgtaagaccgggataaccccgggaaaccggggctaataccggataggaccttcggtcgcatgaccgttggttgaaaggtggccgcaaggctaccgcttacagatgggcctgcggcgcattagctagttggtgaggtaacggctcaccaaggcgacgatgcgtagccggcctgagagggtgaccggccacactgggactgagacacggcccagactcctacgggaggcagcagtagggaatcttccgcaatgggcgcaagcctgacggagcgatgccgcgtgagcgaggaaggccttcgggtcgtaaagctctgttgtcagggaagaacaagtaccgttcgacaagggcggtaccttgacggtacctgacgagaaagccccggctaactacgtgccagcagccgcggtaatacgtagggggcgagcgttgtccggaatcactgggcgtaaagcgcgcgcaggcggcctcttaagtctggtgtgaaagcccgcggctcaaccgtggagacgcactggaaactgggaggcttgagtgcaggagagggaagcggaattcccggtgtagcggtgaaatgcgtagatatcgggaggaacaccagtggcgaaggcggcttcctggcctgtaactgacgctgaggcgcgaaagcgtggggagcaaacaggattagataccctggtagtccacgccgtaaacgatgagtctaggtgttgggggtttcgacaccctcagtgctgaaggtaacccattaagcactccgcctggggagtacggccgcaaggctgaaactcaaaggaattgacgggggcccgcacaagcggtggagcatgtggtttaattcgaagcaacgcgaagaaccttaccagggcttgacatcccggtgctacctccagagatggagggttctcttcggagacaccggtgacaggtggtgcatggttgtcgtcagctcgtgtcgtgagatgttgggttaagtcccgcaacgagcgcaacccttggccttagttgccagcattcagttgggcactctaaggcgactgccggtgacaaaccggaggaaggtggggatgacgtcaaatcatcatgccccttatgccctgggctacacacgtgctacaatgggcggtacaaagggttgcgaacccgcgagggggagctaatcccaaaaagccgctctcagttcggattgcaggctgcaactcgcctgcatgaagccggaatcgctagtaatcgcggatcagcatgccgcggtgaatacgttcccgggccttgtacacaccgcccgtcacaccacgagagtctgtaacacccgaagtcggtgaggtaacccgcaagggagccagccgccgaaggtgggacagatgattggggtg

SEQ ID NO: 987 - DNA, 1354 bp, Caldanaerobius fijiensis
tcgagcggaggtagtggagcttgctctattaccttagcggcggacgggtgagtaacacgtgagcaacctgcctttaagaccgggataacacttcgaaagaggtgctaataccggataacatttatacaccgcatggtgtataaagaaagggggaacccgcttaaagaggggctcgcggcccatcagctagttggtgaggtaacggctcaccaaggcgacgacgggtagccggcctgagagggtgtacggccacactgggactgagacacggcccagactcctacgggaggcagcagtggggaatcttgcgcaatgggggaaaccctgacgcagcgacgccgcgtgagcgaggaaggccttcgggttgtaaagctctgttctgtggggagatgacggtaccacaggagaaagccccggccaactacgtgccagcagccgcggtaatacgtagggggcaagcgttgtccggagtgactgggcgtaaagggcgcgtaggcggtcttagaagtcagatgtaaaaggtaccggctcaaccggtaaatagcatctgataccataagactagagtacaggagaggggagcggaattcctggtgtagcggtgaaatgcgtagagatcaggaagaacaccggtggcgaaggcggctctctggcctgggactgacgctgaggcgcgaaagcgtggggagcgaacaggattagataccctggtagtccacgctgtaaacgatggatactaggtgtgggtgagtaaaatcatccgtgccggagcaaacgcaataagtatcccgcctggggagtacggccgcaaggttgaaactcaaaggaattgacgggggcccgcacaagcagcggagcatgttgtttaattcgaagcaacgcgaagaaccttaccagggcttgacatccacagaatccggtggaaacactggagtgcccgagagggagctgtgagacaggtggtgcatggttgtcgtcagctcgtgtcgtgagatgttgggttaagtcccgcaacgagcgcaacccttgcagctagttagagatctagctggactgccgtggacaacacggaggaaggtggggatgacgtcaaatcatcatgccccttatgccctgggctacaaacgtgctacaatggcgagtacagagggaagcgaaggagcgatctggagcgaatcccaaaaagctcgtcacagttcggattgcaggctgaaacccgcctgcatgaagccggagttgctagtaatcgcggatcagcatgccgcggtgaatgcgttcccgggccttgtacacaccgcccgtcacaccacgagagtctacaatacccgaagacagggaagacctgtgaagtagg

SEQ ID NO: 988 - DNA, 1502 bp, Calderihabitans maritimus
gacgaacgctggcggcgtgcctaacacatgcaagtcgagcgggccttgctactggagtgccctaggtacgaaagtagtgaggctagcggcggacgggtgagtaacgcgtgggcaacctacccttcagaccgggataacaccgggaaaccggtgctaataccggatggactccttgtgctgaggcatgaggaggaaaggaggcctctcggagaagcttccgctgagggatgggcccgcgtcccattagctagttggtgaggtaacggctcaccaaggcgacgatgggtagccggcctgagagggtgaccggccacactgggactgagacacggcccagactcctacgggaggcagcagtggggaatattgcgcaatgggcgaaagcctgacgcagcgacgccgcgtgagcgaagaaggccttcgggtcgtaaagctctgtcattggggacgaagtctgttgtatgaataatacaacaggtgacggtacccaaagaggaagccccggctaactacgtgccagcagccgcggtaaaacgtagggggcgagcgttgtccggaattactgggcgtaaagggcgtgtaggcggtggtctaagtcaggtgtgaaataccggggctcaacctcgggggtgcacctgatactgggtcacttgagggcaggagaggggggcggaattcccggtgtagcggtgaaatgcgtagatatcgggaggaacaccagtggcgaaggcggctctctggcctgtccctgacgctgaggcgcgaaagcgtggggagcgaacaggattagataccctggtagtccacgctgtaaacgatgggtactaggtgttggaggtatcgaccccttcagtgccgtagcaaacgcaataagtaccccgcctggggagtacggccgcaaggctgaaactcaaaggaattgacgggggcccgcacaagcggtggagcatgtggtttaattcgatgcaacgcgaagaaccttaccggggcttgacatgccgcggacctggtggaaacactggggtgccctctttagggagggaacgcggacacaggtggtgcatggttgtcgtcagctcgtgtcgtgagatgttgggttaagtcccgcaacgagcgcaacccctacctttagttgccagcgggtaaagccgggcactctaaagggactgccggtgacaaaccggaggaaggtggggatgacgtcaaatcatcatgccccttatgtcccgggctacacacgtgctacaatggtctgtacagagggtagcgaacccgtgagggggagccaatcccagaaagcagatctcagttcggattgcaggctgcaactcgcctgcatgaaggcggaatcgctagtaatcgcggatcagcatgccgcggtgaatacgttcccgggccttgtacacaccgcccgtcacaccacgaaagccggcaacacccgaagccggtgagccaacccgcgaggggggcagccgtcgaaggtggggctggtgattggggtg

SEQ ID NO: 989 - DNA, 1467 bp, Caldicellulosiruptor bescii
gacgaacgctggcggcgtgcctaacgcatgcaagtcgagcggagatggtggttgaaggtgatgagctggaggctgccatcttagcggcggacgggtgagtaacacgtgagcaacctaccctcagcacggggataacagctcgaaagggctgctaatacccgatgggaccacgctagcgcatgctggtgtggtgaaagggtagctggagaggctatgccggctggggatgggctcgcggcccatcagctagttggtggggtaacggcctaccaaggcgacgacgggtagccggcctgagagggtgtacggccacagtgggactgagacacggcccacactcctacgggaggcagcagcggggaatcttgcgcaatgggcgaaagcctgacgcagcgacgccgcgtgagggaagaagcccttcggggtgtaaacctctttggacggggagaaggagaagatagtacccgtttaaaaagccacggctaactacgtgccagcagccgcggtaatacgtaggtggcgagcgttgtccggaattactgggcgtaaagggtgcgtaggcggcctggtaagttgagcgtgaaatttttgggctcaacccaaaaggagcgttcaaaactgccaggcttgagtgcgggagaggacggcggaattcccggtgtagcggtgaaatgcgtagatatcgggaggaacaccagtggcgaaggcggccgtctggaccgtaactgacgctgaggcacgaaagcgtggggagcaaacaggattagataccctggtagtccacgctgtaaacgatggatgctaggtgtgggggagaagtactcttccgtgccgtagttaacacaataagcatcccgcctggggagtacggccgcaaggttgaaactcaaaggaattgacgggggcccgcacaagcggtggagcatgtggtttaattcgaagcaacgcgaagaaccttaccagggcttgacatgccggggaccctgccgaaaggtgggggtgcctgaccgatgaggttaggagcccggacacaggtggtgcatggttgtcgtcagctcgtgtcgtgagatgttgggttaagtcccgcaacgagcgcaacccctgcccttagttgccagcgcgtagaggcgggcactctaaggggactgccgccgatgaggcggaggaaggtggggatgacgtcaaatcatcatgccccttatgccctgggctacacacgtgctacaatgggtgctacagagggttgcgaaggcgcgagccggagcgaatcccaaaaaagcacccccagttcggattgcaggctgcaactcgcctgcatgaagtcggaatcgctagtaatcgcggatcagcatgccgcggtgaatacgttcccgggccttgtacacaccgcccgtcacaccatgagagtcagcaacacctgaagacacaggttaagctgtgttgaaggtggggctgatgattggggtg

SEQ ID NO: 990 - DNA, 1415 bp, Caldicellulosiruptor changbaiensis
acgcatgcagtcgagcggaggtagctatgaaggtgaagagcctaagtagctaccttagcggcggacgggtgagtaacacgtgagcaacctacccccagcacggggataacagctcgaaagggctgctaatacccgatgggaccacggcatcgcatgatgttgtggtgaaaggagtaatccggctggggatgggctcgcggcccatcagctagttggtgaggtaacggctcaccaaggcgacgacgggtagccggcctgagagggtgtacggccacagtgggactgagacacggcccacactcctacgggaggcagcagcggggaatcttgcgcaatgggcggaagcctgacgcagcgacgccgcgtgagggaggaagcccttcggggtgtaaacctctttggacggggagaaggaggagatagtacccgtttaaaaagccacggctaactacgtgccagcagccgcggtaatacgtaggtggcgagcgttgtccggaattactgggcgtaaagggtgcgtaggcggctatgcaagttaagcgtgaaagccttaggctcaacctaaggattgcgcttaatactgcatagcttgagtgcgggagaggacggcggaattcccggtgtagcggtgaaatgcgtagatatcgggaggaacaccagtggcgaaggcggccgtctggaccgtaactgacgctgaggcacgaaagcgtggggagcgaacaggattagataccctggtagtccacgctgtaaacgatggatgctaggtgtgggggagaaggactcttccgtgccgtagttaacacaataagcatcccgcctggggagtacggccgcaaggttgaaactcaaaggaattgacgggggcccgcacaagcggtggagcatgtggtttaattcgaagcaacgcgaagaaccttaccagggcttgacatgccgggaacctgcccgaaagggtggggtgcctgaccgtaaggttaggagcccggacacaggtggtgcatggttgtcgtcagctcgtgtcgtgagatgttgggttaagtcccgcaacgagcgcaacccctgcccttagttgccagcgcgtaatggtgggcactctaaggggactgccgtcgatgaggcggaggaaggtggggatgacgtcaaatcatcatgccccttatgccctgggctacacacgtgctacaatgggtgctacagagggcgtgcgaaggcgcgagccggagcgaatcccaaaaaagcaccctcagttcggattgcaggctgcaactcgcctgcatgaagtcggaatcgctagtaatcgcggatcagcatgccgcggtgaatacgttcccgggccttgtacacaccgcccgtcacaccatgagagtcagcaacacctgaagacacagggcagctgtgtgaagtaggtccaa

SEQ ID NO: 991 - DNA, 1466 bp, Caldicellulosiruptor hydrothermalis
gacgaacgctggcggcgtgcctaacgcatgcaagtcgagcggagatggtggttgaaggtgatgagctggaggctgccatcttagcggcggacgggtgagtaacacgtgagcaacctaccctcagcacggggataacagctcgaaagggctgctaatacccgatgggaccacggcatcgcatggtgttgtggtgaaagggtggatattgaggtccataccggctggggatgggctcgcggcccatcagctagttggtggggtaacggcctaccaaggcgacgacgggtagccggcctgagagggtgtacggccacagtgggactgagacacggcccacactcctacgggaggcagcagcggggaatcttgcgcaatgggcgaaagcctgacgcagcgacgccgcgtgagggaaggagcccttcggggtgtaaacctctttggacggggagaaggtgaagatagtacccgtttaaaaagccacggctaactacgtgccagcagccgcggtaatacgtaggtggcgagcgttgtccggaattactgggcgtaaagggtgcgtaggcggcctggtaagttgagcgtgaaatttttgggctcaacccaaaaggagcgttcaaaactgccaggcttgagtgcgggagaggacggcggaattcccggtgtagcggtgaaatgcgtagatatcgggaggaacaccagtggcgaaggcggccgtctggaccgtaactgacgctgaggcacgaaagcgtggggagcaaacaggattagataccctggtagtccacgctgtaaacgatggatgctaggtgtgggggagaagaactcttccgtgccgtagttaacacaataagcatcccgcctggggagtacggccgcaaggttgaaactcaaaggaattgacgggggcccgcacaagcggtggagcatgtggtttaattcgaagcaacgcgaagaaccttaccagggcttgacatgccggggacctgcccgaaagggtggggtgcctgaccgtaaggttaggagcctggacacaggtggtgcatggttgtcgtcagctcgtgtcgtgagatgttgggttaagtcccgcaacgagcgcaacccctgcccttagttgccagcgcgtagaggcgggcactctaaggggactgccgccgatgaggcggaggaaggtggggatgacgtcaaatcatcatgccccttatgccctgggctacacacgtgctacaatgggtgctacagagggcagcgaaggcgcgagccggagcgaatcccaaaaaagcacccccagttcggattgcaggctgcaactcgcctgcatgaagtcggaatcgctagtaatcgcggatcagcatgccgcggtgaatacgttcccgggccttgtacacaccgcccgtcacaccatgagagtcagcaacacctgaagacacagggcagctgtgttgaaggtggggctgatgattggggtg

SEQ ID NO: 992 - DNA, 1466 bp, Caldicellulosiruptor kristjanssonii
gacgaacgctggcggcgtgcctaacgcatgcaagtcgagcggagatggtagctgaaggtgatgagctggaagctatcatcttagcggcggacgggtgagtaacacgtgagcaacctaccctcagcacggggataacagctcgaaagggctgctaatacccgatgggaccacggcatcgcatggtgttgtggtgaaagggtagccgaagaggctatgccggctggggatgggctcgcggcccatcagctagttggtggggtaacggcctaccaaggcgacgacgggtagccggcctgagagggtgtacggccacagtgggactgagacacggcccacactcctacgggaggcagcagcggggaatcttgcgcaatgggcgaaagcctgacgcagcgacgccgcgtgagggaagaagcccttcggggtgtaaacctctttggacggggagaagtggaagatagtacccgtttaaaaagccacggctaactacgtgccagcagccgcggtaatacgtaggtggcgagcgttgtccggaattactgggcgtaaagggtgcgtaggcggcctggtaagttgagcgtgaaatttttgggctcaacccaaaaggagcgctcaagactgccgggcttgagtgcgggagaggacggcggaattcccggtgtagcggtgaaatgcgtagatatcgggaggaacaccagtggcgaaggcggccgtctggaccgtaactgacgctgaggcacgaaagcgtggggagcaaacaggattagataccctggtagtccacgctgtaaacgatggatgctaggtgtgggggagaagaactcttccgtgccgtagttaacacaataagcatcccgcctggggagtacggccgcaaggttgaaactcaaaggaattgacgggggcccgcacaagcggtggagcatgtggtttaattcgaagcaacgcgaagaaccttaccagggcttgacatgcggggaaccctgccgaaaggcgggggtgcctgcttgttaagagcaggagcccggacacaggtggtgcatggttgtcgtcagctcgtgtcgtgagatgttgggttaagtcccgcaacgagcgcaacccctgcccttagttgccagcggttttagccgggcactctaaggggactgccgccgatgaggcggaggaaggtggggatgacgtcaaatcatcatgccccttatgccctgggctacacacgtgctacaatgggtgctacagagggcggcgaaggcgcgagccggagcgaatcccaaaaaagcacccccagttcggattgcaggctgcaactcgcctgcatgaagtcggaatcgctagtaatcgcggatcagcatgccgcggtgaatacgttcccgggccttgtacacaccgcccgtcacaccatgagagtcagcaacacctgaagacacaggatatctgtgttgaaggtggggctgatgattggggtg

SEQ ID NO: 993 - DNA, 1466 bp, Caldicellulosiruptor kronotskyensis
gacgaacgctggcggcgtgcctaacgcatgcaagtcgagcggagatggtggttgaaggtgatgagctggaggctgccatcttagcggcggacgggtgagtaacacgtgagcaacctaccctcagcacggggataacagctcgaaagggctgctaatacccgatgggaccacggcatcgcatgatgttgtggtgaaagggtggacgtaaggtccattccggctggggatgggctcgcggcccatcagctagttggtggggtaacggcctaccaaggcgacgacgggtagccggcctgagagggtgtacggccacagtgggactgagacacggcccacactcctacgggaggcagcagcggggaatcttgcgcaatgggcgaaagcctgacgcagcgacgccgcgtgagggaagaagcccttcggggtgtaaacctctttggacggggagaaggagaagatagtacccgtttaaaaagccacggctaactacgtgccagcagccgcggtaatacgtaggtggcgagcgttgtccggaattactgggcgtaaagggtgcgtaggcggcctggtaagttgagcgtgaaatttttgggctcaacccaaaaggagcgctcaaaactgccaggcttgagtgcgggagaggacggcggaattcccggtgtagcggtgaaatgcgtagatatcgggaggaacaccagtggcgaaggcggccgtctggaccgtaactgacgctgaggcacgaaagcgtggggagcaaacaggattagataccctggtagtccacgctgtaaacgatggatgctaggtgtgggggagaagaactcttccgtgccgtagttaacacaataagcatcccgcctggggagtacggccgcaaggttgaaactcaaaggaattgacgggggcccgcacaagcggtggagcatgtggtttaattcgaagcaacgcgaagaaccttaccagggcttgacatgccggggaccctgccgaaaggtgggggtgcctgcttgttgagagcaggaacccggacacaggtggtgcatggttgtcgtcagctcgtgtcgtgagatgttgggttaagtcccgcaacgagcgcaacccctgcccttagttgccagcgcgtaatggcgggcactctaaggggactgccgccgatgaggcggaggaaggtggggatgacgtcaaatcatcatgccccttatgccctgggctacacacgtgctacaatgggtgctacagagggcagcgaaggcgtgagccggagcgaatcccaaaaaagcacccccagttcggattgcaggctgcaactcgcctgcatgaagtcggaatcgctagtaatcgcggatcagcatgccgcggtgaatacgttcccgggccttgtacacaccgcccgtcacaccatgagagtcagcaacacctgaagacacagggcagctgtgttgaaggtggggctgatgattggggtg

SEQ ID NO: 994 - DNA, 1466 bp, Caldicellulosiruptor lactoaceticus
gacgaacgctggcggcgtgcctaacgcatgcaagtcgagcggagatggtagctgaaggtgatgagctggaagctatcatcttagcggcggacgggtgagtaacacgtgagcaacctaccctcagcacggggataacagctcgaaagggctgctaatacccgatgggaccacggcatcgcatggtgctgtggtgaaagggtagccggagaggctatgccggctggggatgggctcgcggcccatcagctagttggtggggtaacggcctaccaaggcgacgacgggtagccggcctgagagggtgtacggccacagtgggactgagacacggcccacactcctacgggaggcagcagcggggaatcttgcgcaatgggcgaaagcctgacgcagcgacgccgcgtgagggaagaagcccttcggggtgtaaacctctttggacggggagaagtggaagatagtacccgtttaaaaagccacggctaactacgtgccagcagccgcggtaatacgtaggtggcgagcgttgtccggaattactgggcgtaaagggtgcgtaggcggcctggtaagttgagcgtgaaatttttgggctcaacccaaaaggagcgctcaagactgccgggcttgagtgcgggagaggacggcggaattcccggtgtagcggtgaaatgcgtagatatcgggaggaacaccagtggcgaaggcggccgtctggaccgtaactgacgctgaggcacgaaagcgtggggagcaaacaggattagataccctggtagtccacgctgtaaacgatggatgctaggtgtgggggagaagaactcttccgtgccgtagttaacacaataagcatcccgcctggggagtacggccgcaaggttgaaactcaaaggaattgacgggggcccgcacaagcggtggagcatgtggtttaattcgaagcaacgcgaagaaccttaccagggcttgacatgccgggaaccctgccgaaaggcgggggtgcctgcatgatgagtgcaggagcccggacacaggtggtgcatggttgtcgtcagctcgtgtcgtgagatgttgggttaagtcccgcaacgagcgcaacccttgcccttagttgccagcggttttagccgggcactctaaggggactgccgccgatgaggcggaggaaggtggggatgacgtcaaatcatcatgccccttatgccctgggctacacacgtgctacaatgggtgctacagagggcagcgaaggggcgacccggagcgaatcccaaaaaagcacccccagttcggattgcaggctgcaactcgcctgcatgaagtcggaatcgctagtaatcgcggatcagcatgccgcggtgaatacgttcccgggccttgtacacaccgcccgtcacaccatgagagtcagcaacacctgaagacacaggatatctgtgttgaaggtggggctgatgattggggtg

SEQ ID NO: 995 - DNA, 1466 bp, Caldicellulosiruptor obsidiansis
gacgaacgctggcggcgtgcctaacgcatgcaagtcgagcggggatggtagctgaaggtgatgagctggaagctgccatcttagcggcggacgggtgagtaacacgtgagcaacctaccctcagcacggggataacagctcgaaagggctgctaatacccgatgggaccacgtcattgcatggtgatgtggtgaaagggtggacgtaaggtccataccggctggggatgggctcgcggcccatcagctagttggtggggtaacggcctaccaaggcgacgacgggtagccggcctgagagggtgaccggccacagtgggactgagacacggcccacactcctacgggaggcagcagcggggaatcttgcgcaatgggcgaaagcctgacgcagcgacgccgcgtgagggaaggagcccttcggggtgtaaacctctttggacggggagaagtaggagatagtacccgtttaaaaagccacggctaactacgtgccagcagccgcggtaatacgtaggtggcgagcgttgtccggaattactgggcgtaaagggtgcgtaggcggcctggtaagttgagcgtgaaatttttgggctcaacccaaaaggagcgttcaagactgccaggcttgagtgcgggagaggacggcggaattcccggtgtagcggtgaaatgcgtagatatcgggaggaacaccagtggcgaaggcggccgtctggaccgtaactgacgctgaggcacgaaagcgtggggagcaaacaggattagataccctggtagtccacgctgtaaacgatggatgctaggtgtgggggagaagaactcttccgtgccgtagttaacacaataagcatcccgcctggggagtacggccgcaaggttgaaactcaaaggaattgacgggggcccgcacaagcggtggagcatgtggtttaattcgaagcaacgcgaagaaccttaccagggcttgacatgccggggacccttccgaaaggagggggtgcctgaccgatgaggttaggaacccggacacaggtggtgcatggttgtcgtcagctcgtgtcgtgagatgttgggttaagtcccgcaacgagcgcaacccctgcccttagttgccagcgggcagagccgggcactctaaggggactgccgccgatgaggcggaggaaggtggggatgacgtcaaatcatcatgccccttatgccctgggctacacacgtgctacaatgggtgctacagagggcagcgaaggcgcgagccggagcgaatcccaaaaaagcacccccagttcggattgcaggctgcaactcgcctgcatgaagtcggaatcgctagtaatcgcggatcagcatgccgcggtgaatacgttcccgggccttgtacacaccgcccgtcacaccatgagagtcagcaacacctgaagacacagggcatctgtgttgaaggtggggctgatgattggggtg

SEQ ID NO: 996 - DNA, 1469 bp, Caldicellulosiruptor owensensis
gacgaacgctggcggcgtgcctaacgcatgcaagtcgagcggggatgctaagcggatgggggaaactcttgaagcttagcatcttagcggcggacgggtgagtaacacgtgagcaacctgccctcagcacggggataacagctcgaaagggctgctaatacccgatgggaccacggcatcgcatgatgttgtggtgaaagggtggacgtaatgttcataccggctggggatgggctcgcggcccatcagctagttggtggggtaacggcctaccaaggcgacgacgggtagccggcctgagagggtgaccggccacagtgggactgagacacggcccacactcctacgggaggcagcagcggggaatcttgcgcaatgggcgaaagcctgacgcagcgacgccgcgtgagggaaggagcccttcggggtgtaaacctctttggacggggagaagtagaagatagtacccgtttaaaaagccacggctaactacgtgccagcagccgcggtaatacgtaggtggcgagcgttgtccggaattactgggcgtaaagggtgcgtaggcggtctggtaagttgagcgtgaaatttttgggctcaacccaaaaggagcgttcaagactgccaggcttgagtgcgggagaggacggcggaattcccggtgtagcggtgaaatgcgtagatatcgggaggaacaccagtggcgaaggcggccgtctggaccgtaactgacgctgaggcacgaaagcgtggggagcaaacaggattagataccctggtagtccacgctgtaaacgatggatgctaggtgtgggggagaaggactcttccgtgccgtagttaacacaataagcatcccgcctggggagtacggccgcaaggttgaaactcaaaggaattgacgggggcccgcacaagcggtggagcatgtggtttaattcgaagcaacgcgaagaaccttaccagggcttgacatgccgggaacccttccgaaaggagggggtgcctgaccgtaaggttaggagcccggacacaggtggtgcatggttgtcgtcagctcgtgtcgtgagatgttgggttaagtcccgcaacgagcgcaacccctgcccttagttgccagcgggtgaagccgggcactctaaggggactgccgccgatgaggcggaggaaggtggggatgacgtcaaatcatcatgccccttatgccctgggctacacacgtgctacaatgggtgctacagagggcgagcgaaggcgcgagccggagcgaatcccaaaaaagcacccccagttcggattgcaggctgcaactcgcctgcatgaagtcggaatcgctagtaatcgcggatcagcatgccgcggtgaatacgttcccgggccttgtacacaccgcccgtcacaccatgagagtcagcaacacctgaagacacagggtagctgtgttgaaggtggggctgatgattggggtg

SEQ ID NO: 997 - DNA, 1467 bp, Caldicellulosiruptor saccharolyticus
gacgaacgctggcggcgtgcctaacgcatgcaagtcgagcggagatggtggttgaaggtgatgagctggaggctgccatcttagcggcggacgggtgagtaacacgtgagcaacctacccccagcacggggataacagctcgaaagggctgctaatacccgatgggaccacgtcatcgcatggtgatgtggtgaaagggtagccggggaggctatactggctggggatgggctcgcggcccatcagctagttggtgaggtaacggctcaccaaggcgacgacgggtagccggcctgagagggtgtacggccacagtgggactgagacacggcccacactcctacgggaggcagcagcggggaatcttgcgcaatgggcggaagcctgacgcagcgacgccgcgtgagggatgaagcccttcggggtgtaaacctctttggacggggagaagaaggagatagtacccgtttaaaaagccacggctaactacgtgccagcagccgcggtaatacgtaggtggcgagcgttgtccggaattactgggcgtaaagggtgcgtaggcggctatgcgagttaagcgtgaaagccttaggctcaacctaaggattgcgcttaatactgcatagcttgagtgcgggagaggacggcggaattcccggtgtagcggtgaaatgcgtagatatcgggaggaacaccagtggcgaaggcggccgtctggaccgtaactgacgctgaggcacgaaagcgtggggagcgaacaggattagataccctggtagtccacgctgtaaacgatggatgctaggtgtgggggagaaggactcctccgtgccgtagttaacacaataagcatcccgcctggggagtacggccgcaaggttgaaactcaaaggaattgacgggggcccgcacaagcggtggagcatgtggtttaattcgaagcaacgcgaagaaccttaccagggcttgacatgccggggacctgcccgaaagggtggggtgcctgaccgtaaggttaggagcccggacacaggtggtgcatggttgtcgtcagctcgtgtcgtgagatgttgggttaagtcccgcaacgagcgcaacccctgcccttagttgccagcggttttagccgggcactctaaggggactgccgtcgatgaggcggaggaaggtggggatgacgtcaaatcatcatgccccttatgccctgggctacacacgtgctacaatgggtgctacagagggcgtgcgaaggcgcgagccggagcgaatcccaaaaaagcacccccagttcggattgcaggctgcaactcgcctgcatgaagtcggaatcgctagtaatcgcggatcagcatgccgcggtgaatacgttcccgggccttgtacacaccgcccgtcacaccatgagagtcagcaacacctgaagacacaggttaagctgtgttgaaggtggggctgatgattggggtg

SEQ ID NO: 998 - DNA, 1494 bp, Caldimicrobium thiodismutans
ggcgaacgctagcggcgcgcctaacacatgcaagtcgtgcgggaaagggctccggcccaagtaccgcggcagacgggtgagtaacacgtgagtaacctgtcctcaggtctgggataaccatccgaaagggtggctaataccggataaagtcactgggcgcaagttcagtgatgaaaggaggcctctgcatagcaagcttctgcctgaggaggggctcgcggcccatcagcttgttggtggggtaatggcccaccaaggctatgacgggtagccggcctgagagggtggtcggccacacgggcactgagacacgggcccgactcctacgggaggcagcagtggggaatcttgggcaatgggcgaaagcctgacccagcgacgccgcgtgggggacgaaggccttcgggtcgtaaacccctgttctgggggaagaaccaggtcgtagcgaatagctatggcctgctgacggtaccccaggagaaagccacggctaactgcgtgccagcagccgcggtaatacgcaggtggcaagcgttgcccggaatcactgggcgtaaagggtgcgtaggcggcaaggcaagtcgcaggtcaaagcccggggctcaaccccggaagggcctgcgatactgttttgcttgagggccggagaggctggcggaattcccggtgtaggggtgaaatccgtagatatcgggaggaacaccggtggggaagcctgccagctggacggttcctgacgctgaggcacgaaagcgtggggagcaaaccggattagatacccgggtagtccacgccgtaaacgatgggtgctaggtctggggaggaaactctctgggccgcagctaacgcgttaagcaccccgcctggggagtacggccgcaaggctgaaactcaaaggaattgacgggggcccgcacaagcggtggagcacgtggtttaattcgatgcaaagcgaagaaccttacctgggtttgacatgccagggttgtaccccgatagaaatattgggggagtgtggggttttcctcgcacgctctggcacaggtgctgcatggctgtcgtcagctcgtgtcgtgagatgttgggttaagtcccgcaacgagcgcaacccctgcccttagttgccagcgggtaagccgggcactctaaggggactgctggggataacccggaggaaggaggggatgacgtcaagtcctcatggcccttatgcccagggctacacacgtgctacaatggggggtacagagggttgcaaacccgcaagggggagctaatcccagaaagccctcctcagttcggatcggggtctgcaactcgaccccgtgaagccggaatcgctagtaatggcggatcagcatgccgccgtgaatgcgttcccgggccttgtacacaccgcccgtcacaccacggaagccggtctcacccgaagtcgctatctcaacccggctcgccgggagggaggcgcctacggtggggctggtgactggggtg

SEQ ID NO: 999 - DNA, 1472 bp, Calditerrivibrio nitroreducens
aacgaacgctggcggcacgcttaacacatgcaagtcaaggggaaagggcttcggcctgagtacactggcgcacgggtgagtaacgcgtgaggaatctgcccataagactgggataacacaccgaaaggtgtgctaatactggatgtgttccataggcgcatgcttatggagtaaaggcggggtaacctgtcgcttatggatgacctcgcgtccgattagctagttggtggggtaatggcctaccaaggcgacgatcggtagccggcctgagagggtggccggccacactggaactgagacacggtccagactcctacgggaggcagcagtggggaatcttgcgcaatgggggcaaccctgacgcagcgatgccgcgtggacgaagaaggccttcgggtcgtaaagtcctttcgctggggaagaaagctattagtagtaactgactgatagttgacggtacccagataagcagccccggctaactccgtgccagcagccgcggtaatacggagggggcaagcgttgttcggaattactgggcgtaaagcgcacgtaggcggttttgtaagtctggggtcaaaggcgacagctcaactgtcgtaaggccttagatactatagaactggagtgccagagaggatggcggaattcccggtgtagcggtgaaatgcgtagatatcgggaggaacaccattggcgaaggcggctatctggctggtaactgacgctgaggtgcgagagcgtagggagcaaacaggattagataccctggtagtctacgctgtaaacgatggatgttagatgttggtggaaccgaccccatcagtgtcgaagctaacgcgttaaacatcccgcctggggagtatgctcgcaagagtgaaactcaaaggaattgacgggggcccgcacaagcggtggagcacgtggtttaattcgatgataaccgaagaaccttacctgggtttgacatcccaagaaccctgcagagatgtgggggtgccgggcttgctcggagcttggagacaggtgctgcatggctgtcgtcagctcgtgccgtgaggtgttgggttaagtcccgcaacgagcgcaacccctgttagtagttgccatcaggtaaagctgggcactctactgagactgccggcgataagccggaggaaggtggggatgacgtcaagtcatcatggcccttatgtccagggctacacacgtgctacaatggcgtatacagagggcagcgagacagtgatgttaagcgaatcccagaaagtacgccgtagttcggattgcagtctgcaactcgactgcatgaagtcggaatcgctagtaatcgcaggtcagcaaaactgcggtgaatacgttcccgggccttgtacacaccgcccgtcacaccatgggagttggtcgtgcctgaagccggtggcctaaccgcgagggaggagccgtctatggcatggtcgatgactggggtg

SEQ ID NO: 1000 - DNA, 1462 bp, Caldithrix abyssi
gacgaacgctggcggcgtgcctaacacatgcaagtcaaggggaaaggcggacttcggtttgccgagtatactggcggacgggtgagtaacgcgtaggcaacctgcccttatgtctgggataacctcgagaaatcggggctaataccggataaggtcaattggccgcatggttaattgattaaaggtgccgcaaggtactgcataaggatgggcctgcgttccattagctagatggtagggtaacggcctaccatggcgacgatggatagctgatctgagaggatgatcagccacactgggattgagatacggcccagactcctacgggaggcagcagtgaggaatattgcgcaatgggggcaaccctgacgcagcaacgccgcgtgggggaagaagctctatggagtgtaaacccctgtaggtagggaagaaagtcatggcttcgcaaggggtcatgtttgacggtacctacaaagtaagctccggctaactccgtgccagcagccgcggtaatacggggggagcaagcgttgtccggaatcactgggcgtaaagggcgtgtaggcggtctggtaagtcagatgtgaaatcccacggcttaaccgtggaattgcatttgaaactgccggacttgagtgcgagagagggtagtggaattcccggtgtagcggtgaaatgcgtagatatcgggaagaacaccagtagcgaaggcggctacctggctcgtaactgacgctaaggcgcgaaagcgtggggagcaaacaggattagataccctggtagtccacgccgtaaacgatgggcactaggtgttggggccgacttgtcggcctcagtgccgcagccaacgcattaagtgccccgcctggggagtacgctcgcaagggtgaaactcaaaggaattgacgggggcccgcacaagcggtggagcatgtggtttaattcgatgcaacgcgaagaaccttaccggggtttgacatgccgatgacgtcacgggagaccgtgattcccttcggggcgtcggcacaggtgctgcatggctgtcgtcagctcgtgtcgtgagatgttgggttaagtcccgcaacgagcgcaacccctgcctctagttaccatcggttcaagccggggactctagagggactgccggcgataagctggaggaaggtggggatgacgtcaagtcctcatggcccttacaccccgggctacacacgtgctacaatggccggtacagcgagttgcgaaaccgcgaggtggagccaatctctaaaaaccggtctcagttcggattgcagtctgcaactcgactgcatgaagtcggaatcgctagtaatcgcggatcagcatgccgcggtgaatacgttcccgggccttgtacacaccgcccgtcacgccatggaagtcggcagtacccgaagcccccgcattagcggggtcgaaggtaaggccgatgactggggcg

SEQ ID NO: 1001 - DNA, 1447 bp, Caloramator australicus
gacgaacgctggcggcgtgcctaacacatgcaagtcgagcggagatgccaaggagcaatccaaggtgtcttagcggcggacgggtgagtaacacgtgggtaacctaccccaaggagggggataacaggtcgaaagacctgctaataccgcataaagcttgtgtgtcgcatgatacataagccaaaggaggaatccgccttgggatgggcccgcggcccattagctagttggtgaggtaacggctcaccaaggcgacgatgggtagccggcctgagagggtggtcggccacactgggactgagacacggcccagactcctacgggaggcagcagtggggaatattgcgcaatgggggaaaccctgacgcagcgacgccgcgtgagcgaagaaggccttcgggttgtaaagctctgtcttccctgacgaagaaagtgacggtaagggaggaggaagccacggctaactacgtgccagcagccgcggtaatacgtaggtggcgagcgttgtccggaattactgggcgtaaagggtgcgtaggcggctccttaagtgaggtgtgaaatccctgggctcaacccaggaactgcacttcaaactggggagctagagtgcaggagaggaaagcggaattcccggtgtagcggtgaaatgcgtagagatcgggaggaacaccagtggcgaaggcggctttctggactgtaactgacgctgaggcacgaaagcgtggggagcaaacaggattagataccctggtagtccacgctgtaaacgatgagtgctaggtgtgggaggcgtagccttccgtgccgcagttaacacattaagcactccgcctggggagtacggtcgcaagattaaaactcaaaggaattgacgggggcccgcacaagcagcggagcatgtggtttaattcgaagcaacgcgaagaaccttaccagggcttgacatccaccgaaccctgtggagacatgggggtgccctctttgagggagcggtgagacaggtggtgcatggttgtcgtcagctcgtgtcgtgagatgttgggttaagtcccgcaacgagcgcaacccctatcgttagttgccagcacttcgggtgggcactctaacgagactgccagggtaacctggaggaaggtggggatgacgtcaaatcatcatgccccttatgtcctgggctacacacgtgctacaatggccactacagagagaagcgaagcagcgatgcggagcaaatctttaaaagtggtcccagttcggattgcaggctgcaactcgcctgcatgaagccggagttgctagtaatcgcggatcagcatgccgcggtgaatacgttcccgggccttgtacacaccgcccgtcacaccatgagagccggcaacacccgaagccagtgggctaaccgattaggaggcagctgtcgaaggtggggctggtgattggggtg

SEQ ID NO: 1002 - DNA, 1454 bp, Caloramator fervidus
gacgaacgctggcggcgtgcctaacacatgcaagtcgagcggagagggcgagggggtttactctgagcctcttagcggcggacgggtgagtaacacgtgggtaacctaccccaaggagggggataacaggtcgaaaggcctgctaataccgcataaagctactggggcgcatgctttggtagccaaaggagcgatagctccgccttgggatgggcccgcggcccattagctagttggtgaggtaacggctcaccaaggcgacgatgggtagccggcctgagagggtggtcggccacactgggactgagacacggcccagactcctacgggaggcagcagtggggaatattgcgcaatgggggaaaccctgacgcagcgacgccgcgtgagcgaagaaggccttcgggtcgtaaagctctgtcttccctgacgaaggaagtgacggtaagggaggaggaagccacggctaactacgtgccagcagccgcggtaatacgtaggtggcgagcgttgtccggaattactgggcgtaaagggtgcgtaggcggccccttaagtgaggtgtgaaatccctgggctcaacccaggaactgcacttcaaactggggggctagagtgcaggagaggaaagcggaattcccggtgtagcggtgaaatgcgtagagatcgggaggaacaccagtggcgaaggcggctttctggactgcaactgacgctgaggcacgaaagcgtggggagcaaacaggattagataccctggtagtccacgctgtaaacgatgggtgctaggtgtggggggcgtagccttccgtgccgtagttaacacattaagcaccccgcctggggagtacggtcgcaagactaaaactcaaaggaattgacgggggcccgcacaagcagcggagcatgtggtttaattcgaagcaacgcgaagaaccttaccagggcttgacatccaccgaaccctgtggaaacacgggggtgccccttatggggagcggtgagacaggtggtgcatggttgtcgtcagctcgtgtcgtgagatgttgggttaagtcccgcaacgagcgcaacccctatcgttagttgccagcacttcggggtgggcactctaacgagactgccagggttaacctggaggaaggtggggatgacgtcaaatcatcatgccccttatgccctgggctacacacgtgctacaatggccactacagagagaagcgaacccgcgagggggagcgaatcttgaaaggtggtcccagttcggattgcaggctgcaactcgcctgcatgaagccggagttgctagtaatcgcggatcagcatgccgcggtgaatacgttcccgggccttgtacacaccgcccgtcacaccatgagagccggcaacacccgaagccagtgggctaacccgaaaggaggcagctgtcgaaggtggggctggtgattggggtg

SEQ ID NO: 1003 - DNA, 1559 bp, Caloramator mitchellensis
gacgaacgctggcggcgtgcctaacacatgcaagtcgagcggaggcagcacttaacactgagtgctcagcagattgggaagcaaaagtaagccagcgtcaaggcacgcgaagcaggctttacgctatttaaaaaagaataacacatgctaaccaagggctgaacattgagtgttaagggctgtcttagcggcggacgggtgagtaacacgtgggtaacctgccctaaggagggggataacagtccgaaaggattgctaataccgcataaagctattgttctgcatgggatgatagccaaaggagaaatccgccttaggatgggcccgcggcccattagctagttggtgaggtaacggctcaccaaggcgacgatgggtagccggcctgagagggtggccggccacactgggactgagacacggcccagactcctacgggaggcagcagtggggaatattgcgcaatgggggaaaccctgacgcagcgacgccgcgtgagcgaagaaggccttcgggttgtaaagctctgtcttccctgacgaagagatgacggtaagggaggaggaagccacggctaactacgtgccagcagccgcggtaatacgtaggtggcgagcgttgtccggaattattgggcgtaaagggtgcgtaggcggctctttaagtgaggtgtgaaaaccctgggctcaaccgagggatggcacttcaaactggggagctagagtgcaggagaggaaagtggaattcccagtgtagcggtgaaatgcgtagagattgggaggaacaccagtggcgaaggcgactttctggactgtaactgacgctgaggcacgaaagcgtggggagcaaacaggattagataccctggtagtccacgctgtaaacgatgagtgctaggtgtggggggcgtagccttccgtgccgcagttaacacattaagcactccgcctgggaagtacggtcgcaagattaaaactcaaaggaattgacgggggcccgcacaagcagcggagcatgtggtttaattcgaagcaacgcgaagaaccttaccagggcttgacatccatcgaatcctgtggaaacatgggagtgcctttcggggaacgatgagacaggtggtgcatggttgtcgtcagctcgtgtcgtgagatgttgggttaagtcccgcaacgagcgcaacccctatcgttagttgccagcagtaaggtgggcactctaacgagactgccagggtaacctggaggaaggtggggatgacgtcaaatcatcatgccccttatgctctgggctacacacgtgctacaatggccactacagagagaagcgaggcagcgatgcggagcaaatcttgtaaaagtggtcccagttcggattgcaggctgcaactcgcctgcatgaagctggagttgctagtaatcgcgaatcagaatgtcgcggtgaatacgttcccgggccttgtacacaccgcccgtcacaccatgagagccggcaacacccgaagccagtgggctaacccgaaagggaggcagctgtcgaaggtggggctggtgattggggtg

SEQ ID NO: 1004 - DNA, 1418 bp, Caloramator proteoclasticus
  misc_feature (188)..(188): n is a, c, g, or t
  misc_feature (1267)..(1267): n is a, c, g, or t
gaacgctgccggagtgactaacacatgcaagtcgagcggaggggataggagcttgctccttgaacctcagtggcggacgggtgagtaacacgtgggtaaccagcccttgagagggggataacaggtcgaaaggcctgctaataccgcataacgctaagaagctgcatggcgtcttagccaagggttanggccgctcaaggatgggcccgcggcccattagatagttggtgaggtaatgtttcaccatggggacgatgggtagccggcctgagagggtggtcggccacactgggactgagacacggcccagactcctacgggaggcagcagtggggaatattgcgcaatgggggaaaccctgacgcagcgacgccgcgtgagcgatgaaggccttcgggttgtaaagctctgtcttccctgacgataatgacggtaagggaggaggaagccacggctaactacgtgccagcagccgcggtaatacgtaggtggcgagcgttgtccggaattactgggcgtaaagggtgcgtaggcggctctttaagtgggatgtgaaatccctgggctcaacccaggaactgcattccaaactggagagctagagtgcaggagaggaaagcggaattcccagtgtagcggtgaaatgcgtagagattgggaggaacaccagtggcgaaggcggctttctggactgtaactgacgctgaggcacgaaagcgtggggagcaaacaggattagataccctggtagtccacgctgtaaacgatgggtgctaggtgtagggggcgaagccctctgtgccgcagctaacgcattaagtaccccgcctggggagtacggtcgcaagattaaaactcaaaggaattgacgggggcccgcacaagcagcggagcatgtggtttaattcgaagcaacgcgaagaaccttaccagggcttgacatccaccgaaccctgtggaaacacgggggtgcccttcggggaacggtgagacaggtggtgcatggttgtcgtcagctcgtgtcgtgagatgttgggttaagtcccgcaacgaacgcaacccttacctttagttgccaccaaatcggttgggcactctagagggactacctgggttacccaggaggaaggtggggatgacgtcaaatcatcatgccccttatgctctgggctacacacgtgccacaatggccggtacaatgagttgcaaacccgcgagggggagctaatctcaaaaaccggtcccagttcggattgtaggctgcaantcgcccacatgaagctggagttgctagtaatcgcggatcagcatgccgcggtgaatacgttcccggaccttgtacacaccgcccgtcacaccatgagagccggcaacacccgaagccagtgggctaaccctcaagggaggcagctgtcgaa

SEQ ID NO: 1005 - DNA, 1512 bp, Caloramator quimbayensis
gggcgctgcttaccatgcagtcgagctaggggaaattaatgctgattgcttattggtgagagcttaaattaagttagtctgcgtcaagaccgcgtaagcaggcttcacgctatataataataacacaaaagctgagcattgagtgttaagggctgccttagcggcggacggttgagtaacacgtgggtaacctgcctcatggagggggataacactaagaaattggtgctaataccgcataaaaccgcagggtcacatgacctaacggtcaaagatttatcagaatgagatgggcccgcggcccattagctagttggtgaggtaacggctcacggggcgacgatgggtagccgacctgagagggtgatcggccacattgggactgagacactgtccagactcctacgggaggcagcagtggggaatattgcaccatgggggaaaccctgatgcagcaacgccgcgtgagcgaagaaggccttcgggttgtaaagctctgtcttccctgacgataatgacggtaagggaggaggaagccacggctaactacgtgccagcagccgcggtaatacgtaggtggcgagcgttgtccggaattattgggcgtaaagggtgcgtaggcggttttttaagtgggatgtgaaatccatgggcttaacccatgaattgcattccaaactggaaagcttgagtgcaggagaggaaagcggaattcccagtgtagcggtgaaatgcgtagatattgggaggaacaccagtggcgaaggcggctttctggactgtaactgacgctgagccacgaaagcgtggggagcaaacaggattagataccctggtagtccacgctgtaaacgatgggtactaggtgtagggggcgtagccctctgtgccgcagttaacacattaagtaccccgcctgggaagtacgatcgcaagattaaaactcaaaggaattgacgggggcccgcacaagcagcggagcatgtggtttaattcgaagcaacgcgaagaaccttaccagggcttgacatcctactaatcctgtagagatacgggagtgcccttcggggaaagtagagacaggtggtgcatggttgtcgtcagctcgtgtcgtgagatgttgggttaagtcccgcaacgagcgcaacccctgcctttagttgccagcattaagttgggcactctaaagggactgctagggttaacctagaggaaggtggggatgacgtcaaatcatcatgccctttatgccctgggctacacacgtgctacaatggccggtacaaagagcagcgaggccgcgaggcggagcaaatcttaaaaaccggtcccagttcagattgtaggctgcaactcgcctacatgaagccggagttgctagtaatcgcgaatcagcatgtcgcggtgaatgcgttcccgggccttgtacacaccgcccgtcacaccatgagagtctgcaacacccgaagtcagtgggctaacgcgaaagcgaggcagctgccgaaggtgggg

SEQ ID NO: 1006 - DNA, 1424 bp, Caloranaerobacter azorensis
agtcgatcgggtaggtgctttaatgaaccttcgggggatttaaagtactgaaagcggcggacgggtgagtaacgcgtggggaacctgccctatgcagggggatagcctcgggaaaccgggattaataccccataacacttatggaccgcatggtgcataagtcaaagcgtttagcggcataggatggccccgcgtcccattagctagttggtgaggtaacggctcaccaaggcgacgatgggtagccggcctgagagggtggacggccacactgggactgagacacggcccagactcctacgggaggcagcagtggggaatattgcacaatgggcgaaagcctgatgcagcgacgccgcgtgagcgaagaaggccttcgggtcgtaaagctctgtcctaagggaagaagaatgacggtaccttaggaggaagccccggctaactacgtgccagcagccgcggtaatacgtagggggcgagcgttgtccggaatcactgggcgtaaagggtgcgtaggcggccctgcaagtcaggtgtgaaaggcatcggctcaaccgatgtgagcacttgaaactgtagggcttgagtgcaggagaggagagcggaattcctagtgtagcggtgaaatgcgtagatattaggaggaacaccagtggcgaaggcggctctctggactgtaactgacgctgaggcacgaaagcgtgggtagcgaacaggattagataccctggtagtccacgccgtaaacgatgagtgctaggtgttggggggttagaccttcagtgccgcagttaacacattaagcactccgcctggggagtacggtcgcaagactgaaactcaaaggaattgacggggacccgcacaagcagcggagcatgtggtttaattcgaagcaacgcgaagaaccttaccaagacttgacatcctccggacggctctggagacagggctttcccttcggggactggagagacaggtggtgcatggttgtcgtcagctcgtgtcgtgagatgttgggttaagtcccgcaacgagcgcaacccttgcctttagttgccatcaggtaaagctgggcactctagagggactgccggctaaaagtcggaggaaggtggggatgacgtcaaatcatcatgccccttatgtcttgggctacacacgtgctacaatggccggtacagagggcagcgaacccgtaagggggagcgaatcccaaaaagccggtcccagttcggattgtgggctgcaactcgcccacatgaagctggagttgctagtaatcgcgaatcagaatgtcgcggtgaatgcgttcccgggtcttgtacacaccgcccgtcacaccatgagagtcggcaacacccgaagccagtgggctaaccgaaaggaggcagctgtcgaaggtggggccgatgattggggtg

SEQ ID NO: 1007 - DNA, 1411 bp, Calothrix brevissima
gatgaacgctggcggtatgcttaacacatgcaagtcgaacggactcttcggagttagtggcggacgggtgagtaacgcgtgagaatctagctctaggtcggggacaacagttggaaacggctgctaataccggatgtgccgaaaggtgaaaggcttgctgcctagagatgagctcgcgtctgattagctagtaggtgtggtaagagcgcacctaggcgacgatcagtagctggtctgagaggacgatcagccacactgggactgagacacggcccagactcctacgggaggcagcagtggggaattttccgcaatgggcgaaagcctgacggagcaataccgcgtgagggaggaaggctcttgggttgtaaacctcttttctcaaggaagaaaaaaatgacggtacttgaggaataagcatcggctaactccgtgccagcagccgcggtaatacggaggatgcaagcgttatccggaatgattgggcgtaaagcgtccgcaggtggctatgtgtgtctgctgttaaagagtttggcttaaccaaataaaagcggtggaaactacatagctagagtgcgttcggggcagagggaattcctggtgtagcggtgaaatgcgtagagatcaggaagaacaccggtggcgaaagcgctctgctaggccgcaactgacactgagggacgaaagctaggggagcgaatgggattagataccccagtagtcctagccgtaaacgatggatactaggcgtggcttgtatcgacccgagccgtgccggagctaacgcgttaagtatcccgcctggggagtacgcacgcaagtgtgaaactcaaaggaattgacgggggcccgcacaagcggtggagtatgtggtttaattcgatgcaacgcgaagaaccttaccaagacttgacatgtcgcgaatcctcttgaaagggaggagtgccttcgggagcgcgaacacaggtggtgcatggctgtcgtcagctcgtgtcgtgagatgttgggttaagtcccgcaacgagcgcaaccctcgtttttagttgccagcattaagttgggcactctagagagactgccggtgacaaaccggaggaaggtggggatgacgtcaagtcagcatgccccttacgtcttgggctacacacgtactacaatgctacggacaaagggcagcaagctagcgatagcaagcaaatctcataaaccgtagctcagttcagatcgcaggctgcaactcgcctgcgtgaagtcggaatcgctagtaattgcaggtcagcatactgcagtgaattcgttcccgggccttgtacacaccgcccgtcacaccatggaagctggcaacgcccgaagtcattactccaacccttcggggaggaggatgcctaaggcagtgctggtgactggggtg

SEQ ID NO: 1008 - DNA, 1408 bp, Calothrix desertica
gatgaacgctggcggtatgcttaacacatgcaagtcgaacggtcacttcggtgatagtggcggacgggtgagtaacgcgtgagaatctgtcttcaggtcggggacaacagttagaaatgactgctaataccggatgtgccgaaaggtgaaagatttattgcctgaaaaagagctcgcgtcagattagctagtaggtggtgtaagagactacctaggcttcgatctgtagctggtctgagaggacgatcagccacactggaactgagacacggtccagactcctacgggaggcagcagtggggaattttccgcaatgggcgaaagcctgacggagcaataccgcgtgagggacgaaggctcttgggtcgtaaacctcttttctcaaggaagattaagacggtacttgaggaataagcatcggctaactctgtgccagcagccgcggtaatacagaggatgcaagcgttatccggaatgattgggcgtaaagcgtccgcaggtggttttataagtctgctgttaaagcgttaggctcaacctaataagggcagtggaaactataagactagagtatgttaggggtagagggaattcccagtgtagcggtgaaatgcgtagagattgggaagaacaccggtggcgaaagcgctctgctaggacaatactgacactgagggacgaaagctaggggagcgaatgggattagataccccagtagtcctagccgtaaacgatggatactaggcgttgcccgtatcgacccgggcattgtcgtagctaacgcgttaagtatcccgcctggggagtacgcacgcaagtgtgaaactcaaaggaattgacgggggcccgcacaagcggtggagtatgtggtttaattcgatgcaacgcgaagaaccttaccaggacttgacatgtcgcgaaccctgctgaaaggtgggggtgccttcgggagcgcgaacacaggtggtgcatggctgtcgtcagctcgtgtcgtgagatgttgggttaagtcccgcaacgagcgcaaccctcgtttttagttgccatcattaagttgggcactctagagagactgccggtgacaaaccggaggaaggtggggatgacgtcaagtcagcatgccccttacgtcctgggctacacacgtactacaatgctacgaacaaagggcagctagttagcaataacatgcaaatctcagaaatcgtagctcagttcagattgaaggctgcaactcgccttcatgaagtcggaatcgctagtaattgcaggtcagcatactgcagtgaattcgttcccgggccttgtacacaccgcccgtcacaccatggaagctggtcacgcccgaagtagttatcctaacagttcgctgggggagactccgaaggtagggctggtgactggggtg

SEQ ID NO: 1009 - DNA, 1139 bp, Calothrix elsteri
  misc_feature (20)..(20): n is a, c, g, or t
cgaaagcctgacggagcaanaccgcgtgagggaggaaggctcttgggttgtaaacctcttttctcagggaagataatgacggtacctgaggaataagcatcggctaactccgtgccagcagccgcggtaatacggaggatgcaagcgttatccggaatgattgggcgtaaagcgtccgcaggtggttatgtaagtctgctgttaaagcgtcaggctcaacctgataagggcagtggaaactatgtgactagagtgcgttaggggcagagggaattcccagtgtagcggtgaaatgcgtagagattgggaagaacaccggtggcgaaggcgctctgctataccgtaactgacactgagggacgcaagctaggggagcgaatgggattagataccccagtagtcctagccgtaaacgatggatactaggcgttgtctgtatcgacccggacagtgccgtagctaacgcgttaagtatcccgcctggggagtacgcaggcaactgtgaaactcaaaggaattgacgggggcccgcacaagcggtggagtatgtggtttaattcgatgcaacgcgaagaaccttaccagggcttgacatgtcgcgaagtccggggaaacttggatatgccttagggagcgcgaacacaggtggtgcatggctgtcgtcagctcgtgtcgtgagatgttgggttaagtcccgcaacgagcgcaaccctcgtttttagttgccagcattaagttgggcactctagagagactgccggtgacaaaccggaggaaggtggggatgacgtcaagtcagcatgccccttacgtcctgggctacacacgtactacaatgctacgaacaaagggcagctagacagcgatgtcatgcaaatctcagaaatcgtggctcagttcagattgcaggctgcaactcgcctgcatgaaggaggaatcgctagtaattgcaggtcagcatactgcagtgaattcgttcccgggccttgtacacaccgcccgtcacaccatggaagctggtcacgcccgaagtagttgccctaaccattcgtggggggggactcctaaggtagggctggtgactggggtgaagtcgtaacaaggtagccgtaccggaaggtgtggctggatcacctcct

SEQ ID NO: 1010 - DNA, 1409 bp, Calothrix parasitica
gatgaacgctggcggcgtgcctaacacatgcaagtcgaacggtctcttcggagatagtggcggacgggtgagtaacgcgtgagaatctgcctttaggttcgggacaacagttggaaacgactgctaataccgaatgtgtcgtaagatgaaagattaattgcctaaagatgagctcgcgtctgattagctagttggtgtggtaaaagcataccaaggcgacgatcagtagctggtctgagaggatgatcagccacattgggactgagacacggcccaaactcctacgggaggcagcagtggggaattttccgcaatgggcgaaagcctgacggagcaacgccgcgtgagggaggaaggctcttgggttgtaaacctcttttctcaaggaagataatgacggtacttgaggaatcagcatcggctaactccgtgccagcagccgcggtaatacggaggatgcaagcgttatccggaataattgggcgtaaagcgttcgtaggtggttctgtaagtctgctgttaaagcgtgtagctcaactacatataggcagtggaaactacaaaacttgagtgcgttcggggtagagggaattcctggtgtagcggtgaaatgcgtagagatcaggaagaacaccggtggcgaaggcgctctactaggccgcaactgacactgagggacgaaagctaggggagcgaatgggattagataccccagtagtcctagctgtaaacgatggatactaggcgttgtctgtatcgacccggacagtgccgtagctaacgcgttaagtatcccgcctggggagtacgcacgcaagtgtgaaactcaaaggaattgacgggggcccgcacaagcggtggagtatgtggtttaattcgatgcaacgcgaagaaccttaccaaggcttgacatgtccggaagttctgggaaactagaatgtgccttcgggaaccggaacacaggtggtgcatggctgtcgtcagctcgtgtcgtgagatgttgggttaagtcccgcaacgagcgcaaccctcgtccttagttgccagcacttcgggtgggcactttagggagactgccggtgacaaaccggaggaaggtggggatgacgtcaagtcatcatgccccttacgtcttgggctacacacgtactacaatgctatggacaaagagcagccagctagcgatagtgcgctaatctcataaaccatggctcagttcagattgcaggctgcaactcgcctgcatgaagtaggaatcgctagtaattgcaggtcagcatactgcagtgaattcgttcccgggccttgtacacaccgcccgtcacaccatggaagttggtcacgcccgaagtcgttaccctaaccgttcgcggagggggatgccgaaggtaggactgatgactggggtg

SEQ ID NO: 1011 - DNA, 1411 bp, Camelimonas lactis
aacgaacgctggcggcaggcttaacacatgcaagtcgaacgatcccttcggggatagtggcagacgggtgagtaacacgtgggaacgtacctttcagttcggaataactcatggaaacgtgagctaataccggatacgcccttatggggaaagatttatcgctgaaagatcggcccgcgtctgattagcttgatggtggggtaatggcctaccatggcgacgatcagtagctggtctgagaggatgatcagccacactgggactgagacacggcccagactcctacgggaggcagcagtggggaatattggacaatgggcgcaagcctgatccagccatgccgcgtgagtgatgacggccctagggttgtaaagctctttcggcggggacgataatgacggtacccgcagaagaagccccggctaacttcgtgccagcagccgcggtaatacgaagggggcaagcgttgttcggaatcactgggcgtaaagggcgcgtaggcggacatttaagtcaggggtgaaatcccggggctcaaccccggaactgcccttgatactgggtgtcttgagaccggaagaggcaagtggaactgcgagtgtagaggtgaaattcgtagatattcgcaagaacaccagtggcgaaggcggcttgctggtccggatctgacgctgaggcgcgaaagcgtggggagcaaacaggattagataccctggtagtccacgccgtaaacgatggatgccagccgttgggcagcttgctgctcagtggcgcagttaacgcgttaagcatcccgcctggggagtacggtcgcaagattaaaactcaaaggaattgacgggggcccgcacaagcggtggagcatgtggtttaattcgaagcaacgcgcagaaccttaccagctcttgacatgtcacgtttggttaccggagacggtttccttcagttcggctggcgtgaacacaggtgctgcatggctgtcgtcagctcgtgtcgtgagatgttgggttaagtcccgcaacgagcgcaaccctcgcccccagttgccatcattcagttgggaactctggggggactgccggtgataagccgagaggaaggtggggatgacgtcaagtcctcatggcccttacgggctgggctacacacgtgctacaatggtggtgacagagggcagcgaaagggcgacctggagctaatccccaaaagccatctcagttcggattgcactctgcaactcgggtgcatgaaggtggaatcgctagtaatcgtggatcagcatgccacggtgaatacgttcccgggccttgtacacaccgcccgtcacaccatgggagttggttctacccgacagcgctgcgctaacccgcaagggaggcaggcgaccacggtagggtcagcgactggggtg

SEQ ID NO: 1012 - DNA, 1430 bp, Caminibacter mediatlanticus
agtgaacgctggcggcgtgcttaacacatgcaagtcgaggggcagcaggccgactcttcggagttggtgctggcgaccggcggacgggtgcgtaacacgtagctacttgccctacagtgggggataacccggggaaacccgggctaataccgcatacacccgagaggggaaaggccgtaaggtcgctgtaggatagggctgcggcgtatcagctagttggtggggtaacggcctaccaaggctatgacgcgtagctggtctgagaggatgatcagccacactggaactgagacacggtccagactcctacgggaggcagcagtggggaatcttgggcaatgggcgaaagcctgacccagcaacgccgcgtggaggaagaagcccttcggggtgtaaactccttttgcaggggaagagagagacggtaccctgcgaataagctccggctaactccgtgccagcagccgcggtaatacggggggagcgagcgttactcggaatcactgggcgtaaagggtgcgtaggcggcttagtaagttggaagtgaaatcccacggctcaaccgtggaactgcttccaaaactgctaagctagagtccgggagaggccgagggaattcctggtgtaggggtgaaatccgtagagatcaggaggaatgccgaaagcgaaggcgctcggctggaacggaactgacgctgaggcacgaaagcgtggggagcaaacaggattagataccctggtagtccacgccctaaacgatgggtactagtggttggggggatagtccctcagtcacgcagctaacgcgataagtaccccgcctggggagtacggccgcaaggctaaaactcaaaggaatagacggggacccgaacaagcggtggagcatgtggtttaattcgaagatacgcgaagaaccttacctgggcttgacatcccgcgaaccctccagagatgggggggtgccttcttttgaaggagcgcggagacaggtgctgcatggctgtcgtcagctcgtgtcgtgagatgttgggttaagtcccgcaacgagcgcaacccctgcccttagttgccatcagttcggctgggcactctaaggggactgcccgggtaaccgggaggaaggtggggatgacgtcaagtcatcatggcccttatgtccagggcgacacacgtgctacaatggcgaggacagtgagatgcaaacccgcgagggggagcaaatctctaaacctcgtcccagttcggattgcagtctgcaactcgactgcatgaaggcggaatcgctagtaatcgtggatcagccatgccacggtgaatacgttcccgggtcttgtactcaccgcccgtcacaccatgggagtcgggctcacccgaagtcggtatcccaaagattggggccgccgacggtgggtccggcgactggggtg

SEQ ID NO: 1013 - DNA, 1441 bp, Caminicella sporogenes
gatgaacgctggcggcgtgcctaacacatgcaagtcgagcggagctttaatcttttcagcttagctgaaaagattaaagcttagcggcggacgggtgagtaacgcgtgggcaacctgccctgtgcagggggataacacatcgaaaggtgtgctaataccccataagactacgatgtcgcatggcatagtagtaaaagctgaggcggcacaggatgggcccgcgtctgattagctagttggtagggtaacggcctaccaaggcaacgatcagtagccgacctgagagggtgaacggccacactggaactgagacacggtccagactcctacgggaggcagcagtggggaatattgcacaatgggggaaaccctgatgcagcaacgccgcgtgagcgaagaaggccttcgggtcgtaaagctctgtcctaagggaagaaagatgacggtaccttaggaggaagccccggctaactacgtgccagcagccgcggtaaaacgtagggggcgagcgttatccggaatgactgggcgtaaagggtgtgtaggcggccggtaaagtctggggtgaaaggctacggcttaaccgtagtaagccttggaaacttatcggcttgagtgcaggagaggagagcggaattcctagtgtagcggtgaaatgcgtagatattaggaggaacaccagtggcgaaggcggctctctggactgcaactgacgctgaggcacgaaagcgtggggagcgaacaggattagataccctggtagtccacgccgtaaacgatgagtgctaggtgttggaggttcatactttcagtgccgcagttaacgcattaagcactccgcctggggagtacggtcgcaagactgaaactcaaaggaattgacggggacccgcacaagcagcggagcatgtggtttaattcgaagcaacgcgaagaaccttaccaggacttgacatccctgtgacagcttcttaatcgaagccttcccttcggggacacaggagacaggtggtgcatggttgtcgtcagctcgtgtcgtgagatgttgggttaagtcccgcaacgagcgcaacccttgtctttagttgccagcacttagggtgggcactctaaagagactgccggtgataaaccggaggaaggtggggatgacgtcaaatcatcatgccccttatgttctgggctacacacgtgctacaatggctggtacaaagggaagcgaaggagtaatccggagcgaatcccaaaaagccagtcccagttcggattgtgggctgcaactcgcccacatgaagccggagttgctagtaatcgcgaatcagaatgtcgcggtgaatacgttcccgggtcttgtacacaccgcccgtcacaccatgggagcccatggcacccgaagtcagtgagtcaaccgtaaaggagacagctgccgaaggtgaaatgg

SEQ ID NO: 1014 - DNA, 1435 bp, Campylobacter avium
agtgaacgttggcggcgtgcttaacacatgcaagtcgaacgatgaagcctttagcttgctagaggtggattagtggcgcacgggtgagtaaggtatagttaatctgccttgcactgggggacaacatttagaaatgagtgctaataccccatactccactataacacaagttatagtgggaaagtttttcggtgcaagatgagactatatagtatcagctagttggtaaggtaaaggcttaccaaggctatgacgcttaactggtctgagaggatgatcagtcacattggaactgagacacggtccaaactcctacgggaggcagcagtggggaatattgcgcaatgggcgaaagcctgacgcagcaacgccgcgtggaggatgacacttttcggagcgtaaactccttttcttagggaagaattctgacggtacctaaggaataagcaccggctaactccgtgccagcagccgcggtaatacggagggtgcaaacgttactcggaatcactgggcgtaaagggcgcgtaggcggattatcaagtctcttgtgaaatctaatggctcaaccattaaactgcttgggaaactgatagtctagagtaagggagaggcagatggaattggtggtgtaggggtaaaatccgtagatatcaccaagaatacccattgcgaaggcgatctgctggaacttaactgacgctaaggcgcgaaagcgtggggagcaaacaggattagataccctggtagtccacgccctaaacgatgtatgctagttgttggggtgctagtcatctcagtaatgcagctaacgcattaagcataccgcctggggagtacggtcgcaagattaaaactcaaaggaatagacggggacccgcacaagcggtggagcatgtggtttaattcgaggatacgcgaagaaccttacctgggcttgatatccaactaattctttagagataaagaagtgctagcttgctagaaagttgagacaggtgctgcacggctgtcgtcagctcgtgtcgtgagatgttgggttaagtcccgcaacgagcgcaaccctcgtccttagttgctaacagctcggctgagcactctaaggagactgccttcgtaaggaggaggaaggtggggacgatgtcaagtcatcatggcccttatgcccagggcgacacacgtgctacaatggcatatacaatgagacgcaataccgtgaggtggagcaaatctataaaatatgtcccagttcggattgttctctgcaactcgagagcatgaagccggaatcgctagtaatcgcaaatcagccatgttgcggtgaatacgttcccgggtcttgtactcaccgcccgtcaaaccatgggagttgatttcactcgaagaggggatgctaaactggctactctccacagtggaatcagcgactggggtt

SEQ ID NO: 1015 - DNA, 1435 bp, Campylobacter cuniculorum
agtgaacgctggcggcgtgcctaatacatgcaagtcgaacgatgaagcttctagcttgctagaagtggattagtggcgcacgggtgagtaaggtatagttaatctgccctacactagggaataacacttagaaatgagtgctaataccctatactcctattgaacctaagtttaatagggaaagtttttcggtgtaggatgaggctatatagtatcagctagttggtggggtaaaggcttaccaaggctatgacgcttaactggtctgagaggatgatcagtcacactggaactgagacacggtccagactcctacgggaggcagcagtagggaatattgcgcaatgggcgaaagcctgacgcagcaacgccgcgtggaggatgacacttttcggagcgtaaactccttttcttagggaagaactttgacggtacctaaggaataagcaccggctaactccgtgccagcagccgcggtaatacggagggtgcaagcgttactcggaatcactgggcgtaaagggcgcgtaggcggattatcaagtcttttgtgaaatctaatggcttaaccattaaactgcttgagaaactgatagtctagagtgggggagaggcagatggaattggtggtgtaggggtaaaatccgtagatatcaccaagaatacccattgcgaaggcgatctgctggaacttaactgacgctaaggcgcgaaagcgtggggagcaaacaggattagataccctggtagtccacgccctaaacgatgtatgctagttgttggagtgctagtcatttcagtaatgcagctaacgcattaagcataccgcctggggagtacggtcgcaagattaaaactcaaaggaatagacggggacccgcacaagcggtggagcatgtggtttaattcgaggatacgcgaagaaccttacctgggcttgatatcctaagaaccctatagagatatgggggtgctagcttgctagaacttagagacaggtgctgcacggctgtcgtcagctcgtgtcgtgagatgttgggttaagtcccgcaacgagcgcaacccacgtatttagttgctaacagctcggctgagcactctaaatagactgccttcgtaaggaggaggaaggtgtggacgacgtcaagtcatcatggcccttatgcccagggcgacacacgtgctacaatggcatatacaatgagacgcaataccgcgaggtggagcaaatctataaaatatgtcccagttcggattgttctctgcaactcgagagcataaagccggaatcgctagtaatcgcaaatcagccatgttgcggtgaatacgttcccgggtcttgtactcaccgcccgtcacaccatgggagttgatttcactcgaagaggggatgctaaatcggctactctccacagtggaatcagcgactggggtg

SEQ ID NO: 1016 - DNA, 1343 bp, Campylobacter fetus
agtgaacgctggcggcgtgcctaatacatgcaagtcgaacggagtattaagagagcttgctcttttaatacttagtggcgcacgggtgagtaatgtatagttaatctgccctacactggaggacaacagttagaaatgactgctaatactccatactccttcttaacataagttaagtcgggaaagtttttcggtgtaggatgagactatattgtatcagctagttggtaaggtaatggcttaccaaggctttgacgcataactggtctgagaggatgatcagtcacactggaactgagacacggtccagactcctacgggaggcagcagtagggaatattgctcaatgggggaaaccctgaagcagcaacgccgcgtggaggatgacacttttcggagcgtaaactccttttgttagggaagaaccatgacggtacctaacgaataagcaccggctaactccgtgccagcagccgcggtaatacggagggtgcaagcgttactcggaatcactgggcgtaaaggacgcgtaggcggattatcaagtcttttgtgaaatctaacagcttaactgttaaactgcttgagaaactgataatctagagtgagggagaggcagatggaattggtggtgtaggggtaaaatccgtagagatcaccaggaatacccattgcgaaggcgatctgctggaactcaactgacgctaatgcgtgaaagcgtggggagcaaacaggattagataccctggtagtccacgctctaaacgatgtatactagttgttgctgtgctagtcacggcagtaatgcacctaacggattaagtataccgcctggggagtacggtcgcaagattaaaactcaaaggaatagacggggacccgcacaagcggtggagcatgtggtttaattcgaagatacgcgaagaaccttacctgggcttgatatccaactaatctcttagagataagagagtgctagcttgctagaaagttgagacaggtgctgcacggctgtcgtcagctcgtgtcgtgagatgttgggttaagtcccgcaacgagcgcaacccacgtatttagttgctaacagttcggctgagcactctaaatagactgccttcgcaaggaggaggaaggtgtggacgacgtcaagtcatcatggcccttatgcccagggcgacacacgtgctacaatggcatatacaatgagatgcaatatcgcgagatggagcaaatctataaaatatgtcccagttcggattggagtctgcaactcgactccatgaagccggaatcgctagtaatcgtagatcagccatgctacggtgaatacgttcccgggtctt

SEQ ID NO: 1017 - DNA, 1438 bp, Campylobacter geochelonis
agtgaacgctggcggcgtgcctaatacatgcaagtcgaacggagaattaagagagcttgctcttttaattcttagtggcgcacgggtgagtaatatatagctaacctgccccttagaagagaacaacagttagaaatgactgctaatactctatactccaactaaacatatgtttggttgggaaagtcttttcgctaagggatggggctatattgtatcagtttgttggtgaggtaatggctcaccaagactatgacgcataactggtctgagaggatgatcagtcacactggaactgagacacggtccagactcctacgggaggcagcagtaaggaatattgcgcaatgggcgaaagcctgacgcagcaacgccgcgtggaggatgacacttttcggagcgtaaactccttttgttggggaagaataatgacggtacccaacgaataagcaccggctaactccgtgccagcagccgcggtaatacggggggtgcaagcgttactcggaatcactgggcgtaaagggcgcgtaggcggatgaataagtcttttgtgaaatctaacagcttaactgttaaactgcttaggaaactatttatctagagtaagggagaggcagatggaactggtggtgtaggggtaaaatccgtagagatcaccaagaatacctattgcgaaagcgatctgctagaacttaactgacgctgaggcgcgaaagcgtggggagcaaacaggattagataccctggtagtccacgccctaaacgatgtatactagttgttgctttgctagtcaaggcagtaatgcacctaacggattaagtataccgcctggggagtacggtcgcaagattaaaactcaaaggaatagacggggacccgcacaagcggtggagcatgtggtttaattcgaagatacgcgaagaaccttacccggacttgatatccaacaaattctttagagatagagaagtgctagcttgctagaatgttgagacaggtgctgcacggctgtcgtcagctcgtgtcgtgagatgttgggttaagtcccgcaacgagcgcaacccacgtgtttagttgctaacagttcggctgagcactctaaacagactgcctacgcaagtaggaggaaggtgtggacgacgtcaagtcatcatggcccttatgtccggggcgacacacgtgctacaatggcatatacaatgagaagcaatatcgcgagatggagcaaatctataaaatatgtctcagttcggattggagtctgcaactcgactccatgaagccggaatcgctagtaatcgtagatcagccatgctacggtgaatacgttcccgggtcttgtactcaccgcccgtcacaccatgggagttgatttcactcgaagtcggaatgctaaactagctaccgcccacagtggaatcagcgactggggtg

SEQ ID NO: 1018 - DNA, 1435 bp, Campylobacter helveticus
agtgaacgctggcggcgtgcctaatacatgcaagtcgaacgatgaagcttttagcttgctagaagtggattagtggcgcacgggtgagtaaggtatagttaatctgccctacactgggggacaacacttagaaatgagtgctaataccccatactcctatttagcataagttagatagggaaagtttttcggtgtaggatgagactatatagtatcagctagttggtaaggtaaaggcttaccaaggctatgacgcttaactggtctgagaggatgatcagtcacactggaactgagacacggtccagactcctacgggaggcagcagtagggaatattgcgcaatgggggaaaccctgacgcagcaacgccgcgtggaggatgacacttttcggagcgtaaactccttttctttgggaagaattttgacggtaccaaaggaataagcaccggctaactccgtgccagcagccgcggtaatacggagggtgcaagcgttactcggaatcactgggcgtaaagggcgcgtaggcggattatcaagtctcttgtgaaatctaatggcttaaccattaaactgcttgggaaactgatagtctagagtgagggagaggcagatggaattggtggtgtaggggtaaaatccgtagatatcaccaagaatacccattgcgaaggcgatctgctggaacttaactgacgctaaggcgcgaaagcgtggggagcaaacaggattagataccctggtagtccacgccctaaacgatgtatgctagttgttgggatgctagtcatctcagtaatgcagctaacgcattaagcataccgcctggggagtacggtcgcaagattaaaactcaaaggaatagacggggacccgcacaagcggtggagcatgtggtttaattcgaggatacgcgaagaaccttacctgggcttgatatcctaagaaccttatagagatatgagggtgctagcttgctagaacttagagacaggtgctgcacggctgtcgtcagctcgtgtcgtgagatgttgggttaagtcccgcaacgagcgcaaccctcgtccttagttgctaacgattcggtcgagcactctaaggagactgccttcgtaaggaggaggaaggtggggacgacgtcaagtcatcatggcccttacgcccagggcgacacacgtgctacaatggcatatacaatgagacgcaataccgcgaggtggagcaaatctataaaatatgtcccagttcggattgttctctgcaactcgagagcatgaagccggaatcgctagtaatcgtgaatcagccatgtcacggtgaatacgttcccgggtcttgtactcaccgcccgtcacaccatgggagttgatttcactcgaagtggaaatactaaactagttatcccccacagtggaatcagcgactggggtg

SEQ ID NO: 1019 - DNA, 1436 bp, Campylobacter hepaticus
agtgaacgctggcggcgtgcctaatacatgcaagttgaacgatgaaacttctagcttgctagaagtggattagtggcgcacgggtgagtaaggtatagttaatctgccctacacaagaggacaacagttggaaacgactgctaatactctatactcctacttaacacaagttaagtagggaaagttttttcggtgtaggatgagactatatagtatcagttagttggtgaggtaatggctcaccaagactatgacgcttaactggtctgagaggatgatcagtcacactggaactgagacacggtccagactcctacgggaggcagcagtagggaatattgcgcaatgggggaaaccctgacgcagcaacgccgcgtggaggatgacacttttcggagcgtaaactccttttcttagggaagaattttgacggtacctaaggaataagcaccggctaactccgtgccagcagccgcggtaatacggagggtgcaagcgttactcggaatcactgggcgtaaagggcgcgtaggcggattatcaagtctcttgtgaaatctaatggcttaaccattaaactgcttgggaaactgataatctagagtaaggtagaggcagatggaattggtggtgtaggggtaaaatccgtagatatcaccaagaatacccattgcgaaggcgatctgctagaacttaactgacgctaaggcgcgaaagcgtggggagcaaacaggattagataccctggtagtccacgccctaaacgatgtacactagttgttggggtgctagtcatctcagtaatgcagctaacgcattaagtgtaccgcctggggagtacggtcgcaagattaaaactcaaaggaatagacggggacccgcacaagcggtggagcatgtggtttaattcgaagatacgcgaagaaccttacctgggcttgatatcctaagaaccttatagagatatgagggtgctagcttgctagaacttagagacaggtgctgcacggctgtcgtcagctcgtgtcgtgagatgttgggttaagtcccgcaacgagcgcaacccacgtatttagttgctaacagtttggctgagcactctaaatagactgccttcgtaaggaggaggaaggtgtggacgacgtcaagtcatcatggcccttatgcccagggcgacacacgtgctacaatggcatatacaataagacgcaataccgcaaggtggagcaaatctataaaatatgtcttagttcggattgttctctgcaactcgagagcatgaagccggaatcgctagtaatcgtagatcagccatgctacggtgaatacgttcccgggtcttgtactcaccgcccgtcacaccatgggagttgatttcactcgaagccggaatactaaaatagttaccgtccacagtggaatcagcgactggggtg

SEQ ID NO: 1020 - DNA, 1433 bp, Campylobacter hominis
agtgaacgctggcggcgtgcctaatacatgcaagtcgaacgaacgaataagagcttgctcttataagttagtggcgcacgggtgagtaatatatagctaatctgcctcttagtagaggataacagtcggaaacgattgctaatactctatacttctgctttacataagtaaagtagagaaagtttttcgctaagagatgaggctatactgtatcagctagttggtaaggtaacggcttaccaaggctatgacgcataactggtctgagaggatgatcagtcacattggaactgagacacggtccaaactcctacgggaggcagcagtagggaatattgcgcaatgggggaaaccctgacgcagcaacgccgcgtggaggatgacacttttcggagcgtaaactccttttatcgggaaagaataatgacggtacccgatgaataagcaccggctaactccgtgccagcagccgcggtaatacggagggtgcaagcgttactcggaatcactgggcgtaaagggtgcgtaggtggattatcaagtctcttgtgaaatctaatagcttaactattaaattgcttgggaaactgatagtctagagtaggggagaggcagatggaactcttggtgtaggagtaaaatccgtagatatcaagaagaatacctattgcgaaagcgatctgctagaacctaactgacactgatgcacgaaagcgtggggagcaaacaggattagataccctggtagtccacgccctaaacgatgtataccggttgttgctttgctagtcaaggcagtaatccagctaacgcattaagtataccgcctggggagtacggtcgcaagattaaaactcaaaggaatagacggggacccgcacaagcggtggagcatgtggtttaattcgaagatacgcgaagaaccttacccggacttgatatctaacaaatcatccagagatggaagagtgtctgcttgcagaaatgttaagacaggtgctgcacggctgtcgtcagctcgtgtcgtgagatgttgggttaagtcccgcaacgagcgcaacccacgtatttagttgctaacagttaggctgagttctctaaatagactgccttcgtaaggaggaggaaggtgtggacgacgtcaagtcatcatggcccttatgtccggggcgacacacgtgctacaatgacatatacaatgagatgcaatatcgcaagatggagcaaatctataaaatatgtcccagttcggattggagtctgcaactcgactccatgaagccggaatcgctagtaatcgtagatcagccatgctacggtgaatacgttcccgggtcttgtactcaccgcccgtcacaccatgggagttgatttcactcgaagcggggatgcaaaatttgctaccctccacagtggaatcagcgactggggtg

SEQ ID NO: 1021 - DNA, 1438 bp, Campylobacter hyointestinalis
agtgaacgctggcggcgtgcctaatacatgcaagtcgaacggagtattaagagagcttgctcttttaatacttagtggcgcacgggtgagtaatgtatagttaatctgccctacactggaggacaacagttagaaatgactgctaatactccatactccttcttaacataagttaagttgggaaagttttttcggtgtaggatgagactatattgtatcagctagttggtaaggtaatggcttaccaaggctatgacgcataactggtctgagaggatgatcagtcacactggaactgagacacggtccagactcctacgggaggcagcagtagggaatattgctcaatgggggaaaccctgaagcagcaacgccgcgtggaggatgacacttttcggagcgtaaactccttttgttggggaagaaccatgacggtacccaacgaataagcaccggctaactccgtgccagcagccgcggtaatacggagggtgcaagcgttactcggaatcactgggcgtaaaggacgcgtaggcggattatcaagtcttttgtgaaatctaacagctcaactgttaaactgcttgagaaactgataatctagagtgagggagaggcagatggaattggtggtgtaggggtaaaatccgtagagatcaccaggaatacccattgcgaaggcgatctgctggaactcaactgacgctaatgcgtgaaagcgtggggagcaaacaggattagataccctggtagtccacgccctaaacgatgtatactagttgttgctgtgctagtcacggcagtaatgcacctaacggattaagtataccgcctggggagtacggtcgcaagattaaaactcaaaggaatagacggggacccgcacaagcggtggagcatgtggtttaattcgaagatacgcgaagaaccttacctgggcttgatatcctaataacatcttagagataagatagtgcttgtttacaagaaattagtgacaggtgctgcacggctgtcgtcagctcgtgtcgtgagatgttgggttaagtcccgcaacgagcgcaacccacgtatttagttgctaacagttcggctgagcactctaaatagactgccttcgtaaggaggaggaaggtgtggacgacgtcaagtcatcatggcccttatgcccagggcgacacacgtgctacaatggcatatacaatgagacgcaatatcgcgagatggagcaaatctataaaatatgtcccagttcggattgttctctgcaactcgagagcatgaagccggaatcgctagtaatcgtagatcagccatgctacggtgaatacgttcccgggtcttgtactcaccgcccgtcacaccatgggagttgatttcactcgaagtcggaatgctaaattagctaccgcccacagtggaatcagcgactggggtg

SEQ ID NO: 1022 - DNA, 1437 bp, Campylobacter iguaniorum
agtgaacgctggcggcgtgcctaatacatgcaagtcgaacggagatttaagaaagcttgcttttttaaatcttagtggcgcacgggtgagtaatgtatagttaatctgccctacactggaggacaacagttagaaatgactgctaatactccatactccttcttaacataagttaagtcgggaaagtttttcggtgtaggatgagactatattgtatcagctagttggtgaggtaatggctcaccaaggctttgacgcataactggtctgagaggatgatcagtcacactggaactgagacacggtccagactcctacgggaggcagcagtagggaatattgctcaatgggggaaaccctgaagcagcaacgccgcgtggaggatgacacttttcggagcgtaaactccttttctacaagaagaaccatgacggtattgtaggaataagcaccggctaactccgtgccagcagccgcggtaatacggagggtgcaagcgttactcggaatcactgggcgtaaaggacgcgtaggcggattatcaagtcttttgtgaaatctaacagcttaactgttaaactgcttgagaaactgataatctagagtgagggagaggcagatggaattggtggtgtaggggtaaaatccgtagagatcaccaggaatacccattgcgaaggcgatctgctggaactcaactgacgctaatgcgtgaaagcgtggggagcaaacaggattagataccctggtagtccacgccctaaacgatgtatactagttgttgctgtgctagtcacggcagtaatgcacctaacggattaagtataccgcctggggagtacggtcgcaagattaaaactcaaaggaatagacggggacccgcacaagcggtggagcatgtggtttaattcgaagatacgcgaagaaccttacctgggcttgatatcctaagaaccttgtagagatatgagggtgctagcttgctagaacttagagacaggtgctgcacggctgtcgtcagctcgtgtcgtgagatgttgggttaagtcccgcaacgagcgcaacccacgtatttagttgctaacagttcggctgagcactctaaatagactgccttcgtaaggaggaggaaggtgtggacgacgtcaagtcatcatggcccttatgcccagggcgacacacgtgctacaatggcatatacaatgagatgcaatatcgcgagatggagcaaatctataaaatatgtcccagttcggattgctctctgcaactcgagagcatgaagccggaatcgctagtaatcgtagatcagccatgctacggtgaatacgttcccgggtcttgtactcaccgcccgtcacaccatgggagttgatttcactcgaagcccgaatgctaaactagctacggtccacagtggaatcagcgactggggtg

SEQ ID NO: 1023 - DNA, 1435 bp, Campylobacter insulaenigrae
agtgaacgctggcggcgtgcctaatacatgcaagtcgaacgatgaagcaactagcttgctagttgtggattagtggcgcacgggtgagtaaagtatagttaatctgccctacacaagaggacaacagttggaaacgactgctaatactctatactcctatttaacataagttgagtagggaaagtttttcggtgtaggatgagactatatagtatcagctagttggtgaggtaatggctcaccaaggctatgacgcttaactggtctgagaggatgatcagtcacactggaactgagacacggtccagactcctacgggaggcagcagtagggaatattgcgcaatgggggaaaccctgacgcagcaacgccgcgtggaggatgacacttttcggagcgtaaactccttttcttagggaagaattctgacggtacctaaggaataagcaccggctaactccgtgccagcagccgcggtaatacggagggtgcaagcgttactcggaatcactgggcgtaaagggcgcgtaggcggattatcaagtctcttgtgaaatctaatggctcaaccattaaactgcttgggaaactgataatctagagtgagggagaggcagatggaattggtggtgtaggggtaaaatccgtagatatcaccaagaatacccattgcgaaggcgatctgctggaacttaactgacgctaaggcgcgaaagcgtggggagcaaacaggattagataccctggtagtccacgccctaaacgatgtacactagttgttgggatgctagtcatctcagtaatgcagctaacgcattaagtgtaccgcctggggagtacggtcgcaagattaaaactcaaaggaatagacggggacccgcacaagcggtggagcatgtggtttaattcgaagatacgcgaagaaccttacctgggcttgatatcctaagaaccttatagagatatgagggtgctagcttgctagaacttagagacaggtgctgcacggctgtcgtcagctcgtgtcgtgagatgttgggttaagtcccgcaacgagcgcaacccacgtatttagttgctaacggttaggccgagcactctaaatagactgccttcgtaaggaggaggaaggtgtggacgacgtcaagtcatcatggcccttatgcccagggcgacacacgtgctacaatggcatatacaatgagacgcaatatcgcaaggtggagcaaatctataaaatatgtcccagttcggattgttctctgcaactcgagagcatgaagccggaatcgctagtaatcgtagatcagccatgctacggtgaatacgttcccgggtcttgtactcaccgcccgtcacaccatgggagttgatttcactcgaagccggaatactaaactagttaccgtccacagtggaatcagcgactggggtg

SEQ ID NO: 1024 - DNA, 1434 bp, Campylobacter lanienae
agtgaacgctggcggcgtgcctaatacatgcaagtcgaacggacaagtaagagcttgctcttatgagttagtggcgcacgggtgagtaatgtatagttaatctgccctatgctggaggacaacagttagaaatgactgctaatactccatactccttcttaacacaagttaagttgggaaagttttttcggcataggatgagactatattgtatcagctagttggtgaggtaatggctcaccaaggctatgacgcataactggtctgagaggatgatcagtcacactggaactgagacacggtccagactcctacgggaggcagcagtagggaatattgctcaatgggggaaaccctgaagcagcaacgccgcgtggaggatgacacttttcggagcgtaaactccttttcttagggaagaaatttgacggtacctaaggaataagcaccggctaactccgtgccagcagccgcggtaatacggagggtgcaagcgttactcggaatcactgggcgtaaaggacgcgtaggcggattatcaagtcttttgtgaaatctaatggctcaaccattaaactgcttgagaaactgataatctagagtgagggagaggcagatggaattggtggtgtaggggtaaaatccgtagagatcaccaggaatacccattgcgaaggcgatctgctagaactcaactgacgctaatgcgtgaaagcgtggggagcaaacaggattagataccctggtagtccacgccctaaacgatgtatactagttgttgctgtgctagtcatggcagtaatgcacctaacggattaagtataccgcctggggagtacggtcgcaagattaaaactcaaaggaatagacggggacccgcacaagcggtggagcatgtggtttaattcgatgatacgcgaagaaccttacctgggcttgatatcctaagaacctcttagagataagagggtgctagcttgctagaacttagtgacaggtgctgcacggctgtcgtcagctcgtgtcgtgagatgttcggttaagtccggcaacgagcgcaacccacgtatttagttgctaacagtttggctgagcactctaaatatactgccttcgtaaggaggaggaaggtgtggacgacgtcaagtcatcatggcccttatgcccagggcgacacacgtgctacaatggcatatacaatgagacgcaatatcgtgagatggagcaaatctataaaatatgtcccagttcggattgttctctgcaactcgagagcatgaagccggaatcgctagtaatcgtagatcagccatgctacggtgaatacgttcccgggtcttgtactcaccgcccgtcacaccatgggagttgatttcactcgaagtcggaatgctaaactagctaccgcccacagtggaatcagcgactggggtg

SEQ ID NO: 1025 - DNA, 1435 bp, Campylobacter lari
agtgaacgctggcggcgtgcctaatacatgcaagtcgaacgatgaagcgactagcttgctagttgtggattagtggcgcacgggtgagtaaggtatagttaatctgccctacacaagaggacaacagttggaaacggctgctaatactctatactcctgcttaacacaagttgagtagggaaagtttttcggtgtaggatgagactatatagtatcagctagttggtgaggtaatggctcaccaaggctatgacgcttaactggtctgagaggatgatcagtcacactggaactgagacacggtccagactcctacgggaggcagcagtagggaatattgcgcaatgggggaaaccctgacgcagcaacgccgcgtggaggatgacacttttcggagcgtaaactccttttcttagggaagaattctgacggtacctaaggaataagcaccggctaactccgtgccagcagccgcggtaatacggagggtgcaagcgttactcggaatcactgggcgtaaagggcgcgtaggcggattatcaagtctcttgtgaaatccaacggcttaaccgttgaactgcttgggaaactggtaatctagagtgggggagaggcagatggaattggtggtgtaggggtaaaatccgtagatatcaccaagaatacccattgcgaaggcgatctgctggaacttaactgacgctaaggcgcgaaagcgtggggagcaaacaggattagataccctggtagtccacgccctaaacgatgtatgctagttgttggggtgctagtcatctcagtaatgcagctaacgcattaagcataccgcctggggagtacggtcgcaagattaaaactcaaaggaatagacggggacccgcacaagcggtggagcatgtggtttaattcgaagatacgcgaagaaccttacctgggcttgatatcctaagaaccttatagagatatgagggtgctagcttgctagaacttagagacaggtgctgcacggctgtcgtcagctcgtgtcgtgagatgttgggttaagtcccgcaacgagcgcaacccacgtatttagttgctaacacttcgggtgagcactctaaatagactgccttcgtaaggaggaggaaggtgtggacgacgtcaagtcatcatggcccttatgcccagggcgacacacgtgctacaatggcatatacaatgagacgcaataccgcgaggtggagcaaatctataaaatatgtcccagttcggattgttctctgcaactcgagagcatgaagccggaatcgctagtaatcgtagatcagccatgctacggtgaatacgttcccgggtcttgtactcaccgcccgtcacaccatgggagttgatttcactcgaagccggaatactaaactagttaccgtccacagtggaatcagcgactggggtg

SEQ ID NO: 1026 - DNA, 1435 bp, Campylobacter ornithocola
agtgaacgctggcggcgtgcctaatacatgcaagtcgaacgatgaagcaactagcttgctagttgtggattagtggcgcacgggtgagtaaggtatagttaatctgccctacacaagaggacaacagttggaaacgactgctaatactctatactcctgcttaacacaagttaagtagggaaagtttttcggtgtaggatgagactatatagtatcagctagttggtgaggtaatggctcaccaaggctatgacgcttaactggtctgagaggatgatcagtcacactggaactgagacacggtccagactcctacgggaggcagcagtagggaatattgcgcaatgggggaaaccctgacgcagcaacgccgcgtggaggatgacacttttcggagcgtaaactccttttcttagggaagaattctgacggtacctaaggaataagcaccggctaactccgtgccagcagccgcggtaatacggagggtgcaagcgttactcggaatcactgggcgtaaagggcgcgtaggcggattatcaagtctcttgtgaaatccaacggcttaaccgttgaactgcttgggaaactggtagtctagagtgggggagaggcagatggaattggtggtgtaggggtaaaatccgtagatatcaccaagaatacccattgcgaaggcgatctgctggaacttaactgacgctaaggcgcgaaagcgtggggagcaaacaggattagataccctggtagtccacgccctaaacgatgtacactagttgttggggtgctagtcatctcagtaatgcagctaacgcattaagtgtaccgcctggggagtacggtcgcaagattaaaactcaaaggaatagacggggacccgcacaagcggtggagcatgtggtttaattcgaagatacgcgaagaaccttacctgggcttgatatcctaagaaccttatagagatatgagggtgctagcttgctagaacttagagacaggtgctgcacggctgtcgtcagctcgtgtcgtgagatgttgggttaagtcccgcaacgagcgcaacccacgtatttagttgctaacggttcggccgagcactctaaatagactgccttcgtaaggaggaggaaggtgtggacgacgtcaagtcatcatggcccttatgcccagggcgacacacgtgctacaatggcatatacaatgagacgcaataccgcgaggtggagcaaatctataaaatatgtcccagttcggattgttctctgcaactcgagagcatgaagccggaatcgctagtaatcgtagatcagccatgctacggtgaatacgttcccgggtcttgtactcaccgcccgtcacaccatgggagttgatttcactcgaagccggaatactaaactagttaccgtccacagtggaatcagcgactggggtg

SEQ ID NO: 1027 - DNA, 1435 bp, Campylobacter peloridis
agtgaacgctggcggcgtgcctaatacatgcaagtcgaacgatgaagcaactagcttgctagttgtggattagtggcgcacgggtgagtaaggtatagttaatctgccctacacaagaggacaacagctagaaatggctgctaatactctatactcctgcttaacacaagttaagtagggaaagtttttcggtgtaggatgagactatatagtatcagctagttggtgaggtaatggctcaccaaggctatgacgcttaactggtctgagaggatgatcagtcacactggaactgagacacggtccagactcctacgggaggcagcagtagggaatattgcgcaatgggggaaaccctgacgcagcaacgccgcgtggaggatgacacttttcggagcgtaaactccttttcttagggaagaattctgacggtacctaaggaataagcaccggctaactccgtgccagcagccgcggtaatacggagggtgcaagcgttactcggaatcactgggcgtaaagggcgcgtaggcggattatcaagtctcttgtgaaatctaatggcttaaccattaaactgcttgggaaactggtaatctagagtgagggagaggcagatggaattggtggtgtaggggtaaaatccgtagatatcaccaagaatacccattgcgaaggcgatctgctggaactcaactgacgctaaggcgcgaaagcgtggggagcaaacaggattagataccctggtagtccacgccctaaacgatgtatgctagttgttggggtgctagtcatctcagtaatgcagctaacgcattaagcataccgcctggggagtacggtcgcaagattaaaactcaaaggaatagacggggacccgcacaagcggtggagcatgtggtttaattcgaagatacgcgaagaaccttacctgggcttgatatcctaagaaccttatagagatatgagggtgctagcttgctagaacttagagacaggtgctgcacggctgtcgtcagctcgtgtcgtgagatgttgggttaagtcccgcaacgagcgcaacccacgtatttagttgctaacacttcgggtgagcactctaaatagactgccttcgtaaggaggaggaaggtgtggacgacgtcaagtcatcatggcccttatgcccagggcgacacacgtgctacaatggcatatacaatgagacgcaatatcgcaagatggagcaaatctataaaatatgtcccagttcggattgttctctgcaactcgagagcatgaagccggaatcgctagtaatcgtagatcagccatgctacggtgaatacgttcccgggtcttgtactcaccgcccgtcacaccatgggagttgatttcactcgaagtggaaatactaaactagttatcccccacagtggaatcagcgactggggtg

SEQ ID NO: 1028 - DNA, 1435 bp, Campylobacter pinnipediorum
agtgaacgctggcggcgtgcctaatacatgcaagtcgaacggagattaattaagcttgcttttttaatcttagtggcgcacgggtgagtaatgtatagctaatctgccccttacaagaggacaacagttagaaatgactgctaatactctatactccttccaaacataagtttggtcgggaaagtttttcggtaagggatgaggctatattgtatcagctagttggtaaggtaatggcttaccaaggctatgacgcataactggtctgagaggatgatcagtcacactggaactgagacacggtccagactcctacgggaggcagcagtagggaatattgctcaatgggggaaaccctgaagcagcaacgccgcgtggaggatgacacttttcggagcgtaaactccttttgttagggaagaaccatgacggtacctaacgaataagcaccggctaactccgtgccagcagccgcggtaatacggggggtgcaagcgttactcggaatcactgggcgtaaaggacgcgtaggcggattatcaagtcttttgtgaaatcctatggcttaaccatagaactgcttgggaaactgataatctagagtgagggagaggcagatggaattggtggtgtaggggtaaaatccgtagagatcaccaggaatacccattgcgaaggcgatctgctggaactcaactgacgctaaggcgtgaaagcgtggggagcaaacaggattagataccctggtagtccacgccctaaacgatgtatactagttgttgctttgctagtcaaggcagtaatgcacctaacggattaagtataccgcctggggagtacggtcgcaagattaaaactcaaaggaatagacggggacccgcacaagcggtggagcatgtggtttaattcgaagatacgcgaagaaccttacccggacttgatatctaacaaatcatccagagatggaagagtgtctgcttgcagaaatgttaagacaggtgctgcacggctgtcgtcagctcgtgtcgtgagatgttgggttaagtcccgcaacgagcgcaacccacgtcattagttgctaacgcttagggcgagcactctaatgagactgccttcgtaaggaggaggaaggtgtggacgacgtcaagtcatcatggcccttatgtccggggcgacacacgtgctacaatggcatatacaatgagaagcaatatcgcgagatggagcaaatctataaaatatgtcccagttcggattggagtctgcaactcgactccatgaagccggaatcgctagtaatcgtagatcagccatgctacggtgaatacgttcccgggtcttgtactcaccgcccgtcacaccatgggagttgatttcactcgaagtcggaatgctaaactagctaccgcccacagtggaatcagcgactggggtg

SEQ ID NO: 1029 - DNA, 1433 bp, Campylobacter rectus
agtgaacgctggcggcgtgcctaatacatgcaagtcgaacggagattaagtagcttgctatttaatcttagtggcgcacgggtgagtaatatatagctaatctgccctacactagaggacaacagttggaaacgactgctaatactctatactccttctttacataagttaagtcgggaaagtttttcggtgtaggatgaggctatatcgtatcagctagttggtagggtaacggcctaccaaggctatgacgcgtaactggtctgagaggatgatcagtcacactggaactgagacacggtccagactcctacgggaggcagcagtagggaatattgctcaatgggggaaaccctgaagcagcaacgccgcgtggaggatgacacttttcggagcgtaaactccttttcttgggaaagaattatgacggtacccaaggaataagcaccggctaactccgtgccagcagccgcggtaatacggagggtgcaagcgttactcggaatcactgggcgtaaaggacgcgtaggcggattatcaagtctcttgtgaaatctaacggcttaaccgttaaactgcttgggaaactgataatctagagtaagggagaggcagatggaattcttggtgtaggggtaaaatccgtagagatcaagaagaatacccattgcgaaagcgatctgctggaacttaactgacgctaatgcgtgaaagcgtggggagcaaacaggattagataccctggtagtccacgccctaaacgatgtatactagttgttgcttcgctagtcgaggcagtaatgcacctaacggattaagtataccgcctggggagtacggtcgcaagattaaaactcaaaggaatagacggggacccgcacaagcggtggagcatgtggtttaattcgaagatacgcgaagaaccttacccggacttgatatctaacaaatcatccagagatggaagagtgtctgcttgcagaaatgttaagacaggtgctgcacggctgtcgtcagctcgtgtcgtgagatgttgggttaagtcccgcaacgagcgcaacccacgtcattagttgctaacggttcggccgagcactctaatgagactgccttcgtaaggaggaggaaggtgtggacgacgtcaagtcatcatggcccttatgtccggggcgacacacgtgctacaatggcgtatacaataagacgcaatatcgcgagatggagcaaatctataaaatacgtcccagttcggattggagtctgcaactcgactccatgaagccggaatcgctagtaatcgtagatcagccatgctacggtgaatacgttcccgggtcttgtactcaccgcccgtcacaccatgggagttgatttcactcgaagcccaaataccaaaccggttatggtccacagtggaatcagcgactggggtg

SEQ ID NO: 1030 - DNA, 1570 bp, Campylobacter sputorum
agtgaacgctggcggcgtgcctaatacatgcaagtcgaacgatgaagtcctagcttgctaggatggattagtggcgcacgggtgagtaatgtatagctaatctgccccatagagaggaacaacacttagaaatgagtgctaatacctcatactccaattatacataagtttaattgggaaatgtagctcttaataatatatatcaaagataatttataaataaaaagttataaatataacaataagcttttttgaagctttatataataaagcgaaaaaaagcaaagcagttagatttaataaatttttatagcatttaaaaatacaaaagacttaatttttaaatctaaatataaattattactaatatttttaatagtcatttagaaatatcttaatatatattattaagagctttcgctatgggatgaggctatattgtatcagctagttggtaaggtaatggcttaccaaggctatgacgcataactggtctgagaggatgatcagtcacactggaactgagacacggtccagactcctacgggaggcagcagtagggaatattgctcaatgggggaaaccctgaagcagcaacgccgcgtggaggatgacacttttcggagcgtaaactccttttctttgggaagaataatgacggtaccaaaggaataagcaccggctaactccgtgccagcagccgcggtaatacggagggtgcaagcgttactcggaatcactgggcgtaaaggacgcgtaggtggatagataagtctcttgtgaaatctagtagcttaactactaaactgcttgggaaactatctatctagagtaagggagaggcagatggaattcttggtgtaggggtaaaatccgtagatatcaagaggaatacttattgcgaaggcgatctgctagaacttaactgacactaatgcgtgaaagcgtggggagcaaacaggattagataccctggtagtccacgccctaaacgatgtatactggttgttgctgtgctagtcatggcagtaatccacctaacggattaagtataccgcctggggagtacggtcgcaagattaaaactcaaaggaatagacggggacccgcacaagcggtggagcatgtggtttaattcgaagatacgcgaagaaccttacccggacttgatatctaacaaatcatctagagatagaagagtgtctgcttgcagaaatgttaagacaggtgctgcacggctgtcgtcagctcgtgtcgtgagatgttgggttaagtcccgcaacgagcgcaacccacgtgtttagttgctaacagttaggctgagcactctaaacagactgccttcgtaaggaggaggaaggtgtggacgacgtcaagtcatcatggcccttatgtccggggcgacacacgtgctacaatggcatatacaataagacgcaatatcgcgagatggagcaaatctataaaatatgtcccagttcggattggagtctgcaactcgactccatgaagccggaatcgctagtaatcgtagatcagccatgctacggtgaatacgttcccgggtctt

SEQ ID NO: 1031 - DNA, 1436 bp, Campylobacter subantarcticus
agtgaacgctggcggcgtgcctaatacatgcaagtcgaacgatgaagcttttagcttgctagaagtggattagtggcgcacgggtgagtaaggtatagttaatctgccctacacaagaggacaacagttggaaacgactgctaatactctatactcctgcttaacacaagttgagtagggaaagttttttcggtgtaggatgagactatatagtatcagctagttggtgaggtaatggctcaccaaggctatgacgcttaactggtctgagaggatgatcagtcacactggaactgagacacggtccagactcctacgggaggcagcagtagggaatattgcgcaatgggggaaaccctgacgcagcaacgccgcgtggaggatgacacttttcggagcgtaaactccttttcttagggaagaattctgacggtacctaaggaataagcaccggctaactccgtgccagcagccgcggtaatacggagggtgcaagcgttactcggaatcactgggcgtaaagggcgcgtaggcggattatcaagtctcttgtgaaatccaacggcttaaccgttgaactgcttgggaaactggtagtctagagtgagggagaggcagatggaattggtggtgtaggggtaaaatccgtagatatcaccaagaatacccattgcgaaggcgatctgctggaacttaactgacgctaaggcgcgaaagcgtggggagcaaacaggattagataccctggtagtccacgccctaaacgatgtacactagttgttggggtgctagtcatctcagtaatgcagctaacgcattaagtgtaccgcctggggagtacggtcgcaagattaaaactcaaaggaatagacggggacccgcacaagcggtggagcatgtggtttaattcgaagatacgcgaagaaccttacctgggcttgatatcctaagaaccttatagagatatgagggtgctagcttgctagaacttagagacaggtgctgcacggctgtcgtcagctcgtgtcgtgagatgttgggttaagtcccgcaacgagcgcaacccacgtatttagttgctaacggttcggccgagcactctaaatagactgccttcgtaaggaggaggaaggtgtggacgacgtcaagtcatcatggcccttatgcccagggcgacacacgtgctacaatggcatatacaatgagacgcaataccgcgaggtggagcaaatctataaaatatgtcccagttcggattgttctctgcaactcgagagcatgaagccggaatcgctagtaatcgtagatcagccatgctacggtgaatacgttcccgggtcttgtactcaccgcccgtcacaccatgggagttgatttcactcgaagccggaatactaaactagttaccgtccacagtggaatcagcgactggggtg

SEQ ID NO: 1032 - DNA, 1435 bp, Campylobacter upsaliensis
agtgaacgctggcggcgtgcctaatacatgcaagtcgaacgatgaagcttttagcttgctagaagtggattagtggcgcacgggtgagtaaggtatagttaatctgccctacactgggggacaacacttagaaatgagtgctaataccccatactcctacctaacataagttagatagggaaagtttttcggtgtaggatgagactatatagtatcagctagttggtaaggtaaaggcttaccaaggctatgacgcttaactggtctgagaggatgatcagtcacactggaactgagacacggtccagactcctacgggaggcagcagtagggaatattgcgcaatgggggaaaccctgacgcagcaacgccgcgtggaggatgacacttttcggagcgtaaactccttttctttgggaagaattttgacggtaccaaaggaataagcaccggctaactccgtgccagcagccgcggtaatacggagggtgcaagcgttactcggaatcactgggcgtaaagggcgcgtaggcggattatcaagtctcttgtgaaatctaatggcttaaccattaaactgcttgggaaactgatagtctagagtgagggagaggcagatggaattggtggtgtaggggtaaaatccgtagatatcaccaagaatacccattgcgaaggcgatctgctggaactcaactgacgctaaggcgcgaaagcgtggggagcaaacaggattagataccctggtagtccacgccctaaacgatgtatgctagttgttggggtgctagtcatctcagtaatgcagctaacgcattaagcataccgcctggggagtacggtcgcaagattaaaactcaaaggaatagacggggacccgcacaagcggtggagcatgtggtttaattcgaagctacgcgaagaaccttacctaggcttgatatccaacaaattctgtagagatacggaagtgctagcttgctagaatgttgagacaggtgctgcacggctgtcgtcagctcgtgtcgtgagatgttgggttaagtcccgcaacgagcgcaaccctcgtccttagttgctaacgattcggtcgagcactctaaggagactgccttcgtaaggaggaggaaggtggggacgacgtcaagtcatcatggcccttacgcctagggcgacacacgtgctacaatggcatatacaatgagacgcaataccgcgaggtggagcaaatctataaaatatgtcccagttcggattgttctctgcaactcgagagcatgaagccggaatcgctagtaatcgcaaatcagccatgttgcggtgaatacgttcccgggtcttgtactcaccgcccgtcacaccatgggagttgatttcactcgaagtggaaatactaaactagttatcccccacagtggaatcagcgactggggtg

SEQ ID NO: 1033 - DNA, 1435 bp, Campylobacter volucris
agtgaacgctggcggcgtgcctaatacatgcaagtcgaacgatgaagcaactagcttgctagttgtggattagtggcgcacgggtgagtaaggtatagttaatctgccctacacaagaggacaacagttggaaacgactgctaatactctatactcctatttaacacaagttgaatagggaaagtttttcggtgtaggatgagactatatagtatcagctagttggtgaggtaatggctcaccaaggctatgacgcttaactggtctgagaggatgatcagtcacactggaactgagacacggtccagactcctacgggaggcagcagtagggaatattgcgcaatgggggaaaccctgacgcagcaacgccgcgtggaggatgacacttttcggagcgtaaactccttttcttagggaagaattctgacggtacctaaggaataagcaccggctaactccgtgccagcagccgcggtaatacggagggtgcaagcgttactcggaatcactgggcgtaaagggcgcgtaggcggattatcaagtctcttgtgaaatccaacggcttaaccgttgaactgcttgggaaactggtaatctagagtgggggagaggcagatggaattggtggtgtaggggtaaaatccgtagatatcaccaagaatacccattgcgaaggcgatctgctggaacttaactgacgctaaggcgcgaaagcgtggggagcaaacaggattagataccctggtagtccacgccctaaacgatgtatgctagttgttggggtgctagtcatctcagtaatgcagctaacgcattaagcataccgcctggggagtacggtcgcaagattaaaactcaaaggaatagacggggacccgcacaagcggtggagcatgtggtttaattcgaagatacgcgaagaaccttacctgggcttgatatcctaagaaccttatagagatatgagggtgctagcttgctagaacttagagacaggtgctgcacggctgtcgtcagctcgtgtcgtgagatgttgggttaagtcccgcaacgagcgcaacccacgtatttagttgctaacggtttggccgagcactctaaatagactgccttcgtaaggaggaggaaggtgtggacgacgtcaagtcatcatggcccttatgcccagggcgacacacgtgctacaatggcatatacaatgagacgcaataccgcgaggtggagcaaatctataaaatatgtcccagttcggattgttctctgcaactcgagagcatgaagccggaatcgctagtaatcgtagatcagccatgctacggtgaatacgttcccgggtcttgtactcaccgcccgtcacaccatgggagttgatttcactcgaagccggaatactaaactagttaccgtccacagtggaatcagcgactggggtg

SEQ ID NO: 1034 - DNA, 1393 bp, Thiodictyon
agagtttgatcatggctcagattgaacgctggcggcatgcctaacacatgcaagtcgaacgcgaaagccctttggggtgagtagagtggcggacgggtgagtaatgtgtgggaatctgccttgcagtgggggacaacccggggaaactcgggctaataccgcatacgtcctacgggggaaagggggcctcacggctctcgctgcaagatgagcccacatccgattagctagttggcagggtaaaggcctaccaaggcgacgatcggtagctggtctgagaggatgaccagccacactgggactgagacacggcccagactcctacgggaggcagcagtggggaatattggacaatgggcgcaagcctgatccagcaatgccgcgtgtgtgaagaaggcctgcgggttgtaaagcactttcagtggggaagaacgccttgtggttaatacccatgagggttgacgttacccacagaagaagcaccggctaactccgtgccagcagccgcggtaatacggagggtgcaagcgttaatcggaattactgggcgtaaagcgtacgtaggcggcacgatcagtcagatgtgaaagccccgggctcaacctgggaactgcatttgatactgtcgcgctcgagtctgagagaggggggtggaattccaggtgtagcggtgaaatgcgtagatatctggaggaacaccagtggcgaaggcggccccctggctcaagactgacgctgaggtacgaaagcgtggggagcaaacaggattagataccctggtagtccacgctgtaaacgatgtcgactagccgttgggtccatttaagggcttagtggcgcagctaacgcgataagtcgaccgcctggggagtacggccgcaaggttaaaactcaaaggaattgacgggggcccgcacaagcggtggagcatgtggtttaattcgatgcaacgcgaagaaccttaccagcccttgacatccctggaatcctgccgagaggtgggagtgccttcgggagccaggagacaggtgctgcatggctgtcgtcagctcgtgtcgtgagatgttgggttaagtcccgtaacgagcgcaacccttgcccttagttgccagcacgtcatggtgggaactctaaggggactgccggtgataaaccggaggaaggtggggacgacgtcaagtcatcatggcccttatgggctgggctacacacgtgctacaatggtcggtacagagggtcgcaaacccgcgagggggagccaatctcacaaaaccggtcgtagtccggatcgcagtctgcaactcgactgcgtgaagtcggaatcgctagtaatcgcgaatcagcatgtcgcggtgaatacgttcccgggccttgtacacaccgcccgtcacac

SEQ ID NO: 1035 - DNA, 1455 bp, Candidimonas bauzanensis
attgaacgctagcgggatgctttacacatgcaagtcgaacggcagcgcgggtcttcggacctggcggcgagtggcgaacgggtgagtaatatatcggaacgtgcctggtagcgggggataactacgcgaaagcgtggctaataccgcatacgccctacgggggaaagggggggatcgcaagacctctcactatcagagcggccgatatcagattagctagttggtggggtaaaggcccaccaaggcgacgatctgtagctggtttgagaggacgaccagccacactgggactgagacacggcccagactcctacgggaggcagcagtggggaattttggacaatgggggcaaccctgatccagccatcccgcgtgtgcgatgaaggccttcgggttgtaaagcacttttggcagggaagaaacggcgctgattaatacttggcgcaactgacggtacctgcagaataagcaccggctaactacgtgccagcagccgcggtaatacgtagggtgcaagcgttaatcggaattactgggcgtaaagcgtgcgcaggcggtttggaaagaaagatgtgaaatcccagagcttaactttggaactgcatttttaactgccaagctagagtatgtcagaggggggtagaattccacgtgtagcagtgaaatgcgtagagatgtggaggaataccgatggcgaaggcagccccctgggataatactgacgctcatgcacgaaagcgtggggagcaaacaggattagataccctggtagtccacgccctaaacgatgtcaactagctgttggggccttcgggccttagtagcgcagctaacgcgtgaagttgaccgcctggggagtacggtcgcaagattaaaactcaaaggaattgacggggacccgcacaagcggtggatgatgtggattaattcgatgcaacgcgaaaaaccttacctacccttgacatgtctggaatccttaagagattagggagtgctcgcaagagaaccggaacacaggtgctgcatggctgtcgtcagctcgtgtcgtgagatgttgggttaagtcccgcaacgagcgcaacccttgtcattagttgctacgaaagggcactctaatgagactgccggtgacaaaccggaggaaggtggggatgacgtcaagtcctcatggcccttatgggtagggcttcacacgtcatacaatggtcgggacagagggtcgccaacccgcaagggggagccaatcccagaaacccgatcgtagtccggatcgcagtctgcaactcgactgcgtgaagtcggaatcgctagtaatcgcggatcagaatgtcgcggtgaatacgttcccgggtcttgtacacaccgcccgtcacaccatgggagtgggttttaccagaagtagttagcctaaccgcaaggagggcgattaccacggtaggattcatgactggggtg

SEQ ID NO: 1036 - DNA, 1490 bp, Carboxydocella sporoproducens
gatgaacgctggcggcgtgcctaacacatgcaagtcgagcggagccgtgagggagcttgctcctgagcggcttagcggcggacgggtgagtaacgcgtgagcaacctgcccttcagacagggataacaccgcgaaagtggtgctaatacctggtacactctttgcatcgcatgaagcagggaggaaaggtggcctctggaacaagctaccgctgaaggatgggctcgcgtcccattagctagttggtgaggtaacggctcaccaaggcgacgatgggtagccggcctgagagggtgaccggccacactgggactgagacacggcccagactcctacgggaggcagcagtggggaatcttccgcaatgggcgaaagcctgacggagcaacgccgcgtgggtgaagaaggccttcgggtcgtaaagccctgtcttcagggacgaagtctcacctgtgaagaatgggtgaaggtgacggtacctgaggaggaagccccggctaactacgtgccagcagccgcggtaaaacgtagggggcgagcgttatccggaattactgggcgtaaagcgcgtgtaggcgggctgttaagtcggttgtgaaaatccggggctcaacttcggacatgcagccgatactgacagtcttgagggcaggagagggaagcggaattcccggtgtagcggtgaaatgcgtagatatcgggaggaacaccagtggcgaaggcggctttctggactgtacctgacgctgagacgcgaaagcgtggggagcaaacaggattagataccctggtagtccacgccgtaaacgatgggtactaggtgttggaggtatcgaacccttcagtgccgtagtaaacacaataagtaccccgcctggggagtacggccgcaaggctgaaactcaaaggaattgacgggggcccgcacaagcggtggagcatgtggtttaattcgaagcaacacgaagaaccttaccagggcttgacatatggatgacagctgcagagatgtagcgttcttggcttcggtcaagacatccatacaggtggtgcatggttgtcgtcagctcgtgtcgtgagatgttgggttaagtcccgcaacgagcgcaacccctatgcttagttgccagcacggaaggtgggcactctaggcagactgccggtgacaaaccggaggaaggtggggatgacgtcaaatcatcatgccccttatgtcctgggctacacacgtgctacaatggccggtacagagggcagcgaagccgtgaggcggagcaaatcccaaaaagccggtcccagttcggattgcaggctgcaactcgcctgcatgaagtcggaatcgctagtaatcgcaggtcagcaaactgcggtgaatacgttcccgggccttgtacacaccgcccgtcacaccacgaaagtctgcaacacccgaagccggtgggctaaccgcaaggaggcagccgtcgaaggtggggcagatgattggggtg

SEQ ID NO: 1037 - DNA, 1457 bp, Carboxydocella thermautotrophica
  misc_feature (35)..(35): n is a, c, g, or t
  misc_feature (436)..(436): n is a, c, g, or t
  misc_feature (562)..(562): n is a, c, g, or t
  misc_feature (607)..(608): n is a, c, g, or t
  misc_feature (614)..(614): n is a, c, g, or t
  misc_feature (948)..(948): n is a, c, g, or t
  misc_feature (1144)..(1144): n is a, c, g, or t
  misc_feature (1443)..(1443): n is a, c, g, or t
tggcggcgtgcctaacacatgcaagtcgagcggancgtgagggagcttgctcctaacggcttagcggcggacgggtgagtaacgcgtggacagcctgcccttcagacagggataacaccgcgaaagtggtgctaatacctggtacactctttgcatcgcatgaagcagggaggaaaggtggcctctggaacaagctaccgctgaaggatgggctcgcgtcgcattagctagttggtgaggtaacggctcaccaaggcgacgatgggtagccggcctgagagggtgaccggccacactgggactgagacacggcccagactcctacgggaggcagcagtggggaatcttccgcaatgggcgaaagcctgacggagcaacgccgcgtgggtgaagaaggccttcgggttgtaaagccctgtcttcagggacgaagtcncacctgtgaagaatgggtgaaggtgacggtacctgaggaggaagccccggctaactacgtgccagcagccgcggtaaaacgtagggggcgagcgttatccggaattactgggcgtaaagcgcgtgnaggcgggctgttaagtcgggtgtgaaaatccggggctcaacttcnnacatgnagccgatactgacagtcttgagggcaggagagggaagcggaattcccggtgtagcggtgaaatgcgtagatatcgggaggaacaccagtggcgaaggcggctttctggactgtacctgacgctgagacgcgaaagcgtggggagcaaacaggattagataccctggtagtccacgccgtaaacgatgggtactaggtgttggaggtatcgaacccttcagtgccgtagtaaacacaataagtaccccgcctggggagtacggccgcaagctgaaactcaaaggaattgacgggggcccgcacaagcggtggagcatgtggtttaattcgaagcnacacgaagaaccttaccagggcttgacatatggatgacagctgcagagatgtagcgttcttggcttcggtcaagacatccatacaggtggtgcatggttgtcgtcagctcgtgtcgtgagatgttgggttaagtcccgcaacgagcgcaacccctatgcttagttgccatcacggacaggtggccactctaggcanactgccggtgacaaaccggaggaaggtggggatgacgtcaaatcatcatgccccttatgtcctgggctacacacgtgctacaatggccggtacagagggaagcgaagccgtgaggcgcgagcaaatcccaaaaagccggtcccagttcggattgcaggctgcaactcgcctgcatgaagtcggaatcgctagtaatcgcaggtcagcaaactgcggtgaatacgttcccgggccttgtacacaccgcccgtcacaccacgaaagtctgcaacacccgaagccggtgggctaagccgcanggaggccagccgtc

SEQ ID NO: 1038 - DNA, 1495 bp, Carboxydothermus hydrogenoformans
gacgaacgctggcggcgtgcctaacacatgcaagtcgagcgggggaagcggttgagcttgctcagctgtttccttagcggcggacgggtgagtaacgcgtgggtgacctacctgtaagaccgggataaccctgggaaaccggggctaataccggatacgctatcgggagtagaggcctgataggaaagggtggctgaggctttagcatgctaccgcttacagatgggcccgcgtcctattagctagttggtggggtaatggcctaccaaggcgacgatgggtagccggcctgagagggtgaccggccacactgggactgagacacggcccagactcctacgggaggcagcagtgggggatattccgcaatgggcgaaagcctgacggagcgacgccgcgtgggggaagaaggccttcgggttgtaaacccctgtcttccgggacgaagttcactcattcgaaaagggtgagtggatgacggtaccggaggaggaagccccggctaactacgtgccagcagccgcggtaaaacgtagggggcgagcgttgtccggaattactgggcgtaaagagctcgtaggcggtctggtaagtcaggtgtaaaaggccacggctcaaccgtgggggagcacctgatactgctggacttgagggcaggagaggagagtggaattcccggtgtagcggtgaaatgcgtagatatcgggaggaacaccagtggcgaaggcggctctctggactgaacctgacgctgaggagcgaaagccaggggagcgaaccggattagatacccgggtagtcctggccgtaaacgatgggtgctaggtgtggggcctgagaggttccgtgccggaggtaacccaataagcaccccgcctggggagtacggccgcaaggttgaaactcaaaggaattgacgggggcccgcacaagcagtggagcatgtggtttaattcgacgcaacccgaagaaccttaccagggcttgacatccgcggaacctggtggaaacaccggggtgcctgccgaaaggtaggagccgcgagacaggtgctgcatggttgtcgtcagctcgtgtcgtgagatgttgggttaagtcccgcaacgagcgcaacccctacccttagttgccagcgtaaagacgggcactctaaggggactgccatcgataagatggaggaaggtggggatgacgtcaaatcatcatggcctttatgccctgggctacacacgtgctacaatgggcggtacaaagggaagcgaaggggcgacctggagcaaatcccaaaaagccgctctcagttcggattgcaggctgcaactcgcctgcatgaagtcggaattgctagtaatcgcggatcagcatgccgcggtgaatacgttcccgggccttgtacacaccgcccgtcacaccacgaaagccggtaacacccgaagtcagtggcctaacccggaaagggagggagctgccgaaggtgggaccggtgattggggtg

SEQ ID NO: 1039 - DNA, 1447 bp, Carboxydothermus islandicus
gacgaacgctggcggcgtgcctaacacatgcaagtcgagcggtcttggaggttagcttgctgacctccaggatagcggcggacgggtgagtaacgcgtgggtgacctacctgtaagaccgggataaccctgggaaaccggggctaataccggatacgctatcaggtttagagacctgataggaaaggtggcttaagcggaagctgctaccgcttacagatgggcccgcgtcctattagctagttggtagggtaatggcctaccaaggcgacgatgggtagccggcctgagagggtggacggccacactgggactgagacacggcccagactcctacgggaggcagcagtgggggatattccgcaatgggcgaaagcctgacggagcgacgccgcgtgggggaagaaggccttcgggttgtaaacccctgtcttccgggacgaagttcctctgctcgaatagggtagtgggatgacggtactggaggaggaagccccggctaactacgtgccagcagccgcggtaaaacgtagggggcgagcgttgtccggaattactgggcgtaaagagctcgtaggcggtctggtaagtcaggtgtaaaataccacggctcaaccgtggggtagcacctgatactgctggacttgagggcaggagaggagagtggaattcccggtgtagcggtgaaatgcgtagatatcgggaggaacaccagtggcgaaggcggctctctggactgaacctgacgctgaggagcgaaagccaggggagcgaaccggattagatacccgggtagtcctggccgtaaacgatgggtgctaggtgtggggccggagaggttccgtgccggaggtaacccaataagcaccccgcctggggagtacggccgcaaggttgaaactcaaaggaattgacgggggcccgcacaagcagtggagcatgtggtttaattcgacgcaacccgaagaaccttaccagggcttgacatccgcggaacctggtggaaacaccggggtgcctgccttatggtaggaaccgcgagacaggtgctgcatggttgtcgtcagctcgtgtcgtgagatgttgggttaagtcccgcaacgagcgcaacccctacccttagttgccagcgtaaagacgggcactctaaggggactgccatcgacaagatggaggaaggtggggatgacgtcaaatcatcatggcctttatgccctgggctacacacgtgctacaatgggcggtacaaagggaagcgaaggggcgacctggagcaaatcccaaaaagccgctctcagttcggattgcaggctgcaactcgcctgcatgaaggcggaattgctagtaatcgcggatcagcatgccgcggtgaatacgttcccgggccttgtacacaccgcccgtcacaccacgaaagccggtaacacccgaagtcagtggcctaaccc

SEQ ID NO: 1040 - DNA, 1492 bp, Carboxydothermus pertinax
gacgaacgctggcggcgtgcctaacacatgcaagtcgagcgggggaagtcgtagagcttgctttacgactttccaagcggcggacgggtgagtaacgcgtgggtgacctacctgtaagaccgggataaccctgggaaaccggggctaataccggatacgctattaggggtagagctctaataggaaaggtggctgaggcttagcaagctaccacttacagatgggcccgcgtcctattagctagttggtagggtaacggcctaccaaggcgacgatgggtagccggcctgagagggtggacggccacactgggactgagacacggcccagactcctacgggaggcagcagtgggggatattccgcaatgggcgaaagcctgacggagcgacgccgcgtgggggaagaaggccttcgggttgtaaacccctgtcttctgggacgaagttcccttgcttgaacaaggtaaggggatgacggtaccggaggaggaagccccggctaactacgtgccagcagccgcggtaaaacgtagggggcgagcgttgtccggaattactgggcgtaaagagctcgtaggcggtctggtaagtcaggtgtaaaagggcacggctcaaccgtggaggggcatctgatactgctggacttgagggcaggagaggagagtggaattcccggtgtagcggtgaaatgcgtagatatcgggaggaacaccagtggcgaaggcggctctctggactgaacctgacgctgaggagcgaaagccaggggagcaaaccggattagatacccgggtagtcctggccgtaaacgatgggtgctaggtgtggggccggaaaggttccgtgccggaggaaacccaataagcaccccgcctggggagtacggccgcaaggttgaaactcaaaggaattgacgggggcccgcacaagcagtggagcatgtggtttaattcgacgcaacccgaagaaccttaccagggcttgacatccgcgggacctggtggaaacaccggggtgcctatcaatggataggaaccgcgagacaggtgctgcatggttgtcgtcagctcgtgtcgtgagatgttgggttaagtcccgcaacgagcgcaacccctacccttagttgccagcgtaaagacggggactctaaggggactgccatcgacaagatggaggaaggtggggatgacgtcaaatcatcatggcctttatgccctgggctacacacgtgctacaatgggcggtacagagggaagcgaaggggtgacctggagcaaaacccaaaaagccgctctcagttcggattgcaggctgcaactcgcctgcatgaagacggaattgctagtaatcgcggatcagcaagccgcggtgaatacgttcccgggccttgtacacaccgcccgtcacaccacgaaagccggtaacacccgaagtcagtggcccaacccggaagggagggagctgccgaaggtgggactggtgattggggtg

SEQ ID NO: 1041 - DNA, 1479 bp, Caryophanon tenue
gacgaacgctggcggcgtgcctaatacatgcaagtcgagcgaactgacttgagaagcttgcttctcaatgacgttagcggcggacgggtgagtaacacgtgggtaacctaccctatagactgggataacttcgggaaaccggagctaataccggataattgttttcttcgcatgaagagaattggaaagacggtttcggctgtcactataggatggacccgcggcgcattagctagttggtgaggtaacggctcaccaaggcgacgatgcgtagccgacctgagagggtgatcggccacactgggactgagacacggcccagactcctacgggaggcagcagtagggaatcttccacaatggacgaaagtctgatggagcaacgccgcgtgagtgaagaaggatttcggttcgtaaaactctgttgcaagggaagaacaagtagcgtagtaactggcgctaccttgacggtaccttgttagaaagccacggctaactacgtgccagcagccgcggtaatacgtaggtggcaagcgttgtccggaattattgggcgtaaagcgcgcgcaggtggttctttaagtctgatgtgaaagcccccggctcaaccggggagggtcattggaaactggggaacttgagtgcagaagaggatagtggaattccaagtgtagcggtgaaatgcgtagagatttggaggaacaccagtggcgaaggcgactatctggtctgtaactgacactgaggcgcgaaagcgtggggagcaaacaggattagataccctggtagtccacgccgtaaacgatgagtgctaagtgttggggggtttccgcccctcagtgctgcagctaacgcattaagcactccgcctggggagtacggtcgcaagactgaaactcaaaggaattgacgggggcccgcacaagcggtggagcatgtggtttaattcgaagcaacgcgaagaaccttaccaggtcttgacatcccgttgaccactatggagacatagttttcccttcggggacaacggtgacaggtggtgcatggttgtcgtcagctcgtgtcgtgagatgttgggttaagtcccgcaacgagcgcaacccttgtccttagttgccagcatttagttgggcactctagggagactgccggtgacaaaccggaggaaggtggggatgacgtcaaatcatcatgccccttatgacctgggctacacacgtgctacaatggacggtacaaacggttgccaacccgcgagggggagccaatccgataaagccgttctcagttcggattgtaggctgcaactcgcctacatgaagccggaatcgctagtaatcgcggatcagcatgccgcggtgaatacgttcccgggccttgtacacaccgcccgtcacaccacgagagtttgtaacacccgaagccggtggggtaacctttatggagccagccgtcgaaggtgggatagatgattggggtg

SEQ ID NO: 1042 - DNA, 1379 bp, Catenovulum agarivorans
gtcgagcggtaacagatcgagcttgctatttgctgacgagcggcggacgggtgagtaatgcttggggatctgccttgttgtgggggataaccattggaaacgatggctaataccgcataatacctacgggttaaagggggcttcggctcttgcgacgagatgaacccaagtgagattagctagttggtgaggtaatggctcaccaaggcgacgatctctagctggtttgagaggatgatcagccacactgggactgagacacggcccagactcctacgggaggcagcagtggggaatattgcacaatgggcgcaagcctgatgcagccatgccgcgtgtgtgaagaaggccttcgggttgtaaagcactttcagttgtgaggaaagggtagtagttaatacctgctatctgtgacgttaacaacagaagaagcaccggctaactccgtgccagcagccgcggtaatacggagggtgcaagcgttaatcggaattactgggcgtaaagcgcacgtaggtggatagataagctgggtgtgaaaaaccggggctcaacctcggccgtgcattcagaactgtctgtctagagtaagggagaggggggtagaattccaggtgtagcggtgaaatgcgtagagatctggaggaataccggtggcgaaggcggccccctggcccattactgacactgaggtgcgaaagcgtgggtagcgaacaggattagataccctggtagtccacgccgtaaacgatgtctacttgctgtttgtgcatttaatgcgtgagtagcgaagctaacgcgctaagtagaccgcctggggagtacggccgcaaggttaaaactcaaatgaattgacgggggcccgcacaagcggtggagcatgtggtttaattcgatgcaacgcgaagaaccttaccatcccttgacatccagagaatttagcagagatgctttagtgccttcgggaactctgagacaggtgctgcatggctgtcgtcagctcgtgttgtgaaatgttgggttaagtcccgcaacgagcgcaacccttatccttagttgccagcattaagttggggactctaaggagactgccggtgataaaccggaggaaggtggggacgacgtcaagtcatcatggcccttacgggatgggctacacacgtgctacaatggacagtacagagggcagctaacttgcgagagtacgcgaatcccttaaagctgttcgtagtccggattggagtctgcaactcgactccatgaagtcggaatcgctagtaatcgcagatcagaatgctgcggtgaatacgttcccgggccttgtacacaccgcccgtcacaccatgggagtgggctgcaaaagaagtaggtagcttaac

SEQ ID NO: 1043 - DNA, 1450 bp, Catenovulum maritimum
attgaacgctggcggcaggcctaacacatgcaagtcgagcggtaacatttctagcttgctagaagatgacgagcggcggacgggtgagtaatgcttggggatctgcctcaatgtgggggataaccattggaaacgatggctaataccgcataatacctacgggttaaagggggcttcggctcttgcgttgagatgaacccaagtgagattagctagttggtgaggtaatggctcaccaaggcgacgatctctagctggtttgagaggatgatcagccacactggaactgagacacggtccagactcctacgggaggcagcagtggggaatattgcacaatgggcgaaagcctgatgcagccatgccgcgtgtgtgaagaaggccttcgggttgtaaagcactttcagtcaggaggaaaggttagtagttaatacctgctagctgtgacgttactgacagaagaagcaccggctaactccgtgccagcagccgcggtaatacggagggtgcaagcgttaatcggaattactgggcgtaaagcgagcgtaggcggcttgataagttggatgtgaaaaaccggggctcaacctcggctgtgcattcaaaactgttaggctagagtcttgtagaggggggtagaatttcaggtgtagcggtgaaatgcgtagagatctgaaggaataccagtggcgaaggcggccccctggacaaagactgacgctgaggttcgaaagcgtgggtagcgaacaggattagataccctggtagtccacgccgtaaacgatgtctacttgctgtctgtgttcttgtaacgtgggtagcgcagctaacgcgataagtagaccgcctggggagtacggccgcaaggttaaaactcaaatgaattgacgggggcccgcacaagcggtggagcatgtggtttaattcgatgcaacgcgatgaaccttaccatcccttgacatccagagaatttactagagatagtttagtgccttcgggaactctgagacaggtgctgcatggctgtcgtcagctcgtgttgtgaaatgttgggttaagtcccgcaacgagcgcaacccttatccttagttgccatcattaagttggggactctagggagactgccggtgataaaccggaggaaggtggggacgacgtcaagtcatcatggcccttacgggatgggctacacacgtgctacaatggtaagtacagagggcagctaacttgcgagagtccgcgaatcccttaaagcttatcgtagtccggattggagtctgcaactcgactccatgaagtcggaatcgctagtaatcgcagatcagaatgctgcggtgaatacgttcccgggccttgtacacaccgcccgtcacaccatgggagtgggctgcaaaagaagtaggtagcttaacattgggcgcttaccactttgtggttcatgactggggtg

SEQ ID NO: 1044 - DNA, 1404 bp, Caulobacter flavus
agcgaacgctggcggcaggcctaacacatgcaagtcgaacggatccttcgggattagtggcggacgggtgagtaacacgtgggaacgtgtcctttggttcggaacaactcagggaaacttgagctaataccggatgtgcccttcgggggaaagatttatcgccattggagcggcccgcgtctgattagctagttggtgaggtaaaagctcaccaaggcgacgatcagtagctggtctgagaggatgatcagccacattgggactgagacacggcccaaactcctacgggaggcagcagtggggaatcttgcgcaatgggcgaaagcctgacgcagccatgccgcgtgaatgatgaaggtcttaggattgtaaaattctttcaccggggacgataatgacggtacccggagaagaagccccggctaacttcgtgccagcagccgcggtaatacgaagggggctagcgttgctcggaattactgggcgtaaagggagcgtaggcggactgtttagtcagaggtgaaagcccagggctcaaccttggaattgcctttgatactggcagtcttgagtacggaagaggtatgtggaactccgagtgtagaggtgaaattcgtagatattcggaagaacaccagtggcgaaggcgacatactggtccgttactgacgctgaggctcgaaagcgtggggagcaaacaggattagataccctggtagtccacgctgtaaacgatgagtgctagttgtcggcaggcatgcctgtcggtgacgcagctaacgcattaagcactccgcctggggagtacggtcgcaagattaaaactcaaaggaattgacgggggcccgcacaagcggtggagcatgtggtttaattcgaagcaacgcgcagaaccttaccaccttttgacatgcccggaccaccagagagatctggctttcccttcggggactgggacacaggtgctgcatggctgtcgtcagctcgtgtcgtgagatgttgggttaagtcccgcaacgagcgcaaccctcgctgttagttgccaccattcagttgggcactctaacaggactgccggagttaatccggaggaaggcggggatgacgtcaagtcctcatggcccttacaaggtgggctacacacgtgctacaatggcgactacagagggctgcaatcccgcgagggggagccaacccctaaaagtcgtctcagttcggattgttctctgcaactcgagagcatgaagttggaatcgctagtaatcgcggatcagcatgccgcggtgaatacgttcccgggccttgtacacaccgcccgtcacaccatgggagttggctttacccgaaggcgctgcgctaaccgcaaggaggcaggcgaccacggtagggtcagcgactggggtg

SEQ ID NO: 1045 - DNA, 1406 bp, Caulobacter henricii
agcgaacgctggcggcaggcctaacacatgcaagtcgaacggatccttcgggattagtggcggacgggtgagtaacacgtgggaacgtgccttttggttcggaacaactcagggaaacttgagctaataccggataagcccttcgggggaaagatttatcgccattagagcggcccgcgtaggattagctagttggtggggtaaaggctcaccaaggctacgatccttagctggtctgagaggatgatcagccacattgggactgagacacggcccaaactcctacgggaggcagcagtggggaatcttgcgcaatgggcgaaagcctgacgcagccatgccgcgtgaatgatgaaggtcttaggattgtaaaattctttcaccggggacgataatgacggtacccggagaagaagccccggctaacttcgtgccagcagccgcggtaatacgaagggggctagcgttgctcggaattactgggcgtaaagggagcgtaggcggatagtttagtcagaggtgaaagcccagggctcaaccttggaattgcctttgatactggctatcttgagtacggaagaggtatgtggaactccgagtgtagaggtgaaattcgtagatattcggaagaacaccagtggcgaaggcgacatactggtccgttactgacgctgaggctcgaaagcgtggggagcaaacaggattagataccctggtagtccacgctgtaaacgatgagtgctagttgtcggcatgcatgcatgtcggtgacgcagctaacgcattaagcactccgcctggggagtacggtcgcaagattaaaactcaaaggaattgacgggggcccgcacaagcggtggagcatgtggtttaattcgaagcaacgcgcagaaccttaccaccttttgacatgcccggaccgccacagagatgtggttttcccttcggggactgggacacaggtgctgcatggctgtcgtcagctcgtgtcgtgagatgttgggttaagtcccgcaacgagcgcaaccctcgctattagttgccatcaggtttggctgggcactctaataggaccgccggtggtaagccggaggaaggtggggatgacgtcaagtcctcatggcccttacaaggtgggctacacacgtgctacaatggcgactacagagggctgcaatcccgcgagggggagccaatccctaaaagtcgtctcagttcggattgcactctgcaactcgagtgcatgaagttggaatcgctagtaatcgcggatcagcatgccgcggtgaatacgttcccgggccttgtacacaccgcccgtcacaccatgggagttggctctacccgaaggcgctgcgctaaccgcaagggggcaggcgaccacggtagggtcagcgactggggtg

SEQ ID NO: 1046 - DNA, 1402 bp, Caulobacter mirabilis
agcgaacgctggcggcaggcctaacacatgcaagtcgaacgatccttcgggatagtggcggacgggtgagtaacacgtgggaacgtgccctttggttcggaacaactcagggaaacttgagctaataccgaatgtgcccttcgggggaaagatttatcgccattggagcggcccgcgtctgattagctagttggtgaggtaaaggctcaccaaggctacgatcagtagctggtctgagaggatgatcagccacattgggactgagacacggcccaaactcctacgggaggcagcagtggggaatcttgcgcaatgggcgaaagcctgacgcagccatgccgcgtgaatgatgaaggtcttaggattgtaaaattctttcaccggggacgataatgacggtacccggagaagaagccccggctaacttcgtgccagcagccgcggtaatacgaagggggctagcgttgctcggaattactgggcgtaaagggcgcgtaggcggacagtttagtcagaggtgaaagcccagggctcaaccttggaattgcctttgatactggctgtcttgagtacggaagaggtgtgtggaactccgagtgtagaggtgaaattcgtagatattcggaagaacaccagtggcgaaggcgacacactggtccgttactgacgctgaggcgcgaaagcgtggggagcaaacaggattagataccctggtagtccacgccgtaaacgatgagtgctagttgtcggcatgcatgcatgtcggtgacgcagctaacgcattaagcactccgcctggggagtacggtcgcaagattaaaactcaaaggaattgacgggggcccgcacaagcggtggagcatgtggtttaattcgaagcaacgcgcagaaccttaccaccttttgacatgcctggaccgctgcagagatgcagttttcccttcggggaccaggacacaggtgctgcatggctgtcgtcagctcgtgtcgtgagatgttgggttaagtcccgcaacgagcgcaacccacgccattagttgccatcatttagttgggcactctaatgggaccgccggtggtaagccggaggaaggtgtggatgacgtcaagtcctcatggcccttacagggtgggctacacacgtgctacaatggcgactacagagggctgcaagccagcgatggtgagccaatccctaaaagtcgtctcagttcggattgttctctgcaactcgagagcatgaagttggaatcgctagtaatcgcggatcagcatgccgcggtgaatacgttcccgggccttgtacacaccgcccgtcacaccatgggagttggttctacccgaaggcgatgcgctaaccgcaaggaggcagtcgaccacggtagggtcagcgactggggtg

SEQ ID NO: 1047 - DNA, 1408 bp, Caulobacter rhizosphaerae
agcgaacgctggcggcaggcctaacacatgcaagtcgaacggatccttcgggattagtggcggacgggtgagtaacacgtgggaacgtgccctttggttcggaacaactcagggaaacttgagctaataccggatgtgcccttcgggggaaagatttatcgccattggagcggcccgcgtaggattagctagttggtggggtaaaggcccaccaaggctacgatccttagctggtctgagaggatgatcagccacattgggactgagacacggcccaaactcctacgggaggcagcagtggggaatcttgcgcaatgggcgaaagcctgacgcagccatgccgcgtgaatgatgaaggtcttaggattgtaaaattctttcaccggggacgataatgacggtacccggagaagaagccccggctaacttcgtgccagcagccgcggtaatacgaagggggctagcgttgctcggaattactgggcgtaaagggagcgtaggcggatagtttagtcagaggtgaaagcccagggctcaaccttggaattgcctttgatactggctatcttgagtacggaagaggtatgtggaactccgagtgtagaggtgaaattcgtagatattcggaagaacaccagtggcgaaggcgacatactggtccgttactgacgctgaggctcgaaagcgtggggagcaaacaggattagataccctggtagtccacgctgtaaacgatgagtgctagttgtcggcaggcatgcctgtcggtgacgcagctaacgcattaagcactccgcctggggagtacggtcgcaagattaaaactcaaaggaattgacgggggcccgcacaagcggtggagcatgtggtttaattcgaagcaacgcgcagaaccttaccaccttttgacatgcccggaccgccgcagagatgcggctttcccttcggggactgggacacaggtgctgcatggctgtcgtcagctcgtgtcgtgagatgttgggttaagtcccgcaacgagcgcaaccctcgctattagttgccatcaggtttggctgggcactctaatagtactgccgaagttaattcggaggaaggtggggatgacgtcaagtcctcatggcccttacaaggtgggctacacacgtgctacaatggcgactacagagggctgcaatcccgcgagggggagccaatccctaaaagtcgtctcagttcggattgcactctgcaactcgagtgcatgaagttggaatcgctagtaatcgcggatcagcatgccgcggtgaatacgttcccgggccttgtacacaccgcccgtcacaccatgggagttggctttacccgaaggcgctgcgctaactcgcaagagaggcaggcgaccacggtagggtcagcgactggggtg

SEQ ID NO: 1048 - DNA, 1406 bp, Caulobacter segnis
agcgaacgctggcggcaggcctaacacatgcaagtcgaacggatccttcgggattagtggcggacgggtgagtaacacgtgggaacgtgccctttggttcggaacaactcagggaaacttgagctaataccggatgtgcccttcgggggaaagatttatcgccattggagcggcccgcgtctgattagctagttggtgaggtaaaggctcaccaaggcgacgatcagtagctggtctgagaggatgatcagccacattgggactgagacacggcccaaactcctacgggaggcagcagtggggaatcttgcgcaatgggcgaaagcctgacgcagccatgccgcgtgaatgatgaaggtcttaggattgtaaaattctttcaccggggacgataatgacggtacccggagaagaagccccggctaacttcgtgccagcagccgcggtaatacgaagggggctagcgttgctcggaattactgggcgtaaagggagcgtaggcggactgtttagtcagaggtgaaagcccagggctcaaccttggaattgcctttgatactggcagtcttgagtacggaagaggtatgtggaactccgagtgtagaggtgaaattcgtagatattcggaagaacaccagtggcgaaggcgacatactggtccgttactgacgctgaggctcgaaagcgtggggagcaaacaggattagataccctggtagtccacgccgtaaacgatgagtgctagttgtcggcatgcatgcatgtcggtgacgcagctaacgcattaagcactccgcctggggagtacggtcgcaagattaaaactcaaaggaattgacgggggcccgcacaagcggtggagcatgtggtttaattcgaagcaacgcgcagaaccttaccaccttttgacatgcccggaccgccacagagatgtggctttcccttcggggactgggacacaggtgctgcatggctgtcgtcagctcgtgtcgtgagatgttgggttaagtcccgcaacgagcgcaaccctcgcgattagttgccatcaggtttggctgggcactctaatcgtactgccggagttaatccggaggaaggcggggatgacgtcaagtcctcatggcccttacaaggtgggctacacacgtgctacaatggcgactacagagggctgcaatcccgcgagggggagccaatccctaaaagtcgtctcagttcggattgttctctgcaactcgagagcatgaagttggaatcgctagtaatcgcggatcagcatgccgcggtgaatacgttcccgggccttgtacacaccgcccgtcacaccatgggagttggctttacccgaaggcgctgcgctaaccgcaagggggcaggcgaccacggtagggtcagcgactggggtg

SEQ ID NO: 1049 - DNA, 1406 bp, Caulobacter vibrioides
agcgaacgctggcggcaggcctaacacatgcaagtcgaacggatccttcgggattagtggcggacgggtgagtaacacgtgggaacgtgccctttggttcggaacaactcagggaaacttgagctaataccggatgtgcccttcgggggaaagatttatcgccattggagcggcccgcgtctgattagctagttggtgaggtaaaggctcaccaaggcgacgatcagtagctggtctgagaggatgatcagccacattgggactgagacacggcccaaactcctacgggaggcagcagtggggaatcttgcgcaatgggcgaaagcctgacgcagccatgccgcgtgaatgatgaaggtcttaggattgtaaaattctttcaccggggacgataatgacggtacccggagaagaagccccggctaacttcgtgccagcagccgcggtaatacgaagggggctagcgttgctcggaattactgggcgtaaagggagcgtaggcggactgtttagtcagaggtgaaagcccagggctcaaccttggaattgcctttgatactggcagtcttgagtacggaagaggtatgtggaactccgagtgtagaggtgaaattcgtagatattcggaagaacaccagtggcgaaggcgacatactggtccgttactgacgctgaggctcgaaagcgtggggagcaaacaggattagataccctggtagtccacgccgtaaacgatgagtgctagttgtcggcatgcatgcatgtcggtgacgcagctaacgcattaagcactccgcctggggagtacggtcgcaagattaaaactcaaaggaattgacgggggcccgcacaagcggtggagcatgtggtttaattcgaagcaacgcgcagaaccttaccaccttttgacatgcctggaccgccacagagatgtggttttcccttcggggactgggacacaggtgctgcatggctgtcgtcagctcgtgtcgtgagatgttgggttaagtcccgcaacgagcgcaaccctcgtgattagttgccatcaggtttggctgggcactctaatcatactgccggagttaatccggaggaaggcggggatgacgtcaagtcctcatggcccttacaaggtgggctacacacgtgctacaatggcgactacagagggctgcaatcccgcgagggggagccaatccctaaaagtcgtctcagttcggattgttctctgcaactcgagagcatgaagttggaatcgctagtaatcgcggatcagcatgccgcggtgaatacgttcccgggccttgtacacaccgcccgtcacaccatgggagttggctttacccgaaggcgctgcgctaaccgcaagggggcaggcgaccacggtagggtcagcgactggggtg

SEQ ID NO: 1050 - DNA, 1464 bp, Cedecea davisae
attgaacgctggcggcaggcctaacacatgcaagtcgagcggtaacagggagtagcttgctactccgctgacgagcggcggacgggtgagtaatgtctggggatctgcctgatggagggggataactactggaaacggtagctaataccgcataacgtcgcaagaccaaagagggggaccttcgggcctcttgccatcggatgaacccagatgggattagctagtaggtggggtaatggctcacctaggcgacgatccctagctggtctgagaggatgaccagccacactggaactgagacacggtccagactcctacgggaggcagcagtggggaatattgcacaatgggcgcaagcctgatgcagccatgccgcgtgtgtgaagaaggccttcgggttgtaaagcactttcagcgaggaggaaggcattaaggttaataaccttggtgattgacgttactcgcagaagaagcaccggctaactccgtgccagcagccgcggtaatacggagggtgcaagcgttaatcggaattactgggcgtaaagcgcacgcaggcggtttgttaagtcggatgtgaaatccccgggctcaacctgggaactgcattcgaaactggcaagcttgagtcttgtagaggggggtagaattccaggtgtagcggtgaaatgcgtagagatctggaggaataccggtggcgaaggcggccccctggacaaagactgacgctcaggtgcgaaagcgtggggagcaaacaggattagataccctggtagtccacgccgtaaacgatgtcgacttggaggttgtgcccttgaggcgtggcttccggagctaacgcgttaagtcgaccgcctggggagtacggccgcaaggttaaaactcaaatgaattgacgggggcccgcacaagcggtggagcatgtggtttaattcgatgcaacgcgaagaaccttacctactcttgacatccagagaactttccagagatggattggtgccttcgggaactctgagacaggtgctgcatggctgtcgtcagctcgtgttgtgaaatgttgggttaagtcccgcaacgagcgcaacccttatcctttgttgccagcggttcggccgggaactcaaaggagactgccagtgataaactggaggaaggtggggatgacgtcaagtcatcatggcccttacgagtagggctacacacgtgctacaatggcgcatacaaagagaagcgacctcgcgagagcaagcggacctcataaagtgcgtcgtagtccggattggagtctgcaactcgactccatgaagtcggaatcgctagtaatcgtagatcagaatgctacggtgaatacgttcccgggccttgtacacaccgcccgtcacaccatgggagtgggttgcaaaagaagtaggtagcttaaccttcgggagggcgcttaccactttgtgattcatgactggggtg

SEQ ID NO: 1051 - DNA, 1468 bp, Celerinatantimonas diazotrophica
  misc_feature (239)..(239): n is a, c, g, or t
attgaacgctggcggcaggcctaacacatgcaagtcgagcggtaacagagagaagcttgcttctctgctgacgagcggcggacgggtgagtaatgcttggggagctgcctgatagcgggggacaaccactggaaacggtggctaataccgcataatgtctacggaccaaagcaggggatctttcgggaccttgcgctatcagatgcacccaagtgagattagttagttggtggggtaanggcctaccaaggcgacgatctctagctggtttgagaggatgatcagccacactgggactgagacacggcccagactcctacgggaggcagcagtggggaatattgcacaatgggggaaaccctgatgcagccatgccgcgtgtgtgaagaaggccttcgggttgtaaagcactttcagttgtgaggaaagggtaatcgctaataccggttatctgtgacgttagcaacagaagaagcaccggctaactccgtgccagcagccgcggtaatacggagggtgcgagcgttaatcggaattactgggcgtaaagcgtacgcaggcggctgactaagtcagatgtgaaagccccgggcttaacctgggaactgcatttgaaactggttagctagagtcttgtagagggaggtagaatttccggtgtagcggtgaaatgcgtagagatcggaaggaataccagtggcgaaggcggcctcctggacaaagactgacgctcaggtacgaaagcgtggggagcaaacaggattagataccctggtagtccacgctgtaaacgatgtctactcgttgtctgtggttttaaaccgtgggtaacgcagcaaacgcactaagtagaccgcctggggagtacggccgcaaggttaaaactcaaatgaattgacgggggcccgcacaagcggtggagcatgtggtttaattcgatgcaacgcgaagaaccttacctgcccttgacatacagcgaacttaccagagatggtttggtgccttcgggaacgctgatacaggtgctgcatggctgtcgtcagctcgtgtcgtgagatgttgggttaagtcccgcaacgagcgcaacccctatccttagttgccagcgattcggtcgggaactctagggagactgccggtgataaaccggaggaaggtggggacgacgtcaagtcatcatggccctgacgggcagggctacacacgtgctacaatggcggatacaaagggaagcgaacctgcgagggtaagcggaacccagaaagtctgtcgtagtccggattggagtctgcaactcgactccatgaagtcggaatcgctagtaatcgtgaatcagaatgtcacggtgaatacgttcccgggccttgtacacaccgcccgtcacaccatgggagtgggctgcaccagaagtagatagcttaacccttcggggagggcgtttaccacggtgtggttcatgactggggtg

SEQ ID NO: 1052 - DNA, 1456 bp, Cellvibrio japonicus
attgaacgctggcggcaggcctaacacatgcaagtcgagcgcgaaagttcttcggaatgagtaaagcggcgaacgggtgagtaacgcgtgggaatctgcccagtagtgggggacaacgttccgaaagggacgctaataccgcatacgccctacgggggaaagcaggggatcttcggaccttgcgctattggatgagcccgcgtcagattagctagttggtagggtaaaggcctaccaaggcgacgatctgtaactggtctgagaggatgatcagtcacactggaactgagacacggtccagactcctacgggaggcagcagtggggaatattggacaatgggcgaaagcctgatccagccatgccgcgtgtgtgaagaaggccttcgggttgtaaagcactttcagtggggaggaaggctgtttagttaatacctgagcagattgacgctacccacagaagaagcaccggctaactccgtgccagcagccgcggtaatacggagggtgcaagcgttaatcggaattactgggcgtaaagcgcacgtaggcggttcgttaagctagctgtgaaatccccgggctcaacctgggaattgcagttagaactggcgagctagagtatggtagaggggtgtggaattccaggtgtagcggtgaaatgcgtagatatctggaggaacatcagtggcgaaggcgacaccctggaccaatactgacgctgaggtgcgaaagcgtggggagcaaacaggattagataccctggtagtccacgccgtaaacgatgtctactagccgttggggtccttgagactttagtggcgcagctaacgcactaagtagaccgcctggggagtacggtcgcaagattaaaactcaaatgaattgacgggggcccgcacaagcggtggagcatgtggtttaattcgacgcaacgcgaagaaccttaccaggtcttgacatccagtgaactttccagagatggattggtgccttcgggaacactgagacaggtgctgcatggctgtcgtcagctcgtgtcgtgagatgttgggttaagtcccgtaacgagcgcaacccttgtccttagttgccagcgcgtaatggcgggaactctaaggagactgccggtgacaaaccggaggaaggtggggatgacgtcaagtcatcatggcccttacgacctgggctacacacgtgctacaatgggcagtacaaagggtcgccaagccgcgaggtggagctaatcccataaaactgttcgtagtccggattggagtctgcaactcgactccatgaagtcggaatcgctagtaatcgcaaatcagaacgttgcggtgaatacgttcccgggccttgtacacaccgcccgtcacaccatgggagtgggttgcaaaagaagtagctagtctaaccttcggggggacggttaccactttgtgattcatgactggggtg

SEQ ID NO: 1053 - DNA, 1455 bp, Cellvibrio mixtus
attgaacgctggcggcaggcctaacacatgcaagtcgagcgcgaaagttcttcggaatgagtaaagcggcgaacgggtgagtaatgcatgggaatctgcctggtagtgggggacaacgtctcgaaagggacgctaataccgcatacgccctacgggggaaagggggggatcttcggacctctcgctatcagatgagcccatgtcagattagctagttggtggagtaaaggctcaccaaggcgacgatctgtaactggtctgagaggatgatcagtcacactggaactgagacacggtccagactcctacgggaggcagcagtggggaatattggacaatgggcgcaagcctgatccagccatgccgcgtgtgtgaagaagccctagggttgtaaagcactttcagtggggagaaaagtgattcacctaatacgtgagttaattgatgttacccacagaagaagcaccggctaactccgtgccagcagccgcggtaatacggagggtgcaagcgttaatcggaattactgggcgtaaagcgcacgtaggtggtttgttaagctagctgtgaaatccccgggctcaacctgggcactgcagttagaactggcaagctagagtagggtagaggggtgtggaattccaggtgtagcggtgaaatgcgtagatatctggaggaacatcagtggcgaaggcgacaccctggactcatactgacactgaggtgcgaaagcgtggggagcaaacaggattagataccctggtagtccacgccgtaaacgatgtctactagccgttgggagccttgagctcttagtggcgcagctaacgcactaagtagaccgcctggggagtacggtcgcaagattaaaactcaaatgaattgacgggggcccgcacaagcggtggagcatgtggtttaattcgacgcaacgcgaagaaccttaccaggtcttgacatccagagaactttccagagatggattggtgccttcgggagctctgagacaggtgctgcatggctgtcgtcagctcgtgtcgtgagatgttgggttaagtcccgtaacgagcgcaacccttgtccttagttgccagcgcgtaatggcgggaactctaaggagactgccggtgacaaaccggaggaaggtggggatgacgtcaagtcatcatggcccttacgacctgggctacacacgtgctacaatgggcggtacaaagggttgccaaaccgcgaggtggagctaatcccataaaaccgttcgtagtccggattggagtctgcaactcgactccatgaagtcggaatcgctagtaatcgcaaatcagaacgttgcggtgaatacgttcccgggccttgtacacaccgcccgtcacaccatgggagtgggttgcaaaagaagtagctagtctaaccgcaagggggacggttaccactttgtgattcatgactggggtg

SEQ ID NO: 1054 - DNA, 1461 bp, Centipeda periodontii
  misc_feature (40)..(40): n is a, c, g, or t
  misc_feature (44)..(45): n is a, c, g, or t
  misc_feature (51)..(52): n is a, c, g, or t
  misc_feature (67)..(67): n is a, c, g, or t
  misc_feature (162)..(162): n is a, c, g, or t
  misc_feature (169)..(169): n is a, c, g, or t
  misc_feature (428)..(428): n is a, c, g, or t
  misc_feature (447)..(447): n is a, c, g, or t
  misc_feature (449)..(449): n is a, c, g, or t
  misc_feature (1008)..(1008): n is a, c, g, or t
acgctggcggcgtgcttaacacatgcaagtcgaacgggangatnnagaacnntgcttttagagaatntagtggcaaacgggtgagtaacacgtagacaacctgccgacaggatggggacaacattccgaaaggaatgctaataccgaatgaagtcagagagnggcatcnctctctgatgaaagatggcctctgaatatgctatcacctgtcgatgggtctgcgtctgattagctggttggtgaggtaacggctcaccaaggcgacgatcagtagccggtctgagaggatgaacggccacattgggactgagacacggcccagactcctacgggaggcagcagtggggaatcttccgcaatgggcgcaagcctgacggagcaacgccgcgtgagtgaagaaggtcttcggatcgtaaagctctgttganggggacgaacgtgcgaagngngaataatcctttgtaatgacggtacctgtcgaggaagccacggctaactacgtgccagcagccgcggtaatacgtaggtggcgagcgttgtccggaatcattgggcgtaaagggagcgcaggcgggcatgtaagtctttcttaaaagtgcggggctcaaccccgtgatgggaaagaaactacatgtcttgagtacaggagaggaaagcggaattcccagtgtagcggtgaaatgcgtagatattgggaggaacaccagtggcgaaggcggctttctggactgcaactgacgctgaggctcgaaagccaggggagcgaacgggattagataccccggtagtcctggccgtaaacgatggatactaggtgtgggaggtatcgacccctaccgtgccggagttaacgcaataagtatcccgcctggggagtacggtcgcaagactgaaactcaaaggaattgacggggacccgcacaagcggtggagtatgtggtttaattcgaagcaacgcgaagaaccttaccaggccttgacattgactgaagttactagagatagtantgtttcttcggaaacaggaaaacaggtggtgcatggctgtcgtcagctcgtgtcgtgagatgttgggttaagtcccgcaacgagcgcaacccctgttctttgttgccatcaggtagagctgggcactcaaaggagactgccgcggagaacgcggaggaaggcggggatgacgtcaagtcatcatgccccttatggtctgggctacacacgtactacaatgggacggacagagagcagcgaacccgcgagggcaagcgaacctcaaaaaccgtttctcagttcggattgcaggctgcaactcgcctgcatgaagtcggaatcgctagtaatcgcaggtcagcatactgcggtgaatacgttcccgggtcttgtacacaccgcccgtcacaccacggaagtcgttcacacccgaagccggctaagccgtctaaggtggggaaggtgactggggtg

SEQ ID NO: 1055 - DNA, 1442 bp, Cesiribacter andamanensis
gatgaacgctagcggcaggcctaatacatgcaagtcgaacggcaagactctttcgggagtcctagagtggcgcacgggtgcgtaacgcgtatgcaacctaccttttactgggggatagcccggggaaacccggattaatacctcatagtatcctagaatggcatcatgaaaggattaaagatttatcggtaaaagatgggcatgcgtctgattagctagttggtggtgtaacggactaccaaggcgatgatcagtagggggtctgagaggatgatcccccacactggcactgagatacgggccagactcctacgggaggcagcagtagggaatattgggcaatgggcgagagcctgacccagccatgccgcgtgaaggatgaaggcgttctgcgttgtaaacttcttttatcggggaagaaaaagctcttgcgagagcaactgacggtacccgatgaataagcaccggctaactccgtgccagcagccgcggtaatacggagggtgcaagcgttgtccggatttattgggtttaaagggtgcgtaggcggactggtaagtcagtggtgaaagacggcagctcaactgtcgaggtgccattgatactgtcagtcttgagtatcgttgaggtaggcggaatggaaggtgtagcggtgaaatgcatagatatcttccagaacaccgatagcgtaggcagcttactaagcgataactgacgctgaggcacgaaagcgtggggagcgaacaggattagataccctggtagtccacgccgtaaacgatgtacactcgctgttggcgacattactgtcagcggccaagcgaaagcgttaagtgtaccacctggggagtacgccggcaacggtgaaactcaaaggaattgacgggggtccgcacaagcggtggagcatgtggtttaattcgatgatacgcgaggaaccttacctgggctagaatgcccttgaccggtctggaaacagactttcccttcggggcaaggtgcaaggtgctgcatggctgtcgtcagctcgtgccgtgaggtgttgggttaagtcccgcaacgagcgcaacccctattcttagttgccagcatgtaatgatggggactctaagaagactgcctgcgcaagcagagaggaaggaggggacgacgtcaagtcatcatggcccttacgcccagggctacacacgtgctacaatggcgcatacaaagggtagctactgagtgatcagatgccaatctcaaaaagtgcgtctcagttcggattgtagtctgcaactcgactacatgaaggtggaatcgctagtaatcgcgcatcagcaatggcgcggtgaatacgttcccggaccttgtacacaccgcccgtcaagccatggaagccggggggacctgaagatggtggccgcaaggcgctatttagggttaaactggtaactggggct

SEQ ID NO: 1056 - DNA, 1426 bp, Cetia pacifica
agtgaacgctggcggcgtgcttaacacatgcaagtcgaggggcagcaggtcggaacttcggttccgatgctggcgaccggcggacgggtgagtaacacgtagctacttgccccacagagggggataacccggggaaacccgggctaataccccatacacccgagaggggaaagcttttgcgctgtgggatagggctgcggcgtatcaggtagttggtggggtaacggcctaccaagccgatgacgcgtagctggtctgagaggatgatcagccacactggaactgagacacggtccagactcctacgggaggcagcagtggggaatcttgggcaatgggcgaaagcctgacccagcaacgccgcgtggaggaagacgcccttcggggtgtaaactccttttctgagggaagagagtgacggtacctcaggaataagctccggctaactccgtgccagcagccgcggtaatacggggggagcgagcgttactcggaatcactgggcgtaaagggtgcgtaggcggcttagtaagttgggagtgaaatcccacggctcaaccgtggaactgcttccaaaactgctaagctagagtccgggagaggctgcgggaattcctggtgtaggggtgaaatccgtagagatcaggaggaatgccgaaagcgaaggcgcgcagctggaacggtactgacgctgaggcacgaaagcgtggggagcaaacaggattagataccctggtagtccacgccctaaacgatggctactagtggttggggggatagtccctcagtcacgcagctaacgcgataagtagcccgcctggggagtacggccgcaaggctaaaactcaaaggaatagacggggacccgaacaagcggtggagcatgtggtttaattcgaagatacgcgaagaaccttacctgggcttgacatccggggaaccctccagagatggaggggtgcctacttcggtaggagccccgagacaggtgctgcatggctgtcgtcagctcgtgtcgtgagatgttgggttaagtcccgcaacgagcgcaacccctgcccttagttggcagcagttcggctggccactctaaggggactgcccgggcaaccgggaggaaggtggggatgacgtcaagtcatcatggcccttatgtccagggcgacacacgtgctacaatggccaggacagagagaggcaaagccgcgaggtggagcaaatctctaaacctggtcccagttcggattgcagtctgcaactcgactgcatgaaggcggaatcgctagtaatcgcggatcagccatgccgcggtgaatacgttcccgggtcttgtactcaccgcccgtcacaccatgggagtcgggctcacccgaagtcggtatccctaagataggggccgccgacggtgggtccggcgactggggtg

SEQ ID NO: 1057 - DNA, 1409 bp, Chamaesiphon minutus
gatgaacgctggcggtatgcctaacacatgcaagtcgaacggtgtcttcggacatagtggcggacgggtgagtaacgcgtgagaatctgccttcaggacggggacaacagttggaaacgactgctaatacccgatgtgacgaaagttgaaagatttatcgcctgaagatgagctcgcgtcagattagctagatggtgtggtaaaggcgcaccatggcgacgatctgtagctggtctgagaggatgagcagccacactgggactgagacacggcccagactcctacgggaggcagcagtggggaattttccgcaatgggcgcaagcctgacggagcaataccgcgtgagggaggaaggctcttgggtcgtaaacctcttttcttagggaagaacaaaatgacggtacctaaggaatcagcatcggctaactccgtgccagcagccgcggtaatacggaggatgcaagcgttatccggaatgattgggcgtaaagcgtccgtaggtggttttgtaagtccgtggttaaagcgcgaagcttaacttcgtaagggccatggaaactacaagacttgagtaaagtaggggtagagggaattcccagtgtagcggtgaaatgcgtagagattgggaagaacaccggtggcgaaagcgctctactggacttaaactgacactgagggacgaaagctaggggagcgaaagggattagatacccctgtagtcctagccgtaaacgatggatactaggtgttgcccgtatcgacccgggcagtgccgtagctaacgcgttaagtatcccgcctggggagtacgcacgcaagtgtgaaactcaaaggaattgacgggggcccgcacaagcggtggagtatgtggtttaattcgatgcaacgcgaagaaccttaccagggcttgacatgtctggaatttctgcgaaagtagaaagtgccttcgggaaccagaacacaggtggtgcatggctgtcgtcagctcgtgtcgtgagatgttgggttaagtcccgcaacgagcgcaaccctcgtttttagttgccatcattaagttgggcactctagaaagactgccggtgacaaaccggaggaaggtggggatgacgtcaagtcagcatgccccttacgccctgggctacacacgtactacaatgctatggacaaagagcagccaactggcgacagtgcgctaatctcataaaccatggctcagttcagattgcaggctgcaactcgcctgcatgaaggcggaatcgctagtaatcgcaggtcagcatactgcggtgaatccgttcccgggccttgtacacaccgcccgtcacaccatgggagttggtcacgcccgaagtcgttactctaaccgcaaggaagaggacgccgaaggtagggctgatgactggggtg

SEQ ID NO: 1058 - DNA, 1464 bp, Chania multitudinisentens
attgaacgctggcggcaggcctaacacatgcaagtcgagcggcagcgggaagtagcttgctactttgccggcgagcggcggacgggtgagtaatgtctgggaaactgcccgatggagggggataactactggaaacggtagctaataccgcatgacgtctacggaccaaagtgggggaccttcgggcctcacgccatcggatgtgcccagatgggattagctagtaggtggggtaatggctcacctaggcgacgatccctagctggtctgagaggatgaccagccacactgggactgagacacggcccagactcctacgggaggcagcagtggggaatattgcacaatgggcgcaagcctgatgcagccatgccgcgtgtgtgaagaaggccttagggttgtaaagcactttcagtggggaggaagggtacagtgtgaatagcgctgtgcattgacgttacccacagaagaagcaccggctaactccgtgccagcagccgcggtaatacggagggtgcaagcgttaatcggaattactgggcgtaaagcgcacgcaggcggtctgtgaagtcggatgtgaaatccccgggcttaacctgggaactgcatccgaaactggcaggctagagtcttgtagaggggggtagaattccaggtgtagcggtgaaatgcgtagagatctggaggaataccggtggcgaaggcggccccctggacagagactgacgctcaggtgcgaaagcgtggggagcaaacaggattagataccctggtagtccacgctgtaaacgatgtcgacttggaggttgtgcccttgaggcgtggcttccggagctaacgcgttaagtcgaccgcctggggagtacggccgcaaggttaaaactcaaatgaattgacgggggcccgcacaagcggtggagcatgtggtttaattcgatgcaacgcgaagaaccttacctactcttgacatccacggaacttgccagagatggcttggtgccttcgggaaccgtgagacaggtgctgcatggctgtcgtcagctcgtgttgtgaaatgttgggttaagtcccgcaacgagcgcaacccttatcctttgttgccagcggttaggccgggaactcaaaggagactgccagtgataaactggaggaaggtggggatgacgtcaagtcatcatggcccttacgagtagggctacacacgtgctacaatggcgtatacaaagagaagctaccctgcgaaggcatgcggacctcataaagtacgtcgtagtccggattggagtctgcaactcgactccatgaagtcggaatcgctagtaatcgtagatcagaatgctacggtgaatacgttcccgggccttgtacacaccgcccgtcacaccatgggagtgggttgcaaaagaagtaggtagcttaaccttcgggagggcgcttaccactttgtgattcatgactggggtg

SEQ ID NO: 1059 - DNA, 1409 bp, Chelatococcus sambhunathii
agcgaacgctggcggcaggcctaacacatgcaagtcgaacggttccttcggggacagtggcagacgggtgagtaacgcgtgggaacgtgccctttggttcggaataactcagggaaacttgagctaataccggatacgtccgagaggagaaagatttatcgccgaaggatcggcccgcgtctgattagctagttggtggggtaacggcctaccaaggcgacgatcagtagctggtctgagaggatgatcagccacactgggactgagacacggcccagactcctacgggaggcagcagtggggaatattggacaatgggcgcaagcctgatccagccatgccgcgtgagtgatgaaggccctagggttgtaaagctcttttatccgggacgataatgacggtaccggaagaataagccccggctaacttcgtgccagcagccgcggtaatacgaagggggctagcgttgctcggaatcactgggcgtaaagggcgcgtaggcggacgtttaagtcaggggtgaaatcccggggctcaacctcggaattgcctttgatactggatgtctcgagaccggaagaggtaagtggaactgcgagtgtagaggtgaaattcgtagatattcgcaagaacaccagtggcgaaggcggcttactggtccggatctgacgctgaggcgcgaaagcgtggggagcaaacaggattagataccctggtagtccacgccgtaaacgatggatgctagccgttgggcagcttgctgctcagtggcgcagctaacgctttaagcatcccgcctggggagtacggtcgcaagattaaaactcaaaggaattgacgggggcccgcacaagcggtggagcatgtggtttaattcgaagcaacgcgcagaaccttaccagcccttgacatgtctcgtttggataccggagacggtttccttcagttcggctggcgagaacacaggtgctgcatggctgtcgtcagctcgtgtcgtgagatgttgggttaagtcccgcaacgagcgcaaccctcgcccctagttgccatcattcagttgggcactttagggggactgccggtgataagccgagaggaaggtggggatgacgtcaagtcctcatggcccttacgggctgggctacacacgtgctacaatggcggtgacaatgggcagcgaaagggcgacctggagctaatccccaaaagccgtctcagttcagattgcactctgcaactcgagtgcatgaaggcggaatcgctagtaatcgcagatcagcatgctgcggtgaatacgttcccgggccttgtacacaccgcccgtcacaccatgggagttggttctacccgaaggcgctgcgccaaccgcaagggggcaggcgaccacggtagggtcagcgactggggtg

SEQ ID NO: 1060 - DNA, 1462 bp, Chelonobacter oris
attgaacgctggcggcaggcttaacacatgcaagtcgagcggtagcgggggagagcttgctctcctgccgacgagcggcggacgggtgagtaatgcttggggatctgccttgtggcgggggataacgacgggaaactgtcgctaataccgcgtaatgtctaaggactaaagtgcgggaccgaaaggccgcacgccacgagatgaacccaagtgagattaggtagttggtagggtaagggcttaccaagccgtcgatctctaactggtctgagaggatgaccagtcacactgggactgagacacggcccagactcctacgggaggcagcagtggggaatattgcgcaatgggggcaaccctgacgcagccatgccgcgtgaatgaagaaggccttcgggttgtaaagttctttcggtgatgaggaaggcagagattttaatagggtttttgtttgacgttagtcacagaagaagcaccggctaactccgtgccagcagccgcggtaatacggagggtgcgagcgttaatcggaataactgggcgtaaagggcacgcaggcggatagataagtgagatgtgaaatccccgggcttaacccgggaactgcatttcatactgtttatctagagtattgtagagaggggtagaattccacgtgtagcggtgaaatgcgtagagatgtggaggaataccggaggcgaaggcggccccttggacaaatactgacgctcatgtgcgaaagcgtggggagcaaacaggattagataccctggtagtccacgctgtaaacgatgtcgatttgggggttgggcgaatgcctggctctcgcagctaacgcgttaaatcgaccgcctggggagtacggccgcaaggttaaaactcaaatgaattgacgggggcccgcacaagcggtggagcatgtggtttaattcgatgcaacgcgaagaaccttacctactcttgacatccagagaatcctttagagatagaggagtgccttcgggagctctgagacaggtgctgcatggctgtcgtcagctcgtgttgtgaaatgttgggttaagtcccgcaacgagcgcaacccttatcctttgttgccagcgcgtaatggcgggaactcaaaggagactgccggtgacaaaccggaggaaggtggggatgacgtcaagtcatcatggcccttacgagtagggctacacacgtgctacaatggcgtatacagagggaagcgaggcagcgatgttgagcgaatctcttaaagtgcgtcgtagtccggattggagtctgcaactcgactccatgaagtcggaatcgctagtaatcgcaaatcagaatgttgcggtgaatacgttcccgggccttgtacacaccgcccgtcacaccatgggagtgggttgtaccagaagtagatagcctaaccttcgggggggcgtttaccacggtatgattcatgactggggtg

SEQ ID NO: 1061 - DNA, 1456 bp, Chitinimonas taiwanensis
attgaacgctggcggcatgctttacacatgcaagtcgaacgggcttaggggcttgctcctaagttagtggcgaacgggtgagtaatgcatcggaacgtaccgtgtagtgggggataacccggcgaaagtcggattaataccgcatacgatctaaggatgaaagcaggggatcgcaagaccttgcgctatacgagcggccgatgtcggattagctagttggtagggtaaaggcctaccaaggcaacgatccgtaacgggtctgagaggatgatccgccacactgggactgagacacggcccagactcctacgggaggcagcagtggggaattttggacaatgggcgaaagcctgatccagccatgccgcgtgagtgaagaaggccttcgggttgtaaagctcttttgtccgggagcaaatcctgttcactaatactgagcggggctgagagtaccggaagaataagcaccggctaactacgtgccagcagccgcggtaatacgtagggtgcgagcgttaatcggaattactgggcgtaaagggtgcgcaggtggttacgtaagtctgatgtgaaagccccgggctcaacctgggaactgcattggagactgcctggctagagtgtggcagaggggggtggaattccgcgtgtagcagtgaaatgcgtagagatgcggaggaacaccaatggcgaaggcagccccctgggttaacactgacactcatgcacgaaagcgtggggagcaaacaggattagataccctggtagtccacgccctaaacgatgtctactagttgttggggtagcaataccttagtaacgcagctaacgcgtgaagtagaccgcctggggagtacggtcgcaagattaaaactcaaaggaattgacgggggcccgcacaagcggtggatgatgtggattaattcgatgcaacgcgaaaaaccttacctacccttgacatgtcaggaatccagcagagacgttggagtgctcgaaagagaacctgaacacaggtgctgcatggctgtcgtcagctcgtgtcgtgagatgttgggttaagtcccgcaacgagcgcaacccttgtccttagttgctaccatttagttgagcactttaaggagactgccggtgacaaaccggaggaaggtggggatgacgtcaagtcctcatggcccttatgggtagggcttcacacgtcatacaatggtcggtacagagggttgccaagccgcgaggtggagctaatctcagaaagccgatcgtagtccggattgcactctgcaactcgagtgcatgaagtcggaatcgctagtaatcgcggatcagcatgtcgcggtgaatacgttcccgggccttgtacacaccgcccgtcacaccatgggagtgggttctaccagaagtagctaggctaaccgcaagggggccggttaccacggtagggttcatgactggggtg

SEQ ID NO: 1062 - DNA, 1456 bp, Chitiniphilus shinanonensis
attgaacgctggcggcatgctttacacatgcaagtcgaacggtaacgcgggcttcggcctggcgacgagtggcgaacgggtgagtaatgcatcggaacgtgccgagtagtgggggatagcccggcgaaagccggattaataccgcatacgatctaaggatgaaagtgggggaccttcgggcctcacgctattcgagcggccgatgtcggattagctagttggtgaggtaaaggctcaccaaggcgacgatccgtagcgggtctgagaggacgacccgccacactgggactgagacacggcccagactcctacgggaggcagcagtggggaatcttggacaatgggcgcaagcctgatccagcaatgccgcgtgggtgaagaaggccttcgggttgtaaagcccttttgtcagggagcaaatccttggtgtgaatagcgcctggggatgagagtacctgaagaataaggaccggctaactacgtgccagcagccgcggtaatacgtagggtccaagcgttaatcggaattactgggcgtaaagcgtgcgcaggtggcttgttaagaccgatgtgaaatccccgggctcaacctgggaactgcattggtgactggctcgctagagtgcggcagaggggggtggaattccacgtgtagcagtgaaatgcgtagagatgtggaggaacaccgatggcgaaggcaaccccctgggctgacactgacactcatgcacgaaagcgtggggagcaaacaggattagataccctggtagtccacgccctaaacgatgtctactagttgttggggttttcgaaccttagtaacgcagctaacgcgggaagtagaccgcctggggagtacggccgcaaggttaaaactcaaaggaattgacgggggcccgcacaagcggtggatgatgtggattaattcgatgcaacgcgaaaaaccttacctagccttgacatgtacggaaccctttagagatagaggggtgccttcgggagccgtaacacaggtgctgcatggctgtcgtcagctcgtgtcgtgagatgttgggttaagtcccgcaacgagcgcaacccttgccactagttgctaccattcagttgagcactttagtgggactgccggtgacaaaccggaggaaggtggggatgacgtcaagtcctcatggcccttatggctagggcttcacacgtcatacaatggtcggtacagagggccgcgaagccgcgaggtggagccaatcccataaaaccgatcgtagtccggattgcactctgcaactcgagtgcatgaagtcggaatcgctagtaatcgcggatcagcatgtcgcggtgaatacgttcccgggccttgtacacaccgcccgtcacaccatgggagtgggttctaccagaagtagctaggctaaccctcgggaggccggttaccacggtaggattcatgactggggtg

SEQ ID NO: 1063 - DNA, 1466 bp, Chitinivibrio alkaliphilus
agtgaacgctggcggagtgcttaatacatgcaagtcgagcgagaaagcttcttcggaagtgagtagagcggcgaacgggtgagtaacacgtaaataacctgtccttaagttcgggacaaccttgctaacgcgaggctaataccggatgtgaacataatgcagcattgtataatgtttaaaggctacctcttcatgaaagtggttgcttaagggtggatttgcgtaccattagttagttggtggggtaacggcctaccaagacgatgatggttagccgacctgagagggtgatcggccacattgggactgagacacggcccagactcctacgggaggcagcagtagggaatcttgcgcaatggacgaaagtctgacgcagcaactccgcgtggaggaagacggtcttcggattgtaaactcctttggtatgggaagaaaccctgtatgttaatagcatacagcttgacggtaccatactaaaaagtcacggctaaatacgtgccagcagccgcggtaatacgtatgtggcgagcgttactcggaatcactgggcgtaaagggtacgtaggctgatttctaagtcagtagtgaaatgtcggggcttaaccccggagttgctattgaaactggtaatcttgaatatgcgaggggaagacggaatttctggtgtagcggtggaatgcgtagatatcagaaagaacaccggcggcgaaggcggtcttctggcgcaatattgacgctgaggtacgaaagcgtggggagcgaacaggattagataccctggtagtccacgccgtaaacgatggacactagctggtggagatttcactggcgcagttaacgcattaagtgtcccgcctggggagtacgtccgcaaggatgaaacccaaaggaattgacgggggcccgcacaagcggtggagcatgtgctttaattcgatgcaacgcgaagaaccttacctggtcttgacataccagtgctacgtttagagatagacggttttcttcggaaacactggatacaggtgctgcatggttgtcgtcagctcgtgtcgtgagatgttgggttaagtcccgtaacgagcgcaacccttgtccttagttgccatcattaagttgggcactctatggagacagccgtcgcaaggcggaggaaggtgaggatgacgtcaaatcatcatggcccttacgaccagggctagacacgtgctacaatggccaatacaaagggtagctacatagcgatatggtgctaatctcaaaaagttggtcacagttcggatcggagtctgcaactcgactccgtgaagttggaatcgctagtaatcgtgggtcagcataccacggtgaatacgttcccgggccttgtacacaccgcccgtcaagccacgaaagttggtggtgcccgacatcgtatccttaaccattggaggggagcgactaaggcgacactgataattggggct

SEQ ID NO: 1064 - DNA, 1449 bp, Chitinophaga ginsengisegetis
gatgaacgctagcggcaggcctaatacatgcaagtcgaggggcagcacaggtagcaatactgggtggcgaccggcaaacgggtgcggaacacgtacgcaaccttcctttaagcggggaatagcccagagaaatttggattaataccccataagaatgtgatctggcatcaggtagcatttaaagatttatcacttaaagatgggcgtgcgtctgattaggtagttggtgaggtaacggctcaccaagccgacgatcagtaactggcgtgagagcgcgaccagtcacacgggcactgagacacgggcccgactcctacgggaggcagcagtaaggaatattggtcaatggacgcaagtctgaaccagccatgccgcgtggaggatgaaggccctctgggttgtaaacttcttttatctgggacgaaacacttcttttctaaggagcttgacggtaccaggtgaataagcaccggctaactccgtgccagcagccgcggtaatacggagggtgcaagcgttatccggattcactgggtttaaagggtgcgtaggcggacatgtaagtccgtggtgaaatctccgagcttaactcggaaactgccatggatactatatgtcttgaatgttgtggaggttagcggaatatgtcatgtagcggtgaaatgcatagatatgacatagaacaccaattgcgaaggcagctggctacacaaatattgacgctgaggcacgaaagcgtggggatcaaacaggattagataccctggtagtccacgccctaaacgatgattactcgacatacgtgatacacaatgtgtgtctgagcgaaagcattaagtaatccacctgggaagtacgaccgcaaggttgaaactcaaaggaattgacgggggtccgcacaagcggtggagcatgtggtttaattcgatgatacgcgaggaaccttacctgggctagaatgcagtctgactgatgctgaaaggtgtctttgtagcaatacacagattgtaaggtgctgcatggctgtcgtcagctcgtgccgtgaggtgttgggttaagtcccgcaacgagcgcaacccctatcactagttgccagcacgtcaaggtgggaactctagtgaaactgccgtcgtaagacgcgaggaaggaggggatgatgtcaagtcatcatggcctttatgcccagggctacacacgtgctacaatggtgggaacaaagggctgctccctggtaacaggctgctaatctcaaaaatcccatctcagttcggattgaggtctgcaactcgacctcatgaagctggaatcgctagtaatcgtatatcagcaatgatacggtgaatacgttcccggaccttgtacacaccgcccgtcaagccatgaaagccggggggacctgaagtcggcaaccgcaaggaaccgcctagggtaaaatcggtaattggggct

SEQ ID NO: 1065 - DNA, 1402 bp, Chitinophaga niastensis
catgcaagtcgaggggcagcacaggtagcaatactgggtggcgaccggcaaacgggtgcggaacacgtacgcaaccttcctttaagcggggaatagcccagagaaatttggattaataccccataagaatgtggactggcatcagtcagcatttaaagatttatcacttaaagatgggcgtgcgtctgattaggtagttggtgaggtaacggctcaccaagccgacgatcagtaactggcgtgagagcgcgaccagtcacacgggcactgagacacgggcccgactcctacgggaggcagcagtaaggaatattggtcaatggacgagagtctgaaccagccatgccgcgtggaggatgaaggccctctgggttgtaaacttcttttatttgggacgaaacacttcttttctaagaagcttgacggtaccagatgaataagcaccggctaactccgtgccagcagccgcggtaatacggagggtgcaagcgttatccggattcactgggtttaaagggtgcgtaggcgggcatgtaagtccgtggtgaaatctctaagcttaacttggaaactgccatggatactatatgtcttgaatgttgtggaggttagcggaatatgtcatgtagcggtgaaatgcatagatatgacatagaacaccaattgcgaaggcagctggctacacaaatattgacgctgaggcacgaaagcgtggggatcaaacaggattagataccctggtagtccacgccctaaacgatgattactcgacatttgcgatacacagcaagtgtctgagcgaaagcattaagtaatccacctgggaagtacgaccgcaaggttgaaactcaaaggaattgacgggggtccgcacaagcggtggagcatgtggtttaattcgatgatacgcgaggaaccttacctgggctagaatgcagtctgactgtgggtgaaagctcattttgtagcaatacacagattgtaaggtgctgcatggctgtcgtcagctcgtgccgtgaggtgttgggttaagtcccgcaacgagcgcaacccctatcactagttgccagcacgtcaaggtgggaactctagtgaaactgccgtcgtaagacgcgaggaaggaggggacgatgtcaagtcatcatggcctttatgcccagggctacacacgtgctacaatggtgggaacaaagggctgctacctggtaacaggctgctaatctcaaaaatcccatctcagttcggattgaggtctgcaactcgacctcatgaagctggaatcgctagtaatcgtatatcagcaatgatacggtgaatacgttcccggaccttgtacacaccgcccgtcaagccatgaaagccggggggacctgaagtcggcaaccgcaaggaaccgcctagg

SEQ ID NO: 1066 - DNA, 1449 bp, Chitinophaga terrae
  misc_feature (1038)..(1038): n is a, c, g, or t
  misc_feature (1107)..(1107): n is a, c, g, or t
gatgaacgctagcggcaggcctaatacatgcaagtcgaggggcagcacaggtagcaatactgggtggcgaccggcaaacgggtgcggaacacgtacgcaaccttccttcaagcggggaatagcccagagaaatttggattaataccccataggaatgtagtctcgcatgagacagcatttaaagatttatcacttgaagatgggcgtgcgtctgattaggtagttggtgaggtaacggctcaccaagccgacgatcagtaactggcgtgagagcgcgaccagtcacacgggcactgagacacgggcccgactcctacgggaggcagcagtaaggaatattggtcaatggacgcaagtctgaaccagccatgccgcgtggaggatgaatgccctctgggttgtaaacttcttttatctgggacgaaacacttcttatctaaggagcttgacggtaccagatgaataagcaccggctaactccgtgccagcagccgcggtaatacggagggtgcaagcgttatccggattcactgggtttaaagggtgcgtaggcggatatgtaagtctgtggtgaaatctctgagcttaactcagaaactgccgtggatactatatgtcttgaatgttgtggaggttagcggaatatgtcatgtagcggtgaaatgcttagatatgacatagaacaccgattgcgaaggcagctggctacacaactattgacgctgaggcacgaaagcgtggggatcaaacaggattagataccctggtagtccacgccctaaacgatggatactcgacatttgcgatatattgtaagtgtctgagcgaaagcattaagtatcccacctgggaagtacgaccgcaaggttgaaactcaaaggaattgacgggggtccgcacaagcggtggagcatgtggtttaattcgatgatacgcgaggaaccttacctgggctagaatgcagtctgaccgtggatgaaagttcactttgtagcaatacacagattgtaaggtgctgcatggctgtcgtcagctcgngccgtgaggtgttgggttaagtcccgcaacgagcgcaacccctatcactagttgccagcgcgtaatggngggaactctagtgaaactgccgtcgtaagacgtgaggaaggaggggatgatgtcaagtcatcatggcctttatgcccagggctacacacgtgctacaatggtagagacaaagggctgctacatggtaacatgctgctaatctcaaaaactctatctcagttcggattgaggtctgcaactcgacctcatgaagctggaatcgctagtaatcgtatatcagcaatgatacggtgaatacgttcccggaccttgtacacaccgcccgtcaagccatgaaagccggggggacctgaagtcggcaaccgcaaggaaccgcctagggtaaaatcggtaattggggct

SEQ ID NO: 1067 - DNA, 1425 bp, Chlorobaculum limnaeum
gacgaacgctggcggcgtgcctaacacatgcaagtcaaagtctgagtggcttcggtcacaaggacttggcgcaagggtgagtaaggcataggtaatctgccttttggactgggacaaccccgagaaatcggggacaataccagatgatgcagcggaaccgcatggttatgttgttaaatgatttatcgccaaaagatgagcctatgttccatcaggtagttggtagggtaacggcttaccaagcctacgacggatagctggtctgagaggatgatcagccacattggaactgagacacggtccagactcctacgggaggcagcagtgaggaatattgcgcaatgggcgaaagcctgacgcagcaacgccgcgtggatgatgaagttcttcggaatgtaaaatccttttgcaggggacgaataggtcggcttgccggctgtgacggtaccctgcgaataagccacggctaactctgtgccagcagccgcggtgatacaggggtggcaagcgttgtccggatttactgggtgtaaagggtgcgcaggcggatcaataagtcgggggttaaatccatgtgcttaacacatgcacggcttccgatactgttgatctagagtctcgaagaggaaggtggaatttccggtgtaacggtggaatgtgtagatatcggaaagaacaccagtggcgaaggcagccttctggtcgagtactgacgctcatgcacgaaagcgtggggagcaaacaggattagataccctggtagtccacgccgtaaacgatgaatactagatgttggacatattgttcagtgtcgcagctaacgcgttaagtattccacctgggaagtacgcccgcaagggtgaaactcaaaggaattgacgggggcccgcacaagcggtggatcatgtggtttaattcgatgcaacgcgaagaaccttacctaggcttgatattgcagctaaactccctgaaaggggaggtccttcgggaagctgtaacaggtgctgcatggctgtcgtcagctcgtgtcgtgagatgttgggttaagtcccgcaacgagcgcaacccctacaattagttaccatcaggttatgctggggactctaattgaactgcctacgcaagtagagaggaaggaggggatgacgtcaagtcctcatggcccttacgcctagggccacacacgtgatacaatggcgactacagagggcaaagccgcaaggcagagggaatcccaaaaaagtcgtctcagtccggatcggagtctgcaactcgactccgtgaagttggaatcgctagtaatcgcggatcagcatgccgcggtgaatgtgttcccgggccttgtacacaccgcccgtcaagtcatggaagtcaggagtacccaaagacacgtgagtgtttaaggtaagactggtaactgggact

SEQ ID NO: 1068 - DNA, 1424 bp, Chlorobaculum parvum
gacgaacgctggcggcgtgcctaacacatgcaagtcaaaggaaagtttcttcggaaataagtacttggcgcaagggtgagtaaggcataggtaatctgccctttggactggcataaccccgagaaatcggggacaataccagatgatgcagcggaaccgcatggttatgttgttaaatgatttatcgccaaaggatgagcctatgttccatcaggtagttggtagggtaacggcctaccaagccaacgacggatagctggtctgagaggatgatcagccacattggaactgagacacggtccagactcctacgggaggcagcagtgaggaatattgcgcaatgggcgaaagcctgacgcagcaacgccgcgtggatgatgaagttcttcggaatgtaaaatccttttgctggggacgaataggtcggcttgccgactctgacggtacccagcgaataagccacggctaactctgtgccagcagccgcggtgatacaggggtggcaagcgttgtccggatttactgggtgtaaagggtgcgcaggcggactgataagtcgggggttaaatccatgtgctcaacacatgcacggcttccgatactgtcagtcttgagtctcgaagaggaagatggaatttccggtgtaacggtggaatgtgtagatatcggaaagaacaccagtggcgaaggcagtcttctggtcgagtactgacgctcaggcacgaaagcgtggggagcaaacaggattagataccctggtagtccacgccgtaaacgatgaatactagatgttggtcatattgatcagtgtcgcagctaacgcattaagtattccacctgggaagtacgcccgcaagggtgaaactcaaaggaattgacgggggcccgcacaagcggtggatcatgtggtttaattcgatgcaacgcgaagaaccttacctaggcttgaaatgttagctaaagctcctgaaagggagtgtccttcggggagctagcacaggtgctgcatggctgtcgtcagctcgtgtcgtgagatgttgggttaagtcccgcaacgagcgcaacccctacaattagttactaacaggttaagctgaggactctaattgaactgcctacgcaagtagagaggaaggaggggatgacgtcaagtcctcatggcccttacgcctagggccacacacgtgatacaatggcgactacagagggcaaagccgcgaggcagaggaaatcccttaaaagtcgtctcagtccggatcggagtctgcaactcgactccgtgaagttggaatcgctagtaatcgcggatcagcatgccgcggtgaatgtgttcccgggccttgtacacaccgcccgtcaagtcatggaagtcaggagtacccaaagacgctcgcgcgtttaaggtaagactggtaactgggact

SEQ ID NO: 1069 - DNA, 1424 bp, Chlorobaculum tepidum
gacgaacgctggcggcgtgcctaacacatgcaagtcaaagtttgagtaacttcggttacaaagacttggcgcaagggtgagtaaggcataggtaatctgccttttggtctgggataaccccgagaaatcgggaacaataccagatgatgcagcggaatcgcatggttatgttgttaaagatttatcgccaaaagatgagcctatgttccatcaggtagttggtagggtaacggcctaccaagcctacgacggatagctggtctgagaggatgatcagccacattggaactgagacacggtccagactcctacgggaggcagcagtgaggaatattgcgcaatgggcgaaagcctgacgcagcaacgccgcgtggatgatgaagttcttcggaatgtaaaatccttttgcaggagacgaagaggtcggcttgccggctgtgacggtaccctgcgaataagccacggctaactctgtgccagcagccgcggtgatacaggggtggcaagcgttgtccggatttactgggtgtaaagggtgcgcaggcggatcgataagtcgggggttaaatccatgtgcttaacacatgcacggcttccgatactgttgatctagagtctcgaagaggaaggtggaatttccggtgtaacggtggaatgtgtagatatcggaaagaacaccagtggcgaaggcagccttctggtcgagtactgacgctcaggcacgaaagcgtggggagcaaacaggattagataccctggtagtccacgccgtaaacgatgaatactagatgttggtcatagtgatcagtgtcgcagctaacgcgttaagtattccacctgggaagtacgcccgcaagggtgaaactcaaaggaattgacgggggcccgcacaagcggtggatcatgtggtttaattcgatgcaacgcgaagaaccttacctaggcttgatattacagctaaacctcctgaaagggagggtccttcggggagctgtaacaggtgctgcatggctgtcgtcagctcgtgtcgtgagatgttgggttaagtcccgcaacgagcgcaacccctacaattagttaccatcaggttaagctggggactctaattgaactgcctacgcaagtagagaggagggaggggatgacgtcaagtcctcatggcccttacgcctagggccacacacgtgatacaatggcgactacagagggcaaagccgcaaggcagagggaatcccaaaaaagtcgtctcagtccggatcggagtctgcaactcgactccgtgaagttggaatcgctagtaatcgcggatcagcatgccgcggtgaatgtgttcccgggccttgtacacaccgcccgtcaagtcatggaagtcaggagtacccaaagacgctcgcgcgtttaaggtaagactggtaactgggact

SEQ ID NO: 1070 - DNA, 1400 bp, Chlorobaculum thiosulfatiphilum
  misc_feature (173)..(173): n is a, c, g, or t
  misc_feature (1385)..(1385): n is a, c, g, or t
  misc_feature (1388)..(1388): n is a, c, g, or t
ctaacacatgcaagtcaaaggctgagtgacttcggttacaaggacttggcgcaagggtgagtaatgtataggtaatctgccctttggtttgggataaccccgagaaatcggggacaatgtcagatgatgcagcggaaccgcatggttatgttgttaaagatttatcgccaaangatgagcctatatcccatcaggtagttggtaaggtaacggcttaccaagcctacgacgggtagctggtctgagaggatgatcagccacattggaactgagacacggtccagactcctacgggaggcagcagtgaggaatattgcgcaatgggcgaaagctgacgcagcaacgcgcgtggatgatgaagttcttcggaatgtaaaatccttttgcaggggacgaataagtcggcttgccgactctgacggtaccttgcgaataagccacggctaactctgtgccagcagccgcggtgatacaggggtggcaagcgttgtccggatttactgggtgtaaagggtgcgcaggcggaccgataagtcgggggttaaatccatgtgcttaacacatgcacggcttccgatactgtcggtctagagtctcgaagaggaaggtggaatttccggtgtaacggtggaatgtgtagatatcggaaagaacaccagtggcgaaggcagccttctggtcgagtactgacgctcaggcacgaaagcgtggggagcaaacaggattagataccctggtagtccacgccgtaaacgatgaatactagatgttggtcatgttgatcagtgtcgcagctaacgcgttaagtattccacctgggaagtacgcccgcaaggtgaaactcaaaggaattgacgggggcccgcacaagcggtggatcatgtggtttaattcgatgcaacgcgaagaaccttacctaggcttgatattgcagctaaactccctgaaagggaggtccttcgggaagctgtaacaggtgctgcatggctgtcgtcagctcgtgtcgtgagatgttgggttaagtcccgcaacgagcgcaacccctacaattagttactaacaggtcaagctgaggactctaattgaactgcctacgcaagtagtgaggaaggaggggatgacgtcaagtcctcatggcccttacgcctagggccacacacgtgatacaatggcagctacagagggcaaaaccgcgaggtagagttaatcccttaaaagctgtctcagtccggatcggagtctgcaactcgactccgtgaagttggaatcgctagtaatcgcagatcagcatgctgcggtgaatgtgttcccgggccttgtacacaccgcccgtcaagtcatggaagtcaggagtacccaaagtcgctcgcgcgtttaaggtaagnctngtaactgggact

SEQ ID NO: 1071 - DNA, 1423 bp, Chlorobium chlorochromatii
gacgaacgctggcggcgtgcctaacacatgcaagtcaaagggaagtgacttcggttatgagtacttggcgcaagggtgagtaacgtataggtaatttgccttttggactgaaataactccgagaaatcggagacaatgtcagatgatgcagcggaaccgcatggttatgttgttaaagatttatcgccaaaagatgagcctatatcccatcaggtagttggtagggtaaaagcctaccaagcctacgacgggtagctggtctgagaggatgatcagccacattggaactgagacacggtccagactcctacgggaggcagcagtgaggaatattgcgcaatgggcgaaagcctgacgcagcaacgccgcgtggatgatgaagttcttcggaatgtaaagtccttttgcagggtaagaaactctcggtttaccgagactgacggtactctgcgaataagccacggctaactctgtgccagcagccgcggtgatacaggggtggcaagcgttgtccggatttactgggtgtaaagggtgcgcaggcgggctcgtaagtcgggggttaaatccgtgtgcttaacacacgcatggcttccgatactgcgagtctagagtatcgaagaggaagatggaatttccggtgtaacggtggaatgtgtagatatcggaaagaacaccagtggcgaaggcagtcttctggtcggttactgacgctcaggcacgaaagcgtggggagcaaacaggattagataccctggtagtccacgccgtaaacgatgaatactagatgttggtcatgttgatcagtgtcgcagctaacgcgttaagtattccacctgggaagtacgcccgcaagggtgaaactcaaaggaattgacgggggcccgcacaagcggtggatcatgtggtttaattcgatgcaacgcgaagaaccttacctgggcttgatatgctaactaaagtcgctgaaaggcgatgtccttcggggagttagtacaggtgctgcatggctgtcgtcagctcgtgtcgtgagatgttgggttaagtcccgcaacgagcgcaacccctacagttagttactaacaggtcaagctgaggactctaactgaactgcctacgcaagtagtgaggaaggaggggatgacgtcaagtcctcatggcccttacgcccagggccacacacgtgatacaatggtagctacagagggcaaagccgcaaggtggaggaaatcccttaaaagctatctcagtccggatcggagtctgcaactcgactccgtgaagttggaatcgctagtaatcgcagatcagcatgctgcggtgaatctgttcccgggccttgtacacaccgcccgtcaagtcatggaagttaggagtacccaaagacacgtgagtgtttaaggtaagactagtaactgggact

SEQ ID NO: 1072 - DNA, 1423 bp, Chlorobium ferrooxidans
gacgaacgctggcggcgtgcctaacacatgcaagtcaaagggaagcatcttcggatgtaagtacttggcgcaagggtgagtaatgtataggtaatctgccctttggactgggataaccccgagaaatcggggacaataccagatgatgcagcggaaccgcatggttatgttgttaaagatttatcgccaaaggatgaacctatatcccatcaggtagttggcagggttaaagcctaccaagcctacgacgggtagctggtctgagaggatgatcagccacattggaactgagacacggtccagactcctacgggaggcagcagtgaggaatattgcgcaatgggcgaaagcctgacgcagcaacgccgcgtggatgatgaagttcttcggaatgtaaagtccttttgtagaggaagaatatcccggtttaccgggactgacggtactctgcgaataagccacggctaactctgtgccagcagccgcggtgatacaggggtggcaagcgttgtccggatttactgggtgtaaagggtgcgcaggcgggccgataagtcgggggttaaatccatgtgcttaacacatgcatggcttccgatactgtcggcctagagtctcgaagaggaagatggaatttccggtgtaacggtggaatgtgtagatatcggaaagaacaccagtggcgaaggcagtcttctggtcgagaactgacgctcaggcacgaaagcgtggggagcaaacaggattagataccctggtagtccacgccgtaaacgatgaatactagatgttggtaatttttatcagtgtcgcagctaacgcgttaagtattccacctgggaagtacgcccgcaagggtgaaactcaaaggaattgacgggggcccgcacaagcggtggatcatgtggtttaattcgatgcaacgcgaagaaccttacctgggcttgatattgcaactaaacctcctgaaagggagggtgcttcggcgagttgtaacaggtgctgcatggctgtcgtcagctcgtgtcgtgagatgttgggttaagtcccgcaacgagcgcaacccctacaattagttactaacaggttaagctgaggactctaattgaactgcctacgcaagtagtgaggaaggaggggatgacgtcaagtcctcatggcccttacgcccagggccacacacgtgatacaatggtagctacagagggcaaagccgcgaggcagagttaatcccttaaaagctatctcagtccggatcggagtctgcaactcgactccgtgaagttggaatcgctagtaatcgcggatcagcatgccgcggtgaatgtgttcccgggccttgtacacaccgcccgtcaagtcatggaagtcaggagcacccaaagacactcgcgtgtttaaggtgagactggtaactgggact

SEQ ID NO: 1073 - DNA, 1423 bp, Chlorobium limicola
gacgaacgctggcggcgtgcctaacacatgcaagtcaaagggaagcgacttcggtcgtgagtacttggcgcaagggtgagtaacgtataggtaatctgccctttggactgggataacctcgagaaatcgaggacaataccagatgatgcagcgggaccgcatggtcatgttgttaaagatttatcgccaaaggatgagcctatattccatcaggtagttggtagggtaacggcctaccaagcctacgacggatagctggtctgagaggatgatcagccacattggaactgagacacggtccagactcctacgggaggcagcagtgaggaatattgcgcaatgggcgaaagcctgacgcagcaacgccgcgtggatgatgaagttcttcggaatgtaaaatccttttgcagaggaagaaaatgctggtttaccggcactgacggtactctgcgaataagccacggctaactctgtgccagcagccgcggtgatacaggggtggcaagcgttgtccggatttactgggtgtaaagggtgcgcaggcggacttataagtcgggggttaaatccatgtgcttaacacatgcaaggcttccgatactgtaggtctagagtctcgaagaggaagatggaatttccggtgtaacggtggaatgtgtagatatcggaaagaacaccagtggcgaaggcagtcttctggtcgagaactgacgctcaggcacgaaagcgtggggagcaaacaggattagataccctggtagtccacgccgtaaacgatgaatactagatgttggtcatattgatcagtgtcgcagctaacgcgttaagtattccacctgggaagtacgctcgcaagagtgaaactcaaaggaattgacgggggcccgcacaagcggtggatcatgtggtttaattcgatgcaacgcgaagaaccttacctgggcttgatattgcagctaaactcattgaaagatgaggtccttcgggaagctgtaacaggtgctgcatggctgtcgtcagctcgtgtcgtgagatgttgggttaagtcccgcaacgagcgcaacccctacaattagttactaacaggttaagctgaggactctaattgaactgcctacgcaagtagtgaggaaggaggggatgacgtcaagtcctcatggcccttacgcccagggccacacacgtgatacaatggtagctacagagggcaaagccgcgaggcagaggaaatcccaaaaaagctatctcagtccggatcggagtctgcaactcgactccgtgaagttggaatcgctagtaatcgcagatcagcacgctgcggtgaatgtgttcccgggccttgtacacaccgcccgtcaagtcatggaagtcaggagtacccaaagacgctcgcgcgtttaaggtaagactggtaactgggact

SEQ ID NO: 1074 - DNA, 1423 bp, Chlorobium luteolum
gacgaacgctggcggcgtgcctaacacatgcaagtcaaaggaaagcggcttcggccgggagtacttggcgcaagggtgagtaaggcataggtaatctgccctttggactgggataacctcgagaaatcgaggacaataccagatgatgcagcgggaccgcatggtcatgttgttaaagatttatcgccaagggatgagcctatgttccatcaggtagttggtagggtaacggcctaccaagcctacgacggatagctggtctgagaggatgatcagccacattggaactgagacacggtccagactcctacgggaggcagcagtgaggaatattgcgcaatgggcgaaagcctgacgcagcaacgccgcgtggatgatgaagttcttcggaatgtaaagtccttttgcaggggacgaacatgtcggtataccgacactgacggtaccttgcgaataagccacggctaactctgtgccagcagccgcggtgatacaggggtggcaagcgttgtccggatttactgggtgtaaagggtgcgcaggcggacttataagtcgggggttaaatccatgtgcttaacacatgcatggcttccgatactgtaagtctagagtctcggagaggaagatggaatttccggtgtaacggtggaatgtgtagatatcggaaagaacaccagtggcgaaggcagtcttctggccgagtactgacgctcaggcacgaaagcgtggggagcaaacaggattagataccctggtagtccacgccgtaaacgatgaatactagatgttggtcatattgatcagtgtcgcagctaacgcgttaagtattccacctgggaagtacgctcgcaagagtgaaactcaaaggaattgacgggggcccgcacaagcggtggatcatgtggtttaattcgatgcaacgcgaagaaccttacctaggcttgatattgcgactaaacctcctgaaagggagggtccttcggggagtcgtaacaggtgctgcatggctgtcgtcagctcgtgtcgtgagatgttgggttaagtcccgcaacgagcgcaacccctacaattagttactaacaggttaagctgaggactctaattgaactgcctacgcaagtagtgaggaaggaggggatgacgtcaagtcctcatggcccttacgcctagggccacacacgtgatacaatggcagctacagagggcaaagccgcgaggtggaggaaatcccttaaaagctgtctcagtccggatcggagtctgcaactcgactccgtgaagttggaatcgctagtaatcgcagatcagcatgctgcggtgaatgtgttcccgggccttgtacacaccgcccgtcaagtcatggaagtcaggagtacccaaagacgctcgcgcgtttaaggtaagactggtaactgggact

SEQ ID NO: 1075 - DNA, 1423 bp, Chlorobium phaeobacteroides
gacgaacgctggcggcgtgcctaacacatgcaagtcaaaggaaagcagcttcggctgtaagtacttggcgcaagggtgagtaatgtataggtaatctgccctttggactgggataacctcgagaaatcgaggacaataccagatgatgcagcggaaccgcatggttatgttgttaaagatttatcgccaaaggatgaacctatatcccatcaggtagttggtaaggtaacggcttaccaagcctacgacgggtagctggtctgagaggatgatcagccacattggaactgagacacggtccagactcctacgggaggcagcagtgaggaatattgcgcaatgggcgaaagcctgacgcagcaacgccgcgtggatgatgaagttcttcggaatgtaaagtccttttgtggaggaagaatatcccgatttatcgggactgacggtactccgcgaataagccacggctaactctgtgccagcagccgcggtgatacaggggtggcaagcgttgtccggatttactgggtgtaaagggtgcgcaggcggattcataagtcgggggttaaatccatgtgcttaacacatgcaaggcttccgatactgtgagtctagagtctcgaagaggaagatggaatttccggtgtaacggtggaatgtgtagatatcggaaagaacaccagtggcgaaggcagtcttctggtcgagaactgacgctcaggcacgaaagcgtggggagcaaacaggattagataccctggtagtccacgctgtaaacgatgaatactagatgttggtcatattgatcagtgtcgcagctaacgcgttaagtattccacctgggaagtacgctcgcaagagtgaaactcaaaggaattgacgggggcccgcacaagcggtggatcatgtggtttaattcgatgcaacgcgaagaaccttacctgggcttgatatgccaattaaactccctgaaaggggaggtccttcggggaattggtacaggtgctgcatggctgtcgtcagctcgtgtcgtgagatgttgggttaagtcccgcaacgagcgcaacccctacaattagttactagcaggttaagctgaggactctaattgaactgcctacgcaagtagtgaggaaggaggggatgacgtcaagtcctcatggcccttacgcccagggccacacacgtgatacaatggtagctacagagggcaaagccgcgaggcagagttaatcccttaaaagctatctcagtccggatcggagtctgcaactcgactccgtgaagttggaatcgctagtaatcgcagatcagcacgctgcggtgaatgtgttcccgggccttgtacacaccgcccgtcaagtcatggaagtcaggagtacccaaagccgcgcaagcgtttaaggtaagactggtaactgggact

SEQ ID NO: 1076 - DNA, 1423 bp, Chlorobium phaeovibrioides
gacgaacgctggcggcgtgcctaacacatgcaagtcaaagggaagcagcttcggctgtgagtacttggcgcaagggtgagtaatgtataggtaatctgcccttaggactggcataacctcgagaaatcgaggacaataccagatgatgcagcgggaccgcatggtcatgttgttaaagatttatcgcctaaggatgaacctatatcccatcaggtagttggcaggataatagcctaccaagcctacgacgggtagctggtctgagaggatgatcagccacattggaactgagacacggtccagactcctacgggaggcagcagtgaggaatattgcgcaatgggcgaaagcctgacgcagcaacgccgcgtggatgatgaagttcttcggaatgtaaagtccttttgtagaggaagaacatgtcggtttaccggcactgacggtactctgcgaataagccacggctaactctgtgccagcagccgcggtgatacaggggtggcaagcgttgtccggatttactgggtgtaaagggtgcgcaggcggacttataagtcgggggttaaatccatgtgcttaacacatgcatggcttccgatactgtaagtctagagtctcggagaggaagatggaatttccggtgtaacggtggaatgtgtagatatcggaaagaacaccagtggcgaaggcagtcttctggccgagtactgacgctcaggcacgaaagcgtggggagcaaacaggattagataccctggtagtccacgccgtaaacgatgaatactagatgttggtcatattgatcagtgtcgcagctaacgcgttaagtattccacctgggaagtacgctcgcaagagtgaaactcaaaggaattgacgggggcccgcacaagcggtggatcatgtggtttaattcgatgcaacgcgaagaaccttacctgggcttgatattgcgactaaacctcttgaaagggagggtccttcggggagtcgtaacaggtgctgcatggctgtcgtcagctcgtgtcgtgagatgttgggttaagtcccgcaacgagcgcaacccctacaattagttactaacaggtcaagctgaggactctaattgaactgcctacgcaagtagtgaggaaggaggggatgacgtcaagtcctcatggcccttacgcccagggccacacacgtgatacaatggcagctacagagggcaaagccgcgaggtggaggaaatcccttaaaagctgtctcagtccggatcggagtctgcaactcgactccgtgaagttggaatcgctagtaatcgcagatcagcatgctgcggtgaatgtgttcccgggccttgtacacaccgcccgtcaagtcatggaagtcaggagtacccaaagacactcgcgtgtttaaggtaagactggtaactgggact

SEQ ID NO: 1077 - DNA, 1413 bp, Chlorogloeopsis fritschii
gatgaacgctggcggtatgcttaacacatgcaagtcgaacggtctttttcggaagatagtggcggacgggtgagtaacgcgtgagaatctggctctaggttcgggacaaccactggaaacggtggctaataccggatgtgccgaagaggtgaaaggctagctgcctagagatgagctcgcgtctgattagctagatggtggggtaagagcctaccatggcgacgatcagtagctggtctgagaggatgatcagccacactgggactgagacacggcccagactcctacgggaggcagcagtggggaattttccgcaatgggcgaaagcctgacggagcaataccgcgtgagggaggaaggctcttgggttgtaaacctcttttctcagggaagaagagatgacggtacctgaggaagaagcatcggctaactccgtgccagcagccgcggtaatacggaggatgcaagcgttatccggaatgattgggcgtaaagcgtccgtaggtggtgatgcaagtctattgtcaaagcgtgcggctcaaccgcataaaggcagtggaaactgtgtaactagagtgcattcggggcagggggaattcctggtgtagcggtgaaatgcgtagagatcaggaagaacaccggtggcgaaagcgccctgctaggctgcaactgacactgagggacgaaagctaggggagcgaatgggattagataccccagtagtcctagctgtaaacgatggatactaggcgttgcgtgtatcgacccacgcagtgccgtagctaacgcgttaagtatcccgcctggggagtacgcacgcaagtgtgaaactcaaaggaattgacgggggcccgcacaagcggtggagtatgtggtttaattcgatgcaacgcgaagaaccttaccagggcttgacatgtccggaaccgaagtgaaagcttcgggtgccttcgggagccggaacacaggtggtgcatggctgtcgtcagctcgtgtcgtgagatgttgggttaagtcccgcaacgagcgcaaccctcgttcttagttgccagcacttcgggtgggcactctaaggagactgccggtgacaaaccggaggaaggtggggatgacgtcaagtcagcatgccccttacgtcctgggctacacacgtactacaatgctcaagacagagggcagcaagctagcgatagcaagcaaatctcgtaaacttgggctcagttcagatcgcaggctgcaactcgcctgcgtgaaggaggaatcgctagtaatcgcaggtcagcatactgcggtgaattcgttcccgggccttgtacacaccgcccgtcacaccatggaagctggtcatgcccgaagtcgttaccctaactcttttgagagggggatgccgaaggcgggactggtgactggggt

SEQ ID NO: 1078 - DNA, 1414 bp, Chloroherpeton thalassium
gacgaacgctggcggcgtgcctaacacatgcaagccaaaggaaagcttcggttagtacttggcgtacgggtgagtaaggtataggtaatctgcctcttggtctgacataccttcgagaaatcgaagataatttcagataatgcagcggcaccgcatggtgatgttgttaaagacttgttgccaagagatgagcctatatttcatcaggtagttggtggggtaatagcctaccaagcctacgacggataactggtctgagaggatgatcagtcacactggaactgagacacggtccagactcctacgggaggcagcagtgaggaatattgcgcaatgggtgaaagcctgacgcagcaacgccgcgtggatgatgaagttcttaggaatgtaaagtccttttgtaagggaagaaaatctcgcttggtgagactgacggtaccttatgaataagccacggctaactctgtgccagcagccgcggtgatacaggggtggcaagcgttgtccggatttactgggtgtaaagggtgcgtaggcggattgattagtcgggagttaaagcctcttgcttaacgagagaacagcttccgatactgtcagtctagagtgccgaagaggaagatggaatttccggtgtagcggtggaatgtgtagagatcggaaagaacaccagttgcgaaggcagtcttctggtcggtaactgacgctgatgtacgaaagcgtgggtagcaaacaggattagataccctggtagtccacgctgtaaacgatggatgctagatgttggctcttgggtcagtgtcgtagttaacgcattaagcatcccacctgggaagtacgctcgcaagggtgaaactcaaaggaattgacgggggcccgcacaagcggtggatcatgtggtttaattcgatgcaacgcgaagaaccttacctgggcttgacatgctaactaaagccggtgaaagccggtgtccgaaagggagttagtgcaggtgctgcatggctgtcgtcagctcgtgtcgtgagatgttgggttaagtcccgcaacgagcgcaacccttacaattagttgctaacaagtaatgttgagcactctaattggactgcctacgcaagtagtgaggaaggaggggatgacgtcaagtcctcatggcccttacgtccagggcaacacacgtgatacaatggcgactacaatgggcgaagccgcgaggtgaagataatcccaaaaaagtcgtctcagtccagatcggagtctgcaactcgactccgtgaagtcggaatcgctagtaatcgcagatcagcatgctgcggtgaatacgttcccgggccttgtacacaccgcccgtcaagccatggaagtcaggagtacccaaagacgctgtgcgtttaaggtaagactggtaactggggct

SEQ ID NO: 1079 - DNA, 1479 bp, Chondromyces apiculatus
agcgaacgttagcggcgcgcttaacacatgcaagtcgagcgagaaagggcttcgcccccggtaaagcggcgcacgggtgagtaacacgtaggtaatctgccttccggtggtggataacgttccgaaaggaacgctaatacagcatgagaccacggtgtcgagagacgcagaggtcaaagcgggccaatgaaatcaagctcgcaccggaagatgagcctgcggcccatcagctagttggtagggtaatggcctaccaaggcgaagacgggtagctggtctgagaggatgatcagccacactggaactgagacacggtccagactcctacgggaggcagcagtggggaatcttgcgcaatgggcgaaagcctgacgcagcgacgccgcgtgagtgatgaaggccttcgggttgtaaagctctgtggagagggacgaataagtgctggctaatatccagcgcgatgacggtacctctttagcaagcaccggctaactctgtgccagcagccgcggtaagacagagggtgcaaacgttgttcggaattactgggcgtaaagcgcgtgtaggcggctctgcaagtcgggtgtgaaagccctgggctcaacccaggaagtgcactcgaaactgcagagcttgagtcccggagaggaaggcggaattctcggtgtagaggtgaaattcgtagatatcgagaggaacaccggtggcgaaggcggccttctggacggcgactgacgctgagacgcgaaagcgtggggagcaaacaggattagataccctggtagtccacgccgtaaacgatgggtgctaggtgctgcgggctttgacccctgcggtgccgtagctaacgcattaagcaccccgcctggggagtacggccgcaaggctaaaactcaaaggaattgacgggggcccgcacaagcggtggagcatgtggttcaattcgacgcaacgcgcagaaccttacctgggctagaaaacgcaagaacctggtcgaaaggtcggggtgctcttcggagaacttgcggttaggtgctgcatggctgtcgtcagctcgtgtcgtgagatgttgggttaagtcccgcaacgagcgcaacccctgtcgttagttgccagcggttcggccgggcactctagcgagactgccgatattgaaatcggaggaaggtggggatgacgtcaagtcctcatggcccttatgtccagggctacacacgtgctacaatggtcggtacaaacggttgcgaactcgcgagggggagccaatccgaaaaaaccgacctcagtacggataagagtctgcaactcgactctttgaagttggaatcgctagtaatcgctgatcagcaggcagcggtgaatacgttcccgggccttgtacacaccgcccgtcacaccatgggagtcgattgctccagaagtggctgcgccaacccgcaagggaggcaggcccccaaggagtggtcggtaactggggtg

SEQ ID NO: 1080 - DNA, 1478 bp, Chondromyces crocatus
  misc_feature (158)..(158): n is a, c, g, or t
  misc_feature (209)..(211): n is a, c, g, or t
  misc_feature (386)..(386): n is a, c, g, or t
  misc_feature (444)..(444): n is a, c, g, or t
  misc_feature (472)..(473): n is a, c, g, or t
  misc_feature (729)..(729): n is a, c, g, or t
  misc_feature (747)..(748): n is a, c, g, or t
  misc_feature (831)..(831): n is a, c, g, or t
  misc_feature (862)..(863): n is a, c, g, or t
  misc_feature (912)..(912): n is a, c, g, or t
  misc_feature (915)..(915): n is a, c, g, or t
  misc_feature (1029)..(1029): n is a, c, g, or t
  misc_feature (1084)..(1084): n is a, c, g, or t
  misc_feature (1130)..(1130): n is a, c, g, or t
  misc_feature (1375)..(1375): n is a, c, g, or t
  misc_feature (1392)..(1395): n is a, c, g, or t
aacgaacgttagcggcgcgcttaacacatgcaagtcgagcgagaaagggcttcggccccggtaaagcggcgcacgggtgagtaacacgtaggtaatctacctcccagtggtggataacgttccgaaaggaacgctaatacagcataagaccacggctncgcgaggagcagaggtcaaagcgggccactacttgtaagctcgcgctgggnnntgagcctgcggcccatcagctagttggtagggtaatggcctaccaaggcgaagacgggtagctggtctgagaggatgatcagccacactggaactgagacacggtccagactcctacgggaggcagcagtggggaatcttgcgcaatgggcgaaagcctgacgcagcgacgccgngtgagtgatgaaggccttcgggttgtaaagctctgtggagggggacgaataagtttcngttaataaccggagcgatgacggtaccnntttagcaagcaccggctaactctgtgccagcagccgcggtaagacagagggtgcaaacgttgttcggaattactgggcgtaaagcgcgtgtaggcggctgcgcaagtcggatgtgaaagccctgggctcaacccaggaagtgcattcgaaactgcgcggcttgagtcccggagaggaaggcggaattctcggtgtagaggtgaaattcgtagatatcgagaggaacaccggtggcgaaggcggccttctggacggngactgacgctgagacgcnnaagcgtggggagcaaacaggattagataccctggtagtccacgccgtaaacgatgggtgctaggtgctgcgggctttgacccntgcggtgccgtagctaacgcattaagcaccnngcctggggagtacggccgcaaggctaaaactcaaaggaattgacggggnccngcacaagcggtggagcatgtggttcaattcgacgcaacgcgcagaaccttacctgggctagaaaacgtaagaacctggtcgaaaggtcggggtgcccttcggggaacttgcggntaggtgctgcatggctgtcgtcagctcgtgtcgtgagatgttgggttaagtcccncaacgagcgcaacccctgtcgttagttgccagcggttcggccgggnactctagcgagactgccgatattaaaatcggaggaaggtagggatgacgtcaagtcctcatggcccttatgtccagggctacacacgtgctacaatggtcggtacaaacggttgctaaatcgcgaggtggagccaatccgaaaaaaccgacctcagtacggataagagtctgcaactcgactctttgaagttggaatcgctagtaatcgctgatcagcaggcagcggtgaatacgttcccgggcnttgtacacaccgcccgnnnnaccatgggagtcgattgctccagaagtggctgagccaacccgcaagggaggcaggcccccaaggagtggtcggtaactggggt

SEQ ID NO: 1081 - DNA, 1371 bp, Chromatium okenii
attgaacgctggcggtatgcctaacacatgcaagtcgaacgtcaaaggtcttcggattgagtagcgtggcggacgggtgagtaaagcgtgggaatctgccttgcagtgggggataacccggggaaactcgggctaataccgcatacgccctacgggggaaagggggctttggctctcgttgcaagatgagcccacgtccgattagctagttggtagggtaaaggcctaccaaggcgacgatcggtcgctggtctgagaggatgaccagccacactgggactgagacacggcccagactcctacgggaggcagcagtggggaatattggacaatgggggaaaccctgatccagcaataccgcgtgtgtgaagaaggcctgcgggttgtaaagcactttcagtgggaaagaaaacctggtggttaatacccatcggctttgacgttactcacaaaagaagcaccggctaactccgtgccagcagccgcggtaatacggagggtgcaagcgttaatcggaattactgggcgtaaagcgcacgtaggcggcgccgtcagtccgatgtgaaagccctgggcttaacctgggaactgcattggatactgcggcgctagaatgtgaaagaggggagtggaattccaggtgtagcggtgaaatgcgtagagatctggaggaacaccagtggcgaaggcggctccctggttcaacattgacgctgaggtgcgaaagcgtgggtagcaaacaggattagataccctggtagtccacgcggtaaacgatgtcgactagccgttgggtccatttaagggcttagtggcgcagctaacgcgataagtcgaccgcctggggagtacggccgcaaggttaaaactcaaaggaattgacgggggcccgcacaagcggtggagcatgtggtttaattcgatgcaacgcgaaaaaccttaccagcccttgacatcctcggaatcttgcagagatgtgagagtgccttcgggaaccgagagacaggtgctgcatggctgtcgtcagctcgtgtcgtgagatgttgggttaagtcccgtaacgagcgcaacccttgtccttagttgccagcgcgtcaaggcgggaactctaaggagactgccggtgataaaccggaggaaggtggggatgacgtcaagtcatcatggcccttatgggctgggctacacacgtgctacaatggccggtacagagcgtcgcgaccccgcgagggtgagccaatcgcagaaaaccggtcgtagtccggatcgcagtctgcaactcgactgcgtgaagtcggaatcgctagtaatcgcgaatcagcatgtcgcggtgaatacgttcccgggccttgtacacaccgcccgtcacac

SEQ ID NO: 1082 - DNA, 1454 bp, Chromatocurvus halotolerans
  misc_feature (1257)..(1257): n is a, c, g, or t
attgaacgctggcggcaggcctaacacatgcaagtcgagcgcgaaaggccttcgggttgagtagagcggcggacgggtgagtaacgcgtaggaatctacctggtagtgggggacaactcggggaaactcgagctaataccgcatacgccctatgggggaaagcgggggatcttcggacctcgtgctatcggatgagcctgcgttggattagctagttggtggggtaaaggcctaccaaggcaacgatccatagctggtctgagaggatgatcagccacaccgggactgagacacggcccggactcctacgggaggcagcagtggggaatattgcgcaatgggcgaaagcctgacgcagccatgccgcgtgtgtgaagaaggccttcgggttgtaaagcactttcacttgggaagaaagggtgcgttaatagcacgtatctgtgacattaccttgagaagaagcaccggctaactccgtgccagcagccgcggtaatacggagggtgcaagcgttaatcggaattactgggcgtaaagcgcgcgtaggcggtttgttaagttggatgtgaaatccccgggctcaacctgggaatggcacccgatactggccgactagagtacgagagagggaggtagaattccacgtgtagcggtgaaatgcgtagatatgtggaggaataccggtggcgaaggcggcctcctggctcgatactgacgctgaggtgcgaaagcgtggggagcaaacaggattagataccctggtagtccacgccgtaaacgatgtctactagccgttggggaacttgattctttggtggcgcagttaacgcgataagtagaccgcctggggcgtacggccgcaaggttaaaactcaaatgaattgacgggggcccgcacaagcggtggagcatgtggtttaattcgatgcaacgcgaagaaccttaccaggtcttgacatccagagaactttccagagatggattggtgccttcgggagctctgagacaggtgctgcatggctgtcgtcagctcgtgtcgtgagatgttgggttaagtcccgtaacgagcgcaacccttgtccttagttgccagcgcgtaatggcgggaactctaaggagactgccggtgacaaaccggaggaaggtggggacgacgtcaagtcatcatggcccttacgacctgggctacacacgtgctacaatggaacgcacagagggcagcaagagcgcgagctggagcgaatcccacaaaacgtntcgtagtccggatcggagtctgcaactcgactccgtgaagtcggaatcgctagtaatcgcgaatcagaatgtcgcggtgaatacgttcccgggccttgtacacaccgcccgtcacaccatgggagtgggttgctccagaagtggttagcctaaccttcgggagggcgatcaccacggagtgattcatgactggggtg

SEQ ID NO: 1083 - DNA, 1462 bp, Chromohalobacter canadensis
attgaacgctggcggcaggcctaacacatgcaagtcgagcggaaacgatcctagcttgctaggaggcgtcgagcggcggacgggtgagtaatgcataggaatctacccagtcgtgggggataacctgaggaaactcaggctaataccgcatacgtcctacgggagaaagcgggggctcttcggacctcgcgcgattggatgagcctatgtcggattagcttgttggtaaggtaacggcttaccaaggcgacgatccgtagctggtctgagaggatgatcagccacaccgggactgagacacggcccggactcctacgggaggcagcagtggggaatattggacaatgggcgaaagcctgatccagccatgccgcgtgtgtgaagaaggctttcgggttgtaaagcactttcagcgaggaagaaagcgtgccggccaatacccggtacggacgacatcactcgcagaagaagcaccggctaactccgtgccagcagccgcggtaatacggagggtgcaagcgttaatcggaattactgggcgtaaagcgcgcgtaggcggcttgtcacgccgggtgtgaaagccccgggctcaacctgggaacggcatccggaacgggcaggctagagtgcaggagaggaaggtagaattcccggtgtagcggtgaaatgcgtagagatcgggaggaataccagtggcgaaggcggccttctggactgacactgacgctgaggtgcgaaagcgtgggtagcaaacaggattagataccctggtagtccacgccgtaaacgatgtcgactagccgttgggtcccttgaggacttagtggcgcagttaacgcgataagtcgaccgcctggggagtacggccgcaaggttaaaactcaaatgaattgacgggggcccgcacaagcggtggagcatgtggtttaattcgatgcaacgcgaagaaccttacctacccttgacatcctgcgaacccggaagagattccggggtgccttcgggagcgcagagacaggtgctgcatggctgtcgtcagctcgtgttgtgaaatgttgggttaagtcccgtaacgagcgcaacccttgtccctatttgccagcgattcggtcgggaactctagggagactgccggtgacaaaccggaggaaggtggggacgacgtcaagtcatcatggcccttacgggtagggctacacacgtgctacaatggccggtacaaagggttgcgaaagcgcgagctgaagctaatcccgaaaagccggtctcagtccggatcggagtctgcaactcgactccgcgaagtcggaatcgctagtaatcgtgcatcagaatggcacggtgaatacgttcccgggccttgtacacaccgcccgtcacaccatggaagtggactgcaccagaagtggttagcttaaccttcgggagagcgatcaccacggtgtggttcatgactggggtg

SEQ ID NO: 1084 - DNA, 1423 bp, Chromohalobacter marismortui
  misc_feature (15)..(15): n is a, c, g, or t
attgaacgctggcgncagccctaacacatgcaagtcgagcggcagcacgggaagcttgcttcctggtggcgagcggcggacgggtgagtaatgcataggaatctacccagtcgtgggggataacctgaggaaactcaggctaataccgcatacgtcctacgggagaaagcgggggctcttcggacctcgcgcgattggatgagcctatgtcggattagctggttggtaaggtaacggcttaccaaggcgacgatccgtagctggtctgagaggatgatcagccacaccgggactgagacacggcccggactcctacgggaggcagcagtggggaatattggacaatgggcgcaagcctgatccagccatgccgcgtgtgtgaagaaggctttcgggttgtaaagcactttcagcgaggaagaaagcgtgccggccaatacccggtacggacgacatcactcgcagaagaagcaccggctaactccgtgccagcagccgcggtaatacggagggtgcaagcgttaatcggaattactgggcgtaaagcgcgcgtaggcggcgtgtcacgccgggtgtgaaagccccgggctcaacctgggaacggcatccggaacgggcaggctagagtgcaggagaggaaggtagaattcccggtgtagcggtgaaatgcgtagagatcgggaggaataccagtggcgaaggcggccttctggcctgacactgacgctgaggtgcgaaagcgtgggtagcaaacaggattagataccctggtagtccacgccgtaaacgatgtcgactagccgttgggtcccttgaggacttagtggcgcagttaacgcgataagtcgaccgcctggggagtacggccgcaaggttaaaactcaaatgaattgacgggggcccgcacaagcggtggagcatgtggtttaattcgatgcaacgcgaagaaccttacctacccttgacatcctgcgaacccggaagagattccggggtgccttcgggagcgcagagacaggtgctgcatggctgtcgtcagctcgtgttgtgaaatgttgggttaagtcccgtaacgagcgcaacccttgtccctagttgccagcgattcggtcgggaactctagggagactgccggtgacaaaccggaggaaggtggggacgacgtcaagtcatcatggcccttacgggtagggctacacacgtgctacaatggtcggtacaaagggttgcgaaagcgcgagctgaagctaatcccgaaaagccgacctcagtccggatcggagtctgcaactcgactccgtgaagtcggaatcgctagtaatcgtgcatcagaatggcacggtgaatacgttcccgggccttgtacacaccgcccgtcacaccatgggagtggactgcaccagaagtggttagcctaacttcg

SEQ ID NO: 1085 - DNA, 1460 bp, Chromohalobacter salexigens
attgaacgctggcggcaggcctaacacatgcaagtcgagcggtaacaggtccagcttgctggacgctgacgagcggcggacgggtgagtaatgcataggaatctacccagtcgtgggggataacctggggaaacccaggctaataccgcatacgtcctacgggagaaagcgggggctcttcggacctcgcgcgattggatgagcctatgtcggattagctggttggtggggtaacggctcaccaaggcgacgatccgtagctggtctgagaggatgatcagccacactgggactgagacacggcccagactcctacgggaggcagcagtggggaatattggacaatgggcgaaagcctgatccagccatgccgcgtgtgtgaagaaggctttcgggttgtaaagcactttcagtggggaagaaggcttgtcggccaatacccggcaagagcgacatcacccacagaagaagcaccggctaactccgtgccagcagccgcggtaatacggagggtgcaagcgttaatcggaattactgggcgtaaagcgcgcgtaggcggcttgtcacgccgggtgtgaaagccccgggctcaacctgggaacggcatccggaacgggcaggctagagtgcaggagaggaaggtagaattcccggtgtagcggtgaaatgcgtagagatcgggaggaataccagtggcgaaggcggccttctggactgacactgacgctgaggtgcgaaagcgtgggtagcaaacaggattagataccctggtagtccacgccgtaaacgatgtcgactagccgttgggtcccttgaggacttagtggcgcagttaacgcgataagtcgaccgcctggggagtacggccgcaaggttaaaactcaaatgaattgacgggggcccgcacaagcggtggagcatgtggtttaattcgatgcaacgcgaagaaccttacctacccttgacatcctgcgaacccggaagagattccggggtgccttcgggagcgcagagacaggtgctgcatggctgtcgtcagctcgtgttgtgaaatgttgggttaagtcccgtaacgagcgcaacccttgtccctatttgccagcgattcggtcgggaactctagggagactgccggtgacaaaccggaggaaggtggggacgacgtcaagtcatcatggcccttacgggtagggctacacacgtgctacaatggccggtacaaagggttgcgaagccgcgaggtgaagccaatcccagaaagccggcctcagtccggattggagtctgcaactcgactccatgaagtcggaatcgctagtaatcgtgcatcagaatggcacggtgaatacgttcccgggccttgtacacaccgcccgtcacaccatgggagtggactgcaccagaagtggttagcctaacttcggagggcgatcaccacggtgtggttcatgactggggtg

SEQ ID NO: 1086 - DNA, 1370 bp, Chroococcidiopsis cubana
agcttttcggagcttagtggcggacgggtgagtaacgcgtgagaatctgccttttggaccgggacaactgctggaaacggcagctaagaccggatgtgcccttgggtgaaatattcatagccaaaagaggagctcgcgaccgattagctagttggtggggtaagagcctaccaaggctgcgatcggtagccggtttgagaggacgaccggccacactgggactgagacacggcccagactcctacgggaggcagcagtggggaattttccgcaatgggcgaaagcctgacggagcaataccgcgtgagggaggaaggctcttgggtcgtaaacctcttttctcagggaagaagcaatgacggtacctgaggaatcagcatcggctaactccgtgccagcagccgcggtaatacggaggatgcaagcgttatccggaatgattgggcgtaaagcgtccgcaggtggcacatcaagtctgctgtcaaagcccccagcttaactgggaagaggcggtggaaactggtgagctagagagcaataggggtagagggaattcccggtgtagcggtgaaatgcgtagagatcgggaagaacaccagtggcgaaagcgctctactaggttgcaactgacactgagggacgaaagctaggggagcgaatgggattagataccccagtagtcctagccgtaaacgatggatactaggcgtttctcgtatcgacccgaggagttccggagccaacgcgttaagtatcccgcctggggagtacgcacgcaagtttgaaactcaaaggaattgacggggggccgcacaagcggtggagtatgttggttaattcgatgcaacgcgaagaaccttaccagggcttgacatgtctggaacccgtgggaaactatggggtgccgaaaggagccagaacacaggtggtgcatggctgtcgtcagctcgtgtcgtgagatgttgggttaagtcccgcaacgagcgcaaccctcgtgtttagttgccatcattcagttgggcactctagacagactgccggtgacaaaccggaggaaggtggggatgacgtcaagtcagcatgccccttacgtcctgggcgacacacgtactacaatgctacggacaacgggaagccaaccagcgatggggagcaaagcccagcaaaccgtagctcagttcagatcgcaggctgcaactcgcctgcgtgaaggcggaatcgctagtaatcgccggtcagcatacggcggtgaatacgttcccgggccttgtacacaccgcccgtcacaccatggaagttggccacgcccgaagtcattactctaaccattcgtggaggaggatgccgaaggagggctgatgactggggtg

SEQ ID NO: 1087 - DNA, 1443 bp, Chroococcidiopsis thermalis
gatgaacgctggcggtatgcttaacacatgcaagtcgaacggagcttttcggagcttagtggcggacgggtgagtaacgcgtgagaatctgccttttggaccgggacaactgctggaaacggcagctaagaccggatgtgcccttgggtgaaatattcatagccaaaagaggagctcgcgaccgattagctagttggtggggtaagagcctaccaaggctgcgatcggtagccggtttgagaggacgaccggccacactgggactgagacacggcccagactcctacgggaggcagcagtggggaattttccgcaatgggcgaaagcctgacggagcaataccgcgtgagggaggaaggctcttgggtcgtaaacctcttttctcagggaagaagcaatgacggtacctgaggaatcagcatcggctaactccgtgccagcagccgcggtaatacggaggatgcaagcgttatccggaatgattgggcgtaaagcgtccgcagttggcacatcaagtctgctgtcaaagcccccagcttaactgggaagaggcggtggaaactggtgagctagagagcaataggggtagagggaattcccggtgtagcggtgaaatgcgtagagatcgggaagaacaccagtggcgaagcgctctactaggttgcaactgacactgagggacgaaagctaggggagcgaatgggattagataccccagtagtcctagccgtaaacgatggatactaggcgtttctcgtatcgacccgaggagtgccggagccaacgcgttaagtatcccgcctggggagtacgcacgcaagtgtgaaactcaaaggaattgacgggggcctgcacaagcggtggagtatgtggtttaattcgatgcaacgcgaagaaccttaccagggcttgacatgtctggaacccgtgggaaactatggggtgccgaaaggagccagaacacaggtggtgcatggctgtcgtcagctcgtgtcgtgagatgttgggttaagtcccgcaacgagcgcaaccctcgtgtttagttgccatcattcagttgggcactctagacagactgccggtgacaaaccggaggaaggtggggatgacgtcaagtcagcatgccccttacgtcctgggcgacacacgtactacaatgctacggacaacgggaagccaaccagcgatggggagcaaagcccagcaaaccgtagctcagttcagatcgcaggctgcaactcgcctgcgtgaaggcggaatcgctagtaatcgccggtcagccatacggcggtgaatacgttcccgggccttgtacacaccgcccgtcacaccatggaagttggccacgcccgaagtcattactctaaccattcgtggaggaggatgccgaaggcagggctgatgactggggtgaagtcgtaacaaggtagccgtaccggaagg

SEQ ID NO: 1088 - DNA, 1413 bp, Chroogloeocystis siderophila
gatgaacgctggcggtatgcttaacacatgcaagtcgaacggtgtcttcggacatagtggcggacgggtgagtaacgcgtgagaatctggcttaaggacggggacaaccactggaaacggtggctaagacccgatatgccgagaggtgaaagtatttatagccttaaggggagctcgcgtctgattagctagttggtagggtaagagcttaccaaggcgacgatcagtagctggtctgagaggatgatcagccacactgggactgagacacggcccagactcctacgggaggcagcagtggggaattttccgcaatgggcgaaagcctgacggagcaataccgcgtgggggaggaaggctcttgggttgtaaactccttttctcagggaagaaaaaaatgacggtacctgaggaatcagcatcggctaactccgtgccagcagccgcggtaatacggaggatgcaagcgttatccggaatcattgggcgtaaagcgtccgcaggtggcacttcaagtctgctgtcaaaggtcggggcttaactccgaacaggcagtggaaactgaagcgctcgagtgcggtaggggcagagggaattcctggtgtagcggtgaaatgcgtagagatcaggaagaacaccggtggcgaaagcgctctgctaggccgcaactgacactcagggacgaaagctaggggagcgaatgggattagataccccagtagtcctagctgtaaacgatggatactaggcgttgcttgtatcgacccaagcagtgccgtagctaacgcgttaagtatcccgcctggggagtacgcacgcaagtgtgaaactcaaaggaattgacgggggcccgcacaagcggtggagtatgtggtttaattcgatgcaacgcgaagaaccttaccagggtttgacatgtccggaaccccgctgaaaggtgggggtgccttagggaaccggaacacaggtggtgcatggctgtcgtcagctcgtgtcgtgagatgttgggttaagtcccgcaacgagcgcaaccctcgtttttagttgccagcattaagttgggcactctagaaagactgccggtgacaaaccggaggaaggtggggatgacgtcaagtcagcatgccccttacgctctgggctacacacgtactacaatgctatggacaaagggcagcaagttagcgatgacaagcaaatcccataaaccatggctcagttcagatcgcaggctgcaactcgcctgcgtgaaggcggaatcgctagtaatcgccggtcagccatacggcggtgaatacgttcccgggccttgtacacaccgcccgtcacaccatggaagctggccacgcccgaagtcgttaccctaaccgcttgcggagggggacgccgaaggcagggctggtgactggggtg

SEQ ID NO: 1089 - DNA, 1480 bp, Chthoniobacter flavus
aacgaacgctggcggcgtggataagacatgcaagtcgaacgggatattatttgtagcaatacaagtgatgtccagtggcgtaagggtgcgtaacacgtgggcaatctgccgagaagtgggggatagctcgccgaaaggcgaattaataccgcatgtggttaggggagacatctctctgacaccaaagccggggcaacctggcgcttcttgatgagcccgcggcctatcagctagttggtgaggtaacggctcaccaaggctatgacgggtagctggtctgagaggacgaccagccacactggaactgagacacggtccagacacctacgggtggcagcagtcgagaatttttctcaatgggggaaaccctgaaggagcgacgccgcgtggaggatgaaggtcttcggattgtaaactcctgtcattagggaacaattgccggcaaataactactgccggcttgatagtacctgaagaggaagagacggctaactctgtgccagcagccgcggtaatacagaggtctcaagcgttgttcggattcattgggcgtaaagggtgcgtaggtggcgccataagtcaggtgtgaaatctcggggctcaaccccgaaactgcacttgatactgtggtgctggagtactggagaggagattggaatttacggtgtagcagtgaaatgcgtagatatcgtaaggaagaccagtggcgaaggcgaatctctggacagttactgacactgaggcacgaaggccaggggagcaaacgggattagataccccggtagtcctggcagtaaacggtgcgcgtttggtgtgggaggattcgaccccttctgtgccggagctaacgcgttaaacgcgccgcctggggagtacggtcgcaagattaaaactcaaagaaattgacgggggcccgcacaagcggtggagtatgtggcttaattcgatgcaacgcgaagaaccttacctagccttgacatgcatctctaagtcggtgaaagccggcgaccatagcaatatggaatttgcacaggtgctgcatggctgtcgtcagctcgtgtcgtgagatgttgggttaagtcccgcaacgagcgcaacccctgtgaactgttgccaccgatctacggatcgagcactctgttcagactgccctgtgaaacggggaggaaggtggggatgacgtcaagtcagcatggcccttacggctagggctgcacacgtactacaatgcccagtacagaacgaaccgaaaccgcgaggtggaggaaatccctaaaactgggctcaattcggattggaggctgcaactcgcctccatgaagccggaatcgctagtaatggcgtatcagctacgacgccgtgaatacgttcccgggccttgtacacaccgcccgtcacatcatggaagtcacttgtacccgaagtgcatgcgccaaccgcaaggaggcagtgccctaaggtatgggtggtaactgggatg

SEQ ID NO: 1090 - DNA, 1459 bp, Chthonomonas calidirosea
gacgaacgctagcggcgtgcctaagaaatgcaagtcgagcggggagagctccgcaaggggttcttctagcggcgaacggtcgcgtaacgcgtaggcaacctgccctaaagaccgggataacacctcgaaaggggtgctaataccggatggtgtcgtacggaggcatctttgtacgatgaaaaccgggcgaagagccacgggcttgaggaggggcctgcgtcctatcagctagatggtggggtaacggcctaccatggcgacgacgggtagctggtctgagaggatggtcagccggactgggactgagacacggcccagactcctacgggaggcagcaattagggatcttgcgcaatgggggaaaccctgacgcagcgacgccgcgtggaggaggaaggccttcgggttgtaaactccttttcttggggaagaaggaagtgacggtacccaaggaagaagccccggctaactccgtgccagcagccgcggtaagacggagggggcgagcgttgtccggatttactgggcgtaaagggcgcgtaggcgggggagcgcgtctactgtaaaagtttggggctcagccccaaaaggtcggtagatacggctcttcttgaagcagctagggggagatggaattaccggtggagcggtgaaatgcgtagagatcggtaggaacacccgtggcgaaggcggtctcctggggctgtcttgacgctgaggcgcgaaagctgggggagcgaacgggattagataccccggtagtcccagccctaaacgatggatactaggtgtcaggggtatcgactcctctggtgccgtcgctaacgcagtaagtatcccgcctggggagtacggccgcaaggttgaaactcaaaggaattgacgggggcccgcacaagcggtggagcatgttgtttaatacgtcacaaaccgtagaaccttaccagggcttgacatgcggcgcaccgtggtgagagccacgttctccgcaaggggacgccgacacaggtgttgcatggctgtcgtcagctcgtgtcgtgagatgttgggttaagtcccgcaacgagcgcaacccccatcccatgttgccatcgggtagtgccgggcactcttgggaaactgccggggtaactcggaggaaggtggggatgacgtcaagtcagcatggcccttacgccctgggctacaaacatgctacaatggacggtagacagagggttccgaactcgtgagggggaggcaatcccaaaaatccgtccacagttcagatcgcaggctgcaactcgcctgcgtgaagtcggaatcgctagtaaccgcagatcagcgaagctgcggtgaatacgttcccgggccttgtacacaccgcccgtcacgtcacctgagttgcctgcacccgaagtcggtggggcaaccccgcaaggggagctagccgccgaaggtgtggggagcgagggggacg

SEQ ID NO: 1091 - DNA, 1464 bp, Citrobacter pasteurii
attgaacgctggcggcaggcctaacacatgcaagtcgaacggtagcacagaggagcttgctccttgggtgacgagtggcggacgggtgagtaatgtctgggaaactgcccgatggagggggataactactggaaacggtagctaataccgcataacgtcgcaagaccaaagagggggaccttcgggcctcttgccatcggatgtgcccagatgggattagctagtaggtggggtaacggctcacctaggcgacgatccctagctggtctgagaggatgaccagccacactggaactgagacacggtccagactcctacgggaggcagcagtggggaatattgcacaatgggcgcaagcctgatgcagccatgccgcgtgtatgaagaaggccttcgggttgtaaagtactttcagcgaggaggaaggcgttgtggttaataaccgcagcgattgacgttactcgcagaagaagcaccggctaactccgtgccagcagccgcggtaatacggagggtgcaagcgttaatcggaattactgggcgtaaagcgcacgcaggcggtctgtcaagtcggatgtgaaatccccgggctcaacctgggaactgcatccgaaactggcaggctagagtcttgtagaggggggtagaattccaggtgtagcggtgaaatgcgtagagatctggaggaataccggtggcgaaggcggccccctggacaaagactgacgctcaggtgcgaaagcgtggggagcaaacaggattagataccctggtagtccacgccgtaaacgatgtcgacttggaggttgtgcccttgaggcgtggcttccggagctaacgcgttaagtcgaccgcctggggagtacggccgcaaggttaaaactcaaatgaattgacgggggcccgcacaagcggtggagcatgtggtttaattcgatgcaacgcgaagaaccttacctactcttgacatccacggaatttagcagagatgctttagtgccttcgggaaccgtgagacaggtgctgcatggctgtcgtcagctcgtgttgtgaaatgttgggttaagtcccgcaacgagcgcaacccttatcctttgttgccagcggtccggccgggaactcaaaggagactgccagtgataaactggaggaaggtggggatgacgtcaagtcatcatggcccttacgagtagggctacacacgtgctacaatggcatatacaaagagaagcgacctcgcgagagcaagcggacctcataaagtatgtcgtagtccggattggagtctgcaactcgactccatgaagtcggaatcgctagtaatcgtggatcagaatgccacggtgaatacgttcccgggccttgtacacaccgcccgtcacaccatgggagtgggttgcaaaagaagtaggtagcttaaccttcgggagggcgcttaccactttgtgattcatgactggggtg

SEQ ID NO: 1092 - DNA, 1464 bp, Citrobacter portucalensis
attgaacgctggcggcaggcctaacacatgcaagtcgaacggtagcacagaggagcttgctccttgggtgacgagtggcggacgggtgagtaatgtctgggaaactgcccgatggagggggataactactggaaacggtagctaataccgcataacgtcgcaagaccaaagagggggaccttcgggcctcttgccatcggatgtgcccagatgggattagctagtaggtggggtaacggctcacctaggcgacgatccctagctggtctgagaggatgaccagccacactggaactgagacacggtccagactcctacgggaggcagcagtggggaatattgcacaatgggcgcaagcctgatgcagccatgccgcgtgtatgaagaaggccttcgggttgtaaagtactttcagcgaggaggaaggtgttgtggttaataaccgcagcaattgacgttactcgcagaagaagcaccggctaactccgtgccagcagccgcggtaatacggagggtgcaagcgttaatcggaattactgggcgtaaagcgcacgcaggcggtctgtcaagtcggatgtgaaatccccgggctcaacctgggaactgcatccgaaactggcaggctagagtcttgtagaggggggtagaattccaggtgtagcggtgaaatgcgtagagatctggaggaataccggtggcgaaggcggccccctggacaaagactgacgctcaggtgcgaaagcgtggggagcaaacaggattagataccctggtagtccacgccgtaaacgatgtcgacttggaggttgtgcccttgaggcgtggcttccggagctaacgcgttaagtcgaccgcctggggagtacggccgcaaggttaaaactcaaatgaattgacgggggcccgcacaagcggtggagcatgtggtttaattcgatgcaacgcgaagaaccttacctactcttgacatccagagaacttagcagagatgctttggtgccttcgggaactctgagacaggtgctgcatggctgtcgtcagctcgtgttgtgaaatgttgggttaagtcccgcaacgagcgcaacccttatcctttgttgccagcggttaggccgggaactcaaaggagactgccagtgataaactggaggaaggtggggatgacgtcaagtcatcatggcccttacgagtagggctacacacgtgctacaatggcatatacaaagagaagcgacctcgcgagagcaagcggacctcataaagtatgtcgtagtccggattggagtctgcaactcgactccatgaagtcggaatcgctagtaatcgtggatcagaatgccacggtgaatacgttcccgggccttgtacacaccgcccgtcacaccatgggagtgggttgcaaaagaagtaggtagcttaaccttcgggagggcgcttaccactttgtgattcatgactggggtg

SEQ ID NO: 1093 - DNA, 1464 bp, Citrobacter rodentium
attgaacgctggcggcaggcctaacacatgcaagtcgaacggtaacaggaagcagcttgctgctttgctgacgagtggcggacgggtgagtaatgtctgggaaactgcccggtggagggggataactactggaaacggtagctaataccgcataacgtcgcaagaccaaagagggggaccttcgggcctcttgccaccggatgtgcccagatgggattagcttgttggtgaggtaacggctcaccaaggcgacgatccctagctggtctgagaggatgaccagccacactggaactgagacacggtccagactcctacgggaggcagcagtggggaatattgcacaatgggcgcaagcctgatgcagccatgccgcgtgtatgaagaaggccttcgggttgtaaagtactttcagcggggaggaagggattgtggttaataaccgcagtcattgacgttacccgcagaagaagcaccggctaactccgtgccagcagccgcggtaatacggagggtgcaagcgttaatcggaattactgggcgtaaagcgcacgcaggcggtctgtcaagtcggatgtgaaatccccgggctcaacctgggaactgcattcgaaactggcaggcttgagtctcgtagaggggggtggaattccaggtgtagcggtgaaatgcgtagagatctggaggaataccggtggcgaaggcggccccctggacgaagactgacgctcaggtgcgaaagcgtggggagcaaacaggattagataccctggtagtccacgccgtaaacgatgtctacttggaggttgtgcccctgaggcgtggcttccggagctaacgcgttaagtagaccgcctggggagtacggccgcaaggttaaaactcaaatgaattgacgggggcccgcacaagcggtggagcatgtggtttaattcgatgcaacgcgaagaaccttacctggtcttgacatccagagaactttccagagatggattggtgccttcgggaactctgagacaggtgctgcatggctgtcgtcagctcgtgttgtgaaatgttgggttaagtcccgcaacgagcgcaacccttatcctttgttgccagcggtccggccgggaactcaaaggagactgccagtgataaactggaggaaggtggggatgacgtcaagtcatcatggcccttacgaccagggctacacacgtgctacaatggcatatacaaagagaagcgacctcgcgagagcaagcggacctcataaagtatgtcgtagtccggattggagtctgcaactcgactccatgaagtcggaatcgctagtaatcgtggatcagaatgccacggtgaatacgttcccgggccttgtacacaccgcccgtcacaccatgggagtgggttgcaaaagaagtaggtagcttaacctccgggagggcgcttaccactttgtgattcatgactggggtg

SEQ ID NO: 1094 - DNA, 1462 bp, Citrobacter werkmanii
attgaacgctggcggcaggcctaacacatgcaagtcgaacggtagcacagagagcttgctctcgggtgacgagtggcggacgggtgagtaatgtctgggaaactgcccgatggagggggataactactggaaacggtagctaataccgcataatgtcgcaagaccaaagagggggaccttcgggcctcttgccatcggatgtgcccagatgggattagcttgtaggtggggtaacggctcacctaggcgacgatccctagctggtctgagaggatgaccagccacactggaactgagacacggtccagactcctacgggaggcagcagtggggaatattgcacaatgggcgcaagcctgatgcagccatgccgcgtgtatgaagaaggccttcgggttgtaaagtactttcagcgaggaggaaggtgttgtggttaataaccacagcaattgacgttactcgcagaagaagcaccggctaactccgtgccagcagccgcggtaatacggagggtgcaagcgttaatcggaattactgggcgtaaagcgcacgcaggcggtctgtcaagtcggatgtgaaatccccgggctcaacctgggaactgcatccgaaactggcaggctagagtcttgtagaggggggtagaattccaggtgtagcggtgaaatgcgtagagatctggaggaataccggtggcgaaggcggccccctggacaaagactgacgctcaggtgcgaaagcgtggggagcaaacaggattagataccctggtagtccacgccgtaaacgatgtcgacttggaggttgtgcccttgaggcgtggcttccggagctaacgcgttaagtcgaccgcctggggagtacggccgcaaggttaaaactcaaatgaattgacgggggcccgcacaagcggtggagcatgtggtttaattcgatgcaacgcgaagaaccttacctactcttgacatccagagaacttagcagagatgctttggtgccttcgggaactctgagacaggtgctgcatggctgtcgtcagctcgtgttgtgaaatgttgggttaagtcccgcaacgagcgcaacccttatcctttgttgccagcggttaggccgggaactcaaaggagactgccagtgataaactggaggaaggtggggatgacgtcaagtcatcatggcccttacgagtagggctacacacgtgctacaatggcatatacaaagagaagcgacctcgcgagagcaagcggacctcataaagtatgtcgtagtccggattggagtctgcaactcgactccatgaagtcggaatcgctagtaatcgtggatcagaatgccacggtgaatacgttcccgggccttgtacacaccgcccgtcacaccatgggagtgggttgcaaaagaagtaggtagcttaaccttcgggagggcgcttaccactttgtgattcatgactggggtg

SEQ ID NO: 1095 - DNA, 1524 bp, Cloacamonas acidaminovorans
gacgaacgctggcggcgtggattaggcatgcaagtcgaacggtataaacctttcggggtttagagagtggcgaacgggtgagtaacacgtaggtaatctaccctcaaaacggggacaacccagggaaacttgggctaataccggatgcgtgcaagcaatgttttggctgttaatgctattcacggaagtgagtagtgttaatggttgagagcattatttgcataaaaggtggcatttgctgccgtttgaggatgagcctgcgtcctattagttagttggtgaggtaatggcttaccaaggcgatgataggtaggcggccttaacgggtggtcgcccacactgggattgagagacggcccagactcctacgggaggcagcagtcgagaatagtctacaatggacggaagtctgatagtgcgacgccgcgtgaacgaagaatcccttcggggtgtaaagttcttttatatgtgagcagtgccctttatattaatagtatagagggagggatttaagcgtatgaataagcaacggctaactccgtgccagcagccgcggtaacacgggggttgcaagcgttgtccggaattactaggcgtaaagtgcaggtaggcggatagataagtttaaggttaaaggctacggcttacccgtagtaaggcgttagatactgtttatctggaatgcggttgagggagacagaattcctggtgtagcggtggaatgcgcagagatcaggaggaataccgaaggcgaaggcagtcttctaagccgatattgacgctaaactgcgaaggtgtggggatcaaacaggattagataccctggtagtccacacagtaaacgataatcactaggtgttgggttcgtataggactcggtgccggagctaacgcgataagtgattcgcctggggagtacgatcgcaaggttgaaactcaaaggaattgacgggggcccgcacaagcggtggagcatgtggtttaattcgacgcaacgcgaagaaccttacccggtcttgacatctgcagaattcttcagagatggaggagtgccggtttgccggagctgcaagacaggtgctgcatggctgtcgtcagctcgtgtcgtgagatgttgggttaagtcccgcaacgagcgcaacccctgctttcagttgccatcattaagttggggactctggaaggaccgctgcggtaacaacgcagaggaagatggggacgaggtcaagtcatcatggtccttatgaccggggctacacacgtgctacaatggtagttacagaggggagcgaagcagtgatgtggagcgaatctcagaaaagctacccaagttcggattgaggtctgcaactcgacctcatgaagccggaatcgctagtaatcgcgcaacatcatggtgcggtgaatacgttcccgggccttgtacacaccgcccgtcaagtcagccgagtggagtgcacccgaaggaggtgagctaacccgtgagggaagcagctttcgaaggtgtgctttgcgaggaggact

SEQ ID NO: 1096 - DNA, 1562 bp, Clostridium aceticum
gatgaacgctggcggcgtgcctaacacatgcaagtcgagcgaggcaaatatctaacattgagtacttgagagataagggagaaagagaggcagcgttaagcaggcctgtagaccctttgtgagcaaaggctagctttacgccataaagtgccaacacatgatgagaatcgagtattgaatgttagatatttgcctagcggcggacgggtgagtaacgcgtgggtaacctaccttgtacagggggataacagtcggaaacgattgctaataccgcataaagctattctaaggcatcttagaatagccaaagatttattggtacaagatgggcccgcgtctgattagctagttggtggggtaaaggcctaccaaggcgacgatcagtagccgacctgagagggtgaccggccacactggaactgagacacggtccagactcctacgggaggcagcagtgggggatattgcacaatgggggaaaccctgatgcagcgacgccgcgtgagcgatgaaggccttcgggtcgtaaagctctgtttcgagggaagataatgacggtacctcgggaggaagccccggctaactacgtgccagcagccgcggtaatacgtagggggcaagcgttatccggaatcactgggcgtaaagggtgcgtaggcggccaataaagtctagggtgaaaggctacggctcaaccgtagtaagccttagaaacttattggcttgagtgcaggagaggagagtggaattcctagtgtagcggtgaaatgcgtagatattaggaggaacaccagtggcgaaggcgactctctggactgtaactgacgctgaggcacgaaagcgtggggagcgaacaggattagataccctggtagtccacgccgtaaacgatgagtgctaggtgttgggggtcaaacctcagtgccgcagctaacgcattaagcactccgcctggggagtacgcacgcaagtgtgaaactcaaaggaattgacggggacccgcacaagcagcggagcatgtggtttaattcgaagcaacgcgaagaaccttacctggacttgacatccttttgaccgctttttaacagaagttttcccttcggggacagaagtgacaggtggtgcatggttgtcgtcagctcgtgtcgtgagatgttgggttaagtcccgcaacgagcgcaacccttgtctttagttgccagcatttcggatgggcactctagagagactgccggggataactcggaggaaggtggggatgacgtcaaatcatcatgccccttatgttcagggctacacacgtgctacaatggccgatacaaagggcagcgaaggagtaatctggagcgaatctcataaagtcggtctcagttcggattgtgggctgaaactcgcccacatgaagtcggagttgctagtaatcgcgaatcagaatgtcgcggtgaatgcgttcccgggtcttgtacacaccgcccgtcacaccacgggagtcggaagcgcccgaagccagctgctcaaccgtaaggggagagctgtcgaaggtgaagccgatgactggggtg

SEQ ID NO: 1097 - DNA, 1428 bp, Clostridium acetobutylicum
gacgaacgctggcggcgtgcttaacacatgcaagtcgagcggggaacttcggttcccagcggcggacgggtgagtaacacgtgggtaacctacctcatagtggggaatagcctttcgaaaggaagattaataccgcataatactcgagaatcgcatgattcttgagccaaaggatttattcgctatgagatggacccgcggcgcattagcttgttggtgaggtaacggctcaccaaggcttcgatgcgtagccgacctgagagggtgatcggccacattggaactgagacacggtccagactcctacgggaggcagcagtggggaatattgcacaatgggggaaaccctgatgcagcaacgccgcgtgagtgatgaaggtcttcggatcgtaaaactctgtcttatgggacgataatgacggtaccataggaggaagccacggctaactacgtgccagcagccgcggtaatacgtaggtggcaagcgttgtccggatttactgggcgtaaaggatgtgtaggcggatatttaagtgagatgtgaaatccccgggcttaacttgggggctgcatttcaaactggatgtctggagtgcaggagaggaaggcagaattcctagtgtagcggtgaaatgcgtagagattaggaagaataccagtggcgaaggcggccttctggactgtaactgacgctgaggcatgaaagcgtggggagcaaacaggattagataccctggtagtccacgccgtaaacgatgaatactaggtgtaggaggtatcgactccttctgtgccgcagttaacacaataagtattccgcctgggaagtacggtcgcaagattaaaactcaaaggaattgacggggacccgcacaagcagcggagcatgtggtttaattcgaagcaacgcgaagaaccttacctagacttgacatctcctgaattagtccgtaatggatgaagtcccttcggggacaggatgacaggtggtgcatggttgtcgtcagctcgtgtcgtgagatgttgggttaagtcccgcaacgagcgcaacccttatcattagttgctaacatttagttgagcactctagtgagactgcccgggttaaccgggaggaaggtggggatgacgtcaaatcatcatgccccttatgtctagggctacacacgtgctacaatggtggggacaaaaagatgcaataccgcaaggtggagcaaaactcaaaaccccatcccagttcggattgtaggctgaaactcgcctacatgaagccggagttgctagtaatcgcgaatcagaatgtcgcggtgaatacgttcccgggtcttgtacacaccgcccgtcacaccatgagagtcggcaacacccgaagcccgtgaggtaaccttttggaaccagcggtcgaaggtggggttgataattggggtg

SEQ ID NO: 1098 - DNA, 1419 bp, Clostridium acidisoli
gacgaacgctggcggcgtgcttaacacatgcaagtcgagcgagaaaccttcgggtttctagcggcggacgggtgagtaacacgtgggtaacctgcctcaaagtgggggatagccttccgaaaggaagattaataccgcataacattgtacgttcgcatgaagcaataattaaaggagtaatccgctttgagatggacccgcggcgcattagctagttggagaggtaacggctcaccaaggcaacgatgcgtagccgacctgagagggtgatcggccacattggaactgagacacggtccagactcctacgggaggcagcagtggggaatattgcacaatgggcgaaagcctgatgcagcaacgccgcgtgagtgatgaaggtcttcggattgtaaagctctgtcttttgggacgataatgacggtaccaaaggaggaagccacggctaactacgtgccagcagccgcggtaatacgtaggtggcaagcgttgtccggaattactgggcgtaaaggatgtgtaggcggatatttaagtgagatgtgaaatccccgagctcaacttgggggctgcatttcaaactgggtatctagagtgcaggagaggaaagcggaattcctagtgtagccgtgaaatgcgtagagattaggaagaacatcagtgccgaaggcggctttctggactgtaactgacgctgaggcatgaaagcgtggggagcaaacaggattagataccctggtagtctacgccgtaaacgatgagtactaggtgtaggaggtatcgactccttctgtgccgcagttaacacaataagtactccgcctgggaagtacggtcgcaagattaaaactcaaaggaattgacgggggcccgcacaagcagcggagcatgtggtttaattcgaagcaacgcgaagaaccttacctagacttgacatcccctgaataacgtagagatacgcgaagcccttcggggcagggagacaggtggtgcatggttgtcgtcagctcgtgtcgtgagatgttgggttaagtcccgcaacgagcgcaacccttatcattagttgctaccatttagttgagcactctagtgagactgcccgggttaaccgggaggaaggcggggatgacgtcaaatcatcatgccccttatgtctagggctacacacgtgctacaatggtgagaacaacgagatgcaataccgcgaggtggagcaaaacttcaaaactcatctcagttcggattgtaggctgaaactcgcctacatgaagttggagttgctagtaatcgcgaatcagaatgtcgcggtgaatacgttcccgggccttgtacacaccgcccgtcacaccatgagagctggtaacacccgaagtccgtgaggtaacctttattggggccagcggccgaaggtgggattag

SEQ ID NO: 1099 - DNA, 1453 bp, Clostridium algidixylanolyticum
gatgaacgctggcggcgtgcttaacacatgcaagtcgagcgaagcgattttaaggaagccttcgggtggaattagaattgacttagcggcggacgggtgagtaacgcgtgggtaacctgcctcatacagggggataacagttagaaatgactgctaataccgcataagcgcacagtgctgcatagcacagtgtgaaaaactccggtggtatgagatggacccgcgtctgattaggtagttggtgaggtaacggcccaccaagccgacgatcagtagccgacctgagagggtgaccggccacattgggactgagacacggcccaaactcctacgggaggcagcagtggggaatattggacaatgggggaaaccctgatccagcgacgccgcgtgactgaagaagtatttcggtatgtaaaggtctatcagcagggaagaaaatgacggtacctgactaagaagccccggctaactacgtgccagcagccgcggtaatacgtagggggcaagcgttatccggatttactgggtgtaaagggagcgtagacggctctgcaagtctggagtgaaagcccggggctcaaccccgggactgctttggaaactgtggagctagagtgcaggagaggtaagtggaattcctagtgtagcggtgaaatgcgtagatattaggaggaacaccagtggcgaaggcggcttactggactgtaactgacgttgaggctcgaaagcgtggggagcaaacaggattagataccctggtagtccacgccgtaaacgatgaatactaggtgtcggggagcaaagctcttcggtgccgtcgctaacgcaataagtattccacctggggagtacgttcgcaagaatgaaactcaaaggaattgacggggacccgcacaagcggtggagcatgtggtttaattcgaagcaacgcgaagaaccttaccaagtcttgacatcggaatgacagccttataactaaggtctccctacggggcattctagacaggtggtgcatggttgtcgtcagctcgtgtcgtgagatgttgggttaagtcccgcaacgagcgcaacccttatccttagtagccagcagttcggctgggcactctggggagactgccagggataacctggaggaaggtggggatgacgtcaaatcatcatgccccttatgatttgggctacacacgtgctacaatggcgtaaacaaagggaagcgaaggagcgatctggagcaaaccccaaaaataacgtctcagttcggattgtagtctgcaactcgactacatgaagctggaatcgctagtaatcgcagatcagaatgctgcggtgaatacgttcccgggtcttgtacacaccgcccgtcacaccatgggagttggtaacgcccgaagtcagtgacccaaccgtaaggagggagctgccgaaggcgggactgataactggggtg

SEQ ID NO: 1100 - DNA, 1347 bp, Clostridium arbusti
ttcgggtttctagcggcggacgggtgagtaacacgtgggtaacctacctcaaagaggggaatagcctcccgaaagggagattaataccgcataatatcatagcttcgcatgaagcaatgattaaaggagtaatccgctttgagatggacccgcggcgcattagctagttggagaggtaacggctcaccaaggcaacgatgcgtagccgacctgagagggtgatcggccacattggaactgagacacggtccagactcctacgggaggcagcagtggggaatattgcacaatgggcgaaagcctgatgcagcaacgccgcgtgagtgatgacggtcttcggattgtaaagctctgtcttttgggacgataatgacggtaccaaaggaggaagccacggctaactacgtgccagcagccgcggtaatacgtaggtggcaagcgttgtccggatttactgggcgtaaaggatgtgtaggcggacatttaagtgagatgtgaaagccccgagctcaacttggggactgcatttcaaactgggtgtctagagtgcaggagaggaaagcggaattcctagtgtagcggtgaaatgcgtagagattaggaagaacatcagtggcgaaggcggctttctggactgtaactgacgctgaggcatgaaagcgtggggagcaaacaggattagataccctggtagtccacgccgtaaacgatgagtactaggtgtaggaggtatcgactccttctgtgccgcagttaacacaataagtactccgcctgggaagtacggtcgcaagattaaaactcaaaggaattgacgggggcccgcacaagcagcggagcatgtggtttaattcgaagcaacgcgaagaaccttacctagacttgacatctcctgaatagcgtagagatacgtgaagcccttcggggcaggaagacaggtggtgcatggttgtcgtcagctcgtgtcgtgagatgttgggttaagtcccgcaacgagcgcaacccttatcattagttgctaccattaagttgagcactctagtgagactgcccgggttaaccgggaggaaggcggggatgacgtcaaatcatcatgccccttatgtctagggctacacacgtgctacaatggtgagaacaacgagatgcaataccgcgaggtggagccaaacttgaaaactcatcccagttcggattgtaggctgaaattcgcctacatgaagttggagttgctagtaatcgcgaatcagaatgtcgcggtgaatacgttcccgggccttgtacacaccgcccgtcacaccatgagagctggtaacacccgaagtccgtgaggtaacctttataggg

SEQ ID NO: 1101 - DNA, 1434 bp, Clostridium argentinense
gacgaacgctggcggcgtgcctaacacatgcaagtcgagcgatgaagcttccttcgggaagtggattagcggcggacgggtgagtaacacgtgggtaacctgcctctaagaggggaatagcctcccgaaagggagattaataccgcataaagtatgaaggtcgcatgacttttataccaaaggagtaatccgctatgagatggacccgcggcgcattagctagttggtgaggtaagggctcaccaaggcaacgatgcgtagccgacctgagagggtgatcggccacattggaactgagacacggtccagactcctacgggaggcagcagtggggaatattgcgcaatgggggaaaccctgacgcagcaacgccgcgtgaatgaagaaggccttagggttgtaaagttctgtcatatgggaagataatgacggtaccatatgaggaagccacggctaactacgtgccagcagccgcggtaatacgtaggtggcaagcgttgtccggatttactgggcgtaaaggatgcgtaggcggacatttaagtcagatgtgaaatacccgggctcaacttgggtgctgcatttgaaactgggtgtctagagtgcaggagaggaaagcggaattcctagtgtagcggtgaaatgcgtagagattaggaagaacaccagtggcgaaggcggctttctggactgtaactgacgctgaggcatgaaagcgtggggagcaaacaggattagataccctggtagtccacgccgtaaacgatgaatactaggtgtaggaggtatcgaccccttctgtgccgcagttaacacaataagtattccgcctggggagtacgatcgcaagattaaaactcaaaggaattgacgggggcccgcacaagcagcggagcatgtggtttaattcgaagcaacgcgaagaaccttacctagacttgacatcccctgaattacctgtaatgagggaagcccttcggggcagggagacaggtggtgcatggttgtcgtcagctcgtgtcgtgagatgttgggttaagtcccgcaacgagcgcaacccttatcattagttgctaccattaagttgagcactctagtgagactgcccgggttaaccgggaggaaggtggggatgacgtcaaatcatcatgccccttatgtctagggctacacacgtgctacaatggttggtacaacaagatgcaagaccgcgaggtggagctaaacttaaaaaaccaacccagttcggattgtaggctgaaactcgcctacatgaagccggagttgctagtaatcgcgaatcagcatgtcgcggtgaatacgttcccgggccttgtacacaccgcccgtcacaccatgagagctggtaacacccgaagtccgtgaggtaaccgtaaggagccagcgccgaaggtgggattagtgattggggtg

SEQ ID NO: 1102 - DNA, 1434 bp, Clostridium beijerincki; identical to SEQ ID NO: 182

SEQ ID NO: 1103 - DNA, 1436 bp, Clostridium bornimense
gacgaacgctggcggcgtgcttaacacatgcaagtcgagcgaacaaagctccttcgggagtggagttagcggcggacgggtgagtaacacgtgggtaacctgccttatagagggggatagccttccgaaaggaagattaataccgcataagaagtagaagtcgcatggctttagctttaaaggagcaatccgctataagatggacccgcggcgcattagctagttggtgaggtaacggctcaccaaggcgacgatgcgtagccgacctgagagggtgatcggccacattggaactgagacacggtccagactcctacgggaggcagcagtggggaatattgcacaatgggcgaaagcctgatgcagcaacgccgcgtgggtgatgaaggttttcggatcgtaaagccctgtcttttgggacgataatgacggtaccaaaggaggaagccacggctaactacgtgccagcagccgcggtaatacgtaggtggcaagcgttgtccggatttactgggcgtaaagggagcgtaggcggacctttaagtgagatgtgaaatacccgagctcaacttgggtgctgcatttcaaactggaggtctagagtgtcggagaggtaagtggaattcctagtgtagcggtgaaatgcgtagagattaggaagaaccccggtggcgaaggcgacttactggacgataactgacgctgaggctcgaaagcgtggggagcaaacaggattagataccctggtagtccacgccgtaaacgatgaatactaggtgtgggggttgtcatgacctccgtgccgtcgcaaacgcattaagtattccgcctggggagtacggtcgcaagattaaaactcaaaggaattgacgggggcccgcacaagcagcggagcatgtggtttaattcgaagcaacgcgaagaaccttacctagacttgacatctcctgaattactcttaatcgaggaagtcccttcggggacaggaagacaggtggtgcatggttgtcgtcagctcgtgtcgtgagatgttgggttaagtcccgcaacgagcgcaacccttattgttagttgctaccattaagttgagcactctagcaagactgccgtggttaacgcggaggaaggtggggatgacgtcaaatcatcatgccccttatgtctagggctacacacgtgctacaatggtgagtacaaagagacgcaaaaccgtgaggtggagcaaaactcaaaaactcatcccagttcggattgtaggctgcaactcgcctacatgaagttggagttgctagtaatcgcgaatcagaatgtcgcggtgaatacgttcccgggccttgtacacaccgcccgtcacaccatgagagctggtaacacccgaagtccgtgaggtaaccgcaaggagccagcggccgaaggtgggattagtgattggggtg

SEQ ID NO: 1104 - DNA, 1437 bp, Clostridium cellulovorans
gacgaacgctggcggcgtgcttaacacatgcaagtcgagcgatgaagcccttcggggtggattagcggcggacgggtgagtaacacgtgggcaacctgccttatagagggggatagccttccgaaaggaagattaataccgcataaaatgcaattctcgcatgagagatgtatcaaaggagcaatccgctataagatgggcccgcggcgcattagctagttggtgaggtaacggctcaccaaggcgacgatgcgtagccgacctgagagggtgatcggccacattggaactgagacacggtccagactcctacgggaggcagcagtggggaatattgcacaatgggggaaaccctgatgcagcaacgccgcgtgagtgatgaaggccttcgggttgtaaagctctttgattagggacgataatgacggtacctaaagaacaagccacggctaactacgtgccagcagccgcggtaatacgtaggtggcaagcgttgtccggatttactgggcgtaaaggatgtgtaggcggatttttaagtgagatgtgaaatacccgagctcaacttgggtgctgcatttcaaactggaagtctagagtgcaggagaggaaagtggaattcctagtgtagcggtgaaatgcgtagagattaggaagaacatcagtggcgaaggcgactttctggactgtaactgacgctgaggcatgaaagcgtggggagcaaacaggattagataccctggtagtccacgccgtaaacgatgaatactaggtgtaggggttgtcatgacctctgtgccgccgctaacgcattaagtattccgcctggggagtacggtcgcaagattaaaactcaaaggaattgacgggggcccgcacaagcagcggagcatgtggtttaattcgaagcaacgcgaagaaccttacctagacttgacatctcctgaattacccgtaactggggaagttacctctttgaggtgacaggaagacaggtggtgcatggttgtcgtcagctcgtgtcgtgagatgttgggttaagtcccgcaacgagcgcaacccttattgttagttgctaccatttagttgagcactctagcaagactgcctgggttaaccaggaggaaggtggggatgacgtcaaatcatcatgccccttatgtctagggctacacacgtgctacaatggcgagtacaacgagacgcaagaccgtgaggtggagcaaatctataaaactcgtcccagttcggattgtaggctgaaactcgcctacatgaagttggagttgctagtaatcgcgaatcagcatgtcgcggtgaatacgttcccgggccttgtacacaccgcccgtcacaccatgagagtcggcaacacccgaagtccgtgaggtaaccgtaaggagccagcggccgaaggtggggtcgatgattggggtg

SEQ ID NO: 1105 - DNA, 1432 bp, Clostridium chromiireducens
gacgaacgctggcggcgtgcttaacacatgcaagtcgagcgatgaagttccttcgggaacggattagcggcggacgggtgagtaacacgtgggtaacctgcctcatagaggggaatagcctttcgaaaggaagattaataccgcataagattgtagtttcgcatgaaacagcaattaaaggagtaatccgctatgagatggacccgcgtcgcattagctagttggtgaggtaacggctcaccaaggcgacgatgcgtagccgacctgagagggtgatcggccacattgggactgagacacggcccagactcctacgggaggcagcagtggggaatattgcacaatgggggaaaccctgatgcagcaacgccgcgtgagtgatgacggtcttcggattgtaaaactctgtctttggggacgataatgacggtacccaaggaggaagccacggctaactacgtgccagcagccgcggtaatacgtaggtggcaagcgttgtccggatttactgggcgtaaagggagcgtaggtggatatttaagtgggatgtgaaatactcgggcttaacctgagtgctgcattccaaactggatatctagagtgcaggagaggaaagtagaattcctagtgtagcggtgaaatgcgtagagattaggaagaataccagtggcgaaggcgactttctggactgtaactgacactgaggctcgaaagcgtggggagcaaacaggattagataccctggtagtccacgccgtaaacgatgagtactaggtgtaggggttgtcatgacctctgtgccgccgctaacgcattaagtattccgcctggggagtacggtcgcaagattaaaactcaaaggaattgacgggggcccgcacaagcagcggagcatgtggtttaattcgaagcaacgcgaagaaccttacctagacttgacatctcctgaattacccttaatcggggaagcccttcggggcaggaagacaggtggtgcatggttgtcgtcagctcgtgtcgtgagatgttgggttaagtcccgcaacgagcgcaacccttattgttagttgctaccatttagttgagcactctagcgagactgcccgggttaaccgggaggaaggtggggatgacgtcaaatcatcatgccccttatgtctagggctacacacgtgctacaatggctggtacagagagatgctaaaccgcgaggtggagccaaacttcaaaaccagtctcagttcggattgtaggctgaaactcgcctacatgaagctggagttgctagtaatcgcgaatcagaatgtcgcggtgaatacgttcccgggccttgtacacaccgcccgtcacaccatgagagttggcaatacccaaagttcgtgagctaaccgtaaggaggcagcgacctaaggtagggtcagcgattggggtg

SEQ ID NO: 1106 - DNA, 1568 bp, Clostridium clariflavum
gacgaacgctggcggcgtgcctaacacatgcaagtcgagcggtcctgcattcaacattgagtattcagctgacgttggagattgagccggcgtcaagcagaaacaaccatatactatgatatgtttaaagtttctgcttcacgctgaataaagtgccaacacaaaaaggagctgagtattgaatgttgaatgcaggatagcggcggacgggtgagtaacgcgtgggtaatctgcctcacacagggggataacactgggaaactagtgctaataccgcataacataacgaggtggcatcactttgttatcaaaggagcaatccggtgtgagatgagcccgcgtccgattagctagttggtgaggtaacggctcaccaaggcgacgatcggtagccgaactgagaggttgatcggccacattgggactgagacacggcccagactcctacgggaggcagcagtggggaatattgcgcaatgggggaaaccctgacgcagcaacgccgcgtgaaggaagaaggtcttcggattgtaaacttctttggttggggacgataatgacggtacccaaggaacaagccacggctaactacgtgccagcagccgcggtaatacgtaggtggcgagcgttgtccggaattactgggtgtaaagggcgcgtaggcggggatgcaagtcagatgtgaaattccggggctcaaccccggcgctgcatctgaaactgtatttcttgagtgctggagaggaaagcggaattcctagtgtagcggtgaaatgcgtagagattaggaggaacaccagtggcgaaggcggctttctggacagtaactgacgctgaggcgcgaaagcgtggggagcaaacaggattagataccctggtagtccacgccgtaaacgatggatactaggtgtaggaggtatcgaccccttctgtgccggagttaacacaataagtatcccacctggggagtacggccgcaaggttgaaactcaaaggaattgacgggggcccgcacaagcagtggagtatgtggtttaattcgaagcaacgcgaagaaccttaccagggcttgacatccctctgacagctctagagatagggcttctcttcggagcagaggagacaggtggtgcatggttgtcgtcagctcgtgtcgtgagatgttgggttaagtcccgcaacgagcgcaacccttgttgttagttgccatcattaagttgggcactctaacgagactgccggtgataaatcggaggaaggtggggacgacgtcaaatcatcatgccccttatgtcctgggctacacacgtactacaatggctgctacaaagggaagcgagaccgtgaggtggagcaaatccccaaaagcagtcccagttcagattgcaggctgaaactcgcctgcatgaagtcggaattgctagtaatggcaggtcagcatactgccgtgaatacgttcccgggccttgtacacaccgcccgtcacaccatgagagtctgcaacacccgaagtcagtagtctaaccgagaggagggcgctgccgaaggtggggcagatgattggggtg

SEQ ID NO: 1107 - DNA, 1449 bp, Clostridium cocleatum
gatgaacgctggcggcgtgcctaatacatgcaagtcgaacgcgggcacttgtgcccgagtggcgaacgggtgagtaatacataagtaacctggcctttacagggggataactgctggaaacggtagctaagaccgcataggtagggacactgcatggtgaccgtattaaaagtgctgcaaggcactggtagaggatggacttatggcgcattagctggttggtgaggtaacggctcaccaaggcgacgatgcgtagccgacctgagagggtgaccggccacactgggactgagacacggcccagactcctacgggaggcagcagtagggaattttcggcaatggggggaaccctgaccgagcaacgccgcgtgaaggaagaaggaattcgttctgtaaacttctgttataaaggaagaaaggcggatggaggaaatgacatccgagtgacggtactttatgagaaagccacggctaactacgtgccagcagccgcggtaatacgtaggtggcaagcgttatccggaattattgggcgtaaagagggagcaggcggcagcaaaggtctgtggtgaaagactgaagcttaacttcagtaagccatagaaaccaggcagctagagtgcaggagaggatcgtggaattccatgtgtagcggtgaaatgcgtagatatatggaggaacaccagtggcgaaggcgacgatctggcctgtaactgacgctcagtcccgaaagcgtggggagcaaataggattagataccctagtagtccacgccgtaaacgatgagtactaagtgttggaagtcaaatttcagtgctgcagttaacgcagtaagtactccgcctgagtagtacgttcgcaagaatgaaactcaaaggaattgacgggggcccgcacaagcggtggagcatgtggtttaattcgaagcaacgcgaagaaccttaccaggtcttgacatactcataaaggatccagagatggatagatagttatatgagatacaggtggtgcatggttgtcgtcagctcgtgtcgtgagatgttgggttaagtcccgcaacgagcgcaacccttatcgttagttaccatcattaagttggggactctagcgagactgccagtgacaagctggaggaaggcggggatgacgtcaaatcatcatgccccttatgacctgggctacacacgtgctacaatggatggtgcagagggaagcgaagccgcgaggcgaagcaaaacccataaaaccattctcagttcggattgtagtctgcaactcgactacatgaagttggaatcgctagtaatcgcgaatcagcatgtcgcggtgaatacgttctcgggccttgtacacaccgcccgtcacaccatgagagttgataacacccgaagccggtggcctaaccgaaaggaaggagctgtctaaggtgggattgatgattggggtg

SEQ ID NO: 1108 - DNA, 1481 bp, Clostridium combesii
  misc_feature (132)..(132): n is a, c, g, or t
  misc_feature (173)..(173): n is a, c, g, or t
  misc_feature (199)..(199): n is a, c, g, or t
  misc_feature (268)..(268): n is a, c, g, or t
  misc_feature (306)..(306): n is a, c, g, or t
  misc_feature (308)..(308): n is a, c, g, or t
  misc_feature (316)..(316): n is a, c, g, or t
  misc_feature (328)..(328): n is a, c, g, or t
  misc_feature (331)..(331): n is a, c, g, or t
  misc_feature (355)..(356): n is a, c, g, or t
  misc_feature (454)..(454): n is a, c, g, or t
  misc_feature (513)..(513): n is a, c, g, or t
  misc_feature (528)..(528): n is a, c, g, or t
  misc_feature (533)..(533): n is a, c, g, or t
  misc_feature (632)..(632): n is a, c, g, or t
  misc_feature (655)..(655): n is a, c, g, or t
  misc_feature (720)..(721): n is a, c, g, or t
  misc_feature (921)..(921): n is a, c, g, or t
  misc_feature (933)..(933): n is a, c, g, or t
  misc_feature (955)..(956): n is a, c, g, or t
  misc_feature (1012)..(1013): n is a, c, g, or t
  misc_feature (1041)..(1041): n is a, c, g, or t
  misc_feature (1084)..(1084): n is a, c, g, or t
  misc_feature (1087)..(1088): n is a, c, g, or t
  misc_feature (1120)..(1121): n is a, c, g, or t
  misc_feature (1142)..(1142): n is a, c, g, or t
  misc_feature (1157)..(1157): n is a, c, g, or t
  misc_feature (1316)..(1316): n is a, c, g, or t
  misc_feature (1400)..(1400): n is a, c, g, or t
tttcattggagagtttgatcctggctcaggacgaacgctggcggcgtgcttaacacatgcaagtcgaacggtaaggccctttcgggggtacacgagtggcgaacgggtgagtaacacgtgagtaacctgccnacttcttcgggataacgctaggaaactggtgctaataccgnatatgagctttcaccgcatggtgggngttggaaagtgtttgtggtggtggatggactcgcggcctatcagcttgttggtgaggtagtggctcacnaaggcggtgacgggtagccggcctgagagggtgaccgncnacattggnactgagatacgnccnagactcctacgggaggcagcagtnnggaatattgcacaatgggcggaagcctgatgcagcaacgccgcgtgcgggatgacggccttcgggttgtaaaccgctttcaccaggggcgaaggcatncttttggggtgttgacggtacctggagaagaagcaccggctaactacgtgccagcagcngcggtgatacgtagngtgcnagcgttgtccggatttattgggcgtaaagggctcgtaggcggttgatcgcgtcggaagtgaaaacttggggcttaaccctgagcgtgctttcgatacgngttgacttgaggaaggtaggggngaatggaattcctggtggagcggtggaatgcgcagatatcaggaggaacaccagtggcgaaggcnnttctctggacctttcctgacgctgaggagcgaaagcgtggggagcaaacaggcttagataccctggtagtccacgctgtaaacggtgggtactaggtgtggggtccattccacggattccgtgccgtagctaacgcattaagtaccccgcctggggagtacggccgcaaggctaaaactcaaaggaattgacggggcccngcacaagcggcngagcatgcggattaattcgatnnaacgcgaagaaccttacctgggtttgacatggattggtaacggtcagagatggccnncccccttgtgggccggttcacaggtggngcatggctgtcgtcagctcgtgtcgtgagatgttgggttaagnccnncaacgagcgcaaccctcttccactgttgccannatttggttggggactcagtgnagaccgccggggtcnactcggaggaaggtggggatgacgtcaagtcatcatgccccttatgtccagggcttcacgcatgctacaatggccggtacaaagagtggcgacatcgtgaggtggagcgaatctcagaaagccggtctcagttcggattggggtctgcaactcgacccnatgaagtcggagtcgctagtaatcgcagatcagcaacgctgcggtgaatacgttcccggggcttgtacacaccgcccgtcaagncatgaaagtcggtaacacccgaagccggtggcccaacacgttctgcgtgggggagtcgtcgaaggtgggactggtaattag

SEQ ID NO: 1109 - DNA, 1439 bp, Clostridium cylindrosporum
gacgaacgctggcggcgtgcttaacacatgcaagtcgagcgggagaatctggtgcttgcaccagaggatctagcggcggacgggtgagtaacacgtgggcaacctgccctaaggaggggaataacaggccgaaaggtctgctaataccgcataagaccttagcttcgcatggagcataggttaaagatttatcgccttaggatgggcccgcggcgcattagctagttggtaaggtaacggcttaccaaggcgacgatgcgtagccgacctgagagggtgatcggccacattgggactgagacacggcccagactcctacgggaggcagcagtggggaatattgcacaatgggggaaaccctgatgcagcaacgccgcgtgagcgatgaaggccttcgggttgtaaagctctgtcttcgctgaagataatgacggtaagcgaggaggaagccacggctaactacgtgccagcagccgcggtaatacgtaggtggcaagcgttgtccggatttattgggcgtaaagggtgcgtaggtggttttttaagtgggatgtgaaatccctgggctcaacccaggaactgcattccaaactggaaaactagagtgcaggagaggaaagtggaattcctagtgtagcggtgaaatgcgtagagattaggaggaacaccagtggcgaaggcgactttctggactgtaactgacactgaggcacgaaagcgtggggagcaaacaggattagataccctggtagtccacgccgtaaacgatgagcactaggtgtaggggagaccatcctctgtgccgcagttaacacattaagtgctccgcctgggaagtacgatcgcaagattaaaactcaaaggaattgacgggggcccgcacaagtagcggagcatgtggtttaattcgaagcaacgcgaagaaccttaccaggacttgacatccttagaatcctgcagagatgcgggagtgcccttcggggaactaagagacaggtggtgcatggttgtcgtcagctcgtgtcgtgagatgttgggttaagtcccgcaacgagcgcaacccctattgttagttgccagcatttcggatgggcactctagcgagactgccgaggttaactcggaggaaggtggggatgacgtcaaatcatcatgccctttatgtcctgggctacacacgtgctacaatggctggtacagtgagatgcaagaccgcgaggtggagcaaatctacaaaaccagtcccagttcggattgtaggctgcaactcgcctacatgaagccggagttactagtaatcgcagatcagaatgctgcggtgaatacgttcccgggccttgtacacaccgcccgtcacaccacgagagttggcaacacccgaagcctgtgagctaaccgtaaggaggcagcagtcgaaggtggggtcgatgattggggtg

SEQ ID NO: 1110 - DNA, 1436 bp, Clostridium estertheticum
gacgaacgctggcggcgtgcctaacacatgcaagtcgagcgatgcgatccttcggggtcaattagcggcggacgggtgagtaacacgtgggtaacctgcctcaaagaggggaatagcctcccgaaagggagattaataccgcataatatgttttgatcgcatgatcttaacatcaaaggaatttttcggaatttcgctttgagatggacccgcggcgcattagctagttggtgaggtaaaggcccaccaaggcaacgatgcgtagccgacctgagagggtgatcggccacattggaactgagacacggtccagactcctacgggaggcagcagtggggaatattgcgcaatgggggaaaccctgacgcagcaacgccgcgtgaatgatgaaggccttcgggttgtaaagttctgtcttctgggacgataatgacggtaccagaggaggaagccacggctaactacgtgccagcagccgcggtaatacgtaggtggcaagcgttgtccggatttactgggcgtaaaggatgcgtaggcggacatttaagtcagatgtgaaatacccgagcttaacttgggtgctgcatttgaaactgggtgtctagagtgcaggagaggtaagtggaattcctagtgtagcggtgaaatgcgtagagattaggaagaacaccagtggcgaaggcgacttactggactgtaactgacgctgaggcatgaaagcgtggggagcaaacaggattagataccctggtagtccacgccgtaaacgatgaatactaggtgtcgggggtcgaacctcggtgccgccgttaacacattaagtattccgcctggggagtacgatcgcaagattaaaactcaaaggaattgacgggggcccgcacaagcagcggagcatgtggtttaattcgaagcaacgcgaagaaccttacctagacttgacatcccttgcataactcagagatgagtgaagtccttcgggacaaggtgacaggtggtgcatggttgtcgtcagctcgtgtcgtgagatgttgggttaagtcccgcaacgagcgcaacccttatcattagttgctaccattaagttgagcactctagtgagactgcccgggttaaccgggaggaaggtggggatgacgtcaaatcatcatgccccttatgtctagggctacacacgtgctacaatggtgagtacaaagagatgcaagaccgcaaggtggagccaaactcaaaaactcatcccagttcggattgtaggctgcaactcgcctacatgaagccggagttgctagtaatcgcgaatcagcatgtcgcggtgaatacgttcccgggccttgtacacaccgcccgtcacaccatgagagttggtaacacccgaagtccgtgaggtaaccgtaaggagccagcggccgaaggtgggatcgatgattggggtg

SEQ ID NO: 1111 - DNA, 1452 bp, Clostridium felsineum
gatgaacgctggcggcgtgcctaacacatgcaagtcgagcgaaccgatttatcggaagccttcgggtggaagatgatgaggttagcggcggacgggtgagtaacgcgtgggtaacctaccttgtacagggggataacagtcggaaacgattgctaataccgcataaagctattttaaggcatcttagaatagccaaagatttattggtacaagatgggcccgcgtctgattagctagttggtggggtaaaggcctaccaaggcgacgatcagtagccgacctgagagggtgaccggccacactggaactgagacacggtccagactcctacgggaggcagcagtgggggatattgcacaatgggggaaaccctgatgcagcgacgccgcgtgagcgaagaaggccttcgggtcgtaaagcgctgtttcgagggaagaaaaatgacggtacctcgggaggaagccccggctaactacgtgccagcagccgcggtaatacgtagggggcaagcgttatccggaatcactgggcgtaaagggtgcgtaggcggccaataaagtctagggtgaaaggctacggctcaaccgtagtaatgccttggaaacttattggcttgagtgcaggagaggagagtggaattcctagtgtagcggtgaaatgcgtagatattaggaggaacaccagtggcgaaggcgactctctggactgtaactgacgctgaggcacgaaagcgtggggagcgaacaggattagataccctggtagtccacgccgtaaacgatgagtgctaggtgttgggggtcaaacctcagtgccgcagctaacgcattaagcactccgcctggggagtacgcacgcaagtgtgaaactcaaaggaattgacggggacccgcacaagcagcggagcatgtggtttaattcgaagcaacgcgaagaaccttacctggacttgacatccttatgaccgctttttaacagaagctttcccttcggggacagaagtgacaggtggtgcatggttgtcgtcagctcgtgtcgtgagatgttgggttaagtcccgcaacgagcgcaacccttgtctttagttgccagcatttcggatgggcactctagagagactgccggggacaactcggaggaaggtggggatgacgtcaaatcatcatgccccttatgttcagggctacacacgtgctacaatggccgatacaaagggcagcgaaggagtaatctggagcgaatctcataaagtcggtctcagttcggattgtgggctgaaactcgcccacatgaagttggagttgctagtaatcgcgaatcagaatgtcgcggtgaatgcgttcccgggccttgtacacaccgcccgtcacaccatgggagtcggaagcgcccgaagccagtcactttaaccgaaaggagagagcgtcgaaggtgaagccgatgactggggtg

SEQ ID NO: 1112 - DNA, 1455 bp, Clostridium fimetarium
gatgaacgctggcggcgtgcttaacacatgcaagtcgaacgaagtatagtgaatcgagttcttcggaacaattgaagctgtactgagtggcggacgggtgagtaacgcgtggataacctgccttacactgggggacaacagttggaaacgactgctaataccgcataagcgcacagtaccgcatggtacggtgtgaaaaactccggtggtgtaagatggatccgcgtctgattagctagttggtagggtaatggcctaccaaggcaacgatcagtagccggcctgagagggtgtacggccacattgggactgagacacggcccagactcctacgggaggcagcagtggggaatattgcacaatgggcgaaagcctgatgcagcgacgccgcgtgagcgaagaagtatttcggtatgtaaagctctatcagcaaggaagataatgacggtacttgactaagaagccccggctaactacgtgccagcagccgcggtaatacgtagggggcaagcgttatccggatttactgggtgtaaagggagtgtaggtggcatggcaagtcagaagtgaaagcccggggctcaaccccgggactgcttttgaaactgccaagctagagtgcaggagaggtaagtggaattcctagtgtagcggtgaaatgcgtagatattaggaggaacaccagtggcgaaggcgacttactggactgtaactgacactgaggctcgaaagcgtggggagcaaacaggattagataccctggtagtccacgctgtaaacgatgaatactagatgttgggaggcataagcttctcagtgtcgtagctaacgcgataagtattccacctgggaagtacgttcgcaagaatgaaactcaaaggaattgacggggacccgcacaagcggtggagcatgtggtttaattcgaagcaacgcgaagaaccttaccaagtcttgacatccctctgaccggcacgtaatggtgcctttccttcgggacagaggagacaggtggtgcatggttgtcgtcagctcgtgtcgtgagatgttgggttaagtcccgcaacgagcgcaacccttatctttagtagccagcatttcggatgggcactctagagagactgccagggataacctggaggaaggtggggatgacgtcaaatcatcatgccccttatgacttgggctacacacgtgctacaatggcgtaaacaaagggacgcaagctggtgacagtaagcaaatcccaaaaataacgtctcagttcggattgtagtctgcaactcgactacatgaagctggaatcgctagtaatcgcgaatcagaatgtcgcggtgaatacgttcccgggtcttgtacacaccgcccgtcacaccatgggagtcggtaatgcccgaagtcagtgacccaaccgtaaggagggagctgccgaaggcaggatcgataactggggtg

SEQ ID NO: 1113 - DNA, 1452 bp, Clostridium formicaceticum
gatgaacgctggcggcgtgcctaacacatgcaagtcgagcgaaccgatttatcagaagccttcgggtggaagatgatgaggttagcggcggacgggtgagtaacgcgtgggtaacctaccttgtacagggggataacagtcggaaacgattgctaataccgcataaagctattttaaggcatcttagaatagccaaagatttattggtacaagatgggcccgcgtctgattagctagttggtggggtaaaggcctaccaaggcgacgatcagtagccgacctgagagggtgaccggccacactggaactgagacacggtccagactcctacgggaggcagcagtgggggatattgcacaatgggggaaaccctgatgcagcgacgccgcgtgagcgaagaaggccttcgggtcgtaaagctctgtttcgagggaagaaaaatgacggtacctcgggaggaagccccggctaactacgtgccagcagccgcggtaatacgtagggggcaagcgttatccggaatcactgggcgtaaagggtgcgtaggcggccaataaagtctagggtgaaaggctacggctcaaccgtagtaagccttggaaacttattggcttgagtgcaggagaggagagtggaattcctagtgtagcggtgaaatgcgtagatattaggaggaacaccagtggcgaaggcgactctctggactgtaactgacgctgaggcacgaaagcgtggggagcgaacaggattagataccctggtagtccacgccgtaaacgatgagtgctaggtgttgggggtcaaacctcagtgccgcagctaacgcattaagcactccgcctggggagtacgcacgcaagtgtgaaactcaaaggaattgacggggacccgcacaagcagcggagcatgtggtttaattcgaagcaacgcgaagaaccttacctggacttgacatccttatgaccgctttttaacagaagctttcccttcggggacagaagtgacaggtggtgcatggttgtcgtcagctcgtgtcgtgagatgttgggttaagtcccgcaacgagcgcaacccttgtctttagttgccagcatttcggatgggcactctagagagactgccggggacaactcggaggaaggtggggatgacgtcaaatcatcatgccccttatgttcagggctacacacgtgctacaatggccgatacaaagggcagcgaaggagtaatctggagcgaatctcataaagtcggtctcagttcggattgtgggctgaaactcgcccacatgaagttggagttgctagtaatcgcgaatcagaatgtcgcggtgaatgcgttcccgggtcttgtacacaccgcccgtcacaccatgggagtcggaagcgcccgaagccagctactttaaccgaaaggagagagctgtcgaaggtgaagccgatgactggggtg

SEQ ID NO: 1114 - DNA, 1436 bp, Clostridium gasigenes
gacgaacgctggcggcgtgcctaacacatgcaagtcgagcgagaggagttcttcggaacgaatctagcggcggacgggtgagtaacacgtgggcaacctaccttatagaggggaatagccttccgaaaggaagattaataccgcataacattgcagtttcgcatgaaacagcaattaaaggagaaatccgctataagatgggcccgcggcgcattagctagttggtgaggtaaaggctcaccaaggcgacgatgcgtagccgacctgagagggtgatcggccacattgggactgagacacggcccagactcctacgggaggcagcagtggggaatattgcacaatgggggaaaccctgatgcagcaacgccgcgtgagtgatgaaggttttcggatcgtaaaactctgtctttggggacgataatgacggtacccaaggaggaagccacggctaactacgtgccagcagccgcggtaatacgtaggtggcaagcgttgtccggatttactgggcgtaaagggagcgtaggtggatttttaagtgaggtgtgaaatactcgggctcaacccgagaactgcatttcaaactggaaatctagagtgcaggagaggaaagtggaattcctagtgtagcggtgaaatgcgtagatattaggaagaacaccagtggcgaaggcgactttctggactgtaactgacactgaggctcgaaagcgtggggagcaaacaggattagataccctggtagtccacgccgtaaacgatgaatactaggtgtgggggttgtcatgacctccgtgccgccgctaacgcattaagtattccgcctggggagtacggtcgcaagattaaaactcaaaggaattgacgggggcccgcacaagcagcggagcatgtggtttaattcgaagcaacgcgaagaaccttacctagacttgacatctcctgaattacccgtaattggggaagtggcttcggccacaggaagacaggtggtgcatggttgtcgtcagctcgtgtcgtgagatgttgggttaagtcccgcaacgagcgcaacccttattgttagttgccatcatttagttgggcactctagcgagactgcccgggttaaccgggaggaaggtggggatgacgtcaaatcatcatgccccttatgtctagggctacacacgtgctacaatggcaagtacaaagagaagcaagaccgcgaggtggagccaaactataaaacttgtctcagttcggattgcaggctgaaactcgcctgcatgaagctggagttgctagtaatcgcgaatcagcatgtcgcggtgaatacgttcccgggccttgtacacaccgcccgtcacaccacgagagttggcaatacccaaagttcgtgagctaacccgcaagggaggcagcgacctaaggtagggtcagcgattggggtg

SEQ ID NO: 1115 - DNA, 1431 bp, Clostridium homopropionicum
gacgaacgctggcggcgtgcctaacacatgcaagtcgagcgaggggagttcttcggaacaaacctagcggcggacgggtgagtaacacgtgggcaacctgcctcaaagaggggaatagcctcccgaaagggagattaataccgcataaagttattttttcgcatgaagagataaccaaaggagcaatccgctttgagatgggcccgcggcgcattagctagttggtgaggtaacggctcaccaaggcgacgatgcgtagccgacctgagagggtgatcggccacattggaactgagacacggtccagactcctacgggaggcagcagtggggaatattgcgcaatgggggaaaccctgacgcagcaacgccgcgtgagcgatgaaggtcttcggattgtaaagctctgtcttttgggacgataatgacggtaccaaaggaggaagccacggctaactacgtgccagcagccgcggtaatacgtaggtggcaagcgttgtccggatttactgggcgtaaagagtatgtaggcggacatttaagtcagatgtgaaattcccgggcttaacctgggagctgcatttgatactgggtgtctagagtgcaggagaggaaagtggaattcctagtgtagcggtgaaatgcgtagagattaggaagaacaccagtggcgaaggcgactttctggactgtaactgacgctgagatacgaaagcgtggggagcaaacaggattagataccctggtagtccacgccgtaaacgatgaatactaggtgtcggagggtaccaccttcggtgccgcagcaaacgcaataagtattccgcctggggagtacggtcgcaagattaaaactcaaaggaattgacggggacccgcacaagcagcggagcatgtggtttaattcgaagcaacgcgaagaaccttacctagacttgacatctcctgaattactcgtaacagaggaagcccttcggggcaggaagacaggtggtgcatggttgtcgtcagctcgtgtcgtgagatgttgggttaagtcccgcaacgagcgcaacccctattgttagttgctaccattaagttgagcactctagcaagactgcctgggttaaccaggaggaaggtggggatgacgtcaaatcatcatgccccttatgtctagggctacacacgtgctacaatggtcggtacaaaaagatgcaaacccgtgagggggagctaaacttaaaaaccgatcccagttcggattgtaggctgaaactcgcctacatgaagttggagttgctagtaatcgcgaatcagcatgtcgcggtgaatacgttcccgggtcttgtacacaccgcccgtcacaccatgagagccggtaacacccgaagcccgtgaggtaaccgtaaggagccagcggtcgaaggtgggattggtgattggggtg

SEQ ID NO: 1116 - DNA, 1454 bp, Clostridium indolis
gatgaacgctggcggcgtgcttaacacatgcaagtcgagcgaagcgatttaaatgaagttttcggatggaatttaaattgactgagcggcggacgggtgagtaacgcgtgggtaacctgcctcatacagggggataacagttggaaacgactgctaataccgcataagcacacagtgccgcatggtacggtgtgaaaaactccggtggtatgagatggacccgcgtctgattaggtagttggtgaggtaacggcccaccaagccgacgatcagtagccgacctgagagggtgaccggccacattgggactgagacacggcccaaactcctacgggaggcagcagtggggaatattggacaatgggggaaaccctgatccagcgacgccgcgtgagtgaagaagtgtttcggcatgtaaagctctatcagcagggaagaaaatgacggtacctgactaagaagccccggctaactacgtgccagcagccgcggtaatacgtagggggcaagcgttatccggatttactgggtgtaaagggagcgtagacggcgatgcaagtctggagtgaaagcccggggctcaaccccgggactgctttggaaactgtgttgctggagtgcaggagaggtaagtggaattcctagtgtagcggtgaaatgcgtagatattaggaggaacaccagtggcgaaggcggcttactggactgtaactgacgttgaggctcgaaagcgtggggagcaaacaggattagataccctggtagtccacgccgtaaacgatgaatactaggtgttggggagcaaagctcttcggtgccgccgctaacgcaataagtattccacctggggagtacgttcgcaagaatgaaactcaaaggaattgacggggacccgcacaagcggtggagcatgtggtttaattcgaagcaacgcgaagaaccttaccaagtcttgacatcggaatgaccggtccgtaacggggccttcccttcggggcattccagacaggtggtgcatggttgtcgtcagctcgtgtcgtgagatgttgggttaagtcccgcaacgagcgcaacccttatccttagtagccagcaagtcaagttgggcactctggggagactgccagggataacctggaggaaggtggggatgacgtcaaatcatcatgccccttatgatttgggctacacacgtgctacaatggcgtaaacaaagggaagcaaaggagtgatccggagcaaaccccaaaaataacgtctcagttcggattgtagtctgcaactcgactacatgaagctggaatcgctagtaatcgcggatcagaatgccgcggtgaatacgttcccgggtcttgtacacaccgcccgtcacaccatgggagttggtaacgcccgaagtcagtgacccaaccgcaaggagggagctgccgaaggcgggactgataactggggtg

SEQ ID NO: 1117 - DNA, 1434 bp, Clostridium magnum
gacgaacgctggcggcgtgcctaacacatgcaagtcgagcgatgaagcccttcggggtggattagcggcggacgggtgagtaacacgtgggtaacctgcctcaaagagggggatagcctcccgaaagggagattaataccgcataatattagtttttcgcatgaagaactaattaaaggagtaatccgctttgagatggacccgcggcgcattagctagttggtgaggtaaaggctcaccaaggcgacgatgcgtagccgacctgagagggtgatcggccacattggaactgagacacggtccagactcctacgggaggcagcagtggggaatattgcacaatgggcgaaagcctgatgcagcaacgccgcgtgagtgatgaaggccttcgggttgtaaagctctgtcttttgggacgataatgacggtaccaaaggaggaagccacggctaactacgtgccagcagccgcggtaatacgtaggtggcgagcgttgtccggatttactgggcgtaaaggatgcgtaggcggatatttaagtgagatgtgaaatacccgagcttaacttgggtgctgcatttcaaactggatatctagagtgcgggagaggagaatggaattcctagtgtagcggtgaaatgcgtagagattaggaagaacaccagtggcgaaggcgattctctggaccgtaactgacgctgaggcatgaaagcgtgggtagcaaacaggattagataccctggtagtccacgccgtaaacgatgagtactaggtgtaggaggtatcgaccccttctgtgccgcagttaacacaataagtactccgcctgggaagtacgatcgcaagattaaaactcaaaggaattgacgggggcccgcacaagcagcggagcatgtggtttaattcgaagcaacgcgaagaaccttacctggacttgacatcccctgaatagtgcagagatgcatgaagcccttcggggcagggagacaggtggtgcatggttgtcgtcagctcgtgtcgtgagatgttaggttaagtcctgcaacgagcgcaacccctatcattagttgctaccattaagttgagcactctagtgagactgcccgggttaaccgggaggaaggtggggatgacgtcaaatcatcatgccccttatgtccagggctacacacgtgctacaatggtaggtacagagagatgcaagaccgcgaggtggagcaaaactcaaaaacctatcccagttcggattgtaggctgcaactcgcctacatgaagccggagttgctagtaatcgcgaatcagaatgtcgcggtgaatacgttcccgggccttgtacacaccgcccgtcacaccatgagagctggcaacacccgaagtccgtgaggtaacctgtaaaggagccagcggccgaaggtggggttagtgattggggtg

SEQ ID NO: 1118 - DNA, 1444 bp, Clostridium papyrosolvens
gacgaacgctggcggcgtgcctaacacatgcaagtcgagcggagttaattgaaagcttgcttttgattaacttagcggcggacgggtgagtaacgcgtgggcaacctgcctgttacagggggataacacagggaaacttgtgctaataccgcataacacaacgagaaagcattttcttgttgtcaaaggagcaatccggtaacagatgggcccgcgtccaattagctagttggtgatgtaacggaccaccaaggcgacgattggtagccgaactgagaggttgatcggccacattgggactgagacacggcccagactcctacgggaggcagcagtggggaatattgcacaatgggggaaaccctgatgcagcaacgccgcgtgaaggatgaaggttttcggattgtaaacttctttagtcagggacgaataaatgacggtacctgaagaataagccacggctaactacgtgccagcagccgcggtaatacgtaggtggcaagcgttgtccggaattactgggtgtaaagggcgtgtaggcgggaatgtaagtcagatgtgaaatcccagagcttaactctggagctgcatctgaaactatgtttcttgagtgccggagaggaaagcggaattcctagtgtagcggtgaaatgcgtagatattaggaggaacaccagtggcgaaggcggctttctggacggtaactgacgctgaggcgcgaaagcgtggggagcaaacaggattagataccctggtagtccacgctgtaaacgatggatactaggtgtaggaggtatcgaccccttctgtgccggagttaacacaataagtatcccacctggggagtacggccgcaaggttgaaactcaaaggaattgacgggggcccgcacaagcagtggagtatgtggtttaattcgaagcaacgcgaagaaccttaccaaggcttgacataatagtgaatacggtagagatatcgtagtccttcgggacactattacaggtggtgcatggttgtcgtcagctcgtgtcgtgagatgttgggttaagtcccgcaacgagcgcaacccctgttgctagttgataacattaagatgatcactctagcgagactgccggtgataaatcggaggaaggtggggacgacgtcaaatcatcatgccccttatgtcttgggctacacacgtactacaatggctataacagagggaagctaagctgcaaagtggagcaaatccccaaaaatagtcccagttcagattgtgggctgcaacccgcccacatgaagtcggaattgctagtaatggcaggtcagcatactgccgtgaatacgttcccgggccttgtacacaccgcccgtcacaccatgagagtctgcaacacccgaagtcgatagtctaaccgcaaggaggacgtcgccgaaggtggggccgatgattggggtg

SEQ ID NO: 1119 - DNA, 1429 bp, Clostridium pasteurianum
gacgaacgctggcggcgtgcttaacacatgcaagtcgagcgagaaaccttcgggtttctagcggcggacgggtgagtaacacgtgggtaacctgcctcaaagaggggaatagcctcccgaaagggagattaataccgcataatattaaagtttcacatggagctttaattaaaggagtaatccgctttgagatggacccgcggcgcattagctagttggagaggtaacggctcaccaaggcgacgatgcgtagccgacctgagagggtgatcggccacattggaactgagacacggtccagactcctacgggaggcagcagtggggaatattgcacaatgggcgaaagcctgatgcagcaacgccgcgtgagtgatgacggtcttcggattgtaaagctctgtcttttgggacgataatgacggtaccaaaggaggaagccacggctaactacgtgccagcagccgcggtaatacgtaggtggcaagcgttgtccggatttactgggcgtaaaggatgtgtaggcggatacttaagtgagatgtgaaagccccgggctcaacctggggactgcatttcaaactgggtatctagagtgcaggagaggaaagcggaattcctagtgtagcggtgaaatgcgtagagattaggaagaacatcagtggcgaaggcggctttctggactgtaactgacgctgaggcatgaaagcgtggggagcaaacaggattagataccctggtagtccacgccgtaaacgatgagtactaggtgtaggaggtatcgactccttctgtgccgcagttaacacaataagtactccgcctgggaagtacggtcgcaagattaaaactcaaaggaattgacgggggcccgcacaagcagcggagcatgtggtttaattcgaagcaacgcgaagaaccttacctagacttgacatctcctgaatagcgtagagatacgtgaagcccttcggggcaggaagacaggtggtgcatggttgtcgtcagctcgtgtcgtgagatgttgggttaagtcccgcaacgagcgcaacccttatcattagttgctaccattaagttgagcactctagtgagactgcccgggttaaccgggaggaaggcggggatgacgtcaaatcatcatgccccttatgtctagggctacacacgtgctacaatggtgagaacaacgagatgcaataccgtgaggtggagctaaacttgaaaactcatcccagttcggattgcaggctgaaattcgcctgcatgaagttggagttgctagtaatcgcgaatcagaatgtcgcggtgaatacgttcccgggccttgtacacaccgcccgtcacaccatgagagctggtaacacccgaagtccgtgaggtaacctttatggggccagcggccgaaggtgggattagtgattggggtg

SEQ ID NO: 1120 - DNA, 1448 bp, Clostridium polysaccharolyticum
  misc_feature (987)..(987): n is a, c, g, or t
  misc_feature (1095)..(1095): n is a, c, g, or t
gatgaacgctggcggcgtgcctaacacatgcaagtcgaacgaagcacctgatggattccttcgggaggaagttcttgtgactgagtggcggacgggtgagtaacgcgtgggtaacctgcctcatacagggggataacagctggaaacggctgctaataccgcataacccgatagccgcatggcccggacggaaaagaattatcggtatgagatggacccgcgtctgattagctagttggaggggtaacggcccaccaaggcgacgatcagtagccggcttgagagagtgaccggccacattgggactgagacacggcccaaactcctacgggaggcagcagtggggaatattgcacaatgggggaaaccctgatgcagcgacgccgcgtgagtgaagaagtatttcggtatgtaaagctctatcagcagggaagaaaatgacggtacctgactaagaagccccggctaactacgtgccagcagccgcggtaatacgtagggggcaagcgttatccggatttactgggtgtaaagggagcgcaggtggcgtggcaagtcagaagtgaaagcggggctcaaccccgggactgcttttgaaactgtcatgctggagtgcaggagaggcaggcggaattcctagtgtagcggtgaaatgcgtagatattaggaggaacaccagtggcgaaggcggcctgctggactgtaactgacactgaggctcgaaagcgtggggagcaaacaggattagataccctggtagtccacgccgtaaacgatgaatactaggtgtcgggcgccacagggcttcggtgccgcacgtaacgcagtaagtattccacctggggagtacgttcgcaagaatgaaactcaaaggaattgacggggacccgcacaagcggtggagcatgtggtttaattcgaagcaacgcgaagaaccttaccaagccttgacatcccaatgaccgtccggcaatgcggactttcctncgggacattggagacaggtggtgcatggttgtcgtcagctcgtgtcgtgagatgttgggttaagtcccgcaacgagcgcaacccctatcttcagtagccagcggatcngccgggcactctggagagactgccagggacaacctggaggaaggcggggatgacgtcaaatcatcatgccccttatggcttgggctacacacgtgctacaatggcagctacaaagtgaagctaccccgtgaggcaaagcaaatcacaaaaaggctgtcccagttcggattgcagtctgcaactcgactgcatgaagctggaatcgctagtaatcgcaaatcagaatgttgcggtgaatacgttcccgggtcttgtacacaccgcccgtcacaccatgggagtcggaaatgcccgaagtcagtgacccaaccgaaaggagggagctgccgaaggtggagccggtaactggggtg

SEQ ID NO: 1121 - DNA, 1453 bp, Clostridium populeti
  misc_feature (1208)..(1208): n is a, c, g, or t
  misc_feature (1210)..(1210): n is a, c, g, or t
  misc_feature (1424)..(1424): n is a, c, g, or t
  misc_feature (1441)..(1441): n is a, c, g, or t
gatgaacgctggcggcgtgcttaacacatgcaagtcgagcgaagcaccaaaagcggaagccttcgggtggaagcatttgtgactgagtggcggacgggtgagtaacgcgtgggtaacctgcctcatacagagggataacagctggaaacggctgctaatacctgataataatgtttttccgcatgggaggacattcaaagagttatcggtatgagatggacccgcgtctgattagctagttggtgaggtaacggctcaccaaggcgacgatcagtagccgacttgagagagtgatcggccacattgggactgagacacggcccaaactcctacgggaggcagcagtggggaatattgcacaatgggggaaaccctgatgcagcgacgccgcgtgagtgaagaagtatttcggtatgtaaagctctatcagcagggaagaaaatgacggtacctgactaagaagccccggctaactacgtgccagcagccgcggtaatacgtagggggcaagcgttatccggatttactgggtgtaaagggagcgtaggtggcgtggtaagtcagatgtgaaagcccggggctcaaccccgggactgcatttgaaactatcatgctagagtgcaggagaggtaagtggaattcctagtgtagcggtgaaatgcgtagatattaggaggaacaccagtggcgaaggcggcttactggactgtaactgacactgaggctcgaaagcgtggggagcaaacaggattagataccctggtagtccacgccgtaaacgatgaatactaggtgttggggtcaaaagaccttcggtgccgcagctaacgcaataagtattccacctggggagtacgttcgcaagaatgaaactcaaaggaattgacggggacccgcacaagcggtggagcatgtggtttaattcgaagcaacgcgaagaaccttaccaagtcttgacatccttctgaccgtcccgtaacggggacttctcttcggagcaggagagacaggtggtgcatggttgtcgtcagctcgtgtcgtgagatgttgggttaagtcccgcaacgagcgcaacccctatgtttagtagccagcatttcggatgggcactctagagagactgccagggataacctggaggaaggtggggatgacgtcaaatcatcatgccccttatgatttgggctacacacgtgctacaatggtgncnacaaagtgaagcagcctcgtgagagtgagcaaatcacaaaaaagcatctcagttcggattgtagtctgcaactcgactacatgaagctggaatcgctagtaatcgcgaatcagaatgtcgcggtgaatacgttcccgggtcttgtacacaccgcccgtcacaccatgggagttggaaatgcccgaagtcagtgacccacccgtaaggagggagntgccgaaggtggagccnatgactggggtg

SEQ ID NO: 1122 - DNA, 1433 bp, Clostridium puniceum
gacgaacgctggcggcgtgcttaacacatgcaagtcgagcgatgaagttccttcgggaatggattagcggcggacgggtgagtaacacgtgggtaacctgcctcatagaggggaatagcctttcgaaaggaagattaataccgcataagattgtagtttcgcatgaaacagcaattaaaggagtaatccgctatgagatggacccgcgtcgcattagctagttggtgaggtaacggctcaccaaggcgacgatgcgtagccgacctgagagggtgatcggccacattgggactgagacacggcccagactcctacgggaggcagcagtggggaatattgcacaatgggggaaaccctgatgcagcaacgccgcgtgagtgatgacggtcttcggattgtaaaactctgtcttcagggacgataatgacggtacctgaggaggaagccacggctaactacgtgccagcagccgcggtaatacgtaggtggcaagcgttgtccggatttactgggcgtaaagggagcgtaggtggatatttaagtgggatgtgaaatactcgggcttaacctgggtgctgcattccaaactggatatctagagtgcaggagaggaaagtagaattcctagtgtagcggtgaaatgcgtagagattaggaagaataccagtggcgaaggcgactttctggactgtaactgacactgaggctcgaaagcgtggggagcaaacaggattagataccctggtagtccacgccgtaaacgatgaatactaggtgtgggggttgtcatgacctccgtgccgccgctaacgcattaagtattccgcctggggagtacggtcgcaagattaaaactcaaaggaattgacgggggcccgcacaagcagcggagcatgtggtttaattcgaagcaacgcgaagaaccttacctagacttgacatctcctgaattactctgtaatggaggaagcccctcggggcaggaagacaggtggtgcatggttgtcgtcagctcgtgtcgtgagatgttgggttaagtcccgcaacgagcgcaacccttattgttagttgctaccatttagttgagcactctagcgagactgcccgggttaaccgggaggaaggtggggatgacgtcaaatcatcatgccccttatgtctagggctacacacgtgctacaatggctggtacagagagatgcaataccgtgaggtggagccaaactttaaaaccagtctcagttcggattgtaggctgaaactcgcctacatgaagctggagttgctagtaatcgcgaatcagaatgtcgcggtgaatacgttcccgggccttgtacacaccgcccgtcacaccatgagagttggcaatacccaaagttcgtgagctaaccgcaaggaggcagcgacctaaggtagggtcagcgattggggtg

SEQ ID NO: 1123 - DNA, 1428 bp, Clostridium roseum
gacgaacgctggcggcgtgcttaacacatgcaagtcgagcggggaacttcggttcccagcggcggacgggtgagtaacacgtgggtaacctgcctcatagtggggaatagccttccgaaaggaagattaataccgcataatactcggaaatcacatgatttctgagccaaaggatttattcgctatgagatggacccgcggcgcattagcttgttggtgaggtaacggctcaccaaggcttcgatgcgtagccgacctgagagggtgatcggccacattggaactgagacacggtccagactcctacgggaggcagcagtggggaatattgcacaatgggggaaaccctgatgcagcaacgccgcgtgagtgatgaaggtcttcggatcgtaaaactctgtcttatgggacgataatgacggtaccataggaggaagccacggctaactacgtgccagcagccgcggtaatacgtaggtggcaagcgttgtccggatttactgggcgtaaaggatgtgtaggcggatatttaagtgagatgtgaaatccccgggcttaacttgggggctgcatttcaaactggatgtctggagtgcaggagaggaaggcagaattcctagtgtagcggtgaaatgcgtagagattaggaagaataccagtggcgaaggcggccttctggactgtaactgacgctgaggcatgaaagcgtggggagcaaacaggattagataccctggtagtccacgccgtaaacgatgaatactaggtgtaggaggtatcgactccttctgtgccgcagttaacacaataagtattccgcctgggaagtacggtcgcaagattaaaactcaaaggaattgacggggacccgcacaagcagcggagcatgtggtttaattcgaagcaacgcgaagaaccttacctagacttgacatctcctgaattagtccgtaatggatgaaatcccttcggggacaggatgacaggtggtgcatggttgtcgtcagctcgtgtcgtgagatgttgggttaagtcccgcaacgagcgcaacccttatcattagttgctaacatttagttgagcactctagtgagactgcccgggttaaccgggaggaaggtggggatgacgtcaaatcatcatgccccttatgtctagggctacacacgtgctacaatggtagggacaaaaagatgctataccgcaaggtggagctaaactcaaaaccctatcccagttcggattgtaggctgaaactcgcctacatgaagccggagttgctagtaatcgcgaatcagaatgtcgcggtgaatacgttcccgggtcttgtacacaccgcccgtcacaccatgagagtcggcaacacccgaagcccgtgaggtaaccttttggaaccagcggtcgaaggtggggttgatgattggggtg

SEQ ID NO: 1124 - DNA, 1435 bp, Clostridium saccharobutylicum
gacgaacgctggcggcgtgcttaacacatgcaagtcgagcgatgaagcttcttcggaagtggattagcggcggacgggtgagtaacacgtgggtaacctgcctcatagaggggaatagccttccgaaaggaagattaataccgcataagattgcaatatcgcatgatatagcaattaaaggagtaatccgctatgagatggacccgcgtcgcattagctagttggtgaggtaacggctcaccaaggcgacgatgcgtagccgacctgagagggtgatcggccacattgggactgagacacggcccagactcctacgggaggcagcagtggggaatattgcacaatgggggaaaccctgatgcagcaacgccgcgtgagtgatgacggtcttcggattgtaaagctctgtctttagggacgataatgacggtacctaaggaggaagccacggctaactacgtgccagcagccgcggtaatacgtaggtggcaagcgttgtccggatttactgggcgtaaagggagcgtaggtggatatttaagtgggatgtgaaatactcgggcttaacttgggtgctgcattccaaactggatatctagagtgcaggagaggaaagtagaattcctagtgtagcggtgaaatgcgtagagattaggaagaataccagtggcgaaggcgactttctggactgtaactgacactgaggctcgaaagcgtggggagcaaacaggattagataccctggtagtccacgccgtaaacgatgaatactaggtgtgggggttgtcatgacctccgtgccgccgctaacgcattaagtattccgcctggggagtacggtcgcaagattaaaactcaaaggaattgacgggggcccgcacaagcagcggagcatgtggtttaattcgaagcaacgcgaagaaccttacctagacttgacatctcctgaattactccgtaatggaggaagcccttcggggcaggaagacaggtggtgcatggttgtcgtcagctcgtgtcgtgagatgttgggttaagtcccgcaacgagcgcaacccttattgttagttgctaccattaagttgagcactctagcgagactgcccgggttaaccgggaggaaggtggggatgacgtcaaatcatcatgccccttatgtctagggctacacacgtgctacaatggctggtacagagagatgctaaaccgcgaggtggagccaaactttaaaaccagtctcagttcggattgtaggctgaaactcgcctacatgaagctggagttgctagtaatcgcgaatcagaatgtcgcggtgaatacgttcccgggccttgtacacaccgcccgtcacaccatgagagttggcaatacccaaagttcgtgagctaacgcgtaagcgaggcagcgacctaaggtagggtcagcgattggggtg

SEQ ID NO: 1125 - DNA, 1435 bp, Clostridium saccharoperbutylacetonicum
gacgaacgctggcggcgtgcttaacacatgcaagtcgagcgatgaaattctttcgggaatggattagcggcggacgggtgagtaacacgtgggtaacctacctcatagaggggaatagcctttcgaaaggaagattaataccgcataagattgtagtaccgcatggtgcagcaattaaaggagtaatccgctatgagatggacccgcgtcgcattagctagttggtgaggtaacggctcaccaaggcgacgatgcgtagccgacctgagagggtgatcggccacattgggactgagacacggcccagactcctacgggaggcagcagtggggaatattgcacaatgggggaaaccctgatgcagcaacgccgcgtgagtgatgacggtcttcggattgtaaagctctgtcttcagggacgataatgacggtacctgaggaggaagccacggctaactacgtgccagcagccgcggtaatacgtaggtggcaagcgttgtccggatttactgggcgtaaagggagcgtaggtggatatttaagtgggatgtgaaatactcgggcttaacctgggtgctgcattccaaactggatatctagagtgcaggagaggaaagtagaattcctagtgtagcggtgaaatgcgtagagattaggaagaataccagtggcgaaggcgactttctggactgtaactgacactgaggctcgaaagcgtggggagcaaacaggattagataccctggtagtccacgccgtaaacgatgaatactaggtgtgggggttgtcatgacctccgtgccgccgctaacgcattaagtattccgcctggggagtacggtcgcaagattaaaactcaaaggaattgacgggggcccgcacaagcagcggagcatgtggtttaattcgaagcaacgcgaagaaccttacctagacttgacatctcctgaattactctgtaatggaggaagcccttcggggcaggaagacaggtggtgcatggttgtcgtcagctcgtgtcgtgagatgttgggttaagtcccgcaacgagcgcaacccttattgttagttgctaccatttagttgagcactctagcgagactgcccgggttaaccgggaggaaggtggggatgacgtcaaatcatcatgccccttatgtctagggctacacacgtgctacaatggctggtacagagagatgctaaaccgcgaggtggagccaaactttaaaaccagtctcagttcggattgtaggctgaaactcgcctacatgaagctggagttgctagtaatcgcgaatcagaatgtcgcggtgaatacgttcccgggccttgtacacaccgcccgtcacaccatgagagttggcaatacccaaagttcgtgagctaacgcgcaagcgaggcagcgacctaaggtagggtcagcgattggggtg

SEQ ID NO: 1126 - DNA, 1442 bp, Clostridium spiroforme
gatgaacgctggcggctgcctaatacatgcaagtcgaacgcgagcagcaatgctcgagtggcgaacgggtgagtaatacataagtaacctgccctagacagggggataactgctggaaaccagctaagaccgcataggtatggacactgcatggtgaccatattaaaagtgccaaggcactggtagaggatggacttatggcgcattagctggttggtgaggtaacagctcaccaaggcgacgatgcgtagccgacctgagagggtgaccggccacactgggactgagacacggcccagactcctacgggaggcagcagtagggaattttcggcaatggggggaaccctgaccgagcaacgccgcgtgaaggaagaaggaattcgttctgtaaacttctgttataaaggaagaacggcggatatagggaatgatatccgagtgacggtactttatgagaaagccacggctaactacgtgccagcagccgcggtaatacgtaggtggcgagcgttatccggaattattgggcgtaaagagggagcaggcggcggcagaggtctgtggtgaaagactgaagcttaacttcagtaagccatagaaaccgggctgctagagtgcaggagaggatcgtggaattcctgtgtagcggtgaaatgcgtagatatatggaggaacaccagtggcgaaggcgacggtctggcctgtaactgacgctcattcccgaaagcgtggggagcaaataggattagataccctagtagtccacgccgtaaacgatgagtactaagtgttgggagtcaaatttcagtgctgcagttaacgcaataagtactccgcctgagtagtacgttcgcaagaatgaaactcaaaggaattgacgggggccgcacaagcggtggagcatgtggtttaattcgaagcaacgcgaagaaccttaccaggtcttgacatccggataaagacctcagagatgaggggatagatatatccgagacaggtggtgcatggttgtcgtcagctcgtgtcgtgagatgttgggttaagtcccgcaacgagcgcaacccttgtcgctagttaccatcattaagttggggactctagcgagactgccagtgacaagctggaggaaggcggggatgacgtcaaatcatcatgccccttatgacctgggctacacacgtgctacaatggatggagcagagggaagcgaagccgcgaggtgaagcaaaacccataaaaccattctcagttcggattgtagtctgcaactcgactacatgaagttggaatcgctagtaatcgcgaatcagcatgtcgcggtgaatacgttctcgggccttgtacacaccgcccgtcacaccatgagagttgataacacccgaagccggtggcctaaccgcaaggagggagctgtctaaggtgggattgatgattggggtg

SEQ ID NO: 1127 - DNA, 1436 bp, Clostridium taeniosporum
gacgaacgctggcggcgtgcctaacacatgcaagtcgagcgatgaagctccttcgggagtggattagcggcggacgggtgagtaacacgtgggcaacctgcctcatagagagggatagccttccgaaaggaagattaatacctcataagattgtagtttcgcatgaaacagcaataaaaggagcaatccgctatgagatgggcccgcgtcgcattagctagttggtaaggtaatggcttaccaaggcgacgatgcgtagccgacctgagagggtgatcggccacattgggactgagacacggcccagactcctacgggaggcagcagtggggaatattgcacaatgggggaaaccctgatgcagcaacgccgcgtgagtgatgacggtcttcggattgtaaaactctgtctttggggacgataatgacggtacccaaggaggaagccacggctaactacgtgccagcagccgcggtaatacgtaggtggcaagcgttgtccggatttactgggcgtaaagggagcgtaggtggatatttaagtgggatgtgaaatactcgggcttaacctgagtgctgcattccaaactggatatctagagtgcaggagaggaaagcggaattcctagtgtagtggtgaaatgcgtagatattaggaagaacaccagtggcgaaggcggctttctggactgtaactgacactgaggctcgaaagcgtggggagcgaacaggattagataccctggtagtccacgccgtaaacgatgaatactaggtgtaggagctgtcatggcttctgtgccgccgctaacgcattaagtattccgcctggggagtacggtcgcaagattaaaactcaaaggaattgacgggggcccgcacaagcagcggagcatgtggtttaattcgaagcaacgcgaagaaccttacctagacttgacatctcctgaattactcttaatcgaggaagtcgcttcggcgacaggaagacaggtggtgcatggttgtcgtcagctcgtgtcgtgagatgttgggttaagtcccgcaacgagcgcaacccttattgttagttgctaccatttagttgagcactctagcgagactgccgtggttaacgcggaggaaggtggggatgacgtcaaatcatcatgccccttatgtctagggctacacacgtgctacaatggctggtacagagagacgcaataccgtgaggtggagctaaactttaaaaccagtctcagttcggattgtaggctgaaactcgcctacatgaagctggagttgctagtaatcgcgaatcagaatgtcgcggtgaatacgttcccgggccttgtacacaccgcccgtcacaccatgagagttggcaatacccaaagttcgtgagctaacccgtaagggaggcagcgacctaaggtagggtcagcgattggggtg

SEQ ID NO: 1128 - DNA, 1430 bp, Clostridium tagluense
  misc_feature (183)..(183): n is a, c, g, or t
  misc_feature (307)..(307): n is a, c, g, or t
gcggcgtgcctaacacatgcaagtcgagcgatgaaacccttcggggtggattagcggcggacgggtgagtaacacgtgggtaacctgcctcaaagaggggaatagcctcccgaaagggagattaataccgcataatatgttttgatcgcatgatcgaaacatcaaaggatttttcttttaganaattccactttgagatggacccgcggcgcattagctagttggtgaggtaacggcccaccaaggcaacgatgcgtagccgacctgagagggtgatcggccacattggaactgagacacggtccanactcctacgggaggcagcagtggggaatattgcccaatgggggaaaccctgacgcagcaacgccgcgtgaatgatgaaggccttcgggttgtaaagttctgtcttctgggacgataatgacggtaccagaggaggaagccacggctaactacgtgccagcagccgcggtaatacgtaggtggcaagcgttgtccggatttactgggcgtaaaggatgcgtaggcggacatttaagtcagatgtgaaatacccgagcttaacttgggtgctgcatttgaaactgggtgtctagagtgcaggagaggtaagtggaattcctagtgtagcggtgaaatgcgtagagattaggaagaacaccagtggcgaaggcgacttactggactgtaactgacgctgaggcatgaaagcgtggggagcaaacaggattagataccctggtagtccacgccgtaaacgatgaatactaggtgtcgggggtcgaacctcggtgccgcagttaacacaataagtattccgcctggggagtacgatcgcaagattaaaactcaaaggaattgacgggggcccgcacaagcagcggagcatgtggtttaattcgaagcaacgcgaagaaccttacctagacttgacatcccctgcataacccagagatgggcgaagtccttcgggacagggtgacaggtggtgcatggttgtcgtcagctcgtgtcgtgagatgttgggttaagtcccgcaacgagcgcaacccttatcattagttgctaccatttagttgagcactctagtgagactgcccgggttaaccgggaggaaggtggggatgacgtcaaatcatcatgccccttatgtctagggctacacacgtgctacaatggtgagtacaaagagatgcaagaccgcaaggtggagccaaactcaaaaactcatcccagttcggattgtaggctgcaactcgcctacatgaagccggagttgctagtaatcgcgaatcagcatgtcgcggtgaatacgttcccgggccttgtacacaccgcccgtcacaccatgagagttggtaacacccgaagtccgtgaggtaaccgtaaggagccagcggccgaaggtgggattgatgattggggtg

SEQ ID NO: 1129 - DNA, 1430 bp, Clostridium tepidiprofundi
gacgaacgctggcggcgtgcctaacacatgcaagtcgagcgatgaagctaccttcgggtagtggaatagcggcggacgggtgagtaacacgtgggtaacctgcctcaaagagggggatagccctccgaaaggaggagtaataccgcataacatatatttctcgcatgagagatatatcaaagatttatcgctttgagatggacccgcgtcgcattagctagttggtgaggtaaaggctcaccaaggcgacgatgcgtagccgacctgagagggtgatcggccacattgggactgagacacggcccagactcctacgggaggcagcagtggggaatattgcgcaatgggggaaaccctgacgcagcaacgccgcgtgggtgaagaaggttttcggattgtaaagccctgttctataggacgataatgacggtactataggagaaagccacggctaactacgtgccagcagccgcggtaatacgtaggtggcaagcgttgtccggaattactgggcgtaaagagtgcgtaggcggataattaagtgagatgtgaaatacccgagctcaacttgggtgctgcatttcaaactggtaatctagagtgcaggagaggaaagcggaattcctagtgtagcggtgaaatgcgtagagattaggaagaacaccagtggcgaaggcggctttctggactgtaactgacgctgaggcacgaaagcgtggggagcgaacaggattagataccctggtagtccacgccgtaaacgatgggtactaggtgttgggggtcgaacctcagtgccgcagtaaacacaataagtaccccgcctggggagtacggtcgcaagattaaaactcaaaggaattgacgggggcccgcacaagcagcggagcatgtggtttaattcgaagcaacgcgaagaaccttacctagacttgacatcctaagaatcctttggaaacagaggagtgccttcgggaacttagagacaggtggtgcatggttgtcgtcagctcgtgtcgtgagatgttgggttaagtcccgcaacgagcgcaacccttattgttagttgctaccattaagttgagcactctagcgagactgcccgggtaaccgggaggaaggtggggatgacgtcaaatcatcatgccccttatgtctagggctacacacgtgctacaatggtcggtacaaagagaagcgaaatcgcgaggtggagcaaaactcaaaaaccgatctcagttcggattgcaggctgcaactcgcctgcatgaagctggagttgctagtaatcgcaaatcagaatgttgcggtgaatgcgttcccgggccttgtacacaccgcccgtcacaccatgagagccggcaacacccgaagtccgtgaggtaaccgaaaggagccagcggccgaaggtggggttggtgattggggtg

SEQ ID NO: 1130 - DNA, 1434 bp, Clostridium tepidum
gacgaacgctggcggcgtgcttaacacatgcaagtcgagcgatgaagcttccttcgggaagtggattagcggcggacgggtgagtaacacgtgggtaacctacctcaaagtgggggatagcctcccgaaagggagattaataccgcataatataagaaaatcgcatgattatcttatcaaagatttatcgctttgagatggacccgcggcgcattagctagttggtggggtaacggcctaccaaggcaacgatgcgtagccgacctgagagggtgatcggccacattggaactgagacacggtccagactcctacgggaggcagcagtggggaatattgcgcaatgggggaaaccctgacgcagcaacgccgcgtgggtgatgaaggtcttcggattgtaaagccctgttttctgggacgataatgacggtaccagaggaggaagccacggctaactacgtgccagcagccgcggtaatacgtaggtggcgagcgttgtccggatttactgggcgtaaagggtgcgtaggcggatgtttaagtgggatgtgaaatccccgggcttaacctgggggctgcattccaaactggatatctagagtgcaggagaggaaagcggaattcctagtgtagcggtgaaatgcgtagagattaggaagaacaccagtggcgaaggcggctttctggactgtaactgacgctgaggcacgaaagcgtgggtagcaaacaggattagataccctggtagtccacgccgtaaacgatggatactaggtgtagggggtatcaactccctctgtgccgcagttaacacaataagtatcccgcctggggagtacggtcgcaagattaaaactcaaaggaattgacgggggcccgcacaagcagcggagcatgtggtttaattcgaagcaacgcgaagaaccttacctggacttgacatcccttgcatagcctagagataggtgaagcccttcggggcaaggagacaggtggtgcatggttgtcgtcagctcgtgtcgtgagatgttaggttaagtcctgcaacgagcgcaacccttgttattagttgctaccattaagttgagcactctaatgagactgcctgggtaaccaggaggaaggtggggatgacgtcaaatcatcatgccccttatgtccagggctacacacgtgctacaatggtaggtacaataagaggcaagaccgtgaggtggagcaaaacttataaagcctatctcagttcggattgtaggctgcaactcgcctacatgaagctggagttgctagtaatcgcgaatcagaatgtcgcggtgaatacgttcccgggccttgtacacaccgcccgtcacaccatgagagctggtaacacccgaagtccgtgaggcaaccgtaaggagccagcggccgaaggtgggattagtgattggggtg

SEQ ID NO: 1131 - DNA, 1407 bp, Clostridium tetanomorphum
aacgctggcggcgtgccttcacatgcaagtcgagcgatgaagtcccttcggggatggattagcggcggacgggtgagtaacacgtgggcaacctgcctcaaagtgggggatagccctccgaaaggaggattaataccgcataacattagttttccgcatgaaaaactaatcaaaggagtaatccgctttgagatgggcccgcggtgcattagctagttggtgaggtaacagctcaccaaggccacgatgcatagccgacctgagagggtgatcggccacattggaactgagacacggtccagactcctacgggaggcagcagtggggaatattgcgcaatgggggaaaccctgacgcagcaacgccgcgtgggtgatgaaggtcttcggattgtaaaaccctgtcttctgggacgataatgacggtaccagaggaggaagccacggctaactacgtgccagcagccgcggtaatacgtaggtggcgagcgttgtccggatttactgggcgtaaaggatgcgtaggcgggcatttaagtgagatgtgaaatccccgggcttaacttgggggctgcatttcaaactgggtgcctagagtgcaggagaggtaagtggaattcctagtgtagcggtgaaatgcgtagagattaggaagaacaccagtggcgaaggcgacttactggactgtaactgacgctgaggcatgaaagcgtgggtagcaaacaggattagataccctggtagtccacgccgtaaacgatgaatactaggtgtaggaggtatcgaccccttctgtgccgcagttaacacaataagtattccgcctggggagtacggtcgcaagattaaaactcaaaggaattgacgggggcccgcacaagcagcggagcatgtggtttaattcgaagcaacgcgaagaaccttacctagacttgacatcccctgaattactcgtaacggaggaagcccttcggggcagggagacaggtggtgcatggttgtcgtcagctcgtgtcgtgagatgttgggttaagtcccgcaacgagcgcaacccttatcattagttgctaccattaagttgagcactctaatgagactgcccgggttaaccgggaggaaggtggggatgacgtcaaatcatcatgccccttatgtctagggctacacacgtgctacaatggtgagtacagagagatgcaagaccgcaaggtggagctaaactcaaaaactcatcccagttcggattgtaggctgaaactcgcctacatgaagccggagttgctagtaatcgcgaatcagcatgtcgcggtgaatacgttcccgggccttgtacacaccgcccgtcacaccatgagagttggcaacacccgaagtccgtgaggtaaccgtaaggagccagcggccgaag

SEQ ID NO: 1132 - DNA, 1531 bp, Clostridium thermoalcaliphilum
cgctggcggcgtgcctaacacatgcaagtcgagcggaggcaatgcttaacactgagtatttatctacaaggctactaagtagccagcgtcaagcgaacgaagtgagcttcacgtaaattatgaataacacatgatgagtattgagtgttaagtattgcctcagcggcggacgggtgagtaacgcgtgggtaacctgccctgtacacttggataacacaccgaaaggtgtgctaatacaagataatatcaaaggaaggcatcttcttttgatcaaagcttttgcggtacaggatggacccgcgtcccattagctagttggtggggtaatggcctaccaaggcgacgatgggtagccgacctgagagggtgatcggccacactggaactgagacacggtccagactcctacgggaggcagcagtggggaatattgcacaatgggcgaaagcctgatgcagcaacgccgcgtgaacgatgaaggccttcgggtcgtaaagttctgtccttgaggaagaaattttgacggtactcaaggaggaagccccggctaactacgtgccagcagccgcggtaatacgtagggggctagcgttatccggaattactgggcgtaaagggtgcgtaggcggcccttcaagtcagaggtgaagggctacggctcaaccgtagtaagcctttgaaactgttgggcttgagtgcaggagaggagagtggaattcccagtgtagcggtgaaatgcgtagatattgggaggaacaccagttgcgaaggcggctctctggactgtaactgacgctgaggcacgaaagcgtggggagcaaacaggattagataccctggtagtccacgccgtaaacgatgagtgctaggtgtcgggagttacccctctcggtgccgcagttaacgcattaagcactccgcctggggagtacgctcgcaagagtgaaactcaaaggaattgacggggacccgcacaagcagcggagcatgtggtttaattcgaagcaacgcgaagaaccttacctaggcttgacatcccttggacagctccttaatcggagccttcccttcggggactaaggtgacaggtggtgcatggttgtcgtcagctcgtgtcgtgagatgttgggttaagtcccgcaacgagcgcaacccctacttttagttgccatcattaagttgggcactctagagggactgccgaggataactcggaggaaggtggggatgacgtcaaatcatcatgccccttatgcctagggctacacacgtgctacaatggccagtacagagggcagcgaaaccgtgaggtcaagccaatcccttaaagctggtctcagttcggattgtaggctgaaactcgcctacatgaagctggagttgctagtaatcgcggatcagaatgccgcggtgaatgcgttcccgggtcttgtacacaccgcccgtcacaccatgggagtcgggggcacccgaagtcagctacccaaccgcaaggagggggctgccgaaggtgaaatcgatgactggggtg

SEQ ID NO: 1133 - DNA, 1433 bp, Clostridium thermobutyricum
  misc_feature (758)..(758): n is a, c, g, or t
gacgaacgctggcggcgtgcctaacacatgcaagtcgagcgagaagagctccttcgggagtaattctagcggcggacgggtgagtaacacgtgggcaacctgccttagtgagggggatagcctcccgaaagggagattaataccgcataacattattctatcgcatgatagaataatcaaaggagcaatccgcactaagatgggcccgcggcgcattagctagttggtgaggtaacggctcaccaaggcgacgatgcgtagccgacctgagagggtgatcggccacattggaactgagacacggtccagactcctacgggaggcagcagtggggaatattgcgcaatgggggaaaccctgacgcagcaacgccgcgtgagtgatgaaggtcttcggattgtaaagctctgtctttagggacgataatgacggtacctaaggaggaagccacggctaactacgtgccagcagccgcggtaatacgtaggtggcaagcgttgtccggatttactgggtgtaaagagtatgtaggcggatatttaagtcagatgtgaaattcccgggcttaacctgggcgctgcatttgatactggatatctagagtgtgggagaggacagcggaattcctagtgtagcggtgaaatgcgtagagattaggaagaatatcagtggcgaaggcgcctttctggactgtaactgacactgaggcgcgaaagcgtggggagcaaacaggattagataccctggtagtccacgcngtaaacgatgaacactaggtgtcgggggttaccaccctcggtgccgcagcaaacgcaataagtattccgcctggggagtacggtcgcaagattaaaactcaaaggaattgacggggacccgcacaagcagcggagcatgtggtttaattcgaagcaacgcgaagaaccttacctagacttgacatctcctgaattactcgtaatggaggaaccttcggggcaggaaagacaggtggtgcatggttgtcgtcagctcgtgtcgtgagatgttgggttaagtcccgcaacgagcgcaacccttattgttagttgctaccattaagttgagcactctaacgagactgccgcggttaacgtggaggaaggtggggatgacgtcaaatcatcatgccccttatgtctagggctacacacgtgctacaatggccggtacaacgagatgcaaacccgtgagggggagccaaacttcaaagccggtcccagttcggattgtaggctgaaactcgcctacatgaagtcggagttgctagtaatcgcgaatcagcatgtcgcggtgaatacgttcccgggccttgtacacaccgcccgtcacaccatgagagccggtaacacccgaagtccgtgaggtaacctttatggaggcagcggccgaaggtgggattggtgattggggtg

SEQ ID NO: 1134 - DNA, 1434 bp, Clostridium thermopalmarium
  misc_feature (414)..(414): n is a, c, g, or t
gacgaacgctggcggcgtgcctaacacatgcaagtcgagcgagaagagctccttcgggagtaattctagcggcggacgggtgagtaacacgtggccaacctaccttagtgagggggatagcctcccgaaagggagattaataccgcataacattattctatcgcatgatagaataatcaaaggagcaatccgcactaagatgggcccgcggcgcattagctagttggtgaggtaacggctcaccaaggcgacgatgcgtagccgacctgagagggtgatcggccacattggaactgagacacggtccagactcctacgggaggcagcagtggggaatattgcgcaatgggggaaaccctgacgcagcaacgccgcgtgagcgatgaaggtcttcggattgtaaagctctgtctntagggacgataatgacggtacctaaggaggaagccacggctaactacgtgccagcagccgcggtaatacgtaggtggcaagcgttgtccggatttactgggcgtaaagagtatgtaggcggatatttaagtcagatgtgaaattcccgggcttaacctgggcgctgcatttgatactggatatctagagtgtgggagaggaaagcggaattcctagtgtagcggtgaaatgcgtagagattaggaagaacaccagtggcgaaggcggctttctggaccataactgacgctgagatacgaaagcgtggggagcaaacaggattagataccctggtagtccacgccgtaaacgatgaatactaggtgtcgggggttaccaccctcggtgccgcagcaaacgcaataagtattccgcctggggagtacggtcgcaagattaaaactcaaaggaattgacggggacccgcacaagcagcggagcatgtggtttaattcgaagcaacgcgaagaaccttacctagacttgacatctcctgaattactcgtaatggaggaagcccttcggggcaggaagacaggtggtgcatggttgtcgtcagctcgtgtcgtgagatgttgggttaagtcccgcaacgagcgcaacccttatcgttagttgctaccattaagttgagcactctaacgagactgccgcggttaacgtggaggaaggtggggatgacgtcaaatcatcatgccccttatgtctagggctacacacgtgctacaatggccggtacaacgagatgcaaacccgtgagggggagccaaactccaaagccggtcccagttcggattgtaggctgaaactcgcctacatgaagtcggagttgctagtaatcgcgaatcagcatgtcgcggtgaatacgttcccgggtcttgtacacaccgcccgtgagaggatgagagccggtaacacccgaagtccgtgaggtaacctttatggagccagcggccgaaggtgggattggtgattggggtg

SEQ ID NO: 1135 - DNA, 1436 bp, Clostridium uliginosum
gacgaacgctggcggcgtgcctaacacatgcaagtcgagcgatgaagcttcttcggaagtggattagcggcggacgggtgagtaacacgtgggtaacctgcctcatagtgggggatagccttccgaaaggaagattaataccctataagattgtagcttcgcatgaagtagcaataaaaggagcaatccgctatgagatggacccgcgtcgcattagctagttggtaaggtaatggcttaccaaggcgacgatgcgtagccgacctgagagggtgatcggccacattgggactgagacacggcccagactcctacgggaggcagcagtggggaatattgcacaatgggggaaaccctgatgcagcaacgccgcgtgagtgatgaaggccttcgggttgtaaaactctgtctttggggacgataatgacggtacccaaggaggaagccacggctaactacgtgccagcagccgcggtaatacgtaggtggcaagcgttgtccggatttactgggcgtaaagggagcgtaggtggatatttaagtgggatgtgaaatgctcgggcttaacccgagagctgcattccaaactggatatctagagtgcaggagaggaaagtggaattcctagtgtagcggtgaaatgcgtagatattaggaagaacaccagtggcgaaggcgactttctggactgtaactgacactgaggctcgaaagcgtggggagcgaacaggattagataccctggtagtccacgccgtaaacgatgaatactaggtgtgggggttgtcatgacctccgtgccgccgctaacgcattaagtattccgcctggggagtacggtcgcaagattaaaactcaaaggaattgacgggggcccgcacaagcagcggagcatgtggtttaattcgaagcaacgcgaagaaccttacctagacttgacatctcctgaattactcttaatcgaggaagtcccttcggggacaggaagacaggtggtgcatggttgtcgtcagctcgtgtcgtgagatgttgggttaagtcccgcaacgagcgcaacccttattgttagttgctaccatttagttgagcactctagcgagactgcccgggttaaccgggaggaaggtggggatgacgtcaaatcatcatgccccttatgtctagggctacacacgtgctacaatggcaagtacagagagatgctaaaccgcgaggtggagccaaacttcaaaacttgtctcagttcggattgtaggctgaaactcgcctacatgaagctggagttgctagtaatcgcgaatcagaatgtcgcggtgaatacgttcccgggccttgtacacaccgcccgtcacaccatgagagttggcaatacccaaagttcgtgagctaacccgtaagggaggcagcgacctaaggtagggtcagcgattggggtg

SEQ ID NO: 1136 - DNA, 1431 bp, Clostridium ventriculi
  misc_feature (1413)..(1413): n is a, c, g, or t
  misc_feature (1431)..(1431): n is a, c, g, or t
gatgaacgctggcggcgtgcttaacacatgcaagtcgagcgagaaaagttcttcggagcttttctagcggcggacgggtgagtaacacgtgggcaacctgcctcatacaccccaatagccttccgaaaggaagattaataccgcataacattgttgaaaggcatcttttaacaatcaaaggagcaatccgctatgagatgggcccgcggcgcattagctagttggtgaggtaacggctcaccaaggcgacgatgcgtagccgacctgagagggtgatcggccacattggaactgagacacggtccagactcctacgggaggcagcagtggggaatattgcacaatgggggaaaccctgatgcagcaacgccgcgtgagtgatgaaggtcttcggattgtaaagctctgtctttagggacgataatgacggtacctaaggaggaagccacggctaactacgtgccagcagccgcggtaatacgtaggtggcaagcgttatccggatttactgggcgtaaagggagcgtaggcgatatttaagtgggatgtgaaatacccgagcttaacttgggagctgcattccaaactggatatctagagtgcaggagaggagaatggaattcctagtgtagcggtgaaatgcgtagagattaggaagaacaccagtggcgaaggcgattctctggactgtaactgacgctgaggctcgaaagcgtggggagcaaacaggattagataccctggtagtccacgccgtaaacgatgaatactaggtgtaggggccccaagcctctgtgccgccgctaacgcattaagtattccgcctggggagtacggtcgcaagattaaaactcaaaggaattgacggggacccgcacaagcagcggagcatgtggtttaattcgaagcaacgcgaagaaccttacctagacttgacatgtcctgaattaccagtaatgtgggaagttccttcgggaacaggaacacaggtggtgcatggttgtcgtcagctcgtgtcgtgagatgttgggttaagtcccgcaacgagcgcaacccttattgttagttggtaccattaagttgaccactctagcgagactgcccgggttaaccgggaggaaggtggggatgacgtcaaatcatcatgccccttatgtctagggctacacacgtgctacaatggcaagtacaaagagaagcaatactgtgaagtggagcaaaactcaaaaacttgtctcagttcggattgtaggctgaaactcgcctacatgaagctggagttgctagtaatcgcgaatcagaatgtcgcggtgaatacgttcccgggtcttgtacacaccgcccgtcacaccatgagagttggcaatacccgaagtccgtaagctaaccgtaaggaggcagcggccgaaggtngggtcagcgattggggtn

SEQ ID NO: 1137 - DNA, 1436 bp, Clostridium vincentii
gacgaacgctggcggcgtgcttaacacatgcaagtcgagcgatgaagcttcttcggaagcggattagcggcggacgggtgagtaacacgtgggcaacctgccctatagaggggaatagccttccgaaaggaagattaataccccataagattgtagtttcacatggaacagcaattaaaggagcaatccgctataggatgggcccgcggcgcattagctagttggtgaggtaacggctcaccaaggcgacgatgcgtagccgacctgagagggtgatcggccacattgggactgagacacggcccagactcctacgggaggcagcagtggggaatattgcacaatgggggaaaccctgatgcagcaacgccgcgtgagtgatgaaggccttcgggttgtaaagctctgtctttggggacgataatgacggtacccaaggaggaagccacggctaactacgtgccagcagccgcggtaatacgtaggtggcaagcgttgtccggatttactgggcgtaaagggagcgtaggcggatttttaagtgggatgtgaaatactcgggctcaacctgagtgctgcattccaaactggaagtctagagtacaggaggggaaagtggaattcctagtgtagcggtgaaatgcgtagatattaggaagaacaccggtggcgaaggcgactttctggactgtaactgacgctgaggctcgaaagcgtggggagcgaacaggattagataccctggtagtccacgccgtaaacgatgaatactaggtgtgggggttgtcatgacctccgtgccgccgctaacgcattaagtattccgcctggggagtacggtcgcaagattaaaactcaaaggaattgacgggggcccgcacaagcagcggagcatgtggtttaattcgaagcaacgcgaagaaccttacctagacttgacatctcctgcattacccttaatcggggaagtcctttcggggacaggaagacaggtggtgcatggttgtcgtcagctcgtgtcgtgagatgttgggttaagtcccgcaacgagcgcaacccttattgttagttgctaccatttagttgagcactctagcgagactgcccgggttaaccgggaggaaggtggggatgacgtcaaatcatcatgccccttatgtctagggctacacacgtgctacaatggccggtacaaagagacgcaataccgcaaggtggagccaaactataaaaccggtctcagttcggattgcaggctgaaactcgcctgcatgaagctggagttgctagtaatcgcgaatcagaatgtcgcggtgaatacgttcccgggccttgtacacaccgcccgtcacaccacgagagttggcaatacccaaagttggtgatctaacccgcaagggaggaagccacctaaggtagggtcagcgattggggtg

SEQ ID NO: 1138 - DNA, 1463 bp, Cobetia crustatorum
attgaacgctggcggcaggcttaacacatgcaagtcgagcggaaacgattctagcttgctagaaggcgtcgagcggcggacgggtgagtaatgcatgggaatctgcccgatagtgggggacaacctggggaaactcaggctaataccgcatacgtcctacgggagaaagcaggggatcttcggaccttgcgctatcggatgagcccatgtcggattagctagttggtgaggtaatggctcaccaaggcgacgatccgtagctggtctgagaggatgatcagccacactgggactgagacacggcccagactcctacgggaggcagcagtggggaatattggacaatgggcgcaagcctgatccagccatgccgcgtgtgtgaagaaggccttcgggttgtaaagcactttcagcgaggaagaaagcttctggattaatactctggaggaaggacatcactcgcagaagaagcaccggctaactccgtgccagcagccgcggtaatacggagggtgcaagcgttaatcggaattactgggcgtaaagcgcgcgtaggtggctaagtcagccaggtgtgaaagccccgggctcaacctgggaacggcatctggaactgcttggctagagtacagtagaggaaggtagaattcccggtgtagcggtgaaatgcgtagagatcgggaggaataccagtggcgaaggcggccttctggactgatactgacactgaggtgcgaaagcgtgggtagcaaacaggattagataccctggtagtccacgccgtaaacgatgtcaactagccgttgggtcccttgaggacttagtggcgcagctaacgcaataagttgaccgcctggggagtacggccgcaaggttaaaactcaaatgaattgacgggggcccgcacaagcggtggagcatgtggtttaattcgatgcaacgcgaagaaccttacctacccttgacatccagaggactttccagagatggattggtgccttcgggaactctgagacaggtgctgcatggctgtcgtcagctcgtgttgtgaaatgttgggttaagtcccgtaacgagcgcaacccctatccttatttgccagcgagtaatgtcgggaactctaaggagactgccggtgacaaaccggaggaaggtggggacgacgtcaagtcatcatggcccttacgggtagggctacacacgtgctacaatggcaagtacaaagggttgcaatacggcgacgtggagccaatcccataaagcttgcctcagtccggattggagtctgcaactcgactccatgaagtcggaatcgctagtaatcgtggatcagaatgccacggtgaatacgttcccgggccttgtacacaccgcccgtcacaccatgggagtggactgcaccagaagtggttagcctaaccttcgggagggcgatcaccacggtgtggttcatgactggggtg

SEQ ID NO: 1139 - DNA, 1463 bp, Cobetia marina
attgaacgctggcggcaggcttaacacatgcaagtcgagcggaaacgattctagcttgctagaaggcgtcgagcggcggacgggtgagtaatgcatgggaatctgcccgatagtgggggacaacctggggaaactcaggctaataccgcatacgtcctacgggagaaagcaggggatcttcggaccttgcgctatcggatgagcccatgtcggattagcttgttggtgaggtaacggctcaccaaggcgacgatccgtagctggtctgagaggatgatcagccacactgggactgagacacggcccagactcctacgggaggcagcagtggggaatattggacaatgggcgaaagcctgatccagccatgccgcgtgtgtgaagaaggccttcgggttgtaaagcactttcagcgaggaagaacgcttcgggattaatactcccgaggaaagacatcactcgcagaagaagcaccggctaactccgtgccagcagccgcggtaatacggagggtgcaagcgttaatcggaattactgggcgtaaagcgcgcgtaggtggctaagtcagccaggtgtgaaagccccgggctcaacctgggaacggcatctggaactgcttggctagagtgcaggagaggaaggtagaattcccggtgtagcggtgaaatgcgtagagatcgggaggaataccagtggcgaaggcggccttctggactgacactgacactgaggtgcgaaagcgtgggtagcaaacaggattagataccctggtagtccacgccgtaaacgatgtcaactagccgttgggtcccttgaggacttagtggcgcagctaacgcaataagttgaccgcctggggagtacggccgcaaggttaaaactcaaatgaattgacgggggcccgcacaagcggtggagcatgtggtttaattcgatgcaacgcgaagaaccttacctacccttgacatccagaggactttccagagatggattggtgccttcgggaactctgagacaggtgctgcatggctgtcgtcagctcgtgttgtgaaatgttgggttaagtcccgtaacgagcgcaacccctatccttatttgccagcgagtaatgtcgggaactctaaggagactgccggtgacaaaccggaggaaggtggggacgacgtcaagtcatcatggcccttacgggtagggctacacacgtgctacaatggcaagtacaaagggttgcaatacggcgacgtggagccaatcccataaagcttgcctcagtccggattggagtctgcaactcgactccatgaagtcggaatcgctagtaatcgtggatcagaatgccacggtgaatacgttcccgggccttgtacacaccgcccgtcacaccatgggagtggactgcaccagaagtggttagcctaaccttcgggagggcgatcaccacggtgtggttcatgactggggtg

SEQ ID NO: 1140 - DNA, 1465 bp, Cocleimonas flava
attgaacgctggcggcatgcttaacacatgcaagtcgaacggaaacgcgaagagcttgctctttggcgtcgagtggcggacgggtgagtaacgcgtgggaatctacccagtagtggaggacagccaggagaaatcctgattaatactgcatacgatctacggatgaaaggtggcctctgtttacatgctatcgctattggatgagcccgcgttagattagctagttggtggggtaagagcctaccaaggcgacgatctatagctggtctgagaggacgaccagccacatcgggactgagacacggcccggactcctacgggaggcagcagtggggaatattggacaatgggcgcaagcctgatccagcaatgccgcgtgtgtgaagaaggccctagggttgtaaagcactttcaattgtgaagaagggtataagattaatactcttgtatcttgacgttaactttagaagaagcaccggctaactctgtgccagcagccgcggtaatacagagggtgcgagcgttaatcggaattactgggcgtaaagcgcgcgtaggcggttagataagtcagatgtgaaatccccgggctcaacctgggaactgcacctgatactgtttaactagagtttgggagagggaagtagaatttcaggtgtagcggtgaaatgcatagagatctgaaggaataccagtggcgaaggcgacttcctggcctaaaactgacgctgaggtgcgaaagcgtgggtagcaaacgggattagataccccggtagtccacgccgtaaacgatgtcaactagtcgtcggttcccttgagggatcggtgacgcagctaacgcattaagttgaccgcctggggagtacggtcgcaagactaaaactcaaaggaattgacgggggcccgcacaagcggtggagcatgtggtttaattcgatgcaacgcgaagaaccttaccatcccttgacatccggagaatttgcaagagattgcttagtgccttcgggaactccgtgacaggtgctgcacggctgtcgtcagctcgtgtcgtgagatgttgggttaagtcccgcaacgagcgcaacccctatccttggttgctaacaggttaagctgagaactccagggagactgccggtgacaaaccggaggaaggtggggacgacgtcaagtcatcatggcccttatgggatgggctacacacgtgctacaatggccagtacagagggttgcgaacttgcgagagtaagctaatcccagaaagctggtcgtagtccggattggagtctgcaactcgactccatgaagttggaatcgctagtaatcgtggatcagaatgccacggtgaatacgttcccgggccttgtacacaccgcccgtcacaccatgggagtgggctgcaaaagaagtgggtagactaaccttcgggatgtcgctcaccactttgtggttcatgactggggtg

SEQ ID NO: 1141 - DNA, 1384 bp, Cognatishimia maritima
aacgaacgctggcggcaggcctaacacatgcaagtcgagcgcttccttcgggaagagcggcggacgggttagtaacgcgtgggaacgtgcccttctctaaggaatagccactggaaacggtgagtaataccttatacgcccttcgggggaaagatttatcggagaaggatcggcccgcgttagattagatagttggtggggtaatggcctaccaagtctacgatctatagctggttttagaggatgatcagcaacactgggactgagacacggcccagactcctacgggaggcagcagtggggaatcttagacaatgggcgcaagcctgatctagccatgccgcgtgagtgatgaaggccctagggtcgtaaagctctttcgcctgtgaagataatgacggtagcaggtaaagaaaccccggctaactccgtgccagcagccgcggtaatacggagggggttagcgttgttcggaattactgggcgtaaagcgcgcgtaggcggattagtaagttaggggtgaaatcccgaggctcaacctcggaactgcctctaaaactgctagtcttgagttcgagagaggtaagtggaattccgagtgtagaggtgaaattcgtagatattcggaggaacaccagtggcgaaggcggcttactggctcgatactgacgctgaggtgcgaaagtgtggggagcaaacaggattagataccctggtagtccacaccgtaaacgatgaatgccagtcgtcgggtagcatgctattcggtgacacacctaacggattaagcattccgcctggggagtacggtcgcaagattaaaactcaaaggaattgacgggggcccgcacaagcggtggagcatgtggtttaattcgaagcaacgcgcagaaccttaccaacccttgacatcctgtgctacatccagagatggatggttcccttcggggacgcagtgacaggtgctgcatggctgtcgtcagctcgtgtcgtgagatgttcggttaagtccggcaacgagcgcaacccacatccttagttgccagcagttcggctgggcactctagggaaactgcccgtgataagcgggaggaaggtgtggatgacgtcaagtcctcatggcccttacgggttgggctacacacgtgctacaatggcagtgacaatgggttaatcccaaaaagctgtctcagttcggattggggtctgcaactcgaccccatgaagtcggaatcgctagtaatcgcgtaacagcatgacgcggtgaatacgttcccgggccttgtacacaccgcccgtcacaccatgggagttggttctacccgacggccgtgcgctaaccttttggaggcagcggaccacggtaggatcagcgactggggtg

SEQ ID NO: 1142 - DNA, 1363 bp, Cohaesibacter gelatinilyticus
acatgcagtcgaacgggctcttcggagctagtggcagacgggtgagtaacgcgtgggaacctacctataagtacggaacaacacagagaaatttgtgctaataccgtatgtgccctttggggtaaagatttatcgcttatagatgggcccgcgttagattagctagttggtgaggtaatggctcaccaaggcgacgatctatagctggtctgagaggatgatcagccacactgggactgagacacggcccagactcctacgggaggcagcagtgaggaatattggacaatgggggcaaccctgatccagccatgccgcgtgagtgatgacggccttagggttgtaaagctctttcgctagggaagataatgacggtacctagtaaagaagccccggctaacttcgtgccagcagccgcggtaatacgaagggggctagcgttgttcggaatcactgggcgtaaagcgcgcgtaggcggacttttaagtcaggggtgaaatcccggggctcaacctcggaactgcctttgatactggaagtcttgagttcgagagaggtgagtggaataccgagtgtagaggtgaaattcgtagatattcggtggaacaccagtggcgaaggcggctcactggctcgatactgacgctgaggtgcgaaagcgtggggagcaaacaggattagataccctggtagtccacgccgtaaacgatgaatgctagttgttggtgggtttactcatcagtgacgcagctaacgcattaagcattccgcctggggagtacggtcgcaagattaaaactcaaaggaattgacgggggcccgcacaagcggtggagcatgtggtttaattcgaagcaacgcgcagaaccttaccagcccttgacataccggtcgcggatattggagacgatatccttcagtttggctggaccggatacaggtgctgcatggctgtcgtcagctcgtgtcgtgagatgttgggttaagtcccgcaacgagcgcaaccctcgcccttagttgccatcatttagttgggcactctagggggactgccggtgataagccggaggaaggtggggatgacgtcaagtcctcatggcccttacgggctgggctacacacgtgctacaatggtagtgacagagggcagcgactccgcgaggggaagctaatctccaaaaactatctcagttcggattgttctctgcaactcgagagcatgaagttggaatcgctagtaatcgcagatcagcatgctgcggtgaatacgttcccgggccttgtacacaccgcccgtcacaccatgggagttggttctacccgaaggcgatgcgctaaccgcaaggaggcgtcgaccacgagt

SEQ ID NO: 1143 - DNA, 1435 bp, Cohnella laeviribosi
  misc_feature (143)..(143): n is a, c, g, or t
gcctaatacatgcaagtcgagcggaccttcgagggagcttgcttccgagaaggttagcggcggacgggtgagtaacacgtaggcaacctgccctttagaccgggataacattcggaaacggatgctaagaccggataagcagnctcttcgcatgagggggctgggaaagacggagcaatctgtcactaaaggatgggcctgcggcgcattagctagttggtgaggtaacggctcaccaaggcgacgatgcgtagccgacctgagagggtgaacggccacactgggactgagacacggcccagactcctacgggaggcagcagtagggaatcttccacaatgggcgaaagcctgatggagcaacgccgcgtgagtgaggaaggccttcgggtcgtaaagctctgttgccagggaagaataaggtccagttcactgctggaccgatgacggtacctgagaagaaagccccggctaactacgtgccagcagccgcggtaatacgtagggggcgagcgttgtccggaattattgggcgtaaagcgcgcgcaggcggtcctttaagtctggtgtttaagtgcggggctcaaccccgtgacgcactggaaactgggggacttgagtgcaggagaggaaagcggaattccacgtgtagcggtgaaatgcgtagagatgtggaggaacaccagtggcgaaggcggctttctggactgtaactgacgctgaggcgcgaaagcgtggggagcaaacaggattagataccctggtagtccacgccgtaaacgatgagtgctaggtgttggggggggtccacccctcggtgccgaagttaacacattaagcactccgcctggggagtacggtcgcaagactgaaactcaaaggaattgacggggacccgcacaagcagtggagtatgtggtttaattcgaagcaacgcgaagaaccttaccaggtcttgacatccctctgaccggttcagagatggacctttccttcgggacagaggagacaggtggtgcatggttgtcgtcagctcgtgtcgtgagatgttgggttaagtcccgcaacgagcgcaacccttagttctagttgccagcacggaaggtgggcactctagagcgactgccggtgacaaaccggaggaaggcggggatgacgtcaaatcatcatgccccttatgacctgggctacacacgtactacaatggccggtacagcgggcagcgaaggagcgatccggagccaatcctagaaagccggtctcagttcggattgcaggctgcaactcgcctgcatgaagtcggaattgctagtaatcgcggatcagcatgccgcggtgaatacgttcccgggtcttgtacacaccgcccgtcacaccacgagagtttacaacacccgaagccggtggggtaaccgcaaggagccagccgtcgaagg

SEQ ID NO: 1144 - DNA, 1452 bp, Cohnella luojiensis
tacatgcaagtcgaacgaatctagaagttagcttgctaacttttaggttagtggcggacgggtgagtaacacgtaggcaacctgcccccaagatcgggataacattcggaaacggatgctaagaccggataaacaattggcccgcatgggcggattgggaaacacggcgcaagctgtggcttggggatgggcctgcggcgcattagctagttggtggggtaacggctcaccaaggcgacgatgcgtagccgacctgagagggtgaacggccacactgggactgagacacggcccagactcctacgggaggcagcagtagggaatcttccacaatgggcgaaagcctgatggagcaacgccgcgtgagtgaggaaggctttcgggtcgtaaagctctgttgccagggaagaataagggccagttaactgctggtccgatgacggtacctgagaagaaagccccggctaactacgtgccagcagccgcggtaatacgtagggggcaagcgttgtccggaattattgggcgtaaagcgcgcgcaggcggttctttaagtctggtgtctaagtgcggggctcaaccccgtgatgcactggaaactggggaacttgagtgcagaagaggagagcggaattccacgtgtagcggtgaaatgcgtagagatgtggaggaacaccagtggcgaaggcggctctctggactgtaactgacgctgaggcgcgaaagcgtggggagcaaacaggattagataccctggtagtccacgctgtaaacgatgagtgctaggtgttgggggtatcatgccctcggtgccgaagttaacacattaagcactccgcctggggagtacggtcgcaagactgaaactcaaaggaattgacggggacccgcacaagcagtggagtatgtggtttaattcgaagcaacgcgaagaaccttaccaggtcttgacatccctctgaatcctctagagatagaggcggccttcgggacagaggagacaggtggtgcatggttgtcgtcagctcgtgtcgtgagatgttgggttaagtcccgcaacgagcgcaacccctaaacttagttgccagcacgtaaaggtgggcactctaggttgactgccggtgacaaaccggaggaaggcggggatgacgtcaaatcatcatgccccttatgacctgggctacacacgtactacaatggccggtacaacgggctgcgaaaccgcgaggtggagccaatcccaacaaagccggtctcagttcggattgcaggctgcaactcgcctgcatgaagtcggaattgctagtaatcgcggatcagcatgccgcggtgaatacgttcccgggtcttgtacacaccgcccgtcacaccacgagagtttacaacacccgaagtcggtggggtaacccgcaagggagccagccgccgaaggtggggtagatgattggggtg

SEQ ID NO: 1145 - DNA, 1473 bp, Cohnella lupini
gacgaacgctggcggcgtgcctaatacatgcaagtcgagcggacttacatagagcttgcttctaacttggttagtggcggacgggtgagtaacacgtaggcaacctgcccacaagatcgggataacattcggaaacgaatgctaagaccggatgcacaagtttgccgcatggcgagcttgggaaacacgggcaagctgtggcttgtggatgggcctgcggcgcattagctagttggtggggtaatggctcaccaaggcgacgatgcgtagccgacctgagagggtgaacggccacactgggactgagacacggcccagactcctacgggaggcagcagtagggaatcttccacaatgggcgaaagcctgatggagcaacgccgcgtgagtgaggaaggctttcgggtcgtaaagctctgttgccagggaagaataaggatgagagtaactgctcatccgatgacggtacctgagaagaaagccccggctaactacgtgccagcagccgcggtaatacgtagggggcaagcgttgtccggaattattgggcgtaaagcgcgcgcaggcggttctttaagtctggtgtctaagtgcggggctcaaccccgtgatgcactggaaactggggaacttgagtgcagaagaggagagcggaattccacgtgtagcggtgaaatgcgtagagatgtggaggaacaccagtggcgaaggcggctctctggactgtaactgacgctgaggcgcgaaagcgtggggagcaaacaggattagataccctggtagtccacgctgtaaacgatgagtgctaggtgttgggggtatcatgccctcggtgccgaagttaacacattaagcactccgcctggggagtacggtcgcaagactgaaactcaaaggaattgacggggacccgcacaagcagtggagtatgtggtttaattcgaagcaacgcgaagaaccttaccaggtcttgacatccctctgaccgtcctagagatagggctttccttcgggacagaggagacaggtggtgcatggttgtcgtcagctcgtgtcgtgagatgttgggttaagtcccgcaacgagcgcaacccctaaacttagttgccagcacttgggtgggcactctaggttgactgccggtgacaaaccggaggaaggcggggatgacgtcaaatcatcatgccccttatgacctgggctacacacgtactacaatggccggtacaacgggctgcgaaaccgcgaggtggagccaatcccaacaaagccggtctcagttcggattgcaggctgcaactcgcctgcatgaagtcggaattgctagtaatcgcggatcagcatgccgcggtgaatacgttcccgggtcttgtacacaccgcccgtcacaccacgagagtttacaacacccgaagtcggtggggtaacccgcaagggagccagccgccgaaggtggggtagatgattggggtg

SEQ ID NO: 1146 - DNA, 1458 bp, Coleofasciculus chthonoplastes
  misc_feature (1368)..(1368): n is a, c, g, or t
gatgaacgctggcggtctgcttaacacatgcaagtcgaacgcaaccttcgggttgagtggcggacgggtgagtaacgcgtgagaatctgccttggggtcggggacaaccactggaaacggtggctaataccggataagccgattggtgaaagatttattgcccgaagaggagctcgcgtctgattagctagttggtgaggtaagagctcaccaaggcagcgatcagtagctggtctgagaggacgatcagccacactgggactgagacacggcccagactcctacgggaggcagcagtggggaattttccgcaatgggcgaaagcctgacggagcaagaccgcgtgagggaggaaggctcttgggttgtaaacctcttttctcagggaagaagctctgacggtacctgaggaatcagcctcggctaactccgtgccagcagccgcggtaatacggaggaggcaagcgttatccggaattattgggcgtaaagcgtccgcaggtggcgattcaagtctgctgtcaaagcacggggcttaactccgtaaaggcagtggaaactgaatagctagagtgccgtaggggtagagggaattcccggtgtagcggtgaaatgcgtagagatcgggaagaacatcggtggcgaaagcgctctactggacggcaactgacactcagggacgaaagctaggggagcgaatgggattagataccccagtagtcctagctgtaaacgatggatactaggtgtagcttgtatcgacccgagctgtgccgaagctaacgcgttaagtatcccgcctggggagtacgcacgcaagtgtgaaactcaaaggaattgacgggggcccgcacaagcggtggagtatgtggtttaattcgatgcaacgcgaagaaccttaccagggcttgacatgtccggaatcccggtgaaagctgggagtgccttcgggagccggaacacaggtggtgcatggctgtcgtcagctcgtgtcgtgagatgttgggttaagtcccgcaacgagcgcaaccctcgtctttagttgccagcattaagttgggcactctagagagactgccggtgacaaaccggaggaaggtggggatgacgtcaagtcagcatgccccttacgctctgggcgacacacgtactacaatggtcgggacagagggcagctaacctgcgaaggcaagctaatcccagaaactcggcctcagttcagatcgcaggctgcaactcgcctgcgtgaaggaggaatcgctagtaatcgccggtcagaatacggcggtgaatccgttcccgggccttgtacacaccgcccgtcacaccatggaagctggccacgcccgaagtcgttaccctaacctntaggggagggggacgccgaaggcagggttggtgactggggtgaagtcgtaacaaggtagccgtaccggaaggtgtggctggatcacctcc

SEQ ID NO: 1147 - DNA, 1453 bp, Collimonas arenae
attgaacgctggcggcatgccttacacatgcaagtcgaacggtaacagggagcttgctccgctgacgagtggcgaacgggtgagtaatatatcggaacgtacctttgagtgggggataactagtcgaaagattagctaataccgcatacgatctacggatgaaagtgggggctcgcaagacctcatgctcatagagcggccgatatctgattagctagttggtgaggtaaaggctcaccaaggcatcgatcagtagctggtctgagaggacgaccagccacactgggactgagacacggcccagactcctacgggaggcagcagtggggaattttggacaatgggggcaaccctgatccagcaatgccgcgtgagtgaagaaggccttcgggttgtaaagctcttttgtcagggaagaaacggtgagagctaatatctcttgctaatgacggtacctgaagaataagcaccggctaactacgtgccagcagccgcggtaatacgtagggtgcaagcgttaatcggaattactgggcgtaaagcgtgcgcaggcggttatgtaagacaggtgtgaaatccccgggcttaacctgggaatggcatttgtgactgcatagctagagtgtgtcagaggggggtagaattccacgtgtagcagtgaaatgcgtagagatgtggaggaataccgatggcgaaggcagccccctgggataacactgacgctcatgcacgaaagcgtggggagcaaacaggattagataccctggtagtccacgccctaaacgatgtctactagttgtcgggtcttaattgacttggtaacgcagctaacgcgtgaagtagaccgcctggggagtacggtcgcaagattaaaactcaaaggaattgacggggacccgcacaagcggtggatgatgtggattaattcgatgcaacgcgaaaaaccttacctacccttgacatgtacagaatcccgaagagatttgggagtgttcgaaagaaaactgtaacacaggtgctgcatggctgtcgtcagctcgtgtcgtgagatgttgggttaagtcccgcaacgagcgcaacccttgtcattagttgctacgaaagggcactctaatgagactgccggtgacaaaccggaggaaggtggggatgacgtcaagtcctcatggcccttatgggtagggcttcacacgtcatacaatggtacatacagagggccgccaacccgcgagggggagctaatcccagaaagtgtatcgtagtccggattgtagtctgcaactcgactacatgaagttggaatcgctagtaatcgcggatcagcatgtcgcggtgaatacgttcccgggtcttgtacacaccgcccgtcacaccatgggagcgggttttaccagaagtaggtagcctaaccgcaaggggggcgcttaccacggtaggattcgtgactggggtg

SEQ ID NO: 1148 - DNA, 1453 bp, Collimonas fungivorans
attgaacgctggcggcatgccttacacatgcaagtcgaacggtaacagggagcttgctccgctgacgagtggcgaacgggtgagtaatatatcggaacgtacctttgagtgggggataactagtcgaaagactagctaataccgcatacgatctacggatgaaagtgggggctcgcaagacctcatgctcatagagcggccgatatctgattagctagttggtgaggtaaaggctcaccaaggcatcgatcagtagctggtctgagaggacgaccagccacactgggactgagacacggcccagactcctacgggaggcagcagtggggaattttggacaatgggggcaaccctgatccagcaatgccgcgtgagtgaagaaggccttcgggttgtaaagctcttttgtcagggaagaaacgggggatcctaatacggtcccctaatgacggtacctgaagaataagcaccggctaactacgtgccagcagccgcggtaatacgtagggtgcaagcgttaatcggaattactgggcgtaaagcgtgcgcaggcggttttgtaagacaggtgtgaaatccccgggcttaacctgggaatggcatttgtgactgcaaggctagagtgtgtcagaggggggtagaattccacgtgtagcagtgaaatgcgtagagatgtggaggaataccgatggcgaaggcagccccctgggataacactgacgctcatgcacgaaagcgtggggagcaaacaggattagataccctggtagtccacgccctaaacgatgtctactagttgtcgggtcttaattgacttggtaacgcagctaacgcgtgaagtagaccgcctggggagtacggtcgcaagattaaaactcaaaggaattgacggggacccgcacaagcggtggatgatgtggattaattcgatgcaacgcgaaaaaccttacctacccttgacatgtacagaatcccgaagagatttgggagtgttcgaaagaaagctgtaacacaggtgctgcatggctgtcgtcagctcgtgtcgtgagatgttgggttaagtcccgcaacgagcgcaacccttgtcattagttgctacgaaagggcactctaatgagactgccggtgacaaaccggaggaaggtggggatgacgtcaagtcctcatggcccttatgggtagggcttcacacgtcatacaatggtacatacagagggccgccaacccgcgagggggagctaatcccagaaagtgtatcgtagtccggattgtagtctgcaactcgactacatgaagttggaatcgctagtaatcgcggatcagcatgtcgcggtgaatacgttcccgggtcttgtacacaccgcccgtcacaccatgggagcgggttttaccagaagtaggtagcctaaccgtaaggagggcgcttaccacggtaggattcgtgactggggtg

SEQ ID NO: 1149 - DNA, 1453 bp, Collimonas pratensis
attgaacgctggcggcatgccttacacatgcaagtcgaacggtaacagggagcttgctccgctgacgagtggcgaacgggtgagtaatatatcggaacgtacctttgagtgggggataactagtcgaaagattagctaataccgcatacgatctacggatgaaagtgggggatcgcaagacctcatgctcatagagcggccgatatctgattagctagttggtgaggtaaaggctcaccaaggcttcgatcagtagctggtctgagaggacgaccagccacactgggactgagacacggcccagactcctacgggaggcagcagtggggaattttggacaatgggggcaaccctgatccagcaatgccgcgtgagtgaagaaggccttcgggttgtaaagctcttttgtcagggaagaaacggggggtcctaatacggtcccctaatgacggtacctgaagaataagcaccggctaactacgtgccagcagccgcggtaatacgtagggtgcaagcgttaatcggaattactgggcgtaaagcgtgcgcaggcggttatgtaagacaggtgtgaaatccccgggcttaacctgggaatggcatttgtgactgcatagctagagtgtgtcagaggggggtagaattccacgtgtagcagtgaaatgcgtagagatgtggaggaataccgatggcgaaggcagccccctgggataacactgacgctcatgcacgaaagcgtggggagcaaacaggattagataccctggtagtccacgccctaaacgatgtctactagttgtcgggtcttaattgacttggtaacgcagctaacgcgtgaagtagaccgcctggggagtacggtcgcaagattaaaactcaaaggaattgacggggacccgcacaagcggtggatgatgtggattaattcgatgcaacgcgaaaaaccttacctacccttgacatgtacagaatcccgaagagatttgggagtgttcgaaagaaaactgtaacacaggtgctgcatggctgtcgtcagctcgtgtcgtgagatgttgggttaagtcccgcaacgagcgcaacccttgtcattagttgctacgaaagggcactctaatgagactgccggtgacaaaccggaggaaggtggggatgacgtcaagtcctcatggcccttatgggtagggcttcacacgtcatacaatggtacatacagagggccgccaacccgcgagggggagctaatcccagaaagtgtatcgtagtccggattgtagtctgcaactcgactacatgaagttggaatcgctagtaatcgcggatcagcatgtcgcggtgaatacgttcccgggtcttgtacacaccgcccgtcacaccatgggagcgggttttaccagaagtaggtagcctaaccgtaaggagggcgcttaccacggtaggattcgtgactggggtg

SEQ ID NO: 1150 - DNA, 1467 bp, Colwellia beringensis
attgaacgctggcggcaggcttaacacatgcaagtcgagcggtaacagagatagcttgctatctgctgacgagcggcggacgggtgagtaatgcttgggaatatgcctttgagtgggggacaacagttggaaacgactgctaataccgcataacgtctacggaccaaagggggggacgcttcggcacctctcgctcattgattagcccaagtgagattagctagttggtaaggtaatggcttaccaaggcgacgatctctagctggtttgagaggatgatcagccacactgggactgagacacggcccagactcctacgggaggcagcagtggggaatattgcacaatgggcgaaagcctgatgcagccatgccgcgtgtgtgaagaaggccttcgggttgtaaagcactttcagcgaggaggaaaggttagtagttaataactgctagctgtgacgttactcgcagaagaagcaccggctaacttcgtgccagcagccgcggtaatacgaggggtgcaagcgttaatcggaattactgggcgtaaagcgtgcgtaggtggtttgttaagcaagatgtgaaagccctgggctcaacctgggaactgcattttgaactggcaagctagagttttgtagagggtagtggaatttccagtgtagcggtgaaatgcgtagagattggaaggaacatcagtggcgaaggcggctacctggacaaagactgacactgaggcacgaaagcgtggggagcaaacaggattagataccctggtagtccacgccgtaaacgatgtcaactagccgtctgtagacttgatctgtgggtggcgtagctaacgcgctaagttgaccgcctggggagtacggccgcaaggttaaaactcaaatgaattgacgggggcccgcacaagcggtggagcatgtggtttaattcgatgcaacgcgaagaaccttaccatcccttgacatccagagaagagactagagatagacttgtgccttcgggaactctgtgacaggtgctgcatggctgtcgtcagctcgtgttgtgaaatgttgggttaagtcccgcaacgagcgcaacccctatccttatttgccagcgagttatgtcgggaactctaaggagactgccggtgataaaccggaggaaggtggggacgacgtcaagtcatcatggcccttacgggatgggctacacacgtgctacaatggcaagtacagagggcagcaataccgcgaggtggagcgaatcccacaaagcttgtcgtagtccggattggagtctgcaactcgactccatgaagtcggaatcgctagtaatcgtagatcagaatgctacggtgaatacgttcccgggccttgtacacaccgcccgtcacaccatgggagtgggttgcaaaagaagtggctagtttaacccttcggggaggacggtcaccactttgtgattcatgactggggtg

SEQ ID NO: 1151 - DNA, 1463 bp, Colwellia chukchiensis
attgaacgctggcggcaggcttaacacatgcaagtcgagcggaaacgagaagtacttgtacttcggcgtcgagcggcggacgggtgagtaatgcttgggaatatgcctttgagtgggggacaacagttggaaacgactgctaataccgcataacgtctacggaccaaagggggggatcttcggacctctcgctcattgattagcccaagtgagattagctagttggtaaggtaatggcttaccaaggcgacgatctctagctggtttgagaggatgatcagccacactgggactgagacacggcccagactcctacgggaggcagcagtggggaatattgcacaatgggcgcaagcctgatgcagccatgccgcgtgtgtgaagaaggccttcgggttgtaaagcactttcagcgaggaggaaagggtgttgtttaatacgcagcatctgtgacgttactcgcagaagaagcaccggctaacttcgtgccagcagccgcggtaatacgaggggtgcaagcgttaatcggaattactgggcgtaaagcgtgcgtaggtggtttgttaagcaagatgtgaaagccctgggctcaacctgggaactgcattttgaactggcaagctagagttttgtagagggtagtggaatttccagtgtagcggtgaaatgcgtagagattggaaggaacatcagtggcgaaggcggctacctggacaaagactgacactgaggcacgaaagcgtggggagcaaacaggattagataccctggtagtccacgccgtaaacgatgtcaactagccgtctgtggtcttgaaccgtgggtggcgtagctaacgcgctaagttgaccgcctggggagtacggccgcaaggttaaaactcaaatgaattgacgggggcccgcacaagcggtggagcatgtggtttaattcgatgcaacgcgaagaaccttaccatcccttgacatccagagaagagactagagatagacttgtgccttcgggaactctgtgacaggtgctgcatggctgtcgtcagctcgtgttgtgaaatgttgggttaagtcccgcaacgagcgcaacccctatccttatttgccagcgcgtagtggcgggaactctaaggagactgccggtgataaaccggaggaaggtggggacgacgtcaagtcatcatggcccttacgggatgggctacacacgtgctacaatggcaagtacagagggcagcgataccgcgaggtggagcgaatcccataaagcttgtcgtagtccggatcggagtctgcaactcgactccgtgaagtcggaatcgctagtaatcgtagatcagaatgctacggtgaatacgttcccgggccttgtacacaccgcccgtcacaccatgggagtgggatgcaaaagaagtggttagtctaaccttcgggagggcgatcaccactttgtgtttcatgactggggtg

SEQ ID NO: 1152 - DNA, 1464 bp, Colwellia demingiae
  misc_feature (355)..(356): n is a, c, g, or t
  misc_feature (495)..(495): n is a, c, g, or t
  misc_feature (505)..(505): n is a, c, g, or t
  misc_feature (568)..(568): n is a, c, g, or t
  misc_feature (747)..(747): n is a, c, g, or t
  misc_feature (764)..(764): n is a, c, g, or t
  misc_feature (773)..(773): n is a, c, g, or t
  misc_feature (782)..(782): n is a, c, g, or t
  misc_feature (791)..(791): n is a, c, g, or t
  misc_feature (799)..(799): n is a, c, g, or t
  misc_feature (806)..(806): n is a, c, g, or t
  misc_feature (808)..(808): n is a, c, g, or t
  misc_feature (823)..(823): n is a, c, g, or t
  misc_feature (831)..(832): n is a, c, g, or t
  misc_feature (834)..(834): n is a, c, g, or t
attgaacgctggcggcaggcttaacacatgcaagtcgagcggtaacagagatagcttgctatctgctgacgagcggcggacgggtgagtaatgcttgggaatatgccttatggtgggggacaacagttggaaacgactgctaataccgcataacgtctacggaccaaagggggggatcttcggacctctcgccatttgattagcccaagtgagattagctagttggtaaggtaatggcttaccaaggcgacgatctctagctggtttgagaggatgatcagccacactgggactgagacacggcccagactcctacgggaggcagcagtggggaatattgcacaatgggcgaaannctgatgcagccatgccgcgtgtgtgaagaaggccttcgggttgtaaagcactttcagttgtgaggaaagggatgtagttaatagctgcattctgtgacgttaacaacagaagaagcaccggctaactccgtgccagcanccgcggtaanacggagggtgcgagcgttaatcggaattactgggcgtaaaacgttcgtaagcggtttgttaanccagatgtgaaagccccgggctcaacctgggaactgcatttgaactggcaaactagagtaccgtagaaggtggtggaattcccagtgtagcggtgaaatgcgtagagatgggaaggaacatcaatggcgaaggcgggcacctggacagatactgacgctgaggaacgaaagcgtggggngcaaacaggattagatnccctggtantcccccccntaaacgatntcaactanccgtttntncccttgagaactgantggcgcanntnacgcactaagttgaccgcctggggagtacggccgcaaggttaaaactcaaatgaattgacgggggcccgcacaagcggtggagcatgtggtttaattcgatgcaacgcgaagaaccttaccatcccttgacatccacagaagagaccagagatggacttgtgccttcgggaactgtgtgacaggtgctgcatggctgtcgtcagctcgtgttgtgaaatgttgggttaagtcccgcaacgagcgcaacccctatccttatttgccagcgcgttatggcgggaactctaaggagactgccggtgataaaccggaggaaggtggggacgacgtcaagtcatcatggcccttacgggatgggctacacacgtgctacaatggcaagtacagagggcagcaataccgcgaggtggagcgaatcccacaaagcttgtcgtagtccggattggagtctgcaactcgactccatgaagtcggaatcgctagtaatcgtggatcagaatgccacggtgaatacgttcccgggccttgtacacaccgcccgtcacaccatgggagtgggatgcaaaagaagtggctagtttaacccctcggggaggacggtcaccactttgtgtttcatgactggggtg

SEQ ID NO: 1153 - DNA, 1360 bp, Colwellia hornerae
  misc_feature (15)..(15): n is a, c, g, or t
  misc_feature (19)..(19): n is a, c, g, or t
  misc_feature (21)..(21): n is a, c, g, or t
  misc_feature (27)..(27): n is a, c, g, or t
  misc_feature (38)..(38): n is a, c, g, or t
  misc_feature (41)..(41): n is a, c, g, or t
  misc_feature (66)..(66): n is a, c, g, or t
  misc_feature (75)..(75): n is a, c, g, or t
  misc_feature (131)..(131): n is a, c, g, or t
  misc_feature (196)..(196): n is a, c, g, or t
  misc_feature (200)..(200): n is a, c, g, or t
  misc_feature (278)..(278): n is a, c, g, or t
  misc_feature (282)..(282): n is a, c, g, or t
  misc_feature (288)..(288): n is a, c, g, or t
  misc_feature (318)..(318): n is a, c, g, or t
  misc_feature (333)..(333): n is a, c, g, or t
  misc_feature (351)..(351): n is a, c, g, or t
  misc_feature (383)..(383): n is a, c, g, or t
  misc_feature (408)..(408): n is a, c, g, or t
  misc_feature (424)..(424): n is a, c, g, or t
  misc_feature (513)..(513): n is a, c, g, or t
  misc_feature (527)..(527): n is a, c, g, or t
  misc_feature (544)..(544): n is a, c, g, or t
  misc_feature (595)..(595): n is a, c, g, or t
  misc_feature (755)..(755): n is a, c, g, or t
  misc_feature (774)..(774): n is a, c, g, or t
  misc_feature (900)..(900): n is a, c, g, or t
  misc_feature (1033)..(1033): n is a, c, g, or t
  misc_feature (1168)..(1168): n is a, c, g, or t
  misc_feature (1220)..(1220): n is a, c, g, or t
  misc_feature (1222)..(1222): n is a, c, g, or t
  misc_feature (1229)..(1229): n is a, c, g, or t
  misc_feature (1251)..(1251): n is a, c, g, or t
gtaacagagagtagnttgntnctttgntgacgagcggnggncgggtgagtaatgcttgggaatatnccatatggngggggacaacagttggaaacgactgctaataccgcataacgtctacggaccaaagngggggattcttcggaacctcttgccatttgattaggccaagtgagattagctagttggtgaggtnatgnctcaccaaggcgacgatctctagctggtttgagaggatgatcagccacactgggactgagacacggcccagactcctncggnaggcancagtggggaatattgcacaatgggcgaaancctgatccacccatnccgcgtgtgtgaagaagnccttcgggttgtaaagcactttcagttgtgangaaaggtgggtagttaatacctgcncactgtgacgttaccnacagaagaagcaccggctaacttcgtgccagcagccgcggtaatacgaggggtgcaagcgttaatcggaattactgggcgtaaagcgtncgtaggcggtttgntaagcaagatgtgaaancccagggctcaaccttggaactgcattttgaactgccaaactagagtactntagagggtggtggaatttccagtgtagcggtgaaatgcgtagagatttgaaggaacatcagtggcgaaggcggccacctggacagatactgacgctgaggcacgaaagcgtggggagcaaacaggattagataccctggtagtccacgccgtaaacgatntcaactagctgtctgtggncttgatccgtgggtagcggagctaacgcattaagttgaccgcctggggagtacggccgcaaggttaaaactcaaatgaattgacgggggcccgcacaagcggtggagcatgtggtttaattcgatncaacgcgaagaaccttaccatcccttgacatccacagaagagactagagatagacttgtgccttcgggaactgtgagacaggtgctgcatcgctgtcgtcagctcgtgttgtgaaatgttgggttaagtcccncaacgagcgcaacccctatccatatttgccagcgcgttatggcgggaactctaaggagactgccggtgataaaccggaggaaggtggggacgacgtcaagtcatcatggcccttacgggatgggctacacacgtnctacaatggcaagtacagagggcagcaataccgcgaggtggagcgaatcccncnaagcttntcgtagtccggattggagtctncaactcgactccatgaagtcggaatcgctagtaatcgtagatcagaatgctacggtgaatacgttcccgggccttgtacacaccgcccgtcacaccatgggagtgggat

SEQ ID NO: 1154 - DNA, 1478 bp, Colwellia marinimaniae
attgaacgctggcggcaggcttaacacatgcaagtcgaacggtaacatgaactagcttgctagtttgatgacgagtggcggacgggtgagtaatgcttgggaatatgccttggagtgggggacaacagttggaaacgactgctaataccgcataacgtgctttttgtagtgaaaagtaccaaagggggggatcttcggacctcccgcttcttgattagcccaagtgagattagctagttggtaaggtaaaggcttaccaaggcgacgatctctagctggtttgagaggatgatcagccacactgggactgagacacggcccagactcctacgggaggcagcagtggggaatattgcacaatgggcgaaagcctgatgcagccatgccgcgtgtgtgaagaaggccttcgggttgtaaagcactttcagttgtgaggaaaggtggtgatttaataaatcatcactgtgacgttagcaacagaagaagcaccggctaacttcgtgccagcagccgcggtaatacgaggggtgcaagcgttaatcggaattactgggcgtaaagcgttcgtaggcggttatttaagcaagatgtgaaagcccagggctcaaccttggaactgcattttgaactgggtaactagagtactgtagagggtggtggaatttccagtgtagcggtgaaatgcgtagagattggaaggaacatcagtggcgaaggcggccacctggacagatactgacgctgaggaacgaaagcgtggggagcgaacaggattagataccctggtagtccacgccgtaaacgatgtcaactagccgttcgtggacttgatccgtgagtggcgcagctaacgcactaagttgaccgcctggggagtacggccgcaaggttaaaactcaaatgaattgacgggggcccgcacaagcggtggagcatgtggtttaattcgatgcaacgcgaagaaccttaccatcccttgacatcctcagaagccagtagagatacaggcgtgccttcgggaactgagtgacaggtgctgcatggctgtcgtcagctcgtgttgtgaaatgttgggttaagtcccgcaacgagcgcaacccctatccttatttgccagcgcgttatggcgggaactctaaggagactgccggtgataaaccggaggaaggtggggacgacgtcaagtcatcatggcccttacgggatgggctacacacgtgctacaatggcaggtacagagggctgcaataccgcgaggtggagcgaatcccacaaagcctgtcgtagtccggatcggagtctgcaactcgactccgtgaagtcggaatcgctagtaatcgtggatcagaacgccacggtgaatacgttcccgggccttgtacacaccgcccgtcacaccatgggagtgggatgcaaaagaagtggctagtttaaccttcgggaggacggtcaccactttgtgtttcatgactggggtg

SEQ ID NO: 1155 - DNA, 1465 bp, Colwellia psychrerythraea
attgaacgctggcggcaggcttaacacatgcaagtcgagcggtaacatttctagcttgctagaagatcacgagcggcggacgggtgagtaatgcttgggaatatgccttatggtgggggacaacagttggaaacgactgctaataccgcataacgtctacggaccaaagggggggattttcggacctctcgccatttgattagcccaagtgagattagctagttggtgaggtaatggctcaccaaggcgacgatctctagctggtttgagaggatgatcagccacactgggactgagacacggcccagactcctacgggaggcagcagtggggaatattgcacaatgggcgaaagcctgatgcagccatgccgcgtgtgtgaagaaggccttcgggttgtaaagcactttcagttgtgaggaaagggatgtagttaataactgcatgctgtgacgttaacaacagaagaagcaccggctaacttcgtgccagcagccgcggtaatacgaggggtgctagcgttaatcggaattactgggcgtaaagcgttcgtaggcggtctattaagcaagatgtgaaagcccagggctcaaccttggaactgcattttgaactggtagactagagtactgtagagggtggtggaatttccagtgtagcggtgaaatgcgtagagattggaaggaacatcagtggcgaaggcggccacctggacagatactgacgctgaggaacgaaagcgtggggagcgaacaggattagataccctggtagtccacgccgtaaacgatgtcaactagccgttcgtgtccttgagacgtgagtggcgcagctaacgcactaagttgaccgcctggggagtacggccgcaaggttaaaactcaaatgaattgacgggggcccgcacaagcggtggagcatgtggtttaattcgatgcaacgcgaagaaccttaccatcccttgacatccagagaagcgactagagatagacttgtgccttcgggaactctgtgacaggtgctgcatggctgtcgtcagctcgtgttgtgaaatgttgggttaagtcccgcaacgagcgcaacccctatccttatttgccagcgcgtaatggcgggaactctaaggagactgccggtgataaaccggaggaaggtggggacgacgtcaagtcatcatggcccttacgggatgggctacacacgtgctacaatggcaggtacagagggcagcaataccgcgaggtggagcgaatcccacaaagcttgtcgtagtccggattggagtctgcaactcgactccatgaagtcggaatcgctagtaatcgtagatcagaatgctacggtgaatacgttcccgggccttgtacacaccgcccgtcacaccatgggagtgggatgcaaaagatgtggctagtttctaaccttcgggaggacggtcaccactttgtgtttcatgactggggtg

SEQ ID NO: 1156 - DNA, 1455 bp, Comamonas serinivorans
attgaacgctggcggaatgctttacacatgcaagtcgaacggcagcataggtgcttgcacctgatggcgagtggcgaacgggtgagtaatacatcggaacgtgcccagtcgtgggggataactgctcgaaagagcagctaataccgcatacgatctgaggatgaaagcgggggaccttcgggcctcgcgcgattggagcggccgatggcagattaggtagttggtggggtaaaggcttaccaagcctacgatctgtagctggtctgagaggacgaccagccacactgggactgagacacggcccagactcctacgggaggcagcagtggggaattttggacaatgggcgaaagcctgatccagccattccgcgtgcaggatgaaggccctcgggttgtaaactgcttttgtacggaacgaaaagccttgggttaataccctggggtcatgacggtaccgtaagaataagcaccggctaactacgtgccagcagccgcggtaatacgtagggtgcaagcgttaatcggaattactgggcgtaaagcgtgcgcaggcggttttgtaagacagaggtgaaatccccgggctcaacctgggaactgcctttgtgactgcaaggctggagtgcggcagagggggatggaattccgcgtgtagcagtgaaatgcgtagatatgcggaggaacaccgatggcgaaggcaatcccctgggcctgcactgacgctcatgcacgaaagcgtggggagcaaacaggattagataccctggtagtccacgccctaaacgatgtcaactggttgttggggattaatttcttcagtaacgaagctaacgcgtgaagttgaccgcctggggagtacggccgcaaggttgaaactcaaaggaattgacggggacccgcacaagcggtggatgatgtggtttaattcgatgcaacgcgaaaaaccttacccacctttgacatggcaggaacttaccagagatggtttggtgctcgaaagagaacctgcacacaggtgctgcatggctgtcgtcagctcgtgtcgtgagatgttgggttaagtcccgcaacgagcgcaacccttgccattagttgctacgaaagggcactctaatgggactgccggtgacaaaccggaggaaggtggggatgacgtcaagtcctcatggcccttataggtggggctacacacgtcatacaatggctggtacaaagggttgccaacccgcgagggggagctaatcccataaaaccagtcgtagtccggatcgcagtctgcaactcgactgcgtgaagtcggaatcgctagtaatcgtggatcagcatgtcacggtgaatacgttcccgggtcttgtacacaccgcccgtcacaccatgggagcgggtctcgccagaagtaggtagcctaaccgcaaggagggcgcttaccacggcggggttcgtgactggggtg

SEQ ID NO: 1157 - DNA, 1455 bp, Comamonas testosteroni
attgaacgctggcggcatgctttacacatgcaagtcgaacggtaacaggtcttcggatgctgacgagtggcgaacgggtgagtaatacatcggaacgtgcctagtagtgggggataactactcgaaagagtagctaataccgcatgagatctacggatgaaagcaggggaccttcgggccttgtgctactagagcggctgatggcagattaggtagttggtggggtaaaggcttaccaagcctgcgatctgtagctggtctgagaggacgaccagccacactgggactgagacacggcccagactcctacgggaggcagcagtggggaattttggacaatgggcgaaagcctgatccagcaatgccgcgtgcaggatgaaggccctcgggttgtaaactgcttttgtacggaacgaaaagcctggggctaatatccccgggtcatgacggtaccgtaagaataagcaccggctaactacgtgccagcagccgcggtaatacgtagggtgcaagcgttaatcggaattactgggcgtaaagcgtgcgcaggcggttttgtaagacagtggtgaaatccccgggctcaacctgggaactgccattgtgactgcaaggctagagtgcggcagagggggatggaattccgcgtgtagcagtgaaatgcgtagatatgcggaggaacaccgatggcgaaggcaatcccctgggcctgcactgacgctcatgcacgaaagcgtggggagcaaacaggattagataccctggtagtccacgccctaaacgatgtcaactggttgttgggtcttaactgactcagtaacgaagctaacgcgtgaagttgaccgcctggggagtacggccgcaaggttgaaactcaaaggaattgacggggacccgcacaagcggtggatgatgtggtttaattcgatgcaacgcgaaaaaccttacccacctttgacatggcaggaacttaccagagatggtttggtgctcgaaagagaacctgcacacaggtgctgcatggctgtcgtcagctcgtgtcgtgagatgttgggttaagtcccgcaacgagcgcaacccttgccattagttgctacattcagttgagcactctaatgggactgccggtgacaaaccggaggaaggtggggatgacgtcaagtcctcatggcccttataggtggggctacacacgtcatacaatggctggtacaaagggttgccaacccgcgagggggagctaatcccataaagccagtcgtagtccggatcgcagtctgcaactcgactgcgtgaagtcggaatcgctagtaatcgtggatcagaatgtcacggtgaatacgttcccgggtcttgtacacaccgcccgtcacaccatgggagcgggtctcgccagaagtaggtagcctaaccgcaaggagggcgcttaccacggcggggttcgtgactggggtg

SEQ ID NO: 1158 - DNA, 1455 bp, Comamonas thiooxydans; identical to SEQ ID NO: 1157

SEQ ID NO: 1159 - DNA, 1411 bp, Commensalibacter intestini
agtgaacgctggcggcatgcttaacacatgcaagtcgcacggatgcttcggcattagtggcggacgggtgagtaacgcgtagggatctatccacgagtgggggataactttgggaaactgaagctaataccgcatgatacctgagggtcaaaggagtgatccgcttgtggaggaacctgcgtttgattagctagttggtggggtaaaggcctaccaaggcgatgatcaatagctggtttgagaggatgatcagccacactgggactgagacacggcccagactcctacgggaggcagcagtggggaatattggacaatgggggcaaccctgatccagcaatgccgcgtgtatgaagaaggtcttcggattgtaaagtactttcgacagggacgatgatgacggtacctgtagaagaagccccggctaacttcgtgccagcagccgcggtaatacgaagggggctagcgttactcggaatgactgggcgtaaagggcgcgtaggcggcttatacagtcagatgtgaaattcctgggcttaacctgggacctgcatttgatacgtataggctagagtgtgaaagaggattgtggaattccaagtgtagaggtgaaattcgtagatatttggaggaacaccggtggcgaaggcggcaatctggttcacaactgacgctgaggcgcgaaagcgtggggagcaaacaggattagataccctggtagtccacgctgtaaacgatgtatgctagatgttaggtaacttagttacttagtgtcgaagttaacgcgataagcataccgcctggggagtacggccgcaaggttgaaactcaaaggaattgacgggggcccgcacaagcggtggagcatgtggtttaattcgaagcaacgcgcagaaccttaccaggtcttgacatgtagacgctgtatccagagatggatgcttccagcaatggacgtctaacacaggtgctgcatggctgtcgtcagctcgtgtcgtgagatgttgggttaagtcccgcaacgagcgcaacccttgcctttagttgccagcatgtttgggtgggcactctagagggactgccggtgataagccggaggaaggtagggatgacgtcaagtcctcatggcccttatgacctgggctacacacgtgctacaatggtggtgacagaaggaagcgaagtagtgatgctaagcagatctttaaaaaccatctcagttcagattgcactctgcaactcgagtgcatgaaggcggaatcgctagtaatcgcggatcagcatgccgcggtgaatacgttcccgggccttgtacacaccgcccgtcacaccatgggagttggtttgaccttaagccggtgagcgaaccgtaaggacgcagccgaccacggtcgggtcagcgactggggtg

SEQ ID NO: 1160 - DNA, 1390 bp, Confluentimicrobium lipolyticum
aacgaacgctggcggcaggcttaacacatgcaagtcgagcgaggtcttcggacctagcggcggacgggtgagtaacgcgtgggaacatacccttttctgcggaatagcctctggaaacggagagtaataccgcatacgcccttcgggggaaagatttatcggagaaggattggcccgcgttagattaggtagttggtggggtaatggcctaccaagccgacgatctatagctggtttgagaggatgatcagccacactgggactgagacacggcccagactcctacgggaggcagcagtgaggaatcttggacaatgggggaaaccctgatccagccatgccgcgtgaacgatgaaggccttagggttgtaaagttctttcaacggtgaagataatgacggtagccgtagaagaaaccccggctaactccgtgccagcagccgcggtaatacggagggggttagcgttgttcggaattactgggcgtaaagcgcacgtaggcggattggaaagttgggggtgaaatcccagggctcaaccctggaactgcctccaaaactcccagtctagagttcgagagaggtgagtggaattccgagtgtagaggtgaaattcgtagatattcggaggaacaccagtggcgaaggcggctcactggctcgatactgacgctgaggtgcgaaagcgtggggagcaaacaggattagataccctggtagtccacgccgtaaacgatgaatgccagtcgtcgggtagcatgctattcggtgacacacctaacggattaagcattccgcctggggagtacggtcgcaagattaaaactcaaaggaattgacgggggcccgcacaagcggtggagcatgtggtttaattcgaagcaacgcgcagaaccttaccaacccttgacatacctgtcgcggttaccagagatggtttccttcagctcggctggacaggatacaggtgctgcatggctgtcgtcagctcgtgtcgtgagatgttcggttaagtccggcaacgagcgcaacccacgtctttagttgccagcagttcggctgggcactctaaagaaactgccgatgataagtcggaggaaggtgtggatgacgtcaagtcctcatggcccttacgggttgggctacacacgtgctacaatggcagtgacaatgggttaatcccaaaaaactgtctcagttcggattggggtctgcaactcgaccccatgaagtcggaatcgctagtaatcgcgtaacagcatgacgcggtgaatacgttcccgggccttgtacacaccgcccgtcacaccatgggagttggttctacccgacgacgctgcgctaacctttcgaggaggcaggcggccacggtaggatcagcgactggggtg

SEQ ID NO: 1161 - DNA, 1456 bp, Congregibacter litoralis
attgaacgctggcggcaggcctaacacatgcaagtcgagcgcgaaagtacttcggtatgagtagagcggcggacgggtgagtaacgcgtaggaatctatccagtagtgggggacaactcggggaaactcgagctaataccgcatacgtcctaagggagaaagcgggggatcttcggacctcgcgctattggaggagcctgcgttggattagctagttggtggggtaaaggcctaccaaggcgacgatccatagctggtctgagaggatgatcagccacaccgggactgagacacggcccggactcctacgggaggcagcagtggggaatattgcgcaatgggcgaaagcctgacgcagccatgccgcgtgtgtgaagaaggccttcgggttgtaaagcactttcaattgggaagaaaggttagtagttaataactgctagctgtgacattacctttagaagaagcaccggctaactccgtgccagcagccgcggtaatacggagggtgcgagcgttaatcggaattactgggcgtaaagcgcgcgtaggcggtctgttaagtcggatgtgaaagccccgggctcaacctgggaattgcacccgatactggccgactggagtgcgagagagggaggtagaattccacgtgtagcggtgaaatgcgtagatatgtggaggaataccggtggcgaaggcggcctcctggctcgacactgacgctgaggtgcgaaagcgtggggagcaaacaggattagataccctggtagtccacgccgtaaacgatgtctactagccgttgggagacttgatttcttggtggcgaagttaacgcgataagtagaccgcctggggagtacggccgcaaggttaaaactcaaatgaattgacgggggcccgcacaagcggtggagcatgtggtttaattcgatgcaacgcgaagaaccttaccaggccttgacatcctaggaatcctgtagagatacgggagtgccttcgggaatctagtgacaggtgctgcatggctgtcgtcagctcgtgtcgtgagatgttgggttaagtcccgtaacgagcgcaacccttgtccttagttgccagcgcgtaatggcgggaactctaaggagactgccggtgacaaaccggaggaaggtggggacgacgtcaagtcatcatggcccttacggcctgggctacacacgtgctacaatggaacgcacagagggcagcaaacccgcgagggggagcgaatcccacaaaacgtttcgtagtccggatcggagtctgcaactcgactccgtgaagtcggaatcgctagtaatcgtgaatcagaatgtcacggtgaatacgttcccgggccttgtacacaccgcccgtcacaccatgggagtgggttgctccagaagtggttagcctaaccttcgggagggcgatcaccacggagtgattcatgactggggtg

SEQ ID NO: 1162 - DNA, 1450 bp, Coprobacter secundus
gatgaacgctagcgacaggcctaacacatgcaagtcgaggggcatcaggtatcagcttgctgatacgctggcgaccggcgcacgggtgagtaacgcgtatgcaatctgcctgtaacagggggataacccggagaaatccggcctaataccccataaggatgtctgtccgcatgggcggtcatctaaaggttttccggttacagatgggcatgcgttccattagctggttggcggggtaacggcccaccaaggcgacgatggataggggttctgagaggaaggtcccccacactggtactgagacacggaccagactcctacgggaggcagcagtgaggaatattggtcaatgggcgtaagcctgaaccagccaagtcgcgtgaaggaagacagccctacgggtcgtaaacttcttttgtatgggagtaaaagagtccacgcgtgggctattgcaagtaccatacgaataagcatcggctaactccgtgccagcagccgcggtaatacggaggatgcgagcgttatccggatttattgggtttaaagggtgcgtaggcggccctataagtcagcggtgaaatgttccggctcaaccgggaaactgccgttgaaactgtagagctagagtccacaagaggtatgcggaatgcgtggtgtagcggtgaaatgcatagatatcacgcagaaccccgattgcgaaggcagcatactggggtgaaacagacgctgaagcacgaaagcgtgggtatcgaacaggattagataccctggtagtccacgccgtaaacgatgaatactaactgtttgcgatatacagtaagcggtacagcgaaagcgttaagtattccacctggggagtacgccggcaacggtgaaactcaaaggaattgacgggggcccgcacaagcggaggaacatgtggtttaattcgatgatacgcgaggaaccttacccgggctcaaacgcagggggaatacgtatgaaagtacgtagctagcaatagccgcctgcgaggtgctgcatggttgtcgtcagctcgtgccgtgaggtgtcggcttaagtgccataacgagcgcaacccttatcgatagttactaccaggtcaagctgaggactcaatcgagactgccagcgtaagctgcgaggaaggtggggatgacgtcaaatcagcacggcccttacgtccggggcgacacacgtgttacaatggcagggacagcgagtagccaggcagcaatgccgcgccaatctcgaaaccctgtcccagttcggatcggagtctgcaacccgactccgtgaagctggattcgctagtaatcgcgcatcagccatggcgcggtgaatacgttcccgggccttgtacacaccgcccgtcaagccatgggagccgggagtacctgaagtatgcaaccgcgaggagcgtcctagggtaatactggtgactggggct

SEQ ID NO: 1163 - DNA, 1476 bp, Coraliomargarita akajimensis
agtgaacgctggcggcgtggttaagacatgcaagtcgaacgggattgtttaagttgacgcttcggttgattcttaaacatgagagtggcaaacgggtgcgtaacacgtaagcaacctgccctaaagtttgggatagctcgaggaaactcgaattaataccggatgtggctcggtaactcatgttactagagctaaagcttgagatggcgctttaggaggggcttgcggcctatcagcttgttggtgaggtaatggctcaccaaggcaaagacgggtagctggtctgagaggatgatcagccacactggaactgagacacggtccagacacctacgggtggcagcagtttcgaatcattcacaatgggggaaaccctgatggtgcaacgccgcgtgggggatgacggccttcgggttgtaaacctctgtcaccaaggagcaacaagcaggttcatagcctgccctgagttaacttggagaggaagcagtggctaactccgtgccagcagccgcggtaatacggagactgcaagcgttactcggattcactgggcgtaaagggtgcgtaggccgctaagcgtgtcgggtgtgaaatctcggggctcaacctcgaaactgcgcccgaaactgtttagctagagtgtcggagaggtaagcggaattccaggtgtagcggtgaaatgcgtagatatctggaggaacaccaatggcgaaggcagcttactggacgacaactgacgctgaggcacgaaagcatgggtagcgaaagggattagatacccctgtagtccatgccgtaaacgttgtacactaggtcttgggggtttcgaccccttcaggaccccagctaacgcgataagtgtaccgcctgaggactacggccgcaaggctaaaactcaaaggaattgacgggggcccgcacaagcggtggagcatgtggcttaattcgatgcaacgcgaagaaccttacctaggcttgacatctataggacggtttccagagatggattcttcccttcggggcttatagacaggtgctgcatggccgtcgtcagctcgtgtcgtgagatgtttggttaagtccagcaacgagcgcaaccctcgtccttagttgccagcacgtaatggtggggactctaaggagacaaacttctttcagaagtgggaaggtggggatgacgtcaggtcagtatggcccttacgcctagggctgcacacgtgctacaatgcccggtacagtgggacgcaataccgcgaggtggagcaaatcctcaaaaccgggcccagttcggattggagtctgcaactcgactccatgaagtcggaatcgctagtaatgacgtatcagctacgacgtcgtgaatacgttcccgggccttgtacacaccgcccgtcacatcatgaaagccggttctgcccgaagtacgtgagttaacttcggagacagcgtcctaaggtagggctggtgattgggatg

SEQ ID NO: 1164 - DNA, 1458 bp, Corallococcus coralloides
aacgaacgctggcggcgtgcctaacacatgcaagtcgagcgcgaataggggcaacccttagtagagcggcgcacgggtgcgtaacacgtggataatctgcctggatgcctgggataaccagtcgaaagactggctaataccggataagcccacggtttcttcggagactgagggaaaaggtggcctctgtatacaagctatcacaaccagatgagtccgcggcccatcagctagttggcggggtaatggcccaccaaggcgacgacgggtagctggtctgagaggacgatcagccacactggaactgagacacggtccagactcctacgggaggcagcagtggggaattttgcgcaatgggcgaaagcctgacgcagcaacgccgcgtgtgtgatgaaggtctttggattgtaaagcactttcgaccgggacgaaaccgtaaagcctaatacgctttgccttgacggtaccgggagaagaagcaccggctaactctgtgccagcagccgcggtaatacagagggtgcaagcgttgttcggaattattgggcgtaaagcgcgtgtaggcgcttgcaagtcgggtgtgaaagccctcagctcaactgaggaagtgcgcccgaaactgcagagcttgagtgccggagagggtggcggaattccccaagtagaggtgaaattcgtagatatggggaggaacaccggtggcgaaggcggccacctggacggtaactgacgctgagacgcgaaagcgtgggtagcaaacaggattagataccctggtagtccacgccgtaaacgatgagaactaggtgtcgtgggagttgacccccgcggtgccgtagctaacgcattaagttctccgcctgggaagtacggtcgcaagactaaaactcaaaggaattgacgggggcccgcacaagcggtggagcatgtggtttaattcgacgcaacgcgcagaaccttacctggtcttgacatcctcggaatccttcagagatgagggagtgcccgcaagggaaccgagagacaggtgctgcatggctgtcgtcagctcgtgtcgtgagatgttgggttaagtcccgcaacgagcgcaaccctcgcctttagttgccacgcaagtggatctctagagggactgccggtgttaaaccggaggaaggtggggatgacgtcaagtcctcatggcctttatgaccagggctacacacgtgctacaatggccggtacagagcgctgcaaacccgcgagggggagctaatcgcagaaaaccggtctcagttcagattggagtctgcaactcgactccatgaaggcggaatcgctagtaatcgcagatcagcacgctgcggtgaatacgttcccgggccttgtacacaccgcccgtcacaccatgggagtcgattgctccagaagtcatctcaccaagagatgcccaaggagtgctcggtaactggggtg

SEQ ID NO: 1165 - DNA, 1460 bp, Corallococcus exiguus
aacgaacgctggcggcgtgcctaacacatgcaagtcgagcgcgaataggggcaacccttagtagagcggcgcacgggtgcgtaacacgtggataatctgcctggatgcctgggataaccagtcgaaagattggctaataccggataagcccacggtttcttcggagactgagggaaaaggtggcctctgtatacaagctatcacaaccagatgagtccgcggcccatcagctagttggcggggtaatggcccaccaaggcaacgacgggtagctggtctgagaggacgatcagccacactggaactgagacacggtccagactcctacgggaggcagcagtggggaattttgcgcaatgggcgaaagcctgacgcagcaacgccgcgtgtgtgatgaaggtctttggattgtaaagcactttcgaccgggacgaaaccgtaaagcctaatacgctttgccttgacggtaccgggagaagaagcaccggctaactctgtgccagcagccgcggtaatacagagggtgcaagcgttgttcggaattattgggcgtaaagcgcgtgtaggcggctttgcaagtcgggtgtgaaagccctcagctcaactgaggaagtgcgcccgaaactgcagagcttgagtgccggagagggtggcggaattccccaagtagaggtgaaattcgtagatatggggaggaacaccggtggcgaaggcggccacctggacggtaactgacgctgagacgcgaaagcgtgggtagcaaacaggattagataccctggtagtccacgccgtaaacgatgagaactaggtgtcgtgggagttgacccccgcggtgccgtagctaacgcattaagttctccgcctgggaagtacggtcgcaagactaaaactcaaaggaattgacgggggcccgcacaagcggtggagcatgtggtttaattcgacgcaacgcgcagaaccttacctggtcttgacatcctcggaatccttcagagatgagggagtgcccgcaagggaaccgagagacaggtgctgcatggctgtcgtcagctcgtgtcgtgagatgttgggttaagtcccgcaacgagcgcaaccctcgcctttagttgccacgcaagtggatctctagagggactgccggtgttaaaccggaggaaggtggggatgacgtcaagtcctcatggcctttatgaccagggctacacacgtgctacaatggccggtacagagcgctgcaaacccgcgagggggagctaatcgcagaaaaccggtctcagttcagattggagtctgcaactcgactccatgaaggcggaatcgctagtaatcgcagatcagcacgctgcggtgaatacgttcccgggccttgtacacaccgcccgtcacaccatgggagtcgattgctccagaagtcatctcaccaagagatgcccaaggagtgctcggtaactggggtg

SEQ ID NO: 1166 - DNA, 1465 bp, Cosenzaea myxofaciens
attgaacgctggcggcaggcctaacacatgcaagtcgagcggtaacagagggaagcttgctttcctgctgacgagcggcggacgggtgagtaatgtatggggatctgcccgatagagggggataactactggaaacggtggctaataccgcatgacgtctacggaccaaagcaggggctcttcggaccttgcgctatcggatgaacccatatgggattagctagtaggtggggtaacggctcacctaggcgacgatctctagctggtctgagaggatgatcagccacactgggactgagacacggcccagactcctacgggaggcagcagtggggaatattgcacaatgggcgcaagcctgatgcagccatgccgcgtgtatgaagaaggccttcgggttgtaaagtactttcagcgaggaggaaggggataaagttaatacctttgtccattgacgttactcgcagaagaagcaccggctaactccgtgccagcagccgcggtaatacggagggtgcaagcgttaatcggaattactgggcgtaaagcgcacgcaggcggtcaattaagtcagatgtgaaagccccgagcttaacttgggaattgcatctgaaactggttggctagagtcttgtagaggggggtagaattccatgtgtagcggtgaaatgcgtagagatgtggaggaataccggtggcgaaggcggccccctggacaaagactgacgctcaggtgcgaaagcgtggggagcaaacaggattagataccctggtagtccacgctgtaaacgatgtcgatttggaggttgtgcccttgaggcgtggcttccggagctaacgcgttaaatcgaccgcctggggagtacggccgcaaggttaaaactcaaatgaattgacgggggcccgcacaagcggtggagcatgtggtttaattcgatgcaacgcgaagaaccttacctactcttgacatccagagaatcctttagagatagaggagtgccttcgggagctctgagacaggtgctgcatggctgtcgtcagctcgtgttgtgaaatgttgggttaagtcccgcaacgagcgcaacccttatcctttgttgccagcgcgtaatggcgggaactcaaaggagactgccggtgataaaccggaggaaggtggggatgacgtcaagtcatcatggcccttacgagtagggctacacacgtgctacaatggcagatacaaagagaagcgacctcgcgagagcaagcggaactcataaagtctgtcgtagtccggattggagtctgcaactcgactccatgaagtcggaatcgctagtaatcgtagatcagaatgctacggtgaatacgttcccgggccttgtacacaccgcccgtcacaccatgggagtgggttgcaaaagaagtaggtagcttaaccttcgggagggcgcttaccactttgtgattcatgactggggtg

SEQ ID NO: 1167 - DNA, 1462 bp, Coxiella burnetii
attgaacgctagcggcatgcttaacacatgcaagtcgaacggcagcgcggggagcttgctccctggcggcgagtggcggacgggtgagtaatgcgtaggaatctaccttgtagtgggggataacctggggaaactcgggctaataccgcataatctctttggagcaaagcgggggatcttcggacctcgtgctataagatgagcctacgtcggattagcttgttggtggggtaatggcctaccaaggcgacgatccgtagctggtctgagaggacgatcagccacactgggactgagacacggcccagactcctacgggaggcagcagtggggaatattggacaatgggggaaaccctgatccagcaatgccgcgtgtgtgaagaaggccttcgggttgtaaagcactttcggtggggaagaaattctcaagggtaatatccttgggcgttgacgttacccacagaagaagcactggctaactctgtgccagcagccgcggtaatacagagagtgcaagcgttaatcggaatcactgggcgtaaagcgcgcgtaggtggatatttaagtcggatgtgaaagccctgggcttaacctgggaattgcatccgatactgggtatcttgagtatggtagagggaagtggaatttccggtgtagcggtgaaatgcgtagatatcggaaagaacaccagtggcgaaggcgacttcctggaccaatactgacactgaggcgcgaaagcgtggggagcaaacaggattagagaccctggtagtccacgccgtcaacgatgagaactagctgttgggaagttcacttcttagtagcgaagctaacgcgttaagttctccgcctggggagtacggccgcaaggttaaaactcaaagaaattgacgggggcccgcacaagcggtggagcatgtggtttaattcgatgcaacgcgaaaaaccttacctacccttgacatcctcggaacttgtcagagatgatttggtgccttcgggaaccgagtgacaggtgctgcatggctgtcgtcagctcgtgtcgtgagatgttgggttaagtcccgtaacgagcgcaaccctcgtccttagttgccagcgagtcaagtcgggaactctaaggagactgccggtgataaaccggaggaaggtggggatgatgtcaagtcatcatggcccttacgggtagggctacacacgtgctacaatgggcagtacaaagggttgccaagccgcgaggtggagctaatcccagaaaactgctcgtagtccggattggagtctgcaactcgactccatgaagttggaatcgctagtaatcgcgaatcagcatgtcgcggtgaatacgttctcgggccttgtacacaccgcccgtcacaccatgggagtgaattgtaccagaagcgggtaggctaaccttcgggaggccgctcaccacggtatgatccatgactggggtg

SEQ ID NO: 1168 - DNA, 1408 bp, Crenobacter cavernae
tgcagtcgaacggtagcaggtccttcgggatgctgacgagtggcgaacgggtgagtaatgcgtcggaacgtaccgagtaatgggggataacgcttcgaaaggagtgctaataccgcatacgccctgagggggaaagtgggggaccggcaacggcctcacgttattcgagcggccgacgtctgattagctagttggtggggtaagagcccaccaaggcgacgatcagtagcgggtctgagaggatgatccgccacactgggactgagacacggcccagactcctacgggaggcagcagtggggaattttggacaatgggcgcaagcctgatccagccatgccgcgtgtctgaagaaggccttcgggttgtaaaggacttttgtcggggaggaaatccgcacacctaatacgtgtgtgggatgacagtacctgaagaataagcaccggctaactacgtgccagcagccgcggtaatacgtagggtgcaagcgttaatcggaattactgggcgtaaagcgtgcgcaggcggttgtgtaagtctgatgtgaaagccccgggctcaacctgggaacggcattggagactgcacggctagagtgcgtcagaggggggtggaattccgcgtgtagcagtgaaatgcgtagagatgcggaggaacaccgatggcgaaggcagccccctgggatgacactgacgctcatgcacgaaagcgtggggagcaaacaggattagataccctggtagtccacgccctaaacgatgtcgactagttgttgggggttgaaatccctggtaacgcagctaacgcgtgaagtcgaccgcctggggagtacggccgcaaggttaaaactcaaaggaattgacgggggcccgcacaagcggtggatgatgtggattaattcgatgcaacgcgaagaaccttacctagccttgacatgctcggaaccctgctgaaaggtgggggtgcccgcaagggagccgggacacaggtgctgcatggctgtcgtcagctcgtgtcgtgagatgttgggttaagtcccgcaacgagcgcaacccttgtcgttaattgccatcattcagttgggcactttaacgagactgccggtgacaaaccggaggaaggtggggatgacgtcaagtcctcatggcccttatggctagggcttcacacgtcatacaatggtcggtacagagggtcgccaagccgcgaggtggagccaatctcataaagccgatcgtagtccggattgcaggctgcaactcgcctgcatgaagtcggaatcgctagtaatcgcaggtcagcatactgcggtgaatacgttcccgggccttgtacacaccgcccgtcacaccatgggagtgggggataccagaagtgggtaggctaaccttcgggaggccgctaccac

SEQ ID NO: 1169 - DNA, 1458 bp, Crenobacter luteus
attgaacgctggcggcatgctttacacatgcaagtcgaacggcagcatgggcttcggcctgatggcgagtggcgaacgggtgagtaatgcgtcggaacgtgccgagtaatgggggataacgcttcgaaaggagtgctaataccgcatacgctctgaggaggaaagcgggggaccttcgggcctcgcgttattcgagcggccgacgtcggattagctagttggcggggtaagagcccaccaaggcgacgatccgtagcgggtctgagaggatgatccgccacactgggactgagacacggcccagactcctacgggaggcagcagtggggaattttggacaatgggcgcaagcctgatccagccatgccgcatgtctgaagaaggccttcgggttgtaaaggacttttgtcggggaggaaatcccggtggctaatatccgctggggatgacagtacctgaagaataagcaccggctaactacgtgccagcagccgcggtaatacgtagggtgcaagcgttaatcggaattactgggcgtaaagcgtgcgcaggcggttggataagtctgatgtgaaagccccgggctcaacctgggaacggcattggagactgtccggctagagtacgtcagaggggggtggaattccacgtgtagcagtgaaatgcgtagagatgtggaggaacaccgatggcgaaggcagccccctgggatgatactgacgctcatgcacgaaagcgtggggagcaaacaggattagataccctggtagtccacgccctaaacgatgtctactagttgttgggggttgaaatccctggtaacgcagctaacgcgtgaagtagaccgcctggggagtacggccgcaaggttaaaactcaaaggaattgacgggggcccgcacaagcggtggatgatgtggattaattcgatgcaacgcgaagaaccttacctagccttgacatgtccggaatcccgatgaaagttgggagtgcccgaaagggaatcggaacacaggtgctgcatggctgtcgtcagctcgtgtcgtgagatgttgggttaagtcccgcaacgagcgcaacccttgtcgttaattgccatcattgagttgggcactttaacgagactgccggtgacaaaccggaggaaggtggggatgacgtcaagtcctcatggcccttatggctagggcttcacacgtcatacaatggtcggtacagagggttgccaagccgcgaggcggagctaatctcataaaaccgatcgtagtccggatcgcagtctgcaactcgactgcgtgaagtcggaatcgctagtaatcgcaggtcagcatactgcggtgaatacgttcccgggccttgtacacaccgcccgtcacaccatgggagtgggcttcaccagaagtgggtaggctaaccgcaaggaggccgcttaccacggtgggatccatgactggggtg

SEQ ID NO: 1170 - DNA, 1456 bp, Crenothrix polyspora
attgaacgctggcggtatgcttaacacatgcaagtcgaacggtagcaggccttcgggcgctgacgagtggcggacaggtgagtaacgcgtaggaatctgcctgttagtgggggacaacgtgtggaaacgcacgctaataccgcatacgccctacgggggaaagggggggatcgcaagacctctcgctaacagatgagcctgcgttggattagctagttggtagggtaaaggcctaccaaggcgacgatccatagctggtctgagaggacgatcagccacactgggactgagacacggcccagactcctacgggaggcagcagtggggaatattggacaatgggcgaaagcctgatccagcaataccgcgtgtgtgaagaaggccttagggttgtaaagcactttcaatagggaggaaaaaggtaagcttaatacgtttgcccttgacattacctatacaagaagcaccggctaactccgtgccagcagccgcggtaatacggagggtgcaagcgttaatcggaattactgggcgtaaagcgtgcgtaggcggcttgttaagtcagatgtgaaagccccgggctcaacctgggaactgcatttgaaactggcaagctagagttgagtagaggggagtggaatttcaggtgtagcggtgaaatgcgtagatatctgaaggaacaccagtggcgaaggcgactccctggactcaaactgacgctgaggcacgaaagcgtgggtagcaaacaggattagataccctggtagtccacgccgtaaacgatgtcgactagccgttgggcccttttagggtttagtggcgcagctaacgcattgagtcgaccgcctggggagtacggccgcaaggttaaaactcaaatgaattgacgggggcccgcacaagcggtggagcatgtggtttaattcgatgcaacgcgaagaaccttacctacccttgacatgtctgaaatccctgagagattggggagtgccttcgggaatcagaacacaggtgctgcatggctgtcgtcagctcgtgtcgtgagatgttgggttaagtcccgtaacgagcgcaacccttgtccttagttgccagcgggtaatgccgggaactctagggagactgccggtgataaaccggaggaaggtggggacgacgtcaagtcatcatggcccttatgggtagggctacacacgtgctacaatggccggtacagagggctgcgaacttgcgaaagtaagctaatcccagaaagccggtcccagtccggattggagtctgcaactcgactccatgaagtcggaatcgctagtaatcgcgaatcagaatgtcgcggtgaatacgttcccgggccttgtacacaccgcccgtcacaccatgggagtgggttgcaaaagaagtaggtagtctaaccgcaaggagggcgcttaccactttgtgattcatgactggggtg

SEQ ID NO: 1171 - DNA, 1473 bp, Criblamydia sequanensis
attgaacgctggcagcgtggatgaggcatgcaagtcgaacgaagtatttgggtaactagatacttagtggcgaaagggttagtaatacatggataacctgcctctaacttgggaataacggttggaaacggccgctaataccgaatgtgatgagagaaggcatcttcttttcattaaagtgggggacttttagcctcgcggttagagaagggtccatgggatatcagctagttggtagggtaacggcctaccaaggctaagacgtctaggcggattgagagattgaccgccaacactgggactgagacactgcccagactcctacgggaggctgcagtcgagaatctttcgcaatgggcgaaagcctgacgaagcgacgctgcgtgagtgatgaaggccctcgggtcgtaaagctctttcgcctgggaacaagggaatccggctaatatccggaagacttgagagtatcaggtaaagaagcaccggctaactccgtgccagcagctgcggtaatacggagggtgcaagcgttaatcggaattattgggcgtaaagggtgcgcaggcggaaacacaagtcgggtgtgaaatcccggggctcaacctcggaacggcactcgaaactgtgtttctagaggatagaaggagaaaatggaattccacaagtagcggtgaaatgcgtagatatgtggaagaacaccggtggcgaaggcggttttctattttattcctgacgctcatgcacgaaagttaggggatcaaacaggattagataccctggtagtcctaactgtaaacgatgtgtacttggtgtagctggtctcaaccccagctgtgccgtagccaacgcgttaagtacaccgcctggggagtacagccgcaaggctgaaactcaaaagaattgacggggacccgcacaagcagtggagcatgtggtttaattcgatgcaacgcgaagaaccttacctaggcttgacatatagtggaccgcttcagaaatgaagtttttcgtatgaaccgctatacaggtgctgcatggctgtcgtcagctcgtgccgtgaggtgttgggttaagtcccgcaacgagcgcaacccttgtcattagttgccagcacgtaatggtgggaactctaatgagactgcctgggttaaccaggaggaaggtgaggatgacgtcaagtcagcatggcccttatgcctagggctacacacgtgctacaatggccggtacagagggcagcgaagccgcgaggtgaagcaaatcccataaagccggccccagttcagattgtagtctgcaactcgactacatgaagttggaattgctagtaatggcgtatcagctacgacgccgtgaatacgttcccgggtcttgtacacaccgcccgtcacatcatgggagttggttttacccgatgtcactgacttaaccgcaaggggagaagtgcctaaggtgaggccgatgactgggatg

SEQ ID NO: 1172 - DNA, 1295 bp, Cricetibacter osteomyelitidis
  misc_feature (72)..(72): n is a, c, g, or t
  misc_feature (143)..(143): n is a, c, g, or t
  misc_feature (157)..(157): n is a, c, g, or t
  misc_feature (161)..(161): n is a, c, g, or t
  misc_feature (164)..(164): n is a, c, g, or t
  misc_feature (166)..(166): n is a, c, g, or t
  misc_feature (172)..(172): n is a, c, g, or t
  misc_feature (176)..(176): n is a, c, g, or t
aacggtagcaggaagaaagcttgcttttctttgctgacgagtggcggacgggtgagtaatgcttgggaatcnggcttatggagggggataacaacgggaaactgttgctaataccgcgtaatatcgagagattaaagggggcntttgactcttgccntaanatnancccaantggnattaggtagttggtggggtaaaggcctaccaagcccgcgatctctagctggtctgagaggatgaccagccacactggaactgagacacggtccagactcctacgggaggcagcagtggggaatattgcacaatggggggaaccctgatgcagccatgccgcgtgaatgaagaaggccttcgggttgtaaagttctttcggtgatgaggaaggggttgtggttaatacccaccaatcattgacgttaatcacagaagaagcaccggctaactccgtgccagcagccgcggtaatacggggggtgcgagcgttaatcggaataactgggcgtaaagggcacgcaggcggttgtttaagtgaggtgtgaaagccccgggcttaacctgggaatagcatttcagactggacaactagagtactttagggaggggtagaattccacgtgtagcggtgaaatgcgtagagatgtggaggaataccgaaggcgaaggcagccccttgggaatgtactgacgctcatgtgcgaaagcgtggggagcaaacaggattagataccctggtagtccacgccgtaaacgttgtcgatttggggattggggtttaactctggtgcccgtagctaacgtgataaatcgaccgcctggggagtacggccgcaaggttaaaactcaaatgaattgacgggggcccgcacaagcggtggagcatgtggtttaattcgatgcaacgcgaagaaccttacctactcttgacatccagagaagacctcagagatgaggttgtgccttagggaactttgagacaggtgctgcatggctgtcgtcagctcgtgttgtgaaatgttgggttaagtcccgcaacgagcgcaacccttatcctttgttgccagcgcgtaatggtgggaactcaaaggagactgccggtgataaaccggaggaaggtggggatgacgtcaagtcatcatggcccttacgagtagggctacacacgtgctacaatggtgcatacagagggcggcgagccagcgatggtgagcgaatctcagaaagtgcatctaagtccggattggagtctgcaactcgactccatgaagtcggaatcgctagtaatcgcaaatcag

SEQ ID NO: 1173 - DNA, 1413 bp, Crinalium epipsammum
gatgaacgctggcggtctgcttaacacatgcaagtcgaacgggtgtagcaatacattagtggcggacgggtgagtaacgcgtgagaatctggctttaggttcgggacaaccactggaaacggtggctaataccggatgtgccgaaaggtaaaaggtttaccgcctgaagatgagctcgcgtctgattagctagttggtgtggtaagagcgcaccaaggcgacgatcagtagctggtctgagaggatgatcagccacactgggactgagacacggcccagactcctacgggaggcagcagtggggaattttccgcaatgggcgaaagcctgacggagcaagaccgcgtgagggaggaaggctcttgggtcgtaaacctcttttctctgggaataagaaagtgaaggtaccagaggaatcagcatcggctaactccgtgccagcagccgcggtaatacggaggatgcaagcgttatccggaatgattgggcgtaaagagtccgtaggtggtgattcaagtcgattgttaaagagcggggcttaaccccgtagaagcagtggaaactgaatcactagagagaggtaggggtagagggaattcccggtgtagcggtgaaatgcgtagagatcgggaagaacaccagtggcgaaagcgctctactggacctcatctgacactgagggacgaaagctaggggagcgaaagggattagatacccctgtagtcctagccgtaaacgatggatactaggtgttgtctgtatcgacccggacagtgccgtagctaacgcgttaagtatcccgcctggggagtacgcacgcaagtgtgaaactcaaaggaattgacgggggcccgcacaagcggtggagtatgtggtttaattcgatgcaacgcgaacaaccttaccagggcttgacatgtctggaatcttcgtgaaagcgaggagtgccttcgggaaccagaacacaggtggtgcatggctgtcgtcagctcgtgtcgtgagatgttgggttaagtcccgcaacgagcgcaaccctcgtcctaagttgccagcattaagttgggcactctgaggagactgccggtgacaaaccggaggaaggtggggatgacgtcaagtcagcatgccccttacgtcctgggctacacacgtactacaatgctacggacaaagggcagccaaccagcgatggtgagcaaatcccataaaccgtggctcagttcagattgcaggctgcaactcgcctgcatgaaggtggaatcgctagtaatcgccggtcagcatacggcggtgaattcgttcccgggccttgtacacaccgcccgtcacaccatgggagctggtcatgcccgaagtcgttaccctaacctgtaaaggagggggatgccgaaggcagggctggtgactggggtg

SEQ ID NO: 1174 - DNA, 1411 bp, Croceicoccus marinus
aacgaacgctggcggcatgcctaacacatgcaagtcgaacgaaggcttcggccttagtggcgcacgggtgcgtaacgcgtgggaatctacccttaggttcggaataactcagagaaatttgagctaataccggataatgtcttcggaccaaagatttatcgcctttggatgagcccgcgtaagattagctagttggtagggtaaaggcctaccaaggcgacgatctttagctggtctgagaggatgatcagccacactgggactgagacacggcccagactcctacgggaggcagcagtggggaatattggacaatgggcgcaagcctgatccagcaatgccgcgtgagtgatgaaggccttcgggtcgtaaagctcttttaccagggatgataatgacagtacctggagaataagctccggctaactccgtgccagcagccgcggtaatacggagggagctagcgttgttcggaattactgggcgtaaagcgcgcgtaggcggcttgccaagtcaggggtgaaatcccggggctcaaccccggaactgcccttgaaactagcaggctagaatcttggagaggtcagtggaattccgagtgtagaggtgaaattcgtagatattcggaagaacaccagtggcgaaggcgactgactggacaagtattgacgctgaggtgcgaaagcgtggggagcaaacaggattagataccctggtagtccacgccgtaaacgatgataactagctgtccgggttcacagaacttgggtggcgcagctaacgcattaagttatccgcctggggagtacggtcgcaagattaaaactcaaaggaattgacgggggcctgcacaagcggtggagcatgtggtttaattcgaagcaacgcgcagaaccttaccagcctttgacatcctggtcgcggattagagagatcttttccttcagttcggctggaccagtgacaggtgctgcatggctgtcgtcagctcgtgtcgtgagatgttgggttaagtcccgcaacgagcgcaaccctcatccttagttgccatcatttagttgggcactttaaggaaactgccggtgataagccggaggaaggtggggatgacgtcaagtcctcatggcccttacaggctgggctacacacgtgctacaatggcgttgacagtgggcagctagaccgcgaggtcatgctaatctctaaaagacgtctcagttcggattgttctctgcaactcgagagcatgaaggcggaatcgctagtaatcgcggatcagcatgccgcggtgaatacgttcccaggccttgtacacaccgcccgtcacaccatgggagttgggttcacccgaaggcgttgcgctaactcgcaagagaggcaggcgaccacggtgggcttagcgactggggtg

SEQ ID NO: 1175 - DNA, 1411 bp, Croceicoccus naphthovorans
aacgaacgctggcggcatgcctaacacatgcaagtcgaacgaagccttcgggcttagtggcgcacgggtgcgtaacgcgtgggaatctacccttaggttcggaataactcagagaaatttgagctaataccggatgatgtcttcggaccaaagatttatcgcctttggatgagcccgcgtaagattagctagttggtagggtaaaggcctaccaaggcgacgatctttagctggtctgagaggatgatcagccacactgggactgagacacggcccagactcctacgggaggcagcagtggggaatattggacaatgggcgaaagcctgatccagcaatgccgcgtgagtgatgaaggccttagggttgtaaagctcttttacccgggatgataatgacagtaccgggagaataagctccggctaactccgtgccagcagccgcggtaatacggagggagctagcgttgttcggaattactgggcgtaaagcgcgcgtaggcggcgaaccaagtcaggggtgaaatcccggggctcaaccccggaactgcccttgaaactagtttgctagaatcttggagaggtcagtggaattccgagtgtagaggtgaaattcgtagatattcggaagaacaccagtggcgaaggcgactgactggacaagtattgacgctgaggtgcgaaagcgtggggagcaaacaggattagataccctggtagtccacgccgtaaacgatgataactagctgtccgggcacatggtgcttgggtggcgcagctaacgcattaagttatccgcctggggagtacggtcgcaagattaaaactcaaaggaattgacgggggcctgcacaagcggtggagcatgtggtttaattcgaagcaacgcgcagaaccttaccagcctttgacatcctggtcgcggttagaggagactctttccttcagttcggctggaccagtgacaggtgctgcatggctgtcgtcagctcgtgtcgtgagatgttgggttaagtcccgcaacgagcgcaaccctcatccttagttgctaccatttagttgggcactctaaggaaactgccggtgataagccggaggaaggtggggatgacgtcaagtcctcatggcccttacaggctgggctacacacgtgctacaatggcatctacagtgggcagctatcacgcgagtgtgagctaatctccaaaagatgtctcagttcggattgttctctgcaactcgagagcatgaaggcggaatcgctagtaatcgcggatcagcatgccgcggtgaatacgttcccaggccttgtacacaccgcccgtcacaccatgggagttggtttcacccgaaggcgctacgctaacccgcaagggaggtaggcgaccacggtgggatcagcgactggggtg

SEQ ID NO: 1176 - DNA, 1408 bp, Crocosphaera watsonii
gatgaacgctggcggtatgcctaacacatgcaagtcgaacgaagtcttcggacttagtggcggacgggtgagtaacgcgtgagaatctgccttgaggatggggacaacagttggaaacgactgctaatacccgatgtgccggaaggtgaaaattttttgcctcaagaggagctcgcgtctgattagctagttggtggggtaaaagcgtaccaaggcaacgatcagtagctggtctgagaggatgagcagccacactgggactgagacacggcccagactcctacgggaggcagcagtggggaattttccgcaatgggcgaaagcctgacggagcaataccgcgtgagggaggaaggcctttgggttgtaaacctcttttctcagggaagaagatctgacggtacctgaggaataagcatcggctaactccgtgccagcagccgcggtaatacggaggatgcaagcgttatccggaattattgggcgtaaagcgtccgcaggtggtctttcaagtctgctgtcaaagaccagagcttaactctgggcaggcggtggaaactgagagactagagttcggtaggggtagcgggaattcccagtgtagcggtgaaatgcgtagatattgggaagaacatcggtggcgaaggcgtgctactggaccgaaactgacactcagggacgaaagctagggtagcgaaagggattagatacccctgtagtcctagctgtaaacgatggaaactaggtgtggcttgtatcgacccgagccgtgccgtagccaacgcgttaagtttcccgcctggggagtacgcacgcaagtgtgaaactcaaaggaattgacgggggcccgcacaagcggtggagtatgtggtttaattcgatgcaacgcgaagaaccttaccagggcttgacatgtccggaacttttctgaaaggagaaggtgccttcgggaaccggaacacaggtggtgcatggctgtcgtcagctcgtgtcgtgagatgttgggttaagtcccgcaacgagcgcaaccctcgtctttagttgccagcattaaggtgggcactctagagagactgccggtgacaaaccggaggaaggtgaggatgacgtcaagtcagcatgccccttacgccctgggctacacacgtactacaatggttgggacaaagggcagcgaacccgcgagggagagcgaatctcatcaaacccagcctcagttcagattgctctctgcaactcgagagcatgaaggaggaatcgctagtaatcgcaggtcagcatactgcggtgaattcgttcccgggccttgtacacaccgcccgtcacaccatggaagctggtcacgcccgaagtagttaccctaactttcgggagggggactcctaaggcagggctagtgactggggtg

SEQ ID NO: 1177 - DNA, 1465 bp, Cronobacter dublinensis
attgaacgctggcggcaggcctaacacatgcaagtcgggcggtaacaggaatcagcttgctgatttgctgacgagcggcggacgggtgagtaatgtctgggaaactgcctgatggagggggataactactggaaacggtagctaataccgcataacgtcttcggaccaaagtgggggaccttcgggcctcatgccatcagatgtgcccagatgggattagctagtaggtggggtaaaggctcacctaggcgacgatccctagctggtctgagaggatgaccagccacactggaactgagacacggtccagactcctacgggaggcagcagtggggaatattgcacaatgggcgcaagcctgatgcagccatgccgcgtgtatgaagaaggccttcgggttgtaaagtactttcagcgaggaggaaggtgttgtggttaataaccacagcaattgacgttactcgcagaagaagcaccggctaactccgtgccagcagccgcggtaatacggagggtgcaagcgttaatcggaattactgggcgtaaagcgcacgcaggcggtttgttaagtcagatgtgaaatccccgggctcaacctgggaactgcatttgaaactggcaagcttgagtctcgtagaggggggtagaattccaggtgtagcggtgaaatgcgtagagatctggaggaataccggtggcgaaggcggccccctggacgaagactgacgctcaggtgcgaaagcgtggggagcaaacaggattagataccctggtagtccacgccgtaaacgatgtcgacttggaggttgtgcccttgaggcgtggcttccggagctaacgcgttaagtcgaccgcctggggagtacggccgcaaggttaaaactcaaatgaattgacgggggcccgcacaagcggtggagcatgtggtttaattcgatgcaacgcgaagaaccttacctggtcttgacatccagagaatcctgcagagatgcgggagtgccttcgggaactctgagacaggtgctgcatggctgtcgtcagctcgtgttgtgaaatgttgggttaagtcccgcaacgagcgcaacccttatcctttgttgccagcacgtaatggtgggaactcaaaggagactgccggtgataaaccggaggaaggtggggatgacgtcaagtcatcatggcccttacgaccagggctacacacgtgctacaatggcgcatacaaagagaagcgacctcgcgagagcaagcggacctcataaagtgcgtcgtagtccggattggagtctgcaactcgactccatgaagtcggaatcgctagtaatcgtggatcagaatgccacggtgaatacgttcccgggccttgtacacaccgcccgtcacaccatgggagtgggttgcaaaagaagtaggtagcttaaccttcgggagggcgcttaccactttgtgattcatgactggggtg

SEQ ID NO: 1178 - DNA, 1464 bp, Cronobacter malonaticus
attgaacgctggcggcaggcctaacacatgcaagtcgaacggtaacagggagcagcttgctgctctgctgacgagtggcggacgggtgagtaatgtctgggaaactgcctgatggagggggataactactggaaacggtagctaataccgcataacgtcttcggaccaaagtgggggaccttcgggcctcatgccatcagatgtgcccagatgggattagctagtaggtggggtaacggctcacctaggcgacgatccctagctggtctgagaggatgaccagccacactggaactgagacacggtccagactcctacgggaggcagcagtggggaatattgcacaatgggcgcaagcctgatgcagccatgccgcgtgtatgaagaaggccttcgggttgtaaagtactttcagcggggaggaaggcgttgtggttaataaccacagcgattgacgttacccgcagaagaagcaccggctaactccgtgccagcagccgcggtaatacggagggtgcaagcgttaatcggaattactgggcgtaaagcgcacgcaggcggttgattaagtcagatgtgaaatccccgggctcaacctgggaactgcatttgaaactggtcagcttgagtctcgtagaggggggtagaattccaggtgtagcggtgaaatgcgtagagatctggaggaataccggtggcgaaggcggccccctggacgaagactgacgctcaggtgcgaaagcgtggggagcaaacaggattagataccctggtagtccacgccgtaaacgatgtcgacttggaggttgtgcccttgaggcgtggcttccggagctaacgcgttaagtcgaccgcctggggagtacggccgcaaggttaaaactcaaatgaattgacgggggcccgcacaagcggtggagcatgtggtttaattcgatgcaacgcgaagaaccttacctggtcttgacatccagagaatcctgcagagatgcgggagtgccttcgggaactctgagacaggtgctgcatggctgtcgtcagctcgtgttgtgaaatgttgggttaagtcccgcaacgagcgcaacccttatcctttgttgccagcggttcggccgggaactcaaaggagactgccggtgataaaccggaggaaggtggggatgacgtcaagtcatcatggcccttacgaccagggctacacacgtgctacaatggcgcatacaaagagaagcgacctcgcgagagcaagcggacctcataaagtgcgtcgtagtccggattggagtctgcaactcgactccatgaagtcggaatcgctagtaatcgtggatcagaatgccacggtgaatacgttcccgggccttgtacacaccgcccgtcacaccatgggagtgggttgcaaaagaagtaggtagcttaaccttcgggagggcgcttaccactttgtgattcatgactggggtg

SEQ ID NO: 1179 - DNA, 1465 bp, Cronobacter muytjensii
attgaacgctggcggcaggcctaacacatgcaagtcgaacggtaacaggaagcagcttgctgctttgctgacgagtggcggacgggtgagtaatgtctgggaaactgcctgatggagggggataactactggaaacggtagctaataccgcataacgtcgcaagaccaaagtgggggaccttcgggcctcatgccatcagatgtgcccagatgggattagctagtaggtggggtaacggctcacctaggcgacgatccctagctggtctgagaggatgaccagccacactggaactgagacacggtccagactcctacgggaggcagcagtggggaatattgcacaatgggcgcaagcctgatgcagccatgccgcgtgtatgaagaaggccttcgggttgtaaagtactttcagcgaggaggaaggggttaaggttaataaccttggccattgacgttactcgcagaagaagcaccggctaactccgtgccagcagccgcggtaatacggagggtgcaagcgttaatcggaattactgggcgtaaagcgcacgcaggcggtctgtcaagtcggatgtgaaatccccgggctcaacctgggaactgcatccgaaactggcaggcttgagtctcgtagaggggggtagaattccaggtgtagcggtgaaatgcgtagagatctggaggaataccggtggcgaaggcggccccctggacgaagactgacgctcaggtgcgaaagcgtggggagcaaacaggattagataccctggtagtccacgccgtaaacgatgtcgacttggaggttgtgcccttgaggcgtggcttccggagctaacgcgttaagtcgaccgcctggggagtacggccgcaaggttaaaactcaaatgaattgacgggggcccgcacaagcggtggagcatgtggtttaattcgatgcaacgcgaagaaccttacctggtcttgacatccagagaatcctgcagagatgcgggagtgccttcgggaactctgagacaggtgctgcatggctgtcgtcagctcgtgttgtgaaatgttgggttaagtcccgcaacgagcgcaacccttatcctttgttgccagcacatcatggtgggaactcaaaggagactgccggtgataaaccggaggaaggtggggatgacgtcaagtcatcatggcccttacgaccagggctacacacgtgctacaatggcgcatacaaagagaagcgacctcgcgagagcaagcggacctcataaagtgcgtcgtagtccggattggagtctgcaactcgactccatgaagtcggaatcgctagtaatcgtggatcagaatgccacggtgaatacgttcccgggccttgtacacaccgcccgtcacaccatgggagtgggttgcaaaagaagtaggtagcttaaccttcgggagggcgcttaccactttgtgattcatgactggggtg

SEQ ID NO: 1180 - DNA, 1465 bp, Cronobacter turicensis
attgaacgctggcggcaggcctaacacatgcaagtcgaacggtaacagagagcagcttgctgctctgctgacgagtggcggacgggtgagtaatgtctgggaaactgcctgatggagggggataactactggaaacggtagctaataccgcataacgtcttcggaccaaagtgggggaccttcgggcctcatgccatcagatgtgcccagatgggattagctagtaggtggggtaaaggctcacctaggcgacgatccctagctggtctgagaggatgaccagccacactggaactgagacacggtccagactcctacgggaggcagcagtggggaatattgcacaatgggcgcaagcctgatgcagccatgccgcgtgtatgaagaaggccttcgggttgtaaagtactttcagcgaggaggaagggattgtggttaataaccgcagtcattgacgttactcgcagaagaagcaccggctaactccgtgccagcagccgcggtaatacggagggtgcaagcgttaatcggaattactgggcgtaaagcgcacgcaggcggtttgttaagtcagatgtgaaatccccgggctcaacctgggaactgcatttgaaactggcaagcttgagtctcgtagaggggggtagaattccaggtgtagcggtgaaatgcgtagagatctggaggaataccggtggcgaaggcggccccctggacgaagactgacgctcaggtgcgaaagcgtggggagcaaacaggattagataccctggtagtccacgccgtaaacgatgtcgacttggaggttgtgcccttgaggcgtggcttccggagctaacgcgttaagtcgaccgcctggggagtacggccgcaaggttaaaactcaaatgaattgacgggggcccgcacaagcggtggagcatgtggtttaattcgatgcaacgcgaagaaccttacctggtcttgacatccagagaatcctgcagagatgcgggagtgccttcgggaactctgagacaggtgctgcatggctgtcgtcagctcgtgttgtgaaatgttgggttaagtcccgcaacgagcgcaacccttatcctttgttgccagcacgtaatggtgggaactcaaaggagactgccggtgataaaccggaggaaggtggggatgacgtcaagtcatcatggcccttacgaccagggctacacacgtgctacaatggcgcatacaaagagaagcgaactcgcgagagcaagcggacctcataaagtgcgtcgtagtccggattggagtctgcaactcgactccatgaagtcggaatcgctagtaatcgtggatcagaatgccacggtgaatacgttcccgggccttgtacacaccgcccgtcacaccatgggagtgggttgcaaaagaagtaggtagcttaaccttcgggagggcgcttaccactttgtgattcatgactggggtg

SEQ ID NO: 1181 - DNA, 1465 bp, Cronobacter universalis
attgaacgctggcggcaggcctaacacatgcaagtcgaacggtaacagagagcagcttgctgctctgctgacgagtggcggacgggtgagtaatgtctgggaaactgcctgatggagggggataactactggaaacggtagctaataccgcataacgtcttcggaccaaagtgggggaccttcgggcctcatgccatcagatgtgcccagatgggattagctagtaggtggggtaacggctcacctaggcgacgatccctagctggtctgagaggatgaccagccacactggaactgagacacggtccagactcctacgggaggcagcagtggggaatattgcacaatgggcgcaagcctgatgcagccatgccgcgtgtatgaagaaggccttcgggttgtaaagtactttcagcgaggaggaagggattgtggttaataaccacagtcattgacgttactcgcagaagaagcaccggctaactccgtgccagcagccgcggtaatacggagggtgcaagcgttaatcggaattactgggcgtaaagcgcacgcaggcggtctgttaagtcagatgtgaaatccccgggctcaacctgggaactgcatttgaaactggcaggcttgagtctcgtagaggggggtagaattccaggtgtagcggtgaaatgcgtagagatctggaggaataccggtggcgaaggcggccccctggacgaagactgacgctcaggtgcgaaagcgtggggagcaaacaggattagataccctggtagtccacgccgtaaacgatgtcgacttggaggttgtgcccttgaggcgtggcttccggagctaacgcgttaagtcgaccgcctggggagtacggccgcaaggttaaaactcaaatgaattgacgggggcccgcacaagcggtggagcatgtggtttaattcgatgcaacgcgaagaaccttacctggtcttgacatccagagaatcctgcagagatgcgggagtgccttcgggaactctgagacaggtgctgcatggctgtcgtcagctcgtgttgtgaaatgttgggttaagtcccgcaacgagcgcaacccttatcctttgttgccagcacgtgatggtgggaactcaaaggagactgccggtgataaaccggaggaaggtggggatgacgtcaagtcatcatggcccttacgaccagggctacacacgtgctacaatggcgcatacaaagagaagcgaactcgcgagagcaagcggacctcataaagtgcgtcgtagtccggattggagtctgcaactcgactccatgaagtcggaatcgctagtaatcgtggatcagaatgccacggtgaatacgttcccgggccttgtacacaccgcccgtcacaccatgggagtgggttgcaaaagaagtaggtagcttaaccttcgggagggcgcttaccactttgtgattcatgactggggtg

SEQ ID NO: 1182 - DNA, 1431 bp, Cruoricaptor ignavus
gatgaacgctagcgggaggcctaacacatgcaagccgggcgggatcccttcggggtgagagcggcgtacgggtgaggagcacgtgtgcaacctgcccctgtctgggggatagccctccgaaaggaggattaacaccccataggatgttcgccggcatcggcggtcattgaaaggttacggacggggatgggcacgcgcaggattaggtagttggcagggtaacggcctaccaagcctttgatccttagggggcctgagagggtgatcccccacactggtactgagacacggaccagactcctacgggaggcagcagtgaggaatattggacaatgggtggaagcctgatccagccatcccgcgtgaaggactaagggcctatggcctgtaaacttcttttgtacggggataaacctatctacgcgtagatagctgaaggtaccgtacgaataagcaccggctaactccgtgccagcagccgcggtaatacggagggtgcgagcgttatccggatttattgggtttaaagggtccgtaggcgggcctgtaagtcggaggtgaaatcccgcggctcaaccgcggaaccgccttcgatactgcgggtcttgagtaggcttgaggcggccggaatgagtggtgtagcggtgaaatgcatagatatcactcagaacaccgatagcgaaggcaggtcgccaaggccttactgacgctgatggacgaaagcgtggggagcgaacaggattagataccctggtagtccacgccgtaaacgatgctcactcgttctcgggcgttatcgttcgggggctaagcgaaagtgataagtgagccacctggggagtacgggcgcaagcctgaaactcaaaggaattgacgggggcccgcacaagcggtggattatgtggtttaattcgatgatacgcgaggaaccttaccagggcttaaatgggggccgaccggcgcagagatgcgcctttcttcggacggtcttcaaggtgctgcatggttgtcgtcagctcgtgccgtgaggtgttaggttaagtcctgcaacgagcgcaacccctgccgccagttgccatcattaagttggggactctggcgggactgcctacgcaagtagcgaggaaggcggggacgacgtcaaatcatcacggcccttacgccctgggccacacacgtaatacaatggccggtacagagggcagccacgcggcgacgcggagcgaatctcgaaagccggtctcagttcggattggagtctgcaactcgactctatgaagctggaatcgctagtaatcgcgcatcagccatggcgcggtgaatacgttcccgggccttgtacacaccgcccgtcaagccatggaagtccggggtacctgaagtcggtgaccgtaaaaggagctgcctagggtaaaacgggtaactagggct

SEQ ID NO: 1183 - DNA, 1454 bp, Cupriavidus alkaliphilus
attgaacgctggcggcatgccttacacatgcaagtcgaacggcagcgcgggcttcggcctggcggcgagtggcgaacgggtgagtaatacatcggaacgtgccctgtcgtgggggataactagtcgaaagattagctaataccgcatacgacctgagggtgaaagcgggggaccgcaaggcctcgcgcgataggagcggccgatgtctgattagctagttggtggggtaaaggcctaccaaggcgacgatcagtagctggtctgagaggacgatcagccacactgggactgagacacggcccagactcctacgggaggcagcagtggggaattttggacaatgggggcaaccctgatccagcaatgccgcgtgtgtgaagaaggccttcgggttgtaaagcacttttgtccggaaagaaatggcctgggttaataccccgggtcgatgacggtaccggaagaataagcaccggctaactacgtgccagcagccgcggtaatacgtagggtgcgagcgttaatcggaattactgggcgtaaagcgtgcgcaggcggtttgataagacaggcgtgaaatccccgagctcaacttgggaatggcgcttgtgactgtcaggctagagtatgtcagaggggggtagaattccacgtgtagcagtgaaatgcgtagagatgtggaggaataccgatggcgaaggcagccccctgggacgtcactgacgctcatgcacgaaagcgtggggagcaaacaggattagataccctggtagtccacgccctaaacgatgtcaactagttgttggggattcatttcttcagtaacgtagctaacgcgtgaagttgaccgcctggggagtacggtcgcaagattaaaactcaaaggaattgacggggacccgcacaagcggtggatgatgtggattaattcgatgcaacgcgaaaaaccttacctacccttgacatgccactaacgaagcagagatgcattaggtgcccgaaagggaaagtggacacaggtgctgcatggctgtcgtcagctcgtgtcgtgagatgttgggttaagtcccgcaacgagcgcaacccttgtctctagttgctacgaaagggcactctagagagactgccggtgacaaaccggaggaaggtggggatgacgtcaagtcctcatggcccttatgggtagggcttcacacgtcatacaatggtgcgtacagagggttgccaacccgcgagggggagctaatcccagaaaacgcatcgtagtccggatcgtagtctgcaactcgactacgtgaagctggaatcgctagtaatcgcggatcagcatgccgcggtgaatacgttcccgggtcttgtacacaccgcccgtcacaccatgggagtgggttttgccagaagtagttagcctaaccgcaaggagggcgattaccacggcagggttcatgactggggtg

SEQ ID NO: 1184 - DNA, 1454 bp, Cupriavidus basilensis
  misc_feature (429)..(429): n is a, c, g, or t
  misc_feature (437)..(437): n is a, c, g, or t
attgaacgctggcggcatgccttacacatgcaagtcgaacggcagcacgggagcaatcctggtggcgagtggcgaacgggtgagtaatacatcggaacgtgccctgtcgtgggggataactagtcgaaagattagctaataccgcatacgacctgagggtgaaagcgggggaccgtaaggcctcgcgcgataggagcggccgatgtctgattagctagttggtggggtaaaggcccaccaaggcgacgatcagtagctggtctgagaggacgatcagccacactgggactgagacacggcccagactcctacgggaggcagcagtggggaattttggacaatgggggcaaccctgatccagcaatgccgcgtgtgtgaagaaggccttcgggttgtaaagcacttttgtccggaaagaaatcccttgcnctaatacngcggggggatgacggtaccggaagaataagcaccggctaactacgtgccagcagccgcggtaatacgtagggtgcgagcgttaatcggaattactgggcgtaaagcgtgcgcaggcggttttgtaagacaggcgtgaaatccccgagctcaacttgggaatggcgcttgtgactgcaaggctagagtatgtcagaggggggtagaattccacgtgtagcagtgaaatgcgtagagatgtggaggaataccgatggcgaaggcagccccctgggacgtcactgacgctcatgcacgaaagcgtggggagcaaacaggattagataccctggtagtccacgccctaaacgatgtcaactagttgttggggattcatttcttcagtaacgtagctaacgcgtgaagttgaccgcctggggagtacggtcgcaagattaaaactcaaaggaattgacggggacccgcacaagcggtggatgatgtggattaattcgatgcaacgcgaaaaaccttacctacccttgacatgccactaacgaagcagagatgcatcaggtgcccgaaagggaaagtggacacaggtgctgcatggctgtcgtcagctcgtgtcgtgagatgttgggttaagtcccgcaacgagcgcaacccttgtctttagttgctacgcaagagcactctagagagactgccggtgacaaaccggaggaaggtggggatgacgtcaagtcctcatggcccttatgggtagggcttcacacgtcatacaatggtgcgtacagagggttgccaacccgcgagggggagctaatcccagaaaacgcatcgtagtccggatcgtagtctgcaactcgactacgtgaagctggaatcgctagtaatcgcggatcagcatgccgcggtgaatacgttcccgggtcttgtacacaccgcccgtcacaccatgggagtgggttttgccagaagtagttagcctaaccgcaaggagggcgattaccacggcagggttcatgactggggtg

SEQ ID NO: 1185 - DNA, 1454 bp, Cupriavidus campinensis
attgaacgctggcggcatgccttacacatgcaagtcgaacggcagcacgggagcaatcctggtggcgagtggcgaacgggtgagtaatacatcggaacgtgccctgttgtgggggataactagtcgaaagattagctaataccgcatacgacctgagggtgaaagcgggggaccgaaaggcctcgcgcaataggagcggccgatgtctgattagctagttggtggggtaaaagctcaccaaggcgacgatcagtagctggtctgagaggacgatcagccacactgggactgagacacggcccagactcctacgggaggcagcagtggggaattttggacaatgggggcaaccctgatccagcaatgccgcgtgtgtgaagaaggccttcgggttgtaaagcacttttgtccggaaagaaatggccctggctaatacccggggtcgatgacggtaccggaagaataagcaccggctaactacgtgccagcagccgcggtaatacgtagggtgcgagcgttaatcggaattactgggcgtaaagcgtgcgcaggcggttttgtaagacaggcgtgaaatccccgggctcaacctgggaattgcgcttgtgactgcaaggctagagtgcgtcagaggggggtagaattccacgtgtagcagtgaaatgcgtagagatgtggaggaataccgatggcgaaggcagccccctgggacgtgactgacgctcatgcacgaaagcgtggggagcaaacaggattagataccctggtagtccacgccctaaacgatgtcaactagttgttggggattcatttcctcagtaacgtagctaacgcgtgaagttgaccgcctggggagtacggtcgcaagattaaaactcaaaggaattgacggggacccgcacaagcggtggatgatgtggattaattcgatgcaacgcgaaaaaccttacctacccttgacatgccactaacgaagcagagatgcattaggtgctcgaaagagaaagtggacacaggtgctgcatggctgtcgtcagctcgtgtcgtgagatgttgggttaagtcccgcaacgagcgcaacccttgtctctagttgctacgaaagggcactctagagagactgccggtgacaaaccggaggaaggtggggatgacgtcaagtcctcatggcccttatgggtagggcttcacacgtcatacaatggtgcatacagagggttgccaacccgcgagggggagctaatcccagaaaatgcatcgtagtccggatcgtagtctgcaactcgactacgtgaagctggaatcgctagtaatcgcggatcagcatgccgcggtgaatacgttcccgggtcttgtacacaccgcccgtcacaccatgggagtgggttttgccagaagtagttagcctaaccgcaaggagggcgattaccacggcagggttcatgactggggtg

SEQ ID NO: 1186 - DNA, 1421 bp, Cupriavidus gilardii
  misc_feature (22)..(23): n is a, c, g, or t
  misc_feature (26)..(26): n is a, c, g, or t
  misc_feature (57)..(57): n is a, c, g, or t
  misc_feature (62)..(62): n is a, c, g, or t
  misc_feature (67)..(68): n is a, c, g, or t
  misc_feature (84)..(84): n is a, c, g, or t
  misc_feature (89)..(89): n is a, c, g, or t
  misc_feature (95)..(95): n is a, c, g, or t
  misc_feature (116)..(117): n is a, c, g, or t
  misc_feature (120)..(120): n is a, c, g, or t
  misc_feature (328)..(328): n is a, c, g, or t
  misc_feature (344)..(344): n is a, c, g, or t
  misc_feature (356)..(356): n is a, c, g, or t
  misc_feature (1074)..(1074): n is a, c, g, or t
gtcgaacggcagcgcgggtttnngcntggcggcgagtggcgaacgggtgagtaatanatcgnaacgnnccctgttgtggggganaactngtcganagattagctaataccgcatannacntgagggtgaaagcgggggaccgtaaggcctcgcgcaataggagcggccgatgtctgattagctagttggtggggtaaaggcctaccaaggcgacgatcagtagctggtatgagaggacgatcagccacactgggactgagacacggcccagactcctacgggaggcagcagtggggaattttggacaatgggggcaaccctgatccancaatgccgcgtgtgtnaagaaggccttngggttgtaaagcacttttgtccggaaagaaatcgcgctggctaatacctggcgtggatgacggtaccggaagaataagcaccggctaactacgtgccagcagccgcggtaatacgtagggtgcgagcgttaatcggaattactgggcgtaaagcgtgcgcaggcggttttgtaagacaggcgtgaaatccccgggcttaacctgggaatggcgcttgtgactgcaaggctagagtgcgtcagaggggggtagaattccacgtgtagcagtgaaatgcgtagagatgtggaggaataccgatggcgaaggcagccccctgggacgagactgacgctcatgcacgaaagcgtggggagcaaacaggattagataccctggtagtccacgccctaaacgatgtcaactagttgttggggattcatttcctcagtaacgtagctaacgcgtgaagttgaccgcctggggagtacggtcgcaagattaaaactcaaaggaattgacggggacccgcacaagcggtggatgatgtggattaattcgatgcaacgcgaaaaaccttacctacccttgacatgccactaacgaagcagagatgcatcaggtgcccgaaagggaaagtggacacaggtgctgcatggctgtcgtcagctcgtgtcgtgagatgttgggttaagtcccgcaacgagcgcaacccttgtctctagttgctacgcaaggncactctagagagactgccggtgacaaaccggaggaaggtggggatgacgtcaagtcctcatggcccttatgggtagggcttcacacgtcatacaatggtgcgtacagagggttgccaacccgcgagggggagctaatcccagaaaacgcatcgtagtccggatcgtagtctgcaactcgactacgtgaagctggaatcgctagtaatcgcggatcagcatgccgcggtgaatacgttcccgggtcttgtacacaccgcccgtcacaccatgggagtgggttttgccagaagtagttagcctaaccgcaaggagggcgattaccacggcagggttcatgactggggtg

SEQ ID NO: 1187 - DNA, 1452 bp, Cupriavidus metallidurans
attgaacgctggcggcatgccttacacatgcaagtcgaacggcagcgcggacttcggtctggcggcgagtggcgaacgggtgagtaatacatcggaacgtaccctgttgtgggggataactagtcgaaagattagctaataccgcatacgacctgagggtgaaagtgggggaccgcaaggcctcacgcagcaggagcggccgatgtctgattagctagttggtggggtaaaggcccaccaaggcgacgatcagtagctggtctgagaggacgatcagccacactgggactgagacacggcccagactcctacgggaggcagcagtggggaattttggacaatgggggcaaccctgatccagcaatgccgcgtgtgtgaagaaggccttcgggttgtaaagcacttttgtccggaaagaaatcgcgctggttaatacctcgtggatgacggtaccggaagaataagcaccggctaactacgtgccagcagccgcggtaatacgtagggtgcgagcgttaatcggaattactgggcgtaaagcgtgcgcaggcggttttgtaagacaggcgtgaaatccccgggcttaacctgggaattgcgcttgtgactgcaaggctagagtgcgtcagaggggggtagaattccacgtgtagcagtgaaatgcgtagagatgtggaggaataccgatggcgaaggcagccccctgggacgtgactgacgctcatgcacgaaagcgtggggagcaaacaggattagataccctggtagtccacgccctaaacgatgtcaactagttgttggggattcattttctcagtaacgtagctaacgcgtgaagttgaccgcctggggagtacggtcgcaagattaaaactcaaaggaattgacggggacccgcacaagcggtggatgatgtggattaattcgatgcaacgcgaaaaaccttacctacccttgacatgccactaacgaagcagagatgcattaggtgcccgaaagggaaagtggacacaggtgctgcatggctgtcgtcagctcgtgtcgtgagatgttgggttaagtcccgcaacgagcgcaacccttgtctctagttgctacgcaagagcactctagagagactgccggtgacaaaccggaggaaggtggggatgacgtcaagtcctcatggcccttatgggtagggcttcacacgtcatacaatggtgcgtacagagggttgccaacccgcgagggggagctaatcccagaaaacgcatcgtagtccggatcgtagtctgcaactcgactacgtgaagctggaatcgctagtaatcgcggatcagcatgccgcggtgaatacgttcccgggtcttgtacacaccgcccgtcacaccatgggagtgggttttgccagaagtagttagcctaaccgcaaggagggcgattaccacggcagggttcatgactggggtg

SEQ ID NO: 1188 - DNA, 1456 bp, Cupriavidus nantongensis
attgaacgctggcggcatgccttacacatgcaagtcgaacggcagcgcgggcttcggcctggcggcgagtggcgaacgggtgagtaatacatcggaacgtgccctgtcgtgggggataactagtcgaaagattagctaataccgcatacgacccgagggtgaaagcgggggaccggtaacggcctcgcgcgataggagcggccgatgtctgattagctagttggtggggtaaaggcctaccaaggcgacgatcagtagctggtctgagaggacgatcagccacactgggactgagacacggcccagactcctacgggaggcagcagtggggaattttggacaatgggggcaaccctgatccagcaatgccgcgtgtgtgaagaaggccttcgggttgtaaagcacttttgtccggaaagaaatggcctgggctaatacctcgggtcgatgacggtaccggaagaataagcaccggctaactacgtgccagcagccgcggtaatacgtagggtgcgagcgttaatcggaattactgggcgtaaagcgtgcgcaggcggtttgataagacaggcgtgaaatccccgggctcaacctgggaatggcgcttgtgactgtcaggctagagtgcgtcagaggggggtagaattccacgtgtagcagtgaaatgcgtagagatgtggaggaataccgatggcgaaggcagccccctgggacgtgactgacgctcatgcacgaaagcgtggggagcaaacaggattagataccctggtagtccacgccctaaacgatgtcaactagttgttggggattcatttcttcagtaacgtagctaacgcgtgaagttgaccgcctggggagtacggtcgcaagattaaaactcaaaggaattgacggggacccgcacaagcggtggatgatgtggattaattcgatgcaacgcgaaaaaccttacctacccttgacatgccactaacgaagcagagatgcatcaggtgcccgaaagggaaagtggacacaggtgctgcatggctgtcgtcagctcgtgtcgtgagatgttgggttaagtcccgcaacgagcgcaacccttgtctctagttgctacgaaagggcactctagagagactgccggtgacaaaccggaggaaggtggggatgacgtcaagtcctcatggcccttatgggtagggcttcacacgtcatacaatggtgcgtacagagggttgccaacccgcgagggggagctaatcccagaaaacgcatcgtagtccggatcgtagtctgcaactcgactacgtgaagctggaatcgctagtaatcgcggatcagcatgccgcggtgaatacgttcccgggtcttgtacacaccgcccgtcacaccatgggagtgggttttgccagaagtagttagcctaaccgcaaggagggcgattaccacggcagggttcatgactggggtg

SEQ ID NO: 1189 - DNA, 1454 bp, Cupriavidus necator
attgaacgctggcggcatgccttacacatgcaagtcgaacggcagcacgggcttcggcctggtggcgagtggcgaacgggtgagtaatacatcggaacgtgccctgtagtgggggataactagtcgaaagattagctaataccgcatacgacctgagggtgaaagcgggggaccgcaaggcctcgcgctacaggagcggccgatgtctgattagctagttggtggggtaaaagcctaccaaggcgacgatcagtagctggtctgagaggacgatcagccacactgggactgagacacggcccagactcctacgggaggcagcagtggggaattttggacaatgggggcaaccctgatccagcaatgccgcgtgtgtgaagaaggccttcgggttgtaaagcacttttgtccggaaagaaatggctctggttaatacccggggtcgatgacggtaccggaagaataagcaccggctaactacgtgccagcagccgcggtaatacgtagggtgcgagcgttaatcggaattactgggcgtaaagcgtgcgcaggcggttttgtaagacaggcgtgaaatccccgagctcaacttgggaatggcgcttgtgactgcaaggctagagtatgtcagaggggggtagaattccacgtgtagcagtgaaatgcgtagagatgtggaggaataccgatggcgaaggcagccccctgggacgtcactgacgctcatgcacgaaagcgtggggagcaaacaggattagataccctggtagtccacgccctaaacgatgtcaactagttgttggggattcatttcttcagtaacgtagctaacgcgtgaagttgaccgcctggggagtacggtcgcaagattaaaactcaaaggaattgacggggacccgcacaagcggtggatgatgtggattaattcgatgcaacgcgaaaaaccttacctacccttgacatgccactaacgaagcagagatgcattaggtgcccgaaagggaaagtggacacaggtgctgcatggctgtcgtcagctcgtgtcgtgagatgttgggttaagtcccgcaacgagcgcaacccttgtctctagttgctacgaaagggcactctagagagactgccggtgacaaaccggaggaaggtggggatgacgtcaagtcctcatggcccttatgggtagggcttcacacgtcatacaatggtgcgtacagagggttgccaacccgcgagggggagctaatcccagaaaacgcatcgtagtccggatcgtagtctgcaactcgactacgtgaagctggaatcgctagtaatcgcggatcagcatgccgcggtgaatacgttcccgggtcttgtacacaccgcccgtcacaccatgggagtgggttttgccagaagtagttagcctaaccgcaaggagggcgattaccacggcagggttcatgactggggtg

SEQ ID NO: 1190 - DNA, 1419 bp, Cupriavidus oxalaticus
  misc_feature (7)..(7): n is a, c, g, or t
  misc_feature (13)..(13): n is a, c, g, or t
  misc_feature (26)..(26): n is a, c, g, or t
  misc_feature (38)..(38): n is a, c, g, or t
  misc_feature (144)..(144): n is a, c, g, or t
  misc_feature (765)..(765): n is a, c, g, or t
  misc_feature (952)..(952): n is a, c, g, or t
caagtcnaacggnccccgggcttcancctggtggcgantggcgaacgggtgagtaatacatcggaacgtgccctgtcgtgggggaaactagtcgaaagattagctaatacgcatacgacctgagggtgaaagcgggggaccggnaacggcctcgcgcgacaggagcggccgatgtctgattagctagttggtggggtaagagcctaccaaggcgacgatcagtagctggtctgagaggacgatcagccacactgggactgagacacggcccagactcctacgggaggcagcagtggggaattttggacaatgggggcaaccctgatccagcaatgccgcgtgtgtgaagaaggccttcgggttgtaaagcacttttgtccggaaagaaaacgcgctggttaatacctggcgtggatgacggtaccggaagaataagcaccggctaactacgtgccagcagccgcggtaatacgtagggtgcgagcgttaatcggaattactgggcgtaaagcgtgcgcaggcggtttgataagacaggcgtgaaatccccgagctcaacttgggaatggcgcttgtgactgtcaggctagagtatgtcagaggggggtagaattccacgtgtagcagtgaaatgcgtagagatgtggaggaataccgatggcgaaggcagccccctgggacgtgactgacgctcatgcacgaaagcgtggggagcaaacaggattagataccctggtagtccacgccctaaacgatgtcaactanttgttggggattcatttcttcagtaacgtagctaaccgtgaagttgaccgcctggggagtacggtcgcaagattaaaactcaaaggaattgacggggacccgcacaagcggtggatgatgtggattaattcgatgcaacgcgaaaaacttacctacccttgacatgccactaacgaaccagagatgntcaggtgcccgaaaaggaaagtggaccaggtgctgcatggctgtcgtcagctcgtgtcgtgagatgttgggttaagtcccgcaacgagcgcaacccttgtctctagttgctacgcaagagcactctagagagactgccggtgacaaaccggaggaaggtggggatgacgtcaagtcctcatggcccttatgggtagggcttcacacgtcatacaatggtgcgtacagagggttgccaacccgcgagggggagctaatcccagaaaacgcatcgtagtccggatcgtagtctgcaactcgactacgtgaagctggaatcgctagtaatcgcggatcagcatgccgcggtgaatacgttcccgggtcttgtacacaccgcccgtcacaccatgggagtgggttttgccagaagtagttagcctaaccgcaaggaaggcgattaccacggcagggttcatgactggggtg

SEQ ID NO: 1191 - DNA, 1454 bp, Cupriavidus pauculus
  misc_feature (389)..(389): n is a, c, g, or t
attgaacgctggcggcatgccttacacatgcaagtcgaacggcagcgcggacttcggtctggcggcgagtggcgaacgggtgagtaatacatcggaacgtaccctgttgtgggggataactagtcgaaagattagctaataccgcatacgacctgagggtgaaagcgggggaccgaaaggcctcgcgcagcaggagcggccgatgtctgattagctagttggtggggtaaaggcccaccaaggcgacgatcagtagctggtctgagaggacgatcagccacactgggactgagacacggcccagactcctacgggaggcagcagtggggaattttggacaatgggggcaaccctgatccagcaatgccgcgtgtgtgaagaaggccttngggttgtaaagcacttttgtccggaaagaaattgctctggctaatacctggggtagatgacggtaccggaagaataagcaccggctaactacgtgccagcagccgcggtaatacgtagggtgcgagcgttaatcggaattactgggcgtaaagcgtgcgcaggcggttttgtaagacaggcgtgaaatccccgggctcaacctgggaattgcgcttgtgactgcaaggctagagtgcgtcagaggggggtagaattccacgtgtagcagtgaaatgcgtagagatgtggaggaataccgatggcgaaggcagccccctgggacgtgactgacgctcatgcacgaaagcgtggggagcaaacaggattagataccctggtagtccacgccctaaacgatgtcaactagttgttggggattcattttctcagtaacgtagctaacgcgtgaagttgaccgcctggggagtacggtcgcaagattaaaactcaaaggaattgacggggacccgcacaagcggtggatgatgtggattaattcgatgcaacgcgaaaaaccttacctacccttgacatgccactaacgaagcagagatgcattaggtgcccgaaagggaaagtggacacaggtgctgcatggctgtcgtcagctcgtgtcgtgagatgttgggttaagtcccgcaacgagcgcaacccttgtctctagttgctacgcaagagcactctagagagactgccggtgacaaaccggaggaaggtggggatgacgtcaagtcctcatggcccttatgggtagggcttcacacgtcatacaatggtgcgtacagagggttgccaacccgcgagggggagctaatcccagaaaacgcatcgtagtccggatcgtagtctgcaactcgactacgtgaagctggaatcgctagtaatcgcggatcagcatgccgcggtgaatacgttcccgggtcttgtacacaccgcccgtcacaccatgggagtgggttttgccagaagtagttagcctaaccgcaaggagggcgattaccacggcagggttcatgactggggtg

SEQ ID NO: 1192 - DNA, 1455 bp, Cupriavidus pinatubonensis
attgaacgctggcggctgccttacacatgcaagtcgaacggcagcacgggcttcggcctggtggcgagtggcgaacgggtgagtaatacatcggaacgtgccctgtcgtgggggataactagtcgaaagattagctaataccgcatacgacctgagggtgaaagcgggggaccggtaacggcctcgcgcgataggagcggccgatgtctgattagctagttggtggggtaagagcctaccaaggcgacgatcagtagctggtctgagaggacgatcagccacactgggactgagacacggcccagactcctacgggaggcagcagtggggaattttggacaatgggggcaaccctgatccagcaatgccgcgtgtgtgaagaaggccttcgggttgtaaagcacttttgtccggaaagaaatcctctgccctaatacggcggggggatgacggtaccggaagaataagcaccggctaactacgtgccagcagccgcggtaatacgtagggtgcgagcgttaatcggaattactgggcgtaaagcgtgcgcaggcggttttgtaagacaggcgtgaaatccccgggcttaacctgggaatggcgcttgtgactgcaaggctagagtgtgtcagaggggggtagaattccacgtgtagcagtgaaatgcgtagagatgtggaggaataccgatggcgaaggcagccccctgggacatgactgacgctcatgcacgaaagcgtggggagcaaacaggattagataccctggtagtccacgccctaaacgatgtcaactagttgttggggattcatttcttcagtaacgtagctaacgcgtgaagttgaccgcctggggagtacggtcgcaagattaaaactcaaaggaattgacggggacccgcacaagcggtggatgatgtggattaattcgatgcaacgcgaaaaaccttacctacccttgacatgccactaacgaagcagagatgcattaggtgcccgaaagggaaagtggacacaggtgctgcatggctgtcgtcagctcgtgtcgtgagatgttgggttaagtcccgcaacgagcgcaacccttgtctctagttgctacgaaagggcactctagagagactgccggtgacaaaccggaggaaggtggggatgacgtcaagtcctcatggcccttatgggtagggcttcacacgtcatacaatggtgcgtacagagggttgccaacccgcgagggggagccaatcccagaaaacgcatcgtagtccggatcgtagtctgcaactcgactacgtgaagctggaatcgctagtaatcgcggatcagcatgccgcggtgaatacgttcccgggtcttgtacacaccgcccgtcacaccatgggagtgggttttgccagaagtagttagcctaaccgcaaggagggcgattaccacggcagggttcatgactggggtg

SEQ ID NO: 1193 - DNA, 1454 bp, Cupriavidus plantarum
attgaacgctggcggcatgccttacacatgcaagtcgaacggcagcgcggacttcggtctggcggcgagtggcgaacgggtgagtaatacatcggaacgtgccctgttgtgggggataactagtcgaaagattagctaataccgcatacgacctgagggtgaaagcgggggaccgtaaggcctcgcgcaataggagcggccgatgtctgattagctagttggtggggtaaaggcccaccaaggcgacgatcagtagctggtctgagaggacgatcagccacactgggactgagacacggcccagactcctacgggaggcagcagtggggaattttggacaatgggggcaaccctgatccagcaatgccgcgtgtgtgaagaaggccttcgggttgtaaagcacttttgtccggaaagaaattgcgctggttaatacccggcgtagatgacggtaccggaagaataagcaccggctaactacgtgccagcagccgcggtaatacgtagggtgcgagcgttaatcggaattactgggcgtaaagcgtgcgcaggcggttttgtaagacaggcgtgaaatccccgggctcaacctgggaattgcgcttgtgactgcaaggctagagtgcgtcagaggggggtagaattccacgtgtagcagtgaaatgcgtagagatgtggaggaataccgatggcgaaggcagccccctgggacgtgactgacgctcatgcacgaaagcgtggggagcaaacaggattagataccctggtagtccacgccctaaacgatgtcaactagttgttggggattcatttcctcagtaacgtagctaacgcgtgaagttgaccgcctggggagtacggtcgcaagattaaaactcaaaggaattgacggggacccgcacaagcggtggatgatgtggattaattcgatgcaacgcgaaaaaccttacctacccttgacatgccactaacgaagcagagatgcattaggtgcccgaaagggaaagtggacacaggtgctgcatggctgtcgtcagctcgtgtcgtgagatgttgggttaagtcccgcaacgagcgcaacccttgtctttagttgctacgcaagagcactctagagagactgccggtgacaaaccggaggaaggtggggatgacgtcaagtcctcatggcccttatgggtagggcttcacacgtcatacaatggtgcgtacagagggttgccaacccgcgagggggagctaatcccagaaaacgcatcgtagtccggatcgtagtctgcaactcgactacgtgaagctggaatcgctagtaatcgcggatcagcatgccgcggtgaatacgttcccgggtcttgtacacaccgcccgtcacaccatgggagtgggttttgccagaagtagttagcctaaccgcaaggagggcgattaccacggcagggttcatgactggggtg

SEQ ID NO: 1194 - DNA, 1456 bp, Cupriavidus taiwanensis
attgaacgctggcggcatgccttacacatgcaagtcgaacggcagcgcgggcttcggcctggcggcgagtggcgaacgggtgagtaatacatcggaacgtgccctgtcgtgggggataactagtcgaaagattagctaataccgcatacgacctgagggtgaaagcgggggaccggtaacggcctcgcgcgataggagcggccgatgtctgattagctagttggtggggtaaaggcctaccaaggcgacgatcagtagctggtctgagaggacgatcagccacactgggactgagacacggcccagactcctacgggaggcagcagtggggaattttggacaatgggggcaaccctgatccagcaatgccgcgtgtgtgaagaaggccttcgggttgtaaagcacttttgtccggaaagaaatggctctggctaatacccggggtcgatgacggtaccggaagaataagcaccggctaactacgtgccagcagccgcggtaatacgtagggtgcgagcgttaatcggaattactgggcgtaaagcgtgcgcaggcggtttgataagacaggcgtgaaatccccgggctcaacctgggaatggcgcttgtgactgtcaggctagagtgcgtcagaggggggtagaattccacgtgtagcagtgaaatgcgtagagatgtggaggaataccgatggcgaaggcagccccctgggacgtgactgacgctcatgcacgaaagcgtggggagcaaacaggattagataccctggtagtccacgccctaaacgatgtcaactagttgttggggattcatttcttcagtaacgtagctaacgcgtgaagttgaccgcctggggagtacggtcgcaagattaaaactcaaaggaattgacggggacccgcacaagcggtggatgatgtggattaattcgatgcaacgcgaaaaaccttacctacccttgacatgccactaacgaagcagagatgcatcaggtgcccgaaagggaaagtggacacaggtgctgcatggctgtcgtcagctcgtgtcgtgagatgttgggttaagtcccgcaacgagcgcaacccttgtctctagttgctacgcaagagcactctagagagactgccggtgacaaaccggaggaaggtggggatgacgtcaagtcctcatggcccttatgggtagggcttcacacgtcatacaatggtgcgtacagagggttgccaacccgcgagggggagctaatcccagaaaacgcatcgtagtccggatcgtagtctgcaactcgactacgtgaagctggaatcgctagtaatcgcggatcagcatgccgcggtgaatacgttcccgggtcttgtacacaccgcccgtcacaccatgggagtgggttttgccagaagtagttagcctaaccgcaaggagggcgattaccacggcagggttcatgactggggtg

SEQ ID NO: 1195 - DNA, 1407 bp, Cyanobium gracile
gatgaacgctggcggcgtgcttaacacatgcaagtcgaacgagccttcgggctagtggcggacgggtgagtaacgcgtgggaatctgccctcaggagggggataacggccggaaacggccgctaataccccatatgccgagaggtgaaatgaatttcgcctgaggatgagcccgcgtctgattagctagttggtggggtaatggcccaccaaggcgacgatcagtagctggtctgagaggatgatcagccacactgggactgagacacggcccagactcctacgggaggcagcagtggggaattttccgcaatgggcgaaagcctgacggagcaacgccgcgtgagggatgaaggcctctgggctgtaaacctcttttctcaaggaagaagacatgacggtacttgaggaataagccacggctaattccgtgccagcagccgcggtaatacgggagtggcaagcgttatccggaattattgggcgtaaagcgtccgcaggcggccttgtaagtctgtcgttaaagcgtggagcttaactccatttcagcgatggaaactacaaggcttgagtgtggtaggggcagagggaattcccggtgtagcggtgaaatgcgtagatatcgggaagaacaccagtggcgaaggcgctctgctgggccataactgacgctcatggacgaaagccaggggagcgaaagggattagatacccctgtagtcctggccgtaaacgatgaacactaggtgtcgggggaatcgaccccctcggtgtcgtagctaacgcgttaagtgttccgcctggggagtacgcacgcaagtgtgaaactcaaaggaattgacgggggcccgcacaagcggtggagtatgtggtttaattcgatgcaacgcgaagaaccttaccagggtttgacatcctgcgaatcccttggaaacgagggagtgccttcgggagcgcagagacaggtggtgcatggctgtcgtcagctcgtgtcgtgagatgttgggttaagtcccgcaacgagcgcaacccacgtctttagttgccagcattcagttgggcactctagagagaccgccggtgataaaccggaggaaggtgtggatgacgtcaagtcatcatgccccttacatcctgggctacacacgtactacaatgctacggacaaagggttgcaagctcgcgagagttagctaatcccataaaccgtggctcagttcagatcgtaggctgcaactcgcctacgtgaaggaggaatcgctagtaatcgcaggtcagcatactgcggtgaatacgttcccgggccttgtacacaccgcccgtcacaccatggaagttggccatgcccgaagtcgttactccaacccttgtggaggaggacgccgaaggtggggctgatgactggggtg

SEQ ID NO: 1196 - DNA, 1460 bp, Cycloclasticus pugetii
attgaacgctggcggcatgcctaacacatgcaagtcgaacggaaacgatgctagcttgctagcaggcgtcgagtggcggacgggtgagtaatgcataggaatctacctaatagtgggggacaacctggtgaaaaccaggctaataccgcataatccctacggggcaaagcaggggaccttcgggccttgcgctaatagatgagcctatgtcggattagctagttggtgaggtaatggctcaccaaggcaacgatccgtagctggtttgagaggatgatcagccacactgggactgagacacggcccagactcctacgggaggcagcagtggggaatattgcacaatggaggaaactctgatgcagcaatgccgcgtgtgtgaagaaggccttagggttgtaaagcactttcagtagggaggaaaagtttaaggttaataaccttaggccctgacgttacctacagaagaagcaccggctaactccgtgccagcagccgcggtaatacggagggtgcaagcgttaatcggaattactgggcgtaaagcgcgcgtaggcggttaaacaagtcagatgtgaaagccccgggctcaacctgggaactgcatttgaaactgtttagctagagtgtggtagaggagagtggaatttcaggtgtagcggtgaaatgcgtagatatctgaaggaacaccagtggcgaaggcggctctctggaccaacactgacgctgaggtgcgaaagcgtgggtagcaaacgggattagataccccggtagtccacgccgtaaacgatgtcaactaactgttgggcgggtttccgcttagtggtgcagctaacgcaataagttgaccgcctggggagtacggccgcaaggctaaaactcaaatgaattgacgggggcccgcacaagcggtggagcatgtggtttaattcgatgcaacgcgaagaaccttacctacccttgacatacagagaactttctagagatagattggtgccttcgggaactctgatacaggtgctgcatggctgtcgtcagctcgtgtcgtgagatgttgggttaagtcccgtaacgagcgcaacccttatccttagttgctaccatttagttgggcactctaaggagactgccggtgataaaccggaggaaggtggggacgacgtcaagtcatcatggcccttatgggtagggctacacacgtgctacaatggccggtacagagggccgcaaactcgcgagagtaagctaatcccttaaagccggtcctagtccggattgcagtctgcaactcgactgcatgaagctggaatcgctagtaatcgcggatcagaatgccgcggtgaattcgttcccgggccttgtacacaccgcccgtcacaccatgggagtgggttgcaaaagaagtgggtaggctaaccttcgggaggccgctcaccactttgtgattcatgactggggtg

SEQ ID NO: 1197 - DNA, 1410 bp, Cylindrospermopsis raciborskii
gatgaacgctggcggtatgcttaacacatgcaagtcgaacgggatgcttaggcatctagtggcggacgggtgagtaacgcgtgagaatctggctccaggtcggggataacagttggaaacgactgctaataccggatgtgccgagaggtgaaagatttattgcctggagatgagctcgcgtctgattagctagttggtggtgtaagggaccaccaaggcgtcgatcagtagctggtctgagaggatgatcagccacactgggactgagacacggcccagactcctacgggaggcagcagtggggaattttccgcaatgggcgaaagcctgacggagcaataccgcgtgagggaggaaggctcttgggtcgtaaacctcttttctcaaggaagaagaaagtgacggtacttgaggaataagcatcggctaactccgtgccagcagccgcggtaatacggaggatgcaagcgttatccggaatgattgggcgtaaagggtctgcaggtggaactgaaagtctgctgttaaagagtttggcttaaccaaataaaagcggtggaaactacagaactagagtgcggtaggggcaaaaggaattcctggtgtagcggtgaaatgcgtagatatcaggaagaacaccggtggcgaaagcgttttgctagaccgtaactgacactgagggacgaaagctaggggagcgaatgggattagataccccagtagtcctagccgtaaacgatggatactcggcgtggcttgtatcgacccgagccgtgccggagctaacgcgttaagtatcccgcctggggagtacgcacgcaagtgtgaaactcaaaggaattgacgggggcccgcacaagcggtggagtatgtggtttaattcgatgcaacgcgaagaaccttaccaagacttgacatcctgcgaattccggtgaaagctgggagtgccttagggagcgcagagacaggtggtgcatggctgtcgtcagctcgtgtcgtgagatgttgggttaagtcccgcaacgagcgcaaccctcgtttttagttgccagcattaagttgggcactctagagagactgccggtgacaaaccggaggaaggtgaggatgacgtcaagtcagcatgccccttacgtcttgggctacacacgtactacaatgctacggacagagggcagcaagccagggatggcaagcgaatccagaaaccgtagctcagttcagatcgaaggctgcaactcgccttcgtgaaggaggaatcgctagtaattgcaggtcagcatactgcagtgaattcgttcccgggccttgtacacaccgcccgtcacaccatggaagttggtcacgcccgaagtcattaccccaaccgaaaggagggggatgcctaaggtaggactggtgactggggtg

SEQ ID NO: 1198 - DNA, 1411 bp, Cylindrospermum stagnale
gatgaacgctggcggtatgcttaacacatgcaagtcgaacggtctcttcggagatagtggcggacgggtgagtaacgcgtgagaatctgccttcaggtctgggacaaccactggaaacggtggctaataccggatgtgccgagaggtgaaaggttaactgcctgaagaggagctcgcgtctgattagctagttggtggggtaaaagcctaccaaggcgacgatcagtagctggtctgagaggatgatcagccacactgggactgagacacggcccagactcctacgggaggcagcagtggggaattttccgcaatgggcgaaagcctgacggagcaataccgcgtgagggaggaaggctcttgggttgtaaacctcttttctcagggaataaaaaaatgaaggtacctgaggaataagcatcggctaactccgtgccagcagccgcggtaatacggaggatgcaagcgttatccggaatgattgggcgtaaagcgtccgcaggtggctatgtaagtctgctgttaaagagcaaggctcaaccttgtaaaggcagtggaaactacatagctagagtgcgttcggggcagagggaattcctggtgtagcggtgaaatgcgtagatatcaggaagaacaccggtggcgaaagcgctctgctaggccgcaactgacactgagggacgaaagctaggggagcgaatgggattagataccccagtagtcctagccgtaaacgatggatactaggcgttgcttgtatcgacccgagcagtgccgtagctaacgcgttaagtatcccgcctggggagtacgcacgcaagtgtgaaactcaaaggaattgacgggggcccgcacaagcggtggagtatgtggtttaattcgatgcaacgcgaagaaccttaccaaggcttgacatgtcgcgaatctccttgaaaggggagagtgccttcgggagcgcgaacacaggtggtgcatggctgtcgtcagctcgtgtcgtgagatgttgggttaagtcccgcaacgagcgcaaccctcgtttttagttgccagcacttcgggtgggcactctagagagactgccggtgacaaaccggaggaaggtggggatgacgtcaagtcagcatgccccttacgccttgggctacacacgtactacaatgctacggacagagggcagcaagctagcgatagcaagctaatcccggaaaccgtagctcagttcagatcgcaggctgcaactcgcctgcgtgaaggaggaatcgctagtaattgcaggtcagcatactgcagtgaattcgttcccgggccttgtacacaccgcccgtcacaccatggaagctggtcacgcccgaagtcgttaccccaacccttgtggagggggatgcctaaggcaggactggtgactggggtg

SEQ ID NO: 1199 - DNA, 1458 bp, Cystobacter ferrugineus
aacgaacgctggcggcgtgcctaacacatgcaagtcgagcgcgaatggagcaatcctagtagagcggcgcacgggtgcgtaacacgtggataatctgcctgggtgtctgggataaccagtcgaaagattggctaataccggataagcccccgggagcttcggctcttgagggaaaaggtggcctctgtatacaagctatcacatccagatgagtccgcggcccatcagctagttggcggggtaatggcccaccaaggcaacgacgggtagctggtctgagaggacgatcagccacactggaactgagacacggtccagactcctacgggaggcagcagtggggaattttgcgcaatgggcgaaagcctgacgcagcaacgccgcgtgtgtgatgaaggtctttggattgtaaagcactttcgaccgggacgaaaacccctgggctaatactccagggcttgacggtaccgggagaagaagcaccggctaactctgtgccagcagccgcggtaatacagagggtgcaagcgttgttcggaattattgggcgtaaagcgcgtgtaggcggctttgcaagtcggatgtgaaagccctcggctcaaccgaggaagtgcgttcgaaactgcagagcttgagtgccggagagggtggcggaattccccaagtagaggtgaaattcgtagatatggggaggaacaccggtggcgaaggcggccacctggacggtcactgacgctgagacgcgaaagcgtgggtagcaaacaggattagataccctggtagtccacgccgtaaacgatgagaactaggtgtcgtgggtgttgacccccgcggtgccgtagctaacgcattaagttctccgcctgggaagtacggtcgcaagactaaaactcaaaggaattgacgggggcccgcacaagcggtggagcatgtggtttaattcgacgcaacgcgcagaaccttacctggtcttgacatcctcggaatgcctcagagatgaggcggtgcccgcaagggaaccgagagacaggtgctgcatggctgtcgtcagctcgtgtcgtgagatgttgggttaagtcccgcaacgagcgcaaccctcgcctttagttgccgcgcaagcggatctctagagggactgccggtgttaaaccggaggaaggtggggatgacgtcaagtcctcatggcctttatgaccagggctacacacgtgctacaatggccggtacaaagcgttgccaactcgcgagagggagctaatcgcataaaaccggtctcagttcagattggagtctgcaactcgactccatgaaggcggaatcgctagtaatcgcagatcagcacgctgcggtgaatacgttcccgggccttgtacacaccgcccgtcacaccatgggagtcgattgctccagaagtcatctcaccaagaggtgcccaaggagtggtcggtaactggggtg

SEQ ID NO: 1200 - DNA, 1458 bp, Cystobacter fuscus
aacgaacgctggcggcgtgcctaacacatgcaagtcgagcgcgaatggagcaatcctagtagagcggcgcacgggtgcgtaacacgtggataatctgcctgggtgtctgggataaccagtcgaaagattggctaataccggataagcccccgggagcttcggctcttgagggaaaaggtggcctctgtatacaagctatcacatccagatgagtccgcggcccatcagctagttggcggggtaatggcccaccaaggcaacgacgggtagctggtctgagaggacgatcagccacactggaactgagacacggtccagactcctacgggaggcagcagtggggaattttgcgcaatgggcgaaagcctgacgcagcaacgccgcgtgtgtgatgaaggtctttggattgtaaagcactttcgaccgggacgaaaacccctgggctaatactccagggcttgacggtaccgggagaagaagcaccggctaactctgtgccagcagccgcggtaatacagagggtgcaagcgttgttcggaattattgggcgtaaagcgcgtgtaggcggctttgcaagtcggatgtgaaagccctcggctcaaccgaggaagtgcgttcgaaactgcagagcttgagtaccggagagggtggcggaattccccaagtagaggtgaaattcgtagatatggggaggaacaccggtggcgaaggcggccacctggacggtcactgacgctgagacgcgaaagcgtgggtagcaaacaggattagataccctggtagtccacgccgtaaacgatgagaactaggtgtcgtgggtgttgacccccgcggtgccgtagctaacgcattaagttctccgcctgggaagtacggtcgcaagactaaaactcaaaggaattgacgggggcccgcacaagcggtggagcatgtggtttaattcgacgcaacgcgcagaaccttacctggtcttgacatcctcggaatgcctcagagatgaggcggtgcccgcaagggaaccgagagacaggtgctgcatggctgtcgtcagctcgtgtcgtgagatgttgggttaagtcccgcaacgagcgcaaccctcgcctttagttgccgcgcaagcggatctctagagggactgccggtgttaaaccggaggaaggtggggatgacgtcaagtcctcatggcctttatgaccagggctacacacgtgctacaatggccggtacaaagcgttgccaactcgcgagagggagctaatcgcataaaaccggtctcagttcagattggagtctgcaactcgactccatgaaggcggaatcgctagtaatcgcagatcagcacgctgcggtgaatacgttcccgggccttgtacacaccgcccgtcacaccatgggagtcgattgctccagaagtcatctcaccaagaggtgcccaaggagtggtcggtaactggggtg

SEQ ID NO: 1201 - DNA, 1440 bp, Cytophaga xylanolytica
  misc_feature (1094)..(1094): n is a, c, g, or t
gatgaacgctagcgacaggcctaacacatgcaagtcgaggggcagcacgtcttcggatggtggcgaccggcgcacgggtgagtaacgcgtatgtaacctgcctacaacagggggatagctcgctgaaaagcgaattaagaccgcataagaccacgctttcgcatgttagcgtggtaaaatatttataggttgtagatgggcatgcgtgacattagctagttggtaaggtaacggcttaccaaggcaacgatgtctaggggttctgagaggaaggtcccccacactggtactgagacacggaccagactcctacgggaggcagcagtgaggaatattggtcaatgggcgagagcctgaaccagccatgtcgcgtgcaggatgacggccctacgggttgtaaactgcttttgtacgggaagaaaaaacgccacgtgtggtgtcttgccggtaccgtacgaataaggatcggctaactccgtgccagcagccgcggtaatacggaggatccgagcgttatccggatttattgggtttaaagggtgcgtaggcgggagattaagtcagtggtgaaagtttgcggctcaaccgtaaaattgccattgatactggttttcttgagtacagttgaggtaggcggaatgtggtgtgtagcggtgaaatgcttagatataccacagaacaccgattgcgaaggcagcttactaaagtgtaactgacgctgatgcacgaaagcgtggggatcaaacaggattagataccctggtagtccacgcagtaaacgatgatcactcgttgtttgcgatacattgcaagtgaccaagagaaatcgataagtgatccacctggggagtacggccgcaaggctgaaactcaaaggaattgacgggggcccgcacaagcggaggaacatgtggtttaattcgatgatacgcgaggaaccttacctgggtttaaatggggagtgacagctgccgaaaggtggtcttcttcggacactcttcaaggtgctgcatggttgtcgtcagctcgtgccgtgaggtgtcgggttaagtcccataacgagcgcaacccacgtcgttagttgccatcaggtnatgctgggcactctaacgagactgccggtgtaaaccgcgaggaaggtgtggatgacgtcaaatcagcacggcccttacatccagggctacacacgtgttacaatggccggtacagagggctgctaccatgcgaatggatgctaatcctaaaaaccggtcccagttcggattggagtctgcaacccgactccatgaagctggattcgctagtaatcgcgcatcagccatggcgcggtgaatacgttcccgggccttgtacacaccgcccgtcaagccatggaagctgagggtacctaaagtctgtcaccgtaaggagcggcctagggtaaaattggtaactggggct

SEQ ID NO: 1202 - DNA, 1411 bp, Dactylococcopsis salina
gatgaacgctggcggcgtgcttaacacatgcaagtcgaacgaagtcttcggacttagtggcggacgggtgagtaacgcgtgagaatctaccttctagatggggacaaccgttggaaacgacggctaatccccaatacgccgaaaggtgaaatggttttccgctagaagaggagctcgcgtccgattagttagttggtggggtaaaagcctaccaaagcgtcgatcggtagctggtctgagaggatgagcagccacactgggactgagacacggcccagactcctacgggaggcagcagtggggaattttccgcaatgggcgaaagcctgacggagcaacgccgcgtgtgggaagaaggctcttgggctgtcaaccacttttctcagggaagaatgactgacggtacctgaggaatcagcctcggctaactccgtgccagcagccgcggtaatacggaggaggcaagcgttatccggaattattgggcgtaaagcgtccgcagggggcgcatcaagtctgctgtcaaaggtcggagcttaactccggtgtggcagtggaaacgggtgcgctagagggcgacaggggtagagggaattcccagtgtagcggtgaaatgcgtagagattgggaagaacaccggtggcgaaagcgctctactgggtcgcacctgaccctcagggacgaaagctaaggtagcgaaagggattagatacccctgtagtcttagccgtaaacgatggatactaggcgtggtttgtatcgacccaagccgtgccgaagctaacgcgttaagtatcccgcctggggagtacgcacgcaagtgtgaaactcaaaggaattgacgggggcccgcacaagcggtggaggatgtggtttaattcgatgcaacgcgaagaaccttaccagggcttgacatcccgcggatccccatgaaagtggggagtgccttcgggaacgcggagacaggtggtgcatggctgtcgtcagctcgtgtcgtgagatgttgggttaagtcccgcaacgagcgcaaccctcgtccttagttgccagcattaggttgggaactctagggagactgccggtgacaaaccggaggaaggtgaggatgacgtcaagtcagcatgccccttatgctctgggcgacacacgtcctacaatggtcgggacaaagggaagcgaactcgcaagagccagcaaatcccatcaaactcggcctcagttcagatagcaggctgcaactcgcctgcttgaaggaggaatcgctagtaatcgccggtcagaatacggcggtgaattcgttcccgggccttgtacacaccgcccgtcacaccatggaagctggccaagcccgaagtcgttaccctaacccgtgtggaggggggcgccgaaggctgggctagtgactggggtg

SEQ ID NO: 1203 - DNA, 1391 bp, Dankookia rubra
agcgaacgcggcggcatgcttaacacatgcagtcgcacgggcagcaatgtcagtggcggacgggtgagtatcgcgtaggaatgtatcctgaggtgggggacaaccctgggaaactggggctaataccgcatgggagctgaggctcaaagccttcgggtgccttgggagcagcctgcgtccgattaggtagttggtggggtaaaggcctaccaagcctgcgatcggtagctggtctgagaggacgatcagccacactgggactgagacacggcccagactcctacgggaggcagcagtggggaatattggacaatgggcgcaagcctgatccagcaatgccgcgtgggtgaagaaggtcttcggattgtaaagccctttcgacggggacgatgatgacggtacccgtagaagaagccccggctaacttcgtgccagcagccgcggtaatacgaagggggctagcgttgctcggaattactgggcgtaaagggcgcgtaggcggcactgttagtcaggcgtgaaattcctgggctcaacctggggactgcgcttgatacggcagagctagaggatggaaaaggctcgcggaattcccagtgtagaggtgaaattcgtagatattgggaagaacaccggtggcgaaggcggcgagctggtccattactgacgctgaggcgcgacagcgtggggagcaaacaggattagataccctggtagtccacgccgtaaacgatgtgcgctggatgttgggtggcctagccactcagtgtcgtagctaacgcggtaagcgcaccgcctggggagtacggccgcaaggttgaaactcaaaggaattgacgggggcccgcacaagcggtggagcatgtggtttaattcgaagcaacgcgcagaaccttaccagcccttgacatgggtcggaccggcgcagagatgcgctttccccgcaaggggccgactgcacaggtgctgcatggctgtcgtcagctcgtgtcgtgagatgttgggttaagtcccgcaacgagcgcaaccctcgcctttagttgccagcatgtttgggtgggcactctagaggaactgccggtgacaagccggaggaaggtggggatgacgtcaagtcctcatggcccttatgggctgggctacacacgtgctacaatggcggtgacagtgggacgccaggtcgcaaggccgagccgatccccaaaagccgtctcagttcggattgcactctgcaactcgggtgcatgaaggtggaatcgctagtaatcgtggatcagcacgccacggtgaatacgttcccgggccttgtacacaccgcccgtcacaccatgggagttggttctaccttaagtcgctgcggtaaccgcaaggagctaggcgaccacggtagg

SEQ ID NO: 1204 - DNA, 1460 bp, Dechloromonas denitrificans
attgaacgctggcggcatgccttacacatgcaagtcgaacggcagcacgggagcaatcctggtggcgagtggcgaacgggtgagtaatgtatcggaacgtacctttcagtgggggataacgtagcgaaagttacgctaataccgcatattctgtgcgcaggaaagcaggggaccttcgggccttgcgctgattgagcggccgatatcagattagctagttggtgaggtaaaggctcaccaaggcgacgatctgtagcgggtctgagaggatgatccgccacactggaactgagacacggtccagactcctacgggaggcagcagtggggaattttggacaatgggcgcaagcctgatccagccatgccgcgtgagtgaagaaggccttcgggttgtaaagctctttcggccgggaagaaatcgcatgggttaataccctgtgcggatgacggtaccggcataagaagcaccggctaactacgtgccagcagccgcggtaatacgtagggtgcgagcgttaatcggaattactgggcgtaaagcgtgcgcaggcggttttgtaagacaggcgtgaaatccccgggctcaacctgggaactgcgcttgtgactgcaaggctagagtacggcagaggggggtggaattccacgtgtagcagtgaaatgcgtagagatgtggaggaacaccaatggcgaaggcagccccctgggtcgatactgacgctcatgcacgaaagcgtgggtagcaaacaggattagataccctggtagtccacgccctaaacgatgtcaactaggtgttgggtgggtaaaaccatttagtaccggagctaacgcgtgaagttgaccgcctggggagtacggccgcaaggttaaaactcaaaggaattgacggggacccgcacaagcggtggatgatgtggattaattcgatgcaacgcgaaaaaccttacctacccttgacatgtccagaagcccgaagagatttgggtgtgcccgaaagggagctggaacacaggtgctgcatggctgtcgtcagctcgtgtcgtgagatgttgggttaagtcccgcaacgagcgcaacccttgtcgttaattgccatcatttagttgggcactttaacgagactgccggtgacaaaccggaggaaggtggggatgacgtcaagtcctcatggcccttatgggtagggcttcacacgtcatacaatggtcggtacagagggttgccaagccgcgaggtggagccaatcccagaaagccgatcgtagtccggattgcaggctgcaactcgcctgcatgaagtcggaatcgctagtaatcgcggatcagcatgtcgcggtgaatacgttcccgggtcttgtacacaccgcccgtcacaccatgggagcgggttccgccagaagtaggtagcctaaccgcaaggggggcgcttaccacggcggggttcgtgactggggtg

SEQ ID NO: 1205 - DNA, 1488 bp, Deferribacter autotrophicus
aacgaacgctggcggcgtgcctaacacatgcaagtcagggggaaagctagcttcggctggcgagtacaccggcggacgggtgagtaacgcgtgaggaacctaccccacagaccgggataacccatcgaaaggtgggctaatactggataagcgcacgcaacgaatgttgtgtgtgaaaaggcaggtcacttttttggtggcttgtgctgtgggatggcctcgcgtcccattagctagttggtgaggtaacggctcaccaaggctacgatgggtagccggcctgagagggtggccggccacactgggactgagacacggcccagactcctacgggaggcagcagtggggaatattgcgcaatgccggaaacggtgacgcagcgacgccgcgtgggtgaggaaggccttcgggtcgtaaagccctttcagtggggaagaaaggcttgggcagtaactggtccgagtttgacggtacccacagaagaagccccggctaactccgtgccagcagccgcggtaatacggagggggcgagcgttgttcggagtcactgggcgtaaagcgcgcgtaggcggcgtggtaagtcaagggtcaaaggctacggctcaaccgtagtaaggcctttgatactatcatgctagagtgccggagagggtagcggaattcccggtgtagcggtgaaatgcgtagatatcgggaggaacaccggttgcgaaggcggctacctggccggtaactgacgctgaggtgcgagagcgtggggagcaaacaggattagataccctggtagtccacgctgtaaacgatgggcgctaggtgttggtggttagtagccatcagtgccgaagctaacgcgttaagcgccccgcctggggagtacggccgcaaggctgaaactcaaaggaattgacgggggcccgcacaagcggtggagcacgtggtttaattcgatgctaaccgaagaaccttacctgggcttgacatccccggaacctggcagagatgctggggtgcccgtttttggcgggagccgggagacaggtgctgcatggctgtcgtcagctcgtgccgtgaggtgttgggttaagtcccgcaacgagcgcaacccctacccttagttgccatggtttggccgggcactctaaggggactgccccggataacggggaggaaggtggggatgacgtcaagtcatcatggcccttatgtccagggctacacacgtgctacaatggcgcgtacagaggggagcgaagccgcgaggtggagcgaatctcagaaagcgcgcctcagttcggatcgcagtctgcaactcgactgcgtgaagccggaatcgctagtaatcgcaggtcagcaaaactgcggtgaatacgttcccgggccttgtacacaccgcccgtcacaccacgggagttggtcatacctgaagccggtggcccaaccgcgcgagcggggggagccgtccatggtatggctggcgactggggtg

SEQ ID NO: 1206 - DNA, 1483 bp, Deferribacter desulfuricans
gacgaacgctggcggcgtgcctaacacatgcaagtcagggggaaagctggcttcggtcagtgagtacaccggcggacgggtgagtaacgcgtgagcaacctaccccgcagaccgggataacccatcgaaaggtgggctaatactggatgagcgcacgtgctgcatggcatgtgtgaaaaggcaggctttaagcttgcgctgcgggatgggctcgcgtcccattagctagttggtgaggtaacggctcaccaaggctacgatgggtagccggcctgagagggtggtcggccacattgggactgagacacggcccagactcctacgggaggcagcagtggggaatattgcgcaatgccggaaacggtgacgcagcgacgccgcgtgggcgaggaaggccttcgggtcgtaaagccctttcagtggggaagaaaggtgcaggcagtaactggtctgtatttgacggtacccacagaagaagccccggctaactccgtgccagcagccgcggtaatacggagggggcgagcgttgttcggagtcactgggcgtaaagcgcacgtaggcggtgcggtaagtctggggtcaaaggctacggctcaaccgtagtaaggcctcagatactatcgtgctagagtgccggagagggtagcggaattccctgtgtagcggtgaaatgcgtagatatagggaggaacaccggttgcgaaggcggctacctggccggtaactgacgctgaggtgcgagagcgtggggagcaaacaggattagataccctggtagtccacgctgtaaacgatgggcgctaggtgttggtggttagtagccatcagtgccgaagctaacgcgttaagcgccccgcctggggagtacggccgcaaggctgaaactcaaaggaattgacgggggcccgcacaagcggtggagcacgtggtttaattcgatgctaaccgaagaaccttacctgggcttgacatccccgggacctgccagagatggtggggtgcctggttttaccaggagccgggagacaggtgctgcatggctgtcgtcagctcgtgccgtgaggtgttgggttaagtcccgcaacgagcgcaacccctacccttagttgccatcggttaggccgggcactctaaggggactgccccggataacggggaggaaggtggggatgacgtcaagtcatcatggcccttatgtccagggctacacacgtgctacaatggggcgtacagagggcagcgaagccgcgaggctgagcgaatctcagaaagcgctcctcagttcggatcgcagtctgcaactcgactgcgtgaagccggaatcgctagtaatcgcaggtcagcaaaactgcggtgaatacgttcccgggccttgtacacaccgcccgtcacaccacgggagttggctatacctgaagccggtggcccaacccaggcaactgggggggagccgtccatggtatggctggcgactggggtg

SEQ ID NO: 1207 - DNA, 1424 bp, Deinococcus actinosclerus
ggtgaacgctggcggcgtgcttaagacatgcaagtcgaacggtcccttcggggatagtggcgcacgggtgagtaacgcgtaactgacctaccccaaagtcgcggataacgattcgaaagaatcgctaatacgtgatgtgctgtcagattgtgttctgccagtaaagatttattgctttgggatggggttgcgttccatcagctagttggtggggtaaaggcctaccaaggcgacgacggatagccggcctgagagggtggccggccacaggggcactgagacacgggtcccactcctacgggaggcagcagttaggaatcttccacaatgggcgaaagcctgatggagcgacgccgcgtgagggatgaaggtcttcggattgtaaacctctgaatcagggacgaaagacgcgtaagcgggatgacggtacctgagtaatagcaccggctaactccgtgccagcagccgcggtaatacggagggtgcaagcgttacccggaatcactgggcgtaaagggcgtgtaggcggacacttaagtctggttttaaagactgcggctcaaccgcagggatggactggatactgggtgtcttgacctctggagagagaactggaattcctggtgtagcggtggaatgcgtagataccaggaggaacaccaatggcgaaggcaggttcttggacagaaggtgacgctgaggcgcgaaagtgtggggagcgaaccggattagatacccgggtagtccacaccctaaacgatgtacgttggctaaccgcaggatgctgtggttggcgaagctaacgcgataaacgtaccgcctgggaagtacggccgcaaggttgaaactcaaaggaattgacgggggcccgcacaagcggtggagcatgtggtttaattcgaagcaacgcgaagaaccttaccaggtcttgacatgctaggaactcctgagagatcaggaggtgcccttcggggaacctagacacaggtgctgcatggctgtcgtcagctcgtgtcgtgagatgttgggttaagtcccgcaacgagcgcaacccttacctttagttgccagcattgagttgggcactctagagggactgcctatgaaagtaggaggaaggcggggatgacgtctagtcagcatggtccttacgacctgggctacacacgtgctacaatggatgggacaacgcgcagccaacttgcgaaagtgagcgaatcgctgaaacccatccccagttcagatcggagtctgcaactcgactccgtgaagttggaatcgctagtaatcgcaggtcagcatactgcggtgaatacgttcccgggccttgtacacaccgcccgtcacaccatgggagtaaattgcagctgaaaccgccgggagcctcacggcaggcgtctaggctgtggttcatgactggggtg

SEQ ID NO: 1208 - DNA, 1366 bp, Deinococcus cellulosilyticus
tgcaagtcgaacgggggacttcggtccttacgtggcgcacgggtgagtaacgcgtgaatgacgtaccttctggtcgaggataacggtccgaaaggatcgctaatacttgatgtgatgccctctcttgtgaggtcattaaaggtttactgccagaagatcggttcgcgtcccatcagctagttggtagggtaaaggcctaccaaggcaacgacgggtagccggcctgagagggtggccggccacaggggcactgagacacgggccccactcctacgggaggcagcagttaggaatcttccacaatgggcgaaagcctgatggagcgacgccgcttgagggatgacggttttcggattgtaaacctctgaacgagtgacgaaagataaccaaaatgacggtagctcggtaatagcaccggctaactccgtgccagcagccgcggtaatacggagggtgcaagcgttacccggaatcactgggcgtaaagggcgtgtaggcgggatgttaagtctgactttaaagactgtggctcaaccacaggagtgggctggatactggcattctagacaactggagaggcgattggaattactggtgtagcggtggaatgcgtagataccagtaggaacgtcaatggcgaaggcaggtcgctggacagtttgtgacgctgaggcgcgaaagtgtggggagcaaaccggattagatacccgggtagtccacaccctaaacgatgcatgtttgatgatcgtgggatgccatgattgtcgaagccaacgcgataaacatgccgcctgggaagtacggccgcaaggttgaaactcaaaggaattgacgggggcccgcacaagcggtggagtatgtggtttaattcgaagctacgcgaagaaccttaccaggtcttgacatgcacggaaccttccagaaaagggagggtgcccttcggggagccgtgacacaggtgctgcatggctgtcgtcagctcgtgtcgtgagatgttgggttaagtcccgcaacgagcgcaacccttgtctttagttgccagccttaagtggggcactctagagagactgcctgtgaaagcaggaggaaggcggggatgacgtctagtcagcatggtccttacgatctgggctacacacgtactacaatggggaatacagcgcgcagcaagctggtgacagtgagcgaatcgcttaaagtttccctcagttcagattgcagtctgcaactcgactgcatgaagttggaatcgctagtaatcgcgggtcagcataccgcggtgaatacgttcccgggccttgtacacaccgcccgtcacaccatgggagtggaatgcagctgaaattgccgggagctgaaaggcagg

SEQ ID NO: 1209 - DNA, 1428 bp, Deinococcus deserti
ggtgaacgctggcggcgtgcttaagacatgcaagtcgaacgggggaagcttgcttccccagtggcgcacgggtgagtaacgcgtaactgacctaccccaaagtcgcggataacgtctcgaaagaggcgctaatacgtgatgtgcagtcagatcatgttctgcctgtaaagatttattgctttgggatggggttgcgttccatcagctagttggtggggtaaaggcctaccaaggcgacgacggatagccggcctgagagggtggccggccacaggggcactgagacacgggtcccactcctacgggaggcagcagttaggaatcttccacaatgggcgaaagcctgatggagcgacgccgcgtgagggatgaaggttttcggatcgtaaacctctgaatcagggacgaaagacacttcggtgggatgacggtacctgagtaatagcaccggctaactccgtgccagcagccgcggtaatacggagggtgcaagcgttacccggaatcactgggcgtaaagggcgtgtaggcgggatgttaagtctggttttaaagactgcggctcaaccgcagggatggactggatactggcattcttgacctctggagaggaaaccggaattcctggtgtagcggtggaatgcgtagataccaggaggaacaccaatggcgaaggcaggtttctggacagaaggtgacgctgaggcgcgaaagtgtggggagcgaaccggattagatacccgggtagtccacaccctaaacgatgtacgttggctaagcgcaggatgctgtgcttggcgaagctaacgcgataaacgtaccgcctgggaagtacggccgcaaggttgaaactcaaaggaattgacgggggcccgcacaagcggtggagcatgtggtttaattcgaagcaacgcgaagaaccttaccaggtcttgacatccatggaaccgttgagagatcagcgggtgcccttcggggagccatgagacaggtgctgcatggctgtcgtcagctcgtgtcgtgagatgttgggttaagtcccgcaacgagcgcaacccctaccttcagttgccagcattcagttgggcactctggagggactgcctatgaaagtaggaggaaggcggggatgacgtctagtcagcatggtccttacgacctgggctacacacgtgctacaatggatggtacaacgcgcagccagcccgcgagggtgagcgaatcgctgaaagccatccccagttcagatcggagtctgcaactcgactccgtgaagttggaatcgctagtaatcgtgggtcagcataccgcggtgaatacgttcccgggccttgtacacaccgcccgtcacaccatgggagtacgttgcagttgaaaccgccgggagccgtaaggcaggcgtctagactgtggcgcatgactggggtg

SEQ ID NO: 1210 - DNA, 1428 bp, Deinococcus gobiensis
ggtgaacgctggcggcgtgcttaagacatgcaagtcggacgatcggcttcggccggtagtggcgcacgggtgagtaacgcgtaactgacctgcccccaagtcgcggataacgtctcgaaagagacgctaatacgtgatgtgcagtaccgctgtggcggtactgtaaagactggatcgcttggggatggggttgcgtttcatcagctagttggtggggtaaaggcctaccaaggcgacgacgaatagccggcctgagagggtggccggccacaggggcactgagacacgggccccactcctacgggaggcagcagttaggaatcttccacaatgggcgaaagcctgatggagcgacgccgcgtgagggaagaaggttttcggatcgtaaacctctgaatctgggacgaaagacgcgacgagcgggatgacggtaccagagtaatagcaccggctaactccgtgccagcagccgcggtaatacggagggtgcaagcgttacccggaatcactgggcgtaaagggcgtgtaggcgggaacttaagtctggttttaaagaccggggctcaacctcggggatggactggatactgggtttcttgatctctggagaggtaaccggaattcctggtgtagcggtggaatgcgtagataccaggaggaacaccaatggcgaaggcaggttactggacagaagatgacgctgaggcgcgaaagtgtggggagcgaaccggattagatacccgggtagtccacaccctaaacgatgcacgttggcttaacgcaggatgctgtgttgggcgaagctaacgcgataaacgtgccgcctgggaagtacggccgcaaggttgaaactcaaaggaattgacgggggcccgcacaagcggtggagcatgtggtttaattcgaagcaacgcgaagaaccttaccaggtcttgacatgcacagaacttctgagagatcagagggtgcccttcggggaactgtgacacaggtgctgcatggctgtcgtcagctcgtgtcgtgagatgttgggttaagtcccgcaacgagcgcaacccctacctttagttgccagcattcggttgggcactctagagggactgcctatgaaagtaggaggaaggcggggatgacgtctagtcagcatggtccttacgacctgggcgacacacgtgctacaatggtcggtacaacgcgcagcaaactcgtgagagtaagcgaatcgctgaaagccggcctcagttcagatcggagtctgcaactcgactccgtgaagttggaatcgctagtaatcgtgggtcagcataccgcggtgaatacgttcccgggccttgtacacaccgcccgtcacaccatgggagtagattgcagttgaaaccgccgggagcctcacggcaggcgtctagactgtggtttatgactggggtg

SEQ ID NO: 1211 - DNA, 1425 bp, Deinococcus grandis
ggtgaacgctggcggcgtgcttaagacatgcaagtcgaacgggctcttcggagccagtggcgcacgggtgagtaacgcgtaactgacctaccccaaagtcgcggataacgattcgaaagaatcgctaatacgtgatgtgctgtcagatcctgttctgccagtaaagatttattgctttgggatggggttgcgttccatcagctagttggtggggtaaaggcccaccaaggcgacgacggatcgccggcctgagagggtggccggccacaggggcactgagacacgggtcccactcctacgggaggcagcagttaggaatcttccacaatgggcgaaagcctgatggagcgacgccgcgtgagggatgaaggtcttcggatcgtaaacctctgaatcagggacgaaagacactttatgtgggatgacggtacctgagtaatagcaccggctaactccgtgccagcagccgcggtaatacggagggtgcaagcgttacccggaatcactgggcgtaaagggcgtgtaggcggacacttaagtctggttttaaagactgcggctcaaccgcagggatggactggatactgggtgtcttgacctctggagagagaactggaattcctggtgtagcggtggaatgcgtagataccaggaggaacaccaatggcgaaggcaggttcttggacagaaggtgacgctgaggcgcgaaagtgtggggagcgaaccggattagatacccgggtagtccacaccctaaacgatgtacgttggctaaccgcaggatgctgtggttggcgaagctaacgcgataaacgtaccgcctgggaagtacggccgcaaggttgaaactcaaaggaattgacgggggcccgcacaagcggtggagcatgtggtttaattcgaagcaacgcgaagaaccttaccaggtcttgacatgcatggaactcctgagagatcaggaggtgcccttcggggagccatgacacaggtgctgcatggctgtcgtcagctcgtgtcgtgagatgttgggttaagtcccgcaacgagcgcaacccttacctttagttgccagcattgagttgggcactctagagggactgcctatgaaagtaggaggaaggcggggatgacgtctagtcagcatggtccttacgacctgggctacacacgtgctacaatggatgggacaacgcgcagccaacttgcgaaagtgagcgaatcgctgaaacccatccccagttcagatcggagtctgcaactcgactccgtgaagttggaatcgctagtaatcgcaggtcagcatactgcggtgaatacgttcccgggccttgtacacaccgcccgtcacaccatgggagtaaattgcagctgaaaccgccgggagcctcacggcaggcgtctaggctgtggttcatgactggggtg

SEQ ID NO: 1212 - DNA, 1426 bp, Deinococcus indicus
ggtgaacgctggcggcgtgcttaagacatgcaagtcgaacgcagtcttcggaccgtagtggcgcacgggtgagtaacacgtaactgacctacccagaagtcacgaataacggtccgaaagaaccgctaatacgtgatgtgctgctccctcgtggtgcatcactaaaggttgatcgcttcgggatggggttgcgttccatcagctagttggtggggtaaaggcctaccaaggcgacgacggatagccggcctgagagggtggccggccacaggggcactgagacacgggtcccactcctacgggaggcagcagttaggaatcttccacaatgggcgaaagcctgatggagcgacgccgcgtgagggatgaaggttttcggatcgtaaacctctgaatcagggacgaaagacgccttatgggagatgacggtaccagagtaatagcaccggctaactccgtgccagcagccgcggtaatacggagggtgcaagcgttacccggaatcactgggcgtaaagggcgtgtaggccgaatggtaagtctggttttaaagactggggctcaacctcggggatggactggatactggcattcttgacctctggagagataactggaattcctggtgtagcggtggaatgcgtagataccaggaggaacaccaatggcgaaggcaggttcttggacagaaggtgacgctgaggcgcgaaagtgtggggagcaaaccggattagatacccgggtagtccacaccctaaacgatgtacgttggctaatcgcaggatgctgtgattggcgaagctaacgcgataaacgtaccgcctgggaagtacggccgcaaggttgaaactcaaaggaattgacgggggcccgcacaagcggtggagcatgtggtttaattcgaagcaacgcgaagaaccttaccaggtcttgacatgctaggaacttttcagagatgagagggtgcccttcggggaacctagacacaggggctgcatggctgtcgtcagctcgtgtcgtgagatgttgggttaagtcccgcaacgagcgcaacccttgcctttagttgccagcattgagttgggcactctagagggactgcctatgaaagtaggaggaaggcggggatgacgtctagtcagcatggtccttacgtcctgggctacacacgtgctacaatgggcaggacaacgcgcagccaacttgcgagagtgagcgaatcgctaaaacctgtccccagttcagatcggagtctgcaactcgactccgtgaagttggaatcgctagtaatcgcgggtcagcataccgcggtgaatacgttcccgggccttgtacacaccgcccgtcacaccatgggagtaaattgcagttgaaaccgccgggagcttcacggcaggcgtctaggctgtggttcatgactggggtg

SEQ ID NO: 1213 - DNA, 1423 bp, Deinococcus maricopensis
ggtgaacgctggcggcgtgcttaagacatgcaagtcgaacgcagaccttcgggtctgagtggcgcacgggtgagtaacgcgtaactgacgtacctcaaagtctcggataactggccgaaaggtcagctaagacgggatgtgcagtcatcttgtgtgatgcctgtaaagatttatcgctttgagatcgggttgcgtcccatcagctagatggtgaggtaaaggctcaccatggcgacgacgggtagccggcctgagagggtggccggccacaggggcactgagacacgggccccactcctacgggaggcagcagttaggaatcttccacaatgggcgaaagcctgatggagcgacgccgcgtgagggatgaaggttttcggatcgtaaacctctgaactagggacgaaagataaccaaaatgacggtacctaggtaatagcaccggctaactccgtgccagcagccgcggtaatacggagggtgcaagcgttacccggaatcactgggcgtaaagggcgtgtaggcgggaacttaagtctggctttaaagacaggggctcaacccctggagtgggctggatactgggtttctagacgggtggagaggtcaccggaattcttggtgtagcggtggaatgcgtagataccaagaggaacaccaatggcgaaggcaggtgactggacacttagtgacgctgaggcgcgaaagtgtggggagcgaaccggattagatacccgggtagtccacaccctaaacgatgtacgttggataaccgcaggatgctgtggtcgtcgaagctaacgcgataaacgtaccgcctgggaagtacggccgcaaggttgaaactcaaaggaattgacgggggcccgcacaagcggtggagcatgtggtttaattcgaagcaacgcgaagaaccttaccaggtcttgacatgcacggaactcggcgtaacggctgaggtgcccttcggggaaccgtgacacaggtgctgcatggctgtcgtcagctcgtgtcgtgagatgttgggttaagtcccgcaacgagcgcaacccttaccttcagttgctaacagttcggctgagaactctggagggactgcccatgaaagtgggaggaaggcggggatgacgtctagtcagcatggtccttacgtcctgggctacacacgtgctacaatggtcggtacaacgcgcagcaacgccgcgaggcgaagcgaatcgctgaaagccgaccccagttcagattgcagtctgcaactcgactgcatgaagttggaatcgctagtaatcgcgggtcagcataccgcggtgaatacgttcccgggccttgtacacaccgcccgtcacaccatgggagttgattgcagctaaaatcgccgggagccgcaaggcaggcgcctaggttgtggtcgatgactggggtg

SEQ ID NO: 1214 - DNA, 1432 bp, Deinococcus peraridilitoris
ggtgaacgctggcggcgtgcttaagacatgcaagtcgaacggcagggcttcggtcctgtagtggcgcacgggtgagtaacgcataactgacgtacccagaagacctgaataactccccgaaagggaagctaatacgggatgtgcagcactgctgtggtggtgttgtaaagatttattgcttttggatcgggttatgtcgcatcagctagttggtggggtaaaggcctaccaaggcgacgacgcgtagccggcctgagagggtggccggccacaggggcactgagacacgggccccactcctacgggaggcagcagttaggaatcttctgcaatgggcgaaagcctgacagagcgacgccgcttgagggaagaaggtcttcggattgtaaacctctgaaacagggacgaaaggcagcctcgagctgagatgacggtacctgtgtaatagcaccggctaactccgtgccagcagccgcggtaatacggagggtgcgagcgttacccggaatcactgggcgtaaagggcgtgtaggcggcttttcaagtctgactttaaagaccgaagctcaacttcgggagtgggttggagactgtgaggctagacggatggagaggcaactggaattcctggtgtagcggtggaatgcgtagataccaggaggaacaccaatggcgaaggcaggttgctggacattttgtgacgctgaggcgcgaaagtgtggggagcgaaccggattagatacccgggtagtccacaccctaaacgatgcacgttggattatggcgggatgccgtcatggtcgaagccaacgcgataaacgtgccgcctgggaagtacggccgcaaggttgaaactcaaaggaattgacgggggcccgcacaagcggtggagcatgtggtttaattcgaagcaacgcgaagaaccttaccaggtcttgacatgcacggaaccttgcagagatgcgagggtgcccttcggggaaccgtgacacaggtgctgcatggctgtcgtcagctcgtgtcgtgagatgttgggttaagtcccgcaacgagcgcaacccttgcctttagttgccagcagttcggctgggcactctagagggactgcctgtgaaagcaggaggaaggcggggatgacgtctagtcagcatggtccttacgtcctgggctacacacgtgctacaatggtcggtacaacgcgctgcaagctcgcgagagcaagcgaatcgctgaaagccggcctcagttcagattgcagtctgcaactcgactgcatgaagttggaatcgctagtaatcgcgggtcagcacaccgcggtgaatacgttcccgggccttgtacacaccgcccgtcacaccatgggagtagtttgcagctgaagtcgccgggagcctcacggcaggcgcctaggttgtgagccatgactggggtg

SEQ ID NO: 1215 - DNA, 1424 bp, Deinococcus proteolyticus
ggtgaacgctggcggcgtgcttaagacatgcaagtcgaacggggtcttcggacccagtggcgcacgggtgagtaacacgtgactgacctaccccgaagttctgaataacctggcgaaagtcgggctaatacaggatgcgcagtatcgctgtggcgatactgcaaagatttatcgcttcgggatggggttgcgttccatcagctagttggtagggtaaaggcctaccaaggcgacgacggatagccggcctgagagggtggccggccacaggggcactgagacacgggccccactcctacgggaggcagcagttaggaatcttccacaatgggcgaaagcctgatggagcgacgccgcgtgagggatgacggtcttcggattgtaaacctctgaactagggacgaaagacgcgtaagcgggatgacggtacctaggtaatagcaccggctaactccgtgccagcagccgcggtaatacggagggtgcgagcgttacccggaatcactgggcgtaaagggcgtgtaggcggcttgttaagtctggttttaaaggctgaggctcaacctcagaaatggactggatactggcaagcttgacctctggagaggtaactggaatttctggtgtagcggtggaatgcgtagataccagaaggaacaccaatggcgaaggcaagttactggacagaaggtgacgctgaggcgcgaaagtgtggggagcgaaccggattagatacccgggtagtccacaccctaaacgatgtacgttggtctagcgcaggatgctgtgttggacgaagctaacgcgataaacgtaccgcctgggaagtacggccgcaaggttgaaactcaaaggaattgacgggggcccgcacaagcggtggagcatgtggtttaattcgaagcaacgcgaagaaccttaccagaccttgacatgcacggaacgcgctggaagcagcgcggtgcccttcggggaaccgtgacacaggtgctgcatggctgtcgtcagctcgtgtcgtgagatgttgggttaagtcccgcaacgagcgcaacccttgcctttagttgccagcatttggttgggcactctagagggactgcctgtgaaagcaggaggaaggcggggatgacgtctagtcagcatggtccttacggtctgggctacacacgtgctacaatggccggtacaacgcgcagcgaacttgtgagagtaagcgaatcgctaaaagccggcctcagttcagattggagtctgcaactcgactccatgaagttggaatcgctagtaatcgtgggtcagcataccgcggtgaatacgttcccgggccttgtacacaccgcccgtcacaccatgggagtagattgcagctgaaaccgctgggagccgcaaggcaggcgtctaggctgtggtttatgactggggtg

SEQ ID NO: 1216 - DNA, 1428 bp, Deinococcus radiophilus
ggtgaacgctggcggcgtgcttaagacatgcaagtcgaacggcccagcttgctgggcagtggcgcacgggtgagtaacacgtgactgacctaccccgaagttctgaataacctggcgaaagtcgggctaatacaggatgtgcagtatcgctgtggcgatactgcaaaggtttaccgctttgggatggggttgcgttccatcagctagatggtggggtaaaggcctaccatggcgacgacggatagccggcctgagagggtggccggccacaggggcactgagacacgggtcccactcctacgggaggcagcagttaggaatcttccacaatgggcgaaagcctgatggagcgacgccgcgtgagggatgacggttttcggattgtaaacctctgaatcagggacgaaagggcctttatggcagatgacggtacctgagtaatagcaccggctaactccgtgccagcagccgcggtaatacggagggtgcgagcgttacccggaatcactgggcgtaaagggcgtgtacgcgggatgttaagtccggtcttaaagaccgcagctcaactgcgggagtggactggatactggcactctggacctctggagaggtagctggaatttctggtgtagcggtggaatgcgtagataccagaaggaacaccaatggcgaaggcaggttactggacagaaggtgacgctgaggcgcgaaagtgtggggagcgaaccggattagatacccgggtagtccacaccctaaacgatgtacgttggcagatcgcaggatgctgtgatttgcgaagctaacgcgataaacgtaccgcctgggaagtacggccgcaaggttgaaactcaaaggaattgacgggggcccgcacaagcggtggagcatgtggtttaattcgaagcaacgcgaagaaccttaccagaccttgacatccacagaacgccgcggaagcgcggcggtgcccttcggggaactgtgagacaggtgctgcatggctgtcgtcagctcgtgtcgtgagatgttgggttaagtcccgcaacgagcgcaacccttgcctttagttgccagcatttaagttgggcactctagagggactgcctgtgaaagcaggaggaaggcggggatgacgtctagtcagcatggtccttacggtctgggctacacacgtgctacaatggccagtacaacgcgcagcaaacttgcgagagtgagcgaatcgctaaaagctggcctcagttcagattggagtctgcaactcgactccatgaagttggaatcgctagtaatcgtgggtcagcataccgcggtgaatacgttcccgggccttgtacacaccgcccgtcacaccatgggagtagattgcagctgaaaccgctgggagccgcaaggcaggcgtctaggctgtggtttatgactggggtg

SEQ ID NO: 1217 - DNA, 1426 bp, Deinococcus soli
ggtgaacgctggcggcgtgcttaagacatgcaagtcgaacggcagtcttcggactgtagtggcgcacgggtgagtaacgcgtaactgacctaccccaaagtcgcggataacgattcgaaagaatcgctaatacgtgatgtgctgtcagattgtgttctgccagtaaagattgattgctttgggatggggttgcgttccatcagctagttggtggggtaaaggcccaccaaggcgacgacggatagccggcctgagagggtggccggccacaggggcactgagacacgggtcccactcctacgggaggcagcagttaggaatcttccacaatgggcgaaagcctgatggagcgacgccgcgtgagggatgaaggtcttcggatcgtaaacctctgaatcagggacgaaagacacttcggtgggatgacggtacctgagtaatagcaccggctaactccgtgccagcagccgcggtaatacggagggtgcaagcgttacccggaatcactgggcgtaaagggcgtgtaggcggacacttaagtctggttttaaagactgcggctcaaccgcagggatggactggatactgggtgtcttgacctctggagagagaactggaattcctggtgtagcggtggaatgcgtagataccaggaggaacaccaatggcgaaggcaggttcttggacagaaggtgacgctgaggcgcgaaagtgtggggagcgaaccggattagatacccgggtagtccacaccctaaacgatgtacgttggctaaccgcaggatgctgtggttggcgaagctaacgcgataaacgtaccgcctgggaagtacggccgcaaggttgaaactcaaaggaattgacgggggcccgcacaagcggtggagcatgtggtttaattcgaagcaacgcgaagaaccttaccaggtcttgacatgctaggaactcctgagagatcaggaggtgcccttcggggaacctagacacaggtgctgcatggctgtcgtcagctcgtgtcgtgagatgttgggttaagtcccgcaacgagcgcaacccttacctttagttgccagcattgagttgggcactctagagggactgcctatgaaagtaggaggaaggcggggatgacgtctagtcagcatggtccttacgacctgggctacacacgtgctacaatggatgggacaacgcgcagccaacttgcgaaagtgagcgaatcgctgaaacccatccccagttcagatcggagtctgcaactcgactccgtgaagttggaatcgctagtaatcgcaggtcagcatactgcggtgaatacgttcccgggccttgtacacaccgcccgtcacaccatgggagtaaattgcagctgaaaccgccgggagcctcacggcaggcgtctaggctgtggttcatgactggggtg

SEQ ID NO: 1218 - DNA, 1424 bp, Deinococcus yavapaiensis
ggcggcgtgcttaagacatgcaagtcgaacgatcagtttgcggactggtagtggcgcacgggtgagtaacgtataactgacgtacccgaaactcgaggataacgctccgaaaggaacgctaatactcgatgtgcagtcgcaccatggtgtgcctgtaaagcctgcgagtggtttcggatcgggttatatcgcatcagctagttggtgaggtaaaggctcaccaaggcaacgacgcgtagccggcctgagagggtggccggccacaggggcactgagacacgggccccactcctacgggaggcagcagttaggaatcttccccaatggacgaaagtctgagggagcgacgccgcttgagggacgaaggtcttcggattgtaaacctctgaatcagggatgaaagacaccgacaaggtgggatgacggtacctgagtaatagcaccggctaactccgtgccagcagccgcggtaatacggagggtgcaagcgttacccggaatcactgggcgtaaagggcgtgtaggcggaaacataagtctgacttcaaaggcagcggctcaaccgctgtaaggggttggatactgtgcttctagacctctggagaggcaactggaattcttggtgtagcggtggaatgcgtagataccaagaggaacaccaatggcgaaggcaggttgctggacagaaggtgacgctgaggcgcgaaagtgtggggagcgaaccggattagatacccgggtagtccacaccctaaacgatgcacgttggatcatggcgggatgccgtcatggtcgaagccaacgcgataaacgtgccgcctgggaagtacggccgcaaggttgaaactcaaaggaattgacgggggcccgcacaagcggtggagcatgtggtttaattcgaagcaacgcgaagaaccttaccaggttttgacatgcccggaaccctgctgaaaggcaggggtgcccttcggggagccgggacacaggtgctgcatggctgtcgtcagctcgtgtcgtgagatgttgggttaagtcccgcaacgagcgcaacccttatcgtgtgttaccagcggctcggccggggactcacgcgagactgcccatgaaagtgggaggaaggcggggatgacgtctagtcagcatggtccttacgacctgggcgacacacgtgctacaatggccggtacaacgcgcagcaacaccgcgaggtgaagcgaatcgctaaaagccggtctcagttcagattgcagtctgcaactcgactgcatgaagttggaatcgctagtaatcgcgggtcagcacaccgcggtgaatacgttcccgggccttgtacacaccgcccgtcacaccatgggagttgtttgcagctgaagccgccgggagccgaaaggcaggcgtctaggctgtgagcgatgactggggtg

SEQ ID NO: 1219 - DNA, 1455 bp, Delftia acidovorans
attgaacgctggcggcatgccttacacatgcaagtcgaacggtaacaggtcttcggacgctgacgagtggcgaacgggtgagtaatacatcggaacgtgcccagtcgtgggggataactactcgaaagagtagctaataccgcatacgatctgaggatgaaagcgggggaccttcgggcctcgcgcgattggagcggccgatggcagattaggtagttggtgggataaaagcttaccaagccgacgatctgtagctggtctgagaggacgaccagccacactgggactgagacacggcccagactcctacgggaggcagcagtggggaattttggacaatgggcgaaagcctgatccagcaatgccgcgtgcaggatgaaggccttcgggttgtaaactgcttttgtacggaacgaaaaagcttctcctaatacgagaggcccatgacggtaccgtaagaataagcaccggctaactacgtgccagcagccgcggtaatacgtagggtgcgagcgttaatcggaattactgggcgtaaagcgtgcgcaggcggttatgtaagacagatgtgaaatccccgggctcaacctgggaactgcatttgtgactgcatggctagagtacggtagagggggatggaattccgcgtgtagcagtgaaatgcgtagatatgcggaggaacaccgatggcgaaggcaatcccctggacctgtactgacgctcatgcacgaaagcgtggggagcaaacaggattagataccctggtagtccacgccctaaacgatgtcaactggttgttgggaattagttttctcagtaacgaagctaacgcgtgaagttgaccgcctggggagtacggccgcaaggttgaaactcaaaggaattgacggggacccgcacaagcggtggatgatgtggtttaattcgatgcaacgcgaaaaaccttacccacctttgacatggcaggaagtttccagagatggattcgtgctcgaaagagaacctgcacacaggtgctgcatggctgtcgtcagctcgtgtcgtgagatgttgggttaagtcccgcaacgagcgcaacccttgtcattagttgctacatttagttgggcactctaatgagactgccggtgacaaaccggaggaaggtggggatgacgtcaagtcctcatggcccttataggtggggctacacacgtcatacaatggctggtacagagggttgccaacccgcgagggggagctaatcccataaaaccagtcgtagtccggatcgcagtctgcaactcgactgcgtgaagtcggaatcgctagtaatcgcggatcagcatgccgcggtgaatacgttcccgggtcttgtacacaccgcccgtcacaccatgggagcgggtctcgccagaagtaggtagcctaaccgcaaggagggcgcttaccacggcggggttcgtgactggggtg

SEQ ID NO: 1220 - DNA, 1455 bp, Delftia lacustris; identical to SEQ ID NO: 193

SEQ ID NO: 1221 - DNA, 1413 bp, Dendrosporobacter quercicolus
agtggcgaacgggtgagtaacgcgtagacaacctgccttccagatggggacaacaccgcgaaagtggtgctaataccgaataaagtattttgagcgcatgcttgaaatagcaaaggtggcctctgaagatgctaccgctggaagatgggtctgcgtctgattagctagttggtggggtaaaggcctaccaaggcgatgatcagtagccggtctgagaggatgaacggccacactgggactgagacacggcccagactcctacgggaggcagcagtggggaatcttccgcaatggacgaaagtctgacggagcaacgccgcgtgagtgaagaaggttttcggatcgtaaagctctgtcttcaagggagaacgtgccttatgtaaataatgtaaggcaatgacggtacttgaggaggaagccacggctaactacgtgccagcagccgcggtaatacgtaggtggcgagcgttgtccggaattattgggcgtaaagggcgcgtaggcgggaatataagtctgtcttaaaagtgcggggctcaaccccgtgaggggatggaaactatatttcttgagtgcaggagaggaaagtggaattcccagtgtagcggtgaaatgcgtagatattgggaggaacaccagtggcgaaggcgactttctggactgtaactgacgctgaggcgcgaaagccagggtagtgaacgggattagataccccggtaatcctggccgtaaacgatgggtactaggtgtaggaggtatcgacccctcctgtgccggagttaacgcaataagtaccccgcctggggagtacggccgcaaggttgaaactcaaaggaattgacgggggcccgcacaagcggtggagtatgtggtttaattcgacgcaacgcgaagaaccttaccaggacttgacattgagtgaaaggtctagagatagacgcctctcttcggagacacaaaaacaggtggtgcatggctgtcgtcagctcgtgtcgtgagatgttgggttaagtcccgcaacgagcgcaacccttatcctatgttgccagcgagtagagtcgggaactcatgggagactgccgcagacaatgcggaggaaggcggggatgacgtcaagtcatcatgccccttatgtcctgggctacacacgtactacaatgggcttaaatagagggaagcgaagccgcgaggtgaagcgaaccccgaaaacaagctctcagttcggattgcaggctgcaactcgcctgcatgaagtcggaatcgctagtaatcgcagatcagcatgctgcggtgaatacgttcccgggccttgtacacaccgcccgtcacaccacgaaagttggaaacacccgaaaccggcgacttaacctgaaaaggagagaaccgtctaaggtggggccgatgattggggtg

SEQ ID NO: 1222 - DNA, 1468 bp, Desmospora activa
gctggcggcgtgcctaatacatgcaagtcgagcggaccgatggagagcttgctctcttgaagtcagcggcgaacgggtgagtaacacgtgggcaacctgcccgcaagactgggataactccgggaaaccggggctaataccggatacgatcttccctcgcatgagagaagatggaaaggcggcatcacgctgtcacttgcggatgggcccgcggcgcattagctagttggtgaggtagtggctcaccaaggcgacgatgcgtagccgacctgagagggtgaccggccacactgggactgagacacggcccagactcctacgggaggcagcagtagggaattttcgtcaatgggcgcaagcctgaacgagcaacgccgcgtgagtgaggacggctttcgggttgtaaagctctgttcttcgggaagaacgacagaagggtgaataatccttttgtgtgacggtaccggagaagaaagccccggctaactacgtgccagcagccgcggtaatacgtagggggcaagcgttgtccggaattattgggcgtaaagcgcgcgcaggcggcctgttaagtcggatgtgaaagaccacggctcaaccgtgggggtgcatccgaaactggcgggcttgagtgcaggagaggggagtggaattcccggtgtagcggtggaatgcgtagagatcgggaggaacaccagtggcgaaggcggctctctggcctgtaactgacgctgaggcgcgaaagcgtggggagcaaacaggattagataccctggtagtccacgccgtaaacgatgagtgctaggtgttgggggtttcacgccctctgtgccgaaggtaacccaataagcactccgcctggggagtacggccgcaaggctgaaactcaaaggaattgacgggggcccgcacaagcggtggagcatgtggtttaattcgaagcaacgcgaagaaccttaccagggcttgacatcccgctgaccccttcagagatgaaggttcccttcggggcagcggagacaggtggtgcatggttgtcgtcagctcgtgtcgtgagatgttgggttcagtcccgcaacgagcgcaacccttatcgttagttgccagcacctcgggtgggcactctagcgagacagccggtgaaagccggaggaaggtggggatgaggtcaaatcatcatgccccttatgtcctgggcaacacacgtgctacaatggctggtacaacgggtcgcgaagccgcgaggtggagccaatcccaaaaaaccagtctcagttcggatcgcaggctgcaactcgcctgcgtgaagctggaatcgctagtaatcgcggatcagcatgccgcggtgaatacgttcccgggccttgtacacaccgcccgtcacaccacgagagtttgcaacacccgaagtcggtgagggaacccttttgggacccagccgccgaaggtggggcagatgattggggtg

SEQ ID NO: 1223 - DNA, 1475 bp, Desulfacinum hydrothermale
aatgaacgctggcggcgtgcctaacacatgcaagtcgcacgagaaaggctaggtttcgacttggccgagtaaagtggcgcacgggtgagtaacgcgtgggtgacctaccctcgaatctgggataacttcgcgaaagcggggctaataccggatacgtcccttcggggagaaagccggcctctcgaagaagctggtgttcggggatgggcccgcgtcctatcagctggttggtggggtaatggcccaccaaggcgacgacgggtagctggtctgagaggatgatcagccacactggcactggaacacgggccagactcctacgggaggcagcagtgaggaattttgcgcaatgggagcaatcctgacgcagcaacgccgcgtgggtgaagaaggccttcgggtcgtaaagccctgtcaggagggaagaaactggcggagtcgaacagactctgtcactgacggtacctccagaggaagcaccggctaactccgtgccagcagccgcggtaatacggagggtgcgagcgttattcggaattactgggcgtaaagcgcgtgtaggcggtggggcaagtctggtgtgaaagcccggggctcaaccccggaagtgcattggaaactgcctcacttgagtaccggagaggaagggggaattcccggtgtagcggtgaaatgcgtagatatcgggaggaataccagtggcgaaggcgcccttctggacggttactgacgctgagacgcgaaagcgtggggagcaaacaggattagataccctggtagtccacgccgtaaacgatgggcactaggtgcagcgggtattgacccctgctgtgccgaagctaacgcgttaagtgccccgcctggggactacggccgcaaggctaaaactcaaaggaattgacgggggcccgcacaagcggtggagcatgtggtttaattcgaagcaacgcgaagaaccttacctgggcttgacatcccgggagccccctggaaacaggggggtgcccttcggggaacccggagacaggtgctgcatggctgtcgtcagctcgtgtcgtgagatgttgggttaagtcccgcaacgagcgcaacccctgcctctagttgccatcacttcgggtgggcactctagagggactgccggtgtcaaaccggaggaaggtggggacgacgtcaagtcctcatggcccttatgcccagggctacacacgtgctacaatgggcggtacaaagggcagcgaacctgcgagggggagcgaatcccaaaaagccgtcctcagttcggatcggagtctgcaactcgactccgtgaaggtggaatcgctagtaatcgcggatcagcatgccgcggtgaatacgttcccgggccttgtacacaccgcccgtcacaccacgaaagtcggctgtaccagaagtgcgtgggccaaccccttgtggggaggcagcgtaccaaggtgtggtcggtaattggggtg

SEQ ID NO: 1224 - DNA, 1567 bp, Desulfallas geothermicus
cttaacacatgcaagtcgaacggttctcgaggttcgaggttcgaggttcgaggttcgaagttcgaacctgggtcaaacctaacgggacaatgaaaaaagaccccaaaggaatgcccatatcgaatatcgaatttcgaatctcgaacttcgaggatagtggcggacgggtgagtaacgcgtggataacctgcccattagtccgggataacgccgggaaaccggtgctaataccggatacgttcatccgatcgcctgatcggatgaagaaaggagcaatccgctaatggatgggtccgcgtcccattagctggttggtggggtaacggcccaccaaggcaacgatgggtagccggcctgagagggcgaccggccacactggaactgagacacggtccagactcctacgggaggcagcagtggggaatcttccgcaatgggcgcaagcctgacggagcaacgccgcgtgagcgaagaaggccttcgggttgtaaagctctgtccagggggaagaaggatgacggtacccctggaggaagccccggctaactacgtgccagcagccgcggtaaaacgtagggggcaagcgttgtccggaattactgggcgtaaagggcgtgtaggcggcgaagcaagtcaggagtgaaacccagcggctcaaccgctggctggcttctgaaactgcattgcttgagtgcaggagaggggagtggaattcccagtgtagcggtgaaatgcgtagatattgggaggaacaccagtggcgaaagcggctccctggcctgtaactgacgctgaggcgcgaaagcgtgggtagcacacaggattagataccctggtagtccacgccgtaaacgatgggtgctaggtgttgggggtatcgacccccgcagtgccgcagttaacgcaataagcaccccgcctggggagtacggccgcaaggctgaaactcaaaggaattgacgggggcccgcacaagcggtggagcatgtggtttaattcgacgcaacgcgaagaaccttaccaggtcttgacatcacccgccagccatggaaacatggtctttcccttatgggaacgggtagacaggtggtgcatggttgtcgtcagctcgtgtcgtgagatgttgggttaagtcccgcaacgagcgcaacccctacctttagttgccagcgcgtaacggtgggcactctaaagggactgccgttgacaaaacggaggaaggtggggatgacgtcaaatcatcatgccctttatgatctgggctacacacgtgctacaatggccggtacagacggaggcgaagccgcgaggtggagcaaacccgccaaagccggtcccagttcggattgcaggctgcaactcgcctgcatgaagtcggaatcgctagtaatcgcaggtcagcatactgcggtgaatacgttcccgggccttgtacacaccgcccgtcacaccacgaaagtcgtcaacacccgaagccggtgagctaacctgtctcgagattcgaggttcgaagttggaagttcgaatttgggtcaagtttctgggtcaaaaagactaaaagaatacc

SEQ ID NO: 1225 - DNA, 1479 bp, Desulfarculus baarsii
aacgaacgctggcggcaggcctaacacatgcaagtcgcacgagaacgattcccttcggggagactagtaaagtggcgcacgggtgagtaacgcgtgggtaatctacctgatggtacggaataacgtctcgaaaggggcgctaataccgtataagaccacgacaactgcggttgttgcggtcaaagggggcctctctatagaagctcctgccattggacgagcccgcgtcccattagcttgttggtgaggtaacggctcaccaaggccgcgatgggtagctggtctgagaggatgatcagccacactgggactggaacacggcccagactcctacgggaggcagcagtgaggaatcttgcgcaatgggggaaaccctgacgcagccatgccgcgtgagtgaagaaggccttcgggtcgtaaagctctgtcaggtgggaagaaccctcaagggacgaataatcctttgagctgacggtaccgccaaaggaagcaccggctaactccgtgccagcagccgcggtaatacggagggtgcaagcgttgttcggaattactgggcgtaaagcgtgtgcaggcggccaaataagtcggatgtgaaagccctcggctcaaccgaggaactgcattcgatactgcttggcttgagtcctggagaggagagtggaattcccggtgtagaggtgaaattcgtagatatcgggaggaacatcggtggcgaaggcgactctctggacagtgactgacgctgatacacgaaagcgtggggagcaaacaggattagataccctggtagtccacgctgtaaacggtgtccactaggtgtagcgggtattgacccccgctgtgccgtagctaacgcgttaagtggaccgcctggggagtacggccgcaaggttaaaactcaaaggaattgacgggggcccgcacaagcggtggagcatgtggtttaattcgaagcaacgcgaagaaccttacctgggtttgacatccccggacagcctatgaaagtaggtttttcttcggaaccgggtgacaggtgctgcatggctgtcgtcagctcgtgtcgtgagatgttgggttaagtcccgcaacgagcgcaacccctatcgttagttgccagtatttagttaggcactctagtgatactgccccggttaacggggaggaaggtggggatgacgtcaagtcatcatggcccttatgcccagggctacacacgtgctacaatggtcggtacaaagggctgctaaatcgcgaggttatgccaatcccaaaaagccggcctcagttcggattggagtctgcaactcgactccatgaagttggaatcgctagtaatcccggatcagcatgccggggtgaatacgttcccgggccttgtacacaccgcccgtcacaccacgaaagccagctgtaccagaagtggctgggctaaccttcgggaggcaggtccccaaggtatggttggtaattggggtg

SEQ ID NO: 1226 - DNA, 1483 bp, Desulfatibacillum aliphaticivorans
aatgaacgctggcggcgtgcttaacacatgcaagtcgtacgagaactcccttgcttgcaagggatagtaaagtggcgcacgggtgagtaacgcgtgggtaatctacccttggattcgggataacattgcgaaagcggtgctaataccggataacattcgcaggtcttaggatgtgcggatcaaagatggcctctacatgtaagctatcgtctggggaggagctcgcgtaccattagctagttggtggggtaaaggcccaccaaggctccgatggttagctggtctgagaggatgatcagccacactggaactgacacacggtccagactcctacgggaggcagcagtgaggaatcttgcgcaatgggcgaaagcctgacgcagcaacgccgcgtgagtgatgaaggccttcgggtcgtaaagctctgtcaagtgggaagaacctgcttctgattaatactcaggagtactgacggtaccactgaaggaagcaccggctaactccgtgccagcagccgcggtaatacggagggtgcaagcgttattcggaattattgggcgtaaagggcgcgcaggcggccgtttaagtcagatgtgaaatcccggggcttaaccccggaagtgcatttgatactggatggcttgagtatgggagagggaagtggaattcctggtgtagaggtgaaattcgtagatatcaggaggaacaccggtggcgaaggcgacttcctggaccaatactgacgctgaggcgcgaaggcgtggggagcaaacaggattagataccctggtagtccacgcagtaaacgttgatcactaggtgtagcgggtattgacccctgctgtgccgcagctaacgcattaagtgatccgcctggggagtacggccgcaaggttaaaactcaaaggaattgacgggggcccgcacaagcggtggagcatgtggtttaattcgacgcaacgcgcaaaaccttacctggatttgacatctcgggaatctctttgaaagaagagagtgcccttcggggagcccgatgacaggtgctgcatggctgtcgtcagctcgtgtcgtgagatgttgggttaagtcccgcaacgagcgcaacccctatgtttagttgccatcattcagttgggcactctaaatagactgccccggttaacggggaggaaggtggggatgacgtcaagtcctcatggcccttatgtccagggctacacacgtgctacaatggatcgcacaaagggcagcgaactcgcgagagtaagccaatcccaaaaaacggtcctcagttcggattggagtctgcaactcgactccatgaagttggaatcgctagtaatcgcggatcagcatgccgcggtgaatacgttcccgggccttgtacacaccgcccgtcacaccatgagagttggctgtaccagaagtcgtcgggctaaccttcgggaggcaggcgcctaaggtatggttgataattggggtg

SEQ ID NO: 1227 - DNA, 1483 bp, Desulfatibacillum alkenivorans
aatgaacgctggcggcgtgcttaacacatgcaagtcgtacgagaactcccttgcttgcaagggatagtaaagtggcgcacgggtgagtaacgcgtgggtaatctacccttggattcgggataacattgcgaaagcggtgctaataccggataatattcgcatgtcttaggatgtgcggatcaaagatggcctctacatgtaagctattgtctgaggaggagctcgcgtaccattagctagttggtggggtaaaggcccaccaaggctccgatggttagctggtctgagaggatgatcagccacactggaactgacacacggtccagactcctacgggaggcagcagtgaggaatcttgcgcaatgggcgaaagcctgacgcagcaacgccgcgtgagtgatgaaggccttcgggtcgtaaagctctgtcaagtgggaagaacctgcttctgattaatactcaggagtactgacggtaccactgaaggaagcaccggctaactccgtgccagcagccgcggtaatacggagggtgcaagcgttattcggaattattgggcgtaaagggcgcgcaggcggccgtttaagtcagatgtgaaatcccggggcttaaccccggaagtgcatttgatactggatggcttgagtatgggagagggaagtggaattcctggtgtagaggtgaaattcgtagatatcaggaggaacaccggtggcgaaggcgacttcctggaccaatactgacgctgaggcgcgaaggcgtggggagcaaacaggattagataccctggtagtccacgcagtaaacgttgatcactaggtgtagcgggtattgacccctgctgtgccgcagctaacgcattaagtgatccgcctggggagtacggccgcaaggttaaaactcaaaggaattgacgggggcccgcacaagcggtggagcatgtggtttaattcgacgcaacgcgcaaaaccttacctggatttgacatctcgggaatctctttgaaagaagagagtgcccttcggggagcccgatgacaggtgctgcatggctgtcgtcagctcgtgtcgtgagatgttgggttaagtcccgcaacgagcgcaacccctatgtttagttgccatcattgagttgggcactctaaatagactgccccggttaacggggaggaaggtggggatgacgtcaagtcctcatggcccttatgtccagggctacacacgtgctacaatggatcgcacaaagggcagcgaactcgcgagagtaagccaatcccaaaaaacggtcctcagttcggattggagtctgcaactcgactccatgaagttggaatcgctagtaatcgcggatcagcatgccgcggtgaatacgttcccgggccttgtacacaccgcccgtcacaccatgagagttggctgtaccagaagtcgtcgggctaaccttcgggaggcaggcgcctaaggtatggttgataattggggtg

SEQ ID NO: 1228 - DNA, 1483 bp, Desulfobacca acetoxidans
aatgaacgctggcggcgtgcttaacacatgcaagtcgtacgagaaagcccggcttgccgggcaagtaaagtggcgcacgggtgagtaacgcgtgggtaatctaccttcgtttgggggataacctaccgaaaggtgggctaataccgcataacgtgatcgagctctggcttgatcgccaaaggtggcctctccatggaagctaccgagtgaagatgagcccgcgtcccattagctagttggtaaggtaaaagcttaccaaggcgacgatgggtagctggtctgagaggatggccagccacactggaactggaacacggtccagactcctacgggaggcagcagtgaggaatcttgcgcaatgggggcaaccctgacgcagcaacgccgcgtgggtgaagaaggccttcgggtcgtaaagctctgtcaagtgggaagaatagccttaaggggaatatccttggggtatgacggtaccactggaggaagcaccggctaactccgtgccagcagccgcggtaatacggagggtgcaagcgttattcggaattattgggcgtaaagggcgtgtaggcggccagataagtcagaggtgaaagcccggggctcaaccccggaagtgcctttgaaactgtttggcttgagtgcgggagaggaaagcggaattcccagtgtagaggtgaaattcgtagatattgggaggaacatcggtggcgaaggcggctttctggaccgacactgacgctgaggcgcgaaagcgtggggagcaaacaggattagataccctggtagtccacgctgtaaacgatgggcactaggtgtaggaggtttttaaccctcctgtgccgtagctaacgcattaagtgccccgcctggggagtacggccgcaaggttaaaactcaaaggaattgacgggggcccgcacaagcggtggagcatgtggtttaattcgacgcaacgcgaagaaccttacctgggcttgacatctgcggaacctcatggaaacatgggggtgcctggcaacaggagccgcaagacaggtgctgcatggctgtcgtcagctcgtgtcgtgagatgttgggttaagtcccgcaacgagcgcaacccttgtctttagttgccatcatttagttgggcactctaaagagactgccggtgttaaaccggaggaaggtggggacgacgtcaagtcctcatggcctttatgcccagggctacacacgtgctacaatgggcggtacaaagggtcgcaaacctgtgaaggggagctaatcccaaaaagccgtcctcagttcggatcggagtctgcaactcgactccgtgaagttggaatcgctagtaatcgtggatcagcatgccacggtgaatacgttcccgggccttgtacacaccgcccgtcacaccacgaaagcctgttgtaccagaagtcgctggcctaacccttcggggaaggaggcgcctaaggtatggccggtaattggggtg

SEQ ID NO: 1229 - DNA, 1478 bp, Desulfobacter curvatus
  misc_feature (368)..(368): n is a, c, g, or t
  misc_feature (458)..(458): n is a, c, g, or t
  misc_feature (1006)..(1006): n is a, c, g, or t
aatgaacgctggcggcgtgcttaacacatgcaagtcgaacgagaaagggattgcttgcaatcctgagtagagtggcgcacgggtgagtaacacgtagataatctgccttcaagcctgggataactattcgaaagggtagctaataccggataaagtcggttcacacaagtggattgatgaaagattgcctattcttgaaagcaattgtttggggatgagtttgcgtaccattagcttgttggtggggtaaaggcctaccaaggcaacgatggttagctggtctgagaggatgatcagccacactggaactggaacacggtccagactcctacgggaggcagcagtgaggaattttgcgcaatgggggnaaccctgacgcagcaacgccgcgtgagtgaagaaggcctttgggtcgtaaagctctgtcaactgggaagaagttaccatcatttaatagntggtggtattgacggtaccagtggaggaagcgccggctaactccgtgccagcagccgcggtaacacggggggcgcaagcgttattcggaattattgggcgtaaagggcgcgcaggcggtcttgtccgtcaggtgtgaaagctcggggctcaaccccggaagtgcacttgaaacagcaagacttgaatacgggagaggagagaggaattcctggtgtagaggtgaaattcgtagatatcaggaggaacaccgatggcgaaggcatctctctggaccgatattgacgctgaggcgcgaaggcgtgggtagcgaacgggattagataccccggtagtccacgcagtaaacgttgtacactcggtgtagcggatattaaaatctgctgtgcccaagctaacgcattaagtgtaccgcctgggaagtacggtcgcaagactaaaactcaaaggaattgacgggggcccgcacaagcggtggagcatgtggtttaattcgacgcaacgcgaagaaccttacctgggtttgacatcctgtgaatatccagtaatntcgatagtgccttcgggagcacagagacaggtgctgcatggctgtcgtcagctcgtgtcgtgagatgtttggttaagtccagcaacgagcgcaacccttatcgttagttgccagcacgttatggtgggaactctaacgagactgcccgggtcaaccgggaggaaggcggggatgacgtcaagtcctcatggcccttatatccagggctacacacgtgctacaatggtaggtacaaagggcagcgactttgcaaaaagaagcgaatcccaaaagcctatctcagtccggattggggtctgcaactcgaccccatgaagttggaatcgctagtaatcgcggatcagcatgccgcggtgaatatgttcccgggccttgtacacaccgcccgtcacaccatgggagttgattatacccgacgtcgctaggctaacttcggaggcaggcgcctaaggtatggttgataactggggtg

SEQ ID NO: 1230 - DNA, 1482 bp, Desulfobacter hydrogenophilus
  misc_feature (166)..(166): n is a, c, g, or t
aatgaacgctggcggcgtgcttaacacatgcaagtcgaacgagaaaaggattgcttgcaatcctgagtagagtggcgcacgggtgagtaacacgtagataatctgccttcaaacctggaataactattcgaaagggtagctaataccggataaagtcgatttacanaagtggattgatgaaagattgcctcttcttgaaagcaattgtttggggatgagtctgcggaccattagcttgttggtggggtaaaggcctaccaaggcagcgatggttagctggtctgagaggatgatcagccacactggaactggaacacggtccagactcctacgggaggcagcagtgaggaattttgcgcaatgggggcaaccctgacgcagcaacgccgcgtgagtgaagaaggcctttgggtcgtaaagctctgtcaactgggaagaaattagcttctattaatagtagttgctattgacggtaccagtggaggaagcgccggctaactccgtgccagcagccgcggtaacacggggggcgcaagcgttattcggaattattgggcgtaaagggcgcgcaggcggtcttgtccgtcaggtgtgaaagctcggggctcaaccccggaagtgcacttgaaacagcaagacttgaatacgggagaggagagaggaattcctggtgtagaggtgaaattcgtagatatcaggaggaacaccgatggcgaaggcatctctctggaccgatattgacgctgaggcgcgaaggcgtgggtagcgaacgggattagataccccggtagtccacgcagtaaacgttgtacactcggtgtggcggatattaaaatctgctgtgcctaagctaacgcattaagtgtaccgcctgggaagtacggtcgcaagactaaaactcaaaggaattgacgggggcccgcacaagcggtggagcatgtggtttaattcgacgcaacgcgaagaaccttacctgggtttgacatcctgtgaatattgtgtaattgcaatagtgccttcgggagcacagagacaggtgctgcatggctgtcgtcagctcgtgtcgtgagatgtttggttaagtccagcaacgagcgcaacccttatcgtcagttgccagcacataatggtgggaactctggcgagactgccccggtcaacggggaggaaggtggggatgacgtcaagtcctcatggcccttatacccagggctacacacgtgctacaatggtaggtacaaagggcagcgactctgcaaagggaagcgaatcccaaaagcctatctcagtccggattggggtctgcaactcgaccccatgaagttggaatcgctagtaatcgcggatcagcatgccgcggtgaatatgttcccgggccttgtacacaccgcccgtcacaccatggaagttgattatacccgacgtcgctgggctaactatttataggggcaggcgcctaaggtatggtcgataactggggtg

SEQ ID NO: 1231 - DNA, 1479 bp, Desulfobacter postgatei
aatgaacgctggcggcgtgcttaacacatgcaagtcgaacgagaaagggattgcttgcaatcccgagtagagtggcgcacgggtgagtaacacgtagataatctgccttcaagcctgggataactattcgaaagggtagctaataccggataaagtcgatttacacaagtagattgatgaaagattgcctcttcttgaaagcaattgtttggagatgagtttgcgtaccattagcttgttggtggggtaaaggcctaccaaggcaacgatggttagctggtctgagaggatgatcagccacactggaactggaacacggtccagactcctacgggaggcagcagtgaggaattttgcgcaatgggggcaaccctgacgcagcaacgccgcgtgagtgaagaaggcctttgggtcgtaaagctctgtcaacagggaagaagttacaattgtttaacagatggttgtattgacggtacctgtggaggaagcgccggctaactccgtgccagcagccgcggtaacacggggggcgcaagcgttattcggaattattgggcgtaaagggcgcgcaggcggtcttgtccgtcaggtgtgaaagctcggggctcaaccccggaagtgcacttgaaacagcaagacttgaatacgggagaggaaagcggaattcctggtgtagaggtgaaattcgtagatatcaggaggaacaccgatggcgaaggcagctttctggaccgatattgacgctgaggcgcgaaggcgtgggtagcaaacgggattagataccccggtagtccacgcagtaaacgttgtacactcggtgtagcgggtattaaaacctgctgtgcccaagctaacgcattaagtgtaccgcctgggaagtacggtcgcaagactaaaactcaaaggaattgacgggggcccgcacaagcggtggagcatgtggtttaattcgacgcaacgcgaagaaccttacctgggtttgacatcctgtgaatatcccgtaattgggatagtgccttcgggagcacagagacaggtgctgcatggctgtcgtcagctcgtgtcgtgagatgtttggttaagtccagcaacgagcgcaacccttatcgttagttgccagcatttaaagatgggaactctaacgagactgcccgggtcaaccgggaggaaggtggggatgacgtcaagtcctcatggcccttatatccagggctacacacgtgctacaatggtaggtacaaagggcagcgactccgcaaggggaagccaatcccaaaagcctatctcagtccggattggggtctgcaactcgaccccatgaagttggaatcgctagtaatcgcggatcagcatgccgcggtgaatatgttcccgggccttgtacacaccgcccgtcacaccatgggagttgattatacccgacgtcgctgggctaacttttagaggcaggcgcctaaggtatggtcgataactggggtg

SEQ ID NO: 1232 - DNA, 1482 bp, Desulfobacula phenolica
aatgaacgctggcggcgtgcttaacacatgcaagtcgaacgagaaagggattgcttgcaatcctgagtagagtggcgcacgggtgagtaacacgtagataatctaccttcaagcccgggataactgcccgaaaggacagctaataccggatgaagttggttcacacaagtgaattaatgaaagattgcctcttcttgaaagcaattgtttggagatgagtttgcggaccattagtttgttggtggggtaaaggcctaccaagactgcgatggttagctggtctgagaggatgatcagccacactggaactggtacacggtccagactcctacgggaggcagcagtgaggaattttgcgcaatgggggaaaccctgacgcagcaacgccgcgtgagtgaagaaggcccttgggtcgtaaagctctgtcgacagggaagaaattataatcatccaataggtggttgtattgacggtacctgtagaggaagcaccggctaactccgtgccagcagccgcggtaatacggggggtgcaagcgttattcggaattattgggcgtaaagggcgcgtaggcggtcttgtcggtcagatgtgaaagcccagggctcaaccctggacgtgcatttgaaacagcaagacttgagtacgggagaggaaagcggaattcctggtgtagaggtgaaattcgtagatatcaggaggaacaccgatggcgaaggcagctttctggaccgatactgacgctgaggcgcgaaggcgtgggtagcgaacaggattagataccctggtagtccacgcagtaaacgatgtgcactaggtgtggcggatattaaaatctgctgtgcccaagctaacgcattaagtgtaccgcctggggagtacggtcgcaagactaaaactcaaaggaattgacgggggcccgcacaagcggtggagcatgtggtttaattcgacgcaacgcgaagaaccttacctgggtttgacatcctgtgaatgtttaagagattagacagtgccttcgggagcacagagacaggtgctgcatggctgtcgtcagctcgtgtcgtgagatgtttggttaagtccagcaacgagcgcaacccttatcgttagttgccagcacataatggtgggaactctagcgagactgcccgggttaaccgggaggaaggcggggatgacgtcaagtcctcatggcccttatgtccagggctacacacgtgctacaatggtaaatacagagggcagcaaaccggcaacggtaagcgaatccctaaagtttatctcagtccggattggagtctgcaactcgactccatgaagttggaatcgctagtaatcgcggatcagcatgccgcggtgaatatgttcccgggccttgtacacaccgcccgtcacaccatgagagttgattatacccgacgtcgttgggctaactatttatagaagcaggcgcctaaggtatgtttgataattggggtg

SEQ ID NO: 1233 - DNA, 1482 bp, Desulfobacula toluolica
aatgaacgctggcggcgtgcttaacacatgcaagtcgaacgagaaagggattgcttgcaatcctgagtagagtggcgcacgggtgagtaacacgtagataatctaccttcaagcccgggataactgcccgaaaggacagctaataccggatgaagttgattgacataagttaattaatgaaagattgcctcttcttgaaagcaattgtttggagatgagtttgcggaccattagtttgttggtggggtaaaggcctaccaagactgcgatggttagctggtctgagaggatgatcagccacactggaactggtacacggtccagactcctacgggaggcagcagtgaggaattttgcgcaatgggggaaaccctgacgcagcaacgccgcgtgagtgaagaaggcccttgggtcgtaaagctctgtcgacagggaagaaattagagttttctaataggagattctattgacggtacctgtagaggaagcaccggctaactccgtgccagcagccgcggtaatacggggggtgcaagcgttattcggaattattgggcgtaaagggcgcgtaggcggtcttgtcggtcagatgtgaaagcccagggctcaaccctggacgtgcatttgaaacagcaagacttgagtacgggagaggaaagcggaattcctggtgtagaggtgaaattcgtagatatcaggaggaacaccgatggcgaaggcagctttctggaccgatactgacgctgaggcgcgaaggcgtgggtagcgaacaggattagataccctggtagtccacgcagtaaacgatgtacactaggtgtggcggatattaaaatctgctgtgcccaagctaacgcattaagtgtaccgcctggggagtacggtcgcaagactaaaactcaaaggaattgacgggggcccgcacaagcggtggagcatgtggtttaattcgacgcaacgcgaagaaccttacctgggtttgacatcctgtgaatatctaagagattagatagtgccttcgggagcacagagacaggtgctgcatggctgtcgtcagctcgtgtcgtgagatgtttggttaagtccagcaacgagcgcaacccttatcgttagttgccagcacataatggtgggaactctagcgagactgcccgggttaaccgggaggaaggcggggatgacgtcaagtcctcatggcccttatgtccagggctacacacgtgctacaatggtaaatacagagggcagcaagccggcaacggtaagcgaatccctaaagtttatctcagtccggattggagtctgcaactcgactccatgaagttggaatcgctagtaatcgcggatcagcatgccgcggtgaatatgttcccgggccttgtacacaccgcccgtcacaccatgagagttgattatacccgacgtcgttgggctaactatttatagaagcaggcgcctaaggtatggttgataattggggtg

SEQ ID NO: 1234 - DNA, 1391 bp, Desulfobotulus alkaliphilus
  misc_feature (18)..(18): n is a, c, g, or t
acgctggcggcgtgcttnacacatgcaagtcgaacgagaaagttcccttcgggggacaagtaaagtggcgcacgggtgagtaacgcgtggataatctgcccttgaattcggaataacatcgcgaaagcggtgctaataccggatgatgttgtgttttctgcggggaatgcaaccaaagaatgcctcttcatgaaagcatttgtttgaggatgagtccgcgtcccattagctagttggcggggtaacggcccaccaaggcagtgatgggtagctggtctgagaggatgatcagccacactgggactgacacacggcccagactcctacgggaggcagcagtgaggaattttgcgcaatgggggaaaccctgacgcagcaacgccgcgtgagtgaagaaggcccttgggtcgtaaagctctgtcaatggcgaagaagttgtgtggttctaacaggcccatgcattgacggtacccatgaaggaagcaccggctaactccgtgccagcagccgcggtaatacggagggtgcaagcgttattcggaattattgggcgtaaagggcgcgtaggcggcctgttaagtcatatgtgaaattttggggctcaaccccaacgctgcatgtgatactggcaggcttgagtatggcagaggaaagcggaattcctggtgtagcggtgaaatgcgtagatatcaggaggaacaccggtggcgaaggcggctttctggaccaatactgacgctgatgcgcgaaggcgtgggtagcaaacaggattagataccctggtagtccacgcagtaaacgttgatcactaggtgttgcgggtattgacccctgcagtgccgtagctaacgcattaagtgatccgcctggggagtacgatcgcaagattaaaactcaaaggaattgacgggggcccgcacaagcggtggagcatgtggtttaattcgacgcaacgcgcagaaccttacctgggcttgaaatctgtggaacttgtatgaaagtatggggtgcccttcggggagccgcaagacaggtgctgcatggctgtcgtcagctcgtgtcgtgagatgttgggttaagtcccgcaacgagcgcaacccttgtcttcagttgccagcacgtaaaggtgggaactctgaagatactgccccggttaacggggaggaaggtggggatgacgtcaagtcctcatggcccttatgcccagggctacacacgtgctacaatggcatatacagagggtagcgagaccgcgaggtggagccaatcccagaaagtatgccacagttcggattggagtctgcaactcgactccatgaagttggaatcgctagtaatcgcggatcagcatgccgcggtgaatacgttcccgggccttgtacacaccgccc

SEQ ID NO: 1235 - DNA, 1480 bp, Desulfobulbus propionicus
aacgaacgctggcggcgtgcttaacacatgcaagtcgaacgcgaaagggacttcggtcctgagtaaagtggcgcacgggtgagtaacgcgtagataacctgtcttcatgtctggaataatacgccgaaaggggtactaataccggatattcttgcttttcataagttatgcaagcaaaggtggcctctgcatatgctactgcatgaagaggggtctgcgtaccattagctagtaggtggggtaatggcctacctaggcgacgatggttagcgggtctgagaggatgatccgccacactggcactggaacacgggccagactcctacgggaggcagcagtgaggaatattgcgcaatgggggaaaccctgacgcagcgacgccgcgtgagtgaggaaggccttcgggtcgtaaagctctgtcaagaggaaagaagtgtacaatggctaatacctgttgtatttgacggtacctctaaaggaagcaccggctaactccgtgccagcagccgcggtaatacggagggtgcaagcgttgttcggaatcactgggcgtaaagggcgcgtaggcggcttggtaagtcagatgtgaaagcccacggcttaactgtggaagtgcatttgaaactgtcaggcttgagtaccagaggggaaagtggaattcccggtgtagaggtgaaattcgtagatatcgggaggaataccggtggcgaaggcgactttctggctggatactgacgctgaggcgcgaaagcgtggggagcaaacaggattagataccctggtagtccacgctgtaaacgatgtgaactagatgcagggggtgttgatcccttctgtgtcgcagctaacgcattaagttcaccgcctggggagtacggtcgcaagattaaaactcaaaggaattgacgggggcccgcacaagcggtggagtatgtggtttaattcgatgcaacgcgaagaaccttacctggtcttgacatcccggaaatcttttggaaacaagagagtgcttccattcggaagaatctggagacaggtgctgcatggctgtcgtcagctcgtgtcgtgagatgttgggttaagtcccgcaacgagcgcaacccttgcctttagttgccagcagttcggctgggcactctaaagggactgccggtgttaaaccggaggaaggtggggatgacgtcaagtcctcatggcctttatgaccagggctacacacgtactacaatggccgatacaaagggcagcgacactgcgaggtggagccaatcccataaaatcggtctcagtccggattggagtctgcaactcgactccatgaagttggaatcgctagtaatcgcggatcagcatgccgcggtgaatacgttcccgggccttgtacacaccgcccgtcacaccacgggagtcggttgtaccagaagcagttgagctaaccgcaagggggcaggctgccaaggtatggctggtaactggggtg

SEQ ID NO: 1236 - DNA, 1482 bp, Desulfocapsa sulfexigens
aacgaacgttggcggcgtgcttaacacatgcaagtcgaacgcgaacggtttcttcggagacctagtagagtggcgcacgggtgagtaacgcgtaagtaatctaccctcgcatcagggataactacgggaagctgtagctaataccggatacgttctcctatttacggactggagaagaaagatggcctcttcatgaaagctatcgtgcggggaggagcttgcgtaccattagctagttggtagggtaatggcctaccaaggcgacgatggttagcgggtctgagaggatgatccgccacactggaactgaaacacggaccagactcctacgggaggcagcagtgaggaatattgcgcaatgggggaaaccctgacgcagcgacgccgcgtggatgatgaaggccttagggtcgtaaaatcctgtcaggtgggaagaagtggttatagactaatactctatttctttgacggtaccaccaaaggaagcaccggctaactccgtgccagcagccgcggtaatacggagggtgcaaacgttgttcggaattactgggcgtaaagcgcgcgtaggcggtttgttaagtcagatgtgaaagcccatggctcaaccatggacgtgcatttgaaactggcagacttgagtactggagggggtgatggaattcccggtgtagaggtgaaattcgtagatatcgggaggaataccggtggcgaaggcgatcacctggccagatactgacgctgaggtgcgaaagcgtggggagcaaacaggattagataccctggtagtccacgccgtaaacgatgtcaactaggtgttggggcggttaatcgtctcattgccgaagctaacgcattaagttgaccgcctggggagtacggtcgcaagattaaaactcaaaggaattgacgggggcccgcacaagcggtggagtatgtggtttaattcgacgcaacgcgcagaaccttacctggtcttgacatcccgggaatctcttagaaataagagagtgcctcattagaggagcctggtgacaggtgctgcatggctgtcgtcagctcgtgtcgtgagatgttgggttaagtcccgcaacgagcgcaacccttgcctttagttgccatcattaagttgggcactctagagggactgccggtgtcaaaccggaggaaggtggggatgacgtcaagtcctcatggcctttatgaccagggctacacacgtactacaatggcatgtacaaaaggcagccacttcgcgagaaggagcgaatccttaaaacatgtctcagtccggattggagtctgcaactcgactccatgaagttggaatcgctagtaatcgtagatcagcatgctacggtgaatacgttcccgggccttgtacacaccgcccgtcacaccacgggagttggttgtaccagaagtagttgagcgaacttttcggagacgcaggctaccaaggtatgatcggtaactggggtg

SEQ ID NO: 1237 - DNA, 1483 bp, Desulfocarbo indianensis
aacgaacgctggcggcaggcctaacacatgcaagtcgcacgagaacgtctcgcttcggtgaggctagtaaagtggcgcacgggtgagtatcgcgtgggtaatctacctttgggcacgggataacgtctcgaaaggggcgctaataccgtataagaccacagtaaccccggttgctgcggtaaaagggggcctctacatgtaagctcccacctgatgatgagcccgcgtcccattagcttgttggtgaggtaacggctcaccaaggccgcgatgggtagctggtctgagaggatgatcagccacactgggactggaacacggcccagactcctacgggaggcagcagtgaggaatcttgcgcaatgggggaaaccctgacgcagccatgccgcgtgggtgaagaaggccttcgggtcgtaaagccctgtcaggagggaagaaccgtttgcagtccaataaactgcaagcctgacggtaccttcaaaggaagcaccggctaactccgtgccagcagccgcggtaatacggagggtgcaagcgttgttcggaattactgggcgtaaagggtgtgcaggcggctaggtaagtccgatgtgaaatccctcggctcaactgaggatgtgcatcggatactgcttggcttgagtctcggagaggggggtggaattcccggtgtagaggtgaaattcgtagatatcgggaggaacaccagtggcgaaggcgaccccctggacgatgactgacgctgatacacgaaagcgtgggtagcaaacaggattagataccctggtagtccacgccgtaaacggtgtccactaggtgtcgtgggtattgacccccgcggtgccgcagctaacgcattaagtggaccgcctggggagtacggccgcaaggttaaaactcaaaggaattgacgggggcccgcacaagcggtggagtatgtggtttaattcgacgcaacgcgcagaaccttacctgggtttgacatccccggacagcctatgaaagtaggtttccacttcggtggccgggtgacaggtgctgcatggctgtcgtcagctcgtgtcgtgagatgttgggttaagtcccgcaacgagcgcaacccctgtctctagttgccagtatttagttaggcactctagggagaccgccccggttaacggggaggaaggtggggatgacgtcaagtcctcatggcccttatgcccagggctacacacgtactacaatggccggtacaaagggccgcaatactgcgaagtggagctaatcccaaaaaaccggtctcagttcggattggagtctgcaactcgactccatgaaggtggaatcgctagtaatcccggatcagcatgccggggtgaatacgttcccgggccttgtacacaccgcccgtcacaccacgaaagcctgttgtaccagaagtggccgagccaacccgtaaggggggcaggtccccaaggtatggccggtaattggggtg

SEQ ID NO: 1238 - DNA, 1485 bp, Desulfococcus multivorans
aatgaacgctggcggcgtgcttaacacatgcaagtcgcacgagaacgcttctgcttgcaggggctagtaaagtggcgcacgggtgagtaacgcgtgggtaatctacccttggattcgggataacccttcgaaaggagtgctaataccggatgaagtcatttaggctgtggtttagatgatgaaaggtggcctctccgaggaagctaccgtttggggatgagcccgcgtaccattagcttgttggtggggtaacggcctaccaaggcgacgatggttagctggtctgagaggatgatcagccacactggaactgacacacggtccagactcctacgggaggcagcagtgaggaattttgcgcaatggggggaaccctgacgcagcaacgccgcgtgagtgaagaaggccttcgggtcgtaaagctctgtcgagtgggaagaaccttcgtatgttgaatatgcatacggactgacggtaccacagaaggaagcaccggctaactccgtgccagcagccgcggtaatacggagggtgcaagcgttattcggaattattgggcgtaaagagcgcgtaggcggctttgcaagtcaggtgtgaaatcccggggctcaaccccggaagagcatttgatactgtggagcttgagtatgggagagggaagtggaattcctggtgtagcggtgaaatgcgtagatatcaggaggaacaccggtggcgaaggcggcttcctggaccaatactgacgctgaggcgcgaaggcgtggggagcaaacaggattagataccctggtagtccacgcagtaaacgttgatcactaggtgtagcgggtattgacccctgctgtgccggagttaacgcattaagtgatccgcctggggagtacgatcgcaagattaaaactcaaaggaattgacgggggcccgcacaagcggtggagcatgtggtttaattcgacgcaacgcgaagaaccttacctggatttgacatccgcgggattcttatgaaaatagggagtgcccttcggggagccgcgagacaggtgctgcatggctgtcgtcagctcgtgtcgtgagatgttgggttaagtcccgcaacgagcgcaacccctgtcttcagttaccatcattaagttggggactctgaagatactgccccggttaacggggaggaaggtggggatgacgtcaagtcctcatggcctttatgtccagggctacacacgtgctacaatgggctgtacagagggtagcgatctcgcgagagcaagccaatcccaaaaagcagtccttagttcggattggagtctgcaactcgactccatgaagctggaatcgctagtaatcgcggatcagcatgccgcggtgaatacgttcccgggccttgtacacaccgcccgtcacaccatgagagttggttgtaccagaagttgttgggctaacccgcaagggaggcaggcacctaaggtatggctgatgattggggtg

SEQ ID NO: 1239 - DNA, 1487 bp, Desulfofaba hansenii
  misc_feature (372)..(372): n is a, c, g, or t
  misc_feature (379)..(379): n is a, c, g, or t
  misc_feature (1256)..(1256): n is a, c, g, or t
  misc_feature (1442)..(1442): n is a, c, g, or t
  misc_feature (1447)..(1447): n is a, c, g, or t
  misc_feature (1455)..(1455): n is a, c, g, or t
aatgaacgctggcggcatgcttaacacatgcaagtcgaacgagaaatcttgggcttcggcctaggagagtaaagtggcgcacgggtgcgtaacgcgtggataatctacccttgaatccggaataacattgcgaaagcgatgctaataccggatgatattcaaacggcctcggcagtttgaatcaaagacggcctcttcttgaaagccgttgtttgaggatgagtccgcgtaccattagcttgttggtggggtaaaagcccaccaaggccgcgatggttagctggtctgagaggatgatcagccacactgggactgacacacggcccagactcctacgggaggcagcagtgaggaattttgcgcaatgggggnaaccctnacgcagcaatgccgcgtgagtgatgaaggcccttgggtcgtaaaactctgtcaagcgggaagaacggatcgaaggttaataccctttgattttgacggtaccgctgaaggaagcaccggctaactccgtgccagcagccgcggtaatacggggggtgcaagcgttattcggaattattgggcgtaaagcgcgcgtaggcggcttcgtaggtcagatgtgaaatcccggggctcaaccccggcagtgcatttgaaaccccgaagcttgagtatgggagagggaagtggaattccaggtgtagaggtgaaattcgtagatatctggaggaacaccggtggcgaaggcgacttcctggaccaatactgacgctgaggtgcgaaggcgtggggagcaaacaggattagataccctggtagtccacgcagtaaacgatgatcactaggtgttgagggtattgactccttcagtgccgcagctaacgcattaagtgatccgcctggggagtacgatcgcaagattaaaactcaaagaaattgacgggggcccgcacaagcggtggagcatgtggtttaattcgacgcaacgcgcagaaccttacctggatttgacatcctgggaatcatttggaaacttttgagtgcccttcggggagcccagtgacaggtgctgcatggctgtcgtcagctcgtgtcgtgagatgtttggttaagtccagcaacgagcgcaacccctatcttcagttaccatcatttggttggggactctggagatactgccccggttaacggggaggaaggtggggatgacgtcaagtcctcatggcccttatatccagggctacacacgtgctacaatggcgtgtacaaagggtagcaanccggtgacggtaagccaatcccataaagcacgcctcagttcggattggagtctgcaactcgactccatgaagttggaatcgctagtaatcgcggatcagcatgccgcggtgaatacgttcccgggccttgtacacaccgcccgtcacaccatgagagttgattgtaccagaagtcgcccagctaancttcnggggggcnaggcgcctaaggtatggttgataattagggtg

SEQ ID NO: 1240 - DNA, 1558 bp, Desulfofarcimen acetoxidans
agagtttgatcctggctcaggacgaacgttggcggcgtgcttaacacatgcaagtcgaacggagttaagaaaagagtttactttttccttaacttagtggcggacgggtgagtaacgcgtggataatctgcctgtaagacaggaataacgccgggaaaccggtgctaataccggataacctctttttatcgcatggtgaaaagagaaaaggcggcctctttacaatgctgccgcttacagatgaatccgcgtcccattagccagttggtggggtaacggcccaccaaagcgacgatgggtagccggcctgagagggtgatcggccacactggaactgagacacggtccagactcctacgggaggcagcagtggggaatcttccgcaatgggcgaaagcctgacggagcaacgccgcgtgagcgaagaaggtcttcggattgtaaagctctgtgatattggacgaacagatttcttgtaaacagcaaggaaaaatgacggtacaataagaggaagccacggctaactacgtgccagcagccgcggtaatacgtaggtggcaaacgttgtccggaattactgggcgtaaagggcgagtaggtggtttattaagtcagaagtgaaaactccgggctcaacctggagactgcttctgaaactggtagacttgagtgcaggagagggaagcggaattcctagtgtagcggtgaaatgcgtagatattaggaggaacaccagtggcgaaggcggcttcctggcctgtaactgacactgaggcgcgaaagcgtggggatcaaacaggattagataccctggtagtccacgccgtaaacgatgagtgttaggtgtcgggggtatcgaccccctcggtgccacagttaacacaataagcactccgcctggggagtacggtcgcaagactgaaactcaaaggaattgacgggggcccgcacaagcggtggagtatgtggtttaattcgacgcaacgcgaagaaccttaccaaggcttgacatcccgtgaccgccgtggaaacatggtcttgcaagtttacttgcacacggagacaggtggtgcatggttgtcgtcagctcgtgtcgtgagatgttgggttaagtcccgcaacgagcgcaacccctacagccagttgccagcacttagggtgggaactctggcagaactgccgttgacaaaacggaggaaggtggggatgacgtcaaatcatcatgccccttatgtcttgggctacacacgtactacaatggcctgaacagagggaagcgaaactgtgaagtagagccaacccctaaaaacaggtcccagttcggattgtaggctgcaactcgcctacatgaagtcggaatcgctagtaatcgcaggtcagcatactgcggtgaatacgttcccgggccttgtacacaccgcccgtcacaccacgaaagtcggcaacacccgaagccggtgacttaactcgcaagagagagagccgtcgaaggtggggtcggtgattggggtgaagtcgtaacaaggtagccgtatcggaaggtgcggctggatcacct

SEQ ID NO: 1241 - DNA, 1561 bp, Desulfofundulus australicus
  misc_feature (836)..(836): n is a, c, g, or t
  misc_feature (842)..(842): n is a, c, g, or t
  misc_feature (1433)..(1433): n is a, c, g, or t
agtcgagcgggtaacggaggtcggtcatcggaggtcagaagtcagataagaagcaagtggcctgaggcagttgcgacgaaagatctggcatccgatttccgacggccgacttccgttgccagcgcggacgggtgagtaacgcgtggataacctgcccattagaccgggataacgctggcaaactggcgctaataccggatacgctccctggttcgcatggactggggaggaaaggggaaacccgctaatggatgggtccgcgtcccattagctagatggtggggtaacggcctaccatggcgacgatgggtagccggcctgagagggtgaccggccacactgggactgagacacggcccagactcctacgggaggcagcagtggggaatcttccgcaatgggcgaaagcctgacggagcgacgccgcgtgagcgaagaaggccttcgggtcgtaaagctctgttctgggggaagaaggaagtgacggtactccaggagaaagccccggctaactacgtgccagcagccgcggtaagacgtagggggcgagcgttgtccggaatcactgggcgtaaagggcgcgtaggcggtccaagaagtcagtggtgaaataccgcagctcaactgcgggggtgccattgaaaccattggacttgagggcaggagaggggagtggaattcccggtgtagcggtgaaatgcgtagatatcgggaggaacaccagtagcgaaggcggctctctggcctggccctgacgctgaggcgcgaaagcgtggggaggaaacaggattagataccctggtagtccacgctgtaaacgatgggtgctaggagangggggnataggacccttcagtgccgtagctaacgcaataagcaccccgcctggggagtacggccgcaaggctgaaactcaaaggaattgacgggggcccgcacaagcggtggagcatgtggtttaattcgacgcaacgcgaagaaccttaccagggcttgacatctctctgacgttcgtggaaacacggatttcacgcggggtaacccgtgtgacagggagacaggtggtgcatggttgtcgtcagctcgtgtcgtgagatgttgggttaagtcccgcaacgagcgcaacccctacggttagttgctaacgggtaaagccgagcactctagccggactgccgttgacaaaacggaggaaggtggggatgacgtcaaatcatcatgccccttatgtcctgggctacacacgtgctacaatggccggtacagagggcagcgaacccgtgagggggagcgaatcccaaaaagccggtctcagttcggattgcaggctgcaactcgcctgcatgaagtcggaatcgctagtaatcgcaggtcagcatactgcggtgaatacgttcccgggccttgtacacaccgcccgtcacaccacgaanggcgacaacacccgaagccggtgagctaaccctgcaagggggggcagccgtcgaaggtggggttggtgattggggtgaagtcgtaacaaggtagccgtatcggaaggtgcggctggatcacctcctta

SEQ ID NO: 1242 - DNA, 1715 bp, Desulfofundulus kuznetsovii
agtgattagagtttgatcctggctcaggacgaacgctggcggcgtgcctaacacatgcaagtcgagcggtccagcactcaactcggtgtttacgtgatgcataagagaaaccctttcacccgggagggaagaagggggtagtgcatcaggtatacagcgagttgagtgctggatagcggcggacgggtgagtaacgcgtggataacctgcccattagaccgggataacgccgggaaactggcgctaataccggatacgctcctctggtcgcatgactgggggaggaaaggggaaacccgctaatggatgggtccgcgtcccattagctagatggtggggtaatggcctaccatggcgacgatgggtagccggcctgagagggtgaccggccacactgggactgagacacggcccagactcctacgggaggcagcagtggggaatcttccgcaatgggcgaaagcctgacggagcgacgccgcgtgagcgaggaaggccttcgggtcgtaaagctctgttctgggggaagaagagggtgacggtaccccaggaggaagccccggctaactacgtgccagcagccgcggtaatacgtagggggcgagcgttgtccggaattactgggcgtaaagggcgcgtaggcggctcaagaagtcaggggtgaaataccgcagctcaactgcgggggtgcctctgaaaccattgggcttgagggcaggagaggggagtggaattcccggtgtagcggtgaaatgcgtagatatcgggaggaacaccagtggcgaaggcggctctctggcctggccctgacgctgaggcgcgaaagcgtggggagcaaacaggattagataccctggtagtccacgctgtaaacgatgggtgctaggtgttggggggataggacccttcagtgccgtagcaaacgcaataagcaccccgcctggggagtacggccgcaaggctgaaactcaaaggaattgacgggggcccgcacaagcggtggagcatgtggtttaattcgacgcaacgcgaagaaccttaccagggcttgacatcccctgacggccgtggaaacacggatttcacgggagtaatctcgtgacagggagacaggtggtgcatggttgtcgtcagctcgtgtcgtgagatgttgggttaagtcccgcaacgagcgcaacccctacggttagttgctaacgggtaaagccgagcactctagccggactgccgttgacaaaacggaggaaggtggggatgacgtcaaatcatcatgccccttatgtcctgggctacacacgtgctacaatggccggtacaaagggcagcgaacccgcgagggggagcgaatcccaaaaagccggtctcagttcggattgcaggctgcaactcgcctgcatgaagtcggaatcgctagtaatcgcaggtcagcatactgcggtgaatacgttcccgggccttgtacacaccgcccgtcacaccacgaaagccgacaacacccgaagccggtgagctaacctgttcggaagtcagaggtcagaagtcagaagttggattgggaaaaggagggcgggtaaaacctccgcacccttagcctggatctgacatccgacttccgacttccgaacggggggcagccgtcgaaggtggggttggtgattggggtgaagtcgtaacaaggtagccgtatcggaaggtgcggctggatcacctcctta

SEQ ID NO: 1243 - DNA, 1505 bp, Desulfofundulus thermosubterraneus
ttgagaggtgagaggtgagaggttagaagtgagattaagaaggctttggcaaagccaaagccaacaataaatctcacatctcgcttctcacatctcacctctcaatagcggcggacgggtgagtaacgcgtggataacctgcccattagaccgggataacgccgggaaactggcgctaataccggatacgctcctttagccgcatggctgaaggaggaaaggccgagcactcaacctggtgtttgcatggcggtcttacggaaggcaatctcccgggagggggggtagcgggtaaggcgacatgcaggcagcgggttgagtgctggccgctaatggatgggtccgcgtcccattagctagatggtggggtaacggcctaccatggcgacgatgggtagccggcctgagagggtgaccggccacactgggactgagacacggcccagactcctacgggaggcagcagtggggaatcttccgcaatgggcgaaagcctgacggagcgacgccgcgtgagcgaggaaggccttcgggtcgtaaagctctgttctgggggaagaaggatgtgacggtaccccaggaggaagccccggctaactacgtgccagcagccgcggtaagacgtagggggcgagcgttgtccggaattactgggcgtaaagggcgcgtaggcggctcaagaagtcaggggtgaaataccgcagctcaactgcgggggtgcctctgaaaccattgggcttgagggcaggagaggggagtggaattcccggtgtagcggtgaaatgcgtagatatcgggaggaacaccagtggcgaaggcggctctctggcctggccctgacgctgaggcgcgaaagcgtggggagcaaacaggattagataccctggtagtccacgctgtaaacgatgggtgctaggtgttgggggggtagacccttcagtgccgtagcaaacgcaataagcaccccgcctggggagtacggccgcaaggctgaaactcaaaggaattgacgggggcccgcacaagcggtggagcatgtggtttaattcgacgcaacgcgaagaaccttaccagggcttgacatcccctgacggtcgtggaaacacggatttcacgggagaaatctcgtgacagggagacaggtggtgcatggttgtcgtcagctcgtgtcgtgagatgttgggttaagtcccgcaacgagcgcaacccctacggttagttgctaacgggagaagccgagcactctagccgaactgccgttgacaaaacggaggaaggtggggatgacgtcaaatcatcatgccccttatgtcctgggctacacacgtgctacaatggccggtacaaagggcagcgaacccgtgagggggagcgaatcccaaaaagccggtctcagttcggattgcaggctgcaactcgcctgcatgaagtcggaatcgctagtaatcgcaggtcagcatactgcggtgaatacgttcccgggccttgtacacaccgcccgtcac

SEQ ID NO: 1244 - DNA, 1482 bp, Desulfofustis glycolicus
aacgaacgctggcggcgtgcttaacacatgcaagtcgaacgcgaacggttccttcggggaccaagtagagtggcgcacgggtgagtaacgcgtaagtaatctccccttgcattcggaataactcaccgaaaggtgtgctaataccggatacgtctggaataatgactttttttcagagaaaggcagcctctatttataagctgtcgtgcaaggatgagcttgcgtaccattagctagttggtagggtaagggcctaccaaggcgacgatggttagcgggtctgagaggatgatccgccacactggaactggaacacggaccagactcctacgggaggcagcagtgaggaatattgcgcaatgggggcaaccctgacgcagcgacgccgcgtggatgatgaaggccttcgggttgtaaaatcctgtcagatgggaagaaatgtatgggtattaatagtgcccgtatttgacggtaccatcaaaggaagcaccggctaactccgtgccagcagccgcggtaatacggagggtgcgagcgttgttcggaattactgggcgtaaagcgcgcgtaggcggcactttaagtcatttgtgaaagtccacggctcaaccgtggaagtgcatgtgaaactggagtgcttgagtactggagggggtggtggaattcccggtgtagaggtgaaattcgtagatatcgggaggaataccggtggcgaaggcgaccacctggccagatactgacgctgaggtgcgaaagcgtggggagcaaacaggattagataccctggtagtccacgccgtaaacgatgtcaactaggtgttgggatggttaatcgtctcattgccggagcaaacgcattaagttgaccgcctggggagtacggtcgcaagattaaaactcaaaggaattgacgggggcccgcacaagcggtggagtatgtggtttaattcgacgcaacgcgcagaaccttacctggtcttgacatcccgggaatcctgtggaaacacgggagtgcctttcgaggaacccggagacaggtgctgcatggctgtcgtcagctcgtgtcgtgagatgttgggttaagtcccgcaacgagcgcaacccttgtctttagttgccagcattaagttgggcactctaaagagactgccggtgtcaaaccggaggaaggtggggatgacgtcaagtcctcatggcctttatgatcagggctacacacgtactacaatggccggtacaacgggcagcaacacagcgatgtgaagcgaatctcgcaaagccggtctcagtccggattggagtctgcaactcgactccatgaagttggaatcgctagtaatcgcggatcagcatgccgcggtgaatacgttcccgggccttgtacacaccgcccgtcacaccacgggagttggttgtaccagaagcagttgagctaactattcgtagaggcaggctgccaaggtatgatcggtaactggggtg

SEQ ID NO: 1245 - DNA, 1482 bp, Desulfoglaeba alkanexedens
  misc_feature (137)..(137): n is a, c, g, or t
aatgaacgctggcggcgtgcctaacacatgcaagtcgcacgagaaatccgagcttcagttttactggagcagggagagtaaagtggcgcacgggtgagtaacgcgtgggtgacctacccctggatccgggataacanttcgaaaggggtgctaataccggatacgacccttaggggagaaagccggcctctcgaagaagctggtgttcggggatgggcccgcgtcctatcagctggttggtagggtaacggcctaccaaggcgacgacgggtagctggtctgagaggatgatcagccacactggcactggaacacgggccagactcctacgggaggcagcagtgaggaattttgcgcaatggccgcaaggctgacgcagcaacgccgcgtgggtgatgaaggccttcgggtcgtaaagccctgtcaggtgggaagaaaggcatggtggcgaagagcctctgtgtttgacggtaccaccagaggaagcaccggctaactccgtgccagcagccgcggtaatacggagggtgcgagcgttattcggaattactgggcgtaaagcgcacgtaggcggccgcacaagtctgatgtgaaagcccggggctcaacctcggaagtgcattggaaacggtgcggcttgagtaccggagaggaagggggaattcccggtgtagcggtgaaatgcgtagagatcgggaggaataccagtggcgaaggcgcccttctggacggtaactgacgctgaggtgcgaaagcgtggggagcaaacaggattagataccctggtagtccacgctgtaaacgatgggcactaggtgtagcgggtattgacccctgctgtgccgaagctaacgcgttaagtgccccgcctggggactacggccgcaaggctaaaactcaaaggaattgacgggggcccgcacaagcggtggagcatgtggtttaattcgaagcaacgcgaagaaccttacctgggcttgacatccccggccgctcctggaaacagggggttccccttcgggggaccgggagacaggtgctgcatggctgtcgtcagctcgtgtcgtgagatgttgggttaagtcccgcaacgagcgcaacccctgcctctagttgccatcatttcgggtgggcactctagagggactgccggtgtcaaaccggaggaaggtggggacgacgtcaagtcctcatggcctttatgtccagggctacacacgtgctacaatgggcggtacaaagggcagcgaacccgcgagggggagccaaccccaaaaagccgtcctcagttcggatcggagtctgcaactcgactccgtgaaggtggaatcgctagtaatcgcggatcagcatgccgcggtgaatacgttcccgggccttgtacacaccgcccgtcacaccacgaaagtcggctgtaccagaagtgcgtgggccaacccgcaagggaggcagcgtaccaaggtatggtcggtaattggggtg

SEQ ID NO: 1246 - DNA, 1461 bp, Desulfoluna butyratoxydans
  misc_feature (32)..(33): n is a, c, g, or t
  misc_feature (60)..(60): n is a, c, g, or t
  misc_feature (1427)..(1427): n is a, c, g, or t
  misc_feature (1429)..(1430): n is a, c, g, or t
aatgaacgctggcggcgtgcttaacacatgcnngtcgaacgagaaagttttcttcggaanacgagtacagtggcgcacgggtgagtaacgcgtgaataatctacccctgaatttgggataacagttcgaaagggctgctaataccggatgacataatccttaccacggtttggattatcaaagagggcctctccttggaagctcttgtttggggatgagttcgcgtcccattagcttgttggtaaggtaacggcttaccaaggcaacgatgggtagctggtctgagaggatgatcagccacactggaactgacacacggtccagactcctacgggaggcagcagtgaggaattttgcgcaatgggggaaaccctgacgcagcaacgccgcgtgagtgatgaaggctcttgggtcgtaaagctctgtcaagtgggaagaaaccttccttatttaatagataagggaattgacggtaccactgaaggaagcaccggctaactccgtgccagcagccgcggtaacacggggggtgcaagcgttattcggaattattgggcgtaaagggcgcgtaggcggccatttaagtcgggtgtgaaatcccggggcttaaccccggaactgcatccgatactggatggcttgagtatgggagagggaagtggaattccaggtgtagaggtgaaattcgtagatatctggaggaacaccagtggcgaaggcgacttcctggaccaatactgacgctgaggcgcgaaggcgtggggagcaaacaggattagataccctggtagtccacgcagtaaacgttgacaactaggtgtcgcgggtattgacccctccggtgccggagctaacgcattaagttttccccctggggagtacggtcgcaagattaaaactcaaaggaattgacgggggcccgcacaagcggtggagcatgtggtttaattcgacgcaacgcgcagaaccttacctggacttgacatatcgggaatcttttcgaaagatatagagatgctctcggggagcccgatgacaggtgctgcatggctgtcgtcagctcgtgtcgtgagatgttgggttaagacccgcaacgagcgcaacccttatcttcagttaccacgcatttcggatggggactctggagatactgccccggttaacggggaggaaggtggggatgacgtcaagtcctcatggcccttatgtccagggctacacacgtgctacaatgttatgtacaaagggtagcgaactcgcgagagtaagccaatcccatataagcatacctcagttcggattggagtctgcaactcgactccatgaagttggaatcgctagtaatcgcggatcagcatgccgcggtgaatacgttcccggccttgtacacaccgcccgtcacaccacgagagttgattgtaccagangnngttgggctaactatctgggaggcaggcacct

SEQ ID NO: 1247 - DNA, 1484 bp, Desulfoluna spongiiphila
aatgaacgctggcggcgtgcttaacacatgcaagtcgaacgagaaagttttcttcggaaaacgagtacagtggcgcacgggtgagtaacgcgtgaataatctacccctgaatttgggataacagttcgaaagggctgctaataccggatgacataacccttaccacggtttgggttatcaaagagggcctctccttggaagctcttgtttggggatgagttcgcgtaccattagcttgttggtggggtaatggcctaccaaggcttcgatggttagctggtctgagaggatgatcagccacactggaactgacacacggtccagactcctacgggaggcagcagtgaggaattttgcgcaatgggggaaaccctgacgcagcaacgccgcgtgagtgatgaaggctcttgggtcgtaaagctctgtcaagtgggaagaaaccttccttatttaatagataagggaattgacggtaccactgaaggaagcaccggctaactccgtgccagcagccgcggtaacacggggggtgcaagcgttattcggaattattgggcgtaaagggcgcgtaggcggccatttaagtcgggtgtgaaatcccggggcttaaccccggaactgcatccgatactggatggcttgagtatgggagagggaagtggaattccaggtgtagaggtgaaattcgtagatatctggaggaacaccagtggcgaaggcgacttcctggaccaatactgacgctgaggcgcgaaggcgtggggagcaaacaggattagataccctggtagtccacgcagtaaacgttgacaactaggtgtcgcgggtattgacccctgcggtgccggagctaacgcattaagttgtccgcctggggagtacggtcgcaagattaaaactcaaaggaattgacgggggcccgcacaagcggtggagcatgtggtttaattcgacgcaacgcgcagaaccttacctggacttgacatctcggaaatctcttggaaacttgagagtgcccttcggggaatccgatgacaggtgctgcatggctgtcgtcagctcgtgtcgtgagatgttgggttaagtcccgcaacgagcgcaacccttatcttcagttaccagcaactcggttggggactctggagatactgccccggttaacggggaggaaggtggggatgacgtcaagtcctcatggcccttatgtccagggctacacacgtgctacaatggtatgtacaaagggtagcgaactcgcgagagtaagccaatcccataaagcatacctcagttcggattggagtctgcaactcgactccatgaagttggaatcgctagtaatcgcggatcagcatgccgcggtgaatacgttcccgggccttgtacacaccgcccgtcacaccacgagagttgattgtaccagaagttgttgggctaacccttcggggaggcaggcacctaaggtatggttgataattggggtg

SEQ ID NO: 1248 - DNA, 1472 bp, Desulfomicrobium apsheronum
aatgaacgctggcggcgtgcctaacacatgcaagtcgtacgagaaaggggcttcggccctgagtagagtggcgcacgggtgagtaacgcgtgggtaatctacccttggatttgggataacttcgcgaaagtggagctaataccggatagtctggctttaaataagaagtcggtaaaggatgcctctgcatatgcattcgtccgaggatgagcccgcgtctcattagctagttggtagggtaatggcctaccaaggcaacgatgagtagctggtctgagaggatgatcagccacactggaactgaaacacggtccagactcctacgggaggcagcagtggggaatattgcgcaatgggcgaaagcctgacgcagcaacgccgtgtgagggatgaaggctttcgggtcgtaaacctctgtcggaagggaagaacgggcattggtctaataggcctttgttttgacggtacctttagaggaagcaccggctaactccgtgccagcagccgcggtaatacggagggtgcaagcgttattcggaattactgggcgtaaagcgcacgtaggcggccttgtaagtcaggggtgaaatcccacggctcaaccgtggaactgcctttgaaactgcagggcttgaatcctggagagggtggcggaattcctggtgtaggagtgaaatccgtagatatcaggaggaacaccggtggcgaaggcggccacctggacaggtattgacgctgaggtgcgaaagtgtggggagcaaacaggattagataccctggtagtccacaccgtaaacgatggatactaggtgtcggggacttgatcttcggtgccgtagctaacgcgttaagtatcccgcctggggagtacggtcgcaaggctgaaactcaaagaaattgacgggggcccgcacaagcggtggagtatgtggtttaattcgatgcaacgcgaagaaccttacctaggcttgacatcctgggaatcctgcagagatgcgggagtgcccttcggggaatccagagacaggtgctgcatggctgtcgtcagctcgtgccgtgaggtgttgggttaagtcccgcaacgagcgcaacccctattctcagttgccagcacataatggtgggcactctgtggagactgcccgggttaaccgggaggaaggtggggatgacgtcaagtcatcatggcccttacgcctagggctacacacgtactacaatggtgggtacaaagggcagcgaaaccgcgaggtcgagcgaatctcaaaaaacccatcatagtccggattgcagtctgcaactcgactgcatgaagttggaatcgctagtaatcccggatcagcatgccggggtgaatacgttcccgggccttgtacacaccgcccgtcacaccacgaaagtcggttctacccgaagtcgccggactaacccttgggaggtaggcgcctacggtagggctggtaattggggtg

SEQ ID NO: 1249 - DNA, 1472 bp, Desulfomicrobium norvegicum
aatgaacgctggcggcgtgcctaacacatgcaagtcgtacgagaaaggggcttcggccctgagtagagtggcgcacgggtgagtaacgcgtgggtaatctacccttggatttgggataactctgcgaaagtggagctaataccggatagtctggctttaaataagaagtcggtaaaggatgcctctgcatatgcattcgtccgaggatgagcccgcgtctcattagctagttggtagggtaatggcctaccaaggcaacgatgagtagctggtctgagaggatgatcagccacactggaactgaaacacggtccagactcctacgggaggcagcagtggggaatattgcgcaatgggcgaaagcctgacgcagcaacgccgtgtgagggatgaaggctttcgggtcgtaaacctctgtcggaagggaagaacgggcattggtctaataggcctttgttttgacggtacctttagaggaagcaccggctaactccgtgccagcagccgcggtaatacggagggtgcaagcgttattcggaattactgggcgtaaagcgcacgtaggcggccttgtaagtcaggggtgaaatcccacggctcaaccgtggaactgcctttgaaactgcagggcttgaatcctggagagggtggcggaattcctggtgtaggagtgaaatccgtagatatcaggaggaacaccggtggcgaaggcggccacctggacaggtattgacgctgaggtgcgaaagtgtggggagcaaacaggattagataccctggtagtccacaccgtaaacgatggatactaggtgtcggggacttgatcttcggtgccgtagctaacgcgttaagtatcccgcctggggagtacggtcgcaaggctgaaactcaaagaaattgacgggggcccgcacaagcggtggagtatgtggtttaattcgatgcaacgcgaagaaccttacctaggcttgacatcctgggaatcctgcagagatgcgggagtgcccttcggggaatccagagacaggtgctgcatggctgtcgtcagctcgtgccgtgaggtgttgggttaagtcccgcaacgagcgcaacccctattctcagttgccagcacataatggtgggcactctgtggagactgcccgggttaaccgggaggaaggtggggatgacgtcaagtcatcatggcccttacgcctagggctacacacgtactacaatggtgggtacaaagggcagcgaaaccgcgaggtcgagcgaatctcaaaaaacccatcatagtccggattgcagtctgcaactcgactgcatgaagttggaatcgctagtaatcccggatcagcatgccggggtgaatacgttcccgggccttgtacacaccgcccgtcacaccacgaaagtcggttctacccgaagtcgccggactaacccttgggaggtaggcgcctacggtagggctggtaattggggtg

SEQ ID NO: 1250 - DNA, 1479 bp, Desulfomonile tiedjei
aacgaacgctggcggcgtgcctaacacatgcaagtcgtacgagaaacatatccttcggggtatggagtaaagtggcgcacgggtgagtaacacgtgggtaacctgccctatggttcgggataactggccgaaaggcccgctaataccggatgagaccacatgagctccggctcaaggggtcaaagtcggcctctcgacgaagccgatgccaaaggatgggctcgcggaccattagcttgttggtgaggtaacggctcaccaaggccgagatggttagctggtctgagaggatgatcagccacactggaactgagacacggtccagactcctacgggaggcagcagtgaggaatattgcgcaatggaggaaactctgacgcagcaacgccgcgtgggtgaagaaggctttcgggttgtaaagccctgtcaggcgggaagaaacctttgcggacgaatagtccgtgaaactgacggtaccgccaaaggaagcaccggctaactccgtgccagcagccgcggtaagacggagggtgcaagcgttgttcggaatcactgggcgtaaagcgcgtgtaggcggttcgataagtcgaatgtgaaagcccgaggctcaacctcggaagtgcattcgaaactgtcgggcttgagtacgggagagggaagtggaattcctggtgtagaggtgaaattcgtagatatcaggaggaacaccggtggcgaaggcggcttcctggaccgatactgacgctgagacgcgaaagcgtggggagcaaacaggattagataccctggtagtccacgccgtaaacggtgagcactaggtgtagcgggtattgacccctgctgtgccgcagctaacgcattaagtgctccgcctggggagtacggtcgcaagattaaaactcaaaggaattgacgggggcccgcacaagcggtggagcatgtggtttaattcgatgcaacgcgaagaaccttacctgggcttgaaatcgcccggacagtcgtggaaacacgatctccttcgggccgggtgacaggtgctgcatggctgtcgtcagctcgtgtcgtgagatgttgggttaagtcccgcaacgagcgcaacccctgcctttagttgccatcattaagttgggaactctaaagggactgccggtgttaaaccggaggaaggtggggacgacgtcaagtcctcatggcccttatgtccagggctacacacgtgctacaatggaccgtacaaagggctgcaaacctgtgaaggggagcaaatcccaaaaaacggttctcagttcggattggagtctgcaactcgactccatgaagttggaatcgctagtaatcgcggatcagcatgccacggtgaatacgttcccgggccttgtacacaccgcccgtcacaccacgaaagttgactgcaccagaagtcgctgggctaacccgcaagggaggcaggcgcctaaggtgtggttgatgattggggtg

SEQ ID NO: 1251 - DNA, 1431 bp, Desulfonema ishimotonii
aatgaacgctggcggcgtgcttaacacatgcaagtcgcacgagaacaccctgcctcggcggggtaagtaaagtggcgcacgggtgagtaacgcgtgggtaatctgtctccgggtccgggataacgttgcgaaagcgacgctaataccggataacattcccgtgaccccggtcacggggatcaaaggtggcctctgtatacaagctaccgcctgggggtgaacccgcgtcccattagcttgtcggtggggtaacggcctaccgaggcgacgatgggtagctggtctgagaggatgatcagccacaccggaactggaacacggtccggactcctacgggaggcagcagtgaggaattttgcgcaatgggggaaaccctgacgcagcaacgccgcgtgagtgatgaaggccctcgggtcgtaaagctctgtcatgtgggaagaacctggggacggccaatacccgttcccactgacggtaccacagaaggaagcaccggctaactccgtgccagcagccgcggtaatacggagggtgcaagcgttattcggaattattgggcgtaaagagcgcgtaggcggcctttcaagtcagatgtgaaatcccgtggcttaaccatggaagtgcatttgatactgggaggcttgagtatgggagagggaaacggaattcctggtgtagcggtgaaatgcgtagatatcaggaggaacaccggtggcgaaggcggtttcctggaccaatactgacgctgaggcgcgaaggcgtggggagcaaacaggattagataccctggtagtccacgcagtaaacggtgatcactaggtgtagcgggtattgacccctgctgtgccggagcaaacgcattaagtgatccgcctggggagtacggtcgcaagattaaaactcaaaggaattgacgggggcccgcacaagcggtggagcatgtggtttaattcgacgcaacgcgcagaaccttacctggatttgacatcccgggaattttccggagacggagaagtgcccttcggggagcccggagacaggtgctgcatggctgtcgtcagctcgtgtcgtgagatgttgggttaagtcccgcaacgagcgcaacccctgtcttcagttaccatcattaggttggggactctgaagatactgccccggttaacggggaggaaggtggggatgacgtcaagtcctcatggcctttatgtccagggctacacacgtgctacaatgggcggtacaaagggtagcgatctcgcgagagcaagccaatcccataaagccgtccccagttcggatcggagtctgcaacccgactccgtgaagccggaatcgctagtaatcgcggatcagcatgccgcggtgaatacgttcccgggccttgtacacaccgcccgtcacaccatgagagtcggttgtaccagaagtcgt

SEQ ID NO: 1252 - DNA, 1465 bp, Desulforhopalus singaporensis
aacgaacgctggcggcgtgcttaacacatgcaagtcgaacgcgaaagtttttcttcggagaaacgagtagagtggcgcacgggtgagtaacgcgtaagttatctaccccttcatctggaataactcaccgaaaggtgtgctaataccggatacgctggaaacaggaaaggtggcctcttttaagctaccgtggagggatgagcttgcgtaccattagctagttggtagggtaatggcctaccaaggcgacgatggttagcgggtctgagaggatgatccgccacactggaactggaacacggaccagactcctacgggaggcagcagtgaggaatattgcgcaatgggggaaaccctgacgcagcgacgccgcgtggatgatgaaggcctttgggtcgtaaaatcctgtcagatggaaagaaatgcacggtggttaatacccatcgtgtttgacggtaccatcaaaggaagcaccggctaactccgtgccagcagccgcggtaatacggagggtgcaagcgttgttcggaattactgggcgtaaagcgcgcgtaggtggctgtttaagtcagatgtgaaagtccacggctcaaccgtggaagtgcatttgaaactggacagcttgagtactggagggggtagtggaattcccggtgtagaggtgaaattcgtagatatcgggaggaataccggtggcgaaggcgactacctggccagatactgacactgaggtgcgaaagcgtggggagcaaacaggattagataccctggtagtccacgccgtaaacgatgtcaactaggtgttgggatggttaatcatctcattgccgtagctaacgcattaagttgaccgcctggggagtacggtcgcaagattaaaactcaaaggaattgacgggggcccgcacaagcggtggagtatgtggtttaattcgacgcaacgcgcagaaccttacctggtcttgacatcccgagaatcctgtggaaacacgggagtgcctctttgaggaattcggtgacaggtgctgcatggctgtcgtcagctcgtgtcgtgagatgttgggttaagtcccgcaacgagcgcaacccttgtctttagttgccagcattaggttgggcactctaaagagactgccggtgtcaaaccggaggaaggtggggatgacgtcaagtcctcatggcctttatgatcagggctacacacgtactacaatggcatatacagagggcagcgacatcgcgaggtgaagcgaatccctaaactatgtctcagtccggattggagtctgcaactcgactccatgaagttggaatcgctagtaatcgcggatcagcatgccgcggtgaatacgttcccgggccttgtacacaccgcccgtcacaccacgggagttggttgtaccagaagcagttgagctaaccttttcggaggcaggctgccaaggtatgattggtaactggggtg

SEQ ID NO: 1253 - DNA, 1657 bp, Desulforudis audaxviator
agagtttgatcctggctcaggacgaacgctggcggcgtgcctaacacatgcaagtcgtgcgattgagaggtgagcatctcacttctcaagagcggcggacgggtgagtaatgcgtgaacaatctaccggcaagactgggacaacaccgggaaactggtgctaataccggataatctccaccggcggcatcgttggtggaggaaagtcggcctctggatatgctggcgcttgtcgatgagttcacgtcccattagcttgttggtggggtaacggcccaccaaggcgacgatgggtagccggcctgagagggtggtcggccacactgggactgagacacggcccagactcctacgggaggcagcagtggggaatcttccgcaatgggcgcaagcctgacggagcgacgccgcgtgagggacgaaggccttcgggttgtaaacctcttttctgggggaagaacgtccggcctgttaatagcgggttgggttgacggtacctcaggaataagccccggctaactacgtgccagcagccgcggtaatacgtagggggcgagcgttgtccggaatcactgggcgtaaagggcgcgtaggcggcttgagaagtcgcaggtgaaatcccgcggctcaaccgtggaactgcctgcgaaaccattgggcttgaggacaggagagggaagcggaattcctggtgtagcggtgaaatgcgtagatatcaggaggaacaccagtggcgaaggcggctttctggcctggtcctgacgctgaggcgcgaaagctaggggagcaaacaggattagataccctggtagtcctagctgtaaacgatgggcactaggtgttggggggttcatacccttcagtgccgtaggtaacccaataagtgccccgcctggggagtacggtcgcaagactgaaactcaaaggaattgacgggggcccgcacaagcggtggagcatgtggtttaattcgatgcaacgcgaagaaccttaccagggtttgacatgtcggtggtacggagtggaaacacgaaggacccttcggggagccggtacaggtggtgcatggttgtcgtcagctcgtgccgtgaggtgttgggttaagtcccgcaacgagcgcaacccttacttctagttgccagcgggttaagccgggcactctagagggactgccgtcgacaaggcggaggaaggtggggatgacgtcaaatcatcatgccctttataccctgggctacacacgtgctacaatggccggtacagcgggaagctaaggcgtgagctggagcaaatcccaaaaagccggtccaagttcggattgcaggctgcaactcgcctgcatgaagtcggaatcgctagtaatcgcaggtcagcatactgcggtgaatgcgttcccgggccttgtacacaccgcccgtcacaccacgaaagtcggcaacacccgaagtcggtgacccaacccgttcggaggttggaggtcagaagttggaggttggactgggaaggacattggggtcgagaggagtttttgaagagggattctgaaagatcctaaaggaatgcccggatctgacatccgatatccggcttccgacttccgaatgggagggagccgcctaaggtggggtcggtgattggggtgaagtcgtaacaaggta

SEQ ID NO: 1254 - DNA, 1444 bp, Desulfosporosinus acididurans
gacgaacgctggcggcgtgcttaacacatgcaagtcgaacggagagaattctaagtttacttagaaggatcttagtggcggacgggtgagtaacgcgtgggtaacctacccaacaaactgggacaacccttggaaacgagggctaataccggatacgcttataggttggcatcaacgtataaggaaaggcggcctctgaatatgctgccgatgatggatggacccgcgtctgattagctagttggtggggtaaaggcctaccaaggcgacgatcagtagccggcctgagagggtgaacggccacactgggactgagacacggcccagactcctacgggaggcagcagtggggaatcttccgcaatggacgaaagtctgacggagcaacgccgcgtgtatgatgaaggtcttcggattgtaaagtactgtttttagggaagaacggtttcttcaggaatatggaggagacatgacggtacctaaggaggaagccccggctaactacgtgccagcagccgcggtaatacgtagggggcgagcgttgtccggaattattgggcgtaaagggcgcgtaggcgggtatttaagtccggtgtgaaagatcagggctcaaccctgagagtgcatcggaaactgggtatcttgaggacaggagaggaaagtggaattccacgtgtagcggtgaaatgcgtagatatgtggaggaacaccagtggcgaaggcgactttctggactgtaactgacgctgaggcgcgaaagcgtggggagcaaacaggattagataccctggtagtccacgccgtaaacgatgagtgctaggtgtagggggtatcgacccctcctgtgccggagttaacacaataagcactccgcctggggagtacggccgcaaggttgaaactcaaaggaattgacgggggcccgcacaagcggtggagcatgtggtttaattcgacgcaacgcgaagaaccttaccagggcttgacatcctctgaaccctttggaaacaagggggtgcctttcggggaacagagagacaggtggtgcatggttgtcgtcagctcgtgtcgtgagatgttgggttaagtcccgcaacgagcgcaacccctgtattcagttgctaacaagtaaggttgagcactctggatagactgccggtgacaaaccggaggaaggtggggatgacgtcaaatcatcatgccccttatgtcctgggctacacacgtgctacaatggccggtacagacggaagcgaagccgtgaggtgaagccaatccgagaaagccggtctcagttcggattgcaggctgcaactcgcctgcatgaagtcggaatcgctagtaatcgcaggtcagcatactgcggtgaatacgttcccgggccttgtacacaccgcccgtcacaccacgaaagtctgcaacacccgaagccggtgaggtaacc

SEQ ID NO: 1255 - DNA, 1490 bp, Desulfosporosinus acidiphilus
gacgaacgctggcggcgtgcctaacacatgcaagtcgaacggaaacaaactctaagtttacttagagtgcgttttagtggcggacgggtgagtaacgcgtgggtaacctgcccataaaaccgggacaactcttggaaacgagggctaataccggatacgcttaagaagcggcatcgctttttaaggaaagatggcctctgaaaatgctatcgcttatggatggacccgcgtctgattagctggttggtggggtaaaggcctaccaaggcgacgatcagtagccggcctgagagggtgaacggccacactgggactgagacacggcccagactcctacgggaggcagcagtggggaatcttccgcaatggacgaaagtctgacggagcaacgccgcgtgtatgatgaaggtcttcggattgtaaagtactgtctttagggaagaacggtctcttcaggaatatggaggagacatgacggtacctaaggaggaagccccggctaactacgtgccagcagccgcggtaatacgtagggggcgagcgttgtccggaattattgggcgtaaagggcgcgtaggcgggtatttaagtccggtgtgaaagatcagggctcaaccctgagagtgcatcggaaactgggtatcttgaggacaggagaggaaagtggaattccacgtgtagcggtgaaatgcgtagatatgtggaggaacaccagtggcgaaggcgactttctggactgtaactgacgctgaggcgcgaaagcgtggggagcaaacaggattagataccctggtagtccacgccgtaaacgatgagtgctaggtgtagggggtatcgacccctcctgtgccggagttaacacaataagcactccgcctggggagtacggccgcaaggttgaaactcaaaggaattgacgggggcccgcacaagcggtggagcatgtggtttaattcgacgcaacgcgaagaaccttaccagggcttgacatcctctgaactctctagaaatagggaggtgcccttcggggagcagagagacaggtggtgcatggttgtcgtcagctcgtgtcgtgagatgttgggttaagtcccgcaacgagcgcaacccctgtatttagttgctaacacgtcaaggtgagcactctagatagactgccggtgacaaaccggaggaaggtggggatgacgtcaaatcatcatgccccttatgtcctgggctacacacgtgctacaatggccggtacagacggaagcgaagccgcgaggtgaagccaatccgagaaagccggtctcagttcggattgcaggctgcaactcgcctgcatgaagtcggaatcgctagtaatcgcaggtcagcatactgcggtgaatacgttcccgggccttgtacacaccgcccgtcacaccacgaaagtctgcaacacccgaagccggtgaggtaacccgcaagggagctagccgtcgaaggtggggccgataattggggtg

SEQ ID NO: 1256 - DNA, 1490 bp, Desulfosporosinus fructosivorans
  misc_feature (51)..(51): n is a, c, g, or t
  misc_feature (54)..(54): n is a, c, g, or t
  misc_feature (164)..(164): n is a, c, g, or t
  misc_feature (166)..(167): n is a, c, g, or t
  misc_feature (201)..(201): n is a, c, g, or t
  misc_feature (203)..(203): n is a, c, g, or t
  misc_feature (1023)..(1023): n is a, c, g, or t
gacgaacgctggcggcgtgcctaacacatgcaagtcgaacggagaatttcnagnagcttgctttgagaaatttttagtggcggacgggtgagtaacgcgtgggtaacctacccataaacccgggacaacccttggaaacgagggctaataccggataatcttanannttggcatcaaggtttaaggaaaggtggcctctgnanatgctaccgattatggatggacccgcgtctgattagctagttggtggggtaaaggcctaccaaggcgacgatcagtagccggcctgagagggtgaacggccacactgggactgagacacggcccagactcctacgggaggcagcagtggggaatcttccgcaatggacgaaagtctgacggagcaacgccgcgtgtatgatgaaggtcttcggattgtaaagtactgtctttggggaagaatgactgatttgaaaatattgagtcagtatgacggtacccaaggaggaagccccggctaactacgtgccagcagccgcggtaatacgtagggggcaagcgttgtccggaattattgggcgtaaagggcgcgtaggcggatagttaagtccggtgtgaaagatcagggctcaaccctgagagtgcatcggaaactggttatcttgaggacaggagaggaaagtggaattcctagtgtagcggtgaaatgcgtagatattaggaggaacaccagtggcgaaggcgactttctggactgtaactgacgctgaggcgcgaaagcgtggggagcaaacaggattagataccctggtagtccacgctgtaaacgatgagtgctaggtgtagagggtatcgaccccttctgtgccgcagttaacacaataagcactccgcctggggagtacggccgcaaggttgaaactcaaaggaattgacgggggcccgcacaagcggtggagcatgtggtttaattcgacgcaacgcgaagaaccttaccagggcttgacatctacagaatccttaggaaactagggagtgccnttcggggagctgtaagacaggtggtgcatggttgtcgtcagctcgtgtcgtgagatgttgggttaagtcccgcaacgagcgcaacccctgtgtttagttgctaacgagtaaggtcgagcactctagacagactgccggtgataaaccggaggaaggtggggatgacgtcaaatcatcatgccccttatgttctgggctacacacgtgctacaatggccagtacagacggaagcgaagccgcgaggtggagcaaatccgagaaagctggtctcagttcggattgcaggctgcaactcgcctgcatgaagtcggaatcgctagtaatcgcaggtcagcatactgcggtgaatacgttcccgggccttgtacacaccgcccgtcacaccacgaaagtctgcaacacccgaagccggtgaggtaacccgtaagggagctagccgtcgaaggtggggccgataattggggtg

SEQ ID NO: 1257 - DNA, 1489 bp, Desulfosporosinus hippei
gacgaacgctggcggcgtgcctaacacatgcaagtcgaacggagaatttgataagcttgcttagaaaaattcttagtggcggacgggtgagtaacgcgtgggtaacctacccataaatccgggacaacccttggaaacgagggctaataccggataatcttagagcttggcatcaaggtttaaggaaagatggcctctgaagatgctatcgattatggatggacccgcgtctgattagctagttggtggggtaaaggcctaccaaggcgacgatcagtagccggcctgagagggtgaacggccacactgggactgagacacggcccagactcctacgggaggcagcagtggggaatcttccgcaatggacgaaagtctgacggagcaacgccgcgtgtatgatgaaggtcttcggattgtaaagtactgtctttggggaagaacggtcgatttgaaaatattgagtcgacatgacggtacccaaggaggaagccccggctaactacgtgccagcagccgcggtaatacgtagggggcaagcgttgtccggaattattgggcgtaaagggcgcgtaggcggattattaagtctggtgtgaaagatcagggctcaaccctgagagtgcatcggaaactggtgatcttgaggacaggagaggaaagtggaattccacgtgtagcggtgaaatgcgtagatatgtggaggaacaccggtggcgaaggcgactttctggactgtaactgacgctgaggcgcgaaagcgtggggagcaaacaggattagataccctggtagtccacgccgtaaacgatgagtgctaggtgtagagggtatcgaccccttctgtgccgcagttaacacaataagcactccgcctggggagtacggccgcaaggttgaaactcaaaggaattgacgggggcccgcacaagcggtggagcatgtggtttaattcgacgcaacgcgaagaaccttaccaaggcttgacatcctacgaatccctaggaaactaaggagtgcccttcggggagcgtagagacaggtggtgcatggttgtcgtcagctcgtgtcgtgagatgttgggttaagtcccgcaacgagcgcaacccctgtatttagttgctaacacgtaatggtgagcactctagatagactgccggtgataaaccggaggaaggtggggatgacgtcaaatcatcatgccccttatgtcttgggctacacacgtgctacaatggccggtacagacggaagcgaagccgcgaggtgaagcaaatccgagaaagccggtctcagttcggattgcaggctgcaactcgcctgcatgaagtcggaatcgctagtaatcgcaggtcagcatactgcggtgaatacgttcccgggccttgtacacaccgcccgtcacaccacgaaagtctgcaacacccgaagccggtgaggtaacccgaaagggagctagccgtcgaaggtggggccgataattggggtg

SEQ ID NO: 1258 - DNA, 1490 bp, Desulfosporosinus lacus
gacgaacgctggcggcgtgcctaacacatgcaagtcgaacggagaatttcaataagtttacttagagaagtttttagtggcggacgggtgagtaacgcgtgggtaacctacccataaagccgggacaacccttggaaacgagggctaataccggataatctttgatgttggcatcaaggttaaaggaaaggtggcctctgaagatgctaccgattatggatggacccgcgtctgattagctagttggtggggtaaaggcctaccaaggcgacgatcagtagccggcctgagagggtgaacggccacactgggactgagacacggcccagactcctacgggaggcagcagtggggaatcttccgcaatggacgaaagtctgacggagcaacgccgcgtgtatgatgaaggtcttcggattgtaaagtactgtctttggggaagaatgactgatttgaaaatattgagtcagtatgacggtacccaaggaggaagccccggctaactacgtgccagcagccgcggtaatacgtagggggcaagcgttgtccggaattattgggcgtaaagggcgcgtaggcggatttttaagtctggtgtgaaagatcagggctcaaccctgagagtgcatcggaaactggagatcttgaggacaggagaggaaagtggaattccacgtgtagcggtgaaatgcgtagatatgtggaggaacaccagtggcgaaggcgactttctggactgtaactgacgctgaggcgcgaaagcgtggggagcaaacaggattagataccctggtagtccacgctgtaaacgatgagtgctaggtgtagagggtatcgaccccttctgtgccgcagttaacacaataagcactccgcctggggagtacggccgcaaggttgaaactcaaaggaattgacgggggcccgcacaagcggtggagcatgtggtttaattcgacgcaacgcgaagaaccttaccaaggcttgacatccacagaatcctaaggaaacttgggagtgcccttcggggagctgtgagacaggtggtgcatggttgtcgtcagctcgtgtcgtgagatgttgggttaagtcccgcaacgagcgcaacccctgtgtttagttgctaacgcgtaatggcgagcactctagacagactgccggtgataaaccggaggaaggtggggatgacgtcaaatcatcatgccccttatgtcttgggctacacacgtgctacaatggccggtacagacggaagcgaagccgcgaggtgaagccaatccgagaaagccggtctcagttcggattgcaggctgcaactcgcctgcatgaagtcggaatcgctagtaatcgcaggtcagcatactgcggtgaatacgttcccgggccttgtacacaccgcccgtcacaccacgaaagtctgcaacacccgaagccggtgaggtaacccgaaagggagctagccgtcgaaggtggggccgatgattggggtg

SEQ ID NO: 1259 - DNA, 1489 bp, Desulfosporosinus meridiei
gacgaacgctggcggcgtgcctaacacatgcaagtcgaacggagaatttgataagcttgcttagaaaaattcttagtggcggacgggtgagtaacgcgtgggtaacctacccataaatccgggacaacccttggaaacgagggctaataccggataatcttaagtcttggcatcaagacttaaggaaagatggcctctgtatatgctatcgattatggatggacccgcgtctgattagctagttggtggggtaaaggcctaccaaggcgacgatcagtagccggcctgagagggtgaacggccacactgggactgagacacggcccagactcctacgggaggcagcagtggggaatcttccgcaatggacgaaagtctgacggagcaacgccgcgtgtatgatgaaggtcttcggattgtaaagtactgtctttggggaagaacggtcgatttgagaatattgagtcgacatgacggtacccaaggaggaagccccggctaactacgtgccagcagccgcggtaatacgtagggggcaagcgttgtccggaattattgggcgtaaagggcgcgtaggcggatttttaagtccggtgtgaaagatcagggctcaaccctgagagtgcatcggaaactgggaatcttgaggacaggagaggaaagtggaattccacgtgtagcggtgaaatgcgtagatatgtggaggaacaccggtggcgaaggcgactttctggactgtaactgacgctgaggcgcgaaagcgtggggagcaaacaggattagataccctggtagtccacgccgtaaacgatgagtgctaggtgtagagggtatcgaccccttctgtgccgcagttaacacaataagcactccgcctggggagtacggccgcaaggttgaaactcaaaggaattgacgggggcccgcacaagcggtggagcatgtggtttaattcgacgcaacgcgaagaaccttaccaaggcttgacatcctacgaatccttaggaaactagggagtgcccttcggggagcgtagagacaggtggtgcatggttgtcgtcagctcgtgtcgtgagatgttgggttaagtcccgcaacgagcgcaacccctgtatttagttgctaacaagtaaggttgagcactctaaatagactgccggtgataaaccggaggaaggtggggatgacgtcaaatcatcatgccccttatgtcttgggctacacacgtgctacaatggccggtacagacggaagcgaagccgcgaggtgaagcaaatccgagaaagccggtctcagttcggattgcaggctgcaactcgcctgcatgaagtcggaatcgctagtaatcgcaggtcagcatactgcggtgaatacgttcccgggccttgtacacaccgcccgtcacaccacgaaagtctgcaacacccgaagccggtgaggtaacccgaaagggagctagccgtcgaaggtggggccgataattggggtg

SEQ ID NO: 1260 - DNA, 1488 bp, Desulfosporosinus orientis
gacgaacgctggcggcgtgcctaacacatgcaagtcgaacggagaattgaataagcttgcttagacaattcttagtggcggacgggtgagtaacgcgtgggtaacctgcccataaagccgggacaacccttggaaacgagggctaataccggataatcttagatcttggcatcaggacttaaggaaagatggcctctgaagatgctatcgattatggatggacccgcgtctgattagctagttggtggggtaaaggcctaccaaggcgacgatcagtagccggcctgagagggtgaacggccacactgggactgagacacggcccagactcctacgggaggcagcagtggggaatcttccgcaatggacgaaagtctgacggagcaacgccgcgtgtatgatgaaggtcttcggattgtaaagtactgtcattggggaagaacggtctttttgaaaatattgaggagacatgacggtacccaaggaggaagccccggctaactacgtgccagcagccgcggtaatacgtagggggcgagcgttgtccggaattattgggcgtaaagggcgcgtaggcggatgcttaagtccggtgtgaaagatcagggctcaaccctgagagtgcatcggaaactgggtatcttgaggacaggagaggaaagtggaattccacgtgtagcggtgaaatgcgtagatatgtggaggaacaccagtggcgaaggcgactttctggactgtaactgacgctgaggcgcgaaagcgtggggagcaaacaggattagataccctggtagtccacgccgtaaacgatgagtgctaggtgtagagggtatcgaccccttctgtgccgcagttaacacaataagcactccgcctggggagtacggccgcaaggttgaaactcaaaggaattgacgggggcccgcacaagcggtggagcatgtggtttaattcgacgcaacgcgaagaaccttaccagggcttgacatcctacgaatcctttggaaacaagggagtgcccttcggggagcgtagagacaggtggtgcatggttgtcgtcagctcgtgtcgtgagatgttgggttaagtcccgcaacgagcgcaacccctgtatttagttgctaacaagtaaggttgagcactctagatagactgccggtgacaaaccggaggaaggtggggatgacgtcaaatcatcatgccccttatgtcctgggctacacacgtgctacaatggccggtacagacggaagcgaagccgcgaggtgaagccaatccgagaaagccggtctcagttcggattgcaggctgcaactcgcctgcatgaagtcggaatcgctagtaatcgcaggtcagcatactgcggtgaatacgttcccgggccttgtacacaccgcccgtcacaccacgaaagtctgcaacacccgaagccggtggggtaacccgcaagggagctagccgtcgaaggtggggccgatgattggggtg

SEQ ID NO: 1261 - DNA, 1490 bp, Desulfosporosinus youngiae
gacgaacgctggcggcgtgcctaacacatgcaagtcgaacggagactttcgaagagtttacttagagaaagtcttagtggcggacgggtgagtaacgcgtgggtaacctacccataaagccgggacaacccttggaaacgagggctaataccggataatcttagggcctggcatcaggctttaaggaaagatggcctctgaatatgctatcgattatggatggacccgcgtctgattagctggttggtggggtaaaggcctaccaaggcgacgatcagtagccggcctgagagggtgaacggccacactgggactgagacacggcccagactcctacgggaggcagcagtggggaatcttccgcaatggacgaaagtctgacggagcaacgccgcgtgtatgatgaaggtcttcggattgtaaagtactgtctttggggaagaacaattaacttgaaaatattgagttagtatgacggtacccaaggaggaagccccggctaactacgtgccagcagccgcggtaatacgtagggggcaagcgttgtccggaattattgggcgtaaagggcgcgtaggcggatttttaagtctggtgtgaaagatcagggctcaaccctgagagtgcatcggaaactggagatcttgaggacaggagaggaaagtggaattccacgtgtagcggtgaaatgcgtagatatgtggaggaacaccagtggcgaaggcgactttctggactgtaactgacgctgaggcgcgaaagcgtggggagcaaacaggattagataccctggtagtccacgccgtaaacgatgagtgctaggtgtagagggtatcgaccccttctgtgccgcagttaacacaataagcactccgcctggggagtacggccgcaaggttgaaactcaaaggaattgacgggggcccgcacaagcggtggagcatgtggtttaattcgacgcaacgcgaagaaccttaccaaggcttgacatcctctgaaccctgtggaaacatgggggtgcccttcggggagcagagagacaggtggtgcatggttgtcgtcagctcgtgtcgtgagatgttgggttaagtcccgcaacgagcgcaacccctgtatttagttgctaacaagtaaagttgagcactctagatagactgccggtgataaaccggaggaaggtggggatgacgtcaaatcatcatgccccttatgtcttgggctacacacgtgctacaatggccggtacagacggaagcgaagccgtgaggtgaagccaatccgagaaagccggtctcagttcggattgcaggctgcaactcgcctgcatgaagtcggaatcgctagtaatcgcaggtcagcatactgcggtgaatacgttcccgggccttgtacacaccgcccgtcacaccacgaaagtctgcaacacccgaagccggtgaggtaacccgaaagggagctagccgtcgaaggtggggccgatgattggggtg

SEQ ID NO: 1262 - DNA, 1469 bp, Desulfotalea psychrophila
aacgaacgctggcggcgtgcttaacacatgcaagtcgaacgcgaacgagtttttcgaaactctagtagagtggcgcacgggtgagtaacgcgtaagtaatctaccctgatatctgggataacaattcgaaaggattgctaataccggatacgttgatttatcaagaaagatggcctcttcatgaaagctattgtatcgggaggagcttgcgtaccattagctagttggtggggtaatggcctaccaaggcgacgatggttagcgggtctgagaggatgatccgccacactggaactgaaacacggaccagactcctacgggaggcagcagtgaggaatattgcgcaatgggggaaaccctgacgcagcgacgccgcgtggatgatgaaggccttcgggtcgtaaaatcctgtcagatgggaagaaatggtaatgagctaatacctcgttactttgacggtaccatcaaaggaagcaccggctaactccgtgccagcagccgcggtaatacggggggtgcaagcgttgttcggaattactgggcgtaaagcgcgcgtaggcggctttttaagtcagatgtgaaagtcctcggctcaaccgaggaagtgcatttgaaactggggagcttgagtactggaggggatggtggaattcccggtgtagaggtgaaattcgtagatatcgggaggaataccggtggcgaaggcgaccatctggccagatactgacgctgaggtgcgaaagcgtggggagcaaacaggattagataccctggtagtccacgccgtaaacgatgtcaactaggtgttggagtggttaatcgcttcattgccggagctaacgcattaagttgaccgcctggggagtacggtcgcaagattaaaactcaaaggaattgacgggggcccgcacaagcggtggagtatgtggtttaattcgacgcaacgcgcagaaccttacctggtcttgacatctcggaaatctcttggaaacaggagagtgcctcttgaggaatccgatgacaggtgctgcatggctgtcgtcagctcgtgtcgtgagatgttgggttaagtcccgcaacgagcgcaacccctgtctctagttgccatcattaagttgggcactctagagagactgccggtgtcaaaccggaggaaggtagggatgacgtcaagtcctcatggcctttatgaccagggctacacacgtactacaatggcatagacaaagggcagcaacacagcgatgtgaagccaatcccataaactatgtctcagtccggattggagtctgcaactcgactccatgaagttggaatcgctagtaatcgtagatcagcatgctacggtgaatacgttcccgggccttgtacacaccgcccgtcacaccacgggagttggttgtaccagaagcagttgagctaacccttcgggggggcaggctgccaaggtatggctggtaactggggtg

SEQ ID NO: 1263 - DNA, 1482 bp, Desulfotignum phosphitoxidans
aatgaacgctggcggcgtgcttaacacatgcaagtcgaacgagaaagggattgcttgcaatcctgagtagagtggcgcacgggtgagtaacacgtagataatctaccttcaagcccgggataacccttcgaaaggatggctaataccggatgcagtttcagtacacaagtgctgagatgaaagattgcctcttcttgaaagcaattgtttggagatgagtttgcgtaccattagcttgttggtggggtaaaagcctaccaaggctgcgatggttagctggtctgagaggatgatcagtcacactggaactggaacacggtccagactcctacgggaggcagcagtgaggaattttgcgcaatgggggaaaccctgacgcagcaacgccgcgtgagtgaagaaggcccttgggtcgtaaagctctgtcaactgggaagaagttgttattgtttaatagatgatagcattgacggtaccagtggaggaagcgccggctaactccgtgccagcagccgcggtaacacggggggcgcaagcgttattcggaattattgggcgtaaagggcgcgtaggcggttctgtcggtcagatgtgaaagcccggggctcaaccctggaagtgcatttgaaacagcagaacttgagtacgggagaggaaagcggaattcctggtgtagaggtgaaattcgtagatatcaggaggaacaccgatggcgaaggcagctttctggaccgatactgacgctgaggcgcgaaggcgtgggtagcgaacaggattagataccctggtagtccacgcagtaaacgatgttcactaggtgtagcgggtattaaaacttgctgtgccgcagtcaacgcattaagtgaaccgcctgggaagtacggtcgcaagactaaaactcaaaggaattgacgggggcccgcacaagcggtggagcatgtggtttaattcgacgcaacgcgaagaaccttacctgggtttgacatcctgtggatctgtaagagattacagagtgccttcgggagcacagagacaggtgctgcatggctgtcgtcagctcgtgtcgtgagatgtttggttaagtccagcaacgagcgcaacccttatcgtcagttgccagcgcgtaatggcgggaactctggcgagactgccccggttaacggggaggaaggtggggatgacgtcaagtcctcatggcccttatatccagggctacacacgtgctacaatggtaggtacaaagggcagcgagcctgcgagggtgagcgaatccttaaagcctatctcagtccggattggagtctgcaactcgactccatgaagttggaatcgctagtaatcgcggatcagcatgccgcggtgaatatgttcccgggccttgtacacaccgcccgtcacaccatggaagttgattatacccgacgtcgctgggctaactgtttacaggggcaggcgcctaaggtatggtcgataactggggtg

SEQ ID NO: 1264 - DNA, 1493 bp, Desulfotomaculum acetoxidans
gacgaacgttggcggcgtgcttaacacatgcaagtcgaacggagttaagaaaagagtttactttttgcttaacttagtggcggacgggtgagtaacgcgtggataatctgcctgtaagacaggaataacgccgggaaaccggtgctaataccggataacctctttttatcgcatggtgaaaagagaaaaggtggcctctttacaatgctgccgcttacagatgaatccgcgtcccattagccagttggtggggtaacggcccaccaaagcgacgatgggtagccggcctgagagggtgatcggccacactggaactgagacacggtccagactcctacgggaggcagcagtggggaatcttccgcaatgggcgaaagcctgacggagcaacgccgcgtgagcgaagaaggtcttcggattgtaaagctctgtgatattggacgaacagatttcttgtaaacagcaaggaaaaatgacggtacaataagaggaagccacggctaactacgtgccagcagccgcggtaatacgtaggtggcaaacgttgtccggaattactgggcgtaaagggcgagtaggtggtttattaagtcagaagtgaaaactccgggctcaacctggagactgcttctgaaactggtagacttgagtgcaggagagggaagtggaattcctagtgtagcggtgaaatgcgtagatattaggaggaacaccagtggcgaaggcgacttcctggcctgtaactgacactgaggcgcgaaagcgtggggatcaaacaggattagataccctggtagtccacgccgtaaacgatgagtgctaggtgtcgggggtatcgaccccctcggtgccacagttaacacaataagcactccgcctggggagtacggtcgcaagactgaaactcaaaggaattgacgggggcccgcacaagcggtggagtatgtggtttaattcgacgcaacgcgaagaaccttaccaaggcttgacatcccgtgacagctgtggaaacacggtttttcaccttcgggtaaacacggagacaggtggtgcatggttgtcgtcagctcgtgtcgtgagatgttgggttaagtcccgcaacgagcgcaacccctacagccagttgccagcacataaaggtgggaactctggcagaactgccgttgacaaaacggaggaaggtggggatgacgtcaaatcatcatgccccttatgtcttgggctacacacgtactacaatggcctgaacagagggaagcgaaactgtgaagtagagccaacccctaaaaacaggtcccagttcggattgtaggctgcaactcgcctacatgaagtcggaatcgctagtaatcgcaggtcagcatactgcggtgaatacgttcccgggccttgtacacaccgcccgtcacaccacgaaagtcggcaacacccgaagccggtgacttaactcgcaagagagagagccgtcgaaggtggggtcggtgattggggtg

SEQ ID NO: 1265 - DNA, 1435 bp, Desulfotomaculum aeronauticum
  misc_feature (149)..(149): n is a, c, g, or t
  misc_feature (162)..(162): n is a, c, g, or t
  misc_feature (165)..(165): n is a, c, g, or t
tgcttaacacatgcaagtcgaacggagtttaagtggaagcttgcgaaacttaaacttagtggcgcacgggtgagtaacgcgtggataacctgcctgatagactgggataacagctggaaacggctgctaataccggatacgctcgggtngtcgcatggtganttnaggaaagctttagtgctatcagatggatccgcgtcccattagctagttggtggtgtagaggaccaccaaggcgacgatgggtagccggcctgagagggcgaacggccacactgggactgagacacggcccagactcctacgggaggcagcagtggggaatcttccgcaatgggcgaaagcctgacggagcaacgccgcgtgagggaagaaggccttcgggttgtaaacctctgttttcagggaagaaagaaatgacggtacctgaagagtaagccccggctaactacgtgccagcagccgcggtaaaacgtagggggcaagcgttgtccggaattactgggcgtaaagggcgcgtaggtggttcattaagttataggtgaaagttcggggctcaaccccgtgattgcctgtgatactggtggacttgagtgcaggagagggtagcagaattcccagtgtagcggtgaaatgcgtagatattgggaggaataccagtggcgaaggcggctatctggactgtaactgacactgaggcgcgaaagcgtggggagcaaacaggattagataccctggtagtccacgccgtaaacgatgagtgctaggtgttgcgggtatcgacccctgcagtgccgtagttaacacaataagcactccgcctggggagtacggtcgcaagactgaaactcaaaggaattgacgggggcccgcacaagcggtggagtatgtggtttaattcgacgcaacgcgaagaaccttaccagggcttgacatcgcatgaaagctctagagatagagtgttctgccttcgggtagacatgtagacaggtggtgcatggttgtcgtcagctcgtgtcgtgagatgttgggttaagtcccgcaacgagcgcaacccctaacattagttgccagcacgtaaaggtgggaactctaatgtgactgccgttgacaaaacggaggaaggtggggatgacgtcaaatcatcatgccccttatgtcctgggctacacacgtactacaatggccggtacagacggaagcgaagctgtgaagtggagcaaacctgagaaagccggtcccagttcggattgtagtctgcaactcgactacatgaagtcggaatcgctagtaatcgcaggtcagcatactgcggtgaatacgttcccgggccttgtacacaccgcccgtcacaccacgaaagctgacaacacccgaagccggtgacttaaccgtaaggagagagccgtcgaaggtgggttgggtgattggggtg

SEQ ID NO: 1266 - DNA, 1455 bp, Desulfotomaculum arcticum
  misc_feature (168)..(168): n is a, c, g, or t
  misc_feature (178)..(178): n is a, c, g, or t
  misc_feature (818)..(818): n is a, c, g, or t
  misc_feature (1416)..(1416): n is a, c, g, or t
gacgaacgctggcggcgtgcttaacacatgcaagtcgaacggagattagcgaggagtttactttttgctaattttagtggcggacgggtgagtaacgcgtggataacctgcctgatagcctgggataacgccgggaaactggtgctaataccggatacgctccttggnatgcatattntggggaggaaaggagaaatccgctgacagatgggtccgcgtcccattagctagttggaggggtaacggccccccaaggcgacgatgggtagccggcctgagagggcgaccggccacactggaactgagacacggtccagactcctacgggaggcagcagtggggaatcttccgcaatgggcgcaagcctgacggagcaacgccgcgtgagtgatgaaggttttcggattgtaaaactctgtccagggggaagaagaaaatgacggtacccctggaggaagccccggctaactacgtgccagcagccgcggtaaaacgtagggggcgagcgttgtccggaattactgggcgtaaagggcgtgtaggcggcatagtaagtccgtagtgaaacccgacagctcaactgtcggctggctaaggaaactgctaagcttgagtgcagaagaggggagtggaattcccagtgtagcggtgaaatgcgtagatattgggaggaacaccagtggcgaaagcggctccctggcctgtaactgacgctgaggcgcgaaagcgtgggtagcaaacaggattagataccctggtagtccacgccgtaaacgatgggtgctaggtgttgtgggtatcgacccccacagtgccgnagttaacgcaataagcaccccgcctggggagtacggccgcaaggctgaaactcaaaggaattgacgggggcccgcacaagcggtggagtatgtggtttaattcgacgcaacgcgaagaaccttaccaggtcttgacatctcctgccagcctatgaaagtaggtttttaccttcgggtgacaggaagacaggtggtgcatggttgtcgtcagctcgtgtcgtgagatgttgggttaagtcccgcaacgagcgcaacccctacctttagttgccatcaagtgaggttgggcactctaaagggactgccgttgacaaaacggaggaaggtggggatgacgtcaaatcatcatgccctttatgatctgggctacacacgtactacaatggccggtacagacggaagcgaagccgtgaggtggagcgaacccgagaaagccggtcccagttcggattgcaggctgcaactcgcctgcatgaagtcggaatcgctagtaatcgcaggtcagcatactgcggtgaatacgttcccgggccttgtacacaccgcccgtcacaccacgaaagttggcaacacccgaagccggtgagctaacctgtanaggaagcagccgtcgaaggtggggtcggtaattggggtg

SEQ ID NO: 1267 - DNA, 1452 bp, Desulfotomaculum carboxydivorans
gacgaacgctggcggcgtgcctaacacatgcaagtcgaacggggtttagaatgaagcttgcgatttctaaacctagtggcggacgggtgagtaacgcgtggataacctgcctggtagaccgggataacagctggaaacggctgctaataccggatacgctcttggggccgcatggtgccgagaggaaaggggagccgctatcagatggatccgcgtcccattagctggttggtggtgtagcggaccaccaaggcgacgatgggtagccggcctgagagggcgaccggccacactgggactgagacacggcccagactcctacgggaggcagcagtggggaatcttccgcaatgggcgaaagcctgacggagcaacgccgcgtgagggaagaaggccttcgggttgtaaacctctgtcctaaaggaagaaagaaatgacggtactttaggaggaagccccggctaactacgtgccagcagccgcggtaaaacgtagggggcgagcgttgtccggaattactgggcgtaaagggcgcgtaggtggtccattaagttagaggtgaaagtgcggggcttaaccccgtgattgcctctgatactggtggacttgagtgcaggagaggggagcggaattcccagtgtagcggtgaaatgcgtagatattgggaggaacaccagtggcgaaggcggctctctggactgcaactgacactgaggcgcgaaagcgtggggagcaaacaggattagataccctggtagtccacgccgtaaacgatgagtgctaggtgttgcgggtatcgacccctgcagtgccgcagtaaacacaataagcactccgcctggggagtacggtcgcaagactgaaactcaaaggaattgacgggggcccgcacaagcggtggagtatgtggtttaattcgacgcaacgcgaagaaccttaccagggcttgacatcgcgcgacagctctagagatagagggttctgccttagggtagacgcgcagacaggtggtgcatggttgtcgtcagctcgtgtcgtgagatgttgggttaagtcccgcaacgagcgcaacccctaacattagttgccagcgagagagacggggactctaatgtgactgccgttgacaaaacggaggaaggtggggatgacgtcaaatcatcatgccccttatgtcctgggctacacacgtactacaatggccggtacaaacggaggcgaaggcgtgagccggagcaaaactgagaaagccggtctcagttcggattgtagtctgcaactcgactacatgaagtcggaatcgctagtaatcgcaggtcagcatactgcggtgaatacgttcccgggccttgtacacaccgcccgtcacaccacgaaagctgacaacacccgaagccggtgagctaaccctataggaggcagccgtcgaaggtggggtcggtgattggggtg

SEQ ID NO: 1268 - DNA, 1536 bp, Desulfotomaculum ferrireducens
gacgaacgctggcggcgtgcctaacacatgcaagtcgaacggttctcgaggttcgacattcgaggttcgaagttcgagtgaacgcaagcctttggggtccttgacccgaaaggaatgcttgaatcgaaccacgaatttcgaacgtcgaacttcgaggatagtggcggacgggtgagtaacgcgtggataacctgcctggtagaccgggataacagctggaaacggctgctaataccggatacgctcgggagttcgcatgaacactcgaggaaagctttcgtgctatcagatgggtccgcgtcccattagctagttggtggtgtaaaggaccaccaaggcgacgatgggtagccggcctgagagggcgaccggccacactgggactgagacacggcccagactcctacgggaggcagcagtggggaatcttccgcaatgggcgaaagcctgacggagcaacgccgcgtgagggaagaaggccttcgggttgtaaacctctgtttttagggacgaagagatgacggtacctaaagagtaagctccggctaactacgtgccagcagccgcggtaatacgtagggagcgagcgttgtccggaattactgggcgtaaagggcgcgtaggtggtccattaagttactggtgaaagttcggggcttaaccccgtgattgcctgtaatactggtggacttgagtgcaggagaggggagtggaattcccagtgtagcggtgaaatgcgtagatattgggaggaacaccagtggcgaaggcggctctctggactgtaactgacactgaggcgcgaaagcgtggggagcaaacaggattagataccctggtagtccacgccgtaaacgatgagtgctaggtgttgcgggtatcgacccctgcagtgccgtagttaacacaataagcactccgcctggggagtacggtcgcaagactgaaactcaaaggaattgacgggggcccgcacaagcggtggagtatgtggtttaattcgacgcaacgcgaagaaccttaccagggcttgacatcctctgaaaagtatagagatatactcctctgccttatggtagacagagagacaggtggtgcatggttgtcgtcagctcgtgtcgtgagatgttgggttaagtcccgcaacgagcgcaacccctaacattagttgccagcgaggtaggtcgggaactctaatgtgactgccgttgacaaaacggaggaaggtggggatgacgtcaaatcatcatgccccttatgtcctgggctacacacgtactacaatggccggtacagacggaggcgaagctgtgaagcggagcaaaactgagaaagccggtcccagttcggattgtagtctgcaactcgactacatgaagtcggaatcgctagtaatcgcaggtcagcatactgcggtgaatacgttcccgggccttgtacacaccgcccgtcacaccacgaaagctgacaacacccgaagccggtgacttaaccgcaaggagagagccgtcgaaggtggggttggtgattggggtg

SEQ ID NO: 1269 - DNA, 1501 bp, Desulfotomaculum hydrothermale
gacgaacgctggcggcgtgcctaacacatgcaagtcgaacggttttcgaggttcgacattcgaggttcgaagttcgagtaaaagcaaatcgaacttcgaatttcgaacgtcgaacttcgagaatagtggcgcacgggtgagtaacgcgtggataacctgcctggtagaccgggataacagctggaaacggctgctaataccggatacgctctgactgtcgcatggcagtgagaggaaagaattatcgctatcagatgggtccgcgtcccattagctggttggtggtgtaagagaccaccaaggcgacgatgggtagccggcctgagagggcgaccggccacactgggactgagacacggcccagactcctacgggaggcagcagtggggaatcttccgcaatgggcgaaagcctgacggagcaacgccgcgtgagggaagaaggccttcgggttgtaaacctctgtcttcaaggaagaatagatgacggtacttggagaggaagccccggctaactacgtgccagcagccgcggtaaaacgtagggggcgagcgttgtccggaattactgggcgtaaagggcgcgtaggtggttcattaagtcagaggtgaaagttcggggctcaaccccgtgattgcctctgatactggtggacttgagtgcaggagaggggagcggaattcccagtgtagcggtgaaatgcgtagatattgggaggaacaccagtggcgaaggcggctctctggactgtaactgacactgaggcgcgaaagcgtggggagcaaacaggattagataccctggtagtccacgccgtaaacgatgagtgctaggtgttggtggtatcgaccccaccagtgccgcagttaacacaataagcactccgcctggggagtacggtggcaacactgaaactcaaaggaattgacgggggcccgcacaagcggtggagtatgtggtttaattcgacgcaacgcgaagaaccttaccagggcttgacatcgcctgacagctgtagagatacagtgttcaaccttcgggttgacaggtagacaggtggtgcatggttgtcgtcagctcgtgtcgtgagatgttgggttaagtcccgcaacgagcgcaacccctaacattagttgccagcgagtgaagtcgggaactctaatgtgactgccgttgacaaaacggaggaaggtggggatgacgtcaaatcatcatgccccttatgtcctgggctacacacgtactacaatggccggtacagacggaagcgaagccgtgaggcggagcgaaaccgagaaagccggtctcagttcggattgtagtctgcaactcgactacatgaagtcggaatcgctagtaatcgcaggtcagcatactgcggtgaatacgttcccgggccttgtacacaccgcccgtcacaccacgaaagctgacaacacccgaagccggtgagctaaccgcaaggaggcagccgtcgaaggtggggttggtgattggggtg

SEQ ID NO: 1270 - DNA, 1501 bp, Desulfotomaculum kuznetsovii
gacgaacgctggcggcgtgcctaacacatgcaagtcgagcgctcttggaggttggaggttagaggttagaagttggattaagaaggaattcggcggaggcgaattccaacaaggtccaacatctaatttccaacttccaacctccaagggagcggcggacgggtgagtaacgcgtggataacctgcccattagaccgggataacgccgggaaactggcgctaataccggatacgctccttgagccgcatggcacgaggaggaaaggggtaacccgctaatggatgggtccgcgtcccattagctagatggtggggtaacggcctaccatggcgacgatgggtagccggcctgagagggtgaccggccacactgggactgagatacggcccagactcctacgggaggcagcagtggggaatcttccgcaatgggcgaaagcctgacggagcgacgccgcgtgagcgaggaaggccttcgggtcgtaaagctctgttctgggggaagaagagggtgacggtaccccaggaggaagccccggctaactacgtgccagcagccgcggtaagacgtagggggcgagcgttgtccggaattactgggcgtaaagggcgcgtaggcggctcaagaagtcaggggtgaaataccgcagctcaactgcgggggtgcctctgaaaccattgggcttgagggcaggagaggggagtggaattcccggtgtagcggtgaaatgcgtagatatcgggaggaacaccagtggcgaaggcggctctctggcctggccctgacgctgaggcgcgaaagcgtggggagcaaacaggattagataccctggtagtccacgctgtaaacgatgggtgctaggtgttggggggataggacccttcagtgccgtagcaaacgcaataagcaccccgcctggggagtacggccgcaaggctgaaactcaaaggaattgacgggggcccgcacaagcggtggagcatgtggtttaattcgacgcaacgcgaagaaccttaccagggcttgacatcccctgacggccgtggaaacacggatttcacgggagtaatctcgtgacagggagacaggtggtgcatggttgtcgtcagctcgtgtcgtgagatgttgggttaagtcccgcaacgagcgcaacccctacggttagttgctaacgggtaaagccgagcactctagccggactgccgttgacaaaacggaggaaggtggggatgacgtcaaatcatcatgccccttatgtcctgggctacacacgtgctacaatggccggtacaaagggcagcgaacccgcgagggggagcgaatcccaaaaagccggtctcagttcggattgcaggctgcaactcgcctgcatgaagtcggaatcgctagtaatcgcaggtcagcatactgcggtgaatacgttcccgggccttgtacacaccgcccgtcacaccacgaaagccgacaacacccgaagccggtgagctaacccagcactca

SEQ ID NO: 1271 - DNA, 1453 bp, Desulfotomaculum nigrificans
gacgaacgctggcggcgtgcctaacacatgcaagtcgaacggggtttagaatgaagcttgcgatttctaaacctagtggcggacgggtgagtaacgcgtggataacctgcctggtagaccgggataacagctggaaacggctgctaataccggatacgctcttggggccgcatggtgccgagaggaaaggggagccgctatcagatggatccgcgtcccattagctggttggtggtgtagcggaccaccaaggcgacgatgggtagccggcctgagagggcgaccggccacactgggactgagacacggcccagactcctacgggaggcagcagtggggaatcttccgcaatgggcgaaagcctgacggagcaacgccgcgtgagggaagaaggccttcgggttgtaaacctctgtcctaaaggaagaaagaaatgacggtactttaggaggaagccccggctaactacgtgccagcagccgcggtaaaacgtagggggcgagcgttgtccggaattactgggcgtaaagggcgcgtaggtggtccattaagttagaggtgaaagtgcggggcttaaccccgtgattgcctctgatactggtggacttgagtgcaggagaggggagcggaattcccagtgtagcggtgaaatgcgtagatattgggaggaacaccagtggcgaaggcggctctctggactgcaactgacactgaggcgcgaaagcgtggggagcaaacaggattagataccctggtagtccacgccgtaaacgatgagtgctaggtgttgcgggtatcgacccctgcagtgccgcagtaaacacaataagcactccgcctggggagtacggtcgcaagactgaaactcaaaggaattgacgggggcccgcacaagcggtggagtatgtggtttaattcgacgcaacgcgaagaaccttaccagggcttgacatcgcgcgacagctctagagatagagggttctgccttagggtagacgcgcagacaggtggtgcatggttgtcgtcagctcgtgtcgtgagatgttgggttaagtcccgcaacgagcgcaacccctaacattagttgccagcgagagagacggggactctaatgtgactgccgttgacaaaacggaggaaggtggggatgacgtcaaatcatcatgccccttatgtcctgggctacacacgtactacaatggccggtacaaacggaggcgaaggcgtgagccggagcaaaactgagaaagccggtctcagttcggattgtagtctgcaactcgactacatgaagtcggaatcgctagtaatcgcaggtcagcatactgcggtgaatacgttcccgggccttgtacacaccgcccgccacaccacgaaagctgacaacacccgaagccggtgagctaactcgaaagagaggcagccgtcgaaggtggggtcggtgattggggtg

SEQ ID NO: 1272 - DNA, 1347 bp, Desulfotomaculum putei
  misc_feature (2)..(2): n is a, c, g, or t
  misc_feature (39)..(39): n is a, c, g, or t
  misc_feature (164)..(164): n is a, c, g, or t
  misc_feature (191)..(191): n is a, c, g, or t
  misc_feature (244)..(244): n is a, c, g, or t
  misc_feature (253)..(253): n is a, c, g, or t
  misc_feature (348)..(348): n is a, c, g, or t
  misc_feature (478)..(478): n is a, c, g, or t
  misc_feature (735)..(735): n is a, c, g, or t
  misc_feature (1299)..(1299): n is a, c, g, or t
gncgaacgctggcggcgtgcctaacacatgcaagtcgancggggtttaagaggaagcttgcgaatcttaaacctagtggcgcacgggtgagtaacgcgtggataacctgcctggtagaccgggataacagctggaaacggctgctaataccggatacgctctgntggacgcatgttcagcagaggaaagcnttagtgctatcagatgggtccgcgtcccattagctagttggtggtgtaagagnccaccaagncgacgatgggtagccggcctgagagggcgaccggccacactgggactgagacacggcccagactcctacgggaggcagcagtggggaatcttccncaatgggcgaaagcctgacggagcaacgccgcgtgagggaagaaggccttcgggttgtaaacctctgtcttcaaggaagaagtaatgacggtacttggagaggaagccccggctaactacgtgccagcanccgcggtaaaacgtagggggcgagcgttgtccggaattactgggcgtaaagggcgcgtaggtggtacattaagtcagaggtgaaagatcggggctcaaccccgagattgcctctgatactggtggacttgagtgcaggagaggggagcggaattcccagtgtagcggtgaaatgcgtagatattgggaggaacaccggtggcgaaggcggctctctggactgtaactgacactgaggcgcgaaagcgtggggagcanacaggattagataccctggtagtccacgccgtaaacgatgagtgctaggtgttggaggtatcgacccctccagtgccgtagttaacacaataagcactccgcctggggagtacggtggcaacactgaaactcaaaggaattgacgggggcccgcacaagcggtggagtatgtggtttaattcgacgcaacgcgaagaaccttaccagggcttgacatcctctgacggttctagagatagggctttcatccttcgggatgacagagagacaggtggtgcatggttgtcgtcagctcgtgtcgtgagatgttgggttaagtcccgcaacgagcgcaccccctaacattagttgccagcgagtaaggtcgggaactctaatgtgactgccgttgacaaaacggaggaaggtggggatgacgtcaaatcatcatgccccttatgtcctgggctacacacgtactacaatggccggtacagacggaagcgaagccgtgaggcggagcaaatctgagaaagccggtcccagttcggattgtagtctgcaactcgactacatgaagtcggnatcgctagtaatcgcaggtcagcatactgcggtgaatacgttcccggg

SEQ ID NO: 1273 - DNA, 1541 bp, Desulfotomaculum reducens
gacgaacgctggcggcgtgcttaacacatgcaagtcgaacggtcttcgaggttcgacattcgaggttcgaattttgagttcgagtaaagcttaagggtcatttaaaagaccccaaagaaatgcttggatcgaatcacgaatttcgaacgtcgaacttcgaagatagtggcgaacgggtgagtaacgcgtggataacctgcctgatagaccgggataacagctggaaacggttgctaataccggatacgcttgcggagtcgcatggctctgtaaggaaagctatcgtgctatcagatggatccgcgtcccattagctagttggtggtgtaacggaccaccaaggcgacgatgggtagccggcctgagagggcgaacggccacactgggactgagacacggcccagactcctacgggaggcagcagtggggaatcttccgcaatgggcgaaagcctgacggagcaacgccgcgtgagggaagaaggccttcgggttgtaaacctctgttttcagggaagaacaaatgacggtacctgaagagtaagctccggctaactacgtgccagcagccgcggtaatacgtagggagcgagcgttgtccggatttactgggcgtaaagggcgcgtaggtggtgcattaagttagaggtgaaagttcggggctcaaccccgtgattgcctctgatactggtggacttgagtgcaggagaggggagcagaattcccagtgtagcggtgaaatgcgtagatattgggaggaataccagtggcgaaggcggctctctggactgtaactgacactgaggcgcgaaagcgtggggagcgaacaggattagataccctggtagtccacgccgtaaacgatgagtgctaggtgttgcgggtatcgacccctgcagtgccgcagtaaacacaataagcactccgcctggggagtacggtcgcaagactgaaactcaaaggaattgacgggggcccgcacaagcggtggagtatgtggtttaattcgacgcaacgcgaagaaccttaccagggcttgacatcctacgaaactcatagagatatgagccttatccttcgggataacgtagagacaggtggtgcatggttgtcgtcagctcgtgtcgtgagatgttgggttaagtcccgcaacgagcgcaacccctaacattagttgccagcacgtaaaggtgggaactctaatgtgactgccgttgacaaaacggaggaaggtggggatgacgtcaaatcatcatgccccttatgtcctgggctacacacgtactacaatggccggtacagacggaagcgaagccgtgaggtggagcaaacctgagaaagccggtcccagttcggattgtagtctgcaactcgactacatgaagtcggaatcgctagtaatcgcaggtcagcatactgcggtgaatacgttcccgggccttgtacacaccgcccgtcacaccacgaaagttgacaacacccgaagccggtgagctaaccgcaaggaggcagccgtcgaaggtggggccgatgattggggtg

SEQ ID NO: 1274 - DNA, 1452 bp, Desulfotomaculum ruminis
gacgaacgctggcggcgtgcttaacacatgcaagtcgaacggagtttaaaatgaaacctagtgatttttaaacttagtggcggacgggtgagtaacgcgtggataacctgccggatagaccgggataacagttggaaacgactgctaataccggatacgctcctaggaacgcatgttctaaggaggaaagatttatcgctaaccgatggatccgcgtcccattagctagttggaggtgtaacggacccccaaggcgacgatgggtagccggcctgagagggcgaacggccacactgggactgagacacggcccagactcctacgggaggcagcagtggggaatcttccgcaatgggcgaaagcctgacggagcaacgccgcgtgagggaagaaggctttcgggttgtaaacctctgtcttaagggaagaacaaaatgacggtaccttgagaggaagccccggctaactacgtgccagcagccgcggtaaaacgtagggggcgagcgttgtccggaattactgggcgtaaagggcgcgtaggtggtgcattaagttagaggtgaaagtgcggggcttaaccccgtgaggcctctgatactggtggacttgagtgcaggagaggggagcagaattcccagtgtagcggtgaaatgcgtagatattgggaggaataccagtggcgaaggcggctctctggactgtaactgacactgaggcgcgaaagcgtggggagcgaacaggattagataccctggtagtccacgccgtaaacgatgagtgctaggtgttgggggtatcgacccccccagtgccgtagttaacacaataagcactccgcctggggagtacggtcgcaagactgaaactcaaaggaattgacgggggcccgcacaagcggtggagtatgtggtttaattcgacgcaacgcgaagaaccttaccagggcttgacatcctctgaaaagtatagagatatactccttgcccttcggggtaacagagagacaggtggtgcatggttgtcgtcagctcgtgtcgtgagatgttgggttaagtcccgcaacgagcgcaacccctaacattcgttgccagcgagtaatgtcgggaactcgaatgtgactgccgttgacaaaacggaggaaggtggggatgacgtcaaatcatcatgccccttatgtcctgggctacacacgtactacaatggccggtacagacggaagcgaagctgtgaagtgaagcaaatctgagaaagccggtcccagttcggattgtagtctgcaactcgactacatgaagtcggaatcgctagtaatcgcaggtcagcatactgcggtgaatacgttcccgggccttgtacacaccgcccgtcacaccacgaaagctgacaacacccgaagccggtgacttaaccgcaaggagagagccgtcgaaggtggggttggtgattggggtg

SEQ ID NO: 1275 - DNA, 1471 bp, Desulfovibrio carbinolicus
attgaacgctggcggcgtgcttaacacatgcaagtcgtgcgagaaaggggacttcgttccctgagtagagcggcgcacgggtgagtaacgcgtggattatctacccagatattcgggataacggcgggaaactgccgctaataccggatacgctccaatttcggttgggggaaaggcggcctctgcttgcaagctgtcgtatctggatgagtccgcgtcccattagcttgttggcggggtaatggcccaccaaggctacgatgggtagctggtctgagaggatgatcagccacactggaactgaaacacggtccagactcctacgggaggcagcagtggggaatattgcgcaatgggggaaaccctgacgcagcgacgccgtgtgagggaagaaggctttcgggtcgtaaacctctgtcgggagggaagaaccttccaggtctgaataagccctggaactgacggtacctccaaaggaagcaccggctaactccgtgccagcagccgcggtaatacggagggtgcaagcgttaatcggaatcactgggcgtaaagcgcgcgtaggccgccttttaagtcggacgtgaaagccctcggctcaaccgaggaactgcgttcgaaactgggaggcttgagtcctggagagggtggcggaattccgggtgtaggagtgaaatccgtagatatccggaggaacaccggtggcgaaggcggccacctggacaggtactgacgctgaggcgcgaaagcgtggggagcaaacaggattagataccctggtagtccacgctgtaaacgatggatgctaggtgtcggggagcgatcttcggtgccgcagttaacgcattaagcatcccgcctggggagtacggtcgcaaggctgaaactcaaaggaattgacgggggcccgcacaagcggtggagtatgtggtttaattcgatgcaacgcgaagaaccttacctgggtttgacatcccgcgaatcctcccgaaaaggaggagtgcccttcggggagcgcggtgacaggtgctgcatggctgtcgtcagctcgtgccgtgaggtgttgggttaagtcccgcaacgagcgcaacccttgtctttagttgccagcgagtaatgtcgggcactctagagagaccgcctcggtcaacggggaggaaggtggggacgacgtcaagtcatcatggcccttacgcccagggctacacacgtactacaatggtgggtacaatgggctgcgagaccgcaaggtggagccaatcccaaaaaacccatcccagtccggatcggggtctgcaactcgaccccgtgaagtcggaatcgctagtaatcggagatcagcatgctccggtgaatacgttcccgggccttgtacacaccgcccgtcacaccacgaaagttggttctacccgaaagctccgggctaaccgcaaggaggcaggagtctacggtagggccgatgattggggtg

SEQ ID NO: 1276 - DNA, 1471 bp, Desulfovibrio carbinoliphilus
attgaacgctggcggcgtgcttaacacatgcaagtcgtgcgagaaaggggacttcggtccctgagtagagcggcgcacgggtgagtaacgcgtggatcatctgcccaactgttcgggataacggcgggaaactgccgctaataccggataagaatcaatttcggttgattgaaaggcggcctctgcttgcaagctgtcgctgttggatgagtccgcgtcccattagcttgttggtggggtaatggcctaccaaggctacgatgggtagctggtctgagaggatgatcagccacactggaactgaaacacggtccagactcctacgggaggcagcagtggggaatattgcgcaatgggggaaaccctgacgcagcgacgccgtgtgagggaagaaggctttcgggtcgtaaacctctgtcgggaaggaagaaccccttggggccgaacaagccctgaggctgacggtacttccaaaggaagcaccggctaactccgtgccagcagccgcggtaatacggagggtgcaagcgttaatcggaatcactgggcgtaaagcgcgcgtaggcggctttttaagtcggacgtgaaagccctcggctcaaccggggaattgcgttcgaaactgggaagcttgagtcctggagagggtggcggaattccgggtgtaggagtgaaatccgtagatatccggaggaacaccggtggcgaaggcggccacctggacaggtactgacgctgaggcgcgaaagcgtggggagcaaacaggattagataccctggtagtccacgctgtaaacgatggatgctaggtgtcggggagcgatcttcggtgccgcagttaacgcattaagcatcccgcctggggagtacggtcgcaaggctgaaactcaaaggaattgacgggggcccgcacaagcggtggagtatgtggtttaattcgatgcaacgcgaagaaccttacctgggtttgacatcccgcgaatcctcccgaaaaggaggagtgcccttcggggagcgcggtgacaggtgctgcatggctgtcgtcagctcgtgccgtgaggtgttgggttaagtcccgcaacgagcgcaacccttgtctttagttgccagcgagtaatgtcgggcactctagagagaccgcctgcctcaacggggaggaaggtggggacgacgtcaagtcatcatggcccttacgcccagggctacacacgtactacaatggtgggtacaatgggctgcgagaccgcaaggtggagccaatcccaaaaaacccatcccagtccggatcggggtctgcaactcgaccccgtgaagtcggaatcgctagtaatcggagatcagcatgctccggtgaatacgttcccgggccttgtacacaccgcccgtcacaccacgaaagtcggttctacccaaaaccgccaggctaaccctcgggaggcaggcgtctacggtagggctgatgattggggtg

SEQ ID NO: 1277 - DNA, 1471 bp, Desulfovibrio fructosivorans
attgaacgctggcggcgtgcttaacacatgcaagtcgtgcgagaaagggggcttcggtccctgagtagagcggcgcacgggtgagtaacgcgtggatcatctgcccaaatgttcgggataacggcgggaaactgccgctaataccggatacgcttcaatttcggttgaaggaaaggcggcctctgcttgcaagctgtcgcatttggatgagtccgcgtcccattagcttgttggtggggtaacggcctaccaaggctacgatgggtagctggtctgagaggatgatcagccacactggaactgaaacacggtccagactcctacgggaggcagcagtggggaatattgcgcaatgggggaaaccctgacgcagcgacgccgtgtgagggaagaaggctttcgggtcgtaaacctctgtcgggaaggaagaacctcccgggtccgaatagggctcgggactgacggtacttccaaaggaagcaccggctaactccgtgccagcagccgcggtaatacggagggtgcaagcgttaatcggaatcactgggcgtaaagcgcgcgtaggccgccttttaagtcggacgtgaaagccctcggctcaaccggggaattgcgttcgaaactgggaggcttgagtcctggagagggtggcggaattccgggtgtaggagtgaaatccgtagatatccggaggaacaccggtggcgaaggcggccacctggacaggtactgacgctgaggcgcgaaagcgtggggagcaaacaggattagataccctggtagtccacgccgtaaacgatggatgctaggtgtcggggagcgatcttcggtgccgcagttaacgcattaagcatcccgcctggggagtacggtcgcaaggctgaaactcaaaggaattgacgggggcccgcacaagcggtggagtatgtggtttaattcgatgcaacgcgaagaaccttacctgggtttgacatcccgcgaatcctcccgaaacggaggagtgcccttcggggagcgcggtgacaggtgctgcatggctgtcgtcagctcgtgccgtgaggtgttgggttaagtcccgcaacgagcgcaacccttgtccttagttgccagcgagtaatgtcgggcactctagggagaccgcctcggtcaacggggaggaaggtggggacgacgtcaagtcatcatggcccttacgcccagggctacacacgtactacaatggcgggtacaatgggccgcgagaccgcaaggtggagccaatcccaaaaaacccgtcccagtccggatcggggtctgcaactcgaccccgtgaagtcggaatcgctagtaatcggagatcagcatgctccggtgaatacgttcccgggccttgtacacaccgcccgtcacaccacgaaagtcggttctacccaaaaccgtcaggctaaccttcgggaggcagacgtctacggtagggctgatgattggggtg

SEQ ID NO: 1278 - DNA, 1436 bp, Desulfovibrio legallii
attgaacgctggcggcgtgcttaacacatgcaagtcgaacgcgaacggggcttcggccccaagtagagtggcgcacgggtgagtaacgcgtggacaatctgcccttatgactggaataacagttggaaacggctgctaataccggatacgctcaggaagaactttttgaggaaaggcggcctctgcttgcaagctgtcgcataaggatgagtccgcgtcccattagctagttggcggggtaacggcccaccaaggcaacgatgggtagccgatttgagaggatgatcggccacactgggactgaaacacggcccagactcctacgggaggcagcagtggggaatattgcgcaatgggcgaaagcctgacgcagcgacgccgcgtgagggatgaaggttttcggatcgtaaacctctgtcagaagggaagaaactgccgtgctctaatcatcatggcattgacggtaccttcaaaggaagcaccggctaactccgtgccagcagccgcggtaatacggagggtgcaagcgttaatcggaattactgggcgtaaagcgcacgtaggctgttgtgtaagtcaggggtgaaatcccacggctcaaccgtggaactgcctttgatactgcacgacttgaatccgggagagggtggcggaattccaggtgtaggagtgaaatccgtagatatctggaggaacatcagtggtgaaggcggccacctggaccggtattgacgctgaggtgcgaaagcgtggggagcaaacaggattagataccctggtagtccacgccgtagacgatggatgctagatgtcggggggttgccctcggtgtcgtagttaacgcgttaagcatcccgcctggggagtacggtcgcaaggctgaaactcaaagaaattgacgggggcccgcacaagcggtggagtatgtggtttaattcgatgcaacgcgaagaaccttacctgggtttgacatccacggaaccctcttgaaagagaggggtgcccttcggggagccgtgagacaggtgctgcatggctgtcgtcagctcgtgtcgtgagatgttgggttaagtcccgcaacgagcgcaacccctatgcatagttgccagcaagtaacgttgggcactctatgcagactgcccgggttaaccgggaggaaggtggggacgacgtcaagtcatcatggcccttacatccagggctacacacgtactacaatggcgcgcacaaagggaagcgagaccgcgaggtggagccaatcccaaaaaacgcgtcccagtccggattgcagtctgcaactcgactgcatgaagtcggaatcgctagtaattcgagatcagcatgctcgggtgaatgcgttcccgggccttgtacacaccgcccgtcacaccacgaaagtcggttttacccgaagccggtaagccaaccagcaatgg

SEQ ID NO: 1279 - DNA, 1471 bp, Desulfovibrio magneticus
attgaacgctggcggcgtgcttaacacatgcaagtcgtgcgagaaaggggacttcggtccctgagtagagcggcgcacgggtgagtaacgcgtggattatctacccagatattcgggataacggcgggaaactgccgctaataccggatacgctccaatttcggttgggggaaaggcggcctctgcttgcaagctgtcgtatctggatgagtccgcgtcccattagcttgttggcggggtaatggcccaccaaggctacgatgggtagctggtctgagaggatgatcagccacactggaactgaaacacggtccagactcctacgggaggcagcagtggggaatattgcgcaatgggggaaaccctgacgcagcgacgccgtgtgagggaagaaggctttcgggtcgtaaacctctgtcgggagggaagaaccttccaggtctgaataagccctggaactgacggtacctccaaaggaagcaccggctaactccgtgccagcagccgcggtaatacggagggtgcaagcgttaatcggaatcactgggcgtaaagcgcgcgtaggccgccttttaagtcggacgtgaaagccctcggctcaaccgaggaactgcgttcgaaactgggaggcttgagtcctggagagggtggcggaattccgggtgtaggagtgaaatccgtagatatccggaggaacaccggtggcgaaggcggccacctggacaggtactgacgctgaggcgcgaaagcgtggggagcaaacaggattagataccctggtagtccacgctgtaaacgatggatgctaggtgtcggggagcgatcttcggtgccgcagttaacgcattaagcatcccgcctggggagtacggtcgcaaggctgaaactcaaaggaattgacgggggcccgcacaagcggtggagtatgtggtttaattcgatgcaacgcgaagaaccttacctgggtttgacatcccgcgaatcctcccgaaaaggaggagtgcccttcggggagcgcggtgacaggtgctgcatggctgtcgtcagctcgtgccgtgaggtgttgggttaagtcccgcaacgagcgcaacccttgtctttagttgccagcgagtaatgtcgggcactctagagagaccgcctcggtcaacggggaggaaggtggggacgacgtcaagtcatcatggcccttacgcccagggctacacacgtactacaatggtgggtacaatgggctgcgagaccgcaaggtggagccaatcccaaaaaacccatcccagtccggatcggggtctgcaactcgaccccgtgaagtcggaatcgctagtaatcggagatcagcatgctccggtgaatacgttcccgggccttgtacacaccgcccgtcacaccacgaaagttggttctacccgaaagctccgggctaaccgcaaggaggcaggagtctacggtagggccgatgattggggtg

SEQ ID NO: 1280 - DNA, 1473 bp, Desulfovibrio mexicanus
attgaacgctggaggcgtgcttaacacatgcaagtcgtgcgagaaagggacttcggtcctgagtagagcggcgcacgggtgagtaacgcgtgggtaatctcccctggtgatcgggataacagcgggaaactgctgctaataccggataatcttcatgtttaacttcatggggtaaaggtggcctctgcttgcaagctaccacatcaggatgagcccgcgtctcattagctagttggtagggtaatggcctaccaaggctacgatgagtagctggtctgagaggatgaccagccacactgggactggaacacggcccagactcctacgggaggcagcagtggggaatattgcgcaatgggcgaaagcctgacgcagcgacgcctcgtgagggatgaaggtcttcggatcgtaaacctctgtcaagagggaagaaacccttgagttcgaacagggctcttggctgacggtacctctaaaggaagcaccggctaactccgtgccagcagccgcggtaatacggagggtgcaagcgttaatcggaatcactgggcgtaaagcgctcgtaggcggtttggtcagtcagatgtgaaagccctcggcttaaccggggaactgcatttgatactgccagacttgagtgtcggagagggtggcggaattccgggtgtaggagtgaaatccgtagatatccggaggaacaccagtggcgaaggcggccacctggacgacaactgacgctgaggagcgaaagcgtggggagcaaacaggattagataccctggtagtccacgcggtaaacgatggatgctgggtgtcgggggtttaccttcggtgccgcagttaacgcgttaagcatcccgcctggggagtacggtcgcaaggctgaaactcaaaggaattgacgggggcccgcacaagcggtggagtatgtggtttaattcgatgcaacgcgaagaaccttacctaggcttgacatcttgagaaccctccggaaaaggaggggtgcccttcggggagctcaaagacaggtgctgcatggctgtcgtcagctcgtgccgtgaggtgttgggttaagtcccgcaacgagcgcaacccctattgctagttgccagcaagtaatgttgggcactctagtgagactgcccgggtcaaccgggaggaaggtggggatgacgtcaagtcatcatggcccttacgcctagggctacacacgtactacaatggcagatacaaagggcagctaagccgcgaggccatgccaatcccaaaaaatctgtctcagtccggattgcagtctgcaactcgactgcatgaagctggaatcgctagtaatcccggatcagcatgccggggtgaatacgttcccgggccttgtacacaccgcccgtcacaccacgaaagctggttttacccgaagccggcggactaaccgcaagggagtagtcgtcgacggtaggactggtgattggggtg

SEQ ID NO: 1281 - DNA, 1477 bp, Desulfovibrio salexigens
attgaacgctggtggcgtgcttaacacatgcaagtcgtgcgagaacagttccttcgggaacctagtagagcggcgcacgggtgagtaacgcgtggataatctacccagaagactgggataacagttggaaacgactgctaataccggatacgtttcatatttaactttatgagagaaaggtggcctctgtttcaagctatcacttttggatgagtccgcgtttcattagctagttggtaaggtaacggcttaccaaggcgacgatgaatagctggtctgagaggatgaccagccacactgggactggaacacggcccagactcctacgggaggcagcagtggggaatattgcgcaatgggggaaaccctgacgcagcgacgccatgtgagggacgaaggctttcgggtcgtaaacctctgtcaggagggaagaaactgtttgaggctaataccctctttcactgacggtacctccagaggaagcaccggctaactccgtgccagcagccgcggtaatacggagggtgcgagcgttaatcggaatcactgggcgtaaagcgcgcgtaggcggcgcgataagtcaggcgtgaaagccctcggctcaaccggggaattgcgcttgatactgtcgtgcttgagtctcggagagggtggcggaattccaggtgtaggagtgaaatccgtagatatctggaggaacaccagtggcgaaggcggccacctggacgagtactgacgctgaggtgcgaaagcgtggggagcaaacaggattagataccctggtagtccacgccgtaaacgatggatgctagatgtcgggccttaaccggttcggtgtcgaagttaacgcgataagcatcccgcctggggagtacggtcgcaaggctgaaactcaaagaaattgacgggggcccgcacaagcggtggagtatgtggtttaattcgatgcaacgcgaagaaccttacctggacttgacatcctgagaatcctctagaaatagaggagtgcccttcggggaattcagtgacaggtgctgcatggctgtcgtcagctcgtgccgtgaggtgttgggttaagtcccgcaacgagcgcaacccctattgctagttgccatcacataatggtgggcactctagtgagactgcccgggtcaaccgggaggaaggtggggacgacgtcaagtcatcatggcccttacgtccagggctacacacgtactacaatggtggatacaaagggttgccaagccgcgaggccgagccaatcccaaaaagtccatcccagtccggatcgcagtctgcaactcgactgtgtgaagttggaatcgctagtaatcccggatcagcatgccggggtgaatacgttcccgggccttgtacacaccgcccgtcacaccacgaaagctggttctacccgaaatcgacggactaaccctttgggaggtagtcgcctacggtagggctggtgattggggtg

SEQ ID NO: 1282 - DNA, 1471 bp, Desulfovibrio vulgaris
attgaacgctggcggcgtgcttaacacatgcaagtcgcgcgtgaaaggacttcggtccgagtaaagcggcgcacgggtgagtaacgcgtggatgatctacccatgagttgggaataacggctggaaacggtcgctaataccgaatacgctccgatttcaacttcgggggaaaggtggcctctgcttgcaagctactgctcatggatgagtccgcgtcccattagctagttggtggggtaacggcccaccaaggcgacgatgggtagccggtctgagaggatgaccggccacactgggactggaacacggcccagactcctacgggaggcagcagtggggaatattgcgcaatgggcgaaagcctgacgcagcgacgccgcgtgagggatgaaggtcctcggatcgtaaacctctgtcaggagggaagaaccgccacggtgctaatcagccgtggtctgacggtacctccaaaggaagcaccggctaactccgtgccagcagccgcggtaatacggagggtgcgagcgttaatcggaatcactgggcgtaaagcgcacgtaggctgcttggtaagtcaggggtgaaagcccgcggctcaaccgcggaattgcctttgatactgccgagctagagtccgggagagggtagtggaattccaggtgtaggagtgaaatccgtagagatctggaggaacatcagtggcgaaggcgactacctggaccggtactgacgctgaggtgcgaaagcgtggggagcaaacaggattagataccctggtagtccacgccgtaaacgatggatgctaggtgtcggggccttgagcttcggtgccgtagttaacgcgttaagcatcccgcctggggagtacggtcgcaaggctgaaactcaaagaaattgacgggggcccgcacaagcggtggagtatgtggtttaattcgatgcaacgcgaagaaccttacctaggtttgacatccggaaaaccttcccgaaaaggaagggtgcccttcggggaattccgagacaggtgctgcatggctgtcgtcagctcgtgccgtgaggtgttgggttaagtcccgcaacgagcgcaacccctattgccagttgctaccaggtaatgctgggcactctggtgagactgccccggttaacggggaggaaggtggggacgacgtcaagtcatcatggcccttacgcctagggctacacacgtactacaatggcgcatacaaagggcagcgataccgcgaggtggagccaatcccaaaaagtgcgtcccagtccggattgcagtctgcaactcgactgcatgaagttggaatcgctagtaattcgagatcagcatgctcgggtgaatgcgttcccgggccttgtacacaccgcccgtcacaccacgaaagttggttttacccgacaccggtgagctaaccagcaatggaggcagccgtctacggtagggccgatgattggggtg

SEQ ID NO: 1283 - DNA, 1491 bp, Desulfurella acetivorans
aatgaacgctggcggcgtgcctaacacatgcaagtcgtacgcgaaagaagggcaaccttcgagtaaagtggcgcacgggtgagtaacacgtggataacctgccccaaagtctgggataacgtgccgaaaggtgcgctaataccggatacctttgtgtctcacaagaggtataaagaaaggaggcctctgcttgcaagctttcgctttgggatgggtccgcggcctatcaggtagttggtagggtaacggcctaccaagcctacgacgggtagctggtctgagaggacgatcagccacattgggactgagacacggcccagactcctacgggaggcagcagtggggaatattgggcaatgggagaaatcctgacccagcaacgccgcgtggaggatgaaggccttcgggttgtaaactcctgtcagcagggaaaaagattgcaaaagctaataccttttgcagtttgatggtacctgctaaggaagcaccggctaactacgtgccagcagccgcggtaatacgtagggtgcaagcgttattcggaatcactgggcgtaaagggcgcgcaggcggttttgtaagtctaaagtgaaatccttgggcttaacccaggggctgctttagatactgcaaaactcgagttcgggaaaagcaagcggaattcctggtgaaggggtgaaatccgtagatatcaggaagaacaccagtggcgaaagcggcttgctagaacgcaactgacgcttaggcgcgaaagcgtggggagcaaacaggattagataccctggtagtccacgccctaaacgatggatgttaggcgttgggaagtacacttcccagtgccgtaagctaacgcgttaaacatcccgcctggggagtacggccgcaaggttaaaactcaaaggaattgacgggggcccgcacaagcggtggagcatgtggtttaattcgaaggtacacgaagaaccttacctgggcttgacatgctagtagtaggagcccgaaagggtaacgattcttgccttcgggcaagaaagctagcacaggtgctgcatggctgtcgtcagctcgtgtcgtgagatgttgggttaagtcccgcaacgagcgcaaccctcggcattagttgctaacaggttatgctgagcactctaatgcgaccgccggggataacccggaggaaggtggggatgacgtcaagtcatcatggcccttatgtccagggctacacacgtgctacaatgggatgtacaatgggttgcaataccgcgaggtggagctaatccctaaagcatcccacagttcggattgcactctgcaactcgagtgcatgaagctggaatcgctagtaatcaccggtcagctatacggtggtgaatacgttcccgggccttgtacacaccgcccgtcacaccatgggagttgattctactgtaagacggtaggctaacccgttaagggaggcagccgttcatggtagggtcagcgaccggggtg

SEQ ID NO: 1284 - DNA, 1491 bp, Desulfurella amilsii
aatgaacgctggcggcgtgcttaacacatgcaagtcgtacgtgaaagaagggcaaccttcaagtaaagtggcgcacgggtgagtaacacgtggataacctgccccaaagtctgggataacgcgccgaaaggtgcgctaataccggatacctttatgcctcataagaggtataaagaaaggaggcctctgcttgcaagcttctgctttgggatggatccgcggcctatcaggtagttggtagggtaatggcctaccaagcctacgacgggtagctggtctgagaggacgatcagccacattgggactgagacacggcccagactcctacgggaggcagcagtggggaatattgggcaatgggaaaaatcctgacccagcaacgccgcgtggaggactaaggccttcgggttgtaaactcctgtcagcagggaaaaaggttataagagctaataccttttatagcttgatggtacctgcagaggaagcaccggctaactacgtgccagcagccgcggtaatacgtagggtgcaagcgttattcggaatcactgggcgtaaagggcgcgcaggcggtcttgtaagtctaaagtgaaatcctttgggcttaacccatgggctgctttagatactgcaaaactcgagttcgggaaaaagcaagcggaattcctggtgaaggggtgaaatccgtagatatcaggagaacaccagtggcgaaagcggcttgctagaacgcaactgacgcttaggcgcgaaagcgtggggagcaaacaggattagataccctggtagtccacgccctaaacgatggatgttaggcgttgggaagtacacttctcagtgccgtaagctaacgcgttaaacatcccgcctggggagtacggtcgcaagattaaaactcaaaggaattgacgggggcccgcacaagcggtggagcatgtggtttaattcgaaggtacacgaagagccttacctgggtttgacatgctagtagtaggagctcgaaagggtaacgattcttgtcttcgggcaagaaagctagcacaggtgctgcatggctgtcgtcagctcgtgtcgtgagatgttgggttaagtcccgcaacgagcgcaaccctcggcattagttgctaacaggttatgctgagcactctaatgcggccgccggggataacctggaggaaggtggggatgacgtcaagtcatcatggcccttatgtccagggctacacacgtgctacaatgggatgtacaatgggttgcaataccgcgaggtggagctaatccccaaagcatcccacagttcggattgcactctgcaactcgagtgcatgaagctggaatcgctagtaatcaccggtcagctatacggtggtgaatacgttcccgggccttgtacacaccgcccgtcacaccatgggagttgactttactgtaagacggtaggctaacctgtaagggaggcagccgttcatggtagggccagcgaccggggtg

SEQ ID NO: 1285 - DNA, 1491 bp, Desulfurella multipotens
aatgaacgctggcggcgtgcctaacacatgcaagtcgtacgcgaaagaagggcaaccttcgagtaaagtggcgcacgggtgagtaacacgtggataacctgccccaaagtctgggataacgtgccgaaaggtgcgctaataccggatacctttgtgcctcacaagaggtataaagaaaggaggcctctgcttgcaagctttcgctttgggatgggtccgcggcctatcaggtagttggtagggtaacggcctaccaagcctacgacgggtagctggtctgagaggacgatcagccacattgggactgagacacggcccagactcctacgggaggcagcagtggggaatattgggcaatgggagaaatcctgacccagcaacgccgcgtggaggatgaaggccttcgggttgtaaactcctgtcagcagggaaaaagattgcaaaagctaataccttttgcagtttgatggtacctgctaaggaagcaccggctaactacgtgccagcagccgcggtaatacgtagggtgcaagcgttattcggaatcactgggcgtaaagggcgcgcaggcggttttgtaagtctaaagtgaaatccttgggcttaacccaggggctgctttagatactgcaaaactcgagttcgggaaaagcaagcggaattcctggtgaaggggtgaaatccgtagatatcaggaagaacaccagtggcgaaagcggcttgctagaacgcaactgacgcttaggcgcgaaagcgtggggagcaaacaggattagataccctggtagtccacgccctaaacgatggatgttaggcgttgggaagtacacttcccagtgccgtaagctaacgcgttaaacatcccgcctggggagtacggccgcaaggttaaaactcaaaggaattgacgggggcccgcacaagcggtggagcatgtggtttaattcgaaggtacacgaagaaccttacctgggcttgacatgctagtagtaggagcccgaaagggtaacgattcttgccttcgggcaagaaagctagcacaggtgctgcatggctgtcgtcagctcgtgtcgtgagatgttgggttaagtcccgcaacgagcgcaaccctcggcattagttgctaacaggttatgctgagcactctaatgcgaccgccggggataacccggaggaaggtggggatgacgtcaagtcatcatggcccttatgtccagggctacacacgtgctacaatgggatgtacaatgggttgcaataccgcgaggtggagctaatccctaaagcatcccacagttcggattgcactctgcaactcgagtgcatgaagctggaatcgctagtaatcaccggtcagctatacggtggtgaatacgttcccgggccttgtacacaccgcccgtcacaccatgggagttgattctactgtaagacggtaggctaacccgttaagggaggcagccgttcatggtagggtcagcgaccggggtg

SEQ ID NO: 1286 - DNA, 1472 bp, Desulfuribacillus alkaliarsenatis
gacgaacgctggcggcgtgcctaatacatgcaagtcgagcggacagagatgagagcttgctcttatcaaagttagcggcggacgggtgagtaacacgtgggcaacctgcctgtaagactgggataacttcgggaaaccgaagctaataccggataacagtagagagtgcatactttctatttaaaagatgctacggcatcacttacagatgggcccgcgtcgcattagctagttggtgaggtaacggctcaccaaggcaacgatgcgtagccgacctgagagggtgatcggccacactggaactgagacacggtccagactcctacgggaggcagcagtagggaatcttccgcaatgggcgaaagcctgacggagcaacgccgcgtgagcgaagaaggtcttcggattgtaaagctctgtctttaaggaagaacagcctctagagggaatgctagaggtgtgacggtacttaaggaggaagccccggctaactacgtgccagcagccgcggtaatacgtagggggcaagcgttgtccggaattattgggcgtaaagcgcgcgcaggcggtcatgtaagtctgatgtgaaaatccagggctcaaccttgggactgcattggaaactgcatgacttgagggcagaggaggggagtggaattcctagtgtagcggtgaaatgcgtagatattaggaggaacaccagtggcgaaggcgactctctggtctgttactgacgctgaggcgcgaaagcgtggggagcaaacaggattagataccctggtagtccacgccgtaaacgatgagtgctatgtgttggagggtaccaccttcagtgcagtagttaacgcaataagcactccgcctggggagtacggtcgcaaggctgaaactcaaaggaattgacgggggcccgcacaagcagtggagcatgtggtttaattcgaagcaacgcgaagaaccttaccaggtcttgacatccctctgacaggtgtagagatacaccctctcttcggagcagaggtgacaggtggtgcatggttgtcgtcagctcgtgtcgtgagatgttgggttaagtcccgcaacgagcgcaacccctattattagttgccagcattaagttgggcactctaatgagactgccggtgacaaaccggaggaaggcggggatgacgtcaaatcatcatgccccttatgacctgggcaacacacgtgctacaatggatggtacaaagggtagcgaagccgcgaggtggagccaatcccataaagccattctcagttcggattgtaggctgcaactcgcctacatgaagctggaattgctagtaatcgcggatcagaatgccgcggtgaatacgttcccgggccttgtacacaccgcccgtcacaccacgagagtttgtaacacccgaagccggtggggtaacccgtaagggagctagccgtcgaaggtgggacagatgattggggtg

SEQ ID NO: 1287 - DNA, 1472 bp, Desulfuribacillus stibiiarsenatis
gacgaacgctggcggcgtgcctaatacatgcaagtcgagcggatgtgatgaagagcttgctcttctgaacattagcggcggacgggtgagtaacacgtgggtaacctggctgtaagactgggataaccccgggaaaccggagctaataccagataataagatttctcgcatgagagatttttgaaaggtgctaaggcatcacttacaaatgggcccgcggcgcattagctagttggtggggtaaaggcctaccaaggcaacgatgcgtagccgacctgagagggtgaccggccacactggaactgagacacggtccagactcctacgggaggcagcagtagggaatcttccgcaatggacgaaagtctgacggagcaacgccgcgtgagcgaagaaggtcttcggattgtaaagctctgtctttaaggaagaacagctatgagagggaatgctcatagagtgacggtacttaaggaggaagccccggctaactacgtgccagcagccgcggtaatacgtagggggcaagcgttgtccggaattattgggcgtaaagcgcgcgcaggtggccatgtaagtctgatgtgaaattctagggctcaaccttagaactgcattggaaactgcatggcttgagagcaggagagggaagtggaattcctagtgtagcggtgaaatgcgtagatattaggaggaacaccagtggcgaaggcgacttcctggcctgttactgacactgaggcgcgaaagcgtggggagcaaacaggattagataccctggtagtccacgctgtaaacgatgagtgctatgtgttggagggtaccaccttcagtgcagtagttaacgcaataagcactccgcctggggagtacggtcgcaaggctgaaactcaaaggaattgacggggacccgcacaagcagtggagcatgtggtttaattcgaagcaacgcgaagaaccttaccaaggcttgacatccctctgaccggtgtagagatacacctttccttcgggacagaggtgacaggtggtgcatggttgtcgtcagctcgtgtcgtgagatgttgggttaagtcccgcaacgagcgcaacccctattattagttgccagcattaagttgggcactctaatgagactgccggtgacaaaccggaggaaggcggggatgacgtcaaatcatcatgccccttatgtcttgggctacacacgtgctacaatggatggtacagagggaagcgaagccgcgaggtggagccaatcccaaaaagccattctcagttcggattgtaggctgcaactcgcctacatgaagctggaattgctagtaatcgcggatcagaatgccgcggtgaatacgttcccgggtcttgtacacaccgcccgtcacaccacgagagtttgtaacacccgaagccggtggggtaacccgcaagggagctagccgtcgaaggtgggatagatgattggggtg

SEQ ID NO: 1288 - DNA, 1442 bp, Desulfurispirillum indicum
gacgaacgctggcggcgtgcctaacacatgcaagtcaaggggcctttcggggccactggcgcacgggtgagtaacacgtgggtaatctgccctttggcccgggataacatctggaaacggatgctaataccggataatctcttttgagcaaacggagctttcgggttccgccgaaggatgagcccgcgcatgattagcttgttggtggggtaacggcccaccaaggcgaagatcattagccggcctgagagggtgaacggccacactgggactgagacacggcccagactcctacgggaggcagcagtggggaatattgcgcaatggacgtaagtctgacgcagcaacgccgcgtggatgacgaaggctttcgggtcgtaaagtcctttagatggtgaagaaccggtacgggagtaactgcccgtgccctgacggtagccatagaataagctccggctaaatccgtgccagcagccgcggtaatacggatggagcaagcgttgtccggaatcattgggcgtaaagggtgcgtaggcggttttttaagtctgcattgtaagttcagtgcttaacgctgaaattggtgcggaaactggaagacttgagtactgtaggggaaagcggaatgccctgtgtagaggtgaaattcgtagatatagggtggaacatcaaaagcgaaggcagctttctgggcagtaactgacgctgaggcacgaaagcgtggggagcaaacaggattagataccctggtagtccacgccgtaaacgatggatgctagatgttggcgggaatcttcctgtcagtgtcggagctaacgcaataagcatcccgcctggggagtacggtcgcaaggctgaaactcaaaggaattgacgggggcccgcacaagcggtggagcatgtggtttaattcgaagcaacgcgaagaaccttacctggtcttgacatcccgatgccgtattcagagatgtatatttcccttcggggacatcggtgacaggtgctgcatggctgtcgtcagctcgtgtcgtgagatgttgggttaagtcccgcaacgagcgcaacccctgccattagttgccatcattaagttgggcactctagtgggacagccggagtaatccggaggaaggtggggacgacgtcaagtcatcatggcccttatgaccagggctacacacgtgctacaatggcaaggacaacgggatgcgacctcgcgagagtgagccaacctcaaaaaccttgtcttagttcggattgcagtctgcaactcgactgcatgaagtcggaatcgctagtaatcgcaggtcagcatactgcggtgaatacgttcccgggccttgtacacaccgcccgtcacaccacgaaagtcggttttgccagaagcgggtgaccgaatcttcggataggagccttcgaaggcaggactggtgattggggtg

SEQ ID NO: 1289 - DNA, 1530 bp, Desulfurispora thermophila
gacgaacgctggcggcgtgcctaacacatgcaagtcgaacggtccggacgccggtcatcagacggcggacgttggggcagggaggtattcgcggggcgaataacctgggagccctgacgactgaagtctgacgaccggcgaccggatagtggcggacgggtgagtaacacgtggataacctgcccgtaagaccgggacaactccgggaaactggagctaataccggatacatttacgccggggcatcctggtgtaaagaaaggagtaatccgcttacggatgggtccgcggcccattagctagatggcggggtaacggcccaccatggcgacgatgggtagccggcctgagagggcggccggccacactggaactgagacacggtccagactcctacgggaggcagcagtggggaatcttccgcaatgggcgcaagcctgacggagcgacgccgcgtgggtgaggaagtccttcgggatgtaaagccctttgagcagggaagagtaaggacggtacctgcagaacaagccccggctaactacgtgccagcagccgcggtaaaacgtagggggcgagcgttgtccggaatcactgggcgtaaagggcgagtaggcggctgccgaagtcgaaagtgaaaccccggggctcaacctcgggcctgctttcgaaaccaggcagcttgagtgcaggagaggtaagtggaattcccggtgtagcggtgaaatgcgtagatatcgggaggaacaccagtggcgaaagcggcttactggcctgtaactgacgctgaggcgcgaaagcgtggggagcaaacaggattagataccctggtagtccacgccgtaaacgatgggtgctaagtgttggggggatggtcccttcagtgctgtagttaacgcaataagcaccccgcctggggagtacggtcgcaagactgaaactcaaaggaattgacgggggcccgcacaagcggtggagcatgtggtttaattcgacgcaacgcgaagaaccttaccagggcttgacatcccctgacgacctgtgaaagcaggggttctggtcttcgggccggacagggagacaggtggtgcatggttgtcgtcagctcgtgtcgtgagatgttgggttaagtcccgcaacgagcgcaacccctacgtttagttgccagcacttaaaggtgggcactctaaacgaactgccgttgacaaaacggaggaaggtggggatgacgtcaaatcatcatgccccttatgtcctgggctacacacgtgctacaatggcctgtacagagggaagcgaagccgcgaggcggagcggaacccaaaaagcaggtcccagttcggattgcaggctgcaactcgcctgcatgaagtcggaatcgctagtaatcgcaggtcagcatactgcggtgaatacgttcccgggccttgtacacaccgcccgtcacaccacgaaagccagcaacacccgaagccggtgagctaaccgcgcaagcggaggcagccgtcgaaggtggggttggtgattggggtg

SEQ ID NO: 1290 - DNA, 1483 bp, Desulfurivibrio alkaliphilus
attgaacgctggcggcgtgcttaacacatgcaagtcgaacgagaaaggggcttcggccctgagtagagtggcgcacgggtgagtaacgcgtaagtaacctgcccttctatctgggataacagttcgaaagggctgctaataccggatattcttgccggccataaggttggtaaggaaaggtgacctcttcttgaaagttaccgtagagggaggggcttgcgtaccattagctagttggtggggtaacggcttaccaaggcgacgatggttagcgggtttgagaggatgatccgccacactggaactgaaacacggaccagactcctacgggaggcagcagtgaggaatattgcgcaatgggggcaaccctgacgcagcgacgccgcgtgagtgaagaaggccttcgggttgtaaagctctgtcggaagggaagaacggttcaggtgttaataccatctggatttgacggtaccttcaaaggaagcaccggctaactccgtgccagcagccgcggtaatacggagggtgcgagcgttaatcggaattactgggcgtaaagggcgcgtaggcggccctgcaagtcagttgtgaaagcccacggctcaaccgtggatgtgcaattgaaactgcagggcttgagtaccggcggggaagatggaattcccggtgtagaggtgaaattcgtagatatcgggaggaataccggtggcgaaggcgatcttctggacggatactgacgctgaggcgcgaaagcgtggggagcaaacaggattagataccctggtagtccacgctgtaaacgatgtgcactagatgttgggaggaattgaccctttcagtgtcgcagctaacgcattaagtgcaccgcctggggagtacggccgcaaggttaaaactcaaaggaattgacgggggcccgcacaagcggtggagtatgtggtttaattcgacgcaacgcgcagaaccttacctgggcttgacatcccggagatctcctggaaacaggagagtgctatcattaggtagaatccggagacaggtgctgcatggctgtcgtcagctcgtgtcgtgagatgttgggttaagtcccgcaacgagcgcaaccctcgcctttagttgccatcattaagttgggcactctagagggaccgccggtgtcaaaccggaggaaggtggggatgacgtcaagtcctcatggcctttatgtccagggctacacacgtactacaatggccggtacagagggcagcgacttagcgataagtagccaatctcaaaaagccggtctcagtccggattggagtctgcaactcgactccatgaagttggaatcgctagtaatcgcggatcagcatgccgcggtgaatacgttcccgggccttgtacacaccgcccgtcacaccacgaaagtcggttgttccagaagcggttgagctaaccttttaggaggcaggctgccaaggaatgatcggtaattggggtg

SEQ ID NO: 1291 - DNA, 1318 bp, Desulfuromonas acetexigens
ggtccctggaaagtggcgcacgggtgagtaacacgtggataatctacccgatgatccgggataacctttcgaaaggggggctaataccggataagctcacgaactcctcggagtttgcgggaaaaggtggggaccttcgggcctaccgtcattggatgagtccgcggcccattagctagttggtggggtaatggcctaccaaggcaacgatgggtagctggtctgagaggatgatcagccacactggaactgagacacggtccagactcctacgggaggcagcagtggggaattttgcgcaatgggcgaaagcctgacgcagcaacgccgcgtgagtgatgaaggttttcggatcgtaaagctctgtcagaggggaagaaactcccgggtgttaatatcgcctgggcctgacggtaccctcaaaggaagcaccggctaactccgtgccagcagccgcggtaatacggagggtgcaagcgttgttcggaattattgggcgtaaagcgcgtgtaggcggttggttaagtctgatgtgaaagccctgggctcaacccgggaagtgcattggaaactggctaacttgagtacgggagagggtagtggaatttcgagtgtaggggtgaaatccgtagatattcgaaggaacaccggtggcgaaggcggctacctggaccgatactgacgctgagacgcgaaagcgtggggagcaaacaggattagataccctggtagtccacgccgtaaacgatgggtactaggtgttgcgggtattgacccctgcagtgccgaagctaacgcattaagtaccccgcctggggagtacggtcgcaagactaaaactcaaaggaattgacgggggcccgcacaagcggtggagcatgtggtttaattcgacgcaacgcgcagaaccttacctgggcttgacatcccgatcgcactttctggaaacagagaggtcagttcggctggatcggtgacaggtgctgcatggctgtcgtcagctcgtgtcgtgagatgttgggttaagtcccgcaacgagcgcaaccctcgtccttagttgccagcattcagttgggcactctaaggagactgccggtgttaaaccggaggaaggcggggatgacgtcaagtcctcatggcccttatgtccagggctacacacgtgctacaatggccggtacaaagggtagcaagaccgcgaggtggagccaatcccaaaaagccggtctcagttcggattggagtctgcaactcgactccatgaagttggaatcgctagtaatcgtggatcagcatgccacggtgaatacgttcccgg

SEQ ID NO: 1292 - DNA, 1482 bp, Desulfuromonas acetoxidans
aacgaacgctggcggcgtgcctaacacatgcaagtcgaacgagaaagtttccttcgggaaatgagtagagtggcgcacgggtgagtaacacgtggataatctgcctgataatctgggataacatttcgaaagaagtgctaataccggataagcccacagtatcttcgggtacagcgggaaaagatggcctcttcttgaaagctattgttatcagatgagtccgcggtccattagctagttggtggggtaatggcccaccaaggcgacgatggatagctggtttgagagaatgatcagccacactggaactgagacacggtccagactcctacgggaggcagcagtggggaatcttgcgcaatgggggcaaccctgacgcagcaacgccgcgtgagtgatgaaggttttcggatcgtaaagctctgtcaagagggaagaaacctttgttggctaatacccaacagaattgacggtacctctagaggaagcaccggctaactccgtgccagcagccgcggtaatacggagggtgcaagcgttgttcggaattattgggcgtaaagcgcgtgtaggcggtttgttaagtctgatgtgaaagccccgggctcaacctgggaagtgcattggaaactggcaaacttgagtacgggagaggaaagtggaatttcgagtgtaggggtgaaatccgtagatattcgaaggaacaccagtggcgaaggcggctttctggaccgatactgacgctgagacgcgaaagcgtggggagcaaacaggattagataccctggtagtccacgccgtaaacgatgggtactaggtgtcgcgggtattgacccctgcggtgccgaagctaacgcattaagtaccccgcctggggagtacggccgcaaggctaaaactcaaaggaattgacgggggcccgcacaagcggtggagcatgtggtttaattcgacgcaacgcgaagaaccttacctgggcttgacatcccgatcgtaccttatggaaacatttgggtcagttcggctggatcggtgacaggtgctgcatggctgtcgtcagctcgtgtcgtgagatgttgggttaagtcccgcaacgagcgcaacccttgtccttagttgccatcattaagttgggcactctagggagactgccggtgttaaaccggaggaaggtggggacgacgtcaagtcatcatggcccttatgtccagggctacacacgtgctacaatggtcggtacaaagggcagcgataccgtgaggtggagcgaatcccaaaaagccggtctcagttcggattggagtctgcaactcgactccatgaagttggaatcgctagtaatcgcggatcagcatgccgcggtgaatacgttcccgggccttgtacacaccgcccgtcacaccacgggagttgattgtacctgaaatcggtgggctaaccttcgggaggcagccgcttatggtatgatcggtaactggggtg

SEQ ID NO: 1293 - DNA, 1481 bp, Desulfuromonas thiophila
aacgaacgctggcggcgtgcttaacacatgcaagtcgaacgcgaaaggggcttcggccctgagtaaagtggcgcacgggtgagtaacacgtggataatctgcctgatgatctgggataacatttcgaaaggagtgctaataccggataagcccacagcaacctcggttgcagcgggaaaagggggcctcttcctgaaagcttctgtcattagatgagtccgcggtccattagctagttggtagggtaacggcctaccaaggcgacgatggatagctggtttgagagaatgatcagccacactggaactgagacacggtccagactcctacgggaggcagcagtggggaattttgcgcaatgggcgaaagcctgacgcagcaacgccgcgtgagtgatgaaggttttcggatcgtaaagctctgtcaggaggaaagaaactccagaaggctaatatccttttggactgacggtacctccaaaggaagcaccggctaactccgtgccagcagccgcggtaatacggagggtgcaagcgttgttcggaattattgggcgtaaagcgcgtgcaggcggttttttaagtctgatgtgaaagccccgggcttaacctgggaagtgcattggaaactgggaaacttgagtacgggagagggaagtggaatttcgagtgtaggggtgaaatccgtagatattcgaaggaacaccggtggcgaaggcggcttcctggaccgatactgacgctgagacgcgaaagcgtggggagcaaacaggattagataccctggtagtccacgccgtaaacgatgggtactaggtgttgcgggtattgacccctgcagtgccgaagctaacgcattaagtaccccgcctggggagtacggccgcaaggctaaaactcaaaggaattgacgggggcccgcacaagcggtggagcatgtggtttaattcgacgcaacgcgaagaaccttacctgggcttgacatcccgatcgtacgatatggaaacatattggtcagttcggctggatcggtgacaggtgctgcatggctgtcgtcagctcgtgtcgtgagatgttgggttaagtcccgcaacgagcgcaacccttgtccttagttgccatcattaagttgggcactctaaggagactgccggtgttaaaccggaggaaggtggggacgacgtcaagtcatcatggcccttatgtccagggctacacacgtgctacaatggccggtacaaagggcagcgataccgcaaggtggagcaaatcccaaaaagccggtctcagttcggattggagtctgcaactcgactccatgaagttggaatcgctagtaatcgcggatcagcatgccgcggtgaatacgttcccgggccttgtacacaccgcccgtcacaccacgggagttgattgtacctgaaatcggtgagctaacctttcaggaggcagccgcttatggtatggtcggtaactggggtg

SEQ ID NO: 1294 - DNA, 1454 bp, Desulfuromusa kysingii
aacgaacgctggcggtatgcctaacacatgcaagtcgaacgcgaacggaatcttcggattccaagtagagtggcgcacgggtgagtaacacgtggataatctgccctaaggtcagggataacacttcgaaaggggtgctaataccggataagctcacgccctcctcggaggaggtgagaaaagatttattgccttaggatgagtccgcggtccattagctagttggtggggtaatggcctaccaaggctgcgatggatagctggtctgagaggatgatcagccacactggaactgagacacggtccagactcctacgggaggcagcagtggggaattttgcgcaatgggcgaaagcctgacgcagcaataccgcgtgaaggatgaaggcccttgggtcgtaaacttctgtcagaggggaagaaatactcgcaagagtgctgacggtaccctcaaaggaagcaccggctaactccgtgccagcagccgcggtaatacggagggtgcaagcgttgttcggaattattgggcgtaaagagcatgtaggcggcttgttaagtctggtgtgaaagcccggggctcaaccccggaagtgcattggatactggcaggcttgagtatgggagaggaaagtggaattccgagtgtaggagtgaaatccgtagatattcggaggaacaccagtggcgaaggcggctttctggaccaatactgacgctgagatgcgaaagcgtggggagcgaacaggattagataccctggtagtccacgccgtaaacgatgggtactaggtgttgcgggtaaccactcctgcagtgccgcagctaacgcattaagtaccccgcctggggagtacggccgcaaggctaaaactcaaaggaattgacgggggcccgcacaagcggtggagcatgtggtttaattcgacgcaacgcgaagaaccttacctaggcttgacatcccgatcgtactctatggaaaaatagaggtcagcttggctggatcggtgacaggtgctgcatggctgtcgtcagctcgtgtcgtgagatgttgggttaagtcccgcaacgagcgcaacccttgtccttagttgccatcattaagttgggcactctagggagactgccggtgttaaaccggaggaaggtggggatgacgtcaagtcctcatggcccttatgcctagggctacacacgtgctacaatggccggtacaaagggcagcgataccgcaaggtggagcgaatcccaaaaagccggtctcagttcggattggagtctgcaactcgactctatgaagttggaatcgctagtaatcgcggatcagcatgccgcggtgaatacgttcccgggccttgtacacaccgcccgtcacaccacgggagtctattgtaccggaaaccggtgggctaaccttcggggagcagccgtttatggtatgatcggtaactggggtg

SEQ ID NO: 1295 - DNA, 1485 bp, Dethiosulfatarculus sandiegensis
aacgaacgctggcggcaggcctaacacatgcaagtcgtacgagaacggttaacttcggttaacctagtaaagtggcgcacgggtgagtaacgcgtgggtaatctacctctggatttgggataacgttccgaaaggggcgctaataccaaataagactgtagccatcacgatggcatcagccaaagcgggcctatacatgtaagctcgtgtctggagatgagctcgcgtcccattagcttgttggtgaggtaacggctcaccaaggccgcgatgggtagctgatctgagaggatgatcagccacactgggactggaacacggcccagactcctacgggaggcagcagtgaggaatcttgcgcaatgggggaaaccctgacgcagccatgccgcgtgggtgaagaaggccttcgggtcgtaaagctctgtcaggtgggaagaatgttttagaggttaataccctttattattgacggtaccaccaaaggaagcaccggctaactccgtgccagcagccgcggtaatacggagggtgcaagcgttgttcggaattactgggcgtaaagagcgtgtaggcggctaagtaagtcaaatgtgaaatccctcggcttaaccgaggacgtgcatctgatactgcttagcttgagtctcggagaggggtgtggaattcccggtgtagaggtgaaattcgtagatatcgggaggaacatcagtggcgaaggcgacaccctggacgatgactgacgctgagacgcgaaagcgtgggtagcaaacaggattagataccctggtagtccacgccgtaaacggtgtcaactaggtgttgtgggtattgacccccgcagtgccgaagctaacgcattaagttgaccgcctggggagtacggccgcaaggttaaaactcaaaggaattgacggggacccgcacaagcggtggagcatgtggtttaattcgacgcaacgcgcagaaccttacctgggtttgacatcccctgacagctctagaaatagagttttcacttcggtgacagggtgacaggtgctgcatggctgtcgtcagctcgtgtcgtgagatgttgggttaagtcccgcaacgagcgcaacccctatgtctagttgccagtatttagttaggcactctagtcagactgccccggttaacggggaggaaggtggggatgacgtcaagtcctcatggcccttatgtccagggctacacacgtgctacaatggtcggtacaaagggttgcgagatcgcaaggttaagctaatcccaaaaaaccggccccagttcggattggagtctgcaactcgactccatgaagttggaatcgctagtaatcccggatcagcatgccggggtgaatacgttcccgggtcttgtacacaccgcccgtcacaccacgaaagcctgctgtaccagaagtggctaggccaacctctcacgaggaggcaggtccccaaggtatggccggtaattggggtg

SEQ ID NO: 1296 - DNA, 1434 bp, Dethiosulfatibacter aminovorans
gacgaaagctggcggcgtgcctaacacatgcaagtcgagcggaactgataaagtttactttaacagtttagcggcggacgggtgagtaacgcgtgagtaacctgccttatacagagggatagccttgagaaatcgggattaatacctcatgacatattttgatcgcatgatcaagatatcaaaactccggtggtataagatggactcgcgtcccattagctagttggtgaagtaacggttcaccaaggcgacgatgggtagccggcctgagagggtggacggccacactggaactgagacacggtccagactcctacgggaggcagcagtggggaatattgcacaatgggggaaaccctgatgcagcgacgccgcgtgagcgaagaaggttttcggatcgtaaagctctgtccttggagaagataatgacggtatccaaggaggaagccccggctaactacgtgccagcagccgcggtaatacgtagggggcgagcgttgtccggaattactgggcgtaaagagtacgtaggcggtctgataagtcaggtgtaaaaggcaatggctcaaccattgtaagcacttgaaactgtcggacttgagtacaggagaggtaagtggaattcctagtgtagcggtgaaatgcgtagatattaggaggaacaccagtggcgaaggcgacttactggactgtaactgacgctgaggtacgaaagcgtggggagcgaacaggattagataccctggtagtccacgccgtaaacgatgagtgctaggtgtcggcgagcgatcgtcggtgccggagttaacgcaataagcactccgcctggggagtacggtcgcaagactgaaactcaaaggaattgacggggacccgcacaagcagcggagcatgtggtttaattcgaagcaacgcgaagaaccttaccaaggtttgacatccctatgaaaagtgcagagatgcattccctcttcggagcataggtgacaggtggtgcatggttgtcgtcagctcgtgtcgtgagatgttgggttaagtcccgcaacgagcgcaacccctattattagttgccagcatttaggatgggcactctagtgagactgccggtgataaaccggaggaaggtggggatgacgtcaaatcatcatgccccttatatcttgggctacacacgtgctacaatggtcggtacaacgggaagcgaaggagcgatccggagcaaatccttagaagccgatcccagttcggattgcaggctgcaactcgcctgcatgaagttggagttgctagtaatcgtgaatcagaatgtcgcggtgaatgcgttcccgggtcttgtacacaccgcccgtcacaccatggaagttggtaatacccgaagccgttgagctaaccgtaagggggcagacgtcgaaggtaggatcaatgactagggtg

SEQ ID NO: 1297 - DNA, 1378 bp, Devosia elaeis
tgcaagtcgaacggtctcttcggaggcagtggcagacgggtgagtaacgcgtgggaatctacccagttctacggaataacgcagggaaacttgcgctaataccgtatacgccctacgggggaaagatttatcggaattggatgagcccgcgtaagattagctagttggtgaggtaatggctcaccaaggcgacgatctttagctggtctgagaggatgatcagccacactgggactgagacacggcccagactcctacgggaggcagcagtggggaatattggacaatgggcgcaagcctgatccagccatgccgcgtgagtgatgaaggccttagggttgtaaagctctttcagtagggaagataatgacggtacctacagaagaagccccggctaacttcgtgccagcagccgcggtaatacgaagggggctagcgttgttcggatttactgggcgtaaagcgcacgtaggcggatcgttaagtcagaggtgaaatcccggagctcaactccggaactgcctttgatactggcgatctcgagtccggaagaggtaagtggaactcctagtgtagaggtggaattcgtagatattaggaagaacaccagtggcgaaggcggcttactggtccggaactgacgctgaggtgcgaaagcgtggggagcaaacaggattagataccctggtagtccacgccgtaaactatgagagctagccgttgggtggtttaccactcagtggcgcagctaacgcattaagctctccgcctggggagtacggtcgcaagattaaaactcaaaggaattgacgggggcccgcacaagcggtggagcatgtggtttaattcgaagcaacgcgaagaaccttaccagcccttgacatggtcggacggtttccagagatggattccttcacttcggtgactgacacacaggtgctgcatggctgtcgtcagctcgtgtcgtgagatgttgggttaagtcccgcaacgagcgcaaccctcgtccttagttgccatcattcagttgggcactctaaggagactgccggtgataagccggaggaaggtggggatgacgtcaagtcatcatggcccttatgggctgggctacacacgtgctacaatggcggtgacagagggcagctacatggcgacatgatgctaatcccaaaaaaccgtctcagttcggattgcactctgcaactcgggtgcatgaagttggaatcgctagtaatcgcagatcagcatgctgcggtgaatacgttcccgggccttgtacacaccgcccgtcacaccatgggagttggttctacccgaagccggtgcgctaaccgcaaggaagcagccgaccacggtagggtcagcgactggggtg

SEQ ID NO: 1298 - DNA, 1404 bp, Devosia psychrophila
aacgaacgctggcggcaggcttaacacatgcaagtcgaacgctccgcaaggagagtggcagacgggtgagtaacgcgtgggaatctacctagttctacggaacaacagttggaaacgactgctaataccgtatacgccctacgggggaaagatttatcggaattagatgagcccgcgtaagattagctagttggtggggtaatggcctaccaaggcgacgatctttagctggtctgagaggatgatcagccacactgggactgagacacggcccagactcctacgggaggcagcagtggggaatattggacaatgggcgcaagcctgatccagccatgccgcgtgagtgatgaaggccttagggttgtaaagctctttcagtggggaagataatgacggtacccacagaagaagccccggctaacttcgtgccagcagccgcggtaatacgaagggggctagcgttgttcggatttactgggcgtaaagcgcacgtaggcggattggtaagttaggggtgaaatcctggagctcaactccagaactgcctttaatactgccagtctagagtccggaagaggtaagtggaactcctagtgtagaggtggaattcgtagatattaggaagaacaccagtggcgaaggcggcttactggtccggtactgacgctgaggtgcgaaagcgtggggagcaaacaggattagataccctggtagtccacgccgtaaactatgagagctagccgttgggagatttatctctcagtggcgcagctaacgcattaagctctccgcctggggagtacggtcgcaagattaaaactcaaaggaattgacgggggcccgcacaagcggtggagcatgtggtttaattcgaagcaacgcgaagaaccttaccagcccttgacatgccaagacgacttccagagatggatttcttcccttcggggacttggacacaggtgctgcatggctgtcgtcagctcgtgtcgtgagatgttgggttaagtcccgcaacgagcgcaaccctcgcctttagttgccatcatttagttgggcactctagagggactgccggtgataagccggaggaaggtggggatgacgtcaagtcatcatggcccttatgggctgggctacacacgtgctacaatggtggtgacagagggcagctacacagcgatgtgatgctaatcccaaaaagccatctcagttcggattgcactctgcaactcgggtgcatgaagttggaatcgctagtaatcgcagatcagcatgctgcggtgaatacgttcccgggccttgtacacaccgcccgtcacaccatgggagttggttctacccgaagccggtgcgctaaccgtaaggaagcagccgaccacggtagggtcagcgactggggtg

SEQ ID NO: 1299 - DNA, 1404 bp, Devosia riboflavina
aacgaacgctggcggcaggcttaacacatgcaagtcgaacgccccgcaaggggagtggcagacgggtgagtaacgcgtgggaatctacctagttctacggaacaacagttggaaacgactgctaataccgtatacgccctacgggggaaagatttatcggaattagatgagcccgcgtaagattagctagttggtggggtaatggcctaccaaggcgacgatctttagctggtctgagaggatgatcagccacactgggactgagacacggcccagactcctacgggaggcagcagtggggaatattggacaatgggcgcaagcctgatccagccatgccgcgtgagtgatgaaggccttagggttgtaaagctctttcaccgatgaagataatgacggtagtcggagaagaagccccggctaacttcgtgccagcagccgcggtaatacgaagggggctagcgttgttcggatttactgggcgtaaagcgcacgtaggcggtttgttaagtcaggggtgaaatcccggagctcaactccggaactgcctttgatactggcaagctagagtccggaagaggtaagtggaactcctagtgtagaggtggaattcgtagatattaggaagaacaccagtggcgaaggcggcttactggtccggaactgacgctgaggtgcgaaagcgtggggagcaaacaggattagataccctggtagtccacgccgtaaactatgagagctagccgttggatggtttaccattcagtggcgcagctaacgcattaagctctccgcctggggagtacggtcgcaagattaaaactcaaaggaattgacgggggcccgcacaagcggtggagcatgtggtttaattcgaagcaacgcgaagaaccttaccagcccttgacatggcaggacgatttccagagatggatctcttcacttcggtgacctgcacacaggtgctgcatggctgtcgtcagctcgtgtcgtgagatgttgggttaagtcccgcaacgagcgcaaccctcgtccttagttgccatcatttagttgggcactctaaggagactgccggtgataagccggaggaaggtggggatgacgtcaagtcatcatggcccttatgggctgggctacacacgtgctacaatggcggtgacagagggcagctagaccgcgaggtcatgctaatcccaaaaagccgtctcagttcggattgcactctgcaactcgggtgcatgaagttggaatcgctagtaatcgcagatcagcatgctgcggtgaatacgttcccgggccttgtacacaccgcccgtcacaccatgggaattggttctacccgaagccggtgcgctaaccgtaaggaagcagccgaccacggtagggtcagtgactggggtg

SEQ ID NO: 1300 - DNA, 1489 bp, Dialister micraerophilus
gacgaacgctggcggcgtgcttaacacatgcaagtcgaacgagaggacatgaaaagcttgctttttatgaaatctagtggcaaacgggtgagtaacacgtaaacaacctgccttcaagatggggacaacagacggaaacgactgctaataccgaatacgatccgaaagtcgcatgacatttggatgaaagggtggcctatcgaagaagctatcgcttgaagaggggtttgcgtccgattaggtagttggtgaggtaacggcccaccaagccgacgatcggtagccggtctgagaggatgaacggccacactggaactgagacacggtccagactcctacgggaggcagcagtggggaatcttccgcaatggacgaaagtctgacggagcaacgccgcgtgagtgaagacggccttcgggttgtaaagctctgtgattcgggacgaaaggccatatgtgaataatatatggaaatgacggtaccgaaaaagcaagccacggctaactacgtgccagcagccgcggtaatacgtaggtggcaagcgttgtccggaattattgggcgtaaagcgcgcgcaggcggtcacttaagtccatcttagaagtgcggggcttaaccccgtgatgggatggaaactgggagactggagtatcggagaggaaagtggaattcctagtgtagcggtgaaatgcgtagatattaggaagaacaccggtggcgaaggcgactttctggacgaaaactgacgctgaggcgcgaaagcgtggggagcaaacaggattagataccctggtagtccacgccgtaaacgatggatactaggtgtaggaggtatcgaccccttctgtgccggagttaacgcaataagtatcccgcctgggaagtacgatcgcaagattaaaactcaaaggaattgacgggggcccgcacaagcggtggagtatgtggtttaattcgacgcaacgcgaagaaccttaccaagtcttgacattgatcgccattccaagagattggaagttctccttcgggagacgagaaaacaggtggtgcacggctgtcgtcagctcgtgtcgtgagatgttgggttaagtcccgcaacgagcgcaacccctatcttttgttgccagcacgtagaggtgggaactcagaagagaccgccgcagacaatgcggaggaaggtggggatgacgtcaagtcatcatgccccttatgacttgggctacacacgtactacaatgggctttaacaaagagcagcgaaaccgcgaggtggagcgaaactcaaaaacaagcccccagttcagatcgcaggctgcaactcgcctgcgtgaagcaggaatcgctagtaatcgcgggtcagcataccgcggtgaatacgttcccgggccttgtacacaccgcccgtcacactatgagagtcggaaacacccgaagccggtgaggtaaccgcaaggagccagccgtcgaaggtggggctgatgattggagtg

SEQ ID NO: 1301 - DNA, 1402 bp, Dichotomicrobium thermohalophilum
aacgaacgctggcggcaggcctaacacatgcaagtcgaacgcaccttcgggtgagtggcagacgggtgagtaacgcgtgggaacctgccctgtggtacggaataaccctgggaaaccggggctaataccgtatacgccctacgggggaaagatttatcgccataggatgggcccgcgtcagattagctagttggtggggtaacagcctaccaaggcgacgatctgtagctggtttgagaggatgatcagccacactgggactgagacacggcccagactcctacgggaggcagcagtggggaatcttggacaatgggcgaaagcctgatccagccatgccgcgtgagtgaagaaggccctagggttgtaaagctctttcagcggggaagataatgacggtacccgcagaagaagccccggctaacttcgtgccagcagccgcggtaatacgaagggggctagcgttgttcggaattactgggcgtaaagcgcgcgtaggcggattggccagtcaggggtgaaagcccggggcttaacctcggaactgcccttgatactgccagtctagagtccggcagaggtgagtggaattcctagtgtagaggtgaaattcgtagatattaggaagaacaccagtggcgaaggcggctcactgggccgagactgacgctgaggcgcgaaagcgtggggagcaaacaggattagataccctggtagtccacgccgtaaacgatggatgctagccgttgggcagcatgctgttcagtggcgcagctaacgcattaagcatcccgcctggggagtacggccgcaaggctaaaactcaaaggaattgacgggggcccgcacaagcggtggagcatgtggtttaattcgaggcaacgcgaagaaccttaccagcccttgacatcccgtcgcggatccagagatgggtccttcggttcggccggacggtgacaggtgctgcatggctgtcgtcagctcgtgtcgtgagatgttgggttaagtcccgcaacgagcgcaacccttgtccctagttgccagcattaagttgggcactctagggagactgccagtgataagctggaggaaggtggggatgacgtcaagtcatcatggcccttacgggctgggctacacacgtgctacaatggtggtgacagtgggcagctactccgcgaggagatgctaatctctaaaagccacctcagttcggattgcactctgcaactcgagtgcatgaagttggaatcgctagtaatcgtggatcagcatgccacggtgaatacgttcccgggccttgtacacaccgcccgtcacaccatgggagttggtcttacccgaagacggtgcgctaaccttcgggaggcagccggccacggtaagatcagcgactggggtg

SEQ ID NO: 1302 - DNA, 1409 bp, Dickeya aquatica
catgcagtcgagcggtagcacaagggagcttgctccctgggtgacgagcggcggacgggtgagtaatgtctgggaaactgcctgatggagggggataactactggaaacggtagctaataccgcataacgtcttcggaccaaagagggggaccttcgggcctcttgccatcggatgtgcccagatgggattagctagtaggtggggtaaaggctcacctaggcgacgatccctagctggtctgagaggatgaccagccacactggaactgagacacggtccagactcctacgggaggcagcagtggggaatattgcacaatgggcgcaagcctgatgcagccatgccgcgtgtgtgaagaaggccttcgggttgtaaagcactttcagcggggaggaagggaacaggcttaatacgtctgttcattgacgttacccgcagaagaagcaccggctaactccgtgccagcagccgcggtaatacggagggtgcaagcgttaatcggaatgactgggcgtaaagcgcacgcaggcggtctgttaagttggatgtgaaatccccgggcttaacctgggaactgcattcaaaactgacaggctagagtctcgtagaggggggtagaattccaggtgtagcggtgaaatgcgtagagatctggaggaataccggtggcgaaggcggccccctggacgaagactgacgctcaggtgcgaaagcgtggggagcaaacaggattagataccctggtagtccacgctgtaaacgatgtcgatttggaggttgtgcccttgaggcgtggcttccggagctaacgcgttaaatcgaccgcctggggagtacggccgcaaggttaaaactcaaatgaattgacgggggcccgcacaagcggtggagcatgtggtttaattcgatgcaacgcggagaaccttacctactcttgacatccagcgaaccttgtagagatacgagggtgccttcgggaacgctgagacaggtgctgcatggctgtcgtcagctcgtgttgtgaaatgttgggttaagtcccgcaacgagcgcaacccttatcctctgttgccagcacttcgggtgggaactcaggggagactgccggtgataaaccggaggaaggtggggatgacgtcaagtcatcatggcccttacgagtagggctacacacgtgctacaatggcgtatacaaagagaagcgacctcgcgagagcaagcggacctcataaagtacgtcgtagtccggattggagtctgcaactcgactccatgaagtcggaatcgctagtaatcgtagatcagaatgctacggtgaatacgttcccgggccttgtacacaccgcccgtcacaccatgggagtgggttgcaaaagaagtaggtagcttaaccttcgggagggcgct

SEQ ID NO: 1303 - DNA, 1464 bp, Dickeya chrysanthemi
  misc_feature (428)..(430): n is a, c, g, or t
  misc_feature (448)..(449): n is a, c, g, or t
attgaacgctggcggcaggcctaacacatgcaagtcggcggtagcacaagggagcttgctccccgggtgacgagcggcggacgggtgagtaatgtctgggaaactgcctgatggagggggataactactggaaacggtagctaataccgcataacgtcttcggaccaaagagggggaccttcgggcctcttgccatcggatgtgcccagatgggattagctagtaggtggggtaaaggctcacctaggcgacgatccctagctggtctgagaggatgaccagccacactggaactgagacacggtccagactcctacgggaggcagcagtggggaatattgcacaatgggcgcaagcctgatgcagccatgccgcgtgtgtgaagaaggccttcgggttgtaaagcactttcagcggggaggaagggnnnaaggttaatacccttgtnnattgacgttacccgcagaagaagcaccggctaactccgtgccagcagccgcggtaatacggagggtgcaagcgttaatcggaatgactgggcgtaaagcgcacgcaggcggtctgttaagttggatgtgaaatccccgggcttaacctgggaactgcattcaaaactgacaggctagagtctcgtagaggggggtagaattccaggtgtagcggtgaaatgcgtagagatctggaggaataccggtggcgaaggcggccccctggacgaagactgacgctcaggtgcgaaagcgtggggagcaaacaggattagataccctggtagtccacgctgtaaacgatgtcgatttggaggttgtgcccttgaggcgtggcttccggagctaacgcgttaaatcgaccgcctggggagtacggccgcaaggttaaaactcaaatgaattgacgggggcccgcacaagcggtggagcatgtggtttaattcgatgcaacgcgaagaaccttacctactcttgacatccagagaagcctgcagagatgcgggtgtgccttcgggagctctgagacaggtgctgcatggctgtcgtcagctcgtgttgtgaaatgttgggttaagtcccgcaacgagcgcaacccttatcctctgttgccagcacgttatggtgggaactcaggggagactgccggtgataaaccggaggaaggtggggatgacgtcaagtcatcatggcccttacgagtagggctacacacgtgctacaatggcgcatacaaagagaagcgacctcgcgagagcaagcggacctcataaagtgcgtcgtagtccggattggagtctgcaactcgactccatgaagtcggaatcgctagtaatcgtagatcagaatgctacggtgaatacgttcccgggccttgtacacaccgcccgtcacaccatgggagtgggttgcaaaagaagtaggtagcttaaccttcgggagggcgcttaccactttgtgattcatgactggggtg

SEQ ID NO: 1304 - DNA, 1464 bp, Dickeya dadantii
attgaacgctggcggcaggcctaacacatgcaagtcgagcggcagcggggggaagcttgcttccccgccggcgagcggcggacgggtgagtaatgtctggggatctgcctgatggagggggataactactggaaacggtagctaataccgcataacgtcgcaagaccaaagtgggggaccttcgggcctcacgccatcggatgaacccagatgggattagctagtaggtgaggtaacggctcacctaggcgacgatccctagctggtctgagaggatgaccagccacactggaactgagacacggtccagactcctacgggaggcagcagtggggaatattgcacaatgggggaaaccctgatgcagccatgccgcgtgtgtgaagaaggccttcgggttgtaaagcactttcagcggggaggaagggagcagggttaataaccttgttcattgacgttacccgcagaagaagcaccggctaactccgtgccagcagccgcggtaatacggagggtgcaagcgttaatcggaatgactgggcgtaaagcgcacgcaggcggtctgttaagttggatgtgaaatccccgggcttaacctgggaactgcattcaaaactgacaggctagagtctcgtagaggggggtagaattccaggtgtagcggtgaaatgcgtagagatctggaggaataccggtggcgaaggcggccccctggacgaagactgacgctcaggtgcgaaagcgtggggagcaaacaggattagataccctggtagtccacgctgtaaacgatgtcgatttggaggttgtgcccttgaggcgtggcttccggagctaacgcgttaaatcgaccgcctggggagtacggccgcaaggttaaaactcaaatgaattgacgggggcccgcacaagcggtggagcatgtggtttaattcgatgcaacgcgaagaaccttacctactcttgacatccagcgaagcctgtagagatacgggtgtgccttcgggagcgctgagacaggtgctgcatggctgtcgtcagctcgtgttgtgaaatgttgggttaagtcccgcaacgagcgcaacccttatcctctgttgccagcactacgggtgggaactcaggggagactgccggtgataaaccggaggaaggtggggatgacgtcaagtcatcatggcccttacgagtagggctacacacgtgctacaatggcgcatacaaagagaagcgacctcgcgagagcaagcggacctcataaagtgcgtcgtagtccggattggagtctgcaactcgactccatgaagtcggaatcgctagtaatcgtagatcagaatgctacggtgaatacgttcccgggccttgtacacaccgcccgtcacaccatgggagtgggttgcaaaagaagtaggtagcttaaccttcgggagggcgcttaccactttgtgattcatgactggggtg

SEQ ID NO: 1305 - DNA, 1424 bp, Dickeya dianthicola
attgaacgctggcggcaggcctaacacatgcaagtcgagcggcagcggggggaagcttgcttccccgccggcgagcggcggacgggtgagtaatgtctggggatctgcctgatggagggggataactactggaaacggtagctaataccgcatgacgtcgcaagaccaaagtgggggaccttcgggcctcacgccatcggatgtgcccagatgggattagctggtaggtggggtaacggctcacctaggcgacgatccctagctggtctgagaggatgaccagccacactggaactgagacacggtccagactcctacgggaggcagcagtggggaatattgcacaatgggggaaaccctgatgcagccatgccgcgtgtgtgaagaaggccttcgggttgtaaagcactttcagcggggaggaagggagcagggttaataaccttgttcattgacgttacccgcagaagaagcaccggctaactccgtgccagcagccgcggtaatacggagggtgcaagcgttaatcggaatgactgggcgtaaagcgcacgcaggcggtctgttaagttggatgtgaaatccccgggcttaacctgggaactgcattcaaaactgacaggctagagtctcgtagaggggggtagaattccaggtgtagcggtgaaatgcgtagagatctggaggaataccggtggcgaaggcggccccctggacgaagactgacgctcaggtgcgaaagcgtggggagcaaacaggattagataccctggtagtccacgctgtaaacgatgtcgatttggaggttgtgcccttgaggcgtggcttccggagctaacgcgttaaatcgaccgcctggggagtacggccgcaaggttaaaactcaaatgaattgacgggggcccgcacaagcggtggagcatgtggtttaattcgatgcaacgcgaagaaccttacctactcttgacatccagagaacttagcagagatgcggtggtgccttcgggagctctgagacaggtgctgcatggctgtcgtcagctcgtgttgtgaaatgttgggttaagtcccgcaacgagcgcaacccttatcctctgttgccagcacgttatggtgggaactcaggggagactgccggtgataaaccggaggaaggtggggatgacgtcaagtcatcatggcccttacgagtagggctacacacgtgctacaatggcgcatacaaagagaagcgacctcgcgagagcaagcggacctcataaagtgcgtcgtagtccggattggagtctgcaactcgactccatgaagtcggaatcgctagtaatcgtagatcagaatgctacggtgaatacgttcccgggccttgtacacaccgcccgtcacaccatgggagtgggttgcaaaagaagtaggtagcttaacct

SEQ ID NO: 1306 - DNA, 1423 bp, Dickeya fangzhongdai
attgaacgctggcggcaggcctaacacatgcaagtcgagcggcagcggggggaagcttgcttccccgccggcgagcggcggacgggtgagtaatgtctggggatctgcctgatggagggggataactactggaaacggtagctaataccgcataacgtcgcaagaccaaagtgggggaccttcgggcctcacgccatcggatgaacccagatgggattagctagtaggtggggtaacggctcacctaggcgacgatccctagctggtctgagaggatgaccagccacactggaactgagacacggtccagactcctacgggaggcagcagtggggaatattgcacaatgggggaaaccctgatgcagccatgccgcgtgtgtgaagaaggccttcgggttgtaaagcactttcagcggggaggaaggcggcaaggttaataaccttgtcgattgacgttacccgcagaagaagcaccggctaactccgtgccagcagccgcggtaatacggagggtgcaagcgttaatcggaatgactgggcgtaaagcgcacgcaggcggtctgttaagttggatgtgaaatccccgggcttaacctgggaactgcattcaaaactgacaggctagagtctcgtagaggggggtagaattccaggtgtagcggtgaaatgcgtagagatctggaggaataccggtggcgaaggcggccccctggacgaagactgacgctcaggtgcgaaagcgtggggagcaaacaggattagataccctggtagtccacgctgtaaacgatgtcgatttggaggttgtgcccttgaggcgtggcttccggagctaacgcgttaaatcgaccgcctggggagtacggccgcaaggttaaaactcaaatgaattgacgggggcccgcacaagcggtggagcatgtggtttaattcgatgcaacgcgaagaaccttacctactcttgacatccagcgaagactgcagagatgcggtcgtgccttcgggaacgctgagacaggtgctgcatggctgtcgtcagctcgtgttgtgaaatgttgggttaagtcccgcaacgagcgcaacccttatcctctgttgccagcactacgggtgggaactcaggggagactgccggtgataaaccggaggaaggtggggatgacgtcaagtcatcatggcccttacgagtagggctacacacgtgctacaatggcgtatacaaagagaagcgacctcgcgagagcaagcggacctcataaagtacgtcgtagtccggattggagtctgcaactcgactccatgaagtcggaatcgctagtaatcgtagatcagaatgctacggtgaatacgttcccgggccttgtacacaccgcccgtcacaccatgggagtgggttgcaaaagaagtaggtagcttaacct

SEQ ID NO: 1307 - DNA, 1417 bp, Dickeya paradisiaca
cggcaggcctaacacatgcaagtcgagcggcagcggggggaagcttgcttccccgccggcgagcggcggtcgggtgagtaatgtctgggaaactgcctgatggagggggataactactggaaacggtagctaataccgcataacgtcttcggaccaaagtgggggctcttcggacctcatgccatcggatgtgcccagatgggattagctagtaggcggggtaaaggcccacctaggcgacgatccctagctggtctgagaggatgaccagccacactggaactgagacacggtccagactcctacgggaggcagcagtggggaatattgcacaatgggggaaaccctgatgcagccatgccgcgtgtgtgaagaaggccttcgggttgtaaagcactttcagcggggaggaaggggacaggcttaatacgtgtgttcattgacgttacccgcagaagaagcaccggctaactccgtgccagcagccgcggtaatacggagggtgcaagcgttaatcggaatgactgggcgtaaagcgcacgcaggcggtctgttaagttggatgtgaaatccccgggcttaacctgggaactgcattcaaaactgacaggctagagtctcgtagaggggggtagaattccaggtgtagcggtgaaatgcgtagagatctggaggaataccggtggcgaaggcggccccctggacgaagactgacgctcaggtgcgaaagcgtggggagcaaacaggattagataccctggtagtccacgctgtaaacgatgtcgatttggaggttgtggtcttgaaccgtggcttccggagctaacgcgttaaatggaccgcctggggagtacggccgcaaggttaaaactcaaatgaattgacgggggcccgcacaagcggtggagcatgtggtttaattcgatgcaacgcgaagaaccttacctactcttgacatccagagaagactgcagagatgcggttgtgccttcgggagctctgagacaggtgctgcatggctgtcggcagctcgtgttgtgaaatgttgggttaagtcccgcaacgagcgcaacccttatcctttgttgccagcacgtgatggtgggaactcaagggagactgccggtgataaaccggaggaaggtggggatgacgtcaagtcatcatggcccttacgagtagggctacacacgtgctacaatggcgcatacaaagagaagcgacctcgcgagagcaagcggatctcataaagtgcgtcgtagtccggattggagtctgcaactcgactccatgaagtcggaatcgctagtaatcgcggatcagaatgccgcggtgaatacgttcccgggccttgtacacaccgcccgtcacaccatgggagtgggttgcaaaagaagtaggtagcttaaccttcggg

SEQ ID NO: 1308 - DNA, 1464 bp, Dickeya solani
attgaacgctggcggcaggcctaacacatgcaagtcgagcggcagcggggggaagcttgcttccccgccggcgagcggcggacgggtgagtaatgtctggggatctgcctgatggagggggataactactggaaacggtagctaataccgcataacgtcgcaagaccaaagtgggggaccttcgggcctcacgccatcggatgaacccagatgggattagctagtaggtggggtaacggctcacctaggcgacgatccctagctggtctgagaggatgaccagccacactggaactgagacacggtccagactcctacgggaggcagcagtggggaatattgcacaatgggggaaaccctgatgcagccatgccgcgtgtgtgaagaaggccttcgggttgtaaagcactttcagcggggaggaaggcgataaggttaataaccctgtcgattgacgttacccgcagaagaagcaccggctaactccgtgccagcagccgcggtaatacggagggtgcaagcgttaatcggaatgactgggcgtaaagcgcacgcaggcggtctgttaagttggatgtgaaatccccgggcttaacctgggaactgcattcaaaactgacaggctagagtctcgtagaggggggtagaattccaggtgtagcggtgaaatgcgtagagatctggaggaataccggtggcgaaggcggccccctggacgaagactgacgctcaggtgcgaaagcgtggggagcaaacaggattagataccctggtagtccacgctgtaaacgatgtcgacttggaggttgtgcccttgaggcgtggcttccggagctaacgcgttaagtcgaccgcctggggagtacggccgcaaggttaaaactcaaatgaattgacgggggcccgcacaagcggtggagcatgtggtttaattcgatgcaacgcgaagaaccttacctactcttgacatccagagaatttggcagagatgccttagtgccttcgggagctctgagacaggtgctgcatggctgtcgtcagctcgtgttgtgaaatgttgggttaagtcccgcaacgagcgcaacccttatcctttgttgccagcacttcgggtgggaactcaagggagactgccggtgataaaccggaggaaggtggggatgacgtcaagtcatcatggcccttacgagtagggctacacacgtgctacaatggcgcatacaaagagaagcgacctcgcgagagcaagcggacctcataaagtgcgtcgtagtccggattggagtctgcaactcgactccatgaagtcggaatcgctagtaatcgtagatcagaatgctacggtgaatacgttcccgggccttgtacacaccgcccgtcacaccatgggagtgggttgcaaaagaagtaggtagcttaaccttcgggagggcgcttaccactttgtgattcatgactggggtg

SEQ ID NO: 1309 - DNA, 1463 bp, Dickeya zeae
attgaacgctggcggcaggcctaacacatgcaagtcgagcggtagcacagggagcttgctccctgggtgacgagcggcggacgggtgagtaatgtctgggaaactgcctgatggagggggataactactggaaacggtagctaataccgcataacgtcgcaagaccaaagagggggaccttcgggcctcttgccatcggatgtgcccagatgggattagctagtaggtgaggtaaaggctcacctaggcgacgatccctagctggtctgagaggatgaccagccacactggaactgagacacggtccagactcctacgggaggcagcagtggggaatattgcacaatgggcgcaagcctgatgcagccatgccgcgtgtgtgaagaaggccttcgggttgtaaagcactttcagcggggaggaagggagcagacttaatacgtctgttcattgacgttacccgcagaagaagcaccggctaactccgtgccagcagccgcggtaatacggagggtgcaagcgttaatcggaatgactgggcgtaaagcgcacgcaggcggtctgttaagttggatgtgaaatccccgggcttaacctgggaactgcattcaaaactgacaggctagagtctcgtagaggggggtagaattccaggtgtagcggtgaaatgcgtagagatctggaggaataccggtggcgaaggcggccccctggacgaagactgacgctcaggtgcgaaagcgtggggagcaaacaggattagataccctggtagtccacgctgtaaacgatgtcgatttggaggttgtgcccttgaggcgtggcttccggagctaacgcgttaaatcgaccgcctggggagtacggccgcaaggttaaaactcaaatgaattgacgggggcccgcacaagcggtggagcatgtggtttaattcgatgcaacgcgaagaaccttacctactcttgacatccagagaagcctgcagagatgcgggtgtgccttcgggagctctgagacaggtgctgcatggctgtcgtcagctcgtgttgtgaaatgttgggttaagtcccgcaacgagcgcaacccttatcctttgttgccagcacttcgggtgggaactcaagggagactgccggtgataaaccggaggaaggtggggatgacgtcaagtcatcatggcccttacgagtagggctacacacgtgctacaatggcgtatacaaagagaagcgacctcgcgagagcaagcggacctcataaagtacgtcgtagtccggattggagtctgcaactcgactccatgaagtcggaatcgctagtaatcgtagatcagaatgctacggtgaatacgttcccgggccttgtacacaccgcccgtcacaccatgggagtgggttgcaaaagaagtaggtagcttaaccttcgggagggcgcttaccactttgtgattcatgactggggtg

SEQ ID NO: 1310 - DNA, 1377 bp, Dictyobacter aurantiacus
gataaacgctggcggcgtgcctaacacatgcaagtcgaacgccctgcgcaagcagggagtggcggacgggtgaggaacacgtgggtcatctgccctggggtgaggaataccggcgagaaatcgccgacaataccgcatagcttcgcaagaagaaagctggcaagagcgcccgaggatgagcctgcgctcgattagttggttggtggggtaatggcctaccaagaccgcgatcgatagctggtctgagaggacgatcagccacactgggattgagaacggcccagactcctacggggggcagcagtgaggaattttcgtcaatgggggcaaccctgaacgagcaacgccgcgtgcaggaagacggttttcggatcgtaaactgcttttctctgggacgagaacggacggtaccagaggaatcagcctcggctaactacgtgccagcagccgcggtaatacgtaggaggcgagcgttgtccggagttactgggcgtaaagcgcacgcaggcggtcaggttagtctgtggtgacagtcgtcggctcaactgacgaagtactatggaaactgtctgacttgagggcttcagagggacacggaattccgggtggagtggtgaaatgcgtagatatccggaggaacaccaaaggcgaaggcagtgtcctgggaagtacctgacgctcaggtgcgaaagctaggggagcgaacaggattagataccctggtagtcctagccgtaaacgatgaccactagacgttgggggtatcgaccccttcagtgtcgtagttaacacaataagtggtccgcctggggagtacggtcgcaagattaaaactcaaaggaattgacggggacccgcacaagcagcggagcgtgtggtttattcgatgcaacgcgaagaaccttaccaaggcttgacatgaacttgcaccagccgtaacgggctgtcccttcggggcgggttcacaggtgctgcatggctgtcgtcagctcgtgtcgtgagatgttgggttaagtcccgcaacgagcgcaacccctgtcgttagttggatttttctagcgaaactgccgttataagacggaggaaggcggggatgacgtcaagtcagcacggcccttacgctttgggcgacacacacgctacaatggtcaggacaaagagttgcgaacccgcgagggggagctaatctcgtcaaacctggcctcagttcagattggaggctgcaacccgcctccatgaagttggagttgctagtaaccgtaggtcagcacactacggtgaatacgttcccgggtcttgtacacaccgcccgtcacaccacgaaagttggcaacacttgaagccgctgggctaacccatctgggaggcaagcgtcaa

SEQ ID NO: 1311 - DNA, 1487 bp, Dissulfuribacter thermophilus
agcgaacgctggcggcgtgcctaacacatgcaagtcgtgcgagaaacctggccttcgggctggggagtacagcggcgcacgggtgagtaacgcgtaggtaacctacccctgggaccgggataacatgccgaaaggcgtgctaataccggataacatggatgagggggacctcatccatcaaaggtggcctctgcttgcaagctactacctggggatgggcctgcgtcccattagctagttggtggggtaatggcctaccaaggcaacgatgggtagcgggtctgagaggatgatccgccacactggaactggaacacggtccagactcctacgggaggcagcagtgaggaatattggacaatgggcgaaagcctgatccagcgacgccgcgtgggcgaagaaggccttcgggtcgtaaagccctgtcagaggggacgaacccctgcctggctaatatccaggtaggctgacggtaccctcagaggaagcgccggctaactccgtgccagcagccgcggtaatacggagggcgcaagcgttgctcggaatcactgggcgtaaagcgggtgtaggcggcctgtcaagtcagatgtgaaagcccacggctcaaccgtgtgaagtgcatctgaaactgacaggcttgagtgccggagagggaagtggaattcctggtgtaggggtgaaatccgtagatatcaggaggaacaccggtggcgaaggcgacttcctggacggttactgacgctgagacccgaaagcgtggggagcaaacaggattagataccctggtagtccacgccctaaacgatgggcactaggtgctgggggttttaccccctcggtgccgtagctaacgcattaagtgccccgcctggggagtacggccgcaaggttgaaactcaaaggaattgacgggggcccgcacaagcggtggagcatgtggtttaattcgaagcaacgcgaagaaccttacctgggcttgacatcccgggaaccctgtggaaacacgggggtgcctcttcggaggaacccggtgacaggtgctgcatggctgtcgtcagctcgtgtcgtgagatgttgggttaagtcccgcaacgagcgcaaccctcgcccttagttgccaccattaagttgggcactctaaggggactgccggtgtcaaaccggaggaaggtggggatgacgtcaagtcctcatggcccttatgcccagggctacacacgtgctacaatggccggtacaaagggcagccaacccgcgagggtgagcaaatcccaaaaagccggtctcagttcggatcggagtctgcaactcgactccgtgaaggtggaatcgctagtaatcccggatcagcatgccggggtgaatacgttcccgggccttgtacacaccgcccgtcacaccacgaaagctggctgtaccagaagtcgccgggctaaccccgtaaggggaggcaggcgcccaaggtatggtcagtgattggggtg

SEQ ID NO: 1312 - DNA, 1449 bp, Dokdonella fugitiva
cggcaggcctaacacatgcaagtcgagcggcagcacgggggcaaccctggtggcgagcggcggacgggtgaggaatacatcggaatctgccttgtcgtgggggataacgtagggaaacttacgctaataccgcatacgaccgagaggtgaaagtgggggaccgcaaggcctcacgcgataagatgagccgatgtcggattagctagttggcggggtaatggcccaccaaggcgacgatccgtagctggtctgagaggatgatcagccacactggaactgagacacggtccagactcctacgggaggcagcagtggggaatattggacaatgggcgcaagcctgatccagccatgccgcgtgggtgaagaaggccttcgggttgtaaagcccttttgttggggaagaaatcgtacgggcgaatacctcgtgcggatgacggtacccaaagaataagcaccggctaacttcgtgccagcagccgcggtaatacgaagggtgcaagcgttactcggaattactgggcgtaaagcgtgcgtaggcggttcgttaagtccgttgtgaaagccctgggctcaacctgggaattgcagtggatactggcgagctagagtacggtagaggatggtggaattcccggtgtagcggtgaaatgcgtagagatcgggaggaacacccgtggcgaaggcggccatctggaccagtactgacgctgaggcacgaaagcgtggggagcaaacaggattagataccctggtagtccacgccctaaacgatgcgaactggatgttgggcacacttaggtgctcagtgtcgaagctaacgcgttaagttcgccgcctggggagtacggtcgcaagactgaaactcaaaggaattgacgggggcccgcacaagcggtggagtatgtggtttaattcgatgcaacgcgaagaaccttacctggccttgacatgtccggaatcctgcagagatgcgggagtgccttcgggaatcggaacacaggtgctgcatggctgtcgtcagctcgtgtcgtgagatgttgggttaagtcccgcaacgagcgcaacccttgtccttagttgccagcacgtaatggtgggaactctaaggagactgccggtgacaaaccggaggaaggtggggatgacgtcaagtcatcatggcccttacggccagggctacacacgtactacaatggtcggtacagagggttgcgatgccgcgaggcggagccaatcccagaaagccggtctcagtccggatcggagtctgcaactcgactccgtgaagtcggaatcgctagtaatcgcgaatcagcattgtcgcggtgaatacgttcccgggccttgtacacaccgcccgtcacaccatgggagttggttgctccagaagcaggtagtctaaccgcaaggaggacgcttgccacggagtggtcaatgactggggtg

SEQ ID NO: 1313 - DNA, 1461 bp, Dokdonella immobilis
agtgaacgctggcggcaggcctaacacatgcaagtcgagcggcagcgcgggggcaaccctggcggcgagcggcggacgggtgaggaatgcatcggaatctacctcgttgtgggggataacgtagggaaacttacgctaataccgcatacgacctacgggtgaaagtgggggaccgcaaggcctcacgcgatgagatgagccgatgccggattagctagttggcggggtaaaggcccaccaaggcgacgatccgtagctggtctgagaggatgatcagccacactggaactgagacacggtccagactcctacgggaggcagcagtggggaatattggacaatgggcgcaagcctgatccagccatgccgcgtgtgtgaagaaggccttcgggttgtaaagcacttttgttggggaagaaaccgaccggactaatactccggttgaatgacggtacccaaagaataagcaccggctaacttcgtgccagcagccgcggtaatacgaagggtgcaagcgttactcggaattactgggcgtaaagcgtgcgtaggcggtttgttaagtctgctgtgaaagccctgggctcaacctgggaactgcagtggatactggcaagctagagtgtgtcagaggatggtggaattcccggtgtagcggtgaaatacgtagagatcgggaggaacaccagtggcgaaggcggccatctgggacaacactgacgctgaggcacgaaagcgtggggagcaaacaggattagataccctggtagtccacgccctaaacgatgcgaactggacgttgggcacacttaggtgctcagtgtcgaagctaacgcgttaagttcgccgcctggggagtacggtcgcaagactgaaactcaaaggaattgacgggggcccgcacaagcggtggagtatgtggtttaattcgatgcaacgcgaagaaccttacctggccttgacatgtccggaatcctgcagagatgcgggagtgccttcgggaatcggaacacaggtgctgcatggctgtcgtcagctcgtgtcgtgagatgttgggttaagtcccgcaacgagcgcaacccttgtccttagttgccagcgagtaatgtcgggaactctaaggagactgccggtgacaaaccggaggaaggtggggatgacgtcaagtcatcatggcccttacggccagggctacacacgtactacaatggtcggtacagagggttgcgaaaccgcgaggtgaagccaatcccagaaagccgatctcagtccggatcggagtctgcaactcgactccgtgaagtcggaatcgctagtaatcgcgaatcagcattgtcgcggtgaatacgttcccgggccttgtacacaccgcccgtcacaccatgggagtgggttgctccagaagcaggtagcgtaaccgcaaggggcgcgcttgccacggagtggttcatgactggggtg

SEQ ID NO: 1314 - DNA, 1461 bp, Dokdonella koreensis
agtgaacgctggcggcaggcctaacacatgcaagtcgagcggcagcgcgggggcaaccctggcggcgagcggcggacgggtgaggaatgcatcggaatctgcctcgttgtgggggataacgtagggaaacttacgctaataccgcatacgaccgagaggtgaaagtgggggaccgcaaggcctcacgcgacgagatgagccgatgccggattagctagttggtggggtaaaggcccaccaaggcgacgatccgtagctggtctgagaggatgatcagccacactggaactgagacacggtccagactcctacgggaggcagcagtggggaatattggacaatgggcgcaagcctgatccagccatgccgcgtgtgtgaagaaggccttcgggttgtaaagcacttttgttggggaagaaagcgtacggattaatacttcgtgcggatgacggtacccaaagaataagcaccggctaacttcgtgccagcagccgcggtaatacgaagggtgcaagcgttactcggaattactgggcgtaaagcgtgcgcaggcggttcgttaagtctgctgtgaaagccctgggctcaacctgggaatggcagtggatactggcgagctagagtacggtagaggaaggtggaattcccggtgtagcggtgaaatgcgtagagatcgggaggaacaccagtggcgaaggcgaccttctggaccagtactgacgctcatgcacgaaagcgtggggagcaaacaggattagataccctggtagtccacgccctaaacgatgcgaactggatgttgggcacactttggtgctcagtgtcgaagctaacgcgttaagttcgccgcctggggagtacggtcgcaagactgaaactcaaaggaattgacgggggcccgcacaagcggtggagtatgtggtttaattcgatgcaacgcgaagaaccttacctggccttgacatgtccggaatcctgcggagacgcgggagtgccttcgggaatcggaacacaggtgctgcatggctgtcgtcagctcgtgtcgtgagatgttgggttaagtcccgcaacgagcgcaacccttgtccttagttgccagcacgtaaaggtgggaactctaaggagactgccggtgacaaaccggaggaaggtggggatgacgtcaagtcatcatggcccttacggccagggctacacacgtactacaatggtcggtacagagggttgcaataccgcgaggtggagccaatcccagaaagccgatcccagtccggatcggagtctgcaactcgactccgtgaagtcggaatcgctagtaatcgcgaatcagcattgtcgcggtgaatacgttcccgggccttgtacacaccgcccgtcacaccatgggagttggttgctccagaagcaggtagtctaaccgcaagggggacgcttgccacggagtggtcaatgactggggtg

SEQ ID NO: 1315 - DNA, 1409 bp, Dolichospermum compactum
gatgaacgctggcggtatgcttaacacatgcaagtcgaacggtcttttcggagatagtggcggacgggtgagtaacgcgtaagaatctaccttcaggtcggggacaaccactggaaacggtggctaataccggatgtgccgagaggtgaaaggcttgctgcctgaagaagagcttgcgtctgattagctagttggtggggtaagagcctaccaaggcgacgatcagtagctggtctgagaggatgatcagccacactgggactgagacacggcccagactcctacgggaggcagcagtggggaattttccgcaatgggcgaaagcctgacggagcaataccgcgtgagggaggaaggctcttgggttgtaaacctcttttctcagggaagaacagaatgacggtacctgaggaataagcatcggctaactccgtgccagcagccgcggtaatacggaggatgcaagcgttatccggaatgattgggcgtaaagggtccgcaggtggcatagtaagtctgctgttaaagagtcacgctcaacgtgataagagcagtggaaactacaaagctagagtatggtcggggcagagggaattcctggtgtagcggtgaaatgcgtagatatcaggaagaacaccggtggcgaaggcgctctgctaggccaaaactgacactgagggacgaaagctaggggagcgaatgggattagataccccagtagtcctagccgtaaacgatggatactaggcgtagctcgtatcgacccgagctgtgccgtagctaacgcgttaagtatcccgcctggggagtacgcaggcaactgtgaaactcaaaggaattgacgggggcccgcacaagcggtggagtatgtggtttaattcgatgcaacgcgaagaaccttaccaaggcttgacatgtcacgaatcctgtagaaatataggagtgccttagggagcgtgaacacaggtggtgcatggctgtcgtcagctcgtgtcgtgagatgttgggttaagtcccgcaacgagcgcaaccctcgtttttagttgccagcattaagttgggcactctagagagactgccggtgacaaaccggaggaaggtggggatgacgtcaagtcagcatgccccttacgtcttgggctacacacgtactacaatgctacggacaaagggcagctacacagcgatgtgatgcgaatctcagaaaccgtagctcagttcagatcgaaggctgcaactcgccttcgtgaaggaggaatcgctagtaattgcaggtcagcatactgcagtgaattcgttcccgggccttgtacacaccgcccgtcacaccatggaagttggtcacgcccgaagtcgttaccccaaccttttggagggggatgcctaaggtaggactgatgactggggtg

SEQ ID NO: 1316 - DNA, 1475 bp, Domibacillus antri
gacgaacgctggcggggtgcctaatacatgcaagtcgagcggacttgacggagcttgctctgttcaagtcagcggcggacgggtgagtaacacgtgggcaacctgccctgcagattgggataactccgggaaaccggggctaataccgaataatagggaagatcacatgatcttcctttgaaagacggtttcggctgtcactgcaggatgggcccgcggcgcattagctagttggtgaggtaacggctcaccaaggcgacgatgcgtagccgacctgagagggtgatcggccacactgggactgagacacggcccagactcctacgggaggcagcagtagggaatcttccgcaatggacgaaagtctgacggagcaacgccgcgtgagtgaagaaggttttcggatcgtaaaactctgttgtcagggaagaacaagtacgggagtaactgtccgtaccttgacggtacctggccagaaagccacggctaactacgtgccagcagccgcggtaatacgtaggtggcaagcgttgtccggaattattgggcgtaaagcgcgcgcaggcggtcttttaagtctgatgtgaaagcccacggctcaaccgtggagggtcattggaaactggaagacttgagtgcagaagagaagagcggaattccacgtgtagcggtgaaatgcgtagagatgtggaggaacaccagtggcgaaggcggctctttggtctgtaactgacgctgaggcgcgaaagcgtggggagcgaacaggattagataccctggtagtccacgccgtaaacgatgagtgctaagtgttggggggtttccgcccctcagtgctgcagctaacgcattaagcactccgcctggggagtacggccgcaaggctgaaactcaaaggaattgacgggggcccgcacaagcggtggagcatgtggtttaattcgaagcaacgcgaagaaccttaccaggtcttgacatcccgctgcccggtatagagatatacctttcccttcggggacagcggtgacaggtggtgcatggttgtcgtcagctcgtgtcgtgagatgttgggttaagtcccgcaacgagcgcaacccttgatcttagttgccagcattcagttgggcactctaaggtgactgccggtgacaaaccggaggaaggtggggatgacgtcaaatcatcatgccccttatgacctgggctacacacgtgctacaatggatggtacaaagggctgcaagaccgcgaggtttagccaatcccataaaaccattctcagttcggattgcaggctgcaactcgcctgcatgaagccggaatcgctagtaatcgcggatcagcatgccgcggtgaatacgttcccgggccttgtacacaccgcccgtcacaccacgagagtttgcaacacccgaagtcggtggggtaacccttacgggagccagccgccgaaggtggggcagatgattggggtg

SEQ ID NO: 1317 - DNA, 1468 bp, Domibacillus enclensis
  misc_feature (161)..(161): n is a, c, g, or t
gacgaacgcggcggcgtgcctaatacatgcaagtcgagcggatttgatcagagcttgctctggtcaagttagcggcggacgggtgagtaacacgtgggcaacctgccctgcagattgggataactccgggaaaccggggctaataccgaataatatagagngtttcatgattttcttttgaaaggcggcttcggctgtcactgcaggatgggcccgcggcgcattagctagttggtgaggtaacggctcaccaaggcgacgatgcgtagccgacctgagagggtgatcggccacactgggactgagacacggcccagactcctacgggaggcagcagtagggaatcttccgcaatggacgaaagtctgacggagcaacgccgcgtgagtgaagaaggttttcggatcgtaaaactctgttgtcagggaagaacaagtatgggagtaactgcccgtaccttgacggtacctggccagaaagccacggctaactacgtgccagcagccgcggtaatacgtaggtggcaagcgttgtccggaattattgggcgtaaagcgcgcgcaggcggccttttaagtctgatgtgaaagcccccggctcaaccggggagggtcattggaaactggaaggcttgagtgcagaagagaagagcggaattccacgtgtagcggtgaaatgcgtagagatgtggaggaacaccagtggcgaaggcggctctttggtctgtaactgacgctgaggcgcgaaagcgtggggagcgaacaggattagataccctggtagtccacgccgtaaacgatgagtgctaagtgttggggggtttccgcccctcagtgctgcagctaacgcattaagcactccgcctggggagtacggccgcaaggctgaaactcaaaggaattgacgggggcccgcacaagcggtggagcatgtggtttaattcgaagcaacgcgaagaaccttaccaggtcttgacatcccgctgaccgccctggagacagggcttccccttcgggggcagcggtgacaggtggtgcatggttgtcgtcagctcgtgtcgtgagatgttgggttaagtcccgcaacgagcgcaacccttgatcttagttgccagcattcagttgggcactctaaggtgactgccggtgacaaaccggaggaaggtggggatgacgtcaaatcatcatgccccttatgacctgggctacacacgtgctacaatggatggtacaaagggctgcaagaccgcggaggtttagccaatcccataaaaccattctcagttcggattgcaggctgcaactcgcctgcatgaagctggaatcgctagtaatcgcggatcagcatgccgcggtgaatacgttcccgggccttgtacacaccgcccgtcacaccacgagagtttgcaacacccgaagtcggtgtggtacccttactggattccagccgccgaaggtggggcagatga

SEQ ID NO: 1318 - DNA, 1474 bp, Domibacillus epiphyticus
gacgaacgctggcggcgtgcctaatacatgcaagtcgagcggacttgacagagcttgctctgttcaagttagcggcggacgggtgagtaacacgtgggcaacctgccctgcagattgggataactccgggaaaccggggctaataccgaataatatagaagatctcatgatcttcttttgaaagacggttttgctgtcactgcaggatgggcccgcggcgcattagctagttggtgaggtaacggctcaccaaggcgacgatgcgtagccgacctgagagggtgatcggccacactgggactgagacacggcccagactcctacgggaggcagcagtagggaatcttccgcaatggacgaaagtctgacggagcaacgccgcgtgagtgaagaaggttttcggatcgtaaaactctgttgtcagggaagaacaagtacgggagtaactgtccgtaccttgacggtacctggccagaaagccacggctaactacgtgccagcagccgcggtaatacgtaggtggcaagcgttgtccggaattattgggcgtaaagcgcgcgcaggcggtcttttaagtctgatgtgaaagcccacggctcaaccgtggagggtcattggaaactggaagacttgagtgcagaagagaagagcggaattccacgtgtagcggtgaaatgcgtagagatgtggaggaacaccagtggcgaaggcggctctttggtctgtaactgacgctgaggcgcgaaagcgtggggagcgaacaggattagataccctggtagtccacgccgtaaacgatgagtgctaagtgttggggggtttccgcccctcagtgctgcagctaacgcattaagcactccgcctggggagtacggccgcaaggctgaaactcaaaggaattgacgggggcccgcacaagcggtggagcatgtggtttaattcgaagcaacgcgaagaaccttaccaggtcttgacatcccgctgcccggcatagagatatgcctttcccttcggggacagcggtgacaggtggtgcatggttgtcgtcagctcgtgtcgtgagatgttgggttaagtcccgcaacgagcgcaacccttgatcttagttgccagcattcagttgggcactctaaggtgactgccggtgacaaaccggaggaaggtggggatgacgtcaaatcatcatgccccttatgacctgggctacacacgtgctacaatggatggtacaaagggctgcaagaccgcgaggtttagccaatcccataaaaccattctcagttcggattgcaggctgcaactcgcctgcatgaagccggaatcgctagtaatcgcggatcagcatgccgcggtgaatacgttcccgggccttgtacacaccgcccgtcacaccacgagagtttgcaacacccgaagtcggtggggtaacccttacgggagccagccgccgaaggtggggcagatgattggggtg

SEQ ID NO: 1319 - DNA, 1415 bp, Domibacillus iocasae
agtcgagcggacttgacggagcttgctccgttcaggtcagcggcggacgggtgagtaacacgtgggcaacctgccctgcagattgggataactccgggaaaccggggctaataccgaataacattgaaaacctcatggttttcttttgaaaggcggcttcggctgtcactgcaggatgggcccgcggcgcattagctagttggtgaggtaacggctcaccaaggcgacgatgcgtagccgacctgagagggtgatcggccacactgggactgagacacggcccagactcctacgggaggcagcagtagggaatcttccgcaatggacgaaagtctgacggagcaacgccgcgtgagtgaagaaggttttcggatcgtaaaactctgttgtcagggaagaacaagtacgggagtaactgcccgtaccttgacggtacctggccagaaagccacggctaactacgtgccagcagccgcggtaatacgtaggtggcaagcgttgtccggaattattgggcgtaaagcgcgcgcaggcggccttttaagtctgatgtgaaagcccccggctcaaccggggagggtcattggaaactggaaggcttgagtgcagaagagaagagcggaattccacgtgtagcggtgaaatgcgtagagatgtggaggaacaccagtggcgaaggcggctctttggtctgtaactgacgctgaggcgcgaaagcgtggggagcgaacaggattagataccctggtagtccacgccgtaaacgatgagtgctaagtgttggggggtttccgcccctcagtgctgcagctaacgcattaagcactccgcctggggagtacggccgcaaggctgaaactcaaaggaattgacgggggcccgcacaagcggtggagcatgtggtttaattcgaagcaacgcgaagaaccttaccaggtcttgacatcccgctgcccggtatagagatatacctttcccttcggggacagcggtgacaggtggtgcatggttgtcgtcagctcgtgtcgtgagatgttgggttaagtcccgcaacgagcgcaacccttgatcttagttgccagcattcagttgggcactctaaggtgactgccggtgacaaaccggaggaaggtggggatgacgtcaaatcatcatgccccttatgacctgggctacacacgtgctacaatggatggtacaaagggctgcaagaccgcgaggtttagccaatcccataaaaccattctcagttcggattgcaggctgcaactcgcctgcatgaagctggaatcgctagtaatcgcggatcagcatgccgcggtgaatacgttcccgggccttgtacacaccgcccgtcacaccacgagagtttgcaacacccgaagtcggtggggtaacccttacgggagccagcc

SEQ ID NO: 1320 - DNA, 1462 bp, Domibacillus mangrovi
cggcgtgcctaatacatgcaagtcgagcggatctaaaggagcttgctcctttagattagcggcggacgggtgagtaacacgtgggcaacctgccctgcagattgggataactccgggaaaccggggctaataccgaataatatcgaggatttcatgatcttcttttgaaagatggcttcggctgtcactgcaggatgggcccgcggcgcattagctagttggtgaggtaacggctcaccaaggcgacgatgcgtagccgacctgagagggtgatcggccacactgggactgagacacggcccagactcctacgggaggcagcagtagggaatcttccgcaatggacgaaagtctgacggagcaacgccgcgtgagtgatgaaggttttcggatcgtaaaactctgttgtcagggaagaacacgtacgggagtaactgtccgtaccttgacggtacctgaccagaaagccacggctaactacgtgccagcagccgcggtaatacgtaggtggcaagcgttgtccggaattattgggcgtaaagcgcgcgcaggcggtcttttaagtctgatgtgaaagcccacggctcaaccgtggaaggtcattggaaactggaagacttgagtgcagaagagaagagcggaattccacgtgtagcggtgaaatgcgtagagatgtggaggaacaccagtggcgaaggcggctctttggtctgtaactgacgctgaggcgcgaaagcgtggggagcaaacaggattagataccctggtagtccacgccgtaaacgatgagtgctaagtgttggggggtttccgcccctcagtgctgcagctaacgcattaagcactccgcctggggagtacggccgcaaggctgaaactcaaaggaattgacgggggcccgcacaagcggtggagcatgtggtttaattcgaagcaacgcgaagaaccttaccaggtcttgacatcccgctgaccggtatagagatatatctttcccttcggggacagtggtgacaggtggtgcatggttgtcgtcagctcgtgtcgtgagatgttgggttaagtcccgcaacgagcgcaacccttgatcttagttgccagcatttagttgggcactctaaggtgactgccggtgacaaaccggaggaaggtggggatgacgtcaaatcatcatgccccttatgacctgggctacacacgtgctacaatggatggtacaaagggctgcaagaccgcgaggtttagccaatcccataaaaccattctcagttcggattgcaggctgcaactcgcctgcatgaagctggaatcgctagtaatcgcggatcagcatgccgcggtgaatacgttcccgggccttgtacacaccgcccgtcacaccacgagagtttgcaacacccgaagtcggtggggtaacccttacgggagccagccgccgaaggtggggcagatgattggggtg

SEQ ID NO: 1321 - DNA, 1383 bp, Donghicola tyrosinivorans
aacgaacgctggcggcaggcctaacacatgcaagtcgaacgaagtcttcggacttagtggcggacgggttagtaacgcgtgggaacgtgccctttacttcggaatagtcccgggaaactgggtttaataccgaatacgcccttcgggggaaagatttatcggtaaaggatcggcccgcgttggattaggtagttggtggggtaatggcctaccaagccgacgatccatagctggtttgagaggatgatcagcaacactgggactgagacacggcccagactcctacgggaggcagcagtggggaatcttagacaatgggggcaaccctgatctagccatgccgcgtgagtgaagaaggccttagggtcgtaaagctctttcgccagggatgataatgacagtacctggtaaagaaaccccggctaactccgtgccagcagccgcggtaatacggagggggttagcgttgttcggaattactgggcgtaaagcgcacgtaggcggacttgaaagttgggggtgaaatcccggggctcaacctcggaactgccttcaaaactccaagtctagagttcgagagaggtgagtggaattccgagtgtagaggtgaaattcgtagatattcggaggaacaccagtggcgaaggcggctcactggctcgatactgacgctgaggtgcgaaagtgtggggagcaaacaggattagataccctggtagtccacaccgtaaacgatgaatgccagtcgtcgggtagcatgctgctcggtgacacacctaacggattaagcattccgcctggggagtacggtcgcaagattaaaactcaaaggaattgacgggggcccgcacaagcggtggagcatgtggtttaattcgaagcaacgcgcagaaccttaccaacccttgacatcctgtgccacgtccagagatggaccgttcccttcggggacgcagtgacaggtgctgcatggctgtcgtcagctcgtgtcgtgagatgttcggttaagtccggcaacgagcgcaacccacatccttagttgccagcattcagttgggcactctaaggaaactgcccgtgataagcgggaggaaggtgtggatgacgtcaagtcctcatggcccttacgggttgggctacacacgtgctacaatggcagtgacaatgggttaatcccaaaaaactgtctcagttcggattgttctctgcaactcgagagcatgaagtcggaatcgctagtaatcgcgtaacagcatgacgcggtgaatacgttcccgggccttgtacacaccgcccgtcacaccatgggagttgggtttacccgaaggcggtgcgccaaccttttggaggcagccgaccacggtaagctcagcgactggggtg

SEQ ID NO: 1322 - DNA, 1357 bp, Duganella phyllosphaerae
cggggcaacctggcggcgagtggcgaacgggtgagtaatatatcggaacgtaccctggagtgggggataacgtagcgaaagttacgctaataccgcatacgatctaaggatgaaagtgggggattcgcaagaacctcatgctcctggagcggccgatatctgattagctagttggtagggtaaaagcctaccaaggcatcgatcagtagctggtctgagaggacgaccagccacactggaactgagacacggtccagactcctacgggaggcagcagtggggaattttggacaatgggcgcaagcctgatccagcaatgccgcgtgagtgaagaaggccttcgggttgtaaagctcttttgtcagggaagaaacggggctttctaatacagagcgctaatgacggtacctgaagaataagcaccggctaactacgtgccagcagccgcggtaatacgtagggtgcaagcgttaatcggaattactgggcgtaaagcgtgcgcaggcggttttgtaagactgtcgtgaaatccccgggctcaacctgggaatggcgatggtgactgcaaggctagagtttggcagaggggggtagaattccacgtgtagcagtgaaatgcgtagatatgtggaggaacaccgatggcgaaggcagccccctgggtcaaaactgacgctcatgcacgaaagcgtggggagcaaacaggattagataccctggtagtccacgccctaaacgatgtctactagttgtcgggttttaattaacttggtaacgcagctaacgcgtgaagtagaccgcctggggagtacggtcgcaagattaaaactcaaaggaattgacggggacccgcacaagcggtggatgatgtggattaattcgatgcaacgcgaaaaaccttacctacccttgacatggcagaaatcccggagagattcgggagtgctcgaaagagaatctgcacacaggtgctgcatggctgtcgtcagctcgtgtcgtgagatgttgggttaagtcccgcaacgagcgcaacccttgtcattagttgctacgaaagagcactctaatgagactgccggtgacaaaccggaggaaggtggggatgacgtcaagtcctcatggcccttatgggtagggcttcacacgtcatacaatggtacatacagagggccgccaacccgcgagggggagctaatcccagaaagtgtatcgtagtccggattgtagtttgcaactcgactgcatgaagttggaatcgctagtaatcgcggatcagcatgtcgcggtgaatacgttcccgggtcttgtacacaccgcccgtcacaccatgggagcgggttttaccagaagtaggtag

SEQ ID NO: 1323 - DNA, 1399 bp, Duganella sacchari
tgcaagtcgaacggcagcacggagctttgctcctggtggcgagtggcgaacgggtgagtaaaatatcggaacgtacccaggagtgggggataacgtagcgaaagttacgctaataccgcatacgtcctaagggagaaagtgggggatcgcaagacctcatgctcatggagcggccgatatctgattagctagttggtggggtaaaggcctaccaaggcaacgatcagtagctggtctgagaggacgaccagccacactggaactgagacacggtccagactcctacgggaggcagcagtggggaattttggacaatgggggcaaccctgatccagcaatgccgcgtgagtgaagaaggccttcgggttgtaaagctcttttgtcagggaagaaaagggactggctaatatctggtcctcatgacggtacctgaagaataagcaccggctaactacgtgccagcagccgcggtaatacgtagggtgcaagcgttaatcggaattactgggcgtaaagcgtgcgcaggcggttttgtaagactgtcgtgaaatccccgggctcaacctgggaatggcgatggtgactgcaaggctagagtttggcagaggggggtagaattccacgtgtagcagtgaaatgcgtagatatgtggaggaacaccgatggcgaaggcagccccctgggtcaaaactgacgctcatgcacgaaagcgtggggagcaaacaggattagataccctggtagtccacgccctaaacgatgtctactagttgtcgggtcttaattgacttggtaacgcagctaacgcgtgaagtagaccgcctggggagtacggtcgcaagattaaaactcaaaggaattgacggggacccgcacaagcggtggatgatgtggattaattcgatgcaacgcgaaaaaccttacctacccttgacatggcaggaatcccggagagatttgggagtgctcgaaagggaatcattacacaggtgctgcatggctgtcgtcagctcgtgtcgtgagatgttgggttaagtcccgcaacgagcgcaacccttgtcattagttgctacgaaagagcactctaatgagactgccggtgacaaaccggaggaaggtggggatgacgtcaagtcctcatggcccttatgggtagggcttcacacgtcatacaatggtacatacagagggccgccaacccgcgagggggagctaatcccagaaagtgtatcgtagtccggattgtagtctgcaactcgactacatgaagttggaatcgctagtaatcgcggatcagcatgtcgcggtgaatacgttcccgggtcttgtacacaccgcccgtcacaccatgggagcgggttttaccagaagtaggtagcttaaccgcaaggagggcgct

SEQ ID NO: 1324 - DNA, 1451 bp, Duganella zoogloeoides
attgaacgctggcggcatgccttacacatgcaagtcgaacggcagcgcggggcaacctggcggcgagtggcgaacgggtgagtaatatatcggaacgtaccctggagtgggggataacgtagcgaaagttacgctaataccgcatacgatctaaggatgaaagtgggggatcgcaagacctcatgctcctggagcggccgatatctgattagctagttggtagggtaaaagcctaccaaggcatcgatcagtagctggtctgagaggacgaccagccacactggaactgagacacggtccagactcctacgggaggcagcagtggggaattttggacaatgggcgcaagcctgatccagcaatgccgcgtgagtgaagaaggccttcgggttgtaaagctcttttgtcagggaagaaacgggtttttctaatacagagatctaatgacggtacctgaagaataagcaccggctaactacgtgccagcagccgcggtaatacgtagggtgcaagcgttaatcggaattactgggcgtaaagcgtgcgcaggcggttttgtaagactgtcgtgaaatccccgggctcaacctgggaatggcgatggtgactgcaaggctagagtttggcagaggggggtagaattccacgtgtagcagtgaaatgcgtagatatgtggaggaacaccgatggcgaaggcagccccctgggtcaaaactgacgctcatgcacgaaagcgtggggagcaaacaggattagataccctggtagtccacgccctaaacgatgtctactagttgtcgggttttaattaacttggtaacgcagctaacgcgtgaagtagaccgcctggggagtacggtcgcaagattaaaactcaaaggaattgacggggacccgcacaagcggtggatgatgtggattaattcgatgcaacgcgaaaaaccttacctacccttgacatggcagaaatcctcgagagattgaggagtgctcgaaagagaatctgcacacaggtgctgcatggctgtcgtcagctcgtgtcgtgagatgttgggttaagtcccgcaacgagcgcaacccttgtcattagttgctacgaaagagcactctaatgagactgccggtgacaaaccggaggaaggtggggatgacgtcaagtcctcatggcccttatgggtagggcttcacacgtcatacaatggtacatacagagggccgccaacccgcgagggggagctaatcccagaaagtgtatcgtagtccggattgtagtctgcaactcgactgcatgaagttggaatcgctagtaatcgcggatcagcatgtcgcggtgaatacgttcccgggtcttgtacacaccgcccgtcacaccatgggagcgggttttaccagaagtaggtagcttaaccgcaaggagggcgcttaccacggtaggattcgtgactggggtg

SEQ ID NO: 1325 - DNA, 1467 bp, Dyella ginsengisoli
attgaacgctggcggcatgcctaacacatgcaagtcgaacggcagcacagcagtagcaatactgtgggtggcgagtggcggacgggtgagtaatgcatcgggacctacctagacgtgggggataacgtagggaaacttacgctaataccgcatacgtcctacgggagaaagcaggggaccttcgggccttgcgcggttagacggaccgatgttcgattagcttgttggtgaggtaatggctcaccaaggcgacgatcgatagctggtctgagaggatgatcagccacactggaactgagacacggtccagactcctacgggaggcagcagtggggaatattggacaatgggcgcaagcctgatccagcaatgccgcgtgtgtgaagaaggccttcgggttgtaaagcacttttatcaggagcgaaatactaccggctaatacccggtggggctgacggtacctgaggaataagcaccggctaacttcgtgccagcagccgcggtaatacgaagggtgcaagcgttaatcggaattactgggcgtaaagcgtgcgtaggcggtttcttaagtctgctgtgaaatccccgggctcaacctgggaatggcagtggatactgggaagctagagtgtgtcagaggatggtggaattcccggtgtagcggtgaaatgcgtagagatcgggaggaacatcagtggcgaaggcggccatctgggacaacactgacgctgaggcacgaaagcgtggggagcaaacaggattagataccctggtagtccacgccctaaacgatgcgaactggatgttggtctcaactcggagatcagtgtcgaagctaacgcgttaagttcgccgcctggggagtacggtcgcaagactgaaactcaaaggaattgacgggggcccgcacaagcggtggagtatgtggtttaattcgatgcaacgcgaagaaccttacctggccttgacatgtccggaatcctgcagagatgcgggagtgccttcgggaatcggaacacaggtgctgcatggctgtcgtcagctcgtgtcgtgagatgttgggttaagtcccgcaacgagcgcaacccttgtccttagttgccagcacgtaatggtgggaactctaaggagactgccggtgacaaaccggaggaaggtggggatgacgtcaagtcatcatggcccttacggccagggctacacacgtactacaatggtcggtacagagggttgcaataccgcgaggtggagccaatcccagaaagccgatcccagtccggatcgaagtctgcaactcgacttcgtgaagtcggaatcgctagtaatcgcagatcagctatgctgcggtgaatacgttcccgggccttgtacacaccgcccgtcacaccatgggagtgagttgctccagaagccgttagtctaaccgcaagggggacgacgaccacggagtggttcatgactggggtg

SEQ ID NO: 1326 - DNA, 1467 bp, Dyella japonica
attgaacgctggcggcatgcctaacacatgcaagtcgaacggcagcacagcagtagcaatactgtgggtggcgagtggcggacgggtgagtaatgcatcgggatctacccaaacgtgggggataacgtagggaaacttacgctaataccgcatacgtcctatgggagaaagcgggggaccgaaaggcctcgcgcggttggacgaaccgatgtgcgattagctagttggtagggtaatggcctaccaaggcgacgatcgctagctggtctgagaggatgatcagccacactggaactgagacacggtccagactcctacgggaggcagcagtggggaatattggacaatgggcgcaagcctgatccagcaatgccgcgtgtgtgaagaaggccttcgggttgtaaagcacttttatcaggagcgaaatactactggctaataaccggtggggctgacggtacctgaggaataagcaccggctaacttcgtgccagcagccgcggtaatacgaagggtgcaagcgttaatcggaattactgggcgtaaagcgtgcgtaggcggttatttaagtctgttgtgaaatccccgggctcaacctgggaatggcaatggatactggatagctagagtgtgatagaggatggtggaattcccggtgtagcggtgaaatgcgtagagatcgggaggaacatcagtggcgaaggcggccatctggatcaacactgacgctgaggcacgaaagcgtggggagcaaacaggattagataccctggtagtccacgccctaaacgatgcgaactggatgttggtctcaactcggagatcagtgtcgaagctaacgcgttaagttcgccgcctggggagtacggtcgcaagactgaaactcaaaggaattgacgggggcccgcacaagcggtggagtatgtggtttaattcgatgcaacgcgaagaaccttacctggccttgacatgtctggaatcctgcagagatgcgggagtgccttcgggaatcagaacacaggtgctgcatggctgtcgtcagctcgtgtcgtgagatgttgggttaagtcccgcaacgagcgcaacccttgtccttagttgccagcacgtaatggtgggaactctaaggagactgccggtgacaaaccggaggaaggtggggatgacgtcaagtcatcatggcccttacggccagggctacacacgtactacaatggtcggtacagagggttgcaataccgcgaggtggagccaatcccagaaagccgatcccagtccggattggagtctgcaactcgactccatgaagtcggaatcgctagtaatcgcagatcagctatgctgcggtgaatacgttcccgggccttgtacacaccgcccgtcacaccatgggagtgagttgctccagaagccgttagtctaaccgcaagggggacgacgaccacggagtggttcatgactggggtg

SEQ ID NO: 1327 - DNA, 1467 bp, Dyella jiangningensis
attgaacgctggcggcatgcctaacacatgcaagtcgaacggcagcacagtagagcttgctctatgggtggcgagtggcggacgggtgagtaatgcatcgggatctacccaaacgtgggggataacgtagggaaacttacgctaataccgcatacgtcctatgggagaaagcgggggatcgcaagacctcgcgcggttggacgaaccgatgtgcgattagctagttggtagggtaatggcctaccaaggcgacgatcgctagctggtctgagaggatgatcagccacactggaactgagacacggtccagactcctacgggaggcagcagtggggaatattggacaatgggcgcaagcctgatccagcaatgccgcgtgtgtgaagaaggccttcgggttgtaaagcacttttatcaggagcgaaatgccattggttaatacccggtggagctgacggtacctgaggaataagcaccggctaacttcgtgccagcagccgcggtaatacgaagggtgcaagcgttaatcggaattactgggcgtaaagcgtgcgtaggcggtgacttaagtctgctgtgaaatccccgggctcaacctgggaatggcagtggatactgggtcgctagagtgtgatagaggatggtggaattcccggtgtagcggtgaaatgcgtagagatcgggaggaacatcagtggcgaaggcggccatctggatcaacactgacgctgaggcacgaaagcgtggggagcaaacaggattagataccctggtagtccacgccctaaacgatgcgaactggatgttggtctcaactcggagatcagtgtcgaagctaacgcgttaagttcgccgcctggggagtacggtcgcaagactgaaactcaaaggaattgacgggggcccgcacaagcggtggagtatgtggtttaattcgatgcaacgcgaagaaccttacctggccttgacatgtctggaatcctgcagagatgcgggagtgccttcgggaatcagaacacaggtgctgcatggctgtcgtcagctcgtgtcgtgagatgttgggttaagtcccgcaacgagcgcaacccttgtccttagttgccagcacgtaatggtgggaactctaaggagactgccggtgacaaaccggaggaaggtggggatgacgtcaagtcatcatggcccttacggccagggctacacacgtactacaatggtcggtacagagggttgcaataccgcgaggtggagccaatcccagaaagccgatcccagtccggatcgaagtctgcaactcgacttcgtgaagtcggaatcgctagtaatcgcagatcagctatgctgcggtgaatacgttcccgggccttgtacacaccgcccgtcacaccatgggagtgagttgctccagaagccgttagtctaaccgcaagggggacgacgaccacggagtggttcatgactggggtg

SEQ ID NO: 1328 - DNA, 1421 bp, Dyella marensis
tgcctaacacatgcaagtcgaacggcagcacagcagtagcaatactgtgggtggcgagtggcggacgggtgagtaatgcatcgggacctgcccagacgtgggggataacgtagggaaacttacgctaataccgcatacgtcctacgggagaaagcgggggatcgaaagacctcgcgcggttggatggaccgatgttcgattagctagttggtgaggtaatggctcaccaaggcgacgatcgatagctggtctgagaggatgatcagccacactgggactgagacacggcccagactcctacgggaggcagcagtggggaatattggacaatgggcgaaagcctgatccagcaatgccgcgtgtgtgaagaaggccttcgggttgtaaagcacttttatcaggagcgaaatactgccggctaatacccggcggggctgacggtacctgaggaataagcaccggctaacttcgtgccagcagccgcggtaatacgaagggtgcaagcgttaatcggaattactgggcgtaaagcgtgcgtaggcggttctttaagtctgctgtgaaatccccgggctcaacctgggaatggcagtggatactggagagctagagtgtgatagaggatggtggaattcccggtgtagcggtgaaatgcgtagagatcgggaggaacatcagtggcgaaggcggccatctggatcaacactgacgctgaggcacgaaagcgtggggagcaaacaggattagataccctggtagtccacgccctaaacgatgcgaactggatgttggtctcaactcggagatcagtgtcgaagctaacgcgttaagttcgccgcctggggagtacggtcgcaagactgaaactcaaaggaattgacgggggcccgcacaagcggtggagtatgtggtttaattcgatgcaacgcgaagaaccttacctggccttgacatgtctggaatcctgcagagatgcgggagtgccttcgggaatcagaacacaggtgctgcatggctgtcgtcagctcgtgtcgtgagatgttgggttaagtcccgcaacgagcgcaacccttgtccttagttgccagcacgtaatggtgggaactctaaggagactgccggtgacaaaccggaggaaggtggggatgacgtcaagtcatcatggcccttacggccagggctacacacgtactacaatggtcggtacagagggttgcaataccgcgaggtggagccaatcccagaaagccgatcccagtccggatcgaagtctgcaactcgacttcgtgaagtcggaatcgctagtaatcgcagatcagctatgctgcggtgaatacgttcccgggccttgtacacaccgcccgtcacaccatgggagtgagttgctccagaagccgttagcctaaccgcaaggagggcga

SEQ ID NO: 1329 - DNA, 1420 bp, Dyella soli
atgcagtcgaacggcagcacagcagtagcaatactgtgggtggcgagtggcggacgggtgagtaatgcatcgggacctacctagacgtgggggataacgtagggaaacttacgctaataccgcatacgtcctacgggagaaagcaggggaccttcgggccttgcgcggttagacggaccgatgttcgattagctagttggtagggtaaaggcctaccaaggcgacgatcgatagctggtctgagaggatgatcagccacactggaactgagacacggtccagactcctacgggaggcagcagtggggaatattggacaatgggcgcaagcctgatccagcaatgccgcgtgtgtgaagaaggccttcgggttgtaaagcacttttatcaggagcgaaatgccattggttaatacccgatggagctgacggtacctgaggaataagcaccggctaacttcgtgccagcagccgcggtaatacgaagggtgcaagcgttaatcggaattactgggcgtaaagcgtgcgtaggcggtttgttaagtctgttgtgaaatccccgggctcaacctgggaatggcaatggatactggcaagctagagtgtgatagaggatggtggaattcccggtgtagcggtgaaatgcgtagagatcgggaggaacatcagtggcgaaggcggccatctggatcaacactgacgctgaggcacgaaagcgtggggagcaaacaggattagataccctggtagtccacgccctaaacgatgcgaactggatgttggtctcaactcggagatcagtgtcgaagctaacgcgttaagttcgccgcctggggagtacggtcgcaagactgaaactcaaaggaattgacgggggcccgcacaagcggtggagtatgtggtttaattcgatgcaacgcgaagaaccttacctggccttgacatgtctggaatcctgcagagatgcgggagtgccttcgggaatcagaacacaggtgctgcatggctgtcgtcagctcgtgtcgtgagatgttgggttaagtcccgcaacgagcgcaacccttgtccttagttgccagcacgtaatggtgggaactctaaggagactgccggtgacaaaccggaggaaggtggggatgacgtcaagtcatcatggcccttacggccagggctacacacgtactacaatggtcggtacagagggttgcaataccgcgaggtggagccaatcccagaaagccgatcccagtccggatcgaagtctgcaactcgacttcgtgaagtcggaatcgctagtaatcgcagatcagctatgctgcggtgaatacgttcccgggccttgtacacaccgcccgtcacaccatgggagtgagttgctccagaagccgttagtctaaccgcaagggggacgacgaccacgga

SEQ ID NO: 1330 - DNA, 1467 bp, Dyella thiooxydans
attgaacgctggcggcatgcttaacacatgcaagtcgaacggcagcacagcagagcttgctctgtgggtggcgagtggcggacgggtgagtaatgcatcgggacctacccagacgtgggggataacgtagggaaacttacgctaataccgcatacgtcctacgggagaaagcaggggaccttcgggccttgcgcggttggacggaccgatgttcgattagcttgttggtgaggtaatggctcaccaaggcgacgatcgatagctggtctgagaggatgatcagccacactgggactgagacacggcccagactcctacgggaggcagcagtggggaatattggacaatgggcgcaagcctgatccagcaatgccgcgtgtgtgaagaaggccttcgggttgtaaagcacttttatcaggagcgaaacactgtcggctaatacccggcgggactgacggtacctgaggaataagcaccggctaacttcgtgccagcagccgcggtaatacgaagggtgcaagcgttaatcggaattactgggcgtaaagcgtgcgtaggcggtttgttaagtctgctgtgaaatccccgggctcaacctgggaatggcagtggatactggcaagctagagtgtgtcagagggtggtggaattcccggtgtagcggtgaaatgcgtagagatcgggaggaacatcagtggcgaaggcggccacctgggacaacactgacgctgaggcacgaaagcgtggggagcaaacaggattagataccctggtagtccacgccctaaacgatgcgaactggatgttggtctcaactcggagatcagtgtcgaagctaacgcgttaagttcgccgcctggggagtacggtcgcaagactgaaactcaaaggaattgacgggggcccgcacaagcggtggagtatgtggtttaattcgatgcaacgcgaagaaccttacctggccttgacatgtccggaatcctgcagagatgcgggagtgccttcgggaatcggaacacaggtgctgcatggctgtcgtcagctcgtgtcgtgagatgttgggttaagtcccgcaacgagcgcaacccttgtccttagttgccagcacgtaatggtgggaactctaaggagactgccggtgacaaaccggaggaaggtggggatgacgtcaagtcatcatggcccttacggccagggctacacacgtactacaatggtcggtacagagggttgcaataccgcgaggtggagccaatcccagaaagccgatcccagtccggattggagtctgcaactcgactccatgaagtcggaatcgctagtaatcgcagatcagctatgctgcggtgaatacgttcccgggccttgtacacaccgcccgtcacaccatgggagtgagttgctccagaagccgttagtctaaccgcaagggggacgacgaccacggagtggttcatgactggggtg

SEQ ID NO: 1331 - DNA, 1450 bp, Dysgonomonas alginatilytica
  misc_feature (391)..(391): n is a, c, g, or t
atgaacgctagcgacaggcctaacacatgcaagtcgaggggtagcatgaagtagcaatactttgatgacgaccggcgcacgggtgagtaacacgtatgcaacctaccttctacaggggaatagcccggagaaatccggattaataccccataacgcagggataccgcctggtaatatttgctaaagattaatcggtagaagatgggcatgcgttccattagccagttggtgaggtaacggctcaccaaagcaacgatggataggggaactgagaggtttatcccccacactggaactgagacacggtccagactcctacgggaggcagcagtgaggaatattggtcaatggacgagagtctgaaccagccaagtcgcgtgaaggatgactnccctacgggttgtaaacttcttttgtatgggagtaaaaagggttacgtgtaacctcttgcaagtaccatacgaataagcatcggctaactccgtgccagcagccgcggtaatacggaggatgcaagcgttatccggatttattgggtttaaagggtgcgtaggcgggattataagtcagcggtgaaagtttgaggctcaaccttaaaattgccgttgaaactgtttttcttgagtatatttgaagtaggcggaattcgtggtgtagcggtgaaatgcatagatatcacgaagaactccaattgcgaaggcagcttactaaactataactgacgctgaagcacgaaagcgtgggtatcaaacaggattagataccctggtagtccacgccgtaaacgatgattactagctgtttgtgatattacaataagcggctaagcgaaagcgataagtaatccacctggggagtacgccggcaacggtgaaactcaaaggaattgacgggggcccgcacaagcggaggaacatgtggtttaattcgatgatacgcgaggaaccttacccgggcttgaaatgcatctgaccgcttaagaaattaggcttctagcaatagcagatgtgtaggtgctgcatggttgtcgtcagctcgtgccgtgaggtgtcggcttaagtgccataacgagcgcaacccacattgttagttactaacaggtcaagctgaggactctgacaagactgccagcgtaagctgtgaggaaggtgtggatgacgtcaaatcagcacggcccttacgtccggggcgacacacgtgttacaatggatggtacagagggtcgctacctggtgacaggatgccaatctccaaagccattcccagttcggattggagtctgcaactcgactccatgaagctggattcgctagtaatcgcgcatcagccatggcgcggtgaatacgttcccgggccttgtacacaccgcccgtcaagccatggaagctgggggtacctgaagtacgtaaccgataaggagcgtcctagggtaaaactagtgactggggct

SEQ ID NO: 1332 - DNA, 1452 bp, Dysgonomonas capnocytophagoides
  misc_feature (95)..(95): n is a, c, g, or t
  misc_feature (736)..(736): n is a, c, g, or t
  misc_feature (1447)..(1447): n is a, c, g, or t
gatgaacgctagcgacaggcctaacacatgcaagtcgaggggtagcatgaaatgtagcaatactttagatgacgaccggcgcacgggtgagtaangcgtatgcaacctacctactacaggggaatagcccgaaaaaattcggattaatgccgcataatacaggggcaccgcatggtgatatttgttaaagattaattggtagtagatgggcatgcgttccattagccagttggtgaggtaacggctcaccaaagcaacgatggataggggttctgagaggtttatcccccacactggtactgagacacggaccagactcctacgggaggcagcagtgaggaatattggtcaatgggcgagagcctgaaccagccaagtcgcgtgaaggatgactgccctatgggttgtaaacttcttttgtactggggtaaaaaagaggacgtgtcctttcttgcaagtacagtacgaataagcatcggctaactccgtgccagcagccgcggtaatacggaggatgcgagcgttatccggatttattgggtttaaagggtgcgtaggcggggatttaagtcagcggtgaaagtttgaggctcaaccttaaaattgccgttgaaactgggtttcttgagtgtatttgaagtaggcggaattcgttgtgtagcggtgaaatgcatagatataacgaagaactccaattgcgcaggcagcttactaaactacaactgacgctgaagcncgaaatcgtgggtatcaaacaggattagataccctggtagtccacgcagtaaacgatgattactagctgtttgtgatatacaataagtggctaagcgaaagcgataagtaatccacctggggagtacgccggcaacggtgaaactcaaaggaattgacgggggcccgcacaagcggaggaacatgtggtttaattcgatgatacgcgaggaaccttacccgggcttgaaatgcatctgatcgatcgggaaaccgatcttctagcaatagcagatgcggaggtgctgcatggttgtcgtcagctcgtgccgtgaggtgtcggcttaagtgccataacgagcgcaacccacattgttagttactaacaggtcaagctgaggactctgacaagactgccagcgtaagctgcgaggaaggtgtggatgacgtcaaatcagcacggcccttacgtcccgggcgacacacgtgttacaatggggggtacagagggttgctacttggtgacaagatgctaatctcgaaagcctctcccagttcggattggagtctgcaactcgactccatgaagctggattcgctagtaatcgcgcatcagccatggcgcggtgaatacgttcccgggccttgtacacaccgcccgtcaagccatggaagctgggggtacctgaagtacgtaaccgcaaggagcgtcctagggtaaaactagtgactngggct

SEQ ID NO: 1333 - DNA, 1449 bp, Dysgonomonas gadei
gatgaacgctagcgataggcctaacacatgcaagtcgaggggcagcatagggtagcaatactttgatggcgaccggcgcacgggtgagtaacgcgtatgcaacctacctataacaggggaataacccggagaaattcggactaataccgcataaaacaggggctccgcatggagatatttgttaaagatttatcggttatagatgggcatgcgttccattagccagttggtgaggtaacggctcaccaaagcaacgatggataggggaactgagaggtttgtcccccacactggaactgagacacggaccagactcctacgggaggcagcagtgaggaatattggtcaatgggcgagagcctgaaccagccaaatcgcgtgaaggaagactgccttatgggttgtaaacttcttttatacaggaataaaaagagttacgtgtaacttattgcatgtactgtatgaataagcatcggctaactccgtgccagcagccgcggtaatacggaggatgcgagcgttatccggatttattgggtttaaagggtgcgcaggcgggaacttaagtcagcggtgaaatctcgacgcttaacgtcgaaactgccgttgaaactgggtttcttgagtatagatgaagtaggcggaattcgttgtgtagcggtgacatgcttagatataacgaggaactccgattgcgtaggcagcttactaagctataactgacgctcaagcacgaaagcgtggggatcaaacaggattagataccctggtagtccacgccgtaaacgatgattactagttgtatgcgatataccgtatgtgactaagcgaaagcgataagtaatccacctggggagtacgccggcaacggtgaaactcaaaggaattgacgggggcccgcacaagcggaggaacatgtggtttaattcgatgatacgcgaggaaccttacccgggcttgaaatgcagaagaataacgttgaaagatgttagccagcaatggcttctgtgtaggtgctgcatggttgtcgtcagctcgtgccgtgaggtgtcggcttaagtgccataacgagcgcaacccacattgttagttactaacaggtcaagctgaggactctaacaagactgccgtcgtaagatgcgaggaaggtgtggatgacgtcaaatcagcacggcccttacgtccggggcgacacacgtgttacaatgggtggtacaaagggcagctacttggtgacaagatgctaatctccaaagccactcccagttcggatcggagtctgcaactcgactccgtgaagctggattcgctagtaatcgcgcatcagccatggcgcggtgaatacgttcccgggccttgtacacaccgcccgtcaagccatggaagctgggggtatctgaagtgcgtaaccgcaaggagcgtcctagggtaaaaccggtgactggggct

SEQ ID NO: 1334 - DNA, 1451 bp, Dysgonomonas macrotermitis
gatgaacgctagcgacaggcctaacacatgcaagtcgaggggtaacatggaagtagcaatacaaccgatgacgaccggcgcacgggtgagtaacgcgtatgcaacctacctactacagggggatagcccggagaaatccggattaataccgcataatacagggattccgcatggaaatatttgttaaagaaattcggtagtagatgggcatgcgttccattagccagttggtgaggtaacggctcaccaaagcaacgatggataggggaactgagaggtttatcccccacactggtactgagacacggaccagactcctacgggaggcagcagtgaggaatattggtcaatggacgagagtctgaaccagccaagtcgcgtgaaggatgactgccctacgggttgtaaacttcttttgtgctagagtaaaaaagagtatgtatactctcttgcaagtatagtacgaataagcatcggctaactccgtgccagcagccgcggtaatacggaggatgcgagcgttatccggatttattgggtttaaagggtgcgtaggcgggaccttaagtcagcggtgaaagtttgaggctcaaccttaaaattgccgttgaaactgggatccttgagtgtatttgaagtaggcggaattcgtagtgtagcggtgaaatgcatagatattacgaagaactccaattgcgcaggcagcttactaaactacaactgacgctgaagcacgaaagcgtgggtatcaaacaggattagataccctggtagtccacgcagtaaacgatgattactagctgtttgtgatattacaataagtggctaagcgaaagcgataagtaatccacctggggagtacgccggcaacggtgaaactcaaaggaattgacgggggcccgcacaagcggaggaacatgtggtttaattcgatgatacgcgaggaaccttacccgggcttgaaatatactcgaccggtctggaaacaggccttctagcaatagcgagtatgtaggtgctgcatggttgtcgtcagctcgtgccgtgaggtgtcggcttaagtgccataacgagcgcaaccctcattgttagttactaacaggtcaagctgaggactctgacaagactgccagcgtaagctgtgaggaaggtggggatgacgtcaaatcagcacggcccttacgtccggggcgacacacgtgttacaatggggggtacaacgggtagctacctggcgacaggatgccaatctccaaagcccctcccagttcggatcgaagtctgcaactcgacttcgtgaagctggattcgctagtaatcgcgcatcagccatggcgcggtgaatacgttcccgggccttgtacacaccgcccgtcaagccatggaagccgggggtacctgaagtacgtaaccgtaaggagcgtcctagggtaaaactggtgactggggct

SEQ ID NO: 1335 - DNA, 1458 bp, Ectothiorhodosinus mongolicus
attgaacgctggcggcatgcttaacacatgcaagtcgaacggtaacaggccttcgggcgctgacgagtggcggacgggtgagtaacgcgtaggaatctgcccagtagtgggggacaacccggggaaactcgggctaataccgcatacgccctacgggggaaagcaggggatcttcggaccttgcgctattggatgagcctgcgtcggattagcttgttggtggggtaatggcccaccaaggcgacgatccgtagctggtctgagaggatgatcagccacactgggactgagacacggcccagactcctacgggaggcagcagtggggaatattggacaatgggcgcaagcctgatccagcaatgccgcgtgtgtgaagaaggcctgcgggttgtaaagcactttcagtggggaggaaaagcgggtacctaatacgtacttgtcttgacgttacccacagaagaagcaccggctaactccgtgccagcagccgcggtaatacggagggtgcaagcgttaatcggaattactgggcgtaaagcgcacgtaggtggctacataagtcagatgtgaaagccccgggctcaacctgggaattgcatctgatactgtgtagctagagtttggtagaggagagtggaatttccggtgtagcggtgaaatgcgtagatatcggaaggaacaccagtggcgaaggcgactctctggactaaaactgacactgaggtgcgaaagcgtggggagcaaacaggattagataccctggtagtccacgccgtaaacgatgagaactagccgttggggggattaaaccctttagtggcgcagctaacgcgataagttctccgcctggggagtacggccgcaaggttgaaactcaaaggaattgacgggggcccgcacaagcggtggagcatgtggtttaattcgatgcaacgcgaagaaccttacctgcccttgacatgctaggaatcccacagagatgtgggagtgccttcgggaacctagacacaggtgctgcatggctgtcgtcagctcgtgtcgtgagatgttgggttaagtcccgcaacgagcgcaacccttgtccctagttgccagcgattcggtcgggaactctagggagactgccggtgacaaaccggaggaaggtggggatgacgtcaagtcatcatggcccttatgggcagggctacacacgtgctacaatggtcggtacagagggttgccaagccgcgaggtggagctaatcccagaaagccgatcgtagtccggattggagtctgcaactcgactccatgaagtcggaatcgctagtaatcgcggatcagcattgccgcggtgaatacgttcccgggccttgtacacaccgcccgtcacaccatgggagtgggttgcaccagaagtagctagtctaaccttcgggaggacggttaccacggtgtgattcatgactggggtg

SEQ ID NO: 1336 - DNA, 1458 bp, Ectothiorhodospira haloalkaliphila
attgaacgctggcggcatgcctaacacatgcaagtcgaacggtaacaggccttcgggtgctgacgagtggcggacgggtgagtaacgcgtaggaatctgcctggtagtggaggacaacccggggaaactcgggctaatactgcatacgccctacgggggaaagcgggggatcttcggacctcgcgctatcagatgagcctgcgttggattagcttgttggtggggtaaaggcctaccaaggctgcgatccatagctggtctgagaggatgatcagccacactgggactgagacacggcccagactcctacgggaggcagcagtggggaatattggacaatgggggcaaccctgatccagcaatgccgcgtgtgtgaagaaggcctgcgggttgtaaagcactttcagtggggaagaaaagcgggtgcttaatacgtgcctgtcttgacatcacccacagaagaagcaccggctaactccgtgccagcagccgcggtaatacggagggtgcgagcgttaatcggaattactgggcgtaaagcgcacgtaggtggttatgtcagtcagatgtgaaagccccgggcttaacctgggaattgcatctgatactgcatggctagagtttggtagaggagagtggaatttccggtgtagcggtgaaatgcgtagatatcggaaggaacaccagtggcgaaggcgactctctggactaaaactgacactgaggtgcgaaagcgtggggagcaaacaggattagataccctggtagtccacgctgtaaacgatgagaactagccgttggggggaattaaccccttagtggcgcagctaacgcgttaagttctccgcctggggagtacggccgcaaggttgaaactcaaaggaattgacgggggcccgcacaagcggtggagcatgtggtttaattcgatgcaacgcgaagaaccttacctgcccttgacatcctcggaatcctgcagagatgcgggagtgccttcgggaaccgagtgacaggtgctgcatggctgtcgtcagctcgtgtcgtgagatgttgggttaagtcccgcaacgagcgcaacccttgtccctagttgccagcatttcggatgggaactctagggagactgccggtgacaaaccggaggaaggtggggatgacgtcaagtcatcatggcccttatgggcagggctacacacgtgctacaatggccggtacagtgggttgccaagccgcgaggtggagctaatcccaaaaagccggtcgtagtccgaattggagtctgcaactcgactccatgaagtcggaatcgctagtaatcgcggatcagcattgccgcggtgaatacgttcccgggccttgtacacaccgcccgtcacaccatgggagttggctgcaccagaagtggatagtctaaccttcgggaggacgttcaccacggtgtggtcaatgactggggtg

SEQ ID NO: 1337 - DNA, 1458 bp, Ectothiorhodospira magna
attgaacgctggcggcatgcttaacacatgcaagtcgaacggtaacaggccttcgggcgctgacgagtggcggacgggtgagtaacgcgtaggaatctgcctggtagtgggggacaacccggggaaactcgggctaataccgcatacgccctaagggggaaagcgggggctcttcggacctcgcgctatcagatgagcctgcgtccgattagctggttggtgaggtaatggctcaccaaggcgacgatcggtagctggtctgagaggatgatcagccacactgggactgagacacggcccagactcctacgggaggcagcagtggggaatattggacaatgggcgcaagcctgatccagcaatgccgcgtgtgtgaagaaggcctgcgggttgtaaagcactttcagtggggaggaaaagcgggtgcctaatacgcgcctgtcttgacgttacccacagaagaagcaccggctaactccgtgccagcagccgcggtaatacggagggtgcaagcgttaatcggaattactgggcgtaaagcgcacgtaggtggtgatgtcagtcagatgtgaaagccctgggctcaacctgggaactgcatctgatactgcatgactagagtttggtagaggagagtggaatttccggtgtagcggtgaaatgcgtagatatcggaaggaacaccagtggcgaaggcgactctctggactaaaactgacactgaggtgcgaaagcgtggggagcaaacaggattagataccctggtagtccacgccgtaaacgatgagaactagccgttgggagggtttaacctcttagtggcgcagcaaacgcgttaagttctccgcctggggagtacggccgcaaggttgaaactcaaaggaattgacgggggcccgcacaagcggtggagcatgtggtttaattcgatgcaacgcgaagaaccttacctgcccttgacatcctcggaatcctgcagagatgcgggagtgccttcgggaaccgagtgacaggtgctgcatggctgtcgtcagctcgtgtcgtgagatgttgggttaagtcccgcaacgagcgcaacccttgtccctagttgccaacacttcgggtgggaactctagggagactgccggtgacaaaccggaggaaggtggggatgacgtcaagtcatcatggcccttatgggcagggctacacacgtgctacaatggccagtacagtgggttgccaagccgcaaggtggagctaatcccaaaaagctggtcgtagtccggattggagtctgcaactcgactccatgaagtcggaatcgctagtaatcgcagatcagcattgctgcggtgaatacgttcccgggccttgtacacaccgcccgtcacaccatgggagttggctgcaccagaagtagatagtctaaccttcgggaggacgtttaccacggtgtggtcaatgactggggtg

SEQ ID NO: 1338 - DNA, 1458 bp, Ectothiorhodospira marina
attgaacgctggcggcatgcctaacacatgcaagtcgaacggtaacaggccttcgggtgctgacgagtggcggacgggtgagtaacgcgtaggaatctgcctggtagtggaggacaacccggggaaactcgggctaatactgcatacgccctacgggggaaagcgggggatctttggacctcgcgctatcagatgagcctgcgttggattagcttgttggtggggtaaaggcttaccaaggcgacgatccatagctggtctgagaggatgatcagccacactgggactgagacacggcccagactcctacgggaggcagcagtggggaatattggacaatgggggcaaccctgatccagcaatgccgcgtgtgtgaagaaggcctgcgggttgtaaagcactttcagtggggaagaaaagcgggcgcttaatacgtgcttgtcttgacatcacccacagaagaagcaccggctaactccgtgccagcagccgcggtaatacggagggtgcgagcgttaatcggaattactgggcgtaaagcgcacgtaggtggttatgtcagtcagatgtgaaagccccgggcttaacctgggaattgcatctgatactgcatggctagagtttggtagaggagagtggaatttccggtgtagcggtgaaatgcgtagatatcggaaggaacaccagtggcgaaggcgactctctggactgaaactgacactgaggtgcgaaagcgtggggagcaaacaggattagataccctggtagtccacgctgtaaacgatgagaactagccgttggggggaattaaccccttagtggcgcagctaacgcgttaagttctccgcctggggagtacggccgcaaggttgaaactcaaaggaattgacgggggcccgcacaagcggtggagcatgtggtttaattcgatgcaacgcgaagaaccttacctgcccttgacatcctcggaatcctgcagagatgcgggagtgccttcgggaaccgagtgacaggtgctgcatggctgtcgtcagctcgtgtcgtgagatgttgggttaagtcccgcaacgagcgcaacccttgtccctagttgccagcatttcggatgggaactctagggagactgccggtgacaaaccggaggaaggtggggatgacgtcaagtcatcatggcccttatgggcagggctacacacgtgctacaatggccggtacagtgggttgccaagccgcgaggtggagctaatcccaaaaagccggtcgtagtccgaattggagtctgcaactcgactccatgaagtcggaatcgctagtaatcgcggatcagcattgccgcggtgaatacgttcccgggccttgtacacaccgcccgtcacaccatgggagttggctgcaccagaagtggatagtctaaccttcgggaggacgttcaccacggtgtggtcaatgactggggtg

SEQ ID NO: 1339 - DNA, 1447 bp, Ectothiorhodospira mobilis
  misc_feature (232)..(232): n is a, c, g, or t
  misc_feature (301)..(301): n is a, c, g, or t
  misc_feature (498)..(502): n is a, c, g, or t
  misc_feature (697)..(698): n is a, c, g, or t
  misc_feature (722)..(724): n is a, c, g, or t
  misc_feature (967)..(967): n is a, c, g, or t
  misc_feature (1183)..(1183): n is a, c, g, or t
  misc_feature (1187)..(1187): n is a, c, g, or t
  misc_feature (1244)..(1244): n is a, c, g, or t
  misc_feature (1288)..(1288): n is a, c, g, or t
  misc_feature (1299)..(1299): n is a, c, g, or t
  misc_feature (1303)..(1303): n is a, c, g, or t
  misc_feature (1309)..(1309): n is a, c, g, or t
  misc_feature (1312)..(1312): n is a, c, g, or t
aacgctggcggcatgcttaacacatgcaagtcgaacggtaacaggccttcgggcgctgacgagtggcggacgggtgagtaacgcgtaggaatctgcctggtagtgggggacaacccggggaaactcgggctaataccgcatacgcccaagggggaaagcgggggctcttcggacctcgcgctatcagatgagcctgcgttggattagcttgttggtggggtaatggcctacnaaggcgacgatccatagctggtctgagaggatgatcagccacactgggactgagacacggcccagactnctacgggaggcagcagtggggaatattggacaatgggcgcaaccctgatccagcaatgccgcgtgtgtgaagaaggcctgcgggttgtaaagcactttcagtggggaggaaaagcgggtgcctaatacgtgcctgacttgacgttacccacagaagaagcaccggctaactccgtgccagcagccgcggtaatacgnnnnnaaggcgcggtattcggaattactgggcgtaaagcgcacgtaggtggttatgtaagtcggatgtgaaagccccgggctcaacctggaattgcatccgatactgcatggctagagtttggtagaggagagtggaattcccggtgtagcggtgaaatgcgtagatatcgggaggaacaccagtgcgaaggcggctctnnggaccaaaactgacgctgaggtgnnnaagcgtggggagcaaacaggattagataccctggtagtccacgttgtaaacgctgaggcctagcctgttcggttcgcactagaactgagtggcgcagtaaacgcattaagtcctccgctggggagtacggccgcaaggttgaaactcaaaggaattgacgggggcccgcacaagcggtggagcatgtggtttaattcgatgcaacgcgaagaaccttacctgcccttgacatcctggaatccncagagatgcgggagtgcttcgggaacccagtgacaggtgctgcatggctgtcgtcagctcgtgtcgtgagatgttgggttaagtcccgcaacgagcgcaacccttgtccctagttgccaacactttgggtgggaactctagggagactgccggtgacaaaccggaggaaggtggggatgacggcagtcatcatggcccttatgggcagggctacanacgngctacaatggccggtacaatgggttgccaagccgcgaggtggagccaatcccaaaangccggtcgtagtccgaattggagtctgcaactcgactccatgangtcggaatcgntagnaatcgnggntcagcattcccgcggtgaatacgttcccgggccttgtacacaccgcccgtcacaccatgggagttggttgcaccagaagtggatagtctaaccttcgggaggacgttcaccacggtgtggtcaatgactggggtg

SEQ ID NO: 1340 - DNA, 1422 bp, Edaphobacter aggregans
aatcaacgctggcggcgtgcctaacacatgcaagtcgcacgagaaagggtagcaatacctgagtacagtggcgcacgggtgagtaacacgtgaattatctaccttcgagtggggaataactgagagaaatctcagctaataccgcataacacctacgggtcaaagcagcaatgcgcttgaagaggagttcgcggcagattagttagttggcggggtaatggcccaccaagacgatgatctgtatccggcctgagagggcgcacggacacactggaactgaaacacggtccagactcctacgggaggcagcagtggggaattttgcgcaatgggggaaaccctgacgcagcaacgccgcgtggaggatgaaatcccttgggatgtaaactcctttcgatcgggacgattatgacggtaccggaagaagaagccccggctaacttcgtgccagcagccgcggtaatacgaggggggcaagcgttgttcggaattattgggcgtaaagggcgcgtaggcggtttgacaagtctgatgtgaaatctctgggctcaacccagagtctgcattagaaactgtcgggcttgagtatgggagaggtgagtggaatttccggtgtagcggtgaaatgcgtagatatcggaaggaacacctgtggcgaaagcggctcactggaccataactgacgctgaggcgcgaaagctaggggagcaaacaggattagataccctggtagtcctagccctaaacgatgattgcttggtgtgacaggtacccaatcctgtcgtgccgaagctaacgcgataagcaatccgcctggggagtacggtcgcaaggctgaaactcaaaggaattgacgggggcccgcacaagcggtggagcatgtggtttaattcgacgcaacgcgaagaaccttacctgggctcgaaatgtagtggaccggggtagaaatatccctttctagcaatagactgctatataggtgctgcatggctgtcgtcagctcgtgtcgtgagatgttgggttaagtcccgcaacgagcgcaacccttatcttcagttgctaccatttagttgagcactctgacgaaaccgcctcggataacggggaggaaggtggggatgacgtcaagtcctcatggcctttatgtccagggctacacacgtgctacaatggccggtacaaaccgctgcaaacccgcgagggggagctaatcggaaaaagccggcctcagttcggattggagtctgcaactcgactccatgaagctggaatcgctagtaatcgcagatcagcatgctgcggtgaatacgttcccgggccttgtacacaccgcccgtcacatcacgaaagtgggttgcactagaagtcggtgcgctaaccgcaagggagcagccgcccaaggtgtaattcatgattggggtg

SEQ ID NO: 1341 - DNA, 1422 bp, Edaphobacter dinghuensis
aatcaacgctggcggcgtgcctaacacatgcaagtcgcacgagaaagggtagcaatacctgagtaaagtggcgcacgggtgagtaatacgtgaattatctacctccgagtggggaataactgagagaaatcttagctaataccgcataacacttacgagtcaaagcagcaatgcgcttggagaggagttcgcggcagattagttagttggcggggtaatggcccaccaagacgatgatctgtatccggcctgagagggcgcacggacacactggaactgaaacacggtccagactcctacgggaggcagcagtggggaattttgcgcaatgggggaaaccctgacgcagcaacgccgcgtggaggatgaaatcccttgggatgtaaactcctttcgatagggaagataatgacggtacctatagaagaagccccggctaacttcgtgccagcagccgcggtaatacgaggggggcaagcgttgttcggatttattgggcgtaaagggtgcgtaggcggtttggcaagtcttgtgtgaaatctttgggctcaacccaaagtctgcataagaaactgccgggcttgagtatgggagaggtgagtggaatttccggtgtagcggtgaaatgcgtagatatcggaaggaacacctgtggcgaaagcggctcactggaccattactgacgctgaggcacgaaagctaggggagcaaacaggattagataccctggtagtcctagccctaaacgatgattgcttgatgtggcaggtacccaatcctgccgtgtcgaagctaacgcgataagcaatccgcctggggagtacggtcgcaaggctgaaactcaaaggaattgacgggggcccgcacaagcggtggagcatgtggtttaattcgacgcaacgcgaagaaccttacctgggctcgaaatgtagtggaatccggcagaaacgtcggcgtctagcaatagaccgctatataggtgctgcatggctgtcgtcagctcgtgtcgtgagatgttgggttaagtcccgcaacgagcgcaacccttatctacagttgctaccatttagttgagcactctgtcgaaaccgcctcggataacggggaggaaggtggggatgacgtcaagtcctcatggcctttatgtccagggctacacacgtgctacaatggccgatacaaaccgctgcaaacccgcgagggggagctaatcggaaaaagtcggcctcagttcggattggagtctgcaactcgactccatgaagctggaatcgctagtaatcgtggatcagcatgccacggtgaatacgttcccgggccttgtacacaccgcccgtcacatcacgaaagtgggttgcactagaagtcggtacgctaaccgcaagggagcagccgcccaaggtgtgattcatgattggggtg

SEQ ID NO: 1342 - DNA, 1416 bp, Edaphobacter modestus
aatcaacgctggcggcgtgcctaacacatgcaagtcgcacgagaaagtggagcaatccatgagtacagtggcgcacgggtgagtaacacgtgacttatctacctccgagtggggaataacctagagaaatctgggctaataccgcataacacttacgagtcaaagcagcaatgcgcttggagaggaggtcgcggcagattagttagttggcggggtaatggcccaccaagacgatgatctgtatccggcctgagagggcgcacggacacactggaactgaaacacggtccagactcctacgggaggcagcagtggggaattttgcgcaatgggggaaaccctgacgcagcaacgccgcgtggaggatgaaatcccttgggatgtaaactcctttcgatcgggacgattatgacggtaccggaagaagccccggctaacttcgtgccagcagccgcggtaatacgaggggggcaagcgttgttcggaattattgggcgtaaagggcgcgtaggcggtttgacaagtctgatgtgaaatctctgggctcaacccagagtctgcattagaaactgtcgggcttgagtatgggagaggtgagtggaatttccggtgtagcggtgaaatgcgtagatatcggaaggaacacctgtggcgaaagcggctcactggaccataactgacgctgaggcgcgaaagctaggggagcaaacaggattagataccctggtagtcctagccctaaacgatgattgcttgatgtgacaggtacccaatcctgtcgtgtcgaagctaacgcgataagcaatccgcctggggagtacggtcgcaaggctgaaactcaaaattgacgggggcccgcacaagcggtggagcatgtggtttaattcgacgcaacgcgaagaaccttacctgggctcgaaatgtagtggaatccggtggaaacatcggcgtctagcaatagaccgctatataggtgctgcatggctgtcgtcagctcgtgtcgtgagatgttgggttaagtcccgcaacgagcgcaacccttatcttcagttgctaccatttagttgagcactctgacgaaaccgcctcggataacggggaggaaggtggggatgacgtcaagtcctcatggcctttatgtccagggctacacacgtgctacaatggccggtacaaaccgctgcaaacccgcgagggggagctaatcggaaaaagccggcctcagttcggattggagtctgcaactcgactccatgaagctggaatcgctagtaatcgcagatcagcatgctgcggtgaatacgttcccgggccttgtacacaccgcccgtcacatcacgaaagtgggttgcactagaagtcggtgagctaaccgcaagggagcagccgcccaaggtgtaattcatgattggggtg

SEQ ID NO: 1343 - DNA, 1466 bp, Edwardsiella anguillarum
attgaacgctggcggcaggcttaacacatgcaagtcgagcggtagcagggagaaagcttgctttctccgctgacgagcggcggacgggtgagtaatgtctggggatctgcctgatggagggggataactactggaaacggtagctaataccgcataacgtcgcaagaccaaagtgggggaccttcgggcctcatgccatcagatgaacccagatgggattagctagtaggtggggtaatggctcacctaggcgacgatccctagctggtctgagaggatgaccagccacactggaactgagacacggtccagactcctacgggaggcagcagtggggaatattgcacaatgggcgcaagcctgatgcagccatgccgcgtgtatgaagaaggccttcgggttgtaaagtactttcagtagggaggaaggtgtgaacgttaatagcgctcacaattgacgttacctacagaagaagcaccggctaactccgtgccagcagccgcggtaatacggagggtgcaagcgttaatcggaattactgggcgtaaagcgcacgcaggcggtttgttaagttggatgtgaaatccccgggcttaacctgggaactgcatccaagactggcaagctagagtctcgtagagggaggtagaattccaggtgtagcggtgaaatgcgtagagatctggaggaataccggtggcgaaggcggcctcctggacgaagactgacgctcaggtgcgaaagcgtggggagcaaacaggattagataccctggtagtccacgctgtaaacgatgtcgatttggaggttgtgcccttgaggcgtggcttccgaagctaacgcgttaaatcgaccgcctggggagtacggccgcaaggttaaaactcaaatgaattgacgggggcccgcacaagcggtggagcatgtggtttaattcgatgcaacgcgaagaaccttacctactcttgacatccagcgaatcctgtagagatacgggagtgccttcgggaacgctgagacaggtgctgcatggctgtcgtcagctcgtgttgtgaaatgttgggttaagtcccgcaacgagcgcaacccttatcctttgttgccagcggttcggccgggaactcaaaggagactgccagtgataaactggaggaaggtggggatgacgtcaagtcatcatggcccttacgagtagggctacacacgtgctacaatggcgtatacaaagagaagcgacctcgcgagagcaagcggacctcataaagtacgtcgtagtccggattggagtctgcaactcgactccatgaagtcggaatcgctagtaatcgtggatcagaatgccacggtgaatacgttcccgggccttgtacacaccgcccgtcacaccatgggagtgggttgcaaaagaagtaggtagcttaaccttcgggagggcgcttaccactttgtgattcatgactggggtg

SEQ ID NO: 1344 - DNA, 1466 bp, Edwardsiella hoshinae
attgaacgctggcggcaggcttaacacatgcaagtcgagcggtagcagggagaaagcttgctttctccgctgacgagcggcggacgggtgagtaatgtctggggatctgcctgatggagggggataactactggaaacggtagctaataccgcataacgtcgcaagaccaaagtgggggaccttcgggcctcatgccatcagatgaacccagatgggattagctagtaggtggggtaatggctcacctaggcgacgatccctagctggtctgagaggatgaccagccacactggaactgagacacggtccagactcctacgggaggcagcagtggggaatattgcacaatgggcgcaagcctgatgcagccatgccgcgtgtatgaagaaggccttcgggttgtaaagtactttcagtagggaggaaggtgtacgtgttaatagcacgtacaattgacgttacctacagaagaagcaccggctaactccgtgccagcagccgcggtaatacggagggtgcaagcgttaatcggaattactgggcgtaaagcgcacgcaggcggtttgttaagttggatgtgaaatccccgggcttaacctgggaactgcatccaagactggcaagctagagtctcgtagagggaggtagaattccaggtgtagcggtgaaatgcgtagagatctggaggaataccggtggcgaaggcggcctcctggacgaagactgacgctcaggtgcgaaagcgtggggagcaaacaggattagataccctggtagtccacgctgtaaacgatgtcgatttggaggttgtgcccttgaggcgtggcttccgaagctaacgcgttaaatcgaccgcctggggagtacggccgcaaggttaaaactcaaatgaattgacgggggcccgcacaagcggtggagcatgtggtttaattcgatgcaacgcgaagaaccttacctactcttgacatccagcgaatcctgtagagatacgggagtgccttcgggaacgctgagacaggtgctgcatggctgtcgtcagctcgtgttgtgaaatgttgggttaagtcccgcaacgagcgcaacccttatcctttgttgccagcggttaggccgggaactcaaaggagactgccagtgataaactggaggaaggtggggatgacgtcaagtcatcatggcccttacgagtagggctacacacgtgctacaatggcgtatacaaagagaagcgacctcgcgagagcaagcggacctcataaagtacgtcgtagtccggattggagtctgcaactcgactccatgaagtcggaatcgctagtaatcgtggatcagaatgccacggtgaatacgttcccgggccttgtacacaccgcccgtcacaccatgggagtgggttgcaaaagaagtaggtagcttaaccttcgggagggcgcttaccactttgtgattcatgactggggtg

SEQ ID NO: 1345 - DNA, 1466 bp, Edwardsiella ictaluri
attgaacgctggcggcaggcttaacacatgcaagtcgggcggtagcagggagaaagcttgctttctccgctgacgagcggcggacgggtgagtaatgtctggggatctgcctgatggagggggataactactggaaacggtagctaataccgcataacgtcgcaagaccaaagtgggggaccttcgggcctcatgccatcagatgaacccagatgggattagctagtaggtggggtaatggctcacctaggcgacgatccctagctggtctgagaggatgaccagccacactggaactgagacacggtccagactcctacgggaggcagcagtggggaatattgcacaatgggcgcaagcctgatgcagccatgccgcgtgtatgaagaaggccttcgggttgtaaagtactttcagtagggaggaaggtgtgagcgttaatagcgttcacaattgacgttacctacagaagaagcaccggctaactccgtgccagcagccgcggtaatacggagggtgcaagcgttaatcggaattactgggcgtaaagcgcacgcaggcggtttgttaagttggatgtgaaatccccgggcttaacctgggaactgcatccaagactggcaagctagagtctcgtagagggaggtagaattccaggtgtagcggtgaaatgcgtagagatctggaggaataccggtggcgaaggcggcctcctggacgaagactgacgctcaggtgcgaaagcgtggggagcaaacaggattagataccctggtagtccacgctgtaaacgatgtcgatttggaggttgtgcccttgaggcgtggcttccgaagctaacgcgttaaatcgaccgcctggggagtacggccgcaaggttaaaactcaaatgaattgacgggggcccgcacaagcggtggagcatgtggtttaattcgatgcaacgcgaagaaccttacctactcttgacatccagcgaatcctgtagagatacgggagtgccttcgggaacgctgagacaggtgctgcatggctgtcgtcagctcgtgttgtgaaatgttgggttaagtcccgcaacgagcgcaacccttatcctttgttgccagcggttaggccgggaactcaaaggagactgccagtgataaactggaggaaggtggggatgacgtcaagtcatcatggcccttacgagtagggctacacacgtgctacaatggcgtatacaaagagaagcgacctcgcgagagcaagcggacctcataaagtacgtcgtagtccggattggagtctgcaactcgactccatgaagtcggaatcgctagtaatcgtggatcagaatgccacggtgaatacgttcccgggccttgtacacaccgcccgtcacaccatgggagtgggttgcaaaagaagtaggtagcttaaccttcgggagggcgcttaccactttgtgattcatgactggggtg

SEQ ID NO: 1346 - DNA, 1466 bp, Edwardsiella piscicida
attgaacgctggcggcaggcttaacacatgcaagtcgagcggtagcagggagaaagcttgctttctccgctgacgagcggcggacgggtgagtaatgtctggggatctgcctgatggagggggataactactggaaacggtagctaataccgcataacgtcgcaagaccaaagtgggggaccttcgggcctcatgccatcagatgaacccagatgggattagctagtaggtggggtaatggctcacctaggcgacgatccctagctggtctgagaggatgaccagccacactggaactgagacacggtccagactcctacgggaggcagcagtggggaatattgcacaatgggcgcaagcctgatgcagccatgccgcgtgtatgaagaaggccttcgggttgtaaagtactttcagtagggaggaaggtgtgaacgttaatagcgctcacaattgacgttacctacagaagaagcaccggctaactccgtgccagcagccgcggtaatacggagggtgcaagcgttaatcggaattactgggcgtaaagcgcacgcaggcggtttgttaagttggatgtgaaatccccgggcttaacctgggaactgcatccaagactggcaagctagagtctcgtagagggaggtagaattccaggtgtagcggtgaaatgcgtagagatctggaggaataccggtggcgaaggcggcctcctggacgaagactgacgctcaggtgcgaaagcgtggggagcaaacaggattagataccctggtagtccacgctgtaaacgatgtcgatttggaggttgtgcccttgaggcgtggcttccgaagctaacgcgttaaatcgaccgcctggggagtacggccgcaaggttaaaactcaaatgaattgacgggggcccgcacaagcggtggagcatgtggtttaattcgatgcaacgcgaagaaccttacctactcttgacatccagcgaatcctgtagagatacgggagtgccttcgggaacgctgagacaggtgctgcatggctgtcgtcagctcgtgttgtgaaatgttgggttaagtcccgcaacgagcgcaacccttatcctttgttgccagcggttcggccgggaactcaaaggagactgccagtgataaactggaggaaggtggggatgacgtcaagtcatcatggcccttacgagtagggctacacacgtgctacaatggcgtatacaaagagaagcgaactcgcgagagcaagcggacctcataaagtacgtcgtagtccggattggagtctgcaactcgactccatgaagtcggaatcgctagtaatcgtggatcagaatgccacggtgaatacgttcccgggccttgtacacaccgcccgtcacaccatgggagtgggttgcaaaagaagtaggtagcttaaccttcgggagggcgcttaccactttgtgattcatgactggggtg

SEQ ID NO: 1347 - DNA, 1466 bp, Edwardsiella tarda
attgaacgctggcggcaggcttaacacatgcaagtcgagcggtagcagggagaaagcttgctttctccgctgacgagcggcggacgggtgagtaatgtctggggatctgcctgatggagggggataactactggaaacggtagctaataccgcataacgtcgcaagaccaaagtgggggaccttcgggcctcatgccatcagatgaacccagatgggattagctagtaggtgaggtaatggctcacctaggcgacgatccctagctggtctgagaggatgaccagccacactggaactgagacacggtccagactcctacgggaggcagcagtggggaatattgcacaatgggcgcaagcctgatgcagccatgccgcgtgtatgaagaaggccttcgggttgtaaagtactttcagtagggaggaaggtgtgcgtgttaatagcacgtgcaattgacgttacctacagaagaagcaccggctaactccgtgccagcagccgcggtaatacggagggtgcaagcgttaatcggaattactgggcgtaaagcgcacgcaggcggtttgttaagttggatgtgaaatccccgggcttaacctgggaactgcatccaagactggcaagctagagtctcgtagagggaggtagaattccaggtgtagcggtgaaatgcgtagagatctggaggaataccggtggcgaaggcggcctcctggacgaagactgacgctcaggtgcgaaagcgtggggagcaaacaggattagataccctggtagtccacgctgtaaacgatgtcgatttggaggttgtgcccttgaggcgtggcttccgaagctaacgcgttaaatcgaccgcctggggagtacggccgcaaggttaaaactcaaatgaattgacgggggcccgcacaagcggtggagcatgtggtttaattcgatgcaacgcgaagaaccttacctactcttgacatccagcgaatcctgtagagatacgggagtgccttcgggaacgctgagacaggtgctgcatggctgtcgtcagctcgtgttgtgaaatgttgggttaagtcccgcaacgagcgcaacccttatcctttgttgccagcggttcggccgggaactcaaaggagactgccagtgataaactggaggaaggtggggatgacgtcaagtcatcatggcccttacgagtagggctacacacgtgctacaatggcgtatacaaagagaagcgacctcgcgagagcaagcggacctcataaagtacgtcgtagtccggattggagtctgcaactcgactccatgaagtcggaatcgctagtaatcgtggatcagaatgccacggtgaatacgttcccgggccttgtacacaccgcccgtcacaccatgggagtgggttgcaaaagaagtaggtagcttaaccttcgggagggcgcttaccactttgtgattcatgactggggtg

SEQ ID NO: 1348 - DNA, 1438 bp, Eilatimonas milleporae
aacgaacgctggcggcacgcctaacacatgcaagtcgaacgcgaacgccctttcgggggttattagagtggcggacgggtgagtaacgcgtgggaacctgccctttggtacggaacaacgcctggaaacgggcgctaataccgtatacgcccaccttgattggtttcttggtggggaaagatttatcgccgaaggattggcccgcgttagattagctagttggtgaggtaagagctcaccaaggcgacgatctatagctggtttgagaggatgatcagccacactgggactgagacacggcccagactcctacgggaggcagcagtggggaatattggacaatgggggcaaccctgatccagcgatgccgcgtgagtgatgaaggccttagggttgtaaaactctttcaggggtgacgataatgacggtaaccccagaagaagctccggctaactccgtgccagcagccgcggtaatacggagggagctagcgttgttcggaatgactaggcgtaaagcggcgcgtaggcggataagacaagttgggggtgaaagcccggggctcaaccccggaactgccctcaaaactgtctgtctagaatcctggagaggtgagcggaattcctagtgtagaggtgaaagtcgtagatattaggaagaacaccagtggcgaaggtggctcactggccaggtattgacgctgaggtgcgaaagcgtggggagcgaacaggattagataccctggtagtccacgccgtaaacgatgggtgctaggtgtcgggcagcatgctgttcggtgccgcagctaacgcgttaagcaccccgcctggggagtacggacgcaagattaaaactcaaaggaattgacggggccccgcacaagcggtggagcatgtggtttaattcgaagcaacgcgcagaaccttaccagcccttgacataccggtttgggtctttggagacagagactttcagttcggctggaccggatacaggtgctgcatggctgtcgtcagctcgtgtcgtgagatgttgggttaagtcccgcaacgagcgcaacccccatccttagttgccagcggtttggccgggcactctaaggaaactgccggtgataagccggaggaaggtggggatgacgtcaagtcctcatggcccttatgggctgggctacacacgtgctacagtggcggtgacagagggcagcgacccagcgatggggagcgaatctcaaaaaaccgtctcagttcggattgcactctgcaactcggatgcatgaaggtggaatcgctagtaatcgcagatcagcatgctgcggtgaatacgttcccgggccttgtacacaccgcccgtcacaccatgggagttggttctacccgaagctggtgagctaaccttttggaggcagccaaccacggtaggattagcgactggggtg

SEQ ID NO: 1349 - DNA, 1411 bp, Elstera cyanobacteriorum
aacgaacgctggcggcatgcctaacacatgcaagtcgaacgagtaccttcgggtgctagtggcgcacgggtgagtaacgcgtgggaacctgcctttcggtacgggataacgtttggaaacgaacgctaataccgtatatgtctttggatgaaagatttatcgccggaagaggggcccgcgtctgattaggtagttggtgaggtaatggctcaccaagccttcgatcagtagctggtctgagaggatgatcagccacactgggactgagacacggcccagactcctacgggaggcagcagtggggaatattggacaatgggcgcaagcctgatccagcaatgccgcgtgagtgatgaaggccttcgggttgtaaagctcttttacctgcgacgatgatgacggtagcaggagaataagccccggctaacttcgtgccagcagccgcggtaatacgaagggggctagcgttgttcggaattactgggcgtaaagggcgcgtaggcggccctgtcagtcaagcgtgaaagccccgggctcaacctgggaattgcgcctgatactgcagggcttgagggtcggagaggatggtggaattcccagtgtagaggtgaaattcgtagatattgggaagaacaccggtggcgaaggcggccatctggacgacatctgacgctgaggcgcgaaagcgtggggagcaaacaggattagataccctggtagtccacgctgtaaacgatgaatgctagacgttggggttcttggaacttcagtgtcgccgctaacgcattaagcattccgcctggggagtacggtcgcaagattaaaactcaaaggaattgacgggggcccgcacaagcggtggagcatgtggtttaattcgaagcaacgcgcagaaccttaccagcccttgacatgggatctatggttaccggagacggtttccttcacttcgggtgggatccacacaggtgctgcatggctgtcgtcagctcgtgtcgtgagatgttgggttaagtcccgcaacgagcgcaaccctcatcgtcagttgccatcagttcggctgggcactctgacgaaaccgccggtgacaagccggaggaaggcggggatgacgtcaagtcctcatggcccttatgggctgggctacacacgtgctacaatggtggtgacagtgggacgcaagaccgcgaggtcaagcaaatctccaaaagccatctcagttcagattgcactctgcaactcgagtgcatgaaggcggaatcgctagtaatcgcggatcagcatgccgcggtgaatacgttcccgggccttgtacacaccgcccgtcacaccatgggagttggctttacccgaagccggtgcgctaaccgaaaggaggcagccgaccacggtagggtcagtgactggggtg

SEQ ID NO: 1350 - DNA, 1413 bp, Elstera litoralis
aacgaacgctggcggcatgcctaacacatgcaagtcgaacgagtaccttcgggtgctagtggcgcacgggtgagtaacgcgtgggaacctgccttatggtacgggataacgtcgggaaactgacgctaataccgtatatgtctttggatgaaagatttatcgccataagaggggcccgcgtctgattaggtagttggtgaggtaatggctcaccaagccttcgatcagtagctggtctgagaggatgatcagccacactgggactgagacacggcccagactcctacgggaggcagcagtggggaatattggacaatgggcgcaagcctgatccagcaatgccgcgtgagtgatgaaggccttcgggttgtaaagctcttttacctgcgacgatgatgacggtagcaggagaataagccccggctaacttcgtgccagcagccgcggtaatacgaagggggctagcgttgttcggaattactgggcgtaaagggcgcgtaggcggccctgtcagtcaagcgtgaaagccccgggctcaacctgggaattgcgcctgatactgcagggcttgagggtcggagaggatggtggaattcccagtgtagaggtgaaattcgtagatattgggaagaacaccggtggcgaaggcggccatctggacgacatctgacgctgaggcgcgaaagcgtggggagcaaacaggattagataccctggtagtccacgctgtaaacgatgaatgctagacgttggggttctcagaacttcagtgtcgccgctaacgcattaagcattccgcctggggagtacggtcgcaagattaaaactcaaaggaattgacgggggcccgcacaagcggtggagcatgtggtttaattcgaagcaacgcgcagaaccttaccagcccttgacatgggacctttggttaccggagacggtttccttcacttcgggtggggtccacacaggtgctgcatggctgtcgtcagctcgtgtcgtgagatgttgggttaagtcccgcaacgagcgcaaccctcatcgtcagttgccaccagttcggctgggcactctgacgaaaccgccggtgacaagccggaggaaggcggggatgacgtcaagtcctcatggcccttatgggctgggctacacacgtgctacaatggtggtgacagtgggacgcaaggtcgcgaggccaagcaaatctccaaaagccatctcagttcagattgcactctgcaactcgagtgcatgaaggcggaatcgctagtaatcgcggatcagcatgccgcggtgaatacgttcccgggccttgtacacaccgcccgtcacaccatgggagttggctttacccgaagccggtgcgctaactcgcaagagaggcagccgaccacggtagggtcagtgactggggtg

SEQ ID NO: 1351 - DNA, 1434 bp, Elusimicrobium minutum
agttaacgctggcatcgtgcataacacatgcaagtcgaacgggaattttttgtgtagcaatacatgaaaaattctagtggcagacgggtgagtaatacataaggaatctaccttgaagtggggaacaactagtcgaaagattagctaatactccataatatcacttagtggcatcacttagtgattaaagatttatcgcttcaagacgatcttatggtctatcagctagttggtagggtaatggcctaccaaggcgacgacggatagccggcctgaaagggcgaccggccacaggggcactgagacacgggccccactcctacgggaggcagcagtggggaattttggacaatggacgcaagtctgatccagcaacgatgcgtggaggatgaaggttttcggattgtaaactccttttgcaggggaagaaaaaaatgacggtactctgcgaataagccacggctaactacgtgccagcagccgcggtaagacgtaggtggcaagcgttactcggaattactaggcgtaaagcgcgcgtaggcggattgttaagtctgttgtgtaatctctgggcccaacccagaaactgcaattgaaactggcgatcttgagtgaggcagaggaaatcggaattccaagtgtagcagtgaaatgcgtagatatttggaggaacaccggtggcgaaggcggatttctgggcctttactgacgctgaagtgcgaaagctaggggagcaaacgggattagataccccggtagtcctagccgtaaacgatgataactaggtgtgggaggtatcgaccccttccgtgccgacgctaacgcattaagttatccgcctggggagtacggccgcaaggttaaaactcaaaggaattgacggggacccgcacaagaggtggattatgtggtttaattcgacgctacgcgaaaaaccttacctgggctcgaacgactggtagtaacatttatgaaagtagatgtgattcgcaagaaagccagccgaggtgctgcatggttgtcgtcagctcgtgtcgtgagatgttgggttaagtcccgcaacgagcgcaacccctattctgtgttgcctagcaataggatctctcagaagactgccgcggataacgtggaggaaggtggggatgacgtcaaatcatcatggcctttatgtccagggctacacacgtaatacaatggcatagacagagggcagcaatatcgcgagatggagccaatccctaaactatgccccagttcagattgcaggctgcaattcgcctgcatgaagccggaatctctagtaatcgcagatcagcacgctgcggtgaatacgttcccgggtcttgtacacaccgcccgtcacaccacgaaagttaattgcaacagaagtgctcaggtcgtctgggccctaagttgtgattagtaattggggtg

SEQ ID NO: 1352 - DNA, 1418 bp, Emcibacter nanhaiensis
aacgaacgctggcggcatgcctaacacatgcaagtcgaacgggaagccaccttcgggtggtggatagtggcgcacgggtgagtaacacgtggggacctgcccattagtacggaacaacagttggaaacgactgctaataccgtatacgcccttcgggggaaagatttatcgctaatggatggacccgcgcaggattagctagttggtaaggtaacggcttaccaaggcaacgatccttagctggtttgagaagatgatcagccacattgggactgagacacggcccagactcctacgggaggcagcagtggggaatattggacaatgggggcaaccctgatccagcaatgccgcgtgagtgatgaaggccttagggttgtaaaactctttcagatgggaagataatgacggtaccatcagaagaagccccggctaactccgtgccagcagccgcggtaatacggagggggctagcgttgttcggaattactgggcgtaaagagttcgtaggcggactgacaagttgggggtgaaatcccggggctcaaccccggaactgccttcaaaactgtcagtcttgagaccggaagaggttaggggaatacctagtgtagaggtgaaattcgtagatattaggtggaacaccagtggcgaaggcgcctaactggtccggtactgacgctgaggaacgaaagcgtggggagcaaacaggattagataccctggtagtccacgccgtaaacgatgagtgctagatgtcgggaaccttaggttctcggtgtcgcagctaacgcattaagcactccgcctggggagtacggtcgcaagattaaaactcaaaggaattgacgggggcccgcacaagcggtggagcatgtggtttaattcgaagcaacgcgaagaaccttaccagcccttgacataccggtcgcgatttccagagatggatttcttcagtttggctggaccggatacaggtgctgcacggctgtcgtcagctcgtgtcgtgagatgttgggttaagtcccgcaacgagcgcaacccctaccttcagttgccatcagttcggctgggcactctggagggactgccggtgataaaccggaggaaggtggggacgacgtcaagtcatcatggcccttatgggctgggctacacacgtgctacaatggcggtgacagagggcagccactccgcgaggaggagctaatccctaaaagccgtctcagttcggattgttctctgcaactcgagagcatgaagttggaatcgctagtaatcgtggatcagcatgccacggtgaatacgttcccgggccttgtacacaccgcccgtcacaccatgggagttggttttacccgaagccggtgggctaacctttgaggcagccgaccacggtaagatcagcgactggggtg

SEQ ID NO: 1353 - DNA, 1483 bp, Empedobacter haloabium
  misc_feature (154)..(154): n is a, c, g, or t
  misc_feature (425)..(425): n is a, c, g, or t
  misc_feature (427)..(427): n is a, c, g, or t
attgaacgctggcggcatgctttacacatgcaagtcgaacggtaacagggagcttgctccgctgacgagtggcgaacgggtgagtaatatatcggaacgtgcccaagagtgggggataacgtagcgaaagttacgctaataccgcatacgatcnaaggatgaaagcaggggaccgcaaggccttgtgctcctggagcggccgatatctgattagctagttggtgaggtaaaggctcaccaaggcgacgatcagtagctggtctgagaggacgaccagccacactgggactgagacacggcccagactcctacgggaggcagcagtggggaattttggacaatgggcgcaagcctgatccagcaatgccgcgtgagtgaagaaggccttcgggttgtaaagctcttttgtcagggaagaaacggtngnggctaatatccacggctaatgacggtacctgaagaataagcaccggctaactacgtgccagcagccgcggtaatacgtagggtgcaagcgttaatcggaattactgggcgtaaagcgtgcgcaggcggttttgtaagtctgtcgtgaaatccccgggcttaacctgggaatggcgatggagactgcaaggctggaatctggcagaggggggtagaattccacgtgtagcagtgaaatgcgtagagatgtggaggaacaccgatggcgaaggcagccccctgggctaagattgacgctcatgcacgaaagcgtggggagcaaacaggattagataccctggtagtccacgccctaaacgatgtctactagttgtcgggtcttaattgacttggtaacgcagctaacgcgtgaagtagaccgcctggggagtacggtcgcaagattaaaactcaaaggaattgacggggacccgcacaagcggtggatgatgtggattaattcgatgcaacgcgaaaaaccttacctacccttgacatggcaggaatccctgagagatcggggagtgctcgaaagagaacctgcacacaggtgctgcatggctgtcgtcagctcgtgtcgtgagatgttgggttaagtcccgcaacgagcgcaacccttgtcattagttgctacgaaagggcactctaatgagactgccggtgacaaaccggaggaaggtggggatgacgtcaagtcctcatggcccttatgggtagggcttcacacgtcatacaatggtacatacagagggccgccaacccgcgagggggagctaatcccagaaagtgtatcgtagtccggattgtagtctgcaactcgactgcatgaagttggaatcgctagtaatcgcggatcagcatgtcgcggtgaatacgttcccgggtcttgtacacaccgcccgtcacaccatgggagcgggttttaccagaagtaggtagcttaaccgtaaggagggcgcttaccacggtaggattcgtgactggggtgaagtcgtaacaaggtagccgtatcggaagg

SEQ ID NO: 1354 - DNA, 1441 bp, Endomicrobium proavitum
gtgaacgctggcggcgtgcctaacacatgcaagttgagcgaagttttgcagagtatcgcagaatttagcggcaaacgggtgagtaacacgtgggaaacctccctcaaaatggggaatatctccgagaaatcggagtcaataccgcataagaccacagattggcatcaatcaggggtcaaagcagtaatgcgttttgagatggtcctgcggcctatcagctagttggcggggtaacggcccaccaaggctaagacgggtatccggcctgaaagggtgaacggacacactggaactgagacacggtccagactcctacgggaggcagcagtggggaattttggacaatgggggaaaccctgatccagcgacgccgcgtggaggacgaaggccttcgggttgtaaactccttttagtggggaagaataaattgacggtacccacagaaaaagccacggctaactacgtgccagcagccgcggtaatacgtaggtggcgagcgttactcggaattactaggcgtaaagcgtatgtaggcggtcggataagtcttcagtgaaatttctcggctcaaccgggaaaggcttgaggatactgttcggcttgagtgtggcagggggaaacggaattcctggtgtagcggtgaaatgcgtagatatcaggaggaacaccgatggcgaaagcagtttcctgggccaatactgacgctaatgtacgaaagctagggtagcaaacaggattagataccctggtagtcctagctgtaaacgatgttcactagatgtgggaggtatcgaccccttccgcgtcgacgctaacgcattaagtgaaccgcctggggagtacggccgcaaggttgaaactcaaaggaattgacgggggcccgcacaagcggtggagtatgtggtttaattcgacgcaacgcgaaaaaccttacctgggcttgaactgttagtggtagaaaccggaaacggctacgacccgcaagggagctaacagaggtgctgcatggctgtcgtcagctcgtgtcgtgagatgttgggttaagtcccgcaacgagcgcaacccttatcccatgttacctgtagcaatacagggtctctgaggaaactgccattgataaaatggaggaaggtggggacgacgtcaagtcatcatggcctttatgtccagggctacacacgtactacaatggtcggtacagagggcagcgagaccgcaaggtggagcaaatccctaaaagccggcctcagttcagattgtgggctgcaattcgcccacatgaagtaggaatcgctagtaatcgcagatcagcaggctgcggtgaatacgttcccgggccttgtacacaccgcccgtcacaccacgaaagtcagtcataacagaagtcgttgagctaaccgcaaggaggcaggcgcctaagttatggttggtgattggggtg

SEQ ID NO: 1355 - DNA, 1465 bp, Endozoicomonas elysicola
attgaacgctggcggcaggcctaacacatgcaagtcgagcggtagcgggaagagcttgctctttgccgacgagcggcggacgggtgcgtaacacgtaggaatctgcctggtagtgggggatagcccggagaaatccggattaataccgcatacgccctaagggggaaaggaggggactcttcggagcctttcgctatcagatgagcctgcgtcggattagcttgttggtggggtaaaggcctaccaaggcgacgatccgtagctggtctgagaggatgatcagccacactgggactgagacacggcccagactcctacgggaggcagcagtggggaatattgcacaatgggcgaaagcctgatgcagccatgccgcgtgtgtgaagaaggctctagggttgtaaagcactttcagcgaggaggaaaggttgatggttaatacccatcagctgtgacgttactcgcagaagaagcaccggctaactccgtgccagcagccgcggtaatacggagggtgcaagcgttaatcggaattactgggcgtaaagcgtgcgtaggcggctgcctaagttggatgtgaaagccccgggctcaacctgggaactgcatccaaaactgggcagctagagtgcggaagaggagtgtggaatttcctgtgtagcggtgaaatgcgtagatataggaaggaacaccagtggcgaaggcgacactctggtctgacactgacgctgaggtacgaaagcgtggggagcaaacaggattagataccctggtagtccacgccgtaaacgatgtctactagttgtccggagtcttgtattctgggtaacgcagctaacgcgataagtagaccgcctggggagtacggccgcaaggttaaaactcaaatgaattgacgggggcccgcacaagcggtggagcatgtggtttaattcgaagcaacgcgaagaaccttacctggccttgacatcctgcgaactttctagagatagattggtgccttcgggaacgcagagacaggtgctgcatggctgtcgtcagctcgtgtcgtgagatgttgggttaagtcccgcaacgagcgcaacccttgtcctcagttaccagcacgttatggtgggcactctggggagactgccggtgacaaaccggaggaaggtggggacgacgtcaagtcatcatggcccttacggccagggctacacacgtgctacaatggtgcatacagacggttgccaagccgcgaggtggagctaatctgagaaagtgcatcgtagtccggattggagtctgcaactcgactccatgaagtcggaatcgctagtaatcgtgaatcagaatgtcacggtgaatacgttcccgggccttgtacacaccgcccgtcacaccatgggagtgggttgctccagaagtggttagcctaaccttcgggagggcgatcaccacggagtgattcatgactggggtg

SEQ ID NO: 1356 - DNA, 1479 bp, Endozoicomonas montiporae
attgaacgctggcggcaggcctaacacatgcaagtcgagcggtaacagaactagcttgctagttgctgacgagcggcggacgggtgcgtaacacgtaggaatctgcccggtagtgggggatagcccggagaaatccggattaataccgcatacgccctaagggggaaagcaggggctcttgctcttttcggagagtcggaccttgtgctatcggatgagcctgcgtcggattagctagttggtgaggtaaaggctcaccaaggcgacgatccgtagctggtctgagaggatgatcagccacactgggactgagacacggcccagactcctacgggaggcagcagtggggaatattgcacaatgggcgcaagcctgatgcagccatgccgcgtgtgtgaagaaggccttagggttgtaaagcactttcagcgaggaggaaaggttgtacgttaataccgtgcagctgtgacgttactcgcagaagaagcaccggctaactccgtgccagcagccgcggtaatacggagggtgcaagcgttaatcggaattactgggcgtaaagcgtgcgtaggcggctgcctaagttggatgtgaaagccccgggctcaacctgggaactgcatccaaaactgggcagctagagtgcggaagaggagtgtggaatttcctgtgtagcggtgaaatgcgtagatataggaaggaacaccagtggcgaaggcgacactctggtctgacactgacgctgaggtacgaaagcgtggggagcaaacaggattagataccctggtagtccacgccgtaaacgatgtctactagtcgtcggggctcttgcagctttggtgacgcagctaacgcgataagtagaccgcctggggagtacggccgcaaggttaaaactcaaatgaattgacgggggcccgcacaagcggtggagcatgtggtttaattcgaagcaacgcgaagaaccttacctggccttgacatcctgcgaactttctagagatagatgggtgccttcgggaacgcagtgacaggtgctgcatggctgtcgtcagctcgtgtcgtgagatgttgggttaagtcccgcaacgagcgcaacccttgtcctcagttaccagcacgttatggtgggcactctggggagactgccggtgacaaaccggaggaaggtggggacgacgtcaagtcatcatggcccttacggccagggctacacacgtgctacaatggtgcatacagacggttgccaagccgcgaggtggagctaatctgagaaagtgcatcgtagtccggattggagtctgcaactcgactccatgaagtcggaatcgctagtaatcgtgaatcagaatgtcacggtgaatacgttcccgggccttgtacacaccgcccgtcacaccatgggagtgggttgctccagaagtggctagtctaaccttcgggaggacggtcaccacggagtgattcatgactggggtg

SEQ ID NO: 1357 - DNA, 1465 bp, Endozoicomonas numazuensis
attgaacgctggcggcaggcctaacacatgcaagtcgagcggtaacagaactagcttgctagttgctgacgagcggcggacgggtgcgtaacacgtaggaatctgcccagtagtgggggatagcccggagaaatccggattaataccgcatacgccctaagggggaaagcaggggcttcttcggaaccttgcgctactggatgagcctgcgtcggattagcttgttggtggggtaaaggcctaccaaggcgacgatccgtagctgatctgagaggatgatcagccacactgggactgagacacggcccagactcctacgggaggcagcagtggggaatattgcacaatgggcgaaagcctgatgcagccatgccgcgtgtgtgaagaaggctctagggttgtaaagcactttcagcgaggaggaaaggttgtacgttaataccgtgcagctgtgacgttactcgcagaagaagcaccggctaactccgtgccagcagccgcggtaatacggagggtgcaagcgttaatcggaattactgggcgtaaagcgtgcgtaggcggctgattaagttgggtgtgaaagccccgggctcaacctgggaactgcatccaaaactgatcagctagagtgcggaagaggagtgtggaatttcctgtgtagcggtgaaatgcgtagatataggaaggaacaccagtggcgaaggcgacactctggtctgacactgacgctgaggtacgaaagcgtggggagcaaacaggattagataccctggtagtccacgccgtaaacgatgtctactagtcgtcgggtctcttgcagacttggtgacgaagctaacgcgataagtagaccgcctggggagtacggccgcaaggttaaaactcaaatgaattgacgggggcccgcacaagcggtggagcatgtggtttaattcgaagcaacgcgaagaaccttacctggccttgacatcctgcgaacttactagagatagtttggtgccttcgggaacgcagtgacaggtgctgcatggctgtcgtcagctcgtgtcgtgagatgttgggttaagtcccgcaacgagcgcaacccttatcctcagttaccagcacattatggtgggcactctggggagactgccggtgacaaaccggaggaaggtggggacgacgtcaagtcatcatggcccttacggccagggctacacacgtgctacaatggtgcatacagacggttgccaagccgcgaggtggagctaatctgagaaagtgcatcgtagtccggattggagtctgcaactcgactccatgaagtcggaatcgctagtaatcgtgaatcagaatgtcacggtgaatacgttcccgggccttgtacacaccgcccgtcacaccatgggagtgggttgctccagaagtggctagcttaaccttcgggagagcggtcaccacggagtgattcatgactggggtg

SEQ ID NO: 1358 - DNA, 1453 bp, Enhydrobacter aerosaccus
  misc_feature (178)..(178): n is a, c, g, or t
attgaacgctggcggcaggcttaacacatgcaagtcgaacgatgactctctagcttgctagagatgattagtggcggacgggtgagtaatatttaggaatctgcctagtagtgggggatagctcggggaaactcgaattaataccgcatacgacctacgggtgaaagggggcgcaagntcttgctattagatgagcctaaatcagattagctagttggtggggtaaaggcccaccaaggcgacgatctgtaactggtctgagaggatgatcagtcacaccggaactgagacacggtccggactcctacgggaggcagcagtggggaatattggacaatgggggcaaccctgatccagccatgccgcgtgtgtgaagaaggccttttggttgtaaagcactttaagcagggaggagaggctaatggttaatacccattagattagacgttacctgcagaataagcaccggctaactctgtgccagcagccgcggtaatacagagggtgcgagcgttaatcggaattactgggcgtaaagcgagtgtaggtggctcattaagtcacatgtgaaatccccgggcttaacctgggaactgcatgtgatactggtgtgctagaatatgtgagagggaagtagaattccaggtgtagcggtgaaatgcgtagagatctggaggaataccgatggcgaaggcagcttcctggcataatattgacactgagattcgaaagcgtgggtagcaaacaggattagataccctggtagtccacgccgtaaacgatgtctactagccgttggggtccttgagactttagtggcgcagttaacgcgataagtagaccgcctggggagtacggccgcaaggttaaaactcaaatgaattgacgggggcccgcacaagcggtggagcatgtggtttaattcgatgcaacgcgaagaaccttacctggtcttgacatagtgagaatctttcagagatgagagagtgccttcgggaattcacatacaggtgctgcatggctgtcgtcagctcgtgtcgtgagatgttgggttaagtcccgcaacgagcgcaacccttttccttatttgccagcgggttaagccgggaactttaaggatactgccagtgacaaactggaggaaggcggggacgacgtcaagtcatcatggcccttacgaccagggctacacacgtgctacaatggtaggtacagagggttgctacacagcgatgtgatgctaatctcaaaaagcctatcgtagtccggattggagtctgcaactcgactccatgaagtcggaatcgctagtaatcgcagatcagaatgctgcggtgaatacgttcccgggccttgtacacaccgcccgtcacaccatgggagtctattgcaccagaagtaggtagcctaacgaaagagggcgcttaccacggtgtggtcgatgactggggtg

SEQ ID NO: 1359 - DNA, 1455 bp, Enhygromyxa salina
agcgaacgtttgcggcgggcttaacacatgcaagtcgaacgagaacctcttcggaggggacagtggcgcacgggtgcgtaacacgtggataaccaaccccctggttcgggacaacactgggaaaccggtgctaataccggctatggcgcatgagtcacaaggcttgtgcgagaaaggcccgcaagggtcgccaggggacgggtccgcgtcccatcagcttgttggtgaggtaatggctcaccaaggcgaagacgggtagctggtctgagaggatgatcagccacactggaactgagacacggtccagactcctacgggaggcagcagtggggaatattgcgcaatgggcgaaagcctgacgcagccacgccgcgtgagcgatgaaggtcctaggatcgtaaagctctgtggagggagaagaataagccggtgaagagccggccttgacggtatccctttagcaagcaccggctaactccgtgccagcagccgcggtaatacggagggtgcaaacgttgctcggaatcattgggcgtaaagcgcgcgtaggcggcttggcaagttggatgtgaaagccctgggctcaacccaggaggtgcatacaaaactgccaggcttgaatctcggagggggtcagggaattcccggtgtagaggtgaaattcgtagatatcgggaggaacaccagtggcgaaggcgctgacctggacgatgattgacgctgaggcgcgaaagcgtggggagcaaacaggattagataccctggtagtccacgccgtaaacgatgagtgctaggcgccggcggattgaccccgtcggtgccgaagctaacgcgttaagcactccgcctggggagtacggtcgcaagactaaaactcaaaggaattgacgggggcccgcacaagcggtggagcatgtggtttaattcgacgctacgcgcagaaccttacctgggttaaatccaccagaatccggcccaaaagctggagtgcccttcggggaattggtgagaaggtgctgcatggctgtcgtcagctcgtgtcgtgagatgttgggttaagtcccgcaacgagcgcaacccctgtcgtctgttgccatcatttagttgggaactcagacggtactgccggcctaaaccggaggaaggtggggatgacgtcaagtcctcatggccctcatgcccagggctacacacgtgctacaatggctggtacaaagagccgctaactcgcgagagtacgctaatctcataaaaccagtctcagttcggattggagtctgcaactcgactccatgaagctggaatcgctagtaatcggagatcagcacgctccggtgaatacgttcccgggccttgtacacaccgcccgtcacaccatgggagtcgattgctccagaagtgggtagcctaaccttcgggagggcgcttaccaaggagtgatcggtgactggggtg

SEQ ID NO: 1360 - DNA, 1407 bp, Ensifer adhaerens
aacgaacgctggcggcaggcttaacacatgcaagtcgagcgccccgcaaggggagcggcagacgggtgagtaacgcgtgggaatctacccttttctacggaataacgcagggaaacttgtgctaataccgtatacgcccttcgggggaaagatttatcgggaaaggatgagcccgcgttggattagctagttggtggggtaaaggcctaccaaggcgacgatccatagctggtctgagaggatgatcagccacattgggactgagacacggcccaaactcctacgggaggcagcagtggggaatattggacaatgggcgcaagcctgatccagccatgccgcgtgagtgatgaaggccctagggttgtaaagctctttcaccggtgaagataatgacggtaaccggagaagaagccccggctaacttcgtgccagcagccgcggtaatacgaagggggctagcgttgttcggaattactgggcgtaaagcgcacgtaggcggacatttaagtcaggggtgaaatcccggggctcaaccccggaactgcctttgatactgggtgtctagagtatggaagaggtgagtggaattccgagtgtagaggtgaaattcgtagatattcggaggaacaccagtggcgaaggcggctcactggtccattactgacgctgaggtgcgaaagcgtggggagcaaacaggattagataccctggtagtccacgccgtaaacgatgaatgttagccgtcgggcagtttactgttcggtggcgcagctaacgcattaaacattccgcctggggagtacggtcgcaagattaaaactcaaaggaattgacgggggcccgcacaagcggtggagcatgtggtttaattcgaagcaacgcgcagaaccttaccagcccttgacatcccgatcgcggattacggagacgttttccttcagttcggctggatcggagacaggtgctgcatggctgtcgtcagctcgtgtcgtgagatgttgggttaagtcccgcaacgagcgcaaccctcgcccttagttgccagcatttagttgggcactctaaggggactgccggtgataagccgagaggaaggtggggatgacgtcaagtcctcatggcccttacgggctgggctacacacgtgctacaatggtggtgacagtgggcagcgagaccgcgaggtcgagctaatctccaaaagccatctcagttcggattgcactctgcaactcgagtgcatgaagttggaatcgctagtaatcgcagatcagcatgctgcggtgaatacgttcccgggccttgtacacaccgcccgtcacaccatgggagttggttctacccgaaggtagtgcgctaaccgcaaggaggcagctaaccacggtagggtcagcgactggggtg

SEQ ID NO: 1361 - DNA, 1407 bp, Ensifer alkalisoli
aacgaacgctggcggcaggcttaacacatgcaagtcgagcgcgtagcaatacgagcggcagacgggtgagtaacgcgtgggaatctacccttttctacggaataacgcagggaaacttgtgctaataccgtatgagcccttcgggggaaagatttatcgggaaaggatgagcccgcgttggattagctagttggtggggtaaaggcctaccaaggcgacgatccatagctggtctgagaggatgatcagccacattgggactgagacacggcccaaactcctacgggaggcagcagtggggaatattggacaatgggcgcaagcctgatccagccatgccgcgtgagtgatgaaggccctagggttgtaaagctctttcaccggtgaagataatgacggtaaccggagaagaagccccggctaacttcgtgccagcagccgcggtaatacgaagggggctagcgttgttcggaattactgggcgtaaagcgcacgtaggcggattgttaagtgaggggtgaaatcccagggctcaaccctggaactgcctttcatactggcaatctagagtccagaagaggtgagtggaattccgagtgtagaggtgaaattcgtagatattcggaggaacaccagtggcgaaggcggctcactggtctggtactgacgctgaggtgcgaaagcgtggggagcaaacaggattagataccctggtagtccacgccgtaaacgatgaatgttagccgtcgggcagtttactgttcggtggcgcagctaacgcattaaacattccgcctggggagtacggtcgcaagattaaaactcaaaggaattgacgggggcccgcacaagcggtggagcatgtggtttaattcgaagcaacgcgcagaaccttaccagcccttgacatcccggtcgcggatacgagagatcgtattcttcagttcggctggaccggagacaggtgctgcatggctgtcgtcagctcgtgtcgtgagatgttgggttaagtcccgcaacgagcgcaaccctcgcccttagttgccagcattaagttgggcactctaaggggactgccggtgataagccgagaggaaggtggggatgacgtcaagtcctcatggcccttacgggctgggctacacacgtgctacaatggtggtgacagtgggcagcgagaccgcgaggtcgagctaatctccaaaagccatctcagttcggattgcactctgcaactcgggtgcatgaagttggaatcgctagtaatcgcagatcagcatgctgcggtgaatacgttcccgggccttgtacacaccgcccgtcacaccatgggagttggttctacccgaaggtagtgcgctaaccgcaaggaggcagctaaccacggtagggtcagcgactggggtg

SEQ ID NO: 1362 - DNA, 1407 bp, Ensifer glycinis
aacgaacgctggcggcaggcttaacacatgcaagtcgagcgcgtggcaacacgagcggcagacgggtgagtaacgcgtgggaatctacccttttctacggaataacgcagggaaacttgtgctaataccgtatgagcccttcgggggaaagatttatcgggaaaggatgagcccgcgttggattagctagttggtggggtaaaggcctaccaaggcgacgatccatagctggtctgagaggatgatcagccacattgggactgagacacggcccaaactcctacgggaggcagcagtggggaatattggacaatgggcgcaagcctgatccagccatgccgcgtgagtgatgaaggccctagggttgtaaagctctttcaccggtgaagataatgacggtaaccggagaagaagccccggctaacttcgtgccagcagccgcggtaatacgaagggggctagcgttgttcggaattactgggcgtaaagcgcacgtaggcggacatttaagtcaggggtgaaatcccggggctcaaccccggaactgcctttgatactgggtgtctagagtccggaagaggtgagtggaattccgagtgtagaggtgaaattcgtagatattcggaggaacaccagtggcgaaggcggctcactggtccggtactgacgctgaggtgcgaaagcgtggggagcaaacaggattagataccctggtagtccacgccgtaaacgatgaatgttagccgtcgggcagtttactgttcggtggcgcagctaacgcattaaacattccgcctggggagtacggtcgcaagattaaaactcaaaggaattgacgggggcccgcacaagcggtggagcatgtggtttaattcgaagcaacgcgcagaaccttaccagcccttgacatcccggtcgcgggaacgagagatcgtttccttcagttcggctggaccggagacaggtgctgcatggctgtcgtcagctcgtgtcgtgagatgttgggttaagtcccgcaacgagcgcaaccctcgcccttagttgccagcatttagttgggcactctaaggggactgccggtgataagccgagaggaaggtggggatgacgtcaagtcctcatggcccttacgggctgggctacacacgtgctacaatggtggtgacagtgggcagcgagaccgcgaggtcgagctaatctccaaaagccatctcagttcggattgcactctgcaactcgagtgcatgaagttggaatcgctagtaatcgcagatcagcatgctgcggtgaatacgttcccgggccttgtacacaccgcccgtcacaccatgggagttggttctacccgaaggtagtgcgctaaccgcaaggaggcagctaaccacggtagggtcagcgactggggtg

SEQ ID NO: 1363 - DNA, 1407 bp, Ensifer sojae
aacgaacgctggcggcaggcttaacacatgcaagtcgagcgcgtagcaatacgagcggcagacgggtgagtaacgcgtgggaatctacccttttctacggaataacgcagggaaacttgtgctaataccgtatgagcccttcgggggaaagatttatcgggaaaggatgagcccgcgttggattagctagttggtggggtaaaggcctaccaaggcgacgatccatagctggtctgagaggatgatcagccacattgggactgagacacggcccaaactcctacgggaggcagcagtggggaatattggacaatgggcgcaagcctgatccagccatgccgcgtgagtgatgaaggccctagggttgtaaagctctttcaccggtgaagataatgacggtaaccggagaagaagccccggctaacttcgtgccagcagccgcggtaatacgaagggggctagcgttgttcggaattactgggcgtaaagcgcacgtaggcggacatttaagtcaggggtgaaatcccggggctcaaccccggaactgcctttgatactgggtgtctagagtccagaagaggtgagtggaattccgagtgtagaggtgaaattcgtagatattcggaggaacaccagtggcgaaggcggctcactggtctggtactgacgctgaggtgcgaaagcgtggggagcaaacaggattagataccctggtagtccacgccgtaaacgatgaatgttagccgtcgggcagtttactgttcggtggcgcagctaacgcattaaacattccgcctggggagtacggtcgcaagattaaaactcaaaggaattgacgggggcccgcacaagcggtggagcatgtggtttaattcgaagcaacgcgcagaaccttaccagcccttgacatcccggtcgcgggaacgagagatcgtttccttcagttcggctggaccggagacaggtgctgcatggctgtcgtcagctcgtgtcgtgagatgttgggttaagtcccgcaacgagcgcaaccctcgcccttagttgccagcatttagttgggcactctaaggggactgccggtgataagccgagaggaaggtggggatgacgtcaagtcctcatggcccttacgggctgggctacacacgtgctacaatggtggtgacagtgggcagcgagaccgcgaggtcgagctaatctccaaaagccatctcagttcggattgcactctgcaactcgggtgcatgaagttggaatcgctagtaatcgcagatcagcatgctgcggtgaatacgttcccgggccttgtacacaccgcccgtcacaccatgggagttggttctacccgaaggtagtgcgctaaccgcaaggaggcagctaaccacggtagggtcagcgactggggtg

SEQ ID NO: 1364 - DNA, 1381 bp, Enterobacillus tribolii
attgaacgctggcggcaggcctaacacatgcaagtcgagcggcagcggggggaagcttgcttccccgccggcgagcggcggacgggtgagtaatgtctgggaaactgcctgatggagggggataaccactggaaacggtggctaataccgcataacgtcgcaagaccaaagagggggaccttcgggcctcttgccatcagatgtgcccagatgggattagctagtaggtggggtaatggctcacctaggcgacgatccctagctggtctgagaggatgaccagccacactggaactgagacacggtccagactcctacgggaggcagcagtggggaatattgcacaatgggcgcaagcctgatgcagccatgccgcgtgtatgaagaaggccttcgggttgtaaagtactttcagcggggaggaaggtgttgagtttaatacactcagcaattgacgttacccgcagaagaagcaccggctaactccgtgccagcagccgcggtaatacggagggtgcaagcgttaatcggaattactgggcgtaaagcgcacgcaggcggttgattaagtcagatgtgaaatccccgggcttaacctgggaactgcatttgaaactggtcagcttgagtctcgtagaggggggtagaattccaggtgtagcggtgaaatgcgtagagatctggaggaataccggtggcgaaggcggccccctggacgaagactgacgctcaggtgcgaaagcgtggggagcaaacaggattagataccctggtagtccacgctgtaaacgatgtcgacttggaggttgttcccttgaggagtggcttccggagctaacgcgttaagtcgaccgcctggggagtacggccgcaaggttaaaactcaaatgaattgacgggggcccgcacaagcggtggagcatgtggtttaattcgatgcaacgcgaagaaccttacctactcttgacatccacagaaggtctcagagatgagactgtgccttcgggaactgtgagacaggtgctgcatggctgtcgtcagctcgtgttgtgaaatgttgggttaagtcccgcaacgagcgcaacccttatcctttgttgccagcgattcggtcgggaactcaaaggagactgccggtgataaaccggaggaaggtggggatgacgtcaagtcatcatggcccttacgagtagggctacacacgtgctacaatggcgtatacaaagagaagcgacctcgcgagagcaagcggacctcataaagtacgtcgtagtccggattggagtctgcaactcgactccatgaagtcggaatcgctagtaatcgtggatcagaatgccacggtgaatacgttcccgggccttgtacacaccgcccgtca

SEQ ID NO: 1365 - DNA, 1462 bp, Enterobacter bugandensis
attgaacgctggcggcaggcctaacacatgcaagtcgaacggtagcacagagagcttgctctcgggtgacgagtggcggacgggtgagtaatgtctgggaaactgcctgatggagggggataactactggaaacggtagctaataccgcataacgtcgcaagaccaaagagggggaccttcgggcctcttgccatcagatgtgcccagatgggattagctagtaggtggggtaacggctcacctaggcgacgatccctagctggtctgagaggatgaccagccacactggaactgagacacggtccagactcctacgggaggcagcagtggggaatattgcacaatgggcgcaagcctgatgcagccatgccgcgtgtatgaagaaggccttcgggttgtaaagtactttcagcggggaggaaggcgataaggttaataaccttgtcgattgacgttacccgcagaagaagcaccggctaactccgtgccagcagccgcggtaatacggagggtgcaagcgttaatcggaattactgggcgtaaagcgcacgcaggcggtctgtcaagtcggatgtgaaatccccgggctcaacctgggaactgcattcgaaactggcaggctagagtcttgtagaggggggtagaattccaggtgtagcggtgaaatgcgtagagatctggaggaataccggtggcgaaggcggccccctggacaaagactgacgctcaggtgcgaaagcgtggggagcaaacaggattagataccctggtagtccacgccgtaaacgatgtcgacttggaggttgtgcccttgaggcgtggcttccggagctaacgcgttaagtcgaccgcctggggagtacggccgcaaggttaaaactcaaatgaattgacgggggcccgcacaagcggtggagcatgtggtttaattcgatgcaacgcgaagaaccttacctactcttgacatccagagaacttagcagagatgctttggtgccttcgggaactctgagacaggtgctgcatggctgtcgtcagctcgtgttgtgaaatgttgggttaagtcccgcaacgagcgcaacccttatcctttgttgccagcggttaggccgggaactcaaaggagactgccagtgataaactggaggaaggtggggatgacgtcaagtcatcatggcccttacgagtagggctacacacgtgctacaatggcgcatacaaagagaagcgacctcgcgagagcaagcggacctcataaagtgcgtcgtagtccggattggagtctgcaactcgactccatgaagtcggaatcgctagtaatcgtggatcagaatgccacggtgaatacgttcccgggccttgtacacaccgcccgtcacaccatgggagtgggttgcaaaagaagtaggtagcttaaccttcgggagggcgcttaccactttgtgattcatgactggggtg

SEQ ID NO: 1366 - DNA, 1464 bp, Enterobacter mori
attgaacgctggcggcaggcctaacacatgcaagtcgagcggcagcgggaagtagcttgctactttgccggcgagcggcggacgggtgagtaatgtctgggaaactgcctgatggagggggataactactggaaacggtagctaataccgcataatgtcgcaagaccaaagagggggaccttcgggcctcttgccatcagatgtgcccagatgggattagctagtaggtggggtaacggctcacctaggcgacgatccctagctggtctgagaggatgaccagccacactggaactgagacacggtccagactcctacgggaggcagcagtggggaatattgcacaatgggcgcaagcctgatgcagccatgccgcgtgtatgaagaaggccttcgggttgtaaagtactttcagcggggagggaggtgttgaggttaataacctcagcaattgacgttacccgcagaagaagcaccggctaactccgtgccagcagccgcggtaatacggagggtgcaagcgttaatcggaattactgggcgtaaagcgcacgcaggcggtctgtcaagtcggatgtgaaatccccgggctcaacctgggaactgcattcgaaactggcaggctagagtcttgtagaggggggtagaattccaggtgtagcggggaaatgcgtagagatctggaggaataccggtggcgaaggcggccccctggacaaagactgacgctcaggtgcgaaagcgtggggagcaaacaggattagataccctggtagtccacgccgtaaacgatgtcgacttggaggttgtgcccttgaggcgtggcttccggagctaacgcgttaagtcgaccgcctggggagtacggccgcaaggttaaaactcaaatgaattgacgggggcccgcacaagcggtggagcatgtggtttaattcgatgcaacgcgaagaaccttacctactcttgacatccagagaacttagcagagatgctttggtgccttcgggaactctgagacaggtgctgcatggctgtcgtcagctcgtgttgtgaaatgttgggttaagtcccgcaacgagcgcaacccttatcctttgttgccagcggttcgggcgggaactcaaaggagactgccagtgataaactggaggaaggtggggatgacgtcaagtcatcatggcccttacgagtagggctacacacgtgctacaatggcgcatacaaagagaagcgacctcgcgagagcaagcggacctcataaagtgcgtcgtagtccggattggagtctgcaactcgactccatgaagtcggaatcgctagtaatcgtagatcagaatgctacggtgaatacgttcccgggccttgtacacaccgcccgtcacaccatgggagtgggttgcaaaagaagtaggtagcttaaccttcgggagggcgcttaccactttgtgattcatgactggggtg

SEQ ID NO: 1367 - DNA, 1462 bp, Enterobacter soli
attgaacgctggcggcaggcctaacacatgcaagtcgagcggtaacacagggagcttgctcctgggtgacgagcggcggacgggtgagtaatgtctgggaaactgcctgatggagggggataactactggaaacggtagctaataccgcataacgtcgcaagaccaaagagggggaccttcgggcctcttgccatcagatgtgcccagatgggattagctagtaggtggggtaacggctcacctaggcgacgatccctagctggtctgagaggatgaccagccacactggaactgagacacggtccagactcctacgggaggcagcagtggggaatattgcacaatgggcgcaagcctgatgcagccatgccgcgtgtatgaagaaggccttcgggttgtaaagtactttcagcgaggaggaaggcattaaggttaataaccttagtgattgacgttactcgcagaagaagcaccggctaactccgtgccagcagccgcggtaatacggagggtgcaagcgttaatcggaattactgggcgtaaagcgcacgcaggcggtctgtcaagtcggatgtgaaatccccgggctcaacctgggaactgcattcgaaactggcaggctagagtcttgtagaggggggtagaattccaggtgtagcggtgaaatgcgtagagatctggaggaataccggtggcgaaggcggccccctggacaaagactgacgctcaggtgcgaaagcgtggggagcaaacaggattagataccctggtagtccacgccgtaaacgatgtcgatttggaggttgttcccttgaggagtggcttccggagctaacgcgttaaatcgaccgcctggggagtacggccgcaaggttaaaactcaaatgaattgacgggggcccgcacaagcggtggagcatgtggtttaattcgatgcaacgcgaagaaccttacctactcttgacatccagagaactttccagagatggattggtgccttcgggaactctgagacaggtgctgcatggctgtcgtcagctcgtgttgtgaaatgttgggttaagtcccgcaacgagcgcaacccttatcctttgttgccagcggtccggccgggaactcaaaggagactgccagtgataaactggaggaaggtggggatgacgtcaagtcatcatggcccttacgagtagggctacacacgtgctacaatggcatatacaaagagaagcgacctcgcgagagcaagcggacctcataaagtatgtcgtagtccggattggagtctgcaactcgactccatgaagtcggaatcgctagtaatcgtagatcagaatgctacggtgaatacgttcccgggccttgtacacaccgcccgtcacaccatgggagtgggttgcaaaagaagtaggtagcttaaccttcgggagggcgcttaccactttgtgattcatgactggggtg

SEQ ID NO: 1368 - DNA, 1467 bp, Enterovibrio calviensis
  misc_feature (182)..(182): n is a, c, g, or t
  misc_feature (190)..(190): n is a, c, g, or t
  misc_feature (192)..(192): n is a, c, g, or t
  misc_feature (819)..(819): n is a, c, g, or t
attgaacgctggcggcaggcctaacacatgcaagtcgagcggtaacatttcaaaagcttgcttttgaagatgacgagcggcggacgggtgagtaatggctgggaacctgccctgacgtgggggataacagttggaaacgactgctaataccgcatgatgtttacggaccaaagagggggatnttcggacntntcgcgtcgggatgggcccagttgggattagctagttggtgaggtaatggctcaccaaggcgacgatccctagctggtttgagaggatgatcagccacactggaactgagacacggtccagactcctacgggaggcagcagtggggaatattgcacaatgggcgcaagcctgatgcagccatgccgcgtgtgtgaagaaggccttcgggttgtaaagcactttcagcagtgaggaaggttggtgcgttaatagcgtatcaatttgacgttagctgcagaagaagcaccggctaactccgtgccagcagccgcggtaatacggagggtgcgagcgttaatcggaattactgggcgtaaagcgcatgcaggcggtttgttaagcaagatgtgaaagccccgggctcaacctgggaaccgcattttgaactggcaggctagagtcttgtagaggggggtagaatttcaggtgtagcggtgaaatgcgtagagatctgaaggaataccggtggcgaaggcggccccctggacaaagactgacgctcagatgcgaaagcgtggggagcaaacaggattagataccctggtagtccacgctgtaaacgatgtctacttggaggttgtgacctanagtcgtggctttcggagctaacgcgttaagtagaccgcctggggagtacggtcgcaagattaaaactcaaatgaattgacgggggcccgcacaagcggtggagcatgtggtttaattcgatgcaacgcgaagaaccttacctactcttgacatccagagaagccgaaagagattttggtgtgccttcgggaactctgagacaggtgctgcatggctgtcgtcagctcgtgttgtgaaatgttgggttaagtcccgcaacgagcgcaacccttatccttgtttgccagcgagtaatgtcgggaactccagggagactgccggtgataaaccggaggaaggtggggacgacgtcaagtcatcatggcccttacgagtagggctacacacgtgctacaatggcatatacagagggcagcgaggccgcgaggtggagcgaatcccagaaagtatgtcgtagtccggatcggagtctgcaactcgactccgtgaagtcggaatcgctagtaatcgtgaatcagaatgtcacggtgaatacgttcccgggccttgtacacaccgcccgtcacaccatgggagtgggctgcaccagaagtagatagcttaaccttcgggagggcgtttaccacggtgtggttcatgactggggtg

SEQ ID NO: 1369 - DNA, 1467 bp, Enterovibrio nigricans
attgaacgctggcggcaggcctaacacatgcaagtcgagcggtaacatttcaaaagcttgcttttgaagatgacgagcggcggacgggtgagtaatggctgggaacctgccctgatgtgggggataacagttggaaacgactgctaataccgcatgatgtctacggaccaaagaggaggaccttcgggcttctcgcgtcaggatgggcccagttgggattagctagttggtgaggtaatggctcaccaaggcgacgatccctagctggtttgagaggatgatcagccacactggaactgagacacggtccagactcctacgggaggcagcagtggggaatattgcacaatgggcgcaagcctgatgcagccatgccgcgtgtgtgaagaaggccttcgggttgtaaagcactttcagcagtgaggaaggttacgtagttaatacctgcgtgatttgacgttagctgcagaagaaggaccggctaactccgtgccagcagccgcggtaatacggagggtccgagcgttaatcggaattactgggcgtaaagcgcatgcaggcggtttgttaagcaagatgtgaaagccccgggcttaacctgggaaccgcattttgaactggcaggctagagtcttgtagaggggggtagaatttcaggtgtagcggtgaaatgcgtagagatctgaaggaataccggtggcgaaggcggccccctggacaaagactgacgctcagatgcgaaagcgtggggagcaaacaggattagataccctggtagtccacgctgtaaacgatgtctacttggaggttgttctctagaggagtggctttcggagctaacgcgttaagtagaccgcctggggagtacggtcgcaagattaaaactcaaatgaattgacgggggcccgcacaagcggtggagcatgtggtttaattcgatgcaacgcgaagaaccttacctactcttgacatccagagaagccgaaagagattttggtgtgccttcgggagctctgagacaggtgctgcatggctgtcgtcagctcgtgttgtgaaatgttgggttaagtcccgcaacgagcgcaacccttatccttgtttgccagcacataatggtgggaactccagggagactgccggtgataaaccggaggaaggtggggacgacgtcaagtcatcatggcccttacgagtagggctacacacgtgctacaatggcatatacagagggcagcgaggccgcgaggtggagcgaatcccagaaagtatgtcgtagtccggatcggagtctgcaactcgactccgtgaagtcggaatcgctagtaatcgtggatcagaatgccacggtgaatacgttcccgggccttgtacacaccgcccgtcacaccatgggagtgggctgcaccagaagtagatagcttaaccttcgggagggcgtttaccacggtgtggttcatgactggggtg

SEQ ID NO: 1370 - DNA, 1475 bp, Enterovibrio norvegicus
  misc_feature (55)..(55): n is a, c, g, or t
  misc_feature (67)..(67): n is a, c, g, or t
  misc_feature (172)..(172): n is a, c, g, or t
  misc_feature (440)..(440): n is a, c, g, or t
  misc_feature (991)..(991): n is a, c, g, or t
attgaacgctggcggcaggcctaacacatgcaagtcgagcggcagcgacaacaangattcttcggangatttgttgggcggcgagcggcggacgggtgagtaatggctgggaacctgccctgacgtgggggataacagttggaaacgactgctaataccgcatgatgtcttnggaccaaagaggaggaccttcgggcttctcgcgtcgggatgggcccagttgggattagctagttggtgaggtaatggctcaccaaggcgacgatccctagctggtttgagaggatgatcagccacactggaactgagacacggtccagactcctacgggaggcagcagtggggaatattgcacaatgggcgcaagcctgatgcagccatgccgcgtgtgtgaagaaggccttcgggttgtaaagcactttcagcagtgaggaagggtnatgagttaatacctcattatcttgacgttagctgcagaagaagcaccggctaactccgtgccagcagccgcggtaatacggagggtgcgagcgttaatcggaattactgggcgtaaagcgcatgcaggcggtttgttaagcaagatgtgaaagccccgggctcaacctgggaaccgcattttgaactggcaggctagagtcttgtagaggggggtagaatttcaggtgtagcggtgaaatgcgtagagatctgaaggaataccggtggcgaaggcggccccctggacaaagactgacgctcagatgcgaaagcgtggggagcaaacaggattagataccctggtagtccacgctgtaaacgatgtctacttggaggttgcggtcttgaactgtggctttcggagctaacgcgttaagtagaccgcctggggagtacggtcgcaagattaaaactcaaatgaattgacgggggcccgcacaagcggtggagcatgtggtttaattcgatgcaacgcgaagaaccttacctactcttgacatccagagaattngctagagatagcttagtgccttcgggagctctgagacaggtgctgcatggctgtcgtcagctcgtgttgtgaaatgttgggttaagtcccgcaacgagcgcaacccttatccttgtttgccagcgagtaatgtcgggaactccagggagactgccggtgataaaccggaggaaggtggggacgacgtcaagtcatcatggcccttacgagtagggctacacacgtgctacaatggcatatacagagggcagcgaggccgcgaggtggagcgaatcccagaaagtatgtcgtagtccggattggagtctgcaactcgactccatgaagtcggaatcgctagtaatcgtgaatcagaatgtcacggtgaatacgttcccgggccttgtacacaccgcccgtcacaccatgggagtgggctgcaccagaagtagatagcttaaccttcgggagggcgtttaccacggtgtggttcatgactggggtg

SEQ ID NO: 1371 - DNA, 1465 bp, Enterovibrio pacificus
attgaacgctggcggcaggcctaacacatgcaagtcgagcggaaacgagaaggtgcttgcaccttcggcgtcgagcggcggacgggtgagtaatggctgggtacctgccctgatgtgggggataacagttggaaacgactgctaataccgcataacgtctacggaccaaagagggggatcttcggacctctcgcgtcaggatgggcccagttgggattagcttgttggtgaggtaatggctcaccaaggcaacgatccctagctggtttgagaggatgatcagccacactggaactgagacacggtccagactcctacgggaggcagcagtggggaatattgcacaatgggggaaaccctgatgcagccatgccgcgtgtgtgaagaaggccttcgggttgtaaagcactttcagctgtgaggaaggcagtttagttaatagctagattgtttgacgttagcagcagaagaagcaccggctaactccgtgccagcagccgcggtaatacggagggtgcgagcgttaatcggaattactgggcgtaaagcgcatgcaggcggtctgttaagcaagatgtgaaagccccgggctcaacctgggaaagtcattttgaactggcaggctagagtcttgtagaggggggtagaatttcaggtgtagcggtgaaatgcgtagagatctgaaggaataccggtggcgaaggcggccccctggacaaagactgacgctcagatgcgaaagcgtggggagcaaacaggattagataccctggtagtccacgccgtaaacgatgtctacttggaggctgtgacctagagtcgtggctttcggagctaacgcgttatgtagaccgcctggggagtacggtcgcaagattaaaactcaaatgaattgacgggggcccgcacaagcggtggagcatgtggtttaattcgatgcaacgcgaagaaccttacctactcttgacatccagagaagcttgaagagattcgagtgtgccttcgggagctctgagacaggtgctgcatggctgtcgtcagctcgtgttgtgaaatgttgggttaagtcccgcaacgagcgcaacccttatccttgtttgccagcacgtcatggtgggaactccagggagactgccggtgataaaccggaggaaggtggggacgacgtcaagtcatcatggcccttacgagtagggctacacacgtgctacaatggcatatacagagggcagcgagaccgcgaggtggagcgaatcccagaaagtatgtcgtagtccggattggagtctgcaactcgactccatgaagtcggaatcgctagtaatcgtggatcagaatgccacggtgaatacgttcccgggccttgtacacaccgcccgtcacaccatgggagtgggctgcaccagaagtagatagcttaaccttcgggagggcgtttaccacggtgtggttcatgactggggtg

SEQ ID NO: 1372 - DNA, 1411 bp, Enterovirga rhinocerotis
agcgaacgctggcggcaggcttaacacatgcaagtcgaacgggcatcttcggatgtcagtggcagacgggtgagtaacacgtgggaacgtacccttcggttcggaataactcagggaaacttgagctaataccggatacgccctttgggggaaaggtttactgccgaaggatcggcccgcgtctgattagctagttggtggggtaatggcccaccaaggcgacgatcagtagctggtctgagaggatgatcagccacactgggactgagacacggcccagactcctacgggaggcagcagtggggaatattggacaatgggcgaaagcctgatccagccatgccgcgtgagtgatgaaggccttagggttgtaaagctcttttacccgggaagataatgactgtaccgggagaataagccccggctaacttcgtgccagcagccgcggtaatacgaagggggctagcgttgctcggaatcatctgggtcgtaaagggcggcgtaggcggccgatcaagtcagagggtgaaagccccaggctcaacctgggaattgcctttgatactgtttggctagagaccggaagaggtaagtggaactgcgagtgtagaggtgaaattcgtagatattcgcaagaacaccagtggcgaaggcggcttactggtccggttctgacgctgaggcgcgaaagcgtggggagcaaacaggattagataccctggtagtccacgccgtaaactatgaatgctagccgttggtcagcttgctgatcagtggcgcagctaacgctttaagcattccgcctggggagtacggtcgcaagattaaaactcaaaggaattgacgggggcccgcacaagcggtggagcatgtggtttaattcgaagcaacgcgcagaaccttaccagctcttgacatcctgtgccacccagagagatttggggttcccttcggggacgcagagacaggtgctgcatggctgtcgtcagctcgtgtcgtgagatgttgggttaagtcccgcaacgagcgcaaccctcgcccctagttgccatcatttagttgggcactctagggggactgccggtgataagccgagaggaaggtggggatgacgtcaagtcctcatggcccttacgggctgggctacacacgtgctacaatggcggtgacaatgggcagcgaaagggcgacctggagctaatcccaaaaagccgtctcagttcggattgcactctgcaactcgagtgcatgaaggcggaatcgctagtaatcgcggatcagcacgccacggtgaatacgttcccgggccttgtacacaccgcccgtcacaccatgggagttgggtttacccgaaggcagtgcgccaaccgcaaggaggcagctgaccacggtaggctcagcgactggggtg

SEQ ID NO: 1373 - DNA, 1462 bp, Erwinia amylovora
attgaacgctggcggcaggcctaacacatgcaagtcgaacggtagcacagagagcttgctcttgggtgacgagtggcggacgggtgagtaatgtctgggaaactgcccgatggagggggataactactggaaacggtagctaataccgcataacgtctacggaccaaagtgggggaccttcgggcctcacaccatcggatgtgcccagatgggattagctggtaggtgaggtaacggctcacctaggcgacgatccctagctggtctgagaggatgaccagccacactggaactgagacacggtccagactcctacgggaggcagcagtggggaatattgcacaatgggcgcaagcctgatgcagccatgccgcgtgtatgaagaaggccttcgggttgtaaagtactttcagcggggaggaagggttagaggttaataacctcctgcattgacgttacccgcagaagaagcaccggctaactccgtgccagcagccgcggtaatacggagggtgcaagcgttaatcggaattactgggcgtaaagcgcacgcaggcggtctgtcaagtcggatgtgaaatccccgggcttaacctgggaactgcattcgaaactggcaggctagagtctcgtagaggggggtagaattccaggtgtagcggtgaaatgcgtagagatctggaggaataccggtggcgaaggcggccccctggacgaagactgacgctcaggtgcgaaagcgtggggagcaaacaggattagataccctggtagtccacgccgtaaacgatgtcgacttggaggctgttcccctgaggagtggcttccggagctaacgcgttaagtcgaccgcctggggagtacggccgcaaggttaaaactcaaatgaattgacgggggcccgcacaagcggtggagcatgtggtttaattcgatgcaacgcgaagaaccttacctggccttgacatccacggaattctgcagagatgcggaagtgccttcgggaaccgtgagacaggtgctgcatggctgtcgtcagctcgtgttgtgaaatgttgggttaagtcccgcaacgagcgcaacccttatcctttgttgccagcgattcggtcgggaactcaaaggagactgccggtgataaaccggaggaaggtggggatgacgtcaagtcatcatggcccttacggccagggctacacacgtgctacaatggcgcatacaaagagaagcgacctcgcgagagcaagcggacctcataaagtgcgtcgtagtccggatcggagtctgcaactcgactccgtgaagtcggaatcgctagtaatcgtagatcagaatgctacggtgaatacgttcccgggccttgtacacaccgcccgtcacaccatgggagtgggttgcaaaagaagtaggtagcttaaccttcgggagggcgcttaccactttgtgattcatgactggggtg

SEQ ID NO: 1374 - DNA, 1464 bp, Erwinia aphidicola
attgaacgctggcggcaggcctaacacatgcaagtcgaacggtagcacagaggagcttgctccttgggtgacgagtggcggacgggtgagtaatgtctgggaaactgcccgatggagggggataactactggaaacggtagctaataccgcataacgtcgcaagaccaaagagggggaccttcgggcctcttgccatcggatgtgcccagatgggattagctagtaggtggggtaacggctcacctaggcgacgatccctagctggtctgagaggatgaccagccacactggaactgagacacggtccagactcctacgggaggcagcagtggggaatattgcacaatgggcgcaagcctgatgcagccatgccgcgtgtatgaagaaggccttcgggttgtaaagtactttcagcgaggaggaaggtgttgaggttaataacctcagcaattgacgttacccgcagaagaagcaccggctaactccgtgccagcagccgcggtaatacggagggtgcaagcgttaatcggaattactgggcgtaaagcgcacgcaggcggtctgtcaagtcggatgtgaaatccccgggctcaacctgggaactgcattcgaaactggcaggctagagtcttgtagaggggggtagaattccaggtgtagcggtgaaatgcgtagagatctggaggaataccggtggcgaaggcggccccctggacaaagactgacgctcaggtgcgaaagcgtggggagcaaacaggattagataccctggtagtccacgccgtaaacgatgtcgacttggaggttgtgcccttgaggcgtggcttccggagctaacgcgttaagtcgaccgcctggggagtacggccgcaaggttaaaactcaaatgaattgacgggggcccgcacaagcggtggagcatgtggtttaattcgatgcaacgcgaagaaccttacctactcttgacatccagagaacttggcagagatgctttggtgccttcgggaactctgagacaggtgctgcatggctgtcgtcagctcgtgttgtgaaatgttgggttaagtcccgcaacgagcgcaacccttatcctttgttgccagcggttcggccgggaactcaaaggagactgccagtgataaactggaggaaggtggggatgacgtcaagtcatcatggcccttacggccagggctacacacgtgctacaatggcgcatacaaagagaagcgacctcgcgagagcaagcggacctcataaagtgcgtcgtagtccggattggagtctgcaactcgactccatgaagtcggaatcgctagtaatcgtagatcagaatgctacggtgaatacgttcccgggccttgtacacaccgcccgtcacaccatgggagtgggttgcaaaagaagtaggtagcttaaccttcgggagggcgcttaccactttgtgattcatgactggggtg

SEQ ID NO: 1375 - DNA, 1463 bp, Erwinia billingiae
attgaacgctggcggcaggcctaacacatgcaagtcgaacggtagcacagagagcttgctctcgggtgacgagtggcggacgggtgagtaatgtctgggaaactgcctgatggagggggataactactggaaacggtagctaataccgcataacgtcttcggaccaaagtgggggaccttcgggcctcacaccatcggatgtgcccagatgggattagctagtaggtggggtaatggctcacctaggcgacgatccctagctggtctgagaggatgaccagccacactggaactgagacacggtccagactcctacgggaggcagcagtggggaatattgcacaatgggcgcaagcctgatgcagccatgccgcgtgtatgaagaaggccttcgggttgtaaagtactttcagcggggaggaaggcgataaggttaataaccttgtcgattgacgttacccgcagaagaagcaccggctaactccgtgccagcagccgcggtaatacggagggtgcaagcgttaatcggaattactgggcgtaaagcgcacgcaggcggtctgtcaagtcagatgtgaaatccccgggcttaacctgggaactgcatttgaaactggcaggctagagtcttgtagaggggggtagaattccaggtgtagcggtgaaatgcgtagagatctggaggaataccggtggcgaaggcggccccctggacaaagactgacgctcaggtgcgaaagcgtggggagcaaacaggattagataccctggtagtccacgccgtaaacgatgtcgacttggaggttgtgcccttgaggcgtggcttccggagctaacgcgttaagtcgaccgcctggggagtacggccgcaaggttaaaactcaaatgaattgacgggggcccgcacaagcggtggagcatgtggtttaattcgatgcaacgcgaagaaccttacctggccttgacatccacggaattcggcagagatgccttagtgccttcgggaaccgtgagacaggtgctgcatggctgtcgtcagctcgtgttgtgaaatgttgggttaagtcccgcaacgagcgcaacccttatcctttgttgccagcgagtaatgtcgggaactcaaaggagactgccggtgacaaaccggaggaaggtggggatgacgtcaagtcatcatggcccttacggccagggctacacacgtgctacaatggcgcatacaaagagaagcgaactcgcgagagcaagcggacctcacaaagtgcgtcgtagtccggatcggagtctgcaactcgactccgtgaagtcggaatcgctagtaatcgtagatcagaatgctacggtgaatacgttcccgggccttgtacacaccgcccgtcacaccatgggagtgggttgcaaaagaagtaggtagcttaaccttcgggagggcgcttaccactttgtgattcatgactggggtg

SEQ ID NO: 1376 - DNA, 1348 bp, Erwinia gerundensis
  misc_feature (104)..(104): n is a, c, g, or t
  misc_feature (192)..(192): n is a, c, g, or t
  misc_feature (208)..(208): n is a, c, g, or t
  misc_feature (239)..(239): n is a, c, g, or t
  misc_feature (329)..(329): n is a, c, g, or t
  misc_feature (388)..(388): n is a, c, g, or t
  misc_feature (410)..(410): n is a, c, g, or t
  misc_feature (478)..(478): n is a, c, g, or t
gagtaatgtctggggatctgcccgatggagggggataaccactggaaacggtggcttataccgcataacgtcgcaagaccaaagtgggggaccttcgggcctcnctccatcggatgaacccagatgggattagctagtaggtggggtaacggctcacctaggcgacgatccctagctggtgtgagaggatgnccagccacactggaantgagacacggtccagactcttacgggaggcngcagtggggaatattgcacaatgggcgcaagcctgatgcagccatgccgcgtgtatgaagaaggccttcgggttgtaaagtactttcaanggggaggaaggggacgaggttaataacctcgttcattgacgttacccgcagaagaagcnccggctaactccgtgccagcanccgcggtaatacggagggtgcaagcgttaatcggaattactgggcgtaaagcgcacgcaggcggtctnttaagtcagatgtgaaatccccgggcttaacctgggaactgcatttgaaactggcaggcttgagtcttgtagaggggggtagaattccaggtgtagcggtgaaatgcgtagagatctggaggaataccggtggcgaaggcggccccctggacaaagactgacgctcaggtgcgaaagcgtggggagcaaacaggattagataccctggtagtccacgccgtaaacgatgtcgacttggaggctgtgagcatgactcgtggcttccggagctaacgcgttaagtcgaccgcctggggagtacggccgcaaggttaaaactcaaatgaattgacgggggcccgcacaagcggtggagcatgtggtttaattcgatgcaacgcgaagaaccttacctgctcttgacatccacggaattcggcagagatgccttagtgccttcgggaaccgtgagacaggtgctgcatggctgtcgtcagctcgtgttgtgaaatgttgggttaagtcccgcaacgagcgcaacccttatcctttgttgccagcgattcggtcgggaactcaaaggagactgccggtgataaaccggaggaaggtggggatgacgtcaagtcatcatggcccttacgagcagggctacacacgtgctacaatggcgcatacaaagagaagcgacctcgcgagagcaagcggacctcacaaagtgcgtcgtagtccggatcggagtctgcaactcgactccgtgaagtcggaatcgctagtaatcgtggatcagaatgccacggtgaatacgttcccgggccttgtacacaccgcccgtcacgccatgggagtgggttgcaaaagaagtaggtagcttaaccttcgggagggcgc

SEQ ID NO: 1377 - DNA, 1465 bp, Erwinia iniecta
attgaacgctggcggcaggcctaacacatgcaagtcgaacggtagcacaggggagcttgctccccgggtgacgagtggcggacgggtgagtaatgtctggggatctgcccgatggagggggataactactggaaacggtagctaataccgcataacctcgaaagagcaaagtgggggaccttcgggcctcacaccatcggatgaacccagatgggattagctagtaggtggggtaacggctcacctaggcgacgatccctagctggtctgagaggatgaccagccacactggaactgagacacggtccagactcctacgggaggcagcagtggggaatattgcacaatgggcgcaagcctgatgcagccatgccgcgtgtatgaagaaggccttcgggttgtaaagtactttcagcggggaggaagggatgagggttaataaccttcgtcattgacgttacccgcagaagaagcaccggctaactccgtgccagcagccgcggtaatacggagggtgcaagcgttaatcggaattactgggcgtaaagcgcacgcaggcggtttgttaagtcagatgtgaaatccccgggctcaacctgggaactgcatttgaaactggcaagcttgagtctcgtagaggggggtagaattccaggtgtagcggtgaaatgcgtagagatctggaggaataccggtggcgaaggcggccccctggacgaagactgacgctcaggtgcgaaagcgtggggagcaaacaggattagataccctggtagtccacgccgtaaacgatgtcgacttggaggttgtgcccttgaggcgtggcttccggagctaacgcgttaagtcgaccgcctggggagtacggccgcaaggttaaaactcaaatgaattgacgggggcccgcacaagcggtggagcatgtggtttaattcgatgcaacgcgaagaaccttacctggccttgacatccacggaattcggcagagatgccttagtgccttcgggaaccgtgagacaggtgctgcatggctgtcgtcagctcgtgttgtgaaatgttgggttaagtcccgcaacgagcgcaacccttatcctttgttgccagcgcgtaatggcgggaactcaaaggagactgccggtgataaaccggaggaaggtggggatgacgtcaagtcatcatggcccttacggccagggctacacacgtgctacaatggcgcatacaaagagaagcgaactcgcgagagcaagcggacctcataaagtgcgtcgtagtccggatcggagtctgcaactcgactccgtgaagtcggaatcgctagtaatcgtggatcagaatgccacggtgaatacgttcccgggccttgtacacaccgcccgtcacaccatgggagtgggttgcaaaagaagtaggtagcttaaccttcgggagggcgcttaccactttgtgattcatgactggggtg

SEQ ID NO: 1378 - DNA, 1464 bp, Erwinia mallotivora
  misc_feature (125)..(125): n is a, c, g, or t
  misc_feature (150)..(150): n is a, c, g, or t
  misc_feature (155)..(155): n is a, c, g, or t
  misc_feature (355)..(355): n is a, c, g, or t
  misc_feature (382)..(382): n is a, c, g, or t
  misc_feature (407)..(407): n is a, c, g, or t
  misc_feature (826)..(826): n is a, c, g, or t
  misc_feature (830)..(831): n is a, c, g, or t
  misc_feature (835)..(835): n is a, c, g, or t
attgaacgctggcggcaggcctaacacatccaagtcgaacggtagcacaggggagcttcctccctgggtgacgagtggcggacgggtgagtaatgtctgggaacctgcccgatggagggggatanctactggaaacggtagctaataccncatancgtcttcggaccaaagtgggggaccttcgggcctcacaccatcggatgtgcccagatgggattagctggttggtgaggtaacggctcaccaaggcgacgatccctagctggtctgagaggatgaccagccacactggaactgagacacggtccagactcctacgggaggcagcagtggggaatattgcacaatgggcgcnagcctgatgcagccatgccgcgtgtangaagaaggccttcgggttgtaaagnactttcagcggggaggaaggtggtggggttaataaccttatcaattgacgttacccgcagaagaagcaccggctaactccgtgccagcagccgcggtaatacggagggtgcaagcgttaatcggaattactgggcgtaaagcgcacgcaggcggtctgttaagtcagatgtgaaatccccgggcttaacctgggaactgcatttgaaactggcaggcttgagtcttgtagaggggggtagaattccaggtgtagcggtgaaatgcgtagagatctggaggaataccggtggcgaaggcggccccctggacaaagactgacgctcaggtgcgaaagcgtggggagcaaacaggattagataccctggtagtccacgccgtaaacgatgtcgatttggaggttgtgcccttgaggcgtggnttcnntagntaacgcgttaaatcgaccgcctggggagtacggccgcaaggttaaaactcaaatgaattgacgggggcccgcacaagcggtggagcatgtggtttaattcgatgcaacgggaagaaccttacctggccttgacatccacggaagacctcagagatggggttgtgccttcgggaaccgtgagacaggtgctgcatggctgtcgtcagctcgtgttgtgaaatgttgggttaagtcccgcaacgagcgcaacccttatcctttgttgccatcgattcggtcgggaactcaaaggagactgccggtgataaaccggaggaaggtggggatgacgtcaagtcatcatggcccttacggccagggctacacacgtgctacaatggcgcatacaaagagaagcgacctcgcgagagcaagcggatctcataaagtgcgtcgtagtccggatcggagtctgcaactcgactccgtgaagtcggaatcgctagtaatcgtggatcagaatgccacggtgaatacgttcccgggccttgtacacaccgcccgtcacaccatgggagtgggttgcaaaagaagtaggtagcttaaccttcgggagggcgcttaccactttgtgattcatgactggggtg

SEQ ID NO: 1379 - DNA, 1463 bp, Erwinia persicina
attgaacgctggcggcaggcctaacacatgcaagtcgaacggtagcacagagagcttgctctcgggtgacgagtggcggacgggtgagtaatgtctgggaaactgcccgatggagggggataactactggaaacggtagctaataccgcataacgtcttcggaccaaagtgggggaccttcgggcctcacaccatcggatgtgcccagatgggattagctagtaggtggggtaacggctcacctaggcgacgatccctagctggtctgagaggatgaccagccacactggaactgagacacggtccagactcctacgggaggcagcagtggggaatattgcacaatgggcgcaagcctgatgcagccatgccgcgtgtatgaagaaggccttcgggttgtaaagtactttcagtggggaggaaggcgatgaagttaataacttcgtcgattgacgttacccgcagaagaagcaccggctaactccgtgccagcagccgcggtaatacggagggtgcaagcgttaatcggaattactgggcgtaaagcgcacgcaggcggtctgtcaagtcggatgtgaaatccccgggctcaacctgggaactgcattcgaaactggcaggctagagtcttgtagaggggggtagaattccaggtgtagcggtgaaatgcgtagagatctggaggaataccggtggcgaaggcggccccctggacaaagactgacgctcaggtgcgaaagcgtggggagcaaacaggattagataccctggtagtccacgccgtaaacgatgtcgacttggaggttgtgcccttgaggcgtggcttccggagctaacgcgttaagtcgaccgcctggggagtacggccgcaaggttaaaactcaaatgaattgacgggggcccgcacaagcggtggagcatgtggtttaattcgatgcaacgcgaagaaccttacctggccttgacatccacggaattcggcagagatgccttagtgccttcgggaaccgtgagacaggtgctgcatggctgtcgtcagctcgtgttgtgaaatgttgggttaagtcccgcaacgagcgcaacccttatcctttgttgccagcacgtaatggtgggaactcaaaggagactgccggtgataaaccggaggaaggtggggatgacgtcaagtcatcatggcccttacggccagggctacacacgtgctacaatggcgcatacaaagagaagcgacctcgcgagagcaagcggacctcataaagtgcgtcgtagtccggatcggagtctgcaactcgactccgtgaagtcggaatcgctagtaatcgtagatcagaatgctacggtgaatacgttcccgggccttgtacacaccgcccgtcacaccatgggagtgggttgcaaaagaagtaggtagcttaaccttcgggagggcgcttaccactttgtgattcatgactggggtg

SEQ ID NO: 1380 - DNA, 1348 bp, Erwinia piriflorinigrans
gcttgctctcgggtgacgagtggcggacgggtgagtaatgtctgggaaactgcccgatggagggggataactactggaaacggtagctaataccgcataacgtctacggaccaaagtgggggaccttcgggcctcacaccatcggatgtgcccagatgggattagctagtaggtggggtaacggctcacctaggcgacgatccctagctggtctgagaggatgaccagccacactggaactgagacacggtccagactcctacgggaggcagcagtggggaatattgcacaatgggcgcaagcctgatgcagccatgccgcgtgtatgaagaaggccttcgggttgtaaagtactttcagcggggaggaaggcgatgaggttaatagcctcgtcgattgacgttacccgcagaagaagcaccggctaactccgtgccagcagccgcggtaatacggagggtgcaagcgttaatcggaattactgggcgtaaagcgcacgcaggcggtctgtcaagtcggatgtgaaatccccgggctcaccggaactgcattcgaaactggcaggctagagtcttgtagaggggggtagaattccaggtgtagcggtgaaatgcgtagagatctggaggaataccggtggcgaaggcggcccctggacaagactgacgctcaggtgcgaaagcgtgggagcaaacaggattagataccctggtagtccacgccgtaaacgatgtcgactggaggctgttcccttgaggagtggcttccggagctaacgcgttaagtcgaccgcctggggagtacggccgcaaggttaaaactcaaatgaattgacgggggcccgcacaagcggtggagcatgtggtttaattcgatgcaacgcgaagaaccttacctggccttgacatccacggaattctgcagagatgcggaagtgccttcgggacccgtgagacaggtgctgcatggctgtcgtcagctcgtgttgtgaaatgttgggttaagtcccgcaacgagcgcaacccttatcctttgttgccagcgattcggtcgggaactcaaaggagactgccggtgataaaccggaggaaggtggggatgacgtcaagtcatcatggcccttacggccagggctacacacgtgctacaatggcgcatacaaagagaagcgacctcgcgagagcaagcggacctcataaagtgcgtcgtagtccggatcggagtctgcaactcgactccgtgaagtcggaatcgctagtaatcgtagatcagaatgctacggtgaatacgttcccgggccttgtacacaccgcccgtcacaccatgggagtgggttgcaaaagaagta

SEQ ID NO: 1381 - DNA, 1463 bp, Erwinia psidii
  misc_feature (367)..(367): n is a, c, g, or t
attgaacgctggcggcaggcctaacacatgcaagtcgaacggtagcgggaagaagcttgcttctttgccgacgagtggcggacgggtgagtaatgtctgggaaactgcccgatggagggggataactactggaaacggtagctaataccgcataacgtcgcaagaccaaagtgggggaccttagggcctcacaccatcggatgtgcccagatgggattagcttgttggtggggtaaaagctcaccaaggcgacgatccctagctggtctgagaggatgaccagccacactggaactgagacacggtccagactcctacgggaggcagcagtggggaatattgcacaatgggcgcaagcctgatgcanccatgccgcgtgtatgaagaaggccttcgggttgtaaagtactttcagcggggaggaaggtggtgaggttaataaccttatcaattgacgttacccgcagaagaagcaccggctaactccgtgccagcagccgcggtaatacggagggtgcaagcgttaatcggaattactgggcgtaaagcgcacgcaggcggtctgttaagtcagatgtgaaatccccgggcttaacctgggaactgcatttgaaactggcaggcttgagtcttgtagaggggggtggaattccaggtgtagcggtgaaatgcgtagagatctggaggaataccggtggcgaaggcggccccctggacaaagactgacgctcaggtgcgaaagcgtggggagcaaacaggattagataccctggtagtccacgccgtaaacgatgtcgatttggaggttgtgcccttgaggcgtggcttccgtagctaacgcgttaaatcgaccgcctggggagtacggccgcaaggttaaaactcaaatgaattgacgggggcccgcacaagcggtggagcatgtggtttaattcgatgcaacgcgaagaaccttacctggccttgacatccacagaacttagcagagatgctttggtgcttcgggaactgtgagacaggtgctgcatggctgtcgtcagctcgtgttgtgaaatgttgggttaagtcccgcaacgagcgcaacccttatcctttgttgccatcgattcggtcgggaactcaaaggagactgccggtgataaaccggaggaaggtggggatgacgtcaagtcatcatggcccttacggccagggctacacacgtgctacaatggcgcatacaaagagaagcgacctcgcgagagcaagcggacctcataaagtgcgtcgtagtccggatcggagtctgcaactcgactccgtgaagtcggaatcgctagtaatcgtggatcagaatgccacggtgaatacgttcccgggccttgtacacaccgcccgtcacaccatgggagtgggttgcaaaagaagtaggtagcttaaccttcgggagggcgcttaccactttgtgattcatgactggggtg

SEQ ID NO: 1382 - DNA, 1462 bp, Erwinia pyrifoliae
attgaacgctggcggcaggcctaacacatgcaagtcgaacggtagcacagagagcttgctctcgggtgacgagtggcggacgggtgagtaatgtctgggaaactgcccgatggagggggataactactggaaacggtagctaataccgcataacgtctacggaccaaagtgggggaccttcgggcctcacaccatcggatgtgcccagatgggattagctggtaggtggggtaacggctcacctaggcgacgatccctagctggtctgagaggatgaccagccacactggaactgagacacggtccagactcctacgggaggcagcagtggggaatattgcacaatgggcgcaagcctgatgcagccatgccgcgtgtatgaagaaggccttcgggttgtaaagtactttcagcggggaggaagggggaaaggttaataacctttttcattgacgttacccgcagaagaagcaccggctaactccgtgccagcagccgcggtaatacggagggtgcaagcgttaatcggaattactgggcgtaaagcgcacgcaggcggtctgtcaagtcggatgtgaaatccccgggcttaacctgggaactgcattcgaaactggcaggctagagtctcgtagaggggggtagaattccaggtgtagcggtgaaatgcgtagagatctggaggaataccggtggcgaaggcggccccctggacgaagactgacgctcaggtgcgaaagcgtggggagcaaacaggattagataccctggtagtccacgccgtaaacgatgtcgacttggaggctgttcccctgaggagtggcttccggagctaacgcgttaagtcgaccgcctggggagtacggccgcaaggttaaaactcaaatgaattgacgggggcccgcacaagcggtggagcatgtggtttaattcgatgcaacgcgaagaaccttacctggccttgacatccacggaattttgcagagatgcggaagtgccttcgggaaccgtgagacaggtgctgcatggctgtcgtcagctcgtgttgtgaaatgttgggttaagtcccgcaacgagcgcaacccttatcctttgttgccagcgattcggtcgggaactcaaaggagactgccggtgataaaccggaggaaggtggggatgacgtcaagtcatcatggcccttacggccagggctacacacgtgctacaatggcgcatacaaagagaagcgacctcgcgagagcaagcggacctcataaagtgcgtcgtagtccggatcggagtctgcaactcgactccgtgaagtcggaatcgctagtaatcgtagatcagaatgctacggtgaatacgttcccgggccttgtacacaccgcccgtcacaccatgggagtgggttgcaaaagaagtaggtagcttaaccttcgggagggcgcttaccactttgtgattcatgactggggtg

SEQ ID NO: 1383 - DNA, 1443 bp, Erwinia rhapontici
aacacatgcaagtcgaacggtagcacagaggagcttgctctctgggtgacgagtggcggacgggtgagtaatgcctgggaaactgcccgatggagggggataactactggaaacggtagctaataccgcataacgtcttcggaccaaagtgggggaccttcgggcctcacaccatcggatgtgcccaggtgggattagctagtaggtggggtaatggctcacctaggcgacgatccctagctggtctgagaggatgaccagccacactggaactgagacacggtccagactcctacgggaggcagcagtggggaatattgcacaatgggcgcaagcctgatgcagccatgccgcgtgtatgaagaaggccttcgggttgtaaagtactttcagtggggaggaaggcgatgaggttaatagcctcgtcgattgacgttacccgcagaagaagcaccggctaactccgtgccagcagccgcggtaatacggagggtgcaagcgttaatcggaattactgggcgtaaagcgcacgcaggcggtctgtcaagtcggatgtgaaatccccgggctcaacctgggaactgcattcgaaactggcagactagagtcttgtagaggggggtagaattccaggtgtagcggtgaaatgcgtagagatctggaggaataccggtggcgaaggcggccccctggacaaagactgacgctcaggtgcgaaagcgtggggagcaaacaggattagataccctggtagtccacgccgtaaacgatgtcgacttggaggttgtgcccttgaggcgtggcttccggagctaacgcgttaagtcgaccgcctggggagtacggccgcaaggttaaaactcaaatgaattgacgggggcccgcacaagcggtggagcatgtggtttaattcgatgcaacgcgaagaaccttacctggccttgacatccacggaattcggcagagatgccttagtgccttcgggaaccgtgagacaggtgctgcatggctgtcgtcagctcgtgttgtgaaatgttgggttaagtcccgcaacgagcgcaacccttatcctttgttgccagcgagtaatgtcgggaactcaaaggagactgccggtgataaaccggaggaaggtggggatgacgtcaagtcatcatggcccttacggccagggctacacacgtgctacaatggcgcatacaaagagaagcgacctcgcgagagcaagcggacctcataaagtgcgtcgtagtccggatcggagtctgcaactcgactccgtgaagtcggaatcgctagtaatcgtagatcagaatgctacggtgaatacgttcccgggccttgtacacaccgcccgtcacaccatgggagtgggttgcaaaagaagtaggtagcttaaccttcgggagggcgcttaccactttgtgattcatgactggggtg

SEQ ID NO: 1384 - DNA, 1462 bp, Erwinia tasmaniensis
attgaacgctggcggcaggcctaacacatgcaagtcgaacggtagcacagagagcttgctcttgggtgacgagtggcggacgggtgagtaatgtctgggaaactgcccgatggagggggataactactggaaacggtagctaataccgcataacgtctacggaccaaagtgggggaccttcgggcctcacgccatcggatgtgcccagatgggattagctagtaggtggggtaacggctcacctaggcgacgatccctagctggtctgagaggatgaccagccacactggaactgagacacggtccagactcctacgggaggcagcagtggggaatattgcacaatgggcgcaagcctgatgcagccatgccgcgtgtatgaagaaggccttcgggttgtaaagtactttcagcggggaggaaggcgatggggttaataaccccgtcgattgacgttacccgcagaagaagcaccggctaactccgtgccagcagccgcggtaatacggagggtgcaagcgttaatcggaattactgggcgtaaagcgcacgcaggcggtctgtcaagtcggatgtgaaatccccgggctcaacccgggaactgcattcgaaactggcaggctagagtcttgtagaggggggtagaattccaggtgtagcggtgaaatgcgtagagatctggaggaataccggtggcgaaggcggccccctggacaaagactgacgctcaggtgcgaaagcgtggggagcaaacaggattagataccctggtagtccacgccgtaaacgatgtcgacttggaggctgttcccttgaggagtggcttccggagctaacgcgttaagtcgaccgcctggggagtacggccgcaaggttaaaactcaaatgaattgacgggggcccgcacaagcggtggagcatgtggtttaattcgatgcaacgcgaagaaccttacctggccttgacatccacggaattcggcagagatgccttagtgccttcgggaaccgtgagacaggtgctgcatggctgtcgtcagctcgtgttgtgaaatgttgggttaagtcccgcaacgagcgcaacccttatcctttgttgccagcgattcggtcgggaactcaaaggagactgccggtgataaaccggaggaaggtggggatgacgtcaagtcatcatggcccttacggccagggctacacacgtgctacaatggcgcatacaaagagaagcgacctcgcgagagcaagcggacctcataaagtgcgtcgtagtccggatcggagtctgcaactcgactccgtgaagtcggaatcgctagtaatcgtagatcagaatgctacggtgaatacgttcccgggccttgtacacaccgcccgtcacaccatgggagtgggttgcaaaagaagtaggtagcttaaccttcgggagggcgcttaccactttgtgattcatgactggggtg

SEQ ID NO: 1385 - DNA, 1452 bp, Erwinia toletana
  misc_feature (420)..(420): n is a, c, g, or t
  misc_feature (1097)..(1097): n is a, c, g, or t
ggcaggcctaacacatgcaagtcgggcggtagcacagaggagcttgctccttgggtgacgagcggcggacgggtgagtaatgtctggggatctgcccgatggagggggataactactggaaacggtagctaataccgcataatctcgcaagagcaaagtgggggaccttcgggcctcacaccatcggatgaacccagatgggattagctagtaggtggggtaacggctcacctaggcgacgatccctagctggtctgagaggatgaccagccacactggaactgagacacggtccagactcctacgggaggcagcagtggggaatattgcacaatgggcgcaagcctgatgcagccatgccgcgtgtatgaagaaggccttcgggttgtaaagtactttcagcggggaggaaggcgatgnggttaataaccgcgtcgattgacgttacccgcagaagaagcaccggctaactccgtgccagcagccgcggtaatacggagggtgcaagcgttaatcggaattactgggcgtaaagcgcacgcaggcggtctgttaagtcagatgtgaaatccccgggctcaacctgggaactgcatttgaaactggcaggctagagtctcgtagaggggggtagaattccaggtgtagcggtgaaatgcgtagagatctggaggaataccggtggcgaaggcggccccctggacgaagactgacgctcaggtgcgaaagcgtggggagcaaacaggattagataccctggtagtccacgccgtaaacgatgtcgacttggaggttgtgcccttgaggcgtggcttccggagctaacgcgttaagtcgaccgcctggggagtacggccgcaaggttaaaactcaaatgaattgacgggggcccgcacaagcggtggagcatgtggtttaattcgatgcaacgcgaagaaccttacctggccttgacatccacggaattcggcagagatgccttagtgccttcgggaaccgtgagacaggtgctgcatggctgtcgtcagctcgtgttgtgaaatgttgggttaagtcccgcaacgagcgcaacccttatcctttgttgccagcgcgtnatggcgggaactcaaaggagactgccggtgataaaccggaggaaggtggggatgacgtcaagtcatcatggcccttacggccagggctacacacgtgctacaatggcgcatacaaagagaagcgaactcgcgagagcaagcggacctcataaagtgcgtcgtagtccggatcggagtctgcaactcgactccgtgaagtcggaatcgctagtaatcgtagatcagaatgctacggtgaatacgttcccgggccttgtacacaccgcccgtcacaccatgggagtgggttgcaaaagaagtaggtagcttaacctccgggagggcgcttaccactttgtgattcatgactggggtg

SEQ ID NO: 1386 - DNA, 1464 bp, Erwinia tracheiphila
  misc_feature (467)..(467): n is a, c, g, or t
  misc_feature (470)..(470): n is a, c, g, or t
  misc_feature (494)..(494): n is a, c, g, or t
  misc_feature (497)..(497): n is a, c, g, or t
  misc_feature (661)..(661): n is a, c, g, or t
  misc_feature (663)..(663): n is a, c, g, or t
  misc_feature (676)..(676): n is a, c, g, or t
  misc_feature (935)..(935): n is a, c, g, or t
  misc_feature (1193)..(1193): n is a, c, g, or t
  misc_feature (1411)..(1411): n is a, c, g, or t
  misc_feature (1415)..(1415): n is a, c, g, or t
  misc_feature (1455)..(1455): n is a, c, g, or t
attgaacgctggcggcaggcctaacacatgcaagtcggacggtagcacagaagagcgtgctctttgggtgacgagtggcggacgggtgagtaatgtctgggaaactgcctgatggcgggggataaccactggaaacggtggctaataccgcataatctcgcaagagcaaagagggggaccttatggcctcttgccatcggatgtgcccagatgggattagctggcaggtagggtaacggcctacctgggcgacgatccctagctggtctgagaggatgaccagccacactggaactgagacacggtccagactcctacgggaggcagcagtggggaatattgcacaatgggcgcaagcctgatgcagccatgccgcgtgtatgaagaaggccttcgggttgtaaagtactttcagcggggaggaagggacgctggttaataaccagcgtcattgatgttacccgcanaanaagcaccggctaactccgtgccancanccgcggtaatacggagggtgcaagcgttaatcggaattactgggcgtaaagcgcacgcaggcggtctgttaagtcagatgtgaaatccccgggcttaacctgggaactgcatttgaaactggcaggctggagtcttgtagaggggggtggaattccaggtgtancngtgaaatgcgtanagatctggaggaataccggtggcgaaggcggccccctggacaaagactgacgctcatgtgcgaaagcgtggggagcaaacaggattagataccctggtagtccacgctgtaaacgatgtcgatttggaggttgtgcccttgaggtgtggcttccgtagctaacgcgttaaatcgaccgcctggggagtacggccgcaaggttaaaactcaaatgaattgacgggggcccgcacaagcggtggagcatgtggtttaattngatgcaacgcgaagaaccttacctggccttgacatccacagaacttagcacagatgctttggtgccttcgggagctgtgagacaggtgctgcatggctgtcgtcagctcgtgttgtgaaatgttgggttaagtcccgcaacgagcgcaacccttatcctttgttgccagcgatttggtcgggaactcaaaggagactgccggtgataaaccggaggaaggtggggatgacgtcaagtcatcatggcccttacggccanggctacacacgtgctacaatggcgcatacaaagagaagcgacctcgcgagagcatgcggacctcataaagtgcgtcgtagtccggatcggagtctgcaactcgactccgtgaagtcggaatcgctagtaatcgtggatcagaatgccacggtgaatacgttcccgggccttgtacacaccgcccgtcacaccatgggagtgggttgcaaaagaagtangtancttaaccttcgggagggcgcttaccactttgtgattcatnactggggtg

SEQ ID NO: 1387 - DNA, 1406 bp, Erwinia typographi
cttgctctttgggtgacgagtggcggacgggtgagtaatgtctggggatctgcccggcagagggggataactactggaaacggtagctaataccgcataacctcgcaagagcaaagagggggaccttatggcctctcgctgtcggatgaacccagatgggattagctagtaggtgaggtaacggctcacccaggcgacgatccctagctggtctgagaggatgaccagccacactggaactgagacacggtccagactcctacgggaggcagcagtggggaatattgcacaatgggcgcaagcctgatgcagccatgccgcgtgtatgaagaaggccttcgggttgtaaagtactttcagcggggaggaagggttgctggttaataaccagtgacattgacgttacccgcagaagaagcaccggctaactccgtgccagcagccgcggtaatacggagggtgcaagcgttaatcggaattactgggcgtaaagcgcacgcaggcggtctgtcaagtcagatgtgaaatccccgggcttaacctgggaactgcatttgaaactggcagactggagtcttgtagaggggggtagaattccaggtgtagcggtgaaatgcgtagagatctggaggaataccggtggcgaaggcggccccctggacaaagactgacgctcaggtgcgaaagcgtggggagcaaacaggattagataccctggtagtccacgctgtaaacgatgtcgacttggaggttgtgcccttgaggcgtggcttccggagctaacgcgttaagtcgaccgcctggggagtacggccgcaaggttaaaactcaaatgaattgacgggggcccgcacaagcggtggagcatgtggtttaattcgatgcaacgcgaagaaccttacctggccttgacatccacggaattgggcagagatgcctgagtgccttcgggaaccgtgagacaggtgctgcatggctgtcgtcagctcgtgttgtgaaatgttgggttaagtcccgcaacgagcgcaacccttatcctttgttgccagcgggtagagccgggaactcaaaggagactgccggtgacaaaccggaggaaggtggggatgacgtcaagtcatcatggcccttacggccagggctacacacgtgctacaatggcgcatacaaagagaagcgacctcgcgagagcaagcggacctcataaagtgcgtcgtagtccggatcggagtctgcaactcgactccgtgaagtcggaatcgctagtaatcgtggatcagaatgccacggtgaatacgttcccgggccttgtacacaccgcccgtcacaccatgggagtgggttgcaaaagaagtaggtagcttaaccttcgggagggcgcttaccactttgtgattcatgactgg

SEQ ID NO: 1388 - DNA, 1409 bp, Erythrobacter aquimixticola
aacgaacgctggcggcatgcctaacacatgcaagtcgaacgccctcttcggagggagtggcgcacgggtgcgtaacgcgtgggaacctgcccttaggttcggaataacagtgagaaatcgctgctaataccggataatgtcttcggaccaaagatttatcgcctttggatgggcccgcgttggattagctagttggtagggtaaaggcctaccaaggcgacgatccatagctggtcttagaggatgatcagccacactgggactgagacacggcccagactcctacgggaggcagcagtggggaatattggacaatgggcgaaagcctgatccagcaatgccgcgtgagtgatgaaggccttagggttgtaaagctcttttaccagggatgataatgacagtacctggagaataagctccggctaactccgtgccagcagccgcggtaatacggagggagctagcgttgttcggaaatactgggcgtaaagcgcacgtaggcggcgtcgcaagtcaggggtgaaatcccggggctcaaccccggaactgcccttgaaactgcaatgctagaatattggagaggcaagtggaattccgagtgtagaggtgaaattcgtagatattcggaagaacaccagtggcgaaggcgacttgctggacaattattgacgctgaggtgcgaaagcgtggggagcaaacaggattagataccctggtagtccacgccgtaaacgatgataactagctgtccgggctcatagagcttgggtggcgcagctaacgcattaagttatccgcctggggagtacggtcgcaagattaaaactcaaaggaattgacgggggcctgcacaagcggtggagcatgtggtttaattcgaagcaacgcgcagaaccttaccagcctttgacatccttcgacggttaccagagatggtttcctcccttcggggcgaagtgacaggtgctgcatggctgtcgtcagctcgtgtcgtgagatgttgggttaagtcccgcaacgagcgcaaccctcatccttagttgccatcatttagttgggaactctaaggaaactgccggtgataagccggaggaaggtggggatgacgtcaagtcctcatggcccttacaggctgggctacacacgtgctacaatggcatctacagtgagcagcgatcccgcgagggttagctaatctccaaaagatgtctcagttcggattgttctctgcaactcgagagcatgaaggcggaatcgctagtaatcgcggatcagcatgccgcggtgaatacgttcccaggccttgtacacaccgcccgtcacgccatgggagttggtttcacccgaaggtggtgcgctaaccggtttaccggaggcagccaaccacggtgggatcagcgactggggtg

SEQ ID NO: 1389 - DNA, 1409 bp, Erythrobacter atlanticus
aacgaacgctggcggcatgcctaacacatgcaagtcgaacgaacccttcggggtgagtggcgcacgggtgcgtaacgcgtgggaacctgcccttaggttcggaataacagcgagaaattgctgctaataccggataatgtcttcggaccaaagatttatcgcctttggatgggcccgcgttggattagctagttggtgaggtaaaggctcaccaaggcgacgatccatagctggtcttagaggatgatcagccacactgggactgagacacggcccagactcctacgggaggcagcagtggggaatattggacaatgggcgaaagcctgatccagcaatgccgcgtgagtgatgaaggccttagggttgtaaagctcttttaccagggatgataatgacagtacctggagaataagctccggctaactccgtgccagcagccgcggtaatacggagggagctagcgttgttcggaaatactgggcgtaaagcgaacgtaggcggtctagtaagtcaggggtgaaatcccggagctcaactccggaactgcccttgaaactactaaactagaatcctggagaggtcagtggaattccgagtgtagaggtgaaattcgtagatattcggaagaacaccagtggcgaaggcgactgactggacaggtattgacgctgaggttcgaaagcgtggggagcaaacaggattagataccctggtagtccacgccgtaaacgatgataactagctgtccgggctcatagagcttgggtggcgcagctaacgcattaagttatccgcctggggagtacggtcgcaagattaaaactcaaaggaattgacgggggcctgcacaagcggtggagcatgtggtttaattcgaagcaacgcgcagaaccttaccagcctttgacatccttcgacggttacgagagatcgtttccttccttcgggacgaagtgacaggtgctgcatggctgtcgtcagctcgtgtcgtgagatgttgggttaagtcccgcaacgagcgcaaccctcatccttagttgccatcatttagttgggcactttaaggaaactgccggtgataagccggaggaaggtggggatgacgtcaagtcctcatggcccttacaggctgggctacacacgtgctacaatggcatctacagtgagcagcgatcccgcgagggttagctaatctccaaaagatgtctcagttcggattgttctctgcaactcgagagcatgaaggcggaatcgctagtaatcgcggatcagcatgccgcggtgaatacgttcccaggccttgtacacaccgcccgtcacgccatgggagttggtttcacccgaaggtggtgcgctaaccggtttaccggaggcagccaaccacggtgggatcagcgactggggtg

SEQ ID NO: 1390 - DNA, 1411 bp, Erythrobacter citreus
  misc_feature (225)..(225): n is a, c, g, or t
  misc_feature (236)..(236): n is a, c, g, or t
aacgaacgctggcggcatgcctaacacatgcaagtcgaacgaacccttcggggtgagtggcgcacgggtgcgtaacgcgtgggaacctgcctttaggttcggaataacagttagaaatgactgctaataccggataatgtcttcggaccaaagatttatcgcctttagatgggcccgcgttagattagatagttggtggggtaatggcctaccaagtcgacgatntatagctggtntgagaggatgatcagccacactgggactgagacacggcccagactcctacgggaggcagcagtggggaatattggacaatgggcgaaagcctgatccagcaatgccgcgtgagtgatgaaggccttagggttgtaaagctcttttaccagggatgataatgacagtacctggagaataagctccggctaactccgtgccagcagccgcggtaatacggagggagctagcgttgttcggaattactgggcgtaaagcgcacgtaggcggcttttcaagtcaggggtgaaatcccggggctcaaccccggaactgcccttgaaactggatggctagaatactggagaggtgagtggaattccgagtgtagaggtgaaattcgtagatattcggaagaacaccagtggcgaaggcgactcactggacagttattgacgctgaggtgcgaaagcgtggggagcaaacaggattagataccctggtagtccacgccgtaaacgatgataactagctgtccgggctcatggagcttgggtggcgcagctaacgcattaagttatccgcctggggagtacggtcgcaagattaaaactcaaaggaattgacgggggcctgcacaagcggtggagcatgtggtttaattcgaagcaacgcgcagaaccttaccagcctttgacatcctaggacggtttctggagacagattccttcccttcggggacctagtgacaggtgctgcatggctgtcgtcagctcgtgtcgtgagatgttgggttaagtcccgcaacgagcgcaaccctcgtccttagttgccatcattcagttgggcactttaaggaaactgccggtgataagccggaggaaggtggggatgacgtcaagtcctcatggcccttacaggctgggctacacacgtgctacaatggcatctacagtgagcagcgatcccgcgagggttagctaatctccaaaagatgtctcagttcggattgttctctgcaactcgagagcatgaaggcggaatcgctagtaatcgcggatcagcatgccgcggtgaatacgttcccaggccttgtacacaccgcccgtcacaccatgggagttggattcacccgaaggtggtgcgctaaccagtttactggaggcagccaaccacggtgggttcagcgactggggtg

SEQ ID NO: 1391 - DNA, 1409 bp, Erythrobacter flavus
aacgaacgctggcggcatgcctaacacatgcaagtcgaacgccctcttttagagggagtggcgcacgggtgcgtaacgcgtgggaacctgcccttaggttcggaataactcagagaaatttgagctaataccggataatgtcttcggaccaaagatttatcgcctttggatgggcccgcgtaggattagatagttggtggggtaatggcctaccaagtcgacgatccttagctggtctgagaggatgatcagccacactgggactgagacacggcccagactcctacgggaggcagcagtggggaatattggacaatgggcgaaagcctgatccagcaatgccgcgtgagtgatgaaggccttagggttgtaaagctcttttaccagggatgataatgacagtacctggagaataagctccggctaactccgtgccagcagccgcggtaatacggagggagctagcgttgttcggaattactgggcgtaaagcgcacgtaggcggcttttcaagtcaggggtgaaatcccggggctcaaccccggaactgcccttgaaactggatggctagaatactggagaggtgagtggaattccgagtgtagaggtgaaattcgtagatattcggaagaacaccagtggcgaaggcgactcactggacagttattgacgctgaggtgcgaaagcgtggggagcaaacaggattagataccctggtagtccacgccgtaaacgatgataactagctgcttgggctcatggagcttgggtggcgcagctaacgcattaagttatccgcctggggagtacggtcgcaagattaaaactcaaaggaattgacgggggcctgcacaagcggtggagcatgtggtttaattcgaagcaacgcgcagaaccttaccagcctttgacatcctaggacggtttctggagacagattccttcccttcggggacctagtgacaggtgctgcatggctgtcgtcagctcgtgtcgtgagatgttgggttaagtcccgcaacgagcgcaaccctcgtccttagttgccatcatttagttgggcactttaaggaaactgccggtgataagccggaggaaggtggggatgacgtcaagtcctcatggcccttacaggctgggctacacacgtgctacaatggcatctacagtgagcagcgatcccgcgagggttagctaatctccaaaagatgtctcagttcggattgttctctgcaactcgagagcatgaaggcggaatcgctagtaatcgcggatcagcatgccgcggtgaatacgttcccaggccttgtacacaccgcccgtcacaccatgggagttggattcacccgaaggcggtgcgctaaccttttaggaggcagccgaccacggtgggttcagcgactggggtg

SEQ ID NO: 1392 - DNA, 1409 bp, Erythrobacter gangjinensis
aacgaacgctggcggcatgcctaacacatgcaagtcgaacgaacccttcggggtgagtggcgcacgggtgcgtaacgcgtgggaacctgcccttaggttcggaataacagtgagaaatcgctgctaataccggataatgtcttcggaccaaagatttatcgccaaaggatgggcccgcgttagattagatagttggtggggtaacggcctaccaagtcgacgatctatagctggtcttagaggatgatcagccacactgggactgagacacggcccagactcctacgggaggcagcagtggggaatattggacaatgggcgaaagcctgatccagcaatgccgcgtgagtgatgaaggccttagggttgtaaagctcttttaccagggatgataatgacagtacctggagaataagctccggctaactccgtgccagcagccgcggtaatacggagggagctagcgttgttcggaaatactgggcgtaaagcgcacgtaggcggtgtcgcaagtcaggggtgaaatcccggggctcaaccccggaactgcccttgaaactgcaacactagaatactggagaggcaagtggaattccgagtgtagaggtgaaattcgtagatattcggaagaacaccagtggcgaaggcgacttgctggacagtgattgacgctgaggtgcgaaagcgtggggagcaaacaggattagataccctggtagtccacgccgtaaacgatgataactagctgtccgggctcatagagcttgggtggcgcagctaacgcattaagttatccgcctggggagtacggtcgcaagattaaaactcaaaggaattgacgggggcctgcacaagcggtggagcatgtggtttaattcgaagcaacgcgcagaaccttaccagcctttgacatccttcgacggttaccagagatggtttccttccttcgggacgaagtgacaggtgctgcatggctgtcgtcagctcgtgtcgtgagatgttgggttaagtcccgcaacgagcgcaaccctcatccttagttgccatcatttagttgggaactctaaggaaactgccggtgataagccggaggaaggtggggatgacgtcaagtcctcatggcccttacaggctgggctacacacgtgctacaatggcatctacagtgagcagcgatcccgcgagggttagctaatctccaaaagatgtctcagttcggattgttctctgcaactcgagagcatgaaggcggaatcgctagtaatcgcggatcagcatgccgcggtgaatacgttcccaggccttgtacacaccgcccgtcacgccatgggagttggtttcacccgaaggtggtgcgctaaccggtttaccggaggcagccaaccacggtgggatcagcgactggggtg

SEQ ID NO: 1393 - DNA, 1407 bp, Erythrobacter litoralis
aacgaacgctggcggcatgcctaacacatgcaagtcgaacgaacccttcggggttagtggcgcacgggtgcgtaacgcgtgggaacctgcctttaggttcggaataactcagagaaatttgagctaataccggataatgtcttcggaccaaagatttatcgcctttagatgggcccgcgttagattagatagttggtggggtaatggcctaccaagtcgacgatctatagctggtctgagaggatgatcagccacactgggactgagacacggcccagactcctacgggaggcagcagtggggaatattggacaatgggggaaaccctgatccagcaatgccgcgtgagtgatgaaggccttagggttgtaaagctcttttacccgggatgataatgacagtaccgggagaataagctccggctaactccgtgccagcagccgcggtaatacggagggagctagcgttgttcggaattactgggcgtaaagcgcgcgtaggcggctatttaagtcaggggtgaaatcccggggctcaaccccggaactgcccttgaaactggatggctagaatcctggagaggcgagtggaattccgagtgtagaggtgaaattcgtagatattcggaagaacaccagtggcgaaggcgactcgctggacaggtattgacgctgaggtgcgaaagcgtggggagcaaacaggattagataccctggtagtccacgccgtaaacgatgataactagctgtccgggctcatagagcttgggtggcgcagctaacgcattaagttatccgcctggggagtacggtcgcaagattaaaactcaaaggaattgacgggggcctgcacaagcggtggagcatgtggtttaattcgaagcaacgcgcagaaccttaccagcctttgacatcctaggacggtttctggagacagactccttcccttcggggacctagtgacaggtgctgcatggctgtcgtcagctcgtgtcgtgagatgttgggttaagtcccgcaacgagcgcaaccctcgtccttagttgccatcatttagttgggcactttaaggaaactgccggtgataagccggaggaaggtggggatgacgtcaagtcctcatggcccttacaggctgggctacacacgtgctacaatggcatctacagtgggcagctatcccgcaagggtgagctaatctccaaaagatgtctcagttcggattgtcctctgcaactcgagggcatgaaggcggaatcgctagtaatcgcggatcagcatgccgcggtgaatacgttcccaggccttgtacacaccgcccgtcacaccatgggagttggattcacccgaaggcagtgcgctaaccgcaaggaggcagctgaccacggtgggttcagcgactggggtg

SEQ ID NO: 1394 - DNA, 1408 bp, Erythrobacter longus
aacgaacgctggcggcatgcctaacacatgcaagtcgaacgaacccttcggggttagtggcgcacgggtgcgtaacgcgtgggaacctgcctttaggttcggaataactcagagaaatttgagctaataccggataatgtcttcggaccaaagatttatcgcctttagatgggcccgcgttagattagatagttggtggggtaatggcctaccaagtcgacgatctatagctggtctgagaggatgatcagccacactgggactgagacacggcccagactcctacgggaggcagcagtggggaatattggacaatgggcgaaagcctgatccagcaatgccgcgtgagtgatgaaggccttagggttgtaaagctcttttactagggatgataatgacagtacctagagaataagctccggctaactccgtgccagcagccgcggtaatacggagggagctagcgttgttcggaattactgggcgtaaagcgcgcgtaggcggttatccaagtcaggggtgaaatcccggagctcaactccggaactgcccttgaaactaggtaactagaatactggagaggtgagtggaattccgagtgtagaggtgaaattcgtagatattcggaagaacaccagtggcgaaggcgactcactggacagttattgacgctgaggtgcgaaagcgtggggagcaaacaggattagataccctggtagtccacgccgtaaacgatgataactagctgtccgggctcatagagcctgggtggcgcagctaacgcattaagttatccgcctggggagtacggtcgcaagattaaaactcaaaggaattgacgggggcctgcacaagcggtggagcatgtggtttaattcgaagcaacgcgcagaaccttaccagcctttgacatcctaggacggtttctggagacagactccttcccttcggggacctagtgacaggtgctgcatggctgtcgtcagctcgtgtcgtgagatgttgggttaagtcccgcaacgagcgcaaccctcatccttagttgccatcatttagttgggcactttaaggaaactgccggtgataagccggaggaaggtggggatgacgtcaagtcctcatggcccttacaggctgggctacacacgtgctacaatggtatctacagtgagcagcgatcccgcaagggtcagctaatctccaaaagatatctcagttcggattgttctctgcaactcgagagcatgaaggcggaatcgctagtaatcgcggatcagcatgccgcggtgaatacgttcccaggccttgtacacaccgcccgtcacaccatgggagttggtttcacccgaagatagtgcgctaaccttttaggaggcagctagccacggtgggatcagcgactggggtg

SEQ ID NO: 1395 - DNA, 1409 bp, Erythrobacter luteus
aacgaacgctggcggcatgcctaacacatgcaagtcgaacgaacccttcggggtgagtggcgcacgggtgcgtaacgcgtgggaacctgcccttaggttcggaataacagttagaaatgactgctaataccggataatgtcttcggaccaaagatttatcgcctttggatgggcccgcgtaggattagctagttggtgaggtaaaggctcaccaaggcgacgatccttagctggtcttagaggatgatcagccacactgggactgagacacggcccagactcctacgggaggcagcagtggggaatattggacaatgggcgaaagcctgatccagcaatgccgcgtgagtgatgaaggccttagggttgtaaagctcttttaccagggatgataatgacagtacctggagaataagctccggctaactccgtgccagcagccgcggtaatacggagggagctagcgttgttcggaaatactgggcgtaaagcgaacgtaggcggcgcagcaagtcaggggtgaaatcccggagctcaactccggaactgcccttgaaactgcagtgctagaatcctggagaggcgagtggaattccgagtgtagaggtgaaattcgtagatattcggaagaacaccagtggcgaaggcgactcgctggacaggtattgacgctgaggttcgaaagcgtggggagcaaacaggattagataccctggtagtccacgccgtaaacgatgataactagctgtccgggctcatagagcttgggtggcgcagctaacgcattaagttatccgcctggggagtacggtcgcaagattaaaactcaaaggaattgacgggggcctgcacaagcggtggagcatgtggtttaattcgaagcaacgcgcagaaccttaccagcctttgacatccttcgacggttaccagagatggtttccttccttcgggacgaagtgacaggtgctgcatggctgtcgtcagctcgtgtcgtgagatgttgggttaagtcccgcaacgagcgcaaccctcatccttagttgccatcattcagttgggcactttaaggaaactgccggtgataagccggaggaaggtggggatgacgtcaagtcctcatggcccttacaggctgggctacacacgtgctacaatggcatctacagtgagcagcgatcccgcgagggttagctaatctccaaaagatgtctcagttcggattgttctctgcaactcgagagcatgaaggcggaatcgctagtaatcgcggatcagcatgccgcggtgaatacgttcccaggccttgtacacaccgcccgtcacgccatgggagttggtttcacccgaagatggtgcgctaacctgcttgcaggaggcagccagccacggtgggatcagcgactggggtg

SEQ ID NO: 1396 - DNA, 1409 bp, Erythrobacter lutimaris
  misc_feature (1310)..(1310): n is a, c, g, or t
aacgaacgctggcggcatgcttcatacatgcaagtcgaacgaagtcttcggacttagtggcgaacgggtgcgtaacgcgtgggaacctgcccttaggttcggaataacagttagaaatgactgctaatgccggataatgtcttcggaccaaagatttatcgcctttggatgggcccgcgtaggattaggtagttggtgtggtaatggcgcaccaagccgacgatccttagctggtctgagaggatgatcagccacactgggactgagacacggcccagactcctacgggaggcagcagtagggaatattggacaatgggcgaaagcctgatccagcaatgccgcgtgagtgatgaaggccttagggttgtaaagctcttttaccagggatgataatgacagtacctggagaataagctccggctaactccgtgccagcagccgcggtaatacggagggagctagcgttgttcggaattactgggcgtaaagcgcgcgtaggcggcttttcaagtcaggggtgaaatcccggggctcaaccccggaactgcccttgaaactggatggctagaatactggagaggtgagtggaattccgagtgtagaggtgaaattcgtagatattcggaagaacaccagtggcgaaggcgactcactggacagttattgacgctgaggtgcgaaagcgtggggagcaaacaggattagataccctggtagtccacgccgtaaacgatgatgactagctgtccgggctcatggagcttgggtggcgcagttaacgcattaagtcatccgcctggggagtacggtcgcaagattaaaactcaaaggaattgacgggggcctgcacaagcggtggagcatgtggtttaattcgaagcaacgcgcagaaccttaccagcctttgacatcctaggacggtttctggagacagattccttcccttcggggacctagtgacaggtgctgcatggctgtcgtcagctcgtgtcgtgagatgttgggttaagtcccgcaacgagcgcaaccctcgtccttagttgccatcatttagttgggcactttaaggaaactgccggtgataagccggaggaaggtggggatgacgtcaagtcctcatggcccttacaggctgggctacacacgtgctacaatggcatctacagtgagcagcgatcccgcaagggctagctaatctccaaaagatgtctcagttcggattgtcgtctgcaactcgacggcatgaaggcggaatcgctagtaatcgcggatcagcatgccgcggtgaatacgttcccaggccttgtncacaccgcccgtcacatcatgggagttggtttcacccgaagatcgtgcgctaacccgcaagggatgcagcgagccacggtgggatcagcgactgggatg

SEQ ID NO: 1397 - DNA, 1409 bp, Erythrobacter marinus
aacgaacgctggcggcatgcctaacacatgcaagtcgaacgaacccttcggggttagtggcgcacgggtgcgtaacgcgtgggaacctgcccttaggtttggaataacagcgagaaattgctgctaataccagataatgtctccggaccaaagatttatcgccaaaggatgggcccgcgttggattagctagttggtgaggtaaaggctcaccaaggcgacgatccatagctggtcttagaggatgatcagccacactgggactgagacacggcccagactcctacgggaggcagcagtggggaatattggacaatgggcgaaagcctgatccagcaatgccgcgtgagtgatgaaggccttagggttgtaaagctcttttaccagggatgataatgacagtacctggagaataagctccggctaactccgtgccagcagccgcggtaatacggagggagctagcgttgttcggaaatactgggcgtaaagcgaacgtaggcggtctattaagtcaggggtgaaatcccggagctcaactccggaactgcccttgaaactgctagactagaatcctggagaggtcagtggaattccgagtgtagaggtgaaattcgtagatattcggaagaacaccagtggcgaaggcgactgactggacaggtattgacgctgaggttcgaaagcgtggggagcaaacaggattagataccctggtagtccacgccgtaaacgatgataactagctgttcgggttcacagaacttgagtggcgcagctaacgcattaagttatccgcctggggagtacggtcgcaagattaaaactcaaaggaattgacgggggcctgcacaagcggtggagcatgtggtttaattcgaagcaacgcgcagaaccttaccagcctttgacatccttcgacggtttcgagagatcgattccttccttcgggacgaagtgacaggtgctgcatggctgtcgtcagctcgtgtcgtgagatgttgggttaagtcccgcaacgagcgcaaccctcatccttagttgccatcattcagttgggcactttaaggaaactgccggtgataagccggaggaaggtggggatgacgtcaagtcctcatggcccttacaggctgggctacacacgtgctacaatggcatctacagtgagcagcgatcccgcgagggttagctaatctccaaaagatgtctcagttcggattgttctctgcaactcgagagcatgaaggcggaatcgctagtaatcgcggatcagcatgccgcggtgaatacgttcccaggccttgtacacaccgcccgtcacgccatgggagttggtttcacccgaaggtggtgcgctaaccggtttaccggaggcagccaaccacggtgggatcagcgactggggtg

SEQ ID NO: 1398 - DNA, 1411 bp, Erythrobacter nanhaisediminis
aacgaacgctggcggcatgcctaacacatgcaagtcgaacgaacccttcggggttagtggcgcacgggtgcgtaacgcgtgggaacctgcctttaggttcggaataactcagagaaatttgagctaataccggataatgtcttcggaccaaagatttatcgcctttagatgggcccgcgttagattagatagttggtggggtaatggcctaccaagtcgacgatctatagctggtctgagaggatgatcagccacactgggactgagacacggcccagactcctacgggaggcagcagtggggaatattggacaatgggcgaaagcctgatccagcaatgccgcgtgagtgatgaaggccttagggttgtaaagctcttttaccagggatgataatgacagtacctggagaataagctccggctaactccgtgccagcagccgcggtaatacggagggagctagcgttgttcggaattactgggcgtaaagcgcgcgtaggcggcttttcaagtcaggggtgaaatcccggggctcaaccccggaactgcccttgaaactggatggctagaatactggagaggtgagtggaattccgagtgtagaggtgaaattcgtagatattcggaagaacaccagtggcgaaggcgactcactggacagttattgacgctgaggtgcgaaagcgtggggagcaaacaggattagataccctggtagtccacgccgtaaacgatgataactagctgtccgggctcatagagcttgggtggcgcagctaacgcattaagttatccgcctggggagtacggtcgcaagattaaaactcaaaggaattgacgggggcctgcacaagcggtggagcatgtggtttaattcgaagcaacgcgcagaaccttaccagcctttgacatcctaggacggtttctggagacagtctccttcccttcggggacctagtgacaggtgctgcatggctgtcgtcagctcgtgtcgtgagatgttgggttaagtcccgcaacgagcgcaaccctcatccttagttgccatcatttagttgggcactttaaggaaactgccggtgataagccggaggaaggtggggatgacgtcaagtcctcatggcccttacaggctgggctacacacgtgctacaatggtatctacagtgagcagcgatcccgcgagggttagctaatctccaaaagatatctcagttcggattgttctctgcaactcgagagcatgaaggcggaatcgctagtaatcgcggatcagcatgccgcggtgaatacgttcccaggccttgtacacaccgcccgtcacaccatgggagttggattcacccgaaggtggtgcgctaacctgcttgcaggaggcagccaaccacggtgggttcagcgactggggtg

SEQ ID NO: 1399 - DNA, 1406 bp, Erythrobacter xanthus
aacgaacgctggcggcatgcctaacacatgcaagtcgaacgaagccttcgggcttagtggcgcacgggtgcgtaacgcgtgggaacctgcctttaggttcggaataacagtgagaaatcgctgctaataccggataatgtcttcggaccaaagatttatcgcctttagatgggcccgcgtaggattagctagttggtgaggtaatggctcaccaaggcgacgatccttagctggtcttagaggatgatcagccacactgggactgagacacggcccagactcctacgggaggcagcagtggggaatattggacaatgggcgaaagcctgatccagcaatgccgcgtgagtgatgaaggccttagggttgtaaagctcttttacccgggatgataatgacagtaccgggagaataagccccggctaactccgtgccagcagccgcggtaatacggagggggctagcgttgttcggaaatactgggcgtaaagcgcacgtaggcggcgtcgtaagtcaggggtgaaatcccagagctcaactctggaactgcccttgaaactgcaatgctagaatcttggagaggcgagtggaattccgagtgtagaggtgaaattcgtagatattcggaagaacaccagtggcgaaggcgactcgctggacaagtattgacgctgaggtgcgaaagcgtggggagcaaacaggattagataccctggtagtccacgccgtaaacgatgataactagctgtccgggttcatagaacttgggtggcgcagctaacgcattaagttatccgcctggggagtacggtcgcaagattaaaactcaaaggaattgacgggggcctgcacaagcggtggagcatgtggtttaattcgaagcaacgcgcagaaccttaccagcgtttgacatcctttgacggttaccagagatgttttccttccttcgggacaaagtgacaggtgctgcatggctgtcgtcagctcgtgtcgtgagatgttgggttaagtcccgcaacgagcgcaaccctcgtccttagttgccatcatttagttgggcactctaaggaaaccgccggtgataagccggaggaaggtggggatgacgtcaagtcctcatggcccttacacgctgggctacacacgtgctacaatggcatctacagtgagcagcgatcccgcgagggttagctaatctccaaaagatgtctcagttcggattgttctctgcaactcgagagcatgaaggcggaatcgctagtaatcgcggatcagcatgccgcggtgaatacgttcccaggccttgtacacaccgcccgtcacgccatgggagttggtttcacccgaagatggtgcgctaaccttttaggaggcagccagccacggtgggatcagcgactggggtg

SEQ ID NO: 1400 - DNA, 1464 bp, Escherichia albertii
attgaacgctggcggcaggcctaacacatgcaagtcgaacggtaacaggaaacagcttgctgtttcgctgacgagtggcggacgggtgagtaatgtctgggaaactgcccgatggagggggataactactggaaacggtagctaataccgcataacgtcgcaagaccaaagagggggaccttagggcctcttgccatcggatgtgcccagatgggattagcttgttggtgaggtaacggctcaccaaggcgacgatccctagctggtctgagaggatgaccagccacactggaactgagacacggtccagactcctacgggaggcagcagtggggaatattgcacaatgggcgcaagcctgatgcagccatgccgcgtgtatgaagaaggccttcgggttgtaaagtactttcagcggggaggaagggagtaaagttaatacctttgctcattgacgttacccgcagaagaagcaccggctaactccgtgccagcagccgcggtaatacggagggtgcaagcgttaatcggaattactgggcgtaaagcgcacgcaggcggttgattaagtcagatgtgaaatccccgggctcaacctgggaactgcatctgatactggtcagcttgagtctcgtagaggggggtagaattccaggtgtagcggtgaaatgcgtagagatctggaggaataccggtggcgaaggcggccccctggacgaagactgacgctcaggtgcgaaagcgtggggagcaaacaggattagataccctggtagtccacgccgtaaacgatgtcgacttggaggttgtgcccttgaggcgtggcttccggagctaacgcgttaagtcgaccgcctggggagtacggccgcaaggttaaaactcaaatgaattgacgggggcccgcacaagcggtggagcatgtggtttaattcgatgcaacgcgaagaaccttacctggtcttgacatccacggaagttttcagagatgagaatgtgccttcgggaaccgtgagacaggtgctgcatggctgtcgtcagctcgtgttgtgaaatgttgggttaagtcccgcaacgagcgcaacccttatcctttgttgccagcggtccggccgggaactcaaaggagactgccagtgataaactggaggaaggtggggatgacgtcaagtcatcatggcccttacgaccagggctacacacgtgctacaatggcgcatacaaagagaagcgacctcgcgagagcaagcggacctcataaagtgcgtcgtagtccggattggagtctgcaactcgactccatgaagtcggaatcgctagtaatcgtggatcagaatgccacggtgaatacgttcccgggccttgtacacaccgcccgtcacaccatgggagtgggttgcaaaagaagtaggtagcttaaccttcgggagggcgcttaccactttgtgattcatgactggggtg

SEQ ID NO: 1401 - DNA, 1468 bp, Estrella lausannensis
cggcgtggatgaggcatgcaagtcggacgaagtattttagcaataagatacttagtggcgaaagggttagtaatacatagacaatctgcctttaactttggaataacggctggaaacggccgctaataccggatgtggtgaagagaggcatctttctttcattaaagcgggggctcgtaagacctcgcggttaaagaagagtctatgggatatcagctagttggtggggtaatggcctaccaaggctaagacgtctaggcggattgagagattgaccgccaacactgggactgagatactgcccagactcctacgggaggctgcagtcgagaatctttcgcaatgggcgaaagcctgacgaagcgacgctgcgtgagcgatgaaggccttcgggttgtaaagctctttcgcctgggaacaagagaatccggataacacccggaggatttgagggtactaggtaaagaagcaccggctaactccgtgccagcagctgcggtaatacggagggtgcaagcgttaatcggatttattgggcgtaaagggcgcgtaggctgatgaataagtcgggtgtgaaatcctggggctcaacctcagggcggcacctgaaactatttgtctagagggtaggcggagaaaacggaattccacaagtagcggtgaaatgcgtagatatgtggaagaacaccggtggcgaaggcggttttctagcttactcctgacgctgaggcgcgaaagttaggggatcaaacaggattagataccctggtagtcctaaccgtaaactatgtatacttggtgtagctggtctcaaccccagctgtgccgtagctaacgcgataagtataccgcctggggagtacactcgcaagggtgaaactcaaaagaattgacggggacccgcacaagcagtggagcatgtggtttaattcgatgcaacgcgaagaaccttacctaggcttgacatatagtagaccgcatcagagatggtgctttccttcgggactgctaaacaggtgctgcatggctgtcgtcagctcgtgccgtgaggtgttgggttaagtcccgcaacgagcgcaacccttgtcattagttgccaacaggtgaagctgggaactctaatgagactgcctgggttaaccaggaggaaggtgaggatgacgtcaagtcagcatggcccttatgcctagggctacacacgtgctacaatggccggtacagagggcagccaacccgtgagggggagcaaatcccaaaaaaccggccccagttcagattgtagtctgcaactcgactacatgaagttggaattgctagtaatggcgtgtcagctataacgccgtgaatacgttcccgggtcttgtacacaccgcccgtcacatcatgggagttggttttacccgacgtcgctgacttaaccgcaaggagagaagcgcctaaggtgaggccgatgactgggatgaagtcg

SEQ ID NO: 1402 - DNA, 1450 bp, Euzebyella marina
gatgaacgctagcggcaggcctaacacatgcaagtcgaggggcagcggggaaaagcttgcttttccgccggcgaccggcgcacgggtgcgcaacgcgtatacaatctgccccctactgcgggatagcccagagaaatttggattaagaccgcatggtaccgtattgccgcatggcatttacggttaaaggttacggtaggggatgggtatgcgtcccattagctagatggcggggtaacggcccaccatggcgacgatgggtaggggccctgagagggggatcccccacactggtactgagacacggaccagactcctacgggaggcagcagtgaggaatattggacaatgggcgggagcctgatccagccatgccgcgtgcgggaagaaggccctatgggtcgtaaaccgcttttatacgggaagaaaccaccctacgtgtagggtactgacggtaccgtaagaataaggaccggctaactccgtgccagcagccgcggtaatacggagggtccgagcgttatccggaatcattgggtttaaagggtccgtaggcgggccgttaagtcaggggtgaaagtctgcggctcaaccgtagaactgcccttgatactggcggtcttgagtcatactggagtaggcggaatatgtagtgtagcggtgaaatgcatagatattacatagaacaccgatcgcgaaggcagcttactaagtatgtactgacgctgatggacgaaagcgtggggagcgaacgggattagataccccggtagtccacgccgtaaacgatggatactagctgtccgggcccttgaggcctgggcggccaagcgaaagtgataagtatcccacctggggagtacgttcgcaagaatgaaactcaaaggaattgacgggggcccgcacaagcggtggagcatgtggtttaattcgatgatacgcgaggaaccttaccagggcttaaatgtaggttgcatggggcagagacgcccctttcttcggaccacctacaaggtgctgcatggttgtcgtcagctcgtgccgtgaggtgtcaggttaagtcctataacgagcgcaacccctaccgttagttgccagcatgtcaagatggggactctaacgggactgccggtgcaaaccgcgaggaaggtggggacgacgtcaaatcatcacggcccttacgtcctgggctacacacgtgctacaatggccggtacagcgggaagccactgcgcgagcaggagcggatccacaaaaccggtcacagttcggatcggggtctgcaacccgaccccgtgaagctggaatcgctagtaatcggatatcagccatgatccggtgaatacgttcccgggccttgtacacaccgcccgtcaagccatggaagccgggagtgcctgaagtccgtcaccgcaaggagcggcctagggcaagatcggtaactagggct

SEQ ID NO: 1403 - DNA, 1466 bp, Ewingella americana
attgaacgctggcggcaggcctaacacatgcaagtcgagcggcagcgggaagtagcttgctactttgccggcgagcggcggacgggtgagtaatgtctgggaaactgcctgatggagggggataactactggaaacggtagctaataccgcatgacctcgaaagagcaaagtgggggaccttcgggcctcacgccatcggatgtgcccagatgggattagctagtaggtgaggtaatggctcacctaggcgacgatccctagctggtctgagaggatgaccagccacactggaactgagacacggtccagactcctacgggaggcagcagtggggaatattgcacaatgggcgcaagcctgatgcagccatgccgcgtgtgtgaagaaggccttcgggttgtaaagcactttcagcgaggaggaaggcgttaaggttaataaccttagcgattgacgttactcgcagaagaagcaccggctaactccgtgccagcagccgcggtaatacggagggtgcaagcgttaatcggaattactgggcgtaaagcgcacgcaggcggtttgttaagtcagatgtgaaatccccgagcttaacttgggaactgcatttgaaactggcaagctagagtcttgtagaggggggtagaattccaggtgtagcggtgaaatgcgtagagatctggaggaataccggtggcgaaggcggccccctggacaaagactgacgctcaggtgcgaaagcgtggggagcaaacaggattagataccctggtagtccacgctgtaaacgatgtcgatttggaggttgtgggcttgacccgtggcttccggagctaacgcgttaaatcgaccgcctggggagtacggccgcaaggttaaaactcaaatgaattgacgggggcccgcacaagcggtggagcatgtggtttaattcgatgcaacgcgaagaaccttacctactcttgacatccagagaattcgctagagatagcttagtgccttcgggaactctgagacaggtgctgcatggctgtcgtcagctcgtgttgtgaaatgttgggttaagtcccgcaacgagcgcaacccttatcctttgttgccagcgacgtaatggtgggaactcaaaggagactgccggtgataaaccggaggaaggtggggatgacgtcaagtcatcatggcccttacgagtagggctacacacgtgctacaatggcatatacaaagagaagcgaactcgcgagagcaagcggacctcataaagtatgtcgtagtccggattggagtctgcaactcgactccatgaagtcggaatcgctagtaatcgtagatcagaatgctacggtgaatacgttcccgggccttgtacacaccgcccgtcacaccatgggagtgggttgcaaaagaagtaggtagcttaaccttcgggagggcgcttaccactttgtgattcatgactggggtg

SEQ ID NO: 1404 - DNA, 1413 bp, Falsibacillus pallidus
atgcaagtcgagcggattgatgggagcttgctccctgatatcagcggcggacgggtgagtaacacgtgggcaacctgcctgtaagactgggataactccgggaaaccggggctaataccggataattccttcctcctcctggaggaaggctgaaagatggtttcggctatcacttacagatgggcccgcggcgcattagctagttggtgaggtaacggctcaccaaggccacgatgcgtagccgacctgagagggtgatcggccacactgggactgagacacggcccagactcctacgggaggcagcagtagggaatcttccgcaatggacgaaagtctgacggagcaacgccgcgtgagtgaagaaggttttcggatcgtaaaactctgttgttagggaagaacaagtgcgagagtaactgctcgcaccttgacggtacctaaccagaaagccacggctaactacgtgccagcagccgcggtaatacgtaggtggcaagcgttgtccggaattattgggcgtaaagcgcgcgcaggcggttccttaagtctgatgtgaaagcccacggctcaaccgtggagggtcattggaaactggggaacttgagtgcagaagagaagagcggaattccacgtgtagcggtgaaatgcgtagagatgtggaggaacaccagtggcgaaggcggctctttggtctgtaactgacgctgaggcgcgaaagcgtggggagcaaacaggattagataccctggtagtccacgccgtaaacgatgagtgctaagtgttagagggtttccgccctttagtgctgcagctaacgcattaagcactccgcctggggagtacggccgcaaggctgaaactcaaaggaattgacgggggcccgcacaagcggtggagcatgtggtttaattcgaagcaacgcgaagaaccttaccaggtcttgacatcctctgacaaccctagagatagggcgttccccttcgggggacagagtgacaggtggtgcatggttgtcgtcagctcgtgtcgtgagatgttgggttaagtcccgcaacgagcgcaacccttgaccttagttgccagcattcagttgggcactctaaggtgactgccggtgacaaaccggaggaaggtggggatgacgtcaaatcatcatgccccttatgacctgggctacacacgtgctacaatggacggtacaaagggctgcaaaactgcaaagtcgagccaatcccataaaaccgttctcagttcggattgcaggctgcaactcgcctgcatgaagctggaatcgctagtaatcgcggatcagcatgccgcggtgaatacgttcccgggccttgtacacaccgcccgtcacaccacgagagtttgtaacacccgaagtcggtggggtaacctttatggagc

SEQ ID NO: 1405 - DNA, 1457 bp, Fangia hongkongensis
attgaacgctggtggtatgcttaacacatgcaagtcgaacggacttgttaacctgcttgcaggttaacggttagtggcggacgggtgagtaatgcataggaatctggcttatggtgggggacaacagttggaaacggctgctaataccgcatattatctaatgatgaaaggtgccttagggtgtcgccatgagatgagcctatgttagattagctagttggtgaggtaaaggctcaccaaggctgcgatctatagctgttctgagaggaagatcagccacactgggactgagacacggcccagactcctacgggaggcagcagtggggaatattggacaatgggggcaaccctgatccagcaataccatgtgtgtgaagaaggccttagggttgtaaagcactttagtcgctgaggaaggctattaggttaagagctagatagtttgacgttaggcgaagaataagcaccggctaactccgtgccagcagccgcggtaatacggagggtgcgagcgttaatcggaattactgggcgtaaagggttcgtaggtggatagataagtcagatgtgaaatccctgggctcaacctaggaattgcatttgatactgtttatctagagttcactagaggattggggaatttccggtgtagcggtgaaatgcgtagagatcggaaggaacatcaatggcgaaggcaacaatctggggttgaactgacactgagggacgaaagcgtgggtagcaaacaggattagataccctggtagtccacgctgtaaacgatgagtactagctgttggagtcggtgaaaaggctttagtggcgcagctaacgcgttaagtactccgcctggggactacggccgcaaggctaaaactcaaaggaattgacggggacccgcacaagcggtggagcatgtggtttaattcgatgcaacgcgaagaaccttacctacccttgacatcctaagaagaaccgagagattggtttgtgccttcgggaacttagagacaggtgctgcatggctgtcgtcagctcgtgttgtgaaatgttgggttaagtcccgcaacgagcgcaacccttatttttagttgccatcattaagttgggcactctagagagactgccgctgataaggcggaggaaggtggggacgacgtcaagtcatcatggcccttacgggtagggctacacacgtgctacaatgggcactacagagggctgcgaaggagcgatctggagcgaaactcacaaaggtgttctaagtccggattgatctctgcaactcgagatcatgaagtcggaatcgctagtaatcgcggatcagcatgccgcggtgaatacgttcccgggtcttgtacacaccgcccgtcacaccatgggagtgggttgcaaaagaagtaggtagcttaacttcggagggcgcttaccactttgtgattcatgactggggtg

SEQ ID NO: 1406 - DNA, 1457 bp, Fermentimonas caenicola
gatgaacgctagcgataggcctaacacatgcaagtcgaggggcagcacatgaagtagcaatacagatggtggcgaccggcgcacgggtgagtaacacgtatgcaacctaccttccacaggagaataacccgttgaaaaacggactaatactccataatacaggggtcccgcatgggaatatttgttaaagatttttttcggtagaagatgggcatgcgttccattagctagttggttgaggtaacggctcaccaaggcaacgatggataggggaactgagaggtttatcccccacactggtactgagacacggaccagactcctacgggaggcagcagtgaggaatattggtcaatggaggcaactctgaaccagccacgtcgcgtgaaggatgacggccctacgggttgtaaacttcttttatacaggaataaagtgagtcacgtgtgactttttgcatgtactgtatgaataaggatcggctaactccgtgccagcagccgcggtaatacggaggatccaagcgttatccggatttattgggtttaaagggtgcgcaggcggaagattaagtcggcggtgaaattttgcagctcaactgtaaaagtgccatcgatactggttttcttgagtgtggatgaagtaggcggaatttgtggtgtagcggtgaaatgcatagatatcacgaggaactccgattgcgcaggcagcttactaggccataactgacgctcaggcacgaaggcgtggggatcaaacaggattagataccctggtagtccacgcagtaaacgatgattactcgctgtttgcgatacacagtaagcggcttagcgaaagcgttaagtaatccacctggggagtacgttcgcaagaatgaaactcaaaggaattgacgggggcccgcacaagcggaggaacatgtggtttaattcgatgatacgcgaggaaccttacccgggcttgaaatgcatctgacaggagcagagacgctctctcccttcggggcagatgtgtaggtgctgcatggttgtcgtcagctcgtgccgtgaggtgtcggcttaagtgccataacgagcgcaaccctcatcattagttaccatcaggttaagctggggactctaatgagactgccatcgtaagatgtgaggaaggtggggatgacgtcaaatcagcacggcccttacgtccggggcgacacacgtgttacaatggatggtacaaagggcagctacatggcgacatgatgctaatctccaaaaccattctcagttcggatcgaagtctgcaactcgacttcgtgaagctggattcgctagtaatcgcgcatcagccacggcgcggtgaatacgttcccgggccttgtacacaccgcccgtcaagccatggaagccgggggtacctgaagttcgtaaccgtcaaaggagcgacctagggtaaaactggtgactggggct

SEQ ID NO: 1407 - DNA, 1446 bp, Ferrimicrobium acidiphilum
gacgaacgctggcggcgtgcttaacacatgcaagtcgaacggggtatcagggtagtaatacccgaagtacctagtggcgaacgggtgcgtaacacgtgagcaacctaccccagagcttggaataacaccgggaaaccggtgctaataccgaatactctcattcggccgcatgactgaatgaggaaagatttatcactctgggacgggctcgcggcctatcagcttgttggtgaggtaacggctcaccaaggctacgacgggtagctggtctgagaggacgatcagccacactgggactgagacacggcccagactcctacgggaggcagcagtggggaatattgcgcaatgggcgaaagcctgacgcagcaacgccgcgtggaggatgaaggctttcgggttgtaaactcctttcagcagggacgaaactgacggtacctgcagaagaagccccggctaactacgtgccagcagccgcggtgagacgtagggggcaagcgttgtccggatttattgggcgtaaagagctcgtaggcggcttggcaagtcggatgtgaaatctccaggcttaacctggagtcgccatccgatactgctatggctagagtccggtagaggatcgtggaattcctggtgtagcggtgaaatgcgcagatatcaggaggaacaccaacggcgaaggcagcgatctgggccggtactgacgctgaggagcgaaagcgtggggagcgaacaggattagataccctggtagtccacgccctaaacgttgggcactaggtgtggggcctatttcgacgggttccgtgccgtagctaacgcattaagtgccccgcctggggagtacggtcgcaaggctaaaactcaaaggaattgacgggggcccgcacaagcggcggagcatgcggcttaattcgatgcaacgcgaaaaacctcacctgggtttgacatgtagggaaaagctgcagagatgcagtgtccttttagggcccttcacaggtggtgcatggctgtcgtcagctcgtgtcgtgagatgttgggttaagtcccgcaacgagcgcaacccttgccctatgttgccagcggataatgccggggactcgtaggggactgccggagttaattcggaggaaggtggggacgacgtcaagtcatcatgccccttacatccagggctgcacgcatgctacaatggccggtacaaagggtcgccaacccgcgagggggagccaatcccataaagccggtctcagttcggatcgcagtctgcaactcgactgcgtgaagtcggagtcgctagtaatcccgaatcagcacgtcggggtgaatacgttcccgggccttgtacacaccgcccgtcacaccacgaaagtcggcaacacccgaagccggtggcccaaccagtaatggagggagccgtcgaaggtggggtcggtgattggggtg

SEQ ID NO: 1408 - DNA, 1475 bp, Ferrimonas balearica
attgaacgctggcggcaggcctaacacatgcaagtcgagcggcagcgacaacattgaaccttcgggggatttgttgggcggcgagcggcggacgggtgagtaatgcttaggaatttgcccagtcgagggggacaacagttggaaacgactgctaataccgcatacgccctacgggggaaagcaggggctcttcggaccttgcgcgattggataagcctaagtgagattagctagttggtgaggtaatggctcaccaaggcgacgatctctagctggtttgagaggatgatcagccacactgggactgagacacggcccagactcctacgggaggcagcagtggggaatattgcacaatgggcgaaagcctgatgcagccatgccgcgtgtgtgaagaaggccttcgggttgtaaagcactttcagcgaggaggaaaggttagcggttaatacccgctagctgtgacgttactcgcagaagaagcaccggctaactccgtgccagcagccgcggtaatacggagggtgcgagcgttaatcggaattactgggcgtaaagcgcatgcaggcggccaagtcagtcagatgtgaaagccccgggcttaacctgggaattgcatttgatactgcttggctagagtccttgagaggggggtagaatttcaggtgtagcggtgaaatgcgtagagatctgaaggaataccagtggcgaaggcggccccctggcaagagactgacgctcagatgcgaaagcgtggggagcaaacaggattagataccctggtagtccacgccgtaaacgatgtctattaggagtctgtgcccttgaggcgtgggttccaaagctaacgcattaaatagaccgcctggggagtacggccgcaaggttaaaactcaaatgaattgacgggggcccgcacaagcggtggagcatgtggtttaattcgatgcaacgcgaagaaccttacctacccttgacatccagagaacttaccagagatggtttggtgccttcgggaactctgagacaggtgctgcatggctgtcgtcagctcgtgttgtgaaatgttgggttaagtcccgcaacgagcgcaacccttgtcctatgttgccagcgcgtaatggcgggaactcatgggagactgccggtgataaaccggaggaaggtggggacgacgtcaagtcatcatggcccttacgggtagggctacacacgtgctacaatggtcagtacaaagggttgccaactcgcgagagtgagccaatcccataaagctggtcgtagtccggattggagtctgcaactcgactccatgaagtcggaatcgctagtaatcgtggatcagaatgccacggtgaatacgttcccgggccttgtacacaccgcccgtcacaccatgggagtgggctgcaaaagaagtgggtagtttaaccttcgggaggacgctcaccactttgtggttcatgactggggtg

SEQ ID NO: 1409 - DNA, 1474 bp, Ferrimonas marina
attgaacgctggcggcaggcctaacacatgcaagtcgagcggcagcgacaacattgaaccttcgggggatttgttgggcggcgagcggcggacgggtgagtaatgcttggggatctgcccggttgtgggggacaacagttggaaacgactgctaataccgcatacgccctacgggggaaagcaggggctcttcggaccttgcgcgatcggatgaacccaagtgagattagctagttggtggggtaatggctcaccaaggcgacgatctctagctggtttgagaggatgatcagccacactgggactgagacacggcccagactcctacgggaggcagcagtggggaatattgcacaatgggcgaaagcctgatgcagccatgccgcgtgtgtgaagaaggccttcgggttgtaaagcactttcagcgaggaggaaaggttgttggttaatacccaacagctgtgacgttactcgcagaagaagcaccggctaactccgtgccagcagccgcggtaatacggagggtgcgagcgttaatcggaattactgggcgtaaagcgcatgcaggcggtctggtcagtcagatgtgaaagccccgggctcaacctgggaattgcatttgatactgccagactagagtccttgagaggggggtagaatttcaggtgtagcggtgaaatgcgtagagatctgaaggaataccagtggcgaaggcggccccctggcaagagactgacgctcagatgcgaaagcgtggggagcaaacaggattagataccctggtagtccacgccgtaaacgatgtctattaggagtctgtaaccttgagttgtgggttccaaagctaacgcattaaatagaccgcctggggagtacggccgcaaggttaaaactcaaatgaattgacgggggcccgcacaagcggtggagcatgtggtttaattcgatgcaacgcgaagaaccttacctactcttgacatccagagaactttccagagatggattggtgccttcgggaactctgagacaggtgctgcatggctgtcgtcagctcgtgttgtgaaatgttgggttaagtcccgcaacgagcgcaacccttgtcctatgttgccagcacttcgggtgggaactcatgggagactgccggtgataaaccggaggaaggtggggacgacgtcaagtcatcatggcccttacgagtagggctacacacgtgctacaatggtcagtacaaagggttgccaactagcgatagtgagccaatcccataaagctggtcgtagtccggatcggagtctgcaactcgactccgtgaagtcggaatcgctagtaatcgtggatcagaatgccacggtgaatacgttcccgggccttgtacacaccgcccgtcacaccatgggagtgggctgcaaaagaagtgggtagtttaaccttcgggaggacgctcaccactttgtggttcatgactggggtg

SEQ ID NO: 1410 - DNA, 1416 bp, Ferrimonas sediminum
gcggcggctaccatgcagtcgagcggaacgacgataaagattcttcggatgatttatcgggcgtcgagcggcggacgggtgagtaatgcttaggaatttgcccagtcgagggggataaccattggaaacgatggctaataccgcatacgccctacgggggaaagagggggacgcttcggcacctttcgcgattggataagcctaagtgagattagctagttggtggggtaaaggctcaccaaggcgacgatctctagctggtttgagaggatgatcagccacactggaactgagacacggtccagactcctacgggaggcagcagtggggaatattgcacaatgggcgcaagcctgatgcagccatgccgcgtgtatgaagaaggccttcgggttgtaaagtactttcagcgaggaggaaaggttagtagttaatacctgctagctgtgacgttactcgcagaagaagcaccggctaactccgtgccagcagccgcggtaatacggagggtgcgagcgttaatcggaattactgggcgtaaagcgcatgcaggcggttgattaagcgagatgtgaaagccccgggcttaacctgggaactgcatttcgaactggtcaactagagtcttgtagaggggggtagaatttcaggtgtagcggtgaaatgcgtagagatctgaaggaataccagtggcgaaggcggccccctggacaaagactgacgctcagatgcgaaagcgtggggagcaaacaggattagataccctggtagtccacgccgtaaacgatgtctattaggagtctgtgaccttgagtcgtgggttccaaagctaacgcattaaatagaccgcctggggagtacggccgcaaggttaaaactcaaatgaattgacgggggcccgcacaagcggtggagcatgtggtttaattcgatgcaacgcgaagaaccttaccatctcttgacatccacggaagcttggggagacccgagtgtgccttcgggaaccgtgagacaggtgctgcatggctgtcgtcagctcgtgttgtgaaatgttgggttaagtcccgcaacgagcgcaacccttgtccttagttgccagcacgtaatggtgggaactctagggagactgccggtgataaaccggaggaaggtggggacgacgtcaagtcatcatggcccttacgagatgggctacacacgtgctacaatggtcggtacaaagggttgccagctagcgatagtgagccaatcccataaagccggtcgtagtccggattggagtctgcaactcgactccatgaagtcggaatcgctagtaatcgtagatcagagagtttgatcgaatctcttgaggagacctccgcacaccagaggtcgcaccacaggagtggttttgggggccatgggtggcacaac

SEQ ID NO: 1411 - DNA, 1460 bp, Ferriphaselus amnicola
attgaacgctggcggcatgctttacacatgcaagtcgaacggattttggagcttgctccagagttagtggcgaacgggtgagtaatatatcggaacgtacccggcaatgggggataacgtagcgaaagttacgctaataccgcatatgccctgagggggaaagcaggggaccagtaatggccttgcgttgtcggagcggccgatatcggattagctagttggtgaggtaaaggctcaccaaggcgacgatccgtagcaggtctgagaggatgatctgccacactgggactgagacacggcccagactcctacgggaggcagcagtggggaattttggacaatgggcgaaagcctgatccagccatgccgcgtgagtgaagaaggccttcgggttgtaaagctctttcaggtggaaagaaaaggttacggataatacctgtgactgatgacggtaccatcagaagaagcaccggctaactacgtgccagcagccgcggtaatacgtagggtgcgagcgttaatcggaattactgggcgtaaagcgtgcgcaggcggttttgtaagacagacgtgaaagccccgggcttaacctgggaacggcgtttgtgactgcaagactagagtatggcagaggggggtagaattccacgtgtagcagtgaaatgcgtagagatgtggaggaataccgatggcgaaggcagccccctgggtcaatactgacgctcatgcacgaaagcgtggggagcaaacaggattagataccctggtagtccacgccctaaacgatgtcaactaggtgttgggggaggagacttccttagtaccgcagctaacgcgtgaagttgaccgcctggggagtacggccgcaaggttaaaactcaaaggaattgacggggacccgcacaagcggtggattatgtggattaattcgatgcaacgcgaaaaaccttacctacccttgacatgccaagaagattccagagatgggattgtgctcgaaagagaacttggacacaggtgctgcatggctgtcgtcagctcgtgtcgtgagatgttgggttaagtcccgcaacgagcgcaacccttgtcattaattgccatcatttagttgggcactttaatgagactgccggtgataaaccggaggaaggtggggatgacgtcaagtcctcatggcccttatgggtagggcttcacacgtaatacaatggtcggtacagagggttgccaagccgcgaggtggagccaatcccagaaagccgatcgtagtccggattggagtctgcaactcgactccatgaagtcggaatcgctagtaatcgcggatcagcatgtcgcggtgaatacgttcccgggtcttgtacacaccgcccgtcacaccatgggagtggaatctggcagaagtaggtagcctaaccgtaaggagggcgcttaccacgctgggtttcatgactggggtg

SEQ ID NO: 1412 - DNA, 1368 bp, Fervidicella metallireducens
ccttagcggcggacgggtgagtaacacgtgggcaacctgcctctaagagggggataacacagagaaatctgtgctaataccgcataaagctgggactttgcatgaagtaacagccaaaggagaaatccgcttagagatgggcccgcggcgcattagctagttggtgaggtaacggctcaccaaggcgacgatgcgtagccgacctgagagggtgatcggccacattggaactgagacacggtccagactcctacgggaggcagcagtggggaatattgcacaatgggggaaaccctgatgcagcaacgccgcgtgagcgacgaaggcctcgggttgtaaagctctgtcttcgctgaagaaacctgacggtaagcgaggaggaagccacggctaactacgtgccagcagccgcggtaatacgtaggtggcgagcgttgtccggaattattgggcgtaaaggatgcgtaggtggtagtttaagtgggatgtgaaatccctgggcttaacccaggaactgcattccaaactggactactagagtgcaggagaggaaagtggaattcctagtgtagcggtgaaatgcgtagagattaggaggaacaccagtggcgaaggcgactttctggactgtaactgacactgaggcatgaaagcgtggggagcaaacaggattagataccctggtagtccacgccgtaaacgatgagtactaggtgtagggagtcaaatctctgtgccgcagttaacacattaagtactccgcctgggaagtacgatcgcaagattaaaactcaaaggaattgacggggacccgcacaagcagcggagcatgtggtttaattcgaagcaacgcgaagaaccttaccaagacttgacatctcctgaatagcctagagataggtgaagcttcggggcaggaagacaggtggtgcatggttgtcgtcagctcgtgtcgtgagatgttgggttaagtcccgcaacgagcgcaacccctgtcgttagttgccatcattaagttgggcactctagcgagactgcgaggttaactcggaggaaggtggggatgacgtcaaatcatcatgccccttatgtcttgggctacacacgtgctacaatggccggtacagaaagaagcgaacccgtgagggggagcaaatctcaaaaaccggtcccagttcggattgtaggctgcaactcgcctacatgaagccggagttgctagtaatcgcggatcagcatgccgcggtgaatacgttcccgggtcttgtacacaccgcccgtcacaccatgagagtcggcaacacccgaagtcagtgggctaactcgaaagagaggcagctgccgaaggtggggtcgatgattggggtg

SEQ ID NO: 1413 - DNA, 1452 bp, Fervidicola ferrireducens
gacgaacgctggcggcgtgcctaacacatgcaagtcgagcgggggtggtggaaggcgtaagctggaagccaccttagcggcggacgggtgagtaacacgtaggcaacctacccaccacacggggatagccctgggaaactgggggtaatacccgatacctttgctagccgcatggctggtaaagaaagctgccttttaggtggcggtggtggatgggcctgcggcccatcagctagttggtgaggtaacggctcaccaaggcgacgacgggtagccggcctgagagggtgtacggccacactgggactgggacacggcccagactcctacgggaggcagcagtggggaatcttgggcaatgggggaaaccctgacccagcgacgccgcgtgggggaagaaggccttcgggttgtaaacccctgtcaccggggaagaggaaggacggtacccggggaggaagccccggctaactacgtgccagcagccgcggtaatacgtagggggcgagcgttgtccggaatcactgggcgtaaagggcgtgtaggcgggctagcaagttgcgggtaaaaacccagggctcaactctgggggagcctgcaaaactgctggtcttgagggcgggagaggagagtggaattcccggagtagcggtgaaatgcgtagataccgggaggaacaccagtggcgaaggcggctctctggaccgcacctgacgctgaggcgcgaaagctaggggagcgaacgggattagataccccggtagtcctagccgtaaacgatggtcactaggtgtgggcggtttaaaagccgtccgtgccgcagctaacgcaataagtgacccgcctggggagtacggccgcaaggttgaaactcaaaggaattgacgggggcccgcacaagcggtggagcatgtggtttaattcgaagcaacgcgaagaaccttaccaggccttgacatgcgggtggtagcgacccgaaaggggagcgaccctagccgtttaggttagggagcctgcacaggtggtgcatggttgtcgtcagctcgtgtcgtgagatgttgggttaagtcccgcaacgagcgcaacccctacctctagttgccagcgggtggagccgggcactctagagggactgccgccgacaaggcggaggaaggtggggatgacgtcaaatcatcatgccctttatggcctgggccacacacgtgctacaatggccggtacagcgggaggcgaaggcgcgagccggagcgaatccctaaaagccggtctcagttcggattgcaggctgcaactcgcctgcatgaaggcggaatcgctagtaatcgcggatcagcatgccgcggtgaatacgttcccgggccttgtacacaccgcccgtcacaccatgggagttggcaacacccgaagccggacgtaaggtccgtcgaaggtggggccagcgactggggt

SEQ ID NO: 1414 - DNA, 1331 bp, Fibrobacter succinogenes
  misc_feature (19)..(19): n is a, c, g, or t
  misc_feature (244)..(244): n is a, c, g, or t
  misc_feature (495)..(495): n is a, c, g, or t
  misc_feature (697)..(697): n is a, c, g, or t
  misc_feature (904)..(904): n is a, c, g, or t
  misc_feature (913)..(913): n is a, c, g, or t
  misc_feature (942)..(942): n is a, c, g, or t
  misc_feature (968)..(970): n is a, c, g, or t
  misc_feature (1080)..(1080): n is a, c, g, or t
  misc_feature (1083)..(1086): n is a, c, g, or t
  misc_feature (1093)..(1094): n is a, c, g, or t
  misc_feature (1114)..(1115): n is a, c, g, or t
  misc_feature (1117)..(1117): n is a, c, g, or t
  misc_feature (1151)..(1151): n is a, c, g, or t
aacgaacgctggtggcgtntcttatacatgcaagtcgagcggggcagcaatgcccagcggcgaacgggtgagtaacgcgtaagcaatctgccccatatcaggaaatacccgtgccaacgcgcggttaatgtccaggagcgtggcttcccgcatgggaagttgacaagagatttatcggtatgggatgagcttgcgtccgattagctagttggcggggcaacggcccaccaaggcgacgatcggnagccggcctgagagggtgatcggccacattgggactgagatacggcccagactcctacgggaggcagcagtagggaatattgcacaatgggggaaaccctgatgcagcaacgccacgtgtgggaagaagcatttcggtgtgtaaaccactgtcgtgagggaataaggcgtcttctcggagacgttgaatgtacctcgaaaggaagcaccggcaaacttcgtgccagcagccgcggtaatacgaggggtgcnagcgttgttcggaatcactgggcgtaaagggagcgtaggcggagatgcaagcggactgtacaataccggggcccaaccccgggcctgcagttcggactgcacctcttggatagttcaggggcaggcggaattcctggtgtagcggtggaatgcgtagagatcaggaagaacaccgatggcgaaggcagcctgctggggactnatcgacgctgaggctcgaaagtgcgggtagcaaacaggattagataccctggtagtccgcaccgtaaacgatgcatactgggtgtccggggttcgccccgggtaccgcagcaaacgcgttaagtatgccgcctggggagtacgtacgcaagtatgaaactcaaaggaattgacgggggcccgcacaagcggtggagcatgtggtttnattcgaagnaacgcgcagaaccttaccagggtttgacntgggaacgccgcggcgagagatcgcnnntttgtagcaatacacgttccgcacaggtgctgcatggctgtcgtcagctcgtgtcgtgagatgttgggttaagtcccgcaacgagcgcaacccacgtttccagttgccanccnnnnagggggnnctctggagagactgccgggnncnacccggaggaaggtgtggatgacgtcaagtcctnatggcccttacatcctgggctacacacgtgctacaatggtcggtacaatgggtcgcaacgccgcgaggcggagccaatcctcaaagccggcctcagttcggatcggagtctgcaactcgactccgtgaagctggaatcgctagtaatcgtgggtcagcacaccacggtgaatacgttccc

SEQ ID NO: 1415 - DNA, 1472 bp, Fictibacillus aquaticus
gatgaacgctggcggcgtgcctaatacatgcaagtcgagcgaatgatgaggagcttgctcctctgatttagcggcggacgggtgagtaacacgtgggtaacctgcctgtaagatggggataactccgggaaaccggggctaataccgaataataaaagaagaagcatttcttctttttgaaagttggtttcggctaacacttacagatgggcccgcggcgcattagctagttggtgaggtaacggctcaccaaggcgacgatgcgtagccgacctgagagggtgatcggccacactgggactgagacacggcccagactcctacgggaggcagcagtagggaatcttcggcaatgggcgaaagcctgaccgagcaacgccgcgtgagcgaggaaggccttcgggtcgtaaagctctgttgtcagggaagaacaagtacgagagtaactgctcgtaccttgacggtacctgaccagaaagccacggctaactacgtgccagcagccgcggtaatacgtaggtggcaagcgttatccggaattattgggcgtaaagcgcgcgcaggcggtctcttaagtctgatgtgaaagcccacggctcaaccgtggagggtcattggaaactgggagacttgagtgcaggagagaaaagtggaattccacgtgtagcggtgaaatgcgtagagatgtggaggaacaccagtggcgaaggcggctttttggcctgtaactgacgctgaggcgcgaaagcgtggggagcaaacaggattagataccctggtagtccacgccgtaaacgatgagtgctaggtgttggggggttccaccctcagtgctgacgctaacgcattaagcactccgcctggggagtacggccgcaaggctgaaactcaaaggaattgacgggggcccgcacaagcagtggagcatgtggtttaattcgaagcaacgcgaagaaccttaccaggtcttgacatcctctgaccactctagagatagagctttccccttcgggggacagagtgacaggtggtgcatggttgtcgtcagctcgtgtcgtgagatgttgggttaagtcccgcaacgagcgcaacccttgaccttagttgccagcattcagttgggcactctaaggtgactgccggtgacaaaccggaggaaggtggggatgacgtcaaatcatcatgccccttatgacctgggctacacacgtgctacaatgggtggtacaaagggttgcaaagccgcgaggccgagccaatcccaaaaagccactctcagttcggattgtaggctgcaactcgcctacatgaagccggaattgctagtaatcgcggatcagcatgccgcggtgaatacgttcccgggccttgtacacaccgcccgtcacaccacgagagtttgtaacacccgaagtcggtggggtaacccttttgggagccagccgccgaaggtgggacagatgattggggtg

SEQ ID NO: 1416 - DNA, 1472 bp, Fictibacillus arsenicus
gatgaacgctggcggcgtgcctaatacatgcaagtcgagcgaatgaagaggagcttgctcctctgatttagcggcggacgggtgagtaacacgtgggtaatctgcctgtaagacggggataactccgggaaaccggggctaataccggataataagaagaaacgcatgtttcttctttgaaagtcggtttcggctgacacttacagatgagcccgcggcgcattagctagttggtgaggtaacggctcaccaaggcgacgatgcgtagccgacctgagagggtgatcggccacactgggactgagacacggcccagactcctacgggaggcagcagtagggaatcttcggcaatgggcgaaagcctgaccgagcaacgccgcgtgagcgatgaaggccttcgggtcgtaaagctctgttgttagagaagaacaagtacgagagtaactgctcgtaccttgacggtacctaaccagaaagccacggctaactacgtgccagcagccgcggtaatacgtaggtggcaagcgttatccggaattattgggcgtaaagcgcgcgcaggcggtctcttaagtctgatgtgaaagcccacggctcaaccgtggagggtcattggaaactgggagacttgagtgcaggagagaaaagtggaattccacgtgtagcggtgaaatgcgtagagatgtggaggaacaccagtggcgaaggcggctttttggcctgtaactgacgctgaggcgcgaaagcgtggggagcaaacaggattagataccctggtagtccacgccgtaaacgatgagtgctaggtgttggggggttccaccctcagtgctgaagttaacacattaagcactccgcctggggagtacgaccgcaaggttgaaactcaaaggaattgacgggggcccgcacaagcagtggagcatgtggtttaattcgaagcaacgcgaagaaccttaccaggtcttgacatcctctgaccactctagagatagagctttccccttcgggggacagagtgacaggtggtgcatggttgtcgtcagctcgtgtcgtgagatgttgggttaagtcccgcaacgagcgcaacccttgaccttagttgccagcattcagttgggcactctaaggtgactgccggtgacaaaccggaggaaggtggggatgacgtcaaatcatcatgccccttatgacctgggctacacacgtgctacaatggatggtacaaagggttgcgaagccgcgaggccaagccaatcccaaaaagccattctcagttcggattgtaggctgcaactcgcctacatgaagccggaattgctagtaatcgcggatcagcatgccgcggtgaatacgttcccgggccttgtacacaccgcccgtcacaccacgagagtttgtaacacccgaagtcggtggggtaacccttttgggagccagccgccgaaggtgggacagatgattggggtg

SEQ ID NO: 1417 - DNA, 1419 bp, Fictibacillus enclensis
gatgagaggacttgctcctctgatttagcggcggagggtgagtaacacgtgggtaacctgcctgtaagacggggataactccgggaaaccggagctaataccggatgataacgagaagcgcctgcttcttttttgaaagtcggtttcggctgacgcttacagatgggcccgcggcgcattagctagttggtgaggtaacggctcaccaaggcgacgatgcgtagccgacctgagagggtgatcggccacactgggactgagacacggcccagactcctacgggaggcagcagtagggaatcttcggcaatggacgaaagtctgaccgagcaacgccgcgtgagcgatgaaggccttcgggtcgtaaagctctgttgtcagagaagaacaagtaccggagtaactgccggtaccttgacggtacctgaccagaaagccacggctaactacgtgccagcagccgcggtaatacgtaggtggcaagcgtgatccggaattattgggcgtaaagcgcgcgcaggcggtttcttaattctgatgtgaaagcccacggctcaaccgtggagggtcattggaaactgggagacttgagtgcaggagagaaaagtggaattccacgtgtagcggtgaaatgcgtagagatgtggaggaacaccagtggcgaaggcggctttttggcctgtaactgacgctgaggcgcgaaagcgtggggagcaaacaggattagataccctggtagtccacgccgtaaacgatgagtgctaggtgttggggggttccaccctcagtgctgacgttaacacattaagcactccgcctggggagtacggccgcaaggctgaaactcaaaggaattgacgggggcccgcacaagcagtggagcatgtggtttaattcgaagcaacgcgaagaaccttaccaggtcttgacatcctctgaccacttgagagatcaagctttccccttcgggggacagagtgacaggtggtgcatggttgtcgtcagctcgtgtcgtgagatgttgggttaagtcccgcaacgagcgcaacccttgaccttagttgccagcattcagttgggcactctaaggtgactgccggtgacaaaccggaggaaggtggggatgacgtcaaatcatcatgccccttatgacctgggctacacacgtgctacaatgggtggtacaaagggttgcaaacccgccaggccgacccaatcccaaaaagccactctcagttcggattgtaggttgcaactcgcctacatgaagccggaattgctagtaatcgcggatcagcatgccgcggtgaatacgttcccgggccttgtacacaccgcccgtcacaccacgagagtttgtaacacccgaagtcggtggggtaaccttttggattccagccgccgaaggtgggacagatga

SEQ ID NO: 1418 - DNA, 1472 bp, Fictibacillus macauensis
gatgaacgctggcggcgtgcctaatacatgcaagtcgagcgaacagatgagaagcttgcttctcagacgttagcggcggacgggtgagtaacacgtgggcaacctacctataagacggggataactccgggaaaccggggctaataccagataatcaagaagaacacctgtttttcttgtgaaagtcggtttcggctgacacttatagatgggcccgcggcgcattagctagttggtgaggtaacggctcaccaaggccacgatgcgtagccgacctgagagggtgatcggccacactgggactgagacacggcccagactcctacgggaggcagcagtagggaatcttcggcaatggacgaaagtctgaccgagcaacgccgcgtgagcgatgaaggccttcgggtcgtaaagctctgttgtcagagaagaacaagtatcggagtaactgccggtaccttgacggtacctgaccagaaagccacggctaactacgtgccagcagccgcggtaatacgtaggtggcaagcgttatccggaattattgggcgtaaagcgcgcgcaggcggttccttaagtctgatgtgaaagcccacggctcaaccgtggagggtcattggaaactggggaacttgagtgcaggagagaaaagtggaattccacgtgtagcggtgaaatgcgtagagatgtggaggaacaccagtggcgaaggcggctttttggcctgtaactgacgctgaggcgcgaaagcgtggggagcaaacaggattagataccctggtagtccacgccgtaaacgatgagtgctaggtgttggggggttccaccctcagtgctgacgttaacacattaagcactccgcctggggagtacggccgcaaggctgaaactcaaaggaattgacgggggcccgcacaagcagtggagcatgtggtttaattcgaagcaacgcgaagaaccttaccaggtcttgacatcctctgaccacttgagagatcaagctttccccttcgggggacagagtgacaggtggtgcatggttgtcgtcagctcgtgtcgtgagatgttgggttaagtcccgcaacgagcgcaacccttgaccttagttgccagcattcagttgggcactctagggtgactgccggtgacaaaccggaggaaggtggggatgacgtcaaatcatcatgccccttatgacctgggctacacacgtgctacaatgggtggtacaaagggttgcgaagccgcgaggctaagccaatcccaaaaagccactctcagttcggattgtaggctgcaactcgcctacatgaagccggaattgctagtaatcgcggatcagcatgccgcggtgaatacgttcccgggccttgtacacaccgcccgtcacaccacgagagtttgtaacacccgaagtcggtgaggtaaccttttggagccagccgccgaaggtgggacagatgattggggtg

SEQ ID NO: 1419 - DNA, 1444 bp, Fictibacillus phosphorivorans
aacgctggcggcgtgcctaatacatgcaagtcgagcgaatgatgaggagcttgctcctctgatttagcggcggacgggtgagtaacacgtgggtaatctgcctgtaagacggggataactccgggaaaccggggctaataccggataataagagaagaagcatttcttctttttgaaagtcggtttcggctgacacttacagatgagcccgcggcgcattagctagttggtgaggtaacggctcaccaaggcgacgatgcgtagccgacctgagagggtgatcggccacactgggactgagacacggcccagactcctacgggaggcagcagtagggaatcttcggcaatgggcgaaagcctgaccgagcaacgccgcgtgagcgatgaaggccttcgggtcgtaaagctctgttgttagagaagaacaagtacgagagtaactgctcgtaccttgacggtacctaaccagaaagccacggctaactacgtgccagcagccgcggtaatacgtaggtggcaagcgttatccggaattattgggcgtaaagcgcgcgcaggcggtctcttaagtctgatgtgaaagcccacggctcaaccgtggagggtcattggaaactgggagacttgagtgcaggagagaaaagtggaattccacgtgtagcggtgaaatgcgtagagatgtggaggaacaccagtggcgaaggcggctttttggcctgtaactgacgctgaggcgcgaaagcgtggggagcaaacaggattagataccctggtagtccacgccgtaaacgatgagtgctaggtgttggggggttccaccctcagtgctgaagttaacacattaagcactccgcctggggagtacgaccgcaaggttgaaactcaaaggaattgacgggggcccgcacaagcagtggagcatgtggtttaattcgaagcaacgcgaagaaccttaccaggtcttgacatcctttgaccactctagagatagagctttccccttcgggggacaaagtgacaggtggtgcatggttgtcgtcagctcgtgtcgtgagatgttgggttaagtcccgcaacgagcgcaacccttgaccttagttgccagcattcagttgggcactctaaggtgactgccggtgacaaaccggaggaaggtggggatgacgtcaaatcatcatgccccttatgacctgggctacacacgtgctacaatggatgatacaaagggttgcgaagccgcgaggccaagccaatcccaaaaagtcattctcagttcggattgtaggctgcaactcgcctacatgaagccggaattgctagtaatcgcggatcagcatgccgcggtgaatacgttcccgggccttgtacacaccgcccgtcacaccacgagagtttgtaacacccgaagtcggtggggtaacccttttgggagccagccgccg

SEQ ID NO: 1420 - DNA, 1422 bp, Fictibacillus solisalsi
tacatgcaagtcgagcggacagatgaggagcttgctcctctgatgttagcggcggacgggtgagtaacacgtgggcaacctacctgtaagacggggataactccgggaaaccggagctaataccggataataaagagaaacgcctgtttcttttttgaaagtcggtttcggctgacacttacagatgggcccgcggcgcattagctagttggtgaggtaacggctcaccaaggcgacgatgcgtagccgacctgagagggtgatcggccacactgggactgagacacggcccagactcctacgggaggcagcagtagggaatcttcggcaatggacgaaagtctgaccgagcaacgccgcgtgagcgatgaaggccttcgggtcgtaaagctctgttgtcagggaagaacaagtaccggagtaactgccggtaccttgacggtacctgaccagaaagccacggctaactacgtgccagcagccgcggtaatacgtaggtggcaagcgttgtccggaattattgggcgtaaagcgcgcgcaggcggttctttaagtctgatgtgaaagcccacggctcaaccgtggagggtcattggaaactggggaacttgagtgcaggagagaaaagtggaattccacgtgtagcggtgaaatgcgtagagatggggaggaaccccagtggcgaaggcggctttttggcctgtaactgacgctgaggcgcgaaagcgtggggagcaaacaggattagataccctggtagtccacgccgtaaacgatgagtgctaggtgtttggggggttccaccctcagtgctgacgttaacacattaagcactccgcctggggagtacggccgcaaggctgaaactcaaaggaattgacgggggcccgcacaagcagtggagcatgtggtttaattcgaagcaacgcgaagaaccttaccaggtcttgacatcctctgaccacttgagagatcaagctttccccttcgggggacagagtgacaggtggtgcatggttgtcgtcagctcgtgtcgtgagatgttgggttaagtcccgcaacgagcgcaacccttgaccttagttgccagcattcagttgggcactctaaggtgactgccggtgacaaaccggaggaaggtggggatgacgtcaaatcatcatgccccttatgacctgggctacacacgtgctacaatgggtggtacaaagggttgcgaagccgcgaggccgagccaatcccaaaaagccactctcagttcggattgtaggctgcaactcgcctacatgaagccggaattgctagtaatcgcggatcagcatgccgcggtgaatacgttcccgggccttgtacacaccgcccgtcacaccacgagagtttgtaacacccgaagtcggtggggtaaccgttggagccagccgc

SEQ ID NO: 1421 - DNA, 1477 bp, Filobacillus milosensis
gctggcggcgtgcctaatacatgcaagtcgagcgcgggaagcagactgaatccttcgggaggacgtctgtggaacgagcggcggacgggtgagtaacacgtgggcaacctgcctgtaagactgggataactccgggaaaccggggctaataccggataacacatcggttcgcatgaaccgatgatgaaagatggcttcttgctatcacttacagatgggcccgcggcgcattagctagttggtggggtaacggcctaccaaggcaacgatgcgtagccgacctgagagggtgatcggccacactgggactgagacacggcccagactcctacgggaggcagcagtagggaatcatccgcaatggacgaaagtctgacggtgcaacgccgcgtgagtgaggaaggtcttcggatcgtaaagctctgttgttagggaagaacaagtcccgttcgaataggacggggccttgacggtacctaaccagaaagccacggctaactacgtgccagcagccgcggtaatacgtaggtggcaagcgttgtccggaattattgggcgtaaagcgcgcgcaggcggttccttaagtctgatgtgaaagcccacggctcaaccgtggagggtcattggaaactggggaacttgagtacagaagaggagagcggaattccacgtgtagcggtgaaatgcgtagatatgtggaggaacaccagtggcgaaggcggctctctggtctgttactgacgctgaggtgcgaaagcgtggggagcgaacaggattagataccctggtagtccacgccgtaaacgatgagtgctaggtgttaggggtttccacccttagtgctgcagttaacgcaataagcactccgcctggggagtacggccgcaaggctgaaactcaaaggaattgacgggggcccgcacaagcggtggagcatgtggtttaattcgaagcaacgcgaagaaccttaccaggtcttgacatctttggaccaccctagagatagggtcttcccttcggggaccaaatgacaggtggtgcatggttgtcgtcagctcgtgtcgtgagatgttgggttaagtcccgcaacgagcgcaacccttgatcttagttgccagcattcagttgggcactctaaggtgactgccggtgacaaaccggaggaaggtggggatgacgtcaaatcatcatgccccttatgacctgggcaacacacgtgctacaatggatggtacaatgggacgcgaaaccgcgaggtgaagcaaatcccaaaaagccattctcagttcggattgtaggctgcaactcgcctgcatgaagccggaatcgctagtaatcgtggatcagcatgccacggtgaatacgttcccgggccttgtacacaccgcccgtcacaccacgagagttggtaacacccgaagtcggtggagtaaccttttggagctagccgccgaaggtgggaccaatgattggggtg

SEQ ID NO: 1422 - DNA, 1419 bp, Fimbriiglobus ruber
aacgaacgttggcggcgtggattaggcatgcaagtcgtgggaatcccagcaatgggggaaccggcgtaaggggcagtaaggcatgggtacctaccccggggttgggcatagcccgtagaaatacggggtaattcccagcgatgtccgcaaggaccaaagctccggcgccccgggaggggcccatgtggtattagctagttggtggggtaacggcccaccaaggcgaagatgcctagcgggtgtgagagcacgacccgcgccactggcactgagacactggccagacacctacgggtggctgcagtcgaggatcttcggcaatgggcgcaagcctgaccgagcgacgccgcgtgtgcgacgaaggccttcgggttgtaaagcactgtcgagggggagaaaagggcaaccttgatctatccctggaggaagcacgggctaagttcgtgccagcagccgcggtaagacgaaccgtgcgaacgttgttcggaatcactgggcttaaagggcgcgtaggcgggccgccaagtccggggtgaaatcctccagcttaactggagaactgccccggatactggaggtctcgaggaggataggggcatgcggaactgtgggtggagcggtgaaatgcgttgatatccacaggaactccggtggcgaaggcggcgtgctggatcctttctgacgctgaggcgcgaaagccaggggagcgaacgggattagataccccggtagtcctggccctaaacgttgggtactaggtagtagactagacatgggtttactgccgaagcaaaagtgctaagtaccccgcctggggagtatggtcgcaaggctgaaactcaaaggaattgacgggggctcacacaagcggtggagcatgtggcttaattcgaggctacgcgaagaaccttatcctagacttgacatgtgcgaaagcgctcggtagtagcttaccgaaaggtggagcggatcccgcaagggagggccgagcacaggtgctgcatggctgtcgtcagctcgtgtcgtgagatgtcgggttaagtcccataacgagcgaaacccttaccctcagttgctaattataggactctggggggactgccggtgttaaaccggaggaaggtggggatgacgtcaagtcctcatggcctttatgtctagggctgcacacgtgctacaatggcgtgaacaaagggacgccaacgcgcgagcgggagcaaatcccaaaaaacacgccccagttcagatcgcaggctgcaactcgcctgcgtgaagtcggaatcgctagtaatcgcgggtcagcaacaccgcggtgaatgtgttcctgagccttgtacacaccgcccgtcaagccacgaaaaagagaggccgccgaagtcaccttcaccggtgccgaagcggaagctcttgattgggact

SEQ ID NO: 1423 - DNA, 1434 bp, Fimbriimonas ginsengisoli
gacgaacgctggcggcgtgcctaaaacatgcaagtcgaacgagggtagtaataccttagtggcgaacggcggagtaatacataagcaacgtgccccgaagactgggatatacagccgaaaggctgggcaataccggatgtgacggaagatcggcatcgattttccattaaacagttttttgcttcgggagcggcttatggcctatcaggtagttggtgaggtaacggctcaccaagccgacgacgggtagcgggtctgagaggatggtccgctcgagtgggactgagacacggcccacacacctacgggtggcagcagttgggaatcttgcacaatgggggaaaccctgatgcagcgacgccgcgtggaggacgaagggtctaggcctgtaaactccttttactcggaaagacttaggacggtaccgagtgaataaggaccggctaactacgtgccagcagccgcggtaagacgtagggtccaagcgttgtccggatttactgggcgtaaagagcgcgtaggcggctcgttaagtgtagagtgaaatctctgggctcaccccagaaaccgctgtgcatactggcgagctggagtgtcggagaggtatgtggaattcctggtgtagcggtgaaatgcgttgatatcaggaggaacacccatggcgaaggcagcatactggccgaccactgacgctgaggcgcgaaagcgtgggtagcaaacaggattagataccctggtagtccacgccctaaacgatggatactaggcgtaaggggtatcgaccccccttgtgccgcagctaacgcactaagtatcccgcctggggagtacggccgcaaggttgaaactcaaatgaattgacggggacccgcacaagcggtggagcatgtggattaattcgatactaaccgaagaaccttacccagacttgacatcgattgaaaagtccagaaatgggctcctccctcacaaggggacatgaagacacttgttgcatggctgtcgtcagctcgtgccgtgaggtgtacggttaagtccgccaacgagcgcaacccacgtcctgtgttaccagcgagaaagtcgggcactcacaggagaccgccggtgtaagccggaggaaggtgtggatgacgtcaagtcagcatggcagttacgtctggggcttcacacatgctacaatgggcgcaacagagggccgcgataccgcgaggtggagccaatcccaaaaatacgcccccagttcagattgcagtctgcaactcgactgcatgaaggcggaatcgctagtaaacgcaggtcagctatactgcgttgaatacgttcccgggtcttgtacacaccgcccgtcaagtcacttgaatcgtcttcacccgaagtccgtggcctaacccgcaagggaaggagcggccgaaggtgaggggggtaagagggact

SEQ ID NO: 1424 - DNA, 1360 bp, Fischerella major
acatagtggcggacgggtgagtaacgcgtgagaatctagcttcaggttcgggacaacattgggaaaccgatgctaataccggatgtgccgagaggtgaaaggcttgctgcctgaagaagagctcgcgtctgattagctagttggtggtgtaagggactaccaaggcgacgatcagtagctggtctgagaggatgatcagccacactggaactgagacacggtccagactcctacgggaggcagcagtggggaattttccgcaatgggcgaaagcctgacggagcaataccgcgtgagggaggaaggctcttgggttgtaaacctcttttctcaaggaagaagttctgacggtacttgaggaatcagcatcggctaactccgtgccagcagccgcggtaatacggaggatgcaagcgttatccggaatgattgggcgtaaagcgtccgcaggtggtggtgtgtgtctattgtcaaagcatcatgcttaacatgataaaggcagtagaaactacacgactagagtgcgttcggggcagagggaattcctggtgtagcggtgaaatgcgtagagatcaggaagaacaccggtggcgaaagcgctctgctaggccgcaactgacactgagggacgaaagctaggggagcgaatgggattagataccccagtagtcctagccgtaaacgatggatactaggcgttgagagtatcgaccctctcagtgccgtagctaacgcgttaagtatcccgcctggggagtacgcacgcaagtgtgaaactcaaaggaattgacgggggcccgcacaagcggtggagtatgtggtttaattcgatgcaacgcgaagaaccttaccagggcttgacatgtctggaacttcggtgaaagctgaaggtgccttcgggagccagaacacaggtggtgcatggctgtcgtcagctcgtgtcgtgagatgttgggttaagtcccgcaacgagcgcaaccctcgttcttagttgccagcacttcgggtgggcactctagggagactgccggtgacaaaccggaggaaggtggggatgacgtcaagtcagcatgccccttacgtcctgggctacacacgtactacaatgctcgagacaaagggcagcaagtatgcgaatacaagcaaatctcagaaactcgggctcagttcagatcgcaggctgcgactcgcctgcgtgaagtcggaatcgctagtaattgcaggtcagcatactgcagtgaattcgttcccgggccttgtacacaccgcccgtcacaccatggaagctggtcacgcccgaagtcgttaccctaaccgttcgcggagggggacgccgaaggtaggactggtgactggggtg

SEQ ID NO: 1425 - DNA, 1412 bp, Fischerella muscicola
gatgaacgctggcggtatgcttaacacatgcaagtcgaacggggcttttcggagcctagtggcggacgggtgagtaacgcgtgagaatctagcttcaggttcgggacaacattgggaaaccgatgctaataccggatgtgccgtgaggtaaaaggcttgctgcctgaagatgagctcgcgtctgattagctagttggtggtgtaagggactaccaaggcgacgatcagtagctggtctgagaggatgatcagccacactggaactgagacacggtccagactcctacgggaggcagcagtggggaattttccgcaatgggcgaaagcctgacggagcaataccgcgtgagggaggaaggctcttgggttgtaaacctcttttctcaaggaagaatcttgacggtacttgaggaatcagcatcggctaactccgtgccagcagccgcggtaatacggaggatgcaagcgttatccggaatgattgggcgtaaagcgtccgcaggtggttgtgtgtgtctattgtcaaagggtcatgcttaacatgataaaggcagtggaaactacacgactagagtgcgttcggggcagagggaattcctggtgtagcggtgaaatgcgtagagatcaggaagaacaccggtggcgaaagcgctctgctaggcctgcactgacactgagggacgaaagctaggggagcgaatgggattagataccccagtagtcctagccgtaaacgatggatactaggcgttgagagtatcgaccctctcagtgccgtagctaacgcgttaagtatcccgcctggggagtacgcacgcaagtgtgaaactcaaaggaattgacgggggcccgcacaagcggtggagtatgtggtttaattcgatgcaacgcgaagaaccttaccagggcttgacatgtctgggacttcggtgaaagctgaaggtgccttcgggagccagaacacaggtggtgcatggctgtcgtcagctcgtgtcgtgagatgttgggttaagtcccgcaacgagcgcaaccctcgttcttagttgccagcacttcgggtgggcactctagggagactgccggtgacaaaccggaggaaggtggggatgacgtcaagtcagcatgccccttacgtcctgggctacacacgtactacaatgctcgagacaaagggcagcaagcaggtaactgcaagcaaatctcataaactcgggctcagttcagatcgcaggctgcaactcgcctgcgtgaaggtggaatcgctagtaattgcaggtcagcatactgcggtgaattcgttcccgggccttgtacacaccgcccgtcacaccatggaagctggtcacgcccgaagtcgttaccctaaccgttcgcggggggggacgccgaaggtaggactggtgactggggtg

SEQ ID NO: 1426 - DNA, 1430 bp, Fischerella thermalis
gatgaacgctggcggtatgcttaacacatgcaagtcgaacgatgtggggacgtagcaatgctacgtctgtgcatagtggcggacgggtgagtaacgcgtgagaatctagcttcaggttcgggacaacattgggaaaccgatgctaataccggatgtgccgagaggtgaaaggctagccgcctgaagaagagctcgcgtctgattagctagttggtggtgtaagggactaccaaggcgacgatcagtagctggtctgagaggatgatcagccacactggaactgagacacggtccagactcctacgggaggcagcagtggggaattttccgcaatgggcgaaagcctgacggagcaataccgcgtgagggaggaaggctcttgggttgtaaacctcttttctcaaggaagaagttctgacggtacttgaggaatcagcatcggctaactccgtgccagcagccgcggtaatacggaggatgcaagcgttatccggaatgattgggcgtaaagcgtccgcaggtggttgtgtgtgtctattgtcaaagcatcatgcttaacatgataaaggcagtagaaactacacgactagagtgcgttcggggcagagggaattcctggtgtagcggtgaaatgcgtagagatcaggaagaacaccggtggcgaaagcgctctgctaggccgcaactgacactgagggacgaaagctaggggagcgaatgggattagataccccagtagtcctagccgtaaacgatggatactaggcgttgagagtatcgaccctctcagtgccgtagctaacgcgttaagtatcccgcctggggagtacgcacgcaagtgtgaaactcaaaggaattgacgggggcccgcacaagcggtggagtatgtggtttaattcgatgcaacgcgaagaaccttaccagggcttgacatgtctggaacttcggtgaaagctgaaggtgccttcgggagccagaacacaggtggtgcatggctgtcgtcagctcgtgtcgtgagatgttgggttaagtcccgcaacgagcgcaaccctcgttcttagttgccagcatttcggatgggcactctagggagactgccggtgacaaaccggaggaaggtggggatgacgtcaagtcagcatgccccttacgtcctgggctacacacgtactacaatgctcgagacaaagggcagcaagtatgcgaatacaagcaaatctcagaaactcgggctcagttcagatcgcaggctgcaactcgcctgcgtgaagtcggaatcgctagtaattgcaggtcagcatactgcagtgaattcgttcccgggccttgtacacaccgcccgtcacaccatggaagctggtcacgcccgaagtcgttaccctaaccgtcaaaggagggggacgccgaaggtaggactggtgactggggtg

SEQ ID NO: 1427 - DNA, 1453 bp, Flavisolibacter tropicus
gatgaacgctagcggcaggcttaatacatgcaagtcgaggggcagcagggtggtagcaataccattgctggcgaccggcaaacgggtgcggaacacgtacgcaatctacccataactggggcatagccctccgaaaggaggattaatacctcgtaacctctgggggtggcatcacctctttagtatagctccggcggttatggatgagcgtgcggctgattaggtagttggcggggtaacggcccaccaagcctgcgatcagtaactggtgtgagagcacgaccagtcacacgggcactgagacacgggcccgactcctacgggaggcagcagtaaggaatattggtcaatggaggcaactctgaaccagccatgccgcgtgaaggatgaaggtcctctggattgtaaacttcttttacaggggaagaaaccacttttttccaagagtgttgacggtaccctgggaataagcaccggctaactccgtgccagcagccgcggtaatacggagggtgcaagcgttatccggattcactgggtttaaagggtgcgtaggagggcagggaagtccgtggtgaaatcctagagcttaactctagaactgccgtggatactctctgtcttgaatcccgtggagatgagcggaatatgtcatgtagcggtgaaatgcttagatatgacatagaacaccaattgcgaaggcagctcgttacacgaagattgactctgaggcacgaaagcgtggggatcaaacaggattagataccctggtagtccacgccctaaactatggatactcgacatacgcgatacactgtgtgtgtctgagcgaaagcattaagtatcccacctgggaagtacgaccgcaaggttgaaactcaaaggaattggcgggggtccgcacaagcggtggagcatgtggtttaattcgatgatacgcgaggaaccttacctgggctagaatgctggtggaccgtgggtgaaagctcactttgtagcaatacaccgccagtaaggtgctgcatggctgtcgtcagctcgtgccgtgaggtgttgggttaagtcccgcaacgagcgcaacccccatcactagttgccatcaggtaacgctgggaactctagtgaaactgccgtcgtaagacgcgaggaaggaggggatgatgtcaagtcatcatggcctttatgcccagggctacacacgtgctacaatggggcgtacaaagggctgccacttagcgataaggagccaatcccaaaaaacgcctctcagttcagattggagtctgcaactcgactccatgaagctggaatcgctagtaatcgtatatcagcaatgatacggtgaatacgttcccggaccttgcacacaccgcccgtcaagccatggaagccgggtgtacctaaagtcggtaaccgcaaggagccgcctagggtaaaactggtaactggggct

SEQ ID NO: 1428 - DNA, 1475 bp, Flexistipes sinusarabici
aacgaacgctggcggcgtgcttaacacatgcaagtcagggggaatcctcccttcggggaggtagtacaccggcgcacgggtgagtaacgcgtgagtgacctacccattagacctggataacccggcgaaagttgggctaagacaggatgtgttaatacacttcatggtgtattgataaaggcaggtttcggcttgtgctaatggatgggctcgcgtctgattagctagttggtaaggtaaaggcttaccaaggcgacgatcattaggcggcctgagagggtggtcgcccacactggaactgagacacggtccagactcctacgggaggcagcagtggggaattttgcgcaatgggcgagagcctgacgcagcgacgccgcgtggacgaggaaggccttcgggtcgtaaagtccttttttacgggaagaaagttattaacagtaactggttaatatttgacggtaccgtaagaataagccccggctaactccgtgccagcagccgcggtaatacggagggggcgagcgttgttcggaattactgggcgtaaagcgtacgtaggcggcgtggtaagtcggaggttaaaggctacggctcaaccgtagtagggcctttgatactatcatgctagagtgtcggagggggtagcggaattccctgtgtagcggtgaaatgcgtagatatagggaagaacaccagtagcgaaggcggctacctggccgatcactgacgctgaggtacgagagcgtgggtagcaaacaggattagataccctggtagtccacgctgtaaacgatggacgctaggtgttggaggaaccgaccccttcagtgccgaagccaacgcgttaagcgtcccgcctggggagtacgaccgcaaggttaaaactcaaaggaattgacgggggcccgcacaagcggtggagcacgtggtttaattcgatgctaaccgaagaaccttacctggtcttgacatcctccggagggactagagatagttctgtgcccgcctttggcgggagcggagagacaggtgctgcatggctgtcgtcagctcgtgccgtgaggtgttgggttaagtcccgcaacgagcgcaacccctattcatagttgccatcggtaaggccgggcactctatggatactgcccgtgataaacgggaggaaggtggggacgacgtcaagtcatcatggcctttatgaccagggctacacacgtgctacaatggtacgtacagagggcagcgaagccgcgaggtgtagcgaatccctaaaagcgtgccttagttcggattgtagtctgcaattcgactacatgaaggcggaatcgctagtaatcgcaggtcagcaaaactgcggtgaatacgttcccgggccttgtacacaccgcccgtcacaccacgggagttggttgtacctgaagccggtggcccaactgcggagggagccgtttatggtatgactggcaactggggtg

SEQ ID NO: 1429 - DNA, 1467 bp, Fluoribacter bozemanae
attgaacgctggcggcatgcttaacacatgcaagtcgaacggcagcatgacctagcttgctaggttgatggcgagtggcgaacgggtgagtaacgcgtaggaatatgccttgaagtgggggacaacttggggaaactcaagctaataccgcatgatgtctaaggacgaaagctggggaccttttaggcctggcgctttaagattagcctgcgtccgattagctagttggtggggtaagggcctaccaaggcgacgatcggtagctggtctgagaggatgaccagccacactggaactgagacacggtccagactcctacgggaggcagcagtggggaatattggacaatggggggaaccctgatccagcaatgccgcgtgtgtgaagaaggcctgagggttgtaaagcactttcagtggggaggaggtttgctaggttaagagctaggcgaatggacgttacccacagaagaagcaccggctaactccgtgccagcagccgcggtaatacggagggtgcgagcgttaatcggaattactgggcgtaaagcgtgcgtaggtggttgattaagttatctgtgaaatccctgggcttaacctgggcaggtcagatgatactggttgactcgagtatgggagagggtagtggaatttccggtgtagcggtgaaatgcgtagagatcggaaggaacaccagtggcgaaggcggctacctggcctaatactgacactgaggcacgaaagcgtggggagcaaacaggattagataccctggtagtccacgctgtaaacgatgtcaactagctgttggttatatgaaaataattagtggcgcagcaaacgcgataagttgaccgcctggggagtacggtcgcaagattaaaactcaaaggaattgacgggggcccgcacaagcggtggagcatgtggtttaattcgatgcaacgcgaagaaccttacctacccttgacatacagtgaattttgcagagatgcattagtgccttcgggaacactgatacaggtgctgcatggctgtcgtcagctcgtgtcgtgagatgttgggttaagtcccgtaacgagcgcaacccttgtccttagttgccagcgcgtaaaggtgggaactctaaggagactgccggtgacaaaccggaggaaggcggggatgacgtcaagtcatcatggcccttacgggtagggctacacacgtgctacaatgggcgatacagagggaagcgaaggggtgacctggagctaatcttagaaagtcgttcgtagtccggattggagtctgcaactcgactccatgaagtcggaatcgctagtaatcgcgaatcagcatgtcgcggtgaatacgttcccgggccttgtacacaccgcccgtcacaccatgggagtgggctgcaccagaagtagatagtctaaccttcagggggacgtttaccacggtgtggttcatgactggggtg

SEQ ID NO: 1430 - DNA, 1467 bp, Fluoribacter dumoffii
attgaacgctggcggcatgcttaacacatgcaagtcgaacggcagcacggtctagcttgctagatgggtggcgagtggcgaacgggtgagtaacgcgtaggaatatgccttgaagtgggggacaacttggggaaactcaagctaataccgcataatgtctaaggacgaaagctggggaccttttaggcctggcgctttaagattagcctgcgtccgattagctagttggtggggtaagggcctaccaaggcgacgatcggtagctggtctgagaggatggccagccacactggaactgagacacggtccagactcctacgggaggcagcagtggggaatattggacaatgggggcaaccctgatccagcaatgccgcgtgtgtgaagaaggcctgagggttgtaaagcactttcagtggggaggagggttgataggttaagagctaattaactggacgttacccacagaagaagcaccggctaactccgtgccagcagccgcggtaatacggagggtgcaagcgttaatcggaattactgggcgtaaagcgtgcgtaggtggttgattaagttatctgtgaaatccctgggcttaacctgggcaggtcagatgatactggttgactcgagtatgggagagggtagtggaatttccggtgtagcggtgaaatgcgtagagatcggaaggaacaccagtggcgaaggcggctacctggcctaatactgacactgaggcacgaaagcgtggggagcaaacaggattagataccctggtagtccacgccgtaaacgatgtcaactagctgttggatatatgaaaatatttagtggcgcagcaaacgcgataagttgaccgcctggggagtacggtcgcaagattaaaactcaaaggaattgacgggggcccgcacaagcggtggagcatgtggtttaattcgatgcaacgcgaagaaccttacctacccttgacatacagtgaattttgcagagatgcattagtgccttcgggaacactgatacaggtgctgcatggctgtcgtcagctcgtgtcgtgagatgttgggttaagtcccgtaacgagcgcaacccttgtccttagttgccagcgcgtaaaggcgggaactctaaggagactgccggtgacaaaccggaggaaggcggggatgacgtcaagtcatcatggcccttacgggtagggctacacacgtgctacaatgggtgatacagagggaagcgaaggggtgacctggagctaatcttagaaagtcgctcgtagtccggattggagtctgcaactcgactccatgaagtcggaatcgctagtaatcgcgaatcagcatgtcgcggtgaatacgttcccgggccttgtacacaccgcccgtcacaccatgggagtgggctgcaccagaagtagatagtctaaccttcgggaggacgtttaccacggtgtggttcatgactggggtg

SEQ ID NO: 1431 - DNA, 1466 bp, Fluoribacter gormanii
attgaacgctggcggcatgcttaacacatgcaagtcgaacggcagcattttctagcttgctagagagatggcgagtggcgaacgggtgagtaacgcgtaggaatatgccttgaagtgggggacaacttggggaaactcaagctaataccgcataatatctaaggatgaaagctggggaccttcgggcctggcgctttaagattagcctgcgtccgattagctagttggtggggtaagggcctaccaaggcgacgatcggtagctggtctgagaggatggccagccacactggaactgagacacggtccagactcctacgggaggcagcagtggggaatattggacaatgggggcaaccctgatccagcaatgccgcgtgtgtgaagaaggcctgagggttgtaaagcactttcagtggggaggagggtttataggttaagagctagtagactggacgttacccacagaagaagcaccggctaactccgtgccagcagccgcggtaatacggagggtgcaagcgttaatcggaattactgggcgtaaagcgtgcgtaggtggttgattaagttatctgtgaaatccctgggcttaacctgggcaggtcagatgatactggttgactcgagtatgggagagggtagtggaatttccggtgtagcggtgaaatgcgtagagatcggaaggaacaccagtggcgaaggcggctacctggcctaatactgacactgaggcacgaaagcgtggggagcaaacaggattagataccctggtagtccacgccgtaaacgatgtcaactagctgttggatatatgaatatatttagtggcgcagcaaacgcgataagttgaccgcctggggagtacggtcgcaagattaaaactcaaaggaattgacgggggcccgcacaagcggtggagcatgtggtttaattcgatgcaacgcgaagaaccttacctacccttgacatacagtgaattttgcagagatgcattagtgccttcgggaacactgatacaggtgctgcatggctgtcgtcagctcgtgtcgtgagatgttgggttaagtcccgtaacgagcgcaacccttgtccttagttgccagcgcgtaatggcgggaactctaaggagactgccggtgacaaaccggaggaaggcggggatgacgtcaagtcatcatggcccttacgggtagggctacacacgtgctacaatgggcgatacagagggaagcgaaggggtgacctggagctaatcttagaaagtcgctcgtagtccggattggagtctgcaactcgactccatgaagtcggaatcgctagtaatcgcgaatcagcatgtcgcggtgaatacgttcccgggccttgtacacaccgcccgtcacaccatgggagtgggctgcaccagaagtagatagtctaaccttcgggaggacgtttaccacggtgtggttcatgactggggtg

SEQ ID NO: 1432 - DNA, 1400 bp, Fluviicoccus keumensis
ttaccatgcagtcgagcggagacttcggtcttagcggcgaacgggtgaggaatgcctgggaatctgcctattagtgggggataacgttccgaaaggaacgctaataccgcatacgtcctacgggagaaagcaggggaccttcgggccttgcgctaatagatgagcccaggtcggattagctagttggtggggtaaaggctcaccaaggcgacgatccgtagctggtctgagaggatgatcagccacactggaactgagacacggtccagactcctacgggaggcagcagtggggaatattggacaatgggcgaaagcctgatccagccatgccgcgtgtgtgaagaaggccttcgggttgtaaagcactttaagcggggaggaagtgctcggggctaatacccctgagtgttgacgttacccgcagaataagcaccggctaactctgtgccagcagccgcggtaatacagagggtgcaagcgttaatcggaattactgggcgtaaagcgcgcgtaggcggtttgttaagtcggatgtgaaatccccgggctcaacctgggcacggcatccgatactggctgactagagtgtgggagaggaaggtagaattccaggtgtagcggtgaaatgcgtagagatctggaggaataccgatggcgaaggcagccttctggcctaacactgacgctgaggtgcgaaagcatggggagcaaacaggattagataccctggtagtccatgccgtaaacgatgtcaactagccgttggggaccttgagtctttagtggcgcagctaacgcgataagttgaccgcctggggagtacggccgcaaggttaaaactcaaatgaattgacgggggcccgcacaagcggtggagtatgtggtttaattcgatgcaacgcgaagaaccttacctggccttgacatatccggaaccctgcagagatgcgggggtgccttcgggaatcggaatacaggtgctgcatggctgtcgtcagctcgtgtcgtgagatgttgggttaagtcccgcaacgagcgcaacccttgtccttagttgccagcacgtaatggtgggaactctaaggagactgccggtgacaaaccggaggaaggcggggacgacgtcaagtcatcatggcccttacggccagggctacacacgtactacaatggtcggtacaaagggttgctaagccgcgaggcctcgctaatctcaaaaaaccgatcgtagtccagattggagtctgcaactcgactccatgaagtcggaatcgctagtaatcgcagatcagaatgctgcggtgaatacgttcccgggccttgtacacaccgcccgtcacaccatgggagtctattgcaccagaagtagctagcttaaccttcgggagggcggttacc

SEQ ID NO: 1433 - DNA, 1445 bp, Fontibacillus panacisegetis
cggggtgcctaatacatgcaagtcgagcggacttgatggagagcttgctctcctgatagttagcggcggacgggtgagtaacacgtaggcaacctgcctgtaagaccgggataactagcggaaacgttagctaataccggataatttatttcatcgcatggtggaataatgaaagacggagcaatctgtcacttacggatgggcctgcggcgcattagctagttggtggggtaaaggcctaccaaggcgacgatgcgtagccgacctgagagggtgaacggccacactgggactgagacacggcccagactcctacgggaggcagcagtagggaatcttccgcaatggacgaaagtctgacggagcaacgccgcgtgagtgatgaaggttttcggatcgtaaagctctgttgccagggaagaacgtcttggagagtaactgctctgagagtgacggtacctgagaagaaagccccggctaactacgtgccagcagccgcggtaatacgtagggggcaagcgttgtccggaattattgggcgtaaagcgcgcgcaggcggtcgattaagtctggtgtttaatcctggggctcaactccgggtcgcactggaaactggtagacttgagtgcagaagaggagagtggaattccacgtgtagcggtgaaatgcgtagagatgtggaggaacaccagtggcgaaggcgactctctgggctgtaactgacgctgaggcgcgaaagcgtggggagcaaacaggattagataccctggtagtccacgccgtaaacgatgaatgctaggtgttaggggtttcgatacccttggtgccgaagttaacacattaagcattccgcctggggagtacggtcgcaagactgaaactcaaaggaattgacggggacccgcacaagcagtggagtatgtggtttaattcgaagcaacgcgaagaaccttaccaggtcttgacatcccgatgcaaacactagagatagtgtccttcttcggaacatcggagacaggtggtgcatggttgtcgtcagctcgtgtcgtgagatgttgggttaagtcccgcaacgagcgcaacccttaactttagttgccagcacgccgtggtgggcactctagagtgactgccggtgacaaaccggaggaaggtggggatgacgtcaaatcatcatgccccttatgacctgggctacacacgtactacaatggctggtacaacgggaagcgaagccgcgaggtgaagccaatcctataaaagccagtctcagttcggattgtaggctgcaactcgcctacatgaagtcggaattgctagtaatcgcggatcagcatgccgcggtgaatacgttcccgggtcttgtacacaccgcccgtcacaccacgagagtttacaacacccgaagtcggtgaggtaaccgcaaggagccagccgccgaaagt

SEQ ID NO: 1434 - DNA, 1475 bp, Fontibacillus phaseoli
  misc_feature (102)..(102): n is a, c, g, or t
  misc_feature (988)..(988): n is a, c, g, or t
  misc_feature (992)..(992): n is a, c, g, or t
  misc_feature (1006)..(1006): n is a, c, g, or t
  misc_feature (1120)..(1120): n is a, c, g, or t
gacgaacgctggcggcgtgcctaatacatgcaagtcgagcggacttgatggagagcttgctctccggatagttagcggcggacgggtgagtaacacgtaggnaacctgcctgtaagactgggataactaccggaaacggtagctaataccggataatttatttcttcgcatggagaaataatgaaagacggagcaatctgtcacttacggatgggcctgcggcgcattagctagttggtggggtaacggctcaccaaggcgacgatgcgtagccgacctgagagggtgaacggccacactgggactgagacacggcccagactcctacgggaggcagcagtagggaatcttccgcaatggacgaaagtctgacggagcaacgccgcgtgagtgaagaaggttttcggatcgtaaagctctgttgccagggaagaacgtccgttagagtaactgctaacggagtgacggtacctgagaagaaagccccggctaactacgtgccagcagccgcggtaatacgtagggggcaagcgttgtccggaattattgggcgtaaagcgcgcgcaggcggtcatttaagtctggtgtataatcctggggctcaactccgggtcgcactggaaactgggtgacttgagtgcagaagaggagagtggaattccacgtgtagcggtgaaatgcgtagatatgtggaggaacaccagtggcgaaggcgactctctgggctgtaactgacgctgaggcgcgaaagcgtggggagcaaacaggattagataccctggtagtccacgccgtaaacgatgaatgctaggtgttaggggtttcgatacccttggtgccgaagttaacacattaagcattccgcctggggagtacggtcgcaagactgaaactcaaaggaattgacggggacccgcacaagcagtggagtatgtggtttaattcgaagcaacgcgaagaaccttaccaggtcttgacatcccgatgnccanactagagatattgnccttcttcggaacatcggagacaggtggtgcatggttgtcgtcagctcgtgtcgtgagatgttgggttaagtcccgcaacgagcgcaacccttaactttagttgccagcaattnggttgggcactctagagtgactgccggtgacaaaccggaggaaggtggggatgacgtcaaatcatcatgccccttatgacctgggctacacacgtactacaatggccggtacaacgggaagcgaagtcgcgagatggagcgaatcctataaaagccggtctcagttcggattgcaggctgcaactcgcctgcatgaagtcggaattgctagtaatcgcggatcagcatgccgcggtgaatacgttcccgggtcttgtacacaccgcccgtcacaccacgagagtttacaacacccgaagtcggtgaggtaaccgcaaggagccagccgccgaaggtggggtagatgattggggtg

SEQ ID NO: 1435 - DNA, 1438 bp, Fonticella tunisiensis
gacgaacgctggcggcgtgcctaacacatgcaagtcgagcggggggagttcttcggaacgaacctagcggcggacgggtgagtaacacgtgggcaacctgccttgaggagggggataacaggatgaaagtcctgctaataccgcataaaccggtgctgtcgcatgatggcatcggcaaaggagcaatccgcctcaagatgggcccgcggcgcattagctagttggtggggtaacggcctaccaaggcgacgatgcgtagccgacctgagagggtgatcggccacattggaactgagacacggtccagactcctacgggaggcagcagtggggaatattgcacaatgggcgaaagcctgatgcagcaacgccgcgtgagcgatgaaggccttcgggttgtaaagctctgtcttcgctgacgaaatctgacggtaagcgaggaggaagccacggctaactacgtgccagcagccgcggtaatacgtaggtggcaagcgttgtccggaattactgggcgtaaagggtgcgtaggcggtcctttaagtgggatgtgaaatccctgggcttaacccaggaactgcattccaaactggaggactagagtgcaggagaggaaagcggtattcccagtgtagcggtgaaatgcgtagagattgggaggaacaccagtagcgaaggcggctttctggaatgtaactgacgctgaggcacgaaagcgtggggagcaaacaggattagataccctggtagtccacgccgtaaacgatgagtactaggtgtgagggcgtaagccttcgtgccgtagttaacacattaagtactccgcctgggaagtacgatcgcaagattaaaactcaaaggaattgacgggggcccgcacaagcagcggagcatgtggtttaattcgaagcaacgcgaagaaccttaccaggacttgacatccagagaatcctgtggaaacacgggagtgccccttcgggggagctctgagacaggtggtgcatggttgtcgtcagctcgtgtcgtgagatgttgggttaagtcccgcaacgagcgcaacccctgtcgttagttgctaccattaagttgagcactctaacgagactgccggggttaactcggaggaaggtggggatgacgtcaaatcatcatgccccttatgttctgggctacacacgtgctacaatggccggtacaaagagaagcaagaccgtgaggtggagcaaatctcaaaaaccggtcccagttcggattgtaggctgcaactcgcctacatgaagccggagttgctagtaatcgcgaatcagaatgtcgcggtgaatgcgttcccgggccttgtacacaccgcccgtcacaccatgagagtcggcaacacccgaagtcagtgggccaacccgaaagggaagcagctgccgaaggtggggtcgatgattggggtg

SEQ ID NO: 1436 - DNA, 1453 bp, Fontimonas thermophila
attgaacgctggcggcatgcctaacacatgcaagtcgaacgaggtgtagcaatacacctagtggcggacgggtgagtaatacgtaggaatctgcctcagagtgggggatagcccggggaaacccggattaataccgcatgatctccacggagcaaagcaggggaccgcaaggccttgcgctctgagaggagcctacgtctgattagctagttggtggggtaatggcctaccaaggcgacgatcagtagctggtctgagaggacgatcagccacaccggaactgagacacggtccggactcctacgggaggcagcagtggggaatattggacaatgggcgcaagcctgatccagcaatgccgcgtgtgtgaagaaggccttcgggttgtaaagcactttagccagggaagaaaaagctcgacctaatacgccgagccttgacggtacctggagaataagcaccggctaactctgtgccagcagccgcggtaatacagagggtgcaagcgttaatcggatttactgggcgtaaagcgtgtgtaggtggctgttcaagtcggttgtgaaagccccgggctcaacctgggaattgcttccgagactgagcggctagagtacggtagagggcggtggaatttccggtgtagcggtgaaatgcgtagatatcggaaggaacaccaatggcgaaggcagccgcctgggcctgtactgacactgagacacgaaagcgtggggatcaaacaggattagataccctggtagtccacgccgtaaacgatgagaacttgacgtcggtttgcttacgcgaatcggtgtcgcagctaacgcgctaagttctccgcctggggagtacggccgcaaggttgaaactcaaaggaattgacgggggcccgcacaagcggtggagtatgtggtttaattcgatgcaacgcgaagaaccttacctggccttgacatgctaggaatcctgcagagatgtgggagtgcccgcaagggaacctagacacaggtgctgcatggctgtcgtcagctcgtgtcgtgagatgttgggttaagtcccgcaacgagcgcaacccttgcccttagttgcccccattcagttgagcactctaaggggaccgccggtgacaaaccggaggaaggtggggatgacgtcaagtcatcatggcccttatggccagggctacacacgtactacaatggtcggtacagagggtcgccaagtcgcgagacggagctaatcccagaaagccgatcgtagtccggattggagtctgcaactcgactccatgaagtcggaatcgctagtaatcgccgatcagcagttgcggcggtgaatacgttcccgggccttgtacacaccgcccgtcacaccatgggagttggctgcaccagaagccggtagtctaaccgcaaggaggacgccgtccacggtgtggtcaatgactggggtg

SEQ ID NO: 1437 - DNA, 1456 bp, Formivibrio citricus
attgaacgctggcggcatgctttacacatgcaagtcgaacggcagcgcggacttcggtctggcggcgagtggcgaacgggtgagtaatgcatcggaacgtacctattagtgggggataacgcttcgaaaggagtgctaataccgcatacgacctgagggtgaaagtgggggaccgcaaggcctcacgctaatagatcggccgatgtctgattagctagttggtggggtaaaggcccaccaaggcgacgatcagtagcgggtcttagaggacgatccgccacactgggactgagacacggcccagactcctacgggaggcagcagtggggaatcttggacaatgggcgcaagcctgatccagcaatgccgcgtgggtgaagaaggccttcgggttgtaaagcccttttgtttgggagcaaatcctgcgggttaataccctgtggggatgagagtaccaaaagaataagcaccggctaactacgtgccagcagccgcggtaatacgtagggtgcaagcgttaatcggaattactgggcgtaaagcgtgcgcaggtggtttgacaagaccgacgtgaaagccccgggctcaacctgggaactgcgttggtgactgtctgactagagtgtggcagaggggggtggaattccgcgtgtagcagtgaaatgcgtagagatgcggaggaacaccgatggcgaaggcagccccctgggctaacactgacactcatgcacgaaagcgtggggagcaaacaggattagataccctggtagtccacgccctaaacgatgtcaactggttgttgggattttcggatcttagtaacgaagctaacgcgagaagttgaccgcctggggagtacggccgcaaggttaaaactcaaaggaattgacgggggcccgcacaagcggtggatgatgtggattaattcgatgcaacgcgaaaaaccttacctggtcttgacatgtacggaatcttttagagatagaagagtgccttcgggagccgtaacacaggtgctgcatggctgtcgtcagctcgtgtcgtgagatgttgggttaagtcccgcaacgagcgcaacccttgccattagttgccatcattaagttgggcactttaatgggactgccggtgacaaaccggaggaaggtggggatgacgtcaagtcctcatggcccttatgaccagggcttcacacgtcatacaatggtcggtacagagggtcgctaagccgcgaggtggtgccaatctcataaaaccgatcgtagtccggattgcactctgcaactcgagtgcatgaagtcggaatcgctagtaatcgcggatcagcatgtcgcggtgaatacgttcccgggccttgtacacaccgcccgtcacaccatgggagtgggtttcgccagaagtagctagtctaaccttcgggaggacggttaccacggcgggattcatgactggggtg

SEQ ID NO: 1438 - DNA, 1319 bp, Franconibacter pulveris
attgaacgctggcggcaggcctaacacatgcaagtcgagcggcacaggaattagcttgctctcgcctgacgagcggcggacgggtgagtaatgtctgggaaactgcctgatggagggggataaccactggaaacggtggctaataccgcataacgtcgcaagaccaaagtgggggaccttcgggcctcatgccatcagatgtgcccagatgggattagcttgtaggtggggtaacggctcacctaggcgacgatccctagctggtctgagaggatgaccagccacactggaactgagacacggtccagactcctacgggaggcagcagtggggaatattgcacaatgggcgcaagcctgatgcagccatgccgcgtgtatgaagaaggccttcgggttgtaaagtactttcagtggggaggaaggcgtgatgtttaatacgcatcgcgattgacgttacccacagaagaagcaccggctaactccgtgccagcagccgcggtaatacggagggtgcaagcgttaatcggaattactgggcgtaaagcgcacgcaggcggtctgttaagtcagatgtgaaatccccgggctcaacccgggaactgcatttgaaactggcaggcttgagtctcgtagaggggggtagaattccaggtgtagcggtgaaatgcgtagagatctggaggaataccggtggcgaaggcggccccctggacgaagactgacgctcaggtgcgaaagcgtggggagcaaacaggattagataccctggtagtccacgccgtcaacgatgtcgacttggaggttgtgcccttgaggcgttgcttccggagctaacgcgttaagtcgaccgcctggggagtacggccgcaaggttaaaactcaaatgaattgacgggggcccgcacaagcggtggagcatgtggtttaattcgatgcaacgcgaagaaccttacctggccttgacatccagagaactttccagagatggattggtgcttcgggaactctgagacaggtgctgcatggctgtcgtcagctcgtgttgtcaaatgttgggttaagtcccgcaacgagcgcaacccttatcctttgttgccagcggttcggccgggaactcaaaggagactgccggtgataaaccggaggaaggtggggatgacgtcaagtcatcatggcccttacggccagggctacacacgtgctacaatggcgcatacaaagagaagcgacctcgcgagagcaagcggacctcataaagtgcgtcgtagtccggattggagtctgcaactcgactccatgaagtcggcatcgctacaa

SEQ ID NO: 1439 - DNA, 1432 bp, Frankia casuarinae
gacgaacgctggcggcgtgcttaacacatgcaagtcgagcggggagcttcggctctcagcggcgaacgggtgagtaacacgtgggcaacctgccccgagctctggaataacctcgggaaaccggggctaatgccggatatgacattgccgggcatctggtggtgtggaaagatttatcggctcgggatgggcccgcggcctatcagcttgttggtggggtgatggcctaccaaggcgacgacgggtagccggcctgagagggcgaccggccacactgggactgagacacggcccagactcctacgggaggcagcagtggggaatattgcgcaatgggcggaagcctgacgcagcgacgccgcgtgggggatgacggccttcgggttgtaaacctctttcagcagggacgaagcgagagtgacggtacctgcagaagaagcaccggccaactacgtgccagcagccgcggtaatacgtaggatgcaagcgttgtccggaattattgggcgtaaagagctcgtaggcggcctgttgcgtcggctgtgaaaacccggggctcaactccgggcctgcagtcgatacgggcaggctagagtccggcaggggagactggaattcctggtgtagcggtgaaatgcgcagatatcaggaggaacaccggtggcgaaggcgggtctctgggccggaactgacgctaaggagcgaaagcgtggggagcgaacaggattagataccctggtagtccacgccgtaaacgttgggcgctaggtgtgggggaccttccacggcctccgtgccgcagctaacgcattaagcgccccgcctggggagtacggccgcaaggctaaaactcaaaggaattgacgggggcccgcacaagcggcggagcatgtggcttaattcgatgcaacgcgaagaaccttaccagggcttgacatgcagggaaatctcgtagagatacggggtccgtaagggtcctgcacaggtggtgcatggctgtcgtcagctcgtgtcgtgagatgttgggttaagtcccgcaacgagcgcaaccctcgtcctatgttgccagcgagtcgtgtcggggactcataggagactgccggggtcaactcggaggaaggtggggatgacgtcaagtcatcatgccccttacgtcctgggctgcacacatgctacaatggccggtacaaagggctgcgatgccgtgaggtggagcgaatcccaaaaagccggtctcagttcggatcggggtctgcaactcgaccccgtgaagtcggagtcgctagtaatcgcagatcagcaatgctgcggtgaatacgttcccgggccttgtacacaccgcccgtcacgtcacgaaagtcggtaacacccgaagccggtggcctaacccttgtggggggagccgtcgaaggtgggaccggcgattgggacg

SEQ ID NO: 1440 - DNA, 1467 bp, Frateuria aurantia
attgaacgctggcggtatgcttaacacatgcaagtcgaacggcagcacagcagagcttgctctgtgggtggcgagtggcggacgggtgagtaatacatcgggacctacccagacgtgggggataacgtagggaaacttacgctaataccgcatacgtcctacgggagaaagcaggggatcttcggaccttgcgcggttggacggaccgatgttcgattagcttgttggtgaggtaatggctcaccaaggcgacgatcgatagctggtctgagaggatgatcagccacactgggactgagacacggcccagactcctacgggaggcagcagtggggaatattggacaatgggcgcaagcctgatccagcaataccgcgtgtgtgaagaaggccttcgggttgtaaagcacttttatcaggaacgaaacgctgtcggttaatacccggcggaactgacggtacctgaggaataagcaccggctaacttcgtgccagcagccgcggtaatacgaagggtgcaagcgttaatcggaattactgggcgtaaagcgtgcgtaggcggtttgttaagtctgttgtgaaatccccgggctcaacctgggaatggcaatggatactggcaagctagagtgtgatagaggatggtggaattcccggtgtagcggtgaaatgcgtagagatcgggaggaacatcagtggcgaaggcggccatctggatcaacactgacgctgaggcacgaaagcgtggggagcaaacaggattagataccctggtagtccacgccctaaacgatgcgaactggatgttggtctcaactcggagatcagtgtcgaagctaacgcgttaagttcgccgcctggggagtacggtcgcaagactgaaactcaaaggaattgacgggggcccgcacaagcggtggagtatgtggtttaattcgatgcaacgcgaagaaccttacctggccttgacatgtctggaatcctgtagagatacgggagtgccttcgggaatcagaacacaggtgctgcatggctgtcgtcagctcgtgtcgtgagatgttgggttaagtcccgcaacgagcgcaacccttgtccttagttgccagcacgtaatggtgggaactctaaggagactgccggtgacaaaccggaggaaggtggggatgacgtcaagtcatcatggcccttacggccagggctacacacgtactacaatggtcggtacagagggttgcaataccgcgaggtggagccaatcccagaaagccgatcccagtccggatcgaagtctgcaactcgacttcgtgaagtcggaatcgctagtaatcgcggatcagctatgccgcggtgaatacgttcccgggccttgtacacaccgcccgtcacaccatgggagtgagctgctccagaagccgttagtctaaccgcaagggggacgacgaccacggagtggttcatgactggggtg

SEQ ID NO: 1441 - DNA, 1461 bp, Frateuria terrea
attgaacgctggcggcatgcctaacacatgcaagtcgaacggcagcgggtccttcgggatgccggcgagtggcggacgggtgagtaatgcatcgggacctgcccagacgtgggggataacgtagggaaacttacgctaataccgcatacgtcctacgggagaaagcaggggaccttcgggccttgcgcggttggatggaccgatgtgcgattagctagttggcggggtaatggcccaccaaggcgacgatcgctagctggtctgagaggatgatcagccacactgggactgagacacggcccagactcctacgggaggcagcagtggggaatattggacaatgggcgcaagcctgatccagcaatgccgcgtgtgtgaagaaggccttcgggttgtaaagcacttttatcaggaacgaaacactgtcggttaatacccggcgggactgacggtacctgaggaataagcaccggctaacttcgtgccagcagccgcggtaatacgaagggtgcaagcgttaatcggaattactgggcgtaaagcgtgcgtaggcggtttcttaagtctgctgtgaaatccccgggctcaacctgggaatggcagtggatactgggaggctagagtgtgtcagaggatggtggaattcccggtgtagcggtgaaatgcgtagagatcgggaggaacatcagtggcgaaggcggccatctgggacaacactgacgctgaggcacgaaagcgtggggagcaaacaggattagataccctggtagtccacgccctaaacgatgcgaactggatgttggtctcaactcggagatcagtgtcgaagctaacgcgttaagttcgccgcctggggagtacggtcgcaagactgaaactcaaaggaattgacgggggcccgcacaagcggtggagtatgtggtttaattcgatgcaacgcgaagaaccttacctggccttgacatgtctggaatccttgagagatcgaggagtgccttcgggaaccagaacacaggtgctgcatggctgtcgtcagctcgtgtcgtgagatgttgggttaagtcccgcaacgagcgcaacccttgtccttagttgccagcacgtaatggtgggaactctaaggagactgccggtgacaaaccggaggaaggtggggatgacgtcaagtcatcatggcccttacggccagggctacacacgtactacaatggtcggtacagagggttgcaataccgcgaggtggagccaatcccagaaagccgatcccagtccggatcgaagtctgcaactcgacttcgtgaagtcggaatcgctagtaatcgcggatcagctatgccgcggtgaatacgttcccgggccttgtacacaccgcccgtcacaccatgggagtgagttgctccagaagccgttagtctaaccgcaagggggacgacgaccacggagtggttcatgactggggtg

SEQ ID NO: 1442 - DNA, 1362 bp, Frederiksenia canicola
attgaacgctggcggcaggcttaacacatgcaagtcgaacggtagcaggagaaagcttgctttcttgctgacgagtggcggacgggtgagtaatgcttgggaatctggcttatggagggggataactacgggaaactgtagctaataccgcgtaatatcgagagattaaagactgggacctacgggccagttgccataagatgagcccaagtgggattaggtagttggtggggtaaaggcctaccaagcccgcgatctctagctggtctgagaggatgaccagccacactggaactgagacacggtccagactcctacgggaggcagcagtggggaatattgcacaatggggggaaccctgatgcagccatgccgcgtgaatgaagaaggccttcgggttgtaaagttctttcggtggtgaggaaggtatcaactttaatagagttggtaattgacgttatccacagaagaagcaccggctaactccgtgccagcagccgcggtaatacggagggtgcgagcgttaatcggaatgactgggcgtaaagggcacgcaggcggattgttaagtgagatgtgaaagccccgggcttaacctgggaattgcatttcagactggcaatctagagtattttagggaggggtagaattccacgtgtagcggtgaaatgcgtagagatgtggaggaataccgaaggcgaaggcagccccttgggaatatactgacgctcatgtgcgaaagcgtggggagcaaacaggattagataccctggtagtccacgctgtaaacgatgtcgatttggggattggggtttaactctggtgcccgaagctaacgtgataaatcgaccgcctggggagtacggccgcaaggttaaaactcaaatgaattgacgggggcccgcacaagcggtggagcatgtggtttaattcgatgcaacgcgaagaaccttacctactcttgacatccatggaagttcgcagagatgtgaatgtgccttcgggaaccatgagacaggtgctgcatggctgtcgtcagctcgtgttgtgaaatgttgggttaagtcccgcaacgagcgcaacccttatcctttgttgccagcgattaggtcgggaactcaaaggagactgccagtgataaactggaggaaggtggggatgacgtcaagtcatcatggcccttacgagtagggctacacacgtgctacaatggtgcatacagagggaagcaaaatggcgacatggagcaaatctcacaaagtgcatctaagtccggattggagtctgcaactcgactccatgaagtcggaatcgctagtaatcgcaaatcagaatgttgcggtgaatacgttcccgggcctt

SEQ ID NO: 1443 - DNA, 1411 bp, Fremyella diplosiphon
gatgaacgctggcggtatgcttaacacatgcaagtcgaacggtctcttcggagatagtggcggacgggtgagtaacgcgtgagaatctagctctaggtcggggacaaccactggaaacggtggctaataccggatgtgccggaaggtgaaagatttattgcctagagatgagctcgcgtctgattagctagtaggtgtggtaagagcgcacctaggcgacgatcagtagctggtctgagaggatgatcagccacactgggactgagacacggcccagactcctacgggaggcagcagtggggaattttccgcaatgggcgaaagcctgacggagcaataccgcgtgagggaggaaggctcttgggttgtaaacctcttttctcaaggaagaaaaaaatgacggtacttgaggaataagcatcggctaactccgtgccagcagccgcggtaatacggaggatgcaagcgttatccggaatgattgggcgtaaagcgtccgcaggtggcaatgtaagtctgctgttaaagagtgaggctcaacctcataagagcagtggaaactacatagctagagtgcgttcggggcagagggaattcctggtgtagcggtgaaatgcgtagagatcaggaagaacaccggtggcgaaagcgctctgctaggccgcaactgacactgagggacgaaagctaggggagcgaatgggattagataccccagtagtcctagccgtaaacgatggatactaggcgtggcttgtatcgacccgagccgtgccggagctaacgcgttaagtatcccgcctggggagtacgcacgcaagtgtgaaactcaaaggaattgacgggggcccgcacaagcggtggagtatgtggtttaattcgatgcaacgcgaagaaccttaccaagacttgacatgtcgcgaatcctcttgaaagggaggagtgccttcgggagcgcgaacacaggtggtgcatggctgtcgtcagctcgtgtcgtgagatgttgggttaagtcccgcaacgagcgcaaccctcgtttttagttgccagcattaagttgggcactctagagagactgccggtgacaaaccggaggaaggtggggatgacgtcaagtcagcatgccccttacgtcttgggctacacacgtactacaatgctacggacaaagggcagcgagctagcgatagcaagcaaatctcataaaccgtggctcagttcagatcgcaggctgcaactcgcctgcgtgaaggaggaatcgctagtaattgcaggtcagcatactgcagtgaattcgttcccgggccttgtacacaccgcccgtcacaccatggaagctggcaacgcccgaagtcattactccaaccattcgtgggggaggatgccgaaggcagtgctggtgactggggtg

SEQ ID NO: 1444 - DNA, 1456 bp, Frischella perrara
attgaacgctggcggcaggcttaacacatgcaagtcgaacggtaacatgagtgcttgcacttgatgacgagtggcggacgggtgagtaatgtatggggatctgccgaatggattgggacaacagttggaaacgactgctaataccgaataatgtcgcgagaccaaagggtgctttcgggcacttgccatttgatgaacccatatgagattagctagttggtggggtaaaggctcaccaaggcgacgatctctagctggtctgagaggatgaccagccacactggaactgagacacggtccagactcctacgggaggcagcagtggggaatattgcacaatgggggaaaccctgatgcagccatgccgcgtgtatgaagaaggccttagggttgtaaagtactttcggtgatgaggaagttatgtgtgggataagcacatataattgacgttagttacagaagaagcaccggctaactccgtgccagcagccgcggtaatacggagggtgcgagcgttaatcggaatgactgggcgtaaagggcatgtaggcggatgattaagttaggtgtgaaagcctcgggctcaacctgagaatagcatttaaaactggtgatctggagtactgtagagggaggtagaattccacgtgtagcggtgaaatgcgtagagatgtggaggaataccggtggcgaaggcggccttctggacagatactgacgctgagatgcgaaagcgtggggagcaaacaggattagataccctggtagtccacgctgtaaacgatgtcgatttggagtttgttgcctagagtgatgggctccgaagctaacgcgataaatcgaccgcctggggagtacggccgcaaggttaaaactcaaatgaattgacgggggcccgcacaagcggtggagcatgtggtttaattcgatgcaacgcgaagaaccttacctggtcttgacatccacagaatctttcagagatgagggagtgccttcgggaactgtgagacaggtgctgcatggctgtcgtcagctcgtgttgtgaaatgttgggttaagtcccgcaacgagcgcaacccttatcctttgttgccagcgattaggtcgggaactcaaaggagactgccgttgataaaacggaggaaggtggggacgacgtcaagtcatcatggcccttacgaccagggctacacacgtgctacaatggcgtatacaaagggaagcgaaggtgcgagctggagcggacctcctaaagtacgtctaagtccggattggagtctgcaactcgactccatgaagtcggaatcgctagtaatcgtgaatcagaatgtcacggtgaatacgttcccgggccttgtacacaccgcccgtcacaccatgggagtgggttgcaccagaagtagatagcttaaccgcaaggggggcgtttaccacggtgtgattcatgactggggtg

SEQ ID NO: 1445 - DNA, 1468 bp, Fuerstia marisgermanicae
aatgaacgttggcggcgtggattaggcatgcaagtcgagcgagaatttgtgaatggatccttcgggtgaagtgatcaaaggaaagcggcaaacggcgtagtaatgcgtagatacatgccctcgggttgggaatagccacgggaaactgtgggtaatgcccaataatctctgcggagcaaaggtgtgattccgcccgaggagtggtttacgtgatattagcttgttggtggggtaatggcctaccaaggcgacgatgtctagggggtgtgagagcatggcccccacgaccggaactgagacactgtccggacacctacgggtggctgcagtcgagaatcttccgcaatgggcgaaagcctgacggagcgacgccgcgtgcgggatgaaggcccttgggttgtaaaccgctgtcagaggggatgaaatcatggttggcaatccttccatgttgacagagcctcagaggaagcacgggctaagtacgtgccagcagccgcggtaacacgtactgtgcgaacgttattcggaatcactgggcttaaagggtatgtaggcggttgatcaagtcagatgtgaaatgctacagctcaactgtagcactgcgtttgaaactgatcggctagagtattccagaggtatgcggaactgccagtggagcggtgaaatgcgttgatattggcaggaacaccagaggcgaaggcggcatactgggggataactgacgctgagatacgaaagccagggtagcgaacgggattagataccccggtagtcctggctgtaaacgatgagcactgggcgagaggcgattcgtcgctttttgccgtagggaaaccattaagtgctccgcctggggagtatggtcgcaaggctgaaactcaaaggaattgacgggggctcacacaagcggtggatgatgtggcttaattcgaggcaacgcgaagaaccttatcctggacttgacatgcttgaattagccctatgaaagtagggtgacgccttcgggtggaacttgcacaggtgctgcatggctgtcgtcagctcgtgtcgtgagacgtcgcgttaagtcgcttaacgagcgcaacccttgtccttagttgccagcacgtaatggtggggactctaaggagaccgccggtgtcaaaccggaggaaggcggggacgacgtcaagtcatcatggcctttatgtccagggctgcacacgtcatacaatgcaacatacaaagggcagctaacccgcgagggggcgctaatctcagaaagtgttgctcagttcggattgtaggctgcaactcgcctacatgaagctggaatcgctagtaatcgcaggtcatctatactgcggtgaatatgttcctgagccttgtacacaccgcccgtcaagccacgaaagcggggggcgcctaaagtcgctgtgctaactcttcggagaggcaggtgcctagggcgaacttcgtgattgggact

SEQ ID NO: 1446 - DNA, 1405 bp, Fulvimarina manganoxydans
aacgaacgctggcggcaggcttaacacatgcaagtcgagcgccccgcaaggggagcggcagacgggtgagtaacgcgtgggaacgtacccttctctacgggatagctccgggaaactggaattaataccgtatacgtccgagaggagaaagatttatcggagaaggatcggcccgcgttggattagctagttggtggggtaaaggcctaccaaggcgacgatccatagctggtctaagaggatgatcagccacattgggactgagacacggcccaaactcctacgggaggcagcagtggggaatattggacaatgggcgcaagcctgatccagccatgccgcgtgagtgatgacggtcttaggattgtaaagctctttcaccggagacgataatgacggtatccggagaagaagccccggctaacttcgtgccagcagccgcggtaatacgaagggggctagcgttgttcggaattactgggcgtaaagcgcacgtaggcggaccaatcagtcaggggtgaaatcccggggctcaaccccggaacggcctttgatactgttggtctagagtgtgagagaggtgagtggaattgcgagtgtagaggtgaaattcgtagatattcgcaggaacaccagtggcgaaggcggctcactggctcacaactgacgctgaggtgcgaaagcgtggggagcaaacaggattagataccctggtagtccacgccgtaaacgatggaagctagccgtcgggttgtttacagctcggtggcgcagttaacgcattaagcttcccgcctggggagtacggtcgcaagattaaaactcaaaggaattgacgggggcccgcacaagcggtggagcatgtggtttaattcgaagcaacgcgcagaaccttaccagctcttgacatgccacgacggttcccggagacgggttcctccctttgggcgtggacacaggtgctgcatggctgtcgtcagctcgtgtcgtgagatgttgggttaagtcccgcaacgagcgcaaccctcgcccttagttgccatcattcagttgggcactctaaggggactgccggtgataagccgagaggaaggtggggatgacgtcaagtcctcatggcccttacgggctgggctacacacgtgctacaatggcggtgacaatgggcagcaagccagcgatggtgagctaatctccaaaagccgtctcagttcggattgcactctgcaactcgggtgcatgaagttggaatcgctagtaatcgtggatcagcatgccacggtgaatacgttcccgggccttgtacacaccgcccgtcacaccatgggagttggtttgacccgaagatggtgcgctaacccgataagggaggcagccagccacggtcaggtcagcgactggggtg

SEQ ID NO: 1447 - DNA, 1467 bp, Fulvimonas soli
  misc_feature (162)..(162): n is a, c, g, or t
attgaacgctggcggcatgcctaacacatgcaagtcgaacggcagcacagaggagcttgctccttgggtggcgagtggcggacgggtgagtaaggcatcgggatctgccccgacgtgggggataacgtagggaaacttacgctaataccgcatacgtcctangggagaaagcgggggaccttcgggcctcgcgcggcgggatgaaccgatgtgcgattagctagttggcggggtaacggcccaccaaggcgacgatcgctagctggtctgagaggatgatcagccacactgggactgagacacggcccagactcctacgggaggcagcagtggggaatattggacaatgggcgcaagcctgatccagcaatgccgcgtgtgtgaagaaggccttcgggttgtaaagcacttttatcaggagcgaaatgccatcggccaatacccggtggagctgacggtacctgaggaataagcaccggctaacttcgtgccagcagccgcggtaatacgaagggtgcaagcgttaatcggaattactgggcgtaaagcgtgcgtaggcggtttcttaagtctgctgtgaaatccccgggctcaacctgggaatggcagtggatactggggagctagagtgtgatagaggatggtggaattcccggtgtagcggtgaaatgcgtagagatcgggaggaacatcagtggcgaaggcggccatctggatcaacactgacgctgaggcacgaaagcgtggggagcaaacaggattagataccctggtagtccacgccctaaacgatgcgaactggatgttggtctcaactcggagatcagtgtcgaagctaacgcgttaagttcgccgcctggggagtacggtcgcaagactgaaactcaaaggaattgacgggggcccgcacaagcggtggagtatgtggtttaattcgatgcaacgcgaagaaccttacctggccttgacatgtccggaatcctgcagagatgcgggagtgccttcgggaatcggaacacaggtgctgcatggctgtcgtcagctcgtgtcgtgagatgttgggttaagtcccgcaacgagcgcaacccttgtccttagttgccagcgcgtaaaggcgggaactctaaggagactgccggtgacaaaccggaggaaggtggggatgacgtcaagtcatcatggcccttacggccagggctacacacgtactacaatggtcggtacagagggttgcaagaccgcgaggtggagccaatcccagaaagccgatcccagtccggattggagtctgcaactcgactccatgaagtcggaatcgctagtaatcgcagatcagctatgctgcggtgaatacgttcccgggccttgtacacaccgcccgtcacaccatgggagtgagttgctccagaagccgttagcctaaccgcaaggggggcgacgaccacggagtggttcatgactggggtg

SEQ ID NO: 1448 - DNA, 1379 bp, Gallaecimonas pentaromativorans
agtcgagcggtagaggggagcttgcttcccttgagagcggcggacgggtgagtaatacgtagggagctgcctgatagtgggggataaccattggaaacgatggctaataccgcatgatgtctacggaccaaagagggggaccttcgggcctcttgctatcagatgcacctacgtgggattagctagttggtgaggtaacggctcaccaaggcgacgatccctagctggtctgagaggatgatcagccacactgggactgagacacggcccagactcctacgggaggcagcagtggggaatattggacaatgggcgcaagcctgatccagccatgccgcgtgtgtgaagaaggccttcgggttgtaaagcactttcagcgaggaggaaaggttgtagcttgatacgctatagctgtgacgttactcgcagaagaagcaccggctaactccgtgccagcagccgcggtaatacggagggtgcaagcgttaatcggaattactgggcgtaaagcgcacgcaggcggcttgttaagttagatgtgaaagccccgggcttaacctgggaattgcatttaagactggcaagctagagtcttggagaggggggtggaatttccggtgtagcggtgaaatgcgtagagatcggaaggaacatcaatggcgaaggcaaccccctggccaaagactgacgctcaggtgcgaaagcgtggggagcaaacaggattagataccctggtagtccacgccgcaaacgatgtcaacttggagtttgtgttcttgaaacgtggactccggagctaacgcgttaagttgaccgcctggggagtacggccgcaaggttaaaactcaaatgaattgacgggggcccgcacaagcggtggagcatgtggtttaattcgatgcaacgcgaagaaccttacctactcttgacatctagcgaacttggcagagatgccttggtgccttcgggaacgctaagacaggtgctgcatggctgtcgtcagctcgtgttgtgaaatgttgggttaagtcccgcaacgagcgcaacccttatcctttgttgccagcacataatggtgggaactcaaaggagactgccggtgataaaccggaggaaggtggggacgacgtcaagtcatcatggcccttacgagtagggctacacacgtgctacaatggcgcgtacagagggaagcaagctagcgatagtaagcggatcccaaaaagcgcgtcgtagtccggatcggagtctgcaactcgactccgtgaagtcggaatcgctagtaatcgtggatcagaatgccacggtgaatacgttcccgggccttgtacacaccgcccgtcacaccatgggagtgggctgcaccagaagtagatagc

SEQ ID NO: 1449 - DNA, 1465 bp, Gallaecimonas xiamenensis
attgaacgctggcggcaggcctaacacatgcaagtcgagcggtaacatgaactagcttgctagtttgatgacgagcggcggacgggtgagtaatacgtagggagctgcctggtagtgggggataaccattggaaacgatggctaataccgcatgatgtctacggaccaaagagggggaccttcgggcctcttgctatcagatgcgcctacgtgggattagcttgttggtgaggtaacggctcaccaaggcgacgatccctagctggtctgagaggatgatcagccacactgggactgagacacggcccagactcctacgggaggcagcagtggggaatattggacaatgggcgcaagcctgatccagccatgccgcgtgtgtgaagaaggccttcgggttgtaaagcactttcagcgaggaggaaaggtgggtagctaataactgctcactgtgacgttactcgcagaagaagcaccggctaactccgtgccagcagccgcggtaatacggagggtgcaagcgttaatcggaattactgggcgtaaagcgcacgcaggcggcttgttaagttagatgtgaaagccccgggcttaacctgggaattgcatttaagactggcaagctagagtcttggagaggggggtggaatttccggtgtagcggtgaaatgcgtagagatcggaaggaacatcagtggcgaaggcgaccccctggccaaagactgacgctcaggtgcgaaagcgtggggagcaaacaggattagataccctggtagtccacgccgtaaacgatgtcaacttggagtttgtgttcttgaaacgtggactccggagctaacgcgttaagttgaccgcctggggagtacggccgcaaggttaaaactcaaatgaattgacgggggcccgcacaagcggtggagcatgtggtttaattcgatgcaacgcgaagaaccttacctactcttgacatccagagaatttgctagagatagcttagtgccttcgggaactctgagacaggtgctgcatggctgtcgtcagctcgtgttgtgaaatgttgggttaagtcccgcaacgagcgcaacccttatcctttgttgccagcacgtaatggtgggaactcaaaggagactgccggtgataaaccggaggaaggtggggacgacgtcaagtcatcatggcccttacgagtagggctacacacgtgctacaatggcgcgtacagagggaagcaagctagcgatagtaagcggatcccaaaaagcgcgtcgtagtccggatcggagtctgcaactcgactccgtgaagtcggaatcgctagtaatcgtggatcagaatgccacggtgaatacgttcccgggccttgtacacaccgcccgtcacaccatgggagtgggctgcaccagaagtagatagcttaaccttcgggagggcgtttaccacggtgtggttcatgactggggtg

SEQ ID NO: 1450 - DNA, 1522 bp, Gallionella capsiferriformans
ttagagtttgatcatggctcagattgaacgctggcggtatgctttacacatgcaagtcgaacggattaaagagcttgctctttagttagtggcgaacgggtgagtaatatatcggaacatatccggaagtgggggataacgtagcgaaagttacgctaataccgcatatgccctgagggggaaagggggggatcgcaagacctctcgctttcggagtggccgatatcggattagctagtaggtgaggtaaaggctcacctaggcgacgatccgtagctggtctgagaggacgaccagccacactggaactgagacacggtccagactcctacgggaggcagcagtggggaattttggacaatgggcgaaagcctgatccagccataccgcgtgagtgaagaaggccttcgggttgtaaagctctttcagccggaaagaaattgcttctattaatactaggagtagatgacggtaccggaagaagaagcaccggctaactacgtgccagcagccgcggtaatacgtagggtgcgagcgttaatcggaattactgggcgtaaagcgtgcgcaggcggttttttaagtcagatgtgaaatccccgggctcaacctgggaactgcatttgaaactggaagactagagtatagcagaggggggtagaattccacgtgtagcagtgaaatgcgtagatatgtggaggaataccaatggcgaaggcagccccctgggttaatactgacgctcatgcacgaaagcgtggggagcaaacaggattagataccctggtagtccacgccctaaacgatgtcaactaggtgttgggggaggagacttccttagtaccgtagctaacgcgtgaagttgaccgcctggggagtacggtcgcaagattaaaactcaaaggaattgacggggacccgcacaagcggtggattatgtggattaattcgatgcaacgcgaaaaaccttacctacccttgacatgtcagaaagatcgcagagatgtgattgtgctcgaaagagaatctgaacacaggtgctgcatggctgtcgtcagctcgtgtcgtgagatgttgggttaagtcccgcaacgagcgcaacccttgtcattaattgccatcatttagttgggcactttaatgagactgccggtgataaaccggaggaaggtggggatgacgtcaagtcctcatggcccttatgggtagggcttcacacgtaatacaatggcgcgtacagagggttgccaacccgcgagggggagctaatctcagaaagcgcgtcgtagtccggattggagtctgcaactcgactccatgaagtcggaatcgctagtaatcgcggatcagcatgtcgcggtgaatacgttcccgggtcttgtacacaccgcccgtcacaccatgggagtggaatctgccagaagtaggtagcctaaccgtaaggagggcgcttaccacggtgggtttcatgactggggtgaagtcctaacaaggtagccgtatcgaaaggtgcggctggatc

SEQ ID NO: 1451 - DNA, 1458 bp, Gallionella ferruginea
attgaacgctggcggtatgctttacacatgcaagtcgaacggattaaagagcttgctctttagttagtggcgaacgggtgagtaatatatcggaacatatccggaagtgggggataacgtagcgaaagttacgctaataccgcatatgccctgagggggaaagggggggatcgcaagacctctcgctttcggagtggccgataccggattagcttgttggtgaggtaaaggctcaccaaggcgacgatccgtagctggtctgagaggacgaccagccacactggaactgagacacggtccagactcctacgggaggcagcagtggggaattttggacaatgggcgaaagcctgatccagccataccgcgtgagtgaagaaggccttcgggttgtaaagctctttcagccggaaagaaattgcacttcttaatacgaagtgtagatgacggtaccggaagaagaagcaccggctaactacgtgccagcagccgcggtaatacgtagggtgcgagcgttaatcggaattactgggcgtaaagcgtgcgcaggcggttttttaagtcagatgtgaaatccccgggctcaacctgggaactgcatttgaaactggaagactagagtatagcagagggaggtagaattccacgtgtagcagtgaaatgcgtagatatgtggaggaataccaatggcgaaggcagcctcctgggttaatactgacgctcatgcacgaaagcgtggggagcaaacaggattagataccctggtagtccacgccctaaacgatgtcaactagttgttggggaaggagactttcttagtaacgtagctaacgcgtgaagttgaccgcctggggagtacggtcgcaagattaaaactcaaaggaattgacggggacccgcacaagcggtggattatgtggattaattcgatgcaacgcgaaaaaccttacctacccttgacatgtcagaaagattgcagagatgtgattgtgcccgaaagggaatctgaacacaggtgctgcatggctgtcgtcagctcgtgtcgtgagatgttgggttaagtcccgcaacgagcgcaacccttgtcattaattgccatcattcagttgggcactttaatgagactgccggtgataaaccggaggaaggtggggatgacgtcaagtcctcatggcccttatgggtagggcttcacacgtaatacaatggcgcgtacagagggttgccaacccgcgagggggagctaatctcagaaagcgcgtcgtagtccggattggagtctgcaactcgactccatgaagtcggaatcgctagtaatcgcggatcagcatgtcgcggtgaatacgttcccgggtcttgtacacaccgcccgtcacaccatgggagtggaatctgccagaagtaggtagcctaaccgtaaggagggcgcttaccacggtgggtttcatgactggggtg

SEQ ID NO: 1452 - DNA, 1440 bp, Gelidibacter algens
gatgaacgctagcggcaggcctaacacatgcaagtcgaacggtaacagcacttcggtggctgacgagtggcgcacgggtgagtaacgcgtatgcaacctacctttcacagtgggatagcccagagaaatttggattaataccgcatagtatgcaggaccagcattggatctgtattaaacatttatgggtgagagatgggcatgcgttctattagttagttggagtggtaacggcaccccaagacagcgatagataggggccctgagagggggatcccccacactggtactgagacacggaccagactcctacgggaggcagcagtgaggaatattggacaatgggcgcaagcctgatccagccatgccgcgtgcaggaagacggccctatgggttgtaaactgcttttatacaggaagaaacaccccgacgtgtcggggcttgacggtactgtaggaataaggatcggctaactccgtgccagcagccgcggtaatacggaggatccaagcgttatccggaatcattgggtttaaagggtccgtaggtggacgattaagtcagaggtgaaatcctgcagctcaactgtagaattgcctttgaaactggttgtcttgaatcattgtgaagtggttagaatatgtggtgtagcggtgaaatgcatagatatcacatagaataccgattgcgaaggcagatcactaacaatgtattgacactgatggacgaaagcgtggggagcgaacaggattagataccctggtagtccacgccgtaaacgatggatactagctgtacggacttcggtctgtgtggctaagcgaaagtgataagtatcccacctggggagtacgttcgcaagaatgaaactcaaaggaattgacgggggcccgcacaagcggtggagcatgtggtttaattcgatgatacgcgaggaaccttaccagggcttaaatgtagattgacaggtttagagatagactttccttcgggcaatttacaaggtgctgcatggttgtcgtcagctcgtgccgtgaggtgtcaggttaagtcctataacgagcgcaacccctgttgttagttgccagcgagtcatgtcgggaactctagcaagactgccagtgcaaactgtgaggaaggtggggatgacgtcaaatcatcacggcccttacgtcctgggctacacacgtgctacaatggtggggacagagagcagccactgggcgaccaggagcgaatctataaaccccatcacagttcggatcggagtctgcaactcgactccgtgaagctggaatcgctagtaatcgcatatcagccatgatgcggtgaatacgttcccgggccttgtacacaccgcccgtcaagccatggaagccgggagtgcctgaagtccgtcaccgcaaggagcggcctagggtaaaattggtaactagggct

SEQ ID NO: 1453 - DNA, 1379 bp, Gelidibacter salicanalis
tgcaagtcgaacggtaacagcacttcggtggctgacgagtggcgcacgggtgagtaacgcgtatgcaacctacctttcacagtgggatagcccagagaaatttggattaataccgcatagtatgcaagatcagcattggccttgtattaaacatttatgggtgagagatgggcatgcgttctattagttagttggagtggtaacggcaccccaagacagcgatagataggggccctgagagggggatcccccacactggtactgagacacggaccagactcctacgggaggcagcagtgaggaatattggacaatgggcgcaagcctgatccagccatgccgcgtgcaggaagacggccctatgggttgtaaactgcttttatacaggaagaaacacctctacgtgtcgggacttgacggtactgtaagaataaggatcggctaactccgtgccagcagccgcggtaatacggaggatccaagcgttatccggaatcattgggtttaaagggtccgtaggtggacaattaagtcagaggtgaaaatctgcagctcaactgtagaattgcctttgaaactggttgtcttgaatcattatgaagtggttagaatatgtggtgtagcggtgaaatgcatagatatcacatagaataccgattgcgaaggcagatcactaataatgtattgacactgatggacgaaagcgtggggagcgaacaggattagataccctggtagtccacgccgtaaacgatggatactagttgttcgggcttcggcctgagtgactaagcgaaagtgataagtatcccacctggggagtacgttcgcaagaatgaaactcaaaggaattgacgggggcccgcacaagcggtggagcatgtggtttaattcgatgatacgcgaggacccttaccagggcttaaatgtagattgacaggtttagagatagactttccttcgggcaatttacaaggtgctgcatggttgtcgtcagctcgtgccgtgaggtgtcaggttaagtcctataacgagcgcaacccctgttgttagttgccagcgagtcatgtcgggaactctagcaagactgccagtgcaaactgtgaggaaggtggggatgacgtcaaatcatcacggcccttacgtcctgggctacacacgtgctacaatggtaggtacagagagcagccactgggtgaccaggagcgaatctataaaacctatctcagttcggatcggagtctgcaactcgactccgtgaagctggaatcgctagtaatcggatatcagccatgatccggtgaatacgttcccgggccttgtacacaccgcccgtcaagccatggaagccgggagtgcctgaagtccgtaaccgcaag

SEQ ID NO: 1454 - DNA, 1421 bp, Gemmata obscuriglobus
aacgaacgttggcggcatggattaggcatgcaagtcgggggaatcccgcaagggggaaccggcgtaaggggcagtaaggcatgggtacctacccgggggttcgggatagccatcagagatggtgggtaataccggatgacctcgtgagagcaaagattcatcgcccccggaggggcccatgtgatattagctagttggtggggtaacggcccaccaaggcgaagatgtctagcgggtgtgagagcacgacccgcgccactcgcactgagacactggcgagacacctacgggtggctgcagtcgaggatcttcggcaatgggggcaaccctgaccgagcgatgccgcgtgcgcgatgaaggccttcgggttgtaaagcgctttagtgggggagaaaagccgagaggtgtgatctatcccaaaaataagctcgggctaagttcgtgccagcagccgcggtaagacgaaccgagcgaacgttgttcggaatcactgggcttaaagggcgcgtaggcgggctatcaagtctggggtgaaatgccgcggctcaaccgcggaacggcctcagatactgacggcctggagggaggtaggggcatgtggaactgtaggtggagcggtgaaatgcgttgatatctacaggaactccggtggcgaaagcgacgtgctggacctcttctgacgctgaggcgcgaaagctaggggagcaaacgggattagataccccggtagtcctagccctaaacgatgggtactagatagtagaccagatatgggtttactgtcgaagttaaaatgctaagtaccccgcctggggagtatggtcgcaaggctgaaactcaaagaaattgacgggggctcacacaagcggtggagcatgtggcttaattcgaggctacgcgaagaaccttatcctggacttgacatgtgcgaaagcgctcggcagtaggacccggaaacgggaacggaccccagcaatggggggaccgagcacaggtgctgcatggctgtcgtcagctcgtgtcgtgagatgtcgggttaagtcccataacgagcgaaacccttacctttagttgcgacccacaagggcactctagagggactgccggtgtcaaaccggaggaaggcggggatgacgtcaagtcctcatggcctttatgtccagggctgcacacgtgctacaatggtgtacacagagtgaagcgactctgcgaagaggagccaatcacagaaattacaccccagttcagatcgcaggctgcaactcgcctgcgtgaagccggaatcgctagtaatcgcgggtcagcaacaccgcggtgaatgtgttcctgagccttgtacacaccgcccgtcaagccacgaaagagagggacgtccgaagccaccttcaccggtgtcgaagacggacttcttgattgggact

SEQ ID NO: 1455 - DNA, 1446 bp, Gemmatimonas aurantiaca
gacgaacgctggcggcgtgcttaacacatgcaagtcacgggggcccgcaagggtaaccggcgaacgggtgcgtaacacgtgaacaatctgcctagatgtgggggatagccggcccaacggccgggtaataccgcatacgctcttcgggtggcatcacttgaagaggaaacctccggggcatctagaggagttcgcggcctatcagctagttggtggggtaacggcctaccaaggcaatgacgggtagctggtctgagaggatggccagccacattgggactgagatacggcccagactcctacgggaggcagcagtggggaatattgcgcaatggccgaaaggctgacgcagcgacgccgcgtgggggatgaagcatttcggtgtgtaaacccctgttgcccgggacgaacaagcgattttgatcgctctgacggtaccgggtgaggaagcaccggctaactccgtgccagcagccgcggtaatacggagggtgcgagcgttgtccggaatcactgggcgtaaagggcgcgtaggcggtctgctaagcgtgtggtgaaagctcggggctcaaccccgagtctgccatgcgaactggtggactagagcactgtagaggcaggtggaattccgggtgtagcggtggaatgcgtagagatccggaagaacaccagtggcgaaggcggcctgctgggcagtagctgacgctgaggcgcgatagcgtggggagcaaacaggattagataccctggtagtccacgccgtaaacgatggggactaggtgcttgggggagcgacccctcgagtgccggcgctaacgcattaagtcccccgcctggggagtacgaccgcaaggttgaaactcaaaggaattgacgggggcccgcacaagcggtggagcatgtggtttaattcgacgcaacgcgaagaaccttacccaggcttgacatgtacgagaaagcctctggaaacaggggcccctcttcggagctcgtgcacaggtgctgcatggctgtcgtcagctcgtgtcgtgagatgttgggttaagtcccgcaacgagcgcaacccttgcccttagttaccagcgagtaaagtcggggactctagggggactgccggtgccaaaccggaggaaggtggggacgacgtcaagtcatcatggtccttacgtctggggctacacacgtgctacaatggccggtacagagggctgcgaaagagcaatctggagccaatccctaaagccggcctcagttcggattgtcgtctgcaactcgacggcatgaagctggaatcgctagtaatcgcggatcagcgacgccgcggtgaatacgttcccgggccttgtacacaccgcccgtcacgccatggaagctgtgagcgcccgaagtcggtgcaggaacccgcaaggggccaagccgcctaaggcgagcgcagtgactggggcg

SEQ ID NO: 1456 - DNA, 1446 bp, Gemmatimonas phototrophica
gacgaacgctggcggcgtgcttaacacatgcaagtcacgggggcccgcaagggtaaccggcgaacgggtgcgtaacacgtgagcaatctgccgtactctgggggatagccggcccaacggccgggtaataccgcatacgcttgtcgagtggcatcgcttgacaaggaaacctccgggggagtacgaggagctcgcggcctatcagctagttggtggggtaacggcctaccaaggcattgacgggtagctggtctgagaggatggccagccacattgggactgagatacggcccagactcctacgggaggcagcagtggggaatattgcgcaatggccgcaaggctgacgcagcgacgccgcgtgggggatgaagcatttcggtgtgtaaacccctgttgctcgggacgaacaagccttttcgagggctctgacggtaccgagtgaggaagcaccggctaactccgtgccagcagccgcggtaatacggagggtgcgagcgttgtccggaatcactgggcgtaaagggcgcgtaggtggtctgctaagcgtgcggtgaaagcctggggctcaaccccaggtctgccgtgcgaactggtggacttgagcactgtagaggcaggtggaattccgggtgtagcggtggaatgcgtagagatccggaagaacaccggtggcgaaggcggcctgctgggcagtagctgacactgaggcgcgacagcgtggggagcaaacaggattagataccctggtagtccacgccgtaaacgatggggactaggtgcttgggggagcgacccctcgagtgccggcgctaacgcattaagtcccccgcctggggagtacggccgcaaggctgaaactcaaaggaattgacgggggcccgcacaagcggtggagcatgtggtttaattcgacgcaacgcgaagaaccttacccaggcttgacatggatgagaaagcctctggaaacaggggcccctcttcggagttcattcacaggtgctgcatggctgtcgtcagctcgtgtcgtgagatgttgggttaagtcccgcaacgagcgcaacccttgcccttagttaccagcgcgtgatggcggggactctagggggactgccggtgccaaaccggaggaaggtggggacgacgtcaagtcatcatggtccttacgtctggggctacacacgtgctacaatggctggtacagagggctgcgaagtggcaacacggagccaatccctaaagccagcctcagttcggattgtcgtctgcaactcgacggcatgaagctggaatcgctagtaatcgtggatcagcgacgccacggtgaatacgttcccgggccttgtacacaccgcccgtcacgccatggaagctgtgagcgcccgaagtcggtgccggaacccgcaagggaccaagccgcctaaggcgagcgcagtgactggggcg

SEQ ID NO: 1457 - DNA, 1447 bp, Gemmatirosa kalamazoonesis
gacgaacgctggcggcgtgcttaacacatgcaagtcagggggcggagcaatccgtcaccggcgaacgggtgcgtaacacgtgagcgacctgccctggtgtgggggatagccggcccaacggccgggtaataccgcatacggcgcgacgggggcatccccgatgcgcgaaactatttaggcgccaggaggggctcgcggcctatcagctagttggcggggtaatggcccaccaaggcgatgacgggtagctggtctgagaggatggccagccacattgggactgagagacggcccagactcctacgggaggcagcagtggggaatcttgcgcaatggccgaaaggctgacgcagcgacgccgcgtgtgggatgacggccttcgggttgtaaaccactgttgcccgggacgaacagcgcttttcgaggcgcctgacggtaccgggtgaggaagcaccggctaactctgtgccagcagccgcggtaatacagagggtgcgagcgttgtccggaatcactgggcgtaaagggcgcgtaggcggtctcttaagcgtgtggtgaaagcccggggctcaactccgggtcggccgtgcgaactgggagactggagcttgtcagaggcaggcggaattccgggtgtagcggtggaatgcgtagagatccggaagaacaccggtggcgaaggcggcctgctgggacagtgctgacgctgatgcgcgacagcgtggggagcaaacaggattagataccctggtagtccacgccgtaaacgatgggcactaggtgcttgggggagcgaccccctgagtgccggcgctaacgcattaagtgccccgcctggggagtacggccgcaaggctgaaactcaaaggaattgacgggggcccgcacaagcggtggagcatgtggtttaattcgacgcaacgcgaagaaccttacctgggcttgacatgcacgggaaagcctctggaaacaggggcccctcttcggagctcgtgcacaggtgctgcatggctgtcgtcagctcgtgtcgtgagatgttgggttaagtcccgcaacgagcgcaaccctcgcctctagttaccagcgggtcatgccggggactctagagggactgccggtgccaaaccggaggaaggtgaggacgacgtcaagtcatcatggtccttacgcccagggccacacacgtgctacaatggcaccgacagaaggtcgcgaggccgcgaggccgagccaatccccaaacggtgcctcagttcggattgtcctctgcaactcgagggcatgaagctggaatcgctagtaatcgtggatcagctacgccacggtgaatacgttcccgggccttgtacacaccgcccgtcacgccatggaagctgtgagcgcccgaagtccgtgacgcaacccgcaagggagctagcggccgaaggcgagcgcagtgactggggcg

SEQ ID NO: 1458 - DNA, 1481 bp, Geoalkalibacter ferrihydriticus
aacgaacgctggcggcgtgcctaacacatgcaagtcgaacggtaacaggcccttcggggcgctgacgagtggcgcacgggtgagtaacacgtgggtaatctgcccaggggaccgggataacacttcgaaaggagtgctaataccggataagcccacgagctcttcggagcacgcgggaaaaggtggggatcttcggacctgccgtctctggatgagcccgcggcccattagctagttggcggggtaatggcccaccaaggcgacgatgggtagctggtctgagaggatgatcagccacactggaactgagacacggtccagactcctacgggaggcagcagtggggaattttgcgcaatgggcgaaagcctgacgcagcaacgccgcgtgagggatgaaggccttcgggtcgtaaacctctgtcagaggggaagaaccgccggtgggataataccccatcggtctgacggtaccctcagaggaagcaccggctaactccgtgccagcagccgcggtaatacggagggtgcaagcgttgttcggaattattgggcgtaaagcgcgtgcaggcggctgcgcaagtctgatgtgaaagccccgggctcaacctgggaagtgcatcggaaactgcgtagcttgagtacgggagagggaagcggaattccgagtgtaggggtgaaatccgtagatattcggaggaacaccagtggcgaaggcggcttcctggaccgatactgacgctgagacgcgaaagcgtggggagcaaacaggattagataccctggtagtccacgccgtaaacgatgggtactaggtgtcgcgggtattgacccctgcggtgccgaagctaacgcattaagtaccccgcctggggagtacggccgcaaggctaaaactcaaaggaattgacgggggcccgcacaagcggtggagcatgtggtttaattcgacgcaacgcgaagaaccttacctgggtttgacatcccgatcgtacctcctagagataggagggtcagttcggctggatcggtgacaggtgctgcatggctgtcgtcagctcgtgtcgtgagatgttgggttaagtcccgcaacgagcgcaaccctcgtccttagttgccagcattaagttgggcactctaaggagactgccggtgttaagccggaggaaggtggggatgacgtcaagtcctcatggcccttatgtccagggctacacacgtgctacaatggccggtacaaagggttgccaatccgcaaggtggagccaatcccagaaagccggtctcagttcggattggagtctgcaactcgactccatgaagttggaatcgctagtaatcgcgtatcagcatgacgcggtgaatacgttcccgggccttgtacacaccgcccgtcacaccacggaagttgtttgtacctgaagccggtgggctaacccgcaagggatgcagccgtccatggtatgaatggtaactggggtg

SEQ ID NO: 1459 - DNA, 1485 bp, Geoalkalibacter subterraneus
aacgaacgctggcggcgtgcctaacacatgcaagtcgaacgagaaaggggacttcggtccctgagtacagtggcgcacgggtgagtaacacgtgggtaatctgcccggagattcgggacaacatctcgaaaggggtgctaataccggataagcctacgacgtcttcggacgacgcaggaaaaggtggggattcttcggaacctaccgtccccggatgagcccgcggcccattagctagttggcggggtaatggcccaccaaggcgacgatgggtagctggtctgagaggatgatcagccacactggaactgagacacggtccagactcctacgggaggcagcagtggggaattttgcgcaatgggcgaaagcctgacgcagcaacgccgcgtgagggatgaaggccttcgggtcgtaaacctctgtcagaggggaagaaccgtctgtgggataataccccgcaggcctgacggtaccctcagaggaagcaccggctaactccgtgccagcagccgcggtaatacggagggtgcaagcgttgttcggaattattgggcgtaaagcgcgcgcaggcggctgcgcaagtctgatgtgaaagccccgggctcaacctgggaagtgcatcggaaactgcgtagcttgagtacgggagagggaagcggaattccgagtgtaggggtgaaatccgtagatattcggaagaacaccagtggcgaaggcggcttcctggaccgatactgacgctgaggcgcgaaagcgtggggagcaaacaggattagataccctggtagtccacgccgtaaacgatgggtactaggtgtcgcgggtattgacccctgcggtgccgaagctaacgcattaagtaccccgcctggggagtacggccgcaaggctaaaactcaaaggaattgacgggggcccgcacaagcggtggagcatgtggtttaattcgacgcaacgcgaagaaccttacctgggtttgacatcccgatcgcaccctttagagatagaggggtcagttcggctggatcggagacaggtgctgcatggctgtcgtcagctcgtgtcgtgagatgttgggttaagtcccgcaacgagcgcaaccctcgtccttagttgccagcattgagttgggcactctaaggagactgccggtgttaaaccggaggaaggtggggatgacgtcaagtcctcatggcccttatgtccagggctacacacgtgctacaatggccggtacaaagggttgccaagccgcaaggtggagctaatcccaaaaagccggtctcagttcggattggagtctgcaactcgactccatgaagctggaatcgctagtaatcgcgtatcagcatgacgcggtgaatacgttcccgggccttgtacacaccgcccgtcacaccacggaagtcgtttgtacctgaagccggtgggctaaccctttaaggggagcagccgtccatggtatgaatggtaactggggtg

SEQ ID NO: 1460 - DNA, 1479 bp, Geobacillus caldoxylosilyticus
gacgaacgctggcggcgtgcctaatacatgcaagtcgagcggaccgaacaggagcttgctcttgttcggttagcggcggacgggtgagtaacacgtgggtaacctacccgtaagaccgggataactccgggaaaccggagctaataccggataacaccaaagaccgcatggtctttggttgaaaggcggcttcggctgtcacttacggatgggcccgcggcgcattagctagttggtgaggtaacggctcaccaaggcgacgatgcgtagccggcctgagagggtgaccggccacactgggactgagacacggcccagactcctacgggaggcagcagtagggaatcttccgcaatggacgaaagtctgacggagcgacgccgcgtgagcgaagaaggtcttcggatcgtaaagctctgttgttagggaagaagaagtaccgttcgaatagggcggtacggtgacggtacctaacgagaaagccccggctaactacgtgccagcagccgcggtaatacgtagggggcgagcgttgtccggaattattgggcgtaaagcgcgcgcaggcggtcccttaagtctgatgtgaaagcccacggctcaaccgtggagggtcattggaaactgggggacttgagtgcagaagaggagagcggaattccacgtgtagcggtgaaatgcgtagagatgtggaggaacaccagtggcgaaggcggctctctggtctgtaactgacgctgaggcgcgaaagcgtggggagcaaacaggattagataccctggtagtccacgccgtaaacgatgagtgctaagtgttagaggggtcaaaccctttagtgctgtagctaacgcgttaagcactccgcctggggagtacggccgcaaggctgaaactcaaaggaattgacgggggcccgcacaagcggtggagcatgtggtttaattcgaagcaacgcgaagaaccttaccaggtcttgacatcccctgacaaccctggagacagggcgttcccccttcggggggacagggtgacaggtggtgcatggttgtcgtcagctcgtgtcgtgagatgttgggttaagtcccgcaacgagcgcaaccctcgcccctagttgccagcattcagttgggcactctagggggactgccggtgacaaaccggaggaaggtggggatgacgtcaaatcatcatgccccttatgacctgggctacacacgtgctacaatgggcggtacaaagggctgcgaacccgcgagggggagccaatcccaaaaagccgctctcagttcggattgcaggctgcaactcgcctgcatgaagccggaatcgctagtaatcgcggatcagcatgccgcggtgaatacgttcccgggccttgtacacaccgcccgtcacaccacgagagcttgcaacacccgaagtcggtgaggtaacccgcaagggagccagccgccgaaggtggggcaagtgattggggtg

SEQ ID NO: 1461 - DNA, 1396 bp, Geobacillus galactosidasius
  misc_feature (780)..(780): n is a, c, g, or t
  misc_feature (797)..(797): n is a, c, g, or t
  misc_feature (803)..(803): n is a, c, g, or t
  misc_feature (832)..(832): n is a, c, g, or t
  misc_feature (834)..(834): n is a, c, g, or t
  misc_feature (838)..(838): n is a, c, g, or t
  misc_feature (846)..(846): n is a, c, g, or t
  misc_feature (861)..(861): n is a, c, g, or t
  misc_feature (870)..(870): n is a, c, g, or t
  misc_feature (872)..(872): n is a, c, g, or t
  misc_feature (875)..(875): n is a, c, g, or t
  misc_feature (886)..(886): n is a, c, g, or t
  misc_feature (888)..(888): n is a, c, g, or t
  misc_feature (895)..(895): n is a, c, g, or t
  misc_feature (905)..(905): n is a, c, g, or t
  misc_feature (914)..(914): n is a, c, g, or t
  misc_feature (917)..(917): n is a, c, g, or t
  misc_feature (933)..(933): n is a, c, g, or t
  misc_feature (939)..(939): n is a, c, g, or t
  misc_feature (942)..(942): n is a, c, g, or t
  misc_feature (945)..(946): n is a, c, g, or t
  misc_feature (950)..(950): n is a, c, g, or t
  misc_feature (953)..(953): n is a, c, g, or t
  misc_feature (955)..(956): n is a, c, g, or t
  misc_feature (958)..(959): n is a, c, g, or t
  misc_feature (966)..(966): n is a, c, g, or t
  misc_feature (968)..(969): n is a, c, g, or t
  misc_feature (971)..(972): n is a, c, g, or t
  misc_feature (976)..(976): n is a, c, g, or t
  misc_feature (979)..(979): n is a, c, g, or t
  misc_feature (981)..(981): n is a, c, g, or t
  misc_feature (985)..(985): n is a, c, g, or t
  misc_feature (998)..(998): n is a, c, g, or t
  misc_feature (1068)..(1068): n is a, c, g, or t
  misc_feature (1074)..(1075): n is a, c, g, or t
gtgagtaacacgtgggtaacctgcccgtaagaccgggataactccgggaaaccggggctaataccggataacaccgaagaccgcatggtctttggttgaaaggtggcttttgctaccacttacggatgggcccgcggcgcattagctagttggtgaggtaacggctcaccaaggcgacgatgcgtagccggcctgagagggtgaccggccacactgggactgagacacggcccagactcctacgggaggcagcagtagggaatcttccgcaatggacgaaagtctgacggagcgacgccgcgtgagcgaagaaggtcttcggatcgtaaagctctgttgttagggaagaagaagtaccgttcgaatagggcggtacggtgacggtacctaacgagaaagccccggctaactacgtgccagcagccgcggtaatacgtagggggcgagcgttgtccggaattattgggcgtaaagcgcgcgcaggcggtcccttaagtctgatgtgaaagcccacggctcaaccgtggagggtcattggaaactgggggacttgagtgcagaagaggagagcggaattccacgtgtagcggtgaaatgcgtagagatgtggaggaacaccagtggcgaaggcggctctctggtctgtaactgacgctgaggcgcgaaagcgtggggagcaaacaggattagataccctggtagtccacgccgtaaacgatgagtgctaagtgttagaggggttttccctttagtgctgtagctaacgcgttaagcactccncctggggagtacggccncaaggntgaaactcaaaggaattgacgggggcccncncaancggtggancatgtggtttaattngaagcaacncnaanaaccttaccangncttgacntcccctgacnaccctgganacngggcgttcccccttcngggggnacnggnngacnggngnngnntggttgncnncnnttcnggncngganatgttgggttaantcccgcaacgagcgcaaccctcgcccctagttgccagcattcagttgggcactctagggggactgccggngacaanncggaggaaggtggggatgacgtcaaatcatcatgccccttatgacctgggctacacacgtgctacaatgggcggtacaaagggctgcgaacccgcgagggggagcgaatcccaaaaagccgctctcagttcggattgcaggctgcaactcgcctgcatgaagccggaatcgctagtaatcgcggatcagcatgccgcggtgaatacgttcccgggccttgtacacaccgcccgtcacaccacgagagcttgcaacacccgaagtcggtgaggtaacccgtaagggagccagccgccgaaggtggggcaagtgattggggtg

SEQ ID NO: 1462 - DNA, 1480 bp, Geobacillus kaustophilus
gacgaacgctggcggcgtgcctaatacatgcaagtcgagcggaccaaatcggagcttgctctgatttggtcagcggcggacgggtgagtaacacgtgggcaacctgcccgcaagaccgggataactccgggaaaccggagctaataccggataacaccgaagaccgcatggtctttggttgaaaggcggcctttggctgtcacttgcggatgggcccgcggcgcattagctagttggtgaggtaacggctcaccaaggcgacgatgcgtagccggcctgagagggtgaccggccacactgggactgagacacggcccagactcctacgggaggcagcagtagggaatcttccgcaatgggcgaaagcctgacggagcgacgccgcgtgagcgaagaaggccttcgggtcgtaaagctctgttgtgagggacgaaggagcgccgttcgaagagggcggcgcggtgacggtacctcacgaggaagccccggctaactacgtgccagcagccgcggtaatacgtagggggcgagcgttgtccggaattattgggcgtaaagcgcgcgcaggcggttccttaagtctgatgtgaaagcccacggctcaaccgtggagggtcattggaaactgggggacttgagtgcaggagaggagagcggaattccacgtgtagcggtgaaatgcgtagagatgtggaggaacaccagtggcgaaggcggctctctggcctgcaactgacgctgaggcgcgaaagcgtggggagcaaacaggattagataccctggtagtccacgccgtaaacgatgagtgctaagtgttagaggggtcacaccctttagtgctgcagctaacgcgataagcactccgcctggggagtacggccgcaaggctgaaactcaaaggaattgacgggggcccgcacaagcggtggagcatgtggtttaattcgaagcaacgcgaagaaccttaccaggtcttgacatcccctgacaacccaagagattgggcgttcccccttcggggggacagggtgacaggtggtgcatggttgtcgtcagctcgtgtcgtgagatgttgggttaagtcccgcaacgagcgcaaccctcgcctctagttgccagcacgaaggtgggcactctagagggactgccggcgacaagtcggaggaaggtggggatgacgtcaaatcatcatgccccttatgacctgggctacacatgtgctacaatgggcggtacaaagggctgcgaacccgcgagggggagcgaatcccaaaaagccgctctcagttcggattgcaggctgcaactcgcctgcatgaagccggaatcgctagtaatcgcggatcagcatgccgcggtgaatacgttcccgggccttgtacacaccgcccgtcacaccacgagagcttgcaacacccgaagtcggtgaggtaacccttacgggagccagccgccgaaggtggggcaagtgattggggtg

SEQ ID NO: 1463 - DNA, 1481 bp, Geobacillus lituanicus
gacgaacgctggcggcgtgcctaatacatgcaagtcgagcggaccgaacgagagcttgctcttgtttggtcagcggcggacgggtgagtaacacgtgggcaacctgcccgcaagaccgggataactccgggaaaccggagctaataccggataacaccgaagaccgcatggtcttcggttgaaaggcggcctttgggctgtcacttgcggatgggcccgcggcgcattagctagttggtgaggtaacggctcaccaaggcgacgatgcgtagccggcctgagagggtgaccggccacactgggactgagacacggcccagactcctacgggaggcagcagtagggaatcttccgcaatgggcgaaagcctgacggagcgacgccgcgtgagcgaagaaggccttcgggtcgtaaagctctgttgtgagggacgaaagagcgccgttcgaagagggcggcgcggtgacggtacctcacgagaaagccccggctaactacgtgccagcagccgcggtaatacgtagggggcgagcgttgtccggaattattgggcgtaaagcgcgcgcaggcggtctcttaagtctgatgtgaaagcccacggctcaaccgtggagggtcattggaaactgggggacttgagggcaggagaggagagcggaattccacgtgtagcggtgaaatgcgtagagatgtggaggaacaccagtggcgaaggcggctctctggcctgcacctgacgctgaggcgcgaaagcgtggggagcaaacaggattagataccctggtagtccacgccgtaaacgatgagtgctaagtgttagaggggtcacaccctttagtgctgcagctaacgcgataagcactccgcctggggagtacggccgcaaggctgaaactcaaaggaattgacgggggcccgcacaagcggtggagcatgtggtttaattcgaagcaacgcgaagaaccttaccaggtcttgacatcccctgacaacccaagagattgggcgttcccccttcggggggacagggtgacaggtggtgcatggttgtcgtcagctcgtgtcgtgagatgttgggttaagtcccgcaacgagcgcaaccctcgcctctagttgccagcattcagttgggcactctagagggactgccggcgacaagtcggaggaaggtggggatgacgtcaaatcatcatgccccttatgacctgggctacacacgtgctacaatgggcggtacaaagggctgcgaacccgcgagggggagcgaatcccaaaaagccgctctcagttcggattgcaggctgcaactcgcctgcatgaagccggaatcgctagtaatcgcggatcagcatgccgcggtgaatacgttcccgggccttgtacacaccgcccgtcacaccacgagagcttgcaacacccgaagtcggtgaggtaacccgcaagggagccagccgccgaaggtggggcaagtgattggggtg

SEQ ID NO: 1464 - DNA, 1480 bp, Geobacillus subterraneus
gacgaacgctggcggcgtgcctaatacatgcaagtcgagcggaccgaatgagagcttgctcttatttggtcagcggcggacgggtgagtaacacgtgggcaacctgcccgcaagaccgggataactccgggaaaccggagctaataccggataacaccgaagaccgcatggtctttggttgaaaggcggcctttggctgtcacttgcggatgggcccgcggcgcattagctagttggtgaggtaacggctcaccaaggcgacgatgcgtagccggcctgagagggtgaccggccacactgggactgagacacggcccagactcctacgggaggcagcagtagggaatcttccgcaatggacgaaagtctgacggagcgacgccgcgtgagcgaagaaggccttcgggtcgtaaagctctgttgtgagggacgaaggagcgccgtttgaacaaggcggcgcggtgacggtacctcacgagaaagccccggctaactacgtgccagcagccgcggtaatacgtagggggcgagcgttgtccggaattattgggcgtaaagcgcgcgcaggcggttccttaagtctgatgtgaaagcccacggctcaaccgtggagggtcattggaaactgggggacttgagtgcaggagaggagagcggaattccacgtgtagcggtgaaatgcgtagagatgtggaggaacaccagtggcgaaggcggctctctggcctgcaactgacgctgaggcgcgaaagcgtggggagcaaacaggattagataccctggtagtccacgccgtaaacgatgagtgctaagtgttagaggggtcacaccctttagtgctgcagctaacgcgataagcactccgcctggggagtacggccgcaaggctgaaactcaaaggaattgacgggggcccgcacaagcggtggagcatgtggtttaattcgaagcaacgcgaagaaccttaccaggtcttgacatcccctgacaacccaagagattgggcgttcccccttcggggggacagggtgacaggtggtgcatggttgtcgtcagctcgtgtcgtgagatgttgggttaagtcccgcaacgagcgcaacccttgcctctcgttgccagcattgagttgggcactctagagggactgccggctaaaagtcggaggaaggtggggatgacgtcaaatcatcatgccccttatgacctgggctacacacgtgctacaatgggcggtacaaagggctgcgaacccgcgagggggagcgaatcccaaaaagccgctctcagttcggattgcaggctgcaactcgcctgcatgaagccggaatcgctagtaatcgcggatcagcatgccgcggtgaatacgttcccgggccttgtacacaccgcccgtcacaccacgagagcttgcaacacccgaagtcggtgaggtaaccctgacgggagccagccgccgaaggtggggcaagtgattggggtg

SEQ ID NO: 1465 - DNA, 1480 bp, Geobacillus thermocatenulatus
gacgaacgctggcggcgtgcctaatacatgcaagtcgagcggaccgaacgggagcttgctctcgtttggtcagcggcggacgggtgagtaacacgtgggcaacctgcccgcaagaccgggataactccgggaaaccggagctaataccggataacaccgaagaccgcatggtctttggttgaaaggcggcctttggctgtcacttgcggatgggcccgcggcgcattagctagttggtgaggtaacggctcaccaaggcgacgatgcgtagccggcctgagagggtggacggccacactgggactgagacacggcccagactcctacgggaggcagcagtagggaatcttccgcaatgggcgaaagcctgacggagcgacgccgcgtgagcgaagaaggccttcgggtcgtaaagctctgttgtgagggacgaaggagcgccgttcgaagagggcggcgcggtgacggtacctcacgagaaagccccggctaactacgtgccagcagccgcggtaatacgtagggggcgagcgttgtccggaattattgggcgtaaagcgcgcgcaggcggccccttaagtctgatgtgaaagcccacggctcaaccgtggagggtcattggaaactggggggcttgagggcaggagaggagagcggaattccacgtgtagcggtgaaatgcgtagagatgtggaggaacaccagtggcgaaggcggctctctggcctgcaactgacgctgaggcgcgaaagcgtggggagcaaacaggattagataccctggtagtccacgccgtaaacgatgagtgctaagtgttagaggggtcacaccctttagtgctgcagctaacgcgataagcactccgcctggggagtacggccgcaaggctgaaactcaaaggaattgacgggggcccgcacaagcggtggagcatgtggtttaattcgaagcaacgcgaagaaccttaccaggtcttgacatcccctgacaacccaagagattgggcgttcccccttcggggggacagggtgacaggtggtgcatggttgtcgtcagctcgtgtcgtgagatgttgggttaagtcccgcaacgagcgcaaccctcgcctctagttgccagcattcaggtgggcactctagagggactgccggcgacaagtcggaggaaggtggggatgacgtcaaatcatcatgccccttatgacctgggctacacacgtgctacaatgggcggtacaaagggctgcgaacccgcgagggggagcgaatcccaaaaagccgctctcagttcggattgcaggctgcaactcgcctgcatgaagccggaatcgctagtaatcgcggatcagcatgccgcggtgaatacgttcccgggccttgtacacaccgcccgtcacaccacgagagcttgcaacacccgaagtcggtgaggcaacccgcaagggagccagccgccgaaggtggggcaagtgattggggtg

SEQ ID NO: 1466 - DNA, 1400 bp, Geobacillus thermodenitrificans
agcggaccgaacgagagcttgctcttgttcggtcagcggcggacgggtgagtaacacgtgggcaacctgcccgcaagaccgggataactccgggaaaccggagctaataccggataacaccaaagaccgcatggtctttggttgaaaggcggcttcggctgtcacttgcggatgggcccgcggcgcattagctagttggtgaggtaacggctcaccaaggcgacgatgcgtagccggcctgagagggtgaccggccacactgggactgagacacggcccagactcctacgggaggcagcagtagggaatcttccgcaatggacgaaagtctgacggagcgacgccgcgtgagcgaagaaggccttcgggtcgtaaagctctgttgtgagggacgaaggagcgccgtttgaataaggcggcgcggtgacggtacctcacgagaaagccccggctaactacgtgccagcagccgcggtaatacgtagggggcgagcgttgtccggaattattgggcgtaaagcgcgcgcaggcggtcctttaagtctgatgtgaaagcccacggctcaaccgtggagggtcattggaaactgggggacttgagtgcaggagaggagagcggaattccacgtgtagcggtgaaatgcgtagagatgtggaggaacaccagtggcgaaggcggctctctggcctgtaactgacgctgaggcgcgaaagcgtggggagcaaacaggattagataccctggtagtccacgccgtaaacgatgagtgctaagtgttagaggggtcacaccctttagtgctgtagctaacgcgataagcactccgcctggggagtacggccgcaaggctgaaactcaaaggaattgacgggggcccgcacaagcggtggagcatgtggtttaattcgaagcaacgcgaagaaccttaccaggtcttgacatcccctgacaacccaagagattgggcgttcccccttcggggggacagggtgacaggtggtgcatggttgtcgtcagctcgtgtcgtgagatgttgggttaagtcccgcaacgagcgcaacccttgcctctagttgccagcattcagttgggcactctagagggactgccggctaaaagtcggaggaaggtggggatgacgtcaaatcatcatgccccttatgacctgggctacacacgtgctacaatgggcggtacaaagggctgcgaacccgcgagggggagcgaatcccaaaaagccgctctcagttcggattgcaggctgcaactcgcctgcatgaagccggaatcgctagtaatcgcggatcagcatgccgcggtgaatacgttcccgggccttgtacacaccgcccgtcacaccacgagagcttgcaacacccgaagtcggtgaggtaaccct

SEQ ID NO: 1467 - DNA, 1481 bp, Geobacillus thermoglucosidasius
gacgaacgctggcggcgtgcctaatacatgcaagtcgagcggaccgggcgggagcttgcttccgcttggttagcggcggacgggtgagtaacacgtgggtaacctgcccgtaagaccgggataactccgggaaaccggggctaataccggataacaccgaagaccgcatggtcttcggttgaaaggcggcttcggctgccacttacggatgggcccgcggcgcattagctagttggtgaggtaacggctcaccaaggcgacgatgcgtagccggcctgagagggtgaccggccacactgggactgagacacggcccagactcctacgggaggcagcagtagggaatcttccgcaatggacgaaagtctgacggagcgacgccgcgtgagcgaagaaggtcttcggatcgtaaagctctgttgttagggaagaagaagtgccgttcgaacagggcggcacggtgacggtacctaacgagaaagccccggctaactacgtgccagcagccgcggtaatacgtagggggcgagcgttgtccggaattattgggcgtaaagcgcgcgcaggcggtcccttaagtctgatgtgaaagcccacggcttaaccgtggagggtcattggaaactgggggacttgagtgcagaagaggagagcggaattccacgtgtagcggtgaaatgcgtagagatgtggaggaacaccagtggcgaaggcggctctctggtctgtaactgacgctgaggcgcgaaagcgtggggagcaaacaggattagataccctggtagtccacgccgtaaacgatgagtgctaagtgttagaggggttattccctttagtgctgtagctaacgcgttaagcactccgcctggggagtacggccgcaaggctgaaactcaaaggaattgacgggggcccgcacaagcggtggagcatgtggtttaattcgaagcaacgcgaagaaccttaccaggtcttgacatcccctgacaaccctggagacagggcgttcctcccttgcgggaggacagggtgacaggtggtgcatggttgtcgtcagctcgtgtcgtgagatgttgggttaagtcccgcaacgagcgcaaccctcgcccctagttgccagcattcagttgggcactctagggggactgccggctaaaagtcggaggaaggtggggatgacgtcaaatcatcatgccccttatgacctgggctacacacgtgctacaatgggcggtacaaagggctgcgaacccgcgagggggagcgaatcccaaaaagccgctctcagttcggattgcaggctgcaactcgcctgcatgaagccggaatcgctagtaatcgcggatcagcatgccgcggtgaatacgttcccgggccttgtacacaccgcccgtcacaccacgagagcttgcaacacccgaagtcggtgaggtaacccgcaagggagccagccgccgaaggtggggcaagtgattggggtg

SEQ ID NO: 1468 - DNA, 1480 bp, Geobacillus thermoleovorans
gacgaacgctggcggcgtgcctaatacatgcaagtcgagcggaccaaatcggagcttgctctgatttggtcagcggcggacgggtgagtaacacgtgggcaacctgcccgcaagaccgggataactccgggaaaccggagctaataccggataacaccgaagaccgcatggtctttggttgaaaggcggcctttggctgtcacttgcggatgggcccgcggcgcattagctagttggtgaggtaacggctcaccaaggcgacgatgcgtagccggcctgagagggtgaccggccacactgggactgagacacggcccagactcctacgggaggcagcagtagggaatcttccgcaatgggcgaaagcctgacggagcgacgccgcgtgagcgaagaaggccttcgggtcgtaaagctctgttgtgagggacgaaggagcgccgttcgaagagggcggcgcggtgacggtacctcacgaggaagccccggctaactacgtgccagcagccgcggtaatacgtagggggcgagcgttgtccggaattattgggcgtaaagcgcgcgcaggcggtcccttaagtctgatgtgaaagcccacggctcaaccgtggagggtcattggaaactgggggacttgagtgcaggagaggagagcggaattccacgtgtagcggtgaaatgcgtagagatgtggaggaacaccagtggcgaaggcggctctctggcctgcaactgacgctgaggcgcgaaagcgtggggagcaaacaggattagataccctggtagtccacgccgtaaacgatgagtgctaagtgttagaggggtcacaccctttagtgctgcagctaacgcgataagcactccgcctggggagtacggccgcaaggctgaaactcaaaggaattgacgggggcccgcacaagcggtggagcatgtggtttaattcgaagcaacgcgaagaaccttaccaggtcttgacatcccctgacaacccaagagattgggcgttcccccttcggggggacagggtgacaggtggtgcatggttgtcgtcagctcgtgtcgtgagatgttgggttaagtcccgcaacgagcgcaaccctcgcctctagttgccagcacgaaggtgggcactctagagggactgccggcgacaagtcggaggaaggtggggatgacgtcaaatcatcatgccccttatgacctgggctacacacgtgctacaatgggcggtacaaagggctgcgaacccgcgagggggagcgaatcccaaaaagccgctctcagttcggattgcaggctgcaactcgcctgcatgaagccggaatcgctagtaatcgcggatcagcatgccgcggtgaatacgttcccgggccttgtacacaccgcccgtcacaccacgagagcttgcaacacccgaagtcggtgaggtaacccttacgggagccagccgccgaaggtggggcaagtgattggggtg

SEQ ID NO: 1469 - DNA, 1476 bp, Geobacter argillaceus
aacgaacgctggcggcgtgcctaacacatgcaagtcgaacgtgaaagtccttcgggatgagtaaagtggcgcacgggtgagtaatgcgtagataatctgcctggtgatctgggataacatttcgaaaggggtgctaataccggataagcccacgatctctttggagaatgcgggaaaagggggggaccttcgggccttctgtcaccagatgagtctacgtaccattagctagttggtggggtaagagcccaccaaggcgacgatggttagctggtctgagaggatgatcagccacactggaactgagacacggtccagactcctacgggaggcagcagtggggaattttgcgcaatgggggaaaccctgacgcagcaacgccgcgtgagtgatgaaggccttcgggtcgtaaagctctgtcagagggaaagaaatgtgggtggctaataaccataccacttgacggtaccctcaaaggaagcaccggctaactccgtgccagcagccgcggtaatacggagggtgcgagcgttgttcggaattattgggcgtaaagcgcgtgtaggcggttttataagtctgatgtgaaagccccgggctcaacctgggaagtgcattggaaactgtaagacttgagtacgggagagggcagtggaattcctagtgtaggagtgaaatccgtagatattaggaggaacaccggtggcgaaggcggctgcctggaccgatactgacgctgagacgcgaaagcgtggggagcaaacaggattagataccctggtagtccacgccgtaaacgatgagtactaggtgttgcgggtattgacccctgcagtgccgcagctaacgcattaagtactccgcctgggaagtacggtcgcaagactaaaactcaaaggaattgacgggggcccgcacaagcggtggagcatgtggtttaattcgacgcaacgcgcagaaccttacctgggcttgacatctacggaacctctgtgaaagcagggggtgcctttcggggagccgtaagacaggtgctgcatggctgtcgtcagctcgtgtcgtgagatgttgggttaagtcccgcaacgagcgcaacccctatctttagttgccatcattcagttgggcactctaaagagactgccggtgttaaaccggaggaaggtggggatgacgtcaagtcctcatggcccttatgtccagggctacacacgtgctacaatggccggtacaaagggttgcaataccgcgaggtggagctaatctcagaaaaccggtctcagttcggattggagtctgcaactcgactccatgaagttggaatcgctagtaatcgcggatcagcatgccgcggtgaatacgttcccgggccttgtacacaccgcccgtcacaccacgggagtcgattggtcccgaagtgcgtaagctaacccgcaagggaggcagcgtcctaaggaatggtcggtgactggggtg

SEQ ID NO: 1470 - DNA, 1477 bp, Geobacter bemidjiensis
aacgaacgctggcggcgtgcttaacacatgcaagtcgaacgggatccagagcttgctctggtgagagtggcgcacgggtgagtaacgcgtggataacctgccctggtatctggaataacatctcgaaaggggtgctaataccggataagcctacggagccttcggtctctgcaggaaaaggtggcctctatttataagctaccgtatcaggatgggtccgcgtaccattagctagttggtagggtaatggcctaccaaggctacgatggttagctggtctgagaggatgatcagccacactggaactgagacacggtccagactcctacgggaggcagcagtggggaattttgcgcaatgggggaaaccctgacgcagcaacgccgcgtgagtgatgaaggctttcgggtcgtaaagctctgtcagtagggaagaaatgaaaacggttaatacccgtttttcttgacggtacctacaaaggaagcaccggctaactccgtgccagcagccgcggtaatacggagggtgcaagcgttgttcggatttattgggcgtaaagcgcgtgtaggcggtttcttaagtctgatgtgaaagccctgggctcaacccaggaagtgcattggatactgggagacttgaatacgggagagggtagtggaattcctagtgtaggagtgaaatccgtagatattaggaggaacaccggtggcgaaggcggctacctggaccgatattgacgctgagacgcgaaagcgtggggagcaaacaggattagataccctggtagtccacgccgtaaacgatgagaactaggtgttgcgggtattgacccctgcagtgccgcagctaacgcattaagttctccgcctgggaagtacggtcgcaagactaaaactcaaaggaattgacgggggcccgcacaagcggtggagcatgtggtttaattcgacgcaacgcgcagaaccttacctgggcttgacatctgcggaacctccccgaaacgggagggtgccttcgggagccgcaagacaggtgctgcatggctgtcgtcagctcgtgtcgtgagatgttgggttaagtcccgcaacgagcgcaacccctatccttagttgccatcatttagttgggcactctaaggagactgccggtgtcaaaccggaggaaggtggggatgacgtcaagtcctcatggcccttatgtccagggctacacacgtgctacaatggccggtacaaagagcagcgataccgcgaggtggagccaatctcaaaaagccggtctcagttcggattggagtctgcaactcgactccatgaagttggaatcgctagtaatcgcggatcagcacgccgcggtgaatacgttcccgggccttgtacacaccgcccgtcacaccacgggagtcggttggtcccgaagtgcgtgagctaacccgcaagggaggcagcgtcctaaggaatggccggtgactggggtg

SEQ ID NO: 1471 - DNA, 1478 bp, Geobacter daltonii
aacgaacgctggcggcgtgcttaacacatgcaagtcgaacggaattaggggcttgctcctaatttagtggcgcacgggtgagtaacgcgtggataacctaccctggtatctgggataacatctcgaaaggggtgctaataccggataagcccacgggaactttggttcttgcgggaaaaggtggcctctatttataagctactgtatcaggatgggtccgcgtaccattagctagttggtagtgtaatggactaccaaggctacgatggttagctggtctgagaggatgatcagccacactggaactgagacacggtccagactcctacgggaggcagcagtggggaattttgcgcaatgggggaaaccctgacgcagcaacgccgcgtgagtgatgaaggccttcgggtcgtaaagctctgtcagaggggaagaagtgtatgggcgctaataccatctatacttgacggtaccctcaaaggaagcaccggctaactccgtgccagcagccgcggtaatacggagggtgcaagcgttgttcggatttattgggcgtaaagcgcgtgtaggcggtcttttaagtctgatgtgaaagccccgggctcaacccgggaagtgcattggaaactgggagacttgaatacgggagagggtagtggaattcctagtgtaggagtgaaatccgtagatattaggaggaacaccggtggcgaaggcggctacctggaccgatattgacgctgagacgcgaaagcgtggggagcaaacaggattagataccctggtagtccacgccgtaaacgatgagtactaggtgttgcgggtattgacccctgcagtgccgcagctaacgcattaagtactccgcctgggaagtacggtcgcaagactaaaactcaaaggaattgacgggggcccgcacaagcggtggagcatgtggtttaattcgacgcaacgcgcagaaccttacctgggcttgacatctgcggaacctggtggaaacatcggggtgccttcgggagccgcaagacaggtgctgcatggctgtcgtcagctcgtgtcgtgagatgttgggttaagtcccgcaacgagcgcaacccctgtccttagttgccatcattcagttgggcactctaaggagactgccggtgttaaaccggaggaaggtggggatgacgtcaagtcctcatggcccttatgtccagggctacacacgtgctacaatggccggtacaaagagttgcgatgccgcgaggtggagctaatctcaaaaaaccggtctcagttcggattggagtctgcaactcgactccatgaagttggaatcgctagtaatcgcggatcagcatgccgcggtgaatacgttcccgggccttgtacacaccgcccgtcacaccacgggagtcgattggtcccgaagtgcgtgagctaacccgcaagggaggcagcgtcctaaggaatggtcggtgactggggtg

SEQ ID NO: 1472 - DNA, 1480 bp, Geobacter lovleyi
aacgaacgctggcggcgtgcctaacacatgcaagtcgaacggagtgaaggagcttgctctttcatttagtggcgcacgggtgagtaacgcgtagataatctgccttggactctgggataacatctcgaaaggggtgctaataccggataagcccacgatggcgtaagtcattgcgggaaaagggggcctctgaatatgctcctgattcaagatgagtctgcgtaccattagctagttggtagggtaagagcctaccaaggcgacgatggttagctggtctgagaggatgatcagccacactggaactgagacacggtccagactcctacgggaggcagcagtggggaattttgcgcaatgggggaaaccctgacgcagcaacgccgcgtgagtgatgaaggctttcgggtcgtaaagctctgtctagagggaagaaatgatagtcggttaatacccggttttcttgacggtacctctgaaggaagcaccggctaactccgtgccagcagccgcggtaatacggagggtgcaagcgttgttcggatttattgggcgtaaagcgcgtgtaggcggtttgttaagtctgatgtgaaagccctgggctcaacctgggaagtgcattggaaactggcagacttgaatacgggagagggtagtggaattcctagtgtaggagtgaaatccgtagatattaggaggaacaccggtggcgaaggcggctacctggaccgatattgacgctgagacgcgaaagcgtggggagcaaacaggattagataccctggtagtccacgccgtaaacgatgagtactaggtgttgcgggtattgacccctgcagtgccgcagctaacgcattaagtactccgcctgggaagtacggtcgcaagactaaaactcaaaggaattgacgggggcccgcacaagcggtggagcatgtggtttaattcgacgcaacgcgcagaaccttacctggtcttgacatctacggaacctctatgaaagtagagggtgcctttcggggagccgtaagacaggtgctgcatggctgtcgtcagctcgtgtcgtgagatgttgggttaagtcccgcaacgagcgcaacccctatcctcagttgccatcattaagttgggcactctgtggagactgccggtgtcaaaccggaggaaggtggggatgacgtcaagtcctcatggcccttatgaccagggctacacacgtgctacaatggccggtacaaagagttgcgatgccgcgaggtggagctaatctcataaagccggtctcagttcggattggagtctgcaactcgactccatgaagttggaatcgctagtaatcgcggatcagcatgccgcggtgaatacgttcccgggccttgtacacaccgcccgtcacaccacgggagtcgattggtcccgaagtacgtgagctaacccttttgggaggcagcgtcctaaggaatggtcggtgactggggtg

SEQ ID NO: 1473 - DNA, 1478 bp, Geobacter metallireducens
aacgaacgctggcggcgtgcctaacacatgcaagtcgaacgtgaagggggcttcggtccccggaaagtggcgcacgggtgagtaacgcgtggataatctgcccagtgatctgggataacatctcgaaaggggtgctaataccggataagcccacggagtccttggattctgcgggaaaagggggggaccttcgggccttttgtcactggatgagtccgcgtaccattagctagttggtggggtaatggcccaccaaggctacgatggttagctggtctgagaggatgatcagccacactggaactgagacacggtccagactcctacgggaggcagcagtggggaattttgcgcaatgggcgaaagcctgacgcagcaacgccgcgtgagtgatgaaggccctcgggtcgtaaagctctgtcgggagggaagaagtgattgagggttaataccccttggtcttgacggtacctccgaaggaagcaccggctaactccgtgccagcagccgcggtaatacggagggtgcaagcgttgttcggaattattgggcgtaaagcgcgtgtaggcggtttcttaagtctgatgtgaaagccccgggctcaacctgggaagtgcattggaaactgggagacttgagtacgggagagggtagtggaattcctagtgtaggagtgaaatccgtagatattaggaggaacaccggtggcgaaggcggctacctggaccgatactgacgctgagacgcgaaagcgtggggagcaaacaggattagataccctggtagtccacgccgtaaacgatgagtactaggtgttgcgggtattgacccctgcagtgccgcagctaacgcattaagtactccgcctgggaagtacggccgcaaggctaaaactcaaaggaattgacgggggcccgcacaagcggtggagcatgtggtttaattcgacgcaacgcgcagaaccttacctgggcttgacatccgcggaacctctatgaaagtagggggtgcccttcggggagccgcgagacaggtgctgcatggctgtcgtcagctcgtgtcgtgagatgttgggttaagtcccgcaacgagcgcaacccttatcttcagttgccatcattaagttgggcactctgaagaaactgccggtgtcaaaccggaggaaggtggggatgacgtcaagtcctcatggcccttatgtccagggctacacacgtgctacaatggccggtacaaagagttgcgatgccgcgaggtggagccaatctcaaaaagccggtctcagttcggattggagtctgcaactcgactccatgaagtcggaatcgctagtaatcgcggatcagcatgccgcggtgaatacgttcccgggccttgtacacaccgcccgtcacaccacgggagtcgactggtcccgaagtgcgtgagccaacccgcaagggaagcagcgccctaaggaatggtcggtgactggggtg

SEQ ID NO: 1474 - DNA, 1467 bp, Geobacter pelophilus
aacgaacgctggcggcgtgcctaacacatgcaagtcgaacggggttaaggggcttgctccttaacttagtggcgcacgggtgagtaacgcgtggataatctgcccgatgctcagggataacatctcgaaaggggtgctaatacctgataagcccacggactcttcggagtttgcgggaaaagggggggaccttcgggcctcccgacatcggatgagtccgcgtcccattagctagttggtggggtaaaggcctaccaaggcgacgatgggtagctggtctgagaggatgatcagccacactggaactgagacacggtccagactcctacgggaggcagcagtggggaattttgcgcaatgggggaaaccctgacgcagcaacgccgcgtgagtgatgaaggcctttgggtcgtaaagctctgtcagagggaaagaaatgtgtgcggttaatagccgttacacttgacggtaccctcaaaggaagcaccggctaactccgtgccagcagccgcggtaatacggagggtgcgagcgttgttcggaattattgggcgtaaagcgcgtgtaggcggcttattaagtctgatgtgaaagccctgggctcaacctgggaagtgcattggatactggtagacttgagtacgggagagggcagtggaattcccagtgtaggagtgaaatccgtagatattgggaggaacaccggtggcgaaggcggctgcctggaccgatactgacgctgagacgcgaaagcgtggggagcaaacaggattagataccctggtagtccacgccgtaaacgatgagtactaggtgttgcgggtattgacccctgcagtgccgtagctaacgcattaagtactccgcctgggaagtacggtcgcaagactaaaactcaaaggaattgacgggggcccgcacaagcggtggagcatgtggtttaattcgaagcaacgcgcagaaccttacctgggcttgacatctacggaaccttgtggaaacacaggggtgccttcgggagccgtaagacaggtgctgcatggctgtcgtcagctcgtgtcgtgagatgttgggttaagtcccgcaacgagcgcaacccctatccctagttgccatcattaagttgggcactctaaggagactgccggtgttaaaccggaggaaggtggggatgacgtcaagtcctcatggcccttatgtccagggctacacacgtgctacaatggccggtacaaagagttgcgataccgcgaggtggagctaatctcataaagccggtctcagttcggattggagtctgcaactcgactccatgaagttggaatcgctagtaatcgcggatcagcatgccgcggtgaatacgttcccgggccttgtacacaccgcccgtcacaccacgggagtcgattggtcccgaagtgcgtgagctaacccgcaagggaggcagcgtcctaaggaatggtcggt

SEQ ID NO: 1475 - DNA, 1477 bp, Geobacter pickeringii
aacgaacgctggcggcgtgcctaacacatgcaagtcgaacgcgaaaggggcttcggccctgagtaaagtggcgcacgggtgagtaacgcgtggataatctgcccgacgatctgggataacatctcgaaaggggtgctaataccggataagcccacggagtcttaggattctgcgggaaaagggggggaccttcgggcctcttgtcgtcggatgagtccgcgtaccattagctagttggcggggtaaaggcccaccaaggcgacgatggttagctggtctgagaggatgatcagccacactggaactgagacacggtccagactcctacgggaggcagcagtggggaattttgcgcaatgggcgaaagcctgacgcagcaacgccgcgtgagtgatgaaggccttcgggtcgtaaagctctgacagaagggaagaaatgcgggacggataatacctgtttcgcttgacggtaccttcaaaggaagcaccggctaactccgtgccagcagccgcggtaatacggagggtgcaagcgttgttcggaattattgggcgtaaagcgcgtgtaggcggtcttttaagtctgatgtgaaagccccgggctcaacctgggaagtgcattggaaactgggagacttgaatacgggagagggcagtggaattcctagtgtaggagtgaaatccgtagatattaggaggaacaccggtggcgaaggcggctgcctggaccgatattgacgctgagacgcgaaagcgtggggagcaaacaggattagataccctggtagtccacgccgtaaacgatgagtactaggtgttgcgggtattgacccctgcagtgccgcagctaacgcattaagtactccgcctgggaagtacggtcgcaagactaaaactcaaaggaattgacgggggcccgcacaagcggtggagcatgtggtttaattcgacgcaacgcgcagaaccttacctgggcttgacatccgcggaatcctgtggaaacacgggagtgccttcgggagccgcgagacaggtgctgcatggctgtcgtcagctcgtgtcgtgagatgttgggttaagtcccgcaacgagcgcaacccctatccctagttgccatcattaagttgggcactctaaggagactgccggtgtcaaaccggaggaaggtggggatgacgtcaagtcctcatggcccttatgtccagggctacacacgtgctacaatggccggtacaaagagtagcgatgccgcgaggtggagccaatctcataaagccggtctcagttcggattggagtctgcaactcgactccatgaagttggaatcgctagtaatcgcggatcagcatgccgcggtgaatacgttcccgggccttgtacacaccgcccgtcacaccacgggagtcgattggtcccgaagtgcgtgagctaacccctcggggaggcagcgccctaaggaatggtcggtgactggggtg

SEQ ID NO: 1476 - DNA, 1479 bp, Geobacter soli
aacgaacgctggcggcgtgcctaacacatgcaagtcgaacgtgatccgcccttcggggtggtgaaagtggcgcacgggtgagtaacgcgtggataatctgcccgaggatttgggataacatctcgaaaggggtgctaataccgaataagcccacggggtctacggatcttgcgggaaaagggggggaccttcgggcctcctgtccttggatgagtctgcgtaccattagctagttggtggggtaatggcctaccaaggcgacgatggttagctggtctgagaggatgatcagccacactggaactgagacacggtccagactcctacgggaggcagcagtggggaattttgcgcaatgggggaaaccctgacgcagcaacgccgcgtgggtgatgaaggccttcgggtcgtaaagctctgtctggagggaagaaatgattgggagctaatacctcttgatcttgacggtacctctgaaggaagcaccggctaactccgtgccagcagccgcggtaatacggagggtgcaagcgttgttcggaattattgggcgtaaagcgcgtgtaggcggtcttttaagtctgatgtgaaagccccgggctcaacctgggaagtgcattggaaactgggaggcttgagtacgggagaggagagtggaattcctagtgtaggagtgaaatccgtagatattaggaggaacaccggtggcgaaggcggctctctggaccgatactgacgctgagacgcgaaagcgtgggtagcaaacaggattagataccctggtagtccacgccgtaaacgatgagtactaggtgttgcgggtattgacccctgcagtgccgtagctaacgcattaagtactccgcctgggaagtacggtcgcaagactaaaactcaaaggaattgacgggggcccgcacaagcggtggagcatgtggtttaattcgacgcaacgcgcagaaccttacctgggcttgacatccacggaaccctcccgaaacggaggggtgcccttcggggagccgtgagacaggtgctgcatggctgtcgtcagctcgtgtcgtgagatgttgggttaagtcccgcaacgagcgcaacccttgtcatcagttgccatcattcagttgggcactctgatgaaactgccggtgtcaaaccggaggaaggtggggatgacgtcaagtcctcatggcccttatgtccagggctacacacgtgctacaatggccggtacaaagagtagcaataccgcgaggtggagccaatctcagaaagccggtctcagttcggattggagtctgcaactcgactccatgaagtcggaatcgctagtaatcgcggatcagcatgccgcggtgaatacgttcccgggccttgtacacaccgcccgtcacaccacgggagtcgactggtcccgaagtgcgtgagctaaccccttgtgggaggcagcgtcctaaggaatggtcggtgactggggtg

SEQ ID NO: 1477 - DNA, 1478 bp, Geobacter sulfurreducens
aacgaacgctggcggcgtgcctaacacatgcaagtcgaacgtgatccatccttcggggtggtgaaagtggcgcacgggtgagtaacgcgtggataatctgcccgaggatttgggataacatctcgaaaggggtgctaataccgaataagcccacggggtctacggatcttgcgggaaaagggggggactttcgggcctcctgtcttcggatgagtccgcgtaccattagctagttggtagggtaatggcctaccaaggcgacgatggttagctggtctgagaggatgatcagccacactggaactgagacacggtccagactcctacgggaggcagcagtggggaattttgcgcaatgggggaaaccctgacgcagcaacgccgcgtgggtgatgaaggccttcgggtcgtaaagccctgtcgggagggaagaaatgattgagagctaatacctcttggtcttgacggtacctccgaaggaagcaccggctaactccgtgccagcagccgcggtaatacggagggtgcaagcgttgttcggaattattgggcgtaaagcgcgtgtaggcggtcttttaagtctgatgtgaaagccccgggctcaacctgggaagtgcattggaaactgggagacttgagtacgggagaggagagtggaattcctagtgtaggagtgaaatccgtagatattaggaggaacaccggtggcgaaggcggctctctggaccgatactgacgctgagacgcgaaagcgtgggtagcaaacaggattagataccctggtagtccacgccgtaaacgatgagtactaggtgttgcgggtattgacccctgcagtgccgtagctaacgcattaagtactccgcctgggaagtacggtcgcaagactaaaactcaaaggaattgacgggggcccgcacaagcggtggagcatgtggtttaattcgacgcaacgcgcagaaccttacctgggcttgacatccacggaaccctcccgaaacggaggggtgcccttcggggagccgtgagacaggtgctgcatggctgtcgtcagctcgtgtcgtgagatgttgggttaagtcccgcaacgagcgcaacccttatcatcagttgccatcattaagttgggcactctgatgaaactgccggtgtcaaaccggaggaaggtggggatgacgtcaagtcctcatggcccttatgtccagggctacacacgtgctacaatggccggtacaaagagtcgcaatgccgcgaggtggagccaatctcaaaaagccggtctcagttcggattggagtctgcaactcgactccatgaagtcggaatcgctagtaatcgcggatcagcatgccgcggtgaatacgttcccgggccttgtacacaccgcccgtcacaccacgggagtcgactggtcccgaagtgcgtgagctaaccagcaatggaggcagcgtcctaaggaatggtcggtgactggggtg

SEQ ID NO: 1478 - DNA, 1480 bp, Geobacter thiogenes
aacgaacgctggcggcgtgcctaacacatgcaagtcgaacggagtgaaggagcttgctctttcatttagtggcgcacgggtgagtaacgcgtagataatctgccttagactctgggataacatctcgaaaggggtgctaatacctgataagcccacgatggcgaaagtcgttgcgggaaaagggggcctctgaatatgctcttgatctaagatgagtctgcgtaccattagctagttggtagggtaagagcctaccaaggctacgatggttagctggtctgagaggatgatcagccacactggaactgagacacggtccagactcctacgggaggcagcagtggggaattttgcgcaatgggggaaaccctgacgcagcaacgccgcgtgagtgatgaaggctttcgggtcgtaaagctctgtctagagggaagaaatgataattggttaatacccggttttcttgacggtacctctgaaggaagcaccggctaactccgtgccagcagccgcggtaatacggagggtgcaagcgttgttcggatttattgggcgtaaagcgcgtgtaggcggtttgttaagtctgatgtgaaagccctgggctcaacctgggaagtgcattggaaactggcagacttgaatacgggagagggtagtggaattcctagtgtaggagtgaaatccgtagatattaggaggaacaccggtggcgaaggcggctacctggaccgatattgacgctgagacgcgaaagcgtggggagcaaacaggattagataccctggtagtccacgccgtaaacgatgagtactaggtgttgcgggtattgacccctgcagtgccgcagctaacgcattaagtactccgcctgggaagtacggtcgcaagactaaaactcaaaggaattgacgggggcccgcacaagcggtggagcatgtggtttaattcgacgcaacgcgcagaaccttacctggtcttgacatctacggaaccttcgtgaaagcgaggggtgcctttcggggagccgtaagacaggtgctgcatggctgtcgtcagctcgtgtcgtgagatgttgggttaagtcccgcaacgagcgcaacccctatcctcagttgccatcattaagttgggcactctgtggagactgccggtgttaaaccggaggaaggtggggatgacgtcaagtcctcatggcccttatgaccagggctacacacgtgctacaatggccggtacaaagagttgcgatacagcgatgtggagctaatctcataaagccggtctcagttcggattggagtctgcaactcgactccatgaagttggaatcgctagtaatcgcggatcagcatgccgcggtgaatacgttcccgggccttgtacacaccgcccgtcacaccacgggagtcgattggtcccgaagtacgtgagctaacccttttgggaggcagcgtcctaaggaatggtcggtgactggggtg

SEQ ID NO: 1479 - DNA, 1476 bp, Geobacter uraniireducens
aacgaacgctggcggcgtgcttaacacatgcaagtcgaacgagaatcggagcttgctccgaggatagtggcgcacgggtgagtaacgcgtggataacctgccctggtatctgggataacatctcgaaaggggtgctaataccggataagcccacgggaactttggttcttgcgggaaaaggtggcctctgaatatgctactgtatcaggatgggtccgcgtaccattagctagttggtggtgtaatggaccaccaaggcgacgatggttagctggtctgagaggatgatcagccacactggaactgagacacggtccagactcctacgggaggcagcagtggggaattttgcgcaatgggggaaaccctgacgcagcaacgccgcgtgagtgatgaaggccttcgggtcgtaaagctctgtcagaggggaagaagtgtatgggtgctaataccatctttacttgacggtaccctcaaaggaagcaccggctaactccgtgccagcagccgcggtaatacggagggtgcaagcgttgttcggatttattgggcgtaaagcgcgtgtaggcggttttttaagtctgatgtgaaagccctgggctcaacccaggaagtgcattggaaactggaagacttgaatacgggagagggtagtggaattcctagtgtaggagtgaaatccgtagatattaggaggaacaccggtggcgaaggcggctacctggaccgatattgacgctgagacgcgaaagcgtggggagcaaacaggattagataccctggtagtccacgccgtaaacgatgagaactaggtgttgcgggtattgacccctgcagtgccgcagctaacgcattaagttctccgcctgggaagtacggtcgcaagactaaaactcaaaggaattgacgggggcccgcacaagcggtggagcatgtggtttaattcgacgcaacgcgcagaaccttacctgggcttgacatctgcggaacctggtggaaacatcggggtgccttcgggagccgcaagacaggtgctgcatggctgtcgtcagctcgtgtcgtgagatgttgggttaagtcccgcaacgagcgcaacccctgtccttagttgccatcattcagttgggcactctaaggagactgccggtgttaaaccggaggaaggtggggatgacgtcaagtcctcatggcccttatgtccagggctacacacgtgctacaatggccggtacaaagagttgcgatgccgcgaggtggagctaatctcaaaaagccggtctcagttcggattggagtctgcaactcgactccatgaagttggaatcgctagtaatcgcggatcagcatgccgcggtgaatacgttcccgggccttgtacacaccgcccgtcacaccacgggagtcgattggtcccgaagtgcgtgagctaacccgcaagggaggcagcgtcctaaggaatggtcggtgactggggtg

SEQ ID NO: 1480 - DNA, 1454 bp, Geopsychrobacter electrodiphilus
aacgaacgctggcggcgtgcctaacacatgcaagtcgaacgagaaagggacttcggtcctgagtagagtggcgcacgggtgagtaacacgtggataacctgccctaaggtctgggataacatttcgaaagggatgctaataccggataagcctacgacctcttcgggggatgtaggaaaagatttattgccttgggatgggtccgcggtccattagctagttggtagggtaatggcctaccaaggctacgatggatagctggtctgagaggatgatcagccacactggaactgagacacggtccagactcctacgggaggcagcagtggggaattttgcgcaatgggcgaaagcctgacgcagcaacgccgcgtgaaggatgaaggcccttgggtcgtaaacttctgtcagtggggaagaaatacccgtaagggagctgacggtacccacaaaggaagcaccggctaactccgtgccagcagccgcggtaatacggagggtgcaagcgttgttcggaattattgggcgtaaagcgcgtgtaggtggtctgttaagtctggtgtgaaagccctgggctcaacccaggaagtgcattggatactggcagacttgagtatgggagaggaaagcggaattccgagtgtaggagtgaaatccgtagatattcggaggaacaccagtggcgaaggcggctttctggaccaatactgacactgagacgcgaaagcgtggggagcaaacaggattagataccctggtagtccacgccgtaaacgatgggcactaggtgttgcgggtaaccactcctgcagtgccgaagctaacgcattaagtgccccgcctggggagtacggccgcaaggctaaaactcaaaggaattgacgggggcccgcacaagcggtggagcatgtggtttaattcgacgcaacgcgaagaaccttacctggatttgacatcccgatcgcatcccttggaaacttgggagtcagctcggctggatcggtgacaggtgctgcatggctgtcgtcagctcgtgtcgtgagatgttgggttaagtcccgcaacgagcgcaacccctatccttagttgccatcattaagttgggcactctagggagactgccggtgttaaaccggaggaaggtggggatgacgtcaagtcctcatggcccttatatccagggctacacacgtgctacaatggccggtacaaagggctgcgaactcgcgagagtaagctaatcccaaaaagccggtctcagttcggattggagtctgcaactcgactccatgaagttggaatcgctagtaatcgcgtatcagcatgacgcggtgaatacgttcccgggccttgtacacaccgcccgtcacaccacgggagtctattgtaccggaaaccggtgggctaacccttcggggaggcagccgtttatggtatgatcggtaactggggtg

SEQ ID NO: 1481 - DNA, 1389 bp, Geothermobacter ehrlichii
aacgaacgctggcggcatgcctaacacatgcaagtcgaacgcgaaagcttccttcgggaagcgagtagagtggcgcacgggtgagtaacacgtggataacctgcccggtgatctgggataacatctcgaaaggggtgctaataccggataagctcacagggacttcggtcctggtgggaaaagatggcctcttcttgaaagctattgtcaccggatgggtccgcggcccattagctagttggtagggtaatggcctaccaaggcaacgatgggtagctggtctgagaggatgatcagccacactggaactgagacacggtccagactcctacgggaggcagcagtggggaattttgcgcaatgggcgaaagcctgacgcagcaatgccgcgtgagtgaagaaggccttcgggtcgtaaagctctgtcagaggggaagaaactcctgatggctaatacctgtcaggactgacggtaccctcaaaggaagcccgggctaactccgtgccagcagccgcggtaatacggagggtccgagcgttgttcgaaattattgggcgtaaagcgcgtgtaggcggtccgttaagtctgatgtgaaagcccggggctcaacctcggaagtgcattggaaactggcggacttgagtacgggagagggaagtggaattccgagtgtaggggtgaaatccgtagatattcggaggaacaccggtggcgaaggcggcttcctggaccgatactgacgctgagacgcgaaagcgtggggagcaaacaggattagataccctggtagtccacgccgtaaacgatgggtactaggtgttgcgggtattgacccctgcagtgccgtagctaacgcattaagtaccccgcctggggagtacggtcgcaagattaaaactcaaaggaattgacgggggcccgcacaagcggtggagcatgtggtttaattcgacgcaacgcgaagaaccttacctgggcttgacatcccgatcgtatcccatggaaacatgggagtcagttcggctggatcggtgacaggtgctgcatggctgtcgtcagctcgtgtcgtgagatgttgggttaagtcccgcaacgagcgcaacccttgtccttagttgccatcattcagttgggcactctagggagactgccggtgttaaaccggaggaaggtggggatgacgtcaagtcctcatggcccttatgtccagggctacacacgtgctacaatggccggtacaaagggtagcgataccgtgaggtggagccaatcccaaaaagccggtctcagttcggattggagtctgcaactcgactccatgaagttggaatcgctagtaatcgcgtatcagcatgacgcggtaatacgtgcccgggcttctcgactcc

SEQ ID NO: 1482 - DNA, 1474 bp, Geovibrio thiophilus
aacgaacgctggcggcgtgcttaacacatgcaagtctaggggaattcgctttcgggcgatagtacactggcgaacgggtgagtaacgcgtgaggaacctaccctgaagattgggacaacacagagaaatttgtgctaataccggataagcccacgtacttagttgtgtgtgggaaaagacggggtaacctgtcgctttgggatggcctcgcgtgccattagctagttggtagggtaatggcctaccaaggctacgatggctaggcggcctgagagggtggccgcccacactggaactgagacacggtccagactcctacgggaggcagcagtggggaattttgcgcaatgaccgaaaggttgacgcagcaacgccgcgtgtatgatgaaggctttcgggtcgtaaagtactttcagtggggaagaatggcatgaggagtaactgccttgtgattgacggtacccacagaagcagccccggctaactccgtgccagcagccgcggtaatacggagggggcaagcgttgttcggagtcactgggcgtaaagagctcgtaggcggcgatgtaagtcgggagttaaaggcaacagctcaactgttgtagggcttctgaaactacattgctagagtaccagagaggtatgcggaattccctgtgtagcggtgaaatgcgtagatatagggaggaacaccggttgcgaaggcggcatactggctggtaactgacgctgaggagcgaaagcgtgggtagcaaacaggattagataccctggtagtccacgctgtaaacgatggatgctaggtgttggatgtaaccacattcagtgccgaagctaacgcattaagcatcccgcctggggagtacggtcgcaagactgaaactcaaaggaattgacgggggcccgcacaagcggtggagcacgtggtttaattcgatgctaaccgcagaaccttacccgggtttgacatcttcaaaatacgatagagatattgtagtgcttactttcagtaagaattgaatgacaggtgctgcatggctgtcgtcagctcgtgccgtgaggtgttgggttaagtcccgcaacgagcgcaacccctgcttttagttgccatcgggtcaagccgggcactctagaggaacagccgtcgacaaggcggaggaaggtggggacgacgtcaagtcatcatggcccttatgtccggggctacacacgtgctacaatggcgtatacagagggcagcgagacagtgatgttaagcgaatcccagaaagtacgcctcagttcagattgtagtctgcaactcgactacatgaagtcggaatcgctagtaatcgcaggtcagcaaaactgcggtgaatacgttcccgggccttgtacacaccgcccgtcacaccacgggagtcgaccgtacctgaagccggtggcctaaccttttaagagggagccgtctatggtatagttggtaactggggtg

SEQ ID NO: 1483 - DNA, 1464 bp, Gibbsiella quercinecans
attgaacgctggcggcaggcctaacacatgcaagtcgagcggcagcgggaggaagcttgcttcctcgccggcgagcggcggacgggtgagtaatgtctgggaaactgcccgatggagggggataactactggaaacggtagctaataccgcataacgtcgcaagaccaaagtgggggaccttcgggcctcacaccatcggatgtgcccagatgggattagctagtaggtggggtaatggctcacctaggcgacgatccctagctggtctgagaggatgaccagccacactggaactgagacacggtccagactcctacgggaggcagcagtggggaatattgcacaatgggcgcaagcctgatgcagccatgccgcgtgtgtgaagaaggccttcgggttgtaaagcactttcagcgaggaggaaggcgttgtagttaataactgcagcgattgacgttactcgcagaagaagcaccggctaactccgtgccagcagccgcggtaatacggagggtgcaagcgttaatcggaattactgggcgtaaagcgcacgcaggcggtctgttaagtcagatgtgaaatccccgggcttaacctgggaactgcatttgaaactggcaggctagagtctcgtagaggggggtagaattccaggtgtagcggtgaaatgcgtagagatctggaggaataccggtggcgaaggcggccccctggacgaagactgacgctcaggtgcgaaagcgtggggagcaaacaggattagataccctggtagtccacgctgtaaacgatgtcgatttggaggttgtggccttgagccgtggcttccggagctaacgcgttaaatcgaccgcctggggagtacggccgcaaggttaaaactcaaatgaattgacgggggcccgcacaagcggtggagcatgtggtttaattcgatgcaacgcgaagaaccttacctactcttgacatccacggaacttgccagagatggcttggtgccttcgggaaccgtgagacaggtgctgcatggctgtcgtcagctcgtgttgtgaaatgttgggttaagtcccgcaacgagcgcaacccttatcctttgttgccagcggttcggccgggaactcaaaggagactgccagtgataaactggaggaaggtggggatgacgtcaagtcatcatggcccttacgagtagggctacacacgtgctacaatggcatatacaaagagaagcgacctcgcgagagcaagcggacctcataaagtatgtcgtagtccggattggagtctgcaactcgactccatgaagtcggaatcgctagtaatcgtagatcagaatgctacggtgaatacgttcccgggccttgtacacaccgcccgtcacaccatgggagtgggttgcaaaagaagtaggtagcttaaccttcgggagggcgcttaccactttgtgattcatgactggggtg

SEQ ID NO: 1484 - DNA, 1455 bp, Giesbergeria anulus
attgaacgctggcggcatgccttacacatgcaagtcgaacggtaacaggtcttcggatgctgacgagtggcgaacgggtgagtaatacatcggaacgtgcccaatcgtgggggataacgcagcgaaagctgtgctaataccgcatacgatctacggatgaaagcgggggatcttcggacctcgcgcgaatggagcggccgatggcagattaggtagttggtagggtaaaagcctaccaagccgacgatctgtagctggtctgagaggacgaccagccacactgggactgagacacggcccagactcctacgggaggcagcagtggggaattttggacaatgggcgcaagcctgatccagcaatgccgcgtgcaggatgaaggccttcgggttgtaaactgcttttgtacggagcgaaaaggtctcttctaatacaggaggcccatgacggtaccgtaagaataagcaccggctaactacgtgccagcagccgcggtaatacgtagggtgcaagcgttaatcggaattactgggcgtaaagcgtgcgcaggcggtgttgtaagacagaggtgaaatccccgggctcaacctgggaactgcctttgtgactgcaacgctagagtacggcagagggggatggaattccgcgtgtagcagtgaaatgcgtagatatgcggaggaacaccgatggcgaaggcaatcccctgggcctgtactgacgctcatgcacgaaagcgtggggagcaaacaggattagataccctggtagtccacgccctaaacgatgtcaactggttgttgggtcttcactgactcagtaacgaagctaacgcgtgaagttgaccgcctggggagtacggccgcaaggttaaaactcaaaggaattgacggggacccgcacaagcggtggatgatgtggtttaattcgatgcaacgcgaaaaaccttacccacctttgacatggcagaaatcctttagagatagaggagtgctcgaaagagaatctgcacacaggtgctgcatggctgtcgtcagctcgtgtcgtgagatgttgggttaagtcccgcaacgagcgcaacccttgccattagttgctacatttagttgggcactctaatgggactgccggtgacaaaccggaggaaggtggggatgacgtcaagtcctcatggcccttataggtggggctacacacgtcatacaatggctggtacaaagggttgccaacccgcgagggggagctaatcccataaagccagtcgtagtccggatcgcagtctgcaactcgactgcgtgaagtcggaatcgctagtaatcgtggatcagaatgtcacggtgaatacgttcccgggtcttgtacacaccgcccgtcacaccatgggagcgggttctgccagaagtaggtagcctaaccgtaaggagggcgcttaccacggcagggttcgtgactggggtg

SEQ ID NO: 1485 - DNA, 1460 bp, Gilliamella bombicola
attgaacgctggcggcaggcttaacacatgcaagtcgaacggtaacatgagtgcttgcacttgatgacgagtggcggacgggtgagtaaagtatggggatctgccgaatggaaggggacaacagttggaaacgactgctaataccgtataaagtcgtaagaccaaagcatgggactttcgggccatgcgccatttgatgaacccatatgggattagctagtaggtggggtaaaggctcacctaggcgacgatctctagctggtctgagaggatgaccagccacactggaactgagacacggtccagactcctacgggaggcagcagtggggaatattgcacaatggggggaaccctgatgcagccatgccgcgtgtatgaagaaggccttcgggttgtaaagtactttcggtgatgaggaaggtaatgtatctaataggtgcattaattgacgttaatcacagaagaagcaccggctaactccgtgccagcagccgcggtaatacggagggtgcgagcgttaatcggaatgactgggcgtaaagggcatgtaggcggataattaagttaggtgtgaaagccctgggctcaacctaggaattgcacttaaaactggttaactagagtattgtagaggaaggtagaattccacgtgtagcggtgaaatgcgtagagatgtggaggaataccggtggcgaaggcggccttctggacagatactgacgctgagatgcgaaagcgtggggagcaaacaggattagataccctggtagtccacgctgtaaacgatgtcgatttggagtttgttgcctagagtgatgggctccgaagctaacgcgataaatcgaccgcctggggagtacggccgcaaggttaaaactcaaatgaattgacgggggcccgcacaagcggtggagcatgtggtttaattcgatgcaacgcgaagaaccttacctggtcttgacatccacagaatcttgtagagatacgagagtgccttcgggaactgtgagacaggtgctgcatggctgtcgtcagctcgtgttgtgaaatgttgggttaagtcccgcaacgagcgcaacccttatcctttgttgccattggtacggccgggaactcaaaggagactgccgttgataaagcggaggaaggtggggacgacgtcaagtcatcatggcccttacgaccagggctacacacgtgctacaatggcgtatacaaagagaagcgacctcgcgagagcaagcggacctcataaagtacgtctaagtccggattggagtctgcaactcgactccatgaagtcggaatcgctagtaatcgtgaatcagaatgtcacggtgaatacgttcccgggccttgtacacaccgcccgtcacaccatgggagtgggttgcaccagaagtagatagcttaaccttcgggagggcgtttaccacggtgtggttcatgactggggtg

SEQ ID NO: 1486 - DNA, 1460 bp, Gilliamella intestini
  misc_feature (1255)..(1255): n is a, c, g, or t
attgaacgctggcggcaggcttaacacatgcaagtcgaacggtaacataagtgcttgcacttgatgacgagtggcggacgggtgagtaaagtatggggatctgccgaatggtaggggacaacagttggaaacgactgctaataccgtataaagttgagagaccaaagcatgggacctacgggccatgcgccatttgatgaacccatatgggattagctagtaggtggggtaatggctcacctaggcgacgatctctagctggtctgagaggatgaccagccacactggaactgagacacggtccagactcctacgggaggcagcagtggggaatattgcacaatgggggtaaccctgatgcagccatgccgcgtgtatgaagaaggccttcgggttgtaaagtactttcggtgatgaggaaggcggtgtatctaataggtgcatcgattgacgttaatcacagaagaagcaccggctaactccgtgccagcagccgcggtaatacggagggtgcgagcgttaatcggaatgactgggcgtaaagggcatgtaggcggataattaagttaggtgtgaaagccctgggcttaacctaggaattgcacttaaaactggttaactagagtattgtagaggaaggtagaattccacgtgtagcggtgaaatgcgtagagatgtggaggaataccggtggcgaaggcggccttctggacagatactgacgctgagatgcgaaagcgtggggagcaaacaggattagataccctggtagtccacgctgtaaacgatgtcgatttggagtttgttgcctagagtgatgggctccgaagctaacgcgataaatcgaccgcctggggagtacggccgcaaggttaaaactcaaatgaattgacgggggcccgcacaagcggtggagcatgtggtttaattcgatgcaacgcgaagaaccttacctggtcttgacatccacagaatcttgtagagatacgagagtgccttcgggaactgtgagacaggtgctgcatggctgtcgtcagctcgtgttgtgaaatgttgggttaagtcccgcaacgagcgcaacccttatcctttgttgccatcgattaggtcgggaactcaaaggagactgccgttgataaagcggaggaaggtggggacgacgtcaagtcatcatggcccttacgaccagggctacacacgtgctacaatggcgtatacaaagggaggcgacctcgcgagagtaagcggacctcanaaagtacgtctaagtccggattggagtctgcaactcgactccatgaagtcggaatcgctagtaatcgtgaatcagaatgtcacggtgaatacgttcccgggccttgtacacaccgcccgtcacaccatgggagtgggttgcaccagaagtagatagcttaaccttcgggagggcgtttaccacggtgtggttcatgactggggtg

SEQ ID NO: 1487 - DNA, 1466 bp, Gimesia maris
aatgaacgttggcggcgtggattaggcatgcaagtcggacgagaagtttccttcgggaaatggaaagtggcaaacggggtagtaaggcgtaggtgacgtaccctcaggttcgggatagccacgggaaaccgtgattaataccgaatgatctctctttgtatggtgcattgagagcaaaggtgtgattccgccagaggagcggcttacgtgatattaggtagttggtgaggtaatggctcaccaagccttagatgtctagggggtgtgagagcatggcccccaccactgggactgagacactgcccagacacctacgggtggctgcagtcgagaatcttcggcaatggacgcaagtctgaccgagcgacgccgcgtgcgggatgaaggcccttgggttgtaaaccgctgtcagaggggatgaaatgcagaagggttatcccttttgtttgacagagcctcagaggaagcacgggctaagtacgtgccagcagccgcggtaacacgtactgtgcgaacgttattcggaatcactgggcttaaagggtgcgtaggcggtttagtaagtagggtgtgaaatgccagggctcaaccttggcacggcgctctaaactgctaaacttgagtgagataggggtgtacggaacttccggtggagcggtgaaatgcgttgatatcggaaggaacaccggtggcgaaagcggtacactgggtcttaactgacgctgaggcacgaaagctagggtagcgaacgggattagataccccggtagtcctagccgtaaacgatgagtactagttgggaggagcttcggctcatccggacgtagcgaaagcattaagtactccgcctggggagtatggtcgcaaggctgaaactcaaaggaattgacgggggctcacacaagcggtggagcatgtggcttaattcgaggcaacgcgaagaaccttatcctggatttgacatgcttgtattagctctgtgaaagcagagtgacgccttcgggtggaacttgcacaggtgctgcatggctgtcgtcagctcgtgtcgtgagatgtcgcgttaagtcgctgaacgagcgaaacccctatccttagttgccagcacgtcatggtggggactctaaggagactgccggtgtcaaaccggaggaaggtggggacgacgtcaagtcatcatggcctttatgtccagggctgcacacgtgctacaatgcggcgtacaaagggaagcaaaatcgcgagatcaagcaaatcccaaaaagcgtcgctcagttcggattgcaggctgcaactcgcctgcatgaagttggaatcgctagtaatcgcaggtcagctatactgcggtgaatatgttcctgagccttgtacacaccgcccgtcaagccacgaaagcggggggcgtccaaagtcgctgagctaacccttcggggaggcaggcgcctaagatgaactccgtgattgggact

SEQ ID NO: 1488 - DNA, 1455 bp, Glaciecola nitratireducens
attgaacgctggcggcaggcctaacacatgcaagtcgaacggaaacatgtctagcttgctagatgatgtcgagtggcggacgggtgagtaatgcctgggaatttgcctttgtgtgggggataaccattggaaacgatggctaataccgcatgatacctacgggtcaaagggggcttcggctcccgcgcaaagagaagcccaggtgagattagctagttggtgaggtaaaggctcaccaaggcgacgatctctagctgttctgagaggaagatcagccacactggaactgagacacggtccagactcctacgggaggcagcagtggggaatattgcacaatgggcgaaagcctgatgcagccatgccgcgtgtgtgaagaaggccttcgggttgtaaagcactttcagttgtgaggaaaggttgacggttaatacccgtcagctgtgacgttagcaacagaagaagcaccggctaactccgtgccagcagccgcggtaatacggagggtgcaagcgttaatcggaattactgggcgtaaagcgcacgcaggcggtctgttaagctagatgtgaaagccccgcgctcaacgtgggatggtcatttagaactggcagactagagttttggagaggagagtggaattccaggtgtagcggtgaaatgcgtagatatctggaggaacatcagtggcgaaggcgactctctggtcaataactgacgctcatgtgcgaaagtgtgggtagcgaacaggattagataccctggtagtccacaccgtaaacgctgtctactaactgtttgtggatttaatccgtgagtagtgaagctaacgcgataagtagaccgcctggggagtacggccgcaaggttaaaactcaaatgaattgacgggggcccgcacaagcggtggagcatgtggtttaattcgatgcaacgcgaagaaccttacctactcttgacatacttggaatttttcagagatgaattagtgccttcgggaaccaagatacaggtgctgcatggctgtcgtcagctcgtgtcgtgagatgttgggttaagtcccgcaacgagcgcaacccttgtccttatttgccagcattaagttgggtactctaaggagactgccggtgacaaaccggaggaaggtggggacgacgtcaagtcatcatggcccttacgagtagggctacacacgtgctacaatggcgagtacaaagggatgcaaactggtgacagtaagcggaccccttaaagctcgtcgtagtccggattggagtctgcaactcgactccatgaagtcggaatcgctagtaatcgtaggtcagcatactacggtgaatacgttcccgggccttgtacacaccgcccgtcacaccatgggagtgggatgcaaaagaagtagttagtctaaccttcgggaggacgattaccactttgtgtttcatgactggggtg

SEQ ID NO: 1489 - DNA, 1455 bp, Glaciecola pallidula
attgaacgctggcggcaggcctaacacatgcaagtcgaacggaaacatgtctagcttgctagatgatgtcgagtggcggacgggtgagtaatgcctgggaatttgccttagtgtgggggataactattggaaacgatagctaataccgcataatacctacgggtcaaagggggcttcggctcccgcgctaagagaagcccaggtgagattagcttgttggtgaggtaaaggctcaccaaggcgacgatctctagctgttctgagaggaagatcagccacactggaactgagacacggtccagactcctacgggaggcagcagtggggaatattgcacaatggaggaaactctgatgcagccatgccgcgtgtgtgaagaaggccttcgggttgtaaagcactttcagttgtgaggaaaggttagtagttaatacctgctagctgtgacgttaacaacagaagaagcaccggctaactccgtgccagcagccgcggtaatacggagggtgcaagcgttaatcggaattactgggcgtaaagcgcacgcaggcggtctgttaagctagatgtgaaagccccgcgctcaacgtgggatggtcatttagaactggcagactagagttttggagaggagagtggaattccaggtgtagcggtgaaatgcgtagatatctggaggaacatcagtggcgaaggcgactctctggtcaataactgacgctcatgtgcgaaagtgtgggtagcgaacgggattagataccccggtagtccacaccgtaaacgctgtctactaactgtttgtggatttaatccgtgagtagtgaagctaacgcgataagtagaccgcctggggagtacggccgcaaggttaaaactcaaatgaattgacgggggcccgcacaagcggtggagcatgtggtttaattcgatgcaacgcgaagaaccttacctactcttgacatactagaaacttttcagagatgaattggtaccttcggggatctagatacaggtgctgcatggctgtcgtcagctcgtgtcgtgagatgttgggttaagtcccgcaacgagcgcaacccttgtccttatttgccagcattaagttgggtactctaaggagactgccggtgacaaaccggaggaaggtggggacgacgtcaagtcatcatggcccttacgagtagggctacacacgtgctacaatggcgagtacaaagggatgcaaactggtgacagtaagcggaccccttaaagctcgtcgtagtccggattggagtctgcaactcgactccatgaagtcggaatcgctagtaatcgtaggtcagcatactacggtgaatacgttcccgggccttgtacacaccgcccgtcacaccatgggagtgggatgcaaaagaagtagttagtctaaccttcgggaggacgattaccactttgtgtttcatgactggggtg

SEQ ID NO: 1490 - DNA, 1466 bp, Glaciecola punicea
attgaacgctggcggcaggcctaacacatgcaagtcgaacggtaacatttctagcttgctagaagatgacgagtggcggacgggtgagtaatacttagggatctgccctttggagggggataaccattggaaacgatggctaataccgcatattacctacgggtaaaagggggcgctgtacttgtacaggctcgcgccaaaggaggaacctaagcgagattagctagttggtagggtaaaggcctaccaaggcgacgatctctagctgttctgagaggaagatcagccacactgggactgagacacggcccagactcctacgggaggcagcagtggggaatattgcacaatgggggcaaccctgatgcagccatgccgcgtgtgtgaagaaggccttcgggttgtaaagcactttcagttgtgaggaaagggatttggttaatacccaaattctgtgacgttagcaacagaagaagcaccggctaactccgtgccagcagccgcggtaatacggagggtgcaagcgttaatcggaattactgggcgtaaagcgcacgcaggtggttaattaagctagaagtgaaagccctgcgctcaacgtgggaaggccttttagaactggttaactagagtcttggagaggggagtggaattccaggtgtagcggtgaaatgcgtagatatctggaggaacatcagtggcgaaggcgactctctggccaaagactgacactcatgtgcgaaagtgtgggtagcgaacaggattagataccctggtagtccacaccgtaaacgctgtctactagctgtttgtggatttaatccgtgagtagcgaagctaacgcgataagtagaccgcctggggagtacggccgcaaggttaaaactcaaatgaattgacgggggcccgcacaagcggtggagcatgtggtttaattcgatgcaacgcgaagaaccttacctactcttgacatactagaaacttttcagagatgaattggtgccttcgggaatctagatacaggtgctgcatggctgtcgtcagctcgtgtcgtgagatgttgggttaagtcccgcaacgagcgcaacccttgtccttagttgccagcatttagttgggcactttaaggagactgccggtgacaaaccggaggaaggtggggacgacgtcaagtcatcatggcccttacgagtagggctacacacgtgctacaatggcgagtacagagggctgcaaactagtgatagtaagcgaaccccttaaagctcgtcgtagtccggattggagtctgcaactcgactccatgaagtcggaatcgctagtaatcgcagatcagaatgctgcggtgaatacgttcccgggccttgtacacaccgcccgtcacaccatgggagtgggttgcaaaagaagtagctagtttaaccttcgggagaacggttaccactttgtgattcatgactggggtg

SEQ ID NO: 1491 - DNA, 1477 bp, Glaesserella parasuis
  misc_feature (85)..(85): n is a, c, g, or t
  misc_feature (96)..(96): n is a, c, g, or t
  misc_feature (370)..(370): n is a, c, g, or t
  misc_feature (445)..(445): n is a, c, g, or t
  misc_feature (661)..(661): n is a, c, g, or t
  misc_feature (670)..(670): n is a, c, g, or t
  misc_feature (827)..(828): n is a, c, g, or t
  misc_feature (840)..(840): n is a, c, g, or t
  misc_feature (914)..(914): n is a, c, g, or t
  misc_feature (963)..(963): n is a, c, g, or t
  misc_feature (1088)..(1088): n is a, c, g, or t
  misc_feature (1165)..(1165): n is a, c, g, or t
  misc_feature (1413)..(1413): n is a, c, g, or t
  misc_feature (1445)..(1445): n is a, c, g, or t
aattgaagagtttgatcatggctcagattgaacgctggcggcaggcttaacacatgcaagtcgaacggtagcaggaagaagcttncttctttgctnacgagtggcggacgggtgagtaatgcttgggaatctggcttatggagggggataactacgggaaactgtagctaataccgcgtagtatcgggagatgaaagactgggaccgcaaggccagttgccataagatgagcccaagtgggattaggtagttggtggggtaaaggcctaccaagccgacgatctctagctggtctgagaggatgaccagccacactggaactgagacacggtccagactcctacgggaggcagcagtggggaatattgcncaatggggggaaccctgatgcagccatgccgcgtgaatgaagaaggccttcgggttgtaaagttctttcggtgangaggaagggtggtgttttaatagaacactacattgacgttagtcacagaagaagcaccggctaactccgtgccagcagccgcggtaatacggagggtgcgagcgttaatcggaatgactgggcgtaaagggcacgcaggcggtgacttaagtgagatgtgaaagccccgagcttaacttgggaattgcatttcatactgggttgctagagtatttnagggagggntagaattccacgtgtagcggtgaaatgcgtagagatgtggaggaataccgaaggcgaaggcagccccttgggaaaatactgacgctcatgtgcgaaagcgtggggagcaaacaggattagataccctggtagtccacgctgtaaacgctgtcgattnngggattgggctnagagcttggtgcccgtagctaacgtgataaatcgaccgcctggggagtacggccgcaaggttaaaactcaaatnaattgacgggggccgcacaagcggtggagcatgtggtttaattcgatgnaacgcgaagaaccttacctactcttgacatcctaagaagaactcagagatgagtttgtgccttcgggaacttagagacaggtgctgcatggctgtcgtcagctcgtgttgtgaaatgttgggttnagtcccgcaacgagcgcaacccttatcctttgttgccagcgattcggtcgggaactcaaaggagactgccagtgatnaactggaggaaggtggggatgacgtcaagtcatcatggcccttacgagtagggctacacacgtgctacaatggtgcatacagagggtgacgaagccgcgaggtggagtgaatctcagaaagtgcatctaagtccggattggagtctgcaactcgactccatgaagtcggaatcgctagtaatcgcgaatcagaatgtcgcggtgaatacgttcccgggccttgtacacaccgcccgtcacaccatggnagtgggttgtaccagaagtagatagcttaacngaaaggggggcgtttaccacggtatgattcat

SEQ ID NO: 1492 - DNA, 1407 bp, Gloeobacter kilaueensis
gatgaacgctggcggcgtgcttaacacatgcaagtcgaacgagatcttcggatctagtggcggacgggtgagtaacacgtgggaatctgccctcaggagggggataacattcggaaacgagtgctaataccccatatgccgcaaggtgaaatgaatttcgcctgaggatgagcccgcgtctgattagctagttggtggggtaatggcctaccaaggcgacgatcagtagctggtctgagaggatgatcagccacactgggactgagacacggcccagactcctacgggaggcagcagtggggaattttccgcaatgggcgaaagcctgacggagcaacgccgcgtgggtgatgaaggcccgtgggtcgtaaaacccttttgtcagggacgaaacctgacggtacctgacgaataagcatcggctaactccgtgccagcagccgcggtaatacggaggatgcaagcgttatccggaattattgggcgtaaagcgtacgtaggtggccagccaagtctggggtcaaagcccgcagcctaactgcggaaaggccctggaaactggttggctagagtgcggtaggggcaaggggaattcccggtgtagcggtgaaatgtggagatatcgggaagaacaccagcggcgaaagcgccttgctggaccgcaactgacgctgaggtacgaaagccaggggagcaaatgggattagataccccagtagtcctggccgtaaacgttggacactaggtgttgcgcgtatcgacccgtgcagtgccgtagctaacgcgttaagtgtcccgcctggggagtacgcacgcaagtgtgaaactcaaaggaattgacgggggcccgcacaagcggtggagcatgtggtttaattcgatgcaacgcgaagaaccttaccagggcttgacatgtcgcgaacctcgcggaaacgtgggggtgccttcgggaacgcgaacacaggtgctgcatggctgtcgtcagctcgtgtcgtgagatgttgggttaagtcccgcaacgagcgcaaccctcgtcgtcagttgccatcattcagttgggcactctggcgagactgccggtgacaaaccggaggaaggtggggatgacgtcaagtcagcatggctcttacgtcctgggctacacacgtgctacaatggttcggataaagggctgcaatcccgcgagggggagccaatcccataaaccgaatctcagttcggattgtaggctgcaactcgcctacatgaagtcggaatcgctagtaatcgcaggtcagcatactgcggtgaatacgttcccgggccttgtacacaccgcccgtcacaccatgggagctggtcatgcccgaagtcggtatcctaaccgcaaggagggagccgccgaaggcggggccggtgactggggtg

SEQ ID NO: 1493 - DNA, 1407 bp, Gloeobacter violaceus
gatgaacgctggcggcgtgcttaacacatgcaagtcgaacgagatcttcggatcgagtggcggacgggtgagtaacacgtgggaatctgccctcaggagggggataacggccggaaacggccgctaataccccatatgccgcaaggtgaaatgaatttcgcctgaggatgagcccgcgtctgattagctagttggtggggtaatggcctaccaaggctacgatcagtagctggtctgagaggatgatcagccacactgggactgagacacggcccagactcctacgggaggcagcagtggggaattttccgcaatgggcgaaagcctgacggagcaacgccgcgtgggtgatgaaggcccgtgggtcgtaaagcccttttgtcagggacgaaacctgacggtacctgacgaataagcatcggctaactccgtgccagcagccgcggtaatacggaggatgcaagcgttatccggaattattgggcgtaaagcgtacgtaggcggccagccaagtctggggtcaaagcccgcagcctaactgcggaaaggccctggaaactggttggctagagtgcggtaggggcaaggggaattcccggtgtagcggtgaaatgtggagatatcgggaagaacaccagcggcgaaagcgccttgctggaccgcaactgacgctgaggtacgaaagccaggggagcaaatgggattagataccccagtagtcctggccgtaaacgatggacactaggtgttgcgcgtatcgacccgtgcagtgccgtagctaacgcgttaagtgtcccgcctggggagtacgcacgcaagtgtgaaactcaaaggaattgacgggggcccgcacaagcggtggagcatgtggtttaattcgatgcaacgcgaagaaccttaccagggcttgacatgtcgcgaatctcgcggaaacgtgggagtgccttcgggaacgcgaacacaggtgctgcatggctgtcgtcagctcgtgtcgtgagatgttgggttaagtcccgcaacgagcgcaaccctcgtcgtcagttgccatcattcagttgggcactctggcgagactgccggtgacaaaccggaggaaggtggggatgacgtcaagtcagcatggctcttacgtcctgggctacacacgtgctacaatggttcggataaagggtcgcaatctcgcgagggggagccaatcccataaaccgaatctcagttcggattgcaggctgcaactcgcctgcatgaagtcggaatcgctagtaatcgcaggtcagcatactgcggtgaatacgttcccgggccttgtacacaccgcccgtcacaccatggaagctggtcatgcccgaagtcggtattctaaccgcaaggagggagccgccgaaggcggggccggtgactggggtg

SEQ ID NO: 1494 - DNA, 1411 bp, Gloeomargarita lithophora
gatgaacgctggcggcgtgcttaacacatgcaagtcgaacggggtagcaatacctagtggcggacgggtgagtaacgcgtgagaacctggcttgaggtgggggacaacagttggaaacgactgctaataccccatatgccgaggggtgaaagatttatcgccttaaggggggctcgcgtccgattagcttgttggtggggtaatggcctaccaaggcgacgatcggtagctggtttgagaggacgaccagccacactgggactgagacacggcccagactcctacgggaggcagcagtggggaattttccgcaatgggcgcaagcctgacggagcaacgccgcgtgtgggatgaaggcctgtgggttgtaaaccacttttctcagggacgaacacaatgacggtacctgaggaatcagcctcggctaactctgtgccagcagccgcggtaagacagaggaggcaagcgttatccggaattattgggcgtaaagcgtccgtaggtggtctagcaagtctggggttaaagcccggagcccaactccggatcggccttggaaactgccagactcgagtaaggtaggggttgcgggaattcccggtgtagcggtgaaatgcgtagatatcgggaagaacaccagcggcgaaagcgcgcaactgggccattactgacactgagggacgaaagctaggggagcgaatgggattagataccccagtagtcctagccgtaaacgatggtgactagatgtggctcgtattgacccgagccgtgtcgtagctaacgcgataagtcacccgcctggggagtacgcacgcaagtgtgaaactcaaaggaattgacgggggcccgcacaagcggtggagcatgtggattaattcgatgcaacgcgaagaaccttaccagggcttgacatcctgcgaaccccgctgaaaggtgggggtgccttcgggagcgcagagacaggtggtgcatggctgtcgtcagctcgtgtcgtgagatgttgggttaagtcccgcaacgagcgcaacccgcgtccttagttgccagcatttagttgggcactctggggagactgccggtgacaagccggaggaaggtgcggatgacgtcaagtcagcatgccccttaccgccctgggcgtcacacgtgctacaatggccagcacaaagggtagccagccagcgatggtgagccaatcccataaagttggtctcagttcagatcggagtctgcaactcgactccgtgaaggcggaatcgctagtaatcgcaggtcagccatactgcggtgaatacgttcccgggccttgtacacaccgcccgtcacaccatgggagctggccacgcccgaagtcgttactccaaccgcaaggaggggagcgccgaaggcagggctggtgactggggtg

SEQ ID NO: 1495 - DNA, 1469 bp, Glomeribacter gigasporarum
attgaacgctggcggcatgccttacacatgcaagtcggacggcagcacaggtggaaacactgggtggcgagtggcgaacgggtgagtaaaacatcggaacgtatcctgtagagggggatagcccggcgaaagccggattaataccgcatatgctcaaaagaggaaggcgggggaccggatgggtgaccattgggcctcgcgctagaggggcggccgatgtcggattatgctagttggtggggtaagggcctaccaaggcggtgatccgtagcgggtctgagaggatgatccgccacactgggactgagacacggcccagactcctacgggaggcagcagtggggaattttggacaatgggggcaaccctgatccagcaatgccgcgtgtgtgaagaaggccttcgggttgtaaagcacttttgtccgagaagaaagggctccggtaaataatcggagtggatgacggtatcggaagaaaaagcaccggctaactacgtgccagcagcccgcggtaatacgtagggtgcgagcgttaatcggaatgactgggcgtaaagggtgcgtaggcggtttgtcaagacggaagtgaaatccccgggcttaacctgggaacagcatacgtgactggcagactagagtatggcagagggaggtggaattccacgtgtagcagtgaaatgcgtagagatgtggaggaacatcgatggcgaaggcagcctcctgggccaatactgacgctcaggcacgaaagcgtggggagcaaacaggattagataccctggtagtccatgccctaaacgatgtcaactagttgttggggattcatttccttagtaacgaagctaacgcatgaagttgaccgcctggggagtacggtcgcaagattaaaactcaaaggaattgacggggacccgcacaagcggtggatgatgtggattaattcgatgcaacgcgaaaaaccttacctacccttgacatggccggaaacctgaagagattcgggtgtgctcgcaagagaaccggcacacaggtgctgcatggctgtcgtcagctcgtgtcgtgagatgttgggttaagtcccgcaacgagcgcaacccttatccttagttgctacgcaagggcactctaaggagactgccagtgacaaactggaggaaggtggggatgacgtcaagtcctcatggcccttacgggtagggcttcacacgtcatacaatggtctgtacagagggatgccaacctgtgaaggggagtcaatcccaaaaaacggatcgtagtccggattgtagtctgcaactcgactgcatgaagctggaatcgctagtaatcgcggatcagcatgccgcggtgaatacgttcccgggtcttgtacacaccgcccgtcataccatgggagtgagttttaccagaagccattagcctaaccgtaaggagggcgatggccacggtaggacgcatgactggggta

SEQ ID NO: 1496 - DNA, 1415 bp, Gluconacetobacter diazotrophicus
agcgaacgctggcggcatgcttaacacatgcaagtcgcacgaacctttcggggttagtggcggacgggtgagtaacgcgtagggatctgtccatgggtgggggataactccgggaaactggagctaataccgcatgacacctgagggtcaaaggcgcgagtcgcctgtggaggaacctgcgttcgattagctagttggtggggtaaaggcctaccaaggcgatgatcgatagctggtctgagaggatgatcagccacactgggactgagacacggcccagactcctacgggaggcagcagtggggaatattggacaatgggcgcaagcctgatccagcaatgccgcgtgtgtgaagaaggtcttcggattgtaaagcactttcgacggggacgatgatgacggtacccgtagaagaagccccggctaacttcgtgccagcagccgcggtaatacgaagggggctagcgttgctcggaatgactgggcgtaaagggcgcgtaggcggtttggacagtcagatgtgaaattcctgggcttaacctgggggctgcatttgatacgtacagactagagtgtgagagagggttgtggaattcccagtgtagaggtgaaattcgtagatattgggaagaacaccggtggcgaaggcggcaacctggctcataactgacgctgaggcgcgaaagcgtggggagcaaacaggattagataccctggtagtccacgctgtaaacgatgtgtgctggatgttgggtggcttagcccctcagtgtcgtagttaacgcgataagcacaccgcctggggagtacggccgcaaggttgaaactcaaaggaattgacgggggcccgcacaagcggtggagcatgtggtttaattcgaagcaacgcgcagaaccttaccagggcttgacatggggaggctgcagtcagagatggctgtttcccgcaagggacctcctgcacaggtgctgcatggctgtcgtcagctcgtgtcgtgagatgttgggttaagtcccgcaacgagcgcaaccctcgcctttagttgccagcatgattgggtgggcactctaaaggaactgccggtgacaagccggaggaaggtggggatgacgtcaagtcctcatggcccttatgtcctgggctacacacgtgctacaatggcggtgacagtgggaagccaggcagcgatgccgagctgatctcaaaaagccgtctcagttcggattgcactctgcaactcgagtgcatgaaggtggaatcgctagtaatcgcggatcagcatgccgcggtgaatacgttcccgggccttgtacacaccgcccgtcacaccatgggagttggtttgaccttaagccggtgagcgaacccagcaatggggcgcagccgaccacggtcgggtcagcgactggggtg

SEQ ID NO: 1497 - DNA, 1411 bp, Gluconacetobacter entanii
agcgaacgctggcggcatgcttaacacatgcaagtcgcacgaacctttcggggttagtggcggacgggtgagtaacgcgtagggatctgtccatgggtgggggataaccttgggaaaccgaggctaataccgcatgacacctgagggtcaaaggcgcaagtcgcctgtggaggaacctgcgttcgattagctagttggtggggtaaaggcctaccaaggcgatgatcgatagctggtctgagaggatgatcagccacactgggactgagacacggcccagactcctacgggaggcagcagtggggaatattggacaatgggcgcaagcctgatccagcaatgccgcgtgtgtgaagaaggttttcggattgtaaagcactttcagcggggacgatgatgacggtacccgcagaagaagccccggctaacttcgtgccagcagccgcggtaatacgaagggggcaagcgttgctcggaatgactgggcgtaaagggcgcgtaggcggttgttacagtcagatgtgaaattcccgggcttaacctgggggctgcatttgatacgtggcgactagagtgtgagagagggttgtggaattcccagtgtagaggtgaaattcgtagatattgggaagaacaccggtggcgaaggcggcaacctggctcatgactgacgctgaggcgcgaaagcgtggggagcaaacaggattagataccctggtagtccacgctgtaaacgatgtgtgctggatgttgggtggcttggccattcagtgtcgtagttaacgcgataagcacaccgcctggggagtacggccgcaaggttgaaactcaaaggaattgacgggggcccgcacaagcggtggagcatgtggtttaattcgaagcaacgcgcagaaccttaccagggcttgacatgcggaggctgtgtccagagatgggcatttctcgcaagagacctccagcacaggtgctgcatggctgtcgtcagctcgtgtcgtgagatgttgggttaagtcccgcaacgagcgcaaccctcgcctttagttgccagcacgtctgggtgggcactctaaaggaactgccggtgacaagccggaggaaggtggggatgacgtcaagtcctcatggcccttatgtcctgggctacacacgtgctacaatggcggtgacagtgggaagccaggcagcgatgccgagcggatctccaaaagccgtctcagttcggattgcactctgcaactcgagtgcatgaaggtggaatcgctagtaatcgcggatcagcatgccgcggtgaatacgttcccgggccttgtacacaccgcccgtcacaccatgggagttggtttgaccttaagccggtgagcgaaccgcaaggacgcagccgaccacggtcgggtcagcgactggggtg

SEQ ID NO: 1498 - DNA, 1413 bp, Gluconacetobacter liquefaciens
agcgaacgctggcggcatgcttaacacatgcaagtcgcacgaacctttcggggttagtggcggacgggtgagtaacgcgtaggtatctatccatgggtgggggataactctgggaaactggagctaataccgcatgacacctgagggtcaaaggcgcgagtcgcctgtggaggagcctgcgttcgattagctagttggcggggtaaaggcccaccaaggcgatgatcgatagctggtctgagaggatgatcagccacactgggactgagacacggcccagactcctacgggaggcagcagtggggaatattggacaatgggcgcaagcctgatccagcaatgccgcgtgtgtgaagaaggtcttcggattgtaaagcactttcgacggggacgatgatgacggtacccgtagaagaagccccggctaacttcgtgccagcagccgcggtaatacgaagggggctagcgttgctcggaatgactgggcgtaaagggcgcgtaggcggtatggacagtcagatgtgaaattcctgggcttaacctgggggctgcatttgatacgtccaaactagagtgtgagagagggttgtggaattcccagtgtagaggtgaaattcgtagatattgggaagaacaccggtggcgaaggcggcaacctggctcataactgacgctgaggcgcgaaagcgtggggagcaaacaggattagataccctggtagtccacgctgtaaacgatgtgtgctggatgttgggtgacttagtcattcagtgtcgtagttaacgcgataagcacaccgcctggggagtacggccgcaaggttgaaactcaaaggaattgacgggggcccgcacaagcggtggagcatgtggtttaattcgaagcaacgcgcagaaccttaccagggcttgacatggggaggctgtatccagagatgggtatttcccgcaagggacctcctgcacaggtgctgcatggctgtcgtcagctcgtgtcgtgagatgttgggttaagtcccgcaacgagcgcaaccctcgcctttagttgccagcatgattgggtgggcactctaaaggaactgccggtgacaagccggaggaaggtggggatgacgtcaagtcctcatggcccttatgtcctgggctacacacgtgctacaatggcggtgacagtgggaagccaggcagcgatgccgagctgatctcaaaaagccgtctcagttcggattgcactctgcaactcgagtgcatgaaggtggaatcgctagtaatcgcggatcagcatgccgcggtgaatacgttcccgggccttgtacacaccgcccgtcacaccatgggagttggtttgaccttaagccggtgagcgaacccgcaaggggcgcagccgaccacggtcgggtcagcgactggggtg

SEQ ID NO: 1499 - DNA, 1406 bp, Gluconobacter albidus
agcgaacgctggcggcatgcttaacacatgcaagtcgcacgaaggtttcggccttagtggcggacgggtgagtaacgcgtagggatctatccacgggtgggggacaacttcgggaaactggagctaataccgcatgatacctgagggtcaaaggcgcaagtcgcctgtggaggaacctgcgttcgattagctagttggtggggtaaaggcctaccaaggcgatgatcgatagctggtttgagaggatgatcagccacactgggactgagacacggcccagactcctacgggaggcagcagtggggaatattggacaatgggggaaaccctgatccagcaatgccgcgtgtgtgaagaaggtcttcggattgtaaagcactttcgacggggacgatgatgacggtacccgtagaagaagccccggctaacttcgtgccagcagccgcggtaatacgaagggggctagcgttgctcggaatgactgggcgtaaagggcgcgtaggcggtttggacagtcagatgtgaaatccccgggcttaacctgggaactgcatttgatacgtccagactagagttcgagagagggttgtggaattcccagtgtagaggtgaaattcgtagatattgggaagaacaccggtggcgaaggcggcaacctggctcgatactgacgctgaggcgcgaaagcgtggggagcaaacaggattagataccctggtagtccacgctgtaaacgatgtgtgctggatgttgggtaacttagttactcagtgtcgaagctaacgcgctaagcacaccgcctggggagtacggccgcaaggttgaaactcaaaggaattgacgggggcccgcacaagcggtggagcatgtggtttaattcgaagcaacgcgcagaaccttaccagggcttgcatggggaggaccggttcagagatggacctttcttcggacctcccgcacaggtgctgcatggctgtcgtcagctcgtgtcgtgagatgttgggttaagtcccgcaacgagcgcaacccttgtctttagttgccagcactttcaggtgggcactctagagagactgccggtgacaagccggaggaaggtggggatgacgtcaagtcctcatggcccttatgtcctgggctacacacgtgctacaatggcggtgacagtgggaagctacatggtgacatggtgctgatctctaaaagccgtctcagttcggattgtactctgcaactcgagtacatgaaggtggaatcgctagtaatcgcggatcagcatgccgcggtgaatacgttcccgggccttgtacacaccgcccgtcacaccatgggagttggttcgaccttaagccggtgagcgaaccgcaaggacgcagccgaccacggacgggtcagcgactggggtg

SEQ ID NO: 1500 - DNA, 1406 bp, Gluconobacter cerinus
agcgaacgctggcggcatgcttaacacatgcaagtcgcacggatctttcgggatcagtggcggacgggtgagtaacgcgtagggatctatccatgggtgggggacaactccgggaaactggagctaataccgcatgatacctgagggtcaaaggcgcaagtcgcctgtggaggaacctgcgttcgattagctagttggtggggtaaaggcctaccaaggcgatgatcgatagctggtttgagaggatgatcagccacactgggactgagacacggcccagactcctacgggaggcagcagtggggaatattggacaatgggcgaaagcctgatccagcaatgccgcgtgtgtgaagaaggtcttcggattgtaaagcactttcgacggggacgatgatgacggtacccgtagaagaagccccggctaacttcgtgccagcagccgcggtaatacgaagggggctagcgttgctcggaatgactgggcgtaaagggcgcgtaggcggtttatgcagtcagatgtgaaatccccgggcttaacctgggaactgcatttgagacgcatagactagaggtcgagagagggttgtggaattcccagtgtagaggtgaaattcgtagatattgggaagaacaccggtggcgaaggcggcaacctggctcgatactgacgctgaggcgcgaaagcgtggggagcaaacaggattagataccctggtagtccacgctgtaaacgatgtgtgctggatgttgggtaacttagttactcagtgtcgaagctaacgcgctaagcacaccgcctggggagtacggccgcaaggttgaaactcaaaggaattgacgggggcccgcacaagcggtggagcatgtggtttaattcgaagcaacgcgcagaaccttaccaggacttgcatggggaggacgtactcagagatgggtatttcttcggacctcccgcacaggtgctgcatggctgtcgtcagctcgtgtcgtgagatgttgggttaagtcccgcaacgagcgcaacccttgtctttagttgccagcactttcaggtgggcactctagagagactgccggtgacaagccggaggaaggtggggatgacgtcaagtcctcatggcccttatgtcctgggctacacacgtgctacaatggcggtgacagtgggaagctacatggcgacatggtgctgatctctaaaagccgtctcagttcggattgtactctgcaactcgagtacatgaaggtggaatcgctagtaatcgcggatcagcatgccgcggtgaatacgttcccgggccttgtacacaccgcccgtcacaccatgggagttggttcgaccttaagccggtgagcgaaccgcaaggacgcagccgaccacggacgggtcagcgactggggtg

SEQ ID NO: 1501 - DNA, 1406 bp, Gluconobacter frateurii
agcgaacgctggcggcatgcttaacacatgcaagtcgcacggatctttcgggattagtggcggacgggtgagtaacgcgtagggatctatccatgggtgggggacaactccgggaaactggagctaataccgcatgatacctgagggtcaaaggcgcaagtcgcctgtggaggaacctgcgttcgattagctagttggtggggtaaaggcctaccaaggcgatgatcgatagctggtttgagaggatgatcagccacactgggactgagacacggcccagactcctacgggaggcagcagtggggaatattggacaatgggcgaaagcctgatccagcaatgccgcgtgtgtgaagaaggtcttcggattgtaaagcactttcgacggggacgatgatgacggtacccgtagaagaagccccggctaacttcgtgccagcagccgcggtaatacgaagggggctagcgttgctcggaatgactgggcgtaaagggcgcgtaggcggttgatgcagtcagatgtgaaatccccgggcttaacctgggaactgcatttgagacgcattgactagagttcgagagagggttgtggaattcccagtgtagaggtgaaattcgtagatattgggaagaacaccggtggcgaaggcggcaacctggctcgatactgacgctgaggcgcgaaagcgtggggagcaaacaggattagataccctggtagtccacgctgtaaacgatgtgtgctggatgttgggtaacttagttactcagtgtcgaagctaacgcgctaagcacaccgcctggggagtacggccgcaaggttgaaactcaaaggaattgacgggggcccgcacaagcggtggagcatgtggtttaattcgaagcaacgcgcagaaccttaccagggcttgcatggggaggacgtactcagagatgggtatttcttcggacctcccgcacaggtgctgcatggctgtcgtcagctcgtgtcgtgagatgttgggttaagtcccgcaacgagcgcaacccttgtctttagttgccagcactttcaggtgggcactctagagagactgccggtgacaagccggaggaaggtggggatgacgtcaagtcctcatggcccttatgtcctgggctacacacgtgctacaatggcggtgacagtgggaagctatgtggtgacacagtgctgatctctaaaagccgtctcagttcggattgtactctgcaactcgagtacatgaaggtggaatcgctagtaatcgcggatcagcatgccgcggtgaatacgttcccgggccttgtacacaccgcccgtcacaccatgggagttggttcgaccttaagccggtgagcgaaccgcaaggacgcagccgaccacggacgggtcagcgactggggtg

SEQ ID NO: 1502 - DNA, 1406 bp, Gluconobacter japonicus; identical to SEQ ID NO: 1501

SEQ ID NO: 1503 - DNA, 1406 bp, Gluconobacter kanchanaburiensis
agcgaacgctggcggcatgcttaacacatgcaagtcgcacgaaggtttcggccttagtggcggacgggtgagtaacgcgtagggatctatccacgggtgggggacaacttcgggaaactggagctaataccgcatgatacctgagggtcaaaggcgtaagtcgcctgtggaggaacctgcgttcgattagctagttggtggggtaaaggcctaccaaggcgatgatcgatagctggtttgagaggatgatcagccacactgggactgagacacggcccagactcctacgggaggcagcagtggggaatattggacaatgggggaaaccctgatccagcaatgccgcgtgtgtgaagaaggtcttcggattgtaaagcactttcgacggggacgatgatgacggtacccgtagaagaagccccggctaacttcgtgccagcagccgcggtaatacgaagggggctagcgttgctcggaatgactgggcgtaaagggcgcgtaggcggtttggacagtcagatgtgaaatccccgggcttaacctgggaactgcatttgatacgtccagactagagttcgagagagggttgtggaattcccagtgtagaggtgaaattcgtagatattgggaagaacaccggtggcgaaggcggcaacctggctcgatactgacgctgaggcgcgaaagcgtggggagcaaacaggattagataccctggtagtccacgctgtaaacgatgtgtgctggatgttggaaaacttagtttttcagtgtcgaagctaacgcgctaagcacaccgcctggggagtacggccgcaaggttgaaactcaaaggaattgacgggggcccgcacaagcggtggagcatgtggtttaattcgaagcaacgcgcagaaccttaccagggcttgcatggggaggaccggttcagagatggacctttcttcggacctcccgcacaggtgctgcatggctgtcgtcagctcgtgtcgtgagatgttgggttaagtcccgcaacgagcgcaacccttgtctttagttgccagcactttcaggtgggcactctagagagactgccggtgacaagccggaggaaggtggggatgacgtcaagtcctcatggcccttatgtcctgggctacacacgtgctacaatggcggtgacagtgggaagctagatggtgacatcgtgctgatctctaaaagccgtctcagttcggattgtactctgcaactcgagtacatgaaggtggaatcgctagtaatcgcggatcagcatgccgcggtgaatacgttcccgggccttgtacacaccgcccgtcacaccatgggagttggttcgaccttaagccggtgagcgaaccgcaaggacgcagccgaccacggacgggtcagcgactggggtg

SEQ ID NO: 1504 - DNA, 1406 bp, Gluconobacter morbifer
agcgaacgctggcggcatgcttaacacatgcaagtcgcacggacctttcggggttagtggcggacgggtgagtaacgcgtagggatctatccatgggtgggggacaacttcgggaaactggagctaataccgcatgacacctgagggtcaaaggcgcaagtcgcctgtggaggagcctgcgttcgattagctagttggtggggtaaaggcctaccaaggcgatgatcgatagctggtttgagaggatgatcagccacactgggactgagacacggcccagactcctacgggaggcagcagtggggaatattggacaatgggcgcaagcctgatccagcaatgccgcgtgtgtgaagaaggtcttcggattgtaaagcactttcgacggggacgatgatgacggtacccgtagaagaagccccggctaacttcgtgccagcagccgcggtaatacgaagggggctagcgttgctcggaatgactgggcgtaaagggcgcgtaggcggtttggacagtcagatgtgaaatccccgggcttaacctgggaactgcatttgatacgttcagactagagttcgagagagggttgtggaattcccagtgtagaggtgaaattcgtagatattgggaagaacaccggtggcgaaggcggcaacctggctcgatactgacgctgaggcgcgaaagcgtggggagcaaacaggattagataccctggtagtccacgctgtaaacgatgtgtgctggatgttgggtaacttggttactcagtgtcgaagctaacgcgctaagcacaccgcctggggagtacggccgcaaggttgaaactcaaaggaattgacgggggcccgcacaagcggtggagcatgtggtttaattcgaagcaacgcgcagaaccttaccagggcttgcatggggaggctgtgtccagagatgggcatttcttcggacctcccgcacaggtgctgcatggctgtcgtcagctcgtgtcgtgagatgttgggttaagtcccgcaacgagcgcaacccttgtctttagttgccagcacgtctgggtgggcactctagagagactgccggtgacaagccggaggaaggtggggatgacgtcaagtcctcatggcccttatgtcctgggctacacacgtgctacaatggcggtgacagtgggaagctagatggtgacatcatgctgatctctaaaagccgtctcagttcggattgtactctgcaactcgagtgcatgaaggtggaatcgctagtaatcgcggatcagcatgccgcggtgaatacgttcccgggccttgtacacaccgcccgtcacaccatgggagttggttcgaccttaagtcggtgagcgaaccgcaaggacgcagccgaccacggacgggtcagcgactggggtg

SEQ ID NO: 1505 - DNA, 1406 bp, Gluconobacter oxydans
agcgaacgctggcggcatgcttaacacatgcaagtcgcacgaaggtttcggccttagtggcggacgggtgagtaacgcgtagggatctatccacgggtgggggacaacttcgggaaactggagctaataccgcatgatacctgagggtcaaaggcgcaagtcgcctgtggaggaacctgcgttcgattagctagttggtggggtaaaggcctaccaaggcgatgatcgatagctggtttgagaggatgatcagccacactgggactgagacacggcccagactcctacgggaggcagcagtggggaatattggacaatgggcgaaagcctgatccagcaatgccgcgtgtgtgaagaaggtcttcggattgtaaagcactttcgacggggacgatgatgacggtacccgtagaagaagccccggctaacttcgtgccagcagccgcggtaatacgaagggggctagcgttgctcggaatgactgggcgtaaagggcgcgtaggcggttgttacagtcagatgtgaaatccccgggcttaacctgggaactgcatttgatacgtgacgactagagttcgagagagggttgtggaattcccagtgtagaggtgaaattcgtagatattgggaagaacaccggtggcgaaggcggcaacctggctcgatactgacgctgaggcgcgaaagcgtggggagcaaacaggattagataccctggtagtccacgctgtaaacgatgtgtgctggatgttgggaaacttagtttctcagtgtcgaagctaacgcgctaagcacaccgcctggggagtacggccgcaaggttgaaactcaaaggaattgacgggggcccgcacaagcggtggagcatgtggtttaattcgaagcaacgcgcagaaccttaccagggcttgcatggggaggaccggttcagagatggacctttcttcggacctcccgcacaggtgctgcatggctgtcgtcagctcgtgtcgtgagatgttgggttaagtcccgcaacgagcgcaacccttgtctttagttgccagcactttcaggtgggcactctagagagactgccggtgacaagccggaggaaggtggggatgacgtcaagtcctcatggcccttatgtcctgggctacacacgtgctacaatggcggtgacagtgggaagctacatggtgacatggtgctgatctctaaaagccgtctcagttcggattgtactctgcaactcgagtacatgaaggtggaatcgctagtaatcgcggatcagcatgccgcggtgaatacgttcccgggccttgtacacaccgcccgtcacaccatgggagttggttcgaccttaagccggtgagcgaaccgcaaggacgcagccgaccacggacgggtcagcgactggggtg

SEQ ID NO: 1506 - DNA, 1406 bp, Gluconobacter roseus; identical to SEQ ID NO: 1505

SEQ ID NO: 1507 - DNA, 1406 bp, Gluconobacter sphaericus
agcgaacgctggcggcatgcttaacacatgcaagtcgcacgaaggtttcggccttagtggcggacgggtgagtaacgcgtagggatctatccacgggtgggggacaacttcgggaaactggagctaataccgcatgatacctgagggtcaaaggcgcaagtcgcctgtggaggaacctgcgttcgattagctagttggtggggtaaaggcctaccaaggcgatgatcgatagctggtttgagaggatgatcagccacactgggactgagacacggcccagactcctacgggaggcagcagtggggaatattggacaatgggggaaaccctgatccagcaatgccgcgtgtgtgaagaaggtcttcggattgtaaagcactttcgacggggacgatgatgacggtacccgtagaagaagccccggctaacttcgtgccagcagccgcggtaatacgaagggggctagcgttgctcggaatgactgggcgtaaagggcgcgtaggcggtttggacagtcagatgtgaaatccccgggcttaacctgggaactgcatttgatacgtccagactagagttcgagagagggttgtggaattcccagtgtagaggtgaaattcgtagatattgggaagaacaccggtggcgaaggcggcaacctggctcgatactgacgctgaggcgcgaaagcgtggggagcaaacaggattagataccctggtagtccacgctgtaaacgatgtgtgctggatgttgggtaacttagttactcagtgtcgaagctaacgcgctaagcacaccgcctggggagtacggccgcaaggttgaaactcaaaggaattgacgggggcccgcacaagcggtggagcatgtggtttaattcgaagcaacgcgcagaaccttaccagggcttgcatggggaggactggttcagagatggacctttcttcggacctcccgcacaggtgctgcatggctgtcgtcagctcgtgtcgtgagatgttgggttaagtcccgcaacgagcgcaacccttgtctttagttgccagcactttcaggtgggcactctagagagactgccggtgacaagccggaggaaggtggggatgacgtcaagtcctcatggcccttatgtcctgggctacacacgtgctacaatggcggtgacagtgggaagctacatggtgacatggtgctgatctctaaaagccgtctcagttcggattgtactctgcaactcgagtacatgaaggtggaatcgctagtaatcgcggatcagcatgccgcggtgaatacgttcccgggccttgtacacaccgcccgtcacaccatgggagttggttcgaccttaagccggtgagcgaaccgcaaggacgcagccgaccacggacgggtcagcgactggggtg

SEQ ID NO: 1508 - DNA, 1406 bp, Gluconobacter thailandicus
agcgaacgctggcggcatgcttaacacatgcaagtcgcacggatctttcgggattagtggcggacgggtgagtaacgcgtagggatctatccacgggtgggggacaactccgggaaactggagctaataccgcatgatacctgagggtcaaaggcgcaagtcgcctgtggaggaacctgcgttcgattagctagttggtggggtaaaggcctaccaaggcgatgatcgatagctggtttgagaggatgatcagccacactgggactgagacacggcccagactcctacgggaggcagcagtggggaatattggacaatgggcgaaagcctgatccagcaatgccgcgtgtgtgaagaaggtcttcggattgtaaagcactttcgacggggacgatgatgacggtacccgtagaagaagccccggctaacttcgtgccagcagccgcggtaatacgaagggggctagcgttgctcggaatgactgggcgtaaagggcgcgtaggcggttgatgcagtcagatgtgaaatccccgggcttaacctgggaactgcatttgagacgcattgactagaggtcgagagagggttgtggaattcccagtgtagaggtgaaattcgtagatattgggaagaacaccggtggcgaaggcggcaacctggctcgatactgacgctgaggcgcgaaagcgtggggagcaaacaggattagataccctggtagtccacgctgtaaacgatgtgtgctggatgttgggtaacttagttactcagtgtcgaagctaacgcgctaagcacaccgcctggggagtacggccgcaaggttgaaactcaaaggaattgacgggggcccgcacaagcggtggagcatgtggtttaattcgaagcaacgcgcagaaccttaccagggcttgcatggggaggacgtactcagagatgggtatttcttcggacctcccgcacaggtgctgcatggctgtcgtcagctcgtgtcgtgagatgttgggttaagtcccgcaacgagcgcaacccttgtctttagttgccagcactttcaggtgggcactctagagagactgccggtgacaagccggaggaaggtggggatgacgtcaagtcctcatggcccttatgtcctgggctacacacgtgctacaatggcggtgacagtgggaagctatgtggtgacacagtgctgatctctaaaagccgtctcagttcggattgtactctgcaactcgagtacatgaaggtggaatcgctagtaatcgcggatcagcatgccgcggtgaatacgttcccgggccttgtacacaccgcccgtcacaccatgggagttggttcgaccttaagccggtgagcgaaccgcaaggacgcagccgaccacggacgggtcagcgactggggtg

SEQ ID NO: 1509 - DNA, 1406 bp, Gluconobacter wancherniae
agcgaacgctggcggcatgcttaacacatgcaagtcgcacggatctttcgggattagtggcggacgggtgagtaacgcgtagggatctatccatgggtgggggacaactccgggaaactggagctaataccgcatgatacctgagggtcaaaggcgcaagtcgcctgtggaggaacctgcgttcgattagctagttggtggggtaaaggcctaccaaggcgatgatcgatagctggtttgagaggatgatcagccacactgggactgagacacggcccagactcctacgggaggcagcagtggggaatattggacaatgggcgaaagcctgatccagcaatgccgcgtgtgtgaagaaggtcttcggattgtaaagcactttcgacggggacgatgatgacggtacccgtagaagaagccccggctaacttcgtgccagcagccgcggtaatacgaagggggctagcgttgctcggaatgactgggcgtaaagggcgcgtaggcggttgatgcagtcagatgtgaaatccccgggcttaacctgggaactgcatttgatacgcattgactagagttcgagagagggttgtggaattcccagtgtagaggtgaaattcgtagatattgggaagaacaccggtggcgaaggcggcaacctggctcgatactgacgctgaggcgcgaaagcgtggggagcaaacaggattagataccctggtagtccacgctgtaaacgatgtgtgctggatgttgggtaacttagttactcagtgtcgaagctaacgcgctaagcacaccgcctggggagtacggccgcaaggttgaaactcaaaggaattgacgggggcccgcacaagcggtggagcatgtggtttaattcgaagcaacgcgcagaaccttaccagggcttgcatggggaggaccggttcagagatggacctttcttcggacctcccgcacaggtgctgcatggctgtcgtcagctcgtgtcgtgagatgttgggttaagtcccgcaacgagcgcaacccttgtctttagttgccagcactttcaggtgggcactctagagagactgccggtgacaagccggaggaaggtggggatgacgtcaagtcctcatggcccttatgtcctgggctacacacgtgctacaatggcggtgacagtgggaagctatgtggtgacacaatgctgatctctaaaagccgtctcagttcggattgtactctgcaactcgagtacatgaaggtggaatcgctagtaatcgcggatcagcatgccgcggtgaatacgttcccgggccttgtacacaccgcccgtcacaccatgggagttggttcttccttaagccggtgagcgaaccgcaaggacgcagccgaccacggaagggtcagcgactggggtg

SEQ ID NO: 1510 - DNA, 1389 bp, Glycocaulis alkaliphilus
aacgaacgctggcggaaggcttaacacatgcaagtcgagcgcacccttcggggtgagcggcagacgggtgagtaacgcgtgggaacgcgccctttggttcggaatagcctcgggaaactgggagtaataccgaatgtgcccttcgggggaaagatttatcgccaaaggatcggcccgcgttagattagcttgttggtggggtaatggcccaccaaggcgacgatctatagctggtctgagaggatgatcagccacactgggactgagacacggcccagactcctacgggaggcagcagtggggaagcttggacaatgggcgaaagcctgatccagccattccgcgtggatgatgaaggccttagggttgtaaaatcctttcagcggggaagataatgactgtacccgcagaagaagccccggctaactccgtgccagcagccgcggtaatacggagggggctagcgttgttcggaattactgggcgtaaagcgcacgtaggcggatcagccagtcagaggtgaaagcccagggctcaaccttggaattgcctttgatactgttgatctggagtccgggagaggtgtgtggaattccgagtgtagaggtgaaattcgtagatattcggaggaacaccagaggcgaaggcgacacactggaccggtactgacgctgaggtgcgaaagcgtggggagcaaacaggattagataccctggtagtccacgccgtaaacgatggatgctagttgtcgggcagcatgctgttcggtgacgcagctaacgcattaagcatcccgcctggggagtacggccgcaaggttaaaactcaaagaaattgacgggggcccgcacaagcggtggagcatgtggtttaattcgaagcaacgcgcagaaccttacctgcccttgacatcccggtcgcggtttccagagatggattccttcagttcggctggaccggtgacaggtgctgcatggctgtcgtcagctcgtgtcgtgagatgttgggttaagtcccgcaacgagcgcaaccctcgtcgttagttgccatcaggttgggctgggcactctaacgagactgccggtgtcaaaccggaggaaggtggggatgacgtcaagtcctcatggcccttacgggcagggctacacacgtgctacaatggcagtgacagagagttaatctctaaaagctgtctcagttcggattgttctctgcaactcgagagcatgaagttggaatcgctagtaatcgcggatcagcatgccgcggtgaatacgttcccgggccttgtacacaccgcccgtcacaccatgggagttggttctacccgaagatggtgcgctaaccgcaaggaagcagccagccacggtagggtcagcgaccggggtg

SEQ ID NO: 1511 - DNA, 1446 bp, Gordonia paraffinivorans
gacgaacgctggcggcgtgcttaacacatgcaagtcgaacggaaaggcccagcttgctgggtactcgagtggcgaacgggtgagtaacacgtgggtgatctgccctggactctgggataagcctgggaaactgggtctaataccggatattcactttctctcgcatgggggttggtggaaagcttttgcggttcaggatgggcccgcggcctatcagcttgttggtggggtaatggcctaccaaggcgacgacgggtagccgacctgagagggtgatcggccacactgggactgagacacggcccagactcctacgggaggcagcagtggggaatattgcacaatgggcgcaagcctgatgcagcgacgccgcgtgagggatgacggccttcgggttgtaaacctctttcaccagggacgaagcgtgagtgacggtacctggagaagaagcaccggccaactacgtgccagcagccgcggtaatacgtagggtgcgagcgttgtccggaattactgggcgtaaagagctcgtaggcggtttgtcgcgtcgtctgtggaattctgcaactcaattgtaggcgtgcaggcgatacgggcagacttgagtactacaggggagactggaattcctggtgtagcggtgaaatgcgcagatatcaggaggaacaccggtggcgaaggcgggtctctgggtagtaactgacgctgaggagcgaaagcgtggggagcgaacaggattagataccctggtagtccacgccgtaaacggtgggtactaggtgtgggactcttttcacgggttccgtgccgtagctaacgcattaagtaccccgcctggggagtacggccgcaaggctaaaactcaaaggaattgacgggggcccgcacaagcggcggagcatgtggattaattcgatgcaacgcgaagaaccttacctgggtttgacatctaccggaccgctccagagatggggcttcccttgtggctggtagacaggtggtgcatggctgtcgtcagctcgtgtcgtgagatgttgggttaagtcccgcaacgagcgcaacccttgtcctgtattgccagcgcgtaatggcggggacttgcaggagactgccggggtcaactcggaggaaggtggggatgacgtcaagtcatcatgccccttatgtccagggcttcacacatgctacaatggctggtacagagggctgcgatatcgtgaggtggagcgaatcccttaaagccagtctcagttcggattggggtctgcaactcgaccccatgaagtcggagtcgctagtaatcgcagatcagcaacgctgcggtgaatacgttcccgggccttgtacacaccgcccgtcacgtcatgaaagtcggtaacacccgaagccggtggcctaaccccttgtgggagggagctgtcgaaggtgggatcggcgattgggacg

SEQ ID NO: 1512 - DNA, 1447 bp, Gottschalkia acidurici
gatgaacgctggcggcgtgcctaacacatgcaagtcgagcgggaaagtcgttacggatccttcgggtgaaagaatgactggagagcggcggacgggtgagtaacgcgtgggaaaccttccttatacaaagggatagcctcgggaaaccgggattaataccttataaaactctagcaccacatggtgcatgagtcaaaactccggtggtataagatggtcccgcgtcccattagctagttggtgagataaaagctcaccaaggcgacgatgggtagccggcctgagagggtgaacggccacactggaactgagacacggtccagactcctacgggaggcagcagtggggaatattgcacaatgggggaaaccctgatgcagcgacgccgcgtgagtgatgaaggcctttgggtcgtaaaactctgtcctaagggaagataatgacggtaccttaggaggaagccccggctaactacgtgccagcagccgcggtaatacgtagggggcgagcgttatccggaattattgggcgtaaagggtacgtaggcggccagataagtcaggtgtgaaaggcgtcggctcaaccggcgtaagcacttgaaactatttggcttgagtacaggagaggaaagtggaattcctagtgtagcggtgaaatgcgtagatattaggaggaacaccagtggcgaaggcgactttctggactgatactgacgctgaggtacgaaagcgtggggagcgaacaggattagataccctggtagtccacgccgtaaacgatgagtgctaggtgttgggggtcgaacctcagtgccgcagctaacgcattaagcactccgcctggggagtacggtcgcaagactgaaactcaaaggaattgacggggacccgcacaagcagcggagcatgtggtttaattcgaagcaacgcgaagaaccttaccaacatttgacatccctctgacaactctagagatagagtctcccttcggggcagaggtgacaggtggtgcatggttgtcgtcagctcgtgtcgtgagatgttgggttaagtcccgcaacgagcgcaacccttacctttagttgccatcattaagttgggcactctagagggactgccgatgataaatcggaggaaggtggggatgacgtcaaatcatcatgccccttatatgttgggctacacacgtgctacaatggtcggtacaacgggcagcgaaaccgcgaggtggagcgaatctcaataagccgatcacagttcggattgtaggctgcaactcgcctacatgaagccggagttgctagtaatcgcggatcagaatgtcgcggtgaatacgttcccgggtcttgtacacaccgcccgtcacaccacgagagttggtaacacccgaagccagtgagctaaccgcaaggaggcagctgtcgaaggtgggatcgatgattggggtg

SEQ ID NO: 1513 - DNA, 1488 bp, Gracilibacillus boraciitolerans
gacgaacgctggcggcgtgcctaatacatgcaagtcgagcgcgggaagcaggcagatcctcttcggaggtgatgcttgtggaacgagcggcggacgggtgagtaacacgtgggcaacctgcctgtaagactgggataaccccgggaaaccggggctaataccggataacacattgcttcgcatgaagcgatgttgaaagatggcttttatgctatcacttacagatgggcctgcggcgcattagctagttggtgaggtaacggctcaccaaggcgacgatgcgtagccgacctgagagggtgatcggccacactgggactgagacacggcccagactcctacgggaggcagcagtagggaatcttccgcaatggacgaaagtctgacggagcaacgccgcgtgaacgaagaaggttttcggatcgtaaagttctgttgttagggaagaacaagtgccgttcaaatagggcggcaccttgacggtacctatcgaggaagccccggctaactacgtgccagcagccgcggtaatacgtagggggcaagcgttgtccggaattattgggcgtaaagagcacgtaggcggtttcttaagtctgatgtgaaatcttgtggctcaaccacaagcggtcattggaaactggggaacttgagtgcagaagaggagagtggaattccacgtgtagcggtgaaatgcgtagatatgtggaggaacaccagtggcgaaggcgactctctggtctgtaactgacgctgaggtgcgaaagcgtggggagcaaacaggattagataccctggtagtccacgccgtaaacgatgagtgctaggtgttagggggtttccgccccttagtgctgcagttaacgcattaagcactccgcctggggagtacggccgcaaggctgaaactcaaaagaattgacgggggcccgcacaagcggtggagcatgtggtttaattcgaagcaacgcgaagaaccttaccaggtcttgacatcttcggatgtccctagagatagggagttcccttcggggaccgaatgacaggtggtgcatggttgtcgtcagctcgtgtcgtgagatgttgggttaagtcccgcaacgagcgcaacccctgatcttagttgccagcattcagttgggcactctaaggtgactgccggtgacaaaccggaggaaggtggggatgacgtcaaatcatcatgccccttatgacctgggctacacacgtgctacaatggatggtacagagggccgcgaagccgcgaggtgaagcaaatctcctaaaaccattctcagttcggattgcaggctgcaactcgcctgcatgaagccggaatcgctagtaatcgtggatcagcatgccacggtgaatacgttcccgggccttgtacacaccgcccgtcacaccacgagagttggcaacacccgaagtcggtggggtaacctttggagccagccgccgaaggtggggccaatgattggggtg

SEQ ID NO: 1514 - DNA, 1459 bp, Gracilibacillus dipsosauri
  misc_feature (883)..(883): n is a, c, g, or t
  misc_feature (1048)..(1048): n is a, c, g, or t
  misc_feature (1368)..(1368): n is a, c, g, or t
gctggcggcgtgcctaatacatgcaagtcgagcgcgggaagctgactgaatccttcgggaggacgtgagtggaacgagcggcggacgggtgagtaacacgtgggcaacctgcctgtaagactgggataactccgggaaaccggggctaataccggatagtactttggttcataggaaccgaagtggaaaggtggcgcaagctaccacttacagatgggcccgcggtgcattagctagttggtgaggtaacggctcaccaaggcaacgatgcatagccgacctgagagggtgatcggccacactgggactgagacacggcccagactcctacgggaggcagcagtagggaatcttccgcaatggacgaaagtctgacggagcaacgccgcgtgaacgaagaaggttttcggatcgtaaagttctgttgttagggaagaacaagtaccgttcgaatagggcggtaccttgacggtacctatcgaggaagccccggctaactacgtgccagcagccgcggtaatacgtagggggcaagcgttgtccggaattattgggcgtaaagcgcgcgtaggcggtttcttaagtctgatgtgaaatcttgcggctcaaccgcaagcggtcattggaaactggggaacttgagtacagaagaggagagcggaattccacgtgtagcggtgaaatgcgtagagatgtggaggaacaccagtggcgaaggcgcctctctggtctgtaactgacgctgaggtccgaaagcgtggggagcgaacaggattagataccctggtagtccacgccgtaaacgatgagtgctaagtgttagggggtttccgccccttagtgctgcagttaacgcattaagcactccgcctggggagtacgnccgcagcggcgaaactcaaaagaattgacgggggcccgcacaagcggtggagcatgtggtttaattcgaagccacgcgaagaaccttaccaggtcttgacatcttcggatgtccctagagatagggagttcccttcggggaccgaatgacaggtggtgcatggtngtcgtcagctcgtgtcgtgagatgttgggttaagtcccgcaacgagcgcaacccttgatcttagttgccagcattcagttgggcactctaaggtgactgccggtgacaaaccggaggaaggtggggatgacgtcaaatcatcatgccccttatgacctgggctacacacgtgctacaatggatggtacaaagggcagcgaagccgtgaggtgaagccaatcccataaaaccattctcagttcggattgtaggctgcaactcgcctacatgaagccggaatcgctagtaatcgcggatcagcatgccgcggtgaatacgtncccgggccttgtacacaccgcccgtcacaccacgagagttggcaacacccgaagtcggtggggtaacctttggagccagccgccgaaggtg

SEQ ID NO: 1515 - DNA, 1486 bp, Gracilibacillus halophilus
gacgaacgctggcggcgtgcctaatacatgcaagtcgagcgcgggaagcttgtctgatcccttcggggtgaagcgagtggaacgagcggcggacgggtgagtaacacgtgggcaacctacctgtaagattgggataactcgtggaaacgcgagctaataccgaataaagctttcggtcgcatgaccgaaagatgaaaggtggcatgagctatcacttacagatgggcccgcggcgcattagctagttggtgggataacagctcaccaaggcgacgatgcgtagccgacctgagagggtgatcggccacactgggactgagacacggcccagactcctacgggaggcagcagtagggaatcatccgcaatggacgaaagtctgacggtgcaacgccgcgtgaacgaagaaggttttcggatcgtaaagttctgttgttagggaagaacaagtgccgttcaaacagggcggtaccttgacggtacctatcgaggaagccccggctaactacgtgccagcagccgcggtaatacgtagggggcaagcgttgtccggaattattgggcgtaaagggcgcgcaggcggttccttaagtctgatgtgaaatctcgtggctcaaccatgagcggtcattggaaactggggaacttgagtacagaagaggagagcggaattccacgtgtagcggtgaaatgcgtagatatgtggaggaacaccagtggcgaaggcggctctctggtctgtgactgacgctgaggcgcgaaagcgtggggagcgaacaggattagataccctggtagtccacgccgtaaacgttgagtgctaggtgttagggggtatccgccccttagtgctgcagttaacgcattaagcactccgcctggggagtacggccgcaaggctgaaactcaaaagaattgacgggggcccgcacaagcggtggagcatgtggtttaattcgaagcaacgcgaagaaccttaccaggtcttgacatcttcggacggccctagagatagggcgttcccttcggggaccgaatgacaggtggtgcatggttgtcgtcagctcgtgtcgtgagatgttgggttaagtcccgcaacgagcgcaacccttaatcttagttgccagcattaagttgggcactctaaggtgactgccggtgacaaaccggaggaaggtggggatgacgtcaaatcatcatgccccttatgacctgggctacacacgtgctacaatggatggtacaaagggcagctaagcggtgacgccaagcaaatcccagaaaaccattctcagtccggattgcaggctgcaactcgcctgcatgaagccggaatcgctagtaatcgcggatcagcatgccgcggtgaatacgttcccgggccttgtacacaccgcccgtcacaccacgagagttggcaacacccgaagtcggtagggtaaccttttggagccagccgccgaaggtggggccaatgattggggtg

SEQ ID NO: 1516 - DNA, 1410 bp, Gracilibacillus kekensis
agcgcgggaagcgaacggaatccttcgggaggaagttcgtggaacgagcggcggacgggtgagtaacacgtgggcaacctgcctgtaagactgggataaccccgggaaaccggggctaataccggataatacatggtttcgcatgaaaccatgttgaaagatggcttttcgctatcacttacagatgggcccgcggcgcattagctagttggtaaggtaacggcttaccaaggcaacgatgcgtagccgacctgagagggtgatcggccacactgggactgagacacggcccagactcctacgggaggcagcagtagggaatcttccgcaatggacgaaagtctgacggagcaacgccgcgtgaacgaagaaggttttcggatcgtaaagttctgttgttagggaagaacaagtgccgttcgaatagggcggcaccttgacggtacctatcgaggaagccccggctaactacgtgccagcagccgcggtaatacgtagggggcaagcgttgtccggaattattgggcgtaaagcgcgcgtaggcggtttcttaagtctgatgtgaaatcttgcggctcaaccgcaagcggtcattggaaactggggaacttgagtgcagaagaggagagtggaattccacgtgtagcggtgaaatgcgtagatatgtggaggaacaccagtggcgaaggcgactctctggtctgtaactgacgctgaggtgcgaaagcgtggggagcgaacaggattagataccctggtagtccacgccgtaaacgatgagtgctaggtgttagggggtttccgccccttagtgctgcagttaacgcattaagcactccgcctggggagtacggccgcaaggctgaaactcaaaagaattgacgggggcccgcacaagcggtggagcatgtggtttaattcgaagcaacgcgaagaaccttaccaggtcttgacatcttcggatgtccctagagatagggagttcccttcggggaccgaatgacaggtggtgcatggttgtcgtcagctcgtgtcgtgagatgttgggttaagtcccgcaacgagcgcaacccttgatcttagttgccagcattcagttgggcactctaaggtgactgccggtgacaaaccggaggaaggtggggatgacgtcaaatcatcatgccccttatgacctgggctacacacgtgctacaatggatggtacagagggaagcaaaaccgcgaggtcaagccaatcccataaaaccattctcagttcggattgtaggctgcaactcgcctacatgaagccggaatcgctagtaatcgtggatcagcatgccacggtgaatacgttcccgggccttgtacacaccgcccgtcacaccacgagagttggcaacacccgaagtcggtggggtaaccatt

SEQ ID NO: 1517 - DNA, 1438 bp, Gracilibacillus lacisalsi
tctagcgccggaagcttgtctgagcccctcacggggtgacgcttagtggcaacgagcggcggacgggtgagtaacacgtgggcaacctgcctgtaagactgggataactccgggaaaccggggctaataccggataatacattgcttcgcatgaagcaatgttgaaagatggcttttagctatcacttacagatgggcccgcggcgcattagctagttggtaaggtaatggcttaccaaggcaacgatgcgtagccgacctgagagggtgatcggccacactgggactgagacacggcccagactcctacgggaggcagcagtagggaatcttccgcaatggacgaaagtctgacggagcaacgccgcgtgaacgaagaaggttttcggatcgtaaagttctgttgttagggaagaacaagtaccgttcaaatagggcggtaccttgacggtacctatcgaggaagccccggctaactacgtgccagcagccgcggtaatacgtagggggcaagcgttgtccggaattattgggcgtaaagcgcgcgtaggcggtttcttaagtctgatgtgaaatcttgcggctcaaccgcaagcggccattggaaactgaggaacttgagtgcagaagaggagagcggaattccacgtgtagcggtgaaatgcgtagatatgtggaggaacaccagtggcgaaggcggctctctggtctgtaactgacgctgaggtgcgaaagcgtggggagcgaacaggattagataccctggtagtccacgccgtaaacgatgagtgctaggtgttagggggtttccgccccttagtgctgcagttaacgcattaagcactccgcctggggagtacggccgcaaggctgaaactcaaaagaattgacgggggcccgcacaagcggtggagcatgtggtttaattcgaagcaacgcgaagaaccttaccaggtcttgacatcttcggatgtccctagagatagggagttcccttcggggaccgaatgacaggtggtgcatggttgtcgtcagctcgtgtcgtgagatgttgggttaagtcccgcaacgagcgcaacccttgatcttagttgccagcatttagttgggcactctaaggtgactgccggtgacaaaccggaggaaggtggggatgacgtcaaatcatcatgccccttatgacctgggctacacacgtgctacaatggatggaacaaagggcagcgaagccgcgaggtgtagcaaatcccataaatccattctcagttcggattgcaggctgcaactcgcctgtatgaagccggaatcgctagtaatcgtggatcagcatgccacggtgaatacgttcccgggccttgacacaccgcccgtcacaccacgagagtggcatacacctgaagtcggtggggtactcttgacccgtccgcggtaggtgcgg

SEQ ID NO: 1518 - DNA, 1447 bp, Gracilibacillus orientalis
gacgaacgctggcggcgtgcctaatacatgcaagtcgagcgcgggaagcttgtctgatctcttcggagtgaagcgagtggaacgagcggcggacgggtgagtaacacgtgggcaacctacctataagactgggataactccgggaaaccggggctaataccggataacacttttcttcacatgaagggaagttgaaagatggcttcttgctatcacttacagatgggcccgcggcgcattagctagttggtgaggtaagagctcaccaaggcgacgatgcgtagccgacctgagagggtgatcggccacactgggactgagacacggcccagactcctacgggaggcagcagtagggaatcttccgcaatggacgaaagtctgacggagcaacgccgcgtgaacgaagaaggttttcggatcgtaaagttctgttgttagggaagaacaagtaccgttcgaatagggcggtaccttgacggtacctatcgaggaagccccggctaactacgtgccagcagccgcggtaatacgtagggggcaagcgttgtccggaattattgggcgtaaagcgcgcgcaggcggtttcttaagtctgatgtgaaatcttgtggctcaaccacaagcggtcattggaaactggggaacttgagtacagaagaggagagcggaattccacgtgtagcggtgaaatgcgtagatatgtggaggaaccccagtggcgaaggcggctctctggtctgtaactgacgctgaggtgcgaaagcgtggggagcgaacaggattagataccctggtagtccacgccgtaaacgatgagtgctaggtgttagggggtttccgccccttagtgctgcagttaacgcattaagcactccgcctggggagtacggccgcaaggctgaaactcaaaagaattgacgggggcccgcacaagcggtggagcatgtggtttaattcgaagcaacgcgaagaaccttaccaggtcttgacatcttcggatgtccctagagatagggagttcccttcggggaccgaatgacaggtggtgcatggttgtcgtcagctcgtgtcgtgagatgttgggttaagtcccgcaacgagcgcaacccttgatcttagttgccagcattcagttgggcactctaaggtgactgccggtgacaaaccggaggaaggtggggatgacgtcaaatcatcatgccccttatgacctgggctacacacgtgctacaatggatagaacaaagggaagcgaagccgcaaggtgtagcaaatcccgtaaatctattctcagttcggattgcaggctgcaactcgcctgtatgaagccggaatcgctagtaatcgtggatcagcatgccacggtgaatacgttcccgggccttgtacacaccgcccgtcacaccacgagagttggcaacacccgaagtcggtggggtaacctt

SEQ ID NO: 1519 - DNA, 1485 bp, Gracilibacillus ureilyticus
gacgaacgctggcggcgtgcctaatacatgcaagtcgagcgcgggaagctaactgaatccttcgggaggacgttagtggaacgagcggcggacgggtgagtaacacgtgggcaacctgcctgtaagactgggataactccgggaaaccggggctaataccggataatacttctcctcacatgagggaaagttgaaaggtggcttcggctaccacttacagatgggcccgcggtgcattagctagttggtgaggtaacggctcaccaaggcaacgatgcatagccgacctgagagggtgatcggccacactgggactgagacacggcccagactcctacgggaggcagcagtagggaatcttccgcaatggacgaaagtctgacggagcaacgccgcgtgaacgaagaaggttttcggatcgtaaagttctgttgttagggaagaacaagtaccgttcaaatagggcggtaccttgacggtacctaccgaggaagccccggctaactacgtgccagcagccgcggtaatacgtagggggcaagcgttgtccggaattattgggcgtaaagcgcgcgtaggcggtttcttaagtctgatgtgaaatcttgcggctcaaccgcaagcggtcattggaaactggggaacttgagtacagaagaggagagcggaattccacgtgtagcggtgaaatgcgtagatatgtggaggaacaccagtggcgaaggcggctctctggtctgtaactgacgctgaggtgcgaaagcgtggggagcgaacaggattagataccctggtagtccacgccgtaaacgatgagtgctaggtgttagggggtttccgccccttagtgctgcagttaacgcattaagcactccgcctggggagtacggccgcaaggctgaaactcaaaagaattgacgggggcccgcacaagcggtggagcatgtggtttaattcgaagcaacgcgaagaaccttaccaggtcttgacatcttcggatgtccctagagatagggagttcccttcggggaccgaatgacaggtggtgcatggttgtcgtcagctcgtgtcgtgagatgttgggttaagtcccgcaacgagcgcaacccttgatcttagttgccagcattaagttgggcactctaaggtgactgccggtgacaaaccggaggaaggtggggatgacgtcaaatcatcatgccccttatgacctgggctacacacgtgctacaatggatggtacaaagggcagcgaagccgcgaggtgaagccaatcccataaaaccattctcagttcggattgcaggctgcaactcgcctgcatgaagccggaatcgctagtaatcgcggatcagcatgccgcggtgaatacgttcccgggccttgtacacaccgcccgtcacaccacgagagttggtaacacccgaagtcggtggggtaaccttttggagccagccgccgaaggtgggaccaatgattggggtg

SEQ ID NO: 1520 - DNA, 1415 bp, Granulibacter bethesdensis
agcgaacgctggcggcatgcttaacacatgcaagtcgcacggtttggtttcggccggacagtggcggacgggtgagtaacgcgtaggtatctgtcctggggtgggggataactgtgggaaactacagctaataccgcatgacacctgagggtcaaaggcgcaagtcgccttgggaggagcctgcgttcgattaggtagttggtggggtaaaggcctaccaagcctacgatcgatagctggtctgagaggatgatcagccacactgggactgagacacggcccagactcctacgggaggcagcagtggggaatattggacaatgggcgcaagcctgatccagcaatgccgcgtgtgtgaagaaggtcttcggattgtaaagcactttcggcggggacgatgatgacggtacccgcagaagaagccccggctaacttcgtgccagcagccgcggtaatacgaagggggctagcgttgctcggaatgactgggcgtaaagggcgcgtaggcggttcgtacagtcagatgtgaaattcccgggctcaacctgggggctgcatttgatacgtgcgggctggagtgtgagagagggttgtggaattcccagtgtagaggtgaaattcgtagatattgggaagaacaccggtggcgaaggcggcaacctggctcatgactgacgctgaggcgcgaaagcgtggggagcaaacaggattagataccctggtagtccacgctgtaaacgatgtgtgctggatgttgggttacctagtaactcagtgtcgtagctaacgcggtaagcacaccgcctggggagtacggccgcaaggttgaaactcaaaggaattgacgggggcccgcacaagcggtggagcatgtggtttaattcgaagcaacgcgcagaaccttaccaggacttgacatgggagggctgtgtccagagatggacatttccgcaaggaccctctgcacaggtgctgcatggctgtcgtcagctcgtgtcgtgagatgttgggttaagtcccgcaacgagcgcaaccctcgcctttagttgccagcatgttcgggtgggcactctaaaggaactgccggtgacaagccggaggaaggtggggatgacgtcaagtcctcatggcccttatgtcctgggctacacacgtgctacaatggcggtgacagtgggaagctaggcagtgatgccatgctgatctcaaaaagccgtctcagttcggattgcactctgcaactcgagtgcatgaaggtggaatcgctagtaatcgcggatcagcatgccgcggtgaatacgttcccgggccttgtacacaccgcccgtcacaccatgggagttggtttgaccttaagccggtgcgcgaacccgcaagggacgcagccgaccacggtcgggtcagcgactggggtg

SEQ ID NO: 1521 - DNA, 1422 bp, Granulicella mallensis
aatcaacgctggcggcgtgcctaacacatgcaagtcgcacgagaaagggacttcggtcctgagtacagtggcgcacgggtgagtaacacgtgacttatctacctccgagtggggaataacctagagaaatctgggctaataccgcataacacttacgagtcaaagcagcaatgcgcttggagaggaggtcgcggcagattagttagttggcggggtaatggcccaccaagacgatgatctgtatccggcctgagagggcgcacggacacactggaactgaaacacggtccagactcctacgggaggcagcagtggggaattttgcgcaatgggggaaaccctgacgcagcaacgccgcgtggaggatgaaatcccttgggatgtaaactcctttcgatcgggaagataatgacggtaccgagagaagaagccccggctaacttcgtgccagcagccgcggtaatacgaggggggcaagcgttgttcggaattattgggcgtaaagggtgcgtaggcggtttgataagtcacatgtgaaatcttcgggctcaacccgaagtctgcatgcgaaactgtcgggcttgagtatgggagaggtgagtggaatttccggtgtagcggtgaaatgcgtagatatcggaaggaacacctgtggcgaaagcggctcactggaccataactgacgctgatgcacgaaagctaggggagcaaacaggattagataccctggtagtcctagccctaaacgatgattgcttgatgtggtgggtacccaatcctaccgtgtcgaagctaacgcgataagcaatccgcctggggagtacggtcgcaaggctgaaactcaaaggaattgacgggggcccgcacaagcggtggagcatgtggtttaattcgacgcaacgcgaagaaccttacctgggctcgaaatgtacaggacaacggtagaaatatcgtctcccagcaatgggtctgtatataggtgctgcatggctgtcgtcagctcgtgtcgtgagatgttgggttaagtcccgcaacgagcgcaacccttatctccagttgctaccatttagttgagcactctggcgaaaccgcctcggataacggggaggaaggtggggatgacgtcaagtcctcatggcctttatgtccagggctacacacgtgctacaatggccggtacaaaccgctgcaaccccgcgagggtgagctaatcggaaaaagccggcctcagttcggattggagtctgcaactcgactccatgaagctggaatcgctagtaatcgtggatcagcatgccacggtgaatacgttcccgggccttgtacacaccgcccgtcacatcacgaaagtgggttgcactagaagtcggtgcgctaaccgcaagggagcagccgcccaaggtgtaattcatgattggggtg

SEQ ID NO: 1522 - DNA, 1422 bp, Granulicella pectinivorans
aatcaacgctggcggcgtgcctaacacatgcaagtcgcacgagaaagggacttcggtcctgagtaaagtggcgcacgggtgagtaacacgtgaatgatctacctccgagtggggaataactgagagaaatcttagctaataccgcataatacccacgggtcaaagcagcaatgcgcttggagaggagttcgcggccgattagctagttggcggggtaatggcccaccaaggcgatgatcggtatccggcctgagagggcgcacggacacactggaactgaaacacggtccagactcctacgggaggcagcagtggggaattttgcgcaatgggggaaaccctgacgcagcaacgccgcgtggaggatgaagtatcttggtacgtaaactcctttcgatggggaagataatgacggtacccatagaagaagccccggctaacttcgtgccagcagccgcggtaatacgaggggggcaagcgttgttcggaattattgggcgtaaagggtgcgtaggcggtttgataagtctcgtgtgaaatctctgggctcaacccagagtctgcacgggaaactgtcgggcttgagtatgggagaggtgagtggaatttccggtgtagcggtgaaatgcgtagatatcggaaggaacacctgtggcgaaagcggctcactggaccataactgacgctgatgcacgaaagctaggggagcaaacaggattagataccctggtagtcctagccctaaacgatgattgcttggtgtggccggtacccaatccggccgtgccgaagctaacgcgataagcaatccgcctggggagtacggtcgcaaggctgaaactcaaaggaattgacgggggcccgcacaagcggtggagcatgtggtttaattcgacgcaacgcgaagaaccttacctgggctcgaaatgtacatgaatccggcagaaacgtcggcgtctagcaatagacatgtatataggtgctgcatggctgtcgtcagctcgtgtcgtgagatgttgggttaagtcccgcaacgagcgcaacccttatcttcagttgctaccatttagttgagcactctgacgaaaccgcctcggataacggggaggaaggtggggatgacgtcaagtcctcatggcctttatgtccagggctacacacgtgctacaatggccggtacaaaccgctgcaaccccgcgagggtgagctaatcggaaaaagccggcctcagttcggattggagtctgcaactcgactccatgaagctggaatcgctagtaatcgtggatcagcatgccacggtgaatacgttcccgggccttgtacacaccgcccgtcacatcacgaaagtgggttgcactagaagtcggtgcgctaaccgcaagggagcagccgcccaaggtgtaattcatgattggggtg

SEQ ID NO: 1523 - DNA, 1424 bp, Granulicella rosea
aatcaacgctggcggcgtgcctaacacatgcaagtcgcacgagaaagggacttcggtcttgagtaaagtggcgcacgggtgagtaacacgtgaatgatctaccctcgagtggggaataactgagagaaatcttagctaataccgcataatacccacgggtcaaagcagcaatgcgcttgaggaggagttcgcggccgattagttagttggcggggtaatggcccaccaagacgatgatcggtatccggcctgagagggcgcacggacacactggaactgaaacacggtccagactcctacgggaggcagcagtggggaattttgcgcaatgggggaaaccctgacgcagcaacgccgcgtggaggatgaagtatcttggtacgtaaactcctttcgatggggaagataatgacggtacccatagaagaagccccggctaacttcgtgccagcagccgcggtaatacgaggggggcaagcgttgttcggatttattgggcgtaaagggtgcgtaggcggtttggcaagtcttgtgtgaaatcgatgggctcaacccatcgtctgcacgagaaactaccgggcttgagtagtggagaggtgagtggaatttccggtgtagcggtgaaatgcgtagatatcggaaggaacacctgtggcgaaagcggctcactggacactaactgacgctgaggcacgaaagctaggggagcaaacaggattagataccctggtagtcctagccctaaacgatgatcgcttgatgtggcaggtacccaatcctgccgtgtcgaagctaacgcgataagcgatccgcctggggagtacggtcgcaaggctgaaactcaaaggaattgacgggggcccgcacaagcggtggagcatgtggtttaattcgacgcaacgcgaagaaccttacctgggctcgaaatgtacttgaatccggcagaaacgtcggcgtctcgcaagagacaagtatataggtgctgcatggctgtcgtcagctcgtgtcgtgagatgttgggttaagtcccgcaacgagcgcaacccttatcttcagttgctaccatttagttgagcactctgacgaaaccgcctcggataacggggaggaaggtggggatgacgtcaagtcctcatggcctttatgtccagggctacacacgtgctacaatggccggtacaaaccgctgcaaccccgcgagggtgagctaatcggaaaaagccggcctcagttcggattggagtctgcaactcgactccatgaagctggaatcgctagtaatcgtggatcagcatgccacggtgaatacgttcccgggccttgtacacaccgcccgtcacatcacgaaagtgggttgcactagaagtcggtgcgctaactcgcaagaggagcagctgcccaaggtgtaattcatgattggggtg

SEQ ID NO: 1524 - DNA, 1422 bp, Granulicella tundricola
aatcaacgctggcggcgtgcctaacacatgcaagtcgaacgagaaagggacttcggtcctgagtatagtggcgcacgggtgagtaacacgtgaatgatctaccttcgagtggggaataactgagagaaatcttagctaataccgcataatacctacgggtcaaagcagcaatgcgcttgaagaggagttcgcggcagattagctagttggcggggtaatggcccaccaaggcgatgatctgtatccggcctgagagggcgcacggacacactggaactgaaacacggtccagactcctacgggaggcagcagtggggaattttgcgcaatgggggaaaccctgacgcagcaacgccgcgtggaggatgaagtatcttggtacgtaaactcctttcgatggggaagataatgacggtacccatagaagaagccccggctaacttcgtgccagcagccgcggtaatacgaggggggcaagcgttgttcggaattattgggcgtaaagggtgcgtaggcggttcagcaagtctcgtgtgaaatcttcgggctcaacccgaagtctgcacgggaaactactgggcttgagtaatggagaggtgagtggaatttccggtgtagcggtgaaatgcgtagatatcggaaggaacacctgtggcgaaagcggctcactggacatttactgacgctgatgcacgaaagctaggggagcaaacaggattagataccctggtagtcctagccctaaacgatgattgcttggtgtggcaggtacccaatcctgccgtgccgaagctaacgcgataagcaatccgcctggggagtacggtcgcaaggctgaaactcaaaggaattgacgggggcccgcacaagcggtggagcatgtggtttaattcgacgcaacgcgaagaaccttacctgggctcgaaatgctagtgaatccggcagaaacgtcggcgtctcgcaagagacactagtataggtgctgcatggctgtcgtcagctcgtgtcgtgagatgttgggttaagtcccgcaacgagcgcaacccttatcttcagttgctaccatttagttgagcactctgacgaaaccgcctcggataacggggaggaaggtggggatgacgtcaagtcctcatggcctttatgtccagggctacacacgtgctacaatggccggtacaaaccgctgcaaccccgcgagggtgagctaatcggaaaaagccggcctcagttcggattggagtctgcaactcgactccatgaagctggaatcgctagtaatcgtggatcagcatgccacggtgaatacgttcccgggccttgtacacaccgcccgtcacatcacgaaagtgggttgcactagaagtcggtgcgctaaccgcaagggagcagccgcccaaggtgtaattcatgattggggtg

SEQ ID NO: 1525 - DNA, 1467 bp, Granulosicoccus antarcticus
attgaacgctggcggtatgcttaacacatgcaagtcgaacggcagcatgacagagcttgctctgttgatggcgagtggcggacgggtgagtaatacttaggaatctatccagtagttggggataacgtggggaaactcacgctaataccgaatacgcactacggtggaaagagggggatcttcggacctctcactattgggtgagcctaagccggattagctagttggtggggtaatggcctaccaaggcgacgatccgtagctggtctgagaggacgatcagccacactgggactgagacacggcccagactcctacgggaggcagcagtggggaatattggacaatgggggcaaccctgatccagcaataccgcgtgtgtgaagaaggcctgcgggttgtaaagcactttcagtagggaagaaaggttgttggttaatagctgacgaatttgacgttacctacagaagaagcaccggctaactccgtgccagcagccgcggtaatacggagggtgcaagcgttaatcggaattactgggcgtaaagcgcgcgtaggcggcttagtcagtcagatgtgaaatccccgagcttaacttgggaactgcatttgatactgctaggctagagtatgttagaggaaagcggaattccaggtgtagcggtgaaatgcgtagatatctggaggaacatcagtggcgaaggcggctttctggaacaatactgacgctgaggtgcgaaagcgtggggagcaaacaggattagataccctggtagtccacgccgtaaacgatgtcaactagccgttggttccatttaagggatcagtggcgaagctaacgcgataagttgaccgcctggggagtacgccggcaacggtaaaactcaaaggaattgacgggggcccgcacaagcggtggagcatgtggtttaattcgatgcaacgcgaaaaaccttacctacccttgacatcatcggaacttgtcagagatgactcggtgccttcgggaaccgatagacaggtgctgcatggctgtcgtcagctcgtgtcgtgagatgttgggttaagtcccgcaacgagcgcaacccttgtccttagttgccagcacgtaatggtgggaactctagggagactgccggtgacaaaccggaggaaggtggggatgacgtcaagtcatcatggcccttacgggtagggctacacacgtgctacaatggtcggtacagagggttgcgaagccgcgaggtggagctaatctcacaaaaccgatcgtagtccggattggagtctgcaactcgactccatgaagtcggaatcgctagtaatcgcagatcagaactgctgcggtgaatacgttcccgggccttgtacacaccgcccgtcacaccatgggagttggctgcaaaagaagtgggtagtctaaccttcgggaggacgctcaccactttgtggttaatgactggggtg

SEQ ID NO: 1526 - DNA, 1465 bp, Grimontia celer
ggcggcaggcctaacacatgcaagtcgagcggcagcgacaacattgaaccttcgggggatttgttgggcggcgagcggcggacgggtgagtaatggctgggaacctgcctggtagagggggataaccactggaaacggtggctaataccgcatgatgtctacggaccaaagagggggaccttcgggcctctcgctaccggatgggcccagttgggattagctagttggtggggtaaaggctcaccaaggcgacgatccctagctggtttgagaggatgatcagccacactggaactgagacacggtccagactcctacgggaggcagcagtggggaatattgcacaatgggcgcaagcctgatgcagccatgccgcgtgtgtgaagaaggccttcgggttgtaaagcactttcagccgtgaggaaggcattgtacttaatacgtgcagtgtttgacgttagcggcagaagaagcaccggctaactccgtgccagcagccgcggtaatacggagggtgcgagcgttaatcggaattactgggcgtaaagcgcatgcaggcggtctgttaagcaagatgtgaaagccccgggcttaacctgggaaccgcattttgaactggcaggctagagtcttgtagaggggggtagaatttcaggtgtagcggtgaaatgcgtagagatctgaaggaataccggtggcgaaggcggccccctggacaaagactgacgctcagatgcgaaagcgtggggagcaaacaggattagataccctggtagtccacgccgtaaacgatgtctacttggaggctgtagtcttgaactgtggctttcggagctaacgcgttaagtagaccgcctggggagtacggtcgcaagattaaaactcaaatgaattgacgggggcccgcacaagcggtggagcatgtggtttaattcgatgcaacgcgaagaaccttacctactcttgacatccagagaagccgaaagagattttggtgtgccttcgggaactctgagacaggtgctgcatggctgtcgtcagctcgtgttgtgaaatgttgggttaagtcccgcaacgagcgcaacccttatccttgtttgccagcacgtaatggtgggaactccagggagactgccggtgataaaccggaggaaggtggggacgacgtcaagtcatcatggcccttacgagtagggctacacacgtgctacaatggcatatacagagggcagcgagacagcgatgtgaagcgaatcccagaaagtatgtcgtagtccggattggagtctgcaactcgactccatgaagtcggaatcgctagtaatcgtggatcagaatgccacggtgaatacgttcccgggccttgtacacaccgcccgtcacaccatgggagtgggctgcaccagaagtagatagcttaaccttcgggagggcgtttaccacggtgtggttcatgactggggtg

SEQ ID NO: 1527 - DNA, 1474 bp, Grimontia hollisae
attgaacgctggcggcaggcctaacacatgcaagtcgagcggcagcgacatgaacaatccttcgggtgcgttcatgggcggcgagcggcggacgggtgagtaaaggctgggaacctgccctgacgagggggataaccactggaaacggtggctaataccgcataatgtcttcggaccaaagagggggactttcgggcctctcgcgtcaggatgggcccagttgggattagctggttggtggggtaaaggctcaccaaggcgacgatccctagctggtttgagaggatgatcagccacactggaactgagacacggtccagactcctacgggaggcagcagtggggaatattgcacaatgggcgcaagcctgatgcagccatgccgcgtgtgtgaagaaggccttcgggttgtaaagcactttcagccgtgaggaaggtagcgtagttaatacctgcgttacttgacgttagcggcagaagaagcaccggctaactccgtgccagcagccgcggtaatacggagggtgcgagcgttaatcggaattactgggcgtaaagcgcatgcaggcggtctgttaagcaagatgtgaaagccccgggcttaacctgggagtggcattttgaactggcaggctagagtcttgtagaggggggtagaatttcaggtgtagcggtgaaatgcgtagagatctgaaggaataccggtggcgaaggcggccccctggacaaagactgacgctcagatgcgaaagcgtggggagcaaacaggattagataccctggtagtccacgctgtaaacgatgtctacttggaggctgtggtctagaaccgtggctttcggagctaacgcgttaagtagaccgcctggggagtacggtcgcaagattaaaactcaaatgaattgacgggggcccgcacaagcggtggagcatgtggtttaattcgatgcaacgcgaagaaccttacctactcttgacatcctcagaagccggaagagattctggtgtgccttcgggaactgagagacaggtgctgcatggctgtcgtcagctcgtgttgtgaaatgttgggttaagtcccgcaacgagcgcaacccttatccttgtttgccagcacttcgggtgggaactccagggagactgccggtgataaaccggaggaaggtggggacgacgtcaagtcatcatggcccttacgagtagggctacacacgtgctacaatggtgcatacagagggcagcgagaccgcgaggtggagcgaatcccagaaagtgcatcgtagtccggattggagtctgcaactcgactccatgaagtcggaatcgctagtaatcgtggatcagaatgccacggtgaatacgttcccgggccttgtacacaccgcccgtcacaccatgggagtgggctgcaccagaagtagatagcttaaccttcgggagggcgtttaccacggtgtggttcatgactggggtg

SEQ ID NO: 1528 - DNA, 1475 bp, Grimontia indica
attgaacgctggcggcaggcctaacacatgcaagtcgagcggcagcgacttaactgaaccttcgggggacgttaagggcggcgagcggcggacgggtgagtaatggctgggaacctgcctggtagagggggataaccactggaaacggtggctaataccgcatgatgtctacggaccaaagagggggaccttcgggcctctcgctaccggatgggcccagttgggattagctagttggtggggtaaaggctcaccaaggcgacgatccctagctggtttgagaggatgatcagccacactggaactgagacacggtccagactcctacgggaggcagcagtggggaatattgcacaatgggcgcaagcctgatgcagccatgccgcgtgtgtgaagaaggccttcgggttgtaaagcactttcagccgtgaggaaggcattgtacctaatacgtgcagtgtttgacgttagcggcagaagaagcaccggctaactccgtgccagcagccgcggtaatacggagggtgcgagcgttaatcggaattactgggcgtaaagcgcatgcaggcggtctgttaagcaagatgtgaaagccccgggcttaacctgggaaccgcattttgaactggcaggctagagtcttgtagaggggggtagaatttcaggtgtagcggtgaaatgcgtagagatctgaaggaataccggtggcgaaggcggccccctggacaaagactgacgctcagatgcgaaagcgtggggagcaaacaggattagataccctggtagtccacgccgtaaacgatgtctacttggaggctgtagtcttgaactgtggctttcggagctaacgcgttaagtagaccgcctggggagtacggtcgcaagattaaaactcaaatgaattgacgggggcccgcacaagcggtggagcatgtggtttaattcgatgcaacgcgaagaaccttacctactcttgacatccagcgaagcttgaagagattcgagtgtgccttcgggaacgctgagacaggtgctgcatggctgtcgtcagctcgtgttgtgaaatgttgggttaagtcccgcaacgagcgcaacccttatccttgtttgccagcacgtaatggtgggaactccagggagactgccggtgataaaccggaggaaggtggggacgacgtcaagtcatcatggcccttacgagtagggctacacacgtgctacaatggcatatacagagggcagcgagacagcgatgtgaagcgaatcccagaaagtatgtcgtagtccggattggagtctgcaactcgactccatgaagtcggaatcgctagtaatcgtggatcagaatgccacggtgaatacgttcccgggccttgtacacaccgcccgtcacaccatgggagtgggctgcaccagaagtagatagcttaaccttcgggagggcgtttaccacggtgtggttcatgactggggtg

SEQ ID NO: 1529 - DNA, 1475 bp, Grimontia marina
attgaacgctggcggcaggcctaacacatgcaagtcgagcggcagcgacaataaagattcttcggatgatttattgggcggcgagcggcggacgggtgagtaatggctgggaacctgcctggtagagggggataaccactggaaacggtggctaataccgcatgatgtctttggaccaaagagggggaccttcgggcctctcgctaccggatgggcccagttgggattagctagttggtggggtaaaggctcaccaaggcgacgatccctagctggtttgagaggatgatcagccacactggaactgagacacggtccagactcctacgggaggcagcagtggggaatattgcacaatgggcgcaagcctgatgcagccatgccgcgtgtgtgaagaaggccttcgggttgtaaagcactttcagccgtgaggaaggcattgtacttaatacgtgcagtgtttgacgttagcggcagaagaagcaccggctaactccgtgccagcagccgcggtaatacggagggtgcgagcgttaatcggaattactgggcgtaaagcgcatgcaggcggtctgttaagcaagatgtgaaagccccgggcttaacctgggaaactcattttgaactggcaggctagagtcttgtagaggggggtagaatttcaggtgtagcggtgaaatgcgtagagatctgaaggaataccggtggcgaaggcggccccctggacaaagactgacgctcagatgcgaaagcgtggggagcaaacaggattagataccctggtagtccacgccgtaaacgatgtctacttggaggctgttgtctagaacagtggctttcggagctaacgcgttaagtagaccgcctggggagtacggtcgcaagattaaaactcaaatgaattgacgggggcccgcacaagcggtggagcatgtggtttaattcgatgcaacgcgaagaaccttacctactcttgacatccagcgaagcttgaagagattcgagtgtgccttcgggaacgctgagacaggtgctgcatggctgtcgtcagctcgtgttgtgaaatgttgggttaagtcccgcaacgagcgcaacccttatccttgtttgccagcacgtaatggtgggaactccagggagactgccggtgataaaccggaggaaggtggggacgacgtcaagtcatcatggcccttacgagtagggctacacacgtgctacaatggcatatacagagggcagcgagacagcgatgtgaagcgaatcccagaaagtatgtcgtagtccggattggagtctgcaactcgactccatgaagtcggaatcgctagtaatcgtggatcagaatgccacggtgaatacgttcccgggccttgtacacaccgcccgtcacaccatgggagtgggctgcaccagaagtagatagcttaaccttcgggagggcgtttaccacggtgtggttcatgactggggtg

SEQ ID NO: 1530 - DNA, 1440 bp, Gulbenkiania indica
tgcttacacatgcaagtcggacggcagcgggggcttcggcctgccggcgagtggcgaacgggtgagtaaagcgtcggaacgtaccgagtaatgggggataactgtccgaaaggacagctaataccgcatacgctctgaggaggaaagcgggggaccttcgggcctcgcgttattcgagcggccgacgtctgattagctagttggtgaggtaaaggctcaccaaggcgacgatcagtagcgggtctgagaggatgatccgccacactgggactgagacacggcccagactcctacgggaggcagcagtggggaattttggacaatgggcgcaagcctgatccagccatgccgcgtgtctgaagaaggccttcgggttgtaaaggacttttgtcggggaggaaatcctctgggttaataccctagggggatgacagtacctgaagaataagcaccggctaactacgtgccagcagccgcggtaatacgtagggtgcaagcgttaatcggaattactgggcgtaaagcgtgcgcaggcggttgtgcaagtctgatgtgaaatccccgggcttaacctgggaactgcattggagactgcacggctagagtgcgtcagaggggggtggaattccgcgtgtagcagtgaaatgcgtagagatgcggaggaacaccgatggcgaaggcagccccctgggatgacactgacgctcatgcacgaaagcgtggggagcaaacaggattagataccctggtagtccacgccctaaacgatgtcaactagctgttgggggtttgaatccttggtagcgtagctaacgcgtgaagttgaccgcctggggagtacggccgcaaggttaaaactcaaaggaattgacggggacccgcacaagcggtggatgatgtggattaattcgatgcaacgcgaagaaccttacctgctcttgacatgtaccgaatcctgaagagatttaggagtgcccgaaagggagccgtaacccaggtgctgcatggctgtcctcagcccctgtcgtgagatgttgggttaagtcccgcaacgagcgcaacccttgtcattagttgccatcattgagttgggcactctaatgagactgccggtgacaaaccggaggaaggtggggatgacgtcaagtcctcatggcccttatgagcagggcttcacacgtcatacaatggtcggtacagagggtcgccaaaccgcgaggtggagccaatctcataaaaccgatcgtagtccggattgcactctgcaactcgagtgcatgaagtcggaatcgctagtaatcgcagatcagcatgctgcggtgaatacgttcccgggtcttgtacacaccgcccgtcacaccatgggagtgggggataccagaagtggctaggataaccttcgggagtccggttaccacggtatgcttcatgactggggtg

SEQ ID NO: 1531 - DNA, 1464 bp, Gynuella sunshinyii
attgaacgctggcggcaggcttaacacatgcaagtcgagcggtagcatttccagcttgctggaagatgacgagcggcggacgggtgagtaacgcgtaggaatctgccttggagtgggggatagcccggggaaactcggattaataccgcatacggtctacggacgaaagtgggggctcttcggacctcacgctctaagatgagcctgcgtaggattagctagttggtgaggtaaaggctcaccaaggcgacgatccttagctgttctgagaggatgatcagccacactgggactgagacacggcccagactcctacgggaggcagcagtggggaatattggacaatgggggcaaccctgatccagccatgccgcgtgtgtgaagaaggccttcgggttgtaaagcactttcagtggggaggaaggcgtgagtattaataatgctcatgattgacgttacccacagaagaagcaccggctaactccgtgccagcagccgcggtaatacggagggtgcgagcgttaatcggaattactgggcgtaaagcgcgcgtaggcggcgagttaagtcggatgtgaaatccctgggctcaacctgggaactgcatacgatactgacttgctagagtcttgcagaggggtgtggaatttccggtgtagcggtgaaatgcgtagagatcggaaggaacatcagtggcgaaggcgacaccctgggcaaagactgacgctgaggtgcgaaagcgtgggtagcaaacaggattagataccctggtagtccacgcggtaaacgatgtctattagccgtccgtttcgtttttagagatgggtggcgcagctaacgcgataaatagaccgcctggggagtacggtcgcaagattaaaactcaaatgaattgacgggggcccgcacaagcggtggagcatgtggtttaattcgaagcaacgcgaagaaccttacctactcttgacatccagagaactttccagagatggattggtgccttcgggaactctgagacaggtgctgcatggctgtcgtcagctcgtgttgtgaaatgttgggttaagtcccgtaacgagcgcaacccttatccttagttgccagcggttcggccggggactctaaggaaactgccggtgacaaaccggaggaaggtggggacgacgtcaagtcatcatggcccttacgagtagggctacacacgtgctacaatggccggtacagacggtagcgaagcggcgacgtggagccaatccgagaaagctggtcgtagtccggatcgcagtctgcaactcgactgcgtgaagtcggaatcgctagtaatcgcgaatcagaatgtcgcggtgaatacgttcccgggccttgtacacaccgcccgtcacaccatgggagttgatttcaccagaagtaggtagcttaaccgaaaggagggcgcttaccacggtggggtcaatgactggggtg

SEQ ID NO: 1532 - DNA, 1408 bp, Haematospirillum jordaniae
aacgaacgctggcggcaggcctaacacatgcaagtcgagcgcccggatttatccgggagcggcgcacgggtgagtaacgcgtgggaacatgccctgaagtacggaacaacctggggaaaccttggctaataccgtatacgccctgagggggaaagatttatcgctttgggattggcccgcgttggattagctagttggtgtggtaacggcgcaccaaggcgacgatccataactggtctgagaggatgaccagtcacactgggactgagacacggcccagactcctacgggaggcagcagtggggaatattggacaatgggcgaaagcctgatccagccatgccgcgtgagtgaagaaggccttcgggttgtaaagctctttcagcggggacgatgatgacggtacccgcagaagaagccccggctaacttcgtgccagcagccgcggtaatacgaagggggctagcgttgttcggaattactgggcgtaaagcgcgcgtaggcggctttgtcagtcaggggtgaaatcccggggctcaaccccggaactgcctttgatactgcaaggcttgagtccgtgagaggatggtggaatacccagtgtagaggtgaaattcgtagatattgggtggaacaccggtggcgaaggcgaccatctggcacggtactgacgctgaggtgcgaaagcgtggggagcaaacaggattagataccctggtagtccacgctgtaaacgatgagtgccagctgtcggaatgcatgcatttcggtggcgcagctaacgcattaagcactccgcctggggagtacggccgcaaggttaaaactcaaaggaattgacgggggcccgcacaagcggtggagcatgtggtttaattcgaagcaacgcgcagaaccttaccagcccttgacatggggatcgcggaaccggagacggttccttcagttcggctggatcccacacaggtgctgcatggctgtcgtcagctcgtgtcgtgagatgttgggttaagtcccgcaacgagcgcaaccctcgtcctcagttgccatcattaagttgggcactctggggaaactgccggtgacaagccggaggaaggtggggatgacgtcaagtcctcatggcccttacgggctgggctacacatgtgctacaatggcgactacagagggaagccacttcgcgagaaggcgcaaatcccaaaaagtcgtcccagttcggattgcactctgcaactcgagtgcatgaagtcggaatcgctagtaatcgtggatcagcacgccacggtgaatacgttcccgggccttgtacacaccgcccgtcacaccatgggagttggttttacccgaagacggttcgctaaccgcaaggaggcagccggccacggtagggtcagcgactggggtg

SEQ ID NO: 1533 - DNA, 1462 bp, Haemophilus aegyptius
attgaacgctggcggcaggcttaacacatgcaagtcgaacggtagcaggagaaagcttgctttcttgctgacgagtggcggacgggtgagtaatgcttgggaatctggcttatggagggggataacgacgggaaactgtcgctaataccgcgtagtgtcgagagacgaaagtgcgggactgagaggccgcatgccataggatgagcccaagtgggattaggtagttggtggggtaaaggtctaccaagcctgcgatctctagctggtctgagaggatgaccagccacactggaactgagacacggtccagactcctacgggaggcagcagtggggaatattgcgcaatggggggaaccctgacgcagccatgccgcgtgaatgaagaaggccttcgggttgtaaagttctttcggtattgaggaaggttgatgtgttaatagcacatcaaattgacgttaaatacagaagaagcaccggctaactccgtgccagcagccgcggtaatacggagggtgcgagcgttaatcggaataactgggcgtaaagggcacgcaggcggttatttaagtgaggtgtgaaagccctgggcttaacctaggaattgcatttcagactgggtaactagagtactttagggaggggtagaattccacgtgtagcggtgaaatgcgtagagatgtggaggaataccgaaggcgaaggcagccccttgggaatgtactgacgctcatgtgcgaaagcgtggggagcaaacaggattagataccctggtagtccacgctgtaaacgctgtcgatttgggggttggggtttaactctggcgcccgtagctaacgtgataaatcgaccgcctggggagtacggccgcaaggttaaaactcaaatgaattgacgggggcccgcacaagcggtggagcatgtggtttaattcgatgcaacgcgaagaaccttacctactcttgacatcctaagaagagctcagagatgagcttgtgccttcgggaacttagagacaggtgctgcatggctgtcgtcagctcgtgttgtgaaatgttgggttaagtcccgcaacgagcgcaacccttatcctttgttgccagcgacttggtcgggaactcaaaggagactgccagtgataaactggaggaaggtggggatgacgtcaagtcatcatggcccttacgagtagggctacacacgtgctacaatggcgtatacagagggaagcgaagctgcgaggtggagcgaatctcataaagtacgtctaagtccggattggagtctgcaactcgactccatgaagtcggaatcgctagtaatcgcgaatcagaatgtcgcggtgaatacgttcccgggccttgtacacaccgcccgtcacaccatgggagtgggttgtaccagaagtagatagcttaaccttttggagggcgtttaccacggtatgattcatgactggggtg

SEQ ID NO: 1534 - DNA, 1462 bp, Haemophilus ducreyi
attgaacgctggcggcaggcttaacacatgcaagtcgaacggtagcacgaaggacttgctccttgggtgacgagtggcggacgggtgagtaatgcttgggaatctggcttatggagggggataactacgggaaactgtagctaataccgcgtaatatcttcggattaaagggtgggaccttcgggccacctgccataagatgagcccaagtgggattaggtagttggttaggtaaaggctgaccaagccgacgatctctagctggtctgagaggatgaccagccacactggaactgagacacggtccagactcctacgggaggcagcagtggggaatattgcacaatgggggaaaccctgatgcagccatgccgcgtgaatgaagaaggccttcgggttgtaaagttctttcggtgatgaggaaggcagttttgttaatagcaaaattgattgacgttagtcacagaagaagcaccggctaactccgtgccagcagccgcggtaatacggggggtgcgagcgttaatcggaataactgggcgtaaagggcacgcaggcggttgattaagtgagatgtgaaagccccgggcttaacctgggaattgcatttcatactggtcaactagagtactttagggaggggtagaattccacgtgtagcggtgaaatgcgtagagatgtggaggaataccgaaggcgaaggcagccccttgggaatgtattgacgctcatgtgcgaaagcgtggggagcaaacaggattagataccctggtagtccacgctgtaaacgatgtcgatttgggggttggtctttaagactggcgcccgaagctaacgtgataaatcgaccgcctggggagtacggccgcaaggttaaaactcaaatgaattgacgggggcccgcacaagcggtggagcatgtggtttaattcgatgcaacgcgaagaaccttacctactcttgacatccatagaagaactcagagatgagtttgtgccttcgggaactatgtgacaggtgctgcatggctgtcgtcagctcgtgttgtgaaatgttgggttaagtcccgcaacgagcgcaacccttatcctttgttgccagcatgtaatgatgggaactcaaaggagactgccagtgataaactggaggaaggtggggatgacgtcaagtcatcatggcccttacgagtagggctacacacgtgctacaatggcgtatacagagggcggcaaacctgcaaaggggagcgaatctcacaaagtacgtctaagtccggattggagtctgcaactcgactccatgaagtcggaatcgctagtaatcgcaaatcagaatgttgcggtgaatacgttcccgggccttgtacacaccgcccgtcacaccatgggagtgggttgtaccagaagtagatagcttaaccttcgggagggcgtttaccacggtatgattcatgactggggtg

SEQ ID NO: 1535 - DNA, 1462 bp, Haemophilus felis
  misc_feature (94)..(94): n is a, c, g, or t
  misc_feature (344)..(344): n is a, c, g, or t
  misc_feature (563)..(563): n is a, c, g, or t
  misc_feature (565)..(565): n is a, c, g, or t
  misc_feature (587)..(587): n is a, c, g, or t
  misc_feature (589)..(589): n is a, c, g, or t
  misc_feature (620)..(620): n is a, c, g, or t
  misc_feature (632)..(632): n is a, c, g, or t
attgaacgctggcggcaggcttaacacatgcaagtcgaacggtagcaggagaaagcttgctttcttgctgacgagtggcggacgggtgagtaangcttgggaatctggcttatggagggggataactacgggaaactgtagctaataccgcgtaatatcgaaagattaaaatgtgggacttttagccagcatgccataagatgagcccaagtgggattaggtagttggtggggtaagggcctaccaagccgacgatctctagctggtctgagaggatgaccagccacactggaactgagacacggtccagactcctacgggaggcagcagtggggaatattgcncaatggggggaaccctgatgcagccatgccgcgtgaatgaagaaggccttcgggttgtaaagttctttcggtggtgaggaaggttgtaatgttaatagtattacaaattgacgttaaccacagaagaagcaccggctaactccgtgccagcagccgcggtaatacggagggtgcgagcgttaatcggaataactgggcgtaaagggcacgcaggcggantnttaagtgagatgtgaaatcccngngcttaacttgggaattgcatttcagactggnagtctagagtantttagggaggggtagaattccacgtgtagcggtgaaatgcgtagagatgtggaggaataccgaaggcgaaggcagccccttgggaatatactgacgctcatgtgcgaaagcgtggggagcaaacaggattagataccctggtagtccacgctgtaaacgctgtcgatttggggattgggctatatgcttggtgcccgaagctaacgtgataaatcgaccgcctggggagtacggccgcaaggttaaaactcaaatgaattgacgggggcccgcacaagcggtggagcatgtggtttaattcgatgcaacgcgaagaaccttacctactcttgacatcctaagaagaactcagagatgagtttgtgccttcgggaacttagagacaggtgctgcatggctgtcgtcagctcgtgttgtgaaatgttgggttaagtcccgcaacgagcgcaacccttatcctttgttgccagcgattcggtcgggaactcaaaggagactgccagtgataaactggaggaaggtggggatgacgtcaagtcatcatggcccttacgagtagggctacacacgtgctacaatggtgcatacagagggaagcgagagtgcgagctggagcgaatctcagaaagtgcatctaagtccggattggagtctgcaactcgactccatgaagtcggaatcgctagtaatcgcaaatcagaatgttgcggtgaatacgttcccgggccttgtacacaccgcccgtcacaccatgggagtgggttgtaccagaagtagatagcttaacggaaacgggggcgtttaccacggtatgattcatgactggggtg

SEQ ID NO: 1536 - DNA, 1455 bp, Haemophilus paracuniculus
  misc_feature (4)..(4): n is a, c, g, or t
  misc_feature (22)..(22): n is a, c, g, or t
  misc_feature (58)..(58): n is a, c, g, or t
  misc_feature (61)..(62): n is a, c, g, or t
  misc_feature (70)..(70): n is a, c, g, or t
  misc_feature (235)..(235): n is a, c, g, or t
  misc_feature (265)..(265): n is a, c, g, or t
  misc_feature (644)..(644): n is a, c, g, or t
  misc_feature (812)..(812): n is a, c, g, or t
  misc_feature (1030)..(1030): n is a, c, g, or t
  misc_feature (1062)..(1063): n is a, c, g, or t
attnaacgctggcggcaggctnaacacatgcaagtcgaacggtagcaggagaaagctngcnntcttgctnacgagtggcggacgggtgagtaatgcttgggaatctggcttatggagggggataactactggaaacggtagctaataccgcgtaatatcttcggattaaagggtgggacctcttggccacctgccataagatgagcccaagtgggattaggtagttggtggggtnaaggcctaccaagccgacgatctctagctngtctgagaggatgaccagccacactggaactgagacacggtccagactcctacgggaggcagcagtggggaatattgcacaatggggggaaccctgatgcagccatgccgcgtgaatgaagaaggccttcgggttgtaaagttctttcggtgatgaggaaggcggttagtttaatagactaatcgattgacgttagtcacagaagaagcaccggctaactccgtgccagcagccgcggtaatacggagggtgcgagcgttaatcggaataactgggcgtaaagggcacgcaggcggatttttaagtgggatgtgaaagccccgggcttaacctgggaattgcatttcagactggaagtctagagtattttagggagggntagaattccacgtgtagcggtgaaatgcgtagagatgtggaggaataccgaaggcgaaggcagccccttgggaatatactgacgctcatgtgcgaaagcgtggggagcaaacaggattagataccctggtagtccacgctgtaaacgctgtcgatttggggattgggnttagagcttggtgcccgtagctaacgtgataaatcgaccgcctggggagtacggccgcaaggttaaaactcaaatgaattgacgggggccgcacaagcggtggagcatgtggtttaattcgatgcaacgcgaagaaccttacctactcttgacatcctaagaagaactcagagatgagtttgtgccttcgggaacttagagacaggtgctgcatggcngtcgtcagctcgtgttgtgaaatgttgggttnngtcccgcaacgagcgcaacccttatcctttgttgccagcacttcgggtggggactcaaaggagactgccagtgataaactggaggaaggtggggatgacgtcaagtcatcatggcccttacgagtagggctacacacgtgctacaatggtgcatacagagggaagcaaacctgcgagggggagcgaatctcagaaagtgcatctaagtccggattggagtctgcaactcgactccatgaagtcggaatcgctagtaatcgcgaatcagaatgtcgcggtgaatacgttcccgggccttgtacacaccgcccgtcacaccatgggagtgggttgtaccagaagtagatagcttaaccgaaaggggggcgtttaccacggtatgattcatgact

SEQ ID NO: 1537 - DNA, 1462 bp, Haemophilus parahaemolyticus
attgaacgctggcggcaggcttaacacatgcaagtcgaacggtaacagggattagcttgctaatctgctgacgagtggcggacgggtgagtaatgcttgggaatctggcttatggagggggataactacgggaaactgtagctaataccgcgtaaaatcttcggattaaagggtgggactttcgagccacctgccataagatgagcccaagtgggattaggtagttggttaggtaaaggctgaccaagccgacgatctctagctggtctgagaggatgaccagccacactggaactgagacacggtccagactcctacgggaggcagcagtggggaatattgcacaatggggggaaccctgatgcagccatgccgcgtgaatgaagaaggccttcgggttgtaaagttctttcggtgacgaggaaggttgataggttaatagcctatcaaattgacgttaatcacagaagaagcaccggctaactccgtgccagcagccgcggtaatacggggggtgcgagcgttaatcggaataactgggcgtaaagggcacgcaggcggtgacttaagtgagatgtgaaagccccgggcttaacctgggaattgcatttcatactgggtcgctagagtactttagggaggggtagaattccacgtgtagcggtgaaatgcgtagagatgtggaggaataccgaaggcgaaggcagccccttgggaatgtactgacgctcatgtgcgaaagcgtggggagcaaacaggattagataccctggtagtccacgctgtaaacgatgtcgatttggggattgggctttgagcttggtgcccgtagctaacgtgataaatcgaccgcctggggagtacggccgcaaggttaaaactcaaatgaattgacgggggcccgcacaagcggtggagcatgtggtttaattcgatgcaacgcgaagaaccttacctactcttgacatccatggaatcttgtagagatatgagagtgccttcgggaaccatgagacaggtgctgcatggctgtcgtcagctcgtgttgtgaaatgttgggttaagtcccgcaacgagcgcaacccttatcctttgttgccagcgattaggtcgggaactcaaaggagactgccagtgataaactggaggaaggtggggatgacgtcaagtcatcatggcccttacgagtagggctacacacgtgctacaatggcgtatacagagggaagcgagcctgcgagggggagcaaatctcagaaagtacgtctaagtccggattggagtctgcaactcgactccatgaagtcggaatcgctagtaatcgcgaatcagaatgtcgcggtgaatacgttcccgggccttgtacacaccgcccgtcacaccatgggagtgggttgtaccagaagtagatagcttaaccttcgggagggcgtttaccacggtatgattcatgactggggtg

SEQ ID NO: 1538 - DNA, 1462 bp, Haemophilus paraphrohaemolyticus
attgaacgctggcggcaggcttaacacatgcaagtcgaacggtaacagggattagcttgctaatttgctgacgagtggcggacgggtgagtaatgcttgggaatctggcttatggagggggataactacgggaaactgtagctaataccgcgtaatatcggaagattaaagggtgggactttcgggccacctgccataagatgagcccaagtgggattaggtagttggttaggtaaaggctgaccaagccgacgatctctagctggtctgagaggatgaccagccacactggaactgagacacggtccagactcctacgggaggcagcagtggggaatattgcacaatggggggaaccctgatgcagccatgccgcgtgaatgaagaaggccttcgggttgtaaagttctttcggtgacgaggaaggttgataggttaatagcctatcaaattgacgttaatcacagaagaagcaccggctaactccgtgccagcagccgcggtaatacggggggtgcgagcgttaatcggaataactgggcgtaaagggcacgcaggcggtgacttaagtgagatgtgaaagccccgggcttaacctgggaattgcatttcatactgggtcgctagagtactttagggaggggtagaattccacgtgtagcggtgaaatgcgtagagatgtggaggaataccgaaggcgaaggcagccccttgggaatgtactgacgctcatgtgcgaaagcgtggggagcaaacaggattagataccctggtagtccacgctgtaaacgatgtcgatttggggattgggctttaagcttggtgcccgtagctaacgtgataaatcgaccgcctggggagtacggccgcaaggttaaaactcaaatgaattgacgggggcccgcacaagcggtggagcatgtggtttaattcgatgcaacgcgaagaaccttacctactcttgacatccatggaatcttgtagagatacgagagtgccttcgggaaccatgagacaggtgctgcatggctgtcgtcagctcgtgttgtgaaatgttgggttaagtcccgcaacgagcgcaacccttatcctttgttgccagcggttaggccgggaactcaaaggagactgccagtgataaactggaggaaggtggggatgacgtcaagtcatcatggcccttacgagtagggctacacacgtgctacaatggcgtatacagagggaagcaatcctgcgagggggagcaaatctcagaaagtacgtctaagtccggattggagtctgcaactcgactccatgaagtcggaatcgctagtaatcgcgaatcagaatgtcgcggtgaatacgttcccgggccttgtacacaccgcccgtcacaccatgggagtgggttgtaccagaagtagatagcttaaccgagaggggggcgtttaccacggtatgattcatgactggggtg

SEQ ID NO: 1539 - DNA, 1462 bp, Haemophilus parasuis
attgaacgctggcggcaggcttaacacatgcaagtcgaacggtagcaggaagaagcttgcttctttgctgacgagtggcggacgggtgagtaatgcttgggaatctggcttatggagggggataactacgggaaactgtagctaataccgcgtagtatcgggagatgaaagactgggaccgcaaggccagttgccataagatgagcccaagtgggattaggtagttggtggggtaaaggcctaccaagccgacgatctctagctggtctgagaggatgaccagccacactggaactgagacacggtccagactcctacgggaggcagcagtggggaatattgcacaatggggggaaccctgatgcagccatgccgcgtgaatgaagaaggccttcgggttgtaaagttctttcggtgatgaggaagggtggtgttttaatagaacattacattgacgttagtcacagaagaagcaccggctaactccgtgccagcagccgcggtaatacggagggtgcgagcgttaatcggaatgactgggcgtaaagggcacgcaggcggtgacttaagtgagatgtgaaagccccgagcttaacttgggaattgcatttcatactgggttgctagagtattttagggaggggtagaattccacgtgtagcggtgaaatgcgtagagatgtggaggaataccgaaggcgaaggcagccccttgggaaaatactgacgctcatgtgcgaaagcgtggggagcaaacaggattagataccctggtagtccacgctgtaaacgctgtcgatttggggattgggcttagagcttggtgcccgtagctaacgtgataaatcgaccgcctggggagtacggccgcaaggttaaaactcaaatgaattgacgggggcccgcacaagcggtggagcatgtggtttaattcgatgcaacgcgaagaaccttacctactcttgacatcctaagaagaactcagagatgagtttgtgccttcgggaacttagagacaggtgctgcatggctgtcgtcagctcgtgttgtgaaatgttgggttaagtcccgcaacgagcgcaacccttatcctttgttgccagcgattcggtcgggaactcaaaggagactgccagtgataaactggaggaaggtggggatgacgtcaagtcatcatggcccttacgagtagggctacacacgtgctacaatggtgcatacagagggtgacgaagccgcgaggtggagtgaatctcagaaagtgcatctaagtccggattggagtctgcaactcgactccatgaagtcggaatcgctagtaatcgcgaatcagaatgtcgcggtgaatacgttcccgggccttgtacacaccgcccgtcacaccatgggagtgggttgtaccagaagtagatagcttaactgaaaggggggcgtttaccacggtatgattcatgactggggtg

SEQ ID NO: 1540 - DNA, 1465 bp, Hafnia paralvei
attgaacgctggcggcaggcctaacacatgcaagtcgagcggtagcacaagagagcttgctctctgggtgacgagcggcggacgggtgagtaatgtctgggaaactgcctgatggagggggataactactggaaacggtagctaataccgcatgacgtcttcggaccaaagtgggggaccttcgggcctcacgccatcagatgtgcccagatgggattagctagtaggtggggtaatggctcacctaggcgacgatctctagctggtctgagaggatgaccagccacactggaactgagacacggtccagactcctacgggaggcagcagtggggaatattgcacaatgggcgcaagcctgatgcagccatgccgcgtgtatgaagaaggccttcgggttgtaaagtactttcagcgaggaggaaggcattaaggttaataaccttagtgattgacgttactcgcagaagaagcaccggctaactccgtgccagcagccgcggtaatacggagggtgcaagcgttaatcggaattactgggcgtaaagcgcacgcaggcggtttgttaagtcagatgtgaaatccccgagcttaacttgggaactgcatttgaaactggcaagctagagtcttgtagaggggggtagaattccaggtgtagcggtgaaatgcgtagagatctggaggaataccggtggcgaaggcggccccctggacaaagactgacgctcaggtgcgaaagcgtggggagcaaacaggattagataccctggtagtccacgctgtaaacgatgtcgacttggaggttgtgcccttgaggcgtggcttccggagctaacgcgttaagtcgaccgcctggggagtacggccgcaaggttaaaactcaaatgaattgacgggggcccgcacaagcggtggagcatgtggtttaattcgatgcaacgcgaagaaccttacctactcttgacatccagagaatttgctagagatagcttagtgccttcgggaactctgagacaggtgctgcatggctgtcgtcagctcgtgttgtgaaatgttgggttaagtcccgcaacgagcgcaacccttatcctttgttgccagcgagtaatgtcgggaactcaaaggagactgccggtgataaaccggaggaaggtggggatgacgtcaagtcatcatggcccttacgagtagggctacacacgtgctacaatggcatatacaaagagaagcgaactcgcgagagcaagcggacctcataaagtatgtcgtagtccggattggagtctgcaactcgactccatgaagtcggaatcgctagtaatcgtagatcagaatgctacggtgaatacgttcccgggccttgtacacaccgcccgtcacaccatgggagtgggttgcaaaagaagtaggtagcttaaccttcgggagggcgcttaccactttgtgattcatgactggggtg

SEQ ID NO: 1541 - DNA, 1457 bp, Hahella chejuensis
attgaacgctggcggcaggcttaacacatgcaagtcgagcggtaacagtccttcgggagctgacgagcggcggacgggtgagtaaagcataggaatctgcctgttagagggggatagcccggggaaactcggattaataccgcatacgccctacgggggaaagcaggggatcttcggaccttgcgctaacagatgagcctatgtcggattagctagttggtagggtaagagcctaccaaggcgacgatccgtaactggtctgagaggatgatcagtcacactggaactgagacacggtccagactcctacgggaggcagcagtggggaatattggacaatgggggcaaccctgatccagccatgccgcgtgtgtgaagaaggccttcgggttgtaaagcactttcagtggggaggaaagggcagttgctaatatcagctgcagttgacgttacccacagaagaagcaccggcaaactccgtgccagcagccgcggtaatacggagggtgcgagcgttaatcggaattactgggcgtaaagcgcgcgtaggcggttgcttaagctaggtgtgaaatccccgggctcaacctgggaactgcacttagaactgggcgactagagttttggagaggagggtagaattccaggtgtagcggtgaaatgcgtagagatctggaggaataccagtggcgaaggcggccctctggccaaaaactgacgctgaggtgcgaaagcgtggggagcaaacaggattagataccctggtagtccacgccgtaaacgatgagaactagccgttggggtccttagagactttagtggcgcagctaacgcgataagttctccgcctggggagtacggccgcaaggttaaaactcaaatgaattgacgggggcccgcacaagcggtggagcatgtggtttaattcgaagcaacgcgaagaaccttacctggccttgacatccagagaactttccagagatggattggtgccttcgggaactctgagacaggtgctgcatggctgtcgtcagctcgtgttgtgaaatgttgggttaagtcccgtaacgagcgcaacccttgtccctatttgccagcacttcgggtgggaactttagggagactgccggtgacaaaccggaggaaggtggggacgacgtcaagtcatcatggcccttacggccagggctacacacgtgctacaatggggcgtacagagggttgcgaagccgcgaggtggagctaatctcttaaagcgtctcgtagtccggattggagtctgcaactcgactccatgaagtcggaatcgctagtaatcgcgaatcagaatgtcgcggtgaatacgttcccgggccttgtacacaccgcccgtcacaccatgggagtgggttgcaccagaagtagctagtctaaccttcggggggacggttaccacggtgtgattcatgactggggtg

SEQ ID NO: 1542 - DNA, 1456 bp, Haliea salexigens
attgaacgctggcggcaggcctaacacatgcaagtcgagcgcgaaagcacttcggtgtgagtagagcggcggacgggtgagtaacgcgtaggaatctacctggtagtgggggataacttggggaaacccaagctaataccgcatacgccctaagggggaaagcgggggatcttcggacctcgcgctatcggatgagcctgcgtaggattagcttgttggtgaggtaaaggctcaccaaggcgacgatccttagctggtctgagaggatgatcagccacaccgggactgagacacggcccggactcctacgggaggcagcagtggggaatattgcgcaatgggcgaaagcctgacgcagccatgccgcgtgtgtgaagaaggccttcgggttgtaaagcactttcacttgggaagaaaggctaggggctaataccttttagctgtgacattaccttgagaagaagcaccggctaactccgtgccagcagccgcggtaatacggagggtgcaagcgttaatcggaattactgggcgtaaagcgcgcgtaggcggtttgttaagtcggatgtgaaagccccgggctcaacctgggaactgcacccgatactggccgactagagtacgagagagggaggtagaattccacgtgtagcggtgaaatgcgtagatatgtggaggaataccggtggcgaaggcgacctcctggctcgatactgacgctgaggtgcgaaagcgtggggagcaaacaggattagataccctggtagtccacgccgtaaacgatgtctactagccgttgggagacttgatttcttggtggcgcagctaacgcactaagtagaccgcctggggagtacggccgcaaggttaaaactcaaatgaattgacgggggcccgcacaagcggtggagcatgtggtttaattcgatgcaacgcgaagaaccttaccaggtcttgacatcctgagaactttctagagatagattggtgccttcgggaactcagagacaggtgctgcatggctgtcgtcagctcgtgtcgtgagatgttgggttaagtcccgtaacgagcgcaacccttgtccttagttgccagcgcgtaatggcgggaactctaaggagactgccggtgacaaaccggaggaaggtggggacgacgtcaagtcatcatggcccttacgacctgggctacacacgtgctacaatggaacgtacagagggcagcaaagcggcgacgtggagcgaatcccacaaaacgtttcgtagtccggatcggagtctgcaactcgactccgtgaagtcggaatcgctagtaatcgtgaatcagaatgtcacggtgaatacgttcccgggccttgtacacaccgcccgtcacaccatgggagtgggttgctccagaagtggttagtctaaccttcggggggacgatcaccacggagtgattcatgactggggtg

SEQ ID NO: 1543 - DNA, 1456 bp, Halioglobus japonicus
attgaacgctggcggcaggcctaacacatgcaagtcgagcgagaaagcacttcggtgtgagtacagcggcggacgggtgagtaacgcgtaggaatctacccagtagtgggggacaacagtcggaaacggctgctaataccgcatacgccctacgggggaaagcgggggaccttcgggcctcgtgctattggatgagcctgcgtaagattagctagttggtgaggtaaaggctcaccaaggcgacgatctttagctggtctgagaggatgatcagccacactggaactgagacacggtccagactcctacgggaggcagcagtggggaatattgcacaatgggggaaaccctgatgcagccatgccgcgtgtgtgaagaaggccttagggttgtaaagcactttcaattgggaggaaaagcttgtcgttaatagcggcaagccctgacgttacctttagaagaagcaccggctaactccgtgccagcagccgcggtaatacggagggtgcgagcgttaatcggaattactgggcgtaaagcgcgcgtaggcggttgcctcagtcggatgtgaaagccccgggcttaacctgggaactgcatccgatactgggcgactagagtacgagagaggggggtagaattccacgtgtagcggtgaaatgcgtagatatgtggaggaataccagtggcgaaggcggccccctggcttgatactgacgctgaggtgcgaaagcgtggggagcaaacaggattagataccctggtagtccacgccgtaaacgatgtctactagccgttgggaaacttgatttcttagtggcgcagctaacgcactaagtagaccgcctggcgagtacggccgcaaggttaaaactcaaatgaattgacgggggcccgcacaagcggtggagcatgtggtttaattcgatgcaacgcgaagaaccttaccaggacttgacatccagagaactttctagagatagattggtgccttcgggaactctgagacaggtgctgcatggctgtcgtcagctcgtgtcgtgagatgttgggttaagtcccgtaacgagcgcaacccttgtccttagttgccagcacataatggtgggaactctagggagactgccggtgacaaaccggaggaaggtggggacgacgtcaagtcatcatggcccttacgtcctgggctacacacgtgctacaatggaacgcacagagggctgcaacctcgcgagagtgagcgaatcccacaaaacgtttcgtagtccggattggagtctgcaactcgactccatgaagtcggaatcgctagtaatcgtgaatcagaatgtcacggtgaatacgttcccgggccttgtacacaccgcccgtcacaccatgggagtgggttgctccagaagtggttagcctaaccttcgggagggcgatcaccacggagtgattcatgactggggtg

SEQ ID NO: 1544 - DNA, 1458 bp, Halioglobus lutimaris
attgaacgctggcggcaggcctaacacatgcaagtcgagcgcgaaagcacttcggtgtgagtagagcggcggacgggtgagtaacgcgtaggaatctacccagtagtgggggacaacatggtgaaaaccatgctaataccgcatacgccctacgggggaaagcgggggaccttcgggcctcgcgctactggatgagcctgcgttggattagcttgttggtgaggtaaaggctcaccaaggcgacgatccatagctggtctgagaggatgatcagccacactgggactgagacacggcccagactcctacgggaggcagcagtggggaatattgcgcaatgggcgaaagcctgacgcagccatgccgcgtgtgtgaagaaggccttagggttgtaaagcactttcaattgggaagaaaagtttaacgttaatagcgttaagccctgacattacctttaaaagaagcaccggctaactccgtgccagcagccgcggtaatacggagggtgcaagcgttaatcggaattactgggcgtaaagcgcgcgtacgcggttatttaagtcggatgtgaaagccctgggctcaacctgggaactgcactcgatactgggtaactagagtacgagagagggaggtagaattccacgtgtagcggtgaaatgcgtagatatgtggaggaataccggtggcgaaggcggcctcctggctcgatactgacgctgaggtgcgaaagcgtggggagcaaacaggattagataccctggtagtccacgccgtaaacggtgtctactagccgttgggagacttgatttcttagtggcgcagctaacgcactaagtagaccgcctggggagtacggccgcaaggttaaaactcaaatgaattgacgggggcccgcacaagcggtggagcatgtggtttaattcgatgcaacgcgaagaaccttaccaggtcttgacatccagagaactttccagagatggattggtgccttcgggagctctgtgacaggtgctgcatggctgtcgtcagctcgtgtcgtgagatgttgggttaagtcccgtaacgagcgcaacccttgtccctagttgctagcaggtaatgctgagaactctagggagactgccggtgacaaaccggaggaaggtggggacgacgtcaagtcatcatggcccttacgacctgggctacacacgtgctacaatggaacgcacagagggcagcaaacccgcgagggggagcgaatcccacaaaacgtttcgtagtccggattggagtctgcaactcgactccatgaagtcggaatcgctagtaatcgtgaatcagaatgtcacggtgaatacgttcccgggccttgtacacaccgcccgtcacaccatgggagtgggttgctccagaagtggttagcctaaccttcgggagggcgatcaccacggagtgattcatgactggggtgaa

SEQ ID NO: 1545 - DNA, 1464 bp, Halobacillus aidingensis
ggcgtgcctaatacatgcaagtcgagcgcgggaagcgagtggatcccttcggggtgaagctcgtggaacgagcggcggacgggtgagtaacacgtgggcaacctgcctgtaagatcggaataaccccggcaaaccggggctaatgccgggtaatactttctttcgcatgaaggaaagttgaaagatggcttcttgctatcacttacagatgggcccgcggcgcattagctagttggtgaggtaacggctcaccaaggcgacgatgcgtagccgacctgagagggtgatcggccacactgggactgagacacggcccagactcctacgggaggcagcagtagggaatcttccgcaatggacgaaagtctgacggagcaacgccccgtgaacgatgaaggtcttcggatcgtaaagttctgttgttagggaagaacaagtaccgtgcgaatagcggtaccttgacggtacctaacgaggaagccccggctaactacgtgccagcagccgcggtaatacgtagggcaagcgttgtccggaattattgggcgtaaagcgcgcgcaggcggttccttaagtctgatgtgaaagcccacggctcaaccgtggagggtcattggaaactggggaacttgaggacagaagaggagagtggaattccacgtgtagcggtgtaatgcgtagatatgtggaggaacaccagtggcgaaggcgactctctggtctgtttctgacgctgaggtgcgaaagcgtgggtagcaaacaggattagataccctggtagtccacgccgtaaacgatgagtgctaggtgttagggggcttccacccctttgctgaagttaacgcattaagcactccgcctggggagtacggccgcaaggctgaaactcaaaggaattgacgggggcccgcacaagcggtggagcatgtggtttaattcgaagcaacgcgaagaaccttaccaggtcttgacatccttggacatccctagagatagggctttcccttcggggaccaagtgacaggtggtgcatatgtcgtcagctcgtgtcgtgagatgttgcgttaagtcccgcaacgagcgcaacccctaatcttagttgccagcattcagttgggcactctaaggtgactgccggtgacaaaccggagaaggccgggatgacgtcaaatcatcatgccccttatgacctgggctacacacgtgctacaatggatggtacaaaggccagcgaagccgcgaggtgtagcaaatcccataaaaccattctcagttcggattgcaggctgcaactcgcctgcatgaagccggaatcgctagtaatcgcggatcagcatgccgcggtgaatacgttcccgggccttgtacacaccgcccgtcacaccacgagagttggcaacacccgaagtcggtgaggtaacctttttggagcctgccgccgaagtggggccaatgattggggtg

SEQ ID NO: 1546 - DNA, 1476 bp, Halobacillus alkaliphilus
ggcgtgcctaatacatgcaagtcgagcgcgggaagcaagcggatccccttcgggggtgaagcttgtggaacgagcggcggacgggtgagtaacacgtgggcaacctgcctgtaagaccggaataaccccgggaaaccggggctaatgccgggtaacacctaccttcacctgaaggaaggttaaaagatggcttctcgctatcacttacagatgggcccgcggcgcattagctagttggtgaggtaacggctcaccaaggcgacgatgcgtagccgacctgagagggtgatcggccacactgggactgagacacggcccagactcctacgggaggcagcagtagggaatcttccgcaatggacgaaagtctgacggagcaacgccgcgtgaacgatgaaggtcttcggatcgtaaagttctgttgttagggaagaacaagtaccgtgcgaatagagcggtaccttgacggtacctaacgaggaagccccggctaactacgtgccagcagccgcggtaatacgtagggggcaagcgttgtccggaattattgggcgtaaagcgcgcgcaggcggtttcttaagtctgatgtgaaagcccacggctcaaccgtggagggtcattggaaactggggaacttgaggacagaagaggagagtggaattccacgtgtagcggtgaaatgcgtagatatgtggaggaacaccagtggcgaaggcgactctctggtctgtttctgacgctgaggtgcgaaagcgtgggtagcaaacaggattagataccctggtagtccacgccgtaaacgatgagtgctaggtgttagggggcttccaccccttagtgctgaagttaacgcattaagcactccgcctggggagtacggccgcaaggctgaaactcaaaggaattgacgggggcccgcacaagcggtggagcatgtggtttaattcgaagcaacgcgaagaaccttaccaggtcttgacatccttggaccaccctagagatagggttttcccttcggggaccaagtgacaggtggtgcatggttgtcgtcagctcgtgtcgtgagatgttgggttaagtcccgcaacgagcgcaacccctaatcttagttgccagcatttagttgggcactctaaggtgactgccggtgacaaaccggaggaaggcggggatgacgtcaaatcatcatgccccttatgacctgggctacacacgtgctacaatggatggtacaaagggcagcgaagccgcgaggtgtagcaaatcccataaaaccattctcagttcggattgcaggctgcaactcgcctgcatgaagccggaatcgctagtaatcgcggatcagcatgccgcggtgaatacgttcccgggccttgtacacaccgcccgtcacaccacgagagttggcaacacccgaagtcggtgaggtaacctttatggagccagccgccgaaggtggggccaatgattggggtg

SEQ ID NO: 1547 - DNA, 1487 bp, Halobacillus faecis
  misc_feature (129)..(129): n is a, c, g, or t
  misc_feature (1132)..(1132): n is a, c, g, or t
gacgaacgctggcggcgtgcctaatacatgcaagtcgagcgcgggaagcgagtggatcccttcggggtgaagctcgtggaacgagcggcggacgggtgagtaacacgtgggcaacctgcctgtaagatnggaataaccccgggaaaccggggctaatgccgggtaatactttctttcgcatgaaggaaagttgaaagatggcttctcgctatcacttacagatgggcccgcggcgcattagctagttggtgaggtaacggctcaccaaggcgacgatgcgtagccgacctgagagggtgatcggccacactgggactgagacacggcccagactcctacgggaggcagcagtagggaatcttccgcaatggacgaaagtctgacggagcaacgccgcgtgaacgatgaaggtcttcggatcgtaaagttctgttgttagggaagaacaagtaccgttcgaacagggcggtaccttgacggtacctaacgaggaagccccggctaactacgtgccagcagccgcggtaatacgtagggggcaagcgttgtccggaattattgggcgtaaagcgcgcgcaggcggttccttaagtctgatgtgaaagcccacggctcaaccgtggagggtcattggaaactggggaacttgaggacagaagaggagagtggaattccacgtgtagcggtgaaatgcgtagatatgtggaggaacaccagtggcgaaggcgactctctggtctgtttctgacgctgaggtgcgaaagcgtgggtagcaaacaggattagataccctggtagtccacgccgtaaacgatgagtgctaggtgttagggggcttccaccccttagtgctgaagttaacgcattaagcactccgcctggggagtacggccgcaaggctgaaactcaaaggaattgacgggggcccgcacaagcggtggagcatgtggtttaattcgaagcaacgcgaagaaccttaccaggtcttgacatccttggacaaccctagagatagggctttcccttcggggaccaagtgacaggtggtgcatggttgtcgtcagctcgtgtcgtgagatgttgggttaagtcccgcaacgagcgcaacccctaatcttagttgccagcattnagttgggcactctaaggtgactgccggtgacaaaccggaggaaggcggggatgacgtcaaatcatcatgccccttatgacctgggctacacacgtgctacaatggatggtacaaagggcagcgaagccgcgaggtgtagcaaatcccataaaaccattctcagttcggattgcaggctgcaactcgcctgcatgaagccggaatcgctagtaatcgcggatcagcatgccgcggtgaatacgttcccgggccttgtacacaccgcccgtcacaccacgagagttggcaacacccgaagtcggtgaggtaacctttttggagccagccgccgaaggtggggccaatgattggggtg

SEQ ID NO: 1548 - DNA, 1489 bp, Halobacillus halophilus
gacgaacgctggcggcgtgcctaatacatgcaagtcgagcgcgggaagcaatcggatccccttcgggggtgaagcttgtggaacgagcggcggacgggtgagtaacacgtgggcaacctgcctgtaagaccggaataaccccgggaaaccggggctaatgccggataacacctaccttcacctgaaggaaggttaaaagatggcttctcgctatcacttacagatgggcccgcggcgcattagctagttggtgaggtaatagctcaccaaggcgacgatgcgtagccgacctgagagggtgatcggccacactgggactgagacacggcccagactcctacgggaggcagcagtagggaatcttccgcaatggacgaaagtctgacggagcaacgccgcgtgaacgatgaaggtcttcggatcgtaaagttctgttgttagggaagaacaagtaccgtacgaatagagcggtaccttgacggtacctaacgaggaagccccggctaactacgtgccagcagccgcggtaatacgtagggggcaagcgttgtccggaattattgggcgtaaagcgcgcgcaggcggtttcttaagtctgatgtgaaagcccacggctcaaccgtggagggtcattggaaactggggaacttgaggacagaagaggagagtggaattccacgtgtagcggtgaaatgcgtagatatgtggaggaacaccagtggcgaaggcgactctctggtctgtttctgacgctgaggtgcgaaagcgtgggtagcaaacaggattagataccctggtagtccacgccgtaaacgatgagtgctaggtgttagggggcttccaccccttagtgctgaagttaacgcattaagcactccgcctggggagtacggccgcaaggctgaaactcaaaggaattgacgggggcccgcacaagcggtggagcatgtggtttaattcgaagcaacgcgaagaaccttaccaggtcttgacatccttggaccaccctagagatagggtcttcccttcggggaccaagtgacaggtggtgcatggttgtcgtcagctcgtgtcgtgagatgttgggttaagtcccgcaacgagcgcaacccctaatcttagttgccagcattcagttgggcactctaaggtgactgccggtgacaaaccggaggaaggcggggatgacgtcaaatcatcatgccccttatgacctgggctacacacgtgctacaatggatggtacaaagggcagcgaagccgcgaggtgtagcaaatcccataaaaccattctcagttcggattgcaggctgcaactcgcctgcatgaagccggaatcgctagtaatcgcggatcagcatgccgcggtgaatacgttcccgggccttgtacacaccgcccgtcacaccacgagagttggcaacacccgaagtcggtgaggtaacctttatggagccagccgccgaaggtggggccaatgattggggtg

SEQ ID NO: 1549 - DNA, 1486 bp, Halobacillus litoralis
gacgaacgctggcggcgtgcctaatacatgcaagtcgagcgcgggaagcgagtggctcccttcggggtgaagctcgtggaacgagcggcggacgggtgagtaacacgtgggcaacctgcctgtaagaccggaataaccccgggaaaccggggctaatgccgggtaatacttttcttcgcatgaaggaaagttgaaagatggcttcttgctatcacttacagatgggcccgcggcgcattagctagttggtgaggtaacggctcaccaaggcgacgatgcgtagccgacctgagagggtgatcggccacactgggactgagacacggcccagactcctacgggaggcagcagtagggaatcttccgcaatggacgaaagtctgacggagcaacgccgcgtgaacgatgaaggtcttcggatcgtaaagttctgttgttagggaagaacaagtaccgtgcgaatagagcggtaccttgacggtacctaacgaggaagccccggctaactacgtgccagcagccgcggtaatacgtagggggcaagcgttgtccggaattattgggcgtaaagcgcgcgcaggcggttccttaagtctgatgtgaaagcccacggctcaaccgtggagggtcattggaaactggggaacttgaggacagaagaggagagtggaattccacgtgtagcggtgaaatgcgtagatatgtggaggaacaccagtggcgaaggcgactctctggtctgtttctgacgctgaggtgcgaaagcgtgggtagcaaacaggattagataccctggtagtccacgccgtaaacgatgagtgctaggtgttagggggcttccaccccttagtgctgaagttaacgcattaagcactccgcctggggagtacggccgcaaggctgaaactcaaaggaattgacgggggcccgcacaagcggtggagcatgtggtttaattcgaagcaacgcgaagaaccttaccaggtcttgacatccttggaccaccctagagatagggttttccttcggggaccaagtgacaggtggtgcatggttgtcgtcagctcgtgtcgtgagatgttgggttaagtcccgcaacgagcgcaacccctaatcttagttgccagcattcagttgggcactctaaggtgactgccggtgacaaaccggaggaaggcggggatgacgtcaaatcatcatgccccttatgacctgggctacacacgtgctacaatggatggaacaaagggcagcgaagccgcgaggtgtagcaaatcccataaaaccattctcagttcggattgcaggctgcaactcgcctgcatgaagccggaatcgctagtaatcgcggatcagcatgccgcggtgaatacgttcccgggccttgtacacaccgcccgtcacaccacgagagttggcaacacccgaagtcggtgaggtaacctttttggagccagccgccgaaggtggggccaatgattggggtg

SEQ ID NO: 1550 - DNA, 1457 bp, Halobacillus mangrovi
  misc_feature (333)..(333): n is a, c, g, or t
gacgaacgctggcggcgtgcctaatacatgcaagtcgagcgcgggaagcgagcggatccccttcgggggtgaagctcgtggaacgagcggcggacgggtgagtaacacgtgggcaacctgcctgtaagaccggaataaccccgggaaaccggggctaatgccgggtaatactcttctccgcatggaggagagttgaaagatggcttctagctatcacttacagatgggcccgcggcgcattagctagttggtgaggtaacggctcaccaaggcgacgatgcgtagccgacctgagagggtgatcggccacactgggactgagacacggcccanactcctacgggaggcagcagtagggaatcttccgcaatggacgaaagtctgacggagcaacgccgcgtgaacgatgaaggtcttcggatcgtaaagttctgttgttagggaagaacaagtaccgtgcgaatagagcggtaccttgacggtacctaacgaggaagccccggctaactacgtgccagcagccgcggtaatacgtagggggcaagcgttgtccggaattattgggcgtaaagcgcgcgcaggcggtttcttaagtctgatgtgaaagcccacggctcaaccgtggagggtcattggaaactggggaacttgaggacagaagaggagagtggaattccacgtgtagcggtgaaatgcgtagatatgtggaggaacaccagtggcgaaggcgactctctggtctgtctctgacgctgaggtgcgaaagcgtgggtagcaaacaggattagataccctggtagtccacgccgtaaacgatgagtgctaggtgttagggggcttccaccccttagtgctgaagttaacgcattaagcactccgcctggggagtacggccgcaaggctgaaactcaaaggaattgacgggggcccgcacaagcggtggagcatgtggtttaattcgaagcaacgcgaagaaccttaccaggtcttgacatccttggacctccctagagatagggatttcccttcggggaccaagtgacaggtggtgcatggttgtcgtcagctcgtgtcgtgagatgttgggttaagtcccgcaacgagcgcaacccctaatcttagttgccagcattcagttgggcactctaaggtgactgccggtgacaaaccggaggaaggcggggatgacgtcaaatcatcatgccccttatacctgggctacacacgtgctacaatggatggtacaaagggcagcgaagccgcaaggtgtagcaaatcccataaaaccattctcagttcggattgcaggctgcaactcgcctgcatgaagccggaatcgctagtaatcgcggatcagcatgccgcggtgaatacgttcccgggccttgtacacaccgcccgtcacaccacgagagttggcaacacccgaagtcggtgaggtaaccattggagccagc

SEQ ID NO: 1551 - DNA, 1479 bp, Halobacteriovorax marinus
aacgaacgctgtcggcatgcctaacacatgcaagtcgtacgagaaagcaccttcgggtgtgagtagagtggcgcacgggtgagtaacgcgtaggtgatctaccatttggcgggggataaccaggagaaattctggctaataccgcatacgtactgcaattttgaaagtagcagtagaaagaatgcctctccttggaagcatttaccaaatgatgagcctgcgtagcattagtttgatggtggggtaatggcctaccatgactacgatgcttagctggtctgagaggatgatcagtcacactggaactgagacacggtccagactcctacgggaggcagcagtggggaatattgcgcaatgggggaaaccctgacgcagcaatgccgagtgagtgaggaaggccttcgggttgtaaagctctgtcagaagggaataatggtgtagggtccaataggccttacatttgaaggtaccttcaaaggaagcaccggctaacttcgtgccagcagccgcggtaatacgaagggtgcaagcgttgttcggatttattgggcgtaaagcgcgcgcaggcggattgttaagtcagatgtgaaatctcggggctcaacctcgaaactgcgtctgaaactgataatctagaatctcggagggggaaggggaatttcgcatgtaggggtaaaatccgtagagatgcgaaggaacaccagaggcgaaggcgccttcctggacgagtattgacgctgaggcgcgaaagcgtgggtagcaaacaggattagataccctggtagtccacgccgtaaacgatgtgcactagatattggaggtttgaccccttcagtgtcgtagctaacgcattaagtgcaccgcctggggagtacggtcgcaagactaaaactcaaaggaattgacgggggcccgcacaagcggtggattatgtggtttaattcgaagcaacgcgcagaaccttacctaggcttgaaatcctgagaatctaatggaaacattggagtgctcttcggagaattcagtgacaggcgctgcatggctgtcgtcagctcgtgtcgtgagatgttgggttaagtctcgcaacgagcgcaacccctatccttagttgccagcattaagttgggcactctagggagactgcccgggctaaccgggaggaaggtggggatgacgtcaagtcctcatggcccttatgtctagggctacacacgtaatacaatggtacatacaaagggaagcgacctggcaacagtgagcaaatctcaaaaagtgtatctcagtccggattggagtctgcaactcgactccatgaagttggaatcgctagtaatcggagatcagcacgctccggtgaatacgttcccgggccttgtacacaccgcccgtcacaccacgggagttggtcttacctgaagtcgtggccctaactgcttgcagaggggagcgcctacggtcggaccgatgactggggtg

SEQ ID NO: 1552 - DNA, 1464 bp, Halodesulfovibrio marinisediminis
attgaacgctggcggcgtgcctaacacatgcaagtcgaacgcgaaagtttcttcggaaacgagtagagtggcgcacgggtgagtaacgcgtggattatctacctactggtacgggacaacagttggaaacgactgctaataccgtatacgctggtaacgggaaagggggcctcttcttgaaagctctcgccagtagatgagtccgcgtttcattagctagacggtggggtaacggcctaccgtggcaacgatgaatagcaggcctgagagggtggcctgccacactgggactggaacacggcccagactcctacgggaggcagcagtggggaatattgcgcaatggacgaaagtctgacgcagcgacgccgcgtggaggatgaaggttttcggatcgtaaactcctgtcaagagggaagaaacctattaagattaatactcttagtaattgacggtacctctagaggaagcaccggctaattcagtgccagcagccgcggtaatactgaaggtgcaagcgttaatcggaatcactgggcgtaaagcgctcgtaggtggctttgtaagtcaggtgtgaaagcccacggctcaaccgtggaattgcacttgatactgcatcgctagagtataggagagggaagtggaatttctggtgtaggagtgaaatccgtagagatcagaaggaacacccgtggcgaaggcgacttcctggactattactgacactgaggagcgaaagcgtggggagcaaacaggattagataccctggtagtccacgccgtaaacgatgggtactaggtgttgggggcttgaccctcggtgccgtagttaacgcgttaagtaccccgcctggggagtacggtcgcaaggctgaaactcaaagaaattgacgggggcccgcacaagcggtggagtatgtggtttaattcgatgcaacgcgaagaaccttacccaggcttgacatcctgcgaatgcccaagaaattaggcagtgcccttcggggaatgcagtgacaggtgctgcatggctgtcgtcagctcgtgccgtgaggtgttgggttaagtcccgcaacgagcgcaacccctatccttagttgccaccaggtaatgctgagcactctagggagactgcccgggttaaccgggaggaaggtggggacgacgtcaagtcatcatggcccttacgcctggggctacacacgtactacaatggtgcatacaaagggttgcgataccgtgaggtggagctaatcccagaaagtgcatcccagtccggataggagtctgcaactcgactccttgaagtcggaatcgctagtaatcccggatcagcatgccggggtgaatgcgttcccgggccttgtacacaccgcccgtcacaccacgaaagttggttctacccgaaaccagtgagctaaccagcaatggaggcagctgtctacggtggggctgatgattggggtg

SEQ ID NO: 1553 - DNA, 1460 bp, Halomonas aestuarii
attgaacgctggcggcaggcctaacacatgcaagtcgagcggaaacgatcctagcttgctaggaggcgtcgagcggcggacgggtgagtaatgcataggaatctgcccgatagtgggggataacctggggaaactcaggctaataccgcatacgtcctacgggagaaagcaggggatcttcggaccttgcgctatcggatgagcctatgtcggattagcttgttggtgaggtaatggctcaccaaggcgacgatccgtagctggtctgagaggatgatcagccacatcgggactgagacacggcccgaactcctacgggaggcagcagtggggaatattggacaatgggcgaaagcctgatccagccatgccgcgtgtgtgaagaaggctttcgggttgtaaagcactttcagtgaggaagaaagccttggggctaatacccccaagggacgacatcactcacagaagaagcaccggctaactccgtgccagcagccgcggtaatacggagggtgcgagcgttaatcggaattactgggcgtaaagcgcgcgtaggcggcttgataagccggttgtgaaagccccgggctcaacctgggaacggcatccggaactgtcaggctagagtgcaggagaggaaggtagaattcccggtgtagcggtgaaatgcgtagagatcgggaggaataccagtggcgaaggcggccttctggactgacactgacgctgaggtgcgaaagcgtgggtagcaaacaggattagataccctggtagtccacgccgtaaacgatgtcgactagccgttggggtcctagagacctttgtggcgcagttaacgcgataagtcgaccgcctggggagtacggccgcaaggttaaaactcaaatgaattgacgggggcccgcacaagcggtggagcatgtggtttaattcgatgcaacgcgaagaaccttacctacccttgacatcgtgcgaactttccagagatggattggtgccttcgggagcgcacagacaggtgctgcatggctgtcgtcagctcgtgttgtgaaatgttgggttaagtcccgtaacgagcgcaacccttgtccctatttgccagcgattcggtcgggaactctagggagactgccggtgacaaaccggaggaaggtggggacgacgtcaagtcatcatggcccttacgggtagggctacacacgtgctacaatggccggtacaatgggttgcaaagccgcgaggtggagctaatcccacaaagccggtctcagtccggatcggagtctgcaactcgactccgtgaagtcggaatcgctagtaatcgtgaatcagaatgtcacggtgaatacgttcccgggccttgtacacaccgcccgtcacaccatgggagtggactgcaccagaagtggttagcctaacttcggagggcgatcaccacggtgtggttcatgactggggtg

SEQ ID NO: 1554 - DNA, 1455 bp, Halomonas alkaliantarctica
attgaacgctggcggcaggcctaacacatgcaagtcgagcggtaacagatctagcttgctagatgctgacgagcggcggacgggtgagtaatgcataggaatctgcccggtagtgggggataacctggggaaacccaggctaataccgcatacgtcctacgggagaaagggggctccggctcccgctattggatgagcctatgtcggattagctagttggtgaggtaatggctcaccaaggcaacgatccgtagctggtctgagaggatgatcagccacatcgggactgagacacggcccgaactcctacgggaggcagcagtggggaatattggacaatgggggcaaccctgatccagccatgccgcgtgtgtgaagaaggccctcgggttgtaaagcactttcagcgaggaagaacgcctagtggttaatacccattaggaaagacatcactcgcagaagaagcaccggctaactccgtgccagcagccgcggtaatacggagggtgcaagcgttaatcggaattactgggcgtaaagcgcgcgtaggtggcttgataagccggttgtgaaagccccgggctcaacctgggaacggcatccggaactgtcaggctagagtgcaggagaggaaggtagaattcccggtgtagcggtgaaatgcgtagagatcgggaggaataccagtggcgaaggcggccttctggactgacactgacactgaggtgcgaaagcgtgggtagcaaacaggattagataccctggtagtccacgccgtaaacgatgtcgaccagccgttgggtgcctagagcactttgtggcgaagttaacgcgataagtcgaccgcctggggagtacggccgcaaggttaaaactcaaatgaattgacgggggcccgcacaagcggtggagcatgtggtttaattcgatgcaacgcgaagaaccttacctacccttgacatctacagaagccggaagagattctggtgtgccttcgggaactgtaagacaggtgctgcatggctgtcgtcagctcgtgttgtgaaatgttgggttaagtcccgtaacgagcgcaacccttgtccttatttgccagcgagtaatgtcgggaactctaaggagactgccggtgacaaaccggaggaaggtggggacgacgtcaagtcatcatggcccttacgggtagggctacacacgtgctacaatggccggtacaaagggctgcgagctcgcgagagtcagcgaatcccttaaagccggtctcagtccggatcggagtctgcaactcgactccgtgaagtcggaatcgctagtaatcgtgaatcagaatgtcacggtgaatacgttcccgggccttgtacacaccgcccgtcacaccatgggagtggactgcaccagaagtggttagcctaacgcaagagggcgatcaccacggtgtggttcatgactggggtg

SEQ ID NO: 1555 - DNA, 1457 bp, Halomonas alkaliphila
attgaacgctggcggcaggcctaacacatgcaagtcgagcggtaacaggggtagcttgctacccgctgacgagcggcggacgggtgagtaatgcataggaatctgcccgatagtgggggataacctggggaaacccaggctaataccgcatacgtcctacgggagaaagggggctccggctcccgctattggatgagcctatgtcggattagctagttggtgaggtaatggctcaccaaggcaacgatccgtagctggtctgagaggatgatcagccacatcgggactgagacacggcccgaactcctacgggaggcagcagtggggaatattggacaatgggcgaaagcctgatccagccatgccgcgtgtgtgaagaaggccctcgggttgtaaagcactttcagcgaggaagaacgcctagtggttaatacccattaggaaagacatcactcgcagaagaagcaccggctaactccgtgccagcagccgcggtaatacggagggtgcaagcgttaatcggaattactgggcgtaaagcgcgcgtaggtggcttgataagccggttgtgaaagccccgggctcaacctgggaacggcatccggaactgtcaagctagagtgcaggagaggaaggtagaattcccggtgtagcggtgaaatgcgtagagatcgggaggaataccagtggcgaaggcggccttctggactgacactgacactgaggtgcgaaagcgtgggtagcaaacaggattagataccctggtagtccacgccgtaaacgatgtcgaccagccgttgggtgcctagcgcactttgtggcgaagttaacgcgataagtcgaccgcctggggagtacggccgcaaggttaaaactcaaatgaattgacgggggcccgcacaagcggtggagcatgtggtttaattcgatgcaacgcgaagaaccttacctactcttgacatcctgcgaacttgtgagagatcacttggtgccttcgggaacgcagagacaggtgctgcatggctgtcgtcagctcgtgttgtgaaatgttgggttaagtcccgtaacgagcgcaacccttgtccttatttgccagcgggtaatgccgggaactctaaggagactgccggtgacaaaccggaggaaggtggggacgacgtcaagtcatcatggcccttacgagtagggctacacacgtgctacaatggccggtacaaagggttgcgagctcgcgagagtcagctaatcccgaaaagccggtctcagtccggatcggagtctgcaactcgactccgtgaagtcggaatcgctagtaatcgtgaatcagaatgtcacggtgaatacgttcccgggccttgtacacaccgcccgtcacaccatgggagtggactgcaccagaagtggttagcttaaccttcgggaaagcgatcaccacggtgtggttcatgactggggtg

SEQ ID NO: 1556 - DNA, 1408 bp, Halomonas andesensis
cgctggcggcaggcctaacacatgcaagtcgagcggtgacagatctagcttgctagatgctgacgagcggcggacgggtgagtaatgcataggaatctgcccggtagtgggggataacctggggaaacccaggctaataccgcatacgtcctacgggagaaagggggcttcggctcccgctattggatgagcctatgtcggattagctagttggtgaggtaatggctcaccaaggcgacgatccgtagctggtctgagaggatgatcagccacatcgggactgagacacggcccgaactcctacgggaggcagcagtggggaatattggacaatgggcgaaagcctgatccagccatgccgcgtgtgtgaagaaggccctcgggttgtaaagcactttcagcgaggaagaacgcctagtggttaatacccactaggaaagacatcactcgcagaagaagcaccggctaactccgtgccagcagccgcggtaatacggagggtgcaagcgttaatcggaattactgggcgtaaagcgcgcgtaggtggcttgataagccggttgtgaaagccccgggctcaacctgggaacggcatccggaactgtcaagctagagtgcaggagaggaaggtagaattcccggtgtagcggtgaaatgcgtagagatcgggaggaataccagtggcgaaggcggccttctggactgacactgacactgaggtgcgaaagcgtgggtagcaaacaggattagataccctggtagtccacgccgtaaacgatgtcgaccagccgttgggtgcctagcgcactttgtggcgaagttaacgcgataagtcgaccgcctggggagtacggccgcaaggttaaaactcaaatgaattgacgggggcccgcacaagcggtggagcatgtggtttaattcgatgcaacgcgaagaaccttacctactcttgacatcctgcgaatttggtagagataccttagtgccttcgggaacgcagagacaggtgctgcatggctgtcgtcagctcgtgttgtgaaatgttgggttaagtcccgtaacgagcgcaacccttgtccttatttgccagcgggtaatgccgggaactctaaggagactgccggtgacaaaccggaggaaggtggggacgacgtcaagtcatcatggcccttacgagtagggctacacacgtgctacaatggccggtacaaagggttgcgagctcgcgagagtcagctaatcccgaaaagccggtctcagtccggatcggagtctgcaactcgactccgtgaagtcggaatcgctagtaatcgtgaatcagaatgtcacggtgaatacgttcccgggccttgtacacaccgcccgtcacaccatgggagtggactgcaccagaagtggttagcttaac

SEQ ID NO: 1557 - DNA, 1462 bp, Halomonas anticariensis
attgaacgctggcggcaggcctaacacatgcaagtcgagcggcagcacggggagcttgctccctggtggcgagcggcggacgggtgagtaatgcataggaatctgcccgatagtgggggataacctggggaaacccaggctaataccgcatacgtcctacgggagaaagcaggggaccttcgggccttgcgctatcggatgagcctatgtcggattagctagttggtggggtaatggcccaccaaggcgacgatccgtagctggtctgagaggatgatcagccacactgggactgagacacggcccagactcctacgggaggcagcagtggggaatattggacaatgggggcaaccctgatccagccatgccgcgtgtgtgaagaaggccctcgggttgtaaagcactttcagtgaggaagaaggccttgcggttaataaccgcgaggaaggacatcactcacagaagaagcaccggctaactccgtgccagcagccgcggtaatacggagggtgcgagcgttaatcggaattactgggcgtaaagcgcgcgtaggcggctcgataagccggttgtgaaagccccgggctcaacctgggaatggcatccggaactgttgggctagagtgcaggagaggaaggtagaattcccggtgtagcggtgaaatgcgtagagatcgggaggaataccagtggcgaaggcggccttctggtctgacactgacgctgaggtgcgaaagcgtgggtagcaaacaggattagataccctggtagtccacgccgtaaacgatgtcgactagccgttgggttcttcgagaacttagtggcgcagttaacgcgataagtcgaccgcctggggagtacggccgcaaggttaaaactcaaatgaattgacgggggcccgcacaagcggtggagcatgtggtttaattcgatgcaacgcgaagaaccttacctacccttgacatcgagagaactttccagagatggatgggtgccttcgggagctctcagacaggtgctgcatggctgtcgtcagctcgtgttgtgaaatgttgggttaagtcccgtaacgagcgcaacccctgtccctatttgccagcgattcggtcgggaactctagggagactgccggtgacaaaccggaggaaggtggggacgacgtcaagtcatcatggcccttacgggtagggctacacacgtgctacaatggcaggtacaaagggttgcgagacggcgacgtggagccaatcccagaaagcctgcctcagtccggatcggagtctgcaactcgactccgtgaagtcggaatcgctagtaatcgtgaatcagaatgtcacggtgaatacgttcccgggccttgtacacaccgcccgtcacaccatgggagtggactgcaccagaagtggttagcttaaccttcgggggagcgatcaccacggtgtggttcatgactggggtg

SEQ ID NO: 1558 - DNA, 1455 bp, Halomonas aquamarina
attgaacgctggcggcaggcctaacacatgcaagtcgagcggtaacagatccagcttgctggatgctgacgagcggcggacgggtgagtaatgcataggaatctgcccgatagtgggggataacctggggaaacccaggctaataccgcatacgtcctacgggagaaagggggctccggctcccgctatcggatgagcctatgtcggattagctagttggtgaggtaacggctcaccaaggccacgatccgtagctggtctgagaggatgatcagccacatcgggactgagacacggcccgaactcctacgggaggcagcagtggggaatattggacaatgggggaaaccctgatccagccatgccgcgtgtgtgaagaaggccctcgggttgtaaagcactttcagcgaggaagaacgcctagcggttaatacccgctaggaaagacatcactcgcagaagaagcaccggctaactccgtgccagcagccgcggtaatacggagggtgcaagcgttaatcggaattactgggcgtaaagcgcgcgtaggtggcttgataagccggttgtgaaagccccgggctcaacctgggaacggcatccggaactgtcaagctagagtgcaggagaggaaggtagaattcccggtgtagcggtgaaatgcgtagagatcgggaggaataccagtggcgaaggcggccttctggactgacactgacactgaggtgcgaaagcgtgggtagcaaacaggattagataccctggtagtccacgccgtaaacgatgtcgaccagccgttgggtgcctagcgcactttgtggcgaagttaacgcgataagtcgaccgcctggggagtacggccgcaaggttaaaactcaaatgaattgacgggggcccgcacaagcggtggagcatgtggtttaattcgatgcaacgcgaagaaccttacctactcttgacatcctgcgaatttggtagagataccttagtgccttcgggaacgcagagacaggtgctgcatggctgtcgtcagctcgtgttgtgaaatgttgggttaagtcccgtaacgagcgcaacccttgtccttatttgccagcgcgtaatggcgggaactctaaggagactgccggtgacaaaccggaggaaggtggggacgacgtcaagtcatcatggcccttacgagtagggctacacacgtgctacaatggtcggtacaaagggttgccaactcgcgagagtgagccaatcccgaaaagccgatctcagtccggatcggagtctgcaactcgactccgtgaagtcggaatcgctagtaatcgtggatcagaatgccacggtgaatacgttcccgggccttgtacacaccgcccgtcacaccatgggagtggactgcaccagaagtggttagcctaacgcaagagggcgatcaccacggtgtggttcatgactggggtg

SEQ ID NO: 1559 - DNA, 1404 bp, Halomonas arcis
tgcaagtcgagcggtaacagatccagcttgctggatgctgacgagcggcggacgggtgagtaacgcataggaatttacccggtagtgggggataacctggggaaactcaggctaataccgcatacgtcctacgggagaaagggggctttggctcccgctatcggatgagcctatgccggattagctggttggtgaggtaaaggctcaccaaggcgacgatccgtagctggtctgagaggatgatcagccacatcgggactgagacacggcccgaactcctacgggaggcagcagtggggaatattggacaatgggggcaaccctgatccagccatgccgcgtgtgtgaagaaggccctcgggttgtaaagcactttcagcgaggaagaacgcctggtggttaatacccgccaggaaagacatcactcgcagaagaagcaccggctaactccgtgccagcagccgcggtaatacggagggtgcaagcgttaatcggaattactgggcgtaaagcgcgcgtaggtggcttgataagccggttgtgaaagccccgggctcaacctgggaacggcatccggaactatgaggctagagtgcaggagaggaaggtagaattcccggtgtagcggtgaaatgcgtagagatcgggaggaataccagtggcgaaggcggccttctggactgacactgacactgaggtgcgaaagcgtgggtagcaaacaggattagataccctggtagtccacgccgtaaacgatgtcgaccagccgttgggtgcctagcgcactttgtggcgaagttaacgcgataagtcgaccgcctggggagtacggccgcaaggttaaaactcaaatgaattgacgggggcccgcacaagcggtggagcatgtggtttaattcgatgcaacgcgaagaaccttacctacccttgacatcctgcgaacttgtgagagatcacttggtgccttcgggagcgcagagacaggtgctgcatggctgtcgtcagctcgtgttgtgaaatgttgggttaagtcccgtaacgagcgcaacccttgtccttatttgccagcacgtaatggtgggaactctaaggagactgccggtgacaaaccggaggaaggtggggacgacgtcaagtcatcatggcccttacgggtagggctacacacgtgctacaatggccggtacaaagggctgcgaactcgcgagagccagcgaatcccttaaagccggtctcagtccggatcggagtctgcaactcgactccgtgaagtcggaatcgctagtaatcgtgcatcagaatggcacggtgaatacgttcccgggccttgtacacaccgcccgtcacaccatgggagtggactgcaccagaagtggttagcctaacttggagggcgatcaccac

SEQ ID NO: 1560 - DNA, 1412 bp, Halomonas beimenensis
tcgagcggaaacgatggaagcttgcttccaggcgtcgagcggcggacgggtgagtaatgcataggaatctgcccggtagtgggggataacctggggaaactcaggctaataccgcatacgtcctacgggagaaagcaggggatcttcggaccttgcgctatcggatgagcctatgtcggattagctagttggtgaggtaatggctcaccaaggcgacgatccgtagctggtctgagaggatgatcagccacatcgggactgagacacggcccgaactcctacgggaggcagcagtggggaatattggacaatgggcgaaagcctgatccagccatgccgtgtgtgtgaagaaggccttcgggttgtaaagcactttcagtgaggaagaacgcctgcgggctaataccccgcaggaaggacatcactcacagaagaagcaccggctaactccgtgccagcagccgcggtaatacggagcgtgcgagcgttaatcggaattactgggcgtaaagcgcgcgtaggcggcttgataagccggttgtgaaagccccgggctcaactgggaacggcatctgaactgtcaggctagagtgcaggagaggaaggtagaattcccggtgtagcggtgaaatgcgtagagatcgggaggaataccagtggcgaaggcggcatctggactgacactgacgctgaggtgcgaaagcgtgggtagcaaacaggattagataccctggtagtccacgccgtaaacgatgtcgactagccgttggggtccttgagacctttgtggcgcagttaacgcgataagtcgaccgcctggggagtacggccgcaaggttaaaactcaaatgaattgacgggggcccgcacaagcggtggagcatgtggtttaattcgatgcaacgcgaagaaccttacctacccttgacatcgagcgaactttccagagatggattggtgccttcgggaacgctcagacaggtgctgcatggctgtcgtcagctcgtgttgtgaaatgttgggttaagtcccgtaacgagcgcaacccttgtccctatttgccagcgattcggtcgggaactctagggagactgccggtgacaaaccggaggaaggtggggacgacgtcaagtcatcatggcccttacgggtagggctacacacgtgctacaatggccggtacagagggttgcaatgccgcgaggtggagctaatcccgaaaagccggtctcagtccggatcggagtctgcaactcgactccgtgaagtcggaatcgctagtaatcgtgaatcagaatgtcacggtgaatacgttcccgggccttgtacacaccgcccgtcacaccatgggagtggactgcaccagaagtggttagcctaacttcggagggcgatcaccacggtggtctttg

SEQ ID NO: 1561 - DNA, 1455 bp, Halomonas boliviensis
attgaacgctggcggcaggcctaacacatgcaagtcgagcggtaacagatctagcttgctagatgctgacgagcggcggacgggtgagtaatgcataggaatctgcccggtagtgggggataacctggggaaacccaggctaataccgcatacgtcctacgggagaaagggggctccggctcccgctattggatgagcctatgtcggattagctagttggtgaggtaacggctcaccaaggcgacgatccgtagctggtctgagaggatgatcagccacatcgggactgagacacggcccgaactcctacgggaggcagcagtggggaatattggacaatgggggcaaccctgatccagccatgccgcgtgtgtgaagaaggccctcgggttgtaaagcactttcagcgaggaagaacgcctagtggttaatacccattaggaaagacatcactcgcagaagaagcaccggctaactccgtgccagcagccgcggtaatacggagggtgcaagcgttaatcggaattactgggcgtaaagcgcgcgtaggtggcttgataagccggttgtgaaagccccgggctcaacctgggaacggcatccggaactgtcaggctagagtgcaggagaggaaggtagaattcccggtgtagcggtgaaatgcgtagagatcgggaggaataccagtggcgaaggcggccttctggactgacactgacactgaggtgcgaaagcgtgggtagcaaacaggattagataccctggtagtccacgccgtaaacgatgtcgaccagccgttgggtgcctagagcactttgtggcgaagttaacgcgataagtcgaccgcctggggagtacggccgcaaggttaaaactcaaatgaattgacgggggcccgcacaagcggtggagcatgtggtttaattcgatgcaacgcgaagaaccttacctacccttgacatctacagaagccggaagagattctggtgtgccttcgggaactgtaagacaggtgctgcatggctgtcgtcagctcgtgttgtgaaatgttgggttaagtcccgtaacgagcgcaacccttgtccttatttgccagcgagtaatgtcgggaactctaaggagactgccggtgacaaaccggaggaaggtggggacgacgtcaagtcatcatggcccttacgggtagggctacacacgtgctacaatggccggtacaaagggctgcgagctcgcgagagttagcgaatcccttaaagccggtctcagtccggatcggagtctgcaactcgactccgtgaagtcggaatcgctagtaatcgtgaatcagaatgtcacggtgaatacgttcccgggccttgtacacaccgcccgtcacaccatgggagtggactgcaccagaagtggttagcctaacgcaagagggcgatcaccacggtgtggttcatgactggggtg

SEQ ID NO: 1562 - DNA, 1460 bp, Halomonas campaniensis
  misc_feature (391)..(391): n is a, c, g, or t
  misc_feature (424)..(424): n is a, c, g, or t
  misc_feature (1007)..(1007): n is a, c, g, or t
attgaacgctggcggcaggcctaacacatgcaagtcgagcggaaacgaagggagcttgctcccaggcgtcgagcggcggacgggtgagtaatgcataggaatctgcccgatagtgggggataacctggggaaacccaggctaataccgcatacgtcctacgggagaaagcaggggctcttcggaccttgcgctatcggatgagcctatgtcggattagctggttggtgaggtaatggctcaccaaggcgacgatccgtagctggtctgagaggatgatcagccacatcgggactgagacacggcccgaactcctacgggaggcagcagtggggaatattggacaatgggcgaaagcctgatccagccatgccgcgtgtgtgaagaaggccntcgggttgtaaagcactttcagtggggaagaangccttggggctaataccctcgaggaaggacatcacccacagaagaagcaccggctaactccgtgccagcagccgcggtaatacggagggtgcgagcgttaatcggaattactgggcgtaaagcgcgcgtaggtggcttgataagccggttgtgaaagccccgggctcaacctgggaacggcatccggaactgtcaggctagagtgcaggagaggaaggtagaattcccggtgtagcggtgaaatgcgtagagatcgggaggaataccagtggcgaaggcggccttctggactgacactgacactgaggtgcgaaagcgtgggtagcaaacaggattagataccctggtagtccacgccgtaaacgatgtcgactagccgttgggagcctcgagttcttagtggcgcagttaacgcgataagtcgaccgcctggggagtacggccgcaaggttaaaactcaaatgaattgacgggggcccgcacaagcggtggagcatgtggtttaattcgatgcaacgcgaagaaccttacctacccttgacatcgtgcgaacttggtagagataccttggtgccttcgggancgcacagacaggtgctgcatggctgtcgtcagctcgtgttgtgaaatgttgggttaagtcccgtaacgagcgcaacccttgtccctatttgccagcgattcggtcgggaactctagggagactgccggtgacaaaccggaggaaggtggggacgacgtcaagtcatcatggcccttacgggtagggctacacacgtgctacaatggtcggtacaaagggttgcaaagcggcgacgtggagctaatcccagaaagctgatctcagtccggatcggagtctgcaactcgactccgtgaagtcggaatcgctagtaatcgtgaatcagaatgtcacggtgaatacgttcccgggccttgtacacaccgcccgtcacaccatgggagtggactgcaccagaagtggttagcctaacttcggagggcgatcaccacggtgtggttcatgactggggtg

SEQ ID NO: 1563 - DNA, 1460 bp, Halomonas caseinilytica
attgaacgctggcggcaggcctaacacatgcaagtcgagcggaaacgatcctagcttgctaggaggcgtcgagcggcggacgggtgagtaatgcataggaatctgcccggtagtgggggataacctgaggaaactcaggctaataccgcatacgtcctacgggagaaagcaggggctcttcggaccttgcgctatcggatgagcttatgtcggattagctggttggtgaggtaacggctcaccaaggcgacgatccgtagctggtctgagaggatgatcagccacatcgggactgagacacggcccgaactcctacgggaggcagcagtggggaatattggacaatgggggcaaccctgatccagccatgccgcgtgtgtgaagaaggccctcgggttgtaaagcactttcagtgaggaagaaggcttgtcggttaatacccggcaagaaagacatcactcacagaagaagcaccggctaactccgtgccagcagccgcggtaatacggagggtgcgagcgttaatcggaattactgggcgtaaagcgtgcgtaggcggcttgataagccggttgtgaaagccccgggctcaacctgggaacggcatccggaactgtcaggctagagtgcaggagaggaaggtagaattcccggtgtagcggtgaaatgcgtagagatcgggaggaataccagtggcgaaggcggccttctggactgacactgacgctgaggtacgaaagcgtgggtagcaaacaggattagataccctggtagtccacgccgtaaacgatgtcgactagccgttggggtcctcgagacctttgtggcgcagttaacgcactaagtcgaccgcctggggagtacggccgcaaggttaaaactcaaatgaattgacgggggcccgcacaagcggtggagcatgtggtttaattcgatgcaacgcgaagaaccttacctacccttgacatcgtgcgaactttccagagatggattggtgccttcgggaacgcacagacaggtgctgcatggctgtcgtcagctcgtgttgtgaaatgttgggttaagtcccgtaacgagcgcaacccttgtccctatttgccagcgattcggtcgggaactctagggagactgccggtgacaaaccggaggaaggtggggacgacgtcaagtcatcatggcccttacgggtagggctacacacgtgctacaatggccggtacaatgggttgcaaagcggcgacgtggagctaatcccataaagccggtctcagtccggatcggagtctgcaactcgactccgtgaagtcggaatcgctagtaatcgtgcatcagaatggcacggtgaatacgttcccgggccttgtacacaccgcccgtcacaccatgggagtggactgcaccagaagtggttagcctaacttcggagggcgatcaccacggtgtggttcatgactggggtg

SEQ ID NO: 1564 - DNA, 1463 bp, Halomonas chromatireducens
attgaacgctggcggcaggcttaacacatgcaagtcgagcggtaacaggtccagcttgctggatgctgacgagcggcggacgggtgagtaatgcataggaatctgcccagtagtgggggataacctggggaaacccaggctaataccgcatacgccctacgggggaaagcaggggatcttcggaccttgcgctatcggatgagcctatgtcggattagctagttggtagggtaaaggcctaccaaggcgacgatccgtagctggtctgagaggatgatcagccacatcgggactgagacacggcccgaactcctacgggaggcagcagtggggaatattggacaatgggggcaaccctgatccagccatgccgcgtgtgtgaagaaggccttcgggttgtaaagcactttcagcgaggaagaaagcctggtggccaatacccaccaggaaggacatcactcgcagaagaagcaccggctaactccgtgccagcagccgcggtaatacggagggtgcgagcgttaatcggaattactgggcgtaaagcgcgcgtaggtggcttgataagccggttgtgaaagccccgggctcaacctgggaacggcatccggaactgtcaggctagagtgcaggagaggaaggtagaattcccggtgtagcggtgaaatgcgtagagatcgggaggaataccagtggcgaaggcggccttctggactgacactgacactgaggtgcgaaagcgtgggtagcaaacaggattagataccctggtagtccacgccgtaaacgatgtcgactagccgttgggtccctcgcggactttgtggcgcagttaacgcgataagtcgaccgcctggggagtacggccgcaaggttaaaactcaaatgaattgacgggggcccgcacaagcggtggagcatgtggtttaattcgatgcaacgcgaagaaccttacctacccttgacatcctgcgaacttggtagagataccttggtgccttcgggagcgcagagacaggtgctgcatggctgtcgtcagctcgtgttgtgaaatgttgggttaagtcccgtaacgagcgcaacccttgtccttatttgccagcgggtaatgccgggaactctaaggagactgccggtgacaaaccggaggaaggtggggacgacgtcaagtcatcatggcccttacgggtagggctacacacgtgctacaatggtcagtacaaagggttgccaactcgcgagagtgcgctaatcccataaagctgatctcagtccggatcggagtctgcaactcgactccgtgaagtcggaatcgctagtaatcgtgaatcagaatgtcacggtgaatacgttcccgggccttgtacacaccgcccgtcacaccatgggagtggactgcaccagaagtggttagcctaaccttcgggagggcgatcaccacggtgtggttcatgactggggtg

SEQ ID NO: 1565 - DNA, 1441 bp, Halomonas cupida
  misc_feature (10)..(10): n is a, c, g, or t
  misc_feature (38)..(38): n is a, c, g, or t
  misc_feature (171)..(171): n is a, c, g, or t
  misc_feature (456)..(456): n is a, c, g, or t
  misc_feature (460)..(460): n is a, c, g, or t
  misc_feature (472)..(472): n is a, c, g, or t
  misc_feature (499)..(500): n is a, c, g, or t
  misc_feature (504)..(504): n is a, c, g, or t
  misc_feature (519)..(519): n is a, c, g, or t
  misc_feature (572)..(572): n is a, c, g, or t
  misc_feature (584)..(584): n is a, c, g, or t
  misc_feature (592)..(592): n is a, c, g, or t
  misc_feature (685)..(685): n is a, c, g, or t
  misc_feature (787)..(787): n is a, c, g, or t
  misc_feature (842)..(842): n is a, c, g, or t
  misc_feature (1061)..(1061): n is a, c, g, or t
  misc_feature (1294)..(1294): n is a, c, g, or t
  misc_feature (1438)..(1438): n is a, c, g, or t
taacacatgnaagtcgagcggaaacgatggaagcttgnttccaggcgtcgagcggcggacgggtgagtaatgcatgggaatctgcccgatagtgggggataacctggggaaacccaggctaataccgcatacgtcctacgggagaaagcaggggatcttcggaccttgtgntatcggatgagcccatgtcggattagcttgttggtggggtaatggcctaccaaggcgacgatccgtagctggtctgagaggatgatcagccacatcgggactgagacacggcccgaactcctacgggaggcagcagtggggaatattggacaatgggcgaaagcctgatccagccatgccgcgtgtgtgaagaaggccttcgggttgtaaagcactttcagtgaggaagaacgcctctggcccaatacgtcagagggaagacatcactcacagaagaagcaccgnctanctccgtgccagnagccgcggtaatacggagggtgcgagnnttantcggaattactgggngtaaagcgcgcgtaggtggcttgataagccggttgtgaaagccccggtctcancctgggaatggnatccgganctgtcaggctagagtgcaggagaggaaggtagaattcccggtgtagcggtgaaatgcgtagagatcgggaggaataccagtggtgaaggcggncttctggactgacactgacactgaggtgcgaaagcgtgggtagcaaacaggattagataccctggtagtccacgccgtaaacgatgtcgactagccgttggnctccttgagagctttgtggcgcagttaacgcgataagtcgaccgcctggggagtncggccgcaaggttaaaactcaaatgaattgacgggggcccgcacaagcggtggagcatgtggtttaattcgatgcaacgcgaagaaccttacctacccttgacatcgagagaactttccagagatggattggtgccttcgggaactctcagacaggtgctgcatggctgtcgtcagctcgtgttgtgaaatgttgggttaagtcccgtaacgagcgcancccttgtccctatttgccagcgattcggtcgggaactctagggagactgccggtgacaaaccggaggaaggtggggacgacgtcaagtcatcatggcccttacgggtagggctacacacgtgctacaatggccggtacaaagggttgcgaatccgcgaggtggagccaatcccgaaaagccggtctcagtccggatcggagtctgcaactcgactccgtgaagtcggaatcgntagtaatcgtgaatcagaatgtcacggtgaatacgttcccgggccttgtacacaccgcccgtcacacaatgggagtggactgcaccagaagtggttagcttaaccttcgggagagcgatcaccacggtgtggttcatgactggngtg

SEQ ID NO: 1566 - DNA, 1400 bp, Halomonas daqingensis
tcgagcggcagcacgggaagcttgcttcctggtggcgagcggcggacgggtgagtaatgcataggaatctgcccggtagtgggggataacctggggaaacccaggctaataccgcatacgccctacgggagaaagcaggggctcttcggaccttgcgctatcggatgagcctatgtcggattacctggttggtgaggtaatggctcaccaaggcgacgatccgtagctggtctgagaggatgatcagccacatcgggactgagacacggcccgaactcctacgggaggcagcagtggggaatattggacaatgggcgcaagcctgatccagccatgccgcgtgtgtgaagaaggccctcgggttgtaaagcactttcagtggggaagaacgccttccggctaatacccgggaggaaagacatcacccacagaagaagcaccggctaactccgtgccagcagccgcggtaatacggagggtgcgagcgttaatcggaattactgggcgtaaagcgcgcgtagggggcgtgataagccggttgtgaaagccccgggctcaacctgggaacggcatccggaactgtcaggctagagtgcaggagaggaaggtagaattcccggtgtagcggtgaaatgcgtagagatcgggaggaataccagtggcgaaggcggccttctggactgacactgacactgaggtgcgaaagcgtgggtagcaaacaggattagataccctggtagtccacgccgtaaacgatgtcgactagccgttgggtccttcgcggactttgtggcgcagttaacgcgataagtcgaccgcctggggagtacggccgcaaggttaaaactcaaatgaattgacgggggcccgcacaagcggtggagcatgtggtttaattcgatgcaacgcgaagaaccttacctacccttgacatcctgcgaacccttcggagacgaaggggtgccttcgggaacgcagagacaggtgctgcatggctgtcgtcagctcgtgttgtgaaatgttgggttaagtcccgtaacgagcgcaacccttgtccctatttgccagcgattcggtcgggaactctagggagactgccggtgacaaaccggaggaaggtggggacgacgtcaagtcatcatggcccttacgggtagggctacacacgtgctacaatggtcagtacaaagggttgcgaacttgcgagagtgagccaatcccagaaagctgatctcagtccggatcggagtctgcaactcgactccgtgaagtcggaatcgctagtaatcgtgaatcagaatgtcacggtgaatacgttcccgggccttgtacacaccgcccgtcacaccatgggagtggactgcaccagaagtggttagcctaaccttcgggagggcgtc

SEQ ID NO: 1567 - DNA, 1462 bp, Halomonas desiderata
attgaacgctggcggcaggcctaacacatgcaagtcgagcggcagcacgggaagcttgcttcctggtggcgagcggcggacgggtgagtaatgcataggaatctgcccggtagtgggggataacctggggaaacccaggctaataccgcatacgtcctacgggagaaagcaggggctcttcggaccttgcgctatcggatgagcctatgtcggattagctggttggtgaggtaatggctcaccaaggcgacgatccgtagctggtctgagaggatgatcagccacatcgggactgagacacggcccgaactcctacgggaggcagcagtggggaatattggacaatgggcgcaagcctgatccagccatgccgcgtgtgtgaagaaggccctcgggttgtaaagcactttcagtggggaagaaagccttctggttaatacccgggaggaaagacatcacccacagaagaagcaccggctaactccgtgccagcagccgcggtaatacggagggtgcgagcgttaatcggaattactgggcgtaaagcgcgcgtaggtggcttgataagccggttgtgaaagccccgggctcaacctgggaacggcatccggaactgtcaggctagagtgcaggagaggaaggtagaattcccggtgtagcggtgaaatgcgtagagatcgggaggaataccagtggcgaaggcggccttctggactgacactgacactgaggtgcgaaagcgtgggtagcaaacaggattagataccctggtagtccacgccgtaaacgatgtcgactagccgttgggtccttcgcggactttgtggcgcagttaacgcgataagtcgaccgcctggggagtacggccgcaaggttaaaactcaaatgaattgacgggggcccgcacaagcggtggagcatgtggtttaattcgatgcaacgcgaagaaccttacctacccttgacatcctcggaatccgccagagatggcggagtgccttcgggaaccgagagacaggtgctgcatggctgtcgtcagctcgtgttgtgaaatgttgggttaagtcccgtaacgagcgcaacccttgtccctatttgccagcgattcggtcgggaactctagggagactgccggtgacaaaccggaggaaggtggggacgacgtcaagtcatcatgggccttacgggtagggctacacacgtgctacaatggtcagtacaaagggttgcgaacttgcgagagtgagccaatcccagaaagctgatctcagtccggatcggagtctgcaactcgactccgtgaagtcggaatcgctagtaatcgtgaatcagaatgtcacggtgaatacgttcccgggccttgtacacaccgcccgtcacaccatgggagtggactgcaccagaagtggttagcctaaccttcgggagggcgatcaccacggtgtggttcatgactggggtg

SEQ ID NO: 1568 - DNA, 1460 bp, Halomonas elongata
attgaacgctggcggcaggcctaacacatgcaagtcgagcggaaacgatcctagcttgctaggaggcgtcgagcggcggacgggtgagtaatgcataggaatctgcccggtagtgggggataacttgaggaaactcaagctaataccgcatacgccctacgggggaaagcaggggctcttcggaccttgcgctatcggatgagcttatgtcggattagctggttggtgaggtaacggctcaccaaggcgacgatccgtagctggtctgagaggatgatcagccacatcgggactgagacacggcccgaactcctacgggaggcagcagtggggaatattggacaatgggggcaaccctgatccagccatgccgcgtgtgtgaagaaggccctcgggttgtaaagcactttcagcgaggaagaatgcttgtcggttaatacccggcaagggagacatcactcgcagaagaagcaccggctaactccgtgccagcagccgcggtaatacggagggtgcgagcgttaatcggaattactgggcgtaaagcgtgcgtaggcggcttgataagccggttgtgaaagccccgggctcaacctgggaacggcatccggaactgttaggctagagtgcaggagaggaaggtagaattcccggtgtagcggtgaaatgcgtagagatcgggaggaataccagtggcgaaggcggccttctggactgacactgacgctgaggtacgaaagcgtgggtagcaaacaggattagataccctggtagtccacgccgtaaacgatgtcgactagccgttggggtcctcgagacctttgtggcgcagttaacgcactaagtcgaccgcctggggagtacggccgcaaggttaaaactcaaatgaattgacgggggcccgcacaagcggtggagcatgtggtttaattcgatgcaacgcgaagaaccttacctacccttgacatcgtgcgaactttccagagatggattggtgccttcgggagcgcacagacaggtgctgcatggctgtcgtcagctcgtgttgtgaaatgttgggttaagtcccgtaacgagcgcaacccttgtccctatttgccagcgattcggtcgggaactctagggagactgccggtgacaaaccggaggaaggtggggacgacgtcaagtcatcatggcccttacgggtagggctacacacgtgctacaatggccggtacaatgggttgcaaagcggcgacgtggagctaatctcataaagccggtctcagtccggatcggagtctgcaactcgactccgtgaagtcggaatcgctagtaatcgtgcatcagaatggcacggtgaatacgttcccgggccttgtacacaccgcccgtcacaccatgggagtggactgcaccagaagtggttagcctaacttcggagggcgatcaccacggtgtggttcatgactggggtg

SEQ ID NO: 1569 - DNA, 1460 bp, Halomonas eurihalina
  misc_feature (55)..(55): n is a, c, g, or t
  misc_feature (59)..(59): n is a, c, g, or t
  misc_feature (180)..(180): n is a, c, g, or t
  misc_feature (401)..(401): n is a, c, g, or t
  misc_feature (488)..(488): n is a, c, g, or t
  misc_feature (560)..(560): n is a, c, g, or t
  misc_feature (926)..(926): n is a, c, g, or t
  misc_feature (1168)..(1168): n is a, c, g, or t
  misc_feature (1188)..(1188): n is a, c, g, or t
  misc_feature (1216)..(1216): n is a, c, g, or t
  misc_feature (1219)..(1219): n is a, c, g, or t
  misc_feature (1224)..(1224): n is a, c, g, or t
  misc_feature (1238)..(1238): n is a, c, g, or t
  misc_feature (1359)..(1359): n is a, c, g, or t
  misc_feature (1362)..(1362): n is a, c, g, or t
  misc_feature (1365)..(1365): n is a, c, g, or t
  misc_feature (1398)..(1398): n is a, c, g, or t
attgaacgctggcggcaggcctaacacatgcaagtcgagcggaaacgatcctagnttgntaggaggcgtcgagcggcggacgggtgagtaatgcataggaatctgcccggtagtgggggataacttgaggaaactcaagctaataccgcatacgccctacgggggaaagcaggggctctncggaccttgcgctatcggatgagcttatgtcgaattagctagttggtgaggtaatggctcaccaaggcgacgatccgtagctggtctgagaggatgatcagccacatcgggactgagacacggcccgaactcctacgggaggcagcagtggggaatattggacaatgggggcaaccctgatccagccatgccgcgtgtgtgaagaaggccctcgggttgtnaagcactttcagcgaggaagaatgcttgtcggttaatacccggcaagggagacatcactcgcagaagaagcaccggctaactccgtnccagcagccgcggtaatacggagggtgcgagcgttaatcggaattactgggcgtaaagcgtgcgtaggcggnttggtaagccggttgtgaaagccccgggctcaacctgggaacggcatccggaactgtcaggctagagtgcaggagaggaaggtagaattcccggtgtagcggtgaaatgcgtagagatcgggaggaataccagtggcgaaggcggccttctggactgacactgacgctgaggtacgaaagcgtgggtagcaaacaggattagataccctggtagtccacgccgtaaacgatgtcgactagccgttggggtcctcgagacctttgtggcgcagttaacgcactaagtcgaccgcctggggagtacggccgcaaggttaaaactcaaatgaattgacgggggcccgcacaagcggtggagcatgtggnttaattcgatgcaacgcgaagaaccttacctacccttgacatcgtgcgaacttggtagagataccttggtgccttcgggagcgcacagacaggtgctgcatggctgtcgtcagctcgtgttgtgaaatgttgggttaagtcccgtaacgagcgcaacccttgtccctatttgccagcgattcggtcgggaactctagggagactgccggtgacaaaccggaggaaggtggggacgacgtcangtcatcatggcccttacggntagggctacacacgtgctacaatggccngtncaatnggttgcgaagcggngacgtggagctaatctcataaagccggtctcagtccggatcggagtctgcaactcgactccgtgaagtcggagtcgctagtaatcgtgcatcagaatggcacggtgaatacgttcccgggnctngtncacaccgcccgtcacaccatgggagtggactgnaccagaagtggttagcctaacttcgaagggcgatcaccacggtgtggttcatgactggggtg

SEQ ID NO: 1570 - DNA, 1460 bp, Halomonas halmophila
attgaacgctggcggcaggcctaacacatgcaagtcgagcggaaacgatcccagcttgctgggaggcgtcgagcggcggacgggtgagtaatgcataggaatctgcccggtagtgggggataacttgaggaaactcaagctaataccgcatacgccctacgggggaaagcaggggctcttcggaccttgcgctatcggatgagcttatgtcggattagctagttggtgaggtaacggcttaccaaggcgacgatccgtagctggtctgagaggatgatcagccacatcgggactgagacacggcccgaactcctacgggaggcagcagtggggaatattggacaatgggcgaaagcctgatccagccatgccgcgtgtgtgaagaaggccctcgggttgtaaagcactttcagtgaggaagaaggcttgtcggttaatacccggcaggaaggacatcactcacagaagaagccccggctaactccgtgccagcagccgcggtaatacggagggggcaagcgttaatcggaattactgggcgtaaagcgtgcgtaggcggcttggtaagccggttgtgaaagccccgggctcaacctgggaatggcatccggaactgtcaggctagagtgcaggagaggaaggtagaattcccggtgtagcggtgaaatgcgtagagatcgggaggaataccagtggcgaaggcggccttctggactgacactgacgctgaggtacgaaagcgtgggtagcaaacaggattagataccctggtagtccacgccgtaaacgatgtcgactagccgttggggtccttgagacctttgtggcgcagttaacgcactaagtcgaccgcctggggagtacggccgcaaggttaaaactcaaatgaattgacgggggcccgcacaagcggtggagcatgtggtttaattcgatgcaacgcgaagaaccttacctacccttgacatcgtgcgaacttggtagagataccttggtgccttcgggagcgcacagacaggtgctgcatggctgtcgtcagctcgtgttgtgaaatgttgggttaagtcccgtaacgagcgcaacccttatccttatttgccagcgatacggtcgggaactctaaggagactgccggtgacaaaccggaggaaggtggggacgacgtcaagtcatcatggcccttacgggtagggctacacacgtgctacaatggccgatacaatgggtcgcaaagcggcgacgtggcgctaatcccataaagtcggtctcagtccggatcggagtctgcaactcgactccgtgaagtcggaatcgctagtaatcgtgcatcagaatggcacggtgaatacgttcccgggctttgtacacaccgcccgtcacaccatgggagtggactgcaccagaagtggttagcctaacttcggagggcgatcaccacggtgtggttcatgactggggtg

SEQ ID NO: 1571 - DNA, 1441 bp, Halomonas halophila
attgaacgctggcggcaggcctaacacatgcaagtcgagcggaaacgatcctagcttgctaggaggcgtcgagcggcggacgggtgagtaatgcataggaatctgcccggtagtgggggataacttgaggaaactcaagctaataccgcatacgccccaagggggaaagcaggggatcttcggaccttgcgctatcggatgagcctatgtcggattagctagttggtgaggtaatggctcaccaaggccgcgatccgtagctggtctgagaggatgatcagccacatcgggactgagacacggcccgaactcctacgggaggcagcagtggggaatattggacaatgggcgaaagcctgatccagccatgccgcgtgtgtgaagaaggccttcgggttgtaaagcactttcagcgaggaagaacgcttgtgggttaataccctgcaagaaggacatcactcgcagaagaagcaccggctaactccgtgccagcagccgcggtaatacggagggtgcaagcgttaatcggaattactgggcgtaaagcgcgcgtaggcggcttgataagccggttgtgaaagccccgggctcaacctgggaacggcatccggaactgtcaggctagagtgcaggagaggaaggtagaattcccggtgtagcggtgaaatgcgtagagatcgggaggaataccagtggcgaaggcggccttctggactgacactgacgctgaggtgcgaaagcgtgggtagcaaacaggattagataccctggtagtccacgccgtaaacgatgtcgactagccgttggggtcctcgagacctttgtggcgcagttaacgcgataagtcgaccgcctggggagtacggccgcaaggttaaaactcaaatgaattgacgggggcccgcacaagcggtggagcatgtggtttaattcgatgcaacgcgaagaaccttacctactcttgacatcgagcgaaccatccagagatggatgggtgccttcgggaacgctcagacaggtgctgcatggccgtcgtcagctcgtgttgtgaaatgttgggttaagtcccgtaacgagcgcaacccttgtccctatttgccagcgattcggtcgggaactctagggagactgccggtgacaaaccggaggaaggtggggacgacgtcaggtcatcatggcccttacgagtagggctacacacgtgctacaatggccggtacaatgggctgccatcccgcgagggggagctaatctcataaagccggtctcagtccggatcggagtctgcaactcgactccgtgaagtcggaatcgctagtaatcgtgcatcagaatggcacggtgaatacgttcccgggccttgtacacaccgcccgtcacaccatgggagtggactgcaccagaagtggttagcctaacttcggagggcgatcaccacggt

SEQ ID NO: 1572 - DNA, 1460 bp, Halomonas heilongjiangensis
attgaacgctggcggcaggcctaacacatgcaagtcgagcggtaacagggggagcttgctccctgctgacgagcggcggacgggtgagtaatgcataggaatctgcccgacagtgggggataacctggggaaacccaggctaataccgcatacgtcctacgggagaaagcaggggaccttcgggccttgcgctatcggatgagcctatgtcggattagctggttggtgaggtaatggctcaccaaggcaacgatccgtagctggtctgagaggatgatcagccacatcgggactgagacacggcccgaactcctacgggaggcagcagtggggaatattggacaatgggggcaaccctgatccagccatgccgcgtgtgtgaagaaggccatcgggttgtaaagcactttcagtgaggaagaaggccttggggctaataccctcgaggaaggacatcactcacagaagaagcaccggctaactccgtgccagcagccgcggtaatacggagggtgcgagcgttaatcggaattactgggcgtaaagcgcgcgtaggtggcttgataagccggttgtgaaagccccgggctcaacctgggaacggcatccggaactgtcaggctagagtgcaggagaggaaggtagaattcccggtgtagcggtgaaatgcgtagagatcgggaggaataccagtggcgaaggcggccttctggaccgacactgacactgaggtgcgaaagcgtgggtagcaaacaggattagataccctggtagtccacgccgtaaacgatgtcgactagccgttgggtccctcgcggactttgtggcgcagttaacgcgataagtcgaccgcctggggagtacggccgcaaggttaaaactcaaatgaattgacgggggcccgcacaagcggtggagcatgtggtttaattcgatgcaacgcgaagaaccttacctacccttgacatcctcggaatctgtcggagacgacggagtgccttcgggaaccgagtgacaggtgctgcatggctgtcgtcagctcgtgttgtgaaatgttgggttaagtcccgtaacgagcgcaacccttgtccctatttgccagcgattcggtcgggaactctagggagactgccggtgacaaactggaggaaggtggggacgacgtcaagtcatcatggcccttacgggtagggctacacacgtgctacaatggccggtacaaagggttgcgaagccgcgaggtggagctaatcccgaaaagctggtctcagtccggatcggagtctgcaactcgactccgtgaagtcggaatcgctagtaatcgtgaatcagaatgtcacggtgaatacgttcccgggccttgtacacaccgcccgtcacaccatgggagtggactgcaccagaagtggttagcctaacttcggagggcgatcaccacggtgtggttcatgactggggtg

SEQ ID NO: 1573 - DNA, 1462 bp, Halomonas huangheensis
attgaacgctggcggcaggcctaacacatgcaagtcgagcggaaacgatggaagcttgcttccaggcgtcgagcggcggacgggtgagtaatgcataggaatctgcccgatagtgggggataacctggggaaactcaggctaataccgcatacgtcctacgggagaaagcaggggatcttcggaccttgcgctatcggatgagcctatgtcggattagcttgttggtggggtaatggcctaccaaggcgacgatccgtagctggtctgagaggatgatcagccacatcgggactgagacacggcccgaactcctacgggaggcagcagtggggaatattggacaatgggcgaaagcctgatccagccatgccgcgtgtgtgaagaaggctttcgggttgtaaagcactttcagtgaggaagaacgcctctggattaatactctggaggaaagacatcactcacagaagaagcaccggctaactccgtgccagcagccgcggtaatacggagggtgcgagcgttaatcggaattactgggcgtaaagcgcgcgtaggtggcttgataagccggttgtgaaagccccgggctcaacctgggaacggcatccggaactgtcaggctagagtgcaggagaggaaggtagaattcccggtgtagcggtgaaatgcgtagagatcgggaggaataccagtggcgaaggcggccttctggactgacactgacactgaggtgcgaaagcgtgggtagcaaacaggattagataccctggtagtccacgccgtaaacgatgtcgactagccgttgggctccttgagagctttgtggcgcagttaacgcgataagtcgaccgcctggggagtacggccgcaaggttaaaactcaaatgaattgacgggggcccgcacaagcggtggagcatgtggtttaattcgatgcaacgcgaagaaccttacctacccttgacatcgagagaactttccagagatggattggtgccttcgggaactctcagacaggtgctgcatggctgtcgtcagctcgtgttgtgaaatgttgggttaagtcccgtaacgagcgcaacccttgtccctatttgccagcgattcggtcgggaactctagggagactgccggtgacaaaccggaggaaggtggggacgacgtcaagtcatcatggcccttacgggtagggctacacacgtgctacaatggccggtacaaagggttgcgaagccgcgaggtggagctaatcccgaaaagccggtctcagtccggatcggagtctgcaactcgactccgtgaagtcggaatcgctagtaatcgtgaatcagaatgtcacggtgaatacgttcccgggccttgtacacaccgcccgtcacaccatgggagtggactgcaccagaagtggttagcttaaccttcgggggagcgatcaccacggtgtggttcatgactggggtg

SEQ ID NO: 1574 - DNA, 1409 bp, Halomonas hydrothermalis
  misc_feature (47)..(47): n is a, c, g, or t
cacatgcaagtcgagcggtaacaggggtagcttgctacccgctgacnagcggcggacgggtgagtaatgcataggaatctgcccggtagtgggggataacctggggaaacccaggctaataccgcatacgtcctacgggagaaagggggctccggctcccgctattggatgagcctatgtcggattagctagttggtgaggtaatggctcaccaaggcgacgatccgtagctggtctgagaggatgatcagccacatcgggactgagacacggcccgaactcctacgggaggcagcagtggggaatattggacaatgggcgaaagcctgatccagccatgccgcgtgtgtgaagaaggccctcgggttgtaaagcactttcagcgaggaagaacgcctagtggttaatacccactaggaaagacatcactcgcagaagaagcaccggctaactccgtgccagcagccgcggtaatacggagggtgcaagcgttaatcggaattactgggcgtaaagcgcgcgtaggtggcttgataagccggttgtgaaagccccgggctcaacctgggaacggcatccggaactgtcaagctagagtgcaggagaggaaggtagaattcccggtgtagcggtgaaatgcgtagagatcgggaggaataccagtggcgaaggcggccttctggactgacactgacactgaggtgcgaaagcgtgggtagcaaacaggattagataccctggtagtccacgccgtaaacgatgtcgaccagccgttgggtgcctagcgcactttgtggcgaagttaacgcgataagtcgaccgcctggggagtacggccgcaaggttaaaactcaaatgaattgacgggggcccgcacaagcggtggagcatgtggtttaattcgatgcaacgcgaagaaccttacctactcttgacatcctgcgaacttgtgagagatcacttggtgccttcgggaacgcagagacaggtgctgcatggctgtcgtcagctcgtgttgtgaaatgttgggttaagtcccgtaacgagcgcaacccttgtccttatttgccagcgcgtaatggcgggaactctaaggagactgccggtgacaaaccggaggaaggtggggacgacgtcaagtcatcatggcccttacgagtagggctacacacgtgctacaatggccggtacaaagggttgcgagctcgcgagagtcagctaatcccgaaaagccggtctcagtccggatcggagtctgcaactcgactccgtgaagtcggaatcgctagtaatcgtgaatcagaatgtcacggtgaatacgttcccgggccttgtacacaccgcccgtcacaccatgggagtggactgcaccagaagtggttagcttaaccttcgggaaagcgatcacc

SEQ ID NO: 1575 - DNA, 1475 bp, Halomonas korlensis
aacgaacgctggcggcaggcctaacacatgcaagtcgagcggcagcacgggaagcttgcttcctggtggcgagcggcggacgggtgagtaatgcataggaatctgcccgatagtgggggataacctggggaaacccaggctaataccgcatacgtcctacgggagaaagcgggggctccgtgttcttcggaatggggacctcgcgctatcggatgagcctatgtcggattagctagttggtgaggtaacggcccaccaaggcgacgatccgtagctggtctgagaggatgatcagccacatcgggactgagacacggcccgaactcctacgggaggcagcagtggggaatattggacaatgggcgcaagcctgatccagccatgccgcgtgtgtgaagaaggctttcgggttgtaaagcactttcagtggggaagaaggcctggcggccaatacccgtcaggggcgacatcacccacagaagaagcaccggctaactccgtgccagcagccgcggtaatacggagggtgcaagcgttaatcggaattactgggcgtaaagcgcgcgtaggcggccgcatcagccggttgtgaaagccccgggctcaacctgggaacggcatccggaactgtgtggctagagtgcaggagaggaaggtagaattcccggtgtagcggtgaaatgcgtagagatcgggaggaataccagtggcgaaggcggccttctggactgacactgacgctgaggtgcgaaagcgtgggtagcaaacaggattagataccctggtagtccacgccgtaaacgatgtcgactagccgttgggtgcctcgagcactttgtggcgaagttaacgcgataagtcgaccgcctggggagtacggccgcaaggttaaaactcaaatgaattgacgggggcccgcacaagcggtggagcatgtggtttaattcgatgcaacgcgaagaaccttacctacccttgacatcgtgcgaacccggaagagattccggggtgccttcgggagcgcacagacaggtgctgcatggctgtcgtcagctcgtgttgtgaaatgttgggttaagtcccgtaacgagcgcaacccttgtccctatttgccagcgggtaatgccgggaactctagggagactgccggtgacaaaccggaggaaggtggggacgacgtcaagtcatcatggcccttacgggtagggctacacacgtgctacaatggccggtacaaagggtggcgaagccgcgaggtgaagctaatcccgaaaagccggtctcagtccggatcggagtctgcaactcgactccgtgaagtcggaatcgctagtaatcgtgaatcagaatgtcacggtgaatacgttcccgggccttgtacacaccgcccgtcacaccatgggagtggactgcaccagaagtggttagcctaacttcggagggcgatcaccacggtgtggttcatgactggggtg

SEQ ID NO: 1576 - DNA, 1460 bp, Halomonas lutea
attgaacgctggcggcaggcctaacacatgcaagtcgagcggcagcgggaggtgcttgcacctcgccggcgagcggcggacgggtgagtaatgcataggaatctgcccggtagtgggggataacctggggaaactcaggctaataccgcatacgtcctacgggagaaagcaggggatcttcggaccttgcgctatcggatgagcctatgccggattagctagttggtagggtaatggcctaccaaggcgacgatccgtagctggtctgagaggatgatcagccacactgggactgagacacggcccagactcctacgggaggcagcagtggggaatattggacaatgggcgaaagcctgatccagccatgccgcgtgtgtgaagaaggctttcgggttgtaaagcactttcagtggggaagaaagcctgtcggctaatacccggcaggaacgacatcacccacagaagaagcaccggctaactccgtgccagcagccgcggtaatacggagggtgcgagcgttaatcggaattactgggcgtaaagcgcgcgtaggcggcgtgataagccggttgtgaaagccccgggctcaacctgggaacggcatccggaactgtcaggctagagtgcaggagaggaaggtagaattcccggtgtagcggtgaaatgcgtagagatcgggaggaataccagtggcgaaggcggccttctggactgacactgacgctgaggtgcgaaagcgtgggtagcaaacaggattagataccctggtagtccacgccgtaaacgatgtcgactagccgttgggagcctcgagttcttagtggcgcagttaacgcgataagtcgaccgcctggggagtacggccgcaaggttaaaactcaaatgaattgacgggggcccgcacaagcggtggagcatgtggtttaattcgatgcaacgcgaagaaccttacctacccttgacatcctcggaatccgccagagatggcggagtgccttcgggaaccgagtgacaggtgctgcatggctgtcgtcagctcgtgttgtgaaatgttgggttaagtcccgtaacgagcgcaacccttgtccctatttgccagcgattcggtcgggaactctagggagactgccggtgacaaaccggaggaaggtggggacgacgtcaagtcatcatggcccttacgggtagggctacacacgtgctacaatggcaggtacaaagggtcgcaagacggcgacgtggagctaatcccagaaagcctgcctcagtccggatcggagtctgcaactcgactccgtgaagtcggaatcgctagtaatcgtgaatcagaatgtcacggtgaatacgttcccgggccttgtacacaccgcccgtcacaccatgggagtggactgcaccagaagtggttagcctaacttcggagggcgatcaccacggtgtggttcatgactggggtg

SEQ ID NO: 1577 - DNA, 1455 bp, Halomonas meridiana
attgaacgctggcggcaggcctaacacatgcaagtcgagcggtaacagatccagcttgctggatgctgacgagcggcggacgggtgagtaatgcataggaatctgcccgatagtgggggataacctggggaaacccaggctaataccgcatacgtcctacgggagaaagggggctccggctcccgctatgggatgagcctatgtcggattagctagttggtgaggtaacggctcaccaaggccacgatccgtagctggtctgagaggatgatcagccacatcgggactgagacacggcccgaactcctacgggaggcagcagtggggaatattggacaatgggggcaaccctgatccagccatgccgcgtgtgtgaagaaggccctcgggttgtaaagcactttcagcgaggaagaacgcctagcggttaatacccgctaggaaagacatcactcgcagaagaagcaccggctaactccgtgccagcagccgcggtaatacggagggtgcaagcgttaatcggaattactgggcgtaaagcgcgcgtaggtggcttgataagccggttgtgaaagccccgggctcaacctgggaacggcatccggaactgtcaagctagagtgcaggagaggaaggtagaattcccggtgtagcggtgaaatgcgtagagatcgggaggaataccagtggcgaaggcggccttctggactgacactgacactgaggtgcgaaagcgtgggtagcaaacaggattagataccctggtagtccacgccgtaaacgatgtcgaccagccgttgggtgcctagcgcactttgtggcgaagttaacgcgataagtcgaccgcctggggagtacggccgcaaggttaaaactcaaatgaattgacgggggcccgcacaagcggtggagcatgtggtttaattcgatgcaacgcgaagaaccttacctactcttgacatcctgcgaatttggtagagataccttagtgccttcgggaacgcagagacaggtgctgcatggctgtcgtcagctcgtgttgtgaaatgttgggttaagtcccgtaacgagcgcaacccttgtccttatttgccagcgcgtaatggcgggaactctaaggagactgccggtgacaaaccggaggaaggtggggacgacgtcaagtcatcatggcccttacgagtagggctacacacgtgctacaatggtcggtacaaagggttgccaactcgcgagagtgagccaatcccgaaaagccgatctcagtccggatcggagtctgcaactcgactccgtgaagtcggaatcgctagtaatcgtggatcagaatgccacggtgaatacgttcccgggccttgtacacaccgcccgtcacaccatgggagtggactgcaccagaagtggttagcctaacgcaagagggcgatcaccacggtgtggttcatgactggggtg

SEQ ID NO: 1578 - DNA, 1463 bp, Halomonas muralis
  misc_feature (990)..(990): n is a, c, g, or t
attgaacgctggcggcaggcctaacacatgcaagtcgagcggcagcacgggaagcttgcttcctggtggcgagcggcggacgggtgagtaatgcataggaatctgcccggtagtgggggataacctggggaaacccaggctaataccgcatacgtcctacgggagaaagcgggggctcttcggacctcgcgctatcggatgagcctatgtcggattagctggttggtgaggtaacggctcaccaaggcgacgatccgtagctggtctgagaggatgatcagccacactgggactgagacacggcccagactcctacgggaggcagcagtggggaatattggacaatgggggcaaccctgatccagccatgccgcgtgtgtgaagaaggctttcgggttgtaaagcactttcagtggggaagaaggcttgccggtcaatacccggtaagaaggacatcacccacagaagaagcaccggctaactccgtgccagcagccgcggtaatacggagggtgcgagcgttaatcggaattactgggcgtaaagcgcgcgtaggtggcgtgataagccggttgtgaaagccccgggctcaacctgggaacggcatccggaactgtcaggctagagtgcaggagaggaaggtagaattcccggtgtagcggtgaaatgcgtagagatcgggaggaataccagtggcgaaggcggccttctggactgacactgacactgaggtgcgaaagcgtgggtagcaaacaggattagataccctggtagtccacgccgtaaacgatgtcgactagccgttgggttccttgagaacttagtggcgcagttaacgcgataagtcgaccgcctggggagtacggccgcaaggttaaaactcaaatgaattgacgggggcccgcacaagcggtggagcatgtggtttaattcgatgcaacgcgaagaaccttacctacccttgacatcctcggaagccaaaagagattntggtgtgccttcgggaaccgagagacaggtgctgcatggctgtcgtcagctcgtgttgtgaaatgttgggttaagtcccgtaacgagcgcaacccctgtccctatttgccagcacgtaacggtgggaactctagggagactgccggtgacaaaccggaggaaggtggggacgacgtcaagtcatcatggcccttacgggtagggctacacacgtgctacaatggccggtacaaagggacgcaagacggcgacgtggagcgaatcccagaaagccggcctcagttcggatcggagtctgcaactcgactccgtgaagtcggaatcgctagtaatcgtgaatcagaatgtcacggtgaatacgttcccgggccttgtacacaccgcccgtcacaccatgggagtggactgcaccagaagtggttagcttaaccttcgggagagcgatcaccacggtgtggttcatgactggggtg

SEQ ID NO: 1579 - DNA, 1455 bp, Halomonas nigrificans
attgaacgctggcggcaggcctaacacatgcaagtcgagcggtaacaggggtagcttgctacccgctgacgagcggcggacgggtgagtaatgcataggaatctgcccggtagtgggggataacctggggaaacccaggctaataccgcatacgtcctacgggagaaagggggcttcggctcccgctattggatgagcctatgtcggattagctagttggtgaggtaatggctcaccaaggcgacgatccgtagctggtctgagaggatgatcagccacatcgggactgagacacggcccgaactcctacgggaggcagcagtggggaatattggacaatgggcggaagcctgatccagccatgccgcgtgtgtgaagaaggccttcgggttgtaaagcactttcagcgaggaagaacgcctagtggttaatacccattaggaaagacatcactcgcagaagaagcaccggctaactccgtgccagcagccgcggtaatacggagggtgcgagcgttaatcggaattactgggcgtaaagcgcgcgtaggtggcttgataagccggttgtgaaagccccgggctcaacctgggaacggcatccggaactgtcaagctagagtgcaggagaggaaggtagaattcccggtgtagcggtgaaatgcgtagagatcgggaggaataccagtggcgaaggcggccttctggactgacactgacactgaggtgcgaaagcgtgggtagcaaacaggattagataccctggtagtccacgccgtaaacgatgtcgaccagccgttgggtgcctagcgcactttgtggcgaagttaacgcgataagtcgaccgcctggggagtacggccgcaaggttaaaactcaaatgaattgacgggggcccgcacaagcggtggagcatgtggtttaattcgatgcaacgcgaagaaccttacctactcttgacatctacagaagccggaagagattctggtgtgccttcgggaactgtaagacaggtgctgcatggctgtcgtcagctcgtgttgtgaaatgttgggttaagtcccgtaacgagcgcaacccttgtccttatttgccagcgcgtaatggcgggaactctaaggagactgccggtgacaaaccggaggaaggtggggacgacgtcaagtcatcatggcccttacgagtagggctacacacgtgctacaatggccggtacaaagggttgcgagctcgcgagagtcagctaatcccgaaaagccggtctcagtccggatcggagtctgcaactcgactccgtgaagtcggaatcgctagtaatcgtgaatcagaatgtcacggtgaatacgttcccgggccttgtacacaccgcccgtcacaccatgggagtggactgcaccagaagtggttagcctaacgcaagagggcgatcaccacggtgtggttcatgactggggtg

SEQ ID NO: 1580 - DNA, 1441 bp, Halomonas nitroreducens
gaacgctggcggcaggcctaacacatgcaagtcgagcggaaacgatggaagcttgcttccaggcgtcgagcggcggacgggtgagtaatgcataggaatctgcccggtagtgggggataacctgaggaaactcaggctaataccgcatacgccctacgggggaaagcaggggatcttcggaccttgcgctatcggatgagcctatgtcggattagcttgttggtgaggtaatggctcaccaaggccgcgatccgtagctggtctgagaggatgatcagccacatcgggactgagacacggcccgaactcctacgggaggcagcagtggggaatattggacaatgggcgaaagcctgatccagccatgccgcgtgtgtgaagaaggccttcgggttgtaaagcactttcagtgaggaagaacgcctctgggctaataccccagagggaagacatcactcacagaagaagcaccggctaactccgtgccagcagccgcggtaatacggagggtgcgagcgttaatcggaattactgggcgtaaagcgcgcgtaggcggcgtgataagccggttgtgaaagccccgggctcaacctgggaacggcatccggaactgtcaggctagagtgcaggagaggaaggtagaattcccggtgtagcggtgaaatgcgtagagatcgggaggaataccagtggcgaaggcggccttctggactgacactgacgctgaggtgcgaaagcgtgggtagcaaacaggattagataccctggtagtccacgccgtaaacgatgtcgactagccgttggggtccttgagacctttgtggcgcagttaacgcgataagtcgaccgcctggggagtacggccgcaaggttaaaactcaaatgaattgacgggggcccgcacaagcggtggagcatgtggtttaattcgatgcaacgcgaagaaccttacctacccttgacatcgtgcgaactttccagagatggattggtgccttcgggaacgcacagacaggtgctgcatggctgtcgtcagctcgtgttgtgaaatgttgggttaagtcccgtaacgagcgcaacccttgtccctatttgccagcgattcggtcgggaactctagggagactgccggtgacaaaccggaggaaggtggggacgacgtcaagtcatcatggcccttacgggtagggctacacacgtgctacaatggtcggtacaatgggttgcaaagccgcgaggtggagctaatcccataaagccggtctcagtccggatcggagtctgcaactcgactccgtgaagtcggaatcgctagtaatcgtgaatcagaatgtcacggtgaatacgttcccgggccttgtacacaccgcccgtcacaccatgggagtggactgcaccagaagtggttagcctaacttcggagggcgatcaccacggtgtg

SEQ ID NO: 1581 - DNA, 1456 bp, Halomonas olivaria
  misc_feature (229)..(229): n is a, c, g, or t
  misc_feature (234)..(234): n is a, c, g, or t
attgaacgctggcggcaggcctaacacatgcaagtcgagcggtaacagatctagcttgctagatgctgacgagcggcggacgggtgagtaatgcataggaatctgcccgatagtgggggataacctggggaaacccaggctaataccgcatacgtcctacgggagaaagggggcttcggctcccgctattggatgagcctatgtcggattagctagttggtaaggtaanggctnaccaaggcaacgatccgtagctggtctgagaggatgatcagccacatcgggactgagacacggcccgaactcctacgggaggcagcagtggggaatattggacaatggggggaaccctgatccagccatgccgcgtgtgtgaagaaggccctcgggttgtaaagcacctttcagcgaggaagaacgcctagtggttaatacccattaggaaagacatcactcgcagaagaagcaccggctaactccgtgccagcagccgcggtaatacggagggtgcaagcgttaatcggaattactgggcgtaaagcgcgcgtaggtggcttgataagccggttgtgaaagccccgggctcaacctgggaacggcatccggaactgtcaggctagagtgcaggagaggaaggtagaattcccggtgtagcggtgaaatgcgtagagatcgggaggaataccagtggcgaaggcggccttctggactgacactgacactgaggtgcgaaagcgtgggtagcaaacaggattagataccctggtagtccacgccgtaaacgatgtcgaccagccgttgggtgcctagagcactttgtggcgaagttaacgcgataagtcgaccgcctggggagtacggccgcaaggttaaaactcaaatgaattgacgggggcccgcacaagcggtggagcatgtggtttaattcgatgcaacgcgaagaaccttacctacccttgacatctacagaagccggaagagattctggtgtgccttcgggaactgtaagacaggtgctgcatggctgtcgtcagctcgtgttgtgaaatgttgggttaagtcccgtaacgagcgcaacccttgtccttatttgccagcgagtaatgtcgggaactctaaggagactgccggtgacaaaccggaggaaggtggggacgacgtcaagtcatcatggcccttacgggtagggctacacacgtgctacaatggccggtacaaagggctgcgagcttgcgagagtcagcgaatcccttaaagccggtctcagtccggatcggagtctgcaactcgactccgtgaagtcggaatcgctagtaatcgtgaatcagaatgtcacggtgaatacgttcccgggccttgtacacaccgcccgtcacaccatgggagtggactgcaccagaagtggttagcctaacgcaagagggcgatcaccacggtgtggttcatgactggggtg

SEQ ID NO: 1582 - DNA, 1450 bp, Halomonas pacifica
  misc_feature (656)..(656): n is a, c, g, or t
  misc_feature (920)..(920): n is a, c, g, or t
  misc_feature (1169)..(1169): n is a, c, g, or t
  misc_feature (1231)..(1231): n is a, c, g, or t
ggcggcaggcctaacacatgcaagtcgagcggaaacgatggaagcttgcttccaggcgtcgagcggcggacgggtgagtaatgcataggaatctgcccgatagtgggggataacctggggaaactcaggctaataccgcatacgtcctacgggagaaagcaggggatcttcggaccttgcgctatcggatgagcctatgtcggattagctagttggtgaggtaacggctcaccaaggcgacgatccgtagctggtctgagaggatgatcagccacactgggactgagacacggcccagactcctacgggaggcagcagtggggaatattggacaatgggggaaaccctgatccagccatgccgcgtgtgtgaagaaggccttcgggttgtaaagcactttcagcgaggaagaaggcctgagggctaatacccttcaggaaggacatcactcgcagaagaagcaccggctaactccgtgccagcagccgcggtaatacggagggtgcgagcgttaatcggaattactgggcgtaaagcgcgcgtaggtggcttgataagccggttgtgaaagccccgggctcaacctgggaacggcatccggaactgtcaggctagagtgcaggagaggaaggtagaattcccggtgtagcggtganatgcgtagagatcgggaggaataccagtggcgaaggcggccttctggactgacactgacactgaggtgcgaaagcgtgggtagcaaacaggattagataccctggtagtccacgccgtaaacgatgtcggctagccgttggggtccttgagacctttgtggcgcagttaacgcgataagtcgaccgcctggggagtacggccgcaaggttaaaactcaaatgaattgacgggggcccgcacaagcggtggagcatgtggtttanttcgatgcaacgcgaggaaccttacctacccttgacatcgtgcgaactttccagagatggattggtgccttcgggaacgcacagacaggtgctgcatggctgtcgtcagctcgtgttgtgaaatgttgggttaagtcccgtaacgagcgcaacccttgtccctatttgccagcgattcggtcgggaactctagggagactgccggtgacaaaccggaggaaggtggggacgacgtcaagtcatcatggnccttacgggtagggctacacacgtgctacaatggtcggtacaaagggttgcaataccgcggngtggagctaatcccataaagccggtctcagtccggatcggagtctgcaactcgactccgtgaagtcggaatcgctagtaatcgtgaatcagaatgtcacggtgaatacgttcccgggccttgtacacaccgcccgtcacaccatgggagtggactgcaccagaagtggttagcctaacttcggagggcgatcaccacggtgtggttcatgactggggtg

SEQ ID NO: 1583 - DNA, 1460 bp, Halomonas pantelleriensis
attgaacgctggcggcaggcctaacacatgcaagtcgagcggcagcacgggaagcttgcttcctggtggcgagcggcggacgggtgagtaatgcataggaatctgcccgatagtgggggataacctggggaaactcaggctaataccgcatacgtcctacgggagaaagcaggggctcttcggaccttgcgctatcggatgagcctatgtcggattagctagttggtgaggtaatggctcaccaaggcgacgatccgtagctggtctgagaggatgatcagccacatcgggactgagacacggcccgaactcctacgggaggcagcagtggggaatattggacaatgggggcaaccctgatccagccatgccgcgtgtgtgaagaaggccttcgggttgtaaagcactttcagtgaggaagaaggcctcgggcttaatacgtccgagggaggacatcactcacagaagaagcaccggctaactccgtgccagcagccgcggtaatacggagggtgcgagcgttaatcggaattactgggcgtaaagcgcgcgtaggtggcgtgataagccggttgtgaaagccccgggctcaacctgggaacggcatccggaactgtcatgctagagtgcaggagaggaaggtagaattcccggtgtagcggtgaaatgcgtagagatcgggaggaataccagtggcgaaggcggccttctggactgacactgacactgaggtgcgaaagcgtgggtagcaaacaggattagataccctggtagtccacgccgtaaacgatgtcgactagccgttgggagcctcgagttcttagtggcgcagttaacgcgataagtcgaccgcctggggagtacggccgcaaggttaaaactcaaatgaattgacgggggcccgcacaagcggtggagcatgtggtttaattcgatgcaacgcgaagaaccttacctacccttgacatcttcggaagccgagagagatcttggtgtgccttcgggaaccgaaagacaggtgctgcatggctgtcgtcagctcgtgttgtgaaatgttgggttaagtcccgtaacgagcgcaacccctgtccctatttgccagcgattcggtcgggaactctagggagactgccggtgacaaaccggaggaaggtggggacgacgtcaagtcatcatggcccttacgggtagggctacacacgtgctacaatggcaggtacaaagggttgcaagacggcgacgtggagctaatcccataaagcctgcctcagtccggatcggagtctgcaactcgactccgtgaagtcggaatcgctagtaatcgtgcatcagaatggcacggtgaatacgttcccgggccttgtacacaccgcccgtcacaccatgggagtggactgcaccagaagtggttagcctaacttcggagggcgatcaccacggtgtggttcatgactggggtg

SEQ ID NO: 1584 - DNA, 1407 bp, Halomonas saccharevitans
tgcaagtcgagcggaacgatcctagcttgctaggaggcgtcgagcggcggacgggtgagtaatgcataggaatctgcccggtagtgggggataacctggggaaacccaggctaataccgcatacgccctacgggggaaagcaggggatcttcggaccttgcgctatcggatgagcctatgtcggattagcttgttggtgaggtaatggctcaccaaggcgacgatccgtagctggtctgagaggatgatcagccacatcgggactgagacacggcccgaactcctacgggaggcagcagtggggaatattggacaatgggcgaaagcctgatccagccatgccgcgtgtgtgaagaaggctttcgggttgtaaagcactttcagtgaggaagaatgccttgggcttaatacgcccgaggaaagacatcactcacagaagaagcaccggctaactccgtgccagcagccgcggtaatacggagggtgcgagcgttaatcggaattactgggcgtaaagcgcgcgtaggtggcttgataagccggttgtgaaagccccgggctcaacctgggaacggcatccggaactgtcaggctagagtgcaggagaggaaggtagaattcccggtgtagcggtgaaatgcgtagagatcgggaggaataccagtggcgaaggcggccttctggactgacactgacactgaggtgcgaaagcgtgggtagcaaacaggattagataccctggtagtccacgccgtaaacgatgtcgactagccgttggggtcctagagacctttgtggcgcagttaacgcgataagtcgaccgcctggggagtacggccgcaaggttaaaactcaaatgaattgacgggggcccgcacaagcggtggagcatgtggtttaattcgatgcaacgcgaagaaccttacctacccttgacatcgtgcgaactttccagagatggattggtgccttcgggagcgcacagacaggtgctgcatggctgtcgtcagctcgtgttgtgaaatgttgggttaagtcccgtaacgagcgcaacccttgtccttatttgccagcacgtaatggtgggaactctagggagactgccggtgacaaaccggaggaaggtggggacgacgtcaagtcatcatggcccttacgggtagggctacacacgtgctacaatggccggtacaatgggttgcaaagccgcgaggtggagctaatcccataaagccggtctcagtccggatcggagtctgcaactcgactccgtgaagtcggaatcgctagtaatcgtgaatcagaatgtcacggtgaatacgttcccgggccttgtacacaccgcccgtcacaccatgggagtggactgcaccagaagtggttagcttaacttcggagagcgatcac

SEQ ID NO: 1585 - DNA, 1460 bp, Halomonas shengliensis
attgaacgctggcggcaggcctaacacatgcaagtcgagcggaaacgatcctagcttgctaggaggcgtcgagcggcggacgggtgagtaacgcataggaatctgcccggtagtgggggataacctggggaaacccaggctaataccgcatacgtcctacgggagaaagcaggggatcttcggaccttgcgctatcggatgagcctatgtcggattagctggttggtgaggtaatggctcaccaaggcgacgatccgtagctggtctgagaggatgatcagccacatcgggactgagacacggcccgaactcctacgggaggcagcagtggggaatattggacaatgggcgcaagcctgatccagccatgccgcgtgtgtgaagaaggccttcgggttgtaaagcactttcagtggggaagaaatcctcggggctaataccctcgagggaggacatcacccacagaagaagcaccggctaactccgtgccagcagccgcggtaatacggagggtgcgagcgttaatcggaattactgggcgtaaagcgcgcgtaggcggcctgataagccggttgtgaaagccccgggctcaacctgggaacggcatccggaactgtcaggctagagtgcaggagaggaaggtagaattcccggtgtagcggtgaaatgcgtagagatcgggaggaataccagtggcgaaggcggccttctggactgacactgacgctgaggtgcgaaagcgtgggtagcaaacaggattagataccctggtagtccacgccgtaaacgatgtcgactagccgttggggtccttgagacctttgtggcgcagttaacgcgataagtcgaccgcctggggagtacggccgcaaggttaaaactcaaatgaattgacgggggcccgcacaagcggtggagcatgtggtttaattcgatgcaacgcgaagaaccttacctacccttgacatcgagagaacttggcagagatgccttggtgccttcgggaactctcagacaggtgctgcatggccgtcgtcagctcgtgttgtgaaatgttgggttaagtcccgtaacgagcgcaatccttgtccctatttgccagcgattcggtcgggaactctagggagactgccggtgacaaaccggaggaaggtggggacgacgtcaggtcatcatggcccttacgggtagggctacacacgtgctacaatggccggtacaaagggttgcgaagccgcgaggtggagccaatcccgaaaagccggtctcagtccggatcggagtctgcaactcgactccgtgaagtcggaatcgctagtaatcgtgaatcagaatgtcacggtgaatacgttcccgggccttgtacacaccgcccgtcacaccatgggagtggactgcaccagaagtggttagcctaacttcggagggcgatcaccacggtgtggttcatgactggggtg

SEQ ID NO: 1586 - DNA, 1460 bp, Halomonas smyrnensis
attgaacgctggcggcaggcctaacacatgcaagtcgagcggaaacgatcctagcttgctaggaggcgtcgagcggcggacgggtgagtaatgcataggaatctgcccggtagtgggggataacttgaggaaactcaagctaataccgcatacgccccaagggggaaagcaggggatcttcggaccttgcgctatcggatgagcctatgtcggattagctagttggtgaggtaatggctcaccaaggccgcgatccgtagctggtctgagaggatgatcagccacatcgggactgagacacggcccgaactcctacgggaggcagcagtggggaatattggacaatgggcgaaagcctgatccagccatgccgcgtgtgtgaagaaggccttcgggttgtaaagcactttcagcgaggaagaacgcttgtgggttaataccccgcaagaaggacatcactcgcagaagaagcaccggctaactccgtgccagcagccgcggtaatacggagggtgcaagcgttaatcggaattactgggcgtaaagcgcgcgtaggcggcttgataagccggttgtgaaagccccgggctcaacctgggaacggcatccggaactgtcaggctagagtgcaggagaggaaggtagaattcccggtgtagcggtgaaatgcgtagagatcgggaggaataccagtggcgaaggcggccttctggactgacactgacgctgaggtgcgaaagcgtgggtagcaaacaggattagataccctggtagtccacgccgtaaacgatgtcgactagccgttggggtcctcgagacctttgtggcgcagttaacgcgataagtcgaccgcctggggagtacggccgcaaggttaaaactcaaatgaattgacgggggcccgcacaagcggtggagcatgtggtttaattcgatgcaacgcgaagaaccttacctactcttgacatcgagcgaactttccagagatggattggtgccttcgggaacgctcagacaggtgctgcatggccgtcgtcagctcgtgttgtgaaatgttgggttaagtcccgtaacgagcgcaacccttgtccctatttgccagcgattcggtcgggaactctagggagactgccggtgacaaaccggaggaaggtggggacgacgtcaggtcatcatggcccttacgagtagggctacacacgtgctacaatggccggtacaatgggctgcaatcccgcgagggggagctaatctcataaagccggtctcagtccggatcggagtctgcaactcgactccgtgaagtcggaatcgctagtaatcgtgcatcagaatggcacggtgaatacgttcccgggccttgtacacaccgcccgtcacaccatgggagtggactgcaccagaagtggttagcctaacttcggagggcgatcaccacggtgtggttcatgactggggtg

SEQ ID NO: 1587 - DNA, 1410 bp, Halomonas songnenensis
acacatgcagtcgagcggtaacaggtctagcttgctagacgctgacgagcggcggacgggtgagtaatgcataggaatctgcccgatagtgggggataacctggggaaacccaggctaataccgcatacgtcctacgggagaaagggggcttcggctcccgctatcggatgagcctatgtcggattagctagttggtgaggtaaaggctcaccaaggcgacgatccgtagctggtctgagaggatgatcagccacatcgggactgagacacggcccgaactcctacgggaggcagcagtggggaatattggacaatgggggcaaccctgatccagccatgccgcgtgtgtgaagaaggccttagggttgtaaagcactttcagcgaggaagaacgcctggcggttaatacccgccaggaaagacatcactcgcagaagaagcaccggctaactccgtgccagcagccgcggtaatacggagggtgcaagcgttaatcggaattactgggcgtaaagcgcgcgtaggtggcttgataagccggttgtgaaagccccgggctcaacctgggaacggcatccggaactgtcaggctagagtgcaggagaggaaggtagaattcccggtgtagcggtgaaatgcgtagagatcgggaggaataccagtggcgaaggcggccttctggactgacactgacactgaggtgcgaaagcgtgggtagcaaacaggattagataccctggtagtccacgccgtaaacgatgtcgaccagccgttgggtgcctagcgcactttgtggcgaagttaacgcgataagtcgaccgcctggggagtacggccgcaaggttaaaactcaaatgaattgacgggggcccgcacaagcggtggagcatgtggtttaattcgatgcaacgcgaagaaccttacctacccttgacatcctgcgaattcgtgagagatcacttagtgccttcgggaacgcagagacaggtgctgcatggctgtcgtcagctcgtgttgtgaaatgttgggttaagtcccgtaacgagcgcaacccttgtccttatttgccagcacgtaatggtgggaactctaaggagactgccggtgacaaaccggaggaaggtggggacgacgtcaagtcatcatggcccttacgggtagggctacacacgtgctacaatggccggtacaaagggttgccaactcgcgagagtgagccaatcccgaaaagccggtctcagtccggatcggagtctgcaactcgactccgtgaagtcggaatcgctagtaatcgtggatcagaatgccacggtgaatacgttcccgggccttgtacacaccgcccgtcacaccatgggagtggactgcaccagaagtggttagcctaacgcaagagggcgatcaccacg

SEQ ID NO: 1588 - DNA, 1455 bp, Halomonas stevensii
attgaacgctggcggcaggcctaacacatgcaagtcgagcggtaacagggggtgcttgcaccccgctgacgagcggcggacgggtgagtaatgcataggaatctgcccgatagtgggggataacctggggaaacccaggctaataccgcatacgtcctacgggagaaagggggctccggctcccgctatcggatgagcctatgtcggattagctggttggtgaggtaaaggctcaccaaggcgacgatccgtagctggtctgagaggatgatcagccacatcgggactgagacacggcccgaactcctacgggaggcagcagtggggaatattggacaatggggggaaccctgatccagccatgccgcgtgtgtgaagaaggccctcgggttgtaaagcactttcagtgaggaagaacgcctggtggttaatacccatcaggaaagacatcactcacagaagaagcaccggctaactccgtgccagcagccgcggtaatacggagggtgcgagcgttaatcggaattactgggcgtaaagcgcgcgtaggtggcttgataagccggttgtgaaagccccgggctcaacctgggaacggcatccggaactgtcaagctagagtgcaggagaggaaggtagaattcccggtgtagcggtgaaatgcgtagagatcgggaggaataccagtggcgaaggcggccttctggactgacactgacactgaggtgcgaaagcgtgggtagcaaacaggattagataccctggtagtccacgccgtaaacgatgtcgaccagccgttgggtgcctagcgcactttgtggcgaagttaacgcgataagtcgaccgcctggggagtacggccgcaaggttaaaactcaaatgaattgacgggggcccgcacaagcggtggagcatgtggtttaattcgatgcaacgcgaagaaccttacctactcttgacatcctgcgaacttgtgagagatcacttggtgccttcgggaacgcagagacaggtgctgcatggctgtcgtcagctcgtgttgtgaaatgttgggttaagtcccgtaacgagcgcaacccttgtccttatttgccagcgcgtaaaggcgggaactctaaggagactgccggtgacaaaccggaggaaggtggggacgacgtcaagtcatcatggcccttacgagtagggctacacacgtgctacaatggtcggtacaaagggttgccaactcgcgagagtgagccaatcccgaaaagccgatctcagtccggatcggagtctgcaactcgactccgtgaagtcggaatcgctagtaatcgtggatcagaatgccacggtgaatacgttcccgggccttgtacacaccgcccgtcacaccatgggagtggactgcaccagaagtggttagcctaacgcaagagggcgatcaccacggtgtggttcatgactggggtg

SEQ ID NO: 1589 - DNA, 1381 bp, Halomonas subterranea
agtcgagcggtaacaggtccagcttgctggatgctgacgagcggcggacgggtgagtaacgcataggaatctacccggtagtgggggataacctggggaaacccaggctaataccgcatacgtcctacgggagaaagggggcttaggctcccgctattggatgagcctatgccggattagctggttggtgaggtaatggctcaccaaggcgacgatccgtagctggtctgagaggatgatcagccacatcgggactgagacacggcccgaactcctacgggaggcagcagtggggaatattggacaatgggggcaaccctgatccagccatgccgcgtgtgtgaagaaggccctcgggttgtaaagcactttcagcgaggaagaacgcctgtcggttaatacccggtaggaaagacatcactcgcagaagaagcaccggctaactccgtgccagcagccgcggtaatacggagggtgcaagcgttaatcggaattactgggcgtaaagcgcgcgtaggtggcttgataagccggttgtgaaagccccgggctcaacctgggaacggcatccggaactattaggctagagtgcaggagaggaaggtagaattcccggtgtagcggtgaaatgcgtagagatcgggaggaataccagtggcgaaggcggccttctggactgacactgacactgaggtgcgaaagcgtgggtagcaaacaggattagataccctggtagtccacgccgtaaacgatgtcgaccagccgttgggtgcctagcgcactttgtggcgaagttaacgcgataagtcgaccgcctggggagtacggccgcaaggttaaaactcaaatgaattgacgggggcccgcacaagcggtggagcatgtggtttaattcgatgcaacgcgaagaaccttacctacccttgacatcctgcgaacttgtgagagatcacttggtgccttcgggagcgcagagacaggtgctgcatggctgtcgtcagctcgtgttgtgaaatgttgggttaagtcccgtaacgagcgcaacccttgtccctatttgccagcgattcggtcgggaactctagggagactgccggtgacaaaccggaggaaggtggggacgacgtcaagtcatcatggcccttacgggtagggctacacacgtgctacaatggccggtacaaagggcggcgagctcgcgagagtcagcgaatcccttaaagccggtctcagtccggatcggagtctgcaactcgactccgtgaagtcggaatcgctagtaatcgtgcatcagaatggcacggtgaatacgttcccgggccttgtacacaccgcccgtcacaccatgggagtggactgcaccagaagtggttagcctaac

SEQ ID NO: 1590 - DNA, 1430 bp, Halomonas sulfidaeris
  misc_feature (463)..(463): n is a, c, g, or t
taacacatgcaagtcgagcggtaacaggtccttcgggatgctgacgagcggcggacgggtgagtaatgcataggaatctgcccggtagtgggggataacctggggaaacccaggctaataccgcatacgtcctacgggagaaagggggctccggctcccgctattggatgagcctatgtcggattagctagttggtgaggtaatggctcaccaaggcaacgatccgtagctggtctgagaggatgatcagccacatcgggactgagacacggcccgaactcctacgggaggcagcagtggggaatattggacaatgggggcaaccctgatccagccatgccgcgtgtgtgaagaaggccctcgggttgtaaagcactttcagcgaggaagaacgcctggcggttaatacccgccaggaaagacatcactcgcagaagaagcaccggctaactccgtgccagcngccgcggtaatacggagggtgcaagcgttaatcggaattactgggcgtaaagcgcgcgtaggtggcttgataagccggttgtgaaagccccgggctcaacctgggaacggcatccggaactgtcaggctagagtgcaggagaggaaggtagaattcccggtgtagcggtgaaatgcgtagagatcgggaggaataccagtggcgaaggcggccttctggactgacactgacactgaggtgcgaaagcgtgggtagcaaacaggattagataccctggtagtccacgccgtaaacgatgtcgaccagccgttgggtgcctagcgcactttgtggcgaagttaacgcgataagtcgaccgcctggggagtacggccgcaaggttaaaactcaaatgaattgacgggggcccgcacaagcggtggagcatgtggtttaattcgatgcaacgcgaagaaccttacctacccttgacatcctgcgaacccggaagagattccggggtgccttcgggaacgcagagacaggtgctgcatggctgtcgtcagctcgtgttgtgaaatgttgggttaagtcccgtaacgagcgcaacccttgtccttatttgccagcgagtaatgtcgggaactctaaggagactgccggtgacaaaccggaggaaggtggggacgacgtcaagtcatcatggcccttacgggtagggctacacacgtgctacaatggccggtacaaagggctgcgagctcgcgagagtcagcgaatcccttaaagccggtctcagtccggatcggagtctgcaactcgactccgtgaagtcggaatcgctagtaatcgtgaatcagaatgtcacggtgaatacgttcccgggccttgtacacaccgcccgtcacaccatgggagtggactgcaccagaagtggttagcctaacgcaagagggcgatcaccacggtgtggttcatgactggggtg

SEQ ID NO: 1591 - DNA, 1407 bp, Halomonas taeanensis
agcggaaacgatcctagcttgctaggaggcgtcgagcggcggacgggtgagtaatgcataggaatctgcccggtagtgggggataacgtggggaaactcacgctaataccgcatacgccctacgggggaaagcaggggatcttcggaccttgcgctatcggatgagcctatgtcggattagcttgttggtgaggtaatggctcaccaaggcgacgatccgtagctggtctgagaggatgatcagccacactgggactgagacacggcccagactcctacgggaggcagcagtggggaatattggacaatgggggaaaccctgatccagccatgccgcgtgtgtgaagaaggctttcgggttgtaaagcactttcagcgaggaagaaggcctgacggttaatacctgtcaggaaggacatcactcgcagaagaagcaccggctaactccgtgccagcagccgcggtaatacggagggtgcaagcgttaatcggaattactgggcgtaaagcgcgcgtaggtggcttgataagccggttgtgaaagccccgggctcaacctgggaactgcatccggaactgtcaggctagagtgcaggagaggaaggtagaattcccggtgtagcggtgaaatgcgtagagatcgggaggaataccagtggcgaaggcggccttctggactgacactgacactgaggtgcgaaagcgtgggtagcaaacaggattagataccctggtagtccacgccgtaaacgatgtcgactagccgttgggagcctcgagttcttagtggcgcagttaacgcaataagtcgaccgcctggggagtacggccgcaaggttaaaactcaaatgaattgacgggggcccgcacaagcggtggagcatgtggtttaattcgatgcaacgcgaagaaccttacctactcttgacatcgtgcgaactttccagagatggattggtgccttcgggagcgcacagacaggtgctgcatggctgtcgtcagctcgtgttgtgaaatgttgggttaagtcccgtaacgagcgcaacccctatccttatttgccagcgagtaatgtcgggaactctaaggagactgccggtgacaaaccggaggaaggtggggatgacgtcaagtcatcatggcccttacgagtagggctacacacgtgctacaatggcaggtacaaagggttgcaagacggcgacgtggagctattcccataaagcctgcctcagtccggatcggagtctgcaactcgactccgtgaagtcggaatcgctagtaatcgtgaatcagaatgtcacggtgaatacgttcccgggccttgtacacaccgcccgtcacaccatgggagtggactgcaccagaagtggttagcttaacctttcgggggagcgatcaccacgg

SEQ ID NO: 1592 - DNA, 1455 bp, Halomonas titanicae
attgaacgctggcggcaggcctaacacatgcaagtcgagcggtaacaggggtagcttgctacccgctgacgagcggcggacgggtgagtaatgcataggaatctgcccgatagtgggggataacctggggaaacccaggctaataccgcatacgtcctacgggagaaagggggcttcggctcccgctattggatgagcctatgtcggattagctagttggtaaggtaatggcttaccaaggcaacgatccgtagctggtctgagaggatgatcagccacatcgggactgagacacggcccgaactcctacgggaggcagcagtggggaatattggacaatgggggcaaccctgatccagccatgccgcgtgtgtgaagaaggccctcgggttgtaaagcactttcagcgaggaagaacgcctatcggttaatacccggtaggaaagacatcactcgcagaagaagcaccggctaactccgtgccagcagccgcggtaatacggagggtgcaagcgttaatcggaattactgggcgtaaagcgcgcgtaggtggcttgataagccggttgtgaaagccccgggctcaacctgggaacggcatccggaactgtcaggctagagtgcaggagaggaaggtagaattcccggtgtagcggtgaaatgcgtagagatcgggaggaataccagtggcgaaggcggccttctggactgacactgacactgaggtgcgaaagcgtgggtagcaaacaggattagataccctggtagtccacgccgtaaacgatgtcgaccagccgttgggtgcctagagcactttgtggcgaagttaacgcgataagtcgaccgcctggggagtacggccgcaaggttaaaactcaaatgaattgacgggggcccgcacaagcggtggagcatgtggtttaattcgatgcaacgcgaagaaccttacctacccttgacatctacagaagccggaagagattctggtgtgccttcgggaactgtaagacaggtgctgcatggctgtcgtcagctcgtgttgtgaaatgttgggttaagtcccgtaacgagcgcaacccttgtccttatttgccagcgagtaatgtcgggaactctaaggagactgccggtgacaaaccggaggaaggtggggacgacgtcaagtcatcatggcccttacgggtagggctacacacgtgctacaatggccggtacaaagggctgcgagctcgcgagagtcagcgaatcccttaaagccggtctcagtccggatcggagtctgcaactcgactccgtgaagtcggaatcgctagtaatcgtgaatcagaatgtcacggtgaatacgttcccgggccttgtacacaccgcccgtcacaccatgggagtggactgcaccagaagtggttagcctaacgcaagagggcgatcaccacggtgtggttcatgactggggtg

SEQ ID NO: 1593 - DNA, 1395 bp, Halomonas ventosae
ggccgacacatgcaagtcgagcggaaacgatggagcttgctccaggcgtcgagcggcggacgggtgagtaatgcataggaatctgcccggtagtgggggataacctggggaaacccaggctaataccgcatacgtcctacgggagaaagcaggggatcttcggaccttgcgctatcggatgagcctatgtcggattagcttgttggtgaggtaatggctcaccaaggcgacgatccgtagctggtctgagaggatgatcagccacatcgggactgagacacggcccgaactcctacgggaggcagcagtggggaatattggacaatgggcgaaagcctgatccagccatgccgcgtgtgtgaagaaggctttcgggttgtaaagcactttcagtgaggaagaaggccttggggctaatacccccgaggaaggacatcactcacagaagaagcaccggctaactccgtgccagcagccgcggtaatacggagggtgcgagcgttaatcggaattactgggcgtaaagcgcgcgtaggcggcgtgataagccggttgtgaaagccccgggctcaacctgggaacggcatccggaactgtcaggctagagtgcaggagaggaaggtagaattcccggtgtagcggtgaaatgcgtagagatcgggaggaataccagtggcgaaggcggccttctggactgacactgacgctgaggtgcgaaagcgtgggtagcaaacaggattagataccctggtagtccacgccgtaaacgatgtcgactagccgttggggtccttgagacctttgtggcgcagttaacgcgataagtcgaccgcctggggagtacggccgcaaggttaaaactcaaatgaattgacgggggcccgcacaagcggtggagcatgtggtttaattcgatgcaacgcgaagaaccttacctacccttgacatcgtgcgaactttccagagatggattggtgccttcgggagcgcacagacaggtgctgcatggctgtcgtcagctcgtgttgtgaaatgttgggttaagtcccgtaacgagcgcaacccttgtccctatttgccagcgattcggtcgggaactctagggagactgccggtgacaaaccggaggaaggtggggacgacgtcaagtcatcatggcccttacgggtagggctacacacgtgctacaatggccggtacaaagggttgcgaagccgcgaggtggagctaatcccgaaaagccggtctcagtccggatcggagtctgcaactcgactccgtgaagtcggaatcgctagtaatcgtgaatcagaatgtcacggtgaatacgttcccgggccttgtacacaccgcccgtcacaccatgggagtggactgcaccagaagggttagcct

SEQ ID NO: 1594 - DNA, 1457 bp, Halomonas venusta
attgaacgctggcggcaggcctaacacatgcaagtcgagcggtaacaggggtagcttgctacccgctgacgagcggcggacgggtgagtaatgcataggaatctgcccgatagtgggggataacctggggaaacccaggctaataccgcatacgtcctacgggagaaagggggcttcggctcccgctattggatgagcctatgtcggattagctagttggtgaggtaaaggctcaccaaggcgacgatccgtagctggtctgagaggatgatcagccacatcgggactgagacacggcccgaactcctacgggaggcagcagtggggaatattggacaatgggcgaaagcctgatccagccatgccgcgtgtgtgaagaaggccctcgggttgtaaagcactttcagcgaggaagaacgcctagtggttaatacccattaggaaagacatcactcgcagaagaagcaccggctaactccgtgccagcagccgcggtaatacggagggtgcaagcgttaatcggaattactgggcgtaaagcgcgcgtaggtggcttgataagccggttgtgaaagccccgggctcaacctgggaacggcatccggaactgtcaagctagagtgcaggagaggaaggtagaattcccggtgtagcggtgaaatgcgtagagatcgggaggaataccagtggcgaaggcggccttctggactgacactgacactgaggtgcgaaagcgtgggtagcaaacaggattagataccctggtagtccacgccgtaaacgatgtcgaccagccgttgggtgcctagcgcactttgtggcgaagttaacgcgataagtcgaccgcctggggagtacggccgcaaggttaaaactcaaatgaattgacgggggcccgcacaagcggtggagcatgtggtttaattcgatgcaacgcgaagaaccttacctactcttgacatcctgcgaacttgtgagagatcacttggtgccttcgggaacgcagagacaggtgctgcatggctgtcgtcagctcgtgttgtgaaatgttgggttaagtcccgtaacgagcgcaacccttgtccttatttgccagcgcgtaatggcgggaactctaaggagactgccggtgacaaaccggaggaaggtggggacgacgtcaagtcatcatggcccttacgagtagggctacacacgtgctacaatggccggtacaaagggttgcgagctcgcgagagtcagctaatcccgaaaagccggtctcagtccggatcggagtctgcaactcgactccgtgaagtcggaatcgctagtaatcgtgaatcagaatgtcacggtgaatacgttcccgggccttgtacacaccgcccgtcacaccatgggagtggactgcaccagaagtggttagcttaaccttcgggaaagcgatcaccacggtgtggttcatgactggggtg

SEQ ID NO: 1595 - DNA, 1460 bp, Halomonas xianhensis
attgaacgctggcggcaggcctaacacatgcaagtcgagcggcagcgggaggtgcttgcacctcgccggcgagcggcggacgggtgagtaatgcataggaaactgcccggtagtgggggataacctggggaaacccaggctaataccgcatacgtcctacgggagaaagcaggggctcttcggaccttgcgctatcggatgtgcctatgtcggattagctggttggtgaggtaacggctcaccaaggcgacgatccgtagctggtctgagaggatgatcagccacactgggactgagacacggcccagactcctacgggaggcagcagtggggaatattggacaatgggcgaaagcctgatccagccatgccgcgtgtgtgaagaaggctttcgggttgtaaagcactttcagtggggaagaaagcctggcggttaatacccgtcagggacgacatcacccacagaagaagcaccggctaactccgtgccagcagccgcggtaatacggagggtgcgagcgttaatcggaattactgggcgtaaagcgcgcgtaggcggcttgataagccgggtgtgaaagccctgggctcaacctgggaacggcatccggaactgtcaagctagagtgcaggagaggaaggtagaattcccggtgtagcggtgaaatgcgtagagatcgggaggaataccagtggcgaaggcggccttctggactgacactgacgctgaggtgcgaaagcgtgggtagcaaacaggattagataccctggtagtccacgccgtaaacgatgtcgactagccgttgggctcctcgcgagcttagtggcgcagttaacgcgataagtcgaccgcctggggagtacggccgcaaggttaaaactcaaatgaattgacgggggcccgcacaagcggtggagcatgtggtttaattcgatgcaacgcgaagaaccttacctacccttgacatcctcggaatccgccggagacggcggagtgccttcgggaaccgagtgacaggtgctgcatggctgtcgtcagctcgtgttgtgaaatgttgggttaagtcccgtaacgagcgcaacccttgtccctatttgccagcgattcggtcgggaactctagggagactgccggtgacaaaccggaggaaggtggggacgacgtcaagtcatcatggcccttacgggtagggctacacacgtgctacaatggcaggtacaaagggtcgcaagacggcgacgtggagctaatcccagaaagcctgcctcagtccggattggagtctgcaactcgactccatgaagtcggaatcgctagtaatcgtgaatcagaatgtcacggtgaatacgttcccgggccttgtacacaccgcccgtcacaccatgggagtggactgcaccagaagtggttagcctaacttcggagggcgatcaccacggtgtggttcatgactggggtg

SEQ ID NO: 1596 - DNA, 1469 bp, Halorhodospira halochloris
attgaacgctggcggcatgcctaacacatgcaagtcgagcggcagcgcggaagagcttgctcttctggcggcgagcggcggacgggtgagtaacgcgtgggaatctgccctttggtgggggatagcccggggaaacccggattaataccgcataagccctacgggggaaagtgggcctctgcttcaagctcacgccgaaggatgagcccgcgtccgattagctagttggtggggtaaaggcctaccaaggcgacgatcggtagctggcctgagagggtggtcagccacactgggactgagacacggcccagactcctacgggaggcagcagtggggaatattggacaatgggcgcaagcctgatccagcaatgccgcgtgtgtgaagaaggcctgcgggttgtaaagcactttcattggggaggaaagttgcacggttaatagctgtgcgagttgacgttacccaaagaagaagcgccggcaaacttcgtgccagcagccgcggtaatacgaagggcgcaagcgttaatcggaatcactgggcgtaaagggcgcgtaggcggctatgtaagtcggatgtgaaagccccgggctcaacctgggaattgcattcgatactgcgtagctagagtccggtagagggtagtggaattcccggtgtagcggtgaaatgcgtagatatcgggaggaacaccagtggcgaaggcgactgcctggaccgagactgacgctgaggcgcgaaagcgtggggagcaaacaggattagataccctggtagtccacgctgtaaacgctgaggactagctgttcggttcgcactagaactgagtggcgcagctaacgcattaagtcctccgcctggggagtacggccgcaaggctaaaactcaaaggaattgacgggggcccgcacaagcggtggagcatgtggtttaattcgatgcaacgcgaagaaccttaccggcccttgacatcctcggagccctctggagacggaggggtgccttcgggaaccgagtgacaggtgctgcatggctgtcgtcagctcgtgtcgtgagatgttgggttaagtcccgcaacgagcgcaacccttgtccttagttgccatcagtttagctgggcactctagggagactgccggtgacaaaccggaggaaggcggggacgacgtcaagtcatcatggcccttatgggccgggctacacacgtgctacaatggcgggtacagagggttgcgaagccgcgaggtggagctaatctcttaaagcccgtcctagtccggatcggagtctgcaactcgactccgtgaagcaggaatcgctagtaatcgcagatcagcaatgctgcggtgaatacgttcccgggccttgtacacaccgcccgtcacaccatgggagtcggctgcaccagaagtgcgtagtctaacccttcggggaggacgcgtaccacggtgtggtcggcgactggggtg

SEQ ID NO: 1597 - DNA, 1467 bp, Halorhodospira halophila
attgaacgctggcggcatgcctaacacatgcaagtcgagcggcagcgcggaggagcttgctcctctggcggcgagcggcggacgggtgagtaacgcgtgggaatttacccttcggtgggggatagcccggggaaactcggattaataccgcatacgccctacgggggaaagtgggcctctgattcaagctcacgccgaaggatgagcccgcgtccgattagctagttggtggggtaaaggcctaccaaggcgacgatcggtagctggtttgagaggatgatcagccacactgggactgagacacggcccagactcctacgggaggcagcagtggggaatattggacaatgggcgaaagcctgatccagcaatgccgcgtgtgtgaagaaggcctgcgggttgtaaagcactttcatcggggaggaaaagcgttgggttaataccctggcgtcttgacgttacccgaagaagaagcgccggcaaacttcgtgccagcagccgcggtaatacgaagggcgcaagcgttaatcggaatcactgggcgtaaagggcgcgtaggcggtcaggtaagtcgggtgtgaaagccctgggctcaacctaggaattgcatccgatactgcttgactagagttcggtagagggtagtggaattcccggtgtagcggtgaaatgcgtagatatcgggaggaacaccagtggcgaaggcgactgcctggaccgaaactgacgctgaggcgcgaaagcgtgggtagcaaacaggattagataccctggtagtccacgccgtaaacgctgagaactagccgttgggcctatttataggcttagtggcgcagctaacgcattaagttctccgcctggggagtacggccgcaaggctaaaactcaaaggaattgacgggggcccgcacaagcggtggagcatgtggtttaattcgatgcaacgcgaagaaccttaccggcccttgacatcctcggagccttctggagacagaagggtgccttcgggagccgagtgacaggtgctgcatggctgtcgtcagctcgtgtcgtgagatgttgggttaagtcccgcaacgagcgcaacccttgtccctagttgccagcggttcggccgggaactctagggagactgccggtgacaaaccggaggaaggtggggacgacgtcaagtcatcatggcccttatgggccgggctacacacgtgctacaatggcgggtacagagggttgccaatccgcgaggtggagctaatccctgaaagcccgtcctagtccggatcggagtctgcaactcgactccgtgaagcaggaatcgctagtaatcgcagatcagcaatgctgcggtgaatacgttcccgggccttgtacacaccgcccgtcacaccatgggagtcggctgcaccagaagtgcgtagtctaaccttcgggaggacgcgtaccacggtgtggtcggcgactggggtg

SEQ ID NO: 1598 - DNA, 1427 bp, Halospina denitrificans
  misc_feature (213)..(213): n is a, c, g, or t
gcctaacacatgcaagtcgagcggtaactggtccttcgggatgctgacgagcggcggacgggtgagtaatgcatgggaacttgcccagtagtgggggatagcccggggaaacccggattaataccgcatacgccctgagggggaaagcgggcctttgtgctcgcgctattggatgggcccatgtcggattagtttgttggtggggtaacggcntaccaaggcgacgatccgtagctggtctgagaggatgatcagccacaccgggactgagacacggcccggactcctacgggaggcagcagtggggaatattggacaatgggggcaaccctgatccagccatgccgcgtgtgtgaagaaggctttcgggttgtaaagcactttcagtcgggaggaaaagctagtcgttaataccggctagtgttgacgttaccggcagaagaagcaccggctaactccgtgccagcagccgcggtaatacggagggtgcaagcgttaatcggaattactgggcgtaaagggcgcgtaggcggtttggtaagcgagttgtgaaagccccgggctcaacctgggaatggcaattcgaactgccaggctagaatgcagcagagggtagtggaattccaggtgtagcggtgaaatgcgtagatatctggaggaacaccagtggcgaaggcgactgcctgggctgacattgacgctgaggtgcgaaagcgtgggtagcaaacaggattagataccctggtagtcacgctgtaaacgctgagaactagtcgttggggctattagagccttagtgacgcagctaacgcgataagttctccgcctggggagtacggccgcaaggttaaaactcaaatgaattgacgggggcccgcacaagcggtggagcatgtggtttaattcgacgcaacgcgaagaaccttacctggtcttgacatcctgcgaacttgctagagatagcttggtgccttcgggagcgcagtgacaggtgctgcatggccgtcgtcagctcgtgtcgtgagatgttgggttaagtcccgtaacgagcgcaacccttgtccttagttgccagcggtccggccgggaactctagggagactgccggtgacaaaccggaggaaggtggggatgacgtcaggtcatcatggcccttacggccagggctacacacgtgctacaatggggcgcacagagggcagctaagccgcgaggtgcagcgaatcccttaaaacgcctcgtagtccggatcggagtctgcaactcgactccgtgaagtcggaatcgctagtaatcgcagatcagaatgctgcggtgaatacgttcccgggccttgtacacaccgcccgtcacaccatgggagtggactgcaccagaagcggttagtctaacttcgggaggacgatcgccacggtgtggttcacgac

SEQ ID NO: 1599 - DNA, 1459 bp, Halotalea alkalilenta
attgaacgctggcggcaggcctaacacatgcaagtcgagcggcagcacggggagcttgctccctggtggcgagcggcggacgggtgagtaatgcatgggaatctgcccggtagagggggataacgtgtggaaacgcacgctaataccgcatacgtcctacgggagaaaggaggggatcttcggaccttccgctatcggatgagcccatgtcggattagctagttggtagggtaaaggcctaccaaggcaacgatccgtagctggtctgagaggatgatcagccacactgggactgagacacggcccagactcctacgggaggcagcagtggggaatattggacaatgggggcaaccctgatccagccatgccgcgtgtgtgaagaaggccttcgggttgtaaagcactttcagcgaggaggaacgccttttggttaataccctggaggggggacgttactcgcagaagaagcaccggctaactccgtgccagcagccgcggtaatacggagggtgcgagcgttaatcggaattactgggcgtaaagggcgcgtaggcggtctgttaagccagatgtgaaagccccgggctcaacctgggaacagcatttggaactggcggacttgagtgcaggagaggaaggtagaattcccggtgtagcggtgaaatgcgtagagatcgggaggaataccagtggcgaaggcggccttctggactgacactgacgctgaggcgcgaaagcgtgggtagcaaacaggattagataccctggtagtccacgccgtaaacgatgtcaactagccgttggatcccttgaggatttagtggcgcagataacgcactaagttgaccgcctggggagtacggccgcaaggctaaaactcaaatgaattgacgggggcccgcacaagcggtggagcatgtggtttaattcgatgcaacgcgaagaaccttacctacccttgacatccagaggaccttccagagatggaggggtgcttcgggaactctgagacaggtgctgcatggctgtcgtcagctcgtgttgtgaaatgttgggttaagtcccgtaacgagcgcaacccctatccttatttgccagcgattcggtcgggaactctaaggagactgccggtgacaaaccggaggaaggtggggacgacgtcaagtcatcatggccttacgggtagggctacacacgtgctacaatggcgagtacagagggttgcgaagcggcgacgtgaagccaatcccagaaagctcgcctcagtccggattggagtctgcaactcgactccatgaagtcggaatcgctagtaatcgcgaatcagaatgtcgcggtgaatacgttcccgggccttgtacacaccgcccgtcacaccatgggagtggattgcaccagaagtggctagtttaacttcgggagaacggtcaccacggtgtggttcatgactggggtg

SEQ ID NO: 1600 - DNA, 1439 bp, Halothiobacillus neapolitanus
ttaacacatgcaagtcgaacggtaacaggccttcgggcgctgacgagtggcggacgggtgagtaatacatgggaatctgcccttaggtgggggataacgttgggaaactaacgctaataccgcataacctctttggagcaaagcgtgggatcttcggaccacgtgccaaaggatgagcccatgtctgattagctagttggtgaggtaacggctcaccaaggcgacgatcagtagccggcctgagagggtgtacggccacactgggactgagacacggcccagactcctacgggaggcagcagtggggaatattggacaatgggggcaaccctgatccagcaatgccgcgtgtgtgaagaaggcctgcgggttgtaaagcacttttgttgaggaagaatgtgtttgggttaatagtccaaatgcttgacgttactcaaagaaaaagcaccggctaactccgtgccagcagccgcggtaatacggagggtgcaagcgttaatcggaattactgggcgtaaagcgtgcgtaggcggaattttaagtctgatgtgaaatccccgggcttaacctgggaactgcattggatactgggattctagagtatggtagagggtggcggaatttctggtgtagcggtgaaatgcgtagatatcagaaagaacaccaatggcgaaggcagccacctgggccaatactgacgctgaggtacgaaagcgtggggagcaaacaggattagataccctggtagtccacgccctaaacgatgtctacttgtcgtcgggagggctaaacctttcggtgacggagctaacgcattaagtagaccgcctggggagtacggccgcaaggttgaaactcaaaggaattgacgggggcccgcacaagcggtggagcatgtggtttaattcgatgcaacgcgaaaaaccttacctggccttgacatcctgcgaactttctagagatagattggtgccttcgggagcgcagagacaggtgctgcatggctgtcgtcagctcgtgtcgtgagatgttgggttaagtcccgcaacgagcgcaacccttatctttagttgccagcacgttatggtgggaactctaaagagactgccggtgacaaaccggaggaaggtggggatgacgtcaagtcatcatggcccttatggccagggctacacacgtgctacaatggtcggtacagagggtagccaaaccgcgaggtggagccaatcccataaagccgatcttagtccggattgcagtctgcaactcgactgcatgaagtcggaatcgctagtaatcgtggatcagcattgccacggtgaatacgttcccgggccttgtacacaccgcccgtcacaccatgggagtttgttgcaccagaagtaggtagcttaaccgtaaggagggcgcttaccacggtgtggccgatgactggggtg

SEQ ID NO: 1601 - DNA, 1458 bp, Halovibrio variabilis
attgaacgctggcggcaggcctaacacatgcaagtcgagcggtaacaggtctagcttgctagacgctgacgagcggcggacgggtgagtaatgcataggaatctgcccgatagtgggggataacctggggaaacccaggctaataccgcatacgtcctacgggagaaagggggctttggctcccgctattggatgagcctatgtcggattagctagttggtgaggtaatggctcaccaaggcagcgatccgtagctggtctgagaggatgatcagccacatcgggactgagacacggcccgaactcctacgggaggcagcagtggggaatattggacaatgggggcaaccctgatccagccatgccgcgtgtgtgaagaaggccctcgggttgtaaagcactttcagcgaggaagaacgcctgtcggttaatacccggcaggaaagacatcactcgcagaagaagcaccggctaactccgtgccagcagccgcggtaatacggagggtgcaagcgttaatcggaattactgggcgtaaagcgcgcgtaggtggcttgataagccggttgtgaaagccccgggctcaacctgggaacggcatccggaactgtcaggctagagtacaggagaggaaggtagaattcccggtgtagcggtgaaatgcgtagagatcgggaggaataccagtggcgaaggcggccttctggactgatactgacactgaggtgcgaaagcgtgggtagcaaacaggattagataccctggtagtccacgccgtaaacgatgtcgaccagccgttgggtgcctagagcactttgtggcgaagttaacgcgataagtcgaccgcctggggagtacggccgcaaggttaaaactcaaatgaattgacgggggcccgcacaagcggtggagcatgtggtttaattcgatgcaacgcgaagaaccttacctacccttgacatctacagaagccggaagagattctggtgtgccttcgggaactgtaagacaggtgctgcatggctgtcgtcagctcgtgttgtgaaatgttgggttaagtcccgtaacgagcgcaacccttgtccttatttgccagcgcgtaatggcgggaactctaaggagactgccggtgacaaaccggaggaaggtggggacgacgtcaagtcatcatggcccttacgggtagggctacacacgtgctacaatggccggtacaaagggctgcgagctcgcgagagtcagcgaatcccttaaagccggtctcagtccggatcggagtctgcaactcgactccgtgaagtcggaatcgctagtaatcgtgaatcagaatgtcacggtgaatacgttcccgggccttgtacacaccgcccgtcacaccatgggagtggactgcaccagaagtggttagcctaacgcaagagggcgatcaccacggtgtggttcatgactggggtgaag

SEQ ID NO: 1602 - DNA, 1471 bp, Hamiltonella defensa
attgaacgctggtggcaggcctaacacatgcaagtcgagcggcatcgagtgatcgcagtttactgagttcatgtcggcgagcggcggacgggtgagtaaagtctgggaatctggccgaaggagggggataactgctggaaacggcagctaataccgcatgaagtcgcgagaccaaagtgggggaccttcgggcctcacgccttcggatgagcccagatgagattagctggtaggtaaggtaaaggcttacctaggcgacgatctctagcgggtctgagaggatagcccgccacactggaactgagacacggtccagactcctacgggaggcagcagtggggaatattgcacaatgggcgaaagcctgatgcagccatgccacgtgtgtgaagaaggccttcgggttgtaaagcactttcagcgaggaggaagcgataaatgcgaataccatttatttttgacgttactcgcagaagaagcaccggctaactccgtgccagcagccgcggtaatacggagggtgcgagcgttaatcggaataactgggcgtaaagggcatgtaggcggtgagttaagtcagatgtgaaatccccgagctcaacttgggaatggcatttgaaactgggtcgctagagttttctagaggggggtagaattccaggtgtagcggtgaaatgcgtagatatctggaggaataccggtggcgaaggcggccccctggagaaagactgacgctgaggtgcgaaagcgtggggagcaaacaggattagataccctggtagtccacgctgtaaacgatgtcgatttggaggttgcggtcttgaactgtggcgtccggagctaacgcgttaaatcgaccgcctggggagtacggccgcaaggttaaaactcaaatgaattgacgggggcccgcacaagcggtggagcatgtggtttaattcgatgcaacgcgaagaaccttacctactcttgacatccacggaattgtgcagagatgcgcaagtgccttcgggaaccgtgagacaggtgctgcatggctgtcgtcagctcgtgttgtgaaatgttgggttaagtcccgcaacgagcgcaaccctcgtcctttgttgccagcgcgtagaggcgggaactcaaaggagactgccggtgataaaccgtaggaaggtggggacgacgtcaagtcatcatggcccttacgagtagggctacacacgtgctacaatggcgtatacaaagggatgcgaacctgcgagggaaagcggaactcagaaagtacgtcgtagtccggattggagtctgcaactcgactccatgaagtcggaatcgctagtaatcgtagatcagaatgctacggtgaatacgttcccgggccttgtacacaccgcccgtcacaccatgggagtgggttgcaaaagaagtaggtagcttaaccgcaaggagggcgcttaccactttgtgattcatgactggggtg

SEQ ID NO: 1603 - DNA, 1424 bp, Helicobacter acinonychis
agtgaacgctggcggcgtgcctaatacatgcaagtcgaacgatgaagcttctagcttgctagaagtggattagtggcgcacgggtgagtaacgcataggttatgtgcctcttagtttgggatagccattggaaacggtgattaataccagatattccctacgggggaaagatttatcgctaagagatcagcctatgccctatcagcttgttggtaaggtaatggcttaccaaggctatgacgggtatccggtctgagagggtgaacggacacactggaactgagacacggtccagactcctacgggaggcagcagtagggaatattgctcaatgggggaaaccctgaagcagcaacgccgcgtggaggatgaaggttttaggattgtaaactccttttgtcagagaagataatgacggtatctgacgaataagcaccggctaactccgtgccagcagccgcggtaatacggagggtgcaagcgttactcggaatcactgggcgtaaagagcgcgtaggcgggatagtcagtcaggtgtgaaatcctatggcttaaccatagaactgcatttgaaactgctattctagagtgtgggagaggcaggtggaattcttggtgtaggggtaaaatccgtagagatcaagaggaatactcattgcgaaggcgacctgctagaacatgactgacgctattgcgcgaaagcgtggggagcaaacaggattagataccctggtagtccacgccctaaacgatggatgctagttgttggagggcttagtctctccagtaatgcagctaacgccttaagcatcccgcctggggagtacggtcgcaagattaaaactcaaaggaatagacggggacccgcacaagcggtggagcatgtggtttaattcgaagatacacgaagaaccttacctaggcttgacattgagagaatccgctagaaatagcggggtgtctggcttgccagaccttgaaaacaggtgctgcacggctgtcgtcagctcgtgtcgtgagatgttgggttaagtcccgcaacgagcgcaaccccctttcttagttgctaacaggtcatgctgagaactctaaggagactgcctccgtaaggaggaggaaggtggggacgacgtcaagtcatcatggcccttacgcctagggctacacacgtgctacaatggggtgcacaaagagaagcgatactgcgaagtggagccaatcttcaaaacacctcccagttcggattgcaggctgcaactcgcctgcatgaagccggaatcgctagtaatcgcaaatcagccatgttgcggtgaatacgttcccgggtcttgtactcaccgcccgtcacaccatgggagttgtgtttgccttaagtcaggatgctaaagcagctactgcccacggcacgcacagcgactggggtg

SEQ ID NO: 1604 - DNA, 1422 bp, Helicobacter ailurogastricus
agtgaacgctggcggcgtgcctaatacatgcaagtcgaacgatgaagcctagcttgctaggtggattagtggcgcacgggtgagtaacgcatagatgacatgccctttagtttgggatagccactagaaatggtgattaataccaaataccaccctacgggggaaagatttatcgctaaaggattggtctatgtcctatcagcttgttggtgaggtaaaggctcaccaaggctatgacgggtatccggcctgagagggtgaacggacacactggaactgagacacggtccagactcctacgggaggcagcagtagggaatattgctcaatgggcgcaagcctgaagcagcaacgccgcgtggaggatgaaggttttaggattgtaaactccttttgtgagagaagataatgacggtatctcacgaataagcaccggctaactccgtgccagcagccgcggtaatacggagggtgcaagcgttactcggaatcactgggcgtaaagagtgcgtaggcggggttgtaagtcaggtgtgaaatcctatggcttaaccatagaactgcatttgaaactacaaccctagagtgtgggagaggtaggtggaattcttggtgtaggggtaaaatccgtagagatcaagaggaatactcattgcgaaggcgacctgctggaacaatactgacgctgattgcacgaaagcgtggggagcaaacaggattagataccctggtagtccacgccctaaacgatggatgctagttgttggggggctttgtcctcccagtaatgcagctaacgccttaagcatcccgcctggggagtacggtcgcaagattaaaactcaaaggaatagacggggacccgcacaagcggtggagcatgtggtttaattcgaagatacacgaagaaccttacctaggcttgacattgaaggaatttgctagaaatagcggagtgtctagcttgctagaccctgaaaacaggtgctgcacggctgtcgtcagctcgtgtcgtgagatgttgggttaagtcccgcaacgagcgcaaccctctttcttagttgctaacaggtcatgctgagctctctaagaagactgcctgcgtaagcaggaggaaggtgaggacgacgtcaagtcatcatggcccttacgcctagggctacacacgtgctacaatggggcgcacaaagagatgcaatgccgcgaggttgagccaatcttaaaaacgcctctcagttcggattgcaggctgcaactcgcctgcatgaagctggaatcgctagtaatcgcaaatcagccatgttgcggtgaatacgttcccgggtcttgtactcaccgcccgtcacaccatgggagttgtgtttgccttaagtcaggatgctaaggtagctactgcccacggcacacacagcgactggggtg

SEQ ID NO: 1605 - DNA, 1421 bp, Helicobacter anseris
agtgaacgctggcggcgtgcctaatacatgcaagtcgaacgatgaagcttttagcttgctaaaagtggattagtggcgcacgggtgagtaacgcataggttatgtgccccatagtctgggatagccactggaaacggtgattaatactagatactccctacgggggaaagtttttcgctatgggatcagcctatgtcctatcagcttgttggtgaggtaatggctcaccaaggctatgacgggtatccggcctgagagggtgatcggacacactggaactgagacacggtccagactcctacgggaggcagcagtagggaatattgctcaatgggcgaaagcctgaagcagcaacgccgcgtggaggatgaaggttttaggattgtaaactccttttgttagagaagattatgacggtatctaacgaataagcaccggctaactccgtgccagcagccgcggtaatacggagggtgcaagcgttactcggaatcactgggcgtaaagagcgcgtaggcgggataataagtcagatgtgaaatcctgtagcttaactacagaactgcatttgaaactgttattctagagtatgggagaggtaggtggaattcttggtgtaggggtaaaatccgtagagatcaagaggaatactcattgcgaaggcgacctactggaacattactgacgctgatgcgcgaaagcgtggggagcaaacaggattagataccctggtagtccacgccctaaacgatgaatgctagttgttggggtgcttgtcactccagtaatgcagctaacgcattaagcattccgcctggggagtacggtcgcaagattaaaactcaaaggaatagacggggacccgcacaagcggtggagcatgtggtttaattcgaagatacgcgaagaaccttacctaggcttgacattgatagaatcctatagagatatgggagtatctagtttactagaacttgaaaacaggtgctgcacggctgtcgtcagctcgtgtcgtgagatgttgggttaagtcccgcaacgagcgcaaccctcgtccttagttgctagcagttcggctgagcactctagggagactgccttcgtaaggaggaggaaggtgaggacgacgtcaagtcatcatggcccttacgcctagggctacacacgtgctacaatggggtgtacaaagagaagcaataccgcgaggtggagcaaatctcaaaaacatctctcagttcggattgtagtctgcaactcgactacatgaagctggaatcgctagtaatcgtgaatcagccatgtcacggtgaatacgttcccgggtcttgtactcaccgcccgtcacaccatgggagttgtattcgccttaagccgggatgctaaactggctaccgtccacggcggatgcagcgactggggtg

SEQ ID NO: 1606 - DNA, 1420 bp, Helicobacter bizzozeronii
agtgaacgctggcggcgtgcctaatacatgcaagtcgaacgatgaagcctagcttgctaggtggattagtggcgcacgggtgagtaacgcatagataacatgccctttagtttgggatagccactagaaatggtgattaataccaaatactaccctatgggggaaagatttatcgctaaaggattggtctatgtcctatcagcttgttggtgaggtaaaggctcaccaaggcaatgacgggtatccggcctgagagggtgaacggacacactggaactgagacacggtccagactcctacgggaggcagcagtagggaatattgctcaatgggcgcaagcctgaagcagcaacgccgcgtggaggatgaaggttttaggattgtaaactccttttgtcagagaagataatgacggtatctgacgataagcaccggctaactccgtgccagcagccgcggtaatacggagggtgcaagcgttactcggaatcactgggcgtaaagagtgcgtaggcggggttgtaagtcaggtgtgaaatcctatggcttaaccatagaactgcatttgaaactacaactctggagtgtgggagaggtaggtggaattcttggtgtaggggtaaaatccgtagagatcaagaggaatactcattgcgaaggcgacctgctggaacaatactgacgctattgcacgaaagcgtggggagcaaacaggattagataccctggtagtccacgccctaaacgatggatgctagttgttggggggctttgtccccccagtaatgcagctaacgccttaagcatcccgcctggggagtacggtcgcaagattaaaactcaaaggaatagacggggacccgcacaagcggtggagcatgtggtttaattcgaagatacacgaagaaccttacctaggcttgacattgaaggaatcccctagaaataggggagtgtctagcttgctagaccctgaaaacaggtgctgcacggctgtcgtcagctcgtgtcgtgagatgttgggttaagtcccgcaacgagcgcaaccctctttcttagttgctaacaggtcaagctgagctctctaagaatactgcctgcgtaagcaggaggaaggtgaggacgacgtcaagtcatcatggcccttacgcctagggctacacacgtgctacaatgggatgcacaaagagatgcaatgccgcgaggctgagccaatcttaaaaacatctctcagttcggattgcaggctgcaactcgcctgcatgaagctggaatcgctagtaatcgcaaatcagccatgttgcggtgaatacgttcccgggtcttgtactcaccgcccgtcacaccatgggagttgtgtttgccttaagtcaggatgctaaagtagctactgcccacggcacacacagcgactggggtg

SEQ ID NO: 1607 - DNA, 1425 bp, Helicobacter cetorum
agtgaacgctggcggcgtgcctaatacatgcaagtcgaacgatgaagcttctagcttgctagaagtggattagtggcgcacgggtgagtaacgcataggttatgtgcctcttagtttgggatagccattggaaacgatgattaataccagatactccctacgggggaaagatttatcgctaagagatcagcctatgtcctatcagcttgttggtaaggtaatggcttaccaaggctatgacgggtatccggcctgagagggtgaacggacacactggaactgagacacggtccagactcctacgggaggcagcagtagggaatattgctcaatgggcgcaagcctgaagcagcaacgccgcgtggaggatgaaggttttaggattgtaaactccttttgttagagaagataatgacggtatctaacgaataagcaccggctaactccgtgccagcagccgcggtaatacggagggtgcaagcgttactcggaatcactgggcgtaaagagcgcgtaggcgggatagtaagtcagatgtgaaatcctatggcttaaccatagaactgcatttgaaactgctattctagagtgtgggagaggtaggtggaattcttggtgtaggggtaaaatccgtagagatcaagaggaatactcattgcgaaggcgacctgctggaacataactgacgctgattgcgcgaaagcgtggggagcaaacaggattagataccctggtagtccacgccctaaacgatggatgctagttgttggggagcttagtctctccagtaatgcagctaacgcattaagcatcccgcctggggagtacggtcgcaagattaaaactcaaaggaatagacggggacccgcacaagcggtggagcatgtggtttaattcgaagatacacgaagaaccttacctaggcttgacattgaaggaatctgctagaaatagtggagtgtctagcttgctagaccttgaaaacaggtgctgcacggctgtcgtcagctcgtgtcgtgagatgttgggttaagtcccgcaacgagcgcaaccccctttcttagttgctaacaggttatgctgagaactctaaggatactgcctccgtaaggaggaggaaggtggggacgacgtcaagtcatcatggcccttacgcctagggctacacacgtgctacaatggggtgtacaaagagaagcaatactgcgaagtggagcaaatctcaaaaacatctctcagttcggattgcaggctgcaactcgcctgcatgaagctggaatcgctagtaatcgtgaatcagccatgtcacggtgaatacgttcccgggtcttgtactcaccgcccgtcacaccatgggagttgtgtttgccttaagtcaggatgctaaactagctactgcccacggcacacacagcgactggggtg

SEQ ID NO: 1608 - DNA, 1422 bp, Helicobacter felis
agtgaacgctggcggcgtgcctaatacatgcaagtcgaacgatgaagcctagcttgctaggcggattagtggcgcacgggtgagtaacgcatagatgacatgccctttagtttgggatagccactagaaatggtgattaataccaaatactaccctacgggggaaagatttatcgctaaaggattggtctatgtcctatcagcttgttggtgaggtaaaggctcaccaaggctatgacgggtatccggcctgagagggtgaacggacacactggaactgagacacggtccagactcctacgggaggcagcagtagggaatattgctcaatgggcgcaagcctgaagcagcaacgccgcgtggaggatgaaggttttaggattgtaaactccttttgtcagagaagataatgacggtatctgacgaataagcaccggctaactccgtgccagcagccgcggtaatacggagggtgcaagcgttactcggaatcactgggcgtaaagagtgcgtaggcggggttgtaagtcagatgtgaaatcctatggcttaaccatagaactgcatttgaaactacaactctggagtgtgggagaggtaggtggaattcttggtgtaggggtaaaatccgtagagatcaagaggaatactcattgcgaaggcgacctgctggaacaatactgacgctgattgcacgaaagcgtggggagcaaacaggattagataccctggtagtccacgccctaaacgatggatgctagttgttggggggctttgtccccccagtaatgcagctaacgccttaagcatcccgcctggggagtacggtcgcaagattaaaactcaaaggaatagacggggacccgcacaagcggtggagcatgtggtttaattcgaagatacacgaagaaccttacctaggcttgacattgaaggaatctgctagaaatagtggagtgtctagcttgctagaccctgaaaacaggtgctgcacggctgtcgtcagctcgtgtcgtgagatgttgggttaagtcccgcaacgagcgcaaccctctttcttagttgctaacaggtagtgctgagctctctaagaatactgcctgcgtaagcaggaggaaggtgaggacgacgtcaagtcatcatggcccttacgcctagggctacacacgtgctacaatggggtgcacaaagagatgcaatgccgcgaggttgagccaatcttaaaaacgcctctcagttcggattgcaggctgcaactcgcctgcatgaagctggaatcgctagtaatcgcaaatcagccatgttgcggtgaatacgttcccgggtcttgtactcaccgcccgtcacaccatgggagttgtgtttgccttaagtcaggatgctaaggtagctactgcccacggcacacacagcgactggggtg

SEQ ID NO: 1609 - DNA, 1421 bp, Helicobacter heilmannii
agtgaacgctggcggcgtgcctaatacatgcaagtcgaacgatgaagcctagcttgctaggtggattagtggcgcacgggtgagtaacgcatagatgacatgccctttagtttgggatagccactagaaatggtgattaataccaaatattaccctacgggggaaagatttatcgctaaaggattggtctatgtcctatcagcttgttggtgaggtaaaggctcaccaaggcaatgacgggtatccggcctgagagggtgaacggacacactggaactgagacacggtccagactcctacgggaggcagcagtagggaatattgctcaatgggcgcaagcctgaagcagcaacgccgcgtggaggatgaaggttttaggattgtaaactccttttgtgagagaagataatgacggtatctcacgaataagcaccggctaactccgtgccagcagccgcggtaatacggagggtgcaagcgttactcggaatcactgggcgtaaagagtgcgtaggcggggttgtaagtcaggtgtgaaatcctatggcttaaccatagaactgcatttgaaactgcaaccctagagtgtgggagaggtaggtggaattcttggtgtaggggtaaaatccgtagagatcaagaggaatactcattgcgaaggcgacctgctggaacaatactgacgctattgcacgaaagcgtggggagcaaacaggattagataccctggtagtccacgccctaaacgatggatgctagttgttggggggctttgtcctcccagtaatgcagctaacgccttaagcatcccgcctggggagtacggtcgcaagattaaaactcaaaggaatagacggggacccgcacaagcggtggagcatgtggtttaattcgaagatacacgaagaaccttacctaggcttgacattgaaggaatctgctagaaatagcggagtgtctagcttgctagaccctgaaaacaggtgctgcacggctgtcgtcagctcgtgtcgtgagatgttgggttaagtcccgcaacgagcgcaaccctctttcttagttgctaacaggtgatgctgagctctctaagaagactgcctgcgtaagcaggaggaaggtgaggacgacgtcaagtcatcatggcccttacgcctagggctacacacgtgctacaatgggatgcacaaagagatgcaatgccgcgaggctgagccaatcttaaaaacatctctcagttcggattgtaggctgcaactcgcctgcatgaagctggaatcgctagtaatcgcaaatcagccatgttgcggtgaatacgttcccgggtcttgtactcaccgcccgtcacaccatgggagttgtgtttgccttaagtcaggatgctaaagcagctactgcccacggcacacacagcgactggggtg

SEQ ID NO: 1610 - DNA, 1421 bp, Helicobacter mustelae
agtgaacgctggcggcgtgcctaatacatgcaagtcgaacgatgaagcttctagcttgctagaagtggattagtggcgcacgggtgagtaacgcataggttatgtgccccatagtctgggatagccactggaaacggtgattaatactggatactccctacgggggaaagtttttcgctatgggatcagcctatgtcctatcagcttgttggtgaggtaatggctcaccaaggctatgacgggtatccggcctgagagggtgatcggacacactggaactgagacacggtccagactcctacgggaggcagcagtagggaatattgctcaatgggcgaaagcctgaagcagcaacgccgcgtggaggatgaaggttttaggattgtaaactccttttctaagagaagataatgacggtatcttaggaataagcaccggctaactccgtgccagcagccgcggtaatacggagggtgcaagcgttactcggaatcactgggcgtaaagagcgcgtaggcggagtaataagtcagatgtgaaatcctgtagcttaactacagaactgcatttgaaactgttattctagagtgtgggagaggtaggtggaattcttggtgtaggggtaaaatccgtagagatcaagaggaatactcattgcgaaggcgacctactggaacattactgacgctgatgcgcgaaagcgtggggagcaaacaggattagataccctggtagtccacgccctaaacgatgaatgctagttgttggggtgcttgtcactccagtaatgcagttaacacattaagcattccgcctggggagtacggtcgcaagattaaaactcaaaggaatagacggggacccgcacaagcggtggagcatgtggtttaattcgatgctacgcgaagaaccttacctaggcttgacattgatagaatctgctagaaatagcggagtgtctagtttactagaccttgaaaacaggtgctgcacggctgtcgtcagctcgtgtcgtgagatgttgggttaagtcccgcaacgagcgcaaccctcgttcttagttgctagcagttcggctgagcactctaagaagactgccttcgtaaggaggaggaaggtgaggacgacgttaagtcatcatggcccttacgcctagggctacacacgtgctacaatggggtgcacaaagagacgcaataccgcgaggtggagcaaatctcaaaaacatctctcagttcggattgtagtctgcaactcgactacatgaagctggaatcgctagtaatcgtgaatcagccatgtcacggtgaatacgttcccgggtcttgtactcaccgcccgtcacaccatgggagttgtattcgccttaagccgggatgctaaattggctaccgtccacggcggatgcagcgactggggtg

SEQ ID NO: 1611 - DNA, 1422 bp, Helicobacter suis
agtgaacgctggcggcgtgcctaatacatgcaagtcgaacgatgaagcctagcttgctaggttgattagtggcgcacgggtgagtaatgcatagatgacatgccctttagtttggaatagccactagaaatggtgattaataccaaatactaccttacgagggaaagatttatcgctaaaggattggtctatgtcctatcagcttgttggtgaggtaaaggctcaccaaggctatgacgggtatccggcctgagagggtgagcggacacactggaactgagacacggtccagactcctacgggaggcagcagtagggaatattgctcaatgggggaaaccctgaagcagcaacgccgcgtggaggatgaaggttttaggatcgtaaactccttttgttagagaagataatgacggtatctaacgaataagcaccggctaactccgtgccagcagccgcggtaatacggagggtgcaagcgttactcggaatcactgggcgtaaagagtgcgtaggcgggaggacaagtcaggtgtgaaatcctatggcttaaccatagaactgcatttgaaactatccttctggagtgtgggagaggtaggtggaattcttggtgtaggggtaaaatccgtagagatcaagaggaatactcattgcgaaggcgacctgctggaacatcactgacgctgattgcacgaaagcgtggggagcaaacaggattagataccctggtagtccacgccctaaacgatggatgctagttgttgggaggctttgtctttccagtaatgcagctaacgccttaagcatcccgcctggggagtacggtcgcaagattaaaactcaaaggaatagacggggacccgcacaagcggtggagcatgtggtttaattcgaggatacacgaagaaccttacctaggcttgacattgaaggaattccctagaaataggggagtgtctagcttgctagaccctgaaaacaggtgctgcacggctgtcgtcagctcgtgtcgtgagatgttgggttaagtcccgcaacgagcgcaaccctttttcttagttgctaacaggttatgctgcgcactctaagaagactgcctgcgtaagcaggaggaaggtgaggacgacgtcaagtcatcatggcccttacgcctagggctacacacgtgctacaatggggtgcacaaagagatgcaaagccgcgaggcagagctaatctataaaacacctcctagttcggattgcaggctgcaactcgcctgcatgaagctggaatcgctagtaatcgcaaatcagctatgttgcggtgaatacgttcccgggtcttgtactcaccgcccgtcacaccatgggagttgtgtttgccttaagtcaggatgctaaagcagctactgcccacggcacacacagcgactggggtg

SEQ ID NO: 1612 - DNA, 1431 bp, Heliophilum fasciatum
  misc_feature (135)..(137): n is a, c, g, or t
  misc_feature (177)..(177): n is a, c, g, or t
  misc_feature (248)..(248): n is a, c, g, or t
  misc_feature (297)..(297): n is a, c, g, or t
  misc_feature (299)..(299): n is a, c, g, or t
  misc_feature (397)..(397): n is a, c, g, or t
  misc_feature (414)..(415): n is a, c, g, or t
  misc_feature (465)..(465): n is a, c, g, or t
  misc_feature (483)..(484): n is a, c, g, or t
  misc_feature (566)..(567): n is a, c, g, or t
  misc_feature (588)..(588): n is a, c, g, or t
  misc_feature (704)..(704): n is a, c, g, or t
  misc_feature (787)..(787): n is a, c, g, or t
  misc_feature (871)..(871): n is a, c, g, or t
  misc_feature (904)..(906): n is a, c, g, or t
  misc_feature (962)..(962): n is a, c, g, or t
  misc_feature (1070)..(1070): n is a, c, g, or t
  misc_feature (1080)..(1080): n is a, c, g, or t
  misc_feature (1083)..(1083): n is a, c, g, or t
  misc_feature (1153)..(1153): n is a, c, g, or t
  misc_feature (1209)..(1209): n is a, c, g, or t
  misc_feature (1330)..(1331): n is a, c, g, or t
  misc_feature (1344)..(1344): n is a, c, g, or t
gacgaacgctggcggcatgcctaacacatgcaagtcgaacggagcattgaagtttcgatggaaatgcttagtggcggacgggtgagtaacccgtggatcatctacctcggtttggggaataacagcccgaaaggnnngctaataccgcataatatccttcgggatcaaaggcttttngccgcatcgagatgagtctgcgtccgattagctagttggtggggtaagagcctaccaaggcgacgatcggnagccggcctgagagggcgaacggccacactgggactgagacacggcccngnctcctacgggaggcagcagtggggaatcttccgcaatgggcgaaagcctgacggagcaatgccgcgtgggggaagaaggtcttcggattgtaaacccntgtctccagggaagaanntttgacggtacctggggaggaagccccggctaactacgtgccagcagccncggtaatacgtagggggnnagcgttgtccggaattactgggcgtaaagcgcgcgtaggcggaccattaagtctgaggtgaaagaccggagctcaactccgnngcggccttggatactggtggncttgagggacggagaggacagtggaattcccagtgtagcggtgaaatgcgtagatattgggaggaacaccagtggcgaaggcgactgtctggacgtcaactgacgctgaggtgcgnaagcgtggggagcaaacaggattagataccctggtagtccacgccgtaaacgatgagtgctaggtgtcgggggtatcgacccntccggtgccgcagtcaacacaataagcactccgcctggggagtacggccgcaaggttgaaactcaaaggaattgacgggggccngcacaagcggtggagcatgtggtttaattcgannnaacgcgaagaaccttaccaaggcttgacatcctctgaatccgctagagatagtggngtgcccttcggggagcagagagacaggtggtgcatggttgtcgtcagctcgtgtcgtgagatgttgggttaagtcccgcaacgagcgcaacccttatcttcagttgcnagcgtgtaanggnggggactctggagagactgcccgggacgaccgggaggaaggcggggatgacgtcaaatcatcatgccccntatgtcttgggctacacacgtgctacaatgggcggtacaaaccgaagcgaaatcgngagatggagcgaaccggagaaagccgttcacagttcggattgcaggctgcaactcgcctgcatgaaggcggaatcgctagtaatcgcaggtcagcatactgcggtgaatacgttcccgggnnttgtacacaccgnccgtcacaccacgaaagtcggcaacacccgaagtcggtgagctaacctaacggaggcagccgccgaaggtggggtcgatgattgggg

SEQ ID NO: 1613 - DNA, 1376 bp, Henriciella algicola
  misc_feature (840)..(840): n is a, c, g, or t
aacgaacgctggcggcaggcttaacacatgcaagtcgaacgacatagtggcagacgggtgagtaacgcgtgggaacgtacccttcactacggaatagcttctggaaacggaaggtaataccgtatacgccctccgggggaaagatttatcggtgaaggatcggcccgcgttagattagtttgttggtggggtaatggcctaccaagactacgatctatagctggtctgagaggatgatcagccacactgggactgagacacggcccagactcctacgggaggcagcagtggggaatcttgcacaatgggcgaaagcctgatgcagccatgccgcgtgaatgatgaaggccttagggttgtaaaattctttcgccagggatgataatgacagtacctggtaaagaagccccggctaacttcgtgccagcagccgcggtaatacgaagggggctagcgttgttcggaattactgggcgtaaagcgcgcgtaggcgggctattaagccagatgtgaaagcccggggctcaacctcggaattgcatttggaactggtagcctagagaccaggagaggttagcggaataccgagtgtagaggtgaaattcgtagatattcggtggaacaccagtggcgaaggcggctaactggactggtactgacgctgaggcgcgaaagtgtggggagcaaacaggattagataccctggtagtccacaccgtaaacgatgaatgctagttgtctgcgcgcatgcgtgcaggtgacgcagctaacgcattaagcattccgcctggggagtacggccgcaaggttaaaactcaaagaaattgacgggggcccgcncaagcggtggagcatgtggtttaattcgaagcaacgcgcagaaccttacccgcgtttgacatgccctgtttggttaccagagatggtttccttcatttagttggcaggtgcacaggtgctgcatggctgtcgtcagctcgtgtcgtgagatgttgggttaagtcccgcaacgagcgcaacccttatccttagttgccagcacgtttgggtgggcactctaaggaaactgccggtgctaagccggaggaaggcggggatgacgtcaagtcctcatggcccttacacgcggggctacacacgtgctacaatggcagtgacaatgggataatcccaaaaagctgtctcagttcagattgtcctctgcaactcgagggcatgaagttggaatcgctagtaatcgtggatcagcatgccacggtgaatacgttcccgggccttgtacacaccgcccgtcacatcatgggagttggatctacccgaagactgtgcgctaacttcggaggcagcaggccacggtaggttcagcgactgggatg

SEQ ID NO: 1614 - DNA, 1376 bp, Henriciella barbarensis
aacgaacgctggcggcaggcttaacacatgcaagtcgaacgacatagtggcagacgggtgagtaacgcgtgggaacgtacccttcactacggaatagcttctggaaacggaaggtaataccgtatacgcccttcgggggaaagatttatcggtgaaggatcggcccgcgttagattagtttgttggtggggtaatggcctaccaagactacgatctatagctggtctgagaggatgatcagccacactgggactgagacacggcccagactcctacgggaggcagcagtggggaatcttgcacaatgggcgaaagcctgatgcagccatgccgcgtgaatgatgaaggccttagggttgtaaaattctttcgccagggatgataatgacagtacctggtaaagaagccccggctaacttcgtgccagcagccgcggtaatacgaagggggctagcgttgttcggaattactgggcgtaaagcgcgcgtaggcgggctattaagccagatgtgaaagcccggagctcaactccggaattgcatttggaactggtagcctagagaccaggagaggttagcggaataccgagtgtagaggtgaaattcgtagatattcggtggaacaccagtggcgaaggcggctaactggactggtactgacgctgaggcgcgaaagtgtggggagcaaacaggattagataccctggtagtccacaccgtaaacgatgaatgctagttgtctgtgtgcatgcatacaggtgacgcagctaacgcattaagcattccgcctggggagtacggccgcaaggttaaaactcaaagaaattgacgggggcccgcacaagcggtggagcatgtggtttaattcgaagcaacgcgcagaaccttacccgcgtttgacatgccctgtttggttaccagagatggtttccttcatttggttggcaggtgcacaggtgctgcatggctgtcgtcagctcgtgtcgtgagatgttgggttaagtcccgcaacgagcgcaacccttatccttagttgccagcacgtttgggtgggcactctaaggaaactgccggtgctaagccggaggaaggcggggatgacgtcaagtcctcatggcccttacacgcggggctacacacgtgctacaatggcagtgacaatgggataatcccaaaaagctgtctcagttcagattgtcctctgcaactcgagggcatgaagttggaatcgctagtaatcgtggatcagcatgccacggtgaatacgttcccgggccttgtacacaccgcccgtcacatcatgggagttggatctacccgaagactgtgcgctaacttcggaggcagcaggccacggtaggttcagcgactgggatg

SEQ ID NO: 1615 - DNA, 1411 bp, Hephaestia caeni
aacgaacgctggcggcatgcctaacacatgcaagtcgaacgagaccttcgggtctagtggcgcacgggtgcgtaacacgtgggaatctgcccttgggttcggaataactcagagaaatttgagctaataccggatgatgacgtaagtccaaagatttatcgcccagggatgagcccgcggaggattagctagttggtggggtaaaggctcaccaaggcgacgatccttagctggtctgagaggatgatcagccacactgggactgagacacggcccagactcctacgggaggcagcagtggggaatattggacaatgggcgaaagcctgatccagcaatgccgcgtgagtgatgaaggccctagggttgtaaagctcttttacccgggaagataatgactgtaccgggagaataagctccggctaactccgtgccagcagccgcggtaatacggagggagctagcgttgttcggaattactgggcgtaaagcgcacgtaggcggctttgcaagttagaggtgaaagcccggggctcaaccccggaatagcctttaaaactgcatcgcttgaatccaggagaggtgagtggaattccgagtgtagaggtgaaattcgtagatattcggaagaacaccagtggcgaaggcggctcactggactggtattgacgctgaggtgcgaaagcgtggggagcaaacaggattagataccctggtagtccacgccgtaaacgatgataactagctgtcggggcacttggtgcttcggtggcgcagctaacgcattaagttatccgcctggggagtacggtcgcaagattaaaactcaaaggaattgacgggggcctgcacaagcggtggagcatgtggtttaattcgaagcaacgcgcagaaccttaccagcgtttgacatgccggtcgcggatagtggagacactttccttcagttcggctggaccgtgcacaggtgctgcatggctgtcgtcagctcgtgtcgtgagatgttgggttaagtcccgcaacgagcgcaaccctcgcctttagttgccatcatttagttgggcactctagaggaaccgccggtgataagccggaggaaggtggggatgacgtcaagtcctcatggcccttacgcgctgggctacacacgtgctacaatggcaagtacagtgggcagcaatcccgcgagggtgagctaatctccaaaacttgtctcagttcggattgttctctgcaactcgagagcatgaaggcggaatcgctagtaatcgcggatcagcatgccgcggtgaatacgttcccaggccttgtacacaccgcccgtcacaccatgggagttggtttcacccgaaggcagtgctctaacccgcaagggaggaagctgaccacggtgggatcagcgactggggtg

SEQ ID NO: 1616 - DNA, 1455 bp, Herbaspirillum aquaticum
attgaacgctggcggcatgccttacacatgcaagtcgaacggcagcataggagcttgctcctgatggcgagtggcgaacgggtgagtaatatatcggaacgtgccctagagtgggggataactagtcgaaagactagctaataccgcatacgatctacggatgaaagtgggggatcgcaagacctcatgctcctggagcggccgatatctgattagctagttggtggggtaaaagcctaccaaggcgacgatcagtagctggtctgagaggacgaccagccacactgggactgagacacggcccagactcctacgggaggcagcagtggggaattttggacaatgggggcaaccctgatccagcaatgccgcgtgagtgaagaaggccttcgggttgtaaagctcttttgtcagggaagaaacggtagtagctaatatctattactaatgacggtacctgaagaataagcaccggctaactacgtgccagcagccgcggtaatacgtagggtgcaagcgttaatcggaattactgggcgtaaagcgtgcgcaggcggttgtgtaagtcagatgtgaaatccccgggctcaacctgggaattgcatttgagactgcacggctagagtgtgtcagaggggggtagaattccacgtgtagcagtgaaatgcgtagatatgtggaggaataccgatggcgaaggcagccccctgggataacactgacgctcatgcacgaaagcgtggggagcaaacaggattagataccctggtagtccacgccctaaacgatgtctactagttgtcgggtcttaattgacttggtaacgcagctaacgcgtgaagtagaccgcctggggagtacggtcgcaagattaaaactcaaaggaattgacggggacccgcacaagcggtggatgatgtggattaattcgatgcaacgcgaaaaaccttacctacccttgacatggatggaatcccgaagagatttgggagtgctcgaaagagaaccatcacacaggtgctgcatggctgtcgtcagctcgtgtcgtgagatgttgggttaagtcccgcaacgagcgcaacccttgtcattagttgctacgaaagggcactctaatgagactgccggtgacaaaccggaggaaggtggggatgacgtcaagtcctcatggcccttatgggtagggcttcacacgtcatacaatggtacatacagagggccgccaacccgcgagggggagctaatcccagaaagtgtatcgtagtccggattggagtctgcaactcgactccatgaagttggaatcgctagtaatcgcggatcagcatgtcgcggtgaatacgttcccgggtcttgtacacaccgcccgtcacaccatgggagcgggttttaccagaagtgggtagcctaaccgcaaggagggcgctcaccacggtaggattcgtgactggggtg

SEQ ID NO: 1617 - DNA, 1455 bp, Herbaspirillum hiltneri
attgaacgctggcggcatgccttacacatgcaagtcgaacggcagcacgggagcttgctcctggtggcgagtggcgaacgggtgagtaatatatcggaacgtgccctagagtgggggataactagtcgaaagattagctaataccgcatacgatctacggatgaaagtgggggatcgcaagacctcatgctcatggagcggccgatatctgattagctagttggtggggtaaaagctcaccaaggcgacgatcagtagctggtctgagaggacgaccagccacactggaactgagacacggtccagactcctacgggaggcagcagtggggaattttggacaatgggcgcaagcctgatccagcaatgccgcgtgagtgaagaaggccttcgggttgtaaagctcttttgtcagggaagaaacggtcttggttaatacctggggctaatgacggtacctgaagaataagcaccggctaactacgtgccagcagccgcggtaatacgtagggtgcaagcgttaatcggaattactgggcgtaaagcgtgcgcaggcggttatacaagacagatgtgaaatccccgggctcaacctgggaattgcatttgtgactgtatggctagagtgtgtcagaggggggtagaattccacgtgtagcagtgaaatgcgtagatatgtggaggaataccgatggcgaaggcagccccctgggataacactgacgctcatgcacgaaagcgtggggagcaaacaggattagataccctggtagtccacgccctaaacgatgtctactagttgtcgggtcttaattgacttggtaacgcagctaacgcgtgaagtagaccgcctggggagtacggtcgcaagattaaaactcaaaggaattgacggggacccgcacaagcggtggatgatgtggattaattcgatgcaacgcgaaaaaccttacctacccttgacatgtacggaatcctgaagagatttaggagtgctcgaaagagaaccgtaacacaggtgctgcatggctgtcgtcagctcgtgtcgtgagatgttgggttaagtcccgcaacgagcgcaacccttgtcattagttgctacgaaagggcactctaatgagactgccggtgacaaaccggaggaaggtggggatgacgtcaagtcctcatggcccttatgggtagggcttcacacgtcatacaatggtacatacagagggccgccaacccgcgagggggagctaatcccagaaagtgtatcgtagtccggattggagtctgcaactcgactccatgaagttggaatcgctagtaatcgcggatcagcatgtcgcggtgaatacgttcccgggtcttgtacacaccgcccgtcacaccatgggagcgggttctgccagaagtagttagcctaaccgcaaggagggcgattaccacggcagggttcgtgactggggtg

SEQ ID NO: 1618 - DNA, 1455 bp, Herbaspirillum huttiense
attgaacgctggcggcatgccttacacatgcaagtcgaacggcagcataggagcttgctcctgatggcgagtggcgaacgggtgagtaatatatcggaacgtgccctagagtgggggataactagtcgaaagactagctaataccgcatacgatctacggatgaaagtgggggatcgcaagacctcatgctcctggagcggccgatatctgattagctagttggtggggtaaaagcctaccaaggcaacgatcagtagctggtctgagaggacgaccagccacactgggactgagacacggcccagactcctacgggaggcagcagtggggaattttggacaatgggggcaaccctgatccagcaatgccgcgtgagtgaagaaggccttcgggttgtaaagctcttttgtcagggaagaaacggtagtagcgaataactactactaatgacggtacctgaagaataagcaccggctaactacgtgccagcagccgcggtaatacgtagggtgcaagcgttaatcggaattactgggcgtaaagcgtgcgcaggcggttgtgtaagtcagatgtgaaatccccgggctcaacctgggaattgcatttgagactgcacggctagagtgtgtcagaggggggtagaattccacgtgtagcagtgaaatgcgtagatatgtggaggaataccgatggcgaaggcagccccctgggataacactgacgctcatgcacgaaagcgtggggagcaaacaggattagataccctggtagtccacgccctaaacgatgtctactagttgtcgggtcttaattgacttggtaacgcagctaacgcgtgaagtagaccgcctggggagtacggtcgcaagattaaaactcaaaggaattgacggggacccgcacaagcggtggatgatgtggattaattcgatgcaacgcgaaaaaccttacctacccttgacatggatggaatcccgaagagatttgggagtgctcgaaagagaaccatcacacaggtgctgcatggctgtcgtcagctcgtgtcgtgagatgttgggttaagtcccgcaacgagcgcaacccttgtcattagttgctacgaaagggcactctaatgagactgccggtgacaaaccggaggaaggtggggatgacgtcaagtcctcatggcccttatgggtagggcttcacacgtcatacaatggtacatacagagggccgccaacccgcgagggggagctaatcccagaaagtgtatcgtagtccggattggagtctgcaactcgactccatgaagttggaatcgctagtaatcgcggatcagcatgtcgcggtgaatacgttcccgggtcttgtacacaccgcccgtcacaccatgggagcgggttttaccagaagtgggtagcctaaccgcaaggagggcgctcaccacggtaggattcgtgactggggtg

SEQ ID NO: 1619 - DNA, 1405 bp, Herbaspirillum robiniae
aagtcgaacggcagcataggagcttgctcctgatggcgagtggcgaacgggtgagtaatatatcggaacgtgccctagagtgggggataactagtcgaaagattagctaataccgcatacgatctacggatgaaagtgggggatcgcaagacctcatgctcctggagcggccgatatctgattagctagttggtgaggtaaaagctcaccaaggcgacgatcagtagctggtctgagaggacgaccagccacactgggactgagacacggcccagactcctacgggaggcagcagtggggaattttggacaatgggggcaaccctgatccagcaatgccgcgtgagtgaagaaggccttcgggttgtaaagctcttttgtcagggaagaaacggttgaggctaatatcctcgactaatgacggtacctgaagaataagcaccggctaactacgtgccagcagccgcggtaatacgtagggtgcaagcgttaatcggaattactgggcgtaaagcgtgcgcaggcggttgtgtaagtcagatgtgaaatccccgggctcaacctgggaattgcatttgagactgcacggctagagtgtgtcagaggggggtagaattccacgtgtagcagtgaaatgcgtagatatgtggaggaataccgatggcgaaggcagccccctgggataacactgacgctcatgcacgaaagcgtggggagcaaacaggattagataccctggtagtccacgccctaaacgatgtctactagttgtcgggtcttaattgacttggtaacgcagctaacgcgtgaagtagaccgcctggggagtacggtcgcaagattaaaactcaaaggaattgacggggacccgcacaagcggtggatgatgtggattaattcgatgcaacgcgaaaaaccttacctacccttgacatggaaggaatcccgaagagatttgggagtgctcgaaagagaaccttcacacaggtgctgcatggctgtcgtcagctcgtgtcgtgagatgttgggttaagtcccgcaacgagcgcaacccttgtcattagttgctacgaaagggcactctaatgagactgccggtgacaaaccggaggaaggtggggatgacgtcaagtcctcatggcccttatgggtagggcttcacacgtcatacaatggtacatacagagggccgccaacccgcgagggggagctaatcccagaaagtgtatcgtagtccggattggagtctgcaactcgactccatgaagttggaatcgctagtaatcgcggatcagcatgtcgcggtgaatacgttcccgggtcttgtacacaccgcccgtcacaccatgggagcgggttctgccagaagtagttagcctatccgtaaggagggggcttaccacggt

SEQ ID NO: 1620 - DNA, 1435 bp, Herbaspirillum rubrisubalbicans
cttacacatgcaagtcgaacggcagcataggagcttgctcctgatggcgagtggcgaacgggtgagtaatatatcggaacgtgccctagagtgggggataactagtcgaaagactagctaataccgcatacgatctaaggatgaaagtgggggatcgcaagacctcatgctcctggagcggccgatatctgattagctagttggtggggtaaaagcctaccaaggcgacgatcagtagctggtctgagaggacgaccagccacactgggactgagacacggcccagactcctacgggaggcagcagtggggaattttggacaatgggggcaaccctgatccagcaatgccgcgtgagtgaagaaggccttcgggttgtaaagctcttttgtcagggaagaaaccggtggagctaatatctactactaatgacggtacctgaagaataagcaccggctaactacgtgccagcagccgcggtaatacgtagggtgcaaccgttaatcggaattactgggcgtaaaacgtgcgcaggcggttgtgtaagtcagatgtgaaatccccgggctcaacctgggaattgcatttgagactgcacggctagagtgtgtcagaggggggtagaattccacgtgtagcagtgaaatgcgtagatatgtggaggaataccgatggcgaaggcagccccctgggataacactgacgctcatgcacgaaagcgtggggagcaaacaggattagataccctggtagtccacgccctaaacgatgtctactagttgtcgggtcttaattgacttggtaacgcagctaacgcgtgaagtagaccgcctggggagtacggtcgcaagattaaaactcaaaggaattgacggggacccgcacaagcggtggatgatgtggattaattcgatgcaacgcgaaaaaccttacctacccttgacatggtcggaatcctgaagagatttgggagtgctcgaaagagaaccggcgcacaggtgctgcatggctgtcgtcagctcgtgtcgtgagatgttgggttaagtcccgcaacgagcgcaacccttgtcattagttgctacgaaagggcactctaatgagactgccggtgacaaaccggaggaaggtggggatgacgtcaagtcctcatggcccttatgggtagggcttcacacgtcatacaatggtacatacagagggccgccaacccgcgagggggagctaatcccagaaagtgtatcgtagtccggattgtagtctgcaactcgactacatgaagttggaatcgctagtaatcgcggatcagcatgtcgcggtgaatacgttcccgggtcttgtacacaccgcccgtcacaccatgggagcgggttttaccagaagtgggtagcctaaccgcaaggagggggctcaccacggtaggattcgtgactggggtg

SEQ ID NO: 1621 - DNA, 1455 bp, Herbaspirillum seropedicae
attgaacgctggcggcatgccttacacatgcaagtcgaacggcagcataggagcttgctcctgatggcgagtggcgaacgggtgagtaatatatcggaacgtgccctagagtgggggataactagtcgaaagattagctaataccgcatacgatctacggatgaaagtgggggatcgcaagacctcatgctcctggagcggccgatatctgattagctagttggtggggtaaaagcctaccaaggcgacgatcagtagctggtctgagaggacgaccagccacactgggactgagacacggcccagactcctacgggaggcagcagtggggaattttggacaatgggggcaaccctgatccagcaatgccgcgtgagtgaagaaggccttcgggttgtaaagctcttttgtcagggaagaaacggttttggctaatatccagaactaatgacggtacctgaagaataagcaccggctaactacgtgccagcagccgcggtaatacgtagggtgcaagcgttaatcggaattactgggcgtaaagcgtgcgcaggcggttgtgtaagacagatgtgaaatccccgggctcaacctgggaattgcatttgtgactgcacggctagagtgtgtcagaggggggtagaattccacgtgtagcagtgaaatgcgtagatatgtggaggaataccgatggcgaaggcagccccctgggataacactgacgctcatgcacgaaagcgtggggagcaaacaggattagataccctggtagtccacgccctaaacgatgtctactagttgtcgggtcttaattgacttggtaacgcagctaacgcgtgaagtagaccgcctggggagtacggtcgcaagattaaaactcaaaggaattgacggggacccgcacaagcggtggatgatgtggattaattcgatgcaacgcgaaaaaccttacctacccttgacatggtcggaatcctgaagagatttgggagtgctcgaaagagaaccggcgcacaggtgctgcatggctgtcgtcagctcgtgtcgtgagatgttgggttaagtcccgcaacgagcgcaacccttgtcattagttgctacgaaagggcactctaatgagactgccggtgacaaaccggaggaaggtggggatgacgtcaagtcctcatggcccttatgggtagggcttcacacgtcatacaatggtacatacagagggccgccaacccgcgagggggagctaatcccagaaagtgtatcgtagtccggattggagtctgcaactcgactccatgaagttggaatcgctagtaatcgcggatcagcatgtcgcggtgaatacgttcccgggtcttgtacacaccgcccgtcacaccatgggagcgggttttaccagaagtgggtagcctaaccgcaaggagggcgctcaccacggtaggattcgtgactggggtg

SEQ ID NO: 1622 - DNA, 1455 bp, Herminiimonas arsenicoxydans
attgaacgctggcggcatgccttacacatgcaagtcgaacggcagcatgggagcttgctcctgatggcgagtggcgaacgggtgagtaatatatcggaacgtaccctagagtgggggataacgcagcgaaagttgcgctaataccgcatacgatctacggatgaaagtgggggatcgcaagacctcatgctcatggagcggccgatatctgattagctagttggtggggtaaaggcctaccaaggcttcgatcagtagctggtctgagaggacgaccagccacactggaactgagacacggtccagactcctacgggaggcagcagtggggaattttggacaatgggcgcaagcctgatccagcaatgccgcgtgagtgaagaaggccttcgggttgtaaagctcttttgtcagggaagaaacggtgaactctaatacagtttgctaatgacggtacctgaagaataagcaccggctaactacgtgccagcagccgcggtaatacgtagggtgcaagcgttaatcggaattactgggcgtaaagcgtgcgcaggcggttatgtaagtcagatgtgaaatccccgggctcaacctgggaatggcatttgagactgcatggctagagtgtgtcagaggggggtagaattccacgtgtagcagtgaaatgcgtagagatgtggaggaataccgatggcgaaggcagccccctgggataacactgacgctcatgcacgaaagcgtggggagcaaacaggattagataccctggtagtccacgccctaaacgatgtctactagttgtcgggacttaattgtcttggtaacgcagctaacgcgtgaagtagaccgcctggggagtacggtcgcaagattaaaactcaaaggaattgacggggacccgcacaagcggtggatgatgtggattaattcgatgcaacgcgaaaaaccttacctacccttgacatgtacggaatcccagagagatttgggagtgctcgaaagagagccgtaacacaggtgctgcatggctgtcgtcagctcgtgtcgtgagatgttgggttaagtcccgcaacgagcgcaacccttgtcattagttgctacgaaagggcactctaatgagactgccggtgacaaaccggaggaaggtggggatgacgtcaagtcctcatggcccttatgggtagggcttcacacgtcatacaatggtacatacagagggccgccaacccgcgagggggagctaatcccagaaagtgtatcgtagtccggattgtagtctgcaactcgactacatgaagttggaatcgctagtaatcgcggatcagcatgtcgcggtgaatacgttcccgggtcttgtacacaccgcccgtcacaccatgggagcgggtttcaccagaagtaggtagcctaaccgtaaggagggcgcttaccacggtgggattcgtgactggggtg

SEQ ID NO: 1623 - DNA, 1426 bp, Herminiimonas fonticola
tgccttacacatgcaagtcgaacggcagcacgggagcttgctcctggtggcgagtggcgaacgggtgagtaatatatcggaacgtaccctagagtgggggataacgcagcgaaagttgcgctaataccgcatacgatctacggatgaaagtgggggatcgcaagacctcatgctcatggagcggccgatatctgattagctagttggtagggtaaaagcctaccaaggcttcgatcagtagctggtctgagaggacgaccagccacactggaactgagacacggtccagactcctacgggaggcagcagtggggaattttggacaatgggcgcaagcctgatccagcaatgccgcgtgagtgaagaaggccttcgggttgtaaagctcttttgtcagggaagaaacggtggactctaatacagatcactaatgacggtacctgaagaataagcaccggctaactacgtgccagcagccgcggtaatacgtagggtgcaagcgttaatcggaattactgggcgtaaagcgtgcgcaggcggttgtgcaagacagatgtgaaatccccgggctcaacctgggaattgcatttgtgactgcacggctagagtgtgtcagaggggggtagaattccacgtgtagcagtgaaatgcgtagagatgtggaggaataccgatggcgaaggcagccccctgggataacactgacgctcatgcacgaaagcgtggggagcaaacaggattagataccctggtagtccacgccctaaacgatgtctactagttgttgggtcttaattgacttagtaacgcagctaacgcgtgaagtagaccgcctggggagtacggtcgcaagattaaaactcaaaggaattgacggggacccgcacaagcggtggatgatgtggattaattcgatgcaacgcgaaaaaccttacctacccttgacatgtacggaatccctgagagattagggagtgctcgaaagagaaccgtaacacaggtgctgcatggctgtcgtcagctcgtgtcgtgagatgttgggttaagtcccgcaacgagcgcaacccttgtcattagttgctacgaaagggcactctaatgagactgccggtgacaaaccggaggaaggtggggatgacgtcaagtcctcatggcccttatgggtagggcttcacacgtcatacaatggtacatacagagggccgccaacccgcgagggggagctaatcccagaaagtgtatcgtagtccggattgtagtctgcaactcgactacatgaagttggaatcgctagtaatcgcggatcagcatgtcgcggtgaatacgttcccgggtcttgtacacaccgcccgtcacaccatgggagcgggtttcaccagaagtaggtagcctaaccgtaaggagggcgcttaccacggtggattcg

SEQ ID NO: 1624 - DNA, 1580 bp, Hippea maritima
aacgaacgctggcggcgtgcctaacacatgcaagtcgtgggagaaagtctccttcgggagacgagtaaaccggcgcacgggtgagtaacacgtgggtaacctgccctgaagtccgggataacccaccgaaaggtgggctaataccggatagttcccctgcacttatcttagaatacaagaggatggtagaagaggttatgtgttttgtcctttacctcttttactcttttaattctctgtgttttaagataagtgcaggggggaaaggtggcctctgcttgcaagctatcgcttcaggatgggcccgcggcctatcaggtagttggtggggtaacggcctaccaagcctacgacgggtagctggtctgagaggatggtcagccacactggaactgagacacggtccagactcctacgggaggcagcagtggggaatattgggcaatgggggaaaccctgacccagcgacgccgcgtggaggatgaaggccttcgggtcgtaaactcctgtcagaggggaagaaggtgcgagggctaatacccctttgcacttgacggtaccctcagaggaagcaccggctaactacgtgccagcagccgcggtaatacgtagggtgcgagcgttgttcggaatcactgggcgtaaagcgtgcgtaggcgggcctgtaagtccaacgtgaaagccttgggctcaacccaagaactgcgttggatactgcaggtcttagagtgcgggagaggtgagcggaattcccggtgtaggggtgaaatccgtagatatcgggaagaacaccggtggcgaaggcggctcactggaacgcaactgacgctgaggcacgaaagcgtggggagcaaacaggattagataccctggtagtccacgccctaaacgatggacgctgggtgtcgggaggtactcttcccggtgccgtaagctaacgcgttaagcgtcccgcctggggagtacggccgcaaggctaaaactcaaaggaattgacgggggcccgcacaagcggtggagcatgtggtttaattcgatgatacgcgaagaaccttacctgggcttgacatgctggtggtagtgaaccgaaaggggaacgacccttaccttcgggtgagggagccagcacaggtgctgcatggctgtcgtcagctcgtgtcgtgagatgttgggttaagtcccgcaacgagcgcaaccctcgcccttagttgctaacggttcggccgagcactctaaggggaccgccagggataacctggaggaaggtggggatgacgtcaagtcatcacggcccttatgcccagggctacacacgtgctacaatggggtggacaaagggttgcaaacccgcgagggtgagctaatcccaaaaaccatcccccagttcggattgcagtctgcaactcgactgcatgaagccggaatcgctagtaatcgcaggtcagctacactgcggtgaatacgttcccgggccttgtacacaccgcccgtcacaccatgggagtcgattctaccggaagacggtgggctaaccccttttggggaggcagccgtccatggtagggtcggcgactggggtg

SEQ ID NO: 1625 - DNA, 1464 bp, Holophaga foetida
aatgaacgctggcggcgtgcctaacacatgcaagtcggatgtgcccgcaagggtgcatggcagacgggtgagtaacgcgtaggagacctacctttttgtggggaataacgttccgaaagggacgataataccgcatgagaccacaggattggatgcctgtggtgaaagccggggaccgtaaggcctggcgcaagaagagggtcctgcgtctgattagctagttggcggggtaacggcccaccaaggcgacgatcagtagccggcctgagagggtgatcggccacactggaactgagacacggtccagactcctacgggaggcagcagtggggaattttgcgcaatgggcgaaagcctgacgcagcaacgccgcgtgggtgatgaaggtcttcggattgtaaaaccctgtcgtcagggacgaaggcatgggattgaatatttcctatgcttgacggtacctggagaggaagccccggctaactctgtgccagcagccgcggtaatacagagggggcaagcgttattcggaattattgggcgtaaagggcgcgtaggcggttctttaagtgagatgtgcaatccccgggctcaacctgggaactgcatctcatactggagagctagagtgctggagagggtggtagaattccacgtgtagcggtgaaatgcgtagagatgtggaggaataccagtggcgaaggcggccacctggacagtaactgacgctgaggcgcgaaagtgtgggtagcaaacaggattagataccctggtagtccacgctgtaaacgatgaacacttggtgtggtgggagttgacccctgccgtgccggagctaacgcgttaagtgttccgcctggggagtacggtcgcaaggctgaaactcaaaggaattgacgggggcccgcacaagcggtggagcatgtggtttaattcgacgcaacgcgaagaaccttacctgggcttgaactgtaatggaccggtgcagagatgtgccttttcgcaagaactgttacagaggtgctgcatggctgtcgtcagctcgtgtcgtgagatgttgggttaagtcccgcaacgagcgcaacccttacccttagttgccagcgcgtaaaggcgggaactctaaggggactgcccgggttaaccgggaggaaggtggggatgatgtcaagtcctcatggcccttatgtccagggctacacacgtgctacaatgggcgatacaaaccgtcgcgaggccgcgaggtggagctaatcggagaaagtcgccctcagttcggattgtagtctgcaactcgactacatgaaggtggaatcgctagtaatcgtgtatcagaatgatacggtgaatacgttcccgggccttgtacacaccgcccgtcacatcacgaaagccgggagcacttgaagaggctgtggtaacccgcaagggggctaggtttcaatggtgaacttggtgattggggtg

SEQ ID NO: 1626 - DNA, 1409 bp, Humitalea rosea
agcgaacgctggcggcatgcttaacacatgcaagtcgcacgggcagcaatgtcagtggcggacgggtgagtaacgcgtaggaacatgtccaggggtgggggataacgtcgggaaactgacgctaataccgcatgtgagctgaggctcaaagcagcgatgcgcctttggagtggcctgcgtccgattaggtagttggtggggtaaaggcctaccaagcctatgatcggtagctggtctgagaggacgatcagccacactgggactgagacacggcccagactcctacgggaggcagcagtggggaatattggacaatgggcgcaagcctgatccagcaatgccgcgtgtgtgaagaaggtcttcggattgtaaagcactttcgacagggacgatgatgacggtacctgtagaagaagccccggctaacttcgtgccagcagccgcggtaatacgaagggggctagcgttgctcggaattactgggcgtaaagggcgcgtaggcggcggagtcagtcaggcgtgaaattcccgggcttaacctggggactgcgcttgatacggctatgctagaggatggaagaggctcgtggaattcccagtgtagaggtgaaattcgtagatattgggaagaacaccggtggcgaaggcggcgagctggtccattactgacgctgaggcgcgaaagcgtggggagcaaacaggattagataccctggtagtccacgctgtaaacgatgtgtgctggatgttgggtgacctagtcactcagtgtcgtagctaacgcggtaagcacaccgcctggggagtacggccgcaaggttgaaactcaaaggaattgacgggggcccgcacaagcggtggagcatgtggtttaattcgaagcaacgcgcagaaccttaccagcccttgacatggacggaagctccgagagattggagtgtgctcgcaagagagccgtcgcacaggtgctgcatggctgtcgtcagctcgtgtcgtgagatgttgggttaagtcccgcaacgagcgcaaccctcgcctttagttgccatcgggttatgccgggcactctagaggaactgtcggtgacaagccggaggaaggtggggatgacgtcaagtcctcatggcccttatgggctgggctacacacgtgctacaatggcggtgacaatgggaagccaggtcgcgagatcgagccgatcccaaaaagccgtctcagttcagatcgcactctgcaactcgagtgcgtgaaggtggaatcgctagtaatcgcggatcagcatgccgcggtgaatacgttcccgggccttgtacacaccgcccgtcacaccatgggagttggttttaccttaagtgggtgcgctaaccgcaagggggcagctcaccacggtagggtcagcgactggggtg

SEQ ID NO: 1627 - DNA, 1634 bp, Hungateiclostridium clariflavum
agagtttgatcctggctcaggacgaacgctggcggcgtgcctaacacatgcaagtcgagcggtcctgcattcaacattgagtattcagctgacgttggagattgagccggcgtcaagcagaaacaaccatatactatgatatgtttaaagtttctgcttcacgctgaataaagtgccaacacaaaaaggagctgagtattgaatgttgaatgcaggatagcggcggacgggtgagtaacgcgtgggtaatctgcctcacacagggggataacactgggaaactagtgctaataccgcataacataacgaggtggcatcactttgttatcaaaggagcaatccggtgtgagatgagcccgcgtccgattagctagttggtgaggtaacggctcaccaaggcgacgatcggtagccgaactgagaggttgatcggccacattgggactgagacacggcccagactcctacgggaggcagcagtggggaatattgcgcaatgggggaaaccctgacgcagcaacgccgcgtgaaggaagaaggtcttcggattgtaaacttctttggttggggacgataatgacggtacccaaggaacaagccacggctaactacgtgccagcagccgcggtaatacgtaggtggcgagcgttgtccggaattactgggtgtaaagggcgcgtaggcggggatgcaagtcagatgtgaaattccggggctcaaccccggcgctgcatctgaaactgtatttcttgagtgctggagaggaaagcggaattcctagtgtagcggtgaaatgcgtagagattaggaggaacaccagtggcgaaggcggctttctggacagtaactgacgctgaggcgcgaaagcgtggggagcaaacaggattagataccctggtagtccacgccgtaaacgatggatactaggtgtaggaggtatcgaccccttctgtgccggagttaacacaataagtatcccacctggggagtacggccgcaaggttgaaactcaaaggaattgacgggggcccgcacaagcagtggagtatgtggtttaattcgaagcaacgcgaagaaccttaccagggcttgacatccctctgacagctctagagatagggcttctcttcggagcagaggagacaggtggtgcatggttgtcgtcagctcgtgtcgtgagatgttgggttaagtcccgcaacgagcgcaacccttgttgttagttgccatcattaagttgggcactctaacgagactgccggtgataaatcggaggaaggtggggacgacgtcaaatcatcatgccccttatgtcctgggctacacacgtactacaatggctgctacaaagggaagcgagaccgtgaggtggagcaaatccccaaaagcagtcccagttcagattgcaggctgaaactcgcctgcatgaagtcggaattgctagtaatggcaggtcagcatactgccgtgaatacgttcccgggccttgtacacaccgcccgtcacaccatgagagtctgcaacacccgaagtcagtagtctaaccgagaggagggcgctgccgaaggtggggcagatgattggggtgaagtcgtaacaaggtagccgtatcggaaggtgcggctggatcacct

SEQ ID NO: 1628 - DNA, 1421 bp, Hungateiclostridium saccincola
  misc_feature (1413)..(1413): n is a, c, g, or t
agtcgagcggggtatacggagcagcttgctgcactgtagacctagcggcggacgggtgagtaacgcgtgggtaacctgccttacacagggggataacactgggaaaccagtgctaataccgcataacatcattttatggcatcatgaaatgatcaaaggagaaatccggtgtaagatgggcccgcgtccgattagctagttggtgaggtaatggctcaccaaggcagcgatcggtagccggactgagaggttggccggccacattgggactgagacacggcccagactcctacgggaggcagcagtggggaatattgcgcaatggggggaaccctgacgcagcgacgccgcgtgaaggaagaaggccttcgggttgtaaacttctttgattggggaagaaaaatgacggtacccaaagaacaagccacggctaactacgtgccagcagccgcggtaatacgtaggtggcgagcgttatccggaattactgggtgtaaagggcgtgtaggcggggatgcaagtcagatgtgaaattccggggctcaacctcggcactgcatctgaaactgtgtctcttgagtgctggagaggaaagtggaattcctagtgtagcggtgaaatgcgtagagattaggaggaacaccagtggcgaaggcgactttctggacagcaactgacgctgaggcgcgagagcgtggggagcaaacaggattagataccctggtagtccacgccgtaaacgatggatactaggtgtaggaggtatcgaccccttctgtgccgtagttaacacaataagtatcccacctggggagtacggccgcaaggctgaaactcaaaggaattgacgggggcccgcacaagcagtggagtatgtggtttaattcgaagcaacgcgaagaaccttaccagggcttgacatcccttgaccgctgtagaaatacagtttcccttcggggcaaggagacaggtggtgcatggttgtcgtcagctcgtgtcgtgagatgttgggttaagtcccgcaacgagcgcaacccctgtcgttagttgccagcacgtagaggtgggcactctagcgagactgccggtgacaaatcggaggaaggtggggacgacgtcaaatcatcatgccccttatgtcctgggctacacacgtactacaatggttgctacagagggcagcgaagccgcgaggtggagcaaatccctaaaagcagccccagttcggattgcaggctgaaactcgcctgcatgaagtcggaattgctagtaatggcaggtcagcatactgccgtgaatacgttcccgggccttgtacacaccgcccgtcacaccatgagagtcggcaacacccgaagtcagtagtctaaccgcaagggggacgctgccgaaggtggggctgatgattggggngaagtcgt

SEQ ID NO: 1629 - DNA, 1447 bp, Hungateiclostridium straminisolvens
  misc_feature (56)..(56): n is a, c, g, or t
gacgaacgctggcggcgtgcctaacacatgcaagtcgagcggagatatattgaagntttatcggatatatatcttagcggcggacgggtgagtaacgcgtgggtaacctgcctcatacagggggataacacagggaaacttgtgctaataccgcataacataacgaggcggcatcgctttgttatcaaaggagcaatccggtatgagatgggcccgcgtccgattagctagttggtgaggtaacggctcaccaaggcgacgatcggtagccgaactgagaggttgatcggccacattgggactgagacacggcccagactcctacgggaggcagcagtggggaatattgcgcaatgggggaaaccctgacgcagcaacgccgcgtgaaggaagaaggccttcgggttgtaaacttctttgattggggacgaagaaagtgactgtacccaaaaaacaagccacggctaactacgtgccagcagccgcggtaatacgtaggtggcaagcgttgtccggaattactgggtgtaaagggcgtgtaggcggggatgcaagtcagatgtgaaattccggggcttaaccccggcgctgcatctgaaactgtatctcttgagtgctggagaggaaagcggaattcctagtgtagcggtgaaatgcgtagatattaggaggaacaccagtggcgaaggcggctttctggacagtaactgacgctgaggcgcgaaagcgtggggagcaaacaggattagataccctggtagtccacgccgtaaacgatggatactaggtgtaggaggtatcgaccccttctgtgccggagttaacacaataagtatcccacctggggagtacggccgcaaggttgaaactcaaaggaattgacgggggcccgcacaagcagtggagtatgtggtttaattcgaagcaacgcgaagaaccttaccagggcttgacatcccttgaaagtcctagagataggatttctcttcggagcaaggagacaggtggtgcatggttgtcgtcagctcgtgtcgtgagatgttgggttaagtcccgcaacgagcgcaacccctgttgttagttgccatcattaagttgggcactctagcgagactgccggtgacaaatcggaggaaggtggggacgacgtcaaatcatcatgccccttatgtcctgggctacacacgtactacaatggctgttacaaagggaagctaagccgcgaggtggagcaaatccccaaaggcagccccagttcagattgcaggctgaaactcgcctgcatgaagtcggaattgctagtaatggcaggtcagcatactgccgtgaatacgttcccgggccttgtacacaccgcccgtcacaccatgagagtctgcaacacccgaagtcagtagtctaaccgcaaggaggacgctgccgaaggtggggccgatgattggggtga

SEQ ID NO: 1630 - DNA, 1489 bp, Hungateiclostridium thermocellum
agagtttgatcctggctcaggacgaacgctggcggcgtgcctaacacatgcaagtcgagcggggatatacggaaggtttaccggaagtatatcctagcggcggacgggtgagtaacgcgtgggtaacctacctcatacagggggataacacagggaaacctgtgctaataccgcataacataacggggcggcatcgtcctgttatcaaaggagaaatccggtatgagatgggcccgcgtccgattagctggttggtgaggtaacggctcaccaaggcgacgatcggtagccgaactgagaggttggtcggccacattgggactgagacacggcccagactcctacgggaggcagcagtggggaatattgcgcaatgggggaaaccctgacgcagcaacgccgcgtgaaggaagaaggccttcgggttgtaaacttctttgattggggacgaaggaagtgacggtacccaaagaacaagccacggctaactacgtgccagcagccgcggtaatacgtaggtggcgagcgttgtccggaattactgggtgtaaagggcgcgtaggcggggatgcaagtcagatgtgaaattccggggcttaaccccggcgctgcatctgaaactgtatctcttgagtgctggagaggaaagcggaattcctagtgtagcggtgaaatgcgtagatattaggaggaacaccagtggcgaaggcggctttctggacagtaactgacgctgaggcgcgaaagcgtggggagcaaacaggattagataccctggtagtccacgccgtaaacgatggatactaggtgtaggaggtatcgaccccttctgtgccggagttaacacaataagtatcccacctggggagtacggccgcaaggttgaaactcaaaggaattgacgggggcccgcacaagcagtggagtatgtggtttaattcgaagcaacgcgaagaaccttaccagggcttgacatccctctgacagctctagagatagggcttcccttcggggcagaggagacaggtggtgcatggttgtcgtcagctcgtgtcgtgagatgttgggttaagtcccgcaacgagcgcaacccttgtcgttagttgccagcacgttaaggtgggcactctagcgagactgccggcgacaagtcggaggaaggtggggacgacgtcaaatcatcatgccccttatgtcctgggctacacacgtactacaatggctgctacaaagggaagcgataccgcgaggtggagcaaatccccaaaagcagtcccagttcggattgcaggctgaaactcgcctgcatgaagtcggaattgctagtaatggcaggtcagcatactgccgtgaatacgttcccgggccttgtacacaccgcccgtcacaccatgagagtctgcaacacccgaagtcagtagtctaaccgcaaggagggcgctgccgaaggtggggcagatgattggggtgaagtcgtaacaaggtaacc

SEQ ID NO: 1631 - DNA, 1458 bp, Hyalangium minutum
aacgaacgctggcggcgtgcctaacacatgcaagtcgagcgcgaatggagcaatcctagtagagcggcgcacgggtgcgtaacacgtgggtaatctgcctagaagcctgggataaccagtcgaaagattggctaataccagataagcccacggggacttcggtcctcgagggaaaaggtggcctctgtatacaagctatcacttctagatgagcccgcggcccatcagctagttggcggggtaatggcccaccaaggcaacgacgggtagctggtctgagaggacgatcagccacactggaactgagacacggtccagactcctacgggaggcagcagtggggaattttgcgcaatgggcgaaagcctgacgcagcaacgccgcgtgtgtgatgaaggtcttcggattgtaaagcactttcgaccgggacgaaaaccctgaagctaacatcttcaggtttgacggtaccgggagaagaagcaccggctaactctgtgccagcagccgcggtaatacagagggtgcaagcgttgttcggaattattgggcgtaaagcgcgtgtaggcggctttgcaagtcgggtgtgaaagccctcagctcaactgaggaagtgcgcccgaaactgcagagcttgagtgccggagagggtggcggaattccccaagtagaggtgaaattcgtagatatggggaggaacaccggtggcgaaggcggccacctggacggtaactgacgctgagacgcgaaagcgtggggagcaaacaggattagataccctggtagtccacgccgtaaacgatgagaactaggtgtcgtgggagttgacccccgcggtgccgtagctaacgcattaagttctccgcctgggaagtacggtcgcaagactaaaactcaaaggaattgacgggggcccgcacaagcggtggagcatgtggtttaattcgacgcaacgcgcagaaccttacctggtcttgacatccttggaatccttcagagatgagggagtgcccgcaagggaaccaagagacaggtgctgcatggctgtcgtcagctcgtgtcgtgagatgttgggttaagtcccgcaacgagcgcaaccctcgcctttagttgctccgcaaggagatctctagagggactgccggtgttaaaccggaggaaggtggggatgacgtcaagtcctcatggcctttatgaccagggctacacacgtgctacaatggccggtacagaacgctgcaaacccgcgagggggagccaatcgtagaaaaccggtctcagttcagattggagtctgcaactcgactccatgaaggcggaatcgctagtaatcgcagatcagcacgctgcggtgaatacgttcccgggccttgtacacaccgcccgtcacaccatgggagtcaattgctccagaagtcatctcaccaagaggtgcccaaggagtggttggtaactggggtg

SEQ ID NO: 1632 - DNA, 1524 bp, Hydrocarboniclastica marina
agagtttgatcatggctcagattgaacgctggcggcaggcttaacacatgcaagtcgagcggtaacaggtccttcgggatgctgacgagcggcggacgggtgagtaatgcatgggaatctgcccggtaatgggggatagcccggggaaacccggattaataccgcatacgccctacgggggaaagcaggggatcttcggaccttgcgttatcggatgagcccatgtcggattagctagttggtggggtaaaggcctaccaaggcgacgatccgtagctggtttgagaggatgatcagccacactgggactgagacacggcccagactcctacgggaggcagcagtggggaatattggacaatgggggcaaccctgatccagccatgccgcgtgtgtgaagaaggctttcgggttgtaaagcactttcagcggggaggaaggctcacaggttaataccctgtgggattgacgttacccgcagaagaagcaccggctaactccgtgccagcagccgcggtaatacggagggtgcaagcgttaatcggaattactgggcgtaaagcgcgcgtaggcggtttgataagcaggatgtgaaagccctgggcttaacctaggaatggcattctgaactgtctgactggagtatggtagagggtagtggaatttcctgtgtagcggtgaaatgcgtagatataggaaggaacaccagtggcgaaggcgactacctggaccaatactgacgctgaggtgcgaaagcgtggggagcaaacaggattagataccctggtagtccacgctgtaaacgatgtcaactagtcgttggggatcttgaatccttagtgacgcagctaacgcactaagttgaccgcctggggagtacggccgcaaggttaaaactcaaatgaattgacgggggcccgcacaagcggtggagcatgtggtttaattcgacgcaacgcgaagaaccttacctggccttgacatcctgcgaaccctctggagacagaggggtgccttcgggagcgcagtgacaggtgctgcatggccgtcgtcagctcgtgtcgtgagatgttgggttaagtcccgtaacgagcgcaacccctgtccttagttaccagcgattcggtcgggaactctagggagactgccggtgacaaaccggaggaaggtggggatgacgtcaggtcatcatggcccttacggccagggctacacacgtgctacaatggcgcgcacagagggctgcaaacccgcgaggttgagccaatcccttaaaacgcgtcgtagtccggatcggagtctgcaactcgactccgtgaagtcggaatcgctagtaatcgcgaatcagaatgtcgcggtgaatacgttcccgggccttgtacacaccgcccgtcacaccatgggagtggattgcaccagaagtagttagtctaaccgcaaggaggacgactaccacggtgtggttcatgactggggtgaagtcgtaacaaggtagccgtaggggaacctgcggctggatcacct

SEQ ID NO: 1633 - DNA, 1448 bp, Hydrocarboniphaga daqingensis
attgaacgctggcggcatgcctaacacatgcaagtcgaacgagggtagcaatactctagtggcggacgggtgaggaatacataggaatttgcccttaagtgggggataacccggggaaacccggattaataccgcatgatctcgagagagcaaagcaggggaccgcaaggccttgcgcttttggagaagcctatgtcggattagcttgttggtgaggtaatggctcaccaaggccgcgatccgtaactggtctgagaggatgatcagtcacaccggaactgagacacggtccggactcctacgggaggcagcagtggggaatattggacaatgggcgaaagcctgatccagcaatgccgcgtgtgtgaagaaggccttcgggttgtaaagcactttaggctggaaagaaaaaactttctctaatacaggaagtcttgacggtaccagcagaataagcaccggctaactctgtgccagcagccgcggtaatacagagggtgcaagcgttaatcggatttactgggcgtaaagcgtgcgtaggtggctatttaagtcggatgtgaaagccctgggcttaacctgggaactgcattcgatactgggtggctagagatcggtagagggcagcggaattccgggtgtagcggtgaaatgcgtagatatccggaggaacaccgatggcgaaggcaactgcctgggcctgatctgacactgaggcacgaaagcgtgggtagcaaacaggattagataccctggtagtccacgctgtaaacgatgagaacttgacgtctgcttgctatgcgagtaggtgtcgtagctaacgcgataagttctccgcctggggagtacggccgcaaggttgaaactcaaaggaattgacgggggcccgcacaagcggtggagtatgtggtttaattcgatgcaacgcgaagaaccttacctggtcttgacatgtcaagaagtctgcagagatgcggatgtgccttcgggaacttgaacacaggtgctgcatggctgtcgtcagctcgtgtcgtgagatgttgggttaagtcccgcaacgagcgcaacccttgcccttagttgccatcattcagttgggcactctaaggggaccgccggtgacaaaccggaggaaggtggggatgacgtcaagtcatcatggcccttatgaccagggctacacacgtactacaatggtcggtacagagggtcgccaacccgcgagggggagccaatcccagaaagccgatcgtagtccggattggagtctgcaactcgactccatgaagtcggaatcgctagtaatcgcggatcagcacttgtcgcggtgaatacgttcccgggccttgtacacaccgcccgtcacaccatgggagttggttgcaccagaagtaggtagtctaaccgcaaggggggcgcctaccacggtgtggtcaatgactggggtg

SEQ ID NO: 1634 - DNA, 1448 bp, Hydrocarboniphaga effusa
attgaacgctggcggcatgcctaacacatgcaagtcgaacgagggtagcaataccttagtggcggacgggtgaggaatacataggaatttgcccttaagtgggggatagcccggggaaacccggattaataccgcatgaactcgcgagagcaaagtcggggaccttcgggcctggcgcttttggagaagcctatgtcggattagctagttggtgaggtaatggctcaccaaggctgcgatccgtaactggtctgagaggatgatcagtcacaccggaactgagacacggtccggactcctacgggaggcagcagtggggaatattggacaatgggcgaaagcctgatccagcaatgccgcgtgtgtgaagaaggccttcgggttgtaaagcactttaggctggaaagaaaaagctttggctaatatccaaagccttgacggtaccagcagaataagcaccggctaactctgtgccagcagccgcggtaatacagagggtgcaagcgttaatcggatttactgggcgtaaagcgtgcgtaggcggctatttaagtcggatgtgaaagccctgggcttaacctgggaactgcattcgatactgggtagctggagatcggtagagggcggcggaattccgggtgtagcggtgaaatgcgtagatatccggaggaacaccgatggcgaaggcaaccgcctgggcctgatctgacgctgaggcacgaaagcgtggggagcaaacaggattagataccctggtagtccacgctgtaaacgatgagaacttgacgtccgcttgctctgcgagtgggtgtcgaagctaacgcgctaagttctccgcctggggagtacggccgcaaggttgaaactcaaaggaattgacgggggcccgcacaagcggtggagtatgtggtttaattcgatgcaacgcgaagaaccttacctggtcttgacatgtcgagaatcctgcagagatgcgggagtgccttcgggaactcgaacacaggtgctgcatggctgtcgtcagctcgtgtcgtgagatgttgggttaagtcccgcaacgagcgcaacccttgcccttagttgccatcattcagttgggcactctaaggggaccgccggtgacaaaccggaggaaggtggggatgacgtcaagtcatcatggcccttatgaccagggctacacacgtactacaatggtcggtacagagggttgccaacccgcgagggggagctaatcccaaaaagccgatcgtagtccggattggagtctgcaactcgactccatgaagtcggaatcgctagtaatcgcggatcagcacttgtcgcggtgaatacgttcccgggccttgtacacaccgcccgtcacaccatgggagttgtttgcaccagaagtaggtagtctaaccgcaaggggggcgcttaccacggtgtggtcaatgactggggtg

SEQ ID NO: 1635 - DNA, 1412 bp, Hydrogenimonas thermophila
agtgaacgctggcggcgtgcctaacacatgcaagtcgaacgagaacggctcatagataccttcgggttgaaatgagtgtcagctaagtggcgcacgggtgagtaatgtataggtaacatgccccttggagggggataacagttggaaacgactgctaataccccatactcctctttgacataagttgaagagggaaatggtttattccgccaagggattggcctgtatcgtatcagctagttggtggggtaatggcctaccaaggctatgacgcgtagctggtctgagaggatgatcagccacactggaactgagacacggtccagactcctacgggaggcagcagtggggaatattgcacaatgggggaaaccctgatgcagcaacgccgcgtggaggatgacgcatttcggtgtgtaaactccttttctgtcggaagatgatgacggtatgacaggaataagcaccggctaactccgtgccagcagccgcggtaatacggagggtgcaagcgttactcggaatcactgggcgtaaaggacgcgtaggcgggttattaagtcagatgtgaaagcccacggctcaaccgtggaactgcatttgaaactgataacctagagtctgggagaggcagatggaattggtggtgtaggggtaaaatccgtagagatcaccaggaataccgatggcgaaggcgatctgctggaacagtactgacgctgaggcgtgaaagcgtggggagcaaacaggattagataccctggtagtccacgccctaaacgatgaatgctagtcgttgtggtgctagtcactgcagtgatgcagctaacgcaataagcattccgcctggggagtacggtcgcaagattaaaactcaaaggaatagacggggacccgcacaagcggtggagcatgtggtttaattcgaagatacgcgaagaaccttacctgggcttgacatcccgagaatcttgtagagatacgggagtgccctttcgggggaactcggtgacaggtgctgcacggctgtcgtcagctcgtgtcgtgagatgttgggttaagtcccgcaacgagcgcaaccctcgtccttagttgccagcactttgggtgggcactctaaggagactgcctgggtaaccaggaggaaggtgaggacgacgtcaagtcatcatggcccttatgtccagggcgacacacgtgctacaatggcgtgtacaatgagacgcaataccgtgaggtggagcaaatctataaaacacgtcccagttcggattgcagtctgcaactcgactgcatgaagttggaatcgctagtaatcgcggatcagccatgccgcggtgaatacgttcccgggtcttgtactcaccgcccgtcacaccatgggagttgatttcacccgaagcggggaagct

SEQ ID NO: 1636 - DNA, 1492 bp, Hydrogenivirga caldilitoris
cgcgaacgctggcggcacgcctaacacatgcaagtcgtggggcatcagaccctccttcgggagggtgctggcgaccggcaaacgggtgagtaacacgtgggtaacctaccctcaggagggggataaccccgggaaaccggggctaataccccataatgccaggcgccactgaggtgtcctggttaaagggggcctctgcttgcaagctcccgcctgaggatgggcccgcggcctatcaggtagttggtggggtaatggcctaccaagcctatgacgggtagccggcctgagagggtagccggccacagcgggactgagacacggcccgcacccctacggggggcagcagtggggaatcgtgggcaatgggcgaaagcctgaccccgcgatgccgcgtgcgggaagaagcccttcggggtgtaaaccgctgtcaggagggacgaagggactgtgggctaatacctcacagtcttgacggtacctccagaggaagggacggctaactacgtgccagcagccgcggtaatacgtaggtcccgagcgttgcgcggagtcactgggcgtaaagcgtccgcagctggtcgggtaagcgggatgtcaaagcccgccgcttaacggcggaacggcatcctgaactgcctgacttgaggcacgcccgggcaggcggaattcccggggtagcggtgaaatgcgtagatctcgggaggaacaccgaaggggaagccagcctgctggggctgtcctgacggtcagggacgaaagccaggggagcgaaccggattagatacccgggtagtcctggccgtaaaccatgggcgctagggctcgtccttctgggcgggctcgcagctaacgcgttaagcgccccgcctggggagtacgggcgcaagcctgaaactcaaaggaattggcgggggcccgcacaaccggtggagcgtctggttcaattcgatgctaaccgaagaaccttacccgggcttgacatgccagggtcacctctgcgaaagcggagggttttcgttcctctggagcgaaccctggcacaggtggtgcatggccgtcgtcagctcgtgtcgtgagatgttgggttaagtcccgcaacgagcgcaacccctgcctccagttgctaccccttttggggagcactctggagggactgccggcgataagccggaggaaggtggggacgacgtcaggtcagtatgccctttatgcccggggccacacaggcgctacagtggccgggacaatgggatgcgacccagcaatggggagccaatccttaaacccggtcatggtgcggattgtgggctgaaactcgcccacatgaagccggaatcggtagtaacggggtatcagcgatgtccccgtgaatacgttctcgggccttgcacacaccgcccgtcacgccacggaagtcggtcctgtcggaagtccccgagctaacccgcaagggaggcaggggccgatgatagggctggcaactggggcg

SEQ ID NO: 1637 - DNA, 1474 bp, Hydrogenobacter hydrogenophilus
cgcgaacgctggcggcgtgcctaacacatgcaagtcgtgcggggtggctctgccacccagcggcaaacgggtgagtaacacgtgagtaacctgccctcaggaaggggataaccctccgaaaggggggctaataccctataatgtccgggaccactaaggtttccggaccaaaggtggcctctgctctgcaagctaccgcctgaggaggggctcgcggcccatcaggtagttggtggggtaatggcctaccaagcctatgacgggtagccggcttgagagggtggccggccacagtgggactgagacacggcccacacccctacggggggcagcagtggggaatcgtgggcaatgggcgaaagcctgaccccgcgacgccgcgtggaggaagaagcccttcggggtgtaaactcctgtcaggggggaagatgctcacaggggtgaataatctctgtgggtgactgtacccccagaggaagggacggctaactacgtgccagcagccgcggtaatacgtaggtcccgagcgttgcgcgaattcactgggcgtaaagcgtccgcagccggatgggtaagcggtttgtcaaagcccaccgctcaacggtggaaaggcataccgaactgcccatcttgaggcacgctcaggtaggcggaattcccggtgtagcggtgaaatgcgtagatatcgggaggaacaccggtggcgaaggcggcctactggggctgtcctgacggtcagggacgaaagctgggggagcaaaccggattagatacccgggtagtcccagccgtaaaccatgggcgctaggcgttgtccgcaagggcagtgcctcagctaacgcggtaagcgccccgcctggggagtacgggcgcaagcctgaaactcaaaggaattggcgggggcccgcacaaccggtggagcgtctggttcaattcgatgctaaccgaaaaaccttacccgggcttgacatggtaggaaacccttgcgaaagcgaggggtgccgtcctctggacggaatcctaccacaggtggtgcatggccgtcgtcagctcgtgtcgtgagatgttgggttaagtcccgcaacgagcgcaacccctgcccttagttgccactcttcggagggcactctaaggggactgccggcgataagccggaggaaggtggggatgacgtcaggtcagtatgccctttatgcccggggctacacaggcgctacagtggccgggacaatgggaagcgacccagcaatggggagcaaatcctccaaacccggtcatggtgcagattgagggctgaaactcgccctcatgaagccggaatcggtagtaatggcggatcagctaagccgccgtgaatacgttctcgggccttgcacacaccgcccgtcacgccacggaagtcagtcttcccggaagccctcgagctaacccgcaagggaggcagaggacgatgggaaggctggcaactggggcg

SEQ ID NO: 1638 - DNA, 1474 bp, Hydrogenobacter thermophilus
cgcgaacgctggcggcgtgcctaacacatgcaagtcgtgcggggtggctctgccacccagcggcaaacgggtgagtaacacgtgagtaacctgccctcaggaaggggataaccctccgaaaggggggctaataccctataaagccaggggtcacaaaggctacctggccaaagggggcctctgctctgcatgctcccgcctgaggaggggctcgcggcccatcaggtagttggtggggtaacggcctaccaagcctatgacgggtagccggcctgagagggtggccggccacagtgggactgagacacggcccacacccctacggggggcagcagtggggaatcgtgggcaatgggcgaaagcctgaccccgcgacgccgcgtggaggaagaagcccttcggggtgtaaactcctgtcaggggggaagatgctcacagaggcgaatagtctctgtgggtgactgtacccccagaggaagggacggctaactacgtgccagcagccgcggtaatacgtaggtcccgagcgttgcgcgaatttactgggcgtaaagcgtccgcagccggatgggtaagcggtttgtcaaagcccaccgctcaacggtggaaaggcataccgaactgcccatcttgaggcacgctcaggtaggcggaattcccggtgtagcggtgaaatgcgtagatatcgggaggaacaccggtggcgaaggcggcctactggggctgtcctgacggtcagggacgaaagctgggggagcaaaccggattagatacccgggtagtcccagccgtaaaccatgggcgctaggcgttgtccgcaagggcagtgcctcagctaacgcggtaagcgccccgcctggggagtacgggcgcaagcctgaaactcaaaggaattggcgggggcccgcacaaccggtggagcgtctggttcaattcgatgctaaccgaaaaaccttacccgggtttgacatggtgggaaacccttgcgaaagcgaggggtgccgtcttctggacggaatcccaccacaggtggtgcatggccgtcgtcagctcgtgtcgtgagatgttgggttaagtcccgcaacgagcgcaacccctgcccttagttgctactcttcggagggcactctaaggggactgccggcgataagccggaggaaggtggggatgacgtcaggtcagtatgccctttatgcccggggctacacaggcgctacagtggccgggacaatgggaagcgactcagtaatgaggagcaaatcctataaacccggtcatggtgcggattgagggctgaaactcgccctcatgaagccggaatcggtagtaatggcggatcagctaagccgccgtgaatacgttctcgggccttgcacacaccgcccgtcacgccatggaagtcagtcttcccggaagccctcgggctaacccgtaagggaggtagaggacgatgggaaggctggcaactggggcg

SEQ ID NO: 1639 - DNA, 1451 bp, Hydrogenophaga intermedia
attgaacgctggcggcatgctttacacatgcaagtcgaacggtaacaggccgcaaggtgctgacgagtggcgaacgggtgagtaatgcatcggaacgtgcccagtcgtgggggataacgcagcgaaagctgcgctaataccgcatacgatctgcggatgaaagcgggggaccttcgggcctcgcgcgattggagcggccgatgtcagattaggtagttggtggggtaaaggctcaccaagccgacgatctgtagctggtctgagaggacgaccagccacactgggactgagacacggcccagactcctacgggaggcagcagtggggaattttggacaatgggggcaaccctgatccagcaatgccgcgtgcaggaagaaggccttcgggttgtaaactgcttttgtacggaacgaaaaggctctggttaatacctggagcacatgacggtaccgtaagaataagcaccggctaactacgtgccagcagccgcggtaatacgtagggtgcgagcgttaatcggaattactgggcgtaaagcgtgcgcaggcggtgctgtaagacaggcgtgaaatccccgggcttaacctgggaatggcgcttgtgactgcagtgctggagtgtggcagagggggatggaattccgcgtgtagcagtgaaatgcgtagatatgcggaggaacaccgatggcgaaggcaatcccctgggcctgcactgacgctcatgcacgaaagcgtggggagcaaacaggattagataccctggtagtccacgccctaaacgatgtcaactggttgttgggtcttttctgactcagtaacgaagctaacgcgtgaagttgaccgcctggggagtacggccgcaaggttgaaactcaaaggaattgacggggacccgcacaagcggtggatgatgtggtttaattcgatgcaacgcgaaaaaccttacccacctttgacatgtacggaagttgccagagatggcttcgtgctcgaaagagagccgtaacacaggtgctgcatggctgtcgtcagctcgtgtcgtgagatgttgggttaagtcccgcaacgagcgcaacccttgtcattagttgctacgaaagggcactctaatgagactgccggtgacaaaccggaggaaggtggggatgacgtcaagtcctcatggcccttataggtggggctacacacgtcatacaatggccggtacaaagggcagccaacccgcgagggggagctaatcccataaagccggtcgtagtccggatcgcagtctgcaactcgactgcgtgaagtcggaatcgctagtaatcgtggatcagcatgtcacggtgaatacgttcccgggtcttgtacacaccgcccgtcacaccatgggagcgggtctcgccagaagtaggtagcctaaccgtaaggagggcgcttaccacggcggggttcgtgactggggtg

SEQ ID NO: 1640 - DNA, 1460 bp, Hydrogenophilus thermoluteolus
  misc_feature (195)..(195): n is a, c, g, or t
  misc_feature (832)..(832): n is a, c, g, or t
attgaacgctggcggcatgcttacacatgcaagtcgaacggcatcgcgggaaagcttgctttcctggcggcgagtggcgaacgggtgagtaacacatcggaacgtaccggctagtgggggataacccgtcgaaagacggctaataccgcatacgctcttaggaggaaagcaggggacctttgggccttgcgctancgagcggccgatgtccgattagctagttggtggggtaaaggcctaccaaggcgacgatcagtagcgggtctgagaggacgatccgccacactgggactgagacacggcccagactcctacgggaggcagcagtggggaatcttggacaatgggggcaaccctgatccagcaatgccgcgtgggtgaagaaggccttcgggttgtaaagccctttcggcagggaagaaatcggcggggcgaataaccctgctggatgacggtacctgcagaagaagcaccggctaactacgtgccagcagccgcggtaatacgtagggtgcgagcgttaatcggatttactgggcgtaaagcgtgcgcaggcggcccgttaagacaggtgtgaaatccctgggctcaacctaggaattgcgcttgtgactggcgggctcgagtacggtagaggggggtggaattcctggtgtagcagtgaaatgcgtagagatcaggaggaacaccgatggcgaaggcagccccctgggcctgtactgacgctcatgcacgaaagcgtggggagcaaacaggattagataccctggtagtccacgccctaaacgatgggtactagccgtttggtgcgcgatagcgctgagtggcgaantaacgcgtgaagtaccccgcctggggagtacggccgcaaggttgaaactcaaaggaattgacggggaccgcacaagcggtggatgatgtggattaattcgatgcaacgcgaagaaccttacctacccttgacatgccccgaacctgggagagatcctggggtgcccgaaagggaacggggacacaggtgctgcatggctgtcgtcagctcgtgtcgtgagatgttgggttaagtcccgcaacgagcgcaacccctgccattagttgccagcggcttggccgggcactctaatgggactgccggtgacaaaccggaggaaggtggggacgacgtcaagtcatcatggcccttatgggtagggcttcacacgtcatacaatggcgcgtacagagggttgcgaagcgcgaggcggagccaatcccagaaagcgcgtcgtagtccggattgcagtctgcaactcgactgcatgaagtcggaatcgctagtaatcgcggatcagcatgccgcggtgaatacgttcccgggtcttgtacacaccgcccgtcacaccatgggagtggggtgcaccagaagtcggtagcctaaccgcaaggaggcgccgcccacggtgtgctccatgactggggtg

SEQ ID NO: 1641 - DNA, 1457 bp, Hydrogenovibrio crunogenus
  misc_feature (28)..(28): n is a, c, g, or t
  misc_feature (899)..(904): n is a, c, g, or t
  misc_feature (941)..(941): n is a, c, g, or t
  misc_feature (945)..(945): n is a, c, g, or t
  misc_feature (948)..(956): n is a, c, g, or t
  misc_feature (964)..(965): n is a, c, g, or t
  misc_feature (970)..(970): n is a, c, g, or t
  misc_feature (973)..(973): n is a, c, g, or t
  misc_feature (985)..(986): n is a, c, g, or t
  misc_feature (1142)..(1142): n is a, c, g, or t
cctaacacatgcaagtcggacggaaacnacaagaacaatcacttcggtgtgcgtttttgggcgtcgagtggcggacgggtgagtaacgcgtgggaatctaccctttagttggggacaacatatggaaacgtatgctaataccgaatatgctctacggagtaaaggtgccctctccttggaaggtatcgctaaaggatgagcccgcgttagattagctagttggtaaggtaaaggcttaccaaggcgacgatctatagctggtttgagaggatgatcagccacactgggactgagacacggcccagactcctacgggaggcagcagtggggaatattgcacaatgagggaaaccttgatgcagccatgccgcgtgtgtgaagaaggcccgagggttgtaaagcactttcaattgtgaggaagattaagtagctaatacctgcttagtttgacgttaactttagaagaagcaccggctaactctgtgccagcagccgcggtaatacagagggtgcaagcgttattcggaattactgggcgtaaagcgcgcgtaggcggactgttaagtcggttgtgaaagccctgggctcaacctaggaactgcatccgatactggcaatctagagtttaagagagggaagtggaattccaggtgtagcagtgaaatgcgtagatatctggaggaacatcagtggcgaaggcgacttcctggcttaaaactgacgctgaggtgcgaaagcttgggtagcgaacgggattagataccccggtagtccaagccgtaaacgatgtcaactagctgttggccttattaaaaaggttagtagcgtagctaacgcgataagttgaccgcctggggagtacggtcgcaagattaaaactcaaaggaattgacgggggnnnnnncaagcggtggagcatgtggtttaattcgatgcaacgngaanagnnnnnnnnncccttganntcctncgnactttctagagnnagattggtgccttcgggaacgcagtgacaggtgctgcatggctgtcgtcagctcgtgtcgtgagatgttgggttaagtcccgcaacgagcgcaacccttatcattagttgctaacatttagttgagaactctaatgagactgccggtgataaaccngaggaaggcggggacgacgtcaagtcatcatggcccttatgggatgggctacacacgtgctacaatggggggtacaaagagcagccaactggcgacagtgcgcgaatctcataaaacctctcgtagtccggatcggagtctgcaactcgactccgtgaagtcggaatcgctagtaatcgtgaatcagaatgtcacggtgaatacgttcccgggccttgtacacaccgcccgtcacaccatgggagtgggttgcaaaagaagtgggtagtctaaccttcgggagggcgctcaccactttgtgattcatgactgggg

SEQ ID NO: 1642 - DNA, 1466 bp, Hydrogenovibrio marinus
aatgaacgctggcggcaggcttaacacatgcaagtcgaacggtaacaggagaaagcttgctttcttgctgacgagtggcggacgggtgagtaatgtatgggaatctgccctctagttggggacaacatatggaaacgtatgctaataccgaatgtgatctacggattaaaggtgccctctccttggaaggtatcgctagaggatgagcccatattagattagctagttggtagggtaaaggcctaccaaggcgacgatctatagctggtttgagaggatgatcagccacactgggactgagacacggcccagactcctacgggaggcagcagtggggaatattgcacaatgagggaaaccttgatgcagccatgccgcgtgtgtgaagaaggcctgagggttgtaaagcactttcaattgtgaggaaagctaagtagttaatacctgcttagtgtgacgttaactttagaagaagcaccggctaactctgtgccagcagccgcggtaatacagagggtgcaagcgttattcggaattactgggcgtaaagcgcgcgtaggcggactgttaagtcggttgtgaaagccctgggctcaacctaggaattgcatccgatactggcaatctagagtttaagagagggaaggggaattccaggtgtagcagtgaaatgcgtagatatctggaggaacatcagtggcgaaggcgccttcctggcttaaaactgacgctgaggtgcgaaagcgtgggtagcgaacgggattagataccccggtagtccacgccgtaaacgatgtcaactagctgttggccttattaaaaaggttagtagcgcagctaacgcgataagttgaccgcctggggagtacggtcgcaagattaaaactcaaaggaattgacgggggcccgcacaagcggtggagcatgtggtttaattcgatgcaacgcgaagaaccttaccatcccttgacatcctgcgaactttctagagatagattggtgccttcgggaacgcagtgacaggtgctgcatggctgtcgtcagctcgtgtcgtgagatgttgggttaagtcccgcaacgagcgcaacccttatctttagttgctaccatttagttgagaactctaaagagactgccggtgataaaccggaggaaggcggggacgacgtcaagtcatcatggcccttatgggatgggctacacacgtgctacaatggggggtacaaagagcagctagctggcgacagtgcgcgaatctcataaaacccttcgtagtccggattggagtctgcaactcgactccatgaagtcggaatcgctagtaatcgtgaatcagaatgtcacggtgaatacgttcccgggccttgtacacaccgcccgtcacaccatgggagtgggttgcaaaagaagtaggtagtctaaccttcgggagggcgcttaccactttgtgattcatgactggggtg

SEQ ID NO: 1643 - DNA, 1478 bp, Hydrogenovibrio thermophilus
aatgaacgctggcggcaggcctaacacatgcaagtcgaacggaaacgacaagaacaaactcttcggagggcgatcttgggcgtcgagtggcggacgggtgagtaacgcgtgggaatctaccctttagttggggacaacatatggaaacgtatgctaataccgaatatgctctacggagtaaaggtggcctctacttgtaagctatcgctaaaggatgagcccgcgttagattagctagttggtggggtaaaggcctaccaaggcgacgatctatagctggtttgagaggatgatcagccacactgggactgagacacggcccagactcctacgggaggcagcagtggggaatattgcacaatgagggaaaccttgatgcagccatgccgcgtgtgtgaagaaggcccgagggttgtaaagcactttcaattgtgaggaaaggttagtcgctaatatcggctagctgtgacgttaactttagaagaagcaccggctaactctgtgccagcagccgcggtaatacagagggtgcaagcgttattcggaattactgggcgtaaagcgcgcgtaggcggactgttaagtcggttgtgaaagccctgggctcaacctaggaattgcatccgatactggcaatctagagtttaggagagggaagtggaattcctggtgtagcagtgaaatgcgtagatatcaggaggaacatcagtggcgaaggcgacttcctggcctaaaactgacgctgaggtgcgaaagcgtgggtagcgaacgggattagataccccggtagtccacgccgtaaacgatgtcaactagctgttggccttattaaaaaggttagtagcgtagctaacgcgctaagttgaccgcctggggagtacggtcgcaagattaaaactcaaaggaattgacgggggcccgcacaagcggtggagcatgtggtttaattcgatgcaacgcgaagaaccttaccatcccttgacatcctgcgaactttctagagatagattggtgccttcgggaacgcagtgacaggtgctgcatggctgtcgtcagctcgtgtcgtgagatgttgggttaagtcccgcaacgagcgcaacccttatctttagttgctaccatttagttgagaactctaaagagactgccggtgataaaccggaggaaggcggggacgacgtcaagtcatcatggcccttatgggatgggctacacacgtgctacaatggggggtacaaagagcagctagctggcgacagtgcgcgaatctcataaaacctctcgtagtccggatcggagtctgcaactcgactccgtgaagtcggaatcgctagtaatcgtgaatcagaatgtcacggtgaatacgttcccgggccttgtacacaccgcccgtcacaccatgggagtgggttgcaaaagaagtgggtagtctaaccttcgggagggcgctcaccactttgtgattcatgactggggtg

SEQ ID NO: 1644 - DNA, 1417 bp, Hydromonas duriensis
taaacgggtaacatgaagaaagcttgctttctgtgatgacgagtggcgaacgggtgagtaatacatcggaacgtaccgtttagtgggggataactactcgaaagagtagctaataccgcatacgaactacggttgaaagcgggggacctttgggcctcgcgctaaacgagcggccgatggaagattagctagttggtgaggtaaaggctcaccaaggcgacgatctttagcgggtctgagaggacgatccgccacactggaactgagacacggtccagactcctacgggaggcagcagtggggaattttggacaatgggggcaaccctgatccagcaatgccgcgtgagtgaagaaggccttcgggttgtaaagctcttttgttagggaagaaatccttaaggctaatacccttgggggatgacggtacctaaagaataagcaccggctaactacgtgccagcagccgcggtaatacgtagggtgcaagcgttaatcggaattactgggcgtaaagcgtgcgcaggcggtctgataagacagtcgtgaaatccccgagctcaacttgggagctgcgattgtaactgtcagactagagtgtgtcagagggaggtagaattccacgtgtagcagtgaaatgcgtagagatgtggaggaataccggtggcgaaggcggcctcctgggataacactgacgctcatgtacgaaagcgtggggagcaaacaggattagataccctggtagtccacgccctaaacgatgtcaactggttgttgggtcttcattgacttagtaacgaagctaacgcgtgaagttgaccgcctggggagtacggtcgcaagattaaaactcaaatgaattgacggggacccgcacaagcggtggatgatgtggattaattcgatgcaacgcgaaaaaccttacctacccttgacatgccactaacgaagcagagatgcattaggtgctcgaaagagaaagtggacacaggtgctgcatggctgtcgtcagctcgtgtcgtgagatgttgggttaagtcccgcaacgagcgcaacccttgtcattagttgccatcattaagttgggcactctaatgagactgccggtgacaaaccggaggaaggtggggatgacgtcaagtcctcatggcccttatgggtagggcttcacacgtcatacaatggtcggtacaaagggttgccaagccgcgaggtggagccaatcccataaaaccgatcgtagtccggattggagtctgcaactcgactccatgaagtcggaatcgctagtaatcgtggatcagaatgtcacggtgaatacgttcccgggtcttgtacacaccgcccgtcaaaccatgggagtgggtttcaccagaagtaggtagcctaaccgtaaggagggcgctaccacggtgatc

SEQ ID NO: 1645 - DNA, 1436 bp, Hymenobacter chitinivorans
gatgaacgctagcggcaggcctaatacatgcaagtcgaacgcagggtagcaataccttgagtggcgcacgggtgcgtaacgcgtaaccaacctacctacatctgggggatagcccgccgaaaggcggattaataccgcataacccaacagtgtggcatcacacaattggtaaagatttattggatgtagatggggttgcgtgccattagctagttggcggggtaacggcccaccaaggcgacgatggctaggggacctgagagggtgatcccccacactggcactgagatacgggccagactcctacgggaggcagcagtagggaatattgggcaatgggcgagagcctgacccagccatgccgcgtgccggatgaaggccttctgggttgtaaacggcttttctcagggaagaaaaaggggatgcgtcccaaactgacggtacctgaggaataagcaccggctaactccgtgccagcagccgcggtaatacggagggtgcaagcgttgtccggatttattgggtttaaagggtgcgtaggtggcccgttaagtccggggtgaaagcccactgctcaacagtggaactgccctggatactgacgggcttgagtccagacgaggttggcggaatggatggtgtagcggtgaaatgcatagataccatccagaaccccgattgcgtaggcagctgactaggctggtactgacactgaggcacgaaagcgtggggagcgaacaggattagataccctggtagtccacgccgtaaacgatggatactcgttgctagcgatacacagttagagacttagcgaaagtgtaagtatcccacctggggagtacgctcgcaagagtgaaactcaaaggaattgacgggggcccgcacaagtggtggagcatgtggtttaattcgatgatacgcgaggaaccttacctaggctagaatgcgcgtgaccggctcagagatgagcctttccttcgggacacaaagcaaggtgctgcatggccgtcgtcagctcgtgccgtgaggtgttgggttaagtcccgcaacgagcgcaacccctactgttagttgccagcggattatgccggggactctaataggactgcctgcgcaagcagtgaggaaggcggggacgacgtcaggtcatcatggcccttacgcctagggctacacacgtgctacaatggacggtacagagggtcgctacacagtgatgtgatgccaatctcacaaagccgttctcagttcggatcggagtctgcaactcgactccgtgaagctggaatcactagtaatcgcgtatcagcaatgacgcggtgaatacgttcccgggccttgtacacaccgcccgtcaagccatggaagtttggtagacctgaagctggtgctcgtcacagaagccagttagggtagaacaagtaactggggct

SEQ ID NO: 1646 - DNA, 1403 bp, Hyphomicrobium denitrificans
aacgaacgctggcggcaggcctaacacatgcaagtcgaacgccccgcaaggggagtggcagacgggtgagtaacacgtgggaaccttccctatagtacggaatagcccagggaaacttggagtaataccgtatacgcccgaaaggggaaagaatttcgctataggatgggcccgcgtaggattagctagttggtgaggtaatggctcaccaaggcgacgatccttagctggtttgagagaacgaccagccacactgggactgagacacggcccagactcctacgggaggcagcagtggggaatattggacaatgggcgcaagcctgatccagccatgccgcgtgagtgatgaaggccttagggttgtaaagctcttttggcggggacgataatgacggtacccgcagaataagtcccggctaacttcgtgccagcagccgcggtaatacgaaggggactagcgttgttcggaatcactgggcgtaaagcgcacgtaggcggatatgccagtcaggggtgaaatcccggggctcaacctcggaactgcccttgatacagcatgtcttgagtccgatagaggtgggtggaattcctagtgtagaggtgaaattcgtagatattaggaagaacaccggtggcgaaggcggcccactggatcggtactgacgctgaggtgcgaaagcgtggggagcaaacaggattagataccctggtagtccacgccgtaaacgatggatgctagccgtcggatagcttgctattcggtggcgcagctaacgcattaagcatcccgcctggggagtacggccgcaaggttaaaactcaaaggaattgacgggggcccgcacaagcggtggagcatgtggtttaattcgacgcaacgcgaagaaccttaccagctcttgacattcactgattgccggtagagatgccggagttccagcaatggacagtgggacaggtgctgcatggctgtcgtcagctcgtgtcgtgagatgttgggttaagtcccgcaacgagcgcaaccctcgccattagttgccatcattcagttgggcactctagtgggactgccggtgataagccggaggaaggtggggatgacgtcaagtcatcatggcccttacgggctgggctacacacgtgctacaatggcggtgacaatgcgcagccacctagtaatagggagctaatcgcaaaaagccgtctcagttcagattgaggtctgcaactcgacctcatgaagtcggaatcgctagtaatcgcgcatcagcatggcgcggtgaatacgttcccgggccttgtacacaccgcccgtcacaccatgggagttggtcttaccctaaaacggtgcgctaaccgcaaggaggcagccggccacggtaaggtcagcgactggggtg

SEQ ID NO: 1647 - DNA, 1401 bp, Hyphomicrobium facile
gaacgctggcggcaggcttaacacatgcaagtcgaacgccccgcaaggggagtggcagacgggtgagtaacacgtgggaaccttccctatagtacggaatagcccagggaaacttggagtaataccgtatacgcccgaaaggggaaagaattttcgctataggatgggcccgcgtaggattagctagttggtgaggtaatggctcaccaaggcgacgatccttagctggtttgagagaacgaccagccacactgggactgagacacggcccagactcctacgggaggcagcagtggggaatattggacaatgggcgcaagcctgatccagccatgccgcgtgagtgatgaaggccttagggttgtaaagctcttttgccggggacgataatgacggtacccggagaataagtcccggctaacttcgtgccagcagccgcggtaatacgaaggggactagcgttgttcggaatcactgggcgtaaagcgcacgtaggcggatttgtaagtcaggggtgaaatcccggggctcaacctcggaactgcctttgatactgcgaatcttgagtccgatagaggtgggtggaattcctagtgtagaggtgaaattcgtagatattaggaagaacaccggtggcgaaggcggcccactggatcggtactgacgctgaggtgcgaaagcgtggggagcaaacaggattagataccctggtagtccacgccgtaaacgatggatgctagccgtcggatagcttgctattcggtggcgcagctaacgcattaagcatcccgcctggggagtacggccgcaaggttaaaactcaaaggaattgacgggggcccgcacaagcggtggagcatgtggtttaattcgacgcaacgcgaagaaccttaccagctcttgacattcactgatcgcctggagagatccgggaattccagcaatggacagtgggacaggtgctgcatggctgtcgtcagctcgtgtcgtgagatgttgggttaagtcccgcaacgagcgcaaccctcgccattagttgccatcatttagttgggcactctagtgggactgccggtgataagccggaggaaggtggggatgacgtcaagtcatcatggcccttacgggctgggctacacacgtgctacaatggcggtgacaatgcgcagccacctagcaatagggagctaatcgcaaaaagccgtctcagttcagattgaggtctgcaactcgacctcatgaagtcggaatcgctagtaatcgcgcatcagcatggcgcggtgaatacgttcccgggccttgtacacaccgcccgtcacaccatgggagttggtcttaccctaaaacggtgcgctaaccgcaaggaggcagccggccacggtaaggtcagcgactggggtg

SEQ ID NO: 1648 - DNA, 1406 bp, Hyphomicrobium nitrativorans
aacgaacgctggcggcaggcctaacacatgcaagtcgaacgctgtagcaatacagagtggcagacgggtgagtaacacgtgggaatcttcctatcggtacggaatagctcagggaaacttggggtaataccgcatacgcccttcgggggaaagatttatcgccgatagacgagcccgcgtctgattagctagttggtgaggtaatggctcaccaaggcgacgatcagtagctggtctgagaggatgatcagccacactgggactgagacacggcccagactcctacgggaggcagcagtggggaatattggacaatgggcgaaagcctgatccagccatgccgcgtgagtgacgaaggtcttcggattgtaaagctcttttggcggggacgataatgacggtacccgcagaataagccccggctaacttcgtgccagcagccgcggtaatacgaagggggctagcgttgttcggaattactgggcgtaaagcgcacgtaggcggattgctaagtcaggggtgaaatcccggggctcaacctcggaactgcctttgatactgacaatcttgagtccggaagaggtgagtggaattcctagtgtagaggtgaaattcgtagatattaggaagaacaccagtggcgaaggcggctcactggtccggtactgacgctgaggtgcgaaagcgtggggagcaaacaggattagataccctggtagtccacgccgtaaactatggatgctagccgtcggcaagcttgcttgtcggtggcgcagctaacgcattaagcatcccgcctggggagtacggccgcaaggttaaaactcaaaggaattgacgggggcccgcacaagcggtggagcatgtggtttaattcgacgcaacgcgaagaaccttaccagctcttgacatttacggaccgtttccagagatggattcatcctagcaataggccgtaggacaggtgctgcatggctgtcgtcagctcgtgtcgtgagatgttgggttaagtcccgcaacgagcgcaaccctcgccattagttgccatcatttagttgggcactctagtgggactgccggtgataagccggaggaaggtggggatgacgtcaagtcatcatggcccttacgggctgggctacacacgtgctacaatggcggtgacaatgggcagcaacacagcgatgtgaagctaatctcaaaaagccgtctcagttcggattggtctctgcaactcgagaccatgaagttggaatcgctagtaatcgcgcatcagcatggcgcggtgaatacgttcccgggccttgtacacaccgcccgtcacaccatgggagttggttttacccgaagacggtgcgctaaccgcaaggaggcagccggccacggtaaggtcagcgactggggtg

SEQ ID NO: 1649 - DNA, 1399 bp, Hyphomicrobium sulfonivorans
gctggcggcaggcctaacacatgcaagtcgaacgccccgcaaggggagtggcagacgggtgagtaacgcgtgggaaccttcccaatggtgcggaatagcccagggaaacttggagtaataccgcataagcccttagggggaaagatttatcgccattggatgggcccgcgtcggattagctagttggtagggtaacggcctaccaaggcgacgatccgtagctggtttgagagaatgaccagccacactgggactgagacacggcccagactcctacgggaggcagcagtggggaatcttggacaatgggcgcaagcctgatccagccatgccgcgtgagtgacgaaggccttagggttgtaaagctcttttgccggggacgataatgacggtacccggagaataagtcccggctaacttcgtgccagcagccgcggtaatacgaaggggactagcgttgttcggaattactgggcgtaaagcgcacgtaggcggattattaagtcaggggtgaaatcccggggctcaacctcggaactgcctttgatactggtaatctagagtccgatagaggtgggtggaattcctagtgtagaggtgaaattcgtagatattacgaagaacaccagtggcgaaggcggcccactggatcggtactgacgctgaggtgcgaaagcgtggggagcaaacaggattagataccctggtagtccacgccgtaaacgatggatgctagccgtcggcaagcttgcttgtcggtggcgcagctaacgcattaagcatcccgcctggggagtacggccgcaaggttaaaactcaaaggaattgacgggggcccgcacaagcggtggagcatgtggtttaattcgacgcaacgcgaagaaccttaccagctcttgacatggtcggtcggtttccagagatggattcctcctagcaataggccgatacacaggtgctgcatggctgtcgtcagctcgtgtcgtgagatgttgggttaagtcccgcaacgagcgcaaccctcgccattagttgccatcattaagttgggcactctagtgggactgccggtgataagccggaggaaggtggggatgacgtcaagtcatcatggcccttacgggctgggctacacacgtgctacaatggcggtgacagtgggcagcaacacagcgatgtgaagctaatctcaaaaagccgtctcagttcggattggtctctgcaactcgagaccatgaagttggaatcgctagtaatcgcggatcagcatgccgcggtgaatacgttcccgggccttgtacacaccgcccgtcacaccatgggagttggttctacccgaaggcgatgcgctaacccgcaagggaggcagtcgaccacggtagggtcagcgactggggtg

SEQ ID NO: 1650 - DNA, 1406 bp, Hyphomicrobium zavarzinii
aacgaacgctggcggcaggcctaacacatgcaagtcgaacgctgtagcaatacagagtggcagacgggtgagtaacacgtgggaatcttcctatcggtacggaatagctcagggaaacttggggtaataccgcatacgcccttcgggggaaagatttatcgccgatagatgagcccgcgtctgattagctagttggtgaggtaatggctcaccaaggcgacgatcagtagctggtctgagaggatgaccagccacactgggactgagacacggcccagactcctacgggaggcagcagtggggaatattggacaatgggcgcaagcctgatccagccatgccgcgtgagtgacgaaggtcttcggattgtaaagctcttttggcggggacgataatgacggtacccgcagaataagccccggctaacttcgtgccagcagccgcggtaatacgaagggggctagcgttgttcggaattactgggcgtaaagcgcacgtaggcggattgctaagtcaggggtgaaatcccggggctcaacctcggaactgcctttgatactgacagtcttgagtccggaagaggtgagtggaattcctagtgtagaggtgaaattcgtagatattaggaagaacaccagtggcgaaggcggctcactggtccggtactgacgctgaggtgcgaaagcgtggggagcaaacaggattagataccctggtagtccacgccgtaaactatggatgctagccgtcggcaagcttgcttgtcggtggcgcagctaacgctttaagcatcccgcctggggagtacggccgcaaggttaaaactcaaaggaattgacgggggcccgcacaagcggtggagcatgtggtttaattcgacgcaacgcgaagaaccttaccagctcttgacatttacggaccgtttccagagatggattcatcctagcaataggccgtaggacaggtgctgcatggctgtcgtcagctcgtgtcgtgagatgttgggttaagtcccgcaacgagcgcaaccctcgccattagttgccatcatttagttgggcactctagtgggactgccggtgataagccggaggaaggtggggatgacgtcaagtcatcatggcccttacgggctgggctacacacgtgctacaatggcggtgacaatgggcagcaacacagcaatgtgaagctaatctcaaaaagccgtctcagttcggattgggctctgcaactcgagcccatgaagttggaatcgctagtaatcgcgcatcagcatggcgcggtgaatacgttcccgggccttgtacacaccgcccgtcacaccatgggagttggttttacccgaagacggtgcgctaaccgcaaggaggcagccggccacggtaaggtcagcgactggggtg

SEQ ID NO: 1651 - DNA, 1377 bp, Hyphomonas adhaerens
aacgaacgctggcggcaggcctaacacatgcaagtcgaacgacatagtggcagacgggtgagtaacgcgtgggaacgtacctttcgctacggaatagctcttggaaacgagtggtaataccgtatacgcccttcgggggaaagatttatcggcgaaagatcggcccgcgttagattagtttgttggtggggtaatggcctaccaagactacgatctatagctggtctgagaggatgatcagccacactgggactgagacacggcccagactcctacgggaggcagcagtggggaatcttgcacaatgggcgaaagcctgatgcagccatgccgcgtgaatgatgaaggccttagggttgtaaaattctttcgctagggatgataatgacagtacctagtaaagaagccccggctaacttcgtgccagcagccgcggtaatacgaagggggctagcgttgttcggaattactgggcgtaaagcgcacgtaggcggacttttaagtcagatgtgaaatcccggggctcaacctcggaactgcatttgaaactggaagtctggagttcaggagaggttagcggaataccgagtgtagaggtgaaattcgtagatattcggtggaacaccagtggcgaaggcggctaactggactgatactgacgctgaggtgcgaaagtgtggggagcaaacaggattagataccctggtagtccacaccgtaaacgatgacagctagttgttggcaggcatgcctgtcggtgacgcagctaacgcattaagctgtccgcctggggagtacggccgcaaggttaaaactcaaagaaattgacgggggcccgcacaagcggtggagcatgtggtttaattcgaagcaacgcgcagaaccttacctacccttgacatcccgatcgcggtttccagagatggattccttcagttaggctggatcggtgacaggtgctgcatggctgtcgtcagctcgtgtcgtgagatgttgggttaagtcccgcaacgagcgcaaccctcatccttagttgccatcacgtttgggtgggcactctaaggaaactgccggtggcaagccggaggaaggtggggatgacgtcaagtcctcatggcccttacgggtagggctacacacgtgctacaatggcagtgacaatgggataatcccaaaaagctgtctcagttcagattgtcctctgcaactcgagggcatgaaggtggaatcgctagtaatcgtggatcagcatgccacggtgaatacgttcccgggccttgtacacaccgcccgtcacatcatgggaattggctctacccgaagacgctgtgctaacttcggaggcaggcggccacggtagggtcagtgactgggatg

SEQ ID NO: 1652 - DNA, 1377 bp, Hyphomonas atlantica
aacgaacgctggcggcaggcttaacacatgcaagtcgaacgacatagtggcagacgggtgagtaacgcgtgggaacgtacctttcactacggaatagctcttggaaacgagtggtaataccgtatacgccctccgggggaaagatttatcggtgaaagatcggcccgcgttagattagctagttggtagggtaatggcctaccaaggcgacgatctatagctggtctgagaggatgatcagccacactgggactgagacacggcccagactcctacgggaggcagcagtggggaatcttgcacaatgggcgaaagcctgatgcagccatgccgcgtgaatgatgaaggccttagggttgtaaaattctttcgccagggatgataatgacagtacctggtaaagaagccccggctaacttcgtgccagcagccgcggtaatacgaagggggctagcgttgttcggaattactgggcgtaaagcgcacgtaggcggacttttaagtcagatgtgaaatcccggggctcaacctcggaactgcatttgaaactggaagtctagagaccaggagaggttagcggaataccgagtgtagaggtgaaattcgtagatattcggtggaacaccagtggcgaaggcggctaactggactggtactgacgctgaggtgcgaaagtgtggggagcaaacaggattagataccctggtagtccacaccgtaaacgatgagagctagttgttggcaggcatgcctgtcggtgacgcagctaacgcattaagctctccgcctggggagtacggtcgcaagattaaaactcaaagaaattgacgggggcccgcacaagcggtggagcatgtggtttaattcgaagcaacgcgcagaaccttacctacccttgacatcccgatcgcggtttccagagatggattccttcagttaggctggatcggtgacaggtgctgcatggctgtcgtcagctcgtgtcgtgagatgttgggttaagtcccgcaacgagcgcaaccctcatccttagttgccatcacgtttgggtgggcactctaaggaaactgccggtggtaagccggaggaaggtggggatgacgtcaagtcctcatggcccttacgggtagggctacacacgtgctacaatggcagtgacaatgggttaatccccaaaaactgtctcagttcggattgtcgtctgcaactcgacggcatgaaggtggaatcgctagtaatcgtggatcagcatgccacggtgaatacgttcccgggccttgtacacaccgcccgtcacatcatgggaattggttctacccgaagacgctgtgctaacttcggaggcaggcggccacggtaggatcagtgactgggatg

SEQ ID NO: 1653 - DNA, 1377 bp, Hyphomonas beringensis
aacgaacgctggcggcaggcttaacacatgcaagtcgaacgacatagtggcagacgggtgagtaacgcgtgggaacgtacctttcactacggaatagctcttggaaacgagtggtaataccgtatacgccctccgggggaaagatttatcggtgaaagatcggcccgcgttagattagctagttggtagggtaatggcctaccaaggcgacgatctatagctggtctgagaggatgatcagccacactgggactgagacacggcccagactcctacgggaggcagcagtggggaatcttgcacaatgggcgaaagcctgatgcagccatgccgcgtgaatgatgaaggccttagggttgtaaaattctttcgctagggatgataatgacagtacctagtaaagaagccccggctaacttcgtgccagcagccgcggtaatacgaagggggctagcgttgttcggaattactgggcgtaaagcgcacgtaggcggacttttaagtcagatgtgaaatcccagggctcaaccctggaactgcatttgaaactggaagtctagagaccaggagaggttagcggaataccgagtgtagaggtgaaattcgtagatattcggtggaacaccagtggcgaaggcggctaactggactggtactgacgctgaggtgcgaaagtgtggggagcaaacaggattagataccctggtagtccacaccgtaaacgatgagagctagttgttggcaggcatgcctgtcggtgacgcagctaacgcattaagctctccgcctggggagtacggccgcaaggttaaaactcaaagaaattgacgggggcccgcacaagcggtggagcatgtggtttaattcgaagcaacgcgcagaaccttacctacccttgacatcccgatcgcggtttccagagatggattccttcagttaggctggatcggtgacaggtgctgcatggctgtcgtcagctcgtgtcgtgagatgttgggttaagtcccgcaacgagcgcaaccctcatccttagttgccatcacgtttgggtgggcactctaaggaaactgccggtggtaagccggaggaaggtggggatgacgtcaagtcctcatggcccttacgggtagggctacacacgtgctacaatggcagtgacaatgggttaatccccaaaaactgtctcagttcggattgtcgtctgcaactcgacggcatgaaggtggaatcgctagtaatcgtggatcagcatgccacggtgaatacgttcccgggccttgtacacaccgcccgtcacatcatgggaattggttctacccgaagacgctgtgctaacttcggaggcaggcggccacggtaggatcagtgactgggatg

SEQ ID NO: 1654 - DNA, 1377 bp, Hyphomonas chukchiensis
aacgaacgctggcggcaggcttaacacatgcaagtcgaacgatatagtggcagacgggtgagtaacgcgtgggaacgtacctttcactacggaatagctcttggaaacgagtggtaataccgtatacgccctccgggggaaagatttatcggtgaaagatcggcccgcgttagattagctagttggtagggtaatggcctaccaaggcgacgatctatagctggtctgagaggatgatcagccacactgggactgagacacggcccagactcctacgggaggcagcagtggggaatcttgcacaatgggcgaaagcctgatgcagccatgccgcgtgaatgatgaaggccttagggttgtaaaattctttcgctagggatgataatgacagtacctagtaaagaagccccggctaacttcgtgccagcagccgcggtaatacgaagggggctagcgttgttcggaattactgggcgtaaagcgcacgtaggcggacttttaagtcaggtgtgaaatcccagggctcaaccctggaactgcatttgaaactggaagtctagagaccaggagaggttagcggaataccgagtgtagaggtgaaattcgtagatattcggtggaacaccagtggcgaaggcggctaactggactggtactgacgctgaggtgcgaaagtgtggggagcaaacaggattagataccctggtagtccacaccgtaaacgatgagagctagttgttggcaggcatgcctgtcagtgacgcagctaacgcattaagctctccgcctggggagtacggccgcaaggttaaaactcaaagaaattgacgggggcccgcacaagcggtggagcatgtggtttaattcgaagcaacgcgcagaaccttacctacccttgacatgtccagtatggtttccagagatggatcccttcagttaggctggctggaacacaggtgctgcatggctgtcgtcagctcgtgtcgtgagatgttgggttaagtcccgcaacgagcgcaaccctcatccttagttgccatcacgtttgggtgggcactctaaggaaactgccggtggcaagccggaggaaggtggggatgacgtcaagtcctcatggcccttacgggtagggctacacacgtgctacaatggcagtgacaatgggataatccccaaaaactgtctcagttcggattgtcgtctgcaactcgacggcatgaaggtggaatcgctagtaatcgtggatcagcatgccacggtgaatacgttcccgggccttgtacacaccgcccgtcacatcatgggaattggttctacccgaagatcgtgtgctaacttcggaggcagcgagccacggtaggatcagtgactgggatg

SEQ ID NO: 1655 - DNA, 1377 bp, Hyphomonas hirschiana
aacgaacgctggcggcaggcctaacacatgcaagtcgaacgatatagtggcagacgggtgagtaacgcgtgggaacgtacctttcactacggaatagctctgggaaactggtggtaataccgtatacgcccttagggggaaagatttatcggtgaaagatcggcccgcgttggattagctagttggtgaggtaatggctcacaaaggcgacgatccatagctggtctgagaggatgatcagccacactgggactgagacacggcccagactcctacgggaggcagcagtggggaatcttgcacaatgggcgaaagcctgatgcagccatgccgcgtgaatgatgaaggccttagggttgtaaaattctttcgtcagggatgataatgaccgtacctgaagaagaagccccggctaacttcgtgccagcagccgcggtaatacgaagggggctagcgttgttcggaattactgggcgtaaagcgcacgtaggcggacttttaagtcaggtgtgaaatcccgaggctcaacctcggaactgcatttgaaactggaagtctggagatcaggagaggttagcggaataccgagtgtagaggtgaaattcgtagatattcggtggaacaccagtggcgaaggcggctaactggactgatactgacgctgaggtgcgaaagtgtggggagcaaacaggattagataccctggtagtccacaccgtaaacgatgagagctagttgttggcaggcatgcctgtcggtgacgcagttaacacattaagctctccgcctggggagtacggccgcaaggttaaaactcaaagaaattgacgggggcccgcacaagcggtggagcatgtggtttaattcgaagcaacgcgcagaaccttacctacccttgacatgtctagtatggtttccggagacggattccttcagttcggctggctagaacacaggtgctgcatggctgtcgtcagctcgtgtcgtgagatgttgggttaagtcccgcaacgagcgcaaccctcatccttagttgccatcacgtttgggtgggcactctaaggaaactgccggtggcaagccggaggaaggtggggatgacgtcaagtcctcatggcccttacgggtagggctacacacgtgctacaatggcagtgacaatgggataatcccaaaaagctgtctcagttcggattgtcgtctgcaactcgacggcatgaaggtggaatcgctagtaatcgtggatcagcatgccacggtgaatacgttcccgggccttgtacacaccgcccgtcacatcatgggaattggttctacccgaagatcgtgcgctaacttcggaggcagcgagccacggtaggatcagtaactgggatg

SEQ ID NO: 1656 - DNA, 1377 bp, Hyphomonas jannaschiana
aacgaacgctggcggcaggcctaacacatgcaagtcgaacgacatagtggcagacgggtgagtaacgcgtgggaacgtacctttcgctacggaatagctcttggaaacgagtggtaataccgtatacgcccttcgggggaaagatttatcggcgaaagatcggcccgcgttagattaggtagttggtggggtaatggcctaccaagcctacgatctatagctggtctgagaggatgatcagccacactgggactgagacacggcccagactcctacgggaggcagcagtggggaatcttgcacaatgggcgaaagcctgatgcagccatgccgcgtgaatgatgaaggccttagggttgtaaaattctttcgccagggatgataatgacagtacctggtaaagaagccccggctaacttcgtgccagcagccgcggtaatacgaagggggctagcgttgttcggaattactgggcgtaaagcgcacgtaggcggacttttaagtcagatgtgaaatcccggggctcaacctcggaactgcatttgaaactggaagtctggagttcaggagaggttagcggaataccgagtgtagaggtgaaattcgtagatattcggtggaacaccagtggcgaaggcggctaactggactgatactgacgctgaggtgcgaaagtgtggggagcaaacaggattagataccctggtagtccacaccgtaaacgatgacagctagttgttggcaggcatgcctgtcggtgacgcagctaacgcattaagctgtccgcctggggagtacggccgcaaggttaaaactcaaagaaattgacgggggcccgcacaagcggtggagcatgtggtttaattcgaagcaacgcgcagaaccttacctacccttgacatcccgatcgcggtttccagagatggattccttcagttaggctggatcggtgacaggtgctgcatggctgtcgtcagctcgtgtcgtgagatgttgggttaagtcccgcaacgagcgcaaccctcatccttagttgccatcacgtttgggtgggcactctaaggaaactgccggtggcaagccggaggaaggtggggatgacgtcaagtcctcatggcccttacgggtagggctacacacgtgctacaatggcagtgacaatgggataatcccaaaaagctgtctcagttcagattgtcctctgcaactcgagggcatgaaggtggaatcgctagtaatcgtggatcagcatgccacggtgaatacgttcccgggccttgtacacaccgcccgtcacatcatgggaattggctctacccgaagacgctgtgctaacttcggaggcaggcggccacggtagggtcagtgactgggatg

SEQ ID NO: 1657 - DNA, 1377 bp, Hyphomonas johnsonii
aacgaacgctggcggcaggcttaacacatgcaagtcgaacgatatagtggcagacgggtgagtaacgcgtggaaacgtacctttcactacggaatagcacttggaaacgagtggtaataccgtatacgccctccgggggaaagatttatcggtgaaagatcggtccgcgttagattagctagttggtagggtaatggcctaccaaggcgacgatctatagctggtctgagaggatgatcagccacactgggactgagacacggcccagactcctacgggaggcagcagtggggaatcttgcacaatgggcgaaagcctgatgcagccatgccgcgtgaatgatgaaggccttagggttgtaaaattctttcgctagggatgataatgacagtacctagtaaagaagccccggctaacttcgtgccagcagccgcggtaatacgaagggggctagcgttgttcggaattactgggcgtaaagcgcacgtaggcggactattaagtcagatgtgaaatcccagggctcaaccctggaactgcatttgaaactggtagtctagagaccaggagaggttagcggaataccgagtgtagaggtgaaattcgtagatattcggtggaacaccagtggcgaaggcggctaactggactggtactgacgctgaggtgcgaaagtgtggggagcaaacaggattagataccctggtagtccacaccgtaaacgatgagagctagttgttggcaggcatgcctgtcagtgacgcagctaacgcattaagctctccgcctggggagtacggccgcaaggttaaaactcaaagaaattgacgggggcccgcacaagcggtggagcatgtggtttaattcgaagcaacgcgcagaaccttacctacccttgacataccgatcgcggtttccagagatggattccttcagttaggctggatcggatacaggtgctgcatggctgtcgtcagctcgtgtcgtgagatgttgggttaagtcccgcaacgagcgcaaccctcatccttagttgccatcacgtttgggtgggcactctaaggaaactgccggtggcaagccggaggaaggtggggatgacgtcaagtcctcatggcccttacgggtagggctacacacgtgctacaatggcagtgacaatgggataatccccaaaaactgtctcagttcggattgtcgtctgcaactcgacggcatgaaggtggaatcgctagtaatcgtggatcagcatgccacggtgaatacgttcccgggccttgtacacaccgcccgtcacatcatgggaattggttctacccgaagatcgtgtgctaacttcggaggcagcgagccacggtaggatcagtgactgggatg

SEQ ID NO: 1658 - DNA, 1377 bp, Hyphomonas neptunium; identical to SEQ ID NO: 1655

SEQ ID NO: 1659 - DNA, 1377 bp, Hyphomonas oceanitis; identical to SEQ ID NO: 1654

SEQ ID NO: 1660 - DNA, 1377 bp, Hyphomonas polymorpha
aacgaacgctggcggcaggcctaacacatgcaagtcgaacgatatagtggcagacgggtgagtaacgcgtgggaacgtacctttcactacggaatagctctgggaaactggtggtaataccgtatacgcccttagggggaaagatttatcggtgaaagatcggcccgcgttggattagctagttggtgaggtaatggctcacaaaggcgacgatccatagctggtctgagaggatgatcagccacactgggactgagacacggcccagactcctacgggaggcagcagtggggaatcttgcacaatgggcgaaagcctgatgcagccatgccgcgtgaatgatgaaggccttagggttgtaaaattctttcgtcagggatgataatgaccgtacctgaagaagaagccccggctaacttcgtgccagcagccgcggtaatacgaagggggctagcgttgttcggaattactgggcgtaaagcgcacgtaggcggacttttaagtcaggtgtgaaatcccggggctcaacctcggaactgcatttgaaactggaagtctggagatcaggagaggttagcggaataccgagtgtagaggtgaaattcgtagatattcggtggaacaccagtggcgaaggcggctaactggactgatactgacgctgaggtgcgaaagtgtggggagcaaacaggattagataccctggtagtccacaccgtaaacgatgagagctagttgttggcaggcatgcctgtcggtgacgcagttaacacattaagctctccgcctggggagtacggccgcaaggttaaaactcaaagaaattgacgggggcccgcacaagcggtggagcatgtggtttaattcgaagcaacgcgcagaaccttacctacccttgacatgtccagtatggtttccagagatggattccttcagttcggctggctggaacacaggtgctgcatggctgtcgtcagctcgtgtcgtgagatgttgggttaagtcccgcaacgagcgcaaccctcatccttagttgccatcacgtttgggtgggcactctaaggaaactgccggtggcaagccggaggaaggtggggatgacgtcaagtcctcatggcccttacgggtagggctacacacgtgctacaatggcagtgacaatgggataatcccaaaaagctgtctcagttcggattgtcgtctgcaactcgacggcatgaaggtggaatcgctagtaatcgtggatcagcatgccacggtgaatacgttcccgggccttgtacacaccgcccgtcacatcatgggaattggttctacccgaagacggtgagctaacttcggaggcagccggccacggtaggatcagtaactgggatg

SEQ ID NO: 1661 - DNA, 1213 bp, Hypnocyclicus thermotrophus
  misc_feature (1159)..(1159): n is a, c, g, or t
aaagaacttgcctcatagtctgggacaacagttggaaacgactgctaatactagatattatgaatgattggcatcttttattcatgaaagctatatgcgctatgagagagctttgcgtcctattagctagttggtgaggtaacggctcaccaaggcgacgataggtagccggcctgagagggtgaacggccacaaggggactgagacacggcccttactcctacgggaggcagcagtggggaatattggacaatggaccaaaagtctgatccagcaattctgtgtgcacgatgaaggtcttcggattgtaaagtgctttcagtagggaagaagaatgtgacggtacctacagaagaagcgacggctaaatacgtgccagcagccgcggtaatacgtatgtcgcaagcgttatccggaattattgggcataaagggcgtctaggtggtttattaagtctgatgtgaaaatgcggagctcaactccgtattgcgttggaaactgatttactagagtcttggagaggtgggcggaactacaagtgtagaggtgaaattcgtagatatttgtaggaatgccgatgacgaaggtagctcactggacaagtactgacactaaagcgcgaaagctaggggagcaaacaggattagataccctggtagtcctagctgtaaacgatgatcactgggtgtggggggtcgaacctctgtgccgaagttaatgcgataagtgatccgcctggggagtacgctcgcaagagtgaaactcaaaggaattgacggggacccgcacaagcggtggagcatgtggtttaattcgacgcaacgcgaggaaccttaccagtccttgacatcctaagaacttagcagagatgctttggtgcctcttcggaggaacttagtgacaggtggtgcatggctgtcgtcagctcgtgtcgtgagatgttgggttaagtcccgcaacgagcgcaacccctattgctagttaccatcattaagttggggactctagcgagactgcctgcgacgagcaggaggaaggtggggatgacgtcaagtcatcatgccccttatggactgggctacacacgtgctacaatgggcggtacaaagagaagcaagctggtgacagtaagcaaatctcaaaaatccgctctcagtncggattgtagtctgcaactcgactacatgaagttggaatcgctagtaatcgcga

SEQ ID NO: 1662 - DNA, 1428 bp, Hyunsoonleella pacifica
tggcctaacacatgcaagtcgaggggtaacaggaaaaagcttgcttttttgctgacgaccggcgcacgggtgcgtaacgcgtatacaatctgccttgtactgggggatagcctttagaaatgaagattaacaccccataatatatagagttcgcatggacattatattaaagtttacggtacaagatgagtatgcgtcctattagctagatggtgtggtaacggcacaccatggccacgataggtaggggccctgagagggggatcccccacactggtactgagacacggaccagactcctacgggaggcagcagtgaggaatattggacaatggaggcaactctgatccagccatgccgcgtgcaggaagactgccctatgggttgtaaactgcttttatacgggaagaaaccactctacgtgtagagtcttgacggtaccgtaagaataaggatcggctaactccgtgccagcagccgcggtaatacggaggatccaagcgttatccggaatcattgggtttaaagggtccgtaggtggactggtcagtcagaggtgaaatcctgcagcttaactgtagaactgcctttgatactgctagtcttgaatcattatgaagtggttagaatatgtagtgtagcggtgaaatgcatagatattacatagaataccaattgcgaaggcagatcactaataatgtattgacactgatggacgaaagcgtaggtagcgaacgggattagataccccggtagtctacgccgtaaacgatggatactagctgttcggcttcggctgagtggctaagcgaaagtgataagtatcccacctggggagtacgttcgcaagaatgaaactcaaaggaattgacgggggcccgcacaagcggtggagcatgtggtttaattcgatgatacgcgaggaaccttaccagggcttaaatgtagagtgacaggctgagagatcggcttttcttcggacactttacaaggtgctgcatggttgtcgtcagctcgtgccgtgaggtgtcaggttaagtcctataacgagcgcaacccctgttgttagttgccagcatgtaaagatgggaactctagcaagactgccagtgcaaactgtgaggaaggtggggatgacgtcaaatcatcacggcccttacgtcctgggctacacacgtgctacaatggtagggacagagagcagccacaacgcgagttggagcgaatctataaaccctatcacagttcggatcggagtctgcaactcgactccgtgaagctggaatcgctagtaatcggatatcagccatgatccggtgaatacgttcccgggccttgtacacaccgcccgtcaagccatggaagctgggagtgcctgaagtccgtcaccgcaaggagcggcctagggtaaaatcggtaactagggct

SEQ ID NO: 1663 - DNA, 1465 bp, Idiomarina abyssalis
attgaacgctggcggcaggcctaacacatgcaagtcgagcggtaacagagagaagcttgcttctctgctgacgagcggcggacgggtgagtaatacttgggaatttgcctttaggcgggggacaaccacgggaaactgtggctaataccgcataatgtctacggaccaaagtgggggaccttcgggcctcacacctaaagatgagcccaagcgggattagctagttggtggggtaaaggctcaccaaggcgacgatccctagctgttctgagaggatgatcagccacactgggactgagacacggcccagactcctacgggaggcagcagtggggaatattgcacaatgggggaaaccctgatgcagccatgccgcgtgtgtgaagaaggccttcgggttgtaaagcactttcagcgacgaggaaggagtgtgtgttaatagcgcacattattgacgttagtcgcagaagaagcaccggctaactccgtgccagcagccgcggtaatacggagggtgcaagcgttaatcggaattactgggcgtaaagcgtacgtaggcggcgtgttaagcaagatgtgaaagccccgggctcaacctgggaattgcattttgaactggcatgctagagtcctgaagagggtggtagaatttccagtgtagcggtgaaatgcgtagatattggaaggaataccagtggcgaaggcggccacctggtcagagactgacgctgaggtacgaaagcgtggggagcaaacaggattagataccctggtagtccacgccgtaaacgatgtcaactagttgttcgtgtcattaagacgtgagtaacgcagctaacgcactaagttgaccgcctggggagtacggccgcaaggttaaaactcaaatgaattgacgggggcccgcacaagcggtggagcatgtggtttaattcgatgcaacgcgaagaaccttaccatcccttgacatccagtgaattttccagagatggattagtgccttcgggaacactgagacaggtgctgcatggctgtcgtcagctcgtgttgtgagatgttgggttaagtcccgcaacgagcgcaacccttatccttagttgccagcacgtaaaggtgggaactctggggagactgccggtgataaaccggaggaaggtggggacgacgtcaagtcatcatggcccttacgggatgggctacacacgtgctacaatggcgcatacaaagggcagcaagccagcgatggttagcgaatctcataaagtgcgtcgtagtccggattggagtctgcaactcgactccatgaagtcggaatcgctagtaatcgtggatcagaatgccacggtgaatacgttcccgggccttgtacacaccgcccgtcacaccatgggagtgggctgcaccagaagtggttagtttaaccttcgggagaacgatcaccacggtgtggttcatgactggggtg

SEQ ID NO: 1664 - DNA, 1439 bp, Idiomarina aquatica
attgaacgctggcggcaggcctaacacatgcaagtcgagcggtaacaggaagaagcttgcttctttgctgacgagcggcggacgggtgagtaatacttgggaacttgcctctaggcgggggacaaccactggaaacggtggctaataccgcataatgtctacggaccaaagtgggggaccttcgggcctcacacctagagatgggcccaagcgggattagctagttggtgaggtaacggctcaccaaggcgacgatccctagctgttctgagaggatgatcagccacactgggactgagacacggcccagactcctacgggaggcagcagtggggaatattggacaatgggggcaaccctgatccagccatgccgcgtgtgtgaagaaggccttcgggttgtaaagcactttcagtggtgaggaaagggtaatcgttaatagcggttacagttgacgttagccacagaagaagcaccggctaactccgtgccagcagccgcggtaatacggagggtgcaagcgttaatcggaattactgggcgtaaagcgtacgtaggcggtgtgttaagcaagatgtgaaagccccgggctcaacctgggaatggcattttgaactggcacgctagagtcctgaagagggtggtagaatttccagtgtagcggtgaaatgcgtagatattggaaggaataccggtggcgaaggcggccacctggtcagagactgacgctgaggtacgaaagcgtggggagcaaacaggattagataccctggtagtccacgccgtaaacgatgtcaactagttgttcgtgtctttaagacgtgagtaacgcagctaacgcactaagttgaccgcctggggagtacggccgcaaggttaaaactcaaatgaattgacgggggcccgcacaagcggtggagcatgtggtttaattcgatgcaacgcgaagaaccttaccatcccttgacatccagtgaactttctagagatagattggtgccttcgggaacactgagacaggtgctgcatggctgtcgtcagctcgtgttgtgagatgttgggttaagtcccgcaacgagcgcaacccttatccttagttgccagcacgtaatggtgggaactctggggagactgccggtgataaaccggaggaaggtggggacgacgtcaagtcatcatggcccttacgggatgggctacacacgtgctacaatggcgcgtacaaagggcagcgaacctgcgaaggtaagcgaatctcataaagcgcgtcgtagtccggattggagtctgcaactcgactccatgaagtcggaatcgctagtaatcgtggatcagaatgccacggtgaatacgttcccgggccttgtacacaccgcccgtcacaccatgggagtgggctgcaccagaagtggttagtttaaccttcgggagaacgatca

SEQ ID NO: 1665 - DNA, 1430 bp, Idiomarina aquimaris
gtcgagcggtaacagagagaagcttgcttctttgctgacgagcggcggacgggtgagtaatacttgggaacttgcctttaggagggggacaaccacgggaaactgtggctaataccgcataatgtctacggaccaaagtaggggatcttcggaccttgcacctaaagatgggcccaagcgagattagctagttggtggggtaaaggctcaccaaggcgacgatctctagctgttctgagaggatgatcagccacactgggactgagacacggcccagactcctacgggaggcagcagtggggaatattgcacaatgggggaaaccctgatgcagccatgccgcgtgtgtgaagaaggccttcgggttgtaaagcactttcagtggtgaggaaggccgtaagattaatactcttgcggattgacgttaaccacagaagaagcaccggctaactccgtgccagcagccgcggtaatacggagggtgcaagcgttaatcggaattactgggcgtaaagcgtacgtaggcggcttgttaagcaagatgtgaaagccccgggctcaacctgggaatggcattttgaactggcaggctcgagttctgaagagggtggtagaatttcctgtgtagcggtgaaatgcgtagatataggaaggaataccggtggcgaaggcggccacctggtcagaaactgacgctgaggtacgaaagcgtggggagcaaacaggattagataccctggtagtccacgccgtaaacgatgtcaactagttgttcgtcttataaacaaggtgagtaacgcagctaacgcactaagttgaccgcctggggagtacggccgcaaggttaaaactcaaatgaattgacgggggcccgcacaagcggtggagcatgtggtttaattcgatgcaacgcgaagaaccttaccatcccttgacatccagagaattttctagagatagattggtcccttcgggaattttgagacaggtgctgcatggctgtcgtcagctcgtgttgtgagatgttgggttaagtcccgcaacgagcgcaacccttatcttcagttgccagcggttcggccgggaactctgtggagactgccggtgataaaccggaggaaggtggggacgacgtcaagtcatcatggcccttacgggatgggctacacacgtgctacaatggcgcgtacaatgggaagcaagcacgcgagtgtaagcggatctcaaaaagcgcgtcgtagtccggattggagtctgcaactcgactccatgaagtcggaatcgctagtaatcgtggatcagaatgccacggtgaatacgttcccgggccttgtacacaccgcccgtcacaccatgggagtgggctgcaccagaagtggatagtttaaccttcgggagaacgttcaccacggtgtggttcatgactgggg

SEQ ID NO: 1666 - DNA, 1466 bp, Idiomarina atlantica
attgaacgctggcggcaggcctaacacatgcaagtcgagcggtaacaggaagaagcttgcttctttgctgacgagcggcggacgggtgagtacaacttgggaacttgcctttaggagggggacaaccacgggaaactgtggctaataccgcataatatcttcggatcaaagtaggggctcttcggaccttacgcctaaagataggcccaagcgagattagctagttggtgaggtaaaggctcaccaaggcgacgatctctagctgttctgagaggatgatcagccacactgggactgagacacggcccagactcctacgggaggcagcagtggggaatattgcacaatgggggaaaccctgatgcagccatgccgcgtgtgtgaagaaggccttcgggttgtaaagcactttcagtggtgaggaaggccatacacctaatacgtgtgtggattgacgttagccacagaagaagcaccggctaactccgtgccagcagccgcggtaatacggagggtgcaagcgttaatcggaattactgggcgtaaagcgtacgtaggcggcttgttaagcaagatgtgaaagccccgggctcaacctgggaatggcattttgaactggcaagctcgagttttgaagagggtggtagaatttcctgtgtagcggtgaaatgcgtagatataggaaggaataccagtggcgaaggcggccacctggtcaaaaactgacgctgaggtacgaaagcgtggggagcaaacaggattagataccctggtagtccacgccgtaaacgatgtcaactagttgttcgtgtcataaacgatgtgagtaacgcagctaacgcactaagttgaccgcctggggagtacggccgcaaggttaaaactcaaatgaattgacgggggcccgcacaagcggtggagcatgtggtttaattcgatgcaacgcgaagaaccttaccatcccttgacatccagtgaattttccagagatggattagtgccttcgggaacactgagacaggtgctgcatggctgtcgtcagctcgtgttgtgagatgttgggttaagtcccgcaacgagcgcaacccttatcctcagttgccagcacgtaatggtgggaactctgtggagactgccggtgataaaccggaggaaggtggggacgacgtcaagtcatcatggcccttacgggatgggctacacacgtgctacaatggcgcatacaaagggaagcaagcgcgcgagtgcaagcggatctcaaaaagtgcgtcgtagtccggatcggagtctgcaactcgactccgtgaagtcggaatcgctagtaatcgcggatcagaatgccgcggtgaatacgttcccgggccttgtacacaccgcccgtcacaccatgggagtgggctgcaccagaagtagatagcttaaccttcgggagggcgtttaccacggtgtggttcatgactggggtg

SEQ ID NO: 1667 - DNA, 1464 bp, Idiomarina baltica
  misc_feature (269)..(269): n is a, c, g, or t
attgaacgctggcggcaggcctaacacatgcaagtcgagcggtaacagagagaagcttgcttctttgctgacgagcggcggacgggtgagtaatacttgggaacttgcctctaggcgggggacaaccactggaaacggtggctaataccgcataatgtctacggaccaaagtgggggaccttcgggcctcacacctagagatgggcccaagcgggattagctagttggtgaggtaaaggctcaccaaggcgacgatccctagctgttcngagaggatgatcagccacactgggactgagacacggcccagactcctacgggaggcagcagtggggaatattgcacaatgggcgcaagcctgatgcagccatgccgcgtgtgtgaagaaggccttcgggttgtaaagcactttcagtggtgaggaaggtcagtaagttaataacttgctgaattgacgttagccacagaagaagcaccggctaactccgtgccagcagccgcggtaatacggagggtgcaagcgttaatcggaattactgggcgtaaagcgtacgtaggcggtgtgttaagcaagatgtgaaagccccgggctcaacctgggaattgcattttgaactggcacgctagagtcctgaagagggtggtagaatttccagtgtagcggtgaaatgcgtagatattggaaggaataccagtggcgaaggcggccacctggtcagagactgacgctgaggtacgaaagcgtggggagcaaacaggattagataccctggtagtccacgccgtaaacgatgtcaactagttgttcgtgtcactaagacgtgagtaacgcagctaacgcactaagttgaccgcctggggagtacggccgcaaggttaaaactcaaatgaattgacgggggcccgcacaagcggtggagcatgtggtttaattcgatgcaacgcgaagaaccttaccatcccttgacatccagtgaactttctagagatagattggtgccttcgggaacactgagacaggtgctgcatggctgtcgtcagctcgtgttgtgagatgttgggttaagtcccgcaacgagcgcaacccttatccttagttgccagcgattcggtcgggaactctggggagactgccggtgataaaccggaggaaggtggggacgacgtcaagtcatcatggcccttacgggatgggctacacacgtgctacaatggcgcgtacaaagggcagcgaacctgcgagggtaagcgaatctcataaagcgcgtcgtagtccggattggagtctgcaactcgactccatgaagtcggaatcgctagtaatcgtggatcagaatgccacggtgaatacgttcccgggccttgtacacaccgcccgtcacaccatgggagtgggctgcaccagaagtggttagtttaaccttcgggagaacgatcaccacggtgtggttcatgactggggtg

SEQ ID NO: 1668 - DNA, 1466 bp, Idiomarina donghaiensis
attgaacgctggcggcaggcctaacacatgcaagtcgagcggtaacagagagtagcttgctactttgctgacgagcggcggacgggtgagtaatgcttgggaacttgcctttaggagggggataaccacgggaaactgtggctaataccgcataacgtctacggaccaaagcaggggatcttcggaccttgcacctaaagataggcccaagtgagattagctagttggtggggtaaaggctcaccaaggcgacgatctctagctgttctgagaggatgatcagccacactgggactgagacacggcccagactcctacgggaggcagcagtggggaatattgcacaatgggggaaaccctgatgcagccatgccgcgtgtgtgaagaaggccttcgggttgtaaagcactttcagtggtgaggaagggcgtaagattaatactcttgcgcattgacgttagccacagaagaagcaccggctaactccgtgccagcagccgcggtaatacggagggtgcaagcgttaatcggaattactgggcgtaaagcgtacgtaggcggcttgttaagcaagatgtgaaagccccgggctcaacctgggaatggcattttgaactggcaagctcgagttttgaagagggtggtagaatttcctgtgtagcggtgaaatgcgtagatataggaaggaataccagtggcgaaggcggccacctggtcaaaaactgacgctgaggtacgaaagcgtggggagcaaacaggattagataccctggtagtccacgccgtaaacgatgtcaactagttgttcgtgtcattaacgatgtgagtaacgcagctaacgcactaagttgaccgcctggggagtacggccgcaaggttaaaactcaaatgaattgacgggggcccgcacaagcggtggagcatgtggtttaattcgatgcaacgcgaagaaccttaccatcccttgacatccagtgaattatctagagatagatgagtgccttcgggaacactgagacaggtgctgcatggctgtcgtcagctcgtgttgtgagatgttgggttaagtcccgcaacgagcgcaacccttatccttagttgccagcacgtaaaggtgggaactctggggagactgccggtgataaaccggaggaaggtggggacgacgtcaagtcatcatggcccttacgggatgggctacacacgtgctacaatggcgcatacaatgggaagctagctcgcgagagtacgcggatctcaaaaagtgcgtcgtagtccggattggagtctgcaactcgactccatgaagtcggaatcgctagtaatcgtggatcagaatgccacggtgaatacgttcccgggccttgtacacaccgcccgtcacaccatgggagtgggctgcaccagaagtagatagcttaaccttcgggagggcgtttaccacggtgtggttcatgactggggtg

SEQ ID NO: 1669 - DNA, 1421 bp, Idiomarina fontislapidosi
ttggacgctggcggcaggcctaacacatgcaagtcgagcggtaacagagagaagcttgcttctttgctgacgagcggcggacgggtgagtaatacttgggaacttgcctctaggcgggggacaaccactggaaacggtggctaataccgcataatgtctacggaccaaagtgggggaccttcgggcctcacacctagagatgggcccaagcgggattagctagttggtgaggtaaaggctcaccaaggcgacgatccctagctgttctgagaggatgatcagccacactgggactgagacacggcccagactcctacgggaggcagcagtggggaatattgcacaatgggcgcaagcctgatgcagccatgccgcgtgtgtgaagaaggccttcgggttgtaaagcactttcagtggtgaggaaggtcagtaagttaatagcttgctgaattgacgttagccacagaagaagcaccggctaactccgtgccagcagccgcggtaatacggagggtgcaagcgttaatcggaattactgggcgtaaagcgtacgtaggcggtgtgttaagcaagatgtgaaagccccgggctcaacctgggaattgcattttgaactggcacgctagagtcctgaagagggtggtagaatttccagtgtagcggtgaaatgcgtagatattggaaggaataccagtggcgaaggcggccacctggtcagagactgacgctgaggtacgaaagcgtggggagcaaacaggattagataccctggtagtccacgccgtaaacgatgtcaactagttgttcgtgtcactatgacgtgagtaacgcagctaacgcactaagttgaccgcctggggagtacggccgcaaggttaaaactcaaatgaattgacgggggcccgcacaagcggtggagcatgtggtttaattcgatgcaacgcgaagaaccttaccatcccttgacatccagtgaactttctagagatagattggtgccttcgggaacactgagacaggtgctgcatggctgtcgtcagctcgtgttgtgagatgttgggttaagtcccgcaacgagcgcaacccttatccttagttgccagcacgtaatggtgggaactctggggagactgccggtgataaaccggaggaaggtggggacgacgtcaagtcatcatggcccttacgggatgggctacacacgtgctacaatggcgcgtacaaagggcagcgaacctgcgaaggtaagcgaatctcataaagcgcgtcgtagtccggattggagtctgcaactcgactccatgaagtcggaatcgctagtaatcgtggatcagaatgccacggtgaatacgttcccgggccttgtacacaccgcccgtcacaccatgggagtgggctgcaccagaagtggttagtttaac

SEQ ID NO: 1670 - DNA, 1464 bp, Idiomarina halophila
attgaacgctggcggcaggcctaacacatgcaagtcgagcggtaacaggggtagcttgctacccgctgacgagcggcggacgggtgagtaatacttgggaacttgcctttaggagggggacaaccacgggaaactgtggctaataccgcataatgtctacggaccaaagtgggggatcttcggacctcacacctaaagatgggcccaagtgagattagctagttggtggggtaaaggctcaccaaggcgacgatctctagctgttctgagaggatgatcagccacactgggactgagacacggcccagactcctacgggaggcagcagtggggaatattgcacaatgggggaaaccctgatgcagccatgccgcgtgtgtgaagaaggccttcgggttgtaaagcactttcagtggtgaggaaggcgttgtagttaatagctgcaacgattgacgttagccacagaagaagcaccggctaactccgtgccagcagccgcggtaatacggagggtgcaagcgttaatcggaattactgggcgtaaagcgtacgtaggcggcctgttaagcaagatgtgaaagccccgggctcaacctgggaatggcattttgaactggcaggctcgagttttgaagagggtggtagaatttcctgtgtagcggtgaaatgcgtagatataggaaggaataccagtggcgaaggcggccacctggtcaaaaactgacgctgaggtacgaaagcgtggggagcaaacaggattagataccctggtagtccacgccgtaaacgatgtcaactagttgttcgtcttataaacaaggtgagtaacgcagctaacgcactaagttgaccgcctggggagtacggccgcaaggttaaaactcaaatgaattgacgggggcccgcacaagcggtggagcatgtggtttaattcgatgcaacgcgaagaaccttaccatcccttgacatccagagaaggtcttagagataagactgtgccttcgggaactctgagacaggtgctgcatggctgtcgtcagctcgtgttgtgagatgttgggttaagtcccgcaacgagcgcaacccttatcctcagttgccagcacgtaaaggtgggaactctgtggagactgccggtgataaaccggaggaaggtggggacgacgtcaagtcatcatggcccttacgggatgggctacacacgtgctacaatggcgcatacaaagggaagcaagctagcgatagtaagcggatctcaaaaagtgcgtcgtagtccggatcggagtctgcaactcgactccgtgaagtcggaatcgctagtaatcgtggatcagaatgccacggtgaatacgttcccgggccttgtacacaccgcccgtcacaccatgggagtgggctgcaccagaagtagatagcttaaccttcgggagggcgtttaccacggtgtggttcatgactggggtg

SEQ ID NO: 1671 - DNA, 1460 bp, Idiomarina homiensis
cgctggcggcaggcctaacacatgcaagtcgagcggtaacagagagaagcttgcttctctgctgacgagcggcggacgggtgagtaatacttgggaacttgcctttaggagggggacaaccacgggaaactgtggctaataccgcataatgtgtacggaccaaagtaggggatcttcggaccttacacctaaagatgggcccaagcgagattagctagttggtggggtaaaggctcaccaaggcgacgatctctagctgttctgagaggatgatcagccacactgggactgagacacggcccagactcctacgggaggcagcagtggggaatattgcacaatgggggaaaccctgatgcagccatgccgcgtgtgtgaagaaggccttcgggttgtaaagcactttcagtggtgaggaaggccatacacttaatacgtgtgtggattgacgttagccacagaagaagcaccggctaactccgtgccagcagccgcggtaatacggagggtgcgagcgttaatcggaattactgggcgtaaagcgtacgtaggcggcttgttaagcaagatgtgaaagccccgggctcaacctgggaatggcattttgaactggcaagctcgagttctgaagagggtggtagaatttcctgtgtagcggtgaaatgcgtagatataggaaggaataccggtggcgaaggcggccacctggtcagaaactgacgctgaggtacgaaagcgtggggagcaaacaggattagataccctggtagtccacgccgtaaacgatgtcaactagttgttcgtcttataaacaaggtgagtaacgcagctaacgcactaagttgaccgcctggggagtacggccgcaaggttaaaactcaaatgaattgacgggggcccgcacaagcggtggagcatgtggtttaattcgatgcaacgcgaagaaccttaccatcccttgacatccagtgaactttctagagatagattggtgccttcgggaacactgagacaggtgctgcatggctgtcgtcagctcgtgttgtgagatgttgggttaagtcccgcaacgagcgcaacccttatcctcagttgccagcacataatggtgggaactctgtggagactgccggtgataaaccggaggaaggtggggacgacgtcaagtcatcatggcccttacgggatgggctacacacgtgctacaatggcgcgtacaatgggaagcaagctagcgatagtaagcggatctcaaaaagcgcgtcgtagtccggatcggagtctgcaactcgactccgtgaagtcggaatcgctagtaatcgtggatcagaatgccacggtgaatacgttcccgggccttgtacacaccgcccgtcacaccatgggagtgggctgcaccagaagtggatagtttaaccttcgggagaacgttcaccacggtgtggttcatgactggggtg

SEQ ID NO: 1672 - DNA, 1466 bp, Idiomarina indica
attgaacgctggcggcaggcctaacacatgcaagtcgagcggtaacagggagtagcttgctacttcgctgacgagcggcggacgggtgagtaatgcttgggaacttgcctttgggagggggataaccgctggaaacggtggctaataccgcatgatgtctacggaccaaagcgggggctcttcggacctcgcgcccaaagataggcccaagtgagattagctagttggtggggtaatggctcaccaaggcgacgatctctagctgttctgagaggatgatcagccacactgggactgagacacggcccagactcctacgggaggcagcagtggggaatattggacaatggggggaaccctgatccagccatgccgcgtgtgtgaagaaggccctagggttgtaaagcactttcagtggtgaggaaggcttgttagcgaatacctaacaagattgacgttagccacagaagaagcaccggctaactccgtgccagcagccgcggtaatacggagggtgcgagcgttaatcggaattactgggcgtaaagcgtacgtaggcggcttattaagcaagatgtgaaagccccgggctcaacctgggaatggcattttgaactggtaggctcgagttctgaagagggtggtagaatttcctgtgtagcggtgaaatgcgtagatataggaaggaataccggtggcgaaggcggccacctggtcagagactgacgctgaggtacgaaagcgtggggagcaaacaggattagataccctggtagtccacgccgtaaacgatgtcaactagttgttcgtgtcattaacgacgtgagtaacgcagctaacgcactaagttgaccgcctggggagtacggccgcaaggttaaaactcaaatgaattgacgggggcccgcacaagcggtggagcatgtggtttaattcgatgcaacgcgaagaaccttaccatcccttgacatccacagaaggtcttagagataggactgtgccttcgggaactgtgagacaggtgctgcatggctgtcgtcagctcgtgttgtgagatgttgggttaagtcccgcaacgagcgcaacccttatccttagttgccagcacgtaatggtgggaactctggggagactgccggtgataaaccggaggaaggtggggacgacgtcaagtcatcatggcccttacgggatgggctacacacgtgctacaatggcgtatacaacgggaagctagcctgcgagggtatgcggatctcataaagtacgtcgtagtccggattggagtctgcaactcgactccatgaagtcggaatcgctagtaatcgcggatcagaatgccgcggtgaatacgttcccgggccttgtacacaccgcccgtcacaccatgggagtgggctgcaccagaagtagatagcttaaccttcgggagggcgtttaccacggtgtggttcatgactggggtg

SEQ ID NO: 1673 - DNA, 1466 bp, Idiomarina insulisalsae
attgaacgctggcggcaggcctaacacatgcaagtcgagcggtaacagagaggagcttgctcctttgctgacgagcggcggacgggtgagtacaacttgggaacttgcctttaggagggggacaaccacgggaaactgtggctaataccgcataatgtctacggaccaaagtaggggctcttcggaccttacacctaaagataggcccaagcgagattagctagttggtgaggtaatggctcaccaaggcgacgatctctagctgttctgagaggatgatcagccacactgggactgagacacggcccagactcctacgggaggcagcagtggggaatattgcacaatgggggaaaccctgatgcagccatgccgcgtgtgtgaagaaggccttcgggttgtaaagcactttcagtggtgaggaagggcgtaagattaatactcttgcgcattgacgttagccacagaagaagcaccggctaactccgtgccagcagccgcggtaatacggagggtgcaagcgttaatcggaattactgggcgtaaagcgtacgtaggcggcctattaagcaagatgtgaaagccccgggctcaacctgggaatggcattttgaactggtaggctcgagttctgaagagggtggtagaatttcctgtgtagcggtgaaatgcgtagatataggaaggaataccggtggcgaaggcggccacctggtcagaaactgacgctgaggtacgaaagcgtggggagcaaacaggattagataccctggtagtccacgccgtaaacgatgtcaactagttgttcgtgtcataaacgatgtgagtaacgcagctaacgcactaagttgaccgcctggggagtacggccgcaaggttaaaactcaaatgaattgacgggggcccgcacaagcggtggagcatgtggtttaattcgatgcaacgcgaagaaccttaccatcccttgacatccagagaaggtcttagagatagggctgtgccttcgggaactctgagacaggtgctgcatggctgtcgtcagctcgtgttgtgagatgttgggttaagtcccgcaacgagcgcaacccttatcctcagttgccagcacgtaatggtgggaactctgtggagactgccggtgataaaccggaggaaggtggggacgacgtcaagtcatcatggcccttacgggatgggctacacacgtgctacaatggcgcgtacaatgggaagcaagctagcgatagtaagcggatctcaaaaagcgcgtcgtagtccggattggagtctgcaactcgactccatgaagtcggaatcgctagtaatcgtggatcagaatgccacggtgaatacgttcccgggccttgtacacaccgcccgtcacaccatgggagtgggctgcaccagaagtggttagtttaaccttcgggagaacgatcaccacggtgtggttcatgactggggtg

SEQ ID NO: 1674 - DNA, 1465 bp, Idiomarina loihiensis
attgaacgctggcggcaggcctaacacatgcaagtcgagcggtaacagagagaagcttgcttctctgctgacgagcggcggacgggtgagtaatacttgggaatttgcctttaggcgggggacaaccacgggaaactgtggctaataccgcataatgtctacggaccaaagtgggggaccttcgggcctcacacctaaagatgagcccaagcgggattagctagttggtggggtaaaggctcaccaaggcgacgatccctagctgttctgagaggatgatcagccacactgggactgagacacggcccagactcctacgggaggcagcagtggggaatattgcacaatgggggaaaccctgatgcagccatgccgcgtgtgtgaagaaggccttcgggttgtaaagcactttcagcgacgaggaagggtgttgtgttaatagcgcagcacattgacgttagtcgcagaagaagcaccggctaactccgtgccagcagccgcggtaatacggagggtgcaagcgttaatcggaattactgggcgtaaagcgtacgtaggcggcgtgttaagcaagatgtgaaagccccgggctcaacctgggaattgcattttgaactggcatgctagagtcctgaagagggtggtagaatttccagtgtagcggtgaaatgcgtagatattggaaggaataccggtggcgaaggcggccacctggtcagagactgacgctgaggtacgaaagcgtggggagcaaacaggattagataccctggtagtccacgccgtaaacgatgtcaactagttgttcgtgtcattaagacgtgagtaacgcagctaacgcactaagttgaccgcctggggagtacggccgcaaggttaaaactcaaatgaattgacgggggcccgcacaagcggtggagcatgtggtttaattcgatgcaacgcgaagaaccttaccatcccttgacatccagtgaatttttcagagatgaattagtgccttcgggaacactgagacaggtgctgcatggctgtcgtcagctcgtgttgtgagatgttgggttaagtcccgcaacgagcgcaacccttatccttagttgccagcacgtaaaggtgggaactctggggagactgccggtgataaaccggaggaaggtggggacgacgtcaagtcatcatggcccttacgggatgggctacacacgtgctacaatggcgcatacaaagggcagcaagccagcgatggttagcgaatctcataaagtgcgtcgtagtccggatcggagtctgcaactcgactccgtgaagtcggaatcgctagtaatcgtggatcagaatgccacggtgaatacgttcccgggccttgtacacaccgcccgtcacaccatgggagtgggctgcaccagaagtggttagtttaaccttcgggagaacgatcaccacggtgtggttcatgactggggtg

SEQ ID NO: 1675 - DNA, 1465 bp, Idiomarina marina
ttgaacgctggcggcaggcctaacacatgcaagtcgagcggcagcggggagtagcttgctactttgccggcgagcggcggacgggtgagtaatgcttgggaacttgcctttaggagggggataaccacgggaaactgtggctaataccgcataatgtctacggaccaaagcaggggatcttcggaccttgcacctagagataggcccaagtgagattagctagttggtggggtaaaggcccaccaaggcgacgatctctagctgttctgagaggatgatcagccacactgggactgagacacggcccagactcctacgggaggcagcagtggggaatattgcacaatgggggaaaccctgatgcagccatgccgcgtgtgtgaagaaggccttcgggttgtaaagcactttcagtggtgaggaaggatgtaagattaatactcttgcatattgacgttagccacagaagaagcaccggctaactccgtgccagcagccgcggtaatacggagggtgcaagcgttaatcggaattactgggcgtaaagcgtacgtaggcggcttgttaagcaagatgtgaaagccccgggctcaacctgggaatggcattttgaactggcaggctcgagttctgaagagggtggtagaatttcctgtgtagcggtgaaatgcgtagatataggaaggaataccggtggcgaaggcggccacctggtcagaaactgacgctgaggtacgaaagcgtggggagcaaacaggattagataccctggtagtccacgccgtaaacgatgtcaactagttgttcgtttcataaacgaagtgagtaacgcagctaacgcactaagttgaccgcctggggagtacggccgcaaggttaaaactcaaatgaattgacgggggcccgcacaagcggtggagcatgtggtttaattcgatgcaacgcgaagaaccttaccatcccttgacatccagtgaattttctagagatagatgagtgccttcgggaacactgagacaggtgctgcatggctgtcgtcagctcgtgttgtgagatgttgggttaagtcccgcaacgagcgcaacccttatccttagttgccagcgcgtaatggcgggaactctggggagactgccggtgataaaccggaggaaggtggggacgacgtcaagtcatcatggcccttacgggatgggctacacacgtgctacaatggcgcgtacaatgggaagctaactcgcgagagtgtgcggatctcaaaaagcgcgtcgtagtccggattggagtctgcaactcgactccatgaagtcggaatcgctagtaatcgtggatcagaatgccacggtgaatacgttcccgggccttgtacacaccgcccgtcacaccatgggagtgggctgcaccagaagtagatagcttaaccttcgggagggcgtttaccacggtgtggttcatgactggggtg

SEQ ID NO: 1676 - DNA, 1466 bp, Idiomarina maritima
attgaacgctggcggcaggcctaacacatgcaagtcgagcggcagcggggagtagcttgctactttgccggcgagcggcggacgggtgagtaatgcttgggaacttgcctttaggagggggataaccacgggaaactgtggctaataccgcataatgtctacggaccaaagcgggggctcttcggacctcgcacctaaagataggcccaagtgagattagctagttggtggggtaaaggcccaccaaggcgacgatctctagctgttctgagaggatgatcagccacactgggactgagacacggcccagactcctacgggaggcagcagtggggaatattgcacaatgggggaaaccctgatgcagccatgccgcgtgtgtgaagaaggccttcgggttgtaaagcactttcagtggtgaggaaggcttgtaggttaatagcctgcaagattgacgttagccacagaagaagcaccggctaactccgtgccagcagccgcggtaatacggagggtgcaagcgttaatcggaattactgggcgtaaagcgtacgtaggcggcttgttaagcaagatgtgaaagccccgggctcaacctgggaatggcattttgaactggcaggctcgagttctgaagagggtggtagaatttcctgtgtagcggtgaaatgcgtagatataggaaggaataccggtggcgaaggcggccacctggtcagaaactgacgctgaggtacgaaagcgtggggagcaaacaggattagataccctggtagtccacgccgtaaacgatgtcaactagttgttcgtgtcataaacgatgtgagtaacgcagctaacgcactaagttgaccgcctggggagtacggccgcaaggttaaaactcaaatgaattgacgggggcccgcacaagcggtggagcatgtggtttaattcgatgcaacgcgaagaaccttaccatcccttgacatccagtgaatcttttagagatagaagagtgccttcgggaacactgagacaggtgctgcatggctgtcgtcagctcgtgttgtgagatgttgggttaagtcccgcaacgagcgcaacccttatccttagttgccagcacgtaaaggtgggaactctggggagactgccggtgataaaccggaggaaggtggggacgacgtcaagtcatcatggcccttacgggatgggctacacacgtgctacaatggcgcgtacaatgggaagctagctcgcgagagtatgcggatctcaaaaagcgcgtcgtagtccggattggagtctgcaactcgactccatgaagtcggaatcgctagtaatcgtggatcagaatgccacggtgaatacgttcccgggccttgtacacaccgcccgtcacaccatgggagtgggctgcaccagaagtagatagcttaaccttcgggagggcgtttaccacggtgtggttcatgactggggtg

SEQ ID NO: 1677 - DNA, 1397 bp, Idiomarina piscisalsi
gcggctaccatgcaagtcgagcggtaacagagagaagcttgcttctctgctgacgagcggcggacgggtgagtaagacttgggaatttgcctttaggcgggggacaaccactggaaacggtggctaataccgcataatgtctacggaccaaagtgggggaccttcgggcctcacacctaaagatgagcccaagcgggattagctagttggtggggtaaaggctcaccaaggcgacgatccctagctgttctgagaggatgatcagccacactgggactgagacacggcccagactcctacgggaggcagcagtggggaatattgcacaatgggggaaaccctgatgcagccatgccgcgtgtgtgaagaaggccttcgggttgtaaagcactttcagtggtgaggaaagggtaatcgttaatagcgattacagttgacgttagccacagaagaagcaccggctaactccgtgccagcagccgcggtaatacggagggtgcaagcgttaatcggaattactgggcgtaaagcgtacgtaggcggtgtgttaagctagatgtgaaagccccgggctcaacctgggaatagcatttagaactggcacgctagagtcctgaagagggtggtagaatttccagtgtagcggtgaaatgcgtagatattggaaggaataccggtggcgaaggcggccacctggtcagagactgacgctgaggtacgaaagcgtggggagcaaacaggattagataccctggtagtccacgccgtaaacgatgtcaactagttgttcgtgtcattaagacgtgagtaacgcagctaacgcactaagttgaccgcctggggagtacggccgcaaggttaaaactcaaatgaattgacgggggcccgcacaagcggtggagcatgtggtttaattcgatgcaacgcgaagaaccttaccatcccttgacatccagtgaattttccagagatggattagtgccttcgggaacactgagacaggtgctgcatggctgtcgtcagctcgtgttgtgagatgttgggttaagtcccgcaacgagcgcaacccttatccttagttgccagcggttcggccgggaactctggggagactgccggtgataaaccggaggaaggtggggacgacgtcaagtcatcatggcccttacgggatgggctacacacgtgctacaatggcgcgtacaaagggcagcgaacctgcgagggtaagcgaatctcataaagcgcgtcgtagtccggattggagtctgcaactcgactccatgaagtcggaatcgctagtaatcgtggatcagaatgccacggtgaatacgttcccgggccttgtacacaccgcccgtcacaccatgggagtgggctgcaccagaagtggttag

SEQ ID NO: 1678 - DNA, 1466 bp, Idiomarina planktonica
attgaacgctggcggcaggcctaacacatgcaagtcgagcggtaacaggggaaagcttgctttcctgctgacgagcggcggacgggtgagtaatgcttgggaacttgcctttgggtgggggataaccacgggaaactgtggctaataccgcataacgtctacggaccaaagtgtgggatcttcggaccacacgcccagagataggcccaagtgagattagctagttggtgaggtaatggctcaccaaggcaacgatctctagctgttctgagaggatgatcagccacactgggactgagacacggcccagactcctacgggaggcagcagtggggaatattgcacaatgggcgcaagcctgatgcagccatgccgcgtgtgtgaagaaggccttcgggttgtaaagcactttcagtggtgaggaaggtggtgtcgttaatagcggcaccaattgacgttagccacagaagaagcaccggctaactccgtgccagcagccgcggtaatacggagggtgcgagcgttaatcggaattactgggcgtaaagcgtacgtaggcggcctgttaagcaagatgtgaaatccccgggctcaacctgggaatggcattttgaactggcaggctcgagttctgaagagggtggtagaatttccagtgtagcggtgaaatgcgtagatattggaaggaataccggtggcgaaggcggccacctggtcagaaactgacgctgaggtacgaaagcgtggggagcaaacaggattagataccctggtagtccacgccgtaaacgatgtcaactagttgttcgtttcataaacgaagtgagtaacgcagctaacgcactaagttgaccgcctggggagtacggccgcaaggttaaaactcaaatgaattgacgggggcccgcacaagcggtggagcatgtggtttaattcgatgcaacgcgaagaaccttaccatcccttgacatccagtgaattttccagagatggattagtgccttcgggaacactgagacaggtgctgcatggctgtcgtcagctcgtgttgtgagatgttgggttaagtcccgcaacgagcgcaacccttatccttagttgccagcacgtaatggtgggaactctagggagactgccggtgataaaccggaggaaggtggggacgacgtcaagtcatcatggcccttacgggatgggctacacacgtgctacaatggcgcatacaaagggaagcaagctagcgatagtgagcggatctcaaaaagtgcgtcgtagtccggatcggagtctgcaactcgactccgtgaagtcggaatcgctagtaatcgtggatcagaatgccacggtgaatacgttcccgggccttgtacacaccgcccgtcacaccatgggagtgggctgcaccagaagtagatagcttaaccttcgggagggcgtttaccacggtgtggttcatgactggggtg

SEQ ID NO: 1679 - DNA, 1450 bp, Idiomarina ramblicola
  misc_feature (1398)..(1398): n is a, c, g, or t
ttgaacgctggcggcaggcctaacacatgcaagtcgagcggtaacagcctagaagcttgcttctctgctgacgagcggcggacgggtgagtaagacttgggaatttgcctttaggcgggggacaaccacgggaaactgtggctaataccgcataatgtctacggaccaaagtgggggaccttcgggcctcacacctaaagatgagcccaagcgggattagctagttggtggggtaaaggctcaccaaggcgacgatccctagctgttctgagaggatgatcagccacactgggactgagacacggcccagactcctacgggaggcagcagtggggaatattgcacaatgggggaaaccctgatgcagccatgccgcgtgtgtgaagaaggccttcgggttgtaaagcactttcagcgacgaggaagggtgttgtattaatagtgcagcacattgacgttagtcgcagaagaagcaccggctaactccgtgccagcagccgcggtaatacggagggtgcaagcgttaatcggaattactgggcgtaaagcgtacgtaggcggcgtgttaagcaagatgtgaaagccccgggctcaacctgggaattgcattttgaactggcatgctagagtcctgaagagggtggtagaatttccagtgtagcggtgaaatgcgtagatattggaaggaataccagtggcgaaggcggccacctggtcagagactgacgctgaggtacgaaagcgtggggagcaaacaggattagataccctggtagtccacgccgtaaacgatgtcaactagttgttcgtgtcattaagacgtgagtaacgcagctaacgcactaagttgaccgcctggggagtacggccgcaaggttaaaactcaaatgaattgacgggggcccgcacaagcggtggagcatgtggtttaattcgatgcaacgcgaagaaccttaccatcccttgacatccagtgaattttccagagatggattagtgccttcgggaacactgagacaggtgctgcatggctgtcgtcagctcgtgttgtgagatgttgggttaagtcccgcaacgagcgcaacccttatccttagttgccagcgcgtaatggcgggaactctggggagactgccggtgataaaccggaggaaggtggggacgacgtcaagtcatcatggcccttacgggatgggctacacacgtgctacaatggcgcatacaaagggcagcaagccagcgatggttagcgaatctcataaagtgcgtcgtagtccggatcggagtctgcaactcgactccgtgaagtcggaatcgctagtaatcgtggatcagaatgccacggtgaatacgttcccgggccttgtacacaccgcccgtcacaccatgggagtgggntgcaccagaagtggttagtttaacctttcgggagaacgatcaccacggtgtg

SEQ ID NO: 1680 - DNA, 1464 bp, Idiomarina salinarum
attgaacgctggcggcaggcctaacacatgcaagtcgagcggtaacaggggtagcttgctacccgctgacgagcggcggacgggtgagtaatgcttgggaacttgcctttaggagggggataaccacgggaaactgtggctaataccgcataatgtctccggaccaaagtgggggatcttcggacctcacacctaaagataggcccaagcgagattagctagttggtggggtaaaggctcaccaaggcgacgatctctagctgttctgagaggatgatcagccacactgggactgagacacggcccagactcctacgggaggcagcagtggggaatattgcacaatgggggaaaccctgatgcagccatgccgcgtgtgtgaagaaggccttcgggttgtaaagcactttcagtggtgaggaaggccttgtagttaatagctgcaaggattgacgttagccacagaagaagcaccggctaactccgtgccagcagccgcggtaatacggagggtgcaagcgttaatcggaattactgggcgtaaagcgtacgtaggcggcttgttaagcaagatgtgaaagccccgggctcaacctgggaatggcattttgaactggcaagctcgagttctgaagagggtggtagaatttccagtgtagcggtgaaatgcgtagatattggaaggaataccagtggcgaaggcggccacctggtcagaaactgacgctgaggtacgaaagcgtggggagcaaacaggattagataccctggtagtccacgccgtaaacgatgtcaactagttgttcgtttcataaacgaagtgagtaacgcagctaacgcactaagttgaccgcctggggagtacggccgcaaggttaaaactcaaatgaattgacgggggcccgcacaagcggtggagcatgtggtttaattcgatgcaacgcgaagaaccttaccatcccttgacatccagtgaattttccagagatggattagtgccttcgggaacactgagacaggtgctgcatggctgtcgtcagctcgtgttgtgagatgttgggttaagtcccgcaacgagcgcaacccttatccttagttgccagcacgtaatggtgggaactctggggagactgccggtgataaaccggaggaaggtggggacgacgtcaagtcatcatggcccttacgggatgggctacacacgtgctacaatggcgcatacaaagggaagcaagcacgcgagtgcaagcggatctcaaaaagtgcgtcgtagtccggatcggagtctgcaactcgactccgtgaagtcggaatcgctagtaatcgtggatcagaatgccacggtgaatacgttcccgggccttgtacacaccgcccgtcacaccatgggagtgggctgcaccagaagtagatagcttaaccttcgggagggcgtttaccacggtgtggttcatgactggggtg

SEQ ID NO: 1681 - DNA, 1446 bp, Idiomarina sediminum
caaagttggcggcgggccctaaccatgcaagtcgagcggtaacaggaagaagcttgcttctttgctgacgagcggcggacgggtgagtaatacttgggaacttgcctttaggagggggataaccgctggaaacggtggctaataccgcataatgtctacggaccaaagcaggggctcttcggaccttgcacctaaagataggcccaagcgagattagctagttggtggggtaaaggcccaccaaggcgacgatctctagctgttctgagaggatgatcagccacactgggactgagacacggcccagactcctacgggaggcagcagtggggaatattgcacaatgggggaaaccctgatgcagccatgccgcgtgtgtgaagaaggccttcgggttgtaaagcactttcagtggtgaggaaggccgtaagattaatactcttgcggattgacgttaaccacagaagaagcaccggctaactccgtgccagcagccgcggtaatacggagggtgcaagcgttaatcggaattactgggcgtaaagcgtacgtaggcggcctattaagcaagatgtgaaagccccgggctcaacctgggaatggcattttgaactggtaggctcgagttctgaagagggtggtagaatttccagtgtagcggtgaaatgcgtagagattggaaggaataccggtggcgaaggcggccacctggtcagaaactgacgctgaggtacgaaagcgtggggagcaaacaggattagataccctggtagtccacgccgtaaacgatgtcaactagttgttcgtcttataaacaaggtgagtaacgcagctaacgcactaagttgaccgcctggggagtacggccgcaaggttaaaactcaaatgaattgacgggggcccgcacaagcggtggagcatgtggtttaattcgatgcaacgcgaagaaccttaccatcccttgacatccagagaagattttagagatagaattgtgccttcgggaactctgagacaggtgctgcatggctgtcgtcagctcgtgttgtgagatgttgggttaagtcccgcaacgagcgcaacccttatcctcagttgccagcacgtaatggtgggaactctgtggagactgccggtgataaaccggaggaaggtggggacgacgtcaagtcatcatggcccttacgggatgggctacacacgtgctacaatggcgcgtacaaagggaagcaagctagcgatagtgagcggatctcaaaaagcgcgtcgtagtccggattggagtctgcaactcgactccatgaagtcggaatcgctagtaatcgcggatcagaatgccgcggtgaatacgttcccgggccttgtacacaccgcccgtcacaccatgggagtgggctgcaccagaagtagatagcttaaccttcgggagggcgttaccacggtgtg

SEQ ID NO: 1682 - DNA, 1463 bp, Idiomarina seosinensis
attgaacgctggcggcaggcctaacacatgcaagtcgagcggtaacatttccagcttgctggaagatgacgagcggcggacgggtgagtaatacttgggaacttgcctctaggcgggggacaaccactggaaacggtggctaataccgcataatgtctacggaccaaagtgggggaccttcgggcctcacacctagagatgggcccaagtgggattagctagttggtgaggtaatggctcaccaaggcgacgatccctagctgttctgagaggatgatcagccacactgggactgagacacggcccagactcctacgggaggcagcagtggggaatattggacaatgggggcaaccctgatccagccatgccgcgtgtgtgaagaaggccttcgggttgtaaagcactttcagtggtgaggaaagggtgatagttaatagctatcacagttgacgttagccacagaagaagcaccggctaactccgtgccagcagccgcggtaatacggagggtgcaagcgttaatcggaattactgggcgtaaagcgtacgtaggcggtgtgttaagcaagatgtgaaagccccgggctcaacctgggaatggcattttgaactggcacgctagagtcctgaagagggtggtagaatttccagtgtagcggtgaaatgcgtagatattggaaggaataccggtggcgaaggcggccacctggtcagagactgacgctgaggtacgaaagcgtggggagcaaacaggattagataccctggtagtccacgccgtaaacgatgtcaactagttgttcgtgtctttaagacgtgagtaacgcagctaacgcactaagttgaccgcctggggagtacggccgcaaggttaaaactcaaatgaattgacgggggcccgcacaagcggtggagcatgtggtttaattcgatgcaacgcgaagaaccttaccatcccttgacatccagtgaattttccagagatggattagtgccttcgggaacactgagacaggtgctgcatggctgtcgtcagctcgtgttgtgagatgttgggttaagtcccgcaacgagcgcaacccttatccttagttgccagcacgtaatggtgggaactctggggagactgccggtgacaaaccggaggaaggtggggacgacgtcaagtcatcatggcccttacgggatgggctacacacgtgctacaatggcgcatacaaagggcagcaagccagcgatggttagcgaatctcataaagtgcgtcgtagtccggattggagtctgcaactcgactccatgaagtcggaatcgctagtaatcgtggatcagaatgccacggtgaatacgttcccgggccttgtacacaccgcccgtcacaccatgggagtgggctgcaccagaagtggttagtttaaccttcgggagaacgatcaccacggtgtggttcatgactggggtg

SEQ ID NO: 1683 - DNA, 1465 bp, Idiomarina tainanensis
ttgaacgctggcggcaggcctaacacatgcaagtcgagcggcagcggggagtagcttgctactttgccggcgagcggcggacgggtgagtaatgcttgggaacttgcctttaggagggggataaccacgggaaactgtggctaataccgcataatgtctacggaccaaagcgggggctcttcggacctcgcacctaaagataggcccaagtgagattagctagttggtggggtaaaggcccaccaaggcgacgatctctagctgttctgagaggatgatcagccacactgggactgagacacggcccagactcctacgggaggcagcagtggggaatattgcacaatgggggaaaccctgatgcagccatgccgcgtgtgtgaagaaggccttcgggttgtaaagcactttcagtggtgaggaaggcttgtagattaatagcctgcaagattgacgttagccacagaagaagcaccggctaactccgtgccagcagccgcggtaatacggagggtgcaagcgttaatcggaattactgggcgtaaagcgtacgtaggcggcttgttaagcaagatgtgaaagccccgggctcaacctgggaatggcattttgaactggcaggctcgagttctgaagagggtggtagaatttcctgtgtagcggtgaaatgcgtagatataggaaggaataccggtggcgaaggcggccacctggtcagaaactgacgctgaggtacgaaagcgtggggagcaaacaggattagataccctggtagtccacgccgtaaacgatgtcaactagttgttcgtgtcataaacgatgtgagtaacgcagctaacgcactaagttgaccgcctggggagtacggccgcaaggttaaaactcaaatgaattgacgggggcccgcacaagcggtggagcatgtggtttaattcgatgcaacgcgaagaaccttaccatcccttgacatccagtgaatcttttagagatagaagagtgccttcgggaacactgagacaggtgctgcatggctgtcgtcagctcgtgttgtgagatgttgggttaagtcccgcaacgagcgcaacccttatccttagttgccagcgcgtaaaggcgggaactctggggagactgccggtgataaaccggaggaaggtggggacgacgtcaagtcatcatggcccttacgggatgggctacacacgtgctacaatggcgcgtacaatgggaagctagctcgcgagagtatgcggatctcaaaaagcgcgtcgtagtccggattggagtctgcaactcgactccatgaagtcggaatcgctagtaatcgtggatcagaatgccacggtgaatacgttcccgggccttgtacacaccgcccgtcacaccatgggagtgggctgcaccagaagtagatagcttaaccttcgggagggcgtttaccacggtgtggttcatgactggggtg

SEQ ID NO: 1684 - DNA, 1465 bp, Idiomarina taiwanensis
attgaacgctggcggcaggcctaacacatgcaagtcgagcggtaacaggaagaagcttgcttctttgctgacgagcggcggacgggtgagtaatgcttgggaacttgcctttaggagggggataaccattggaaacgatggctaataccgcataatgtctccggaccaaagcaggggatcttcggaccttgcacctaaagataggcccaagtgagattagctagttggtggggtaacggcccaccaaggcgacgatctctagctgttctgagaggatgatcagccacactgggactgagacacggcccagactcctacgggaggcagcagtggggaatattgcacaatgggggaaaccctgatgcagccatgccgcgtgtgtgaagaaggccttcgggttgtaaagcactttcagtggtgaggaagggttgtaagttaataccttgcaacattgacgttagccacagaagaagcaccggctaactccgtgccagcagccgcggtaatacggagggtgcaagcgttaatcggaattactgggcgtaaagcgtacgtaggcggcctattaagcaagatgtgaaagccccgggctcaacctgggaatggcattttgaactggtaggctcgagttctgaagagggtggtagaatttccagtgtagcggtgaaatgcgtagagattggaaggaataccggtggcgaaggcggccacctggtcagaaactgacgctgaggtacgaaagcgtggggagcaaacaggattagataccctggtagtccacgccgtaaacgatgtcaactagttgttcgtgtcataaaagatgtgagtaacgcagctaacgcactaagttgaccgcctggggagtacggccgcaaggttaaaactcaaatgaattgacgggggcccgcacaagcggtggagcatgtggtttaattcgatgcaacgcgaagaaccttaccatcccttgacatccagagaagattttagagatagaattgtgccttcgggaactctgagacaggtgctgcatggctgtcgtcagctcgtgttgtgagatgttgggttaagtcccgcaacgagcgcaacccttatccttagttgccagcggttcggccgggaactctagggagactgccggtgataaaccggaggaaggtggggacgacgtcaagtcatcatggcccttacgggatgggctacacacgtgctacaatggcgcatacaaagggaagcgagctagcgatagtgagcggatctcaaaaagtgcgtcgtagtccggattggagtctgcaactcgactccatgaagtcggaatcgctagtaatcgcggatcagaatgccgcggtgaatacgttcccgggccttgtacacaccgcccgtcacaccatgggagtgggctgcaccagaagtagatagcttaaccttcgggagggcgtttaccacggtgtggttcatgactggggtg

SEQ ID NO: 1685 - DNA, 1465 bp, Idiomarina tyrosinivorans
attgaacgctggcggcaggcctaacacatgcaagtcgagcggtaacaggaagaagcttgcttctttgctgacgagcggcggacgggtgagtaatacttgggaacttgcctgatggagggggataactacgggaaactgtagctaataccgcataatgtctacggaccaaagcgggggctcttcggacctcgtgccatcagatgggcccaagcgggattagctagttggtaaggtaacggcttaccaaggcgacgatccctagctgttctgagaggatgatcagccacactgggactgagacacggcccagactcctacgggaggcagcagtggggaatattgcacaatggggggaaccctgatgcagccatgccgcgtgtgtgaagaaggccttcgggttgtaaagcactttcagtggtgaggaaggccagtagcttaatacgttactggattgacgttagccacagaagaagcaccggctaactccgtgccagcagccgcggtaatacggagggtgcaagcgttaatcggaattactgggcgtaaagcgtacgtaggcggtgtgttaagcaagatgtgaaagccccgggctcaacctgggaatggcattttgaactggcacgctagagtcctgaagagggtggtagaatttccagtgtagcggtgaaatgcgtagagattggaaggaataccggtggcgaaggcggccacctggtcagagactgacgctgaggtacgaaagcgtggggagcaaacaggattagataccctggtagtccacgccgtaaacgatgtcgactagttgttcgtgacataaaggtcgtgagtaacgcagctaacgcactaagtcgaccgcctggggagtacggccgcaaggttaaaactcaaatgaattgacgggggcccgcacaagcggtggagcatgtggtttaattcgatgcaacgcgaagaaccttaccatcccttgacatccagtgaattatttagagatagataagtgccttcgggaacactgagacaggtgctgcatggctgtcgtcagctcgtgttgtgagatgttgggttaagtcccgcaacgagcgcaacccttatccttagttgccagcggttcggccgggaactctagggagactgccggtgataaaccggaggaaggtggggacgacgtcaagtcatcatggcccttacgggatgggctacacacgtgctacaatggcgcgtacaaagggcagcgagcctgcgagggtgagcgaatctcataaagcgcgtcgtagtccggattggagtctgcaactcgactccatgaagtcggaatcgctagtaatcgtggatcagaatgccacggtgaatacgttcccgggccttgtacacaccgcccgtcacaccatgggagtgggctgcaccagaagtggttagtttaaccttcgggagaacgatcaccacggtgtggttcatgactggggtg

SEQ ID NO: 1686 - DNA, 1466 bp, Idiomarina woesei
attgaacgctggcggcaggcctaacacatgcaagtcgagcggtaacagagagtagcttgctactttgctgacgagcggcggacgggtgagtaatgcttgggaacttgcctttaggagggggataaccacgggaaactgtggctaataccgcataatgtctacggaccaaagcgggggctcttcggacctcgcacctaaagataggcccaagtgagattagctagttggtggggtaaaggctcaccaaggcgacgatctctagctgttctgagaggatgatcagccacactgggactgagacacggcccagactcctacgggaggcagcagtggggaatattgcacaatgggggaaaccctgatgcagccatgccgcgtgtgtgaagaaggccttcgggttgtaaagcactttcagtggtgaggaagggcgtaagattaatactcttgcgcattgacgttagccacagaagaagcaccggctaactccgtgccagcagccgcggtaatacggagggtgcaagcgttaatcggaattactgggcgtaaagcgtacgtaggcggcttgttaagcaagatgtgaaagccccgggctcaacctgggaatggcattttgaactggcaagctcgagttttgaagagggtggtagaatttcctgtgtagcggtgaaatgcgtagatataggaaggaataccagtggcgaaggcggccacctggtcaaaaactgacgctgaggtacgaaagcgtggggagcaaacaggattagataccctggtagtccacgccgtaaacgatgtcaactagttgttcgtgtcattaacgatgtgagtaacgcagctaacgcactaagttgaccgcctggggagtacggccgcaaggttaaaactcaaatgaattgacgggggcccgcacaagcggtggagcatgtggtttaattcgatgcaacgcgaagaaccttaccatcccttgacatccagtgaattttctagagatagattagtgccttcgggaacactgagacaggtgctgcatggctgtcgtcagctcgtgttgtgagatgttgggttaagtcccgcaacgagcgcaacccttatccttagttgccagcgcgtaaaggcgggaactctggggagactgccggtgataaaccggaggaaggtggggacgacgtcaagtcatcatggcccttacgggatgggctacacacgtgctacaatggcgcatacaatgggaagctaactcgcgagagtacgcggatctcaaaaagtgcgtcgtagtccggattggagtctgcaactcgactccatgaagtcggaatcgctagtaatcgtggatcagaatgccacggtgaatacgttcccgggccttgtacacaccgcccgtcacaccatgggagtgggctgcaccagaagtagatagcttaaccttcgggagggcgtttaccacggtgtggttcatgactggggtg

SEQ ID NO: 1687 - DNA, 1463 bp, Idiomarina xiamenensis
attgaacgctggcggcaggcctaacacatgcaagtcgagcggtaacatttctagcttgctagaagatgacgagcggcggacgggtgagtaatgcttgggaacttgcctttgggtgggggataaccacgggaaactgtggctaataccgcataatgtttatggaccaaagtgggggctcttcggacctcacgcccaaagataggcccaagtgagattagctagttggtggggtaacggctcaccaaggcgacgatctctagctgttctgagaggatgatcagccacactgggactgagacacggcccagactcctacgggaggcagcagtggggaatattgcacaatgggggaaaccctgatgcagccatgccgcgtgtgtgaagaaggccttcgggttgtaaagcactttcagtggtgaggaaggtggtgttgttaatagcagcatcaattgacgttagccacagaagaagcaccggctaactccgtgccagcagccgcggtaatacggagggtgcaagcgttaatcggaattactgggcgtaaagcgtacgtaggcggcgtgttaagcaagatgtgaaagccccgggctcaacctgggaatggcattttgaactggcatgctagagtcctggagagggtggtagaatttccagtgtagcggtgaaatgcgtagatattggaaggaataccggtggcgaaggcggccacctggtcagagactgacgctgaggtacgaaagcgtggggagcaaacaggattagataccctggtagtccacgccgtaaacgatgtcgactagttgtccgtgacatttatgttgtgggtaacggagctaacgcattaagtcgaccgcctggggagtacggccgcaaggttaaaactcaaatgaattgacgggggcccgcacaagcggtggagcatgtggtttaattcgatgcaacgcgaagaaccttaccatcccttgacatccacagaatttttcagagatgagaaagtgccttcgggaactgtgagacaggtgctgcatggctgtcgtcagctcgtgttgtgagatgttgggttaagtcccgcaacgagcgcaacccttatccttagttgccagcggttcggccgggaactctagggagactgccggtgataaaccggaggaaggtggggacgacgtcaagtcatcatggcccttacgggatgggctacacacgtgctacaatggcgcatacaaagggcggcaagctagcgatagcaagcgaatcccagaaagtgcgtcgtagtccggattggagtctgcaactcgactccatgaagtcggaatcgctagtaatcgcggatcagaatgccgcggtgaatacgttcccgggccttgtacacaccgcccgtcacaccatgggagtgggctgcaccagaagtagatagcttaaccttagggggagcgtttaccacggtgtggttcatgactggggtg

SEQ ID NO: 1688 - DNA, 1464 bp, Idiomarina zobellii
  misc_feature (442)..(442): n is a, c, g, or t
  misc_feature (910)..(910): n is a, c, g, or t
attgaacgctggcggcaggcctaacacatgcaagtcgagcggtaacagagagaagcttgcttctctgctgacgagcggcggacgggtgagtaagacttgggaatttgcctttaggcgggggacaaccactggaaacggtggctaataccgcataatgtctacggaccaaagtgggggaccttcgggcctcacgcctaaagatgagcccaagcgggattagctagttggtggggtaaaggctcaccaaggcgacgatccctagctgttctgagaggatgatcagccacactgggactgagacacggcccagactcctacgggaggcagcagtggggaatattgcacaatgggggaaaccctgatgcagccatgccgcgtgtgtgaagaaggccttcgggttgtaaagcactttcagtggtgaggaaagggtgatagttaatanctatcacagttgacgttagccacagaagaagcaccggctaactccgtgccagcagccgcggtaatacggagggtgcaagcgttaatcggaattactgggcgtaaagcgtacgtaggcggtgtgttaagctagatgtgaaagccccgggctcaacctgggaatagcatttagaactggcacgctagagtcctgaagagggtggtagaatttccagtgtagcggtgaaatgcgtacatattggaaggaataccggtggcgaaggcggccacctggtcagagactgacgctgaggtacgaaagcgtggggagcaaacaggattagataccctggtagtccacgccgtaaacgatgtcaactagttgttcgtgtcattaagacgtgagtaacgcagctaacgcactaagttgaccgcctggggagtacggccgcaaggttaaaactcaaatgaattgacgggggcccgcacnagcggtggagcatgtggtttaattctattcttcgcgaacaaccttaccatcccttgacatccagtgaattttccagagatggattagtgccttcgggaacactgagacaggtgctgcatggctgtcgtcagctcgtgttgtgagatgttgggttaagtcccgcaacgagcgcaacccttatccttagttgccagcggctcggccgggaactctggggagactgccggtgataaaccggaggaaggtggggacgacgtcaagtcatcatggcccttacgggatgggctacacacgtgctacaatggcgcatacaaagggcagcgaacctgcgaaggtaagcgaatctcataaagtgcgtcgtagtccggattggagtctgcaactcgactccatgaagtcggaatcgctagtaatcgtggatcagaatgccacggtgaatacgttcccgggccttgtacacaccgcccgtcacaccatgggagtgggctgcaccagaagtggttagtttaaccttcgggagaacgatcaccacggtgtggttcatgactggggtg

SEQ ID NO: 1689 - DNA, 1462 bp, Ignatzschineria indica
attgaacgctggcggtatgcttaacacatgcaagtcgaacggcagcacgaggagagtttactctcttcggtggcgagtggcggacgggtgagtaatgcataggaatctaccttttagtctaggataactacccgaaagggtggctaatactggatgtggactacggtttaaagcaggggatcttcggaccttgcgctaagagatgagcctatgtgggattagctagttggtgaggtaacggctcaccaaggcgacgatctctagctggtttgagaggatgatcagccacactgggactgagacacggcccagactcctacgggaggcagcagtggggaatattggacaatgggcgaaagcctgatccagcaataccgcgtgtgtgaagaaggccctagggttgtaaagcacttttgttagggagaacgggttttgtagctaatacctacagaatctgatgttacctaaagaataagcaccggctaactccgtgccagcagccgcggtaatacggagggtgcaagcgttaatcggaattactgggcgtaaagggcgcgtaggtggtatcttaagttgggtgtgaaatccccgggctcaacctgggaattgcatccaaaactggggtgctagagtgtggtagagggtagcggaatttctggtgtagcggtgaaatgcgtagatatcagaaggaacatcaatggcgaaggcagctacctgggccaacactgacgctgaggcgcgaaagcgtggggagcaaacaggattagataccctggtagtccacgctataaacgatgacaacttgttgatggggacactggtcttcgttgacggagctaacgcgttaagttgtccgcctggggagtacggtcgcaaggctgaaactcaaaggaattgacggggacccgcacaagcggtggagcatgtggtttaattcgatgcaacgcgaagaaccttacctggtcttgacatctacagaactttccagagatggatgggtgccttcgggaactgtaagacaggtgctgcatggctgtcgtcagctcgtgtcgtgagatgttcggttaagtccggcaacgagcgcaacccttgtccttatttgccagcacgtaatggtgggaactctaaggagactgccggtgataaaccggaggaaggtagggacgacgtcaagtcatcatggcccttatgaccagggctacacacgtgctacaatggtcggtacaatgggttgccaaaccgcgaggtggagctaatcccacaaaaccgatcccagtccggattgtagtctgcaactcgactacatgaagtcggaatcgctagtaatcgtggatcagaatgccacggtgaatacgttcccgggtcttgtacacaccgcccgtcacaccatggaagttgattgctccagaagtaggtagcttaaaaatgggcgcttaccacggagtggtcgatgactggggtg

SEQ ID NO: 1690 - DNA, 1458 bp, Ignatzschineria ureiclastica
attgaacgctggcggtatgcttaacacatgcaagtcgaacggcagcacggagagtttactctttggtggcgagtggcggacgggtgagtaatgcataggaatctaccttttagtctaggataactacccgaaagggtagctaatactggatgtggactacggtttaaagcaggggatcttcggaccttgcgctaagagatgagcctatgtgggattagctagttggtgaggtaatggctcaccaaggcgacgatctctagctggtttgagaggatgatcagccacactgggactgagacacggcccagactcctacgggaggcagcagtggggaatattggacaatgggcgcaagcctgatccagcaataccgcgtgtgtgaagaaggccctagggttgtaaagcacttttgttagggagaatgggtttagtagttaatacctactgaatctgatgttacctaaagaataagcaccggctaactccgtgccagcagccgcggtaatacggagggtgcaagcgttaatcggaattactgggcgtaaagggcgcgtaggtggtatcttaagttgggtgtgaaatccccgggctcaacctgggaattgcatccaaaactgggatgctagagtgtggtagagggtagcggaatttctggtgtagcggtgaaatgcgtagatatcagaaggaacatcaatggcgaaggcagctacctgggccaacactgacgctgaggcgcgaaagcgtggggagcaaacaggattagataccctggtagtccacgctgtaaacgatgacaacttgttgatggggacactggtcttcgttgacggagctaacgcgttaagttgtccgcctggggagtacggtcgcaaggctgaaactcaaaggaattgacggggacccgcacaagcggtggagcatgtggtttaattcgatgcaacgcgaagaaccttacctggtcttgacatctacagaactatccagagatggatgggtgccttcgggaactgtaagacaggtgctgcatggctgtcgtcagctcgtgtcgtgagatgttcggttaagtccggcaacgagcgcaacccttgtccttatttgccagcacgtaaaggtgggaactttaaggagactgccggtgataaaccggaggaaggtagggacgacgtcaagtcatcatggcccttatgaccagggctacacacgtgctacaatggtcggtacaatgggttgccaaaccgcgaggtggagctaatctcataaaaccgatcccagtccggattgtagtctgcaactcgactacatgaagtcggaatcgctagtaatcgtggatcagaatgccacggtgaatacgttcccgggtcttgtacacaccgcccgtcacaccatggaagttgattgctccagaagtaggtagcttaaaaatgggcgcttaccacggagtggtcgatgactggggtg

SEQ ID NO: 1691 - DNA, 1439 bp, Ilumatobacter fluminis
gacgaacgctggcggcgtgcttaacacatgcaagtcgaacgaggtccatggagcttgctccggaagacctagtggcgaacgggtgcgtaacacgtgagaaacctgccccggacttgggaataacagtcggaaacgactgctaataccgaataccttcacaccgtcgcatggcggagtgaagaaagcttttgcggtttgggagggtctcgcggcctatcagctagttggtgaggtaacggctcaccaaggcatcgacgggtagctggtctgagaggatgatcagccacactgggactgagacacggcccagactcctacgggaggcagcagtggggaatattgcacaatgggcgcaagcctgatgcagcaacgccgcgtgcgggaagaaggccctagggttgtaaaccgctttcagcagggaagaaaatgacggtacctgcagaagaaggtgcggccaactacgtgccagcagccgcggtgacacgtaggcaccaagcgttgtccggatttattgggcgtaaagagctcgtaggcggttttgtaagtcgggtgtgaaaactctgggctcaacccagagaggccacccgatactgcaatgacttgagtacggtaggggagcggggaattcctggtgtagcggtgaaatgcgcagatatcaggaggaacaccagtggcgaaggcgccgctctgggccgtaactgacgctgaggagcgaaagcatgggtagcaaacaggattagataccctggtagtccatgccgtaaacgttgggcactaggtgtgggtctcaaccaacgagatccgcgccgtcgctaacgcattaagtgccccgcctggggagtacggtcgcaagactaaaactcaaaggaattgacgggggcccgcacaagcagcggagcgtgttgcttaattcgatgcaacgcgaagaaccttacctgggtttgacatgtagggaaaagctctagagatagggtgtccttcggggctctacacaggtggtgcatggctgtcgtcagctcgtgtcgtgagatgttgggttaagtcccgcaacgagcgcaacccttatcctatgttgccagcatttagttggggactcgtaggagactgccggggtcaactcggaggaaggtggggatgacgtcaagtcatcatgccccttatgcccagggctgcaaacacgctacaatggacggtacagagggctgcgatcccgcgagggtgagcgaatcccacaaagccgttctcagttcggattggagtctgcaactcgactccatgaagccggagttgctagtaatcctggatcagcacgccagggtgaatacgttcccgggccttgtacacaccgcccgtcacaccacgaaagtcggtaacacccgaagccggtggcccaaccctctgggagggagccgtcgaaggtgggatcggtgattggggtg

SEQ ID NO: 1692 - DNA, 1444 bp, Ilyobacter polytropus
gatgaacgctgacagaatgcttaacacatgcaagtcgactggaattcaccttcgggtgatagtacggtggcggacgggtgagtaacgcgtaaagaacttgccctctagactgggacaactgttggaaacgacagctaataccggatattatggaactgcggcatcgtggaactatgaaaggctatatgcgctagaggagagctttgcgtcccattagttagttggtagggtaatggcctaccaagacgatgatgggtagccggcctgagagggtgatcggccacaaggggactgagacacggcccttactcctacgggaggcagcagtggggaatattggacaatggactaaaagtctgatccagcaattctgtgtgcacgatgaaggtcttcggatcgtaaagtgctttcaggtgggaagaagaaagtgacggtaccaccagaagaagcgacggctaaatacgtgccagcagccgcggtaatacgtatgtcgcaagcgttatccggaattattgggcgtaaagcgcgtctaggcggccttttaagtctgatgtgaaaatgcggggctcaactccgtattgcgttggaaactggaaggctagagtatcagagaggtgggcggaactacaagtgtagaggtgaaattcgtagatatttgtaggaatgccgatggggaagccagctcactggatgaatactgacgctaaagcgcgaaagcgtggggagcaaacgggattagataccccggtagtccacgccgtaaacgatgatcactaagtgtggggggtcgaacctccgtgctcaagctaacgcgataagtgatccgcctggggagtacgtacgcaagtatgaaactcaaaggaattgacggggacccgcacaagcggtggagcatgtggtttaattcgacgcaacgcgaggaaccttaccagcccttgacatcccaagaactaggcagagatgcttaggtgccttttcggaggaacttggtgacaggtggtgcatggctgtcgtcagctcgtgtcgtgagatgttgggttaagtcccgcaacgagcgcaacccctatcgtatgttaccatcattaagttggggactcatgcgagactgcctgcgacgagcaggaggaaggtggggatgacgtcaagtcatcatgccccttatgggctgggctacacacgtgctacaatggacaatacagagggtagcgatcccgcgagggggagccaatctcagaaagttgttcttagttcggatcgcagtctgcaactcgactgcgtgaagttggaatcgctagtaatcgcgaatcagcaatgtcgcggtgaatacgttctcgggtcttgtacacaccgcccgtcacaccacgagagttggttgcacctgaagtagcaggcctaacccgtttacgggagggatgttcctaaggtgtgattagcgattggggtg

SEQ ID NO: 1693 - DNA, 1450 bp, Imhoffiella purpurea
attgaacgctggcggcatgcctaacacatgcaagtcgaacgcgaaagtccttcggggcgagtagagtggcggacgggtgagtaaagcgtgggaatctgcctggcagtgggggataacccggggaaactcgggctaataccgcatacgccctacgggggaaagggggcttcggctcttgttgccagatgagcccacgtccgattagctagttggtggggtaatggcctaccaaggcgacgatcggtagctggtctgagaggatgatcagccacactgggactgagacacggcccagactcctacgggaggcagcagtggggaatattggacaatgggcgaaagcctgatccagcaatgccgcgtgtgtgaagaaggcctgcgggttgtaaagcactttcagcgaggaagaaaagcctgtggttaatacccatgggtcttgacgttactcgcagaagaagcaccggctaactccgtgccagcagccgcggtaatacggagggtgcaagcgttaatcggaatcactgggcgtaaagcgcacgtaggcggtgaggtcagtcagctgtgaaagccccgggcttaacctgggaactgcagttgatactgcctgactagagtctgaaagaggggggtggaattccaggtgtagcggtgaaatgcgtagagatctggaggaacaccagtggcgaaggcggccccctggttcaagactgacgctgaggtgcgaaagcgtggggagcaaacaggattagataccctggtagtccacgctgtaaacgctgtcgactagccgtggggctcatttaagggtttcgtggcgcagctaacgcgataagtcgaccgcctggggagtacggccgcaaggttaaaactcaaaggaattgacgggggcccgcacaagcggtggagcatgtggtttaattcgatgcaacgcgaagaaccttaccagcccttgacatcctcggaacttggcagagatgccttggtgccttcgggagccgagagacaggtgctgcatggctgtcgtcagctcgtgtcgtgagatgttgggttaagtcccgtaacgagcgcaacccttgtccttagttgccagcatttcggatgggaactctaaggagactgccggtgataaaccggaggaaggtggggatgacgtcaagtcatcatggcccttatgggctgggctacacacgtgctacaatggtcggtacagagggttgcgaagcggcgacgtggagccaatcccagaaaaccggtcgtagtccggattgcagtctgcaactcgactgcatgaagtcggaatcgctagtaatcgcgaatcagcatgtcgcggtgaatacgttcccgggccttgtacacaccgcccgtcacaccatgggagttggttgcaccagaagtagatagcttaaccttcgggagggcgtttaccacggtgtggtcaatgactggggtg

SEQ ID NO: 1694 - DNA, 1466 bp, Immundisolibacter cernigliae
attgaacgctggcggtatgcttaacacatgcaagtcgaacggcagcacagggtagcttgctatccgggtggcgagtggcggacgggtgagtaacgcgtaggaatctaccttttcgtgggggataacccggggaaactcgggctaataccgcatacgccctacgggggaaagcgggggaccttcgggcctcgcgcggaacgatgagcctgcgtcctatcaggtagttggtgaggtaatggctcaccaagccgacgacgggtagctggtctgagaggacgaccagccacactgggactgagacacggcccagactcctacgggaggcagcagtggggaatattggacaatgggggaaaccctgatccagcaataccgcgtgtgtgaagaaggccttcgggttgtaaagcacttttagcaggaaagaaagacaatgcgctaataccgcatggttttgacgttacttgcagaaaaagcaccggctaactccgtgccagcagccgcggtaatacggagggtgcaagcgttaatcggaattactgggcgtaaagcgcgcgtaggcggcttgttaagtcggatgtgaaatccccgggctcaacctgggaactgcattcgatactggctggctagagtgtggtagagggaagtggaattccaggtgtagcggtgaaatgcgtagatatctgggggaacatcagtggcgaaggcggcttcctggaccaacactgacgctgaggcgcgaaagcgtggggagcaaacaggattagataccctggtagtccacgccgtaaacgatgtcaactagccgtagggagcatctggctctttgtggcgcagctaacgcgataagttgaccgcctggggagtacggccgcaaggctaaaactcaaatgaattgacgggggcccgcacaagcggtggagcatgtggtttaattcgatgcaacgcgaaaaaccttacctgcccttgacatgtcaggaatctttcagagatgagagagtgccttcgggaacctgaacacaggtgctgcatggctgtcgtcagctcgtgtcgtgagatgttgggttaagtcccgtaacgagcgcaacccttgtccttagttgccagcggttcggccgggaactctaaggagactgccggtgataaaccggaggaaggtggggacgacgtcaagtcatcatggcccttatgggcagggctacacacgtgctacaatggccagtacagaaggttgccaacccgcgagggggagctaatcctgtaaagctggtcgtagtccggatcgcagtctgcaactcgactgcgtgaagtcggaatcgctagtaatcgcgaatcagcatgtcgcggtgaatacgttcccgggccttgtacacaccgcccgtcacaccatgggagtgggctgcaccagaagtaggttgcttaacccgtaagggagggcgcttaccacggtgtggttcatgactggggtg

SEQ ID NO: 1695 - DNA, 1471 bp, Inmirania thermothiophila
attgaacgctggcggcatgcctaacacatgcaagtcgtacggcagcgcggggaagcttgcttccctggcggcgagtggcgaacgggtgagtaacgcgtaggaacctgccctgcagtgggggataacctggggaaactcaggctaataccgcatacaccctacgggggaaagcgggggatctcttcggagacctcgcgctgcaggatgggcctgcgtccgattagcttgttggtgaggtaatggctcaccaaggcgacgatcggtagctggtctgagaggatgatcagccacactgggactgagacacggcccagactcctacgggaggcagcagtggggaatattggacaatgggcgaaagcctgatccagcaatgccgcgtgggtgaagaaggccttcgggttgtaaagccctttcggtggggaagaaaagcggagggctaatacctctccgtcttgacgttacccacagaagaagcaccggctaactccgtgccagcagccgcggtaatacggagggtgcgagcgttaatcggaattactgggcgtaaagggcgtgtaggcggcctggtaagtcgggtgtgaaagccctgggctcaacccgggaattgcatccgatactgccaggctagagtgtggtagaggggagcggaattcccggtgtagcggtgaaatgcgtagatatcgggaggaacaccagtggcgaaggcggctccctggaccaacactgacgctgaggcgcgaaagcgtggggagcaaacaggattagataccctggtagtccacgccgtaaacgatgaggactagccgttgggaaggttcagcttctcagtggcgcagctaacgcgttaagtcctccgcctggggagtacggccgcaaggttaaaactcaaaggaattgacgggggcccgcacaagcggtggagcatgtggtttaattcgatgcaacgcgaagaaccttacctgcccttgacatccccggaatcccccagagatgggggagtgccttcgggaaccgggtgacaggtgctgcatggctgtcgtcagctcgtgtcgtgagatgttgggttaagtcccgtaacgagcgcaacccttgcccctagttgccagcggttcggccgggaactctagggggactgccggtgacaaaccggaggaaggtggggatgacgtcaagtcatcatggcccttatgggcagggctacacacgtgctacaatggccggtacagagggtcgcgaacccgcgagggggagccaatcccagaaaaccggtcgtagtccggattggagtctgcaactcgactccatgaagtcggaatcgctagtaatcgcgaatcagcatgtcgcggtgaatacgttcccgggccttgtacacaccgcccgtcacaccatgggagtcggctgcaccagaagcaggtagcttaacccttcggggagggcgcttgccacggtgtggtcgatgactggggtg

SEQ ID NO: 1696 - DNA, 1408 bp, Inquilinus limosus
aacgaacgctggcggcaggcctaacacatgcaagtcgaacgccccgcaaggggagtggcgcacgggtgagtaacacgtgggaacctaccttctggtacggaacaaccaagggaaactttggctaataccgtatacgacctccgggtgaaagatttatcgccggaagaggggcccgcgtccgattaggtagttggtggggtaacggcctaccaagccgacgatcggtagctggtctgagaggatgaccagccacactgggactgagacacggcccagactcctacgggaggcagcagtggggaatattggacaatgggcgcaagcctgatccagccatgccgcgtgagtgatgaaggccttcgggttgtaaagctctttcacccacgacgatgatgacggtagtgggagaagaagccccggctaacttcgtgccagcagccgcggtaatacgaagggggcaagcgttgttcggaatgactgggcgtaaagggcgcgtaggcggttcgttgcgtcagatgtgaaagccccgggctcaacctgggaactgcatttgatacgggcgggcttgaatccaagagagggtggtggaattcccagtgtagaggtgaaattcgtagatattgggaagaacaccagtggcgaaggcggccacctggcttggcattgacgctgaggcgcgaaagcgtggggagcaaacaggattagataccctggtagtccacgccgtaaacgatgtgtgctagccgtcgggcagcttgctgttcggtggcgcagctaacgcgataagcacaccgcctggggagtacggtcgcaagattaaaactcaaaggaattgacgggggcccgcacaagcggtggagcatgtggtttaattcgaagcaacgcgcagaaccttaccaacccttgacatggggagtgtgggcctgagagatcgggtccttcagttcggctggctcccacacaggtgctgcatggctgtcgtcagctcgtgtcgtgagatgttgggttaagtcccgcaacgagcgcaaccctcctcttcagttgccatcattgagttgggcactctggagatactgccggtgacaagccggaggaaggcggggatgacgtcaagtcctcatggcccttacgggttgggctacacacgtgctacaatggcggtgacagtgggcagcgaaggggcgacctggagctaatccccaaaagccgtctcagttcggattgcactctgcaactcgggtgcatgaagttggaatcgctagtaatcgcggatcagcacgccgcggtgaatacgttcccgggccttgtacacaccgcccgtcacaccatgggagttggttttacccgaagacggtgcgctgacccgcaagggaggcagccggccacggtgagatcagcgactggggtg

SEQ ID NO: 1697 - DNA, 1409 bp, Insolitispirillum peregrinum
aacgaacgctggcggcaggcctaacacatgcaagtcgatcgctgtcttcggacagagaggcgcacgggtgagtaacacgtgggaacatacccttgagtgcggaataactattggaaacgatagctaataccgcatacgccctacgggggaaagatttatcgctcaaggattggcccgcgtccgattagctagttggcggggtaacggcccaccaaggcgacgatcggtagctggtttgagagaatgatcagccacactgggactgagacacggcccagactcctacgggaggcagcagtggggaatattggacaatgggcgcaagcctgatccagccatgccgcgtgagtgaagaaggccttcgggttgtaaagctctttcagacgtgacgatgatgacggtagcgtcagaagaagccccggctaacttcgtgccagcagccgcggtaatacgaagggggcaagcgttgttcggaattactgggcgtaaagcgcgcgtaggcggcgtcgtcagtcagaggtgaaatcccagggctcaaccttggaattgcctttgatactgcgatgcttgagttcgagagagggtggcggaatacccagtgtagaggtgaaattcgtagatattgggtagaacaccagtggcgaaggcggccacctggctcgatactgacgctgaggtgcgaaagcgtggggagcaaacaggattagataccctggtagtccacgccgtaaacgatgagtgctagctgttggaatgcatgcatttcagtggcgcagctaacgcattaagcactccgcctggggagtacggtcgcaagattaaaactcaaaggaattgacgggggcccgcacaagcggtggagcatgtggtttaattcgaagcaacgcgcagaaccttaccagcccttgacatcgggatcgcgacctccagagatggaagtcttcagttcggctggatcctggacaggtgctgcatggctgtcgtcagctcgtgtcgtgagatgttgggttaagtcccgcaacgagcgcaaccctcactttcagttgccatcattcagttgggcactctgaagggactgccggtgacaagccggaggaaggtggggatgacgtcaagtcctcatggcccttacgggctgggctacacacgtgctacaatggtggatacaatgggcagcgaacccgcgagggcaagcgaatctccaaagtccatctcagttcggattgtactctgcaactcgagtacatgaagtcggaatcgctagtaatcgtagatcagcatgctacggtgaatacgttcccgggccttgtacacaccgcccgtcacaccatgggagttggttttacccgaaggcggttcgctaaccttttaggaggcagccgaccacggtaaggtcagtgactggggtg

SEQ ID NO: 1698 - DNA, 1446 bp, Iodobacter fluviatilis
  misc_feature (176)..(177): n is a, c, g, or t
  misc_feature (448)..(448): n is a, c, g, or t
  misc_feature (458)..(458): n is a, c, g, or t
  misc_feature (566)..(566): n is a, c, g, or t
  misc_feature (757)..(757): n is a, c, g, or t
  misc_feature (781)..(781): n is a, c, g, or t
  misc_feature (810)..(810): n is a, c, g, or t
  misc_feature (933)..(933): n is a, c, g, or t
  misc_feature (967)..(968): n is a, c, g, or t
  misc_feature (997)..(997): n is a, c, g, or t
  misc_feature (1005)..(1007): n is a, c, g, or t
  misc_feature (1037)..(1037): n is a, c, g, or t
  misc_feature (1058)..(1058): n is a, c, g, or t
  misc_feature (1066)..(1067): n is a, c, g, or t
  misc_feature (1102)..(1103): n is a, c, g, or t
  misc_feature (1226)..(1226): n is a, c, g, or t
  misc_feature (1359)..(1359): n is a, c, g, or t
  misc_feature (1361)..(1361): n is a, c, g, or t
  misc_feature (1363)..(1363): n is a, c, g, or t
  misc_feature (1415)..(1417): n is a, c, g, or t
attgaacgctggcggcatgctttacacatgcaagtcgaacggtaacagggtgcttgcaccgctgacgagtggcgaacgggtgagtaatatatcggaacgtacctagtaatgggggataactatccgaaaggatagctaataccgcatacgccctgagggggaaagagggggatcgnnagacctctcgttattagagcggccgatatcagattagctagttggtgaggtaaaggctcaccaaggcaacgatctgtagcgggtcttagaggacgatccgccacactggaactgagacacggtccagactcctacgggaggcagcagtggggaatcttggacaatgggcgcaagcctgatccagcaatgccgcgtgcgtgaagaaggccttcgggttgtaaagcgcttttgttcgggaggaaatcctagtggctaatatccattggggatnacagtaccgnaagaataaggaccggctaactacgtgccagcagccgcggtaatacgtagggtccaagcgttaatcggaattactgggcgtaaagggtgcgcaggtggttgattaagtntgatgtgaaagccccgggctcaacctgggaattgcattgcaaactggtcaactagagtatggcagaggggggtggaattccgcgtgtagcagtgaaatgcgtagagatgcggaggaataccgatggcgaaggcaaccccctgggctaatactgacactcatgcacgaaagcgtggggagcaaacaggattngataccctggtagtccacgccctnaacgatgtctactagttgttggggaattngttccttagtaacgcagctaacgcgtgaagtagaccgcctggggagtacggccgcaaggctaaaactcaaaggaattgacgggggcccgcacaagcggtggatgatgtggattaattcgatgnaacgcgaaaaaccttacctagccttgacatgtcnngaatccctgagagattggggagtgccgcnaggaaccnnnacacaggtgctgcatggctgtcgtcagctngtgtcgtgagatgttgggttnagtcccgnnacgagcgcaacccttgtccttagttgctaccattnngttgggcactttaaggagactgccggtgacaaaccggaggaaggtggggatgacgtcaagtcctcatggcccttatggctagggcttcacacgtcatacaatggtcggtacagagggttgccnagccgcgaggtggagctaatctcataaaaccgatcgtagtccggattggagtctgcaactcgactccgtgaagtcggaatcgctagtaatcgcggatcagcatgtcgcggtgaatacgttcccgggccttgtncncnccgcccgtcacaccatgggaatgggtttcaccagaagtaggtaggctaaccnnnaggaggccgcttaccacggtgggattcat

SEQ ID NO: 1699 - DNA, 1446 bp, Isosphaera pallida
aatgaacgttggcggcgtggattaggcatgcaagtcgaacgggccgcaaggccagtggcgaaagggtgagtaaggcgacggcaacctaccccgaggttgggcatagccgggggaaactccgggtaattcccagcgatgtgcgtctcaggcatctgagacgcaccaaaggtgcaattccgcctcgggacgggccgtcgtggtattaggtagttggtggggtcacggcccaccaagccgacgatgcctaccgggcgtgcgagcgtggcccggcacactgggactgagacactgcccagactcctacgggaggctgcagtcgagaatcttcggcaatgggcgcaagcctgaccgagcgacgccgcgtggaggaagacggcccttgggttgtaaactcctgtcgaggggaaggaagggtcggcgaagagccgatcttgaccgctccctggaggaagcacgggctaagttcgtgccagcagccgcggtaagacgaaccgtgcaaacgttattcggaatcactgggcttaaagggcgcgtaggcggaagggcgcgtcggcgttgaaatcccccggctcaaccgggggaagcggcgtcgaaacggccgttctggaggggcgtagagggactcggaacttccggtggagcggtgatatgcgttgagatcggaaggaacgcccgtggcgaaagcggagtcctggacgcttactgacgctgaggcgcgaaagccaggggagcaaacgggattagataccccggtagtcctggctgtaaacgatgggcacttggcagtgggttcgtcgatgggtccactgccggagggaaaccgtgaagtgccccgcctggggagtatggtcgcaaggctgaaactcaaaggaattgacgggggctcacacaagcggtggagcatgtggcttaattcgaggctacgcgaaaaaccttatcctgggcttgacatgcagggattagccggcggaaacgtcggtgacgccgcaaggtggaacctgcacaggtgctgcatggctgtcgtcagctcgtgccgtgaggtgtcgggttaagtcccttaacgagcgaaacccctgcggccagttgccaacacatcctggtggggactctggccggaccgccggcgtgaagccggaggaaggcggggatgacgtcaagtcctcatggcccttatgcccagggctgcacacgtgctacaatggcggggacaaagcgtcgccacgccgtaaggccgagccaaccgcgtaaaccccgccccagttcggatcgagggctgcaacccgccctcgtgaagccggaatcgctagtaatcgcggatcagcattgccgcggtgaatgtgttcctgagccttgtacacaccgcccgtcaagccaccaaaggggggggcacccgaagtcgccgacgtctcacgacgggcgccgaaggtgaaactcctgatggggact

SEQ ID NO: 1700 - DNA, 1465 bp, Izhakiella australiensis
attgaacgctggcggcaggcctaacacatgcaagtcgaacggcagcgggggagagcttgctctcccgccggcgagtggcggacgggtgagtaatgtctggggatctgcccgatggagggggataaccactggaaacggtggctaataccgcataacgtcgcaagaccaaagtgggggaccttcgggcctcacaccatcggatgaacccagatgggattagctagtaggtggggtaaaggctcacctaggcgacgatccctagctggtctgagaggatgaccagccacactggaactgagacacggtccagactcctacgggaggcagcagtggggaatattgcacaatgggggaaaccctgatgcagccatgccgcgtgtatgaagaaggccttcgggttgtaaagtactttcagtcaggaggaagggcgagtggttaataaccgcccgcattgacgttactgacagaagaagcaccggctaactccgtgccagcagccgcggtaatacggagggtgcaagcgttaatcggaattactgggcgtaaagcgcacgcaggcggtctgttaagtcagatgtgaaatccccgggctcaacccgggaactgcatttgaaactggcaggcttgagtctcgtagaggggggtggaattccaggtgtagcggtgaaatgcgtagagatctggaggaataccggtggcgaaggcggccccctggacgaagactgacgctcaggtgcgaaagcgtggggagcaaacaggattagataccctggtagtccacgccgtaaacgatgtcgacttggaggctgtgagcttgactcgtggcttccggagctaacgcgttaagtcgaccgcctggggagtacggccgcaaggttaaaactcaaatgaattgacgggggcccgcacaagcggtggagcatgtggtttaattcgatgcaacgcgaagaaccttacctggtcttgacatccacggaaggtctcagagatgagaccgtgccttcgggaaccgtgagacaggtgctgcatggctgtcgtcagctcgtgttgtgaaatgttgggttaagtcccgcaacgagcgcaacccttatcctttgttgccagcacgtaatggtgggaactcaaaggagactgccggtgataaaccggaggaaggtggggatgacgtcaagtcatcatggcccttacgaccagggctacacacgtgctacaatggcgcatacaaagagaagcgacctcgcgagagcaagcggacctcataaagtgcgtcgtagtccggattggagtctgcaacccgactccatgaagtcggaatcgctagtaatcgtggatcagaatgccacggtgaatacgttcccgggccttgtacacaccgcccgtcacaccatgggagtgggttgcaaaagaagtaggtagcttaaccttcgggagggcgcttaccactttgtgattcatgactggggtg

SEQ ID NO: 1701 - DNA, 1464 bp, Izhakiella capsodis
attgaacgctggcggcaggcctaacacatgcaagtcgaacggcagcgggggagagcttgctctcctgccggcgagtggcggacgggtgagtaatgtctggggatctgcccgatggagggggataaccactggaaacggtggctaataccgcatgaagtcgcaagaccaaagtgggggaccttcgggcctcacgccataggatgaacccagatgggattagctggtaggtggggtaaaggcccacctaggcgacgatccctagctggtctgagaggatgaccagccacactggaactgagacacggtccagactcctacgggaggcagcagtggggaatattgcacaatggggggaaccctgatgcagccatgccgcgtgtatgaagaaggccttagggttgtaaagtactttcagtcaggaggaagggtgagcagtgaatagctgtttgcattgacgttactgacagaagaagcaccggctaactccgtgccagcagccgcggtaatacggagggtgcaagcgttaatcggaattactgggcgtaaagcgcacgcaggcggtctgttaagtcagatgtgaaatccccgggcttaacccgggaactgcatttgaaactggcaggctggagtctcgtagaggggggtagaattccaggtgtagcggtgaaatgcgtagagatctggaggaataccggtggcgaaggcggccccctggacgaagactgacgctcaggtgcgaaagcgtggggagcaaacaggattagataccctggtagtccacgctgtaaacgatgtcgacttggaggttgtgcccttgaggcgtggcttccggagctaacgcgttaagtcgaccgcctggggagtacggccgcaaggttaaaactcaaatgaattgacgggggcccgcacaagcggtggagcatgtggtttaattcgatgcaacgcgaagaaccttacctggtcttgacatccacggaaggtcccagagatggggctgtgccttcgggagccgtgagacaggtgctgcatggctgtcgtcagctcgtgttgtgaaatgttgggttaagtcccgcaacgagcgcaacccttatcctttgttgccagcgatacggtcgggaactcaaaggagactgccggtgataaaccggaggaaggtggggatgacgtcaagtcatcatggcccttacgaccagggctacacacgtgctacaatggcgcatacaaagagaagcgacctcgcgagagcaagcggacctcataaagtgcgtcgtagtccggattggagtctgcaacccgactccatgaagtcggaatcgctagtaatcgtggatcagaatgccacggtgaatacgttcccgggccttgtacacaccgcccgtcacaccatgggagtgggttgcaaaagaagtaggtagcttaaccttcgggagggcgcttaccactttgtgattcatgactggggtg

SEQ ID NO: 1702 - DNA, 1475 bp, Jeotgalibacillus alimentarius
gacgaacgctggcggcgtgcctaatacatgcaagtcgagcgaacagatgaggagcttgctcctctgacgttagcggcggacgggtgagtaacacgtgggcaacctgccctgcagattgggataactccgggaaaccggggctaataccgaataacagaaagaatctcctgattcttttttgaaaggcggcttttagctgtcactgcaggatgggcccgcggcgcattagctagttggtgaggtaacggctcaccaaggcaacgatgcgtagccgacctgagagggtgatcggccacactgggactgagacacggcccagactcctacgggaggcagcagtagggaatcttccgcaatggacgaaagtctgacggagcaacgccgcgtgagtgaagaaggttttcggatcgtaaagctctgttgtcagggaagaacaagtaccatagtaactgatggtaccttgacggtacctgaccagaaagccacggctaactacgtgccagcagccgcggtaatacgtaggtggcaagcgttgtccggaattattgggcgtaaagcgcgcgcaggtggttccaaaagtctgatgtgaaagcccccggctcaaccggggagggtcattggaaactggggaacttgagtgcaggagaggaaagtggaattccacgtgtagcggtgaaatgcgtagatatgtggaggaacaccagtggcgaaggcgactttctggcctgtaactgacactgaggcgcgaaagcgtggggagcaaacaggattagataccctggtagtccacgccgtaaacgatgagtgctaagtgttggggggtttccgcccctcagtgctgcagctaacgcattaagcactccgcctggggagtacggccgcaaggctgaaactcaaaggaattgacgggggcccgcacaagcggtggagcatgtggtttaattcgaagcaacgcgaagaaccttaccaggtcttgacatcccggtgaccgcactggagacagtgttttcccttcggggacaacggtgacaggtggtgcatggttgtcgtcagctcgtgtcgtgagatgttgggttaagtcccgcaacgagcgcaacccttgatcttagttgccagcattcagttgggcactctaaggtgactgccggtgacaaaccggaggaaggtggggatgacgtcaaatcatcatgccccttatgacctgggctacacacgtgctacaatggacgatacaaagggctgcgagaccgcgaggtttagccaatcccataaaatcgttctcagttcggattgtaggctgcaactcgcctacatgaagctggaatcgctagtaatcgcggatcagcatgccgcggtgaatacgttcccgggccttgtacacaccgcccgtcacaccacgagagtttgtaacacccgaagtcggtgaggtaaccttttggagccagccgcctaaggtgggacagatgattggggtg

SEQ ID NO: 1703 - DNA, 1473 bp, Jeotgalibacillus campisalis
gacgaacgctggcggcgtgcctaatacatgcaagtcgagcgaattttctggagcttgctccagaaagttagcggcggacgggtgagtaacacgtgggcaatctgcccgtaagactgggataactccgggaaaccggggctaataccggataatcctgactctctcctgagagtcggttgaaagatggtttcggctatcacttacggatgagcccgcggcgcattagctagttggtgaggtaacggctcaccaaggcgacgatgcgtagccgacctgagagggtgatcggccacactgggactgagacacggcccagactcctacgggaggcagcagtagggaatcttccgcaatggacgaaagtctgacggagcaacgccgcgtgagtgaagaaggttttcggatcgtaaaactctgttgttagggaagaacacgtacgagagtaactgctcgtaccttgacggtacctaaccagaaagccacggctaactacgtgccagcagccgcggtaatacgtaggtggcaagcgttgtccggaattattgggcgtaaagcgcgcgcaggtggttccttaagtctgatgtgaaagcccccggctcaaccggggagggtcattggaaactggggaacttgagtgcaggagaggaaagtggaattccacgtgtagcggtgaaatgcgtagatatgtggaggaacaccagtggcgaaggcgactttctggcctgtaactgacactgaggcgcgaaagcgtggggagcaaacaggattagataccctggtagtccacgccgtaaacgatgagtgctaagtgttggggggtttccgcccctcagtgctgcagctaacgcattaagcactccgcctggggagtacggccgcaaggctgaaactcaaaggaattgacgggggcccgcacaagcggtggagcatgtggtttaattcgaagcaacgcgaagaaccttaccaggtcttgacatcccattgcccggtctagagatagacttttcccttcggggacaatggtgacaggtggtgcatggttgtcgtcagctcgtgtcgtgagatgttgggttaagtcccgcaacgagcgcaacccttgatcttagttgccagcattcagttgggcactctaaggtgactgccggtgacaaaccggaggaaggtggggatgacgtcaaatcatcatgccccttatgacctgggctacacacgtgctacaatggacgatacaaagggctgcgagaccgcgaggtggagccaatcccataaaatcgttctcagttcggattgtaggctgcaactcgcctacatgaagctggaatcgctagtaatcgcggatcagcatgccgcggtgaatacgttcccgggccttgtacacaccgcccgtcacaccacgagagtttgtaacacccgaagtcggtggggtaacctttatggagccagccgcctaaggtgggacagatgattggggtg

SEQ ID NO: 1704 - DNA, 1475 bp, Jeotgalibacillus malaysiensis
gacgaacgctggcggcgtgcctaatacatgcaagtcgagcgaacagatgaggagcttgctcctctgacgttagcggcggacgggtgagtaacacgtgggcaacctgccctgcagattgggataactccgggaaaccggggctaataccgaataacaaaaagaatctcctgattcttttttgaaaggcggcttttagctgtcactgcaggatgggcccgcggcgcattagctagttggtgaggtaacggctcaccaaggcgacgatgcgtagccgacctgagagggtgatcggccacactgggactgagacacggcccagactcctacgggaggcagcagtagggaatcttccgcaatggacgaaagtctgacggagcaacgccgcgtgagtgaagaaggttttcggatcgtaaagctctgttgtcagggaagaacaagtaccatagtaactgatggtaccttgacggtacctgaccagaaagccacggctaactacgtgccagcagccgcggtaatacgtaggtggcaagcgttgtccggaattattgggcgtaaagcgcgcgcaggtggttccaaaagtctgatgtgaaagcccccggctcaaccggggagggtcattggaaactggggaacttgagtgcaggagaggaaagtggaattccacgtgtagcggtgaaatgcgtagatatgtggaggaacaccagtggcgaaggcgactttctggcctgtaactgacactgaggcgcgaaagcgtggggagcaaacaggattagataccctggtagtccacgccgtaaacgatgagtgctaagtgttggggggtttccgcccctcagtgctgcagctaacgcattaagcactccgcctggggagtacggccgcaaggctgaaactcaaaggaattgacgggggcccgcacaagcggtggagcatgtggtttaattcgaagcaacgcgaagaaccttaccaggtcttgacatcccggtgaccacactggagacagtgttttcccttcggggacaacggtgacaggtggtgcatggttgtcgtcagctcgtgtcgtgagatgttgggttaagtcccgcaacgagcgcaacccttgatcttagttgccagcattcagttgggcactctaaggtgactgccggtgacaaaccggaggaaggtggggatgacgtcaaatcatcatgccccttatgacctgggctacacacgtgctacaatggacgatacaaagggctgcgagaccgcgaggtttagccaatcccataaaatcgttctcagttcggattgtaggctgcaactcgcctacatgaagctggaatcgctagtaatcgcggatcagcatgccgcggtgaatacgttcccgggccttgtacacaccgcccgtcacaccacgagagtttgtaacacccgaagtcggtgaggtaaccttttggagccagccgcctaaggtgggacagatgattggggtg

SEQ ID NO: 1705 - DNA, 1472 bp, Jeotgalibacillus marinus
gacgaacgctggcggcgtgcctaatacatgcaagtcgagcggagttagagaagcttgcttctctaacttagcggcggacgggtgagtaacacgtgggcaatctgcccgtaagactgggataactccgggaaaccggggctaataccggataatcctgactctctcctgagagtcagttgaaagatggtttcggctatcacttacggatgagcccgcggcgcattagctagttggtgaggtaacggctcaccaaggcgacgatgcgtagccgacctgagagggtgatcggccacactgggactgagacacggcccagactcctacgggaggcagcagtagggaatcttccgcaatggacgaaagtctgacggagcaacgccgcgtgagtgaagaaggttttcggatcgtaaaactctgttgttagggaagaacacgtacgagagtaactgctcgtaccttgacggtacctaaccagaaagccacggctaactacgtgccagcagccgcggtaatacgtaggtggcaagcgttgtccggaattattgggcgtaaagcgcgcgcaggtggttccttaagtctgatgtgaaagcccccggctcaaccggggagggtcattggaaactggggaacttgagtgcaggagaggaaagtggaattccacgtgtagcggtgaaatgcgtagatatgtggaggaacaccagtggcgaaggcgactttctggcctgtaactgacactgaggcgcgaaagcgtggggagcaaacaggattagataccctggtagtccacgccgtaaacgatgagtgctaagtgttggggggtttccgcccctcagtgctgcagctaacgcattaagcactccgcctggggagtacggccgcaaggctgaaactcaaaggaattgacgggggcccgcacaagcggtggagcatgtggtttaattcgaagcaacgcgaagaaccttaccaggtcttgacatcccattgcccggtctagagatagacttttcccttcggggacaatggtgacaggtggtgcatggttgtcgtcagctcgtgtcgtgagatgttgggttaagtcccgcaacgagcgcaacccttgatcttagttgccagcatttagttgggcactctaaggtgactgccggtgacaaaccggaggaaggtggggatgacgtcaaatcatcatgccccttatgacctgggctacacacgtgctacaatggacgatacaaagggcagcgagaccgcgaggtggagccaatcccataaaatcgttctcagttcggattgtaggctgcaactcgcctacatgaagctggaatcgctagtaatcgcggatcagcatgccgcggtgaatacgttcccgggccttgtacacaccgcccgtcacaccacgagagtttgtaacacccgaagtcggtggggtaaccatttggagccagccgcctaaggtgggaccgatgattggggtg

SEQ ID NO: 1706 - DNA, 1474 bp, Jeotgalibacillus salarius
gacgaacgctggcggcgtgcctaatacatgcaagtcgagcgaacagaagagaagcttgcttctcggatgttagcggcggacgggtgagtaacacgtgggcaacctgcccttaagactgggataactccgggaaaccggggctaataccggataatgcttttgtcttcatggacgagagctgaaagatggtttcggctatcacttaaggatgggcccgcggcgcattagctagttggtgaggtaacggctcaccaaggccacgatgcgtagccgacctgagagggtgatcggccacactgggactgagacacggcccagactcctacgggaggcagcagtagggaatcttccgcaatggacgaaagtctgacggagcaacgccgcgtgagtgaagaaggttttcggatcgtaaagctctgttgttagggaagaacaagtaccatagtaactgatggtaccttgacggtacctaaccagaaagccacggctaactacgtgccagcagccgcggtaatacgtaggtggcaagcgttgtccggaattattgggcgtaaagcgcgcgcaggtggttccaaaagtctgatgtgaaagcccccggctcaaccggggagggtcattggaaactggggaacttgagtgcaggagaggaaagtggaattccacgtgtagcggtgaaatgcgtagatatgtggaggaacaccagtggcgaaggcgactttctggcctgtaactgacactgaggcgcgaaagcgtggggagcaaacaggattagataccctggtagtccacgccgtaaacgatgagtgctaagtgttggggggtttccgcccctcagtgctgcagctaacgcattaagcactccgcctggggagtacggccgcaaggctgaaactcaaaggaattgacgggggcccgcacaagcggtggagcatgtggtttaattcgaagcaacgcgaagaaccttaccaggtcttgacatcccggtgaccgcactggagacagtgttttcccttcggggacaacggtgacaggtggtgcatggttgtcgtcagctcgtgtcgtgagatgttgggttaagtcccgcaacgagcgcaacccttgatcttagttgccagcattcagttgggcactctaaggtgactgccggtgacaaaccggaggaaggtggggatgacgtcaaatcatcatgccccttatgacctgggctacacacgtgctacaatggacgatacaaagggctgcgagaccgcgaggtttagccaatcccataaaatcgttctcagttcggattgtaggctgcaactcgcctacatgaagctggaatcgctagtaatcgcggatcagcatgccgcggtgaatacgttcccgggccttgtacacaccgcccgtcacaccacgagagtttgtaacacccgaagtcggtgaggtaaccttttggagccagccgcctaaggtgggacagatgattggggtg

SEQ ID NO: 1707 - DNA, 1477 bp, Jeotgalibacillus soli
gacgaacgctggcggcgtgcctaatacatgcaagtcgagcgaatgacgaaggagcttgctccttctgatttagcggcggacgggtgagtaacacgtgggcaatctgcccgtaagactgggataactccgggaaaccggggctaataccggataatcccgatcctctcctgaggatcggttgaaagatggtttcggctatcacttacggatgagcccgcggcgcattagctagttggtggggtaatggctcaccaaggcgacgatgcgtagccgacctgagagggtgatcggccacactgggactgagacacggcccagactcctacgggaggcagcagtagggaatcttccgcaatggacgaaagtctgacggagcaacgccgcgtgagtgaagaaggttttcggatcgtaaagctctgttgttagggaagaacacgtacgagagtaactgctcgtaccttgacggtacctaaccagaaagccacggctaactacgtgccagcagccgcggtaatacgtaggtggcaagcgttgtccggaattattgggcgtaaagcgcgcgcaggtggttctttaagtctgatgtgaaagcccccggctcaaccggggagggtcattggaaactggggaacttgagtgcaggagaggaaagtggaattccacgtgtagcggtgaaatgcgtagatatgtggaggaacaccagtggcgaaggcgactttctggcctgtaactgacactgaggcgcgaaagcgtggggagcaaacaggattagataccctggtagtccacgccgtaaacgatgagtgctaagtgttggggggtttccgcccctcagtgctgcagctaacgcattaagcactccgcctggggagtacggccgcaaggctgaaactcaaaggaattgacgggggcccgcacaagcggtggagcatgtggtttaattcgaagcaacgcgaagaaccttaccaggtcttgacatcctctgccaacccaagagattgggcgttccccttcgggggacagagtgacaggtggtgcatggttgtcgtcagctcgtgtcgtgagatgttgggttaagtcccgcaacgagcgcaacccttgatcttagttgccagcattcagttgggcactctaaggtgactgccggtgacaaaccggaggaaggtggggatgacgtcaaatcatcatgccccttatgacctgggctacacacgtgctacaatggacgatacaaagggcagcaagaccgcgaggtggagccaatcccataaaatcgttctcagttcggattgtaggctgcaactcgcctacatgaagctggaatcgctagtaatcgcggatcagcatgccgcggtgaatacgttcccgggccttgtacacaccgcccgtcacaccacgagagtttgtaacacccgaagtcggtggggtaacactttatgtgagccagccgcctaaggtgggacagatgattggggtg

SEQ ID NO: 1708 - DNA, 1451 bp, Kandleria vitulina
gatgaacgctggcggcgtgcctaatacatgcaagtcgaacgggaatcttcggattccagtggcgaacgggtgaggaatacataggtaacctgcccctccgagggggacaacagacggaaacatctgctaagaccgcatagccacagggaaggcatcttccctgtgccaaatgtcctttcggggacagcggggggatggacctatgccgcattagctggttggcggggcaacggcccaccaaggcgacgatgcgtagccggcctgagagggcggacggccacactgggactgagacacggcccagactcctacgggaggcagcagtagggaattttcggcaatgggggaaaccctgaccgagcaacgccgcgtgaacgatgaaggccttcgggtcgtaaagttctgttgcgaaggaagaacgccggtgtcaggaaatgggcgccgggtgacggtacttcgcatagaaagccacggctaactacgtgccagcagccgcggtaatacgtaggtggcgagcgttatccggaatcattgggcgtaaagagggagcaggcggcgatacaggtctgtggtgaaattccgaagctaaacttcggccagccaaagaaaccggatcgctagagtgcggaagaggatcgtggaattccatgtgtagcggtgaaatgcgtagatatatggaggaacaccagtggcgaaggcgacggtctgggccgcaactgacgctcattcccgaaagcgtggggagcaaataggattagataccctagtagtccacgccgtaaacgatcgatactaagtgtcgggggtcaaacctcggtgctggagtcaacgcaataagtatcgcgcctgagtagtacgttcgcaagaatgaaactcaaaggaattgacgggggcccgcacaagcggtggagcatgtggtttaattcgaagcaacgcgaagaaccttaccaggtcttgacatcgatccaaaagggacggagacgtccccatagctatggagaagacaggtggtgcatggttgtcgtcagctcgtgtcgtgagatgttgggttaagtcccgcaacgagcgcaacccctgtcgccagttgccagcattgagttggggactctggcgagactgcctctgcaaggaggaggaaggcggggatgacgtcaaatcatcatgccccttatgacctgggccacacacgtgctacaatggacggagcagagggaagcgaagcggcgacgccaagcggatcccagaaacccgttctcagttcggactgcagtctgcaactcgactgcacgaagctggaatcgctagtaatcgcggatcagcatgccgcggtgaatacgttctcgggccttgtacacaccgcccgtcacaccatgagagtcggcaacacccgaagccggtggctcaacccttctgggagggagctgtctaaggtggggccgatgattggggtg

SEQ ID NO: 1709 - DNA, 1461 bp, Kangiella geojedonensis
attgaacgctggcggtatgcttaacacatgcaagtcgaacggtaacatgaaagagcttgctcttttgatgacgagtggcggacgggtgagtaacacgtgggaatctaccgaatagcgggggatagcccggagaaatccggattaataccgcataagcactacggtgtaaagggggcctcttcttgaaagcttccactattcgatgagcctgcgtcagattagctagttggtggggtaatggcctaccaaggcgacgatctgtagctggtctgagaggatgatcagccacactgggactgagacacggcccagactcctacgggaggcagcagtggggaatattggacaatgggggcaaccctgatccagcaataccgcgtgtgtgaagaaggccttcgggttgtaaagcactttcagcgaggaggaaaagctagtagttaatacctgctggccttgacgttactcgcagaagaagcaccggctaactccgtgccagcagccgcggtaatacggagggtgcaagcgttaatcggaattactgggcgtaaagcgcgcgtaggcggatgattaagtcagatgtgaaagcccagggcttaaccttggaactgcatttgatactggtcatctagagtacagaagaggggggtggaattccaggtgtagcggtgaaatgcgtagatatctggaggaacatcagtggcgaaggcgaccccctggtctgatactgacgctgaggtgcgaaagcgtgggtagcgaacaggattagataccctggtagtccacgccgtaaacgatgtctattagctgttgggtatattaagatacttagtggcgcagctaacgctttaaatagaccgcctggggagtacggccgcaaggttaaaactcaaatgaattgacgggggcccgcacaagcggtggagcatgtggtttaattcgatgcaacgcgaagaaccttaccaggtcttgacatccagagaactttccagagatggattggtgccttcgggaactctgtgacaggtgctgcatggctgtcgtcagctcgtgtcgtgagatgttgggttaagtcccgtaacgagcgcaacccttgtccttagttgctaacattaagttgagaactctaaggagactgccggtgacaaaccggaggaaggtggggacgacgtcaagtcatcatggcccttacgacctgggctacacacgtgctacaatgggcagtacagagggttgccaacccgcgagggggagctaatctcacaaagctgttcgtagtccggattgttctctgcaactcgagaacatgaagtcggaatcgctagtaatcgtggatcagaatgccacggtgaatacgttcccgggccttgtacacaccgcccgtcacaccatggaagttgtttgcaccagaagtagctagcttaacattgggcggttaccacggtgtgagcaatgactggggtg

SEQ ID NO: 1710 - DNA, 1461 bp, Kangiella koreensis
attgaacgctggcggtatgcttaacacatgcaagtcgaacggtaacatgaaaaagcttgcttttttgatgacgagtggcggacgggtgagtaacacgtaggaatctaccgagtagcgggggatagcccggagaaatccggattaataccgcatgtgcacttcggtgtaaagagggcctcttcttgaaagctctcactattcgatgagcctgcgtcagattagcttgttggtggggtaatggcctaccaaggcgacgatctgtagctggtctgagaggatgatcagccacactgggactgagacacggcccagactcctacgggaggcagcagtggggaatattggacaatgggcgcaagcctgatccagcaataccgcgtgtgtgaagaaggccttcgggttgtaaagcactttcaatagggaggaaggcttgatggttaatacccattgagattgacgttacctatagaagaagcaccggctaactccgtgccagcagccgcggtaatacggagggtgcaagcgttaatcggaattactgggcgtaaagcgcgcgtaggcggatgattaagtcagatgtgaaagccccgggctcaacctgggaactgcatttgagactggtcgtctagagtacagaagaggggggtggaattccaggtgtagcggtgaaatgcgtagatatctggaggaacatcagtggcgaaggcgaccccctggtctgatactgacgctgaggtgcgaaagcgtgggtagcgaacaggattagataccctggtagtccacgccgtaaacgatgtctattagctgttgggtatattaaaatacttagtggcgcagctaacgcgataaatagaccgcctggggagtacggccgcaaggttaaaactcaaatgaattgacgggggcccgcacaagcggtggagcatgtggtttaattcgatgcaacgcgaagaaccttaccaggtcttgacatccagagaactttccagagatggattggtgccttcgggaactctgagacaggtgctgcatggctgtcgtcagctcgtgtcgtgagatgttgggttaagtcccgtaacgagcgcaacccttgtccttagttgctaacattaagttgagaactctaaggagactgccggtgacaaaccggaggaaggtggggacgacgtcaagtcatcatggcccttacgacctgggctacacacgtgctacaatgggcagtacagagggttgccaacccgcgagggggagctaatctcataaagctgttcgtagtccggattgttctctgcaactcgagaacatgaagtcggaatcgctagtaatcgtggatcagaatgccacggtgaatacgttcccgggccttgtacacaccgcccgtcacaccatgggagttgtttgcaccagaagtagctagcttaacattgggcggttaccacggtgtggtcaatgactggggtg

SEQ ID NO: 1711 - DNA, 1461 bp, Kangiella profundi
attgaacgctggcggtatgcttaacacatgcaagtcgaacggtaacatgaaaaagcttgcttttttgatgacgagtggcggacgggtgagtaacacgtaggaatctaccgagtagcgggggatagcccggagaaatccggattaataccgcatgtgcacttcggtgtaaagagggcctcttcttgaaagctctcactattcgatgagcctgcgtcagattagcttgttggtggggtaatggcctaccaaggcaacgatctgtagctggtctgagaggatgatcagccacactgggactgagacacggcccagactcctacgggaggcagcagtggggaatattggacaatgggcgcaagcctgatccagcaataccgcgtgtgtgaagaaggccttcgggttgtaaagcactttcaatagggaggaaggccaagtagttaatacctgcttggattgacgttacctatagaagaagcaccggctaactccgtgccagcagccgcggtaatacggagggtgcaagcgttaatcggaattactgggcgtaaagcgcgcgtaggcggatgattaagtcagatgtgaaagccccgggctcaacctgggaactgcatttgagactggtcgtctagagtacagaagaggggggtggaattccaggtgtagcggtgaaatgcgtagagatctggaggaacatcagtggcgaaggcgaccccctgggctgatactgacgctgaggtgcgaaagcgtgggtagcgaacaggattagataccctggtagtccacgccgtaaacgatgtctattagctgttgggtatattaagatacttagtggcgcagcaaacgcgataaatagaccgcctggggagtacggccgcaaggttaaaactcaaatgaattgacgggggcccgcacaagcggtggagcatgtggtttaattcgatgcaacgcgaagaaccttaccaggtcttgacatccagagaactttccagagatggattggtgccttcgggaactctgagacaggtgctgcatggctgtcgtcagctcgtgtcgtgagatgttgggttaagtcccgtaacgagcgcaacccttgtccttagttgctaccattaagttgagaactctaaggagactgccggtgacaaaccggaggaaggtggggacgacgtcaagtcatcatggcccttacgacctgggctacacacgtgctacaatgggcagtacagagggttgccaacccgcgagggggagctaatctcttaaagctgttcgtagtccggattgtactctgcaactcgagtgcatgaagtcggaatcgctagtaatcgcagatcagaatgctgcggtgaatacgttcccgggccttgtacacaccgcccgtcacaccatgggagttgtttgcaccagaagtagctagcttaacattgggcggttaccacggtgtggtcaataacgggggtg

SEQ ID NO: 1712 - DNA, 1459 bp, Kangiella sediminilitoris
attgaacgctggcggtatgcttaacacatgcaagtcgaacggtaacgatgctagcttgctagcaggcgacgagtggcggacgggtgagtaacgcgtgggaatctaccgagtagcgggggatagcccggagaaatccggattaataccgcatgtgcactacggtgtaaagagggcctctatttataagctctcactattcgatgagcctgcgtcagattagctagatggtggggtaaaggcctaccatggcgacgatctgtagctggtctgagaggatgatcagccacactgggactgagacacggcccagactcctacgggaggcagcagtggggaatattggacaatgggggcaaccctgatccagcaataccgcgtgtgtgaagaaggccttcgggttgtaaagcactttcagcgaggaggaaaagctagtagttaatacctgctggccttgacgttactcgcagaagaagcaccggctaactccgtgccagcagccgcggtaatacggagggtgcaagcgttaatcggaattactgggcgtaaagcgcgcgtaggcggatgattaagtcagatgtgaaagcccagggcttaaccttggaactgcatttgatactggtcatctagagtacagtagaggggggtggaattccaggtgtagcggtgaaatgcgtagagatctggaggaacatcagtggcgaaggcgaccccctggactgatactgacgctgaggtgcgaaagcgtgggtagcgaacaggattagataccctggtagtccacgccgtaaacgatgtctattagctgttgggtatattaagatacttagtggcgcagctaacgctttaaatagaccgcctggggagtacggccgcaaggttaaaactcaaatgaattgacgggggcccgcacaagcggtggagcatgtggtttaattcgatgcaacgcgaagaaccttaccaggtcttgacatccagagaactttccagagatggattggtgccttcgggaactctgtgacaggtgctgcatggctgtcgtcagctcgtgtcgtgagatgttgggttaagtcccgtaacgagcgcaacccttgtccttagttgctaacatttagttgagaactctaaggagactgccggtgacaaaccggaggaaggtggggacgacgtcaagtcatcatggcccttacgacctgggctacacacgtgctacaatgggcagtacagagggttgccaacccgcgagggggagctaatctcacaaagctgttcgtagtccggattgtactctgcaactcgagtgcatgaagtcggaatcgctagtaatcgtggatcagaatgccacggtgaatacgttcccgggccttgtacacaccgcccgtcacaccatggaagttgtttgcaccagaagtagctagcttaacattgggcggttaccacggtgtgaccaatgactggggtg

SEQ ID NO: 1713 - DNA, 1453 bp, Kangiella spongicola
attgaacgctggcggtatgcttaacacatgcaagtcgaacggtaacatgaaagagcttgctcttttgatgacgagtggcggacgggtgagtaacacgtgggaatctaccgagtagcgggggatagcccggagaaatccggattaataccgcatgtgcactacggtgtaaagggggcctcttcttgaaagcttccactattcgatgagcctgcgtcagattagctagttggtggggtaatggcctaccaaggcgacgatctgtagctggtctgagaggatgatcagccacactgggactgagacacggcccagactcctacgggaggcagcagtggggaatattggacaatgggggcaaccctgatccagcaataccgcgtgtgtgaagaaggccttcgggttgtaaagcactttcagcgaggaggaaggccaagtagttaatacctgcttggattgacgttactcgcagaagaagcaccggctaactccgtgccagcagccgcggtaatacggagggtgcaagcgttaatcggaattactgggcgtaaagcgcgcgtaggcggataattaagtcagatgtgaaagcccagggctcaaccttggaattgcatttgatactggttatctagagtacagcagaggggggtggaatttcaggtgtagcggtgaaatgcgtagatatctggaggaacatcagtggcgaaggcgaccccctgggctgatactgacgctgaggtgcgaaagcgtgggtagcgaacaggattagataccctggtagtccacgccgtaaacgatgtctattagttgttgggtatattaaaatacttagtgacgcagctaacgctttaaatagaccgcctggggagtacggccgcaaggttaaaactcaaatgaattgacgggggcccgcacaagcggtggagcatgtggtttaattcgatgcaacgcgaagaaccttaccaggtcttgacatccagagaactttccagagatggattggtgccttcgggaactctgtgacaggtgctgcatggctgtcgtcagctcgtgtcgtgagatgttgggttaagtcccgtaacgagcgcaacccttgtccttagttgctaacattcagttgagaactctaaggagactgccggtgacaaaccggaggaaggtggggacgacgtcaagtcatcatggcccttacgacctgggctacacacgtgctacaatgggcagtacagagggttgccaacccgcgagggggagctaatctcacaaagctgttcgtagtccggattgttctctgcaactcgagaacatgaagtcggaatcgctagtaatcgtggatcagaatgccacggtgaatacgttcccgggccttgtacacaccgcccgtcacaccatggaagttgtttgcaccagaagtagctagcttaaaattgggcggttaccacggtgtgggcaatga

SEQ ID NO: 1714 - DNA, 1528 bp, Ketobacter alkanivorans
agagtttgatcatggctcagattgaacgctggcggcaggcctaacacatgcaagtcgagcggtaacaggggagcttgctcctgctgacgagcggcggacgggtgagtaacgcgtgggaatctgcccattggtgggggatagcccggagaaattcggattaataccgcataatacctgagggttaaaacgggggatcattagacctcgtgccaatggatgagcccgcgtcagattagctagttggtaaggtaaaggcttaccaaggcgacgatctgtagctggcctgagagggtggtcagtcacactggaactgagacacggtccagactcctacgggaggcagcagtggggaatattgggcaatgggcgcaagcctgacccagccatgccgcgtgtgtgaagaaggctttcgggttgtaaagcactttaagttgggaggaaggctgcttagttaatacctaagtagattgacgttaccaacagaataagcaccggctaattccgtgccagcagccgcggtaatacggaaggtgcgagcgttaatcggaattactgggcgtaaagagcacgtaggcggtttgttaagttggatgtgaaagcccagggctcaaccttggaattgcatccgatactggcaggctagagtacagtagagggaggtggaatttccggtgtagcggtgaaatgcgtagagatcggaaggaacaccagtggcgaaggcggcctcctggactgatactgacgctgaggtgcgaaagcgtggggagcaaacaggattagataccctggtagtccacgccgtaaacgatgtcgactagccgttgggaaccttagagttcttagtggcgcagctaacgcactaagtcgaccgcctggggagtacggccgcaaggttaaaactcaaatgaattgacgggggcccgcacaagcggtggagcatgtggtttaattcgaagcaacgcgaagaaccttaccaagtcttgacatcctgcgaactttccagaaatggattggtgccttcgggaacgcagtgacaggtgctgcatggctgtcgtcagctcgtgtcgtgagatgttgggttaagtcccgtaacgagcgcaacccttgtccctatttgccagcacataatggtgggaactctagggagactgccggtgacaaaccggaggaaggtggggacgacgtcaagtcatcatggcccttacgacttgggctacacacgtgctacaatggtcggtacagagggcagcaaagcggcgacgtggagccaatcccttaaaaccggtcgtagtccggattggagtctgcaactcgactccatgaagtcggaatcgctagtaatcgcgaatcagaatgtcgcggtgaatacgttcccgggccttgtacacaccgcccgtcacaccatgggagtggattgcaccagaagtaggtagcttaaccttcgggagggcgcttaccacggtgtggttcatgactggggtgaagtcgtaacaaggtagccgtaggggaacctgcggctggatcacct

SEQ ID NO: 1715 - DNA, 1417 bp, Kiloniella laminariae
aacgaacgtggcggcaggcttaacacatgcaagtcgaacgagaatgttctttcgggaacaagacagtggcgcacgggtgagtaacgcgtgggaatctaccatggagtgggggataacagttggaaacgactgctaataccgcatacgccctacgggggaaagatttattgctctatgatgagcccgcgttagattaggtagttggtgaggtaacggctcaccaagcctacgatctatagctggtctgagaggatgatcagccacactgggactgagacacggcccagactcctacgggaggcagcagtggggaatattggacaatgggcgcaagcctgatccagccatgccgcgtgagtgaagaaggccttagggttgtaaagctctttcaactgtgaggatgatgacagtagcagtagaagaagcaccggctaacttcgtgccagcagccgcggtaatacgaagggtgcaagcgttgttcggaattactgggcgtaaagggcgtgtaggcggattacaaagatagaggtgaaaggcctgggctcaacctgggaactgcctttataacttgtagtctagagatcgagagaggatagcggaattcctagtgtagaggtgaaattcgtagatattaggaagaacaccagtggcgaaggcggctatctggctcgatactgacgctgaggcgcgaaagcgtggggagcaaacaggattagataccctggtagtccacgctgtaaacgatgtacactagtcgtcagggtacttgtactttggtgacgcagctaacgcattaagtgtaccgcctggggagtacggtcgcaagattaaaactcaaaggaattgacgggggcccgcacaagcggtggagcatgtggtttaattcgaagcaacgcgcagaaccttaccagcccttgacatcccggtcgcggaattcagagatgaatttcttcagttcggctggaccggtgacaggtgctgcatggctgtcgtcagctcgtgtcgtgagatgttgggttaagtcccgcaacgagcgcaacccctatctttagttgccagcattcagttgggcactctagagagactgccggtgataagccggaggaaggcggggatgacgtcaagtcctcatggcccttatgggctgggctacacacgtgctacaatggtaactacagtgggcagcgacgtcgcgaggcgaagctaatctccaaaagttatctcagttcggattgttctctgcaactcgagagcatgaaggtggaatcgctagtaatcgtagatcagcatgctacggtgaatacgttcccgggccttgtacacaccgcccgtcacaccatgggagttggttctacccgaagccggtgcgctaaccgcaaggaggcagccgaccacggtagggtcagcgactggggtg

SEQ ID NO: 1716 - DNA, 1469 bp, Kiloniella litopenaei
ttttagagtttgtgactggctcagaacgaacgctggcggcaggcttaacacatgcaagtcgaacgagaaggtaccttcgggtgctggacagtggcgcacgggtgagtaacgcgtgggaatctaccatggagtgggggataacagttggaaacgactgctaataccgcatacgccctacgggggaaagatttattgctctatgatgagcccgcgttagattaggtagttggtggggtaatggcctaccaagcctacgatctatagctggtctgagaggatgatcagccacactgggactgagacacggcccagactcctacgggaggcagcagtggggaatattggacaatgggcgaaagcctgatccagccatgccgcgtgagtgaagaaggccttagggttgtaaaactctttcaactgtgaggatgatgacagtagcagtagaagaagcaccggctaacttcgtgccagcagccgcggtaatacgaagggtgcgagcgttgttcggaattactgggcgtaaagggcgtgtaggcggattggcaagatagaggtgaaaggcctgggctcaacctgggaactgcctttataacttccagtctagagatcgagagaggatagcggaattcctagtgtagaggtgaaattcgtagatattaggaagaacaccagtggcgaaggcggctatctggctcgatactgacgctgaggcgcgaaagcgtggggagcaaacaggattagataccctggtagtccacgccgtaaacgatgtgaactagtcgtcaggatgcttgcatcttggtgacggagctaacgtattaagttcaccgcctggggagtacggtcgcaagattaaaactcaaaggaattgacgggggcccgcacaagcggtggagcatgtggtttaattcgaagcaacgcgcagaaccttaccagcccttgacataccaatcgcggatttcagagatgaattccttcagttcggctggattggatacaggtgctgcatggctgtcgtcagctcgtgtcgtgagatgttgggttaagtcccgcaacgagcgcaacccctgcctttagttgccatcatttagttgggcactctagagggactgccggtgataagccggaggaaggcggggatgacgtcaagtcctcatggcccttatgggctgggctacacacgtgctacaatggcaactacagtgggcagcaacgtcgcgaggcggagctaatctccaaaagttgtctcagttcggattgttctctgcaactcgagagcatgaaggtggaatcgctagtaatcgtagatcagcatgctacggtgaatacgttcccgggccttgtacacaccgcccgtcacaccatgggagttggttctacccgaagccggtgcgctaaccgtaaggaggcagccgaccacggtagggtcagcgactggggtgaagtcgtaacagggttaagccgtaata

SEQ ID NO: 1717 - DNA, 1418 bp, Kiloniella spongiae
aacgaacgctggcggcaggcttaacacatgcaagtcgaacgagaaggttctttcgggaactggacagtggcgcacgggtgagtaacgcgtgggaatctaccatggagtgggggataacagttggaaacgactgctaataccgcatacgccctacgggggaaagatttattgctctatgatgagcccgcgttagattaggtagttggtggggtaatggcctaccaagcctacgatctatagctggtctgagaggatgatcagccacactgggactgagacacggcccagactcctacgggaggcagcagtggggaatattggacaatgggggcaaccctgatccagccatgccgcgtgagtgaagaaggccttagggttgtaaaactctttcaactgtgaggatgatgacagtagcagtagaagaagcaccggctaacttcgtgccagcagccgcggtaatacgaagggtgcgagcgttgttcggaattactgggcgtaaagggcgtgtaggcggattgcaaagatagaggtgaaaggcctgggctcaacctgggaactgcctttataacttgcagtctagagatcgagagaggatagcggaattcctagtgtagaggtgaaattcgtagatattaggaagaacaccagtggcgaaggcggctatctggctcgatactgacgctgaggcgcgaaagcgtggggagcaaacaggattagataccctggtagtccacgccgtaaacgatgtgaactagtcgtcaggatgcttgcatcttggtgacggagctaacgtattaagttcaccgcctggggagtacggtcgcaagattaaaactcaaaggaattgacgggggcccgcacaagcggtggagcatgtggtttaattcgaagcaacgcgcagaaccttaccagcccttgacataccaatcgcggtttccagagatggattccttcagttcggctggattggatacaggtgctgcatggctgtcgtcagctcgtgtcgtgagatgttgggttaagtcccgcaacgagcgcaacccctgcctttagttgccatcattaagttgggcactctagagggactgccggtgataagccggaggaaggcggggatgacgtcaagtcctcatggcccttatgggctgggctacacacgtgctacaatggcaactacagtgggcagcaacgtcgcgaggcggagctaatctccaaaagttgtctcagttcggattgttctctgcaactcgagagcatgaaggtggaatcgctagtaatcgtagatcagcatgctacggtgaatacgttcccgggccttgtacacaccgcccgtcacaccatgggagttggttctacccgaagccggtgcgctaaccgcaaggaggcagccgaccacggtagggtcagcgactggggtg

SEQ ID NO: 1718 - DNA, 1459 bp, Kingella kingae
attgaacgctggcggcatgctttacacatgcaagtcggacggcagcacgagtacttgtacttggtggcgagtggcgaacgggtgagtaatatattggaacgtaccgagtaatgggggataactatccgaaaggatagctaataccgcatacgctttgagaaggaaagcaggggatcttcggaccttgcgttattcgagcggccaataactgattagctagttggtggggtaagggcccaccaaggcgacgatcagtagtgggtctgagaggatgatccgccacactgggactgagacacggcccagactcctacgggaggcagcagtggggaattttggacaatgggcgaaagcctgatccagccatgccgcgtgtctgaagaaggccttcgggttgtaaaggacttttgttagggaagaaaaggttgatgctaatatcattaactgatgacggtacctaaagaataagcaccggctaactacgtgccagcagccgcggtaatacgtagggtgcgagcgttaatcggaattactgggcgtaaagcgagcgcagacggttagttaagcaagatgtgaaatccccgagctcaacttgggaactgcgttttgaactggctagctagagtgtgtcagaggggggtagaattccacgtgtagcagtgaaatgcgtagagatgtggaggaataccgatggcgaaggcagccccctgggataacactgacgttcatgctcgaaagcgtgggtagcaaacaggattagataccctggtagtccacgccctaaacgatgtcaattagctgttgggcaacttgattgcttagtagcgtagctaacgcgtgaaattgaccgcctggggagtacggtcgcaagattaaaactcaaaggaattgacggggacccgcacaagcggtggatgatgtggattaattcgatgcaacgcgaagaaccttacctggtcttgacatgtacggaagagagtagagatactcttgtgccttcgggagccgtagcacaggtgctgcatggctgtcgtcagctcgtgtcgtgagatgttgggttaagtcccgcaacgagcgcaacccttgtcattagttgccatcattaagttgggcactctaatgagactgccggtgacaaaccggaggaaggtggggatgacgtcaagtcctcatggcccttatgaccagggcttcacacgtcatacaatggtcggtacagagggtagccaagccgcgaggtggagccaatcccagaaaaccgatcgtagtccggattgcactctgcaactcgagtgcatgaagtcggaatcgctagtaatcgcaggtcagcatactgcggtgaatacgttcccgggtcttgtacacaccgcccgtcacaccatgggagtgggggataccagaagtagatagggtaaccgcaaggagcccgtttaccacggtatgtttcatgactggggtg

SEQ ID NO: 1719 - DNA, 1463 bp, Kingella negevensis
attgaacgctggcggcatgctttacacatgcaagtcgaacggcagcgaggtagtgcttgcactactgtcggcgagtggcgaacgggtgagtaatatattggaacgtaccgagtaatgggggataactatccgaaaggatagctaataccgcatacgacctgagggtgaaagtgggggatcttcggacctcgcgttattcgagcggccaatatctgattagctagttggtggggtaaaggcccaccaaggcgacgatcagtagcgggtcttagaggatgatccgccacactgggactgagacacggcccagactcctacgggaggcagcagtggggaattttggacaatgggcgaaagcctgatccagccatgccgcgtgtctgaagaaggccttcgggttgtaaaggacttttgttagggaagaaaaggttgatgctaatatcattaactgatgacggtacctaaagaataagcaccggctaactacgtgccagcagccgcggtaatacgtagggtgcgagcgttaatcggaattactgggcgtaaagcgagcgcagacggttagttaagcaagatgtgaaatccccgagctcaacttgggaactgcgttttgaactggctagctagagtgtgtcagaggggggtagaattccacgtgtagcagtgaaatgcgtagagatgtggaggaataccgatggcgaaggcagccccctgggataacactgacgttcatgctcgaaagcgtgggtagcaaacaggattagataccctggtagtccacgccctaaacgatgtcaattagctgttgggcaacttgattgcttagtagcgtagctaacgcgtgaaattgaccgcctggggagtacggtcgcaagattaaaactcaaaggaattgacggggacccgcacaagcggtggatgatgtggattaattcgatgcaacgcgaagaaccttacctggtcttgacatgtacggaatctcccagagacgggagagtgccttcgggaaccgtaacacaggtgctgcatggctgtcgtcagctcgtgtcgtgagatgttgggttaagtcccgcaacgagcgcaacccttgtcattagttgccatcattaagttgggcactctaatgagactgccggtgacaaaccggaggaaggtggggatgacgtcaagtcctcatggcccttatgaccagggcttcacacgtcatacaatggtcggtacagagggtagccaagccgcgaggtggagccaatcccagaaaaccgatcgtagtccggattgcactctgcaactcgagtgcatgaagtcggaatcgctagtaatcgcaggtcagcatactgcggtgaatacgttcccgggtcttgtacacaccgcccgtcacaccatgggagcgggggataccagaagtaggtaggataaccgtaaggggtccgcttaccacggtatgcttcgtgactggggtg

SEQ ID NO: 1720 - DNA, 1411 bp, Kingella potus
attgaacgctggcggcatgctttacacatgcaagtcggacggcagcggggtagtgcttgcactactgccggcgagtggcgaacgggtgagtaatgcatcggaacgtaccggataatgggggataactttccgaaaggaaggctaataccgcatattccctgagggggaaagcgggggacctttgggcctcgcgttatccgagcggccgatgtctgattagctagttggtggggtaaaggcctaccaaggcgacgatcagtagcgggtctgagaggacgatccgccacactgggactgagacacggcccagactcctacgggaggcagcagtggggaattttggacaatgggcgcaagcctgatccagccatgccgcgtgtctgaagaaggccttcgggttgtaaaggacttttgttagggaagaaagggtttgtgctaataccatgaacttatgacggtacctaagaataagcaccggctaactacgtgccagcagccgcggtaatacgtagggtgcgagcgttaatcggaattactgggcgtaaagcgggcgcagacggtttgttaagcaggatgtgaaatccccgggctcaacctgggaactgcgttctgaactggcaggctagagtgtgtcagaggggggtagaattccacgtgtagcagtgaaatgcgtagagatgtggaggaataccgatggcgaaggcagccccctgggataacactgacgttcatgcccgaaagcgtgggtagcaaacaggattagataccctggtagtccacgccctaaacgatgtcgattagctgttgggcaacttgactgcttagtagcgtagctaacgcgtgaaatcgaccgcctggggagtacggtcgcaagattaaaactcaaaggaattgacggggacccgcacaagcggtggatgatgtggattaattcgatgcaacgcgaagaaccttacctggtcttgacatgtacggaaccttccagagacggaagggtgccttcgggagccgtaacacaggtgctgcatggctgtcgtcagctcgtgtcgtgagatgttgggttaagtcccgcaacgagcgcaacccttgtcattagttgccatcattaagttgggcactctaatgagactgccggtgacaaaccggaggaaggtggggatgacgtcaagtcctcatggcccttatgaccagggcttcacacgtcatacaatggtcggtacagagggtagccaagccgcgaggcggagccaatcccacaaaaccgatcgtagtccggattgcactctgcaactcgagtgcatgaagtcggaatcgctagtaatcgcaggtcagcatactgcggtgaatacgttcccgggtcttgtacacaccgcccgtcacaccatgggagtgggggataccagaagcaggt

SEQ ID NO: 1721 - DNA, 1386 bp, Kinneretia asaccharophila
tcgaacggtaacgcggggcaacctggcgacgagtggcgaacgggtgagtaatgtatcggaacgtgcccagttgtgggggataactgctcgaaagagcagctaataccgcatacgacctgagggtgaaagcgggggatcgcaagacctcgcgcaattggagcggccgatatcagattaggtagttggtggggtaaaggcccaccaagccaacgatctgtagctggtctgagaggacgaccagccacactgggactgagacacggcccagactcctacgggaggcagcagtggggaattttggacaatgggcgcaagcctgatccagccatgccgcgtgcgggaagaaggccttcgggttgtaaaccgcttttgtcagggaagaaacgctctgggttaatacctcggggtaatgacggtacctgaagaataagcaccggctaactacgtgccagcagccgcggtaatacgtagggtgcaagcgttaatcggaattactgggcgtaaagcgtgcgcaggcggttatgcaagacagaggtgaaatccccgggctcaacctgggaactgcctttgtgactgcatagctagagtacggtagagggggatggaattccgcgtgtagcagtgaaatgcgtagatatgcggaggaacaccgatggcgaaggcaatcccctggacctgtactgacgctcatgcacgaaagcgtggggagcaaacaggattagataccctggtagtccacgccctaaacgatgtcaactggttgttgggagggtttcttctcagtaacgtagctaacgcgtgaagttgaccgcctggggagtacggccgcaaggttgaaactcaaaggaattgacggggacccgcacaagcggtggatgatgtggtttaattcgatgcaacgcgaaaaaccttacctacccttgacatgccaggaatcctgcagagatgtgggagtgctcgaaagagaacctggacacaggtgctgcatggccgtcgtcagctcgtgtcgtgagatgttgggttaagtcccgcaacgagcgcaacccttgtcattagttgctacgaaagggcactctaatgagactgccggtgacaaaccggaggaaggtggggatgacgtcaggtcatcatggcccttatgggtagggctacacacgtcatacaatggccgggacagagggctgccaacccgcgagggggagctaatcccagaaacccggtcgtagtccggatcgcagtctgcaactcgactgcgtgaagtcggaatcgctagtaatcgcggatcagcttgccgcggtgaatacgttcccgggtcttgtacacaccgcccgtcacaccatgggagcgggttctgccagaagtagttagcctaaccgcaaggggggc

SEQ ID NO: 1722 - DNA, 1490 bp, Kiritimatiella glycovorans
aacgaacgctggcggcgtggattaggcatgcaagtcgagcgggatcgtcaggcttcaatccttcgggagagaaacctgacgtgagagcggcgaacgggtgagtaacgcttgaacaacctgcccttcagtccggaatagcccaccgaaaggtggattaatgccggatgtgttcctcctgcgcatgcaggactgtgtaaagacgggatttatcctgtcgctgaaggatgggttcgagtcctatcagcttgttggtgaggtaacggctcaccaaggcgatgacgggtagccggcctgagagggtgatcggccacactgggactgagacactgcccagactcctacgggaggctgcagtcgagaatcattcgcaatgcgcgaaagcgtgacgatgcgacgccgcgtggaggacgaaggccctagggtcgtaaactcctgtcagcagggaacaaggggcacgggctaataccccgcagctcttgatggtacctgcagaggaagtcacggctaactctgtgccagcagccgcggtaatacagaggtggctagcgttgttcggatttactgggcgtaaagggtccgcaggcggccccgcatgtcggatgtgaaagctcacggctcaaccgtggaacggcattcgaaactgtggggctagagtccgggagaggagaggggaattcttggtgtagcggtgaaatgcgtagatatcaagaagaacgccggtggcgaaagcgcctctctggaccggtactgacgctcatggacgaaagccgggggagcgaaagggattagatacccctgtagtcccggctgtaaacggtgtgcacttgtcgtgggaggactacccccttccgtgacgaagctaacgcgttaagtgcaccgcctggggagtacggccgcaaggctaaaactcaaaggaattgacgggggcccgcacaagcggtggagcatgtggcttaattcgatgcaacgcgaagaaccttacctgggtttgacatgcagctgcaagcccctgaaagggggtcgccttcgagggtgctgcacaggtgctgcatggctgtcgtcagctcgtgccgtgaggtgttgggttaagtcccgcaacgagcgcaacccctatgtttagttgccatcggttcggccgggcactctagacagactgcctcggttaacggggaggaaggtggggatgacgtcaagtccgtatggtccttatgcccagggctgcacacgtgctacaatggccggtctagtgggatgcaatactgcgaagtggagcaaatccttaaagccggccccagttcggatcggggtctgcaactcgaccccgtgaagtcggaatcgctagtaaaggcgtatcagcaatggcgccttgaatacgttcccgggccttgtacacaccgcccgtcacatcatgagagtcggctgcacccgaagtcgccggtccaacccgttcagggaggaaggcgccgaaggtgtggcagataattgggatg

SEQ ID NO: 1723 - DNA, 1540 bp, Klebsiella aerogenes
aaattgaagagtttgatcatggctcagattgaacgctggcggcaggcctaacacatgcaagtcgagcggtagcacagagagcttgctctcgggtgacgagcggcggacgggtgagtaatgtctgggaaactgcctgatggagggggataactactggaaacggtagctaataccgcataacgtcgcaagaccaaagtgggggaccttcgggcctcatgccatcagatgtgcccagatgggattagctagtaggtggggtaatggctcacctaggcgacgatccctagctggtctgagaggatgaccagccacactggaactgagacacggtccagactcctacgggaggcagcagtggggaatattgcacaatgggcgcaagcctgatgcagccatgccgcgtgtatgaagaaggccttcgggttgtaaagtactttcagcgaggaggaaggcgttaaggttaataaccttggcgattgacgttactcgcagaagaagcaccggctaactccgtgccagcagccgcggtaatacggagggtgcaagcgttaatcggaattactgggcgtaaagcgcacgcaggcggtctgtcaagtcggatgtgaaatccccgggctcaacctgggaactgcattcgaaactggcaggctagagtcttgtagaggggggtagaattccaggtgtagcggtgaaatgcgtagagatctggaggaataccggtggcgaaggcggccccctggacaaagactgacgctcaggtgcgaaagcgtggggagcaaacaggattagataccctggtagtccacgccgtaaacgatgtcgacttggaggttgtgcccttgaggcgtggcttccggagctaacgcgttaagtcgaccgcctggggagtacggccgcaaggttaaaactcaaatgaattgacgggggcccgcacaagcggtggagcatgtggtttaattcgatgcaacgcgaagaaccttacctactcttgacatccagagaacttagcagagatgctttggtgccttcgggaactctgagacaggtgctgcatggctgtcgtcagctcgtgttgtgaaatgttgggttaagtcccgcaacgagcgcaacccttatcctttgttgccagcggtccggccgggaactcaaaggagactgccagtgataaactggaggaaggtggggatgacgtcaagtcatcatggcccttacgagtagggctacacacgtgctacaatggcatatacaaagagaagcgacctcgcgagagcaagcggacctcataaagtatgtcgtagtccggattggagtctgcaactcgactccatgaagtcggaatcgctagtaatcgtagatcagaatgctacggtgaatacgttcccgggccttgtacacaccgcccgtcacaccatgggagtgggttgcaaaagaagtaggtagcttaaccttcgggagggcgcttaccactttgtgattcatgactggggtgaagtcgtaacaaggtaaccgtaggggaacctgcggttggatcacctcctta

SEQ ID NO: 1724 - DNA, 1462 bp, Klebsiella grimontii
attgaacgctggcggcaggcctaacacatgcaagtcgaacggtagcacagagagcttgctctcgggtgacgagtggcggacgggtgagtaatgtctgggaaactgcctgatggagggggataactactggaaacggtagctaataccgcataacgtcgcaagaccaaagagggggaccttcgggcctcttgccatcagatgtgcccagatgggattagctagtaggtggggtaacggctcacctaggcgacgatccctagctggtctgagaggatgaccagccacactggaactgagacacggtccagactcctacgggaggcagcagtggggaatattgcacaatgggcgcaagcctgatgcagccatgccgcgtgtatgaagaaggccttcgggttgtaaagtactttcagcggggaggaaggcgataaggttaataaccttgtcgattgacgttacccgcagaagaagcaccggctaactccgtgccagcagccgcggtaatacggagggtgcaagcgttaatcggaattactgggcgtaaagcgcacgcaggcggtctgtcaagtcggatgtgaaatccccgggctcaacctgggaactgcattcgaaactggcaggctggagtcttgtagaggggggtagaattccaggtgtagcggtgaaatgcgtagagatctggaggaataccggtggcgaaggcggccccctggacaaagactgacgctcaggtgcgaaagcgtggggagcaaacaggattagataccctggtagtccacgctgtaaacgatgtcgacttggaggttgttcccttgaggagtggcttccggagctaacgcgttaagtcgaccgcctggggagtacggccgcaaggttaaaactcaaatgaattgacgggggcccgcacaagcggtggagcatgtggtttaattcgatgcaacgcgaagaaccttacctactcttgacatccagagaacttagcagagatgctttggtgccttcgggaactctgagacaggtgctgcatggctgtcgtcagctcgtgttgtgaaatgttgggttaagtcccgcaacgagcgcaacccttatcctttgttgccagcggtccggccgggaactcaaaggagactgccagtgataaactggaggaaggtggggatgacgtcaagtcatcatggcccttacgagtagggctacacacgtgctacaatggcatatacaaagagaagcgacctcgcgagagcaagcggacctcataaagtatgtcgtagtccggattggagtctgcaactcgactccatgaagtcggaatcgctagtaatcgtggatcagaatgccacggtgaatacgttcccgggccttgtacacaccgcccgtcacaccatgggagtgggttgcaaaagaagtaggtagcttaaccttcgggagggcgcttaccactttgtgattcatgactggggtg

SEQ ID NO: 1725 - DNA, 1372 bp, Klebsiella michiganensis
  misc_feature (136)..(136): n is a, c, g, or t
  misc_feature (426)..(426): n is a, c, g, or t
  misc_feature (444)..(444): n is a, c, g, or t
  misc_feature (448)..(448): n is a, c, g, or t
  misc_feature (972)..(973): n is a, c, g, or t
  misc_feature (1105)..(1105): n is a, c, g, or t
  misc_feature (1107)..(1107): n is a, c, g, or t
  misc_feature (1111)..(1111): n is a, c, g, or t
attgaacgctggcggcaggcctaacacatgcaagtcgaacggtagcacagagagcttgctctcgggtgacgagtggcggacgggtgagtaatgtctgggaaactgcctgatggagggggataactactggaaacgntagctaataccgcataacgtcgcaagaccaaagagggggaccttcgggcctcttgccatcagatgtgcccagatgggattagctagtaggtggggtaacggctcacctaggcgacgatccctagctggtctgagaggatgaccagccacactggaactgagacacggtccagactcctacgggaggcagcagtggggaatattgcacaatgggcgcaagcctgatgcagccatgccgcgtgtatgaagaaggccttcgggttgtaaagtactttcagcggggaggaaggngataaggttaataacctngtcnattgacgttacccgcagaagaagcaccggctaactccgtgccagcagccgcggtaatacggagggtgcaagcgttaatcggaattactgggcgtaaagcgcacgcaggcggtctgtcaagtcggatgtgaaatccccgggctcaacctgggaactgcattcgaaactggcaggctggagtcttgtagaggggggtagaattccaggtgtagcggtgaaatgcgtagagatctggaggaataccggtggcgaaggcggccccctggacaaagactgacgctcaggtgcgaaagcgtggggagcaaacaggattagataccctggtagtccacgctgtaaacgatgtcgacttggaggttgttcccttgaggagtggcttccggagctaacgcgttaagtcgaccgcctggggagtacggccgcaaggttaaaactcaaatgaattgacgggggcccgcacaagcggtggagcatgtggtttaattcgatgcaacgcgaagaaccttacctactcttgacatccanngaacttagcagagatgctttggtgccttcgggaactctgagacaggtgctgcatggctgtcgtcagctcgtgttgtgaaatgttgggttaagtcccgcaacgagcgcaacccttatcctttgttgccagcgntncggncgggaactcaaaggagactgccagtgataaactggaggaaggtggggatgacgtcaagtcatcatggcccttacgagtagggctacacacgtgctacaatggcatatacaaagagaagcgacctcgcgagagcaagcggacctcataaagtatgtcgtagtccggattggagtctgcaactcgactccatgaagtcggaatcgctagtaatcgtggatcagaatgccacggtgaatacgttcccgggccttgtacacaccg

SEQ ID NO: 1726 - DNA, 1462 bp, Klebsiella quasipneumoniae
  misc_feature (73)..(73): n is a, c, g, or t
  misc_feature (113)..(113): n is a, c, g, or t
  misc_feature (980)..(980): n is a, c, g, or t
  misc_feature (990)..(990): n is a, c, g, or t
  misc_feature (1107)..(1107): n is a, c, g, or t
attgaacgctggcggcaggcctaacacatgcaagtcgagcggtagcacagagagcttgctctcgggtgacgancggcggacgggtgagtaatgtctgggaaactgcctgatgnagggggataactactggaaacggtagctaataccgcataacgtcgcaagaccaaagtgggggaccttcgggcctcatgccatcagatgtgcccagatgggattagctagtaggtggggtaacggctcacctaggcgacgatccctagctggtctgagaggatgaccagccacactggaactgagacacggtccagactcctacgggaggcagcagtggggaatattgcacaatgggcgcaagcctgatgcagccatgccgcgtgtgtgaagaaggccttcgggttgtaaagcactttcagcggggaggaaggcgataaggttaataaccttgtcgattgacgttacccgcagaagaagcaccggctaactccgtgccagcagccgcggtaatacggagggtgcaagcgttaatcggaattactgggcgtaaagcgcacgcaggcggtctgtcaagtcggatgtgaaatccccgggctcaacctgggaactgcattcgaaactggcaggctagagtcttgtagaggggggtagaattccaggtgtagcggtgaaatgcgtagagatctggaggaataccggtggcgaaggcggccccctggacaaagactgacgctcaggtgcgaaagcgtggggagcaaacaggattagataccctggtagtccacgccgtaaacgatgtcgatttggaggttgtgcccttgaggcgtggcttccggagctaacgcgttaaatcgaccgcctggggagtacggccgcaaggttaaaactcaaatgaattgacgggggcccgcacaagcggtggagcatgtggtttaattcgatgcaacgcgaagaaccttacctggtcttgacatccacagaacttnccagagatgntttggtgccttcgggaactgtgagacaggtgctgcatggctgtcgtcagctcgtgttgtgaaatgttgggttaagtcccgcaacgagcgcaacccttatcctttgttgccagcggtncggccgggaactcaaaggagactgccagtgataaactggaggaaggtggggatgacgtcaagtcatcatggcccttacgaccagggctacacacgtgctacaatggcatatacaaagagaagcgacctcgcgagagcaagcggacctcataaagtatgtcgtagtccggattggagtctgcaactcgactccatgaagtcggaatcgctagtaatcgtagatcagaatgctacggtgaatacgttcccgggccttgtacacaccgcccgtcacaccatgggagtgggttgcaaaagaagtaggtagcttaaccttcgggagggcgcttaccactttgtgattcatgactggggtg

SEQ ID NO: 1727 - DNA, 1462 bp, Kluyvera ascorbata
attgaacgctggcggcaggcctaacacatgcaagtcgaacggtagcacagagagcttgctcttgggtgacgagtggcggacgggtgagtaatgtctgggaaactgcccgatggagggggataactactggaaacggtagctaataccgcataacgtcgcaagaccaaagtgggggaccttcgggcctcacaccatcggatgtgcccagatgggattagctagttggtgaggtaatggctcaccaaggcgacgatccctagctggtctgagaggatgaccagccacactggaactgagacacggtccagactcctacgggaggcagcagtggggaatattgcacaatgggcgcaagcctgatgcagccatgccgcgtgtatgaagaaggccttcgggttgtaaagtactttcagcgaggaggaaggcgttgtggttaataaccgcagcgattgacgttactcgcagaagaagcaccggctaactccgtgccagcagccgcggtaatacggagggtgcaagcgttaatcggaattactgggcgtaaagcgcacgcaggcggtctgtcaagtcggatgtgaaatccccgggctcaacctgggaactgcattcgaaactggcaggctagagtcttgtagaggggggtagaattccaggtgtagcggtgaaatgcgtagagatctggaggaataccggtggcgaaggcggccccctggacaaagactgacgctcaggtgcgaaagcgtggggagcaaacaggattagataccctggtagtccacgccgtaaacgatgtctatttggaggttgttcccttgaggagtggcttccggagctaacgcgttaaatagaccgcctggggagtacggccgcaaggttaaaactcaaatgaattgacgggggcccgcacaagcggtggagcatgtggtttaattcgatgcaacgcgaagaaccttacctactcttgacatccagagaacttagcagagatgctttggtgccttcgggaactctgagacaggtgctgcatggctgtcgtcagctcgtgttgtgaaatgttgggttaagtcccgcaacgagcgcaacccttatcctttgttgccagcggttcggccgggaactcaaaggagactgccagtgataaactggaggaaggtggggatgacgtcaagtcatcatggcccttacgagtagggctacacacgtgctacaatggcatatacaaagagaagcgacctcgcgagagcaagcggacctcataaagtatgtcgtagtccggattggagtctgcaactcgactccatgaagtcggaatcgctagtaatcgtagatcagaatgctacggtgaatacgttcccgggccttgtacacaccgcccgtcacaccatgggagtgggttgcaaaagaagtaggtagcttaaccttcgggagggcgcttaccactttgtgattcatgactggggtg

SEQ ID NO: 1728 - DNA, 1462 bp, Kluyvera intermedia
attgaacgctggcggcaggcctaacacatgcaagtcgaacggtagcacagagagcttgctcttgggtgacgagtggcggacgggtgagtaatgtctgggaaactgcccgatggagggggataactactggaaacggtagctaataccgcataacgtcgcaagaccaaagtgggggaccttcgggcctcacaccatcggatgtgcccagatgggattagctagtaggtggggtaatggctcacctaggcgacgatccctagctggtctgagaggatgaccagccacactggaactgagacacggtccagactcctacgggaggcagcagtggggaatattgcacaatgggcgcaagcctgatgcagccatgccgcgtgtatgaagaaggccttcgggttgtaaagtactttcagcgaggaggaaggcattgtggttaataaccgcagtgattgacgttactcgcagaagaagcaccggctaactccgtgccagcagccgcggtaatacggagggtgcaagcgttaatcggaattactgggcgtaaagcgcacgcaggcggtctgtcaagtcggatgtgaaatccccgggctcaacctgggaactgcattcgaaactggcaggctagagtcttgtagaggggggtagaattccaggtgtagcggtgaaatgcgtagagatctggaggaataccggtggcgaaggcggccccctggacaaagactgacgctcaggtgcgaaagcgtggggagcaaacaggattagataccctggtagtccacgccgtaaacgatgtcgacttggaggttgtgcccttgaggcgtggcttccggagctaacgcgttaagtcgaccgcctggggagtacggccgcaaggttaaaactcaaatgaattgacgggggcccgcacaagcggtggagcatgtggtttaattcgatgcaacgcgaagaaccttacctactcttgacatccagagaatttagcagagatgctttagtgccttcgggaactctgagacaggtgctgcatggctgtcgtcagctcgtgttgtgaaatgttgggttaagtcccgcaacgagcgcaacccttatcctttgttgccagcggttcggccgggaactcaaaggagactgccagtgataaactggaggaaggtggggatgacgtcaagtcatcatggcccttacgagtagggctacacacgtgctacaatggcatatacaaagagaagcgacctcgcgagagcaagcggacctcataaagtatgtcgtagtccggatcggagtctgcaactcgactccgtgaagtcggaatcgctagtaatcgtagatcagaatgctacggtgaatacgttcccgggccttgtacacaccgcccgtcacaccatgggagtgggttgcaaaagaagtaggtagcttaaccttcgggagggcgcttaccactttgtgattcatgactggggtg

SEQ ID NO: 1729 - DNA, 1411 bp, Komagataeibacter europaeus
agcgaacgctggcggcatgcttaacacatgcaagtcgcacgaacctttcggggttagtggcggacgggtgagtaacgcgtagggatctgtccatgggtgggggataactttgggaaactgaagctaataccgcatgacacctgagggtcaaaggcgcaagtcgcctgtggaggaacctgcgttcgattagctagttggtggggtaaaggcctaccaaggcgatgatcgatagctggtctgagaggatgatcagccacactgggactgagacacggcccagactcctacgggaggcagcagtggggaatattggacaatgggcgcaagcctgatccagcaatgccgcgtgtgtgaagaaggttttcggattgtaaagcactttcagcggggacgatgatgacggtacccgcagaagaagccccggctaacttcgtgccagcagccgcggtaatacgaagggggcaagcgttgctcggaatgactgggcgtaaagggcgcgtaggcggttgacacagtcagatgtgaaattcctgggcttaacctgggggctgcatttgatacgtggcgactagagtgtgagagagggttgtggaattcccagtgtagaggtgaaattcgtagatattgggaagaacaccggtggcgaaggcggcaacctggctcatgactgacgctgaggcgcgaaagcgtggggagcaaacaggattagataccctggtagtccacgctgtaaacgatgtgtgctggatgttgggtgactttgtcattcagtgtcgtagttaacgcgataagcacaccgcctggggagtacggccgcaaggttgaaactcaaaggaattgacgggggcccgcacaagcggtggagcatgtggtttaattcgaagcaacgcgcagaaccttaccagggcttgacatgcggaggccgtgtccagagatgggcatttctcgcaagagacctccagcacaggtgctgcatggctgtcgtcagctcgtgtcgtgagatgttgggttaagtcccgcaacgagcgcaaccctcgcctttagttgccatcacgtctgggtgggcactctaaaggaactgccggtgacaagccggaggaaggtggggatgacgtcaagtcctcatggcccttatgtcctgggctacacacgtgctacaatggcggtgacagtgggaagccaggtagcgataccgagccgatctcaaaaagccgtctcagttcggattgcactctgcaactcgagtgcatgaaggtggaatcgctagtaatcgcggatcagcatgccgcggtgaatacgttcccgggccttgtacacaccgcccgtcacaccatgggagttggtttgaccttaagccggtgagcgaaccgcaaggacgcagccgaccacggtcgggtcagcgactggggtg

SEQ ID NO: 1730 - DNA, 1411 bp, Komagataeibacter hansenii
agcgaacgctggcggcatgcttaacacatgcaagtcgcacgaacctttcggggttagtggcggacgggtgagtaacgcgtagggatctgtccatgggtgggggataactttgggaaactgaagctaataccgcatgacacctgagggtcaaaggcgcgagtcgcctgtggaggaacctgcgttcgattagctagttggtggggtaaaggcctaccaaggcgatgatcgatagctggtctgagaggatgatcagccacactgggactgagacacggcccagactcctacgggaggcagcagtggggaatattggacaatgggcgcaagcctgatccagcaatgccgcgtgtgtgaagaaggttttcggattgtaaagcactttcagcggggacgatgatgacggtacccgcagaagaagccccggctaacttcgtgccagcagccgcggtaatacgaagggggcaagcgttgctcggaatgactgggcgtaaagggcgcgtaggcggttgttacagtcagatgtgaaattcccgggcttaacctgggggctgcatttgatacgtgacgactagagtgtgagagagggttgtggaattcccagtgtagaggtgaaattcgtagatattgggaagaacaccggtggcgaaggcggcaacctggctcatgactgacgctgaggcgcgaaagcgtggggtgcaaacaggattagataccctggtagtccacgctgtaaacgatgtgtgctggatgttggatggcttggccattcggtgtcgtagttaacgcgataagcacaccgcctggggagtacggccgcaaggttgaaactcaaaggaattgacgggggcccgcacaagcggtggagcatgtggtttaattcgaagcaacgcgcagaaccttaccaggacttgacatgcggaggctgtgtccagagatgggcatttctcgcaagagacctccagcacaggtgctgcatggctgtcgtcagctcgtgtcgtgagatgttgggttaagtcccgcaacgagcgcaaccctcgcctttagttgccagcacgtctgggtgggcactctaaaggaactgccggtgacaagccggaggaaggtggggatgacgtcaagtcctcatggcccttatgtcctgggctacacacgtgctacaatggcggtgacagtgggaagccaggcagcgatgccgagcggatctccaaaagccgtctcagttcggattgcactctgcaactcgagtgcatgaaggtggaatcgctagtaatcgcggatcagcatgccgcggtgaatacgttcccgggccttgtacacaccgcccgtcacaccatgggagttggtttgaccttaagccggtgagcgaaccgcaaggacgcagccgaccacggtcgggtcagcgactggggtg

SEQ ID NO: 1731 - DNA, 1411 bp, Komagataeibacter intermedius
agcgaacgctggcggcatgcttaacacatgcaagtcgcacgaacctttcggggttagtggcggacgggtgagtaacgcgtagggatctatccacgggtgggggataactttgggaaactgaagctaataccgcatgacacctgagggtcaaaggcgcaagtcgcctgtggaggaacctgcgttcgattagctagttggtggggtaaaggcctaccaaggcgatgatcgatagctggtctgagaggatgatcagccacactgggactgagacacggcccagactcctacgggaggcagcagtggggaatattggacaatgggcgcaagcctgatccagcaatgccgcgtgtgtgaagaaggttttcggattgtaaagcactttcagcggggacgatgatgacggtacccgcagaagaagccccggctaacttcgtgccagcagccgcggtaatacgaagggggcaagcgttgctcggaatgactgggcgtaaagggcgcgtaggcggttgacacagtcagatgtgaaattcccgggcttaacctgggggctgcatttgatacgtggcgactagagtgtgagagagggttgtggaattcccagtgtagaggtgaaattcgtagatattgggaagaacaccggtggcgaaggcggcaacctggctcatgactgacgctgaggcgcgaaagcgtggggagcaaacaggattagataccctggtagtccacgctgtaaacgatgtgtgctggatgttgggtgactttgtcattcagtgtcgtagttaacgcgataagcacaccgcctggggagtacggccgcaaggttgaaactcaaaggaattgacgggggcccgcacaagcggtggagcatgtggtttaattcgaagcaacgcgcagaaccttaccagggcttgacatgcggaggccgtgtccagagatgggcatttctcgcaagagacctccagcacaggtgctgcatggctgtcgtcagctcgtgtcgtgagatgttgggttaagtcccgcaacgagcgcaaccctcgcctttagttgccatcacgtttgggtgggcactctaaaggaactgccggtgacaagccggaggaaggtggggatgacgtcaagtcctcatggcccttatgtcctgggctacacacgtgctacaatggcggtgacagtgggaagccaggtggtgacaccgagccgatctcaaaaagccgtctcagttcggattgcactctgcaactcgagtgcatgaaggtggaatcgctagtaatcgcggatcagcatgccgcggtgaatacgttcccgggccttgtacacaccgcccgtcacaccatgggagttggtttgaccttaagccggtgagcgaaccgcaaggacgcagccgaccacggtcgggtcagcgactggggtg

SEQ ID NO: 1732 - DNA, 1411 bp, Komagataeibacter maltaceti
agcgaacgctggcggcatgcttaacacatgcaagtcgcacgaacctttcggggttagtggcggacgggtgagtaacgcgtagggatctgtccatgggtgggggataaccttgggaaaccgaggctaataccgcatgacacctgagggtcaaaggcgcaagtcgcctgtggaggaacctgcgttcgattagctagttggtggggtaaaggcctaccaaggcgatgatcgatagctggtctgagaggatgatcagccacactgggactgagacacggcccagactcctacgggaggcagcagtggggaatattggacaatgggcgcaagcctgatccagcaatgccgcgtgtgtgaagaaggttttcggattgtaaagcactttcagcggggacgatgatgacggtacccgcagaagaagccccggctaacttcgtgccagcagccgcggtaatacgaagggggcaagcgttgctcggaatgactgggcgtaaagggcgcgtaggcggttgttacagtcagatgtgaaattcccgggcttaacctgggggctgcatttgatacgtgacgactagagtgtgagagagggttgtggaattcccagtgtagaggtgaaattcgtagatattgggaagaacaccggtggcgaaggcggcaacctggctcatgactgacgctgaggcgcgaaagcgtggggagcaaacaggattagataccctggtagtccacgctgtaaacgatgtgtgctggatgttgggtggcttggccattcagtgtcgtagttaacgcgataagcacaccgcctggggagtacggccgcaaggttgaaactcaaaggaattgacgggggcccgcacaagcggtggagcatgtggtttaattcgaagcaacgcgcagaaccttaccagggcttgacatgcggaggccgtgtccagagatgggcatttctcgcaagagacctccagcacaggtgctgcatggctgtcgtcagctcgtgtcgtgagatgttgggttaagtcccgcaacgagcgcaaccctcgcctttagttgccagcacgtctgggtgggcactctaaaggaactgccggtgacaagccggaggaaggtggggatgacgtcaagtcctcatggcccttatgtcctgggctacacacgtgctacaatggcggtgacagtgggaagccaggcagcgatgccgagcggatctccaaaagccgtctcagttcggattgcactctgcaactcgagtgcatgaaggtggaatcgctagtaatcgcggatcagcatgccgcggtgaatacgttcccgggccttgtacacaccgcccgtcacaccatgggagttggtttgaccttaagccggtgagcgaaccgcaaggacgcagccgaccacggtcgggtcagcgactggggtg

SEQ ID NO: 1733 - DNA, 1413 bp, Komagataeibacter medellinensis
agcgaacgctggcggcatgcttaacacatgcaagtcgcacgaacctttcggggttagtggcggacgggtgagtaacgcgtagggatctgtccatgggtgggggataactttgggaaactgaagctaataccgcatgacacctgagggtcaaaggcgcaagtcgcctgtggaggaacctgcgttcgattagctagttggtggggtaaaggcctaccaaggcgatgatcgatagctggtctgagaggatgatcagccacactgggactgagacacggcccagactcctacgggaggcagcagtggggaatattggacaatgggcgcaagcctgatccagcaatgccgcgtgtgtgaagaaggttttcggattgtaaagcactttcagcggggacgatgatgacggtacccgcagaagaagccccggctaacttcgtgccagcagccgcggtaatacgaagggggcaagcgttgctcggaatgactgggcgtaaagggcgcgtaggcggttgacacagtcaggtgtgaaattcccgggcttaacctggggtctgcatttgatacgtggcgactagagtgtgagagagggttgtggaattcccagtgtagaggtgaaattcgtagatattgggaagaacaccggtggcgaaggcggcaacctggctcatgactgacgctgaggcgcgaaagcgtggggagcaaacaggattagataccctggtagtccacgctgtaaacgatgtgtgctggatgttgggtgactttgtcattcagtgtcgtagttaacgcgataagcacaccgcctggggagtacggccgcaaggttgaaactcaaaggaattgacgggggcccgcacaagcggtggagcatgtggtttaattcgaagcaacgcgcagaaccttaccagggcttgacatgcggaggctgtgtccagagatgggcatttctcgcaagagacctccagcacaggtgctgcatggctgtcgtcagctcgtgtcgtgagatgttgggttaagtcccgcaacgagcgcaaccctcgcctttagttgccatcacgtttgggtgggcactctaaaggaactgccggtgacaagccggaggaaggtggggatgacgtcaagtcctcatggcccttatgtcctgggctacacacgtgctacaatggcggtgacagtgggaagccaggtggtgacaccgagccgatctcaaaaagccgtctcagttcggattgcactctgcaactcgagtgcatgaaggtggaatcgctagtaatcgcggatcagcatgccgcggtgaatacgttcccgggccttgtacacaccgcccgtcacaccatgggagttggtttgaccttaagccggtgagcgaacccgcaaggggcgcagccgaccacggtcgggtcagcgactggggtg

SEQ ID NO: 1734 - DNA, 1413 bp, Komagataeibacter nataicola
agcgaacgctggcggcatgcttaacacatgcaagtcgcacgaacctttcggggttagtggcggacgggtgagtaacgcgtagggatctgtccacgggtgggggataactttgggaaactgaagctaataccgcatgacacctgagggtcaaaggcgcaagtcgcctgtggaggaacctgcgttcgattagctagttggtggggtaaaggcctaccaaggcgatgatcgatagctggtctgagaggatgatcagccacactgggactgagacacggcccagactcctacgggaggcagcagtggggaatattggacaatgggcgcaagcctgatccagcaatgccgcgtgtgtgaagaaggttttcggattgtaaagcactttcagcggggacgatgatgacggtacccgcagaagaagccccggctaacttcgtgccagcagccgcggtaatacgaagggggcaagcgttgctcggaatgactgggcgtaaagggcgcgtaggcggttgacacagtcagatgtgaaattcctgggcttaacctgggggctgcatttgatacgtggcgactagagtgtgagagagggttgtggaattcccagtgtagaggtgaaattcgtagatattgggaagaacaccggtggcgaaggcggcaacctggctcatgactgacgctgaggcgcgaaagcgtggggagcaaacaggattagataccctggtagtccacgctgtaaacgatgtgtgctggatgttgggtgactttgtcattcagtgtcgtagttaacgcgataagcacaccgcctggggagtacggccgcaaggttgaaactcaaaggaattgacgggggcccgcacaagcggtggagcatgtggtttaattcgaagcaacgcgcagaaccttaccagggcttgacatgcggaggccgtgtccagagatgggcatttctcgcaagagacctccagcacaggtgctgcatggctgtcgtcagctcgtgtcgtgagatgttgggttaagtcccgcaacgagcgcaaccctcgcctttagttgccatcacgtctgggtgggcactctaaaggaactgccggtgacaagccggaggaaggtggggatgacgtcaagtcctcatggcccttatgtcctgggctacacacgtgctacaatggcggtgacagtgggaagccaggtagcgataccgagccgatctcaaaaagccgtctcagttcggattgcactctgcaactcgagtgcatgaaggtggaatcgctagtaatcgcggatcagcatgccgcggtgaatacgttcccgggccttgtacacaccgcccgtcacaccatgggagttggtttgaccttaagccggtgagcgaacccgcaaggggcgcagccgaccacggtcgggtcagcgactggggtg

SEQ ID NO: 1735 - DNA, 1411 bp, Komagataeibacter oboediens
agcgaatgctggcggcatgcttaacacatgcaagtcgcacgaacctttcggggttagtggcggacgggtgagtaacgcgtagggatctatccacgggtgggggataactttgggaaactgaagctaataccgcatgacacctgagggtcaaaggcgcaagtcgcctgtggaggaacctgcgttcgattagctagttggtggggtaaaggcctaccaaggcgatgatcgatagctggtctgagaggatgatcagccacactgggactgagacacggcccagactcctacgggaggcagcagtggggaatattggacaatgggcgcaagcctgatccagcaatgccgcgtgtgtgaagaaggttttcggattgtaaagcactttcagcggggatgatgatgacggtacccgcagaagaagccccggctaacttcgtgccagcagccgcggtaatacgaagggggcaagcgttgctcggaatgactgggcgtaaagggcgcgtaggcggttgacacagtcagatgtgaaattcccgggcttaacctgggggctgcatttgatacgtggcgactagagtgtgagagagggttgtggaattcccagtgtagaggtgaaattcgtagatattgggaagaacaccggtggcgaaggcggcaacctggctcatgactgacgctgaggcgcgaaagcgtggggagcaaacaggattagataccctggtagtccacgctgtaaacgatgtgtgctggatgttgggtgactttgtcattcagtgtcgtagttaacgcgataagcacaccgcctggggagtacggccgcaaggttgaaactcaaaggaattgacgggggcccgcacaagcggtggagcatgtggtttaattcgaagcaacgcgcagaaccttaccagggcttgacatgcggaggccgtgtccagagatgggcatttctcgcaagagacctccagcacaggtgctgcatggctgtcgtcagctcgtgtcgtgagatgttgggttaagtcccgcaacgagcgcaaccctcgcctttagttgccatcacgtctgggtgggcactctaaaggaactgccggtgacaagccggaggaaggtggggatgacgtcaagtcctcatggcccttatgtcctgggctacacacgtgctacaatggcggtgacagtgggaagccaggtggtgacaccgagccgatctcaaaaagccgtctcagttcggattgcactctgcaactcgagtgcatgaaggtggaatcgctagtaatcgcggatcagcatgccgcggtgaatacgttcccgggccttgtacacaccgcccgtcacaccatgggagttggtttgaccttaagccggtgagcgaaccgcaaggacgcagccgaccacggtcgggtcagcgactggggtg

SEQ ID NO: 1736 - DNA, 1318 bp, Komagataeibacter rhaeticus
tgggtgggggataactttgggaaactgaagctaataccgcatgacacctgagggtcaaaggcgcaagtcgcctgtggaggaacctgcgttcgattagctagttggtggggtaaaggcctaccaaggcgatgatcgatagctggtctgagaggatgatcagccacactgggactgagacacggcccagactcctacgggaggcagcagtggggaatattggacaatgggcgcaagcctgatccagcaatgccgcgtgtgtgaagaaggttttcggattgtaaagcactttcagcggggacgatgatgacggtacccgcagaagaagccccggctaacttcgtgccagcagccgcggtaatacgaagggggcaagcgttgctcggaatgactgggcgtaaagggcgcgtaggcggttgttacagtcagatgtgaaattcccgggcttaacctgggggctgcatttgatacgtgatgactagagtgtgagagagggttgtggaattcccagtgtagaggtgaaattcgtagatattgggaagaacaccggtggcgaaggcggcaacctggctcatgactgacgctgaggcgcgaaagcgtggggagcaaacaggattagataccctggtagtccacgctgtaaacgatgtgtgctggatgttgggtgactttgtcattcagtgtcgtagttaacgcgataagcacaccgcctggggagtacggccgcaaggttgaaactcaaaggaattgacgggggcccgcacaagcggtggagcatgtggtttaattcgaagcaacgcgcagaaccttaccagggcttgacatgcggaggctgtgtccagagatgggcatttctcgcaagagacctccagcacaggtgctgcatggctgtcgtcagctcgtgtcgtgagatgttgggttaagtcccgcaacgagcgcaaccctcgcctttagttgccatcacgtctgggtgggcactctaaaggaactgccggtgacaagccggaggaaggtggggatgacgtcaagtcctcatggcccttatgtcctgggctacacacgtgctacaatgacggtgacagtgggaagccaggtggtgacaccgagccgatctcaaaaagccgtctcagttcggattgcactctgcaactcgagtgcatgaaggtggaatcgctagtaatcgcggatcagcatgccgcggtgaatacgttcccgggccttgtacacaccgcccgtcacaccatgggagttggtttgaccttaagccggtgagcgaaccgcaaggacgcagccgaccacggtcgggtcagcgactggggtg

SEQ ID NO: 1737 - DNA, 1377 bp, Komagataeibacter saccharivorans
agcgaacgctggcggcatgcttaacacatgcaagtcgcacgaacctttcggggttagtggcggacgggtgagtaacgcgtagggatctgtccatgggtgggggataactttgggaaactgaagctaataccgcatgacacctgagggtcaaaggcgcaagtcgcctgtggaggaacctgcgttcgattagctagttggtggggtaaaggcctaccaaggcgatgatcgatagctggtctgagaggatgatcagccacactgggactgagacacggcccagactcctacgggaggcagcagtggggaatattggacaatgggcgcaagcctgatccagcaatgccgcgtgtgtgaagaaggttttcggattgtaaagcactttcagcggggacgatgatgacggtacccgcagaagaagccccggctaacttcgtgccagcagccgcggtaatacgaagggggcaagcgttgctcggaatgactgggcgtaaagggcgcgtaggcggttttaacagtcagatgtgaaattcctgggcttaacctgggggctgcatttgatacgttgagactagagtgtgagagagggttgtggaattcccagtgtagaggtgaaattcgtagatattgggaagaacaccggtggcgaaggcggcaacctggctcattactgacgctgaggcgcgaaagcgtggggagcaaacaggattagataccctggtagtccacgctgtaaacgatgtgtgctggatgttgggtgactttgtcattcagtgtcgtagttaacgcgataagcacaccgcctggggagtacggccgcaaggttgaaactcaaaggaattgacgggggcccgcacaagcggtggagcatgtggtttaattcgaagcaacgcgcagaaccttaccagggcttgacatgcggaggccgtgtccagagatgggcatttctcgcaagagacctccagcacaggtgctgcatggctgtcgtcagctcgtgtcgtgagatgttgggttaagtcccgcaacgagcgcaaccctcgcctttagttgccatcacgtttgggtgggcactctagaggaactgccggtgacaagccggaggaaggtggggatgacgtcaagtcctcatggcccttatgtcctgggctacacacgtgctacaatggcggtgacagtgggaagccaggtagcgataccgagccgatctctaaaagccgtctcagttcggattgcactctgcaactcgagtgcatgaaggtggaatcgctagtaatcgcggatcagcatgccgcggtgaatacgttcccgggccttgtacacaccgcccgtcacaccatgggagttggtttgaccttaagccggtgagcgaaccgcaaggac

SEQ ID NO: 1738 - DNA, 1411 bp, Komagataeibacter sucrofermentans
agcgaacgctggcggcatgcttaacacatgcaagtcgcacgaacctttcgaggttagtggcggacgggtgagtaacgcgtagggatctgtccacgggtgggggataactttgggaaactgaagctaataccgcatgacacctgagggtcaaaggcgcaagtcgcctgtggaggaacctgcgttcgattagctagttggtggggtaaaggcctaccaaggcgatgatcgatagctggtctgagaggatgatcagccacactgggactgagacacggcccagactcctacgggaggcagcagtggggaatattggacaatgggcgcaagcctgatccagcaatgccgcgtgtgtgaagaaggttttcggattgtaaagcactttcagcggggacgatgatgacggtacccgcagaagaagccccggctaacttcgtgccagcagccgcggtaatacgaagggggcaagcgttgctcggaatgactgggcgtaaagggcgcgtaggcggttgacacagtcagatgtgaaattcctgggcttaacctgggggctgcatttgatacgtggcgactagagtgtgagagagggttgtggaattcccagtgtagaggtgaaattcgtagatattgggaagaacaccggtggcgaaggcggcaacctggctcatgactgacgctgaggcgcgaaagcgtggggagcaaacaggattagataccctggtagtccacgctgtaaacgatgtgtgctggatgttgggtgactttgtcattcagtgtcgtagttaacgcgataagcacaccgcctggggagtacggccgcaaggttgaaactcaaaggaattgacgggggcccgcacaagcggtggagcatgtggtttaattcgaagcaacgcgcagaaccttaccagggcttgacatgcggaggccgtgtccagagatgggcatttctcgcaagagacctccagcacaggtgctgcatggctgtcgtcagctcgtgtcgtgagatgttgggttaagtcccgcaacgagcgcaaccctcgcctttagttgccagcacgtctgggtgggcactctaaaggaactgccggtgacaagccggaggaaggtggggatgacgtcaagtcctcatggcccttatgtcctgggctacacacgtgctacaatggcggtgacagtgggaagccaggtagcgataccgagccgatctcaaaaagccgtctcagttcggattgcactctgcaactcgagtgcatgaaggtggaatcgctagtaatcgcggatcagcatgccgcggtgaatacgttcccgggccttgtacacaccgcccgtcacaccatgggagttggtttgaccttaagccggtgagcgaaccgcaaggacgcagccgaccacggtcgggtcagcgactggggtg

SEQ ID NO: 1739 - DNA, 1410 bp, Komagataeibacter swingsii
gcgaacgctggcggcatgcttaacacatgcaagtcgcacgaacctttcggggttagtggcggacgggtgagtaacgcgtagggatctgtccatgggtgggggataactttgggaaactgaagctaataccgcatgacacctgagggtcaaaggcgcaagtcgcctgtggaggaacctgcgttcgattagctagttggtggggtaaaggcctaccaaggcgatgatcgatagctggtctgagaggatgatcagccacactgggactgagacacggcccagactcctacgggaggcagcagtggggaatattggacaatgggcgcaagcctgatccagcaatgccgcgtgtgtgaagaaggttttcggattgtaaagcactttcagcggggacgatgatgacggtacccgcagaagaagccccggctaacttcgtgccagcagccgcggtaatacgaagggggcaagcgttgctcggaatgactgggcgtaaagggcgcgtaggcggttgacacagtcagatgtgaaattcctgggcttaacctgggggctgcatttgatacgtggcgactagagtgtgagagagggttgtggaattcccagtgtagaggtgaaattcgtagatattgggaagaacaccggtggcgaaggcggcaacctggctcatgactgacgctgaggcgcgaaagcgtggggagcaaacaggattagataccctggtagtccacgctgtaaacgatgtgtgctggatgttgggtgactttgtcattcagtgtcgtagttaacgcgataagcacaccgcctggggagtacggccgcaaggttgaaactcaaaggaattgacgggggcccgcacaagcggtggagcatgtggtttaattcgaagcaacgcgcagaaccttaccagggcttgacatgcggaggccgtgtccagagatgggcatttctcgcaagagacctccagcacaggtgctgcatggctgtcgtcagctcgtgtcgtgagatgttgggttaagtcccgcaacgagcgcaaccctcgcctttagttgccatcacgtctgggtgggcactctaaaggaactgccggtgacaagccggaggaaggtggggatgacgtcaagtcctcatggcccttatgtcctgggctacacacgtgctacaatggcggtgacagtgggaagccaggtagcgataccgagccgatctcaaaaagccgtctcagttcggattgcactctgcaactcgagtgcatgaaggtggaatcgctagtaatcgcggatcagcatgccgcggtgaatacgttcccgggccttgtacacaccgcccgtcacaccatgggagttggtttgaccttaagccggtgagcgaaccgcaaggacgcagccgaccacggtcgggtcagcgactggggtg

SEQ ID NO: 1740 - DNA, 1411 bp, Komagataeibacter xylinus
agcgaacgctggcggcatgcttaacacatgcaagtcgcacgaacctttcggggttagtggcggacgggtgagtaacgcgtagggatctgtccatgggtgggggataactttgggaaactgaagctaataccgcatgacacctgagggtcaaaggcgcaagtcgcctgtggaggaacctgcgttcgattagctagttggtggggtaaaggcctaccaaggcgatgatcgatagctggtctgagaggatgatcagccacactgggactgagacacggcccagactcctacgggaggcagcagtggggaatattggacaatgggcgcaagcctgatccagcaatgccgcgtgtgtgaagaaggttttcggattgtaaagcactttcagcggggacgatgatgacggtacccgcagaagaagccccggctaacttcgtgccagcagccgcggtaatacgaagggggcaagcgttgctcggaatgactgggcgtaaagggcgcgtaggcggttgacacagtcagatgtgaaattcctgggcttaacctgggggctgcatttgatacgtggcgactagagtgtgagagagggttgtggaattcccagtgtagaggtgaaattcgtagatattgggaagaacaccggtggcgaaggcggcaacctggctcatgactgacgctgaggcgcgaaagcgtggggagcaaacaggattagataccctggtagtccacgctgtaaacgatgtgtgctggatgttgggtgactttgtcattcagtgtcgtagttaacgcgataagcacaccgcctggggagtacggccgcaaggttgaaactcaaaggaattgacgggggcccgcacaagcggtggagcatgtggtttaattcgaagcaacgcgcagaaccttaccagggcttgacatgcggaggccgtgtccagagatgggcatttctcgcaagagacctccagcacaggtgctgcatggctgtcgtcagctcgtgtcgtgagatgttgggttaagtcccgcaacgagcgcaaccctcgcctttagttgccagcacgtctgggtgggcactctaaaggaactgccggtgacaagccggaggaaggtggggatgacgtcaagtcctcatggcccttatgtcctgggctacacacgtgctacaatggcggtgacagtgggaagccaggtagcgataccgagccgatctcaaaaagccgtctcagttcggattgcactctgcaactcgagtgcatgaaggtggaatcgctagtaatcgcggatcagcatgccgcggtgaatacgttcccgggccttgtacacaccgcccgtcacaccatgggagttggtttgaccttaagccggtgagcgaaccgcaaggacgcagccgaccacggtcgggtcagcgactggggtg

SEQ ID NO: 1741 - DNA, 1419 bp, Kordiimonas lacus
aacgaacgctggcggcacgcctaacacatgcaagtcgaacgcgaacgcaccttcgggtgttattagagtggcggacgggtgagtaacacgtgggaatatgcctttcggtagagaacaacgcttggaaacgagtgctaatactctatacgccctatgggggaaagatttatcgccgaaagattggcccgcgctagattagctagttggtaaggtaatggcttaccaaggcgacgatctatagctggtttgagaggatgatcagccacactgggactgagacacggcccagactcctacgggaggcagcagtggggaatattggacaatgggggcaaccctgatccagcgatgccgcgtgagtgatgaaggccttagggttgtaaaactctttcagtagggaagataatgacggtacctacagaagaagctccggctaactccgtgccagcagccgcggtaatacggagggagctagcgttgttcggaattactgggcgtaaagcgcgcgtaggcggcttagcaagttgggggtgaaatcccggggctcaacctcggaactgcctccaaaactgctaagctagaatcctggagaggtgagtggaattcctagtgtagaggtgaaattcgtagatattaggaagaacaccagtggcgaaggcgactcactggacaggtattgacgctgaggtgcgaaagcgtggggagcgaacaggattagataccctggtagtccacgccgtaaacgatggatgctaggtgttgggtagcttgctattcagtgccgaagctaacgcgttaagcatcccgcctggggagtacggtcgcaagattaaaactcaaaggaattgacgggggcccgcacaagcggtggagcatgtggtttaattcgaagcaacgcgcagaaccttaccagcccttgacataccaatcgcgatttccggagacggatttcttcagttcggctggattggatacaggtgctgcatggctgtcgtcagctcgtgtcgtgagatgttgggttaagtcccgcaacgagcgcaaccctcgcctttagttgccatcatttagttgggcactctagaggaactgccggtgataagccggaggaaggtggggatgacgtcaagtcctcatggcccttatgggctgggctacacacgtgctacaatggcggtgacagagagctgctacctagcgatagggtgctaatctctaaaagccgtctcagttcggattgttctctgcaactcgagagcatgaagttggaatcgctagtaatcgcagatcagcatgctgcggtgaatacgttcccgggccttgtacacaccgcccgtcacaccatgggagttggttttacctgacgccggtgggctaaccttttggaggcagccgaccacggtagagtcagcgactggggtg

SEQ ID NO: 1742 - DNA, 1424 bp, Koribacter versatilis
aatcaacgctggcggcgtgcctaacacatgcaagtcgcacgagaaagtgggggcaactccatgagtaaagtggcgtacgggtgagtaacacgtgactaacctacctccgagtggggaataactccgggaaaccggggctaataccgcataacatctacggatcaaagcagtaatgcgcttggagagggggtcgcggctgattagctagttggtaaggtaatggcttaccaaggcgacgatcagtatccggcctgagagggcgcacggacacactggaactgaaacacggtccagactcctacgggaggcagcagtggggaattttgcgcaatgggggaaaccctgacgcagcaacgccgcgtggaggatgaaggtctttggattgtaaactcctttcgatcgggacgattatgacggtaccggaagaagaagcaccggctaactctgtgccagcagccgcggtaatacagagggtgcaagcgttgttcggaattattgggcgtaaagggcgcgtaggcggtgcggtaagtctctagtgaaatctccgggctcaactcggagcctgctagggaaactgccgtgcttgagtgtgggagaggtgagtggaattcccggtgtagcggtgaaatgcgtagatatcgggaggaacacctgtggcgaaagcggctcactggaccacaactgacgctgaggcgcgaaagctaggggagcaaacaggattagataccctggtagtcctagccctaaacgatgattgcttggtgtaacaggtacccaatcctgttgtgccgaagctaacgcgataagcaatccgcctggggagtacggtcgcaaggctgaaactcaaaggaattgacgggggcccgcacaagcggtggagcatgtggttcaattcgacgcaacgcgaagaaccttacctgggctcgaagcgcagtggactgcggtagaaatatcgctttcccgcaagggactgctgcgtaggtgctgcatggctgtcgtcagctcgtgtcgtgagatgttgggttaagtcccgcaacgagcgcaacccttattgccagttgccatcattaagttgggcactctggcgaaactgccccggataacggggaggaaggtggggatgacgtcaagtcctcatggcctttatgtccagggctacacacgtgctacaatgggtgatacaaaccgtcgcaaacccgcgagggggagctaatcggaaaaagtcatcctcagttcggattggagtctgcaactcgactccatgaagctggaatcgctagtaatcgcagatcagcacgctgcggtgaatacgttcccgggccttgtacacaccgcccgtcacatcacgaaagtgggctgtactagaagccggtgcgctgaccgcaaggaagcagccgtccaaggtataactcatgattggggtg

SEQ ID NO: 1743 - DNA, 1464 bp, Kosakonia arachidis
attgaacgctggcggcaggcctaacacatgcaagtcgaacggtagcacagaggagcttgctcttcgggtgacgagtggcggacgggtgagtaatgtctgggaaactgcctgatggagggggataactactggaaacggtagctaataccgcataacgtcgcaagaccaaagagggggaccttcgggcctcttgccatcagatgtgcccagatgggattagctagtaggcggggtaacggcccacctaggcgacgatccctagctggtctgagaggatgaccagccacactggaactgagacacggtccagactcctacgggaggcagcagtggggaatattgcacaatgggcgcaagcctgatgcagccatgccgcgtgtgtgaagaaggccttcgggttgtaaagcactttcagcggggaggaaggcggtacggttaataaccgtgctgattgacgttacccgcagaagaagcaccggctaactccgtgccagcagccgcggtaatacggagggtgcaagcgttaatcggaattactgggcgtaaagcgcacgcaggcggtctgtcaagtcggatgtgaaatccccgggctcaacctgggaactgcattcgaaactggcaggctggagtctcgtagagggaggtagaattccaggtgtagcggtgaaatgcgtagagatctggaggaataccggtggcgaaggcggcctcctggacgaagactgacgctcaggtgcgaaagcgtggggagcaaacaggattagataccctggtagtccacgctgtaaacgatgtcgatttggaggttgtgcccttgaggcgtggcttccggagctaacgcgttaaatcgaccgcctggggagtacggccgcaaggttaaaactcaaatgaattgacgggggcccgcacaagcggtggagcatgtggtttaattcgatgcaacgcgaagaaccttacctggtcttgacatccacagaacttgccagagatggcttggtgccttcgggaactgtgagacaggtgctgcatggctgtcgtcagctcgtgttgtgaaatgttgggttaagtcccgcaacgagcgcaacccttatcctttgttgccagcggtccggccgggaactcaaaggagactgccagtgataaactggaggaaggtggggatgacgtcaagtcatcatggcccttacgaccagggctacacacgtgctacaatggcgcatacaaagagaagcgacctcgcgagagcaagcggacctcataaagtgcgtcgtagtccggattggagtctgcaactcgactccatgaagtcggaatcgctagtaatcgtgaatcagaatgtcacggtgaatacgttcccgggccttgtacacaccgcccgtcacaccatgggagtgggttgcaaaagaagtaggtagcttaaccttcgggagggcgcttaccactttgtgattcatgactggggtg

SEQ ID NO: 1744 - DNA, 1462 bp, Kosakonia oryzae
attgaacgctggcggcaggcctaacacatgcaagtcgaacggtagcacagagagcttgctctcgggtgacgagtggcggacgggtgagtaatgtctgggaaactgcctgatggagggggataactactggaaacggtagctaataccgcataacgtcgcaagaccaaagagggggaccttcgggcctcttgccatcagatgtgcccagatgggattagctagtaggcggggtaatggcccacctaggcgacgatccctagctggtctgagaggatgaccagccacactggaactgagacacggtccagactcctacgggaggcagcagtggggaatattgcacaatgggcgcaagcctgatgcagccatgccgcgtgtgtgaagaaggccttcgggttgtaaagcactttcagcggggaggaaggcggtacggttaataaccgtgccgattgacgttacccgcagaagaagcaccggctaactccgtgccagcagccgcggtaatacggagggtgcaagcgttaatcggaattactgggcgtaaagcgcacgcaggcggtctgtcaagtcggatgtgaaatccccgggctcaacctgggaactgcattcgaaactggcaggctggagtctcgtagagggaggtagaattccaggtgtagcggtgaaatgcgtagagatctggaggaataccggtggcgaaggcggcctcctggacgaagactgacgctcaggtgcgaaagcgtggggagcaaacaggattagataccctggtagtccacgccgtaaacgatgtcgatttggaggttgtgcccttgaggcgtggcttccggagctaacgcgttaaatcgaccgcctggggagtacggccgcaaggttaaaactcaaatgaattgacgggggcccgcacaagcggtggagcatgtggtttaattcgatgcaacgcgaagaaccttacctggtcttgacatccacagaacctggcagagatgccggggtgccttcgggaactgtgagacaggtgctgcatggctgtcgtcagctcgtgttgtgaaatgttgggttaagtcccgcaacgagcgcaacccttatcctttgttgccagcggtccggccgggaactcaaaggagactgccagtgataaactggaggaaggtggggatgacgtcaagtcatcatggcccttacgaccagggctacacacgtgctacaatggcgcatacaaagagaagcgacctcgcgagagcaagcggacctcataaagtgcgtcgtagtccggattggagtctgcaactcgactccatgaagtcggaatcgctagtaatcgtgaatcagaatgtcacggtgaatacgttcccgggccttgtacacaccgcccgtcacaccatgggagtgggttgcaaaagaagtaggtagcttaaccttcgggagggcgcttaccactttgtgattcatgactggggtg

SEQ ID NO: 1745 - DNA, 1403 bp, Kosakonia oryzendophytica
aagtcgaacggtagcacagagagcttgctctcgggtgacgagtggcggacgggtgagtaatgtctgggaaactgcctgatggagggggataactactggaaacggtagctaataccgcataacgtcgcaagaccaaagagggggaccttcgggcctcttgccatcagatgtgcccagatgggattagctagtaggtggggtaacggctcacctaggcgacgatccctagctggtctgagaggatgaccagccacactggaactgagacacggtccagactcctacgggaggcagcagtggggaatattgcacaatgggcgcaagcctgatgcagccatgccgcgtgtatgaagaaggccttcgggttgtaaagtactttcagcggggaggaaggtgttgtggttaataaccgcagcaattgacgttacccgcagaagaagcaccggctaactccgtgccagcagccgcggtaatacggagggtgcaagcgttaatcggaattactgggcgtaaagcgcacgcaggcggtctgtcaagtcggatgtgaaatccccgggctcaacctgggaactgcattcgaaactggcaggctggagtctcgtagagggaggtagaattccaggtgtagcggtgaaatgcgtagagatctggaggaataccggtggcgaaggcggcctcctggacgaagactgacgctcaggtgcgaaagcgtggggagcaaacaggattagataccctggtagtccacgctgtaaacgatgtcgatttggaggttgtgcccttgaggcgtggcttccggagctaacgcgttaaatcgaccgcctggggagtacggccgcaaggttaaaactcaaatgaattgacgggggcccgcacaagcggtggagcatgtggtttaattcgatgcaacgcgaagaaccttacctggtcttgacatccacagaacttggcagagatgccttggtgccttcgggaactgtgagacaggtgctgcatggctgtcgtcagctcgtgttgtgaaatgttgggttaagtcccgcaacgagcgcaacccttatcctttgttgccagcggtccggccgggaactcaaaggagactgccagtgataaactggaggaaggtggggatgacgtcaagtcatcatggcccttacgaccagggctacacacgtgctacaatggcgcatacaaagagaagcgacctcgcgagagcaagcggacctcataaagtgcgtcgtagtccggattggagtctgcaactcgactccatgaagtcggaatcgctagtaatcgtggatcagaatgccacggtgaatacgttcccgggccttgtacacaccgcccgtcacaccatgggagtgggttgcaaaagaagtaggtagcttaaccttcgggagggcgct

SEQ ID NO: 1746 - DNA, 1397 bp, Kosakonia oryziphila
gtcgaacggtagcacagagagcttgctctcgggtgacgagtggcggacgggtgagtaatgtctgggaaactgcctgatggagggggataactactggaaacggtagctaataccgcataacgtcgcaagaccaaagagggggaccttcgggcctcttgccatcagatgtgcccagatgggattagctagtaggcggggtaacggcccacccaggcgacgatccctagctggtctgagaggatgaccagccacactggaactgagacacggtccagactcctacgggaggcagcagtggggaatattgcacaatgggcgcaagcctgatgcagccatgccgcgtgtgtgaagaaggccttcgggttgtaaagcactttcagcggggaggaaggcagtacggttaataagcgtgctgattgacgttacccgcagaagaagcaccggctaactccgtgccagcagccgcggtaatacggagggtgcaagcgttaatcggaattactgggcgtaaagcgcacgcaggcggtctgtcaagtcggatgtgaaatccccgggctcaacctgggaactgcattcgaaactggcaggctggagtctcgtagagggaggtagaattccaggtgtagcggtgaaatgcgtagagatctggaggaataccggtggcgaaggcggcctcctggacgaagactgacgctcaggtgcgaaagcgtggggagcaaacaggattagataccctggtagtccacgctgtaaacgatgtcgatttggaggttgtgcccttgaggcgtggcttccggagctaacgcgttaaatcgaccgcctggggagtacggccgcaaggttaaaactcaaatgaattgacgggggcccgcacaagcggtggagcatgtggtttaattcgatgcaacgcgaagaaccttacctggtcttgacatccacagaagtttccagagatgggaatgtgccttcgggaactgtgagacaggtgctgcatggctgtcgtcagctcgtgttgtgaaatgttgggttaagtcccgcaacgagcgcaacccttatcctttgttgccagcggtccggccgggaactcaaaggagactgccagtgataaactggaggaaggtggggatgacgtcaagtcatcatggcccttacgaccagggctacacacgtgctacaatggcgcatacaaagagaagcgacctcgcgagagcaagcggacctcataaagtgcgtcgtagtccggattggagtctgcaactcgactccatgaagtcggaatcgctagtaatcgtgaatcagaatgtcacggtgaatacgttcccgggccttgtacacaccgcccgtcacaccatgggagtgggttgcaaaagaagtaggtagcttaacctcggagggcg

SEQ ID NO: 1747 - DNA, 1462 bp, Kosakonia radicincitans
attgaacgctggcggcaggcctaacacatgcaagtcgaacggtagcacagagagcttgctctcgggtgacgagtggcggacgggtgagtaatgtctgggaaactgcctgatggagggggataactactggaaacggtagctaataccgcataacgtcgcaagaccaaagagggggaccttcgggcctcttgccatcagatgtgcccagatgggattagctagtaggcggggtaatggcccacctaggcgacgatccctagctggtctgagaggatgaccagccacactggaactgagacacggtccagactcctacgggaggcagcagtggggaatattgcacaatgggcgcaagcctgatgcagccatgccgcgtgtgtgaagaaggccttcgggttgtaaagcactttcagcggggaggaaggcggtacggttaataaccgtgccgattgacgttacccgcagaagaagcaccggctaactccgtgccagcagccgcggtaatacggagggtgcaagcgttaatcggaattactgggcgtaaagcgcacgcaggcggtctgtcaagtcggatgtgaaatccccgggctcaacctgggaactgcattcgaaactggcaggctggagtctcgtagagggaggtagaattccaggtgtagcggtgaaatgcgtagagatctggaggaataccggtggcgaaggcggcctcctggacgaagactgacgctcaggtgcgaaagcgtggggagcaaacaggattagataccctggtagtccacgccgtaaacgatgtcgatttggaggttgtgcccttgaggcgtggcttccggagctaacgcgttaaatcgaccgcctggggagtacggccgcaaggttaaaactcaaatgaattgacgggggcccgcacaagcggtggagcatgtggtttaattcgatgcaacgcgaagaaccttacctggtcttgacatccacagaacctggcagagatgccggggtgccttcgggaactgtgagacaggtgctgcatggctgtcgtcagctcgtgttgtgaaatgttgggttaagtcccgcaacgagcgcaacccttatcctttgttgccagcggttaggccgggaactcaaaggagactgccagtgataaactggaggaaggtggggatgacgtcaagtcatcatggcccttacgaccagggctacacacgtgctacaatggcgcatacaaagagaagcgacctcgcgagagcaagcggacctcataaagtgcgtcgtagtccggattggagtctgcaactcgactccatgaagtcggaatcgctagtaatcgtgaatcagaatgtcacggtgaatacgttcccgggccttgtacacaccgcccgtcacaccatgggagtgggttgcaaaagaagtaggtagcttaaccttcgggagggcgcttaccactttgtgattcatgactggggtg

SEQ ID NO: 1748 - DNA, 1415 bp, Kozakia baliensis
agcgaacgctggcggcatgcttaacacatgcaagtcgcacggacctttcggggtcagtggcggacgggtgagtaacgcgtagggatctatccatgggtgggggataacactgggaaactggtgctaataccgcatgatgcctgagggccaaaggcgcaagtcgcctgtggaggagcctgcgttcgattagcttgttggtggggtaaaggcctaccaaggcgatgatcgatagctggtctgagaggatgatcagccacactgggactgagacacggcccagactcctacgggaggcagcagtggggaatattggacaatgggcgcaagcctgatccagcaatgccgcgtgtgtgaagaaggtcttcggattgtaaagcactttcgacggggacgatgatgacggtacccgtagaagaagccccggctaacttcgtgccagcagccgcggtaatacgaagggggctagcgttgctcggaataactgggcgtaaagggcgcgtaggcggtttggacagtcagatgtgaaattcctgggcttaacctgggggctgcatttgatacgtacagactagagtgtgagagagggttgtggaattcccagtgtagaggtgaaattcgtagatattgggaagaacaccggtggcgaaggcggcaacctggctcatgactgacgctgaggcgcgaaagcgtggggagcaaacaggattagataccctggtagtccacgctgtaaacgatgtgtgctggatgttgggcaacttagttgctcagtgtcgtagctaacgcgctaagcacaccgcctggggagtacggccgcaaggttgaaactcaaaggaattgacgggggcccgcacaagcggtggagcatgtggtttaattcgaagcaacgcgcagaaccttaccagggcttgacatggggaggctgtagccagagatggttatttcccgcaagggacctcctgcacaggtgctgcatggctgtcgtcagctcgtgtcgtgagatgttgggttaagtcccgcaacgagcgcaaccctcgcctttagttgccagcacgtttgggtgggcactctagaggaactgccggtgacaagccggaggaaggtggggatgacgtcaagtcctcatggcccttatgtcctgggctacacacgtgctacaatggcggtgacagtgggaagctagacagcgatgtcatgccgatctctaaaaaccgtctcagttcggattgcactctgcaactcgagtgcatgaaggtggaatcgctagtaatcgcggatcagcatgccgcggtgaatacgttcccgggccttgtacacaccgcccgtcacaccatgggagttggttcgaccttaagccggtgagcgaacccagcaatggggcgcagccgatcacggtcgggttagcgactagggtg

SEQ ID NO: 1749 - DNA, 1381 bp, Kriegella aquimaris
aggggcagcggggaaaagcttgcttttccgccggcgaccggcgcacgggtgcgcaacgcgtatagaatctgccccttaccggggaatagcccagggaaacttggattaatgccccatggtatatgttgacggcatcgttttcatattaaaggttacggtaagggatgactatgcgtcccattagttagttggtaaggtaacggcttaccaaggcagcgatgggtaggggccctgagagggggatcccccacactggtactgagacacggaccagactcctacgggaggcagcagtgaggaatattggacaatgggcgaaagcctgatccagccatgccgcgtgcaggaagacggccctatgggttgtaaactgcttttgtacgggaagaaacccgcccacgtgtgggcgattgacggtaccgtaagaataaggaccggctaactccgtgccagcagccgcggtaatacggagggtccgagcgttatccggaattattgggtttaaagggtccgtaggcgggccgttaagtcaggggtgaaatgctgcggctcaaccgtagcactgcctttgatactggcggtcttgagttatggtgaagttgccggaatatgtggtgtagcggtgaaatgcatagagatcacatagaacaccgattgcgaaggcaggtgactaaccatatactgacgctgatggacgaaagcgtggggagcgaacgggattagataccccggtagtccacgccgtaaacgatggatactagctgtccggtaccttgagtactgggcggccaagcgaaagtgataagtatcccacctggggagtacgttcgcaagaatgaaactcaaaggaattgacgggggcccgcacaagcggtggagcatgtggtttaattcgatgatacgcgaggaaccttaccagggcttaaatgcattttgacaggtctagagatagattttccttcgggcaatttgcaaggtgctgcatggttgtcgtcagctcgtgccgtgaggtgtcaggttaagtcctataacgagcgcaacccctaccgttagttgccagcgagtcatgtcggggactctaacgggactgccggtgcaaaccgtgaggaaggtggggacgacgtcaaatcatcacggcccttacgtcctgggccacacacgtgctacaatggccggtacagcgggaagccatgcggcaacgcagagcggatccacaaaaccggtcacagttcggatcggggtctgcaactcgaccccgtgaagctggaatcgctagtaatcggatatcagccatgatccggtgaatacgttcccgggccttgtacacaccgcccgtcaagccatggaagccgggagtgcctgaagtccgtcgccgcaagga

SEQ ID NO: 1750 - DNA, 1543 bp, Kroppenstedtia eburnea
gacgaacgctggcggcgtgcctaatacatgcaagtcgagcgatctggaggttggagattagaggttagaagttagacgaaaccaatcggcgaagccgattggatgaatctgatttccaacttccaatctccaacttccagggagcggcggacgggtgagtaacacgtgggcaacctgcccgcaagaccgggataactccgggaaaccggggctaataccggatgatgcctcttcctgcatgggaggatgctgaaaggcggcctttggctgtcacttgcggatgggcccgcggcgcattagctggttggtgaggtaacggctcaccaaggcgacgatgcgtagccgacctgagagggtgaccggccacactgggactgagacacggcccagactcctacgggaggcagcagtagggaattttccgcaatgggcgcaagcctgacggagcaacgccgcgtgagtgaggacggctttcgggttgtaaaactctgttcttcgggaagaacggtcgaagggtgaacaatcctttggcgtgacggtaccggaggagaaagccccggctaactacgtgccagcagccgcggtaatacgtagggggcaagcgttgtccggaattattgggcgtaaagcgcgcgcaggcggcctgttaagtctggtgtgaaagaccacggctcaaccgtggggtggcatcagaaactggcgggcttgagtgcaggagaggagagtggaattcccggtgtagcggtggaatgcgtagagatcgggaggaacaccagtggcgaaggcgactctctggcctgtaactgacgctgaggcgcgaaagcgtggggagcgaacaggattagataccctggtagtccacgccgtaaacgatgagtgctaggtgttgggggttccgccctctgtgccgaaggtaacccaataagcactccgcctggggagtacggccgcaaggctgaaactcaaaggaattgacgggggcccgcacaagcggtggagcatgtggtttaattcgaagcaacgcgaagaaccttaccagggcttgacatcccgctgaccggtgcagagatgcaccttcccttcggggcagcggtgacaggtggtgcatggttgtcgtcagctcgtgtcgtgagatgttgggttcagtcccgcaacgagcgcaacccttgtcgtcagttgccagcacatgatggtgggcactctggcgagacagccggtgaaagccggaggaaggtggggatgacgtcaaatcatcatgccccttatgtcctgggctacacacgtgctacaatggccggtacaacgggcagcgaacccgtgagggggagccaatcccaaaaaaccggtctcagttcggatcgcaggctgcaactcgcctgcgtgaagctggaatcgctagtaatcgcggatcagcatgccgcggtgaatccgttcccgggccttgtacacaccgcccgtcacaccacgagagtctgcaacacccgaagtcggtgaggtaaccttcgggaaccagccgccgaaggtggggcagatgattggggtg

SEQ ID NO: 1751 - DNA, 1400 bp, Ktedonobacter racemifer
gataaacgctggcggcgtgcctaacacatgcaagtcgaacgccctctcgcaagagagggagtggcggacgggtgagtaacacatgggtacctgccccgaggtgaggaataccggcgagaaatcgccgacaataccgcatacgttcctccgggaacaaagctcgcaagggcgccttgggatgggcctgtggccgattagcttgttggtgaggtaagagctcaccaaggccacgatcggtagctggtctgagaggatggtcagccacactgggattgagaacggcccagactcctacggggggcagcagtgaggaattttcgtcaatgggggcaaccctgaacgagcaacgccgcgtgcaggaggacgcttttcggagtgtaaactgcttttcttggggacgagtaaggacggtacccaaggaataagccccggctaactacgtgccagcagccgcggtaatacgtagggggcaagcgttgtccggagttattgggcgtaaagcgcacgcaggcggtttcgtacgtccggagtgacagttcccggctcaactgggaaaggtcttcggaaacggcgagacttgagggcttcagagggacacggaattccgggtggagtggtgaaatgcgtagagatccggaggaacaccaatggcgaaggcagtgtcctgggaagcatctgacgctcaggtgcgaaagctaggggagcgaacaggattagataccctggtagtcctagccgtaaacgatgaccactaggtgtgggaggtatcgaccccttccgtgccgtcgcaaacgcagtaagtggtccgcctggggagtacggtcgcaagattaaaactcaaaggaattgacggggacccgcacaagcagcggagcgtgtggtttaattcgatgcaacgcgaagaaccttaccaagtcttgacatgcagatgcaccagcggtaatgcgctgtcccttcggggcgtttgcacaggtgctgcatggctgtcgtcagctcgtgtcgtgagatgttgggttaagtcccgcaacgagcgcaacccctactgcctattacaacttctaggcggaactgccctcacgggaggaaggcggggatgacgtcaagtcagcacggcccttacgacttgggcgacacacacgctacaatggccagaaacaaagggatgccaacccgcgagggggagccaagctcaaaaacctggtctcagttcagattgcaggctgaaactcgcctgcatgaaggtggagttgctagtaaccgtaggtcagcacactacggtgaatacgttcccgggtcttgtacacaccgcccgtcacaccacgaaagtcggcaacacctgaagccgccaggctaactcttcggagaggcaggcgtcgagggtggggttggtgattggggtg

SEQ ID NO: 1752 - DNA, 1510 bp, Kuenenia stuttgartiensis
aacgaacgctggcggcgtggattaggcatgcaagtcgaacgaggaagtgccccgtaaggggcgcaagcctagtggcgaaagggtgagtaatgcattgataacctgcctttgagatgggaataactgcgtttcgagcaatcggaactaccgaaagggctgctaatacccaataatactataggtgcaaaagcacttgtggtcaaatgctaggaattctgttccttgtgcttaaagaggggttaatgtcctatcagctagttggtggggtaatggcctaccaaggcaaagacgggtagccggcttgagagggtggtcggccacactgggactgagacactgcccagactcctacgggaggctgcagtcgagaatctttcgcaatgcccgaaagggtgacgaagcgacgccgcgtgtgggaagaaggccttcgggttgtaaaccactgtcgggagttaggaaatgcaggtgcgttaatagcgcacttgcttgactaaggctccagaggaagccacggctaactctgtgccagcagccgcggtaatacagaggcggcaagcgttgttcggaattattgggcgtaaagagcacgtaggcggccttgcaagtcagttgtgaaagccttccgcttaacggaagaacggcatctgatactacagggcttgagtacgggaggggagagtggaacttctggtggagcggtgaaatgcgtagatatcagaaggaacgccggcggcgaaagcgactctctggtccgaaactgacgctgaggtgcgaaagctaggggagcaaacgggattagataccccggtagtcctagccgtaaacgatgggcactaagtagaggggttttgattatttctctgccggagctaacgcattaagtgccccgcctggggagtacggccgcaaggctaaaactcaaaagaattgacgggggctcgcacaagcggtggagcatgtggcttaattcgatgcaacgcgaagaaccttaccggggcttgacatggtagaagtagaatcctgaaagggtgacgatcggtatccagtccgaagctatcacaggtgttgcatggctgtcgtcagctcgtgtcgtgagacgttgggttaagtcccctaacgagcgaaacccttgtctttagttgctaacgggtaatgctgagcactttagagagactgccgtcgttaagacggaggaaggtggggacgacgtcaagtcatcatggcccttatgtcccgggctgcacacgtgctacaatggtcggtacaaagggatgctaagtcgcgagatggtgcgaaacctataaagccgatctcagttcagattggaggctgaaactcgcctccatgaagttggaatcgctagtaatcgcggatcagctacgccgcggtgaatatgttcccgagccttgtacacaccgcccgtcaagccacccaagcaagatgcacccaaaatcgcctgcctaacccgtaagggagggaagtgcctaaggtgtgttttgtgaggaggact

SEQ ID NO: 1753 - DNA, 1462 bp, Kushneria avicenniae
attgaacgctggcggcaggcctaacacatgcaagtcgagcggtaacaggggtagcttgctacccgctgacgagcggcggacgggtgagtaatgcatgggaatctgcccggtagtgggggataactcggggaaacccgagctaataccgcatacgtcctacgggagaaagcaggggatcttcggaccttgcgctatcggatgagcccatgtcggattagcttgttggtgaggtaacggctcaccaaggccgcgatccgtagctggtctgagaggatgatcagccacaccgggactgagacacggcccggactcctacgggaggcagcagtggggaatattggacaatgggggcaaccctgatccagccatgccgcgtgtgtgaagaaggccctcgggttgtaaagcactttcagtggggaagaaggcatggcggctaatacccgccatgaaggacatcacccacagaagaagcaccggctaactccgtgccagcagccgcggtaatacggagggtgcaagcgttaatcggaattactgggcgtaaagggcgcgtaggcggcttgccaagccggatgtgaaagccccgggctcaacccgggaacggcattcggaactggcaggctagagtgcaggagaggaaggtggaattcccggtgtagcggtgaaatgcgtagagatcgggaggaataccagtggcgaaggcggccttctggactgacactgacgctgaggcgcgaaagcgtgggtagcaaacaggattagataccctggtagtccacgccgtaaacgatgtcgaccagccgttggaccccttgagggtttggtggcgcagttaacgcaataagtcgaccgcctggggagtacggccgcaaggctaaaactcaaatgaattgacgggggcccgcacaagcggtggagcatgtggtttaattcgatgcaacgcgaagaaccttacctgctcttgacatcctgcgaatctcccagagatgggagagtgccttcgggaacgcagagacaggtgctgcatggctgtcgtcagctcgtgttgtgaaatgttgggttaagtcccgtaacgagcgcaacccctatccctttttgccagcggtccggccgggaacttcagggagactgccggtgacaaaccggaggaaggtggggacgacgtcaagtcatcatggcccttacgagcagggctacacacgtgctacaatggccggtacaaagggttgcgaatccgcgaggtgaagccaatcccaaaaagccggcctcagtccggatcggagtctgcaactcgactccgtgaagtcggaatcgctagtaatcgcgcatcagaatggcgcggtgaatacgttcccgggccttgtacacaccgcccgtcacaccatgggagtggactgcaccagaagtggttagcttaaccttcgggagagcgatcaccacggtgtggttcatgactggggtg

SEQ ID NO: 1754 - DNA, 1462 bp, Kushneria indalinina
  misc_feature (762)..(762): n is a, c, g, or t
  misc_feature (795)..(795): n is a, c, g, or t
  misc_feature (832)..(832): n is a, c, g, or t
  misc_feature (847)..(847): n is a, c, g, or t
  misc_feature (863)..(863): n is a, c, g, or t
  misc_feature (959)..(959): n is a, c, g, or t
  misc_feature (1174)..(1174): n is a, c, g, or t
  misc_feature (1271)..(1271): n is a, c, g, or t
  misc_feature (1285)..(1285): n is a, c, g, or t
  misc_feature (1348)..(1348): n is a, c, g, or t
  misc_feature (1403)..(1403): n is a, c, g, or t
  misc_feature (1434)..(1434): n is a, c, g, or t
attgaacgctggcggcaggcctaacacatgcaagtcgagcggtaacaggggtagcttgctacccgctgacgagcggcggacgggtgagtaatgcatgggtatctgcccggtagtgggggataactcggggaaacccgagctaataccgcatacgtcctacgggagaaagcaggggatcttcggaccttgcgctatcggatgagcccatgtcggattagcttgttggtgaggtaatggctcaccaaggccgcgatccgtagctggtctgagaggatgatcagccacaccgggactgagacacggcccggactcctacgggaggcagcagtggggaatattggacaatgggggaaaccctgatccagccatgccgcgtgtgtgaagaaggccttcgggttgtaaagcactttcagtggggaagaaggcatggtggttaataaccaccatgaaggacatcacccacagaagaagcaccggctaactccgtgccagcagccgcggtaatacggagggtgcaagcgttaatcggaattactgggcgtaaagggcgcgtaggcggcttgccaagccggatgtgaaagccccgggctcaacccgggaacggcattcggaactggcaggctagagtgcaggagaggaaggtggaattcccggtgtagcggtgaaatgcgtagagatcgggaggaataccagtggcgaaggcggccttctggactgacactgacgctgaggcgcgaaagcgtgggtagcaaacaggattanataccctggtagtccacgccgtaaacgatgtcnaccagccgttggaccccttgagggtttggtggcgcanttaacgcaataagtngaccgcctggggagtncggccgcaaggctaaaactcaaatgaattgacggggccccgcacaagcggtggagcatgtggtttaattctatgcaacgcgaaaaaccttacctgnttttgacatcctgcgaatctcccagagatgggagagtgccttcgggagcgcagagacaggtgctgcatggctgtcgtcagctcgtgttgtgaaatgttgggttaagtcccgtaacgagcgcaacccctatccctttttgccagcggtccggccgggaacttcagggagactgccggtgacaaaccggaggaaggtggggacgacgtcaagtcatnatggcccttacgagcagggctacacacgtgctacaatggccggtacaaagggttgcgaagcggcgacgtgaagccaatcccataaagccggcctcantccggatcggagtntgcaactcgactccgtgaagtcggaatcgctagtaatcgtggatcagaatgccacggtgaatncgttcccgggccttgtacacaccgcccgtcacaccatgggagtggactgcaccanaagtggttagcttaacctttgggagagcgancaccacggtgtggttaatgactggggtg

SEQ ID NO: 1755 - DNA, 1458 bp, Kushneria konosiri
attgaacgctggcggcaggcctaacacatgcaagtcgagcggcagcgggtccttcgggatgccggcgagcggcggacgggtgagtaatgcatgggaatctgcccggtagtgggggataactcggggaaacccgagctaataccgcatacgtcctacgggagaaagcaggggatcttcggaccttgcgctatcggatgagcccatgtcggattagcttgttggtgaggtaacggctcaccaaggcaacgatccgtagctggtctgagaggatgatcagccacaccgggactgagacacggcccggactcctacgggaggcagcagtggggaatattggacaatgggggaaaccctgatccagccatgccgcgtgtgtgaagaaggccctagggttgtaaagcactttcagtggggaagaaggcatgacgattaatacccgtcatgaaggacatcacccacagaagaagcaccggctaactccgtgccagcagccgcggtaatacggagggtgcaagcgttaatcggaattactgggcgtaaagggcgcgtaggcggcttgccaagccggatgtgaaagccccgggctcaacccgggaacggcattcggaactggcaggctagagtgcaggagaggaaggtggaattcccggtgtagcggtgaaatgcgtagagatcgggaggaataccagtggcgaaggcggccttctggactgacactgacgctgaggcgcgaaagcgtgggtagcaaacaggattagataccctggtagtccacgccgtaaacgatgtcgaccagccgttggaccccttgagggtttggtggcgcagttaacgcaataagtcgaccgcctggggagtacggccgcaaggctaaaactcaaatgaattgacgggggcccgcacaagcggtggagcatgtggtttaattcgatgcaacgcgaagaaccttacctgctcttgacatcctgcgaatctcccagagatgggagagtgccttcgggaacgcagagacaggtgctgcatggctgtcgtcagctcgtgttgtgaaatgttgggttaagtcccgtaacgagcgcaacccctatccctttttgccagcggtccggccgggaacttcagggagactgccggtgacaaaccggaggaaggtggggacgacgtcaagtcatcatggcccttacgagcagggctacacacgtgctacaatggccggtacaaagggttgcgaagcggcgacgtgaagccaatcccataaagccggcctcagtccggatcggagtctgcaactcgactccgtgaagtcggaatcgctagtaatcgtggatcagaatgccacggtgaatacgttcccgggccttgtacacaccgcccgtcacaccatgggagtggactgcaccagaagtggttagcttaaccttcgggagagcgatcaccacggtgtggttcatgactggggtg

SEQ ID NO: 1756 - DNA, 1462 bp, Kushneria marisflavi
attgaacgctggcggcaggcctaacacatgcaagtcgagcggtaacaggggtagcttgctacccgctgacgagcggcggacgggtgagtaatgcatgggaatctgcccgatagtgggggataactcggggaaacccgagctaataccgcatacgtcctacgggagaaagcaggggatcttcggaccttgcgctatcggatgagcccatgtcggattagcttgttggtgaggtaaaggctcaccaaggctgcgatccgtagctggtctgagaggatgatcagccacaccgggactgagacacggcccggactcctacgggaggcagcagtggggaatattggacaatgggggaaaccctgatccagccatgccgcgtgtgtgaagaaggccttagggttgtaaagcactttcagtggggaagaaggcatgatgattaatactcgtcatgaaggacatcacccacagaagaagcaccggctaactccgtgccagcagccgcggtaatacggagggtgcaagcgttaatcggaattactgggcgtaaagggcgcgtaggcggcttgccaagccggatgtgaaagccccgggctcaacccgggaacggcattcggaactggcaggctagagtgcaggagaggaaggtggaattcccggtgtagcggtgaaatgcgtagagatcgggaggaataccagtggcgaaggcggccttctggactgacactgacgctgaggcgcgaaagcgtgggtagcaaacaggattagataccctggtagtccacgccgtaaacgatgtcgaccagccgttggaccccttgagggtttggtggcgcagttaacgcaataagtcgaccgcctggggagtacggccgcaaggctaaaactcaaatgaattgacgggggcccgcacaagcggtggagcatgtggtttaattcgatgcaacgcgaagaaccttacctgctcttgacatcctgcgaatctcccagagatgggagagtgccttcgggaacgcagagacaggtgctgcatggctgtcgtcagctcgtgttgtgaaatgttgggttaagtcccgtaacgagcgcaacccctatccctttttgccagcggtccggccgggaacttcagggagactgccggtgacaaaccggaggaaggtggggacgacgtcaagtcatcatggcccttacgagcagggctacacacgtgctacaatggccggtacaaagggttgcgaagcggcgacgtgaagccaatcccataaagccggcctcagtccggatcggagtctgcaactcgactccgtgaagtcggaatcgctagtaatcgtggatcagaatgccacggtgaatacgttcccgggccttgtacacaccgcccgtcacaccatgggagtggactgcaccagaagtggttagcttaaccttcgggagagcgatcaccacggtgtggttcatgactggggtg

SEQ ID NO: 1757 - DNA, 1462 bp, Kyrpidia tusciae
gacgaacgctggcggcgtgcctaatacatgcaagtcgagcgggtctccccggggcttgccccggggagatcagcggcggacgggtgagtaacgcgtgggcaacctgtccgacagaccgggacaacgcctggaaacgggcgctaattccggataggcgccaggggcgcatgctcttggcgggaaaggggaaacccgctgtcgggtgggcccgcgtcgcattagctggttggtggggtaacggctcaccaaggcgacgatgcgtagccggcctgagagggtggacggccacactgggactgagacacggcccagactcctacgggaggcagcagtagggaatcttccgcaatgggcgaaagcctgacggagcgacgccgcgtgagggacgaaggccttcgggttgtaaacctctggctttggggacgagggcaccggggggacccggtgagggacggtacccaaggaggaagccccggcaaactacgtgccagcagccgcggtaagacgtagggggcgagcgttgtccggaatcactgggcgtaaagggcgcgcaggcggcgatgcacgtccgaggtgaaaggcagcggctcaaccgctgaggggcctcggatacggcatggcttgagggtcggagaggcaaggggaattcctggtgtagcggtgaaatgcgtagagatcaggaggaataccggtggcgaaggcgccttgctggacgacgcctgacgctgaggcgcgaaagcgtggggagcgaacaggattagataccctggtagtccacgccgtaaacgatgagtgctaggtgtgggtggggatgcccatccgtgccgaaggaaacccaataagcactccgcctggggagtacggccgcaaggctgaaactcaaaggaattgacgggggcccgcacaagcggtggagcatgtggtttaattcgaagcaacgcgaagaaccttaccagggcttgacatccctctgacaccttcagagatggggggttcccgtttgggacagaggagacaggtggtgcatggttgtcgtcagctcgtgtcgtgagatgttgggttaagtcccgcaacgagcgcaacccttgctctgtgttgccagcactctgggtgggcactcacaggggactgccggcgaggagccggaggaaggcggggatgacgtcaaatcatcatgccccatatgtcctgggctacacacgtgctacaatgggcggtacaacggggggcgaaggggcgacctggagcgaatccctgaaagccgttcgtggttcggattgcaggctgcaactcgcctgcatgaaggcggaatcgctagtaatcgcggatcagcatgccgcggtgaatccgttcccgggccttgtacacaccgcccgtcacaccacgagagtcggcaacacccgaagtcggtggggcaaccggaaggggccagccgccgaaggtggggtcgatgattggggtg

SEQ ID NO: 1758 - DNA, 1405 bp, Labrenzia aggregata
aacgaacgctggcggcaggcttaacacatgcaagtcgaacgaactcttcggagttagtggcagacgggtgagtaacgcgtgggaacctacctttaggtacggaacaacagttggaaacgactgctaataccgtatgtgccctatgggggaaagatttatcgcctaaggatgggcccgcgttggattagctagttggtggggtaaaggcctaccaaggcgacgatccatagctggtctgagaggatgatcagccacactgggactgagacacggcccagactcctacgggaggcagcagtggggaatattggacaatgggcgcaagcctgatccagccatgccgcgtgagtgatgaaggccctagggttgtaaagctctttcagcgaggaggataatgacgttactcgcagaagaagccccggctaacttcgtgccagcagccgcggtaatacgaagggggctagcgttgttcggaatcactgggcgtaaagcgcacgtaggcggacttttaagtcaggggtgaaatcccggggctcaaccccggaactgcctttgatactggaagtcttgagtccgagagaggtgagtggaactccgagtgtagaggtgaaattcgtagatattcggaagaacaccagtggcgaaggcggctcactggctcggtactgacgctgaggtgcgaaagcgtggggagcaaacaggattagataccctggtagtccacgccgtaaacgatggaagctagccgtcaggtagcatgctatttggtggcgcagctaacgcattaagcttcccgcctggggagtacggtcgcaagattaaaactcaaaggaattgacgggggcccgcacaagcggtggagcatgtggtttaattcgaagcaacgcgcagaaccttaccagcccttgacatttggtgctacttccagagatggaaggttcccttcggggacgccaggacaggtgctgcatggctgtcgtcagctcgtgtcgtgagatgttgggttaagtcccgcaacgagcgcaaccctcgcccttagttgccagcattcagttgggcactctagggggactgccggtgataagccgagaggaaggtggggatgacgtcaagtcctcatggcccttacgggctgggctacacacgtgctacaatggcggtgacagtgggcagcgaactcgcgagagggagctaatctccaaaagccgtctcagttcggattgttctctgcaactcgagagcatgaagttggaatcgctagtaatcgcgtaacagcatgacgcggtgaatacgttcccgggccttgtacacaccgcccgtcacaccatgggagttgggtttacccgaaggcagtgcgctaaccgcaagggggcagctgaccacggtaggctcagcgactggggtg

SEQ ID NO: 1759 - DNA, 1405 bp, Labrenzia alba
aacgaacgctggcggcaggcttaacacatgcaagtcgaacgaactcttcggagttagtggcagacgggtgagtaacgcgtgggaacctacctttaggtacggaacaacagttggaaacgactgctaataccgtatgagccctatgggggaaagatttatcgcctaaggatgggcccgcgttggattagctagttggtggggtaaaggcctaccaaggcgacgatccatagctggtctgagaggatgatcagccacactgggactgagacacggcccagactcctacgggaggcagcagtggggaatattggacaatgggggcaaccctgatccagccatgccgcgtgagtgatgaaggccctagggttgtaaagctctttcagcgaggaggataatgacgttactcgcagaagaagccccggctaacttcgtgccagcagccgcggtaatacgaagggggctagcgttgttcggaatcactgggcgtaaagcgcacgtaggcggacttttaagtcaggggtgaaatcccggggctcaaccccggaactgcctttgatactggaagtcttgagaccgagagaggtgagtggaactccgagtgtagaggtgaaattcgtagatattcggaagaacaccagtggcgaaggcggctcactggctcggtactgacgctgaggtgcgaaagcgtggggagcaaacaggattagataccctggtagtccacgccgtaaacgatggaagctagccgtcaggtagcatgctatttggtggcgcagctaacgcattaagcttcccgcctggggagtacggtcgcaagattaaaactcaaaggaattgacgggggcccgcacaagcggtggagcatgtggtttaattcgaagcaacgcgcagaaccttaccagcccttgacatttggtgctacatcgggagaccgatggttcccttcggggacgccaggacaggtgctgcatggctgtcgtcagctcgtgtcgtgagatgttgggttaagtcccgcaacgagcgcaaccctcgcccttagttgccagcattaagttgggcactctagggggactgccggtgataagccgagaggaaggtggggatgacgtcaagtcctcatggcccttacgggctgggctacacacgtgctacaatggcggtgacagtgggcagcgaacccgcaagggggagctaatctccaaaagccgtctcagttcggattgttctctgcaactcgagagcatgaagttggaatcgctagtaatcgcgtaacagcatgacgcggtgaatacgttcccgggccttgtacacaccgcccgtcacaccatgggagttgggtttacccgaaggcagtgcgctaaccgtaagggggcagctgaccacggtaggctcagcgactggggtg

SEQ ID NO: 1760 - DNA, 1405 bp, Labrenzia alexandrii
aacgaacgctggcggcaggcttaacacatgcaagtcgaacgaactcttcggagttagtggcagacgggtgagtaacgcgtgggaatatacctttcggtacggaacaacagttggaaacgactgctaataccgtatgcgccctacgggggaaagatttatcgccgaaggattagcccgcgttggattagctagttggtggggtaaaggcctaccaaggcgacgatccatagctggtctgagaggatgatcagccacactgggactgagacacggcccagactcctacgggaggcagcagtggggaatattggacaatgggggcaaccctgatccagccatgccgcgtgagtgatgaaggccctagggttgtaaagctctttcagcgaggaggataatgacgttactcgcagaagaagccccggctaacttcgtgccagcagccgcggtaatacgaagggggctagcgttgttcggaataactgggcgtaaagcgcacgtaggcggacttttaagtcaggggtgaaatcccagagctcaactctggaactgcctttgatactggaagtcttgagtccgagagaggtgagtggaactccgagtgtagaggtgaaattcgtagatattcggaagaacaccagtggcgaaggcggctcactggctcggtactgacgctgaggtgcgaaagcgtggggagcaaacaggattagataccctggtagtccacgccgtaaacgatggaagctagttgtcaggcagcatgctgtttggtgacgcagctaacgcattaagcttcccgcctggggagtacggtcgcaagattaaaactcaaaggaattgacgggggcccgcacaagcggtggagcatgtggtttaattcgaagcaacgcgcagaaccttaccagcccttgacatttggtgctacatccggagacggatggttcccttcggggacgccaggacaggtgctgcatggctgtcgtcagctcgtgtcgtgagatgttgggttaagtcccgcaacgagcgcaaccctcgcccttagttgccagcatttagttgggcactctagggggactgccggtgataagccgagaggaaggtggggatgacgtcaagtcctcatggcccttacgggctgggctacacacgtgctacaatggcggtgacaatgggcagcgaacccgcgagggggagctaatctcaaaaagccgtctcagttcggattgttctctgcaactcgagagcatgaagttggaatcgctagtaatcgcgtaacagcatgacgcggtgaatacgttcccgggccttgtacacaccgcccgtcacaccatgggagttgggtttacccgaaggcagtgcgctaaccgtaagggggcagctgaccacggtaggctcagcgactggggtg

SEQ ID NO: 1761 - DNA, 1355 bp, Labrenzia marina
tcgaacgaactcttcggagttagtggcagacgggtgagtaacgcgtgggaacatacctttcggtacggaacaacagttggaaacgactgctaataccgtatgcgccctatgggggaaagatttatcgccgagagattggcccgcgttggattagctagttggtggggtaacggcctaccaaggcgacgatccatagctggtctgagaggatgatcagccacactgggactgagacacggcccagactcctacgggaggcagcagtggggaatattggacaatgggggcaaccctgatccagccatgccgcgtgagtgatgaaggccctagggttgtaaagctctttcagcgaggaggataatgacgttactcgcagaagaagccccggctaacttcgtgccagcagccgcggtaatacgaagggggctagcgttgttcggaatcactgggcgtaaagcgcacgtaggcggacttttaagtcaggggtgaaatcccggggctcaaccccggaactgcctttgatactggaagtcttgagaccgagagaggtgagtggaactccgagtgtagaggtgaaattcgtagatattcggaagaacaccagtggcgaaggcggctcactggctcggtactgacgctgaggtgcgaaagcgtggggagcaaacaggattagataccctggtagtccacgccgtaaactatggaagctagccgtcaggtagcatgctatttggtggcgcagctaacgcattaagcttcccgcctggggagtacggtcgcaagattaaaactcaaaggaattgacgggggcccgcacaagcggtggagcatgtggtttaattcgaagcaacgcgcagaaccttaccagcccttgacatttggtgctacatcgggagaccgatggttcccttcggggacgccaggacaggtgctgcatggctgtcgtcagctcgtgtcgtgagatgttgggttaagtcccgcaacgagcgcaaccctcgcccttagttgccagcattaagttgggcactctagggggactgccggtgataagccgagaggaaggtggggatgacgtcaagtcctcatggcccttacgggctgggctacacacgtgctacaatggcggtgacagtgggcagcgaactcgcgagagggagctaatctccaaaagccgtctcagttcggattgttctctgcaactcgagagcatgaagttggaatcgctagtaatcgcgtaacagcatgacgcggtgaatacgttcccgggccttgtacacaccgcccgtcacaccatgggagttgggtttacccgaaggcagtgcgctaaccgcaagggggcagctgaccacggtagg

SEQ ID NO: 1762 - DNA, 1405 bp, Labrenzia suaedae
aacgaacgctggcggcaggcttaacacatgcaagtcgaacggtctcttcggagatagtggcagacgggtgagtaacgcgtgggaacatacctttcggtacggaacaacagttggaaacgactgctaataccgtatacgccctatgggggaaagatttatcgccgagagattggcccgcgttggattagctagttggtggggtaaaggcctaccaaggcgacgatccatagctggtctgagaggatgatcagccacactgggactgagacacggcccagactcctacgggaggcagcagtggggaatattggacaatgggcgcaagcctgatccagccatgccgcgtgagtgatgaaggccttagggttgtaaagctctttcagcgaggaggataatgacgttactcgcagaagaagccccggctaacttcgtgccagcagccgcggtaatacgaagggggctagcgttgttcggaatcactgggcgtaaagcgcacgtaggcggacttttaagtcaggggtgaaatcccggggctcaaccctggaactgcctttgatactggaagtcttgagtccgagagaggtgagtggaactccgagtgtagaggtgaaattcgtagatattcggaagaacaccagtggcgaaggcggctcactggctcggtactgacgctgaggtgcgaaagcgtggggagcaaacaggattagataccctggtagtccacgccgtaaacgatggaagctagccgtcaggttgcatgcaatttggtggcgcagctaacgcattaagcttcccgcctggggagtacggtcgcaagattaaaactcaaaggaattgacgggggcccgcacaagcggtggagcatgtggtttaattcgaagcaacgcgcagaaccttaccagcccttgacatttggtgctacatcgagagatcgatggttcccttcggggacgccaggacaggtgctgcatggctgtcgtcagctcgtgtcgtgagatgttgggttaagtcccgcaacgagcgcaaccctcgcccttagttgccagcattcagttgggcactctagggggactgccggtgataagccgagaggaaggtggggatgacgtcaagtcctcatggcccttacgggctgggctacacacgtgctacaatggcggtgacaatgggcagcgaacccgcgagggggagctaatctcaaaaagccgtctcagttcggattgttctctgcaactcgagagcatgaagttggaatcgctagtaatcgcgtaacagcatgacgcggtgaatacgttcccgggccttgtacacaccgcccgtcacaccatgggagttggttttacccgaaggcgctgcgctaaccgcaaggaggcaggcgaccacggtagggtcagcgactggggtg

SEQ ID NO: 1763 - DNA, 1426 bp, Laceyella sacchari
  misc_feature (49)..(49): n is a, c, g, or t
gatgaacgctggcggcatgcctaatacatgcaagtcgtgcgggggtctncggaccctagcggcgaacgggtgagtaacacgtgggcaacctgcccgtaagactgggataactccgggaaaccggtgctaataccagataatctctttctccgcatggagaaagagtaaaaggcttcggccacttacggatgggcccgcggcgcattagctagttggtgaggtaacggctcaccaaggcgacgatgcgtagccgacctgagagggtgatcggccacactgggactgagacacggcccagactcctacgggaggcagcagtagggaattttccgcaatgggcgaaagcctgacggagcaatgccgcgtgagtgatgacggccttcgggttgtaaaactctgttctgaaggaagaagttctgacggtacttcaggagaaagccccggctaactacgtgccagcagccgcggtaatacgtagggggcgagcgttatccggaattattgggcgtaaagcgcgcgcaggcggtcatttaagtcaggtgtgaaaggctgcggctcaaccgcagagcggcacctgaaactggatgacttgagtgcaggagaggagagcggaattcccggtgtagcggtggaatgcgtagagatcgggaggaacaccagtggcgaaggcggctctctggcctgtttctgacgctgaggcgcgaaagcgtggggagcaaacaggattagataccctggtagtccacgccgtaaacgatgagtgctaggtgtcggggggtcctaccctcggtgccgaaggtaacccattaagcactccgcctggggagtacggccgcaaggctgaaactcaaaggaattgacgggggcccgcacaagcggtggagcatgtggtttaattcgaagcaacgcgaagaaccttaccagggcttgacatcccgctgaccgctccagagatggagcttcccttcggggcagcggtgacaggtggtgcatggttgtcgtcagctcgtgtcgtgagatgttgggttcagtcccgcaacgagcgcaacccttatcgctagttgccagcattcagttgggcactctagcgagacagccggtgaaagccggaggaaggtggggatgacgtcaaatcatcatgccccttatgtcctgggctacacacgtgctacaatggccggtacaatgggtcgccaacccgcgagggggagctaatcccacaaaaccggtctcagttcggatcgcaggctgcaactcgcctgcgtgaagccggaatcgctagtaatcgcggatcagcatgccgcggtgaatacgttcccgggccttgtacacaccgcccgtcacaccacgagagtttgcaacacccgaagtcggtgaggtaaccttttggaaccagccgccgaaggtggggcagatgattggggtg

SEQ ID NO: 1764 - DNA, 1427 bp, Laceyella sediminis
gatgaacgctggcggcatgcctaatacatgcaagtcgtgcgggggtcttcggaccctagcggcgaacgggtgagtaacacgtgggcaacctgcccgtaagactgggataactccgggaaaccggtgctaataccagataatctctttctccgcatggagaaagagtaaaaggtttcggccacttacggatgggcccgcggcgcattagctagttggtgaggtaacggctcaccaaggcgacgatgcgtagccgacctgagagggtgatcggccacactgggactgagacacggcccagactcctacgggaggcagcagtagggaattttccgcaatgggcgaaagcctgacggagcaatgccgcgtgtgtgatgacggccttcgggttgtaaaactctgttctgaaggaagaagttctgacggtacttcaggagaaagccccggctaactacgtgccagcagccgcggtaatacgtagggggcgagcgttatccggaattattgggcgtaaagcgcgcgcaggcggtcatttaagtcaggtgtgaaaggctgcggctcaaccgcagagcggcacctgaaactggatgacttgagtgcaggagaggagagcggaattcccggtgtagcggtggaatgcgtagagatcgggaggaacaccagtggcgaaggcggctctctggcctgtttctgacgctgaggcgcgaaagcgtggggagcaaacaggattagataccctggtagtccacgccgtaaacgatgagtgctaggtgtcggggggtcctaccctcggtgccgaaggtaacccattaagcactccgcctggggagtacggccgcaaggctgaaactcaaaggaattgacgggggcccgcacaagcggtggagcatgtggtttaattcgaagcaacgcgaagaaccttaccagggcttgacatcccgctgatcgctccagagatggagcttcccttcggggcagcggtgacaggtggtgcatggttgtcgtcagctcgtgtcgtgagatgttgggttcagtcccgcaacgagcgcaacccttatcgctagttgccagcattcagttgggcactctagcgagacagccggtgaaagccggaggaaggtggggatgacgtcaaatcatcatgccccttatgtcctgggctacacacgtgctacaatggccggtacaatgggtcgccaacccgcgagggggagctaatcccacaaaaccggtctcagttcggatcgcaggctgcaactcgcctgcgtgaagccggaatcgctagtaatcgcggatcagcatgccgcggtgaatacgttcccgggccttgtacacaccgcccgtcacaccacgagagtttgcaacacccgaagtcggtgaggtaacctttacggaaccagccgccgaaggtggggcagatgattggggtg

SEQ ID NO: 1765 - DNA, 1453 bp, Lachnospira multipara
  misc_feature (49)..(49): n is a, c, g, or t
  misc_feature (972)..(972): n is a, c, g, or t
gatgaacgctggcggcgtgcttaacacatgcaagtcgaacgaagcaacntatcacgattccttcgggatgacgatttgttgactgagtggcggacgggtgagtaacgcgtgggtaacctgccttatacagggggatagcagctggaaacggctgataataccgcataagcgcacggcatcgcatgatgcagtgtgaaaaactccggtggtataagatggacccgcgtctgattagctagttggtgaggtaacggcccaccaaggcaacgatcagtagccgacctgagagggtgaccggccacattgggactgagacacggcccagactcctacgggaggcagcagtggggaatattgcacaatggaggaaactctgatgcagcgacgccgcgtgagcgaagaagtatttcggtatgtaaagctctatcagcagggaagataatgacggtacctgactaagaagctccggctaaatacgtgccagcagccgcggtaatacgtatggagcaagcgttatccggatttactgggtgtaaagggagtgtaggtggcaaagcaagtcagtagtgaaaatccggggctcaacctcggaactgctattgaaactgtttagctagagtgcaggagaggtaagtggaattcctagtgtagcggtgaaatgcgtagatattaggaggaacaccagtggcgaaggcggcttactggactgtaactgacactgaggctcgaaagcgtggggagcaaacaggattagataccctggtagtccacgccgtaaacgatgaatactaggtgttgggtctcataagagattcggtgccgcagctaacgcaataagtattccacctggggagtacgttcgcaagaatgaaactcaaaggaattgacggggacccgcacaagcggtggagcatgtggtttaattcgaagcaacgcgaagaaccttacctagtcttgacatcccgatgaccnagtatgtaatgtactctttcttcggaacatcggtgacaggtggtgcatggttgtcgtcagctcgtgtcgtgagatgttgggttaagtcccgcaacgagcgcaacccctatttctagtagccagcagttcggctgggcactctagagagactgccagggataacctggaggaaggtggggatgacgtcaaatcatcatgccccttatgactagggctacacacgtgctacaatggcgtaaacaaagtgaagcgagagtgtgagcttaagcaaatcacaaaaataacgtctcagttcggattgtagtctgcaactcgactacatgaagctggaatcgctagtaatcgcagatcagaatgctgcggtgaatacgttcccgggtcttgtacacaccgcccgtcacaccatgggagtcgaaaatgcccgaagtcggtgacctaacgtaagaaggagccgccgaaggcaggtttgataactggggtg

SEQ ID NO: 1766 - DNA, 1460 bp, Lacimicrobium alkaliphilum
attgaacgctggcggcaggcctaacacatgcaagtcgagcggtaacatttctagcttgctagaagatgacgagcggcggacgggtgagtaatacttggggatctgcctgatggcgggggacaaccactggaaacggtggctaataccgcataatgtcttcggaccaaagtatgggaccttcgggccatacaccatcagaggaacccaagcgagattagctagtaggtgaggtaagagctcacctaggcgacgatctctagctgttctgagaggaagatcagccacactgggactgagacacggcccagactcctacgggaggcagcagtggggaatattggacaatgggggcaaccctgatccagccatgccgcgtgtgtgaagaaggccttcgggttgtaaagcactttcagtggtgaggaaggggagtgcgttaatagcgtacttcattgacgttagccacagaagaagcaccggctaactccgtgccagcagccgcggtaatacggagggtgcgagcgttaatcggaattactgggcgtaaagcgcacgcaggcggcttgttaagccagatgtgaaagccccgggctcaacctgggagggtcatttggaactggcaagctagagtcttggagaggggagtggaattccaggtgtagcggtgaaatgcgtagagatctggaggaacatcagtggcgaaggcggctccctggccaaagactgacgctcatgtgcgaaagtgtgggtagcgaacaggattagataccctggtagtccacaccgtaaacgctgtctactagctgtgtgcgatttaatttgtgcgtagcgaagctaacgcgctaagtagaccgcctggggagtacggccgcaaggttaaaactcaaatgaattgacgggggcccgcacaagcggtggagcatgtggtttaattcgatgcaacgcgaagaaccttacctactcttgacatactgggaatttagcagagatgctttagtgccttcgggaatccagatacaggtgctgcatggctgtcgtcagctcgtgtcgtgagatgttgggttaagtcccgcaacgagcgcaacccttgtccttagttgccagcattaggttgggcactctaaggagactgccggtgacaaaccggaggaaggtggggacgacgtcaagtcatcatggcccttacgagtagggctacacacgtgctacaatggttggtacagagggaagcgagaccgcgaggtggagcggatcccttaaagccaatcgtagtccggatcggagtctgcaactcgactccgtgaagtcggaatcgctagtaatcgcaggtcagcatactgcggtgaatacgttcccgggccttgtacacaccgcccgtcacaccatgggagtgggatgcaaaagaagtggttagcttaaccttcgggagggcgatcaccactttgtgtttcatgactggggtg

SEQ ID NO: 1767 - DNA, 1481 bp, Lactobacillus aquaticus
gacgaacgctggcggcgtgcctaatacatgcaagtcgtacgcaaaactttcaccgagtgcttgcactcaccgaaagttttgagtggcgaacgggtgagtaacacgtgggtaacctgcccagaagaaggggataacacttggaaacaggtgctaataccgtataacaacaaagaccgcatggtctttgtttaaaagatggttctgctatcacttctggatggacccgcggcgtattagctagttggtgaggtaatggctcaccaaggcaatgatacgtagccgaactgagaggttgatcggccacattgggactgagacacggcccaaactcctacgggaggcagcagtagggaatcttccacaatggacgaaagtctgatggagcaacgccgcgtgagtgaagaaggttttcggatcgtaaaactctgttgttagagaagaacgtgtgtgagagtaactgttcatgcagtgacggtatctaaccagaaagccacggctaactacgtgccagcagccgcggtaatacgtaggtggcaagcgttgtccggatttattgggcgtaaagggaacgcaggcggttttttaagtctgatgtgaaagccttcggcttaaccgaagtcatgcattggaaactggaagacttgagtgcagaagaggagagtggaactccatgtgtagcggtgaaatgcgtagatatatggaagaacaccagtggcgaaagcggctctctggtctgtaactgacgctgaggttcgaaagcatgggtagcaaacaggattagataccctggtagtccatgccgtaaacgatgaatgctaagtgttggagggtttccgcccttcagtgctgcagctaacgcattaagcattccgcctggggagtacgaccgcaaggttgaaactcaaaggaattgacgggggcccgcacaagcggtggagcatgtggtttaattcgaagcaacgcgaagaaccttaccaggtcttgacatcttctgccaatctgagagatcagatgttcccttcggggacagaatgacaggtggtgcatggttgtcgtcagctcgtgtcgtgagatgttgggttaagtcccgcaacgagcgcaacccttattactagttgccagcatttagttgggcactctagtgagactgccggtgacaaaccggaggaaggtggggatgacgtcaaatcatcatgccccttatgacctgggctacacacgtgctacaatggacagtacaacgagtcgcaagaccgcgaggtcaagctaatctcttaaagctgttctcagttcggattgtaggctgcaactcgcctacatgaagtcggaatcgctagtaatcgcggatcagcatgccgcggtgaatacgttcccgggccttgtacacaccgcccgtcacaccatgagagtttgtaacacccaaagccggtgaggtaaccttttggagccagccgtctaaggtgggacagatgattggggtg

SEQ ID NO: 1768 - DNA, 1481 bp, Lactobacillus capillatus
gacgaacgctggcggcgtgcctaatacatgcaagtcgtacgcaaatctttcaccgaatgcttgcattcatcgaaagatttgagtggcgaacgggtgagtaacacgtgggtaacctgcccagaagaaggggataacacttggaaacaggtgctaataccgtataacaacaaaaaccgcctggtttttgtttaaaagatggttctgctatcacttctggatggacccgcggcgtattagctagttggtgaggtaatggctcaccaaggcaatgatacgtagccgaactgagaggttgatcggccacattgggactgagacacggcccaaactcctacgggaggcagcagtagggaatcttccacaatggacgaaagtctgatggagcaacgccgcgtgagtgaagaaggttttcggatcgtaaaactctgttgttagagaagaacgtgtgtgagagtaactgttcatgcagtgacggtatctaaccagaaagccacggctaactacgtgccagcagccgcggtaatacgtaggtggcaagcgttgtccggatttattgggcgtaaagggaacgcaggcggttttttaagtctgatgtgaaagccttcggcttaaccgaagtcgtgcattggaaactggaagacttgagtgcagaagaggagagtggaactccatgtgtagcggtgaaatgcgtagatatatggaagaacaccagtggcgaaagcggctctctggtctgtaactgacgctgaggttcgaaagcatgggtagcaaacaggattagataccctggtagtccatgccgtaaacgatgaatgctaagtgttggagggtttccgcccttcagtgctgcagttaacgcattaagcattccgcctggggagtacgatcgcaagattgaaactcaaaggaattgacgggggcccgcacaagcggtggagcatgtggtttaattcgaagcaacgcgaagaaccttaccaggtcttgacatcttctgccaatctaagagattagatgttcccttcggggacagaatgacaggtggtgcatggttgtcgtcagctcgtgtcgtgagatgttgggttaagtcccgcaacgagcgcaacccttattactagttgccagcattaagttgggcactctagtgagactgccggtgacaaaccggaggaaggtggggatgacgtcaaatcatcatgccccttatgacctgggctacacacgtgctacaatggacagtacaacgagtcgcaagaccgcgaggtcaagctaatctcttaaaactgttctcagttcggattgtaggctgcaactcgcctacatgaagtcggaatcgctagtaatcgcggatcagcatgccgcggtgaatacgttcccgggccttgtacacaccgcccgtcacaccatgagagtttgtaacacccaaagccggtgaggtaaccttttggagccagccgtctaaggtgggacagatgattggggtg

SEQ ID NO: 1769 - DNA, 1406 bp, Lactobacillus hordei
gatgcttgcattcacgaaagttttgagtggcgaacgggtgagtaacacgtgggtaacctgcccagaagagggggataacacttggaaacaggtgctaataccgcataataacaaaaaccgcatggtttttgtttgaaagatggttttgctatcacttctggatggacccgcggcgtattagctagttggtaaggtaaaggcttaccaaggcaatgatacgtagccgaactgagaggttgatcggccacattgggactgagacacggcccaaactcctacgggaggcagcagtagggaatcttccacaatggacgaaagtctgatggagcaacgccgcgtgagtgaagaaggttttcggatcgtaaaactctgttgttagagaagaacgtgtgtgagagtaactgctcatgcagtgacggtatctaaccagaaagccacggctaactacgtgccagcagccgcggtaatacgtaggtggcaagcgttgtccggatttattgggcgtaaagggaacgcaggcggttttttaagtctgatgtgaaagccttcggcttaaccgaagtcatgcattggaaactgaaagacttgagtgcagaagaggagagtggaactccatgtgtagcggtgaaatgcgtagatatatggaagaacaccagtggcgaaagcggctctctggtctgtaactgacgctgaggttcgaaagtgtgggtagcaaacaggattagataccctggtagtccacaccgtaaacgatgaatgctaagtgttggagggtttccgcccttcggtgctgcagctaacgcattaagcattccgcctggggagtacgaccgcaaggttgaaactcaaaggaattgacgggggcccgcacaagcggtggagcatgtggtttaattcgaagcaacgcgaagaaccttaccaggtcttgacatcttctgacaacctaagagattaggtgttcccttcggggacagaatgacaggtggtgcatggttgtcgtcagctcgtgtcgtgagatgttgggttaagtcccgcaacgagcgcaacccttattactagttgccagcatttagttgggcactctagtgagactgccggtgacaaaccggaggaaggtggggatgacgtcaaatcatcatgccccttatgacctgggctacacacgtgctacaatggacggtacaacgagtcgcgaaaccgcgaggtttagctaatctcttaaagccgttctcagttcggattgtaggctgcaactcgcctacatgaagtcggaatcgctagtaatcgcggatcagcatgccgcggtgaatacgttcccgggccttgtacacaccgcccgtcacaccatgagagtttgtaacacccaaagccggtgaggtaaccatttatggagccagccgtctaag

SEQ ID NO: 1770 - DNA, 1481 bp, Lactobacillus sucicola
gacgaacgctggcggcgtgcctaatacatgcaagtcgtacgcaaaactttctctgagtgttcgcactcgctgaaagatttgagtggcgaacgggtgagtaacacgtgggtaacctgcccagaagaaggggataacacttggaaacaggtgctaataccgtataacaacaaagaccgcatggtctttgtttaaaagatggttctgctatcacttctggatggacccgcggcgtattagctagttggtgaggtaatggctcaccaaggcaatgatacgtagccgaactgagaggttgatcggccacattgggactgagacacggcccaaactcctacgggaggcagcagtagggaatcttccacaatggacgaaagtctgatggagcaacgccgcgtgagtgaagaaggttttcggatcgtaaaactctgttgttagagaagaacgtgtgtgagagtaactgttcatgcagtgacggtatctaaccagaaagccacggctaactacgtgccagcagccgcggtaatacgtaggtggcaagcgttgtccggatttattgggcgtaaagggaacgcaggcggttttttaagtctgatgtgaaagccttcggcttaaccgaagtcgtgcattggaaactggaagacttgagtgcagaagaggagagtggaactccatgtgtagcggtgaaatgcgtagatatatggaagaacaccagtggcgaaagcggctctctggtctgtaactgacgctgaggttcgaaagcatgggtagcaaacaggattagataccctggtagtccatgccgtaaacgatgaatgctaagtgttggagggtttccgcccttcagtgctgcagctaacgcattaagcattccgcctggggagtacgatcgcaagattgaaactcaaaggaattgacgggggcccgcacaagcggtggagcatgtggtttaattcgaagcaacgcgaagaaccttaccaggtcttgacatcttctgccaatctgagagatcagatgttcccttcggggacagaatgacaggtggtgcatggttgtcgtcagctcgtgtcgtgagatgttgggttaagtcccgcaacgagcgcaacccttattactagttgccagcatttagttgggcactctagtgagactgccggtgacaaaccggaggaaggtggggatgacgtcaaatcatcatgccccttatgacctgggctacacacgtgctacaatggacagtacaacgagtcgcaagaccgcgaggtcaagctaatctcttaaagctgttctcagttcggattgtaggctgcaactcgcctacatgaagtcggaatcgctagtaatcgcggatcagcatgccgcggtgaatacgttcccgggccttgtacacaccgcccgtcacaccatgagagtttgtaacacccaaagccggtgaggtaaccttttggagccagccgtctaaggtgggacagatgattggggtg

SEQ ID NO: 1771 - DNA, 1481 bp, Lactobacillus uvarum
gacgaacgctggcggcgtgcctaatacatgcaagtcgtacgcaaaactttcaccgagtgcttgcactcaccgaaagttttgagtggcgaacgggtgagtaacacgtgggtaacctgcccagaagaaggggataacacttggaaacaggtgctaataccgtataacaacaaagaccgcatggtctttgtttaaaagatggttctgctatcacttctggatggacccgcggcgtattagctagttggtgaggtaatggctcaccaaggcaatgatacgtagccgaactgagaggttgatcggccacattgggactgagacacggcccaaactcctacgggaggcagcagtagggaatcttccacaatggacgaaagtctgatggagcaacgccgcgtgagtgaagaaggttttcggatcgtaaaactctgttgttagagaagaacgtgtgtgagagtaactgttcatgcagtgacggtatctaaccagaaagccacggctaactacgtgccagcagccgcggtaatacgtaggtggcaagcgttgtccggatttattgggcgtaaagggaacgcaggcggttttttaagtctgatgtgaaagccttcggcttaaccgaagtcatgcattggaaactggaagacttgagtgcagaagaggagagtggaactccatgtgtagcggtgaaatgcgtagatatatggaagaacaccagtggcgaaagcggctctctggtctgtaactgacgctgaggttcgaaagcatgggtagcaaacaggattagataccctggtagtccatgccgtaaacgatgaatgctaagtgttggagggtttccgcccttcagtgctgcagctaacgcattaagcattccgcctggggagtacgaccgcaaggttgaaactcaaaggaattgacgggggcccgcacaagcggtggagcatgtggtttaattcgaagcaacgcgaagaaccttaccaggtcttgacatcttttgccaatctgagagatcagatgttcccttcggggacagaatgacaggtggtgcatggttgtcgtcagctcgtgtcgtgagatgttgggttaagtcccgcaacgagcgcaacccttattactagttgccagcatttagttgggcactctagtgagactgccggtgataaaccggaggaaggtggggatgacgtcaaatcatcatgccccttatgacctgggctacacacgtgctacaatggacagtacaacgagtcgcaagaccgcgaggtcaagctaatctcttaaagctgttctcagttcggattgtaggctgcaactcgcctacatgaagtcggaatcgctagtaatcgcggatcagcatgccgcggtgaatacgttcccgggccttgtacacaccgcccgtcacaccatgagagtttgtaacacccaaagccggtgaggtaaccttttggagccagccgtctaaggtgggacagatgattggggtg

SEQ ID NO: 1772 - DNA, 1479 bp, Lactobacillus vini
gacgaacgctggcggcgtgcctaatacatgcaagtcgaacgagactttttatttgatgcttgcatcttttaaaaagttgagtggcgaacgggtgagtaacacgtgggtaacctgccttaaagtgggggataacacttggaaacaggtgctaataccgcataaccatcaaaaccgcctggttttgatgttaaagatggttctgctatcgctttaagatggacccgcggcgtattagctagttggtgaggtaacggcttaccaaggcaatgatacgtagccgaactgagaggttgatcggccacattgggactgagacacggcccaaactcctacgggaggcagcagtagggaatcttccacaatggacgaaagtctgatggagcaacgccgcgtgagtgaagaaggttttcggatcgtaaaactctgttgtcagagaagaacgtgtgtgagagtaactgttcacgcagtgacggtatctgaccagaaagtcacggctaactacgtgccagcagccgcggtaatacgtaggtggcaagcgttgtccggatttattgggcgtaaagggaacgcaggcggtcttttaagtctgatgtgaaagccttcggcttaaccgaagtcgggcattggaaactgggagacttgagtgcagaagaggagagtggaactccatgtgtagcggtgaaatgcgtagatatatggaagaacaccagtggcgaaagcggctctctggtctgtaactgacgctgaggttcgaaagcgtgggtagcaaacaggattagataccctggtagtccacgccgtaaacgatgaatgctaagtgttggagggtttccgcccttcagtgccgcagctaacgcattaagcattccgcctggggagtacgatcgcaagattgaaactcaaaggaattgacgggggcccgcacaagcggtggagcatgtggtttaattcgaagcaacgcgaagaaccttaccaggtcttgacatcttttgctaacctgagagatcaggtgttcccttcggggacaaaatgacaggtggtgcatggttgtcgtcagctcgtgtcgtgagatgttgggttaagtcccgcaacgagcgcaacccttattgttagttgccagcatttagttgggcactctaacgagactgccggtgacaaaccggaggaaggtggggatgacgtcaaatcatcatgccccttatgacctgggctacacacgtgctacaatggacggtacaacgagtcgcaagaccgcgaggtcaagctaatctctgaaaaccgttctcagttcggattgcaggctgcaactcgcctgcatgaagtcggaatcgctagtaatcgcggatcagcatgccgcggtgaatacgttcccgggccttgtacacaccgcccgtcacaccatgagagtttgtaacacccaaagccggtggggtaacctttgggagccagccgtctaaggtgggacagatgattggggtg

SEQ ID NO: 1773 - DNA, 1495 bp, Lacunisphaera limnophila
gctcagaatgaacgctggcggcgtggttaagacatgcaagtcgaacggtttttcaggtgtagcaatacatttgaaaagcagtggcgaacgggtgcgtaacacgtgaacaatctaccatttagtgtggaatagctcggcgaaagccggattaataccgcatgtggttggctttctcctgaaagccatactaaagccggggaccgcaaggcctggcgctaattgaggagttcgcggcctatcagctagttggcgaggtaacggctcaccaaggctaagacgggtagctgatctgagaggatgatcagccacactggaactgagacacggtccagacacctacgggtggcagcagtttcgaatcattcacaatgggcgaaagcctgatggtgcgacgccgcgtgagggatgaaggtcttcggattgtaaacctctgtcactggggagaaaacgcttcaatttaatagattgaagcctgatttaacccggagaggaagcagtggctaactctgtgccagcagccgcggtaatacagagactgcaagcgttattcggattcactgggcgtaaagggtgcgcaggcggttgggtgtgtcagatgtgaaatcccgaggctcaacctcggaactgcgtctgaaactactcgactagagtactggagagggtaacggaattcacggtgtagcagtgaaatgcgtagatatcgtgaggaacaccagaggcgaaggcggttacctggacagttactgacgctcaggcacgaaagcatggggagcaaaagggattagatacccctgtagtccatgccctaaacggtgcacactaggtcttagcggattcgaccccactagggcccaagctaacgcgttaagtgtgccgcctgaggactacggtcgcaagactaaaactcaaaggaattgacgggggcccgcacaagcggtggagcatgtggctcaattcgatgcaacgcgaagaaccttaccaggccttgacatgcactagaccgacgctgaaaggcgtcttcccttcggggctggtgcacaggtgctgcatggctgtcgtcagctcgtgtcgtgagatgttgcgttaagtcgcgcaacgagcgcaacccctgtccttagttgccatcaggtaaagctgggcactctagggagacaaaccctctctgagggtgggaaggtggggatgacgtcaagtcaggatggcccttacggcctgggctgcacacgtgctacaatgctcggtacagagggacgcaataccgcgaggtggagcaaatcccaaaaaccgagcccagttcagattgcagtctgcaactcgactgcatgaagccggaatcgctagtaatggcgtatcagctacgacgccgtgaatacgttcccgggccttgtacacaccgcccgtcacgtcatgaaagccggttttgcccgaagtgcgtttgccaaccagcaatggaggcggcgccctaaggtgaggctggtgattgggacgaagtcgt

SEQ ID NO: 1774 - DNA, 1453 bp, Lamprocystis purpurea
attgaacgctggcggcatgcctaacacatgcaagtcgaacgcgaaagtcctttggggcgagtagagtggcggacgggtgagtaatgcgtgggaatctgcctggcagtgggggacaacccggggaaactcgggctaataccgcatacgacctacgggtgaaaggggggtttcggcctctcgctgcgagatgagcccacgtccgattagctagttggcagggtaagagcctaccaaggcgacgatcggtagctggtctgagaggatgatcagccacactgggactgagacacggcccagactcctacgggaggcagcagtggggaatattggacaatgggcgcaagcctgatccagcaatgccgcgtgtgtgaagaaggcctgcgggttgtaaagcactttcagtggggaagaagtcgtttgggataataccctgggcgattgacgttacccacaaaagaagcaccggctaactccgtgccagcagccgcggtaatacggagggtgcaagcgttaatcggaatcactgggcgtaaagcgcacgtaggcggcggcgtcagtcagatgtgaaagccccgggctcaacctgggaacggcatttgatactgcgcggctcgagtctgctagaggggggtggaattccaggtgtagcggtgaaatgcgtagatatctggaggaacaccagtggcgaaggcggccccctggagcaagactgacgctgaggtgcgaaagcgtggggagcaaacaggattagataccctggtagtccacgcggtaaacgatgtcaactagccgttgggtccatttaagggcttagtggcgcagctaacgcgataagttgaccgcctggggagtacggccgcaaggttaaaactcaaaggaattgacgggggcccgcacaagcggtggagcatgtggtttaattcgatgcaacgcgaagaaccttaccagcccttgacatccttggaatctggcggagacgctggagtgccttcgggagccaagagacaggtgctgcatggctgtcgtcagctcgtgtcgtgagatgttgggttaagtcccgtaacgagcgcaacccttgtccttagttgccagcacgtcatggtgggaactctaaggagactgccggtgataaaccggaggaaggtggggacgacgtcaagtcatcatggcccttatgggctgggctacacacgtgctacaatggtcggtacagagggacgccaacccgcgagggggagccaatcccagaaaaccggtcgtagtccggattgcagtctgcaactcgactgcatgaagtcggaatcgctagtaatcgcgaatcagcatgtcgcggtgaatacgttcccgggccttgtacacaccgcccgtcacaccatgggagttggttgcaccagaagtaggtagcttaaccttcgggagggcgcttaccacggtgtggtcaatgactggggtg

SEQ ID NO: 1775 - DNA, 1458 bp, Laribacter hongkongensis
attgaacgctggcggcatgctttacacatgcaagtcgaacggtaacagggacttcggtctgctgacgagtggcgaacgggtgagtaatgcatcggaacgtaccgagtaatgggggataacgcatcgaaaggtgtgctaataccgcatacgccctgagggggaaagcgggggatcgaaagacctcgcgttattcgagcggccgatgccggattagctagttggtggggtaaaggctcaccaaggcgacgatccgtagcaggtctgagaggatgatctgccacactgggactgagacacggcccagactcctacgggaggcagcagtggggaattttggacaatgggggcaaccctgatccagccatgccgcgtgtctgaagaaggccttcgggttgtaaaggacttttgtcagggaggaaatccctaaggctaatacccttgggggatgacagtacctgaagaataagcaccggctaactacgtgccagcagccgcggtaatacgtagggtgcaagcgttaatcggaattactgggcgtaaagcgtgcgcaggcggtttgaaaagtcagctgtgaaagccccgggctcaacctgggaactgcggttgaaactctcaagctagagtgcgtcagaggggggtggaattccacgtgtagcagtgaaatgcgtagagatgtggaggaacaccaatggcgaaggcagccccctgggatgacactgacgctcatgcacgaaagcgtggggagcaaacaggattagataccctggtagtccacgccctaaacgatgtcgactagccgttggagatttcggtttctggtggcgcagctaacgcgtgaagtcgaccgcctggggagtacggtcgcaagattaaaactcaaaggaattgacgggggcccgcacaagcggtggatgatgtggattaattcgatgcaacgcgaaaaaccttacctggtcttgacatgtaccgaacctcgaagagatttgagggtgcccgaaagggagcggtaacacaggtgctgcatggctgtcgtcagctcgtgtcgtgagatgttgggttaagtcccgcaacgagcgcaacccttgtcattagttgccagcattaagttgggcactctaatgagactgccggtgacaaaccggaggaaggtggggatgacgtcaagtcctcatggcccttatgaccagggcttcacacgtcatacaatggtcggtacagagggtcgctaagccgcgaggtagtgccaatctcataaaaccgatcgtagtccggatcgcagtctgcaactcgactgcgtgaagtcggaatcgctagtaatcgcggatcagcatgtcgcggtgaatacgttcccgggccttgtacacaccgcccgtcacaccatgggagtggaatccgccagaagtgggtagggtaaccgtaaggagcccgcttaccacggtaggtttcatgactggggtg

SEQ ID NO: 1776 - DNA, 1453 bp, Lautropia mirabilis
attgaacgctggcggcatgctttacacatgcaagtcgaacggcagcgcgggcttcggcctggcggcgagtggcgaacgggtgagtaatacatcggaacgtgcccagtagtgggggatagctcggcgaaagccggattaataccgcatacgacctgagggtgaaagcgggggatcttcggacctcgcgctattggagcggccgatggcagattagctagttggtggggtaaaggcctaccaaggcgacgatctgtagctggtctgagaggacgaccagccacactgggactgagacacggcccagactcctacgggaggcagcagtggggaattttggacaatgggcgaaagcctgatccagcaatgccgcgtgtgtgatgaaggccttcgggttgtaaagcacttttggcgggaacgaaaaggactgtgccaataccacggttcgatgacggtacccgcagaataagcaccggctaactacgtgccagcagccgcggtaatacgtagggtgcaagcgttaatcggaattactgggcgtaaagagtgcgcaggcggttttgcaagaccgatgtgaaatccccgggcttaacctgggaactgcattggtgactgcaaggctagagtgtgtcagagggaggtggaattccgcatgtagcagtgaaatgcgtagatatgcggaggaacaccgatggcgaaggcagcctcctgggataacactgacgctcatgcacgaaagcgtggggagcaaacaggattagataccctggtagtccacgccctaaacgatgtctactagttgtcggggattaatttccttggtaacgcagctaacgcgtgaagtagaccgcctggggagtacggtcgcaagattaaaactcaaaggaattgacggggacccgcacaagcggtggatgatgtggattaattcgatgcaacgcgaaaaaccttacctacgcttgacatgtccggaaccctgaagagatttgggggtgctcgaaagagagccggaacacaggtgctgcatggctgtcgtcagctcgtgtcgtgagatgttgggttaagtcccgcaacgagcgcaacccttatcattagttgctacgcaagggcactctaatgagactgccggtgacaaaccggaggaaggtggggatgacgtcaagtcctcatggcccttatgtgtagggcttcacacgtcatacaatggtcggtacagagggttgcgaagccgcgaggtggagccaatcccaaaaaaccgatcgtagtccggattgcagtctgcaactcgactgcatgaagtcggaatcgctagtaatcgcggatcagcatgccgcggtgaatacgttcccgggtcttgtacacaccgcccgtcacaccatgggagtgggttttaccagaagtaggtagcttaaccgcaaggagggcgcttaccacggtagggctcatgactggggtg

SEQ ID NO: 1777 - DNA, 1474 bp, Lawsonia intracellularis
  misc_feature (518)..(518): n is a, c, g, or t
  misc_feature (521)..(522): n is a, c, g, or t
attgaacgctggcggcgtgcttaacacatgcaagtcgaacgtgaaagtcttcgggatgagtaaagtggcgcacgggtgagtaacgcgtggataatctaccttcgagacggggataacggctggaaacggtcgctaataccggataaccattatggtaaaaagttgtagtgcaaagggtagcctctgtatgtaacgtatcgcttgaagatgagtccgcgtcccattagctagttggtgaggtaaatgctcaccaaggcgatgatgggtagccgatctaagaggataatcggccacactggaactggaacacggtccagactcctacgggaggcagcagtggggaatattgcgcaatgggcgaaagcctgacgcagcgacgccgcgtgagggatgaaggtctttggatcgtaaacctctgtcaggggggaagaaatggatgggctctaatagggtctatttttgacggtacccccagaggaagcaccggctaactccgtgccagcagccgcggtaatacnganngtgcaagcgttaatcggaattactgggcgtaaagcgcgcgtaggtggttatataagtcaggggtgaaagcccaccgcttaacggtggaacagcctttgatactgtataacttgagtatcggagagggtggcggaattccaggtgtaggggtgaaatccgtagatatctggaggaacaccagtggcgaaggcggccacctggacgataactgacactgaggtgcgaaagcgtggggagcaaacaggattagataccctggtagtccacgctgtaaacgatgggtgctaggtgctggggagttatcttcggtgccgtagctaacgcgttaagcaccccgcctggggagtacggtcgcaaggctgaaactcaaagaaattgacgggggcccgcacaagcggtggagtatgtggtttaattcgatgcaacgcgaagaaccttacccaggcttgacatctgagggactcttaagagattaagaggtgcctttcggggagcctcaagacaggtgctgcatggctgtcgtcagctcgtgccgtgaggtgttgggttaagtcccgcaacgagcgcaacccttatctttagttgccatcaagtaaagttgggcactctagagagactgctccggttaacggggaggaaggtggggacgacgtcaagtcatcatggcccttacgcctggggctacacacgtactacaatggtgcacacaaagggcagcaagaccgcaaggtggagccaatcccaaaaaatgcatctcagtccggattggagtctgcaactcgactccatgaagtcggaatcgctagtaatccgagatcagcatgctcgggtgaatgcgttcccgggccttgtacacaccgcccgtcacaccacgaaagttggttttacccaaagccggcgagctaacgagcaatcgaggcagtcgtctacggtagggctaatgattggggtg

SEQ ID NO: 1778 - DNA, 1429 bp, Lebetimonas natsushimae
agtgaacgctggcggcatgcttaacacatgcaagtcgaggggcagcagtaggaaacttcggtttcctagctggcgaccggcggacgggtgagtaacacgtagctacttgccccacagtgggggataacagtccgaaaggactgctaataccgcatacacccgagaggggaaagcctttaaggcgctgtgggatagggctgcggcgtatcagctagttggtggggtaacggcctaccaaggcgatgacgcgtagctggtctgagaggatgatcagccacactggaactgagacacggtccagactcctacgggaggcagcagtggggaatattgggcaatgggcgaaagcctgacccagcaatgccgcgtggaggaagacgcccttcggggtgtaaactccttttgtaggggaagaagctgacggtaccctacgaataagctccggctaactccgtgccagcagccgcggtaatacggggggagcgagcgttactcggaatcactgggcgtaaagggtgcgtaggcggcttggtaagttaggagtgaaagcccacagctcaactgtggaactgcttctaaaactgctaagctagagtccgggagaggctgcgggaattcctggtgtaggggtgaaatccgtagagatcaggaggaatgccgaaagcgaaggcgcgcagctggaacggtactgacgctgaggcacgaaagcgtggggagcaaacaggattagataccctggtagtccacgccctaaacgatggccactagtggttggggggacagtcccccagtcacgcagctaacgcgataagtggcccgcctggggagtacggccgcaaggctaaaactcaaaggaatagacggggacccgaacaagcggtggagcatgtggtttaattcgaagatacgcgaagaaccttacctgggcttgacatccggggaatcccccagagatgggggagtgctaacttcggttagaaccccgagacaggtgctgcatggctgtcgtcagctcgtgtcgtgagatgttgggttaagtcccgcaacgagcgcaacccctgcccttagttggaaacagttcggctgtccactctaaggggactgcccgggcaaccgggaggaaggtggggatgacgtcaagtcatcatggcccttatgtccagggcgacacacgtgctacaatggccaggacagagagaggcaataccgcgaggtggagcaaatctctaaacctggtcccagttcggattgcagtctgcaactcgactgcatgaaggcggaatcgctagtaatcgcggatcagccatgccgcggtgaatacgttcccgggtcttgtactcaccgcccgtcacaccatgggagttgtgctcacccgaagtcggtatcccaaagattggggccgccgacggtgggcacagcgactggggtg

SEQ ID NO: 1779 - DNA, 1460 bp, Leeia oryzae
attgaacgctggcggaatgctttacacatgcaagtcgaacggcagcacgggtgcttgcacctggtggcgagtggcgaacgggtgagtaatgcatcggaacgtgccgtatagtgggggataacgcatcgaaaggtgtgctaataccgcatacgccctgagggggaaagtgggggaccgtaaggcctcacgctatacgagcggccgatgtccgattagctagttggtggggtaaaggctcaccaaggcgacgatcggtagctggtctgagaggacgaccagccacactgggactgagacacggcccagactcctacgggaggcagcagtggggaattttggacaatgggggaaaccctgatccagccattccgcgtgagtgaagaaggccttcgggttgtaaagctcttttgtcagggaggaaatccttaacgttaataccgttgggggatgacagtacctgaagaataaggaccggctaactacgtgccagcagccgcggtaatacgtagggtccaagcgttaatcggaattactgggcgtaaagcgtgcgcaggcggctgattaagccagatgtgaaatccccgggctcaacctgggaactgcgtttggaactggtcagctagagtacgtcagaggggggtagaattccacgtgtagcagtgaaatgcgtagagatgtggaggaataccgatggcgaaggcagccccctgggatgatactgacgctcatgcacgaaagcgtggggagcaaacaggattagataccctggtagtccacgccctaaacgatgtctactagttgtcgggggaggaatcctttggtaacgaagctaacgcgagaagtagaccgcctggggagtacggtcgcaagattaaaactcaaaggaattgacgggggcccgcacaagcggtggatgatgtggattaattcgatgcaacgcgaaaaaccttacctacccttgacatgccaggaatcttgcagagatgtgagagtgctcgaaagagaacctgggcacaggtgctgcatggctgtcgtcagctcgtgtcgtgagatgttgggttaagtcccgcaacgagcgcaacccttgccattagttgctaccatttagttgagcactttaatgggactgccggtgacaaaccggaggaaggtggggatgacgtcaagtcctcatggcccttatgggtagggcttcacacgtcatacaatggtcggtacagagggttgccaacccgcgagggggagctaatctcagaaagccgatcgtagtccggatcgcagtctgcaactcggctgcgtgaagtcggaatcgctagtaatcgcggatcagcatgtcgcggtgaatacgttcccgggccttgtacacaccgcccgtcacaccatgggagtggaatccgccagaagtaggtagcctaaccgtaaggagggcgcttaccacggtaggtttcatgactggggtg

SEQ ID NO: 1780 - DNA, 1450 bp, Leeuwenhoekiella palythoae
gatgaacgctagcggcaggcctaacacatgcaagtcgaacggtaacaggaattagcttgctaatttgctgacgagtggcgcacgggtgcgtaacgcgtatgcaatctgccttgtactggagtatagcccagggaaacttggattaatcctccatagtctattgatatggcatcgtattaatagtaaaggttacggtacaagatgagcatgcgtcctattagctagtaggtgtggtaacggcacacctaggcaacgataggtaggggtcctgagagggagatcccccacactggtactgagacacggaccagactcctacgggaggcagcagtgaggaatattggacaatgggcgggagcctgatccagccatgccgcgtgcaggaagactgccctatgggttgtaaactgcttttatacgggaagaataagtgttacgtgtagcacgatgacggtaccgtaagaataagcaccggctaactccgtgccagcagccgcggtaatacggagggtgcaagcgttatccggaatcattgggtttaaagggtccgtaggtggactaataagtcagtggtgaaagtctgcagcttaactgtagaattgccattgatactgttagtcttgaattgttgtgaagtaactagaatatgtagtgtagcggtgaaatgcatagatattacatagaataccgattgcgaaggcaggttactaacaatatattgacactgatggacgaaagcgtggggagcgaacaggattagataccctggtagtccacgccgtaaacgatggttactagctgtccggctcaattgagggctgggtggccaagcgaaagtgataagtaacccacctggggagtacgttcgcaagaatgaaactcaaaggaattgacgggggcccgcacaagcggtggagcatgtggtttaattcgatgatacgcgaggaaccttaccagggcttaaatgtagtctgacagatttggaaacagatttttcttcggacagattacaaggtgctgcatggttgtcgtcagctcgtgccgtgaggtgtcaggttaagtcctataacgagcgcaacccctgttgttagttgccagcgagtaatgtcgggaactctagcaagactgccggtgcaaaccgtgaggaaggtggggatgacgtcaaatcatcacggcccttacgtcctgggccacacacgtgctacaatggtaggtacagagagcagccacgtcgcaaggcggagcgaatctataaaacctatcacagttcggatcggggtctgcaactcgaccccgtgaagctggaatcgctagtaatcgcatatcagccatgatgcggtgaatacgttcccgggccttgtacacaccgcccgtcaagccatggaagctgggggtacctgaagtccgtcaccgcaaggagcggcctagggtaagaccggtaactggggct

SEQ ID NO: 1781 - DNA, 1466 bp, Legionella adelaidensis
attgaacgctggcggcatgcttaacacatgcaagtcgaacggcagcatggtctagcttgctagactgatggcgagtggcgaacgggtgagtaacgcgtaggaatataccttagagagggggataacctggggaaactcaggctaataccgcatacgttctatggaataaagctggggaccattaggcctggcgctttaagaatagcctgcgtccgattagctagttggtggggtaagggcctaccaaggcgacgatcggtagctggtctgagaggatgatcagccacactgggactgagacacggcccagactcctacgggaggcagcagtggggaatattggacaatgggggcaaccctgatccagcaatgccgcgtgtgtgaagaaggcctgagggttgtaaagcactttcagtggggaggaggattgataggttaagagctaattgattggacgttacccacagaagaagcaccggctaactccgtgccagcagccgcggtaatacggagggtgcgagcgttaatcggaattactgggcgtaaagggtgcgtaggtggtttattaagttagctgtgaaatacctgggcttaacctgggcaggtcagctaagactggtagactggagtataggagagggtagtggaatttccggtgtagcggtgaaatgcgtagagatcggaaggaacaccagtggcgaaggcggctacctggcctaatactgacactgaggcacgaaagcgtggggagcaaacaggattagataccctggtagtccacgctgtaaacgatgtcaactagctgttggtcatatgaaaatgattagtggcgcagcaaacgcgataagttgaccgcctggggagtacggtcgcaagattaaaactcaaaggaattgacgggggcccgcacaagcggtggagcatgtggtttaattcgatgcaacgcgaagaaccttacctacccttgacatacagtgaatctggcagagatgctggagtgccttcgggaacactgatacaggtgctgcatggctgtcgtcagctcgtgtcgtgagatgttgggttaagtcccgtaacgagcgcaacccttatccttagttgccagcgcgtagaggcgggaactctaaggagactgccggtgacaaaccggaggaaggcggggacgacgtcaagtcatcatggcccttacgggtagggctacacacgtgctacaatggccggtacagaggggagcgaaggagtgatctggagcgaatcttagaaagccggtcgtagtccggattggagtctgcaactcgactccatgaagtcggaatcgctagtaatcgcgaatcagcatgtcgcggtgaatacgttcccgggccttgtacacaccgcccgtcacaccatgggagtgggctgcaccagaagtagatagtctaaccttcggggggacgtttaccacggtgtggttcatgactggggtg

SEQ ID NO: 1782 - DNA, 1464 bp, Legionella anisa
tgaacgctggcggcatgcttaacacatgcaagtcgaacggcagcataatctagcttgctagattgatggcgagtggcgaacgggtgagtaacgcgtaggaatatgccttgaagtgggggacaacttggggaaactcaagctaataccgcataatgtctaaggacgaaagctggggaccttcgggcctggcgctttaagattagcctgcgtccgattagctagttggtggggtaagggcctaccaaggcgacgatcggtagctggtctgagaggatggccagccacactggaactgagacacggtccagactcctacgggaggcagcagtggggaatattggacaatggggggaaccctgatccagcaatgccgcgtgtgtgaagaaggcctgagggttgtaaagcactttcagtggggaggagggttgattggttaagagctgattaactggacgttacccacagaagaagcaccggctaactccgtgccagcagccgcggtaatacggagggtgcaagcgttaatcggaattactgggcgtaaagcgtgcgtaggtggttgattaagttatctgtgaaatccctgggcttaacctgggcaggtcagatgatactggttgactcgagtatgggagagggtagtggaatttccggtgtagcggtgaaatgcgtagagatcggaaggaacaccagtggcgaaggcggctacctggcctaatactgacactgaggcacgaaagcgtggggagcaaacaggattagataccctggtagtccacgctgtaaacgatgtcaactagctgttggttatatgaaaataattagtggcgcagcaaacgcgataagttgaccgcctggggagtacggtcgcaagattaaaactcaaaggaattgacgggggcccgcacaagcggtggagcatgtggtttaattcgatgcaacgcgaagaaccttacctacccttgacatacagtgaattttgcagagatgcattagtgccttcgggaacactgatacaggtgctgcatggctgtcgtcagctcgtgtcgtgagatgttgggttaagtcccgtaacgagcgcaacccttgtccttagttgccagcacgtaaaggtgggaactctaaggagactgccggtgacaaaccggaggaaggcggggatgacgtcaagtcatcatggcccttacgggtagggctacacacgtgctacaatgggtgatacagagggaagcgaaggggtgacctggagctaatcttagaaagtcgctcgtagtccggattggagtctgcaactcgactccatgaagtcggaatcgctagtaatcgcgaatcagcatgtcgcggtgaatacgttcccgggccttgtacacaccgcccgtcacaccatgggagtgggctgcaccagaagtagatagtctaaccttcggggggacgtttaccacggtgtggttcatgactggggtg

SEQ ID NO: 1783 - DNA, 1449 bp, Legionella beliardensis
attgaacgctggcggcatgcttaacacatgcaagtcgaacggcaacagggtctagcttgctagactgctggcgagtggcgaacgggtgagtaacgcgtaggaatatgccttaaagagtgggacaacttggggaaactcaagctaataccgcataatttctgaggaaaaaagctggggaccttcgggcctggcgctttaagattagcctgcgtccgattagctagttggtggggtaaaggcttaccaaggcgacgatcggtagctggtctgagaggatgaccagccacactgggactgagacacggcccagactcctacgggaggcagcagtggggaatattggacaatggggggaaccctgatccagcaatgccgcgtgtgtgaagaaggcctgagggttgtaaagcactttcagtggggaggagtggagtttaggttaagagctagaacttcggacgttacccacagaagaagcaccggctaactccgtgccagcagccgcggtaatacggagggtgcaagcgttaatcggaattactgggcgtaaagggtgcgtaggtggtctgataagttagctgtgaaattcctgggcttaacctggggtggtcagctaagactgttagactggagtatgggagagggtagtggaatttccggtgtagcggtgaaatgcgtagagatcggaaggaacaccagtggcgaaggcggctacctggcctaatactgacactgaggcacgaaagcgtggggagcaaacaggattagataccctggtagtccacgctgtaaacgatgtcaactagctgttggtcatatgaatgtgattagtggcgcagcaaacgcggtaagttgaccgcctggggagtacggtcgcaagattaaaactcaaaggaattgacgggggcccgcacaagcggtggagcatgtggtttaattcgatgcaacgcgaagaaccttacctacccttgacatacagtgaaaccagcagagatgccggtgtgccgcaaggaacactgatacaggtgctgcatggctgtcgtcagctcgtgtcgtgagatgttgggttaagtcccgtaacgagcgcaacccttgttcttagttaccagcacgtaaaggtggggactctaaggagactgccggtgacaaaccggaggaaggcggggacgacgtcaagtcatcatggcccttacgggtagggctacacacgtgctacaatggccggtacagagggcagcgaaggggcgacctggagcaaatcctttaaagctggtcgtagtccggattggagtctgcaactcgactccatgaagtcggaatcgctagtaatcgcgaatcagcatgtcgcggtgaatacgttcccgggccttgtacacaccgcccgtcacaccatgggagtgggttgcaccagaagtagatagtctaaccttcgggggacgtttaccacggtgt

SEQ ID NO: 1784 - DNA, 1458 bp, Legionella birminghamensis
gatggcggcatgcttaacacatgcaagtcgaacggcagcacgacctagcttgctaggttggtggcgagtggcgaacgggtgagtaacgcgtaggaatataccttagagagggggataacctggggaaactcaggctaataccgcgtacgttcttcggataaagctggggaccgcaaggcctggcgctttaagaatagcctgcgtccgattagctagttggtggggtaagggcctaccaaggcgacgatcggtagctggtctgagaggatgatcagccacactgggactgagacacggcccagactcctacgggaggcagcagtggggaatattggacaatgggggcaaccctgatccagcaatgccgcgtgtgtgaagaaggcctgagggttgtaaagcactttcagtggggaggagggttgataggttaagagctaattaactggacgttacccacagaagaagcaccggctaactccgtgccagcagccgcggtaatacggagggtgcgagcgttaatcggaattactgggcgtaaagggtgcgtaggtggtttaataagttaactgtgaaatccctgggctcaacctgggcaggtcaggtatgactgttagactagagtatgggagagggtagtggaatttccggtgtagcggtgaaatgcgtagagatcggaaggaacaccagtggcgaaggcggctacctggcctaatactgacactgaggcacgaaagcgtggggagcaaacaggattagataccctggtagtccacgctgtaaacgatgtcaactagctgttggtcttatgaatgagattagtggcgcagcaaacgcgataagttgaccgcctggggagtacggtcgcaagattaaaactcaaaggaattgacgggggcccgcacaagcggtggagcatgtggtttaattcgatgcaacgcgaagaaccttacctacccttgacatacagtgaattttgcagagatgcggaagtgccttcgggaacactgatacaggtgctgcatggctgtcgtcagctcgtgtcgtgagatgttgggttaagtcccgtaacgagcgcaacccttattcttagttgccagcgcgtagaggcggggactctaaggagactgccggtgacaaaccggaggaaggcggggatgacgtcaagtcatcatggcccttacgggtagggctacacacgtgctacaatggccggtacagagggcagggaaggggcgacctggagcaaatccttaaaagctggtcgtagtccggattggagtctgcaactcgactccatgaagtcggaatcgctagtaatcgcgaatcagcatgtcgcggtgaatacgttcccgggccttgtacacaccgcccgtcacaccatgggagtgggctgcaccagaagtagatagtctaacctgcggggggacgtttaccacggtgtgattcatgactggggtg

SEQ ID NO: 1785 - DNA, 1467 bp, Legionella brunensis
attgaacgctggcggcatgcttaacacatgcaagtcgaacggcagcattttctagcttgctagaaagatggcgagtggcgaacgggtgagtaacgcgtaggaatatgccttaaagagtgggataacatggggaaactcatgctaataccgcataatttcttaggaaaaaagctggggaccgtaaggcctggcgctttaagattagcctgcgtccgattagctagttggtggggtaagggcctaccaaggcgacgatcggtagctggtctgagaggatggccagccacactgggactgagacacggcccagactcctacgggaggcagcagtggggaatattggacaatggggggaaccctgatccagcaatgccgcgtgtgtgaagaaggcctgagggttgtaaagcactttcagtggggaggagtggttgataggttaagagctaattgattagacgttacccacagaagaagcaccggctaactccgtgccagcagccgcggtaatacggagggtgcaagcgttaatcggaattactgggcgtaaagggtgcgtaggtggtttaataagttaactgtgaaatccctgggcttaacctgggaactgcagttaagactgttagactcgagtatgggagagggtagtggaatttccggtgtagcggtgaaatgcgtagagatcggaaggaacaccagtggcgaaggcggctacctggcctaatactgacactgaggcacgaaagcgtggggagcaaacaggattagataccctggtagtccacgctgtaaacgatgtcaactagctgttggtcttataaatgagattagtggcgcagcaaacgcgataagttgaccgcctggggagtacggtcgcaagattaaaactcaaaggaattgacgggggcccgcacaagcggtggagcatgtggtttaattcgatgcaacgcgaagaaccttacctacccttgacatacagtgaattttgcagagatgcattagtgccttcgggaacactgatacaggtgctgcatggctgtcgtcagctcgtgtcgtgagatgttgggttaagtcccgtaacgagcgcaacccttgtccttagttgccagcatgtaatggtggggactctaaggagactgccggtgacaaaccggaggaaggcggggatgacgtcaagtcatcatggcccttacgggtagggctacacacgtgctacaatggccggtacagagggcagcgaaggggtgacctggagcaaatcttttaaagctggtcgtagtccggattggagtctgcaactcgactccatgaagtcggaatcgctagtaatcgcgaatcagcatgtcgcggtgaatacgttcccgggccttgtacacaccgcccgtcacaccatgggagtgggttgcaccagaagtagatagtctaaccttcggggggacgtttaccacggtgtgattcatgactggggtg

SEQ ID NO: 1786 - DNA, 1466 bp, Legionella busanensis
tgaacgctggcggcatgcttaacacatgcaagtcgaacggcagcatgacctagcttgctaggttgatggcgagtggcgaacgggtgagtaacgcgtaggaatatgccttaaagagtgggacaacttggggaaactcaagctaataccgcataagctctgaggagtaaagctggggaccttcgggcctggcgctttaagattagcctgcgtccgattagctagttggtgaggtaagggcttaccaaggcgacgatcggtagctggtctgagaggatgaccagccacactgggactgagacacggaccagactcctacgggaggcagcagtggggaatattggacaatggggggaaccctgatccagcaatgccgcgtgtgtgaagaaggcctgagggttgtaaagcactttcagtggggaggagtgaacattcggttaagagctagatgtttggacgttacccacagaagaagcaccggctaactccgtgccagcagccgcggtaatacggagggtgcgagcgttaatcggaattactgggcgtaaagggtgcgtaggtggtttaataagttagctgtgaaattcctgggcttaacctagggtggtcagctaagactgttagacttgagtatgggagagggtagtggaatttccggtgtagcggtgaaatgcgtagagatcggaaggaacaccagtggcgaaagcggctacctggcctaatactgacactgaggcacgaaagcgtggggagcaaacaggattagataccctggtagtccacgctgtaaacgatgtcaactagctgttggtcatatgaatgtgattagtggcgcagcaaacgcggtaagttgaccgcctggggagtacggtcgcaagattaaaactcaaaggaattgacgggggcccgcacaagcggtggagcatgtggtttaattcgatgcaacgcgaagaaccttacctacccttgacatacagtgaatcttgcagagatgcgggagtgccgaaaggaacactgatacaggtgctgcatggctgtcgtcagctcgtgtcgtgagatgttgggttaagtcccgtaacgagcgcaacccttattcttagttgccagcgcgtaaaggcggggactctaaggagactgccggtgacaaaccggaggaaggcggggacgacgtcaagtcatcatggcccttacgggtagggctacacacgtgctacaatggccggtacagagggcagcgaaggggcgacctggagcaaatccttgaaagctggtcgtagtccggattggagtctgcaactcgactccatgaagtcggaatcgctagtaatcgcgaatcagcatgtcgcggtgaatacgttcccgggccttgtacacaccgcccgtcacaccatgggagtgggttgcaccagaagtagatagtctaacctttcgagggggacgtttaccacggtgtgattcatgactggggt

SEQ ID NO: 1787 - DNA, 1466 bp, Legionella cherrii
attgaacgctggcggcatgcttaacacatgcaagtcgaacggcagcatggtctagcttgctagactgatggcgagtggcgaacgggtgagtaacgcgtaggaatatgccttgaagtgggggacaacttggggaaactcaagctaataccgcataatatctaaggatgaaagctggggaccttcgggcctggcgctttaagattagcctgcgtccgattagctagttggtggggtaagggcctaccaaggcgacgatcggtagctggtctgagaggatggccagccacactggaactgagacacggtccagactcctacgggaggcagcagtggggaatattggacaatgggggcaaccctgatccagcaatgccgcgtgtgtgaagaaggcctgagggttgtaaagcactttcagtagggaggagggcatttaggttaagagctagaatgttggacgttacctacagaagaagcaccggctaactccgtgccagcagccgcggtaatacggagggtgcaagcgttaatcggaattactgggcgtaaagcgtgcgtaggtggttgattaagttatctgtgaaatccctgggcttaacctgggcaggtcagatgatactggttgactcgagtatgggagagggtagtggaatttccggtgtagcggtgaaatgcgtagagatcggaaggaacaccagtggcgaaggcggctacctggcctaatactgacactgaggcacgaaagcgtggggagcaaacaggattagataccctggtagtccacgccgtaaacgatgtcaactagctgttggttatatgaaaataattagtggcgcagcaaacgcgataagttgaccgcctggggagtacggtcgcaagattaaaactcaaaggaattgacgggggcccgcacaagcggtggagcatgtggtttaattcgatgcaacgcgaagaaccttacctacccttgacatacagtgaattttgcagagatgcattagtgccttcgggaacactgatacaggtgctgcatggctgtcgtcagctcgtgtcgtgagatgttgggttaagtcccgtaacgagcgcaacccttgtccttagttgccagcgcgtaaaggcgggaactctaaggagactgccggtgacaaaccggaggaaggcggggatgacgtcaagtcatcatggcccttacgggtagggctacacacgtgctacaatgggcgatacagagggaagcgaaggggtgacctggagctaatcttagaaagtcgctcgtagtccggattggagtctgcaactcgactccatgaagtcggaatcgctagtaatcgcgaatcagcatgtcgcggtgaatacgttcccgggccttgtacacaccgcccgtcacaccatgggagtgggctgcaccagaagtagatagtctaaccttcgggaggacgtttaccacggtgtggttcatgactggggtg

SEQ ID NO: 1788 - DNA, 1467 bp, Legionella cincinnatiensis
attgaacgctggcggcatgcttaacacatgcaagtcgaacggcagcatgacctagcttgctaggttgatggcgagtggcgaacgggtgagtaacgcgtaggaatatgccttgaagactgggataacttggggaaactcaagctaataccggatgatgtctgcggacgaaagctggggaccattttggcctggcgctttaagattagcctgcgtccgattagctagttggtggggtaagggcctaccaaggcgacgatcggtagctggtctgagaggatgaccagccacactggaactgagacacggtccagactcctacgggaggcagcagtggggaatattggacaatggggggaaccctgatccagcaatgccgcgtgtgtgaagaaggcctgagggttgtaaagcactttcagtggggaggaggattgataggttaagagctaattgattggacgttacccacagaagaagcaccggctaactccgtgccagcagccgcggtaatacggagggtgcgagcgttaatcggaattactgggcgtaaagcgtgcgtaggtggttgattaagttatctgtgaaatccctgggcttaacctgggcaggtcagatgatactggttgactcgagtatgggagagggtagtggaatttccggtgtagcggtgaaatgcgtagagatcggaaggaacaccagtggcgaaggcggctacctggcctaatactgacactgaggcacgaaagcgtggggagcaaacaggattagataccctggtagtccacgccgtaaacgatgtcaactagctgttggatatatgaatatatttagtggcgtagcaaacgcgataagttgaccgcctggggagtacggtcgcaagattaaaactcaaaggaattgacgggggcccgcacaagcggtggagcatgtggtttaattcgatgcaacgcgaagaaccttacctacccttgacatacagtggagcttgcagagatgcgagtgtgccttcgggaacactgctacaggtgctgcatggctgtcgtcagctcgtgtcgtgagatgttgggttaagtcccgtaacgagcgcaacccttgtccttagttaccagcacgtgaaggtgggaactctaaggagactgccggtgacaaaccggaggaaggcggggacgacgtcaagtcatcatggcccttacgggtagggctacacacgtgctacaatggacgatacagagggaagcgaaggggcgacctggagccaatcttagaaagtcgttcgtagtccggattggagtctgcaactcgactccatgaagtcggaatcgctagtaatcgcgaatcagcatgtcgcggtgaatacgttcccgggccttgtacacaccgcccgtcacaccatgggagtgggctgcaccagaagtagatagtctaaccttcggggggacgtttaccacggtgtggttcatgactggggtg

SEQ ID NO: 1789 - DNA, 1467 bp, Legionella clemsonensis
attgaacgctggcggcatgcttaacacatgcaagtcgaacggcagcatggtctagcttgctagactgatggcgagtggcgaacgggtgagtaacgcgtaggaatatgccttaaagagggggataacctggggaaactcaggctaataccgcataagttctgaggaagaaagctggggaccttatggcctggcgctttaagattagcctgcgtccgattagctagttggtggggtaagggcctaccaaggcgacgatcggtagctggtctgagaggatgatcagccacactgggactgagacacggcccagactcctacgggaggcagcagtggggaatattggacaatggggggaaccctgatccagcaatgccgcgtgtgtgaagaaggcctgagggttgtaaagcactttcagtggggaggagtgattgattggttaagagctgattgattggacgttacccacagaagaagcaccggctaactccgtgccagcagccgcggtaatacggagggtgcgagcgttaatcggaattactgggcgtaaagggtgcgtaggtggtttaataagttagctgtgaaatccctgggcttaacctgggaattgcaactaagactgtttaacttgagtataggagagggtagtggaatttccggtgtagcggtgaaatgcgtagagatcggaaggaacaccagtggcgaaggcggctacctggcctaatactgacactgaggcacgaaagcgtgggtagcaaacaggattagataccctggtagtccacgctgtaaacgatgtcaactagctgttggtcttatgaatgagattagtggcgcagcaaacgcgataagttgaccgcctggggagtacggtcgcaagattaaaactcaaaggaattgacgggggcccgcacaagcggtggagcatgtggtttaattcgatgcaacgcgaagaaccttacctacccttgacatacagtggagcttgcagagatgtgagtgtgccttcgggaacactgatacaggtgctgcatggctgtcgtcagctcgtgtcgtgagatgttgggttaagtcccgtaacgagcgcaacccttgtccttagttaccagcacgttgaggtggggactctaaggagactgccggtgacaaaccggaggaaggcggggatgacgtcaagtcatcatggcccttacgggtagggctacacacgtgctacaatggctagtacagagggaagcgaaggggtgacctggagcaaatcctttaaagctggtcgtagtccggattggagtctgcaactcgactccatgaagtcggaatcgctagtaatcgcgaatcagcatgtcgcggtgaatacgttcccgggccttgtacacaccgcccgtcacaccatgggagtgggttgcaccagaagtagatagtctaaccttcggggggacgtttaccacggtgtgattcatgactggggtg

SEQ ID NO: 1790 - DNA, 1466 bp, Legionella drancourtii
attgaacgctggcggcatgcttaacacatgcaagtcgaacggcagcatagtctagcttgctagatgggtggcgagtggcgaacgggtgagtaacgcgtaggaatatgccttaaagagggggacaacttggggaaactcaagctaataccgcataatgtctgaggacaaaagctggggaccttcgggcctggcgctttaagattagcctgcgtccgattagctagttggtagggtaaaggcctaccaaggcgacgatcggtagctggtctgagaggatgaccagccacactggaactgagacacggtccagactcctacgggaggcagcagtggggaatattggacaatgggggcaaccctgatccagcaatgccgcgtgtgtgaagaaggcctgagggttgtaaagcactttcagtggggaggaggattgtttgtttaagagatgaatgattggacgttacccacagaagaagcaccggctaactccgtgccagcagccgcggtaatacggagggtgcaagcgttaatcggaattactgggcgtaaagagtgcgtaggtggttgagtaagttatctgtgaaatccctgggcttaacctgggcaggtcagataatactgcttgactcgagtatgggagagggtagtggaatttccggtgtagcggtgaaatgcgtagagatcggaaggaacaccagtggcgaaggcggctacctggcctaatactgacactgaggcacgaaagcgtggggagcaaacaggattagataccctggtagtccacgccgtaaacgatgtcaactagctgttggttatataaatataattagtggcgcagcaaacgcgataagttgaccgcctggggagtacggtcgcaagattaaaactcaaaggaattgacgggggcccgcacaagcggtggagcatgtggtttaattcgatgcaacgcgaagaaccttacctacccttgacatacagtggattttgcagagatgcgaaagtgccttcgggaacactgatacaggtgctgcatggctgtcgtcagctcgtgtcgtgagatgttgggttaagtcccgtaacgagcgcaacccttattgttagttgccagcacgtaatggtgggaactctaatgagactgccggtgacaaaccggaggaaggcggggacgacgtcaagtcatcatggcccttacgggtagggctacacacgtgctacaatgggtgatacagagggaagcgaaggagtgatctggagccaatcttagaaagtcgctcgtagtccggattggagtctgcaactcgactccatgaagtcggaatcgctagtaatcgcgaatcagcatgtcgcggtgaatacgttcccgggccttgtacacaccgcccgtcacaccatgggagtgggctgcaccagaagtagatagtctaaccgcaagggggacgtttaccacggtgtggttcatgactggggtg

SEQ ID NO: 1791 - DNA, 1466 bp, Legionella drozanskii
attgaacgctggcggcatgcttaacacatgcaagtcgaacggcagcacggtctagcttgctagatgggtggcgagtggcgaacgggtgagtaacgcgtaggaatatgccttaaagattgggataacatggggaaacacatgctaataccgaatgagctcttaggaggaaagctggggaccgcaaggcctggcgctttaagattagcctgcgtccgattagctagttggtagggtaaaggcctaccaaggcgacgatcggtagctggtctgagaggatggccagccacactgggactgagacacggcccagactcctacgggaggcagcagtggggaatattggacaatgggggcaaccctgatccagcaatgccgcgtgtgtgaagaaggcctgagggttgtaaagcactttcagtggggaggaggattgattggttaagagctgattgattggacgttacctacagaagaagcaccggctaactccgtgccagcagccgcggtaatacggagggtgcgagcgttaatcggaattactgggcgtaaagggtgcgtaggtggttagataagttagctgtgaaatccccgggctcaacctgggcaggtcagctaagactgtttgactcgagtatgggagagggtagtggaatttccggtgtagcggtgaaatgcgtagagatcggaaggaacaccagtggcgaaggcggctacctggcctaatactgacactgaggcacgaaagcgtggggagcaaacaggattagataccctggtagtccacgccgtaaacgatgtcaactagttgttggccttatgaatgaggttagtgacgaagcaaacgcgataagttgaccgcctggggagtacggtcgcaagattaaaactcaaaggaattgacgggggcccgcacaagcggtggagcatgtggtttaattcgatgcaacgcgaagaaccttacctacccttgacatacagtgaattttgcagagatgtgagagtgccttcgggaacactgatacaggtgctgcatggctgtcgtcagctcgtgtcgtgagatgttgggttaagtcccgtaacgagcgcaacccttatccttagttgccagcgcgtaaaggcgggaactctaaggagactgccggtgacaaaccggaggaaggcggggacgacgtcaagtcatcatggcccttacgggtagggctacacacgtgctacaatggccggtacagagggcagcgaaggggcgacctggagcaaatctttgaaagctggtcgtagtccggattggagtctgcaactcgactccatgaagtcggaatcgctagtaatcgcgaatcagcatgtcgcggtgaatacgttcccgggccttgtacacaccgcccgtcacaccatgggagtgggttgcaccagaagtagatagtctaaccttaggggggacgtttaccacggtgtgattcatgactggggtg

SEQ ID NO: 1792 - DNA, 1467 bp, Legionella erythra
attgaacgctggcggcatgcttaacacatgcaagtcgaacggcagcacggtctagtttactagatgggtggcgagtggcgaacgggtgagtaacgcgtaggaatataccttaaagtgggggacaacttggggaaactcaagctaataccgcatagatctctgaggagagaagctggggaccttcgggcctggcgctttaagattagcctgcgtccgattagctagttggtggggtaagggcctaccaaggcgacgatcggtagctggtctgagaggatggccagccacactggaactgagacacggtccagactcctacgggaggcagcagtggggaatattggacaatggggggaaccctgatccagcaatgccgcgtgtgtgaagaaggcctgagggttgtaaagcactttcagtggggaggagggttgacaggttaagagctggttgactggacgttacccacagaagaagcaccggctaactccgtgccagcagccgcggtaatacggagggtgcgagcgttaatcggaattactgggcgtaaagggtgcgtaggtggtttgataagttatctgtgaaagccctgggcttaacctgggaactgcagataagactgttagactcgagtatgggagagggtagtggaatttccggtgtagcggtgaaatgcgtagagatcggaaggaacaccagtggcgaaggcggctacctggcctaatactgacactgaggcacgaaagcgtggggagcaaacaggattagataccctggtagtccacgctgtaaacgatgtcaactagctgttggtcttatgaatgagattagtggcgcagcaaacgcgataagttgaccgcctggggagtacggtcgcaagattaaaactcaaaggaattgacgggggcccgcacaagcggtggagcatgtggtttaattcgatgcaacgcgaagaaccttacctacccttgacatacagtgaacctttcagagatgagagggtgccttcgggagcactgatacaggtgctgcatggctgtcgtcagctcgtgtcgtgagatgttgggttaagtcccgtaacgagcgcaacccttatccttagttgccagcgcgtagaggcgggaactctagggagactgccggtgacaaaccggaggaaggcggggatgacgtcaagtcatcatggcccttacgggtagggctacacacgtgctacaatggccggtacagagggcagcgaaggggcgacctggagccaatctttaaaagccggtcgtagtccggattggagtctgcaactcgactccatgaagtcggaatcgctagtaatcgcgaatcagcatgtcgcggtgaatacgttcccgggccttgtacacaccgcccgtcacaccatgggagtgggttgcaccagaagtagatagtctaaccttaggggggacgtttaccacggtgtgattcatgactggggtg

SEQ ID NO: 1793 - DNA, 1466 bp, Legionella fallonii
attgaacgctggcggcatgcttaacacatgcaagtcgaacggcagcatagtctagcttgctagactgatggcgagtggcgaacgggtgagtaacgcgtaggaatatgccttaaagagggggacaacttggggaaactcaagctaataccgcatacgctcttaggaggaaagctggggaccttcgggcctggcgctttaagattagcctgcgtccgattagctagttggtggggtaagggcctaccaaggcgacgatcggtagctggtctgagaggatgaccagccacactggaactgagacacggtccagactcctacgggaggcagcagtggggaatattggacaatggggggaaccctgatccagcaatgccgcgtgtgtgaagaaggcctgagggttgtaaagcactttcagtggggaggaggtttgacgggttaagagctagttgaatggacgttacccacagaagaagcaccggctaactccgtgccagcagccgcggtaatacggagggtgcaagcgttaatcggaattactgggcgtaaagagtgcgtaggtggttaattaagttatctgtgaaatccctgggctcaacctgggcaggtcagataatactggttaactcgagtatgggagagggtagtggaatttccggtgtagcggtgaaatgcgtagagatcggaaggaacaccagtggcgaaggcggctacctggcctaatactgacactgaggcacgaaagcgtggggagcaaacaggattagataccctggtagtccacgccgtaaacgatgtcaactagctgttggttatatgaatataattagtggcgcagcaaacgcgataagttgaccgcctggggagtacggtcgcaagattaaaactcaaaggaattgacgggggcccgcacaagcggtggagcatgtggtttaattcgatgcaacgcgaagaaccttacctacccttgacatacagtggattttgcagagatgcattagtgccttcgggaacactgatacaggtgctgcatggctgtcgtcagctcgtgtcgtgagatgttgggttaagtcccgtaacgagcgcaacccttatccttagttgccagcgcgtaaaggcgggaactctaaggagactgccggtgacaaaccggaggaaggcggggatgacgtcaagtcatcatggcccttacgggtagggctacacacgtgctacaatggccgatacagagggcagcgaaggggcgacctggagcaaatcttagaaagtcggtcgtagtccggattggagtctgcaactcgactccatgaagtcggaatcgctagtaatcgcgaatcagcatgtcgcggtgaatacgttcccgggccttgtacacaccgcccgtcacaccatgggagtgggttgcaccagaagtagatagtctaaccttcgggaggacgtttaccacggtgtggttcatgactggggtg

SEQ ID NO: 1794 - DNA, 1466 bp, Legionella feeleii
attgaacgctggcggcatgcttaacacatgcaagtcgaacggcagcacggtctagcttgctagatgggtggcgagtggcgaacgggtgagtaacgcgtaggaatatgccttgaagtgggggataacttggggaaactcaagctaataccgcataagctctaaggaggaaagctggggaccgtaaggcctggcgcttcaagattagcctgcgtccgattagctagttggtggggtaagggcctaccaaggcgacgatcggtagctggtctgagaggatggccagccacactgggactgagacacggcccagactcctacgggaggcagcagtggggaatattggacaatgggggcaaccctgatccagcaatgccgcgtgtgtgaagaaggcctgagggttgtaaagcactttcagtggggaggaggattgacaggttaagagctagttaattggacgttacccacagaagaagcaccggctaactccgtgccagcagccgcggtaatacggagggtgcaagcgttaatcggaattactgggcgtaaagggtgcgtaggtggttgtataagttaactgtgaaatccccgggctcaacctgggcaggtcagttaagactgtatgactcgagtatgggagagggtagtggaatttccggtgtagcggtgaaatgcgtagagatcggaaggaacaccagtggcgaaggcggctacctggcccaatactgacactgaggcacgaaagcgtggggagcaaacaggattagataccctggtagtccacgctgtaaacgatgtcaactagctgttggccttatgaatgaggttagtggcgcagcaaacgcgataagttgaccgcctggggagtacggtcgcaagattaaaactcaaaggaattgacgggggcccgcacaagcggtggagcatgtggtttaattcgatgcaacgcgaagaaccttacctacccttgacatacagtgaattttgcagagatgcggaagtgccttcgggaacactgatacaggtgctgcatggctgtcgtcagctcgtgtcgtgagatgttgggttaagtcccgtaacgagcgcaacccttgtccttagttgccagcgcgtaaaggcgggaactctaaggagactgccggtgacaaaccggaggaaggcggggacgacgtcaagtcatcatggcccttacgggtagggctacacacgtgctacaatggccggtacagagggttgcgaagcggtgacgtggagctaatcttttaaagctggtcgtagtccggattggagtctgcaactcgactccatgaagtcggaatcgctagtaatcgcgaatcagcatgtcgcggtgaatacgttcccgggccttgtacacaccgcccgtcacaccatgggagtgggttgcaccagaagtagatagtctaaccttcgggaggacgtttaccacggtgtgattcatgactggggtg

SEQ ID NO: 1795 - DNA, 1465 bp, Legionella geestiana
attgaacgctggcggcatgcctaacacatgcaagtcgaacggcagcacggtccagtttactggatgggtggcgagtggcgaacgggtgagtaacgcgtaggaatataccctgaagagggggataacctggggaaacccaggctaataccgcataatctctgaggagcaaagctggggaccttcgggcctggcgcttcaggaatagcctgcgtccgattagctagttggtggggtaagggcctaccaaggcgacgatcggtagctggtctgagaggatggtcagccacactgggactgagacacggcccagactcctacgggaggcagcagtggggaatattggacaatgggggcaaccctgatccagcaatgccgcgtgtgtgaagaaggcctgagggttgtaaagcactatcagtggggaggaggctttaatggttaagagctgttgaagtggacgttacccacagaagaagcaccggctaactccgtgccagcagccgcggtaatacggagggtgcgagcgttaatcggaattactgggcgtaaagggtgcgcaggtggttttgtaagttatctgtgaaagccccgggcttaacctgggaaagccagataaaactacgagactcgagtacgggagagggcagtggaatttccggtgtagcggtgaaatgcgtagagatcggaaggaacaccagtggcgaaggcggctgcctggcctgatactgacactgaggcacgaaagcgtggggagcaaacaggattagataccctggtagtccacgctgtaaacgatgtcaactggctgttggccttatgaatgaggttagtggcgtagctaacgcgataagttgaccgcctggggagtacggtcgcaagattaaaactcaaaggaattgacgggggcccgcacaagcggtggagcatgtggtttaattcgatgcaacgcgaagaaccttacctacccttgacatacagttaattgagcagagatgtttgagtgccttcgggcagactgatacaggtgctgcatggctgtcgtcagctcgtgtcgtgagatgttgggttaagtcccgtaacgagcgcaacccttgtcccttgttgccagcgattcggtcgggaactcgagggagactgccggtgacaaaccggaggaaggcggggacgacgtcaagtcatcatggcccttacgggtagggctacacacgtgctacaatggcaggtacagagggaagcgaagcggcgacgtggagcgaatcccaaaaagcctgtcgtagtccggattggagtctgcaactcgactccatgaagtcggaatcgctagtaatcgcgaatcagcatgtcgcggtgaatacgttcccgggccttgtacacaccgcccgtcacaccatgggagtgggctgcaccagaagtagatagtctaaccttcggggggacgtttaccacggtgtggttcatgactggggtg

(The sequence listing continues in the following parts.)
